United States Patent Application Publication US 2006/0003322 A1 - sequence listing, part 6

SEQ ID NO: 193618 - RNA, 21 nt, Human
aaaccacagugcucgcacagu

SEQ ID NO: 193619 - RNA, 21 nt, Human
aaacgauagcuccaacgagcu

SEQ ID NO: 193620 - RNA, 18 nt, Human
aaagggauauaaagugcu

SEQ ID NO: 193621 - RNA, 20 nt, Human
aaagguaaaaaaaaauguac

SEQ ID NO: 193622 - RNA, 23 nt, Human
aacccagccacaaaaauccacca

SEQ ID NO: 193623 - RNA, 19 nt, Human
aaccuccagguguaggaaa

SEQ ID NO: 193624 - RNA, 18 nt, Human
aacuucugcccccaaguc

SEQ ID NO: 193625 - RNA, 23 nt, Human
aagauuuagacauuauuaccauu

SEQ ID NO: 193626 - RNA, 24 nt, Human
aaggaaacaaacaaaacaaaacaa

SEQ ID NO: 193627 - RNA, 22 nt, Human
aaggagauaaaaggaaacaaac

SEQ ID NO: 193628 - RNA, 22 nt, Human
aaggaggccagaagagccugcc

SEQ ID NO: 193629 - RNA, 21 nt, Human
aaggggccgggcggcccuggg

SEQ ID NO: 193630 - RNA, 23 nt, Human
aaggucccucugucccccacccg

SEQ ID NO: 193631 - RNA, 21 nt, Human
aagucaacacagcugugcgga

SEQ ID NO: 193632 - RNA, 24 nt, Human
aagugcucgcuugcugacucccag

SEQ ID NO: 193633 - RNA, 19 nt, Human
aauaaaccgucacaaggcc

SEQ ID NO: 193634 - RNA, 20 nt, Human
acacaguaaugcucucagca

SEQ ID NO: 193635 - RNA, 21 nt, Human
acccaaguggguaaagagccc

SEQ ID NO: 193636 - RNA, 20 nt, Human
acggaggggaaaaacacacc

SEQ ID NO: 193637 - RNA, 24 nt, Human
acggugagggcugggucacagacg

SEQ ID NO: 193638 - RNA, 23 nt, Human
agaaaaacugaaacaccuugaca

SEQ ID NO: 193639 - RNA, 24 nt, Human
agaaaaaggcuaaagguccaagga

SEQ ID NO: 193640 - RNA, 23 nt, Human
agaaaacccagccacaaaaaucc

SEQ ID NO: 193641 - RNA, 19 nt, Human
agaaacucaagccagcucc

SEQ ID NO: 193642 - RNA, 21 nt, Human
agacagacagacaagagaaca

SEQ ID NO: 193643 - RNA, 22 nt, Human
agacagagacagacagacaaga

SEQ ID NO: 193644 - RNA, 22 nt, Human
agcaguccauguuaucccauca

SEQ ID NO: 193645 - RNA, 22 nt, Human
agccacaaaaauccaccagagc

SEQ ID NO: 193646 - RNA, 23 nt, Human
agccacaaaaauccaccagagca

SEQ ID NO: 193647 - RNA, 19 nt, Human
aggaagaaaaaggcuaaag

SEQ ID NO: 193648 - RNA, 24 nt, Human
aggcauuuuucuucuuccccaaag

SEQ ID NO: 193649 - RNA, 19 nt, Human
aggucccucugucccccac

SEQ ID NO: 193650 - RNA, 20 nt, Human
agugcccccaaggccuuugc

SEQ ID NO: 193651 - RNA, 24 nt, Human
auaaaaggaaacaaacaaaacaaa

SEQ ID NO: 193652 - RNA, 19 nt, Human
auauauuuauaucuauaua

SEQ ID NO: 193653 - RNA, 22 nt, Human
aucguaacacugcaagugugcc

SEQ ID NO: 193654 - RNA, 22 nt, Human
caaaacaaaacaaaauuccucc

SEQ ID NO: 193655 - RNA, 23 nt, Human
caaaacaaaacaaaauuccucca

SEQ ID NO: 193656 - RNA, 25 nt, Human
caaaacaaaacaaaauuccuccaaa

SEQ ID NO: 193657 - RNA, 22 nt, Human
caaaauuccuccaaaucaacuc

SEQ ID NO: 193658 - RNA, 23 nt, Human
caaacaaaacaaaacaaaacaaa

SEQ ID NO: 193659 - RNA, 20 nt, Human
caaaugucaugagaggggaa

SEQ ID NO: 193660 - RNA, 24 nt, Human
caagacagagacagacagacaaga

SEQ ID NO: 193661 - RNA, 19 nt, Human
caaucagaauaaaccguca

SEQ ID NO: 193662 - RNA, 31 nt, Human
caccagagcaauaaaaaaaaaggcacaaacc

SEQ ID NO: 193663 - RNA, 21 nt, Human
caccgcuaugguucacagagg

SEQ ID NO: 193664 - RNA, 20 nt, Human
caccuaaaaguaauuaaaaa

SEQ ID NO: 193665 - RNA, 25 nt, Human
cagaaccagagcccugggacgcugg

SEQ ID NO: 193666 - RNA, 19 nt, Human
cagagcccugggacgcugg

SEQ ID NO: 193667 - RNA, 19 nt, Human
cagcacugccaggcucggc

SEQ ID NO: 193668 - RNA, 18 nt, Human
cagcagcccagugaccaa

SEQ ID NO: 193669 - RNA, 22 nt, Human
cagccccuggccccggagauga

SEQ ID NO: 193670 - RNA, 20 nt, Human
cagccgggacgcggccacgg

SEQ ID NO: 193671 - RNA, 21 nt, Human
cagcgcuggcccccgccuccc

SEQ ID NO: 193672 - RNA, 21 nt, Human
cagcucggccgccuguugcca

SEQ ID NO: 193673 - RNA, 18 nt, Human
ccaaacucccaccaacac

SEQ ID NO: 193674 - RNA, 18 nt, Human
ccacaaaaauccaccaga

SEQ ID NO: 193675 - RNA, 18 nt, Human
ccacagugcucgcacagu

SEQ ID NO: 193676 - RNA, 18 nt, Human
ccacaugcuucacgaccg

SEQ ID NO: 193677 - RNA, 19 nt, Human
ccaggcucggcuggccaca

SEQ ID NO: 193678 - RNA, 20 nt, Human
cccaagaccguucugccugc

SEQ ID NO: 193679 - RNA, 23 nt, Human
cccaaggccuuugcaaaggaaga

SEQ ID NO: 193680 - RNA, 20 nt, Human
cccacccgggugcagacccc

SEQ ID NO: 193681 - RNA, 19 nt, Human
cccacggccgcgcgcgggg

SEQ ID NO: 193682 - RNA, 19 nt, Human
cccagccagugcccccaag

SEQ ID NO: 193683 - RNA, 22 nt, Human
cccccaagucugaacccaauau

SEQ ID NO: 193684 - RNA, 19 nt, Human
cccccagcucacauuccug

SEQ ID NO: 193685 - RNA, 20 nt, Human
cccccagcucacauuccugu

SEQ ID NO: 193686 - RNA, 18 nt, Human
ccccccgccgcacaccgc

SEQ ID NO: 193687 - RNA, 19 nt, Human
cccccgccucccacggccg

SEQ ID NO: 193688 - RNA, 21 nt, Human
cccccgccucccacggccgcg

SEQ ID NO: 193689 - RNA, 18 nt, Human
ccccgcgcccccgccccg

SEQ ID NO: 193690 - RNA, 23 nt, Human
cccgccgcacaccgcuaugguuc

SEQ ID NO: 193691 - RNA, 25 nt, Human
cccgccgcacaccgcuaugguucac

SEQ ID NO: 193692 - RNA, 26 nt, Human
cccgccgcacaccgcuaugguucaca

SEQ ID NO: 193693 - RNA, 18 nt, Human
cccgcgcccccgccccgg

SEQ ID NO: 193694 - RNA, 22 nt, Human
cccguggcuguugcacgcuggg

SEQ ID NO: 193695 - RNA, 18 nt, Human
cccuccagaaccagagcc

SEQ ID NO: 193696 - RNA, 24 nt, Human
cccuccucuccuucaagguuuugu

SEQ ID NO: 193697 - RNA, 18 nt, Human
cccugggacgcuggggag

SEQ ID NO: 193698 - RNA, 23 nt, Human
cccugggugcuccaagagagccc

SEQ ID NO: 193699 - RNA, 19 nt, Human
ccgaaaagaccuacggucc

SEQ ID NO: 193700 - RNA, 22 nt, Human
ccgcaucuccucagccugcgcc

SEQ ID NO: 193701 - RNA, 23 nt, Human
ccgccgggcugcagccccuggcc

SEQ ID NO: 193702 - RNA, 22 nt, Human
ccgcgccgcaucuccucagccu

SEQ ID NO: 193703 - RNA, 22 nt, Human
ccggcgcgcgggcucgggcucg

SEQ ID NO: 193704 - RNA, 20 nt, Human
ccgggacagccgccugcugg

SEQ ID NO: 193705 - RNA, 25 nt, Human
ccgggacggugagggcugggucaca

SEQ ID NO: 193706 - RNA, 21 nt, Human
ccgggggcccaggcugggagg

SEQ ID NO: 193707 - RNA, 18 nt, Human
ccuccgggacagccgccu

SEQ ID NO: 193708 - RNA, 20 nt, Human
ccugacgauguggucagaga

SEQ ID NO: 193709 - RNA, 18 nt, Human
cgagggcagggcagacgc

SEQ ID NO: 193710 - RNA, 24 nt, Human
cgccgcaucuccucagccugcgcc

SEQ ID NO: 193711 - RNA, 18 nt, Human
cgccgggccggggcugcg

SEQ ID NO: 193712 - RNA, 20 nt, Human
cgcgcggggcggguguggac

SEQ ID NO: 193713 - RNA, 22 nt, Human
cggcaaggucucaugagccagg

SEQ ID NO: 193714 - RNA, 23 nt, Human
cggccgccuguugccacaggcuc

SEQ ID NO: 193715 - RNA, 23 nt, Human
cggccgcgcgcggggcgggugug

SEQ ID NO: 193716 - RNA, 22 nt, Human
cggcggcggccggcucuagccc

SEQ ID NO: 193717 - RNA, 22 nt, Human
cgggcucgggcucgggcggcgg

SEQ ID NO: 193718 - RNA, 23 nt, Human
cggggcgcggggcgggcggcgga

SEQ ID NO: 193719 - RNA, 20 nt, Human
cguacaaaaauaaaaacaaa

SEQ ID NO: 193720 - RNA, 19 nt, Human
cgugccucccccugccagg

SEQ ID NO: 193721 - RNA, 18 nt, Human
cucaaaauuuccacggaa

SEQ ID NO: 193722 - RNA, 24 nt, Human
cucaagccagcucccccagcucac

SEQ ID NO: 193723 - RNA, 21 nt, Human
cucccccagcucacauuccuu

SEQ ID NO: 193724 - RNA, 19 nt, Human
cuccgcgccgcaucuccuc

SEQ ID NO: 193725 - RNA, 22 nt, Human
cuccgggacagccgccugcugg

SEQ ID NO: 193726 - RNA, 22 nt, Human
cuccgggacagccgccugcugg

SEQ ID NO: 193727 - RNA, 21 nt, Human
cuccuuucuuccacggcgucc

SEQ ID NO: 193728 - RNA, 19 nt, Human
cucgagagagacaggcagu

SEQ ID NO: 193729 - RNA, 20 nt, Human
cucguaauacuacuaguguu

SEQ ID NO: 193730 - RNA, 20 nt, Human
cuggacgcuugcuguggaga

SEQ ID NO: 193731 - RNA, 20 nt, Human
cugugccaugaauggggaau

SEQ ID NO: 193732 - RNA, 25 nt, Human
cuugcgggacccgccagagugugcu

SEQ ID NO: 193733 - RNA, 24 nt, Human
cuuuaaaaaaaaaauaagcuacaa

SEQ ID NO: 193734 - RNA, 22 nt, Human
cuuuccauaagcaccuugagag

SEQ ID NO: 193735 - RNA, 22 nt, Human
gaaacaaacaaaacaaaacaaa

SEQ ID NO: 193736 - RNA, 23 nt, Human
gacaaaguggcccuccagaacca

SEQ ID NO: 193737 - RNA, 20 nt, Human
gacaauggcccgcgggcgcc

SEQ ID NO: 193738 - RNA, 18 nt, Human
gaccuacggucccuccuc

SEQ ID NO: 193739 - RNA, 25 nt, Human
gacggugcuccgcggcggggcagcc

SEQ ID NO: 193740 - RNA, 20 nt, Human
gacugcuuaaagugaaaucu

SEQ ID NO: 193741 - RNA, 20 nt, Human
gacuucagaaaacccagcca

SEQ ID NO: 193742 - RNA, 20 nt, Human
gagccugcuagcugggcccu

SEQ ID NO: 193743 - RNA, 19 nt, Human
gcaaacuuccccgcccucc

SEQ ID NO: 193744 - RNA, 22 nt, Human
gcaauaaaaaaaaaggcacaaa

SEQ ID NO: 193745 - RNA, 24 nt, Human
gccagcucccccagcucacauucc

SEQ ID NO: 193746 - RNA, 19 nt, Human
gccgccgggggcccaggcu

SEQ ID NO: 193747 - RNA, 22 nt, Human
gccgcugccugccgugcccacc

SEQ ID NO: 193748 - RNA, 20 nt, Human
gccugggcggcagaaaggcu

SEQ ID NO: 193749 - RNA, 19 nt, Human
gcgccgggccggggcugcg

SEQ ID NO: 193750 - RNA, 19 nt, Human
gcgcgggcgggugcgcggg

SEQ ID NO: 193751 - RNA, 18 nt, Human
gcgcgucgccggcgucug

SEQ ID NO: 193752 - RNA, 21 nt, Human
gcggcgcggguggaaaggucc

SEQ ID NO: 193753 - RNA, 23 nt, Human
gcggcggacaauggcccgcgggc

SEQ ID NO: 193754 - RNA, 18 nt, Human
gcggcggccccacaaccu

SEQ ID NO: 193755 - RNA, 20 nt, Human
gcggcggcggcggcgcgggc

SEQ ID NO: 193756 - RNA, 19 nt, Human
gcggcggcggggacggugc

SEQ ID NO: 193757 - RNA, 21 nt, Human
gcuaugcagagaaugaggcca

SEQ ID NO: 193758 - RNA, 27 nt, Human
gcuggcccccgccucccacggccgcgc

SEQ ID NO: 193759 - RNA, 23 nt, Human
gcugggcccugccacugcucugu

SEQ ID NO: 193760 - RNA, 21 nt, Human
ggaaaaacacaccaccccucg

SEQ ID NO: 193761 - RNA, 18 nt, Human
ggaacagaaaggcauuuu

SEQ ID NO: 193762 - RNA, 18 nt, Human
ggagaagagccgagugug

SEQ ID NO: 193763 - RNA, 19 nt, Human
ggagcuugagaaaacauga

SEQ ID NO: 193764 - RNA, 30 nt, Human
ggaggcuguucgggcggcggcggcggcggg

SEQ ID NO: 193765 - RNA, 18 nt, Human
ggaguuguggguaauaaa

SEQ ID NO: 193766 - RNA, 19 nt, Human
ggcgggcggcggcggccgg

SEQ ID NO: 193767 - RNA, 21 nt, Human
ggcugcaguggaaaaacccaa

SEQ ID NO: 193768 - RNA, 18 nt, Human
ggcugcgcggggcgcggg

SEQ ID NO: 193769 - RNA, 21 nt, Human
gggcggcgcucgccuggcccg

SEQ ID NO: 193770 - RNA, 20 nt, Human
gggcggcggcggggacggug

SEQ ID NO: 193771 - RNA, 23 nt, Human
gggcggcggcggggacggugcuc

SEQ ID NO: 193772 - RNA, 18 nt, Human
gggcuggccacguggcug

SEQ ID NO: 193773 - RNA, 21 nt, Human
gggggcccaggcugggaggcu

SEQ ID NO: 193774 - RNA, 23 nt, Human
gggggcccaggcugggaggcugu

SEQ ID NO: 193775 - RNA, 18 nt, Human
gggugcagaccccccgcc

SEQ ID NO: 193776 - RNA, 19 nt, Human
ggucaggcaaucauacccu

SEQ ID NO: 193777 - RNA, 24 nt, Human
guaaacuuuaccaaacuccgaaac

SEQ ID NO: 193778 - RNA, 20 nt, Human
gugcuccaagagagccccac

SEQ ID NO: 193779 - RNA, 20 nt, Human
guggcugcaguggaaaaacc

SEQ ID NO: 193780 - RNA, 22 nt, Human
uaaaaaguacaauuucuuaaga

SEQ ID NO: 193781 - RNA, 28 nt, Human
uaaaaggaaacaaacaaaacaaaacaaa

SEQ ID NO: 193782 - RNA, 21 nt, Human
uaaaaugaaaguacaaacuug

SEQ ID NO: 193783 - RNA, 25 nt, Human
uaaaaugaaaguacaaacuuguagg

SEQ ID NO: 193784 - RNA, 20 nt, Human
uaaacagcaauaaagcaaaa

SEQ ID NO: 193785 - RNA, 19 nt, Human
uaaagaaaaacugaaacac

SEQ ID NO: 193786 - RNA, 22 nt, Human
uaaagagccccacgugugcccc

SEQ ID NO: 193787 - RNA, 19 nt, Human
uaaccuggccacugagcag

SEQ ID NO: 193788 - RNA, 24 nt, Human
uaaguucaauaagacgcaaacuuc

SEQ ID NO: 193789 - RNA, 21 nt, Human
uaccaaacuccgaaacucggc

SEQ ID NO: 193790 - RNA, 23 nt, Human
uauccugacgauguggucagaga

SEQ ID NO: 193791 - RNA, 21 nt, Human
ucaaugcccauaaaacacggu

SEQ ID NO: 193792 - RNA, 18 nt, Human
ucagaaaacccagccaca

SEQ ID NO: 193793 - RNA, 25 nt, Human
ucagcacauuugugaagcuggagug

SEQ ID NO: 193794 - RNA, 19 nt, Human
uccaagaaucugcacucau

SEQ ID NO: 193795 - RNA, 22 nt, Human
uccagguguaggaaacuuaaaa

SEQ ID NO: 193796 - RNA, 23 nt, Human
uccauaagcaccuugagagcaaa

SEQ ID NO: 193797 - RNA, 21 nt, Human
ucccacggccgcgcgcggggc

SEQ ID NO: 193798 - RNA, 19 nt, Human
ucccccagcucacauuccu

SEQ ID NO: 193799 - RNA, 20 nt, Human
ucccccagcucacauuccug

SEQ ID NO: 193800 - RNA, 20 nt, Human
ucccuggguuccuugcagcc

SEQ ID NO: 193801 - RNA, 21 nt, Human
uccucagacuucagaaaaccc

SEQ ID NO: 193802 - RNA, 19 nt, Human
ucgagaccugugggccugg

SEQ ID NO: 193803 - RNA, 19 nt, Human
ucgggcggcggcggcggcg

SEQ ID NO: 193804 - RNA, 24 nt, Human
ucuacaaaaagaagaauggaauga

SEQ ID NO: 193805 - RNA, 21 nt, Human
ucucagagcugaccaucagca

SEQ ID NO: 193806 - RNA, 24 nt, Human
ucuccucagccugcgccgccaccc

SEQ ID NO: 193807 - RNA, 18 nt, Human
ucugcuuaaaaaaaaaaa

SEQ ID NO: 193808 - RNA, 19 nt, Human
ucuguccaguuuuguuuuc

SEQ ID NO: 193809 - RNA, 18 nt, Human
ucugucccguguucccug

SEQ ID NO: 193810 - RNA, 24 nt, Human
ugaaagguaaaaaaaaauguacaa

SEQ ID NO: 193811 - RNA, 28 nt, Human
ugaacagaggcguccgcuggcuucugca

SEQ ID NO: 193812 - RNA, 20 nt, Human
ugaauggggaauggaccagc

SEQ ID NO: 193813 - RNA, 22 nt, Human
ugacagaugaaacgugccuccc

SEQ ID NO: 193814 - RNA, 24 nt, Human
ugacaugcucaaaaggucuuugga

SEQ ID NO: 193815 - RNA, 20 nt, Human
ugacucccagccagugcccc

SEQ ID NO: 193816 - RNA, 21 nt, Human
ugagcacguggcugugaccag

SEQ ID NO: 193817 - RNA, 22 nt, Human
ugagccagguaacccacaaguu

SEQ ID NO: 193818 - RNA, 21 nt, Human
ugcagagaaugaggccaagga

SEQ ID NO: 193819 - RNA, 26 nt, Human
ugcauucauuuuauauauauauauau

SEQ ID NO: 193820 - RNA, 23 nt, Human
ugccacggaggggaaaaacacac

SEQ ID NO: 193821 - RNA, 22 nt, Human
ugcgggacccgccagagugugc

SEQ ID NO: 193822 - RNA, 22 nt, Human
ugcucgcuugcugacucccagc

SEQ ID NO: 193823 - RNA, 23 nt, Human
ugcucucagcacauuugugaagc

SEQ ID NO: 193824 - RNA, 22 nt, Human
ugcugacaugcucaaaaggucu

SEQ ID NO: 193825 - RNA, 18 nt, Human
uggccgggcauccuaagc

SEQ ID NO: 193826 - RNA, 18 nt, Human
ugggaggcuguucgggcg

SEQ ID NO: 193827 - RNA, 21 nt, Human
ugggcccugccacugcucugu

SEQ ID NO: 193828 - RNA, 23 nt, Human
ugggcccugccacugcucugugc

SEQ ID NO: 193829 - RNA, 21 nt, Human
uggguaauaaacuuuaagcac

SEQ ID NO: 193830 - RNA, 22 nt, Human
ugguggggcgugggcacguggg

SEQ ID NO: 193831 - RNA, 19 nt, Human
uuaaaaaaaaaaagugaga

SEQ ID NO: 193832 - RNA, 18 nt, Human
uucacagaggcgggccac

SEQ ID NO: 193833 - RNA, 23 nt, Human
uucacgaccagauggagaugcuc

SEQ ID NO: 193834 - RNA, 22 nt, Human
uucauuuuauauauauauauau

SEQ ID NO: 193835 - RNA, 18 nt, Human
uugcacgcuggguguccc

SEQ ID NO: 193836 - RNA, 24 nt, Human
uuggugucacuccgaaaagaccua

SEQ ID NO: 193837 - RNA, 18 nt, Human
uuuacagaaaaauuucca

SEQ ID NO: 193838 - RNA, 19 nt, Human
uuuacagaaaaauuuccaa

SEQ ID NO: 193839 - RNA, 24 nt, Human
uuucuuggcugagcuucaagacag

SEQ ID NO: 193840 - RNA, 24 nt, Human
uuuuaaucaaguuuguuuuguauu

SEQ ID NO: 193841 - RNA, 23 nt, Human
aaaacaaaaggccccaggaggga

SEQ ID NO: 193842 - RNA, 22 nt, Human
aaaaggacagacagaaugcagg

SEQ ID NO: 193843 - RNA, 25 nt, Human
aaacaaacacacaagcacacuauga

SEQ ID NO: 193844 - RNA, 26 nt, Human
aaacaaacacacaagcacacuaugaa

SEQ ID NO: 193845 - RNA, 22 nt, Human
aaaccaguccucuccuucccca

SEQ ID NO: 193846 - RNA, 23 nt, Human
aaauccauauccagggagacaaa

SEQ ID NO: 193847 - RNA, 18 nt, Human
aacaaacacacaagcaca

SEQ ID NO: 193848 - RNA, 18 nt, Human
aaccaaggcaccgacuuc

SEQ ID NO: 193849 - RNA, 21 nt, Human
aagacaccaccacccccugca

SEQ ID NO: 193850 - RNA, 22 nt, Human
aagagucagcccccuaggagcc

SEQ ID NO: 193851 - RNA, 21 nt, Human
aagcuggcguugggggcuggg

SEQ ID NO: 193852 - RNA, 23 nt, Human
aaggagagaaaguauauguggua

SEQ ID NO: 193853 - RNA, 24 nt, Human
aaucagcugaaaccaaggcaccga

SEQ ID NO: 193854 - RNA, 22 nt, Human
acacacuuucacccucucagcc

SEQ ID NO: 193855 - RNA, 21 nt, Human
accagccacagggagagagug

SEQ ID NO: 193856 - RNA, 25 nt, Human
accauccccaggauccaaaacaaaa

SEQ ID NO: 193857 - RNA, 22 nt, Human
agacggacgggacgggagcccg

SEQ ID NO: 193858 - RNA, 27 nt, Human
agacugcaggccacagcuugggcacca

SEQ ID NO: 193859 - RNA, 21 nt, Human
agagagacagacgauaacaga

SEQ ID NO: 193860 - RNA, 18 nt, Human
agaggaaggaggaggaga

SEQ ID NO: 193861 - RNA, 20 nt, Human
agaggaaggaggaggagagg

SEQ ID NO: 193862 - RNA, 23 nt, Human
agaggaaggaggaggagaggggu

SEQ ID NO: 193863 - RNA, 18 nt, Human
agcaggaggggcaaggcu

SEQ ID NO: 193864 - RNA, 19 nt, Human
agccgacuccuggaucccu

SEQ ID NO: 193865 - RNA, 18 nt, Human
aggaagcuggcguugggg

SEQ ID NO: 193866 - RNA, 19 nt, Human
aggaaggaggaggagaggg

SEQ ID NO: 193867 - RNA, 18 nt, Human
aggaggaaaaggacagac

SEQ ID NO: 193868 - RNA, 22 nt, Human
aggaggaaaaggacagacagaa

SEQ ID NO: 193869 - RNA, 19 nt, Human
aggaggagaggggucugca

SEQ ID NO: 193870 - RNA, 21 nt, Human
aggcagucaggcacucagaac

SEQ ID NO: 193871 - RNA, 19 nt, Human
aggcugugaggagugugag

SEQ ID NO: 193872 - RNA, 19 nt, Human
agggaugggggccggggcg

SEQ ID NO: 193873 - RNA, 19 nt, Human
aggggccgggagccugggg

SEQ ID NO: 193874 - RNA, 18 nt, Human
agguauggaagcuccagc

SEQ ID NO: 193875 - RNA, 21 nt, Human
agguggaagccacagggcugg

SEQ ID NO: 193876 - RNA, 20 nt, Human
agguggggagcagaccuggu

SEQ ID NO: 193877 - RNA, 19 nt, Human
agugcugagaccaagagga

SEQ ID NO: 193878 - RNA, 21 nt, Human
auccaaaacaaaaggccccag

SEQ ID NO: 193879 - RNA, 20 nt, Human
auccugcucaggcccccaua

SEQ ID NO: 193880 - RNA, 22 nt, Human
auguaaacagauugguggggcc

SEQ ID NO: 193881 - RNA, 26 nt, Human
caaaucagcugaaaccaaggcaccga

SEQ ID NO: 193882 - RNA, 21 nt, Human
caccaccacccccugcagagg

SEQ ID NO: 193883 - RNA, 21 nt, Human
caccauccccaggauccaaaa

SEQ ID NO: 193884 - RNA, 19 nt, Human
cacugagccuggccccauc

SEQ ID NO: 193885 - RNA, 20 nt, Human
cagccccggggaaggggaag

SEQ ID NO: 193886 - RNA, 18 nt, Human
cagccccuggcagggcuc

SEQ ID NO: 193887 - RNA, 23 nt, Human
caggauccaaaacaaaaggcccc

SEQ ID NO: 193888 - RNA, 20 nt, Human
cagggcugggggccugaggc

SEQ ID NO: 193889 - RNA, 21 nt, Human
cagggugggugcccaccuccc

SEQ ID NO: 193890 - RNA, 23 nt, Human
cagggugggugcccaccuccccu

SEQ ID NO: 193891 - RNA, 27 nt, Human
ccaggaaaccaguccucuccuucccca

SEQ ID NO: 193892 - RNA, 22 nt, Human
cccacacacuuucacccucuca

SEQ ID NO: 193893 - RNA, 20 nt, Human
cccacagccccuggcagggc

SEQ ID NO: 193894 - RNA, 21 nt, Human
cccauccccaucccccaggag

SEQ ID NO: 193895 - RNA, 22 nt, Human
ccccacacacuuucacccucuc

SEQ ID NO: 193896 - RNA, 19 nt, Human
ccccagaacuggagaguac

SEQ ID NO: 193897 - RNA, 25 nt, Human
ccccaggauccaaaacaaaaggccc

SEQ ID NO: 193898 - RNA, 18 nt, Human
ccccauccccauccccca

SEQ ID NO: 193899 - RNA, 22 nt, Human
ccccuaggagccacuucccauc

SEQ ID NO: 193900 - RNA, 24 nt, Human
ccccucugcagggaccaccuucuc

SEQ ID NO: 193901 - RNA, 21 nt, Human
cccgcagcaugcuggauggcu

SEQ ID NO: 193902 - RNA, 19 nt, Human
cccuccuggucuuagcucc

SEQ ID NO: 193903 - RNA, 20 nt, Human
cccuucuagaaccuccauuc

SEQ ID NO: 193904 - RNA, 19 nt, Human
ccuccuggccccugagaac

SEQ ID NO: 193905 - RNA, 20 nt, Human
ccugccccuccccuggcucc

SEQ ID NO: 193906 - RNA, 22 nt, Human
ccuggccccugagaacccagga

SEQ ID NO: 193907 - RNA, 19 nt, Human
cggcagcaccuccucgacu

SEQ ID NO: 193908 - RNA, 23 nt, Human
cggcagcagcggcggcggcagcg

SEQ ID NO: 193909 - RNA, 23 nt, Human
cggcggcagcagcggcggcggca

SEQ ID NO: 193910 - RNA, 18 nt, Human
cggcuucgcgggcggcgg

SEQ ID NO: 193911 - RNA, 23 nt, Human
cgggacgggagcccggggccgcc

SEQ ID NO: 193912 - RNA, 23 nt, Human
cgggaggggguggagcugcggug

SEQ ID NO: 193913 - RNA, 23 nt, Human
cggguuacaaaauacuuaacuga

SEQ ID NO: 193914 - RNA, 22 nt, Human
cuaaaacaaacacacaagcaca

SEQ ID NO: 193915 - RNA, 20 nt, Human
cuagaaccuccauucucacc

SEQ ID NO: 193916 - RNA, 21 nt, Human
cuagaaccuccauucucacca

SEQ ID NO: 193917 - RNA, 19 nt, Human
cucacagacugcaggccac

SEQ ID NO: 193918 - RNA, 19 nt, Human
cucagaacggcauccccgc

SEQ ID NO: 193919 - RNA, 21 nt, Human
cuccaucuuugcggcggcucc

SEQ ID NO: 193920 - RNA, 26 nt, Human
cuccauucucaccauccccaggaucc

SEQ ID NO: 193921 - RNA, 20 nt, Human
cuccuggaucccuggguucu

SEQ ID NO: 193922 - RNA, 23 nt, Human
cuccuggccccugagaacccagg

SEQ ID NO: 193923 - RNA, 32 nt, Human
cugagaccaagaggaaggaggaggagagggga

SEQ ID NO: 193924 - RNA, 22 nt, Human
cugcaggccacagcuugggcac

SEQ ID NO: 193925 - RNA, 20 nt, Human
cugcagggaccaccuucucc

SEQ ID NO: 193926 - RNA, 22 nt, Human
cugcagggaccaccuucucccc

SEQ ID NO: 193927 - RNA, 20 nt, Human
cugguggucagcaaagggag

SEQ ID NO: 193928 - RNA, 19 nt, Human
cuucgcgggcggcggcggc

SEQ ID NO: 193929 - RNA, 26 nt, Human
cuucuagaaccuccauucucaccauc

SEQ ID NO: 193930 - RNA, 18 nt, Human
gaaagaaggggaaagggu

SEQ ID NO: 193931 - RNA, 22 nt, Human
gaaccagaccagccacagggag

SEQ ID NO: 193932 - RNA, 18 nt, Human
gaaggaggaggagagggg

SEQ ID NO: 193933 - RNA, 23 nt, Human
gacgggaggggguggagcugcgg

SEQ ID NO: 193934 - RNA, 24 nt, Human
gacuccugccccuccccuggcucc

SEQ ID NO: 193935 - RNA, 19 nt, Human
gacuucccguucccuccuc

SEQ ID NO: 193936 - RNA, 18 nt, Human
gagaacccaggaaaccag

SEQ ID NO: 193937 - RNA, 18 nt, Human
gaggacgaaagaagggga

SEQ ID NO: 193938 - RNA, 23 nt, Human
gaggaggagaggggucugcagag

SEQ ID NO: 193939 - RNA, 19 nt, Human
gaggaucuaaaacaaacac

SEQ ID NO: 193940 - RNA, 19 nt, Human
gauggugaggacgaaagaa

SEQ ID NO: 193941 - RNA, 21 nt, Human
gcagggugggugcccaccucc

SEQ ID NO: 193942 - RNA, 20 nt, Human
gccccuggcagggcuccugg

SEQ ID NO: 193943 - RNA, 18 nt, Human
gccugaggcagcguagag

SEQ ID NO: 193944 - RNA, 24 nt, Human
gccuggagccccucugcagggacc

SEQ ID NO: 193945 - RNA, 21 nt, Human
gccuggccccauccccauccc

SEQ ID NO: 193946 - RNA, 23 nt, Human
gcgaggcagucaggcacucagaa

SEQ ID NO: 193947 - RNA, 23 nt, Human
gcggcagcagcggcggcggcagc

SEQ ID NO: 193948 - RNA, 24 nt, Human
gcggcggcggcagcggcggcagca

SEQ ID NO: 193949 - RNA, 19 nt, Human
gcgggcggcggcggcagca

SEQ ID NO: 193950 - RNA, 24 nt, Human
gcuucgcgggcggcggcggcagca

SEQ ID NO: 193951 - RNA, 24 nt, Human
ggacgggagcccggggccgccgug

SEQ ID NO: 193952 - RNA, 22 nt, Human
ggaggagaggggucugcagaga

SEQ ID NO: 193953 - RNA, 19 nt, Human
ggaggccauccgaguaagg

SEQ ID NO: 193954 - RNA, 21 nt, Human
ggaggggguggagcugcggug

SEQ ID NO: 193955 - RNA, 21 nt, Human
ggauccaaaacaaaaggcccc

SEQ ID NO: 193956 - RNA, 26 nt, Human
ggcaagacagcccuccucacagacug

SEQ ID NO: 193957 - RNA, 21 nt, Human
ggcagcagcggcggcggcagc

SEQ ID NO: 193958 - RNA, 20 nt, Human
ggcauccccuggaagccuug

SEQ ID NO: 193959 - RNA, 21 nt, Human
ggcggcagcagcggcggcggc

SEQ ID NO: 193960 - RNA, 21 nt, Human
ggcggcagcggcggcagcacc

SEQ ID NO: 193961 - RNA, 23 nt, Human
ggcggcggcagcagcggcggcgg

SEQ ID NO: 193962 - RNA, 18 nt, Human
ggcggcuccuccggcucc

SEQ ID NO: 193963 - RNA, 23 nt, Human
gggaaagagaagggacagcgccc

SEQ ID NO: 193964 - RNA, 22 nt, Human
gggacgggagcccggggccgcc

SEQ ID NO: 193965 - RNA, 21 nt, Human
gguacuggggaggaggaggaa

SEQ ID NO: 193966 - RNA, 18 nt, Human
gguggucagcaaagggag

SEQ ID NO: 193967 - RNA, 18 nt, Human
guagaggagcaggagggg

SEQ ID NO: 193968 - RNA, 19 nt, Human
uaaaacaaacacacaagca

SEQ ID NO: 193969 - RNA, 26 nt, Human
uaggagccacuucccaucuuuggucg

SEQ ID NO: 193970 - RNA, 22 nt, Human
ucagcccccuaggagccacuuc

SEQ ID NO: 193971 - RNA, 22 nt, Human
uccauauccagggagacaaagc

SEQ ID NO: 193972 - RNA, 19 nt, Human
uccaucuuugcggcggcuc

SEQ ID NO: 193973 - RNA, 18 nt, Human
uccccaggauccaaaaca

SEQ ID NO: 193974 - RNA, 19 nt, Human
uccccaggauccaaaacaa

SEQ ID NO: 193975 - RNA, 24 nt, Human
uccccuggcucccucaauccugac

SEQ ID NO: 193976 - RNA, 24 nt, Human
ucccucaauccugcucaggccccc

SEQ ID NO: 193977 - RNA, 19 nt, Human
ucccuggguucuggccuua

SEQ ID NO: 193978 - RNA, 24 nt, Human
ucccuggguucuggccuuaccccu

SEQ ID NO: 193979 - RNA, 19 nt, Human
uccgaguaagguggggagc

SEQ ID NO: 193980 - RNA, 19 nt, Human
uccuggccccugagaaccc

SEQ ID NO: 193981 - RNA, 26 nt, Human
ucuagaaccuccauucucaccauccc

SEQ ID NO: 193982 - RNA, 19 nt, Human
ucuagagcugagguggaag

SEQ ID NO: 193983 - RNA, 20 nt, Human
ucuuugguuuccuacaggcu

SEQ ID NO: 193984 - RNA, 19 nt, Human
ugacagcaggggggcucuc

SEQ ID NO: 193985 - RNA, 19 nt, Human
ugagaacccaggaaaccag

SEQ ID NO: 193986 - RNA, 18 nt, Human
ugagguggaagccacagg

SEQ ID NO: 193987 - RNA, 21 nt, Human
ugccagcagaggggcagggag

SEQ ID NO: 193988 - RNA, 20 nt, Human
ugcccaggcugugccagcaa

SEQ ID NO: 193989 - RNA, 22 nt, Human
ugccccuccccuggcucccuca

SEQ ID NO: 193990 - RNA, 21 nt, Human
ugggaaagagaagggacagcg

SEQ ID NO: 193991 - RNA, 25 nt, Human
uggggaggaggaggaaggaagaguu

SEQ ID NO: 193992 - RNA, 22 nt, Human
ugggggcugggacgggaggggg

SEQ ID NO: 193993 - RNA, 20 nt, Human
uggguucuggccuuaccccu

SEQ ID NO: 193994 - RNA, 20 nt, Human
ugguggggcccuggagauag

SEQ ID NO: 193995 - RNA, 21 nt, Human
ugugugacuuuuuguuuuuaa

SEQ ID NO: 193996 - RNA, 18 nt, Human
agagggaccguauucugg

SEQ ID NO: 193997 - RNA, 21 nt, Human
agcguuucaaccagccccgcu

SEQ ID NO: 193998 - RNA, 23 nt, Human
auccaagguacaggcuggaauga

SEQ ID NO: 193999 - RNA, 19 nt, Human
cacuccgccagaucccgcc

SEQ ID NO: 194000 - RNA, 21 nt, Human
cagccccgcuccucaggggac

SEQ ID NO: 194001 - RNA, 26 nt, Human
ccaagguacaggcuggaaugagcuac

SEQ ID NO: 194002 - RNA, 20 nt, Human
ccacuccgccagaucccgcc

SEQ ID NO: 194003 - RNA, 18 nt, Human
ccacugagcugccccccu

SEQ ID NO: 194004 - RNA, 27 nt, Human
ccaugccugccaguuaacuccccuccc

SEQ ID NO: 194005 - RNA, 18 nt, Human
ccccccuuuccuucuggg

SEQ ID NO: 194006 - RNA, 18 nt, Human
cccuuuccuucugggcug

SEQ ID NO: 194007 - RNA, 21 nt, Human
cccuuuccuucugggcuggag

SEQ ID NO: 194008 - RNA, 18 nt, Human
ccgcuccucaggggacug

SEQ ID NO: 194009 - RNA, 23 nt, Human
ccucauccaagguacaggcugga

SEQ ID NO: 194010 - RNA, 26 nt, Human
ccucccgccaauguuauccucaugau

SEQ ID NO: 194011 - RNA, 18 nt, Human
cucuuggggccacugagc

SEQ ID NO: 194012 - RNA, 20 nt, Human
cuggaguaguggugccccuc

SEQ ID NO: 194013 - RNA, 26 nt, Human
uaacuccccucccgccaauguuaucc

SEQ ID NO: 194014 - RNA, 18 nt, Human
uaucgugggccucagaag

SEQ ID NO: 194015 - RNA, 19 nt, Human
uaucgugggccucagaagg

SEQ ID NO: 194016 - RNA, 25 nt, Human
ucagaaggugaagagggaccguauu

SEQ ID NO: 194017 - RNA, 23 nt, Human
ucagcucccucuuggggccacug

SEQ ID NO: 194018 - RNA, 22 nt, Human
ucuaucgugggccucagaaggu

SEQ ID NO: 194019 - RNA, 21 nt, Human
ucugggcuggaguaguggugc

SEQ ID NO: 194020 - RNA, 21 nt, Human
ugaggaggcuuggccccugcc

SEQ ID NO: 194021 - RNA, 20 nt, Human
ugccaguuaacuccccuccc

SEQ ID NO: 194022 - RNA, 20 nt, Human
uucugggcuggaguaguggu

SEQ ID NO: 194023 - RNA, 21 nt, Human
aaaagccuugaagacuuugcc

SEQ ID NO: 194024 - RNA, 19 nt, Human
aaacagagaaggcuccccg

SEQ ID NO: 194025 - RNA, 21 nt, Human
aaagacacacacacacgccuc

SEQ ID NO: 194026 - RNA, 25 nt, Human
aacaugcauacauacacaggguaug

SEQ ID NO: 194027 - RNA, 18 nt, Human
aagcaggcaggcuguucu

SEQ ID NO: 194028 - RNA, 24 nt, Human
acacacacgcucacacacacgccu

SEQ ID NO: 194029 - RNA, 21 nt, Human
acacgcucacacacacgccuc

SEQ ID NO: 194030 - RNA, 23 nt, Human
acucacacacacgcucacacaca

SEQ ID NO: 194031 - RNA, 23 nt, Human
acucacacacaugcucacacaca

SEQ ID NO: 194032 - RNA, 24 nt, Human
agcacccaucugcuccaccagggc

SEQ ID NO: 194033 - RNA, 18 nt, Human
agccggagccaguccucc

SEQ ID NO: 194034 - RNA, 23 nt, Human
agccggagccaguccuccucugu

SEQ ID NO: 194035 - RNA, 23 nt, Human
aggaagcacaggacucccagagc

SEQ ID NO: 194036 - RNA, 22 nt, Human
agggagcaggguaaacuggaaa

SEQ ID NO: 194037 - RNA, 25 nt, Human
aggucccaagggcauggugggcggg

SEQ ID NO: 194038 - RNA, 26 nt, Human
cacacacacgcucacacacacgccuc

SEQ ID NO: 194039 - RNA, 18 nt, Human
caccagggcaucgccagg

SEQ ID NO: 194040 - RNA, 22 nt, Human
cagaaacagagaaggcuccccg

SEQ ID NO: 194041 - RNA, 21 nt, Human
cagccuagggacagagagagg

SEQ ID NO: 194042 - RNA, 19 nt, Human
caggaagcacaggacuccc

SEQ ID NO: 194043 - RNA, 21 nt, Human
cauuggaucaggaagcacagg

SEQ ID NO: 194044 - RNA, 22 nt, Human
ccagagcagccuccccuccucc

SEQ ID NO: 194045 - RNA, 25 nt, Human
ccccaaaagccuugaagacuuugcc

SEQ ID NO: 194046 - RNA, 20 nt, Human
ccccagaaacagagaaggcu

SEQ ID NO: 194047 - RNA, 21 nt, Human
ccccagaaacagagaaggcuc

SEQ ID NO: 194048 - RNA, 24 nt, Human
ccccaggccuggacccccaaaagc

SEQ ID NO: 194049 - RNA, 22 nt, Human
ccccccuagccccuagagccua

SEQ ID NO: 194050 - RNA, 24 nt, Human
ccccucagccucccucaggcucac

SEQ ID NO: 194051 - RNA, 19 nt, Human
cccggugguagagggaagc

SEQ ID NO: 194052 - RNA, 20 nt, Human
cccugugggggucgccgccc

SEQ ID NO: 194053 - RNA, 19 nt, Human
ccucuuggcuccccacucc

SEQ ID NO: 194054 - RNA, 18 nt, Human
ccuggggcagccuaggga

SEQ ID NO: 194055 - RNA, 27 nt, Human
cgccucacucacacacacgcucacaca

SEQ ID NO: 194056 - RNA, 27 nt, Human
cgccucacucacacacaugcucacaca

SEQ ID NO: 194057 - RNA, 23 nt, Human
cggugguagagggaagcuuccag

SEQ ID NO: 194058 - RNA, 24 nt, Human
cucacucacacacacgcucacaca

SEQ ID NO: 194059 - RNA, 24 nt, Human
cucacucacacacaugcucacaca

SEQ ID NO: 194060 - RNA, 21 nt, Human
cucuaaagacccaggaauggg

SEQ ID NO: 194061 - RNA, 20 nt, Human
cugcacagggccuggggcag

SEQ ID NO: 194062 - RNA, 20 nt, Human
cugcacagggccuggggcag

SEQ ID NO: 194063 - RNA, 24 nt, Human
cugugugcaaagucugggguuugc

SEQ ID NO: 194064 - RNA, 20 nt, Human
cuugaccccaggccuggacc

SEQ ID NO: 194065 - RNA, 18 nt, Human
cuuggcuccccacucccc

SEQ ID NO: 194066 - RNA, 18 nt, Human
gcauggugggcgggcaga

SEQ ID NO: 194067 - RNA, 22 nt, Human
gccccagaaacagagaaggcuc

SEQ ID NO: 194068 - RNA, 19 nt, Human
gccuagggacagagagagg

SEQ ID NO: 194069 - RNA, 27 nt, Human
gccuggacccccaaaagccuugaagac

SEQ ID NO: 194070 - RNA, 21 nt, Human
gcucacacacauuuuccuucu

SEQ ID NO: 194071 - RNA, 23 nt, Human
ggcaguggccgaggggucccagg

SEQ ID NO: 194072 - RNA, 28 nt, Human
ggccuggacccccaaaagccuugaagac

SEQ ID NO: 194073 - RNA, 20 nt, Human
ggcugcggcugagggccugg

SEQ ID NO: 194074 - RNA, 20 nt, Human
ggcugcggcugagggccugg

SEQ ID NO: 194075 - RNA, 24 nt, Human
gggcaguggccgaggggucccagg

SEQ ID NO: 194076 - RNA, 26 nt, Human
gggcaucgccaggagguugauguagg

SEQ ID NO: 194077 - RNA, 21 nt, Human
gggcugcggcugagggccugg

SEQ ID NO: 194078 - RNA, 19 nt, Human
gggguuagaagagaaccag

SEQ ID NO: 194079 - RNA, 20 nt, Human
gguagagggaagcuuccaga

SEQ ID NO: 194080 - RNA, 18 nt, Human
guagagggaagcuuccag

SEQ ID NO: 194081 - RNA, 18 nt, Human
uacauacacaggguaugg

SEQ ID NO: 194082 - RNA, 19 nt, Human
uagaagagaaccagguccc

SEQ ID NO: 194083 - RNA, 18 nt, Human
uagagccuaggaagggcc

SEQ ID NO: 194084 - RNA, 21 nt, Human
uaggaagggccagccugucug

SEQ ID NO: 194085 - RNA, 19 nt, Human
uaucuucucucccaccccu

SEQ ID NO: 194086 - RNA, 28 nt, Human
uaucuucucucccaccccuucccccuca

SEQ ID NO: 194087 - RNA, 21 nt, Human
ucaggguccucuccaguuccc

SEQ ID NO: 194088 - RNA, 19 nt, Human
uccaguucccauucuagac

SEQ ID NO: 194089 - RNA, 24 nt, Human
ucccaccccuucccccucagucag

SEQ ID NO: 194090 - RNA, 22 nt, Human
ucccagggguaugcugcgcuuc

SEQ ID NO: 194091 - RNA, 19 nt, Human
uccccacuccccccuagcc

SEQ ID NO: 194092 - RNA, 21 nt, Human
uccccacuccccccuagcccc

SEQ ID NO: 194093 - RNA, 19 nt, Human
uccccgagugggcaguggc

SEQ ID NO: 194094 - RNA, 20 nt, Human
ucccucaggcucacuugaca

SEQ ID NO: 194095 - RNA, 24 nt, Human
ucccucaggcucacuugacaaugg

SEQ ID NO: 194096 - RNA, 18 nt, Human
uccuucuugaccccaggc

SEQ ID NO: 194097 - RNA, 24 nt, Human
ucuaaagacccaggaaugggggcu

SEQ ID NO: 194098 - RNA, 25 nt, Human
ucucuaaagacccaggaaugggggc

SEQ ID NO: 194099 - RNA, 19 nt, Human
ucugaggaagcaggugaga

SEQ ID NO: 194100 - RNA, 22 nt, Human
ucuguaucuucucucccacccc

SEQ ID NO: 194101 - RNA, 21 nt, Human
ugaccccaggccuggaccccc

SEQ ID NO: 194102 - RNA, 20 nt, Human
ugagagggacuaccccugca

SEQ ID NO: 194103 - RNA, 24 nt, Human
ugagcccgacggagccggagccag

SEQ ID NO: 194104 - RNA, 18 nt, Human
ugauccccccucagccuc

SEQ ID NO: 194105 - RNA, 21 nt, Human
ugcauacauacacaggguaug

SEQ ID NO: 194106 - RNA, 22 nt, Human
ugcccacaggaucucuaaagac

SEQ ID NO: 194107 - RNA, 20 nt, Human
ugcucacacacauuuuccuu

SEQ ID NO: 194108 - RNA, 18 nt, Human
uggcaaaacacucucaug

SEQ ID NO: 194109 - RNA, 20 nt, Human
uggcaaaacacucucauggg

SEQ ID NO: 194110 - RNA, 25 nt, Human
uggcuccccacuccccccuagcccc

SEQ ID NO: 194111 - RNA, 20 nt, Human
ugggauaacugucaaagcag

SEQ ID NO: 194112 - RNA, 21 nt, Human
ugguagagggaagcuuccaga

SEQ ID NO: 194113 - RNA, 23 nt, Human
ugguuccaacuacuugcccacug

SEQ ID NO: 194114 - RNA, 25 nt, Human
uguaucuucucucccaccccuuccc

SEQ ID NO: 194115 - RNA, 20 nt, Human
ugucaaagcaggcaggcugu

SEQ ID NO: 194116 - RNA, 23 nt, Human
ugucaaagcaggcaggcuguucu

SEQ ID NO: 194117 - RNA, 20 nt, Human
ugucuguaucuucucuccca

SEQ ID NO: 194118 - RNA, 19 nt, Human
uuccuauguggggugggaa

SEQ ID NO: 194119 - RNA, 18 nt, Human
uugaagacuuugccagag

SEQ ID NO: 194120 - RNA, 20 nt, Human
uuuuuuuuuuuaaagcaaau

SEQ ID NO: 194121 - RNA, 19 nt, Human
uuuuuuuuuuuuuuuuuaa

SEQ ID NO: 194122 - RNA, 22 nt, Human
aaaauacuccccuccccaauuc

SEQ ID NO: 194123 - RNA, 24 nt, Human
aaacaacaccagcggacuucuccc

SEQ ID NO: 194124 - RNA, 19 nt, Human
aaaccguuccgcagccacc

SEQ ID NO: 194125 - RNA, 25 nt, Human
aacaacaccagcggacuucucccca

SEQ ID NO: 194126 - RNA, 25 nt, Human
aacccugccucucagcugccuccug

SEQ ID NO: 194127 - RNA, 22 nt, Human
acccucucucccagggcuccac

SEQ ID NO: 194128 - RNA, 19 nt, Human
aucaguacccucucuccca

SEQ ID NO: 194129 - RNA, 24 nt, Human
aucuccuucuuccccuagguccag

SEQ ID NO: 194130 - RNA, 22 nt, Human
auuucauuuguguguguguguu

SEQ ID NO: 194131 - RNA, 23 nt, Human
cagcggacuucuccccaccuccc

SEQ ID NO: 194132 - RNA, 28 nt, Human
cagcggacuucuccccaccucccagucu

SEQ ID NO: 194133 - RNA, 23 nt, Human
ccaccuggaugguccugaggccc

SEQ ID NO: 194134 - RNA, 18 nt, Human
ccagcggacuucucccca

SEQ ID NO: 194135 - RNA, 24 nt, Human
ccagcggacuucuccccaccuccc

SEQ ID NO: 194136 - RNA, 24 nt, Human
ccccaauucgcuuaaaaauaauuu

SEQ ID NO: 194137 - RNA, 22 nt, Human
cccuagguccaguugaggacuc

SEQ ID NO: 194138 - RNA, 19 nt, Human
cccugccucucagcugccu

SEQ ID NO: 194139 - RNA, 27 nt, Human
ccuccugcccuacaaaccggguccuuc

SEQ ID NO: 194140 - RNA, 21 nt, Human
cugccacuugaugccccuugg

SEQ ID NO: 194141 - RNA, 22 nt, Human
gccucucagcugccuccugccc

SEQ ID NO: 194142 - RNA, 22 nt, Human
gccucuucaccccaggaagcca

SEQ ID NO: 194143 - RNA, 20 nt, Human
guccaguugaggacucuggg

SEQ ID NO: 194144 - RNA, 19 nt, Human
uaaaaccguuccgcagcca

SEQ ID NO: 194145 - RNA, 24 nt, Human
uaagaugauuaaaauacuccccuc

SEQ ID NO: 194146 - RNA, 21 nt, Human
uaggcaccacuccucagcucu

SEQ ID NO: 194147 - RNA, 18 nt, Human
ucccagggcuccaccugg

SEQ ID NO: 194148 - RNA, 22 nt, Human
ugaggcccaaacccugccucuc

SEQ ID NO: 194149 - RNA, 19 nt, Human
ugcccuacaaacuggugac

SEQ ID NO: 194150 - RNA, 19 nt, Human
uggggugccugccucuuca

SEQ ID NO: 194151 - RNA, 30 nt, Human
uucaaagauuuuauuaaaaaaaccaaagaa

SEQ ID NO: 194152 - RNA, 23 nt, Human
uuuuuuuuuuuuuuuuuuuuagg

SEQ ID NO: 194153 - RNA, 19 nt, Human
aaguauauccucagacucu

SEQ ID NO: 194154 - RNA, 21 nt, Human
aggcguggagcagcccggcuu

SEQ ID NO: 194155 - RNA, 19 nt, Human
caagcugaaccacagaagc

SEQ ID NO: 194156 - RNA, 21 nt, Human
caagcugaaccacagaagcug

SEQ ID NO: 194157 - RNA, 20 nt, Human
cacagaagcugccugucuac

SEQ ID NO: 194158 - RNA, 23 nt, Human
ccccaagaaaaaugcauguacac

SEQ ID NO: 194159 - RNA, 20 nt, Human
cucacagauggacacgcagg

SEQ ID NO: 194160 - RNA, 22 nt, Human
gcugaaccacagaagcugccug

SEQ ID NO: 194161 - RNA, 24 nt, Human
ggcguggagcagcccggcuucccu

SEQ ID NO: 194162 - RNA, 22 nt, Human
gucuacccucggcccuuucuca

SEQ ID NO: 194163 - RNA, 19 nt, Human
uaucaugucacaagcugaa

SEQ ID NO: 194164 - RNA, 23 nt, Human
ucaugucacaagcugaaccacag

SEQ ID NO: 194165 - RNA, 18 nt, Human
ucccucuugccaguccug

SEQ ID NO: 194166 - RNA, 26 nt, Human
ugcauguacacauaagcacacagugu

SEQ ID NO: 194167 - RNA, 21 nt, Human
ugugggucaugagccccuaug

SEQ ID NO: 194168 - RNA, 18 nt, Human
uucacagagucccugaag

SEQ ID NO: 194169 - RNA, 22 nt, Human
uucuguguuauauaucauguca

SEQ ID NO: 194170 - RNA, 20 nt, Human
uuguauccuauuguggguca

SEQ ID NO: 194171 - RNA, 22 nt, Human
acagaugcucaacacucccacc

SEQ ID NO: 194172 - RNA, 18 nt, Human
acagcagcaggaacaggg

SEQ ID NO: 194173 - RNA, 27 nt, Human
agaaaugggggcaacgauggggaagga

SEQ ID NO: 194174 - RNA, 23 nt, Human
agagagaccaguaggaagagggu

SEQ ID NO: 194175 - RNA, 23 nt, Human
agaggagagcagguugggguggg

SEQ ID NO: 194176 - RNA, 21 nt, Human
agaggugagagccagguggcc

SEQ ID NO: 194177 - RNA, 22 nt, Human
agcagcaggaacaggguggggg

SEQ ID NO: 194178 - RNA, 18 nt, Human
agcaggaacagggugggg

SEQ ID NO: 194179 - RNA, 22 nt, Human
aggaaaaaggacagcuaggagu

SEQ ID NO: 194180 - RNA, 20 nt, Human
aggccucuuccuccaccccc

SEQ ID NO: 194181 - RNA, 19 nt, Human
agggagaggggccagggua

SEQ ID NO: 194182 - RNA, 22 nt, Human
agggagaggggccaggguaaaa

SEQ ID NO: 194183 - RNA, 22 nt, Human
agguccuuggcccgaacaacuu

SEQ ID NO: 194184 - RNA, 18 nt, Human
agguuggggugggaaagg

SEQ ID NO: 194185 - RNA, 20 nt, Human
aguagaagaggagagcaggu

SEQ ID NO: 194186 - RNA, 18 nt, Human
aguagcacccagacagca

SEQ ID NO: 194187 - RNA, 24 nt, Human
auggaaaggagccccuccccuaca

SEQ ID NO: 194188 - RNA, 24 nt, Human
auggggaaggagcagaauggagag

SEQ ID NO: 194189 - RNA, 18 nt, Human
auuccuaccccugauccc

SEQ ID NO: 194190 - RNA, 20 nt, Human
auugcucccuccucugcgcg

SEQ ID NO: 194191 - RNA, 26 nt, Human
caaaaagaaagucaucaagccccaaa

SEQ ID NO: 194192 - RNA, 24 nt, Human
caaagccccagcuacaaaaagaaa

SEQ ID NO: 194193 - RNA, 18 nt, Human
caacacugagggggccag

SEQ ID NO: 194194 - RNA, 20 nt, Human
caagggagaggggccagggu

SEQ ID NO: 194195 - RNA, 21 nt, Human
cacccagacagcagcaggaac

SEQ ID NO: 194196 - RNA, 19 nt, Human
caccccgcauuugaggauu

SEQ ID NO: 194197 - RNA, 18 nt, Human
cagaauggagagcacaca

SEQ ID NO: 194198 - RNA, 22 nt, Human
cagagcccaagggagaggggcc

SEQ ID NO: 194199 - RNA, 18 nt, Human
cagcagcaggaacagggg

SEQ ID NO: 194200 - RNA, 20 nt, Human
cagcagcaggaacagggugg

SEQ ID NO: 194201 - RNA, 23 nt, Human
cagcaggaacagggugggggcuc

SEQ ID NO: 194202 - RNA, 23 nt, Human
cagcuaggagucuucccaagcau

SEQ ID NO: 194203 - RNA, 19 nt, Human
caggccccagcagaagccu

SEQ ID NO: 194204 - RNA, 19 nt, Human
cagguccuuggcccgaaca

SEQ ID NO: 194205 - RNA, 18 nt, Human
cauagagagaccaguagg

SEQ ID NO: 194206 - RNA, 18 nt, Human
ccaagcggaaggaacaca

SEQ ID NO: 194207 - RNA, 21 nt, Human
ccacccaaauggguaaaguca

SEQ ID NO: 194208 - RNA, 23 nt, Human
ccaccccccgcccgguccccacu

SEQ ID NO: 194209 - RNA, 18 nt, Human
ccagacagcagcaggaac

SEQ ID NO: 194210 - RNA, 19 nt, Human
ccagacagcagcaggaaca

SEQ ID NO: 194211 - RNA, 23 nt, Human
cccacccaaauggguaaagucaa

SEQ ID NO: 194212 - RNA, 22 nt, Human
ccccgcccgguccccacuccuc

SEQ ID NO: 194213 - RNA, 25 nt, Human
ccccgcccgguccccacuccuccuc

SEQ ID NO: 194214 - RNA, 25 nt, Human
cccucccaggccccacaagcccacc

SEQ ID NO: 194215 - RNA, 22 nt, Human
ccgcacggacggggcgggcgcg

SEQ ID NO: 194216 - RNA, 19 nt, Human
ccgcccgguccccacuccu

SEQ ID NO: 194217 - RNA, 18 nt, Human
ccgcuccgcuccggcccc

SEQ ID NO: 194218 - RNA, 21 nt, Human
ccggcccucgcgcggcccccg

SEQ ID NO: 194219 - RNA, 18 nt, Human
ccuaccccugaucccaac

SEQ ID NO: 194220 - RNA, 19 nt, Human
ccucccaggccccacaagc

SEQ ID NO: 194221 - RNA, 24 nt, Human
ccuccugugcugcccccaccccgc

SEQ ID NO: 194222 - RNA, 22 nt, Human
ccuuccauuccuaccccugauc

SEQ ID NO: 194223 - RNA, 21 nt, Human
cgccucgaugguggcccccgg

SEQ ID NO: 194224 - RNA, 22 nt, Human
cgcuccggcccucgcgcggccc

SEQ ID NO: 194225 - RNA, 21 nt, Human
cggaucggggcaaggcuccgg

SEQ ID NO: 194226 - RNA, 20 nt, Human
cggcccucgcgcggcccccg

SEQ ID NO: 194227 - RNA, 21 nt, Human
cgugcggcgguggcggcgccg

SEQ ID NO: 194228 - RNA, 19 nt, Human
cuaggagucuucccaagca

SEQ ID NO: 194229 - RNA, 23 nt, Human
cuaggagucuucccaagcauccu

SEQ ID NO: 194230 - RNA, 19 nt, Human
cucauuccagggagaagac

SEQ ID NO: 194231 - RNA, 23 nt, Human
cucccaggccccacaagcccacc

SEQ ID NO: 194232 - RNA, 19 nt, Human
cucccuccucugcgcgagg

SEQ ID NO: 194233 - RNA, 23 nt, Human
cucucuguccucucaguggguua

SEQ ID NO: 194234 - RNA, 22 nt, Human
cucugcgcgaggccucuuccuc

SEQ ID NO: 194235 - RNA, 23 nt, Human
cuggaaggaacaucaaagcccca

SEQ ID NO: 194236 - RNA, 21 nt, Human
cugugcugcccccaccccgca

SEQ ID NO: 194237 - RNA, 21 nt, Human
cuucccaagcauccuauuugu

SEQ ID NO: 194238 - RNA, 21 nt, Human
gaacaacuuggaagccccaaa

SEQ ID NO: 194239 - RNA, 25 nt, Human
gaaggaacacaguggccucaacuca

SEQ ID NO: 194240 - RNA, 25 nt, Human
gacacuggaaggaacaucaaagccc

SEQ ID NO: 194241 - RNA, 21 nt, Human
gacagcagcaggaacagggug

SEQ ID NO: 194242 - RNA, 25 nt, Human
gacagcagcaggaacagggugacga

SEQ ID NO: 194243 - RNA, 21 nt, Human
gagagugggagaaggguguca

SEQ ID NO: 194244 - RNA, 19 nt, Human
gagcacacaaaggguuagg

SEQ ID NO: 194245 - RNA, 18 nt, Human
gaggugagagccaggugg

SEQ ID NO: 194246 - RNA, 20 nt, Human
gcauagagagaccaguagga

SEQ ID NO: 194247 - RNA, 22 nt, Human
gccccgggcuccgcgccgggcc

SEQ ID NO: 194248 - RNA, 22 nt, Human
gcgcgagcccaaguuugcgcgu

SEQ ID NO: 194249 - RNA, 18 nt, Human
gcggcgguggcggcgccg

SEQ ID NO: 194250 - RNA, 18 nt, Human
ggaagagggugggagagg

SEQ ID NO: 194251 - RNA, 18 nt, Human
ggacagaugcucaacacu

SEQ ID NO: 194252 - RNA, 21 nt, Human
ggacagaugcucaacacuccc

SEQ ID NO: 194253 - RNA, 22 nt, Human
ggagucuucccaagcauccuau

SEQ ID NO: 194254 - RNA, 18 nt, Human
ggcccccggcccgagcuc

SEQ ID NO: 194255 - RNA, 19 nt, Human
ggcgcggugggugcgcgcu

SEQ ID NO: 194256 - RNA, 22 nt, Human
gggacagaugcucaacacuccc

SEQ ID NO: 194257 - RNA, 20 nt, Human
gggacaggagcucagaagga

SEQ ID NO: 194258 - RNA, 21 nt, Human
gggcaaggcuccggcgcggug

SEQ ID NO: 194259 - RNA, 19 nt, Human
gggcgccccgggcuccgcg

SEQ ID NO: 194260 - RNA, 23 nt, Human
ggucggcaaaaggaaaaaugggu

SEQ ID NO: 194261 - RNA, 23 nt, Human
gucuuuuccuuuaugucugggug

SEQ ID NO: 194262 - RNA, 19 nt, Human
guuugaaauucaauugcuc

SEQ ID NO: 194263 - RNA, 23 nt, Human
uaaagucaacccuucaggucucc

SEQ ID NO: 194264 - RNA, 21 nt, Human
uaacuacaacucccaaaacuc

SEQ ID NO: 194265 - RNA, 21 nt, Human
uacaaaaagaaagucaucaag

SEQ ID NO: 194266 - RNA, 26 nt, Human
uaccccugaucccaacccagaggucc

SEQ ID NO: 194267 - RNA, 21 nt, Human
uagaggugagagccagguggc

SEQ ID NO: 194268 - RNA, 22 nt, Human
uaggaagagggugggagagggc

SEQ ID NO: 194269 - RNA, 19 nt, Human
ucaaucaucaaggauuuau

SEQ ID NO: 194270 - RNA, 19 nt, Human
ucagagaucuaaaggggga

SEQ ID NO: 194271 - RNA, 21 nt, Human
uccaagcggaaggaacacagu

SEQ ID NO: 194272 - RNA, 23 nt, Human
ucccaggccccacaagcccaccc

SEQ ID NO: 194273 - RNA, 21 nt, Human
ucccaggccccagcagaagcc

SEQ ID NO: 194274 - RNA, 19 nt, Human
uccgggcgccccgggcucc

SEQ ID NO: 194275 - RNA, 21 nt, Human
ucggggcaaggcuccggcgcg

SEQ ID NO: 194276 - RNA, 19 nt, Human
ugacaacacugagggggcc

SEQ ID NO: 194277 - RNA, 24 nt, Human
ugacuauaagcuggccuugagcaa

SEQ ID NO: 194278 - RNA, 18 nt, Human
ugagaaaugacacuggaa

SEQ ID NO: 194279 - RNA, 21 nt, Human
ugccccucccaggccccacaa

SEQ ID NO: 194280 - RNA, 19 nt, Human
ugcuccauccuuccauucc

SEQ ID NO: 194281 - RNA, 21 nt, Human
uggaaaauagcuccaagcgga

SEQ ID NO: 194282 - RNA, 19 nt, Human
uggagaggaaaaaggacag

SEQ ID NO: 194283 - RNA, 21 nt, Human
uggcccgaacaacuuggaagc

SEQ ID NO: 194284 - RNA, 21 nt, Human
uggguaaagucaacccuucag

SEQ ID NO: 194285 - RNA, 20 nt, Human
ugguggcccccggcccgagc

SEQ ID NO: 194286 - RNA, 19 nt, Human
ugucaggaggugggagcag

SEQ ID NO: 194287 - RNA, 21 nt, Human
ugucaggaggugggagcaguu

SEQ ID NO: 194288 - RNA, 21 nt, Human
uguguggagaggaaaaaggac

SEQ ID NO: 194289 - RNA, 23 nt, Human
uguguggagaggaaaaaggacag

SEQ ID NO: 194290 - RNA, 19 nt, Human
uguugucaaucaucaagga

SEQ ID NO: 194291 - RNA, 22 nt, Human
uuccuaccccugaucccaaccc

SEQ ID NO: 194292 - RNA, 25 nt, Human
uuggcccgaacaacuuggaagcccc

SEQ ID NO: 194293 - RNA, 21 nt, Human
aagagcgucaacaauuuacgg

SEQ ID NO: 194294 - RNA, 25 nt, Human
acaccuacacacaauccgggaaaac

SEQ ID NO: 194295 - RNA, 22 nt, Human
accauugugugguuggguuugg

SEQ ID NO: 194296 - RNA, 26 nt, Human
caaaacggucaguagccagaaggucc

SEQ ID NO: 194297 - RNA, 22 nt, Human
cacacacagccaggcgcuaggc

SEQ ID NO: 194298 - RNA, 22 nt, Human
cacagccaggcgcuaggcuccc

SEQ ID NO: 194299 - RNA, 26 nt, Human
caggagcuggagucuguuaucuuagc

SEQ ID NO: 194300 - RNA, 24 nt, Human
caguagccagaagguccguccuga

SEQ ID NO: 194301 - RNA, 23 nt, Human
ccucugucagccugccagcuuuu

SEQ ID NO: 194302 - RNA, 21 nt, Human
cggguggaccaggagcuggag

SEQ ID NO: 194303 - RNA, 25 nt, Human
cucacaccuacacacaauccgggaa

SEQ ID NO: 194304 - RNA, 20 nt, Human
ggacguuuauuuccugaggu

SEQ ID NO: 194305 - RNA, 24 nt, Human
uacacacaauccgggaaaaccaca

SEQ ID NO: 194306 - RNA, 22 nt, Human
uagcacgaaugcucaugaccuu

SEQ ID NO: 194307 - RNA, 23 nt, Human
ucaaggacguuuauuuccugagg

SEQ ID NO: 194308 - RNA, 23 nt, Human
ucaaggacguuuauuuccugagg

SEQ ID NO: 194309 - RNA, 18 nt, Human
ucagauugagacaaacca

SEQ ID NO: 194310 - RNA, 25 nt, Human
ucucacaccuacacacaauccggga

SEQ ID NO: 194311 - RNA, 21 nt, Human
ucugucagccugccagcuuuu

SEQ ID NO: 194312 - RNA, 21 nt, Human
ugagacaaaccauuguguggu

SEQ ID NO: 194313 - RNA, 22 nt, Human
ugagcgggcacggccaggccug

SEQ ID NO: 194314 - RNA, 23 nt, Human
ugagcgggcacggccaggccugg

SEQ ID NO: 194315 - RNA, 23 nt, Human
uggaccaggagcuggagucuguu

SEQ ID NO: 194316 - RNA, 19 nt, Human
uggagcagguccugagcgg

SEQ ID NO: 194317 - RNA, 23 nt, Human
uggagcagguccugagcgggcac

SEQ ID NO: 194318 - RNA, 18 nt, Human
uuaguguuaaacagugga

SEQ ID NO: 194319 - RNA, 22 nt, Human
aaggaugcugcauaucuuggcu

SEQ ID NO: 194320 - RNA, 23 nt, Human
agaaaagagacuuaguauaugga

SEQ ID NO: 194321 - RNA, 21 nt, Human
agccgagacgcucccgacgca

SEQ ID NO: 194322 - RNA, 23 nt, Human
aggcggcgaggcgagaggcgggg

SEQ ID NO: 194323 - RNA, 19 nt, Human
aggcggcgggacggcgagg

SEQ ID NO: 194324 - RNA, 19 nt, Human
aggcggcgggacggcgagg

SEQ ID NO: 194325 - RNA, 23 nt, Human
caccggcggcagggcggcagggc

SEQ ID NO: 194326 - RNA, 21 nt, Human
ccccuuaauaacaaaauacaa

SEQ ID NO: 194327 - RNA, 19 nt, Human
cggcagggcggcagggcgg

SEQ ID NO: 194328 - RNA, 19 nt, Human
cggcagggcggcagggcgg

SEQ ID NO: 194329 - RNA, 19 nt, Human
cggcagggcggcagggcgg

SEQ ID NO: 194330 - RNA, 19 nt, Human
cggcagggcggcagggcgg

SEQ ID NO: 194331 - RNA, 19 nt, Human
cggcagggcggcagggcgg

SEQ ID NO: 194332 - RNA, 19 nt, Human
cggcagggcggcagggugg

SEQ ID NO: 194333 - RNA, 20 nt, Human
cgggaggacgugagguggcg

SEQ ID NO: 194334 - RNA, 22 nt, Human
cuugggaagcacuguccccucc

SEQ ID NO: 194335 - RNA, 21 nt, Human
ggacuugcagcuggaacuugg

SEQ ID NO: 194336 - RNA, 21 nt, Human
gggcggcagggcggcagggcg

SEQ ID NO: 194337 - RNA, 20 nt, Human
uaacaaaauacaaauccaau

SEQ ID NO: 194338 - RNA, 23 nt, Human
uaaguucuugguucaguggguca

SEQ ID NO: 194339 - RNA, 23 nt, Human
ucagcuguuuaagucaaugccuu

SEQ ID NO: 194340 - RNA, 23 nt, Human
ugagaaggaugcugcauaucuug

SEQ ID NO: 194341 - RNA, 18 nt, Human
ugcagcuggaacuuggga

SEQ ID NO: 194342 - RNA, 23 nt, Human
ugccuggagaaaagcugccagga

SEQ ID NO: 194343 - RNA, 24 nt, Human
uggcagggcggcaaggcggcggga

SEQ ID NO: 194344 - RNA, 26 nt, Human
aaaaauuaacugaaaaucuaaacuua

SEQ ID NO: 194345 - RNA, 20 nt, Human
agaaauagacucuaaaauca

SEQ ID NO: 194346 - RNA, 20 nt, Human
agccuguauccaagaauacu

SEQ ID NO: 194347 - RNA, 23 nt, Human
agggaaaaagacauuuacuaaac

SEQ ID NO: 194348 - RNA, 20 nt, Human
auaacugaaguaccuaaagc

SEQ ID NO: 194349 - RNA, 21 nt, Human
aucccaaucucuccccaugaa

SEQ ID NO: 194350 - RNA, 19 nt, Human
caaccgcugccggcccagc

SEQ ID NO: 194351 - RNA, 24 nt, Human
caugaaaagccuacuucauaacug

SEQ ID NO: 194352 - RNA, 28 nt, Human
cauuacuagaagaaaggagggaaaaaga

SEQ ID NO: 194353 - RNA, 22 nt, Human
ccaauacagggaaaucacuaga

SEQ ID NO: 194354 - RNA, 19 nt, Human
ccaugaaaagccuacuuca

SEQ ID NO: 194355 - RNA, 19 nt, Human
ccggguccccuccucucag

SEQ ID NO: 194356 - RNA, 19 nt, Human
ccuggacacucacccggga

SEQ ID NO: 194357 - RNA, 19 nt, Human
cuagaagaaaggagggaaa

SEQ ID NO: 194358 - RNA, 18 nt, Human
cucuccccaugaaaagcc

SEQ ID NO: 194359 - RNA, 21 nt, Human
cuggacacucacccgggaacc

SEQ ID NO: 194360 - RNA, 21 nt, Human
gcaaugccgcgagcuaacucc

SEQ ID NO: 194361 - RNA, 20 nt, Human
gccuggacacucacccggga

SEQ ID NO: 194362 - RNA, 22 nt, Human
gccuggacacucacccgggaac

SEQ ID NO: 194363 - RNA, 19 nt, Human
uaaaaaaggugaaguggac

SEQ ID NO: 194364 - RNA, 25 nt, Human
uaaagcccaugaacugcauuacuag

SEQ ID NO: 194365 - RNA, 18 nt, Human
uaccuaaagcccaugaac

SEQ ID NO: 194366 - RNA, 23 nt, Human
uauggauacuucuuuguucuugg

SEQ ID NO: 194367 - RNA, 19 nt, Human
uccccaugaaaagccuacu

SEQ ID NO: 194368 - RNA, 21 nt, Human
ucuaaacuuaauauggauacu

SEQ ID NO: 194369 - RNA, 18 nt, Human
ucucauagaaauagacuc

SEQ ID NO: 194370 - RNA, 23 nt, Human
ugaaaagccuacuucauaacuga

SEQ ID NO: 194371 - RNA, 23 nt, Human
ugaaguggacaaucaguauuuca

SEQ ID NO: 194372 - RNA, 28 nt, Human
ugaaguggacaaucaguauuucaaaccc

SEQ ID NO: 194373 - RNA, 18 nt, Human
uggauacuucuuuguucu

SEQ ID NO: 194374 - RNA, 22 nt, Human
uucaaacccaauacagggaaau

SEQ ID NO: 194375 - RNA, 22 nt, Human
uuuuuuuuuuuuuuuucaucuu

SEQ ID NO: 194376 - RNA, 24 nt, Human
aaacauauguaacaauacacaaau

SEQ ID NO: 194377 - RNA, 22 nt, Human
acaaagggaacugugcaucuau

SEQ ID NO: 194378 - RNA, 18 nt, Human
acuguaguucauuaguga

SEQ ID NO: 194379 - RNA, 24 nt, Human
acuguaguucauuagugauccauu

SEQ ID NO: 194380 - RNA, 18 nt, Human
agaugaaguccaacuacc

SEQ ID NO: 194381 - RNA, 21 nt, Human
agcaaagcaauuaagugagaa

SEQ ID NO: 194382 - RNA, 19 nt, Human
auagaugaaguccaacuac

SEQ ID NO: 194383 - RNA, 18 nt, Human
ccauuacuucauccaaau

SEQ ID NO: 194384 - RNA, 18 nt, Human
ccugcaguucacugcacu

SEQ ID NO: 194385 - RNA, 18 nt, Human
ccuugagggaaaaaaaag

SEQ ID NO: 194386 - RNA, 20 nt, Human
gaaauuaaaacauucucccu

SEQ ID NO: 194387 - RNA, 26 nt, Human
uaacaauacacaaauuuaaaaauuuu

SEQ ID NO: 194388 - RNA, 18 nt, Human
uaauuucuuacacaucuc

SEQ ID NO: 194389 - RNA, 24 nt, Human
uagcccaucagagcucuuuauaau

SEQ ID NO: 194390 - RNA, 23 nt, Human
ucacccaaauagcccaucagagc

SEQ ID NO: 194391 - RNA, 24 nt, Human
ucuacauaaaagcugucaaaguuu

SEQ ID NO: 194392 - RNA, 21 nt, Human
ucucccuugagggaaaaaaaa

SEQ ID NO: 194393 - RNA, 25 nt, Human
ugcaaaauaauggaauauacuuuaa

SEQ ID NO: 194394 - RNA, 18 nt, Human
uucuacugauacaaacag

SEQ ID NO: 194395 - RNA, 21 nt, Human
aaacagguccucggugacuuu

SEQ ID NO: 194396 - RNA, 20 nt, Human
aaagagccuuaggacccagu

SEQ ID NO: 194397 - RNA, 19 nt, Human
aagaaacccaaugauaauc

SEQ ID NO: 194398 - RNA, 20 nt, Human
aaggacagggccaugaaagc

SEQ ID NO: 194399 - RNA, 25 nt, Human
aaguacugaaggugguauugcuucg

SEQ ID NO: 194400 - RNA, 19 nt, Human
aagugaccacagcuuccac

SEQ ID NO: 194401 - RNA, 19 nt, Human
acacacagacaaguucuga

SEQ ID NO: 194402 - RNA, 19 nt, Human
accccauucccacccccug

SEQ ID NO: 194403 - RNA, 22 nt, Human
acgcuaugguaugccuguaggc

SEQ ID NO: 194404 - RNA, 19 nt, Human
acugagcacaagagcauca

SEQ ID NO: 194405 - RNA, 22 nt, Human
agaugucaaagacaugauggcc

SEQ ID NO: 194406 - RNA, 21 nt, Human
aggaaaugcaaagagaggagg

SEQ ID NO: 194407 - RNA, 21 nt, Human
aggcccaaacucuucugucag

SEQ ID NO: 194408 - RNA, 20 nt, Human
aggcuuagaaguugggcacu

SEQ ID NO: 194409 - RNA, 24 nt, Human
agggugauguagagggagcccugc

SEQ ID NO: 194410 - RNA, 23 nt, Human
aggguuuaggaagguccaaaggg

SEQ ID NO: 194411 - RNA, 20 nt, Human
augcagcaucucaugggcac

SEQ ID NO: 194412 - RNA, 18 nt, Human
cacauguggccccacgcc

SEQ ID NO: 194413 - RNA, 25 nt, Human
cacugcucagcccccugguuucuuc

SEQ ID NO: 194414 - RNA, 19 nt, Human
cacuggcaggcaucaaugg

SEQ ID NO: 194415 - RNA, 23 nt, Human
cacuggcaggcaucaaugguguu

SEQ ID NO: 194416 - RNA, 22 nt, Human
cacuuugaugugucuucggacc

SEQ ID NO: 194417 - RNA, 20 nt, Human
cagagaccuaauccccuccu

SEQ ID NO: 194418 - RNA, 19 nt, Human
cagaggguggucauacucc

SEQ ID NO: 194419 - RNA, 18 nt, Human
cagcaucucaugggcaca

SEQ ID NO: 194420 - RNA, 22 nt, Human
caugcaggugcagaggggccuu

SEQ ID NO: 194421 - RNA, 18 nt, Human
ccacgcuaugguaugccu

SEQ ID NO: 194422 - RNA, 19 nt, Human
ccauacccuuucaaacugc

SEQ ID NO: 194423 - RNA, 19 nt, Human
cccaguagucccgguucau

SEQ ID NO: 194424 - RNA, 21 nt, Human
ccccaccccauucccaccccc

SEQ ID NO: 194425 - RNA, 21 nt, Human
cccuccaacaagaaaaguagc

SEQ ID NO: 194426 - RNA, 20 nt, Human
ccuaacuuuuuccauaagcu

SEQ ID NO: 194427 - RNA, 23 nt, Human
ccuuagccacgcuaugguaugcc

SEQ ID NO: 194428 - RNA, 23 nt, Human
cuaagaauagugaugaaggucuu

SEQ ID NO: 194429 - RNA, 24 nt, Human
cucaagcucaagucaccagaagau

SEQ ID NO: 194430 - RNA, 21 nt, Human
cuccaagaccaucugacccag

SEQ ID NO: 194431 - RNA, 18 nt, Human
cuccuucacugccauccg

SEQ ID NO: 194432 - RNA, 18 nt, Human
cuggauuguucuuccaca

SEQ ID NO: 194433 - RNA, 18 nt, Human
cugucagcuucuucagag

SEQ ID NO: 194434 - RNA, 22 nt, Human
gaccccaccccauucccacccc

SEQ ID NO: 194435 - RNA, 25 nt, Human
gacccucucuccuuagugaccccac

SEQ ID NO: 194436 - RNA, 20 nt, Human
gacuuuuccaguaagaaagg

SEQ ID NO: 194437 - RNA, 21 nt, Human
ggauacugacgaaugaggaca

SEQ ID NO: 194438 - RNA, 22 nt, Human
ggccaugaaagcaaaaagagcc

SEQ ID NO: 194439 - RNA, 22 nt, Human
gguauugcuguaucacuuugau

SEQ ID NO: 194440 - RNA, 23 nt, Human
guaaaauucacacauguggcccc

SEQ ID NO: 194441 - RNA, 21 nt, Human
guagagggagcccugcagaca

SEQ ID NO: 194442 - RNA, 23 nt, Human
guccagccucaauccugagaauu

SEQ ID NO: 194443 - RNA, 20 nt, Human
gugcagaggggccuuagcca

SEQ ID NO: 194444 - RNA, 18 nt, Human
guuugagauucagagagg

SEQ ID NO: 194445 - RNA, 20 nt, Human
uaaaaugacugagguguaag

SEQ ID NO: 194446 - RNA, 18 nt, Human
uaugccuguaggcggaac

SEQ ID NO: 194447 - RNA, 23 nt, Human
ucacacauguggccccacgcccu

SEQ ID NO: 194448 - RNA, 19 nt, Human
ucacugccauccgcagaaa

SEQ ID NO: 194449 - RNA, 22 nt, Human
ucagagcucaagcucaagucac

SEQ ID NO: 194450 - RNA, 25 nt, Human
uccaagaccaucugacccagacggg

SEQ ID NO: 194451 - RNA, 19 nt, Human
uccacagacagauacucac

SEQ ID NO: 194452 - RNA, 18 nt, Human
uccuuagugaccccaccc

SEQ ID NO: 194453 - RNA, 20 nt, Human
ucucagcccuggauuguucu

SEQ ID NO: 194454 - RNA, 26 nt, Human
ucuccagcuccuucacuggggccgcc

SEQ ID NO: 194455 - RNA, 24 nt, Human
ucugccacucucuugccauacccu

SEQ ID NO: 194456 - RNA, 23 nt, Human
ugaaggacagggccaugaaagca

SEQ ID NO: 194457 - RNA, 24 nt, Human
ugaaugaugucacugagcacaaga

SEQ ID NO: 194458 - RNA, 22 nt, Human
ugacccagacgggcaaaacugg

SEQ ID NO: 194459 - RNA, 19 nt, Human
ugaccccaccccauuccca

SEQ ID NO: 194460 - RNA, 23 nt, Human
ugaccccaccccauucccacccc

SEQ ID NO: 194461 - RNA, 24 nt, Human
ugaccccaccccauucccaccccc

SEQ ID NO: 194462 - RNA, 25 nt, Human
ugaccccaccccauucccacccccu

SEQ ID NO: 194463 - RNA, 20 nt, Human
ugaggcacccaugacaaaga

SEQ ID NO: 194464 - RNA, 20 nt, Human
ugccugucagagcucaagcu

SEQ ID NO: 194465 - RNA, 20 nt, Human
ugcucagcccccugguuucu

SEQ ID NO: 194466 - RNA, 19 nt, Human
uggaguugaggcacccaug

SEQ ID NO: 194467 - RNA, 21 nt, Human
uggcuccugacccucucuccu

SEQ ID NO: 194468 - RNA, 23 nt, Human
uggcugggggguugcugaugagg

SEQ ID NO: 194469 - RNA, 22 nt, Human
ugguaagcagaugucaaagaca

SEQ ID NO: 194470 - RNA, 25 nt, Human
ugguguugagaaguucauauacaug

SEQ ID NO: 194471 - RNA, 19 nt, Human
ugucugccacucucuugcc

SEQ ID NO: 194472 - RNA, 22 nt, Human
uuacuuccacagacagauacuc

SEQ ID NO: 194473 - RNA, 25 nt, Human
uucaaauuuuucuccauuaucaacu

SEQ ID NO: 194474 - RNA, 22 nt, Human
uucaauccgugacagaaguaaa

SEQ ID NO: 194475 - RNA, 24 nt, Human
uuccacagacagauacucacaggc

SEQ ID NO: 194476 - RNA, 21 nt, Human
uucugaaugaugucacugagc

SEQ ID NO: 194477 - RNA, 24 nt, Human
uugaggcacccaugacaaagaaga

SEQ ID NO: 194478 - RNA, 21 nt, Human
uuucuucggacaaagaggaaa

SEQ ID NO: 194479 - RNA, 21 nt, Human
aacagagucaucagcuuucag

SEQ ID NO: 194480 - RNA, 19 nt, Human
aagaaugacaucccccacu

SEQ ID NO: 194481 - RNA, 18 nt, Human
aagacaccaugagggugg

SEQ ID NO: 194482 - RNA, 19 nt, Human
accaggcaggcugggccac

SEQ ID NO: 194483 - RNA, 18 nt, Human
acuaguccauggccugcu

SEQ ID NO: 194484 - RNA, 24 nt, Human
agaagcuggaagccacucuuugcu

SEQ ID NO: 194485 - RNA, 21 nt, Human
aggaagcccaaccaggcaggc

SEQ ID NO: 194486 - RNA, 18 nt, Human
aggcacgcugggucagca

SEQ ID NO: 194487 - RNA, 18 nt, Human
agggagggggaagggcug

SEQ ID NO: 194488 - RNA, 25 nt, Human
agucaucagcuuucaguggcccaga

SEQ ID NO: 194489 - RNA, 22 nt, Human
aguccaggauuccaauuuggca

SEQ ID NO: 194490 - RNA, 25 nt, Human
auacauuucuagaaauuucaauacc

SEQ ID NO: 194491 - RNA, 23 nt, Human
aucauauuauuuccauguaaaau

SEQ ID NO: 194492 - RNA, 20 nt, Human
auccagauaagcuugauugc

SEQ ID NO: 194493 - RNA, 24 nt, Human
aucggugggugcauggccuucugg

SEQ ID NO: 194494 - RNA, 19 nt, Human
augcugcacugcagacccc

SEQ ID NO: 194495 - RNA, 22 nt, Human
caaugaguuuuucucuuggucu

SEQ ID NO: 194496 - RNA, 18 nt, Human
caccaugaggguggaugg

SEQ ID NO: 194497 - RNA, 21 nt, Human
cacuuggccucaguucaaagu

SEQ ID NO: 194498 - RNA, 19 nt, Human
cagaaggaaauauaaugua

SEQ ID NO: 194499 - RNA, 19 nt, Human
cagcaacaacccauugacc

SEQ ID NO: 194500 - RNA, 22 nt, Human
cagcggcccauuaaugcugcac

SEQ ID NO: 194501 - RNA, 22 nt, Human
cagcugagguucucaucuacca

SEQ ID NO: 194502 - RNA, 21 nt, Human
caugccccuuugagugugggg

SEQ ID NO: 194503 - RNA, 20 nt, Human
caugcucauggcagcaacaa

SEQ ID NO: 194504 - RNA, 24 nt, Human
cauuacuuuugugaugaggagauc

SEQ ID NO: 194505 - RNA, 20 nt, Human
ccacauuacuuuugugauga

SEQ ID NO: 194506 - RNA, 20 nt, Human
ccagaggagccaucugggua

SEQ ID NO: 194507 - RNA, 24 nt, Human
cccaauacucagccuaccuucaau

SEQ ID NO: 194508 - RNA, 21 nt, Human
cccacauuacuuuugugauga

SEQ ID NO: 194509 - RNA, 20 nt, Human
cccauccagggcuccucuuu

SEQ ID NO: 194510 - RNA, 22 nt, Human
ccccagccugaguccgccagcc

SEQ ID NO: 194511 - RNA, 23 nt, Human
ccccaggaagcccaaccaggcag

SEQ ID NO: 194512 - RNA, 20 nt, Human
cccccgggggaacagaguca

SEQ ID NO: 194513 - RNA, 18 nt, Human
ccccuauccgguucuugu

SEQ ID NO: 194514 - RNA, 22 nt, Human
ccugcaacacuggccccaggaa

SEQ ID NO: 194515 - RNA, 22 nt, Human
cucauggcagcaacaacccauu

SEQ ID NO: 194516 - RNA, 19 nt, Human
cuccagagguuguacaugc

SEQ ID NO: 194517 - RNA, 18 nt, Human
cuguguaugagucauccu

SEQ ID NO: 194518 - RNA, 20 nt, Human
cuuggccucaguucaaagug

SEQ ID NO: 194519 - RNA, 19 nt, Human
gagggagggggaagggcug

SEQ ID NO: 194520 - RNA, 19 nt, Human
gagggagggggaagggcug

SEQ ID NO: 194521 - RNA, 23 nt, Human
gauugcuccuucugcuucuccac

SEQ ID NO: 194522 - RNA, 28 nt, Human
gcagaccccagccugaguccgccagcca

SEQ ID NO: 194523 - RNA, 18 nt, Human
gcaggcugggccacuuca

SEQ ID NO: 194524 - RNA, 20 nt, Human
gcugccccccgggggaacag

SEQ ID NO: 194525 - RNA, 20 nt, Human
gcugggccacuucaucugug

SEQ ID NO: 194526 - RNA, 24 nt, Human
ggccucaguucaaagugaaauuuc

SEQ ID NO: 194527 - RNA, 18 nt, Human
ggccugcugggagugcac

SEQ ID NO: 194528 - RNA, 19 nt, Human
gggagggggaagggcuggg

SEQ ID NO: 194529 - RNA, 20 nt, Human
gggaguucccauccagggcu

SEQ ID NO: 194530 - RNA, 22 nt, Human
ggucuacauccuggcguugagg

SEQ ID NO: 194531 - RNA, 22 nt, Human
guagagcaaagaaacuaaagaa

SEQ ID NO: 194532 - RNA, 23 nt, Human
guagauauggcugccccccgggg

SEQ ID NO: 194533 - RNA, 22 nt, Human
guagguucccccuauccgguuc

SEQ ID NO: 194534 - RNA, 18 nt, Human
guccaguuguagauaugg

SEQ ID NO: 194535 - RNA, 23 nt, Human
guucccauccagggcuccucuuu

SEQ ID NO: 194536 - RNA, 18 nt, Human
uaagaacuuggagaacug

SEQ ID NO: 194537 - RNA, 19 nt, Human
uaagaacuuggagaacugg

SEQ ID NO: 194538 - RNA, 24 nt, Human
uaaguccaggauuccaauuuggca

SEQ ID NO: 194539 - RNA, 18 nt, Human
uacaugcucauggcagca

SEQ ID NO: 194540 - RNA, 23 nt, Human
uagaagacaccaugaggguggau

SEQ ID NO: 194541 - RNA, 22 nt, Human
uagagcaaagaaacuaaagaaa

SEQ ID NO: 194542 - RNA, 18 nt, Human
uccagauaagcuugauug

SEQ ID NO: 194543 - RNA, 21 nt, Human
ucccaucaagccuauauucuu

SEQ ID NO: 194544 - RNA, 18 nt, Human
uccuugaaagaaguagaa

SEQ ID NO: 194545 - RNA, 23 nt, Human
ucggugggugcauggccuucugg

SEQ ID NO: 194546 - RNA, 23 nt, Human
ucuaaaacaugaagagguaacuc

SEQ ID NO: 194547 - RNA, 18 nt, Human
ucucaucuaccacacuga

SEQ ID NO: 194548 - RNA, 21 nt, Human
ucuucuuuguccacugaagca

SEQ ID NO: 194549 - RNA, 23 nt, Human
ugaagaggaggaagaaaucaugg

SEQ ID NO: 194550 - RNA, 21 nt, Human
ugacaucccccacuucagccu

SEQ ID NO: 194551 - RNA, 21 nt, Human
ugagcaguaaguggcaauguu

SEQ ID NO: 194552 - RNA, 21 nt, Human
ugagggagggggaagggcugg

SEQ ID NO: 194553 - RNA, 18 nt, Human
ugcagaccccagccugag

SEQ ID NO: 194554 - RNA, 19 nt, Human
ugccaggugcccacguaga

SEQ ID NO: 194555 - RNA, 21 nt, Human
ugccaggugcccacguagagc

SEQ ID NO: 194556 - RNA, 19 nt, Human
ugccccuuugagugugggg

SEQ ID NO: 194557 - RNA, 25 nt, Human
uggagaacuggcuuuccugaggaga

SEQ ID NO: 194558 - RNA, 19 nt, Human
uggauucccaauacucagc

SEQ ID NO: 194559 - RNA, 21 nt, Human
uggcaggguuuacugggaugg

SEQ ID NO: 194560 - RNA, 22 nt, Human
uggccccaggaagcccaaccag

SEQ ID NO: 194561 - RNA, 22 nt, Human
uggcuaggagcagacacuuuuc

SEQ ID NO: 194562 - RNA, 20 nt, Human
uguacaugcucauggcagca

SEQ ID NO: 194563 - RNA, 19 nt, Human
ugucucaucuucuuugucc

SEQ ID NO: 194564 - RNA, 19 nt, Human
ugugaugaggagaucuugg

SEQ ID NO: 194565 - RNA, 21 nt, Human
ugugaugaggagaucuuggcu

SEQ ID NO: 194566 - RNA, 20 nt, Human
uucaguggcccagaggagcc

SEQ ID NO: 194567 - RNA, 19 nt, Human
uuccugaguccuugaaaga

SEQ ID NO: 194568 - RNA, 23 nt, Human
uugauugcuccuucugcuucucc

SEQ ID NO: 194569 - RNA, 24 nt, Human
uuucucuuggucucuacuuuguga

SEQ ID NO: 194570 - RNA, 21 nt, Human
uuuggauucccaauacucagc

SEQ ID NO: 194571 - RNA, 24 nt, Human
uuugugaugaggagaucuuggcua

SEQ ID NO: 194572 - RNA, 22 nt, Human
uuuuuuuuuuuuuuuuuuucag

SEQ ID NO: 194573 - RNA, 18 nt, Human
aacacaguccuacaugua

SEQ ID NO: 194574 - RNA, 21 nt, Human
aagaaaggagaaagaaaaaaa

SEQ ID NO: 194575 - RNA, 23 nt, Human
acacuugaaagaaaggagaaaga

SEQ ID NO: 194576 - RNA, 20 nt, Human
acgcgcacaggcggaccuuc

SEQ ID NO: 194577 - RNA, 20 nt, Human
agaaaggagaaagaaaaaaa

SEQ ID NO: 194578 - RNA, 25 nt, Human
auauacaugacacaaacauuauaua

SEQ ID NO: 194579 - RNA, 22 nt, Human
caagacgacucacgacacuuga

SEQ ID NO: 194580 - RNA, 24 nt, Human
caaggggacaccugggagagggga

SEQ ID NO: 194581 - RNA, 18 nt, Human
cacagcagcgagugcucu

SEQ ID NO: 194582 - RNA, 19 nt, Human
cacucccuccucccgccug

SEQ ID NO: 194583 - RNA, 18 nt, Human
cagcagcgagugcucugc

SEQ ID NO: 194584 - RNA, 28 nt, Human
cauauacaugacacaaacauuauauaua

SEQ ID NO: 194585 - RNA, 23 nt, Human
cauuacgggugagaagacccuug

SEQ ID NO: 194586 - RNA, 22 nt, Human
ccagucagucucuccacucccu

SEQ ID NO: 194587 - RNA, 22 nt, Human
cccacaaguaaaaaggcuuuau

SEQ ID NO: 194588 - RNA, 20 nt, Human
ccgccuggcucgaggacgga

SEQ ID NO: 194589 - RNA, 18 nt, Human
cgacacuugaaagaaagg

SEQ ID NO: 194590 - RNA, 18 nt, Human
gacaccaaauggccuucu

SEQ ID NO: 194591 - RNA, 22 nt, Human
gcagcgagugcucugcugccuu

SEQ ID NO: 194592 - RNA, 21 nt, Human
ggaagucgagcguccacagug

SEQ ID NO: 194593 - RNA, 22 nt, Human
gucagucucuccacucccuccu

SEQ ID NO: 194594 - RNA, 29 nt, Human
uacacaguuauuuccaauauacaaucaag

SEQ ID NO: 194595 - RNA, 18 nt, Human
uacagucuacacagcagc

SEQ ID NO: 194596 - RNA, 19 nt, Human
uaugcuacaaggggacacc

SEQ ID NO: 194597 - RNA, 22 nt, Human
ucuacacagcagcgagugcucu

SEQ ID NO: 194598 - RNA, 19 nt, Human
ucucaggccugacgcgcag

SEQ ID NO: 194599 - RNA, 21 nt, Human
ucucaggccugacgcgcaggg

SEQ ID NO: 194600 - RNA, 21 nt, Human
ucuccagcuuccucccagguc

SEQ ID NO: 194601 - RNA, 23 nt, Human
ucuccagcuuccucccaggucuc

SEQ ID NO: 194602 - RNA, 20 nt, Human
ucucuccacucccuccuccc

SEQ ID NO: 194603 - RNA, 23 nt, Human
ugacgcgcagggcccggccgccu

SEQ ID NO: 194604 - RNA, 18 nt, Human
ugagaagacccuuggaag

SEQ ID NO: 194605 - RNA, 22 nt, Human
ugcucugcugccuggcucaggc

SEQ ID NO: 194606 - RNA, 23 nt, Human
uggaugcauucaaguaauacuaa

SEQ ID NO: 194607 - RNA, 21 nt, Human
uguucacagaaaggccucaau

SEQ ID NO: 194608 - RNA, 20 nt, Human
uugguuuaaauauccucugg

SEQ ID NO: 194609 - RNA, 23 nt, Human
uuuguuacacaguuauuuccaau

SEQ ID NO: 194610 - RNA, 28 nt, Human
acagcucuggccucugcuggcucugccc

SEQ ID NO: 194611 - RNA, 21 nt, Human
cagcucuggccucugcuggcu

SEQ ID NO: 194612 - RNA, 22 nt, Human
ccaccuacagggacaaaaagug

SEQ ID NO: 194613 - RNA, 24 nt, Human
ccuacagggacaaaaaguguuauc

SEQ ID NO: 194614 - RNA, 20 nt, Human
gcucuggccucugcuggcuc

SEQ ID NO: 194615 - RNA, 19 nt, Human
gggcuggauuuagaacguc

SEQ ID NO: 194616 - RNA, 21 nt, Human
uaaagaagugaugcacaaaug

SEQ ID NO: 194617 - RNA, 22 nt, Human
uaacuuucucuaaagaagugau

SEQ ID NO: 194618 - RNA, 18 nt, Human
uaagcagaacacagacuu

SEQ ID NO: 194619 - RNA, 18 nt, Human
uagaaaguuuuagcaugu

SEQ ID NO: 194620 - RNA, 24 nt, Human
uagaacgucacuaauuaaaauccu

SEQ ID NO: 194621 - RNA, 23 nt, Human
ucaccuuauagcuccgcugacaa

SEQ ID NO: 194622 - RNA, 23 nt, Human
ucucuccuaagcagaacacagac

SEQ ID NO: 194623 - RNA, 21 nt, Human
ugaacacuugcccagccagca

SEQ ID NO: 194624 - RNA, 18 nt, Human
ugccccacguguauaggg

SEQ ID NO: 194625 - RNA, 21 nt, Human
uuaucucuccuaagcagaaca

SEQ ID NO: 194626 - RNA, 23 nt, Human
aacagcacaaaggcuauagguuu

SEQ ID NO: 194627 - RNA, 18 nt, Human
aacccaaaggagaauagc

SEQ ID NO: 194628 - RNA, 23 nt, Human
aacuuaaaagaccucaggggcag

SEQ ID NO: 194629 - RNA, 18 nt, Human
acacugacuccagccugg

SEQ ID NO: 194630 - RNA, 18 nt, Human
acagcacaaaggcuauag

SEQ ID NO: 194631 - RNA, 19 nt, Human
acugacuccagccuggcug

SEQ ID NO: 194632 - RNA, 23 nt, Human
agaacaccuccaagccccuacau

SEQ ID NO: 194633 - RNA, 21 nt, Human
agccuggcuccacuaccauuc

SEQ ID NO: 194634 - RNA, 21 nt, Human
aggggcacgcaggcaaggggc

SEQ ID NO: 194635 - RNA, 24 nt, Human
augccacauuacucuuuauugaau

SEQ ID NO: 194636 - RNA, 21 nt, Human
caccuccaagccccuacaucu

SEQ ID NO: 194637 - RNA, 18 nt, Human
cacugacuccagccuggc

SEQ ID NO: 194638 - RNA, 19 nt, Human
cagaacaccuccaagcccc

SEQ ID NO: 194639 - RNA, 21 nt, Human
cagcaagaaacccaaaggaga

SEQ ID NO: 194640 - RNA, 25 nt, Human
ccacuguccagaacaccuccaagcc

SEQ ID NO: 194641 - RNA, 25 nt, Human
ccagaacaccuccaagccccuacau

SEQ ID NO: 194642 - RNA, 24 nt, Human
ccagcaccggccccuuucucucca

SEQ ID NO: 194643 - RNA, 22 nt, Human
cccgcuggucuccccucucgga

SEQ ID NO: 194644 - RNA, 18 nt, Human
ccggccccuuucucucca

SEQ ID NO: 194645 - RNA, 22 nt, Human
ccuccccacuguccagaacacc

SEQ ID NO: 194646 - RNA, 18 nt, Human
cucuaggggagggaggug

SEQ ID NO: 194647 - RNA, 19 nt, Human
cuuacccuaacgccauuca

SEQ ID NO: 194648 - RNA, 21 nt, Human
gcaaggcagaacagcacaaag

SEQ ID NO: 194649 - RNA, 22 nt, Human
gcacgcaggcaaggggcacgaa

SEQ ID NO: 194650 - RNA, 19 nt, Human
gcaggugucuggaauaugg

SEQ ID NO: 194651 - RNA, 23 nt, Human
gcccucaacuuaaaagaccucag

SEQ ID NO: 194652 - RNA, 18 nt, Human
gcgccagcaccggccccu

SEQ ID NO: 194653 - RNA, 23 nt, Human
gucuggagcccuccccacugucc

SEQ ID NO: 194654 - RNA, 21 nt, Human
guggaagccuggcuccacuac

SEQ ID NO: 194655 - RNA, 25 nt, Human
uacagccagcacccuccucggugcc

SEQ ID NO: 194656 - RNA, 20 nt, Human
uacccuaacgccauucacac

SEQ ID NO: 194657 - RNA, 19 nt, Human
uaggggagggagguggaug

SEQ ID NO: 194658 - RNA, 24 nt, Human
uauggucaggagugggaggggagg

SEQ ID NO: 194659 - RNA, 19 nt, Human
ucucuccaagcacaggggc

SEQ ID NO: 194660 - RNA, 24 nt, Human
ucuuuugugaccagguugggucug

SEQ ID NO: 194661 - RNA, 20 nt, Human
ugaaugcgagcgccagcacc

SEQ ID NO: 194662 - RNA, 23 nt, Human
ugcagcagcaagaaacccaaagg

SEQ ID NO: 194663 - RNA, 19 nt, Human
ugcccuuacccuaacgcca

SEQ ID NO: 194664 - RNA, 21 nt, Human
uggccaggaugcaguggaagc

SEQ ID NO: 194665 - RNA, 24 nt, Human
uggcugugcccuuacccuaacgcc

SEQ ID NO: 194666 - RNA, 22 nt, Human
ugguuguauaaaauugcagcag

SEQ ID NO: 194667 - RNA, 20 nt, Human
ugucuggaauauggucagga

SEQ ID NO: 194668 - RNA, 19 nt, Human
uuagggcaggugucuggaa

SEQ ID NO: 194669 - RNA, 22 nt, Human
uuggagauauaaugcagaagug

SEQ ID NO: 194670 - RNA, 20 nt, Human
uuuuuuuuuaaacacaggua

SEQ ID NO: 194671 - RNA, 20 nt, Human
uuuuuuuuuuaaacacaggg

SEQ ID NO: 194672 - RNA, 22 nt, Human
ccucgggacccgacuucccgcc

SEQ ID NO: 194673 - RNA, 23 nt, Human
cgagccggagccucgggacccga

SEQ ID NO: 194674 - RNA, 20 nt, Human
cuguggccuuuuuccccucc

SEQ ID NO: 194675 - RNA, 19 nt, Human
uacagauugcuguggccuu

SEQ ID NO: 194676 - RNA, 18 nt, Human
ucccgcccggcccggauc

SEQ ID NO: 194677 - RNA, 23 nt, Human
ucuaauaucuuauuuuacaugau

SEQ ID NO: 194678 - RNA, 21 nt, Human
agcuaacucuguucacaacgu

SEQ ID NO: 194679 - RNA, 19 nt, Human
cuaacucuguucacaacgu

SEQ ID NO: 194680 - RNA, 18 nt, Human
guccaguucuccucuucc

SEQ ID NO: 194681 - RNA, 21 nt, Human
uuaccagcuaacucuguucac

SEQ ID NO: 194682 - RNA, 25 nt, Human
uuuaagaggacauuuaccagcuaac

SEQ ID NO: 194683 - RNA, 26 nt, Human
aaaaaagaaaaugguuuaaaagaaga

SEQ ID NO: 194684 - RNA, 26 nt, Human
aaaaaagaaaaugguuuaaaagaaga

SEQ ID NO: 194685 - RNA, 22 nt, Human
aaaaacacccaucauacuaccc

SEQ ID NO: 194686 - RNA, 21 nt, Human
aaaaacaccucuucacaaccc

SEQ ID NO: 194687 - RNA, 19 nt, Human
aaaaagaaaaugguuuaaa

SEQ ID NO: 194688 - RNA, 19 nt, Human
aaaaagaaaaugguuuaaa

SEQ ID NO: 194689 - RNA, 25 nt, Human
aaaaagaaaaugguuuaaaagaaga

SEQ ID NO: 194690 - RNA, 25 nt, Human
aaaaagaaaaugguuuaaaagaaga

SEQ ID NO: 194691 - RNA, 25 nt, Human
aaaaagaaaaugguuuaaaagaaga

SEQ ID NO: 194692 - RNA, 25 nt, Human
aaaaagaaaaugguuuaaaagaaga

SEQ ID NO: 194693 - RNA, 28 nt, Human
aaaaagaaaaugguuuaaaagaagagau

SEQ ID NO: 194694 - RNA, 28 nt, Human
aaaaagaaaaugguuuaaaagaagagau

SEQ ID NO: 194695 - RNA, 22 nt, Human
aaacacaugccaucuggauaua

SEQ ID NO: 194696 - RNA, 22 nt, Human
aaacacaugccaucuggauaua

SEQ ID NO: 194697 - RNA, 21 nt, Human
aaagcaacaggucuuucagaa

SEQ ID NO: 194698 - RNA, 28 nt, Human
aacacccaucauacuacccacagauagc

SEQ ID NO: 194699 - RNA, 24 nt, Human
aacaggucuuucagaacuuuaguu

SEQ ID NO: 194700 - RNA, 24 nt, Human
aaucacauuuacuuuuuucuacau

SEQ ID NO: 194701 - RNA, 24 nt, Human
aaucacauuuacuuuuuucuacau

SEQ ID NO: 194702 - RNA, 21 nt, Human
aaucuccgcuucuuuuggggg

SEQ ID NO: 194703 - RNA, 21 nt, Human
aaucuccgcuucuuuuggggg

SEQ ID NO: 194704 - RNA, 19 nt, Human
aaugaaggaagccucuaga

SEQ ID NO: 194705 - RNA, 20 nt, Human
acaaggagagaccagguaga

SEQ ID NO: 194706 - RNA, 20 nt, Human
acaaucagauggaagaaucc

SEQ ID NO: 194707 - RNA, 24 nt, Human
acauaacuuuucuaaccacaaaaa

SEQ ID NO: 194708 - RNA, 24 nt, Human
acauaacuuuucuaaccacaaaaa

SEQ ID NO: 194709 - RNA, 22 nt, Human
acaugccaucuggauauauaua

SEQ ID NO: 194710 - RNA, 22 nt, Human
acaugccaucuggauauauaua

SEQ ID NO: 194711 - RNA, 27 nt, Human
accggcaugcaggaacucagaaaccua

SEQ ID NO: 194712 - RNA, 23 nt, Human
acuacccacagauagccaugaug

SEQ ID NO: 194713 - RNA, 24 nt, Human
agcacccugggauuacaggcguga

SEQ ID NO: 194714 - RNA, 24 nt, Human
aggaacucagaaaccuaaaugggg

SEQ ID NO: 194715 - RNA, 18 nt, Human
agguucaacucucuccug

SEQ ID NO: 194716 - RNA, 20 nt, Human
aucuccgcuucuuuuggggg

SEQ ID NO: 194717 - RNA, 20 nt, Human
aucuccgcuucuuuuggggg

SEQ ID NO: 194718 - RNA, 21 nt, Human
augacauagguguaugucucu

SEQ ID NO: 194719 - RNA, 19 nt, Human
caaggagagaccagguaga

SEQ ID NO: 194720 - RNA, 24 nt, Human
cacaccuguaaucucagcacccug

SEQ ID NO: 194721 - RNA, 23 nt, Human
cacagcuagggaucaccggcaug

SEQ ID NO: 194722 - RNA, 20 nt, Human
caccuguaaucucagcaccc

SEQ ID NO: 194723 - RNA, 24 nt, Human
caccuguaaucucagcacccuggg

SEQ ID NO: 194724 - RNA, 20 nt, Human
cagaaaaugcauagauacau

SEQ ID NO: 194725 - RNA, 24 nt, Human
cagauggaagaauccccaaggcuu

SEQ ID NO: 194726 - RNA, 21 nt, Human
cagcacccugggauuacaggc

SEQ ID NO: 194727 - RNA, 21 nt, Human
cagcacccugggauuacaggc

SEQ ID NO: 194728 - RNA, 20 nt, Human
caggagaugcccaguaaaac

SEQ ID NO: 194729 - RNA, 20 nt, Human
caggagaugcccaguaaaac

SEQ ID NO: 194730 - RNA, 24 nt, Human
caggcgugagccaccgugcccggc

SEQ ID NO: 194731 - RNA, 18 nt, Human
ccaauuagaaaaaacacc

SEQ ID NO: 194732 - RNA, 23 nt, Human
ccagguagaaaauuauugugauu

SEQ ID NO: 194733 - RNA, 22 nt, Human
cccacagauagccaugaugcuu

SEQ ID NO: 194734 - RNA, 18 nt, Human
cccacagugagucugcag

SEQ ID NO: 194735 - RNA, 19 nt, Human
cccacagugagucugcagg

SEQ ID NO: 194736 - RNA, 20 nt, Human
ccugaaacaugaagagcuca

SEQ ID NO: 194737 - RNA, 23 nt, Human
ccugaagcaccugcccuucaaga

SEQ ID NO: 194738 - RNA, 23 nt, Human
ccugaagcaccugcccuucaaga

SEQ ID NO: 194739 - RNA, 22 nt, Human
ccuuucaagauauuugccuccu

SEQ ID NO: 194740 - RNA, 24 nt, Human
cggggauggcuccagaagucaccc

SEQ ID NO: 194741 - RNA, 24 nt, Human
cggggauggcuccagaagucaccc

SEQ ID NO: 194742 - RNA, 19 nt, Human
cucacaccuguaaucucag

SEQ ID NO: 194743 - RNA, 24 nt, Human
cucacaccuguaaucucagcaccc

SEQ ID NO: 194744 - RNA, 22 nt, Human
cucagcacccugggauuacagg

SEQ ID NO: 194745 - RNA, 23 nt, Human
cuccuaccugcuaaaaacaccca

SEQ ID NO: 194746 - RNA, 21 nt, Human
cuccugaaacaugaagagcuc

SEQ ID NO: 194747 - RNA, 18 nt, Human
cugaaacaugaagagcuc

SEQ ID NO: 194748 - RNA, 18 nt, Human
cugaagcaccugcccuuc

SEQ ID NO: 194749 - RNA, 18 nt, Human
cugggauuacaggcguga

SEQ ID NO: 194750 - RNA, 18 nt, Human
cuucauagcugugcaacu

SEQ ID NO: 194751 - RNA, 23 nt, Human
gaaaagcaacaggucuuucagaa

SEQ ID NO: 194752 - RNA, 23 nt, Human
gaaaagcaacaggucuuucagaa

SEQ ID NO: 194753 - RNA, 20 nt, Human
gaacucagaaaccuaaaugg

SEQ ID NO: 194754 - RNA, 21 nt, Human
gaggaaaugaacagagaaggc

SEQ ID NO: 194755 - RNA, 18 nt, Human
gauuacaggcgugagcca

SEQ ID NO: 194756 - RNA, 21 nt, Human
gauuacaggcgugagccaccg

SEQ ID NO: 194757 - RNA, 24 nt, Human
gauuacaggcgugagccaccgugc

SEQ ID NO: 194758 - RNA, 22 nt, Human
gccacgucccaggguucaaagc

SEQ ID NO: 194759 - RNA, 18 nt, Human
gccuccuaccugcuaaaa

SEQ ID NO: 194760 - RNA, 19 nt, Human
gcuagggaucaccggcaug

SEQ ID NO: 194761 - RNA, 26 nt, Human
gcuuggugacagaugaguuacugggu

SEQ ID NO: 194762 - RNA, 24 nt, Human
ggaggaaaugaaggaagccucuag

SEQ ID NO: 194763 - RNA, 20 nt, Human
ggcaggguggcucacaccug

SEQ ID NO: 194764 - RNA, 20 nt, Human
ggcaggguggcucacaccug

SEQ ID NO: 194765 - RNA, 20 nt, Human
ggcaggguggcucacaccug

SEQ ID NO: 194766 - RNA, 23 nt, Human
ggcaggguggcucacaccuguaa

SEQ ID NO: 194767 - RNA, 23 nt, Human
ggcaggguggcucacaccuguaa

SEQ ID NO: 194768 - RNA, 27 nt, Human
ggcuuggugacagaugaguuacugggu

SEQ ID NO: 194769 - RNA, 18 nt, Human
gggacaggugccucuucc

SEQ ID NO: 194770 - RNA, 24 nt, Human
gggcaggguggcucacaccuguaa

SEQ ID NO: 194771 - RNA, 23 nt, Human
ggggauggcuccagaagucaccc

SEQ ID NO: 194772 - RNA, 23 nt, Human
ggggauggcuccagaagucaccc

SEQ ID NO: 194773 - RNA, 22 nt, Human
ggugacggaggaaaugaaggaa

SEQ ID NO: 194774 - RNA, 19 nt, Human
gguggcucacaccuguaau

SEQ ID NO: 194775 - RNA, 23 nt, Human
gguggcucacaccuguaaucuca

SEQ ID NO: 194776 - RNA, 24 nt, Human
gguggcucacaccuguaaucucag

SEQ ID NO: 194777 - RNA, 22 nt, Human
gguucaacucucuccugaaaca

SEQ ID NO: 194778 - RNA, 21 nt, Human
guaguaacauaaaguaaacac

SEQ ID NO: 194779 - RNA, 20 nt, Human
gugaaacacuaggugaucca

SEQ ID NO: 194780 - RNA, 18 nt, Human
uaaaaaagaaauggggau

SEQ ID NO: 194781 - RNA, 20 nt, Human
uaaaguaaacacaugccauc

SEQ ID NO: 194782 - RNA, 20 nt, Human
uaaaguaaacacaugccauc

SEQ ID NO: 194783 - RNA, 22 nt, Human
uaagaagugcaugcaguaaugc

SEQ ID NO: 194784 - RNA, 23 nt, Human
uacaggcgugagccaccgugccc

SEQ ID NO: 194785 - RNA, 18 nt, Human
uaccacauuuaugcagcc

SEQ ID NO: 194786 - RNA, 18 nt, Human
uaccacauuuaugcagcc

SEQ ID NO: 194787 - RNA, 23 nt, Human
uacuagaguagcaucccaaauga

SEQ ID NO: 194788 - RNA, 22 nt, Human
uagccaugaugcuuuuucuggg

SEQ ID NO: 194789 - RNA, 19 nt, Human
uaucagaacaaggagagac

SEQ ID NO: 194790 - RNA, 22 nt, Human
uaugcagccaagugcauguagu

SEQ ID NO: 194791 - RNA, 22 nt, Human
uaugcagccaagugcauguagu

SEQ ID NO: 194792 - RNA, 24 nt, Human
uaugguauccugaagcaccugccc

SEQ ID NO: 194793 - RNA, 24 nt, Human
uaugguauccugaagcaccugccc

SEQ ID NO: 194794 - RNA, 21 nt, Human
ucaaaggaaaaguugaacggg

SEQ ID NO: 194795 - RNA, 24 nt, Human
ucaagacagaaugcuuguaccaca

SEQ ID NO: 194796 - RNA, 24 nt, Human
ucaagacagaaugcuuguaccaca

SEQ ID NO: 194797 - RNA, 19 nt, Human
ucagaacaaggagagacca

SEQ ID NO: 194798 - RNA, 24 nt, Human
ucagcacccugggauuacaggcgu

SEQ ID NO: 194799 - RNA, 22 nt, Human
ucauacuacccacagauagcca

SEQ ID NO: 194800 - RNA, 19 nt, Human
ucaugagagacaguuccag

SEQ ID NO: 194801 - RNA, 21 nt, Human
ucauuuaaaaaagaaaugggg

SEQ ID NO: 194802 - RNA, 21 nt, Human
uccaaaaauaggaaaugaaau

SEQ ID NO: 194803 - RNA, 21 nt, Human
uccaggggagaggucacagcu

SEQ ID NO: 194804 - RNA, 23 nt, Human
ucccaggguucaaagcuuuucuc

SEQ ID NO: 194805 - RNA, 19 nt, Human
uccuacagcagaagguacc

SEQ ID NO: 194806 - RNA, 20 nt, Human
uccugaaacaugaagagcuc

SEQ ID NO: 194807 - RNA, 20 nt, Human
uccugaagcaccugcccuuc

SEQ ID NO: 194808 - RNA, 21 nt, Human
ucuaaccacaaaaaaagaaaa

SEQ ID NO: 194809 - RNA, 21 nt, Human
ucuaaccacaaaaaaagaaaa

SEQ ID NO: 194810 - RNA, 24 nt, Human
ucucagcacccugggauuacaggc

SEQ ID NO: 194811 - RNA, 18 nt, Human
ucuccuacagcagaaggu

SEQ ID NO: 194812 - RNA, 24 nt, Human
ucuccugaaacaugaagagcucau

SEQ ID NO: 194813 - RNA, 19 nt, Human
ugagauaucuuugcuaaaa

SEQ ID NO: 194814 - RNA, 19 nt, Human
ugaggaaaugaacagagaa

SEQ ID NO: 194815 - RNA, 20 nt, Human
ugaggugacggaggaaauga

SEQ ID NO: 194816 - RNA, 24 nt, Human
ugaguuacuggguaacacagagag

SEQ ID NO: 194817 - RNA, 18 nt, Human
ugcauagauacaugugua

SEQ ID NO: 194818 - RNA, 20 nt, Human
ugcaugcaguaaugcaugua

SEQ ID NO: 194819 - RNA, 24 nt, Human
ugccuccuaccugcuaaaaacacc

SEQ ID NO: 194820 - RNA, 18 nt, Human
uggcucacaccuguaauc

SEQ ID NO: 194821 - RNA, 21 nt, Human
uggcucacaccuguaaucuca

SEQ ID NO: 194822 - RNA, 22 nt, Human
uggcucacaccuguaaucucag

SEQ ID NO: 194823 - RNA, 24 nt, Human
uggcucacaccuguaaucucagca

SEQ ID NO: 194824 - RNA, 18 nt, Human
ugggacaggugccucuuc

SEQ ID NO: 194825 - RNA, 18 nt, Human
ugggauuacaggcgugag

SEQ ID NO: 194826 - RNA, 21 nt, Human
ugggauuacaggcgugagcca

SEQ ID NO: 194827 - RNA, 22 nt, Human
ugggauuacaggcgugagccac

SEQ ID NO: 194828 - RNA, 23 nt, Human
ugggauuacaggcgugagccacc

SEQ ID NO: 194829 - RNA, 23 nt, Human
ugggauuacaggcgugagccacc

SEQ ID NO: 194830 - RNA, 24 nt, Human
ugggauuacaggcgugagccaccg

SEQ ID NO: 194831 - RNA, 20 nt, Human
uggggggcggggaaacgggg

SEQ ID NO: 194832 - RNA, 20 nt, Human
uggggggcggggaaacgggg

SEQ ID NO: 194833 - RNA, 20 nt, Human
uggggggcggggaaacgggg

SEQ ID NO: 194834 - RNA, 20 nt, Human
uguaagaagugcaugcagua

SEQ ID NO: 194835 - RNA, 23 nt, Human
uguuuagguucaacucucuccug

SEQ ID NO: 194836 - RNA, 18 nt, Human
uuccaaaaauaggaaaug

SEQ ID NO: 194837 - RNA, 26 nt, Human
uucuucaggucuggaauacuagagua

SEQ ID NO: 194838 - RNA, 21 nt, Human
uuuaaugccuaaagaagaaac

SEQ ID NO: 194839 - RNA, 21 nt, Human
uuugccuccuaccugcuaaaa

SEQ ID NO: 194840 - RNA, 23 nt, Human
aaccaacccccuccuccaauacu

SEQ ID NO: 194841 - RNA, 20 nt, Human
aacccccuccuccaauacua

SEQ ID NO: 194842 - RNA, 24 nt, Human
aagaagaaucuucacaaaucuacu

SEQ ID NO: 194843 - RNA, 24 nt, Human
acucuuaauuaugguagcaauguu

SEQ ID NO: 194844 - RNA, 18 nt, Human
agaaagcaugagauucug

SEQ ID NO: 194845 - RNA, 22 nt, Human
agcaugagauucugaagaagaa

SEQ ID NO: 194846 - RNA, 21 nt, Human
aggaaacccaggcccagagga

SEQ ID NO: 194847 - RNA, 23 nt, Human
auuuuaaccaacccccuccucca

SEQ ID NO: 194848 - RNA, 21 nt, Human
caacccccuccuccaauacua

SEQ ID NO: 194849 - RNA, 26 nt, Human
caaguuuauugaguaauuaaggugac

SEQ ID NO: 194850 - RNA, 21 nt, Human
ccaacccccuccuccaauacu

SEQ ID NO: 194851 - RNA, 23 nt, Human
cccaggcccagaggauauaaagc

SEQ ID NO: 194852 - RNA, 24 nt, Human
ccucuauguguggugacuucagga

SEQ ID NO: 194853 - RNA, 18 nt, Human
cugaagaagaaucuucac

SEQ ID NO: 194854 - RNA, 22 nt, Human
cuucacuggucagugcgucacu

SEQ ID NO: 194855 - RNA, 29 nt, Human
gccacaaugcuucuuucuccuucaaaaaa

SEQ ID NO: 194856 - RNA, 19 nt, Human
gcguuuccauaaaaguucu

SEQ ID NO: 194857 - RNA, 19 nt, Human
uaaaaguucugaguuacuu

SEQ ID NO: 194858 - RNA, 21 nt, Human
uaaagccacaaugcuucuuuc

SEQ ID NO: 194859 - RNA, 20 nt, Human
uaccagaaagcaugagauuc

SEQ ID NO: 194860 - RNA, 21 nt, Human
uacuaccagaaagcaugaggg

SEQ ID NO: 194861 - RNA, 26 nt, Human
ugaagaagaaucuucacaaaucuacu

SEQ ID NO: 194862 - RNA, 22 nt, Human
ugacuucaggaaacccaggccu

SEQ ID NO: 194863 - RNA, 25 nt, Human
aaaaaucacucaagaaaacuaaguc

SEQ ID NO: 194864 - RNA, 30 nt, Human
aaaauagaucuacaaauaucuuguguaaaa

SEQ ID NO: 194865 - RNA, 23 nt, Human
aaacaaaacaacagaaaacaccc

SEQ ID NO: 194866 - RNA, 18 nt, Human
aaacaacagaaaacaccc

SEQ ID NO: 194867 - RNA, 24 nt, Human
aaacaacagaaaacacccauaaac

SEQ ID NO: 194868 - RNA, 18 nt, Human
aaacacccauaaacauua

SEQ ID NO: 194869 - RNA, 22 nt, Human
aaacacccauaaacauuaauga

SEQ ID NO: 194870 - RNA, 25 nt, Human
aaacacccauaaacauuaaugagaa

SEQ ID NO: 194871 - RNA, 24 nt, Human
aaacauuaaugagaauuucaacaa

SEQ ID NO: 194872 - RNA, 20 nt, Human
aaaccaacaucagaaagcag

SEQ ID NO: 194873 - RNA, 23 nt, Human
aaaccuucugauuuaaaagaucc

SEQ ID NO: 194874 - RNA, 20 nt, Human
aaauaacaacuuuauuaacu

SEQ ID NO: 194875 - RNA, 21 nt, Human
aacaaauuacacaaauagaac

SEQ ID NO: 194876 - RNA, 19 nt, Human
aagcagcuuagacagauua

SEQ ID NO: 194877 - RNA, 21 nt, Human
aagcucuccauaaacuuaaaa

SEQ ID NO: 194878 - RNA, 24 nt, Human
acaaaacaacagaaaacacccaua

SEQ ID NO: 194879 - RNA, 19 nt, Human
acauacaagacaaacaguc

SEQ ID NO: 194880 - RNA, 24 nt, Human
acccuguucuaccaccuaaaauaa

SEQ ID NO: 194881 - RNA, 24 nt, Human
acuaagcucuccauaaacuuaaaa

SEQ ID NO: 194882 - RNA, 25 nt, Human
acuaggauaaugaauacauguaaac

SEQ ID NO: 194883 - RNA, 22 nt, Human
acuucaaaaaagcuuuauuagg

SEQ ID NO: 194884 - RNA, 27 nt, Human
agaaacuacaugaaauaacuaggauaa

SEQ ID NO: 194885 - RNA, 22 nt, Human
agaccagcaacuaguuggaugu

SEQ ID NO: 194886 - RNA, 21 nt, Human
agacgugagaaaaugucuaca

SEQ ID NO: 194887 - RNA, 18 nt, Human
agaugccugggugaaaga

SEQ ID NO: 194888 - RNA, 24 nt, Human
agguguuuuguacaggaagauuuc

SEQ ID NO: 194889 - RNA, 18 nt, Human
agucauagcauccacagu

SEQ ID NO: 194890 - RNA, 23 nt, Human
aguuuuauuuuuuaaaugaguuu

SEQ ID NO: 194891 - RNA, 21 nt, Human
auaaaugaauacagaguugag

SEQ ID NO: 194892 - RNA, 19 nt, Human
augaauacauguaaacacc

SEQ ID NO: 194893 - RNA, 18 nt, Human
auggaaaugaaccuacuu

SEQ ID NO: 194894 - RNA, 19 nt, Human
augguccaaaaaauuuuaa

SEQ ID NO: 194895 - RNA, 19 nt, Human
auuguuggauuuuuaaaaa

SEQ ID NO: 194896 - RNA, 27 nt, Human
caaaacaacagaaaacacccauaaaca

SEQ ID NO: 194897 - RNA, 20 nt, Human
caaacaaaacaacagaaaac

SEQ ID NO: 194898 - RNA, 26 nt, Human
caaacaaaacaacagaaaacacccau

SEQ ID NO: 194899 - RNA, 19 nt, Human
caagacaaacagucauagc

SEQ ID NO: 194900 - RNA, 23 nt, Human
caagacaaacagucauagcaucc

SEQ ID NO: 194901 - RNA, 21 nt, Human
caagcaaaagccuguuaauac

SEQ ID NO: 194902 - RNA, 21 nt, Human
cacaguguucccuuuuuuggg

SEQ ID NO: 194903 - RNA, 20 nt, Human
caccugaaaugccaaccaaa

SEQ ID NO: 194904 - RNA, 21 nt, Human
cacuuuaaguuucuugaugcc

SEQ ID NO: 194905 - RNA, 20 nt, Human
caggagauauguuauuacac

SEQ ID NO: 194906 - RNA, 18 nt, Human
caugacucuacccuguuc

SEQ ID NO: 194907 - RNA, 18 nt, Human
cauucaaguaucuucagg

SEQ ID NO: 194908 - RNA, 20 nt, Human
ccacagcauauagguaaaag

SEQ ID NO: 194909 - RNA, 22 nt, Human
ccacccaugucccucuaucacg

SEQ ID NO: 194910 - RNA, 23 nt, Human
cccucuggaggagaugccugggu

SEQ ID NO: 194911 - RNA, 21 nt, Human
ccugcccacagcauauaggua

SEQ ID NO: 194912 - RNA, 19 nt, Human
cgcccuauauucuguggac

SEQ ID NO: 194913 - RNA, 22 nt, Human
cggaucccucuggaggagaugc

SEQ ID NO: 194914 - RNA, 23 nt, Human
cuaaaauaacauggaccuuguuc

SEQ ID NO: 194915 - RNA, 20 nt, Human
cuacccuguucuaccaccua

SEQ ID NO: 194916 - RNA, 19 nt, Human
cucuacuucaaaaaaaaaa

SEQ ID NO: 194917 - RNA, 23 nt, Human
cugaaaugccaaccaaagaagau

SEQ ID NO: 194918 - RNA, 23 nt, Human
gacaaacaaaacaacagaaaaca

SEQ ID NO: 194919 - RNA, 18 nt, Human
gacuuggaaauuuuccuc

SEQ ID NO: 194920 - RNA, 18 nt, Human
gagaauuucaacaaacau

SEQ ID NO: 194921 - RNA, 20 nt, Human
gagaugccugggugaaagaa

SEQ ID NO: 194922 - RNA, 18 nt, Human
gagccagucggcucugag

SEQ ID NO: 194923 - RNA, 19 nt, Human
gagcugguagggaauuguu

SEQ ID NO: 194924 - RNA, 23 nt, Human
gagucagugccuaaaagagccag

SEQ ID NO: 194925 - RNA, 24 nt, Human
gcaaaagccuguuaauacuagaaa

SEQ ID NO: 194926 - RNA, 23 nt, Human
gcauuaugaaaaauauuuuaguu

SEQ ID NO: 194927 - RNA, 24 nt, Human
ggcauuaugaaaaauauuuuaguu

SEQ ID NO: 194928 - RNA, 18 nt, Human
ggugcugcuggacgggcu

SEQ ID NO: 194929 - RNA, 19 nt, Human
guauaaauuguuuugguga

SEQ ID NO: 194930 - RNA, 19 nt, Human
uaaaaacaacaaugaaaug

SEQ ID NO: 194931 - RNA, 21 nt, Human
uaaaggcagugagcuagaagc

SEQ ID NO: 194932 - RNA, 23 nt, Human
uaaaggcagugagcuagaagcca

SEQ ID NO: 194933 - RNA, 24 nt, Human
uaaauagugucuuccaccagcaaa

SEQ ID NO: 194934 - RNA, 18 nt, Human
uaacacugacaaacaaaa

SEQ ID NO: 194935 - RNA, 24 nt, Human
uaacacugacaaacaaaacaacag

SEQ ID NO: 194936 - RNA, 21 nt, Human
uaaccauuauucaaacagcca

SEQ ID NO: 194937 - RNA, 20 nt, Human
uaagaaaugcuuuaggaaaa

SEQ ID NO: 194938 - RNA, 19 nt, Human
uaagaugauagagaccagc

SEQ ID NO: 194939 - RNA, 24 nt, Human
uacaguaccauugguaccaacaag

SEQ ID NO: 194940 - RNA, 24 nt, Human
uaccacaugaucucuauauugcaa

SEQ ID NO: 194941 - RNA, 19 nt, Human
uaccacucaauaggcagcu

SEQ ID NO: 194942 - RNA, 21 nt, Human
uacuuuguacgguuuguuuga

SEQ ID NO: 194943 - RNA, 21 nt, Human
uagcauccacaguauuucauu

SEQ ID NO: 194944 - RNA, 27 nt, Human
uauaacaguacauaaccauuauucaaa

SEQ ID NO: 194945 - RNA, 24 nt, Human
uauggcauuaggagugaacuuuuu

SEQ ID NO: 194946 - RNA, 20 nt, Human
uauuucuuuuaaaaaaguuu

SEQ ID NO: 194947 - RNA, 24 nt, Human
ucaaacagccaaaccaaaaauugc

SEQ ID NO: 194948 - RNA, 21 nt, Human
ucauuacacauuuuacaauaa

SEQ ID NO: 194949 - RNA, 21 nt, Human
uccaguaguugucuuaggauu

SEQ ID NO: 194950 - RNA, 18 nt, Human
uccagugucucacacuuc

SEQ ID NO: 194951 - RNA, 20 nt, Human
ucccucuggaggagaugccu

SEQ ID NO: 194952 - RNA, 21 nt, Human
ucccucuggaggagaugccug

SEQ ID NO: 194953 - RNA, 26 nt, Human
ucuaaaauauuuagggguuacauuag

SEQ ID NO: 194954 - RNA, 23 nt, Human
ucucacacuucccauaauuugaa

SEQ ID NO: 194955 - RNA, 21 nt, Human
ucuccaguaguugucuuagga

SEQ ID NO: 194956 - RNA, 23 nt, Human
ucuucauguaaaagacaguugua

SEQ ID NO: 194957 - RNA, 23 nt, Human
ugaaauaacuaggauaaugaaua

SEQ ID NO: 194958 - RNA, 18 nt, Human
ugaauacauguaaacacc

SEQ ID NO: 194959 - RNA, 23 nt, Human
ugacaaaauaacacugacaaaca

SEQ ID NO: 194960 - RNA, 19 nt, Human
ugacaaacaaaacaacaga

SEQ ID NO: 194961 - RNA, 23 nt, Human
ugacauuuuaaauuccacauucu

SEQ ID NO: 194962 - RNA, 20 nt, Human
ugagcuagaagccaaucaca

SEQ ID NO: 194963 - RNA, 23 nt, Human
uggcaauaugcucuugaaauuuc

SEQ ID NO: 194964 - RNA, 24 nt, Human
uggguaagcauacagcuauaccaa

SEQ ID NO: 194965 - RNA, 21 nt, Human
ugguaccaacaagaaauauuc

SEQ ID NO: 194966 - RNA, 23 nt, Human
uguaccuuaauucacuucaacau

SEQ ID NO: 194967 - RNA, 18 nt, Human
ugugcaaauggaaaugaa

SEQ ID NO: 194968 - RNA, 20 nt, Human
ugugcaaauggaaaugaacc

SEQ ID NO: 194969 - RNA, 19 nt, Human
ugugguuuuguaaaaagug

SEQ ID NO: 194970 - RNA, 23 nt, Human
uguguaccuaggcauguguacau

SEQ ID NO: 194971 - RNA, 18 nt, Human
uuagauacugaucugagc

SEQ ID NO: 194972 - RNA, 22 nt, Human
uucugauuuaaaagauccuuuu

SEQ ID NO: 194973 - RNA, 20 nt, Human
uugauaaaauaucugauuca

SEQ ID NO: 194974 - RNA, 20 nt, Human
uugcuuccacuuuaaguuuc

SEQ ID NO: 194975 - RNA, 24 nt, Human
uugucaauuccacccaugucccuc

SEQ ID NO: 194976 - RNA, 24 nt, Human
uuuaaacuucuucaauuagauacu

SEQ ID NO: 194977 - RNA, 27 nt, Human
uuuaauauuucuacuggucuuuagaga

SEQ ID NO: 194978 - RNA, 19 nt, Human
uuuacugaggaccugccca

SEQ ID NO: 194979 - RNA, 24 nt, Human
uuuuuguuauucuauuucucaaca

SEQ ID NO: 194980 - RNA, 22 nt, Human
aaggcagggaauggugggaacc

SEQ ID NO: 194981 - RNA, 23 nt, Human
agcaaggcagggaauggugggaa

SEQ ID NO: 194982 - RNA, 19 nt, Human
aggcagggaauggugggaa

SEQ ID NO: 194983 - RNA, 19 nt, Human
aaugucacuuuaucaaaac

SEQ ID NO: 194984 - RNA, 19 nt, Human
accccuuugccuuuccauu

SEQ ID NO: 194985 - RNA, 24 nt, Human
aguuacuuauuaaaaaaaaaacac

SEQ ID NO: 194986 - RNA, 22 nt, Human
auaaauagugaaaaccacuaac

SEQ ID NO: 194987 - RNA, 18 nt, Human
caaaacaaccuaagagca

SEQ ID NO: 194988 - RNA, 18 nt, Human
cacacaucucugagacaa

SEQ ID NO: 194989 - RNA, 24 nt, Human
cagcucuggauuugggguaccccu

SEQ ID NO: 194990 - RNA, 18 nt, Human
ccgccgcgcuccggcccc

SEQ ID NO: 194991 - RNA, 18 nt, Human
ccgccgcgcuccggcccc

SEQ ID NO: 194992 - RNA, 18 nt, Human
ccggccccucgcagagcu

SEQ ID NO: 194993 - RNA, 18 nt, Human
cuaguucaucugcgauua

SEQ ID NO: 194994 - RNA, 23 nt, Human
cucaucaaccauaucucugacaa

SEQ ID NO: 194995 - RNA, 26 nt, Human
cuguagcaaaacauuauuccuaaauc

SEQ ID NO: 194996 - RNA, 21 nt, Human
gaacacacaucucugagacaa

SEQ ID NO: 194997 - RNA, 20 nt, Human
gagaauugauucccuuucuu

SEQ ID NO: 194998 - RNA, 29 nt, Human
uaaucacuauaaugucacuuuaucaaaac

SEQ ID NO: 194999 - RNA, 22 nt, Human
uaauuaaccugugacuucuagu

SEQ ID NO: 195000 - RNA, 22 nt, Human
uacuaagugauagugcaaaaca

SEQ ID NO: 195001 - RNA, 18 nt, Human
ucucugagacaagagcuc

SEQ ID NO: 195002 - RNA, 23 nt, Human
ucugacaaaaagaacacacaucu

SEQ ID NO: 195003 - RNA, 19 nt, Human
ucugagacaagagcucuga

SEQ ID NO: 195004 - RNA, 19 nt, Human
ugaagauuuucuguagcaa

SEQ ID NO: 195005 - RNA, 22 nt, Human
ugacaaaaagaacacacaucuc

SEQ ID NO: 195006 - RNA, 22 nt, Human
ugagacaagagcucugaaaugu

SEQ ID NO: 195007 - RNA, 19 nt, Human
ugagcagugcaccaaauau

SEQ ID NO: 195008 - RNA, 22 nt, Human
ugcaccaaauauuuuuagguuu

SEQ ID NO: 195009 - RNA, 20 nt, Human
uuuuuuuuuuuuacgagguc

SEQ ID NO: 195010 - RNA, 23 nt, Human
uuuuuuuuuuuuuuuuuacgagg

SEQ ID NO: 195011 - RNA, 24 nt, Human
aaaaggagaggacagccacagaug

SEQ ID NO: 195012 - RNA, 24 nt, Human
aaauaugcuauuaugauuuaauua

SEQ ID NO: 195013 - RNA, 23 nt, Human
aacaugcugacauacacacagug

SEQ ID NO: 195014 - RNA, 24 nt, Human
acauacacacagaggaucugcaca

SEQ ID NO: 195015 - RNA, 21 nt, Human
acgcggcgauggguccaaugc

SEQ ID NO: 195016 - RNA, 26 nt, Human
agacagaaaauuccugggaagucaaa

SEQ ID NO: 195017 - RNA, 19 nt, Human
aggaacagaaacggcgacg

SEQ ID NO: 195018 - RNA, 21 nt, Human
aggaggaagaaaaggagagga

SEQ ID NO: 195019 - RNA, 22 nt, Human
aggaggaagaaaaggagaggac

SEQ ID NO: 195020 - RNA, 24 nt, Human
aggaguguguagcaggauaacagu

SEQ ID NO: 195021 - RNA, 18 nt, Human
agggagguggcggggaca

SEQ ID NO: 195022 - RNA, 26 nt, Human
aggggcugggcgcgggaggauggggg

SEQ ID NO: 195023 - RNA, 20 nt, Human
auaaggaaguauauauuuua

SEQ ID NO: 195024 - RNA, 21 nt, Human
augggggggaacgccacugcc

SEQ ID NO: 195025 - RNA, 23 nt, Human
cacuccagagacagagggaggug

SEQ ID NO: 195026 - RNA, 21 nt, Human
cacuuagaaauucaucaggga

SEQ ID NO: 195027 - RNA, 18 nt, Human
cagcaggggcacuagggc

SEQ ID NO: 195028 - RNA, 19 nt, Human
ccaaugccuuaggggagcc

SEQ ID NO: 195029 - RNA, 20 nt, Human
ccaggguggagggaagggga

SEQ ID NO: 195030 - RNA, 22 nt, Human
ccccuugacgucaccgcuucuc

SEQ ID NO: 195031 - RNA, 18 nt, Human
ccuugacgucaccgcuuc

SEQ ID NO: 195032 - RNA, 26 nt, Human
cgacggcggcggcggggcaggcggag

SEQ ID NO: 195033 - RNA, 20 nt, Human
cgcgcgcccccgcccagggu

SEQ ID NO: 195034 - RNA, 23 nt, Human
cggggcaggcggaggcagggcca

SEQ ID NO: 195035 - RNA, 19 nt, Human
cguucccucuuuucuucuu

SEQ ID NO: 195036 - RNA, 24 nt, Human
cguucccucuuuucuucuucuuuu

SEQ ID NO: 195037 - RNA, 24 nt, Human
cucgcgcgcccccgcccagggugg

SEQ ID NO: 195038 - RNA, 22 nt, Human
cugacaaaaaugaagauuacaa

SEQ ID NO: 195039 - RNA, 18 nt, Human
gaagaaaaggagaggaca

SEQ ID NO: 195040 - RNA, 19 nt, Human
gaagaggaggaagaaaagg

SEQ ID NO: 195041 - RNA, 20 nt, Human
gagaaggaguuggaagagga

SEQ ID NO: 195042 - RNA, 19 nt, Human
gagcagcaggggcugggcg

SEQ ID NO: 195043 - RNA, 25 nt, Human
gagcagcaggggcugggcgcgggag

SEQ ID NO: 195044 - RNA, 18 nt, Human
gagggaaggggagggggc

SEQ ID NO: 195045 - RNA, 18 nt, Human
gaggugcugccacagcgc

SEQ ID NO: 195046 - RNA, 20 nt, Human
gaguuguuuaggugggacag

SEQ ID NO: 195047 - RNA, 20 nt, Human
gaguuguuuaggugggacag

SEQ ID NO: 195048 - RNA, 18 nt, Human
gcccagagcagcaggggc

SEQ ID NO: 195049 - RNA, 26 nt, Human
gcgcagcuccaggaggaggggaacgc

SEQ ID NO: 195050 - RNA, 23 nt, Human
gcgcagcuccaggaggaguuugc

SEQ ID NO: 195051 - RNA, 22 nt, Human
gcggaggcagggccagcgcugg

SEQ ID NO: 195052 - RNA, 18 nt, Human
gcggcggcggggcaggcg

SEQ ID NO: 195053 - RNA, 18 nt, Human
gcugaggucuccucugcc

SEQ ID NO: 195054 - RNA, 22 nt, Human
gcugcagcuucucacacagccu

SEQ ID NO: 195055 - RNA, 18 nt, Human
ggaacgccacugcccagc

SEQ ID NO: 195056 - RNA, 19 nt, Human
ggaggaagaaaaggagagg

SEQ ID NO: 195057 - RNA, 23 nt, Human
ggcacuccagagacagagggagg

SEQ ID NO: 195058 - RNA, 20 nt, Human
ggcaggcggaggcagggcca

SEQ ID NO: 195059 - RNA, 20 nt, Human
gggaagucaaauaaucucuu

SEQ ID NO: 195060 - RNA, 22 nt, Human
ggggggaacgccacugcccagc

SEQ ID NO: 195061 - RNA, 18 nt, Human
guauguguaugugcauau

SEQ ID NO: 195062 - RNA, 24 nt, Human
gugggacaguagcaggaacagaag

SEQ ID NO: 195063 - RNA, 20 nt, Human
uaaaagcagaccuuuuagga

SEQ ID NO: 195064 - RNA, 21 nt, Human
uacacugacaaaaaugaagau

SEQ ID NO: 195065 - RNA, 20 nt, Human
uagaauauucaaacaguccc

SEQ ID NO: 195066 - RNA, 22 nt, Human
uagcaggaacagaaacggcgaa

SEQ ID NO: 195067 - RNA, 22 nt, Human
uagugauuacagacagaaaauu

SEQ ID NO: 195068 - RNA, 21 nt, Human
uauaaaacacuugaaaacaau

SEQ ID NO: 195069 - RNA, 23 nt, Human
uauaaauauguaacacaaaccca

SEQ ID NO: 195070 - RNA, 19 nt, Human
uauguguaugugcauaugu

SEQ ID NO: 195071 - RNA, 20 nt, Human
uauguguaugugcauaugug

SEQ ID NO: 195072 - RNA, 20 nt, Human
ucuguaacuggauacacuga

SEQ ID NO: 195073 - RNA, 19 nt, Human
ugaaaacaaucuugagauu

SEQ ID NO: 195074 - RNA, 24 nt, Human
ugaaauaaccagauuucucagcca

SEQ ID NO: 195075 - RNA, 18 nt, Human
ugaaaucacaggagugug

SEQ ID NO: 195076 - RNA, 18 nt, Human
ugacauacacacagagga

SEQ ID NO: 195077 - RNA, 24 nt, Human
ugagauuaagaugaaauaaccaga

SEQ ID NO: 195078 - RNA, 22 nt, Human
ugcaaaaaauaaaagacgcggc

SEQ ID NO: 195079 - RNA, 23 nt, Human
uggaagaggaggaagaaaaggag

SEQ ID NO: 195080 - RNA, 24 nt, Human
uggaauuucuguguaaauuacuuu

SEQ ID NO: 195081 - RNA, 23 nt, Human
ugggaagucaaauaaucucuucu

SEQ ID NO: 195082 - RNA, 18 nt, Human
ugggaagugggaggagga

SEQ ID NO: 195083 - RNA, 22 nt, Human
ugggacaguagcaggaacagaa

SEQ ID NO: 195084 - RNA, 22 nt, Human
ugggaggaggagaaggaguugg

SEQ ID NO: 195085 - RNA, 21 nt, Human
uguaacacaaacccagugccu

SEQ ID NO: 195086 - RNA, 24 nt, Human
uugggggcuuucugcugcggcugg

SEQ ID NO: 195087 - RNA, 18 nt, Human
uuucugcugcggcuggga

SEQ ID NO: 195088 - RNA, 19 nt, Human
aagagccaggguggauggc

SEQ ID NO: 195089 - RNA, 21 nt, Human
acagucaaaggggguuuguuc

SEQ ID NO: 195090 - RNA, 22 nt, Human
accugggugcaggcgggcugag

SEQ ID NO: 195091 - RNA, 20 nt, Human
acuucaagaguuaagaggga

SEQ ID NO: 195092 - RNA, 21 nt, Human
agagucagugaagggagauaa

SEQ ID NO: 195093 - RNA, 20 nt, Human
aggagaaaaacagguauaaa

SEQ ID NO: 195094 - RNA, 24 nt, Human
aggagaaaaacagguauaaaagga

SEQ ID NO: 195095 - RNA, 19 nt, Human
aggagagggaaaaaaaaug

SEQ ID NO: 195096 - RNA, 18 nt, Human
aggagauucagcauaguc

SEQ ID NO: 195097 - RNA, 18 nt, Human
aggcauauucacuucuuu

SEQ ID NO: 195098 - RNA, 19 nt, Human
aggggguuuguucucuggc

SEQ ID NO: 195099 - RNA, 20 nt, Human
aggggguuuguucucuggcg

SEQ ID NO: 195100 - RNA, 19 nt, Human
augccuuauggauacaacu

SEQ ID NO: 195101 - RNA, 18 nt, Human
auuucaccugggugcagg

SEQ ID NO: 195102 - RNA, 19 nt, Human
caagaaaacuucuaccuuc

SEQ ID NO: 195103 - RNA, 21 nt, Human
cagcgugggaaccuagagugg

SEQ ID NO: 195104 - RNA, 25 nt, Human
ccaagaauaaccacuuuaaauuaac

SEQ ID NO: 195105 - RNA, 19 nt, Human
cuaguguuauuuucaaggc

SEQ ID NO: 195106 - RNA, 21 nt, Human
gaagggagauaaggguggggc

SEQ ID NO: 195107 - RNA, 26 nt, Human
gcaaagauuauuuauuuacuucaaga

SEQ ID NO: 195108 - RNA, 18 nt, Human
ggacaagagccagggugg

SEQ ID NO: 195109 - RNA, 18 nt, Human
ggacuaagaauugggagg

SEQ ID NO: 195110 - RNA, 21 nt, Human
ggagauucagcauaguccugc

SEQ ID NO: 195111 - RNA, 22 nt, Human
ggagugggggucucaaggugcu

SEQ ID NO: 195112 - RNA, 22 nt, Human
ggcucagaggccugacaugccu

SEQ ID NO: 195113 - RNA, 21 nt, Human
gggcaggagugggggucucaa

SEQ ID NO: 195114 - RNA, 20 nt, Human
gggccguuuuauaggauuug

SEQ ID NO: 195115 - RNA, 20 nt, Human
gggugauauuguggggaugu

SEQ ID NO: 195116 - RNA, 19 nt, Human
ggugcuuuuugagccagga

SEQ ID NO: 195117 - RNA, 23 nt, Human
gguggggccguuuuauaggauuu

SEQ ID NO: 195118 - RNA, 25 nt, Human
uaaaaggacuaagaauugggaggac

SEQ ID NO: 195119 - RNA, 22 nt, Human
uaagagaaggagaaaaacaggu

SEQ ID NO: 195120 - RNA, 26 nt, Human
uagaaugauaggugauggccuggaua

SEQ ID NO: 195121 - RNA, 24 nt, Human
uagcccacuugggacaagagccag

SEQ ID NO: 195122 - RNA, 24 nt, Human
ucucuggcgggcaggagugggggu

SEQ ID NO: 195123 - RNA, 23 nt, Human
ucuucaguuacuucaggccaucu

SEQ ID NO: 195124 - RNA, 20 nt, Human
ugaaaaacuaaauggaauaa

SEQ ID NO: 195125 - RNA, 23 nt, Human
ugaaaaacuaaauggaauaagag

SEQ ID NO: 195126 - RNA, 22 nt, Human
ugaagggagauaaggguggggc

SEQ ID NO: 195127 - RNA, 18 nt, Human
uggaauaagagaaggaga

SEQ ID NO: 195128 - RNA, 19 nt, Human
uggaaugucaucaguuaag

SEQ ID NO: 195129 - RNA, 25 nt, Human
uggcuuggcuugggcucagaggccc

SEQ ID NO: 195130 - RNA, 21 nt, Human
uggggauguuagaagaaacau

SEQ ID NO: 195131 - RNA, 20 nt, Human
ugggguggcgaaaauuuuug

SEQ ID NO: 195132 - RNA, 20 nt, Human
ugggguggcgaaaauuuuug

SEQ ID NO: 195133 - RNA, 19 nt, Human
ugggugaauucuucaaaug

SEQ ID NO: 195134 - RNA, 26 nt, Human
ugugguggaaugucaucaguuaaggg

SEQ ID NO: 195135 - RNA, 24 nt, Human
uuaaggcaaggaccggccauuuac

SEQ ID NO: 195136 - RNA, 24 nt, Human
uuagaagaaacauuuguuguauag

SEQ ID NO: 195137 - RNA, 21 nt, Human
uuuaacaagaaaacuucuacc

SEQ ID NO: 195138 - RNA, 24 nt, Human
uuuauuuacuucaagaguuaagag

SEQ ID NO: 195139 - RNA, 20 nt, Human
acaaagaggggagcagcggc

SEQ ID NO: 195140 - RNA, 20 nt, Human
acagguccaggccacaaaga

SEQ ID NO: 195141 - RNA, 24 nt, Human
aggcggcggcggaggcccccgggg

SEQ ID NO: 195142 - RNA, 21 nt, Human
aggcggugcggccuccuccag

SEQ ID NO: 195143 - RNA, 22 nt, Human
agggcgagaggcggcuccuugu

SEQ ID NO: 195144 - RNA, 26 nt, Human
caggcggcggcggaggcccccgggcg

SEQ ID NO: 195145 - RNA, 20 nt, Human
cagugcguguugaccgcggc

SEQ ID NO: 195146 - RNA, 19 nt, Human
ccgcggagcccggcgggcu

SEQ ID NO: 195147 - RNA, 20 nt, Human
ccgggcugccgcugccgccg

SEQ ID NO: 195148 - RNA, 21 nt, Human
ccuccuccagcuucuggaagg

SEQ ID NO: 195149 - RNA, 21 nt, Human
cggcagcgacggcagggcgag

SEQ ID NO: 195150 - RNA, 19 nt, Human
cggcgcuccgaggcacaga

SEQ ID NO: 195151 - RNA, 19 nt, Human
cggcgcugggagggcuguc

SEQ ID NO: 195152 - RNA, 26 nt, Human
cggcggcagcgacggcagggcgagag

SEQ ID NO: 195153 - RNA, 25 nt, Human
cggcgggcucuucuuggacaggucc

SEQ ID NO: 195154 - RNA, 19 nt, Human
cugccgcugccgccgcgaa

SEQ ID NO: 195155 - RNA, 23 nt, Human
gagggcuguccgggcgcgggggc

SEQ ID NO: 195156 - RNA, 21 nt, Human
gccacaaagaggggagcagcg

SEQ ID NO: 195157 - RNA, 23 nt, Human
ggccggggggcucgggucccggg

SEQ ID NO: 195158 - RNA, 18 nt, Human
ggggagcagcggcgcucc

SEQ ID NO: 195159 - RNA, 21 nt, Human
gggucccgacgcguacagcuc

SEQ ID NO: 195160 - RNA, 20 nt, Human
uacagcucggcgcagugcgu

SEQ ID NO: 195161 - RNA, 24 nt, Human
uccuccagcuucuggaagggcagc

SEQ ID NO: 195162 - RNA, 21 nt, Human
ucuggcgccgcggagcccggc

SEQ ID NO: 195163 - RNA, 19 nt, Human
ucuuggacagguccaggcc

SEQ ID NO: 195164 - RNA, 23 nt, Human
uggacagguccaggccacaaaga

SEQ ID NO: 195165 - RNA, 19 nt, Human
ugggagggcuguccgggcg

SEQ ID NO: 195166 - RNA, 18 nt, Human
uguccgggcgcgggggca

SEQ ID NO: 195167 - RNA, 26 nt, Human
uuguaggcggcggggccggcgcuggg

SEQ ID NO: 195168 - RNA, 20 nt, Human
aaauaccaaaaaacugagaa

SEQ ID NO: 195169 - RNA, 20 nt, Human
aacugccuaugaucaugaug

SEQ ID NO: 195170 - RNA, 21 nt, Human
accacguacugcuggcaaagc

SEQ ID NO: 195171 - RNA, 20 nt, Human
acuaaaaaagagcauuaaug

SEQ ID NO: 195172 - RNA, 20 nt, Human
agaagagaaggaaaggcaag

SEQ ID NO: 195173 - RNA, 29 nt, Human
agaauuuuauccaaauaaaugccacauua

SEQ ID NO: 195174 - RNA, 23 nt, Human
agacugcuuuagguagugagcca

SEQ ID NO: 195175 - RNA, 24 nt, Human
agccaccaguguccaaaaaaagga

SEQ ID NO: 195176 - RNA, 18 nt, Human
aggaaaggcaaguccaga

SEQ ID NO: 195177 - RNA, 21 nt, Human
aggcaaguccagagguggggg

SEQ ID NO: 195178 - RNA, 19 nt, Human
agguggcuugucagggccc

SEQ ID NO: 195179 - RNA, 22 nt, Human
augcauaucuuucuauauuaug

SEQ ID NO: 195180 - RNA, 23 nt, Human
caaaaaacugagaaaaugagcug

SEQ ID NO: 195181 - RNA, 24 nt, Human
caaaaauaaauaaauaaaaaggug

SEQ ID NO: 195182 - RNA, 24 nt, Human
caaaacaauacaguuaguguuaga

SEQ ID NO: 195183 - RNA, 26 nt, Human
caaagugcauaaaaucaaacauugua

SEQ ID NO: 195184 - RNA, 18 nt, Human
caauguacauagaaaaaa

SEQ ID NO: 195185 - RNA, 18 nt, Human
cacaaagagcaaaaggaa

SEQ ID NO: 195186 - RNA, 20 nt, Human
cagaggugggggugcgaggc

SEQ ID NO: 195187 - RNA, 21 nt, Human
cagaggugggggugcgaggcg

SEQ ID NO: 195188 - RNA, 20 nt, Human
cauaggccaaaaaaaauuuc

SEQ ID NO: 195189 - RNA, 18 nt, Human
ccaaccacaaagagcaaa

SEQ ID NO: 195190 - RNA, 25 nt, Human
cccagcccgacacacuggccgaagc

SEQ ID NO: 195191 - RNA, 25 nt, Human
ccuaugaucaugaugaaagguuacu

SEQ ID NO: 195192 - RNA, 25 nt, Human
ccucgugagacuagagagaagcggg

SEQ ID NO: 195193 - RNA, 20 nt, Human
cgaagcgacgaagagagugc

SEQ ID NO: 195194 - RNA, 18 nt, Human
cggcuccgagccucuccu

SEQ ID NO: 195195 - RNA, 23 nt, Human
cucaaaauaucuuuauaccaaca

SEQ ID NO: 195196 - RNA, 22 nt, Human
cuggccgaagcgacgaagagag

SEQ ID NO: 195197 - RNA, 21 nt, Human
gagaaggaaaggcaaguccag

SEQ ID NO: 195198 - RNA, 18 nt, Human
gcaaguccagaggugggg

SEQ ID NO: 195199 - RNA, 20 nt, Human
gcuggcucccuccacacgcc

SEQ ID NO: 195200 - RNA, 21 nt, Human
ggagaagagaaggaaaggcaa

SEQ ID NO: 195201 - RNA, 20 nt, Human
ggcccccaggcucgcuccgg

SEQ ID NO: 195202 - RNA, 22 nt, Human
ggggaucaaaaauugaacuaac

SEQ ID NO: 195203 - RNA, 21 nt, Human
guccagaggugggggugcgag

SEQ ID NO: 195204 - RNA, 19 nt, Human
uaaaccauacagcauuuaa

SEQ ID NO: 195205 - RNA, 23 nt, Human
uaaagaacauacuaaaaaagagc

SEQ ID NO: 195206 - RNA, 21 nt, Human
uacuaaaaaagagcauuaaug

SEQ ID NO: 195207 - RNA, 18 nt, Human
uagccaggcuucuaaaau

SEQ ID NO: 195208 - RNA, 19 nt, Human
ucagguggcuugucagggc

SEQ ID NO: 195209 - RNA, 22 nt, Human
ucagguggcuugucagggccca

SEQ ID NO: 195210 - RNA, 26 nt, Human
uccaaaaaaaggaaugaaauuaagaa

SEQ ID NO: 195211 - RNA, 20 nt, Human
uccagaggugggggugcgag

SEQ ID NO: 195212 - RNA, 23 nt, Human
uccagaggugggggugcgaggcg

SEQ ID NO: 195213 - RNA, 20 nt, Human
uccaugaguaacugcuggua

SEQ ID NO: 195214 - RNA, 22 nt, Human
uccucagguggcuugucaggga

SEQ ID NO: 195215 - RNA, 19 nt, Human
ugagaaaaugagcugucug

SEQ ID NO: 195216 - RNA, 19 nt, Human
ugagcaaauuaacauacua

SEQ ID NO: 195217 - RNA, 22 nt, Human
ugcaaugguuuaaauaccaaaa

SEQ ID NO: 195218 - RNA, 22 nt, Human
uggcaaagugacuauagaaaca

SEQ ID NO: 195219 - RNA, 18 nt, Human
ugggggugcgaggcggga

SEQ ID NO: 195220 - RNA, 22 nt, Human
uguagaaaauauaaauagacug

SEQ ID NO: 195221 - RNA, 21 nt, Human
uuaacaaugucauguuccagg

SEQ ID NO: 195222 - RNA, 24 nt, Human
uuagauccaaccacaaagagcaaa

SEQ ID NO: 195223 - RNA, 28 nt, Human
uuccuaaaauaaugcuucuaaaauuacc

SEQ ID NO: 195224 - RNA, 21 nt, Human
uucuauauuauguaaauggcu

SEQ ID NO: 195225 - RNA, 22 nt, Human
uucucugaauugagaauuuuau

SEQ ID NO: 195226 - RNA, 24 nt, Human
uuuaacaauuucauaggccaaaaa

SEQ ID NO: 195227 - RNA, 24 nt, Human
uuuuuuuuccacagaagauguuua

SEQ ID NO: 195228 - RNA, 22 nt, Human
uuuuuuuuuuuuuuuuccacag

SEQ ID NO: 195229 - RNA, 24 nt, Human
aaaaaaaacaaaaccaaaaaaccc

SEQ ID NO: 195230 - RNA, 21 nt, Human
aaaaaacccaaccaaccacca

SEQ ID NO: 195231 - RNA, 21 nt, Human
aaaaacccaaccaaccaccau

SEQ ID NO: 195232 - RNA, 18 nt, Human
aaaagaaaaggcauaaga

SEQ ID NO: 195233 - RNA, 18 nt, Human
aaaagaacagagaugacc

SEQ ID NO: 195234 - RNA, 18 nt, Human
aaacagaagucucacaac

SEQ ID NO: 195235 - RNA, 23 nt, Human
aaacccaaccaaccaccauaaga

SEQ ID NO: 195236 - RNA, 21 nt, Human
aaagugcugggauuaaacgug

SEQ ID NO: 195237 - RNA, 22 nt, Human
aaagugcugggauuaaacgugu

SEQ ID NO: 195238 - RNA, 24 nt, Human
aaagugcugggauuaaacguguga

SEQ ID NO: 195239 - RNA, 24 nt, Human
aaagugcugggauuacaggcguga

SEQ ID NO: 195240 - RNA, 23 nt, Human
aaaguucugggauuacaggcaug

SEQ ID NO: 195241 - RNA, 24 nt, Human
aaaguucugggauuacaggcaugc

SEQ ID NO: 195242 - RNA, 22 nt, Human
aacagaaaagaaaaggcauaag

SEQ ID NO: 195243 - RNA, 24 nt, Human
aacuagcugagacuacaggcaugc

SEQ ID NO: 195244 - RNA, 20 nt, Human
aacugggcugugugaacccu

SEQ ID NO: 195245 - RNA, 19 nt, Human
aagaaggaagacgcuguuu

SEQ ID NO: 195246 - RNA, 21 nt, Human
aagagggggagaauggcuuug

SEQ ID NO: 195247 - RNA, 24 nt, Human
aagcaaucaucccgucuuggccuc

SEQ ID NO: 195248 - RNA, 24 nt, Human
aagcaauucucccaccuuagcucc

SEQ ID NO: 195249 - RNA, 20 nt, Human
aagcugucaacaaacaacaa

SEQ ID NO: 195250 - RNA, 21 nt, Human
aagugcugggauuaaacgugu

SEQ ID NO: 195251 - RNA, 19 nt, Human
aagugcugggauuacaggc

SEQ ID NO: 195252 - RNA, 19 nt, Human
aagugcugggauuacaggc

SEQ ID NO: 195253 - RNA, 21 nt, Human
aagugcuugauggcuaccacc

SEQ ID NO: 195254 - RNA, 18 nt, Human
acagccacuuccugcgua

SEQ ID NO: 195255 - RNA, 21 nt, Human
accacaguuggggggcccugg

SEQ ID NO: 195256 - RNA, 24 nt, Human
accauguuggacaggcuggucuug

SEQ ID NO: 195257 - RNA, 24 nt, Human
accauguuggccaggcuagucuug

SEQ ID NO: 195258 - RNA, 23 nt, Human
accucagccucucaaagugcugg

SEQ ID NO: 195259 - RNA, 23 nt, Human
accuuagcuccccaacuagcuga

SEQ ID NO: 195260 - RNA, 18 nt, Human
acgggguuucaccauguu

SEQ ID NO: 195261 - RNA, 23 nt, Human
acgggguuucaccauguuggcca

SEQ ID NO: 195262 - RNA, 24 nt, Human
acgggguuucaccauguuggccag

SEQ ID NO: 195263 - RNA, 18 nt, Human
acucugucacccaggccg

SEQ ID NO: 195264 - RNA, 27 nt, Human
acucugucacccaggccggagugcacu

SEQ ID NO: 195265 - RNA, 25 nt, Human
acuuaaaaaaaaaaaacaaaaccaa

SEQ ID NO: 195266 - RNA, 21 nt, Human
agaagaaaacagaaaagaaaa

SEQ ID NO: 195267 - RNA, 22 nt, Human
agaagaaaacagaaaagaaaag

SEQ ID NO: 195268 - RNA, 18 nt, Human
agacuacaggcaugcacc

SEQ ID NO: 195269 - RNA, 24 nt, Human
agacuacaggcaugcaccaucaug

SEQ ID NO: 195270 - RNA, 20 nt, Human
agacuguuugccccauuugu

SEQ ID NO: 195271 - RNA, 22 nt, Human
agagacaggaucauucagauaa

SEQ ID NO: 195272 - RNA, 22 nt, Human
agaucagaaggucacuuaaaug

SEQ ID NO: 195273 - RNA, 21 nt, Human
agauggggguugguucacagu

SEQ ID NO: 195274 - RNA, 26 nt, Human
aggcaggcgguugacaacagaccaga

SEQ ID NO: 195275 - RNA, 23 nt, Human
aggcaugcgccacugugcccggc

SEQ ID NO: 195276 - RNA, 22 nt, Human
aggcgccugccaccaugcccgg

SEQ ID NO: 195277 - RNA, 19 nt, Human
aggcggacagaggcuuucc

SEQ ID NO: 195278 - RNA, 23 nt, Human
aggcgugagccacugugcccggc

SEQ ID NO: 195279 - RNA, 21 nt, Human
agggaagccacgcaccauucc

SEQ ID NO: 195280 - RNA, 23 nt, Human
agggaagccacgcaccauuccuu

SEQ ID NO: 195281 - RNA, 24 nt, Human
aggugauccacccgccccugccuc

SEQ ID NO: 195282 - RNA, 19 nt, Human
aguagagaugaggucuugc

SEQ ID NO: 195283 - RNA, 18 nt, Human
aguagcugggauuacggg

SEQ ID NO: 195284 - RNA, 18 nt, Human
aguagcugggauuauagg

SEQ ID NO: 195285 - RNA, 22 nt, Human
agugcagugggaaaucauggcu

SEQ ID NO: 195286 - RNA, 19 nt, Human
auggggguugguucacagu

SEQ ID NO: 195287 - RNA, 22 nt, Human
auguggcugaaaggaguuggag

SEQ ID NO: 195288 - RNA, 24 nt, Human
auuuuuguauuuuuaguagagacg

SEQ ID NO: 195289 - RNA, 21 nt, Human
caaaaaacccaaccaaccacc

SEQ ID NO: 195290 - RNA, 22 nt, Human
caaagugcugggauuaaacgug

SEQ ID NO: 195291 - RNA, 21 nt, Human
caaagugcugggauuacaggc

SEQ ID NO: 195292 - RNA, 24 nt, Human
caaagugcugggauuacaggcgug

SEQ ID NO: 195293 - RNA, 24 nt, Human
caaaguucugggauuacaggcaug

SEQ ID NO: 195294 - RNA, 23 nt, Human
caagaucagaaggucacuuaaau

SEQ ID NO: 195295 - RNA, 28 nt, Human
caagcaauucucccaccuuagcucccca

SEQ ID NO: 195296 - RNA, 21 nt, Human
caagucaguaacaguccagca

SEQ ID NO: 195297 - RNA, 18 nt, Human
caauucauuucuguaucu

SEQ ID NO: 195298 - RNA, 21 nt, Human
cacaacugggacagggaagcc

SEQ ID NO: 195299 - RNA, 23 nt, Human
cacaacugggacagggaagccac

SEQ ID NO: 195300 - RNA, 20 nt, Human
cacagccaggacacuccugc

SEQ ID NO: 195301 - RNA, 23 nt, Human
cacaguuggggggcccuggagac

SEQ ID NO: 195302 - RNA, 24 nt, Human
caccaugcccggcuaauuuuugua

SEQ ID NO: 195303 - RNA, 23 nt, Human
caccauguuggacaggcuggucu

SEQ ID NO: 195304 - RNA, 24 nt, Human
caccauguuggacaggcuggucuu

SEQ ID NO: 195305 - RNA, 21 nt, Human
caccauguuggccaggcuagu

SEQ ID NO: 195306 - RNA, 24 nt, Human
caccauguuggccaggcuagucuu

SEQ ID NO: 195307 - RNA, 27 nt, Human
caccauguuggccaggcuagucuugaa

SEQ ID NO: 195308 - RNA, 23 nt, Human
cacccgccccugccucccaaagu

SEQ ID NO: 195309 - RNA, 21 nt, Human
caccgagaggccugggcagca

SEQ ID NO: 195310 - RNA, 18 nt, Human
caccucagccucucaaag

SEQ ID NO: 195311 - RNA, 21 nt, Human
caccuuagcuccccaacuagc

SEQ ID NO: 195312 - RNA, 22 nt, Human
caccuuagcuccccaacuagcu

SEQ ID NO: 195313 - RNA, 18 nt, Human
cacucacucuccuucugc

SEQ ID NO: 195314 - RNA, 23 nt, Human
cacucugucacccaggccggagu

SEQ ID NO: 195315 - RNA, 24 nt, Human
cacucugucacccaggccggagug

SEQ ID NO: 195316 - RNA, 22 nt, Human
cacugcaaccucugccucuggg

SEQ ID NO: 195317 - RNA, 19 nt, Human
cagagagggaguuggggag

SEQ ID NO: 195318 - RNA, 20 nt, Human
cagccucaaacuccugggcu

SEQ ID NO: 195319 - RNA, 21 nt, Human
cagccucaaacuccugggcug

SEQ ID NO: 195320 - RNA, 20 nt, Human
cagccuccugaguagcuggg

SEQ ID NO: 195321 - RNA, 24 nt, Human
cagccucgacuucccaagcucaag

SEQ ID NO: 195322 - RNA, 22 nt, Human
cagcuccauucaagcaugugau

SEQ ID NO: 195323 - RNA, 18 nt, Human
caggcuagucuugaacuc

SEQ ID NO: 195324 - RNA, 22 nt, Human
caggugauucuccugucucagc

SEQ ID NO: 195325 - RNA, 26 nt, Human
caguagcugggauuauaggcgccugc

SEQ ID NO: 195326 - RNA, 24 nt, Human
cagugguguggcugccccugggac

SEQ ID NO: 195327 - RNA, 23 nt, Human
caugcaccaucaugcccggcuaa

SEQ ID NO: 195328 - RNA, 24 nt, Human
cauguuggacaggcuggucuugaa

SEQ ID NO: 195329 - RNA, 24 nt, Human
cauguuggccaggcuagucuugaa

SEQ ID NO: 195330 - RNA, 20 nt, Human
cauuacacuagacuguuugc

SEQ ID NO: 195331 - RNA, 23 nt, Human
cauuacacuagacuguuugcccc

SEQ ID NO: 195332 - RNA, 23 nt, Human
ccaaaaaacccaaccaaccacca

SEQ ID NO: 195333 - RNA, 21 nt, Human
ccaaagugcugggauuaaacg

SEQ ID NO: 195334 - RNA, 22 nt, Human
ccaaagugcugggauuaaacgu

SEQ ID NO: 195335 - RNA, 24 nt, Human
ccaaaguucugggauuacaggcau

SEQ ID NO: 195336 - RNA, 21 nt, Human
ccacaacugggacagggaagc

SEQ ID NO: 195337 - RNA, 20 nt, Human
ccagcacuuggucagugugg

SEQ ID NO: 195338 - RNA, 23 nt, Human
ccaggccggagugcacuggcaca

SEQ ID NO: 195339 - RNA, 24 nt, Human
cccaaaguucugggauuacaggca

SEQ ID NO: 195340 - RNA, 23 nt, Human
cccaagcucaagcaauucuccca

SEQ ID NO: 195341 - RNA, 22 nt, Human
cccaguagcugggauuauaggc

SEQ ID NO: 195342 - RNA, 22 nt, Human
ccccaacuagcugagacuacag

SEQ ID NO: 195343 - RNA, 22 nt, Human
ccccaccaccccucuucguacc

SEQ ID NO: 195344 - RNA, 24 nt, Human
ccccaccaccccucuucguaccua

SEQ ID NO: 195345 - RNA, 19 nt, Human
ccccaguagcugggauuau

SEQ ID NO: 195346 - RNA, 20 nt, Human
cccccaccaccccucuucgu

SEQ ID NO: 195347 - RNA, 18 nt, Human
cccucuugucccucuuuc

SEQ ID NO: 195348 - RNA, 19 nt, Human
cccucuugucccucuuucu

SEQ ID NO: 195349 - RNA, 21 nt, Human
cccugccccccaccaccccuc

SEQ ID NO: 195350 - RNA, 24 nt, Human
ccgccccugccucccaaagugcug

SEQ ID NO: 195351 - RNA, 24 nt, Human
ccucugggguucaggugauucucc

SEQ ID NO: 195352 - RNA, 22 nt, Human
ccugaccucaggugauccaccc

SEQ ID NO: 195353 - RNA, 23 nt, Human
ccugaccucaggugauccacccg

SEQ ID NO: 195354 - RNA, 24 nt, Human
ccugaccucaggugauccuaccac

SEQ ID NO: 195355 - RNA, 23 nt, Human
ccugaguagcugggauuacgggc

SEQ ID NO: 195356 - RNA, 24 nt, Human
ccugaguagcugggauuacgggca

SEQ ID NO: 195357 - RNA, 24 nt, Human
ccugccucagccuccccaguagcu

SEQ ID NO: 195358 - RNA, 24 nt, Human
ccugucucagccuccugaguagcu

SEQ ID NO: 195359 - RNA, 28 nt, Human
ccuguggcuggggaaauaaccggggucc

SEQ ID NO: 195360 - RNA, 29 nt, Human
cgacuucccaagcucaagcaauucuuuuu

SEQ ID NO: 195361 - RNA, 24 nt, Human
cgcucugucacucaggcuggagug

SEQ ID NO: 195362 - RNA, 20 nt, Human
cucaagcaauucucccaccu

SEQ ID NO: 195363 - RNA, 24 nt, Human
cucaagcaauucucccaccuuagc

SEQ ID NO: 195364 - RNA, 23 nt, Human
cucacugcaaccucugccucugg

SEQ ID NO: 195365 - RNA, 24 nt, Human
cucagccuccccaguagcugggau

SEQ ID NO: 195366 - RNA, 24 nt, Human
cucagccuccugaguagcugggau

SEQ ID NO: 195367 - RNA, 21 nt, Human
cucauugcagccucaaacucc

SEQ ID NO: 195368 - RNA, 23 nt, Human
cuccugccucagccuccccagua

SEQ ID NO: 195369 - RNA, 24 nt, Human
cucgcucugucacucaggcuggag

SEQ ID NO: 195370 - RNA, 20 nt, Human
cucuuguugcccaggcugga

SEQ ID NO: 195371 - RNA, 19 nt, Human
cugacccuggagcauggac

SEQ ID NO: 195372 - RNA, 19 nt, Human
cugcaaccucugccucugg

SEQ ID NO: 195373 - RNA, 24 nt, Human
cugcaaccucugccucugggguuc

SEQ ID NO: 195374 - RNA, 23 nt, Human
cugcagccucgacuucccaagcu

SEQ ID NO: 195375 - RNA, 21 nt, Human
cugccccccaccaccccucuu

SEQ ID NO: 195376 - RNA, 20 nt, Human
cugcuucuguuuaagugcuu

SEQ ID NO: 195377 - RNA, 24 nt, Human
cuggaguacaauggcgugaucuca

SEQ ID NO: 195378 - RNA, 18 nt, Human
cuuaacccaguauggagg

SEQ ID NO: 195379 - RNA, 22 nt, Human
cuuccggguuugucaauugcgu

SEQ ID NO: 195380 - RNA, 20 nt, Human
cuucguaccuaggcuugcuc

SEQ ID NO: 195381 - RNA, 22 nt, Human
cuuuacagccacuuccugcgua

SEQ ID NO: 195382 - RNA, 18 nt, Human
gacccgcaucaagaacac

SEQ ID NO: 195383 - RNA, 27 nt, Human
gaccucaggugauccacccgccccugc

SEQ ID NO: 195384 - RNA, 24 nt, Human
gaccucaggugauccuaccaccuc

SEQ ID NO: 195385 - RNA, 21 nt, Human
gacuacaggcaugcaccauca

SEQ ID NO: 195386 - RNA, 24 nt, Human
gagacgggguuucaccauguuggc

SEQ ID NO: 195387 - RNA, 20 nt, Human
gagggagucuuugggaagug

SEQ ID NO: 195388 - RNA, 22 nt, Human
gaguagcugggauuacgggcac

SEQ ID NO: 195389 - RNA, 18 nt, Human
gauuacaggcaugcgcca

SEQ ID NO: 195390 - RNA, 21 nt, Human
gauuacaggcaugcgccacug

SEQ ID NO: 195391 - RNA, 24 nt, Human
gauuacaggcaugcgccacugugc

SEQ ID NO: 195392 - RNA, 18 nt, Human
gauuacaggcgugagcca

SEQ ID NO: 195393 - RNA, 21 nt, Human
gauuacaggcgugagccacug

SEQ ID NO: 195394 - RNA, 24 nt, Human
gauuacaggcgugagccacugugc

SEQ ID NO: 195395 - RNA, 22 nt, Human
gauuauaggcgccugccaccau

SEQ ID NO: 195396 - RNA, 21 nt, Human
gauucuccugucucagccucc

SEQ ID NO: 195397 - RNA, 20 nt, Human
gcagaaagcagcauucaaca

SEQ ID NO: 195398 - RNA, 20 nt, Human
gcagccucaaacuccugggc

SEQ ID NO: 195399 - RNA, 18 nt, Human
gccacugugcccggccac

SEQ ID NO: 195400 - RNA, 21 nt, Human
gccacugugcccggcugggca

SEQ ID NO: 195401 - RNA, 24 nt, Human
gcccaggcuggaguacaauggcgu

SEQ ID NO: 195402 - RNA, 19 nt, Human
gcccaguaugcacguucug

SEQ ID NO: 195403 - RNA, 23 nt, Human
gccccugccucccaaagugcugg

SEQ ID NO: 195404 - RNA, 22 nt, Human
gcccggcuaauuuuuguauuuu

SEQ ID NO: 195405 - RNA, 23 nt, Human
gccgcuggcucuguccuuucuca

SEQ ID NO: 195406 - RNA, 21 nt, Human
gccugacccuggagcauggac

SEQ ID NO: 195407 - RNA, 23 nt, Human
gcuagucuugaacuccugaccuc

SEQ ID NO: 195408 - RNA, 21 nt, Human
gcucuuguugcccaggcugga

SEQ ID NO: 195409 - RNA, 20 nt, Human
gcugccccugggacuccaag

SEQ ID NO: 195410 - RNA, 19 nt, Human
gcuggaguacaauggcgug

SEQ ID NO: 195411 - RNA, 23 nt, Human
gcuggucuugaacuccugaccuc

SEQ ID NO: 195412 - RNA, 20 nt, Human
gcuguugggcugcccauccc

SEQ ID NO: 195413 - RNA, 21 nt, Human
ggaaaggcacucacucuccuu

SEQ ID NO: 195414 - RNA, 19 nt, Human
ggaaauguugacccgcauc

SEQ ID NO: 195415 - RNA, 21 nt, Human
ggacagaggcuuuccgccggg

SEQ ID NO: 195416 - RNA, 18 nt, Human
ggagggagucuuugggaa

SEQ ID NO: 195417 - RNA, 25 nt, Human
ggaguuggggaggggggugggcuag

SEQ ID NO: 195418 - RNA, 24 nt, Human
ggauuacaggcaugcgccacugug

SEQ ID NO: 195419 - RNA, 22 nt, Human
ggcacuggguaauggcaguggu

SEQ ID NO: 195420 - RNA, 24 nt, Human
ggcuagucuugaacuccugaccuc

SEQ ID NO: 195421 - RNA, 22 nt, Human
ggcuggaguacaauggcgugau

SEQ ID NO: 195422 - RNA, 24 nt, Human
ggcuggucuugaacuccugaccuc

SEQ ID NO: 195423 - RNA, 19 nt, Human
gggagauggggguugguuc

SEQ ID NO: 195424 - RNA, 18 nt, Human
gggaggggggugggcuag

SEQ ID NO: 195425 - RNA, 19 nt, Human
gggcagagaaucuuaauuu

SEQ ID NO: 195426 - RNA, 19 nt, Human
ggggaggggggugggcuag

SEQ ID NO: 195427 - RNA, 19 nt, Human
ggggguuucaccauguugg

SEQ ID NO: 195428 - RNA, 24 nt, Human
gggguucaggugauucuccugucu

SEQ ID NO: 195429 - RNA, 18 nt, Human
gggguuucaccauguugg

SEQ ID NO: 195430 - RNA, 23 nt, Human
gggguuucaccauguuggccagg

SEQ ID NO: 195431 - RNA, 20 nt, Human
ggguucaggugauucuccug

SEQ ID NO: 195432 - RNA, 22 nt, Human
ggguuucaccauguuggccagg

SEQ ID NO: 195433 - RNA, 19 nt, Human
ggucuugaacuccugaccu

SEQ ID NO: 195434 - RNA, 18 nt, Human
ggugugcccuuugggaga

SEQ ID NO: 195435 - RNA, 19 nt, Human
gguucaggugauucuccug

SEQ ID NO: 195436 - RNA, 23 nt, Human
guagagacgggguuucaccaugu

SEQ ID NO: 195437 - RNA, 18 nt, Human
guagcugggauuacgggc

SEQ ID NO: 195438 - RNA, 18 nt, Human
guagcugggauuauaggc

SEQ ID NO: 195439 - RNA, 23 nt, Human
gugagacaccaugucuggccuuc

SEQ ID NO: 195440 - RNA, 24 nt, Human
gugauccacccgccccugccuccc

SEQ ID NO: 195441 - RNA, 22 nt, Human
gugauccuaccaccucagccuc

SEQ ID NO: 195442 - RNA, 23 nt, Human
gugauucuccugucucagccucc

SEQ ID NO: 195443 - RNA, 24 nt, Human
guggaacacauggcagaacuucca

SEQ ID NO: 195444 - RNA, 21 nt, Human
guugggcugcccaucccuggc

SEQ ID NO: 195445 - RNA, 20 nt, Human
uaacaguccagcaccuuggc

SEQ ID NO: 195446 - RNA, 20 nt, Human
uaagcagaaagcagcauuca

SEQ ID NO: 195447 - RNA, 24 nt, Human
uaagcagaaagcagcauucaacau

SEQ ID NO: 195448 - RNA, 23 nt, Human
uaagucgaugaaguuuuuaaaca

SEQ ID NO: 195449 - RNA, 24 nt, Human
uaauuuuugguauuuuuaguagag

SEQ ID NO: 195450 - RNA, 25 nt, Human
uaauuuuugguauuuuuaguagaga

SEQ ID NO: 195451 - RNA, 24 nt, Human
uaauuuuuguauuuuuaguagaga

SEQ ID NO: 195452 - RNA, 23 nt, Human
uacaggcaugcaccaucaugccc

SEQ ID NO: 195453 - RNA, 23 nt, Human
uacaggcaugcgccacugugccc

SEQ ID NO: 195454 - RNA, 23 nt, Human
uacaggcgugagccacugugccc

SEQ ID NO: 195455 - RNA, 23 nt, Human
uacaggcgugagccacugugccc

SEQ ID NO: 195456 - RNA, 24 nt, Human
uaccacaguuggggggcccuggag

SEQ ID NO: 195457 - RNA, 18 nt, Human
uacccauuguuguggggg

SEQ ID NO: 195458 - RNA, 22 nt, Human
uagagacgggguuucaccaugu

SEQ ID NO: 195459 - RNA, 20 nt, Human
uagagaugaggucuugcuau

SEQ ID NO: 195460 - RNA, 23 nt, Human
uagagucacaccugaaguucuga

SEQ ID NO: 195461 - RNA, 19 nt, Human
uaggcgccugccaccaugc

SEQ ID NO: 195462 - RNA, 24 nt, Human
uaguagagacgggguuucaccaug

SEQ ID NO: 195463 - RNA, 24 nt, Human
uaguagagaugaggucuugcuaug

SEQ ID NO: 195464 - RNA, 25 nt, Human
uaguagagauggggguuucaccaug

SEQ ID NO: 195465 - RNA, 23 nt, Human
uagucagcaggacuggauguugg

SEQ ID NO: 195466 - RNA, 24 nt, Human
uaugaugcccagccuggucucaaa

SEQ ID NO: 195467 - RNA, 25 nt, Human
ucaaaaaaauacuaagcagaaagca

SEQ ID NO: 195468 - RNA, 22 nt, Human
ucaaagugcugggauuacaggc

SEQ ID NO: 195469 - RNA, 24 nt, Human
ucaaagugcugggauuacaggcgu

SEQ ID NO: 195470 - RNA, 18 nt, Human
ucaagcaauucucccacc

SEQ ID NO: 195471 - RNA, 24 nt, Human
ucacucaauucauuucuguaucuc

SEQ ID NO: 195472 - RNA, 23 nt, Human
ucacucaggcuggagugcagugg

SEQ ID NO: 195473 - RNA, 19 nt, Human
ucacugcaaccucugccuc

SEQ ID NO: 195474 - RNA, 22 nt, Human
ucacugcaaccucugccucugg

SEQ ID NO: 195475 - RNA, 23 nt, Human
ucacugcaaccucugccucuggg

SEQ ID NO: 195476 - RNA, 20 nt, Human
ucagccccaggggugugccc

SEQ ID NO: 195477 - RNA, 18 nt, Human
ucagccuccccaguagcu

SEQ ID NO: 195478 - RNA, 20 nt, Human
ucagccuccugaguagcugg

SEQ ID NO: 195479 - RNA, 18 nt, Human
ucaggguaguguccuggu

SEQ ID NO: 195480 - RNA, 22 nt, Human
ucaugugcccucuguccucauc

SEQ ID NO: 195481 - RNA, 24 nt, Human
ucauugcagccucaaacuccuggg

SEQ ID NO: 195482 - RNA, 18 nt, Human
uccauggcacugcccaaa

SEQ ID NO: 195483 - RNA, 19 nt, Human
uccauggcacugcccaaag

SEQ ID NO: 195484 - RNA, 18 nt, Human
ucccaaagugcugggauu

SEQ ID NO: 195485 - RNA, 24 nt, Human
ucccaaaguucugggauuacaggc

SEQ ID NO: 195486 - RNA, 21 nt, Human
ucccaagaucagaaggucacu

SEQ ID NO: 195487 - RNA, 24 nt, Human
uccccaguagcugggauuauaggc

SEQ ID NO: 195488 - RNA, 24 nt, Human
uccugaguagcugggauuacgggc

SEQ ID NO: 195489 - RNA, 24 nt, Human
ucgcucugucacucaggcuggagu

SEQ ID NO: 195490 - RNA, 23 nt, Human
ucucaaacuccugagcucaagca

SEQ ID NO: 195491 - RNA, 24 nt, Human
ucucaaagugcugggauuacaggc

SEQ ID NO: 195492 - RNA, 19 nt, Human
ucucacucugucacccagg

SEQ ID NO: 195493 - RNA, 24 nt, Human
ucucacucugucacccaggccgga

SEQ ID NO: 195494 - RNA, 26 nt, Human
ucucacucugucacccaggccggagu

SEQ ID NO: 195495 - RNA, 27 nt, Human
ucucacucugucacccaggccggagug

SEQ ID NO: 195496 - RNA, 22 nt, Human
ucucaggguaguguccugguuu

SEQ ID NO: 195497 - RNA, 24 nt, Human
ucuccugucucagccuccugagua

SEQ ID NO: 195498 - RNA, 22 nt, Human
ucuccuugcuuugggauccaag

SEQ ID NO: 195499 - RNA, 19 nt, Human
ucucgcucugucacucagg

SEQ ID NO: 195500 - RNA, 23 nt, Human
ucucgcucugucacucaggcugg

SEQ ID NO: 195501 - RNA, 24 nt, Human
ucucgcucugucacucaggcugga

SEQ ID NO: 195502 - RNA, 18 nt, Human
ucuggccuucuuucucuu

SEQ ID NO: 195503 - RNA, 24 nt, Human
ucugucacucaggcuggagugcag

SEQ ID NO: 195504 - RNA, 21 nt, Human
ucuguccuuucucauuuucuc

SEQ ID NO: 195505 - RNA, 21 nt, Human
ucuguccuuucucauuuucuc

SEQ ID NO: 195506 - RNA, 23 nt, Human
ucuugaacuccugaccucaggug

SEQ ID NO: 195507 - RNA, 23 nt, Human
ucuugaacuccugaccucaggug

SEQ ID NO: 195508 - RNA, 23 nt, Human
ucuugcuaugaugcccagccugg

SEQ ID NO: 195509 - RNA, 19 nt, Human
ucuuugggaagugucaugc

SEQ ID NO: 195510 - RNA, 28 nt, Human
ugaaaagacugagaagaaaacagaaaag

SEQ ID NO: 195511 - RNA, 23 nt, Human
ugaaacuuaaaaaaaaaaaacaa

SEQ ID NO: 195512 - RNA, 21 nt, Human
ugacaacagaccagaaggucu

SEQ ID NO: 195513 - RNA, 19 nt, Human
ugacagcuacuuccucaug

SEQ ID NO: 195514 - RNA, 21 nt, Human
ugaccucaggugauccacccg

SEQ ID NO: 195515 - RNA, 24 nt, Human
ugaccucaggugauccacccgccc

SEQ ID NO: 195516 - RNA, 23 nt, Human
ugaccucaggugauccuaccacc

SEQ ID NO: 195517 - RNA, 24 nt, Human
ugaccucaggugauccuaccaccu

SEQ ID NO: 195518 - RNA, 25 nt, Human
ugaccucaggugauccuaccaccuc

SEQ ID NO: 195519 - RNA, 20 nt, Human
ugagacaccaugucuggccc

SEQ ID NO: 195520 - RNA, 21 nt, Human
ugagacuacaggcaugcacca

SEQ ID NO: 195521 - RNA, 31 nt, Human
ugagacuacaggcaugcaccaucaugcccgg

SEQ ID NO: 195522 - RNA, 22 nt, Human
ugagccucgucacgggaacugg

SEQ ID NO: 195523 - RNA, 24 nt, Human
ugaucucaccagcuccauucaagc

SEQ ID NO: 195524 - RNA, 20 nt, Human
ugauucuccugucucagccu

SEQ ID NO: 195525 - RNA, 21 nt, Human
ugcccaggcuggaguacaaug

SEQ ID NO: 195526 - RNA, 24 nt, Human
ugcccaggcuggaguacaauggcg

SEQ ID NO: 195527 - RNA, 18 nt, Human
ugccccuuucucauggug

SEQ ID NO: 195528 - RNA, 21 nt, Human
ugcccggcuaauuuuguuuuu

SEQ ID NO: 195529 - RNA, 24 nt, Human
ugcccggcuaauuuuuguauuuuu

SEQ ID NO: 195530 - RNA, 21 nt, Human
ugccucagccuccccaguagc

SEQ ID NO: 195531 - RNA, 24 nt, Human
ugccucagccuccccaguagcugg

SEQ ID NO: 195532 - RNA, 24 nt, Human
ugcucuuguugcccaggcuggagu

SEQ ID NO: 195533 - RNA, 24 nt, Human
ugcugggauuaaacgugugagaca

SEQ ID NO: 195534 - RNA, 24 nt, Human
ugcugggauuacaggcgugagcca

SEQ ID NO: 195535 - RNA, 24 nt, Human
uggaaauccauggcacugcccaaa

SEQ ID NO: 195536 - RNA, 24 nt, Human
uggacaggcuggucuugaacuccu

SEQ ID NO: 195537 - RNA, 20 nt, Human
uggagccgcuggcucugucc

SEQ ID NO: 195538 - RNA, 23 nt, Human
uggaggcggagauggagcaccga

SEQ ID NO: 195539 - RNA, 19 nt, Human
uggaguacaauggcgugau

SEQ ID NO: 195540 - RNA, 19 nt, Human
uggagugcagugggaaauc

SEQ ID NO: 195541 - RNA, 23 nt, Human
uggagugcagugggaaaucaugg

SEQ ID NO: 195542 - RNA, 19 nt, Human
uggcagaacuuccagcaga

SEQ ID NO: 195543 - RNA, 22 nt, Human
uggcagugguguggcugccccu

SEQ ID NO: 195544 - RNA, 24 nt, Human
uggccaggcuagucuugaacuccu

SEQ ID NO: 195545 - RNA, 22 nt, Human
uggcccugccccccaccacccc

SEQ ID NO: 195546 - RNA, 24 nt, Human
uggcgugaucucagcucacugcaa

SEQ ID NO: 195547 - RNA, 24 nt, Human
uggcucauugcagccucaaacucc

SEQ ID NO: 195548 - RNA, 18 nt, Human
uggcuuuggcauucacag

SEQ ID NO: 195549 - RNA, 18 nt, Human
ugggaagugcuugauggc

SEQ ID NO: 195550 - RNA, 18 nt, Human
ugggaagugcuugauggc

SEQ ID NO: 195551 - RNA, 22 nt, Human
ugggaagugcuugauggcuacc

SEQ ID NO: 195552 - RNA, 21 nt, Human
ugggauuacaggcaugcgcca

SEQ ID NO: 195553 - RNA, 22 nt, Human
ugggauuacaggcaugcgccac

SEQ ID NO: 195554 - RNA, 22 nt, Human
ugggauuacaggcaugcgccac

SEQ ID NO: 195555 - RNA, 24 nt, Human
ugggauuacaggcaugcgccacug

SEQ ID NO: 195556 - RNA, 26 nt, Human
ugggauuacaggcaugcgccacugug

SEQ ID NO: 195557 - RNA, 21 nt, Human
ugggauuacaggcgugagcca

SEQ ID NO: 195558 - RNA, 22 nt, Human
ugggauuacaggcgugagccac

SEQ ID NO: 195559 - RNA, 22 nt, Human
ugggauuacaggcgugagccac

SEQ ID NO: 195560 - RNA, 22 nt, Human
ugggauuacaggcgugagccac

SEQ ID NO: 195561 - RNA, 24 nt, Human
ugggauuacaggcgugagccacug

SEQ ID NO: 195562 - RNA, 26 nt, Human
ugggauuacaggcgugagccacugug

SEQ ID NO: 195563 - RNA, 20 nt, Human
ugggauuacgggcacccguc

SEQ ID NO: 195564 - RNA, 22 nt, Human
ugggauuacgggcacccgucac

SEQ ID NO: 195565 - RNA, 21 nt, Human
ugggauuauaggcgccugcca

SEQ ID NO: 195566 - RNA, 22 nt, Human
ugggauuauaggcgccugccac

SEQ ID NO: 195567 - RNA, 24 nt, Human
ugggauuauaggcgccugccacca

SEQ ID NO: 195568 - RNA, 25 nt, Human
ugggauuauaggcgccugccaccau

SEQ ID NO: 195569 - RNA, 19 nt, Human
ugggcagagaaucuuaauu

SEQ ID NO: 195570 - RNA, 22 nt, Human
uggggaggggggugggcuaggg

SEQ ID NO: 195571 - RNA, 24 nt, Human
uggugggugcccaguaugcacguu

SEQ ID NO: 195572 - RNA, 21 nt, Human
uguauuuuuaguagagacggg

SEQ ID NO: 195573 - RNA, 24 nt, Human
ugucucagccuccugaguagcugg

SEQ ID NO: 195574 - RNA, 19 nt, Human
ugugaucaaguuuuugagc

SEQ ID NO: 195575 - RNA, 22 nt, Human
uguggcugaaaggaguuggagc

SEQ ID NO: 195576 - RNA, 18 nt, Human
uguugugggggucaaaua

SEQ ID NO: 195577 - RNA, 26 nt, Human
uguuuguuuuuaaagagauggagucu

SEQ ID NO: 195578 - RNA, 24 nt, Human
uguuuuugaauuuuaguagagaug

SEQ ID NO: 195579 - RNA, 24 nt, Human
uuacacugacauaugggguguugg

SEQ ID NO: 195580 - RNA, 18 nt, Human
uuagccucugcuucuguu

SEQ ID NO: 195581 - RNA, 18 nt, Human
uuaguagagacgggguuu

SEQ ID NO: 195582 - RNA, 22 nt, Human
uuaguagagacgggguuucacc

SEQ ID NO: 195583 - RNA, 24 nt, Human
uuaguagagacgggguuucaccau

SEQ ID NO: 195584 - RNA, 18 nt, Human
uuaguagagaugaggucu

SEQ ID NO: 195585 - RNA, 18 nt, Human
uuaguagagaugaggucu

SEQ ID NO: 195586 - RNA, 25 nt, Human
uuaguagagauggggguuucaccau

SEQ ID NO: 195587 - RNA, 18 nt, Human
uuccagcagagcacugcg

SEQ ID NO: 195588 - RNA, 23 nt, Human
uugcucuuguugcccaggcugga

SEQ ID NO: 195589 - RNA, 20 nt, Human
uuggagcagauccugggaag

SEQ ID NO: 195590 - RNA, 21 nt, Human
uuggagccgcuggcucugucc

SEQ ID NO: 195591 - RNA, 19 nt, Human
uugguccucucuguugagu

SEQ ID NO: 195592 - RNA, 23 nt, Human
uuguuuuugaauuuuaguagaga

SEQ ID NO: 195593 - RNA, 21 nt, Human
uuucaccauguuggacaggcu

SEQ ID NO: 195594 - RNA, 24 nt, Human
uuucaccauguuggccaggcuagu

SEQ ID NO: 195595 - RNA, 20 nt, Human
uuucuucugauucuugaagg

SEQ ID NO: 195596 - RNA, 24 nt, Human
uuugcucuuguugcccaggcugga

SEQ ID NO: 195597 - RNA, 18 nt, Human
uuuggccuguggcugggg

SEQ ID NO: 195598 - RNA, 24 nt, Human
uuuugcucuuguugcccaggcugg

SEQ ID NO: 195599 - RNA, 23 nt, Human
uuuuguugcugucccaucuuguc

SEQ ID NO: 195600 - RNA, 24 nt, Human
uuuuuaguagagacgggguuucac

SEQ ID NO: 195601 - RNA, 25 nt, Human
uuuuuaguagagauggggguuucac

SEQ ID NO: 195602 - RNA, 19 nt, Human
uuuuugaauuuuaguagag

SEQ ID NO: 195603 - RNA, 20 nt, Human
uuuuugaauuuuaguagaga

SEQ ID NO: 195604 - RNA, 22 nt, Human
uuuuugaggaaagcugucacuc

SEQ ID NO: 195605 - RNA, 24 nt, Human
uuuuugguauuuuuaguagagaug

SEQ ID NO: 195606 - RNA, 20 nt, Human
uuuuuguauuuuuaguagag

SEQ ID NO: 195607 - RNA, 19 nt, Human
aaacaggaaaugggggugg

SEQ ID NO: 195608 - RNA, 23 nt, Human
aagagcucuagcucggaauauua

SEQ ID NO: 195609 - RNA, 19 nt, Human
accucacuccccagaaagc

SEQ ID NO: 195610 - RNA, 19 nt, Human
accuggguuucugggcuuu

SEQ ID NO: 195611 - RNA, 21 nt, Human
acgaccuucaggaguccagaa

SEQ ID NO: 195612 - RNA, 24 nt, Human
aggaaaugcuaacacaaagccaag

SEQ ID NO: 195613 - RNA, 21 nt, Human
aggaaauggggguggcugcag

SEQ ID NO: 195614 - RNA, 23 nt, Human
aggcagggagccccacgcuggcc

SEQ ID NO: 195615 - RNA, 18 nt, Human
agggccaggggccuugag

SEQ ID NO: 195616 - RNA, 24 nt, Human
agggcuagggcuggggugggggga

SEQ ID NO: 195617 - RNA, 21 nt, Human
auccagaagcaccacccacau

SEQ ID NO: 195618 - RNA, 21 nt, Human
caagggacacacauucguuca

SEQ ID NO: 195619 - RNA, 20 nt, Human
cacauccagaagcaccaccc

SEQ ID NO: 195620 - RNA, 22 nt, Human
caccagccacccugcuggaccc

SEQ ID NO: 195621 - RNA, 23 nt, Human
caccagccacccugcuggacccc

SEQ ID NO: 195622 - RNA, 21 nt, Human
caccagguggaggggcaaggc

SEQ ID NO: 195623 - RNA, 20 nt, Human
caccucacuccccagaaagc

SEQ ID NO: 195624 - RNA, 20 nt, Human
cagaaagcggccccuuccag

SEQ ID NO: 195625 - RNA, 24 nt, Human
cagcaucugaccccuccugggggg

SEQ ID NO: 195626 - RNA, 21 nt, Human
cagcugcuggcucuguccucc

SEQ ID NO: 195627 - RNA, 23 nt, Human
cagcugcuggcucuguccuccca

SEQ ID NO: 195628 - RNA, 20 nt, Human
cagggagccccacgcuggcc

SEQ ID NO: 195629 - RNA, 18 nt, Human
caggguccccucccugag

SEQ ID NO: 195630 - RNA, 19 nt, Human
ccacauggcccaggacccu

SEQ ID NO: 195631 - RNA, 23 nt, Human
ccagaaggcagggagccccacgg

SEQ ID NO: 195632 - RNA, 23 nt, Human
ccagcaccuggguuucugggcuu

SEQ ID NO: 195633 - RNA, 21 nt, Human
ccagccuggucccaccccucc

SEQ ID NO: 195634 - RNA, 24 nt, Human
cccagccuggucccaccccuccug

SEQ ID NO: 195635 - RNA, 26 nt, Human
ccccagaaagcggccccuuccagcau

SEQ ID NO: 195636 - RNA, 19 nt, Human
cccugcuggaccccugggg

SEQ ID NO: 195637 - RNA, 20 nt, Human
ccuaccggguccuggcugca

SEQ ID NO: 195638 - RNA, 24 nt, Human
ccuccugccgcucuccuugggcuc

SEQ ID NO: 195639 - RNA, 21 nt, Human
ccugcaggcucaguaagggcc

SEQ ID NO: 195640 - RNA, 21 nt, Human
ccuggucugcggagaccacgc

SEQ ID NO: 195641 - RNA, 21 nt, Human
cggcagccccagccuaggcac

SEQ ID NO: 195642 - RNA, 19 nt, Human
cgggcugugugccuuccau

SEQ ID NO: 195643 - RNA, 21 nt, Human
cucacauccagaagcaccacc

SEQ ID NO: 195644 - RNA, 19 nt, Human
cucgguccugucagggcag

SEQ ID NO: 195645 - RNA, 24 nt, Human
cugcagauaaauaagagacucaca

SEQ ID NO: 195646 - RNA, 21 nt, Human
cugcggagaccacgcagcugg

SEQ ID NO: 195647 - RNA, 19 nt, Human
gaggcccaggccugucacc

SEQ ID NO: 195648 - RNA, 20 nt, Human
gaggcccaggccugucaccc

SEQ ID NO: 195649 - RNA, 22 nt, Human
gaguccagaaggcagggagccc

SEQ ID NO: 195650 - RNA, 24 nt, Human
gcagaggcccaggccugucaccag

SEQ ID NO: 195651 - RNA, 21 nt, Human
gcaggguccccucccugaggg

SEQ ID NO: 195652 - RNA, 24 nt, Human
gccaacagaacacuucaggaggaa

SEQ ID NO: 195653 - RNA, 19 nt, Human
gcccaggccugucaccagc

SEQ ID NO: 195654 - RNA, 20 nt, Human
gcccgcuuuuguccggcucc

SEQ ID NO: 195655 - RNA, 19 nt, Human
gccgcaggguccccucccu

SEQ ID NO: 195656 - RNA, 21 nt, Human
gcugcuggcucuguccuccca

SEQ ID NO: 195657 - RNA, 21 nt, Human
ggaggcccgagggccaggccu

SEQ ID NO: 195658 - RNA, 20 nt, Human
ggcaaggccucucgguccug

SEQ ID NO: 195659 - RNA, 26 nt, Human
ggcucuguccucccagccugguccca

SEQ ID NO: 195660 - RNA, 19 nt, Human
ggggaauggaaaacaggaa

SEQ ID NO: 195661 - RNA, 24 nt, Human
gggguggcugcagauuccagcugg

SEQ ID NO: 195662 - RNA, 24 nt, Human
ggguggggggagcaggagggcaug

SEQ ID NO: 195663 - RNA, 18 nt, Human
gguccggcagccccagcc

SEQ ID NO: 195664 - RNA, 24 nt, Human
gugcauuuuauugccaacagaaca

SEQ ID NO: 195665 - RNA, 20 nt, Human
uaaagggcuagggcuggggu

SEQ ID NO: 195666 - RNA, 24 nt, Human
uaaagggcuagggcuggggugggg

SEQ ID NO: 195667 - RNA, 21 nt, Human
uagaaucggugccccagaagg

SEQ ID NO: 195668 - RNA, 19 nt, Human
uagggccaagcccacucuc

SEQ ID NO: 195669 - RNA, 20 nt, Human
uagggcugggguggggggag

SEQ ID NO: 195670 - RNA, 23 nt, Human
ucagggcaguugcagaggcccag

SEQ ID NO: 195671 - RNA, 20 nt, Human
ucccagccuggucccacccc

SEQ ID NO: 195672 - RNA, 23 nt, Human
ucccaucacggaggcccgagggc

SEQ ID NO: 195673 - RNA, 21 nt, Human
ucccugagggcccugguccag

SEQ ID NO: 195674 - RNA, 18 nt, Human
uccugccgcucuccuugg

SEQ ID NO: 195675 - RNA, 20 nt, Human
ucuccuugggcucaagggac

SEQ ID NO: 195676 - RNA, 21 nt, Human
ugaaaggcuaaagggcuaggg

SEQ ID NO: 195677 - RNA, 25 nt, Human
ugacuacaaacguaggaagaagagc

SEQ ID NO: 195678 - RNA, 20 nt, Human
ugagcuggagggccuagggc

SEQ ID NO: 195679 - RNA, 18 nt, Human
ugcauuuuauugccaaca

SEQ ID NO: 195680 - RNA, 19 nt, Human
ugcggagaccacgcagcug

SEQ ID NO: 195681 - RNA, 25 nt, Human
uggaaaacaggaaauggggguggcc

SEQ ID NO: 195682 - RNA, 23 nt, Human
uggagggccugguagaaucggug

SEQ ID NO: 195683 - RNA, 18 nt, Human
uggcccaggacccugcag

SEQ ID NO: 195684 - RNA, 24 nt, Human
uggcugagcuggagggccuagggc

SEQ ID NO: 195685 - RNA, 19 nt, Human
uggcugcaccccaaaguuc

SEQ ID NO: 195686 - RNA, 18 nt, Human
ugggcaccagguggaggg

SEQ ID NO: 195687 - RNA, 21 nt, Human
ugggcaguggggcgcggccag

SEQ ID NO: 195688 - RNA, 21 nt, Human
ugggcucaagggacacacauu

SEQ ID NO: 195689 - RNA, 21 nt, Human
uggggguggcugcagauucca

SEQ ID NO: 195690 - RNA, 27 nt, Human
uggggguggcugcagauuccagcugga

SEQ ID NO: 195691 - RNA, 21 nt, Human
ugggguggggggagcaggagg

SEQ ID NO: 195692 - RNA, 22 nt, Human
ugggguggggggagcaggaggg

SEQ ID NO: 195693 - RNA, 24 nt, Human
uggugcuggcucauuuuugcuccu

SEQ ID NO: 195694 - RNA, 22 nt, Human
uuccauccauccacgaccuuca

SEQ ID NO: 195695 - RNA, 21 nt, Human
uugcagaggcccaggccuguc

SEQ ID NO: 195696 - RNA, 20 nt, Human
uuuuucuggcugagcuggag

SEQ ID NO: 195697 - RNA, 19 nt, Human
aaaaacaguuaagguagcc

SEQ ID NO: 195698 - RNA, 23 nt, Human
aaauccacuucaaccuucauaaa

SEQ ID NO: 195699 - RNA, 18 nt, Human
aagaagaggcaagcuuga

SEQ ID NO: 195700 - RNA, 22 nt, Human
aagaauucucaaaugcuuaaaa

SEQ ID NO: 195701 - RNA, 21 nt, Human
aaguaaauucacaggcacaga

SEQ ID NO: 195702 - RNA, 21 nt, Human
aaugcuuaaaaugguggucuu

SEQ ID NO: 195703 - RNA, 23 nt, Human
acagagcagggauuuuuuuuuuu

SEQ ID NO: 195704 - RNA, 24 nt, Human
accccaaaaucaggcuaaaaacug

SEQ ID NO: 195705 - RNA, 19 nt, Human
accgccgccaccucuuccu

SEQ ID NO: 195706 - RNA, 19 nt, Human
acugcaaacagcugacugc

SEQ ID NO: 195707 - RNA, 21 nt, Human
agaauucucaaaugcuuaaaa

SEQ ID NO: 195708 - RNA, 21 nt, Human
agcaagaaugacuugaaguau

SEQ ID NO: 195709 - RNA, 18 nt, Human
aggcgggggugggggggg

SEQ ID NO: 195710 - RNA, 20 nt, Human
aggcggggguggggggggug

SEQ ID NO: 195711 - RNA, 20 nt, Human
aggugucaaauucacugaaa

SEQ ID NO: 195712 - RNA, 19 nt, Human
auagaccccaaaaucaggc

SEQ ID NO: 195713 - RNA, 19 nt, Human
auuucaucacuaaaaaaua

SEQ ID NO: 195714 - RNA, 20 nt, Human
caaaugaaguuaugcugacg

SEQ ID NO: 195715 - RNA, 23 nt, Human
caagaaugccaguuuaaaagaaa

SEQ ID NO: 195716 - RNA, 20 nt, Human
caagagaaauaaaauuggca

SEQ ID NO: 195717 - RNA, 22 nt, Human
caccgccaccgccgccaccucu

SEQ ID NO: 195718 - RNA, 20 nt, Human
caccgcuacgaccaccgcca

SEQ ID NO: 195719 - RNA, 24 nt, Human
cagaaacaucauaaagaaagcuag

SEQ ID NO: 195720 - RNA, 18 nt, Human
cagcugacugcauccuug

SEQ ID NO: 195721 - RNA, 23 nt, Human
cagcugauucguacccgccuccu

SEQ ID NO: 195722 - RNA, 19 nt, Human
caggcuaaaaacugcaaac

SEQ ID NO: 195723 - RNA, 20 nt, Human
ccaccgccaccgccgccacc

SEQ ID NO: 195724 - RNA, 19 nt, Human
cccgcagcugauucguacc

SEQ ID NO: 195725 - RNA, 22 nt, Human
ccgcagcugauucguacccgcc

SEQ ID NO: 195726 - RNA, 19 nt, Human
ccucaagaagaggcaagcu

SEQ ID NO: 195727 - RNA, 25 nt, Human
cuaaaaacugcaaacagcugacugc

SEQ ID NO: 195728 - RNA, 20 nt, Human
cuugaaguauccaauaaagc

SEQ ID NO: 195729 - RNA, 25 nt, Human
ggcaaggcgggggugggggggguga

SEQ ID NO: 195730 - RNA, 21 nt, Human
gggaagugcaagcaagaauga

SEQ ID NO: 195731 - RNA, 18 nt, Human
gggauacauacuguccuu

SEQ ID NO: 195732 - RNA, 19 nt, Human
ggggguggggggggugaag

SEQ ID NO: 195733 - RNA, 19 nt, Human
ggggguggggggggugaag

SEQ ID NO: 195734 - RNA, 21 nt, Human
uaaagcaaucucuauagaccc

SEQ ID NO: 195735 - RNA, 25 nt, Human
uaagaagucaaguacaagcaugcaa

SEQ ID NO: 195736 - RNA, 19 nt, Human
uacaauaaaacaccaacac

SEQ ID NO: 195737 - RNA, 21 nt, Human
uacaauaaaacaccaacacag

SEQ ID NO: 195738 - RNA, 26 nt, Human
uacaauaaaacaccaacacagcuuuc

SEQ ID NO: 195739 - RNA, 18 nt, Human
uacagccuuacuuuaauu

SEQ ID NO: 195740 - RNA, 19 nt, Human
uacgaccuaaaaaugaagc

SEQ ID NO: 195741 - RNA, 19 nt, Human
uagaccccaaaaucaggcu

SEQ ID NO: 195742 - RNA, 23 nt, Human
uagaccccaaaaucaggcuaaaa

SEQ ID NO: 195743 - RNA, 21 nt, Human
uaugugcaucugaaguaugua

SEQ ID NO: 195744 - RNA, 29 nt, Human
uccaaaccuacgaccuaaaaaugaagcaa

SEQ ID NO: 195745 - RNA, 22 nt, Human
uccuccgccaccgcuacgacca

SEQ ID NO: 195746 - RNA, 22 nt, Human
ucguauuaucagaaacaucaua

SEQ ID NO: 195747 - RNA, 22 nt, Human
ucuauagaccccaaaaucaggc

SEQ ID NO: 195748 - RNA, 19 nt, Human
ugaauggcccugacacacu

SEQ ID NO: 195749 - RNA, 20 nt, Human
ugacaaggacaaaaaggcuc

SEQ ID NO: 195750 - RNA, 21 nt, Human
ugacaaggacaaaaaggcucu

SEQ ID NO: 195751 - RNA, 20 nt, Human
ugacuauaucagcagcucuc

SEQ ID NO: 195752 - RNA, 19 nt, Human
ugacugcauccuugccagu

SEQ ID NO: 195753 - RNA, 23 nt, Human
ugacugcauccuugccaguucuc

SEQ ID NO: 195754 - RNA, 20 nt, Human
ugaugcaacaccaacaauuu

SEQ ID NO: 195755 - RNA, 20 nt, Human
ugauucguacccgccuccuc

SEQ ID NO: 195756 - RNA, 21 nt, Human
ugcaaaacuaauaauuuucaa

SEQ ID NO: 195757 - RNA, 20 nt, Human
ugggacaagacauuccaaac

SEQ ID NO: 195758 - RNA, 22 nt, Human
ugugcaucugaaguauguacaa

SEQ ID NO: 195759 - RNA, 18 nt, Human
uguguguggcaaggcggg

SEQ ID NO: 195760 - RNA, 19 nt, Human
uguguguggcaaggcgggg

SEQ ID NO: 195761 - RNA, 19 nt, Human
uucuuucauuaaaccuggg

SEQ ID NO: 195762 - RNA, 24 nt, Human
acccucuuuaaucccuuccuuuua

SEQ ID NO: 195763 - RNA, 20 nt, Human
aggccagcgcccacgguccc

SEQ ID NO: 195764 - RNA, 21 nt, Human
auggcaacggagaagggaacg

SEQ ID NO: 195765 - RNA, 21 nt, Human
cagccucagugggaaucugcc

SEQ ID NO: 195766 - RNA, 19 nt, Human
ccagcgcccacggucccag

SEQ ID NO: 195767 - RNA, 19 nt, Human
ccauagauuucccacccuc

SEQ ID NO: 195768 - RNA, 18 nt, Human
ccccccccccccccgccc

SEQ ID NO: 195769 - RNA, 19 nt, Human
ccccccccccccccgcccc

SEQ ID NO: 195770 - RNA, 23 nt, Human
ccccccgccccugccccguuugc

SEQ ID NO: 195771 - RNA, 18 nt, Human
cccccucagccucagugg

SEQ ID NO: 195772 - RNA, 21 nt, Human
ccccucagccucagugggaau

SEQ ID NO: 195773 - RNA, 23 nt, Human
ccccugcccucugcccccccccc

SEQ ID NO: 195774 - RNA, 24 nt, Human
cccgccccugccccgucggggccg

SEQ ID NO: 195775 - RNA, 24 nt, Human
cccucagccucagugggaaucugc

SEQ ID NO: 195776 - RNA, 22 nt, Human
cccucugccccccccccccccc

SEQ ID NO: 195777 - RNA, 18 nt, Human
cccugcccucugcccccc

SEQ ID NO: 195778 - RNA, 22 nt, Human
ccucccacuucccgguucaagu

SEQ ID NO: 195779 - RNA, 18 nt, Human
ccucccucccucccuccc

SEQ ID NO: 195780 - RNA, 23 nt, Human
ccucccucccucccuccccucca

SEQ ID NO: 195781 - RNA, 24 nt, Human
ccucccucgggccauucucucccu

SEQ ID NO: 195782 - RNA, 21 nt, Human
ccuccuucucucccuccuccc

SEQ ID NO: 195783 - RNA, 21 nt, Human
ccuccuucucucccuccuccc

SEQ ID NO: 195784 - RNA, 19 nt, Human
cgagcucggcccccucagc

SEQ ID NO: 195785 - RNA, 19 nt, Human
cggagaagggaacgcggcg

SEQ ID NO: 195786 - RNA, 20 nt, Human
cggucccaggagcgccuccc

SEQ ID NO: 195787 - RNA, 24 nt, Human
cucggcccccucagccucaguggg

SEQ ID NO: 195788 - RNA, 18 nt, Human
cugccccccccccccccg

SEQ ID NO: 195789 - RNA, 22 nt, Human
cugccccccccccccccgcccc

SEQ ID NO: 195790 - RNA, 19 nt, Human
gaacgcggcgcgcgagcuc

SEQ ID NO: 195791 - RNA, 21 nt, Human
gacccgucccccugcccucug

SEQ ID NO: 195792 - RNA, 24 nt, Human
gccgggguguccgcgguucauggc

SEQ ID NO: 195793 - RNA, 19 nt, Human
gcgcccacggucccaggag

SEQ ID NO: 195794 - RNA, 19 nt, Human
gcgccucccuccuucucuc

SEQ ID NO: 195795 - RNA, 21 nt, Human
gcggcgcgcgagcucggcccc

SEQ ID NO: 195796 - RNA, 20 nt, Human
uaaaaaccauagauuuccca

SEQ ID NO: 195797 - RNA, 20 nt, Human
uaaaaauguucucuucucuu

SEQ ID NO: 195798 - RNA, 24 nt, Human
ucccacccucuuuaaucccuuccu

SEQ ID NO: 195799 - RNA, 20 nt, Human
ucccaggagcgccucccucc

SEQ ID NO: 195800 - RNA, 24 nt, Human
ucccaggagcgccucccuccuucu

SEQ ID NO: 195801 - RNA, 30 nt, Human
ucccccugcccucugccccccccccccccu

SEQ ID NO: 195802 - RNA, 21 nt, Human
ucccucccucccuccccucca

SEQ ID NO: 195803 - RNA, 19 nt, Human
ucggcccccucagccucag

SEQ ID NO: 195804 - RNA, 21 nt, Human
ucugccaucuugagaaaaaag

SEQ ID NO: 195805 - RNA, 25 nt, Human
uuaaaauaaaaaccauagauuuccc

SEQ ID NO: 195806 - RNA, 18 nt, Human
uucccgguucaaguuuca

SEQ ID NO: 195807 - RNA, 25 nt, Human
uuuaaaaauguucucuucucugcuc

SEQ ID NO: 195808 - RNA, 24 nt, Human
aaacauuuaaaaauuaaaaccaaa

SEQ ID NO: 195809 - RNA, 19 nt, Human
aaagaaaucgcccaccccu

SEQ ID NO: 195810 - RNA, 21 nt, Human
aaauaguccguguguuggaac

SEQ ID NO: 195811 - RNA, 21 nt, Human
accccuuugccccauuccccc

SEQ ID NO: 195812 - RNA, 24 nt, Human
agaaaucgcccaccccuuugcccc

SEQ ID NO: 195813 - RNA, 21 nt, Human
agacggcaggccugggacugc

SEQ ID NO: 195814 - RNA, 21 nt, Human
agucucuuuuuacaaacauuu

SEQ ID NO: 195815 - RNA, 24 nt, Human
caccccuuugccccauucccccaa

SEQ ID NO: 195816 - RNA, 20 nt, Human
cacccgcgcucggccgccgc

SEQ ID NO: 195817 - RNA, 19 nt, Human
cacugcugaagcagcaugg

SEQ ID NO: 195818 - RNA, 20 nt, Human
cacugcugaagcagcauggu

SEQ ID NO: 195819 - RNA, 18 nt, Human
cagcagcaggggcuagug

SEQ ID NO: 195820 - RNA, 18 nt, Human
cagcggcgagaguguggc

SEQ ID NO: 195821 - RNA, 19 nt, Human
caggacacagggcacaucu

SEQ ID NO: 195822 - RNA, 20 nt, Human
cagggcaccugggcagagcu

SEQ ID NO: 195823 - RNA, 22 nt, Human
caucagcggcgagaguguggcc

SEQ ID NO: 195824 - RNA, 18 nt, Human
ccacccgcgcucggccgc

SEQ ID NO: 195825 - RNA, 21 nt, Human
cccaaaacagucucuuuuuac

SEQ ID NO: 195826 - RNA, 19 nt, Human
cccagggcaccugggcaga

SEQ ID NO: 195827 - RNA, 18 nt, Human
ccccaaaacagucucuuu

SEQ ID NO: 195828 - RNA, 21 nt, Human
ccccuccgccgccacagccgc

SEQ ID NO: 195829 - RNA, 23 nt, Human
cccgcccuccggccgccgcccgc

SEQ ID NO: 195830 - RNA, 22 nt, Human
cccgcgccccccuccgccgcca

SEQ ID NO: 195831 - RNA, 19 nt, Human
cccuccgccgccacagccg

SEQ ID NO: 195832 - RNA, 20 nt, Human
cccugcccuugcugcagcca

SEQ ID NO: 195833 - RNA, 28 nt, Human
ccgccgcccgccccgcgcccucagggcc

SEQ ID NO: 195834 - RNA, 20 nt, Human
ccgccgccgccaccacagcc

SEQ ID NO: 195835 - RNA, 20 nt, Human
ccgccgccgccaccacagcc

SEQ ID NO: 195836 - RNA, 21 nt, Human
ccgccgccgccaccacagccg

SEQ ID NO: 195837 - RNA, 23 nt, Human
ccgccgccgccaccacagccgca

SEQ ID NO: 195838 - RNA, 21 nt, Human
ccgccgccgccgccaccacag

SEQ ID NO: 195839 - RNA, 24 nt, Human
ccgccgccgccgccaccacagccg

SEQ ID NO: 195840 - RNA, 20 nt, Human
ccgccgccgcuuccucccgc

SEQ ID NO: 195841 - RNA, 21 nt, Human
ccgccgcgccaucgccggccc

SEQ ID NO: 195842 - RNA, 18 nt, Human
ccgcgccaucgccggccc

SEQ ID NO: 195843 - RNA, 24 nt, Human
ccucagggccgccgcgccaucgcc

SEQ ID NO: 195844 - RNA, 18 nt, Human
ccucccgcgccacccgcc

SEQ ID NO: 195845 - RNA, 24 nt, Human
ccuccgccgccacagccgccaccc

SEQ ID NO: 195846 - RNA, 24 nt, Human
ccuugcugcagccagggcaggcug

SEQ ID NO: 195847 - RNA, 23 nt, Human
cgccccccuccgccgccacagcc

SEQ ID NO: 195848 - RNA, 22 nt, Human
cgcgccaucgccggcccgcgcc

SEQ ID NO: 195849 - RNA, 18 nt, Human
cgcucggccgccgccgcc

SEQ ID NO: 195850 - RNA, 18 nt, Human
cggccgccgccgccgccg

SEQ ID NO: 195851 - RNA, 24 nt, Human
cgugcuggagacggcaggccuggg

SEQ ID NO: 195852 - RNA, 22 nt, Human
cuccucccccuacagccugguc

SEQ ID NO: 195853 - RNA, 23 nt, Human
cugcagccagggcaggcuggggc

SEQ ID NO: 195854 - RNA, 27 nt, Human
gccgccgccgccgccaccacagccgca

SEQ ID NO: 195855 - RNA, 18 nt, Human
gccgccgccgccgccggg

SEQ ID NO: 195856 - RNA, 22 nt, Human
gccggcccgcgccccccuccgc

SEQ ID NO: 195857 - RNA, 23 nt, Human
gcugcagccagggcaggcugggg

SEQ ID NO: 195858 - RNA, 21 nt, Human
guguagcugucauaauuagag

SEQ ID NO: 195859 - RNA, 21 nt, Human
guguccaccuuggggccgugc

SEQ ID NO: 195860 - RNA, 19 nt, Human
uaauaccuaacgcuuccgg

SEQ ID NO: 195861 - RNA, 23 nt, Human
uacaaguuagcaaauucuaguac

SEQ ID NO: 195862 - RNA, 21 nt, Human
uaccuaacgcuuccggauucu

SEQ ID NO: 195863 - RNA, 20 nt, Human
ucccccaaaacagucucuuu

SEQ ID NO: 195864 - RNA, 22 nt, Human
ucccgcgccacccgcccuccgg

SEQ ID NO: 195865 - RNA, 19 nt, Human
ugacuuauagggaaauccu

SEQ ID NO: 195866 - RNA, 22 nt, Human
ugaggcaaugucagacccagga

SEQ ID NO: 195867 - RNA, 18 nt, Human
ugaggcgagcgccggguc

SEQ ID NO: 195868 - RNA, 22 nt, Human
uggaacagcuuuccuuuuacau

SEQ ID NO: 195869 - RNA, 27 nt, Human
aaaaagaaaaaaaaaacaguccaacag

SEQ ID NO: 195870 - RNA, 20 nt, Human
aaaaaugcauuauaacuugg

SEQ ID NO: 195871 - RNA, 28 nt, Human
aaaagaaaaaaaaaacaguccaacagag

SEQ ID NO: 195872 - RNA, 20 nt, Human
aaacaagaaaagcaacucuu

SEQ ID NO: 195873 - RNA, 22 nt, Human
aaaccuccaagcggagcacccc

SEQ ID NO: 195874 - RNA, 18 nt, Human
aaaguccccuuugccccc

SEQ ID NO: 195875 - RNA, 21 nt, Human
aaccuccaagcggagcacccc

SEQ ID NO: 195876 - RNA, 22 nt, Human
aacuacucaagaaccuaagcag

SEQ ID NO: 195877 - RNA, 25 nt, Human
aagaaagaaaaccaaggcacuagaa

SEQ ID NO: 195878 - RNA, 24 nt, Human
aagaacaggagaaagcacgcaagc

SEQ ID NO: 195879 - RNA, 18 nt, Human
aagaaguuugccaagagc

SEQ ID NO: 195880 - RNA, 23 nt, Human
aagcaugcuuccuaaugggaggg

SEQ ID NO: 195881 - RNA, 18 nt, Human
aagcggagcaccccaaua

SEQ ID NO: 195882 - RNA, 19 nt, Human
aagcuuuacauuugaucug

SEQ ID NO: 195883 - RNA, 24 nt, Human
aaggaaaaaaacuucuaaaaagga

SEQ ID NO: 195884 - RNA, 18 nt, Human
aaggcccacaaugguuuc

SEQ ID NO: 195885 - RNA, 20 nt, Human
acagaguccucuucaguuug

SEQ ID NO: 195886 - RNA, 19 nt, Human
accaacucaguccagcuuu

SEQ ID NO: 195887 - RNA, 25 nt, Human
accccaaggcccacaaugguuucua

SEQ ID NO: 195888 - RNA, 25 nt, Human
accccuccccaaaaaugcagucaca

SEQ ID NO: 195889 - RNA, 18 nt, Human
acgaaaccaaccaaagcc

SEQ ID NO: 195890 - RNA, 18 nt, Human
acucaagaaccuaagcag

SEQ ID NO: 195891 - RNA, 25 nt, Human
agaaaaaaaaaacaguccaacagag

SEQ ID NO: 195892 - RNA, 18 nt, Human
agaaagaaaaccaaggca

SEQ ID NO: 195893 - RNA, 20 nt, Human
agacaaacucaucuccccuu

SEQ ID NO: 195894 - RNA, 21 nt, Human
agagagcacguagaauuggac

SEQ ID NO: 195895 - RNA, 19 nt, Human
agagauuacugaaaaccaa

SEQ ID NO: 195896 - RNA, 22 nt, Human
agcagaacuacucaagaaccua

SEQ ID NO: 195897 - RNA, 19 nt, Human
aggaaaaaaacuucuaaaa

SEQ ID NO: 195898 - RNA, 23 nt, Human
aggaaaaaaacuucuaaaaagga

SEQ ID NO: 195899 - RNA, 18 nt, Human
aggaaaacaagaaaagca

SEQ ID NO: 195900 - RNA, 25 nt, Human
aggcagaguuaaauuuaaaauuuug

SEQ ID NO: 195901 - RNA, 18 nt, Human
auaaaaagguccacuguc

SEQ ID NO: 195902 - RNA, 22 nt, Human
aucaccuccaccaucgccauuu

SEQ ID NO: 195903 - RNA, 21 nt, Human
aucucuugaaccuucucccca

SEQ ID NO: 195904 - RNA, 23 nt, Human
caaggcacuagaaagcaagcaca

SEQ ID NO: 195905 - RNA, 23 nt, Human
cacagugcggccagcuagcgggu

SEQ ID NO: 195906 - RNA, 21 nt, Human
caccuccucccacuuccacgg

SEQ ID NO: 195907 - RNA, 18 nt, Human
cacgcaagcuacauauag

SEQ ID NO: 195908 - RNA, 21 nt, Human
cagaacaggaccaacucaguc

SEQ ID NO: 195909 - RNA, 27 nt, Human
cagaggacagacaaacucaucuccccu

SEQ ID NO: 195910 - RNA, 28 nt, Human
cagcagaggacagacaaacucaucuccc

SEQ ID NO: 195911 - RNA, 22 nt, Human
cagcuccucuuccgcguccucc

SEQ ID NO: 195912 - RNA, 18 nt, Human
caggaccaacucagucca

SEQ ID NO: 195913 - RNA, 23 nt, Human
cagggcaggugaaggacuggguu

SEQ ID NO: 195914 - RNA, 20 nt, Human
caguccagcuuugaaggccc

SEQ ID NO: 195915 - RNA, 18 nt, Human
caucaagaaagaaaacca

SEQ ID NO: 195916 - RNA, 22 nt, Human
caucaagaaagaaaaccaaggc

SEQ ID NO: 195917 - RNA, 23 nt, Human
caucuccccuuuggcucgaugcu

SEQ ID NO: 195918 - RNA, 20 nt, Human
ccaaagaaaagcucaaucau

SEQ ID NO: 195919 - RNA, 21 nt, Human
ccaagcucccaguucccuagg

SEQ ID NO: 195920 - RNA, 23 nt, Human
ccaguggaccauaugugccagaa

SEQ ID NO: 195921 - RNA, 22 nt, Human
ccauaugugccagaacaggacc

SEQ ID NO: 195922 - RNA, 21 nt, Human
cccacaaugguuucuaaggcc

SEQ ID NO: 195923 - RNA, 19 nt, Human
cccacauggaaagguggau

SEQ ID NO: 195924 - RNA, 23 nt, Human
ccccaaaaaugcagucacauaaa

SEQ ID NO: 195925 - RNA, 24 nt, Human
ccccaaacagccauuugcuuuaua

SEQ ID NO: 195926 - RNA, 23 nt, Human
ccccagaaaaauguacauacaag

SEQ ID NO: 195927 - RNA, 22 nt, Human
cccccaaacagccauuugcuuu

SEQ ID NO: 195928 - RNA, 20 nt, Human
cccccgacuuucccucccaa

SEQ ID NO: 195929 - RNA, 22 nt, Human
ccccgaagggguuaaaacuacc

SEQ ID NO: 195930 - RNA, 21 nt, Human
ccccugccgcagagcccacaa

SEQ ID NO: 195931 - RNA, 22 nt, Human
ccccuuugcccccucccccaaa

SEQ ID NO: 195932 - RNA, 25 nt, Human
cccggccguagccucagcagaggac

SEQ ID NO: 195933 - RNA, 23 nt, Human
cccuaucaccuccaccaucgcca

SEQ ID NO: 195934 - RNA, 20 nt, Human
cccucccuccucccccuucc

SEQ ID NO: 195935 - RNA, 23 nt, Human
ccgaggcagaguuaaauuuaaaa

SEQ ID NO: 195936 - RNA, 24 nt, Human
ccucccccgacuuucccucccaac

SEQ ID NO: 195937 - RNA, 18 nt, Human
ccucccucccuccucccc

SEQ ID NO: 195938 - RNA, 21 nt, Human
ccuccgaggggccagauccac

SEQ ID NO: 195939 - RNA, 19 nt, Human
ccugcagugacgccuuuag

SEQ ID NO: 195940 - RNA, 22 nt, Human
cgaaaccaaccaaagccagggg

SEQ ID NO: 195941 - RNA, 21 nt, Human
cggcaggaacaguacguaaug

SEQ ID NO: 195942 - RNA, 23 nt, Human
cuaggcccggccguagccucagc

SEQ ID NO: 195943 - RNA, 19 nt, Human
cucaucuccccuuuggcuc

SEQ ID NO: 195944 - RNA, 24 nt, Human
cucccccgacuuucccucccaacc

SEQ ID NO: 195945 - RNA, 20 nt, Human
cugaacuguauauuguagca

SEQ ID NO: 195946 - RNA, 19 nt, Human
cugcagugacgccuuuagc

SEQ ID NO: 195947 - RNA, 18 nt, Human
cuugaagucccuaucacc

SEQ ID NO: 195948 - RNA, 18 nt, Human
gaaggcccugauucaguc

SEQ ID NO: 195949 - RNA, 25 nt, Human
gaauuagcucuagaaaucacacuga

SEQ ID NO: 195950 - RNA, 19 nt, Human
gauuucgguaccccucccc

SEQ ID NO: 195951 - RNA, 20 nt, Human
ggaaucccccaaacagccau

SEQ ID NO: 195952 - RNA, 19 nt, Human
ggcccggccguagccucaa

SEQ ID NO: 195953 - RNA, 19 nt, Human
gggacauuucuaauuuuag

SEQ ID NO: 195954 - RNA, 24 nt, Human
guccucccccgacuuucccuccca

SEQ ID NO: 195955 - RNA, 22 nt, Human
guuaaagucccggcgccaccuc

SEQ ID NO: 195956 - RNA, 21 nt, Human
uaaaaaguccccuuugccccc

SEQ ID NO: 195957 - RNA, 21 nt, Human
uaaaacuaccgaugacgcugc

SEQ ID NO: 195958 - RNA, 19 nt, Human
uaaaagaacaggagaaagc

SEQ ID NO: 195959 - RNA, 18 nt, Human
uaaaauuuuggauuguag

SEQ ID NO: 195960 - RNA, 22 nt, Human
uaaagagcugccucacaaauua

SEQ ID NO: 195961 - RNA, 18 nt, Human
uaacuuggucaaauuacu

SEQ ID NO: 195962 - RNA, 21 nt, Human
uaagcgcccacagugcggccg

SEQ ID NO: 195963 - RNA, 20 nt, Human
uaaggaaaaaaauggguuuu

SEQ ID NO: 195964 - RNA, 20 nt, Human
uaaggaaaaaaauggguuuu

SEQ ID NO: 195965 - RNA, 20 nt, Human
uaaguccagugcgugaaacc

SEQ ID NO: 195966 - RNA, 25 nt, Human
uacauuccaucacuguaaaaagucc

SEQ ID NO: 195967 - RNA, 24 nt, Human
uagacuuuugaauggccgaggcag

SEQ ID NO: 195968 - RNA, 18 nt, Human
ucacuguaaaaagucccc

SEQ ID NO: 195969 - RNA, 18 nt, Human
ucauggaccccaaggccc

SEQ ID NO: 195970 - RNA, 20 nt, Human
ucccggcgccaccuccuccc

SEQ ID NO: 195971 - RNA, 26 nt, Human
ucccuccucccccuucccacagcucc

SEQ ID NO: 195972 - RNA, 20 nt, Human
ucccugcagagguucugaac

SEQ ID NO: 195973 - RNA, 24 nt, Human
uccgucuccuccucuuuuccuccc

SEQ ID NO: 195974 - RNA, 24 nt, Human
uccucauucagcugaggaccucau

SEQ ID NO: 195975 - RNA, 22 nt, Human
uccuucuaucagcaaacuccaa

SEQ ID NO: 195976 - RNA, 19 nt, Human
ucuaaccuaacaaacugcc

SEQ ID NO: 195977 - RNA, 18 nt, Human
ucuguuuuuauuuugggg

SEQ ID NO: 195978 - RNA, 23 nt, Human
ucuuaaaaaaaagaaaaagaaaa

SEQ ID NO: 195979 - RNA, 26 nt, Human
ugagcaaggugaugaggguaagucca

SEQ ID NO: 195980 - RNA, 22 nt, Human
ugccagaacaggaccaacucag

SEQ ID NO: 195981 - RNA, 18 nt, Human
ugcccccucccccaaaaa

SEQ ID NO: 195982 - RNA, 19 nt, Human
ugccgcagagcccacaagg

SEQ ID NO: 195983 - RNA, 21 nt, Human
ugccgcagagcccacaagggg

SEQ ID NO: 195984 - RNA, 21 nt, Human
ugccgcagagcccacaagggg

SEQ ID NO: 195985 - RNA, 20 nt, Human
ugcucugcucaguucuccuc

SEQ ID NO: 195986 - RNA, 19 nt, Human
ugcuugcgcuaagaaguuu

SEQ ID NO: 195987 - RNA, 22 nt, Human
uggcaaauugaaaauucuccca

SEQ ID NO: 195988 - RNA, 24 nt, Human
ugggaggguuuucuucccccuucc

SEQ ID NO: 195989 - RNA, 25 nt, Human
uggggggaaggaagagauuacugaa

SEQ ID NO: 195990 - RNA, 20 nt, Human
uggguuuuucuuaaaaaaaa

SEQ ID NO: 195991 - RNA, 19 nt, Human
uuacgaaaccaaccaaagc

SEQ ID NO: 195992 - RNA, 20 nt, Human
uuacugaaaaccaacuugua

SEQ ID NO: 195993 - RNA, 20 nt, Human
uuaguucucagggccucccu

SEQ ID NO: 195994 - RNA, 22 nt, Human
uuauauacacauguauauaaug

SEQ ID NO: 195995 - RNA, 22 nt, Human
uucaaggaaaaaauuggcaaau

SEQ ID NO: 195996 - RNA, 20 nt, Human
uuccaucacuguaaaaaguc

SEQ ID NO: 195997 - RNA, 21 nt, Human
uucccuaggcccggccguagc

SEQ ID NO: 195998 - RNA, 25 nt, Human
uuuaauauaauuuuuagaccaaaga

SEQ ID NO: 195999 - RNA, 20 nt, Human
uuuccucccucccuccuccc

SEQ ID NO: 196000 - RNA, 26 nt, Human
uuucuuaaaaaaaagaaaaagaaaaa

SEQ ID NO: 196001 - RNA, 20 nt, Human
uuugccaagagccucuucca

SEQ ID NO: 196002 - RNA, 18 nt, Human
uuuucuuaaaaaaaagaa

SEQ ID NO: 196003 - RNA, 23 nt, Human
aaaaagcaaauaaaaaauaaaau

SEQ ID NO: 196004 - RNA, 20 nt, Human
aaaaggcagcuccauaaacu

SEQ ID NO: 196005 - RNA, 21 nt, Human
aacauguacaaaaauggcugg

SEQ ID NO: 196006 - RNA, 20 nt, Human
aagcaagccaccaaaaggca

SEQ ID NO: 196007 - RNA, 22 nt, Human
acauacuaauuuauacacagaa

SEQ ID NO: 196008 - RNA, 23 nt, Human
acuugacaaccccaaacacaaac

SEQ ID NO: 196009 - RNA, 21 nt, Human
aguaaacaauauuuuacugaa

SEQ ID NO: 196010 - RNA, 24 nt, Human
augugcuuuaaggaaaggaggguu

SEQ ID NO: 196011 - RNA, 23 nt, Human
caacauguacaaaaauggcugga

SEQ ID NO: 196012 - RNA, 25 nt, Human
caaccccaaacacaaacauaaccuc

SEQ ID NO: 196013 - RNA, 23 nt, Human
caaggaggacagacccauuuuca

SEQ ID NO: 196014 - RNA, 23 nt, Human
cagauaaagcaagccaccaaaag

SEQ ID NO: 196015 - RNA, 21 nt, Human
ccccaaacacaaacauaaccu

SEQ ID NO: 196016 - RNA, 24 nt, Human
cccgcggcggcggcggcggcgccu

SEQ ID NO: 196017 - RNA, 25 nt, Human
cccggcggagcugccgcugcagccg

SEQ ID NO: 196018 - RNA, 22 nt, Human
ccgcuccccggucccccgcucc

SEQ ID NO: 196019 - RNA, 30 nt, Human
ccgcuccguccgccacccugccgccgcccc

SEQ ID NO: 196020 - RNA, 25 nt, Human
ccguccgccacccugccgccgcccc

SEQ ID NO: 196021 - RNA, 23 nt, Human
ccuccuucacuugacaaccccaa

SEQ ID NO: 196022 - RNA, 20 nt, Human
ccuggacugcgcugcugaug

SEQ ID NO: 196023 - RNA, 21 nt, Human
ccuucuuuuucuucuuaaaaa

SEQ ID NO: 196024 - RNA, 21 nt, Human
cggcggcggcggcggcgccug

SEQ ID NO: 196025 - RNA, 25 nt, Human
cuccucgcggccgccgcuccccggu

SEQ ID NO: 196026 - RNA, 19 nt, Human
cuccuucacuugacaaccc

SEQ ID NO: 196027 - RNA, 19 nt, Human
cugcagauaaagcaagcca

SEQ ID NO: 196028 - RNA, 18 nt, Human
cugccgccgcccagcagc

SEQ ID NO: 196029 - RNA, 28 nt, Human
cugcugauggcggcggccgcggcucuuu

SEQ ID NO: 196030 - RNA, 21 nt, Human
cuuaaaaacugcagauaaagc

SEQ ID NO: 196031 - RNA, 20 nt, Human
gccugggaucccuccuucac

SEQ ID NO: 196032 - RNA, 18 nt, Human
gcggcggcggcggcggcg

SEQ ID NO: 196033 - RNA, 18 nt, Human
ggcggcggccgcggcucg

SEQ ID NO: 196034 - RNA, 21 nt, Human
uaaagcaagccaccaaaaggc

SEQ ID NO: 196035 - RNA, 22 nt, Human
uaaagcaagccaccaaaaggca

SEQ ID NO: 196036 - RNA, 18 nt, Human
uaaggaaaggaggguuuu

SEQ ID NO: 196037 - RNA, 22 nt, Human
uaaggaaaggaggguuuucaaa

SEQ ID NO: 196038 - RNA, 23 nt, Human
uacaacauguacaaaaauggcug

SEQ ID NO: 196039 - RNA, 21 nt, Human
uacacaaggaggacagaccca

SEQ ID NO: 196040 - RNA, 19 nt, Human
uacacagaaacucugcccc

SEQ ID NO: 196041 - RNA, 26 nt, Human
uagauauucaacaaucuguacaguuu

SEQ ID NO: 196042 - RNA, 21 nt, Human
ucagggccuucuuuuucuucu

SEQ ID NO: 196043 - RNA, 18 nt, Human
uccguccgccacccugcc

SEQ ID NO: 196044 - RNA, 19 nt, Human
ucuucuuaaaaacugcaga

SEQ ID NO: 196045 - RNA, 27 nt, Human
ugaauacauaaauauggaguuuacaua

SEQ ID NO: 196046 - RNA, 19 nt, Human
ugccccauagccauaaaau

SEQ ID NO: 196047 - RNA, 18 nt, Human
uuucuaaacauaaagcuc

SEQ ID NO: 196048 - RNA, 20 nt, Human
uuugacucagggccuucuuu

SEQ ID NO: 196049 - RNA, 23 nt, Human
aaaacaaaaacaaaaaaauggga

SEQ ID NO: 196050 - RNA, 22 nt, Human
aaaaugcuuauaagaauauaag

SEQ ID NO: 196051 - RNA, 22 nt, Human
aaacaaaaacaaaaaaauggga

SEQ ID NO: 196052 - RNA, 27 nt, Human
aaacaagagacaaaaaaauauacaaga

SEQ ID NO: 196053 - RNA, 24 nt, Human
aacaagagacaaaaaaauauacaa

SEQ ID NO: 196054 - RNA, 23 nt, Human
aacauuaagaaaaaauguacaau

SEQ ID NO: 196055 - RNA, 23 nt, Human
aacuacuguaacuuaggacaggc

SEQ ID NO: 196056 - RNA, 20 nt, Human
aagagacaaaaaaauauaca

SEQ ID NO: 196057 - RNA, 24 nt, Human
aagcagauacacaaauucuaaaau

SEQ ID NO: 196058 - RNA, 21 nt, Human
acauuaagaaaaaauguacaa

SEQ ID NO: 196059 - RNA, 24 nt, Human
agaaaagcaauccacaacauuaag

SEQ ID NO: 196060 - RNA, 22 nt, Human
agaaaaggcacaaacaucugua

SEQ ID NO: 196061 - RNA, 19 nt, Human
agcaaaguaaagaaaaggc

SEQ ID NO: 196062 - RNA, 25 nt, Human
agccaccgggccggccgauaaccaa

SEQ ID NO: 196063 - RNA, 19 nt, Human
agcuuugaaaaaacucaca

SEQ ID NO: 196064 - RNA, 19 nt, Human
aggcacaaacaucuguaca

SEQ ID NO: 196065 - RNA, 19 nt, Human
auaacugauuuauaaagcu

SEQ ID NO: 196066 - RNA, 20 nt, Human
auaagaccaaauacuuuuaa

SEQ ID NO: 196067 - RNA, 22 nt, Human
auaagaccaaauacuuuuaaua

SEQ ID NO: 196068 - RNA, 19 nt, Human
auacaacagacauccuccc

SEQ ID NO: 196069 - RNA, 18 nt, Human
auagcacaaagauaaccc

SEQ ID NO: 196070 - RNA, 27 nt, Human
auccccuuuucccccuuccacacccaa

SEQ ID NO: 196071 - RNA, 24 nt, Human
auccuguguagcaagaacuaagga

SEQ ID NO: 196072 - RNA, 18 nt, Human
auguacaauuuaugaaac

SEQ ID NO: 196073 - RNA, 18 nt, Human
caaaaacaaaaaaauggg

SEQ ID NO: 196074 - RNA, 22 nt, Human
caagagacaaaaaaauauacaa

SEQ ID NO: 196075 - RNA, 18 nt, Human
cacccaacccucagaguc

SEQ ID NO: 196076 - RNA, 18 nt, Human
caccccucccucucuuuc

SEQ ID NO: 196077 - RNA, 20 nt, Human
caccccucccucucuuucac

SEQ ID NO: 196078 - RNA, 19 nt, Human
caccuucaacacuaaccaa

SEQ ID NO: 196079 - RNA, 18 nt, Human
cacuauauagcacaaaga

SEQ ID NO: 196080 - RNA, 19 nt, Human
cacuauauagcacaaagau

SEQ ID NO: 196081 - RNA, 22 nt, Human
cacuauauagcacaaagauaac

SEQ ID NO: 196082 - RNA, 22 nt, Human
cagacauccucccacgaguucu

SEQ ID NO: 196083 - RNA, 24 nt, Human
cagcaaacaagagacaaaaaaaua

SEQ ID NO: 196084 - RNA, 25 nt, Human
caguaaaucccaugcuucacauaga

SEQ ID NO: 196085 - RNA, 22 nt, Human
caugugcgugccugugcacaug

SEQ ID NO: 196086 - RNA, 24 nt, Human
cauucccccugagauagccaggag

SEQ ID NO: 196087 - RNA, 25 nt, Human
ccaacugaguuacauaaaauuguac

SEQ ID NO: 196088 - RNA, 19 nt, Human
ccagcaaacaagagacaaa

SEQ ID NO: 196089 - RNA, 19 nt, Human
cccccuuccacacccaacc

SEQ ID NO: 196090 - RNA, 18 nt, Human
ccccugagauagccagga

SEQ ID NO: 196091 - RNA, 23 nt, Human
ccccuuuucccccuuccacaccc

SEQ ID NO: 196092 - RNA, 22 nt, Human
ccuccauuucuagaaaaacaaa

SEQ ID NO: 196093 - RNA, 19 nt, Human
ccuucaacacuaaccaaaa

SEQ ID NO: 196094 - RNA, 18 nt, Human
ccuuccacacccaacccu

SEQ ID NO: 196095 - RNA, 23 nt, Human
cuccauccccuuuucccccuucc

SEQ ID NO: 196096 - RNA, 23 nt, Human
cucccucucuuucacucuucugg

SEQ ID NO: 196097 - RNA, 19 nt, Human
cugcaccccucccucucuu

SEQ ID NO: 196098 - RNA, 20 nt, Human
cugcaccccucccucucuuu

SEQ ID NO: 196099 - RNA, 23 nt, Human
cuggaccuacaaaugcucuuccc

SEQ ID NO: 196100 - RNA, 23 nt, Human
cugugcacauguugcugcacccc

SEQ ID NO: 196101 - RNA, 19 nt, Human
cuguucccauguaaaccgg

SEQ ID NO: 196102 - RNA, 21 nt, Human
cuuccacacccaacccucaga

SEQ ID NO: 196103 - RNA, 18 nt, Human
cuuuuccccauucccccu

SEQ ID NO: 196104 - RNA, 20 nt, Human
gagcaggucuccauccccuu

SEQ ID NO: 196105 - RNA, 19 nt, Human
gagcuggggagcaggucuc

SEQ ID NO: 196106 - RNA, 22 nt, Human
gauucuuuuccccauucccccu

SEQ ID NO: 196107 - RNA, 23 nt, Human
gcaccccucccucucuuucacuc

SEQ ID NO: 196108 - RNA, 21 nt, Human
gccugugcacauguugcugca

SEQ ID NO: 196109 - RNA, 19 nt, Human
gcugcaccccucccucucu

SEQ ID NO: 196110 - RNA, 20 nt, Human
ggccgauaaccaagcucuac

SEQ ID NO: 196111 - RNA, 20 nt, Human
ggcugacaggaagagcuggg

SEQ ID NO: 196112 - RNA, 20 nt, Human
uaaaaguaccagacccaaua

SEQ ID NO: 196113 - RNA, 19 nt, Human
uaaagacaccuagcauagg

SEQ ID NO: 196114 - RNA, 21 nt, Human
uacauaaaagcuguucaguuu

SEQ ID NO: 196115 - RNA, 22 nt, Human
uacauuuuuguucuaguuacgc

SEQ ID NO: 196116 - RNA, 19 nt, Human
uagaaaagcaauccacaac

SEQ ID NO: 196117 - RNA, 19 nt, Human
uagcauaggucuguggcaa

SEQ ID NO: 196118 - RNA, 21 nt, Human
uagugcaaccucacauauaua

SEQ ID NO: 196119 - RNA, 24 nt, Human
uauaagcaaaguaaagaaaaggca

SEQ ID NO: 196120 - RNA, 22 nt, Human
uauauaauagcaaacuacugua

SEQ ID NO: 196121 - RNA, 23 nt, Human
uaucuuguuuacaauguacauuu

SEQ ID NO: 196122 - RNA, 22 nt, Human
uauuacauacaacagacauccu

SEQ ID NO: 196123 - RNA, 26 nt, Human
uauuacauacaacagacauccuccca

SEQ ID NO: 196124 - RNA, 19 nt, Human
ucaaauuuuguuuugguca

SEQ ID NO: 196125 - RNA, 18 nt, Human
ucaauccagcaaacaaga

SEQ ID NO: 196126 - RNA, 21 nt, Human
uccaaaaaaggaaagaaauua

SEQ ID NO: 196127 - RNA, 22 nt, Human
uccacuauauagcacaaagaua

SEQ ID NO: 196128 - RNA, 24 nt, Human
uccagcaaacaagagacaaaaaaa

SEQ ID NO: 196129 - RNA, 21 nt, Human
uccccuuuucccccuuccaca

SEQ ID NO: 196130 - RNA, 24 nt, Human
ucuagaaaaacaaaaacaaaaaaa

SEQ ID NO: 196131 - RNA, 26 nt, Human
ucuccaugagcagcgacagacugccu

SEQ ID NO: 196132 - RNA, 18 nt, Human
ucuggaccuacaaaugcu

SEQ ID NO: 196133 - RNA, 19 nt, Human
ucuucuggaccuacaaaug

SEQ ID NO: 196134 - RNA, 28 nt, Human
ugacaggaagagcuggggagcaggucuc

SEQ ID NO: 196135 - RNA, 24 nt, Human
ugcacacaugugcgugccugugca

SEQ ID NO: 196136 - RNA, 22 nt, Human
ugcagaauaagauacucuaguu

SEQ ID NO: 196137 - RNA, 22 nt, Human
ugccugugcacauguugcugca

SEQ ID NO: 196138 - RNA, 29 nt, Human
ugcgugcacacaugugcgugccugugcac

SEQ ID NO: 196139 - RNA, 22 nt, Human
ugcuaagcccaggucuucucca

SEQ ID NO: 196140 - RNA, 18 nt, Human
ugcuguuuugcuuuacau

SEQ ID NO: 196141 - RNA, 23 nt, Human
uggaccuacaaaugcucuuccca

SEQ ID NO: 196142 - RNA, 22 nt, Human
uggcaaccuaguguccaacuga

SEQ ID NO: 196143 - RNA, 21 nt, Human
ugguuucacagaauuauaauc

SEQ ID NO: 196144 - RNA, 18 nt, Human
uguaaaccggcugacagg

SEQ ID NO: 196145 - RNA, 23 nt, Human
uguacaauuuuaaaaguaccaga

SEQ ID NO: 196146 - RNA, 20 nt, Human
uguaugugugcgugcacaca

SEQ ID NO: 196147 - RNA, 21 nt, Human
uguccaaaaaaggaaagaaau

SEQ ID NO: 196148 - RNA, 25 nt, Human
ugugcgugccugugcacauguugcu

SEQ ID NO: 196149 - RNA, 25 nt, Human
ugugugcgugcacacaugugcgugg

SEQ ID NO: 196150 - RNA, 27 nt, Human
uguugcugcaccccucccucucuuuca

SEQ ID NO: 196151 - RNA, 20 nt, Human
uguuuucccauauuuuuaga

SEQ ID NO: 196152 - RNA, 23 nt, Human
uucccauguaaaccggcugacag

SEQ ID NO: 196153 - RNA, 21 nt, Human
uucccccugagauagccagga

SEQ ID NO: 196154 - RNA, 18 nt, Human
uuguauauuuauuucucu

SEQ ID NO: 196155 - RNA, 19 nt, Human
uuuuuuuuuuuuuuuuuaa

SEQ ID NO: 196156 - RNA, 21 nt, Human
aaaggcacagguaacugcaua

SEQ ID NO: 196157 - RNA, 18 nt, Human
aaagguguagaaaaaggc

SEQ ID NO: 196158 - RNA, 23 nt, Human
aaccauaaacuauucacagccuc

SEQ ID NO: 196159 - RNA, 18 nt, Human
aacuguguuggagggagg

SEQ ID NO: 196160 - RNA, 18 nt, Human
aagugucacuggcuguga

SEQ ID NO: 196161 - RNA, 21 nt, Human
aagugucacuggcugugagug

SEQ ID NO: 196162 - RNA, 22 nt, Human
accccgcgaggcuccuccauga

SEQ ID NO: 196163 - RNA, 18 nt, Human
accccuuucccucugcca

SEQ ID NO: 196164 - RNA, 23 nt, Human
agacagaaaacgcaccaaccccg

SEQ ID NO: 196165 - RNA, 19 nt, Human
agacagaaaacgcaccagc

SEQ ID NO: 196166 - RNA, 18 nt, Human
agccacccuccaccuagg

SEQ ID NO: 196167 - RNA, 20 nt, Human
agcggggagggucaggaggc

SEQ ID NO: 196168 - RNA, 18 nt, Human
agggagagucagggcggg

SEQ ID NO: 196169 - RNA, 18 nt, Human
auggggcugaggaagugg

SEQ ID NO: 196170 - RNA, 22 nt, Human
caaaaccauaaacuauucacag

SEQ ID NO: 196171 - RNA, 23 nt, Human
caaacccaagacggcuuugggag

SEQ ID NO: 196172 - RNA, 18 nt, Human
caaccacagcggggaggg

SEQ ID NO: 196173 - RNA, 19 nt, Human
cacgcucuucuucugugcu

SEQ ID NO: 196174 - RNA, 18 nt, Human
cagaaaacgcaccagcac

SEQ ID NO: 196175 - RNA, 21 nt, Human
cagagauuucuagagcuugga

SEQ ID NO: 196176 - RNA, 20 nt, Human
cagauggggcugaggaagug

SEQ ID NO: 196177 - RNA, 21 nt, Human
cagcacuuucugccugaaugu

SEQ ID NO: 196178 - RNA, 20 nt, Human
cagcauucauguccacuccu

SEQ ID NO: 196179 - RNA, 27 nt, Human
cagccacccuccaccuaggcgccgcuc

SEQ ID NO: 196180 - RNA, 19 nt, Human
caggaccccgcgaggcucc

SEQ ID NO: 196181 - RNA, 28 nt, Human
caguguaccccuuucccucugccagccu

SEQ ID NO: 196182 - RNA, 21 nt, Human
caucagccuuuccccaaaacc

SEQ ID NO: 196183 - RNA, 20 nt, Human
cauggcccagucaucccugg

SEQ ID NO: 196184 - RNA, 19 nt, Human
ccagccucuggggugggug

SEQ ID NO: 196185 - RNA, 19 nt, Human
cccucugccagccucuggg

SEQ ID NO: 196186 - RNA, 18 nt, Human
ccuugggauggcaaacug

SEQ ID NO: 196187 - RNA, 22 nt, Human
cuccaccuaggcgccgcucuuc

SEQ ID NO: 196188 - RNA, 24 nt, Human
cucugggguggguggcugccaacc

SEQ ID NO: 196189 - RNA, 20 nt, Human
cugaagcaguuggagagagg

SEQ ID NO: 196190 - RNA, 20 nt, Human
cuggaugcuggggguggcuc

SEQ ID NO: 196191 - RNA, 19 nt, Human
gacuucagaugcuauucag

SEQ ID NO: 196192 - RNA, 20 nt, Human
gagacaucuguguccauggc

SEQ ID NO: 196193 - RNA, 20 nt, Human
gagcuuggagaacuguguug

SEQ ID NO: 196194 - RNA, 23 nt, Human
gccuugggauggcaaacuggucc

SEQ ID NO: 196195 - RNA, 23 nt, Human
gcuggaugcuggggguggcucuu

SEQ ID NO: 196196 - RNA, 21 nt, Human
gugucagagauuucuagagcu

SEQ ID NO: 196197 - RNA, 18 nt, Human
uaaacuauucacagccuc

SEQ ID NO: 196198 - RNA, 18 nt, Human
uacggcagccacccucca

SEQ ID NO: 196199 - RNA, 18 nt, Human
uacggcagccacccucca

SEQ ID NO: 196200 - RNA, 22 nt, Human
uagagcuuggagaacuguguug

SEQ ID NO: 196201 - RNA, 25 nt, Human
uagagcuuggagaacuguguuggag

SEQ ID NO: 196202 - RNA, 19 nt, Human
ucagggagagucagggcgg

SEQ ID NO: 196203 - RNA, 19 nt, Human
uccccaaaaccauaaacua

SEQ ID NO: 196204 - RNA, 24 nt, Human
uccccaaaaccauaaacuauucac

SEQ ID NO: 196205 - RNA, 22 nt, Human
ucucauggucaagaugugucag

SEQ ID NO: 196206 - RNA, 30 nt, Human
ucuucugugcugaaggcaccacuuccgauu

SEQ ID NO: 196207 - RNA, 20 nt, Human
ugaauaaucccaguguccca

SEQ ID NO: 196208 - RNA, 22 nt, Human
ugacccacggauccagccccuu

SEQ ID NO: 196209 - RNA, 23 nt, Human
ugaggcugcuggguuugugccuc

SEQ ID NO: 196210 - RNA, 20 nt, Human
uggagggacagauggggcug

SEQ ID NO: 196211 - RNA, 20 nt, Human
uggauggagggacagauggg

SEQ ID NO: 196212 - RNA, 22 nt, Human
uggauggagggacagauggggc

SEQ ID NO: 196213 - RNA, 18 nt, Human
uggcaaacugguccugug

SEQ ID NO: 196214 - RNA, 25 nt, Human
uggcagguggcccccacgagucccc

SEQ ID NO: 196215 - RNA, 19 nt, Human
uggcccccacgaguccccc

SEQ ID NO: 196216 - RNA, 20 nt, Human
uggcugccaaccacagcggg

SEQ ID NO: 196217 - RNA, 22 nt, Human
uggcugccaaccacagcgggga

SEQ ID NO: 196218 - RNA, 21 nt, Human
uggguuggagaucaacggccu

SEQ ID NO: 196219 - RNA, 19 nt, Human
ugucaguauugccauugua

SEQ ID NO: 196220 - RNA, 18 nt, Human
ugugcuaugcaaacgguu

SEQ ID NO: 196221 - RNA, 20 nt, Human
ugugucagagauuucuagag

SEQ ID NO: 196222 - RNA, 22 nt, Human
ugugucagagauuucuagagcu

SEQ ID NO: 196223 - RNA, 18 nt, Human
uguguuggagggaggccu

SEQ ID NO: 196224 - RNA, 20 nt, Human
uucacaaagacuucagaugc

SEQ ID NO: 196225 - RNA, 18 nt, Human
uugcuggacacuggaagc

SEQ ID NO: 196226 - RNA, 19 nt, Human
uuuaagcaacaaaaggugu

SEQ ID NO: 196227 - RNA, 22 nt, Human
uuuccuuuuccuuucucccuca

SEQ ID NO: 196228 - RNA, 22 nt, Human
uuugaaguuuccuuuuccuuuc

SEQ ID NO: 196229 - RNA, 21 nt, Human
uuugcagacagaaaacgcacc

SEQ ID NO: 196230 - RNA, 23 nt, Human
uuugcagacagaaaacgcaccag

SEQ ID NO: 196231 - RNA, 19 nt, Human
uuuuuugcaagugucacug

SEQ ID NO: 196232 - RNA, 20 nt, Human
aaacagaaugcaagacuguc

SEQ ID NO: 196233 - RNA, 21 nt, Human
aaccaugcaaaguggcagggc

SEQ ID NO: 196234 - RNA, 19 nt, Human
aagacugucacacgcggcu

SEQ ID NO: 196235 - RNA, 26 nt, Human
aagagcaucaacaaugcucacuuuca

SEQ ID NO: 196236 - RNA, 20 nt, Human
accaugcaaaguggcagggc

SEQ ID NO: 196237 - RNA, 18 nt, Human
acgacacggcucacaaag

SEQ ID NO: 196238 - RNA, 19 nt, Human
acuacacuucacacguggg

SEQ ID NO: 196239 - RNA, 22 nt, Human
agaggcaguaggcuggggaucc

SEQ ID NO: 196240 - RNA, 22 nt, Human
aggacuguccaccuccccccac

SEQ ID NO: 196241 - RNA, 22 nt, Human
cacacagggagggggaacccca

SEQ ID NO: 196242 - RNA, 20 nt, Human
cacagggagggggaacccca

SEQ ID NO: 196243 - RNA, 18 nt, Human
cacagugggugccaggag

SEQ ID NO: 196244 - RNA, 21 nt, Human
cacauuuccgcaggacugucc

SEQ ID NO: 196245 - RNA, 22 nt, Human
caccuccccccacgagacaaac

SEQ ID NO: 196246 - RNA, 23 nt, Human
cacgagacaaacagaaugcaaga

SEQ ID NO: 196247 - RNA, 18 nt, Human
cacucgccuucaggcagu

SEQ ID NO: 196248 - RNA, 23 nt, Human
caggaaccugggaugccacagga

SEQ ID NO: 196249 - RNA, 18 nt, Human
cagggcaggaaccuggga

SEQ ID NO: 196250 - RNA, 20 nt, Human
cagggcaggaaccugggaug

SEQ ID NO: 196251 - RNA, 24 nt, Human
caggggcuggccugucccccccug

SEQ ID NO: 196252 - RNA, 27 nt, Human
caggucaaaaucaaaccaugcaaagug

SEQ ID NO: 196253 - RNA, 20 nt, Human
caggugggccaucuugccca

SEQ ID NO: 196254 - RNA, 21 nt, Human
caucuccagccaauaaauaac

SEQ ID NO: 196255 - RNA, 21 nt, Human
ccacgagacaaacagaaugca

SEQ ID NO: 196256 - RNA, 21 nt, Human
ccacuacacuucacacguggg

SEQ ID NO: 196257 - RNA, 25 nt, Human
ccacuacacuucacacgugggggac

SEQ ID NO: 196258 - RNA, 18 nt, Human
ccaggaggggaggaagca

SEQ ID NO: 196259 - RNA, 21 nt, Human
ccccccacgagacaaacagaa

SEQ ID NO: 196260 - RNA, 22 nt, Human
ccccccacgagacaaacagaau

SEQ ID NO: 196261 - RNA, 18 nt, Human
ccccgcgccggcaggccc

SEQ ID NO: 196262 - RNA, 18 nt, Human
ccccgcgccggcaggccc

SEQ ID NO: 196263 - RNA, 24 nt, Human
cccggcagugucugcuggggcgca

SEQ ID NO: 196264 - RNA, 20 nt, Human
cggcuaggacugguuccacg

SEQ ID NO: 196265 - RNA, 23 nt, Human
cucaagagcaucaacaaugcuca

SEQ ID NO: 196266 - RNA, 21 nt, Human
cuccagccuaguccugaugcc

SEQ ID NO: 196267 - RNA, 21 nt, Human
gaaccugggaugccacaggug

SEQ ID NO: 196268 - RNA, 19 nt, Human
gacacggcucacaaagcgg

SEQ ID NO: 196269 - RNA, 20 nt, Human
gagaagugcuggagaggcag

SEQ ID NO: 196270 - RNA, 21 nt, Human
gcaggacuguccaccuccccc

SEQ ID NO: 196271 - RNA, 22 nt, Human
gcaggacuguccaccucccccc

SEQ ID NO: 196272 - RNA, 20 nt, Human
gccacagugggugccaggag

SEQ ID NO: 196273 - RNA, 22 nt, Human
gccacagugggugccaggaggg

SEQ ID NO: 196274 - RNA, 23 nt, Human
gcgccggcaggcccuggcgccag

SEQ ID NO: 196275 - RNA, 19 nt, Human
ggacaacauacacuguccu

SEQ ID NO: 196276 - RNA, 20 nt, Human
ggagaggcaguaggcugggg

SEQ ID NO: 196277 - RNA, 18 nt, Human
ggagggcacuugcugacc

SEQ ID NO: 196278 - RNA, 18 nt, Human
ggagggcacuugcugacc

SEQ ID NO: 196279 - RNA, 19 nt, Human
ggcaggcccuggcgccagc

SEQ ID NO: 196280 - RNA, 23 nt, Human
ggcccagaaggccugucaggugg

SEQ ID NO: 196281 - RNA, 22 nt, Human
ggcggcaggcguggggacgguc

SEQ ID NO: 196282 - RNA, 19 nt, Human
ggcuaggacugguuccacg

SEQ ID NO: 196283 - RNA, 18 nt, Human
ggcuuuggaggcccagaa

SEQ ID NO: 196284 - RNA, 24 nt, Human
gggcaggaaccugggaugccacag

SEQ ID NO: 196285 - RNA, 19 nt, Human
gggcuuuggaggcccagaa

SEQ ID NO: 196286 - RNA, 20 nt, Human
ggggaggaagcagcuaaugc

SEQ ID NO: 196287 - RNA, 19 nt, Human
gggugccaggaggggagga

SEQ ID NO: 196288 - RNA, 24 nt, Human
gugggccaucuugcccagugucag

SEQ ID NO: 196289 - RNA, 23 nt, Human
guggguagguguuuggacucuuu

SEQ ID NO: 196290 - RNA, 22 nt, Human
uacacccagacuccucuuuaca

SEQ ID NO: 196291 - RNA, 20 nt, Human
uacagggcaggaaccuggga

SEQ ID NO: 196292 - RNA, 18 nt, Human
ucacacgcggcuaggacu

SEQ ID NO: 196293 - RNA, 19 nt, Human
ucagguggugugauuuucc

SEQ ID NO: 196294 - RNA, 18 nt, Human
uccaaacacagcaagaua

SEQ ID NO: 196295 - RNA, 21 nt, Human
uccaacuguggauucuuggca

SEQ ID NO: 196296 - RNA, 22 nt, Human
uccaccuccccccacgagacaa

SEQ ID NO: 196297 - RNA, 22 nt, Human
uccacgccaccacaguggugca

SEQ ID NO: 196298 - RNA, 20 nt, Human
uccauugcccaagauguuuu

SEQ ID NO: 196299 - RNA, 20 nt, Human
uccuccgcagcccuggcgag

SEQ ID NO: 196300 - RNA, 22 nt, Human
ucucaggaacaaugcucugggg

SEQ ID NO: 196301 - RNA, 18 nt, Human
ucugcuggugauaauaca

SEQ ID NO: 196302 - RNA, 21 nt, Human
ugaacgccuuugcuuguucuu

SEQ ID NO: 196303 - RNA, 18 nt, Human
ugaagagagaagugcugg

SEQ ID NO: 196304 - RNA, 19 nt, Human
ugaagagagaagugcugga

SEQ ID NO: 196305 - RNA, 21 nt, Human
ugaagagagaagugcuggaga

SEQ ID NO: 196306 - RNA, 18 nt, Human
ugagagauauuaucaaca

SEQ ID NO: 196307 - RNA, 21 nt, Human
ugaggagggauccgggugaga

SEQ ID NO: 196308 - RNA, 23 nt, Human
ugcuaugcccacacucgccuuca

SEQ ID NO: 196309 - RNA, 23 nt, Human
ugcuggagaggcaguaggcuggg

SEQ ID NO: 196310 - RNA, 23 nt, Human
ugcuuguucuucauuugggcuca

SEQ ID NO: 196311 - RNA, 19 nt, Human
ugcuuuccuccccgcgccg

SEQ ID NO: 196312 - RNA, 23 nt, Human
uggaagacaagacacauuuccgc

SEQ ID NO: 196313 - RNA, 19 nt, Human
uggagaggcaguaggcugg

SEQ ID NO: 196314 - RNA, 20 nt, Human
uggagaggcaguaggcuggg

SEQ ID NO: 196315 - RNA, 23 nt, Human
uggauucuuggcacaaagcaggu

SEQ ID NO: 196316 - RNA, 18 nt, Human
uggcacaaagcaggugug

SEQ ID NO: 196317 - RNA, 22 nt, Human
uggcacaaagcaggugugggua

SEQ ID NO: 196318 - RNA, 23 nt, Human
uggcagaucugccccauuguggg

SEQ ID NO: 196319 - RNA, 22 nt, Human
uggcagggcaagugaggaggga

SEQ ID NO: 196320 - RNA, 22 nt, Human
uggcagggcaagugaggggaac

SEQ ID NO: 196321 - RNA, 19 nt, Human
uggcggucggggucgcggg

SEQ ID NO: 196322 - RNA, 23 nt, Human
uggcugaugcucucaagagcauc

SEQ ID NO: 196323 - RNA, 19 nt, Human
ugggcuuuggaggcccaga

SEQ ID NO: 196324 - RNA, 19 nt, Human
uggguagguguuuggacuc

SEQ ID NO: 196325 - RNA, 23 nt, Human
ugguuaguugaaguccuuguugc

SEQ ID NO: 196326 - RNA, 20 nt, Human
ugucacacgcggcuaggacu

SEQ ID NO: 196327 - RNA, 19 nt, Human
uguccaaacacagcaagau

SEQ ID NO: 196328 - RNA, 23 nt, Human
uguggggagggcacuugcugacc

SEQ ID NO: 196329 - RNA, 23 nt, Human
uguggggagggcacuugcugacc

SEQ ID NO: 196330 - RNA, 23 nt, Human
uguuggaugaaugcauacauuag

SEQ ID NO: 196331 - RNA, 24 nt, Human
uuccgcaggacuguccaccucccc

SEQ ID NO: 196332 - RNA, 22 nt, Human
uuuuucagcugcuguagccgau

SEQ ID NO: 196333 - RNA, 22 nt, Human
aaaccgaggcggagacgcgaga

SEQ ID NO: 196334 - RNA, 21 nt, Human
aaaugcuggaauccacagggc

SEQ ID NO: 196335 - RNA, 24 nt, Human
aaauuucaaauauaaauuaaaaug

SEQ ID NO: 196336 - RNA, 19 nt, Human
aacagggaagaaggagaga

SEQ ID NO: 196337 - RNA, 20 nt, Human
aacagggaagaaggagagaa

SEQ ID NO: 196338 - RNA, 19 nt, Human
aagaagcagaucuacucaa

SEQ ID NO: 196339 - RNA, 18 nt, Human
aagaaggagagaaagagg

SEQ ID NO: 196340 - RNA, 22 nt, Human
aagaaucucagcccggcuccac

SEQ ID NO: 196341 - RNA, 18 nt, Human
aagcaaaagccaaggggu

SEQ ID NO: 196342 - RNA, 21 nt, Human
aagcaaaagccaaggggucug

SEQ ID NO: 196343 - RNA, 18 nt, Human
acaugucaagaugaagaa

SEQ ID NO: 196344 - RNA, 25 nt, Human
accggcgagggugcgcccggcuggc

SEQ ID NO: 196345 - RNA, 20 nt, Human
acuaaaaacucccccuuccc

SEQ ID NO: 196346 - RNA, 21 nt, Human
acuaaaaacucccccuucccc

SEQ ID NO: 196347 - RNA, 27 nt, Human
acuaaaaacucccccuuccccaaaggu

SEQ ID NO: 196348 - RNA, 21 nt, Human
acuccuggcuuugguuucauu

SEQ ID NO: 196349 - RNA, 25 nt, Human
acugucaccccuccacccuccccac

SEQ ID NO: 196350 - RNA, 19 nt, Human
agaacuaaauaaaauuuca

SEQ ID NO: 196351 - RNA, 18 nt, Human
aggaauggcaaaugcugg

SEQ ID NO: 196352 - RNA, 19 nt, Human
aggcuaccggcgagggugc

SEQ ID NO: 196353 - RNA, 21 nt, Human
agggaagaaggagagaaagag

SEQ ID NO: 196354 - RNA, 19 nt, Human
auccucaguggagaccucc

SEQ ID NO: 196355 - RNA, 25 nt, Human
augaagaagcagaucuacucaagaa

SEQ ID NO: 196356 - RNA, 18 nt, Human
augcgucaacuccuggcu

SEQ ID NO: 196357 - RNA, 18 nt, Human
augucaagaugaagaagc

SEQ ID NO: 196358 - RNA, 18 nt, Human
caaacuaaaaacuccccc

SEQ ID NO: 196359 - RNA, 26 nt, Human
caaacuaaaaacucccccuuccccaa

SEQ ID NO: 196360 - RNA, 18 nt, Human
caaaugcuggaauccaca

SEQ ID NO: 196361 - RNA, 27 nt, Human
caacaucagugcugggggaugcacccc

SEQ ID NO: 196362 - RNA, 18 nt, Human
caaugggaaugguuauga

SEQ ID NO: 196363 - RNA, 23 nt, Human
cagaguugggaaaccgaggcgga

SEQ ID NO: 196364 - RNA, 18 nt, Human
caggauuccuugauucca

SEQ ID NO: 196365 - RNA, 20 nt, Human
caggcuccaaggugaagcaa

SEQ ID NO: 196366 - RNA, 20 nt, Human
cagugggaccucuccgauuc

SEQ ID NO: 196367 - RNA, 18 nt, Human
cauggaauuuggcaaggg

SEQ ID NO: 196368 - RNA, 24 nt, Human
ccauggauuuuccuccacugucac

SEQ ID NO: 196369 - RNA, 18 nt, Human
cccacaggcgaaugaggu

SEQ ID NO: 196370 - RNA, 20 nt, Human
cccccuuccccaaaggucca

SEQ ID NO: 196371 - RNA, 24 nt, Human
ccccuccacccuccccacgucugg

SEQ ID NO: 196372 - RNA, 18 nt, Human
cccgggacuccugcgccg

SEQ ID NO: 196373 - RNA, 19 nt, Human
ccgcugagaugcgacagcu

SEQ ID NO: 196374 - RNA, 21 nt, Human
ccuccacccuccccacgucug

SEQ ID NO: 196375 - RNA, 21 nt, Human
ccucucugccaagcaaaagcc

SEQ ID NO: 196376 - RNA, 26 nt, Human
ccucucugccaagcaaaagccaaggg

SEQ ID NO: 196377 - RNA, 22 nt, Human
cggcgagggugcgcccggcugg

SEQ ID NO: 196378 - RNA, 18 nt, Human
cuaagggagauaauuuuc

SEQ ID NO: 196379 - RNA, 20 nt, Human
cuaagggagauaauuuucau

SEQ ID NO: 196380 - RNA, 19 nt, Human
cuccugcgccggaguuuca

SEQ ID NO: 196381 - RNA, 21 nt, Human
cucuacaaugagaugcagaga

SEQ ID NO: 196382 - RNA, 21 nt, Human
cucucugccaagcaaaagcca

SEQ ID NO: 196383 - RNA, 20 nt, Human
cuuugugcuggggcucggcu

SEQ ID NO: 196384 - RNA, 21 nt, Human
gaagaagcagaucuacucaag

SEQ ID NO: 196385 - RNA, 19 nt, Human
gaagaaggagagaaagagg

SEQ ID NO: 196386 - RNA, 19 nt, Human
gaagaaggagagaaagagg

SEQ ID NO: 196387 - RNA, 26 nt, Human
gagaaucaguaacaacaucagugcug

SEQ ID NO: 196388 - RNA, 20 nt, Human
gcacaucuauauacauaaca

SEQ ID NO: 196389 - RNA, 19 nt, Human
gccagcggcagcccgggac

SEQ ID NO: 196390 - RNA, 24 nt, Human
gcuggggcucggcugccgggccgg

SEQ ID NO: 196391 - RNA, 19 nt, Human
ggagauaauuuucauguuu

SEQ ID NO: 196392 - RNA, 21 nt, Human
gggcccgcggauuuucuuagc

SEQ ID NO: 196393 - RNA, 24 nt, Human
gggcgcgggucuccggagacguga

SEQ ID NO: 196394 - RNA, 22 nt, Human
uaaaacaaacuaaaaacucccc

SEQ ID NO: 196395 - RNA, 23 nt, Human
uaaauuaaaaugaaaauacagug

SEQ ID NO: 196396 - RNA, 27 nt, Human
uaccggcgagggugcgcccggcuggcg

SEQ ID NO: 196397 - RNA, 19 nt, Human
uagaaggcgccucaguucu

SEQ ID NO: 196398 - RNA, 25 nt, Human
uauauacauaacaaauuaacauaua

SEQ ID NO: 196399 - RNA, 18 nt, Human
ucaagaugaagaagcaga

SEQ ID NO: 196400 - RNA, 24 nt, Human
ucagccaccaagcucuacaaugag

SEQ ID NO: 196401 - RNA, 19 nt, Human
ucaguggagaccucccaga

SEQ ID NO: 196402 - RNA, 19 nt, Human
uccacucgggcagugggac

SEQ ID NO: 196403 - RNA, 18 nt, Human
uccacugucaccccucca

SEQ ID NO: 196404 - RNA, 18 nt, Human
uccaggaauggcaaaugc

SEQ ID NO: 196405 - RNA, 18 nt, Human
ucccccuuccccaaaggu

SEQ ID NO: 196406 - RNA, 22 nt, Human
ucccccuuccccaaagguccau

SEQ ID NO: 196407 - RNA, 23 nt, Human
ucccuucucuucccacaggcgaa

SEQ ID NO: 196408 - RNA, 22 nt, Human
uccucaguggagaccucccaga

SEQ ID NO: 196409 - RNA, 19 nt, Human
ucuacaaugagaugcagag

SEQ ID NO: 196410 - RNA, 21 nt, Human
ucuacaaugagaugcagagac

SEQ ID NO: 196411 - RNA, 20 nt, Human
ucuccuggcgacguguccgg

SEQ ID NO: 196412 - RNA, 18 nt, Human
ucucugccaagcaaaagc

SEQ ID NO: 196413 - RNA, 23 nt, Human
ucugacaggagaaucaguaacaa

SEQ ID NO: 196414 - RNA, 21 nt, Human
ugacacaaggggaugacaucu

SEQ ID NO: 196415 - RNA, 18 nt, Human
ugagaagaaucucagccc

SEQ ID NO: 196416 - RNA, 18 nt, Human
ugagguuaaagaggggcu

SEQ ID NO: 196417 - RNA, 22 nt, Human
ugcagagacaaaacccagucca

SEQ ID NO: 196418 - RNA, 22 nt, Human
uggagaccucccagaucucuga

SEQ ID NO: 196419 - RNA, 18 nt, Human
uggggcucggcugccggg

SEQ ID NO: 196420 - RNA, 26 nt, Human
ugucaagaugaagaagcagaucuacu

SEQ ID NO: 196421 - RNA, 22 nt, Human
uucauugcccagacucaggauu

SEQ ID NO: 196422 - RNA, 23 nt, Human
uuccuccacugucaccccuccac

SEQ ID NO: 196423 - RNA, 25 nt, Human
uugccagcggcagcccgggacuccu

SEQ ID NO: 196424 - RNA, 21 nt, Human
uuggcgucacaacugcuagaa

SEQ ID NO: 196425 - RNA, 22 nt, Human
aaacaggcagaccccgacccgg

SEQ ID NO: 196426 - RNA, 18 nt, Human
aaggccaaauggccgcag

SEQ ID NO: 196427 - RNA, 25 nt, Human
acagagaagcuagucacucuccuca

SEQ ID NO: 196428 - RNA, 20 nt, Human
agaccccgacccggcuccag

SEQ ID NO: 196429 - RNA, 25 nt, Human
agagaagcuagucacucuccucagg

SEQ ID NO: 196430 - RNA, 21 nt, Human
aguggaagguggccaccuggg

SEQ ID NO: 196431 - RNA, 19 nt, Human
cagcaaggcugcggcggag

SEQ ID NO: 196432 - RNA, 19 nt, Human
ccagcaaggcugcggcgga

SEQ ID NO: 196433 - RNA, 20 nt, Human
cgacccggcuccagcaaggc

SEQ ID NO: 196434 - RNA, 21 nt, Human
gcuccagcaaggcugcggcgg

SEQ ID NO: 196435 - RNA, 22 nt, Human
guggaagguggccaccugggac

SEQ ID NO: 196436 - RNA, 18 nt, Human
guggcugggccuggcugg

SEQ ID NO: 196437 - RNA, 24 nt, Human
ucccaggaguccuggguggcuggg

SEQ ID NO: 196438 - RNA, 23 nt, Human
uccuggguggcugggccuggcug

SEQ ID NO: 196439 - RNA, 25 nt, Human
ugggaaacaggcagaccccgacccg

SEQ ID NO: 196440 - RNA, 21 nt, Human
uggguggcugggccuggcugg

SEQ ID NO: 196441 - RNA, 25 nt, Human
uggguggcugggccuggcugggaaa

SEQ ID NO: 196442 - RNA, 22 nt, Human
aaaggaauagaaacaaaaaaaa

SEQ ID NO: 196443 - RNA, 19 nt, Human
aaucgcgcccuccguccac

SEQ ID NO: 196444 - RNA, 19 nt, Human
acagagaauucucaccggc

SEQ ID NO: 196445 - RNA, 18 nt, Human
acaguuccuuccuuuggc

SEQ ID NO: 196446 - RNA, 23 nt, Human
accagccacuuuacagacucucu

SEQ ID NO: 196447 - RNA, 22 nt, Human
accccauccccccaaucacucc

SEQ ID NO: 196448 - RNA, 24 nt, Human
accccauccccccaaucacuccca

SEQ ID NO: 196449 - RNA, 18 nt, Human
agcucgggcaacacagac

SEQ ID NO: 196450 - RNA, 23 nt, Human
caaaguaaccauugcucccaggc

SEQ ID NO: 196451 - RNA, 21 nt, Human
caaggugggcaaucagcaccc

SEQ ID NO: 196452 - RNA, 26 nt, Human
caccagguaggcugccaucacccccu

SEQ ID NO: 196453 - RNA, 18 nt, Human
caccccauccccccaauc

SEQ ID NO: 196454 - RNA, 23 nt, Human
caccccauccccccaaucacucc

SEQ ID NO: 196455 - RNA, 24 nt, Human
caccccauccccccaaucacuccc

SEQ ID NO: 196456 - RNA, 24 nt, Human
caccccauccccccaaucacuccc

SEQ ID NO: 196457 - RNA, 19 nt, Human
cacccccugucccuuccag

SEQ ID NO: 196458 - RNA, 21 nt, Human
cacccccugucccuuccagcc

SEQ ID NO: 196459 - RNA, 19 nt, Human
caccccucccccucgauuc

SEQ ID NO: 196460 - RNA, 23 nt, Human
caccccugaccuggaguuagggg

SEQ ID NO: 196461 - RNA, 25 nt, Human
cagccccagcaccuccagaagugau

SEQ ID NO: 196462 - RNA, 18 nt, Human
caggccaugagaauacca

SEQ ID NO: 196463 - RNA, 22 nt, Human
caggguaguuuauccaccccuc

SEQ ID NO: 196464 - RNA, 19 nt, Human
caucaugauaacucccccc

SEQ ID NO: 196465 - RNA, 30 nt, Human
caucaugauaacuccccccagcagccccaa

SEQ ID NO: 196466 - RNA, 19 nt, Human
ccaaccucuacgcaccccu

SEQ ID NO: 196467 - RNA, 24 nt, Human
ccaaccucuacgcaccccugaccu

SEQ ID NO: 196468 - RNA, 23 nt, Human
cccaaccucuacgcaccccugac

SEQ ID NO: 196469 - RNA, 22 nt, Human
cccaccccauccccccaaucac

SEQ ID NO: 196470 - RNA, 18 nt, Human
ccccaaucacucccaaau

SEQ ID NO: 196471 - RNA, 19 nt, Human
ccccagcagccccagcacc

SEQ ID NO: 196472 - RNA, 27 nt, Human
ccccauccccccaaucacucccaaauc

SEQ ID NO: 196473 - RNA, 23 nt, Human
ccccccagcagccccagcaccuc

SEQ ID NO: 196474 - RNA, 19 nt, Human
ccccugaccuggaguuagg

SEQ ID NO: 196475 - RNA, 19 nt, Human
cccugaagccuccaccaac

SEQ ID NO: 196476 - RNA, 21 nt, Human
ccuccuguuacccucucuguc

SEQ ID NO: 196477 - RNA, 20 nt, Human
ccucuacgcaccccugaccu

SEQ ID NO: 196478 - RNA, 19 nt, Human
cgagaacaggugggguagg

SEQ ID NO: 196479 - RNA, 19 nt, Human
cuauggucccucuggccuc

SEQ ID NO: 196480 - RNA, 23 nt, Human
cuccaaucgcgcccuccguccac

SEQ ID NO: 196481 - RNA, 22 nt, Human
cuccgagaacaggugggguagg

SEQ ID NO: 196482 - RNA, 22 nt, Human
cucucccaccccauccccccaa

SEQ ID NO: 196483 - RNA, 22 nt, Human
cuuuacuccaaucgcgcccucc

SEQ ID NO: 196484 - RNA, 21 nt, Human
gaacuuccuguguagcaacuu

SEQ ID NO: 196485 - RNA, 18 nt, Human
gaagccuccaccaacugg

SEQ ID NO: 196486 - RNA, 21 nt, Human
gaagccuccaccaacuggugg

SEQ ID NO: 196487 - RNA, 23 nt, Human
gaguuagggguagagguuugggg

SEQ ID NO: 196488 - RNA, 20 nt, Human
gccccagcaccuccagaagu

SEQ ID NO: 196489 - RNA, 25 nt, Human
gccccagcaccuccagaagugauug

SEQ ID NO: 196490 - RNA, 18 nt, Human
gcccugggacacuaaucu

SEQ ID NO: 196491 - RNA, 19 nt, Human
gcuacaguuccuuccuuug

SEQ ID NO: 196492 - RNA, 21 nt, Human
gcugaccagagggacagaggc

SEQ ID NO: 196493 - RNA, 23 nt, Human
ggccaugagaauaccaauuaacc

SEQ ID NO: 196494 - RNA, 18 nt, Human
ggccuggaaaggauggua

SEQ ID NO: 196495 - RNA, 23 nt, Human
gggcaaucagcaccaucaugaua

SEQ ID NO: 196496 - RNA, 19 nt, Human
gggcggaagaucggagguc

SEQ ID NO: 196497 - RNA, 22 nt, Human
gggguaggggacaccagguagg

SEQ ID NO: 196498 - RNA, 24 nt, Human
ggugaggaaaaggccuggaaagga

SEQ ID NO: 196499 - RNA, 18 nt, Human
gguuaccaccccuccccc

SEQ ID NO: 196500 - RNA, 23 nt, Human
uaaaaggaauagaaacaaaaaaa

SEQ ID NO: 196501 - RNA, 20 nt, Human
uaacuccccccagcagcccc

SEQ ID NO: 196502 - RNA, 21 nt, Human
uaccaauuaacccucucccac

SEQ ID NO: 196503 - RNA, 23 nt, Human
uaccaauuaacccucucccaccc

SEQ ID NO: 196504 - RNA, 21 nt, Human
uaucccgaaccaccucccgga

SEQ ID NO: 196505 - RNA, 21 nt, Human
ucagcaccaucaugauaacuc

SEQ ID NO: 196506 - RNA, 18 nt, Human
ucaggccaugagaauacc

SEQ ID NO: 196507 - RNA, 22 nt, Human
uccaccaacuggugggagaaag

SEQ ID NO: 196508 - RNA, 21 nt, Human
ucccaagacuaguucucuuua

SEQ ID NO: 196509 - RNA, 19 nt, Human
ucccaccccauccccccaa

SEQ ID NO: 196510 - RNA, 20 nt, Human
ucccaccccauccccccaaa

SEQ ID NO: 196511 - RNA, 23 nt, Human
uccccccagcagccccagcaccu

SEQ ID NO: 196512 - RNA, 22 nt, Human
uccccgacuccuccuguuaccc

SEQ ID NO: 196513 - RNA, 21 nt, Human
ucccucuggccucucauucuc

SEQ ID NO: 196514 - RNA, 18 nt, Human
ucccuggccagggccccc

SEQ ID NO: 196515 - RNA, 24 nt, Human
ucccuggccagggcccccaaccuu

SEQ ID NO: 196516 - RNA, 21 nt, Human
uccgcuuuacuccaaucgcgc

SEQ ID NO: 196517 - RNA, 21 nt, Human
uccuuuggcagaugucccugg

SEQ ID NO: 196518 - RNA, 21 nt, Human
ucuacgcaccccugaccugga

SEQ ID NO: 196519 - RNA, 22 nt, Human
ucucccauucccuuaaguuccc

SEQ ID NO: 196520 - RNA, 28 nt, Human
ucucugggcccucgucucuuccgaucgg

SEQ ID NO: 196521 - RNA, 18 nt, Human
ugacucaacucuauaccu

SEQ ID NO: 196522 - RNA, 21 nt, Human
ugaugccucccucagcagcuc

SEQ ID NO: 196523 - RNA, 23 nt, Human
ugccaaaguaaccauugcuccca

SEQ ID NO: 196524 - RNA, 24 nt, Human
ugccaucacccccugucccuucca

SEQ ID NO: 196525 - RNA, 23 nt, Human
uggggcaggguaguuuauccacc

SEQ ID NO: 196526 - RNA, 18 nt, Human
ugguucuccgagaacagg

SEQ ID NO: 196527 - RNA, 18 nt, Human
uguuacccucucugucca

SEQ ID NO: 196528 - RNA, 22 nt, Human
uuagggguagagguuuggggca

SEQ ID NO: 196529 - RNA, 19 nt, Human
uuaucccgaaccaccuccc

SEQ ID NO: 196530 - RNA, 24 nt, Human
uugacucaacucuauaccuacacu

SEQ ID NO: 196531 - RNA, 22 nt, Human
uugcucccaggcuacaguuccu

SEQ ID NO: 196532 - RNA, 18 nt, Human
uuuauccaccccucacuc

SEQ ID NO: 196533 - RNA, 19 nt, Human
uuuaucccgaaccaccucc

SEQ ID NO: 196534 - RNA, 21 nt, Human
acuggcccccugcuccgucgc

SEQ ID NO: 196535 - RNA, 21 nt, Human
agcgaggguaugcaagagaaa

SEQ ID NO: 196536 - RNA, 18 nt, Human
agcuggccccacuggccc

SEQ ID NO: 196537 - RNA, 19 nt, Human
aggcagaagugacaccccg

SEQ ID NO: 196538 - RNA, 24 nt, Human
aggcagguccucccugagcuggcc

SEQ ID NO: 196539 - RNA, 18 nt, Human
cacagcccacgaaccuag

SEQ ID NO: 196540 - RNA, 23 nt, Human
cacagcccacgaaccuagugccc

SEQ ID NO: 196541 - RNA, 18 nt, Human
cccccugcuccgucgccu

SEQ ID NO: 196542 - RNA, 26 nt, Human
cccccugcuccgucgccuccacagcc

SEQ ID NO: 196543 - RNA, 23 nt, Human
ccugcuccgucgccuccacagcc

SEQ ID NO: 196544 - RNA, 19 nt, Human
cuccgucgccuccacagcc

SEQ ID NO: 196545 - RNA, 22 nt, Human
ucccugagcuggccccacuggc

SEQ ID NO: 196546 - RNA, 24 nt, Human
ucccugagcuggccccacuggccc

SEQ ID NO: 196547 - RNA, 18 nt, Human
ugagcuggccccacuggc

SEQ ID NO: 196548 - RNA, 23 nt, Human
ugcuccgucgccuccacagccca

SEQ ID NO: 196549 - RNA, 20 nt, Human
uggagggcagggaggcagaa

SEQ ID NO: 196550 - RNA, 18 nt, Human
uggggccaagugggcucu

SEQ ID NO: 196551 - RNA, 22 nt, Human
aacucuugccucucagucccac

SEQ ID NO: 196552 - RNA, 22 nt, Human
aacucuugccucucagucccac

SEQ ID NO: 196553 - RNA, 23 nt, Human
acaaagggaagggcaggaacaac

SEQ ID NO: 196554 - RNA, 21 nt, Human
acacaugcaggugccuuugca

SEQ ID NO: 196555 - RNA, 21 nt, Human
accucagccccaccucucugg

SEQ ID NO: 196556 - RNA, 21 nt, Human
agaucagcguggggaagaggg

SEQ ID NO: 196557 - RNA, 20 nt, Human
aggaacacagacacauucag

SEQ ID NO: 196558 - RNA, 18 nt, Human
agggucaugguggacaug

SEQ ID NO: 196559 - RNA, 20 nt, Human
augguggacaugaggguggg

SEQ ID NO: 196560 - RNA, 24 nt, Human
caacucuugccucucagucccaca

SEQ ID NO: 196561 - RNA, 24 nt, Human
caacucuugccucucagucccaca

SEQ ID NO: 196562 - RNA, 20 nt, Human
caugcaggugccuuugcaga

SEQ ID NO: 196563 - RNA, 21 nt, Human
cauggcaagaauuugaaaaag

SEQ ID NO: 196564 - RNA, 18 nt, Human
cauggggguggggugcuc

SEQ ID NO: 196565 - RNA, 20 nt, Human
cauucaggugccuuuguaga

SEQ ID NO: 196566 - RNA, 24 nt, Human
ccccaccuccucacauuaugccua

SEQ ID NO: 196567 - RNA, 25 nt, Human
ccucucauggcaagaauuugaaaaa

SEQ ID NO: 196568 - RNA, 25 nt, Human
ccucucauggcaagaauuugagaaa

SEQ ID NO: 196569 - RNA, 20 nt, Human
cucagucccacacaaggcag

SEQ ID NO: 196570 - RNA, 21 nt, Human
cucauggcaagaauuugaaaa

SEQ ID NO: 196571 - RNA, 21 nt, Human
cucauggcaagaauuugagaa

SEQ ID NO: 196572 - RNA, 21 nt, Human
ggaaagaugauuggagaggga

SEQ ID NO: 196573 - RNA, 18 nt, Human
ggaagggcaggaacaacu

SEQ ID NO: 196574 - RNA, 19 nt, Human
ggaagggcaggaacaacuc

SEQ ID NO: 196575 - RNA, 19 nt, Human
gggaagggcaggaacaacu

SEQ ID NO: 196576 - RNA, 20 nt, Human
gggagggaacacagaucagc

SEQ ID NO: 196577 - RNA, 20 nt, Human
gggagggaacacagaucagc

SEQ ID NO: 196578 - RNA, 20 nt, Human
ggugcucuccccaccuccuc

SEQ ID NO: 196579 - RNA, 18 nt, Human
gguggacaugaggguggg

SEQ ID NO: 196580 - RNA, 23 nt, Human
gucaugguggacauggggguggg

SEQ ID NO: 196581 - RNA, 22 nt, Human
uacacgaacacagacacaugca

SEQ ID NO: 196582 - RNA, 25 nt, Human
ucaagucacaaagggaaggcaggaa

SEQ ID NO: 196583 - RNA, 22 nt, Human
ucacaaagggaaggcaggaaca

SEQ ID NO: 196584 - RNA, 19 nt, Human
ucaugguggacaugagggu

SEQ ID NO: 196585 - RNA, 22 nt, Human
ucaugguggacaugaggguggg

SEQ ID NO: 196586 - RNA, 21 nt, Human
ucucagucccacacaaggcag

SEQ ID NO: 196587 - RNA, 18 nt, Human
ucucauguguuccauuua

SEQ ID NO: 196588 - RNA, 19 nt, Human
ucuccuuuaauuaacucau

SEQ ID NO: 196589 - RNA, 20 nt, Human
ucuggaacaggaaagaugau

SEQ ID NO: 196590 - RNA, 20 nt, Human
ucuggaacaggaaagaugau

SEQ ID NO: 196591 - RNA, 23 nt, Human
ucuggaacaggaaagaugauugg

SEQ ID NO: 196592 - RNA, 23 nt, Human
ucuggaacaggaaagaugauugg

SEQ ID NO: 196593 - RNA, 24 nt, Human
ugagaaaaagauggagacaucuca

SEQ ID NO: 196594 - RNA, 22 nt, Human
ugauuggagagggagcacaggu

SEQ ID NO: 196595 - RNA, 18 nt, Human
ugcucuccccaccuccuc

SEQ ID NO: 196596 - RNA, 25 nt, Human
uggaacaggaaagaugauuggagag

SEQ ID NO: 196597 - RNA, 22 nt, Human
uggagagggagcacaggucagc

SEQ ID NO: 196598 - RNA, 19 nt, Human
ugggaagagggucauggug

SEQ ID NO: 196599 - RNA, 21 nt, Human
uggggaagagggucauggugg

SEQ ID NO: 196600 - RNA, 18 nt, Human
ugucucucaaauuuuagg

SEQ ID NO: 196601 - RNA, 23 nt, Human
uguuccauuuauuuugucucuca

SEQ ID NO: 196602 - RNA, 19 nt, Human
uuacagcucagugcaccau

SEQ ID NO: 196603 - RNA, 21 nt, Human
uuacagcucagugcaccauga

SEQ ID NO: 196604 - RNA, 20 nt, Human
uucuaauuuuaagagggaag

SEQ ID NO: 196605 - RNA, 18 nt, Human
uugcagaaacaaagucag

SEQ ID NO: 196606 - RNA, 23 nt, Human
aaauccugcaucucagucccaca

SEQ ID NO: 196607 - RNA, 20 nt, Human
aauccugcaucucaguccca

SEQ ID NO: 196608 - RNA, 21 nt, Human
aauccugcaucucagucccac

SEQ ID NO: 196609 - RNA, 19 nt, Human
agaaauccugcaucucagu

SEQ ID NO: 196610 - RNA, 23 nt, Human
aggaacgcagacacauucagacg

SEQ ID NO: 196611 - RNA, 24 nt, Human
augaucggggagggaacacagguc

SEQ ID NO: 196612 - RNA, 18 nt, Human
caggggucacgguggaca

SEQ ID NO: 196613 - RNA, 18 nt, Human
caguguggggacaggggu

SEQ ID NO: 196614 - RNA, 18 nt, Human
cuggaagguucucagguc

SEQ ID NO: 196615 - RNA, 18 nt, Human
gaacacaggucagugugg

SEQ ID NO: 196616 - RNA, 19 nt, Human
gaacacaggucaguguggg

SEQ ID NO: 196617 - RNA, 20 nt, Human
gacgccuuugcagaaagaga

SEQ ID NO: 196618 - RNA, 18 nt, Human
gagaacacaaauuuauau

SEQ ID NO: 196619 - RNA, 19 nt, Human
gcagaaagagaugccagag

SEQ ID NO: 196620 - RNA, 21 nt, Human
gggaacacaggucaguguggg

SEQ ID NO: 196621 - RNA, 19 nt, Human
gggagggaacacaggucag

SEQ ID NO: 196622 - RNA, 25 nt, Human
gggagggaacacaggucaguguggg

SEQ ID NO: 196623 - RNA, 21 nt, Human
ggggugggcugucucuccacc

SEQ ID NO: 196624 - RNA, 21 nt, Human
gguggacacgggggugggcug

SEQ ID NO: 196625 - RNA, 24 nt, Human
uaacuucauuagggaaguaagaag

SEQ ID NO: 196626 - RNA, 23 nt, Human
uaugcuaacaggaacgcagacac

SEQ ID NO: 196627 - RNA, 22 nt, Human
ucacgguggacacggggguggg

SEQ ID NO: 196628 - RNA, 21 nt, Human
ucuggaacaggaaagaugauc

SEQ ID NO: 196629 - RNA, 23 nt, Human
ucuggaacaggaaagaugaucgg

SEQ ID NO: 196630 - RNA, 21 nt, Human
ucuuuauuugcucucucaacu

SEQ ID NO: 196631 - RNA, 20 nt, Human
uuaacuucauuagggaaguu

SEQ ID NO: 196632 - RNA, 21 nt, Human
uugcagcucagugcaccauga

SEQ ID NO: 196633 - RNA, 18 nt, Human
uuugagaacacaaauuua

SEQ ID NO: 196634 - RNA, 18 nt, Human
uuugagacagagauggag

SEQ ID NO: 196635 - RNA, 21 nt, Human
accccagggaugucccagaga

SEQ ID NO: 196636 - RNA, 21 nt, Human
agcauccucuguuuggauggc

SEQ ID NO: 196637 - RNA, 18 nt, Human
aggcaggccacucuggga

SEQ ID NO: 196638 - RNA, 21 nt, Human
cacacaccccagggauguccc

SEQ ID NO: 196639 - RNA, 24 nt, Human
cacacaccccagggaugucccaga

SEQ ID NO: 196640 - RNA, 19 nt, Human
caccccagggaugucccag

SEQ ID NO: 196641 - RNA, 23 nt, Human
caccccagggaugucccagagac

SEQ ID NO: 196642 - RNA, 20 nt, Human
cccagagacuucuucuaccc

SEQ ID NO: 196643 - RNA, 18 nt, Human
ccugggcaggaugugaga

SEQ ID NO: 196644 - RNA, 19 nt, Human
gagacuucuucuacccuaa

SEQ ID NO: 196645 - RNA, 19 nt, Human
ggagauccugggcaggaug

SEQ ID NO: 196646 - RNA, 21 nt, Human
gggcaggaugugagaaaucug

SEQ ID NO: 196647 - RNA, 19 nt, Human
gugauaggcaggccacucu

SEQ ID NO: 196648 - RNA, 18 nt, Human
uaagaggagauccugggc

SEQ ID NO: 196649 - RNA, 19 nt, Human
uaagaggagauccugggca

SEQ ID NO: 196650 - RNA, 21 nt, Human
uaggagcuaccaacccagcuu

SEQ ID NO: 196651 - RNA, 19 nt, Human
ucccagagacuucuucuac

SEQ ID NO: 196652 - RNA, 18 nt, Human
uccccaggugggaaaucu

SEQ ID NO: 196653 - RNA, 22 nt, Human
uccucuguuuggauggccgaag

SEQ ID NO: 196654 - RNA, 18 nt, Human
uccugggcaggaugugag

SEQ ID NO: 196655 - RNA, 19 nt, Human
ucuacacacacaccccagg

SEQ ID NO: 196656 - RNA, 21 nt, Human
ucuacacacacaccccaggga

SEQ ID NO: 196657 - RNA, 27 nt, Human
ucuacacacacaccccagggauguccc

SEQ ID NO: 196658 - RNA, 18 nt, Human
uggauggccgaagcugcu

SEQ ID NO: 196659 - RNA, 20 nt, Human
uuuuuuuuuuuuaaagaaau

SEQ ID NO: 196660 - RNA, 19 nt, Human
uuuuuuuuuuuuuuuuuaa

SEQ ID NO: 196661 - RNA, 18 nt, Human
agccuggguagaugaucu

SEQ ID NO: 196662 - RNA, 18 nt, Human
caggggguugaagauguu

SEQ ID NO: 196663 - RNA, 23 nt, Human
ccaaaguuuauuucucugaaaca

SEQ ID NO: 196664 - RNA, 20 nt, Human
ccccuggaccagcucuucca

SEQ ID NO: 196665 - RNA, 23 nt, Human
cccgggucccuugaccccccaaa

SEQ ID NO: 196666 - RNA, 25 nt, Human
ccucgccugucccagaagccccagc

SEQ ID NO: 196667 - RNA, 23 nt, Human
ccucuauggcacacugagagccc

SEQ ID NO: 196668 - RNA, 22 nt, Human
ccuucucacuuggaguggaagu

SEQ ID NO: 196669 - RNA, 23 nt, Human
cgggucccuugaccccccaaaug

SEQ ID NO: 196670 - RNA, 20 nt, Human
gcauagucccaggaaugagg

SEQ ID NO: 196671 - RNA, 18 nt, Human
gcccgggucccuugaccc

SEQ ID NO: 196672 - RNA, 18 nt, Human
ggagacugggaaauucaa

SEQ ID NO: 196673 - RNA, 19 nt, Human
uacauaggggagacuggga

SEQ ID NO: 196674 - RNA, 23 nt, Human
uagcaucauugaguuugaaucuc

SEQ ID NO: 196675 - RNA, 19 nt, Human
uggaccagcucuuccaggg

SEQ ID NO: 196676 - RNA, 20 nt, Human
uucaguccccuggaccagcu

SEQ ID NO: 196677 - RNA, 26 nt, Human
aaaaacagugaaaaggaaacagugac

SEQ ID NO: 196678 - RNA, 23 nt, Human
aacauugaccucaugaauguccu

SEQ ID NO: 196679 - RNA, 19 nt, Human
aagcuuuggagaucaugac

SEQ ID NO: 196680 - RNA, 21 nt, Human
acugcaguuggaagacagaaa

SEQ ID NO: 196681 - RNA, 21 nt, Human
acuucaggcuccagagagaga

SEQ ID NO: 196682 - RNA, 22 nt, Human
agaaaggaaaaaaaugagacag

SEQ ID NO: 196683 - RNA, 20 nt, Human
agacagaaagcuuuggagau

SEQ ID NO: 196684 - RNA, 23 nt, Human
aggaaacagugacuaccugagca

SEQ ID NO: 196685 - RNA, 19 nt, Human
agggagaagggcagauggg

SEQ ID NO: 196686 - RNA, 19 nt, Human
caggcuccagagagagaag

SEQ ID NO: 196687 - RNA, 23 nt, Human
cagugaaaaggaaacagugacua

SEQ ID NO: 196688 - RNA, 24 nt, Human
cucagaacacagagcuccagaauc

SEQ ID NO: 196689 - RNA, 27 nt, Human
cugcaguuggaagacagaaagcuuugg

SEQ ID NO: 196690 - RNA, 19 nt, Human
uaaaaucgucagccucuuc

SEQ ID NO: 196691 - RNA, 21 nt, Human
uaccucacccagggcccagac

SEQ ID NO: 196692 - RNA, 18 nt, Human
ucacccagggcccagacu

SEQ ID NO: 196693 - RNA, 23 nt, Human
ucacccagggcccagacuacuca

SEQ ID NO: 196694 - RNA, 24 nt, Human
ucacccagggcccagacuacucau

SEQ ID NO: 196695 - RNA, 18 nt, Human
ucagaacacagagcucca

SEQ ID NO: 196696 - RNA, 20 nt, Human
uccagagagagaagcuucag

SEQ ID NO: 196697 - RNA, 26 nt, Human
uccagagagagaagcuucagugagga

SEQ ID NO: 196698 - RNA, 18 nt, Human
ucuucugaagacugugga

SEQ ID NO: 196699 - RNA, 21 nt, Human
ugaauguccuuuaccucaccc

SEQ ID NO: 196700 - RNA, 22 nt, Human
ugauuuggggcuggaaggagua

SEQ ID NO: 196701 - RNA, 24 nt, Human
uggaagacagaaagcuuuggagau

SEQ ID NO: 196702 - RNA, 26 nt, Human
uuuaaaaacagugaaaaggaaacagu

SEQ ID NO: 196703 - RNA, 20 nt, Human
uuuggagaucaugacuuaua

SEQ ID NO: 196704 - RNA, 31 nt, Human
aagaaagaaauauuaaugucagcuaagaaag

SEQ ID NO: 196705 - RNA, 32 nt, Human
aagaaagaaauauuaaugucagcuaagaaagg

SEQ ID NO: 196706 - RNA, 19 nt, Human
aagaagaaaaaaaucagga

SEQ ID NO: 196707 - RNA, 22 nt, Human
aggaagucagggaaauaauuuu

SEQ ID NO: 196708 - RNA, 25 nt, Human
aggagaaaagggauaugauaaaugg

SEQ ID NO: 196709 - RNA, 18 nt, Human
agggugggaacacaagga

SEQ ID NO: 196710 - RNA, 24 nt, Human
aguacagacuuacuuuuuuauuuu

SEQ ID NO: 196711 - RNA, 19 nt, Human
aguccacucuucugcuccu

SEQ ID NO: 196712 - RNA, 21 nt, Human
cucuucccaaggcagccuuag

SEQ ID NO: 196713 - RNA, 23 nt, Human
cuguagauggcgaugcaccuucc

SEQ ID NO: 196714 - RNA, 26 nt, Human
cuuaagaagaaaaaaaucaggaaguc

SEQ ID NO: 196715 - RNA, 20 nt, Human
gauguuaaauuggcuugaaa

SEQ ID NO: 196716 - RNA, 21 nt, Human
gcauuugugagcucugagcag

SEQ ID NO: 196717 - RNA, 22 nt, Human
ggcaacucuuaguagguaacac

SEQ ID NO: 196718 - RNA, 19 nt, Human
uaagaagaaaaaaaucagg

SEQ ID NO: 196719 - RNA, 20 nt, Human
uagauggcgaugcaccuucc

SEQ ID NO: 196720 - RNA, 22 nt, Human
uagcaaguccacucuucugcuc

SEQ ID NO: 196721 - RNA, 18 nt, Human
ucccaaggcagccuuagc

SEQ ID NO: 196722 - RNA, 24 nt, Human
ugagccaaaggcagaggguaucca

SEQ ID NO: 196723 - RNA, 26 nt, Human
ugagcucugagcagauauagcaauuu

SEQ ID NO: 196724 - RNA, 21 nt, Human
ugccaagggugggaacacaag

SEQ ID NO: 196725 - RNA, 21 nt, Human
uggagauuauagauggagguu

SEQ ID NO: 196726 - RNA, 18 nt, Human
uggguggcaaugccaagg

SEQ ID NO: 196727 - RNA, 20 nt, Human
aaacgcugaagaugacugcu

SEQ ID NO: 196728 - RNA, 18 nt, Human
aaaugcugaagaugacug

SEQ ID NO: 196729 - RNA, 20 nt, Human
aacaauaaguacacaagaga

SEQ ID NO: 196730 - RNA, 20 nt, Human
aaugauaggaaauagaggaa

SEQ ID NO: 196731 - RNA, 20 nt, Human
aaugauaggaaauagaggaa

SEQ ID NO: 196732 - RNA, 20 nt, Human
acaguuugaggaaaccuuaa

SEQ ID NO: 196733 - RNA, 25 nt, Human
agaggcauauccacacuuggggugg

SEQ ID NO: 196734 - RNA, 18 nt, Human
agcucgggagugaggcag

SEQ ID NO: 196735 - RNA, 21 nt, Human
aggaaaaggcaauagacaggg

SEQ ID NO: 196736 - RNA, 21 nt, Human
aggaaaaggcaauagacaggg

SEQ ID NO: 196737 - RNA, 21 nt, Human
agugaggcagaacagacaaga

SEQ ID NO: 196738 - RNA, 23 nt, Human
auaaguacacaagagagccccau

SEQ ID NO: 196739 - RNA, 22 nt, Human
caagagaugccccauggggcau

SEQ ID NO: 196740 - RNA, 21 nt, Human
cacaguuugaggaaaccuuaa

SEQ ID NO: 196741 - RNA, 25 nt, Human
cacccaagaucaucaaaauaguuua

SEQ ID NO: 196742 - RNA, 24 nt, Human
cagugaucuucucucuaagaaaca

SEQ ID NO: 196743 - RNA, 18 nt, Human
ccauagcagagacagacu

SEQ ID NO: 196744 - RNA, 18 nt, Human
ccauagcagagacagacu

SEQ ID NO: 196745 - RNA, 23 nt, Human
cuggaaaacgcugaagaugacug

SEQ ID NO: 196746 - RNA, 19 nt, Human
gagcucgggagugaggcag

SEQ ID NO: 196747 - RNA, 18 nt, Human
gaggcagaacagacaaga

SEQ ID NO: 196748 - RNA, 23 nt, Human
ggaaauagaggaaaauagauacc

SEQ ID NO: 196749 - RNA, 23 nt, Human
ggaaauagaggaaaauagauacc

SEQ ID NO: 196750 - RNA, 24 nt, Human
ggucaaggauuguaauauugccag

SEQ ID NO: 196751 - RNA, 19 nt, Human
uaaaaugauaggaaauaga

SEQ ID NO: 196752 - RNA, 19 nt, Human
uaaaaugauaggaaauaga

SEQ ID NO: 196753 - RNA, 23 nt, Human
uaaagccauuaaagcagaaguuu

SEQ ID NO: 196754 - RNA, 23 nt, Human
uaaagucauuaaagcagaaguuu

SEQ ID NO: 196755 - RNA, 18 nt, Human
uaagaaacaccaucaccu

SEQ ID NO: 196756 - RNA, 20 nt, Human
uaagaaacaccaucaccucc

SEQ ID NO: 196757 - RNA, 22 nt, Human
uaagaaacaccaucaccuccau

SEQ ID NO: 196758 - RNA, 20 nt, Human
uaagaaacaucaucaccucc

SEQ ID NO: 196759 - RNA, 25 nt, Human
uagauacaggaaaaggcaauagaca

SEQ ID NO: 196760 - RNA, 25 nt, Human
uagauacaggaaaaggcaauagaca

SEQ ID NO: 196761 - RNA, 18 nt, Human
uagcagagacagacuccu

SEQ ID NO: 196762 - RNA, 23 nt, Human
uagcagagacagacuccuguaug

SEQ ID NO: 196763 - RNA, 23 nt, Human
uagcagagacagacuccuguaug

SEQ ID NO: 196764 - RNA, 24 nt, Human
uccauagcagagacagaccggggc

SEQ ID NO: 196765 - RNA, 24 nt, Human
uccauagcagagacagaccggggc

SEQ ID NO: 196766 - RNA, 23 nt, Human
uccauagcagagacagacuccug

SEQ ID NO: 196767 - RNA, 23 nt, Human
uccauagcagagacagacuccug

SEQ ID NO: 196768 - RNA, 22 nt, Human
ucucuaagaaacaccaucaccu

SEQ ID NO: 196769 - RNA, 22 nt, Human
uggaaaaugcugaagaugacug

SEQ ID NO: 196770 - RNA, 26 nt, Human
uguuagaguacggagcaaucgaggag

SEQ ID NO: 196771 - RNA, 19 nt, Human
aacacaggucagugugagg

SEQ ID NO: 196772 - RNA, 18 nt, Human
aagugcugggauuacagg

SEQ ID NO: 196773 - RNA, 19 nt, Human
aagugcugggauuacaggc

SEQ ID NO: 196774 - RNA, 21 nt, Human
aagugcugggauuacaggcau

SEQ ID NO: 196775 - RNA, 22 nt, Human
aagugcugggauuacaggcaug

SEQ ID NO: 196776 - RNA, 23 nt, Human
aagugcugggauuacaggcauga

SEQ ID NO: 196777 - RNA, 26 nt, Human
aagugcugggauuacaggcaugagcu

SEQ ID NO: 196778 - RNA, 19 nt, Human
acagacagauucagaggcc

SEQ ID NO: 196779 - RNA, 19 nt, Human
acccaggcuggagugcagu

SEQ ID NO: 196780 - RNA, 18 nt, Human
acccugucacccaggcug

SEQ ID NO: 196781 - RNA, 25 nt, Human
acccugucacccaggcuggagugca

SEQ ID NO: 196782 - RNA, 18 nt, Human
acgggguuucaccguguu

SEQ ID NO: 196783 - RNA, 19 nt, Human
acgggguuucaccguguua

SEQ ID NO: 196784 - RNA, 20 nt, Human
acgggguuucaccguguuag

SEQ ID NO: 196785 - RNA, 24 nt, Human
acgggguuucaccguguuagccag

SEQ ID NO: 196786 - RNA, 19 nt, Human
agaaaagagaacagggaag

SEQ ID NO: 196787 - RNA, 21 nt, Human
agaaaagagaacagggaagga

SEQ ID NO: 196788 - RNA, 19 nt, Human
agagacgggguuucaccgu

SEQ ID NO: 196789 - RNA, 21 nt, Human
aggaacacaggucagugugag

SEQ ID NO: 196790 - RNA, 20 nt, Human
agggaaggaacacaggucag

SEQ ID NO: 196791 - RNA, 20 nt, Human
aguagagacgggguuucacc

SEQ ID NO: 196792 - RNA, 21 nt, Human
aguagagacgggguuucaccg

SEQ ID NO: 196793 - RNA, 23 nt, Human
aguagcugggacuacaggcccgu

SEQ ID NO: 196794 - RNA, 23 nt, Human
cacccugucacccaggcuggagu

SEQ ID NO: 196795 - RNA, 24 nt, Human
cacccugucacccaggcuggagug

SEQ ID NO: 196796 - RNA, 27 nt, Human
cacccugucacccaggcuggagugcag

SEQ ID NO: 196797 - RNA, 18 nt, Human
caccguguuagccaggau

SEQ ID NO: 196798 - RNA, 21 nt, Human
caccguguuagccaggauggu

SEQ ID NO: 196799 - RNA, 24 nt, Human
caccguguuagccaggaugguuuc

SEQ ID NO: 196800 - RNA, 21 nt, Human
cacugcaaccuccgccucccg

SEQ ID NO: 196801 - RNA, 23 nt, Human
cacugcaaccuccgccucccggg

SEQ ID NO: 196802 - RNA, 18 nt, Human
ccgcacucugcccagguu

SEQ ID NO: 196803 - RNA, 23 nt, Human
ccgccuccugaguagcugggacu

SEQ ID NO: 196804 - RNA, 19 nt, Human
ccuaagugcugggauuaca

SEQ ID NO: 196805 - RNA, 22 nt, Human
ccuaagugcugggauuacaggc

SEQ ID NO: 196806 - RNA, 23 nt, Human
ccuaagugcugggauuacaggca

SEQ ID NO: 196807 - RNA, 24 nt, Human
ccuaagugcugggauuacaggcau

SEQ ID NO: 196808 - RNA, 19 nt, Human
ccuccgccuccugaguagc

SEQ ID NO: 196809 - RNA, 18 nt, Human
ccucgugaucugcccucc

SEQ ID NO: 196810 - RNA, 21 nt, Human
ccucgugaucugcccuccucg

SEQ ID NO: 196811 - RNA, 20 nt, Human
ccucugcgcccagcuaauuu

SEQ ID NO: 196812 - RNA, 23 nt, Human
ccugaguagcugggacuacaggc

SEQ ID NO: 196813 - RNA, 24 nt, Human
ccugucacccaggcuggagugcag

SEQ ID NO: 196814 - RNA, 21 nt, Human
cgcacacaaggcagcugugca

SEQ ID NO: 196815 - RNA, 19 nt, Human
cgccucccggguugacgcc

SEQ ID NO: 196816 - RNA, 22 nt, Human
cuaagugcugggauuacaggca

SEQ ID NO: 196817 - RNA, 23 nt, Human
cucacauugugcuaacagggaca

SEQ ID NO: 196818 - RNA, 24 nt, Human
cucacugcaaccuccgccucccgg

SEQ ID NO: 196819 - RNA, 22 nt, Human
cuccugaccucgugaucugccc

SEQ ID NO: 196820 - RNA, 23 nt, Human
cugcaaccuccgccucccggguu

SEQ ID NO: 196821 - RNA, 23 nt, Human
cugccuccgccuccugaguagcu

SEQ ID NO: 196822 - RNA, 20 nt, Human
cuggagugcagucgcacaau

SEQ ID NO: 196823 - RNA, 18 nt, Human
gaacacaggucaguguga

SEQ ID NO: 196824 - RNA, 19 nt, Human
gaccucgugaucugcccuc

SEQ ID NO: 196825 - RNA, 22 nt, Human
gaccucgugaucugcccuccuc

SEQ ID NO: 196826 - RNA, 24 nt, Human
gaccucgugaucugcccuccucgg

SEQ ID NO: 196827 - RNA, 24 nt, Human
gagacgggguuucaccguguuagc

SEQ ID NO: 196828 - RNA, 20 nt, Human
gaguagcugggacuacaggc

SEQ ID NO: 196829 - RNA, 26 nt, Human
gaguagcugggacuacaggcccgugc

SEQ ID NO: 196830 - RNA, 19 nt, Human
gauuacaggcaugagcugc

SEQ ID NO: 196831 - RNA, 23 nt, Human
gauuacaggcaugagcugccgca

SEQ ID NO: 196832 - RNA, 23 nt, Human
gcccagcuaauuuuuuguauuuu

SEQ ID NO: 196833 - RNA, 19 nt, Human
ggaaauccugcaucucagu

SEQ ID NO: 196834 - RNA, 19 nt, Human
ggaaauccugcaucucagu

SEQ ID NO: 196835 - RNA, 19 nt, Human
ggauuacaggcaugagcug

SEQ ID NO: 196836 - RNA, 23 nt, Human
gggguuucaccguguuagccagg

SEQ ID NO: 196837 - RNA, 22 nt, Human
ggguuucaccguguuagccagg

SEQ ID NO: 196838 - RNA, 20 nt, Human
gguuucgaucuccugaccuc

SEQ ID NO: 196839 - RNA, 23 nt, Human
guagagacgggguuucaccgugu

SEQ ID NO: 196840 - RNA, 25 nt, Human
uaauuuuuuguauuuuuuaguagag

SEQ ID NO: 196841 - RNA, 26 nt, Human
uaauuuuuuguauuuuuuaguagaga

SEQ ID NO: 196842 - RNA, 21 nt, Human
uacaggcaugagcugccgcac

SEQ ID NO: 196843 - RNA, 21 nt, Human
uagaaaagagaacagggaagg

SEQ ID NO: 196844 - RNA, 21 nt, Human
uaguagagacgggguuucacc

SEQ ID NO: 196845 - RNA, 24 nt, Human
uaguagagacgggguuucaccgug

SEQ ID NO: 196846 - RNA, 26 nt, Human
uaguagagacgggguuucaccguguu

SEQ ID NO: 196847 - RNA, 21 nt, Human
ucacccaggcuggagugcagu

SEQ ID NO: 196848 - RNA, 22 nt, Human
ucacccugucacccaggcugga

SEQ ID NO: 196849 - RNA, 24 nt, Human
ucacccugucacccaggcuggagu

SEQ ID NO: 196850 - RNA, 24 nt, Human
ucaccguguuagccaggaugguuu

SEQ ID NO: 196851 - RNA, 23 nt, Human
ucacugcaaccuccgccucccgg

SEQ ID NO: 196852 - RNA, 24 nt, Human
ucacugcaaccuccgccucccggg

SEQ ID NO: 196853 - RNA, 25 nt, Human
ucacugcaaccuccgccucccgggu

SEQ ID NO: 196854 - RNA, 26 nt, Human
ucacugcaaccuccgccucccggguu

SEQ ID NO: 196855 - RNA, 24 nt, Human
ucccggguugacgccauucuccug

SEQ ID NO: 196856 - RNA, 24 nt, Human
ucccuaagugcugggauuacaggc

SEQ ID NO: 196857 - RNA, 24 nt, Human
uccugaguagcugggacuacaggc

SEQ ID NO: 196858 - RNA, 24 nt, Human
ucgcacaauccuggcucacugcaa

SEQ ID NO: 196859 - RNA, 20 nt, Human
ugcaaaaagagaagccagag

SEQ ID NO: 196860 - RNA, 24 nt, Human
ugcaaaaagagaagccagaguccc

SEQ ID NO: 196861 - RNA, 24 nt, Human
ugccuccgccuccugaguagcugg

SEQ ID NO: 196862 - RNA, 22 nt, Human
ugccucugcgcccagcuaauuu

SEQ ID NO: 196863 - RNA, 24 nt, Human
ugccucugcgcccagcuaauuuuu

SEQ ID NO: 196864 - RNA, 18 nt, Human
ugcugggauuacaggcau

SEQ ID NO: 196865 - RNA, 24 nt, Human
uggagugcagucgcacaauccugg

SEQ ID NO: 196866 - RNA, 18 nt, Human
ugggauuacaggcaugag

SEQ ID NO: 196867 - RNA, 19 nt, Human
ugggauuacaggcaugagc

SEQ ID NO: 196868 - RNA, 21 nt, Human
ugggauuacaggcaugagcug

SEQ ID NO: 196869 - RNA, 22 nt, Human
ugggauuacaggcaugagcugc

SEQ ID NO: 196870 - RNA, 23 nt, Human
ugggauuacaggcaugagcugcc

SEQ ID NO: 196871 - RNA, 24 nt, Human
ugggauuacaggcaugagcugccg

SEQ ID NO: 196872 - RNA, 24 nt, Human
ugggauuacaggcaugagcugccg

SEQ ID NO: 196873 - RNA, 25 nt, Human
ugggauuacaggcaugagcugccgc

SEQ ID NO: 196874 - RNA, 21 nt, Human
ugugaggaagggggucauggu

SEQ ID NO: 196875 - RNA, 18 nt, Human
uuaguagagacgggguuu

SEQ ID NO: 196876 - RNA, 22 nt, Human
uuaguagagacgggguuucacc

SEQ ID NO: 196877 - RNA, 24 nt, Human
uuaguagagacgggguuucaccgu

SEQ ID NO: 196878 - RNA, 24 nt, Human
uucacccugucacccaggcuggag

SEQ ID NO: 196879 - RNA, 18 nt, Human
uugcaaaaagagaagcca

SEQ ID NO: 196880 - RNA, 22 nt, Human
uuucacccugucacccaggcug

SEQ ID NO: 196881 - RNA, 24 nt, Human
uuucacccugucacccaggcugga

SEQ ID NO: 196882 - RNA, 19 nt, Human
uuucaccguguuagccagg

SEQ ID NO: 196883 - RNA, 24 nt, Human
uuuuuaguagagacgggguuucac

SEQ ID NO: 196884 - RNA, 27 nt, Human
uuuuuauuuuuuaauuuuuauuuuuug

SEQ ID NO: 196885 - RNA, 22 nt, Human
uuuuuguauuuuuuaguagaga

SEQ ID NO: 196886 - RNA, 23 nt, Human
uuuuuuaguagagacgggguuuc

SEQ ID NO: 196887 - RNA, 25 nt, Human
uuuuuuguauuuuuuaguagagacg

SEQ ID NO: 196888 - RNA, 19 nt, Human
uaucuugcuucucaguccc

SEQ ID NO: 196889 - RNA, 21 nt, Human
uaucuugcuucucagucccac

SEQ ID NO: 196890 - RNA, 21 nt, Human
ucagucccacacaaggaagcu

SEQ ID NO: 196891 - RNA, 19 nt, Human
aaacagcccaucacaugcu

SEQ ID NO: 196892 - RNA, 19 nt, Human
aagaucccaaggaucucag

SEQ ID NO: 196893 - RNA, 23 nt, Human
aaggaucucagggaucagccucc

SEQ ID NO: 196894 - RNA, 22 nt, Human
acuacagaaaaauauucaugaa

SEQ ID NO: 196895 - RNA, 21 nt, Human
acugccuagaguagaacaaaa

SEQ ID NO: 196896 - RNA, 19 nt, Human
agagggucauggugggcac

SEQ ID NO: 196897 - RNA, 21 nt, Human
agaucccaaggaucucaggga

SEQ ID NO: 196898 - RNA, 19 nt, Human
agccccuuuucuggaacag

SEQ ID NO: 196899 - RNA, 18 nt, Human
agggucauggugggcaca

SEQ ID NO: 196900 - RNA, 21 nt, Human
agucacagugaggggugacac

SEQ ID NO: 196901 - RNA, 20 nt, Human
cauagcacagcuaugucccc

SEQ ID NO: 196902 - RNA, 21 nt, Human
caucccagccccuuuucugga

SEQ ID NO: 196903 - RNA, 19 nt, Human
cccuguuccccucaacaac

SEQ ID NO: 196904 - RNA, 22 nt, Human
ccucaacaacccacacacauca

SEQ ID NO: 196905 - RNA, 31 nt, Human
cucaaauuucaggaaucuucuccuuuaauuu

SEQ ID NO: 196906 - RNA, 19 nt, Human
cucccccauggcucccaaa

SEQ ID NO: 196907 - RNA, 19 nt, Human
cugccuagaguagaacaaa

SEQ ID NO: 196908 - RNA, 23 nt, Human
gaaccaggaccgcggcgacguga

SEQ ID NO: 196909 - RNA, 25 nt, Human
gcucccccauggcucccaaacacaa

SEQ ID NO: 196910 - RNA, 18 nt, Human
ggagacaucccagccccu

SEQ ID NO: 196911 - RNA, 20 nt, Human
gggaaggaaugcaguucagc

SEQ ID NO: 196912 - RNA, 21 nt, Human
ggugggcacaggggugggcug

SEQ ID NO: 196913 - RNA, 23 nt, Human
gucaggguucuugaagucacaaa

SEQ ID NO: 196914 - RNA, 18 nt, Human
uaaaaaccugucaccuaa

SEQ ID NO: 196915 - RNA, 21 nt, Human
uagaaccaggaccgcggcgac

SEQ ID NO: 196916 - RNA, 18 nt, Human
uagcucaguggaccacaa

SEQ ID NO: 196917 - RNA, 24 nt, Human
ucacaugcucaauacauugaaguc

SEQ ID NO: 196918 - RNA, 22 nt, Human
ucauggugggcacagggguggg

SEQ ID NO: 196919 - RNA, 23 nt, Human
ucauggugggcacaggggugggc

SEQ ID NO: 196920 - RNA, 18 nt, Human
uccccuguuccccucaac

SEQ ID NO: 196921 - RNA, 21 nt, Human
ugaggaagagggucauggugg

SEQ ID NO: 196922 - RNA, 22 nt, Human
ugccuagaguagaacaaaaaca

SEQ ID NO: 196923 - RNA, 26 nt, Human
uggcucccaaacacaagaucccuccu

SEQ ID NO: 196924 - RNA, 24 nt, Human
uggcucccaaacacaagaucccuu

SEQ ID NO: 196925 - RNA, 19 nt, Human
uggugggcacagggguggg

SEQ ID NO: 196926 - RNA, 18 nt, Human
uuugagacagagacggag

SEQ ID NO: 196927 - RNA, 24 nt, Human
agagacugaaagcugacagucuuu

SEQ ID NO: 196928 - RNA, 24 nt, Human
agaggaaggagaacuggaaaagag

SEQ ID NO: 196929 - RNA, 21 nt, Human
aggaaggagaacuggaaaaga

SEQ ID NO: 196930 - RNA, 21 nt, Human
aggcuugacucuaugggggac

SEQ ID NO: 196931 - RNA, 19 nt, Human
auaaaacaguccaucaaaa

SEQ ID NO: 196932 - RNA, 21 nt, Human
cagucuuuuuggagccaaaga

SEQ ID NO: 196933 - RNA, 28 nt, Human
cuccucuguugcugccauaaaugcucaa

SEQ ID NO: 196934 - RNA, 18 nt, Human
cucuaugggggacagagg

SEQ ID NO: 196935 - RNA, 21 nt, Human
ggacagaggauaacauggcuc

SEQ ID NO: 196936 - RNA, 18 nt, Human
ggagccaaagaacaaaga

SEQ ID NO: 196937 - RNA, 19 nt, Human
ggauaacauggcuccuaga

SEQ ID NO: 196938 - RNA, 19 nt, Human
uaacauggcuccuagagga

SEQ ID NO: 196939 - RNA, 21 nt, Human
ugauaaaacaguccaucaaaa

SEQ ID NO: 196940 - RNA, 25 nt, Human
ugauaaaacaguccaucaaaagaga

SEQ ID NO: 196941 - RNA, 20 nt, Human
uuguggcuccucuguugcug

SEQ ID NO: 196942 - RNA, 22 nt, Human
aaaaacaaacagaaacacagaa

SEQ ID NO: 196943 - RNA, 28 nt, Human
aaacaaacagaaacacagaaaaagaaca

SEQ ID NO: 196944 - RNA, 29 nt, Human
aaacaaacagaaacacagaaaaagaacaa

SEQ ID NO: 196945 - RNA, 25 nt, Human
aaacagaaacacagaaaaagaacaa

SEQ ID NO: 196946 - RNA, 26 nt, Human
aaaccuaaaaacaaacagaaacacag

SEQ ID NO: 196947 - RNA, 19 nt, Human
aaacgacaacaaaacaaac

SEQ ID NO: 196948 - RNA, 19 nt, Human
aaacucacauccaagaagc

SEQ ID NO: 196949 - RNA, 18 nt, Human
aaagaaaacgacaacaaa

SEQ ID NO: 196950 - RNA, 23 nt, Human
aaagcucuugacuugauguuaca

SEQ ID NO: 196951 - RNA, 25 nt, Human
aaauccuuccuacuuccaccacucc

SEQ ID NO: 196952 - RNA, 18 nt, Human
aacaaugacuaagugucc

SEQ ID NO: 196953 - RNA, 25 nt, Human
aacggaagcccacccugccucccuu

SEQ ID NO: 196954 - RNA, 26 nt, Human
aacuggcuuaaaagcuccaaauccuc

SEQ ID NO: 196955 - RNA, 22 nt, Human
aagaaauagggcccacuuguuc

SEQ ID NO: 196956 - RNA, 23 nt, Human
aagagaagggaagucaagcaaaa

SEQ ID NO: 196957 - RNA, 26 nt, Human
aagagcaaacagaucuggagaacgga

SEQ ID NO: 196958 - RNA, 20 nt, Human
aagcuaauggcaaacaacag

SEQ ID NO: 196959 - RNA, 20 nt, Human
aaggcucacucccaaagauc

SEQ ID NO: 196960 - RNA, 24 nt, Human
aaucacuggaacccaguaggcaga

SEQ ID NO: 196961 - RNA, 24 nt, Human
aaucgcccaccuccucauccaagu

SEQ ID NO: 196962 - RNA, 21 nt, Human
aaugaacugauuuccucuaca

SEQ ID NO: 196963 - RNA, 22 nt, Human
aaugauaacauuuuuucccaaa

SEQ ID NO: 196964 - RNA, 24 nt, Human
acacacauaugcgggcacacacac

SEQ ID NO: 196965 - RNA, 21 nt, Human
acacacgcacgcacacacaua

SEQ ID NO: 196966 - RNA, 26 nt, Human
acaccaaagaaaacgacaacaaaaca

SEQ ID NO: 196967 - RNA, 20 nt, Human
acaccacugcacuccagccu

SEQ ID NO: 196968 - RNA, 24 nt, Human
acaccacugcacuccagccuggac

SEQ ID NO: 196969 - RNA, 25 nt, Human
acaccacugcacuccagccuggacu

SEQ ID NO: 196970 - RNA, 22 nt, Human
acauaugcgggcacacacacac

SEQ ID NO: 196971 - RNA, 23 nt, Human
accacucccuagcagaguuccca

SEQ ID NO: 196972 - RNA, 20 nt, Human
accacugcacuccagccugg

SEQ ID NO: 196973 - RNA, 22 nt, Human
accacugcacuccagccuggac

SEQ ID NO: 196974 - RNA, 25 nt, Human
accacugcacuccagccuggacgac

SEQ ID NO: 196975 - RNA, 22 nt, Human
accagcuagcucuaucucuaca

SEQ ID NO: 196976 - RNA, 21 nt, Human
accugugggagggcuuucccu

SEQ ID NO: 196977 - RNA, 24 nt, Human
acgcagcaucugcuucaaggccga

SEQ ID NO: 196978 - RNA, 24 nt, Human
acugcacuccagccuggacgacag

SEQ ID NO: 196979 - RNA, 22 nt, Human
acuuuguacccaaaugcucucc

SEQ ID NO: 196980 - RNA, 21 nt, Human
agaaaacgacaacaaaacaaa

SEQ ID NO: 196981 - RNA, 20 nt, Human
agaaacacagaaaaagaaca

SEQ ID NO: 196982 - RNA, 24 nt, Human
agacagguggaucacgaggucagg

SEQ ID NO: 196983 - RNA, 20 nt, Human
agaccuggauaaagauggug

SEQ ID NO: 196984 - RNA, 18 nt, Human
agagguuguggugagccg

SEQ ID NO: 196985 - RNA, 18 nt, Human
agcaaaaggcucacuccc

SEQ ID NO: 196986 - RNA, 19 nt, Human
agcacuuugggaggccgag

SEQ ID NO: 196987 - RNA, 20 nt, Human
agcaggcaaggcauaucuuc

SEQ ID NO: 196988 - RNA, 21 nt, Human
agccaaaucgcccaccuccuc

SEQ ID NO: 196989 - RNA, 22 nt, Human
agccuggauggcauggugaaac

SEQ ID NO: 196990 - RNA, 24 nt, Human
agccuggauggcauggugaaaccc

SEQ ID NO: 196991 - RNA, 19 nt, Human
aggaguucgaaaccagccu

SEQ ID NO: 196992 - RNA, 24 nt, Human
aggcagagguuguggugagccgag

SEQ ID NO: 196993 - RNA, 23 nt, Human
aggcaggagaaucacuggaaccc

SEQ ID NO: 196994 - RNA, 20 nt, Human
aggcauggaaaagagaaggg

SEQ ID NO: 196995 - RNA, 24 nt, Human
aggcgcgguggcucacaccuguaa

SEQ ID NO: 196996 - RNA, 24 nt, Human
agguggaucacgaggucaggaguu

SEQ ID NO: 196997 - RNA, 23 nt, Human
aguccgggagugaaagaccccag

SEQ ID NO: 196998 - RNA, 27 nt, Human
aguuauugcuguguucuuccuuuugag

SEQ ID NO: 196999 - RNA, 27 nt, Human
auacagggccaggcgcgguggcucaca

SEQ ID NO: 197000 - RNA, 19 nt, Human
aucacgaggucaggaguuc

SEQ ID NO: 197001 - RNA, 25 nt, Human
aucccagagccucuucaaacaccaa

SEQ ID NO: 197002 - RNA, 19 nt, Human
aucuggagaacggaagccc

SEQ ID NO: 197003 - RNA, 23 nt, Human
auggaccaugcaaacgccuucaa

SEQ ID NO: 197004 - RNA, 28 nt, Human
caaaacaaaccuaaaaacaaacagaaac

SEQ ID NO: 197005 - RNA, 22 nt, Human
caaagcagaaccgcgcugucac

SEQ ID NO: 197006 - RNA, 18 nt, Human
caaagcagaguguccaga

SEQ ID NO: 197007 - RNA, 23 nt, Human
caaaucgcccaccuccucaucca

SEQ ID NO: 197008 - RNA, 21 nt, Human
caacccacugguacccagagu

SEQ ID NO: 197009 - RNA, 18 nt, Human
caaggcuggaaacgcaga

SEQ ID NO: 197010 - RNA, 20 nt, Human
caaugcacagccucuaaaac

SEQ ID NO: 197011 - RNA, 26 nt, Human
cacacacauaugcgggcacacacaca

SEQ ID NO: 197012 - RNA, 22 nt, Human
cacacacgcacgcacacacaua

SEQ ID NO: 197013 - RNA, 30 nt, Human
cacacauaugcgggcacacacacacauccu

SEQ ID NO: 197014 - RNA, 21 nt, Human
cacaccacugcacuccagccu

SEQ ID NO: 197015 - RNA, 24 nt, Human
cacaccuguaaucccagcacuuug

SEQ ID NO: 197016 - RNA, 20 nt, Human
cacagaaaaagaacaaagac

SEQ ID NO: 197017 - RNA, 23 nt, Human
cacagccucuaaaacaagggcua

SEQ ID NO: 197018 - RNA, 18 nt, Human
caccaaagaaaacgacaa

SEQ ID NO: 197019 - RNA, 18 nt, Human
caccaaagaaaacgacaa

SEQ ID NO: 197020 - RNA, 23 nt, Human
caccaaagaaaacgacaacaaaa

SEQ ID NO: 197021 - RNA, 21 nt, Human
caccaaagaaaacgacaacua

SEQ ID NO: 197022 - RNA, 26 nt, Human
caccacugcacuccagccuggacgac

SEQ ID NO: 197023 - RNA, 19 nt, Human
caccuguaaucccagcacu

SEQ ID NO: 197024 - RNA, 24 nt, Human
caccuguaaucccagcacuuuggg

SEQ ID NO: 197025 - RNA, 23 nt, Human
caccuguagucccagcuacucgg

SEQ ID NO: 197026 - RNA, 24 nt, Human
caccuguagucccagcuacucggg

SEQ ID NO: 197027 - RNA, 25 nt, Human
cacucccaaagaucaaagcuaagga

SEQ ID NO: 197028 - RNA, 19 nt, Human
cacugcaaccacaccagcu

SEQ ID NO: 197029 - RNA, 18 nt, Human
cacugcacuccagccugg

SEQ ID NO: 197030 - RNA, 19 nt, Human
cacugcacuccagccugga

SEQ ID NO: 197031 - RNA, 21 nt, Human
cacugcacuccagccuggacg

SEQ ID NO: 197032 - RNA, 22 nt, Human
cacugcacuccagccuggacga

SEQ ID NO: 197033 - RNA, 25 nt, Human
cacugcacuccagccuggacgacaa

SEQ ID NO: 197034 - RNA, 25 nt, Human
cacugcacuccagccuggacgacag

SEQ ID NO: 197035 - RNA, 18 nt, Human
cacuugacaaucuaagug

SEQ ID NO: 197036 - RNA, 22 nt, Human
cagagccaaaucgcccaccucc

SEQ ID NO: 197037 - RNA, 19 nt, Human
cagagccucuucaaacacc

SEQ ID NO: 197038 - RNA, 20 nt, Human
cagaucacggaugcugcuaa

SEQ ID NO: 197039 - RNA, 24 nt, Human
cagcacuuugggaggccgagacag

SEQ ID NO: 197040 - RNA, 26 nt, Human
cagcacuuugggaggccgagacaggu

SEQ ID NO: 197041 - RNA, 19 nt, Human
cagcagcucugcagugagu

SEQ ID NO: 197042 - RNA, 29 nt, Human
cagccucuaaaacaagggcuacuccuuuu

SEQ ID NO: 197043 - RNA, 26 nt, Human
caggacacuuuaaauuugcacuucga

SEQ ID NO: 197044 - RNA, 19 nt, Human
cagucuugcaggaaugcuc

SEQ ID NO: 197045 - RNA, 26 nt, Human
cauccaagaagcaguccgggagugaa

SEQ ID NO: 197046 - RNA, 22 nt, Human
cauggugaaacccccgccucua

SEQ ID NO: 197047 - RNA, 25 nt, Human
cauuucagaguaaaucugaaacugg

SEQ ID NO: 197048 - RNA, 20 nt, Human
ccaaaugcucuccgucacaa

SEQ ID NO: 197049 - RNA, 27 nt, Human
ccaaaugcucuccgucacaaaugcuau

SEQ ID NO: 197050 - RNA, 23 nt, Human
ccacacuucauuaguuuuaauuu

SEQ ID NO: 197051 - RNA, 19 nt, Human
ccacugcacuccagccugg

SEQ ID NO: 197052 - RNA, 19 nt, Human
ccacugcacuccagccugg

SEQ ID NO: 197053 - RNA, 21 nt, Human
ccacugcacuccagccuggac

SEQ ID NO: 197054 - RNA, 23 nt, Human
ccacugguacccagagucagauc

SEQ ID NO: 197055 - RNA, 20 nt, Human
cccccaaagaaauucaaaaa

SEQ ID NO: 197056 - RNA, 22 nt, Human
ccccgaccugugcacccgcacc

SEQ ID NO: 197057 - RNA, 27 nt, Human
ccccuugacaauaaacguaaguccaag

SEQ ID NO: 197058 - RNA, 27 nt, Human
ccuccuauaauagcagccagcagaaau

SEQ ID NO: 197059 - RNA, 23 nt, Human
ccuggauggcauggugaaacccc

SEQ ID NO: 197060 - RNA, 21 nt, Human
ccuguagucccagcuacucgg

SEQ ID NO: 197061 - RNA, 23 nt, Human
cgacaacaaaacaaaccuaaaaa

SEQ ID NO: 197062 - RNA, 24 nt, Human
cgagacagguggaucacgagguca

SEQ ID NO: 197063 - RNA, 20 nt, Human
cgugguccaugagccaugga

SEQ ID NO: 197064 - RNA, 20 nt, Human
cuaaagguagacagacuaua

SEQ ID NO: 197065 - RNA, 22 nt, Human
cuauaauagcagccagcagaaa

SEQ ID NO: 197066 - RNA, 24 nt, Human
cucaacaacccacugguacccaga

SEQ ID NO: 197067 - RNA, 22 nt, Human
cucacaccuguaaucccagcac

SEQ ID NO: 197068 - RNA, 24 nt, Human
cucacaccuguaaucccagcacuu

SEQ ID NO: 197069 - RNA, 20 nt, Human
cucacuuuguacccaaaugc

SEQ ID NO: 197070 - RNA, 25 nt, Human
cucacuuuguacccaaaugcucucc

SEQ ID NO: 197071 - RNA, 19 nt, Human
cucccccgaccugugcacc

SEQ ID NO: 197072 - RNA, 20 nt, Human
cucuacuaaaaauacaaaaa

SEQ ID NO: 197073 - RNA, 27 nt, Human
cugcagugaaacucaaccacgauuuuc

SEQ ID NO: 197074 - RNA, 18 nt, Human
cuguggccugugcucccc

SEQ ID NO: 197075 - RNA, 23 nt, Human
cuuaaaagcuccaaauccucccu

SEQ ID NO: 197076 - RNA, 23 nt, Human
cuucaaggcugcuucaucucucu

SEQ ID NO: 197077 - RNA, 25 nt, Human
cuuccaguggauaaaggcaaacagg

SEQ ID NO: 197078 - RNA, 21 nt, Human
cuuguucaagucuucaaugga

SEQ ID NO: 197079 - RNA, 22 nt, Human
cuuuguucccagacuccagggc

SEQ ID NO: 197080 - RNA, 20 nt, Human
gaaaagaaaauucaccuaca

SEQ ID NO: 197081 - RNA, 19 nt, Human
gaaaauacagggccaggcg

SEQ ID NO: 197082 - RNA, 18 nt, Human
gaagggauuuuguucaaa

SEQ ID NO: 197083 - RNA, 20 nt, Human
gacaacaaaacaaaccuaaa

SEQ ID NO: 197084 - RNA, 21 nt, Human
gacaacugagucuccugcgug

SEQ ID NO: 197085 - RNA, 25 nt, Human
gaccacaccacugcacuccagccug

SEQ ID NO: 197086 - RNA, 20 nt, Human
gaccugugcacccgcacccc

SEQ ID NO: 197087 - RNA, 19 nt, Human
gagaacggaagcccacccu

SEQ ID NO: 197088 - RNA, 23 nt, Human
gagaccacaccacugcacuccag

SEQ ID NO: 197089 - RNA, 20 nt, Human
gaggagcgccugcuggaaag

SEQ ID NO: 197090 - RNA, 21 nt, Human
gaucaaagcuaaggaagcccc

SEQ ID NO: 197091 - RNA, 22 nt, Human
gaucacgaggucaggaguucga

SEQ ID NO: 197092 - RNA, 21 nt, Human
gcacagccucuaaaacaaggg

SEQ ID NO: 197093 - RNA, 19 nt, Human
gcacugcuggggugggggu

SEQ ID NO: 197094 - RNA, 22 nt, Human
gcacugcugggguggggguggg

SEQ ID NO: 197095 - RNA, 23 nt, Human
gcagagguaaagaauuugaaaau

SEQ ID NO: 197096 - RNA, 23 nt, Human
gcagcucugcagugaguggggaa

SEQ ID NO: 197097 - RNA, 22 nt, Human
gcaggagaaucacuggaaccca

SEQ ID NO: 197098 - RNA, 20 nt, Human
gccgagaccacaccacugca

SEQ ID NO: 197099 - RNA, 18 nt, Human
gccuucaucuccagcugu

SEQ ID NO: 197100 - RNA, 18 nt, Human
gcucuguggccugugcuc

SEQ ID NO: 197101 - RNA, 24 nt, Human
ggaaaagagaagggaagucaagca

SEQ ID NO: 197102 - RNA, 22 nt, Human
ggaaacaaaggcauggaaaaga

SEQ ID NO: 197103 - RNA, 23 nt, Human
ggaagagagaaaacuggacaaaa

SEQ ID NO: 197104 - RNA, 20 nt, Human
ggaagggaggauaucuugcc

SEQ ID NO: 197105 - RNA, 19 nt, Human
ggcauggaaaagagaaggg

SEQ ID NO: 197106 - RNA, 19 nt, Human
ggcauuuggagaagagugg

SEQ ID NO: 197107 - RNA, 23 nt, Human
gggaugcugaggcaggagaauca

SEQ ID NO: 197108 - RNA, 20 nt, Human
gggcaaggggcgaccaugcu

SEQ ID NO: 197109 - RNA, 22 nt, Human
gggcaaggggcgaccaugcugu

SEQ ID NO: 197110 - RNA, 24 nt, Human
gggcaugguagcgugcaccuguag

SEQ ID NO: 197111 - RNA, 24 nt, Human
gggcaugguagcgugcaccuguag

SEQ ID NO: 197112 - RNA, 18 nt, Human
ggggaggcuggcuccucu

SEQ ID NO: 197113 - RNA, 20 nt, Human
gggguggggguggggacagg

SEQ ID NO: 197114 - RNA, 21 nt, Human
ggguggggacaggaagcccag

SEQ ID NO: 197115 - RNA, 24 nt, Human
gguagcgugcaccuguagucccag

SEQ ID NO: 197116 - RNA, 23 nt, Human
gguggcucacaccuguaauccca

SEQ ID NO: 197117 - RNA, 24 nt, Human
gguggcucacaccuguaaucccag

SEQ ID NO: 197118 - RNA, 24 nt, Human
gugaaauuguuaaaaagcucuagu

SEQ ID NO: 197119 - RNA, 24 nt, Human
gugcacccgcaccccagucggcca

SEQ ID NO: 197120 - RNA, 23 nt, Human
guggaucacgaggucaggaguuc

SEQ ID NO: 197121 - RNA, 20 nt, Human
guucaugugaggcaaaauca

SEQ ID NO: 197122 - RNA, 19 nt, Human
uaaaaacacagaacaauga

SEQ ID NO: 197123 - RNA, 26 nt, Human
uaaaacaaaacauagcauguuuuuca

SEQ ID NO: 197124 - RNA, 21 nt, Human
uaaaacucacauccaagaagc

SEQ ID NO: 197125 - RNA, 18 nt, Human
uaaaagcacacgccaauc

SEQ ID NO: 197126 - RNA, 21 nt, Human
uaaaaggagacacaagaaaua

SEQ ID NO: 197127 - RNA, 21 nt, Human
uaaagaauuugaaaauacagg

SEQ ID NO: 197128 - RNA, 19 nt, Human
uaacccccaaagaaauuca

SEQ ID NO: 197129 - RNA, 22 nt, Human
uaagaaaauaucugaauuuucc

SEQ ID NO: 197130 - RNA, 24 nt, Human
uaagaaagucagucccuaacuaaa

SEQ ID NO: 197131 - RNA, 20 nt, Human
uaagagcaaacagaucugga

SEQ ID NO: 197132 - RNA, 22 nt, Human
uaauagcagccagcagaaaucu

SEQ ID NO: 197133 - RNA, 18 nt, Human
uacaaagucugagaaaug

SEQ ID NO: 197134 - RNA, 19 nt, Human
uacaaggucacugcaacca

SEQ ID NO: 197135 - RNA, 21 nt, Human
uagacagacuauacuaaaaac

SEQ ID NO: 197136 - RNA, 23 nt, Human
uagacagacuauacuaaaaacca

SEQ ID NO: 197137 - RNA, 22 nt, Human
uagcagccagcagaaaucuguu

SEQ ID NO: 197138 - RNA, 23 nt, Human
uagccugacuggguaagaccugg

SEQ ID NO: 197139 - RNA, 21 nt, Human
uaggcagagguuguggugagc

SEQ ID NO: 197140 - RNA, 23 nt, Human
uauggcagcaggcaaggcauauc

SEQ ID NO: 197141 - RNA, 20 nt, Human
uauuuugguuuguuuuuuca

SEQ ID NO: 197142 - RNA, 23 nt, Human
ucacaucaggcaacgucagccug

SEQ ID NO: 197143 - RNA, 24 nt, Human
ucacgaggucaggaguucgaaacc

SEQ ID NO: 197144 - RNA, 21 nt, Human
ucacuggaacccaguaggcag

SEQ ID NO: 197145 - RNA, 18 nt, Human
ucagcugggacuggaaga

SEQ ID NO: 197146 - RNA, 19 nt, Human
ucaggacaacugagucucc

SEQ ID NO: 197147 - RNA, 23 nt, Human
ucaucaggaaaaugccaaguucc

SEQ ID NO: 197148 - RNA, 22 nt, Human
uccacacuugcuucagcaauua

SEQ ID NO: 197149 - RNA, 23 nt, Human
uccagaauaggacuucagcuuaa

SEQ ID NO: 197150 - RNA, 18 nt, Human
uccagccuggacgacaga

SEQ ID NO: 197151 - RNA, 21 nt, Human
uccaguggauaaaggcaaaca

SEQ ID NO: 197152 - RNA, 26 nt, Human
ucccaaagaucaaagcuaaggaagcc

SEQ ID NO: 197153 - RNA, 18 nt, Human
ucccaaagcagagugucc

SEQ ID NO: 197154 - RNA, 19 nt, Human
ucccagagccucuucaaac

SEQ ID NO: 197155 - RNA, 19 nt, Human
uccccaggucugcaagcua

SEQ ID NO: 197156 - RNA, 24 nt, Human
ucccuuuucuucauuaauaaaaac

SEQ ID NO: 197157 - RNA, 20 nt, Human
uccuuaggaaaggagagcuc

SEQ ID NO: 197158 - RNA, 20 nt, Human
ucgcccaccuccucauccaa

SEQ ID NO: 197159 - RNA, 22 nt, Human
ucgcccaccuccucauccaagu

SEQ ID NO: 197160 - RNA, 22 nt, Human
ucugcucaacuuaaaacucaca

SEQ ID NO: 197161 - RNA, 22 nt, Human
ucuucaauggacuggcuguucg

SEQ ID NO: 197162 - RNA, 19 nt, Human
ugaaagaaggcuugggcau

SEQ ID NO: 197163 - RNA, 20 nt, Human
ugaagcagugcggggaggcu

SEQ ID NO: 197164 - RNA, 18 nt, Human
ugacuaaguguccaagca

SEQ ID NO: 197165 - RNA, 19 nt, Human
ugaggcaggagaaucacug

SEQ ID NO: 197166 - RNA, 21 nt, Human
ugaggcaggagaaucacugga

SEQ ID NO: 197167 - RNA, 24 nt, Human
ugaggcaggagaaucacuggaacc

SEQ ID NO: 197168 - RNA, 25 nt, Human
ugaggcaggagaaucacuggaaccc

SEQ ID NO: 197169 - RNA, 20 nt, Human
ugaguaugauucauaaguuu

SEQ ID NO: 197170 - RNA, 21 nt, Human
ugcaaccacaccagcuagcuc

SEQ ID NO: 197171 - RNA, 19 nt, Human
ugcaccuguagucccagcu

SEQ ID NO: 197172 - RNA, 23 nt, Human
ugcacuacuaagaaaauaucuga

SEQ ID NO: 197173 - RNA, 21 nt, Human
ugcaugggcacggacaggcag

SEQ ID NO: 197174 - RNA, 20 nt, Human
ugccagagagcacugcuggg

SEQ ID NO: 197175 - RNA, 18 nt, Human
ugccuggcuaaagguaga

SEQ ID NO: 197176 - RNA, 20 nt, Human
ugcgcacacacgcacgcaca

SEQ ID NO: 197177 - RNA, 18 nt, Human
uggaagagagaaaacugg

SEQ ID NO: 197178 - RNA, 20 nt, Human
uggauaaagauggugcuagu

SEQ ID NO: 197179 - RNA, 22 nt, Human
uggaucacgaggucaggaguuc

SEQ ID NO: 197180 - RNA, 24 nt, Human
uggaucacgaggucaggaguucga

SEQ ID NO: 197181 - RNA, 21 nt, Human
uggcaggcagcagcucugcag

SEQ ID NO: 197182 - RNA, 25 nt, Human
uggcauggugaaacccccgccucua

SEQ ID NO: 197183 - RNA, 21 nt, Human
uggcucacaccuguaauccca

SEQ ID NO: 197184 - RNA, 22 nt, Human
uggcucacaccuguaaucccag

SEQ ID NO: 197185 - RNA, 24 nt, Human
uggcucacaccuguaaucccagca

SEQ ID NO: 197186 - RNA, 24 nt, Human
ugggaggccgagacagguggauca

SEQ ID NO: 197187 - RNA, 28 nt, Human
uggggacaggaagcccagucgggauccc

SEQ ID NO: 197188 - RNA, 19 nt, Human
uggggccacaccaccgggu

SEQ ID NO: 197189 - RNA, 21 nt, Human
uggggguggggacaggaagcc

SEQ ID NO: 197190 - RNA, 22 nt, Human
uggggguggggacaggaagccc

SEQ ID NO: 197191 - RNA, 19 nt, Human
ugggguggggguggggaca

SEQ ID NO: 197192 - RNA, 19 nt, Human
ugggguggggguggggaca

SEQ ID NO: 197193 - RNA, 23 nt, Human
uggguauuuuuucauagggcugu

SEQ ID NO: 197194 - RNA, 22 nt, Human
ugggugcuccgaucaaagcaga

SEQ ID NO: 197195 - RNA, 24 nt, Human
ugguagcgugcaccuguaguccca

SEQ ID NO: 197196 - RNA, 18 nt, Human
ugguuuguuuuuucauag

SEQ ID NO: 197197 - RNA, 19 nt, Human
uguaaaaacuccccuugac

SEQ ID NO: 197198 - RNA, 26 nt, Human
uguaaauucucacuuuguacccaaau

SEQ ID NO: 197199 - RNA, 21 nt, Human
uguagcacaucaaauuuugaa

SEQ ID NO: 197200 - RNA, 20 nt, Human
uguccugugccuggcuaaag

SEQ ID NO: 197201 - RNA, 23 nt, Human
uguggccugugcucccccgaccu

SEQ ID NO: 197202 - RNA, 22 nt, Human
uguuaaaaagcucuaguaacaa

SEQ ID NO: 197203 - RNA, 21 nt, Human
uguuacaauguauggcagcag

SEQ ID NO: 197204 - RNA, 18 nt, Human
uguuucauuuccaaaaaa

SEQ ID NO: 197205 - RNA, 27 nt, Human
uuaaccaucuaucccagagccucuuca

SEQ ID NO: 197206 - RNA, 24 nt, Human
uuacaaaauacggucgauacucaa

SEQ ID NO: 197207 - RNA, 22 nt, Human
uuagccgggcaugguagcgugc

SEQ ID NO: 197208 - RNA, 24 nt, Human
uuaguuuuaauuugcagaaaggaa

SEQ ID NO: 197209 - RNA, 24 nt, Human
uucaaaaagugaugauggcagcuc

SEQ ID NO: 197210 - RNA, 23 nt, Human
uucagaguaaaucugaaacuggc

SEQ ID NO: 197211 - RNA, 23 nt, Human
uucaugugaggcaaaaucagguu

SEQ ID NO: 197212 - RNA, 21 nt, Human
uucgcuaacacgaacagcuau

SEQ ID NO: 197213 - RNA, 25 nt, Human
uugauccugucucuucacaauaugu

SEQ ID NO: 197214 - RNA, 19 nt, Human
uugcggggugcauaaaugg

SEQ ID NO: 197215 - RNA, 28 nt, Human
uuggagaagagugguuuuuuuuguguuu

SEQ ID NO: 197216 - RNA, 18 nt, Human
uuggauggagcaaggcug

SEQ ID NO: 197217 - RNA, 18 nt, Human
uuguggugagccgagacc

SEQ ID NO: 197218 - RNA, 19 nt, Human
uuguggugagccgagacca

SEQ ID NO: 197219 - RNA, 20 nt, Human
uuguggugagccgagaccac

SEQ ID NO: 197220 - RNA, 25 nt, Human
uuuccauguaaaaacuccccuugac

SEQ ID NO: 197221 - RNA, 23 nt, Human
uuucuaggagcgugguccaugag

SEQ ID NO: 197222 - RNA, 21 nt, Human
uuuuuuguuuguuuguuuuuu

SEQ ID NO: 197223 - RNA, 22 nt, Human
aaaaagaaauaagaaagaaaga

SEQ ID NO: 197224 - RNA, 20 nt, Human
aaaagacagugaaauucuua

SEQ ID NO: 197225 - RNA, 19 nt, Human
aaacaaccgcccccuaaaa

SEQ ID NO: 197226 - RNA, 23 nt, Human
aaacagaaacaagagcuuguacu

SEQ ID NO: 197227 - RNA, 23 nt, Human
aaacauuugagaugcucauuuga

SEQ ID NO: 197228 - RNA, 21 nt, Human
aaagaaacaaccgcccccuaa

SEQ ID NO: 197229 - RNA, 18 nt, Human
aaaggaacacgcacacgc

SEQ ID NO: 197230 - RNA, 18 nt, Human
aaauauauauauuaccaa

SEQ ID NO: 197231 - RNA, 22 nt, Human
aaauauccuacugguuggguuu

SEQ ID NO: 197232 - RNA, 23 nt, Human
aaauauuaaagacuucaaaaacc

SEQ ID NO: 197233 - RNA, 23 nt, Human
aacaaaaccgaacacaucaaugu

SEQ ID NO: 197234 - RNA, 18 nt, Human
aacacgcacacgcacaua

SEQ ID NO: 197235 - RNA, 23 nt, Human
aacugacuucuuucugaggccua

SEQ ID NO: 197236 - RNA, 19 nt, Human
aagaaagaaacaaccgccc

SEQ ID NO: 197237 - RNA, 18 nt, Human
aagcaaacagagaauaag

SEQ ID NO: 197238 - RNA, 19 nt, Human
aaggauauuuuaaucuagc

SEQ ID NO: 197239 - RNA, 24 nt, Human
acaaaaccgaacacaucaauguca

SEQ ID NO: 197240 - RNA, 25 nt, Human
acaauccuuccacaauucuccacuu

SEQ ID NO: 197241 - RNA, 19 nt, Human
acacagaugcacaccaaaa

SEQ ID NO: 197242 - RNA, 22 nt, Human
acagacagugcaaaaacacacu

SEQ ID NO: 197243 - RNA, 19 nt, Human
acaggaaacaaacugucca

SEQ ID NO: 197244 - RNA, 29 nt, Human
acauauacacgcacacacacacagaugca

SEQ ID NO: 197245 - RNA, 20 nt, Human
accacacacaugagcacaaa

SEQ ID NO: 197246 - RNA, 28 nt, Human
accacacacaugagcacaagcacauaua

SEQ ID NO: 197247 - RNA, 18 nt, Human
accgauaucaaccucaua

SEQ ID NO: 197248 - RNA, 22 nt, Human
accuuguagaaauauccuacug

SEQ ID NO: 197249 - RNA, 23 nt, Human
acugaaucuuaaguaacuguuuu

SEQ ID NO: 197250 - RNA, 21 nt, Human
agaaauaagaaagaaagaaac

SEQ ID NO: 197251 - RNA, 18 nt, Human
agaauuucgaagugaaca

SEQ ID NO: 197252 - RNA, 22 nt, Human
agacagugcaaaaacacacucu

SEQ ID NO: 197253 - RNA, 23 nt, Human
agaccucccauuucccucugcuu

SEQ ID NO: 197254 - RNA, 18 nt, Human
agagcgcgccaagugccc

SEQ ID NO: 197255 - RNA, 24 nt, Human
agcacauauacacgcacacacaca

SEQ ID NO: 197256 - RNA, 21 nt, Human
aggaggcaggagugaaggagg

SEQ ID NO: 197257 - RNA, 21 nt, Human
aggaggcaggagugaaggagg

SEQ ID NO: 197258 - RNA, 22 nt, Human
aggagugaaggagggaggggau

SEQ ID NO: 197259 - RNA, 19 nt, Human
aggauuauugcuuuaggua

SEQ ID NO: 197260 - RNA, 26 nt, Human
aggcaggagugaaggaggggggaccc

SEQ ID NO: 197261 - RNA, 19 nt, Human
aguaaguaaauaugggauc

SEQ ID NO: 197262 - RNA, 21 nt, Human
agugcagacggucccaggaga

SEQ ID NO: 197263 - RNA, 20 nt, Human
aguuaacuagaaaagugggg

SEQ ID NO: 197264 - RNA, 19 nt, Human
auaaauuaaccccucaucc

SEQ ID NO: 197265 - RNA, 23 nt, Human
caaaaacccccaagcacuucuuc

SEQ ID NO: 197266 - RNA, 21 nt, Human
caaaaguacucgcucucaagg

SEQ ID NO: 197267 - RNA, 25 nt, Human
caaagccagccugcaaaaaugccau

SEQ ID NO: 197268 - RNA, 19 nt, Human
caacaccauccccuucuga

SEQ ID NO: 197269 - RNA, 21 nt, Human
caauacacccccaucucuugc

SEQ ID NO: 197270 - RNA, 31 nt, Human
cacaagcacauauacacgcacacacacagug

SEQ ID NO: 197271 - RNA, 21 nt, Human
cacacacacagaugcacacca

SEQ ID NO: 197272 - RNA, 28 nt, Human
cacacacaugagcacaagcacauauaca

SEQ ID NO: 197273 - RNA, 22 nt, Human
cacagaugcacaccaaaauggg

SEQ ID NO: 197274 - RNA, 18 nt, Human
cacgcacacgcacauacc

SEQ ID NO: 197275 - RNA, 25 nt, Human
cagaaacaagagcuuguacucuuaa

SEQ ID NO: 197276 - RNA, 24 nt, Human
cagaugcacaccaaaaugggaguc

SEQ ID NO: 197277 - RNA, 24 nt, Human
caugagcacaagcacauauacacg

SEQ ID NO: 197278 - RNA, 18 nt, Human
ccaaaaguacucgcucuc

SEQ ID NO: 197279 - RNA, 19 nt, Human
cccaagcacuucuucucug

SEQ ID NO: 197280 - RNA, 22 nt, Human
ccccaucucuugcuguuaucua

SEQ ID NO: 197281 - RNA, 21 nt, Human
cccccaagcacuucuucucug

SEQ ID NO: 197282 - RNA, 18 nt, Human
cccucugcuuccuugucc

SEQ ID NO: 197283 - RNA, 23 nt, Human
ccuuaaaaaagaaauaagaaaga

SEQ ID NO: 197284 - RNA, 26 nt, Human
cgauaucaaccucauaaaacgugcgg

SEQ ID NO: 197285 - RNA, 19 nt, Human
cgaugagagggcuaccuua

SEQ ID NO: 197286 - RNA, 23 nt, Human
cgcacacacacacagaugcacac

SEQ ID NO: 197287 - RNA, 21 nt, Human
cuaacaauucuacaauucgcc

SEQ ID NO: 197288 - RNA, 24 nt, Human
cuaucaaauuauaaaccaaacaca

SEQ ID NO: 197289 - RNA, 26 nt, Human
cucaaggcgguggagaaaagggaaga

SEQ ID NO: 197290 - RNA, 28 nt, Human
cuuaaaauauuaaagacuucaaaaaccc

SEQ ID NO: 197291 - RNA, 18 nt, Human
gaaagaaagaaacaaccc

SEQ ID NO: 197292 - RNA, 20 nt, Human
gaaagcaacuuauaaaggac

SEQ ID NO: 197293 - RNA, 23 nt, Human
gacaaaaugaacaccuuguagaa

SEQ ID NO: 197294 - RNA, 20 nt, Human
gacccgcgagagggcuccuc

SEQ ID NO: 197295 - RNA, 19 nt, Human
gauauaaacaucuaauucc

SEQ ID NO: 197296 - RNA, 18 nt, Human
gaugagagggcuaccuua

SEQ ID NO: 197297 - RNA, 19 nt, Human
gcagggugugagggaaggg

SEQ ID NO: 197298 - RNA, 23 nt, Human
ggaaaaagggccuuagaaaacau

SEQ ID NO: 197299 - RNA, 25 nt, Human
ggagugaaggagggaggggaugggg

SEQ ID NO: 197300 - RNA, 22 nt, Human
ggcgguggagaaaagggaagaa

SEQ ID NO: 197301 - RNA, 21 nt, Human
gggaauagucuggccaugcuc

SEQ ID NO: 197302 - RNA, 20 nt, Human
ggggaugggagacccgcgag

SEQ ID NO: 197303 - RNA, 19 nt, Human
gggugugagggaaggggaa

SEQ ID NO: 197304 - RNA, 22 nt, Human
guaacuuacggacuaaacagaa

SEQ ID NO: 197305 - RNA, 21 nt, Human
uaaaauccauuuugugcuuuu

SEQ ID NO: 197306 - RNA, 24 nt, Human
uaacaauucuacaauucgccucuu

SEQ ID NO: 197307 - RNA, 22 nt, Human
uaaccccucauccuuagaccuc

SEQ ID NO: 197308 - RNA, 24 nt, Human
uaagaaacauaagcuucagaauca

SEQ ID NO: 197309 - RNA, 21 nt, Human
uaccaaaaagugggaaaacug

SEQ ID NO: 197310 - RNA, 22 nt, Human
uaccagggcccuuuuuagugaa

SEQ ID NO: 197311 - RNA, 24 nt, Human
uagcaccgauaucaaccucauaaa

SEQ ID NO: 197312 - RNA, 18 nt, Human
uagcaugguaacuuacgg

SEQ ID NO: 197313 - RNA, 26 nt, Human
uauaagagcacauacguucaaaagca

SEQ ID NO: 197314 - RNA, 18 nt, Human
uauaauucacaaaaauau

SEQ ID NO: 197315 - RNA, 25 nt, Human
uauuaaaaaaaaacuuucggguuuc

SEQ ID NO: 197316 - RNA, 23 nt, Human
uauuaaagacuucaaaaaccccc

SEQ ID NO: 197317 - RNA, 22 nt, Human
uauugcaauuccaauacacccc

SEQ ID NO: 197318 - RNA, 23 nt, Human
ucaaaagcaaacagagaauaaga

SEQ ID NO: 197319 - RNA, 21 nt, Human
ucauuugauauaaacaucuaa

SEQ ID NO: 197320 - RNA, 19 nt, Human
uccaucuauuccaaagcca

SEQ ID NO: 197321 - RNA, 19 nt, Human
ucccucugcuuccuugucc

SEQ ID NO: 197322 - RNA, 22 nt, Human
ucuaucaaauuauaaaccaaac

SEQ ID NO: 197323 - RNA, 21 nt, Human
ucugcagaaaacauuugagau

SEQ ID NO: 197324 - RNA, 18 nt, Human
ugaaaguaagaggaaagc

SEQ ID NO: 197325 - RNA, 23 nt, Human
ugaagcaaagcugaggaggcagg

SEQ ID NO: 197326 - RNA, 21 nt, Human
ugaaggagggaggggauggga

SEQ ID NO: 197327 - RNA, 18 nt, Human
ugaccacacacaugagca

SEQ ID NO: 197328 - RNA, 26 nt, Human
ugagaugcucauuugauauaaacauc

SEQ ID NO: 197329 - RNA, 24 nt, Human
ugcaaaauguucaaaauugaaaaa

SEQ ID NO: 197330 - RNA, 22 nt, Human
ugcugagcuuuuccuccguccu

SEQ ID NO: 197331 - RNA, 19 nt, Human
uggcaagagcaaaggaaca

SEQ ID NO: 197332 - RNA, 21 nt, Human
uggggcacuggcagcaacgug

SEQ ID NO: 197333 - RNA, 19 nt, Human
ugggugacguuaacugacu

SEQ ID NO: 197334 - RNA, 26 nt, Human
uguauaaacauuaaacgauuuaauaa

SEQ ID NO: 197335 - RNA, 23 nt, Human
ugucaguauuuauaucugaaaaa

SEQ ID NO: 197336 - RNA, 19 nt, Human
uguccaucuauuccaaagc

SEQ ID NO: 197337 - RNA, 18 nt, Human
ugugacaaaaugaacacc

SEQ ID NO: 197338 - RNA, 18 nt, Human
uguggcagaugcuuuucc

SEQ ID NO: 197339 - RNA, 21 nt, Human
uuaaaaacugagauccacuau

SEQ ID NO: 197340 - RNA, 23 nt, Human
uuacaauccuuccacaauucucc

SEQ ID NO: 197341 - RNA, 23 nt, Human
uuagaaucuuuuuauuuuuuucu

SEQ ID NO: 197342 - RNA, 18 nt, Human
uucaaaaacccccaagca

SEQ ID NO: 197343 - RNA, 23 nt, Human
uuccuccguccuuugccaaaagu

SEQ ID NO: 197344 - RNA, 21 nt, Human
uucgucaucacaagccucgau

SEQ ID NO: 197345 - RNA, 21 nt, Human
uuugauuuuauuauucaccug

SEQ ID NO: 197346 - RNA, 20 nt, Human
uuuuccuaaaaaacacugua

SEQ ID NO: 197347 - RNA, 26 nt, Human
aagaaaacccaaauagcuaagcccua

SEQ ID NO: 197348 - RNA, 23 nt, Human
aaggcccggauccccuccgcccu

SEQ ID NO: 197349 - RNA, 18 nt, Human
aagucgccaacauacagu

SEQ ID NO: 197350 - RNA, 18 nt, Human
accucacagucgaaccag

SEQ ID NO: 197351 - RNA, 25 nt, Human
agacgggagccggacaccgcaagaa

SEQ ID NO: 197352 - RNA, 24 nt, Human
agccggacaccgcaagaaaaccca

SEQ ID NO: 197353 - RNA, 23 nt, Human
agggggggggaaaaguaauagaa

SEQ ID NO: 197354 - RNA, 23 nt, Human
agguaggcuccacgcugcgucuc

SEQ ID NO: 197355 - RNA, 23 nt, Human
auagaaaaaaaaaaaaaacucgu

SEQ ID NO: 197356 - RNA, 21 nt, Human
caccucacagucgaaccagcc

SEQ ID NO: 197357 - RNA, 22 nt, Human
cagucggagcagcguggggcga

SEQ ID NO: 197358 - RNA, 24 nt, Human
caguguccgcugcagccagucgga

SEQ ID NO: 197359 - RNA, 24 nt, Human
caugguugggaggcugcacgcaag

SEQ ID NO: 197360 - RNA, 23 nt, Human
ccaaauagcuaagcccuaagagc

SEQ ID NO: 197361 - RNA, 20 nt, Human
ccaccgagggaggaggcgag

SEQ ID NO: 197362 - RNA, 21 nt, Human
ccacgcugcgucuccugcccu

SEQ ID NO: 197363 - RNA, 21 nt, Human
cccggauccccuccgcccuag

SEQ ID NO: 197364 - RNA, 23 nt, Human
ccucacagucgaaccagccugcu

SEQ ID NO: 197365 - RNA, 20 nt, Human
ccucuggggcgagucagaga

SEQ ID NO: 197366 - RNA, 23 nt, Human
cgaccucuggggcgagucagaga

SEQ ID NO: 197367 - RNA, 25 nt, Human
cgccucgcucccuggccucgcuuua

SEQ ID NO: 197368 - RNA, 24 nt, Human
cggccggucaccgccucgcucccu

SEQ ID NO: 197369 - RNA, 19 nt, Human
cggcgcggcgcccgcacuc

SEQ ID NO: 197370 - RNA, 18 nt, Human
cggucaccgccucgcucc

SEQ ID NO: 197371 - RNA, 19 nt, Human
cuaaauuuaaaacaacaac

SEQ ID NO: 197372 - RNA, 18 nt, Human
cuagcaggacacugagac

SEQ ID NO: 197373 - RNA, 28 nt, Human
cucacagucgaaccagccugcuuccgga

SEQ ID NO: 197374 - RNA, 21 nt, Human
cuccacgcugcgucuccugcc

SEQ ID NO: 197375 - RNA, 22 nt, Human
cucccuggccucgcuuuaaagg

SEQ ID NO: 197376 - RNA, 21 nt, Human
cugcacgcaaggcccggaucc

SEQ ID NO: 197377 - RNA, 18 nt, Human
cugccggggugagccgcg

SEQ ID NO: 197378 - RNA, 22 nt, Human
cugcgucuccugcccuaccaag

SEQ ID NO: 197379 - RNA, 22 nt, Human
gaaccagccugcuuccggagag

SEQ ID NO: 197380 - RNA, 18 nt, Human
gaagagaggccgggagcc

SEQ ID NO: 197381 - RNA, 25 nt, Human
gccaccgagggaggaggcgagggcc

SEQ ID NO: 197382 - RNA, 22 nt, Human
ggacaccgcaagaaaacccaaa

SEQ ID NO: 197383 - RNA, 24 nt, Human
ggacugggugggugggcgcgcggg

SEQ ID NO: 197384 - RNA, 20 nt, Human
ggagacgggagccggacacc

SEQ ID NO: 197385 - RNA, 23 nt, Human
ggagccagggagacgggagccgg

SEQ ID NO: 197386 - RNA, 21 nt, Human
ggccgcagggcgggcggggga

SEQ ID NO: 197387 - RNA, 22 nt, Human
gggccgcagggcgggcggggga

SEQ ID NO: 197388 - RNA, 19 nt, Human
gggcgcuggggccgcaggg

SEQ ID NO: 197389 - RNA, 21 nt, Human
gggcgcuggggccgcagggcg

SEQ ID NO: 197390 - RNA, 21 nt, Human
ggugggugggcgcgcggggag

SEQ ID NO: 197391 - RNA, 18 nt, Human
uagaaaaaaaaaaaaaac

SEQ ID NO: 197392 - RNA, 22 nt, Human
uagcuaagcccuaagagcuaaa

SEQ ID NO: 197393 - RNA, 24 nt, Human
uagcuaagcccuaagagcuaaauu

SEQ ID NO: 197394 - RNA, 22 nt, Human
ucaaacaccucacagucgaacc

SEQ ID NO: 197395 - RNA, 22 nt, Human
uccucgcgggcuggaugagagc

SEQ ID NO: 197396 - RNA, 21 nt, Human
ucggagcagcguggggcgaag

SEQ ID NO: 197397 - RNA, 22 nt, Human
ugaggaagagaggccgggagcc

SEQ ID NO: 197398 - RNA, 21 nt, Human
uuuacaaauuuaaggcguccu

SEQ ID NO: 197399 - RNA, 23 nt, Human
uuuuuuuuuuuuuuuuuuaaccg

SEQ ID NO: 197400 - RNA, 22 nt, Human
aaaucuaaaaaucacacccacu

SEQ ID NO: 197401 - RNA, 22 nt, Human
aggccacagaggccuggcugga

SEQ ID NO: 197402 - RNA, 22 nt, Human
cagaggagggccaagaaaggga

SEQ ID NO: 197403 - RNA, 23 nt, Human
ccaagaaagggagaaggaaacaa

SEQ ID NO: 197404 - RNA, 22 nt, Human
ccaccuggcucccggggagggg

SEQ ID NO: 197405 - RNA, 18 nt, Human
ccagcuccgguugcugca

SEQ ID NO: 197406 - RNA, 21 nt, Human
cccugagaggcucgggcacca

SEQ ID NO: 197407 - RNA, 20 nt, Human
ccuccugugcccucuaccgg

SEQ ID NO: 197408 - RNA, 24 nt, Human
ccuccugugcccucuaccggugca

SEQ ID NO: 197409 - RNA, 18 nt, Human
ccugcaggguguggggag

SEQ ID NO: 197410 - RNA, 21 nt, Human
ccuggagcugcccuuggccuc

SEQ ID NO: 197411 - RNA, 19 nt, Human
ccuggcucccggggagggg

SEQ ID NO: 197412 - RNA, 23 nt, Human
cguucgggauccgacuccagcuc

SEQ ID NO: 197413 - RNA, 20 nt, Human
cugcagcagggacgcaggcg

SEQ ID NO: 197414 - RNA, 18 nt, Human
cugcccccugcccugucc

SEQ ID NO: 197415 - RNA, 18 nt, Human
cugcccccugcccugucc

SEQ ID NO: 197416 - RNA, 26 nt, Human
cugcugcccccugcccuguccuggag

SEQ ID NO: 197417 - RNA, 22 nt, Human
cuggcccugagaggcucgggca

SEQ ID NO: 197418 - RNA, 23 nt, Human
cugucuggucuggcccugagagg

SEQ ID NO: 197419 - RNA, 18 nt, Human
gagcagaggagggccaag

SEQ ID NO: 197420 - RNA, 23 nt, Human
gagggccaagaaagggagaagga

SEQ ID NO: 197421 - RNA, 22 nt, Human
gccaagaaagggagaaggaaac

SEQ ID NO: 197422 - RNA, 18 nt, Human
ggagcugcccuuggccuc

SEQ ID NO: 197423 - RNA, 18 nt, Human
ggguguggggaggagcag

SEQ ID NO: 197424 - RNA, 22 nt, Human
gguauccugcugcccccugccc

SEQ ID NO: 197425 - RNA, 30 nt, Human
ucuaaaaaucacacccacuuuucccaccuu

SEQ ID NO: 197426 - RNA, 19 nt, Human
ugaggcaaaaucaguccac

SEQ ID NO: 197427 - RNA, 18 nt, Human
ugccugcagggugugggg

SEQ ID NO: 197428 - RNA, 21 nt, Human
ugcugcccccugcccuguccu

SEQ ID NO: 197429 - RNA, 22 nt, Human
gagaaacuuuaauguaugcuaa

SEQ ID NO: 197430 - RNA, 23 nt, Human
aaaaaacaaagaaaaucugaaag

SEQ ID NO: 197431 - RNA, 21 nt, Human
aaaaaucacuaaggaggggga

SEQ ID NO: 197432 - RNA, 19 nt, Human
aaaaaugcuccacaagaca

SEQ ID NO: 197433 - RNA, 19 nt, Human
aaaacaaaaacaaaaacaa

SEQ ID NO: 197434 - RNA, 25 nt, Human
aaaacaaaaacaaaaacaaaaacaa

SEQ ID NO: 197435 - RNA, 26 nt, Human
aaaacaaaaacaaaaacaaugaacaa

SEQ ID NO: 197436 - RNA, 23 nt, Human
aaaacaaaaacaaugaacaacca

SEQ ID NO: 197437 - RNA, 25 nt, Human
aaaacaaaacaaacaaaaaugaacc

SEQ ID NO: 197438 - RNA, 26 nt, Human
aaaacaaacaaaaaugaaccagaaag

SEQ ID NO: 197439 - RNA, 25 nt, Human
aaaacaaugaacaaccaaaaaaccc

SEQ ID NO: 197440 - RNA, 23 nt, Human
aaaaguacaguaauaucuacagg

SEQ ID NO: 197441 - RNA, 26 nt, Human
aaacaaaaacaaaaacaaaaacaaug

SEQ ID NO: 197442 - RNA, 23 nt, Human
aaacaaaaacaaugaacaaccaa

SEQ ID NO: 197443 - RNA, 22 nt, Human
aaacaaaacaaaacaaaacaaa

SEQ ID NO: 197444 - RNA, 22 nt, Human
aaacaaaacaaaacaaaacaaa

SEQ ID NO: 197445 - RNA, 21 nt, Human
aaacaaaacaaaacaaacaaa

SEQ ID NO: 197446 - RNA, 28 nt, Human
aaacaaaacaaacaaaaaugaaccagaa

SEQ ID NO: 197447 - RNA, 21 nt, Human
aaacaagcacaucaacuucuu

SEQ ID NO: 197448 - RNA, 21 nt, Human
aaacaggcaaggagaugcuga

SEQ ID NO: 197449 - RNA, 18 nt, Human
aaagaaaacaggcaagga

SEQ ID NO: 197450 - RNA, 27 nt, Human
aacaaaacaaaacaaaacaaacaaaaa

SEQ ID NO: 197451 - RNA, 19 nt, Human
aacacagcaagaccucauc

SEQ ID NO: 197452 - RNA, 20 nt, Human
aacacagcaagaccucaucu

SEQ ID NO: 197453 - RNA, 21 nt, Human
aagaagacaggaauucccuca

SEQ ID NO: 197454 - RNA, 19 nt, Human
aagaaugaugauccuggac

SEQ ID NO: 197455 - RNA, 21 nt, Human
aagcaaaaauaacccccagag

SEQ ID NO: 197456 - RNA, 18 nt, Human
aagcuccuuucuuuggag

SEQ ID NO: 197457 - RNA, 23 nt, Human
aaggaaaaaacaaaacuccagaa

SEQ ID NO: 197458 - RNA, 20 nt, Human
aagugauguguagcuuugcu

SEQ ID NO: 197459 - RNA, 20 nt, Human
aaugaacaaccaaaaaaccc

SEQ ID NO: 197460 - RNA, 28 nt, Human
acaaaacaaaacaaaacaaacaaaaaag

SEQ ID NO: 197461 - RNA, 27 nt, Human
acaaaacaaacaaaaaugaaccagaaa

SEQ ID NO: 197462 - RNA, 18 nt, Human
acaaaacuccagaauggg

SEQ ID NO: 197463 - RNA, 21 nt, Human
acaaagcaucuggcagaagga

SEQ ID NO: 197464 - RNA, 18 nt, Human
accgcacuccagccuggg

SEQ ID NO: 197465 - RNA, 23 nt, Human
accgcacuccagccugggcaaca

SEQ ID NO: 197466 - RNA, 23 nt, Human
acuucauuuacugccuccucacu

SEQ ID NO: 197467 - RNA, 19 nt, Human
agaaacucuccuucagaac

SEQ ID NO: 197468 - RNA, 19 nt, Human
agacaaaugucaaacaagc

SEQ ID NO: 197469 - RNA, 22 nt, Human
agagaggagguggcacagaccu

SEQ ID NO: 197470 - RNA, 19 nt, Human
agaugcugagaagacagga

SEQ ID NO: 197471 - RNA, 18 nt, Human
agcaaaaauaacccccag

SEQ ID NO: 197472 - RNA, 23 nt, Human
agcaaaaaugcuccacaagacau

SEQ ID NO: 197473 - RNA, 26 nt, Human
agcaagaagcuccuuuccuccccugg

SEQ ID NO: 197474 - RNA, 23 nt, Human
agcagugcuagcaaugcugcaca

SEQ ID NO: 197475 - RNA, 24 nt, Human
agccaccgcacuccagccugggca

SEQ ID NO: 197476 - RNA, 23 nt, Human
agccugggcaacacagcaagacc

SEQ ID NO: 197477 - RNA, 24 nt, Human
agccugggcaacacagcaagaccu

SEQ ID NO: 197478 - RNA, 19 nt, Human
aggaaaauacagaagagca

SEQ ID NO: 197479 - RNA, 19 nt, Human
aggagggggaaggaaggga

SEQ ID NO: 197480 - RNA, 18 nt, Human
agggggaaggaagggaag

SEQ ID NO: 197481 - RNA, 19 nt, Human
agggggaaggaagggaagc

SEQ ID NO: 197482 - RNA, 21 nt, Human
agguauugugcuagccuguaa

SEQ ID NO: 197483 - RNA, 24 nt, Human
auacagaaaacuuggcauuucaac

SEQ ID NO: 197484 - RNA, 24 nt, Human
auagcaauagauaauaaugggguc

SEQ ID NO: 197485 - RNA, 22 nt, Human
auagccaccgcacuccagccug

SEQ ID NO: 197486 - RNA, 23 nt, Human
augagaaacagaaauaugaggag

SEQ ID NO: 197487 - RNA, 21 nt, Human
auggggucuuauucuaaaaaa

SEQ ID NO: 197488 - RNA, 20 nt, Human
caaaaauaacccccagaggc

SEQ ID NO: 197489 - RNA, 23 nt, Human
caaaacaaaaacaaaaacaaaaa

SEQ ID NO: 197490 - RNA, 23 nt, Human
caaaacaaaacaaaacaaaacaa

SEQ ID NO: 197491 - RNA, 24 nt, Human
caaaacaaaacaaaacaaaacaaa

SEQ ID NO: 197492 - RNA, 21 nt, Human
caaaacaaaacaaaacaaaca

SEQ ID NO: 197493 - RNA, 24 nt, Human
caaaacaaaacaaaacaaacaaaa

SEQ ID NO: 197494 - RNA, 21 nt, Human
caaggaaagcaaaaauaaccc

SEQ ID NO: 197495 - RNA, 20 nt, Human
caaguaaaaacacuuaugga

SEQ ID NO: 197496 - RNA, 23 nt, Human
caagugacuauuuugaaugauau

SEQ ID NO: 197497 - RNA, 21 nt, Human
caaugcugcacaaaacugaac

SEQ ID NO: 197498 - RNA, 18 nt, Human
cacaaaacugaacacaaa

SEQ ID NO: 197499 - RNA, 22 nt, Human
cacaagcaaagggaucugcacu

SEQ ID NO: 197500 - RNA, 25 nt, Human
caccgcacuccagccugggcaacac

SEQ ID NO: 197501 - RNA, 21 nt, Human
caccuaucuagaucuaugaau

SEQ ID NO: 197502 - RNA, 22 nt, Human
cacuuauacagaaaacuuggca

SEQ ID NO: 197503 - RNA, 23 nt, Human
cagaaccucucuuuccuuuugcu

SEQ ID NO: 197504 - RNA, 19 nt, Human
cagaaggaaaaaacaaaac

SEQ ID NO: 197505 - RNA, 19 nt, Human
cagcuagguaagaaaacug

SEQ ID NO: 197506 - RNA, 18 nt, Human
caggacacaaagcaucug

SEQ ID NO: 197507 - RNA, 23 nt, Human
cagugcuagcaaugcugcacaaa

SEQ ID NO: 197508 - RNA, 24 nt, Human
cagugucaaaacaaaaacaaaaac

SEQ ID NO: 197509 - RNA, 25 nt, Human
cauccgggucaccuaguaagcugaa

SEQ ID NO: 197510 - RNA, 28 nt, Human
ccaaaaaacccugagguaagaaucagaa

SEQ ID NO: 197511 - RNA, 20 nt, Human
ccaccgcacuccagccuggg

SEQ ID NO: 197512 - RNA, 20 nt, Human
ccaccgcacuccagccuggg

SEQ ID NO: 197513 - RNA, 21 nt, Human
ccaccgcacuccagccugggc

SEQ ID NO: 197514 - RNA, 24 nt, Human
ccaccgcacuccagccugggcaac

SEQ ID NO: 197515 - RNA, 19 nt, Human
cccuuuccucagcugcuuc

SEQ ID NO: 197516 - RNA, 20 nt, Human
ccucacauggauucagcagu

SEQ ID NO: 197517 - RNA, 21 nt, Human
ccucuguuuacaagugaccuu

SEQ ID NO: 197518 - RNA, 22 nt, Human
ccugcagugguguggggcccag

SEQ ID NO: 197519 - RNA, 21 nt, Human
ccugccugcaguggugugggg

SEQ ID NO: 197520 - RNA, 24 nt, Human
ccugggcaacacagcaagaccuca

SEQ ID NO: 197521 - RNA, 19 nt, Human
cuaaaaaauugccaaguga

SEQ ID NO: 197522 - RNA, 19 nt, Human
cucacaaguaaaaacacuu

SEQ ID NO: 197523 - RNA, 24 nt, Human
cucacugagcacagaggagagagg

SEQ ID NO: 197524 - RNA, 23 nt, Human
cucagccccucucaaucgccuuc

SEQ ID NO: 197525 - RNA, 25 nt, Human
cucaucuguaaacaaaacaaaacaa

SEQ ID NO: 197526 - RNA, 21 nt, Human
cugcucccucauuuggcuucc

SEQ ID NO: 197527 - RNA, 18 nt, Human
cuggcagaaggaaaaaac

SEQ ID NO: 197528 - RNA, 20 nt, Human
cuggucacaaaagcagugcu

SEQ ID NO: 197529 - RNA, 22 nt, Human
cuguuuacaagugaccuuuucc

SEQ ID NO: 197530 - RNA, 20 nt, Human
cuucugccauagacagugag

SEQ ID NO: 197531 - RNA, 20 nt, Human
gacaaggagucuaagagaag

SEQ ID NO: 197532 - RNA, 20 nt, Human
gacacaaagcaucuggcaga

SEQ ID NO: 197533 - RNA, 23 nt, Human
gauguguagcuuugcuuuauaga

SEQ ID NO: 197534 - RNA, 24 nt, Human
gcacaucaacuucuuaaaaaacaa

SEQ ID NO: 197535 - RNA, 23 nt, Human
gcaggaaggggccuagggccaaa

SEQ ID NO: 197536 - RNA, 20 nt, Human
gcagugucaaaacaaaaaca

SEQ ID NO: 197537 - RNA, 22 nt, Human
gccaccgcacuccagccugggc

SEQ ID NO: 197538 - RNA, 18 nt, Human
ggaaagacagcauuucag

SEQ ID NO: 197539 - RNA, 19 nt, Human
ggaaagcaaaaauaacccc

SEQ ID NO: 197540 - RNA, 21 nt, Human
ggaaagcaaaaauaaccccca

SEQ ID NO: 197541 - RNA, 29 nt, Human
ggaagcucauauacauguugcugcuccac

SEQ ID NO: 197542 - RNA, 22 nt, Human
ggaauucccucaguuuucacuu

SEQ ID NO: 197543 - RNA, 27 nt, Human
ggagagaggagguggcacagaccuggu

SEQ ID NO: 197544 - RNA, 21 nt, Human
gggcaggaaggggccuagggc

SEQ ID NO: 197545 - RNA, 23 nt, Human
gggcaggaaggggccuagggcca

SEQ ID NO: 197546 - RNA, 31 nt, Human
gugucaaaacaaaaacaaaaacaaaaacaaa

SEQ ID NO: 197547 - RNA, 22 nt, Human
guugcuguuguuuuccuuugga

SEQ ID NO: 197548 - RNA, 21 nt, Human
uaaaaagaaacaaagaaaucu

SEQ ID NO: 197549 - RNA, 25 nt, Human
uaaaaucagucagaaauaaaauacc

SEQ ID NO: 197550 - RNA, 23 nt, Human
uaaacaaaacaaaacaaaacaaa

SEQ ID NO: 197551 - RNA, 21 nt, Human
uacagaagagcaagagaacug

SEQ ID NO: 197552 - RNA, 22 nt, Human
uacaguaauaucuacaggugua

SEQ ID NO: 197553 - RNA, 21 nt, Human
uaccuugucucccuuuccuca

SEQ ID NO: 197554 - RNA, 23 nt, Human
uaccuugucucccuuuccucagc

SEQ ID NO: 197555 - RNA, 22 nt, Human
uagcaacaugacagguaguucu

SEQ ID NO: 197556 - RNA, 21 nt, Human
uagccaccgcacuccagccug

SEQ ID NO: 197557 - RNA, 22 nt, Human
uaggaaacacagccuugcucca

SEQ ID NO: 197558 - RNA, 23 nt, Human
uaggaaacacagccuugcuccac

SEQ ID NO: 197559 - RNA, 22 nt, Human
uagggcagcaaucacaaagcca

SEQ ID NO: 197560 - RNA, 21 nt, Human
uaugcagauccacuuuaacag

SEQ ID NO: 197561 - RNA, 24 nt, Human
ucaaaacaaaaacaaaaacaaaaa

SEQ ID NO: 197562 - RNA, 25 nt, Human
ucaaaacaaaaacaaaaacaaaaac

SEQ ID NO: 197563 - RNA, 22 nt, Human
ucaacuucuuaaaaaacaaaga

SEQ ID NO: 197564 - RNA, 24 nt, Human
ucacaagcaaagggaucugcacuc

SEQ ID NO: 197565 - RNA, 23 nt, Human
ucacaaguaaaaacacuuauggg

SEQ ID NO: 197566 - RNA, 24 nt, Human
ucacauggauucagcaguuaaugg

SEQ ID NO: 197567 - RNA, 22 nt, Human
ucacuaaggagggggaaggaag

SEQ ID NO: 197568 - RNA, 18 nt, Human
ucacugagcacagaggag

SEQ ID NO: 197569 - RNA, 20 nt, Human
ucagaaccucucuuuccuuu

SEQ ID NO: 197570 - RNA, 22 nt, Human
ucagaaccucucuuuccuuuug

SEQ ID NO: 197571 - RNA, 18 nt, Human
ucauauacauguugcugc

SEQ ID NO: 197572 - RNA, 20 nt, Human
uccaaacacauguacacaag

SEQ ID NO: 197573 - RNA, 18 nt, Human
uccacaagacauugucaa

SEQ ID NO: 197574 - RNA, 19 nt, Human
uccacagaggacaauuccc

SEQ ID NO: 197575 - RNA, 27 nt, Human
uccacagaggacaauucccucagcccc

SEQ ID NO: 197576 - RNA, 18 nt, Human
uccauggauggcuucuca

SEQ ID NO: 197577 - RNA, 22 nt, Human
uccuggaccauguuauggccuu

SEQ ID NO: 197578 - RNA, 18 nt, Human
ucuagcuugggcuuugca

SEQ ID NO: 197579 - RNA, 24 nt, Human
ucuguaaacaaaacaaaacaaaac

SEQ ID NO: 197580 - RNA, 26 nt, Human
ucuguaaacaaaacaaaacaaaacaa

SEQ ID NO: 197581 - RNA, 28 nt, Human
ucugugaauagccaccgcacuccagccu

SEQ ID NO: 197582 - RNA, 21 nt, Human
ucuugaaaucucaugcauucc

SEQ ID NO: 197583 - RNA, 20 nt, Human
ugaauagccaccgcacucca

SEQ ID NO: 197584 - RNA, 26 nt, Human
ugagcacagaggagagaggagguggc

SEQ ID NO: 197585 - RNA, 20 nt, Human
ugagggcuggcacccacuga

SEQ ID NO: 197586 - RNA, 22 nt, Human
ugccaagugaugguaugugggu

SEQ ID NO: 197587 - RNA, 18 nt, Human
ugcucugcagugucaaaa

SEQ ID NO: 197588 - RNA, 25 nt, Human
ugcugagcaaccaguuaguccagag

SEQ ID NO: 197589 - RNA, 19 nt, Human
ugcugcucccucauuuggc

SEQ ID NO: 197590 - RNA, 21 nt, Human
uggcacccacugagcaccgug

SEQ ID NO: 197591 - RNA, 24 nt, Human
uggcacccacugagcaccgugugg

SEQ ID NO: 197592 - RNA, 19 nt, Human
uggcagaaauagcagauga

SEQ ID NO: 197593 - RNA, 19 nt, Human
uggcaucugaaucccagcc

SEQ ID NO: 197594 - RNA, 18 nt, Human
uggcauuucaacaguucc

SEQ ID NO: 197595 - RNA, 18 nt, Human
uggcuacagaaggaagac

SEQ ID NO: 197596 - RNA, 19 nt, Human
uuagggcagcaaucacaaa

SEQ ID NO: 197597 - RNA, 22 nt, Human
uuccucacaaguaaaaacacuu

SEQ ID NO: 197598 - RNA, 22 nt, Human
uugugaaaaugauuucauacug

SEQ ID NO: 197599 - RNA, 21 nt, Human
uugugcucugcagugucaaaa

SEQ ID NO: 197600 - RNA, 24 nt, Human
uuguugcuguuguuuuccuuugga

SEQ ID NO: 197601 - RNA, 18 nt, Human
uuucagaagcaagcugcu

SEQ ID NO: 197602 - RNA, 19 nt, Human
agcagugagaaggagccac

SEQ ID NO: 197603 - RNA, 20 nt, Human
caccccagguaaguccccac

SEQ ID NO: 197604 - RNA, 20 nt, Human
cacccccaccagggucccuc

SEQ ID NO: 197605 - RNA, 21 nt, Human
ccaccagggucccucggcugg

SEQ ID NO: 197606 - RNA, 18 nt, Human
cccagguaaguccccaca

SEQ ID NO: 197607 - RNA, 18 nt, Human
cccucggcuggaggagag

SEQ ID NO: 197608 - RNA, 19 nt, Human
gagaaggagccacccccac

SEQ ID NO: 197609 - RNA, 21 nt, Human
uaaguccccacaaggcagcuu

SEQ ID NO: 197610 - RNA, 19 nt, Human
ugagaaggagccaccccca

SEQ ID NO: 197611 - RNA, 19 nt, Human
ugcgggggacaccccaggu

SEQ ID NO: 197612 - RNA, 20 nt, Human
uuuaaaaaguccggauccag

SEQ ID NO: 197613 - RNA, 21 nt, Human
agagagcaauguccccaccac

SEQ ID NO: 197614 - RNA, 24 nt, Human
agagagggcgcccccaaaccaaaa

SEQ ID NO: 197615 - RNA, 20 nt, Human
agagcaauguccccaccacc

SEQ ID NO: 197616 - RNA, 20 nt, Human
agauggggcuugggccccuu

SEQ ID NO: 197617 - RNA, 25 nt, Human
agcaccccccuccauuggccacacc

SEQ ID NO: 197618 - RNA, 27 nt, Human
agggaacagugaaggagcagagagggc

SEQ ID NO: 197619 - RNA, 19 nt, Human
agugaaggagcagagaggg

SEQ ID NO: 197620 - RNA, 20 nt, Human
caccccccuccauuggccac

SEQ ID NO: 197621 - RNA, 22 nt, Human
caccccccuccauuggccacac

SEQ ID NO: 197622 - RNA, 26 nt, Human
caggccccacuaugggaagccagagg

SEQ ID NO: 197623 - RNA, 19 nt, Human
cagggcaguggaguagggc

SEQ ID NO: 197624 - RNA, 23 nt, Human
caggggaacccucccaggcccca

SEQ ID NO: 197625 - RNA, 21 nt, Human
ccaaccuaguacggggacuag

SEQ ID NO: 197626 - RNA, 20 nt, Human
ccacaccugcugcugccagg

SEQ ID NO: 197627 - RNA, 21 nt, Human
cccaaaccaaaagcccagaga

SEQ ID NO: 197628 - RNA, 19 nt, Human
cccagagagcaaugucccc

SEQ ID NO: 197629 - RNA, 22 nt, Human
cccagagagcaauguccccacc

SEQ ID NO: 197630 - RNA, 23 nt, Human
ccccaccaccaagggagugggga

SEQ ID NO: 197631 - RNA, 21 nt, Human
ccccacguggugacaaagacu

SEQ ID NO: 197632 - RNA, 24 nt, Human
cccccaaaccaaaagcccagagag

SEQ ID NO: 197633 - RNA, 23 nt, Human
ccugggggccagcaccccccucc

SEQ ID NO: 197634 - RNA, 23 nt, Human
cgcccccaaaccaaaagcccaga

SEQ ID NO: 197635 - RNA, 24 nt, Human
cucccaggccccacuaugggaagc

SEQ ID NO: 197636 - RNA, 22 nt, Human
cucuaaggagcagguggaagag

SEQ ID NO: 197637 - RNA, 20 nt, Human
gcaccccccuccauuggcca

SEQ ID NO: 197638 - RNA, 20 nt, Human
gcagagagggcgcccccaaa

SEQ ID NO: 197639 - RNA, 23 nt, Human
gccaggaugagauggggcuuggg

SEQ ID NO: 197640 - RNA, 19 nt, Human
gggaagccagagggaacag

SEQ ID NO: 197641 - RNA, 21 nt, Human
gggcaguggaguagggcgugc

SEQ ID NO: 197642 - RNA, 23 nt, Human
gggcuugggccccuuuuaaggcc

SEQ ID NO: 197643 - RNA, 22 nt, Human
ggggacuagggaaguuggggaa

SEQ ID NO: 197644 - RNA, 22 nt, Human
guggugacaaagacaguuuggc

SEQ ID NO: 197645 - RNA, 19 nt, Human
uaaggagcagguggaagag

SEQ ID NO: 197646 - RNA, 23 nt, Human
ugaaaagugagccccacguggug

SEQ ID NO: 197647 - RNA, 21 nt, Human
ugaaggagcagagagggcgcc

SEQ ID NO: 197648 - RNA, 21 nt, Human
ugcagggugcggcuaaguggg

SEQ ID NO: 197649 - RNA, 20 nt, Human
ugccaggaugagauggggcu

SEQ ID NO: 197650 - RNA, 18 nt, Human
ugcugccagggcagugga

SEQ ID NO: 197651 - RNA, 22 nt, Human
ugcugcugccagggcaguggag

SEQ ID NO: 197652 - RNA, 20 nt, Human
uggcugggauggccuucuug

SEQ ID NO: 197653 - RNA, 22 nt, Human
uggcugggggaauccugggggc

SEQ ID NO: 197654 - RNA, 22 nt, Human
uggggaaggaugaaaagugagc

SEQ ID NO: 197655 - RNA, 18 nt, Human
uuggagccgcgccagcgc

SEQ ID NO: 197656 - RNA, 23 nt, Human
uuggcugggggaauccugggggc

SEQ ID NO: 197657 - RNA, 23 nt, Human
aaaaaagaaaacaguaauuaaaa

SEQ ID NO: 197658 - RNA, 21 nt, Human
aaaaacguguuccuuucuauc

SEQ ID NO: 197659 - RNA, 20 nt, Human
aaaagaaaacaguaauuaaa

SEQ ID NO: 197660 - RNA, 23 nt, Human
aaacuaccuccuggcccaguuga

SEQ ID NO: 197661 - RNA, 19 nt, Human
aaagaauuccuccuccucu

SEQ ID NO: 197662 - RNA, 22 nt, Human
aaagacacagagagagauugcc

SEQ ID NO: 197663 - RNA, 23 nt, Human
aaagagaagaggggaggaggagg

SEQ ID NO: 197664 - RNA, 19 nt, Human
aacaccggacguccagcgg

SEQ ID NO: 197665 - RNA, 18 nt, Human
aacagcaaagaacagucc

SEQ ID NO: 197666 - RNA, 18 nt, Human
aacagugagcgaucugcc

SEQ ID NO: 197667 - RNA, 21 nt, Human
aacugcugcugagguagaaau

SEQ ID NO: 197668 - RNA, 22 nt, Human
aacuugcagaaaugguagaaaa

SEQ ID NO: 197669 - RNA, 22 nt, Human
aagaaccuaggagcgacuuggu

SEQ ID NO: 197670 - RNA, 20 nt, Human
aagaagcguuuaaaauaaaa

SEQ ID NO: 197671 - RNA, 22 nt, Human
aagagaagaggggaggaggagg

SEQ ID NO: 197672 - RNA, 19 nt, Human
aagaggaggagggaagcga

SEQ ID NO: 197673 - RNA, 20 nt, Human
aaggaagagaggcuuugagg

SEQ ID NO: 197674 - RNA, 18 nt, Human
aaguaguaucuaguccuu

SEQ ID NO: 197675 - RNA, 19 nt, Human
aauugugucccuugaaaug

SEQ ID NO: 197676 - RNA, 20 nt, Human
acacucaaaggaacagggag

SEQ ID NO: 197677 - RNA, 22 nt, Human
acagagagagauugcccccccc

SEQ ID NO: 197678 - RNA, 24 nt, Human
acagcaauucuacauaaagaacaa

SEQ ID NO: 197679 - RNA, 18 nt, Human
acccaauucgguuuuucu

SEQ ID NO: 197680 - RNA, 20 nt, Human
accccaccccaccccacccc

SEQ ID NO: 197681 - RNA, 22 nt, Human
accccaccccaccccaccccag

SEQ ID NO: 197682 - RNA, 21 nt, Human
accccaccccccccuccccca

SEQ ID NO: 197683 - RNA, 22 nt, Human
accccaccccccccucccccac

SEQ ID NO: 197684 - RNA, 20 nt, Human
accccccccucccccacccc

SEQ ID NO: 197685 - RNA, 21 nt, Human
acccugcgagagagagagaga

SEQ ID NO: 197686 - RNA, 21 nt, Human
acggagcacaggcagaggaca

SEQ ID NO: 197687 - RNA, 25 nt, Human
acuucggaagcggcuuggaaaggga

SEQ ID NO: 197688 - RNA, 20 nt, Human
acuugcagaaaugguagaaa

SEQ ID NO: 197689 - RNA, 20 nt, Human
agaaaugguagaaaaguuaa

SEQ ID NO: 197690 - RNA, 29 nt, Human
agaagaggggaggaggaggaggagaggag

SEQ ID NO: 197691 - RNA, 20 nt, Human
agaaggaagagaggcuuuga

SEQ ID NO: 197692 - RNA, 28 nt, Human
agaauuccuccuccucuuccccccaccc

SEQ ID NO: 197693 - RNA, 25 nt, Human
agacagcaauucuacauaaagaaca

SEQ ID NO: 197694 - RNA, 18 nt, Human
agagacagagagagagag

SEQ ID NO: 197695 - RNA, 22 nt, Human
agagagagaaagacacagagag

SEQ ID NO: 197696 - RNA, 23 nt, Human
agagagagagagacagagagaga

SEQ ID NO: 197697 - RNA, 18 nt, Human
agaggaggagggaagcga

SEQ ID NO: 197698 - RNA, 24 nt, Human
agagggagagagagagagaaagac

SEQ ID NO: 197699 - RNA, 28 nt, Human
agaggggaggaggaggaggagaggagga

SEQ ID NO: 197700 - RNA, 20 nt, Human
agaugaggugauagggcugg

SEQ ID NO: 197701 - RNA, 20 nt, Human
agccauacugacaaaagccc

SEQ ID NO: 197702 - RNA, 19 nt, Human
agcgagggagaaggaagag

SEQ ID NO: 197703 - RNA, 20 nt, Human
aggaacagggagaaagucaa

SEQ ID NO: 197704 - RNA, 18 nt, Human
aggaggaggagaggagga

SEQ ID NO: 197705 - RNA, 20 nt, Human
aggaggaggaggagaggagg

SEQ ID NO: 197706 - RNA, 20 nt, Human
aggaggaggcgcugccggug

SEQ ID NO: 197707 - RNA, 18 nt, Human
aggaggagggaagcgagg

SEQ ID NO: 197708 - RNA, 31 nt, Human
aggaggcgcugccgguggcggcggcggcggg

SEQ ID NO: 197709 - RNA, 19 nt, Human
aggcgcugccgguggcggc

SEQ ID NO: 197710 - RNA, 26 nt, Human
agggaagcgagggagaaggaagagag

SEQ ID NO: 197711 - RNA, 18 nt, Human
agguagcaagaggaggag

SEQ ID NO: 197712 - RNA, 19 nt, Human
aggucuuucauggaaacug

SEQ ID NO: 197713 - RNA, 18 nt, Human
agguggagguagcaagag

SEQ ID NO: 197714 - RNA, 21 nt, Human
aguacuaaaagccauacugac

SEQ ID NO: 197715 - RNA, 21 nt, Human
aguggguggcaccgcgccucc

SEQ ID NO: 197716 - RNA, 20 nt, Human
aguggucacugcagugucuu

SEQ ID NO: 197717 - RNA, 23 nt, Human
aguguuauuuauugcuaaauggc

SEQ ID NO: 197718 - RNA, 19 nt, Human
auuccuccuccucuucccc

SEQ ID NO: 197719 - RNA, 18 nt, Human
caaaagccgucaugagaa

SEQ ID NO: 197720 - RNA, 20 nt, Human
caaaagccgucaugagaaac

SEQ ID NO: 197721 - RNA, 19 nt, Human
caaaaguauguaaaaacgu

SEQ ID NO: 197722 - RNA, 20 nt, Human
caaacauugaaaaaacaaau

SEQ ID NO: 197723 - RNA, 21 nt, Human
caacaacagcaaagaacaguc

SEQ ID NO: 197724 - RNA, 27 nt, Human
caacaacagcaaagaacaguccuauaa

SEQ ID NO: 197725 - RNA, 22 nt, Human
caacagcaaagaacaguccuau

SEQ ID NO: 197726 - RNA, 21 nt, Human
caccccaccccaccccacccc

SEQ ID NO: 197727 - RNA, 21 nt, Human
caccccaccccaccccagaug

SEQ ID NO: 197728 - RNA, 26 nt, Human
caccccaccccccccucccccacccc

SEQ ID NO: 197729 - RNA, 18 nt, Human
caccccccccucccccac

SEQ ID NO: 197730 - RNA, 20 nt, Human
caccccccccucccccaccc

SEQ ID NO: 197731 - RNA, 24 nt, Human
caccccccccucccccaccccacc

SEQ ID NO: 197732 - RNA, 22 nt, Human
cagucggaaagcaaaggaggau

SEQ ID NO: 197733 - RNA, 24 nt, Human
cauggaaacugauaccgucagaga

SEQ ID NO: 197734 - RNA, 24 nt, Human
cauguuaaaaagucagcacacuca

SEQ ID NO: 197735 - RNA, 19 nt, Human
cauuaugcaaaagcagggc

SEQ ID NO: 197736 - RNA, 25 nt, Human
ccaacaacagcaaagaacaguccua

SEQ ID NO: 197737 - RNA, 24 nt, Human
ccaccaucaacaccggacguccag

SEQ ID NO: 197738 - RNA, 18 nt, Human
ccaccccaccccacccca

SEQ ID NO: 197739 - RNA, 18 nt, Human
ccaccccaccccacccca

SEQ ID NO: 197740 - RNA, 22 nt, Human
ccaccccaccccaccccagaug

SEQ ID NO: 197741 - RNA, 19 nt, Human
ccaccccaccccccccucc

SEQ ID NO: 197742 - RNA, 18 nt, Human
cccaccccaccccacccc

SEQ ID NO: 197743 - RNA, 20 nt, Human
cccaccccaccccaccccac

SEQ ID NO: 197744 - RNA, 22 nt, Human
cccaccccaccccaccccagau

SEQ ID NO: 197745 - RNA, 24 nt, Human
cccaccccaccccaccccagauga

SEQ ID NO: 197746 - RNA, 25 nt, Human
cccaccccaccccaccccagaugaa

SEQ ID NO: 197747 - RNA, 27 nt, Human
cccaccccaccccccccucccccaccc

SEQ ID NO: 197748 - RNA, 25 nt, Human
cccaccccccccucccccaccccac

SEQ ID NO: 197749 - RNA, 22 nt, Human
ccccaccccaccccaccccaga

SEQ ID NO: 197750 - RNA, 24 nt, Human
ccccaccccaccccaccccagaug

SEQ ID NO: 197751 - RNA, 18 nt, Human
ccccaccccccccucccc

SEQ ID NO: 197752 - RNA, 21 nt, Human
ccccaccccccccucccccac

SEQ ID NO: 197753 - RNA, 23 nt, Human
ccccagaugaaaguggaaagacc

SEQ ID NO: 197754 - RNA, 22 nt, Human
cccccaccccaccccaccccac

SEQ ID NO: 197755 - RNA, 25 nt, Human
cccccaccccaccccaccccacccc

SEQ ID NO: 197756 - RNA, 24 nt, Human
ccccccccucccccaccccacccc

SEQ ID NO: 197757 - RNA, 22 nt, Human
cccccccuuuuuuuuuuugcuu

SEQ ID NO: 197758 - RNA, 26 nt, Human
ccccccucccccaccccaccccaccc

SEQ ID NO: 197759 - RNA, 19 nt, Human
ccccccuuuuuuuuuuugc

SEQ ID NO: 197760 - RNA, 18 nt, Human
cccccuuuuuuuuuuugc

SEQ ID NO: 197761 - RNA, 22 nt, Human
ccccucccccaccccaccccac

SEQ ID NO: 197762 - RNA, 22 nt, Human
ccccuuuuuuuuuuugcuuuuu

SEQ ID NO: 197763 - RNA, 19 nt, Human
ccgccgcuaccgccgcugc

SEQ ID NO: 197764 - RNA, 19 nt, Human
ccgccgcuaccgccgcugc

SEQ ID NO: 197765 - RNA, 24 nt, Human
ccgccgcuaccgccgcugcagccg

SEQ ID NO: 197766 - RNA, 21 nt, Human
ccgccgcugcagccgcuucgg

SEQ ID NO: 197767 - RNA, 20 nt, Human
ccgcugccaccaucaacacc

SEQ ID NO: 197768 - RNA, 27 nt, Human
ccggagguggagguggcgguggaggug

SEQ ID NO: 197769 - RNA, 19 nt, Human
ccuacaaagcuucaaguuc

SEQ ID NO: 197770 - RNA, 25 nt, Human
ccucccccaccccaccccaccccac

SEQ ID NO: 197771 - RNA, 23 nt, Human
ccucccgccgccgcuaccgccgc

SEQ ID NO: 197772 - RNA, 19 nt, Human
ccuccuaggguggcgggag

SEQ ID NO: 197773 - RNA, 23 nt, Human
ccuccuaggguggcgggagcagg

SEQ ID NO: 197774 - RNA, 22 nt, Human
ccuccucuuccccccacccugc

SEQ ID NO: 197775 - RNA, 22 nt, Human
ccucucgcggguugggaucagg

SEQ ID NO: 197776 - RNA, 19 nt, Human
cgcgcugcccgggcuggaa

SEQ ID NO: 197777 - RNA, 19 nt, Human
cgcugccaccaucaacacc

SEQ ID NO: 197778 - RNA, 23 nt, Human
cggagguggagguggcgguggag

SEQ ID NO: 197779 - RNA, 22 nt, Human
cgggcaccgggagcacuucgga

SEQ ID NO: 197780 - RNA, 18 nt, Human
cggguugggaucaggagu

SEQ ID NO: 197781 - RNA, 19 nt, Human
cuaccgccgcugcagccgc

SEQ ID NO: 197782 - RNA, 19 nt, Human
cucccccaccccaccccac

SEQ ID NO: 197783 - RNA, 26 nt, Human
cucccccaccccaccccaccccaccc

SEQ ID NO: 197784 - RNA, 20 nt, Human
cuccuccucuuccccccacc

SEQ ID NO: 197785 - RNA, 21 nt, Human
cugagucuugcaccaagcgcg

SEQ ID NO: 197786 - RNA, 26 nt, Human
cugccaaaaagagaagaggggaggag

SEQ ID NO: 197787 - RNA, 18 nt, Human
cugccaccaucaacaccg

SEQ ID NO: 197788 - RNA, 23 nt, Human
cugcccgggcuggaaguuuucug

SEQ ID NO: 197789 - RNA, 20 nt, Human
cuggcccaguugauaauacc

SEQ ID NO: 197790 - RNA, 23 nt, Human
gaaaaaacaaaugaaugcugcaa

SEQ ID NO: 197791 - RNA, 19 nt, Human
gaaagcaaaggaggauggg

SEQ ID NO: 197792 - RNA, 21 nt, Human
gacagugauaauacacuagag

SEQ ID NO: 197793 - RNA, 25 nt, Human
gaccaacaacagcaaagaacagucc

SEQ ID NO: 197794 - RNA, 18 nt, Human
gagaagaggggaggagga

SEQ ID NO: 197795 - RNA, 18 nt, Human
gagagauugccccccccu

SEQ ID NO: 197796 - RNA, 21 nt, Human
gaggacagaguaguggguggc

SEQ ID NO: 197797 - RNA, 26 nt, Human
gaggaggaggcgcugccgguggcggc

SEQ ID NO: 197798 - RNA, 18 nt, Human
gaggagggaagcgaggga

SEQ ID NO: 197799 - RNA, 22 nt, Human
gaggauggggagacuccgccgg

SEQ ID NO: 197800 - RNA, 22 nt, Human
gaggggaggaggaggaggagag

SEQ ID NO: 197801 - RNA, 18 nt, Human
gagguagcaagaggagga

SEQ ID NO: 197802 - RNA, 19 nt, Human
gaguugcgggcaccgggag

SEQ ID NO: 197803 - RNA, 20 nt, Human
gauuucgcuccucccaccuc

SEQ ID NO: 197804 - RNA, 20 nt, Human
gcaauauuuguuugcuuacu

SEQ ID NO: 197805 - RNA, 25 nt, Human
gcaauucuacauaaagaacaaagaa

SEQ ID NO: 197806 - RNA, 22 nt, Human
gcagugucuucucccuucaaaa

SEQ ID NO: 197807 - RNA, 23 nt, Human
gccccaagauucaaggggaugag

SEQ ID NO: 197808 - RNA, 20 nt, Human
gccccggagcugcccagcac

SEQ ID NO: 197809 - RNA, 21 nt, Human
gccucccgccgccgcuaccgc

SEQ ID NO: 197810 - RNA, 21 nt, Human
gcgaccaacaacagcaaagaa

SEQ ID NO: 197811 - RNA, 21 nt, Human
gcgcgcugcccgggcuggaag

SEQ ID NO: 197812 - RNA, 22 nt, Human
gcugcccagcaccuuucgggag

SEQ ID NO: 197813 - RNA, 19 nt, Human
ggaagagacuuggagugaa

SEQ ID NO: 197814 - RNA, 20 nt, Human
ggagaggaggaggcgcugcc

SEQ ID NO: 197815 - RNA, 18 nt, Human
ggagagucggagggggac

SEQ ID NO: 197816 - RNA, 21 nt, Human
gggaggaggaggaggagagga

SEQ ID NO: 197817 - RNA, 23 nt, Human
gggcacggagcacaggcagagga

SEQ ID NO: 197818 - RNA, 25 nt, Human
gggcagucggaaagcaaaggaggau

SEQ ID NO: 197819 - RNA, 23 nt, Human
gggcgagcgcgagcuggcgggcu

SEQ ID NO: 197820 - RNA, 22 nt, Human
ggggaggaggaggaggagagga

SEQ ID NO: 197821 - RNA, 19 nt, Human
gguggcggcggcggcggug

SEQ ID NO: 197822 - RNA, 20 nt, Human
gguggcggcggcggcggugg

SEQ ID NO: 197823 - RNA, 23 nt, Human
guaguauugaguaguggggauau

SEQ ID NO: 197824 - RNA, 22 nt, Human
guggcggcggcggcggugggug

SEQ ID NO: 197825 - RNA, 19 nt, Human
gugugugugagugugugug

SEQ ID NO: 197826 - RNA, 21 nt, Human
uaacuguaauuaaguguacaa

SEQ ID NO: 197827 - RNA, 19 nt, Human
uaauuugagguaaguggua

SEQ ID NO: 197828 - RNA, 18 nt, Human
uacaaagcuucaaguucu

SEQ ID NO: 197829 - RNA, 21 nt, Human
uacauagucaugcugaaacac

SEQ ID NO: 197830 - RNA, 21 nt, Human
uaccgccgcugcagccgcuuc

SEQ ID NO: 197831 - RNA, 19 nt, Human
uaccuaacuugcagaaaug

SEQ ID NO: 197832 - RNA, 22 nt, Human
uacuugucuaguuuccuuaaau

SEQ ID NO: 197833 - RNA, 20 nt, Human
uagaagacacucaaaggaac

SEQ ID NO: 197834 - RNA, 21 nt, Human
uagcagagaagcugaaacaag

SEQ ID NO: 197835 - RNA, 20 nt, Human
uagcuccugagucuugcacc

SEQ ID NO: 197836 - RNA, 19 nt, Human
uagcugcgaccaacaacag

SEQ ID NO: 197837 - RNA, 19 nt, Human
uaggguggcgggagcaggc

SEQ ID NO: 197838 - RNA, 22 nt, Human
uaguauugaguaguggggauau

SEQ ID NO: 197839 - RNA, 19 nt, Human
uaguccuuaucuuuggugu

SEQ ID NO: 197840 - RNA, 23 nt, Human
uaguggguggcaccgcgccuccu

SEQ ID NO: 197841 - RNA, 18 nt, Human
uagugugauugaggaaaa

SEQ ID NO: 197842 - RNA, 18 nt, Human
ucaaaagauccaacugcu

SEQ ID NO: 197843 - RNA, 20 nt, Human
ucaaaagauccaacugcugc

SEQ ID NO: 197844 - RNA, 19 nt, Human
ucaaacauugaaaaaacaa

SEQ ID NO: 197845 - RNA, 24 nt, Human
ucaggaguugcgggcaccgggagc

SEQ ID NO: 197846 - RNA, 18 nt, Human
ucaguacuaaaagccaua

SEQ ID NO: 197847 - RNA, 18 nt, Human
uccaaagauauggaaugc

SEQ ID NO: 197848 - RNA, 22 nt, Human
uccauaaauagaagaguuggca

SEQ ID NO: 197849 - RNA, 23 nt, Human
ucccacaaaaauaaacuauauau

SEQ ID NO: 197850 - RNA, 19 nt, Human
uccccaccccacccccccc

SEQ ID NO: 197851 - RNA, 21 nt, Human
uccccaccccaccccccccuc

SEQ ID NO: 197852 - RNA, 31 nt, Human
uccccaccccaccccccccucccccaccccc

SEQ ID NO: 197853 - RNA, 23 nt, Human
ucccgccgccgcuaccgccgcug

SEQ ID NO: 197854 - RNA, 20 nt, Human
uccuccuccucuucccccca

SEQ ID NO: 197855 - RNA, 20 nt, Human
ucucccacaaaaauaaacua

SEQ ID NO: 197856 - RNA, 19 nt, Human
ucuccccaccccacccccc

SEQ ID NO: 197857 - RNA, 23 nt, Human
ucuccugcaaacauaccuaacuu

SEQ ID NO: 197858 - RNA, 23 nt, Human
ugaaaaaacaaaugaaugcugca

SEQ ID NO: 197859 - RNA, 22 nt, Human
ugaaaagagagagggagaggga

SEQ ID NO: 197860 - RNA, 19 nt, Human
ugaaaaugaaguguugucc

SEQ ID NO: 197861 - RNA, 23 nt, Human
ugaaauguuaggcggggaaagaa

SEQ ID NO: 197862 - RNA, 20 nt, Human
ugaagucuggagguaggucu

SEQ ID NO: 197863 - RNA, 18 nt, Human
ugaaguguuguccugaaa

SEQ ID NO: 197864 - RNA, 22 nt, Human
ugagaaacuaccuccuggccca

SEQ ID NO: 197865 - RNA, 25 nt, Human
ugagguaagugguauucaggucuuu

SEQ ID NO: 197866 - RNA, 20 nt, Human
ugagguauacugggacuuaa

SEQ ID NO: 197867 - RNA, 22 nt, Human
ugagugugugugagugugugug

SEQ ID NO: 197868 - RNA, 23 nt, Human
ugauguauaacuauagcaaaaga

SEQ ID NO: 197869 - RNA, 22 nt, Human
ugauuucuccccaccccacccc

SEQ ID NO: 197870 - RNA, 23 nt, Human
ugcccgggcuggaaguuuucuga

SEQ ID NO: 197871 - RNA, 18 nt, Human
ugccgguggcggcggcgg

SEQ ID NO: 197872 - RNA, 22 nt, Human
ugcgggcaccgggagcacuucg

SEQ ID NO: 197873 - RNA, 24 nt, Human
uggagguggagguagcaagaggag

SEQ ID NO: 197874 - RNA, 19 nt, Human
uggcggcggcggcgguggg

SEQ ID NO: 197875 - RNA, 21 nt, Human
uggcggcggcggcggugggug

SEQ ID NO: 197876 - RNA, 22 nt, Human
uggcggcggcggcggugggugg

SEQ ID NO: 197877 - RNA, 24 nt, Human
uggcgggcugcgagggcugcuguu

SEQ ID NO: 197878 - RNA, 27 nt, Human
uguagcugcgaccaacaacagcaaaga

SEQ ID NO: 197879 - RNA, 22 nt, Human
uguccccuguguuuacagcagu

SEQ ID NO: 197880 - RNA, 24 nt, Human
ugugacacguuucuuguuugcaug

SEQ ID NO: 197881 - RNA, 19 nt, Human
ugugaguguguguggugug

SEQ ID NO: 197882 - RNA, 20 nt, Human
ugugaguguguguggugugu

SEQ ID NO: 197883 - RNA, 20 nt, Human
ugugugagugugagugugug

SEQ ID NO: 197884 - RNA, 21 nt, Human
ugugugagugugagugugugu

SEQ ID NO: 197885 - RNA, 20 nt, Human
ugugugagugugugugagug

SEQ ID NO: 197886 - RNA, 21 nt, Human
ugugugagugugugugagugu

SEQ ID NO: 197887 - RNA, 21 nt, Human
uguuuacagcaguuuuucacu

SEQ ID NO: 197888 - RNA, 19 nt, Human
uucaaguuaauguagaaau

SEQ ID NO: 197889 - RNA, 20 nt, Human
uucaguaugaaaaaugaggu

SEQ ID NO: 197890 - RNA, 18 nt, Human
uucuccccaccccacccc

SEQ ID NO: 197891 - RNA, 20 nt, Human
uuggggugguauuugaggug

SEQ ID NO: 197892 - RNA, 22 nt, Human
uugucaagcauuuucuuauauu

SEQ ID NO: 197893 - RNA, 25 nt, Human
uuuaauuaaaaaaacauagaaaaau

SEQ ID NO: 197894 - RNA, 24 nt, Human
uuuaauucucuccauagcuccuuu

SEQ ID NO: 197895 - RNA, 22 nt, Human
aaaacaaaucuuacacagccuu

SEQ ID NO: 197896 - RNA, 23 nt, Human
aagaaaaaaaaacugcgcuagaa

SEQ ID NO: 197897 - RNA, 27 nt, Human
aagaaccugcuuuaaauuuccaugcca

SEQ ID NO: 197898 - RNA, 18 nt, Human
aagcugcaucagagacaa

SEQ ID NO: 197899 - RNA, 20 nt, Human
acacuguacaguuuaaaaac

SEQ ID NO: 197900 - RNA, 23 nt, Human
accaggcaagguuaguggcuauu

SEQ ID NO: 197901 - RNA, 25 nt, Human
acuaccauccccauauauaacuaau

SEQ ID NO: 197902 - RNA, 19 nt, Human
acuuuuuuuuuuuuugcaa

SEQ ID NO: 197903 - RNA, 19 nt, Human
agacaagaaaaaaaaacug

SEQ ID NO: 197904 - RNA, 25 nt, Human
agacaagaaaaaaaaacugcgcuag

SEQ ID NO: 197905 - RNA, 26 nt, Human
agacaagaaaaaaaaacugcgcuaga

SEQ ID NO: 197906 - RNA, 26 nt, Human
aucagagacaacugaagaugaaaaaa

SEQ ID NO: 197907 - RNA, 19 nt, Human
caagaaaaaaaaacugcgc

SEQ ID NO: 197908 - RNA, 18 nt, Human
cacuguacaguuuaaaaa

SEQ ID NO: 197909 - RNA, 21 nt, Human
caugccaauuuacaaccccca

SEQ ID NO: 197910 - RNA, 21 nt, Human
ccaacaagaaccugcuuuaaa

SEQ ID NO: 197911 - RNA, 22 nt, Human
ccaggacagggcuaucuaaaga

SEQ ID NO: 197912 - RNA, 20 nt, Human
ccauccccauauauaacuaa

SEQ ID NO: 197913 - RNA, 23 nt, Human
ccguccggcucucacuugccccc

SEQ ID NO: 197914 - RNA, 23 nt, Human
cugugcaccaacaagaaccugcu

SEQ ID NO: 197915 - RNA, 26 nt, Human
gaaccugcuuuaaauuuccaugccaa

SEQ ID NO: 197916 - RNA, 19 nt, Human
gacacauucgguagugugu

SEQ ID NO: 197917 - RNA, 23 nt, Human
gcauucagaaugucaacaaaaca

SEQ ID NO: 197918 - RNA, 20 nt, Human
gugcccguccggcucucacu

SEQ ID NO: 197919 - RNA, 18 nt, Human
uaaaaggagugaguugug

SEQ ID NO: 197920 - RNA, 23 nt, Human
uacaaaaaaagacacuguacagu

SEQ ID NO: 197921 - RNA, 18 nt, Human
uacuguaccaggcaaggu

SEQ ID NO: 197922 - RNA, 21 nt, Human
uauacaaaaaaagacacugua

SEQ ID NO: 197923 - RNA, 26 nt, Human
uauacaaaaaaagacacuguacaguu

SEQ ID NO: 197924 - RNA, 20 nt, Human
uauagacaagaaaaaaaaac

SEQ ID NO: 197925 - RNA, 23 nt, Human
uccccauauauaacuaauuugug

SEQ ID NO: 197926 - RNA, 23 nt, Human
ugcugugcaccaacaagaaccug

SEQ ID NO: 197927 - RNA, 24 nt, Human
aaacgaaaugcaacauccuaaaaa

SEQ ID NO: 197928 - RNA, 18 nt, Human
acacauuccacacgcauc

SEQ ID NO: 197929 - RNA, 22 nt, Human
agcccaucaaaaagcuacaacc

SEQ ID NO: 197930 - RNA, 20 nt, Human
caaaauaauugccugagcaa

SEQ ID NO: 197931 - RNA, 21 nt, Human
caacauccuaaaaaacccaaa

SEQ ID NO: 197932 - RNA, 23 nt, Human
cacacagaaauuaaaaaaaccau

SEQ ID NO: 197933 - RNA, 19 nt, Human
cagaagcuguaaaaucuaa

SEQ ID NO: 197934 - RNA, 22 nt, Human
ccacacgcaucauuaaaggaua

SEQ ID NO: 197935 - RNA, 27 nt, Human
ccggacccaacggagacgguggaccuc

SEQ ID NO: 197936 - RNA, 23 nt, Human
ccuaaaaaacccaaaauuuacua

SEQ ID NO: 197937 - RNA, 21 nt, Human
cuccggcgugaacugguuuau

SEQ ID NO: 197938 - RNA, 25 nt, Human
gaaaugcaacauccuaaaaaaccca

SEQ ID NO: 197939 - RNA, 21 nt, Human
uaagacaaagacaauagaaau

SEQ ID NO: 197940 - RNA, 22 nt, Human
uacacacagaaauuaaaaaaac

SEQ ID NO: 197941 - RNA, 22 nt, Human
uaguauugagcugcacuugaau

SEQ ID NO: 197942 - RNA, 19 nt, Human
uauuuaggaacauucaaca

SEQ ID NO: 197943 - RNA, 22 nt, Human
ucagccucuuguuuugcagagu

SEQ ID NO: 197944 - RNA, 28 nt, Human
uccacacgcaucauuaaaggauagccag

SEQ ID NO: 197945 - RNA, 24 nt, Human
uccgcgccacggcaacuugacgag

SEQ ID NO: 197946 - RNA, 23 nt, Human
uccuacaaguuugcugugcuacc

SEQ ID NO: 197947 - RNA, 22 nt, Human
ucucuaacgcaauccucagccu

SEQ ID NO: 197948 - RNA, 27 nt, Human
ugagcacacacacacauuccacacgca

SEQ ID NO: 197949 - RNA, 22 nt, Human
ugcgagcuuuuccucagagucc

SEQ ID NO: 197950 - RNA, 22 nt, Human
uggugcgagcuuuuccucagag

SEQ ID NO: 197951 - RNA, 20 nt, Human
uguuuugcagaguucuccga

SEQ ID NO: 197952 - RNA, 24 nt, Human
uucuccgcgccacggcaacuugac

SEQ ID NO: 197953 - RNA, 19 nt, Human
uucucuacagagaaucuua

SEQ ID NO: 197954 - RNA, 21 nt, Human
aaaaacaaacaguuuaaaaac

SEQ ID NO: 197955 - RNA, 21 nt, Human
aaaaagaaaaugccagaaaca

SEQ ID NO: 197956 - RNA, 20 nt, Human
aaaacauuucagcauucuaa

SEQ ID NO: 197957 - RNA, 20 nt, Human
aaaaugccagaaacaucuuu

SEQ ID NO: 197958 - RNA, 22 nt, Human
aaacaagacaaccugaagcuaa

SEQ ID NO: 197959 - RNA, 23 nt, Human
aaacaagacaaccugaagcuaaa

SEQ ID NO: 197960 - RNA, 22 nt, Human
aaccauaguuaccaccaccuua

SEQ ID NO: 197961 - RNA, 21 nt, Human
acaaggagacagauaaacagu

SEQ ID NO: 197962 - RNA, 23 nt, Human
acagaaacaagacaaccugaagc

SEQ ID NO: 197963 - RNA, 21 nt, Human
acaguuucagggugcuccaga

SEQ ID NO: 197964 - RNA, 20 nt, Human
acauacaaaaaaaauaacag

SEQ ID NO: 197965 - RNA, 25 nt, Human
agacacccauggccacuucauguaa

SEQ ID NO: 197966 - RNA, 25 nt, Human
agagaagaguucuaaaaauguaaua

SEQ ID NO: 197967 - RNA, 21 nt, Human
agcaaggagcaucaaggguuu

SEQ ID NO: 197968 - RNA, 19 nt, Human
aguagagaagaguucuaaa

SEQ ID NO: 197969 - RNA, 24 nt, Human
auacaaaaaaaauaacagaacguu

SEQ ID NO: 197970 - RNA, 24 nt, Human
aucuuccccacagccucaacgccg

SEQ ID NO: 197971 - RNA, 19 nt, Human
caaacuauagauauauaca

SEQ ID NO: 197972 - RNA, 24 nt, Human
caaauaaaaagaaaaugccagaaa

SEQ ID NO: 197973 - RNA, 23 nt, Human
caccaacagcaaagugcacagag

SEQ ID NO: 197974 - RNA, 18 nt, Human
cacuauauacagaaacaa

SEQ ID NO: 197975 - RNA, 24 nt, Human
cagaaacaagacaaccugaagcua

SEQ ID NO: 197976 - RNA, 20 nt, Human
cagcaaagugcacagaguga

SEQ ID NO: 197977 - RNA, 21 nt, Human
ccaacagcaaagugcacagag

SEQ ID NO: 197978 - RNA, 25 nt, Human
ccacagccucaacgccgagcaagga

SEQ ID NO: 197979 - RNA, 18 nt, Human
ccagacacccauggccac

SEQ ID NO: 197980 - RNA, 20 nt, Human
ccccacagccucaacgccga

SEQ ID NO: 197981 - RNA, 21 nt, Human
ccccacagccucaacgccgag

SEQ ID NO: 197982 - RNA, 22 nt, Human
ccccuacucuaaguauucacaa

SEQ ID NO: 197983 - RNA, 25 nt, Human
ccugagcuacagccucucccaaaag

SEQ ID NO: 197984 - RNA, 19 nt, Human
ccugcagagucaacagguc

SEQ ID NO: 197985 - RNA, 27 nt, Human
ccuuuucauuuuaaaaauguuuggaaa

SEQ ID NO: 197986 - RNA, 19 nt, Human
cugagcuacagccucuccc

SEQ ID NO: 197987 - RNA, 25 nt, Human
cuuacaaauaaaaagaaaaugccag

SEQ ID NO: 197988 - RNA, 18 nt, Human
gacucuuugcuuugcuga

SEQ ID NO: 197989 - RNA, 20 nt, Human
gagaagaguucuaaaaaugu

SEQ ID NO: 197990 - RNA, 22 nt, Human
gaugcagugacucuuugcuuug

SEQ ID NO: 197991 - RNA, 18 nt, Human
ggagacagauaaacaguu

SEQ ID NO: 197992 - RNA, 23 nt, Human
uaacuucaaaaacauuucagcau

SEQ ID NO: 197993 - RNA, 26 nt, Human
uacaaauaaaaagaaaaugccagaaa

SEQ ID NO: 197994 - RNA, 20 nt, Human
uacaauaugaucgugaucaa

SEQ ID NO: 197995 - RNA, 24 nt, Human
uacagaaacaagacaaccugaagc

SEQ ID NO: 197996 - RNA, 22 nt, Human
uacaguuucagggugcuccaga

SEQ ID NO: 197997 - RNA, 23 nt, Human
uaguagagaagaguucuaaaaau

SEQ ID NO: 197998 - RNA, 22 nt, Human
uaguuaccaccaccuuacaaau

SEQ ID NO: 197999 - RNA, 23 nt, Human
uauacagaaacaagacaaccuga

SEQ ID NO: 198000 - RNA, 21 nt, Human
ucucaugccagcugacccccc

SEQ ID NO: 198001 - RNA, 24 nt, Human
ucucaugccagcugaccccccuuu

SEQ ID NO: 198002 - RNA, 22 nt, Human
ucucccaaaaggcaucuucccc

SEQ ID NO: 198003 - RNA, 21 nt, Human
ugacuguuauaguagagaaga

SEQ ID NO: 198004 - RNA, 19 nt, Human
ugaggagaacacgagagug

SEQ ID NO: 198005 - RNA, 25 nt, Human
ugcacagagugaggagaacacgaga

SEQ ID NO: 198006 - RNA, 22 nt, Human
uggaaauauguacaacuuugau

SEQ ID NO: 198007 - RNA, 21 nt, Human
uguuauaguagagaagaguuc

SEQ ID NO: 198008 - RNA, 23 nt, Human
uguuuuguucuuuuuacaaacua

SEQ ID NO: 198009 - RNA, 23 nt, Human
uuaaaugccuugucacaccaaca

SEQ ID NO: 198010 - RNA, 23 nt, Human
uugucacaccaacagcaaagugc

SEQ ID NO: 198011 - RNA, 24 nt, Human
uuguuuuguucuuuuuacaaacua

SEQ ID NO: 198012 - RNA, 21 nt, Human
aagcagcuccuccugcccuuc

SEQ ID NO: 198013 - RNA, 20 nt, Human
caacuccugggccagggucc

SEQ ID NO: 198014 - RNA, 19 nt, Human
ccaagcagcuccuccugcc

SEQ ID NO: 198015 - RNA, 24 nt, Human
cccacggccauggcaggguggagc

SEQ ID NO: 198016 - RNA, 20 nt, Human
ccccacggccauggcagggu

SEQ ID NO: 198017 - RNA, 19 nt, Human
ccccagggcuucagguggg

SEQ ID NO: 198018 - RNA, 24 nt, Human
ccuauucucauuuccaugucccca

SEQ ID NO: 198019 - RNA, 20 nt, Human
ccucaggucugggcaggagg

SEQ ID NO: 198020 - RNA, 21 nt, Human
ccuucugccaagcagcuccuc

SEQ ID NO: 198021 - RNA, 18 nt, Human
cucaaagccucucacucc

SEQ ID NO: 198022 - RNA, 18 nt, Human
gguccguaacaaagggag

SEQ ID NO: 198023 - RNA, 21 nt, Human
uccacaaauggccucugccag

SEQ ID NO: 198024 - RNA, 24 nt, Human
uccacaaauggccucugccagcuu

SEQ ID NO: 198025 - RNA, 21 nt, Human
uccagagaggagacucaagga

SEQ ID NO: 198026 - RNA, 21 nt, Human
uccucaggucugggcaggagg

SEQ ID NO: 198027 - RNA, 23 nt, Human
ugaugugccauucaaccuuuaau

SEQ ID NO: 198028 - RNA, 23 nt, Human
ugccaagcagcuccuccugcccu

SEQ ID NO: 198029 - RNA, 18 nt, Human
uggagauuuuccagagau

SEQ ID NO: 198030 - RNA, 23 nt, Human
uggagauuuuccagagaugcugg

SEQ ID NO: 198031 - RNA, 20 nt, Human
uggcagacggccaccacgua

SEQ ID NO: 198032 - RNA, 23 nt, Human
uggccagguggccagcucgcgga

SEQ ID NO: 198033 - RNA, 19 nt, Human
ugggcaggagguccuucug

SEQ ID NO: 198034 - RNA, 21 nt, Human
uguguagagcuggcuaugagg

SEQ ID NO: 198035 - RNA, 19 nt, Human
aaaagccuaaugcugaaag

SEQ ID NO: 198036 - RNA, 20 nt, Human
aaaauagaccagcaccaaau

SEQ ID NO: 198037 - RNA, 22 nt, Human
aaaaucaaaauagaccagcacc

SEQ ID NO: 198038 - RNA, 21 nt, Human
aaacaaaaggccucucugaac

SEQ ID NO: 198039 - RNA, 22 nt, Human
aaacaaaaggccucucugaaca

SEQ ID NO: 198040 - RNA, 22 nt, Human
aaacuagaaaaaaguauucuau

SEQ ID NO: 198041 - RNA, 22 nt, Human
aaagagcacagcauguaaagca

SEQ ID NO: 198042 - RNA, 22 nt, Human
aaccugagaccucucugaaaga

SEQ ID NO: 198043 - RNA, 24 nt, Human
aagcuaagagcguucgugggucca

SEQ ID NO: 198044 - RNA, 21 nt, Human
acaaugcagacacaaucaccg

SEQ ID NO: 198045 - RNA, 20 nt, Human
agaaaacagguccccuucug

SEQ ID NO: 198046 - RNA, 20 nt, Human
aggaguuucaucagcuacag

SEQ ID NO: 198047 - RNA, 25 nt, Human
auuauuuauacaaaacuuguacauu

SEQ ID NO: 198048 - RNA, 19 nt, Human
caaaauagaccagcaccaa

SEQ ID NO: 198049 - RNA, 22 nt, Human
caaaauagaccagcaccaaaug

SEQ ID NO: 198050 - RNA, 23 nt, Human
cagaaaaagucacuggcuaaaaa

SEQ ID NO: 198051 - RNA, 19 nt, Human
caucagcuuuccaagagca

SEQ ID NO: 198052 - RNA, 20 nt, Human
ccaaaaucaaaauagaccag

SEQ ID NO: 198053 - RNA, 19 nt, Human
ccaagagcaacacuuaagc

SEQ ID NO: 198054 - RNA, 22 nt, Human
ccagcaccaaaugaaguauuaa

SEQ ID NO: 198055 - RNA, 23 nt, Human
cccaaaaucaaaauagaccagca

SEQ ID NO: 198056 - RNA, 22 nt, Human
ccccaaaaucaaaauagaccag

SEQ ID NO: 198057 - RNA, 24 nt, Human
ccccaaaaucaaaauagaccagca

SEQ ID NO: 198058 - RNA, 24 nt, Human
cccccaaaaucaaaauagaccagc

SEQ ID NO: 198059 - RNA, 23 nt, Human
ccccccaaaaucaaaauagaagc

SEQ ID NO: 198060 - RNA, 19 nt, Human
cccuguguuucuuaaaagc

SEQ ID NO: 198061 - RNA, 23 nt, Human
cccuugaagaaaacagguccccu

SEQ ID NO: 198062 - RNA, 18 nt, Human
ccucucugaaagagccaa

SEQ ID NO: 198063 - RNA, 18 nt, Human
ccuuuagaacccaaugcc

SEQ ID NO: 198064 - RNA, 20 nt, Human
cugccacuuccaugaaaagc

SEQ ID NO: 198065 - RNA, 21 nt, Human
cugccaugguuuccuggaaug

SEQ ID NO: 198066 - RNA, 24 nt, Human
cuucccuugaagaaaacagguccc

SEQ ID NO: 198067 - RNA, 23 nt, Human
cuuucagaggugagcuguagauu

SEQ ID NO: 198068 - RNA, 22 nt, Human
gagaccucucugaaagagccaa

SEQ ID NO: 198069 - RNA, 19 nt, Human
gcaagauauuaauuacagu

SEQ ID NO: 198070 - RNA, 18 nt, Human
ggaauaagaguguuucuu

SEQ ID NO: 198071 - RNA, 21 nt, Human
ggcaagcaagccaggguuucc

SEQ ID NO: 198072 - RNA, 25 nt, Human
guggcugucucagugaucacauuua

SEQ ID NO: 198073 - RNA, 22 nt, Human
uaaauuaacuacaaaaucagga

SEQ ID NO: 198074 - RNA, 19 nt, Human
uaacaaugcagacacaauc

SEQ ID NO: 198075 - RNA, 27 nt, Human
uacaaaacuuguacauuaaaggacauc

SEQ ID NO: 198076 - RNA, 25 nt, Human
uacaacagaaaagguaaaucuucca

SEQ ID NO: 198077 - RNA, 22 nt, Human
uacaguuuacaaaaaaaacuag

SEQ ID NO: 198078 - RNA, 18 nt, Human
uacguacaacagaaaagg

SEQ ID NO: 198079 - RNA, 22 nt, Human
uagaaaaaaguauucuauaaca

SEQ ID NO: 198080 - RNA, 18 nt, Human
uaguaaagaauacaaaac

SEQ ID NO: 198081 - RNA, 21 nt, Human
uauagccaauccagacaaaca

SEQ ID NO: 198082 - RNA, 22 nt, Human
uauagccaauccagacaaacau

SEQ ID NO: 198083 - RNA, 22 nt, Human
ucaaaauagaccagcaccaaau

SEQ ID NO: 198084 - RNA, 22 nt, Human
ucacguggcuccuucacuggcu

SEQ ID NO: 198085 - RNA, 23 nt, Human
ucccuugaagaaaacaggucccc

SEQ ID NO: 198086 - RNA, 24 nt, Human
uccuccagaucucacuagaggcca

SEQ ID NO: 198087 - RNA, 21 nt, Human
ucuaagcaacauuaagagcuc

SEQ ID NO: 198088 - RNA, 19 nt, Human
ucuaaggucccagucuugc

SEQ ID NO: 198089 - RNA, 22 nt, Human
ucuccaugcugccaugguuucc

SEQ ID NO: 198090 - RNA, 19 nt, Human
ucuguaguuugggaauaag

SEQ ID NO: 198091 - RNA, 18 nt, Human
ugaaagacauguuauagc

SEQ ID NO: 198092 - RNA, 29 nt, Human
ugaaagacauguuauagccaauccagcuu

SEQ ID NO: 198093 - RNA, 26 nt, Human
ugaacaaauagccugcggagauaaau

SEQ ID NO: 198094 - RNA, 18 nt, Human
ugaagaaaacaggucccc

SEQ ID NO: 198095 - RNA, 25 nt, Human
ugaagaaaacagguccccuucugaa

SEQ ID NO: 198096 - RNA, 20 nt, Human
ugaaguauuaauuuacaaaa

SEQ ID NO: 198097 - RNA, 22 nt, Human
ugauuaccccccaaaaucaaaa

SEQ ID NO: 198098 - RNA, 21 nt, Human
ugcauggaaagaaccugagac

SEQ ID NO: 198099 - RNA, 20 nt, Human
ugcccauguuccaguucaga

SEQ ID NO: 198100 - RNA, 19 nt, Human
uggauccuccagaucucac

SEQ ID NO: 198101 - RNA, 25 nt, Human
uguaguuugggaauaagaguguuuc

SEQ ID NO: 198102 - RNA, 22 nt, Human
uuaaaaauccauuuucaacugg

SEQ ID NO: 198103 - RNA, 22 nt, Human
uuaacuacaaaaucaggaguuu

SEQ ID NO: 198104 - RNA, 19 nt, Human
uuacuucuugaaguucuac

SEQ ID NO: 198105 - RNA, 22 nt, Human
uugguacaguuuacaaaaaaaa

SEQ ID NO: 198106 - RNA, 21 nt, Human
uuuaagcaauuaaaguuggcu

SEQ ID NO: 198107 - RNA, 22 nt, Human
uuuacaaacaugaacuuagaac

SEQ ID NO: 198108 - RNA, 19 nt, Human
accccaugcccaccccacc

SEQ ID NO: 198109 - RNA, 22 nt, Human
accccaugcccaccccacccug

SEQ ID NO: 198110 - RNA, 23 nt, Human
accccaugcccaccccacccuga

SEQ ID NO: 198111 - RNA, 22 nt, Human
acccccaccccaugcccacccc

SEQ ID NO: 198112 - RNA, 19 nt, Human
acccugaagucuugcaccu

SEQ ID NO: 198113 - RNA, 22 nt, Human
acccugaagucuugcaccucac

SEQ ID NO: 198114 - RNA, 24 nt, Human
caacuguucccauacccccacccc

SEQ ID NO: 198115 - RNA, 20 nt, Human
caccccaugcccaccccacc

SEQ ID NO: 198116 - RNA, 27 nt, Human
cacccugaagucuugcaccucacagag

SEQ ID NO: 198117 - RNA, 24 nt, Human
cccaccccacccugaagucuugca

SEQ ID NO: 198118 - RNA, 23 nt, Human
cccauacccccaccccaugccca

SEQ ID NO: 198119 - RNA, 21 nt, Human
ccccaccccaugcccacccca

SEQ ID NO: 198120 - RNA, 21 nt, Human
cccccaccccaugcccacccc

SEQ ID NO: 198121 - RNA, 24 nt, Human
aacagcacagaaguuuaacaauua

SEQ ID NO: 198122 - RNA, 23 nt, Human
aagcagaaacccagcaaccccgg

SEQ ID NO: 198123 - RNA, 23 nt, Human
aagcagaaacccagcaguucaga

SEQ ID NO: 198124 - RNA, 22 nt, Human
aagcccaggacagugauugcag

SEQ ID NO: 198125 - RNA, 18 nt, Human
acagcugaucugcaugca

SEQ ID NO: 198126 - RNA, 23 nt, Human
acccagcaguucagaaacccagc

SEQ ID NO: 198127 - RNA, 18 nt, Human
agagugggaucuuaaaaa

SEQ ID NO: 198128 - RNA, 22 nt, Human
aggaacagcacagaaguuuaac

SEQ ID NO: 198129 - RNA, 25 nt, Human
aggcaccauaagcccaggacaguga

SEQ ID NO: 198130 - RNA, 25 nt, Human
caaaggaccccuaguccauaggcac

SEQ ID NO: 198131 - RNA, 21 nt, Human
cagcaguucagaaacccagca

SEQ ID NO: 198132 - RNA, 19 nt, Human
cccaggaagcuuuccaugg

SEQ ID NO: 198133 - RNA, 19 nt, Human
cuaugucgauucaaauuca

SEQ ID NO: 198134 - RNA, 18 nt, Human
gcuccaucuugcucuuuc

SEQ ID NO: 198135 - RNA, 20 nt, Human
ggggagaagcucugcuagca

SEQ ID NO: 198136 - RNA, 18 nt, Human
gugauucaggaagagguc

SEQ ID NO: 198137 - RNA, 24 nt, Human
uaagcccaggacagugauugcagc

SEQ ID NO: 198138 - RNA, 23 nt, Human
uacaaaauuuggagauucacagg

SEQ ID NO: 198139 - RNA, 20 nt, Human
uagcuuagaacaagguacaa

SEQ ID NO: 198140 - RNA, 19 nt, Human
ucuuucucucuuuuuaauu

SEQ ID NO: 198141 - RNA, 21 nt, Human
uucacaaaggaccccuagucc

SEQ ID NO: 198142 - RNA, 21 nt, Human
uugcuccaucuugcucuuuca

SEQ ID NO: 198143 - RNA, 23 nt, Human
uuucccaggaagcuuuccaugga

SEQ ID NO: 198144 - RNA, 28 nt, Human
uuuuuuuuuuuuucucuuucucucuuuu

SEQ ID NO: 198145 - RNA, 20 nt, Human
aaaaacacccaccccaucaa

SEQ ID NO: 198146 - RNA, 20 nt, Human
aaaagggaacagacucccga

SEQ ID NO: 198147 - RNA, 24 nt, Human
aaacgaacucacuauguucuucac

SEQ ID NO: 198148 - RNA, 20 nt, Human
aacucacuauguucuucacu

SEQ ID NO: 198149 - RNA, 19 nt, Human
aacuugaggucauuaguaa

SEQ ID NO: 198150 - RNA, 23 nt, Human
aagaccuuuuauuuguuuaaaau

SEQ ID NO: 198151 - RNA, 25 nt, Human
agacaaacgaacucacuauguucuu

SEQ ID NO: 198152 - RNA, 21 nt, Human
aggcagggcccugcugagcuc

SEQ ID NO: 198153 - RNA, 18 nt, Human
agggaauacaacuugagg

SEQ ID NO: 198154 - RNA, 22 nt, Human
aggucauuaguaacuaguugaa

SEQ ID NO: 198155 - RNA, 19 nt, Human
cacccaccccaucaacagc

SEQ ID NO: 198156 - RNA, 19 nt, Human
cacuauguucuucacaaag

SEQ ID NO: 198157 - RNA, 23 nt, Human
cacuauguucuucacaaagauca

SEQ ID NO: 198158 - RNA, 20 nt, Human
cagaauuccccaagaccuuu

SEQ ID NO: 198159 - RNA, 21 nt, Human
cagcagagucugagcagacac

SEQ ID NO: 198160 - RNA, 20 nt, Human
cagugcccacacccauuucu

SEQ ID NO: 198161 - RNA, 22 nt, Human
ccaaacagaauuccccaagacc

SEQ ID NO: 198162 - RNA, 22 nt, Human
ccacacccauuucucagugguc

SEQ ID NO: 198163 - RNA, 20 nt, Human
ccagccuugagaguuacauc

SEQ ID NO: 198164 - RNA, 22 nt, Human
cccagguagccaaacagaauuc

SEQ ID NO: 198165 - RNA, 22 nt, Human
cgucgcagucgccgcgcacgca

SEQ ID NO: 198166 - RNA, 24 nt, Human
cucauagaugagaaacaaugaacc

SEQ ID NO: 198167 - RNA, 21 nt, Human
cucgggagaccaggcagggcc

SEQ ID NO: 198168 - RNA, 18 nt, Human
cucuugccuuuccuucag

SEQ ID NO: 198169 - RNA, 23 nt, Human
gagaccaggcagggcccugcuga

SEQ ID NO: 198170 - RNA, 18 nt, Human
ggugcagacuggcgugcc

SEQ ID NO: 198171 - RNA, 21 nt, Human
guaaaaggaacuuugccaagc

SEQ ID NO: 198172 - RNA, 22 nt, Human
guagccaaacagaauuccccaa

SEQ ID NO: 198173 - RNA, 21 nt, Human
gucacucaugcgccgcaggga

SEQ ID NO: 198174 - RNA, 19 nt, Human
gugcagacuggcgugccca

SEQ ID NO: 198175 - RNA, 22 nt, Human
uaaaguacaccaagcgugcagu

SEQ ID NO: 198176 - RNA, 19 nt, Human
uagaugaacagaacagggu

SEQ ID NO: 198177 - RNA, 23 nt, Human
ugaacagaacaggguaaaaggaa

SEQ ID NO: 198178 - RNA, 23 nt, Human
ugauuuaaauaugucugcauuua

SEQ ID NO: 198179 - RNA, 21 nt, Human
ugcauuuagaugaacagaaca

SEQ ID NO: 198180 - RNA, 22 nt, Human
ugccagggaauacaacuugagg

SEQ ID NO: 198181 - RNA, 19 nt, Human
ugcucgggagaccaggcag

SEQ ID NO: 198182 - RNA, 18 nt, Human
uggcacuaaaagggaaca

SEQ ID NO: 198183 - RNA, 22 nt, Human
ugucagugcccacacccauuuc

SEQ ID NO: 198184 - RNA, 24 nt, Human
uuaagguuuccaauaagguuuggg

SEQ ID NO: 198185 - RNA, 18 nt, Human
uugccagggaauacaacu

SEQ ID NO: 198186 - RNA, 22 nt, Human
aaacaacaugguaauagaagua

SEQ ID NO: 198187 - RNA, 21 nt, Human
aaagagugguuuucuuuagga

SEQ ID NO: 198188 - RNA, 22 nt, Human
aagcauuuacacuuaaaaaaug

SEQ ID NO: 198189 - RNA, 23 nt, Human
acaaccagcaaaugauuucaccu

SEQ ID NO: 198190 - RNA, 18 nt, Human
acuuuccagcuuaaaauu

SEQ ID NO: 198191 - RNA, 20 nt, Human
agcuacuaaaaaacuugcau

SEQ ID NO: 198192 - RNA, 22 nt, Human
aggaaaacaggacuaccacaac

SEQ ID NO: 198193 - RNA, 24 nt, Human
aggacugacuccauauugccauuu

SEQ ID NO: 198194 - RNA, 18 nt, Human
auaaaaacuaacccccca

SEQ ID NO: 198195 - RNA, 25 nt, Human
caaaaaauaaacaaccagcaaauga

SEQ ID NO: 198196 - RNA, 24 nt, Human
caauaucccacacuauuuucuggu

SEQ ID NO: 198197 - RNA, 19 nt, Human
cacagcacaguaacaaagu

SEQ ID NO: 198198 - RNA, 20 nt, Human
cacagcacaguaacaaaguu

SEQ ID NO: 198199 - RNA, 21 nt, Human
cagcaaaugauuucaccucuu

SEQ ID NO: 198200 - RNA, 19 nt, Human
cagccuucgcgaaacuggg

SEQ ID NO: 198201 - RNA, 19 nt, Human
ccgcugccacuccucccgc

SEQ ID NO: 198202 - RNA, 20 nt, Human
ccgcugccacuccucccgcc

SEQ ID NO: 198203 - RNA, 23 nt, Human
ccgcugccacuccucccgcccuc

SEQ ID NO: 198204 - RNA, 21 nt, Human
ccuugccgcugccacuccucc

SEQ ID NO: 198205 - RNA, 22 nt, Human
ccuugccgcugccacuccuccc

SEQ ID NO: 198206 - RNA, 23 nt, Human
ccuugccgcugccacuccucccg

SEQ ID NO: 198207 - RNA, 25 nt, Human
cuaccacaaccaaagauguuacaga

SEQ ID NO: 198208 - RNA, 23 nt, Human
cugccuugccgcugccacuccuc

SEQ ID NO: 198209 - RNA, 18 nt, Human
cugcggggaaggcgcgug

SEQ ID NO: 198210 - RNA, 22 nt, Human
gcgcgugccgggugccugcggg

SEQ ID NO: 198211 - RNA, 22 nt, Human
gcgcgugccgggugccugcggg

SEQ ID NO: 198212 - RNA, 18 nt, Human
ggcagagagagccaugau

SEQ ID NO: 198213 - RNA, 21 nt, Human
ggccgcggcgcgccgacagcc

SEQ ID NO: 198214 - RNA, 22 nt, Human
guaacgaaauucuaaaaagcca

SEQ ID NO: 198215 - RNA, 22 nt, Human
guggcggcggggaaggcgcgug

SEQ ID NO: 198216 - RNA, 26 nt, Human
uaaaaaaaagcauuuacacuuaaaaa

SEQ ID NO: 198217 - RNA, 23 nt, Human
uaagaggcuaucaaguaccagua

SEQ ID NO: 198218 - RNA, 19 nt, Human
uacacuuaaaaaaugggau

SEQ ID NO: 198219 - RNA, 26 nt, Human
uaccaaaaaauaaacaaccagcaaau

SEQ ID NO: 198220 - RNA, 27 nt, Human
uaccaaaaaauaaacaaccagcaaaug

SEQ ID NO: 198221 - RNA, 21 nt, Human
uaccaguaucuucacguuggu

SEQ ID NO: 198222 - RNA, 24 nt, Human
uaccaguaucuucacguuggucag

SEQ ID NO: 198223 - RNA, 20 nt, Human
uagaaguaauuuaaaauguu

SEQ ID NO: 198224 - RNA, 22 nt, Human
uaggaaacaauucuacuaaaaa

SEQ ID NO: 198225 - RNA, 24 nt, Human
uaggaaacaauucuacuaaaaaac

SEQ ID NO: 198226 - RNA, 19 nt, Human
uauaaaaacuaacccccca

SEQ ID NO: 198227 - RNA, 19 nt, Human
uaucaaguaccaguaucuu

SEQ ID NO: 198228 - RNA, 23 nt, Human
uauuccagugacuuuccagcuua

SEQ ID NO: 198229 - RNA, 18 nt, Human
ucaagacauuaaaugcag

SEQ ID NO: 198230 - RNA, 21 nt, Human
ucuagagcuacuaaaaaacuu

SEQ ID NO: 198231 - RNA, 24 nt, Human
ucuuucacagcacaguaacaaagu

SEQ ID NO: 198232 - RNA, 25 nt, Human
ugacacccgagacagucagagccuc

SEQ ID NO: 198233 - RNA, 24 nt, Human
ugacuccauauugccauuuaauau

SEQ ID NO: 198234 - RNA, 23 nt, Human
ugccgggugccugcggggaaggc

SEQ ID NO: 198235 - RNA, 19 nt, Human
uggcggcggggaaggcgcg

SEQ ID NO: 198236 - RNA, 24 nt, Human
uuauuccagugacuuuccagcuua

SEQ ID NO: 198237 - RNA, 27 nt, Human
uucaauaucccacacuauuuucugguu

SEQ ID NO: 198238 - RNA, 22 nt, Human
uuguaccaaaaaauaaacaacc

SEQ ID NO: 198239 - RNA, 20 nt, Human
uuuacacuuaaaaaauggga

SEQ ID NO: 198240 - RNA, 24 nt, Human
uuuuuuuuuuuuuuuuuuuauuuu

SEQ ID NO: 198241 - RNA, 19 nt, Human
aaacuagaagggaaaggug

SEQ ID NO: 198242 - RNA, 19 nt, Human
aaacuguacagucaccaga

SEQ ID NO: 198243 - RNA, 20 nt, Human
aacaacuuuucacaagccga

SEQ ID NO: 198244 - RNA, 22 nt, Human
aacucccuucuucaauggacua

SEQ ID NO: 198245 - RNA, 18 nt, Human
aagggaaagguguuuucu

SEQ ID NO: 198246 - RNA, 21 nt, Human
aagggaaagguguuuucucca

SEQ ID NO: 198247 - RNA, 20 nt, Human
aauuuguuuuucuauaccac

SEQ ID NO: 198248 - RNA, 24 nt, Human
agaaagccacuauaaaacccaaug

SEQ ID NO: 198249 - RNA, 22 nt, Human
agagugaggguugacauuucac

SEQ ID NO: 198250 - RNA, 20 nt, Human
caaacuguauccagcuuuau

SEQ ID NO: 198251 - RNA, 25 nt, Human
caacauagcuuuuaaaaaaaaaaaa

SEQ ID NO: 198252 - RNA, 19 nt, Human
caagaggaagucucucaaa

SEQ ID NO: 198253 - RNA, 18 nt, Human
cagcuuuauuaaagauac

SEQ ID NO: 198254 - RNA, 21 nt, Human
ccaagguggccauguguguca

SEQ ID NO: 198255 - RNA, 21 nt, Human
ccacaaggcuuuugugccaag

SEQ ID NO: 198256 - RNA, 20 nt, Human
ccacaaucuagaaauggaac

SEQ ID NO: 198257 - RNA, 26 nt, Human
cccuccuccugggagccaagaggaag

SEQ ID NO: 198258 - RNA, 20 nt, Human
ccuucccccaaaaacaacaa

SEQ ID NO: 198259 - RNA, 18 nt, Human
cuuuugugccaagguggc

SEQ ID NO: 198260 - RNA, 23 nt, Human
gccccuucccccaaaaacaacaa

SEQ ID NO: 198261 - RNA, 20 nt, Human
ggaaagguguuuucuccaca

SEQ ID NO: 198262 - RNA, 21 nt, Human
ggcaucacuggaaaguccaga

SEQ ID NO: 198263 - RNA, 22 nt, Human
gguggcggcggcgacggcagcg

SEQ ID NO: 198264 - RNA, 21 nt, Human
gugcuggacgcgggaugcagc

SEQ ID NO: 198265 - RNA, 22 nt, Human
uacaacaacuuucaaacucccu

SEQ ID NO: 198266 - RNA, 20 nt, Human
uaccaaaaaucagaaagcca

SEQ ID NO: 198267 - RNA, 22 nt, Human
uaccaaaaaucagaaagccacu

SEQ ID NO: 198268 - RNA, 24 nt, Human
uaccaaaaaucagaaagccacuau

SEQ ID NO: 198269 - RNA, 25 nt, Human
uagaaauggaaccacugcucuuuug

SEQ ID NO: 198270 - RNA, 18 nt, Human
uauaaaacuugauaaaaa

SEQ ID NO: 198271 - RNA, 22 nt, Human
ucaggcaggacaugggcagaca

SEQ ID NO: 198272 - RNA, 23 nt, Human
ucccccaaaaacaacaaugaagu

SEQ ID NO: 198273 - RNA, 21 nt, Human
ucucaaaacuagaagggaaag

SEQ ID NO: 198274 - RNA, 20 nt, Human
ugaaaauggcagaauuuauc

SEQ ID NO: 198275 - RNA, 21 nt, Human
ugaaaauggcagaauuuaucu

SEQ ID NO: 198276 - RNA, 20 nt, Human
ugaaagauggaaagggagaa

SEQ ID NO: 198277 - RNA, 18 nt, Human
ugccaagguggccaugug

SEQ ID NO: 198278 - RNA, 19 nt, Human
ugccccuucccccaaaaac

SEQ ID NO: 198279 - RNA, 21 nt, Human
ugccccuucccccaaaaacaa

SEQ ID NO: 198280 - RNA, 23 nt, Human
uggaaccacugcucuuuugacag

SEQ ID NO: 198281 - RNA, 18 nt, Human
uggcaucacuggaaaguc

SEQ ID NO: 198282 - RNA, 19 nt, Human
uguucugugugcuaacaac

SEQ ID NO: 198283 - RNA, 20 nt, Human
uuaucugaagauccacaauc

SEQ ID NO: 198284 - RNA, 19 nt, Human
uucuccacaucaauccagc

SEQ ID NO: 198285 - RNA, 20 nt, Human
uuuaaaaaaaaaaaaaaagu

SEQ ID NO: 198286 - RNA, 26 nt, Human
uuucaaacucccuucuucaauggacu

SEQ ID NO: 198287 - RNA, 18 nt, Human
uuucuauaccacaaggcu

SEQ ID NO: 198288 - RNA, 22 nt, Human
aaaagcaccacugauuauugcu

SEQ ID NO: 198289 - RNA, 23 nt, Human
aaacaccacaguaugcacaggac

SEQ ID NO: 198290 - RNA, 23 nt, Human
aaaccuagguacaaaagcaccac

SEQ ID NO: 198291 - RNA, 24 nt, Human
aaaccuagguacaaaagcaccacu

SEQ ID NO: 198292 - RNA, 26 nt, Human
aagcaaaaaguaaagcaacggacugg

SEQ ID NO: 198293 - RNA, 20 nt, Human
acaccacaguaugcacagga

SEQ ID NO: 198294 - RNA, 25 nt, Human
aucaaccccaauuuuucaugacaau

SEQ ID NO: 198295 - RNA, 20 nt, Human
auugcucuagaaaaacugca

SEQ ID NO: 198296 - RNA, 21 nt, Human
caaaaaguaaagcaacggacu

SEQ ID NO: 198297 - RNA, 21 nt, Human
cacacagcuuccaauauuuaa

SEQ ID NO: 198298 - RNA, 22 nt, Human
cacaguaugcacaggacuaaag

SEQ ID NO: 198299 - RNA, 24 nt, Human
cccaagagauacauaaaaucaacc

SEQ ID NO: 198300 - RNA, 21 nt, Human
cgaccugccucgugccgaauu

SEQ ID NO: 198301 - RNA, 18 nt, Human
cugccucugccgcugcag

SEQ ID NO: 198302 - RNA, 20 nt, Human
cuggaugcugccucugccgc

SEQ ID NO: 198303 - RNA, 23 nt, Human
cuggcgccgccgcuggaugcugc

SEQ ID NO: 198304 - RNA, 20 nt, Human
gcaccacugauuauugcucu

SEQ ID NO: 198305 - RNA, 19 nt, Human
gcagggcacgacguagccc

SEQ ID NO: 198306 - RNA, 20 nt, Human
gcgccgccgcuggaugcugc

SEQ ID NO: 198307 - RNA, 22 nt, Human
gcucuagaaaaacugcaugaaa

SEQ ID NO: 198308 - RNA, 18 nt, Human
ggacuaaauuuuaaagca

SEQ ID NO: 198309 - RNA, 18 nt, Human
guacaaaagcaccacuga

SEQ ID NO: 198310 - RNA, 19 nt, Human
gugaagcaaaaaguaaagc

SEQ ID NO: 198311 - RNA, 21 nt, Human
guuuuuuuuuuuuuuuucugg

SEQ ID NO: 198312 - RNA, 21 nt, Human
uaaaaacaccacaguaugcac

SEQ ID NO: 198313 - RNA, 30 nt, Human
uaaaaacaccacaguaugcacaggacuaaa

SEQ ID NO: 198314 - RNA, 19 nt, Human
uaaaaguugucccaagaga

SEQ ID NO: 198315 - RNA, 19 nt, Human
uaaagcaacggacuggaac

SEQ ID NO: 198316 - RNA, 21 nt, Human
uagguacaaaagcaccacuga

SEQ ID NO: 198317 - RNA, 22 nt, Human
uaugcacaguaaaaacaccaca

SEQ ID NO: 198318 - RNA, 23 nt, Human
ucaaucuuacacacagcuuccaa

SEQ ID NO: 198319 - RNA, 19 nt, Human
ucggugaagcaaaaaguaa

SEQ ID NO: 198320 - RNA, 18 nt, Human
ucugcagacaaguaaacc

SEQ ID NO: 198321 - RNA, 19 nt, Human
ugaagcaaaaaguaaagca

SEQ ID NO: 198322 - RNA, 22 nt, Human
ugcucuagaaaaacugcaugaa

SEQ ID NO: 198323 - RNA, 19 nt, Human
uggccacaacuauccaugu

SEQ ID NO: 198324 - RNA, 18 nt, Human
uggcgccgccgcuggaug

SEQ ID NO: 198325 - RNA, 22 nt, Human
uggcgccgccgcuggaugcugc

SEQ ID NO: 198326 - RNA, 25 nt, Human
uuagcauuuacaaaauacuugguaa

SEQ ID NO: 198327 - RNA, 22 nt, Human
uuuaaaccacaaauagucagca

SEQ ID NO: 198328 - RNA, 20 nt, Human
uuuccaaaaagcaugacuau

SEQ ID NO: 198329 - RNA, 21 nt, Human
uuuccaaaaagcaugacuaug

SEQ ID NO: 198330 - RNA, 21 nt, Human
aacagcaacaucaauaacaac

SEQ ID NO: 198331 - RNA, 20 nt, Human
acaagcaguauaugacaaac

SEQ ID NO: 198332 - RNA, 22 nt, Human
acagcaacaucaauaacaacaa

SEQ ID NO: 198333 - RNA, 23 nt, Human
agguuucagaacaggaggauaau

SEQ ID NO: 198334 - RNA, 23 nt, Human
auuaaauacaacauuauaaaaua

SEQ ID NO: 198335 - RNA, 19 nt, Human
caacaagacgaaugaaaua

SEQ ID NO: 198336 - RNA, 20 nt, Human
caacaagacgaaugaaauaa

SEQ ID NO: 198337 - RNA, 18 nt, Human
caacagguuucucagaug

SEQ ID NO: 198338 - RNA, 21 nt, Human
caggaggauaauaauaugaua

SEQ ID NO: 198339 - RNA, 26 nt, Human
caggauggagccuaagaaccuguaaa

SEQ ID NO: 198340 - RNA, 19 nt, Human
ccagaaacugaaggugacu

SEQ ID NO: 198341 - RNA, 20 nt, Human
ccagaaacugaaggugacug

SEQ ID NO: 198342 - RNA, 23 nt, Human
cuaaagaagcucagacuagaaaa

SEQ ID NO: 198343 - RNA, 18 nt, Human
cucagauuuuuaguguau

SEQ ID NO: 198344 - RNA, 21 nt, Human
cuccagaaacugaaggugacu

SEQ ID NO: 198345 - RNA, 22 nt, Human
gaacuggacaaguagaaggaua

SEQ ID NO: 198346 - RNA, 22 nt, Human
gaccaagugagcauuaucagaa

SEQ ID NO: 198347 - RNA, 18 nt, Human
gcaguuaaaauuaaauac

SEQ ID NO: 198348 - RNA, 21 nt, Human
gccagcuccagaaacugaagg

SEQ ID NO: 198349 - RNA, 23 nt, Human
ggaaagccagcgaaaggguucag

SEQ ID NO: 198350 - RNA, 22 nt, Human
ggauggagccuaagaaccugua

SEQ ID NO: 198351 - RNA, 23 nt, Human
uaaagaagcucagacuagaaaag

SEQ ID NO: 198352 - RNA, 18 nt, Human
uaacaacaagacgaauga

SEQ ID NO: 198353 - RNA, 20 nt, Human
uaacaacaagacgaaugaaa

SEQ ID NO: 198354 - RNA, 22 nt, Human
uaauaacagcaacaucaauaac

SEQ ID NO: 198355 - RNA, 25 nt, Human
uacacaaauguuaaucaaaugcuga

SEQ ID NO: 198356 - RNA, 25 nt, Human
uacauguagaguuucucagauuuuu

SEQ ID NO: 198357 - RNA, 18 nt, Human
uagaaaagaccuccagga

SEQ ID NO: 198358 - RNA, 21 nt, Human
uagaggcaauaacaagccaag

SEQ ID NO: 198359 - RNA, 20 nt, Human
uaugacaaacucugaagaaa

SEQ ID NO: 198360 - RNA, 19 nt, Human
ucaaaagacacuuugguaa

SEQ ID NO: 198361 - RNA, 23 nt, Human
ucaaaagacacuuugguaaaaaa

SEQ ID NO: 198362 - RNA, 18 nt, Human
uccaggaucaagcugaag

SEQ ID NO: 198363 - RNA, 22 nt, Human
uccaggaucaagcugaagaauc

SEQ ID NO: 198364 - RNA, 23 nt, Human
ugaacuggacaaguagaaggaua

SEQ ID NO: 198365 - RNA, 19 nt, Human
ugacaagcaguauaugaca

SEQ ID NO: 198366 - RNA, 24 nt, Human
ugacaagcaguauaugacaaacuu

SEQ ID NO: 198367 - RNA, 21 nt, Human
ugcaagaaaaaauaaaauguc

SEQ ID NO: 198368 - RNA, 20 nt, Human
uggcaguuaaaauuaaauac

SEQ ID NO: 198369 - RNA, 18 nt, Human
uguagaguuucucagauu

SEQ ID NO: 198370 - RNA, 18 nt, Human
ugucaaaagacacuuugg

SEQ ID NO: 198371 - RNA, 18 nt, Human
aaaaacacaagacacaac

SEQ ID NO: 198372 - RNA, 21 nt, Human
aaaaaccaccccaacccugcu

SEQ ID NO: 198373 - RNA, 18 nt, Human
aaaccaccccaacccugc

SEQ ID NO: 198374 - RNA, 19 nt, Human
aacaccucccuccccaccc

SEQ ID NO: 198375 - RNA, 22 nt, Human
acagaacacaacaaaaauacug

SEQ ID NO: 198376 - RNA, 23 nt, Human
accccaacccugcuauaaaaaca

SEQ ID NO: 198377 - RNA, 22 nt, Human
accccuucgcccccucugaagu

SEQ ID NO: 198378 - RNA, 18 nt, Human
accucccuccccacccac

SEQ ID NO: 198379 - RNA, 20 nt, Human
agaacacaacaaaaauacug

SEQ ID NO: 198380 - RNA, 22 nt, Human
agaacacaacaaaaauacugca

SEQ ID NO: 198381 - RNA, 18 nt, Human
agacaaaaacacaagaca

SEQ ID NO: 198382 - RNA, 22 nt, Human
agacaaaaacacaagacacaac

SEQ ID NO: 198383 - RNA, 23 nt, Human
agacaaaaacacaagacacaaca

SEQ ID NO: 198384 - RNA, 26 nt, Human
agagggcuggaggcccugaaagccuu

SEQ ID NO: 198385 - RNA, 19 nt, Human
aggaagccagccaagagaa

SEQ ID NO: 198386 - RNA, 22 nt, Human
agggcuggaggcccugaaagcc

SEQ ID NO: 198387 - RNA, 23 nt, Human
caaaaauacugcauuugaggcug

SEQ ID NO: 198388 - RNA, 22 nt, Human
caacaaggauacuugaaacuca

SEQ ID NO: 198389 - RNA, 18 nt, Human
caacagaacacaacaaaa

SEQ ID NO: 198390 - RNA, 23 nt, Human
cacacaaaaguuagaccaaggcc

SEQ ID NO: 198391 - RNA, 22 nt, Human
cacccacgcauggcucaaaaac

SEQ ID NO: 198392 - RNA, 25 nt, Human
caccccaacccugcuauaaaaacaa

SEQ ID NO: 198393 - RNA, 18 nt, Human
caccucccuccccaccca

SEQ ID NO: 198394 - RNA, 24 nt, Human
cagugccguuaaacaccucccucc

SEQ ID NO: 198395 - RNA, 18 nt, Human
ccacggggaaagugguca

SEQ ID NO: 198396 - RNA, 24 nt, Human
ccacgguaaggaagccagccaaga

SEQ ID NO: 198397 - RNA, 19 nt, Human
ccauaggcuccuuccuccu

SEQ ID NO: 198398 - RNA, 23 nt, Human
cccaacccugcuauaaaaacaac

SEQ ID NO: 198399 - RNA, 19 nt, Human
ccccaacccugcuauaaaa

SEQ ID NO: 198400 - RNA, 27 nt, Human
cccuccccacccacgcauggcucaaaa

SEQ ID NO: 198401 - RNA, 21 nt, Human
cccugaaagccuucagugccc

SEQ ID NO: 198402 - RNA, 21 nt, Human
cgcauggcucaaaaaccaccc

SEQ ID NO: 198403 - RNA, 20 nt, Human
cucaaaaaccaccccaaccc

SEQ ID NO: 198404 - RNA, 21 nt, Human
cucaaaaaccaccccaacccu

SEQ ID NO: 198405 - RNA, 22 nt, Human
cucaaaaaccaccccaacccug

SEQ ID NO: 198406 - RNA, 21 nt, Human
cuccuuccuccuuuccagaga

SEQ ID NO: 198407 - RNA, 20 nt, Human
cugcuauaaaaacaacagaa

SEQ ID NO: 198408 - RNA, 21 nt, Human
gaacacaacaaaaauacugca

SEQ ID NO: 198409 - RNA, 24 nt, Human
gagggcuggaggcccugaaagccu

SEQ ID NO: 198410 - RNA, 21 nt, Human
gaugugcuuuucguuggggaa

SEQ ID NO: 198411 - RNA, 22 nt, Human
gcccugaaagccuucagugccc

SEQ ID NO: 198412 - RNA, 25 nt, Human
gggacacagugagagggcuggaggc

SEQ ID NO: 198413 - RNA, 21 nt, Human
gggcuggaggcccugaaagcc

SEQ ID NO: 198414 - RNA, 22 nt, Human
gguaaggaagccagccaagaga

SEQ ID NO: 198415 - RNA, 22 nt, Human
guuaaacaccucccuccccacc

SEQ ID NO: 198416 - RNA, 19 nt, Human
guucauggcccugggagcc

SEQ ID NO: 198417 - RNA, 23 nt, Human
uaaaaacaacagaacacaacaaa

SEQ ID NO: 198418 - RNA, 24 nt, Human
uaaaaacaacagaacacaacaaaa

SEQ ID NO: 198419 - RNA, 27 nt, Human
uaagacaaaaacacaagacacaacauc

SEQ ID NO: 198420 - RNA, 24 nt, Human
uauaaaaacaacagaacacaacaa

SEQ ID NO: 198421 - RNA, 21 nt, Human
ucuuccaggcucugcugcagg

SEQ ID NO: 198422 - RNA, 21 nt, Human
ugagccaggaacagaguggcc

SEQ ID NO: 198423 - RNA, 18 nt, Human
ugaggaugcugaagggca

SEQ ID NO: 198424 - RNA, 18 nt, Human
ugcugaagggcagggcug

SEQ ID NO: 198425 - RNA, 22 nt, Human
ugcuggcuccgcgggcggcggc

SEQ ID NO: 198426 - RNA, 18 nt, Human
ugcugggcucguucgugc

SEQ ID NO: 198427 - RNA, 21 nt, Human
aaaaacagggacuaccggaag

SEQ ID NO: 198428 - RNA, 21 nt, Human
aaaacagggacuaccggaagc

SEQ ID NO: 198429 - RNA, 20 nt, Human
aagcagccuagggcccagaa

SEQ ID NO: 198430 - RNA, 20 nt, Human
acccauguacugcaaaaaca

SEQ ID NO: 198431 - RNA, 19 nt, Human
accggaagcagccuagggc

SEQ ID NO: 198432 - RNA, 21 nt, Human
acucccaggguccaagagagg

SEQ ID NO: 198433 - RNA, 22 nt, Human
agagggauucugggugagaggg

SEQ ID NO: 198434 - RNA, 22 nt, Human
agcauccagcaaggcccccucg

SEQ ID NO: 198435 - RNA, 19 nt, Human
aggaggagauaagcugggg

SEQ ID NO: 198436 - RNA, 23 nt, Human
aggccaguggucagucgggagga

SEQ ID NO: 198437 - RNA, 22 nt, Human
aggcccagaaguuguacagcag

SEQ ID NO: 198438 - RNA, 23 nt, Human
agggauucugggugagagggaug

SEQ ID NO: 198439 - RNA, 20 nt, Human
cacacccacccucacuccca

SEQ ID NO: 198440 - RNA, 19 nt, Human
cacccacccucacucccag

SEQ ID NO: 198441 - RNA, 25 nt, Human
cacccucacucccaggguccaagag

SEQ ID NO: 198442 - RNA, 24 nt, Human
cacugugccgacugcucccagggu

SEQ ID NO: 198443 - RNA, 22 nt, Human
cagcagcauccagcaaggcccc

SEQ ID NO: 198444 - RNA, 18 nt, Human
cagggcuggagaaagggg

SEQ ID NO: 198445 - RNA, 21 nt, Human
cauguacugcaaaaacaggga

SEQ ID NO: 198446 - RNA, 23 nt, Human
ccacacccacccucacucccagg

SEQ ID NO: 198447 - RNA, 19 nt, Human
cccacacccacccucacuc

SEQ ID NO: 198448 - RNA, 21 nt, Human
cccacacccacccucacuccc

SEQ ID NO: 198449 - RNA, 27 nt, Human
cccacccucacucccaggguccaagag

SEQ ID NO: 198450 - RNA, 24 nt, Human
cccauguacugcaaaaacagggac

SEQ ID NO: 198451 - RNA, 21 nt, Human
ccgcaggucgcugucgccugu

SEQ ID NO: 198452 - RNA, 25 nt, Human
ccugaggugguaguuuagucagggc

SEQ ID NO: 198453 - RNA, 18 nt, Human
ccugugcccagugcggaa

SEQ ID NO: 198454 - RNA, 22 nt, Human
cggaagcagccuagggcccaga

SEQ ID NO: 198455 - RNA, 22 nt, Human
cugaggcuuccacccacaccca

SEQ ID NO: 198456 - RNA, 19 nt, Human
gaagccuggaguagagcug

SEQ ID NO: 198457 - RNA, 20 nt, Human
gaggaugcugucaggcagag

SEQ ID NO: 198458 - RNA, 18 nt, Human
gccaguggucagucggga

SEQ ID NO: 198459 - RNA, 24 nt, Human
gccucugaggcuuccacccacacc

SEQ ID NO: 198460 - RNA, 18 nt, Human
gcugggugugguucuugc

SEQ ID NO: 198461 - RNA, 18 nt, Human
ggccucugaggcuuccac

SEQ ID NO: 198462 - RNA, 23 nt, Human
gggggccaggcuugcugcacugu

SEQ ID NO: 198463 - RNA, 22 nt, Human
ucagucgggaggaggguaccgg

SEQ ID NO: 198464 - RNA, 22 nt, Human
uccaacaggggagauagucacc

SEQ ID NO: 198465 - RNA, 23 nt, Human
ucccaaggccucugaggcuucca

SEQ ID NO: 198466 - RNA, 20 nt, Human
uccgccagccuccagucagc

SEQ ID NO: 198467 - RNA, 18 nt, Human
ugagcaaaccgcacccaa

SEQ ID NO: 198468 - RNA, 21 nt, Human
ugucaggcagaggcucuagca

SEQ ID NO: 198469 - RNA, 20 nt, Human
ugucgccuguccgccagccu

SEQ ID NO: 198470 - RNA, 22 nt, Human
ugugcccagugcggaauauggc

SEQ ID NO: 198471 - RNA, 18 nt, Human
ugugccgacugcucccag

SEQ ID NO: 198472 - RNA, 19 nt, Human
uugcugcucucgcuccucu

SEQ ID NO: 198473 - RNA, 21 nt, Human
aaaaaaacaacaacccggagg

SEQ ID NO: 198474 - RNA, 22 nt, Human
aaacaacaacccggaggcugca

SEQ ID NO: 198475 - RNA, 20 nt, Human
agcacaccguccgggccggc

SEQ ID NO: 198476 - RNA, 18 nt, Human
aggaggccgcaggagcga

SEQ ID NO: 198477 - RNA, 19 nt, Human
aggcggcggccuccgcgcc

SEQ ID NO: 198478 - RNA, 21 nt, Human
agggacguuuaguguuggggg

SEQ ID NO: 198479 - RNA, 21 nt, Human
caggagcugaggcccgccggc

SEQ ID NO: 198480 - RNA, 19 nt, Human
caggguccuuucuccacca

SEQ ID NO: 198481 - RNA, 24 nt, Human
cauggccgaccgcuccucgcugag

SEQ ID NO: 198482 - RNA, 24 nt, Human
cauuuaaaaaaacaacaacccgga

SEQ ID NO: 198483 - RNA, 19 nt, Human
ccagccugccugcuccugg

SEQ ID NO: 198484 - RNA, 20 nt, Human
cccccuguucgaguggggau

SEQ ID NO: 198485 - RNA, 18 nt, Human
ccccggguggccauggcc

SEQ ID NO: 198486 - RNA, 21 nt, Human
cccuggagcugcuacccggac

SEQ ID NO: 198487 - RNA, 23 nt, Human
cccuguucgaguggggauccagc

SEQ ID NO: 198488 - RNA, 19 nt, Human
ccggccugcugucuggguc

SEQ ID NO: 198489 - RNA, 26 nt, Human
cgauggacccacagguccaggguccu

SEQ ID NO: 198490 - RNA, 20 nt, Human
cgcgccgggcugggcugggc

SEQ ID NO: 198491 - RNA, 21 nt, Human
cgcgccgggcugggcugggcc

SEQ ID NO: 198492 - RNA, 21 nt, Human
cgcgccgggcugggcugggcc

SEQ ID NO: 198493 - RNA, 21 nt, Human
cgcucagccuuggacagccgg

SEQ ID NO: 198494 - RNA, 24 nt, Human
cguccgggccggccugcugucugg

SEQ ID NO: 198495 - RNA, 18 nt, Human
cuccgcgccgggcugggc

SEQ ID NO: 198496 - RNA, 19 nt, Human
cuccucgcugaggccgggg

SEQ ID NO: 198497 - RNA, 20 nt, Human
gaggcccgccggccgcggcc

SEQ ID NO: 198498 - RNA, 20 nt, Human
gcccagagucucugcauggc

SEQ ID NO: 198499 - RNA, 21 nt, Human
gcccagagucucugcauggcc

SEQ ID NO: 198500 - RNA, 23 nt, Human
gcccuggagcugcuacccggacc

SEQ ID NO: 198501 - RNA, 18 nt, Human
gccggccgcggccugcgc

SEQ ID NO: 198502 - RNA, 23 nt, Human
ggaacggacgauggacccacagg

SEQ ID NO: 198503 - RNA, 18 nt, Human
ggccgggccgggagcgag

SEQ ID NO: 198504 - RNA, 19 nt, Human
ggccuccgcgccgggcugg

SEQ ID NO: 198505 - RNA, 21 nt, Human
ggcugagggcagcugccccgg

SEQ ID NO: 198506 - RNA, 21 nt, Human
gggcugggccgggccgggagc

SEQ ID NO: 198507 - RNA, 19 nt, Human
gggcuuggcugagggcagc

SEQ ID NO: 198508 - RNA, 24 nt, Human
gggggguggccguggcgccggggg

SEQ ID NO: 198509 - RNA, 24 nt, Human
ggguagcacaccguccgggccggc

SEQ ID NO: 198510 - RNA, 20 nt, Human
ggguggccauggccgaccgc

SEQ ID NO: 198511 - RNA, 22 nt, Human
gucucugcauggcccccuguuc

SEQ ID NO: 198512 - RNA, 21 nt, Human
guugggggcagucugugggga

SEQ ID NO: 198513 - RNA, 18 nt, Human
uccaccagcacccgcgag

SEQ ID NO: 198514 - RNA, 22 nt, Human
uccaccagcacccgcgagaggg

SEQ ID NO: 198515 - RNA, 21 nt, Human
ucgguccgcuggggauggugg

SEQ ID NO: 198516 - RNA, 24 nt, Human
ucgguccgcuggggauggugggcc

SEQ ID NO: 198517 - RNA, 18 nt, Human
ucucgggcucggccgggc

SEQ ID NO: 198518 - RNA, 21 nt, Human
ucugggucccaggaaagggac

SEQ ID NO: 198519 - RNA, 19 nt, Human
ugagggcagcugccccggg

SEQ ID NO: 198520 - RNA, 22 nt, Human
ugcgcugggcuuggcugagggc

SEQ ID NO: 198521 - RNA, 23 nt, Human
ugggcuuggcugagggcagcugc

SEQ ID NO: 198522 - RNA, 27 nt, Human
uguugcgcugggcuuggcugagggcag

SEQ ID NO: 198523 - RNA, 25 nt, Human
uugcgcugggcuuggcugagggcag

SEQ ID NO: 198524 - RNA, 20 nt, Human
aaaaaaaauucuuuaaaugg

SEQ ID NO: 198525 - RNA, 23 nt, Human
aacauugagaaagcaaagagaaa

SEQ ID NO: 198526 - RNA, 18 nt, Human
aacuuaucucuccuccaa

SEQ ID NO: 198527 - RNA, 23 nt, Human
aagaagcagaguucuugagggca

SEQ ID NO: 198528 - RNA, 24 nt, Human
aaguccauacacaauauacauguu

SEQ ID NO: 198529 - RNA, 25 nt, Human
acuuuuaagagccucuaguguauac

SEQ ID NO: 198530 - RNA, 26 nt, Human
agaaauaauaaugaaacccgucuggc

SEQ ID NO: 198531 - RNA, 21 nt, Human
agagaggggggcaaggaagga

SEQ ID NO: 198532 - RNA, 21 nt, Human
agagggaagaaagagaggggg

SEQ ID NO: 198533 - RNA, 24 nt, Human
auuacaaucacauugauaaaaauu

SEQ ID NO: 198534 - RNA, 21 nt, Human
caaagcaagaagcagaguucu

SEQ ID NO: 198535 - RNA, 24 nt, Human
caauaaauuaacauugagaaagca

SEQ ID NO: 198536 - RNA, 21 nt, Human
cacacgauggcaaugauuaaa

SEQ ID NO: 198537 - RNA, 18 nt, Human
cacccugcccaauacaac

SEQ ID NO: 198538 - RNA, 22 nt, Human
cagaaauguaaacugagaagca

SEQ ID NO: 198539 - RNA, 23 nt, Human
cagcucccuauaacuuaucucuc

SEQ ID NO: 198540 - RNA, 25 nt, Human
cagcuguaaagaaaaagaauaaacc

SEQ ID NO: 198541 - RNA, 29 nt, Human
cauggcacucugcaaagcaagaagcagag

SEQ ID NO: 198542 - RNA, 21 nt, Human
ccugaggaauugauucccagg

SEQ ID NO: 198543 - RNA, 19 nt, Human
ccuggagccacccugccca

SEQ ID NO: 198544 - RNA, 25 nt, Human
ccuuuuuuguuuuuuuaaauaaccc

SEQ ID NO: 198545 - RNA, 19 nt, Human
cuaucugcauguaucagaa

SEQ ID NO: 198546 - RNA, 19 nt, Human
cucagaaugacaugaccau

SEQ ID NO: 198547 - RNA, 19 nt, Human
cuggaugaaacaagcacac

SEQ ID NO: 198548 - RNA, 20 nt, Human
gaaacaagcacacgauggca

SEQ ID NO: 198549 - RNA, 20 nt, Human
gagggaagaaagagaggggg

SEQ ID NO: 198550 - RNA, 18 nt, Human
gaguucuugagggcaauu

SEQ ID NO: 198551 - RNA, 19 nt, Human
gcaaagcaagaagcagagu

SEQ ID NO: 198552 - RNA, 19 nt, Human
gcaagaagcagaguucuug

SEQ ID NO: 198553 - RNA, 22 nt, Human
gcauaauuaaguccauacacaa

SEQ ID NO: 198554 - RNA, 20 nt, Human
ggaaaaagcacaaacaaaua

SEQ ID NO: 198555 - RNA, 19 nt, Human
ggaaggaggagaauuucau

SEQ ID NO: 198556 - RNA, 28 nt, Human
ggaggggaaagagggaagaaagagaggg

SEQ ID NO: 198557 - RNA, 19 nt, Human
gggaaaaagcacaaacaaa

SEQ ID NO: 198558 - RNA, 19 nt, Human
ggguagagaggacaaaggg

SEQ ID NO: 198559 - RNA, 19 nt, Human
gguagagaggacaaagggg

SEQ ID NO: 198560 - RNA, 18 nt, Human
gucagguaaggaggggga

SEQ ID NO: 198561 - RNA, 20 nt, Human
uaaacuucgcaggaaaaaaa

SEQ ID NO: 198562 - RNA, 25 nt, Human
uaaauaacccuccacaaacuagaau

SEQ ID NO: 198563 - RNA, 21 nt, Human
uagagaggacaaagggguugg

SEQ ID NO: 198564 - RNA, 21 nt, Human
uaggauuuuugaaucuuggag

SEQ ID NO: 198565 - RNA, 25 nt, Human
uauacuuguuucuucaccauuucaa

SEQ ID NO: 198566 - RNA, 21 nt, Human
uaugccagacaaaccccccag

SEQ ID NO: 198567 - RNA, 24 nt, Human
uaugccagacaaaccccccagucc

SEQ ID NO: 198568 - RNA, 21 nt, Human
uauugccacagaccuguaaac

SEQ ID NO: 198569 - RNA, 19 nt, Human
ucaagaacauuuuccacgg

SEQ ID NO: 198570 - RNA, 23 nt, Human
ucauuuaaagcaauuucagcugu

SEQ ID NO: 198571 - RNA, 27 nt, Human
uccacaaacuagaaugucuggagggga

SEQ ID NO: 198572 - RNA, 22 nt, Human
ucccuauaacuuaucucuccuc

SEQ ID NO: 198573 - RNA, 19 nt, Human
ucugcaaagcaagaagcag

SEQ ID NO: 198574 - RNA, 24 nt, Human
ucugcuaucugcauguaucagaaa

SEQ ID NO: 198575 - RNA, 22 nt, Human
ucuuaugguuaagaguauugcc

SEQ ID NO: 198576 - RNA, 18 nt, Human
ugaccaucuuccuuuuuu

SEQ ID NO: 198577 - RNA, 24 nt, Human
ugaccauggcacucugcaaagcaa

SEQ ID NO: 198578 - RNA, 22 nt, Human
ugaccucagaaugacaugacca

SEQ ID NO: 198579 - RNA, 18 nt, Human
ugagaaagcaaagagaaa

SEQ ID NO: 198580 - RNA, 20 nt, Human
ugagaaagcaaagagaaaua

SEQ ID NO: 198581 - RNA, 20 nt, Human
ugagaagcaaauggcucuga

SEQ ID NO: 198582 - RNA, 21 nt, Human
ugaggaauugauucccagggc

SEQ ID NO: 198583 - RNA, 23 nt, Human
ugccagacaaaccccccaguccc

SEQ ID NO: 198584 - RNA, 19 nt, Human
ugcgaagcgacgggcggcc

SEQ ID NO: 198585 - RNA, 22 nt, Human
ugcgaagcgacgggcggccgcg

SEQ ID NO: 198586 - RNA, 18 nt, Human
uggagccacccugcccaa

SEQ ID NO: 198587 - RNA, 22 nt, Human
uggcuauacuaacaccaugucc

SEQ ID NO: 198588 - RNA, 23 nt, Human
ugggauuuuauuaugcuguugac

SEQ ID NO: 198589 - RNA, 24 nt, Human
uguaauuuuaaccaucauuuaaag

SEQ ID NO: 198590 - RNA, 23 nt, Human
uguauaucaccuaucuauuaccu

SEQ ID NO: 198591 - RNA, 27 nt, Human
uguaucagaaauguaaacugagaagca

SEQ ID NO: 198592 - RNA, 26 nt, Human
ugucuacacaucugagcaugugcaua

SEQ ID NO: 198593 - RNA, 22 nt, Human
ugugcauaauuaaguccauaca

SEQ ID NO: 198594 - RNA, 24 nt, Human
uuaacauugagaaagcaaagagaa

SEQ ID NO: 198595 - RNA, 21 nt, Human
uucagcuguaaagaaaaagaa

SEQ ID NO: 198596 - RNA, 19 nt, Human
uucgcaggaaaaaaauugg

SEQ ID NO: 198597 - RNA, 19 nt, Human
uugauuuuuucucucuugc

SEQ ID NO: 198598 - RNA, 22 nt, Human
uugugcaugaaaaaugaaauaa

SEQ ID NO: 198599 - RNA, 21 nt, Human
uuuauaaucuguuuaugucuu

SEQ ID NO: 198600 - RNA, 18 nt, Human
aaagucucgacccccacu

SEQ ID NO: 198601 - RNA, 24 nt, Human
agcugcagcgggugaaggaagacu

SEQ ID NO: 198602 - RNA, 21 nt, Human
aggagaacaacaacaacaaaa

SEQ ID NO: 198603 - RNA, 18 nt, Human
aguuagccgggccugaag

SEQ ID NO: 198604 - RNA, 19 nt, Human
caacaacagcaauggagga

SEQ ID NO: 198605 - RNA, 23 nt, Human
caacaccgucuccccaaagucuc

SEQ ID NO: 198606 - RNA, 22 nt, Human
cccaaagucucgacccccacuu

SEQ ID NO: 198607 - RNA, 23 nt, Human
ccgucuccccaaagucucgaccc

SEQ ID NO: 198608 - RNA, 18 nt, Human
cucccuugcgucucugca

SEQ ID NO: 198609 - RNA, 24 nt, Human
cuguuaaaacuacaugguuuuaca

SEQ ID NO: 198610 - RNA, 22 nt, Human
cuugcgucucugcaacaccguc

SEQ ID NO: 198611 - RNA, 18 nt, Human
cuuucccguuuuccuccu

SEQ ID NO: 198612 - RNA, 26 nt, Human
gaacaacaacaacaaaaaaaucagaa

SEQ ID NO: 198613 - RNA, 23 nt, Human
gacuucccugcaacaacagcaau

SEQ ID NO: 198614 - RNA, 19 nt, Human
ggagaacaacaacaacaaa

SEQ ID NO: 198615 - RNA, 22 nt, Human
gggacggaacagcugcagcggg

SEQ ID NO: 198616 - RNA, 20 nt, Human
gggguguuggggugggggug

SEQ ID NO: 198617 - RNA, 23 nt, Human
uaaaacuacaugguuuuacaccg

SEQ ID NO: 198618 - RNA, 24 nt, Human
uacaugguuuuacaccgagucacu

SEQ ID NO: 198619 - RNA, 27 nt, Human
ucacaaaaguuuuuuuuuuuuuuuaag

SEQ ID NO: 198620 - RNA, 18 nt, Human
uccccaaagucucgaccc

SEQ ID NO: 198621 - RNA, 23 nt, Human
uccccaaagucucgacccccacu

SEQ ID NO: 198622 - RNA, 25 nt, Human
ucccugcaacaacagcaauggagga

SEQ ID NO: 198623 - RNA, 19 nt, Human
uccucgauccggggugcca

SEQ ID NO: 198624 - RNA, 20 nt, Human
ucugcaacaccgucucccca

SEQ ID NO: 198625 - RNA, 21 nt, Human
ucuguuaaaacuacaugguuu

SEQ ID NO: 198626 - RNA, 19 nt, Human
ugaagaagcaggagucuac

SEQ ID NO: 198627 - RNA, 19 nt, Human
ugcaacaacagcaauggag

SEQ ID NO: 198628 - RNA, 24 nt, Human
uggaagccgagugcauggcaguuu

SEQ ID NO: 198629 - RNA, 22 nt, Human
uggggguguuggggugggggug

SEQ ID NO: 198630 - RNA, 21 nt, Human
ugguucuguuaaaacuacaug

SEQ ID NO: 198631 - RNA, 19 nt, Human
ugucuuggggguguugggg

SEQ ID NO: 198632 - RNA, 25 nt, Human
uuauggauuucuucucccuugcguc

SEQ ID NO: 198633 - RNA, 18 nt, Human
uugcucucucacuuaucc

SEQ ID NO: 198634 - RNA, 18 nt, Human
uuuuuuuuuuuuuucuug

SEQ ID NO: 198635 - RNA, 21 nt, Human
uuuuuuuuuuuuuucuugguc

SEQ ID NO: 198636 - RNA, 19 nt, Human
aaagcacccaaugggccaa

SEQ ID NO: 198637 - RNA, 20 nt, Human
aaauuccccacacccuaacc

SEQ ID NO: 198638 - RNA, 22 nt, Human
aagcacccaaugggccaaaaaa

SEQ ID NO: 198639 - RNA, 25 nt, Human
acagcaccuaauggggggggccaaa

SEQ ID NO: 198640 - RNA, 22 nt, Human
accaaaaaagaagugggcacag

SEQ ID NO: 198641 - RNA, 24 nt, Human
accuccauccccuacccaacccau

SEQ ID NO: 198642 - RNA, 18 nt, Human
agaguugggggaaagggu

SEQ ID NO: 198643 - RNA, 20 nt, Human
agcaguccucacaguaccca

SEQ ID NO: 198644 - RNA, 24 nt, Human
agcuucguggugugagcuccagcc

SEQ ID NO: 198645 - RNA, 23 nt, Human
aucacacccaaagggccaaccgg

SEQ ID NO: 198646 - RNA, 24 nt, Human
aucacaguaccccguggaucaaca

SEQ ID NO: 198647 - RNA, 20 nt, Human
auccaucaauguagcagucc

SEQ ID NO: 198648 - RNA, 24 nt, Human
auguagcaguccucacaguaccca

SEQ ID NO: 198649 - RNA, 18 nt, Human
caaaaaagaagugggcac

SEQ ID NO: 198650 - RNA, 20 nt, Human
caaaaaagguguuacacagg

SEQ ID NO: 198651 - RNA, 23 nt, Human
caaagcacccaaugggccaaaaa

SEQ ID NO: 198652 - RNA, 22 nt, Human
caaagggccaaccgagauggug

SEQ ID NO: 198653 - RNA, 24 nt, Human
cacacccaaagggccaaccgagau

SEQ ID NO: 198654 - RNA, 18 nt, Human
cacaguacccagugggcc

SEQ ID NO: 198655 - RNA, 19 nt, Human
cacccccgcccucgcccgc

SEQ ID NO: 198656 - RNA, 21 nt, Human
cacccgcccccgcuccggccc

SEQ ID NO: 198657 - RNA, 21 nt, Human
cagaguugggggaaagggugg

SEQ ID NO: 198658 - RNA, 19 nt, Human
cagccaguaccccgcuucc

SEQ ID NO: 198659 - RNA, 19 nt, Human
caguaccccgcuucccggg

SEQ ID NO: 198660 - RNA, 20 nt, Human
ccaaaaaagguguuacacag

SEQ ID NO: 198661 - RNA, 26 nt, Human
ccauacccaccaccauguucccaacc

SEQ ID NO: 198662 - RNA, 25 nt, Human
cccccacccgcccccgcuccggccc

SEQ ID NO: 198663 - RNA, 27 nt, Human
cccgcccccgcuccggccccgggggaa

SEQ ID NO: 198664 - RNA, 21 nt, Human
ccuccauccccuacccaaccc

SEQ ID NO: 198665 - RNA, 20 nt, Human
ccucgcccgccccgggcucc

SEQ ID NO: 198666 - RNA, 20 nt, Human
cgacauggccaacacggggc

SEQ ID NO: 198667 - RNA, 20 nt, Human
cgcccgggguacggcugucc

SEQ ID NO: 198668 - RNA, 20 nt, Human
cucacaguacccagugggcc

SEQ ID NO: 198669 - RNA, 22 nt, Human
cuccagccauacccaccaccau

SEQ ID NO: 198670 - RNA, 20 nt, Human
gaaagaaucagacuucagua

SEQ ID NO: 198671 - RNA, 26 nt, Human
gaaauuccccacacccuaaccagccu

SEQ ID NO: 198672 - RNA, 18 nt, Human
gcccgcccguccgaccgc

SEQ ID NO: 198673 - RNA, 19 nt, Human
gcuccagccauacccacca

SEQ ID NO: 198674 - RNA, 21 nt, Human
ggccccaagagcuucguggug

SEQ ID NO: 198675 - RNA, 23 nt, Human
ggggaaagggugggcuucagaga

SEQ ID NO: 198676 - RNA, 19 nt, Human
uaaguaauagacccaccca

SEQ ID NO: 198677 - RNA, 25 nt, Human
uaaguaauagacccacccccugaag

SEQ ID NO: 198678 - RNA, 18 nt, Human
uaauagacccacccagau

SEQ ID NO: 198679 - RNA, 24 nt, Human
uacccaccaccauguucccaaccc

SEQ ID NO: 198680 - RNA, 25 nt, Human
uagaaauuccccacacccuaaccag

SEQ ID NO: 198681 - RNA, 21 nt, Human
uauagccgggacacccccgcc

SEQ ID NO: 198682 - RNA, 23 nt, Human
uaucacaguaccccguggaucaa

SEQ ID NO: 198683 - RNA, 22 nt, Human
ucacaguaaguaauagacccac

SEQ ID NO: 198684 - RNA, 22 nt, Human
uccccacacccuaaccagccuu

SEQ ID NO: 198685 - RNA, 20 nt, Human
ucccgggaaagaaucagacu

SEQ ID NO: 198686 - RNA, 21 nt, Human
uggaucaacaccaugcccacu

SEQ ID NO: 198687 - RNA, 27 nt, Human
uggaucaacaccaugcccacugagaca

SEQ ID NO: 198688 - RNA, 20 nt, Human
uggccaacacggggcugcag

SEQ ID NO: 198689 - RNA, 21 nt, Human
ugggacaagugaagugucacc

SEQ ID NO: 198690 - RNA, 21 nt, Human
uggggggggccaaagaagaug

SEQ ID NO: 198691 - RNA, 20 nt, Human
ugguuucuccuggaccagag

SEQ ID NO: 198692 - RNA, 22 nt, Human
uguauccauggugguuaucaca

SEQ ID NO: 198693 - RNA, 18 nt, Human
aagacgggauggcugagc

SEQ ID NO: 198694 - RNA, 21 nt, Human
aaggcccccgcccuccgcccu

SEQ ID NO: 198695 - RNA, 19 nt, Human
acaugagaaaguuguccaa

SEQ ID NO: 198696 - RNA, 23 nt, Human
accacagccuucuagacccugcc

SEQ ID NO: 198697 - RNA, 20 nt, Human
accccgaaggcccccgcccu

SEQ ID NO: 198698 - RNA, 21 nt, Human
accccgaaggcccccgcccuc

SEQ ID NO: 198699 - RNA, 24 nt, Human
agaggugggggcagcagcagaagg

SEQ ID NO: 198700 - RNA, 20 nt, Human
aggcaguggcuucaacauga

SEQ ID NO: 198701 - RNA, 21 nt, Human
agggaagaagggagcuggguu

SEQ ID NO: 198702 - RNA, 20 nt, Human
agggaggcagcagagguggg

SEQ ID NO: 198703 - RNA, 21 nt, Human
aggugggggcagcagcagaag

SEQ ID NO: 198704 - RNA, 22 nt, Human
aguggcuucaacaugagaaagu

SEQ ID NO: 198705 - RNA, 18 nt, Human
cagaggugggggcagcag

SEQ ID NO: 198706 - RNA, 19 nt, Human
cagccuucuagacccugcc

SEQ ID NO: 198707 - RNA, 18 nt, Human
caguggagcccccaagcc

SEQ ID NO: 198708 - RNA, 18 nt, Human
ccacgugaucaccaggug

SEQ ID NO: 198709 - RNA, 19 nt, Human
ccacugccuccucccagug

SEQ ID NO: 198710 - RNA, 23 nt, Human
ccccaagugccacaauuggaccc

SEQ ID NO: 198711 - RNA, 18 nt, Human
ccccgaaggcccccgccc

SEQ ID NO: 198712 - RNA, 24 nt, Human
ccccgaaggcccccgcccuccgcc

SEQ ID NO: 198713 - RNA, 18 nt, Human
ccccgcccuccgcccucc

SEQ ID NO: 198714 - RNA, 19 nt, Human
cccuacccugggcgcccac

SEQ ID NO: 198715 - RNA, 22 nt, Human
cccugccuccacgccgcggcca

SEQ ID NO: 198716 - RNA, 19 nt, Human
cccugggcgcccaccccga

SEQ ID NO: 198717 - RNA, 25 nt, Human
cccugggcgcccaccccgaaggccc

SEQ ID NO: 198718 - RNA, 22 nt, Human
ccuccacgccgcggccaccugc

SEQ ID NO: 198719 - RNA, 19 nt, Human
ccucccacugccuccuccc

SEQ ID NO: 198720 - RNA, 25 nt, Human
ccucccacugccuccucccagugcc

SEQ ID NO: 198721 - RNA, 22 nt, Human
ccuccuuggccucuguagaggu

SEQ ID NO: 198722 - RNA, 24 nt, Human
ccuuaggccauguucucgggcccu

SEQ ID NO: 198723 - RNA, 19 nt, Human
cgaaggcccccgcccuccg

SEQ ID NO: 198724 - RNA, 19 nt, Human
cgcccuccgcccucccacu

SEQ ID NO: 198725 - RNA, 18 nt, Human
cgggauggcugagcaagg

SEQ ID NO: 198726 - RNA, 28 nt, Human
cgucagggugcagugggauggcaggggc

SEQ ID NO: 198727 - RNA, 18 nt, Human
cucaccacagccuucuag

SEQ ID NO: 198728 - RNA, 24 nt, Human
cuccacgccgcggccaccugcccc

SEQ ID NO: 198729 - RNA, 24 nt, Human
cuucccucaccacagccuucuaga

SEQ ID NO: 198730 - RNA, 22 nt, Human
cuucuagacccugccuggugcc

SEQ ID NO: 198731 - RNA, 21 nt, Human
gaaggcccccgcccuccgccc

SEQ ID NO: 198732 - RNA, 25 nt, Human
gacugguccuggcaucacgucuucc

SEQ ID NO: 198733 - RNA, 22 nt, Human
gaggcagcagaggugggggcag

SEQ ID NO: 198734 - RNA, 22 nt, Human
gcccccaagccccagcggcuug

SEQ ID NO: 198735 - RNA, 18 nt, Human
gcuggggggagccagugg

SEQ ID NO: 198736 - RNA, 24 nt, Human
ggcuagggaagaagggagcugggu

SEQ ID NO: 198737 - RNA, 24 nt, Human
ggcuggggggagccaguggagccc

SEQ ID NO: 198738 - RNA, 20 nt, Human
ggcuggggggagccaguggg

SEQ ID NO: 198739 - RNA, 20 nt, Human
gggaagaagggagcuggguu

SEQ ID NO: 198740 - RNA, 24 nt, Human
gggaggcagcagaggugggggcag

SEQ ID NO: 198741 - RNA, 20 nt, Human
ggggcuggggggagccagug

SEQ ID NO: 198742 - RNA, 21 nt, Human
guccuuugggaugaagucggg

SEQ ID NO: 198743 - RNA, 25 nt, Human
uacccugggcgcccaccccgaaggc

SEQ ID NO: 198744 - RNA, 26 nt, Human
uagagggucuccccaagucaaagucu

SEQ ID NO: 198745 - RNA, 18 nt, Human
uagggaagaagggagcug

SEQ ID NO: 198746 - RNA, 24 nt, Human
ucagagcagggcgucagggugcag

SEQ ID NO: 198747 - RNA, 19 nt, Human
uccccaagucaaagucuug

SEQ ID NO: 198748 - RNA, 18 nt, Human
ucuuguuaucagagcagg

SEQ ID NO: 198749 - RNA, 23 nt, Human
ugaagucggggguuggacaugga

SEQ ID NO: 198750 - RNA, 24 nt, Human
ugacagcagagggaggcagcagag

SEQ ID NO: 198751 - RNA, 23 nt, Human
uggaugaaggugaaggugaaggc

SEQ ID NO: 198752 - RNA, 18 nt, Human
uggcaucacgucuuccuu

SEQ ID NO: 198753 - RNA, 21 nt, Human
uggcugagcaaggugacagca

SEQ ID NO: 198754 - RNA, 22 nt, Human
ugggaugugccuuaggccaugu

SEQ ID NO: 198755 - RNA, 18 nt, Human
ugggggcagcagcagaag

SEQ ID NO: 198756 - RNA, 22 nt, Human
ugggggcagcagcagaaggagg

SEQ ID NO: 198757 - RNA, 20 nt, Human
ugggggcagcagcagaaggg

SEQ ID NO: 198758 - RNA, 19 nt, Human
uggguuggaggagaaaggc

SEQ ID NO: 198759 - RNA, 25 nt, Human
acuggcugcuuucgcuggugcuccu

SEQ ID NO: 198760 - RNA, 21 nt, Human
auaaacauccuucaaacucag

SEQ ID NO: 198761 - RNA, 18 nt, Human
caauaacaaauagaauga

SEQ ID NO: 198762 - RNA, 18 nt, Human
cauaguagcaauaacaaa

SEQ ID NO: 198763 - RNA, 18 nt, Human
ccuccagcgcaggcuggg

SEQ ID NO: 198764 - RNA, 20 nt, Human
ccuccagcgccuucuucccg

SEQ ID NO: 198765 - RNA, 23 nt, Human
ccugaggcucagccccuccuuca

SEQ ID NO: 198766 - RNA, 23 nt, Human
ccuuggcuaagaguuugccaaaa

SEQ ID NO: 198767 - RNA, 21 nt, Human
cgcuggugcuccuccagcgcc

SEQ ID NO: 198768 - RNA, 21 nt, Human
cguauaaacaagaaaauagga

SEQ ID NO: 198769 - RNA, 18 nt, Human
cuccagcgcaggcugggc

SEQ ID NO: 198770 - RNA, 19 nt, Human
cuggggcagaacuauaagg

SEQ ID NO: 198771 - RNA, 20 nt, Human
cuggggcagaacuauaaggc

SEQ ID NO: 198772 - RNA, 24 nt, Human
cuuggcuaagaguuugccaaaagu

SEQ ID NO: 198773 - RNA, 22 nt, Human
gcaccaaugaagaagccuuggc

SEQ ID NO: 198774 - RNA, 24 nt, Human
ggccuggccuagggguccugaggc

SEQ ID NO: 198775 - RNA, 18 nt, Human
ggugcuccuccagcgccu

SEQ ID NO: 198776 - RNA, 21 nt, Human
uaacagcaccaaugaagaagc

SEQ ID NO: 198777 - RNA, 22 nt, Human
uaacagcaccaaugaagaagcc

SEQ ID NO: 198778 - RNA, 21 nt, Human
uaguagcaauaacaaauagaa

SEQ ID NO: 198779 - RNA, 24 nt, Human
uauaaacaagaaaauaggauacca

SEQ ID NO: 198780 - RNA, 22 nt, Human
uauaacagcaccaaugaagaag

SEQ ID NO: 198781 - RNA, 19 nt, Human
uaucugcuuucaacacggc

SEQ ID NO: 198782 - RNA, 19 nt, Human
ucccuccagcgcaggcugg

SEQ ID NO: 198783 - RNA, 18 nt, Human
ugaaaguuucacauagua

SEQ ID NO: 198784 - RNA, 22 nt, Human
ugaagaagccuuggcuaagagu

SEQ ID NO: 198785 - RNA, 22 nt, Human
uggcuaagaguuugccaaaagu

SEQ ID NO: 198786 - RNA, 20 nt, Human
uggcugcuuucgcuggugcu

SEQ ID NO: 198787 - RNA, 26 nt, Human
uggggcagaacuauaaggcugugggg

SEQ ID NO: 198788 - RNA, 21 nt, Human
uucacauaguagcaauaacaa

SEQ ID NO: 198789 - RNA, 18 nt, Human
uucgcuggugcuccucca

SEQ ID NO: 198790 - RNA, 20 nt, Human
uuucacauaguagcaauaac

SEQ ID NO: 198791 - RNA, 22 nt, Human
aaaaaaaaaaaaaaaugcuaag

SEQ ID NO: 198792 - RNA, 19 nt, Human
aaacagugcuuuaucuaca

SEQ ID NO: 198793 - RNA, 21 nt, Human
aagcacaauagaagaacguac

SEQ ID NO: 198794 - RNA, 18 nt, Human
acaauagaagaacguaca

SEQ ID NO: 198795 - RNA, 23 nt, Human
agaaagacagagcaggaagcaag

SEQ ID NO: 198796 - RNA, 22 nt, Human
agauagaaagcacaauagaaga

SEQ ID NO: 198797 - RNA, 18 nt, Human
aggauaagaccagcagua

SEQ ID NO: 198798 - RNA, 24 nt, Human
cagcaguaucccauaugauuccaa

SEQ ID NO: 198799 - RNA, 22 nt, Human
caguucccucuuucuuucccca

SEQ ID NO: 198800 - RNA, 24 nt, Human
cccacccccaccaguuucuaucca

SEQ ID NO: 198801 - RNA, 21 nt, Human
ccccacccccaccacccgagg

SEQ ID NO: 198802 - RNA, 24 nt, Human
cccccaccaguuucuauccaaaaa

SEQ ID NO: 198803 - RNA, 18 nt, Human
ccccuccuucucuuccca

SEQ ID NO: 198804 - RNA, 23 nt, Human
ccccuccuucucuucccaguucc

SEQ ID NO: 198805 - RNA, 23 nt, Human
cuauccaaaaaaaaaaaaaaaug

SEQ ID NO: 198806 - RNA, 21 nt, Human
cugcauguggucucucuaccu

SEQ ID NO: 198807 - RNA, 25 nt, Human
cuuuccccacccccaccaguuucua

SEQ ID NO: 198808 - RNA, 23 nt, Human
cuuugcacugauacuuuaacccc

SEQ ID NO: 198809 - RNA, 19 nt, Human
gagaaagacagagcaggaa

SEQ ID NO: 198810 - RNA, 20 nt, Human
uaacaugccacaaaggcugg

SEQ ID NO: 198811 - RNA, 18 nt, Human
uaagaccagcaguauccc

SEQ ID NO: 198812 - RNA, 18 nt, Human
uaccuggaggagggacag

SEQ ID NO: 198813 - RNA, 24 nt, Human
ucccauaugauuccaaauggaagu

SEQ ID NO: 198814 - RNA, 24 nt, Human
ucccucuuucuuuccccaccccca

SEQ ID NO: 198815 - RNA, 22 nt, Human
ucuauccaaaaaaaaaaaaaaa

SEQ ID NO: 198816 - RNA, 18 nt, Human
ucugagaaagacagagca

SEQ ID NO: 198817 - RNA, 18 nt, Human
ugagaaagacagagcagg

SEQ ID NO: 198818 - RNA, 25 nt, Human
ugagaaagacagagcaggaagcugg

SEQ ID NO: 198819 - RNA, 19 nt, Human
uguaagaaauagaaguauu

SEQ ID NO: 198820 - RNA, 26 nt, Human
uucacaaaacggccaaaucaguaaca

SEQ ID NO: 198821 - RNA, 20 nt, Human
uucccaguucccucuuucuu

SEQ ID NO: 198822 - RNA, 21 nt, Human
uugaacgggacuuugcacuga

SEQ ID NO: 198823 - RNA, 19 nt, Human
uugagccugcauguggucu

SEQ ID NO: 198824 - RNA, 21 nt, Human
aacccuuuguuggaaugcuuu

SEQ ID NO: 198825 - RNA, 22 nt, Human
aacccuuuguuggaaugcuuuc

SEQ ID NO: 198826 - RNA, 19 nt, Human
aagagagacuuuaacgaug

SEQ ID NO: 198827 - RNA, 20 nt, Human
accaagguuuccgaagacaa

SEQ ID NO: 198828 - RNA, 25 nt, Human
agcuucauucccaucuauaauuuua

SEQ ID NO: 198829 - RNA, 23 nt, Human
auagaaccuggcaucacccugaa

SEQ ID NO: 198830 - RNA, 22 nt, Human
aucugccagccuaccuucgccc

SEQ ID NO: 198831 - RNA, 20 nt, Human
auggggugcaaaaaaaaaaa

SEQ ID NO: 198832 - RNA, 26 nt, Human
auuuugcuuggguaaucccuuuuaau

SEQ ID NO: 198833 - RNA, 19 nt, Human
caacagcauggggugcaaa

SEQ ID NO: 198834 - RNA, 23 nt, Human
caacuacaccaagguuuccgaag

SEQ ID NO: 198835 - RNA, 28 nt, Human
caacuacaccaagguuuccgaagacaau

SEQ ID NO: 198836 - RNA, 21 nt, Human
caauggcuucuccacccaagc

SEQ ID NO: 198837 - RNA, 24 nt, Human
cagcauggggugcaaaaaaaaaaa

SEQ ID NO: 198838 - RNA, 19 nt, Human
cagccuaccuucgcccucu

SEQ ID NO: 198839 - RNA, 21 nt, Human
cagggugaagagagacuuuaa

SEQ ID NO: 198840 - RNA, 20 nt, Human
ccugcuaagcuuuguuuccu

SEQ ID NO: 198841 - RNA, 18 nt, Human
cugcuaagcuuuguuucc

SEQ ID NO: 198842 - RNA, 21 nt, Human
cuuuccacagaacagaaacua

SEQ ID NO: 198843 - RNA, 24 nt, Human
guuuuuugcccauacacaugaguc

SEQ ID NO: 198844 - RNA, 19 nt, Human
uacacaagcuucauuccca

SEQ ID NO: 198845 - RNA, 21 nt, Human
uacaccaagguuuccgaagac

SEQ ID NO: 198846 - RNA, 21 nt, Human
uccacgggcagaaaggagcaa

SEQ ID NO: 198847 - RNA, 25 nt, Human
uccgaagacaauggcuucuccaccc

SEQ ID NO: 198848 - RNA, 20 nt, Human
ucucuggcucuccucuccug

SEQ ID NO: 198849 - RNA, 19 nt, Human
uguuguaaccuguagcuuc

SEQ ID NO: 198850 - RNA, 18 nt, Human
aacacgaaccggacucgu

SEQ ID NO: 198851 - RNA, 25 nt, Human
acuuugagaaaaaucuuaaaaaagg

SEQ ID NO: 198852 - RNA, 19 nt, Human
auggcaaauaggaagaagc

SEQ ID NO: 198853 - RNA, 21 nt, Human
caccugaaacuuacaaauuua

SEQ ID NO: 198854 - RNA, 19 nt, Human
caucugcucuggugucuuc

SEQ ID NO: 198855 - RNA, 18 nt, Human
cauggcaaauaggaagaa

SEQ ID NO: 198856 - RNA, 19 nt, Human
cauuguuauuucgauaacc

SEQ ID NO: 198857 - RNA, 23 nt, Human
ccugaagcuguucuguuaccucu

SEQ ID NO: 198858 - RNA, 24 nt, Human
cgagaaacaacucugcgaggagca

SEQ ID NO: 198859 - RNA, 20 nt, Human
gagaaacaacucugcgagga

SEQ ID NO: 198860 - RNA, 22 nt, Human
gagaaacaacucugcgaggagc

SEQ ID NO: 198861 - RNA, 20 nt, Human
gagcaccuccgcacgggacc

SEQ ID NO: 198862 - RNA, 18 nt, Human
gcggacucagucgcuuca

SEQ ID NO: 198863 - RNA, 23 nt, Human
uaaaaagcuaagaaacugucuca

SEQ ID NO: 198864 - RNA, 27 nt, Human
uaacauuaucaaagaaggaaugcuucu

SEQ ID NO: 198865 - RNA, 23 nt, Human
uacaaagaccacuagaaagaaac

SEQ ID NO: 198866 - RNA, 24 nt, Human
uacacacgcacuuaaauuuuuuua

SEQ ID NO: 198867 - RNA, 19 nt, Human
uaucaaagaaggaaugcuu

SEQ ID NO: 198868 - RNA, 18 nt, Human
ucucugcaucugcucugg

SEQ ID NO: 198869 - RNA, 21 nt, Human
ucucugcaucugcucuggugu

SEQ ID NO: 198870 - RNA, 23 nt, Human
ugccgcugcucgagaaacaacuc

SEQ ID NO: 198871 - RNA, 19 nt, Human
uguagugagaacugccgcu

SEQ ID NO: 198872 - RNA, 22 nt, Human
uguucuguuaccucugggcucu

SEQ ID NO: 198873 - RNA, 23 nt, Human
uguucuguuaccucugggcucuc

SEQ ID NO: 198874 - RNA, 24 nt, Human
uguucuguuaccucugggcucuca

SEQ ID NO: 198875 - RNA, 18 nt, Human
uuacaaagaccacuagaa

SEQ ID NO: 198876 - RNA, 21 nt, Human
uuaccucugggcucucauccu

SEQ ID NO: 198877 - RNA, 21 nt, Human
uuuaacauuaucaaagaagga

SEQ ID NO: 198878 - RNA, 22 nt, Human
uuuuuuuuuuccuuuagaauua

SEQ ID NO: 198879 - RNA, 22 nt, Human
uuuuuuuuuuuuuuuuuccuuu

SEQ ID NO: 198880 - RNA, 26 nt, Human
uuuuuuuuuuuuuuuuuuuccuuuag

SEQ ID NO: 198881 - RNA, 24 nt, Human
aaaaaaccaguaagacacuacuac

SEQ ID NO: 198882 - RNA, 24 nt, Human
aaaaagcacaauacauauuaagca

SEQ ID NO: 198883 - RNA, 24 nt, Human
aaaaucucucugaacuagccgcau

SEQ ID NO: 198884 - RNA, 22 nt, Human
aaacaaccaacaaacaaauuga

SEQ ID NO: 198885 - RNA, 26 nt, Human
aagcaaauuucuuuuaaugagaacuc

SEQ ID NO: 198886 - RNA, 24 nt, Human
aagcauagcaauuaagaaauaaaa

SEQ ID NO: 198887 - RNA, 23 nt, Human
aaggauuuauuaaaaaaccagua

SEQ ID NO: 198888 - RNA, 18 nt, Human
acacucccgcucucuccc

SEQ ID NO: 198889 - RNA, 24 nt, Human
acacugggcuuuuaacacaagacu

SEQ ID NO: 198890 - RNA, 18 nt, Human
acagggaaggcgcgcgcg

SEQ ID NO: 198891 - RNA, 18 nt, Human
acagggaggacacauuau

SEQ ID NO: 198892 - RNA, 27 nt, Human
acugcaauuuuaaucauguccucaauu

SEQ ID NO: 198893 - RNA, 24 nt, Human
agcaaauuucuuuuaaugagaacu

SEQ ID NO: 198894 - RNA, 23 nt, Human
agcggcggccgcucucgccuccu

SEQ ID NO: 198895 - RNA, 22 nt, Human
aggagccaccuucaaaugaauc

SEQ ID NO: 198896 - RNA, 21 nt, Human
augaaucuucaaauuggaaaa

SEQ ID NO: 198897 - RNA, 24 nt, Human
auugacauuaagucauucccaauu

SEQ ID NO: 198898 - RNA, 20 nt, Human
caaaggcuccugcgccucuc

SEQ ID NO: 198899 - RNA, 26 nt, Human
caccacagcucuaaaaaucucucuga

SEQ ID NO: 198900 - RNA, 18 nt, Human
caccagcggcggccgcuc

SEQ ID NO: 198901 - RNA, 19 nt, Human
caccuguuggggauaaguu

SEQ ID NO: 198902 - RNA, 24 nt, Human
cacugggcuuuuaacacaagacuu

SEQ ID NO: 198903 - RNA, 24 nt, Human
cagcggcggccgcucucgccuccu

SEQ ID NO: 198904 - RNA, 27 nt, Human
ccagcggcggccgcucucgccuccucc

SEQ ID NO: 198905 - RNA, 18 nt, Human
ccauucagggacuugaua

SEQ ID NO: 198906 - RNA, 20 nt, Human
cccgcgcugccgcgcgcccg

SEQ ID NO: 198907 - RNA, 23 nt, Human
cccgcucuaccucgcgaagcaca

SEQ ID NO: 198908 - RNA, 26 nt, Human
ccgcugccgccgagacuacacccgcc

SEQ ID NO: 198909 - RNA, 19 nt, Human
ccugcgccucucccuggcc

SEQ ID NO: 198910 - RNA, 20 nt, Human
ccugcgccucucccuggccu

SEQ ID NO: 198911 - RNA, 23 nt, Human
cgaagcacacaagacagggaagg

SEQ ID NO: 198912 - RNA, 24 nt, Human
cuagcagcaaaguaauccccgcgc

SEQ ID NO: 198913 - RNA, 24 nt, Human
cugcaaaggcuccugcgccucucc

SEQ ID NO: 198914 - RNA, 26 nt, Human
cugcaauuuuaaucauguccucaauu

SEQ ID NO: 198915 - RNA, 22 nt, Human
gaaauaaaacaaugaaagcaaa

SEQ ID NO: 198916 - RNA, 18 nt, Human
gaaccgaaacuagcagca

SEQ ID NO: 198917 - RNA, 24 nt, Human
gaaccgaaacuagcagcaaaguaa

SEQ ID NO: 198918 - RNA, 22 nt, Human
gaagcacacaagacagggaagg

SEQ ID NO: 198919 - RNA, 19 nt, Human
gaugauaaaagagccaaua

SEQ ID NO: 198920 - RNA, 20 nt, Human
gcccccuucgccucccacuc

SEQ ID NO: 198921 - RNA, 22 nt, Human
gcgaagcacacaagacagggaa

SEQ ID NO: 198922 - RNA, 24 nt, Human
gcugcacuaaaaaagaauaagcac

SEQ ID NO: 198923 - RNA, 24 nt, Human
uaaaaaaccaguaagacacuacua

SEQ ID NO: 198924 - RNA, 19 nt, Human
uaaaacaaccaacaaacaa

SEQ ID NO: 198925 - RNA, 22 nt, Human
uaaaacaaccaacaaacaaauu

SEQ ID NO: 198926 - RNA, 24 nt, Human
uaagaaauaaaacaaugaaagcaa

SEQ ID NO: 198927 - RNA, 27 nt, Human
uaagacacuacuacaucaugacacugu

SEQ ID NO: 198928 - RNA, 19 nt, Human
uaccucgcgaagcacacaa

SEQ ID NO: 198929 - RNA, 23 nt, Human
uauccagauuuguucuaaaaagc

SEQ ID NO: 198930 - RNA, 18 nt, Human
ucccaauuuggacaggga

SEQ ID NO: 198931 - RNA, 19 nt, Human
ucccuggccugcccccuuc

SEQ ID NO: 198932 - RNA, 22 nt, Human
ucccuggccugcccccuucgcc

SEQ ID NO: 198933 - RNA, 18 nt, Human
uccugcgccucucccugg

SEQ ID NO: 198934 - RNA, 20 nt, Human
ugaaagcaaauuucuuuuaa

SEQ ID NO: 198935 - RNA, 20 nt, Human
ugauaaaagagccaauacau

SEQ ID NO: 198936 - RNA, 21 nt, Human
uggaaaauacugcuucaccac

SEQ ID NO: 198937 - RNA, 18 nt, Human
uggacagggaggacacau

SEQ ID NO: 198938 - RNA, 21 nt, Human
ugggaaaauauucauauaaau

SEQ ID NO: 198939 - RNA, 25 nt, Human
ugggcuuuuaacacaagacuugcuc

SEQ ID NO: 198940 - RNA, 24 nt, Human
ugucuccgccgcugccgccgagac

SEQ ID NO: 198941 - RNA, 22 nt, Human
uguucuaaaaagcacaauacau

SEQ ID NO: 198942 - RNA, 18 nt, Human
uuaauccucccucaacac

SEQ ID NO: 198943 - RNA, 25 nt, Human
uucaaacuucacugcaauuuuaauc

SEQ ID NO: 198944 - RNA, 25 nt, Human
uucaaaugaaucuucaaauuggaaa

SEQ ID NO: 198945 - RNA, 20 nt, Human
aaaaaagggagggcucaugg

SEQ ID NO: 198946 - RNA, 18 nt, Human
aaaaagaggccaagagca

SEQ ID NO: 198947 - RNA, 19 nt, Human
aaaacagcagcaaaaaaga

SEQ ID NO: 198948 - RNA, 21 nt, Human
aaagcuuauuauuauuccagg

SEQ ID NO: 198949 - RNA, 23 nt, Human
aaauacaccuacaaauuggagaa

SEQ ID NO: 198950 - RNA, 21 nt, Human
aagaaaacuaauuggcagcua

SEQ ID NO: 198951 - RNA, 19 nt, Human
aagaauagcaaaacagcag

SEQ ID NO: 198952 - RNA, 23 nt, Human
aagacuuuucucuaaacucacag

SEQ ID NO: 198953 - RNA, 23 nt, Human
aagagcauaaaauacaccuacaa

SEQ ID NO: 198954 - RNA, 20 nt, Human
aagagcauuauaaugugaua

SEQ ID NO: 198955 - RNA, 23 nt, Human
aagaggccaagagcauuauaaug

SEQ ID NO: 198956 - RNA, 20 nt, Human
aaucaucuuagaucaacaga

SEQ ID NO: 198957 - RNA, 26 nt, Human
acacaacuuaaaaaugaagggaacgc

SEQ ID NO: 198958 - RNA, 24 nt, Human
acagagcauuaacagcuaauacaa

SEQ ID NO: 198959 - RNA, 19 nt, Human
acagagcuauguaguaccu

SEQ ID NO: 198960 - RNA, 19 nt, Human
acagcagcaaaaaagaggc

SEQ ID NO: 198961 - RNA, 20 nt, Human
acaugaaaugauacaaauaa

SEQ ID NO: 198962 - RNA, 20 nt, Human
accaaaaagccgucaacccc

SEQ ID NO: 198963 - RNA, 24 nt, Human
accgacuagcaccgcggccagucu

SEQ ID NO: 198964 - RNA, 21 nt, Human
accgcaccuacugaccacaca

SEQ ID NO: 198965 - RNA, 23 nt, Human
agaagagaagaaucagaagagaa

SEQ ID NO: 198966 - RNA, 22 nt, Human
agaauagcaaaacagcagcaaa

SEQ ID NO: 198967 - RNA, 22 nt, Human
agauaaccagaagggaaagaac

SEQ ID NO: 198968 - RNA, 22 nt, Human
agcaaaacagcagcaaaaaaga

SEQ ID NO: 198969 - RNA, 24 nt, Human
aggacaaaguaaaaacaaagaaaa

SEQ ID NO: 198970 - RNA, 18 nt, Human
agggggcgcggcggggcc

SEQ ID NO: 198971 - RNA, 20 nt, Human
auucauuuuuuugaucaggg

SEQ ID NO: 198972 - RNA, 23 nt, Human
auuuauaaaggaccacaguuucu

SEQ ID NO: 198973 - RNA, 19 nt, Human
caaaaaagaggccaagagc

SEQ ID NO: 198974 - RNA, 25 nt, Human
caaaaagccgucaaccccgccuuuu

SEQ ID NO: 198975 - RNA, 24 nt, Human
caaaguaaaaacaaagaaaacuaa

SEQ ID NO: 198976 - RNA, 21 nt, Human
caacgugcgacccccagagau

SEQ ID NO: 198977 - RNA, 18 nt, Human
caagacuuuucucuaaac

SEQ ID NO: 198978 - RNA, 23 nt, Human
cacaauggugucuuguacacuag

SEQ ID NO: 198979 - RNA, 21 nt, Human
cacacaacuuaaaaaugaacu

SEQ ID NO: 198980 - RNA, 25 nt, Human
caccuaaucauaaauuugaacuuac

SEQ ID NO: 198981 - RNA, 19 nt, Human
cacuacccuagacaccgca

SEQ ID NO: 198982 - RNA, 18 nt, Human
cagagcuauguaguaccu

SEQ ID NO: 198983 - RNA, 19 nt, Human
cagcaaaaaagaggccaag

SEQ ID NO: 198984 - RNA, 21 nt, Human
cagcaaaaaagaggccaagag

SEQ ID NO: 198985 - RNA, 22 nt, Human
caggaugcccaaacagaaaaca

SEQ ID NO: 198986 - RNA, 21 nt, Human
cagggagaagaugaagccuua

SEQ ID NO: 198987 - RNA, 20 nt, Human
cagugcggagccgcugcggc

SEQ ID NO: 198988 - RNA, 22 nt, Human
ccaaaaagccgucaaccccgcc

SEQ ID NO: 198989 - RNA, 23 nt, Human
cccacuccuaccaaaaagccguc

SEQ ID NO: 198990 - RNA, 19 nt, Human
ccgacuagcaccgcggcca

SEQ ID NO: 198991 - RNA, 20 nt, Human
ccgcgcggccucuggcgggc

SEQ ID NO: 198992 - RNA, 19 nt, Human
ccuccgggcagcgcagcgc

SEQ ID NO: 198993 - RNA, 21 nt, Human
ccugcaaugaaguucccgcug

SEQ ID NO: 198994 - RNA, 23 nt, Human
ccuggggucagcaguuucggucc

SEQ ID NO: 198995 - RNA, 20 nt, Human
cgcgcgggccaagggggcgc

SEQ ID NO: 198996 - RNA, 19 nt, Human
cgcgggccaagggggcgcg

SEQ ID NO: 198997 - RNA, 23 nt, Human
cgcucgcccgccgcgcgcacgcg

SEQ ID NO: 198998 - RNA, 25 nt, Human
cgggccccgcgcggccucuggcggg

SEQ ID NO: 198999 - RNA, 18 nt, Human
cgggcugaucggccgaag

SEQ ID NO: 199000 - RNA, 23 nt, Human
cugugaacacguaugccaauccc

SEQ ID NO: 199001 - RNA, 18 nt, Human
cugugccuuaauuauugc

SEQ ID NO: 199002 - RNA, 23 nt, Human
cuuacaggauucacuacccuaga

SEQ ID NO: 199003 - RNA, 24 nt, Human
cuucagauaaccagaagggaaaga

SEQ ID NO: 199004 - RNA, 18 nt, Human
gacuagcaccgcggccag

SEQ ID NO: 199005 - RNA, 19 nt, Human
gagaagagaagaaucagaa

SEQ ID NO: 199006 - RNA, 26 nt, Human
gcaaaacagcagcaaaaaagaggcca

SEQ ID NO: 199007 - RNA, 21 nt, Human
gcagaaaagcaaucacauaag

SEQ ID NO: 199008 - RNA, 20 nt, Human
ggaaagaacauuguucaaag

SEQ ID NO: 199009 - RNA, 23 nt, Human
ggacaaaguaaaaacaaagaaaa

SEQ ID NO: 199010 - RNA, 18 nt, Human
ggagaagagggugacgcu

SEQ ID NO: 199011 - RNA, 18 nt, Human
ggaggaggggcgggggcu

SEQ ID NO: 199012 - RNA, 22 nt, Human
gggaaagaacauuguucaaagg

SEQ ID NO: 199013 - RNA, 18 nt, Human
uaaaaaaaaaaagggagg

SEQ ID NO: 199014 - RNA, 26 nt, Human
uaaaaaaaaaaagggagggcucaugg

SEQ ID NO: 199015 - RNA, 24 nt, Human
uaaaaacaaagaaaacuaauuggc

SEQ ID NO: 199016 - RNA, 24 nt, Human
uaaacucacagagcauuaacagcu

SEQ ID NO: 199017 - RNA, 23 nt, Human
uaaauuccuggggucagcaguuc

SEQ ID NO: 199018 - RNA, 18 nt, Human
uaagaaaguugcaggcac

SEQ ID NO: 199019 - RNA, 21 nt, Human
uaagaauagcaaaacagcagc

SEQ ID NO: 199020 - RNA, 22 nt, Human
uaauuuuucgaccaaacucaua

SEQ ID NO: 199021 - RNA, 21 nt, Human
uacaaaauaaucaucuuagau

SEQ ID NO: 199022 - RNA, 23 nt, Human
uacagugcuccuuuuguaucuga

SEQ ID NO: 199023 - RNA, 22 nt, Human
uaccaaaaagccgucaaccccg

SEQ ID NO: 199024 - RNA, 23 nt, Human
uagacaccgcaccuacugaccac

SEQ ID NO: 199025 - RNA, 23 nt, Human
uagcaaaacagcagcaaaaaaga

SEQ ID NO: 199026 - RNA, 24 nt, Human
uagcaaaggacaaaguaaaaacaa

SEQ ID NO: 199027 - RNA, 21 nt, Human
uaucugaacuuuuauacaaga

SEQ ID NO: 199028 - RNA, 20 nt, Human
ucaacucgucaccuaaucau

SEQ ID NO: 199029 - RNA, 21 nt, Human
ucauaccuuucuaccaaaauc

SEQ ID NO: 199030 - RNA, 22 nt, Human
uccagcccacuccuaccaaaaa

SEQ ID NO: 199031 - RNA, 22 nt, Human
ucucaaugucaacucgucaccu

SEQ ID NO: 199032 - RNA, 28 nt, Human
ucugcccgcaacgugcgacccccagaga

SEQ ID NO: 199033 - RNA, 21 nt, Human
ucuuuucaaugcacccagagg

SEQ ID NO: 199034 - RNA, 23 nt, Human
ugaacuuacuuccauucccuaaa

SEQ ID NO: 199035 - RNA, 21 nt, Human
ugacucagucacauuuguaau

SEQ ID NO: 199036 - RNA, 21 nt, Human
ugacuuagucacauuuguaau

SEQ ID NO: 199037 - RNA, 23 nt, Human
ugagaaaacacaacuaaaucuua

SEQ ID NO: 199038 - RNA, 21 nt, Human
ugcaaaauccaaagcuuauua

SEQ ID NO: 199039 - RNA, 21 nt, Human
uggaccaauacucuacaaaau

SEQ ID NO: 199040 - RNA, 21 nt, Human
uggagaagagggugacgcugg

SEQ ID NO: 199041 - RNA, 22 nt, Human
uggcaggaaccagccgaacagu

SEQ ID NO: 199042 - RNA, 24 nt, Human
ugucaaaaacuagauuuacuauca

SEQ ID NO: 199043 - RNA, 21 nt, Human
uuacaggauucacuacccuag

SEQ ID NO: 199044 - RNA, 24 nt, Human
uucucuaaacucacagagcauuaa

SEQ ID NO: 199045 - RNA, 22 nt, Human
uugcuuauuuuaaauuacauuu

SEQ ID NO: 199046 - RNA, 24 nt, Human
uuggagaagagggugacgcuggcu

SEQ ID NO: 199047 - RNA, 21 nt, Human
uuuuacagugcuccuuuugua

SEQ ID NO: 199048 - RNA, 24 nt, Human
aaaaugauugaaguaacucaaaug

SEQ ID NO: 199049 - RNA, 18 nt, Human
aaagcacgucuccccagg

SEQ ID NO: 199050 - RNA, 24 nt, Human
aaauauuucuuugaaucagggagc

SEQ ID NO: 199051 - RNA, 23 nt, Human
aaauguuaauugagaaaagcuga

SEQ ID NO: 199052 - RNA, 21 nt, Human
aacauacuuaaacuacuuaaa

SEQ ID NO: 199053 - RNA, 26 nt, Human
aagaaaaaaauuuaguuaacaaaaaa

SEQ ID NO: 199054 - RNA, 22 nt, Human
aagagccccgaaauuccaccga

SEQ ID NO: 199055 - RNA, 21 nt, Human
aagcgcggcuggcagccaaga

SEQ ID NO: 199056 - RNA, 22 nt, Human
aauugcuuucacaauguaguac

SEQ ID NO: 199057 - RNA, 20 nt, Human
acagcgauucgguggccccc

SEQ ID NO: 199058 - RNA, 18 nt, Human
acccaaaaggaaaucaca

SEQ ID NO: 199059 - RNA, 18 nt, Human
agaugugacuccagcauc

SEQ ID NO: 199060 - RNA, 22 nt, Human
agcaaaauacacccaaaaggaa

SEQ ID NO: 199061 - RNA, 26 nt, Human
augggucccccagcuucccccuaggg

SEQ ID NO: 199062 - RNA, 25 nt, Human
caauucucaaaacuaacuuuuaaaa

SEQ ID NO: 199063 - RNA, 21 nt, Human
cagcuaucaacagaugugacu

SEQ ID NO: 199064 - RNA, 19 nt, Human
ccaaaauguuaauugagaa

SEQ ID NO: 199065 - RNA, 18 nt, Human
cccaaaaggaaaucacag

SEQ ID NO: 199066 - RNA, 21 nt, Human
cccccagcuuccucuauuaua

SEQ ID NO: 199067 - RNA, 20 nt, Human
cccccgaaccccaccuugag

SEQ ID NO: 199068 - RNA, 19 nt, Human
ccgaaauuccaccgaagcu

SEQ ID NO: 199069 - RNA, 32 nt, Human
ccggcgugacagcgauucgguggccccccuuu

SEQ ID NO: 199070 - RNA, 21 nt, Human
cgaaccccaccuugaggaaga

SEQ ID NO: 199071 - RNA, 21 nt, Human
cgagaaacaaaauaauugcuu

SEQ ID NO: 199072 - RNA, 25 nt, Human
cgugugucuauuugaugcuucccuc

SEQ ID NO: 199073 - RNA, 20 nt, Human
cuuagcaaaauacacccaaa

SEQ ID NO: 199074 - RNA, 22 nt, Human
gccaagagccccgaaauuccac

SEQ ID NO: 199075 - RNA, 19 nt, Human
gccccgaaauuccaccgaa

SEQ ID NO: 199076 - RNA, 21 nt, Human
gcuuaaaaacaaccacggaug

SEQ ID NO: 199077 - RNA, 18 nt, Human
guggcuuuuuuguggcuu

SEQ ID NO: 199078 - RNA, 24 nt, Human
uaaaugaaaauauaaacuagaaug

SEQ ID NO: 199079 - RNA, 23 nt, Human
uaacaaaaaauuuaacaaguuuc

SEQ ID NO: 199080 - RNA, 21 nt, Human
uagaaugaacaaacaugagaa

SEQ ID NO: 199081 - RNA, 24 nt, Human
uagcaaaauacacccaaaaggaaa

SEQ ID NO: 199082 - RNA, 20 nt, Human
uagccucaucauaagaauau

SEQ ID NO: 199083 - RNA, 22 nt, Human
uaucaacagaugugacuccagc

SEQ ID NO: 199084 - RNA, 25 nt, Human
ucacauauuuaacauuuuuauuaga

SEQ ID NO: 199085 - RNA, 22 nt, Human
uccacauuuaacauacuuaaac

SEQ ID NO: 199086 - RNA, 24 nt, Human
uccucuauuauaacugcucuuaau

SEQ ID NO: 199087 - RNA, 19 nt, Human
ucugaaguauacuaccaaa

SEQ ID NO: 199088 - RNA, 21 nt, Human
ugaaguauacuaccaaaaugu

SEQ ID NO: 199089 - RNA, 24 nt, Human
ugaaguauacuaccaaaauguuaa

SEQ ID NO: 199090 - RNA, 20 nt, Human
ugagaaaacacugaagaggu

SEQ ID NO: 199091 - RNA, 21 nt, Human
ugagaaaacacugaagaggua

SEQ ID NO: 199092 - RNA, 23 nt, Human
ugagaaaagcugaaaauaguuuu

SEQ ID NO: 199093 - RNA, 19 nt, Human
ugcacauaaguugcaggug

SEQ ID NO: 199094 - RNA, 21 nt, Human
ugcauguuuuuguucucaacc

SEQ ID NO: 199095 - RNA, 22 nt, Human
ugccuucagugggagacacuuc

SEQ ID NO: 199096 - RNA, 21 nt, Human
uggaugguaaugaaaugucca

SEQ ID NO: 199097 - RNA, 20 nt, Human
uggccccccgaaccccaccu

SEQ ID NO: 199098 - RNA, 18 nt, Human
uggcuuaaaaacaaccac

SEQ ID NO: 199099 - RNA, 24 nt, Human
ugguguaaaagauccacauuuaac

SEQ ID NO: 199100 - RNA, 19 nt, Human
ugucagggugggugucagg

SEQ ID NO: 199101 - RNA, 19 nt, Human
uguggcuuuuuuguggcuu

SEQ ID NO: 199102 - RNA, 19 nt, Human
uuagauaacaucacucuga

SEQ ID NO: 199103 - RNA, 19 nt, Human
uuugaaucagggagcuagc

SEQ ID NO: 199104 - RNA, 26 nt, Human
uuuuaaaaagcuuaaacuuaaccuaa

SEQ ID NO: 199105 - RNA, 28 nt, Human
aaaaaaaaaaaaaaagguugaccaagag

SEQ ID NO: 199106 - RNA, 23 nt, Human
aaaaaaaaaaaaagguugaccaa

SEQ ID NO: 199107 - RNA, 23 nt, Human
aaaaaaaaaaaagcuuaaacuua

SEQ ID NO: 199108 - RNA, 20 nt, Human
aaacaaacuagacacgcgac

SEQ ID NO: 199109 - RNA, 18 nt, Human
aaaggaggauuuauuuga

SEQ ID NO: 199110 - RNA, 22 nt, Human
aacaugccaaaauguuucacuu

SEQ ID NO: 199111 - RNA, 18 nt, Human
aacuuaaaaaaaaaaaaa

SEQ ID NO: 199112 - RNA, 18 nt, Human
aagauuuaaaucaaggcc

SEQ ID NO: 199113 - RNA, 18 nt, Human
acaaacaccaagaccaaa

SEQ ID NO: 199114 - RNA, 18 nt, Human
accaagaccaaaauccua

SEQ ID NO: 199115 - RNA, 22 nt, Human
acccucccauuccguucacgcc

SEQ ID NO: 199116 - RNA, 22 nt, Human
agaaaaaaaaaaaaaaaaaaag

SEQ ID NO: 199117 - RNA, 23 nt, Human
agacaacccucccauuccguuca

SEQ ID NO: 199118 - RNA, 24 nt, Human
auacuggacaugcuagacaacccu

SEQ ID NO: 199119 - RNA, 23 nt, Human
caaaacaguguucaauuuaacgu

SEQ ID NO: 199120 - RNA, 23 nt, Human
caaaauccuaaguauugguauug

SEQ ID NO: 199121 - RNA, 19 nt, Human
caagaccaaaauccuaagg

SEQ ID NO: 199122 - RNA, 22 nt, Human
caccaagaccaaaauccuaagu

SEQ ID NO: 199123 - RNA, 23 nt, Human
ccccauccaccacucauacugga

SEQ ID NO: 199124 - RNA, 20 nt, Human
ccuaaauacgcuuacugcuu

SEQ ID NO: 199125 - RNA, 22 nt, Human
cguggcuaagacgaaaaaaaaa

SEQ ID NO: 199126 - RNA, 20 nt, Human
cuagaauuaacaaacaugcc

SEQ ID NO: 199127 - RNA, 23 nt, Human
cuagaauuaacaaacaugccaaa

SEQ ID NO: 199128 - RNA, 20 nt, Human
cucccauuccguucacgcca

SEQ ID NO: 199129 - RNA, 22 nt, Human
cuuaaaaaaaaaaaaagcuuaa

SEQ ID NO: 199130 - RNA, 23 nt, Human
cuuaaagaaaaaaaaaaaaaaaa

SEQ ID NO: 199131 - RNA, 19 nt, Human
gacacgcgacuucugcgug

SEQ ID NO: 199132 - RNA, 29 nt, Human
gucuucauaacaauccugauuuccaccac

SEQ ID NO: 199133 - RNA, 24 nt, Human
uaacauaauucaacugcuuuuacc

SEQ ID NO: 199134 - RNA, 22 nt, Human
uacaaaaaaaauaaaagcaugu

SEQ ID NO: 199135 - RNA, 20 nt, Human
uagaauuaacaaacaugcca

SEQ ID NO: 199136 - RNA, 26 nt, Human
ugggccuuaagucuucauaacaaucc

SEQ ID NO: 199137 - RNA, 20 nt, Human
uuagaguaagcauaaaucac

SEQ ID NO: 199138 - RNA, 22 nt, Human
aaagagaagcugaccaagagug

SEQ ID NO: 199139 - RNA, 21 nt, Human
aacucccacaaauguacagcu

SEQ ID NO: 199140 - RNA, 24 nt, Human
agaaagaaagauaaagaaagagaa

SEQ ID NO: 199141 - RNA, 21 nt, Human
aguaagcaugaaucacaagcc

SEQ ID NO: 199142 - RNA, 24 nt, Human
auacuggauauacuaaacaucccu

SEQ ID NO: 199143 - RNA, 25 nt, Human
caaaaagcuagaauuaacaaacaug

SEQ ID NO: 199144 - RNA, 24 nt, Human
caggauauuaaaccaaaaagcuag

SEQ ID NO: 199145 - RNA, 21 nt, Human
caugaaucacaagccuguaau

SEQ ID NO: 199146 - RNA, 23 nt, Human
ccaaacuucuaaaguauugguau

SEQ ID NO: 199147 - RNA, 18 nt, Human
cccucccauucuauucaa

SEQ ID NO: 199148 - RNA, 23 nt, Human
cuaacgauaccggguaauuuucc

SEQ ID NO: 199149 - RNA, 20 nt, Human
cuagaauuaacaaacaugcc

SEQ ID NO: 199150 - RNA, 23 nt, Human
cuagaauuaacaaacaugccaaa

SEQ ID NO: 199151 - RNA, 22 nt, Human
gacacgaccaaacuucuaaagu

SEQ ID NO: 199152 - RNA, 23 nt, Human
gcucuugguggcaaguuuggcuc

SEQ ID NO: 199153 - RNA, 18 nt, Human
guacacuccuacaacaua

SEQ ID NO: 199154 - RNA, 23 nt, Human
uaacuaacuugaggaaagcuaaa

SEQ ID NO: 199155 - RNA, 27 nt, Human
uaacuugaggaaagcuaaaaauuguuu

SEQ ID NO: 199156 - RNA, 19 nt, Human
uacaggauauuaaaccaaa

SEQ ID NO: 199157 - RNA, 20 nt, Human
uagaauuaacaaacaugcca

SEQ ID NO: 199158 - RNA, 23 nt, Human
uagcucuaacgauaccggguaau

SEQ ID NO: 199159 - RNA, 22 nt, Human
ucaacucccacaaauguacagc

SEQ ID NO: 199160 - RNA, 22 nt, Human
ucacaagccuguaaugcaaaac

SEQ ID NO: 199161 - RNA, 18 nt, Human
uccuacaacauaacuaac

SEQ ID NO: 199162 - RNA, 23 nt, Human
uccuuaaaaaaaaaaaaagugua

SEQ ID NO: 199163 - RNA, 19 nt, Human
ugaaucguagacacagcuc

SEQ ID NO: 199164 - RNA, 22 nt, Human
ugggcucuugguggcaaguuug

SEQ ID NO: 199165 - RNA, 20 nt, Human
uugggcucuugguggcaagu

SEQ ID NO: 199166 - RNA, 23 nt, Human
aaaagaaauuaaaucuguaagaa

SEQ ID NO: 199167 - RNA, 20 nt, Human
aaaccuacagaaaacauuuu

SEQ ID NO: 199168 - RNA, 21 nt, Human
agaucaucaauguuucagagc

SEQ ID NO: 199169 - RNA, 19 nt, Human
aguaaaauacaucaaccca

SEQ ID NO: 199170 - RNA, 21 nt, Human
auugaucaaagggauuaaaau

SEQ ID NO: 199171 - RNA, 22 nt, Human
cauuagccaauuuggaaaaaag

SEQ ID NO: 199172 - RNA, 18 nt, Human
ccacacuacuucuuguag

SEQ ID NO: 199173 - RNA, 18 nt, Human
cucaauaccguuugauuu

SEQ ID NO: 199174 - RNA, 25 nt, Human
cuggcaaaaacaaguaacaaguuca

SEQ ID NO: 199175 - RNA, 19 nt, Human
gcaacaaauaaaccuacag

SEQ ID NO: 199176 - RNA, 19 nt, Human
guccaguucaaagaaggga

SEQ ID NO: 199177 - RNA, 18 nt, Human
uaaaacuccaagcaggga

SEQ ID NO: 199178 - RNA, 18 nt, Human
uaaaacuccaagcaggga

SEQ ID NO: 199179 - RNA, 19 nt, Human
uaaaauacaucaacccaaa

SEQ ID NO: 199180 - RNA, 18 nt, Human
uaacugaauucacaucaa

SEQ ID NO: 199181 - RNA, 18 nt, Human
uaggaguaacuaguauau

SEQ ID NO: 199182 - RNA, 22 nt, Human
uauagaaauaauuagcugaauu

SEQ ID NO: 199183 - RNA, 24 nt, Human
uauagauucuuuaaacuaaaacuc

SEQ ID NO: 199184 - RNA, 20 nt, Human
uauugggcagaaaacugaaa

SEQ ID NO: 199185 - RNA, 21 nt, Human
ucagcuuccaacacucucaua

SEQ ID NO: 199186 - RNA, 19 nt, Human
uccaggaggaacuaaagaa

SEQ ID NO: 199187 - RNA, 23 nt, Human
ucuagggcuagaauucagcuucc

SEQ ID NO: 199188 - RNA, 20 nt, Human
ucuauugggcagaaaacuga

SEQ ID NO: 199189 - RNA, 23 nt, Human
ugaaaaauaauaauauagaaaua

SEQ ID NO: 199190 - RNA, 22 nt, Human
ugacauggacuuguugcuuaca

SEQ ID NO: 199191 - RNA, 23 nt, Human
ugagaaccuuaacccuacucuaa

SEQ ID NO: 199192 - RNA, 19 nt, Human
uggcaaaaacaaguaacaa

SEQ ID NO: 199193 - RNA, 19 nt, Human
uuaaacuaaaacuccaagc

SEQ ID NO: 199194 - RNA, 20 nt, Human
uuaacccuacucuaagacau

SEQ ID NO: 199195 - RNA, 19 nt, Human
uucaaagaagggagaaguc

SEQ ID NO: 199196 - RNA, 19 nt, Human
uucaaagaagggagaaguc

SEQ ID NO: 199197 - RNA, 22 nt, Human
uucaaagaagggagaagucguu

SEQ ID NO: 199198 - RNA, 22 nt, Human
uucggucaagugcugaaggggu

SEQ ID NO: 199199 - RNA, 22 nt, Human
uugggcagaaaacugaaaauac

SEQ ID NO: 199200 - RNA, 21 nt, Human
uuuaaacuaaaacuccaagca

SEQ ID NO: 199201 - RNA, 30 nt, Human
uuuggagacauuuuugguauuucggucaaa

SEQ ID NO: 199202 - RNA, 27 nt, Human
aaaaacaaacaaaaaauccccagcuua

SEQ ID NO: 199203 - RNA, 27 nt, Human
aaaaacaaacaaaaaauccccagcuua

SEQ ID NO: 199204 - RNA, 25 nt, Human
aaaaauaaaauccacucacucugcu

SEQ ID NO: 199205 - RNA, 25 nt, Human
aaaaauaaaauccacucacucugcu

SEQ ID NO: 199206 - RNA, 18 nt, Human
aaaacaaacaaaaaaucc

SEQ ID NO: 199207 - RNA, 18 nt, Human
aaaacaaacaaaaaaucc

SEQ ID NO: 199208 - RNA, 23 nt, Human
aaaacaaacaaaaaauccccagc

SEQ ID NO: 199209 - RNA, 20 nt, Human
aaaauuguugaaaaguaggg

SEQ ID NO: 199210 - RNA, 20 nt, Human
aaaauuguugaaaaguaggg

SEQ ID NO: 199211 - RNA, 19 nt, Human
aaacaaacaaaaaaucccc

SEQ ID NO: 199212 - RNA, 19 nt, Human
aaacaaacaaaaaaucccc

SEQ ID NO: 199213 - RNA, 22 nt, Human
aaacaaacaaaaaauccccagc

SEQ ID NO: 199214 - RNA, 22 nt, Human
aaacagaagcagauaaaaaaaa

SEQ ID NO: 199215 - RNA, 19 nt, Human
aaacauuccuacauaaucc

SEQ ID NO: 199216 - RNA, 19 nt, Human
aaacauuccuacauaaucc

SEQ ID NO: 199217 - RNA, 18 nt, Human
aaauguuacagugaccac

SEQ ID NO: 199218 - RNA, 20 nt, Human
aacuuguaguacugcucccc

SEQ ID NO: 199219 - RNA, 20 nt, Human
aacuuguaguacugcucccc

SEQ ID NO: 199220 - RNA, 21 nt, Human
aagaacuaaaacauuacaucu

SEQ ID NO: 199221 - RNA, 19 nt, Human
acacaaacauuccuacaua

SEQ ID NO: 199222 - RNA, 19 nt, Human
acacaaacauuccuacaua

SEQ ID NO: 199223 - RNA, 18 nt, Human
accuuaguucuucacaac

SEQ ID NO: 199224 - RNA, 19 nt, Human
acuacaccucaaaugcaga

SEQ ID NO: 199225 - RNA, 21 nt, Human
acugcuccccaccuuaguucu

SEQ ID NO: 199226 - RNA, 21 nt, Human
acugcuccccaccuuaguucu

SEQ ID NO: 199227 - RNA, 18 nt, Human
agaagcagauaaaaaaaa

SEQ ID NO: 199228 - RNA, 19 nt, Human
agaugccagggacaugugg

SEQ ID NO: 199229 - RNA, 19 nt, Human
agaugccagggacaugugg

SEQ ID NO: 199230 - RNA, 18 nt, Human
agcagagaaacagaggaa

SEQ ID NO: 199231 - RNA, 19 nt, Human
aggagcugaaaauuaaacu

SEQ ID NO: 199232 - RNA, 19 nt, Human
aggagcugaaaauuaaacu

SEQ ID NO: 199233 - RNA, 18 nt, Human
aggucggugcagcagaga

SEQ ID NO: 199234 - RNA, 20 nt, Human
auacuacacaaaacauccac

SEQ ID NO: 199235 - RNA, 20 nt, Human
auacuacacaaaacauccac

SEQ ID NO: 199236 - RNA, 23 nt, Human
augccaagauacuacacaaaaca

SEQ ID NO: 199237 - RNA, 22 nt, Human
caaaugccaagauacuacacag

SEQ ID NO: 199238 - RNA, 22 nt, Human
caaaugccaagauacuacacag

SEQ ID NO: 199239 - RNA, 18 nt, Human
caacagaggagcugaaaa

SEQ ID NO: 199240 - RNA, 19 nt, Human
caagaaaucaccagaacua

SEQ ID NO: 199241 - RNA, 19 nt, Human
caagaaaucaccagaacua

SEQ ID NO: 199242 - RNA, 22 nt, Human
caagagaugcacuuauaugucc

SEQ ID NO: 199243 - RNA, 22 nt, Human
caagagaugcacuuauaugucc

SEQ ID NO: 199244 - RNA, 24 nt, Human
caccaacaauaacgaaaaauaaaa

SEQ ID NO: 199245 - RNA, 26 nt, Human
caccaacaauaacgaaaaauaaaauc

SEQ ID NO: 199246 - RNA, 19 nt, Human
caccacaauaacgaaaaau

SEQ ID NO: 199247 - RNA, 21 nt, Human
caccagaacuaaguuugccaa

SEQ ID NO: 199248 - RNA, 21 nt, Human
caccagaacuaaguuugccaa

SEQ ID NO: 199249 - RNA, 19 nt, Human
caccuuaguucuucacaac

SEQ ID NO: 199250 - RNA, 20 nt, Human
cacgcccuucccccccccaa

SEQ ID NO: 199251 - RNA, 20 nt, Human
cacgcccuucccccccccaa

SEQ ID NO: 199252 - RNA, 23 nt, Human
cacgcccuucccccccccaaccc

SEQ ID NO: 199253 - RNA, 23 nt, Human
cacgcccuucccccccccaaccc

SEQ ID NO: 199254 - RNA, 21 nt, Human
cagaacaccuaugaagcagag

SEQ ID NO: 199255 - RNA, 18 nt, Human
cagaagcagauaaaaaaa

SEQ ID NO: 199256 - RNA, 24 nt, Human
cagaagcagauaaaaaaaaaaaga

SEQ ID NO: 199257 - RNA, 20 nt, Human
ccaaauguuacagugaccac

SEQ ID NO: 199258 - RNA, 22 nt, Human
ccaagauacuacacaaaacauc

SEQ ID NO: 199259 - RNA, 22 nt, Human
ccaagauacuacacaaaacauc

SEQ ID NO: 199260 - RNA, 22 nt, Human
ccagaauacugcuucacacuau

SEQ ID NO: 199261 - RNA, 25 nt, Human
cccaacccuguuuguaagaacuaaa

SEQ ID NO: 199262 - RNA, 25 nt, Human
cccaccccccaaauguuacagugac

SEQ ID NO: 199263 - RNA, 25 nt, Human
cccaccccccaaauguuacagugac

SEQ ID NO: 199264 - RNA, 24 nt, Human
ccucccuggcccaccccccaaaug

SEQ ID NO: 199265 - RNA, 22 nt, Human
ccucccugucccaccccccaaa

SEQ ID NO: 199266 - RNA, 18 nt, Human
ccuggcccaccccccaaa

SEQ ID NO: 199267 - RNA, 20 nt, Human
cgaaaaauaaaauccacuca

SEQ ID NO: 199268 - RNA, 21 nt, Human
cgcccuucccccccccaaccc

SEQ ID NO: 199269 - RNA, 21 nt, Human
cgcccuucccccccccaaccc

SEQ ID NO: 199270 - RNA, 19 nt, Human
cggaccaacaacugacacc

SEQ ID NO: 199271 - RNA, 19 nt, Human
cggaccaacaacugacacc

SEQ ID NO: 199272 - RNA, 24 nt, Human
cuauuguuacuuuuccucccuggc

SEQ ID NO: 199273 - RNA, 18 nt, Human
cucccugucccacccccc

SEQ ID NO: 199274 - RNA, 23 nt, Human
cucccugucccaccccccaaaug

SEQ ID NO: 199275 - RNA, 26 nt, Human
cugaagcguucugggucggaccaaca

SEQ ID NO: 199276 - RNA, 26 nt, Human
cugaagcguucugggucggaccaaca

SEQ ID NO: 199277 - RNA, 23 nt, Human
cuuaaaaaaaaaaugaccaccaa

SEQ ID NO: 199278 - RNA, 23 nt, Human
cuuaaaaaaaaaaugaccaccaa

SEQ ID NO: 199279 - RNA, 22 nt, Human
cuucccagcaauagacuuccaa

SEQ ID NO: 199280 - RNA, 22 nt, Human
cuucccagcaauagacuuccaa

SEQ ID NO: 199281 - RNA, 21 nt, Human
gcacgcccuucccccccccaa

SEQ ID NO: 199282 - RNA, 21 nt, Human
gcacgcccuucccccccccaa

SEQ ID NO: 199283 - RNA, 25 nt, Human
gcacgcccuucccccccccaacccu

SEQ ID NO: 199284 - RNA, 25 nt, Human
gcacgcccuucccccccccaacccu

SEQ ID NO: 199285 - RNA, 18 nt, Human
gcagaacaccuaugaagc

SEQ ID NO: 199286 - RNA, 22 nt, Human
gcagaacaccuaugaagcagag

SEQ ID NO: 199287 - RNA, 23 nt, Human
gcagaacaccuaugaagcagagg

SEQ ID NO: 199288 - RNA, 20 nt, Human
gcccaccccccaaauguuac

SEQ ID NO: 199289 - RNA, 20 nt, Human
ggguggguugggaaauucag

SEQ ID NO: 199290 - RNA, 20 nt, Human
ggguggguugggaaauucag

SEQ ID NO: 199291 - RNA, 23 nt, Human
ggguguuuuauuuauuuggaagu

SEQ ID NO: 199292 - RNA, 23 nt, Human
ggguguuuuauuuauuuggaagu

SEQ ID NO: 199293 - RNA, 23 nt, Human
uaaaaaaaaaaugaccaccaaaa

SEQ ID NO: 199294 - RNA, 23 nt, Human
uaaaaaaaaaaugaccaccaaaa

SEQ ID NO: 199295 - RNA, 25 nt, Human
uaaaccaccaacaauaacgaaaaau

SEQ ID NO: 199296 - RNA, 18 nt, Human
uacacaaaacauccacag

SEQ ID NO: 199297 - RNA, 22 nt, Human
uacacaaaacauccacaggaac

SEQ ID NO: 199298 - RNA, 23 nt, Human
uacacaaacauuccuacauaauc

SEQ ID NO: 199299 - RNA, 23 nt, Human
uacacaaacauuccuacauaauc

SEQ ID NO: 199300 - RNA, 20 nt, Human
uacagugaccacaaagcaag

SEQ ID NO: 199301 - RNA, 20 nt, Human
uacagugaccacaaagcaag

SEQ ID NO: 199302 - RNA, 18 nt, Human
uacuacacaaaacaucca

SEQ ID NO: 199303 - RNA, 18 nt, Human
uacuacacaaaacaucca

SEQ ID NO: 199304 - RNA, 28 nt, Human
uagaaaauuguugaaaaguaggggcaag

SEQ ID NO: 199305 - RNA, 28 nt, Human
uagaaaauuguugaaaaguaggggcaag

SEQ ID NO: 199306 - RNA, 23 nt, Human
uaggggcaagcauuugcaaaaac

SEQ ID NO: 199307 - RNA, 23 nt, Human
uaggggcaagcauuugcaaaaac

SEQ ID NO: 199308 - RNA, 25 nt, Human
uauaaaaaagaaaaaauaucuugca

SEQ ID NO: 199309 - RNA, 18 nt, Human
uaugaagcagaggaaugu

SEQ ID NO: 199310 - RNA, 23 nt, Human
uauuaaacgggcacaccaaucag

SEQ ID NO: 199311 - RNA, 23 nt, Human
uauuaaacgggcacaccaaucag

SEQ ID NO: 199312 - RNA, 19 nt, Human
ucacacuauaaaaaagaaa

SEQ ID NO: 199313 - RNA, 22 nt, Human
uccaacauacaacagagaaaug

SEQ ID NO: 199314 - RNA, 22 nt, Human
uccaacauacaacagagaaaug

SEQ ID NO: 199315 - RNA, 21 nt, Human
uccccaccuuaguucuucaca

SEQ ID NO: 199316 - RNA, 21 nt, Human
uccccaccuuaguucuucaca

SEQ ID NO: 199317 - RNA, 23 nt, Human
ucugcaaugcugucgccuggagc

SEQ ID NO: 199318 - RNA, 18 nt, Human
ugaacagaugccagggac

SEQ ID NO: 199319 - RNA, 18 nt, Human
ugaacagaugccagggac

SEQ ID NO: 199320 - RNA, 21 nt, Human
ugaacagaugccagggacaug

SEQ ID NO: 199321 - RNA, 21 nt, Human
ugaacagaugccagggacaug

SEQ ID NO: 199322 - RNA, 25 nt, Human
ugaacagaugccagggacaugugga

SEQ ID NO: 199323 - RNA, 25 nt, Human
ugaacagaugccagggacaugugga

SEQ ID NO: 199324 - RNA, 19 nt, Human
ugauuaauaaacuugcugc

SEQ ID NO: 199325 - RNA, 19 nt, Human
ugauuaauaaacuugcugc

SEQ ID NO: 199326 - RNA, 23 nt, Human
ugcacgcccuucccccccccaac

SEQ ID NO: 199327 - RNA, 23 nt, Human
ugcacgcccuucccccccccaac

SEQ ID NO: 199328 - RNA, 21 nt, Human
ugcagcagagaaacagaggau

SEQ ID NO: 199329 - RNA, 22 nt, Human
ugccaagauacuacacaaaaca

SEQ ID NO: 199330 - RNA, 24 nt, Human
ugggucggaccaacaacugacacc

SEQ ID NO: 199331 - RNA, 24 nt, Human
ugggucggaccaacaacugacacc

SEQ ID NO: 199332 - RNA, 22 nt, Human
uguacacaaacauuccuacaua

SEQ ID NO: 199333 - RNA, 20 nt, Human
uguuacuuuuccucccuggc

SEQ ID NO: 199334 - RNA, 20 nt, Human
uuaaacgggcacaccaauca

SEQ ID NO: 199335 - RNA, 20 nt, Human
uuaaacgggcacaccaauca

SEQ ID NO: 199336 - RNA, 26 nt, Human
uuaauaaacuugcugccaaucagaau

SEQ ID NO: 199337 - RNA, 26 nt, Human
uuaauaaacuugcugccaaucagaau

SEQ ID NO: 199338 - RNA, 20 nt, Human
uucccagcaauagacuucca

SEQ ID NO: 199339 - RNA, 20 nt, Human
uucccagcaauagacuucca

SEQ ID NO: 199340 - RNA, 24 nt, Human
uuccucccuggcccaccccccaaa

SEQ ID NO: 199341 - RNA, 25 nt, Human
uucuucccagcaauagacuuccaaa

SEQ ID NO: 199342 - RNA, 25 nt, Human
uucuucccagcaauagacuuccaaa

SEQ ID NO: 199343 - RNA, 23 nt, Human
uugccaaguuauuuugccuaugu

SEQ ID NO: 199344 - RNA, 23 nt, Human
uugccaaguuauuuugccuaugu

SEQ ID NO: 199345 - RNA, 23 nt, Human
uuguacacaaacauuccuacaua

SEQ ID NO: 199346 - RNA, 20 nt, Human
uuugcacgcccuuccccccc

SEQ ID NO: 199347 - RNA, 21 nt, Human
uuugcacgcccuucccccccc

SEQ ID NO: 199348 - RNA, 18 nt, Human
aagaugccacaacuacaa

SEQ ID NO: 199349 - RNA, 24 nt, Human
aauuaccccaaaaagcaacugaau

SEQ ID NO: 199350 - RNA, 20 nt, Human
acaagaaaaaauacaaauuc

SEQ ID NO: 199351 - RNA, 26 nt, Human
accccaaaaagcaacugaauuuuuua

SEQ ID NO: 199352 - RNA, 20 nt, Human
agaaaaaauacaaauucaga

SEQ ID NO: 199353 - RNA, 18 nt, Human
caaccaguaacaccugcg

SEQ ID NO: 199354 - RNA, 19 nt, Human
caaccaguaacaccugcgc

SEQ ID NO: 199355 - RNA, 23 nt, Human
caagaugccacaacuacaaaaaa

SEQ ID NO: 199356 - RNA, 19 nt, Human
caguaacaccugcgccccc

SEQ ID NO: 199357 - RNA, 21 nt, Human
ccaacaaauuaaaaugguuaa

SEQ ID NO: 199358 - RNA, 22 nt, Human
ccacgccccgucgccgcgcagg

SEQ ID NO: 199359 - RNA, 18 nt, Human
cccacucgcccgcggcca

SEQ ID NO: 199360 - RNA, 20 nt, Human
cccacucgcccgcggccacg

SEQ ID NO: 199361 - RNA, 23 nt, Human
cccccgcucccggcugccuccuu

SEQ ID NO: 199362 - RNA, 19 nt, Human
cccgacgcaaccaguaaca

SEQ ID NO: 199363 - RNA, 25 nt, Human
ccggcagcuguugaucgcuucucuc

SEQ ID NO: 199364 - RNA, 23 nt, Human
cgccgcgcaggcgcagaccggca

SEQ ID NO: 199365 - RNA, 18 nt, Human
cugcgcccccgcucccgg

SEQ ID NO: 199366 - RNA, 23 nt, Human
gcagaccggcagcuguugaucgc

SEQ ID NO: 199367 - RNA, 24 nt, Human
gcagaccggcagcuguugaucgcu

SEQ ID NO: 199368 - RNA, 27 nt, Human
gccacaacuacaaaaaaaauugcgcac

SEQ ID NO: 199369 - RNA, 18 nt, Human
gcugccuccuuggcccca

SEQ ID NO: 199370 - RNA, 25 nt, Human
uaaaaaaguaauucaaauuacccca

SEQ ID NO: 199371 - RNA, 23 nt, Human
uaauucaaauuaccccaaaaagc

SEQ ID NO: 199372 - RNA, 23 nt, Human
ucaaagucauauucgaugucaac

SEQ ID NO: 199373 - RNA, 27 nt, Human
ugccacaacuacaaaaaaaauugcgca

SEQ ID NO: 199374 - RNA, 21 nt, Human
ugcgcgcccacgugacccgac

SEQ ID NO: 199375 - RNA, 19 nt, Human
ugucaacaagaugccacaa

SEQ ID NO: 199376 - RNA, 20 nt, Human
uuuuuuuuuuuucaggaacc

SEQ ID NO: 199377 - RNA, 23 nt, Human
uuuuuuuuuuuuuuuuuuucagg

SEQ ID NO: 199378 - RNA, 26 nt, Human
aaaaaaaaaaaaaaaagcaaccaaag

SEQ ID NO: 199379 - RNA, 24 nt, Human
aaaaaaaaaaaaaaagcaaccaaa

SEQ ID NO: 199380 - RNA, 23 nt, Human
aaaaaaaaaaagcaaccaaagaa

SEQ ID NO: 199381 - RNA, 18 nt, Human
aaaaaaaaaaagcaaccc

SEQ ID NO: 199382 - RNA, 18 nt, Human
aaaaaaaagcaaccaaag

SEQ ID NO: 199383 - RNA, 18 nt, Human
aaaaagcaaccaaagaaa

SEQ ID NO: 199384 - RNA, 19 nt, Human
aaaaggcccaagaacccuu

SEQ ID NO: 199385 - RNA, 24 nt, Human
aaaaggcccaagaacccuucugaa

SEQ ID NO: 199386 - RNA, 20 nt, Human
aacaaauucacauugaaaac

SEQ ID NO: 199387 - RNA, 22 nt, Human
aaccccuucuuaacacggauau

SEQ ID NO: 199388 - RNA, 22 nt, Human
aaccgggcagcccagcuggccc

SEQ ID NO: 199389 - RNA, 25 nt, Human
aaggagaggaaauaaauucagagaa

SEQ ID NO: 199390 - RNA, 18 nt, Human
acccacgucuucggccaa

SEQ ID NO: 199391 - RNA, 19 nt, Human
accuaaaaaaaaaaaaaaa

SEQ ID NO: 199392 - RNA, 23 nt, Human
acuucugagagugcucugaggcu

SEQ ID NO: 199393 - RNA, 18 nt, Human
agaaaaaagguggguggg

SEQ ID NO: 199394 - RNA, 26 nt, Human
agaacccuucugaaccaucaggguac

SEQ ID NO: 199395 - RNA, 19 nt, Human
agagagaaaaggaaggaag

SEQ ID NO: 199396 - RNA, 19 nt, Human
agaggaaauaaauucagag

SEQ ID NO: 199397 - RNA, 18 nt, Human
agagugcucugaggcuag

SEQ ID NO: 199398 - RNA, 26 nt, Human
agcaaggaaugaagaacucucaaaac

SEQ ID NO: 199399 - RNA, 24 nt, Human
agccagagggcugcugcguccggc

SEQ ID NO: 199400 - RNA, 23 nt, Human
agccccuguuucaaagcgccuuu

SEQ ID NO: 199401 - RNA, 21 nt, Human
aggaagagcauggagcagaag

SEQ ID NO: 199402 - RNA, 18 nt, Human
aggaagcuaaugcuggga

SEQ ID NO: 199403 - RNA, 23 nt, Human
agggugcagggccaguggccuau

SEQ ID NO: 199404 - RNA, 18 nt, Human
agguggguggggggagac

SEQ ID NO: 199405 - RNA, 20 nt, Human
agguggguggggggagacuc

SEQ ID NO: 199406 - RNA, 22 nt, Human
agucauccuugcacagagagcc

SEQ ID NO: 199407 - RNA, 19 nt, Human
agugcggggcggagaagag

SEQ ID NO: 199408 - RNA, 21 nt, Human
caaggaaugaagaacucucaa

SEQ ID NO: 199409 - RNA, 19 nt, Human
cagaccgcgaagcaucccc

SEQ ID NO: 199410 - RNA, 18 nt, Human
cagaccguuucaugagcu

SEQ ID NO: 199411 - RNA, 18 nt, Human
cagagaaugccaaauacu

SEQ ID NO: 199412 - RNA, 18 nt, Human
cagagggcugcugcgucc

SEQ ID NO: 199413 - RNA, 27 nt, Human
cagcauacacacacggaaagacguaca

SEQ ID NO: 199414 - RNA, 21 nt, Human
cagccccugcgcccucagccu

SEQ ID NO: 199415 - RNA, 18 nt, Human
cagccgccuggagcccca

SEQ ID NO: 199416 - RNA, 18 nt, Human
cagcugggaaccgggcag

SEQ ID NO: 199417 - RNA, 24 nt, Human
caggaagagauaaauaucgcuaug

SEQ ID NO: 199418 - RNA, 24 nt, Human
caggccccaugcuggagccagagg

SEQ ID NO: 199419 - RNA, 22 nt, Human
caguggccuaucgaggagcagg

SEQ ID NO: 199420 - RNA, 18 nt, Human
cauggagcagaagaccgc

SEQ ID NO: 199421 - RNA, 23 nt, Human
ccaauacacaauugaacaaaagg

SEQ ID NO: 199422 - RNA, 18 nt, Human
cccaugcuggagccagag

SEQ ID NO: 199423 - RNA, 21 nt, Human
cccaugcuggagccagagggc

SEQ ID NO: 199424 - RNA, 21 nt, Human
cccccggcugggccgcggggc

SEQ ID NO: 199425 - RNA, 25 nt, Human
ccccgcggucacgugacacuccgcc

SEQ ID NO: 199426 - RNA, 20 nt, Human
ccgccuggagccccagccgc

SEQ ID NO: 199427 - RNA, 24 nt, Human
cgaacggauggggauaaauaauau

SEQ ID NO: 199428 - RNA, 24 nt, Human
cgccuggagccccagccgccaucc

SEQ ID NO: 199429 - RNA, 26 nt, Human
cuaaaaaaaaaaaaaaaagcaaccaa

SEQ ID NO: 199430 - RNA, 24 nt, Human
cuggggccauaaaaagaaagcugg

SEQ ID NO: 199431 - RNA, 28 nt, Human
cuguuucaaagcgccuuugauuuuuuuu

SEQ ID NO: 199432 - RNA, 21 nt, Human
gaaccuaaaaaaaaaaaaaaa

SEQ ID NO: 199433 - RNA, 21 nt, Human
gagccccagccgccauccuga

SEQ ID NO: 199434 - RNA, 21 nt, Human
gcagacccacgucuucggcca

SEQ ID NO: 199435 - RNA, 21 nt, Human
gcccaagaacccuucugaacc

SEQ ID NO: 199436 - RNA, 24 nt, Human
gcccugcguuaucccccggcuggg

SEQ ID NO: 199437 - RNA, 18 nt, Human
gcuggagccagagggcug

SEQ ID NO: 199438 - RNA, 26 nt, Human
ggaaagacguacacuuagucauccuu

SEQ ID NO: 199439 - RNA, 20 nt, Human
ggaaagugcucggcauccuc

SEQ ID NO: 199440 - RNA, 21 nt, Human
ggaagcuaaugcugggauucc

SEQ ID NO: 199441 - RNA, 26 nt, Human
ggcaggaagaaccuaaaaaaaaaaaa

SEQ ID NO: 199442 - RNA, 25 nt, Human
gggagacucuccuggcgcguagccc

SEQ ID NO: 199443 - RNA, 18 nt, Human
gucuucggccaaagaacc

SEQ ID NO: 199444 - RNA, 19 nt, Human
gugcgcucccgcugcgccu

SEQ ID NO: 199445 - RNA, 19 nt, Human
uaaacuauaaaaacgccuu

SEQ ID NO: 199446 - RNA, 21 nt, Human
uacacacacggaaagacguac

SEQ ID NO: 199447 - RNA, 24 nt, Human
uaccagagcugccgcagccgccug

SEQ ID NO: 199448 - RNA, 21 nt, Human
uaugauacagccauuccagca

SEQ ID NO: 199449 - RNA, 25 nt, Human
ucaaaagcuggaucuucucugguca

SEQ ID NO: 199450 - RNA, 23 nt, Human
ucaaagaguggagaagguaaagg

SEQ ID NO: 199451 - RNA, 21 nt, Human
ucagucccuuucaaacuguuu

SEQ ID NO: 199452 - RNA, 19 nt, Human
uccgugcacagcacucggc

SEQ ID NO: 199453 - RNA, 20 nt, Human
uccgugcacagcacucggca

SEQ ID NO: 199454 - RNA, 26 nt, Human
uccguuugcuggagaccugggugagc

SEQ ID NO: 199455 - RNA, 18 nt, Human
uccuugcacagagagccc

SEQ ID NO: 199456 - RNA, 24 nt, Human
uccuugcacagagagccccuguuu

SEQ ID NO: 199457 - RNA, 26 nt, Human
ucuaaaaaucuucucuuuucuggucu

SEQ ID NO: 199458 - RNA, 19 nt, Human
ucuucucuuuucuggucuu

SEQ ID NO: 199459 - RNA, 20 nt, Human
ugaagaacucucaaaacaaa

SEQ ID NO: 199460 - RNA, 20 nt, Human
ugagccucagucccuuucaa

SEQ ID NO: 199461 - RNA, 20 nt, Human
ugaucgcacacucugacagg

SEQ ID NO: 199462 - RNA, 23 nt, Human
uggccaggccccaugcuggagcc

SEQ ID NO: 199463 - RNA, 22 nt, Human
uggcuaauaccgagguuuagga

SEQ ID NO: 199464 - RNA, 24 nt, Human
uguucaccagcauacacacacgga

SEQ ID NO: 199465 - RNA, 18 nt, Human
uucuuccgugcacagcac

SEQ ID NO: 199466 - RNA, 23 nt, Human
uugaacaaaaggcccaagaaccc

SEQ ID NO: 199467 - RNA, 20 nt, Human
uugcaguuuuauuacaaaga

SEQ ID NO: 199468 - RNA, 20 nt, Human
uuucucagaaugugagcaac

SEQ ID NO: 199469 - RNA, 26 nt, Human
aaacaagaucauuuauuaccuuccaa

SEQ ID NO: 199470 - RNA, 19 nt, Human
aaauguuggaggucagccu

SEQ ID NO: 199471 - RNA, 23 nt, Human
aagacaaggcaccuguccucaac

SEQ ID NO: 199472 - RNA, 18 nt, Human
aagcaagagcaagaagug

SEQ ID NO: 199473 - RNA, 19 nt, Human
aagcaagagcaagaaguga

SEQ ID NO: 199474 - RNA, 19 nt, Human
aaugugaugaauacaacgu

SEQ ID NO: 199475 - RNA, 22 nt, Human
acuacugguccccuccuccccc

SEQ ID NO: 199476 - RNA, 23 nt, Human
acuacugguccccuccucccccu

SEQ ID NO: 199477 - RNA, 18 nt, Human
agagaagcaagcaagagc

SEQ ID NO: 199478 - RNA, 23 nt, Human
agagaagcaagcaagagcaagaa

SEQ ID NO: 199479 - RNA, 24 nt, Human
agcaagaagugagcagaagggacc

SEQ ID NO: 199480 - RNA, 21 nt, Human
agcagaauuuccaagcuggga

SEQ ID NO: 199481 - RNA, 19 nt, Human
auggagacagggacaccag

SEQ ID NO: 199482 - RNA, 23 nt, Human
augggacaguaaaaacagauaag

SEQ ID NO: 199483 - RNA, 20 nt, Human
caacguguuaaagacaaggc

SEQ ID NO: 199484 - RNA, 23 nt, Human
caccuguccucaacggagcuuua

SEQ ID NO: 199485 - RNA, 20 nt, Human
cagcccuuccuucuuuuuuu

SEQ ID NO: 199486 - RNA, 22 nt, Human
cagggacaccagcuagggaggc

SEQ ID NO: 199487 - RNA, 24 nt, Human
cagugcccuuagcagcaaaauuuu

SEQ ID NO: 199488 - RNA, 19 nt, Human
caucccucagcaauuacuc

SEQ ID NO: 199489 - RNA, 21 nt, Human
ccaccagagaagcaagcaaga

SEQ ID NO: 199490 - RNA, 21 nt, Human
ccagagaagcaagcaagagca

SEQ ID NO: 199491 - RNA, 25 nt, Human
ccaggaaaagaggaaaacaagauca

SEQ ID NO: 199492 - RNA, 19 nt, Human
ccccuccucccccuaguuu

SEQ ID NO: 199493 - RNA, 18 nt, Human
ccggugcagagagggccc

SEQ ID NO: 199494 - RNA, 23 nt, Human
cgcaccuccaccaugaccagccc

SEQ ID NO: 199495 - RNA, 21 nt, Human
cggugcagagagggccccgga

SEQ ID NO: 199496 - RNA, 19 nt, Human
cuacugguccccuccuccc

SEQ ID NO: 199497 - RNA, 26 nt, Human
cuuuuuuuuuuuuuuuuuccauuuuu

SEQ ID NO: 199498 - RNA, 24 nt, Human
gaagcccaccagagaagcaagcaa

SEQ ID NO: 199499 - RNA, 22 nt, Human
gcaccuccaccaugaccagccc

SEQ ID NO: 199500 - RNA, 22 nt, Human
gccaaagauucaguauuguuag

SEQ ID NO: 199501 - RNA, 24 nt, Human
ggagcccuuccagggagagcgcuu

SEQ ID NO: 199502 - RNA, 21 nt, Human
ggccagcggacaauaguggaa

SEQ ID NO: 199503 - RNA, 19 nt, Human
guccaguuuacaggcugga

SEQ ID NO: 199504 - RNA, 23 nt, Human
gugaaacacaggagcccuuccag

SEQ ID NO: 199505 - RNA, 19 nt, Human
guggaagguggauucagga

SEQ ID NO: 199506 - RNA, 23 nt, Human
uaaguaaaaccagugagucucuu

SEQ ID NO: 199507 - RNA, 19 nt, Human
uacaagaugccugggaaga

SEQ ID NO: 199508 - RNA, 21 nt, Human
uacacccccagauuuacacca

SEQ ID NO: 199509 - RNA, 21 nt, Human
uacacccccagauuuacacca

SEQ ID NO: 199510 - RNA, 20 nt, Human
uaguaagucauuaguacuac

SEQ ID NO: 199511 - RNA, 18 nt, Human
uauuccagaugggcagug

SEQ ID NO: 199512 - RNA, 19 nt, Human
ucagccaagagcgccaggc

SEQ ID NO: 199513 - RNA, 21 nt, Human
ucaucccucagcaauuacucc

SEQ ID NO: 199514 - RNA, 19 nt, Human
uccggugcagagagggccc

SEQ ID NO: 199515 - RNA, 21 nt, Human
uccuugcgcaccuccaccaug

SEQ ID NO: 199516 - RNA, 23 nt, Human
ucuccuugcgcaccuccaccaug

SEQ ID NO: 199517 - RNA, 21 nt, Human
ucugugaucacuuucuggaac

SEQ ID NO: 199518 - RNA, 18 nt, Human
ucuuuuuuuuuuuuuuuu

SEQ ID NO: 199519 - RNA, 23 nt, Human
ugaaacacaggagcccuuccagg

SEQ ID NO: 199520 - RNA, 18 nt, Human
ugauaaauguaacgacgu

SEQ ID NO: 199521 - RNA, 18 nt, Human
ugauuuguuguccggcag

SEQ ID NO: 199522 - RNA, 18 nt, Human
ugauuuguuguccggcag

SEQ ID NO: 199523 - RNA, 20 nt, Human
ugcgcaccuccaccaugacc

SEQ ID NO: 199524 - RNA, 19 nt, Human
uggaaagggccagcggaca

SEQ ID NO: 199525 - RNA, 24 nt, Human
ugucccggccacuuagauuaaaau

SEQ ID NO: 199526 - RNA, 20 nt, Human
uguuucuccuugcgcaccuc

SEQ ID NO: 199527 - RNA, 24 nt, Human
uuaauauuaaccauaugaucugau

SEQ ID NO: 199528 - RNA, 19 nt, Human
uuagauuaaaauguuggag

SEQ ID NO: 199529 - RNA, 23 nt, Human
uuaguacuacugguccccuccuc

SEQ ID NO: 199530 - RNA, 22 nt, Human
uuccagggagagcgcuugguuu

SEQ ID NO: 199531 - RNA, 20 nt, Human
agccugggauagggcuggac

SEQ ID NO: 199532 - RNA, 19 nt, Human
aggcagugaagccaggccu

SEQ ID NO: 199533 - RNA, 22 nt, Human
cuccagugccuggaagccccau

SEQ ID NO: 199534 - RNA, 22 nt, Human
gccuggguugggagagccuggg

SEQ ID NO: 199535 - RNA, 23 nt, Human
gccuggguugggagagccuggga

SEQ ID NO: 199536 - RNA, 21 nt, Human
gggauagggcuggacuggggc

SEQ ID NO: 199537 - RNA, 18 nt, Human
gggcuggacuggggcgcu

SEQ ID NO: 199538 - RNA, 19 nt, Human
acaugggguuccgucuccc

SEQ ID NO: 199539 - RNA, 23 nt, Human
agccugggcuuggcagguuucug

SEQ ID NO: 199540 - RNA, 23 nt, Human
auccaaagcguuuuaaaucgcuc

SEQ ID NO: 199541 - RNA, 19 nt, Human
caguggccugggaagggug

SEQ ID NO: 199542 - RNA, 23 nt, Human
ccacccaggccgggggaauccaa

SEQ ID NO: 199543 - RNA, 19 nt, Human
ccagcucgcucuccccacc

SEQ ID NO: 199544 - RNA, 23 nt, Human
cccaggccgggggaauccaaagc

SEQ ID NO: 199545 - RNA, 20 nt, Human
ccccacuuucgcuccuccca

SEQ ID NO: 199546 - RNA, 22 nt, Human
ccccacuuucgcuccucccacc

SEQ ID NO: 199547 - RNA, 23 nt, Human
ccucucagcagaguccuuggccc

SEQ ID NO: 199548 - RNA, 25 nt, Human
cgcuccugaggaacaguccagcagc

SEQ ID NO: 199549 - RNA, 24 nt, Human
cucagcagaguccuuggccccagc

SEQ ID NO: 199550 - RNA, 19 nt, Human
cugggcuuggcagguuucu

SEQ ID NO: 199551 - RNA, 23 nt, Human
cuuggccccagccugggcuuggc

SEQ ID NO: 199552 - RNA, 19 nt, Human
gccccagccugggcuuggc

SEQ ID NO: 199553 - RNA, 20 nt, Human
ggaacaguccagcagccagu

SEQ ID NO: 199554 - RNA, 23 nt, Human
uaggggccucucagcagaguccu

SEQ ID NO: 199555 - RNA, 19 nt, Human
ucagcagaguccuuggccc

SEQ ID NO: 199556 - RNA, 20 nt, Human
uccccacccaggccggggga

SEQ ID NO: 199557 - RNA, 18 nt, Human
ugacugggccagguucuu

SEQ ID NO: 199558 - RNA, 21 nt, Human
ugaggaacaguccagcagcca

SEQ ID NO: 199559 - RNA, 27 nt, Human
ugcgggggcggggaaucuagggggcac

SEQ ID NO: 199560 - RNA, 18 nt, Human
ugggaaggguguugucuc

SEQ ID NO: 199561 - RNA, 22 nt, Human
ugggcuuggcagguuucugguc

SEQ ID NO: 199562 - RNA, 27 nt, Human
ugguggagugggccugucacauggggu

SEQ ID NO: 199563 - RNA, 21 nt, Human
uuaaaucgcucccagcucgca

SEQ ID NO: 199564 - RNA, 23 nt, Human
uucuuugggaacccugguggagu

SEQ ID NO: 199565 - RNA, 24 nt, Human
uugucucuaggggccucucagcag

SEQ ID NO: 199566 - RNA, 19 nt, Human
aaaacacauaagucuaugc

SEQ ID NO: 199567 - RNA, 21 nt, Human
aaauaaucuacagucuaaaac

SEQ ID NO: 199568 - RNA, 22 nt, Human
aagaagaaaggaaguggauuaa

SEQ ID NO: 199569 - RNA, 20 nt, Human
aagaagaagaaaggaagugg

SEQ ID NO: 199570 - RNA, 22 nt, Human
aagaagaagaaaggaaguggaa

SEQ ID NO: 199571 - RNA, 22 nt, Human
aaggaccgggaggaggaaacag

SEQ ID NO: 199572 - RNA, 19 nt, Human
acuuuccccuuuuccuauu

SEQ ID NO: 199573 - RNA, 19 nt, Human
agaagaagaagaaaggaag

SEQ ID NO: 199574 - RNA, 22 nt, Human
agaggaaaauaggucccucuag

SEQ ID NO: 199575 - RNA, 19 nt, Human
agcgcgggggucgaaagga

SEQ ID NO: 199576 - RNA, 20 nt, Human
aggaaaauaggucccucuag

SEQ ID NO: 199577 - RNA, 20 nt, Human
aguuauuuuuaagaaagucc

SEQ ID NO: 199578 - RNA, 24 nt, Human
auaaaaaagaggaaaauagguccc

SEQ ID NO: 199579 - RNA, 27 nt, Human
auacuuuccccuuuuccuauuauuaaa

SEQ ID NO: 199580 - RNA, 22 nt, Human
caaaacacauaagucuaugcga

SEQ ID NO: 199581 - RNA, 24 nt, Human
cccaauauuuuagaagaagaagaa

SEQ ID NO: 199582 - RNA, 24 nt, Human
ccccuuuuccuauuauuaaagaau

SEQ ID NO: 199583 - RNA, 21 nt, Human
cgaaaggaccgggaggaggaa

SEQ ID NO: 199584 - RNA, 18 nt, Human
cggaagggaccccccccc

SEQ ID NO: 199585 - RNA, 19 nt, Human
ggaagggacccccccccgg

SEQ ID NO: 199586 - RNA, 21 nt, Human
ggagggggcugcugggggggg

SEQ ID NO: 199587 - RNA, 18 nt, Human
ggccaaggagcgcggggg

SEQ ID NO: 199588 - RNA, 23 nt, Human
ggggagggggcugcugggggggg

SEQ ID NO: 199589 - RNA, 20 nt, Human
gucuaaaacauaaaaaagag

SEQ ID NO: 199590 - RNA, 25 nt, Human
uaaauaaucuacagucuaaaacaua

SEQ ID NO: 199591 - RNA, 20 nt, Human
uaccugaauuuuagcaaaac

SEQ ID NO: 199592 - RNA, 19 nt, Human
ugggggagggggcugcugg

SEQ ID NO: 199593 - RNA, 24 nt, Human
ugugugaauuuuaaaagauaaccg

SEQ ID NO: 199594 - RNA, 20 nt, Human
uuccugagauuucauuggaa

SEQ ID NO: 199595 - RNA, 20 nt, Human
aaaaagcccaccaguuuuca

SEQ ID NO: 199596 - RNA, 20 nt, Human
aacaucuccaaagcagaugc

SEQ ID NO: 199597 - RNA, 19 nt, Human
aacuuggaaaggccugaua

SEQ ID NO: 199598 - RNA, 19 nt, Human
aagcaaccucucaggccag

SEQ ID NO: 199599 - RNA, 18 nt, Human
aagcaaguucagcagaga

SEQ ID NO: 199600 - RNA, 23 nt, Human
acacgccggaccccccccccccc

SEQ ID NO: 199601 - RNA, 24 nt, Human
acacuaggagacuccaaaauaaaa

SEQ ID NO: 199602 - RNA, 19 nt, Human
accaccaccuccagcccuu

SEQ ID NO: 199603 - RNA, 22 nt, Human
acccuccucugagcccagaggc

SEQ ID NO: 199604 - RNA, 22 nt, Human
acuagccccugagccuccccua

SEQ ID NO: 199605 - RNA, 22 nt, Human
agaccuccagguugccccccag

SEQ ID NO: 199606 - RNA, 30 nt, Human
agagaagagacacaagggggagaagaggaa

SEQ ID NO: 199607 - RNA, 24 nt, Human
agccccugagccuccccuaguccc

SEQ ID NO: 199608 - RNA, 22 nt, Human
agccuggguaccaccuucucug

SEQ ID NO: 199609 - RNA, 22 nt, Human
aggagaagcaaguucagcagag

SEQ ID NO: 199610 - RNA, 20 nt, Human
aggcaaaaaaaaaaaaauca

SEQ ID NO: 199611 - RNA, 21 nt, Human
aggccgguucugaccaggaag

SEQ ID NO: 199612 - RNA, 23 nt, Human
agggggaagggaaggagcuccag

SEQ ID NO: 199613 - RNA, 21 nt, Human
agguauuccuguugacugagg

SEQ ID NO: 199614 - RNA, 24 nt, Human
agugcuuuccaaaagagaaaauua

SEQ ID NO: 199615 - RNA, 24 nt, Human
auaaaaaaauaaauaaagacuaua

SEQ ID NO: 199616 - RNA, 25 nt, Human
caaaauaaaagcaucaucaacaccc

SEQ ID NO: 199617 - RNA, 18 nt, Human
caacucuucaccaucacu

SEQ ID NO: 199618 - RNA, 20 nt, Human
caccacucucccaccaggaa

SEQ ID NO: 199619 - RNA, 21 nt, Human
caccuccccucucugcccccc

SEQ ID NO: 199620 - RNA, 22 nt, Human
cacgccggaccccccccccccc

SEQ ID NO: 199621 - RNA, 18 nt, Human
cagagcuccacagucucu

SEQ ID NO: 199622 - RNA, 19 nt, Human
cagagcuccacagucucuc

SEQ ID NO: 199623 - RNA, 23 nt, Human
cagaugcugagaaaaaaaagccc

SEQ ID NO: 199624 - RNA, 23 nt, Human
caggcagauggaacaaggggugg

SEQ ID NO: 199625 - RNA, 18 nt, Human
cagguaccaccaccucca

SEQ ID NO: 199626 - RNA, 18 nt, Human
caguggcccuguggggcc

SEQ ID NO: 199627 - RNA, 24 nt, Human
caucacuuuucauaaaaccuccau

SEQ ID NO: 199628 - RNA, 21 nt, Human
cauucagccucgugccgaauu

SEQ ID NO: 199629 - RNA, 20 nt, Human
ccaaagcagaugcugagaaa

SEQ ID NO: 199630 - RNA, 23 nt, Human
ccaauaugauguggauuccuuuc

SEQ ID NO: 199631 - RNA, 20 nt, Human
ccacuucccaccacucuccc

SEQ ID NO: 199632 - RNA, 21 nt, Human
ccacuucccaccacucuccca

SEQ ID NO: 199633 - RNA, 23 nt, Human
ccacuucccaccacucucccacc

SEQ ID NO: 199634 - RNA, 22 nt, Human
ccagaggcuucuaugcuuccag

SEQ ID NO: 199635 - RNA, 20 nt, Human
ccagggggaagggaaggagc

SEQ ID NO: 199636 - RNA, 20 nt, Human
ccaggucucucccggaccug

SEQ ID NO: 199637 - RNA, 23 nt, Human
cccaagcaaagucuagccugaag

SEQ ID NO: 199638 - RNA, 23 nt, Human
cccaccaggaagacaacaacagc

SEQ ID NO: 199639 - RNA, 23 nt, Human
cccacccuuccuucaccgucugu

SEQ ID NO: 199640 - RNA, 20 nt, Human
ccccaaagcaaauaagaaac

SEQ ID NO: 199641 - RNA, 21 nt, Human
ccccaaagcaaauaagaaaca

SEQ ID NO: 199642 - RNA, 24 nt, Human
ccccacauggagcaggauuguguc

SEQ ID NO: 199643 - RNA, 23 nt, Human
cccccaccuccccucucugcccc

SEQ ID NO: 199644 - RNA, 25 nt, Human
ccccccagagcuccacagucucucu

SEQ ID NO: 199645 - RNA, 20 nt, Human
ccccccccaccuccccucuc

SEQ ID NO: 199646 - RNA, 26 nt, Human
cccccccccaccuccccucucugccc

SEQ ID NO: 199647 - RNA, 20 nt, Human
ccccccccccccaccucccc

SEQ ID NO: 199648 - RNA, 18 nt, Human
cccccccccccccaccuc

SEQ ID NO: 199649 - RNA, 24 nt, Human
ccccccuccuccggggucuguucc

SEQ ID NO: 199650 - RNA, 23 nt, Human
cccucaggaccggacauuggcaa

SEQ ID NO: 199651 - RNA, 24 nt, Human
cccugaggcaaaaaaaaaaaaauc

SEQ ID NO: 199652 - RNA, 19 nt, Human
ccggaccccccccccccca

SEQ ID NO: 199653 - RNA, 27 nt, Human
ccuagucccucucguccaucucucccc

SEQ ID NO: 199654 - RNA, 24 nt, Human
ccucguccugucucgucuuccucu

SEQ ID NO: 199655 - RNA, 21 nt, Human
ccucuacccccacucccgggc

SEQ ID NO: 199656 - RNA, 21 nt, Human
ccuggguaccaccuucucugg

SEQ ID NO: 199657 - RNA, 25 nt, Human
cggacccccccccccccaccucccc

SEQ ID NO: 199658 - RNA, 24 nt, Human
cguccaucucuccuccccaacucu

SEQ ID NO: 199659 - RNA, 25 nt, Human
cuaaaagcaacaggcaggagaagca

SEQ ID NO: 199660 - RNA, 21 nt, Human
cuagccccugagccuccccua

SEQ ID NO: 199661 - RNA, 18 nt, Human
cuagccugaaggaaaacc

SEQ ID NO: 199662 - RNA, 24 nt, Human
cuaggagacuccaaaauaaaagca

SEQ ID NO: 199663 - RNA, 19 nt, Human
cuaugcuuccagccuuugc

SEQ ID NO: 199664 - RNA, 22 nt, Human
cuccggggucuguuccaagcgg

SEQ ID NO: 199665 - RNA, 21 nt, Human
cucguccaucucuccucccca

SEQ ID NO: 199666 - RNA, 18 nt, Human
cucuuccuccccaucccc

SEQ ID NO: 199667 - RNA, 23 nt, Human
cugagaaaaaaaagcccaccagu

SEQ ID NO: 199668 - RNA, 18 nt, Human
cugccccccuccuccggg

SEQ ID NO: 199669 - RNA, 26 nt, Human
cugccucguccugucucgucuuccuc

SEQ ID NO: 199670 - RNA, 23 nt, Human
cuggcuccucuuuucagaccucc

SEQ ID NO: 199671 - RNA, 19 nt, Human
cuguccauggcccugcugc

SEQ ID NO: 199672 - RNA, 21 nt, Human
cuucccaccacucucccacca

SEQ ID NO: 199673 - RNA, 22 nt, Human
cuugguagugcuggagcccugg

SEQ ID NO: 199674 - RNA, 20 nt, Human
cuugugagguauccucucca

SEQ ID NO: 199675 - RNA, 23 nt, Human
cuuucaagacugccuagauguag

SEQ ID NO: 199676 - RNA, 19 nt, Human
gaagacaacaacagccuga

SEQ ID NO: 199677 - RNA, 21 nt, Human
gagaagcaaguucagcagaga

SEQ ID NO: 199678 - RNA, 22 nt, Human
gcagaugcugagaaaaaaaagc

SEQ ID NO: 199679 - RNA, 19 nt, Human
gccggaccccccccccccc

SEQ ID NO: 199680 - RNA, 22 nt, Human
gccugggcaguggguggcaacu

SEQ ID NO: 199681 - RNA, 23 nt, Human
gcucaagggaggggacacuagga

SEQ ID NO: 199682 - RNA, 18 nt, Human
ggaaaaccaaaggucucc

SEQ ID NO: 199683 - RNA, 19 nt, Human
ggagaagaggacuggggcu

SEQ ID NO: 199684 - RNA, 19 nt, Human
ggaggggacacuaggagac

SEQ ID NO: 199685 - RNA, 20 nt, Human
ggcagccaguggcccugugg

SEQ ID NO: 199686 - RNA, 19 nt, Human
ggccccacauggagcagga

SEQ ID NO: 199687 - RNA, 24 nt, Human
ggccugggcaguggguggcaacuu

SEQ ID NO: 199688 - RNA, 24 nt, Human
gggagaagaggacuggggcucgaa

SEQ ID NO: 199689 - RNA, 18 nt, Human
gggguggaagacuuaaaa

SEQ ID NO: 199690 - RNA, 23 nt, Human
guuuuuucuuuuccccuccccaa

SEQ ID NO: 199691 - RNA, 21 nt, Human
uaaaaaaauaaauaaagacua

SEQ ID NO: 199692 - RNA, 23 nt, Human
uaaaagcaacaggcaggagaagc

SEQ ID NO: 199693 - RNA, 18 nt, Human
uaaccucaagagccagcu

SEQ ID NO: 199694 - RNA, 20 nt, Human
uagauguagaaucuaguggc

SEQ ID NO: 199695 - RNA, 25 nt, Human
uagccccugagccuccccuaguccc

SEQ ID NO: 199696 - RNA, 21 nt, Human
uaggauuuuguguauuuguuc

SEQ ID NO: 199697 - RNA, 23 nt, Human
uaggucucuugcccaagcaaagu

SEQ ID NO: 199698 - RNA, 19 nt, Human
ucaccgucuguuuucuuug

SEQ ID NO: 199699 - RNA, 18 nt, Human
ucauuuccacuaaaaaau

SEQ ID NO: 199700 - RNA, 22 nt, Human
uccacuucccaccacucuccca

SEQ ID NO: 199701 - RNA, 19 nt, Human
uccagguugccccccagag

SEQ ID NO: 199702 - RNA, 20 nt, Human
ucccaccacucucccaccag

SEQ ID NO: 199703 - RNA, 20 nt, Human
ucccccaaagcaaauaagaa

SEQ ID NO: 199704 - RNA, 19 nt, Human
uccccucucugccccccuc

SEQ ID NO: 199705 - RNA, 21 nt, Human
ucccuccaucucucccaacuc

SEQ ID NO: 199706 - RNA, 23 nt, Human
uccucugagcccagaggcuucua

SEQ ID NO: 199707 - RNA, 18 nt, Human
ucucccaacucuucacca

SEQ ID NO: 199708 - RNA, 19 nt, Human
ucuccuaaaagcaacaggc

SEQ ID NO: 199709 - RNA, 20 nt, Human
ucucguccaucucuccuccc

SEQ ID NO: 199710 - RNA, 20 nt, Human
ucucguccaucucuccuccc

SEQ ID NO: 199711 - RNA, 25 nt, Human
ucucguccaucucuccuccccaacu

SEQ ID NO: 199712 - RNA, 22 nt, Human
ucucgucuuccucuacccccac

SEQ ID NO: 199713 - RNA, 22 nt, Human
ucucuagguuagaaacagaggu

SEQ ID NO: 199714 - RNA, 22 nt, Human
ucucucucuuccuccccauccc

SEQ ID NO: 199715 - RNA, 19 nt, Human
ucucucuuccuccccaucc

SEQ ID NO: 199716 - RNA, 20 nt, Human
ucucuugcccaagcaaaguc

SEQ ID NO: 199717 - RNA, 18 nt, Human
ugaaaagggaacugacau

SEQ ID NO: 199718 - RNA, 20 nt, Human
ugaaaagggaacugacauca

SEQ ID NO: 199719 - RNA, 20 nt, Human
ugacacgccggacccccccc

SEQ ID NO: 199720 - RNA, 19 nt, Human
ugagaaaaaaaagcccacc

SEQ ID NO: 199721 - RNA, 21 nt, Human
ugagaaaaaaaagcccaccag

SEQ ID NO: 199722 - RNA, 22 nt, Human
ugaggcaaaaaaaaaaaaauca

SEQ ID NO: 199723 - RNA, 21 nt, Human
ugagguauccucuccacuucc

SEQ ID NO: 199724 - RNA, 23 nt, Human
ugauguggauuccuuuccgaugg

SEQ ID NO: 199725 - RNA, 20 nt, Human
ugccagaaaaauaaagauuc

SEQ ID NO: 199726 - RNA, 19 nt, Human
ugcugagaaaaaaaagccc

SEQ ID NO: 199727 - RNA, 21 nt, Human
uggggucaucuccaauaugau

SEQ ID NO: 199728 - RNA, 23 nt, Human
ugucucgucuuccucuaccccca

SEQ ID NO: 199729 - RNA, 24 nt, Human
ugucucgucuuccucuacccccac

SEQ ID NO: 199730 - RNA, 22 nt, Human
ugugccagaaaaauaaagauuc

SEQ ID NO: 199731 - RNA, 20 nt, Human
uucaagacugccuagaugua

SEQ ID NO: 199732 - RNA, 25 nt, Human
uucaagacugccuagauguagaauc

SEQ ID NO: 199733 - RNA, 25 nt, Human
uuccacuaaaaaauaaaaaaauaaa

SEQ ID NO: 199734 - RNA, 18 nt, Human
uucucgugccugccugug

SEQ ID NO: 199735 - RNA, 19 nt, Human
uugccuccuuccaagucgg

SEQ ID NO: 199736 - RNA, 20 nt, Human
uuggaaaacuuuaaucucau

SEQ ID NO: 199737 - RNA, 21 nt, Human
uugguagugcuggagcccugg

SEQ ID NO: 199738 - RNA, 24 nt, Human
uuucugggcacgcaguuggugcug

SEQ ID NO: 199739 - RNA, 21 nt, Human
uuuuucccuccaucucuccca

SEQ ID NO: 199740 - RNA, 27 nt, Human
uuuuuucuuuuccccuccccaacaucu

SEQ ID NO: 199741 - RNA, 18 nt, Human
aaacaaauaccaaaagcg

SEQ ID NO: 199742 - RNA, 18 nt, Human
aaacucaaaauacagcga

SEQ ID NO: 199743 - RNA, 19 nt, Human
aaagacugcaaccacagaa

SEQ ID NO: 199744 - RNA, 20 nt, Human
aacacagauggggaggggag

SEQ ID NO: 199745 - RNA, 23 nt, Human
aagcuacaaacaaauaccaaaag

SEQ ID NO: 199746 - RNA, 28 nt, Human
aauaacaagauaaccaguccaggagaga

SEQ ID NO: 199747 - RNA, 21 nt, Human
aauacacaagacauuuugcac

SEQ ID NO: 199748 - RNA, 21 nt, Human
acacuggcggauuugggacaa

SEQ ID NO: 199749 - RNA, 18 nt, Human
accucaacugcugccccu

SEQ ID NO: 199750 - RNA, 21 nt, Human
agauggguaagggagagaugg

SEQ ID NO: 199751 - RNA, 22 nt, Human
agcggggaggauuggaggggcc

SEQ ID NO: 199752 - RNA, 20 nt, Human
aguccaggagagagggagcc

SEQ ID NO: 199753 - RNA, 19 nt, Human
aguugggagcauggaaggg

SEQ ID NO: 199754 - RNA, 21 nt, Human
auaauaacaagauaaccaguc

SEQ ID NO: 199755 - RNA, 24 nt, Human
augcacuguacuucguuuugcuau

SEQ ID NO: 199756 - RNA, 21 nt, Human
augggggggggguuggggggg

SEQ ID NO: 199757 - RNA, 22 nt, Human
caaaagcgaaucacugagacag

SEQ ID NO: 199758 - RNA, 23 nt, Human
cacaggaagaccuaagaccaaac

SEQ ID NO: 199759 - RNA, 21 nt, Human
cacccuaggaccaagccccua

SEQ ID NO: 199760 - RNA, 18 nt, Human
caccuaaugacgauccga

SEQ ID NO: 199761 - RNA, 19 nt, Human
caccucaacugcugccccu

SEQ ID NO: 199762 - RNA, 20 nt, Human
cacuaccccaccucaacugc

SEQ ID NO: 199763 - RNA, 21 nt, Human
cagcaggaacuuaaaucucac

SEQ ID NO: 199764 - RNA, 18 nt, Human
cagcucagcuugacccca

SEQ ID NO: 199765 - RNA, 23 nt, Human
ccacagacacaaacauucagaaa

SEQ ID NO: 199766 - RNA, 23 nt, Human
ccagaccaggccuuguggggccu

SEQ ID NO: 199767 - RNA, 19 nt, Human
ccaggagagagggagccac

SEQ ID NO: 199768 - RNA, 22 nt, Human
ccaguccaggagagagggagcc

SEQ ID NO: 199769 - RNA, 24 nt, Human
cccauggauucacagagaaauaca

SEQ ID NO: 199770 - RNA, 24 nt, Human
ccccaccucaacugcugccccuua

SEQ ID NO: 199771 - RNA, 22 nt, Human
cccuuugguccucccuagcccc

SEQ ID NO: 199772 - RNA, 22 nt, Human
ccucccuagccccuucccaccc

SEQ ID NO: 199773 - RNA, 18 nt, Human
ccuucccacccuaggacc

SEQ ID NO: 199774 - RNA, 22 nt, Human
ccuucccacccuaggaccaagc

SEQ ID NO: 199775 - RNA, 23 nt, Human
cgaagccagcucagcuugacccc

SEQ ID NO: 199776 - RNA, 20 nt, Human
cgaaucacugagacaggccc

SEQ ID NO: 199777 - RNA, 20 nt, Human
cggcacuaccccaccucaac

SEQ ID NO: 199778 - RNA, 24 nt, Human
cuagccagacccauggauucacag

SEQ ID NO: 199779 - RNA, 19 nt, Human
cucaaaauacagcgaucau

SEQ ID NO: 199780 - RNA, 22 nt, Human
cucagcuugaccccacugcggc

SEQ ID NO: 199781 - RNA, 21 nt, Human
cucuugggccgcugggcuccu

SEQ ID NO: 199782 - RNA, 21 nt, Human
cugaaacucaaaauacagcga

SEQ ID NO: 199783 - RNA, 20 nt, Human
cugcaaccacagacacaaac

SEQ ID NO: 199784 - RNA, 19 nt, Human
cugcugccccuuacagaag

SEQ ID NO: 199785 - RNA, 18 nt, Human
cuuuuuuuuuuuuuuucc

SEQ ID NO: 199786 - RNA, 24 nt, Human
gaauuucuuuuuuuuuuuuuuucc

SEQ ID NO: 199787 - RNA, 23 nt, Human
gacaagcagaagggaguugggag

SEQ ID NO: 199788 - RNA, 23 nt, Human
gagcggggaggauuggaggggcc

SEQ ID NO: 199789 - RNA, 18 nt, Human
gcagagcggggaggauug

SEQ ID NO: 199790 - RNA, 24 nt, Human
gcgaauuucuuuuuuuuuuuuuuu

SEQ ID NO: 199791 - RNA, 22 nt, Human
gcggcagagcggggaggauugg

SEQ ID NO: 199792 - RNA, 19 nt, Human
gcggcggcagagcggggag

SEQ ID NO: 199793 - RNA, 23 nt, Human
ggaaagcuacaaacaaauaccaa

SEQ ID NO: 199794 - RNA, 24 nt, Human
ggaggggccagggcuggggguggc

SEQ ID NO: 199795 - RNA, 19 nt, Human
ggccuacccaggcagcagg

SEQ ID NO: 199796 - RNA, 24 nt, Human
gggaggauuggaggggccagggcc

SEQ ID NO: 199797 - RNA, 18 nt, Human
gggccagggcugggggug

SEQ ID NO: 199798 - RNA, 25 nt, Human
gggcguuagggaaucacgugcuuuu

SEQ ID NO: 199799 - RNA, 22 nt, Human
ggggguuggggggguggggggc

SEQ ID NO: 199800 - RNA, 20 nt, Human
gggguggggggcguuaggga

SEQ ID NO: 199801 - RNA, 19 nt, Human
gggguuggggggguggggg

SEQ ID NO: 199802 - RNA, 24 nt, Human
uaacaauaauaacaagauaaccag

SEQ ID NO: 199803 - RNA, 19 nt, Human
uaugcggccaaauaugggg

SEQ ID NO: 199804 - RNA, 23 nt, Human
uauguaugcggccaaauaugggg

SEQ ID NO: 199805 - RNA, 23 nt, Human
ucaauaccaucccuuugguccuc

SEQ ID NO: 199806 - RNA, 22 nt, Human
uccaggaaagcuacaaacaaau

SEQ ID NO: 199807 - RNA, 20 nt, Human
ucccuagccccuucccaccc

SEQ ID NO: 199808 - RNA, 21 nt, Human
ucuccgaagccagcucagcuu

SEQ ID NO: 199809 - RNA, 18 nt, Human
ucuucuuucucucuucuc

SEQ ID NO: 199810 - RNA, 22 nt, Human
ucuuuuuuuuuuuuuuuccugg

SEQ ID NO: 199811 - RNA, 21 nt, Human
ugaaaagggacuccaucuccg

SEQ ID NO: 199812 - RNA, 18 nt, Human
ugaaacucaaaauacagc

SEQ ID NO: 199813 - RNA, 22 nt, Human
ugaggagggaggaggaggagaa

SEQ ID NO: 199814 - RNA, 29 nt, Human
ugaggagggaggaggaggagaaugaagua

SEQ ID NO: 199815 - RNA, 19 nt, Human
ugauuuguggaucgugguc

SEQ ID NO: 199816 - RNA, 24 nt, Human
ugcaaccacagacacaaacauuca

SEQ ID NO: 199817 - RNA, 18 nt, Human
ugcacugaggaucauuuu

SEQ ID NO: 199818 - RNA, 19 nt, Human
uggaagcaagauggguaag

SEQ ID NO: 199819 - RNA, 22 nt, Human
uggaagcaagauggguaaggga

SEQ ID NO: 199820 - RNA, 22 nt, Human
uggaggggccagggcugggggu

SEQ ID NO: 199821 - RNA, 19 nt, Human
uggcacgggcucuugggcc

SEQ ID NO: 199822 - RNA, 19 nt, Human
ugggcuccucugggcgggc

SEQ ID NO: 199823 - RNA, 21 nt, Human
ugggggaaagacugcaaccac

SEQ ID NO: 199824 - RNA, 19 nt, Human
ugggggggggguugggggg

SEQ ID NO: 199825 - RNA, 22 nt, Human
ugguccucccuagccccuuccc

SEQ ID NO: 199826 - RNA, 24 nt, Human
uguggggccuacccaggcagcagg

SEQ ID NO: 199827 - RNA, 21 nt, Human
uuaaacaugcgaauuucuuuu

SEQ ID NO: 199828 - RNA, 22 nt, Human
uuguggggccuacccaggcagc

SEQ ID NO: 199829 - RNA, 23 nt, Human
uuguggggccuacccaggcagca

SEQ ID NO: 199830 - RNA, 26 nt, Human
uuucuuuuuuuuuuuuuuuccugggg

SEQ ID NO: 199831 - RNA, 20 nt, Human
uuuuuuuuuuuccugggggg

SEQ ID NO: 199832 - RNA, 19 nt, Human
aagacuacaaacacaacac

SEQ ID NO: 199833 - RNA, 24 nt, Human
aaggaguauucaguuucuucuuca

SEQ ID NO: 199834 - RNA, 19 nt, Human
acaaacacaacacauagaa

SEQ ID NO: 199835 - RNA, 27 nt, Human
acccgagagccuuccuucccgggucuc

SEQ ID NO: 199836 - RNA, 22 nt, Human
acgcccguggcuccccacaggc

SEQ ID NO: 199837 - RNA, 20 nt, Human
acugaaguacaaaaauauca

SEQ ID NO: 199838 - RNA, 21 nt, Human
agcuaagacaagacuacaaac

SEQ ID NO: 199839 - RNA, 20 nt, Human
aggaaggaaggaguauucag

SEQ ID NO: 199840 - RNA, 20 nt, Human
aggccuuuccccucgcgucc

SEQ ID NO: 199841 - RNA, 18 nt, Human
aguggcuuuggggagggg

SEQ ID NO: 199842 - RNA, 23 nt, Human
aucaucaucaucaucaucgaagu

SEQ ID NO: 199843 - RNA, 20 nt, Human
cacccgccgggagcugugcg

SEQ ID NO: 199844 - RNA, 21 nt, Human
cacguccagagcuaagacaag

SEQ ID NO: 199845 - RNA, 22 nt, Human
cagagcuaagacaagacuacaa

SEQ ID NO: 199846 - RNA, 20 nt, Human
cagcgaaucuaccauugaac

SEQ ID NO: 199847 - RNA, 25 nt, Human
cagcuuccagauaauauugucccuu

SEQ ID NO: 199848 - RNA, 19 nt, Human
caggccuuuccccucgcgu

SEQ ID NO: 199849 - RNA, 21 nt, Human
caucuuuauuauuguuguugu

SEQ ID NO: 199850 - RNA, 24 nt, Human
ccacaggccuuuccccucgcgucc

SEQ ID NO: 199851 - RNA, 19 nt, Human
ccccacccgagagccuucc

SEQ ID NO: 199852 - RNA, 19 nt, Human
ccccgccugucugcgccgg

SEQ ID NO: 199853 - RNA, 22 nt, Human
cccgagagccuuccuucccggg

SEQ ID NO: 199854 - RNA, 25 nt, Human
ccgccggguuuaugauuuguugugu

SEQ ID NO: 199855 - RNA, 22 nt, Human
ccuccggauuuaaaggaauggg

SEQ ID NO: 199856 - RNA, 21 nt, Human
ccucucucguccucucucucu

SEQ ID NO: 199857 - RNA, 20 nt, Human
cgacagggacaagagcauuu

SEQ ID NO: 199858 - RNA, 23 nt, Human
cgaguagugaggccucagagcac

SEQ ID NO: 199859 - RNA, 22 nt, Human
cggccgcugcugcuccgccggg

SEQ ID NO: 199860 - RNA, 23 nt, Human
cgggaaggaagggcgcgcgggau

SEQ ID NO: 199861 - RNA, 23 nt, Human
cgggggcguccaggagagcgcug

SEQ ID NO: 199862 - RNA, 24 nt, Human
cgggggcguccaggagagcgcugg

SEQ ID NO: 199863 - RNA, 22 nt, Human
cuaagacaagacuacaaacaca

SEQ ID NO: 199864 - RNA, 21 nt, Human
cucuuuugcucuaucgagcug

SEQ ID NO: 199865 - RNA, 22 nt, Human
cugaaggacgacagugcuccga

SEQ ID NO: 199866 - RNA, 21 nt, Human
cuuuauuauuguuguuguugu

SEQ ID NO: 199867 - RNA, 22 nt, Human
gagacgacaggucugggaucaa

SEQ ID NO: 199868 - RNA, 22 nt, Human
gagccguugcuuccccuucucu

SEQ ID NO: 199869 - RNA, 18 nt, Human
gagcgcugggccccgccu

SEQ ID NO: 199870 - RNA, 20 nt, Human
gagcugauacugaaguacaa

SEQ ID NO: 199871 - RNA, 18 nt, Human
gagcugugcgggcggggg

SEQ ID NO: 199872 - RNA, 18 nt, Human
ggaaggaagggcgcgcgg

SEQ ID NO: 199873 - RNA, 19 nt, Human
ggcuuuggggagggggugg

SEQ ID NO: 199874 - RNA, 19 nt, Human
ucagagcacccgccgggag

SEQ ID NO: 199875 - RNA, 20 nt, Human
ucuccuggcucccccacccg

SEQ ID NO: 199876 - RNA, 19 nt, Human
ucucucguccucucucucu

SEQ ID NO: 199877 - RNA, 19 nt, Human
ucucucguccucucucucu

SEQ ID NO: 199878 - RNA, 22 nt, Human
ucucuuuugcucuaucgagcug

SEQ ID NO: 199879 - RNA, 25 nt, Human
ucugggaucagggagucuucaaggc

SEQ ID NO: 199880 - RNA, 23 nt, Human
ugaucaggcugaggcgaguuccu

SEQ ID NO: 199881 - RNA, 21 nt, Human
ugcuccuuccaguggcuuugg

SEQ ID NO: 199882 - RNA, 20 nt, Human
ugcuuccaggaaacaucaag

SEQ ID NO: 199883 - RNA, 21 nt, Human
uggacaaaaugagacgcgaca

SEQ ID NO: 199884 - RNA, 19 nt, Human
ugggaggggaggcgcgcgc

SEQ ID NO: 199885 - RNA, 18 nt, Human
uggggagggggugggaga

SEQ ID NO: 199886 - RNA, 19 nt, Human
uggggagggggugggagag

SEQ ID NO: 199887 - RNA, 21 nt, Human
uggguggggaggaaggaagga

SEQ ID NO: 199888 - RNA, 20 nt, Human
uugcucugcuuccaggaaac

SEQ ID NO: 199889 - RNA, 18 nt, Human
aaaaaaaccaaaccugac

SEQ ID NO: 199890 - RNA, 21 nt, Human
aaaaaaccaaaccugacagac

SEQ ID NO: 199891 - RNA, 21 nt, Human
aagcaagcagcagcagcaagg

SEQ ID NO: 199892 - RNA, 18 nt, Human
aagcagcagcagcaaggc

SEQ ID NO: 199893 - RNA, 27 nt, Human
aagcagcagcagcaaggcgcuugggaa

SEQ ID NO: 199894 - RNA, 21 nt, Human
agaaaaggggagguaaauucc

SEQ ID NO: 199895 - RNA, 18 nt, Human
agcauggggcugggggac

SEQ ID NO: 199896 - RNA, 28 nt, Human
aggcggaggcacaggagggcaggcaacc

SEQ ID NO: 199897 - RNA, 21 nt, Human
auuccagaaagcuacagaaca

SEQ ID NO: 199898 - RNA, 20 nt, Human
cagaauguaaagggagcaug

SEQ ID NO: 199899 - RNA, 24 nt, Human
ccaaaauuucuccuuucucccucc

SEQ ID NO: 199900 - RNA, 18 nt, Human
cccagagcugggcuucuc

SEQ ID NO: 199901 - RNA, 18 nt, Human
ccccuuggugccgcugcu

SEQ ID NO: 199902 - RNA, 24 nt, Human
cccuccuuaaaaaauguuuuuaaa

SEQ ID NO: 199903 - RNA, 20 nt, Human
cccuuucucaugucucuucc

SEQ ID NO: 199904 - RNA, 19 nt, Human
ccuuggugccgcugcuggg

SEQ ID NO: 199905 - RNA, 19 nt, Human
cggaggcacaggagggcag

SEQ ID NO: 199906 - RNA, 18 nt, Human
cgggaagcaagcagcagc

SEQ ID NO: 199907 - RNA, 22 nt, Human
cucccuuucucaugucucuucc

SEQ ID NO: 199908 - RNA, 21 nt, Human
cuccuuucucccuccuuaaaa

SEQ ID NO: 199909 - RNA, 21 nt, Human
gaacagguagauaauguccuu

SEQ ID NO: 199910 - RNA, 19 nt, Human
gauucaguucccagagcug

SEQ ID NO: 199911 - RNA, 18 nt, Human
gccgcugcugggaaggcg

SEQ ID NO: 199912 - RNA, 22 nt, Human
ggaagcaagcagcagcagcaag

SEQ ID NO: 199913 - RNA, 20 nt, Human
ggacgggaagcaagcagcag

SEQ ID NO: 199914 - RNA, 18 nt, Human
gggaaggcggaggcacag

SEQ ID NO: 199915 - RNA, 23 nt, Human
guaaauuccagaaagcuacagaa

SEQ ID NO: 199916 - RNA, 26 nt, Human
uaaacuccuuucauuuaaauaggguu

SEQ ID NO: 199917 - RNA, 24 nt, Human
uaaauuccagaaagcuacagaaca

SEQ ID NO: 199918 - RNA, 18 nt, Human
uacaaaaaaaccaaaccu

SEQ ID NO: 199919 - RNA, 26 nt, Human
uacaaaaaaaccaaaccugacagacu

SEQ ID NO: 199920 - RNA, 22 nt, Human
ucaugucucuuccucugccccc

SEQ ID NO: 199921 - RNA, 23 nt, Human
uccagacccacaguccacaaaga

SEQ ID NO: 199922 - RNA, 22 nt, Human
ucccagagcugggcuucucuuc

SEQ ID NO: 199923 - RNA, 22 nt, Human
ucugcccuuucuccaucccccc

SEQ ID NO: 199924 - RNA, 28 nt, Human
ugguagguuuuggggcucccuaaggccc

SEQ ID NO: 199925 - RNA, 21 nt, Human
uguaaagggagcauggggcug

SEQ ID NO: 199926 - RNA, 21 nt, Human
uguuuuguuuuuuuacuuccc

SEQ ID NO: 199927 - RNA, 18 nt, Human
uuccucugcccuuucucc

SEQ ID NO: 199928 - RNA, 18 nt, Human
uuggugccgcugcuggga

SEQ ID NO: 199929 - RNA, 22 nt, Human
uuguuuuuuguuuuguuuuuuu

SEQ ID NO: 199930 - RNA, 22 nt, Human
uuuacaaagaccuuacaauagc

SEQ ID NO: 199931 - RNA, 24 nt, Human
uuuuuuuuguuuuuuuuuguuuuu

SEQ ID NO: 199932 - RNA, 21 nt, Human
uuuuuuuuuguuuuuuguuuu

SEQ ID NO: 199933 - RNA, 22 nt, Human
aaaacaagcgagacaaucaccc

SEQ ID NO: 199934 - RNA, 18 nt, Human
aaacauuuccugcaacaa

SEQ ID NO: 199935 - RNA, 22 nt, Human
aaagcaaaaaacuucuacugga

SEQ ID NO: 199936 - RNA, 21 nt, Human
aacugaaaacaagcgagacaa

SEQ ID NO: 199937 - RNA, 18 nt, Human
aagcaggagcaagagucu

SEQ ID NO: 199938 - RNA, 18 nt, Human
aagcaggaggccaagccc

SEQ ID NO: 199939 - RNA, 19 nt, Human
aagcuuccaucugaugcuu

SEQ ID NO: 199940 - RNA, 19 nt, Human
aaggcucuacgacccacag

SEQ ID NO: 199941 - RNA, 19 nt, Human
acgacagccaccgacaaag

SEQ ID NO: 199942 - RNA, 21 nt, Human
acgacagccaccgacaaagca

SEQ ID NO: 199943 - RNA, 19 nt, Human
agaacccgggcuugccucc

SEQ ID NO: 199944 - RNA, 18 nt, Human
agaaguaggggagcaggg

SEQ ID NO: 199945 - RNA, 19 nt, Human
agacagcacuggcuuugca

SEQ ID NO: 199946 - RNA, 18 nt, Human
agcucuaggccccucgcc

SEQ ID NO: 199947 - RNA, 19 nt, Human
agggagcuugggaaucgau

SEQ ID NO: 199948 - RNA, 24 nt, Human
aucuuccccauggcccuuggccug

SEQ ID NO: 199949 - RNA, 18 nt, Human
augaagcaggaggccaag

SEQ ID NO: 199950 - RNA, 27 nt, Human
augaagcaggaggccaagcccggcccu

SEQ ID NO: 199951 - RNA, 25 nt, Human
caaagaaaucacgaaacacaagcac

SEQ ID NO: 199952 - RNA, 26 nt, Human
caacuccaugggaaugguauggcaau

SEQ ID NO: 199953 - RNA, 18 nt, Human
caagcccggcccuggggc

SEQ ID NO: 199954 - RNA, 21 nt, Human
caccuaagauaccuucauaaa

SEQ ID NO: 199955 - RNA, 19 nt, Human
cacuugucccggaagggag

SEQ ID NO: 199956 - RNA, 22 nt, Human
ccaaagaaaucacgaaacacaa

SEQ ID NO: 199957 - RNA, 26 nt, Human
ccacccagaacccucccauauaaucg

SEQ ID NO: 199958 - RNA, 23 nt, Human
ccagccacgcagaucugcaucca

SEQ ID NO: 199959 - RNA, 25 nt, Human
ccaggcccaugaagcaggaggccaa

SEQ ID NO: 199960 - RNA, 21 nt, Human
cccaaagaaaucacgaaacac

SEQ ID NO: 199961 - RNA, 20 nt, Human
cccacccagaacccucccau

SEQ ID NO: 199962 - RNA, 25 nt, Human
cccacucccacccagaacccuccca

SEQ ID NO: 199963 - RNA, 21 nt, Human
ccccaaagaaaucacgaaaca

SEQ ID NO: 199964 - RNA, 21 nt, Human
ccccauggcccuuggccugag

SEQ ID NO: 199965 - RNA, 20 nt, Human
cccccaaagaaaucacgaaa

SEQ ID NO: 199966 - RNA, 19 nt, Human
ccccucgcccuccccacuc

SEQ ID NO: 199967 - RNA, 30 nt, Human
ccccuugcaggaucaggagaagcaggagcu

SEQ ID NO: 199968 - RNA, 23 nt, Human
ccucccauauaaucgacaacuga

SEQ ID NO: 199969 - RNA, 24 nt, Human
ccuccccacucccacccagaaccc

SEQ ID NO: 199970 - RNA, 20 nt, Human
cgagagcaagagaagcuacc

SEQ ID NO: 199971 - RNA, 20 nt, Human
cgcccuccccacucccaccc

SEQ ID NO: 199972 - RNA, 21 nt, Human
cgcgcgcacgcaccagccacg

SEQ ID NO: 199973 - RNA, 20 nt, Human
cggggaacggaagguggagg

SEQ ID NO: 199974 - RNA, 18 nt, Human
cuaggccccucgcccucc

SEQ ID NO: 199975 - RNA, 20 nt, Human
cugcaacaccucacucagga

SEQ ID NO: 199976 - RNA, 19 nt, Human
cugccucuagacaucuccc

SEQ ID NO: 199977 - RNA, 27 nt, Human
cugguggguauuugcauuagggguaga

SEQ ID NO: 199978 - RNA, 22 nt, Human
cuucauaaaaccacgugcugcc

SEQ ID NO: 199979 - RNA, 24 nt, Human
cuuggaagagagacucccuucccc

SEQ ID NO: 199980 - RNA, 22 nt, Human
gaacggaagcagagaguaagcu

SEQ ID NO: 199981 - RNA, 23 nt, Human
gaagcaggagcaagagucuacaa

SEQ ID NO: 199982 - RNA, 18 nt, Human
gaaggggacugagaagua

SEQ ID NO: 199983 - RNA, 20 nt, Human
gagagcaagagaagcuacag

SEQ ID NO: 199984 - RNA, 22 nt, Human
gagagcaagagaagcuacaguc

SEQ ID NO: 199985 - RNA, 22 nt, Human
gagccgccaagcccggggcuuc

SEQ ID NO: 199986 - RNA, 19 nt, Human
gagcguugcgcgcuggggc

SEQ ID NO: 199987 - RNA, 19 nt, Human
gauaaaggacuuggaagag

SEQ ID NO: 199988 - RNA, 22 nt, Human
gcagggagagguggcacccgga

SEQ ID NO: 199989 - RNA, 24 nt, Human
gccauuuugccccuuuccuuugca

SEQ ID NO: 199990 - RNA, 18 nt, Human
gcccaccggcuugggggc

SEQ ID NO: 199991 - RNA, 18 nt, Human
gcgcgcacgcaccagcca

SEQ ID NO: 199992 - RNA, 20 nt, Human
gcgcgcacgcaccagccacg

SEQ ID NO: 199993 - RNA, 24 nt, Human
gcgcgcacgcaccagccacgcagu

SEQ ID NO: 199994 - RNA, 20 nt, Human
gcugcaacaccucacucagg

SEQ ID NO: 199995 - RNA, 27 nt, Human
ggacugagaaguaggggagcaggggga

SEQ ID NO: 199996 - RNA, 22 nt, Human
ggcaaugcugcagccuuugggc

SEQ ID NO: 199997 - RNA, 19 nt, Human
gggaaacaucaugcggaau

SEQ ID NO: 199998 - RNA, 19 nt, Human
gggaacggaagguggaggg

SEQ ID NO: 199999 - RNA, 20 nt, Human
gggaacggaagguggaggga

SEQ ID NO: 200000 - RNA, 18 nt, Human
gggguugaccuagcgggg

SEQ ID NO: 200001 - RNA, 19 nt, Human
ggguauuugcauuaggggu

SEQ ID NO: 200002 - RNA, 23 nt, Human
guaagcuuccaucugaugcuuag

SEQ ID NO: 200003 - RNA, 19 nt, Human
guuggugggagguggggag

SEQ ID NO: 200004 - RNA, 26 nt, Human
uagagcucuaggccccucgcccuccu

SEQ ID NO: 200005 - RNA, 21 nt, Human
uagcccaccggcuugggggcu

SEQ ID NO: 200006 - RNA, 25 nt, Human
uaggccccucgcccuccccacuccc

SEQ ID NO: 200007 - RNA, 18 nt, Human
uauggcaaugcugcagcc

SEQ ID NO: 200008 - RNA, 19 nt, Human
uauggcaaugcugcagccu

SEQ ID NO: 200009 - RNA, 23 nt, Human
uccaaaacaaacaauuagagcuc

SEQ ID NO: 200010 - RNA, 18 nt, Human
ucccacccagaacccucc

SEQ ID NO: 200011 - RNA, 21 nt, Human
uccccacucccacccagaacc

SEQ ID NO: 200012 - RNA, 24 nt, Human
uccccacucccacccagaacccuc

SEQ ID NO: 200013 - RNA, 25 nt, Human
uccccacucccacccagaacccucc

SEQ ID NO: 200014 - RNA, 19 nt, Human
ucccggaagggagcuuggg

SEQ ID NO: 200015 - RNA, 25 nt, Human
ucgcccuccccacucccacccagaa

SEQ ID NO: 200016 - RNA, 22 nt, Human
ucuacuggaauguccccuugca

SEQ ID NO: 200017 - RNA, 18 nt, Human
ucugcgugggucgagaag

SEQ ID NO: 200018 - RNA, 21 nt, Human
ucuuuuucuuuuuuucuucca

SEQ ID NO: 200019 - RNA, 18 nt, Human
ugaaaacaagcgagacaa

SEQ ID NO: 200020 - RNA, 24 nt, Human
ugaaaacaagcgagacaaucaccc

SEQ ID NO: 200021 - RNA, 18 nt, Human
ugaaggggacugagaagu

SEQ ID NO: 200022 - RNA, 21 nt, Human
ugaaggggacugagaaguagg

SEQ ID NO: 200023 - RNA, 19 nt, Human
ugagauggggaagagcuag

SEQ ID NO: 200024 - RNA, 23 nt, Human
ugagauggggaagagcuagggag

SEQ ID NO: 200025 - RNA, 20 nt, Human
ugcggaagaaugcagggccg

SEQ ID NO: 200026 - RNA, 18 nt, Human
uggcacccggaccggccu

SEQ ID NO: 200027 - RNA, 20 nt, Human
uggggcgggucuccuuuggc

SEQ ID NO: 200028 - RNA, 21 nt, Human
uggugggagguggggaguagc

SEQ ID NO: 200029 - RNA, 20 nt, Human
uuaaacauuuccugcaacaa

SEQ ID NO: 200030 - RNA, 24 nt, Human
uucccagaagcgcgcgcacgcacc

SEQ ID NO: 200031 - RNA, 20 nt, Human
uucucauucggacucuccug

SEQ ID NO: 200032 - RNA, 20 nt, Human
uugccccuuuccuuugcacg

SEQ ID NO: 200033 - RNA, 22 nt, Human
uugccugacagucugagggcug

SEQ ID NO: 200034 - RNA, 20 nt, Human
uuggugggagguggggagua

SEQ ID NO: 200035 - RNA, 21 nt, Human
uuggugggagguggggaguaa

SEQ ID NO: 200036 - RNA, 20 nt, Human
uuguacuuucuagcccaccg

SEQ ID NO: 200037 - RNA, 18 nt, Human
uuuccugucuacaguggg

SEQ ID NO: 200038 - RNA, 24 nt, Human
uuuuuuuuuuuuuuuuuuuauuuu

SEQ ID NO: 200039 - RNA, 22 nt, Human
aacacaacucccagacagggac

SEQ ID NO: 200040 - RNA, 20 nt, Human
aagauacaacauacagaaua

SEQ ID NO: 200041 - RNA, 25 nt, Human
aagcaguacaaauacgagacuucaa

SEQ ID NO: 200042 - RNA, 25 nt, Human
acaacucccagacagggacaggaca

SEQ ID NO: 200043 - RNA, 28 nt, Human
acacaacucccagacaggggggaacgcc

SEQ ID NO: 200044 - RNA, 21 nt, Human
acacaccacaccccacauccc

SEQ ID NO: 200045 - RNA, 24 nt, Human
acaccccacaucccggccgggugc

SEQ ID NO: 200046 - RNA, 18 nt, Human
acucccacccccaucuau

SEQ ID NO: 200047 - RNA, 22 nt, Human
agaaagcaguacaaauacgaga

SEQ ID NO: 200048 - RNA, 18 nt, Human
agaggaaggagcgggaag

SEQ ID NO: 200049 - RNA, 24 nt, Human
agggaggaggggcggggagaggaa

SEQ ID NO: 200050 - RNA, 21 nt, Human
agggcacacaccacaccccac

SEQ ID NO: 200051 - RNA, 18 nt, Human
aggggcggggagaggaag

SEQ ID NO: 200052 - RNA, 21 nt, Human
agguuuuuuuuucuccauuaa

SEQ ID NO: 200053 - RNA, 19 nt, Human
auaacacaacucccagaca

SEQ ID NO: 200054 - RNA, 23 nt, Human
cacaacucccagacagggacagg

SEQ ID NO: 200055 - RNA, 18 nt, Human
cacaccacaccccacauc

SEQ ID NO: 200056 - RNA, 25 nt, Human
cacaccacaccccacaucccggcac

SEQ ID NO: 200057 - RNA, 23 nt, Human
cacaccagccacacucccacccc

SEQ ID NO: 200058 - RNA, 21 nt, Human
cacaccccacaucccggcacc

SEQ ID NO: 200059 - RNA, 19 nt, Human
caccacaccccacaucccg

SEQ ID NO: 200060 - RNA, 21 nt, Human
caccacaccccacaucccggc

SEQ ID NO: 200061 - RNA, 19 nt, Human
cacgaaccacaggucccuu

SEQ ID NO: 200062 - RNA, 24 nt, Human
cacucccacccccaucuaugaggg

SEQ ID NO: 200063 - RNA, 19 nt, Human
cagcacgaaccacaggucc

SEQ ID NO: 200064 - RNA, 20 nt, Human
cagcacgaaccacagguccc

SEQ ID NO: 200065 - RNA, 21 nt, Human
caggcacaaagggaggagggg

SEQ ID NO: 200066 - RNA, 24 nt, Human
ccagccacacucccacccccaucu

SEQ ID NO: 200067 - RNA, 18 nt, Human
gaagggaggaggagaggc

SEQ ID NO: 200068 - RNA, 18 nt, Human
gagaaaagcagaaagcag

SEQ ID NO: 200069 - RNA, 21 nt, Human
gcacaaagggaggaggggcgg

SEQ ID NO: 200070 - RNA, 19 nt, Human
gccgaacuuuccaaaacgu

SEQ ID NO: 200071 - RNA, 20 nt, Human
ggaagggaggaggagaggcc

SEQ ID NO: 200072 - RNA, 24 nt, Human
ggagaggaaggagcgggaagggag

SEQ ID NO: 200073 - RNA, 20 nt, Human
ggaggaggggcggggagagg

SEQ ID NO: 200074 - RNA, 24 nt, Human
ggaggggugggagaaaagcagaaa

SEQ ID NO: 200075 - RNA, 18 nt, Human
gggaagggaggaggagag

SEQ ID NO: 200076 - RNA, 24 nt, Human
gggaggaggggcggggagaggaag

SEQ ID NO: 200077 - RNA, 21 nt, Human
ggggagaggaaggagcgggaa

SEQ ID NO: 200078 - RNA, 19 nt, Human
ggggcggggagaggaagga

SEQ ID NO: 200079 - RNA, 23 nt, Human
ggugcuaggaggggugggagaaa

SEQ ID NO: 200080 - RNA, 21 nt, Human
gugagugagggcuugacacac

SEQ ID NO: 200081 - RNA, 22 nt, Human
uaaagacauggagaggguuugg

SEQ ID NO: 200082 - RNA, 19 nt, Human
uacgacaaacacacgaaca

SEQ ID NO: 200083 - RNA, 25 nt, Human
uccaaaacgucuauuagucuaagga

SEQ ID NO: 200084 - RNA, 20 nt, Human
uccccuacaagcggauggau

SEQ ID NO: 200085 - RNA, 20 nt, Human
uccucuggaugaaauuucug

SEQ ID NO: 200086 - RNA, 18 nt, Human
ucuaugagggcacacacc

SEQ ID NO: 200087 - RNA, 21 nt, Human
ucucaugcuuuaaguggaagc

SEQ ID NO: 200088 - RNA, 20 nt, Human
ugaaauuucugagauguuac

SEQ ID NO: 200089 - RNA, 25 nt, Human
ugacacacacaccagccacacuccc

SEQ ID NO: 200090 - RNA, 21 nt, Human
ugauucuggaaauuuauuagg

SEQ ID NO: 200091 - RNA, 19 nt, Human
ugcagcaaggaaggaacga

SEQ ID NO: 200092 - RNA, 19 nt, Human
uggaggcucugggugcuac

SEQ ID NO: 200093 - RNA, 19 nt, Human
ugugggggugcuaggaggg

SEQ ID NO: 200094 - RNA, 22 nt, Human
ugugggggugcuaggaggggug

SEQ ID NO: 200095 - RNA, 22 nt, Human
uugacacacacaccagccacaa

SEQ ID NO: 200096 - RNA, 26 nt, Human
uugcuuugcuauguucuauuuuuaau

SEQ ID NO: 200097 - RNA, 24 nt, Human
uuugcuuugcuauguucuauuuuu

SEQ ID NO: 200098 - RNA, 20 nt, Human
aaaaaaaaaagagguaacga

SEQ ID NO: 200099 - RNA, 26 nt, Human
aaauaauuuuccccuccccccgcccc

SEQ ID NO: 200100 - RNA, 25 nt, Human
aaucccaucucccuacugccuccac

SEQ ID NO: 200101 - RNA, 23 nt, Human
acauguacacacgcacucacgca

SEQ ID NO: 200102 - RNA, 23 nt, Human
agcaggguggggagugcacaugg

SEQ ID NO: 200103 - RNA, 19 nt, Human
agcggugggggccagcccu

SEQ ID NO: 200104 - RNA, 18 nt, Human
aggagguuccggaaugga

SEQ ID NO: 200105 - RNA, 21 nt, Human
agugcacauguacacacgcag

SEQ ID NO: 200106 - RNA, 27 nt, Human
cacauguacacacgcacucacgcagug

SEQ ID NO: 200107 - RNA, 22 nt, Human
cacccccuuuccaggcccgguc

SEQ ID NO: 200108 - RNA, 18 nt, Human
caccgauuaagaaauuuc

SEQ ID NO: 200109 - RNA, 19 nt, Human
cacugcuuggaaaaagaug

SEQ ID NO: 200110 - RNA, 19 nt, Human
cagcaagacauugucgccg

SEQ ID NO: 200111 - RNA, 22 nt, Human
caggcgcucacuacugucgccc

SEQ ID NO: 200112 - RNA, 22 nt, Human
ccaccaccccaaucuucaauuu

SEQ ID NO: 200113 - RNA, 19 nt, Human
cccccaaaagggcccgguc

SEQ ID NO: 200114 - RNA, 18 nt, Human
ccccccuuucccuccagg

SEQ ID NO: 200115 - RNA, 20 nt, Human
ccccgcccccaaaagggccc

SEQ ID NO: 200116 - RNA, 19 nt, Human
ccucugggaagggagcagg

SEQ ID NO: 200117 - RNA, 22 nt, Human
cgccccucccccaccuaauccg

SEQ ID NO: 200118 - RNA, 24 nt, Human
cggccacagcggugggggccagcc

SEQ ID NO: 200119 - RNA, 18 nt, Human
cggcggaaagaagacgag

SEQ ID NO: 200120 - RNA, 21 nt, Human
cuccaccaccccaaucuucaa

SEQ ID NO: 200121 - RNA, 19 nt, Human
cuccucuccugccggcucc

SEQ ID NO: 200122 - RNA, 21 nt, Human
cugccuccaccaccccaaucu

SEQ ID NO: 200123 - RNA, 22 nt, Human
cugccuccaccaccccaaucuu

SEQ ID NO: 200124 - RNA, 18 nt, Human
cuuaaaaaaaaaaaaaaa

SEQ ID NO: 200125 - RNA, 18 nt, Human
cuuaaaaaaaaaaaaaaa

SEQ ID NO: 200126 - RNA, 24 nt, Human
cuuaaaaaaaaaaaaaaaagaggu

SEQ ID NO: 200127 - RNA, 22 nt, Human
cuuggccucggcgccaacggug

SEQ ID NO: 200128 - RNA, 18 nt, Human
cuuggcgaagacggaggu

SEQ ID NO: 200129 - RNA, 19 nt, Human
gaaagaagacgaguuagaa

SEQ ID NO: 200130 - RNA, 20 nt, Human
gaagggagcaggguggggag

SEQ ID NO: 200131 - RNA, 24 nt, Human
gccaccaaaaaaauuucacagcaa

SEQ ID NO: 200132 - RNA, 19 nt, Human
gcgucccccccuuucccuc

SEQ ID NO: 200133 - RNA, 22 nt, Human
ggaaaaagauguggaaaccuca

SEQ ID NO: 200134 - RNA, 21 nt, Human
ggggagcucgagaaguuuccg

SEQ ID NO: 200135 - RNA, 18 nt, Human
ggguagaggggggagcuc

SEQ ID NO: 200136 - RNA, 22 nt, Human
gguggaaagaaacgcuugggaa

SEQ ID NO: 200137 - RNA, 25 nt, Human
uaaaauaaaauaauuuuccccuccc

SEQ ID NO: 200138 - RNA, 20 nt, Human
uaggcucgggcggggccuug

SEQ ID NO: 200139 - RNA, 23 nt, Human
uauaaauccaugaaguggggcca

SEQ ID NO: 200140 - RNA, 25 nt, Human
ucacucgccgugcaucagacacuuc

SEQ ID NO: 200141 - RNA, 21 nt, Human
uccaccaccccaaucuucaau

SEQ ID NO: 200142 - RNA, 23 nt, Human
uccaccaccccaaucuucaauuu

SEQ ID NO: 200143 - RNA, 23 nt, Human
ucccaucucccuacugccuccac

SEQ ID NO: 200144 - RNA, 22 nt, Human
ucccuacugccuccaccacccc

SEQ ID NO: 200145 - RNA, 18 nt, Human
uccucuccugccggcucc

SEQ ID NO: 200146 - RNA, 20 nt, Human
ucgccccucccccaccuaau

SEQ ID NO: 200147 - RNA, 25 nt, Human
ucuccugccggcuccggauggaggu

SEQ ID NO: 200148 - RNA, 19 nt, Human
ugcaucagacacuucccuu

SEQ ID NO: 200149 - RNA, 25 nt, Human
ugccaccaaaaaaauuucacagcaa

SEQ ID NO: 200150 - RNA, 24 nt, Human
uggaaaccucaaugcaccgauuaa

SEQ ID NO: 200151 - RNA, 20 nt, Human
uggggcacugcuuggaaaaa

SEQ ID NO: 200152 - RNA, 28 nt, Human
uguacacacgcacucacgcagaggagua

SEQ ID NO: 200153 - RNA, 26 nt, Human
ugucgccccucccccaccuaauccga

SEQ ID NO: 200154 - RNA, 20 nt, Human
uuuacaaaaauccaggcccc

SEQ ID NO: 200155 - RNA, 21 nt, Human
uuuccaggcccggucccuguc

SEQ ID NO: 200156 - RNA, 18 nt, Human
uuuuccccuccccccgcc

SEQ ID NO: 200157 - RNA, 22 nt, Human
aaaaagccuauuccugaugaac

SEQ ID NO: 200158 - RNA, 21 nt, Human
aaacauccauacuccaaucac

SEQ ID NO: 200159 - RNA, 25 nt, Human
accucgcuccuguuuccccuccccc

SEQ ID NO: 200160 - RNA, 21 nt, Human
acuguuuuguaaugcaccagu

SEQ ID NO: 200161 - RNA, 23 nt, Human
agagaggagcccuauuuagcagc

SEQ ID NO: 200162 - RNA, 22 nt, Human
agcagcacggccauggagccuc

SEQ ID NO: 200163 - RNA, 22 nt, Human
aggaaaguaugagcuggacaga

SEQ ID NO: 200164 - RNA, 20 nt, Human
aggagcccuauuuagcagcg

SEQ ID NO: 200165 - RNA, 20 nt, Human
aggcagcaucuacaucuagc

SEQ ID NO: 200166 - RNA, 27 nt, Human
aggcagcucccaccuggccccaggaaa

SEQ ID NO: 200167 - RNA, 18 nt, Human
augcaguuucuugguugg

SEQ ID NO: 200168 - RNA, 21 nt, Human
caaggggcccccacagcacca

SEQ ID NO: 200169 - RNA, 24 nt, Human
caucuacaucuagcuaauugaggg

SEQ ID NO: 200170 - RNA, 19 nt, Human
cauucgggauuccccaacc

SEQ ID NO: 200171 - RNA, 18 nt, Human
ccaccagacuuucuggca

SEQ ID NO: 200172 - RNA, 21 nt, Human
cccacucuccauccccuugga

SEQ ID NO: 200173 - RNA, 23 nt, Human
cccccacagcaccaagguggccu

SEQ ID NO: 200174 - RNA, 19 nt, Human
cccccaucccuccccucuu

SEQ ID NO: 200175 - RNA, 20 nt, Human
cccuccccucuuuucucucc

SEQ ID NO: 200176 - RNA, 21 nt, Human
ccuccccucuuuucucuccac

SEQ ID NO: 200177 - RNA, 21 nt, Human
ccucgcuccuguuuccccucc

SEQ ID NO: 200178 - RNA, 25 nt, Human
ccucuaaaagccuggucauaggaug

SEQ ID NO: 200179 - RNA, 24 nt, Human
ccucuggaaaucaguaaaggugaa

SEQ ID NO: 200180 - RNA, 19 nt, Human
ccucuuuucucuccacccc

SEQ ID NO: 200181 - RNA, 22 nt, Human
ccuuagaaaaaaguucugcuuc

SEQ ID NO: 200182 - RNA, 19 nt, Human
ccuuugaggagggaacugu

SEQ ID NO: 200183 - RNA, 20 nt, Human
cuccccccaucccuccccuc

SEQ ID NO: 200184 - RNA, 22 nt, Human
cuggauggggguggaggcuggg

SEQ ID NO: 200185 - RNA, 24 nt, Human
gaaacauccauacuccaaucacgc

SEQ ID NO: 200186 - RNA, 19 nt, Human
gaaggaaaguaugagcugg

SEQ ID NO: 200187 - RNA, 20 nt, Human
gaagggaagaggcaaggggc

SEQ ID NO: 200188 - RNA, 20 nt, Human
gagaggagcccuauuuagca

SEQ ID NO: 200189 - RNA, 20 nt, Human
gaggcaguggggcaaaggca

SEQ ID NO: 200190 - RNA, 25 nt, Human
gcaaggaggaguagaggucgacagc

SEQ ID NO: 200191 - RNA, 19 nt, Human
gccuuugaggagggaacug

SEQ ID NO: 200192 - RNA, 21 nt, Human
gcgaaggaaaguaugagcugg

SEQ ID NO: 200193 - RNA, 18 nt, Human
ggauuccccaacccugcu

SEQ ID NO: 200194 - RNA, 20 nt, Human
ggcagcucccaccuggcccc

SEQ ID NO: 200195 - RNA, 24 nt, Human
gggacagcgaaggaaaguaugagc

SEQ ID NO: 200196 - RNA, 20 nt, Human
gggcaagcagcgggugggug

SEQ ID NO: 200197 - RNA, 18 nt, Human
guugggauggaguguagg

SEQ ID NO: 200198 - RNA, 23 nt, Human
uaaaaacuccacuugccagaggc

SEQ ID NO: 200199 - RNA, 24 nt, Human
uaaauagauggggcaagcagcggg

SEQ ID NO: 200200 - RNA, 20 nt, Human
uccacauguugacugagaga

SEQ ID NO: 200201 - RNA, 18 nt, Human
uccccccaucccuccccu

SEQ ID NO: 200202 - RNA, 20 nt, Human
uccccucuuuucucuccacc

SEQ ID NO: 200203 - RNA, 20 nt, Human
ucccuccccucuuuucucuc

SEQ ID NO: 200204 - RNA, 19 nt, Human
uccucuagcuuuccucugg

SEQ ID NO: 200205 - RNA, 24 nt, Human
ucuggauggggguggaggcugggg

SEQ ID NO: 200206 - RNA, 23 nt, Human
ucuuuguccuccuuggauuucca

SEQ ID NO: 200207 - RNA, 22 nt, Human
ugagagagcagaacaggggagg

SEQ ID NO: 200208 - RNA, 18 nt, Human
ugccuaaggagugcggga

SEQ ID NO: 200209 - RNA, 19 nt, Human
uggaaaggugacuggacag

SEQ ID NO: 200210 - RNA, 22 nt, Human
uggcaaggugagcgcaaggagg

SEQ ID NO: 200211 - RNA, 18 nt, Human
uggcuggagucuuugucc

SEQ ID NO: 200212 - RNA, 21 nt, Human
ugggaagggaagaggcaaggg

SEQ ID NO: 200213 - RNA, 25 nt, Human
ugggaagggaagaggcaaggggccc

SEQ ID NO: 200214 - RNA, 18 nt, Human
uggggaugggauagggag

SEQ ID NO: 200215 - RNA, 22 nt, Human
uggggcaaaggcagcucccacc

SEQ ID NO: 200216 - RNA, 19 nt, Human
uggggcaagcagcgggugg

SEQ ID NO: 200217 - RNA, 19 nt, Human
uggggguggaggcugggga

SEQ ID NO: 200218 - RNA, 20 nt, Human
ugugaggagucauuccuggg

SEQ ID NO: 200219 - RNA, 20 nt, Human
uguugaagccacgugagucc

SEQ ID NO: 200220 - RNA, 21 nt, Human
uguugagggacccacucucca

SEQ ID NO: 200221 - RNA, 20 nt, Human
uguuuccccuccccccaucc

SEQ ID NO: 200222 - RNA, 19 nt, Human
uguuuguggguuuuuuucc

SEQ ID NO: 200223 - RNA, 21 nt, Human
uguuuguggguuuuuuuccuu

SEQ ID NO: 200224 - RNA, 19 nt, Human
uuaaauacucuucugcacc

SEQ ID NO: 200225 - RNA, 24 nt, Human
uuccucuggaaaucaguaaaggug

SEQ ID NO: 200226 - RNA, 20 nt, Human
uugaagccacgugaguccca

SEQ ID NO: 200227 - RNA, 22 nt, Human
uuuacggaaacauccauacucc

SEQ ID NO: 200228 - RNA, 23 nt, Human
uuugcauucaguacauugucauu

SEQ ID NO: 200229 - RNA, 21 nt, Human
uuuguggguuuuuuuccuuuu

SEQ ID NO: 200230 - RNA, 22 nt, Human
uuuguugagggacccacucucc

SEQ ID NO: 200231 - RNA, 23 nt, Human
uuuuuccuuuuugcauucaguac

SEQ ID NO: 200232 - RNA, 26 nt, Human
aaaaauaauuauaaucauccaaaagc

SEQ ID NO: 200233 - RNA, 19 nt, Human
aacucaacuccugcuccug

SEQ ID NO: 200234 - RNA, 21 nt, Human
aacuccugcuccugcauuccu

SEQ ID NO: 200235 - RNA, 21 nt, Human
aagagccugggagagaggagg

SEQ ID NO: 200236 - RNA, 26 nt, Human
aaucauccaaaagccaaacaaaauua

SEQ ID NO: 200237 - RNA, 21 nt, Human
accuauauauauauauauaua

SEQ ID NO: 200238 - RNA, 19 nt, Human
agcucccaaacucaacucc

SEQ ID NO: 200239 - RNA, 19 nt, Human
agggggcaggaggaagagc

SEQ ID NO: 200240 - RNA, 19 nt, Human
auauauauauauauauaua

SEQ ID NO: 200241 - RNA, 19 nt, Human
auauauauauauauauaua

SEQ ID NO: 200242 - RNA, 19 nt, Human
auauauauauauauauaua

SEQ ID NO: 200243 - RNA, 19 nt, Human
auauauauauauauauaua

SEQ ID NO: 200244 - RNA, 19 nt, Human
auauauauauauauauaua

SEQ ID NO: 200245 - RNA, 19 nt, Human
auauauauauauauauaua

SEQ ID NO: 200246 - RNA, 19 nt, Human
auggggugggggcaggggu

SEQ ID NO: 200247 - RNA, 23 nt, Human
auuaaggagaguugcaagaaggg

SEQ ID NO: 200248 - RNA, 25 nt, Human
caacuccaccugggaggaaaaaaaa

SEQ ID NO: 200249 - RNA, 18 nt, Human
cacccuccccagcugccc

SEQ ID NO: 200250 - RNA, 19 nt, Human
cacucucccucucucccuc

SEQ ID NO: 200251 - RNA, 21 nt, Human
cagcucccaaacucaacuccu

SEQ ID NO: 200252 - RNA, 18 nt, Human
ccacacacacacacauau

SEQ ID NO: 200253 - RNA, 23 nt, Human
cccacccuccccagcugccccca

SEQ ID NO: 200254 - RNA, 25 nt, Human
ccccacccuccccagcugcccccag

SEQ ID NO: 200255 - RNA, 26 nt, Human
ccccacccuccccagcugcccccagc

SEQ ID NO: 200256 - RNA, 23 nt, Human
cccccagcuucggcaacuccacc

SEQ ID NO: 200257 - RNA, 24 nt, Human
cccccgcgagcgcugcugucacuc

SEQ ID NO: 200258 - RNA, 19 nt, Human
ccccuugggggccagaggg

SEQ ID NO: 200259 - RNA, 19 nt, Human
cccgcgagcgcugcuguca

SEQ ID NO: 200260 - RNA, 23 nt, Human
cccucccauccccacccucccca

SEQ ID NO: 200261 - RNA, 20 nt, Human
cccucuggccaugcggccgg

SEQ ID NO: 200262 - RNA, 19 nt, Human
ccucccauccccacccucc

SEQ ID NO: 200263 - RNA, 24 nt, Human
ccucccauccccacccuccccagc

SEQ ID NO: 200264 - RNA, 26 nt, Human
ccucucugccucucucucucccacuc

SEQ ID NO: 200265 - RNA, 19 nt, Human
ccugggagagaggaggggc

SEQ ID NO: 200266 - RNA, 21 nt, Human
cgaggcagggucccagcugga

SEQ ID NO: 200267 - RNA, 20 nt, Human
cggcaacuccaccugggagg

SEQ ID NO: 200268 - RNA, 21 nt, Human
cuccacacacacacacauaua

SEQ ID NO: 200269 - RNA, 20 nt, Human
cucccaaacucaacuccugc

SEQ ID NO: 200270 - RNA, 19 nt, Human
cucccauccccacccuccc

SEQ ID NO: 200271 - RNA, 22 nt, Human
cucccauccccacccuccccag

SEQ ID NO: 200272 - RNA, 21 nt, Human
cuccugcuccugcauuccucc

SEQ ID NO: 200273 - RNA, 18 nt, Human
cucuccccucccaucccc

SEQ ID NO: 200274 - RNA, 21 nt, Human
cucucucucucccacucucuu

SEQ ID NO: 200275 - RNA, 20 nt, Human
cucugccucucucucuccca

SEQ ID NO: 200276 - RNA, 22 nt, Human
cugcccccagcuucggcaacuc

SEQ ID NO: 200277 - RNA, 18 nt, Human
cugccucucucucuccca

SEQ ID NO: 200278 - RNA, 25 nt, Human
cugccucucucucucccacucucuu

SEQ ID NO: 200279 - RNA, 27 nt, Human
cugccucucucucucccacucucuuuc

SEQ ID NO: 200280 - RNA, 19 nt, Human
gaggcagggucccagcugg

SEQ ID NO: 200281 - RNA, 18 nt, Human
gcaggaggaagagccugg

SEQ ID NO: 200282 - RNA, 20 nt, Human
gcauggggugggggcagggg

SEQ ID NO: 200283 - RNA, 24 nt, Human
gccugucucagcuccacacacaca

SEQ ID NO: 200284 - RNA, 18 nt, Human
ggagaguugcaagaaggg

SEQ ID NO: 200285 - RNA, 18 nt, Human
ggcaggaggaagagccug

SEQ ID NO: 200286 - RNA, 21 nt, Human
ggcaggaggaagagccuggga

SEQ ID NO: 200287 - RNA, 23 nt, Human
ggcauggggugggggcaggggug

SEQ ID NO: 200288 - RNA, 21 nt, Human
gggcauggggugggggcaggg

SEQ ID NO: 200289 - RNA, 20 nt, Human
ggggagggugggggcauggg

SEQ ID NO: 200290 - RNA, 19 nt, Human
ggggcauggggugggggca

SEQ ID NO: 200291 - RNA, 23 nt, Human
gggugggggcauggggugggggc

SEQ ID NO: 200292 - RNA, 19 nt, Human
uauauauauauauauauau

SEQ ID NO: 200293 - RNA, 19 nt, Human
uauauauauauauauauau

SEQ ID NO: 200294 - RNA, 19 nt, Human
uauauauauauauauauau

SEQ ID NO: 200295 - RNA, 19 nt, Human
uauauauauauauauauau

SEQ ID NO: 200296 - RNA, 24 nt, Human
ucaacuucugucucuccccuccca

SEQ ID NO: 200297 - RNA, 19 nt, Human
ucacucucccucucucccu

SEQ ID NO: 200298 - RNA, 18 nt, Human
ucagcuccacacacacac

SEQ ID NO: 200299 - RNA, 20 nt, Human
uccacacacacacacauaua

SEQ ID NO: 200300 - RNA, 21 nt, Human
uccacacacacacacauauac

SEQ ID NO: 200301 - RNA, 22 nt, Human
uccacacacacacacauauacu

SEQ ID NO: 200302 - RNA, 19 nt, Human
ucccauccccacccucccc

SEQ ID NO: 200303 - RNA, 22 nt, Human
ucccauccccacccuccccagc

SEQ ID NO: 200304 - RNA, 18 nt, Human
ucugccucucucucuccc

SEQ ID NO: 200305 - RNA, 20 nt, Human
ucuggggguugagcccccgc

SEQ ID NO: 200306 - RNA, 23 nt, Human
ugaagggagcgcccagggcaggu

SEQ ID NO: 200307 - RNA, 21 nt, Human
ugacgucauuucuggaggucu

SEQ ID NO: 200308 - RNA, 23 nt, Human
ugcccccagcuucggcaacucca

SEQ ID NO: 200309 - RNA, 24 nt, Human
ugcccccagcuucggcaacuccac

SEQ ID NO: 200310 - RNA, 19 nt, Human
ugccgagccugucucagcu

SEQ ID NO: 200311 - RNA, 23 nt, Human
ugggagagaggaggggcggaggc

SEQ ID NO: 200312 - RNA, 19 nt, Human
ugggggcaggggugugagu

SEQ ID NO: 200313 - RNA, 18 nt, Human
ugggggccagagggucgg

SEQ ID NO: 200314 - RNA, 32 nt, Human
ugucucagcuccacacacacacacauauagug

SEQ ID NO: 200315 - RNA, 22 nt, Human
ugugaggggagggugggggcau

SEQ ID NO: 200316 - RNA, 21 nt, Human
uuaauuuaaaaaaaauacugc

SEQ ID NO: 200317 - RNA, 22 nt, Human
uucugucucuccccucccaucc

SEQ ID NO: 200318 - RNA, 19 nt, Human
uuugugugugaggggaggg

SEQ ID NO: 200319 - RNA, 23 nt, Human
aaaaggaaaggcgcagggacagg

SEQ ID NO: 200320 - RNA, 18 nt, Human
aacagcaaugggucagga

SEQ ID NO: 200321 - RNA, 22 nt, Human
aagcgcuuuugucuguggggcc

SEQ ID NO: 200322 - RNA, 18 nt, Human
acagcaaagggccucuag

SEQ ID NO: 200323 - RNA, 21 nt, Human
agagaggaaaggcgaaaagga

SEQ ID NO: 200324 - RNA, 23 nt, Human
agagucaauaaauaguuggacaa

SEQ ID NO: 200325 - RNA, 19 nt, Human
aggaacaaaggagagggcc

SEQ ID NO: 200326 - RNA, 18 nt, Human
aguccuguucucucuuua

SEQ ID NO: 200327 - RNA, 22 nt, Human
cagcaaagggccucuaggacca

SEQ ID NO: 200328 - RNA, 22 nt, Human
cagcccuccggggaaguccuac

SEQ ID NO: 200329 - RNA, 20 nt, Human
cagccuguacgccgcagccc

SEQ ID NO: 200330 - RNA, 19 nt, Human
ccagccaggaacaaaggag

SEQ ID NO: 200331 - RNA, 18 nt, Human
ccagccuguacgccgcag

SEQ ID NO: 200332 - RNA, 22 nt, Human
cccaccuuaacucgggagggcc

SEQ ID NO: 200333 - RNA, 23 nt, Human
cccaccuuaacucgggagggccg

SEQ ID NO: 200334 - RNA, 19 nt, Human
ccugggccccggguaccga

SEQ ID NO: 200335 - RNA, 18 nt, Human
cgggccucccccgcugcc

SEQ ID NO: 200336 - RNA, 21 nt, Human
cggggagggcccaaaaaaauu

SEQ ID NO: 200337 - RNA, 18 nt, Human
cuacggagcuucccuggg

SEQ ID NO: 200338 - RNA, 23 nt, Human
cuaggaccacuugcuggggucca

SEQ ID NO: 200339 - RNA, 18 nt, Human
cugagagggcaugcagca

SEQ ID NO: 200340 - RNA, 22 nt, Human
cugcgggccucccccgcugccu

SEQ ID NO: 200341 - RNA, 19 nt, Human
cuguacgccgcagcccucc

SEQ ID NO: 200342 - RNA, 20 nt, Human
cuugcugggguccagugcca

SEQ ID NO: 200343 - RNA, 23 nt, Human
gauuugugacucuuugaaguuga

SEQ ID NO: 200344 - RNA, 19 nt, Human
gccagccuguacgccgcag

SEQ ID NO: 200345 - RNA, 18 nt, Human
gcccgggagcccagugcu

SEQ ID NO: 200346 - RNA, 23 nt, Human
gcuaggggcgcgcucugcgggcc

SEQ ID NO: 200347 - RNA, 18 nt, Human
gcugggguccagugccag

SEQ ID NO: 200348 - RNA, 21 nt, Human
ggaagagguuguggagauaag

SEQ ID NO: 200349 - RNA, 24 nt, Human
ggggaagagguuguggagauaagg

SEQ ID NO: 200350 - RNA, 23 nt, Human
ggggcugccggccugagagggca

SEQ ID NO: 200351 - RNA, 19 nt, Human
uaggaccacuugcuggggu

SEQ ID NO: 200352 - RNA, 22 nt, Human
uagggccagacucucgccagcc

SEQ ID NO: 200353 - RNA, 23 nt, Human
ucauaagugaaaaucuaguuuag

SEQ ID NO: 200354 - RNA, 18 nt, Human
uccagcaccugcccccga

SEQ ID NO: 200355 - RNA, 24 nt, Human
ucguucugcgccagccuguacgcc

SEQ ID NO: 200356 - RNA, 18 nt, Human
ugagagggcaugcagcag

SEQ ID NO: 200357 - RNA, 20 nt, Human
uggcagggacuaugggacag

SEQ ID NO: 200358 - RNA, 22 nt, Human
uggcugucuaacccguccagcc

SEQ ID NO: 200359 - RNA, 18 nt, Human
uggggagguucccggguu

SEQ ID NO: 200360 - RNA, 20 nt, Human
ugucuguggggcccgggagc

SEQ ID NO: 200361 - RNA, 22 nt, Human
uuguggagauaagguuuggaaa

SEQ ID NO: 200362 - RNA, 25 nt, Human
aagccgagaacgagcuagcaaggga

SEQ ID NO: 200363 - RNA, 23 nt, Human
aauccaggacagacaaaaaaaaa

SEQ ID NO: 200364 - RNA, 21 nt, Human
agcgagggagaaagggagaga

SEQ ID NO: 200365 - RNA, 18 nt, Human
aggacagacaaaaaaaaa

SEQ ID NO: 200366 - RNA, 19 nt, Human
aggaggcgcguggagaaag

SEQ ID NO: 200367 - RNA, 23 nt, Human
aggcccuggagcagaggccccag

SEQ ID NO: 200368 - RNA, 22 nt, Human
aggccuggacggggaaaagggc

SEQ ID NO: 200369 - RNA, 21 nt, Human
agggagagagggguggcaggg

SEQ ID NO: 200370 - RNA, 21 nt, Human
agggagcgaggaggaggaggc

SEQ ID NO: 200371 - RNA, 21 nt, Human
agggaggggguccagagcuga

SEQ ID NO: 200372 - RNA, 22 nt, Human
aggguccgagcccccaaggccu

SEQ ID NO: 200373 - RNA, 21 nt, Human
caaguccucacuuggagggca

SEQ ID NO: 200374 - RNA, 21 nt, Human
caggagccggcucucugcacg

SEQ ID NO: 200375 - RNA, 19 nt, Human
cauucacuuuuuuucucuc

SEQ ID NO: 200376 - RNA, 24 nt, Human
ccaauccaggacagacaaaaaaaa

SEQ ID NO: 200377 - RNA, 22 nt, Human
ccagcaggcccaggagccggcu

SEQ ID NO: 200378 - RNA, 19 nt, Human
ccaggacagacaaaaaaaa

SEQ ID NO: 200379 - RNA, 23 nt, Human
ccagugauaaauacaggguaccc

SEQ ID NO: 200380 - RNA, 22 nt, Human
cccuccgcuccggcccuccccg

SEQ ID NO: 200381 - RNA, 23 nt, Human
cccugaggcccuggagcagaggc

SEQ ID NO: 200382 - RNA, 19 nt, Human
cccuggggguugguguggg

SEQ ID NO: 200383 - RNA, 20 nt, Human
cccuggggguuggugugggg

SEQ ID NO: 200384 - RNA, 23 nt, Human
ccgcuccggcccuccccggcugc

SEQ ID NO: 200385 - RNA, 24 nt, Human
ccggcccugaggcccuggagcaga

SEQ ID NO: 200386 - RNA, 19 nt, Human
cgaggaggaggaggcgcgu

SEQ ID NO: 200387 - RNA, 20 nt, Human
cggggaaaagggccuguaga

SEQ ID NO: 200388 - RNA, 20 nt, Human
cuggggcagaggggcuaggc

SEQ ID NO: 200389 - RNA, 24 nt, Human
gaccacaaauacagcuaaaaaucu

SEQ ID NO: 200390 - RNA, 20 nt, Human
gagaccacaaauacagcuaa

SEQ ID NO: 200391 - RNA, 24 nt, Human
gagcgagggagaaagggagagagg

SEQ ID NO: 200392 - RNA, 24 nt, Human
gaguugugcggugagggagggggu

SEQ ID NO: 200393 - RNA, 19 nt, Human
gccaaggcgcgcccuccgc

SEQ ID NO: 200394 - RNA, 21 nt, Human
ggagaaagggagagaggggug

SEQ ID NO: 200395 - RNA, 19 nt, Human
ggagcgaggaggaggaggc

SEQ ID NO: 200396 - RNA, 28 nt, Human
ggagcgagggagaaagggagagaggggu

SEQ ID NO: 200397 - RNA, 20 nt, Human
gggaggggguccagagcuga

SEQ ID NO: 200398 - RNA, 19 nt, Human
gggcgggggugggggcguc

SEQ ID NO: 200399 - RNA, 21 nt, Human
gggcuaggcagggacugcggg

SEQ ID NO: 200400 - RNA, 18 nt, Human
ggggcgggggugggggcg

SEQ ID NO: 200401 - RNA, 18 nt, Human
ggugagggagggggucca

SEQ ID NO: 200402 - RNA, 22 nt, Human
gguugguguggggccaaggcgc

SEQ ID NO: 200403 - RNA, 21 nt, Human
guaaaaugccauaaugacccc

SEQ ID NO: 200404 - RNA, 20 nt, Human
uaaaaugccauaaugacccc

SEQ ID NO: 200405 - RNA, 23 nt, Human
uaaaaugccauaaugacccccag

SEQ ID NO: 200406 - RNA, 21 nt, Human
uacagagaccacaaauacagc

SEQ ID NO: 200407 - RNA, 23 nt, Human
uacagagaccacaaauacagcua

SEQ ID NO: 200408 - RNA, 19 nt, Human
uagcaagggagcgaggagg

SEQ ID NO: 200409 - RNA, 18 nt, Human
uauaaauacagagaccac

SEQ ID NO: 200410 - RNA, 20 nt, Human
ucaaaacacaucaauugugc

SEQ ID NO: 200411 - RNA, 18 nt, Human
ucacacagaaacggucac

SEQ ID NO: 200412 - RNA, 21 nt, Human
uccaauccaggacagacaaaa

SEQ ID NO: 200413 - RNA, 19 nt, Human
uccaggacagacaaaaaaa

SEQ ID NO: 200414 - RNA, 23 nt, Human
uccccggcugccaggccggcccu

SEQ ID NO: 200415 - RNA, 24 nt, Human
uccccggcugccaggccggcccug

SEQ ID NO: 200416 - RNA, 31 nt, Human
uccccggcugccaggccggcccugaggcccc

SEQ ID NO: 200417 - RNA, 28 nt, Human
ucucugcacggggggcgggggugggggc

SEQ ID NO: 200418 - RNA, 21 nt, Human
ucugcacggggggcgggggug

SEQ ID NO: 200419 - RNA, 25 nt, Human
ugaggcccuggagcagaggccccag

SEQ ID NO: 200420 - RNA, 20 nt, Human
ugagggaggggguccagagc

SEQ ID NO: 200421 - RNA, 27 nt, Human
ugccugggcugggcauuugcuggggca

SEQ ID NO: 200422 - RNA, 19 nt, Human
ugccuuuaccuggucgguc

SEQ ID NO: 200423 - RNA, 18 nt, Human
ugcuggggcagaggggcu

SEQ ID NO: 200424 - RNA, 21 nt, Human
uggggcagaggggcuaggcag

SEQ ID NO: 200425 - RNA, 24 nt, Human
uguaaaaugccauaaugaccccca

SEQ ID NO: 200426 - RNA, 19 nt, Human
ugugcggugagggaggggg

SEQ ID NO: 200427 - RNA, 20 nt, Human
uuucccucuuuuuuuuccuu

SEQ ID NO: 200428 - RNA, 22 nt, Human
uuucccucuuuuuuuuccuuuu

SEQ ID NO: 200429 - RNA, 25 nt, Human
uuuguaaaaugccauaaugaccccc

SEQ ID NO: 200430 - RNA, 19 nt, Human
aaaaauagaaauauagcga

SEQ ID NO: 200431 - RNA, 24 nt, Human
aaaaauagaaauauagcgauucaa

SEQ ID NO: 200432 - RNA, 23 nt, Human
aaaauagaaauauagcgauucaa

SEQ ID NO: 200433 - RNA, 20 nt, Human
aacccucccaaaucgcaaga

SEQ ID NO: 200434 - RNA, 22 nt, Human
aacgcaguuucucuccccgccu

SEQ ID NO: 200435 - RNA, 23 nt, Human
acacugaacccucccaaaucgca

SEQ ID NO: 200436 - RNA, 24 nt, Human
accauaacaaacagaagcacguua

SEQ ID NO: 200437 - RNA, 19 nt, Human
acgcaguuucucuccccgc

SEQ ID NO: 200438 - RNA, 24 nt, Human
acgggguuuuacauacauaagauu

SEQ ID NO: 200439 - RNA, 27 nt, Human
acguuacaggacggacgcuggggacca

SEQ ID NO: 200440 - RNA, 20 nt, Human
agaacuaacucuaaaacacc

SEQ ID NO: 200441 - RNA, 24 nt, Human
aggcccggggagggaugaccugga

SEQ ID NO: 200442 - RNA, 27 nt, Human
agggaugaccuggaccaaauacgauag

SEQ ID NO: 200443 - RNA, 22 nt, Human
caacacugaacccucccaaauc

SEQ ID NO: 200444 - RNA, 20 nt, Human
caauaucucaacacugaacc

SEQ ID NO: 200445 - RNA, 20 nt, Human
cacuauguacagcccaaggc

SEQ ID NO: 200446 - RNA, 19 nt, Human
cauaagauuauuguaugaa

SEQ ID NO: 200447 - RNA, 20 nt, Human
cauguaugugugugugucuu

SEQ ID NO: 200448 - RNA, 18 nt, Human
ccauaacaaacagaagca

SEQ ID NO: 200449 - RNA, 23 nt, Human
ccccaggcccggggagggaugac

SEQ ID NO: 200450 - RNA, 18 nt, Human
cccgaccuagcccgcggc

SEQ ID NO: 200451 - RNA, 19 nt, Human
cccucagcuccugggcugg

SEQ ID NO: 200452 - RNA, 25 nt, Human
ccuagcccgcggcaugguccccagc

SEQ ID NO: 200453 - RNA, 20 nt, Human
ccucccaaaucgcaagaguu

SEQ ID NO: 200454 - RNA, 19 nt, Human
ccuggaccaaauacgauac

SEQ ID NO: 200455 - RNA, 19 nt, Human
cgcuggggacgaacccugg

SEQ ID NO: 200456 - RNA, 22 nt, Human
cgguugcgcuggggaaagagaa

SEQ ID NO: 200457 - RNA, 22 nt, Human
cucaacacugaacccucccaaa

SEQ ID NO: 200458 - RNA, 21 nt, Human
cucuccccgccuccuccucgc

SEQ ID NO: 200459 - RNA, 23 nt, Human
cucuccccgccuccuccucgcug

SEQ ID NO: 200460 - RNA, 23 nt, Human
cucugaagaaaggaggaaaaaaa

SEQ ID NO: 200461 - RNA, 18 nt, Human
cugaggcagcaggcuggg

SEQ ID NO: 200462 - RNA, 18 nt, Human
cugcacgcagagcgcccc

SEQ ID NO: 200463 - RNA, 23 nt, Human
cuuuccuuuucuuuuucgucucu

SEQ ID NO: 200464 - RNA, 26 nt, Human
cuuuuuuuuuuuuguacaaaaucugc

SEQ ID NO: 200465 - RNA, 19 nt, Human
gaccuagcccgcggcaugg

SEQ ID NO: 200466 - RNA, 24 nt, Human
gcccgcggcaugguccccagcccu

SEQ ID NO: 200467 - RNA, 21 nt, Human
gcugauuggcuuuugucuauc

SEQ ID NO: 200468 - RNA, 22 nt, Human
ggaccaaauacgauacagggaa

SEQ ID NO: 200469 - RNA, 25 nt, Human
gggaaaaaaaaauagaaauauagcg

SEQ ID NO: 200470 - RNA, 18 nt, Human
ggggacgaacccugggga

SEQ ID NO: 200471 - RNA, 24 nt, Human
gggguuuuuguuuuucccuuggcu

SEQ ID NO: 200472 - RNA, 20 nt, Human
ggguauuuugugggguuuuu

SEQ ID NO: 200473 - RNA, 20 nt, Human
ggguuuuuguuuuucccuug

SEQ ID NO: 200474 - RNA, 20 nt, Human
gguauuuugugggguuuuug

SEQ ID NO: 200475 - RNA, 18 nt, Human
guacaaaaucugcacgca

SEQ ID NO: 200476 - RNA, 19 nt, Human
uaaaacaccaauaucucaa

SEQ ID NO: 200477 - RNA, 24 nt, Human
uaagugacuucaauauauuaacac

SEQ ID NO: 200478 - RNA, 19 nt, Human
uacaaaaucugcacgcaga

SEQ ID NO: 200479 - RNA, 23 nt, Human
uacauacauaagauuauuguaug

SEQ ID NO: 200480 - RNA, 21 nt, Human
uacgauacagggaaaaaaaaa

SEQ ID NO: 200481 - RNA, 18 nt, Human
ucaacacugaacccuccc

SEQ ID NO: 200482 - RNA, 20 nt, Human
ucaauauauuaacacagggc

SEQ ID NO: 200483 - RNA, 22 nt, Human
uccccagcccucaccccucagc

SEQ ID NO: 200484 - RNA, 24 nt, Human
uccccagcccucaccccucagcuc

SEQ ID NO: 200485 - RNA, 25 nt, Human
uccccagcccucaccccucagcucc

SEQ ID NO: 200486 - RNA, 23 nt, Human
ucuaccauaacaaacagaagcug

SEQ ID NO: 200487 - RNA, 18 nt, Human
ucucugaagaaaggagga

SEQ ID NO: 200488 - RNA, 18 nt, Human
ugcgcuggggaaagagaa

SEQ ID NO: 200489 - RNA, 20 nt, Human
ugugugugugucuuuuuuuu

SEQ ID NO: 200490 - RNA, 20 nt, Human
uguguugggguauuuugugg

SEQ ID NO: 200491 - RNA, 20 nt, Human
uucucuccccgccuccuccu

SEQ ID NO: 200492 - RNA, 24 nt, Human
uuuccccuuccuuguuuuucuuuu

SEQ ID NO: 200493 - RNA, 20 nt, Human
uuuuucgucucucccccgcc

SEQ ID NO: 200494 - RNA, 22 nt, Human
aaagcugaauauauguagccuu

SEQ ID NO: 200495 - RNA, 23 nt, Human
aaaugugaagaucacugaagcag

SEQ ID NO: 200496 - RNA, 18 nt, Human
aaucauaaccaaacaagu

SEQ ID NO: 200497 - RNA, 18 nt, Human
acccauggcgagugagcc

SEQ ID NO: 200498 - RNA, 18 nt, Human
acccgagcugcccucucc

SEQ ID NO: 200499 - RNA, 21 nt, Human
aggccggggccggaguacgga

SEQ ID NO: 200500 - RNA, 22 nt, Human
aguacggagccgggcagaggcu

SEQ ID NO: 200501 - RNA, 20 nt, Human
cauagagagguagaaaccgc

SEQ ID NO: 200502 - RNA, 24 nt, Human
caucagagugcugacagaacucag

SEQ ID NO: 200503 - RNA, 20 nt, Human
caucucaaaaagcugaauau

SEQ ID NO: 200504 - RNA, 19 nt, Human
caugcuaugacauuaaaug

SEQ ID NO: 200505 - RNA, 22 nt, Human
cauuuuuguucucccaccucca

SEQ ID NO: 200506 - RNA, 18 nt, Human
ccuccaucccaaacugag

SEQ ID NO: 200507 - RNA, 18 nt, Human
cgccugggacuucugcag

SEQ ID NO: 200508 - RNA, 20 nt, Human
cggagcugggcuggcagcug

SEQ ID NO: 200509 - RNA, 19 nt, Human
cgggggcggccacguggcg

SEQ ID NO: 200510 - RNA, 24 nt, Human
cgucugcgccgcuccgccagcccu

SEQ ID NO: 200511 - RNA, 20 nt, Human
cucccaccuccaucccaaac

SEQ ID NO: 200512 - RNA, 19 nt, Human
cugcaggccacaguuuuuc

SEQ ID NO: 200513 - RNA, 18 nt, Human
cugggcuggcagcugggc

SEQ ID NO: 200514 - RNA, 21 nt, Human
cuuuaaauuaaaaccagaaaa

SEQ ID NO: 200515 - RNA, 19 nt, Human
gagcacaucagagugcuga

SEQ ID NO: 200516 - RNA, 20 nt, Human
gagcugcccucuccaaccca

SEQ ID NO: 200517 - RNA, 20 nt, Human
gccgccgucugcgccgcucc

SEQ ID NO: 200518 - RNA, 21 nt, Human
gccggaguacggagccgggca

SEQ ID NO: 200519 - RNA, 22 nt, Human
gccugggacuucugcaggccac

SEQ ID NO: 200520 - RNA, 23 nt, Human
ggacauauagucuggaacucgga

SEQ ID NO: 200521 - RNA, 18 nt, Human
ggagcugggcuggcagcu

SEQ ID NO: 200522 - RNA, 20 nt, Human
gggcggccucuccgcucggc

SEQ ID NO: 200523 - RNA, 19 nt, Human
guccuuuaaauuaaaaccg

SEQ ID NO: 200524 - RNA, 21 nt, Human
gucgccugggacuucugcagg

SEQ ID NO: 200525 - RNA, 25 nt, Human
uaagacacaaaucauaaccaaacaa

SEQ ID NO: 200526 - RNA, 18 nt, Human
uacuucauuucccaagug

SEQ ID NO: 200527 - RNA, 21 nt, Human
ucccaccuccaucccaaacug

SEQ ID NO: 200528 - RNA, 22 nt, Human
ucuacccgagcugcccucucca

SEQ ID NO: 200529 - RNA, 22 nt, Human
ucuaguaacuaaacagcgauug

SEQ ID NO: 200530 - RNA, 20 nt, Human
ucucccaccuccaucccaaa

SEQ ID NO: 200531 - RNA, 22 nt, Human
ucugagcacaucagagugcuga

SEQ ID NO: 200532 - RNA, 19 nt, Human
ucuguggauuuguucaucu

SEQ ID NO: 200533 - RNA, 23 nt, Human
ugagcacaucagagugcugacag

SEQ ID NO: 200534 - RNA, 22 nt, Human
ugaggcaaagauagcagcggag

SEQ ID NO: 200535 - RNA, 25 nt, Human
ugcaagcaaaucuuuuuaaaaaaua

SEQ ID NO: 200536 - RNA, 20 nt, Human
ugcacaugacuaagugaggc

SEQ ID NO: 200537 - RNA, 25 nt, Human
ugccacucugcaacgcgaauugcac

SEQ ID NO: 200538 - RNA, 19 nt, Human
uggccuaauauaccggcgg

SEQ ID NO: 200539 - RNA, 20 nt, Human
uggccuaauauaccggcggg

SEQ ID NO: 200540 - RNA, 21 nt, Human
uggccuaauauaccggcgggg

SEQ ID NO: 200541 - RNA, 22 nt, Human
uggcuuacaagacagucaauua

SEQ ID NO: 200542 - RNA, 23 nt, Human
ugggcuggcagcugggcaccuuu

SEQ ID NO: 200543 - RNA, 20 nt, Human
uguucucccaccuccauccc

SEQ ID NO: 200544 - RNA, 22 nt, Human
uuaaaaccagaaaaacuuuggg

SEQ ID NO: 200545 - RNA, 20 nt, Human
uuguaucaucacucaggcac

SEQ ID NO: 200546 - RNA, 21 nt, Human
uuuaaagaaaaaaaaacugga

SEQ ID NO: 200547 - RNA, 26 nt, Human
uuuaaagaaaaaaaaacuggagugca

SEQ ID NO: 200548 - RNA, 20 nt, Human
uuuuuuuuuuuuuuuugcag

SEQ ID NO: 200549 - RNA, 22 nt, Human
uuuuuuuuuuuuuuuugcagau

SEQ ID NO: 200550 - RNA, 24 nt, Human
acgcggugcccccucuccaauccu

SEQ ID NO: 200551 - RNA, 18 nt, Human
cgcggugcccccucucca

SEQ ID NO: 200552 - RNA, 18 nt, Human
cuggaacgcggugccccc

SEQ ID NO: 200553 - RNA, 21 nt, Human
cuggaacgcggugcccccucu

SEQ ID NO: 200554 - RNA, 18 nt, Human
ggaaagaauuugaagaag

SEQ ID NO: 200555 - RNA, 20 nt, Human
ggccucugauccggccucag

SEQ ID NO: 200556 - RNA, 19 nt, Human
gggaaagaauuugaagaag

SEQ ID NO: 200557 - RNA, 20 nt, Human
ggugcccccucuccaauccu

SEQ ID NO: 200558 - RNA, 18 nt, Human
uccaauccuggccucuga

SEQ ID NO: 200559 - RNA, 18 nt, Human
uggccucugauccggccu

SEQ ID NO: 200560 - RNA, 21 nt, Human
ugggcccuggaacgcggugcc

SEQ ID NO: 200561 - RNA, 18 nt, Human
cagcucccggcgcggcuc

SEQ ID NO: 200562 - RNA, 30 nt, Human
ccccggcccuggcccuggccccgcgcagga

SEQ ID NO: 200563 - RNA, 22 nt, Human
cccggccccggcccuggcccug

SEQ ID NO: 200564 - RNA, 25 nt, Human
cccggccccggcccuggcccuggcc

SEQ ID NO: 200565 - RNA, 27 nt, Human
cccggccccggcccuggcccuggcccc

SEQ ID NO: 200566 - RNA, 19 nt, Human
cccggccuggcccggcccc

SEQ ID NO: 200567 - RNA, 22 nt, Human
ccggcgcggcucauggcccggc

SEQ ID NO: 200568 - RNA, 19 nt, Human
ccuggcccggccccggccc

SEQ ID NO: 200569 - RNA, 18 nt, Human
cgccuccucccuccucuc

SEQ ID NO: 200570 - RNA, 18 nt, Human
cggccccggcccuggccc

SEQ ID NO: 200571 - RNA, 24 nt, Human
cggccccggcccuggcccuggccc

SEQ ID NO: 200572 - RNA, 18 nt, Human
ucccuccucuccuuucuc

SEQ ID NO: 200573 - RNA, 19 nt, Human
uggcccggccuggcccggc

SEQ ID NO: 200574 - RNA, 20 nt, Human
aaacaccagccacgguuacc

SEQ ID NO: 200575 - RNA, 19 nt, Human
aacugccccgcgggcccca

SEQ ID NO: 200576 - RNA, 20 nt, Human
aagcucuggucccucugcag

SEQ ID NO: 200577 - RNA, 23 nt, Human
acaccauuaccagauuggagucc

SEQ ID NO: 200578 - RNA, 23 nt, Human
acagcaagagagguaauuuugcc

SEQ ID NO: 200579 - RNA, 19 nt, Human
acuacaaacaccagccacg

SEQ ID NO: 200580 - RNA, 18 nt, Human
agacccgggaggcggcgg

SEQ ID NO: 200581 - RNA, 20 nt, Human
agacgcgggccaggcccaag

SEQ ID NO: 200582 - RNA, 21 nt, Human
aggcggcggcagggcaagagc

SEQ ID NO: 200583 - RNA, 19 nt, Human
cacccucuaccccaccacu

SEQ ID NO: 200584 - RNA, 22 nt, Human
caggcccaagacucuccaagcu

SEQ ID NO: 200585 - RNA, 19 nt, Human
cagggggacuaaggaggug

SEQ ID NO: 200586 - RNA, 24 nt, Human
ccaagacucuccaagcucuggucc

SEQ ID NO: 200587 - RNA, 19 nt, Human
ccaggcuccaggugaccac

SEQ ID NO: 200588 - RNA, 21 nt, Human
cccaccacuacagcaagagag

SEQ ID NO: 200589 - RNA, 21 nt, Human
cccccacggccuggaagcgaa

SEQ ID NO: 200590 - RNA, 22 nt, Human
ccccgcgggccccacccucuac

SEQ ID NO: 200591 - RNA, 22 nt, Human
cccgaacugccccgcgggcccc

SEQ ID NO: 200592 - RNA, 23 nt, Human
cccgcgggccccacccucuaccc

SEQ ID NO: 200593 - RNA, 19 nt, Human
ccgcuggaggccugagacc

SEQ ID NO: 200594 - RNA, 21 nt, Human
ccggcccccaggcuccaggug

SEQ ID NO: 200595 - RNA, 23 nt, Human
ccuucacugccaccuccaauguc

SEQ ID NO: 200596 - RNA, 21 nt, Human
cgaacugccccgcgggccccu

SEQ ID NO: 200597 - RNA, 21 nt, Human
cgagucacccaaaggacgccc

SEQ ID NO: 200598 - RNA, 28 nt, Human
cgaugggucucagacuuaccuuugggac

SEQ ID NO: 200599 - RNA, 21 nt, Human
cgccugcgccuccgccgcugg

SEQ ID NO: 200600 - RNA, 23 nt, Human
cggcccccaggcuccaggugacc

SEQ ID NO: 200601 - RNA, 18 nt, Human
cucuaccccaccacuaca

SEQ ID NO: 200602 - RNA, 19 nt, Human
cucuucagguuucuuuuga

SEQ ID NO: 200603 - RNA, 22 nt, Human
cugcagggcgcgccgccgaugg

SEQ ID NO: 200604 - RNA, 19 nt, Human
gacaauuugaaaucaauaa

SEQ ID NO: 200605 - RNA, 24 nt, Human
gacaccauuaccagauuggagucc

SEQ ID NO: 200606 - RNA, 24 nt, Human
gauuggagucccuugguccgcagu

SEQ ID NO: 200607 - RNA, 19 nt, Human
ggaggccugagacccggga

SEQ ID NO: 200608 - RNA, 19 nt, Human
ggcacugucaaauuuacag

SEQ ID NO: 200609 - RNA, 18 nt, Human
ggcagggcaagagcgggg

SEQ ID NO: 200610 - RNA, 23 nt, Human
uaagcuagacgcgggccaggccc

SEQ ID NO: 200611 - RNA, 24 nt, Human
uaaggaggugaaauguggccccca

SEQ ID NO: 200612 - RNA, 22 nt, Human
uauggcgagucacccaaaggac

SEQ ID NO: 200613 - RNA, 22 nt, Human
uauggcgagucacccaaaggac

SEQ ID NO: 200614 - RNA, 23 nt, Human
uauggcgagucacccaaaggacg

SEQ ID NO: 200615 - RNA, 20 nt, Human
ucuguggaggcccucgugcc

SEQ ID NO: 200616 - RNA, 22 nt, Human
ugaaacuaagcuagacgcgggc

SEQ ID NO: 200617 - RNA, 18 nt, Human
ugaaaucaauaaacugug

SEQ ID NO: 200618 - RNA, 19 nt, Human
ugaaaucaauaaacugugg

SEQ ID NO: 200619 - RNA, 20 nt, Human
ugacucgcuucaaauaauaa

SEQ ID NO: 200620 - RNA, 23 nt, Human
ugagagagcugggccggccccca

SEQ ID NO: 200621 - RNA, 25 nt, Human
uggaggccugagacccgggaggcgg

SEQ ID NO: 200622 - RNA, 23 nt, Human
ugggacaccauuaccagauugga

SEQ ID NO: 200623 - RNA, 24 nt, Human
uggugaggacugugguuuuugaga

SEQ ID NO: 200624 - RNA, 25 nt, Human
uuaccagauuggagucccuuggucc

SEQ ID NO: 200625 - RNA, 20 nt, Human
uuaugucaacuacaaacacc

SEQ ID NO: 200626 - RNA, 23 nt, Human
uucaaaacuacucucucaacuag

SEQ ID NO: 200627 - RNA, 24 nt, Human
uucccgaacugccccgcgggcccc

SEQ ID NO: 200628 - RNA, 19 nt, Human
uugugccacgccaccgggc

SEQ ID NO: 200629 - RNA, 21 nt, Human
uuuauggcgagucacccaaag

SEQ ID NO: 200630 - RNA, 21 nt, Human
uuuuuuuuuuuuuuugacugg

SEQ ID NO: 200631 - RNA, 18 nt, Human
uuuuuuuuuuuuuuuuug

SEQ ID NO: 200632 - RNA, 24 nt, Human
uuuuuuuuuuuuuuuuugacuggg

SEQ ID NO: 200633 - RNA, 22 nt, Human
aaaacacugcuauaugagggua

SEQ ID NO: 200634 - RNA, 20 nt, Human
aaaagaccaaggcuuggaag

SEQ ID NO: 200635 - RNA, 22 nt, Human
aaacaaagagcaguccccaggg

SEQ ID NO: 200636 - RNA, 23 nt, Human
aaaugcacccuagagcuccccac

SEQ ID NO: 200637 - RNA, 24 nt, Human
aacauguuucuuggcuuuccucug

SEQ ID NO: 200638 - RNA, 23 nt, Human
aacccauuuccuucccugcccua

SEQ ID NO: 200639 - RNA, 20 nt, Human
aacccccgccccccgacacc

SEQ ID NO: 200640 - RNA, 19 nt, Human
aaccuagcccuuuggcccu

SEQ ID NO: 200641 - RNA, 21 nt, Human
aacugguuguaagcacagugc

SEQ ID NO: 200642 - RNA, 19 nt, Human
aagaguuccucaccuuccc

SEQ ID NO: 200643 - RNA, 18 nt, Human
aaggagaaacaaagagca

SEQ ID NO: 200644 - RNA, 24 nt, Human
aauccaguuggaacagaaaauuca

SEQ ID NO: 200645 - RNA, 26 nt, Human
aaucccgcccccccucccauccccau

SEQ ID NO: 200646 - RNA, 23 nt, Human
acaaacuggaaacaaauaauagc

SEQ ID NO: 200647 - RNA, 24 nt, Human
acaaagagcaguccccagggucua

SEQ ID NO: 200648 - RNA, 18 nt, Human
acaacagaaaccuucuaa

SEQ ID NO: 200649 - RNA, 19 nt, Human
acagccccuccccuacacg

SEQ ID NO: 200650 - RNA, 20 nt, Human
acauguggaaauauauuuuc

SEQ ID NO: 200651 - RNA, 22 nt, Human
accccaaggagaaacaaagagc

SEQ ID NO: 200652 - RNA, 18 nt, Human
acccccgccccccgacac

SEQ ID NO: 200653 - RNA, 22 nt, Human
acccuggagggguggagugggg

SEQ ID NO: 200654 - RNA, 22 nt, Human
accucacucccuaguaccccaa

SEQ ID NO: 200655 - RNA, 19 nt, Human
accuuuuuaagauuuuugg

SEQ ID NO: 200656 - RNA, 21 nt, Human
acuuuuguggacuucuagauu

SEQ ID NO: 200657 - RNA, 24 nt, Human
agaaugaauccuccuauuggggua

SEQ ID NO: 200658 - RNA, 18 nt, Human
agacaacccagaaagucc

SEQ ID NO: 200659 - RNA, 19 nt, Human
agaccaaggcuuggaagac

SEQ ID NO: 200660 - RNA, 22 nt, Human
agagaagcggaauuucagccua

SEQ ID NO: 200661 - RNA, 18 nt, Human
agagaguggggaggggug

SEQ ID NO: 200662 - RNA, 22 nt, Human
agagcugagacuuauaaacaaa

SEQ ID NO: 200663 - RNA, 25 nt, Human
agaggaaaaaagaagagaaggguag

SEQ ID NO: 200664 - RNA, 22 nt, Human
agaguuccucaccuucccacuu

SEQ ID NO: 200665 - RNA, 22 nt, Human
agcaagaguuccucaccuuccc

SEQ ID NO: 200666 - RNA, 22 nt, Human
agccaaagaacaagccuacaga

SEQ ID NO: 200667 - RNA, 24 nt, Human
agcuacaaccuuuuuuggagccug

SEQ ID NO: 200668 - RNA, 18 nt, Human
aggaaaagcugcucuaug

SEQ ID NO: 200669 - RNA, 26 nt, Human
aggaaagcagcuuagcaacuuuccaa

SEQ ID NO: 200670 - RNA, 18 nt, Human
aggagaaacaaagagcag

SEQ ID NO: 200671 - RNA, 21 nt, Human
aggagacacagccaaagaaca

SEQ ID NO: 200672 - RNA, 23 nt, Human
aggcaaagacgagugcuugaaaa

SEQ ID NO: 200673 - RNA, 18 nt, Human
aggcagaagaaaaacgac

SEQ ID NO: 200674 - RNA, 23 nt, Human
aggcagaagaaaaacgacuagag

SEQ ID NO: 200675 - RNA, 20 nt, Human
agggagagaugggcccaggg

SEQ ID NO: 200676 - RNA, 25 nt, Human
agggagggggcugcccucgggcagg

SEQ ID NO: 200677 - RNA, 20 nt, Human
agggcgucagaaaaagacgu

SEQ ID NO: 200678 - RNA, 22 nt, Human
aggguuccugccugcccgcccu

SEQ ID NO: 200679 - RNA, 24 nt, Human
auaauauacuuagagagagaaucc

SEQ ID NO: 200680 - RNA, 22 nt, Human
auagaaacaaugaugugaauaa

SEQ ID NO: 200681 - RNA, 21 nt, Human
auguaugaacucugugcuuuu

SEQ ID NO: 200682 - RNA, 20 nt, Human
augucaccaggcgcagcuga

SEQ ID NO: 200683 - RNA, 19 nt, Human
caaaagaaucccuccaagc

SEQ ID NO: 200684 - RNA, 24 nt, Human
caaaagaaucccuccaagcugaga

SEQ ID NO: 200685 - RNA, 21 nt, Human
caaacacuucuggcucauauu

SEQ ID NO: 200686 - RNA, 22 nt, Human
caaagcacguucucagauggaa

SEQ ID NO: 200687 - RNA, 23 nt, Human
caacagaaaccuucuaaaguguu

SEQ ID NO: 200688 - RNA, 19 nt, Human
caaccaauuaggcuugcau

SEQ ID NO: 200689 - RNA, 24 nt, Human
caacuugccuaaggauagcggcuc

SEQ ID NO: 200690 - RNA, 19 nt, Human
caagcccccauuuggguac

SEQ ID NO: 200691 - RNA, 25 nt, Human
caagggcaccuccaccuugucaaaa

SEQ ID NO: 200692 - RNA, 24 nt, Human
cacaguaccuuagagcccagcgag

SEQ ID NO: 200693 - RNA, 20 nt, Human
cacccaaaaguuaccagaau

SEQ ID NO: 200694 - RNA, 23 nt, Human
cacccagaacugguuguaagcac

SEQ ID NO: 200695 - RNA, 26 nt, Human
caccccauuccccucagguaauccca

SEQ ID NO: 200696 - RNA, 21 nt, Human
cacccccagcugaaugcaacc

SEQ ID NO: 200697 - RNA, 23 nt, Human
caccuucccacuuucuccccacu

SEQ ID NO: 200698 - RNA, 21 nt, Human
caccuugucaaaaugcacccu

SEQ ID NO: 200699 - RNA, 19 nt, Human
cacugauuuugccaaccuu

SEQ ID NO: 200700 - RNA, 23 nt, Human
cacugcuauaugaggguauuuag

SEQ ID NO: 200701 - RNA, 23 nt, Human
cacuucacucucccccuccccca

SEQ ID NO: 200702 - RNA, 21 nt, Human
cagacaucaugggcugacuga

SEQ ID NO: 200703 - RNA, 23 nt, Human
cagagcaaugaaagguggguggg

SEQ ID NO: 200704 - RNA, 24 nt, Human
cagccuggugcgcagggagagaug

SEQ ID NO: 200705 - RNA, 20 nt, Human
caggaccccaacacgguuuu

SEQ ID NO: 200706 - RNA, 21 nt, Human
caggccccaaauacaagcaag

SEQ ID NO: 200707 - RNA, 19 nt, Human
caucaaaacuacaagcaac

SEQ ID NO: 200708 - RNA, 19 nt, Human
cauuggagcuuuuccacaa

SEQ ID NO: 200709 - RNA, 19 nt, Human
ccaaaaguuaccagaaucu

SEQ ID NO: 200710 - RNA, 18 nt, Human
ccaacacaaacacuucug

SEQ ID NO: 200711 - RNA, 19 nt, Human
ccaaccuucugccucaacu

SEQ ID NO: 200712 - RNA, 19 nt, Human
ccaagguaauaaaacagaa

SEQ ID NO: 200713 - RNA, 22 nt, Human
ccacaguaccuuagagcccagc

SEQ ID NO: 200714 - RNA, 22 nt, Human
ccaggagaggcagaagaaaaac

SEQ ID NO: 200715 - RNA, 27 nt, Human
cccacaggccccaaauacaagcaagcc

SEQ ID NO: 200716 - RNA, 22 nt, Human
cccacaguaccuuagagcccag

SEQ ID NO: 200717 - RNA, 18 nt, Human
cccagaaaguccagaaau

SEQ ID NO: 200718 - RNA, 22 nt, Human
cccagaaggaaaauguuggacc

SEQ ID NO: 200719 - RNA, 23 nt, Human
cccagcaccccauuccccucagg

SEQ ID NO: 200720 - RNA, 18 nt, Human
cccaucccgcucuaggga

SEQ ID NO: 200721 - RNA, 20 nt, Human
cccauguagcuggggguggg

SEQ ID NO: 200722 - RNA, 22 nt, Human
cccauguagcugggggugggcu

SEQ ID NO: 200723 - RNA, 18 nt, Human
ccccaaaaccuagcccuu

SEQ ID NO: 200724 - RNA, 23 nt, Human
ccccaaauacaagcaagccccca

SEQ ID NO: 200725 - RNA, 24 nt, Human
ccccaaauacaagcaagcccccau

SEQ ID NO: 200726 - RNA, 18 nt, Human
ccccagcaccccauuccc

SEQ ID NO: 200727 - RNA, 21 nt, Human
ccccagcaccccauuccccuc

SEQ ID NO: 200728 - RNA, 23 nt, Human
ccccagcugaaugcaacccccgc

SEQ ID NO: 200729 - RNA, 26 nt, Human
ccccagggucuaauacaaaagacccc

SEQ ID NO: 200730 - RNA, 23 nt, Human
cccccacauuauuaagccacaaa

SEQ ID NO: 200731 - RNA, 22 nt, Human
cccccagcugaaugcaaccccc

SEQ ID NO: 200732 - RNA, 18 nt, Human
cccccccucccaucccca

SEQ ID NO: 200733 - RNA, 21 nt, Human
cccccccucccauccccaucc

SEQ ID NO: 200734 - RNA, 18 nt, Human
cccccgccccccgacacc

SEQ ID NO: 200735 - RNA, 20 nt, Human
cccccuauauacauuuccag

SEQ ID NO: 200736 - RNA, 24 nt, Human
ccccgcagcuucggcucagccugg

SEQ ID NO: 200737 - RNA, 20 nt, Human
ccccgccccccgacaccaag

SEQ ID NO: 200738 - RNA, 21 nt, Human
ccccucagguaaucccagcuu

SEQ ID NO: 200739 - RNA, 19 nt, Human
ccccuuucaccuuuuuaag

SEQ ID NO: 200740 - RNA, 20 nt, Human
cccuggagggguggaguggg

SEQ ID NO: 200741 - RNA, 18 nt, Human
cccuuucccacuuugguc

SEQ ID NO: 200742 - RNA, 18 nt, Human
cccuuucccacuuugguc

SEQ ID NO: 200743 - RNA, 22 nt, Human
ccgacaccaaguaggcacagcu

SEQ ID NO: 200744 - RNA, 19 nt, Human
ccgcagcuucggcucagcc

SEQ ID NO: 200745 - RNA, 20 nt, Human
ccgcagcuucggcucagccu

SEQ ID NO: 200746 - RNA, 21 nt, Human
ccgcccccccucccaucccca

SEQ ID NO: 200747 - RNA, 19 nt, Human
ccuauauacauuuccagag

SEQ ID NO: 200748 - RNA, 22 nt, Human
ccuccaagcugagaaggagagc

SEQ ID NO: 200749 - RNA, 18 nt, Human
ccucccauccccaucccg

SEQ ID NO: 200750 - RNA, 22 nt, Human
ccucuggggcagggaugcaguc

SEQ ID NO: 200751 - RNA, 21 nt, Human
ccugcccucagcucucaggag

SEQ ID NO: 200752 - RNA, 28 nt, Human
ccugccugcagccggcgggagcagggau

SEQ ID NO: 200753 - RNA, 19 nt, Human
ccugccugcccgcccugcc

SEQ ID NO: 200754 - RNA, 22 nt, Human
cgccaagauuuuauguucucag

SEQ ID NO: 200755 - RNA, 22 nt, Human
cgccaugcuuucuaccagugcc

SEQ ID NO: 200756 - RNA, 21 nt, Human
cgcugcccuugcccauguagc

SEQ ID NO: 200757 - RNA, 18 nt, Human
cucaagggagaaugaauc

SEQ ID NO: 200758 - RNA, 19 nt, Human
cucaagggagaaugaaucc

SEQ ID NO: 200759 - RNA, 23 nt, Human
cucaccuucccacuuucucccca

SEQ ID NO: 200760 - RNA, 22 nt, Human
cucacucccuaguaccccaaaa

SEQ ID NO: 200761 - RNA, 19 nt, Human
cucccccagucaggacccc

SEQ ID NO: 200762 - RNA, 23 nt, Human
cucccuaguaccccaaaaccuag

SEQ ID NO: 200763 - RNA, 20 nt, Human
cucccuuucccacuuugguc

SEQ ID NO: 200764 - RNA, 21 nt, Human
cuucacucucccccuccccca

SEQ ID NO: 200765 - RNA, 25 nt, Human
cuuccacugaaagcaccuagcacag

SEQ ID NO: 200766 - RNA, 23 nt, Human
cuucccacuuucuccccacugca

SEQ ID NO: 200767 - RNA, 20 nt, Human
cuugucccagguccaccccc

SEQ ID NO: 200768 - RNA, 22 nt, Human
cuuucucucuuucugucuuucu

SEQ ID NO: 200769 - RNA, 23 nt, Human
gaaaacauguuucuuggcuuucc

SEQ ID NO: 200770 - RNA, 25 nt, Human
gaaaauauauaccuuuuuccccuuc

SEQ ID NO: 200771 - RNA, 23 nt, Human
gaaacccauuuccuucccugccc

SEQ ID NO: 200772 - RNA, 24 nt, Human
gaacaagccuacagagaaacucuu

SEQ ID NO: 200773 - RNA, 25 nt, Human
gaacagaaaauucagucauuaucua

SEQ ID NO: 200774 - RNA, 18 nt, Human
gaagaaaaacgacuagag

SEQ ID NO: 200775 - RNA, 22 nt, Human
gaaguuuuugcaucgaccauau

SEQ ID NO: 200776 - RNA, 26 nt, Human
gaauaaaguugggcagccaugugacc

SEQ ID NO: 200777 - RNA, 20 nt, Human
gacuagaggacaucuccccu

SEQ ID NO: 200778 - RNA, 24 nt, Human
gagcaaugaaagguggguggguga

SEQ ID NO: 200779 - RNA, 24 nt, Human
gagcugagacuuauaaacaaagaa

SEQ ID NO: 200780 - RNA, 18 nt, Human
gaggcggcugaccagcgc

SEQ ID NO: 200781 - RNA, 19 nt, Human
gagggcgucagaaaaagac

SEQ ID NO: 200782 - RNA, 20 nt, Human
gagguggggccacugggagc

SEQ ID NO: 200783 - RNA, 20 nt, Human
gcagaagaaaaacgacuaga

SEQ ID NO: 200784 - RNA, 19 nt, Human
gcagccaugugaccaggcc

SEQ ID NO: 200785 - RNA, 21 nt, Human
gccaugcuuucuaccagugcc

SEQ ID NO: 200786 - RNA, 23 nt, Human
gcccacuccugugggcccaaaug

SEQ ID NO: 200787 - RNA, 23 nt, Human
gccccaggcgaggaggguuccug

SEQ ID NO: 200788 - RNA, 19 nt, Human
gcccccccucccaucccca

SEQ ID NO: 200789 - RNA, 20 nt, Human
gccgccguccuggcuuuguc

SEQ ID NO: 200790 - RNA, 21 nt, Human
gcgccggcugcuucuagucuc

SEQ ID NO: 200791 - RNA, 19 nt, Human
gcucagccuggugcgcagg

SEQ ID NO: 200792 - RNA, 20 nt, Human
gcucccugaaguucagcccc

SEQ ID NO: 200793 - RNA, 22 nt, Human
ggaaaaaagaagagaaggguag

SEQ ID NO: 200794 - RNA, 21 nt, Human
ggagacacagccaaagaacaa

SEQ ID NO: 200795 - RNA, 22 nt, Human
ggagcuuuuccacaccuagcuu

SEQ ID NO: 200796 - RNA, 20 nt, Human
ggaugcugggguccgacugg

SEQ ID NO: 200797 - RNA, 22 nt, Human
gggcaccuccaccuugucaaaa

SEQ ID NO: 200798 - RNA, 19 nt, Human
gggcagagcugggacuggg

SEQ ID NO: 200799 - RNA, 23 nt, Human
ggugaggagcuucuggagaggaa

SEQ ID NO: 200800 - RNA, 18 nt, Human
guuccaguccccagcacc

SEQ ID NO: 200801 - RNA, 24 nt, Human
uaaaaaaccacuauucucaaggca

SEQ ID NO: 200802 - RNA, 24 nt, Human
uaaaacaccaacacaaacacuucu

SEQ ID NO: 200803 - RNA, 21 nt, Human
uaaaggaacaaacuggaaaca

SEQ ID NO: 200804 - RNA, 23 nt, Human
uaaccgccaugcuuucuaccagu

SEQ ID NO: 200805 - RNA, 19 nt, Human
uaaccuaguccgagggcgg

SEQ ID NO: 200806 - RNA, 19 nt, Human
uaacuuugacuucuuccuc

SEQ ID NO: 200807 - RNA, 20 nt, Human
uaagccacaaagcacccugg

SEQ ID NO: 200808 - RNA, 18 nt, Human
uaagugguuacggggccc

SEQ ID NO: 200809 - RNA, 18 nt, Human
uaauuuuucucguguugu

SEQ ID NO: 200810 - RNA, 21 nt, Human
uacaacagaaaccuucuaaag

SEQ ID NO: 200811 - RNA, 22 nt, Human
uacaagcaagcccccauuuggg

SEQ ID NO: 200812 - RNA, 24 nt, Human
uacaagcaagcccccauuugggua

SEQ ID NO: 200813 - RNA, 22 nt, Human
uaccucacucccuaguacccca

SEQ ID NO: 200814 - RNA, 21 nt, Human
uaccuuagagcccagcgaggu

SEQ ID NO: 200815 - RNA, 20 nt, Human
uacggggcccuaccccuucc

SEQ ID NO: 200816 - RNA, 18 nt, Human
uagacaacccagaaaguc

SEQ ID NO: 200817 - RNA, 21 nt, Human
uagagcuccccacugggcuuc

SEQ ID NO: 200818 - RNA, 24 nt, Human
uagagcuccccacugggcuucuuu

SEQ ID NO: 200819 - RNA, 18 nt, Human
uaguuccaguccccagca

SEQ ID NO: 200820 - RNA, 20 nt, Human
uaucuaaacauaaaauaacc

SEQ ID NO: 200821 - RNA, 22 nt, Human
uauguaugaacucugugcuuuu

SEQ ID NO: 200822 - RNA, 20 nt, Human
ucacucucccccucccccag

SEQ ID NO: 200823 - RNA, 21 nt, Human
ucacucucccccucccccagu

SEQ ID NO: 200824 - RNA, 18 nt, Human
ucagcaaacacuucacuc

SEQ ID NO: 200825 - RNA, 25 nt, Human
ucagcaaacacuucacucucccccu

SEQ ID NO: 200826 - RNA, 22 nt, Human
ucaguagcuccugccauauaau

SEQ ID NO: 200827 - RNA, 19 nt, Human
uccaagcugagaaggagag

SEQ ID NO: 200828 - RNA, 20 nt, Human
uccaagguaauaaaacagaa

SEQ ID NO: 200829 - RNA, 22 nt, Human
uccaccccacaguaccuuagag

SEQ ID NO: 200830 - RNA, 23 nt, Human
uccauagacaacccagaaagucc

SEQ ID NO: 200831 - RNA, 26 nt, Human
uccauagacaacccagaaaguccaga

SEQ ID NO: 200832 - RNA, 23 nt, Human
ucccacaggccccaaauacaagc

SEQ ID NO: 200833 - RNA, 21 nt, Human
ucccagccaaagcugggcccu

SEQ ID NO: 200834 - RNA, 19 nt, Human
uccccagggucuaauacaa

SEQ ID NO: 200835 - RNA, 23 nt, Human
ucccccacauuauuaagccacaa

SEQ ID NO: 200836 - RNA, 20 nt, Human
uccccuucucaaagagaagg

SEQ ID NO: 200837 - RNA, 27 nt, Human
ucccgcccccccucccauccccauccc

SEQ ID NO: 200838 - RNA, 25 nt, Human
ucccugaaguucagccccuuucacc

SEQ ID NO: 200839 - RNA, 24 nt, Human
uccguggcccuuccacucaccccc

SEQ ID NO: 200840 - RNA, 21 nt, Human
ucucccuuucccacuuugguc

SEQ ID NO: 200841 - RNA, 23 nt, Human
ucucuuucucucuuucugucuuu

SEQ ID NO: 200842 - RNA, 19 nt, Human
ucugccauacaaaggccgc

SEQ ID NO: 200843 - RNA, 19 nt, Human
ucuuucucucucucucucc

SEQ ID NO: 200844 - RNA, 21 nt, Human
ucuuucucucuuucugucuuu

SEQ ID NO: 200845 - RNA, 18 nt, Human
ucuuuuuucccucccacu

SEQ ID NO: 200846 - RNA, 21 nt, Human
ugaaaaaaacacauguggaaa

SEQ ID NO: 200847 - RNA, 23 nt, Human
ugaaaaaaacacauguggaaaua

SEQ ID NO: 200848 - RNA, 22 nt, Human
ugaaaaaaauaccccccuucug

SEQ ID NO: 200849 - RNA, 23 nt, Human
ugaaaaaaauaccccccuucugg

SEQ ID NO: 200850 - RNA, 23 nt, Human
ugaaagcaccuagcacaggggug

SEQ ID NO: 200851 - RNA, 19 nt, Human
ugaccaggccagccaaugg

SEQ ID NO: 200852 - RNA, 20 nt, Human
ugacccagcucucuggcuuc

SEQ ID NO: 200853 - RNA, 21 nt, Human
ugagaaggagagcugagacuu

SEQ ID NO: 200854 - RNA, 20 nt, Human
ugagaaggagcuuggguuuu

SEQ ID NO: 200855 - RNA, 23 nt, Human
ugagugaauccuuugcuuccuuc

SEQ ID NO: 200856 - RNA, 25 nt, Human
ugcaacccccgccccccgacaccaa

SEQ ID NO: 200857 - RNA, 22 nt, Human
ugcccaggcccggggguuccca

SEQ ID NO: 200858 - RNA, 24 nt, Human
ugccucaacucccccacauuauua

SEQ ID NO: 200859 - RNA, 19 nt, Human
ugcugggguccgacuggga

SEQ ID NO: 200860 - RNA, 20 nt, Human
ugcugggguccgacugggac

SEQ ID NO: 200861 - RNA, 23 nt, Human
ugcuugagggucagcauuuuaga

SEQ ID NO: 200862 - RNA, 24 nt, Human
uggagggcagagcugggacugggc

SEQ ID NO: 200863 - RNA, 19 nt, Human
uggagugggggagaauguc

SEQ ID NO: 200864 - RNA, 20 nt, Human
uggcccuuccacucaccccc

SEQ ID NO: 200865 - RNA, 23 nt, Human
uggcgagggagcaaguuuaucac

SEQ ID NO: 200866 - RNA, 19 nt, Human
uggcuuugucuucaucagg

SEQ ID NO: 200867 - RNA, 20 nt, Human
uggcuuugucuucaucaggg

SEQ ID NO: 200868 - RNA, 25 nt, Human
uggguaccuuugcaccucauguucc

SEQ ID NO: 200869 - RNA, 21 nt, Human
uggugcgcagggagagauggg

SEQ ID NO: 200870 - RNA, 24 nt, Human
uguaaucaaguagcuugcuauggc

SEQ ID NO: 200871 - RNA, 19 nt, Human
uguauagacagauuugggu

SEQ ID NO: 200872 - RNA, 18 nt, Human
uguuucuuggcuuuccuc

SEQ ID NO: 200873 - RNA, 28 nt, Human
uuaaaacaccaacacaaacuggagaccc

SEQ ID NO: 200874 - RNA, 25 nt, Human
uuaaggccccccuauauacauuucc

SEQ ID NO: 200875 - RNA, 18 nt, Human
uuaaucaguggcagcaaa

SEQ ID NO: 200876 - RNA, 21 nt, Human
uuaaucaguggcagcaaaacu

SEQ ID NO: 200877 - RNA, 24 nt, Human
uuacaucaaaacuacaagcaacaa

SEQ ID NO: 200878 - RNA, 24 nt, Human
uuagaaaaaugaacuuugaacccu

SEQ ID NO: 200879 - RNA, 20 nt, Human
uuagacccauuucuuuggag

SEQ ID NO: 200880 - RNA, 25 nt, Human
uucagcacccagaggauacucuguu

SEQ ID NO: 200881 - RNA, 23 nt, Human
uuccacaccuagcuuucuccaaa

SEQ ID NO: 200882 - RNA, 18 nt, Human
uuccauagacaacccaga

SEQ ID NO: 200883 - RNA, 19 nt, Human
uucccacuuucuccccacu

SEQ ID NO: 200884 - RNA, 25 nt, Human
uucccacuuuggucacuuuuugaua

SEQ ID NO: 200885 - RNA, 19 nt, Human
uucccagccaaagcugggc

SEQ ID NO: 200886 - RNA, 22 nt, Human
uuccguggcccuuccacucacc

SEQ ID NO: 200887 - RNA, 20 nt, Human
uucuucccacaggccccaaa

SEQ ID NO: 200888 - RNA, 23 nt, Human
uucuuuggagguggggccacugg

SEQ ID NO: 200889 - RNA, 22 nt, Human
uugaagcuugcuuucuucccac

SEQ ID NO: 200890 - RNA, 19 nt, Human
uuucuuggcuuuccucugg

SEQ ID NO: 200891 - RNA, 24 nt, Human
uuucuuggcuuuccucuggggcag

SEQ ID NO: 200892 - RNA, 20 nt, Human
uuugagaaggagcuuggguu

SEQ ID NO: 200893 - RNA, 20 nt, Human
uuuuucucguguugucuuuu

SEQ ID NO: 200894 - RNA, 19 nt, Human
aaacagcaacaacaacaaa

SEQ ID NO: 200895 - RNA, 23 nt, Human
aaacagcaacaacaacaaauccg

SEQ ID NO: 200896 - RNA, 22 nt, Human
caacaacaacaaauccgcugcc

SEQ ID NO: 200897 - RNA, 22 nt, Human
cacucccacccaacauuacacu

SEQ ID NO: 200898 - RNA, 20 nt, Human
cagcaacaacaacaaauccg

SEQ ID NO: 200899 - RNA, 27 nt, Human
cagcaacaacaacaaauccgcugcccu

SEQ ID NO: 200900 - RNA, 23 nt, Human
cccacaaaggaaacagcaacaac

SEQ ID NO: 200901 - RNA, 23 nt, Human
ccuugagcgcucccgccagcacc

SEQ ID NO: 200902 - RNA, 18 nt, Human
gcucccgccagcaccgcg

SEQ ID NO: 200903 - RNA, 23 nt, Human
ugaggcgucccgcacucccaccc

SEQ ID NO: 200904 - RNA, 24 nt, Human
aggcaagggcuuccggccagccuu

SEQ ID NO: 200905 - RNA, 19 nt, Human
caaaagaaagcucuuuauu

SEQ ID NO: 200906 - RNA, 25 nt, Human
cccguccacuuugcccucuuccagg

SEQ ID NO: 200907 - RNA, 22 nt, Human
gggcuggcacccaucagcuuca

SEQ ID NO: 200908 - RNA, 22 nt, Human
uaucgcauccacuccuguccac

SEQ ID NO: 200909 - RNA, 23 nt, Human
ucaaaccacaucuuaucgcaucc

SEQ ID NO: 200910 - RNA, 24 nt, Human
ucccguccacuuugcccucuucca

SEQ ID NO: 200911 - RNA, 22 nt, Human
ucuugcuuucaggcaagggcuu

SEQ ID NO: 200912 - RNA, 25 nt, Human
ugcccucuuccaggcugaaaucuug

SEQ ID NO: 200913 - RNA, 20 nt, Human
aacuccacaccccuagaauc

SEQ ID NO: 200914 - RNA, 18 nt, Human
aagugcuaaaaggcaggc

SEQ ID NO: 200915 - RNA, 18 nt, Human
acuugcuuuggccugggg

SEQ ID NO: 200916 - RNA, 18 nt, Human
agccucuuucuccaacuc

SEQ ID NO: 200917 - RNA, 20 nt, Human
agggaccagcaagggcuggg

SEQ ID NO: 200918 - RNA, 18 nt, Human
agggcuggggugggaagg

SEQ ID NO: 200919 - RNA, 23 nt, Human
aggggcagaccaacccagccugu

SEQ ID NO: 200920 - RNA, 21 nt, Human
augacuccccccaccccgcaa

SEQ ID NO: 200921 - RNA, 19 nt, Human
caacccagccugugucucu

SEQ ID NO: 200922 - RNA, 21 nt, Human
cacccagcgacgcggagacac

SEQ ID NO: 200923 - RNA, 21 nt, Human
cacugugcauggggcucuggg

SEQ ID NO: 200924 - RNA, 25 nt, Human
cagaauacacacaagggaguggaag

SEQ ID NO: 200925 - RNA, 21 nt, Human
cagaccaacccagccuguguc

SEQ ID NO: 200926 - RNA, 22 nt, Human
caugacuccccccaccccgcaa

SEQ ID NO: 200927 - RNA, 20 nt, Human
ccccacagggcagacccggg

SEQ ID NO: 200928 - RNA, 19 nt, Human
ccccccaccccgcaagcug

SEQ ID NO: 200929 - RNA, 23 nt, Human
ccccccaccccgcaagcugagac

SEQ ID NO: 200930 - RNA, 23 nt, Human
ccccuagaauccuucucuccccu

SEQ ID NO: 200931 - RNA, 24 nt, Human
ccccuagaauccuucucuccccuc

SEQ ID NO: 200932 - RNA, 21 nt, Human
ccccugggcaugacucccccc

SEQ ID NO: 200933 - RNA, 21 nt, Human
ccgagccaagucccacccagc

SEQ ID NO: 200934 - RNA, 23 nt, Human
ccgagccaagucccacccagcga

SEQ ID NO: 200935 - RNA, 24 nt, Human
ccgccgagccaagucccacccagc

SEQ ID NO: 200936 - RNA, 19 nt, Human
cgagccaagucccacccag

SEQ ID NO: 200937 - RNA, 18 nt, Human
cuagaauccuucucuccc

SEQ ID NO: 200938 - RNA, 19 nt, Human
cuagggaccagcaagggcu

SEQ ID NO: 200939 - RNA, 22 nt, Human
cugaaaugagacuuuauucuga

SEQ ID NO: 200940 - RNA, 21 nt, Human
gaagguuucacuugguggcuu

SEQ ID NO: 200941 - RNA, 20 nt, Human
gacagaggggaggacagggg

SEQ ID NO: 200942 - RNA, 23 nt, Human
gacagaggggaggacaggggcuc

SEQ ID NO: 200943 - RNA, 18 nt, Human
gagccgggagggggccgg

SEQ ID NO: 200944 - RNA, 22 nt, Human
gcaggacacugugcauggggcu

SEQ ID NO: 200945 - RNA, 20 nt, Human
gccaaacacagagagcuccg

SEQ ID NO: 200946 - RNA, 21 nt, Human
gccaaacacagagagcuccgu

SEQ ID NO: 200947 - RNA, 18 nt, Human
gccccuuugggggagggg

SEQ ID NO: 200948 - RNA, 22 nt, Human
gcgguuggggggacagagggga

SEQ ID NO: 200949 - RNA, 24 nt, Human
ggacagaggggaggacaggggcuc

SEQ ID NO: 200950 - RNA, 22 nt, Human
ggacaggggcucagccaggggg

SEQ ID NO: 200951 - RNA, 21 nt, Human
ggacugccccuuugggggagg

SEQ ID NO: 200952 - RNA, 21 nt, Human
ggacugccccuuugggggagg

SEQ ID NO: 200953 - RNA, 18 nt, Human
ggagggaggaaggggaac

SEQ ID NO: 200954 - RNA, 19 nt, Human
ggagggaggaaggggaacc

SEQ ID NO: 200955 - RNA, 22 nt, Human
ggagggggccggugaagggagg

SEQ ID NO: 200956 - RNA, 22 nt, Human
ggggcucugggugcaucugccc

SEQ ID NO: 200957 - RNA, 24 nt, Human
uagggaccagcaagggcuggggug

SEQ ID NO: 200958 - RNA, 19 nt, Human
uaugggccugugugugugu

SEQ ID NO: 200959 - RNA, 20 nt, Human
uaugggccugugugugugug

SEQ ID NO: 200960 - RNA, 21 nt, Human
uaugggccuguguguguguga

SEQ ID NO: 200961 - RNA, 24 nt, Human
uccaagugcuaaaaggcaggcugg

SEQ ID NO: 200962 - RNA, 23 nt, Human
ucccacccagcgacgcggagaca

SEQ ID NO: 200963 - RNA, 19 nt, Human
ucccacgcaggacacugug

SEQ ID NO: 200964 - RNA, 23 nt, Human
uccccugggcaugacucccccca

SEQ ID NO: 200965 - RNA, 22 nt, Human
ugaagggagggaggaaggggaa

SEQ ID NO: 200966 - RNA, 18 nt, Human
ugagaggccaaacacaga

SEQ ID NO: 200967 - RNA, 18 nt, Human
ugcaagaaggggacugcc

SEQ ID NO: 200968 - RNA, 22 nt, Human
ugcccaucugucuaugggccug

SEQ ID NO: 200969 - RNA, 21 nt, Human
ugggaaggguggcucaaggaa

SEQ ID NO: 200970 - RNA, 21 nt, Human
uggggugggaaggguggcuca

SEQ ID NO: 200971 - RNA, 19 nt, Human
ugguggguggguaaggggg

SEQ ID NO: 200972 - RNA, 20 nt, Human
ugugagaggccaaacacaga

SEQ ID NO: 200973 - RNA, 20 nt, Human
uucccacgcaggacacugug

SEQ ID NO: 200974 - RNA, 19 nt, Human
uuccggaagccccccacag

SEQ ID NO: 200975 - RNA, 21 nt, Human
uuuggcugcaugcaggggggg

SEQ ID NO: 200976 - RNA, 23 nt, Human
uuuuccggaagccccccacaggg

SEQ ID NO: 200977 - RNA, 24 nt, Human
uuuuugcacugaaaugagacuuua

SEQ ID NO: 200978 - RNA, 20 nt, Human
uuuuuuuuuugcacugaaau

SEQ ID NO: 200979 - RNA, 18 nt, Human
uuuuuuuuuuuuuuuuug

SEQ ID NO: 200980 - RNA, 19 nt, Human
uuuuuuuuuuuuuuuuugc

SEQ ID NO: 200981 - RNA, 18 nt, Human
aaaaggaagccggcagcc

SEQ ID NO: 200982 - RNA, 26 nt, Human
aaacaggcagacaaagagaggggacc

SEQ ID NO: 200983 - RNA, 27 nt, Human
aaacaggcagacaaagagaggggaccc

SEQ ID NO: 200984 - RNA, 20 nt, Human
aagagaagcaaaccgcgacc

SEQ ID NO: 200985 - RNA, 21 nt, Human
aagcgcgccgaggccgggagg

SEQ ID NO: 200986 - RNA, 18 nt, Human
accacacaacagccaggc

SEQ ID NO: 200987 - RNA, 19 nt, Human
acuacaccagagaccaggc

SEQ ID NO: 200988 - RNA, 22 nt, Human
acuacaccugugagucccacac

SEQ ID NO: 200989 - RNA, 20 nt, Human
acugggccacuagaccaugc

SEQ ID NO: 200990 - RNA, 23 nt, Human
aggagggaggcgcagccaccggg

SEQ ID NO: 200991 - RNA, 21 nt, Human
aggggcugcagaaggaaaagg

SEQ ID NO: 200992 - RNA, 22 nt, Human
aguaucuauacgugcaagcggc

SEQ ID NO: 200993 - RNA, 20 nt, Human
agugggucagaaccuccagg

SEQ ID NO: 200994 - RNA, 20 nt, Human
agugggucagaaccuccagg

SEQ ID NO: 200995 - RNA, 22 nt, Human
auggagcugguggggaggggcu

SEQ ID NO: 200996 - RNA, 18 nt, Human
caaaacgcaugggccggc

SEQ ID NO: 200997 - RNA, 19 nt, Human
caacccagagaccaggcgg

SEQ ID NO: 200998 - RNA, 19 nt, Human
caacgcaugccccaggccc

SEQ ID NO: 200999 - RNA, 18 nt, Human
caagguggaggcgcccgu

SEQ ID NO: 201000 - RNA, 22 nt, Human
cacuagaccaugcccugugugc

SEQ ID NO: 201001 - RNA, 22 nt, Human
cagacaaagagagcauaaauac

SEQ ID NO: 201002 - RNA, 19 nt, Human
caggcggaggcugagaggg

SEQ ID NO: 201003 - RNA, 19 nt, Human
caggcggaggcugagaggg

SEQ ID NO: 201004 - RNA, 23 nt, Human
caggugcaacgcaugccccaguu

SEQ ID NO: 201005 - RNA, 21 nt, Human
cauuucaccugucaccacaac

SEQ ID NO: 201006 - RNA, 23 nt, Human
ccacagagggcugcgcuucaaag

SEQ ID NO: 201007 - RNA, 24 nt, Human
ccacagagucacuugggaucacaa

SEQ ID NO: 201008 - RNA, 21 nt, Human
ccacaguaucuauacgugcaa

SEQ ID NO: 201009 - RNA, 19 nt, Human
ccacccuucccacagaguc

SEQ ID NO: 201010 - RNA, 23 nt, Human
ccacuagaccaugcccugugugc

SEQ ID NO: 201011 - RNA, 25 nt, Human
ccagacacaaaugccugugcucaca

SEQ ID NO: 201012 - RNA, 21 nt, Human
cccaggcccggggcccgggag

SEQ ID NO: 201013 - RNA, 23 nt, Human
ccccaagggaggagcuguccucu

SEQ ID NO: 201014 - RNA, 19 nt, Human
ccccagcuaaggaauggag

SEQ ID NO: 201015 - RNA, 19 nt, Human
cccgggccgcugcccggga

SEQ ID NO: 201016 - RNA, 20 nt, Human
cccugcgcucaucgccgccc

SEQ ID NO: 201017 - RNA, 22 nt, Human
ccgagcccaaguucggcgccgg

SEQ ID NO: 201018 - RNA, 18 nt, Human
ccgcugcccgccgccgcc

SEQ ID NO: 201019 - RNA, 19 nt, Human
ccgcugcccgccgccgccg

SEQ ID NO: 201020 - RNA, 18 nt, Human
ccgggacaagcgcgccga

SEQ ID NO: 201021 - RNA, 22 nt, Human
ccgggaggagugacuagcagcg

SEQ ID NO: 201022 - RNA, 19 nt, Human
ccucguccccacccuuccc

SEQ ID NO: 201023 - RNA, 19 nt, Human
ccucugagcuccccgugag

SEQ ID NO: 201024 - RNA, 20 nt, Human
ccugcaugucaccacauccc

SEQ ID NO: 201025 - RNA, 19 nt, Human
ccugcgcucaucgccgccc

SEQ ID NO: 201026 - RNA, 24 nt, Human
ccugcgcucaucgccgcccagaaa

SEQ ID NO: 201027 - RNA, 23 nt, Human
ccugucaccacagcccccaaggg

SEQ ID NO: 201028 - RNA, 24 nt, Human
ccugugcucacaacacggauggga

SEQ ID NO: 201029 - RNA, 20 nt, Human
cgcccguccgcugcccgccg

SEQ ID NO: 201030 - RNA, 25 nt, Human
cgccgcccagaaagacaaaaggaag

SEQ ID NO: 201031 - RNA, 22 nt, Human
cgccggcggcggcugcagcggg

SEQ ID NO: 201032 - RNA, 21 nt, Human
cggcggcugcagcgggcccgg

SEQ ID NO: 201033 - RNA, 22 nt, Human
cgggaccuacacaauacacucc

SEQ ID NO: 201034 - RNA, 21 nt, Human
cgggaggagugacuagcagcg

SEQ ID NO: 201035 - RNA, 21 nt, Human
cuacaccugugagucccacac

SEQ ID NO: 201036 - RNA, 20 nt, Human
cuccccgugagccgggaggu

SEQ ID NO: 201037 - RNA, 21 nt, Human
cuccucggcauggaccucuga

SEQ ID NO: 201038 - RNA, 27 nt, Human
cugcagugaggaccccaggucugaccc

SEQ ID NO: 201039 - RNA, 22 nt, Human
cugcccgggacaagcgcgccga

SEQ ID NO: 201040 - RNA, 23 nt, Human
cugcgggccacagagggcugcgc

SEQ ID NO: 201041 - RNA, 22 nt, Human
cuugcaagcaaagcuuaaacgg

SEQ ID NO: 201042 - RNA, 19 nt, Human
gaagggaccgggccaggcg

SEQ ID NO: 201043 - RNA, 21 nt, Human
gagguccugccuggucuccuc

SEQ ID NO: 201044 - RNA, 21 nt, Human
gcccccaagggaggagcuguc

SEQ ID NO: 201045 - RNA, 21 nt, Human
gcuaaggaauggagcuggugg

SEQ ID NO: 201046 - RNA, 21 nt, Human
gcuggcggcggcgacuacacc

SEQ ID NO: 201047 - RNA, 24 nt, Human
gcugguggggaggggcugcagaag

SEQ ID NO: 201048 - RNA, 18 nt, Human
ggaacagccaacccagag

SEQ ID NO: 201049 - RNA, 24 nt, Human
ggaacagccaacccagagaccagg

SEQ ID NO: 201050 - RNA, 20 nt, Human
ggaagggaccgggccaggcg

SEQ ID NO: 201051 - RNA, 23 nt, Human
ggaccgggccaggcgugagggga

SEQ ID NO: 201052 - RNA, 22 nt, Human
ggagcugguggggaggggcugc

SEQ ID NO: 201053 - RNA, 21 nt, Human
ggaggcugagagggagugggu

SEQ ID NO: 201054 - RNA, 21 nt, Human
ggaggcugagagggagugggu

SEQ ID NO: 201055 - RNA, 24 nt, Human
ggaggugccuggaaccaagaacac

SEQ ID NO: 201056 - RNA, 22 nt, Human
ggcuggcggcggcgacuacacc

SEQ ID NO: 201057 - RNA, 22 nt, Human
gggaggacagaccagacacaaa

SEQ ID NO: 201058 - RNA, 21 nt, Human
gguggaggagggaggcgcagc

SEQ ID NO: 201059 - RNA, 22 nt, Human
guugcccuggaagggaccgggc

SEQ ID NO: 201060 - RNA, 24 nt, Human
uaaaagaaaggggaccacaguauc

SEQ ID NO: 201061 - RNA, 22 nt, Human
uaaauaccacacaacagccagg

SEQ ID NO: 201062 - RNA, 25 nt, Human
uaaauaccacacaacagccaggcuc

SEQ ID NO: 201063 - RNA, 19 nt, Human
uacacuccacuucaccaua

SEQ ID NO: 201064 - RNA, 21 nt, Human
uacgugcaagcggcuguggug

SEQ ID NO: 201065 - RNA, 22 nt, Human
ucaccugucaccacagccccca

SEQ ID NO: 201066 - RNA, 22 nt, Human
ucagaaaaugccauuuauuuua

SEQ ID NO: 201067 - RNA, 22 nt, Human
ucagcagggagggcuagccuga

SEQ ID NO: 201068 - RNA, 18 nt, Human
uccccgugagccgggagg

SEQ ID NO: 201069 - RNA, 23 nt, Human
ucccgacgccucguccccacccu

SEQ ID NO: 201070 - RNA, 18 nt, Human
ucccugggaguugcccug

SEQ ID NO: 201071 - RNA, 21 nt, Human
ucgccuccgcgugggccccca

SEQ ID NO: 201072 - RNA, 20 nt, Human
ucggcgccggcggcggcugc

SEQ ID NO: 201073 - RNA, 21 nt, Human
ucuccucggcauggaccucug

SEQ ID NO: 201074 - RNA, 26 nt, Human
ucucugcaacuguccaggggccgcuc

SEQ ID NO: 201075 - RNA, 24 nt, Human
ucugagcuccccgugagccgggag

SEQ ID NO: 201076 - RNA, 25 nt, Human
ugaacccugcaugucaccacauccc

SEQ ID NO: 201077 - RNA, 18 nt, Human
ugaacgggggggcagcca

SEQ ID NO: 201078 - RNA, 22 nt, Human
ugacugggccacuagaccaugc

SEQ ID NO: 201079 - RNA, 26 nt, Human
ugagaacgcugccagaggccagcugc

SEQ ID NO: 201080 - RNA, 22 nt, Human
ugaggaccccaggucugacccc

SEQ ID NO: 201081 - RNA, 20 nt, Human
ugccccaggcccggggcccg

SEQ ID NO: 201082 - RNA, 20 nt, Human
ugcgggccacagagggcugc

SEQ ID NO: 201083 - RNA, 21 nt, Human
uggaagggaccgggccaggcg

SEQ ID NO: 201084 - RNA, 20 nt, Human
uggaccaagagcugucuuca

SEQ ID NO: 201085 - RNA, 18 nt, Human
uggagaaaaugaacgggg

SEQ ID NO: 201086 - RNA, 20 nt, Human
uggcccaggucgcggugcgg

SEQ ID NO: 201087 - RNA, 24 nt, Human
ugggaucacaaaacgcaugggccg

SEQ ID NO: 201088 - RNA, 23 nt, Human
uggggaggggcugcagaaggaaa

SEQ ID NO: 201089 - RNA, 21 nt, Human
uuuuuuuuuuuuuuuuuucag

SEQ ID NO: 201090 - RNA, 20 nt, Human
gcagagggcggccccgccga

SEQ ID NO: 201091 - RNA, 20 nt, Human
gcuggagcagagggcggccc

SEQ ID NO: 201092 - RNA, 24 nt, Human
ggacccaaggggagcagccaguag

SEQ ID NO: 201093 - RNA, 18 nt, Human
ggagcagccaguagggaa

SEQ ID NO: 201094 - RNA, 18 nt, Human
ggcguggcuguguggcug

SEQ ID NO: 201095 - RNA, 19 nt, Human
guguggcuguggccuccgu

SEQ ID NO: 201096 - RNA, 23 nt, Human
uggagcagagggcggccccgccg

SEQ ID NO: 201097 - RNA, 21 nt, Human
ugggggccgaguccgcuggug

SEQ ID NO: 201098 - RNA, 22 nt, Human
ugggggccgaguccgcuggugg

SEQ ID NO: 201099 - RNA, 24 nt, Human
uggucagugugggcggagccuugg

SEQ ID NO: 201100 - RNA, 23 nt, Human
uugggggccgaguccgcuggugg

SEQ ID NO: 201101 - RNA, 21 nt, Human
aaagaaguaauuugaaaaaaa

SEQ ID NO: 201102 - RNA, 20 nt, Human
aagaagcucuuggaagaacu

SEQ ID NO: 201103 - RNA, 22 nt, Human
aagauuacaaccuagccuuugg

SEQ ID NO: 201104 - RNA, 23 nt, Human
aagcacagauauaaauacacuuu

SEQ ID NO: 201105 - RNA, 24 nt, Human
aauaaagaaguaauuugaaaaaaa

SEQ ID NO: 201106 - RNA, 21 nt, Human
acaaaaaaagcaaaaccucac

SEQ ID NO: 201107 - RNA, 24 nt, Human
acaaccuagccuuugguccacauc

SEQ ID NO: 201108 - RNA, 18 nt, Human
acaucauuuacugauuag

SEQ ID NO: 201109 - RNA, 18 nt, Human
agauaggaucugaauaua

SEQ ID NO: 201110 - RNA, 21 nt, Human
agcugacaacaaaaaaagcaa

SEQ ID NO: 201111 - RNA, 21 nt, Human
aguccaaaaaauuguccauaa

SEQ ID NO: 201112 - RNA, 24 nt, Human
auagcugacaacaaaaaaagcaaa

SEQ ID NO: 201113 - RNA, 20 nt, Human
auaugacaacauuccaguac

SEQ ID NO: 201114 - RNA, 21 nt, Human
auugcuguaacuguuaaaagu

SEQ ID NO: 201115 - RNA, 18 nt, Human
caaaaaaagcaaaaccuc

SEQ ID NO: 201116 - RNA, 19 nt, Human
caaagaguuuuacccaaag

SEQ ID NO: 201117 - RNA, 24 nt, Human
caacaaaaaaagcaaaaccucaca

SEQ ID NO: 201118 - RNA, 19 nt, Human
cacugccagaacauacaaa

SEQ ID NO: 201119 - RNA, 22 nt, Human
cacugccagaacauacaaacaa

SEQ ID NO: 201120 - RNA, 19 nt, Human
cagcaguuuucaucuggga

SEQ ID NO: 201121 - RNA, 23 nt, Human
cauggguacaaaaacauuuacag

SEQ ID NO: 201122 - RNA, 25 nt, Human
ccauauacuuaacuaaaaauuuaga

SEQ ID NO: 201123 - RNA, 19 nt, Human
cguuuaucaccaagugcau

SEQ ID NO: 201124 - RNA, 18 nt, Human
cuguaacuguuaaaaguu

SEQ ID NO: 201125 - RNA, 23 nt, Human
gaagaacugaaauguucaguuga

SEQ ID NO: 201126 - RNA, 20 nt, Human
ggaaaaauacagaagauaag

SEQ ID NO: 201127 - RNA, 23 nt, Human
gucaaucaguuacuuucugucau

SEQ ID NO: 201128 - RNA, 24 nt, Human
gugagcagaggaaagaaaugucuu

SEQ ID NO: 201129 - RNA, 21 nt, Human
gugucaaucaguuacuuucug

SEQ ID NO: 201130 - RNA, 20 nt, Human
uaaagugagcagaggaaaga

SEQ ID NO: 201131 - RNA, 22 nt, Human
uaacuuauguaacucacauuuu

SEQ ID NO: 201132 - RNA, 23 nt, Human
uaaguaauuuauggagaucagaa

SEQ ID NO: 201133 - RNA, 23 nt, Human
uaaguuuuuaacuuauguaacuc

SEQ ID NO: 201134 - RNA, 26 nt, Human
uaaguuuuuaacuuauguaacucaca

SEQ ID NO: 201135 - RNA, 20 nt, Human
uacaaccuagccuuuggucc

SEQ ID NO: 201136 - RNA, 22 nt, Human
uaccuauagaagguaagauuua

SEQ ID NO: 201137 - RNA, 20 nt, Human
uagcugacaacaaaaaaagc

SEQ ID NO: 201138 - RNA, 22 nt, Human
uaggaggcugaacugugaauca

SEQ ID NO: 201139 - RNA, 26 nt, Human
uauagcagaauuaaaauagggcaaga

SEQ ID NO: 201140 - RNA, 25 nt, Human
uauuuacacgacagaggaaaaauac

SEQ ID NO: 201141 - RNA, 19 nt, Human
ucaucugggauauguuuac

SEQ ID NO: 201142 - RNA, 18 nt, Human
ugaaggaaaacuucaaac

SEQ ID NO: 201143 - RNA, 18 nt, Human
ugacaacaaaaaaagcaa

SEQ ID NO: 201144 - RNA, 24 nt, Human
ugagauuuuuggagucgguaaaag

SEQ ID NO: 201145 - RNA, 18 nt, Human
ugaguuucagcaugggua

SEQ ID NO: 201146 - RNA, 18 nt, Human
ugccagaacauacaaaca

SEQ ID NO: 201147 - RNA, 21 nt, Human
uguauuuaaugauucuuaaga

SEQ ID NO: 201148 - RNA, 20 nt, Human
uuacuaguguuaauuacugc

SEQ ID NO: 201149 - RNA, 25 nt, Human
uugagcaucuuaaauauaauauuuu

SEQ ID NO: 201150 - RNA, 24 nt, Human
uuuauugaaggguaggcacuuuug

SEQ ID NO: 201151 - RNA, 22 nt, Human
aaaacgucccauccucggccca

SEQ ID NO: 201152 - RNA, 22 nt, Human
aagaagaaaaacgucccauccc

SEQ ID NO: 201153 - RNA, 24 nt, Human
acagcagaacaauauuuacauggg

SEQ ID NO: 201154 - RNA, 20 nt, Human
agacaggagucccagacagc

SEQ ID NO: 201155 - RNA, 18 nt, Human
aggcagaggcgguggcgu

SEQ ID NO: 201156 - RNA, 21 nt, Human
aggcagaggcgguggcguggg

SEQ ID NO: 201157 - RNA, 20 nt, Human
aggcgguggcguggggccug

SEQ ID NO: 201158 - RNA, 20 nt, Human
agguagggucccuggaaagc

SEQ ID NO: 201159 - RNA, 18 nt, Human
caccucgggcccuggagg

SEQ ID NO: 201160 - RNA, 20 nt, Human
caccucgggcccuggaggcu

SEQ ID NO: 201161 - RNA, 19 nt, Human
cagggugggacccuggggu

SEQ ID NO: 201162 - RNA, 21 nt, Human
ccacuguggaagagaggaccc

SEQ ID NO: 201163 - RNA, 23 nt, Human
cccaucaucaggggcaccuagac

SEQ ID NO: 201164 - RNA, 24 nt, Human
cccaucaucaggggcaccuagaca

SEQ ID NO: 201165 - RNA, 21 nt, Human
ccccgcagcagcgggcggccu

SEQ ID NO: 201166 - RNA, 19 nt, Human
ccgggcccaagaagaaaaa

SEQ ID NO: 201167 - RNA, 21 nt, Human
ccugcuaggccaggcugccuc

SEQ ID NO: 201168 - RNA, 22 nt, Human
cguggggccugcuaggccaggc

SEQ ID NO: 201169 - RNA, 21 nt, Human
cugaccuccugggccagggug

SEQ ID NO: 201170 - RNA, 23 nt, Human
cugaccuccugggccaggguggg

SEQ ID NO: 201171 - RNA, 22 nt, Human
cuggagggaggguguccuugga

SEQ ID NO: 201172 - RNA, 24 nt, Human
cugggccagggugggacccugggg

SEQ ID NO: 201173 - RNA, 20 nt, Human
gagcaucccaucaucagggg

SEQ ID NO: 201174 - RNA, 21 nt, Human
gccagggugggacccuggggu

SEQ ID NO: 201175 - RNA, 22 nt, Human
gcccgccacuguggaagagagg

SEQ ID NO: 201176 - RNA, 18 nt, Human
ggaccgggcccaagaaga

SEQ ID NO: 201177 - RNA, 22 nt, Human
ggagggaggguguccuuggaaa

SEQ ID NO: 201178 - RNA, 20 nt, Human
gggccagggugggacccugg

SEQ ID NO: 201179 - RNA, 20 nt, Human
ggggucgggucagucuccag

SEQ ID NO: 201180 - RNA, 24 nt, Human
gguccagcaggugggggcggagcc

SEQ ID NO: 201181 - RNA, 20 nt, Human
guggaagagaggacccugga

SEQ ID NO: 201182 - RNA, 25 nt, Human
uaaagagcaucccaucaucaggggc

SEQ ID NO: 201183 - RNA, 24 nt, Human
uggaagagaggacccuggagggaa

SEQ ID NO: 201184 - RNA, 18 nt, Human
uggaggcagaggcggugg

SEQ ID NO: 201185 - RNA, 26 nt, Human
uggguggucucggggcugagugggcc

SEQ ID NO: 201186 - RNA, 20 nt, Human
uucccuggcugaccuccugg

SEQ ID NO: 201187 - RNA, 23 nt, Human
uggucuugccucuggaagagcag

SEQ ID NO: 201188 - RNA, 22 nt, Human
aaacaacaauccgcccaaaggg

SEQ ID NO: 201189 - RNA, 23 nt, Human
acuucuuagaugcugucuuugau

SEQ ID NO: 201190 - RNA, 21 nt, Human
agauggccacagaacuagaac

SEQ ID NO: 201191 - RNA, 19 nt, Human
agcucuacuaagcagaugg

SEQ ID NO: 201192 - RNA, 18 nt, Human
aggaggaggaagccggug

SEQ ID NO: 201193 - RNA, 25 nt, Human
caacugacauuucuaaaguacaaaa

SEQ ID NO: 201194 - RNA, 23 nt, Human
caaguuaaacaacaauccgccca

SEQ ID NO: 201195 - RNA, 21 nt, Human
cuacuaaaauaauuccaggac

SEQ ID NO: 201196 - RNA, 22 nt, Human
cucauagugcaaauaaacaguu

SEQ ID NO: 201197 - RNA, 20 nt, Human
gaagccgguggcggagcaga

SEQ ID NO: 201198 - RNA, 19 nt, Human
gaggaggaagccgguggcg

SEQ ID NO: 201199 - RNA, 19 nt, Human
gcggagcagaggaggaggc

SEQ ID NO: 201200 - RNA, 23 nt, Human
gcggagcagaggaggaggcggag

SEQ ID NO: 201201 - RNA, 20 nt, Human
gcucaggaggaggaagccgg

SEQ ID NO: 201202 - RNA, 24 nt, Human
uaaaauaauuccaggacagaacaa

SEQ ID NO: 201203 - RNA, 20 nt, Human
uaaacaacaauccgcccaaa

SEQ ID NO: 201204 - RNA, 19 nt, Human
uaaaguacaaaacagauaa

SEQ ID NO: 201205 - RNA, 22 nt, Human
uaagcagauggccacagaacua

SEQ ID NO: 201206 - RNA, 23 nt, Human
uaagcagauggccacagaacuag

SEQ ID NO: 201207 - RNA, 22 nt, Human
uacaaaacagauaaaauucuua

SEQ ID NO: 201208 - RNA, 19 nt, Human
uacagauaugaguucaaug

SEQ ID NO: 201209 - RNA, 23 nt, Human
uacagucaacauuacugaaacac

SEQ ID NO: 201210 - RNA, 23 nt, Human
ucacugguaauaauuugaacaag

SEQ ID NO: 201211 - RNA, 26 nt, Human
uccaggacagaacaaaacuucuuaga

SEQ ID NO: 201212 - RNA, 18 nt, Human
ucuaaaguacaaaacaga

SEQ ID NO: 201213 - RNA, 22 nt, Human
ugacauuucuaaaguacaaaac

SEQ ID NO: 201214 - RNA, 19 nt, Human
uucucuuuauuucuuacag

SEQ ID NO: 201215 - RNA, 18 nt, Human
aaagacaucaaagccugg

SEQ ID NO: 201216 - RNA, 22 nt, Human
aagacuaaagacacagaaggcg

SEQ ID NO: 201217 - RNA, 23 nt, Human
aagggaauccaaaucucugggcc

SEQ ID NO: 201218 - RNA, 21 nt, Human
accacagaagcuuugaaagac

SEQ ID NO: 201219 - RNA, 20 nt, Human
accugacauggagggugguc

SEQ ID NO: 201220 - RNA, 18 nt, Human
acuaaagacacagaaggc

SEQ ID NO: 201221 - RNA, 22 nt, Human
agcucuggaagaggagcuguug

SEQ ID NO: 201222 - RNA, 26 nt, Human
agcuuugaaagacaucaaagccuggg

SEQ ID NO: 201223 - RNA, 21 nt, Human
aggaacacagauccagucacc

SEQ ID NO: 201224 - RNA, 22 nt, Human
aggaggaacacagauccaguca

SEQ ID NO: 201225 - RNA, 24 nt, Human
aggauaaaggcagaggcagcucug

SEQ ID NO: 201226 - RNA, 22 nt, Human
aggcucucgucauggggaacag

SEQ ID NO: 201227 - RNA, 21 nt, Human
agucccagggcucucaggguc

SEQ ID NO: 201228 - RNA, 18 nt, Human
aucagcacugacagaagg

SEQ ID NO: 201229 - RNA, 24 nt, Human
auccaaaucucugggccagggcca

SEQ ID NO: 201230 - RNA, 21 nt, Human
caaaucucugggccagggcca

SEQ ID NO: 201231 - RNA, 23 nt, Human
caagcacaguggagcauccagac

SEQ ID NO: 201232 - RNA, 21 nt, Human
cagacgccagccaagcaugaa

SEQ ID NO: 201233 - RNA, 20 nt, Human
cagagagaaggaucuggggc

SEQ ID NO: 201234 - RNA, 26 nt, Human
cagcacugacagaagggucggagucc

SEQ ID NO: 201235 - RNA, 22 nt, Human
cagcagaccgacucggugacug

SEQ ID NO: 201236 - RNA, 25 nt, Human
cagcagagauggggcuuccucccca

SEQ ID NO: 201237 - RNA, 24 nt, Human
cagucccagggcucucagggucuc

SEQ ID NO: 201238 - RNA, 18 nt, Human
cauccagacggccagagg

SEQ ID NO: 201239 - RNA, 25 nt, Human
caucccugguccucacuuccgggag

SEQ ID NO: 201240 - RNA, 19 nt, Human
caugcacagcacacggcca

SEQ ID NO: 201241 - RNA, 26 nt, Human
ccacaauccacgcuuuucauugccau

SEQ ID NO: 201242 - RNA, 22 nt, Human
ccacgccguccucucuggccca

SEQ ID NO: 201243 - RNA, 25 nt, Human
ccacgccguccucucuggcccagca

SEQ ID NO: 201244 - RNA, 19 nt, Human
cccccagccccaaagcugu

SEQ ID NO: 201245 - RNA, 19 nt, Human
ccggaggcccacguaccgg

SEQ ID NO: 201246 - RNA, 23 nt, Human
ccuccuggcucagaggagcagac

SEQ ID NO: 201247 - RNA, 23 nt, Human
ccucggguggugguucucaaucc

SEQ ID NO: 201248 - RNA, 22 nt, Human
ccugugcugcaguggacgcuga

SEQ ID NO: 201249 - RNA, 18 nt, Human
cgcugcuaaaaacuaaag

SEQ ID NO: 201250 - RNA, 18 nt, Human
cgcuggaauucaaaccca

SEQ ID NO: 201251 - RNA, 18 nt, Human
cuggcccagcaccggccu

SEQ ID NO: 201252 - RNA, 19 nt, Human
cuggguccauucuggacag

SEQ ID NO: 201253 - RNA, 25 nt, Human
cuguaccccucggguggugguucuc

SEQ ID NO: 201254 - RNA, 22 nt, Human
cuugcugggugggcuuccucca

SEQ ID NO: 201255 - RNA, 27 nt, Human
cuuggcaagcacaguggagcauccaga

SEQ ID NO: 201256 - RNA, 18 nt, Human
gacaggaugcaaaggcag

SEQ ID NO: 201257 - RNA, 18 nt, Human
gaccccugggcuucccuc

SEQ ID NO: 201258 - RNA, 22 nt, Human
gcagggguccugaacaguggug

SEQ ID NO: 201259 - RNA, 18 nt, Human
gccagagguucagaaagg

SEQ ID NO: 201260 - RNA, 21 nt, Human
gcccuagggcagacgccagcc

SEQ ID NO: 201261 - RNA, 18 nt, Human
gcugcuaaaaacuaaagg

SEQ ID NO: 201262 - RNA, 22 nt, Human
ggaaauaguaggugacaaaagc

SEQ ID NO: 201263 - RNA, 23 nt, Human
ggagcagacacucccagucccag

SEQ ID NO: 201264 - RNA, 19 nt, Human
ggcagacgccagccaagca

SEQ ID NO: 201265 - RNA, 22 nt, Human
gggaacagcagagauggggccg

SEQ ID NO: 201266 - RNA, 21 nt, Human
gggcuccacggccgccaaggg

SEQ ID NO: 201267 - RNA, 20 nt, Human
gggcugcagcagaccgacuc

SEQ ID NO: 201268 - RNA, 22 nt, Human
gggcuuccuccccaucucccag

SEQ ID NO: 201269 - RNA, 24 nt, Human
ggguaggagagagcuugcuggguc

SEQ ID NO: 201270 - RNA, 18 nt, Human
gguccugaacaguggugg

SEQ ID NO: 201271 - RNA, 22 nt, Human
gugggcuuccuccacgcaggga

SEQ ID NO: 201272 - RNA, 23 nt, Human
guggugggcucaggggauuggag

SEQ ID NO: 201273 - RNA, 25 nt, Human
guggugggcucaggggauuggaguu

SEQ ID NO: 201274 - RNA, 19 nt, Human
uaaagggaaauaguaggug

SEQ ID NO: 201275 - RNA, 25 nt, Human
uaccacacuggguaauccucacacc

SEQ ID NO: 201276 - RNA, 20 nt, Human
uagaaagaucaaggggacug

SEQ ID NO: 201277 - RNA, 19 nt, Human
uagcaagggcuuaucagca

SEQ ID NO: 201278 - RNA, 21 nt, Human
uaggagagagcuugcugggug

SEQ ID NO: 201279 - RNA, 25 nt, Human
uaggugacaaaagcagggguccuga

SEQ ID NO: 201280 - RNA, 18 nt, Human
ucagcacugacagaaggg

SEQ ID NO: 201281 - RNA, 20 nt, Human
ucaggauguucacuccugug

SEQ ID NO: 201282 - RNA, 20 nt, Human
ucagugauaacaaugaccaa

SEQ ID NO: 201283 - RNA, 19 nt, Human
uccagggcgcaccacagaa

SEQ ID NO: 201284 - RNA, 21 nt, Human
ucccagggcucucagggucuc

SEQ ID NO: 201285 - RNA, 23 nt, Human
uccccaucucccaggauaaaggc

SEQ ID NO: 201286 - RNA, 21 nt, Human
uccuuuauguuuuucuguauu

SEQ ID NO: 201287 - RNA, 25 nt, Human
ucggguggugguucucaauccaggg

SEQ ID NO: 201288 - RNA, 18 nt, Human
ucgguuggaagagagggg

SEQ ID NO: 201289 - RNA, 24 nt, Human
ucucagggucucuugucccugggu

SEQ ID NO: 201290 - RNA, 24 nt, Human
ucucaggguuuagaccaacaugug

SEQ ID NO: 201291 - RNA, 23 nt, Human
ucucccaggauaaaggcagaggc

SEQ ID NO: 201292 - RNA, 21 nt, Human
ucucgguuggaagagaggggc

SEQ ID NO: 201293 - RNA, 23 nt, Human
ucucuugucccuggguccauucu

SEQ ID NO: 201294 - RNA, 19 nt, Human
ucuggaagaggagcuguug

SEQ ID NO: 201295 - RNA, 19 nt, Human
ucugggccagggccagggg

SEQ ID NO: 201296 - RNA, 24 nt, Human
ugaacaguggugggcucaggggau

SEQ ID NO: 201297 - RNA, 21 nt, Human
ugaaggggcugggacuuagca

SEQ ID NO: 201298 - RNA, 25 nt, Human
ugacauggaggguggucuagguggc

SEQ ID NO: 201299 - RNA, 22 nt, Human
ugacuggcucaugggagagcag

SEQ ID NO: 201300 - RNA, 24 nt, Human
ugcaaggaagagaucagucuuuug

SEQ ID NO: 201301 - RNA, 21 nt, Human
ugcaugcacagcacacggcca

SEQ ID NO: 201302 - RNA, 18 nt, Human
ugccaggaggugcagaga

SEQ ID NO: 201303 - RNA, 19 nt, Human
ugcuaaaaacuaaagggaa

SEQ ID NO: 201304 - RNA, 29 nt, Human
uggaggacaggaugcaaaggcagacugcg

SEQ ID NO: 201305 - RNA, 20 nt, Human
uggaggguggucuagguggg

SEQ ID NO: 201306 - RNA, 19 nt, Human
uggaguuuuuuccuuuaug

SEQ ID NO: 201307 - RNA, 20 nt, Human
uggcucaagacuaaagacac

SEQ ID NO: 201308 - RNA, 21 nt, Human
uggcucaagacuaaagacaca

SEQ ID NO: 201309 - RNA, 18 nt, Human
uggcucaugggagagcag

SEQ ID NO: 201310 - RNA, 21 nt, Human
uggcucaugggagagcagcac

SEQ ID NO: 201311 - RNA, 18 nt, Human
ugggccagggccaggggc

SEQ ID NO: 201312 - RNA, 20 nt, Human
ugggccagggccaggggcuu

SEQ ID NO: 201313 - RNA, 25 nt, Human
ugggccagggccaggggcuugagaa

SEQ ID NO: 201314 - RNA, 22 nt, Human
uguuuuacaaacaggaccccug

SEQ ID NO: 201315 - RNA, 23 nt, Human
uucccccagccccaaagcuguuc

SEQ ID NO: 201316 - RNA, 18 nt, Human
accuuaaaaaauguaugg

SEQ ID NO: 201317 - RNA, 19 nt, Human
acuuguaaaauguuuccuu

SEQ ID NO: 201318 - RNA, 21 nt, Human
aggcuuuggcugaaaaaaaca

SEQ ID NO: 201319 - RNA, 18 nt, Human
aucuggaaaaaucaagaa

SEQ ID NO: 201320 - RNA, 18 nt, Human
auggaaacaaggcuuugg

SEQ ID NO: 201321 - RNA, 21 nt, Human
augugugugugugugugugug

SEQ ID NO: 201322 - RNA, 22 nt, Human
augugugugugugugugugugu

SEQ ID NO: 201323 - RNA, 24 nt, Human
auguguguguguguguguguguug

SEQ ID NO: 201324 - RNA, 18 nt, Human
caaaaaaaaugagguuug

SEQ ID NO: 201325 - RNA, 21 nt, Human
caaaaaaaaugagguuugaaa

SEQ ID NO: 201326 - RNA, 18 nt, Human
caacaaaaauggaaacaa

SEQ ID NO: 201327 - RNA, 21 nt, Human
cacaucaacaaaaauggaaac

SEQ ID NO: 201328 - RNA, 21 nt, Human
cagccugaaagcauuuguauc

SEQ ID NO: 201329 - RNA, 23 nt, Human
cauauaugugugugugugugugu

SEQ ID NO: 201330 - RNA, 23 nt, Human
caugucuccaacaacagugaacu

SEQ ID NO: 201331 - RNA, 20 nt, Human
cgagccaaugacgccggguc

SEQ ID NO: 201332 - RNA, 21 nt, Human
gcgcugaccgcgaauguagga

SEQ ID NO: 201333 - RNA, 21 nt, Human
gugugugugugugugugugug

SEQ ID NO: 201334 - RNA, 21 nt, Human
gugugugugugugugugugug

SEQ ID NO: 201335 - RNA, 19 nt, Human
uaacaagaaaaggaacaaa

SEQ ID NO: 201336 - RNA, 21 nt, Human
uaacaucuuucucaaaaacau

SEQ ID NO: 201337 - RNA, 19 nt, Human
uaagguaagcagccugaaa

SEQ ID NO: 201338 - RNA, 19 nt, Human
uacacaucaacaaaaaugg

SEQ ID NO: 201339 - RNA, 18 nt, Human
uaccauggcaaaacauua

SEQ ID NO: 201340 - RNA, 23 nt, Human
uaccauggcaaaacauuaacauc

SEQ ID NO: 201341 - RNA, 21 nt, Human
uagcuaaaagagcaagaguac

SEQ ID NO: 201342 - RNA, 19 nt, Human
uauaugugugugugugugu

SEQ ID NO: 201343 - RNA, 23 nt, Human
uauaugugugugugugugugugu

SEQ ID NO: 201344 - RNA, 18 nt, Human
uaugugugugugugugug

SEQ ID NO: 201345 - RNA, 23 nt, Human
uaugugugugugugugugugugu

SEQ ID NO: 201346 - RNA, 24 nt, Human
uaugugugugugugugugugugug

SEQ ID NO: 201347 - RNA, 22 nt, Human
ucaacaaaaauggaaacaaggc

SEQ ID NO: 201348 - RNA, 19 nt, Human
ucuugggaugaaaaugauu

SEQ ID NO: 201349 - RNA, 20 nt, Human
ugaacugauguuguuccuug

SEQ ID NO: 201350 - RNA, 19 nt, Human
uggcugaaaaaaacaugca

SEQ ID NO: 201351 - RNA, 18 nt, Human
uguaucauauaugugugu

SEQ ID NO: 201352 - RNA, 18 nt, Human
uguaucauauaugugugu

SEQ ID NO: 201353 - RNA, 18 nt, Human
uguguguguguguguaua

SEQ ID NO: 201354 - RNA, 20 nt, Human
uguguguguguguguauaua

SEQ ID NO: 201355 - RNA, 18 nt, Human
ugugugugugugugugug

SEQ ID NO: 201356 - RNA, 18 nt, Human
ugugugugugugugugug

SEQ ID NO: 201357 - RNA, 18 nt, Human
ugugugugugugugugug

SEQ ID NO: 201358 - RNA, 18 nt, Human
ugugugugugugugugug

SEQ ID NO: 201359 - RNA, 18 nt, Human
ugugugugugugugugug

SEQ ID NO: 201360 - RNA, 18 nt, Human
ugugugugugugugugug

SEQ ID NO: 201361 - RNA, 18 nt, Human
ugugugugugugugugug

SEQ ID NO: 201362 - RNA, 18 nt, Human
ugugugugugugugugug

SEQ ID NO: 201363 - RNA, 18 nt, Human
ugugugugugugugugug

SEQ ID NO: 201364 - RNA, 18 nt, Human
ugugugugugugugugug

SEQ ID NO: 201365 - RNA, 24 nt, Human
uguguguguguguguguguauaua

SEQ ID NO: 201366 - RNA, 21 nt, Human
ugugugugugugugugugugu

SEQ ID NO: 201367 - RNA, 21 nt, Human
ugugugugugugugugugugu

SEQ ID NO: 201368 - RNA, 21 nt, Human
ugugugugugugugugugugu

SEQ ID NO: 201369 - RNA, 21 nt, Human
ugugugugugugugugugugu

SEQ ID NO: 201370 - RNA, 21 nt, Human
ugugugugugugugugugugu

SEQ ID NO: 201371 - RNA, 21 nt, Human
ugugugugugugugugugugu

SEQ ID NO: 201372 - RNA, 21 nt, Human
ugugugugugugugugugugu

SEQ ID NO: 201373 - RNA, 21 nt, Human
ugugugugugugugugugugu

SEQ ID NO: 201374 - RNA, 21 nt, Human
ugugugugugugugugugugu

SEQ ID NO: 201375 - RNA, 21 nt, Human
ugugugugugugugugugugu

SEQ ID NO: 201376 - RNA, 21 nt, Human
ugugugugugugugugugugu

SEQ ID NO: 201377 - RNA, 21 nt, Human
ugugugugugugugugugugu

SEQ ID NO: 201378 - RNA, 21 nt, Human
ugugugugugugugugugugu

SEQ ID NO: 201379 - RNA, 21 nt, Human
ugugugugugugugugugugu

SEQ ID NO: 201380 - RNA, 22 nt, Human
ugugugugugugugugugugua

SEQ ID NO: 201381 - RNA, 22 nt, Human
ugugugugugugugugugugug

SEQ ID NO: 201382 - RNA, 22 nt, Human
ugugugugugugugugugugug

SEQ ID NO: 201383 - RNA, 22 nt, Human
ugugugugugugugugugugug

SEQ ID NO: 201384 - RNA, 22 nt, Human
ugugugugugugugugugugug

SEQ ID NO: 201385 - RNA, 22 nt, Human
ugugugugugugugugugugug

SEQ ID NO: 201386 - RNA, 22 nt, Human
uuaacaucuuucucaaaaacau

SEQ ID NO: 201387 - RNA, 23 nt, Human
uuggaauaaaagucaauccccac

SEQ ID NO: 201388 - RNA, 25 nt, Human
uuguaucauauaugugugugugugu

SEQ ID NO: 201389 - RNA, 18 nt, Human
uuuuuuuuuuuuuuuuug

SEQ ID NO: 201390 - RNA, 19 nt, Human
uuuuuuuuuuuuuuuuugu

SEQ ID NO: 201391 - RNA, 19 nt, Human
aaaauaaaauagaggggcc

SEQ ID NO: 201392 - RNA, 18 nt, Human
aaauaaaauagaggggcc

SEQ ID NO: 201393 - RNA, 22 nt, Human
aaauaucauuugguuccuaaaa

SEQ ID NO: 201394 - RNA, 20 nt, Human
aagaaaaauaaaauagaggg

SEQ ID NO: 201395 - RNA, 24 nt, Human
aagcugggauggaacagcaggaga

SEQ ID NO: 201396 - RNA, 23 nt, Human
aauacaacucucaaauggaaucu

SEQ ID NO: 201397 - RNA, 21 nt, Human
acacaagcccaggaacacaca

SEQ ID NO: 201398 - RNA, 19 nt, Human
acacacagcugagugucgc

SEQ ID NO: 201399 - RNA, 18 nt, Human
acaccgccuaccaccacc

SEQ ID NO: 201400 - RNA, 21 nt, Human
acagugcuuuuacccccagac

SEQ ID NO: 201401 - RNA, 18 nt, Human
accgauuaaauacaguuc

SEQ ID NO: 201402 - RNA, 19 nt, Human
accugcgacuucugccccg

SEQ ID NO: 201403 - RNA, 19 nt, Human
agaacuaaccccugccccc

SEQ ID NO: 201404 - RNA, 19 nt, Human
agucaaaggcagcgcaggu

SEQ ID NO: 201405 - RNA, 18 nt, Human
aguucaaacaucagugcc

SEQ ID NO: 201406 - RNA, 19 nt, Human
auacaguucuuuaucaagu

SEQ ID NO: 201407 - RNA, 19 nt, Human
augccucuuacaacucagg

SEQ ID NO: 201408 - RNA, 23 nt, Human
auggaacagcaggagauaugaaa

SEQ ID NO: 201409 - RNA, 18 nt, Human
auguauauuuccaugccu

SEQ ID NO: 201410 - RNA, 26 nt, Human
caaacucccuuccauauuauuaaggc

SEQ ID NO: 201411 - RNA, 23 nt, Human
caaauccauuccucugguuuccu

SEQ ID NO: 201412 - RNA, 24 nt, Human
caagaaaaagacaccauaucauaa

SEQ ID NO: 201413 - RNA, 24 nt, Human
cacacaagcccaggaacacacagc

SEQ ID NO: 201414 - RNA, 25 nt, Human
cacacaagcccaggaacacacagcu

SEQ ID NO: 201415 - RNA, 20 nt, Human
cacaccgccuaccaccaccu

SEQ ID NO: 201416 - RNA, 21 nt, Human
caccauaucauaaacaucaga

SEQ ID NO: 201417 - RNA, 24 nt, Human
cacgcagccaccacugaaaagcac

SEQ ID NO: 201418 - RNA, 19 nt, Human
cagcaagagcgcacuggag

SEQ ID NO: 201419 - RNA, 23 nt, Human
caggaaagccaaaagugggagau

SEQ ID NO: 201420 - RNA, 20 nt, Human
cagggagaaacuauaacaaa

SEQ ID NO: 201421 - RNA, 22 nt, Human
cagucacaccgccuaccaccac

SEQ ID NO: 201422 - RNA, 23 nt, Human
cauuugguuccuaaaaaagggaa

SEQ ID NO: 201423 - RNA, 20 nt, Human
ccaaaacacaucccaaucug

SEQ ID NO: 201424 - RNA, 23 nt, Human
ccaaaacacaucccaaucugcaa

SEQ ID NO: 201425 - RNA, 18 nt, Human
ccaacagaauucaaccaa

SEQ ID NO: 201426 - RNA, 22 nt, Human
ccaagcccgucccggccccaac

SEQ ID NO: 201427 - RNA, 23 nt, Human
ccaaucugcaaaaggaauaacaa

SEQ ID NO: 201428 - RNA, 18 nt, Human
ccacacaagcccaggaac

SEQ ID NO: 201429 - RNA, 21 nt, Human
ccaccucuucaagcuccucuc

SEQ ID NO: 201430 - RNA, 21 nt, Human
ccaugccucuuacaacucagg

SEQ ID NO: 201431 - RNA, 22 nt, Human
cccaaaacacaucccaaucugc

SEQ ID NO: 201432 - RNA, 18 nt, Human
cccccaaaacacauccca

SEQ ID NO: 201433 - RNA, 22 nt, Human
cccccaaaacacaucccaaucu

SEQ ID NO: 201434 - RNA, 20 nt, Human
cccccaauccagugaaucug

SEQ ID NO: 201435 - RNA, 25 nt, Human
cccccagacaucuuguaaacuccua

SEQ ID NO: 201436 - RNA, 23 nt, Human
ccccugcccccaaaacacauccc

SEQ ID NO: 201437 - RNA, 19 nt, Human
cccgucccggccccaacac

SEQ ID NO: 201438 - RNA, 18 nt, Human
cccugcccccaaaacaca

SEQ ID NO: 201439 - RNA, 19 nt, Human
cccugcccccaaaacacau

SEQ ID NO: 201440 - RNA, 21 nt, Human
ccugcccccaaaacacauccc

SEQ ID NO: 201441 - RNA, 21 nt, Human
ccugcgcgcgcggcagagagg

SEQ ID NO: 201442 - RNA, 22 nt, Human
cgaccugaagaacuaaccccug

SEQ ID NO: 201443 - RNA, 21 nt, Human
cgcagccaccacugaaaagca

SEQ ID NO: 201444 - RNA, 24 nt, Human
cgccccuagauuugaguagaguuc

SEQ ID NO: 201445 - RNA, 18 nt, Human
cuaaccccugcccccaaa

SEQ ID NO: 201446 - RNA, 23 nt, Human
cuuaggucacgcgccgccccgcc

SEQ ID NO: 201447 - RNA, 19 nt, Human
gaaauuucuagcuugucua

SEQ ID NO: 201448 - RNA, 18 nt, Human
gaacugagguucuaagua

SEQ ID NO: 201449 - RNA, 18 nt, Human
gaagcuuguggcaccaau

SEQ ID NO: 201450 - RNA, 24 nt, Human
gagaggaaccagcugcacggccca

SEQ ID NO: 201451 - RNA, 23 nt, Human
gaguagccaggcaucccagugcu

SEQ ID NO: 201452 - RNA, 27 nt, Human
gcagaaccaccucuucaagcuccucuc

SEQ ID NO: 201453 - RNA, 21 nt, Human
gcagcagcuggguaccugcga

SEQ ID NO: 201454 - RNA, 19 nt, Human
gcagcgcagguugguccug

SEQ ID NO: 201455 - RNA, 22 nt, Human
gccgaccugaagaacuaacccc

SEQ ID NO: 201456 - RNA, 18 nt, Human
ggacucuggaccagaaac

SEQ ID NO: 201457 - RNA, 19 nt, Human
ggcagagagggagccaagc

SEQ ID NO: 201458 - RNA, 22 nt, Human
gggcagcagcuggguaccugcg

SEQ ID NO: 201459 - RNA, 26 nt, Human
gguguucuaaagaaauuucuagcuug

SEQ ID NO: 201460 - RNA, 20 nt, Human
gugggcagcagcuggguacc

SEQ ID NO: 201461 - RNA, 21 nt, Human
guuccucuaucccccaaucca

SEQ ID NO: 201462 - RNA, 22 nt, Human
uaaacuccuauuuagggacacu

SEQ ID NO: 201463 - RNA, 27 nt, Human
uaaccccugcccccaaaacacaucccc

SEQ ID NO: 201464 - RNA, 28 nt, Human
uaauagaacugagguucuaaguaccaca

SEQ ID NO: 201465 - RNA, 23 nt, Human
uacaacucucaaauggaaucuca

SEQ ID NO: 201466 - RNA, 24 nt, Human
uacaacucucaaauggaaucucaa

SEQ ID NO: 201467 - RNA, 22 nt, Human
uagaguuccaacagaauucaac

SEQ ID NO: 201468 - RNA, 25 nt, Human
uaucauaaacaucagauaucaguuc

SEQ ID NO: 201469 - RNA, 22 nt, Human
ucaaaaaaaugucugacuauaa

SEQ ID NO: 201470 - RNA, 24 nt, Human
ucacaccgccuaccaccaccuggu

SEQ ID NO: 201471 - RNA, 21 nt, Human
ucagauaucaguucacugaca

SEQ ID NO: 201472 - RNA, 27 nt, Human
ucagugccuuggcucggaguagccagg

SEQ ID NO: 201473 - RNA, 24 nt, Human
uccaacagaauucaaccaaguggu

SEQ ID NO: 201474 - RNA, 19 nt, Human
uccggaccucccagcaaga

SEQ ID NO: 201475 - RNA, 24 nt, Human
ucgcucgagaggaaccagcugcac

SEQ ID NO: 201476 - RNA, 20 nt, Human
ucugucucauacugucaaaa

SEQ ID NO: 201477 - RNA, 22 nt, Human
ucuucaguuucauguauauuuc

SEQ ID NO: 201478 - RNA, 19 nt, Human
ugaaucuggacgugguagg

SEQ ID NO: 201479 - RNA, 21 nt, Human
ugccgcuucccugcaggaacg

SEQ ID NO: 201480 - RNA, 19 nt, Human
ugccuuggcucggaguagc

SEQ ID NO: 201481 - RNA, 20 nt, Human
ugcugguuuucuccuuccca

SEQ ID NO: 201482 - RNA, 23 nt, Human
uggaagcuuguggcaccaauuca

SEQ ID NO: 201483 - RNA, 22 nt, Human
uggaccagaaacgugggcagca

SEQ ID NO: 201484 - RNA, 19 nt, Human
uggcagagagggagccaag

SEQ ID NO: 201485 - RNA, 27 nt, Human
uguggcugucugcagaaccaccucuuc

SEQ ID NO: 201486 - RNA, 23 nt, Human
uuggaagcuuguggcaccaauuc

SEQ ID NO: 201487 - RNA, 21 nt, Human
uuuccaguucaaacaucagug

SEQ ID NO: 201488 - RNA, 23 nt, Human
uuuccaguucaaacaucagugcc

SEQ ID NO: 201489 - RNA, 18 nt, Human
uuugaaguuuccaguuca

SEQ ID NO: 201490 - RNA, 23 nt, Human
uuuuuuggcuauuuuauuucuag

SEQ ID NO: 201491 - RNA, 22 nt, Human
uuuuuuuuuuuuuuuuuuccag

SEQ ID NO: 201492 - RNA, 22 nt, Human
aaaccaaauacugcauguucuc

SEQ ID NO: 201493 - RNA, 19 nt, Human
aaagaaaaccgaaagaaga

SEQ ID NO: 201494 - RNA, 18 nt, Human
aaagaagaaaaucagcaa

SEQ ID NO: 201495 - RNA, 25 nt, Human
aaagaucuaaaauuuaauuuucagc

SEQ ID NO: 201496 - RNA, 19 nt, Human
aacacccucuccauuccaa

SEQ ID NO: 201497 - RNA, 19 nt, Human
aaccaaauacugcauguuc

SEQ ID NO: 201498 - RNA, 21 nt, Human
aagaagaaaaucagcaaaauc

SEQ ID NO: 201499 - RNA, 22 nt, Human
aagaagaaaaucagcaaaaucu

SEQ ID NO: 201500 - RNA, 23 nt, Human
aagaagaaaaucagcaaaaucua

SEQ ID NO: 201501 - RNA, 24 nt, Human
aagcaagcauuaacagacaguuau

SEQ ID NO: 201502 - RNA, 23 nt, Human
aagcuucccaacugaaacaagga

SEQ ID NO: 201503 - RNA, 23 nt, Human
aaggagacucaaaaaauggcuca

SEQ ID NO: 201504 - RNA, 20 nt, Human
aagguagagaaaaagcaagc

SEQ ID NO: 201505 - RNA, 21 nt, Human
aaguguccaucaacugauaag

SEQ ID NO: 201506 - RNA, 25 nt, Human
aauggcucauuuucuuccucugguu

SEQ ID NO: 201507 - RNA, 21 nt, Human
aauguacaucacucaggugac

SEQ ID NO: 201508 - RNA, 19 nt, Human
aaugugguauauauguacc

SEQ ID NO: 201509 - RNA, 21 nt, Human
acaaagaaaaccgaaagaaga

SEQ ID NO: 201510 - RNA, 24 nt, Human
acugaagugcuggagccuggccug

SEQ ID NO: 201511 - RNA, 19 nt, Human
acugaccaacacccucucc

SEQ ID NO: 201512 - RNA, 23 nt, Human
agaaaaccgaaagaagaaaauca

SEQ ID NO: 201513 - RNA, 21 nt, Human
agaaaaucagcaaaaucuagc

SEQ ID NO: 201514 - RNA, 22 nt, Human
agagagcugggaagaacccaga

SEQ ID NO: 201515 - RNA, 19 nt, Human
agcaaaaaguguguacccc

SEQ ID NO: 201516 - RNA, 21 nt, Human
agcagagagcugggaagaacc

SEQ ID NO: 201517 - RNA, 18 nt, Human
agcauucauauacauuuu

SEQ ID NO: 201518 - RNA, 19 nt, Human
agccagcgcuaaagauggc

SEQ ID NO: 201519 - RNA, 22 nt, Human
agcuacagccaucaugcuacca

SEQ ID NO: 201520 - RNA, 19 nt, Human
aggaaaucacccacaccca

SEQ ID NO: 201521 - RNA, 18 nt, Human
agugcuggagccuggccu

SEQ ID NO: 201522 - RNA, 19 nt, Human
auaaaacaaaacaaaacuu

SEQ ID NO: 201523 - RNA, 20 nt, Human
augaaggaaagaauucuaaa

SEQ ID NO: 201524 - RNA, 23 nt, Human
caaaagcuucccaacugaaacaa

SEQ ID NO: 201525 - RNA, 23 nt, Human
caaaauacugugcuaaaucuagc

SEQ ID NO: 201526 - RNA, 18 nt, Human
cacccucuccauuccaaa

SEQ ID NO: 201527 - RNA, 26 nt, Human
cacuacacaauucaccccuguaagcc

SEQ ID NO: 201528 - RNA, 18 nt, Human
cagccauaaagaagaaua

SEQ ID NO: 201529 - RNA, 18 nt, Human
cagcgcuaaagauggcag

SEQ ID NO: 201530 - RNA, 20 nt, Human
caugcaaaaugcuaagcagu

SEQ ID NO: 201531 - RNA, 21 nt, Human
ccaucaacugauaaguggaua

SEQ ID NO: 201532 - RNA, 21 nt, Human
cccaugaaacagcuacagcca

SEQ ID NO: 201533 - RNA, 19 nt, Human
ccccuaaagcuauuaaaau

SEQ ID NO: 201534 - RNA, 24 nt, Human
ccccuaaagcuauuaaaauaaaaa

SEQ ID NO: 201535 - RNA, 21 nt, Human
cccucuccauuccaaaggguu

SEQ ID NO: 201536 - RNA, 22 nt, Human
cgagaucaaaauacugugcuaa

SEQ ID NO: 201537 - RNA, 21 nt, Human
cggcaguaugcuuuuucugau

SEQ ID NO: 201538 - RNA, 20 nt, Human
cucaggaauggaaaaccaaa

SEQ ID NO: 201539 - RNA, 21 nt, Human
cucaggaauggaaaaccaaau

SEQ ID NO: 201540 - RNA, 18 nt, Human
cucauuuucuuccucugg

SEQ ID NO: 201541 - RNA, 22 nt, Human
cuccuuacaaauauacuuaaau

SEQ ID NO: 201542 - RNA, 23 nt, Human
cuguaagcaaaaaguguguaccc

SEQ ID NO: 201543 - RNA, 19 nt, Human
cuuuuacaaccaguuucac

SEQ ID NO: 201544 - RNA, 23 nt, Human
gaaaaccgaaagaagaaaaucag

SEQ ID NO: 201545 - RNA, 22 nt, Human
gaaacagcuacagccaucaugc

SEQ ID NO: 201546 - RNA, 18 nt, Human
gaaaucacccacacccac

SEQ ID NO: 201547 - RNA, 20 nt, Human
gaauggaauuaaccuaagug

SEQ ID NO: 201548 - RNA, 21 nt, Human
gacaaagaaaaccgaaagaag

SEQ ID NO: 201549 - RNA, 22 nt, Human
gagcagagagcugggaagaacc

SEQ ID NO: 201550 - RNA, 22 nt, Human
gauguuggagacucagaaggga

SEQ ID NO: 201551 - RNA, 22 nt, Human
gccuggggaggagcgcccgggg

SEQ ID NO: 201552 - RNA, 19 nt, Human
gcgcccggggagcagcgcu

SEQ ID NO: 201553 - RNA, 18 nt, Human
gcuacagccaucaugcua

SEQ ID NO: 201554 - RNA, 20 nt, Human
gcugcuccccccgccaggaa

SEQ ID NO: 201555 - RNA, 19 nt, Human
gcugucuuuuaaggugcaa

SEQ ID NO: 201556 - RNA, 20 nt, Human
ggaaaaccaaauacugcaug

SEQ ID NO: 201557 - RNA, 22 nt, Human
ggcccaugaaacagcuacagcc

SEQ ID NO: 201558 - RNA, 21 nt, Human
ggcucauuuucuuccucuggu

SEQ ID NO: 201559 - RNA, 19 nt, Human
gggauguuggagacucaga

SEQ ID NO: 201560 - RNA, 20 nt, Human
guagagauggcacaugaagg

SEQ ID NO: 201561 - RNA, 20 nt, Human
gugaaauggccacauuaccc

SEQ ID NO: 201562 - RNA, 23 nt, Human
guugcuaugagguuugaaggggc

SEQ ID NO: 201563 - RNA, 21 nt, Human
uauauccauaacaggcauaca

SEQ ID NO: 201564 - RNA, 23 nt, Human
uauuggguacaauguacaucacu

SEQ ID NO: 201565 - RNA, 22 nt, Human
ucaccuggcugcuccccccgcc

SEQ ID NO: 201566 - RNA, 22 nt, Human
ucuaaaaucuucuaauacauuu

SEQ ID NO: 201567 - RNA, 21 nt, Human
ucugaacaauaagacaugagg

SEQ ID NO: 201568 - RNA, 24 nt, Human
ugaaagaucuaaaauuuaauuuuc

SEQ ID NO: 201569 - RNA, 18 nt, Human
ugaaggaaagaauucuaa

SEQ ID NO: 201570 - RNA, 26 nt, Human
ugacaaagaaaaccgaaagaagaaaa

SEQ ID NO: 201571 - RNA, 22 nt, Human
ugacaaguacauuaaaagccga

SEQ ID NO: 201572 - RNA, 19 nt, Human
ugagaaugaagccagcgcu

SEQ ID NO: 201573 - RNA, 22 nt, Human
ugagauggaaucucucuccguc

SEQ ID NO: 201574 - RNA, 27 nt, Human
ugagauggaaucucucuccgucacaaa

SEQ ID NO: 201575 - RNA, 18 nt, Human
ugcuaugagguuugaagg

SEQ ID NO: 201576 - RNA, 20 nt, Human
uggauaaagaaaauguggua

SEQ ID NO: 201577 - RNA, 18 nt, Human
uggcagagcagagagcug

SEQ ID NO: 201578 - RNA, 20 nt, Human
uggcagagcagagagcuggg

SEQ ID NO: 201579 - RNA, 22 nt, Human
uggcagagcagagagcugggaa

SEQ ID NO: 201580 - RNA, 23 nt, Human
uggcucauuuucuuccucugguu

SEQ ID NO: 201581 - RNA, 22 nt, Human
ugggaauauacauuuccuuauu

SEQ ID NO: 201582 - RNA, 23 nt, Human
ugggugccuguagagauggcaca

SEQ ID NO: 201583 - RNA, 21 nt, Human
ugugguauauauguaccaugg

SEQ ID NO: 201584 - RNA, 19 nt, Human
uuaaagauacuauauccau

SEQ ID NO: 201585 - RNA, 24 nt, Human
uuagauaaaaguaaaacaugcaaa

SEQ ID NO: 201586 - RNA, 23 nt, Human
uuauugcugacaaagaaaaccga

SEQ ID NO: 201587 - RNA, 23 nt, Human
uucaccacuacacaauucacccc

SEQ ID NO: 201588 - RNA, 19 nt, Human
uucacugguaaaaagcgca

SEQ ID NO: 201589 - RNA, 21 nt, Human
uugcagccaaaagcuucccaa

SEQ ID NO: 201590 - RNA, 24 nt, Human
uuuguagacugaccaacacccucu

SEQ ID NO: 201591 - RNA, 25 nt, Human
uuuuuuuuuuuuuuuuuuuucaagg

SEQ ID NO: 201592 - RNA, 19 nt, Human
aaaccucuuccauagcccu

SEQ ID NO: 201593 - RNA, 20 nt, Human
aagcccgggaacuggagcaa

SEQ ID NO: 201594 - RNA, 23 nt, Human
aagccguucccaaaccucuucca

SEQ ID NO: 201595 - RNA, 24 nt, Human
accccaaagccguucccaaaccuc

SEQ ID NO: 201596 - RNA, 21 nt, Human
acuggccugugucugcccugc

SEQ ID NO: 201597 - RNA, 19 nt, Human
agaaggacaggugugagcu

SEQ ID NO: 201598 - RNA, 25 nt, Human
agccgccccacccucccgugggccc

SEQ ID NO: 201599 - RNA, 21 nt, Human
aggaguggggauuggaggaag

SEQ ID NO: 201600 - RNA, 21 nt, Human
aggcaccggcgagggcgcagc

SEQ ID NO: 201601 - RNA, 18 nt, Human
aggccguagguugcgcca

SEQ ID NO: 201602 - RNA, 22 nt, Human
aguggugcuugugggguugacc

SEQ ID NO: 201603 - RNA, 23 nt, Human
aucggccgcaccagcuucugggc

SEQ ID NO: 201604 - RNA, 27 nt, Human
augccacccucuccucacacuccccag

SEQ ID NO: 201605 - RNA, 21 nt, Human
caaaccucuuccauagcccaa

SEQ ID NO: 201606 - RNA, 21 nt, Human
caacagacuuuaauggaaauc

SEQ ID NO: 201607 - RNA, 18 nt, Human
caaccgggcugugccugc

SEQ ID NO: 201608 - RNA, 21 nt, Human
caccccaaagccguucccaaa

SEQ ID NO: 201609 - RNA, 22 nt, Human
caccccaaagccguucccaaac

SEQ ID NO: 201610 - RNA, 26 nt, Human
caccgcgcagcgcggcuaauggaggu

SEQ ID NO: 201611 - RNA, 19 nt, Human
caccgggcgccugcucccc

SEQ ID NO: 201612 - RNA, 19 nt, Human
cagaaauccccaagucccc

SEQ ID NO: 201613 - RNA, 19 nt, Human
cagaaauccccaagucccc

SEQ ID NO: 201614 - RNA, 19 nt, Human
cagaccccgggcugugagg

SEQ ID NO: 201615 - RNA, 18 nt, Human
cagcacgaccucugaucg

SEQ ID NO: 201616 - RNA, 19 nt, Human
cagcgcggcuaauggaggu

SEQ ID NO: 201617 - RNA, 24 nt, Human
cagcuccugaugccacccucuccu

SEQ ID NO: 201618 - RNA, 18 nt, Human
cagcuucccagccgcccc

SEQ ID NO: 201619 - RNA, 19 nt, Human
ccaccccgaucccagacac

SEQ ID NO: 201620 - RNA, 20 nt, Human
ccacccucuccucacacucc

SEQ ID NO: 201621 - RNA, 20 nt, Human
ccagaccccgggcugugagg

SEQ ID NO: 201622 - RNA, 20 nt, Human
ccagaggggggucccugggc

SEQ ID NO: 201623 - RNA, 19 nt, Human
ccaugaaaaggggcacagg

SEQ ID NO: 201624 - RNA, 20 nt, Human
ccaugccgcucccuccgcca

SEQ ID NO: 201625 - RNA, 20 nt, Human
cccagaggggggucccuggg

SEQ ID NO: 201626 - RNA, 19 nt, Human
cccagccgccccacccucc

SEQ ID NO: 201627 - RNA, 20 nt, Human
cccagccgccccacccuccc

SEQ ID NO: 201628 - RNA, 19 nt, Human
cccaggagagaggcaccgg

SEQ ID NO: 201629 - RNA, 20 nt, Human
cccagugaggaugcgguggu

SEQ ID NO: 201630 - RNA, 20 nt, Human
cccaugccgcucccuccgcc

SEQ ID NO: 201631 - RNA, 18 nt, Human
ccccacuggccugugucu

SEQ ID NO: 201632 - RNA, 20 nt, Human
ccccagugcgggccugguac

SEQ ID NO: 201633 - RNA, 20 nt, Human
ccccaugggccagcuccggg

SEQ ID NO: 201634 - RNA, 21 nt, Human
cccccagggugcuagggcggg

SEQ ID NO: 201635 - RNA, 18 nt, Human
ccccccgcggcacccggg

SEQ ID NO: 201636 - RNA, 22 nt, Human
cccccgcggcacccgggcgccu

SEQ ID NO: 201637 - RNA, 18 nt, Human
cccccggggcagcgugcc

SEQ ID NO: 201638 - RNA, 22 nt, Human
ccccggggcagcgugccagcuu

SEQ ID NO: 201639 - RNA, 19 nt, Human
ccccugcugaaguugugcc

SEQ ID NO: 201640 - RNA, 19 nt, Human
ccccugcugaaguugugcc

SEQ ID NO: 201641 - RNA, 19 nt, Human
cccgugggcccggccccgg

SEQ ID NO: 201642 - RNA, 23 nt, Human
cccucccgugggcccggccccgg

SEQ ID NO: 201643 - RNA, 26 nt, Human
cccuccgccaagccugagcagcuccc

SEQ ID NO: 201644 - RNA, 19 nt, Human
cccugcgggaaacaggagc

SEQ ID NO: 201645 - RNA, 22 nt, Human
cccugcuugugcccagaguggu

SEQ ID NO: 201646 - RNA, 22 nt, Human
cccugggcuucaccggccgguc

SEQ ID NO: 201647 - RNA, 18 nt, Human
cccuggucuaagggccuu

SEQ ID NO: 201648 - RNA, 23 nt, Human
ccgcggcacccgggcgccugcca

SEQ ID NO: 201649 - RNA, 18 nt, Human
ccggccccggagccuggc

SEQ ID NO: 201650 - RNA, 23 nt, Human
ccgggccggggggaacacgcgcc

SEQ ID NO: 201651 - RNA, 21 nt, Human
ccggggccucccggccggcgg

SEQ ID NO: 201652 - RNA, 23 nt, Human
ccucccggccggcgggcgaggac

SEQ ID NO: 201653 - RNA, 24 nt, Human
ccucccgggccccgggggcuuccg

SEQ ID NO: 201654 - RNA, 25 nt, Human
ccugccgggccacuggcuccugguc

SEQ ID NO: 201655 - RNA, 20 nt, Human
ccugggacccaggagagagg

SEQ ID NO: 201656 - RNA, 22 nt, Human
ccugggccggcccccucccggg

SEQ ID NO: 201657 - RNA, 21 nt, Human
ccugggcugagcaccuggucu

SEQ ID NO: 201658 - RNA, 18 nt, Human
ccugugucugcccugccu

SEQ ID NO: 201659 - RNA, 22 nt, Human
cggcacccccacuauaggugcc

SEQ ID NO: 201660 - RNA, 23 nt, Human
cggccggucgcggcgcgggcggu

SEQ ID NO: 201661 - RNA, 18 nt, Human
cggcgagggcgcagcacc

SEQ ID NO: 201662 - RNA, 21 nt, Human
cggcgggggcgcucuagggcc

SEQ ID NO: 201663 - RNA, 20 nt, Human
cgggaagggcaugagugaca

SEQ ID NO: 201664 - RNA, 19 nt, Human
cgggaggggccggaccagg

SEQ ID NO: 201665 - RNA, 23 nt, Human
cgggaggggccggaccaggccac

SEQ ID NO: 201666 - RNA, 23 nt, Human
cgugccuggauggugggggccga

SEQ ID NO: 201667 - RNA, 19 nt, Human
cguggccggcaccgggcgc

SEQ ID NO: 201668 - RNA, 24 nt, Human
cuagggcggggcggcugggagggg

SEQ ID NO: 201669 - RNA, 18 nt, Human
cucauccucaccuggcca

SEQ ID NO: 201670 - RNA, 24 nt, Human
cucauccucaccuggccaagcugc

SEQ ID NO: 201671 - RNA, 18 nt, Human
cuccccagaucuuuuggc

SEQ ID NO: 201672 - RNA, 20 nt, Human
cucccgggccccgggggcuu

SEQ ID NO: 201673 - RNA, 24 nt, Human
cucuuccauagcccaagggcacaa

SEQ ID NO: 201674 - RNA, 19 nt, Human
cugcuccgccgguuuccuc

SEQ ID NO: 201675 - RNA, 22 nt, Human
cugcuccuuuggccaucuucca

SEQ ID NO: 201676 - RNA, 21 nt, Human
cuggagcaaagggcgggaggg

SEQ ID NO: 201677 - RNA, 20 nt, Human
cuggcccacgccaaccgggc

SEQ ID NO: 201678 - RNA, 20 nt, Human
cugggccgaggccguagguu

SEQ ID NO: 201679 - RNA, 23 nt, Human
cuuccagcccaggggcuggagag

SEQ ID NO: 201680 - RNA, 22 nt, Human
cuucccagccgccccacccucc

SEQ ID NO: 201681 - RNA, 19 nt, Human
gacccaggagagaggcacc

SEQ ID NO: 201682 - RNA, 20 nt, Human
gagcagcaggaggagguguu

SEQ ID NO: 201683 - RNA, 20 nt, Human
gagccuggcaggcgggcggc

SEQ ID NO: 201684 - RNA, 18 nt, Human
gaguugggggaaaggccg

SEQ ID NO: 201685 - RNA, 22 nt, Human
gaugccacccucuccucacacu

SEQ ID NO: 201686 - RNA, 22 nt, Human
gcagugccagagcuggcagggg

SEQ ID NO: 201687 - RNA, 20 nt, Human
gccaagcccgggaacuggag

SEQ ID NO: 201688 - RNA, 21 nt, Human
gccagaaugauucccaaguuu

SEQ ID NO: 201689 - RNA, 19 nt, Human
gccagagcuggcaggggca

SEQ ID NO: 201690 - RNA, 20 nt, Human
gcgaggacgcguucucccgc

SEQ ID NO: 201691 - RNA, 20 nt, Human
gcgcagcgcggcuaauggag

SEQ ID NO: 201692 - RNA, 20 nt, Human
gcggcacccgggcgccugcc

SEQ ID NO: 201693 - RNA, 18 nt, Human
gcggcugggagggggcag

SEQ ID NO: 201694 - RNA, 18 nt, Human
gcgggaaacaggagcccg

SEQ ID NO: 201695 - RNA, 22 nt, Human
gcgguggcggucgucguggccg

SEQ ID NO: 201696 - RNA, 18 nt, Human
gcugggagggggcagugc

SEQ ID NO: 201697 - RNA, 22 nt, Human
ggaaaucaugaaggagggaagc

SEQ ID NO: 201698 - RNA, 26 nt, Human
ggagaugccagccugagaaggacagg

SEQ ID NO: 201699 - RNA, 21 nt, Human
ggagauggccgaguuggggga

SEQ ID NO: 201700 - RNA, 24 nt, Human
ggagcaaagggcgggaggggccgg

SEQ ID NO: 201701 - RNA, 19 nt, Human
ggaggaguggggauuggag

SEQ ID NO: 201702 - RNA, 20 nt, Human
ggcgagggcgcagcaccgcg

SEQ ID NO: 201703 - RNA, 18 nt, Human
ggcgcagcaccgcgcagc

SEQ ID NO: 201704 - RNA, 18 nt, Human
ggcggggugccccccagg

SEQ ID NO: 201705 - RNA, 23 nt, Human
ggcgguggcggucgucguggccg

SEQ ID NO: 201706 - RNA, 18 nt, Human
ggcuggagaggcgcccag

SEQ ID NO: 201707 - RNA, 21 nt, Human
ggcugggagggggcagugcca

SEQ ID NO: 201708 - RNA, 27 nt, Human
gggcacagggugggggagaugccagcc

SEQ ID NO: 201709 - RNA, 20 nt, Human
gggcagaagguuggaggccc

SEQ ID NO: 201710 - RNA, 22 nt, Human
gggcagaagguuggaggccccu

SEQ ID NO: 201711 - RNA, 21 nt, Human
gggccgggccggggcuaggga

SEQ ID NO: 201712 - RNA, 21 nt, Human
gggccggggggaacacgcgcc

SEQ ID NO: 201713 - RNA, 18 nt, Human
ggggaagggggucgugcc

SEQ ID NO: 201714 - RNA, 18 nt, Human
ggggagggccgggccggg

SEQ ID NO: 201715 - RNA, 19 nt, Human
ggggaguggcucccgggag

SEQ ID NO: 201716 - RNA, 21 nt, Human
ggggcggcugggagggggcag

SEQ ID NO: 201717 - RNA, 20 nt, Human
ggggcuuccgccaacgcccc

SEQ ID NO: 201718 - RNA, 18 nt, Human
gguagaaacggagcuggg

SEQ ID NO: 201719 - RNA, 21 nt, Human
ggucaugggcccaugugagcu

SEQ ID NO: 201720 - RNA, 20 nt, Human
ggucggacuccgggaucugc

SEQ ID NO: 201721 - RNA, 19 nt, Human
guagagcgcggcggagagc

SEQ ID NO: 201722 - RNA, 18 nt, Human
gugagcagcaggaggagg

SEQ ID NO: 201723 - RNA, 21 nt, Human
guggcacauggcacgccccac

SEQ ID NO: 201724 - RNA, 18 nt, Human
gugggggagaugccagcc

SEQ ID NO: 201725 - RNA, 20 nt, Human
gugguagaaacggagcuggg

SEQ ID NO: 201726 - RNA, 20 nt, Human
gugugagcuugguggcacug

SEQ ID NO: 201727 - RNA, 19 nt, Human
uaccaugaaaaggggcaca

SEQ ID NO: 201728 - RNA, 19 nt, Human
uccauagcccaagggcaca

SEQ ID NO: 201729 - RNA, 24 nt, Human
ucccaaaccucuuccauagcccaa

SEQ ID NO: 201730 - RNA, 23 nt, Human
ucccagaggggggucccugggcu

SEQ ID NO: 201731 - RNA, 21 nt, Human
ucccagccgccccacccuccc

SEQ ID NO: 201732 - RNA, 18 nt, Human
uccccaugggccagcucc

SEQ ID NO: 201733 - RNA, 23 nt, Human
ucccccucccccccgcggcaccc

SEQ ID NO: 201734 - RNA, 18 nt, Human
ucccgugggcccggcccc

SEQ ID NO: 201735 - RNA, 19 nt, Human
uccgacaccggcuccagac

SEQ ID NO: 201736 - RNA, 18 nt, Human
uccgccaagccugagcag

SEQ ID NO: 201737 - RNA, 19 nt, Human
uccgugcugcgccgcgggg

SEQ ID NO: 201738 - RNA, 25 nt, Human
uccugggacccaggagagaggcacc

SEQ ID NO: 201739 - RNA, 22 nt, Human
ucuagggccgcagguuggaggg

SEQ ID NO: 201740 - RNA, 20 nt, Human
ugaaguugugccugggcuga

SEQ ID NO: 201741 - RNA, 21 nt, Human
ugaaguugugccugggcuuga

SEQ ID NO: 201742 - RNA, 18 nt, Human
ugaccagaaauccccaag

SEQ ID NO: 201743 - RNA, 18 nt, Human
ugaccagaaauccccaag

SEQ ID NO: 201744 - RNA, 20 nt, Human
ugagcagcuccugaugccaa

SEQ ID NO: 201745 - RNA, 22 nt, Human
ugaucgccaucgccagacgcgc

SEQ ID NO: 201746 - RNA, 18 nt, Human
ugcagugagcccagugag

SEQ ID NO: 201747 - RNA, 24 nt, Human
ugcccugcuugugcccagaguggu

SEQ ID NO: 201748 - RNA, 25 nt, Human
ugccuggauggugggggccgauccu

SEQ ID NO: 201749 - RNA, 25 nt, Human
ugccugggcugagcaccuggucuac

SEQ ID NO: 201750 - RNA, 19 nt, Human
ugcggugguagaaacggag

SEQ ID NO: 201751 - RNA, 20 nt, Human
ugcggugguagaaacggagc

SEQ ID NO: 201752 - RNA, 21 nt, Human
ugcuccgccgguuuccuccuc

SEQ ID NO: 201753 - RNA, 23 nt, Human
ugcuccgccgguuuccuccucca

SEQ ID NO: 201754 - RNA, 23 nt, Human
ugcugcgccgcggggagggccgg

SEQ ID NO: 201755 - RNA, 18 nt, Human
uggcaggagggcagaagg

SEQ ID NO: 201756 - RNA, 24 nt, Human
uggcaggcgggcggcacccccucu

SEQ ID NO: 201757 - RNA, 18 nt, Human
uggccggcaccgggcgcc

SEQ ID NO: 201758 - RNA, 22 nt, Human
ugggagggggcagugccagagc

SEQ ID NO: 201759 - RNA, 24 nt, Human
ugggagggggcagugccagagcug

SEQ ID NO: 201760 - RNA, 25 nt, Human
ugggagggggcagugccagagcugg

SEQ ID NO: 201761 - RNA, 21 nt, Human
ugggcucagcgggagugagca

SEQ ID NO: 201762 - RNA, 18 nt, Human
uggggaagcugcuccgcc

SEQ ID NO: 201763 - RNA, 20 nt, Human
uggggcucucccagaggggg

SEQ ID NO: 201764 - RNA, 20 nt, Human
uggggcucucccagaggggg

SEQ ID NO: 201765 - RNA, 24 nt, Human
uggggcucucccagaggggggucc

SEQ ID NO: 201766 - RNA, 24 nt, Human
uggggcucucccagaggggggucc

SEQ ID NO: 201767 - RNA, 23 nt, Human
ugggggaaaggccgaggggccgg

SEQ ID NO: 201768 - RNA, 24 nt, Human
uggugcuuccagcccaggggcugg

SEQ ID NO: 201769 - RNA, 22 nt, Human
uggugggggccgauccugggac

SEQ ID NO: 201770 - RNA, 24 nt, Human
uuccaccccaaagccguucccaaa

SEQ ID NO: 201771 - RNA, 18 nt, Human
uuggaggccccuuguuca

SEQ ID NO: 201772 - RNA, 23 nt, Human
uuugucuccugggucucggagga

SEQ ID NO: 201773 - RNA, 18 nt, Human
acaaaaugguucuggauc

SEQ ID NO: 201774 - RNA, 22 nt, Human
cagcgcacucuugcccacaccg

SEQ ID NO: 201775 - RNA, 19 nt, Human
ccaacaggcacaaucccca

SEQ ID NO: 201776 - RNA, 21 nt, Human
ccaccaccaccagcuuauauu

SEQ ID NO: 201777 - RNA, 23 nt, Human
ccaccaccaccagcuuauauucc

SEQ ID NO: 201778 - RNA, 19 nt, Human
cccacaccgccggcgccca

SEQ ID NO: 201779 - RNA, 25 nt, Human
cccaccaccaccagcuuauauuccg

SEQ ID NO: 201780 - RNA, 25 nt, Human
gcacaauccccaucaaugaccaccu

SEQ ID NO: 201781 - RNA, 21 nt, Human
gcuguacuccuccuggccggc

SEQ ID NO: 201782 - RNA, 21 nt, Human
guggggucguauucguccaca

SEQ ID NO: 201783 - RNA, 21 nt, Human
uccaacaggcacaauccccau

SEQ ID NO: 201784 - RNA, 20 nt, Human
uucuggaucagcuggauggu

SEQ ID NO: 201785 - RNA, 23 nt, Human
aaucuggaacaguaaugaugcac

SEQ ID NO: 201786 - RNA, 21 nt, Human
aauuccuucaauaucaauauc

SEQ ID NO: 201787 - RNA, 24 nt, Human
agcugccgaccuugccgccggcgg

SEQ ID NO: 201788 - RNA, 23 nt, Human
aggcaggcgccagccaucacucg

SEQ ID NO: 201789 - RNA, 18 nt, Human
caggcgccagccaucacu

SEQ ID NO: 201790 - RNA, 24 nt, Human
cagggccaacgccagcaccagcgc

SEQ ID NO: 201791 - RNA, 20 nt, Human
caucacucggggccguccuc

SEQ ID NO: 201792 - RNA, 21 nt, Human
ccucgcagcugccgaccuugc

SEQ ID NO: 201793 - RNA, 19 nt, Human
cgggaggcaggcgccagcc

SEQ ID NO: 201794 - RNA, 18 nt, Human
cuuuuccuccucccaaau

SEQ ID NO: 201795 - RNA, 23 nt, Human
gaaaauaaguauucaccccaggu

SEQ ID NO: 201796 - RNA, 23 nt, Human
ucuuuuccuccucccaaauuccu

SEQ ID NO: 201797 - RNA, 21 nt, Human
aagaucagugaaacaagacaa

SEQ ID NO: 201798 - RNA, 23 nt, Human
acaagacaacagugcaagaggug

SEQ ID NO: 201799 - RNA, 19 nt, Human
acuuuccaguagcaauggu

SEQ ID NO: 201800 - RNA, 19 nt, Human
agaaaggaaaaauucaaga

SEQ ID NO: 201801 - RNA, 24 nt, Human
agcuaagaucagugaaacaagaca

SEQ ID NO: 201802 - RNA, 18 nt, Human
agggaggaggccggcagg

SEQ ID NO: 201803 - RNA, 18 nt, Human
agugcaagagguggagag

SEQ ID NO: 201804 - RNA, 24 nt, Human
caaaacaugaucagcuuuauuaug

SEQ ID NO: 201805 - RNA, 21 nt, Human
cagcggcuuggcuguacuggg

SEQ ID NO: 201806 - RNA, 19 nt, Human
cccgcgccggacccggccg

SEQ ID NO: 201807 - RNA, 21 nt, Human
cccgcgccggacccggccgca

SEQ ID NO: 201808 - RNA, 20 nt, Human
cccucgguuuugcacauauu

SEQ ID NO: 201809 - RNA, 23 nt, Human
cccucgguuuugcacauauuacc

SEQ ID NO: 201810 - RNA, 23 nt, Human
ccgcagcggcuuggcuguacugg

SEQ ID NO: 201811 - RNA, 20 nt, Human
ccgcgccggacccggccgca

SEQ ID NO: 201812 - RNA, 24 nt, Human
ccgggacaaccgccgccgccgccg

SEQ ID NO: 201813 - RNA, 21 nt, Human
cgcggucccacgggccgcccu

SEQ ID NO: 201814 - RNA, 23 nt, Human
cugaucuauuuccccaguaacau

SEQ ID NO: 201815 - RNA, 21 nt, Human
cuggagcccucgguuuugcac

SEQ ID NO: 201816 - RNA, 22 nt, Human
cuuaauauuagccaauuuuaau

SEQ ID NO: 201817 - RNA, 18 nt, Human
gaggaggccggcagggcc

SEQ ID NO: 201818 - RNA, 19 nt, Human
gcccgcgccggacccggcc

SEQ ID NO: 201819 - RNA, 20 nt, Human
gcgccggacccggccgcagc

SEQ ID NO: 201820 - RNA, 19 nt, Human
gcgcgcgccgcccgcgccg

SEQ ID NO: 201821 - RNA, 18 nt, Human
gcucgacgcggcccgggc

SEQ ID NO: 201822 - RNA, 24 nt, Human
gcugaucuauuuccccaguaacau

SEQ ID NO: 201823 - RNA, 18 nt, Human
ggagccgggcagcgcugc

SEQ ID NO: 201824 - RNA, 26 nt, Human
ggccgcagcggcuuggcuguacuggg

SEQ ID NO: 201825 - RNA, 21 nt, Human
gggccgggagccgggcagcgc

SEQ ID NO: 201826 - RNA, 18 nt, Human
gugaaacaagacaacagu

SEQ ID NO: 201827 - RNA, 23 nt, Human
uagaagagcucuuuagaaaggaa

SEQ ID NO: 201828 - RNA, 22 nt, Human
ucaccugcaaacuguagcaaaa

SEQ ID NO: 201829 - RNA, 25 nt, Human
ucagugaaacaagacaacagugcaa

SEQ ID NO: 201830 - RNA, 20 nt, Human
ucugcgcgcgccgcccgcgg

SEQ ID NO: 201831 - RNA, 22 nt, Human
ugacagcaccuuaaaaguggcu

SEQ ID NO: 201832 - RNA, 20 nt, Human
uuaaagcuaagaucagugaa

SEQ ID NO: 201833 - RNA, 19 nt, Human
uuccccaguaacauuucuc

SEQ ID NO: 201834 - RNA, 23 nt, Human
uucuuuuuuuuuuuuuuuauuuu

SEQ ID NO: 201835 - RNA, 22 nt, Human
uuuaaagacuucucuuguguuu

SEQ ID NO: 201836 - RNA, 21 nt, Human
accuuccucugguccuugcug

SEQ ID NO: 201837 - RNA, 20 nt, Human
agcugccucugcggcaaugu

SEQ ID NO: 201838 - RNA, 19 nt, Human
aggcagggggagguacacc

SEQ ID NO: 201839 - RNA, 18 nt, Human
ccucugguccuugcugcc

SEQ ID NO: 201840 - RNA, 24 nt, Human
ccucugguccuugcugccuggcuc

SEQ ID NO: 201841 - RNA, 21 nt, Human
cggacaggcagcacuggcucc

SEQ ID NO: 201842 - RNA, 18 nt, Human
cucuguccaccuuccucu

SEQ ID NO: 201843 - RNA, 19 nt, Human
cucuguccaccuuccucug

SEQ ID NO: 201844 - RNA, 23 nt, Human
cuuccucugguccuugcugccug

SEQ ID NO: 201845 - RNA, 21 nt, Human
cuuucggucucuguccaccuu

SEQ ID NO: 201846 - RNA, 20 nt, Human
gggguuggaaggcaggggga

SEQ ID NO: 201847 - RNA, 21 nt, Human
gucccuuugggguuggucucu

SEQ ID NO: 201848 - RNA, 19 nt, Human
guuggucucuuuuuuucuc

SEQ ID NO: 201849 - RNA, 18 nt, Human
uccaccuuccucuggucc

SEQ ID NO: 201850 - RNA, 19 nt, Human
ucccuuugggguuggucuc

SEQ ID NO: 201851 - RNA, 25 nt, Human
uccuuuguccuuucggucucugucc

SEQ ID NO: 201852 - RNA, 18 nt, Human
ucucuguccaccuuccuc

SEQ ID NO: 201853 - RNA, 23 nt, Human
ucucuuuuuuucucugugucucu

SEQ ID NO: 201854 - RNA, 24 nt, Human
ucuuuuuuucucugugucucuccu

SEQ ID NO: 201855 - RNA, 19 nt, Human
ugccuggcucuggacaccc

SEQ ID NO: 201856 - RNA, 20 nt, Human
ugcugccuggcucuggacac

SEQ ID NO: 201857 - RNA, 20 nt, Human
uggaaagggguuggaaggca

SEQ ID NO: 201858 - RNA, 28 nt, Human
uggaaagggguuggaaggcagggggagg

SEQ ID NO: 201859 - RNA, 18 nt, Human
ugucucuccuuuguccuu

SEQ ID NO: 201860 - RNA, 22 nt, Human
uuuucucugugucucuccuuug

SEQ ID NO: 201861 - RNA, 19 nt, Human
aggaaagaaggagauucug

SEQ ID NO: 201862 - RNA, 23 nt, Human
auuuuauuuauguuucuaauuca

SEQ ID NO: 201863 - RNA, 23 nt, Human
gaaggagauucugaguggcauag

SEQ ID NO: 201864 - RNA, 20 nt, Human
gagauucugaguggcauaga

SEQ ID NO: 201865 - RNA, 23 nt, Human
gcccagguauagcccaagcagua

SEQ ID NO: 201866 - RNA, 20 nt, Human
guucuuuccucuccuuucca

SEQ ID NO: 201867 - RNA, 23 nt, Human
guucuuuccucuccuuuccauuu

SEQ ID NO: 201868 - RNA, 25 nt, Human
uaauaggcagcacugaguucuuucc

SEQ ID NO: 201869 - RNA, 19 nt, Human
uagaguuaaguccaggaaa

SEQ ID NO: 201870 - RNA, 22 nt, Human
uaggcagcacugaguucuuucc

SEQ ID NO: 201871 - RNA, 21 nt, Human
uauagcccaagcaguaacaga

SEQ ID NO: 201872 - RNA, 22 nt, Human
ugaaaagaacuguaauuuucac

SEQ ID NO: 201873 - RNA, 19 nt, Human
ugacagaauuaacuacuaa

SEQ ID NO: 201874 - RNA, 22 nt, Human
uggcauagauuugucucaagug

SEQ ID NO: 201875 - RNA, 24 nt, Human
uggugagugacagaauuaacuacc

SEQ ID NO: 201876 - RNA, 22 nt, Human
uuuuuaguuucaauaccauacu

SEQ ID NO: 201877 - RNA, 21 nt, Human
aaaaaguaaauccuuuugaaa

SEQ ID NO: 201878 - RNA, 21 nt, Human
aaaaauauggcauucugcccc

SEQ ID NO: 201879 - RNA, 21 nt, Human
aaaaaugcacuugguuccuuc

SEQ ID NO: 201880 - RNA, 21 nt, Human
aaaauacaaaacaucagcuug

SEQ ID NO: 201881 - RNA, 20 nt, Human
aaacacaacagaacucacag

SEQ ID NO: 201882 - RNA, 24 nt, Human
aaacaucuucuuaguccaagagac

SEQ ID NO: 201883 - RNA, 23 nt, Human
aaaccaaagagaaagcccauauc

SEQ ID NO: 201884 - RNA, 19 nt, Human
aacaaugguuucugaccug

SEQ ID NO: 201885 - RNA, 22 nt, Human
aacacaacagaacucacagaua

SEQ ID NO: 201886 - RNA, 18 nt, Human
aagaggaacacaaaauac

SEQ ID NO: 201887 - RNA, 22 nt, Human
aagaggaacacaaaauacaaaa

SEQ ID NO: 201888 - RNA, 24 nt, Human
aaguaagugggacuacaggcaugc

SEQ ID NO: 201889 - RNA, 22 nt, Human
aauaagcugaaaccccagagga

SEQ ID NO: 201890 - RNA, 21 nt, Human
acaaccagauugcaacauaaa

SEQ ID NO: 201891 - RNA, 23 nt, Human
acagcaacuauuggcauggauaa

SEQ ID NO: 201892 - RNA, 22 nt, Human
accagauugcaacauaaacacc

SEQ ID NO: 201893 - RNA, 18 nt, Human
accgccaucugcuguucu

SEQ ID NO: 201894 - RNA, 23 nt, Human
accucagccucucaacaugcugg

SEQ ID NO: 201895 - RNA, 20 nt, Human
acuccaugugcuauacauau

SEQ ID NO: 201896 - RNA, 23 nt, Human
acuggucuugaacuccuggccuc

SEQ ID NO: 201897 - RNA, 20 nt, Human
agaacuuuccaaacuaccaa

SEQ ID NO: 201898 - RNA, 18 nt, Human
agacaagguuucuccaua

SEQ ID NO: 201899 - RNA, 19 nt, Human
agcaggagaguuccaccca

SEQ ID NO: 201900 - RNA, 23 nt, Human
agcgauucucgugccucggccuc

SEQ ID NO: 201901 - RNA, 24 nt, Human
agcgauucucgugccucggccucc

SEQ ID NO: 201902 - RNA, 19 nt, Human
aggaacacaaaauacaaaa

SEQ ID NO: 201903 - RNA, 21 nt, Human
aggaacacaaaauacaaaaca

SEQ ID NO: 201904 - RNA, 21 nt, Human
aggaugccuuuugccaccacu

SEQ ID NO: 201905 - RNA, 25 nt, Human
aggcuggagugcaguggcgugaucu

SEQ ID NO: 201906 - RNA, 18 nt, Human
aguacagcccucaaaaau

SEQ ID NO: 201907 - RNA, 23 nt, Human
agugcaguggcgugaucuuggcu

SEQ ID NO: 201908 - RNA, 24 nt, Human
agugcaguggcgugaucuuggcuc

SEQ ID NO: 201909 - RNA, 24 nt, Human
augaucugcccaccucagccucuc

SEQ ID NO: 201910 - RNA, 24 nt, Human
augugaugagaaaccaaagagaaa

SEQ ID NO: 201911 - RNA, 22 nt, Human
auucucucucucuuuucgggcc

SEQ ID NO: 201912 - RNA, 18 nt, Human
auuuuguugcauccccuc

SEQ ID NO: 201913 - RNA, 24 nt, Human
auuuuuguguuuuuaguagagaca

SEQ ID NO: 201914 - RNA, 20 nt, Human
caaacacaacagaacucacc

SEQ ID NO: 201915 - RNA, 18 nt, Human
caacaugcugggauuaua

SEQ ID NO: 201916 - RNA, 23 nt, Human
caaccuccaccucccggguucaa

SEQ ID NO: 201917 - RNA, 28 nt, Human
caagcgauucucgugccucggccuccca

SEQ ID NO: 201918 - RNA, 21 nt, Human
caccuugcugaaccucaauuu

SEQ ID NO: 201919 - RNA, 26 nt, Human
cacucccuuuuuaaucgagucagaag

SEQ ID NO: 201920 - RNA, 24 nt, Human
cagagucuugcucuguugcccagg

SEQ ID NO: 201921 - RNA, 20 nt, Human
cagauugcaacauaaacacc

SEQ ID NO: 201922 - RNA, 22 nt, Human
cagauugcaacauaaacaccaa

SEQ ID NO: 201923 - RNA, 24 nt, Human
cauauuggccagacuggucuugaa

SEQ ID NO: 201924 - RNA, 24 nt, Human
caugcugggauuauaggcuugagc

SEQ ID NO: 201925 - RNA, 20 nt, Human
caugugcuauacauauugug

SEQ ID NO: 201926 - RNA, 24 nt, Human
ccaccucccggguucaagcgauuc

SEQ ID NO: 201927 - RNA, 24 nt, Human
cccaaguaagugggacuacaggca

SEQ ID NO: 201928 - RNA, 19 nt, Human
cccaccucagccucucaac

SEQ ID NO: 201929 - RNA, 21 nt, Human
cccggccaaaagggcacauuu

SEQ ID NO: 201930 - RNA, 20 nt, Human
cccggguucaagcgauucuc

SEQ ID NO: 201931 - RNA, 20 nt, Human
cccggguucaagcgauucuc

SEQ ID NO: 201932 - RNA, 20 nt, Human
ccggccaaaagggcacauuu

SEQ ID NO: 201933 - RNA, 22 nt, Human
ccuaaacuccccccguuuugaa

SEQ ID NO: 201934 - RNA, 18 nt, Human
ccuaugucuuuacuaguu

SEQ ID NO: 201935 - RNA, 21 nt, Human
ccucagucuguuaucugccau

SEQ ID NO: 201936 - RNA, 22 nt, Human
ccucccggguucaagcgauucu

SEQ ID NO: 201937 - RNA, 24 nt, Human
ccuggccucaaaugaucugcccac

SEQ ID NO: 201938 - RNA, 27 nt, Human
ccuuuugccaccacuuuuuuaauagcc

SEQ ID NO: 201939 - RNA, 24 nt, Human
cggcaaccuccaccucccggguuc

SEQ ID NO: 201940 - RNA, 24 nt, Human
cgggauuaaagucuccuaaacucc

SEQ ID NO: 201941 - RNA, 18 nt, Human
cuacaauaagcugaaacc

SEQ ID NO: 201942 - RNA, 24 nt, Human
cucaaaugaucugcccaccucagc

SEQ ID NO: 201943 - RNA, 24 nt, Human
cucaacaugcugggauuauaggcu

SEQ ID NO: 201944 - RNA, 19 nt, Human
cucacagauaaaaaugcac

SEQ ID NO: 201945 - RNA, 22 nt, Human
cucacggcaaccuccaccuccc

SEQ ID NO: 201946 - RNA, 24 nt, Human
cucacggcaaccuccaccucccgg

SEQ ID NO: 201947 - RNA, 27 nt, Human
cuccuggccucaaaugaucugcccacc

SEQ ID NO: 201948 - RNA, 19 nt, Human
cucucucucuuuuauuuuu

SEQ ID NO: 201949 - RNA, 23 nt, Human
cugaaaccccagaggaucuguac

SEQ ID NO: 201950 - RNA, 23 nt, Human
cuuuuuaucucuguaauugaagg

SEQ ID NO: 201951 - RNA, 24 nt, Human
gacuacaggcaugccccaccaugc

SEQ ID NO: 201952 - RNA, 24 nt, Human
gacuggucuugaacuccuggccuc

SEQ ID NO: 201953 - RNA, 27 nt, Human
gaucaccgccaucugcuguucuucuau

SEQ ID NO: 201954 - RNA, 18 nt, Human
gccaaaggaaauuugggg

SEQ ID NO: 201955 - RNA, 24 nt, Human
gcccaggcuggagugcaguggcgu

SEQ ID NO: 201956 - RNA, 25 nt, Human
gcucuguugcccaggcuggagugca

SEQ ID NO: 201957 - RNA, 19 nt, Human
gcuggagugcaguggcgug

SEQ ID NO: 201958 - RNA, 24 nt, Human
ggccucaaaugaucugcccaccuc

SEQ ID NO: 201959 - RNA, 22 nt, Human
ggcuggagugcaguggcgugau

SEQ ID NO: 201960 - RNA, 18 nt, Human
gugcuauacauauugugg

SEQ ID NO: 201961 - RNA, 23 nt, Human
uaaacaccaaguaaaacuacaug

SEQ ID NO: 201962 - RNA, 19 nt, Human
uaaaccuaguacagcccuc

SEQ ID NO: 201963 - RNA, 28 nt, Human
uaaaugagauaaaccuaguacagcccuc

SEQ ID NO: 201964 - RNA, 23 nt, Human
uaagagggcacauuguuaaaaua

SEQ ID NO: 201965 - RNA, 24 nt, Human
uaauuuuuguguuuuuaguagaga

SEQ ID NO: 201966 - RNA, 24 nt, Human
uacaggcaugccccaccaugccca

SEQ ID NO: 201967 - RNA, 24 nt, Human
uagcuaugugaccuuggguaccuc

SEQ ID NO: 201968 - RNA, 24 nt, Human
uaguagagacaagguuucuccaua

SEQ ID NO: 201969 - RNA, 18 nt, Human
uauuucauuucucuuucu

SEQ ID NO: 201970 - RNA, 25 nt, Human
uauuuuuuuuuuugagacagagucu

SEQ ID NO: 201971 - RNA, 23 nt, Human
ucaagaguccuuuucaauucucc

SEQ ID NO: 201972 - RNA, 22 nt, Human
ucaaucacuugacucggaaagc

SEQ ID NO: 201973 - RNA, 19 nt, Human
ucaaucucucugcugauca

SEQ ID NO: 201974 - RNA, 24 nt, Human
ucacggcaaccuccaccucccggg

SEQ ID NO: 201975 - RNA, 22 nt, Human
uccauauuggccagacuggucu

SEQ ID NO: 201976 - RNA, 18 nt, Human
uccauuccaggagggcuc

SEQ ID NO: 201977 - RNA, 24 nt, Human
ucccaaguaagugggacuacaggc

SEQ ID NO: 201978 - RNA, 21 nt, Human
ucccggguucaagcgauucuc

SEQ ID NO: 201979 - RNA, 21 nt, Human
ucccggguucaagcgauucuc

SEQ ID NO: 201980 - RNA, 18 nt, Human
uccuuguuggacaucaua

SEQ ID NO: 201981 - RNA, 24 nt, Human
ucucaacaugcugggauuauaggc

SEQ ID NO: 201982 - RNA, 21 nt, Human
ucucaaggugaccccuggaag

SEQ ID NO: 201983 - RNA, 28 nt, Human
ucuccuaaacuccccccguuuugaacaa

SEQ ID NO: 201984 - RNA, 21 nt, Human
ucugcuuccuccucaaaguuc

SEQ ID NO: 201985 - RNA, 18 nt, Human
ucuguugcccaggcugga

SEQ ID NO: 201986 - RNA, 24 nt, Human
ucuguugcccaggcuggagugcag

SEQ ID NO: 201987 - RNA, 22 nt, Human
ucuucugaacaaugguuucuga

SEQ ID NO: 201988 - RNA, 19 nt, Human
ucuugaacuccuggccuca

SEQ ID NO: 201989 - RNA, 22 nt, Human
ucuugcucuguugcccaggcug

SEQ ID NO: 201990 - RNA, 23 nt, Human
ucuugcucuguugcccaggcugg

SEQ ID NO: 201991 - RNA, 24 nt, Human
ucuugcucuguugcccaggcugga

SEQ ID NO: 201992 - RNA, 22 nt, Human
ugaaaagacauuuacaaaugug

SEQ ID NO: 201993 - RNA, 23 nt, Human
ugaccuggaaacagaccagcugc

SEQ ID NO: 201994 - RNA, 19 nt, Human
ugagaagggauagccccug

SEQ ID NO: 201995 - RNA, 18 nt, Human
ugagacagagucuugcuc

SEQ ID NO: 201996 - RNA, 22 nt, Human
ugagacagagucuugcucuguu

SEQ ID NO: 201997 - RNA, 24 nt, Human
ugaggcucccauaguuccugagga

SEQ ID NO: 201998 - RNA, 24 nt, Human
ugaucugcccaccucagccucuca

SEQ ID NO: 201999 - RNA, 19 nt, Human
ugcaaagaggaacacaaaa

SEQ ID NO: 202000 - RNA, 18 nt, Human
ugcccaggcuggagugca

SEQ ID NO: 202001 - RNA, 21 nt, Human
ugcccaggcuggagugcagug

SEQ ID NO: 202002 - RNA, 22 nt, Human
ugcccaggcuggagugcagugg

SEQ ID NO: 202003 - RNA, 24 nt, Human
ugcccaggcuggagugcaguggcg

SEQ ID NO: 202004 - RNA, 22 nt, Human
ugcuacaauaagcugaaacccc

SEQ ID NO: 202005 - RNA, 24 nt, Human
ugcucuguugcccaggcuggagug

SEQ ID NO: 202006 - RNA, 19 nt, Human
ugcugaaccucaauuugcu

SEQ ID NO: 202007 - RNA, 19 nt, Human
uggagugcaguggcgugau

SEQ ID NO: 202008 - RNA, 23 nt, Human
uggagugcaguggcgugaucuug

SEQ ID NO: 202009 - RNA, 24 nt, Human
uggagugcaguggcgugaucuugg

SEQ ID NO: 202010 - RNA, 24 nt, Human
uggccagacuggucuugaacuccu

SEQ ID NO: 202011 - RNA, 18 nt, Human
uggccucaaaugaucugc

SEQ ID NO: 202012 - RNA, 24 nt, Human
ugggacuacaggcaugccccacca

SEQ ID NO: 202013 - RNA, 25 nt, Human
ugggacuacaggcaugccccaccau

SEQ ID NO: 202014 - RNA, 18 nt, Human
ugggauuauaggcuugag

SEQ ID NO: 202015 - RNA, 22 nt, Human
ugggauuauaggcuugagcuac

SEQ ID NO: 202016 - RNA, 24 nt, Human
ugggauuauaggcuugagcuacca

SEQ ID NO: 202017 - RNA, 25 nt, Human
ugggauuauaggcuugagcuaccau

SEQ ID NO: 202018 - RNA, 21 nt, Human
uggguaccucucucaccuuuu

SEQ ID NO: 202019 - RNA, 23 nt, Human
ugugaccuuggguaccucucuca

SEQ ID NO: 202020 - RNA, 22 nt, Human
ugugggguguuguggggcuuaa

SEQ ID NO: 202021 - RNA, 23 nt, Human
uguguuuuuaguagagacaaggu

SEQ ID NO: 202022 - RNA, 18 nt, Human
uuagaaaauuacccuccu

SEQ ID NO: 202023 - RNA, 24 nt, Human
uuaguagagacaagguuucuccau

SEQ ID NO: 202024 - RNA, 21 nt, Human
uucaagcgauucucgugccuc

SEQ ID NO: 202025 - RNA, 24 nt, Human
uugcccaggcuggagugcaguggc

SEQ ID NO: 202026 - RNA, 24 nt, Human
uugcucuguugcccaggcuggagu

SEQ ID NO: 202027 - RNA, 22 nt, Human
uuggacaucauaaggaucauuu

SEQ ID NO: 202028 - RNA, 18 nt, Human
uuucaaaacaucuucuua

SEQ ID NO: 202029 - RNA, 23 nt, Human
uuuccagggugguucagacacug

SEQ ID NO: 202030 - RNA, 24 nt, Human
uuuugaaaagacauuuacaaaugu

SEQ ID NO: 202031 - RNA, 20 nt, Human
uuuuuguguuuuuaguagag

SEQ ID NO: 202032 - RNA, 20 nt, Human
uuuuuuuuuuugagacagag

SEQ ID NO: 202033 - RNA, 23 nt, Human
uuuuuuuuuuugagacagagucu

SEQ ID NO: 202034 - RNA, 21 nt, Human
aagcaaggccucgaagccagg

SEQ ID NO: 202035 - RNA, 23 nt, Human
accagcaccaccuaaacagcagc

SEQ ID NO: 202036 - RNA, 25 nt, Human
agauccaaaauguguccaguuuuuu

SEQ ID NO: 202037 - RNA, 21 nt, Human
agcugugcggcccuugccaag

SEQ ID NO: 202038 - RNA, 20 nt, Human
aguuuuuuuuuuuuuuuuuu

SEQ ID NO: 202039 - RNA, 20 nt, Human
auucccaucaguagcauccc

SEQ ID NO: 202040 - RNA, 23 nt, Human
caaccacuggacuccaagcuccc

SEQ ID NO: 202041 - RNA, 24 nt, Human
caacuaugccaaccacuggacucc

SEQ ID NO: 202042 - RNA, 20 nt, Human
cagcaccaccuaaacagcag

SEQ ID NO: 202043 - RNA, 24 nt, Human
caguagcauccccucccauugccc

SEQ ID NO: 202044 - RNA, 19 nt, Human
ccaccuaaacagcagcucc

SEQ ID NO: 202045 - RNA, 21 nt, Human
ccacuggacuccaagcuccca

SEQ ID NO: 202046 - RNA, 18 nt, Human
ccccugaagagcuagcuu

SEQ ID NO: 202047 - RNA, 18 nt, Human
ccccugaagagcuagcuu

SEQ ID NO: 202048 - RNA, 21 nt, Human
ccccugaagagcuagcuuccu

SEQ ID NO: 202049 - RNA, 22 nt, Human
cccggggcugggguaggucucc

SEQ ID NO: 202050 - RNA, 23 nt, Human
ccuucuaagguguugggaaugaa

SEQ ID NO: 202051 - RNA, 19 nt, Human
cuagaaauaaauuaagcaa

SEQ ID NO: 202052 - RNA, 19 nt, Human
cuccauagcuggugccugc

SEQ ID NO: 202053 - RNA, 19 nt, Human
cuggugccugcucccaucu

SEQ ID NO: 202054 - RNA, 24 nt, Human
cuucccagguuuugcauagaaucc

SEQ ID NO: 202055 - RNA, 21 nt, Human
cuuccucccggggcuggggua

SEQ ID NO: 202056 - RNA, 24 nt, Human
cuucuaagguguugggaaugaaua

SEQ ID NO: 202057 - RNA, 20 nt, Human
gaaaagcaaggccucgaagc

SEQ ID NO: 202058 - RNA, 23 nt, Human
gcuccuuuuaaaagggagcuaag

SEQ ID NO: 202059 - RNA, 18 nt, Human
ggccaggggguggggaag

SEQ ID NO: 202060 - RNA, 20 nt, Human
gugauggagucaaguacugg

SEQ ID NO: 202061 - RNA, 25 nt, Human
guuuuuuuuuuuuuuuuuuuuuggc

SEQ ID NO: 202062 - RNA, 23 nt, Human
uagcauccccucccauugccccc

SEQ ID NO: 202063 - RNA, 24 nt, Human
uccaagcucccaacagauccaaaa

SEQ ID NO: 202064 - RNA, 18 nt, Human
uccccucccauugccccc

SEQ ID NO: 202065 - RNA, 21 nt, Human
uccccugaagagcuagcuucc

SEQ ID NO: 202066 - RNA, 20 nt, Human
uccccugaucagggccccug

SEQ ID NO: 202067 - RNA, 21 nt, Human
ucuccauagcuggugccugcu

SEQ ID NO: 202068 - RNA, 19 nt, Human
ucucuggagucaguggagg

SEQ ID NO: 202069 - RNA, 20 nt, Human
ugcgugauggagucaaguac

SEQ ID NO: 202070 - RNA, 23 nt, Human
ugggacucuacggcucagucccc

SEQ ID NO: 202071 - RNA, 26 nt, Human
uguguccaguuuuuuuuuuuuuuuuu

SEQ ID NO: 202072 - RNA, 26 nt, Human
uuccuagaacauaaaccagcaccacc

SEQ ID NO: 202073 - RNA, 18 nt, Human
uugcuucuucucugcucc

SEQ ID NO: 202074 - RNA, 21 nt, Human
uugcuucuucucugcucccaa

SEQ ID NO: 202075 - RNA, 20 nt, Human
uuuuuuuuggccagggggug

SEQ ID NO: 202076 - RNA, 18 nt, Human
uuuuuuuuuuuuuuuuug

SEQ ID NO: 202077 - RNA, 25 nt, Human
uuuuuuuuuuuuuuuuuggccaggg

SEQ ID NO: 202078 - RNA, 18 nt, Human
aacccgugaccacgucuc

SEQ ID NO: 202079 - RNA, 19 nt, Human
acaccuggaaacacagccu

SEQ ID NO: 202080 - RNA, 18 nt, Human
accacuaacauaggaggu

SEQ ID NO: 202081 - RNA, 18 nt, Human
acuggcacagcccugugc

SEQ ID NO: 202082 - RNA, 18 nt, Human
agagggcagacacugggc

SEQ ID NO: 202083 - RNA, 19 nt, Human
agguggggacagucacugu

SEQ ID NO: 202084 - RNA, 24 nt, Human
cacaacuguacuaucccaugcaga

SEQ ID NO: 202085 - RNA, 22 nt, Human
caccuuagcucgcacgcugagc

SEQ ID NO: 202086 - RNA, 18 nt, Human
cagcccagcucagagcca

SEQ ID NO: 202087 - RNA, 19 nt, Human
cagcggggguggccacggc

SEQ ID NO: 202088 - RNA, 22 nt, Human
caggagccugagccaccgcccu

SEQ ID NO: 202089 - RNA, 23 nt, Human
ccacgggucggcacugugggcac

SEQ ID NO: 202090 - RNA, 20 nt, Human
ccacuaacauaggagguggg

SEQ ID NO: 202091 - RNA, 21 nt, Human
ccaggugcaacuugguuugcu

SEQ ID NO: 202092 - RNA, 22 nt, Human
cccucaacccgcgcaagcgcag

SEQ ID NO: 202093 - RNA, 22 nt, Human
ccuacacgccacuggcacagcc

SEQ ID NO: 202094 - RNA, 21 nt, Human
cggcagcuccugccgagccca

SEQ ID NO: 202095 - RNA, 22 nt, Human
cucauaacugcugauuuauuuc

SEQ ID NO: 202096 - RNA, 24 nt, Human
cugaacccgugaccacgucuccug

SEQ ID NO: 202097 - RNA, 21 nt, Human
cugagccagggcaguguuccc

SEQ ID NO: 202098 - RNA, 18 nt, Human
gaacauggagcuccgacc

SEQ ID NO: 202099 - RNA, 22 nt, Human
gaccuagaccuagcuuaggaac

SEQ ID NO: 202100 - RNA, 18 nt, Human
gagauguggggucuuguc

SEQ ID NO: 202101 - RNA, 21 nt, Human
gaguuccgcguccacaccgcc

SEQ ID NO: 202102 - RNA, 27 nt, Human
gcauacaucaccaccuuagcucgcacg

SEQ ID NO: 202103 - RNA, 21 nt, Human
gccugagccaccgcccucaac

SEQ ID NO: 202104 - RNA, 20 nt, Human
gcuuguguucaucaccccuc

SEQ ID NO: 202105 - RNA, 22 nt, Human
gggugaacaccuggaaacacag

SEQ ID NO: 202106 - RNA, 23 nt, Human
gucuccuguauggacagggacug

SEQ ID NO: 202107 - RNA, 24 nt, Human
uaucccaugcagagucccaucgca

SEQ ID NO: 202108 - RNA, 23 nt, Human
ucaucaccccucaagauaugcac

SEQ ID NO: 202109 - RNA, 23 nt, Human
uccacaccgccagcgcggagggg

SEQ ID NO: 202110 - RNA, 21 nt, Human
uccaggagccugagccaccgc

SEQ ID NO: 202111 - RNA, 18 nt, Human
ucccuacacgccacuggc

SEQ ID NO: 202112 - RNA, 19 nt, Human
ucccuacacgccacuggca

SEQ ID NO: 202113 - RNA, 21 nt, Human
ucccuacacgccacuggcaca

SEQ ID NO: 202114 - RNA, 20 nt, Human
uccgcguccacaccgccagc

SEQ ID NO: 202115 - RNA, 20 nt, Human
uccgcugaguuccgcgucca

SEQ ID NO: 202116 - RNA, 21 nt, Human
ucuacacaacuguacuauccc

SEQ ID NO: 202117 - RNA, 27 nt, Human
ugcagagucccaucgcauacaucacca

SEQ ID NO: 202118 - RNA, 20 nt, Human
ugccgagcccaagcguguuu

SEQ ID NO: 202119 - RNA, 23 nt, Human
uggaagugacagcccagcucaga

SEQ ID NO: 202120 - RNA, 25 nt, Human
uucaucaccccucaagauaugcaca

SEQ ID NO: 202121 - RNA, 20 nt, Human
aaaacacagucacgaugugc

SEQ ID NO: 202122 - RNA, 27 nt, Human
aaacacagucacgaugugcccucccca

SEQ ID NO: 202123 - RNA, 19 nt, Human
aacacagucacgaugugcc

SEQ ID NO: 202124 - RNA, 21 nt, Human
aguuaugaaaaacacagucac

SEQ ID NO: 202125 - RNA, 21 nt, Human
cacagucacgaugugcccucc

SEQ ID NO: 202126 - RNA, 21 nt, Human
ccagcccaggccccuaaaacc

SEQ ID NO: 202127 - RNA, 22 nt, Human
cccagcccaggccccuaaaacc

SEQ ID NO: 202128 - RNA, 18 nt, Human
ccccauccccccagccca

SEQ ID NO: 202129 - RNA, 22 nt, Human
ccccauccccccagcccaggcc

SEQ ID NO: 202130 - RNA, 25 nt, Human
cccccagcccaggccccuaaaaccc

SEQ ID NO: 202131 - RNA, 19 nt, Human
ccccccagcccaggccccu

SEQ ID NO: 202132 - RNA, 20 nt, Human
ccccccagcccaggccccua

SEQ ID NO: 202133 - RNA, 18 nt, Human
ccccugggcucgugcagg

SEQ ID NO: 202134 - RNA, 18 nt, Human
ccuaggaacgcucagccc

SEQ ID NO: 202135 - RNA, 21 nt, Human
cgggagggagggagaggaagg

SEQ ID NO: 202136 - RNA, 24 nt, Human
gagggagggagaggaagggggagc

SEQ ID NO: 202137 - RNA, 24 nt, Human
gccccuaaaacccccuucugcggg

SEQ ID NO: 202138 - RNA, 23 nt, Human
ggagaggaagggggagccccgaa

SEQ ID NO: 202139 - RNA, 23 nt, Human
uaaaugcaaccauauaaaaacau

SEQ ID NO: 202140 - RNA, 19 nt, Human
uccccccagcccaggcccc

SEQ ID NO: 202141 - RNA, 27 nt, Human
uccccccagcccaggccccuaaaaccc

SEQ ID NO: 202142 - RNA, 23 nt, Human
ugcccuccccauccccccagccc

SEQ ID NO: 202143 - RNA, 24 nt, Human
ugcccuccccauccccccagccca

SEQ ID NO: 202144 - RNA, 19 nt, Human
ugggcucgugcagggcggg

SEQ ID NO: 202145 - RNA, 24 nt, Human
aaaaaagaaaucucguguaaaaaa

SEQ ID NO: 202146 - RNA, 21 nt, Human
aaaacgaaaugucaucugagc

SEQ ID NO: 202147 - RNA, 21 nt, Human
aaaguaaccacuuaaucaaaa

SEQ ID NO: 202148 - RNA, 20 nt, Human
aaauaaacuuccccaaagga

SEQ ID NO: 202149 - RNA, 18 nt, Human
agagguagacgggggauu

SEQ ID NO: 202150 - RNA, 23 nt, Human
agcauuuucaaacaucuuuggca

SEQ ID NO: 202151 - RNA, 18 nt, Human
aggagagagguagacggg

SEQ ID NO: 202152 - RNA, 22 nt, Human
aggaggagggguggccugagcc

SEQ ID NO: 202153 - RNA, 24 nt, Human
agguagacgggggauuccgcuguu

SEQ ID NO: 202154 - RNA, 26 nt, Human
augaacauauaaaauauauacaaaua

SEQ ID NO: 202155 - RNA, 23 nt, Human
cagcucucucuacaaaaaguaac

SEQ ID NO: 202156 - RNA, 23 nt, Human
cugagcaagugcugaggguuuau

SEQ ID NO: 202157 - RNA, 22 nt, Human
gggaguuuaggaggaggggugg

SEQ ID NO: 202158 - RNA, 20 nt, Human
ggggaguuuaggaggagggg

SEQ ID NO: 202159 - RNA, 22 nt, Human
uaaaaaaacacaaaguaaccac

SEQ ID NO: 202160 - RNA, 23 nt, Human
uaaccacuuaaucaaaaaagucc

SEQ ID NO: 202161 - RNA, 20 nt, Human
uacagcucucucuacaaaaa

SEQ ID NO: 202162 - RNA, 20 nt, Human
uacuuuuuucuuuuauuaua

SEQ ID NO: 202163 - RNA, 21 nt, Human
uauacaaauauagugcauggu

SEQ ID NO: 202164 - RNA, 20 nt, Human
uccaggaccaaggagagagg

SEQ ID NO: 202165 - RNA, 18 nt, Human
uccuuuuuuuuuuuuuuu

SEQ ID NO: 202166 - RNA, 22 nt, Human
ucucccaguauucaaguuccug

SEQ ID NO: 202167 - RNA, 21 nt, Human
uguuaucagcaccagcuccgg

SEQ ID NO: 202168 - RNA, 24 nt, Human
uuggugaucaguagcgcuguuccu

SEQ ID NO: 202169 - RNA, 22 nt, Human
uuuccuuuuuuuuuuuuuuuuu

SEQ ID NO: 202170 - RNA, 19 nt, Human
uuuuauuuuuggaguucuu

SEQ ID NO: 202171 - RNA, 24 nt, Human
uuuucucaaauaaacuuccccaaa

SEQ ID NO: 202172 - RNA, 23 nt, Human
uuuuuuuuugccuuuacuuuuuu

SEQ ID NO: 202173 - RNA, 19 nt, Human
uuuuuuuuuuuuuuuugcc

SEQ ID NO: 202174 - RNA, 24 nt, Human
uuuuuuuuuuuuuuuuuugccuuu

SEQ ID NO: 202175 - RNA, 20 nt, Human
uuuuuuuuuuuuuuuuuugg

SEQ ID NO: 202176 - RNA, 21 nt, Human
aaaaaagaaaaccacauuugc

SEQ ID NO: 202177 - RNA, 18 nt, Human
aaaaagccaaauuuaaaa

SEQ ID NO: 202178 - RNA, 18 nt, Human
aaaaucauuagaaaccaa

SEQ ID NO: 202179 - RNA, 23 nt, Human
aaacaaaguacacacugccaaac

SEQ ID NO: 202180 - RNA, 21 nt, Human
aaagcuacaaaaacugucuaa

SEQ ID NO: 202181 - RNA, 22 nt, Human
aacagcaacuucucugcuuccu

SEQ ID NO: 202182 - RNA, 21 nt, Human
aacuucagacaaucucaauau

SEQ ID NO: 202183 - RNA, 19 nt, Human
aagaagauuugagcaugug

SEQ ID NO: 202184 - RNA, 18 nt, Human
aagaucacacagcuguaa

SEQ ID NO: 202185 - RNA, 24 nt, Human
aagaugaggaaauugaggcaaaga

SEQ ID NO: 202186 - RNA, 23 nt, Human
aagcacccaauauguuugaaguu

SEQ ID NO: 202187 - RNA, 23 nt, Human
aagcaccuuaguaaaaauagucu

SEQ ID NO: 202188 - RNA, 22 nt, Human
aagccauaaaaucauuagaaac

SEQ ID NO: 202189 - RNA, 18 nt, Human
aagggggaaaaaaaaaaa

SEQ ID NO: 202190 - RNA, 18 nt, Human
aagucaaaauacacaauc

SEQ ID NO: 202191 - RNA, 21 nt, Human
aagucauaaaaguuuaugaau

SEQ ID NO: 202192 - RNA, 20 nt, Human
acaaagcaaaagcagcagag

SEQ ID NO: 202193 - RNA, 20 nt, Human
acaaagcaaaagcagcagag

SEQ ID NO: 202194 - RNA, 22 nt, Human
acaaagcaaaagcagcagaggc

SEQ ID NO: 202195 - RNA, 21 nt, Human
acaaaguacacacugccaaac

SEQ ID NO: 202196 - RNA, 26 nt, Human
acaguaaugcguucuaaagaguucau

SEQ ID NO: 202197 - RNA, 22 nt, Human
accacagcucacuaauggaguc

SEQ ID NO: 202198 - RNA, 22 nt, Human
accccccuucucgccucuccag

SEQ ID NO: 202199 - RNA, 18 nt, Human
acugccucaguccccgac

SEQ ID NO: 202200 - RNA, 18 nt, Human
agaaaccaaugauguugc

SEQ ID NO: 202201 - RNA, 23 nt, Human
agaaagcuacaaaaacugucuaa

SEQ ID NO: 202202 - RNA, 21 nt, Human
agaaagcuccacuccagagga

SEQ ID NO: 202203 - RNA, 26 nt, Human
agaaaggauacuccuaacccacccua

SEQ ID NO: 202204 - RNA, 19 nt, Human
agacuguggagcugagaac

SEQ ID NO: 202205 - RNA, 18 nt, Human
agagagaaaguagugagc

SEQ ID NO: 202206 - RNA, 24 nt, Human
agaugaggaaauugaggcaaagag

SEQ ID NO: 202207 - RNA, 22 nt, Human
agcgaggcaaagagagagcgac

SEQ ID NO: 202208 - RNA, 20 nt, Human
agcuaugcauuugggaacca

SEQ ID NO: 202209 - RNA, 19 nt, Human
agcuggcagaauguuaagg

SEQ ID NO: 202210 - RNA, 22 nt, Human
aggaauuuccaauaggacacau

SEQ ID NO: 202211 - RNA, 19 nt, Human
aggagcugaauuggcagug

SEQ ID NO: 202212 - RNA, 20 nt, Human
aggcaaagagagagcgacag

SEQ ID NO: 202213 - RNA, 21 nt, Human
agggggaaaaaaaaaaucaga

SEQ ID NO: 202214 - RNA, 20 nt, Human
aguugaaaaaaugcuuuauc

SEQ ID NO: 202215 - RNA, 24 nt, Human
aucaaucaagcauugcucaaagca

SEQ ID NO: 202216 - RNA, 18 nt, Human
auuuacagcauuuuccuu

SEQ ID NO: 202217 - RNA, 21 nt, Human
caaagcaaaagcagcagaggc

SEQ ID NO: 202218 - RNA, 23 nt, Human
caaaggcugaaaaaagaaaacca

SEQ ID NO: 202219 - RNA, 20 nt, Human
caaagugcuuucacaugcca

SEQ ID NO: 202220 - RNA, 23 nt, Human
caacacaggcuuaacaguaaugc

SEQ ID NO: 202221 - RNA, 19 nt, Human
caagaacaguaggucugau

SEQ ID NO: 202222 - RNA, 22 nt, Human
caagucaucugcaauaucaaaa

SEQ ID NO: 202223 - RNA, 23 nt, Human
caccccuuucucagucuccagaa

SEQ ID NO: 202224 - RNA, 18 nt, Human
cagcgcgaagcggcugcc

SEQ ID NO: 202225 - RNA, 20 nt, Human
cagcgcgaagcggcugccgg

SEQ ID NO: 202226 - RNA, 18 nt, Human
caggauaaaucugacuaa

SEQ ID NO: 202227 - RNA, 24 nt, Human
caguaaugcguucuaaagaguuca

SEQ ID NO: 202228 - RNA, 24 nt, Human
cauaaaaucauuagaaaccaauga

SEQ ID NO: 202229 - RNA, 24 nt, Human
caucaggaauucagaagcacccaa

SEQ ID NO: 202230 - RNA, 19 nt, Human
cauggagaaacaaauacua

SEQ ID NO: 202231 - RNA, 25 nt, Human
ccaaucaucaggaauucagaagcac

SEQ ID NO: 202232 - RNA, 23 nt, Human
ccagcaaugaaguacaaagcaaa

SEQ ID NO: 202233 - RNA, 21 nt, Human
cccauaaccuuuaaggcaauc

SEQ ID NO: 202234 - RNA, 21 nt, Human
cccccaggcgcuaucaccaac

SEQ ID NO: 202235 - RNA, 25 nt, Human
ccccccuucucgccucuccaguccc

SEQ ID NO: 202236 - RNA, 19 nt, Human
cccccgcgcccgccugcuu

SEQ ID NO: 202237 - RNA, 18 nt, Human
cccccuccaaaagcccgc

SEQ ID NO: 202238 - RNA, 23 nt, Human
ccccuucucgccucuccaguccc

SEQ ID NO: 202239 - RNA, 25 nt, Human
cccgccucccucucuuccuuccuuc

SEQ ID NO: 202240 - RNA, 24 nt, Human
cccucuacugccucaguccccgac

SEQ ID NO: 202241 - RNA, 23 nt, Human
ccgcgcccgccugcuugcccgcc

SEQ ID NO: 202242 - RNA, 21 nt, Human
ccgcugguguccgcuucuccu

SEQ ID NO: 202243 - RNA, 22 nt, Human
ccgcugguguccgcuucuccuc

SEQ ID NO: 202244 - RNA, 21 nt, Human
ccgcuucuccucagccgacua

SEQ ID NO: 202245 - RNA, 19 nt, Human
ccgggcucucgccucccuc

SEQ ID NO: 202246 - RNA, 21 nt, Human
ccucccucuacugccucaguc

SEQ ID NO: 202247 - RNA, 18 nt, Human
ccucccucucuuccuucc

SEQ ID NO: 202248 - RNA, 25 nt, Human
cgccucuccagucccccucccccaa

SEQ ID NO: 202249 - RNA, 24 nt, Human
cgccugcuugcccgccucccucuc

SEQ ID NO: 202250 - RNA, 23 nt, Human
cggcugccgggcucucgccuccc

SEQ ID NO: 202251 - RNA, 21 nt, Human
cgggagcgaggcaaagagaga

SEQ ID NO: 202252 - RNA, 20 nt, Human
cuaaaaaaugagauagacag

SEQ ID NO: 202253 - RNA, 24 nt, Human
cuagaguagagacacaaagaggau

SEQ ID NO: 202254 - RNA, 19 nt, Human
cucaagccaugcucuuugu

SEQ ID NO: 202255 - RNA, 20 nt, Human
cucacaaaaacaaaguacac

SEQ ID NO: 202256 - RNA, 21 nt, Human
cugaaacuuagaacacugaca

SEQ ID NO: 202257 - RNA, 22 nt, Human
cugaaacuuagaacacugacaa

SEQ ID NO: 202258 - RNA, 21 nt, Human
cugaacucaagcagcugcuca

SEQ ID NO: 202259 - RNA, 18 nt, Human
cugaaguucauuucagug

SEQ ID NO: 202260 - RNA, 23 nt, Human
cugguguccgcuucuccucagcc

SEQ ID NO: 202261 - RNA, 22 nt, Human
cuuaacaguaaugcguucuaaa

SEQ ID NO: 202262 - RNA, 23 nt, Human
cuugcccgccucccucucuuccu

SEQ ID NO: 202263 - RNA, 23 nt, Human
gagccgggagcgaggcaaagaga

SEQ ID NO: 202264 - RNA, 24 nt, Human
gagcgggaccccggaggcgagaga

SEQ ID NO: 202265 - RNA, 18 nt, Human
gagcugagaacaaaggug

SEQ ID NO: 202266 - RNA, 20 nt, Human
gaggaaauugaggcaaagag

SEQ ID NO: 202267 - RNA, 18 nt, Human
gagggcagggagagagaa

SEQ ID NO: 202268 - RNA, 19 nt, Human
gcaaaaacauaacagcaac

SEQ ID NO: 202269 - RNA, 18 nt, Human
gcaaagagagagcgacag

SEQ ID NO: 202270 - RNA, 19 nt, Human
gcaaagagagagcgacagc

SEQ ID NO: 202271 - RNA, 19 nt, Human
gcaaaggccacaaagcugc

SEQ ID NO: 202272 - RNA, 26 nt, Human
gcagcgaccccccuucucgccucucc

SEQ ID NO: 202273 - RNA, 20 nt, Human
gccucaguccccgacccccg

SEQ ID NO: 202274 - RNA, 19 nt, Human
gccucuccagucccccucc

SEQ ID NO: 202275 - RNA, 19 nt, Human
gcgggaccccggaggcgag

SEQ ID NO: 202276 - RNA, 21 nt, Human
gcucgggaucaagacauaccg

SEQ ID NO: 202277 - RNA, 20 nt, Human
gggaccccggaggcgagaga

SEQ ID NO: 202278 - RNA, 26 nt, Human
gggaugucaucuguuuuucguccacg

SEQ ID NO: 202279 - RNA, 19 nt, Human
guuguugaaacauggaaga

SEQ ID NO: 202280 - RNA, 19 nt, Human
uaaaauauuuacucucugg

SEQ ID NO: 202281 - RNA, 18 nt, Human
uaaaaugcuuacaguaug

SEQ ID NO: 202282 - RNA, 25 nt, Human
uaaauacaccccuuucucagucucc

SEQ ID NO: 202283 - RNA, 22 nt, Human
uaaauccaaucaucaggaauuc

SEQ ID NO: 202284 - RNA, 21 nt, Human
uaacagcaacuucucugcuuc

SEQ ID NO: 202285 - RNA, 19 nt, Human
uaacuaaaacuucagacaa

SEQ ID NO: 202286 - RNA, 23 nt, Human
uaacuaaaacuucagacaaucuc

SEQ ID NO: 202287 - RNA, 21 nt, Human
uaagcaagucaucugcaauau

SEQ ID NO: 202288 - RNA, 24 nt, Human
uaagugacuugcccaagaucacac

SEQ ID NO: 202289 - RNA, 19 nt, Human
uaaguugacacugaacacu

SEQ ID NO: 202290 - RNA, 19 nt, Human
uacaaauugucauauacac

SEQ ID NO: 202291 - RNA, 21 nt, Human
uaccagcaaugaaguacaaag

SEQ ID NO: 202292 - RNA, 25 nt, Human
uaccuauaaaagucaauuugaaaaa

SEQ ID NO: 202293 - RNA, 18 nt, Human
uacuggguuuguucauua

SEQ ID NO: 202294 - RNA, 19 nt, Human
uacuugacauaaaauuggu

SEQ ID NO: 202295 - RNA, 22 nt, Human
uagaacacugacaaugccagcc

SEQ ID NO: 202296 - RNA, 23 nt, Human
uagaacacugacaaugccagcca

SEQ ID NO: 202297 - RNA, 19 nt, Human
uagaaguauauaaacucuu

SEQ ID NO: 202298 - RNA, 21 nt, Human
uagaauagcuaccauuucuga

SEQ ID NO: 202299 - RNA, 23 nt, Human
uagaaucaaucaagcauugcuca

SEQ ID NO: 202300 - RNA, 19 nt, Human
uagaccugccauaaguuca

SEQ ID NO: 202301 - RNA, 18 nt, Human
uauauauauguauauaua

SEQ ID NO: 202302 - RNA, 21 nt, Human
uauauguauauauauuucaca

SEQ ID NO: 202303 - RNA, 22 nt, Human
uaucaaaaacaagaguaucaga

SEQ ID NO: 202304 - RNA, 21 nt, Human
uaugaauaaugaacuguguau

SEQ ID NO: 202305 - RNA, 22 nt, Human
uauggucaaaauacugaaaaag

SEQ ID NO: 202306 - RNA, 20 nt, Human
uauugugaggaaagggugcu

SEQ ID NO: 202307 - RNA, 18 nt, Human
uauuuuuauauuauugug

SEQ ID NO: 202308 - RNA, 21 nt, Human
ucaagcagcugcucaugaagc

SEQ ID NO: 202309 - RNA, 18 nt, Human
ucagaaauauuuacuuaa

SEQ ID NO: 202310 - RNA, 18 nt, Human
ucaguagagguguauaac

SEQ ID NO: 202311 - RNA, 21 nt, Human
ucaguccagauaaaauauugu

SEQ ID NO: 202312 - RNA, 23 nt, Human
uccaaaagcccgcgcagcaaaca

SEQ ID NO: 202313 - RNA, 20 nt, Human
uccaagaaaucagaaagcuc

SEQ ID NO: 202314 - RNA, 21 nt, Human
uccaagaaaucagaaagcucc

SEQ ID NO: 202315 - RNA, 22 nt, Human
uccccaugcaauaucuuaagug

SEQ ID NO: 202316 - RNA, 20 nt, Human
ucccucucuuccuuccuucc

SEQ ID NO: 202317 - RNA, 18 nt, Human
uccuuguccaguacucau

SEQ ID NO: 202318 - RNA, 21 nt, Human
ucuccagucccccucccccag

SEQ ID NO: 202319 - RNA, 21 nt, Human
ucucuggcccuuccacagaaa

SEQ ID NO: 202320 - RNA, 19 nt, Human
ugaaaaaagaaaaccacau

SEQ ID NO: 202321 - RNA, 23 nt, Human
ugaaaaaagaaaaccacauuugc

SEQ ID NO: 202322 - RNA, 24 nt, Human
ugaaaaaagaaaaccacauuugcc

SEQ ID NO: 202323 - RNA, 25 nt, Human
ugaaaaaaggaaagaaaaaagccaa

SEQ ID NO: 202324 - RNA, 26 nt, Human
ugaaaaaaggaaagaaaaaagccaaa

SEQ ID NO: 202325 - RNA, 19 nt, Human
ugaaaaagcgcaaaggcug

SEQ ID NO: 202326 - RNA, 20 nt, Human
ugaaaacagaaacagcuuuc

SEQ ID NO: 202327 - RNA, 22 nt, Human
ugaaaugacaaaaccaguauuc

SEQ ID NO: 202328 - RNA, 23 nt, Human
ugaaaugacaaaaccaguauucu

SEQ ID NO: 202329 - RNA, 21 nt, Human
ugaaauuacaggauaaaucug

SEQ ID NO: 202330 - RNA, 21 nt, Human
ugaaauuacaggauaaaucug

SEQ ID NO: 202331 - RNA, 24 nt, Human
ugaaguggugcuuuauuuugggcg

SEQ ID NO: 202332 - RNA, 23 nt, Human
ugacaaaaccaguauucugcagg

SEQ ID NO: 202333 - RNA, 24 nt, Human
ugacuagcugugacagagaccgua

SEQ ID NO: 202334 - RNA, 19 nt, Human
ugacucacaaaaacaaagu

SEQ ID NO: 202335 - RNA, 20 nt, Human
ugacuccuuguccaguacuc

SEQ ID NO: 202336 - RNA, 19 nt, Human
ugagaacaaaggugaagac

SEQ ID NO: 202337 - RNA, 20 nt, Human
ugagaacaaaggugaagaca

SEQ ID NO: 202338 - RNA, 21 nt, Human
ugagacaugacucacaaaaac

SEQ ID NO: 202339 - RNA, 24 nt, Human
ugaggaaauugaggcaaagagagg

SEQ ID NO: 202340 - RNA, 21 nt, Human
ugaggcaaagagagguuaagu

SEQ ID NO: 202341 - RNA, 21 nt, Human
ugauggaauuaaauacacccc

SEQ ID NO: 202342 - RNA, 19 nt, Human
ugcccauggucugcaucug

SEQ ID NO: 202343 - RNA, 18 nt, Human
uggagcugagaacaaagg

SEQ ID NO: 202344 - RNA, 22 nt, Human
uggagcugagaacaaaggugaa

SEQ ID NO: 202345 - RNA, 23 nt, Human
uggagugggggagggcagggaga

SEQ ID NO: 202346 - RNA, 30 nt, Human
uguaaaaugaaaacagaaacagcuuucaaa

SEQ ID NO: 202347 - RNA, 20 nt, Human
ugucacaagccauaaaauca

SEQ ID NO: 202348 - RNA, 21 nt, Human
uguccaaacugugccauaaau

SEQ ID NO: 202349 - RNA, 24 nt, Human
uuauaaaguauuaugacuccuagu

SEQ ID NO: 202350 - RNA, 19 nt, Human
uucaaucucuaaaauuccu

SEQ ID NO: 202351 - RNA, 20 nt, Human
uucaucaccaucagggucca

SEQ ID NO: 202352 - RNA, 22 nt, Human
uucuaacagugaacuuccugaa

SEQ ID NO: 202353 - RNA, 26 nt, Human
uucucagucuccagaaaggauacucc

SEQ ID NO: 202354 - RNA, 23 nt, Human
uugacacugaacacugagucagc

SEQ ID NO: 202355 - RNA, 19 nt, Human
uugacuccuuguccaguac

SEQ ID NO: 202356 - RNA, 18 nt, Human
uuuaagggggaaaaaaaa

SEQ ID NO: 202357 - RNA, 25 nt, Human
uuuaggaaauauauauauauaugua

SEQ ID NO: 202358 - RNA, 23 nt, Human
uuucacaugccaucucauuuaau

SEQ ID NO: 202359 - RNA, 22 nt, Human
aaagcaauucuccaaggcccuu

SEQ ID NO: 202360 - RNA, 20 nt, Human
aaaguuguuuucagagacag

SEQ ID NO: 202361 - RNA, 21 nt, Human
aagcaugauuccauugcaugc

SEQ ID NO: 202362 - RNA, 20 nt, Human
acaguguuuuucaagcacag

SEQ ID NO: 202363 - RNA, 18 nt, Human
acccagagcaucuugaag

SEQ ID NO: 202364 - RNA, 19 nt, Human
agaaaggagaaugauucug

SEQ ID NO: 202365 - RNA, 19 nt, Human
agacugaugaaaacuagug

SEQ ID NO: 202366 - RNA, 22 nt, Human
cacaaaguuguuuucagagaca

SEQ ID NO: 202367 - RNA, 18 nt, Human
cagcagaauuaugugcuu

SEQ ID NO: 202368 - RNA, 19 nt, Human
cagggaccgacugcugugu

SEQ ID NO: 202369 - RNA, 23 nt, Human
caucccaccacccagagcaucuu

SEQ ID NO: 202370 - RNA, 19 nt, Human
cccaccacccagagcauua

SEQ ID NO: 202371 - RNA, 20 nt, Human
cccaucccaccacccagagc

SEQ ID NO: 202372 - RNA, 23 nt, Human
cccuuuaugggcagaaaggagaa

SEQ ID NO: 202373 - RNA, 24 nt, Human
cucaaguugggaaagggggcugga

SEQ ID NO: 202374 - RNA, 20 nt, Human
cucccaggaguggccggagg

SEQ ID NO: 202375 - RNA, 22 nt, Human
gaacaugaaagcucguaugagc

SEQ ID NO: 202376 - RNA, 18 nt, Human
gagcugcuguggcccugc

SEQ ID NO: 202377 - RNA, 23 nt, Human
gcagaaaggagaaugauucugga

SEQ ID NO: 202378 - RNA, 20 nt, Human
gcccuugagagcccuuuccu

SEQ ID NO: 202379 - RNA, 23 nt, Human
ggcagaaaggagaaugauucugg

SEQ ID NO: 202380 - RNA, 21 nt, Human
uaaagcaauucuccaaggccc

SEQ ID NO: 202381 - RNA, 19 nt, Human
uacuggacgugccaggagc

SEQ ID NO: 202382 - RNA, 25 nt, Human
ucaaugaauugauaaggucugagga

SEQ ID NO: 202383 - RNA, 22 nt, Human
ucccaggaguggccggaggugc

SEQ ID NO: 202384 - RNA, 23 nt, Human
ucccaggaguggccggaggugcu

SEQ ID NO: 202385 - RNA, 28 nt, Human
ucccaucccaccacccagagcaucuuga

SEQ ID NO: 202386 - RNA, 21 nt, Human
ucucccaucccaccacccaga

SEQ ID NO: 202387 - RNA, 20 nt, Human
ugaagaaaugaagcucagag

SEQ ID NO: 202388 - RNA, 20 nt, Human
ugaagaaaugaagcucagag

SEQ ID NO: 202389 - RNA, 21 nt, Human
ugacagggaccgacugcugug

SEQ ID NO: 202390 - RNA, 21 nt, Human
ugagagcccuuuccuuucgug

SEQ ID NO: 202391 - RNA, 20 nt, Human
ugcuuuuguccacagggagc

SEQ ID NO: 202392 - RNA, 21 nt, Human
uggaauuaacaaggccacucc

SEQ ID NO: 202393 - RNA, 18 nt, Human
uggacaagcaugauucca

SEQ ID NO: 202394 - RNA, 19 nt, Human
ugggaaagggggcuggagc

SEQ ID NO: 202395 - RNA, 22 nt, Human
ugggcagaaaggagaaugauuc

SEQ ID NO: 202396 - RNA, 23 nt, Human
ugggcagaaaggagaaugauucu

SEQ ID NO: 202397 - RNA, 21 nt, Human
uggguggacaaugacagggac

SEQ ID NO: 202398 - RNA, 21 nt, Human
ugguuuauuucaucaccaaag

SEQ ID NO: 202399 - RNA, 21 nt, Human
uuaaagcaauucuccaaggcc

SEQ ID NO: 202400 - RNA, 21 nt, Human
uucaucaccaaagggucuguc

SEQ ID NO: 202401 - RNA, 18 nt, Human
uugcuugaacagacugau

SEQ ID NO: 202402 - RNA, 19 nt, Human
uuggaacauucacucuucu

SEQ ID NO: 202403 - RNA, 20 nt, Human
uuuaugggcagaaaggagaa

SEQ ID NO: 202404 - RNA, 27 nt, Human
uuuucagagacaguguuucgggucacc

SEQ ID NO: 202405 - RNA, 23 nt, Human
uuuuguccacagggagcagggag

SEQ ID NO: 202406 - RNA, 22 nt, Human
uuuuuuuuuuuuuuuuuuaagg

SEQ ID NO: 202407 - RNA, 24 nt, Human
aaaagggagaaaaauauaaggaua

SEQ ID NO: 202408 - RNA, 20 nt, Human
aacugugacggguacaaaca

SEQ ID NO: 202409 - RNA, 21 nt, Human
aaggcgugcgucucagccccg

SEQ ID NO: 202410 - RNA, 23 nt, Human
aaguccugagcuuggggcagccu

SEQ ID NO: 202411 - RNA, 19 nt, Human
accccgacaggugccagag

SEQ ID NO: 202412 - RNA, 19 nt, Human
agagagagauguuuaaccu

SEQ ID NO: 202413 - RNA, 21 nt, Human
agcacaaauauuaaacugucu

SEQ ID NO: 202414 - RNA, 18 nt, Human
agcgacagugacuuccag

SEQ ID NO: 202415 - RNA, 18 nt, Human
aggcagcggccggggcuc

SEQ ID NO: 202416 - RNA, 23 nt, Human
agguccccccgagucccucugcc

SEQ ID NO: 202417 - RNA, 22 nt, Human
aucccgggggccccgcgcagga

SEQ ID NO: 202418 - RNA, 18 nt, Human
cacgcgcggcugccgggc

SEQ ID NO: 202419 - RNA, 20 nt, Human
cagacaguggcgagcgacag

SEQ ID NO: 202420 - RNA, 22 nt, Human
cagccccggccccgagagacuu

SEQ ID NO: 202421 - RNA, 22 nt, Human
cagccccggcuuucucuggucc

SEQ ID NO: 202422 - RNA, 19 nt, Human
cagccuuggccccucgguu

SEQ ID NO: 202423 - RNA, 19 nt, Human
cauugaaaaaaauacugaa

SEQ ID NO: 202424 - RNA, 24 nt, Human
ccccccgagucccucugcccgagc

SEQ ID NO: 202425 - RNA, 26 nt, Human
cccccgagucccucugcccgagcggg

SEQ ID NO: 202426 - RNA, 18 nt, Human
ccccgagucccucugccc

SEQ ID NO: 202427 - RNA, 20 nt, Human
ccccggccccgagagacuuc

SEQ ID NO: 202428 - RNA, 21 nt, Human
ccggcgggccagcgcgcugga

SEQ ID NO: 202429 - RNA, 19 nt, Human
ccgugcgccccuguggccg

SEQ ID NO: 202430 - RNA, 20 nt, Human
ccgugcgccccuguggccgu

SEQ ID NO: 202431 - RNA, 21 nt, Human
ccgugcgccccuguggccgug

SEQ ID NO: 202432 - RNA, 20 nt, Human
ccuccagucgagggggcggg

SEQ ID NO: 202433 - RNA, 23 nt, Human
ccugagcuuggggcagccuuggc

SEQ ID NO: 202434 - RNA, 21 nt, Human
cgccugggcgcguucucuccg

SEQ ID NO: 202435 - RNA, 24 nt, Human
cgcgggaccugucagcggcccccg

SEQ ID NO: 202436 - RNA, 22 nt, Human
cggccaugcuaggccuggaccc

SEQ ID NO: 202437 - RNA, 21 nt, Human
cucaagauuuucugaaaacuu

SEQ ID NO: 202438 - RNA, 24 nt, Human
cucaagauuuucugaaaacuuuua

SEQ ID NO: 202439 - RNA, 21 nt, Human
cucagccccggccccgagaga

SEQ ID NO: 202440 - RNA, 31 nt, Human
cucagccccggccccgagagacuucucggcc

SEQ ID NO: 202441 - RNA, 22 nt, Human
cuccaaacugcucuuggacccc

SEQ ID NO: 202442 - RNA, 20 nt, Human
cucugguccccuugcccgcc

SEQ ID NO: 202443 - RNA, 24 nt, Human
cugaaaacuuuuaaugacaacuga

SEQ ID NO: 202444 - RNA, 21 nt, Human
cuggaccccgacaggugccag

SEQ ID NO: 202445 - RNA, 20 nt, Human
cugguccccuugcccgccug

SEQ ID NO: 202446 - RNA, 23 nt, Human
cuuuaugacuggguauauagaac

SEQ ID NO: 202447 - RNA, 19 nt, Human
gacagugacuuccagcccc

SEQ ID NO: 202448 - RNA, 22 nt, Human
gagccgcguggcugggcugggc

SEQ ID NO: 202449 - RNA, 25 nt, Human
gagguccccccgagucccucugccc

SEQ ID NO: 202450 - RNA, 22 nt, Human
gaucccugccuccagucgaggg

SEQ ID NO: 202451 - RNA, 18 nt, Human
gccgugcgccccuguggc

SEQ ID NO: 202452 - RNA, 20 nt, Human
gccgugcgccccuguggccg

SEQ ID NO: 202453 - RNA, 21 nt, Human
gccgugcgccccuguggccgu

SEQ ID NO: 202454 - RNA, 22 nt, Human
gccgugcgccccuguggccgug

SEQ ID NO: 202455 - RNA, 21 nt, Human
gcgcggcugccgggccucugc

SEQ ID NO: 202456 - RNA, 22 nt, Human
gcggccggggcuccgcggggaa

SEQ ID NO: 202457 - RNA, 20 nt, Human
ggaaaaagggagaaaaauau

SEQ ID NO: 202458 - RNA, 19 nt, Human
ggaccccaccugugagccg

SEQ ID NO: 202459 - RNA, 21 nt, Human
ggcacgggaaaaagggagaaa

SEQ ID NO: 202460 - RNA, 23 nt, Human
ggccaaggagcgagguccccccg

SEQ ID NO: 202461 - RNA, 23 nt, Human
ggcgcguucucuccgcccgaguu

SEQ ID NO: 202462 - RNA, 20 nt, Human
ggcgggaaggggaacgcggg

SEQ ID NO: 202463 - RNA, 18 nt, Human
ggcugggcugggcugggc

SEQ ID NO: 202464 - RNA, 18 nt, Human
guccccuugcccgccugg

SEQ ID NO: 202465 - RNA, 23 nt, Human
gucccgggaggcagcggccgggg

SEQ ID NO: 202466 - RNA, 22 nt, Human
guggcacgggaaaaagggagaa

SEQ ID NO: 202467 - RNA, 18 nt, Human
uaaaaaaagagagagaga

SEQ ID NO: 202468 - RNA, 24 nt, Human
uaaaauaaaaacugaaaauugaaa

SEQ ID NO: 202469 - RNA, 28 nt, Human
uaacauucauugaaaaaaauacugaaac

SEQ ID NO: 202470 - RNA, 20 nt, Human
uaagaaaaaguggcacggga

SEQ ID NO: 202471 - RNA, 23 nt, Human
uacuuuaugacuggguauauaga

SEQ ID NO: 202472 - RNA, 20 nt, Human
uauagaacauaaaauaaaaa

SEQ ID NO: 202473 - RNA, 24 nt, Human
uauagaacauaaaauaaaaacuga

SEQ ID NO: 202474 - RNA, 18 nt, Human
ucaccggcugccuccugg

SEQ ID NO: 202475 - RNA, 19 nt, Human
ucagcggcccccgccacuc

SEQ ID NO: 202476 - RNA, 18 nt, Human
uccacguguuugguguug

SEQ ID NO: 202477 - RNA, 21 nt, Human
uccccuugcccgccugggcgc

SEQ ID NO: 202478 - RNA, 24 nt, Human
uccguagcgccggguugcuccaaa

SEQ ID NO: 202479 - RNA, 19 nt, Human
uccugagcuuggggcagcc

SEQ ID NO: 202480 - RNA, 23 nt, Human
ucgccgugcgccccuguggccuc

SEQ ID NO: 202481 - RNA, 22 nt, Human
ucuccguagcgccggguugcuc

SEQ ID NO: 202482 - RNA, 24 nt, Human
ucugcgcuccgugcgcuccagaca

SEQ ID NO: 202483 - RNA, 20 nt, Human
ugaaaaaaauacugaaacau

SEQ ID NO: 202484 - RNA, 23 nt, Human
ugacuuccagccccggcuuucuc

SEQ ID NO: 202485 - RNA, 24 nt, Human
ugcuccaaacugcucuuggacccc

SEQ ID NO: 202486 - RNA, 20 nt, Human
uggcugggcugggcugggcc

SEQ ID NO: 202487 - RNA, 26 nt, Human
uggcugggcugggcugggcugcgcgg

SEQ ID NO: 202488 - RNA, 18 nt, Human
ugggcugggcugggcugc

SEQ ID NO: 202489 - RNA, 23 nt, Human
ugguaaaaaaauauauuauauuu

SEQ ID NO: 202490 - RNA, 25 nt, Human
ugucccgggaggcagcggccggggc

SEQ ID NO: 202491 - RNA, 22 nt, Human
uuaaaaaaagagagagagaugu

SEQ ID NO: 202492 - RNA, 24 nt, Human
uuauauuuugauuuuuuuuuucuu

SEQ ID NO: 202493 - RNA, 19 nt, Human
uucauugaaaaaaauacug

SEQ ID NO: 202494 - RNA, 20 nt, Human
uuccagccccggcuuucucu

SEQ ID NO: 202495 - RNA, 21 nt, Human
uuggaccccaccugugagccg

SEQ ID NO: 202496 - RNA, 25 nt, Human
uuuaagaaaaaguggcacgggaaaa

SEQ ID NO: 202497 - RNA, 22 nt, Human
uuuugauuuuuuuuuucuuuuu

SEQ ID NO: 202498 - RNA, 24 nt, Human
uuuuuauuuuaaugaucaaaaagg

SEQ ID NO: 202499 - RNA, 26 nt, Human
uuuuuauuuuaaugaucaaaaaggug

SEQ ID NO: 202500 - RNA, 24 nt, Human
uuuuuuuuuuuuuuuccaagauuu

SEQ ID NO: 202501 - RNA, 23 nt, Human
uuuuuuuuuuuuuuuuuuccaag

SEQ ID NO: 202502 - RNA, 20 nt, Human
aaauacuagaguuaaacacu

SEQ ID NO: 202503 - RNA, 20 nt, Human
aagaaaaaauagaagcacca

SEQ ID NO: 202504 - RNA, 20 nt, Human
aagaaaaaauagaagcacca

SEQ ID NO: 202505 - RNA, 22 nt, Human
aagaagaaaacgaaauacuaga

SEQ ID NO: 202506 - RNA, 22 nt, Human
agaagaaaacgaaauacuagag

SEQ ID NO: 202507 - RNA, 23 nt, Human
agacaagacaaggaggcagcaac

SEQ ID NO: 202508 - RNA, 18 nt, Human
agacccaagacaagacaa

SEQ ID NO: 202509 - RNA, 19 nt, Human
agcgcagagaggguucccc

SEQ ID NO: 202510 - RNA, 18 nt, Human
agcuggaaugggagaccc

SEQ ID NO: 202511 - RNA, 22 nt, Human
aggaagagacagggaagcugga

SEQ ID NO: 202512 - RNA, 23 nt, Human
aggaggcugcugcaugaggccug

SEQ ID NO: 202513 - RNA, 21 nt, Human
aggcagcaacuggagaacuca

SEQ ID NO: 202514 - RNA, 19 nt, Human
caacuggagaacucagacg

SEQ ID NO: 202515 - RNA, 20 nt, Human
cccggcacgcuggacgcccg

SEQ ID NO: 202516 - RNA, 23 nt, Human
cccguaacaacaaaaaucucaag

SEQ ID NO: 202517 - RNA, 18 nt, Human
cccgugugcccgcggccg

SEQ ID NO: 202518 - RNA, 24 nt, Human
cccuucagaauacagcccuguuga

SEQ ID NO: 202519 - RNA, 19 nt, Human
ccgccgcugcugcugcugc

SEQ ID NO: 202520 - RNA, 22 nt, Human
ccgccgcugcugcugcugcucu

SEQ ID NO: 202521 - RNA, 22 nt, Human
ccgcggccgccgcugcugcugc

SEQ ID NO: 202522 - RNA, 22 nt, Human
cggccagggacauggcucagca

SEQ ID NO: 202523 - RNA, 24 nt, Human
cggccgccgcugcugcugcugcuc

SEQ ID NO: 202524 - RNA, 21 nt, Human
cugcccuucagaauacagccc

SEQ ID NO: 202525 - RNA, 22 nt, Human
cugcugcucuuccccagguggc

SEQ ID NO: 202526 - RNA, 18 nt, Human
cugcugcugcugcucuuc

SEQ ID NO: 202527 - RNA, 25 nt, Human
cuguagcggcggcggcucuugacau

SEQ ID NO: 202528 - RNA, 23 nt, Human
gaagaaaaaauagaagcaccauc

SEQ ID NO: 202529 - RNA, 23 nt, Human
gacaaggaggcagcaacuggaga

SEQ ID NO: 202530 - RNA, 21 nt, Human
gacgcgcucggggccaggagg

SEQ ID NO: 202531 - RNA, 23 nt, Human
gagaagaaaaaauagaagcacca

SEQ ID NO: 202532 - RNA, 21 nt, Human
gcccgcggccgccgcugcugc

SEQ ID NO: 202533 - RNA, 20 nt, Human
gccgccgcugcugcugcugc

SEQ ID NO: 202534 - RNA, 21 nt, Human
gcugcaugaggccugcccuuc

SEQ ID NO: 202535 - RNA, 24 nt, Human
gcugcucuuccccagguggcggcg

SEQ ID NO: 202536 - RNA, 19 nt, Human
ggaagagacagggaagcug

SEQ ID NO: 202537 - RNA, 23 nt, Human
ggaaugggagacccaagacaaga

SEQ ID NO: 202538 - RNA, 18 nt, Human
ggccagggacauggcuca

SEQ ID NO: 202539 - RNA, 19 nt, Human
ggcgugggucccgccgggc

SEQ ID NO: 202540 - RNA, 20 nt, Human
uaacagguaggggagaagaa

SEQ ID NO: 202541 - RNA, 25 nt, Human
uagcggcggcggcucuugacauguu

SEQ ID NO: 202542 - RNA, 18 nt, Human
uauaacagguaggggaga

SEQ ID NO: 202543 - RNA, 25 nt, Human
ucuguacauuuuacauacauauaau

SEQ ID NO: 202544 - RNA, 24 nt, Human
ucuguacauuuuacauacauauag

SEQ ID NO: 202545 - RNA, 19 nt, Human
ugacauguugcccggcagg

SEQ ID NO: 202546 - RNA, 19 nt, Human
ugagcgcagagaggguucc

SEQ ID NO: 202547 - RNA, 20 nt, Human
ugcugcugcucuuccccagg

SEQ ID NO: 202548 - RNA, 18 nt, Human
uggaaugggagacccaag

SEQ ID NO: 202549 - RNA, 25 nt, Human
ugggagacccaagacaagacaagga

SEQ ID NO: 202550 - RNA, 19 nt, Human
ugggcgagggucugcuccc

SEQ ID NO: 202551 - RNA, 20 nt, Human
uuccccggcacgcuggacgc

SEQ ID NO: 202552 - RNA, 19 nt, Human
aaccccuuuucguaguucc

SEQ ID NO: 202553 - RNA, 22 nt, Human
aaccccuuuucguaguuccugu

SEQ ID NO: 202554 - RNA, 22 nt, Human
aagagugagacccaaccccauu

SEQ ID NO: 202555 - RNA, 24 nt, Human
aagcagagguuuagacagcaggug

SEQ ID NO: 202556 - RNA, 23 nt, Human
aagcuagagugagaaccccuaua

SEQ ID NO: 202557 - RNA, 18 nt, Human
acagcacuggaggcaauc

SEQ ID NO: 202558 - RNA, 26 nt, Human
acagcacuggaggcaauccuggcugc

SEQ ID NO: 202559 - RNA, 20 nt, Human
acauauacauuaauagcacu

SEQ ID NO: 202560 - RNA, 22 nt, Human
accccaaaaacaugcucagaac

SEQ ID NO: 202561 - RNA, 24 nt, Human
agacuagaaacaccuuagagggag

SEQ ID NO: 202562 - RNA, 18 nt, Human
agagaaaaugaagcccga

SEQ ID NO: 202563 - RNA, 22 nt, Human
agcccgaggagguggugguggg

SEQ ID NO: 202564 - RNA, 18 nt, Human
agguggugguggggcaaa

SEQ ID NO: 202565 - RNA, 22 nt, Human
caaacugaugggaagggacaac

SEQ ID NO: 202566 - RNA, 22 nt, Human
caagcuagagugagaaccccua

SEQ ID NO: 202567 - RNA, 19 nt, Human
caccaagaggacaggauuu

SEQ ID NO: 202568 - RNA, 21 nt, Human
caccccaaaaacaugcucaga

SEQ ID NO: 202569 - RNA, 18 nt, Human
cacuaccucacucucugc

SEQ ID NO: 202570 - RNA, 25 nt, Human
cacucauacaaauuuccaguuuuac

SEQ ID NO: 202571 - RNA, 22 nt, Human
cagagguuuagacagcaggugc

SEQ ID NO: 202572 - RNA, 25 nt, Human
caguggguucugguggccaucuggu

SEQ ID NO: 202573 - RNA, 21 nt, Human
cauucuggggagaagcccaag

SEQ ID NO: 202574 - RNA, 21 nt, Human
ccaaccccagagcucugaccu

SEQ ID NO: 202575 - RNA, 23 nt, Human
ccagcagcgcgcgggucccuccu

SEQ ID NO: 202576 - RNA, 25 nt, Human
cccaaaaacaugcucagaacuacag

SEQ ID NO: 202577 - RNA, 19 nt, Human
cccaccgcccgcacguccg

SEQ ID NO: 202578 - RNA, 22 nt, Human
ccccaagcuagagugagaaccc

SEQ ID NO: 202579 - RNA, 19 nt, Human
ccccagagcucugaccucg

SEQ ID NO: 202580 - RNA, 24 nt, Human
cccccacucauacaaauuuccagu

SEQ ID NO: 202581 - RNA, 21 nt, Human
cccccagauauggccacucau

SEQ ID NO: 202582 - RNA, 23 nt, Human
ccccccacucauacaaauuucca

SEQ ID NO: 202583 - RNA, 18 nt, Human
ccccuauaaagcagaccu

SEQ ID NO: 202584 - RNA, 23 nt, Human
ccucacucucugccaucucuaaa

SEQ ID NO: 202585 - RNA, 18 nt, Human
ccugguuccuccaugggg

SEQ ID NO: 202586 - RNA, 21 nt, Human
ccuucaugauguggggaggga

SEQ ID NO: 202587 - RNA, 22 nt, Human
ccuugcucacccccaacccuca

SEQ ID NO: 202588 - RNA, 24 nt, Human
cgcccgcacguccgggugcacgcg

SEQ ID NO: 202589 - RNA, 21 nt, Human
cuaacagcacuggaggcaauc

SEQ ID NO: 202590 - RNA, 21 nt, Human
cuagggacccuaggggacaga

SEQ ID NO: 202591 - RNA, 23 nt, Human
cuagggacccuaggggacagagu

SEQ ID NO: 202592 - RNA, 22 nt, Human
cucacccccaacccucauaaac

SEQ ID NO: 202593 - RNA, 19 nt, Human
cucaucucugccaacccca

SEQ ID NO: 202594 - RNA, 19 nt, Human
cugacugcuccuuucucca

SEQ ID NO: 202595 - RNA, 20 nt, Human
cuggcugcaugaaggaggag

SEQ ID NO: 202596 - RNA, 22 nt, Human
gaacagauuuaacuccccccac

SEQ ID NO: 202597 - RNA, 27 nt, Human
gaugggccugguuccuccauggggaug

SEQ ID NO: 202598 - RNA, 23 nt, Human
gccacuaccucacucucugccau

SEQ ID NO: 202599 - RNA, 23 nt, Human
gccacucaucucugccaacccca

SEQ ID NO: 202600 - RNA, 19 nt, Human
gccaucuggucaaccagau

SEQ ID NO: 202601 - RNA, 19 nt, Human
gcccaugacagauacaggg

SEQ ID NO: 202602 - RNA, 22 nt, Human
gccugguuccuccauggggaug

SEQ ID NO: 202603 - RNA, 19 nt, Human
gcuagagugagaaccccua

SEQ ID NO: 202604 - RNA, 19 nt, Human
gcugcccagaugggccugg

SEQ ID NO: 202605 - RNA, 22 nt, Human
ggagaucuacuuggcacuccag

SEQ ID NO: 202606 - RNA, 22 nt, Human
ggagaucugugaacaagugcuu

SEQ ID NO: 202607 - RNA, 25 nt, Human
gggacagaguccaccccaaaaacau

SEQ ID NO: 202608 - RNA, 18 nt, Human
gggagggaggaagucagg

SEQ ID NO: 202609 - RNA, 18 nt, Human
gugaagcugcagaagcug

SEQ ID NO: 202610 - RNA, 24 nt, Human
uacucuacucuuugagcagcccug

SEQ ID NO: 202611 - RNA, 23 nt, Human
uagagugagaaccccuauaaagc

SEQ ID NO: 202612 - RNA, 18 nt, Human
uagcgggagaaaugacag

SEQ ID NO: 202613 - RNA, 18 nt, Human
uagggacccuaggggaca

SEQ ID NO: 202614 - RNA, 19 nt, Human
uagggacccuaggggacag

SEQ ID NO: 202615 - RNA, 21 nt, Human
uccccaagcuagagugagaac

SEQ ID NO: 202616 - RNA, 26 nt, Human
uccccaagcuagagugagaaccccua

SEQ ID NO: 202617 - RNA, 21 nt, Human
ucgccacuaccucacucucug

SEQ ID NO: 202618 - RNA, 26 nt, Human
ucugcagacagcccuugcucaccccc

SEQ ID NO: 202619 - RNA, 30 nt, Human
ucuguguguguguguguggguggguguguu

SEQ ID NO: 202620 - RNA, 26 nt, Human
ucuugauggggguuucugcagacagc

SEQ ID NO: 202621 - RNA, 28 nt, Human
ucuuugagcagcccugugggccugaucc

SEQ ID NO: 202622 - RNA, 23 nt, Human
ucuuugcccuucuagggacccua

SEQ ID NO: 202623 - RNA, 22 nt, Human
ugacuagccuuccucugccucu

SEQ ID NO: 202624 - RNA, 22 nt, Human
ugccaucucuaaauagagaaaa

SEQ ID NO: 202625 - RNA, 21 nt, Human
ugcccuucuagggacccuagg

SEQ ID NO: 202626 - RNA, 25 nt, Human
ugccuaagcuaacagcacuggaggc

SEQ ID NO: 202627 - RNA, 18 nt, Human
ugcucagaacuacagugc

SEQ ID NO: 202628 - RNA, 24 nt, Human
ugcuugggagagauggucuucagg

SEQ ID NO: 202629 - RNA, 23 nt, Human
ugggaagggacacuucauucagc

SEQ ID NO: 202630 - RNA, 18 nt, Human
ugggagagauggucuuca

SEQ ID NO: 202631 - RNA, 23 nt, Human
uggggagaagcccaagcagaggu

SEQ ID NO: 202632 - RNA, 24 nt, Human
uggggagaagcccaagcagagguu

SEQ ID NO: 202633 - RNA, 20 nt, Human
uggggagggaggaagucagg

SEQ ID NO: 202634 - RNA, 21 nt, Human
uggggagggaggaagucaggg

SEQ ID NO: 202635 - RNA, 19 nt, Human
uggguggguguguguuuuc

SEQ ID NO: 202636 - RNA, 20 nt, Human
uggguucugguggccaucug

SEQ ID NO: 202637 - RNA, 23 nt, Human
ugguggggcaaauuggaagaaug

SEQ ID NO: 202638 - RNA, 19 nt, Human
ugucaaaugaugcauuuua

SEQ ID NO: 202639 - RNA, 24 nt, Human
ugugaacaagugcuuuaugucaaa

SEQ ID NO: 202640 - RNA, 23 nt, Human
ugugugugugggugggugugugu

SEQ ID NO: 202641 - RNA, 23 nt, Human
ugugugugugugugggugggugu

SEQ ID NO: 202642 - RNA, 25 nt, Human
ugugugugugugugggugggugugu

SEQ ID NO: 202643 - RNA, 19 nt, Human
ugugugugugugugugggu

SEQ ID NO: 202644 - RNA, 20 nt, Human
ugugugugugugugugggug

SEQ ID NO: 202645 - RNA, 22 nt, Human
uuaaagagaagacuagaaacac

SEQ ID NO: 202646 - RNA, 20 nt, Human
uuaacuccccccacucauac

SEQ ID NO: 202647 - RNA, 19 nt, Human
uuaauagcacugucucuga

SEQ ID NO: 202648 - RNA, 20 nt, Human
uuccugguuuuggagaucug

SEQ ID NO: 202649 - RNA, 23 nt, Human
uuucucgccacuaccucacucuc

SEQ ID NO: 202650 - RNA, 26 nt, Human
aaacaugagacagaacagucccaaaa

SEQ ID NO: 202651 - RNA, 21 nt, Human
aacaugagacagaacaguccc

SEQ ID NO: 202652 - RNA, 23 nt, Human
aaccuacagagcuuucuacaacc

SEQ ID NO: 202653 - RNA, 24 nt, Human
aaccuccuaagcaggcagcagccu

SEQ ID NO: 202654 - RNA, 18 nt, Human
acaacugcuggcugcagc

SEQ ID NO: 202655 - RNA, 23 nt, Human
agagagaaccuacagagcuuucu

SEQ ID NO: 202656 - RNA, 21 nt, Human
agauaaacaugagacagaaca

SEQ ID NO: 202657 - RNA, 25 nt, Human
agcuggccugaagacuccuguagga

SEQ ID NO: 202658 - RNA, 18 nt, Human
auaaaguuuaugugaccu

SEQ ID NO: 202659 - RNA, 20 nt, Human
cagaacagucccaaaauccc

SEQ ID NO: 202660 - RNA, 24 nt, Human
cagagcuuucuacaaccuccuaag

SEQ ID NO: 202661 - RNA, 24 nt, Human
cagcaugcccagcccucagggagu

SEQ ID NO: 202662 - RNA, 22 nt, Human
ccaaaaucccucagcaugccca

SEQ ID NO: 202663 - RNA, 25 nt, Human
cccaaaaucccucagcaugcccugu

SEQ ID NO: 202664 - RNA, 24 nt, Human
cuccuaagcaggcagcagccucug

SEQ ID NO: 202665 - RNA, 19 nt, Human
cucuggggacacucuggga

SEQ ID NO: 202666 - RNA, 21 nt, Human
gaacagucccaaaaucccuca

SEQ ID NO: 202667 - RNA, 21 nt, Human
ggaacuccuuccauuugucag

SEQ ID NO: 202668 - RNA, 21 nt, Human
gggacacucugggaagauguc

SEQ ID NO: 202669 - RNA, 22 nt, Human
ucccaaaaucccucagcaugcc

SEQ ID NO: 202670 - RNA, 19 nt, Human
ucccucagcaugcccagcc

SEQ ID NO: 202671 - RNA, 21 nt, Human
ucuacaaccuccuaagcaggc

SEQ ID NO: 202672 - RNA, 20 nt, Human
ugagacagaacagucccaaa

SEQ ID NO: 202673 - RNA, 24 nt, Human
ugagacagaacagucccaaaaucc

SEQ ID NO: 202674 - RNA, 18 nt, Human
uugcaugucucuggggac

SEQ ID NO: 202675 - RNA, 24 nt, Human
agagacacuugggauuuagcccuc

SEQ ID NO: 202676 - RNA, 23 nt, Human
agaggcucacugggaaaccuugg

SEQ ID NO: 202677 - RNA, 21 nt, Human
aggaaccaaggcucacggagc

SEQ ID NO: 202678 - RNA, 21 nt, Human
aggcacuaucugcagaguccu

SEQ ID NO: 202679 - RNA, 27 nt, Human
aggccaggguccaggacacuuggggga

SEQ ID NO: 202680 - RNA, 21 nt, Human
aggcugcagugaagucuugca

SEQ ID NO: 202681 - RNA, 23 nt, Human
cagugaagucuugcaugagacuc

SEQ ID NO: 202682 - RNA, 23 nt, Human
ccccaacccaccuagucacuccu

SEQ ID NO: 202683 - RNA, 20 nt, Human
ccuggauugggcaucggcag

SEQ ID NO: 202684 - RNA, 20 nt, Human
ccugugaaaggcugcaguga

SEQ ID NO: 202685 - RNA, 20 nt, Human
ccugugcugcaguggcuggg

SEQ ID NO: 202686 - RNA, 23 nt, Human
cggagccuccugugcugcagugg

SEQ ID NO: 202687 - RNA, 19 nt, Human
cggcagugggcaugaagug

SEQ ID NO: 202688 - RNA, 21 nt, Human
cggcccagcgggcuggggcgg

SEQ ID NO: 202689 - RNA, 22 nt, Human
cggcccagcgggcuggggcggg

SEQ ID NO: 202690 - RNA, 18 nt, Human
cugcagugaagucuugca

SEQ ID NO: 202691 - RNA, 22 nt, Human
cuggggcggggcggggcggggg

SEQ ID NO: 202692 - RNA, 19 nt, Human
cuucccuguggcuuggggg

SEQ ID NO: 202693 - RNA, 24 nt, Human
gaaacaguggagaggcgcagaggc

SEQ ID NO: 202694 - RNA, 22 nt, Human
gaggaaccaaggcucacggagc

SEQ ID NO: 202695 - RNA, 21 nt, Human
gcagcacugaggcacuggugc

SEQ ID NO: 202696 - RNA, 25 nt, Human
gccaggguccaggacacuuggggga

SEQ ID NO: 202697 - RNA, 22 nt, Human
gcgggcuggggcggggcggggc

SEQ ID NO: 202698 - RNA, 18 nt, Human
ggcagugggcaugaagug

SEQ ID NO: 202699 - RNA, 23 nt, Human
ggcggcccagcgggcuggggcgg

SEQ ID NO: 202700 - RNA, 18 nt, Human
ggcggggcggggcggggg

SEQ ID NO: 202701 - RNA, 22 nt, Human
gggccgggccggggagcgggga

SEQ ID NO: 202702 - RNA, 19 nt, Human
gggcuggggcggggcgggg

SEQ ID NO: 202703 - RNA, 19 nt, Human
ggggcggggcggggcgggg

SEQ ID NO: 202704 - RNA, 18 nt, Human
gguacaccggccuggggc

SEQ ID NO: 202705 - RNA, 21 nt, Human
uaggccaggguccaggacacu

SEQ ID NO: 202706 - RNA, 21 nt, Human
uccugugcugcaguggcuggc

SEQ ID NO: 202707 - RNA, 19 nt, Human
ucggggaggaaccaaggcu

SEQ ID NO: 202708 - RNA, 20 nt, Human
ucuccaagcugcaggguaga

SEQ ID NO: 202709 - RNA, 24 nt, Human
uguggcaauugggaaguacaguac

SEQ ID NO: 202710 - RNA, 22 nt, Human
aaacagccuuucgucucucuga

SEQ ID NO: 202711 - RNA, 28 nt, Human
aaaggcguugggaggugggagaugauug

SEQ ID NO: 202712 - RNA, 20 nt, Human
aagcagguguggguucccac

SEQ ID NO: 202713 - RNA, 22 nt, Human
acaaagaagggcgcgggagaca

SEQ ID NO: 202714 - RNA, 24 nt, Human
acaaagaagggcgcgggagacagc

SEQ ID NO: 202715 - RNA, 19 nt, Human
accugcuucgccccgcccc

SEQ ID NO: 202716 - RNA, 28 nt, Human
acgcaaucucaaggauaaggggaacgcc

SEQ ID NO: 202717 - RNA, 20 nt, Human
agaggcuggggcucugggcc

SEQ ID NO: 202718 - RNA, 23 nt, Human
agccaauggaguucuccauaaaa

SEQ ID NO: 202719 - RNA, 22 nt, Human
agcugcuaccgccgccccaucc

SEQ ID NO: 202720 - RNA, 21 nt, Human
aggagcgauuauagugaccgc

SEQ ID NO: 202721 - RNA, 18 nt, Human
aggcaggacucuaaucug

SEQ ID NO: 202722 - RNA, 19 nt, Human
aggggaggcuuuacaagca

SEQ ID NO: 202723 - RNA, 27 nt, Human
auggaguucuccauaaaaggcccaaag

SEQ ID NO: 202724 - RNA, 22 nt, Human
caaagcgcuggcauuacaggcg

SEQ ID NO: 202725 - RNA, 18 nt, Human
caccccuuguugugucuc

SEQ ID NO: 202726 - RNA, 19 nt, Human
cacccuguucugagccaaa

SEQ ID NO: 202727 - RNA, 23 nt, Human
cacccuguucugagccaaaacag

SEQ ID NO: 202728 - RNA, 21 nt, Human
cacuguguugcucuggcuggu

SEQ ID NO: 202729 - RNA, 24 nt, Human
cacuguguugcucuggcuggucuc

SEQ ID NO: 202730 - RNA, 22 nt, Human
caggguuccuagcucauaacuc

SEQ ID NO: 202731 - RNA, 24 nt, Human
caugccucuaaucccagcacuuug

SEQ ID NO: 202732 - RNA, 19 nt, Human
ccaauggaguucuccauaa

SEQ ID NO: 202733 - RNA, 23 nt, Human
ccacagcugcuaccgccgcccca

SEQ ID NO: 202734 - RNA, 20 nt, Human
ccaggggacaaagaagggcg

SEQ ID NO: 202735 - RNA, 22 nt, Human
cccacagcugcuaccgccgccc

SEQ ID NO: 202736 - RNA, 23 nt, Human
cccacagcugcuaccgccgcccc

SEQ ID NO: 202737 - RNA, 23 nt, Human
cccacugcuuggaacaacaaacu

SEQ ID NO: 202738 - RNA, 22 nt, Human
ccccacccuguucugagccaaa

SEQ ID NO: 202739 - RNA, 21 nt, Human
ccccagggaccacacagaccc

SEQ ID NO: 202740 - RNA, 23 nt, Human
ccccagggaccacacagacccag

SEQ ID NO: 202741 - RNA, 27 nt, Human
cccccugggcagauuccccuggguaug

SEQ ID NO: 202742 - RNA, 21 nt, Human
ccccgccugcgggcccccacc

SEQ ID NO: 202743 - RNA, 18 nt, Human
cccgccccgccugcgggc

SEQ ID NO: 202744 - RNA, 18 nt, Human
ccgccgccccauccccag

SEQ ID NO: 202745 - RNA, 20 nt, Human
ccggggcuugagcgauccuc

SEQ ID NO: 202746 - RNA, 22 nt, Human
ccuccugccuccgccucccaaa

SEQ ID NO: 202747 - RNA, 24 nt, Human
ccuccugccuccgccucccaaagc

SEQ ID NO: 202748 - RNA, 19 nt, Human
ccugcuucgccccgccccg

SEQ ID NO: 202749 - RNA, 23 nt, Human
ccuggcccgcucuccccacccug

SEQ ID NO: 202750 - RNA, 23 nt, Human
ccuguccucuuuucagcugccca

SEQ ID NO: 202751 - RNA, 20 nt, Human
ccuucuccuguccucuuuuc

SEQ ID NO: 202752 - RNA, 21 nt, Human
cgccccgccugcgggccccca

SEQ ID NO: 202753 - RNA, 22 nt, Human
cgcuggcauuacaggcgacagc

SEQ ID NO: 202754 - RNA, 24 nt, Human
cucaugccucuaaucccagcacuu

SEQ ID NO: 202755 - RNA, 21 nt, Human
cuccugccuccgccucccaaa

SEQ ID NO: 202756 - RNA, 19 nt, Human
cuccugcucuggacccuuc

SEQ ID NO: 202757 - RNA, 26 nt, Human
cucuccccacccuguucugagccaaa

SEQ ID NO: 202758 - RNA, 21 nt, Human
cucuggcuggucuccaacucc

SEQ ID NO: 202759 - RNA, 21 nt, Human
cugaacguguggaggcugaca

SEQ ID NO: 202760 - RNA, 22 nt, Human
cugcacaaaggcccaaagaauc

SEQ ID NO: 202761 - RNA, 19 nt, Human
cuggguaugccucugugcc

SEQ ID NO: 202762 - RNA, 20 nt, Human
cuugagcgauccuccugccu

SEQ ID NO: 202763 - RNA, 20 nt, Human
gagaggcuggggcucugggc

SEQ ID NO: 202764 - RNA, 18 nt, Human
gagccaaaacagacauga

SEQ ID NO: 202765 - RNA, 21 nt, Human
gaggggaggcuuuacaagcag

SEQ ID NO: 202766 - RNA, 24 nt, Human
gaguucuccauaaaaggcccaaag

SEQ ID NO: 202767 - RNA, 24 nt, Human
gaucuaucuuaauuagccacccac

SEQ ID NO: 202768 - RNA, 19 nt, Human
gccaaaacagacaugagcc

SEQ ID NO: 202769 - RNA, 19 nt, Human
gccccauccccagggacca

SEQ ID NO: 202770 - RNA, 23 nt, Human
gccccauccccagggaccacaca

SEQ ID NO: 202771 - RNA, 19 nt, Human
gcccgcucuccccacccug

SEQ ID NO: 202772 - RNA, 22 nt, Human
gcugacagaaugugcccagagg

SEQ ID NO: 202773 - RNA, 22 nt, Human
gcugggcacgguggcucaugcc

SEQ ID NO: 202774 - RNA, 21 nt, Human
gcuuggaacaacaaacugucc

SEQ ID NO: 202775 - RNA, 24 nt, Human
gcuuugaggcugggcacgguggcu

SEQ ID NO: 202776 - RNA, 18 nt, Human
ggacaaagaagggcgcgg

SEQ ID NO: 202777 - RNA, 21 nt, Human
ggacccuuccagaccgcccuu

SEQ ID NO: 202778 - RNA, 24 nt, Human
ggaguucuccauaaaaggcccuuc

SEQ ID NO: 202779 - RNA, 23 nt, Human
ggcacgguggcucaugccucuaa

SEQ ID NO: 202780 - RNA, 21 nt, Human
ggcucaugccucuaaucccag

SEQ ID NO: 202781 - RNA, 23 nt, Human
ggcugggcacgguggcucaugcc

SEQ ID NO: 202782 - RNA, 23 nt, Human
gggcuugagcgauccuccugccu

SEQ ID NO: 202783 - RNA, 23 nt, Human
ggggcuugagcgauccuccugcc

SEQ ID NO: 202784 - RNA, 23 nt, Human
gguggcucaugccucuaauccca

SEQ ID NO: 202785 - RNA, 24 nt, Human
gguggcucaugccucuaaucccag

SEQ ID NO: 202786 - RNA, 19 nt, Human
guagagaugggggucucac

SEQ ID NO: 202787 - RNA, 23 nt, Human
guggaggcugacagaaugugccc

SEQ ID NO: 202788 - RNA, 18 nt, Human
guggggagaggcuggggc

SEQ ID NO: 202789 - RNA, 21 nt, Human
uaaaaggcccaaaggacaggg

SEQ ID NO: 202790 - RNA, 18 nt, Human
uagccacccacagcugcu

SEQ ID NO: 202791 - RNA, 25 nt, Human
uaugcuuugaggcugggcacggugg

SEQ ID NO: 202792 - RNA, 22 nt, Human
ucaugccucuaaucccagcacu

SEQ ID NO: 202793 - RNA, 24 nt, Human
ucccaaagcgcuggcauuacaggc

SEQ ID NO: 202794 - RNA, 20 nt, Human
ucccacgugggcacagaguu

SEQ ID NO: 202795 - RNA, 22 nt, Human
uccccagggaccacacagaccc

SEQ ID NO: 202796 - RNA, 20 nt, Human
ucccuggcccgcucucccca

SEQ ID NO: 202797 - RNA, 23 nt, Human
ucccuggcccgcucuccccaccc

SEQ ID NO: 202798 - RNA, 18 nt, Human
ucgccccgccccgccugc

SEQ ID NO: 202799 - RNA, 19 nt, Human
ucucacuguguugcucugg

SEQ ID NO: 202800 - RNA, 22 nt, Human
ucucccacgcaaucucaaggau

SEQ ID NO: 202801 - RNA, 24 nt, Human
ucugaccuucuccuguccucuuuu

SEQ ID NO: 202802 - RNA, 25 nt, Human
ucugaccuucuccuguccucuuuuc

SEQ ID NO: 202803 - RNA, 23 nt, Human
ucugagccaaaacagacaugagc

SEQ ID NO: 202804 - RNA, 23 nt, Human
ucuggacuggccuugcugggcuu

SEQ ID NO: 202805 - RNA, 23 nt, Human
ugaccuucuccuguccucuuuuc

SEQ ID NO: 202806 - RNA, 22 nt, Human
ugagacuguggggagaggcugg

SEQ ID NO: 202807 - RNA, 19 nt, Human
ugagccaaaacagacauga

SEQ ID NO: 202808 - RNA, 26 nt, Human
ugagcgauccuccugccuccgccucc

SEQ ID NO: 202809 - RNA, 27 nt, Human
ugagcgauccuccugccuccgccuccc

SEQ ID NO: 202810 - RNA, 24 nt, Human
ugaggcugggcacgguggcucaug

SEQ ID NO: 202811 - RNA, 24 nt, Human
ugccacaggagcgauuauagugac

SEQ ID NO: 202812 - RNA, 26 nt, Human
ugcccaaggcaggacucuaaucugau

SEQ ID NO: 202813 - RNA, 20 nt, Human
ugcccagagggugacguaac

SEQ ID NO: 202814 - RNA, 22 nt, Human
ugccucaggccucaaaaaacag

SEQ ID NO: 202815 - RNA, 23 nt, Human
ugccucaggccucaaaaaacagc

SEQ ID NO: 202816 - RNA, 25 nt, Human
ugccucaggccucaaaaaacagccu

SEQ ID NO: 202817 - RNA, 24 nt, Human
ugccuccgccucccaaagcgcugg

SEQ ID NO: 202818 - RNA, 24 nt, Human
ugccucuaaucccagcacuuuggg

SEQ ID NO: 202819 - RNA, 22 nt, Human
ugcuggucagagggaggggagg

SEQ ID NO: 202820 - RNA, 18 nt, Human
ugcuucagucauggacag

SEQ ID NO: 202821 - RNA, 19 nt, Human
uggacuggccuugcugggc

SEQ ID NO: 202822 - RNA, 19 nt, Human
uggcauuacaggcgacagc

SEQ ID NO: 202823 - RNA, 22 nt, Human
uggcauuacaggcgacagccau

SEQ ID NO: 202824 - RNA, 24 nt, Human
uggcauuacaggcgacagccaucg

SEQ ID NO: 202825 - RNA, 23 nt, Human
uggcccccugggcagauuccccu

SEQ ID NO: 202826 - RNA, 23 nt, Human
uggcccgcucuccccacccuguu

SEQ ID NO: 202827 - RNA, 21 nt, Human
uggcucaugccucuaauccca

SEQ ID NO: 202828 - RNA, 22 nt, Human
uggcucaugccucuaaucccag

SEQ ID NO: 202829 - RNA, 24 nt, Human
uggcucaugccucuaaucccagca

SEQ ID NO: 202830 - RNA, 22 nt, Human
ugggaggugggagaugauugua

SEQ ID NO: 202831 - RNA, 21 nt, Human
uggggugccucaggccucaaa

SEQ ID NO: 202832 - RNA, 18 nt, Human
uggucagagggaggggag

SEQ ID NO: 202833 - RNA, 21 nt, Human
ugguugcuggucagagggagg

SEQ ID NO: 202834 - RNA, 24 nt, Human
uguagagaugggggucucacugug

SEQ ID NO: 202835 - RNA, 25 nt, Human
uguagagaugggggucucacugugu

SEQ ID NO: 202836 - RNA, 21 nt, Human
ugucauguuggggugccucag

SEQ ID NO: 202837 - RNA, 18 nt, Human
uguccugguugcugguca

SEQ ID NO: 202838 - RNA, 19 nt, Human
uguuggggugccucaggcc

SEQ ID NO: 202839 - RNA, 24 nt, Human
uuguagagaugggggucucacugu

SEQ ID NO: 202840 - RNA, 25 nt, Human
uuguagagaugggggucucacugug

SEQ ID NO: 202841 - RNA, 25 nt, Human
uuuguagagaugggggucucacugu

SEQ ID NO: 202842 - RNA, 21 nt, Human
agcgggcaaaggcuggcugga

SEQ ID NO: 202843 - RNA, 25 nt, Human
agucaagaagggaggggagaaagca

SEQ ID NO: 202844 - RNA, 22 nt, Human
cgacugagcauagauuaagcau

SEQ ID NO: 202845 - RNA, 24 nt, Human
gacuugcugcaccuucaagugcuc

SEQ ID NO: 202846 - RNA, 22 nt, Human
ugaacagagagucaagaaggga

SEQ ID NO: 202847 - RNA, 23 nt, Human
ugagucuagcgggcaaaggcugg

SEQ ID NO: 202848 - RNA, 20 nt, Human
uggaggcagccugaguucug

SEQ ID NO: 202849 - RNA, 22 nt, Human
uucccaguuucccuuucauuuc

SEQ ID NO: 202850 - RNA, 22 nt, Human
uuuaaugagaaacccaguuucc

SEQ ID NO: 202851 - RNA, 22 nt, Human
aaaaauguguauucuaugccuc

SEQ ID NO: 202852 - RNA, 18 nt, Human
acuagguugaagugcugg

SEQ ID NO: 202853 - RNA, 23 nt, Human
agccagcaugggacuggugagga

SEQ ID NO: 202854 - RNA, 18 nt, Human
cagccagcaugggacugg

SEQ ID NO: 202855 - RNA, 18 nt, Human
cagcccuggccguggcuc

SEQ ID NO: 202856 - RNA, 24 nt, Human
cucugugaccccagcccccuccau

SEQ ID NO: 202857 - RNA, 22 nt, Human
gcacucaacagacuguuucagc

SEQ ID NO: 202858 - RNA, 25 nt, Human
uggucugcuccucugguccucuuca

SEQ ID NO: 202859 - RNA, 23 nt, Human
acacacacgaacaagcagacgcg

SEQ ID NO: 202860 - RNA, 18 nt, Human
agcauauuugggugaaga

SEQ ID NO: 202861 - RNA, 23 nt, Human
augaagauacagaucuaagaaca

SEQ ID NO: 202862 - RNA, 25 nt, Human
cagaauaaucaagcauauuugggug

SEQ ID NO: 202863 - RNA, 19 nt, Human
caugugcuagcuuauauau

SEQ ID NO: 202864 - RNA, 21 nt, Human
cuaaggaaacaggacuugggc

SEQ ID NO: 202865 - RNA, 21 nt, Human
cuuguaaaaauaaugauacau

SEQ ID NO: 202866 - RNA, 19 nt, Human
gaacagaaggauaaucaug

SEQ ID NO: 202867 - RNA, 28 nt, Human
gggcaaaauuuuuuauuaugaagauaca

SEQ ID NO: 202868 - RNA, 19 nt, Human
uagaaaaugaaaaucugca

SEQ ID NO: 202869 - RNA, 19 nt, Human
uaucaaugcuaucacaaau

SEQ ID NO: 202870 - RNA, 19 nt, Human
uauuugggugaagagagua

SEQ ID NO: 202871 - RNA, 20 nt, Human
ugaaaauuaguagaaaauga

SEQ ID NO: 202872 - RNA, 18 nt, Human
ugauacaugaaaauuagu

SEQ ID NO: 202873 - RNA, 20 nt, Human
ugcaacgacacacacacgaa

SEQ ID NO: 202874 - RNA, 21 nt, Human
uguaaaaauaaugauacauga

SEQ ID NO: 202875 - RNA, 20 nt, Human
uuaauaguguagugugcccu

SEQ ID NO: 202876 - RNA, 19 nt, Human
uuccccugcaucuuaguuc

SEQ ID NO: 202877 - RNA, 20 nt, Human
aggcagaguggugggggggu

SEQ ID NO: 202878 - RNA, 22 nt, Human
aguggugggggggugagcagag

SEQ ID NO: 202879 - RNA, 21 nt, Human
cacaagcaccccugcuuccca

SEQ ID NO: 202880 - RNA, 22 nt, Human
caccccugcuucccauauucag

SEQ ID NO: 202881 - RNA, 26 nt, Human
ccccugcuucccauauucagcauucc

SEQ ID NO: 202882 - RNA, 18 nt, Human
cugaaccauacacugcca

SEQ ID NO: 202883 - RNA, 21 nt, Human
cugaaccauacacugccaccc

SEQ ID NO: 202884 - RNA, 27 nt, Human
ggaggccaggcagaguggugggggggu

SEQ ID NO: 202885 - RNA, 19 nt, Human
ggcugugggugggugggaa

SEQ ID NO: 202886 - RNA, 24 nt, Human
uacacugccaccccuuuuguaucc

SEQ ID NO: 202887 - RNA, 19 nt, Human
aaccacauggucuuuccuc

SEQ ID NO: 202888 - RNA, 26 nt, Human
accuucuuguugggccaaugacugcg

SEQ ID NO: 202889 - RNA, 20 nt, Human
auuugguaacagcaaaccac

SEQ ID NO: 202890 - RNA, 19 nt, Human
caaguuaaaagagucccua

SEQ ID NO: 202891 - RNA, 21 nt, Human
caccaggaaacagaagaugcu

SEQ ID NO: 202892 - RNA, 20 nt, Human
ccaaaguagcaggaaucacu

SEQ ID NO: 202893 - RNA, 24 nt, Human
ccacaugcacaucucugucauccu

SEQ ID NO: 202894 - RNA, 26 nt, Human
cucaccaggaaacagaagaugcuggg

SEQ ID NO: 202895 - RNA, 19 nt, Human
gaguagaaauggagcucua

SEQ ID NO: 202896 - RNA, 22 nt, Human
gauucuagggugacccuagggu

SEQ ID NO: 202897 - RNA, 21 nt, Human
gcaggaccugagcuugugccc

SEQ ID NO: 202898 - RNA, 21 nt, Human
ggaauggaagauuaaaaagaa

SEQ ID NO: 202899 - RNA, 20 nt, Human
gggccaaugacugcgcaggu

SEQ ID NO: 202900 - RNA, 26 nt, Human
uaacaauacccacaugcacaucucug

SEQ ID NO: 202901 - RNA, 26 nt, Human
uaugauuaggacagaaaccggggucc

SEQ ID NO: 202902 - RNA, 18 nt, Human
ucuccuaacaauacccac

SEQ ID NO: 202903 - RNA, 20 nt, Human
ugaaggaauggaagauuaaa

SEQ ID NO: 202904 - RNA, 22 nt, Human
uggaagauuaaaaagaaaggaa

SEQ ID NO: 202905 - RNA, 23 nt, Human
uguucagaaucagcuacugagau

SEQ ID NO: 202906 - RNA, 21 nt, Human
uuguugggccaaugacugcgc

SEQ ID NO: 202907 - RNA, 33 nt, Human
uuugguaacagcaaaccacauggucuuuccuuu

SEQ ID NO: 202908 - RNA, 18 nt, Human
aaacacuugccaggaaac

SEQ ID NO: 202909 - RNA, 21 nt, Human
agagaggcagcaggaccuggg

SEQ ID NO: 202910 - RNA, 18 nt, Human
agaggcagcaggaccugg

SEQ ID NO: 202911 - RNA, 24 nt, Human
auggagcucuauuagucaaaagag

SEQ ID NO: 202912 - RNA, 19 nt, Human
caaguuaagagagaccaca

SEQ ID NO: 202913 - RNA, 21 nt, Human
cacuugccaggaaacagaaga

SEQ ID NO: 202914 - RNA, 18 nt, Human
cagaagaggguaaccgua

SEQ ID NO: 202915 - RNA, 22 nt, Human
cagaagaugcuggagagcagau

SEQ ID NO: 202916 - RNA, 21 nt, Human
caggaccugggcuugugcccc

SEQ ID NO: 202917 - RNA, 24 nt, Human
ccacaugcacaucucugucauccu

SEQ ID NO: 202918 - RNA, 23 nt, Human
ccacugagauuugguaacagcaa

SEQ ID NO: 202919 - RNA, 19 nt, Human
ccagaagaggguaaccgua

SEQ ID NO: 202920 - RNA, 24 nt, Human
cuugccaggaaacagaagaugcug

SEQ ID NO: 202921 - RNA, 20 nt, Human
gaaaagaaaugcuuucucau

SEQ ID NO: 202922 - RNA, 21 nt, Human
gcaggaccugggcuugugccc

SEQ ID NO: 202923 - RNA, 21 nt, Human
ggaaacagaagaugcuggaga

SEQ ID NO: 202924 - RNA, 22 nt, Human
ggaauaggagauuaaagagaaa

SEQ ID NO: 202925 - RNA, 19 nt, Human
ggcuugugccccuguugcc

SEQ ID NO: 202926 - RNA, 26 nt, Human
uaacaauacccacaugcacaucucug

SEQ ID NO: 202927 - RNA, 24 nt, Human
uagcaggaaacacuugccaggaaa

SEQ ID NO: 202928 - RNA, 23 nt, Human
ugaagaagacaguaaguugggca

SEQ ID NO: 202929 - RNA, 20 nt, Human
ugaaggaauaggagauuaaa

SEQ ID NO: 202930 - RNA, 18 nt, Human
ugacccagaagaggguaa

SEQ ID NO: 202931 - RNA, 20 nt, Human
ugccaggaaacagaagaugc

SEQ ID NO: 202932 - RNA, 22 nt, Human
uguaugaagccaggugggugga

SEQ ID NO: 202933 - RNA, 23 nt, Human
uguucagaaucagccacugagau

SEQ ID NO: 202934 - RNA, 21 nt, Human
uuaaaacauuuauugcucuuu

SEQ ID NO: 202935 - RNA, 24 nt, Human
uuaagcauuaaaacauuuauugcu

SEQ ID NO: 202936 - RNA, 22 nt, Human
aaccaccuacaagcacucucac

SEQ ID NO: 202937 - RNA, 20 nt, Human
aacuuguuaucucgccgucu

SEQ ID NO: 202938 - RNA, 20 nt, Human
aagcugcccuaagcaagccc

SEQ ID NO: 202939 - RNA, 23 nt, Human
aauaaaagaggcacaaaaaauau

SEQ ID NO: 202940 - RNA, 23 nt, Human
aauugcuuuucaaagaaauguau

SEQ ID NO: 202941 - RNA, 18 nt, Human
agaagggacaccggcauu

SEQ ID NO: 202942 - RNA, 19 nt, Human
agcugccagggccacugcc

SEQ ID NO: 202943 - RNA, 21 nt, Human
agcuuaaccaaccaccuacaa

SEQ ID NO: 202944 - RNA, 19 nt, Human
aggaguggccuuggcgagg

SEQ ID NO: 202945 - RNA, 18 nt, Human
aucaauucauguccaucu

SEQ ID NO: 202946 - RNA, 24 nt, Human
caaccaccuacaagcacucucagu

SEQ ID NO: 202947 - RNA, 20 nt, Human
caagaaaaugcugacuaaug

SEQ ID NO: 202948 - RNA, 18 nt, Human
caagaagcugcccuaagc

SEQ ID NO: 202949 - RNA, 18 nt, Human
caagacaaaguuaugugg

SEQ ID NO: 202950 - RNA, 19 nt, Human
cauccgaaauagcagguuc

SEQ ID NO: 202951 - RNA, 20 nt, Human
cauuuucaccaaaacccugg

SEQ ID NO: 202952 - RNA, 23 nt, Human
ccagaaagcgcgggaacgaaucc

SEQ ID NO: 202953 - RNA, 19 nt, Human
cccuaagcaagcccucuuc

SEQ ID NO: 202954 - RNA, 23 nt, Human
ccgaaauagcagguucaccaaaa

SEQ ID NO: 202955 - RNA, 18 nt, Human
ccgcuccgccagcugcca

SEQ ID NO: 202956 - RNA, 24 nt, Human
ccggcgccacgugcacacgggcug

SEQ ID NO: 202957 - RNA, 20 nt, Human
ccuacaagcacucucacuuc

SEQ ID NO: 202958 - RNA, 24 nt, Human
cgaaauagcagguucaccaaaaga

SEQ ID NO: 202959 - RNA, 21 nt, Human
cucuagucaaucacauuuugc

SEQ ID NO: 202960 - RNA, 23 nt, Human
gaaauagcagguucaccaaaagg

SEQ ID NO: 202961 - RNA, 23 nt, Human
gaacgaauccacgccgggggucg

SEQ ID NO: 202962 - RNA, 22 nt, Human
gcauuuucaccaaaacccuggu

SEQ ID NO: 202963 - RNA, 19 nt, Human
gccacugccgcgcucacuc

SEQ ID NO: 202964 - RNA, 21 nt, Human
gccgcugccgccuccgcuccg

SEQ ID NO: 202965 - RNA, 19 nt, Human
ggagagccgccaggcccaa

SEQ ID NO: 202966 - RNA, 26 nt, Human
ggcaaccgaaaggcagcgccggcgcc

SEQ ID NO: 202967 - RNA, 23 nt, Human
ggcauuuucaccaaaacccuggu

SEQ ID NO: 202968 - RNA, 18 nt, Human
ggcugggccgcuccgcca

SEQ ID NO: 202969 - RNA, 20 nt, Human
ggcugggccgcuccgccagc

SEQ ID NO: 202970 - RNA, 20 nt, Human
gggccgcuccgccagcugcc

SEQ ID NO: 202971 - RNA, 24 nt, Human
gggcugggccgcuccgccagcugc

SEQ ID NO: 202972 - RNA, 22 nt, Human
uaagcaagcccucuuccagcca

SEQ ID NO: 202973 - RNA, 23 nt, Human
uagaacuaaaaugcccaauguca

SEQ ID NO: 202974 - RNA, 23 nt, Human
ugcccuaagcaagcccucuucca

SEQ ID NO: 202975 - RNA, 19 nt, Human
uggcaaccgaaaggcagcg

SEQ ID NO: 202976 - RNA, 18 nt, Human
uggucugcugagcagcaa

SEQ ID NO: 202977 - RNA, 22 nt, Human
uucaaaaauaaaagaggcacaa

SEQ ID NO: 202978 - RNA, 24 nt, Human
aaaaaaaaacggaguuuaugugca

SEQ ID NO: 202979 - RNA, 24 nt, Human
aaaaaaacggaguuuaugugcagg

SEQ ID NO: 202980 - RNA, 23 nt, Human
aagugcugcguuugccgcccgcu

SEQ ID NO: 202981 - RNA, 23 nt, Human
acuuggguucgagucccaccccu

SEQ ID NO: 202982 - RNA, 22 nt, Human
agagaggggggcagugugucca

SEQ ID NO: 202983 - RNA, 20 nt, Human
agcugcagaguccgcagagg

SEQ ID NO: 202984 - RNA, 21 nt, Human
aggcaagagaggggggcagug

SEQ ID NO: 202985 - RNA, 18 nt, Human
aggggugggguggggugg

SEQ ID NO: 202986 - RNA, 20 nt, Human
agggguggggugggguggag

SEQ ID NO: 202987 - RNA, 26 nt, Human
agggguggggugggguggaguggggu

SEQ ID NO: 202988 - RNA, 24 nt, Human
caccacgcagaaacaaugcaccuc

SEQ ID NO: 202989 - RNA, 22 nt, Human
cacgagcguaggccuccaggga

SEQ ID NO: 202990 - RNA, 20 nt, Human
cagaaaaggcuggcuggaug

SEQ ID NO: 202991 - RNA, 19 nt, Human
ccaagaaggaugugcagcg

SEQ ID NO: 202992 - RNA, 26 nt, Human
ccacgcagaaacaaugcaccucgcgc

SEQ ID NO: 202993 - RNA, 20 nt, Human
cccucuauuuccuucuuugu

SEQ ID NO: 202994 - RNA, 22 nt, Human
cccugcgccggggccgcggagc

SEQ ID NO: 202995 - RNA, 19 nt, Human
ccgcuccgcccuacuccgc

SEQ ID NO: 202996 - RNA, 21 nt, Human
ccucuauuuccuucuuuguuc

SEQ ID NO: 202997 - RNA, 21 nt, Human
ccugcgccggggccgcggagc

SEQ ID NO: 202998 - RNA, 24 nt, Human
cgcccgugcccucccucucccugc

SEQ ID NO: 202999 - RNA, 18 nt, Human
cgccggggccgcggagcu

SEQ ID NO: 203000 - RNA, 20 nt, Human
cgcgaccuggugugggcugg

SEQ ID NO: 203001 - RNA, 19 nt, Human
cggaaagugcugcguuugc

SEQ ID NO: 203002 - RNA, 23 nt, Human
cggcggacugguuccaagccccu

SEQ ID NO: 203003 - RNA, 20 nt, Human
cgggguaguggagagaggcc

SEQ ID NO: 203004 - RNA, 20 nt, Human
cucugcgcucgggcccggcc

SEQ ID NO: 203005 - RNA, 19 nt, Human
cuucuuuguucuacaggag

SEQ ID NO: 203006 - RNA, 24 nt, Human
gacagcggccgaggcaccagcagg

SEQ ID NO: 203007 - RNA, 20 nt, Human
gaggcaagagaggggggcag

SEQ ID NO: 203008 - RNA, 24 nt, Human
gaggcaccagcaggcagaaaaggc

SEQ ID NO: 203009 - RNA, 18 nt, Human
gccgaggcaccagcaggc

SEQ ID NO: 203010 - RNA, 18 nt, Human
gccgcccgcuccgcccua

SEQ ID NO: 203011 - RNA, 21 nt, Human
gcgcagcgcgccgccagcucc

SEQ ID NO: 203012 - RNA, 19 nt, Human
gcgccaggaagccaagaag

SEQ ID NO: 203013 - RNA, 18 nt, Human
gcgcucgggcccggccgc

SEQ ID NO: 203014 - RNA, 27 nt, Human
gcggacugguuccaagccccuucagag

SEQ ID NO: 203015 - RNA, 23 nt, Human
gcggcguucagcucggccgaagc

SEQ ID NO: 203016 - RNA, 22 nt, Human
ggagagaggccauuuaguagug

SEQ ID NO: 203017 - RNA, 24 nt, Human
ggcccggccgcugcgggcucguca

SEQ ID NO: 203018 - RNA, 22 nt, Human
ggcgccaggaagccaagaagga

SEQ ID NO: 203019 - RNA, 22 nt, Human
ggggcggggcucggacagcggc

SEQ ID NO: 203020 - RNA, 21 nt, Human
gggggcuucgcucacccccga

SEQ ID NO: 203021 - RNA, 19 nt, Human
gggguggaguggggugggg

SEQ ID NO: 203022 - RNA, 25 nt, Human
ggguggggugagaugagugggagac

SEQ ID NO: 203023 - RNA, 18 nt, Human
gguaguggagagaggcca

SEQ ID NO: 203024 - RNA, 24 nt, Human
ucccucuauuuccuucuuuguucu

SEQ ID NO: 203025 - RNA, 20 nt, Human
ugagaugagugggagacuug

SEQ ID NO: 203026 - RNA, 18 nt, Human
ugcaagcccgcggggcgg

SEQ ID NO: 203027 - RNA, 20 nt, Human
uggaggggugggguggggug

SEQ ID NO: 203028 - RNA, 21 nt, Human
uggaguggagggguggggugg

SEQ ID NO: 203029 - RNA, 24 nt, Human
uggaguggaguggagggguggggu

SEQ ID NO: 203030 - RNA, 20 nt, Human
uggagugggguggggugggg

SEQ ID NO: 203031 - RNA, 25 nt, Human
ugggguggggugagaugagugggag

SEQ ID NO: 203032 - RNA, 21 nt, Human
uggggugggguggggugagau

SEQ ID NO: 203033 - RNA, 25 nt, Human
uggguucgagucccaccccucucgg

SEQ ID NO: 203034 - RNA, 18 nt, Human
ugugcagcggcggacugg

SEQ ID NO: 203035 - RNA, 19 nt, Human
ugugcagcggcggacuggu

SEQ ID NO: 203036 - RNA, 20 nt, Human
ugugcagcggcggacugguu

SEQ ID NO: 203037 - RNA, 21 nt, Human
uuggguucgagucccaccccu

SEQ ID NO: 203038 - RNA, 23 nt, Human
aaaaagaagaaauagucguaaga

SEQ ID NO: 203039 - RNA, 21 nt, Human
aaacacaggaaauugagaacu

SEQ ID NO: 203040 - RNA, 18 nt, Human
aaacggaacacuggaucc

SEQ ID NO: 203041 - RNA, 23 nt, Human
agaacugacaaacagaaauacua

SEQ ID NO: 203042 - RNA, 18 nt, Human
agcaaucuuggaaaggcc

SEQ ID NO: 203043 - RNA, 23 nt, Human
agucuugaagcuccaaaacaaaa

SEQ ID NO: 203044 - RNA, 24 nt, Human
caguacuucaccaaaaaauuucaa

SEQ ID NO: 203045 - RNA, 25 nt, Human
caucucugcauguagaaaccggaaa

SEQ ID NO: 203046 - RNA, 23 nt, Human
ccgcacagguucgcucugggaag

SEQ ID NO: 203047 - RNA, 19 nt, Human
cgccggugccugcagccgc

SEQ ID NO: 203048 - RNA, 20 nt, Human
cgcgccggugccugcagccg

SEQ ID NO: 203049 - RNA, 22 nt, Human
cgcgccggugccugcagccgca

SEQ ID NO: 203050 - RNA, 21 nt, Human
cggcucggcucugagauuggg

SEQ ID NO: 203051 - RNA, 20 nt, Human
cucggcucugagauuggggg

SEQ ID NO: 203052 - RNA, 23 nt, Human
cucugcauguagaaaccggaaaa

SEQ ID NO: 203053 - RNA, 21 nt, Human
cuggauccgcgagaagagcuc

SEQ ID NO: 203054 - RNA, 25 nt, Human
gacaacgggagucacucucgaaaaa

SEQ ID NO: 203055 - RNA, 24 nt, Human
gcucugagauugggggcuggaaac

SEQ ID NO: 203056 - RNA, 21 nt, Human
ggaacacuggauccgcgagaa

SEQ ID NO: 203057 - RNA, 25 nt, Human
guuaaguguauuaaaaagaagaaau

SEQ ID NO: 203058 - RNA, 20 nt, Human
uauaaauucaucucugcaug

SEQ ID NO: 203059 - RNA, 18 nt, Human
ucccugcucucugucggc

SEQ ID NO: 203060 - RNA, 26 nt, Human
ucgacgcgccggugccugcagccgca

SEQ ID NO: 203061 - RNA, 20 nt, Human
ucugagauugggggcuggaa

SEQ ID NO: 203062 - RNA, 19 nt, Human
ugaaguaaccaacuuaaaa

SEQ ID NO: 203063 - RNA, 18 nt, Human
ugagaacugacaaacaga

SEQ ID NO: 203064 - RNA, 21 nt, Human
ugggacaacgggagucacucu

SEQ ID NO: 203065 - RNA, 20 nt, Human
uguagaaaccggaaaaaaag

SEQ ID NO: 203066 - RNA, 20 nt, Human
uuaaaaaauggccugaguua

SEQ ID NO: 203067 - RNA, 23 nt, Human
uugaagcuccaaaacaaaaacag

SEQ ID NO: 203068 - RNA, 26 nt, Human
uuucaacauugcaaacacaggaaauu

SEQ ID NO: 203069 - RNA, 21 nt, Human
aaaaaaaaaaaaaaaaacaaa

SEQ ID NO: 203070 - RNA, 25 nt, Human
aaaaaaaaaaaaaaaaacaaacucg

SEQ ID NO: 203071 - RNA, 24 nt, Human
aaaaaaaaacaaacucguacagaa

SEQ ID NO: 203072 - RNA, 21 nt, Human
aaaaaaaacaaacucguacag

SEQ ID NO: 203073 - RNA, 20 nt, Human
aaaaaaacaaacucguacag

SEQ ID NO: 203074 - RNA, 21 nt, Human
aaaaaaacaaacucguacaga

SEQ ID NO: 203075 - RNA, 22 nt, Human
aaaaacauacauucccagccuu

SEQ ID NO: 203076 - RNA, 22 nt, Human
aaaacauacauucccagccuuu

SEQ ID NO: 203077 - RNA, 18 nt, Human
aaacauacauucccagcc

SEQ ID NO: 203078 - RNA, 21 nt, Human
aaacauacuaaagaacaaagg

SEQ ID NO: 203079 - RNA, 23 nt, Human
aaguccuugagucccaacagucc

SEQ ID NO: 203080 - RNA, 18 nt, Human
acuaaagaacaaaggccc

SEQ ID NO: 203081 - RNA, 19 nt, Human
agaagugaagcagcaaaga

SEQ ID NO: 203082 - RNA, 19 nt, Human
agacaaacauacuaaagaa

SEQ ID NO: 203083 - RNA, 21 nt, Human
agacaaacauacuaaagaaca

SEQ ID NO: 203084 - RNA, 25 nt, Human
auuaccaucagguuacaacuuaacu

SEQ ID NO: 203085 - RNA, 22 nt, Human
caaaaaaaaaaaaaaaaaaaaa

SEQ ID NO: 203086 - RNA, 19 nt, Human
cagcaaagagcugaagcag

SEQ ID NO: 203087 - RNA, 25 nt, Human
cagcagcaaaguccuugagucccaa

SEQ ID NO: 203088 - RNA, 21 nt, Human
caguaucaacauuaaaugcaa

SEQ ID NO: 203089 - RNA, 24 nt, Human
ccaagcaaaaaaaaaaaaaaaaaa

SEQ ID NO: 203090 - RNA, 22 nt, Human
ccuugagucccaacaguccacc

SEQ ID NO: 203091 - RNA, 20 nt, Human
cgaaacacccuuacaguauc

SEQ ID NO: 203092 - RNA, 19 nt, Human
cgccggugccugcagccgc

SEQ ID NO: 203093 - RNA, 18 nt, Human
cgcucuggaaagccuugg

SEQ ID NO: 203094 - RNA, 23 nt, Human
cugugggcuccgcucugagacug

SEQ ID NO: 203095 - RNA, 19 nt, Human
gaacgccggaaacucaaca

SEQ ID NO: 203096 - RNA, 23 nt, Human
ggaacgccggaaacucaacacgc

SEQ ID NO: 203097 - RNA, 27 nt, Human
gugaagcagcaaagagcugaagcagaa

SEQ ID NO: 203098 - RNA, 21 nt, Human
uaaaaacauacauucccagcc

SEQ ID NO: 203099 - RNA, 22 nt, Human
ucaaagacaaacauacuaaaga

SEQ ID NO: 203100 - RNA, 24 nt, Human
ucaacacgccggugccugcagccg

SEQ ID NO: 203101 - RNA, 26 nt, Human
ucaacacgccggugccugcagccgca

SEQ ID NO: 203102 - RNA, 21 nt, Human
uccaccucaaagacaaacaua

SEQ ID NO: 203103 - RNA, 22 nt, Human
uccuugagucccaacaguccac

SEQ ID NO: 203104 - RNA, 21 nt, Human
ucgccaagcaaaaaaaaaaaa

SEQ ID NO: 203105 - RNA, 25 nt, Human
ucgccaagcaaaaaaaaaaaaaaaa

SEQ ID NO: 203106 - RNA, 23 nt, Human
ucgguuguacuacaaaaauaaug

SEQ ID NO: 203107 - RNA, 20 nt, Human
ucugagacugggggcuggaa

SEQ ID NO: 203108 - RNA, 18 nt, Human
ugaagcagcaaagagcug

SEQ ID NO: 203109 - RNA, 21 nt, Human
ugaagccagcuaauuaccauc

SEQ ID NO: 203110 - RNA, 24 nt, Human
aaauaacagacauucaaauacauc

SEQ ID NO: 203111 - RNA, 20 nt, Human
acaaccgggguccccccacc

SEQ ID NO: 203112 - RNA, 24 nt, Human
acaggaugugagggagugugauag

SEQ ID NO: 203113 - RNA, 20 nt, Human
agggagugugauagguggug

SEQ ID NO: 203114 - RNA, 21 nt, Human
caaauaagcauccacacagga

SEQ ID NO: 203115 - RNA, 21 nt, Human
caaccgggguccccccacccc

SEQ ID NO: 203116 - RNA, 23 nt, Human
caaccgggguccccccacccccc

SEQ ID NO: 203117 - RNA, 21 nt, Human
cacaaccgggguccccccacc

SEQ ID NO: 203118 - RNA, 20 nt, Human
cacacaggaagaagaauguu

SEQ ID NO: 203119 - RNA, 23 nt, Human
caccccccaccccgucccucccu

SEQ ID NO: 203120 - RNA, 24 nt, Human
cagaauuuccaagggaugguaacu

SEQ ID NO: 203121 - RNA, 25 nt, Human
caguaaucuuuuuccaaacuggccc

SEQ ID NO: 203122 - RNA, 19 nt, Human
ccaccccgucccucccugc

SEQ ID NO: 203123 - RNA, 25 nt, Human
ccccaccccccaccccgucccuccc

SEQ ID NO: 203124 - RNA, 18 nt, Human
ccccaccccgucccuccc

SEQ ID NO: 203125 - RNA, 19 nt, Human
ccccaccccgucccucccu

SEQ ID NO: 203126 - RNA, 20 nt, Human
ccccaccccgucccucccug

SEQ ID NO: 203127 - RNA, 24 nt, Human
ccccaccccgucccucccugcaaa

SEQ ID NO: 203128 - RNA, 22 nt, Human
cccccaccccccaccccguccc

SEQ ID NO: 203129 - RNA, 18 nt, Human
cccccaccccgucccucc

SEQ ID NO: 203130 - RNA, 18 nt, Human
ccccccaccccccacccc

SEQ ID NO: 203131 - RNA, 22 nt, Human
cgccuucgcuucaguuuggaaa

SEQ ID NO: 203132 - RNA, 23 nt, Human
cugaguccauuccaaagucagaa

SEQ ID NO: 203133 - RNA, 19 nt, Human
gaaacguccagauuacgca

SEQ ID NO: 203134 - RNA, 23 nt, Human
gacaaauaagcauccacacagga

SEQ ID NO: 203135 - RNA, 20 nt, Human
gccuaguuuuccugagucca

SEQ ID NO: 203136 - RNA, 21 nt, Human
ggguccccccaccccccaccc

SEQ ID NO: 203137 - RNA, 18 nt, Human
uacauguagaggcauccu

SEQ ID NO: 203138 - RNA, 24 nt, Human
uagguggugcaugagacuccuucu

SEQ ID NO: 203139 - RNA, 20 nt, Human
uccaaagucagaaacaggau

SEQ ID NO: 203140 - RNA, 19 nt, Human
uccacacaggaagaagaau

SEQ ID NO: 203141 - RNA, 19 nt, Human
uccccccaccccccacccc

SEQ ID NO: 203142 - RNA, 18 nt, Human
ugagggagugugauaggu

SEQ ID NO: 203143 - RNA, 22 nt, Human
ugagggagugugauagguggug

SEQ ID NO: 203144 - RNA, 22 nt, Human
ugaguccauuccaaagucagaa

SEQ ID NO: 203145 - RNA, 20 nt, Human
ugcuucaguucuaaaaagaa

SEQ ID NO: 203146 - RNA, 19 nt, Human
uuaaagaggggccuaguuu

SEQ ID NO: 203147 - RNA, 20 nt, Human
aaagagagagagagaaaggc

SEQ ID NO: 203148 - RNA, 21 nt, Human
aagacuuccaacaauagaucu

SEQ ID NO: 203149 - RNA, 24 nt, Human
accucgaauaauguuuuuaaaaaa

SEQ ID NO: 203150 - RNA, 19 nt, Human
acuuuuauaauuaaacuaa

SEQ ID NO: 203151 - RNA, 24 nt, Human
agagagagagagaaaggcaaagag

SEQ ID NO: 203152 - RNA, 22 nt, Human
aggcgaaaggcacauggcggca

SEQ ID NO: 203153 - RNA, 24 nt, Human
caaaaaaaaagagagagagagaaa

SEQ ID NO: 203154 - RNA, 23 nt, Human
caaaaaguauaccuguccuuaac

SEQ ID NO: 203155 - RNA, 19 nt, Human
cacauggcggcaggcaaga

SEQ ID NO: 203156 - RNA, 18 nt, Human
gaacaggugugcaaacuu

SEQ ID NO: 203157 - RNA, 23 nt, Human
ggcacaaggacauuucaaagaaa

SEQ ID NO: 203158 - RNA, 24 nt, Human
uacagaacaggugugcaaacuuaa

SEQ ID NO: 203159 - RNA, 23 nt, Human
ucaaaaaugcucaagucagcaaa

SEQ ID NO: 203160 - RNA, 28 nt, Human
ucaaacaaaucuccaugcacgaacuaaa

SEQ ID NO: 203161 - RNA, 22 nt, Human
ucaaagaaacaaacaaaaaaaa

SEQ ID NO: 203162 - RNA, 23 nt, Human
ucaagucagcaaacacgcaaaau

SEQ ID NO: 203163 - RNA, 24 nt, Human
ucauuugcauauaccaaagacuuc

SEQ ID NO: 203164 - RNA, 24 nt, Human
ugcauuuaugcauuuguuugcaaa

SEQ ID NO: 203165 - RNA, 22 nt, Human
uucaaagaaacaaacaaaaaaa

SEQ ID NO: 203166 - RNA, 25 nt, Human
uugcaccucuccuuucauuugcaua

SEQ ID NO: 203167 - RNA, 20 nt, Human
uuuccaagcuucuacagaac

SEQ ID NO: 203168 - RNA, 18 nt, Human
uuuuuuuuuuuuuuuuug

SEQ ID NO: 203169 - RNA, 22 nt, Human
aaaaauuuuuuuuuuuuuaaga

SEQ ID NO: 203170 - RNA, 21 nt, Human
aaaauccccuaaaaacugacu

SEQ ID NO: 203171 - RNA, 19 nt, Human
aaaauuaacaaggauuuaa

SEQ ID NO: 203172 - RNA, 19 nt, Human
aaagcauaauuagagcucc

SEQ ID NO: 203173 - RNA, 19 nt, Human
aagaaaucuucaguauuca

SEQ ID NO: 203174 - RNA, 23 nt, Human
aagcagagagcaagcagaccaca

SEQ ID NO: 203175 - RNA, 21 nt, Human
aagcauaauuagagcuccugc

SEQ ID NO: 203176 - RNA, 18 nt, Human
aagcucaguaagacuaac

SEQ ID NO: 203177 - RNA, 24 nt, Human
acaaacgcuuaauucuaacuaugc

SEQ ID NO: 203178 - RNA, 21 nt, Human
acaccaaaaaaaaaaaaaaaa

SEQ ID NO: 203179 - RNA, 24 nt, Human
accccauccccacaccaggcaggg

SEQ ID NO: 203180 - RNA, 18 nt, Human
acccccaucccagcaccc

SEQ ID NO: 203181 - RNA, 19 nt, Human
acccccaucccagcaccca

SEQ ID NO: 203182 - RNA, 21 nt, Human
acccuuccccacacacacaca

SEQ ID NO: 203183 - RNA, 21 nt, Human
acuuucaggaagagccuccag

SEQ ID NO: 203184 - RNA, 23 nt, Human
agagagcaagcagaccacaucau

SEQ ID NO: 203185 - RNA, 19 nt, Human
agagagggaagagaacaca

SEQ ID NO: 203186 - RNA, 23 nt, Human
agagagggaagagaacacaggug

SEQ ID NO: 203187 - RNA, 24 nt, Human
agcacccacacccuuccccacaca

SEQ ID NO: 203188 - RNA, 23 nt, Human
aggaagagccuccagguuuaaag

SEQ ID NO: 203189 - RNA, 20 nt, Human
aggcacucuguuauacagaa

SEQ ID NO: 203190 - RNA, 21 nt, Human
agggaagagaacacaggugag

SEQ ID NO: 203191 - RNA, 24 nt, Human
augaaaaagauacaaugcacuuaa

SEQ ID NO: 203192 - RNA, 24 nt, Human
auuggccacacaguuaagaaugag

SEQ ID NO: 203193 - RNA, 22 nt, Human
caacauaaguauacuuuccccu

SEQ ID NO: 203194 - RNA, 27 nt, Human
cacacacacacacacaccaaaaaaaaa

SEQ ID NO: 203195 - RNA, 24 nt, Human
cacacccuuccccacacacacaca

SEQ ID NO: 203196 - RNA, 18 nt, Human
caccacacuucuuuaaca

SEQ ID NO: 203197 - RNA, 19 nt, Human
cacucucuguccuggccuc

SEQ ID NO: 203198 - RNA, 21 nt, Human
cacucuguuauacagaauauc

SEQ ID NO: 203199 - RNA, 20 nt, Human
cagagcacaccuuuguuccu

SEQ ID NO: 203200 - RNA, 19 nt, Human
cagaggaugugcuaagaac

SEQ ID NO: 203201 - RNA, 24 nt, Human
caggauacaaaucuuuacaccaaa

SEQ ID NO: 203202 - RNA, 23 nt, Human
caggccaggauacaaaucuuuac

SEQ ID NO: 203203 - RNA, 18 nt, Human
caucccagcacccacacc

SEQ ID NO: 203204 - RNA, 23 nt, Human
cauugcacuuuagagccuguaac

SEQ ID NO: 203205 - RNA, 24 nt, Human
cauugcacuuuagagccuguaaca

SEQ ID NO: 203206 - RNA, 22 nt, Human
ccaaaaaaaaaaaaaaaaaaaa

SEQ ID NO: 203207 - RNA, 23 nt, Human
ccaaaaaaaaaaaaaaaaaaaaa

SEQ ID NO: 203208 - RNA, 21 nt, Human
ccaacucuggccucaaacacu

SEQ ID NO: 203209 - RNA, 21 nt, Human
ccacacacacacacacacaca

SEQ ID NO: 203210 - RNA, 20 nt, Human
ccagcacccacacccuuccc

SEQ ID NO: 203211 - RNA, 22 nt, Human
cccaaaaagcagucagaggaau

SEQ ID NO: 203212 - RNA, 20 nt, Human
cccacacacacacacacaca

SEQ ID NO: 203213 - RNA, 22 nt, Human
cccacacacacacacacacaca

SEQ ID NO: 203214 - RNA, 25 nt, Human
cccacacacacacacacacacacca

SEQ ID NO: 203215 - RNA, 23 nt, Human
cccagcacccacacccuucccca

SEQ ID NO: 203216 - RNA, 24 nt, Human
ccccaaaaagcagucagaggaaug

SEQ ID NO: 203217 - RNA, 25 nt, Human
ccccacacacacacacacacacacc

SEQ ID NO: 203218 - RNA, 21 nt, Human
ccccggcggggcuagcgagug

SEQ ID NO: 203219 - RNA, 22 nt, Human
cccuaaaaacugacuaagaaau

SEQ ID NO: 203220 - RNA, 26 nt, Human
cccuaaaaacugacuaagaaaucuuc

SEQ ID NO: 203221 - RNA, 22 nt, Human
cccuccccgaaaauccccuaaa

SEQ ID NO: 203222 - RNA, 18 nt, Human
cccuuccuccuccuaagc

SEQ ID NO: 203223 - RNA, 23 nt, Human
cccuuccuccuccuaagcaauug

SEQ ID NO: 203224 - RNA, 19 nt, Human
ccgugccaugcuccagccc

SEQ ID NO: 203225 - RNA, 18 nt, Human
ccuaagcaauuguucucc

SEQ ID NO: 203226 - RNA, 21 nt, Human
ccuccuccuaagcaauuguuc

SEQ ID NO: 203227 - RNA, 20 nt, Human
ccugucaacacugccccaaa

SEQ ID NO: 203228 - RNA, 21 nt, Human
cgaaaauccccuaaaaacuga

SEQ ID NO: 203229 - RNA, 19 nt, Human
cgggcucgggcccgggucc

SEQ ID NO: 203230 - RNA, 19 nt, Human
cuccaugaaaauccaauug

SEQ ID NO: 203231 - RNA, 22 nt, Human
cuccauugcacuuuagagccug

SEQ ID NO: 203232 - RNA, 25 nt, Human
cucucuguccuggccuccaugaaaa

SEQ ID NO: 203233 - RNA, 21 nt, Human
cugaauaaacaggccaggaua

SEQ ID NO: 203234 - RNA, 24 nt, Human
cugccguguuaauccaugccgugc

SEQ ID NO: 203235 - RNA, 24 nt, Human
cuuaacacacaagugauugugaau

SEQ ID NO: 203236 - RNA, 20 nt, Human
gaaagcaggccucuugggcc

SEQ ID NO: 203237 - RNA, 22 nt, Human
gaacaucucccaccugaauaaa

SEQ ID NO: 203238 - RNA, 23 nt, Human
gaagaagcucagagcacaccuuu

SEQ ID NO: 203239 - RNA, 22 nt, Human
gacagauauuaacacuuaacac

SEQ ID NO: 203240 - RNA, 19 nt, Human
gcacccacacccuucccca

SEQ ID NO: 203241 - RNA, 21 nt, Human
gcagagagcaagcagaccaca

SEQ ID NO: 203242 - RNA, 27 nt, Human
gcccucacaaagagggggaccgguuuc

SEQ ID NO: 203243 - RNA, 26 nt, Human
gggagagagggaagagaacacaggug

SEQ ID NO: 203244 - RNA, 23 nt, Human
guauaccugacauuggccacaca

SEQ ID NO: 203245 - RNA, 18 nt, Human
uaaaggagugaagcauaa

SEQ ID NO: 203246 - RNA, 22 nt, Human
uaacacguacaaauuggcaggu

SEQ ID NO: 203247 - RNA, 26 nt, Human
uaaguauacuuuccccuuccuccucc

SEQ ID NO: 203248 - RNA, 23 nt, Human
uacaaagauucaaaacauuacca

SEQ ID NO: 203249 - RNA, 18 nt, Human
uacaaaucuuuacaccaa

SEQ ID NO: 203250 - RNA, 19 nt, Human
uaccauggcuauauccaac

SEQ ID NO: 203251 - RNA, 19 nt, Human
uagaacaaaguugacaacu

SEQ ID NO: 203252 - RNA, 20 nt, Human
uagacacaugguuaaacaua

SEQ ID NO: 203253 - RNA, 19 nt, Human
uagcgaguggaaagcaggc

SEQ ID NO: 203254 - RNA, 21 nt, Human
uauugggagagagggaagaga

SEQ ID NO: 203255 - RNA, 24 nt, Human
ucacuccugucaacacugccccag

SEQ ID NO: 203256 - RNA, 19 nt, Human
ucagcugcuuaacacguac

SEQ ID NO: 203257 - RNA, 18 nt, Human
ucaggaagagccuccagg

SEQ ID NO: 203258 - RNA, 26 nt, Human
uccaaaaugccucacuccugucaaca

SEQ ID NO: 203259 - RNA, 20 nt, Human
uccaguggguacugcaaccg

SEQ ID NO: 203260 - RNA, 18 nt, Human
uccauacauuaccuauuu

SEQ ID NO: 203261 - RNA, 21 nt, Human
uccaugcaugcuuacacacca

SEQ ID NO: 203262 - RNA, 20 nt, Human
ucccaagagaaguacauggc

SEQ ID NO: 203263 - RNA, 27 nt, Human
uccccacacacacacacacacacacca

SEQ ID NO: 203264 - RNA, 19 nt, Human
uccccacaccaggcaggga

SEQ ID NO: 203265 - RNA, 22 nt, Human
uccccacaccaggcagggagca

SEQ ID NO: 203266 - RNA, 25 nt, Human
uccccuccccgaaaauccccuaaaa

SEQ ID NO: 203267 - RNA, 21 nt, Human
ucuaacuaugcaagauagcau

SEQ ID NO: 203268 - RNA, 19 nt, Human
ucugccguguuaauccaug

SEQ ID NO: 203269 - RNA, 21 nt, Human
ucugggccaguuguaaagggu

SEQ ID NO: 203270 - RNA, 18 nt, Human
ugaagcaugacagguaga

SEQ ID NO: 203271 - RNA, 19 nt, Human
ugccucgaggccuccaugc

SEQ ID NO: 203272 - RNA, 21 nt, Human
ugcucaggccggcuccggcuc

SEQ ID NO: 203273 - RNA, 20 nt, Human
uggaacucuugaagcaugac

SEQ ID NO: 203274 - RNA, 20 nt, Human
uggaguuuccaaaaugccuc

SEQ ID NO: 203275 - RNA, 22 nt, Human
uggaguuuccaaaaugccucac

SEQ ID NO: 203276 - RNA, 19 nt, Human
uggauaacgcaaccuggau

SEQ ID NO: 203277 - RNA, 19 nt, Human
uggauagcuagagcuguag

SEQ ID NO: 203278 - RNA, 21 nt, Human
ugggguauucaugaacauacu

SEQ ID NO: 203279 - RNA, 22 nt, Human
uguacacaagccaucaauuacc

SEQ ID NO: 203280 - RNA, 19 nt, Human
uguggugccucgaggccuc

SEQ ID NO: 203281 - RNA, 22 nt, Human
uuaacacuuaacacacaaguga

SEQ ID NO: 203282 - RNA, 22 nt, Human
uucacccccaucccagcaccca

SEQ ID NO: 203283 - RNA, 21 nt, Human
uugguauaccugacauuggcc

SEQ ID NO: 203284 - RNA, 27 nt, Human
uuuaaaauagcuacuggcuucacagca

SEQ ID NO: 203285 - RNA, 22 nt, Human
uuuagaccuugaugcuuggggu

SEQ ID NO: 203286 - RNA, 18 nt, Human
aaaaaaaaaaaaucccug

SEQ ID NO: 203287 - RNA, 23 nt, Human
aaagugcuaggauuacaauauug

SEQ ID NO: 203288 - RNA, 24 nt, Human
aaagugcuaggauuacaauauugg

SEQ ID NO: 203289 - RNA, 25 nt, Human
aaagugcuaggauuacaauauugga

SEQ ID NO: 203290 - RNA, 20 nt, Human
aacaaaaguuccugagucca

SEQ ID NO: 203291 - RNA, 22 nt, Human
aaggcgccacgaaccaggcgaa

SEQ ID NO: 203292 - RNA, 21 nt, Human
aagggcaggucuagaaauaca

SEQ ID NO: 203293 - RNA, 22 nt, Human
aaugaaaagcaguaaacagccc

SEQ ID NO: 203294 - RNA, 23 nt, Human
acaccagaugcacaugacccagu

SEQ ID NO: 203295 - RNA, 19 nt, Human
acaggccgcggcgcuuccc

SEQ ID NO: 203296 - RNA, 23 nt, Human
acauccuaaaguuacaaaugaaa

SEQ ID NO: 203297 - RNA, 23 nt, Human
accaaauacucccuccccucacc

SEQ ID NO: 203298 - RNA, 23 nt, Human
accacgcccagcuaauuuuugua

SEQ ID NO: 203299 - RNA, 25 nt, Human
acccgccuuggccucccaaagugcu

SEQ ID NO: 203300 - RNA, 24 nt, Human
acccuauugccccaggguacacag

SEQ ID NO: 203301 - RNA, 24 nt, Human
accuugugauccacccgccuuggc

SEQ ID NO: 203302 - RNA, 19 nt, Human
acucccuccccucacccca

SEQ ID NO: 203303 - RNA, 19 nt, Human
agaguuacagacuaggugg

SEQ ID NO: 203304 - RNA, 23 nt, Human
agaguuugguguugggauccagu

SEQ ID NO: 203305 - RNA, 24 nt, Human
agcaggcaguccagccacaggccg

SEQ ID NO: 203306 - RNA, 24 nt, Human
agccgagcauggugguaacaagcc

SEQ ID NO: 203307 - RNA, 25 nt, Human
agccuguggucucaauuagcuggga

SEQ ID NO: 203308 - RNA, 22 nt, Human
aggaggguuaaaaaaaaaaaaa

SEQ ID NO: 203309 - RNA, 19 nt, Human
aggcggcaggggcccgggg

SEQ ID NO: 203310 - RNA, 18 nt, Human
agguggaaggaucacuug

SEQ ID NO: 203311 - RNA, 23 nt, Human
agguggaaggaucacuugggccc

SEQ ID NO: 203312 - RNA, 20 nt, Human
aguacaguggugugaucucg

SEQ ID NO: 203313 - RNA, 24 nt, Human
aguacaguggugugaucucggcuc

SEQ ID NO: 203314 - RNA, 20 nt, Human
agugauucuccugccucagc

SEQ ID NO: 203315 - RNA, 21 nt, Human
aguuugguguugggauccagu

SEQ ID NO: 203316 - RNA, 27 nt, Human
auaccaaauacucccuccccucacccc

SEQ ID NO: 203317 - RNA, 19 nt, Human
auccacccgccuuggccuc

SEQ ID NO: 203318 - RNA, 25 nt, Human
auggaguuucaccauguuggcaaag

SEQ ID NO: 203319 - RNA, 18 nt, Human
auucaguaacagcuccuc

SEQ ID NO: 203320 - RNA, 18 nt, Human
auucuccugccucagccu

SEQ ID NO: 203321 - RNA, 21 nt, Human
auucuucuucucccccccacc

SEQ ID NO: 203322 - RNA, 23 nt, Human
caaagugcuaggauuacaauauu

SEQ ID NO: 203323 - RNA, 22 nt, Human
caacauaccaaauacucccucc

SEQ ID NO: 203324 - RNA, 20 nt, Human
caaccucugccucccggguu

SEQ ID NO: 203325 - RNA, 21 nt, Human
caaguauguucaagaaaaccc

SEQ ID NO: 203326 - RNA, 24 nt, Human
cacagcuaggguucacaauauacc

SEQ ID NO: 203327 - RNA, 22 nt, Human
caccauccaagaucccacccca

SEQ ID NO: 203328 - RNA, 24 nt, Human
caccauguuggcaaagauggucuc

SEQ ID NO: 203329 - RNA, 23 nt, Human
cacccgccuuggccucccaaagu

SEQ ID NO: 203330 - RNA, 24 nt, Human
cacccgccuuggccucccaaagug

SEQ ID NO: 203331 - RNA, 22 nt, Human
cacgaaccaggcgaagggcagg

SEQ ID NO: 203332 - RNA, 25 nt, Human
cacgguagugagagccuuugaggua

SEQ ID NO: 203333 - RNA, 22 nt, Human
cacuaccacgcccagcuaauuu

SEQ ID NO: 203334 - RNA, 21 nt, Human
cacugcaaccucugccucccg

SEQ ID NO: 203335 - RNA, 23 nt, Human
cacugcaaccucugccucccggg

SEQ ID NO: 203336 - RNA, 18 nt, Human
cagaaagaguuacagacu

SEQ ID NO: 203337 - RNA, 22 nt, Human
caggaggguuaaaaaaaaaaaa

SEQ ID NO: 203338 - RNA, 24 nt, Human
caguagagauggaguuucaccaug

SEQ ID NO: 203339 - RNA, 26 nt, Human
caguagagauggaguuucaccauguu

SEQ ID NO: 203340 - RNA, 20 nt, Human
cagugcagcugaggccuagg

SEQ ID NO: 203341 - RNA, 23 nt, Human
cauaccaaauacucccuccccuc

SEQ ID NO: 203342 - RNA, 23 nt, Human
cauugccuuuaacaacccauuca

SEQ ID NO: 203343 - RNA, 20 nt, Human
ccaaagugcuaggauuacaa

SEQ ID NO: 203344 - RNA, 23 nt, Human
ccaaagugcuaggauuacaauau

SEQ ID NO: 203345 - RNA, 18 nt, Human
ccaagcagcuauaaaagc

SEQ ID NO: 203346 - RNA, 23 nt, Human
ccaauaggucaaucugucugugc

SEQ ID NO: 203347 - RNA, 26 nt, Human
ccacccaaagacaugugagcaacugc

SEQ ID NO: 203348 - RNA, 18 nt, Human
ccaguguaaauaacaaac

SEQ ID NO: 203349 - RNA, 19 nt, Human
ccaguugggcagcagcagg

SEQ ID NO: 203350 - RNA, 18 nt, Human
ccauccaagaucccaccc

SEQ ID NO: 203351 - RNA, 23 nt, Human
cccggguucgagugauucuccug

SEQ ID NO: 203352 - RNA, 20 nt, Human
cccuccccucaccccacaca

SEQ ID NO: 203353 - RNA, 22 nt, Human
ccuccccucaccccacacacga

SEQ ID NO: 203354 - RNA, 24 nt, Human
ccucccggguucgagugauucucc

SEQ ID NO: 203355 - RNA, 22 nt, Human
ccucucacacucgcgaaacacc

SEQ ID NO: 203356 - RNA, 20 nt, Human
cgagugauucuccugccuca

SEQ ID NO: 203357 - RNA, 22 nt, Human
cgccaggcuggagugccgggcu

SEQ ID NO: 203358 - RNA, 19 nt, Human
cuaaaauaaguaauugauc

SEQ ID NO: 203359 - RNA, 24 nt, Human
cucacugcaaccucugccucccgg

SEQ ID NO: 203360 - RNA, 19 nt, Human
cucagagaauccaagcagc

SEQ ID NO: 203361 - RNA, 19 nt, Human
cucccggguucgagugauu

SEQ ID NO: 203362 - RNA, 18 nt, Human
cucccuccccucacccca

SEQ ID NO: 203363 - RNA, 21 nt, Human
cuccugccucagccuucagcu

SEQ ID NO: 203364 - RNA, 24 nt, Human
cucuugaccuugugauccacccgc

SEQ ID NO: 203365 - RNA, 21 nt, Human
cucuugucgccaggcuggagu

SEQ ID NO: 203366 - RNA, 24 nt, Human
cugcaaccucugccucccggguuc

SEQ ID NO: 203367 - RNA, 25 nt, Human
cuggaguacaguggugugaucucgg

SEQ ID NO: 203368 - RNA, 30 nt, Human
cuggagugccgggcuggaguacaguggugu

SEQ ID NO: 203369 - RNA, 20 nt, Human
gaaaagcaguaaacagccgc

SEQ ID NO: 203370 - RNA, 20 nt, Human
gaccuugugauccacccgcc

SEQ ID NO: 203371 - RNA, 21 nt, Human
gaccuugugauccacccgccu

SEQ ID NO: 203372 - RNA, 21 nt, Human
gaccuugugauccacccgccu

SEQ ID NO: 203373 - RNA, 24 nt, Human
gaccuugugauccacccgccuugg

SEQ ID NO: 203374 - RNA, 19 nt, Human
gagcauggugguaacaagc

SEQ ID NO: 203375 - RNA, 21 nt, Human
gagucucacucuugucgccag

SEQ ID NO: 203376 - RNA, 19 nt, Human
gauccaguucuacuagccc

SEQ ID NO: 203377 - RNA, 19 nt, Human
gauucuccugccucagccu

SEQ ID NO: 203378 - RNA, 22 nt, Human
gcaaccucugccucccggguuc

SEQ ID NO: 203379 - RNA, 18 nt, Human
gcagcagcaggcagucca

SEQ ID NO: 203380 - RNA, 23 nt, Human
gccaggcuggagugccgggcugg

SEQ ID NO: 203381 - RNA, 22 nt, Human
gcccagcuaauuuuuguauuuu

SEQ ID NO: 203382 - RNA, 24 nt, Human
gcccuaguugcuaacuaccauuua

SEQ ID NO: 203383 - RNA, 19 nt, Human
gccguagcacaggagcaca

SEQ ID NO: 203384 - RNA, 18 nt, Human
gcgaagggcaggucuaga

SEQ ID NO: 203385 - RNA, 18 nt, Human
ggaguuucaccauguugg

SEQ ID NO: 203386 - RNA, 19 nt, Human
ggaguuucaccauguuggc

SEQ ID NO: 203387 - RNA, 22 nt, Human
ggcuggaguacaguggugugau

SEQ ID NO: 203388 - RNA, 22 nt, Human
gggcacugugaaaugccccuug

SEQ ID NO: 203389 - RNA, 25 nt, Human
gggcagugcagcugaggccgggccc

SEQ ID NO: 203390 - RNA, 18 nt, Human
gguguugggauccaguuc

SEQ ID NO: 203391 - RNA, 20 nt, Human
guccacgguagugagagccc

SEQ ID NO: 203392 - RNA, 20 nt, Human
gugaacacacacccuaaccc

SEQ ID NO: 203393 - RNA, 24 nt, Human
gugauccacccgccuuggccuccc

SEQ ID NO: 203394 - RNA, 21 nt, Human
gugauucuccugccucagccu

SEQ ID NO: 203395 - RNA, 18 nt, Human
uaaaaaaagccaccagaa

SEQ ID NO: 203396 - RNA, 24 nt, Human
uaaaaaaagccaccagaaaggcaa

SEQ ID NO: 203397 - RNA, 21 nt, Human
uaaaauaccuauccuugggca

SEQ ID NO: 203398 - RNA, 19 nt, Human
uaacuucucuccccuuuuc

SEQ ID NO: 203399 - RNA, 24 nt, Human
uaauuuuuguauuuucaguagaga

SEQ ID NO: 203400 - RNA, 23 nt, Human
uacaauauuacagcacuagcaga

SEQ ID NO: 203401 - RNA, 20 nt, Human
uacagcacuagcagaucagu

SEQ ID NO: 203402 - RNA, 22 nt, Human
uacaguggugugaucucggcuc

SEQ ID NO: 203403 - RNA, 23 nt, Human
uagaaaaaacuuccuacaccaga

SEQ ID NO: 203404 - RNA, 20 nt, Human
uagaaguguuuccuuauccc

SEQ ID NO: 203405 - RNA, 22 nt, Human
uagagauggaguuucaccaugu

SEQ ID NO: 203406 - RNA, 20 nt, Human
ucaccauccaagaucccacc

SEQ ID NO: 203407 - RNA, 23 nt, Human
ucacugcaaccucugccucccgg

SEQ ID NO: 203408 - RNA, 24 nt, Human
ucacugcaaccucugccucccggg

SEQ ID NO: 203409 - RNA, 18 nt, Human
ucaguagagauggaguuu

SEQ ID NO: 203410 - RNA, 24 nt, Human
ucaguagagauggaguuucaccau

SEQ ID NO: 203411 - RNA, 21 nt, Human
ucauaccauuuaccuggacuc

SEQ ID NO: 203412 - RNA, 18 nt, Human
ucccaaagugcuaggauu

SEQ ID NO: 203413 - RNA, 21 nt, Human
ucccggguucgagugauucuc

SEQ ID NO: 203414 - RNA, 24 nt, Human
ucccggguucgagugauucuccug

SEQ ID NO: 203415 - RNA, 25 nt, Human
ucucaauuagcugggagacugaggu

SEQ ID NO: 203416 - RNA, 19 nt, Human
ucucacaaacauuagacca

SEQ ID NO: 203417 - RNA, 20 nt, Human
ucucacacucgcgaaacacc

SEQ ID NO: 203418 - RNA, 23 nt, Human
ucucacucuugucgccaggcugg

SEQ ID NO: 203419 - RNA, 24 nt, Human
ucucacucuugucgccaggcugga

SEQ ID NO: 203420 - RNA, 24 nt, Human
ugaaaagcaguaaacagccgcuua

SEQ ID NO: 203421 - RNA, 24 nt, Human
ugaaggugaacacacacccuaacc

SEQ ID NO: 203422 - RNA, 18 nt, Human
ugaccuugugauccaccc

SEQ ID NO: 203423 - RNA, 21 nt, Human
ugagagccuuugagguaaggg

SEQ ID NO: 203424 - RNA, 24 nt, Human
ugagguggaaggaucacuugggcc

SEQ ID NO: 203425 - RNA, 23 nt, Human
ugagguggagucucacucuuguc

SEQ ID NO: 203426 - RNA, 20 nt, Human
ugccccaggguacacagcac

SEQ ID NO: 203427 - RNA, 23 nt, Human
ugccgggcuggaguacaguggug

SEQ ID NO: 203428 - RNA, 19 nt, Human
uggaguacaguggugugau

SEQ ID NO: 203429 - RNA, 23 nt, Human
uggaguacaguggugugaucucg

SEQ ID NO: 203430 - RNA, 24 nt, Human
uggaguacaguggugugaucucgg

SEQ ID NO: 203431 - RNA, 19 nt, Human
uggaguuucaccauguugg

SEQ ID NO: 203432 - RNA, 21 nt, Human
uggauucuuuuuuuuuuuuuu

SEQ ID NO: 203433 - RNA, 24 nt, Human
ugggagacugagguggaaggauca

SEQ ID NO: 203434 - RNA, 23 nt, Human
ugggauccaguucuacuagcccu

SEQ ID NO: 203435 - RNA, 25 nt, Human
uggugguaacaagccuguggucuca

SEQ ID NO: 203436 - RNA, 22 nt, Human
uucaaugucaccauccaagauc

SEQ ID NO: 203437 - RNA, 18 nt, Human
uucgagugauucuccugc

SEQ ID NO: 203438 - RNA, 23 nt, Human
uucgagugauucuccugccucag

SEQ ID NO: 203439 - RNA, 24 nt, Human
uucgagugauucuccugccucagc

SEQ ID NO: 203440 - RNA, 21 nt, Human
uucuuuuuuuuuuuuuugagg

SEQ ID NO: 203441 - RNA, 18 nt, Human
uuggccucccaaagugcu

SEQ ID NO: 203442 - RNA, 19 nt, Human
uuuagaaagauaaggggaa

SEQ ID NO: 203443 - RNA, 19 nt, Human
uuucaccauguuggcaaag

SEQ ID NO: 203444 - RNA, 22 nt, Human
uuucucagagaauccaagcagc

SEQ ID NO: 203445 - RNA, 23 nt, Human
uuugaaggugaacacacacccua

SEQ ID NO: 203446 - RNA, 24 nt, Human
uuuucaguagagauggaguuucac

SEQ ID NO: 203447 - RNA, 24 nt, Human
uuuugaaggugaacacacacccua

SEQ ID NO: 203448 - RNA, 20 nt, Human
uuuuuguauuuucaguagag

SEQ ID NO: 203449 - RNA, 23 nt, Human
uuuuuguauuuucaguagagaug

SEQ ID NO: 203450 - RNA, 19 nt, Human
uuuuuuuuuuuugaagucu

SEQ ID NO: 203451 - RNA, 26 nt, Human
uuuuuuuuuuuugagguggagucuca

SEQ ID NO: 203452 - RNA, 22 nt, Human
uuuuuuuuuuuuuugaggugga

SEQ ID NO: 203453 - RNA, 20 nt, Human
uuuuuuuuuuuuuuuuuugg

SEQ ID NO: 203454 - RNA, 26 nt, Human
agaagacagucuagaaggcccauagc

SEQ ID NO: 203455 - RNA, 21 nt, Human
agaaggcccauagcauagccc

SEQ ID NO: 203456 - RNA, 25 nt, Human
caaaauauaggugaaagcaauguua

SEQ ID NO: 203457 - RNA, 20 nt, Human
caguuauccugggaagaaag

SEQ ID NO: 203458 - RNA, 21 nt, Human
cggccgccugcacagcagccc

SEQ ID NO: 203459 - RNA, 28 nt, Human
cuauauuuuacauaacaaaauucauaca

SEQ ID NO: 203460 - RNA, 23 nt, Human
cugacagucacagcugacuuauc

SEQ ID NO: 203461 - RNA, 24 nt, Human
gacuucaguuauccugggaagaaa

SEQ ID NO: 203462 - RNA, 24 nt, Human
gaggaugaaccgcccuccccgcaa

SEQ ID NO: 203463 - RNA, 20 nt, Human
gcaauguuaaagugccacac

SEQ ID NO: 203464 - RNA, 22 nt, Human
gcagaagaggaugaaccgcccu

SEQ ID NO: 203465 - RNA, 20 nt, Human
gcccauagcauagcccugac

SEQ ID NO: 203466 - RNA, 26 nt, Human
gccugcacagcagccccauaggccac

SEQ ID NO: 203467 - RNA, 22 nt, Human
uagaaggcccauagcauagccc

SEQ ID NO: 203468 - RNA, 21 nt, Human
uccccgcaaaaagucaaaaga

SEQ ID NO: 203469 - RNA, 21 nt, Human
ucuagcuuuggagggaaaguu

SEQ ID NO: 203470 - RNA, 21 nt, Human
ugaagcagaagaggaugaacc

SEQ ID NO: 203471 - RNA, 22 nt, Human
ugaagcagaagaggaugaaccg

SEQ ID NO: 203472 - RNA, 21 nt, Human
ugcaaguaacaaaguacacaa

SEQ ID NO: 203473 - RNA, 23 nt, Human
ugggaagaaaguucuagcuuugg

SEQ ID NO: 203474 - RNA, 19 nt, Human
uuguucagcuccuugccgu

SEQ ID NO: 203475 - RNA, 23 nt, Human
aaaaaaaaaaaaaaaaacucgag

SEQ ID NO: 203476 - RNA, 26 nt, Human
acaaaaaaaaaaaaaaaaacucgaga

SEQ ID NO: 203477 - RNA, 18 nt, Human
agcaccccuagcaugaac

SEQ ID NO: 203478 - RNA, 24 nt, Human
aggggcugcuccagugggcagggg

SEQ ID NO: 203479 - RNA, 22 nt, Human
auccuccccaggaccccugucc

SEQ ID NO: 203480 - RNA, 18 nt, Human
caaaaagagacugaucau

SEQ ID NO: 203481 - RNA, 22 nt, Human
caaaaagagacugaucauccag

SEQ ID NO: 203482 - RNA, 24 nt, Human
caaaaagagacugaucauccaggc

SEQ ID NO: 203483 - RNA, 21 nt, Human
caauaauaaagacauuuccua

SEQ ID NO: 203484 - RNA, 21 nt, Human
caggcagauccucuggacacg

SEQ ID NO: 203485 - RNA, 20 nt, Human
cagugggcagggguagcuag

SEQ ID NO: 203486 - RNA, 21 nt, Human
cagugggcagggguagcuagc

SEQ ID NO: 203487 - RNA, 23 nt, Human
cauauucaaguauugagaaugcc

SEQ ID NO: 203488 - RNA, 23 nt, Human
caugaacuugugggauggugggg

SEQ ID NO: 203489 - RNA, 23 nt, Human
ccaaaaagagacugaucauccag

SEQ ID NO: 203490 - RNA, 27 nt, Human
cccaggacucuggcuucucuccucaga

SEQ ID NO: 203491 - RNA, 18 nt, Human
ccccaggaccccugucca

SEQ ID NO: 203492 - RNA, 28 nt, Human
ccuaccugcacaaaaaaaaaaaaaaaaa

SEQ ID NO: 203493 - RNA, 20 nt, Human
ccucagccucauccucccca

SEQ ID NO: 203494 - RNA, 22 nt, Human
ccugcacaaaaaaaaaaaaaaa

SEQ ID NO: 203495 - RNA, 22 nt, Human
ccugcacaaaaaaaaaaaaaaa

SEQ ID NO: 203496 - RNA, 19 nt, Human
cucagccucauccucccca

SEQ ID NO: 203497 - RNA, 20 nt, Human
cuccccaggaccccugucca

SEQ ID NO: 203498 - RNA, 20 nt, Human
cuccucagacuucuauuuuu

SEQ ID NO: 203499 - RNA, 26 nt, Human
cucuccucagacuucuauuuuuuaaa

SEQ ID NO: 203500 - RNA, 19 nt, Human
cugcacaaaaaaaaaaaaa

SEQ ID NO: 203501 - RNA, 26 nt, Human
cugcacaaaaaaaaaaaaaaaaacuc

SEQ ID NO: 203502 - RNA, 21 nt, Human
cuugugggauggugggguugg

SEQ ID NO: 203503 - RNA, 21 nt, Human
gaucaugaaaccaaaaagaga

SEQ ID NO: 203504 - RNA, 18 nt, Human
gggccucccggggcccag

SEQ ID NO: 203505 - RNA, 22 nt, Human
guggaacaaugcuacaucuaca

SEQ ID NO: 203506 - RNA, 22 nt, Human
uaaagacugugaaauguuuguc

SEQ ID NO: 203507 - RNA, 21 nt, Human
uaaaugaucaugaaaccaaaa

SEQ ID NO: 203508 - RNA, 19 nt, Human
uacaguguuuauaaagugc

SEQ ID NO: 203509 - RNA, 21 nt, Human
uacaguguuuauaaagugcaa

SEQ ID NO: 203510 - RNA, 20 nt, Human
uagcuagcgugugccaggca

SEQ ID NO: 203511 - RNA, 21 nt, Human
uccaggccucagccucauccu

SEQ ID NO: 203512 - RNA, 26 nt, Human
ucccuggcaugauggacaaaggcugg

SEQ ID NO: 203513 - RNA, 21 nt, Human
uccuaggacagccuuguuccu

SEQ ID NO: 203514 - RNA, 19 nt, Human
ugaaaccaaaaagagacug

SEQ ID NO: 203515 - RNA, 26 nt, Human
ugaucaugaaaccaaaaagagacuga

SEQ ID NO: 203516 - RNA, 25 nt, Human
ugcacaaaaaaaaaaaaaaaaacuc

SEQ ID NO: 203517 - RNA, 21 nt, Human
uggaacaaugcuacaucuaca

SEQ ID NO: 203518 - RNA, 23 nt, Human
uggccaggccugcagacagaccu

SEQ ID NO: 203519 - RNA, 19 nt, Human
ugggguguaggccuggcuc

SEQ ID NO: 203520 - RNA, 19 nt, Human
ugggguuggcuucccuggc

SEQ ID NO: 203521 - RNA, 18 nt, Human
uggugggguuggcuuccc

SEQ ID NO: 203522 - RNA, 22 nt, Human
uggugggguuggcuucccuggc

SEQ ID NO: 203523 - RNA, 21 nt, Human
ugugcuguggccaggccugca

SEQ ID NO: 203524 - RNA, 24 nt, Human
uuaaagacugugaaauguuugucu

SEQ ID NO: 203525 - RNA, 25 nt, Human
uuuuuuuuuuuuuuuuuuuuuaugg

SEQ ID NO: 203526 - RNA, 18 nt, Human
acuguccauuaaaugauc

SEQ ID NO: 203527 - RNA, 21 nt, Human
agcaaacaagcgcuccccucg

SEQ ID NO: 203528 - RNA, 20 nt, Human
auacaggccaguacagcagu

SEQ ID NO: 203529 - RNA, 24 nt, Human
aucacuguccauuaaaugaucacu

SEQ ID NO: 203530 - RNA, 20 nt, Human
cagcaaacaagcgcuccccu

SEQ ID NO: 203531 - RNA, 21 nt, Human
cagcaaacaagcgcuccccuc

SEQ ID NO: 203532 - RNA, 22 nt, Human
cagcauaaaauaguuaaaucuu

SEQ ID NO: 203533 - RNA, 22 nt, Human
cauauguggucucauuucaagu

SEQ ID NO: 203534 - RNA, 21 nt, Human
cauguacauacaggccaguac

SEQ ID NO: 203535 - RNA, 20 nt, Human
cccuugaaaauauggucacu

SEQ ID NO: 203536 - RNA, 20 nt, Human
cuguauuuauuuaaaaaaaa

SEQ ID NO: 203537 - RNA, 23 nt, Human
gccccaucuacaaacauggcaca

SEQ ID NO: 203538 - RNA, 23 nt, Human
gguaagagaacaaucaucaagga

SEQ ID NO: 203539 - RNA, 19 nt, Human
uaccuaauauaaauagcua

SEQ ID NO: 203540 - RNA, 19 nt, Human
uagggacauagaauauugu

SEQ ID NO: 203541 - RNA, 21 nt, Human
uauguuguccuucuggcuuca

SEQ ID NO: 203542 - RNA, 20 nt, Human
ucaauucauccuaccuccuu

SEQ ID NO: 203543 - RNA, 19 nt, Human
ucacuagcuaauggucacu

SEQ ID NO: 203544 - RNA, 18 nt, Human
ucaucaaggauguagguu

SEQ ID NO: 203545 - RNA, 19 nt, Human
uccagaauggguaagagaa

SEQ ID NO: 203546 - RNA, 18 nt, Human
uccccauauguggucuca

SEQ ID NO: 203547 - RNA, 24 nt, Human
uucauccuaccuccuuuuacaugc

SEQ ID NO: 203548 - RNA, 24 nt, Human
uucccauuguucuagauuccucug

SEQ ID NO: 203549 - RNA, 19 nt, Human
uugcaaggccucaguugaa

SEQ ID NO: 203550 - RNA, 26 nt, Human
uuuaaaaaaaaaaaaaauuccagaau

SEQ ID NO: 203551 - RNA, 22 nt, Human
uuuuuuuuuuuuuuuuuucaag

SEQ ID NO: 203552 - RNA, 19 nt, Human
aaaagaacacacagguggc

SEQ ID NO: 203553 - RNA, 25 nt, Human
agccaguggcggcagcagggguggg

SEQ ID NO: 203554 - RNA, 19 nt, Human
aggcacagccaguggcggc

SEQ ID NO: 203555 - RNA, 24 nt, Human
aggugguugcuuugaacuuuauuu

SEQ ID NO: 203556 - RNA, 22 nt, Human
cagcaggggugggcauccaggc

SEQ ID NO: 203557 - RNA, 24 nt, Human
caggugguugcuuugaacuuuauu

SEQ ID NO: 203558 - RNA, 18 nt, Human
ccaguggcggcagcaggg

SEQ ID NO: 203559 - RNA, 24 nt, Human
cucugcucuggacgucugcucaga

SEQ ID NO: 203560 - RNA, 18 nt, Human
cugcucagaaaagugcgg

SEQ ID NO: 203561 - RNA, 18 nt, Human
cugcucagaaaagugcgg

SEQ ID NO: 203562 - RNA, 30 nt, Human
gagaaaaacagaagauaaauguaucaaaag

SEQ ID NO: 203563 - RNA, 24 nt, Human
ggcacagccaguggcggcagcagg

SEQ ID NO: 203564 - RNA, 24 nt, Human
uaaauguaucaaaagaacacacag

SEQ ID NO: 203565 - RNA, 23 nt, Human
uccuccagucggguauuuuuagc

SEQ ID NO: 203566 - RNA, 24 nt, Human
ugagaaaaacagaagauaaaugua

SEQ ID NO: 203567 - RNA, 20 nt, Human
ugcggggcgcugggcucggc

SEQ ID NO: 203568 - RNA, 19 nt, Human
ugcucagaaaagugcgggg

SEQ ID NO: 203569 - RNA, 18 nt, Human
uggcggcagcaggggugg

SEQ ID NO: 203570 - RNA, 21 nt, Human
uggcggcagcaggggugggca

SEQ ID NO: 203571 - RNA, 21 nt, Human
uggcgggggaggcacagccag

SEQ ID NO: 203572 - RNA, 19 nt, Human
uugagaaaaacagaagaua

SEQ ID NO: 203573 - RNA, 24 nt, Human
uuugagaaaaacagaagauaaaug

SEQ ID NO: 203574 - RNA, 21 nt, Human
uuuuuuuuuuuuacagguggu

SEQ ID NO: 203575 - RNA, 21 nt, Human
uuuuuuuuuuuuuuuuacagg

SEQ ID NO: 203576 - RNA, 23 nt, Human
uuuuuuuuuuuuuuuuuuacagg

SEQ ID NO: 203577 - RNA, 19 nt, Human
acuaaaccaaggcuaugac

SEQ ID NO: 203578 - RNA, 22 nt, Human
acuuuuuuuuuuuuuuuuuuuu

SEQ ID NO: 203579 - RNA, 22 nt, Human
agagagggauuugcugggugcu

SEQ ID NO: 203580 - RNA, 18 nt, Human
cagcagaagcccuggucc

SEQ ID NO: 203581 - RNA, 22 nt, Human
ccccaaggaugcugcuaccucu

SEQ ID NO: 203582 - RNA, 23 nt, Human
ccuugggagguagagagggauuu

SEQ ID NO: 203583 - RNA, 20 nt, Human
cgacuuuuuuuuuuuuuuuu

SEQ ID NO: 203584 - RNA, 23 nt, Human
cuaccucuggaguggugggcagc

SEQ ID NO: 203585 - RNA, 26 nt, Human
gaccaugcaccuuucccuucccccaa

SEQ ID NO: 203586 - RNA, 24 nt, Human
gcgucgacuuuuuuuuuuuuuuuu

SEQ ID NO: 203587 - RNA, 25 nt, Human
gcgucgacuuuuuuuuuuuuuuuuu

SEQ ID NO: 203588 - RNA, 18 nt, Human
gcugcagaugcagcagaa

SEQ ID NO: 203589 - RNA, 19 nt, Human
ggcugcagaugcagcagaa

SEQ ID NO: 203590 - RNA, 20 nt, Human
gguagagagggauuugcugg

SEQ ID NO: 203591 - RNA, 18 nt, Human
guggugggcagcugccca

SEQ ID NO: 203592 - RNA, 19 nt, Human
guggugggcagcugcccau

SEQ ID NO: 203593 - RNA, 24 nt, Human
ucaccuugggagguagagagggau

SEQ ID NO: 203594 - RNA, 24 nt, Human
ucagcuccacccaaaacuaaacca

SEQ ID NO: 203595 - RNA, 18 nt, Human
ucuuuuuuuuuuuuuuuu

SEQ ID NO: 203596 - RNA, 20 nt, Human
ugcugggugcugggucugug

SEQ ID NO: 203597 - RNA, 23 nt, Human
uugggagguagagagggauuugc

SEQ ID NO: 203598 - RNA, 21 nt, Human
uuuuuuuuuuuuuugcccuga

SEQ ID NO: 203599 - RNA, 18 nt, Human
uuuuuuuuuuuuuuuuug

SEQ ID NO: 203600 - RNA, 22 nt, Human
uuuuuuuuuuuuuuuuugcccu

SEQ ID NO: 203601 - RNA, 25 nt, Human
uuuuuuuuuuuuuuuuuugcccuga

SEQ ID NO: 203602 - RNA, 25 nt, Human
uuuuuuuuuuuuuuuuuuucuuuuu

SEQ ID NO: 203603 - RNA, 26 nt, Human
agccuccuucugccaaccuuccacug

SEQ ID NO: 203604 - RNA, 18 nt, Human
cauagcaaaucauuucaa

SEQ ID NO: 203605 - RNA, 19 nt, Human
cauagcaaaucauuucaaa

SEQ ID NO: 203606 - RNA, 21 nt, Human
ccacugccuucagucaguggc

SEQ ID NO: 203607 - RNA, 26 nt, Human
ccaguggcugaaccaucaucuucccc

SEQ ID NO: 203608 - RNA, 18 nt, Human
ccuuccacugccuucagu

SEQ ID NO: 203609 - RNA, 22 nt, Human
gagccccugcaguugccuacug

SEQ ID NO: 203610 - RNA, 19 nt, Human
gugaaggcaaaaacagccu

SEQ ID NO: 203611 - RNA, 23 nt, Human
uauuuuuauucuucauaaaaauc

SEQ ID NO: 203612 - RNA, 27 nt, Human
uccccaugucaucugaacaggaacugg

SEQ ID NO: 203613 - RNA, 18 nt, Human
uucugccaaccuuccacu

SEQ ID NO: 203614 - RNA, 20 nt, Human
uugaacagccuccuucugcc

SEQ ID NO: 203615 - RNA, 22 nt, Human
aacugcuuuuucaacaguaaau

SEQ ID NO: 203616 - RNA, 21 nt, Human
accuguaguuuacauuucccu

SEQ ID NO: 203617 - RNA, 24 nt, Human
agaacaggguaagaaagcacauag

SEQ ID NO: 203618 - RNA, 20 nt, Human
agccaguguuuaccugggua

SEQ ID NO: 203619 - RNA, 24 nt, Human
agucaaaaaauuuugacuuuuaau

SEQ ID NO: 203620 - RNA, 22 nt, Human
ccaaagccaguguuuaccuggg

SEQ ID NO: 203621 - RNA, 19 nt, Human
ccaacagaagccaagagcc

SEQ ID NO: 203622 - RNA, 25 nt, Human
ccagcaaaacuggaacagaacaggg

SEQ ID NO: 203623 - RNA, 19 nt, Human
ccuccaacagaagccaaga

SEQ ID NO: 203624 - RNA, 23 nt, Human
cuaaauaucuaccuaguggcuua

SEQ ID NO: 203625 - RNA, 21 nt, Human
cuauguacaaauccagcaaaa

SEQ ID NO: 203626 - RNA, 21 nt, Human
ggucuuuggcuuuaaaaagaa

SEQ ID NO: 203627 - RNA, 21 nt, Human
uaagaaagcacauagcaacug

SEQ ID NO: 203628 - RNA, 23 nt, Human
ucccaugccuccaacagaagcug

SEQ ID NO: 203629 - RNA, 21 nt, Human
uggcuauguacaaauccagca

SEQ ID NO: 203630 - RNA, 20 nt, Human
uuggcuuuaaaaagaaaguc

SEQ ID NO: 203631 - RNA, 19 nt, Human
uuuuuuuuuuuuuuuucaa

SEQ ID NO: 203632 - RNA, 23 nt, Human
aaagaaaaggauuauacguaaua

SEQ ID NO: 203633 - RNA, 22 nt, Human
aacacaaggacaggagagggaa

SEQ ID NO: 203634 - RNA, 24 nt, Human
acaggagagggaaaaaaacacuag

SEQ ID NO: 203635 - RNA, 18 nt, Human
acccagacagucccaaca

SEQ ID NO: 203636 - RNA, 19 nt, Human
acugccuucaacacaagga

SEQ ID NO: 203637 - RNA, 19 nt, Human
agaguagagagggaauggg

SEQ ID NO: 203638 - RNA, 21 nt, Human
aggacaggagagggaaaaaaa

SEQ ID NO: 203639 - RNA, 24 nt, Human
aggacaggagagggaaaaaaacac

SEQ ID NO: 203640 - RNA, 18 nt, Human
agggggagccagguggga

SEQ ID NO: 203641 - RNA, 18 nt, Human
aguagagagggaaugggg

SEQ ID NO: 203642 - RNA, 23 nt, Human
caagggcacaaguuuuccaacua

SEQ ID NO: 203643 - RNA, 22 nt, Human
caauacacaacauccaauccug

SEQ ID NO: 203644 - RNA, 21 nt, Human
ggacaggagagggaaaaaaac

SEQ ID NO: 203645 - RNA, 20 nt, Human
ggggcuugacacccuuaguu

SEQ ID NO: 203646 - RNA, 26 nt, Human
uacacaacauccaauccugcugucaa

SEQ ID NO: 203647 - RNA, 21 nt, Human
uauacaagggcacaaguuuuc

SEQ ID NO: 203648 - RNA, 23 nt, Human
uccgauacccagacagucccaac

SEQ ID NO: 203649 - RNA, 23 nt, Human
ucgaggcugcagugggagcccau

SEQ ID NO: 203650 - RNA, 19 nt, Human
ugaagaaaauaaaauaaaa

SEQ ID NO: 203651 - RNA, 19 nt, Human
uucagaacaaaaugaagaa

SEQ ID NO: 203652 - RNA, 21 nt, Human
uuuuccaacuaugaacuccua

SEQ ID NO: 203653 - RNA, 21 nt, Human
uuuuuuuuuuuuuuaaaacgg

SEQ ID NO: 203654 - RNA, 22 nt, Human
aaaccauuauauauuuugucaa

SEQ ID NO: 203655 - RNA, 25 nt, Human
aacaugccacuucccauaccaccuc

SEQ ID NO: 203656 - RNA, 25 nt, Human
acaugccacuucccauaccaccucc

SEQ ID NO: 203657 - RNA, 18 nt, Human
acuacaacuucugcugua

SEQ ID NO: 203658 - RNA, 22 nt, Human
auaaagcaguucucacaaccuu

SEQ ID NO: 203659 - RNA, 29 nt, Human
auccaauaaagcaguucucacaaccuuuu

SEQ ID NO: 203660 - RNA, 22 nt, Human
caacugaaaccaguaacugaug

SEQ ID NO: 203661 - RNA, 20 nt, Human
cagccagccuuuuucuucau

SEQ ID NO: 203662 - RNA, 19 nt, Human
caugccacuucccauacca

SEQ ID NO: 203663 - RNA, 22 nt, Human
ccaacugacuucucugaaguua

SEQ ID NO: 203664 - RNA, 22 nt, Human
ccacuucccauaccaccuccca

SEQ ID NO: 203665 - RNA, 19 nt, Human
cccaguaucaggaauguac

SEQ ID NO: 203666 - RNA, 23 nt, Human
ccucccauucuacccauugcacc

SEQ ID NO: 203667 - RNA, 21 nt, Human
ccuugggcuuccugucacagu

SEQ ID NO: 203668 - RNA, 21 nt, Human
cggcagggcgugcacgcagcg

SEQ ID NO: 203669 - RNA, 23 nt, Human
cugaaaccaguaacugaugguua

SEQ ID NO: 203670 - RNA, 21 nt, Human
cuuuuacccaguaucaggaau

SEQ ID NO: 203671 - RNA, 18 nt, Human
gggcggcggcagggcgug

SEQ ID NO: 203672 - RNA, 21 nt, Human
uaaguugaaagccauacauug

SEQ ID NO: 203673 - RNA, 25 nt, Human
ucaacaccugcauucuuagcaaaau

SEQ ID NO: 203674 - RNA, 21 nt, Human
ucacaccagcggcauccaaua

SEQ ID NO: 203675 - RNA, 19 nt, Human
ucuccacagaaaggcugcu

SEQ ID NO: 203676 - RNA, 19 nt, Human
ucucugaaguuauugguga

SEQ ID NO: 203677 - RNA, 19 nt, Human
ucugaaguuauuggugagg

SEQ ID NO: 203678 - RNA, 19 nt, Human
ucuucauuagcuggaguca

SEQ ID NO: 203679 - RNA, 20 nt, Human
uggaauuuugaguguucuuu

SEQ ID NO: 203680 - RNA, 19 nt, Human
uggcaagcacuaaaaaucc

SEQ ID NO: 203681 - RNA, 19 nt, Human
ugggcuuccugucacaguu

SEQ ID NO: 203682 - RNA, 19 nt, Human
uucacaaaaucuccaacca

SEQ ID NO: 203683 - RNA, 22 nt, Human
uucacaaaaucuccaaccauag

SEQ ID NO: 203684 - RNA, 22 nt, Human
uuuccaccauauucacaaaauc

SEQ ID NO: 203685 - RNA, 22 nt, Human
ucaguggaaugggcagcaucau

SEQ ID NO: 203686 - RNA, 24 nt, Human
uggaaguguuuauaucaguacaag

SEQ ID NO: 203687 - RNA, 24 nt, Human
aacaggccacccagcucuaucugg

SEQ ID NO: 203688 - RNA, 18 nt, Human
aagggcugcagaaacagg

SEQ ID NO: 203689 - RNA, 20 nt, Human
acucgacauugucgggcugg

SEQ ID NO: 203690 - RNA, 18 nt, Human
agcugugugugugagggu

SEQ ID NO: 203691 - RNA, 22 nt, Human
agcugugugugugaggguggca

SEQ ID NO: 203692 - RNA, 26 nt, Human
aggggcuggguggagguggguggggg

SEQ ID NO: 203693 - RNA, 20 nt, Human
aguggguggcagagacuccu

SEQ ID NO: 203694 - RNA, 21 nt, Human
caaguccuggugacuuucuga

SEQ ID NO: 203695 - RNA, 21 nt, Human
cacccagcucuaucugggggc

SEQ ID NO: 203696 - RNA, 18 nt, Human
cacuaaagacaauuccca

SEQ ID NO: 203697 - RNA, 21 nt, Human
cacuaaagacaauucccaauc

SEQ ID NO: 203698 - RNA, 22 nt, Human
cagcccagggcgguacgagcaa

SEQ ID NO: 203699 - RNA, 22 nt, Human
cagccggcacuaaagacaauuc

SEQ ID NO: 203700 - RNA, 22 nt, Human
ccagcucuaucugggggcucca

SEQ ID NO: 203701 - RNA, 24 nt, Human
cccacccagccacuguuccugacc

SEQ ID NO: 203702 - RNA, 20 nt, Human
cccaggggugagcugccuuu

SEQ ID NO: 203703 - RNA, 19 nt, Human
ccgccugcccaggggugag

SEQ ID NO: 203704 - RNA, 19 nt, Human
ccuccaguccagcccaggg

SEQ ID NO: 203705 - RNA, 19 nt, Human
cuaaagacaauucccaauc

SEQ ID NO: 203706 - RNA, 23 nt, Human
cuggguggaggugggugggggug

SEQ ID NO: 203707 - RNA, 22 nt, Human
gauggggaccgccugcccaggg

SEQ ID NO: 203708 - RNA, 24 nt, Human
gcacuaaagacaauucccaauccu

SEQ ID NO: 203709 - RNA, 24 nt, Human
gcccagcugugugugugagggugg

SEQ ID NO: 203710 - RNA, 20 nt, Human
gcuggggcguggcccgggag

SEQ ID NO: 203711 - RNA, 19 nt, Human
ggaggugggugggggugcu

SEQ ID NO: 203712 - RNA, 19 nt, Human
ggaggugggugggggugcu

SEQ ID NO: 203713 - RNA, 19 nt, Human
ggagugagaacugcccaag

SEQ ID NO: 203714 - RNA, 24 nt, Human
gggacagugggggcaguucugggc

SEQ ID NO: 203715 - RNA, 25 nt, Human
gggcuggggcguggcccgggagucc

SEQ ID NO: 203716 - RNA, 22 nt, Human
gggcuggguggagguggguggg

SEQ ID NO: 203717 - RNA, 24 nt, Human
gggugggggugcugaaaaacgagc

SEQ ID NO: 203718 - RNA, 20 nt, Human
ggugggggugcugaaaaacg

SEQ ID NO: 203719 - RNA, 25 nt, Human
guucugggcccacccagccacuguu

SEQ ID NO: 203720 - RNA, 19 nt, Human
uagggggacagugggggca

SEQ ID NO: 203721 - RNA, 21 nt, Human
uccacagccggcacuaaagac

SEQ ID NO: 203722 - RNA, 23 nt, Human
ucgacauugucgggcuggggcgu

SEQ ID NO: 203723 - RNA, 25 nt, Human
ucgguggguagggggacaguggggg

SEQ ID NO: 203724 - RNA, 19 nt, Human
ucucagguagcuguggggc

SEQ ID NO: 203725 - RNA, 24 nt, Human
ugagaacugcccaagggcugcaga

SEQ ID NO: 203726 - RNA, 27 nt, Human
ugagaacugcccaagggcugcagaaaa

SEQ ID NO: 203727 - RNA, 22 nt, Human
ugcuggccagccuuguggcuuu

SEQ ID NO: 203728 - RNA, 20 nt, Human
uggcccgggaguccgugugg

SEQ ID NO: 203729 - RNA, 18 nt, Human
ugggggugcugaaaaacg

SEQ ID NO: 203730 - RNA, 26 nt, Human
ugggggugcugaaaaacgagcuggug

SEQ ID NO: 203731 - RNA, 21 nt, Human
uggguggaggugggugggggu

SEQ ID NO: 203732 - RNA, 24 nt, Human
aaaacuaaugaaguccauuauggc

SEQ ID NO: 203733 - RNA, 22 nt, Human
aggcugaaguuuguuagaagau

SEQ ID NO: 203734 - RNA, 19 nt, Human
cccucacuucccaggcuga

SEQ ID NO: 203735 - RNA, 18 nt, Human
ccucacuucccaggcuga

SEQ ID NO: 203736 - RNA, 21 nt, Human
ccugcaaucuuuucagcuccu

SEQ ID NO: 203737 - RNA, 22 nt, Human
ggccuggcagcaucaacagcuu

SEQ ID NO: 203738 - RNA, 20 nt, Human
uaauccugcaaucuuuucag

SEQ ID NO: 203739 - RNA, 27 nt, Human
ucagcuccugggguuucagcucucuua

SEQ ID NO: 203740 - RNA, 18 nt, Human
ucccucuaugucauacaa

SEQ ID NO: 203741 - RNA, 19 nt, Human
ucccuuguaaagaauuaag

SEQ ID NO: 203742 - RNA, 22 nt, Human
ugaaagaaauaaguaauuagua

SEQ ID NO: 203743 - RNA, 19 nt, Human
ugacucacuguccacuaga

SEQ ID NO: 203744 - RNA, 19 nt, Human
uucagcucucuuaucugga

SEQ ID NO: 203745 - RNA, 23 nt, Human
aaaaagugaauuugccagucaaa

SEQ ID NO: 203746 - RNA, 22 nt, Human
acagcagugaaaacagcuuaac

SEQ ID NO: 203747 - RNA, 22 nt, Human
agaaacagcagugaaaacagcu

SEQ ID NO: 203748 - RNA, 25 nt, Human
agugguagugugaugcgguaugaug

SEQ ID NO: 203749 - RNA, 24 nt, Human
cuauaaucaugccccaugauuacu

SEQ ID NO: 203750 - RNA, 19 nt, Human
cucaagaggagagucaaga

SEQ ID NO: 203751 - RNA, 26 nt, Human
cucuauaaucaugccccaugauuacu

SEQ ID NO: 203752 - RNA, 20 nt, Human
uaucaugaaacacagaauuc

SEQ ID NO: 203753 - RNA, 26 nt, Human
uauuacucagaaacagcagugaaaag

SEQ ID NO: 203754 - RNA, 23 nt, Human
ucauggucuuucuuuuauucucc

SEQ ID NO: 203755 - RNA, 25 nt, Human
ucuauaaucaugccccaugauuacu

SEQ ID NO: 203756 - RNA, 21 nt, Human
ugccccaugauuacuaaggau

SEQ ID NO: 203757 - RNA, 19 nt, Human
uuuuuuuuuuuuuuugugc

SEQ ID NO: 203758 - RNA, 19 nt, Human
uuuuuuuuuuuuuuuuugu

SEQ ID NO: 203759 - RNA, 27 nt, Human
uuuuuuuuuuuuuuuuuuuuuuugggg

SEQ ID NO: 203760 - RNA, 22 nt, Human
acagcagugaaaacagcuuaac

SEQ ID NO: 203761 - RNA, 22 nt, Human
agaaacagcagugaaaacagcu

SEQ ID NO: 203762 - RNA, 24 nt, Human
ccauaaucaugccccaugauuacu

SEQ ID NO: 203763 - RNA, 19 nt, Human
cucaagaggagaauccaga

SEQ ID NO: 203764 - RNA, 26 nt, Human
cuccauaaucaugccccaugauuacu

SEQ ID NO: 203765 - RNA, 26 nt, Human
uauuacucagaaacagcagugaaaag

SEQ ID NO: 203766 - RNA, 23 nt, Human
ucaagaggagaauccagaaguca

SEQ ID NO: 203767 - RNA, 25 nt, Human
uccauaaucaugccccaugauuacu

SEQ ID NO: 203768 - RNA, 21 nt, Human
ugaagugaagucucaagagau

SEQ ID NO: 203769 - RNA, 19 nt, Human
ugaugcgguaugacaaaug

SEQ ID NO: 203770 - RNA, 18 nt, Human
ugccagucaaaccuccau

SEQ ID NO: 203771 - RNA, 26 nt, Human
uuaacauuuaaauugcaaguaucuaa

SEQ ID NO: 203772 - RNA, 22 nt, Human
aaaaaaaagacaaucccgauga

SEQ ID NO: 203773 - RNA, 25 nt, Human
aaacaagaccggacuauuugaagaa

SEQ ID NO: 203774 - RNA, 24 nt, Human
aaagagauguuaaaaaaaaauuca

SEQ ID NO: 203775 - RNA, 24 nt, Human
aaagcuugcgguggguggggggug

SEQ ID NO: 203776 - RNA, 19 nt, Human
aacaugaugaaaccccguc

SEQ ID NO: 203777 - RNA, 20 nt, Human
aacaugaugaaaccccgucu

SEQ ID NO: 203778 - RNA, 21 nt, Human
aacaugaugaaaccccgucuu

SEQ ID NO: 203779 - RNA, 18 nt, Human
aagaaaacaacaggaaaa

SEQ ID NO: 203780 - RNA, 21 nt, Human
aagaaaacaacaggaaaaaga

SEQ ID NO: 203781 - RNA, 24 nt, Human
aagaaaacaacaggaaaaagaaca

SEQ ID NO: 203782 - RNA, 21 nt, Human
aagaacaauucuguugauuga

SEQ ID NO: 203783 - RNA, 23 nt, Human
aagagauguuaaaaaaaaauuca

SEQ ID NO: 203784 - RNA, 20 nt, Human
aauacugucuuucucuucac

SEQ ID NO: 203785 - RNA, 18 nt, Human
aaucccaagaugucucag

SEQ ID NO: 203786 - RNA, 22 nt, Human
aauuaaaaaaaaaagacaaucc

SEQ ID NO: 203787 - RNA, 20 nt, Human
acaaaaauuagcugggccug

SEQ ID NO: 203788 - RNA, 24 nt, Human
acagagcaaagucauccuucugcu

SEQ ID NO: 203789 - RNA, 21 nt, Human
acaggacacaaaagauaacaa

SEQ ID NO: 203790 - RNA, 25 nt, Human
acagugaaaaggucucaagaccaga

SEQ ID NO: 203791 - RNA, 24 nt, Human
accccgucuuuauuaaaaauacaa

SEQ ID NO: 203792 - RNA, 21 nt, Human
acuacacuccagccuggcgag

SEQ ID NO: 203793 - RNA, 23 nt, Human
acuacacuccagccuggcgagag

SEQ ID NO: 203794 - RNA, 28 nt, Human
acuccgucucaaaaaaaaaaaaaaagaa

SEQ ID NO: 203795 - RNA, 22 nt, Human
acucuggaggcugaggcagaau

SEQ ID NO: 203796 - RNA, 22 nt, Human
agaaaacaacaggaaaaagaac

SEQ ID NO: 203797 - RNA, 21 nt, Human
agaaagaaaauauuaugcuaa

SEQ ID NO: 203798 - RNA, 21 nt, Human
agaaagagauguuaaaaaaaa

SEQ ID NO: 203799 - RNA, 24 nt, Human
agaacuucagaauuccccucacag

SEQ ID NO: 203800 - RNA, 22 nt, Human
agaauggugucccacucaaagc

SEQ ID NO: 203801 - RNA, 20 nt, Human
agcacuuugggaugcugagg

SEQ ID NO: 203802 - RNA, 24 nt, Human
aggcacaguggcucaugccuguaa

SEQ ID NO: 203803 - RNA, 21 nt, Human
aggcagaaucucuugaacccg

SEQ ID NO: 203804 - RNA, 24 nt, Human
aggcgggcggaucacgaggucaag

SEQ ID NO: 203805 - RNA, 21 nt, Human
aggcugaggcagaaucucuug

SEQ ID NO: 203806 - RNA, 22 nt, Human
agggcaagacuccgucucaaaa

SEQ ID NO: 203807 - RNA, 18 nt, Human
aggguagucaaucugguc

SEQ ID NO: 203808 - RNA, 30 nt, Human
aguccugccccccgccccccaccacccacc

SEQ ID NO: 203809 - RNA, 23 nt, Human
aguggcucaugccuguaauccca

SEQ ID NO: 203810 - RNA, 24 nt, Human
aguggcucaugccuguaaucccag

SEQ ID NO: 203811 - RNA, 24 nt, Human
auccuggcuccaaauucucuuuca

SEQ ID NO: 203812 - RNA, 19 nt, Human
augccuguaaucccagcac

SEQ ID NO: 203813 - RNA, 21 nt, Human
augcugaggcgggcggaucac

SEQ ID NO: 203814 - RNA, 18 nt, Human
auggugucccacucaaag

SEQ ID NO: 203815 - RNA, 22 nt, Human
auuauguuggccaggcacagug

SEQ ID NO: 203816 - RNA, 24 nt, Human
auugugccacuacacuccagccug

SEQ ID NO: 203817 - RNA, 23 nt, Human
caaaaaaaaaaaaaaagaaagaa

SEQ ID NO: 203818 - RNA, 18 nt, Human
caaagcuugcggugggug

SEQ ID NO: 203819 - RNA, 21 nt, Human
caacaggaaaaagaacaauuc

SEQ ID NO: 203820 - RNA, 21 nt, Human
caacaugaugaaaccccgucu

SEQ ID NO: 203821 - RNA, 21 nt, Human
caagacuccgucucaaaaaaa

SEQ ID NO: 203822 - RNA, 22 nt, Human
caaucuaccucaaaggggugau

SEQ ID NO: 203823 - RNA, 20 nt, Human
cacacagaauggagacccau

SEQ ID NO: 203824 - RNA, 23 nt, Human
cacagaccuccacacauuuggcu

SEQ ID NO: 203825 - RNA, 21 nt, Human
cacccuccuuuaagcuccaua

SEQ ID NO: 203826 - RNA, 25 nt, Human
cacuacacuccagccuggcgagagg

SEQ ID NO: 203827 - RNA, 22 nt, Human
cacuccagccuggcgagagggc

SEQ ID NO: 203828 - RNA, 20 nt, Human
cagaauggugucccacucaa

SEQ ID NO: 203829 - RNA, 27 nt, Human
cagagagccuucccucugagucugggg

SEQ ID NO: 203830 - RNA, 24 nt, Human
cagcacuuugggaugcugaggcgg

SEQ ID NO: 203831 - RNA, 18 nt, Human
caggaaaaagaacaauuc

SEQ ID NO: 203832 - RNA, 19 nt, Human
caggacacaaaagauaaca

SEQ ID NO: 203833 - RNA, 22 nt, Human
caggacacaaaagauaacaaga

SEQ ID NO: 203834 - RNA, 21 nt, Human
caguccugccccccgcccccc

SEQ ID NO: 203835 - RNA, 20 nt, Human
cauccuggcuccaaauucuc

SEQ ID NO: 203836 - RNA, 20 nt, Human
caugccuguaaucccagcac

SEQ ID NO: 203837 - RNA, 19 nt, Human
ccaaucaaggugccacaca

SEQ ID NO: 203838 - RNA, 20 nt, Human
ccaccacccacagcucuuuc

SEQ ID NO: 203839 - RNA, 19 nt, Human
ccacuacacuccagccugg

SEQ ID NO: 203840 - RNA, 19 nt, Human
ccacuacacuccagccugg

SEQ ID NO: 203841 - RNA, 20 nt, Human
ccacuacacuccagccuggc

SEQ ID NO: 203842 - RNA, 26 nt, Human
ccagcugguaguuaaaggucuuuccu

SEQ ID NO: 203843 - RNA, 22 nt, Human
ccauccuacccccgcuaccccu

SEQ ID NO: 203844 - RNA, 20 nt, Human
cccaagaugucucagggucc

SEQ ID NO: 203845 - RNA, 20 nt, Human
ccccccgccccccaccaccc

SEQ ID NO: 203846 - RNA, 22 nt, Human
ccccccgccccccaccacccac

SEQ ID NO: 203847 - RNA, 19 nt, Human
cccccgccccccaccaccc

SEQ ID NO: 203848 - RNA, 22 nt, Human
ccccgccccccaccacccacag

SEQ ID NO: 203849 - RNA, 21 nt, Human
ccccgcuaccccuaacuucug

SEQ ID NO: 203850 - RNA, 21 nt, Human
cccgggaugcggagguugcag

SEQ ID NO: 203851 - RNA, 23 nt, Human
ccuggccaacaugaugaaacccc

SEQ ID NO: 203852 - RNA, 24 nt, Human
ccuggccaacaugaugaaaccccg

SEQ ID NO: 203853 - RNA, 21 nt, Human
ccuggcgagagggcaagacuc

SEQ ID NO: 203854 - RNA, 20 nt, Human
ccuguaaucccagcacuuug

SEQ ID NO: 203855 - RNA, 21 nt, Human
cgagaccacccuggccaacau

SEQ ID NO: 203856 - RNA, 24 nt, Human
cgggaugcggagguugcagugagc

SEQ ID NO: 203857 - RNA, 24 nt, Human
cguuuguagucccagcuacucugg

SEQ ID NO: 203858 - RNA, 21 nt, Human
cuaccccuaacuucugaaucu

SEQ ID NO: 203859 - RNA, 25 nt, Human
cucaaaaaaaaaaaaaaagaaagaa

SEQ ID NO: 203860 - RNA, 24 nt, Human
cucaacaucucuaaugaguuuuca

SEQ ID NO: 203861 - RNA, 24 nt, Human
cucaugccuguaaucccagcacuu

SEQ ID NO: 203862 - RNA, 19 nt, Human
cuccgucucaaaaaaaaaa

SEQ ID NO: 203863 - RNA, 23 nt, Human
cugaggcagaaucucuugaaccc

SEQ ID NO: 203864 - RNA, 24 nt, Human
cugccccccgccccccaccaccca

SEQ ID NO: 203865 - RNA, 18 nt, Human
cuugccuuuggcaucugg

SEQ ID NO: 203866 - RNA, 20 nt, Human
gaaaacauuauguuggccag

SEQ ID NO: 203867 - RNA, 21 nt, Human
gaaaacauuauguuggccagg

SEQ ID NO: 203868 - RNA, 22 nt, Human
gagaaagagauguuaaaaaaaa

SEQ ID NO: 203869 - RNA, 21 nt, Human
gagguugcagugagcugagau

SEQ ID NO: 203870 - RNA, 23 nt, Human
gagguugcagugagcugagauug

SEQ ID NO: 203871 - RNA, 23 nt, Human
gccaacaugaugaaaccccgucu

SEQ ID NO: 203872 - RNA, 18 nt, Human
gcggagguugcagugagc

SEQ ID NO: 203873 - RNA, 20 nt, Human
gcggagguugcagugagcug

SEQ ID NO: 203874 - RNA, 22 nt, Human
gcggagguugcagugagcugag

SEQ ID NO: 203875 - RNA, 22 nt, Human
ggagguugcagugagcugagau

SEQ ID NO: 203876 - RNA, 24 nt, Human
ggagguugcagugagcugagauug

SEQ ID NO: 203877 - RNA, 18 nt, Human
ggcaagacuccgucucaa

SEQ ID NO: 203878 - RNA, 18 nt, Human
ggcggaucacgaggucaa

SEQ ID NO: 203879 - RNA, 24 nt, Human
gggagagauuuaaucuaagaaaga

SEQ ID NO: 203880 - RNA, 18 nt, Human
gguggcucucucuuccca

SEQ ID NO: 203881 - RNA, 20 nt, Human
gucaagagaucgagaccacc

SEQ ID NO: 203882 - RNA, 21 nt, Human
gucucaaaaaaaaaaaaaaag

SEQ ID NO: 203883 - RNA, 24 nt, Human
guugcagugagcugagauugugcc

SEQ ID NO: 203884 - RNA, 24 nt, Human
guuggccaggcacaguggcucaug

SEQ ID NO: 203885 - RNA, 18 nt, Human
uaacuucugaaucucucu

SEQ ID NO: 203886 - RNA, 24 nt, Human
uaagaaagacucaguggaagaaac

SEQ ID NO: 203887 - RNA, 19 nt, Human
uaaugaguuuucagaucuu

SEQ ID NO: 203888 - RNA, 19 nt, Human
uacaaaaauuagcugggcc

SEQ ID NO: 203889 - RNA, 23 nt, Human
uacaggacacaaaagauaacaag

SEQ ID NO: 203890 - RNA, 19 nt, Human
uacucuggaggcugaggca

SEQ ID NO: 203891 - RNA, 21 nt, Human
uaucaggggaucacacccagg

SEQ ID NO: 203892 - RNA, 25 nt, Human
uauuaaacaagaccggacuauuuga

SEQ ID NO: 203893 - RNA, 19 nt, Human
ucaaaaaaaaaaaaaaaga

SEQ ID NO: 203894 - RNA, 19 nt, Human
ucaagagaucgagaccacc

SEQ ID NO: 203895 - RNA, 24 nt, Human
ucacgaggucaagagaucgagacc

SEQ ID NO: 203896 - RNA, 18 nt, Human
ucagaauggugucccacu

SEQ ID NO: 203897 - RNA, 22 nt, Human
ucaugccuguaaucccagcacu

SEQ ID NO: 203898 - RNA, 19 nt, Human
ucauuaaucuuauucaccc

SEQ ID NO: 203899 - RNA, 23 nt, Human
uccaacaaagaggaacugugaaa

SEQ ID NO: 203900 - RNA, 21 nt, Human
ucccaaccauccuacccccgc

SEQ ID NO: 203901 - RNA, 23 nt, Human
uccgucucaaaaaaaaaaaaaaa

SEQ ID NO: 203902 - RNA, 20 nt, Human
uccuaaaccacaggaauccc

SEQ ID NO: 203903 - RNA, 22 nt, Human
ucgagaccacccuggccaacau

SEQ ID NO: 203904 - RNA, 24 nt, Human
ucucaaaaaaaaaaaaaaagaaag

SEQ ID NO: 203905 - RNA, 18 nt, Human
ucucaggguccuggaacu

SEQ ID NO: 203906 - RNA, 25 nt, Human
ucucaggguccuggaacuuuuccca

SEQ ID NO: 203907 - RNA, 19 nt, Human
ucucucuccaagucacucu

SEQ ID NO: 203908 - RNA, 24 nt, Human
ucuucacggacaacugggagagau

SEQ ID NO: 203909 - RNA, 20 nt, Human
ucuuguaggucacacacuuc

SEQ ID NO: 203910 - RNA, 22 nt, Human
ucuuguaggucacacacuucuu

SEQ ID NO: 203911 - RNA, 18 nt, Human
ugaaaacauuauguuggc

SEQ ID NO: 203912 - RNA, 20 nt, Human
ugaauuaauccaagucucag

SEQ ID NO: 203913 - RNA, 24 nt, Human
ugagauugugccacuacacuccag

SEQ ID NO: 203914 - RNA, 19 nt, Human
ugagcugagauugugccac

SEQ ID NO: 203915 - RNA, 21 nt, Human
ugaggcagaaucucuugaacc

SEQ ID NO: 203916 - RNA, 24 nt, Human
ugaggcgggcggaucacgagguca

SEQ ID NO: 203917 - RNA, 19 nt, Human
ugagucuggggucuuuucu

SEQ ID NO: 203918 - RNA, 21 nt, Human
ugccccccgccccccaccacc

SEQ ID NO: 203919 - RNA, 24 nt, Human
ugcccugggauucuugccuuuggc

SEQ ID NO: 203920 - RNA, 23 nt, Human
ugccuguaaucccagcacuuugg

SEQ ID NO: 203921 - RNA, 23 nt, Human
ugccuguaaucccagcacuuugg

SEQ ID NO: 203922 - RNA, 24 nt, Human
ugccuguaaucccagcacuuuggg

SEQ ID NO: 203923 - RNA, 20 nt, Human
ugccuuuggcaucuggcucu

SEQ ID NO: 203924 - RNA, 21 nt, Human
ugcggagguugcagugagcug

SEQ ID NO: 203925 - RNA, 19 nt, Human
uggaagaaacgcauggaua

SEQ ID NO: 203926 - RNA, 24 nt, Human
uggccaggcacaguggcucaugcc

SEQ ID NO: 203927 - RNA, 24 nt, Human
uggcucaugccuguaaucccagca

SEQ ID NO: 203928 - RNA, 24 nt, Human
ugggaugcugaggcgggcggauca

SEQ ID NO: 203929 - RNA, 20 nt, Human
uggggggugggcgucuaaag

SEQ ID NO: 203930 - RNA, 24 nt, Human
uggugacacacguuuguaguccca

SEQ ID NO: 203931 - RNA, 21 nt, Human
ugucucaggguccuggaacuu

SEQ ID NO: 203932 - RNA, 24 nt, Human
ugugaaaacauuauguuggccagg

SEQ ID NO: 203933 - RNA, 23 nt, Human
uuagcugggccuggugacacacg

SEQ ID NO: 203934 - RNA, 24 nt, Human
uuagcugggccuggugacacacgu

SEQ ID NO: 203935 - RNA, 19 nt, Human
uucaguccugccccccgcc

SEQ ID NO: 203936 - RNA, 19 nt, Human
uugcagugagcugagauug

SEQ ID NO: 203937 - RNA, 22 nt, Human
uugcagugagcugagauugugc

SEQ ID NO: 203938 - RNA, 21 nt, Human
uugcggugggugggggguggg

SEQ ID NO: 203939 - RNA, 18 nt, Human
uuggcaucuggcucuuuu

SEQ ID NO: 203940 - RNA, 25 nt, Human
uugggaugcugaggcgggcggauca

SEQ ID NO: 203941 - RNA, 18 nt, Human
uuuuuuuuuuuuuuuuug

SEQ ID NO: 203942 - RNA, 23 nt, Human
uuuuuuuuuuuuuuuuuggccau

SEQ ID NO: 203943 - RNA, 22 nt, Human
uuuuuuuuuuuuuuuuuuuggc

SEQ ID NO: 203944 - RNA, 20 nt, Human
aaaaauucaaaaaauuagcc

SEQ ID NO: 203945 - RNA, 23 nt, Human
aaacaaacaaggaaacaagacca

SEQ ID NO: 203946 - RNA, 19 nt, Human
aaacaagaccacacauacu

SEQ ID NO: 203947 - RNA, 20 nt, Human
aaacagaacaaaacaaacaa

SEQ ID NO: 203948 - RNA, 21 nt, Human
aaacagaacaaaacaaacaaa

SEQ ID NO: 203949 - RNA, 19 nt, Human
aacaaaacagaacaaaaca

SEQ ID NO: 203950 - RNA, 20 nt, Human
aacauggugaaaucccgucu

SEQ ID NO: 203951 - RNA, 21 nt, Human
aacauggugaaaucccgucuc

SEQ ID NO: 203952 - RNA, 21 nt, Human
aacccgcuccuuuuucuccug

SEQ ID NO: 203953 - RNA, 20 nt, Human
aacuauguagccucgaaggu

SEQ ID NO: 203954 - RNA, 25 nt, Human
aacuauguagccucgaagguuucuc

SEQ ID NO: 203955 - RNA, 22 nt, Human
aagaauuaauaaguugcacccc

SEQ ID NO: 203956 - RNA, 24 nt, Human
aaucauccgaggucggggguucaa

SEQ ID NO: 203957 - RNA, 18 nt, Human
aauccucaaacaaaacag

SEQ ID NO: 203958 - RNA, 25 nt, Human
acaaacaaggaaacaagaccacaca

SEQ ID NO: 203959 - RNA, 22 nt, Human
acaauccucaaacaaaacagaa

SEQ ID NO: 203960 - RNA, 27 nt, Human
acaauccucaaacaaaacagaacaaaa

SEQ ID NO: 203961 - RNA, 25 nt, Human
acagaacaaaacaaacaaacaaacc

SEQ ID NO: 203962 - RNA, 24 nt, Human
acugugcugcugcacuccagccug

SEQ ID NO: 203963 - RNA, 20 nt, Human
agaccagagguagaaaacag

SEQ ID NO: 203964 - RNA, 19 nt, Human
agcacugcuucucucaaca

SEQ ID NO: 203965 - RNA, 24 nt, Human
agcacuuugggaggccgaggcggg

SEQ ID NO: 203966 - RNA, 24 nt, Human
agcauggccaacauggugaaaucc

SEQ ID NO: 203967 - RNA, 23 nt, Human
agccgggcaugguggugagugcc

SEQ ID NO: 203968 - RNA, 20 nt, Human
agcuacuaggaagcugaggc

SEQ ID NO: 203969 - RNA, 20 nt, Human
aggccgaggcgggcgaauca

SEQ ID NO: 203970 - RNA, 19 nt, Human
aggcggagguugcaaugag

SEQ ID NO: 203971 - RNA, 24 nt, Human
auccgaggucggggguucaagacc

SEQ ID NO: 203972 - RNA, 22 nt, Human
caaaacaaacaaacaaacaagg

SEQ ID NO: 203973 - RNA, 22 nt, Human
caaacaaaacagaacaaaacaa

SEQ ID NO: 203974 - RNA, 26 nt, Human
caaacaaacaaacaaggaaacaagac

SEQ ID NO: 203975 - RNA, 23 nt, Human
caaacaaacaaggaaacaagacc

SEQ ID NO: 203976 - RNA, 25 nt, Human
caaauaacaauccucaaacaaaaca

SEQ ID NO: 203977 - RNA, 24 nt, Human
caacauggugaaaucccgucucca

SEQ ID NO: 203978 - RNA, 24 nt, Human
caagaccagcauggccaacauggu

SEQ ID NO: 203979 - RNA, 19 nt, Human
caccccuuacccccaucca

SEQ ID NO: 203980 - RNA, 26 nt, Human
cacucggaacccgcuccuuuuucucc

SEQ ID NO: 203981 - RNA, 22 nt, Human
cagcacuuugggaggccgaggc

SEQ ID NO: 203982 - RNA, 24 nt, Human
cagcacuuugggaggccgaggcgg

SEQ ID NO: 203983 - RNA, 21 nt, Human
cagccugggcgacugagacuc

SEQ ID NO: 203984 - RNA, 23 nt, Human
cauccgaggucggggguucaaga

SEQ ID NO: 203985 - RNA, 24 nt, Human
cauggccaacauggugaaaucccg

SEQ ID NO: 203986 - RNA, 21 nt, Human
cccgucuccacuaaaaauuca

SEQ ID NO: 203987 - RNA, 22 nt, Human
ccgcgaacccgggaggcggagg

SEQ ID NO: 203988 - RNA, 18 nt, Human
ccugcaaucccagcuacu

SEQ ID NO: 203989 - RNA, 21 nt, Human
ccugcaaucccagcuacuagg

SEQ ID NO: 203990 - RNA, 24 nt, Human
ccugcaaucccagcuacuaggaag

SEQ ID NO: 203991 - RNA, 24 nt, Human
cgaaucauccgaggucggggguuc

SEQ ID NO: 203992 - RNA, 21 nt, Human
cgaggcgggcgaaucauccga

SEQ ID NO: 203993 - RNA, 22 nt, Human
cgccgcacugggcaaaccggca

SEQ ID NO: 203994 - RNA, 20 nt, Human
cgccuguaauuccagcacuu

SEQ ID NO: 203995 - RNA, 23 nt, Human
cgccuguaauuccagcacuuugg

SEQ ID NO: 203996 - RNA, 24 nt, Human
cgccuguaauuccagcacuuuggg

SEQ ID NO: 203997 - RNA, 21 nt, Human
cgggcgaaucauccgaggucg

SEQ ID NO: 203998 - RNA, 21 nt, Human
cguccagcuggcuccagaagu

SEQ ID NO: 203999 - RNA, 18 nt, Human
cugcacuccagccugggc

SEQ ID NO: 204000 - RNA, 18 nt, Human
cugcacuccagccugggc

SEQ ID NO: 204001 - RNA, 18 nt, Human
cugcacuccagccugggc

SEQ ID NO: 204002 - RNA, 20 nt, Human
cugcacuccagccugggcga

SEQ ID NO: 204003 - RNA, 21 nt, Human
cugcacuccagccugggcgac

SEQ ID NO: 204004 - RNA, 21 nt, Human
cugcacuccagccugggcgac

SEQ ID NO: 204005 - RNA, 20 nt, Human
cugcugcacuccagccuggg

SEQ ID NO: 204006 - RNA, 24 nt, Human
cugcugcacuccagccugggcgac

SEQ ID NO: 204007 - RNA, 24 nt, Human
gaagguucgccuguaauuccagca

SEQ ID NO: 204008 - RNA, 22 nt, Human
gaagguuucucacuuguaagga

SEQ ID NO: 204009 - RNA, 24 nt, Human
gccaacauggugaaaucccgucuc

SEQ ID NO: 204010 - RNA, 22 nt, Human
gccgcgccgcacugggcaaacc

SEQ ID NO: 204011 - RNA, 24 nt, Human
gcugcugcacuccagccugggcga

SEQ ID NO: 204012 - RNA, 19 nt, Human
ggagaacccgcgaacccgg

SEQ ID NO: 204013 - RNA, 19 nt, Human
gggguucaagaccagcaug

SEQ ID NO: 204014 - RNA, 18 nt, Human
guccagcuggcuccagaa

SEQ ID NO: 204015 - RNA, 20 nt, Human
guccagcuggcuccagaagu

SEQ ID NO: 204016 - RNA, 24 nt, Human
gugaagguucgccuguaauuccag

SEQ ID NO: 204017 - RNA, 21 nt, Human
uauguggucucuuguguucca

SEQ ID NO: 204018 - RNA, 20 nt, Human
uccagccugggcgacugaga

SEQ ID NO: 204019 - RNA, 22 nt, Human
uccgaggucggggguucaagac

SEQ ID NO: 204020 - RNA, 23 nt, Human
uccgaggucggggguucaagacc

SEQ ID NO: 204021 - RNA, 21 nt, Human
uccucaaacaaaacagaacaa

SEQ ID NO: 204022 - RNA, 24 nt, Human
ugagacugugcugcugcacuccag

SEQ ID NO: 204023 - RNA, 22 nt, Human
ugaggcggagaacccgcgaacc

SEQ ID NO: 204024 - RNA, 21 nt, Human
ugaggugagacugugcugcug

SEQ ID NO: 204025 - RNA, 18 nt, Human
ugagugaagguucgccug

SEQ ID NO: 204026 - RNA, 22 nt, Human
ugcaccccuuacccccauccac

SEQ ID NO: 204027 - RNA, 20 nt, Human
ugcugcacuccagccugggc

SEQ ID NO: 204028 - RNA, 23 nt, Human
ugcugcacuccagccugggcgac

SEQ ID NO: 204029 - RNA, 21 nt, Human
uggccaacauggugaaauccc

SEQ ID NO: 204030 - RNA, 24 nt, Human
uggccaacauggugaaaucccguc

SEQ ID NO: 204031 - RNA, 19 nt, Human
ugggaggccgaggcgggcg

SEQ ID NO: 204032 - RNA, 24 nt, Human
ugggaggccgaggcgggcgaauca

SEQ ID NO: 204033 - RNA, 24 nt, Human
uggugagugccugcaaucccagcu

SEQ ID NO: 204034 - RNA, 24 nt, Human
ugguggugagugccugcaauccca

SEQ ID NO: 204035 - RNA, 24 nt, Human
uuagccgggcaugguggugagugc

SEQ ID NO: 204036 - RNA, 21 nt, Human
uuccuuuggcugaaaacuaug

SEQ ID NO: 204037 - RNA, 24 nt, Human
uucgccuguaauuccagcacuuug

SEQ ID NO: 204038 - RNA, 25 nt, Human
uugggaggccgaggcgggcgaauca

SEQ ID NO: 204039 - RNA, 21 nt, Human
uuguucagcuauguggucucu

SEQ ID NO: 204040 - RNA, 24 nt, Human
uuguucagcuauguggucucuugu

SEQ ID NO: 204041 - RNA, 24 nt, Human
uuuuuguuuuuguaugauaauguu

SEQ ID NO: 204042 - RNA, 18 nt, Human
uuuuuuuuuuuuuuuuug

SEQ ID NO: 204043 - RNA, 24 nt, Human
uuuuuuuuuuuuuuuuuuguuuuu

SEQ ID NO: 204044 - RNA, 24 nt, Human
aaacaagaccacacuggaaauuca

SEQ ID NO: 204045 - RNA, 19 nt, Human
aaagugcuaggauuacaug

SEQ ID NO: 204046 - RNA, 24 nt, Human
aaagugcuaggauuacaugcacga

SEQ ID NO: 204047 - RNA, 22 nt, Human
aaaugcugucagaacauuuucc

SEQ ID NO: 204048 - RNA, 20 nt, Human
aaccccgcuuuucauugacc

SEQ ID NO: 204049 - RNA, 26 nt, Human
aacucaaucccaugucaucaaugagg

SEQ ID NO: 204050 - RNA, 22 nt, Human
aagcaauugcuagaaaggcauu

SEQ ID NO: 204051 - RNA, 25 nt, Human
aagugauccucccaucucagccucc

SEQ ID NO: 204052 - RNA, 20 nt, Human
aauugcuagaaaggcauuug

SEQ ID NO: 204053 - RNA, 20 nt, Human
acagagauguccuaggacuc

SEQ ID NO: 204054 - RNA, 19 nt, Human
acucuguaacacugaggcu

SEQ ID NO: 204055 - RNA, 24 nt, Human
acucuguugcccaggaggaaaugg

SEQ ID NO: 204056 - RNA, 19 nt, Human
acuuuguuacccagguugg

SEQ ID NO: 204057 - RNA, 21 nt, Human
agaauaaaaugaggcauacag

SEQ ID NO: 204058 - RNA, 18 nt, Human
agcaaguuaccaaauacc

SEQ ID NO: 204059 - RNA, 20 nt, Human
aggaaauggcagugguguga

SEQ ID NO: 204060 - RNA, 23 nt, Human
agggucucacucuguugcccagg

SEQ ID NO: 204061 - RNA, 23 nt, Human
agguaaccaacucaaucccaugu

SEQ ID NO: 204062 - RNA, 18 nt, Human
aguagccggaaaccugag

SEQ ID NO: 204063 - RNA, 24 nt, Human
aguggcuuuuuuuuuuucuccuuu

SEQ ID NO: 204064 - RNA, 24 nt, Human
aucccaugucaucaaugaacagca

SEQ ID NO: 204065 - RNA, 22 nt, Human
aucucauauuuuuuuuuuccag

SEQ ID NO: 204066 - RNA, 23 nt, Human
augcagcaaaugccagcaaccuu

SEQ ID NO: 204067 - RNA, 24 nt, Human
caaagugcuaggauuacaugcacg

SEQ ID NO: 204068 - RNA, 25 nt, Human
caagaaguagaagagaaagcagcaa

SEQ ID NO: 204069 - RNA, 27 nt, Human
caagugauccucccaucucagccuccc

SEQ ID NO: 204070 - RNA, 23 nt, Human
cacaagaaguagaagagaaagca

SEQ ID NO: 204071 - RNA, 23 nt, Human
cacuugaaaauagaaguuaauuu

SEQ ID NO: 204072 - RNA, 24 nt, Human
cacuuuguuacccagguuggucuc

SEQ ID NO: 204073 - RNA, 20 nt, Human
cagaguaaagcacaagaagu

SEQ ID NO: 204074 - RNA, 19 nt, Human
cagcaaaugccagcaaccu

SEQ ID NO: 204075 - RNA, 21 nt, Human
cauaucuagaaauuugcuuca

SEQ ID NO: 204076 - RNA, 24 nt, Human
caucucagccucccaaagugcuag

SEQ ID NO: 204077 - RNA, 19 nt, Human
ccaaagugcuaggauuaca

SEQ ID NO: 204078 - RNA, 21 nt, Human
ccacaguugccacggcaacua

SEQ ID NO: 204079 - RNA, 21 nt, Human
cccacacucuguaacacugag

SEQ ID NO: 204080 - RNA, 18 nt, Human
cccaggaggaaauggcag

SEQ ID NO: 204081 - RNA, 20 nt, Human
ccccuguagcugggaccaca

SEQ ID NO: 204082 - RNA, 22 nt, Human
ccucaagugauccucccaucuc

SEQ ID NO: 204083 - RNA, 22 nt, Human
ccuugagcuucugggcucaagu

SEQ ID NO: 204084 - RNA, 19 nt, Human
cgagccuccgugccuggcc

SEQ ID NO: 204085 - RNA, 21 nt, Human
cuaauuuuuuccaaucucaua

SEQ ID NO: 204086 - RNA, 24 nt, Human
cucaagugauccucccaucucagc

SEQ ID NO: 204087 - RNA, 25 nt, Human
cucaccauucaccuugauguaccca

SEQ ID NO: 204088 - RNA, 24 nt, Human
cucacugcagccuugagcuucugg

SEQ ID NO: 204089 - RNA, 21 nt, Human
cucagccuccccuguagcugg

SEQ ID NO: 204090 - RNA, 23 nt, Human
cuccccuguagcugggaccacag

SEQ ID NO: 204091 - RNA, 19 nt, Human
cuccgugccuggccgagcc

SEQ ID NO: 204092 - RNA, 23 nt, Human
cucuguugcccaggaggaaaugg

SEQ ID NO: 204093 - RNA, 26 nt, Human
cuguagcugggaccacaguugugugc

SEQ ID NO: 204094 - RNA, 22 nt, Human
cuuggccucaagugauccuccc

SEQ ID NO: 204095 - RNA, 24 nt, Human
gagcuucugggcucaagugauccu

SEQ ID NO: 204096 - RNA, 21 nt, Human
gcaguggugugaacuuggcuc

SEQ ID NO: 204097 - RNA, 23 nt, Human
gcgucucagccuccccuguagcu

SEQ ID NO: 204098 - RNA, 19 nt, Human
gcuuuuuuuuuuucuccuu

SEQ ID NO: 204099 - RNA, 19 nt, Human
ggaggaaauggcaguggug

SEQ ID NO: 204100 - RNA, 24 nt, Human
gugauccucccaucucagccuccc

SEQ ID NO: 204101 - RNA, 24 nt, Human
gugauccuugcgucucagccuccc

SEQ ID NO: 204102 - RNA, 19 nt, Human
guggcuuuuuuuuuuucuc

SEQ ID NO: 204103 - RNA, 18 nt, Human
uaaacaagaccacacugg

SEQ ID NO: 204104 - RNA, 21 nt, Human
uaaacaagaccacacuggaaa

SEQ ID NO: 204105 - RNA, 22 nt, Human
uaaaccgauggaucugaaagca

SEQ ID NO: 204106 - RNA, 25 nt, Human
uaaauaguauaaaccgauggaucug

SEQ ID NO: 204107 - RNA, 25 nt, Human
uaauuuuuugauuuuuuuuguagag

SEQ ID NO: 204108 - RNA, 22 nt, Human
uaccaaauaccucgauagugcu

SEQ ID NO: 204109 - RNA, 24 nt, Human
uaggauuacaugcacgagccuccg

SEQ ID NO: 204110 - RNA, 24 nt, Human
uagggucucacucuguugcccagg

SEQ ID NO: 204111 - RNA, 22 nt, Human
uaguggcuuuuuuuuuuucucc

SEQ ID NO: 204112 - RNA, 22 nt, Human
uauuaaacaagaccacacugga

SEQ ID NO: 204113 - RNA, 24 nt, Human
ucacugcagccuugagcuucuggg

SEQ ID NO: 204114 - RNA, 18 nt, Human
ucccaaagugcuaggauu

SEQ ID NO: 204115 - RNA, 25 nt, Human
uccucaauccugacacaguuacauc

SEQ ID NO: 204116 - RNA, 27 nt, Human
uccucccaucucagccucccaaagugc

SEQ ID NO: 204117 - RNA, 19 nt, Human
ucucacucuguugcccagg

SEQ ID NO: 204118 - RNA, 20 nt, Human
ucucacucuguugcccagga

SEQ ID NO: 204119 - RNA, 21 nt, Human
ucucacucuguugcccaggag

SEQ ID NO: 204120 - RNA, 23 nt, Human
ucucacucuguugcccaggagga

SEQ ID NO: 204121 - RNA, 19 nt, Human
ucucacuuuguuacccagg

SEQ ID NO: 204122 - RNA, 19 nt, Human
ucucacuuuguuacccagg

SEQ ID NO: 204123 - RNA, 19 nt, Human
ucucacuuuguuacccagg

SEQ ID NO: 204124 - RNA, 20 nt, Human
ucucacuuuguuacccaggu

SEQ ID NO: 204125 - RNA, 23 nt, Human
ucucacuuuguuacccagguugg

SEQ ID NO: 204126 - RNA, 21 nt, Human
ucucagccucccaaagugcua

SEQ ID NO: 204127 - RNA, 19 nt, Human
ucugggcucaagugauccu

SEQ ID NO: 204128 - RNA, 20 nt, Human
ucugggcucaagugauccuu

SEQ ID NO: 204129 - RNA, 18 nt, Human
ugaaaugcagcaaaugcc

SEQ ID NO: 204130 - RNA, 23 nt, Human
ugaaaugcugucagaacauuuuc

SEQ ID NO: 204131 - RNA, 19 nt, Human
ugcaugcaugaugcaguca

SEQ ID NO: 204132 - RNA, 19 nt, Human
ugcccaggaggaaauggca

SEQ ID NO: 204133 - RNA, 20 nt, Human
ugcuaggauuacaugcacga

SEQ ID NO: 204134 - RNA, 24 nt, Human
ugcucagugugccuuccacaguug

SEQ ID NO: 204135 - RNA, 21 nt, Human
ugcuguucucccggagcuggc

SEQ ID NO: 204136 - RNA, 19 nt, Human
uggaaccaagcagaauggu

SEQ ID NO: 204137 - RNA, 18 nt, Human
uggccucaagugauccuc

SEQ ID NO: 204138 - RNA, 21 nt, Human
uggccucaagugauccuccca

SEQ ID NO: 204139 - RNA, 24 nt, Human
uggccucaagugauccucccaucu

SEQ ID NO: 204140 - RNA, 25 nt, Human
uggcucacugcagccuugagcuucu

SEQ ID NO: 204141 - RNA, 24 nt, Human
ugggcucaagugauccuugcgucu

SEQ ID NO: 204142 - RNA, 24 nt, Human
uggugugaacuuggcucacugcag

SEQ ID NO: 204143 - RNA, 21 nt, Human
uguccuaggacucuaccacug

SEQ ID NO: 204144 - RNA, 21 nt, Human
uuaguggcuuuuuuuuuuucu

SEQ ID NO: 204145 - RNA, 21 nt, Human
uucauugacagaauaaaauga

SEQ ID NO: 204146 - RNA, 22 nt, Human
uuccacaguugccacggcaacu

SEQ ID NO: 204147 - RNA, 20 nt, Human
uugaaggcaaggauuuuguu

SEQ ID NO: 204148 - RNA, 21 nt, Human
uugcccaggaggaaauggcag

SEQ ID NO: 204149 - RNA, 26 nt, Human
uuguagcagaugagguguagaaggac

SEQ ID NO: 204150 - RNA, 18 nt, Human
uuucugcucaccauucac

SEQ ID NO: 204151 - RNA, 18 nt, Human
uuuuuuuguagagacagg

SEQ ID NO: 204152 - RNA, 21 nt, Human
auauaauauauucugggcaca

SEQ ID NO: 204153 - RNA, 23 nt, Human
auauucugggcacauuuacaucu

SEQ ID NO: 204154 - RNA, 21 nt, Human
auauucuuaauacuuacaucu

SEQ ID NO: 204155 - RNA, 22 nt, Human
aucucauucaucaucuuacuca

SEQ ID NO: 204156 - RNA, 18 nt, Human
cagagugcuggauuguuu

SEQ ID NO: 204157 - RNA, 19 nt, Human
gagaugauuugauauauga

SEQ ID NO: 204158 - RNA, 22 nt, Human
uauucugggcacauuuacaucu

SEQ ID NO: 204159 - RNA, 20 nt, Human
uauucuuaauacuuacaucu

SEQ ID NO: 204160 - RNA, 18 nt, Human
uccaaauuaggaaaauua

SEQ ID NO: 204161 - RNA, 22 nt, Human
uccgaacaguggucagcauggu

SEQ ID NO: 204162 - RNA, 21 nt, Human
uuaaagccugaaauuuauuga

SEQ ID NO: 204163 - RNA, 21 nt, Human
uucugugauucaaucccguuc

SEQ ID NO: 204164 - RNA, 21 nt, Human
uugaugacaacugccaguucu

SEQ ID NO: 204165 - RNA, 24 nt, Human
aaaauuuauccacaguugugugaa

SEQ ID NO: 204166 - RNA, 26 nt, Human
aaacaguaaauauagaacccuaaauc

SEQ ID NO: 204167 - RNA, 23 nt, Human
aaacggacgaaggccaucacacg

SEQ ID NO: 204168 - RNA, 19 nt, Human
aaacugcacagaacuuacg

SEQ ID NO: 204169 - RNA, 23 nt, Human
aaauauagaacccuaaaucucac

SEQ ID NO: 204170 - RNA, 27 nt, Human
aacaguaaauauagaacccuaaaucuc

SEQ ID NO: 204171 - RNA, 20 nt, Human
aagcguccuccgcaagcacc

SEQ ID NO: 204172 - RNA, 19 nt, Human
aaggaccagaaugaaaaca

SEQ ID NO: 204173 - RNA, 22 nt, Human
aauuaagaaaauauuuuaauaa

SEQ ID NO: 204174 - RNA, 18 nt, Human
acgacgaucgcgacgacu

SEQ ID NO: 204175 - RNA, 23 nt, Human
acuacuacuugaugacacaagaa

SEQ ID NO: 204176 - RNA, 26 nt, Human
agaaaauauuuuaauaaggcucaaaa

SEQ ID NO: 204177 - RNA, 21 nt, Human
agaaaggaaggaagaaaggaa

SEQ ID NO: 204178 - RNA, 24 nt, Human
agaaaucagauguuuccaguuuuu

SEQ ID NO: 204179 - RNA, 19 nt, Human
agaccuaacaggcaaggca

SEQ ID NO: 204180 - RNA, 24 nt, Human
agcaaaaauaaacauuuuauucau

SEQ ID NO: 204181 - RNA, 20 nt, Human
aggaagaaaggaaaaaagga

SEQ ID NO: 204182 - RNA, 24 nt, Human
aggaagaaaggaaaaaaggaaggg

SEQ ID NO: 204183 - RNA, 21 nt, Human
aggaagaccaggcagcggucg

SEQ ID NO: 204184 - RNA, 23 nt, Human
aggaagcgccggcgagucgaccu

SEQ ID NO: 204185 - RNA, 21 nt, Human
aggaaggaaagaagggaggga

SEQ ID NO: 204186 - RNA, 22 nt, Human
aggaccagaaugaaaacacuaa

SEQ ID NO: 204187 - RNA, 24 nt, Human
aggcaggccaauggagcagccaag

SEQ ID NO: 204188 - RNA, 22 nt, Human
aguucagaaaucagauguuucc

SEQ ID NO: 204189 - RNA, 22 nt, Human
auauuuuguuucuuuguaaaac

SEQ ID NO: 204190 - RNA, 20 nt, Human
aucacacgagcgccacgacg

SEQ ID NO: 204191 - RNA, 19 nt, Human
aucagauguuuccaguuuu

SEQ ID NO: 204192 - RNA, 25 nt, Human
augcaacauacauggcauacaugca

SEQ ID NO: 204193 - RNA, 20 nt, Human
auucaucaaacaaucaaaau

SEQ ID NO: 204194 - RNA, 23 nt, Human
caaccauucacaaaaaauaccau

SEQ ID NO: 204195 - RNA, 24 nt, Human
caacgauguacagacagaagaaga

SEQ ID NO: 204196 - RNA, 26 nt, Human
caagcaaaugacugauguuguaauga

SEQ ID NO: 204197 - RNA, 24 nt, Human
caaggcaggccaauggagcagcca

SEQ ID NO: 204198 - RNA, 20 nt, Human
caccaucuguaugugcagaa

SEQ ID NO: 204199 - RNA, 24 nt, Human
cacuuucacaaauuagcugcagcc

SEQ ID NO: 204200 - RNA, 21 nt, Human
cagaacuuacgaauagcacac

SEQ ID NO: 204201 - RNA, 21 nt, Human
caggccaauggagcagccaag

SEQ ID NO: 204202 - RNA, 23 nt, Human
caguaaauaccaacacaacauuc

SEQ ID NO: 204203 - RNA, 20 nt, Human
caucucauuauccuuccacu

SEQ ID NO: 204204 - RNA, 20 nt, Human
ccaaaguuuaaaauugagaa

SEQ ID NO: 204205 - RNA, 21 nt, Human
ccaacagaaaaauuaaagaag

SEQ ID NO: 204206 - RNA, 19 nt, Human
cccccggcuagguuuggcu

SEQ ID NO: 204207 - RNA, 19 nt, Human
cccuuguggcagacuauug

SEQ ID NO: 204208 - RNA, 19 nt, Human
ccgcaaccucgcgccucgg

SEQ ID NO: 204209 - RNA, 19 nt, Human
ccuccgcaagcaccagagc

SEQ ID NO: 204210 - RNA, 19 nt, Human
ccuggguugggaaauaacu

SEQ ID NO: 204211 - RNA, 22 nt, Human
cgacgacaacgauguacagaca

SEQ ID NO: 204212 - RNA, 23 nt, Human
cgcugagcugcgcugcgcugcgc

SEQ ID NO: 204213 - RNA, 22 nt, Human
cggcugcaaucgcccagcggag

SEQ ID NO: 204214 - RNA, 24 nt, Human
cuaucuuacuguguuuauaugugu

SEQ ID NO: 204215 - RNA, 21 nt, Human
cuccgcaagcaccagagcgcc

SEQ ID NO: 204216 - RNA, 21 nt, Human
cucugcacuaaucgcgucuuc

SEQ ID NO: 204217 - RNA, 23 nt, Human
cugcuaaauuaaguccuauagac

SEQ ID NO: 204218 - RNA, 21 nt, Human
cuuagagagcagcaggcccac

SEQ ID NO: 204219 - RNA, 21 nt, Human
cuuccaaaauuuauccacagu

SEQ ID NO: 204220 - RNA, 23 nt, Human
cuuccacuucuguagucccgguu

SEQ ID NO: 204221 - RNA, 20 nt, Human
cuuucuucuucguuggcccc

SEQ ID NO: 204222 - RNA, 21 nt, Human
cuuuucgcuccgcuaucuuac

SEQ ID NO: 204223 - RNA, 18 nt, Human
gaaagagagaaaggaagg

SEQ ID NO: 204224 - RNA, 23 nt, Human
gacgacuccgacgacaacgaugu

SEQ ID NO: 204225 - RNA, 24 nt, Human
gauugcuucagucuuaagcaacca

SEQ ID NO: 204226 - RNA, 20 nt, Human
gcaaggcagguagacuugac

SEQ ID NO: 204227 - RNA, 19 nt, Human
gcagcucuuccacugcccu

SEQ ID NO: 204228 - RNA, 22 nt, Human
gccaucacacgagcgccacgac

SEQ ID NO: 204229 - RNA, 21 nt, Human
gcccugauaguucagaaauca

SEQ ID NO: 204230 - RNA, 23 nt, Human
gccucggcggagggagaggaaug

SEQ ID NO: 204231 - RNA, 18 nt, Human
gcugagcugcgcugcgcu

SEQ ID NO: 204232 - RNA, 19 nt, Human
gcuugaaaacuuuucaugg

SEQ ID NO: 204233 - RNA, 22 nt, Human
ggaaggaagcguccuccgcaag

SEQ ID NO: 204234 - RNA, 18 nt, Human
ggaauggagggagcucgg

SEQ ID NO: 204235 - RNA, 20 nt, Human
ggagcccgcggcagucggug

SEQ ID NO: 204236 - RNA, 19 nt, Human
ggccccuaacuaacuacac

SEQ ID NO: 204237 - RNA, 18 nt, Human
gugcgccccccggcuagg

SEQ ID NO: 204238 - RNA, 24 nt, Human
uaaaacuuccaaaguuucuaccau

SEQ ID NO: 204239 - RNA, 25 nt, Human
uaaaauaccacuauguuuagggaca

SEQ ID NO: 204240 - RNA, 21 nt, Human
uaacaaaugugcugugagcua

SEQ ID NO: 204241 - RNA, 26 nt, Human
uaacaggcuagguucaucauaucauc

SEQ ID NO: 204242 - RNA, 20 nt, Human
uaacccacuagcguccggga

SEQ ID NO: 204243 - RNA, 27 nt, Human
uaagaacuagcaucaugaauucuucca

SEQ ID NO: 204244 - RNA, 22 nt, Human
uaagacaacacuuugcaaccau

SEQ ID NO: 204245 - RNA, 23 nt, Human
uaaggaccagaaugaaaacacua

SEQ ID NO: 204246 - RNA, 24 nt, Human
uaaguaacugucaagcguaagaac

SEQ ID NO: 204247 - RNA, 21 nt, Human
uaauaaucagaauuugaacac

SEQ ID NO: 204248 - RNA, 19 nt, Human
uacaauuaucacauggacu

SEQ ID NO: 204249 - RNA, 22 nt, Human
uacaggaauuaggaauaagaca

SEQ ID NO: 204250 - RNA, 18 nt, Human
uauuaaguacuacuacuu

SEQ ID NO: 204251 - RNA, 24 nt, Human
uauuuacauuaguuaagaccaaca

SEQ ID NO: 204252 - RNA, 19 nt, Human
ucaaaacccaauugauguu

SEQ ID NO: 204253 - RNA, 19 nt, Human
ucaagcaaaugacugaugu

SEQ ID NO: 204254 - RNA, 22 nt, Human
ucacauggacuucuuuaaaaca

SEQ ID NO: 204255 - RNA, 23 nt, Human
ucagucuuaagcaaccaaaguuu

SEQ ID NO: 204256 - RNA, 23 nt, Human
ucaucaccuuuacaauuaucaca

SEQ ID NO: 204257 - RNA, 23 nt, Human
ucaucauaucauccuuuaguugu

SEQ ID NO: 204258 - RNA, 18 nt, Human
uccuccgcaagcaccaga

SEQ ID NO: 204259 - RNA, 18 nt, Human
ucuucuuucuucuucguu

SEQ ID NO: 204260 - RNA, 19 nt, Human
ugaaauauaaccacuguca

SEQ ID NO: 204261 - RNA, 23 nt, Human
ugaaaugggcacguauggaaaua

SEQ ID NO: 204262 - RNA, 18 nt, Human
ugaacacuguccuuaaga

SEQ ID NO: 204263 - RNA, 21 nt, Human
ugaagcacacaaauuuccagg

SEQ ID NO: 204264 - RNA, 23 nt, Human
ugacaaugucaaauuuuugcccc

SEQ ID NO: 204265 - RNA, 24 nt, Human
ugacacaagaaucauuaacaaaug

SEQ ID NO: 204266 - RNA, 22 nt, Human
ugagaacacagaccaaggguuu

SEQ ID NO: 204267 - RNA, 19 nt, Human
ugccaccugagaugaacau

SEQ ID NO: 204268 - RNA, 19 nt, Human
ugcgcugagcugcgcugcg

SEQ ID NO: 204269 - RNA, 22 nt, Human
ugcuguguuucuucagccauuu

SEQ ID NO: 204270 - RNA, 21 nt, Human
uggagggagcucggcgcgaua

SEQ ID NO: 204271 - RNA, 22 nt, Human
uggccaacacuuauuguaacac

SEQ ID NO: 204272 - RNA, 20 nt, Human
uggccccuaacuaacuacac

SEQ ID NO: 204273 - RNA, 25 nt, Human
uggccccuaacuaacuacacuacuc

SEQ ID NO: 204274 - RNA, 19 nt, Human
uggccugacuuuagcaaug

SEQ ID NO: 204275 - RNA, 23 nt, Human
uguaauaaucagaauuugaacac

SEQ ID NO: 204276 - RNA, 19 nt, Human
uguguugagaacacagacc

SEQ ID NO: 204277 - RNA, 21 nt, Human
uguugagaacacagaccaagg

SEQ ID NO: 204278 - RNA, 21 nt, Human
uuagcaaugcuugaaaacuuu

SEQ ID NO: 204279 - RNA, 19 nt, Human
uucaacagaccuaacaggc

SEQ ID NO: 204280 - RNA, 24 nt, Human
uucacaaaaaauaccauuugacaa

SEQ ID NO: 204281 - RNA, 22 nt, Human
uucauguaauauuugggcaugc

SEQ ID NO: 204282 - RNA, 18 nt, Human
uucugccucugacucacu

SEQ ID NO: 204283 - RNA, 22 nt, Human
uucuguagucccgguuaaccag

SEQ ID NO: 204284 - RNA, 20 nt, Human
uuggccccuaacuaacuaca

SEQ ID NO: 204285 - RNA, 22 nt, Human
uuuaacaugcacuucaacagac

SEQ ID NO: 204286 - RNA, 24 nt, Human
uuugcaaccauucacaaaaaauac

SEQ ID NO: 204287 - RNA, 19 nt, Human
aaccaccacacccgaccca

SEQ ID NO: 204288 - RNA, 22 nt, Human
aagugccagcacaauuacugaa

SEQ ID NO: 204289 - RNA, 23 nt, Human
agcuuuuuaacccacuauuauuc

SEQ ID NO: 204290 - RNA, 22 nt, Human
aggagaaaugcaaacuugccua

SEQ ID NO: 204291 - RNA, 23 nt, Human
caagaaccaccacacccgaccca

SEQ ID NO: 204292 - RNA, 19 nt, Human
caccacacccgacccagaa

SEQ ID NO: 204293 - RNA, 21 nt, Human
cacccgacccagaaagcuuuu

SEQ ID NO: 204294 - RNA, 22 nt, Human
cacccgacccagaaagcuuuuu

SEQ ID NO: 204295 - RNA, 19 nt, Human
cagaucccaaaaaggagaa

SEQ ID NO: 204296 - RNA, 20 nt, Human
ccaaaaaggagaaaugcaaa

SEQ ID NO: 204297 - RNA, 18 nt, Human
ccaccacacccgacccag

SEQ ID NO: 204298 - RNA, 20 nt, Human
gaaccaccacacccgaccca

SEQ ID NO: 204299 - RNA, 21 nt, Human
uaagugccagcacaauuacug

SEQ ID NO: 204300 - RNA, 18 nt, Human
uggaaugccgcucaauuu

SEQ ID NO: 204301 - RNA, 24 nt, Human
ugggcagaucccaaaaaggagaaa

SEQ ID NO: 204302 - RNA, 19 nt, Human
aaacagaaagaaaacuuaa

SEQ ID NO: 204303 - RNA, 24 nt, Human
aaagacauccagauuaaucugaag

SEQ ID NO: 204304 - RNA, 24 nt, Human
aacagaaagaaaacuuaaaggucc

SEQ ID NO: 204305 - RNA, 26 nt, Human
aagcaagacaggagcgacgccucugg

SEQ ID NO: 204306 - RNA, 18 nt, Human
aagcccacacagcaaaga

SEQ ID NO: 204307 - RNA, 18 nt, Human
aaggaagagcaaguggac

SEQ ID NO: 204308 - RNA, 19 nt, Human
aagucagaaucucacaugg

SEQ ID NO: 204309 - RNA, 23 nt, Human
aaguggacgucugggacugacaa

SEQ ID NO: 204310 - RNA, 19 nt, Human
acaaagccaaaaggcaggc

SEQ ID NO: 204311 - RNA, 26 nt, Human
acaacaauggaaacaauaacugacac

SEQ ID NO: 204312 - RNA, 23 nt, Human
acagcaaagaaggcguauuugga

SEQ ID NO: 204313 - RNA, 18 nt, Human
acccugugucuuccaugg

SEQ ID NO: 204314 - RNA, 22 nt, Human
accgggugcagucgcgcacaag

SEQ ID NO: 204315 - RNA, 21 nt, Human
accuucccgggacuucugcua

SEQ ID NO: 204316 - RNA, 25 nt, Human
agaaaaaaagagaauaugauaaaua

SEQ ID NO: 204317 - RNA, 27 nt, Human
agaaagaaaacuuaaagguccucuagu

SEQ ID NO: 204318 - RNA, 21 nt, Human
agaaucugggaagagggagug

SEQ ID NO: 204319 - RNA, 20 nt, Human
agcaauaagaaaaaaagaga

SEQ ID NO: 204320 - RNA, 25 nt, Human
agcggccacccccagccgcugagcc

SEQ ID NO: 204321 - RNA, 24 nt, Human
agcuuugaauaaaagacauccaga

SEQ ID NO: 204322 - RNA, 19 nt, Human
aggcaggcaggccauggcu

SEQ ID NO: 204323 - RNA, 19 nt, Human
aggcaggcaggccauggcu

SEQ ID NO: 204324 - RNA, 20 nt, Human
agggcgaagaagaggcaggg

SEQ ID NO: 204325 - RNA, 20 nt, Human
aggucaggggucuaaaaggc

SEQ ID NO: 204326 - RNA, 22 nt, Human
agugacgggaacaugucagaga

SEQ ID NO: 204327 - RNA, 20 nt, Human
aucugucuucagcuucccuc

SEQ ID NO: 204328 - RNA, 21 nt, Human
auggcugucuucugggucauu

SEQ ID NO: 204329 - RNA, 24 nt, Human
caacaauggaaacaauaacugaca

SEQ ID NO: 204330 - RNA, 22 nt, Human
caagaggaugcacguuuggacc

SEQ ID NO: 204331 - RNA, 18 nt, Human
caaguggacgucugggac

SEQ ID NO: 204332 - RNA, 21 nt, Human
cacagaacagggcgaagaaga

SEQ ID NO: 204333 - RNA, 21 nt, Human
cacagauguggaaaguggggu

SEQ ID NO: 204334 - RNA, 20 nt, Human
caccuugggggagcugcagg

SEQ ID NO: 204335 - RNA, 18 nt, Human
cacuauucaagaucucac

SEQ ID NO: 204336 - RNA, 26 nt, Human
cagcggccgcuuuuuuuuuuuuuuuu

SEQ ID NO: 204337 - RNA, 19 nt, Human
caggagcgacgccucuggc

SEQ ID NO: 204338 - RNA, 19 nt, Human
cagucgcgcacaagcagca

SEQ ID NO: 204339 - RNA, 20 nt, Human
cagucgcgcacaagcagcag

SEQ ID NO: 204340 - RNA, 22 nt, Human
cauaaggaagagcaaguggacg

SEQ ID NO: 204341 - RNA, 18 nt, Human
caucagugaccgagauag

SEQ ID NO: 204342 - RNA, 19 nt, Human
cauguccugaagaggagga

SEQ ID NO: 204343 - RNA, 20 nt, Human
cauguccugaagaggaggaa

SEQ ID NO: 204344 - RNA, 19 nt, Human
cauuuaccuucccgggacu

SEQ ID NO: 204345 - RNA, 20 nt, Human
ccaagcaaguaagcaagaca

SEQ ID NO: 204346 - RNA, 19 nt, Human
ccaaggcuuuuuagaagac

SEQ ID NO: 204347 - RNA, 19 nt, Human
ccagcggccaggacaccag

SEQ ID NO: 204348 - RNA, 19 nt, Human
cccacacagcaaagaaggc

SEQ ID NO: 204349 - RNA, 21 nt, Human
cccacagggucccgcugccag

SEQ ID NO: 204350 - RNA, 20 nt, Human
cccgggacuucugcuauggg

SEQ ID NO: 204351 - RNA, 25 nt, Human
cccuccagcgccaccugcuggaauc

SEQ ID NO: 204352 - RNA, 20 nt, Human
ccgcugccagaggcgaggga

SEQ ID NO: 204353 - RNA, 22 nt, Human
ccucaggugaagagaauaccgg

SEQ ID NO: 204354 - RNA, 20 nt, Human
ccucuggcuaagacaggaac

SEQ ID NO: 204355 - RNA, 19 nt, Human
ccuggcagauucgagcggc

SEQ ID NO: 204356 - RNA, 20 nt, Human
ccuggcagauucgagcggcc

SEQ ID NO: 204357 - RNA, 20 nt, Human
ccuugggggagcugcagggg

SEQ ID NO: 204358 - RNA, 24 nt, Human
cgagauaggacgcagcaagcuauc

SEQ ID NO: 204359 - RNA, 20 nt, Human
cgcagcaagcuaucgugcuu

SEQ ID NO: 204360 - RNA, 23 nt, Human
cguuccuuugaaacaaagccaaa

SEQ ID NO: 204361 - RNA, 25 nt, Human
cuggcacagaacagggcgaagaaga

SEQ ID NO: 204362 - RNA, 23 nt, Human
cugugucuuccauggaaaauaaa

SEQ ID NO: 204363 - RNA, 19 nt, Human
gaacauggcugugacggac

SEQ ID NO: 204364 - RNA, 18 nt, Human
gaaucugggaagagggag

SEQ ID NO: 204365 - RNA, 18 nt, Human
gacacagugagugacggg

SEQ ID NO: 204366 - RNA, 19 nt, Human
gacaccagagaccacgcgg

SEQ ID NO: 204367 - RNA, 25 nt, Human
gaccaagcaaguaagcaagacagga

SEQ ID NO: 204368 - RNA, 21 nt, Human
gauaucuggaagcccacacag

SEQ ID NO: 204369 - RNA, 18 nt, Human
gauccugcccuccugcac

SEQ ID NO: 204370 - RNA, 20 nt, Human
gcaauuuggguccucuggcu

SEQ ID NO: 204371 - RNA, 19 nt, Human
gcaccggguuccugcacug

SEQ ID NO: 204372 - RNA, 23 nt, Human
gcagauucgagcggccaccccca

SEQ ID NO: 204373 - RNA, 23 nt, Human
gcagcaacaaagccagauugaag

SEQ ID NO: 204374 - RNA, 20 nt, Human
gcagcacagccagggcggca

SEQ ID NO: 204375 - RNA, 22 nt, Human
gcgaagaagaggcagggauagc

SEQ ID NO: 204376 - RNA, 20 nt, Human
gcgagcaucucagggcagac

SEQ ID NO: 204377 - RNA, 18 nt, Human
ggaaagccucaggugaag

SEQ ID NO: 204378 - RNA, 19 nt, Human
ggagcugcaggggaaaaug

SEQ ID NO: 204379 - RNA, 18 nt, Human
ggcaaaagcagagaaucu

SEQ ID NO: 204380 - RNA, 22 nt, Human
ggcaauuuggguccucuggcuu

SEQ ID NO: 204381 - RNA, 20 nt, Human
ggcaggcaggccauggcuuc

SEQ ID NO: 204382 - RNA, 22 nt, Human
ggccgcuuuuuuuuuuuuuuuu

SEQ ID NO: 204383 - RNA, 18 nt, Human
gugcuuagaacgugagug

SEQ ID NO: 204384 - RNA, 21 nt, Human
uaaaaagugaacaaggaggcc

SEQ ID NO: 204385 - RNA, 23 nt, Human
uaagaaaaaaagagaauaugaua

SEQ ID NO: 204386 - RNA, 25 nt, Human
uaagaaaaaaagagaauaugauaaa

SEQ ID NO: 204387 - RNA, 22 nt, Human
uaagcaauaagaaaaaaagaga

SEQ ID NO: 204388 - RNA, 21 nt, Human
uacgauguugcuagcccugcc

SEQ ID NO: 204389 - RNA, 19 nt, Human
uagcccagcaggagagcga

SEQ ID NO: 204390 - RNA, 20 nt, Human
uauuccaaaguuucuuccug

SEQ ID NO: 204391 - RNA, 20 nt, Human
ucagagacaccagagaccac

SEQ ID NO: 204392 - RNA, 18 nt, Human
ucaugggaaagauccuga

SEQ ID NO: 204393 - RNA, 23 nt, Human
ucccgcugccagaggcgagggag

SEQ ID NO: 204394 - RNA, 19 nt, Human
uccucugacagaucucuga

SEQ ID NO: 204395 - RNA, 21 nt, Human
ucucagggcagacacgccagc

SEQ ID NO: 204396 - RNA, 22 nt, Human
ucuggaagcccacacagcaaag

SEQ ID NO: 204397 - RNA, 21 nt, Human
ucugucuucagcuucccucca

SEQ ID NO: 204398 - RNA, 21 nt, Human
ucuucugggucauugucccag

SEQ ID NO: 204399 - RNA, 20 nt, Human
ugaaagaacacuauucaaga

SEQ ID NO: 204400 - RNA, 19 nt, Human
ugacaagggggccaaccaa

SEQ ID NO: 204401 - RNA, 21 nt, Human
ugacaagggggccaaccaaga

SEQ ID NO: 204402 - RNA, 24 nt, Human
ugaccaagcaaguaagcaagacag

SEQ ID NO: 204403 - RNA, 21 nt, Human
ugagaugcuauuaaaccacag

SEQ ID NO: 204404 - RNA, 19 nt, Human
ugagugcacagauguggaa

SEQ ID NO: 204405 - RNA, 22 nt, Human
ugcaggggaaaaugaguuuccc

SEQ ID NO: 204406 - RNA, 20 nt, Human
ugcuguggagaccauuuucc

SEQ ID NO: 204407 - RNA, 18 nt, Human
uggacauaaggaagagca

SEQ ID NO: 204408 - RNA, 19 nt, Human
ugggaaagauccugaagcc

SEQ ID NO: 204409 - RNA, 18 nt, Human
ugguuuggucaaucuucu

SEQ ID NO: 204410 - RNA, 19 nt, Human
ugucuuagaaacagaaaga

SEQ ID NO: 204411 - RNA, 21 nt, Human
ugucuuagaaacagaaagaaa

SEQ ID NO: 204412 - RNA, 21 nt, Human
ugucuucugggucauuguccc

SEQ ID NO: 204413 - RNA, 18 nt, Human
uuaaagguccucuagucc

SEQ ID NO: 204414 - RNA, 25 nt, Human
uuaaagguccucuaguccaagcuug

SEQ ID NO: 204415 - RNA, 23 nt, Human
uucaguuccagaacuaaaguaaa

SEQ ID NO: 204416 - RNA, 24 nt, Human
aagagcuggcccaaggacucaggg

SEQ ID NO: 204417 - RNA, 18 nt, Human
aaggacucagggucuggg

SEQ ID NO: 204418 - RNA, 24 nt, Human
aaggggccuggagauggcagcagg

SEQ ID NO: 204419 - RNA, 18 nt, Human
accgcgacucaccacgcc

SEQ ID NO: 204420 - RNA, 21 nt, Human
aggaagcggcgggaagucaag

SEQ ID NO: 204421 - RNA, 22 nt, Human
aggacacaguguggcuauuugg

SEQ ID NO: 204422 - RNA, 25 nt, Human
aggaccgaggguggacggcaaggga

SEQ ID NO: 204423 - RNA, 20 nt, Human
caagcagaggucggaugggc

SEQ ID NO: 204424 - RNA, 21 nt, Human
cagagggcuucuaggagacuu

SEQ ID NO: 204425 - RNA, 23 nt, Human
cagaggucggaugggcucccugg

SEQ ID NO: 204426 - RNA, 18 nt, Human
cagcagggggucagcucu

SEQ ID NO: 204427 - RNA, 22 nt, Human
ccacgccccccgggggagguga

SEQ ID NO: 204428 - RNA, 19 nt, Human
cccccuggagggggcgggc

SEQ ID NO: 204429 - RNA, 23 nt, Human
ccccgggggaggugagugggggg

SEQ ID NO: 204430 - RNA, 21 nt, Human
ccccugaaggaagcggcggga

SEQ ID NO: 204431 - RNA, 22 nt, Human
ccuccuggucuuagccaagagc

SEQ ID NO: 204432 - RNA, 20 nt, Human
ccugcagguaaggggccugg

SEQ ID NO: 204433 - RNA, 18 nt, Human
ccuggagggggcgggcgg

SEQ ID NO: 204434 - RNA, 23 nt, Human
cgggaagucaagcagaggucgga

SEQ ID NO: 204435 - RNA, 21 nt, Human
cuacaggaggacacagugugg

SEQ ID NO: 204436 - RNA, 19 nt, Human
cuccccauuggccagcccc

SEQ ID NO: 204437 - RNA, 21 nt, Human
cuccccauuggccagccccaa

SEQ ID NO: 204438 - RNA, 24 nt, Human
cuugcagccuccuggucuuagcca

SEQ ID NO: 204439 - RNA, 24 nt, Human
gaccgcgacucaccacgccccccg

SEQ ID NO: 204440 - RNA, 26 nt, Human
gccgaggccccugaaggaagcggcgg

SEQ ID NO: 204441 - RNA, 21 nt, Human
ggaacgcggggagguggguga

SEQ ID NO: 204442 - RNA, 19 nt, Human
ggaacuccuggagcaaacg

SEQ ID NO: 204443 - RNA, 19 nt, Human
ggaagugggaacgcgggga

SEQ ID NO: 204444 - RNA, 18 nt, Human
ggagauggcagcaggggg

SEQ ID NO: 204445 - RNA, 18 nt, Human
ggaggugggugagggggg

SEQ ID NO: 204446 - RNA, 25 nt, Human
ggaggugggugaggggggugaaugg

SEQ ID NO: 204447 - RNA, 20 nt, Human
gggaagugggaacgcgggga

SEQ ID NO: 204448 - RNA, 18 nt, Human
gggauggggcaggaacuc

SEQ ID NO: 204449 - RNA, 18 nt, Human
gggcggcgacuacaggag

SEQ ID NO: 204450 - RNA, 18 nt, Human
ggggacaugggcgggggc

SEQ ID NO: 204451 - RNA, 21 nt, Human
ggggaggugggugaggggggu

SEQ ID NO: 204452 - RNA, 21 nt, Human
ggguuggaaguuuggggaggg

SEQ ID NO: 204453 - RNA, 25 nt, Human
ggugggagcagagcccccuggaggg

SEQ ID NO: 204454 - RNA, 19 nt, Human
gucagagugcggggaagug

SEQ ID NO: 204455 - RNA, 21 nt, Human
gucagcucugcgcaccccucu

SEQ ID NO: 204456 - RNA, 23 nt, Human
gucagcucugcgcaccccucugg

SEQ ID NO: 204457 - RNA, 20 nt, Human
guguggcuauuugggcgccc

SEQ ID NO: 204458 - RNA, 25 nt, Human
uaaggggccuggagauggcagcagg

SEQ ID NO: 204459 - RNA, 18 nt, Human
uaggguggcgggaaagca

SEQ ID NO: 204460 - RNA, 21 nt, Human
ucccugcagguaaggggccug

SEQ ID NO: 204461 - RNA, 21 nt, Human
ugaguggggggacaugggcga

SEQ ID NO: 204462 - RNA, 24 nt, Human
ugaguggggggacaugggcggggg

SEQ ID NO: 204463 - RNA, 20 nt, Human
ugcagguaaggggccuggaa

SEQ ID NO: 204464 - RNA, 23 nt, Human
uggacggggaccguccgugagaa

SEQ ID NO: 204465 - RNA, 22 nt, Human
ugggagcagagcccccuggagg

SEQ ID NO: 204466 - RNA, 22 nt, Human
uggggugggagcagagcccccu

SEQ ID NO: 204467 - RNA, 18 nt, Human
uguggcuauuugggcgcc

SEQ ID NO: 204468 - RNA, 23 nt, Human
cgcgccgccgugugccgcugccc

SEQ ID NO: 204469 - RNA, 22 nt, Human
ucuccauuguucugcuuucaau

SEQ ID NO: 204470 - RNA, 21 nt, Human
ugccuuguuuauuucaucucc

SEQ ID NO: 204471 - RNA, 21 nt, Human
ugccuuguuuauuucaucucc

SEQ ID NO: 204472 - RNA, 21 nt, Human
aagaagcuuggcagcccagac

SEQ ID NO: 204473 - RNA, 18 nt, Human
aagcaacacugggaaucc

SEQ ID NO: 204474 - RNA, 21 nt, Human
aagcucacaaaugccccuuga

SEQ ID NO: 204475 - RNA, 23 nt, Human
acaaaugccccuugagacacacu

SEQ ID NO: 204476 - RNA, 22 nt, Human
acaguagagaaacauacaguac

SEQ ID NO: 204477 - RNA, 22 nt, Human
accccaaagggaucagauguga

SEQ ID NO: 204478 - RNA, 19 nt, Human
accccacccccgcacccca

SEQ ID NO: 204479 - RNA, 18 nt, Human
agcaaagcucacaaaugc

SEQ ID NO: 204480 - RNA, 19 nt, Human
agcagccaacuuuccacgu

SEQ ID NO: 204481 - RNA, 25 nt, Human
aggaaaaccucauggcagggcgggg

SEQ ID NO: 204482 - RNA, 21 nt, Human
aggaggaggcugccgcccugc

SEQ ID NO: 204483 - RNA, 21 nt, Human
aggcaguuuugugaauauccg

SEQ ID NO: 204484 - RNA, 19 nt, Human
aggcggaaauucgggcccc

SEQ ID NO: 204485 - RNA, 21 nt, Human
aggcuggcaggcagcagcccu

SEQ ID NO: 204486 - RNA, 19 nt, Human
agggaagcuggggccucag

SEQ ID NO: 204487 - RNA, 22 nt, Human
caagcccagccuccgcucugcc

SEQ ID NO: 204488 - RNA, 21 nt, Human
cacaaaugccccuugagacac

SEQ ID NO: 204489 - RNA, 23 nt, Human
cacccccgcaccccaaagggauc

SEQ ID NO: 204490 - RNA, 23 nt, Human
caccccgcagcuccacguccacu

SEQ ID NO: 204491 - RNA, 19 nt, Human
cagggggcauucacucagu

SEQ ID NO: 204492 - RNA, 23 nt, Human
ccaagcccagccuccgcucugcc

SEQ ID NO: 204493 - RNA, 19 nt, Human
ccccuggccaagcccagcc

SEQ ID NO: 204494 - RNA, 23 nt, Human
ccccuggccaagcccagccuccg

SEQ ID NO: 204495 - RNA, 21 nt, Human
cccuggccaagcccagccucc

SEQ ID NO: 204496 - RNA, 21 nt, Human
ccgccuuggggaggagaagcu

SEQ ID NO: 204497 - RNA, 25 nt, Human
ccuacagcuugguaaguccuagggc

SEQ ID NO: 204498 - RNA, 24 nt, Human
ccuccguugucugcaggcucugac

SEQ ID NO: 204499 - RNA, 18 nt, Human
ccuccugccugccugggg

SEQ ID NO: 204500 - RNA, 21 nt, Human
ccugcaugccucugggcggca

SEQ ID NO: 204501 - RNA, 21 nt, Human
cgggagaccgggcgggggccg

SEQ ID NO: 204502 - RNA, 21 nt, Human
cggggccgggcgccgggcgcc

SEQ ID NO: 204503 - RNA, 19 nt, Human
cgugggaaggggaagccgg

SEQ ID NO: 204504 - RNA, 20 nt, Human
cucacaccccgcagcuccac

SEQ ID NO: 204505 - RNA, 18 nt, Human
cuccccgcggccuccugc

SEQ ID NO: 204506 - RNA, 22 nt, Human
cucugggcuggaccccaccccc

SEQ ID NO: 204507 - RNA, 22 nt, Human
cugcugcaucccagagcugcgu

SEQ ID NO: 204508 - RNA, 22 nt, Human
cuggaccccacccccgcacccc

SEQ ID NO: 204509 - RNA, 23 nt, Human
cuuccaugcgagcggcugcugca

SEQ ID NO: 204510 - RNA, 19 nt, Human
gaaggcaguuuugugaaua

SEQ ID NO: 204511 - RNA, 19 nt, Human
gagcggcugcugcauccca

SEQ ID NO: 204512 - RNA, 19 nt, Human
gccccauggccgccuuggg

SEQ ID NO: 204513 - RNA, 23 nt, Human
gccccuggccaagcccagccucc

SEQ ID NO: 204514 - RNA, 21 nt, Human
gccgcccugcugaggaccgag

SEQ ID NO: 204515 - RNA, 22 nt, Human
gcguuugucaggggggaagaag

SEQ ID NO: 204516 - RNA, 23 nt, Human
gcucugggcuggaccccaccccc

SEQ ID NO: 204517 - RNA, 19 nt, Human
ggaaggggaagccggcuca

SEQ ID NO: 204518 - RNA, 18 nt, Human
ggacaacgaggccgcugc

SEQ ID NO: 204519 - RNA, 23 nt, Human
ggacuggggcggacgcgcgguca

SEQ ID NO: 204520 - RNA, 22 nt, Human
ggcaggagcaggggggaggucc

SEQ ID NO: 204521 - RNA, 19 nt, Human
gggaagcuaggagaggagg

SEQ ID NO: 204522 - RNA, 22 nt, Human
gggaagcuaggagaggagggga

SEQ ID NO: 204523 - RNA, 20 nt, Human
gggccccuggccaagcccag

SEQ ID NO: 204524 - RNA, 23 nt, Human
gggccccuggccaagcccagccu

SEQ ID NO: 204525 - RNA, 26 nt, Human
gggccgggcgccgggcgccuacggaa

SEQ ID NO: 204526 - RNA, 18 nt, Human
gggcgcagggagcgcagg

SEQ ID NO: 204527 - RNA, 20 nt, Human
gggcuucccuccccggcacc

SEQ ID NO: 204528 - RNA, 21 nt, Human
ggggaggaaaaccucauggca

SEQ ID NO: 204529 - RNA, 21 nt, Human
ggggaggagaagcuuccccag

SEQ ID NO: 204530 - RNA, 18 nt, Human
gugcuccccgcggccucc

SEQ ID NO: 204531 - RNA, 24 nt, Human
gugcuccccgcggccuccugccug

SEQ ID NO: 204532 - RNA, 24 nt, Human
uacagcaaagcucacaaaugcccc

SEQ ID NO: 204533 - RNA, 19 nt, Human
uagggcagagggaagcugg

SEQ ID NO: 204534 - RNA, 25 nt, Human
uagggcagagggaagcuggggccuc

SEQ ID NO: 204535 - RNA, 24 nt, Human
uauuuuccauacaguagagaaaca

SEQ ID NO: 204536 - RNA, 21 nt, Human
uccaacacuccccaggcggaa

SEQ ID NO: 204537 - RNA, 22 nt, Human
uccccaggcagcagccaacuuu

SEQ ID NO: 204538 - RNA, 25 nt, Human
uccccaggcagcagccaacuuucca

SEQ ID NO: 204539 - RNA, 20 nt, Human
uccccaggcggaaauucggg

SEQ ID NO: 204540 - RNA, 26 nt, Human
uccccaggcggaaauucgggccccug

SEQ ID NO: 204541 - RNA, 18 nt, Human
uccccagggcgcagggag

SEQ ID NO: 204542 - RNA, 23 nt, Human
ucccuggaugaggggguggugcc

SEQ ID NO: 204543 - RNA, 21 nt, Human
uccguugucugcaggcucuga

SEQ ID NO: 204544 - RNA, 18 nt, Human
uccuagggcagagggaag

SEQ ID NO: 204545 - RNA, 19 nt, Human
uccuagggcagagggaagc

SEQ ID NO: 204546 - RNA, 19 nt, Human
ucugcaggcugccccaugg

SEQ ID NO: 204547 - RNA, 22 nt, Human
ugccccggacagccaggaggag

SEQ ID NO: 204548 - RNA, 21 nt, Human
ugccugcucugggcuggaccc

SEQ ID NO: 204549 - RNA, 21 nt, Human
uggaccccacccccgcacccc

SEQ ID NO: 204550 - RNA, 18 nt, Human
uggcugagaaccgugugc

SEQ ID NO: 204551 - RNA, 21 nt, Human
ugggaaggggaagccggcuca

SEQ ID NO: 204552 - RNA, 19 nt, Human
ugggacuggggcggacgcg

SEQ ID NO: 204553 - RNA, 19 nt, Human
ugggcuggaccccaccccc

SEQ ID NO: 204554 - RNA, 22 nt, Human
ugugcuuguaaacuuuauuuuc

SEQ ID NO: 204555 - RNA, 24 nt, Human
uuacagcaaagcucacaaaugccc

SEQ ID NO: 204556 - RNA, 25 nt, Human
uucaggaucaucuguacaaggggau

SEQ ID NO: 204557 - RNA, 26 nt, Human
aaaagaaaaagaacuucacauaaaag

SEQ ID NO: 204558 - RNA, 24 nt, Human
aaagaaaauaaauacacuaaccaa

SEQ ID NO: 204559 - RNA, 24 nt, Human
aaagugcugggauuacagguguga

SEQ ID NO: 204560 - RNA, 19 nt, Human
aaauccugaaaugcuccuc

SEQ ID NO: 204561 - RNA, 18 nt, Human
aacaggaugaacacaggg

SEQ ID NO: 204562 - RNA, 21 nt, Human
aacaggaugaacacagggcca

SEQ ID NO: 204563 - RNA, 19 nt, Human
aacauggcgaaaccccauu

SEQ ID NO: 204564 - RNA, 20 nt, Human
aacauggcgaaaccccauuu

SEQ ID NO: 204565 - RNA, 21 nt, Human
aacauggcgaaaccccauuuc

SEQ ID NO: 204566 - RNA, 21 nt, Human
aacauggcgaaaccccauuuc

SEQ ID NO: 204567 - RNA, 23 nt, Human
aagaaaacauugucaucaaaacu

SEQ ID NO: 204568 - RNA, 24 nt, Human
aagcgauccaccugccucggccuc

SEQ ID NO: 204569 - RNA, 23 nt, Human
aagcuccucuccaucuuccucug

SEQ ID NO: 204570 - RNA, 24 nt, Human
aaggugggcagaucguuggagccc

SEQ ID NO: 204571 - RNA, 20 nt, Human
aaguagcugggacuacaggc

SEQ ID NO: 204572 - RNA, 24 nt, Human
aaguagcugggacuacaggcacgu

SEQ ID NO: 204573 - RNA, 23 nt, Human
aagugauccucccaccucagucc

SEQ ID NO: 204574 - RNA, 18 nt, Human
aagugcugggauuacagg

SEQ ID NO: 204575 - RNA, 19 nt, Human
aagugcugggauuacaggu

SEQ ID NO: 204576 - RNA, 18 nt, Human
aaugauacagcuuccugu

SEQ ID NO: 204577 - RNA, 21 nt, Human
aaugcgcagguauacacccug

SEQ ID NO: 204578 - RNA, 26 nt, Human
acaacaacaacaaaaaucuaucaaaa

SEQ ID NO: 204579 - RNA, 26 nt, Human
acaacaacaacaacaaaaaucuauca

SEQ ID NO: 204580 - RNA, 26 nt, Human
acaauacuggagacacaucuuugguu

SEQ ID NO: 204581 - RNA, 20 nt, Human
acagagcaagacccugucuc

SEQ ID NO: 204582 - RNA, 24 nt, Human
acagagcaagacccugucucaaaa

SEQ ID NO: 204583 - RNA, 21 nt, Human
accguguucuaugccuuccag

SEQ ID NO: 204584 - RNA, 23 nt, Human
accucaguccccgaaguagcugg

SEQ ID NO: 204585 - RNA, 20 nt, Human
accugugcugaugggucuuc

SEQ ID NO: 204586 - RNA, 21 nt, Human
accugugcugaugggucuucu

SEQ ID NO: 204587 - RNA, 18 nt, Human
acgggcuuucaccauguu

SEQ ID NO: 204588 - RNA, 19 nt, Human
acgggcuuucaccauguug

SEQ ID NO: 204589 - RNA, 24 nt, Human
acgggcuuucaccauguugcccag

SEQ ID NO: 204590 - RNA, 24 nt, Human
acugcacuccagccugggugacag

SEQ ID NO: 204591 - RNA, 26 nt, Human
acugcacuccagccugggugacagag

SEQ ID NO: 204592 - RNA, 19 nt, Human
acugcagccucgaccuccu

SEQ ID NO: 204593 - RNA, 21 nt, Human
acuguagucccagcuacuugg

SEQ ID NO: 204594 - RNA, 18 nt, Human
agaacuucacauaaaaga

SEQ ID NO: 204595 - RNA, 24 nt, Human
agaugggaggaucacuugaaucug

SEQ ID NO: 204596 - RNA, 24 nt, Human
agcaaaucaccacagucagcuuuu

SEQ ID NO: 204597 - RNA, 24 nt, Human
agcacuuugggaggccaagguggg

SEQ ID NO: 204598 - RNA, 25 nt, Human
agcauguuucaacaacaacaacaac

SEQ ID NO: 204599 - RNA, 19 nt, Human
agccaccacaccuggccua

SEQ ID NO: 204600 - RNA, 18 nt, Human
agcccggggccgccgcga

SEQ ID NO: 204601 - RNA, 22 nt, Human
agccgcaccaguucugugggca

SEQ ID NO: 204602 - RNA, 23 nt, Human
agccgcaccaguucugugggcag

SEQ ID NO: 204603 - RNA, 20 nt, Human
agcggcugcccaggggacgc

SEQ ID NO: 204604 - RNA, 18 nt, Human
agcuaggcauuguggugc

SEQ ID NO: 204605 - RNA, 18 nt, Human
agcuccaggucucaccaa

SEQ ID NO: 204606 - RNA, 24 nt, Human
aggcacaguggcucacgccuguaa

SEQ ID NO: 204607 - RNA, 20 nt, Human
aggcacguaccaccacaccc

SEQ ID NO: 204608 - RNA, 23 nt, Human
aggcagcuccaggucucaccaag

SEQ ID NO: 204609 - RNA, 21 nt, Human
aggccaaggugggcagaucgu

SEQ ID NO: 204610 - RNA, 24 nt, Human
aggcugagaugggaggaucacuug

SEQ ID NO: 204611 - RNA, 21 nt, Human
agggagagucgagcuuuccau

SEQ ID NO: 204612 - RNA, 26 nt, Human
aggugggcagaucguuggagcccagg

SEQ ID NO: 204613 - RNA, 20 nt, Human
agguucaagugauccuccca

SEQ ID NO: 204614 - RNA, 22 nt, Human
agguugaggcugcagugaacug

SEQ ID NO: 204615 - RNA, 24 nt, Human
agugcaguagcaugaucuuggcuc

SEQ ID NO: 204616 - RNA, 24 nt, Human
aguggcucacgccuguaaucucag

SEQ ID NO: 204617 - RNA, 18 nt, Human
agugggaaguggaagggg

SEQ ID NO: 204618 - RNA, 21 nt, Human
augcgcagguauacacccugc

SEQ ID NO: 204619 - RNA, 24 nt, Human
auugugccacugcacuccagccug

SEQ ID NO: 204620 - RNA, 19 nt, Human
caaaccccgcuggcccaag

SEQ ID NO: 204621 - RNA, 28 nt, Human
caaaugccagcucaucuggggacuccuc

SEQ ID NO: 204622 - RNA, 21 nt, Human
caacaacaacaaaaaucuauc

SEQ ID NO: 204623 - RNA, 18 nt, Human
caacaacaacaacaacaa

SEQ ID NO: 204624 - RNA, 20 nt, Human
caacaacaacaacaacaaaa

SEQ ID NO: 204625 - RNA, 18 nt, Human
caacaggaugaacacagg

SEQ ID NO: 204626 - RNA, 23 nt, Human
caacuguagucccagcuacuugg

SEQ ID NO: 204627 - RNA, 24 nt, Human
caacuguagucccagcuacuuggg

SEQ ID NO: 204628 - RNA, 23 nt, Human
cacaaaacacacacaggggcaca

SEQ ID NO: 204629 - RNA, 18 nt, Human
cacacacacacacacaca

SEQ ID NO: 204630 - RNA, 20 nt, Human
cacacacacacacacacaca

SEQ ID NO: 204631 - RNA, 18 nt, Human
cacacacaggggcacaga

SEQ ID NO: 204632 - RNA, 18 nt, Human
cacagacacaauacugga

SEQ ID NO: 204633 - RNA, 24 nt, Human
caccauguugcccaggcugcucuc

SEQ ID NO: 204634 - RNA, 27 nt, Human
caccauguugcccaggcugcucucgaa

SEQ ID NO: 204635 - RNA, 20 nt, Human
cacccucccauuccauccca

SEQ ID NO: 204636 - RNA, 26 nt, Human
cacccucccauuccaucccaucaucc

SEQ ID NO: 204637 - RNA, 21 nt, Human
caccucaguccccgaaguagc

SEQ ID NO: 204638 - RNA, 20 nt, Human
caccuggccuaaaagcucug

SEQ ID NO: 204639 - RNA, 19 nt, Human
cacgccccccgcgccgccc

SEQ ID NO: 204640 - RNA, 24 nt, Human
cacgccuguaaucucagcacuuug

SEQ ID NO: 204641 - RNA, 19 nt, Human
cacucagcaaaucaccaca

SEQ ID NO: 204642 - RNA, 22 nt, Human
cacuccagccugggugacagag

SEQ ID NO: 204643 - RNA, 23 nt, Human
cacuccagccugggugacagagc

SEQ ID NO: 204644 - RNA, 19 nt, Human
cacucccccucaccucuca

SEQ ID NO: 204645 - RNA, 19 nt, Human
cacugcacuccagccuggg

SEQ ID NO: 204646 - RNA, 21 nt, Human
cacugcacuccagccugggug

SEQ ID NO: 204647 - RNA, 22 nt, Human
cacugcacuccagccuggguga

SEQ ID NO: 204648 - RNA, 23 nt, Human
cacugcacuccagccugggugac

SEQ ID NO: 204649 - RNA, 24 nt, Human
cacugcacuccagccugggugaca

SEQ ID NO: 204650 - RNA, 25 nt, Human
cacugcacuccagccugggugacag

SEQ ID NO: 204651 - RNA, 19 nt, Human
cacugcagccucgaccucc

SEQ ID NO: 204652 - RNA, 24 nt, Human
cagcacuuugggaggccaaggugg

SEQ ID NO: 204653 - RNA, 20 nt, Human
cagccucgaccuccuagguu

SEQ ID NO: 204654 - RNA, 23 nt, Human
cagccucgaccuccuagguucaa

SEQ ID NO: 204655 - RNA, 24 nt, Human
cagcuggauacagucagacaacac

SEQ ID NO: 204656 - RNA, 19 nt, Human
cagcuuucucccccaaccu

SEQ ID NO: 204657 - RNA, 22 nt, Human
caggcuuugggucuguggauuc

SEQ ID NO: 204658 - RNA, 20 nt, Human
caucacucccccucaccucu

SEQ ID NO: 204659 - RNA, 21 nt, Human
caucagggguuccagcaaguu

SEQ ID NO: 204660 - RNA, 20 nt, Human
caucccaucaucccucuucc

SEQ ID NO: 204661 - RNA, 24 nt, Human
caucccccucugaccauggcagcc

SEQ ID NO: 204662 - RNA, 24 nt, Human
cauguugcccaggcugcucucgaa

SEQ ID NO: 204663 - RNA, 23 nt, Human
ccaaagccuccucagcuuucucc

SEQ ID NO: 204664 - RNA, 20 nt, Human
ccaaagugcugggauuacag

SEQ ID NO: 204665 - RNA, 21 nt, Human
ccaaagugcugggauuacagg

SEQ ID NO: 204666 - RNA, 21 nt, Human
ccaaagugcugggauuacagg

SEQ ID NO: 204667 - RNA, 24 nt, Human
ccaaagugcugggauuacaggugu

SEQ ID NO: 204668 - RNA, 20 nt, Human
ccaaauauccauucuguccc

SEQ ID NO: 204669 - RNA, 25 nt, Human
ccaaaugccucauuauuggaacacc

SEQ ID NO: 204670 - RNA, 20 nt, Human
ccacugcacuccagccuggg

SEQ ID NO: 204671 - RNA, 20 nt, Human
ccacugcacuccagccuggg

SEQ ID NO: 204672 - RNA, 21 nt, Human
ccacugcacuccagccugggu

SEQ ID NO: 204673 - RNA, 21 nt, Human
ccacugcacuccagccugggu

SEQ ID NO: 204674 - RNA, 23 nt, Human
ccacugcacuccagccuggguga

SEQ ID NO: 204675 - RNA, 24 nt, Human
ccacugcacuccagccugggugac

SEQ ID NO: 204676 - RNA, 21 nt, Human
ccagccccgccugggucuccg

SEQ ID NO: 204677 - RNA, 18 nt, Human
cccaaagaaagcugucuu

SEQ ID NO: 204678 - RNA, 22 nt, Human
cccagcaaacucgccgagcucu

SEQ ID NO: 204679 - RNA, 26 nt, Human
cccaggaguuugagaucagccugagc

SEQ ID NO: 204680 - RNA, 21 nt, Human
cccauuccaucccaucauccc

SEQ ID NO: 204681 - RNA, 22 nt, Human
ccccaaaccccgcuggcccaag

SEQ ID NO: 204682 - RNA, 24 nt, Human
cccccaaaaguucuuccucuuagg

SEQ ID NO: 204683 - RNA, 25 nt, Human
cccccaaccucagucccuuagugcc

SEQ ID NO: 204684 - RNA, 23 nt, Human
ccccgcccccaaaaguucuuccu

SEQ ID NO: 204685 - RNA, 24 nt, Human
ccccggcuucucccgccgccgccc

SEQ ID NO: 204686 - RNA, 25 nt, Human
ccccggcuucucccgccgccgcccu

SEQ ID NO: 204687 - RNA, 23 nt, Human
ccccucacuucccaggggaaaca

SEQ ID NO: 204688 - RNA, 18 nt, Human
ccccuuucaucacucccc

SEQ ID NO: 204689 - RNA, 24 nt, Human
cccgaaguagcugggacuacaggc

SEQ ID NO: 204690 - RNA, 23 nt, Human
cccgcccccaaaaguucuuccuc

SEQ ID NO: 204691 - RNA, 24 nt, Human
cccgccccgggucccguccaggaa

SEQ ID NO: 204692 - RNA, 18 nt, Human
cccgggucccguccagga

SEQ ID NO: 204693 - RNA, 19 nt, Human
cccugggcccagccccgcc

SEQ ID NO: 204694 - RNA, 24 nt, Human
ccgaaguagcugggacuacaggca

SEQ ID NO: 204695 - RNA, 19 nt, Human
ccgcccagcgaggcgcgua

SEQ ID NO: 204696 - RNA, 21 nt, Human
ccgcccccaaaaguucuuccu

SEQ ID NO: 204697 - RNA, 21 nt, Human
ccgcgccgcccagcgaggcgc

SEQ ID NO: 204698 - RNA, 22 nt, Human
ccgcgcucgcagcuccuccucc

SEQ ID NO: 204699 - RNA, 20 nt, Human
ccggggaccccgcccccaaa

SEQ ID NO: 204700 - RNA, 22 nt, Human
ccguguucuaugccuuccagaa

SEQ ID NO: 204701 - RNA, 23 nt, Human
ccuaagcuggagugcaguagcau

SEQ ID NO: 204702 - RNA, 20 nt, Human
ccuagacuucacacaaugac

SEQ ID NO: 204703 - RNA, 22 nt, Human
ccuagguucaagugauccuccc

SEQ ID NO: 204704 - RNA, 22 nt, Human
ccucccauuccaucccaucauc

SEQ ID NO: 204705 - RNA, 24 nt, Human
ccucccauuccaucccaucauccc

SEQ ID NO: 204706 - RNA, 24 nt, Human
ccuccuagguucaagugauccucc

SEQ ID NO: 204707 - RNA, 21 nt, Human
ccuccuccccaggcucuucgg

SEQ ID NO: 204708 - RNA, 21 nt, Human
ccucgaccuccuagguucaag

SEQ ID NO: 204709 - RNA, 20 nt, Human
ccucugaggauccugggccu

SEQ ID NO: 204710 - RNA, 23 nt, Human
ccugaaaugcuccucaccuucuc

SEQ ID NO: 204711 - RNA, 21 nt, Human
ccugagcucaagcgauccacc

SEQ ID NO: 204712 - RNA, 24 nt, Human
ccugccucggccucccaaagugcu

SEQ ID NO: 204713 - RNA, 22 nt, Human
ccugggucuccgcacccagagc

SEQ ID NO: 204714 - RNA, 20 nt, Human
ccugggugacagagcaagac

SEQ ID NO: 204715 - RNA, 22 nt, Human
ccuucagguaaucccugcuaug

SEQ ID NO: 204716 - RNA, 21 nt, Human
cgcccgggccccuuucaggac

SEQ ID NO: 204717 - RNA, 20 nt, Human
cgccgcccugggcccagccc

SEQ ID NO: 204718 - RNA, 23 nt, Human
cgccuguaaucucagcacuuugg

SEQ ID NO: 204719 - RNA, 24 nt, Human
cgccuguaaucucagcacuuuggg

SEQ ID NO: 204720 - RNA, 23 nt, Human
cggcccgcgcggcuccugcucgu

SEQ ID NO: 204721 - RNA, 24 nt, Human
cgggcuuucaccauguugcccagg

SEQ ID NO: 204722 - RNA, 23 nt, Human
cgguagagacgggcuuucaccau

SEQ ID NO: 204723 - RNA, 24 nt, Human
cgguagagacgggcuuucaccaug

SEQ ID NO: 204724 - RNA, 22 nt, Human
cuaaaagcucuguuuucaaugg

SEQ ID NO: 204725 - RNA, 20 nt, Human
cuaacauuucuccuuucacu

SEQ ID NO: 204726 - RNA, 19 nt, Human
cuagaagucacguucauaa

SEQ ID NO: 204727 - RNA, 23 nt, Human
cuagaagucacguucauaacugc

SEQ ID NO: 204728 - RNA, 19 nt, Human
cuauucuaaaguguuggga

SEQ ID NO: 204729 - RNA, 26 nt, Human
cucaaggaaaaugcaucagggguuuc

SEQ ID NO: 204730 - RNA, 21 nt, Human
cucacacacacacacacacac

SEQ ID NO: 204731 - RNA, 24 nt, Human
cucacacacacacacacacacaaa

SEQ ID NO: 204732 - RNA, 22 nt, Human
cucacgccuguaaucucagcac

SEQ ID NO: 204733 - RNA, 24 nt, Human
cucacgccuguaaucucagcacuu

SEQ ID NO: 204734 - RNA, 21 nt, Human
cucacugcagccucgaccucc

SEQ ID NO: 204735 - RNA, 24 nt, Human
cucaguccccgaaguagcugggac

SEQ ID NO: 204736 - RNA, 19 nt, Human
cuccagaccagcucaaaug

SEQ ID NO: 204737 - RNA, 24 nt, Human
cucccaccucaguccccgaaguag

SEQ ID NO: 204738 - RNA, 18 nt, Human
cucccccaaccucagucc

SEQ ID NO: 204739 - RNA, 22 nt, Human
cuccgcacccagagcccggggc

SEQ ID NO: 204740 - RNA, 18 nt, Human
cucgcagcuccuccuccc

SEQ ID NO: 204741 - RNA, 22 nt, Human
cugcaagccugcaaaguggagc

SEQ ID NO: 204742 - RNA, 22 nt, Human
cugccccuggagccaacccucc

SEQ ID NO: 204743 - RNA, 24 nt, Human
cuggaacccagucugaagcuauac

SEQ ID NO: 204744 - RNA, 23 nt, Human
cuggagagguugaggcugcagug

SEQ ID NO: 204745 - RNA, 24 nt, Human
cuggagugcaguagcaugaucuug

SEQ ID NO: 204746 - RNA, 18 nt, Human
cuggcccagaaaaugccc

SEQ ID NO: 204747 - RNA, 23 nt, Human
cuucucccgccgccgcccugggc

SEQ ID NO: 204748 - RNA, 22 nt, Human
gaacuucagaaauaccuguugu

SEQ ID NO: 204749 - RNA, 22 nt, Human
gacugaacccuguuugaggagc

SEQ ID NO: 204750 - RNA, 22 nt, Human
gagacuugcccugccugugggc

SEQ ID NO: 204751 - RNA, 24 nt, Human
gagcccaggaguuugagaucagcc

SEQ ID NO: 204752 - RNA, 24 nt, Human
gagcucaagcgauccaccugccuc

SEQ ID NO: 204753 - RNA, 24 nt, Human
gaucguuggagcccaggaguuuga

SEQ ID NO: 204754 - RNA, 26 nt, Human
gaucguuggagcccaggaguuugaga

SEQ ID NO: 204755 - RNA, 22 nt, Human
gaucuguuguugacaucccccu

SEQ ID NO: 204756 - RNA, 18 nt, Human
gauuacaggugugagcca

SEQ ID NO: 204757 - RNA, 21 nt, Human
gauuacaggugugagccacca

SEQ ID NO: 204758 - RNA, 22 nt, Human
gauuacaggugugagccaccac

SEQ ID NO: 204759 - RNA, 21 nt, Human
gauugugccacugcacuccag

SEQ ID NO: 204760 - RNA, 19 nt, Human
gcacagugaacagugagcu

SEQ ID NO: 204761 - RNA, 19 nt, Human
gcacccagagcccggggcc

SEQ ID NO: 204762 - RNA, 24 nt, Human
gcacuccagccugggugacagagc

SEQ ID NO: 204763 - RNA, 20 nt, Human
gcacuuugggaggccaaggu

SEQ ID NO: 204764 - RNA, 19 nt, Human
gccacugcacuccagccug

SEQ ID NO: 204765 - RNA, 24 nt, Human
gccacugcacuccagccuggguga

SEQ ID NO: 204766 - RNA, 21 nt, Human
gccagcuggauacagucagac

SEQ ID NO: 204767 - RNA, 18 nt, Human
gcccagccccgccugggu

SEQ ID NO: 204768 - RNA, 18 nt, Human
gccccccgcgccgcccag

SEQ ID NO: 204769 - RNA, 23 nt, Human
gccccgggucccguccaggaagc

SEQ ID NO: 204770 - RNA, 23 nt, Human
gcccgggccccuuucaggacacc

SEQ ID NO: 204771 - RNA, 24 nt, Human
gcgauccaccugccucggccuccc

SEQ ID NO: 204772 - RNA, 24 nt, Human
gcucaagcgauccaccugccucgg

SEQ ID NO: 204773 - RNA, 21 nt, Human
gcucacugcagccucgaccuc

SEQ ID NO: 204774 - RNA, 22 nt, Human
gcucacugcagccucgaccucc

SEQ ID NO: 204775 - RNA, 21 nt, Human
gcucgcagcuccuccucccca

SEQ ID NO: 204776 - RNA, 18 nt, Human
gcuuucucccccaaccuc

SEQ ID NO: 204777 - RNA, 21 nt, Human
ggcagaucguuggagcccagg

SEQ ID NO: 204778 - RNA, 25 nt, Human
ggcagaucguuggagcccaggaguu

SEQ ID NO: 204779 - RNA, 22 nt, Human
ggcuuucaccauguugcccagg

SEQ ID NO: 204780 - RNA, 20 nt, Human
gggaagugggaaguggaagg

SEQ ID NO: 204781 - RNA, 19 nt, Human
gggcccagccccgccuggg

SEQ ID NO: 204782 - RNA, 24 nt, Human
gggguguccuuaaaccaucugggu

SEQ ID NO: 204783 - RNA, 18 nt, Human
ggguugugcaggcuuugg

SEQ ID NO: 204784 - RNA, 22 nt, Human
guagagacgggcuuucaccaug

SEQ ID NO: 204785 - RNA, 22 nt, Human
gucaagagcuuuacauaaggcc

SEQ ID NO: 204786 - RNA, 19 nt, Human
gucucaaaaaaagaaaaag

SEQ ID NO: 204787 - RNA, 22 nt, Human
guggugcacaacuguaguccca

SEQ ID NO: 204788 - RNA, 22 nt, Human
guucaagugauccucccaccuc

SEQ ID NO: 204789 - RNA, 19 nt, Human
guugcuguuuucuagagau

SEQ ID NO: 204790 - RNA, 20 nt, Human
guuggguugugcaggcuuug

SEQ ID NO: 204791 - RNA, 19 nt, Human
uaaauacacuaaccaacag

SEQ ID NO: 204792 - RNA, 23 nt, Human
uaauaaaauaauaaagaaucuaa

SEQ ID NO: 204793 - RNA, 22 nt, Human
uacaggugugagccaccacacc

SEQ ID NO: 204794 - RNA, 22 nt, Human
uacaggugugagccaccacacc

SEQ ID NO: 204795 - RNA, 23 nt, Human
uacaggugugagccaccacaccu

SEQ ID NO: 204796 - RNA, 19 nt, Human
uaccaccacacccagcuau

SEQ ID NO: 204797 - RNA, 22 nt, Human
uacuggggcuuugcacagugaa

SEQ ID NO: 204798 - RNA, 19 nt, Human
uacuuguucuuuuccccgg

SEQ ID NO: 204799 - RNA, 22 nt, Human
uagagacgggcuuucaccaugu

SEQ ID NO: 204800 - RNA, 23 nt, Human
uagagauaccccaaaccccgcug

SEQ ID NO: 204801 - RNA, 25 nt, Human
uauacacccugcaagccugcaaagu

SEQ ID NO: 204802 - RNA, 20 nt, Human
uaugaaggaagcaguaacug

SEQ ID NO: 204803 - RNA, 20 nt, Human
uaugccuuaaacaacaggau

SEQ ID NO: 204804 - RNA, 21 nt, Human
ucaacaacaacaacaacaaaa

SEQ ID NO: 204805 - RNA, 18 nt, Human
ucacaaucaucuuuuccc

SEQ ID NO: 204806 - RNA, 23 nt, Human
ucacacacacacacacacacaaa

SEQ ID NO: 204807 - RNA, 19 nt, Human
ucacagaagaccccacaaa

SEQ ID NO: 204808 - RNA, 19 nt, Human
ucacugcagccucgaccuc

SEQ ID NO: 204809 - RNA, 23 nt, Human
ucacugcagccucgaccuccuag

SEQ ID NO: 204810 - RNA, 24 nt, Human
ucacugcagccucgaccuccuagg

SEQ ID NO: 204811 - RNA, 24 nt, Human
ucacuggguuuagaauaaaccuga

SEQ ID NO: 204812 - RNA, 22 nt, Human
ucagaugcuaggucaagagcuu

SEQ ID NO: 204813 - RNA, 21 nt, Human
ucaguaacuacagggugacug

SEQ ID NO: 204814 - RNA, 22 nt, Human
ucaguccccgaaguagcuggga

SEQ ID NO: 204815 - RNA, 22 nt, Human
uccacaaaacacacacaggggc

SEQ ID NO: 204816 - RNA, 20 nt, Human
uccacagagaagaaguacaa

SEQ ID NO: 204817 - RNA, 20 nt, Human
uccacuuucuagcuauguca

SEQ ID NO: 204818 - RNA, 24 nt, Human
uccagccugggugacagagcaaga

SEQ ID NO: 204819 - RNA, 22 nt, Human
uccauaaucugagugccccaga

SEQ ID NO: 204820 - RNA, 23 nt, Human
ucccaaagugcugggauuacagg

SEQ ID NO: 204821 - RNA, 21 nt, Human
uccccaaaugaaaaagguuga

SEQ ID NO: 204822 - RNA, 19 nt, Human
ucccccaaccucagucccu

SEQ ID NO: 204823 - RNA, 25 nt, Human
uccccgaaguagcugggacuacagg

SEQ ID NO: 204824 - RNA, 22 nt, Human
ucccuaagcgagguuggguuga

SEQ ID NO: 204825 - RNA, 18 nt, Human
ucccuucuucagaaaggc

SEQ ID NO: 204826 - RNA, 19 nt, Human
ucccuucuucagaaaggcu

SEQ ID NO: 204827 - RNA, 21 nt, Human
uccgcacccagagcccggggc

SEQ ID NO: 204828 - RNA, 21 nt, Human
uccuagguucaagugauccuc

SEQ ID NO: 204829 - RNA, 24 nt, Human
uccuagguucaagugauccuccca

SEQ ID NO: 204830 - RNA, 21 nt, Human
uccugggccugcccccggcuc

SEQ ID NO: 204831 - RNA, 19 nt, Human
ucgcacagagauaaugcug

SEQ ID NO: 204832 - RNA, 18 nt, Human
ucggccucccaaagugcu

SEQ ID NO: 204833 - RNA, 21 nt, Human
ucggcuuccccggcuucuccc

SEQ ID NO: 204834 - RNA, 24 nt, Human
ucgguagagacgggcuuucaccau

SEQ ID NO: 204835 - RNA, 29 nt, Human
ucguuggagcccaggaguuugagaucagg

SEQ ID NO: 204836 - RNA, 26 nt, Human
ucuagagauaccccaaaccccgcugg

SEQ ID NO: 204837 - RNA, 23 nt, Human
ucuagaucccacccucccauucc

SEQ ID NO: 204838 - RNA, 24 nt, Human
ucucacuuugccaccuaagcugga

SEQ ID NO: 204839 - RNA, 22 nt, Human
ucucgaacuccugagcucaagc

SEQ ID NO: 204840 - RNA, 21 nt, Human
ucugaggauccugggccugcc

SEQ ID NO: 204841 - RNA, 18 nt, Human
ucugccuucuggcaaggc

SEQ ID NO: 204842 - RNA, 23 nt, Human
ucugcuccagaccagcucaaaug

SEQ ID NO: 204843 - RNA, 24 nt, Human
ucugucagagaugugagggacuga

SEQ ID NO: 204844 - RNA, 18 nt, Human
ucuucuguuggggucccc

SEQ ID NO: 204845 - RNA, 19 nt, Human
ucuuugguucgauccuugg

SEQ ID NO: 204846 - RNA, 23 nt, Human
ugaagacuccaggccauucugua

SEQ ID NO: 204847 - RNA, 22 nt, Human
ugacagagcaagacccugucuc

SEQ ID NO: 204848 - RNA, 20 nt, Human
ugacagauguguggagcucu

SEQ ID NO: 204849 - RNA, 19 nt, Human
ugacaucccccucugacca

SEQ ID NO: 204850 - RNA, 22 nt, Human
ugagaaagacagaguucccaaa

SEQ ID NO: 204851 - RNA, 22 nt, Human
ugagcaacauggcgaaacccca

SEQ ID NO: 204852 - RNA, 23 nt, Human
ugaggcugcagugaacugugauu

SEQ ID NO: 204853 - RNA, 21 nt, Human
ugagggaaaaguguauuucac

SEQ ID NO: 204854 - RNA, 23 nt, Human
ugagggaaaaguguauuucacag

SEQ ID NO: 204855 - RNA, 23 nt, Human
ugaucuguuguugacaucccccu

SEQ ID NO: 204856 - RNA, 24 nt, Human
ugaucuguuguugacaucccccuc

SEQ ID NO: 204857 - RNA, 22 nt, Human
ugcaguagcaugaucuuggcuc

SEQ ID NO: 204858 - RNA, 20 nt, Human
ugccaggaauaagaagcacg

SEQ ID NO: 204859 - RNA, 19 nt, Human
ugccaggcaagccugcucc

SEQ ID NO: 204860 - RNA, 19 nt, Human
ugcccacagacgucaacuc

SEQ ID NO: 204861 - RNA, 24 nt, Human
ugcccaggcugcucucgaacuccu

SEQ ID NO: 204862 - RNA, 18 nt, Human
ugcccaggggacgcggga

SEQ ID NO: 204863 - RNA, 21 nt, Human
ugccucggccucccaaagugc

SEQ ID NO: 204864 - RNA, 24 nt, Human
ugccucggccucccaaagugcugg

SEQ ID NO: 204865 - RNA, 18 nt, Human
ugccuuaaacaacaggau

SEQ ID NO: 204866 - RNA, 23 nt, Human
ugcuaugaaaggcagggcugcua

SEQ ID NO: 204867 - RNA, 23 nt, Human
ugcuccucaccuucucuuccaaa

SEQ ID NO: 204868 - RNA, 24 nt, Human
ugcugggauuacaggugugagcca

SEQ ID NO: 204869 - RNA, 19 nt, Human
uggaaagcucccuuaacag

SEQ ID NO: 204870 - RNA, 19 nt, Human
uggaaucacaggcacagac

SEQ ID NO: 204871 - RNA, 21 nt, Human
uggagccaacccuccuagcga

SEQ ID NO: 204872 - RNA, 19 nt, Human
uggagugcaguagcaugau

SEQ ID NO: 204873 - RNA, 24 nt, Human
uggagugcaguagcaugaucuugg

SEQ ID NO: 204874 - RNA, 25 nt, Human
uggcagccacucucugauuucucug

SEQ ID NO: 204875 - RNA, 21 nt, Human
uggccacagagguggucucug

SEQ ID NO: 204876 - RNA, 24 nt, Human
uggccacagagguggucucugguc

SEQ ID NO: 204877 - RNA, 22 nt, Human
uggcucacgccuguaaucucag

SEQ ID NO: 204878 - RNA, 24 nt, Human
uggcucacgccuguaaucucagca

SEQ ID NO: 204879 - RNA, 20 nt, Human
ugggacaaacagcauaaggu

SEQ ID NO: 204880 - RNA, 21 nt, Human
ugggacuacaggcacguacca

SEQ ID NO: 204881 - RNA, 24 nt, Human
ugggacuacaggcacguaccacca

SEQ ID NO: 204882 - RNA, 21 nt, Human
ugggaggaaggaagaucugaa

SEQ ID NO: 204883 - RNA, 20 nt, Human
ugggaggccaaggugggcag

SEQ ID NO: 204884 - RNA, 23 nt, Human
ugggaggccaaggugggcagauc

SEQ ID NO: 204885 - RNA, 19 nt, Human
ugggaggcugagaugggag

SEQ ID NO: 204886 - RNA, 24 nt, Human
ugggaggcugagaugggaggauca

SEQ ID NO: 204887 - RNA, 18 nt, Human
ugggauuacaggugugag

SEQ ID NO: 204888 - RNA, 19 nt, Human
ugggauuacaggugugagc

SEQ ID NO: 204889 - RNA, 22 nt, Human
ugggauuacaggugugagccac

SEQ ID NO: 204890 - RNA, 23 nt, Human
ugggauuacaggugugagccacc

SEQ ID NO: 204891 - RNA, 24 nt, Human
ugggauuacaggugugagccacca

SEQ ID NO: 204892 - RNA, 19 nt, Human
ugggucccuaguuuucccu

SEQ ID NO: 204893 - RNA, 22 nt, Human
ugggucuccgcacccagagccc

SEQ ID NO: 204894 - RNA, 18 nt, Human
uggugcacaacuguaguc

SEQ ID NO: 204895 - RNA, 21 nt, Human
uggugcacaacuguaguccca

SEQ ID NO: 204896 - RNA, 20 nt, Human
ugucacaaaaacauguccac

SEQ ID NO: 204897 - RNA, 27 nt, Human
ugugaugacggcuugaucuggcauggg

SEQ ID NO: 204898 - RNA, 25 nt, Human
uguuugaggagcuuggcuuuccucg

SEQ ID NO: 204899 - RNA, 18 nt, Human
uuacugugccuguagcuc

SEQ ID NO: 204900 - RNA, 23 nt, Human
uucaacaacaacaacaacaaaaa

SEQ ID NO: 204901 - RNA, 23 nt, Human
uucaagugauccucccaccucag

SEQ ID NO: 204902 - RNA, 24 nt, Human
uucaagugauccucccaccucagu

SEQ ID NO: 204903 - RNA, 23 nt, Human
uuccaaagccuccucagcuuucu

SEQ ID NO: 204904 - RNA, 18 nt, Human
uuccccggaauccgacua

SEQ ID NO: 204905 - RNA, 26 nt, Human
uuccccggcuucucccgccgccgccc

SEQ ID NO: 204906 - RNA, 22 nt, Human
uuccucugaggauccugggccu

SEQ ID NO: 204907 - RNA, 18 nt, Human
uucuagcuaugucacccu

SEQ ID NO: 204908 - RNA, 24 nt, Human
uugcauucuuucugaauuugcuuc

SEQ ID NO: 204909 - RNA, 25 nt, Human
uugggaggcugagaugggaggauca

SEQ ID NO: 204910 - RNA, 23 nt, Human
uugugccacugcacuccagccug

SEQ ID NO: 204911 - RNA, 21 nt, Human
uuucaccauguugcccaggcu

SEQ ID NO: 204912 - RNA, 20 nt, Human
uuucaucacucccccucacc

SEQ ID NO: 204913 - RNA, 19 nt, Human
uuucgguagagacgggcuu

SEQ ID NO: 204914 - RNA, 20 nt, Human
uuucuacaaaauacaaaaaa

SEQ ID NO: 204915 - RNA, 18 nt, Human
uuuuucgguagagacggg

SEQ ID NO: 204916 - RNA, 25 nt, Human
uuuuuuguauuuuucgguagagacg

SEQ ID NO: 204917 - RNA, 23 nt, Human
aaaaacaaagcaaaacagacaug

SEQ ID NO: 204918 - RNA, 22 nt, Human
aaaacaaaacaagaaaacaaaa

SEQ ID NO: 204919 - RNA, 23 nt, Human
aaacaaaacaaaacaagaaaaca

SEQ ID NO: 204920 - RNA, 24 nt, Human
aaacaaaacaaaacaagaaaacaa

SEQ ID NO: 204921 - RNA, 25 nt, Human
aaacaaaacaaaacaagaaaacaaa

SEQ ID NO: 204922 - RNA, 18 nt, Human
aaacaaagcaaaacagac

SEQ ID NO: 204923 - RNA, 20 nt, Human
aaacagacaugagcaacauu

SEQ ID NO: 204924 - RNA, 18 nt, Human
aaacccaaaacuggcccc

SEQ ID NO: 204925 - RNA, 19 nt, Human
aaagucucugcaugccaac

SEQ ID NO: 204926 - RNA, 21 nt, Human
aaauauaaggaauuacaaccu

SEQ ID NO: 204927 - RNA, 20 nt, Human
aacacagugagacccugucu

SEQ ID NO: 204928 - RNA, 21 nt, Human
aacacagugagacccugucuc

SEQ ID NO: 204929 - RNA, 23 nt, Human
aacuggccccaggaagaaacuag

SEQ ID NO: 204930 - RNA, 18 nt, Human
aagaaacuaguuggaaug

SEQ ID NO: 204931 - RNA, 23 nt, Human
aagaaagaaauauaaggaauuac

SEQ ID NO: 204932 - RNA, 24 nt, Human
aagaaagaaauauaaggaauuaca

SEQ ID NO: 204933 - RNA, 25 nt, Human
aagaaagaaauauaaggaauuacaa

SEQ ID NO: 204934 - RNA, 20 nt, Human
aagcaaaacagacaugagca

SEQ ID NO: 204935 - RNA, 20 nt, Human
aagcaaaacagacaugagca

SEQ ID NO: 204936 - RNA, 21 nt, Human
aagcaaaacagacaugagcaa

SEQ ID NO: 204937 - RNA, 20 nt, Human
aagcucccaggcaacagcuu

SEQ ID NO: 204938 - RNA, 23 nt, Human
aagcugaggugggaggaugccuu

SEQ ID NO: 204939 - RNA, 21 nt, Human
aagucucugcaugccaacucc

SEQ ID NO: 204940 - RNA, 20 nt, Human
aaugcaagacugacugugcg

SEQ ID NO: 204941 - RNA, 25 nt, Human
acaaaacaaaacaagaaaacaaaag

SEQ ID NO: 204942 - RNA, 26 nt, Human
acaaaacaaaacaagaaaacaaaaga

SEQ ID NO: 204943 - RNA, 22 nt, Human
acaaagcaaaacagacaugagc

SEQ ID NO: 204944 - RNA, 24 nt, Human
acaaccuaaacccaaaacuggccc

SEQ ID NO: 204945 - RNA, 19 nt, Human
acacaacaccugcggccuc

SEQ ID NO: 204946 - RNA, 21 nt, Human
acugaaaugcaagacugacug

SEQ ID NO: 204947 - RNA, 18 nt, Human
acugcacuccagucuggg

SEQ ID NO: 204948 - RNA, 21 nt, Human
acugcacuccagucuggguga

SEQ ID NO: 204949 - RNA, 24 nt, Human
acugcacuccagucugggugacag

SEQ ID NO: 204950 - RNA, 24 nt, Human
agaaugagaccgucucaaacaaaa

SEQ ID NO: 204951 - RNA, 19 nt, Human
agagagagacuccaaaugg

SEQ ID NO: 204952 - RNA, 22 nt, Human
agccaaggaggucaaugcggug

SEQ ID NO: 204953 - RNA, 18 nt, Human
agcugggugugguggugc

SEQ ID NO: 204954 - RNA, 19 nt, Human
aggaagaaacuaguuggaa

SEQ ID NO: 204955 - RNA, 24 nt, Human
aggcaguggcggcggggugacaga

SEQ ID NO: 204956 - RNA, 21 nt, Human
aggggaguggacucagguggg

SEQ ID NO: 204957 - RNA, 21 nt, Human
aguaccaagcucccaggcaac

SEQ ID NO: 204958 - RNA, 19 nt, Human
aucaaugagaaauuguucu

SEQ ID NO: 204959 - RNA, 21 nt, Human
augcugcagcugugacacccc

SEQ ID NO: 204960 - RNA, 23 nt, Human
augcugcagcugugacaccccac

SEQ ID NO: 204961 - RNA, 24 nt, Human
auuguggcacugcacuccagucug

SEQ ID NO: 204962 - RNA, 19 nt, Human
caaaacaaaacaagaaaac

SEQ ID NO: 204963 - RNA, 22 nt, Human
caacacagugagacccugucuc

SEQ ID NO: 204964 - RNA, 24 nt, Human
caacacagugagacccugucucua

SEQ ID NO: 204965 - RNA, 22 nt, Human
caacaucaaugagaaauuguuc

SEQ ID NO: 204966 - RNA, 19 nt, Human
caaggaggucaaugcggug

SEQ ID NO: 204967 - RNA, 23 nt, Human
cacaacaccugcggccucuccca

SEQ ID NO: 204968 - RNA, 18 nt, Human
caccaguagucccagcua

SEQ ID NO: 204969 - RNA, 19 nt, Human
caccaguagucccagcuag

SEQ ID NO: 204970 - RNA, 18 nt, Human
cacuccagucugggugac

SEQ ID NO: 204971 - RNA, 22 nt, Human
cacuccagucugggugacagaa

SEQ ID NO: 204972 - RNA, 24 nt, Human
cacuccagucugggugacagaaug

SEQ ID NO: 204973 - RNA, 19 nt, Human
cacugcacuccagucuggg

SEQ ID NO: 204974 - RNA, 19 nt, Human
cacugcacuccagucuggg

SEQ ID NO: 204975 - RNA, 19 nt, Human
cacugcacuccagucuggg

SEQ ID NO: 204976 - RNA, 20 nt, Human
cacugcacuccagucugggu

SEQ ID NO: 204977 - RNA, 21 nt, Human
cacugcacuccagucugggug

SEQ ID NO: 204978 - RNA, 22 nt, Human
cacugcacuccagucuggguga

SEQ ID NO: 204979 - RNA, 23 nt, Human
cacugcacuccagucugggugac

SEQ ID NO: 204980 - RNA, 24 nt, Human
cacugcacuccagucugggugaca

SEQ ID NO: 204981 - RNA, 25 nt, Human
cacugcacuccagucugggugacag

SEQ ID NO: 204982 - RNA, 20 nt, Human
cagaacacaacaccugcggc

SEQ ID NO: 204983 - RNA, 18 nt, Human
cagcugugacaccccaca

SEQ ID NO: 204984 - RNA, 22 nt, Human
cagcuuugauguucagaaacau

SEQ ID NO: 204985 - RNA, 22 nt, Human
caggaagaaacuaguuggaaug

SEQ ID NO: 204986 - RNA, 25 nt, Human
caggaagaaacuaguuggaauggca

SEQ ID NO: 204987 - RNA, 20 nt, Human
cauccugacaaagucucugc

SEQ ID NO: 204988 - RNA, 20 nt, Human
ccaaggggcaggagcagcgg

SEQ ID NO: 204989 - RNA, 21 nt, Human
ccaguagucccagcuagucag

SEQ ID NO: 204990 - RNA, 20 nt, Human
cccacagugcucugaguaac

SEQ ID NO: 204991 - RNA, 23 nt, Human
cccacagugcucugaguaaccaa

SEQ ID NO: 204992 - RNA, 20 nt, Human
cgauacacuguggaagaaag

SEQ ID NO: 204993 - RNA, 21 nt, Human
cgcagccgcggcgggccucug

SEQ ID NO: 204994 - RNA, 24 nt, Human
cucaaacaaaacaaaacaagaaaa

SEQ ID NO: 204995 - RNA, 26 nt, Human
cucaaacaaaacaaaacaagaaaaca

SEQ ID NO: 204996 - RNA, 20 nt, Human
cucccauccugacaaagucu

SEQ ID NO: 204997 - RNA, 19 nt, Human
cugagcuagagccucugcc

SEQ ID NO: 204998 - RNA, 18 nt, Human
cugcagcugugacacccc

SEQ ID NO: 204999 - RNA, 18 nt, Human
cuuuucuuuucagugucu

SEQ ID NO: 205000 - RNA, 18 nt, Human
gcaagagagagacuccaa

SEQ ID NO: 205001 - RNA, 20 nt, Human
gcacagaccagugaucagaa

SEQ ID NO: 205002 - RNA, 18 nt, Human
gcacugcacuccagucug

SEQ ID NO: 205003 - RNA, 21 nt, Human
gcacugcacuccagucugggu

SEQ ID NO: 205004 - RNA, 24 nt, Human
gcacugcacuccagucugggugac

SEQ ID NO: 205005 - RNA, 22 nt, Human
gcuccaaggggcaggagcagcg

SEQ ID NO: 205006 - RNA, 21 nt, Human
ggagcagcggggugaacacac

SEQ ID NO: 205007 - RNA, 20 nt, Human
ggccgcggauggcgcagccc

SEQ ID NO: 205008 - RNA, 20 nt, Human
ggcggggugacagaggcugu

SEQ ID NO: 205009 - RNA, 21 nt, Human
ggcuacuacaccaagucuaaa

SEQ ID NO: 205010 - RNA, 22 nt, Human
gggaggaugccuugagccaagg

SEQ ID NO: 205011 - RNA, 20 nt, Human
gggaguggacucaggugggc

SEQ ID NO: 205012 - RNA, 21 nt, Human
ggggaguggacucaggugggc

SEQ ID NO: 205013 - RNA, 21 nt, Human
gguauguuucagggagaauga

SEQ ID NO: 205014 - RNA, 18 nt, Human
gucucaaacaaaacaaaa

SEQ ID NO: 205015 - RNA, 25 nt, Human
gucuucuuuccagaacgacagaucc

SEQ ID NO: 205016 - RNA, 19 nt, Human
gugauauguuuauccaacu

SEQ ID NO: 205017 - RNA, 22 nt, Human
uaaaaacaaagcaaaacagaca

SEQ ID NO: 205018 - RNA, 24 nt, Human
uaaacccaaaacuggccccaggaa

SEQ ID NO: 205019 - RNA, 21 nt, Human
uaaccaaggcaguggcggcgg

SEQ ID NO: 205020 - RNA, 27 nt, Human
uaaggaauuacaaccuaaacccaaaac

SEQ ID NO: 205021 - RNA, 20 nt, Human
uacaaccuaaacccaaaacu

SEQ ID NO: 205022 - RNA, 22 nt, Human
uacaaccuaaacccaaaacugg

SEQ ID NO: 205023 - RNA, 27 nt, Human
uacaaccuaaacccaaaacuggcccca

SEQ ID NO: 205024 - RNA, 19 nt, Human
uagucccagcuagucagga

SEQ ID NO: 205025 - RNA, 19 nt, Human
ucaaagaaauauggucuca

SEQ ID NO: 205026 - RNA, 18 nt, Human
ucacugggcuccaagggg

SEQ ID NO: 205027 - RNA, 20 nt, Human
ucagaacacaacaccugcgg

SEQ ID NO: 205028 - RNA, 18 nt, Human
uccacaggacaaugagau

SEQ ID NO: 205029 - RNA, 20 nt, Human
uccagaacgacagauccgau

SEQ ID NO: 205030 - RNA, 24 nt, Human
uccagucugggugacagaaugaga

SEQ ID NO: 205031 - RNA, 20 nt, Human
ucucccauccugacaaaguc

SEQ ID NO: 205032 - RNA, 24 nt, Human
ugaacacacugaaaugcaagacug

SEQ ID NO: 205033 - RNA, 18 nt, Human
ugacaaagucucugcaug

SEQ ID NO: 205034 - RNA, 20 nt, Human
ugaggugggaggaugccuug

SEQ ID NO: 205035 - RNA, 24 nt, Human
ugaggugggaggaugccuugagcc

SEQ ID NO: 205036 - RNA, 25 nt, Human
ugaggugggaggaugccuugagcca

SEQ ID NO: 205037 - RNA, 21 nt, Human
ugauggguauguuucagggag

SEQ ID NO: 205038 - RNA, 24 nt, Human
uggacaacacagugagacccuguc

SEQ ID NO: 205039 - RNA, 18 nt, Human
uggcacugcacuccaguc

SEQ ID NO: 205040 - RNA, 24 nt, Human
uggcugggccagcucucuaggcau

SEQ ID NO: 205041 - RNA, 19 nt, Human
ugggaggaugccuugagcc

SEQ ID NO: 205042 - RNA, 23 nt, Human
ugucuuaaaaacaaagcaaaaca

SEQ ID NO: 205043 - RNA, 19 nt, Human
ugugcgcuacaggccgugc

SEQ ID NO: 205044 - RNA, 22 nt, Human
ugugcgcuacaggccgugcuga

SEQ ID NO: 205045 - RNA, 18 nt, Human
ugugguggugcacaccag

SEQ ID NO: 205046 - RNA, 20 nt, Human
uuagcugggugugguggugc

SEQ ID NO: 205047 - RNA, 22 nt, Human
uuagcugggugugguggugcac

SEQ ID NO: 205048 - RNA, 23 nt, Human
uucagggagaaugagcacaucua

SEQ ID NO: 205049 - RNA, 18 nt, Human
uuggaauggcagaaggag

SEQ ID NO: 205050 - RNA, 21 nt, Human
aacuucucccuuuucuugcug

SEQ ID NO: 205051 - RNA, 18 nt, Human
aagcucgcccaccccugc

SEQ ID NO: 205052 - RNA, 22 nt, Human
aagcucgcccaccccugcuucc

SEQ ID NO: 205053 - RNA, 22 nt, Human
aaguaugcaugugugugcaggg

SEQ ID NO: 205054 - RNA, 21 nt, Human
aauggccucagugaccaagga

SEQ ID NO: 205055 - RNA, 19 nt, Human
accuuggggcugaagggcc

SEQ ID NO: 205056 - RNA, 20 nt, Human
acuugcucuagccuaagcuc

SEQ ID NO: 205057 - RNA, 21 nt, Human
agcaggaaugaauggugucug

SEQ ID NO: 205058 - RNA, 18 nt, Human
agcuagacagccuggguu

SEQ ID NO: 205059 - RNA, 18 nt, Human
aggaagcccuggccagac

SEQ ID NO: 205060 - RNA, 22 nt, Human
aggagugcaagggcuguacccc

SEQ ID NO: 205061 - RNA, 22 nt, Human
aggggagcauggccacuggagg

SEQ ID NO: 205062 - RNA, 21 nt, Human
aguugccucucagaccaggcc

SEQ ID NO: 205063 - RNA, 23 nt, Human
aucucaacuucucccuuuucuug

SEQ ID NO: 205064 - RNA, 21 nt, Human
caccccagcugcaccagagac

SEQ ID NO: 205065 - RNA, 19 nt, Human
caccccugcuuccccauga

SEQ ID NO: 205066 - RNA, 21 nt, Human
caccccugcuuccccaugagc

SEQ ID NO: 205067 - RNA, 19 nt, Human
caggaaugaauggugucug

SEQ ID NO: 205068 - RNA, 22 nt, Human
cagggcuggggggcugagcccu

SEQ ID NO: 205069 - RNA, 19 nt, Human
cagguugcaaagucuccga

SEQ ID NO: 205070 - RNA, 21 nt, Human
ccaauggccucagugaccaag

SEQ ID NO: 205071 - RNA, 21 nt, Human
cccccaggcugacccgaccaa

SEQ ID NO: 205072 - RNA, 18 nt, Human
cccucagcccccaggcug

SEQ ID NO: 205073 - RNA, 18 nt, Human
cccuccuguacacccgcc

SEQ ID NO: 205074 - RNA, 21 nt, Human
cccugcuuccccaugagccac

SEQ ID NO: 205075 - RNA, 21 nt, Human
cccuugcgcauuaauccaccg

SEQ ID NO: 205076 - RNA, 19 nt, Human
ccuggccagauuccacccc

SEQ ID NO: 205077 - RNA, 27 nt, Human
ccuggccagauuccaccccagcugcac

SEQ ID NO: 205078 - RNA, 21 nt, Human
cuaagcucgcccaccccugcu

SEQ ID NO: 205079 - RNA, 22 nt, Human
cucaacuucucccuuuucuugc

SEQ ID NO: 205080 - RNA, 23 nt, Human
cucaacuucucccuuuucuugcu

SEQ ID NO: 205081 - RNA, 21 nt, Human
cucuuccaccagaaauccugg

SEQ ID NO: 205082 - RNA, 21 nt, Human
cugaccccaggaugggggccu

SEQ ID NO: 205083 - RNA, 23 nt, Human
cuggcucagugucucuggaggaa

SEQ ID NO: 205084 - RNA, 23 nt, Human
cuugcugugcaaccuugggcaac

SEQ ID NO: 205085 - RNA, 23 nt, Human
cuuguaugacugugcauguauuu

SEQ ID NO: 205086 - RNA, 23 nt, Human
gacagccaggcccucagcccccc

SEQ ID NO: 205087 - RNA, 22 nt, Human
gagcauggccacuggagggcac

SEQ ID NO: 205088 - RNA, 21 nt, Human
gcaaagucuccgauuccccca

SEQ ID NO: 205089 - RNA, 21 nt, Human
gcaccagagacuccuggagga

SEQ ID NO: 205090 - RNA, 21 nt, Human
gcugcaguucaaagacuggcu

SEQ ID NO: 205091 - RNA, 18 nt, Human
ggagcauggccacuggag

SEQ ID NO: 205092 - RNA, 18 nt, Human
ggaggcagagcugagaac

SEQ ID NO: 205093 - RNA, 21 nt, Human
ggaggccuuccugucucuucc

SEQ ID NO: 205094 - RNA, 22 nt, Human
ggcaggggagacgcauggaggg

SEQ ID NO: 205095 - RNA, 19 nt, Human
ggcucagugucucuggagg

SEQ ID NO: 205096 - RNA, 22 nt, Human
ggcuggggggcugagcccuugc

SEQ ID NO: 205097 - RNA, 24 nt, Human
ggugccucucagcagauucagggg

SEQ ID NO: 205098 - RNA, 23 nt, Human
guacccccggagcuagacagccu

SEQ ID NO: 205099 - RNA, 19 nt, Human
gucgaggacaaccuggcca

SEQ ID NO: 205100 - RNA, 20 nt, Human
gucgaggacaaccuuggggc

SEQ ID NO: 205101 - RNA, 23 nt, Human
gucgaggacaaccuuggggcuga

SEQ ID NO: 205102 - RNA, 23 nt, Human
uagguucucaauaugugcaacuc

SEQ ID NO: 205103 - RNA, 24 nt, Human
uauggagcaggaaugaaugguguc

SEQ ID NO: 205104 - RNA, 20 nt, Human
uaugugcaacucagugugug

SEQ ID NO: 205105 - RNA, 24 nt, Human
ucaacccagcccuccuguacaccc

SEQ ID NO: 205106 - RNA, 26 nt, Human
ucaaugugagugacucaguuuccuca

SEQ ID NO: 205107 - RNA, 21 nt, Human
uccugaccccaggaugggggc

SEQ ID NO: 205108 - RNA, 22 nt, Human
ucuguaaguaugcaugugugug

SEQ ID NO: 205109 - RNA, 23 nt, Human
ugagaacagguugcaaagucucc

SEQ ID NO: 205110 - RNA, 22 nt, Human
ugaggaagcccuggccagaccc

SEQ ID NO: 205111 - RNA, 19 nt, Human
ugaguguacucuuuacugu

SEQ ID NO: 205112 - RNA, 22 nt, Human
ugccucucagcagauucagggg

SEQ ID NO: 205113 - RNA, 21 nt, Human
ugcugugcaaccuugggcaac

SEQ ID NO: 205114 - RNA, 21 nt, Human
ugcugugcaaccuugggcaac

SEQ ID NO: 205115 - RNA, 20 nt, Human
uggaggaauugucuaugacc

SEQ ID NO: 205116 - RNA, 25 nt, Human
uggccagauuccaccccagcugcac

SEQ ID NO: 205117 - RNA, 18 nt, Human
uguaugacugugcaugua

SEQ ID NO: 205118 - RNA, 21 nt, Human
ugugaggaaugaauaaguccc

SEQ ID NO: 205119 - RNA, 21 nt, Human
ugugcagggaauaugccugug

SEQ ID NO: 205120 - RNA, 23 nt, Human
uuagcacggggauuggcaaagag

SEQ ID NO: 205121 - RNA, 26 nt, Human
uuccaccagaaauccuggcagccacu

SEQ ID NO: 205122 - RNA, 23 nt, Human
uuuccugaccccaggaugggggc

SEQ ID NO: 205123 - RNA, 19 nt, Human
agcucaggaacucgcgcgg

SEQ ID NO: 205124 - RNA, 21 nt, Human
auaauaauaauaaacuaucua

SEQ ID NO: 205125 - RNA, 23 nt, Human
caccgccaucccgggcccagccc

SEQ ID NO: 205126 - RNA, 25 nt, Human
caccugccuggcaccagcucaggaa

SEQ ID NO: 205127 - RNA, 25 nt, Human
caccugccuggcaccagcucaggaa

SEQ ID NO: 205128 - RNA, 23 nt, Human
cagacuccaguuuguccaccccc

SEQ ID NO: 205129 - RNA, 20 nt, Human
caucccgggcccagcccagc

SEQ ID NO: 205130 - RNA, 24 nt, Human
ccaccgccaucccgggcccagccc

SEQ ID NO: 205131 - RNA, 18 nt, Human
ccaccgggaccggcgcca

SEQ ID NO: 205132 - RNA, 23 nt, Human
ccagggacuuccccucccccuua

SEQ ID NO: 205133 - RNA, 23 nt, Human
ccaguaggucgguggccucccuc

SEQ ID NO: 205134 - RNA, 21 nt, Human
cccagcccagcccgcuccggc

SEQ ID NO: 205135 - RNA, 25 nt, Human
cccagcccagcuguacccuccuucc

SEQ ID NO: 205136 - RNA, 19 nt, Human
cccaggcgcggcccggcuc

SEQ ID NO: 205137 - RNA, 21 nt, Human
cccagggacuuccccuccccc

SEQ ID NO: 205138 - RNA, 25 nt, Human
ccccuuagaacaggggggugcgagc

SEQ ID NO: 205139 - RNA, 18 nt, Human
cccgggcccagcccagcc

SEQ ID NO: 205140 - RNA, 18 nt, Human
cccgggcccagcccagcc

SEQ ID NO: 205141 - RNA, 19 nt, Human
ccggccguucgcccaggcg

SEQ ID NO: 205142 - RNA, 20 nt, Human
ccggccguucgcccaggcgc

SEQ ID NO: 205143 - RNA, 24 nt, Human
ccuggcaccagcucaggaacucgc

SEQ ID NO: 205144 - RNA, 23 nt, Human
ccuggcaccagcucaggaacugu

SEQ ID NO: 205145 - RNA, 24 nt, Human
ccugggggcucugcccacuccaga

SEQ ID NO: 205146 - RNA, 23 nt, Human
cgcggcccggcucagcgccuccu

SEQ ID NO: 205147 - RNA, 20 nt, Human
cuaucuagggcaagggagua

SEQ ID NO: 205148 - RNA, 21 nt, Human
cuccccagcccagcuguaccc

SEQ ID NO: 205149 - RNA, 22 nt, Human
cuccugggcuuccugggggcuc

SEQ ID NO: 205150 - RNA, 25 nt, Human
cuguacccuccuuccccucuggcag

SEQ ID NO: 205151 - RNA, 23 nt, Human
ggccaccgccaucccgggcccag

SEQ ID NO: 205152 - RNA, 29 nt, Human
guacccuccuuccccucuggcagggagaa

SEQ ID NO: 205153 - RNA, 19 nt, Human
uaagagagcccuuguggua

SEQ ID NO: 205154 - RNA, 24 nt, Human
uaagagagcccuugugguagaggc

SEQ ID NO: 205155 - RNA, 24 nt, Human
uaauaauaauaaacuaucuagggc

SEQ ID NO: 205156 - RNA, 25 nt, Human
uaauaauaauaaacuaucuagggca

SEQ ID NO: 205157 - RNA, 20 nt, Human
uauggaugcccuccugggcu

SEQ ID NO: 205158 - RNA, 23 nt, Human
ucaggaacugugugggaguccgu

SEQ ID NO: 205159 - RNA, 24 nt, Human
uccagacuccaguuuguccacccc

SEQ ID NO: 205160 - RNA, 22 nt, Human
ucccagggacuuccccuccccc

SEQ ID NO: 205161 - RNA, 18 nt, Human
uccccagcccagcuguac

SEQ ID NO: 205162 - RNA, 19 nt, Human
ucccgggcccagcccagcc

SEQ ID NO: 205163 - RNA, 20 nt, Human
ucccgggcccagcccagccc

SEQ ID NO: 205164 - RNA, 21 nt, Human
uccugggcuuccugggggcuc

SEQ ID NO: 205165 - RNA, 20 nt, Human
ucugcccacuccagacucca

SEQ ID NO: 205166 - RNA, 22 nt, Human
ucuggcagggagagaaggggcc

SEQ ID NO: 205167 - RNA, 22 nt, Human
ugccuggcaccagcucaggaac

SEQ ID NO: 205168 - RNA, 22 nt, Human
ugccuggcaccagcucaggaac

SEQ ID NO: 205169 - RNA, 22 nt, Human
ugcgagcugguauggaugcccu

SEQ ID NO: 205170 - RNA, 20 nt, Human
uggcaccagcucaggaacuc

SEQ ID NO: 205171 - RNA, 24 nt, Human
ugguauggaugcccuccugggcuu

SEQ ID NO: 205172 - RNA, 21 nt, Human
uuuuuuuuuuuuuuuuugcaa

SEQ ID NO: 205173 - RNA, 23 nt, Human
uuuuuuuuuuuuuuuuugcaauu

SEQ ID NO: 205174 - RNA, 20 nt, Human
uuuuuuuuuuuuuuuuuugg

SEQ ID NO: 205175 - RNA, 21 nt, Human
aaagcccuaggcuggcagccc

SEQ ID NO: 205176 - RNA, 18 nt, Human
aacuagcuggaaccugac

SEQ ID NO: 205177 - RNA, 21 nt, Human
agcccuaggcuggcagcccua

SEQ ID NO: 205178 - RNA, 21 nt, Human
aggcaguggcaggggcccugg

SEQ ID NO: 205179 - RNA, 22 nt, Human
auagagcaagagugggacagag

SEQ ID NO: 205180 - RNA, 22 nt, Human
caacacccgccaggcgccgacu

SEQ ID NO: 205181 - RNA, 18 nt, Human
cacagcuggguaucucac

SEQ ID NO: 205182 - RNA, 23 nt, Human
cacccgccaggcgccgacucagu

SEQ ID NO: 205183 - RNA, 19 nt, Human
caccucggacuccucgguc

SEQ ID NO: 205184 - RNA, 19 nt, Human
cacuuuaccgaccuucgcc

SEQ ID NO: 205185 - RNA, 25 nt, Human
cagcacccgcgcgucgccgcuuaga

SEQ ID NO: 205186 - RNA, 22 nt, Human
ccgccaggcgccgacucagucu

SEQ ID NO: 205187 - RNA, 29 nt, Human
ccgcgcgucgccgcuuagaacccgccccu

SEQ ID NO: 205188 - RNA, 22 nt, Human
ccuaacuagcuggaaccggggc

SEQ ID NO: 205189 - RNA, 22 nt, Human
cuggcagcccuaacuagcugga

SEQ ID NO: 205190 - RNA, 18 nt, Human
gaguaguuccaggacugg

SEQ ID NO: 205191 - RNA, 18 nt, Human
gcccuaggcuggcagccc

SEQ ID NO: 205192 - RNA, 19 nt, Human
ggccucugguuuuauaagc

SEQ ID NO: 205193 - RNA, 23 nt, Human
gggaagcggggugugugcuugga

SEQ ID NO: 205194 - RNA, 24 nt, Human
guggcagcagggaaaagaagaggc

SEQ ID NO: 205195 - RNA, 23 nt, Human
guuuuuucuggccccuucuaccc

SEQ ID NO: 205196 - RNA, 22 nt, Human
uaaacugaauagagcaagagug

SEQ ID NO: 205197 - RNA, 18 nt, Human
ucacaugaucucagaggg

SEQ ID NO: 205198 - RNA, 18 nt, Human
ucagucucuacccuggcu

SEQ ID NO: 205199 - RNA, 23 nt, Human
ucucacucagucgccaccucgga

SEQ ID NO: 205200 - RNA, 24 nt, Human
ucucacucagucgccaccucggaa

SEQ ID NO: 205201 - RNA, 21 nt, Human
ugcggcggauguucugcagcc

SEQ ID NO: 205202 - RNA, 18 nt, Human
uggaaaaaagugacuuua

SEQ ID NO: 205203 - RNA, 23 nt, Human
uggaaaaaagugacuuuaugaug

SEQ ID NO: 205204 - RNA, 18 nt, Human
uggccucugggauguucc

SEQ ID NO: 205205 - RNA, 26 nt, Human
ugguuugcgcgucacaacacccgcca

SEQ ID NO: 205206 - RNA, 28 nt, Human
aaaaaaaaaaaaaaaaaaaggaaaagaa

SEQ ID NO: 205207 - RNA, 21 nt, Human
aaaaaaaaaaaaaaaaggaaa

SEQ ID NO: 205208 - RNA, 22 nt, Human
aaaaaaaaaaaaaaaggaaaag

SEQ ID NO: 205209 - RNA, 19 nt, Human
aaaaaaaaaaaaaaggaaa

SEQ ID NO: 205210 - RNA, 22 nt, Human
aaaaaaaaaaaaaggaaaagaa

SEQ ID NO: 205211 - RNA, 21 nt, Human
aaaaaaaaaaaaggaaaagaa

SEQ ID NO: 205212 - RNA, 25 nt, Human
aaaaaaaaugacucaagaaaugaga

SEQ ID NO: 205213 - RNA, 21 nt, Human
aaaaggaaaagaaauagauag

SEQ ID NO: 205214 - RNA, 18 nt, Human
aaaggaaaagaaauagau

SEQ ID NO: 205215 - RNA, 21 nt, Human
aaauaaaauaaagaccugccc

SEQ ID NO: 205216 - RNA, 20 nt, Human
aaauguuauaaguuacaucc

SEQ ID NO: 205217 - RNA, 19 nt, Human
aacaaggaggcaucagaaa

SEQ ID NO: 205218 - RNA, 19 nt, Human
aacacggugaaaccccauc

SEQ ID NO: 205219 - RNA, 20 nt, Human
aacacggugaaaccccaucu

SEQ ID NO: 205220 - RNA, 21 nt, Human
aacacggugaaaccccaucuc

SEQ ID NO: 205221 - RNA, 21 nt, Human
aacacggugaaaccccaucuc

SEQ ID NO: 205222 - RNA, 18 nt, Human
aacauuuugggaggcuga

SEQ ID NO: 205223 - RNA, 22 nt, Human
aacauuuugggaggcugaggca

SEQ ID NO: 205224 - RNA, 24 nt, Human
aacauuuugggaggcugaggcagg

SEQ ID NO: 205225 - RNA, 18 nt, Human
aaucaccugaacccagga

SEQ ID NO: 205226 - RNA, 24 nt, Human
aaucaccugaacccaggaggcagu

SEQ ID NO: 205227 - RNA, 24 nt, Human
acaccacuacacuccagccugggc

SEQ ID NO: 205228 - RNA, 24 nt, Human
acacuccagccugggcaacagagu

SEQ ID NO: 205229 - RNA, 24 nt, Human
acagaguaagacuucaucucaaaa

SEQ ID NO: 205230 - RNA, 24 nt, Human
accccaucucuacuaaaaauacaa

SEQ ID NO: 205231 - RNA, 18 nt, Human
acuacacuccagccuggg

SEQ ID NO: 205232 - RNA, 24 nt, Human
acuacacuccagccugggcaacag

SEQ ID NO: 205233 - RNA, 20 nt, Human
agaaauagauagcauaaaua

SEQ ID NO: 205234 - RNA, 20 nt, Human
agagaaaaaaaauguuauaa

SEQ ID NO: 205235 - RNA, 25 nt, Human
agcaauggcuccaaaccaagaagaa

SEQ ID NO: 205236 - RNA, 23 nt, Human
agccugggcaacagaguaagacu

SEQ ID NO: 205237 - RNA, 24 nt, Human
agccugggcaacagaguaagacuu

SEQ ID NO: 205238 - RNA, 20 nt, Human
agcugggcaugauggcaugc

SEQ ID NO: 205239 - RNA, 23 nt, Human
aggcacgguggcucaccccugua

SEQ ID NO: 205240 - RNA, 22 nt, Human
aggcaggcagaucacuugaggu

SEQ ID NO: 205241 - RNA, 26 nt, Human
aggcaggcagaucacuugaggucagg

SEQ ID NO: 205242 - RNA, 24 nt, Human
aggcugaggcaggcagaucacuug

SEQ ID NO: 205243 - RNA, 18 nt, Human
agucaggagaaucaccug

SEQ ID NO: 205244 - RNA, 24 nt, Human
agucaggagaaucaccugaaccca

SEQ ID NO: 205245 - RNA, 20 nt, Human
auaaauaaaauaaagaccug

SEQ ID NO: 205246 - RNA, 24 nt, Human
aucacaccacuacacuccagccug

SEQ ID NO: 205247 - RNA, 24 nt, Human
caacauuuugggaggcugaggcag

SEQ ID NO: 205248 - RNA, 25 nt, Human
caacauuuugggaggcugaggcagg

SEQ ID NO: 205249 - RNA, 23 nt, Human
cacaauucccuuuaaacucaauu

SEQ ID NO: 205250 - RNA, 26 nt, Human
caccccuguacccaacauuuugggag

SEQ ID NO: 205251 - RNA, 25 nt, Human
cacuacacuccagccugggcaacaa

SEQ ID NO: 205252 - RNA, 27 nt, Human
cacuacacuccagccugggcaacagag

SEQ ID NO: 205253 - RNA, 27 nt, Human
cagaucacuugaggucaggaaugcaaa

SEQ ID NO: 205254 - RNA, 20 nt, Human
cagcaauggcuccaaaccaa

SEQ ID NO: 205255 - RNA, 19 nt, Human
caggaaugcaaaccauucu

SEQ ID NO: 205256 - RNA, 24 nt, Human
caggaggcuaagucaggagaauca

SEQ ID NO: 205257 - RNA, 24 nt, Human
caggcagaucacuugaggucagga

SEQ ID NO: 205258 - RNA, 21 nt, Human
ccacuacacuccagccugggc

SEQ ID NO: 205259 - RNA, 22 nt, Human
ccacuacacuccagccugggca

SEQ ID NO: 205260 - RNA, 23 nt, Human
ccacuacacuccagccugggcaa

SEQ ID NO: 205261 - RNA, 24 nt, Human
ccacuacacuccagccugggcaac

SEQ ID NO: 205262 - RNA, 21 nt, Human
ccugggcaacagaguaagacu

SEQ ID NO: 205263 - RNA, 21 nt, Human
ccuguacccaacauuuuggga

SEQ ID NO: 205264 - RNA, 23 nt, Human
cgagccgagaucacaccacuaca

SEQ ID NO: 205265 - RNA, 18 nt, Human
cucaaaaaaaaaaaaaaa

SEQ ID NO: 205266 - RNA, 18 nt, Human
cucaaaaaaaaaaaaaaa

SEQ ID NO: 205267 - RNA, 22 nt, Human
cucucaauagaauucauaagag

SEQ ID NO: 205268 - RNA, 20 nt, Human
cugcagcgagccgagaucac

SEQ ID NO: 205269 - RNA, 23 nt, Human
cuggccaacacggugaaacccca

SEQ ID NO: 205270 - RNA, 23 nt, Human
cugggcaugauggcaugcuccug

SEQ ID NO: 205271 - RNA, 19 nt, Human
gauaaaaauguuacguauc

SEQ ID NO: 205272 - RNA, 18 nt, Human
gaucacuugaggucagga

SEQ ID NO: 205273 - RNA, 23 nt, Human
gaucacuugaggucaggaaugca

SEQ ID NO: 205274 - RNA, 24 nt, Human
gccaacacggugaaaccccaucuc

SEQ ID NO: 205275 - RNA, 25 nt, Human
gguggcucaccccuguacccaacau

SEQ ID NO: 205276 - RNA, 21 nt, Human
gugcaaaucagagguugaaug

SEQ ID NO: 205277 - RNA, 19 nt, Human
uaaaaaagaauucagaagg

SEQ ID NO: 205278 - RNA, 23 nt, Human
uaaaauaaagaccugcccgggcg

SEQ ID NO: 205279 - RNA, 19 nt, Human
uaaaugacuaggcuagagg

SEQ ID NO: 205280 - RNA, 21 nt, Human
uaagacuucaucucaaaaaaa

SEQ ID NO: 205281 - RNA, 20 nt, Human
uaagucaggagaaucaccug

SEQ ID NO: 205282 - RNA, 24 nt, Human
uaagucaggagaaucaccugaacc

SEQ ID NO: 205283 - RNA, 23 nt, Human
uagauggcauuaauagcaaggca

SEQ ID NO: 205284 - RNA, 22 nt, Human
uagcauaaauaaaauaaagacc

SEQ ID NO: 205285 - RNA, 21 nt, Human
ucaaaaaaaaaaaaaaaaaaa

SEQ ID NO: 205286 - RNA, 21 nt, Human
ucagaaggucaguuauuaagc

SEQ ID NO: 205287 - RNA, 24 nt, Human
ucagagguugaauggcaaaggaug

SEQ ID NO: 205288 - RNA, 22 nt, Human
ucaucucaaaaaaaaaaaaaaa

SEQ ID NO: 205289 - RNA, 25 nt, Human
ucaucucaaaaaaaaaaaaaaaaaa

SEQ ID NO: 205290 - RNA, 22 nt, Human
uccaauuuaaggaaauuuaaaa

SEQ ID NO: 205291 - RNA, 22 nt, Human
ucucuacuaaaaauacaaaaau

SEQ ID NO: 205292 - RNA, 24 nt, Human
ucuggccaacacggugaaacccca

SEQ ID NO: 205293 - RNA, 19 nt, Human
ugaaaccccaucucuacua

SEQ ID NO: 205294 - RNA, 19 nt, Human
ugaacccaggaggcagugg

SEQ ID NO: 205295 - RNA, 22 nt, Human
ugacucaagaaaugagaggcgg

SEQ ID NO: 205296 - RNA, 26 nt, Human
ugaggcaggcagaucacuugagguca

SEQ ID NO: 205297 - RNA, 26 nt, Human
ugcuuuagugcacucuagaagaccaa

SEQ ID NO: 205298 - RNA, 23 nt, Human
uggcaaaggauguccagcaaugg

SEQ ID NO: 205299 - RNA, 20 nt, Human
uggcauuaauagcaaggcac

SEQ ID NO: 205300 - RNA, 20 nt, Human
ugggaggcugaggcaggcag

SEQ ID NO: 205301 - RNA, 24 nt, Human
ugggaggcugaggcaggcagauca

SEQ ID NO: 205302 - RNA, 18 nt, Human
uuccaauaaggaggaagu

SEQ ID NO: 205303 - RNA, 25 nt, Human
uugggaggcugaggcaggcagauca

SEQ ID NO: 205304 - RNA, 22 nt, Human
aaaaaaaaaaaaaaaggaaaag

SEQ ID NO: 205305 - RNA, 24 nt, Human
aaaaaaaaaaaggaaaagacaaaa

SEQ ID NO: 205306 - RNA, 21 nt, Human
aaaccuguccaaccagcauca

SEQ ID NO: 205307 - RNA, 19 nt, Human
aacccagggggaaaggagc

SEQ ID NO: 205308 - RNA, 19 nt, Human
aaccccucccccaacccuc

SEQ ID NO: 205309 - RNA, 19 nt, Human
aauagugauuuuucccaaa

SEQ ID NO: 205310 - RNA, 21 nt, Human
aaucacaggggugagaaagga

SEQ ID NO: 205311 - RNA, 19 nt, Human
aauggggaagggaggcuca

SEQ ID NO: 205312 - RNA, 19 nt, Human
acaaggcaaaggauucaga

SEQ ID NO: 205313 - RNA, 21 nt, Human
accaaccccucccccaacccu

SEQ ID NO: 205314 - RNA, 22 nt, Human
accuccaaaucacaggggugag

SEQ ID NO: 205315 - RNA, 24 nt, Human
accugguaacugaggcucugcaga

SEQ ID NO: 205316 - RNA, 22 nt, Human
acuccccagcaaccugauaccc

SEQ ID NO: 205317 - RNA, 22 nt, Human
agaacagcagaagagaggagga

SEQ ID NO: 205318 - RNA, 21 nt, Human
agaaguggugggggaaggggg

SEQ ID NO: 205319 - RNA, 21 nt, Human
agaauccuuccagauuuacuu

SEQ ID NO: 205320 - RNA, 20 nt, Human
agagaggaggaggcagggag

SEQ ID NO: 205321 - RNA, 21 nt, Human
agagaggaggaggcagggagu

SEQ ID NO: 205322 - RNA, 21 nt, Human
agaggaagggagggaaggaac

SEQ ID NO: 205323 - RNA, 23 nt, Human
agagguggggguggggugagggg

SEQ ID NO: 205324 - RNA, 22 nt, Human
agauaggcacucagaaaccaaa

SEQ ID NO: 205325 - RNA, 23 nt, Human
agcaagagaagcccgcagaggga

SEQ ID NO: 205326 - RNA, 24 nt, Human
agcuacugaaagaauucaaacaua

SEQ ID NO: 205327 - RNA, 21 nt, Human
aggaaacccagggggaaagga

SEQ ID NO: 205328 - RNA, 21 nt, Human
aggaagccaaggaaacccagg

SEQ ID NO: 205329 - RNA, 22 nt, Human
aggagcagaacagcagaagaga

SEQ ID NO: 205330 - RNA, 21 nt, Human
aggcagggaguuacaggaacc

SEQ ID NO: 205331 - RNA, 23 nt, Human
aggcagggaguuacaggaaccug

SEQ ID NO: 205332 - RNA, 19 nt, Human
aggcuuuuaggcaaggggc

SEQ ID NO: 205333 - RNA, 22 nt, Human
agguggggguggggugaggggu

SEQ ID NO: 205334 - RNA, 18 nt, Human
aguggugggggaaggggg

SEQ ID NO: 205335 - RNA, 21 nt, Human
aucaccgggacccaucagcca

SEQ ID NO: 205336 - RNA, 24 nt, Human
augccaaccacucuacguggcuuu

SEQ ID NO: 205337 - RNA, 21 nt, Human
caaaguacaauuugacucaaa

SEQ ID NO: 205338 - RNA, 24 nt, Human
caccagagaagaguggaaacuccc

SEQ ID NO: 205339 - RNA, 24 nt, Human
caccauggucucuccuuuccccag

SEQ ID NO: 205340 - RNA, 21 nt, Human
cagaagagguggggguggggu

SEQ ID NO: 205341 - RNA, 20 nt, Human
cagaaggaaccagugagcug

SEQ ID NO: 205342 - RNA, 23 nt, Human
cagagcaagagaagcccgcagag

SEQ ID NO: 205343 - RNA, 18 nt, Human
cagagguacugcagaagg

SEQ ID NO: 205344 - RNA, 21 nt, Human
cagauaggcacucagaaacca

SEQ ID NO: 205345 - RNA, 19 nt, Human
cagcaaccugauacccuuc

SEQ ID NO: 205346 - RNA, 24 nt, Human
cagcuacugaaagaauucaaacau

SEQ ID NO: 205347 - RNA, 20 nt, Human
caggaaccugggguaccagg

SEQ ID NO: 205348 - RNA, 24 nt, Human
caggaccaaccccucccccaaccc

SEQ ID NO: 205349 - RNA, 23 nt, Human
caggcuuuuaggcaaggggcaga

SEQ ID NO: 205350 - RNA, 20 nt, Human
caugccaaccacucuacgug

SEQ ID NO: 205351 - RNA, 22 nt, Human
caugccaaccacucuacguggc

SEQ ID NO: 205352 - RNA, 20 nt, Human
ccacagagguacugcagaag

SEQ ID NO: 205353 - RNA, 22 nt, Human
ccaucagccacuggcagccauu

SEQ ID NO: 205354 - RNA, 18 nt, Human
ccccagggggucaggggg

SEQ ID NO: 205355 - RNA, 20 nt, Human
ccccucccuccucuggccac

SEQ ID NO: 205356 - RNA, 18 nt, Human
cccucccuuccccuucuc

SEQ ID NO: 205357 - RNA, 20 nt, Human
cccucccuuccccuucucca

SEQ ID NO: 205358 - RNA, 20 nt, Human
cccuucuccacaccuccaaa

SEQ ID NO: 205359 - RNA, 21 nt, Human
ccucuggccacuagggguggg

SEQ ID NO: 205360 - RNA, 25 nt, Human
cuacccacaaggcaaaggauucaga

SEQ ID NO: 205361 - RNA, 23 nt, Human
cuccugcuacagacggaauacug

SEQ ID NO: 205362 - RNA, 23 nt, Human
cucugccaauguggcaaaaaaaa

SEQ ID NO: 205363 - RNA, 24 nt, Human
cugccucagagagagggagguggc

SEQ ID NO: 205364 - RNA, 23 nt, Human
cuggaggacgggcucccuaggcg

SEQ ID NO: 205365 - RNA, 20 nt, Human
cugggaggagcagaacagca

SEQ ID NO: 205366 - RNA, 18 nt, Human
cuucacugugccccuccc

SEQ ID NO: 205367 - RNA, 22 nt, Human
cuuuccucuucggagagguggu

SEQ ID NO: 205368 - RNA, 19 nt, Human
gaaaagacaaaaugacuga

SEQ ID NO: 205369 - RNA, 19 nt, Human
gacccuccuccuucaucca

SEQ ID NO: 205370 - RNA, 18 nt, Human
gagaggaggaggcaggga

SEQ ID NO: 205371 - RNA, 21 nt, Human
gagcaagagaagcccgcagag

SEQ ID NO: 205372 - RNA, 22 nt, Human
gaggagcagaacagcagaagag

SEQ ID NO: 205373 - RNA, 20 nt, Human
gauacccuucccaucaccgg

SEQ ID NO: 205374 - RNA, 21 nt, Human
gcaaaggauucagaaauuaau

SEQ ID NO: 205375 - RNA, 24 nt, Human
gcacucagaaaccaaaccugguag

SEQ ID NO: 205376 - RNA, 24 nt, Human
gcagauuaugacagagcuugcacg

SEQ ID NO: 205377 - RNA, 19 nt, Human
gcaggaccaaccccucccc

SEQ ID NO: 205378 - RNA, 18 nt, Human
gcucagagcaagagaagc

SEQ ID NO: 205379 - RNA, 24 nt, Human
gcugucccucccuuccccuucucc

SEQ ID NO: 205380 - RNA, 18 nt, Human
ggagcagaacagcagaag

SEQ ID NO: 205381 - RNA, 20 nt, Human
ggagguggcaucucuacauu

SEQ ID NO: 205382 - RNA, 20 nt, Human
ggaguuacaggaaccugggg

SEQ ID NO: 205383 - RNA, 22 nt, Human
gggcaacaggaguggggcuggg

SEQ ID NO: 205384 - RNA, 19 nt, Human
gggcuggggaggagaacag

SEQ ID NO: 205385 - RNA, 18 nt, Human
guagggcaacaggagugg

SEQ ID NO: 205386 - RNA, 20 nt, Human
guggcaaaaaaaaaaaaaaa

SEQ ID NO: 205387 - RNA, 19 nt, Human
guggggguggggugagggg

SEQ ID NO: 205388 - RNA, 23 nt, Human
ucaaaccuguccaaccagcauca

SEQ ID NO: 205389 - RNA, 24 nt, Human
ucagagcaagagaagcccgcagag

SEQ ID NO: 205390 - RNA, 25 nt, Human
ucagagcaagagaagcccgcagagg

SEQ ID NO: 205391 - RNA, 20 nt, Human
ucagggggugagggaaaggc

SEQ ID NO: 205392 - RNA, 19 nt, Human
uccacaccuccaaaucaca

SEQ ID NO: 205393 - RNA, 21 nt, Human
ucccuaggcguagguauggug

SEQ ID NO: 205394 - RNA, 22 nt, Human
ucccuaggcguagguauggugg

SEQ ID NO: 205395 - RNA, 19 nt, Human
ucccuuccccuucuccaca

SEQ ID NO: 205396 - RNA, 21 nt, Human
ucuacauucacaccauggucu

SEQ ID NO: 205397 - RNA, 21 nt, Human
ugaaagaauucaaacauacag

SEQ ID NO: 205398 - RNA, 24 nt, Human
ugaaaggaugcucaucgcauggug

SEQ ID NO: 205399 - RNA, 18 nt, Human
ugacagagcuugcacgau

SEQ ID NO: 205400 - RNA, 18 nt, Human
ugacugacacagccaggu

SEQ ID NO: 205401 - RNA, 21 nt, Human
ugagaauccuuccagauuuac

SEQ ID NO: 205402 - RNA, 19 nt, Human
ugcagacacuggccugaaa

SEQ ID NO: 205403 - RNA, 20 nt, Human
ugccaaccacucuacguggc

SEQ ID NO: 205404 - RNA, 25 nt, Human
ugccaaccacucuacguggcuuucc

SEQ ID NO: 205405 - RNA, 20 nt, Human
ugccaauguggcaaaaaaaa

SEQ ID NO: 205406 - RNA, 24 nt, Human
ugccaauguggcaaaaaaaaaaaa

SEQ ID NO: 205407 - RNA, 22 nt, Human
ugcuacagacggaauacuggag

SEQ ID NO: 205408 - RNA, 19 nt, Human
uggaggacgggcucccuag

SEQ ID NO: 205409 - RNA, 21 nt, Human
uggaugggaauggggaaggga

SEQ ID NO: 205410 - RNA, 23 nt, Human
uggcaaaaaaaaaaaaaaaagga

SEQ ID NO: 205411 - RNA, 19 nt, Human
uggcaccccaugccaacca

SEQ ID NO: 205412 - RNA, 18 nt, Human
uggcagccauucucuucc

SEQ ID NO: 205413 - RNA, 22 nt, Human
ugggaagaugcagauuaugaca

SEQ ID NO: 205414 - RNA, 24 nt, Human
ugggaauggggaagggaggcucag

SEQ ID NO: 205415 - RNA, 18 nt, Human
ugggagaggaagggaggg

SEQ ID NO: 205416 - RNA, 24 nt, Human
ugggagaggaagggagggaaggaa

SEQ ID NO: 205417 - RNA, 19 nt, Human
uggggaggagaacaguucc

SEQ ID NO: 205418 - RNA, 23 nt, Human
uggggcuggggaggagaacaguu

SEQ ID NO: 205419 - RNA, 21 nt, Human
ugggggaaggggguggagaug

SEQ ID NO: 205420 - RNA, 18 nt, Human
uggugggcucccuucuuc

SEQ ID NO: 205421 - RNA, 20 nt, Human
ugucugggaggagcagaaca

SEQ ID NO: 205422 - RNA, 22 nt, Human
ugucuuggagcugaggcagcag

SEQ ID NO: 205423 - RNA, 18 nt, Human
uucagaaauuaauaguga

SEQ ID NO: 205424 - RNA, 24 nt, Human
aaagugccgggacuacaggcaaga

SEQ ID NO: 205425 - RNA, 22 nt, Human
aacagcauucugucauuucaga

SEQ ID NO: 205426 - RNA, 26 nt, Human
aagugccgggacuacaggcaagagcc

SEQ ID NO: 205427 - RNA, 24 nt, Human
acaaacaucagacacacagaccau

SEQ ID NO: 205428 - RNA, 20 nt, Human
acacaaguuguuucgcaaua

SEQ ID NO: 205429 - RNA, 20 nt, Human
acaggguuucaccacguugg

SEQ ID NO: 205430 - RNA, 21 nt, Human
acaggguuucaccacguuggu

SEQ ID NO: 205431 - RNA, 24 nt, Human
acaggguuucaccacguuggucag

SEQ ID NO: 205432 - RNA, 24 nt, Human
accacguuggucaggcuggucucg

SEQ ID NO: 205433 - RNA, 19 nt, Human
acccaggcuggagugcagu

SEQ ID NO: 205434 - RNA, 23 nt, Human
acccaggcuggagugcaguggug

SEQ ID NO: 205435 - RNA, 24 nt, Human
accuugugaucugccugccucggc

SEQ ID NO: 205436 - RNA, 18 nt, Human
acucugccacccaggcug

SEQ ID NO: 205437 - RNA, 24 nt, Human
acucugccacccaggcuggagugc

SEQ ID NO: 205438 - RNA, 18 nt, Human
agccuccugaguagcugg

SEQ ID NO: 205439 - RNA, 22 nt, Human
aggaaaucacuagaacauaaaa

SEQ ID NO: 205440 - RNA, 25 nt, Human
aggcuggagugcaguggugcaaucu

SEQ ID NO: 205441 - RNA, 23 nt, Human
aguagcugggauuacaggcacau

SEQ ID NO: 205442 - RNA, 20 nt, Human
agugcaguggugcaaucucg

SEQ ID NO: 205443 - RNA, 24 nt, Human
agugcaguggugcaaucucggcuc

SEQ ID NO: 205444 - RNA, 22 nt, Human
auauguccuagcaacaaacauc

SEQ ID NO: 205445 - RNA, 27 nt, Human
caaagugccgggacuacaggcaagagc

SEQ ID NO: 205446 - RNA, 24 nt, Human
caacaaacaucagacacacagacc

SEQ ID NO: 205447 - RNA, 23 nt, Human
caagagccaccgcgccuggucca

SEQ ID NO: 205448 - RNA, 20 nt, Human
caagcgauucuccugccuua

SEQ ID NO: 205449 - RNA, 22 nt, Human
caagcgauucuccugccuuagc

SEQ ID NO: 205450 - RNA, 23 nt, Human
cacaacaaacaauagacuuuaaa

SEQ ID NO: 205451 - RNA, 21 nt, Human
caccacguuggucaggcuggu

SEQ ID NO: 205452 - RNA, 24 nt, Human
caccacguuggucaggcuggucuc

SEQ ID NO: 205453 - RNA, 24 nt, Human
cacccaggcuggagugcaguggug

SEQ ID NO: 205454 - RNA, 22 nt, Human
cacuagaacauaaaacaauaac

SEQ ID NO: 205455 - RNA, 23 nt, Human
cacucugccacccaggcuggagu

SEQ ID NO: 205456 - RNA, 24 nt, Human
cacucugccacccaggcuggagug

SEQ ID NO: 205457 - RNA, 21 nt, Human
cacugcaaccuccgccuccug

SEQ ID NO: 205458 - RNA, 23 nt, Human
cacugcaaccuccgccuccuggg

SEQ ID NO: 205459 - RNA, 25 nt, Human
cagcaagcacaacaaacaauagacu

SEQ ID NO: 205460 - RNA, 22 nt, Human
cagcaauaucagcaaaugcuuc

SEQ ID NO: 205461 - RNA, 22 nt, Human
caggcacaugucaccacccccg

SEQ ID NO: 205462 - RNA, 24 nt, Human
caggguuucaccacguuggucagg

SEQ ID NO: 205463 - RNA, 26 nt, Human
caguagagacaggguuucaccacguu

SEQ ID NO: 205464 - RNA, 19 nt, Human
ccaaagugccgggacuaca

SEQ ID NO: 205465 - RNA, 26 nt, Human
ccagcaagcacaacaaacaauagacu

SEQ ID NO: 205466 - RNA, 18 nt, Human
ccaguagagacaggguuu

SEQ ID NO: 205467 - RNA, 24 nt, Human
ccgccuccuggguucaagcgauuc

SEQ ID NO: 205468 - RNA, 19 nt, Human
ccuccgccuccuggguuca

SEQ ID NO: 205469 - RNA, 24 nt, Human
ccuccuggguucaagcgauucucc

SEQ ID NO: 205470 - RNA, 21 nt, Human
ccugaccuugugaucugccug

SEQ ID NO: 205471 - RNA, 23 nt, Human
ccugaguagcugggauuacaggc

SEQ ID NO: 205472 - RNA, 24 nt, Human
ccugaguagcugggauuacaggca

SEQ ID NO: 205473 - RNA, 24 nt, Human
ccugccuuagccuccugaguagcu

SEQ ID NO: 205474 - RNA, 23 nt, Human
ccuggguucaagcgauucuccug

SEQ ID NO: 205475 - RNA, 19 nt, Human
cgccugguccaauuacuga

SEQ ID NO: 205476 - RNA, 24 nt, Human
cucacugcaaccuccgccuccugg

SEQ ID NO: 205477 - RNA, 24 nt, Human
cuccugaccuugugaucugccugc

SEQ ID NO: 205478 - RNA, 22 nt, Human
cuccugccuuagccuccugagu

SEQ ID NO: 205479 - RNA, 21 nt, Human
cuccuggguucaagcgauucu

SEQ ID NO: 205480 - RNA, 23 nt, Human
cugaguagcugggauuacaggca

SEQ ID NO: 205481 - RNA, 23 nt, Human
cugcaaccuccgccuccuggguu

SEQ ID NO: 205482 - RNA, 24 nt, Human
cugcaaccuccgccuccuggguuc

SEQ ID NO: 205483 - RNA, 24 nt, Human
cuuagccuccugaguagcugggau

SEQ ID NO: 205484 - RNA, 22 nt, Human
gaccuugugaucugccugccuc

SEQ ID NO: 205485 - RNA, 24 nt, Human
gaccuugugaucugccugccucgg

SEQ ID NO: 205486 - RNA, 27 nt, Human
gaguagcugggauuacaggcacauguc

SEQ ID NO: 205487 - RNA, 20 nt, Human
gccuuagccuccugaguagc

SEQ ID NO: 205488 - RNA, 21 nt, Human
ggacuacaggcaagagccacc

SEQ ID NO: 205489 - RNA, 22 nt, Human
ggacuacaggcaagagccaccg

SEQ ID NO: 205490 - RNA, 20 nt, Human
ggcacuguuaaauuauacag

SEQ ID NO: 205491 - RNA, 24 nt, Human
ggcacuguuaaauuauacaggaaa

SEQ ID NO: 205492 - RNA, 23 nt, Human
ggcuggucucgaacuccugaccu

SEQ ID NO: 205493 - RNA, 23 nt, Human
gggacuacaggcaagagccaccg

SEQ ID NO: 205494 - RNA, 20 nt, Human
ggucucgaacuccugaccuu

SEQ ID NO: 205495 - RNA, 18 nt, Human
guagcugggauuacaggc

SEQ ID NO: 205496 - RNA, 20 nt, Human
guccaagcuuguauccacug

SEQ ID NO: 205497 - RNA, 23 nt, Human
uaaaacagcauucugucauuuca

SEQ ID NO: 205498 - RNA, 24 nt, Human
uaaaauacaaaucuauagcaaaaa

SEQ ID NO: 205499 - RNA, 25 nt, Human
uaacacacaaugaaacccucaugga

SEQ ID NO: 205500 - RNA, 22 nt, Human
uaacuucauuauuagcuguuua

SEQ ID NO: 205501 - RNA, 20 nt, Human
uacaggaaaucacuagaaca

SEQ ID NO: 205502 - RNA, 21 nt, Human
uacaggaaaucacuagaacau

SEQ ID NO: 205503 - RNA, 22 nt, Human
uacaggcaagagccaccgcgcc

SEQ ID NO: 205504 - RNA, 21 nt, Human
uaccagcaagcacaacaaaca

SEQ ID NO: 205505 - RNA, 22 nt, Human
uaccagcaagcacaacaaacaa

SEQ ID NO: 205506 - RNA, 22 nt, Human
uagagacaggguuucaccacgu

SEQ ID NO: 205507 - RNA, 22 nt, Human
uagcaacaaacaucagacacac

SEQ ID NO: 205508 - RNA, 24 nt, Human
uagcaacaaacaucagacacacag

SEQ ID NO: 205509 - RNA, 20 nt, Human
uagccuccugaguagcuggg

SEQ ID NO: 205510 - RNA, 23 nt, Human
uaggucccaaaaugacguucuua

SEQ ID NO: 205511 - RNA, 23 nt, Human
uauaaaacaaucuuuugagaagg

SEQ ID NO: 205512 - RNA, 19 nt, Human
ucaagcgauucuccugccu

SEQ ID NO: 205513 - RNA, 23 nt, Human
ucacacuggagaugaaaagggca

SEQ ID NO: 205514 - RNA, 24 nt, Human
ucacucugccacccaggcuggagu

SEQ ID NO: 205515 - RNA, 23 nt, Human
ucacugcaaccuccgccuccugg

SEQ ID NO: 205516 - RNA, 24 nt, Human
ucacugcaaccuccgccuccuggg

SEQ ID NO: 205517 - RNA, 25 nt, Human
ucacugcaaccuccgccuccugggu

SEQ ID NO: 205518 - RNA, 27 nt, Human
ucacugcaaccuccgccuccuggguuc

SEQ ID NO: 205519 - RNA, 24 nt, Human
ucccaaagugccgggacuacaggc

SEQ ID NO: 205520 - RNA, 24 nt, Human
uccugaguagcugggauuacaggc

SEQ ID NO: 205521 - RNA, 21 nt, Human
uccuggguucaagcgauucuc

SEQ ID NO: 205522 - RNA, 24 nt, Human
uccuggguucaagcgauucuccug

SEQ ID NO: 205523 - RNA, 30 nt, Human
ucgcaauacccugcauaagaauaugacugg

SEQ ID NO: 205524 - RNA, 23 nt, Human
ucucacucugccacccaggcugg

SEQ ID NO: 205525 - RNA, 24 nt, Human
ucucacucugccacccaggcugga

SEQ ID NO: 205526 - RNA, 26 nt, Human
ucucacucugccacccaggcuggagu

SEQ ID NO: 205527 - RNA, 27 nt, Human
ucucacucugccacccaggcuggagug

SEQ ID NO: 205528 - RNA, 24 nt, Human
ucugccacccaggcuggagugcag

SEQ ID NO: 205529 - RNA, 21 nt, Human
ucuuuguuuuuaaaacagcau

SEQ ID NO: 205530 - RNA, 18 nt, Human
ucuuuuuuuugagacgag

SEQ ID NO: 205531 - RNA, 19 nt, Human
ugaaagccacuuaaacaaa

SEQ ID NO: 205532 - RNA, 22 nt, Human
ugacugagguuugcugaaagcc

SEQ ID NO: 205533 - RNA, 22 nt, Human
ugcaguggugcaaucucggcuc

SEQ ID NO: 205534 - RNA, 22 nt, Human
ugccgggacuacaggcaagagc

SEQ ID NO: 205535 - RNA, 22 nt, Human
ugccucggccucccaaagugcc

SEQ ID NO: 205536 - RNA, 24 nt, Human
ugccucggccucccaaagugccgg

SEQ ID NO: 205537 - RNA, 20 nt, Human
ugccuuagccuccugaguaa

SEQ ID NO: 205538 - RNA, 24 nt, Human
ugccuuagccuccugaguagcugg

SEQ ID NO: 205539 - RNA, 23 nt, Human
uggagugcaguggugcaaucucg

SEQ ID NO: 205540 - RNA, 24 nt, Human
uggagugcaguggugcaaucucgg

SEQ ID NO: 205541 - RNA, 19 nt, Human
ugggaccuuaguuaguacu

SEQ ID NO: 205542 - RNA, 22 nt, Human
ugggauuacaggcacaugucac

SEQ ID NO: 205543 - RNA, 24 nt, Human
ugggauuacaggcacaugucacca

SEQ ID NO: 205544 - RNA, 23 nt, Human
uggguucaagcgauucuccugcc

SEQ ID NO: 205545 - RNA, 24 nt, Human
uggguucaagcgauucuccugccu

SEQ ID NO: 205546 - RNA, 24 nt, Human
uggucaggcuggucucgaacuccu

SEQ ID NO: 205547 - RNA, 23 nt, Human
uuaguaccagcaagcacaacaaa

SEQ ID NO: 205548 - RNA, 20 nt, Human
uucaagcgauucuccugccu

SEQ ID NO: 205549 - RNA, 24 nt, Human
uucaagcgauucuccugccuuagc

SEQ ID NO: 205550 - RNA, 21 nt, Human
uucacacuggagaugaaaagg

SEQ ID NO: 205551 - RNA, 22 nt, Human
uucguucuuaaaccugugccac

SEQ ID NO: 205552 - RNA, 24 nt, Human
uucucaugucaagaauaacuucau

SEQ ID NO: 205553 - RNA, 21 nt, Human
uuucaccacguuggucaggcu

SEQ ID NO: 205554 - RNA, 25 nt, Human
uuucuuuuuuuugagacgagucuca

SEQ ID NO: 205555 - RNA, 18 nt, Human
aaaucuugugcuacuguu

SEQ ID NO: 205556 - RNA, 18 nt, Human
aaguaacauuguaaccug

SEQ ID NO: 205557 - RNA, 20 nt, Human
acccucgucuuugagggccg

SEQ ID NO: 205558 - RNA, 20 nt, Human
agccccgaagaaacacgcuc

SEQ ID NO: 205559 - RNA, 23 nt, Human
aggaaauaucuucaguguguuca

SEQ ID NO: 205560 - RNA, 23 nt, Human
aggcuggaaacgaacgaacggca

SEQ ID NO: 205561 - RNA, 28 nt, Human
agggaagagagggcguaccugaggggcc

SEQ ID NO: 205562 - RNA, 24 nt, Human
auauguccauuucaucaagagguc

SEQ ID NO: 205563 - RNA, 20 nt, Human
auguauguguaggggauagg

SEQ ID NO: 205564 - RNA, 24 nt, Human
caaauaaauuuuaaaaggccagaa

SEQ ID NO: 205565 - RNA, 21 nt, Human
caccugaaggaaauaucuuca

SEQ ID NO: 205566 - RNA, 24 nt, Human
caccugaaggaaauaucuucagug

SEQ ID NO: 205567 - RNA, 20 nt, Human
cauguauguguaggggauag

SEQ ID NO: 205568 - RNA, 20 nt, Human
ccaggaaaauccagguggca

SEQ ID NO: 205569 - RNA, 21 nt, Human
cgcgggccagcaagccuaaaa

SEQ ID NO: 205570 - RNA, 19 nt, Human
cgggccagcaagccuaaaa

SEQ ID NO: 205571 - RNA, 19 nt, Human
gaacucaagaauagaaaua

SEQ ID NO: 205572 - RNA, 20 nt, Human
gagggccggauccugcaggg

SEQ ID NO: 205573 - RNA, 24 nt, Human
gcgggccagcaagccuaaaagcaa

SEQ ID NO: 205574 - RNA, 23 nt, Human
gcgugacccucgucuuugagggc

SEQ ID NO: 205575 - RNA, 22 nt, Human
gggaagagagggcguaccugag

SEQ ID NO: 205576 - RNA, 19 nt, Human
gggccggauccugcaggga

SEQ ID NO: 205577 - RNA, 20 nt, Human
gugaagauuacugugagguc

SEQ ID NO: 205578 - RNA, 21 nt, Human
guguaauuagggaagggcuga

SEQ ID NO: 205579 - RNA, 23 nt, Human
uaaaagcaacucauccggggucc

SEQ ID NO: 205580 - RNA, 18 nt, Human
uaagugugaagauuacug

SEQ ID NO: 205581 - RNA, 18 nt, Human
uacacacaccugaaggaa

SEQ ID NO: 205582 - RNA, 24 nt, Human
uagguguaauuagggaagggcuga

SEQ ID NO: 205583 - RNA, 18 nt, Human
uaugugcauguaugugua

SEQ ID NO: 205584 - RNA, 18 nt, Human
uaugugcauguaugugua

SEQ ID NO: 205585 - RNA, 18 nt, Human
uaugugcauguaugugua

SEQ ID NO: 205586 - RNA, 24 nt, Human
uaugugcauguauguguaggggau

SEQ ID NO: 205587 - RNA, 20 nt, Human
uauuuuacacacaccugaag

SEQ ID NO: 205588 - RNA, 20 nt, Human
ucaguguguucaugugugug

SEQ ID NO: 205589 - RNA, 19 nt, Human
ugaagauuacugugagguc

SEQ ID NO: 205590 - RNA, 22 nt, Human
ugaaguaacauuguaaccugcu

SEQ ID NO: 205591 - RNA, 24 nt, Human
ugaccgaacaacauugauaaguac

SEQ ID NO: 205592 - RNA, 19 nt, Human
ugauauauauacuaugcca

SEQ ID NO: 205593 - RNA, 24 nt, Human
ugcauguauguguaggggauaggu

SEQ ID NO: 205594 - RNA, 20 nt, Human
ugccuggacagccccgcggg

SEQ ID NO: 205595 - RNA, 22 nt, Human
uguauguguaggggauaggugu

SEQ ID NO: 205596 - RNA, 21 nt, Human
ugugugucuaugugcauguau

SEQ ID NO: 205597 - RNA, 24 nt, Human
ugugugucuaugugcauguaugug

SEQ ID NO: 205598 - RNA, 21 nt, Human
uguguucaugugugugucuau

SEQ ID NO: 205599 - RNA, 24 nt, Human
uguguucaugugugugucuaugug

SEQ ID NO: 205600 - RNA, 23 nt, Human
uuuacugaaacuuaaaauauucc

SEQ ID NO: 205601 - RNA, 21 nt, Human
aaacagcauacugaucacuuu

SEQ ID NO: 205602 - RNA, 18 nt, Human
aacagcauacugaucacu

SEQ ID NO: 205603 - RNA, 18 nt, Human
aacagcauacugaucacu

SEQ ID NO: 205604 - RNA, 24 nt, Human
aagacuucugucgcccaggcugga

SEQ ID NO: 205605 - RNA, 21 nt, Human
aagcagagggccuuuccuguc

SEQ ID NO: 205606 - RNA, 18 nt, Human
aagcauugaagaucucac

SEQ ID NO: 205607 - RNA, 20 nt, Human
aagcauugaagaucucacuc

SEQ ID NO: 205608 - RNA, 24 nt, Human
aagugauccuccugccuuggccuc

SEQ ID NO: 205609 - RNA, 20 nt, Human
aauacuuuuuccaucuucag

SEQ ID NO: 205610 - RNA, 26 nt, Human
accuaccaucaaaguaggcuucugaa

SEQ ID NO: 205611 - RNA, 19 nt, Human
accucggagccccggcccc

SEQ ID NO: 205612 - RNA, 21 nt, Human
acuucugucgcccaggcugga

SEQ ID NO: 205613 - RNA, 25 nt, Human
acuuuguugcccaggcuggucucaa

SEQ ID NO: 205614 - RNA, 18 nt, Human
agaaggaaggcauuuaaa

SEQ ID NO: 205615 - RNA, 19 nt, Human
agaguaaauaauuauacca

SEQ ID NO: 205616 - RNA, 22 nt, Human
agauucaugcauugagcaauuc

SEQ ID NO: 205617 - RNA, 22 nt, Human
agauucaugcauugagcaauuc

SEQ ID NO: 205618 - RNA, 24 nt, Human
agcccagugacaccgcaagcagcc

SEQ ID NO: 205619 - RNA, 19 nt, Human
aggaaaaaagcaugagagg

SEQ ID NO: 205620 - RNA, 19 nt, Human
aggaaaaaagcaugagagg

SEQ ID NO: 205621 - RNA, 19 nt, Human
aggaaggaaaccugagccu

SEQ ID NO: 205622 - RNA, 19 nt, Human
aggaaggaaaccugagccu

SEQ ID NO: 205623 - RNA, 21 nt, Human
aggcaggagaacgguggccug

SEQ ID NO: 205624 - RNA, 19 nt, Human
aggcagucaggucugaggc

SEQ ID NO: 205625 - RNA, 21 nt, Human
aggcagucaggucugaggcaa

SEQ ID NO: 205626 - RNA, 19 nt, Human
aggcugggggcagagaagg

SEQ ID NO: 205627 - RNA, 22 nt, Human
aggcugggggcagagaaggaag

SEQ ID NO: 205628 - RNA, 20 nt, Human
auuuucuucuucucuucuuu

SEQ ID NO: 205629 - RNA, 21 nt, Human
caaacuccuggcuccaaguga

SEQ ID NO: 205630 - RNA, 22 nt, Human
caacagcagcaggucaucuuug

SEQ ID NO: 205631 - RNA, 19 nt, Human
caagugauccuccugccuu

SEQ ID NO: 205632 - RNA, 22 nt, Human
caagugauccuccugccuuggc

SEQ ID NO: 205633 - RNA, 20 nt, Human
caauauaaacagggccguug

SEQ ID NO: 205634 - RNA, 20 nt, Human
caauauaaacagggccguug

SEQ ID NO: 205635 - RNA, 25 nt, Human
cacuuuauacuucugcuagccccca

SEQ ID NO: 205636 - RNA, 25 nt, Human
cacuuuauacuucugcuagccccca

SEQ ID NO: 205637 - RNA, 19 nt, Human
cacuuuguugcccaggcug

SEQ ID NO: 205638 - RNA, 24 nt, Human
cacuuuguugcccaggcuggucuc

SEQ ID NO: 205639 - RNA, 20 nt, Human
cagccuccugaguagcuggg

SEQ ID NO: 205640 - RNA, 27 nt, Human
cagcuccuccaccagugugagaacacu

SEQ ID NO: 205641 - RNA, 21 nt, Human
caggagccucccggccgaggu

SEQ ID NO: 205642 - RNA, 20 nt, Human
caucugcucgcuccaagaag

SEQ ID NO: 205643 - RNA, 21 nt, Human
caucuuugucagcaccuucag

SEQ ID NO: 205644 - RNA, 19 nt, Human
ccaagugauccuccugccu

SEQ ID NO: 205645 - RNA, 20 nt, Human
cccaccaggcaccugcugug

SEQ ID NO: 205646 - RNA, 25 nt, Human
cccaggcuggagcacaaccgggguc

SEQ ID NO: 205647 - RNA, 19 nt, Human
cccaguucguuuucuucuu

SEQ ID NO: 205648 - RNA, 21 nt, Human
ccccaggggagcugcuggggg

SEQ ID NO: 205649 - RNA, 21 nt, Human
ccccaggggagcugcuggggg

SEQ ID NO: 205650 - RNA, 21 nt, Human
ccccaggggagcugcuggggg

SEQ ID NO: 205651 - RNA, 19 nt, Human
ccccggccccaggagccuc

SEQ ID NO: 205652 - RNA, 21 nt, Human
cccuuuauaccaaauaagagu

SEQ ID NO: 205653 - RNA, 21 nt, Human
ccgaggucggagccggggucc

SEQ ID NO: 205654 - RNA, 19 nt, Human
ccggggucccugccacugg

SEQ ID NO: 205655 - RNA, 24 nt, Human
ccuccugccucagccuccugagua

SEQ ID NO: 205656 - RNA, 25 nt, Human
ccucggagccccggccccaggagcc

SEQ ID NO: 205657 - RNA, 23 nt, Human
ccugaguagcugggacugcacau

SEQ ID NO: 205658 - RNA, 18 nt, Human
ccuggcuccaagugaucc

SEQ ID NO: 205659 - RNA, 21 nt, Human
ccuggcuccaagugauccucc

SEQ ID NO: 205660 - RNA, 23 nt, Human
ccuggcuccaagugauccuccug

SEQ ID NO: 205661 - RNA, 19 nt, Human
ccuugcgcugguuuucuuc

SEQ ID NO: 205662 - RNA, 20 nt, Human
cgaagaggcugaaccaggca

SEQ ID NO: 205663 - RNA, 20 nt, Human
cgaagaggcugaaccaggca

SEQ ID NO: 205664 - RNA, 24 nt, Human
cggagccccggccccaggagccuc

SEQ ID NO: 205665 - RNA, 18 nt, Human
cggcaugugagugcccuc

SEQ ID NO: 205666 - RNA, 18 nt, Human
cggcaugugagugcccuc

SEQ ID NO: 205667 - RNA, 21 nt, Human
cggcaugugagugcccucccg

SEQ ID NO: 205668 - RNA, 21 nt, Human
cggcaugugagugcccucccg

SEQ ID NO: 205669 - RNA, 21 nt, Human
cggcaugugagugcccucccg

SEQ ID NO: 205670 - RNA, 25 nt, Human
cggcugcaucuguacuuuccugcug

SEQ ID NO: 205671 - RNA, 24 nt, Human
cucagccuccugaguagcugggac

SEQ ID NO: 205672 - RNA, 18 nt, Human
cuccccggggucucuccu

SEQ ID NO: 205673 - RNA, 19 nt, Human
cuccucgacccccaucucc

SEQ ID NO: 205674 - RNA, 24 nt, Human
cucugaggcuguaggacacgucau

SEQ ID NO: 205675 - RNA, 23 nt, Human
cucuuugcugaacucgcccucuu

SEQ ID NO: 205676 - RNA, 23 nt, Human
cucuuugcugaacucgcccucuu

SEQ ID NO: 205677 - RNA, 21 nt, Human
cugcacggcugcaucuguacu

SEQ ID NO: 205678 - RNA, 23 nt, Human
cugccucagccuccugaguagcu

SEQ ID NO: 205679 - RNA, 21 nt, Human
cugggggcagagaaggaaggc

SEQ ID NO: 205680 - RNA, 26 nt, Human
cugugauccuccugccucagccuccu

SEQ ID NO: 205681 - RNA, 22 nt, Human
cuuccuacagcccuccuccaag

SEQ ID NO: 205682 - RNA, 21 nt, Human
cuucugucgcccaggcuggag

SEQ ID NO: 205683 - RNA, 22 nt, Human
cuuuauacuucugcuagccccc

SEQ ID NO: 205684 - RNA, 21 nt, Human
gagcugcugggggcggcaugu

SEQ ID NO: 205685 - RNA, 21 nt, Human
gagcugcugggggcggcaugu

SEQ ID NO: 205686 - RNA, 21 nt, Human
gagcugcugggggcggcaugu

SEQ ID NO: 205687 - RNA, 22 nt, Human
gaguagcugggacugcacaugc

SEQ ID NO: 205688 - RNA, 24 nt, Human
gagugaguuucucucucucuacuc

SEQ ID NO: 205689 - RNA, 18 nt, Human
gcaggucaucuuugucag

SEQ ID NO: 205690 - RNA, 18 nt, Human
gcaucuguacuuuccugc

SEQ ID NO: 205691 - RNA, 24 nt, Human
gcccaggcuggagcacaacggcuc

SEQ ID NO: 205692 - RNA, 20 nt, Human
gccucagccuccugaguagc

SEQ ID NO: 205693 - RNA, 18 nt, Human
gcucugguuuuaucuugg

SEQ ID NO: 205694 - RNA, 23 nt, Human
gcugcaucuguacuuuccugcug

SEQ ID NO: 205695 - RNA, 22 nt, Human
gcuggagcacaacggcucauua

SEQ ID NO: 205696 - RNA, 23 nt, Human
ggcaggaaaaaagcaugagagga

SEQ ID NO: 205697 - RNA, 23 nt, Human
ggcaggaaaaaagcaugagagga

SEQ ID NO: 205698 - RNA, 19 nt, Human
ggcuccaagugauccuccu

SEQ ID NO: 205699 - RNA, 22 nt, Human
ggcuccaagugauccuccugcc

SEQ ID NO: 205700 - RNA, 20 nt, Human
gggaagaaaagcagagggcc

SEQ ID NO: 205701 - RNA, 20 nt, Human
ggggagaaggggcaggaaaa

SEQ ID NO: 205702 - RNA, 20 nt, Human
ggggagaaggggcaggaaaa

SEQ ID NO: 205703 - RNA, 24 nt, Human
gggggucucacuuuguugcccagg

SEQ ID NO: 205704 - RNA, 22 nt, Human
gggucucacuuuguugcccagg

SEQ ID NO: 205705 - RNA, 21 nt, Human
ggucuggcucucccagggcca

SEQ ID NO: 205706 - RNA, 21 nt, Human
ggucuggcucucccagggcca

SEQ ID NO: 205707 - RNA, 19 nt, Human
guagagaugggggucucac

SEQ ID NO: 205708 - RNA, 19 nt, Human
gugagaacacuggcccacc

SEQ ID NO: 205709 - RNA, 19 nt, Human
gugauccuccugccucagc

SEQ ID NO: 205710 - RNA, 24 nt, Human
gugauccuccugccucagccuccu

SEQ ID NO: 205711 - RNA, 23 nt, Human
uaaaacagcauacugaucacuuu

SEQ ID NO: 205712 - RNA, 23 nt, Human
uaaaacagcauacugaucacuuu

SEQ ID NO: 205713 - RNA, 23 nt, Human
uaaaacagcauacugaucacuuu

SEQ ID NO: 205714 - RNA, 19 nt, Human
uaaccuuugaaacucucau

SEQ ID NO: 205715 - RNA, 20 nt, Human
uaccaucaaaguaggcuucu

SEQ ID NO: 205716 - RNA, 24 nt, Human
uagcagguucuuguagcgaggccu

SEQ ID NO: 205717 - RNA, 23 nt, Human
uagcccagugacaccgcaagcag

SEQ ID NO: 205718 - RNA, 19 nt, Human
uaggcuucugaauuucaac

SEQ ID NO: 205719 - RNA, 24 nt, Human
uaggucacugugauccuccugccu

SEQ ID NO: 205720 - RNA, 26 nt, Human
uaguaaguuuguccuuggagagaagc

SEQ ID NO: 205721 - RNA, 22 nt, Human
uauuuuuuguagagaugggggu

SEQ ID NO: 205722 - RNA, 25 nt, Human
ucacuggaagguggcuuggcaggaa

SEQ ID NO: 205723 - RNA, 20 nt, Human
ucacugugauccuccugccu

SEQ ID NO: 205724 - RNA, 23 nt, Human
ucagccaaguaucugagauggcc

SEQ ID NO: 205725 - RNA, 23 nt, Human
ucagccuccugaguagcugggac

SEQ ID NO: 205726 - RNA, 24 nt, Human
ucauccagagcucacuggccuaag

SEQ ID NO: 205727 - RNA, 23 nt, Human
ucauggauggcugccauagugug

SEQ ID NO: 205728 - RNA, 23 nt, Human
uccaaacacagcggcccacucuu

SEQ ID NO: 205729 - RNA, 23 nt, Human
uccaaacacagcggcccacucuu

SEQ ID NO: 205730 - RNA, 22 nt, Human
uccaaggaggaagcauugaaga

SEQ ID NO: 205731 - RNA, 24 nt, Human
uccaagugauccuccugccuuggc

SEQ ID NO: 205732 - RNA, 22 nt, Human
uccacauagagauacacgaaaa

SEQ ID NO: 205733 - RNA, 22 nt, Human
uccaccagugugagaacacugg

SEQ ID NO: 205734 - RNA, 18 nt, Human
uccagagcucacuggaag

SEQ ID NO: 205735 - RNA, 23 nt, Human
uccaugcgguucaccgucagcca

SEQ ID NO: 205736 - RNA, 18 nt, Human
ucccagggccauaguggg

SEQ ID NO: 205737 - RNA, 18 nt, Human
ucccagggccauaguggg

SEQ ID NO: 205738 - RNA, 19 nt, Human
uccccgaccgucccggcug

SEQ ID NO: 205739 - RNA, 20 nt, Human
uccugaguagcugggacugc

SEQ ID NO: 205740 - RNA, 18 nt, Human
ucgaagaaauuuucccag

SEQ ID NO: 205741 - RNA, 19 nt, Human
ucucacuuuguugcccagg

SEQ ID NO: 205742 - RNA, 22 nt, Human
ucucacuuuguugcccaggcug

SEQ ID NO: 205743 - RNA, 23 nt, Human
ucucacuuuguugcccaggcugg

SEQ ID NO: 205744 - RNA, 26 nt, Human
ucucacuuuguugcccaggcuggucu

SEQ ID NO: 205745 - RNA, 27 nt, Human
ucucacuuuguugcccaggcuggucuc

SEQ ID NO: 205746 - RNA, 21 nt, Human
ucuccaaacacagcggcccac

SEQ ID NO: 205747 - RNA, 21 nt, Human
ucuccaaacacagcggcccac

SEQ ID NO: 205748 - RNA, 22 nt, Human
ucuccauuugcuuguagagguc

SEQ ID NO: 205749 - RNA, 21 nt, Human
ucucuacuccccggggucucu

SEQ ID NO: 205750 - RNA, 21 nt, Human
ucugcuagcccccaggggagc

SEQ ID NO: 205751 - RNA, 22 nt, Human
ucugcuagcccccaggggagcc

SEQ ID NO: 205752 - RNA, 22 nt, Human
ucugcuagcccccaggggagcc

SEQ ID NO: 205753 - RNA, 21 nt, Human
ucugcucgcuccaagaagauc

SEQ ID NO: 205754 - RNA, 21 nt, Human
ucuggaucaagcuccugagac

SEQ ID NO: 205755 - RNA, 18 nt, Human
ucugucgcccaggcugga

SEQ ID NO: 205756 - RNA, 23 nt, Human
ucuucuucuauuguugaugauua

SEQ ID NO: 205757 - RNA, 19 nt, Human
ugaacucgcccucuuccaa

SEQ ID NO: 205758 - RNA, 19 nt, Human
ugaacucgcccucuuccaa

SEQ ID NO: 205759 - RNA, 18 nt, Human
ugagaacacuggcccacc

SEQ ID NO: 205760 - RNA, 20 nt, Human
ugagacaagacuucugucgc

SEQ ID NO: 205761 - RNA, 21 nt, Human
ugagauggcccgaugccgaaa

SEQ ID NO: 205762 - RNA, 20 nt, Human
ugccauagugugagaaguuu

SEQ ID NO: 205763 - RNA, 24 nt, Human
ugcccaggcuggucucaaacuccu

SEQ ID NO: 205764 - RNA, 24 nt, Human
ugccucagccuccugaguagcugg

SEQ ID NO: 205765 - RNA, 23 nt, Human
ugcucugguuuuaucuuggaaac

SEQ ID NO: 205766 - RNA, 23 nt, Human
ugcugggggcggcaugugagugc

SEQ ID NO: 205767 - RNA, 23 nt, Human
ugcugggggcggcaugugagugc

SEQ ID NO: 205768 - RNA, 23 nt, Human
ugcugggggcggcaugugagugc

SEQ ID NO: 205769 - RNA, 24 nt, Human
ugcugggggcggcaugugagugcc

SEQ ID NO: 205770 - RNA, 24 nt, Human
ugcugggggcggcaugugagugcc

SEQ ID NO: 205771 - RNA, 24 nt, Human
ugcugggggcggcaugugagugcc

SEQ ID NO: 205772 - RNA, 25 nt, Human
uggagagaagcccagcuccuccacc

SEQ ID NO: 205773 - RNA, 20 nt, Human
uggccgucuccaaacacagc

SEQ ID NO: 205774 - RNA, 20 nt, Human
uggccgucuccaaacacagc

SEQ ID NO: 205775 - RNA, 24 nt, Human
uggcuccaagugauccuccugccu

SEQ ID NO: 205776 - RNA, 22 nt, Human
uggggagggucggggacucggg

SEQ ID NO: 205777 - RNA, 18 nt, Human
uggguccugagcaugcag

SEQ ID NO: 205778 - RNA, 23 nt, Human
ugucaaaguuuuuuuuugcaagg

SEQ ID NO: 205779 - RNA, 24 nt, Human
ugugauccuccugccucagccucc

SEQ ID NO: 205780 - RNA, 22 nt, Human
uguugcccaggcuggucucaaa

SEQ ID NO: 205781 - RNA, 24 nt, Human
uuaaagcuuugcuagccuccugcu

SEQ ID NO: 205782 - RNA, 22 nt, Human
uuaauuggcucggcuccugcac

SEQ ID NO: 205783 - RNA, 20 nt, Human
uuccucagauuucaugucua

SEQ ID NO: 205784 - RNA, 18 nt, Human
uucugucgcccaggcugg

SEQ ID NO: 205785 - RNA, 20 nt, Human
uugcaucaucuuuccugcuc

SEQ ID NO: 205786 - RNA, 25 nt, Human
uuggaucucacgguagcccagugac

SEQ ID NO: 205787 - RNA, 24 nt, Human
uuggucuaaaagcugcgaaggaag

SEQ ID NO: 205788 - RNA, 24 nt, Human
uuggucuaaaagcugcgaaggaag

SEQ ID NO: 205789 - RNA, 22 nt, Human
uuuauuuuuuguagagaugggg

SEQ ID NO: 205790 - RNA, 23 nt, Human
uuuccugucgcuugcaucaucuu

SEQ ID NO: 205791 - RNA, 25 nt, Human
uuuccugucgcuugcaucaucuuuc

SEQ ID NO: 205792 - RNA, 19 nt, Human
uuucuucuucucuucuuuc

SEQ ID NO: 205793 - RNA, 18 nt, Human
uuuggggagaaggggcag

SEQ ID NO: 205794 - RNA, 18 nt, Human
uuuggggagaaggggcag

SEQ ID NO: 205795 - RNA, 23 nt, Human
uuuguugcccaggcuggucucaa

SEQ ID NO: 205796 - RNA, 24 nt, Human
uuuguugcccaggcuggucucaaa

SEQ ID NO: 205797 - RNA, 22 nt, Human
uuuuaucuuggaaaccuuggga

SEQ ID NO: 205798 - RNA, 18 nt, Human
uuuuuuguagagaugggg

SEQ ID NO: 205799 - RNA, 18 nt, Human
aaacaggacaagaggaca

SEQ ID NO: 205800 - RNA, 23 nt, Human
aaaugcuguuguaucugacugag

SEQ ID NO: 205801 - RNA, 25 nt, Human
aagaggacaaggcauagcuugggca

SEQ ID NO: 205802 - RNA, 20 nt, Human
aagucccagccccauuugau

SEQ ID NO: 205803 - RNA, 21 nt, Human
acacauacacacacacacaca

SEQ ID NO: 205804 - RNA, 22 nt, Human
acagagcgagagcuugucuaca

SEQ ID NO: 205805 - RNA, 19 nt, Human
accacugcacuccagccug

SEQ ID NO: 205806 - RNA, 24 nt, Human
accacugcacuccagccuggguga

SEQ ID NO: 205807 - RNA, 20 nt, Human
acccaauaggcagcaaguuu

SEQ ID NO: 205808 - RNA, 23 nt, Human
accuggugaccuugaaugugauu

SEQ ID NO: 205809 - RNA, 18 nt, Human
accuugaaugugauuagg

SEQ ID NO: 205810 - RNA, 18 nt, Human
acucugaguagcagagga

SEQ ID NO: 205811 - RNA, 24 nt, Human
acugcacuccagccugggugacag

SEQ ID NO: 205812 - RNA, 26 nt, Human
acugcacuccagccugggugacagag

SEQ ID NO: 205813 - RNA, 24 nt, Human
agccuauggucccagcuacucagg

SEQ ID NO: 205814 - RNA, 24 nt, Human
agccugggugacagagcgagagcu

SEQ ID NO: 205815 - RNA, 24 nt, Human
agcuacucaggaggcugagguggg

SEQ ID NO: 205816 - RNA, 31 nt, Human
agcuugucuacacauacacacacacacacag

SEQ ID NO: 205817 - RNA, 23 nt, Human
aggacccugaucacugcaggaaa

SEQ ID NO: 205818 - RNA, 24 nt, Human
aggcugaggugggaggaucacuug

SEQ ID NO: 205819 - RNA, 22 nt, Human
aggcugagguugcaacucugag

SEQ ID NO: 205820 - RNA, 23 nt, Human
aggcugagguugcaacucugagg

SEQ ID NO: 205821 - RNA, 22 nt, Human
agggccacuucuucuguaaguc

SEQ ID NO: 205822 - RNA, 18 nt, Human
aggugggaggaucacuug

SEQ ID NO: 205823 - RNA, 23 nt, Human
aggugggaggaucacuugagccc

SEQ ID NO: 205824 - RNA, 23 nt, Human
auacacacacacacacacgcggg

SEQ ID NO: 205825 - RNA, 24 nt, Human
aucaggcuagacuuuaacauccau

SEQ ID NO: 205826 - RNA, 20 nt, Human
aucuuuuugccaggcacucu

SEQ ID NO: 205827 - RNA, 20 nt, Human
auguauguggguggggaggu

SEQ ID NO: 205828 - RNA, 21 nt, Human
auguggguggggagguggcua

SEQ ID NO: 205829 - RNA, 24 nt, Human
auugcaccacugcacuccagccug

SEQ ID NO: 205830 - RNA, 22 nt, Human
caacuguaccuggugaccuuga

SEQ ID NO: 205831 - RNA, 24 nt, Human
caauguugcgagaccccgucucug

SEQ ID NO: 205832 - RNA, 28 nt, Human
cacauacacacacacacacacgcggaug

SEQ ID NO: 205833 - RNA, 20 nt, Human
caccacugcacuccagccug

SEQ ID NO: 205834 - RNA, 26 nt, Human
caccacugcacuccagccugggugac

SEQ ID NO: 205835 - RNA, 22 nt, Human
cacuccagccugggugacagag

SEQ ID NO: 205836 - RNA, 24 nt, Human
cacuccagccugggugacagagcg

SEQ ID NO: 205837 - RNA, 19 nt, Human
cacugcacuccagccuggg

SEQ ID NO: 205838 - RNA, 19 nt, Human
cacugcacuccagccuggg

SEQ ID NO: 205839 - RNA, 19 nt, Human
cacugcacuccagccuggg

SEQ ID NO: 205840 - RNA, 22 nt, Human
cacugcacuccagccuggguga

SEQ ID NO: 205841 - RNA, 24 nt, Human
cacugcacuccagccugggugaca

SEQ ID NO: 205842 - RNA, 25 nt, Human
cacugcacuccagccugggugacag

SEQ ID NO: 205843 - RNA, 22 nt, Human
cagaucagaugggccccaaaug

SEQ ID NO: 205844 - RNA, 24 nt, Human
cagcuacucaggaggcugaggugg

SEQ ID NO: 205845 - RNA, 20 nt, Human
cauaaaagacacucaauaaa

SEQ ID NO: 205846 - RNA, 20 nt, Human
ccacugcacuccagccuggg

SEQ ID NO: 205847 - RNA, 20 nt, Human
ccacugcacuccagccuggg

SEQ ID NO: 205848 - RNA, 20 nt, Human
ccacugcacuccagccuggg

SEQ ID NO: 205849 - RNA, 21 nt, Human
ccacugcacuccagccugggu

SEQ ID NO: 205850 - RNA, 21 nt, Human
ccacugcacuccagccugggu

SEQ ID NO: 205851 - RNA, 24 nt, Human
ccacugcacuccagccugggugac

SEQ ID NO: 205852 - RNA, 25 nt, Human
ccacugcacuccagccugggugaca

SEQ ID NO: 205853 - RNA, 19 nt, Human
ccaggcacucuccugcagu

SEQ ID NO: 205854 - RNA, 22 nt, Human
ccaguccauauagugcuuuugu

SEQ ID NO: 205855 - RNA, 21 nt, Human
ccuauggucccagcuacucag

SEQ ID NO: 205856 - RNA, 22 nt, Human
ccugggugacagagcgagagcu

SEQ ID NO: 205857 - RNA, 18 nt, Human
cucaggaggcugaggugg

SEQ ID NO: 205858 - RNA, 22 nt, Human
cucauguccagacaugaccgcu

SEQ ID NO: 205859 - RNA, 20 nt, Human
cugaaccuguaaccauuacc

SEQ ID NO: 205860 - RNA, 24 nt, Human
cuuccaaagcugggagggaguccu

SEQ ID NO: 205861 - RNA, 20 nt, Human
cuuuuugccaggcacucucc

SEQ ID NO: 205862 - RNA, 24 nt, Human
gaucacuugagcccaaaaggucaa

SEQ ID NO: 205863 - RNA, 24 nt, Human
gcacuccagccugggugacagagc

SEQ ID NO: 205864 - RNA, 22 nt, Human
gccaggcacucuccugcagugu

SEQ ID NO: 205865 - RNA, 18 nt, Human
ggaaggccgaggaagagg

SEQ ID NO: 205866 - RNA, 23 nt, Human
ggaguccuccaauaccuuggccc

SEQ ID NO: 205867 - RNA, 23 nt, Human
ggcagaaauguaugugggugggg

SEQ ID NO: 205868 - RNA, 18 nt, Human
ggccgguagguguagcug

SEQ ID NO: 205869 - RNA, 20 nt, Human
ggggaaaggcagguuggcca

SEQ ID NO: 205870 - RNA, 18 nt, Human
ggggaagggaggaauaag

SEQ ID NO: 205871 - RNA, 19 nt, Human
gguuggggucaguagacag

SEQ ID NO: 205872 - RNA, 26 nt, Human
gguuggggucaguagacagcagugcc

SEQ ID NO: 205873 - RNA, 28 nt, Human
gucucccccaccacuuccccucucauca

SEQ ID NO: 205874 - RNA, 20 nt, Human
gugagccuauggucccagcu

SEQ ID NO: 205875 - RNA, 21 nt, Human
guggggagguggcuaacaaag

SEQ ID NO: 205876 - RNA, 20 nt, Human
gugguguugugagccuaugg

SEQ ID NO: 205877 - RNA, 21 nt, Human
uaccuuggcccccuuccccac

SEQ ID NO: 205878 - RNA, 23 nt, Human
uccagccugggugacagagcgag

SEQ ID NO: 205879 - RNA, 24 nt, Human
uccagccugggugacagagcgaga

SEQ ID NO: 205880 - RNA, 19 nt, Human
uccccucucaucaggcuag

SEQ ID NO: 205881 - RNA, 20 nt, Human
ucuacacauacacacacaca

SEQ ID NO: 205882 - RNA, 20 nt, Human
ucucuggaaaaaaaaaaaaa

SEQ ID NO: 205883 - RNA, 21 nt, Human
ucucuggaaaaaaaaaaaaaa

SEQ ID NO: 205884 - RNA, 18 nt, Human
ugaaugugauuaggacug

SEQ ID NO: 205885 - RNA, 23 nt, Human
ugagccuauggucccagcuacuc

SEQ ID NO: 205886 - RNA, 21 nt, Human
ugaggacaaugcccuguccuc

SEQ ID NO: 205887 - RNA, 20 nt, Human
ugaggcuuccaaagcuggga

SEQ ID NO: 205888 - RNA, 22 nt, Human
ugaggcuuccaaagcugggagg

SEQ ID NO: 205889 - RNA, 19 nt, Human
ugaggugggaggaucacuu

SEQ ID NO: 205890 - RNA, 20 nt, Human
ugaggugggaggaucacuug

SEQ ID NO: 205891 - RNA, 21 nt, Human
ugaggugggaggaucacuuga

SEQ ID NO: 205892 - RNA, 23 nt, Human
ugaggugggaggaucacuugagc

SEQ ID NO: 205893 - RNA, 24 nt, Human
ugaggugggaggaucacuugagcc

SEQ ID NO: 205894 - RNA, 21 nt, Human
ugcaccacugcacuccagccu

SEQ ID NO: 205895 - RNA, 22 nt, Human
ugcagugaaccaugauugcacc

SEQ ID NO: 205896 - RNA, 20 nt, Human
ugcuccuuccucuuggcuua

SEQ ID NO: 205897 - RNA, 19 nt, Human
uggaaaaaaaaaaaaaauc

SEQ ID NO: 205898 - RNA, 21 nt, Human
uggaaaaaaaaaaaaaaucaa

SEQ ID NO: 205899 - RNA, 23 nt, Human
uggagggccacuucuucuguaag

SEQ ID NO: 205900 - RNA, 20 nt, Human
uguauguggguggggaggug

SEQ ID NO: 205901 - RNA, 26 nt, Human
ugucucccccaccacuuccccucuca

SEQ ID NO: 205902 - RNA, 18 nt, Human
uugugccgauagaaaaau

SEQ ID NO: 205903 - RNA, 22 nt, Human
caagucucugcugccugucaca

SEQ ID NO: 205904 - RNA, 19 nt, Human
cagggcuggaccucaaccc

SEQ ID NO: 205905 - RNA, 18 nt, Human
ccuucagccagggcugga

SEQ ID NO: 205906 - RNA, 22 nt, Human
ccuucagccagggcuggaccuc

SEQ ID NO: 205907 - RNA, 19 nt, Human
cgggcucgcagggaccagc

SEQ ID NO: 205908 - RNA, 23 nt, Human
cugcugccugucacaguccuuca

SEQ ID NO: 205909 - RNA, 22 nt, Human
gggaccagccaagggcugccug

SEQ ID NO: 205910 - RNA, 22 nt, Human
gucacacugaguuccagugacc

SEQ ID NO: 205911 - RNA, 19 nt, Human
uggccaugccacucauggu

SEQ ID NO: 205912 - RNA, 21 nt, Human
acagccaagcccccgccaacu

SEQ ID NO: 205913 - RNA, 25 nt, Human
acagccaagcccccgccaacuuuga

SEQ ID NO: 205914 - RNA, 24 nt, Human
cacagccaagcccccgccaacuuu

SEQ ID NO: 205915 - RNA, 27 nt, Human
cacagccaagcccccgccaacuuugau

SEQ ID NO: 205916 - RNA, 22 nt, Human
ccaacuuugaucccggauccca

SEQ ID NO: 205917 - RNA, 18 nt, Human
cccccgccaacuuugauc

SEQ ID NO: 205918 - RNA, 19 nt, Human
ggaaucugagggcacagcc

SEQ ID NO: 205919 - RNA, 19 nt, Human
ggugcggaaucugagggca

SEQ ID NO: 205920 - RNA, 20 nt, Human
ugagggcacagccaagcccc

SEQ ID NO: 205921 - RNA, 19 nt, Human
uuuuuuuuuuuuagggagu

SEQ ID NO: 205922 - RNA, 25 nt, Human
uuuuuuuuuuuuuuuuuuuuagggg

SEQ ID NO: 205923 - RNA, 22 nt, Human
auaaagcaauaaauaagccccc

SEQ ID NO: 205924 - RNA, 24 nt, Human
caauaaauaagcccccgugugagu

SEQ ID NO: 205925 - RNA, 18 nt, Human
ccgugugagucugggggg

SEQ ID NO: 205926 - RNA, 18 nt, Human
gccgcggcggggaaagca

SEQ ID NO: 205927 - RNA, 20 nt, Human
ggauggguagaaaauggggg

SEQ ID NO: 205928 - RNA, 20 nt, Human
ggauggguagaaaauggggg

SEQ ID NO: 205929 - RNA, 19 nt, Human
ggcgaggagagcgcgagcc

SEQ ID NO: 205930 - RNA, 21 nt, Human
gggaaagcacaggaggcgagg

SEQ ID NO: 205931 - RNA, 18 nt, Human
ggggauggguagaaaaug

SEQ ID NO: 205932 - RNA, 20 nt, Human
ggggauggguagaaaauggg

SEQ ID NO: 205933 - RNA, 22 nt, Human
uaaaugaauaaguaaauaaaua

SEQ ID NO: 205934 - RNA, 24 nt, Human
ugaauaaguaaauaaauaaagcaa

SEQ ID NO: 205935 - RNA, 20 nt, Human
aaaaccugcaauggaaaaau

SEQ ID NO: 205936 - RNA, 21 nt, Human
aaacaaacauacugacugaau

SEQ ID NO: 205937 - RNA, 24 nt, Human
aaacaaacauacugacugaaucuu

SEQ ID NO: 205938 - RNA, 22 nt, Human
aaacugccacucagcagcggcc

SEQ ID NO: 205939 - RNA, 21 nt, Human
aaagccaacuuacucucccaa

SEQ ID NO: 205940 - RNA, 22 nt, Human
aaagccaacuuacucucccaaa

SEQ ID NO: 205941 - RNA, 20 nt, Human
aacacagaaaacaagaguuc

SEQ ID NO: 205942 - RNA, 20 nt, Human
aacuuacucucccaaacuug

SEQ ID NO: 205943 - RNA, 19 nt, Human
aagcacuucuuggaucaaa

SEQ ID NO: 205944 - RNA, 24 nt, Human
aagcacuucuuggaucaaaagaaa

SEQ ID NO: 205945 - RNA, 21 nt, Human
aaggagcagcucgugaagggg

SEQ ID NO: 205946 - RNA, 24 nt, Human
aagggguggcaggugcgcugcugc

SEQ ID NO: 205947 - RNA, 28 nt, Human
aaugacauaaaacgauuaagaaaauccc

SEQ ID NO: 205948 - RNA, 21 nt, Human
acaagaguucugagacuggca

SEQ ID NO: 205949 - RNA, 18 nt, Human
acagaacacagaaaacaa

SEQ ID NO: 205950 - RNA, 21 nt, Human
acagaacacagaaaacaagag

SEQ ID NO: 205951 - RNA, 24 nt, Human
acagaacacagaaaacaagaguuc

SEQ ID NO: 205952 - RNA, 25 nt, Human
accccgcgaccucuucuguaaacug

SEQ ID NO: 205953 - RNA, 19 nt, Human
accgcugauaagaaggggu

SEQ ID NO: 205954 - RNA, 19 nt, Human
acgcacagggcaggcauuc

SEQ ID NO: 205955 - RNA, 22 nt, Human
acucaaagccaacuuacucucc

SEQ ID NO: 205956 - RNA, 23 nt, Human
agaagucaaucacuuaccaaauc

SEQ ID NO: 205957 - RNA, 22 nt, Human
agcacuuugggauuacaggcgu

SEQ ID NO: 205958 - RNA, 22 nt, Human
agccuuuaccucauuaaccuga

SEQ ID NO: 205959 - RNA, 23 nt, Human
agcgucucaccucuuaaagcuuc

SEQ ID NO: 205960 - RNA, 23 nt, Human
agugggggacagaaauaaagagg

SEQ ID NO: 205961 - RNA, 24 nt, Human
aucuuggcugggcgugguggcuca

SEQ ID NO: 205962 - RNA, 25 nt, Human
augagaaucaaaucccaaauaaacg

SEQ ID NO: 205963 - RNA, 21 nt, Human
auggaacuaaaaagaagucaa

SEQ ID NO: 205964 - RNA, 21 nt, Human
caaagcauccuaugaggaagu

SEQ ID NO: 205965 - RNA, 30 nt, Human
caaaugucugcccauuuuuguguagcuuuu

SEQ ID NO: 205966 - RNA, 24 nt, Human
caacuuacucucccaaacuugcaa

SEQ ID NO: 205967 - RNA, 22 nt, Human
caagcauugagcuaggaauacc

SEQ ID NO: 205968 - RNA, 24 nt, Human
caaucaaugaacccguaagccucu

SEQ ID NO: 205969 - RNA, 22 nt, Human
cacaacaccccugugagguagg

SEQ ID NO: 205970 - RNA, 20 nt, Human
caccccugugagguaggugg

SEQ ID NO: 205971 - RNA, 22 nt, Human
cacgcacagggcaggcauucag

SEQ ID NO: 205972 - RNA, 21 nt, Human
cacugacaacaggagcugaga

SEQ ID NO: 205973 - RNA, 20 nt, Human
cagaguggugcucuggcccc

SEQ ID NO: 205974 - RNA, 20 nt, Human
caguggcguguggccucggu

SEQ ID NO: 205975 - RNA, 21 nt, Human
ccaaucaaugaacccguaagc

SEQ ID NO: 205976 - RNA, 24 nt, Human
ccagcacuuugggauuacaggcgu

SEQ ID NO: 205977 - RNA, 22 nt, Human
ccagggccaugguccccuuggc

SEQ ID NO: 205978 - RNA, 21 nt, Human
ccaugguccccuuggccuggg

SEQ ID NO: 205979 - RNA, 23 nt, Human
ccaugguccccuuggccuggggc

SEQ ID NO: 205980 - RNA, 20 nt, Human
cccccgggggaaagccagcc

SEQ ID NO: 205981 - RNA, 21 nt, Human
ccccgcgccgacgccgccuuc

SEQ ID NO: 205982 - RNA, 23 nt, Human
ccccgggggaaagccagccaggg

SEQ ID NO: 205983 - RNA, 18 nt, Human
ccucugcagcaguggccc

SEQ ID NO: 205984 - RNA, 25 nt, Human
ccucugcagcaguggcccagagagu

SEQ ID NO: 205985 - RNA, 22 nt, Human
ccuugauucggcauaaggacag

SEQ ID NO: 205986 - RNA, 23 nt, Human
ccuuuacuuacacucuggccucc

SEQ ID NO: 205987 - RNA, 18 nt, Human
cgccgacgccgccuucac

SEQ ID NO: 205988 - RNA, 23 nt, Human
cgcgugguggggcagcagagugg

SEQ ID NO: 205989 - RNA, 20 nt, Human
cggaaagguuuaguggcucc

SEQ ID NO: 205990 - RNA, 25 nt, Human
cgugguggggcagcagaguggugcu

SEQ ID NO: 205991 - RNA, 23 nt, Human
cuagaacaccaagcauugagcua

SEQ ID NO: 205992 - RNA, 21 nt, Human
cucacgcugcaaucccagcac

SEQ ID NO: 205993 - RNA, 23 nt, Human
cucacgcugcaaucccagcacuu

SEQ ID NO: 205994 - RNA, 22 nt, Human
cucccaaacuugcaaaacaaac

SEQ ID NO: 205995 - RNA, 20 nt, Human
cucuucuguaaacugccacu

SEQ ID NO: 205996 - RNA, 18 nt, Human
cugcagcaguggcccaga

SEQ ID NO: 205997 - RNA, 19 nt, Human
cugcugccuuguuuucugu

SEQ ID NO: 205998 - RNA, 22 nt, Human
cugcuuggauuuguaguuguau

SEQ ID NO: 205999 - RNA, 21 nt, Human
cuguaaacugccacucagcag

SEQ ID NO: 206000 - RNA, 20 nt, Human
cuuggcagcaaauacccaga

SEQ ID NO: 206001 - RNA, 22 nt, Human
gaaagguuguaaaugcauuuuu

SEQ ID NO: 206002 - RNA, 22 nt, Human
gacauuguucuucucaguccuc

SEQ ID NO: 206003 - RNA, 22 nt, Human
gagacccccgggggaaagccag

SEQ ID NO: 206004 - RNA, 19 nt, Human
gagcugagacccccggggg

SEQ ID NO: 206005 - RNA, 20 nt, Human
gagggcgcuguggaauauug

SEQ ID NO: 206006 - RNA, 20 nt, Human
gaguugauaaaaugcuuuuc

SEQ ID NO: 206007 - RNA, 20 nt, Human
gaugucgcucccacaucuga

SEQ ID NO: 206008 - RNA, 20 nt, Human
gcaaaacaaacauacugacu

SEQ ID NO: 206009 - RNA, 21 nt, Human
gcagaguggugcucuggcccc

SEQ ID NO: 206010 - RNA, 19 nt, Human
gcauugaaauugagaauau

SEQ ID NO: 206011 - RNA, 18 nt, Human
gccaugguccccuuggcc

SEQ ID NO: 206012 - RNA, 18 nt, Human
gccuuggcagcaaauacc

SEQ ID NO: 206013 - RNA, 21 nt, Human
gcucaaggagcagcucgugaa

SEQ ID NO: 206014 - RNA, 18 nt, Human
gcugccucugcugcagau

SEQ ID NO: 206015 - RNA, 19 nt, Human
gcugccucugcugcagaug

SEQ ID NO: 206016 - RNA, 21 nt, Human
gcugggcgugguggcucacgc

SEQ ID NO: 206017 - RNA, 19 nt, Human
ggaucaaaagaaacugaug

SEQ ID NO: 206018 - RNA, 25 nt, Human
ggaugaauaaagccuacuuuuuagg

SEQ ID NO: 206019 - RNA, 18 nt, Human
ggccuuggguccucaggc

SEQ ID NO: 206020 - RNA, 20 nt, Human
ggcucacgcugcaaucccag

SEQ ID NO: 206021 - RNA, 21 nt, Human
ggcugggcgugguggcucacg

SEQ ID NO: 206022 - RNA, 19 nt, Human
gggcagcagaguggugcuc

SEQ ID NO: 206023 - RNA, 20 nt, Human
gggcaguggcguguggccuc

SEQ ID NO: 206024 - RNA, 25 nt, Human
gggccaugguccccuuggccugggg

SEQ ID NO: 206025 - RNA, 23 nt, Human
gguggcucacgcugcaaucccag

SEQ ID NO: 206026 - RNA, 19 nt, Human
ggugggcaagcccaacuac

SEQ ID NO: 206027 - RNA, 23 nt, Human
guccuuaaggaguucaucuuggc

SEQ ID NO: 206028 - RNA, 26 nt, Human
guggaauauugcugugauuugccccc

SEQ ID NO: 206029 - RNA, 23 nt, Human
guggcucacgcugcaaucccagc

SEQ ID NO: 206030 - RNA, 21 nt, Human
guggggguacuccuaagcagc

SEQ ID NO: 206031 - RNA, 19 nt, Human
uaaaaugagaaucaaaucc

SEQ ID NO: 206032 - RNA, 20 nt, Human
uaaaucgagaaaauugguga

SEQ ID NO: 206033 - RNA, 19 nt, Human
uaaaugaacagaagggaug

SEQ ID NO: 206034 - RNA, 18 nt, Human
uaaccugauucuccacgg

SEQ ID NO: 206035 - RNA, 18 nt, Human
uaauuuugagaacagaac

SEQ ID NO: 206036 - RNA, 23 nt, Human
uaccccuuucugcuguggagugu

SEQ ID NO: 206037 - RNA, 22 nt, Human
uacuugcugcaggauaaaaguu

SEQ ID NO: 206038 - RNA, 21 nt, Human
uaggugguauugaccccauuc

SEQ ID NO: 206039 - RNA, 25 nt, Human
ucaaucacuuaccaaauccuguccu

SEQ ID NO: 206040 - RNA, 21 nt, Human
ucacacuucuucagugccacc

SEQ ID NO: 206041 - RNA, 18 nt, Human
ucaccggggccacugccc

SEQ ID NO: 206042 - RNA, 24 nt, Human
ucacgcugcaaucccagcacuuug

SEQ ID NO: 206043 - RNA, 23 nt, Human
ucacugacaacaggagcugagac

SEQ ID NO: 206044 - RNA, 23 nt, Human
ucaguaucugugaaugaaaaucc

SEQ ID NO: 206045 - RNA, 21 nt, Human
ucagugccaccgcaacacugc

SEQ ID NO: 206046 - RNA, 24 nt, Human
ucagugccaccgcaacacugcaug

SEQ ID NO: 206047 - RNA, 24 nt, Human
uccacgggcccugccacugcuaaa

SEQ ID NO: 206048 - RNA, 21 nt, Human
ucccaaacuugcaaaacaaac

SEQ ID NO: 206049 - RNA, 24 nt, Human
ucccagcacuuugggauuacaggc

SEQ ID NO: 206050 - RNA, 25 nt, Human
ucccagcacuuugggauuacaggcg

SEQ ID NO: 206051 - RNA, 18 nt, Human
ucucccagcgaguccugg

SEQ ID NO: 206052 - RNA, 18 nt, Human
ucugcccauuuuugugua

SEQ ID NO: 206053 - RNA, 24 nt, Human
ucugcuguggaguguugcugagga

SEQ ID NO: 206054 - RNA, 19 nt, Human
ucuucuguaaacugccacu

SEQ ID NO: 206055 - RNA, 21 nt, Human
ugaagggguggcaggugcgcu

SEQ ID NO: 206056 - RNA, 24 nt, Human
ugaccgcuuggucuugagugacau

SEQ ID NO: 206057 - RNA, 18 nt, Human
ugagaauauaagcuaugg

SEQ ID NO: 206058 - RNA, 23 nt, Human
ugcaaaacaaacauacugacuga

SEQ ID NO: 206059 - RNA, 21 nt, Human
ugccaaaccacuacaaaagca

SEQ ID NO: 206060 - RNA, 25 nt, Human
uggaaaacaguuugaaaugacauga

SEQ ID NO: 206061 - RNA, 22 nt, Human
uggcaggaucucacgcugaggc

SEQ ID NO: 206062 - RNA, 21 nt, Human
uggcauugaaauugagaauau

SEQ ID NO: 206063 - RNA, 21 nt, Human
uggcucacgcugcaaucccag

SEQ ID NO: 206064 - RNA, 23 nt, Human
uggcucacgcugcaaucccagca

SEQ ID NO: 206065 - RNA, 19 nt, Human
uggcugggcgugguggcuc

SEQ ID NO: 206066 - RNA, 23 nt, Human
uggcugggcgugguggcucacgc

SEQ ID NO: 206067 - RNA, 20 nt, Human
ugggauaggcugccucugcu

SEQ ID NO: 206068 - RNA, 18 nt, Human
ugggauuacaggcgugcc

SEQ ID NO: 206069 - RNA, 19 nt, Human
ugggauuacaggcgugccc

SEQ ID NO: 206070 - RNA, 20 nt, Human
ugggauuacaggcgugcccg

SEQ ID NO: 206071 - RNA, 23 nt, Human
ugggauuacaggcgugcccggcc

SEQ ID NO: 206072 - RNA, 25 nt, Human
ugggauuacaggcgugcccggccgu

SEQ ID NO: 206073 - RNA, 24 nt, Human
uggggccuuggguccucaggccuu

SEQ ID NO: 206074 - RNA, 23 nt, Human
ugguggcucacgcugcaauccca

SEQ ID NO: 206075 - RNA, 21 nt, Human
ugguuuaggaacauuuucccc

SEQ ID NO: 206076 - RNA, 19 nt, Human
uuaggaacauuuuccccgg

SEQ ID NO: 206077 - RNA, 19 nt, Human
uuaguggcuccucacaggc

SEQ ID NO: 206078 - RNA, 21 nt, Human
uucagugccaccgcaacacug

SEQ ID NO: 206079 - RNA, 18 nt, Human
uucaucuuggcugggcgu

SEQ ID NO: 206080 - RNA, 21 nt, Human
uuccagaagagugacuaauga

SEQ ID NO: 206081 - RNA, 19 nt, Human
uucucaguccucacaacac

SEQ ID NO: 206082 - RNA, 26 nt, Human
uucucaguccucacaacacccccuuu

SEQ ID NO: 206083 - RNA, 22 nt, Human
uuggcugggcgugguggcucac

SEQ ID NO: 206084 - RNA, 23 nt, Human
uuggucuugagugacauuccaga

SEQ ID NO: 206085 - RNA, 21 nt, Human
uuggugauguggccuuggcag

SEQ ID NO: 206086 - RNA, 18 nt, Human
uuguauaugcucaaaucc

SEQ ID NO: 206087 - RNA, 23 nt, Human
uuuuugagagucaaucugcuugg

SEQ ID NO: 206088 - RNA, 19 nt, Human
aaaaagaaaauugagggca

SEQ ID NO: 206089 - RNA, 18 nt, Human
aaauguguuuguuuuacu

SEQ ID NO: 206090 - RNA, 20 nt, Human
aaauguguuuguuuuacugg

SEQ ID NO: 206091 - RNA, 19 nt, Human
acagaaaccugcaaacaac

SEQ ID NO: 206092 - RNA, 20 nt, Human
accaugaaaacauagauaau

SEQ ID NO: 206093 - RNA, 19 nt, Human
accccaccccacacacaga

SEQ ID NO: 206094 - RNA, 23 nt, Human
agaaaccugcaaacaacucaggg

SEQ ID NO: 206095 - RNA, 25 nt, Human
agaauaccuaguggccucuggcucc

SEQ ID NO: 206096 - RNA, 25 nt, Human
agacaggaaguagagaaaagggacc

SEQ ID NO: 206097 - RNA, 24 nt, Human
auauguguguauauauguaugcau

SEQ ID NO: 206098 - RNA, 23 nt, Human
aucuaaagucuugguaaaauggu

SEQ ID NO: 206099 - RNA, 20 nt, Human
auggggaccauuuugaccug

SEQ ID NO: 206100 - RNA, 18 nt, Human
auguacuaauguacaguu

SEQ ID NO: 206101 - RNA, 23 nt, Human
caaacaacucagggaacaccugu

SEQ ID NO: 206102 - RNA, 23 nt, Human
caacccuggaauuccacccaggu

SEQ ID NO: 206103 - RNA, 18 nt, Human
caaccuauaguaacugca

SEQ ID NO: 206104 - RNA, 20 nt, Human
cacacacagaaaccugcaaa

SEQ ID NO: 206105 - RNA, 19 nt, Human
cacagaaaccugcaaacaa

SEQ ID NO: 206106 - RNA, 20 nt, Human
cacagaaaccugcaaacaac

SEQ ID NO: 206107 - RNA, 18 nt, Human
cagacucuccgugguccc

SEQ ID NO: 206108 - RNA, 19 nt, Human
caggcugauggggaccauu

SEQ ID NO: 206109 - RNA, 19 nt, Human
cauuuuucuuguaaaugug

SEQ ID NO: 206110 - RNA, 23 nt, Human
ccagauugaacaaaacaccagca

SEQ ID NO: 206111 - RNA, 22 nt, Human
ccaggccaggugggccaccaug

SEQ ID NO: 206112 - RNA, 24 nt, Human
cccacacacagaaaccugcaaaca

SEQ ID NO: 206113 - RNA, 21 nt, Human
cccaccccacacacagaaacc

SEQ ID NO: 206114 - RNA, 25 nt, Human
cccaccccacacacagaaaccugca

SEQ ID NO: 206115 - RNA, 18 nt, Human
ccccaccccacacacaga

SEQ ID NO: 206116 - RNA, 23 nt, Human
ccccauaccccaccccacacaca

SEQ ID NO: 206117 - RNA, 21 nt, Human
ccuccccauaccccaccccac

SEQ ID NO: 206118 - RNA, 20 nt, Human
cggacagaugcugguccuug

SEQ ID NO: 206119 - RNA, 21 nt, Human
cuaaacuuguaauuaauagca

SEQ ID NO: 206120 - RNA, 21 nt, Human
cucggcaguaccaaggcaguc

SEQ ID NO: 206121 - RNA, 19 nt, Human
cuguacuguacacauccag

SEQ ID NO: 206122 - RNA, 24 nt, Human
cuugguaaaauggucaacuggggu

SEQ ID NO: 206123 - RNA, 20 nt, Human
gagcaagaauaccuaguggc

SEQ ID NO: 206124 - RNA, 19 nt, Human
gaggugucccaugcuuggg

SEQ ID NO: 206125 - RNA, 18 nt, Human
gcaguaccaaggcagucu

SEQ ID NO: 206126 - RNA, 21 nt, Human
ggagacagggauuccacuccc

SEQ ID NO: 206127 - RNA, 20 nt, Human
ggagucucucaacccuggaa

SEQ ID NO: 206128 - RNA, 22 nt, Human
gucaagcccagaggcaccaugg

SEQ ID NO: 206129 - RNA, 23 nt, Human
uaaaauagcuccagcuuugaagc

SEQ ID NO: 206130 - RNA, 19 nt, Human
uaaaauggucaacuggggu

SEQ ID NO: 206131 - RNA, 22 nt, Human
uaacugcagcuuucaggcuaaa

SEQ ID NO: 206132 - RNA, 20 nt, Human
uaacugcagcuuucaggcuc

SEQ ID NO: 206133 - RNA, 21 nt, Human
uaccccaccccacacacagaa

SEQ ID NO: 206134 - RNA, 19 nt, Human
uauacauauguguguauau

SEQ ID NO: 206135 - RNA, 21 nt, Human
uauacauauguguguauauau

SEQ ID NO: 206136 - RNA, 26 nt, Human
uauauacauauguguguauauaugua

SEQ ID NO: 206137 - RNA, 22 nt, Human
uauauguaugcauagauauaua

SEQ ID NO: 206138 - RNA, 22 nt, Human
uauguguguauauauguaugca

SEQ ID NO: 206139 - RNA, 23 nt, Human
uauucugcucuaccccaugagaa

SEQ ID NO: 206140 - RNA, 23 nt, Human
ucuaaagucuugguaaaaugguc

SEQ ID NO: 206141 - RNA, 19 nt, Human
ucuacaaaaagaacuaaac

SEQ ID NO: 206142 - RNA, 23 nt, Human
ucuggcucaggggagucucucaa

SEQ ID NO: 206143 - RNA, 24 nt, Human
ucuuugccuucuuacuacuguuaa

SEQ ID NO: 206144 - RNA, 21 nt, Human
ugaacaaaacaccagcagaag

SEQ ID NO: 206145 - RNA, 21 nt, Human
ugaaggagaguacugaguaug

SEQ ID NO: 206146 - RNA, 19 nt, Human
ugauacagucauucuucca

SEQ ID NO: 206147 - RNA, 22 nt, Human
ugcagacaggaaguagagaaaa

SEQ ID NO: 206148 - RNA, 18 nt, Human
ugcuaggagcagaugugg

SEQ ID NO: 206149 - RNA, 20 nt, Human
ugcuucagaagccuugggca

SEQ ID NO: 206150 - RNA, 24 nt, Human
ugcuucaugccugggugccagagu

SEQ ID NO: 206151 - RNA, 19 nt, Human
ugcuugggaugaggaugug

SEQ ID NO: 206152 - RNA, 19 nt, Human
uggacaaccaggccaggug

SEQ ID NO: 206153 - RNA, 19 nt, Human
uggcccauuaaagaugauu

SEQ ID NO: 206154 - RNA, 19 nt, Human
uggccucuggcucagggga

SEQ ID NO: 206155 - RNA, 21 nt, Human
uggcucaggggagucucucaa

SEQ ID NO: 206156 - RNA, 18 nt, Human
uggcugcucauuugcuuu

SEQ ID NO: 206157 - RNA, 24 nt, Human
ugggcuuucuccaaagcugguugc

SEQ ID NO: 206158 - RNA, 24 nt, Human
uguacacauccagcauuacacaug

SEQ ID NO: 206159 - RNA, 20 nt, Human
uguguauauauguaugcaua

SEQ ID NO: 206160 - RNA, 20 nt, Human
uguguauauauguaugcaua

SEQ ID NO: 206161 - RNA, 21 nt, Human
uguguauauauguaugcauag

SEQ ID NO: 206162 - RNA, 22 nt, Human
uguguauauauguaugcauaga

SEQ ID NO: 206163 - RNA, 18 nt, Human
uguguguauauauguaug

SEQ ID NO: 206164 - RNA, 22 nt, Human
uguuaaaaucucuuugauaagu

SEQ ID NO: 206165 - RNA, 22 nt, Human
uuaaaacuggauuugauuucac

SEQ ID NO: 206166 - RNA, 21 nt, Human
uuauauacauauguguguaua

SEQ ID NO: 206167 - RNA, 20 nt, Human
uuccuaccacuaacuugaac

SEQ ID NO: 206168 - RNA, 21 nt, Human
uugugcccugacacauaugug

SEQ ID NO: 206169 - RNA, 20 nt, Human
uuuccaggcugugugguuuu

SEQ ID NO: 206170 - RNA, 22 nt, Human
uuuuacuggcugaugcacugcu

SEQ ID NO: 206171 - RNA, 21 nt, Human
aaaaaaacagccccacagaac

SEQ ID NO: 206172 - RNA, 22 nt, Human
aaaaaaacagccccacagaacu

SEQ ID NO: 206173 - RNA, 21 nt, Human
aaaaaaaugagguggaagccc

SEQ ID NO: 206174 - RNA, 22 nt, Human
aaaaaacagccccacagaacua

SEQ ID NO: 206175 - RNA, 22 nt, Human
aacaaaaaaacagccccacaga

SEQ ID NO: 206176 - RNA, 22 nt, Human
aagcagauacggaaaauggaac

SEQ ID NO: 206177 - RNA, 19 nt, Human
aagcccgaagcagauacgg

SEQ ID NO: 206178 - RNA, 22 nt, Human
acaauacaaagcaauuuccuca

SEQ ID NO: 206179 - RNA, 22 nt, Human
agaaugggcaaagcgaaaaaaa

SEQ ID NO: 206180 - RNA, 18 nt, Human
agauacggaaaauggaac

SEQ ID NO: 206181 - RNA, 19 nt, Human
caaaaaaacagccccacag

SEQ ID NO: 206182 - RNA, 22 nt, Human
caaaaaaacagccccacagaac

SEQ ID NO: 206183 - RNA, 24 nt, Human
caaaaaaacagccccacagaacua

SEQ ID NO: 206184 - RNA, 21 nt, Human
cacgaguggaaucccaccccc

SEQ ID NO: 206185 - RNA, 22 nt, Human
cacguaauuccucuugcccccu

SEQ ID NO: 206186 - RNA, 27 nt, Human
cagccccacagaacuauuguaaaacaa

SEQ ID NO: 206187 - RNA, 21 nt, Human
ccaggcuggaugcaguuaagg

SEQ ID NO: 206188 - RNA, 19 nt, Human
ccccuggauggcugggguc

SEQ ID NO: 206189 - RNA, 19 nt, Human
cccuaaagucucuggugac

SEQ ID NO: 206190 - RNA, 24 nt, Human
ccucagaaaucugagaagcaccaa

SEQ ID NO: 206191 - RNA, 24 nt, Human
ccucagccucagccccaggcugga

SEQ ID NO: 206192 - RNA, 24 nt, Human
ccucgccagugccucagccucagc

SEQ ID NO: 206193 - RNA, 24 nt, Human
cgccagugccucagccucagcccc

SEQ ID NO: 206194 - RNA, 24 nt, Human
cgcccucuccucgccagugccuca

SEQ ID NO: 206195 - RNA, 24 nt, Human
cucagccucagccccaggcuggau

SEQ ID NO: 206196 - RNA, 20 nt, Human
cucgccagugccucagccuc

SEQ ID NO: 206197 - RNA, 21 nt, Human
cugggguccgccggucccugg

SEQ ID NO: 206198 - RNA, 19 nt, Human
gaucggucuuguucucccu

SEQ ID NO: 206199 - RNA, 18 nt, Human
gccccaggcuggaugcag

SEQ ID NO: 206200 - RNA, 19 nt, Human
gcccgaagcagauacggaa

SEQ ID NO: 206201 - RNA, 18 nt, Human
gccucagccucagcccca

SEQ ID NO: 206202 - RNA, 21 nt, Human
gccucagccucagccccaggc

SEQ ID NO: 206203 - RNA, 21 nt, Human
gggagacccacagagcacgua

SEQ ID NO: 206204 - RNA, 23 nt, Human
uaacaaaaaaacagccccacaga

SEQ ID NO: 206205 - RNA, 26 nt, Human
uaacaaaaaaacagccccacagaacu

SEQ ID NO: 206206 - RNA, 24 nt, Human
uccucgccagugccucagccucag

SEQ ID NO: 206207 - RNA, 21 nt, Human
ugagaagcaccaaacgugacc

SEQ ID NO: 206208 - RNA, 24 nt, Human
uggaaucccacccccuaaagucuc

SEQ ID NO: 206209 - RNA, 20 nt, Human
uggcugaaacagaaugggca

SEQ ID NO: 206210 - RNA, 20 nt, Human
uucaaaaaauagaaacacac

SEQ ID NO: 206211 - RNA, 18 nt, Human
ccauucaacuuguccucc

SEQ ID NO: 206212 - RNA, 19 nt, Human
ccauucaacuuguccuccu

SEQ ID NO: 206213 - RNA, 18 nt, Human
cccugaagcucaggccgc

SEQ ID NO: 206214 - RNA, 20 nt, Human
gagcuggcugcccugaagcu

SEQ ID NO: 206215 - RNA, 23 nt, Human
ggaaggcgagaccgggagggagc

SEQ ID NO: 206216 - RNA, 20 nt, Human
uaaaagaaaucaugaacacc

SEQ ID NO: 206217 - RNA, 24 nt, Human
ugccgccugcugagcuagcugcgc

SEQ ID NO: 206218 - RNA, 23 nt, Human
ugcgcuuggcaccgggcucggcu

SEQ ID NO: 206219 - RNA, 19 nt, Human
uuuguuguuguuguuguug

SEQ ID NO: 206220 - RNA, 21 nt, Human
aaagaaaaccaaaagaagucc

SEQ ID NO: 206221 - RNA, 21 nt, Human
aacuccgcgccccacgcugcc

SEQ ID NO: 206222 - RNA, 18 nt, Human
aagaccgcggagccgcgg

SEQ ID NO: 206223 - RNA, 19 nt, Human
aaggagaccagaagaccag

SEQ ID NO: 206224 - RNA, 21 nt, Human
acagaaccuuucuccaaggag

SEQ ID NO: 206225 - RNA, 24 nt, Human
acagaaccuuucuccaaggagacc

SEQ ID NO: 206226 - RNA, 22 nt, Human
agaaaaccaaaagaagucccgc

SEQ ID NO: 206227 - RNA, 19 nt, Human
agaaagaaaaccaaaagaa

SEQ ID NO: 206228 - RNA, 23 nt, Human
agaaagucaccuuccuguaaaaa

SEQ ID NO: 206229 - RNA, 22 nt, Human
agaccagaagaccagcucugcc

SEQ ID NO: 206230 - RNA, 18 nt, Human
agcaccugcguucugggc

SEQ ID NO: 206231 - RNA, 24 nt, Human
aggagaccagaagaccagcucugc

SEQ ID NO: 206232 - RNA, 23 nt, Human
aggcacgccucuuuauucaaaau

SEQ ID NO: 206233 - RNA, 20 nt, Human
agggggcugccgaagacagc

SEQ ID NO: 206234 - RNA, 19 nt, Human
aggugccccaaagagaaag

SEQ ID NO: 206235 - RNA, 22 nt, Human
auggcccgccucggcccugccc

SEQ ID NO: 206236 - RNA, 19 nt, Human
auguuaacuuuuauaaaaa

SEQ ID NO: 206237 - RNA, 25 nt, Human
caaacaggcuuccuccggcuggucu

SEQ ID NO: 206238 - RNA, 25 nt, Human
caacagaaccuuucuccaaggagac

SEQ ID NO: 206239 - RNA, 24 nt, Human
caccuccacgcucugaagagaccu

SEQ ID NO: 206240 - RNA, 22 nt, Human
caggacuugccguuuaaaccuc

SEQ ID NO: 206241 - RNA, 18 nt, Human
cauggaaacugacucugc

SEQ ID NO: 206242 - RNA, 22 nt, Human
ccaaagagaaagaaaaccaaaa

SEQ ID NO: 206243 - RNA, 22 nt, Human
ccaaagagaaagaaaaccaaaa

SEQ ID NO: 206244 - RNA, 20 nt, Human
ccacugcgggagggcagggc

SEQ ID NO: 206245 - RNA, 18 nt, Human
ccagacccucggccacug

SEQ ID NO: 206246 - RNA, 20 nt, Human
cccacgcugcccccacccag

SEQ ID NO: 206247 - RNA, 21 nt, Human
ccccacccaguuggcgccaaa

SEQ ID NO: 206248 - RNA, 22 nt, Human
ccccacccaguuggcgccaaaa

SEQ ID NO: 206249 - RNA, 20 nt, Human
ccucuccgccagcaaggauu

SEQ ID NO: 206250 - RNA, 21 nt, Human
ccugcccccgccggcccuggg

SEQ ID NO: 206251 - RNA, 23 nt, Human
cgaaguuggggcccaucccugcc

SEQ ID NO: 206252 - RNA, 20 nt, Human
cgcgcgcacgcucgccgcgg

SEQ ID NO: 206253 - RNA, 22 nt, Human
cggcgccagggaggaaacuugg

SEQ ID NO: 206254 - RNA, 21 nt, Human
cuccaaggagaccagaagacc

SEQ ID NO: 206255 - RNA, 20 nt, Human
cuccgcgccccacgcugccc

SEQ ID NO: 206256 - RNA, 21 nt, Human
cucggcccugcccccgccggc

SEQ ID NO: 206257 - RNA, 19 nt, Human
cuuauagagccugccugga

SEQ ID NO: 206258 - RNA, 23 nt, Human
cuuccacaccuccacgcucugaa

SEQ ID NO: 206259 - RNA, 24 nt, Human
cuugccguuuaaaccucccucucc

SEQ ID NO: 206260 - RNA, 18 nt, Human
gaacuuggggguggggug

SEQ ID NO: 206261 - RNA, 18 nt, Human
gaacuuggggguggggug

SEQ ID NO: 206262 - RNA, 21 nt, Human
gaagagaccuuagaacuuggg

SEQ ID NO: 206263 - RNA, 21 nt, Human
gacgccgaagaccgcggagcc

SEQ ID NO: 206264 - RNA, 19 nt, Human
gacuugccguuuaaaccuc

SEQ ID NO: 206265 - RNA, 20 nt, Human
gagaaagaaaaccaaaagaa

SEQ ID NO: 206266 - RNA, 20 nt, Human
gaggugccccaaagagaaag

SEQ ID NO: 206267 - RNA, 28 nt, Human
gcaacagaaccuuucuccaaggagacca

SEQ ID NO: 206268 - RNA, 19 nt, Human
gcccaucccugccguccgg

SEQ ID NO: 206269 - RNA, 22 nt, Human
gccgaagacagcucccuauaca

SEQ ID NO: 206270 - RNA, 18 nt, Human
gcgcgcacgcucgccgcg

SEQ ID NO: 206271 - RNA, 25 nt, Human
ggcgccaaagaccacaggcggagcu

SEQ ID NO: 206272 - RNA, 19 nt, Human
gggaggaaagaagaccaag

SEQ ID NO: 206273 - RNA, 19 nt, Human
gggcgggggaggaaagaag

SEQ ID NO: 206274 - RNA, 22 nt, Human
ggggcccaucccugccguccgg

SEQ ID NO: 206275 - RNA, 20 nt, Human
gggguggggugggagcaggg

SEQ ID NO: 206276 - RNA, 22 nt, Human
uaaauugcaaacaggcuuccuc

SEQ ID NO: 206277 - RNA, 22 nt, Human
uauuauagaguucauaaaucag

SEQ ID NO: 206278 - RNA, 24 nt, Human
uauuauagaguucauaaaucaggg

SEQ ID NO: 206279 - RNA, 21 nt, Human
ucacucaaaaccauuaacuuc

SEQ ID NO: 206280 - RNA, 18 nt, Human
ucacuugucccucucugg

SEQ ID NO: 206281 - RNA, 22 nt, Human
uccaagagaggagauacucacc

SEQ ID NO: 206282 - RNA, 21 nt, Human
uccaaggagaccagaagacca

SEQ ID NO: 206283 - RNA, 22 nt, Human
uccaggaagggauuuggugaag

SEQ ID NO: 206284 - RNA, 26 nt, Human
uccggcaggagagguucccggggucc

SEQ ID NO: 206285 - RNA, 23 nt, Human
uccugagcaccagguuuagucuc

SEQ ID NO: 206286 - RNA, 21 nt, Human
ucggcccugcccccgccggcc

SEQ ID NO: 206287 - RNA, 23 nt, Human
ucuccaaggagaccagaagacca

SEQ ID NO: 206288 - RNA, 24 nt, Human
ugcacaucacauggaaacugacuc

SEQ ID NO: 206289 - RNA, 22 nt, Human
ugccagacccucggccacugcg

SEQ ID NO: 206290 - RNA, 25 nt, Human
uggccagagcuagcucuggcucuuc

SEQ ID NO: 206291 - RNA, 23 nt, Human
ugggcagggcgaaguuggggccc

SEQ ID NO: 206292 - RNA, 18 nt, Human
ugucaggacacggccgag

SEQ ID NO: 206293 - RNA, 19 nt, Human
ugucuacuuugccagaccc

SEQ ID NO: 206294 - RNA, 18 nt, Human
uucaaaacgucugccaac

SEQ ID NO: 206295 - RNA, 23 nt, Human
uuccuggcagcaccccagaucuu

SEQ ID NO: 206296 - RNA, 21 nt, Human
uucugggcgggggaggaaaga

SEQ ID NO: 206297 - RNA, 18 nt, Human
uuggggguggggugggag

SEQ ID NO: 206298 - RNA, 19 nt, Human
uuuccuggcagcaccccag

SEQ ID NO: 206299 - RNA, 19 nt, Human
uuugccagacccucggcca

SEQ ID NO: 206300 - RNA, 21 nt, Human
uuugccagacccucggccacu

SEQ ID NO: 206301 - RNA, 22 nt, Human
aaaaaaaaaauaucuacaaugc

SEQ ID NO: 206302 - RNA, 19 nt, Human
aaaaaaaacacacacauaa

SEQ ID NO: 206303 - RNA, 19 nt, Human
aaaaaaaagcaaaagcacc

SEQ ID NO: 206304 - RNA, 24 nt, Human
aaaaaaaagcaaaagcaccggaag

SEQ ID NO: 206305 - RNA, 25 nt, Human
aaaaaaacacacacauaauauuuac

SEQ ID NO: 206306 - RNA, 26 nt, Human
aaaaaagcaaaagcaccggaagaaaa

SEQ ID NO: 206307 - RNA, 19 nt, Human
aaaaagcaaaagcaccgga

SEQ ID NO: 206308 - RNA, 22 nt, Human
aaagaaauauucccauagauua

SEQ ID NO: 206309 - RNA, 18 nt, Human
aaaggaaaaaaaaagcaa

SEQ ID NO: 206310 - RNA, 21 nt, Human
aaaggaaaaaaaaagcaaaag

SEQ ID NO: 206311 - RNA, 24 nt, Human
aacguuucuagguuggccgauguu

SEQ ID NO: 206312 - RNA, 21 nt, Human
aacugcaccuccaaaaaacac

SEQ ID NO: 206313 - RNA, 25 nt, Human
aagacagagaaaucuacuuuaauau

SEQ ID NO: 206314 - RNA, 24 nt, Human
aagcaaauuaagagccaggccaaa

SEQ ID NO: 206315 - RNA, 21 nt, Human
aagcccgaucgcggccgccgc

SEQ ID NO: 206316 - RNA, 19 nt, Human
aaguagcccacccgggugu

SEQ ID NO: 206317 - RNA, 19 nt, Human
aaguuuaacugcaccucca

SEQ ID NO: 206318 - RNA, 22 nt, Human
aaucauucagaauccauuuuga

SEQ ID NO: 206319 - RNA, 22 nt, Human
acauguaugcuucaaauacaaa

SEQ ID NO: 206320 - RNA, 22 nt, Human
agaaaucuacuuuaauauucac

SEQ ID NO: 206321 - RNA, 23 nt, Human
agacaaaagagaauacguaugua

SEQ ID NO: 206322 - RNA, 18 nt, Human
agcaaaagcaccggaaga

SEQ ID NO: 206323 - RNA, 19 nt, Human
agcaagcagagaacauuuu

SEQ ID NO: 206324 - RNA, 19 nt, Human
agugggcgacacucagccc

SEQ ID NO: 206325 - RNA, 21 nt, Human
caaaagcaccggaagaaaagu

SEQ ID NO: 206326 - RNA, 23 nt, Human
caacauguaugcuucaaauacaa

SEQ ID NO: 206327 - RNA, 21 nt, Human
caagcauuuccucaucccaua

SEQ ID NO: 206328 - RNA, 19 nt, Human
caagcuccgggccccgucc

SEQ ID NO: 206329 - RNA, 28 nt, Human
cacagcaguuauaaaugaagagacaaaa

SEQ ID NO: 206330 - RNA, 22 nt, Human
cacccggguguccuagucacuc

SEQ ID NO: 206331 - RNA, 20 nt, Human
caccggaagaaaaguagccc

SEQ ID NO: 206332 - RNA, 19 nt, Human
caccuccaaaaaacacaga

SEQ ID NO: 206333 - RNA, 21 nt, Human
caccuccaaaaaacacagaaa

SEQ ID NO: 206334 - RNA, 20 nt, Human
cacuuugauaaaacagcaga

SEQ ID NO: 206335 - RNA, 19 nt, Human
caugguaugaaaugucacu

SEQ ID NO: 206336 - RNA, 20 nt, Human
cauucagaauccauuuugac

SEQ ID NO: 206337 - RNA, 23 nt, Human
cauucagaauccauuuugaccuc

SEQ ID NO: 206338 - RNA, 27 nt, Human
ccaaaaaacacagaaauguacaauuca

SEQ ID NO: 206339 - RNA, 23 nt, Human
cccaaaggaaaaaaaaagcaaaa

SEQ ID NO: 206340 - RNA, 21 nt, Human
ccccucccucucuagugcucc

SEQ ID NO: 206341 - RNA, 24 nt, Human
cccgagcccaaaggaaaaaaaaag

SEQ ID NO: 206342 - RNA, 19 nt, Human
ccgccgcgcuccccuagcc

SEQ ID NO: 206343 - RNA, 18 nt, Human
ccgcgcccggcgcgcucg

SEQ ID NO: 206344 - RNA, 23 nt, Human
ccgcgcccggcgcgcucggggca

SEQ ID NO: 206345 - RNA, 20 nt, Human
ccggaagaaaaguagcccac

SEQ ID NO: 206346 - RNA, 23 nt, Human
ccgggccccguccgcggccggcu

SEQ ID NO: 206347 - RNA, 18 nt, Human
ccucaguugaaaaacaaa

SEQ ID NO: 206348 - RNA, 20 nt, Human
ccuccaaaaaacacagaaau

SEQ ID NO: 206349 - RNA, 22 nt, Human
cgcucggggcaccgcgacacuc

SEQ ID NO: 206350 - RNA, 22 nt, Human
cggccgcacaccuggacagcgc

SEQ ID NO: 206351 - RNA, 23 nt, Human
cggcgcgcucggggcaccgcgac

SEQ ID NO: 206352 - RNA, 18 nt, Human
cgggaucaccccacuccc

SEQ ID NO: 206353 - RNA, 18 nt, Human
cguaaacuccuuaaggau

SEQ ID NO: 206354 - RNA, 22 nt, Human
cuccccuagcccgggaucaccc

SEQ ID NO: 206355 - RNA, 18 nt, Human
cuccgacuaagcccgauc

SEQ ID NO: 206356 - RNA, 19 nt, Human
cuccgcgcccggcgcgcuc

SEQ ID NO: 206357 - RNA, 23 nt, Human
cuccuggcucgggcucaggcggc

SEQ ID NO: 206358 - RNA, 25 nt, Human
cuccuggcucgggcucaggcggccg

SEQ ID NO: 206359 - RNA, 18 nt, Human
cucuacgcgagcgaaccc

SEQ ID NO: 206360 - RNA, 21 nt, Human
cuguugccuauuaauucuuug

SEQ ID NO: 206361 - RNA, 18 nt, Human
cuuuccuccgguggcuuu

SEQ ID NO: 206362 - RNA, 22 nt, Human
gagccaggccaaacagaaaaga

SEQ ID NO: 206363 - RNA, 21 nt, Human
gccgccgcgcuccccuagccc

SEQ ID NO: 206364 - RNA, 20 nt, Human
gcuuuuuuucucuaacuucu

SEQ ID NO: 206365 - RNA, 23 nt, Human
ggcucaggcggccgcacaccugg

SEQ ID NO: 206366 - RNA, 24 nt, Human
gguggcuuuuuuucucuaacuucu

SEQ ID NO: 206367 - RNA, 27 nt, Human
uaaagcuucaaaacaaaaauugagcuc

SEQ ID NO: 206368 - RNA, 23 nt, Human
uaagcaauuuuuuuucacuuuga

SEQ ID NO: 206369 - RNA, 19 nt, Human
uacacaucacaagagaugg

SEQ ID NO: 206370 - RNA, 21 nt, Human
uauauauuacacuauaaaacc

SEQ ID NO: 206371 - RNA, 22 nt, Human
uaugcaaaaucauucagaaucc

SEQ ID NO: 206372 - RNA, 23 nt, Human
ucauuuaucuauacaauauguaa

SEQ ID NO: 206373 - RNA, 22 nt, Human
uccgcgcccggcgcgcucgggg

SEQ ID NO: 206374 - RNA, 21 nt, Human
uccgggccccguccgcggccg

SEQ ID NO: 206375 - RNA, 20 nt, Human
ucuacuuuaauauucacaug

SEQ ID NO: 206376 - RNA, 22 nt, Human
ucuauacugggcaaaacaaaag

SEQ ID NO: 206377 - RNA, 18 nt, Human
ucucuagugcuccuggcu

SEQ ID NO: 206378 - RNA, 24 nt, Human
ucucuuggaaugacgaaugaaaac

SEQ ID NO: 206379 - RNA, 18 nt, Human
ucugcucuucccccuccc

SEQ ID NO: 206380 - RNA, 18 nt, Human
ucuuuccucucucucucu

SEQ ID NO: 206381 - RNA, 24 nt, Human
ugaaaaaugauuuuccaaaagaaa

SEQ ID NO: 206382 - RNA, 22 nt, Human
ugaagagacaaaagagaauacg

SEQ ID NO: 206383 - RNA, 19 nt, Human
ugcaaagaaagaaugaaag

SEQ ID NO: 206384 - RNA, 23 nt, Human
ugcaaagaaagaaugaaaguugu

SEQ ID NO: 206385 - RNA, 20 nt, Human
ugcagagaaaagaaaguucu

SEQ ID NO: 206386 - RNA, 18 nt, Human
ugguaugaaaugucacuc

SEQ ID NO: 206387 - RNA, 22 nt, Human
uguauuuucaacauguaugcuu

SEQ ID NO: 206388 - RNA, 19 nt, Human
uguucauuuccaagaguuu

SEQ ID NO: 206389 - RNA, 28 nt, Human
uuaaaaaaacacauuugaauggacucag

SEQ ID NO: 206390 - RNA, 21 nt, Human
uucaaaacaaaaauugagcuc

SEQ ID NO: 206391 - RNA, 21 nt, Human
uucguaaacuccuuaaggauc

SEQ ID NO: 206392 - RNA, 19 nt, Human
uugaauggacucagaacaa

SEQ ID NO: 206393 - RNA, 21 nt, Human
uugcagagaaaagaaaguucu

SEQ ID NO: 206394 - RNA, 21 nt, Human
uugcucagugggcgacacuca

SEQ ID NO: 206395 - RNA, 19 nt, Human
uuggucugcuuaaguuaau

SEQ ID NO: 206396 - RNA, 25 nt, Human
uuuuuuuuuuuuuuuuuuuuacaag

SEQ ID NO: 206397 - RNA, 23 nt, Human
cagucgccgggaucaccgcaaac

SEQ ID NO: 206398 - RNA, 24 nt, Human
ucagaaacuauuaaaguggccaag

SEQ ID NO: 206399 - RNA, 20 nt, Human
ucuuaggcucuggaagacuc

SEQ ID NO: 206400 - RNA, 21 nt, Human
aaaaagugacagugaauacaa

SEQ ID NO: 206401 - RNA, 21 nt, Human
aaaagacaauuauccuucuua

SEQ ID NO: 206402 - RNA, 18 nt, Human
aaccgaauuccuaggcug

SEQ ID NO: 206403 - RNA, 19 nt, Human
aaccggacucccagugccu

SEQ ID NO: 206404 - RNA, 19 nt, Human
aagcucagacucacaacca

SEQ ID NO: 206405 - RNA, 22 nt, Human
aaguagacucugcagaaacccg

SEQ ID NO: 206406 - RNA, 22 nt, Human
aauuagaacaugagaaaaagug

SEQ ID NO: 206407 - RNA, 22 nt, Human
acaggccagcagaaguccaaaa

SEQ ID NO: 206408 - RNA, 20 nt, Human
accaaaagacaauuauccuu

SEQ ID NO: 206409 - RNA, 23 nt, Human
acccuuuugagcaaucuugauuu

SEQ ID NO: 206410 - RNA, 24 nt, Human
acgggauaucuaugacaccagaac

SEQ ID NO: 206411 - RNA, 23 nt, Human
acuucguuccagucaugugcaag

SEQ ID NO: 206412 - RNA, 23 nt, Human
agaaauaaaacaggccagcagaa

SEQ ID NO: 206413 - RNA, 18 nt, Human
agacucugcagaaacccg

SEQ ID NO: 206414 - RNA, 18 nt, Human
aggccagcagaaguccaa

SEQ ID NO: 206415 - RNA, 19 nt, Human
agucuugcagacucaacug

SEQ ID NO: 206416 - RNA, 20 nt, Human
aguuggggcgccacagccgc

SEQ ID NO: 206417 - RNA, 20 nt, Human
caaaacgggauaucuaugac

SEQ ID NO: 206418 - RNA, 27 nt, Human
caaaagacaauuauccuucuuagcuca

SEQ ID NO: 206419 - RNA, 23 nt, Human
caaucccaaaccggacucccagu

SEQ ID NO: 206420 - RNA, 22 nt, Human
caccccaguuccucccagucuu

SEQ ID NO: 206421 - RNA, 21 nt, Human
cagacucaacugaauguaguu

SEQ ID NO: 206422 - RNA, 20 nt, Human
caggagaagauaagauagug

SEQ ID NO: 206423 - RNA, 26 nt, Human
ccacagccuggcaaucccaaaccuug

SEQ ID NO: 206424 - RNA, 19 nt, Human
ccagaacuucccugugccc

SEQ ID NO: 206425 - RNA, 21 nt, Human
ccagaacuucccugugcccaa

SEQ ID NO: 206426 - RNA, 23 nt, Human
cuaggcugguacuagaaaauaaa

SEQ ID NO: 206427 - RNA, 25 nt, Human
gaaaagauaaacucuggcuucuaau

SEQ ID NO: 206428 - RNA, 24 nt, Human
gagcaaucuugauuuuggucauuu

SEQ ID NO: 206429 - RNA, 23 nt, Human
gcaaucccaaaccggacucccag

SEQ ID NO: 206430 - RNA, 21 nt, Human
gcaaucuugauuuuggucauu

SEQ ID NO: 206431 - RNA, 21 nt, Human
gcagaaguccaaaaaagauuc

SEQ ID NO: 206432 - RNA, 20 nt, Human
gcggccuaaacaguauuuag

SEQ ID NO: 206433 - RNA, 21 nt, Human
ggacucccagugccuccgcuu

SEQ ID NO: 206434 - RNA, 19 nt, Human
gggaaggcagugaauuucu

SEQ ID NO: 206435 - RNA, 24 nt, Human
gugacagugaauacaaaugaguac

SEQ ID NO: 206436 - RNA, 22 nt, Human
uaaaacaggccagcagaagucc

SEQ ID NO: 206437 - RNA, 23 nt, Human
uaaaccuguagaccuaguuacca

SEQ ID NO: 206438 - RNA, 21 nt, Human
uaacacagaaaaauguaaacc

SEQ ID NO: 206439 - RNA, 25 nt, Human
uaacacagaaaaauguaaaccugua

SEQ ID NO: 206440 - RNA, 18 nt, Human
uaccucacaaaacgggau

SEQ ID NO: 206441 - RNA, 24 nt, Human
uaguuuaucgccugccgggaugau

SEQ ID NO: 206442 - RNA, 24 nt, Human
uauauaaaagaaauaaaacaggcc

SEQ ID NO: 206443 - RNA, 23 nt, Human
uauauaagaaaaaggcuguaaac

SEQ ID NO: 206444 - RNA, 18 nt, Human
uauuuuagggagcaauac

SEQ ID NO: 206445 - RNA, 24 nt, Human
ucacaaagguggcaauaacuguau

SEQ ID NO: 206446 - RNA, 18 nt, Human
ucacaaccacagccuggc

SEQ ID NO: 206447 - RNA, 19 nt, Human
ucaggccaggccaggagga

SEQ ID NO: 206448 - RNA, 19 nt, Human
ucccaaaccggacucccag

SEQ ID NO: 206449 - RNA, 21 nt, Human
ucccugugcccaaggucaugg

SEQ ID NO: 206450 - RNA, 26 nt, Human
ucccuugccauguucacaaagguugg

SEQ ID NO: 206451 - RNA, 18 nt, Human
uccggauuccaaacucuc

SEQ ID NO: 206452 - RNA, 19 nt, Human
ugacagugaauacaaauga

SEQ ID NO: 206453 - RNA, 26 nt, Human
ugacagugaauacaaaugaguacuaa

SEQ ID NO: 206454 - RNA, 24 nt, Human
ugacagugaauagauuucuuauca

SEQ ID NO: 206455 - RNA, 22 nt, Human
ugagaaaucacauuuauauaaa

SEQ ID NO: 206456 - RNA, 23 nt, Human
ugcacagcucuaccucacaaaac

SEQ ID NO: 206457 - RNA, 19 nt, Human
ugcccaaggucauggacag

SEQ ID NO: 206458 - RNA, 21 nt, Human
uggcaaucccaaaccggacuc

SEQ ID NO: 206459 - RNA, 23 nt, Human
uggggcgccacagccgcucacaa

SEQ ID NO: 206460 - RNA, 24 nt, Human
ugguacuagaaaauaaaauaaaaa

SEQ ID NO: 206461 - RNA, 19 nt, Human
uguaaaaaagucccuugcc

SEQ ID NO: 206462 - RNA, 22 nt, Human
uuaaugcacagcucuaccucac

SEQ ID NO: 206463 - RNA, 20 nt, Human
uuagaguaguauaauauuca

SEQ ID NO: 206464 - RNA, 21 nt, Human
uugacagugaauagauuucuu

SEQ ID NO: 206465 - RNA, 24 nt, Human
aaaaaaacauccccuagaaaggcc

SEQ ID NO: 206466 - RNA, 27 nt, Human
aaaaacauccccuagaaaggccuccuu

SEQ ID NO: 206467 - RNA, 22 nt, Human
aaacaucuggcuuauaaaaaaa

SEQ ID NO: 206468 - RNA, 20 nt, Human
acugcuccugccucacguca

SEQ ID NO: 206469 - RNA, 23 nt, Human
caauauaaauuacaguaugcaaa

SEQ ID NO: 206470 - RNA, 19 nt, Human
caccauguguuccaagggc

SEQ ID NO: 206471 - RNA, 19 nt, Human
cccuagaaaggccuccaga

SEQ ID NO: 206472 - RNA, 20 nt, Human
ccgcuccucccggcugccug

SEQ ID NO: 206473 - RNA, 21 nt, Human
ccuggccccuccacugcagcc

SEQ ID NO: 206474 - RNA, 25 nt, Human
ccuggccccuccacugguccccugg

SEQ ID NO: 206475 - RNA, 20 nt, Human
cgcacugcuccugccucacg

SEQ ID NO: 206476 - RNA, 18 nt, Human
cgccgcuccucccggcug

SEQ ID NO: 206477 - RNA, 24 nt, Human
cucagcccuggccccuccacugca

SEQ ID NO: 206478 - RNA, 21 nt, Human
cuccucccggcugccuggccg

SEQ ID NO: 206479 - RNA, 21 nt, Human
cugcuccugccucacgucacu

SEQ ID NO: 206480 - RNA, 22 nt, Human
gagcgcgcgccgcuccucccgg

SEQ ID NO: 206481 - RNA, 20 nt, Human
gccggcucagcccuggcccc

SEQ ID NO: 206482 - RNA, 19 nt, Human
gggcgggagagguccgagc

SEQ ID NO: 206483 - RNA, 21 nt, Human
guaaaacgcacugcuccugcc

SEQ ID NO: 206484 - RNA, 19 nt, Human
uaaaaaaacauccccuaga

SEQ ID NO: 206485 - RNA, 21 nt, Human
uaaaaaaacauccccuagaaa

SEQ ID NO: 206486 - RNA, 18 nt, Human
uagaaaggccuccagaga

SEQ ID NO: 206487 - RNA, 23 nt, Human
uauaaaaaaacauccccuagaaa

SEQ ID NO: 206488 - RNA, 19 nt, Human
uaugcaaaacauacugacu

SEQ ID NO: 206489 - RNA, 18 nt, Human
uccacugcagccaugggu

SEQ ID NO: 206490 - RNA, 18 nt, Human
uccccuagaaaggccucc

SEQ ID NO: 206491 - RNA, 18 nt, Human
ugaggggaaacacacaua

SEQ ID NO: 206492 - RNA, 25 nt, Human
ugagguaaaacgcacugcuccugcc

SEQ ID NO: 206493 - RNA, 23 nt, Human
ugcaaaacauacugacuggcuga

SEQ ID NO: 206494 - RNA, 20 nt, Human
ugccgcgcucaggaggaccc

SEQ ID NO: 206495 - RNA, 20 nt, Human
uggcuuauaaaaaaacaucc

SEQ ID NO: 206496 - RNA, 19 nt, Human
uuaguagcuaaauauggca

SEQ ID NO: 206497 - RNA, 21 nt, Human
uuuuuuuuuuugugaagagcu

SEQ ID NO: 206498 - RNA, 22 nt, Human
aaaaaguucuuugaaaacagac

SEQ ID NO: 206499 - RNA, 20 nt, Human
aagaaaaggccagaucuaaa

SEQ ID NO: 206500 - RNA, 25 nt, Human
aagaaaaggccagaucuaaaaaugu

SEQ ID NO: 206501 - RNA, 18 nt, Human
aagaaaauaagguuuuuc

SEQ ID NO: 206502 - RNA, 18 nt, Human
aaggaaaaggagaugccu

SEQ ID NO: 206503 - RNA, 19 nt, Human
acaaaggaaaauacauuua

SEQ ID NO: 206504 - RNA, 22 nt, Human
acucaggcugaguugccuccag

SEQ ID NO: 206505 - RNA, 22 nt, Human
agagaaacuauuuuaacuuaag

SEQ ID NO: 206506 - RNA, 22 nt, Human
agaggaagacaggaaggaaaag

SEQ ID NO: 206507 - RNA, 22 nt, Human
agaggguaacuguucaugaaaa

SEQ ID NO: 206508 - RNA, 22 nt, Human
agccaaaauacauguguucggg

SEQ ID NO: 206509 - RNA, 23 nt, Human
aggaagcagcagcuuaaacaaag

SEQ ID NO: 206510 - RNA, 23 nt, Human
aggaaggaaaaggagaugccuga

SEQ ID NO: 206511 - RNA, 19 nt, Human
aggagaaggggcaguugcu

SEQ ID NO: 206512 - RNA, 24 nt, Human
agggucaaaagcugagcccaagcc

SEQ ID NO: 206513 - RNA, 23 nt, Human
agugugguccauucccagacagc

SEQ ID NO: 206514 - RNA, 22 nt, Human
auccaccugcaucuuuugcaca

SEQ ID NO: 206515 - RNA, 23 nt, Human
aucgcccccagaacuaccugcug

SEQ ID NO: 206516 - RNA, 20 nt, Human
caaaaaaaacauuuaccagg

SEQ ID NO: 206517 - RNA, 19 nt, Human
caaaaaccgaagaaaauaa

SEQ ID NO: 206518 - RNA, 19 nt, Human
caaaagcugagcccaagcc

SEQ ID NO: 206519 - RNA, 21 nt, Human
caaaauacauguguucgggcc

SEQ ID NO: 206520 - RNA, 23 nt, Human
caacaaaauaauugaacacacaa

SEQ ID NO: 206521 - RNA, 18 nt, Human
caagccuaagcccaagcu

SEQ ID NO: 206522 - RNA, 21 nt, Human
caaugcauacauacguaggua

SEQ ID NO: 206523 - RNA, 18 nt, Human
cacucagaguuuacaaaa

SEQ ID NO: 206524 - RNA, 23 nt, Human
cacucagaguuuacaaaaaaaac

SEQ ID NO: 206525 - RNA, 23 nt, Human
cagcaacaugcaagaauaaguuu

SEQ ID NO: 206526 - RNA, 22 nt, Human
cagcagcuuaaacaaaggaaaa

SEQ ID NO: 206527 - RNA, 24 nt, Human
caugaugcugaaaauguauccagu

SEQ ID NO: 206528 - RNA, 21 nt, Human
cauuauguuuuucaaaaaccg

SEQ ID NO: 206529 - RNA, 25 nt, Human
cauuauguuuuucaaaaaccgaaga

SEQ ID NO: 206530 - RNA, 25 nt, Human
cccaagagccacugauaacuggcac

SEQ ID NO: 206531 - RNA, 21 nt, Human
cuaaaaaaaaaaaaauccccu

SEQ ID NO: 206532 - RNA, 19 nt, Human
gaagacaggaaggaaaagg

SEQ ID NO: 206533 - RNA, 18 nt, Human
gaggaagcagcagcuuaa

SEQ ID NO: 206534 - RNA, 23 nt, Human
gaguugccuccagucuuuggaau

SEQ ID NO: 206535 - RNA, 19 nt, Human
gcaguaauuggugcuuugg

SEQ ID NO: 206536 - RNA, 21 nt, Human
ggcucagaggcugugacaacu

SEQ ID NO: 206537 - RNA, 18 nt, Human
gggauaucauugcuaaaa

SEQ ID NO: 206538 - RNA, 20 nt, Human
gggcucagaggcugugacaa

SEQ ID NO: 206539 - RNA, 21 nt, Human
ggggcgguuacaagcuuaaaa

SEQ ID NO: 206540 - RNA, 18 nt, Human
gguacugcugaggcagag

SEQ ID NO: 206541 - RNA, 21 nt, Human
guaaaggacaaaucugucucu

SEQ ID NO: 206542 - RNA, 20 nt, Human
gucuuugguuguggggacag

SEQ ID NO: 206543 - RNA, 23 nt, Human
uaagcccaagcucaagcucaagc

SEQ ID NO: 206544 - RNA, 22 nt, Human
uacaaaauuaauagcaucccaa

SEQ ID NO: 206545 - RNA, 18 nt, Human
uacacucagcccuucugg

SEQ ID NO: 206546 - RNA, 21 nt, Human
uacacucagcccuucuggcuu

SEQ ID NO: 206547 - RNA, 23 nt, Human
uaccugcuguagugugguccauu

SEQ ID NO: 206548 - RNA, 25 nt, Human
uaucauugcuaaaaaaaaaaaaauc

SEQ ID NO: 206549 - RNA, 18 nt, Human
uauccagugaaaaugaag

SEQ ID NO: 206550 - RNA, 22 nt, Human
ucagaggcugugacaacucaug

SEQ ID NO: 206551 - RNA, 21 nt, Human
ucauugcuaaaaaaaaaaaaa

SEQ ID NO: 206552 - RNA, 22 nt, Human
ucauugcuaaaaaaaaaaaaau

SEQ ID NO: 206553 - RNA, 23 nt, Human
uccacucagaguuuacaaaaaaa

SEQ ID NO: 206554 - RNA, 21 nt, Human
uccauucccagacagcaacau

SEQ ID NO: 206555 - RNA, 20 nt, Human
ucuggcuucagaucaggggg

SEQ ID NO: 206556 - RNA, 23 nt, Human
ugaaaaugaaguacuagcucucu

SEQ ID NO: 206557 - RNA, 23 nt, Human
ugaaauacaaaauuaauagcauc

SEQ ID NO: 206558 - RNA, 19 nt, Human
ugaacccaagagccacuga

SEQ ID NO: 206559 - RNA, 20 nt, Human
ugaaguacuagcucucugcu

SEQ ID NO: 206560 - RNA, 21 nt, Human
ugagcccaagccuaagcccaa

SEQ ID NO: 206561 - RNA, 23 nt, Human
ugagcccaagccuaagcccaagc

SEQ ID NO: 206562 - RNA, 20 nt, Human
ugaguugucuuugguugugg

SEQ ID NO: 206563 - RNA, 25 nt, Human
ugccuccagucuuuggaaugucauc

SEQ ID NO: 206564 - RNA, 18 nt, Human
ugcugaggcagagggcag

SEQ ID NO: 206565 - RNA, 21 nt, Human
uggaaaaaguucuuugaaaac

SEQ ID NO: 206566 - RNA, 24 nt, Human
uggaaagaauauuaaaucucaaga

SEQ ID NO: 206567 - RNA, 19 nt, Human
ugggauaggagaaggggca

SEQ ID NO: 206568 - RNA, 22 nt, Human
ugggauaggagaaggggcaguu

SEQ ID NO: 206569 - RNA, 21 nt, Human
uggggacagaggguaacuguu

SEQ ID NO: 206570 - RNA, 23 nt, Human
ugucaucuuauacugguacugcu

SEQ ID NO: 206571 - RNA, 23 nt, Human
ugugacaacucaugaugcugaaa

SEQ ID NO: 206572 - RNA, 19 nt, Human
uugaacccaagagccacug

SEQ ID NO: 206573 - RNA, 22 nt, Human
uuggaaagaauauuaaaucuca

SEQ ID NO: 206574 - RNA, 21 nt, Human
aacaauccccaucaccaccca

SEQ ID NO: 206575 - RNA, 23 nt, Human
aacaauccccaucaccacccaac

SEQ ID NO: 206576 - RNA, 20 nt, Human
aaggaagccggcccaaggac

SEQ ID NO: 206577 - RNA, 25 nt, Human
acccagcaaggggugaccauggucc

SEQ ID NO: 206578 - RNA, 18 nt, Human
accuaggcucuacccagc

SEQ ID NO: 206579 - RNA, 22 nt, Human
agaaucaucaucauccaugugg

SEQ ID NO: 206580 - RNA, 21 nt, Human
aggcagcaaugacagccucag

SEQ ID NO: 206581 - RNA, 23 nt, Human
aggggugaccaugguccacugcc

SEQ ID NO: 206582 - RNA, 19 nt, Human
agugugguccuugcaaggu

SEQ ID NO: 206583 - RNA, 21 nt, Human
caugaaaagacccgaagcaag

SEQ ID NO: 206584 - RNA, 18 nt, Human
ccacccaacagucugucc

SEQ ID NO: 206585 - RNA, 20 nt, Human
ccaucaccacccaacagucu

SEQ ID NO: 206586 - RNA, 22 nt, Human
cccaacagucuguccccuaagg

SEQ ID NO: 206587 - RNA, 21 nt, Human
cccaucaccacccaacagucu

SEQ ID NO: 206588 - RNA, 23 nt, Human
ccccaucaccacccaacagucug

SEQ ID NO: 206589 - RNA, 19 nt, Human
ccccuaaggaagccggccc

SEQ ID NO: 206590 - RNA, 21 nt, Human
ccuaacaauccccaucaccac

SEQ ID NO: 206591 - RNA, 18 nt, Human
cuauggguggggcaaggc

SEQ ID NO: 206592 - RNA, 19 nt, Human
gcagcaaugacagccucag

SEQ ID NO: 206593 - RNA, 21 nt, Human
guacacugcacugaaggguau

SEQ ID NO: 206594 - RNA, 18 nt, Human
uccauccuaacaaucccc

SEQ ID NO: 206595 - RNA, 18 nt, Human
ugacagccucagugaagu

SEQ ID NO: 206596 - RNA, 19 nt, Human
ugcacugaaggguaugggg

SEQ ID NO: 206597 - RNA, 21 nt, Human
ugggcuccauccuaacaaucc

SEQ ID NO: 206598 - RNA, 20 nt, Human
ugucagagguucgaaccugu

SEQ ID NO: 206599 - RNA, 23 nt, Human
uuacauggguauggacagggccu

SEQ ID NO: 206600 - RNA, 22 nt, Human
uuagaggcacaaggucucuucc

SEQ ID NO: 206601 - RNA, 18 nt, Human
cgguacugcgcacgcgcg

SEQ ID NO: 206602 - RNA, 24 nt, Human
gcaccgcugccgccauguugaggg

SEQ ID NO: 206603 - RNA, 18 nt, Human
gcuggcuggggugcugga

SEQ ID NO: 206604 - RNA, 20 nt, Human
ucacgcccccuuccggcgcc

SEQ ID NO: 206605 - RNA, 19 nt, Human
uccaaggagcaaaccaaga

SEQ ID NO: 206606 - RNA, 21 nt, Human
uccaaggagcaaaccaagaag

SEQ ID NO: 206607 - RNA, 22 nt, Human
ucgcaccgauucacgcccccuu

SEQ ID NO: 206608 - RNA, 20 nt, Human
uggcuggggugcuggagugg

SEQ ID NO: 206609 - RNA, 25 nt, Human
uuuuuuuuuuuuuuuuuucuagggg

SEQ ID NO: 206610 - RNA, 24 nt, Human
uuuuuuuuuuuuuuuuuuuuucuu

SEQ ID NO: 206611 - RNA, 25 nt, Human
aaaaaaaaacugguccaauuaccaa

SEQ ID NO: 206612 - RNA, 19 nt, Human
aaaaaacugguccaauuac

SEQ ID NO: 206613 - RNA, 22 nt, Human
aaauuaaaaaaaaaacuggucc

SEQ ID NO: 206614 - RNA, 18 nt, Human
aaguagaaacucaucacc

SEQ ID NO: 206615 - RNA, 21 nt, Human
acuguuuuaaaaagagggaaa

SEQ ID NO: 206616 - RNA, 21 nt, Human
aguagaaacucaucaccuaga

SEQ ID NO: 206617 - RNA, 24 nt, Human
caaaacgaccagcucuaacuccuc

SEQ ID NO: 206618 - RNA, 18 nt, Human
caacacagccgccgcccg

SEQ ID NO: 206619 - RNA, 21 nt, Human
caacacagccgccgcccgggc

SEQ ID NO: 206620 - RNA, 24 nt, Human
caacacagccgccgcccgggcccg

SEQ ID NO: 206621 - RNA, 24 nt, Human
caauuaccaauuauaaauuuuaau

SEQ ID NO: 206622 - RNA, 19 nt, Human
caccagcuggaagggagca

SEQ ID NO: 206623 - RNA, 19 nt, Human
cacguuagagacuuggcua

SEQ ID NO: 206624 - RNA, 19 nt, Human
caggcgcagacgggcggcc

SEQ ID NO: 206625 - RNA, 25 nt, Human
cauuuccuguuguaaaaaccagagg

SEQ ID NO: 206626 - RNA, 19 nt, Human
ccacagaaaggguuauuuc

SEQ ID NO: 206627 - RNA, 21 nt, Human
ccagcuggaagggagcacauc

SEQ ID NO: 206628 - RNA, 24 nt, Human
ccaugaagacugcgcaacacagcc

SEQ ID NO: 206629 - RNA, 24 nt, Human
ccaugaagacugcgcaacacagcc

SEQ ID NO: 206630 - RNA, 23 nt, Human
ccgccgcccgggcccgcagcugg

SEQ ID NO: 206631 - RNA, 20 nt, Human
cggccgcuucagagcggcgg

SEQ ID NO: 206632 - RNA, 20 nt, Human
cggccgcuucagagcggcgg

SEQ ID NO: 206633 - RNA, 21 nt, Human
cucacaccucacggcggguuc

SEQ ID NO: 206634 - RNA, 24 nt, Human
gagaccuccucgucgggaacccau

SEQ ID NO: 206635 - RNA, 24 nt, Human
gagaccuccucgucgggaacccau

SEQ ID NO: 206636 - RNA, 19 nt, Human
gagcacaucacauuugcca

SEQ ID NO: 206637 - RNA, 23 nt, Human
gcaacacagccgccgcccgggcc

SEQ ID NO: 206638 - RNA, 21 nt, Human
gccgcagccacagagaccucc

SEQ ID NO: 206639 - RNA, 21 nt, Human
gccgcagccacagagaccucc

SEQ ID NO: 206640 - RNA, 18 nt, Human
ggcccgcagcuggccgca

SEQ ID NO: 206641 - RNA, 23 nt, Human
uaaaaaaaaaacugguccaauua

SEQ ID NO: 206642 - RNA, 22 nt, Human
uaccacagaaaggguuauuuca

SEQ ID NO: 206643 - RNA, 21 nt, Human
uagcagccgccgcagccacag

SEQ ID NO: 206644 - RNA, 19 nt, Human
uaggcguggcgagagacag

SEQ ID NO: 206645 - RNA, 24 nt, Human
uauauuauuaaauuauaaacaaaa

SEQ ID NO: 206646 - RNA, 20 nt, Human
uauuauggguaaucacaaaa

SEQ ID NO: 206647 - RNA, 24 nt, Human
ucacaccucacggcggguucauag

SEQ ID NO: 206648 - RNA, 20 nt, Human
ucacaccucacggggugcuc

SEQ ID NO: 206649 - RNA, 22 nt, Human
ucacuuggaauuaccacagaaa

SEQ ID NO: 206650 - RNA, 18 nt, Human
uccgugcgacucuucccu

SEQ ID NO: 206651 - RNA, 20 nt, Human
ucucaccagcuggaagggag

SEQ ID NO: 206652 - RNA, 20 nt, Human
uggaauuaccacagaaaggg

SEQ ID NO: 206653 - RNA, 22 nt, Human
uggccgcagcgcgagugcgucc

SEQ ID NO: 206654 - RNA, 20 nt, Human
cccacuggggcucagcacag

SEQ ID NO: 206655 - RNA, 24 nt, Human
ggacugcggggcuucgggcugcaa

SEQ ID NO: 206656 - RNA, 18 nt, Human
ggugcaacccacuggggc

SEQ ID NO: 206657 - RNA, 21 nt, Human
aaacuuacgacccaccaccag

SEQ ID NO: 206658 - RNA, 21 nt, Human
aaacuuacgacccaccaccag

SEQ ID NO: 206659 - RNA, 20 nt, Human
aacccccaacccucuaccuc

SEQ ID NO: 206660 - RNA, 22 nt, Human
aauauuaauuaggagcaauaag

SEQ ID NO: 206661 - RNA, 24 nt, Human
acagcccaccaacccccaccccuc

SEQ ID NO: 206662 - RNA, 25 nt, Human
accaacccccaacccucuaccucgc

SEQ ID NO: 206663 - RNA, 19 nt, Human
accaccagacuucauccca

SEQ ID NO: 206664 - RNA, 19 nt, Human
accaccagacuucauccca

SEQ ID NO: 206665 - RNA, 20 nt, Human
accagguacgccugguguuu

SEQ ID NO: 206666 - RNA, 22 nt, Human
acccccaccccucuaccucgua

SEQ ID NO: 206667 - RNA, 23 nt, Human
acccuaaaggcgacuucaagaag

SEQ ID NO: 206668 - RNA, 23 nt, Human
acccuaaaggcgacuucaagaag

SEQ ID NO: 206669 - RNA, 18 nt, Human
accgggccuagccccagc

SEQ ID NO: 206670 - RNA, 23 nt, Human
accuccuaaacuuacgacccacc

SEQ ID NO: 206671 - RNA, 23 nt, Human
accuccuaaacuuacgacccacc

SEQ ID NO: 206672 - RNA, 18 nt, Human
acuucaagaagauggaag

SEQ ID NO: 206673 - RNA, 18 nt, Human
acuucaagaagauggaag

SEQ ID NO: 206674 - RNA, 20 nt, Human
acuucaagaagauggaagga

SEQ ID NO: 206675 - RNA, 20 nt, Human
acuucaagaagauggaagga

SEQ ID NO: 206676 - RNA, 23 nt, Human
agaugcuggaggaugcagucacc

SEQ ID NO: 206677 - RNA, 23 nt, Human
agaugcuggaggaugcagucacc

SEQ ID NO: 206678 - RNA, 23 nt, Human
agcccagcugggcugugccucgg

SEQ ID NO: 206679 - RNA, 24 nt, Human
auuacguacacaucuccaucaccu

SEQ ID NO: 206680 - RNA, 24 nt, Human
auuacguacacaucuccaucaccu

SEQ ID NO: 206681 - RNA, 18 nt, Human
caacccccaacccucuac

SEQ ID NO: 206682 - RNA, 20 nt, Human
caacccccaacccucuaccu

SEQ ID NO: 206683 - RNA, 18 nt, Human
caagagaccugcauuuac

SEQ ID NO: 206684 - RNA, 18 nt, Human
caagagaccugcauuuac

SEQ ID NO: 206685 - RNA, 20 nt, Human
caccaacccccaccccucua

SEQ ID NO: 206686 - RNA, 22 nt, Human
caccagguacgccugguguuuc

SEQ ID NO: 206687 - RNA, 21 nt, Human
caccuccuaaacuuacgaccc

SEQ ID NO: 206688 - RNA, 27 nt, Human
cagcccaccaacccccaacccucuacc

SEQ ID NO: 206689 - RNA, 20 nt, Human
cagccgggacguccuccccc

SEQ ID NO: 206690 - RNA, 20 nt, Human
cagccgggacguccuccccc

SEQ ID NO: 206691 - RNA, 20 nt, Human
ccaacccccaacccucuacc

SEQ ID NO: 206692 - RNA, 23 nt, Human
ccaccaccagacuucaucccagc

SEQ ID NO: 206693 - RNA, 23 nt, Human
ccaccaccagacuucaucccagc

SEQ ID NO: 206694 - RNA, 19 nt, Human
ccaccagucccacaaagcu

SEQ ID NO: 206695 - RNA, 19 nt, Human
ccaccagucccacaaagcu

SEQ ID NO: 206696 - RNA, 30 nt, Human
ccagucccacaaagcucaauaaauaccaag

SEQ ID NO: 206697 - RNA, 30 nt, Human; identical to SEQ ID NO: 206696

SEQ ID NO: 206698 - RNA, 24 nt, Human
cccacaaagcucaauaaauaccaa

SEQ ID NO: 206699 - RNA, 24 nt, Human
cccacaaagcucaauaaauaccaa

SEQ ID NO: 206700 - RNA, 23 nt, Human
cccacaaagcucaauaaauaccu

SEQ ID NO: 206701 - RNA, 23 nt, Human
cccacaaagcucaauaaauaccu

SEQ ID NO: 206702 - RNA, 25 nt, Human
cccaccaacccccaacccucuaccu

SEQ ID NO: 206703 - RNA, 25 nt, Human
cccaccaacccccaccccucuaccu

SEQ ID NO: 206704 - RNA, 24 nt, Human
ccccaacccucuaccucgcagcca

SEQ ID NO: 206705 - RNA, 22 nt, Human
cccccacccgaguccuccccau

SEQ ID NO: 206706 - RNA, 22 nt, Human
cccccacccgaguccuccccau

SEQ ID NO: 206707 - RNA, 19 nt, Human
ccggguggcgucuccgcug

SEQ ID NO: 206708 - RNA, 24 nt, Human
ccucccccacccgaguccucccca

SEQ ID NO: 206709 - RNA, 24 nt, Human
ccucccccacccgaguccucccca

SEQ ID NO: 206710 - RNA, 19 nt, Human
ccucggucucugugcgccu

SEQ ID NO: 206711 - RNA, 19 nt, Human
ccugguguuucuuuguggu

SEQ ID NO: 206712 - RNA, 18 nt, Human
cgacccaccaccagacuu

SEQ ID NO: 206713 - RNA, 21 nt, Human
cgccgaagucucacacaguag

SEQ ID NO: 206714 - RNA, 21 nt, Human
cgccgaagucucacacaguag

SEQ ID NO: 206715 - RNA, 23 nt, Human
cgcuccgugacagcccaccaacc

SEQ ID NO: 206716 - RNA, 18 nt, Human
cguacauaaauacauaua

SEQ ID NO: 206717 - RNA, 21 nt, Human
cuaaacuuacgacccaccacc

SEQ ID NO: 206718 - RNA, 21 nt, Human
cuaaacuuacgacccaccacc

SEQ ID NO: 206719 - RNA, 23 nt, Human
cuagcccagcugggcugugccuc

SEQ ID NO: 206720 - RNA, 18 nt, Human
cucacggaucucauuccu

SEQ ID NO: 206721 - RNA, 18 nt, Human
cucacggaucucauuccu

SEQ ID NO: 206722 - RNA, 21 nt, Human
cuccgugacagcccaccaacc

SEQ ID NO: 206723 - RNA, 21 nt, Human
cuccgugacagcccaccaacc

SEQ ID NO: 206724 - RNA, 23 nt, Human
cucgcagccacccuaaaggcgac

SEQ ID NO: 206725 - RNA, 23 nt, Human
cucguagccacccuaaaggcgac

SEQ ID NO: 206726 - RNA, 20 nt, Human
cugaguucaaguugccucgg

SEQ ID NO: 206727 - RNA, 19 nt, Human
cugggcugugccucggucu

SEQ ID NO: 206728 - RNA, 23 nt, Human
cuguaguguucugaguucaaguu

SEQ ID NO: 206729 - RNA, 26 nt, Human
cuuacgacccaccaccagacuucauc

SEQ ID NO: 206730 - RNA, 26 nt, Human
cuuacgacccaccaccagacuucauc

SEQ ID NO: 206731 - RNA, 18 nt, Human
cuucaagaagauggaagg

SEQ ID NO: 206732 - RNA, 18 nt, Human
cuucaagaagauggaagg

SEQ ID NO: 206733 - RNA, 21 nt, Human
cuucccaccgggccuagcccc

SEQ ID NO: 206734 - RNA, 20 nt, Human
gacguacauaaauacauaua

SEQ ID NO: 206735 - RNA, 19 nt, Human
gaguccuccccauuucuuc

SEQ ID NO: 206736 - RNA, 19 nt, Human
gaguccuccccauuucuuc

SEQ ID NO: 206737 - RNA, 20 nt, Human
gccugguguuucuuuguggu

SEQ ID NO: 206738 - RNA, 22 nt, Human
gggauacgcucucgcgcaccag

SEQ ID NO: 206739 - RNA, 21 nt, Human
guaguguucugaguucaaguu

SEQ ID NO: 206740 - RNA, 20 nt, Human
uaaaauaaauauuacguaca

SEQ ID NO: 206741 - RNA, 20 nt, Human
uaaaauaaauauuacguaca

SEQ ID NO: 206742 - RNA, 24 nt, Human
uaaauauuaauuaggagcaauaag

SEQ ID NO: 206743 - RNA, 27 nt, Human
uaacgacgcucuccuucccaccggccu

SEQ ID NO: 206744 - RNA, 18 nt, Human
uaaugguccgccgaaguc

SEQ ID NO: 206745 - RNA, 18 nt, Human
uaaugguccgccgaaguc

SEQ ID NO: 206746 - RNA, 24 nt, Human
uaggagcaauaagaaauaaauuaa

SEQ ID NO: 206747 - RNA, 25 nt, Human
uaggagcaauaagaaauaaauuaac

SEQ ID NO: 206748 - RNA, 22 nt, Human
ucaccuccuaaacuuacgaccc

SEQ ID NO: 206749 - RNA, 18 nt, Human
uccaccagucccacaaag

SEQ ID NO: 206750 - RNA, 18 nt, Human
uccaccagucccacaaag

SEQ ID NO: 206751 - RNA, 18 nt, Human
uccccauuucuucuccua

SEQ ID NO: 206752 - RNA, 18 nt, Human
uccccauuucuucuccua

SEQ ID NO: 206753 - RNA, 24 nt, Human
ugagccgagcggaguguaaggcca

SEQ ID NO: 206754 - RNA, 19 nt, Human
ugccucggucucuaugcgc

SEQ ID NO: 206755 - RNA, 22 nt, Human
uggggagugcggggagucacag

SEQ ID NO: 206756 - RNA, 22 nt, Human
uguccugcuuccaccaguccca

SEQ ID NO: 206757 - RNA, 22 nt, Human
uguccugcuuccaccaguccca

SEQ ID NO: 206758 - RNA, 20 nt, Human
uucaagaagauggaaggauc

SEQ ID NO: 206759 - RNA, 20 nt, Human
uucaagaagauggaaggauc

SEQ ID NO: 206760 - RNA, 25 nt, Human
aaaauagucuuaaugccacaagaca

SEQ ID NO: 206761 - RNA, 21 nt, Human
aaccuuuuagccgcuuccuuc

SEQ ID NO: 206762 - RNA, 22 nt, Human
aaccuuuuagccgcuuccuucu

SEQ ID NO: 206763 - RNA, 18 nt, Human
aagcucccaggucuccag

SEQ ID NO: 206764 - RNA, 23 nt, Human
aagggccuggcccucacuucggg

SEQ ID NO: 206765 - RNA, 21 nt, Human
accuuaucagcucccccaacc

SEQ ID NO: 206766 - RNA, 23 nt, Human
accuuaucagcucccccaaccuu

SEQ ID NO: 206767 - RNA, 21 nt, Human
accuuuauacaacaaagacug

SEQ ID NO: 206768 - RNA, 19 nt, Human
acucuggugacgcgcgcgc

SEQ ID NO: 206769 - RNA, 24 nt, Human
agaaagguggggagggacagaagg

SEQ ID NO: 206770 - RNA, 20 nt, Human
agacacguagaaguuacauu

SEQ ID NO: 206771 - RNA, 26 nt, Human
agacauacacaaacacaaaaguuaac

SEQ ID NO: 206772 - RNA, 21 nt, Human
caaacaagacaacuuccccgu

SEQ ID NO: 206773 - RNA, 23 nt, Human
caacaaagacuggagucaccaua

SEQ ID NO: 206774 - RNA, 24 nt, Human
caaccuuuauacaacaaagacugg

SEQ ID NO: 206775 - RNA, 23 nt, Human
caagacaaacuuacauacacaga

SEQ ID NO: 206776 - RNA, 20 nt, Human
caagacaacuuccccguuuc

SEQ ID NO: 206777 - RNA, 21 nt, Human
caccuaagacuccgaagagaa

SEQ ID NO: 206778 - RNA, 23 nt, Human
caccuccuccccgcagggggacc

SEQ ID NO: 206779 - RNA, 27 nt, Human
cacuccuggcccugaagcgggucuagc

SEQ ID NO: 206780 - RNA, 21 nt, Human
cagaaggaauccaagucugug

SEQ ID NO: 206781 - RNA, 22 nt, Human
ccacgcagccggcagaggaaag

SEQ ID NO: 206782 - RNA, 20 nt, Human
ccccaaccuuuauacaacaa

SEQ ID NO: 206783 - RNA, 24 nt, Human
cccccugggcacacccucgaucac

SEQ ID NO: 206784 - RNA, 19 nt, Human
ccccggagaacgaaugggg

SEQ ID NO: 206785 - RNA, 20 nt, Human
cccucgaucaccuaagacuc

SEQ ID NO: 206786 - RNA, 22 nt, Human
ccggcccaaaccuuuuagccgc

SEQ ID NO: 206787 - RNA, 19 nt, Human
ccuaagacuccgaagagaa

SEQ ID NO: 206788 - RNA, 18 nt, Human
ccuggcccugaagcgggu

SEQ ID NO: 206789 - RNA, 18 nt, Human
ccuucuccacgcagccgg

SEQ ID NO: 206790 - RNA, 19 nt, Human
cgccacuccuggcccugaa

SEQ ID NO: 206791 - RNA, 19 nt, Human
cgcccccugggcacacccu

SEQ ID NO: 206792 - RNA, 22 nt, Human
cggaaacgccacuccuggcccu

SEQ ID NO: 206793 - RNA, 22 nt, Human
cguccucuuccaaugagccuca

SEQ ID NO: 206794 - RNA, 23 nt, Human
cucucauuaaacacuuuuuaaaa

SEQ ID NO: 206795 - RNA, 18 nt, Human
cucuuccaaugagccuca

SEQ ID NO: 206796 - RNA, 19 nt, Human
cucuuccaaugagccucaa

SEQ ID NO: 206797 - RNA, 21 nt, Human
cugaagcgggucuagcuuucc

SEQ ID NO: 206798 - RNA, 19 nt, Human
cuguguaguacuucugacc

SEQ ID NO: 206799 - RNA, 21 nt, Human
cuucugucuguaaacucucau

SEQ ID NO: 206800 - RNA, 19 nt, Human
gcagccgggaagggccugg

SEQ ID NO: 206801 - RNA, 19 nt, Human
gcguccucgcagccgggaa

SEQ ID NO: 206802 - RNA, 22 nt, Human
ggcgcaaacaaguccgcccccu

SEQ ID NO: 206803 - RNA, 23 nt, Human
ggcuucugucuguaaacucucau

SEQ ID NO: 206804 - RNA, 18 nt, Human
gucuccagauaagccaga

SEQ ID NO: 206805 - RNA, 20 nt, Human
uaaacuccauuauuuccaag

SEQ ID NO: 206806 - RNA, 20 nt, Human
uaaccucuccaaacaagaca

SEQ ID NO: 206807 - RNA, 22 nt, Human
uaaggucuuuccacuucgggcu

SEQ ID NO: 206808 - RNA, 22 nt, Human
uaauacgccccuuuccuagagu

SEQ ID NO: 206809 - RNA, 25 nt, Human
uacaacgaaggagaaaauacuguac

SEQ ID NO: 206810 - RNA, 20 nt, Human
uacauacacagacauacaca

SEQ ID NO: 206811 - RNA, 18 nt, Human
uacuguacaaaaaccuua

SEQ ID NO: 206812 - RNA, 26 nt, Human
uccaccuccuccccgcagggggacca

SEQ ID NO: 206813 - RNA, 22 nt, Human
uccccugcggggaagcaaagga

SEQ ID NO: 206814 - RNA, 18 nt, Human
ugagccucaagcucccag

SEQ ID NO: 206815 - RNA, 19 nt, Human
ugccacaagacaaacuuac

SEQ ID NO: 206816 - RNA, 21 nt, Human
ugcccccaaucucuuaaaccc

SEQ ID NO: 206817 - RNA, 23 nt, Human
ugcucuacuaaccucuccaaaca

SEQ ID NO: 206818 - RNA, 20 nt, Human
ugcuuccccugcacagggcc

SEQ ID NO: 206819 - RNA, 22 nt, Human
ugggagagaaagguggggaggg

SEQ ID NO: 206820 - RNA, 18 nt, Human
uggggaacuccccggccc

SEQ ID NO: 206821 - RNA, 23 nt, Human
uuaaacacuuuuuaaaagcacug

SEQ ID NO: 206822 - RNA, 26 nt, Human
uuuccaagcuugaacucuucugugaa

SEQ ID NO: 206823 - RNA, 23 nt, Human
uuuuuuuuuuuuuuuugcuucaa

SEQ ID NO: 206824 - RNA, 18 nt, Human
uuuuuuuuuuuuuuuuug

SEQ ID NO: 206825 - RNA, 21 nt, Human
uuuuuuuuuuuuuuuuugcuu

SEQ ID NO: 206826 - RNA, 24 nt, Human
agagaaaaagaauagaaugaagag

SEQ ID NO: 206827 - RNA, 23 nt, Human
cccccuagagaauuauuaauuau

SEQ ID NO: 206828 - RNA, 20 nt, Human
gauuugcuucauuuuucccc

SEQ ID NO: 206829 - RNA, 21 nt, Human
ucauuuuuccccccuagagaa

SEQ ID NO: 206830 - RNA, 23 nt, Human
ucuguggagaccuuuaaaaauau

SEQ ID NO: 206831 - RNA, 18 nt, Human
aaaaaaaacuaugaaaaa

SEQ ID NO: 206832 - RNA, 18 nt, Human
aaaagcacucccaauacc

SEQ ID NO: 206833 - RNA, 23 nt, Human
aaacauuaucgucaaugacaucc

SEQ ID NO: 206834 - RNA, 18 nt, Human
aaacggaaccgcaggaug

SEQ ID NO: 206835 - RNA, 26 nt, Human
aaacggaaccgcaggauguuguaauc

SEQ ID NO: 206836 - RNA, 19 nt, Human
aaagcacucccaauacccc

SEQ ID NO: 206837 - RNA, 27 nt, Human
aaccagguauauguacauuucccaugg

SEQ ID NO: 206838 - RNA, 23 nt, Human
agaaaaugaaguaucugcaaaga

SEQ ID NO: 206839 - RNA, 21 nt, Human
caacaguaguccagaucuuga

SEQ ID NO: 206840 - RNA, 23 nt, Human
cacucccaauaccccauuccaua

SEQ ID NO: 206841 - RNA, 18 nt, Human
ccccagagaaaauggagu

SEQ ID NO: 206842 - RNA, 21 nt, Human
ccccagagaaaauggaguagg

SEQ ID NO: 206843 - RNA, 18 nt, Human
gaaaaauuaaaaaagcac

SEQ ID NO: 206844 - RNA, 25 nt, Human
gcacucccaauaccccauuccauag

SEQ ID NO: 206845 - RNA, 30 nt, Human
uaaaaaaaaacuaugaaaaauuaaaaaagg

SEQ ID NO: 206846 - RNA, 19 nt, Human
uaaaaaagcacucccaaua

SEQ ID NO: 206847 - RNA, 21 nt, Human
uaaaaaagcacucccaauacc

SEQ ID NO: 206848 - RNA, 19 nt, Human
uaacaaggaaaaaaggccu

SEQ ID NO: 206849 - RNA, 18 nt, Human
uaccccauuccauaggau

SEQ ID NO: 206850 - RNA, 18 nt, Human
uauaguguuguauuucaa

SEQ ID NO: 206851 - RNA, 20 nt, Human
uauauggugguguguaugua

SEQ ID NO: 206852 - RNA, 20 nt, Human
uaucugcaaagauaacaagg

SEQ ID NO: 206853 - RNA, 22 nt, Human
ucccagaaacggaaccgcagga

SEQ ID NO: 206854 - RNA, 20 nt, Human
ucuccagaaacgcuaagaaa

SEQ ID NO: 206855 - RNA, 23 nt, Human
ugguguguauguauaguguugua

SEQ ID NO: 206856 - RNA, 20 nt, Human
uguguauguauaguguugua

SEQ ID NO: 206857 - RNA, 25 nt, Human
uuuuucaaauuauagaaguuguagg

SEQ ID NO: 206858 - RNA, 21 nt, Human
cucugcagggcgaggggcagg

SEQ ID NO: 206859 - RNA, 20 nt, Human
gguucucuucucugcagggc

SEQ ID NO: 206860 - RNA, 19 nt, Human
guucucuucucugcagggc

SEQ ID NO: 206861 - RNA, 24 nt, Human
ucaggauggcugggugccuucucc

SEQ ID NO: 206862 - RNA, 20 nt, Human
uccccuggcaugguucucuu

SEQ ID NO: 206863 - RNA, 18 nt, Human
uuggcuccucgcuggguc

SEQ ID NO: 206864 - RNA, 20 nt, Human
uugguauauuucacccaggu

SEQ ID NO: 206865 - RNA, 21 nt, Human
aaauuggaaacuaaagacuua

SEQ ID NO: 206866 - RNA, 20 nt, Human
accuuggcgggggggugggg

SEQ ID NO: 206867 - RNA, 20 nt, Human
augcaggcucuuuuuacugu

SEQ ID NO: 206868 - RNA, 27 nt, Human
cacccaagcccaggccagugugagaac

SEQ ID NO: 206869 - RNA, 19 nt, Human
ccggguccugcugggugug

SEQ ID NO: 206870 - RNA, 21 nt, Human
ccuccgcacuguuggugaaca

SEQ ID NO: 206871 - RNA, 20 nt, Human
cucacucccaccuaggagga

SEQ ID NO: 206872 - RNA, 18 nt, Human
gagaaccuuggcgggggg

SEQ ID NO: 206873 - RNA, 18 nt, Human
gagcagagcccgcaagca

SEQ ID NO: 206874 - RNA, 20 nt, Human
gagcagagcccgcaagcaga

SEQ ID NO: 206875 - RNA, 23 nt, Human
ggcaugcaggcucuuuuuacugu

SEQ ID NO: 206876 - RNA, 19 nt, Human
gggcacugaaaaugggacc

SEQ ID NO: 206877 - RNA, 20 nt, Human
gggcacugaaaaugggaccu

SEQ ID NO: 206878 - RNA, 18 nt, Human
gggcaguguuuugcaaug

SEQ ID NO: 206879 - RNA, 23 nt, Human
ggggggguggggaggaugagaag

SEQ ID NO: 206880 - RNA, 23 nt, Human
gggguggggaggaugagaagggg

SEQ ID NO: 206881 - RNA, 22 nt, Human
uaccagggggaucuugggcacu

SEQ ID NO: 206882 - RNA, 21 nt, Human
uaggaguguuccucacuccca

SEQ ID NO: 206883 - RNA, 19 nt, Human
ucagagcagagcccgcaag

SEQ ID NO: 206884 - RNA, 27 nt, Human
ucagagcagagcccgcaagcagagggc

SEQ ID NO: 206885 - RNA, 19 nt, Human
uccuauaugggcacccaag

SEQ ID NO: 206886 - RNA, 22 nt, Human
ugagaaccuuggcgggggggug

SEQ ID NO: 206887 - RNA, 20 nt, Human
uggcggggggguggggagga

SEQ ID NO: 206888 - RNA, 21 nt, Human
uggcggggggguggggaggau

SEQ ID NO: 206889 - RNA, 20 nt, Human
ugggaccuggaaguagggga

SEQ ID NO: 206890 - RNA, 23 nt, Human
ugggcaguguuuugcaaugugug

SEQ ID NO: 206891 - RNA, 22 nt, Human
uguguccucggaauaccagggg

SEQ ID NO: 206892 - RNA, 23 nt, Human
uguucugggcaguguuuugcaau

SEQ ID NO: 206893 - RNA, 18 nt, Human
uugaucgugugcuccuuu

SEQ ID NO: 206894 - RNA, 26 nt, Human
aaacaguaagcagaaaagagggaccc

SEQ ID NO: 206895 - RNA, 20 nt, Human
aagcagaaaagaugauuagg

SEQ ID NO: 206896 - RNA, 21 nt, Human
aggcagccguucugcaggguu

SEQ ID NO: 206897 - RNA, 22 nt, Human
auguuagcauaaaaugaaauga

SEQ ID NO: 206898 - RNA, 20 nt, Human
caggguuuugcuuagccagg

SEQ ID NO: 206899 - RNA, 23 nt, Human
cugcaggguuuugcuuagccagg

SEQ ID NO: 206900 - RNA, 19 nt, Human
gcaggguuuugcuuagcca

SEQ ID NO: 206901 - RNA, 21 nt, Human
uagccaggcuccucugagauc

SEQ ID NO: 206902 - RNA, 24 nt, Human
ucugcaggguuuugcuuagccagg

SEQ ID NO: 206903 - RNA, 24 nt, Human
ugaaaacaguaagcagaaaagaug

SEQ ID NO: 206904 - RNA, 20 nt, Human
ugaaaguggcugauaucugg

SEQ ID NO: 206905 - RNA, 24 nt, Human
aaagugcugggauuacaggcauga

SEQ ID NO: 206906 - RNA, 18 nt, Human
aacaugcaaagcuucccu

SEQ ID NO: 206907 - RNA, 19 nt, Human
aagcaaaugcugaagaggu

SEQ ID NO: 206908 - RNA, 19 nt, Human
aagcaaaugcugaagaggu

SEQ ID NO: 206909 - RNA, 25 nt, Human
aagcaaaugcugaagagguuuccac

SEQ ID NO: 206910 - RNA, 22 nt, Human
aagcuucccugcucagcaaucc

SEQ ID NO: 206911 - RNA, 19 nt, Human
aaguagcugggacuacagg

SEQ ID NO: 206912 - RNA, 20 nt, Human
aaguagcugggacuacaggu

SEQ ID NO: 206913 - RNA, 19 nt, Human
aagugcugggauuacaggc

SEQ ID NO: 206914 - RNA, 21 nt, Human
aagugcugggauuacaggcau

SEQ ID NO: 206915 - RNA, 26 nt, Human
aagugcugggauuacaggcaugagcc

SEQ ID NO: 206916 - RNA, 18 nt, Human
acgggauuucacuguguu

SEQ ID NO: 206917 - RNA, 20 nt, Human
acgggauuucacuguguuag

SEQ ID NO: 206918 - RNA, 25 nt, Human
agagcaacaugcaaagcuucccugc

SEQ ID NO: 206919 - RNA, 21 nt, Human
agcaaucccagguuggggccc

SEQ ID NO: 206920 - RNA, 19 nt, Human
agcuuacugauuccaagca

SEQ ID NO: 206921 - RNA, 20 nt, Human
agugcaggggcgcaaucuug

SEQ ID NO: 206922 - RNA, 24 nt, Human
agugcaggggcgcaaucuuggcuc

SEQ ID NO: 206923 - RNA, 23 nt, Human
caaaaaacaacucuuuaaaaaug

SEQ ID NO: 206924 - RNA, 24 nt, Human
caaagugcugggauuacaggcaug

SEQ ID NO: 206925 - RNA, 24 nt, Human
caccucggccucccaaagugcugg

SEQ ID NO: 206926 - RNA, 22 nt, Human
cacgccauucuccugccucagc

SEQ ID NO: 206927 - RNA, 18 nt, Human
cacuguguuagccaggau

SEQ ID NO: 206928 - RNA, 19 nt, Human
cacuguguuagccaggaug

SEQ ID NO: 206929 - RNA, 24 nt, Human
cacuguguuagccaggauggucuc

SEQ ID NO: 206930 - RNA, 23 nt, Human
ccaaagugcugggauuacaggca

SEQ ID NO: 206931 - RNA, 24 nt, Human
ccaaagugcugggauuacaggcau

SEQ ID NO: 206932 - RNA, 20 nt, Human
ccaccacgccuggcuaauuu

SEQ ID NO: 206933 - RNA, 22 nt, Human
ccacugcgcccggccaaaaaac

SEQ ID NO: 206934 - RNA, 19 nt, Human
ccagguucacgccauucuc

SEQ ID NO: 206935 - RNA, 22 nt, Human
ccagguucacgccauucuccug

SEQ ID NO: 206936 - RNA, 24 nt, Human
cccaaagugcugggauuacaggca

SEQ ID NO: 206937 - RNA, 22 nt, Human
cccaaguagcugggacuacagg

SEQ ID NO: 206938 - RNA, 23 nt, Human
cccaaguagcugggacuacaggu

SEQ ID NO: 206939 - RNA, 21 nt, Human
cccaggcuggagugcaggggc

SEQ ID NO: 206940 - RNA, 21 nt, Human
cccccugucuuccuaucgucc

SEQ ID NO: 206941 - RNA, 23 nt, Human
cccccugucuuccuaucguccua

SEQ ID NO: 206942 - RNA, 19 nt, Human
cccugcucagcaaucccag

SEQ ID NO: 206943 - RNA, 19 nt, Human
ccgucacaaccaccacugc

SEQ ID NO: 206944 - RNA, 23 nt, Human
ccugccucagccucccaaguagc

SEQ ID NO: 206945 - RNA, 24 nt, Human
ccugccucagccucccaaguagcu

SEQ ID NO: 206946 - RNA, 24 nt, Human
ccuuccagguucacgccauucucc

SEQ ID NO: 206947 - RNA, 19 nt, Human
cggccaaaaaacaacucuu

SEQ ID NO: 206948 - RNA, 24 nt, Human
cgggauuucacuguguuagccagg

SEQ ID NO: 206949 - RNA, 24 nt, Human
cucagccucccaaguagcugggac

SEQ ID NO: 206950 - RNA, 22 nt, Human
cuccagaccucgugauccgccc

SEQ ID NO: 206951 - RNA, 18 nt, Human
cucuguuuuccuccucug

SEQ ID NO: 206952 - RNA, 22 nt, Human
cugauuccaagcaaaugcugaa

SEQ ID NO: 206953 - RNA, 24 nt, Human
cugcaaccucuuccuuccagguuc

SEQ ID NO: 206954 - RNA, 24 nt, Human
cugcgcccggccaaaaaacaacuc

SEQ ID NO: 206955 - RNA, 21 nt, Human
cuugcucuguugcccaggcug

SEQ ID NO: 206956 - RNA, 22 nt, Human
gaccucgugauccgcccaccuc

SEQ ID NO: 206957 - RNA, 22 nt, Human
gaccucgugauccgcccaccuc

SEQ ID NO: 206958 - RNA, 24 nt, Human
gaccucgugauccgcccaccucgg

SEQ ID NO: 206959 - RNA, 21 nt, Human
gagauggagucuugcucuguu

SEQ ID NO: 206960 - RNA, 18 nt, Human
gauuacaggcaugagcca

SEQ ID NO: 206961 - RNA, 22 nt, Human
gauuacaggcaugagccacugc

SEQ ID NO: 206962 - RNA, 22 nt, Human
gauuacaggcaugagccacugc

SEQ ID NO: 206963 - RNA, 22 nt, Human
gcaggggcgcaaucuuggcuca

SEQ ID NO: 206964 - RNA, 18 nt, Human
gccagccaccacgccugg

SEQ ID NO: 206965 - RNA, 19 nt, Human
gcccaggcuggagugcagg

SEQ ID NO: 206966 - RNA, 23 nt, Human
gccuggcuaauuuuuuguauuuu

SEQ ID NO: 206967 - RNA, 19 nt, Human
gcucacugcaaccucuucc

SEQ ID NO: 206968 - RNA, 25 nt, Human
gcucuguugcccaggcuggagugca

SEQ ID NO: 206969 - RNA, 24 nt, Human
gcuggagugcaggggcgcaaucuu

SEQ ID NO: 206970 - RNA, 22 nt, Human
ggauuacaggcaugagccacug

SEQ ID NO: 206971 - RNA, 23 nt, Human
gggauuucacuguguuagccagg

SEQ ID NO: 206972 - RNA, 24 nt, Human
gucuugcucuguugcccaggcugg

SEQ ID NO: 206973 - RNA, 24 nt, Human
gugauccgcccaccucggccuccc

SEQ ID NO: 206974 - RNA, 24 nt, Human
uaauuuuuuguauuuuuaguagag

SEQ ID NO: 206975 - RNA, 25 nt, Human
uaauuuuuuguauuuuuaguagaga

SEQ ID NO: 206976 - RNA, 23 nt, Human
uacaggcaugagccacugcgccc

SEQ ID NO: 206977 - RNA, 22 nt, Human
uacaggugccagccaccacgcc

SEQ ID NO: 206978 - RNA, 20 nt, Human
uaguagagacgggauuucac

SEQ ID NO: 206979 - RNA, 24 nt, Human
uaguagagacgggauuucacugug

SEQ ID NO: 206980 - RNA, 24 nt, Human
ucacugcaaccucuuccuuccagg

SEQ ID NO: 206981 - RNA, 24 nt, Human
ucacuguguuagccaggauggucu

SEQ ID NO: 206982 - RNA, 18 nt, Human
ucagccucccaaguagcu

SEQ ID NO: 206983 - RNA, 20 nt, Human
ucagccucccaaguagcugg

SEQ ID NO: 206984 - RNA, 20 nt, Human
uccagguucacgccauucuc

SEQ ID NO: 206985 - RNA, 24 nt, Human
ucccaaagugcugggauuacaggc

SEQ ID NO: 206986 - RNA, 24 nt, Human
ucccaaguagcugggacuacaggu

SEQ ID NO: 206987 - RNA, 19 nt, Human
ucccagguuggggcccccu

SEQ ID NO: 206988 - RNA, 23 nt, Human
uccuuccagguucacgccauucu

SEQ ID NO: 206989 - RNA, 18 nt, Human
ucggccucccaaagugcu

SEQ ID NO: 206990 - RNA, 26 nt, Human
ucuccugccucagccucccaaguagc

SEQ ID NO: 206991 - RNA, 24 nt, Human
ucuguugcccaggcuggagugcag

SEQ ID NO: 206992 - RNA, 23 nt, Human
ucuugcucuguugcccaggcugg

SEQ ID NO: 206993 - RNA, 24 nt, Human
ucuugcucuguugcccaggcugga

SEQ ID NO: 206994 - RNA, 24 nt, Human
ugauccgcccaccucggccuccca

SEQ ID NO: 206995 - RNA, 22 nt, Human
ugcaggggcgcaaucuuggcuc

SEQ ID NO: 206996 - RNA, 23 nt, Human
ugcaggggcgcaaucuuggcuca

SEQ ID NO: 206997 - RNA, 18 nt, Human
ugcccaggcuggagugca

SEQ ID NO: 206998 - RNA, 19 nt, Human
ugcccaggcuggagugcag

SEQ ID NO: 206999 - RNA, 23 nt, Human
ugcccaggcuggagugcaggggc

SEQ ID NO: 207000 - RNA, 24 nt, Human
ugcccaggcuggagugcaggggcg

SEQ ID NO: 207001 - RNA, 24 nt, Human
ugccucagccucccaaguagcugg

SEQ ID NO: 207002 - RNA, 23 nt, Human
ugcgcccggccaaaaaacaacuc

SEQ ID NO: 207003 - RNA, 24 nt, Human
ugcucuguugcccaggcuggagug

SEQ ID NO: 207004 - RNA, 19 nt, Human
ugcucuguuuuccuccucu

SEQ ID NO: 207005 - RNA, 22 nt, Human
ugcuuuuaugaaaggggaaagg

SEQ ID NO: 207006 - RNA, 24 nt, Human
uggagucuugcucuguugcccagg

SEQ ID NO: 207007 - RNA, 23 nt, Human
uggagugcaggggcgcaaucuug

SEQ ID NO: 207008 - RNA, 24 nt, Human
uggagugcaggggcgcaaucuugg

SEQ ID NO: 207009 - RNA, 22 nt, Human
ugggacuacaggugccagccac

SEQ ID NO: 207010 - RNA, 24 nt, Human
ugggacuacaggugccagccacca

SEQ ID NO: 207011 - RNA, 18 nt, Human
ugggauuacaggcaugag

SEQ ID NO: 207012 - RNA, 19 nt, Human
ugggauuacaggcaugagc

SEQ ID NO: 207013 - RNA, 21 nt, Human
ugggauuacaggcaugagcca

SEQ ID NO: 207014 - RNA, 22 nt, Human
ugggauuacaggcaugagccac

SEQ ID NO: 207015 - RNA, 22 nt, Human
ugggauuacaggcaugagccac

SEQ ID NO: 207016 - RNA, 23 nt, Human
ugggauuacaggcaugagccacu

SEQ ID NO: 207017 - RNA, 24 nt, Human
ugggauuacaggcaugagccacug

SEQ ID NO: 207018 - RNA, 26 nt, Human
ugggauuacaggcaugagccacugcg

SEQ ID NO: 207019 - RNA, 20 nt, Human
uggggcccccugucuuccua

SEQ ID NO: 207020 - RNA, 21 nt, Human
uguugcccaggcuggagugca

SEQ ID NO: 207021 - RNA, 18 nt, Human
uuaguagagacgggauuu

SEQ ID NO: 207022 - RNA, 21 nt, Human
uuaguagagacgggauuucac

SEQ ID NO: 207023 - RNA, 24 nt, Human
uuaguagagacgggauuucacugu

SEQ ID NO: 207024 - RNA, 21 nt, Human
uucacuguguuagccaggaug

SEQ ID NO: 207025 - RNA, 24 nt, Human
uuccagguucacgccauucuccug

SEQ ID NO: 207026 - RNA, 18 nt, Human
uugcccaggcuggagugc

SEQ ID NO: 207027 - RNA, 24 nt, Human
uugcucuguugcccaggcuggagu

SEQ ID NO: 207028 - RNA, 21 nt, Human
uuggggcccccugucuuccua

SEQ ID NO: 207029 - RNA, 19 nt, Human
uuucacuguguuagccagg

SEQ ID NO: 207030 - RNA, 21 nt, Human
uuuuguauuuuuaguagagac

SEQ ID NO: 207031 - RNA, 24 nt, Human
uuuuuaguagagacgggauuucac

SEQ ID NO: 207032 - RNA, 21 nt, Human
uuuuuguauuuuuaguagaga

SEQ ID NO: 207033 - RNA, 23 nt, Human
aaugguguggagguccuggagac

SEQ ID NO: 207034 - RNA, 24 nt, Human
acuuuaggagagggaggaaagagg

SEQ ID NO: 207035 - RNA, 19 nt, Human
agaaacauauacacuuuau

SEQ ID NO: 207036 - RNA, 20 nt, Human
aggaaagaggggcugagggc

SEQ ID NO: 207037 - RNA, 24 nt, Human
aggaaagaggggcugagggcucag

SEQ ID NO: 207038 - RNA, 20 nt, Human
agggaggaaagaggggcuga

SEQ ID NO: 207039 - RNA, 18 nt, Human
agguccuggagacugccc

SEQ ID NO: 207040 - RNA, 21 nt, Human
augguguggagguccuggaga

SEQ ID NO: 207041 - RNA, 24 nt, Human
caacaguuuccucuuccuggcauu

SEQ ID NO: 207042 - RNA, 23 nt, Human
cagaacaaauuccugaggaucaa

SEQ ID NO: 207043 - RNA, 19 nt, Human
cagagcuggccagggccag

SEQ ID NO: 207044 - RNA, 21 nt, Human
cagugagcccucccuuuccuu

SEQ ID NO: 207045 - RNA, 21 nt, Human
ccaagggagcacaaggcucau

SEQ ID NO: 207046 - RNA, 19 nt, Human
ccccaguaguuccguuuuc

SEQ ID NO: 207047 - RNA, 20 nt, Human
cgugugaggauaaagggcug

SEQ ID NO: 207048 - RNA, 18 nt, Human
cugggggcagggcgagga

SEQ ID NO: 207049 - RNA, 22 nt, Human
gcuccuggccucugggggcagg

SEQ ID NO: 207050 - RNA, 22 nt, Human
gcugagggcucagaggggcuuc

SEQ ID NO: 207051 - RNA, 20 nt, Human
gggaggaaagaggggcugag

SEQ ID NO: 207052 - RNA, 18 nt, Human
uaccgggaugguucucag

SEQ ID NO: 207053 - RNA, 23 nt, Human
uaggagagggaggaaagaggggc

SEQ ID NO: 207054 - RNA, 18 nt, Human
ucagaggggcuuccucuc

SEQ ID NO: 207055 - RNA, 20 nt, Human
ucagugagcccucccuuucu

SEQ ID NO: 207056 - RNA, 26 nt, Human
ucucagugagcccucccuuuccccag

SEQ ID NO: 207057 - RNA, 25 nt, Human
ugagggcagaacaaauuccugagga

SEQ ID NO: 207058 - RNA, 18 nt, Human
ugagggcucagaggggcu

SEQ ID NO: 207059 - RNA, 19 nt, Human
uggagacugccccuguguu

SEQ ID NO: 207060 - RNA, 23 nt, Human
uggaguaaguggaauacagguca

SEQ ID NO: 207061 - RNA, 21 nt, Human
uggccagggccagaugagggc

SEQ ID NO: 207062 - RNA, 20 nt, Human
uggccucaaugaugccuccu

SEQ ID NO: 207063 - RNA, 25 nt, Human
ugggauacaggucacgggcagagcu

SEQ ID NO: 207064 - RNA, 18 nt, Human
ugugaggauaaagggcug

SEQ ID NO: 207065 - RNA, 20 nt, Human
uguggagguccuggagacug

SEQ ID NO: 207066 - RNA, 21 nt, Human
uuccccaguaguuccguuuuc

SEQ ID NO: 207067 - RNA, 19 nt, Human
uuccugaggaucaaauuac

SEQ ID NO: 207068 - RNA, 22 nt, Human
aaauagauaaaucaguuuauca

SEQ ID NO: 207069 - RNA, 21 nt, Human
cugggcuugcugagaugggug

SEQ ID NO: 207070 - RNA, 18 nt, Human
ggugacucugaaccuugg

SEQ ID NO: 207071 - RNA, 19 nt, Human
ggugcacaugacguuauau

SEQ ID NO: 207072 - RNA, 23 nt, Human
ugaccugguguaugagucaauaa

SEQ ID NO: 207073 - RNA, 24 nt, Human
ugagaugggugacucugaaccuug

SEQ ID NO: 207074 - RNA, 22 nt, Human
ugagucaauaagaauuguuuuc

SEQ ID NO: 207075 - RNA, 18 nt, Human
accacaauguaaagcgac

SEQ ID NO: 207076 - RNA, 24 nt, Human
acgacacuucuuuacacugcugaa

SEQ ID NO: 207077 - RNA, 18 nt, Human
gaaauggaagaacucaug

SEQ ID NO: 207078 - RNA, 24 nt, Human
gcacagguauacacgacacuucuu

SEQ ID NO: 207079 - RNA, 21 nt, Human
ggacuagugccugcacaggua

SEQ ID NO: 207080 - RNA, 18 nt, Human
gugagucuuugaaaugga

SEQ ID NO: 207081 - RNA, 24 nt, Human
uaaauaugaagaacauauauuguu

SEQ ID NO: 207082 - RNA, 24 nt, Human
uauaguaaaaauuuaaugaaaaag

SEQ ID NO: 207083 - RNA, 18 nt, Human
ugaaauggaagaacucau

SEQ ID NO: 207084 - RNA, 19 nt, Human
ugaaauggaagaacucaug

SEQ ID NO: 207085 - RNA, 24 nt, Human
ugagucuuugaaauggaagaacuc

SEQ ID NO: 207086 - RNA, 19 nt, Human
ugccugcacagguauacac

SEQ ID NO: 207087 - RNA, 21 nt, Human
cugggcuugcugagaugggug

SEQ ID NO: 207088 - RNA, 18 nt, Human
ggugacucugaaccuugg

SEQ ID NO: 207089 - RNA, 24 nt, Human
ugagaugggugacucugaaccuug

SEQ ID NO: 207090 - RNA, 18 nt, Human
cugaaaacauuuggaaau

SEQ ID NO: 207091 - RNA, 18 nt, Human
gugagucuuugaaaugga

SEQ ID NO: 207092 - RNA, 21 nt, Human
uacauuaaccacaauguaaag

SEQ ID NO: 207093 - RNA, 25 nt, Human
ucccgaagaugcugcugaccauugg

SEQ ID NO: 207094 - RNA, 24 nt, Human
ugauucaacuuguggugguuauag

SEQ ID NO: 207095 - RNA, 23 nt, Human
ugcugggcugguugaugaggggu

SEQ ID NO: 207096 - RNA, 19 nt, Human
ugguugaugagggguaaca

SEQ ID NO: 207097 - RNA, 18 nt, Human
uuccaugaugaaccaggg

SEQ ID NO: 207098 - RNA, 19 nt, Human
aaaaauuuaaugaaaagga

SEQ ID NO: 207099 - RNA, 22 nt, Human
aaacauuuugaaauuuugauuc

SEQ ID NO: 207100 - RNA, 22 nt, Human
aguaaaaauuuaaugaaaagga

SEQ ID NO: 207101 - RNA, 21 nt, Human
auaaaacaugauuuaaaccuu

SEQ ID NO: 207102 - RNA, 18 nt, Human
gaaauggaagaacucaug

SEQ ID NO: 207103 - RNA, 18 nt, Human
gugagucuuugaaaugga

SEQ ID NO: 207104 - RNA, 24 nt, Human
guuacauuaagcaaaauguaaagg

SEQ ID NO: 207105 - RNA, 24 nt, Human
uaaauaugaagaacauauauuguu

SEQ ID NO: 207106 - RNA, 21 nt, Human
uacauaaaacaugauuuaaac

SEQ ID NO: 207107 - RNA, 18 nt, Human
ugaaauggaagaacucau

SEQ ID NO: 207108 - RNA, 19 nt, Human
ugaaauggaagaacucaug

SEQ ID NO: 207109 - RNA, 18 nt, Human
ugaaauuuugauucaacu

SEQ ID NO: 207110 - RNA, 21 nt, Human
ugaauagagacaucagcaugg

SEQ ID NO: 207111 - RNA, 24 nt, Human
ugauucaacuuguggugguuauag

SEQ ID NO: 207112 - RNA, 18 nt, Human
uggaagaacucaugaaag

SEQ ID NO: 207113 - RNA, 24 nt, Human
gcacagguauacacgacgcuucuu

SEQ ID NO: 207114 - RNA, 18 nt, Human
gugagucuuugaaauuga

SEQ ID NO: 207115 - RNA, 18 nt, Human
gugagucuuugaaauuga

SEQ ID NO: 207116 - RNA, 24 nt, Human
uaaauaugaagaacauauauuguu

SEQ ID NO: 207117 - RNA, 18 nt, Human
uacacgacgcuucuuuac

SEQ ID NO: 207118 - RNA, 18 nt, Human
uacuagugccugcacagg

SEQ ID NO: 207119 - RNA, 24 nt, Human
uauaguaaaaauuuaaugaaaaag

SEQ ID NO: 207120 - RNA, 19 nt, Human
ugagauggguaaccuugaa

SEQ ID NO: 207121 - RNA, 21 nt, Human
ugagucuuugaaauugaggaa

SEQ ID NO: 207122 - RNA, 24 nt, Human
ugauucaacucguggugguuauag

SEQ ID NO: 207123 - RNA, 19 nt, Human
ugccugcacagguauacac

SEQ ID NO: 207124 - RNA, 21 nt, Human
uguuacauucaccacaaugua

SEQ ID NO: 207125 - RNA, 24 nt, Human
uugaaauugaggaacucaugaaaa

SEQ ID NO: 207126 - RNA, 23 nt, Human
aaaauaaauuuaccaaauacaaa

SEQ ID NO: 207127 - RNA, 21 nt, Human
aaacaaguacaaaaguuccau

SEQ ID NO: 207128 - RNA, 23 nt, Human
aaaucauuuccauguugaaccag

SEQ ID NO: 207129 - RNA, 18 nt, Human
aaaucgugucauggucau

SEQ ID NO: 207130 - RNA, 21 nt, Human
aacaugagucuuugaaauggc

SEQ ID NO: 207131 - RNA, 20 nt, Human
acaaaauaaauuuaccaaau

SEQ ID NO: 207132 - RNA, 20 nt, Human
acaugacauaauaugaacaa

SEQ ID NO: 207133 - RNA, 22 nt, Human
acuccuaaaaacauuugaaaag

SEQ ID NO: 207134 - RNA, 27 nt, Human
caaaauaaauuuaccaaauacaaagaa

SEQ ID NO: 207135 - RNA, 23 nt, Human
caacacaaaauaaauuuaccaaa

SEQ ID NO: 207136 - RNA, 18 nt, Human
cagcaugguccucuguaa

SEQ ID NO: 207137 - RNA, 28 nt, Human
cuagugccuuaagagcugaauacaaugg

SEQ ID NO: 207138 - RNA, 22 nt, Human
gaacaaaaauaaguuguuuuau

SEQ ID NO: 207139 - RNA, 20 nt, Human
ggugcacaugacauaauaug

SEQ ID NO: 207140 - RNA, 22 nt, Human
uaaacaaguacaaaaguuccau

SEQ ID NO: 207141 - RNA, 22 nt, Human
uaaguuguuuuauaaauaguuu

SEQ ID NO: 207142 - RNA, 21 nt, Human
uacauuaaccacugugcaaag

SEQ ID NO: 207143 - RNA, 21 nt, Human
uaccaguuauucuguaaucag

SEQ ID NO: 207144 - RNA, 26 nt, Human
uagcagaaacaugagucuuugaaaug

SEQ ID NO: 207145 - RNA, 20 nt, Human
uauuacauuaaccacugugc

SEQ ID NO: 207146 - RNA, 20 nt, Human
ugauuaauacuccuaaaaac

SEQ ID NO: 207147 - RNA, 21 nt, Human
uuaaagaauaaacaaguacaa

SEQ ID NO: 207148 - RNA, 22 nt, Human
accaaauaauauaagaaguuuu

SEQ ID NO: 207149 - RNA, 18 nt, Human
agauagauaauuagaucu

SEQ ID NO: 207150 - RNA, 20 nt, Human
cuccugaaaagaucugaaaa

SEQ ID NO: 207151 - RNA, 21 nt, Human
gacaaaaauaauuuaaaucua

SEQ ID NO: 207152 - RNA, 19 nt, Human
uacacuccugaaaagaucu

SEQ ID NO: 207153 - RNA, 19 nt, Human
uacauggacaaaaauaauu

SEQ ID NO: 207154 - RNA, 19 nt, Human
acuaauuuccauuuucuaa

SEQ ID NO: 207155 - RNA, 23 nt, Human
caucagcauugucaucuguaaag

SEQ ID NO: 207156 - RNA, 18 nt, Human
gaaauggaagaacucaug

SEQ ID NO: 207157 - RNA, 20 nt, Human
gaacagagacaucagcauug

SEQ ID NO: 207158 - RNA, 18 nt, Human
gugagucuuugaaaugga

SEQ ID NO: 207159 - RNA, 18 nt, Human
ugaaauggaagaacucau

SEQ ID NO: 207160 - RNA, 19 nt, Human
ugaaauggaagaacucaug

SEQ ID NO: 207161 - RNA, 21 nt, Human
ugaacagagacaucagcauug

SEQ ID NO: 207162 - RNA, 21 nt, Human
ugagauggauaaccuugaacu

SEQ ID NO: 207163 - RNA, 24 nt, Human
ugauucaacucguggugguuauag

SEQ ID NO: 207164 - RNA, 18 nt, Human
uggaagaacucaugaaag

SEQ ID NO: 207165 - RNA, 18 nt, Human
uucuaaauucccuaguug

SEQ ID NO: 207166 - RNA, 18 nt, Human
gaaauggaagaacucaug

SEQ ID NO: 207167 - RNA, 18 nt, Human
gugagucuuugaaaugga

SEQ ID NO: 207168 - RNA, 18 nt, Human
ugaaauggaagaacucau

SEQ ID NO: 207169 - RNA, 19 nt, Human
ugaaauggaagaacucaug

SEQ ID NO: 207170 - RNA, 24 nt, Human
ugauucaacuuguggugguuauag

SEQ ID NO: 207171 - RNA, 18 nt, Human
uggaagaacucaugaaag

SEQ ID NO: 207172 - RNA, 18 nt, Human
uuccaugaugaaccaggg

SEQ ID NO: 207173 - RNA, 18 nt, Human
aaacacuugacacauuug

SEQ ID NO: 207174 - RNA, 22 nt, Human
aacaggauguugcuuaacacuc

SEQ ID NO: 207175 - RNA, 22 nt, Human
aacuaaauaaagauuuaaauaa

SEQ ID NO: 207176 - RNA, 22 nt, Human
caaaauaauaaauauaaagaac

SEQ ID NO: 207177 - RNA, 26 nt, Human
caauucacaauguaaaaguucacaua

SEQ ID NO: 207178 - RNA, 24 nt, Human
cacuccugaaaacacuugacacau

SEQ ID NO: 207179 - RNA, 19 nt, Human
ccauacagcugaacaggau

SEQ ID NO: 207180 - RNA, 25 nt, Human
ccauacagcugaacaggauguugcu

SEQ ID NO: 207181 - RNA, 19 nt, Human
gaacaaaacuaauuuaagc

SEQ ID NO: 207182 - RNA, 19 nt, Human
gucuuugaaagagcacaac

SEQ ID NO: 207183 - RNA, 25 nt, Human
uaauaugaacaaaacuaauuuaagc

SEQ ID NO: 207184 - RNA, 19 nt, Human
ugaaagagcacaacuuguc

SEQ ID NO: 207185 - RNA, 21 nt, Human
ugaauagauccaucagcaugg

SEQ ID NO: 207186 - RNA, 22 nt, Human
ugcccauacagcugaacaggau

SEQ ID NO: 207187 - RNA, 20 nt, Human
uggcagaaacaagggucuuu

SEQ ID NO: 207188 - RNA, 23 nt, Human
uuaaucaguuugcacaaucaggg

SEQ ID NO: 207189 - RNA, 24 nt, Human
aaagugcugggauuacagguguga

SEQ ID NO: 207190 - RNA, 18 nt, Human
aagugcugggauuacagg

SEQ ID NO: 207191 - RNA, 19 nt, Human
aagugcugggauuacaggu

SEQ ID NO: 207192 - RNA, 26 nt, Human
aagugcugggauuacaggugugagcc

SEQ ID NO: 207193 - RNA, 24 nt, Human
accacguuggccaggcuggucucg

SEQ ID NO: 207194 - RNA, 20 nt, Human
accauguaaggguagauacu

SEQ ID NO: 207195 - RNA, 24 nt, Human
acugcaaccuccaccuccuguuuu

SEQ ID NO: 207196 - RNA, 23 nt, Human
agaggaaggugaggaccucaggc

SEQ ID NO: 207197 - RNA, 18 nt, Human
agccaccgugcccgggcc

SEQ ID NO: 207198 - RNA, 19 nt, Human
agccuccugaguagcuaag

SEQ ID NO: 207199 - RNA, 19 nt, Human
aggaagacggguggccacu

SEQ ID NO: 207200 - RNA, 25 nt, Human
aggcuggagugcaguggcgugaucu

SEQ ID NO: 207201 - RNA, 19 nt, Human
agugcaguggcgugaucuc

SEQ ID NO: 207202 - RNA, 20 nt, Human
agugcaguggcgugaucucg

SEQ ID NO: 207203 - RNA, 23 nt, Human
agugcaguggcgugaucucggcu

SEQ ID NO: 207204 - RNA, 24 nt, Human
agugcaguggcgugaucucggcuc

SEQ ID NO: 207205 - RNA, 24 nt, Human
augaucugccugccucagccuccc

SEQ ID NO: 207206 - RNA, 18 nt, Human
augggguuucaccacguu

SEQ ID NO: 207207 - RNA, 20 nt, Human
augggguuucaccacguugg

SEQ ID NO: 207208 - RNA, 24 nt, Human
augggguuucaccacguuggccag

SEQ ID NO: 207209 - RNA, 18 nt, Human
auguuaggaauggcgaac

SEQ ID NO: 207210 - RNA, 24 nt, Human
auuuuuguauuuuuaguagagaug

SEQ ID NO: 207211 - RNA, 24 nt, Human
caaagugcugggauuacaggugug

SEQ ID NO: 207212 - RNA, 20 nt, Human
caagcgauucuccugccuca

SEQ ID NO: 207213 - RNA, 22 nt, Human
caagcgauucuccugccucagc

SEQ ID NO: 207214 - RNA, 21 nt, Human
caccacguuggccaggcuggu

SEQ ID NO: 207215 - RNA, 24 nt, Human
caccacguuggccaggcuggucuc

SEQ ID NO: 207216 - RNA, 24 nt, Human
caccaggcuggagugcaguggcgu

SEQ ID NO: 207217 - RNA, 23 nt, Human
cacgcugucaccaggcuggagug

SEQ ID NO: 207218 - RNA, 24 nt, Human
cacgcugucaccaggcuggagugc

SEQ ID NO: 207219 - RNA, 23 nt, Human
cacguuggccaggcuggucucga

SEQ ID NO: 207220 - RNA, 21 nt, Human
cacugcaaccuccaccuccug

SEQ ID NO: 207221 - RNA, 22 nt, Human
cacuguuuuggucugacucauc

SEQ ID NO: 207222 - RNA, 21 nt, Human
cagacagguguggcacaugca

SEQ ID NO: 207223 - RNA, 22 nt, Human
cagccgccaucgccccguccua

SEQ ID NO: 207224 - RNA, 20 nt, Human
cagccuccugaguagcuaag

SEQ ID NO: 207225 - RNA, 23 nt, Human
caggcgcgcgccuaccuacuacc

SEQ ID NO: 207226 - RNA, 21 nt, Human
caggcucccaguguaacuccu

SEQ ID NO: 207227 - RNA, 23 nt, Human
caguguuaaaagaaaagaccaaa

SEQ ID NO: 207228 - RNA, 23 nt, Human
cauccaaugcaaguccggugaca

SEQ ID NO: 207229 - RNA, 24 nt, Human
caugaucugccugccucagccucc

SEQ ID NO: 207230 - RNA, 21 nt, Human
ccaaagugcugggauuacagg

SEQ ID NO: 207231 - RNA, 21 nt, Human
ccaaagugcugggauuacagg

SEQ ID NO: 207232 - RNA, 24 nt, Human
ccaaagugcugggauuacaggugu

SEQ ID NO: 207233 - RNA, 22 nt, Human
ccgcagaucccaccaguuacau

SEQ ID NO: 207234 - RNA, 20 nt, Human
ccuaaaccauguaaggguag

SEQ ID NO: 207235 - RNA, 19 nt, Human
ccuacccucaguguuaaaa

SEQ ID NO: 207236 - RNA, 23 nt, Human
ccucucagccgccaucgccccgu

SEQ ID NO: 207237 - RNA, 23 nt, Human
ccugccucagccuccugaguagc

SEQ ID NO: 207238 - RNA, 24 nt, Human
ccugccucagccuccugaguagcu

SEQ ID NO: 207239 - RNA, 18 nt, Human
cgaacagacagguguggc

SEQ ID NO: 207240 - RNA, 21 nt, Human
cuacccggcuaauuuuuguau

SEQ ID NO: 207241 - RNA, 21 nt, Human
cuacuacccggcuaauuuuug

SEQ ID NO: 207242 - RNA, 26 nt, Human
cucacugcaaccuccaccuccuguuu

SEQ ID NO: 207243 - RNA, 18 nt, Human
cucaugaucugccugccu

SEQ ID NO: 207244 - RNA, 24 nt, Human
cuccugaguagcuaagacaacagg

SEQ ID NO: 207245 - RNA, 19 nt, Human
cucucuguaguuacugaga

SEQ ID NO: 207246 - RNA, 24 nt, Human
cucuugaccucaugaucugccugc

SEQ ID NO: 207247 - RNA, 21 nt, Human
cugcaaccuccaccuccuguu

SEQ ID NO: 207248 - RNA, 23 nt, Human
cugccucagccucccaaagugcu

SEQ ID NO: 207249 - RNA, 24 nt, Human
cugccucagccucccaaagugcug

SEQ ID NO: 207250 - RNA, 21 nt, Human
cuugaccucaugaucugccug

SEQ ID NO: 207251 - RNA, 21 nt, Human
cuugcccguauuuuuaggacc

SEQ ID NO: 207252 - RNA, 20 nt, Human
gaacagaagucccucaacau

SEQ ID NO: 207253 - RNA, 24 nt, Human
gaccucaugaucugccugccucag

SEQ ID NO: 207254 - RNA, 18 nt, Human
gagaugggguuucaccac

SEQ ID NO: 207255 - RNA, 24 nt, Human
gagaugggguuucaccacguuggc

SEQ ID NO: 207256 - RNA, 18 nt, Human
gauuacaggugugagcca

SEQ ID NO: 207257 - RNA, 21 nt, Human
gauuacaggugugagccaccg

SEQ ID NO: 207258 - RNA, 24 nt, Human
gauuacaggugugagccaccgugc

SEQ ID NO: 207259 - RNA, 21 nt, Human
gauucuccugccucagccucc

SEQ ID NO: 207260 - RNA, 20 nt, Human
gcaaccuccaccuccuguuu

SEQ ID NO: 207261 - RNA, 23 nt, Human
gcgauucuccugccucagccucc

SEQ ID NO: 207262 - RNA, 19 nt, Human
gcgccuaccuacuacccgg

SEQ ID NO: 207263 - RNA, 19 nt, Human
gcuggagugcaguggcgug

SEQ ID NO: 207264 - RNA, 25 nt, Human
ggacaggaacacagacgucauccuu

SEQ ID NO: 207265 - RNA, 22 nt, Human
ggcuggagugcaguggcgugau

SEQ ID NO: 207266 - RNA, 22 nt, Human
gggguuucaccacguuggccag

SEQ ID NO: 207267 - RNA, 22 nt, Human
ggguuucaccacguuggccagg

SEQ ID NO: 207268 - RNA, 21 nt, Human
uaagagcuugcccguauuuuu

SEQ ID NO: 207269 - RNA, 24 nt, Human
uaauuuuuguauuuuuaguagaga

SEQ ID NO: 207270 - RNA, 23 nt, Human
uacaggugugagccaccgugccc

SEQ ID NO: 207271 - RNA, 20 nt, Human
uacauguucgcgcacgcgca

SEQ ID NO: 207272 - RNA, 22 nt, Human
uagagaugggguuucaccacgu

SEQ ID NO: 207273 - RNA, 21 nt, Human
uaggguaagcuacuuuccaga

SEQ ID NO: 207274 - RNA, 19 nt, Human
uaguagagaugggguuuca

SEQ ID NO: 207275 - RNA, 24 nt, Human
uaguagagaugggguuucaccacg

SEQ ID NO: 207276 - RNA, 26 nt, Human
uaguagagaugggguuucaccacguu

SEQ ID NO: 207277 - RNA, 19 nt, Human
ucaagcgauucuccugccu

SEQ ID NO: 207278 - RNA, 21 nt, Human
ucacaggaggaagacgggugg

SEQ ID NO: 207279 - RNA, 24 nt, Human
ucacaggaggaagacggguggcca

SEQ ID NO: 207280 - RNA, 24 nt, Human
ucaccaggcuggagugcaguggcg

SEQ ID NO: 207281 - RNA, 23 nt, Human
ucacgcugucaccaggcuggagu

SEQ ID NO: 207282 - RNA, 19 nt, Human
ucacugcaaccuccaccuc

SEQ ID NO: 207283 - RNA, 20 nt, Human
ucacugcaaccuccaccucc

SEQ ID NO: 207284 - RNA, 22 nt, Human
ucacugcaaccuccaccuccug

SEQ ID NO: 207285 - RNA, 23 nt, Human
ucacugcaaccuccaccuccugu

SEQ ID NO: 207286 - RNA, 27 nt, Human
ucacugcaaccuccaccuccuguuuuc

SEQ ID NO: 207287 - RNA, 23 nt, Human
ucaguguuaaaagaaaagaccaa

SEQ ID NO: 207288 - RNA, 23 nt, Human
ucccaaagugcugggauuacagg

SEQ ID NO: 207289 - RNA, 21 nt, Human
uccuguuuucaagcgauucuc

SEQ ID NO: 207290 - RNA, 24 nt, Human
uccuguuuucaagcgauucuccug

SEQ ID NO: 207291 - RNA, 21 nt, Human
ucucacgcugucaccaggcug

SEQ ID NO: 207292 - RNA, 23 nt, Human
ucucacgcugucaccaggcugga

SEQ ID NO: 207293 - RNA, 24 nt, Human
ucuccugccucagccuccugagua

SEQ ID NO: 207294 - RNA, 19 nt, Human
ugacacaguucauuucugg

SEQ ID NO: 207295 - RNA, 22 nt, Human
ugcaguggcgugaucucggcuc

SEQ ID NO: 207296 - RNA, 24 nt, Human
ugccucagccucccaaagugcugg

SEQ ID NO: 207297 - RNA, 23 nt, Human
ugccucagccuccugaguagcua

SEQ ID NO: 207298 - RNA, 24 nt, Human
ugccucagccuccugaguagcuaa

SEQ ID NO: 207299 - RNA, 24 nt, Human
ugcugggauuacaggugugagcca

SEQ ID NO: 207300 - RNA, 19 nt, Human
uggagugcaguggcgugau

SEQ ID NO: 207301 - RNA, 23 nt, Human
uggagugcaguggcgugaucucg

SEQ ID NO: 207302 - RNA, 24 nt, Human
uggagugcaguggcgugaucucgg

SEQ ID NO: 207303 - RNA, 19 nt, Human
uggcauuugcagcuguuuu

SEQ ID NO: 207304 - RNA, 22 nt, Human
uggccaggcuggucucgaucuc

SEQ ID NO: 207305 - RNA, 20 nt, Human
uggcgugaucucggcucacu

SEQ ID NO: 207306 - RNA, 18 nt, Human
ugggauuacaggugugag

SEQ ID NO: 207307 - RNA, 21 nt, Human
ugggauuacaggugugagcca

SEQ ID NO: 207308 - RNA, 22 nt, Human
ugggauuacaggugugagccac

SEQ ID NO: 207309 - RNA, 23 nt, Human
ugggauuacaggugugagccacc

SEQ ID NO: 207310 - RNA, 23 nt, Human
ugggauuacaggugugagccacc

SEQ ID NO: 207311 - RNA, 24 nt, Human
ugggauuacaggugugagccaccg

SEQ ID NO: 207312 - RNA, 24 nt, Human
ugggguuucaccacguuggccagg

SEQ ID NO: 207313 - RNA, 20 nt, Human
ugucaccaggcuggagugca

SEQ ID NO: 207314 - RNA, 24 nt, Human
uguuuucaagcgauucuccugccu

SEQ ID NO: 207315 - RNA, 19 nt, Human
uuaauccuaaaccauguaa

SEQ ID NO: 207316 - RNA, 18 nt, Human
uuaguagagaugggguuu

SEQ ID NO: 207317 - RNA, 22 nt, Human
uuaguagagaugggguuucacc

SEQ ID NO: 207318 - RNA, 24 nt, Human
uuaguagagaugggguuucaccac

SEQ ID NO: 207319 - RNA, 25 nt, Human
uuaguagagaugggguuucaccacg

SEQ ID NO: 207320 - RNA, 21 nt, Human
uucaagcgauucuccugccuc

SEQ ID NO: 207321 - RNA, 23 nt, Human
uucaagcgauucuccugccucag

SEQ ID NO: 207322 - RNA, 24 nt, Human
uucaagcgauucuccugccucagc

SEQ ID NO: 207323 - RNA, 19 nt, Human
uucucgggaugaaugaaca

SEQ ID NO: 207324 - RNA, 23 nt, Human
uuguauuuuuaguagagaugggg

SEQ ID NO: 207325 - RNA, 21 nt, Human
uuucaccacguuggccaggcu

SEQ ID NO: 207326 - RNA, 20 nt, Human
uuucaugauuuuacacaugg

SEQ ID NO: 207327 - RNA, 18 nt, Human
uuugaaauaucucccgag

SEQ ID NO: 207328 - RNA, 24 nt, Human
uuuuuaguagagaugggguuucac

SEQ ID NO: 207329 - RNA, 22 nt, Human
uuuuucaugauuuuacacaugg

SEQ ID NO: 207330 - RNA, 20 nt, Human
uuuuuguauuuuuaguagag

SEQ ID NO: 207331 - RNA, 27 nt, Human
aaaaaaaaaaaaaaaagaacgaaagaa

SEQ ID NO: 207332 - RNA, 24 nt, Human
aaaaaaaaaagaacgaaagaagag

SEQ ID NO: 207333 - RNA, 19 nt, Human
aaaaacacagaguuuaagu

SEQ ID NO: 207334 - RNA, 20 nt, Human
aaaaacacagaguuuaaguc

SEQ ID NO: 207335 - RNA, 20 nt, Human
aacaugguaaaauccugucu

SEQ ID NO: 207336 - RNA, 22 nt, Human
aagaacucucaaaaacacagag

SEQ ID NO: 207337 - RNA, 20 nt, Human
aaggaaaggugcacaugugc

SEQ ID NO: 207338 - RNA, 18 nt, Human
aagguaauucugccccca

SEQ ID NO: 207339 - RNA, 24 nt, Human
aaucaccugaacccgggaggcgga

SEQ ID NO: 207340 - RNA, 22 nt, Human
acagaacgagacucugucucaa

SEQ ID NO: 207341 - RNA, 23 nt, Human
acagaacgagacucugucucaaa

SEQ ID NO: 207342 - RNA, 24 nt, Human
acagaacgagacucugucucaaaa

SEQ ID NO: 207343 - RNA, 19 nt, Human
acgccauguuuccuuucug

SEQ ID NO: 207344 - RNA, 19 nt, Human
agacaggaugugacauggg

SEQ ID NO: 207345 - RNA, 23 nt, Human
agaucacuugaggucaggaguuc

SEQ ID NO: 207346 - RNA, 22 nt, Human
agccaggcacagcggcucaccc

SEQ ID NO: 207347 - RNA, 24 nt, Human
agccuggccaacaugguaaaaucc

SEQ ID NO: 207348 - RNA, 24 nt, Human
agcggcucaccccuguaaucccag

SEQ ID NO: 207349 - RNA, 24 nt, Human
agcuugggcgacagaacgagacuc

SEQ ID NO: 207350 - RNA, 19 nt, Human
aggaacaccacaguuuccu

SEQ ID NO: 207351 - RNA, 22 nt, Human
aggagggcagaucacuugaggu

SEQ ID NO: 207352 - RNA, 26 nt, Human
aggagggcagaucacuugaggucagg

SEQ ID NO: 207353 - RNA, 24 nt, Human
aggcacagcggcucaccccuguaa

SEQ ID NO: 207354 - RNA, 19 nt, Human
aggcagcaaguuaggaugc

SEQ ID NO: 207355 - RNA, 18 nt, Human
aggcaggagaaucaccug

SEQ ID NO: 207356 - RNA, 18 nt, Human
aggcaggagaaucaccug

SEQ ID NO: 207357 - RNA, 24 nt, Human
aggcaggagaaucaccugaacccg

SEQ ID NO: 207358 - RNA, 24 nt, Human
aggcaugguggcaggcgccuguaa

SEQ ID NO: 207359 - RNA, 19 nt, Human
aggcggauguugcagugag

SEQ ID NO: 207360 - RNA, 22 nt, Human
aggcggauguugcagugagcca

SEQ ID NO: 207361 - RNA, 24 nt, Human
aggcggauguugcagugagccaag

SEQ ID NO: 207362 - RNA, 21 nt, Human
aggcugaggagggcagaucac

SEQ ID NO: 207363 - RNA, 24 nt, Human
aggcugaggcaggagaaucaccug

SEQ ID NO: 207364 - RNA, 19 nt, Human
aggucaggaguucgagacc

SEQ ID NO: 207365 - RNA, 22 nt, Human
agguggcagaggccugacccag

SEQ ID NO: 207366 - RNA, 23 nt, Human
agguggcagaggccugacccaga

SEQ ID NO: 207367 - RNA, 25 nt, Human
aucaagaacucucaaaaacacagag

SEQ ID NO: 207368 - RNA, 24 nt, Human
aucacaccauugcgcuccagcuug

SEQ ID NO: 207369 - RNA, 24 nt, Human
auccucugggucaaccaucucuuc

SEQ ID NO: 207370 - RNA, 18 nt, Human
auugcgcuccagcuuggg

SEQ ID NO: 207371 - RNA, 20 nt, Human
caaagugcaccacuuugaau

SEQ ID NO: 207372 - RNA, 18 nt, Human
caagaacucucaaaaaca

SEQ ID NO: 207373 - RNA, 22 nt, Human
caagaguuccaacugcugaggg

SEQ ID NO: 207374 - RNA, 18 nt, Human
cacacuuucuucuuucug

SEQ ID NO: 207375 - RNA, 23 nt, Human
caccccuguaaucccagcacuuu

SEQ ID NO: 207376 - RNA, 23 nt, Human
cacuugaggucaggaguucgaga

SEQ ID NO: 207377 - RNA, 19 nt, Human
cagaggccugacccagagg

SEQ ID NO: 207378 - RNA, 24 nt, Human
cagaucacuugaggucaggaguuc

SEQ ID NO: 207379 - RNA, 27 nt, Human
cagaucacuugaggucaggaguucgag

SEQ ID NO: 207380 - RNA, 20 nt, Human
caggcuaaaaaguuaugaaa

SEQ ID NO: 207381 - RNA, 18 nt, Human
cauccccaaggucaacau

SEQ ID NO: 207382 - RNA, 22 nt, Human
cauuaggugaucaaaauucuga

SEQ ID NO: 207383 - RNA, 23 nt, Human
cauuauauaaccauccccaaggu

SEQ ID NO: 207384 - RNA, 19 nt, Human
cauugcgcuccagcuuggg

SEQ ID NO: 207385 - RNA, 20 nt, Human
cauugcgcuccagcuugggc

SEQ ID NO: 207386 - RNA, 22 nt, Human
cauugcgcuccagcuugggcga

SEQ ID NO: 207387 - RNA, 24 nt, Human
cauugcgcuccagcuugggcgaca

SEQ ID NO: 207388 - RNA, 18 nt, Human
ccaacugcugagggcugu

SEQ ID NO: 207389 - RNA, 21 nt, Human
ccauugcgcuccagcuugggc

SEQ ID NO: 207390 - RNA, 24 nt, Human
ccauugcgcuccagcuugggcgac

SEQ ID NO: 207391 - RNA, 25 nt, Human
ccauugcgcuccagcuugggcgaca

SEQ ID NO: 207392 - RNA, 26 nt, Human
cccaauuuauuucacagaaauaucac

SEQ ID NO: 207393 - RNA, 22 nt, Human
cccccagaccccuccguggagc

SEQ ID NO: 207394 - RNA, 21 nt, Human
ccccccuucucuccacugcuc

SEQ ID NO: 207395 - RNA, 19 nt, Human
ccccuguaaucccagcacu

SEQ ID NO: 207396 - RNA, 18 nt, Human
cccgugcggccggguggu

SEQ ID NO: 207397 - RNA, 18 nt, Human
ccuccucccuuccugccu

SEQ ID NO: 207398 - RNA, 21 nt, Human
ccucgggccccagccgcgccc

SEQ ID NO: 207399 - RNA, 19 nt, Human
ccucugggucaaccaucuc

SEQ ID NO: 207400 - RNA, 22 nt, Human
ccuggccaacaugguaaaaucc

SEQ ID NO: 207401 - RNA, 24 nt, Human
ccuggccaacaugguaaaauccug

SEQ ID NO: 207402 - RNA, 20 nt, Human
ccuguaaucccagcuacuug

SEQ ID NO: 207403 - RNA, 23 nt, Human
ccuguaaucccagcuacuugcga

SEQ ID NO: 207404 - RNA, 22 nt, Human
ccugucuccacuaaaaauacaa

SEQ ID NO: 207405 - RNA, 23 nt, Human
ccuugugcagggccccccuucuc

SEQ ID NO: 207406 - RNA, 19 nt, Human
ccuuuucuuucccugcucc

SEQ ID NO: 207407 - RNA, 21 nt, Human
ccuuuucuuucccugcuccca

SEQ ID NO: 207408 - RNA, 20 nt, Human
cgaaagaagagaaauaucau

SEQ ID NO: 207409 - RNA, 21 nt, Human
cgacugaaacuucgauggcuc

SEQ ID NO: 207410 - RNA, 24 nt, Human
cgagaccagccuggccaacauggu

SEQ ID NO: 207411 - RNA, 21 nt, Human
cgauaaggcagcaaguuagga

SEQ ID NO: 207412 - RNA, 22 nt, Human
cgccuguaaucccagcuacuug

SEQ ID NO: 207413 - RNA, 20 nt, Human
cgcgcccggcucugggaccc

SEQ ID NO: 207414 - RNA, 24 nt, Human
cggcucaccccuguaaucccagca

SEQ ID NO: 207415 - RNA, 20 nt, Human
cgggaaaaggguccuggagu

SEQ ID NO: 207416 - RNA, 18 nt, Human
cucaaaaaaaaaaaaaaa

SEQ ID NO: 207417 - RNA, 24 nt, Human
cucaaaaaaaaaaaaaaaagaacg

SEQ ID NO: 207418 - RNA, 24 nt, Human
cucaccccuguaaucccagcacuu

SEQ ID NO: 207419 - RNA, 21 nt, Human
cucauuauauaaccaucccca

SEQ ID NO: 207420 - RNA, 20 nt, Human
cuccccgacgccauguuucc

SEQ ID NO: 207421 - RNA, 25 nt, Human
cucccuuccugccugcuuugcagcu

SEQ ID NO: 207422 - RNA, 23 nt, Human
cucgggccccagccgcgcccggc

SEQ ID NO: 207423 - RNA, 23 nt, Human
cucgucaucaagaacucucaaaa

SEQ ID NO: 207424 - RNA, 19 nt, Human
cucugucucaaaaaaaaaa

SEQ ID NO: 207425 - RNA, 23 nt, Human
cugaaacuucgauggcucuuccc

SEQ ID NO: 207426 - RNA, 22 nt, Human
cugcucaccuggcucuccuccu

SEQ ID NO: 207427 - RNA, 18 nt, Human
cuggacaagguggaauuc

SEQ ID NO: 207428 - RNA, 18 nt, Human
cuuaaaaaaaaaaaaaaa

SEQ ID NO: 207429 - RNA, 20 nt, Human
cuuaaaaaaaaaaaaaaaga

SEQ ID NO: 207430 - RNA, 23 nt, Human
cuuaaaaaaaaaaaaaaagagag

SEQ ID NO: 207431 - RNA, 18 nt, Human
cuugucuguccaaguuca

SEQ ID NO: 207432 - RNA, 22 nt, Human
gaacaccacaguuuccuccucc

SEQ ID NO: 207433 - RNA, 18 nt, Human
gaacccgggaggcggaug

SEQ ID NO: 207434 - RNA, 18 nt, Human
gacccagaggccugacag

SEQ ID NO: 207435 - RNA, 23 nt, Human
gaggagggcagaucacuugaggu

SEQ ID NO: 207436 - RNA, 24 nt, Human
gaucacuugaggucaggaguucga

SEQ ID NO: 207437 - RNA, 19 nt, Human
gaugcagagacaaagaacc

SEQ ID NO: 207438 - RNA, 19 nt, Human
gauguugcagugagccaag

SEQ ID NO: 207439 - RNA, 21 nt, Human
gauucuguagagguggcagag

SEQ ID NO: 207440 - RNA, 23 nt, Human
gcaggagaaucaccugaacccgg

SEQ ID NO: 207441 - RNA, 24 nt, Human
gccaacaugguaaaauccugucuc

SEQ ID NO: 207442 - RNA, 19 nt, Human
gccauguuuccuuucugua

SEQ ID NO: 207443 - RNA, 20 nt, Human
gccucgggccccagccgcgc

SEQ ID NO: 207444 - RNA, 20 nt, Human
gcggccucucggacagaagc

SEQ ID NO: 207445 - RNA, 19 nt, Human
gcgggcgggggacaaaagc

SEQ ID NO: 207446 - RNA, 20 nt, Human
gcuagccucgggccccagcc

SEQ ID NO: 207447 - RNA, 22 nt, Human
gcuaggcaugguggcaggcgcc

SEQ ID NO: 207448 - RNA, 23 nt, Human
ggaaaggugcacaugugcuuccu

SEQ ID NO: 207449 - RNA, 23 nt, Human
ggacagaagcggcgggcggggga

SEQ ID NO: 207450 - RNA, 20 nt, Human
ggauguugcagugagccaag

SEQ ID NO: 207451 - RNA, 24 nt, Human
ggauguugcagugagccaagauca

SEQ ID NO: 207452 - RNA, 25 nt, Human
ggcagaucacuugaggucaggaguu

SEQ ID NO: 207453 - RNA, 21 nt, Human
ggcaggcgccuguaaucccag

SEQ ID NO: 207454 - RNA, 19 nt, Human
ggcccgugcggccgggugg

SEQ ID NO: 207455 - RNA, 24 nt, Human
ggcgccuguaaucccagcuacuug

SEQ ID NO: 207456 - RNA, 21 nt, Human
ggcggccucucggacagaagc

SEQ ID NO: 207457 - RNA, 22 nt, Human
gggaacuguucggcucgccggc

SEQ ID NO: 207458 - RNA, 23 nt, Human
gggaggcugaggcaggagaauca

SEQ ID NO: 207459 - RNA, 19 nt, Human
gggcuucuaagucgucacu

SEQ ID NO: 207460 - RNA, 24 nt, Human
gguggcaggcgccuguaaucccag

SEQ ID NO: 207461 - RNA, 18 nt, Human
ggugguccgcgggcugcg

SEQ ID NO: 207462 - RNA, 24 nt, Human
gucaucucauuauauaaccauccc

SEQ ID NO: 207463 - RNA, 23 nt, Human
guggcaggcgccuguaaucccag

SEQ ID NO: 207464 - RNA, 21 nt, Human
guggggaacccugcucccugg

SEQ ID NO: 207465 - RNA, 19 nt, Human
guuugcucuuuauuuucua

SEQ ID NO: 207466 - RNA, 22 nt, Human
uaaaauccugucuccacuaaaa

SEQ ID NO: 207467 - RNA, 19 nt, Human
uacaucugaaaucaacauu

SEQ ID NO: 207468 - RNA, 19 nt, Human
uacuugcgagggaggcuga

SEQ ID NO: 207469 - RNA, 21 nt, Human
uagccaccgccacuuguccug

SEQ ID NO: 207470 - RNA, 24 nt, Human
uagccucgggccccagccgcgccc

SEQ ID NO: 207471 - RNA, 19 nt, Human
uaggugaugucaccuggaa

SEQ ID NO: 207472 - RNA, 23 nt, Human
uauguaaacaaugcacugaauga

SEQ ID NO: 207473 - RNA, 24 nt, Human
uauuuuccuuuucuuucccugcuc

SEQ ID NO: 207474 - RNA, 20 nt, Human
ucaagaguuccaacugcuga

SEQ ID NO: 207475 - RNA, 21 nt, Human
ucacacacgugauccuaaagu

SEQ ID NO: 207476 - RNA, 23 nt, Human
ucacaccauugcgcuccagcuug

SEQ ID NO: 207477 - RNA, 20 nt, Human
ucacuugaggucaggaguuc

SEQ ID NO: 207478 - RNA, 21 nt, Human
ucagcuguacuguuugcucuu

SEQ ID NO: 207479 - RNA, 18 nt, Human
uccagcuugggcgacaga

SEQ ID NO: 207480 - RNA, 24 nt, Human
uccagcuugggcgacagaacgaga

SEQ ID NO: 207481 - RNA, 22 nt, Human
ucccugcucccacccuggcccc

SEQ ID NO: 207482 - RNA, 20 nt, Human
ucgauggcucuucccuguuu

SEQ ID NO: 207483 - RNA, 22 nt, Human
ucgauggcucuucccuguuucc

SEQ ID NO: 207484 - RNA, 19 nt, Human
ucgggaaaaggguccugga

SEQ ID NO: 207485 - RNA, 18 nt, Human
ucucaaaaaaaaaaaaaa

SEQ ID NO: 207486 - RNA, 27 nt, Human
ucucaaaaacacagaguuuaaguccac

SEQ ID NO: 207487 - RNA, 26 nt, Human
ucugaagugucuaauuaaacuuugca

SEQ ID NO: 207488 - RNA, 23 nt, Human
ucugucucaaaaaaaaaaaaaaa

SEQ ID NO: 207489 - RNA, 29 nt, Human
ucugucucaaaaaaaaaaaaaaaagaaaa

SEQ ID NO: 207490 - RNA, 18 nt, Human
ucuucggaccacaggccc

SEQ ID NO: 207491 - RNA, 20 nt, Human
ugaaacuguggggaacccug

SEQ ID NO: 207492 - RNA, 24 nt, Human
ugaggagggcagaucacuugaggu

SEQ ID NO: 207493 - RNA, 26 nt, Human
ugaggagggcagaucacuugagguca

SEQ ID NO: 207494 - RNA, 20 nt, Human
ugaggcaggagaaucaccug

SEQ ID NO: 207495 - RNA, 24 nt, Human
ugaggcaggagaaucaccugaacc

SEQ ID NO: 207496 - RNA, 25 nt, Human
ugaggcaggagaaucaccugaaccc

SEQ ID NO: 207497 - RNA, 19 nt, Human
ugauugcacauuaucagga

SEQ ID NO: 207498 - RNA, 19 nt, Human
ugcgagggaggcugaggca

SEQ ID NO: 207499 - RNA, 22 nt, Human
ugcgcuccagcuugggcgacag

SEQ ID NO: 207500 - RNA, 25 nt, Human
ugcuagccucgggccccagccgcgc

SEQ ID NO: 207501 - RNA, 22 nt, Human
uggaagaaaggaacaccacagu

SEQ ID NO: 207502 - RNA, 23 nt, Human
uggaagaaaggaacaccacaguu

SEQ ID NO: 207503 - RNA, 21 nt, Human
uggaauuccaauugcaggaga

SEQ ID NO: 207504 - RNA, 24 nt, Human
uggccaacaugguaaaauccuguc

SEQ ID NO: 207505 - RNA, 29 nt, Human
uggccaggcuaaaaaguuaugaaaauucu

SEQ ID NO: 207506 - RNA, 20 nt, Human
uggcucuccuccucccuucc

SEQ ID NO: 207507 - RNA, 24 nt, Human
ugguggcaggcgccuguaauccca

SEQ ID NO: 207508 - RNA, 23 nt, Human
uguccugggcgcugccucaguua

SEQ ID NO: 207509 - RNA, 22 nt, Human
ugugcagggccccccuucucuc

SEQ ID NO: 207510 - RNA, 21 nt, Human
uuaaguccacauugaagguaa

SEQ ID NO: 207511 - RNA, 18 nt, Human
uuagagucuucucuugac

SEQ ID NO: 207512 - RNA, 24 nt, Human
uugcagcucucgccuugcggcucc

SEQ ID NO: 207513 - RNA, 20 nt, Human
uugcagugagccaagaucac

SEQ ID NO: 207514 - RNA, 18 nt, Human
gucacuuaaacagcaucu

SEQ ID NO: 207515 - RNA, 23 nt, Human
aaaauauauuccccauauaaaua

SEQ ID NO: 207516 - RNA, 18 nt, Human
aaauaaacacacaaccca

SEQ ID NO: 207517 - RNA, 22 nt, Human
acacauucaaguucugucugac

SEQ ID NO: 207518 - RNA, 22 nt, Human
aggcauauuuucaaaccggcag

SEQ ID NO: 207519 - RNA, 23 nt, Human
caagugaaauaaacacacaaccc

SEQ ID NO: 207520 - RNA, 19 nt, Human
caccaggcaugaaaucucc

SEQ ID NO: 207521 - RNA, 23 nt, Human
ccuuguaaucacauagccuugcc

SEQ ID NO: 207522 - RNA, 19 nt, Human
gaaauaaacacacaaccca

SEQ ID NO: 207523 - RNA, 18 nt, Human
gaagcaccaggcaugaaa

SEQ ID NO: 207524 - RNA, 23 nt, Human
gcaugaaaucuccugagaugcua

SEQ ID NO: 207525 - RNA, 19 nt, Human
uaguuggccccugagauaa

SEQ ID NO: 207526 - RNA, 24 nt, Human
ucacaguugucaacaauauuugga

SEQ ID NO: 207527 - RNA, 24 nt, Human
uccccauauaaauaauguuaaaua

SEQ ID NO: 207528 - RNA, 22 nt, Human
ugaaauaaacacacaacccaug

SEQ ID NO: 207529 - RNA, 18 nt, Human
ugcuauguuuucaucagg

SEQ ID NO: 207530 - RNA, 23 nt, Human
uggaagcaccaggcaugaaaucu

SEQ ID NO: 207531 - RNA, 23 nt, Human
uggcugccuaguuggccccugag

SEQ ID NO: 207532 - RNA, 23 nt, Human
uucauuacacaaaaguugcuauu

SEQ ID NO: 207533 - RNA, 18 nt, Human
aaaaugccacacauccuc

SEQ ID NO: 207534 - RNA, 20 nt, Human
aaaauucuuuauuuaaaaau

SEQ ID NO: 207535 - RNA, 24 nt, Human
aauauacacguuucuauuuacaua

SEQ ID NO: 207536 - RNA, 20 nt, Human
aaugccacacauccucuuua

SEQ ID NO: 207537 - RNA, 21 nt, Human
accaaggcagagaaaagaaaa

SEQ ID NO: 207538 - RNA, 21 nt, Human
acgcuuucauguacacuaagu

SEQ ID NO: 207539 - RNA, 19 nt, Human
agccaaaagugaaaaugcc

SEQ ID NO: 207540 - RNA, 19 nt, Human
aggaaaaucagacuucaaa

SEQ ID NO: 207541 - RNA, 18 nt, Human
aggaaccaggaguacugg

SEQ ID NO: 207542 - RNA, 26 nt, Human
ccacacauccucuuuacgcuuucaug

SEQ ID NO: 207543 - RNA, 19 nt, Human
cuucaaaguuggugcaacu

SEQ ID NO: 207544 - RNA, 28 nt, Human
gcagaauuucuucugaaauuacuuaaaa

SEQ ID NO: 207545 - RNA, 19 nt, Human
gugaaaaugccacacaucc

SEQ ID NO: 207546 - RNA, 24 nt, Human
gugaaaaugccacacauccucuuu

SEQ ID NO: 207547 - RNA, 25 nt, Human
uaccaaggcagagaaaagaaaaaaa

SEQ ID NO: 207548 - RNA, 22 nt, Human
uauaccaaggcagagaaaagaa

SEQ ID NO: 207549 - RNA, 23 nt, Human
uccaggaaaaucagacuucaaag

SEQ ID NO: 207550 - RNA, 23 nt, Human
ugaaauuaaagcagaaaacuguc

SEQ ID NO: 207551 - RNA, 23 nt, Human
uggggcaucaccugcucaccuag

SEQ ID NO: 207552 - RNA, 21 nt, Human
ugguugauaccaacuaagaua

SEQ ID NO: 207553 - RNA, 21 nt, Human
ugguugauaccaacuaagaua

SEQ ID NO: 207554 - RNA, 21 nt, Human
uguccaggaaaaucagacuuc

SEQ ID NO: 207555 - RNA, 20 nt, Human
uugaaaagcuugcagaauuu

SEQ ID NO: 207556 - RNA, 20 nt, Human
uuuaaaaaaaaaaaaaaguu

SEQ ID NO: 207557 - RNA, 25 nt, Human
aaaaaaaaaagcuugucacccccau

SEQ ID NO: 207558 - RNA, 20 nt, Human
acaccauggauguacaugaa

SEQ ID NO: 207559 - RNA, 19 nt, Human
accccuccugacccccccc

SEQ ID NO: 207560 - RNA, 19 nt, Human
accccuccugacccccccc

SEQ ID NO: 207561 - RNA, 18 nt, Human
agaaaaaaaaaaaaaagc

SEQ ID NO: 207562 - RNA, 18 nt, Human
agacagaacucuagcagc

SEQ ID NO: 207563 - RNA, 20 nt, Human
agacagaacucuagcagcuc

SEQ ID NO: 207564 - RNA, 25 nt, Human
aggcuggagugcaguggggcgaucu

SEQ ID NO: 207565 - RNA, 20 nt, Human
agggagccagugggcuaggc

SEQ ID NO: 207566 - RNA, 22 nt, Human
aggucuucugacugcucagccc

SEQ ID NO: 207567 - RNA, 19 nt, Human
agugcaguggggcgaucuc

SEQ ID NO: 207568 - RNA, 20 nt, Human
agugcaguggggcgaucucg

SEQ ID NO: 207569 - RNA, 24 nt, Human
agugcaguggggcgaucucggcuc

SEQ ID NO: 207570 - RNA, 18 nt, Human
auccuuccggaagggccc

SEQ ID NO: 207571 - RNA, 19 nt, Human
caacucucccccgcccccc

SEQ ID NO: 207572 - RNA, 19 nt, Human
caacucucccccgcccccc

SEQ ID NO: 207573 - RNA, 19 nt, Human
caccauggauguacaugaa

SEQ ID NO: 207574 - RNA, 22 nt, Human
cagcacaccauggauguacaug

SEQ ID NO: 207575 - RNA, 23 nt, Human
ccaaaguacauauuaagcuuuca

SEQ ID NO: 207576 - RNA, 24 nt, Human
ccacgcagccggccucccagagcu

SEQ ID NO: 207577 - RNA, 21 nt, Human
ccauuuugcuaacaagcaauu

SEQ ID NO: 207578 - RNA, 20 nt, Human
cccaccccuccugacccccc

SEQ ID NO: 207579 - RNA, 21 nt, Human
ccccaccccuccugacccccc

SEQ ID NO: 207580 - RNA, 24 nt, Human
ccccaccccuccugacccccccca

SEQ ID NO: 207581 - RNA, 26 nt, Human
cccccaccccuccugaccccccccaa

SEQ ID NO: 207582 - RNA, 18 nt, Human
cccccgaggccaccgccc

SEQ ID NO: 207583 - RNA, 21 nt, Human
cccccgaggccaccgcccccg

SEQ ID NO: 207584 - RNA, 22 nt, Human
cccccgcccccgccccgucccc

SEQ ID NO: 207585 - RNA, 19 nt, Human
ccccgaggccaccgccccc

SEQ ID NO: 207586 - RNA, 23 nt, Human
ccccuccugaccccccccaacuc

SEQ ID NO: 207587 - RNA, 20 nt, Human
cccgccccccuccccuuuuu

SEQ ID NO: 207588 - RNA, 19 nt, Human
cccgccccgucccgccccc

SEQ ID NO: 207589 - RNA, 18 nt, Human
cccgcgagaccccggccc

SEQ ID NO: 207590 - RNA, 19 nt, Human
cccgcgagaccccggccca

SEQ ID NO: 207591 - RNA, 20 nt, Human
cccgcgagaccccggcccag

SEQ ID NO: 207592 - RNA, 21 nt, Human
cccgcgagaccccggcccagg

SEQ ID NO: 207593 - RNA, 20 nt, Human
cccggaacguccuggagacu

SEQ ID NO: 207594 - RNA, 19 nt, Human
cccggcccaggcccccggg

SEQ ID NO: 207595 - RNA, 24 nt, Human
ccgcccccgccccgucccgccccc

SEQ ID NO: 207596 - RNA, 22 nt, Human
ccgcgauccuuccggaagggcc

SEQ ID NO: 207597 - RNA, 26 nt, Human
ccgucccgcccccgaggccaccgccc

SEQ ID NO: 207598 - RNA, 22 nt, Human
ccucccagagcgcggagccucc

SEQ ID NO: 207599 - RNA, 19 nt, Human
ccuggagcccccaccccuc

SEQ ID NO: 207600 - RNA, 24 nt, Human
ccuucgggggccgcgauccuuccg

SEQ ID NO: 207601 - RNA, 19 nt, Human
ccuuuuuuuugagacggag

SEQ ID NO: 207602 - RNA, 20 nt, Human
cgcagggcgcgcagggcccg

SEQ ID NO: 207603 - RNA, 19 nt, Human
cgccauggcgagcgcaggg

SEQ ID NO: 207604 - RNA, 25 nt, Human
cgccccccuccccuuuuuuuugaga

SEQ ID NO: 207605 - RNA, 20 nt, Human
cgccucuucccgagcggcag

SEQ ID NO: 207606 - RNA, 27 nt, Human
cgcgagaccccggcccaggcccccggg

SEQ ID NO: 207607 - RNA, 18 nt, Human
cgcgcagggcccgccucu

SEQ ID NO: 207608 - RNA, 22 nt, Human
cgcggggaccccacgcagccgg

SEQ ID NO: 207609 - RNA, 22 nt, Human
cggagucaccaggcuggagugc

SEQ ID NO: 207610 - RNA, 21 nt, Human
cucccggaacguccuggagac

SEQ ID NO: 207611 - RNA, 21 nt, Human
cugcaaccuccgccuccaguc

SEQ ID NO: 207612 - RNA, 18 nt, Human
cuggagcccccaccccuc

SEQ ID NO: 207613 - RNA, 22 nt, Human
cuggagccccgcgggacgccca

SEQ ID NO: 207614 - RNA, 19 nt, Human
gagccgcucacgucgccgc

SEQ ID NO: 207615 - RNA, 21 nt, Human
gagucaccaggcuggagugca

SEQ ID NO: 207616 - RNA, 18 nt, Human
gcccaaaccgccauggcg

SEQ ID NO: 207617 - RNA, 23 nt, Human
gcccccgcgcgggacuuucccgc

SEQ ID NO: 207618 - RNA, 22 nt, Human
gcccuggggggccucugcggcu

SEQ ID NO: 207619 - RNA, 18 nt, Human
gccucccagagcgcggag

SEQ ID NO: 207620 - RNA, 21 nt, Human
gcgucccgguggaggggauuc

SEQ ID NO: 207621 - RNA, 20 nt, Human
gcucauuugccaaagucaag

SEQ ID NO: 207622 - RNA, 24 nt, Human
ggcgagcgcagggcgcgcagggcc

SEQ ID NO: 207623 - RNA, 23 nt, Human
ggcguucccuggagcccccaccc

SEQ ID NO: 207624 - RNA, 24 nt, Human
gggacgcccaccuucgggggccgc

SEQ ID NO: 207625 - RNA, 23 nt, Human
gggcgucccgguggaggggauuc

SEQ ID NO: 207626 - RNA, 26 nt, Human
gucgcggccggggccccgcucggggu

SEQ ID NO: 207627 - RNA, 19 nt, Human
gugugaccugcccaagggg

SEQ ID NO: 207628 - RNA, 23 nt, Human
guuuaagagaagccuuaauuuuc

SEQ ID NO: 207629 - RNA, 23 nt, Human
uagaggcagcaaaagggaauacu

SEQ ID NO: 207630 - RNA, 22 nt, Human
uauacaaucuuuuauuuccagu

SEQ ID NO: 207631 - RNA, 19 nt, Human
ucaacucucccccgccccc

SEQ ID NO: 207632 - RNA, 19 nt, Human
ucacugcaaccuccgccuc

SEQ ID NO: 207633 - RNA, 20 nt, Human
ucacugcaaccuccgccucc

SEQ ID NO: 207634 - RNA, 22 nt, Human
ucacugcaaccuccgccuccag

SEQ ID NO: 207635 - RNA, 23 nt, Human
ucacugcaaccuccgccuccagu

SEQ ID NO: 207636 - RNA, 24 nt, Human
ucacugcaaccuccgccuccaguc

SEQ ID NO: 207637 - RNA, 22 nt, Human
ucaggucgcggccggggccccg

SEQ ID NO: 207638 - RNA, 18 nt, Human
ucccccgccccccucccc

SEQ ID NO: 207639 - RNA, 19 nt, Human
ucccccgccccccuccccu

SEQ ID NO: 207640 - RNA, 19 nt, Human
ucccccgccccccuccccu

SEQ ID NO: 207641 - RNA, 19 nt, Human
ucccuggagcccccacccc

SEQ ID NO: 207642 - RNA, 21 nt, Human
uccgauggcuugaucucuucc

SEQ ID NO: 207643 - RNA, 21 nt, Human
ucggcucggccgcccgcgccc

SEQ ID NO: 207644 - RNA, 18 nt, Human
ucucccccgccccccucc

SEQ ID NO: 207645 - RNA, 18 nt, Human
ucucccccgccccccucc

SEQ ID NO: 207646 - RNA, 22 nt, Human
ucugcggcugcagcgcggggac

SEQ ID NO: 207647 - RNA, 18 nt, Human
ugaccccccccaacucuc

SEQ ID NO: 207648 - RNA, 23 nt, Human
uggagugcaguggggcgaucucg

SEQ ID NO: 207649 - RNA, 24 nt, Human
uggagugcaguggggcgaucucgg

SEQ ID NO: 207650 - RNA, 23 nt, Human
ugggacagguugugugaccugcc

SEQ ID NO: 207651 - RNA, 22 nt, Human
ugucauauccauuuugcuaaca

SEQ ID NO: 207652 - RNA, 25 nt, Human
uuuaagaaaaaaaaaaaaaagcuug

SEQ ID NO: 207653 - RNA, 24 nt, Human
acaaaauacaauauuuaaccaaau

SEQ ID NO: 207654 - RNA, 24 nt, Human
acaacaaucuauuaauuuugcauu

SEQ ID NO: 207655 - RNA, 18 nt, Human
acuguuuucauuugugug

SEQ ID NO: 207656 - RNA, 25 nt, Human
agacacacacuacacuaacaauaua

SEQ ID NO: 207657 - RNA, 24 nt, Human
agucaauucugugauuaaagccga

SEQ ID NO: 207658 - RNA, 19 nt, Human
auaaucagacacacacuac

SEQ ID NO: 207659 - RNA, 26 nt, Human
auagugaauauauguauauaugugua

SEQ ID NO: 207660 - RNA, 23 nt, Human
auauauguauauauguguauaua

SEQ ID NO: 207661 - RNA, 24 nt, Human
auucugugauuaaagccgaaauaa

SEQ ID NO: 207662 - RNA, 21 nt, Human
auuugcuucagguuuaccaga

SEQ ID NO: 207663 - RNA, 25 nt, Human
caauauauauauuauauauuuaugu

SEQ ID NO: 207664 - RNA, 24 nt, Human
cauauauauaugaaaaaaaucauu

SEQ ID NO: 207665 - RNA, 21 nt, Human
ccuggcuuuacugagcuggga

SEQ ID NO: 207666 - RNA, 18 nt, Human
cgaaauaagagucuuuug

SEQ ID NO: 207667 - RNA, 22 nt, Human
cuccauuuuuacccuccuuacu

SEQ ID NO: 207668 - RNA, 22 nt, Human
cuuaauacaauguaaaggcaaa

SEQ ID NO: 207669 - RNA, 18 nt, Human
gaagcaaaauuuuaaccc

SEQ ID NO: 207670 - RNA, 21 nt, Human
guaaauaaucagacacacacu

SEQ ID NO: 207671 - RNA, 20 nt, Human
gugaauauauguauauaugu

SEQ ID NO: 207672 - RNA, 25 nt, Human
uaaaauguaagaauaaauaaaugag

SEQ ID NO: 207673 - RNA, 20 nt, Human
uaaagccgaaauaagagucu

SEQ ID NO: 207674 - RNA, 18 nt, Human
uaaauaacaucuuaggga

SEQ ID NO: 207675 - RNA, 19 nt, Human
uaaccaaauggaaagcuga

SEQ ID NO: 207676 - RNA, 19 nt, Human
uaagaauaaauaaaugagu

SEQ ID NO: 207677 - RNA, 28 nt, Human
uaauauaccgacaaaguauuugcagaac

SEQ ID NO: 207678 - RNA, 20 nt, Human
uacuguuuucauuugugugu

SEQ ID NO: 207679 - RNA, 19 nt, Human
uauauacuauaugcaugua

SEQ ID NO: 207680 - RNA, 18 nt, Human
uauauauguguauauaua

SEQ ID NO: 207681 - RNA, 19 nt, Human
uauauguauauauguguau

SEQ ID NO: 207682 - RNA, 18 nt, Human
uauauuuauguauacaca

SEQ ID NO: 207683 - RNA, 25 nt, Human
uauguauacacacuauagugaauau

SEQ ID NO: 207684 - RNA, 20 nt, Human
uauguauauauguguauaua

SEQ ID NO: 207685 - RNA, 22 nt, Human
uauguauauauguguauauaua

SEQ ID NO: 207686 - RNA, 22 nt, Human
uauguauauauguguauauaua

SEQ ID NO: 207687 - RNA, 21 nt, Human
uauguguauauauaauauaua

SEQ ID NO: 207688 - RNA, 24 nt, Human
ucagcuaaacuccaguaaacuuca

SEQ ID NO: 207689 - RNA, 19 nt, Human
ucucuguucuagaagcaaa

SEQ ID NO: 207690 - RNA, 21 nt, Human
ucucuguucuagaagcaaaau

SEQ ID NO: 207691 - RNA, 24 nt, Human
ucuuuugaauugaccagagucaca

SEQ ID NO: 207692 - RNA, 21 nt, Human
ugaaaaacgucuggguacuaa

SEQ ID NO: 207693 - RNA, 19 nt, Human
ugaauugaccagagucaca

SEQ ID NO: 207694 - RNA, 21 nt, Human
ugaauugaccagagucacaug

SEQ ID NO: 207695 - RNA, 18 nt, Human
ugagcugggauauggcuu

SEQ ID NO: 207696 - RNA, 18 nt, Human
ugagcugggauauggcuu

SEQ ID NO: 207697 - RNA, 20 nt, Human
ugcaaguguuauauggcaaa

SEQ ID NO: 207698 - RNA, 18 nt, Human
ugcuucagguuuaccaga

SEQ ID NO: 207699 - RNA, 28 nt, Human
uguauacacacuauagugaauauaugua

SEQ ID NO: 207700 - RNA, 19 nt, Human
uguauauauguguauauau

SEQ ID NO: 207701 - RNA, 19 nt, Human
uguguauauauaauauaua

SEQ ID NO: 207702 - RNA, 20 nt, Human
uguuuuguuaucuuaauaca

SEQ ID NO: 207703 - RNA, 26 nt, Human
uuaacccuuauucuagccuccauuuu

SEQ ID NO: 207704 - RNA, 18 nt, Human
uuugcagaacuaauucag

SEQ ID NO: 207705 - RNA, 26 nt, Human
aaauagaaaaaaaaauagaaauuaga

SEQ ID NO: 207706 - RNA, 21 nt, Human
aagcaauauaaccacugcuac

SEQ ID NO: 207707 - RNA, 23 nt, Human
aauacauugaaauagaaaaaaaa

SEQ ID NO: 207708 - RNA, 19 nt, Human
aauuccuuuuguugaugcc

SEQ ID NO: 207709 - RNA, 20 nt, Human
accuuucuggcauaugcuaa

SEQ ID NO: 207710 - RNA, 18 nt, Human
agacagggucucgcuaug

SEQ ID NO: 207711 - RNA, 23 nt, Human
agacagggucucgcuauguugcc

SEQ ID NO: 207712 - RNA, 20 nt, Human
agauguuaagguuagcaacc

SEQ ID NO: 207713 - RNA, 19 nt, Human
agucauuuuggacucugua

SEQ ID NO: 207714 - RNA, 20 nt, Human
agugcugauuauaggcauga

SEQ ID NO: 207715 - RNA, 21 nt, Human
auccucccgccucagccuccc

SEQ ID NO: 207716 - RNA, 20 nt, Human
auguugcccaggcuggucuc

SEQ ID NO: 207717 - RNA, 24 nt, Human
cagaaaccuuaaucccaauuaugu

SEQ ID NO: 207718 - RNA, 19 nt, Human
cagagucgagaagcggcgg

SEQ ID NO: 207719 - RNA, 23 nt, Human
cagagugcugauuauaggcauga

SEQ ID NO: 207720 - RNA, 24 nt, Human
cagggucucgcuauguugcccagg

SEQ ID NO: 207721 - RNA, 23 nt, Human
ccagagucggagcuuagcgagga

SEQ ID NO: 207722 - RNA, 22 nt, Human
ccagagugcugauuauaggcau

SEQ ID NO: 207723 - RNA, 25 nt, Human
ccauccucccgccucagccucccca

SEQ ID NO: 207724 - RNA, 22 nt, Human
ccccagagugcugauuauaggc

SEQ ID NO: 207725 - RNA, 26 nt, Human
ccucccgccucagccuccccagagug

SEQ ID NO: 207726 - RNA, 25 nt, Human
cgccucagccuccccagagugcuga

SEQ ID NO: 207727 - RNA, 24 nt, Human
cgcuauguugcccaggcuggucuc

SEQ ID NO: 207728 - RNA, 21 nt, Human
cuaauucaucaugaacuccca

SEQ ID NO: 207729 - RNA, 24 nt, Human
cugguagagacagggucucgcuau

SEQ ID NO: 207730 - RNA, 19 nt, Human
gagaagcacuuucagugug

SEQ ID NO: 207731 - RNA, 23 nt, Human
gagaagcggcggggguaagagug

SEQ ID NO: 207732 - RNA, 19 nt, Human
gauuauaggcaugagccac

SEQ ID NO: 207733 - RNA, 25 nt, Human
gauuauaggcaugagccacacugca

SEQ ID NO: 207734 - RNA, 21 nt, Human
gugcgucugugcggcgggcgg

SEQ ID NO: 207735 - RNA, 19 nt, Human
gugggcgguggcggcagca

SEQ ID NO: 207736 - RNA, 18 nt, Human
guuuguaaauauacacau

SEQ ID NO: 207737 - RNA, 23 nt, Human
uaaauacauugaaauagaaaaaa

SEQ ID NO: 207738 - RNA, 22 nt, Human
uacacauaaagcuuugucuccc

SEQ ID NO: 207739 - RNA, 21 nt, Human
uaccucaaagccauaaauaau

SEQ ID NO: 207740 - RNA, 22 nt, Human
uagagacagggucucgcuaugu

SEQ ID NO: 207741 - RNA, 22 nt, Human
uagaucccaaaauuguacccag

SEQ ID NO: 207742 - RNA, 19 nt, Human
uauaaccacugcuacaaaa

SEQ ID NO: 207743 - RNA, 23 nt, Human
uauguugcccaggcuggucucaa

SEQ ID NO: 207744 - RNA, 24 nt, Human
uauguugcccaggcuggucucaaa

SEQ ID NO: 207745 - RNA, 22 nt, Human
ucaaaguaaaaugcacaaaguc

SEQ ID NO: 207746 - RNA, 23 nt, Human
ucggcuaacaacagagucgagaa

SEQ ID NO: 207747 - RNA, 22 nt, Human
ucucaugguauaauuccuuuug

SEQ ID NO: 207748 - RNA, 18 nt, Human
ucucgcuauguugcccag

SEQ ID NO: 207749 - RNA, 19 nt, Human
ucucgcuauguugcccagg

SEQ ID NO: 207750 - RNA, 23 nt, Human
ucucgcuauguugcccaggcugg

SEQ ID NO: 207751 - RNA, 24 nt, Human
ucucgcuauguugcccaggcuggu

SEQ ID NO: 207752 - RNA, 26 nt, Human
ucucgcuauguugcccaggcuggucu

SEQ ID NO: 207753 - RNA, 27 nt, Human
ucucgcuauguugcccaggcuggucuc

SEQ ID NO: 207754 - RNA, 23 nt, Human
ugaaauagaaaaaaaaauagaaa

SEQ ID NO: 207755 - RNA, 20 nt, Human
ugcauguauauaucauuaua

SEQ ID NO: 207756 - RNA, 18 nt, Human
ugccaagcagaaauauuc

SEQ ID NO: 207757 - RNA, 21 nt, Human
ugcccaggcuggucucaaacu

SEQ ID NO: 207758 - RNA, 28 nt, Human
ugcccaggcuggucucaaacuggggcca

SEQ ID NO: 207759 - RNA, 24 nt, Human
ugggcucaugccauccucccgccu

SEQ ID NO: 207760 - RNA, 24 nt, Human
ugguagagacagggucucgcuaug

SEQ ID NO: 207761 - RNA, 19 nt, Human
uguugaugccagugacagg

SEQ ID NO: 207762 - RNA, 23 nt, Human
uuaaaagcuacauuccauuaaaa

SEQ ID NO: 207763 - RNA, 22 nt, Human
uuaaucccaauuauguauugcu

SEQ ID NO: 207764 - RNA, 23 nt, Human
uucaguguggaaaaaaaucuuua

SEQ ID NO: 207765 - RNA, 22 nt, Human
uugaaagucagaaaccuuaauc

SEQ ID NO: 207766 - RNA, 21 nt, Human
uuguuuuccccaucaugaaau

SEQ ID NO: 207767 - RNA, 22 nt, Human
uuuuuuaaauuucugguagaga

SEQ ID NO: 207768 - RNA, 22 nt, Human
aaggaaaggaagggaaaggccc

SEQ ID NO: 207769 - RNA, 26 nt, Human
aaguguccgggcccccagcuacccac

SEQ ID NO: 207770 - RNA, 23 nt, Human
acaggaaggggccacagggcuga

SEQ ID NO: 207771 - RNA, 21 nt, Human
acaggacaggaaggggccaca

SEQ ID NO: 207772 - RNA, 19 nt, Human
agaaaggaaaggaagggaa

SEQ ID NO: 207773 - RNA, 19 nt, Human
agggaaaggcccccuagug

SEQ ID NO: 207774 - RNA, 22 nt, Human
agggucccaaguguccgggccc

SEQ ID NO: 207775 - RNA, 20 nt, Human
agugcagggacaaagggguc

SEQ ID NO: 207776 - RNA, 22 nt, Human
augccaccaccccccuaagagu

SEQ ID NO: 207777 - RNA, 25 nt, Human
cagaugccaccaccccccuaagagu

SEQ ID NO: 207778 - RNA, 18 nt, Human
cagggacaaaggggucag

SEQ ID NO: 207779 - RNA, 20 nt, Human
cauccugggggagcaaggcc

SEQ ID NO: 207780 - RNA, 22 nt, Human
ccaccaccccccuaagaguggg

SEQ ID NO: 207781 - RNA, 22 nt, Human
cccacagcccugaggaaggcac

SEQ ID NO: 207782 - RNA, 22 nt, Human
ccccagcuacccaccccauguc

SEQ ID NO: 207783 - RNA, 24 nt, Human
ccccagcuacccaccccaugucug

SEQ ID NO: 207784 - RNA, 26 nt, Human
ccgcaggaauuuuuuuuuuuuuuuuu

SEQ ID NO: 207785 - RNA, 21 nt, Human
gacaggaaggggccacagggc

SEQ ID NO: 207786 - RNA, 21 nt, Human
gagcaaggccugagaaaggaa

SEQ ID NO: 207787 - RNA, 21 nt, Human
gcuuugccaccccaccugcug

SEQ ID NO: 207788 - RNA, 20 nt, Human
ggucccaaguguccgggccc

SEQ ID NO: 207789 - RNA, 21 nt, Human
gucauccugggggagcaaggc

SEQ ID NO: 207790 - RNA, 20 nt, Human
uaaaaauacggaccaagggc

SEQ ID NO: 207791 - RNA, 23 nt, Human
uaaaaauacggaccaagggcaua

SEQ ID NO: 207792 - RNA, 18 nt, Human
ugaaggcugaccguucug

SEQ ID NO: 207793 - RNA, 19 nt, Human
ugagaaaggaaaggaaggg

SEQ ID NO: 207794 - RNA, 19 nt, Human
ugggucauccugggggagc

SEQ ID NO: 207795 - RNA, 21 nt, Human
uugaaggcugaccguucuguu

SEQ ID NO: 207796 - RNA, 19 nt, Human
uuuuuuuuuuuugaaggcu

SEQ ID NO: 207797 - RNA, 21 nt, Human
uuuuuuuuuuuuuuuugaagg

SEQ ID NO: 207798 - RNA, 18 nt, Human
uuuuuuuuuuuuuuuuug

SEQ ID NO: 207799 - RNA, 24 nt, Human
acccugcaguccugugguguugug

SEQ ID NO: 207800 - RNA, 21 nt, Human
agcugaagcaggagaccaggg

SEQ ID NO: 207801 - RNA, 21 nt, Human
auacagagccauuucucagca

SEQ ID NO: 207802 - RNA, 18 nt, Human
augaugccaaaacaagac

SEQ ID NO: 207803 - RNA, 23 nt, Human
ccaaaacaagacugcugguucau

SEQ ID NO: 207804 - RNA, 20 nt, Human
cugaagcaggagaccaggga

SEQ ID NO: 207805 - RNA, 18 nt, Human
gaggggaggacugcaugg

SEQ ID NO: 207806 - RNA, 22 nt, Human
gcaaagcaagauuuagcaucuu

SEQ ID NO: 207807 - RNA, 24 nt, Human
gcacucuuuuccuuccacuuaaga

SEQ ID NO: 207808 - RNA, 20 nt, Human
ggaggggaggacugcauggu

SEQ ID NO: 207809 - RNA, 22 nt, Human
ggaguugugcacccugcagucc

SEQ ID NO: 207810 - RNA, 24 nt, Human
guacagagcugaagcaggagacca

SEQ ID NO: 207811 - RNA, 19 nt, Human
uacacacuuaaucacuuga

SEQ ID NO: 207812 - RNA, 24 nt, Human
ugacacuuuacugaaugcaaagca

SEQ ID NO: 207813 - RNA, 21 nt, Human
uuaagaagcuggaauacaaca

SEQ ID NO: 207814 - RNA, 27 nt, Human
aaaaaaaaaaaaaaaaacaaaaccaag

SEQ ID NO: 207815 - RNA, 24 nt, Human
aaaaaaaaaaaacaaaaccaagaa

SEQ ID NO: 207816 - RNA, 25 nt, Human
aaaaaaaaacaaaaccaagaaacaa

SEQ ID NO: 207817 - RNA, 22 nt, Human
aaaaaaacaaaaccaagaaaca

SEQ ID NO: 207818 - RNA, 23 nt, Human
aaaaaaagaagaaaagaaccaag

SEQ ID NO: 207819 - RNA, 23 nt, Human
aaaaaaaggcagauucuaaggaa

SEQ ID NO: 207820 - RNA, 22 nt, Human
aaaaaagagagggaacacguga

SEQ ID NO: 207821 - RNA, 25 nt, Human
aaaaaauuuccaacuccugccccuu

SEQ ID NO: 207822 - RNA, 19 nt, Human
aaaaagaucugacauggua

SEQ ID NO: 207823 - RNA, 19 nt, Human
aaaaaguugaaagguggug

SEQ ID NO: 207824 - RNA, 24 nt, Human
aaaaaucaauaaggaacuuacuua

SEQ ID NO: 207825 - RNA, 20 nt, Human
aaaaauccaaaaaauuagcc

SEQ ID NO: 207826 - RNA, 23 nt, Human
aaaacaaaaccaagaaacaaaaa

SEQ ID NO: 207827 - RNA, 21 nt, Human
aaaacaaacagcccgaguugu

SEQ ID NO: 207828 - RNA, 27 nt, Human
aaaauagcaccauuauacuaaaaaaca

SEQ ID NO: 207829 - RNA, 25 nt, Human
aaacaaaacaaaauccaaaaccaag

SEQ ID NO: 207830 - RNA, 18 nt, Human
aaacaaaauccaaaacca

SEQ ID NO: 207831 - RNA, 25 nt, Human
aaacaauucauaaaccacuuagaca

SEQ ID NO: 207832 - RNA, 23 nt, Human
aaacaggcagagggcaaaaauga

SEQ ID NO: 207833 - RNA, 22 nt, Human
aaacauacauuucuaucuagcc

SEQ ID NO: 207834 - RNA, 19 nt, Human
aaagaagaaaagaaccaag

SEQ ID NO: 207835 - RNA, 22 nt, Human
aaagaucaacagcaaucuacca

SEQ ID NO: 207836 - RNA, 21 nt, Human
aaaggaaaaaaaagagaggga

SEQ ID NO: 207837 - RNA, 19 nt, Human
aaauagugaauugguauaa

SEQ ID NO: 207838 - RNA, 19 nt, Human
aacaugguaaaaccccguc

SEQ ID NO: 207839 - RNA, 20 nt, Human
aacaugguaaaaccccgucu

SEQ ID NO: 207840 - RNA, 21 nt, Human
aacaugguaaaaccccgucuc

SEQ ID NO: 207841 - RNA, 19 nt, Human
aacccaggguaaaaaaauc

SEQ ID NO: 207842 - RNA, 21 nt, Human
aacuccugccccugcaccccc

SEQ ID NO: 207843 - RNA, 21 nt, Human
aacuccugccccugcaccccc

SEQ ID NO: 207844 - RNA, 20 nt, Human
aagaaaccaggacugcuagu

SEQ ID NO: 207845 - RNA, 19 nt, Human
aagaaauaaaaagaagugc

SEQ ID NO: 207846 - RNA, 23 nt, Human
aagagagggaacacgugaaauau

SEQ ID NO: 207847 - RNA, 19 nt, Human
aagcaaaaggaaauccaga

SEQ ID NO: 207848 - RNA, 21 nt, Human
aagcaaaaggaaauccagaga

SEQ ID NO: 207849 - RNA, 22 nt, Human
aagcaaauauguacuacaggau

SEQ ID NO: 207850 - RNA, 18 nt, Human
aaggagaggaaggauucu

SEQ ID NO: 207851 - RNA, 22 nt, Human
aagucauagacacucuuagaau

SEQ ID NO: 207852 - RNA, 22 nt, Human
aaucacaaggucaggaguuuga

SEQ ID NO: 207853 - RNA, 24 nt, Human
aaucgcuuaaacccaggaggugga

SEQ ID NO: 207854 - RNA, 23 nt, Human
aaugugugugugugugugugugu

SEQ ID NO: 207855 - RNA, 30 nt, Human
acaaaacaaaauccaaaaccaagaaucuug

SEQ ID NO: 207856 - RNA, 26 nt, Human
acaagauaaauauccaaacaaaauca

SEQ ID NO: 207857 - RNA, 19 nt, Human
acacuguaaaacaaacagc

SEQ ID NO: 207858 - RNA, 20 nt, Human
acagugcgagaccccaucuc

SEQ ID NO: 207859 - RNA, 24 nt, Human
acccaggagguggagguugcagug

SEQ ID NO: 207860 - RNA, 18 nt, Human
accccgucucuauuaaaa

SEQ ID NO: 207861 - RNA, 22 nt, Human
accguuuuggccagacucuuuc

SEQ ID NO: 207862 - RNA, 18 nt, Human
acuccagccugggggaca

SEQ ID NO: 207863 - RNA, 18 nt, Human
acugcacuccagccuggg

SEQ ID NO: 207864 - RNA, 24 nt, Human
acugcacuccagccugggggacag

SEQ ID NO: 207865 - RNA, 21 nt, Human
acugcucuuugagaugucugg

SEQ ID NO: 207866 - RNA, 23 nt, Human
agaaaacauguuaagucugcaga

SEQ ID NO: 207867 - RNA, 23 nt, Human
agaaauucauaaagacuguauaa

SEQ ID NO: 207868 - RNA, 18 nt, Human
agaccccaucaaagauag

SEQ ID NO: 207869 - RNA, 24 nt, Human
agagccaacaaaacaauggagccu

SEQ ID NO: 207870 - RNA, 25 nt, Human
agauaaauauccaaacaaaaucaga

SEQ ID NO: 207871 - RNA, 20 nt, Human
agcaaaaggaaauccagaga

SEQ ID NO: 207872 - RNA, 22 nt, Human
agcaaaaggaaauccagagaga

SEQ ID NO: 207873 - RNA, 23 nt, Human
agcaaugucacauuucaauuuug

SEQ ID NO: 207874 - RNA, 20 nt, Human
agcaauuugggaggcugagg

SEQ ID NO: 207875 - RNA, 23 nt, Human
agccgggcauaguggugggugcc

SEQ ID NO: 207876 - RNA, 18 nt, Human
aggcaaaauacaugaugu

SEQ ID NO: 207877 - RNA, 22 nt, Human
aggcaaaauacaugauguaauc

SEQ ID NO: 207878 - RNA, 26 nt, Human
aggcagagggcaaaaaugagggaccc

SEQ ID NO: 207879 - RNA, 23 nt, Human
aggcaggagaaucgcuuaaaccc

SEQ ID NO: 207880 - RNA, 19 nt, Human
aggcagggacuaagauaua

SEQ ID NO: 207881 - RNA, 24 nt, Human
aggcgggcaaaucacaaggucagg

SEQ ID NO: 207882 - RNA, 20 nt, Human
aggcugaggcaggagaaucg

SEQ ID NO: 207883 - RNA, 20 nt, Human
aggcugaggcaggagaaucg

SEQ ID NO: 207884 - RNA, 24 nt, Human
agguggagguugcagugagccgag

SEQ ID NO: 207885 - RNA, 23 nt, Human
aguaaaugccaaagaauacccaa

SEQ ID NO: 207886 - RNA, 24 nt, Human
aguggugggugccuguaaucccag

SEQ ID NO: 207887 - RNA, 23 nt, Human
auaaaaaaaagaagaaaagaaga

SEQ ID NO: 207888 - RNA, 18 nt, Human
aucacaaggucaggaguu

SEQ ID NO: 207889 - RNA, 24 nt, Human
aucaugccacugcacuccagccug

SEQ ID NO: 207890 - RNA, 20 nt, Human
aucccuagaagaguggauuc

SEQ ID NO: 207891 - RNA, 23 nt, Human
augaagcaaaaggaaauccagag

SEQ ID NO: 207892 - RNA, 24 nt, Human
augaagcaaaaggaaauccagaga

SEQ ID NO: 207893 - RNA, 25 nt, Human
augaggcaaaauacaugauguaauc

SEQ ID NO: 207894 - RNA, 20 nt, Human
augucugggugaagggagaa

SEQ ID NO: 207895 - RNA, 23 nt, Human
augugugugugugugugugugag

SEQ ID NO: 207896 - RNA, 22 nt, Human
augugugugugugugugugugu

SEQ ID NO: 207897 - RNA, 22 nt, Human
augugugugugugugugugugu

SEQ ID NO: 207898 - RNA, 22 nt, Human
caaaacaaaauccaaaaccaag

SEQ ID NO: 207899 - RNA, 23 nt, Human
caaaacaaaauccaaaaccaaga

SEQ ID NO: 207900 - RNA, 27 nt, Human
caaaaccaagaaacaaaaaaucuucac

SEQ ID NO: 207901 - RNA, 18 nt, Human
caaaaggaaauccagaga

SEQ ID NO: 207902 - RNA, 25 nt, Human
caaaaggaaauccagagagauggga

SEQ ID NO: 207903 - RNA, 24 nt, Human
caaaauagcaccauuauacuaaaa

SEQ ID NO: 207904 - RNA, 19 nt, Human
caacaaaacaauggagccu

SEQ ID NO: 207905 - RNA, 24 nt, Human
caacaaaacaauggagccuucuaa

SEQ ID NO: 207906 - RNA, 24 nt, Human
caacaugguaaaaccccgucucua

SEQ ID NO: 207907 - RNA, 21 nt, Human
caacugaaacucuagucaagc

SEQ ID NO: 207908 - RNA, 20 nt, Human
caacuggaucuauacaacac

SEQ ID NO: 207909 - RNA, 25 nt, Human
caagauaaauauccaaacaaaauca

SEQ ID NO: 207910 - RNA, 23 nt, Human
cacaauuuggugaacaguacacu

SEQ ID NO: 207911 - RNA, 20 nt, Human
cacuccagccugggggacag

SEQ ID NO: 207912 - RNA, 18 nt, Human
cacugcacuccagccugg

SEQ ID NO: 207913 - RNA, 19 nt, Human
cacugcacuccagccuggg

SEQ ID NO: 207914 - RNA, 22 nt, Human
cacugcacuccagccuggggga

SEQ ID NO: 207915 - RNA, 24 nt, Human
cacugcacuccagccugggggaca

SEQ ID NO: 207916 - RNA, 25 nt, Human
cacugcacuccagccugggggacag

SEQ ID NO: 207917 - RNA, 20 nt, Human
cagaagacugccuauaaagu

SEQ ID NO: 207918 - RNA, 21 nt, Human
cagcaacucaagcgcccugau

SEQ ID NO: 207919 - RNA, 24 nt, Human
cagcaauuugggaggcugaggcgg

SEQ ID NO: 207920 - RNA, 19 nt, Human
cagcagccaagauucagag

SEQ ID NO: 207921 - RNA, 24 nt, Human
cagcuacucaggaggcugaggcag

SEQ ID NO: 207922 - RNA, 29 nt, Human
caggagguggagguugcagugacaacggu

SEQ ID NO: 207923 - RNA, 24 nt, Human
caggagguggagguugcagugagc

SEQ ID NO: 207924 - RNA, 20 nt, Human
caguagauaacccccaucuu

SEQ ID NO: 207925 - RNA, 23 nt, Human
cagugcgagaccccaucucacaa

SEQ ID NO: 207926 - RNA, 24 nt, Human
cauaaggaaauacuuuccaacauu

SEQ ID NO: 207927 - RNA, 24 nt, Human
cauagaagagucagugagugcuag

SEQ ID NO: 207928 - RNA, 21 nt, Human
cauauauucagagauccaggg

SEQ ID NO: 207929 - RNA, 19 nt, Human
caucuuucagcuuuccucc

SEQ ID NO: 207930 - RNA, 23 nt, Human
caugagaaaaagaaaccaggacu

SEQ ID NO: 207931 - RNA, 19 nt, Human
caugaggcaaaauacauga

SEQ ID NO: 207932 - RNA, 24 nt, Human
caugccuguaaucccagcaauuug

SEQ ID NO: 207933 - RNA, 21 nt, Human
caugucacucuucacuccuca

SEQ ID NO: 207934 - RNA, 18 nt, Human
ccaaaaccaagaaucaac

SEQ ID NO: 207935 - RNA, 19 nt, Human
ccacugcacuccagccugg

SEQ ID NO: 207936 - RNA, 20 nt, Human
ccacugcacuccagccuggg

SEQ ID NO: 207937 - RNA, 22 nt, Human
ccacugcacuccagccuggggg

SEQ ID NO: 207938 - RNA, 24 nt, Human
ccacugcacuccagccugggggac

SEQ ID NO: 207939 - RNA, 20 nt, Human
ccauagugauuagaacauug

SEQ ID NO: 207940 - RNA, 21 nt, Human
cccaggagguggagguugcag

SEQ ID NO: 207941 - RNA, 25 nt, Human
cccccaaauucacaauuuggugaac

SEQ ID NO: 207942 - RNA, 21 nt, Human
cccgucucuauuaaaaaucca

SEQ ID NO: 207943 - RNA, 18 nt, Human
ccugcacccccaaauuca

SEQ ID NO: 207944 - RNA, 23 nt, Human
ccugccccugcacccccaaauuc

SEQ ID NO: 207945 - RNA, 23 nt, Human
ccuggccaacaugguaaaacccc

SEQ ID NO: 207946 - RNA, 24 nt, Human
ccuggccaacaugguaaaaccccg

SEQ ID NO: 207947 - RNA, 22 nt, Human
ccuguaaucccagcaauuuggg

SEQ ID NO: 207948 - RNA, 19 nt, Human
ccuguaaucccagcuacuc

SEQ ID NO: 207949 - RNA, 21 nt, Human
ccuguaaucccagcuacucag

SEQ ID NO: 207950 - RNA, 22 nt, Human
ccuguaaucccagcuacucagg

SEQ ID NO: 207951 - RNA, 19 nt, Human
ccuucugagcaggcauggg

SEQ ID NO: 207952 - RNA, 22 nt, Human
cgggcaaaucacaaggucagga

SEQ ID NO: 207953 - RNA, 18 nt, Human
cgugcagagcaaaggauc

SEQ ID NO: 207954 - RNA, 23 nt, Human
cuaagauauauauauauauauau

SEQ ID NO: 207955 - RNA, 19 nt, Human
cuaugaguuggugaguggg

SEQ ID NO: 207956 - RNA, 20 nt, Human
cuauguauuuuuucucuuug

SEQ ID NO: 207957 - RNA, 25 nt, Human
cucaugccuguaaucccagcaauuu

SEQ ID NO: 207958 - RNA, 24 nt, Human
cuccugccccugcacccccaaauu

SEQ ID NO: 207959 - RNA, 24 nt, Human
cucuauuaaaaauccaaaaaauua

SEQ ID NO: 207960 - RNA, 26 nt, Human
cucuucacuccucaggaggggaccuc

SEQ ID NO: 207961 - RNA, 19 nt, Human
cugggccucugucuuaucu

SEQ ID NO: 207962 - RNA, 21 nt, Human
cuuggaaggcauaacuggggg

SEQ ID NO: 207963 - RNA, 22 nt, Human
gaaacccuggagccacagagca

SEQ ID NO: 207964 - RNA, 23 nt, Human
gaaagggauuuuagagcucuguu

SEQ ID NO: 207965 - RNA, 19 nt, Human
gaagggagaaugucuucua

SEQ ID NO: 207966 - RNA, 18 nt, Human
gaaguacaaagucugaaa

SEQ ID NO: 207967 - RNA, 24 nt, Human
gaaugugugugugugugugugugu

SEQ ID NO: 207968 - RNA, 21 nt, Human
gacuuuauggucuuugcaagg

SEQ ID NO: 207969 - RNA, 21 nt, Human
gagaaaaucuugaucugcaga

SEQ ID NO: 207970 - RNA, 23 nt, Human
gagaucaugccacugcacuccag

SEQ ID NO: 207971 - RNA, 23 nt, Human
gagcaaugucacauuucaauuuu

SEQ ID NO: 207972 - RNA, 19 nt, Human
gagccaacaaaacaaugga

SEQ ID NO: 207973 - RNA, 19 nt, Human
gaggaaacugaggcacaga

SEQ ID NO: 207974 - RNA, 27 nt, Human
gaggaaggauucucaaggguggacagg

SEQ ID NO: 207975 - RNA, 22 nt, Human
gagguugcagugagccgagauc

SEQ ID NO: 207976 - RNA, 20 nt, Human
gauggaaucuuguggguuag

SEQ ID NO: 207977 - RNA, 18 nt, Human
gauucugauggagagcug

SEQ ID NO: 207978 - RNA, 18 nt, Human
gauucuuucuucugagga

SEQ ID NO: 207979 - RNA, 22 nt, Human
gauugcuuuucaugagagcuac

SEQ ID NO: 207980 - RNA, 19 nt, Human
gauuuuagagcucuguuuu

SEQ ID NO: 207981 - RNA, 19 nt, Human
gcagagggcaaaaaugaug

SEQ ID NO: 207982 - RNA, 18 nt, Human
gcagauucuaaggauugu

SEQ ID NO: 207983 - RNA, 22 nt, Human
gcaggagaaucgcuuaaaccca

SEQ ID NO: 207984 - RNA, 18 nt, Human
gcaggcucuaaucugcuc

SEQ ID NO: 207985 - RNA, 19 nt, Human
gcagggugugguggcucau

SEQ ID NO: 207986 - RNA, 24 nt, Human
gcaguaacauuugguuuugugucc

SEQ ID NO: 207987 - RNA, 21 nt, Human
gcauuuugggcaaaauaaaau

SEQ ID NO: 207988 - RNA, 24 nt, Human
gccaacaugguaaaaccccgucuc

SEQ ID NO: 207989 - RNA, 20 nt, Human
gcccaaggucacacaguggu

SEQ ID NO: 207990 - RNA, 20 nt, Human
gcccccauuuugcagaugag

SEQ ID NO: 207991 - RNA, 20 nt, Human
gccgagaucaugccacugca

SEQ ID NO: 207992 - RNA, 23 nt, Human
gcuaaguuugagagccaacaaaa

SEQ ID NO: 207993 - RNA, 25 nt, Human
gcucaauucaaauaauguuggacug

SEQ ID NO: 207994 - RNA, 20 nt, Human
ggaaaaaauaaaaagaggaa

SEQ ID NO: 207995 - RNA, 21 nt, Human
ggaaaacaggcagagggcaaa

SEQ ID NO: 207996 - RNA, 21 nt, Human
ggaaggauucucaagggugga

SEQ ID NO: 207997 - RNA, 26 nt, Human
ggacaagaaauaaaaagaagggaccc

SEQ ID NO: 207998 - RNA, 20 nt, Human
ggagguugcagugagccgag

SEQ ID NO: 207999 - RNA, 22 nt, Human
ggagguugcagugagccgagau

SEQ ID NO: 208000 - RNA, 23 nt, Human
ggagguugcagugagccgagauc

SEQ ID NO: 208001 - RNA, 24 nt, Human
ggagguugcagugagccgagauca

SEQ ID NO: 208002 - RNA, 23 nt, Human
ggcaaaucacaaggucaggaguu

SEQ ID NO: 208003 - RNA, 22 nt, Human
ggcagaauaaagacagcuucaa

SEQ ID NO: 208004 - RNA, 18 nt, Human
ggcagggugugguggcuc

SEQ ID NO: 208005 - RNA, 19 nt, Human
ggcagggugugguggcuca

SEQ ID NO: 208006 - RNA, 23 nt, Human
ggcagggugugguggcucaugcc

SEQ ID NO: 208007 - RNA, 21 nt, Human
ggcucaugccuguaaucccag

SEQ ID NO: 208008 - RNA, 20 nt, Human
gggcagggugugguggcuca

SEQ ID NO: 208009 - RNA, 24 nt, Human
gggcauaguggugggugccuguaa

SEQ ID NO: 208010 - RNA, 25 nt, Human
gggugaaugugugugugugugugug

SEQ ID NO: 208011 - RNA, 19 nt, Human
ggugaaugugugugugugu

SEQ ID NO: 208012 - RNA, 26 nt, Human
ggugaaugugugugugugugugugug

SEQ ID NO: 208013 - RNA, 24 nt, Human
gguggcucaugccuguaaucccag

SEQ ID NO: 208014 - RNA, 23 nt, Human
ggugugguggcucaugccuguaa

SEQ ID NO: 208015 - RNA, 26 nt, Human
gguuuuguguccucucuuuuuuuuuu

SEQ ID NO: 208016 - RNA, 26 nt, Human
guaaaaaaaaaaaaaaaaacaaaacc

SEQ ID NO: 208017 - RNA, 19 nt, Human
guaaaugccaaagaauacc

SEQ ID NO: 208018 - RNA, 19 nt, Human
guggugguggcuagauaga

SEQ ID NO: 208019 - RNA, 21 nt, Human
gugugugugugugugucugug

SEQ ID NO: 208020 - RNA, 21 nt, Human
gugugugugugugugugugug

SEQ ID NO: 208021 - RNA, 21 nt, Human
gugugugugugugugugugug

SEQ ID NO: 208022 - RNA, 21 nt, Human
gugugugugugugugugugug

SEQ ID NO: 208023 - RNA, 21 nt, Human
gugugugugugugugugugug

SEQ ID NO: 208024 - RNA, 20 nt, Human
guugagcaguaacauuuggu

SEQ ID NO: 208025 - RNA, 24 nt, Human
guugcagugagccgagaucaugcc

SEQ ID NO: 208026 - RNA, 20 nt, Human
guuuuggccagacucuuuca

SEQ ID NO: 208027 - RNA, 25 nt, Human
uaaaaaacaaaagcauuguuccaga

SEQ ID NO: 208028 - RNA, 18 nt, Human
uaaaaauagcaaaacauu

SEQ ID NO: 208029 - RNA, 21 nt, Human
uaaaacaaacagcccgaguug

SEQ ID NO: 208030 - RNA, 20 nt, Human
uaaaaccaaaugcagaauuc

SEQ ID NO: 208031 - RNA, 22 nt, Human
uaaaagguacacacuggggaca

SEQ ID NO: 208032 - RNA, 23 nt, Human
uaaaauaaaaugcauccaacuua

SEQ ID NO: 208033 - RNA, 19 nt, Human
uaaaauaauaagggcuggg

SEQ ID NO: 208034 - RNA, 23 nt, Human
uaaaauauagaauuugcaugaaa

SEQ ID NO: 208035 - RNA, 18 nt, Human
uaaagaagauaacuuugu

SEQ ID NO: 208036 - RNA, 22 nt, Human
uaaagcaaucuaauucugaagc

SEQ ID NO: 208037 - RNA, 20 nt, Human
uaaauuggaaauaagccuaa

SEQ ID NO: 208038 - RNA, 19 nt, Human
uaacagaagugacuuugcu

SEQ ID NO: 208039 - RNA, 23 nt, Human
uaaccaaaaaguucuaaggugac

SEQ ID NO: 208040 - RNA, 20 nt, Human
uaacuggggggacuuugccu

SEQ ID NO: 208041 - RNA, 24 nt, Human
uaacuuuaaaaaauuuccaacucc

SEQ ID NO: 208042 - RNA, 21 nt, Human
uaagagauugagcuguuagcu

SEQ ID NO: 208043 - RNA, 20 nt, Human
uaagauuaaaaauagcaaaa

SEQ ID NO: 208044 - RNA, 21 nt, Human
uaaggaaacaauucauaaacc

SEQ ID NO: 208045 - RNA, 21 nt, Human
uaauugauaugcuaaauuuac

SEQ ID NO: 208046 - RNA, 19 nt, Human
uacaagauaaauauccaaa

SEQ ID NO: 208047 - RNA, 18 nt, Human
uacaggauuaaacacuag

SEQ ID NO: 208048 - RNA, 19 nt, Human
uaccaauguuuacuguucu

SEQ ID NO: 208049 - RNA, 18 nt, Human
uaccguuuuggccagacu

SEQ ID NO: 208050 - RNA, 18 nt, Human
uacuuuaaaaaagcuugg

SEQ ID NO: 208051 - RNA, 24 nt, Human
uagagcucuguuuuuauuuuuccu

SEQ ID NO: 208052 - RNA, 24 nt, Human
uagaugacauauugcccccugaag

SEQ ID NO: 208053 - RNA, 19 nt, Human
uagcaggaauaaugaagca

SEQ ID NO: 208054 - RNA, 21 nt, Human
uagccgggcauaguggugggu

SEQ ID NO: 208055 - RNA, 28 nt, Human
uaggagaaacucugucuccccucggaag

SEQ ID NO: 208056 - RNA, 27 nt, Human
uagugauuagaacauugcuaagcaugc

SEQ ID NO: 208057 - RNA, 23 nt, Human
uauaaaccaguaaaugccaaaga

SEQ ID NO: 208058 - RNA, 21 nt, Human
uauaaagguuaugaagggagg

SEQ ID NO: 208059 - RNA, 24 nt, Human
uauaacaaacuacaaaauagcacc

SEQ ID NO: 208060 - RNA, 22 nt, Human
uaucagacacuguaaaacaaac

SEQ ID NO: 208061 - RNA, 21 nt, Human
ucacaaggucaggaguuugag

SEQ ID NO: 208062 - RNA, 23 nt, Human
ucacaaggucaggaguuugaguc

SEQ ID NO: 208063 - RNA, 25 nt, Human
ucacagagagcuaggggcuaccccg

SEQ ID NO: 208064 - RNA, 20 nt, Human
ucauaaaaccaaaugcagaa

SEQ ID NO: 208065 - RNA, 23 nt, Human
ucaugccacugcacuccagccug

SEQ ID NO: 208066 - RNA, 22 nt, Human
ucaugccuguaaucccagcaau

SEQ ID NO: 208067 - RNA, 22 nt, Human
uccaaacaaaaucagauuaagg

SEQ ID NO: 208068 - RNA, 23 nt, Human
uccacagaaccuguaugucugga

SEQ ID NO: 208069 - RNA, 24 nt, Human
ucgcuuaaacccaggagguggagg

SEQ ID NO: 208070 - RNA, 23 nt, Human
ucuauaaaauucugaggcagaua

SEQ ID NO: 208071 - RNA, 18 nt, Human
ucuccuuuuucuuuuccu

SEQ ID NO: 208072 - RNA, 24 nt, Human
ucuccuuuuucuuuuccuuucucu

SEQ ID NO: 208073 - RNA, 19 nt, Human
ucucuggacucgccagucc

SEQ ID NO: 208074 - RNA, 23 nt, Human
ucugaagcaaagcuuguaaaguu

SEQ ID NO: 208075 - RNA, 18 nt, Human
ucugaaguacaaagucug

SEQ ID NO: 208076 - RNA, 23 nt, Human
ucuuaaagaaacaauagcaccac

SEQ ID NO: 208077 - RNA, 22 nt, Human
ugaaaacaaaacaaaauccaaa

SEQ ID NO: 208078 - RNA, 21 nt, Human
ugaaauaaucaagccugggua

SEQ ID NO: 208079 - RNA, 24 nt, Human
ugaaaucugagucauucugcugua

SEQ ID NO: 208080 - RNA, 19 nt, Human
ugaagugacuugcccaagg

SEQ ID NO: 208081 - RNA, 22 nt, Human
ugaaugaauggcuccagcagcc

SEQ ID NO: 208082 - RNA, 20 nt, Human
ugaauggcuccagcagccaa

SEQ ID NO: 208083 - RNA, 22 nt, Human
ugaauggcuccagcagccaaga

SEQ ID NO: 208084 - RNA, 19 nt, Human
ugacaagaacugagauguc

SEQ ID NO: 208085 - RNA, 18 nt, Human
ugaccuaaguauccagua

SEQ ID NO: 208086 - RNA, 23 nt, Human
ugagaguuaaaauacuuguugac

SEQ ID NO: 208087 - RNA, 21 nt, Human
ugagaugucaggagcauucaa

SEQ ID NO: 208088 - RNA, 22 nt, Human
ugagccgagaucaugccacugc

SEQ ID NO: 208089 - RNA, 23 nt, Human
ugaggaggccaaauucggcaaau

SEQ ID NO: 208090 - RNA, 23 nt, Human
ugaggcaaaauacaugauguaau

SEQ ID NO: 208091 - RNA, 19 nt, Human
ugaggcaggagaaucgcuu

SEQ ID NO: 208092 - RNA, 24 nt, Human
ugaggcaggagaaucgcuuaaacc

SEQ ID NO: 208093 - RNA, 26 nt, Human
ugaggcgggcaaaucacaaggucagg

SEQ ID NO: 208094 - RNA, 20 nt, Human
ugagguagguagaugacaua

SEQ ID NO: 208095 - RNA, 20 nt, Human
ugagguagguagaugacaua

SEQ ID NO: 208096 - RNA, 24 nt, Human
ugaguccaaccuggccaacauggu

SEQ ID NO: 208097 - RNA, 18 nt, Human
ugaguugaaagcucauuc

SEQ ID NO: 208098 - RNA, 19 nt, Human
ugauacacagacacagaua

SEQ ID NO: 208099 - RNA, 18 nt, Human
ugauauaaaaaaaagaag

SEQ ID NO: 208100 - RNA, 19 nt, Human
ugcagagcaaaggauccug

SEQ ID NO: 208101 - RNA, 21 nt, Human
ugcauccaacuuauauuuggu

SEQ ID NO: 208102 - RNA, 22 nt, Human
ugccaaagaauacccaaggggg

SEQ ID NO: 208103 - RNA, 24 nt, Human
ugccuguaaucccagcaauuuggg

SEQ ID NO: 208104 - RNA, 24 nt, Human
ugccuguaaucccagcuacucagg

SEQ ID NO: 208105 - RNA, 19 nt, Human
uggaaaacaggcagagggc

SEQ ID NO: 208106 - RNA, 19 nt, Human
uggaaaacaggcagagggc

SEQ ID NO: 208107 - RNA, 23 nt, Human
uggaaggcauaacuggggggacu

SEQ ID NO: 208108 - RNA, 22 nt, Human
uggagccacagagcaugagaug

SEQ ID NO: 208109 - RNA, 21 nt, Human
uggauaaaacacauucacaga

SEQ ID NO: 208110 - RNA, 18 nt, Human
uggauagaauuaagugaa

SEQ ID NO: 208111 - RNA, 20 nt, Human
uggccaguuauuuggauagc

SEQ ID NO: 208112 - RNA, 22 nt, Human
uggcucaugccuguaaucccag

SEQ ID NO: 208113 - RNA, 24 nt, Human
uggcucaugccuguaaucccagca

SEQ ID NO: 208114 - RNA, 18 nt, Human
uggcuccaggcuuccccu

SEQ ID NO: 208115 - RNA, 19 nt, Human
ugggaaagcaaaaugugcu

SEQ ID NO: 208116 - RNA, 26 nt, Human
ugggaagaggaguccaguaucuuauu

SEQ ID NO: 208117 - RNA, 24 nt, Human
ugggaggcugaggcgggcaaauca

SEQ ID NO: 208118 - RNA, 24 nt, Human
ugggcaaaauaaaaugaguaaugu

SEQ ID NO: 208119 - RNA, 22 nt, Human
ugggggcagaauaaagacagcu

SEQ ID NO: 208120 - RNA, 20 nt, Human
uggguuagaauuggugugcu

SEQ ID NO: 208121 - RNA, 22 nt, Human
uggguugggaugggggcagaau

SEQ ID NO: 208122 - RNA, 19 nt, Human
ugguacaaaugccacagau

SEQ ID NO: 208123 - RNA, 20 nt, Human
uggucagcccucuauaaaau

SEQ ID NO: 208124 - RNA, 20 nt, Human
uggugaguggggucaauggg

SEQ ID NO: 208125 - RNA, 20 nt, Human
uggugaguggggucaauggg

SEQ ID NO: 208126 - RNA, 21 nt, Human
uggugaguggggucaaugggu

SEQ ID NO: 208127 - RNA, 22 nt, Human
uggugaguggggucaaugggug

SEQ ID NO: 208128 - RNA, 24 nt, Human
ugguggcucaugccuguaauccca

SEQ ID NO: 208129 - RNA, 21 nt, Human
uggugggugccuguaauccca

SEQ ID NO: 208130 - RNA, 24 nt, Human
uggugggugccuguaaucccagcu

SEQ ID NO: 208131 - RNA, 22 nt, Human
uguaaaauauagaauuugcaug

SEQ ID NO: 208132 - RNA, 22 nt, Human
ugugauuugaauggaaagauuc

SEQ ID NO: 208133 - RNA, 20 nt, Human
ugugucaucuuuggcuccag

SEQ ID NO: 208134 - RNA, 22 nt, Human
ugugucuaaaauaaaaugcauc

SEQ ID NO: 208135 - RNA, 19 nt, Human
ugugugugucuguguaugu

SEQ ID NO: 208136 - RNA, 19 nt, Human
ugugugugucuguguaugu

SEQ ID NO: 208137 - RNA, 20 nt, Human
ugugugugucuguguaugua

SEQ ID NO: 208138 - RNA, 22 nt, Human
ugugugugugugugucugugua

SEQ ID NO: 208139 - RNA, 18 nt, Human
ugugugugugugugugug

SEQ ID NO: 208140 - RNA, 18 nt, Human
ugugugugugugugugug

SEQ ID NO: 208141 - RNA, 18 nt, Human
ugugugugugugugugug

SEQ ID NO: 208142 - RNA, 18 nt, Human
ugugugugugugugugug

SEQ ID NO: 208143 - RNA, 18 nt, Human
ugugugugugugugugug

SEQ ID NO: 208144 - RNA, 18 nt, Human
ugugugugugugugugug

SEQ ID NO: 208145 - RNA, 18 nt, Human
ugugugugugugugugug

SEQ ID NO: 208146 - RNA, 18 nt, Human
ugugugugugugugugug

SEQ ID NO: 208147 - RNA, 18 nt, Human
ugugugugugugugugug

SEQ ID NO: 208148 - RNA, 18 nt, Human
ugugugugugugugugug

SEQ ID NO: 208149 - RNA, 18 nt, Human
ugugugugugugugugug

SEQ ID NO: 208150 - RNA, 18 nt, Human
ugugugugugugugugug

SEQ ID NO: 208151 - RNA, 22 nt, Human
ugugugugugugugugugucug

SEQ ID NO: 208152 - RNA, 21 nt, Human
ugugugugugugugugugugu

SEQ ID NO: 208153 - RNA, 21 nt, Human
ugugugugugugugugugugu

SEQ ID NO: 208154 - RNA, 21 nt, Human
ugugugugugugugugugugu

SEQ ID NO: 208155 - RNA, 21 nt, Human
ugugugugugugugugugugu

SEQ ID NO: 208156 - RNA, 21 nt, Human
ugugugugugugugugugugu

SEQ ID NO: 208157 - RNA, 21 nt, Human
ugugugugugugugugugugu

SEQ ID NO: 208158 - RNA, 21 nt, Human
ugugugugugugugugugugu

SEQ ID NO: 208159 - RNA, 21 nt, Human
ugugugugugugugugugugu

SEQ ID NO: 208160 - RNA, 21 nt, Human
ugugugugugugugugugugu

SEQ ID NO: 208161 - RNA, 21 nt, Human
ugugugugugugugugugugu

SEQ ID NO: 208162 - RNA, 21 nt, Human
ugugugugugugugugugugu

SEQ ID NO: 208163 - RNA, 21 nt, Human
ugugugugugugugugugugu

SEQ ID NO: 208164 - RNA, 21 nt, Human
ugugugugugugugugugugu

SEQ ID NO: 208165 - RNA, 21 nt, Human
ugugugugugugugugugugu

SEQ ID NO: 208166 - RNA, 21 nt, Human
ugugugugugugugugugugu

SEQ ID NO: 208167 - RNA, 21 nt, Human
ugugugugugugugugugugu

SEQ ID NO: 208168 - RNA, 21 nt, Human
ugugugugugugugugugugu

SEQ ID NO: 208169 - RNA, 21 nt, Human
ugugugugugugugugugugu

SEQ ID NO: 208170 - RNA, 21 nt, Human
ugugugugugugugugugugu

SEQ ID NO: 208171 - RNA, 22 nt, Human
ugugugugugugugugugugug

SEQ ID NO: 208172 - RNA, 22 nt, Human
ugugugugugugugugugugug

SEQ ID NO: 208173 - RNA, 22 nt, Human
ugugugugugugugugugugug

SEQ ID NO: 208174 - RNA, 22 nt, Human
ugugugugugugugugugugug

SEQ ID NO: 208175 - RNA, 22 nt, Human
ugugugugugugugugugugug

SEQ ID NO: 208176 - RNA, 24 nt, Human
uuaaacccaggagguggagguugc

SEQ ID NO: 208177 - RNA, 20 nt, Human
uuaaauuggaaauaagccua

SEQ ID NO: 208178 - RNA, 20 nt, Human
uuaagagggaacacaugggc

SEQ ID NO: 208179 - RNA, 20 nt, Human
uuauuccucauucugauaua

SEQ ID NO: 208180 - RNA, 22 nt, Human
uucaaaaauccccugggccucu

SEQ ID NO: 208181 - RNA, 19 nt, Human
uucaaaaucaaauugaaaa

SEQ ID NO: 208182 - RNA, 19 nt, Human
uucacagagagcuaggggc

SEQ ID NO: 208183 - RNA, 23 nt, Human
uucaugauacacagacacagaua

SEQ ID NO: 208184 - RNA, 21 nt, Human
uucuugacgacuugcugcugc

SEQ ID NO: 208185 - RNA, 18 nt, Human
uugaaagaccccaucaaa

SEQ ID NO: 208186 - RNA, 22 nt, Human
uugaaagugaaagguaauucag

SEQ ID NO: 208187 - RNA, 19 nt, Human
uugaagaaacuuucuaugu

SEQ ID NO: 208188 - RNA, 19 nt, Human
uugaagaaugaggagagaa

SEQ ID NO: 208189 - RNA, 18 nt, Human
uugaccuaaguauccagu

SEQ ID NO: 208190 - RNA, 18 nt, Human
uugcagugagccgagauc

SEQ ID NO: 208191 - RNA, 20 nt, Human
uugcagugagccgagaucau

SEQ ID NO: 208192 - RNA, 21 nt, Human
uugcagugagccgagaucaug

SEQ ID NO: 208193 - RNA, 19 nt, Human
uugcauaaaucagauuuau

SEQ ID NO: 208194 - RNA, 21 nt, Human
uugcuaagcaugcuugaggug

SEQ ID NO: 208195 - RNA, 23 nt, Human
uugcuaauuuugcuaaguuugag

SEQ ID NO: 208196 - RNA, 22 nt, Human
uugcugcugcuuuugaggaggc

SEQ ID NO: 208197 - RNA, 24 nt, Human
uuggccaguuauuuggauagcuuc

SEQ ID NO: 208198 - RNA, 25 nt, Human
uugggaggcugaggcgggcaaauca

SEQ ID NO: 208199 - RNA, 21 nt, Human
uuuaaaaaauuuccaacuccu

SEQ ID NO: 208200 - RNA, 23 nt, Human
uuuaaauagucugauuauagcuu

SEQ ID NO: 208201 - RNA, 23 nt, Human
uuuaauauuauuugggcaagaga

SEQ ID NO: 208202 - RNA, 22 nt, Human
uuuacaaauaucuugaaauugc

SEQ ID NO: 208203 - RNA, 25 nt, Human
uuuccaacuccugccccugcacccc

SEQ ID NO: 208204 - RNA, 22 nt, Human
uuucuuuuccuuucucucuuuu

SEQ ID NO: 208205 - RNA, 18 nt, Human
uuuuaaauguuaucaaac

SEQ ID NO: 208206 - RNA, 23 nt, Human
uuuugugucugaaguuccucuug

SEQ ID NO: 208207 - RNA, 21 nt, Human
uuuuguuguugccccccuacc

SEQ ID NO: 208208 - RNA, 18 nt, Human
uuuuuccuggccucugau

SEQ ID NO: 208209 - RNA, 21 nt, Human
uuuuuuguaagcaugaugugg

SEQ ID NO: 208210 - RNA, 24 nt, Human
aaaacucucucuccccccccaccc

SEQ ID NO: 208211 - RNA, 18 nt, Human
aacucucucucccccccc

SEQ ID NO: 208212 - RNA, 23 nt, Human
aacucucucuccccccccacccc

SEQ ID NO: 208213 - RNA, 21 nt, Human
aaggaacaucccaaauguguu

SEQ ID NO: 208214 - RNA, 21 nt, Human
acagggaaggacagggacaga

SEQ ID NO: 208215 - RNA, 18 nt, Human
accugugugccuguggcc

SEQ ID NO: 208216 - RNA, 21 nt, Human
aggacagggacagagugagga

SEQ ID NO: 208217 - RNA, 21 nt, Human
agucagaagcaaugagaccug

SEQ ID NO: 208218 - RNA, 22 nt, Human
caaugagaccugugugccugug

SEQ ID NO: 208219 - RNA, 19 nt, Human
cagaacugaagauccacug

SEQ ID NO: 208220 - RNA, 22 nt, Human
cagcacagcaggggcagucgga

SEQ ID NO: 208221 - RNA, 21 nt, Human
cauauugaaaaaaggaacauc

SEQ ID NO: 208222 - RNA, 24 nt, Human
cccaaauguguuuuacugcagaga

SEQ ID NO: 208223 - RNA, 18 nt, Human
ccccccccaccccgcugc

SEQ ID NO: 208224 - RNA, 25 nt, Human
cgaggaaucagcgccgggccgauga

SEQ ID NO: 208225 - RNA, 22 nt, Human
cgcacacguuacuguuugcaca

SEQ ID NO: 208226 - RNA, 18 nt, Human
cgccgggccgaugaggga

SEQ ID NO: 208227 - RNA, 23 nt, Human
cucucucuccccccccaccccgc

SEQ ID NO: 208228 - RNA, 19 nt, Human
cuucuccccaccuucacug

SEQ ID NO: 208229 - RNA, 23 nt, Human
gaaaaaaggaacaucccaaaugu

SEQ ID NO: 208230 - RNA, 22 nt, Human
gagaacagggaaggacagggac

SEQ ID NO: 208231 - RNA, 19 nt, Human
gagaggagagagaaaggga

SEQ ID NO: 208232 - RNA, 24 nt, Human
gcccaugucaguuaaggguuuggg

SEQ ID NO: 208233 - RNA, 19 nt, Human
gcggguguguacagugguu

SEQ ID NO: 208234 - RNA, 23 nt, Human
ggaaggacagggacagagugagg

SEQ ID NO: 208235 - RNA, 19 nt, Human
ggcagaacugaagauccac

SEQ ID NO: 208236 - RNA, 23 nt, Human
ggcagcaagggcagaacugaaga

SEQ ID NO: 208237 - RNA, 20 nt, Human
ggcccuuuguaaauuucaug

SEQ ID NO: 208238 - RNA, 23 nt, Human
ggcccuuuguaaauuucaugucc

SEQ ID NO: 208239 - RNA, 20 nt, Human
ggcggguguguacagugguu

SEQ ID NO: 208240 - RNA, 23 nt, Human
uaaaaugguaacagccuuggaug

SEQ ID NO: 208241 - RNA, 22 nt, Human
ucauuaagguucuuaaaggccc

SEQ ID NO: 208242 - RNA, 24 nt, Human
ucccuuucucaaaaaaaaaaaaaa

SEQ ID NO: 208243 - RNA, 21 nt, Human
ucucccgcgggcagcaagggc

SEQ ID NO: 208244 - RNA, 26 nt, Human
ucucccgcgggcagcaagggcagaac

SEQ ID NO: 208245 - RNA, 18 nt, Human
ucucuccccccccacccc

SEQ ID NO: 208246 - RNA, 21 nt, Human
ugaaaaaaggaacaucccaaa

SEQ ID NO: 208247 - RNA, 24 nt, Human
ugcgcacacguuacuguuugcaca

SEQ ID NO: 208248 - RNA, 23 nt, Human
ugcucacccaugccuccggacac

SEQ ID NO: 208249 - RNA, 20 nt, Human
ugguuggauggggccacagg

SEQ ID NO: 208250 - RNA, 21 nt, Human
uuaagguucuuaaaggcccau

SEQ ID NO: 208251 - RNA, 21 nt, Human
aaaagguaucgggaaaugagg

SEQ ID NO: 208252 - RNA, 22 nt, Human
aaacagaaagcguguaauuaau

SEQ ID NO: 208253 - RNA, 20 nt, Human
aagaugcugcugugcuuccu

SEQ ID NO: 208254 - RNA, 20 nt, Human
acagcgggagagaacagcac

SEQ ID NO: 208255 - RNA, 18 nt, Human
agaggggggcagagauag

SEQ ID NO: 208256 - RNA, 22 nt, Human
agaguagccuguuucggggagg

SEQ ID NO: 208257 - RNA, 20 nt, Human
aggagcugggggggacggga

SEQ ID NO: 208258 - RNA, 24 nt, Human
aggaggaggcugcaggaugguggc

SEQ ID NO: 208259 - RNA, 27 nt, Human
aggauagaggggggcagagauaguggg

SEQ ID NO: 208260 - RNA, 22 nt, Human
aggcgagagggcgggcgugagg

SEQ ID NO: 208261 - RNA, 21 nt, Human
aggcugcaggaugguggcgcc

SEQ ID NO: 208262 - RNA, 21 nt, Human
augcugcugugcuuccucagc

SEQ ID NO: 208263 - RNA, 22 nt, Human
auggaaccugauggaaacgucc

SEQ ID NO: 208264 - RNA, 23 nt, Human
auggaaccugauggaaacguccg

SEQ ID NO: 208265 - RNA, 19 nt, Human
auuguccagggaggacggg

SEQ ID NO: 208266 - RNA, 25 nt, Human
caaaccgaacagcgggcguuggccc

SEQ ID NO: 208267 - RNA, 24 nt, Human
cagagauagugggagagacagagu

SEQ ID NO: 208268 - RNA, 23 nt, Human
caggaggaggcugcaggauggug

SEQ ID NO: 208269 - RNA, 19 nt, Human
caggaugguggcgccgggc

SEQ ID NO: 208270 - RNA, 21 nt, Human
ccacuuugguucggcgaaggc

SEQ ID NO: 208271 - RNA, 19 nt, Human
ccagcgccgcucuggccga

SEQ ID NO: 208272 - RNA, 19 nt, Human
ccgcccaccucccugcugc

SEQ ID NO: 208273 - RNA, 19 nt, Human
ccgcccaccucccugcugc

SEQ ID NO: 208274 - RNA, 18 nt, Human
cgcacagcgggagagaac

SEQ ID NO: 208275 - RNA, 18 nt, Human
cgugaaaggggggggccg

SEQ ID NO: 208276 - RNA, 23 nt, Human
cguggucaggaggaggcugcagg

SEQ ID NO: 208277 - RNA, 22 nt, Human
cucccugcugcgugucgcaaac

SEQ ID NO: 208278 - RNA, 19 nt, Human
cugccgcccaccucccugc

SEQ ID NO: 208279 - RNA, 19 nt, Human
cuguuucggggaggcgggg

SEQ ID NO: 208280 - RNA, 20 nt, Human
gaagccccagggggacgugg

SEQ ID NO: 208281 - RNA, 18 nt, Human
gagaagccccagggggac

SEQ ID NO: 208282 - RNA, 23 nt, Human
gagagaacagcacggagagaaac

SEQ ID NO: 208283 - RNA, 21 nt, Human
gagaguagccuguuucgggga

SEQ ID NO: 208284 - RNA, 23 nt, Human
gagauagugggagagaccgguac

SEQ ID NO: 208285 - RNA, 19 nt, Human
gagggagucggaggcuagg

SEQ ID NO: 208286 - RNA, 18 nt, Human
gagggggagagaggacag

SEQ ID NO: 208287 - RNA, 23 nt, Human
gagggggggagggagucggaggc

SEQ ID NO: 208288 - RNA, 18 nt, Human
gccggacacuccucugcc

SEQ ID NO: 208289 - RNA, 21 nt, Human
gcugucuucgggcuggggcgg

SEQ ID NO: 208290 - RNA, 23 nt, Human
ggagcugggggggacgggaggga

SEQ ID NO: 208291 - RNA, 20 nt, Human
ggcagagcggggggauggcu

SEQ ID NO: 208292 - RNA, 20 nt, Human
ggcgcacagcgggagagaac

SEQ ID NO: 208293 - RNA, 18 nt, Human
ggcgugagggggggaggg

SEQ ID NO: 208294 - RNA, 24 nt, Human
ggcgugagggggggagggagucgg

SEQ ID NO: 208295 - RNA, 20 nt, Human
gggcagagcggggggauggc

SEQ ID NO: 208296 - RNA, 24 nt, Human
gggcagagcggggggauggcuuuu

SEQ ID NO: 208297 - RNA, 21 nt, Human
gggcaggcgcacagcgggaga

SEQ ID NO: 208298 - RNA, 22 nt, Human
gggcuggggcgggccagauguu

SEQ ID NO: 208299 - RNA, 22 nt, Human
gggcugucuucgggcuggggcg

SEQ ID NO: 208300 - RNA, 23 nt, Human
ggggacgggagggagcgaaggga

SEQ ID NO: 208301 - RNA, 19 nt, Human
gggggagggagucggaggc

SEQ ID NO: 208302 - RNA, 21 nt, Human
gggucaggagaagccccaggg

SEQ ID NO: 208303 - RNA, 20 nt, Human
ggucaggagaagccccaggg

SEQ ID NO: 208304 - RNA, 20 nt, Human
uaucaaggauagaggggggc

SEQ ID NO: 208305 - RNA, 22 nt, Human
ucagcccgauggagggggccga

SEQ ID NO: 208306 - RNA, 18 nt, Human
uccguggucaggaggagg

SEQ ID NO: 208307 - RNA, 23 nt, Human
uccucugccagcgccgcucuggc

SEQ ID NO: 208308 - RNA, 18 nt, Human
ucggaggcuaggagcugg

SEQ ID NO: 208309 - RNA, 23 nt, Human
ugaacgugaaaggggggggccga

SEQ ID NO: 208310 - RNA, 21 nt, Human
uggaaacguccguggucagga

SEQ ID NO: 208311 - RNA, 19 nt, Human
uggaagccggcgacgcugc

SEQ ID NO: 208312 - RNA, 19 nt, Human
uggagggggccgaggagag

SEQ ID NO: 208313 - RNA, 19 nt, Human
uggagggggccgaggagag

SEQ ID NO: 208314 - RNA, 21 nt, Human
uggagggggccgaggagagua

SEQ ID NO: 208315 - RNA, 19 nt, Human
ugggagagacagagugaac

SEQ ID NO: 208316 - RNA, 18 nt, Human
uggucaggaggaggcugc

SEQ ID NO: 208317 - RNA, 20 nt, Human
uuccucagcccgauggaggg

SEQ ID NO: 208318 - RNA, 27 nt, Human
aaacagaaagcaaaagagaagggaccc

SEQ ID NO: 208319 - RNA, 21 nt, Human
aaacugguacaucacaccccu

SEQ ID NO: 208320 - RNA, 18 nt, Human
aaccuaggcacucgggga

SEQ ID NO: 208321 - RNA, 25 nt, Human
aacgguggcuguuuuuuuuuccuuu

SEQ ID NO: 208322 - RNA, 20 nt, Human
aacucuccaaaaccuaggca

SEQ ID NO: 208323 - RNA, 18 nt, Human
aagaaacagaaagcaaaa

SEQ ID NO: 208324 - RNA, 23 nt, Human
aagaaacagaaagcaaaagagaa

SEQ ID NO: 208325 - RNA, 23 nt, Human
aagauggacaaacugguacauca

SEQ ID NO: 208326 - RNA, 24 nt, Human
aagcaaaagagaaaagagacagaa

SEQ ID NO: 208327 - RNA, 22 nt, Human
aaucaggaaggaguggggccug

SEQ ID NO: 208328 - RNA, 23 nt, Human
acacacacacacacaaacacaca

SEQ ID NO: 208329 - RNA, 23 nt, Human
acacacacacacacacacacaca

SEQ ID NO: 208330 - RNA, 23 nt, Human
acacacacacacacacacacaca

SEQ ID NO: 208331 - RNA, 23 nt, Human
acacacacacacacacacacaca

SEQ ID NO: 208332 - RNA, 29 nt, Human
acacacacacacacacacacacaaacaca

SEQ ID NO: 208333 - RNA, 22 nt, Human
acacacacacacacacacacag

SEQ ID NO: 208334 - RNA, 19 nt, Human
acccgcccagccucccucc

SEQ ID NO: 208335 - RNA, 23 nt, Human
acucacacacacacacacacaca

SEQ ID NO: 208336 - RNA, 23 nt, Human
agaaaagagacagaaugagcucc

SEQ ID NO: 208337 - RNA, 24 nt, Human
agaaaagagacagaaugagcucca

SEQ ID NO: 208338 - RNA, 25 nt, Human
agaaaagagacagaaugagcuccaa

SEQ ID NO: 208339 - RNA, 26 nt, Human
agaaaagagacagaaugaggggaccc

SEQ ID NO: 208340 - RNA, 24 nt, Human
agaacaccagcagcgccucccucc

SEQ ID NO: 208341 - RNA, 20 nt, Human
aggaaggaguggggccugag

SEQ ID NO: 208342 - RNA, 20 nt, Human
aggcggagguggagacgggg

SEQ ID NO: 208343 - RNA, 23 nt, Human
aggcggagguggagacgggggac

SEQ ID NO: 208344 - RNA, 24 nt, Human
agguggagacggagcgggagcccg

SEQ ID NO: 208345 - RNA, 20 nt, Human
auagaacaggcaaacucucc

SEQ ID NO: 208346 - RNA, 18 nt, Human
augcaguuucuguaaguc

SEQ ID NO: 208347 - RNA, 24 nt, Human
augcugugaccgcccggccucccu

SEQ ID NO: 208348 - RNA, 22 nt, Human
augcuuuuaaaugaggacuugg

SEQ ID NO: 208349 - RNA, 18 nt, Human
caaacacacaaaucaauc

SEQ ID NO: 208350 - RNA, 22 nt, Human
cacaaacacacaaaucaaucuu

SEQ ID NO: 208351 - RNA, 23 nt, Human
cacacaaacacacaaaucaaucu

SEQ ID NO: 208352 - RNA, 18 nt, Human
cacacacacacacacaca

SEQ ID NO: 208353 - RNA, 20 nt, Human
cacacacacacacacacaca

SEQ ID NO: 208354 - RNA, 20 nt, Human
cacacacacacacacacaca

SEQ ID NO: 208355 - RNA, 20 nt, Human
cacacacacacacacacaca

SEQ ID NO: 208356 - RNA, 20 nt, Human
cacacacacacacacacaca

SEQ ID NO: 208357 - RNA, 20 nt, Human
cacacacacacacacacaca

SEQ ID NO: 208358 - RNA, 20 nt, Human
cacacacacacacacacaca

SEQ ID NO: 208359 - RNA, 22 nt, Human
cacacacacacacacacacaca

SEQ ID NO: 208360 - RNA, 22 nt, Human
cacacacacacacacacacaca

SEQ ID NO: 208361 - RNA, 26 nt, Human
cacacacacacacacacacacacaaa

SEQ ID NO: 208362 - RNA, 26 nt, Human
cacacacacacacacacacacacaca

SEQ ID NO: 208363 - RNA, 26 nt, Human
cacacacacacacacacacacacaca

SEQ ID NO: 208364 - RNA, 26 nt, Human
cacacacacacacacacacacacaca

SEQ ID NO: 208365 - RNA, 26 nt, Human
cacacacacacacacacacacacaca

SEQ ID NO: 208366 - RNA, 19 nt, Human
cacccucucccccaucaca

SEQ ID NO: 208367 - RNA, 25 nt, Human
cacccucucccccaucacaaaaacu

SEQ ID NO: 208368 - RNA, 20 nt, Human
cagcaauagaacaccagagg

SEQ ID NO: 208369 - RNA, 19 nt, Human
cagcgccucccuccuccuc

SEQ ID NO: 208370 - RNA, 23 nt, Human
ccagccaaaccgguacaggcuga

SEQ ID NO: 208371 - RNA, 18 nt, Human
ccaguucaacaucccgcc

SEQ ID NO: 208372 - RNA, 21 nt, Human
cccaaaucuggaaaaaauuca

SEQ ID NO: 208373 - RNA, 19 nt, Human
cccgcccagccucccucca

SEQ ID NO: 208374 - RNA, 19 nt, Human
cccgccggaagcugcccca

SEQ ID NO: 208375 - RNA, 19 nt, Human
ccgcccggccucccuccuc

SEQ ID NO: 208376 - RNA, 19 nt, Human
ccgccuggccucccuccuc

SEQ ID NO: 208377 - RNA, 24 nt, Human
ccuauaccccaaaucuggaaaaaa

SEQ ID NO: 208378 - RNA, 18 nt, Human
ccuccacgccaugcccgc

SEQ ID NO: 208379 - RNA, 21 nt, Human
ccugaccuccuucacccucuc

SEQ ID NO: 208380 - RNA, 20 nt, Human
ccugugcacguaugugugug

SEQ ID NO: 208381 - RNA, 30 nt, Human
cgagaaaagucauucacuaaacauggcagu

SEQ ID NO: 208382 - RNA, 18 nt, Human
cgccagaauaagaacacc

SEQ ID NO: 208383 - RNA, 20 nt, Human
cgccagaauaagaacaccag

SEQ ID NO: 208384 - RNA, 24 nt, Human
cgccgccagggcaaaggcggaggu

SEQ ID NO: 208385 - RNA, 23 nt, Human
cgcggcuccgugcuccccugcag

SEQ ID NO: 208386 - RNA, 22 nt, Human
cggaagcugccccauacacuga

SEQ ID NO: 208387 - RNA, 21 nt, Human
cucacacacacacacacacac

SEQ ID NO: 208388 - RNA, 26 nt, Human
cuccacgccaugcccgccuggccucc

SEQ ID NO: 208389 - RNA, 24 nt, Human
cuccaugcugugaccgcccggccu

SEQ ID NO: 208390 - RNA, 23 nt, Human
cuccgcgcuguacccgcccagcc

SEQ ID NO: 208391 - RNA, 18 nt, Human
cuccuccgcgcuguaccc

SEQ ID NO: 208392 - RNA, 20 nt, Human
cuccuucacccucuccccca

SEQ ID NO: 208393 - RNA, 22 nt, Human
cuucucagcaauagaacaccag

SEQ ID NO: 208394 - RNA, 20 nt, Human
gaaaaaaaaaugaagagaaa

SEQ ID NO: 208395 - RNA, 19 nt, Human
gaagcaucaucgaguggaa

SEQ ID NO: 208396 - RNA, 22 nt, Human
gcccggccucccuccuccucca

SEQ ID NO: 208397 - RNA, 19 nt, Human
gcgggcgcgaggcuaacgg

SEQ ID NO: 208398 - RNA, 19 nt, Human
ggacuaaagcagcaagggu

SEQ ID NO: 208399 - RNA, 21 nt, Human
ggacuuggggcaaaacccugg

SEQ ID NO: 208400 - RNA, 22 nt, Human
ggcaaacucuccaaaaccuagg

SEQ ID NO: 208401 - RNA, 19 nt, Human
ggcauagaacaggcaaacu

SEQ ID NO: 208402 - RNA, 19 nt, Human
ggcccggacugcgcggcgg

SEQ ID NO: 208403 - RNA, 20 nt, Human
gguggagacggagcgggagc

SEQ ID NO: 208404 - RNA, 25 nt, Human
uaaaaaaauaagcacaguaaaggug

SEQ ID NO: 208405 - RNA, 19 nt, Human
uaagaacaccagcagcgcc

SEQ ID NO: 208406 - RNA, 22 nt, Human
ucaacuccacucacacacacac

SEQ ID NO: 208407 - RNA, 26 nt, Human
ucaacuccacucacacacacacacac

SEQ ID NO: 208408 - RNA, 21 nt, Human
ucacacacacacacacacaca

SEQ ID NO: 208409 - RNA, 19 nt, Human
ucacaccccugcuggcagg

SEQ ID NO: 208410 - RNA, 22 nt, Human
ucacccucucccccaucacaaa

SEQ ID NO: 208411 - RNA, 20 nt, Human
uccacucacacacacacaca

SEQ ID NO: 208412 - RNA, 31 nt, Human
uccacucacacacacacacacacacacacag

SEQ ID NO: 208413 - RNA, 19 nt, Human
uccuucacccucuccccca

SEQ ID NO: 208414 - RNA, 18 nt, Human
ucgaaugcagcccucugu

SEQ ID NO: 208415 - RNA, 18 nt, Human
ucucccccaucacaaaaa

SEQ ID NO: 208416 - RNA, 20 nt, Human
ucuucgaaugcagcccucug

SEQ ID NO: 208417 - RNA, 20 nt, Human
ugaaaaaaaaaugaagagaa

SEQ ID NO: 208418 - RNA, 23 nt, Human
ugaagagaugagaccuauacccc

SEQ ID NO: 208419 - RNA, 20 nt, Human
ugaagauaucaugcaaaaag

SEQ ID NO: 208420 - RNA, 18 nt, Human
ugacaccucaacuccacu

SEQ ID NO: 208421 - RNA, 24 nt, Human
ugacuaaaggcauagaacaggcaa

SEQ ID NO: 208422 - RNA, 20 nt, Human
ugaggccaagugcaaugcua

SEQ ID NO: 208423 - RNA, 19 nt, Human
ugcacguaugugugugugu

SEQ ID NO: 208424 - RNA, 22 nt, Human
ugcacguaugugugugugugcu

SEQ ID NO: 208425 - RNA, 23 nt, Human
ugccccauacacugacagccuca

SEQ ID NO: 208426 - RNA, 18 nt, Human
ugcgcggcgggcgcgagg

SEQ ID NO: 208427 - RNA, 21 nt, Human
ugcuagggccgaggcucuggc

SEQ ID NO: 208428 - RNA, 22 nt, Human
ugcucgcacgcacgugugugug

SEQ ID NO: 208429 - RNA, 22 nt, Human
ugcuucucagcaauagaacacc

SEQ ID NO: 208430 - RNA, 21 nt, Human
uggcaggaagaaacgguggcu

SEQ ID NO: 208431 - RNA, 22 nt, Human
uggcuguuuuuuuuuccuuuuu

SEQ ID NO: 208432 - RNA, 18 nt, Human
ugggcagguuguuugaau

SEQ ID NO: 208433 - RNA, 21 nt, Human
ugguuggaggugcuuggcugu

SEQ ID NO: 208434 - RNA, 19 nt, Human
ugugcacguaugugugugu

SEQ ID NO: 208435 - RNA, 20 nt, Human
ugugcacguaugugugugug

SEQ ID NO: 208436 - RNA, 25 nt, Human
ugugugcucgcacgcacgugugugg

SEQ ID NO: 208437 - RNA, 19 nt, Human
ugugugugcccuuaagaaa

SEQ ID NO: 208438 - RNA, 23 nt, Human
ugugugugugugcucgcacgcac

SEQ ID NO: 208439 - RNA, 20 nt, Human
uugaaaaaaaaaugaagaga

SEQ ID NO: 208440 - RNA, 19 nt, Human
uuggggcaaaacccugggc

SEQ ID NO: 208441 - RNA, 23 nt, Human
uuuccuuuuucucaaaccugagu

SEQ ID NO: 208442 - RNA, 19 nt, Human
uuugguuggaggugcuugg

SEQ ID NO: 208443 - RNA, 19 nt, Human
aaacagacgcaggagcuuu

SEQ ID NO: 208444 - RNA, 22 nt, Human
aaauaaacuuacagugaauaaa

SEQ ID NO: 208445 - RNA, 24 nt, Human
aaguuauuaacauaguacaaguuu

SEQ ID NO: 208446 - RNA, 19 nt, Human
aauaaauaaacagcuuucu

SEQ ID NO: 208447 - RNA, 23 nt, Human
agaauauuuauuguaaauguuuc

SEQ ID NO: 208448 - RNA, 19 nt, Human
agacaggggccgaugcucu

SEQ ID NO: 208449 - RNA, 22 nt, Human
aguguacauuuuaacagguggc

SEQ ID NO: 208450 - RNA, 21 nt, Human
cagcagacaggggccgaugcu

SEQ ID NO: 208451 - RNA, 18 nt, Human
caguauuuuuccaugcuc

SEQ ID NO: 208452 - RNA, 18 nt, Human
ccuucaaacuagcugaaa

SEQ ID NO: 208453 - RNA, 18 nt, Human
cggcgcggcggcagaugc

SEQ ID NO: 208454 - RNA, 19 nt, Human
cggcgcggcggcagaugcu

SEQ ID NO: 208455 - RNA, 24 nt, Human
cgggcgguggcccaaacucugggc

SEQ ID NO: 208456 - RNA, 22 nt, Human
cuaggcaguauuuuuccaugcu

SEQ ID NO: 208457 - RNA, 22 nt, Human
cucucucuuauuucauuuugca

SEQ ID NO: 208458 - RNA, 22 nt, Human
cucugggaggguggcggcggcg

SEQ ID NO: 208459 - RNA, 23 nt, Human
cugguggcggcgggcgguggccc

SEQ ID NO: 208460 - RNA, 21 nt, Human
gagcuuuggaagagcagaaau

SEQ ID NO: 208461 - RNA, 22 nt, Human
gaggguggcggcggcgcggcgg

SEQ ID NO: 208462 - RNA, 22 nt, Human
gcugguggcggcgggcgguggc

SEQ ID NO: 208463 - RNA, 20 nt, Human
ggccagugcucucugggagg

SEQ ID NO: 208464 - RNA, 18 nt, Human
ggcggcggcgcggcggca

SEQ ID NO: 208465 - RNA, 22 nt, Human
ggguggcggcggcgcggcggca

SEQ ID NO: 208466 - RNA, 20 nt, Human
guggaauauacaaguuaacc

SEQ ID NO: 208467 - RNA, 18 nt, Human
guggcggcgggcgguggc

SEQ ID NO: 208468 - RNA, 22 nt, Human
uaaacagcuuucuauaucaagu

SEQ ID NO: 208469 - RNA, 23 nt, Human
uacauauacauauauauauaaau

SEQ ID NO: 208470 - RNA, 20 nt, Human
uacauuuuaacagguggcaa

SEQ ID NO: 208471 - RNA, 25 nt, Human
uagcugaaaaacuacucucucuuau

SEQ ID NO: 208472 - RNA, 25 nt, Human
uauacauauacauauauauauaaau

SEQ ID NO: 208473 - RNA, 20 nt, Human
uauauacauauacauauaua

SEQ ID NO: 208474 - RNA, 29 nt, Human
uauauacauauacauauauauauaaaugu

SEQ ID NO: 208475 - RNA, 18 nt, Human
uauauauacauauacaua

SEQ ID NO: 208476 - RNA, 22 nt, Human
uauauauacauauacauauaua

SEQ ID NO: 208477 - RNA, 19 nt, Human
uauauauauacauauacau

SEQ ID NO: 208478 - RNA, 20 nt, Human
uauauauauauacauauaca

SEQ ID NO: 208479 - RNA, 24 nt, Human
ucaacacuuuuaacuuucccuaca

SEQ ID NO: 208480 - RNA, 23 nt, Human
uggcaacaucaccacagguagcu

SEQ ID NO: 208481 - RNA, 29 nt, Human
uggcaacaucaccacagguagcuuugauu

SEQ ID NO: 208482 - RNA, 18 nt, Human
uggcggcggcgcggcggc

SEQ ID NO: 208483 - RNA, 18 nt, Human
uguguagaaaaaauaaac

SEQ ID NO: 208484 - RNA, 19 nt, Human
aaaagggacacagggguuc

SEQ ID NO: 208485 - RNA, 18 nt, Human
aaaauccuccagcaccca

SEQ ID NO: 208486 - RNA, 21 nt, Human
aaagcaagaaggagcaggugu

SEQ ID NO: 208487 - RNA, 23 nt, Human
aagagagaggccggggaggugcc

SEQ ID NO: 208488 - RNA, 23 nt, Human
aagcaagaaggagcagguguggg

SEQ ID NO: 208489 - RNA, 19 nt, Human
acaacccccuuccuccccc

SEQ ID NO: 208490 - RNA, 25 nt, Human
acccaagcacucuccguuuucugcc

SEQ ID NO: 208491 - RNA, 19 nt, Human
accuguaccccagcucccc

SEQ ID NO: 208492 - RNA, 20 nt, Human
agagagaggccggggaggug

SEQ ID NO: 208493 - RNA, 20 nt, Human
aggcaccggcuggcugcggu

SEQ ID NO: 208494 - RNA, 22 nt, Human
agguguggcaucugcagcuggg

SEQ ID NO: 208495 - RNA, 30 nt, Human
caaaaauaaaaauuucucuucccccucccc

SEQ ID NO: 208496 - RNA, 21 nt, Human
caagaaggagcagguguggca

SEQ ID NO: 208497 - RNA, 26 nt, Human
cacccaagcacucuccguuuucugcc

SEQ ID NO: 208498 - RNA, 22 nt, Human
cacccaccacccaagcacucuc

SEQ ID NO: 208499 - RNA, 23 nt, Human
cagcacccaccacccaagcacuc

SEQ ID NO: 208500 - RNA, 26 nt, Human
cagcacccaccacccaagcacucucc

SEQ ID NO: 208501 - RNA, 22 nt, Human
cagcuccccgaccacaaccccc

SEQ ID NO: 208502 - RNA, 20 nt, Human
ccacaacccccuuccucccc

SEQ ID NO: 208503 - RNA, 23 nt, Human
cccaagcacucuccguuuucugc

SEQ ID NO: 208504 - RNA, 21 nt, Human
cccaccacccaagcacucucc

SEQ ID NO: 208505 - RNA, 24 nt, Human
cccaccacccaagcacucuccguu

SEQ ID NO: 208506 - RNA, 18 nt, Human
ccccaaaccuguacccca

SEQ ID NO: 208507 - RNA, 21 nt, Human
ccccgaccacaacccccuucc

SEQ ID NO: 208508 - RNA, 20 nt, Human
ccuccagcacccaccaccca

SEQ ID NO: 208509 - RNA, 19 nt, Human
ccuccuccgcuucuuccuc

SEQ ID NO: 208510 - RNA, 21 nt, Human
ccuguaccccagcuccccgac

SEQ ID NO: 208511 - RNA, 20 nt, Human
ccuuuaaucuuaugcaaaag

SEQ ID NO: 208512 - RNA, 27 nt, Human
cgaccacaacccccuuccucccccggg

SEQ ID NO: 208513 - RNA, 22 nt, Human
cuccagcacccaccacccaagc

SEQ ID NO: 208514 - RNA, 18 nt, Human
cuccccgaccacaacccc

SEQ ID NO: 208515 - RNA, 19 nt, Human
cuucccccuccccaaaccu

SEQ ID NO: 208516 - RNA, 21 nt, Human
gagcgagcgggcgggcgggca

SEQ ID NO: 208517 - RNA, 21 nt, Human
gcgagcgagcgggcgggcggg

SEQ ID NO: 208518 - RNA, 20 nt, Human
gcgagcgggcgggcgggcag

SEQ ID NO: 208519 - RNA, 22 nt, Human
gcggggggcaggggcgccaggc

SEQ ID NO: 208520 - RNA, 18 nt, Human
ggagaggggcggggggca

SEQ ID NO: 208521 - RNA, 19 nt, Human
ggcaggugcacggcccugc

SEQ ID NO: 208522 - RNA, 19 nt, Human
gggaaagcaagaaggagcc

SEQ ID NO: 208523 - RNA, 21 nt, Human
gggcaggugcacggcccugcg

SEQ ID NO: 208524 - RNA, 23 nt, Human
gggcgagcgagcgagcgggcggg

SEQ ID NO: 208525 - RNA, 21 nt, Human
guuuggagaggggcggggggc

SEQ ID NO: 208526 - RNA, 26 nt, Human
uaaaaauuucucuucccccuccccaa

SEQ ID NO: 208527 - RNA, 20 nt, Human
uaccccagcuccccgaccac

SEQ ID NO: 208528 - RNA, 23 nt, Human
uaccccagcuccccgaccacaac

SEQ ID NO: 208529 - RNA, 19 nt, Human
uaugcaaaagggacacagg

SEQ ID NO: 208530 - RNA, 21 nt, Human
uaugcaaaagggacacagggg

SEQ ID NO: 208531 - RNA, 22 nt, Human
ucccccggggaaagcaagaagg

SEQ ID NO: 208532 - RNA, 19 nt, Human
uccgcuucuuccuccuccc

SEQ ID NO: 208533 - RNA, 25 nt, Human
ucggcagcgcggcgcggcgggcgag

SEQ ID NO: 208534 - RNA, 23 nt, Human
ucugcagcugggaagagagaggc

SEQ ID NO: 208535 - RNA, 24 nt, Human
ugcagcugggaagagagaggccgg

SEQ ID NO: 208536 - RNA, 19 nt, Human
uggagaggggcggggggca

SEQ ID NO: 208537 - RNA, 23 nt, Human
ugggaagagagaggccggggagg

SEQ ID NO: 208538 - RNA, 20 nt, Human
uucuuccuccucccucgccc

SEQ ID NO: 208539 - RNA, 21 nt, Human
uuuggagaggggcggggggca

SEQ ID NO: 208540 - RNA, 23 nt, Human
aaaaaaucaguucaccacaaaca

SEQ ID NO: 208541 - RNA, 24 nt, Human
aaaaauacuuuuccccccaaaaag

SEQ ID NO: 208542 - RNA, 20 nt, Human
aaacaaguaggacuccaccu

SEQ ID NO: 208543 - RNA, 24 nt, Human
aaacagaaauauaaaucgaggcug

SEQ ID NO: 208544 - RNA, 23 nt, Human
aaccauaggcauuucaaaaaccu

SEQ ID NO: 208545 - RNA, 24 nt, Human
aagaaaccauaggcauuucaaaaa

SEQ ID NO: 208546 - RNA, 22 nt, Human
aagcgacaagaaaauucaaacu

SEQ ID NO: 208547 - RNA, 19 nt, Human
aaucaguucaccacaaaca

SEQ ID NO: 208548 - RNA, 23 nt, Human
acaagaacauaucuucucugcau

SEQ ID NO: 208549 - RNA, 22 nt, Human
accacaaacagaaauauaaauc

SEQ ID NO: 208550 - RNA, 26 nt, Human
accuuauuuucuccaauaguccccaa

SEQ ID NO: 208551 - RNA, 18 nt, Human
acuauuuauaaauacauu

SEQ ID NO: 208552 - RNA, 20 nt, Human
agaucuuacuauauuugggg

SEQ ID NO: 208553 - RNA, 22 nt, Human
aggaagauuccugaagaggagg

SEQ ID NO: 208554 - RNA, 23 nt, Human
aggcagaaugucuugagaccccu

SEQ ID NO: 208555 - RNA, 23 nt, Human
aggcuguagccagcugcugguca

SEQ ID NO: 208556 - RNA, 23 nt, Human
agucugggugcugugcucgaguc

SEQ ID NO: 208557 - RNA, 18 nt, Human
augggcuccccagcaagc

SEQ ID NO: 208558 - RNA, 18 nt, Human
auuuuuuuaaugguaaaa

SEQ ID NO: 208559 - RNA, 23 nt, Human
caaaaauacuuuuccccccaaaa

SEQ ID NO: 208560 - RNA, 21 nt, Human
caaggagagcucuaugcagcg

SEQ ID NO: 208561 - RNA, 26 nt, Human
cacaaacagaaauauaaaucgaggcu

SEQ ID NO: 208562 - RNA, 18 nt, Human
caccgaggucugcagcag

SEQ ID NO: 208563 - RNA, 19 nt, Human
caccgaggucugcagcagg

SEQ ID NO: 208564 - RNA, 20 nt, Human
cacgcugcuuggcaggcugg

SEQ ID NO: 208565 - RNA, 18 nt, Human
cagaaggcugugagcucc

SEQ ID NO: 208566 - RNA, 22 nt, Human
cagcagggcagagucucccuga

SEQ ID NO: 208567 - RNA, 18 nt, Human
caggaagauuccugaaga

SEQ ID NO: 208568 - RNA, 19 nt, Human
caguguccuggaugggcuc

SEQ ID NO: 208569 - RNA, 18 nt, Human
cauucuucuugguugagg

SEQ ID NO: 208570 - RNA, 25 nt, Human
cccaagcaguacaggucacuugaag

SEQ ID NO: 208571 - RNA, 21 nt, Human
cccagagugcccuagaacauu

SEQ ID NO: 208572 - RNA, 23 nt, Human
ccccacggggccgcagcaaaagc

SEQ ID NO: 208573 - RNA, 20 nt, Human
cccugucucucugucccucc

SEQ ID NO: 208574 - RNA, 23 nt, Human
ccuccgggagagcagcccagucu

SEQ ID NO: 208575 - RNA, 22 nt, Human
ccucuuucuaaacuuugguuua

SEQ ID NO: 208576 - RNA, 26 nt, Human
ccugcaaccggggcacgcugcuuggc

SEQ ID NO: 208577 - RNA, 21 nt, Human
cgacaagaaaauucaaacugc

SEQ ID NO: 208578 - RNA, 23 nt, Human
cgacaagaaaauucaaacugcuc

SEQ ID NO: 208579 - RNA, 22 nt, Human
cggcgcgaagcugugccucgug

SEQ ID NO: 208580 - RNA, 22 nt, Human
cucccaguguccuggaugggcu

SEQ ID NO: 208581 - RNA, 18 nt, Human
cucccugucucucugucc

SEQ ID NO: 208582 - RNA, 19 nt, Human
cugugagcuccaggagcau

SEQ ID NO: 208583 - RNA, 21 nt, Human
cuucgacugggccaugucuuc

SEQ ID NO: 208584 - RNA, 20 nt, Human
cuuggguuuggccuccggga

SEQ ID NO: 208585 - RNA, 22 nt, Human
gaagauuccugaagaggagggc

SEQ ID NO: 208586 - RNA, 19 nt, Human
gacuacuggaaagugaaaa

SEQ ID NO: 208587 - RNA, 18 nt, Human
gagagaugaaaauaaagc

SEQ ID NO: 208588 - RNA, 22 nt, Human
gcccuagaacauucuuagauac

SEQ ID NO: 208589 - RNA, 20 nt, Human
gcgaagcugugccucgugcc

SEQ ID NO: 208590 - RNA, 20 nt, Human
ggagggcccgaaauaccugc

SEQ ID NO: 208591 - RNA, 20 nt, Human
ggccuccgggagagcagccc

SEQ ID NO: 208592 - RNA, 21 nt, Human
guguguccacaccgaggucug

SEQ ID NO: 208593 - RNA, 22 nt, Human
uaaaaaaaaucaguucaccaca

SEQ ID NO: 208594 - RNA, 22 nt, Human
uaaaaaaauaaagaaaagcuaa

SEQ ID NO: 208595 - RNA, 20 nt, Human
uaaagaaaagcuaauaggua

SEQ ID NO: 208596 - RNA, 24 nt, Human
uaaagagcuuauccucagaaauaa

SEQ ID NO: 208597 - RNA, 18 nt, Human
uaaaucgaggcuguagcc

SEQ ID NO: 208598 - RNA, 22 nt, Human
uaccugccuuuauagguuccca

SEQ ID NO: 208599 - RNA, 26 nt, Human
uaccugccuuuauagguucccagagu

SEQ ID NO: 208600 - RNA, 24 nt, Human
uacggggagugggggugaagcgug

SEQ ID NO: 208601 - RNA, 22 nt, Human
uacuauauuuggggcuauguug

SEQ ID NO: 208602 - RNA, 23 nt, Human
uauacaauguuaacaagaacaua

SEQ ID NO: 208603 - RNA, 21 nt, Human
uauuuucuccaauagucccca

SEQ ID NO: 208604 - RNA, 21 nt, Human
ucaaaaauacuuuucccccca

SEQ ID NO: 208605 - RNA, 19 nt, Human
uccacauuaaccuugcggc

SEQ ID NO: 208606 - RNA, 19 nt, Human
uccaccuuauuuucuccaa

SEQ ID NO: 208607 - RNA, 23 nt, Human
uccccaagcaguacaggucacuu

SEQ ID NO: 208608 - RNA, 25 nt, Human
ucccugagccugacuuugccagacc

SEQ ID NO: 208609 - RNA, 19 nt, Human
ucucccugucucucugucc

SEQ ID NO: 208610 - RNA, 19 nt, Human
ucuuugcugacuacuggaa

SEQ ID NO: 208611 - RNA, 18 nt, Human
ugaaaauaaagcuuugcc

SEQ ID NO: 208612 - RNA, 23 nt, Human
ugaaaauaaagcuuugccuuuaa

SEQ ID NO: 208613 - RNA, 24 nt, Human
ugacaccacagaaggcugugagcu

SEQ ID NO: 208614 - RNA, 20 nt, Human
ugagaccccucuguuuucaa

SEQ ID NO: 208615 - RNA, 18 nt, Human
ugagcuccaggagcaugc

SEQ ID NO: 208616 - RNA, 18 nt, Human
ugaguuguugaacuacaa

SEQ ID NO: 208617 - RNA, 21 nt, Human
ugcaaaauaaggcauauuuga

SEQ ID NO: 208618 - RNA, 19 nt, Human
ugcuggucauguccuuggc

SEQ ID NO: 208619 - RNA, 22 nt, Human
uggaugggcuccccagcaagcc

SEQ ID NO: 208620 - RNA, 19 nt, Human
uggcaggcugggcgcgcag

SEQ ID NO: 208621 - RNA, 24 nt, Human
ugggccuucgacugggccaugucu

SEQ ID NO: 208622 - RNA, 18 nt, Human
uggggcgacaguacacgg

SEQ ID NO: 208623 - RNA, 20 nt, Human
ugugagcuccaggagcaugc

SEQ ID NO: 208624 - RNA, 22 nt, Human
uuaaacaaguaggacuccaccu

SEQ ID NO: 208625 - RNA, 20 nt, Human
uuaaagguuuuccuauucuc

SEQ ID NO: 208626 - RNA, 19 nt, Human
uuccugaagaggagggccc

SEQ ID NO: 208627 - RNA, 20 nt, Human
uucuugguugagggauccac

SEQ ID NO: 208628 - RNA, 21 nt, Human
uucuugguugagggauccacg

SEQ ID NO: 208629 - RNA, 18 nt, Human
uugugcuaaggaggacaa

SEQ ID NO: 208630 - RNA, 24 nt, Human
uuucaaaaaccucuuucuaaacuu

SEQ ID NO: 208631 - RNA, 23 nt, Human
uuucagaaaugacaccacagaag

SEQ ID NO: 208632 - RNA, 21 nt, Human
uuuuauuuuuuuaaugguaaa

SEQ ID NO: 208633 - RNA, 25 nt, Human
uuuuuuuuuuuuuuuuuuuauuuuu

SEQ ID NO: 208634 - RNA, 21 nt, Human
aaaggaaggaccuggggaaga

SEQ ID NO: 208635 - RNA, 23 nt, Human
aagcagauggugcaacaaccaga

SEQ ID NO: 208636 - RNA, 20 nt, Human
aaggauagguucaucccggu

SEQ ID NO: 208637 - RNA, 22 nt, Human
aagucagaauaaaaccucccaa

SEQ ID NO: 208638 - RNA, 22 nt, Human
aagucuccuuccauccagucaa

SEQ ID NO: 208639 - RNA, 26 nt, Human
acacgcacgcacacgcacacgugcac

SEQ ID NO: 208640 - RNA, 23 nt, Human
acccaugcucacaaacacacaca

SEQ ID NO: 208641 - RNA, 22 nt, Human
accccaccucccuagcccucug

SEQ ID NO: 208642 - RNA, 31 nt, Human
agagaaauguaccccaccucccuagcccucc

SEQ ID NO: 208643 - RNA, 22 nt, Human
agccuccagagcacaggaguag

SEQ ID NO: 208644 - RNA, 21 nt, Human
aggaaggacgauggucaaggu

SEQ ID NO: 208645 - RNA, 20 nt, Human
aggaagucagaauaaaaccu

SEQ ID NO: 208646 - RNA, 22 nt, Human
aggcaggcggcggggggcggcg

SEQ ID NO: 208647 - RNA, 23 nt, Human
aggggaguagggaggugugggga

SEQ ID NO: 208648 - RNA, 19 nt, Human
augcccaggggaguaggga

SEQ ID NO: 208649 - RNA, 18 nt, Human
auuaggcacauucagucc

SEQ ID NO: 208650 - RNA, 31 nt, Human
caaacacacacacacgcacgcacacgcacag

SEQ ID NO: 208651 - RNA, 22 nt, Human
caagcagauggugcaacaacca

SEQ ID NO: 208652 - RNA, 28 nt, Human
cacacacacgcacgcacacgcacacgug

SEQ ID NO: 208653 - RNA, 25 nt, Human
cacacgcacgcacacgcacacgugc

SEQ ID NO: 208654 - RNA, 20 nt, Human
cacacgugcacacgcgcauu

SEQ ID NO: 208655 - RNA, 20 nt, Human
cacgcacacgugcacacgcg

SEQ ID NO: 208656 - RNA, 19 nt, Human
cacgcuuccuuaggcuccc

SEQ ID NO: 208657 - RNA, 24 nt, Human
cagaauaaaaccucccaaggcuga

SEQ ID NO: 208658 - RNA, 19 nt, Human
cagaccuaaaggaaggacc

SEQ ID NO: 208659 - RNA, 21 nt, Human
cccaaggcugaaaacuagagc

SEQ ID NO: 208660 - RNA, 21 nt, Human
cccaggaagccccucaucccc

SEQ ID NO: 208661 - RNA, 25 nt, Human
cccaugcucacaaacacacacacaa

SEQ ID NO: 208662 - RNA, 19 nt, Human
cccggugacuucauggcug

SEQ ID NO: 208663 - RNA, 20 nt, Human
ccggcccaggcaggcggcgg

SEQ ID NO: 208664 - RNA, 24 nt, Human
ccuuccauccagucaagccagaag

SEQ ID NO: 208665 - RNA, 23 nt, Human
cgcacacgcacacgugcacacgc

SEQ ID NO: 208666 - RNA, 24 nt, Human
cgcacacgugcacacgcgcauuug

SEQ ID NO: 208667 - RNA, 19 nt, Human
cggcccggcgggcgaacgg

SEQ ID NO: 208668 - RNA, 21 nt, Human
cggcgggcgaacggggacgua

SEQ ID NO: 208669 - RNA, 18 nt, Human
cggggacguagcggggga

SEQ ID NO: 208670 - RNA, 25 nt, Human
cuccucugacucugggaaugagauu

SEQ ID NO: 208671 - RNA, 21 nt, Human
cuuugacccccuucgcucucc

SEQ ID NO: 208672 - RNA, 18 nt, Human
gaaauguaccccaccucc

SEQ ID NO: 208673 - RNA, 21 nt, Human
gaacggggacguagcggggga

SEQ ID NO: 208674 - RNA, 19 nt, Human
gaccucgugaccauuacuc

SEQ ID NO: 208675 - RNA, 19 nt, Human
gagagggaggcagagcuac

SEQ ID NO: 208676 - RNA, 21 nt, Human
gagcacaggaguagcagggga

SEQ ID NO: 208677 - RNA, 24 nt, Human
gagcgcgcggcgcgcgggcgagcg

SEQ ID NO: 208678 - RNA, 21 nt, Human
gagcggcggagggcacacggc

SEQ ID NO: 208679 - RNA, 19 nt, Human
gcaagucugagcuuuggga

SEQ ID NO: 208680 - RNA, 18 nt, Human
gcgcggcgcgcgggcgag

SEQ ID NO: 208681 - RNA, 19 nt, Human
gcgcgggcgagcggcggag

SEQ ID NO: 208682 - RNA, 21 nt, Human
gcgcgggcgcggggcgcuggg

SEQ ID NO: 208683 - RNA, 24 nt, Human
gcggcgcgcgggcgagcggcggag

SEQ ID NO: 208684 - RNA, 18 nt, Human
gcugaaaacuagagcugg

SEQ ID NO: 208685 - RNA, 21 nt, Human
ggaaacacaccagggcucaga

SEQ ID NO: 208686 - RNA, 19 nt, Human
ggaaggagauauggagagg

SEQ ID NO: 208687 - RNA, 19 nt, Human
ggaaggagauauggagagg

SEQ ID NO: 208688 - RNA, 18 nt, Human
ggagagggaggcagagcu

SEQ ID NO: 208689 - RNA, 24 nt, Human
ggaguagggagguguggggaggga

SEQ ID NO: 208690 - RNA, 19 nt, Human
ggagugucuccacaugcca

SEQ ID NO: 208691 - RNA, 20 nt, Human
ggcgcgcgggcgagcggcgg

SEQ ID NO: 208692 - RNA, 27 nt, Human
gggaacaggacccaggaagccccucau

SEQ ID NO: 208693 - RNA, 20 nt, Human
gggaaggagauauggagagg

SEQ ID NO: 208694 - RNA, 19 nt, Human
ggggagggagguguagggg

SEQ ID NO: 208695 - RNA, 21 nt, Human
ggggcgcugggcgcaggcggg

SEQ ID NO: 208696 - RNA, 18 nt, Human
gggucuucuccauuaggc

SEQ ID NO: 208697 - RNA, 21 nt, Human
gucagaauaaaaccucccaag

SEQ ID NO: 208698 - RNA, 20 nt, Human
uaaaggaaggaccuggggaa

SEQ ID NO: 208699 - RNA, 19 nt, Human
uauggagagggaggcagag

SEQ ID NO: 208700 - RNA, 18 nt, Human
ucagaauaaaaccuccca

SEQ ID NO: 208701 - RNA, 23 nt, Human
uccacaugccaaaaucagaggaa

SEQ ID NO: 208702 - RNA, 27 nt, Human
ucccacagcagggcucucagcugccag

SEQ ID NO: 208703 - RNA, 20 nt, Human
ucccacccugacugcucaga

SEQ ID NO: 208704 - RNA, 24 nt, Human
uccuaagucuccuuccauccaguc

SEQ ID NO: 208705 - RNA, 19 nt, Human
ucugcagccuccagagcac

SEQ ID NO: 208706 - RNA, 21 nt, Human
ucugcagccuccagagcacag

SEQ ID NO: 208707 - RNA, 22 nt, Human
ugagucccuggccugcuggcaa

SEQ ID NO: 208708 - RNA, 22 nt, Human
ugagucccuggccugcuggcag

SEQ ID NO: 208709 - RNA, 24 nt, Human
ugagugaauccaggaucgaucugg

SEQ ID NO: 208710 - RNA, 19 nt, Human
ugcaacaaccagaccuaaa

SEQ ID NO: 208711 - RNA, 19 nt, Human
ugccaaaaucagaggaagu

SEQ ID NO: 208712 - RNA, 21 nt, Human
uggagagggaggcagagcuac

SEQ ID NO: 208713 - RNA, 18 nt, Human
uggggagggagguguagg

SEQ ID NO: 208714 - RNA, 23 nt, Human
uggggcgcgggcgcggggcgcug

SEQ ID NO: 208715 - RNA, 21 nt, Human
ugggguaggggaacaggaccc

SEQ ID NO: 208716 - RNA, 19 nt, Human
ugggucuucuccauuaggc

SEQ ID NO: 208717 - RNA, 21 nt, Human
uguaacaccaaagagaacacc

SEQ ID NO: 208718 - RNA, 22 nt, Human
uguaacaccaaagagaacaccc

SEQ ID NO: 208719 - RNA, 18 nt, Human
uguaggggaaggagauau

SEQ ID NO: 208720 - RNA, 22 nt, Human
uguggggagggagguguagggg

SEQ ID NO: 208721 - RNA, 18 nt, Human
aaaaaaaccccaaacccu

SEQ ID NO: 208722 - RNA, 23 nt, Human
aaaaaaaccccaaacccuaacac

SEQ ID NO: 208723 - RNA, 20 nt, Human
aaaaacaaaaaaaccccaaa

SEQ ID NO: 208724 - RNA, 24 nt, Human
aaaacaaaaacaaaaaaaccccaa

SEQ ID NO: 208725 - RNA, 25 nt, Human
aaaacaaaaacaaaaaaaccccaaa

SEQ ID NO: 208726 - RNA, 22 nt, Human
aaaacaaaaacaaaaacaaaaa

SEQ ID NO: 208727 - RNA, 27 nt, Human
aaaacaaaaacaaaaacaaaaaaaccc

SEQ ID NO: 208728 - RNA, 28 nt, Human
aaaacaaaaacaaaaacaaaaaaacccc

SEQ ID NO: 208729 - RNA, 20 nt, Human
aaaaccccaaacccuaacac

SEQ ID NO: 208730 - RNA, 23 nt, Human
aaaauguugaaaucaagaaauua

SEQ ID NO: 208731 - RNA, 25 nt, Human
aaacaaaaaaaccccaaacccuaac

SEQ ID NO: 208732 - RNA, 22 nt, Human
aaacaaaaacaaaaaaacccca

SEQ ID NO: 208733 - RNA, 24 nt, Human
aaacaaaaacaaaaaaacccccuc

SEQ ID NO: 208734 - RNA, 28 nt, Human
aaaucaagaaauuaaaaaacaaaaacaa

SEQ ID NO: 208735 - RNA, 23 nt, Human
aacaaaaacaaaaaaaccccaaa

SEQ ID NO: 208736 - RNA, 24 nt, Human
aaugaaaaggagcaaaaaaaggga

SEQ ID NO: 208737 - RNA, 19 nt, Human
aauuauaggggaaaaaaag

SEQ ID NO: 208738 - RNA, 22 nt, Human
acaaaaacaaaaaaaccccaaa

SEQ ID NO: 208739 - RNA, 26 nt, Human
acaaaaacaaaaaaaccccaaacccu

SEQ ID NO: 208740 - RNA, 24 nt, Human
acaaaaacaaaaacaaaaaaaccc

SEQ ID NO: 208741 - RNA, 22 nt, Human
accccgcuuucuaacccucagc

SEQ ID NO: 208742 - RNA, 20 nt, Human
acccuaacaccucuuuucuc

SEQ ID NO: 208743 - RNA, 22 nt, Human
acccuaacaccucuuuucuccc

SEQ ID NO: 208744 - RNA, 22 nt, Human
agcaaaaaaagggaaaaagccc

SEQ ID NO: 208745 - RNA, 19 nt, Human
aggagggguaaugaaaagg

SEQ ID NO: 208746 - RNA, 21 nt, Human
aggggaaaaaaagccacaaaa

SEQ ID NO: 208747 - RNA, 21 nt, Human
agggugaaaacggaggagggg

SEQ ID NO: 208748 - RNA, 22 nt, Human
aucaagaaauuaaaaaacaaaa

SEQ ID NO: 208749 - RNA, 23 nt, Human
caaaaacaaaaaaaccccaaacc

SEQ ID NO: 208750 - RNA, 23 nt, Human
caaaaauguagagagagguggag

SEQ ID NO: 208751 - RNA, 31 nt, Human
caagaaauuaaaaaacaaaaacaaaaacaaa

SEQ ID NO: 208752 - RNA, 18 nt, Human
caagagggcccccggaga

SEQ ID NO: 208753 - RNA, 18 nt, Human
caagcaaccaccgaaaua

SEQ ID NO: 208754 - RNA, 19 nt, Human
caccccgcuuucuaacccu

SEQ ID NO: 208755 - RNA, 23 nt, Human
caccccgcuuucuaacccucagc

SEQ ID NO: 208756 - RNA, 20 nt, Human
cacuuugccaccuccucuuc

SEQ ID NO: 208757 - RNA, 23 nt, Human
cagaacagguaagaggcguuggc

SEQ ID NO: 208758 - RNA, 20 nt, Human
cagggauaaaggggccaaga

SEQ ID NO: 208759 - RNA, 18 nt, Human
cccaaacccuaacaccuc

SEQ ID NO: 208760 - RNA, 18 nt, Human
ccccaaacccuaacaccu

SEQ ID NO: 208761 - RNA, 24 nt, Human
ccucccccagacacuugcaaaaau

SEQ ID NO: 208762 - RNA, 20 nt, Human
ccugggguggagggaggcgc

SEQ ID NO: 208763 - RNA, 18 nt, Human
cggaggccggagaaaccc

SEQ ID NO: 208764 - RNA, 20 nt, Human
cggggcugggggugggaggg

SEQ ID NO: 208765 - RNA, 22 nt, Human
cuuugccaccuccucuucgaaa

SEQ ID NO: 208766 - RNA, 18 nt, Human
gagggaaagguugggggg

SEQ ID NO: 208767 - RNA, 22 nt, Human
gagggcuggggugccugcgagc

SEQ ID NO: 208768 - RNA, 20 nt, Human
gcagguucuacgcgaagucc

SEQ ID NO: 208769 - RNA, 21 nt, Human
gccaccuccucuucgaaauuc

SEQ ID NO: 208770 - RNA, 19 nt, Human
gcugcagccgagagggugg

SEQ ID NO: 208771 - RNA, 21 nt, Human
ggagaaacccucaagccugag

SEQ ID NO: 208772 - RNA, 19 nt, Human
ggcguugggggugggagag

SEQ ID NO: 208773 - RNA, 20 nt, Human
gggcuggggugccugcgagc

SEQ ID NO: 208774 - RNA, 20 nt, Human
ggggugggagagaaaaaugg

SEQ ID NO: 208775 - RNA, 25 nt, Human
gggugagggaaagguugggggggga

SEQ ID NO: 208776 - RNA, 22 nt, Human
gggugggagagaaaaauggauu

SEQ ID NO: 208777 - RNA, 23 nt, Human
ggugggagggggugagggaaagg

SEQ ID NO: 208778 - RNA, 21 nt, Human
guagagcaggugcccuccccc

SEQ ID NO: 208779 - RNA, 26 nt, Human
uaaaauacaccccgcuuucuaacccu

SEQ ID NO: 208780 - RNA, 22 nt, Human
uaggggaaaaaaagccacaaaa

SEQ ID NO: 208781 - RNA, 20 nt, Human
ucacccccaagcaaccaccu

SEQ ID NO: 208782 - RNA, 19 nt, Human
uccugggguggagggaggc

SEQ ID NO: 208783 - RNA, 19 nt, Human
ucgggguggggcaggagag

SEQ ID NO: 208784 - RNA, 23 nt, Human
ucuaaaauacaccccgcuuucua

SEQ ID NO: 208785 - RNA, 23 nt, Human
ugaaaaggagcaaaaaaagggaa

SEQ ID NO: 208786 - RNA, 20 nt, Human
ugcagcucuuuccuagcucu

SEQ ID NO: 208787 - RNA, 20 nt, Human
ugcagcucuuuccuagcucu

SEQ ID NO: 208788 - RNA, 19 nt, Human
uggagggcuggggugccug

SEQ ID NO: 208789 - RNA, 26 nt, Human
uggcagguagagcaggugcccuccuc

SEQ ID NO: 208790 - RNA, 20 nt, Human
uggcguccugggguggaggg

SEQ ID NO: 208791 - RNA, 22 nt, Human
uggcuggagucggggcuggggg

SEQ ID NO: 208792 - RNA, 27 nt, Human
ugggagggggugagggaaagguugggg

SEQ ID NO: 208793 - RNA, 25 nt, Human
ugggggaagcagggcagcgccaggu

SEQ ID NO: 208794 - RNA, 19 nt, Human
ugggggugggaggggguga

SEQ ID NO: 208795 - RNA, 21 nt, Human
ugggguggagggaggcgcugg

SEQ ID NO: 208796 - RNA, 21 nt, Human
ugggguggagggaggcgcugg

SEQ ID NO: 208797 - RNA, 20 nt, Human
uguuuuaaaauuucuggcag

SEQ ID NO: 208798 - RNA, 24 nt, Human
uuauaggggaaaaaaagccacaaa

SEQ ID NO: 208799 - RNA, 23 nt, Human
uugggggugggagagaaaaaugg

SEQ ID NO: 208800 - RNA, 22 nt, Human
uuuuuuuuuuuuuccucaaaua

SEQ ID NO: 208801 - RNA, 23 nt, Human
uuuuuuuuuuuuuuuuuuccuca

SEQ ID NO: 208802 - RNA, 23 nt, Human
uuuuuuuuuuuuuuuuuuuuccu

SEQ ID NO: 208803 - RNA, 22 nt, Human
agcggugaggggcccauggggc

SEQ ID NO: 208804 - RNA, 22 nt, Human
ccaguggcccugcagccccucu

SEQ ID NO: 208805 - RNA, 18 nt, Human
cccagccaacaccaacac

SEQ ID NO: 208806 - RNA, 20 nt, Human
cguccucuccuuccagagca

SEQ ID NO: 208807 - RNA, 18 nt, Human
cugcagccccucuauccc

SEQ ID NO: 208808 - RNA, 18 nt, Human
gaggggcccauggggcgg

SEQ ID NO: 208809 - RNA, 19 nt, Human
gggcggggccugaaggugg

SEQ ID NO: 208810 - RNA, 22 nt, Human
guggcccugcagccccucuauc

SEQ ID NO: 208811 - RNA, 19 nt, Human
ugcagccccucuauccccc

SEQ ID NO: 208812 - RNA, 20 nt, Human
uguuccuuccaguggcccug

SEQ ID NO: 208813 - RNA, 18 nt, Human
uuccagagcagucgcagc

SEQ ID NO: 208814 - RNA, 24 nt, Human
uugacaccccagccaacaccaaca

SEQ ID NO: 208815 - RNA, 30 nt, Human
uugagugaugacagcuccauguuccuuccu

SEQ ID NO: 208816 - RNA, 19 nt, Human
aaaguguuaguggauugga

SEQ ID NO: 208817 - RNA, 18 nt, Human
auauaacuaaaguguuag

SEQ ID NO: 208818 - RNA, 24 nt, Human
uauuaggcaagaacagguaaugua

SEQ ID NO: 208819 - RNA, 23 nt, Human
uuaaugauaugcaugcuuuucuu

SEQ ID NO: 208820 - RNA, 19 nt, Human
uuuuuuuuuuuuuuuguga

SEQ ID NO: 208821 - RNA, 30 nt, Human
aaaaacccaaccuuccccaacagggcccuu

SEQ ID NO: 208822 - RNA, 18 nt, Human
aagaugcugaggcugugg

SEQ ID NO: 208823 - RNA, 23 nt, Human
aagccagagagaggugcacaggc

SEQ ID NO: 208824 - RNA, 22 nt, Human
aagugcugaagaugcugaggcu

SEQ ID NO: 208825 - RNA, 22 nt, Human
accuuuauaagccagagagagg

SEQ ID NO: 208826 - RNA, 19 nt, Human
agaaggaaaguggccccag

SEQ ID NO: 208827 - RNA, 23 nt, Human
agacagaaggaaaguggccccag

SEQ ID NO: 208828 - RNA, 20 nt, Human
agagaggugcacaggccaga

SEQ ID NO: 208829 - RNA, 24 nt, Human
agaugcugaggcuguggggcagcu

SEQ ID NO: 208830 - RNA, 23 nt, Human
aggagggguuggcacaggccagg

SEQ ID NO: 208831 - RNA, 21 nt, Human
aggauccagaggcugggaugu

SEQ ID NO: 208832 - RNA, 24 nt, Human
aggccagaaagaggugccccccag

SEQ ID NO: 208833 - RNA, 19 nt, Human
caaaaacccaaccuucccc

SEQ ID NO: 208834 - RNA, 22 nt, Human
caaaaacccaaccuuccccaac

SEQ ID NO: 208835 - RNA, 23 nt, Human
caagccccaccugcacgagcacu

SEQ ID NO: 208836 - RNA, 21 nt, Human
caagucccagacauuggaggg

SEQ ID NO: 208837 - RNA, 20 nt, Human
cacaggccagaaagaggugc

SEQ ID NO: 208838 - RNA, 23 nt, Human
cacccucauccuaacgggcugag

SEQ ID NO: 208839 - RNA, 18 nt, Human
caccuuuauaagccagag

SEQ ID NO: 208840 - RNA, 19 nt, Human
cacgagcacuguugucccc

SEQ ID NO: 208841 - RNA, 19 nt, Human
cagcuuuucccgggacaac

SEQ ID NO: 208842 - RNA, 23 nt, Human
caggcaccuuuauaagccagaga

SEQ ID NO: 208843 - RNA, 24 nt, Human
cagucaccagcagacagaaggaaa

SEQ ID NO: 208844 - RNA, 20 nt, Human
ccaaaaacccaaccuucccc

SEQ ID NO: 208845 - RNA, 21 nt, Human
ccaagccccaccugcacgagc

SEQ ID NO: 208846 - RNA, 21 nt, Human
ccagcaucuggccacauggga

SEQ ID NO: 208847 - RNA, 18 nt, Human
ccccaacagggcccuccg

SEQ ID NO: 208848 - RNA, 20 nt, Human
ccccagacucacaggagccc

SEQ ID NO: 208849 - RNA, 21 nt, Human
ccccagacucacaggagcccc

SEQ ID NO: 208850 - RNA, 23 nt, Human
cccccagacucacaggagccccc

SEQ ID NO: 208851 - RNA, 21 nt, Human
ccccccagacucacaggagcc

SEQ ID NO: 208852 - RNA, 25 nt, Human
cccugggcuaccauggagagagcuc

SEQ ID NO: 208853 - RNA, 19 nt, Human
cccugggguccaaaaaccc

SEQ ID NO: 208854 - RNA, 25 nt, Human
ccgcuccucccccauaggccccucc

SEQ ID NO: 208855 - RNA, 22 nt, Human
ccucuguggcccugguggaggc

SEQ ID NO: 208856 - RNA, 23 nt, Human
ccugagcgccauucgcagucuug

SEQ ID NO: 208857 - RNA, 21 nt, Human
cucccugcucccugccugagc

SEQ ID NO: 208858 - RNA, 21 nt, Human
cugaaacaaaacccugaggcu

SEQ ID NO: 208859 - RNA, 18 nt, Human
cuggcaagucccagacau

SEQ ID NO: 208860 - RNA, 19 nt, Human
cuucaaguuugaggcccug

SEQ ID NO: 208861 - RNA, 23 nt, Human
gaaacaaaacccugaggcucagg

SEQ ID NO: 208862 - RNA, 24 nt, Human
gagcauggucugccagcgcccugg

SEQ ID NO: 208863 - RNA, 22 nt, Human
gagggguuggcacaggccaggc

SEQ ID NO: 208864 - RNA, 21 nt, Human
gcacgagcacuguuguccccc

SEQ ID NO: 208865 - RNA, 18 nt, Human
gccugggccccuagaagc

SEQ ID NO: 208866 - RNA, 23 nt, Human
ggagggguuggcacaggccaggc

SEQ ID NO: 208867 - RNA, 19 nt, Human
ggaguaaggggaagggacg

SEQ ID NO: 208868 - RNA, 24 nt, Human
ggcggggaguaaggggaagggacg

SEQ ID NO: 208869 - RNA, 20 nt, Human
gugacaucggaaaagcuuau

SEQ ID NO: 208870 - RNA, 20 nt, Human
gugcauuucccaagccccac

SEQ ID NO: 208871 - RNA, 18 nt, Human
gugccccccagacucaca

SEQ ID NO: 208872 - RNA, 23 nt, Human
guggugaggaggagggggaacac

SEQ ID NO: 208873 - RNA, 20 nt, Human
guuugaggcccuggguauuc

SEQ ID NO: 208874 - RNA, 23 nt, Human
uagaagccgacgucccgcuucug

SEQ ID NO: 208875 - RNA, 19 nt, Human
ucagguacaucaucugagg

SEQ ID NO: 208876 - RNA, 20 nt, Human
uccaaaaacccaaccuuccc

SEQ ID NO: 208877 - RNA, 19 nt, Human
uccccaggauccagaggcu

SEQ ID NO: 208878 - RNA, 19 nt, Human
ugagcgccauucgcagucu

SEQ ID NO: 208879 - RNA, 20 nt, Human
ugaggaggagggggaacacu

SEQ ID NO: 208880 - RNA, 23 nt, Human
ugaggcccuggguauucuccagg

SEQ ID NO: 208881 - RNA, 19 nt, Human
ugcugaggcuguggggcag

SEQ ID NO: 208882 - RNA, 25 nt, Human
ugcugaggcuguggggcagcuuuuc

SEQ ID NO: 208883 - RNA, 19 nt, Human
uggagagagcuccgcgggg

SEQ ID NO: 208884 - RNA, 20 nt, Human
ugggaacgugcaagccaaac

SEQ ID NO: 208885 - RNA, 18 nt, Human
uucccaagccccaccugc

SEQ ID NO: 208886 - RNA, 23 nt, Human
uugguacaggacaccggagaagg

SEQ ID NO: 208887 - RNA, 21 nt, Human
aaaaaaagcgggggggaaugc

SEQ ID NO: 208888 - RNA, 22 nt, Human
aaaaaagcccugguuucaaauu

SEQ ID NO: 208889 - RNA, 23 nt, Human
aaaacuuucuccagagacgccag

SEQ ID NO: 208890 - RNA, 20 nt, Human
aaauacauauauuucauaag

SEQ ID NO: 208891 - RNA, 20 nt, Human
aaauauuagagauuucaccu

SEQ ID NO: 208892 - RNA, 23 nt, Human
aauggagagccucucaagaaaaa

SEQ ID NO: 208893 - RNA, 19 nt, Human
acccaaaaaaaaaaaaaag

SEQ ID NO: 208894 - RNA, 18 nt, Human
agagagcauaccucuuuc

SEQ ID NO: 208895 - RNA, 22 nt, Human
aggcaaagucaaaaaaaaaaaa

SEQ ID NO: 208896 - RNA, 24 nt, Human
augauaauuggaagauuuugauac

SEQ ID NO: 208897 - RNA, 26 nt, Human
caaaaaaaaaaaaaagcccugguuuc

SEQ ID NO: 208898 - RNA, 22 nt, Human
caccgcccagcccgugcgcucc

SEQ ID NO: 208899 - RNA, 23 nt, Human
caccgcccagcccgugcgcuccg

SEQ ID NO: 208900 - RNA, 19 nt, Human
cagcccgugcgcuccggcg

SEQ ID NO: 208901 - RNA, 23 nt, Human
caucacccaaaaaaaaaaaaaag

SEQ ID NO: 208902 - RNA, 27 nt, Human
caucacccaaaaaaaaaaaaaagcccu

SEQ ID NO: 208903 - RNA, 28 nt, Human
cauuuuauuacaccuccugauuuucacu

SEQ ID NO: 208904 - RNA, 24 nt, Human
cccgugcgcuccggcgccauggcc

SEQ ID NO: 208905 - RNA, 19 nt, Human
ccgccgcccgucagcgacc

SEQ ID NO: 208906 - RNA, 18 nt, Human
ccgcugccuccagaccgc

SEQ ID NO: 208907 - RNA, 23 nt, Human
ccgcugccuccagaccgccgccc

SEQ ID NO: 208908 - RNA, 22 nt, Human
ccggcgccauggccgcugccuc

SEQ ID NO: 208909 - RNA, 22 nt, Human
ccgugcgcuccggcgccauggc

SEQ ID NO: 208910 - RNA, 21 nt, Human
cggaagcucuggcucuccaag

SEQ ID NO: 208911 - RNA, 19 nt, Human
cggcgccauggccgcugcc

SEQ ID NO: 208912 - RNA, 24 nt, Human
cuccaaggcaaagucaaaaaaaaa

SEQ ID NO: 208913 - RNA, 19 nt, Human
cuccagagacgccagcucc

SEQ ID NO: 208914 - RNA, 23 nt, Human
cucuggcucuccaaggcaaaguc

SEQ ID NO: 208915 - RNA, 26 nt, Human
gaaaaacuuucuccagagacgccagg

SEQ ID NO: 208916 - RNA, 20 nt, Human
gaaaaagagcuaugcaguca

SEQ ID NO: 208917 - RNA, 19 nt, Human
gaaaaugcggaagcucugg

SEQ ID NO: 208918 - RNA, 19 nt, Human
gaccgccgcccgucagcga

SEQ ID NO: 208919 - RNA, 22 nt, Human
gcaaagucaaaaaaaaaaaaaa

SEQ ID NO: 208920 - RNA, 24 nt, Human
gcaaagucaaaaaaaaaaaaaagc

SEQ ID NO: 208921 - RNA, 19 nt, Human
gcccugguuucaaauucau

SEQ ID NO: 208922 - RNA, 23 nt, Human
gcucuccaaggcaaagucaaaaa

SEQ ID NO: 208923 - RNA, 19 nt, Human
uaagagagcauaccucuuu

SEQ ID NO: 208924 - RNA, 28 nt, Human
uacaucacccaaaaaaaaaaaaaagccc

SEQ ID NO: 208925 - RNA, 23 nt, Human
uaugaaaaaaagaagucuguauc

SEQ ID NO: 208926 - RNA, 22 nt, Human
uauuuugguggcggggaguugg

SEQ ID NO: 208927 - RNA, 26 nt, Human
ucaaaaaaaaaaaaaagcggggggga

SEQ ID NO: 208928 - RNA, 24 nt, Human
ucaaaauggagagccucucaagaa

SEQ ID NO: 208929 - RNA, 20 nt, Human
ucacccaaaaaaaaaaaaaa

SEQ ID NO: 208930 - RNA, 20 nt, Human
ucacccaaaaaaaaaaaaaa

SEQ ID NO: 208931 - RNA, 24 nt, Human
ucacccaaaaaaaaaaaaaagccc

SEQ ID NO: 208932 - RNA, 23 nt, Human
uccaaggcaaagucaaaaaaaaa

SEQ ID NO: 208933 - RNA, 19 nt, Human
ucuguaucaucugcuucca

SEQ ID NO: 208934 - RNA, 22 nt, Human
ugauuaugaaaaaaagaagucu

SEQ ID NO: 208935 - RNA, 23 nt, Human
uggagagccucucaagaaaaaga

SEQ ID NO: 208936 - RNA, 20 nt, Human
uggccgcugccuccagaccg

SEQ ID NO: 208937 - RNA, 21 nt, Human
uucaggugagcaugauaauug

SEQ ID NO: 208938 - RNA, 23 nt, Human
uucauaagguucaguuacaaaau

SEQ ID NO: 208939 - RNA, 22 nt, Human
uucuucugaaaaacuuucucca

SEQ ID NO: 208940 - RNA, 21 nt, Human
uuggaagauuuugauacuuag

SEQ ID NO: 208941 - RNA, 23 nt, Human
auugcaccccaguccauguggga

SEQ ID NO: 208942 - RNA, 22 nt, Human
cauugcaccccaguccaugugg

SEQ ID NO: 208943 - RNA, 20 nt, Human
ccauugcaccccaguccauc

SEQ ID NO: 208944 - RNA, 24 nt, Human
ccauugcaccccaguccauguggc

SEQ ID NO: 208945 - RNA, 24 nt, Human
ccauugcaccccaguccauguggg

SEQ ID NO: 208946 - RNA, 18 nt, Human
cccauugcaccccagucc

SEQ ID NO: 208947 - RNA, 24 nt, Human
ccccugggauccugcagcuccagg

SEQ ID NO: 208948 - RNA, 19 nt, Human
ccuagagaguggugcccug

SEQ ID NO: 208949 - RNA, 23 nt, Human
cugggauccugcagcuccaggcc

SEQ ID NO: 208950 - RNA, 24 nt, Human
gauccugcagcuccaggccuuugg

SEQ ID NO: 208951 - RNA, 21 nt, Human
gcagcagcugucccauugcac

SEQ ID NO: 208952 - RNA, 21 nt, Human
ggauccugcagcuccaggccu

SEQ ID NO: 208953 - RNA, 20 nt, Human
uagagaguggugcccugguc

SEQ ID NO: 208954 - RNA, 21 nt, Human
ucagagguccuuguggccuga

SEQ ID NO: 208955 - RNA, 23 nt, Human
uccccugggauccugcagcucca

SEQ ID NO: 208956 - RNA, 24 nt, Human
uccccugggauccugcagcuccag

SEQ ID NO: 208957 - RNA, 18 nt, Human
ucccuagagaguggugcc

SEQ ID NO: 208958 - RNA, 23 nt, Human
ucccuagagaguggugcccuggu

SEQ ID NO: 208959 - RNA, 25 nt, Human
ucccuagagaguggugcccuggucc

SEQ ID NO: 208960 - RNA, 21 nt, Human
ucgcuggcagcagcuguccca

SEQ ID NO: 208961 - RNA, 25 nt, Human
ugcccuggucccucucgcuggcagc

SEQ ID NO: 208962 - RNA, 22 nt, Human
ugggauccugcagcuccaggcc

SEQ ID NO: 208963 - RNA, 25 nt, Human
ugggauccugcagcuccaggccuuu

SEQ ID NO: 208964 - RNA, 20 nt, Human
uggggucggggcugggaacc

SEQ ID NO: 208965 - RNA, 21 nt, Human
uuccccugggauccugcagcu

SEQ ID NO: 208966 - RNA, 25 nt, Human
uuccccugggauccugcagcuccag

SEQ ID NO: 208967 - RNA, 21 nt, Human
agagcaagagagaggagagga

SEQ ID NO: 208968 - RNA, 24 nt, Human
agagcucucaacucccagaauccc

SEQ ID NO: 208969 - RNA, 23 nt, Human
aggaacagcagauggggcugacu

SEQ ID NO: 208970 - RNA, 24 nt, Human
caacucccagaauccccuuuaccc

SEQ ID NO: 208971 - RNA, 20 nt, Human
cagugaggaguuacaggggu

SEQ ID NO: 208972 - RNA, 20 nt, Human
cccagaauccccuuuacccu

SEQ ID NO: 208973 - RNA, 20 nt, Human
cucugagagcaagagagagg

SEQ ID NO: 208974 - RNA, 23 nt, Human
cucuucaggaaacaucucacccu

SEQ ID NO: 208975 - RNA, 20 nt, Human
gggaaccucucuucaggaaa

SEQ ID NO: 208976 - RNA, 20 nt, Human
gggguggggaaccucucuuc

SEQ ID NO: 208977 - RNA, 24 nt, Human
ggugcuggcugugugcucugaguc

SEQ ID NO: 208978 - RNA, 23 nt, Human
gucuugaagaauuuuucuccuca

SEQ ID NO: 208979 - RNA, 19 nt, Human
uacagugaggaguuacagg

SEQ ID NO: 208980 - RNA, 18 nt, Human
ucccagaauccccuuuac

SEQ ID NO: 208981 - RNA, 24 nt, Human
ucucaacucccagaauccccuuua

SEQ ID NO: 208982 - RNA, 19 nt, Human
ugcuggcugugugcucuga

SEQ ID NO: 208983 - RNA, 18 nt, Human
uggcagagcucucaacuc

SEQ ID NO: 208984 - RNA, 18 nt, Human
ccaaucacagagaaaggg

SEQ ID NO: 208985 - RNA, 21 nt, Human
ccguggccaacauccgcuggg

SEQ ID NO: 208986 - RNA, 19 nt, Human
cggcagccuccaggagaca

SEQ ID NO: 208987 - RNA, 25 nt, Human
cguggccaacauccgcuggggcauc

SEQ ID NO: 208988 - RNA, 23 nt, Human
cucccagcuccuaaucucucauu

SEQ ID NO: 208989 - RNA, 19 nt, Human
gagccucagcuccuccgug

SEQ ID NO: 208990 - RNA, 20 nt, Human
gagccucagcuccuccgugg

SEQ ID NO: 208991 - RNA, 23 nt, Human
guggccaacauccgcuggggcau

SEQ ID NO: 208992 - RNA, 24 nt, Human
uccguggccaacauccgcuggggc

SEQ ID NO: 208993 - RNA, 21 nt, Human
ucucccagcuccuaaucucuc

SEQ ID NO: 208994 - RNA, 19 nt, Human
uuccucuucucccagcucc

SEQ ID NO: 208995 - RNA, 22 nt, Human
uccuggaguuggauuuucagug

SEQ ID NO: 208996 - RNA, 24 nt, Human
uggaguuggauuuucagugacuuc

SEQ ID NO: 208997 - RNA, 21 nt, Human
uguagccaguugucuuuucag

SEQ ID NO: 208998 - RNA, 21 nt, Human
aaggaguggggaaggggaggc

SEQ ID NO: 208999 - RNA, 21 nt, Human
agaggagggcuuggagcuggg

SEQ ID NO: 209000 - RNA, 18 nt, Human
agagggaggggcuuggga

SEQ ID NO: 209001 - RNA, 21 nt, Human
agaggguguccaggcaaccag

SEQ ID NO: 209002 - RNA, 19 nt, Human
agaguggacagagggagag

SEQ ID NO: 209003 - RNA, 21 nt, Human
aggagggcuuggagcugggcc

SEQ ID NO: 209004 - RNA, 19 nt, Human
aggccagagggaggggcuu

SEQ ID NO: 209005 - RNA, 20 nt, Human
aggcgugggugcgccgagcg

SEQ ID NO: 209006 - RNA, 19 nt, Human
caagaacagaaggccagag

SEQ ID NO: 209007 - RNA, 20 nt, Human
caagaacagaaggccagagg

SEQ ID NO: 209008 - RNA, 20 nt, Human
ccuaagagaucaagaacaga

SEQ ID NO: 209009 - RNA, 22 nt, Human
ccugcaagaccugaggaguaag

SEQ ID NO: 209010 - RNA, 22 nt, Human
cgugggugcgccgagcgagcug

SEQ ID NO: 209011 - RNA, 18 nt, Human
gaguggacagagggagag

SEQ ID NO: 209012 - RNA, 20 nt, Human
gcucuggggaggcuccgggg

SEQ ID NO: 209013 - RNA, 23 nt, Human
ggaagacagucgacaccugcaag

SEQ ID NO: 209014 - RNA, 20 nt, Human
ggaaggaguggggaagggga

SEQ ID NO: 209015 - RNA, 25 nt, Human
ggacagagggagaggguugaaagau

SEQ ID NO: 209016 - RNA, 21 nt, Human
ggagggaaggaguggggaagg

SEQ ID NO: 209017 - RNA, 21 nt, Human
gggaaggaguggggaagggga

SEQ ID NO: 209018 - RNA, 23 nt, Human
ggguguccaggcaaccagaggag

SEQ ID NO: 209019 - RNA, 22 nt, Human
uaaaggaagaguggacagaggg

SEQ ID NO: 209020 - RNA, 23 nt, Human
ugcccagguugagggcaggaagc

SEQ ID NO: 209021 - RNA, 18 nt, Human
uggggggccggaagggug

SEQ ID NO: 209022 - RNA, 24 nt, Human
uggggggccggaaggguggggggc

SEQ ID NO: 209023 - RNA, 24 nt, Human
uuccaggacaggaaauggccuccc

SEQ ID NO: 209024 - RNA, 22 nt, Human
uucuggggggccggaagggugg

SEQ ID NO: 209025 - RNA, 18 nt, Human
uuuuuuugcuuuuuauaa

SEQ ID NO: 209026 - RNA, 20 nt, Human
uuuuuuuuuuuuuugcuuuu

SEQ ID NO: 209027 - RNA, 21 nt, Human
uuuuuuuuuuuuuuugcuuuu

SEQ ID NO: 209028 - RNA, 19 nt, Human
acuacaccacgacgggggu

SEQ ID NO: 209029 - RNA, 22 nt, Human
aggcagaguaugaaaacucgua

SEQ ID NO: 209030 - RNA, 27 nt, Human
aggcuucuggacccaguacagcaguuc

SEQ ID NO: 209031 - RNA, 21 nt, Human
aggggucaacaaccauccccu

SEQ ID NO: 209032 - RNA, 26 nt, Human
cagcucaggucccuuccagggccagc

SEQ ID NO: 209033 - RNA, 24 nt, Human
caggucccuuccagggccagcucc

SEQ ID NO: 209034 - RNA, 20 nt, Human
guacagcaguuccaggaggg

SEQ ID NO: 209035 - RNA, 24 nt, Human
ucaacaaccauccccucgccagcu

SEQ ID NO: 209036 - RNA, 20 nt, Human
ucaggucccuuccagggcca

SEQ ID NO: 209037 - RNA, 24 nt, Human
ucaggucccuuccagggccagcuc

SEQ ID NO: 209038 - RNA, 23 nt, Human
uccagggccagcucccuccuggc

SEQ ID NO: 209039 - RNA, 24 nt, Human
uccagggccagcucccuccuggcu

SEQ ID NO: 209040 - RNA, 18 nt, Human
ucccccagcucagguccc

SEQ ID NO: 209041 - RNA, 19 nt, Human
ucccccagcucaggucccu

SEQ ID NO: 209042 - RNA, 18 nt, Human
ugaguugggagucgccgu

SEQ ID NO: 209043 - RNA, 20 nt, Human
ugaguugggagucgccgugc

SEQ ID NO: 209044 - RNA, 22 nt, Human
ugcagcucuaugacuacaccac

SEQ ID NO: 209045 - RNA, 19 nt, Human
ugccagccucaaggucucu

SEQ ID NO: 209046 - RNA, 20 nt, Human
uucauggcagaggagauggc

SEQ ID NO: 209047 - RNA, 24 nt, Human
uucauggcagaggagauggcagga

SEQ ID NO: 209048 - RNA, 18 nt, Human
uugcccagucaagucuca

SEQ ID NO: 209049 - RNA, 23 nt, Human
aaaaaggcaacaccuguggagga

SEQ ID NO: 209050 - RNA, 18 nt, Human
aaacaggcaagcuguccc

SEQ ID NO: 209051 - RNA, 18 nt, Human
aaagagcuagcugacacc

SEQ ID NO: 209052 - RNA, 21 nt, Human
aaaggucccaaacaguuccag

SEQ ID NO: 209053 - RNA, 24 nt, Human
aaaguucaaagcagucugcaucua

SEQ ID NO: 209054 - RNA, 22 nt, Human
aaccaugagaaaggaaggguca

SEQ ID NO: 209055 - RNA, 20 nt, Human
aagaaugggaaccugcccac

SEQ ID NO: 209056 - RNA, 22 nt, Human
aagacucccacccauagcacaa

SEQ ID NO: 209057 - RNA, 20 nt, Human
aagcaagucuguguguccuc

SEQ ID NO: 209058 - RNA, 19 nt, Human
aagcagcagaucugugcca

SEQ ID NO: 209059 - RNA, 20 nt, Human
aagcagcagaucugugccau

SEQ ID NO: 209060 - RNA, 24 nt, Human
aagccaaacaggcacuugccuaaa

SEQ ID NO: 209061 - RNA, 23 nt, Human
aagcugaggagccuggcugagag

SEQ ID NO: 209062 - RNA, 24 nt, Human
aagcugaggagccuggcugagagg

SEQ ID NO: 209063 - RNA, 22 nt, Human
aagcuuaaaguucucccuccag

SEQ ID NO: 209064 - RNA, 24 nt, Human
aaggucccaaacaguuccagaccc

SEQ ID NO: 209065 - RNA, 18 nt, Human
accaaggcuucucacagc

SEQ ID NO: 209066 - RNA, 18 nt, Human
acccagagcccucuacuu

SEQ ID NO: 209067 - RNA, 26 nt, Human
acccgucccaccccacccucaggggc

SEQ ID NO: 209068 - RNA, 23 nt, Human
agaaaggagcgggcucggaccga

SEQ ID NO: 209069 - RNA, 22 nt, Human
agaaauauaacccuuuaaaagc

SEQ ID NO: 209070 - RNA, 21 nt, Human
agaagcaaaagaaccaggucc

SEQ ID NO: 209071 - RNA, 22 nt, Human
agaaugugggcaccugcaccca

SEQ ID NO: 209072 - RNA, 19 nt, Human
agacuggaaagcccccaag

SEQ ID NO: 209073 - RNA, 19 nt, Human
agagaaaccaauguccaag

SEQ ID NO: 209074 - RNA, 21 nt, Human
agagugggcguggaggggccc

SEQ ID NO: 209075 - RNA, 21 nt, Human
agaucucaaagaucuagacaa

SEQ ID NO: 209076 - RNA, 21 nt, Human
agaucugugccauuaagggcu

SEQ ID NO: 209077 - RNA, 18 nt, Human
agccacagaucucaaaga

SEQ ID NO: 209078 - RNA, 18 nt, Human
agcuagcugacacccaca

SEQ ID NO: 209079 - RNA, 21 nt, Human
aggaagggcauggggcaaaag

SEQ ID NO: 209080 - RNA, 23 nt, Human
aggagugagcgcgugagcagcgg

SEQ ID NO: 209081 - RNA, 19 nt, Human
agggaguggccuucuuagg

SEQ ID NO: 209082 - RNA, 19 nt, Human
augcggcagccucuccucc

SEQ ID NO: 209083 - RNA, 21 nt, Human
auuuuaagucagcacaaacau

SEQ ID NO: 209084 - RNA, 22 nt, Human
caaaagaaccagguccuuccca

SEQ ID NO: 209085 - RNA, 24 nt, Human
caaagcagucugcaucuagggaac

SEQ ID NO: 209086 - RNA, 19 nt, Human
caagaaaugggcacccaga

SEQ ID NO: 209087 - RNA, 24 nt, Human
caagggaagagugggcguggaggg

SEQ ID NO: 209088 - RNA, 27 nt, Human
cacagcauaagacuggaaagcccccaa

SEQ ID NO: 209089 - RNA, 21 nt, Human
caccacccgucccaccccacc

SEQ ID NO: 209090 - RNA, 21 nt, Human
caccagaggcccugaggccug

SEQ ID NO: 209091 - RNA, 25 nt, Human
cacccagagcccucuacuucugggg

SEQ ID NO: 209092 - RNA, 18 nt, Human
cacccagggcccauacca

SEQ ID NO: 209093 - RNA, 23 nt, Human
cacccagggcccauaccacgucc

SEQ ID NO: 209094 - RNA, 21 nt, Human
caccccaacccaugaucccau

SEQ ID NO: 209095 - RNA, 25 nt, Human
cacccccucccccgcacgcaagguc

SEQ ID NO: 209096 - RNA, 19 nt, Human
cacccgucccaccccaccc

SEQ ID NO: 209097 - RNA, 21 nt, Human
cacuaccauuaaauaacaggg

SEQ ID NO: 209098 - RNA, 18 nt, Human
cacuccucaagcccucac

SEQ ID NO: 209099 - RNA, 20 nt, Human
cagacaaagcucucauuagc

SEQ ID NO: 209100 - RNA, 22 nt, Human
cagcacagcugccgaaacuuga

SEQ ID NO: 209101 - RNA, 22 nt, Human
cagcagcagcacagcugccgaa

SEQ ID NO: 209102 - RNA, 23 nt, Human
cagcauaagacuggaaagccccc

SEQ ID NO: 209103 - RNA, 25 nt, Human
cagcauaagacuggaaagcccccaa

SEQ ID NO: 209104 - RNA, 20 nt, Human
cagccaaaaugacuaaaacc

SEQ ID NO: 209105 - RNA, 24 nt, Human
caggacauccccaaaaggucccaa

SEQ ID NO: 209106 - RNA, 22 nt, Human
caggguucuccauuauuuuuuc

SEQ ID NO: 209107 - RNA, 24 nt, Human
ccaaagaaugggaaccugcccacc

SEQ ID NO: 209108 - RNA, 19 nt, Human
ccaaagagaaauauaaccc

SEQ ID NO: 209109 - RNA, 23 nt, Human
ccaagggcacccugucccugcug

SEQ ID NO: 209110 - RNA, 19 nt, Human
ccacagaaauggugcuggg

SEQ ID NO: 209111 - RNA, 19 nt, Human
ccagagccaccagaggccc

SEQ ID NO: 209112 - RNA, 27 nt, Human
ccaggcccagggccaagagcgccuccu

SEQ ID NO: 209113 - RNA, 24 nt, Human
ccagguccuucccaggguucucca

SEQ ID NO: 209114 - RNA, 25 nt, Human
cccaaagaaugggaaccugcccacc

SEQ ID NO: 209115 - RNA, 22 nt, Human
cccaaguuggggcuaagaaggc

SEQ ID NO: 209116 - RNA, 20 nt, Human
cccaccccacccucaggggc

SEQ ID NO: 209117 - RNA, 21 nt, Human
cccagggaagcacuauagaga

SEQ ID NO: 209118 - RNA, 22 nt, Human
ccccaaagaaugggaaccugcc

SEQ ID NO: 209119 - RNA, 21 nt, Human
cccccauggcugaagccacag

SEQ ID NO: 209120 - RNA, 21 nt, Human
ccccuuccucuuuuaagcacc

SEQ ID NO: 209121 - RNA, 22 nt, Human
cccucugccauaaguuggccuc

SEQ ID NO: 209122 - RNA, 21 nt, Human
ccucacaaagggcugcugccu

SEQ ID NO: 209123 - RNA, 28 nt, Human
ccucccagccccaaagaaugggaaccug

SEQ ID NO: 209124 - RNA, 22 nt, Human
ccucugaguggcugugcagcuc

SEQ ID NO: 209125 - RNA, 19 nt, Human
ccugagggcaccuauuaaa

SEQ ID NO: 209126 - RNA, 18 nt, Human
ccugccugcaguggagag

SEQ ID NO: 209127 - RNA, 27 nt, Human
ccugcuaggacaccgacuaucccccaa

SEQ ID NO: 209128 - RNA, 21 nt, Human
ccuucggacucuuugccuccu

SEQ ID NO: 209129 - RNA, 25 nt, Human
cgagcacccccucccccgcacgcaa

SEQ ID NO: 209130 - RNA, 22 nt, Human
cuagcugacacccacagcauaa

SEQ ID NO: 209131 - RNA, 24 nt, Human
cuaggcccacagaaauggugcugg

SEQ ID NO: 209132 - RNA, 20 nt, Human
cuccagguguccaaagugcu

SEQ ID NO: 209133 - RNA, 22 nt, Human
cucugccauaaguuggccucag

SEQ ID NO: 209134 - RNA, 19 nt, Human
cugaucagacaaagcucuc

SEQ ID NO: 209135 - RNA, 19 nt, Human
cugauggacccaggacuga

SEQ ID NO: 209136 - RNA, 20 nt, Human
cugucccugcugccaagccc

SEQ ID NO: 209137 - RNA, 20 nt, Human
cuuuguucccaaguuggggc

SEQ ID NO: 209138 - RNA, 22 nt, Human
gaaccugcccaccaguggcacc

SEQ ID NO: 209139 - RNA, 24 nt, Human
gaagcagcagaucugugccauuaa

SEQ ID NO: 209140 - RNA, 19 nt, Human
gagcagcccauccagcagc

SEQ ID NO: 209141 - RNA, 22 nt, Human
gagccaccagaggcccugaggc

SEQ ID NO: 209142 - RNA, 23 nt, Human
gaggagccuggcugagagggcgu

SEQ ID NO: 209143 - RNA, 23 nt, Human
gcacccccucccccgcacgcaag

SEQ ID NO: 209144 - RNA, 22 nt, Human
gcagaaugcggcagccucuccu

SEQ ID NO: 209145 - RNA, 24 nt, Human
gcagaaugugggcaccugcaccca

SEQ ID NO: 209146 - RNA, 23 nt, Human
gcagcaaaucccaggccuuccca

SEQ ID NO: 209147 - RNA, 19 nt, Human
gcagcccauccagcagcag

SEQ ID NO: 209148 - RNA, 18 nt, Human
gcccagggaagcacuaua

SEQ ID NO: 209149 - RNA, 21 nt, Human
gcuuggcccagggaagcacua

SEQ ID NO: 209150 - RNA, 23 nt, Human
ggaaagggaccucugaguggcug

SEQ ID NO: 209151 - RNA, 22 nt, Human
ggacaccgacuaucccccacuu

SEQ ID NO: 209152 - RNA, 21 nt, Human
ggacagggcucucuggcaugg

SEQ ID NO: 209153 - RNA, 22 nt, Human
ggacccaggacugaucagacaa

SEQ ID NO: 209154 - RNA, 21 nt, Human
ggagggaguggccuucuuagg

SEQ ID NO: 209155 - RNA, 20 nt, Human
ggagggguggggucccuggc

SEQ ID NO: 209156 - RNA, 21 nt, Human
ggcacccagagcccucuacuu

SEQ ID NO: 209157 - RNA, 18 nt, Human
ggcauggggcaaaagcuc

SEQ ID NO: 209158 - RNA, 18 nt, Human
ggccuggggaaaugagac

SEQ ID NO: 209159 - RNA, 24 nt, Human
ggcuggugucagcuuggcccaggg

SEQ ID NO: 209160 - RNA, 22 nt, Human
gggaagcacuauagagagggcu

SEQ ID NO: 209161 - RNA, 22 nt, Human
gggagggaguggccuucuuagg

SEQ ID NO: 209162 - RNA, 19 nt, Human
gggcguggaggggcccugc

SEQ ID NO: 209163 - RNA, 24 nt, Human
gggcuuacaguuccccgagaagca

SEQ ID NO: 209164 - RNA, 20 nt, Human
gguucugggggcccagaaca

SEQ ID NO: 209165 - RNA, 20 nt, Human
gucccaaacaguuccagacc

SEQ ID NO: 209166 - RNA, 21 nt, Human
uaaccaaauuguacagcuuua

SEQ ID NO: 209167 - RNA, 22 nt, Human
uacagaaaggagcgggcucgga

SEQ ID NO: 209168 - RNA, 23 nt, Human
uacaggagagaagacuguaauuu

SEQ ID NO: 209169 - RNA, 21 nt, Human
uaccuuuaaagccaaacaggc

SEQ ID NO: 209170 - RNA, 21 nt, Human
uaggacaggugccaaccuguc

SEQ ID NO: 209171 - RNA, 20 nt, Human
uauaacccuuuaaaagcaag

SEQ ID NO: 209172 - RNA, 18 nt, Human
ucacaaagggcugcugcc

SEQ ID NO: 209173 - RNA, 20 nt, Human
ucaccugagcaccccaaccc

SEQ ID NO: 209174 - RNA, 18 nt, Human
ucagcagggcccugcagc

SEQ ID NO: 209175 - RNA, 19 nt, Human
ucaggagugagcgcgugag

SEQ ID NO: 209176 - RNA, 19 nt, Human
ucaguggggugggagggag

SEQ ID NO: 209177 - RNA, 18 nt, Human
uccaggcuacagcuaaaa

SEQ ID NO: 209178 - RNA, 22 nt, Human
ucccaccccacccucaggggcu

SEQ ID NO: 209179 - RNA, 22 nt, Human
ucccugcugccaagcccaccag

SEQ ID NO: 209180 - RNA, 20 nt, Human
ucucauuagcagaauguggg

SEQ ID NO: 209181 - RNA, 24 nt, Human
ucuccagguguccaaagugcuggu

SEQ ID NO: 209182 - RNA, 23 nt, Human
ugaggaaagcaugaaggaaugag

SEQ ID NO: 209183 - RNA, 21 nt, Human
ugaggagcagcagaaugcggc

SEQ ID NO: 209184 - RNA, 18 nt, Human
ugaggagccuggcugaga

SEQ ID NO: 209185 - RNA, 22 nt, Human
ugagggccauauucuaggccca

SEQ ID NO: 209186 - RNA, 26 nt, Human
ugaucagacaaagcucucauuagcag

SEQ ID NO: 209187 - RNA, 24 nt, Human
ugcagcuuugcucgcugugaggag

SEQ ID NO: 209188 - RNA, 21 nt, Human
ugcagucagcccuguggugcc

SEQ ID NO: 209189 - RNA, 18 nt, Human
ugccaggccccuugaugg

SEQ ID NO: 209190 - RNA, 26 nt, Human
uggaaagcccccaagaaaugggcacc

SEQ ID NO: 209191 - RNA, 20 nt, Human
uggaaagggaccucugagug

SEQ ID NO: 209192 - RNA, 22 nt, Human
uggaaagggaccucugaguggc

SEQ ID NO: 209193 - RNA, 21 nt, Human
uggaggaagggcauggggcaa

SEQ ID NO: 209194 - RNA, 22 nt, Human
uggcagggacagggcucucugg

SEQ ID NO: 209195 - RNA, 21 nt, Human
uggcauggggcagggagaaag

SEQ ID NO: 209196 - RNA, 22 nt, Human
uggccaucuguuagaagcagca

SEQ ID NO: 209197 - RNA, 18 nt, Human
ugggaggagcagcccauc

SEQ ID NO: 209198 - RNA, 20 nt, Human
uggggaaaugagacccugag

SEQ ID NO: 209199 - RNA, 18 nt, Human
ugggggcccagaacaggg

SEQ ID NO: 209200 - RNA, 19 nt, Human
uggggugggagggaguggc

SEQ ID NO: 209201 - RNA, 21 nt, Human
ugggugcagcuuugcucgcug

SEQ ID NO: 209202 - RNA, 24 nt, Human
ugucacgugccaacaggugccugg

SEQ ID NO: 209203 - RNA, 18 nt, Human
uguggaggaagggcaugg

SEQ ID NO: 209204 - RNA, 21 nt, Human
uuaccaaggcuucucacagcu

SEQ ID NO: 209205 - RNA, 20 nt, Human
uucacuuuauauauauggau

SEQ ID NO: 209206 - RNA, 20 nt, Human
uuuaaggaccaggaaaugag

SEQ ID NO: 209207 - RNA, 20 nt, Human
uuucaggaauaggacaggug

SEQ ID NO: 209208 - RNA, 26 nt, Human
aagaaagagguaucaucaucaaaugu

SEQ ID NO: 209209 - RNA, 25 nt, Human
agggaagaaagagguaucaucauca

SEQ ID NO: 209210 - RNA, 18 nt, Human
caggagccaccaccuggc

SEQ ID NO: 209211 - RNA, 20 nt, Human
ccaccaccuggccauacugg

SEQ ID NO: 209212 - RNA, 20 nt, Human
ccacugcacaucagcuccag

SEQ ID NO: 209213 - RNA, 21 nt, Human
ccacugcacaucagcuccagg

SEQ ID NO: 209214 - RNA, 21 nt, Human
ccacugcacaucagcuccagg

SEQ ID NO: 209215 - RNA, 22 nt, Human
ccacugcacaucagcuccaggc

SEQ ID NO: 209216 - RNA, 21 nt, Human
ccagcggccaguacgucuucu

SEQ ID NO: 209217 - RNA, 25 nt, Human
cgcagcacagcugugccugggacag

SEQ ID NO: 209218 - RNA, 21 nt, Human
cuccaggcugcaggagccacc

SEQ ID NO: 209219 - RNA, 18 nt, Human
cuccuuggcuuguucugg

SEQ ID NO: 209220 - RNA, 18 nt, Human
cugcaggagccaccaccu

SEQ ID NO: 209221 - RNA, 21 nt, Human
cuggccauacuggcuuccucc

SEQ ID NO: 209222 - RNA, 24 nt, Human
uaguuaaaauaaauaaagacucca

SEQ ID NO: 209223 - RNA, 22 nt, Human
uccagcggccaguacgucuucu

SEQ ID NO: 209224 - RNA, 24 nt, Human
ucucaaguacuggagcagcuagca

SEQ ID NO: 209225 - RNA, 21 nt, Human
uggaauguugaagaaauaguu

SEQ ID NO: 209226 - RNA, 22 nt, Human
uggcggggagaugggggaggca

SEQ ID NO: 209227 - RNA, 19 nt, Human
uggcucaggcuggggcuca

SEQ ID NO: 209228 - RNA, 20 nt, Human
ugggacuggcucaggcuggg

SEQ ID NO: 209229 - RNA, 23 nt, Human
uggggcucacagaggccacugca

SEQ ID NO: 209230 - RNA, 22 nt, Human
uguauuagaacauauacacuca

SEQ ID NO: 209231 - RNA, 22 nt, Human
uuggcuccuuggcuuguucugg

SEQ ID NO: 209232 - RNA, 19 nt, Human
aaagcagagaguagagcag

SEQ ID NO: 209233 - RNA, 19 nt, Human
aacucacucuucaaggcug

SEQ ID NO: 209234 - RNA, 19 nt, Human
aagcagagaguagagcagg

SEQ ID NO: 209235 - RNA, 21 nt, Human
aaguuuucugccucacagcuu

SEQ ID NO: 209236 - RNA, 22 nt, Human
aaucuugucucucagugcccac

SEQ ID NO: 209237 - RNA, 20 nt, Human
accuggugcaggaagggcuc

SEQ ID NO: 209238 - RNA, 22 nt, Human
acuggguuggcaaccaagcuga

SEQ ID NO: 209239 - RNA, 20 nt, Human
agaaagcagagaguagagca

SEQ ID NO: 209240 - RNA, 23 nt, Human
agaauccagauaagcccaggaag

SEQ ID NO: 209241 - RNA, 21 nt, Human
agaggcauucaugagcucugc

SEQ ID NO: 209242 - RNA, 18 nt, Human
agcaaugcuggccucuaa

SEQ ID NO: 209243 - RNA, 20 nt, Human
aggaaaaaaaagccuguaaa

SEQ ID NO: 209244 - RNA, 23 nt, Human
aggaaaaaaaagccuguaaaggg

SEQ ID NO: 209245 - RNA, 24 nt, Human
aggaaaaaaaagccuguaaaggga

SEQ ID NO: 209246 - RNA, 21 nt, Human
aggaagauaagaggcauucau

SEQ ID NO: 209247 - RNA, 20 nt, Human
aggcaaaaauggagaaucug

SEQ ID NO: 209248 - RNA, 21 nt, Human
aggcaaaaauggagaaucugg

SEQ ID NO: 209249 - RNA, 25 nt, Human
aggcaaaaauggagaaucugggguc

SEQ ID NO: 209250 - RNA, 20 nt, Human
auggcggcagaugguggugg

SEQ ID NO: 209251 - RNA, 23 nt, Human
caacaggucucuauuugagaucu

SEQ ID NO: 209252 - RNA, 23 nt, Human
cagcggcagggauucauagaacc

SEQ ID NO: 209253 - RNA, 26 nt, Human
cagcggcagggauucauagaaccucu

SEQ ID NO: 209254 - RNA, 29 nt, Human
cagcggcagggauucauagaaccuuaucu

SEQ ID NO: 209255 - RNA, 20 nt, Human
cagcgggguccucagagcuu

SEQ ID NO: 209256 - RNA, 18 nt, Human
caggcaauggcccguccc

SEQ ID NO: 209257 - RNA, 25 nt, Human
caguggucccuuuuuaugugcguuc

SEQ ID NO: 209258 - RNA, 22 nt, Human
caucacgcucaugugccccccg

SEQ ID NO: 209259 - RNA, 21 nt, Human
caugagcucaugaacucacuc

SEQ ID NO: 209260 - RNA, 20 nt, Human
ccacccccaaaauaaauaaa

SEQ ID NO: 209261 - RNA, 20 nt, Human
ccagagcucaugccugggcu

SEQ ID NO: 209262 - RNA, 22 nt, Human
ccccaaaauaaauaaauagaaa

SEQ ID NO: 209263 - RNA, 22 nt, Human
ccccacugcaagccgugucuca

SEQ ID NO: 209264 - RNA, 21 nt, Human
cccuagcaaccaacaggucuc

SEQ ID NO: 209265 - RNA, 23 nt, Human
cccuagcaaccaacaggucucua

SEQ ID NO: 209266 - RNA, 18 nt, Human
cccuccaguguacuccag

SEQ ID NO: 209267 - RNA, 24 nt, Human
ccguccuccagguucuucugacuc

SEQ ID NO: 209268 - RNA, 24 nt, Human
ccuaaaacuccgcuuaggaagaua

SEQ ID NO: 209269 - RNA, 26 nt, Human
ccuccaagaucguggggaguguaugg

SEQ ID NO: 209270 - RNA, 18 nt, Human
ccuccagguucuucugac

SEQ ID NO: 209271 - RNA, 22 nt, Human
ccuccuuuccacaggcaaaaau

SEQ ID NO: 209272 - RNA, 21 nt, Human
ccugugcugucuuuccagagg

SEQ ID NO: 209273 - RNA, 23 nt, Human
cgccgccgacucuguggagaccu

SEQ ID NO: 209274 - RNA, 25 nt, Human
cguccuccagguucuucugacuccc

SEQ ID NO: 209275 - RNA, 23 nt, Human
cuccagaaggugccacuuuaucc

SEQ ID NO: 209276 - RNA, 20 nt, Human
cuccccaacccacccccaaa

SEQ ID NO: 209277 - RNA, 19 nt, Human
cuguggggugaaccgcuuc

SEQ ID NO: 209278 - RNA, 19 nt, Human
cuguuuguucuuauuccau

SEQ ID NO: 209279 - RNA, 22 nt, Human
gaagaauccagauaagcccagg

SEQ ID NO: 209280 - RNA, 25 nt, Human
gaaggcagggcccaggaaucuuguc

SEQ ID NO: 209281 - RNA, 21 nt, Human
gaauggggaacuccaaagucu

SEQ ID NO: 209282 - RNA, 18 nt, Human
gagaaucuggggucuugc

SEQ ID NO: 209283 - RNA, 24 nt, Human
gauuuugggggaaaaaaaggaaaa

SEQ ID NO: 209284 - RNA, 21 nt, Human
gccagagcucaugccugggcu

SEQ ID NO: 209285 - RNA, 19 nt, Human
gcccaccauguacaggcau

SEQ ID NO: 209286 - RNA, 23 nt, Human
gcgggguccucagagcuuccucc

SEQ ID NO: 209287 - RNA, 19 nt, Human
gcgucugccauauggccac

SEQ ID NO: 209288 - RNA, 21 nt, Human
ggaaaaaaaagccuguaaagg

SEQ ID NO: 209289 - RNA, 21 nt, Human
ggaaaaaaaagccuguaaagg

SEQ ID NO: 209290 - RNA, 21 nt, Human
gggaacuccaaagucugcuaa

SEQ ID NO: 209291 - RNA, 19 nt, Human
ggggaguguauggaaggca

SEQ ID NO: 209292 - RNA, 19 nt, Human
gggggaaaaaaaggaaaaa

SEQ ID NO: 209293 - RNA, 19 nt, Human
ggggugaaccgcuucaugg

SEQ ID NO: 209294 - RNA, 19 nt, Human
gugcaggaagggcuccagc

SEQ ID NO: 209295 - RNA, 21 nt, Human
guggugguggggggucccugc

SEQ ID NO: 209296 - RNA, 21 nt, Human
uaacguaucucagugcuugac

SEQ ID NO: 209297 - RNA, 22 nt, Human
uaacuugggcugcccccuccag

SEQ ID NO: 209298 - RNA, 20 nt, Human
uacaaggagaaaaaccauga

SEQ ID NO: 209299 - RNA, 21 nt, Human
uacaaggagaaaaaccaugag

SEQ ID NO: 209300 - RNA, 19 nt, Human
uagaaagcagagaguagag

SEQ ID NO: 209301 - RNA, 21 nt, Human
uaucucagugcuugacucaag

SEQ ID NO: 209302 - RNA, 21 nt, Human
uauggccaccgccgccgacuc

SEQ ID NO: 209303 - RNA, 20 nt, Human
ucacuggguuggcaaccaag

SEQ ID NO: 209304 - RNA, 25 nt, Human
ucacuggguuggcaaccaagcugag

SEQ ID NO: 209305 - RNA, 18 nt, Human
ucagagcuuccuccaaga

SEQ ID NO: 209306 - RNA, 25 nt, Human
ucagagcuuccuccaagaucguggg

SEQ ID NO: 209307 - RNA, 20 nt, Human
ucagcgguccucaacuuucu

SEQ ID NO: 209308 - RNA, 20 nt, Human
ucaguggucccuuuuuaugg

SEQ ID NO: 209309 - RNA, 18 nt, Human
ucaugccugggcuuggcu

SEQ ID NO: 209310 - RNA, 22 nt, Human
ucucauggucagaauguggcag

SEQ ID NO: 209311 - RNA, 23 nt, Human
ucuccgauaagcagcauuagagc

SEQ ID NO: 209312 - RNA, 21 nt, Human
ucuccuucuuggccuuuauug

SEQ ID NO: 209313 - RNA, 23 nt, Human
ucucucagugcccaccauguaca

SEQ ID NO: 209314 - RNA, 25 nt, Human
ucucucagugcccaccauguacagg

SEQ ID NO: 209315 - RNA, 23 nt, Human
ucuguggagaccuugaagggcuc

SEQ ID NO: 209316 - RNA, 19 nt, Human
ugacuccccaacccacccc

SEQ ID NO: 209317 - RNA, 20 nt, Human
ugacuccccaacccaccccc

SEQ ID NO: 209318 - RNA, 22 nt, Human
ugagauggguagaucucuucug

SEQ ID NO: 209319 - RNA, 23 nt, Human
ugcaggaagggcuccagcugcac

SEQ ID NO: 209320 - RNA, 21 nt, Human
ugccauauauagagaugguuu

SEQ ID NO: 209321 - RNA, 22 nt, Human
ugcuucaagucaaguuuucugc

SEQ ID NO: 209322 - RNA, 20 nt, Human
uggaaggcagggcccaggaa

SEQ ID NO: 209323 - RNA, 22 nt, Human
uggcagaauggggaacuccaaa

SEQ ID NO: 209324 - RNA, 24 nt, Human
uggccucuaacuugggcugccccc

SEQ ID NO: 209325 - RNA, 20 nt, Human
uggcggcagauggugguggu

SEQ ID NO: 209326 - RNA, 19 nt, Human
ugggggaaaaaaaggaaaa

SEQ ID NO: 209327 - RNA, 22 nt, Human
ugggggaaaaaaaggaaaaaaa

SEQ ID NO: 209328 - RNA, 23 nt, Human
uggugcaggaagggcuccagcug

SEQ ID NO: 209329 - RNA, 18 nt, Human
uggugguggggggucccu

SEQ ID NO: 209330 - RNA, 20 nt, Human
uggugguggggggucccugc

SEQ ID NO: 209331 - RNA, 19 nt, Human
ugguggugguggggggucc

SEQ ID NO: 209332 - RNA, 22 nt, Human
ugguggugguggggggucccug

SEQ ID NO: 209333 - RNA, 23 nt, Human
ugguggugguggggggucccugc

SEQ ID NO: 209334 - RNA, 24 nt, Human
uguaaacauugccccugguuuccu

SEQ ID NO: 209335 - RNA, 22 nt, Human
ugucuggacuacccuagcaacc

SEQ ID NO: 209336 - RNA, 18 nt, Human
ugucuguggguucucagc

SEQ ID NO: 209337 - RNA, 19 nt, Human
ugugccccccgaccuggug

SEQ ID NO: 209338 - RNA, 21 nt, Human
uguggaaucaccuccagagcu

SEQ ID NO: 209339 - RNA, 22 nt, Human
uguuaauauagucugccauaua

SEQ ID NO: 209340 - RNA, 24 nt, Human
uucauagaaccucugcucccggga

SEQ ID NO: 209341 - RNA, 18 nt, Human
uuccagaggugcacugug

SEQ ID NO: 209342 - RNA, 18 nt, Human
uuuugggggaaaaaaagg

SEQ ID NO: 209343 - RNA, 18 nt, Human
cacagugcaccucagaau

SEQ ID NO: 209344 - RNA, 20 nt, Human
caccaacaaucgagucucca

SEQ ID NO: 209345 - RNA, 19 nt, Human
caccucagaaucaacccac

SEQ ID NO: 209346 - RNA, 19 nt, Human
cagaaucaacccacacugc

SEQ ID NO: 209347 - RNA, 20 nt, Human
cagaaucaacccacacugcu

SEQ ID NO: 209348 - RNA, 18 nt, Human
cagcaacaccgcagcgac

SEQ ID NO: 209349 - RNA, 25 nt, Human
cagcaacaccgcagcgacaagcucu

SEQ ID NO: 209350 - RNA, 23 nt, Human
ccaacagcaacaccgcagcgaca

SEQ ID NO: 209351 - RNA, 21 nt, Human
ccgcagcgacaagcucuuucc

SEQ ID NO: 209352 - RNA, 26 nt, Human
ccgcagcgacaagcucuuucccacag

SEQ ID NO: 209353 - RNA, 19 nt, Human
ccucagaaucaacccacac

SEQ ID NO: 209354 - RNA, 18 nt, Human
gagucuccaacagcaaca

SEQ ID NO: 209355 - RNA, 21 nt, Human
ucaccaacaaucgagucucca

SEQ ID NO: 209356 - RNA, 19 nt, Human
ucagaaucaacccacacug

SEQ ID NO: 209357 - RNA, 25 nt, Human
uccaacagcaacaccgcagcgacaa

SEQ ID NO: 209358 - RNA, 24 nt, Human
uuucgcugucaccaacaaucgagu

SEQ ID NO: 209359 - RNA, 23 nt, Human
aaacagcccaagugaaagaacaa

SEQ ID NO: 209360 - RNA, 26 nt, Human
aaacgcugaagcgcugcaaagaagcc

SEQ ID NO: 209361 - RNA, 24 nt, Human
aagaagccagcgacucaaugggug

SEQ ID NO: 209362 - RNA, 21 nt, Human
acccagagucagcucccacag

SEQ ID NO: 209363 - RNA, 25 nt, Human
acccccaaacagaggugcguccggc

SEQ ID NO: 209364 - RNA, 25 nt, Human
acuaauagccauuguaaucuucucc

SEQ ID NO: 209365 - RNA, 19 nt, Human
agacaaguacaacuauccc

SEQ ID NO: 209366 - RNA, 28 nt, Human
auuaaucucugaggacccccaaacagag

SEQ ID NO: 209367 - RNA, 22 nt, Human
auuaccauaauuaugcucucaa

SEQ ID NO: 209368 - RNA, 24 nt, Human
cacgcgcagccggcuacccagagu

SEQ ID NO: 209369 - RNA, 20 nt, Human
cagagucagcucccacaguc

SEQ ID NO: 209370 - RNA, 21 nt, Human
cagcccaagugaaagaacaau

SEQ ID NO: 209371 - RNA, 21 nt, Human
cagcucccacaguccgcaccc

SEQ ID NO: 209372 - RNA, 22 nt, Human
cauuuuacucuuuccaguucuc

SEQ ID NO: 209373 - RNA, 22 nt, Human
ccgacggcacuaggccuccaag

SEQ ID NO: 209374 - RNA, 18 nt, Human
ccucgccuccccagccac

SEQ ID NO: 209375 - RNA, 19 nt, Human
cuccaaggauggaggcgcc

SEQ ID NO: 209376 - RNA, 23 nt, Human
gaaagaacaaucauucucacaaa

SEQ ID NO: 209377 - RNA, 24 nt, Human
guaggacaacaggaaugaguggaa

SEQ ID NO: 209378 - RNA, 22 nt, Human
uaaucucugaggacccccaaac

SEQ ID NO: 209379 - RNA, 18 nt, Human
ucaaagagcaaggggugg

SEQ ID NO: 209380 - RNA, 23 nt, Human
ucagcucccacaguccgcaccca

SEQ ID NO: 209381 - RNA, 18 nt, Human
uccaaggauggaggcgcc

SEQ ID NO: 209382 - RNA, 20 nt, Human
ucccacaguccgcacccaga

SEQ ID NO: 209383 - RNA, 18 nt, Human
ucucuguccgcggcuccc

SEQ ID NO: 209384 - RNA, 21 nt, Human
ugaaagaacaaucauucucac

SEQ ID NO: 209385 - RNA, 22 nt, Human
ugaagcgcugcaaagaagccag

SEQ ID NO: 209386 - RNA, 21 nt, Human
ugaguggaaauggucuucucu

SEQ ID NO: 209387 - RNA, 21 nt, Human
ugcaaagaagccagcgacuca

SEQ ID NO: 209388 - RNA, 18 nt, Human
ugguaggacaacaggaau

SEQ ID NO: 209389 - RNA, 20 nt, Human
uugcgcacgcgucucugucc

SEQ ID NO: 209390 - RNA, 27 nt, Human
aaacccggggcuaugacaccccccuga

SEQ ID NO: 209391 - RNA, 18 nt, Human
aagaaacacaagcuguaa

SEQ ID NO: 209392 - RNA, 21 nt, Human
aauccagaagaaacacaagcu

SEQ ID NO: 209393 - RNA, 21 nt, Human
acaaggcgccggcagugccca

SEQ ID NO: 209394 - RNA, 19 nt, Human
acauugauaaacaguguuc

SEQ ID NO: 209395 - RNA, 21 nt, Human
accaagcgcugcucggacucu

SEQ ID NO: 209396 - RNA, 25 nt, Human
accuguuugugaucaucugaacuca

SEQ ID NO: 209397 - RNA, 20 nt, Human
acgcggggcagggggcgggc

SEQ ID NO: 209398 - RNA, 21 nt, Human
acucauuuugugcucuugccu

SEQ ID NO: 209399 - RNA, 20 nt, Human
agaaugcuucauucuaucuc

SEQ ID NO: 209400 - RNA, 21 nt, Human
agaggaagugaggauggggcc

SEQ ID NO: 209401 - RNA, 24 nt, Human
agaggacagggagcagggccuuug

SEQ ID NO: 209402 - RNA, 25 nt, Human
agggagcagggccuuuggagagcag

SEQ ID NO: 209403 - RNA, 23 nt, Human
auagugugaaucuccacaaagca

SEQ ID NO: 209404 - RNA, 18 nt, Human
auggagacaugggcaugg

SEQ ID NO: 209405 - RNA, 24 nt, Human
caacuuugccgaaaagaggacaac

SEQ ID NO: 209406 - RNA, 22 nt, Human
cacaaagcaagugaaacaugaa

SEQ ID NO: 209407 - RNA, 19 nt, Human
cacaaucagcaggagaaaa

SEQ ID NO: 209408 - RNA, 25 nt, Human
cacacgcuugagcaggaauggagac

SEQ ID NO: 209409 - RNA, 27 nt, Human
caccaaaguaguagguaaaaacacaau

SEQ ID NO: 209410 - RNA, 18 nt, Human
cacggcagaggaaggagc

SEQ ID NO: 209411 - RNA, 22 nt, Human
cagcagugaaauaaaaagagga

SEQ ID NO: 209412 - RNA, 19 nt, Human
ccagcacacacgcuugagc

SEQ ID NO: 209413 - RNA, 22 nt, Human
ccaggcagccccacgucacgcc

SEQ ID NO: 209414 - RNA, 19 nt, Human
ccaggcagccccaugucag

SEQ ID NO: 209415 - RNA, 21 nt, Human
ccauggaaaccacuugugaaa

SEQ ID NO: 209416 - RNA, 21 nt, Human
cccccaccgcacaaggccugc

SEQ ID NO: 209417 - RNA, 19 nt, Human
ccccccaccgcacaaggcc

SEQ ID NO: 209418 - RNA, 22 nt, Human
cccccugaaaacauuaaaaugc

SEQ ID NO: 209419 - RNA, 22 nt, Human
ccgcaacuauaauuaaacuguc

SEQ ID NO: 209420 - RNA, 18 nt, Human
ccucugugacaaucaccc

SEQ ID NO: 209421 - RNA, 22 nt, Human
cggccugcuccaggcagcccca

SEQ ID NO: 209422 - RNA, 20 nt, Human
cuccacaaagcaagugaaac

SEQ ID NO: 209423 - RNA, 21 nt, Human
cuccucugugacaaucacccc

SEQ ID NO: 209424 - RNA, 22 nt, Human
cucugugacaaucacccccaag

SEQ ID NO: 209425 - RNA, 22 nt, Human
gaaaccacuugugaaagucuuu

SEQ ID NO: 209426 - RNA, 22 nt, Human
gagccgcggccaggcagcccca

SEQ ID NO: 209427 - RNA, 20 nt, Human
gcagauacccuuucuguccc

SEQ ID NO: 209428 - RNA, 23 nt, Human
gggcagggggcgggcuccccggg

SEQ ID NO: 209429 - RNA, 19 nt, Human
gggcggccaaacccggggc

SEQ ID NO: 209430 - RNA, 18 nt, Human
gggcggggaaggcggggc

SEQ ID NO: 209431 - RNA, 18 nt, Human
guacuccaagcacuuuuc

SEQ ID NO: 209432 - RNA, 22 nt, Human
guccuggguccugggugaaagu

SEQ ID NO: 209433 - RNA, 19 nt, Human
gugaaucuccacaaagcaa

SEQ ID NO: 209434 - RNA, 19 nt, Human
uaauaauacugcuagaugc

SEQ ID NO: 209435 - RNA, 18 nt, Human
uaauggaggaccuccagu

SEQ ID NO: 209436 - RNA, 18 nt, Human
uaccagagaccccugggc

SEQ ID NO: 209437 - RNA, 24 nt, Human
uaggagaagcugaauccagaagaa

SEQ ID NO: 209438 - RNA, 26 nt, Human
ucacacacacaaucagcaggagaaaa

SEQ ID NO: 209439 - RNA, 18 nt, Human
ucccuaaacuuacuugac

SEQ ID NO: 209440 - RNA, 20 nt, Human
ucuggauaccagagaccccu

SEQ ID NO: 209441 - RNA, 23 nt, Human
ugaaacaugaauagcucccuaaa

SEQ ID NO: 209442 - RNA, 24 nt, Human
ugaaauaaaaagaggaagugagga

SEQ ID NO: 209443 - RNA, 25 nt, Human
ugagagacagggacuccccggccca

SEQ ID NO: 209444 - RNA, 20 nt, Human
ugcagacaaggcgccggcag

SEQ ID NO: 209445 - RNA, 20 nt, Human
ugcugaggaagcgagagcuc

SEQ ID NO: 209446 - RNA, 21 nt, Human
uggaauguuaauacauguuuc

SEQ ID NO: 209447 - RNA, 23 nt, Human
uggagagcaggagaggacaggcu

SEQ ID NO: 209448 - RNA, 22 nt, Human
uggcaaaccguacuccaagcac

SEQ ID NO: 209449 - RNA, 24 nt, Human
uggcagaaaggaccacagauggag

SEQ ID NO: 209450 - RNA, 22 nt, Human
uggggccagcgaugugcgcugg

SEQ ID NO: 209451 - RNA, 19 nt, Human
ugucggcagggacgcgggg

SEQ ID NO: 209452 - RNA, 22 nt, Human
uugaagaagcaggguuauggca

SEQ ID NO: 209453 - RNA, 21 nt, Human
uuggcagaaaggaccacagau

SEQ ID NO: 209454 - RNA, 21 nt, Human
uuuagcagcagugaaauaaaa

SEQ ID NO: 209455 - RNA, 21 nt, Human
uuuguggggccagcgaugugc

SEQ ID NO: 209456 - RNA, 21 nt, Human
aacccaaauguccaucaauag

SEQ ID NO: 209457 - RNA, 22 nt, Human
aagaugggaaacaacccaaaug

SEQ ID NO: 209458 - RNA, 21 nt, Human
aaggugccgcggccagcuccu

SEQ ID NO: 209459 - RNA, 18 nt, Human
aauguccaucaauaguga

SEQ ID NO: 209460 - RNA, 22 nt, Human
acaacccaaauguccaucaaua

SEQ ID NO: 209461 - RNA, 18 nt, Human
accccaaaagaggggacc

SEQ ID NO: 209462 - RNA, 24 nt, Human
agacagaagggaacaaaaagagca

SEQ ID NO: 209463 - RNA, 20 nt, Human
agacagaagggaacaaaagg

SEQ ID NO: 209464 - RNA, 23 nt, Human
agacagaagggaacaaaagggac

SEQ ID NO: 209465 - RNA, 23 nt, Human
agaccccgcaguggaggaggagg

SEQ ID NO: 209466 - RNA, 22 nt, Human
agagcugccacccagcucugcc

SEQ ID NO: 209467 - RNA, 21 nt, Human
agagggagggauuagcccgag

SEQ ID NO: 209468 - RNA, 21 nt, Human
agaugggaaacaacccaaaug

SEQ ID NO: 209469 - RNA, 22 nt, Human
agaugggaaacaacccaaaugu

SEQ ID NO: 209470 - RNA, 23 nt, Human
agcacucccagggcacagcagcg

SEQ ID NO: 209471 - RNA, 22 nt, Human
agcgggcgggucgguguccggu

SEQ ID NO: 209472 - RNA, 20 nt, Human
agcugccacccagcucugcc

SEQ ID NO: 209473 - RNA, 19 nt, Human
aggaagagggagggauuag

SEQ ID NO: 209474 - RNA, 21 nt, Human
agggaacaaaaagagcagcga

SEQ ID NO: 209475 - RNA, 24 nt, Human
agggaggaguagaaacaguccagc

SEQ ID NO: 209476 - RNA, 18 nt, Human
agggucagaccccgcagu

SEQ ID NO: 209477 - RNA, 20 nt, Human
aguccagcucgccgcccaag

SEQ ID NO: 209478 - RNA, 18 nt, Human
augcagcccaaaaggaga

SEQ ID NO: 209479 - RNA, 20 nt, Human
caaaagaggggaccagcgga

SEQ ID NO: 209480 - RNA, 21 nt, Human
caaauguccaucaauagugac

SEQ ID NO: 209481 - RNA, 21 nt, Human
caacccaaauguccaucaaua

SEQ ID NO: 209482 - RNA, 18 nt, Human
cacaaggaguagggucag

SEQ ID NO: 209483 - RNA, 23 nt, Human
cacccagcccuucauccugggcu

SEQ ID NO: 209484 - RNA, 24 nt, Human
cagaagggaacaaaaagagcagcg

SEQ ID NO: 209485 - RNA, 22 nt, Human
cagaaucugguugcucugccgg

SEQ ID NO: 209486 - RNA, 23 nt, Human
cagcacucccagggcacagcagc

SEQ ID NO: 209487 - RNA, 19 nt, Human
cagcuccuggguggggcuc

SEQ ID NO: 209488 - RNA, 22 nt, Human
cagcuccuggguggggcuccag

SEQ ID NO: 209489 - RNA, 18 nt, Human
cagcucugccaggggaag

SEQ ID NO: 209490 - RNA, 19 nt, Human
caguggccuugcacuggcc

SEQ ID NO: 209491 - RNA, 20 nt, Human
caguggccuugcacuggccc

SEQ ID NO: 209492 - RNA, 21 nt, Human
cccaggccccauucuugacuu

SEQ ID NO: 209493 - RNA, 19 nt, Human
ccccagugccggguggagg

SEQ ID NO: 209494 - RNA, 21 nt, Human
ccccauucuugacuuccccag

SEQ ID NO: 209495 - RNA, 20 nt, Human
ccgccuuggccagugcucca

SEQ ID NO: 209496 - RNA, 20 nt, Human
ccucacacaaggaguagggu

SEQ ID NO: 209497 - RNA, 23 nt, Human
cgcaucuaccccaaaagagggga

SEQ ID NO: 209498 - RNA, 21 nt, Human
cgccuuggccagugcuccaga

SEQ ID NO: 209499 - RNA, 24 nt, Human
cgccuuggccagugcuccagaagc

SEQ ID NO: 209500 - RNA, 18 nt, Human
cgcggagcaggaacgggc

SEQ ID NO: 209501 - RNA, 18 nt, Human
cggucccgggcacguccu

SEQ ID NO: 209502 - RNA, 22 nt, Human
cuccuggguggggcuccaggug

SEQ ID NO: 209503 - RNA, 22 nt, Human
cucgcagcgcucccgcagaauc

SEQ ID NO: 209504 - RNA, 24 nt, Human
cugccaggggaagcaguucucccu

SEQ ID NO: 209505 - RNA, 19 nt, Human
cuuggaaaugcagaagcuc

SEQ ID NO: 209506 - RNA, 20 nt, Human
gaagagggagggauuagccc

SEQ ID NO: 209507 - RNA, 22 nt, Human
gccccaggccccauucuugacu

SEQ ID NO: 209508 - RNA, 24 nt, Human
ggaagagggagggauuagcccgag

SEQ ID NO: 209509 - RNA, 21 nt, Human
ggaauagcaugcagcccaaaa

SEQ ID NO: 209510 - RNA, 19 nt, Human
gggaacaaaaagagcagcc

SEQ ID NO: 209511 - RNA, 19 nt, Human
gugguucgagcagacagaa

SEQ ID NO: 209512 - RNA, 21 nt, Human
uagcccgaggcaagugguucg

SEQ ID NO: 209513 - RNA, 22 nt, Human
uaugguaacaaaaagaugggaa

SEQ ID NO: 209514 - RNA, 18 nt, Human
ucccugagagccccaggc

SEQ ID NO: 209515 - RNA, 19 nt, Human
ucccugagagccccaggcc

SEQ ID NO: 209516 - RNA, 27 nt, Human
ucucugaacuagaggaguccggugccc

SEQ ID NO: 209517 - RNA, 20 nt, Human
ugccaggggaagcaguucuc

SEQ ID NO: 209518 - RNA, 23 nt, Human
ugccggguggaggaagagggagg

SEQ ID NO: 209519 - RNA, 24 nt, Human
uggaauagcaugcagcccaaaagg

SEQ ID NO: 209520 - RNA, 18 nt, Human
uggaggaggagggaggag

SEQ ID NO: 209521 - RNA, 19 nt, Human
uggccagugcuccagaagc

SEQ ID NO: 209522 - RNA, 21 nt, Human
ugggaaacaacccaaaugucc

SEQ ID NO: 209523 - RNA, 18 nt, Human
uggguccugaaucggccc

SEQ ID NO: 209524 - RNA, 18 nt, Human
uuagcccgaggcaagugg

SEQ ID NO: 209525 - RNA, 22 nt, Human
uuuuuuuuuuuuuuuuuuaaug

SEQ ID NO: 209526 - RNA, 24 nt, Human
aaagugcugggauuacaggcguga

SEQ ID NO: 209527 - RNA, 19 nt, Human
aaguagcugggauuacagg

SEQ ID NO: 209528 - RNA, 24 nt, Human
aagugauccacccgccucagccuc

SEQ ID NO: 209529 - RNA, 19 nt, Human
aagugcugggauuacaggc

SEQ ID NO: 209530 - RNA, 19 nt, Human
aagugcugggauuacaggc

SEQ ID NO: 209531 - RNA, 26 nt, Human
aagugcugggauuacaggcgugagcc

SEQ ID NO: 209532 - RNA, 25 nt, Human
acccgccucagccucccaaagugcu

SEQ ID NO: 209533 - RNA, 18 nt, Human
acgggguuucaccauguu

SEQ ID NO: 209534 - RNA, 19 nt, Human
acgggguuucaccauguug

SEQ ID NO: 209535 - RNA, 24 nt, Human
acgggguuucaccauguugaccag

SEQ ID NO: 209536 - RNA, 26 nt, Human
agacagacaaacaauguaacauuccc

SEQ ID NO: 209537 - RNA, 19 nt, Human
agccccaagcccagagaca

SEQ ID NO: 209538 - RNA, 23 nt, Human
aguagcugggauuacaggugcgc

SEQ ID NO: 209539 - RNA, 18 nt, Human
agugcugggauuacaggc

SEQ ID NO: 209540 - RNA, 23 nt, Human
auaaauaacaagcuggccacagc

SEQ ID NO: 209541 - RNA, 20 nt, Human
auggaaacagcuuaaaaaca

SEQ ID NO: 209542 - RNA, 21 nt, Human
auuacaggugcgcgccaccau

SEQ ID NO: 209543 - RNA, 24 nt, Human
auuuuuguauuuuuaguagagacg

SEQ ID NO: 209544 - RNA, 24 nt, Human
caaagugcugggauuacaggcgug

SEQ ID NO: 209545 - RNA, 22 nt, Human
caaauaccauagugugucaccc

SEQ ID NO: 209546 - RNA, 23 nt, Human
caacuuccaucuccuggguucaa

SEQ ID NO: 209547 - RNA, 22 nt, Human
caagcaauucucuugccucagc

SEQ ID NO: 209548 - RNA, 27 nt, Human
caagcaauucucuugccucagccuccc

SEQ ID NO: 209549 - RNA, 24 nt, Human
caccaugcccggcuaauuuuugua

SEQ ID NO: 209550 - RNA, 19 nt, Human
caccauguugaccaggcug

SEQ ID NO: 209551 - RNA, 21 nt, Human
caccauguugaccaggcuggu

SEQ ID NO: 209552 - RNA, 21 nt, Human
caccauguugaccaggcuggu

SEQ ID NO: 209553 - RNA, 31 nt, Human
caccauguugaccaggcugguuaggaacucc

SEQ ID NO: 209554 - RNA, 23 nt, Human
cacccaggcuggaguacaggggc

SEQ ID NO: 209555 - RNA, 23 nt, Human
cacccgccucagccucccaaagu

SEQ ID NO: 209556 - RNA, 23 nt, Human
cacugcaacuuccaucuccuggg

SEQ ID NO: 209557 - RNA, 22 nt, Human
cagacaaacaauguaacauucc

SEQ ID NO: 209558 - RNA, 25 nt, Human
cagagccccagauccgauuccgagg

SEQ ID NO: 209559 - RNA, 23 nt, Human
cauguugaccaggcugguuagga

SEQ ID NO: 209560 - RNA, 20 nt, Human
ccaaagaacauuuuuuuucc

SEQ ID NO: 209561 - RNA, 22 nt, Human
ccaaagugcugggauuacaggc

SEQ ID NO: 209562 - RNA, 22 nt, Human
ccaaagugcugggauuacaggc

SEQ ID NO: 209563 - RNA, 24 nt, Human
ccaaagugcugggauuacaggcgu

SEQ ID NO: 209564 - RNA, 21 nt, Human
ccaaguagcugggauuacagg

SEQ ID NO: 209565 - RNA, 26 nt, Human
ccacccgccucagccucccaaagugc

SEQ ID NO: 209566 - RNA, 22 nt, Human
cccaaguagcugggauuacagg

SEQ ID NO: 209567 - RNA, 23 nt, Human
cccaaguagcugggauuacaggu

SEQ ID NO: 209568 - RNA, 24 nt, Human
cccaaguagcugggauuacaggug

SEQ ID NO: 209569 - RNA, 23 nt, Human
cccaggcuggaguacaggggcau

SEQ ID NO: 209570 - RNA, 24 nt, Human
ccgccucagccucccaaagugcug

SEQ ID NO: 209571 - RNA, 23 nt, Human
ccuccgagacacuggaaggugaa

SEQ ID NO: 209572 - RNA, 22 nt, Human
ccugaccucaagugauccaccc

SEQ ID NO: 209573 - RNA, 23 nt, Human
ccugaccucaagugauccacccg

SEQ ID NO: 209574 - RNA, 20 nt, Human
ccuggguucaagcaauucuc

SEQ ID NO: 209575 - RNA, 24 nt, Human
cgggguuucaccauguugaccagg

SEQ ID NO: 209576 - RNA, 24 nt, Human
cucacugcaacuuccaucuccugg

SEQ ID NO: 209577 - RNA, 24 nt, Human
cucagccucccaaguagcugggau

SEQ ID NO: 209578 - RNA, 22 nt, Human
cucccugguuucucuuccuaag

SEQ ID NO: 209579 - RNA, 21 nt, Human
cuccuggguucaagcaauucu

SEQ ID NO: 209580 - RNA, 18 nt, Human
cugucacccaggcuggag

SEQ ID NO: 209581 - RNA, 23 nt, Human
cuugccucagccucccaaguagc

SEQ ID NO: 209582 - RNA, 24 nt, Human
cuugccucagccucccaaguagcu

SEQ ID NO: 209583 - RNA, 22 nt, Human
gaaaacagcucaacagcuagaa

SEQ ID NO: 209584 - RNA, 18 nt, Human
gaagccccaagcccagag

SEQ ID NO: 209585 - RNA, 21 nt, Human
gaagcuucuguuggcucccca

SEQ ID NO: 209586 - RNA, 24 nt, Human
gaccucaagugauccacccgccuc

SEQ ID NO: 209587 - RNA, 20 nt, Human
gagacgggguuucaccaugu

SEQ ID NO: 209588 - RNA, 18 nt, Human
gauuacaggcgugagcca

SEQ ID NO: 209589 - RNA, 22 nt, Human
gauuacaggcgugagccaccgc

SEQ ID NO: 209590 - RNA, 22 nt, Human
gauuacaggcgugagccaccgc

SEQ ID NO: 209591 - RNA, 18 nt, Human
gauuacaggugcgcgcca

SEQ ID NO: 209592 - RNA, 22 nt, Human
gcccggcuaauuuuuguauuuu

SEQ ID NO: 209593 - RNA, 23 nt, Human
gccucagccucccaaagugcugg

SEQ ID NO: 209594 - RNA, 25 nt, Human
gcucugucacccaggcuggaguaca

SEQ ID NO: 209595 - RNA, 22 nt, Human
gcuggaguacaggggcaugaua

SEQ ID NO: 209596 - RNA, 23 nt, Human
gcugguuaggaacuccugaccuc

SEQ ID NO: 209597 - RNA, 20 nt, Human
ggaaaacagcucaacagcua

SEQ ID NO: 209598 - RNA, 24 nt, Human
ggaagcuucuguuggcuccccaaa

SEQ ID NO: 209599 - RNA, 18 nt, Human
ggaaucccuccgagacac

SEQ ID NO: 209600 - RNA, 24 nt, Human
ggcugguuaggaacuccugaccuc

SEQ ID NO: 209601 - RNA, 24 nt, Human
gggcaugauaucagcucacugcaa

SEQ ID NO: 209602 - RNA, 23 nt, Human
gggguuucaccauguugaccagg

SEQ ID NO: 209603 - RNA, 23 nt, Human
guagagacgggguuucaccaugu

SEQ ID NO: 209604 - RNA, 18 nt, Human
guagcugggauuacaggu

SEQ ID NO: 209605 - RNA, 24 nt, Human
gugauccacccgccucagccuccc

SEQ ID NO: 209606 - RNA, 20 nt, Human
uaaaacacucaaauaccaua

SEQ ID NO: 209607 - RNA, 19 nt, Human
uaaauaacaagcuggccac

SEQ ID NO: 209608 - RNA, 24 nt, Human
uaauuuuuguauuuuuaguagaga

SEQ ID NO: 209609 - RNA, 23 nt, Human
uacaggcgugagccaccgcgccc

SEQ ID NO: 209610 - RNA, 19 nt, Human
uagaaagcguggucaggcu

SEQ ID NO: 209611 - RNA, 22 nt, Human
uagagacgggguuucaccaugu

SEQ ID NO: 209612 - RNA, 24 nt, Human
uaguagagacgggguuucaccaug

SEQ ID NO: 209613 - RNA, 26 nt, Human
uaguagagacgggguuucaccauguu

SEQ ID NO: 209614 - RNA, 25 nt, Human
ucaagaaugaagugguuggggaaug

SEQ ID NO: 209615 - RNA, 24 nt, Human
ucacugcaacuuccaucuccuggg

SEQ ID NO: 209616 - RNA, 20 nt, Human
ucagccucccaaguagcugg

SEQ ID NO: 209617 - RNA, 21 nt, Human
uccacccgccucagccuccca

SEQ ID NO: 209618 - RNA, 24 nt, Human
ucccaaagugcugggauuacaggc

SEQ ID NO: 209619 - RNA, 23 nt, Human
ucccaaguagcugggauuacagg

SEQ ID NO: 209620 - RNA, 24 nt, Human
ucccaaguagcugggauuacaggu

SEQ ID NO: 209621 - RNA, 19 nt, Human
ucccugguuucucuuccua

SEQ ID NO: 209622 - RNA, 21 nt, Human
uccuggguucaagcaauucuc

SEQ ID NO: 209623 - RNA, 24 nt, Human
uccuggguucaagcaauucucuug

SEQ ID NO: 209624 - RNA, 21 nt, Human
ucucaaggggcugggucagcu

SEQ ID NO: 209625 - RNA, 24 nt, Human
ucuccuggguucaagcaauucucu

SEQ ID NO: 209626 - RNA, 18 nt, Human
ucugucacccaggcugga

SEQ ID NO: 209627 - RNA, 24 nt, Human
ucugucacccaggcuggaguacag

SEQ ID NO: 209628 - RNA, 18 nt, Human
ucuguuggcuccccaaag

SEQ ID NO: 209629 - RNA, 26 nt, Human
ucuugccucagccucccaaguagcug

SEQ ID NO: 209630 - RNA, 23 nt, Human
ucuugcucugucacccaggcugg

SEQ ID NO: 209631 - RNA, 24 nt, Human
ucuugcucugucacccaggcugga

SEQ ID NO: 209632 - RNA, 24 nt, Human
ugaccaggcugguuaggaacuccu

SEQ ID NO: 209633 - RNA, 24 nt, Human
ugaccucaagugauccacccgccu

SEQ ID NO: 209634 - RNA, 18 nt, Human
ugagacagagucuugcuc

SEQ ID NO: 209635 - RNA, 22 nt, Human
ugagacagagucuugcucuguc

SEQ ID NO: 209636 - RNA, 24 nt, Human
ugcccggcuaauuuuuguauuuuu

SEQ ID NO: 209637 - RNA, 24 nt, Human
ugccucagccucccaaguagcugg

SEQ ID NO: 209638 - RNA, 22 nt, Human
ugcucugucacccaggcuggag

SEQ ID NO: 209639 - RNA, 24 nt, Human
ugcugggauuacaggcgugagcca

SEQ ID NO: 209640 - RNA, 18 nt, Human
uggaauggaagcuucugu

SEQ ID NO: 209641 - RNA, 18 nt, Human
ugggauuacaggcgugag

SEQ ID NO: 209642 - RNA, 19 nt, Human
ugggauuacaggcgugagc

SEQ ID NO: 209643 - RNA, 21 nt, Human
ugggauuacaggcgugagcca

SEQ ID NO: 209644 - RNA, 22 nt, Human
ugggauuacaggcgugagccac

SEQ ID NO: 209645 - RNA, 23 nt, Human
ugggauuacaggcgugagccacc

SEQ ID NO: 209646 - RNA, 24 nt, Human
ugggauuacaggcgugagccaccg

SEQ ID NO: 209647 - RNA, 18 nt, Human
ugggauuacaggugcgcg

SEQ ID NO: 209648 - RNA, 22 nt, Human
ugggauuacaggugcgcgccac

SEQ ID NO: 209649 - RNA, 24 nt, Human
ugggauuacaggugcgcgccacca

SEQ ID NO: 209650 - RNA, 25 nt, Human
ugggauuacaggugcgcgccaccau

SEQ ID NO: 209651 - RNA, 19 nt, Human
ugggcuucuuucuaaaucg

SEQ ID NO: 209652 - RNA, 23 nt, Human
uggguucaagcaauucucuugcc

SEQ ID NO: 209653 - RNA, 23 nt, Human
uggucaggcuuggaauggaagcu

SEQ ID NO: 209654 - RNA, 21 nt, Human
uguauuuuuaguagagacggg

SEQ ID NO: 209655 - RNA, 18 nt, Human
ugugucacccuauggaaa

SEQ ID NO: 209656 - RNA, 19 nt, Human
uuaaaacacucaaauacca

SEQ ID NO: 209657 - RNA, 20 nt, Human
uuagagggaggucagggaaa

SEQ ID NO: 209658 - RNA, 18 nt, Human
uuaguagagacgggguuu

SEQ ID NO: 209659 - RNA, 22 nt, Human
uuaguagagacgggguuucacc

SEQ ID NO: 209660 - RNA, 24 nt, Human
uuaguagagacgggguuucaccau

SEQ ID NO: 209661 - RNA, 19 nt, Human
uuauuuuuuugagacagag

SEQ ID NO: 209662 - RNA, 24 nt, Human
uugcucugucacccaggcuggagu

SEQ ID NO: 209663 - RNA, 24 nt, Human
uuucaccauguugaccaggcuggu

SEQ ID NO: 209664 - RNA, 24 nt, Human
uuuuuaguagagacgggguuucac

SEQ ID NO: 209665 - RNA, 20 nt, Human
uuuuuguauuuuuaguagag

SEQ ID NO: 209666 - RNA, 24 nt, Human
aaaaacauguaucacuuauugacc

SEQ ID NO: 209667 - RNA, 24 nt, Human
aaacacaagcacaggccuccaacc

SEQ ID NO: 209668 - RNA, 21 nt, Human
aaagugaggaugugaguggcu

SEQ ID NO: 209669 - RNA, 21 nt, Human
aaaugaccccagcagcaaggc

SEQ ID NO: 209670 - RNA, 23 nt, Human
aacccugaggaauccucccucaa

SEQ ID NO: 209671 - RNA, 18 nt, Human
aagcagccucucagcccg

SEQ ID NO: 209672 - RNA, 21 nt, Human
aagcagggaggucugggucug

SEQ ID NO: 209673 - RNA, 20 nt, Human
aagcccagaggccgcccaaa

SEQ ID NO: 209674 - RNA, 19 nt, Human
aagccccauccagggucuc

SEQ ID NO: 209675 - RNA, 23 nt, Human
aagcuuccugccccagaggcccg

SEQ ID NO: 209676 - RNA, 21 nt, Human
aaggcagggcugagaugacuc

SEQ ID NO: 209677 - RNA, 23 nt, Human
aaucacacagcugaacaccaaca

SEQ ID NO: 209678 - RNA, 21 nt, Human
acacagcugaacaccaacaac

SEQ ID NO: 209679 - RNA, 21 nt, Human
acagcugaacaccaacaaggc

SEQ ID NO: 209680 - RNA, 19 nt, Human
acauguaucacuuauugac

SEQ ID NO: 209681 - RNA, 18 nt, Human
accacaacuccagaaagc

SEQ ID NO: 209682 - RNA, 18 nt, Human
acccacauacccugcacu

SEQ ID NO: 209683 - RNA, 22 nt, Human
acuaguucagugaguuggccuc

SEQ ID NO: 209684 - RNA, 28 nt, Human
agaauucuuucacugugcaaugcugccu

SEQ ID NO: 209685 - RNA, 21 nt, Human
agacacccugaccagcccugc

SEQ ID NO: 209686 - RNA, 21 nt, Human
agagggaguucaguuaccaga

SEQ ID NO: 209687 - RNA, 22 nt, Human
agcaggcauggcuaaaaucaaa

SEQ ID NO: 209688 - RNA, 23 nt, Human
agccccaugguuccccugagcaa

SEQ ID NO: 209689 - RNA, 21 nt, Human
agcccugcagggccuggcugg

SEQ ID NO: 209690 - RNA, 20 nt, Human
agcugacuucagccuggugg

SEQ ID NO: 209691 - RNA, 24 nt, Human
agcugacuucagccugguggccuc

SEQ ID NO: 209692 - RNA, 23 nt, Human
aggaauccucccucaagccugcc

SEQ ID NO: 209693 - RNA, 24 nt, Human
aggaauccucccucaagccugccu

SEQ ID NO: 209694 - RNA, 24 nt, Human
aggcagaguccaaauggccuaugg

SEQ ID NO: 209695 - RNA, 20 nt, Human
aggcagggcugagaugacuc

SEQ ID NO: 209696 - RNA, 22 nt, Human
aggccuccaacccugacccucu

SEQ ID NO: 209697 - RNA, 21 nt, Human
agggaccccagcccagugccc

SEQ ID NO: 209698 - RNA, 19 nt, Human
aggucauaccacuggaaac

SEQ ID NO: 209699 - RNA, 22 nt, Human
aguacuuuggcagagggguggg

SEQ ID NO: 209700 - RNA, 22 nt, Human
auaccacuggaaacagcaaagu

SEQ ID NO: 209701 - RNA, 24 nt, Human
auggcacgcacaggccuguccccu

SEQ ID NO: 209702 - RNA, 22 nt, Human
auguaucacuuauugacagagc

SEQ ID NO: 209703 - RNA, 21 nt, Human
caaaagcagccucucagcccg

SEQ ID NO: 209704 - RNA, 20 nt, Human
caacagaacaggucagugcc

SEQ ID NO: 209705 - RNA, 19 nt, Human
caagcccagaggccgccca

SEQ ID NO: 209706 - RNA, 18 nt, Human
caaggcagggaccccagc

SEQ ID NO: 209707 - RNA, 19 nt, Human
cacaacuccagaaagcccc

SEQ ID NO: 209708 - RNA, 19 nt, Human
cacacagcugaacaccaac

SEQ ID NO: 209709 - RNA, 22 nt, Human
cacagcugaacaccaacaaggc

SEQ ID NO: 209710 - RNA, 20 nt, Human
caccacaacuccagaaagcc

SEQ ID NO: 209711 - RNA, 18 nt, Human
cacuggaaacagcaaagu

SEQ ID NO: 209712 - RNA, 19 nt, Human
cagggccuggcuggggcca

SEQ ID NO: 209713 - RNA, 20 nt, Human
cauuggaucuguuagccucu

SEQ ID NO: 209714 - RNA, 21 nt, Human
ccacuggaaacagcaaaguca

SEQ ID NO: 209715 - RNA, 18 nt, Human
ccagagaaaggcagggcu

SEQ ID NO: 209716 - RNA, 23 nt, Human
ccaguggcuuauccucugggucu

SEQ ID NO: 209717 - RNA, 18 nt, Human
ccauggacucccauugga

SEQ ID NO: 209718 - RNA, 23 nt, Human
ccccagacacccugaccagcccu

SEQ ID NO: 209719 - RNA, 26 nt, Human
ccccagacacccugaccagcccugca

SEQ ID NO: 209720 - RNA, 21 nt, Human
ccccaggggcccuccuccugg

SEQ ID NO: 209721 - RNA, 18 nt, Human
ccggagcggagccggccu

SEQ ID NO: 209722 - RNA, 22 nt, Human
ccuaacuucugccccaggggcc

SEQ ID NO: 209723 - RNA, 22 nt, Human
ccucgugccuaacuucugcccc

SEQ ID NO: 209724 - RNA, 20 nt, Human
ccucuggggcuggcaugagc

SEQ ID NO: 209725 - RNA, 19 nt, Human
ccugcagggccuggcuggg

SEQ ID NO: 209726 - RNA, 20 nt, Human
ccugcagggccuggcugggg

SEQ ID NO: 209727 - RNA, 18 nt, Human
ccugccccagacacccug

SEQ ID NO: 209728 - RNA, 19 nt, Human
ccugccccagacacccuga

SEQ ID NO: 209729 - RNA, 23 nt, Human
ccuuuuuccccuaaaaaugaccc

SEQ ID NO: 209730 - RNA, 27 nt, Human
cuccaacccugacccucuggggcuggc

SEQ ID NO: 209731 - RNA, 21 nt, Human
cuccagagaaaggcagggcug

SEQ ID NO: 209732 - RNA, 30 nt, Human
cucccaggaccagcuuggcuaauacccagg

SEQ ID NO: 209733 - RNA, 20 nt, Human
cucccucaagccugccucca

SEQ ID NO: 209734 - RNA, 23 nt, Human
cuccugcuggaagcucugaugcu

SEQ ID NO: 209735 - RNA, 25 nt, Human
cugaacaccaacaaggcagggaccc

SEQ ID NO: 209736 - RNA, 19 nt, Human
cugaagcuuccauuccuac

SEQ ID NO: 209737 - RNA, 20 nt, Human
cugaagcuuccauuccuaca

SEQ ID NO: 209738 - RNA, 19 nt, Human
cugacccucuggggcuggc

SEQ ID NO: 209739 - RNA, 19 nt, Human
cugguccaggcagaggagc

SEQ ID NO: 209740 - RNA, 22 nt, Human
gaaacagcaaagucagagcuag

SEQ ID NO: 209741 - RNA, 19 nt, Human
gagagagggagauauuugc

SEQ ID NO: 209742 - RNA, 24 nt, Human
gagcaggcauggcuaaaaucaaaa

SEQ ID NO: 209743 - RNA, 22 nt, Human
gaguacuuuggcagaggggugg

SEQ ID NO: 209744 - RNA, 21 nt, Human
gaguuggccuccuccugcccc

SEQ ID NO: 209745 - RNA, 19 nt, Human
gcagcaaacacaagcacag

SEQ ID NO: 209746 - RNA, 20 nt, Human
gcccagugcccaguggcuua

SEQ ID NO: 209747 - RNA, 24 nt, Human
gccccagacacccugaccagcccu

SEQ ID NO: 209748 - RNA, 19 nt, Human
gcccugaagcuuccauucc

SEQ ID NO: 209749 - RNA, 22 nt, Human
gcccugaagcuuccauuccuac

SEQ ID NO: 209750 - RNA, 23 nt, Human
gcccugcagggccuggcuggggc

SEQ ID NO: 209751 - RNA, 18 nt, Human
gccuauggggaggcaggg

SEQ ID NO: 209752 - RNA, 21 nt, Human
gcuggggccagccccagugga

SEQ ID NO: 209753 - RNA, 19 nt, Human
ggaccccagcccagugccc

SEQ ID NO: 209754 - RNA, 20 nt, Human
ggacuugcagaaaagugccc

SEQ ID NO: 209755 - RNA, 21 nt, Human
ggaggcagggcccauaaugcc

SEQ ID NO: 209756 - RNA, 21 nt, Human
ggauggguucugagcuggaag

SEQ ID NO: 209757 - RNA, 21 nt, Human
ggcagggcccauaaugccccc

SEQ ID NO: 209758 - RNA, 22 nt, Human
ggccggagcggagccggccugc

SEQ ID NO: 209759 - RNA, 18 nt, Human
gggauggguucugagcug

SEQ ID NO: 209760 - RNA, 23 nt, Human
gggccggagcggagccggccugc

SEQ ID NO: 209761 - RNA, 18 nt, Human
ggggugggggucauggcu

SEQ ID NO: 209762 - RNA, 22 nt, Human
guacuuuggcagaggggugggg

SEQ ID NO: 209763 - RNA, 20 nt, Human
gugcaaugcugccucuccaa

SEQ ID NO: 209764 - RNA, 24 nt, Human
gugccuaacuucugccccaggggc

SEQ ID NO: 209765 - RNA, 23 nt, Human
uaaauaaagcuuucaagggaacc

SEQ ID NO: 209766 - RNA, 23 nt, Human
uaacuucugccccaggggcccuc

SEQ ID NO: 209767 - RNA, 24 nt, Human
uaagaaacaagccagcuugguagu

SEQ ID NO: 209768 - RNA, 25 nt, Human
uaagaaacaagccagcuugguaguc

SEQ ID NO: 209769 - RNA, 24 nt, Human
uaagaucuuccagugacaagcuuc

SEQ ID NO: 209770 - RNA, 20 nt, Human
uaccacuggaaacagcaaag

SEQ ID NO: 209771 - RNA, 23 nt, Human
uacuuuggcagaggggugggggu

SEQ ID NO: 209772 - RNA, 26 nt, Human
uagcagcaaacacaagcacaggccuc

SEQ ID NO: 209773 - RNA, 20 nt, Human
uagcuggacauuagcagcaa

SEQ ID NO: 209774 - RNA, 18 nt, Human
uaggagggagaagguccc

SEQ ID NO: 209775 - RNA, 19 nt, Human
uaugauacaggaaagaguu

SEQ ID NO: 209776 - RNA, 18 nt, Human
uauuucacagaugggaga

SEQ ID NO: 209777 - RNA, 20 nt, Human
ucaaaagcagccucucagcu

SEQ ID NO: 209778 - RNA, 22 nt, Human
ucacagaugggagauugaggcc

SEQ ID NO: 209779 - RNA, 20 nt, Human
ucacugugcaaugcugccuc

SEQ ID NO: 209780 - RNA, 23 nt, Human
uccagaaaauauauaccuuaaga

SEQ ID NO: 209781 - RNA, 19 nt, Human
ucccaggaccagcuuggcu

SEQ ID NO: 209782 - RNA, 23 nt, Human
uccccaugugaccaucauauccu

SEQ ID NO: 209783 - RNA, 22 nt, Human
uccccuaaaaaugaccccagca

SEQ ID NO: 209784 - RNA, 25 nt, Human
uccccuaaaaaugaccccagcagca

SEQ ID NO: 209785 - RNA, 21 nt, Human
ucccucaagccugccuccaga

SEQ ID NO: 209786 - RNA, 22 nt, Human
ucccuuugucuccccucaguga

SEQ ID NO: 209787 - RNA, 21 nt, Human
uccuaggagggagaagguccc

SEQ ID NO: 209788 - RNA, 19 nt, Human
uccuuuuuccccuaaaaau

SEQ ID NO: 209789 - RNA, 21 nt, Human
ucuggcauaagaaacaagcca

SEQ ID NO: 209790 - RNA, 25 nt, Human
ucuuccagugacaagcuuccugccc

SEQ ID NO: 209791 - RNA, 18 nt, Human
ugacaccauggacuccca

SEQ ID NO: 209792 - RNA, 23 nt, Human
ugacuucagccugguggccccaa

SEQ ID NO: 209793 - RNA, 19 nt, Human
ugagcuggaagccccaucc

SEQ ID NO: 209794 - RNA, 19 nt, Human
ugaggaaacugaggcucca

SEQ ID NO: 209795 - RNA, 24 nt, Human
ugaggaaacugaggcuccaagagg

SEQ ID NO: 209796 - RNA, 19 nt, Human
ugcaaugcugccucuccaa

SEQ ID NO: 209797 - RNA, 21 nt, Human
ugcccagacugccucgugccu

SEQ ID NO: 209798 - RNA, 19 nt, Human
ugccccagacacccugacc

SEQ ID NO: 209799 - RNA, 21 nt, Human
ugccccagacacccugaccag

SEQ ID NO: 209800 - RNA, 22 nt, Human
ugccccagacacccugaccagc

SEQ ID NO: 209801 - RNA, 24 nt, Human
ugccccagggggaugcuacuccau

SEQ ID NO: 209802 - RNA, 26 nt, Human
ugccccagggggaugcuacuccauuu

SEQ ID NO: 209803 - RNA, 19 nt, Human
uggacugaacugccuuugu

SEQ ID NO: 209804 - RNA, 20 nt, Human
uggcagagggguggggguca

SEQ ID NO: 209805 - RNA, 22 nt, Human
uggcaugagcuggugcccaagc

SEQ ID NO: 209806 - RNA, 22 nt, Human
uggguucugagcuggaagcccc

SEQ ID NO: 209807 - RNA, 24 nt, Human
ugguggggcagcaaagugaggaug

SEQ ID NO: 209808 - RNA, 23 nt, Human
uguaucacuuauugacagagcuu

SEQ ID NO: 209809 - RNA, 23 nt, Human
uucacagaugggagauugaggcc

SEQ ID NO: 209810 - RNA, 18 nt, Human
uucacugugcaaugcugc

SEQ ID NO: 209811 - RNA, 25 nt, Human
uuccucagcagaaccucacaucccu

SEQ ID NO: 209812 - RNA, 24 nt, Human
uuggcaugacaccauggacuccca

SEQ ID NO: 209813 - RNA, 19 nt, Human
uuggccuccuccugcccca

SEQ ID NO: 209814 - RNA, 20 nt, Human
aaaaaacaaacaaacggccc

SEQ ID NO: 209815 - RNA, 19 nt, Human
aaaacaaacaaacggcccu

SEQ ID NO: 209816 - RNA, 20 nt, Human
aaaagucacccacaauccca

SEQ ID NO: 209817 - RNA, 24 nt, Human
aaagaaaaacacaaaauugggauc

SEQ ID NO: 209818 - RNA, 24 nt, Human
aaagugccaggauuacaggcguga

SEQ ID NO: 209819 - RNA, 20 nt, Human
aacagagcgagacuccaucu

SEQ ID NO: 209820 - RNA, 20 nt, Human
aacauggugaaacccugucu

SEQ ID NO: 209821 - RNA, 21 nt, Human
aacauggugaaacccugucuc

SEQ ID NO: 209822 - RNA, 23 nt, Human
aagagccagggcagaagucugug

SEQ ID NO: 209823 - RNA, 23 nt, Human
aagcauccagccccagcucucag

SEQ ID NO: 209824 - RNA, 20 nt, Human
aagucacccacaaucccacc

SEQ ID NO: 209825 - RNA, 26 nt, Human
aagugccaggauuacaggcgugagcc

SEQ ID NO: 209826 - RNA, 20 nt, Human
aaucccaccucucuccuuug

SEQ ID NO: 209827 - RNA, 24 nt, Human
aauugcuugaacccgggaggugga

SEQ ID NO: 209828 - RNA, 24 nt, Human
acagagcgagacuccaucucaaaa

SEQ ID NO: 209829 - RNA, 19 nt, Human
acaggguuuugccaugucu

SEQ ID NO: 209830 - RNA, 23 nt, Human
acaggguuuugccaugucucgca

SEQ ID NO: 209831 - RNA, 24 nt, Human
acaggguuuugccaugucucgcag

SEQ ID NO: 209832 - RNA, 19 nt, Human
accccaguccccuccuccu

SEQ ID NO: 209833 - RNA, 24 nt, Human
acccugucucuacuaaaaauacaa

SEQ ID NO: 209834 - RNA, 25 nt, Human
acucgcuucguccucccaaagugcc

SEQ ID NO: 209835 - RNA, 24 nt, Human
acugcacuccagccuaggcaacag

SEQ ID NO: 209836 - RNA, 24 nt, Human
acugcacuccagccuaggcaacag

SEQ ID NO: 209837 - RNA, 23 nt, Human
agaaagaaaaacacaaaauuggg

SEQ ID NO: 209838 - RNA, 22 nt, Human
agaauugcuugaacccgggagg

SEQ ID NO: 209839 - RNA, 18 nt, Human
agacaggguuuugccaug

SEQ ID NO: 209840 - RNA, 22 nt, Human
agacaggguuuugccaugucuc

SEQ ID NO: 209841 - RNA, 24 nt, Human
agcacuuugggaggccgaggcagg

SEQ ID NO: 209842 - RNA, 24 nt, Human
agccuaggcaacagagcgagacuc

SEQ ID NO: 209843 - RNA, 22 nt, Human
agccuggccaacauggugaaac

SEQ ID NO: 209844 - RNA, 24 nt, Human
agccuggccaacauggugaaaccc

SEQ ID NO: 209845 - RNA, 24 nt, Human
aggaucaccugaggucaggaguuc

SEQ ID NO: 209846 - RNA, 23 nt, Human
aggauuacaggcgugagccacca

SEQ ID NO: 209847 - RNA, 24 nt, Human
aggcaggagaauugcuugaacccg

SEQ ID NO: 209848 - RNA, 18 nt, Human
aggcaggaggaucaccug

SEQ ID NO: 209849 - RNA, 18 nt, Human
aggcaggaggaucaccug

SEQ ID NO: 209850 - RNA, 22 nt, Human
aggcaggaggaucaccugaggu

SEQ ID NO: 209851 - RNA, 24 nt, Human
aggccgaggcaggaggaucaccug

SEQ ID NO: 209852 - RNA, 21 nt, Human
aggcugaggcaggagaauugc

SEQ ID NO: 209853 - RNA, 24 nt, Human
aggcugaggcaggagaauugcuug

SEQ ID NO: 209854 - RNA, 21 nt, Human
agggggagauaauggcggggg

SEQ ID NO: 209855 - RNA, 19 nt, Human
agguggagcuugcagugac

SEQ ID NO: 209856 - RNA, 25 nt, Human
agguggagcuugcagugacaacggu

SEQ ID NO: 209857 - RNA, 24 nt, Human
aggugugguggcucacaccuguaa

SEQ ID NO: 209858 - RNA, 20 nt, Human
auaaggcacagauguccccc

SEQ ID NO: 209859 - RNA, 20 nt, Human
aucauacacauuaaaaguca

SEQ ID NO: 209860 - RNA, 22 nt, Human
augggucaggugugguggcuca

SEQ ID NO: 209861 - RNA, 24 nt, Human
augggucaggugugguggcucaca

SEQ ID NO: 209862 - RNA, 20 nt, Human
auugccucacugcacuccag

SEQ ID NO: 209863 - RNA, 18 nt, Human
auuuuggcguauuucccu

SEQ ID NO: 209864 - RNA, 18 nt, Human
caaaaacccaggcuuccc

SEQ ID NO: 209865 - RNA, 22 nt, Human
caaaaacccaggcuucccuuuc

SEQ ID NO: 209866 - RNA, 27 nt, Human
caaaagaaauaaauaauuagcugggca

SEQ ID NO: 209867 - RNA, 24 nt, Human
caaagugccaggauuacaggcgug

SEQ ID NO: 209868 - RNA, 24 nt, Human
caacauggugaaacccugucucua

SEQ ID NO: 209869 - RNA, 24 nt, Human
caagaauccgggaccccagucccc

SEQ ID NO: 209870 - RNA, 24 nt, Human
cacaccuguaaucccagcacuuug

SEQ ID NO: 209871 - RNA, 19 nt, Human
cacaccugugaucccagcu

SEQ ID NO: 209872 - RNA, 22 nt, Human
caccaugccuggccaaugucag

SEQ ID NO: 209873 - RNA, 24 nt, Human
caccucucuccuuugaccuggaga

SEQ ID NO: 209874 - RNA, 19 nt, Human
caccugccucccaccccug

SEQ ID NO: 209875 - RNA, 20 nt, Human
caccugccucccaccccugc

SEQ ID NO: 209876 - RNA, 23 nt, Human
caccuguaaucccagcacuuugg

SEQ ID NO: 209877 - RNA, 24 nt, Human
caccuguaaucccagcacuuuggg

SEQ ID NO: 209878 - RNA, 21 nt, Human
caccugugaucccagcuaauc

SEQ ID NO: 209879 - RNA, 24 nt, Human
caccugugaucccagcuaaucggg

SEQ ID NO: 209880 - RNA, 23 nt, Human
cacuccagccuaggcaacagagc

SEQ ID NO: 209881 - RNA, 18 nt, Human
cacucgggaccuccaccu

SEQ ID NO: 209882 - RNA, 19 nt, Human
cacugcacuccagccuagg

SEQ ID NO: 209883 - RNA, 20 nt, Human
cacugcacuccagccuaggc

SEQ ID NO: 209884 - RNA, 21 nt, Human
cacugcacuccagccuaggca

SEQ ID NO: 209885 - RNA, 22 nt, Human
cacugcacuccagccuaggcaa

SEQ ID NO: 209886 - RNA, 23 nt, Human
cacugcacuccagccuaggcaac

SEQ ID NO: 209887 - RNA, 24 nt, Human
cacugcacuccagccuaggcaaca

SEQ ID NO: 209888 - RNA, 19 nt, Human
cagaagucuguggacagac

SEQ ID NO: 209889 - RNA, 24 nt, Human
cagcacuuugggaggccgaggcag

SEQ ID NO: 209890 - RNA, 25 nt, Human
cagcacuuugggaggccgaggcagg

SEQ ID NO: 209891 - RNA, 24 nt, Human
cagcuaaucgggaggcugaggcag

SEQ ID NO: 209892 - RNA, 18 nt, Human
caggacaucauucuuucu

SEQ ID NO: 209893 - RNA, 24 nt, Human
caggaggaucaccugaggucagga

SEQ ID NO: 209894 - RNA, 24 nt, Human
caggauuacaggcgugagccacca

SEQ ID NO: 209895 - RNA, 19 nt, Human
caggcuucccuuuccccuc

SEQ ID NO: 209896 - RNA, 24 nt, Human
caggguuuugccaugucucgcagg

SEQ ID NO: 209897 - RNA, 20 nt, Human
caucucaaaaaacaaacaaa

SEQ ID NO: 209898 - RNA, 20 nt, Human
ccaaagugccaggauuacag

SEQ ID NO: 209899 - RNA, 22 nt, Human
ccaaagugccaggauuacaggc

SEQ ID NO: 209900 - RNA, 24 nt, Human
ccaaagugccaggauuacaggcgu

SEQ ID NO: 209901 - RNA, 21 nt, Human
ccaccaugccuggccaauguc

SEQ ID NO: 209902 - RNA, 19 nt, Human
ccaccucucuccuuugacc

SEQ ID NO: 209903 - RNA, 18 nt, Human
ccaccugcccugccccag

SEQ ID NO: 209904 - RNA, 21 nt, Human
ccaggaguccaccugccuccc

SEQ ID NO: 209905 - RNA, 18 nt, Human
cccaagcauccagcccca

SEQ ID NO: 209906 - RNA, 18 nt, Human
cccaccccaacaugaaaa

SEQ ID NO: 209907 - RNA, 23 nt, Human
cccaccccugcuccugaaauaaa

SEQ ID NO: 209908 - RNA, 19 nt, Human
ccccagggcagggggcagg

SEQ ID NO: 209909 - RNA, 18 nt, Human
ccccuccaccugcccugc

SEQ ID NO: 209910 - RNA, 24 nt, Human
cccgcccacucgggaccuccaccu

SEQ ID NO: 209911 - RNA, 20 nt, Human
cccuccguccccaccccaac

SEQ ID NO: 209912 - RNA, 18 nt, Human
cccugcuccgggcggcug

SEQ ID NO: 209913 - RNA, 24 nt, Human
ccucacugcacuccagccuaggca

SEQ ID NO: 209914 - RNA, 20 nt, Human
ccugaaugacagucccugcu

SEQ ID NO: 209915 - RNA, 22 nt, Human
ccugaggucaggaguucgaaac

SEQ ID NO: 209916 - RNA, 22 nt, Human
ccuggccaacauggugaaaccc

SEQ ID NO: 209917 - RNA, 24 nt, Human
ccuggccaacauggugaaacccug

SEQ ID NO: 209918 - RNA, 21 nt, Human
ccugugaucccagcuaaucgg

SEQ ID NO: 209919 - RNA, 24 nt, Human
cgaaaccagccuggccaacauggu

SEQ ID NO: 209920 - RNA, 20 nt, Human
cgaggcaggaggaucaccug

SEQ ID NO: 209921 - RNA, 25 nt, Human
cgaggcaggaggaucaccugagguc

SEQ ID NO: 209922 - RNA, 26 nt, Human
cgaggcaggaggaucaccugagguca

SEQ ID NO: 209923 - RNA, 19 nt, Human
cggcccuaugcagugcggg

SEQ ID NO: 209924 - RNA, 23 nt, Human
cucaaacucuuggacuucaguga

SEQ ID NO: 209925 - RNA, 22 nt, Human
cucacaccuguaaucccagcac

SEQ ID NO: 209926 - RNA, 24 nt, Human
cucacaccuguaaucccagcacuu

SEQ ID NO: 209927 - RNA, 18 nt, Human
cuccaccugcccugcccc

SEQ ID NO: 209928 - RNA, 22 nt, Human
cuccaucucaaaaaacaaacaa

SEQ ID NO: 209929 - RNA, 24 nt, Human
cuggccaacauggugaaacccugu

SEQ ID NO: 209930 - RNA, 19 nt, Human
gaaacccugucucuacuaa

SEQ ID NO: 209931 - RNA, 26 nt, Human
gaacacagccauaaugaaccaucuug

SEQ ID NO: 209932 - RNA, 20 nt, Human
gagacaggguuuugccaugu

SEQ ID NO: 209933 - RNA, 23 nt, Human
gagcuugcagugaccuuagauug

SEQ ID NO: 209934 - RNA, 21 nt, Human
gaucaccugaggucaggaguu

SEQ ID NO: 209935 - RNA, 24 nt, Human
gaucaccugaggucaggaguucga

SEQ ID NO: 209936 - RNA, 18 nt, Human
gaucccagcuaaucggga

SEQ ID NO: 209937 - RNA, 18 nt, Human
gauuacaggcgugagcca

SEQ ID NO: 209938 - RNA, 21 nt, Human
gauuacaggcgugagccacca

SEQ ID NO: 209939 - RNA, 22 nt, Human
gauuacaggcgugagccaccau

SEQ ID NO: 209940 - RNA, 24 nt, Human
gcacuccagccuaggcaacagagc

SEQ ID NO: 209941 - RNA, 24 nt, Human
gccaacauggugaaacccugucuc

SEQ ID NO: 209942 - RNA, 23 nt, Human
gcccacucgggaccuccaccuga

SEQ ID NO: 209943 - RNA, 21 nt, Human
gccccaggcaaggcucagacc

SEQ ID NO: 209944 - RNA, 24 nt, Human
ggacuucagugauccacucgcuuc

SEQ ID NO: 209945 - RNA, 24 nt, Human
ggagcuugcagugaccuuagauug

SEQ ID NO: 209946 - RNA, 18 nt, Human
ggaggucuccccuccacc

SEQ ID NO: 209947 - RNA, 23 nt, Human
ggaucaccugaggucaggaguuc

SEQ ID NO: 209948 - RNA, 22 nt, Human
ggauuacaggcgugagccacca

SEQ ID NO: 209949 - RNA, 24 nt, Human
ggauuacaggcgugagccaccaug

SEQ ID NO: 209950 - RNA, 23 nt, Human
ggcagggggcagggagccggggg

SEQ ID NO: 209951 - RNA, 21 nt, Human
ggcucacaccuguaaucccag

SEQ ID NO: 209952 - RNA, 19 nt, Human
gggcagggagccgggggcc

SEQ ID NO: 209953 - RNA, 24 nt, Human
gggcaugguggugcacaccuguga

SEQ ID NO: 209954 - RNA, 20 nt, Human
ggggaagagccagggcagaa

SEQ ID NO: 209955 - RNA, 20 nt, Human
gggugguguucuauccacag

SEQ ID NO: 209956 - RNA, 24 nt, Human
gguggugcacaccugugaucccag

SEQ ID NO: 209957 - RNA, 23 nt, Human
ggugguguucuauccacagaugc

SEQ ID NO: 209958 - RNA, 23 nt, Human
guccaccugccucccaccccugc

SEQ ID NO: 209959 - RNA, 24 nt, Human
gugauccacucgcuucguccuccc

SEQ ID NO: 209960 - RNA, 23 nt, Human
guggcucacaccuguaaucccag

SEQ ID NO: 209961 - RNA, 18 nt, Human
gugugguggcucacaccu

SEQ ID NO: 209962 - RNA, 18 nt, Human
guugcuuaacccucacug

SEQ ID NO: 209963 - RNA, 22 nt, Human
uacacagucauggcagaaauuc

SEQ ID NO: 209964 - RNA, 22 nt, Human
uacaggcgugagccaccaugcc

SEQ ID NO: 209965 - RNA, 23 nt, Human
uacaggcgugagccaccaugccu

SEQ ID NO: 209966 - RNA, 23 nt, Human
uacggguacuguugaucacaggg

SEQ ID NO: 209967 - RNA, 19 nt, Human
uagaaagaaaaacacaaaa

SEQ ID NO: 209968 - RNA, 23 nt, Human
uauauagaaagaaaaacacaaaa

SEQ ID NO: 209969 - RNA, 21 nt, Human
ucaaguggauauguaugacac

SEQ ID NO: 209970 - RNA, 23 nt, Human
ucacggaaggacugucucuaacu

SEQ ID NO: 209971 - RNA, 19 nt, Human
ucacugcacuccagccuag

SEQ ID NO: 209972 - RNA, 21 nt, Human
ucacugcacuccagccuaggc

SEQ ID NO: 209973 - RNA, 24 nt, Human
ucacugcacuccagccuaggcaac

SEQ ID NO: 209974 - RNA, 18 nt, Human
ucacuguuggauaucuag

SEQ ID NO: 209975 - RNA, 26 nt, Human
ucagugauccacucgcuucguccucc

SEQ ID NO: 209976 - RNA, 21 nt, Human
uccagccccagcucucagaca

SEQ ID NO: 209977 - RNA, 23 nt, Human
uccagccuaggcaacagagcgag

SEQ ID NO: 209978 - RNA, 22 nt, Human
uccauauauagaaagaaaaaca

SEQ ID NO: 209979 - RNA, 24 nt, Human
ucccaaagugccaggauuacaggc

SEQ ID NO: 209980 - RNA, 18 nt, Human
uccccacagggccagggg

SEQ ID NO: 209981 - RNA, 22 nt, Human
uccccuccguccccaccccaac

SEQ ID NO: 209982 - RNA, 20 nt, Human
ucccugaaugacagucccug

SEQ ID NO: 209983 - RNA, 18 nt, Human
ucgcugccccgcccacuc

SEQ ID NO: 209984 - RNA, 23 nt, Human
ucgggaggcugaggcaggagaau

SEQ ID NO: 209985 - RNA, 18 nt, Human
ucucccagucgcugcccc

SEQ ID NO: 209986 - RNA, 23 nt, Human
ucucuacuaaaaauacaaaagaa

SEQ ID NO: 209987 - RNA, 25 nt, Human
ucuuuccaguuugcuauggugaaca

SEQ ID NO: 209988 - RNA, 19 nt, Human
ugacuuguggaaccuucca

SEQ ID NO: 209989 - RNA, 24 nt, Human
ugaggcaggagaauugcuugaacc

SEQ ID NO: 209990 - RNA, 25 nt, Human
ugaggcaggagaauugcuugaaccc

SEQ ID NO: 209991 - RNA, 23 nt, Human
ugaggucaggaguucgaaaccag

SEQ ID NO: 209992 - RNA, 24 nt, Human
ugcagugguuuuguagccugcugu

SEQ ID NO: 209993 - RNA, 24 nt, Human
ugccaggauuacaggcgugagcca

SEQ ID NO: 209994 - RNA, 22 nt, Human
ugcccaggccuagauggggaag

SEQ ID NO: 209995 - RNA, 25 nt, Human
ugccccaguuacccaagcauccagc

SEQ ID NO: 209996 - RNA, 19 nt, Human
ugccucacugcacuccagc

SEQ ID NO: 209997 - RNA, 26 nt, Human
ugccucacugcacuccagccuaggca

SEQ ID NO: 209998 - RNA, 18 nt, Human
ugccucccaccccugcuc

SEQ ID NO: 209999 - RNA, 20 nt, Human
uggagacccaagaauccggg

SEQ ID NO: 210000 - RNA, 24 nt, Human
uggccaacauggugaaacccuguc

SEQ ID NO: 210001 - RNA, 21 nt, Human
uggcucacaccuguaauccca

SEQ ID NO: 210002 - RNA, 22 nt, Human
uggcucacaccuguaaucccag

SEQ ID NO: 210003 - RNA, 24 nt, Human
uggcucacaccuguaaucccagca

SEQ ID NO: 210004 - RNA, 20 nt, Human
ugggaggccgaggcaggagg

SEQ ID NO: 210005 - RNA, 24 nt, Human
ugggaggccgaggcaggaggauca

SEQ ID NO: 210006 - RNA, 21 nt, Human
ugggucaggugugguggcuca

SEQ ID NO: 210007 - RNA, 22 nt, Human
uggugcacaccugugaucccag

SEQ ID NO: 210008 - RNA, 24 nt, Human
ugguggcucacaccuguaauccca

SEQ ID NO: 210009 - RNA, 24 nt, Human
ugguggugcacaccugugauccca

SEQ ID NO: 210010 - RNA, 19 nt, Human
uguacaaaaacccaggcuu

SEQ ID NO: 210011 - RNA, 21 nt, Human
uguacaaaaacccaggcuucc

SEQ ID NO: 210012 - RNA, 20 nt, Human
uguggacagacuucuuggag

SEQ ID NO: 210013 - RNA, 18 nt, Human
uguuccugcccaggccua

SEQ ID NO: 210014 - RNA, 20 nt, Human
uuagcugggcaugguggugc

SEQ ID NO: 210015 - RNA, 19 nt, Human
uucagugauccacucgcuu

SEQ ID NO: 210016 - RNA, 22 nt, Human
uugagacaggguuuugccaugu

SEQ ID NO: 210017 - RNA, 18 nt, Human
uugcuugaacccgggagg

SEQ ID NO: 210018 - RNA, 23 nt, Human
uugcuugaacccgggagguggag

SEQ ID NO: 210019 - RNA, 24 nt, Human
uuggauaucuagauucuuuccagu

SEQ ID NO: 210020 - RNA, 25 nt, Human
uugggaggccgaggcaggaggauca

SEQ ID NO: 210021 - RNA, 22 nt, Human
uuucuuuuuugagacaggguuu

SEQ ID NO: 210022 - RNA, 22 nt, Human
uuuugagacaggguuuugccau

SEQ ID NO: 210023 - RNA, 24 nt, Human
uuuuuugagacaggguuuugccau

SEQ ID NO: 210024 - RNA, 19 nt, Human
aaucugccgaagcccuccu

SEQ ID NO: 210025 - RNA, 30 nt, Human
acacagauguacacauuacacacguuccuu

SEQ ID NO: 210026 - RNA, 18 nt, Human
acaccagcaagacagaau

SEQ ID NO: 210027 - RNA, 28 nt, Human
acagauguacacauuacacacguuccuu

SEQ ID NO: 210028 - RNA, 24 nt, Human
aggccaagagccaaggacccacag

SEQ ID NO: 210029 - RNA, 18 nt, Human
caccagcaagacagaauu

SEQ ID NO: 210030 - RNA, 27 nt, Human
caccuacauacaugcaugcagagaaua

SEQ ID NO: 210031 - RNA, 20 nt, Human
cagagguacaagcaccuuuc

SEQ ID NO: 210032 - RNA, 18 nt, Human
cagaguguccauagccuc

SEQ ID NO: 210033 - RNA, 18 nt, Human
cagcagcagaguguccau

SEQ ID NO: 210034 - RNA, 21 nt, Human
ccaaacagaacuuccagcuga

SEQ ID NO: 210035 - RNA, 18 nt, Human
ccaacucuggggugaaau

SEQ ID NO: 210036 - RNA, 19 nt, Human
ccacacacacuccccaggc

SEQ ID NO: 210037 - RNA, 21 nt, Human
cccacacacacuccccaggca

SEQ ID NO: 210038 - RNA, 24 nt, Human
cccagcagcagaguguccauagcc

SEQ ID NO: 210039 - RNA, 26 nt, Human
cccaggcaccuacauacaugcaugca

SEQ ID NO: 210040 - RNA, 19 nt, Human
cgagguuuuuuuuuuuuuu

SEQ ID NO: 210041 - RNA, 21 nt, Human
cgagguuuuuuuuuuuuuuuu

SEQ ID NO: 210042 - RNA, 19 nt, Human
cucacagacacauggucac

SEQ ID NO: 210043 - RNA, 21 nt, Human
cugccgaagcccuccuggguc

SEQ ID NO: 210044 - RNA, 22 nt, Human
cugccugguuucuauccacacc

SEQ ID NO: 210045 - RNA, 24 nt, Human
gaacuccaacucuggggugaaauc

SEQ ID NO: 210046 - RNA, 18 nt, Human
gccaagagccaaggaccc

SEQ ID NO: 210047 - RNA, 21 nt, Human
ggugaaaucagagguacaagc

SEQ ID NO: 210048 - RNA, 22 nt, Human
guacaagcaccuuucagcugca

SEQ ID NO: 210049 - RNA, 27 nt, Human
uacauacaugcaugcagagaauacaug

SEQ ID NO: 210050 - RNA, 19 nt, Human
uagccucuaggacuuccuu

SEQ ID NO: 210051 - RNA, 21 nt, Human
uccacaccagcaagacagaau

SEQ ID NO: 210052 - RNA, 21 nt, Human
uccucucaccagcuacagccc

SEQ ID NO: 210053 - RNA, 21 nt, Human
ucuauccacaccagcaagaca

SEQ ID NO: 210054 - RNA, 23 nt, Human
ucugccgaagcccuccugggucc

SEQ ID NO: 210055 - RNA, 24 nt, Human
ugaaaucagagguacaagcaccuu

SEQ ID NO: 210056 - RNA, 25 nt, Human
ugcaaggggaaaggccaagagccaa

SEQ ID NO: 210057 - RNA, 22 nt, Human
ugcaugcagagaauacauguuc

SEQ ID NO: 210058 - RNA, 24 nt, Human
uguacacauuacacacguuccuug

SEQ ID NO: 210059 - RNA, 20 nt, Human
uuccuugagcagaacuccaa

SEQ ID NO: 210060 - RNA, 24 nt, Human
uuuuuuuuuuuuuuuuuuuccaag

SEQ ID NO: 210061 - RNA, 21 nt, Human
aaugacaacgguuuggaggga

SEQ ID NO: 210062 - RNA, 22 nt, Human
acucuggucucuugcuuucugg

SEQ ID NO: 210063 - RNA, 19 nt, Human
agccggcacugcagggaca

SEQ ID NO: 210064 - RNA, 21 nt, Human
agccggcacugcagggacaca

SEQ ID NO: 210065 - RNA, 19 nt, Human
aggugagggcgguggcugg

SEQ ID NO: 210066 - RNA, 23 nt, Human
aucaaaguuuccucauuucaaag

SEQ ID NO: 210067 - RNA, 21 nt, Human
caaaguuuccucauuucaaag

SEQ ID NO: 210068 - RNA, 19 nt, Human
cacugcagggacacagggc

SEQ ID NO: 210069 - RNA, 22 nt, Human
cccccucccuaguucuuaaucc

SEQ ID NO: 210070 - RNA, 24 nt, Human
ccuguggccgcggcaggugagggc

SEQ ID NO: 210071 - RNA, 21 nt, Human
ccuucuuucccccucccuagu

SEQ ID NO: 210072 - RNA, 22 nt, Human
gagccggcacugcagggacaca

SEQ ID NO: 210073 - RNA, 23 nt, Human
gggacucuggucucuugcuuucu

SEQ ID NO: 210074 - RNA, 18 nt, Human
gggcgguggcugggaggc

SEQ ID NO: 210075 - RNA, 21 nt, Human
uaaaaacaauuuauccacagu

SEQ ID NO: 210076 - RNA, 19 nt, Human
ucaaaaauacuugaucaga

SEQ ID NO: 210077 - RNA, 25 nt, Human
uccuucuuucccccucccuaguucu

SEQ ID NO: 210078 - RNA, 21 nt, Human
ugagccggcacugcagggaca

SEQ ID NO: 210079 - RNA, 21 nt, Human
ugaucagagguaucaugugga

SEQ ID NO: 210080 - RNA, 19 nt, Human
uggaugcagaccuguggcc

SEQ ID NO: 210081 - RNA, 19 nt, Human
ugggaggcugacccagggg

SEQ ID NO: 210082 - RNA, 19 nt, Human
uguaauagucccauccuuc

SEQ ID NO: 210083 - RNA, 18 nt, Human
uucaugaaaacuuaaaaa

SEQ ID NO: 210084 - RNA, 18 nt, Human
uuuauccacaguaaaugu

SEQ ID NO: 210085 - RNA, 24 nt, Human
uuucaaaguuuuauaaaaaugaca

SEQ ID NO: 210086 - RNA, 22 nt, Human
aaacaaacaggaaacaaaugua

SEQ ID NO: 210087 - RNA, 24 nt, Human
aaacaaauguaaucacuuuacaga

SEQ ID NO: 210088 - RNA, 20 nt, Human
aaacguuuuaaagcaaaucc

SEQ ID NO: 210089 - RNA, 22 nt, Human
aaauagcaugaaggcccauggc

SEQ ID NO: 210090 - RNA, 23 nt, Human
aagauaucauugugauccuaaaa

SEQ ID NO: 210091 - RNA, 23 nt, Human
aaguaucucuugcguucccaucc

SEQ ID NO: 210092 - RNA, 23 nt, Human
aaucacggcucaccauagccuug

SEQ ID NO: 210093 - RNA, 22 nt, Human
aaugcaaaaauaaauaaauaaa

SEQ ID NO: 210094 - RNA, 23 nt, Human
aauuaucuuuuugggucuauucc

SEQ ID NO: 210095 - RNA, 19 nt, Human
acauggcuguuaagaagcc

SEQ ID NO: 210096 - RNA, 21 nt, Human
accacaagcaugagccaccac

SEQ ID NO: 210097 - RNA, 24 nt, Human
acggcucaccauagccuugaccuc

SEQ ID NO: 210098 - RNA, 24 nt, Human
acggggucuuguuauguuucccag

SEQ ID NO: 210099 - RNA, 24 nt, Human
agagcgcacauacauuacuuaaaa

SEQ ID NO: 210100 - RNA, 24 nt, Human
agcugggaccacaagcaugagcca

SEQ ID NO: 210101 - RNA, 22 nt, Human
augcaguggcacaaucacggcu

SEQ ID NO: 210102 - RNA, 20 nt, Human
auuuugcuuaauaucuucca

SEQ ID NO: 210103 - RNA, 21 nt, Human
auuuuuuuuuuugagacaggg

SEQ ID NO: 210104 - RNA, 22 nt, Human
cacaagcaugagccaccacgcc

SEQ ID NO: 210105 - RNA, 19 nt, Human
caccauagccuugaccucc

SEQ ID NO: 210106 - RNA, 22 nt, Human
caccauagccuugaccuccugg

SEQ ID NO: 210107 - RNA, 20 nt, Human
caccaucuccaggaagucuu

SEQ ID NO: 210108 - RNA, 19 nt, Human
cagaaugcaaaaauaaaua

SEQ ID NO: 210109 - RNA, 26 nt, Human
caguacaaauaaaauuaaauucacag

SEQ ID NO: 210110 - RNA, 24 nt, Human
caucuuguucuccuggaucuucuc

SEQ ID NO: 210111 - RNA, 23 nt, Human
cauuccauacauccuggcagaca

SEQ ID NO: 210112 - RNA, 24 nt, Human
cauucugucaccuaggcugguaug

SEQ ID NO: 210113 - RNA, 23 nt, Human
cauuuagcaucgaacuauacaaa

SEQ ID NO: 210114 - RNA, 22 nt, Human
cauuuuuuuuuuugagacaggg

SEQ ID NO: 210115 - RNA, 20 nt, Human
ccaccacgccuggcuaauuu

SEQ ID NO: 210116 - RNA, 24 nt, Human
ccaccugccauucugacaauuuca

SEQ ID NO: 210117 - RNA, 22 nt, Human
ccauagccuugaccuccugggc

SEQ ID NO: 210118 - RNA, 18 nt, Human
ccaucacaaguguaugau

SEQ ID NO: 210119 - RNA, 25 nt, Human
ccauguaaguaucucuugcguuccc

SEQ ID NO: 210120 - RNA, 22 nt, Human
ccuccugccucauccuccugaa

SEQ ID NO: 210121 - RNA, 24 nt, Human
ccuccugggcucaagagauccucc

SEQ ID NO: 210122 - RNA, 20 nt, Human
ccugggcucaagagauccuc

SEQ ID NO: 210123 - RNA, 19 nt, Human
ccuugaccuccugggcuca

SEQ ID NO: 210124 - RNA, 24 nt, Human
cggcucaccauagccuugaccucc

SEQ ID NO: 210125 - RNA, 18 nt, Human
cucaagagauccuccugc

SEQ ID NO: 210126 - RNA, 25 nt, Human
cuccugggcucaagagauccuccug

SEQ ID NO: 210127 - RNA, 23 nt, Human
cugcauucuuccugauugucaua

SEQ ID NO: 210128 - RNA, 25 nt, Human
cuggcagacaaacguuaaauaacag

SEQ ID NO: 210129 - RNA, 24 nt, Human
cugugucuuuuagagagguggggg

SEQ ID NO: 210130 - RNA, 21 nt, Human
cuugcagccuugcuugaaaag

SEQ ID NO: 210131 - RNA, 25 nt, Human
cuuuacagagcgcacauacauuacu

SEQ ID NO: 210132 - RNA, 27 nt, Human
gaacagcugggaccacaagcaugagcc

SEQ ID NO: 210133 - RNA, 19 nt, Human
gaacuauacaaauacagca

SEQ ID NO: 210134 - RNA, 22 nt, Human
gggcucaagagauccuccugcc

SEQ ID NO: 210135 - RNA, 22 nt, Human
gugauccuaaaaaaacguuuua

SEQ ID NO: 210136 - RNA, 21 nt, Human
uaagaguaugaaacauuccag

SEQ ID NO: 210137 - RNA, 21 nt, Human
uaaguaucucuugcguuccca

SEQ ID NO: 210138 - RNA, 21 nt, Human
uacaaauaaaauuaaauucac

SEQ ID NO: 210139 - RNA, 22 nt, Human
uagcaugaaggcccauggcaac

SEQ ID NO: 210140 - RNA, 21 nt, Human
uagccuugaccuccugggcuc

SEQ ID NO: 210141 - RNA, 22 nt, Human
uaucuuccacuuuuccuccaaa

SEQ ID NO: 210142 - RNA, 19 nt, Human
uauguuucccaggcugguc

SEQ ID NO: 210143 - RNA, 21 nt, Human
uauguuucccaggcuggucaa

SEQ ID NO: 210144 - RNA, 23 nt, Human
ucaccauagccuugaccuccugg

SEQ ID NO: 210145 - RNA, 23 nt, Human
ucaugcuaaugagaaagggauuc

SEQ ID NO: 210146 - RNA, 24 nt, Human
uccuccugccucauccuccugaac

SEQ ID NO: 210147 - RNA, 18 nt, Human
uccugggcucaagagauc

SEQ ID NO: 210148 - RNA, 21 nt, Human
ucgaacuauacaaauacagca

SEQ ID NO: 210149 - RNA, 19 nt, Human
ucucauucugucaccuagg

SEQ ID NO: 210150 - RNA, 22 nt, Human
ucucauucugucaccuaggcug

SEQ ID NO: 210151 - RNA, 24 nt, Human
ucuuguuauguuucccaggcuggu

SEQ ID NO: 210152 - RNA, 19 nt, Human
ucuuuuagagagguggggg

SEQ ID NO: 210153 - RNA, 23 nt, Human
ugaaaaguugucaguacaaauaa

SEQ ID NO: 210154 - RNA, 25 nt, Human
ugaccuccugggcucaagagauccu

SEQ ID NO: 210155 - RNA, 19 nt, Human
ugagaaagggauuccagau

SEQ ID NO: 210156 - RNA, 20 nt, Human
ugagaaagggauuccagauu

SEQ ID NO: 210157 - RNA, 20 nt, Human
ugagacagggucucauucug

SEQ ID NO: 210158 - RNA, 22 nt, Human
ugagacagggucucauucuguc

SEQ ID NO: 210159 - RNA, 23 nt, Human
ugccucauccuccugaacagcug

SEQ ID NO: 210160 - RNA, 24 nt, Human
ugccucauccuccugaacagcugg

SEQ ID NO: 210161 - RNA, 28 nt, Human
ugccucauccuccugaacagcugggacc

SEQ ID NO: 210162 - RNA, 20 nt, Human
uggaaaaucuauacauaaau

SEQ ID NO: 210163 - RNA, 24 nt, Human
uggcacaaucacggcucaccauag

SEQ ID NO: 210164 - RNA, 24 nt, Human
ugggaccacaagcaugagccacca

SEQ ID NO: 210165 - RNA, 24 nt, Human
ugggaccacaagcaugagccacca

SEQ ID NO: 210166 - RNA, 24 nt, Human
ugggcucaagagauccuccugccu

SEQ ID NO: 210167 - RNA, 24 nt, Human
ugguaugcaguggcacaaucacgg

SEQ ID NO: 210168 - RNA, 24 nt, Human
uguagagacggggucuuguuaugu

SEQ ID NO: 210169 - RNA, 24 nt, Human
ugugucauccuccugugucuuuua

SEQ ID NO: 210170 - RNA, 19 nt, Human
uucuccuggaucuucucaa

SEQ ID NO: 210171 - RNA, 18 nt, Human
uugagagcuggaaaaucu

SEQ ID NO: 210172 - RNA, 24 nt, Human
uuguagagacggggucuuguuaug

SEQ ID NO: 210173 - RNA, 23 nt, Human
uugugucuuuaaacauuuugcuu

SEQ ID NO: 210174 - RNA, 24 nt, Human
uuucuagcccuuuuaaaauucagg

SEQ ID NO: 210175 - RNA, 20 nt, Human
uuucugugucauccuccugu

SEQ ID NO: 210176 - RNA, 18 nt, Human
uuuguagagacggggucu

SEQ ID NO: 210177 - RNA, 24 nt, Human
uuuguagagacggggucuuguuau

SEQ ID NO: 210178 - RNA, 22 nt, Human
uuuuuuuguagagacggggucu

SEQ ID NO: 210179 - RNA, 23 nt, Human
uuuuuuuuuugagacagggucuc

SEQ ID NO: 210180 - RNA, 20 nt, Human
uuuuuuuuuuugagacaggg

SEQ ID NO: 210181 - RNA, 22 nt, Human
uuuuuuuuuuugagacaggguc

SEQ ID NO: 210182 - RNA, 25 nt, Human
uuuuuuuuuuugagacagggucuca

SEQ ID NO: 210183 - RNA, 25 nt, Human
agccccacagccccaggggagccuc

SEQ ID NO: 210184 - RNA, 24 nt, Human
ccacguagagccccacagccccag

SEQ ID NO: 210185 - RNA, 18 nt, Human
cucacccucucugagccu

SEQ ID NO: 210186 - RNA, 22 nt, Human
cucacccucucugagccucaac

SEQ ID NO: 210187 - RNA, 24 nt, Human
gccccacagccccaggggagccuc

SEQ ID NO: 210188 - RNA, 23 nt, Human
uacguagccucgggcgagucacu

SEQ ID NO: 210189 - RNA, 25 nt, Human
uagagccccacagccccaggggagc

SEQ ID NO: 210190 - RNA, 23 nt, Human
aaaaagguacauucuuagacuuc

SEQ ID NO: 210191 - RNA, 24 nt, Human
aaagugcugggauuacaggcauga

SEQ ID NO: 210192 - RNA, 18 nt, Human
aagcgggcucggguggga

SEQ ID NO: 210193 - RNA, 19 nt, Human
aagugcugggauuacaggc

SEQ ID NO: 210194 - RNA, 21 nt, Human
aagugcugggauuacaggcau

SEQ ID NO: 210195 - RNA, 26 nt, Human
aagugcugggauuacaggcaugagcu

SEQ ID NO: 210196 - RNA, 21 nt, Human
acacagugaaggauguaauuu

SEQ ID NO: 210197 - RNA, 22 nt, Human
accacgcccggccagaaaaagg

SEQ ID NO: 210198 - RNA, 22 nt, Human
agagacguggcacuuuguugac

SEQ ID NO: 210199 - RNA, 19 nt, Human
agccagaccgaugguggca

SEQ ID NO: 210200 - RNA, 22 nt, Human
aggcccugggaaaggcaagaug

SEQ ID NO: 210201 - RNA, 19 nt, Human
auguccuuucucuguucuc

SEQ ID NO: 210202 - RNA, 24 nt, Human
caaagugcugggauuacaggcaug

SEQ ID NO: 210203 - RNA, 24 nt, Human
caacucccaguuccuaagacuccc

SEQ ID NO: 210204 - RNA, 23 nt, Human
caccaagauaugauaggcgcgau

SEQ ID NO: 210205 - RNA, 24 nt, Human
caccaagauaugauaggcgcgaua

SEQ ID NO: 210206 - RNA, 18 nt, Human
cacgugucgccugccagc

SEQ ID NO: 210207 - RNA, 20 nt, Human
caucugagugaagaccaacu

SEQ ID NO: 210208 - RNA, 23 nt, Human
ccaaagugcugggauuacaggca

SEQ ID NO: 210209 - RNA, 24 nt, Human
ccaaagugcugggauuacaggcau

SEQ ID NO: 210210 - RNA, 25 nt, Human
ccaagugauuaacagccaaugugcc

SEQ ID NO: 210211 - RNA, 22 nt, Human
ccaauacaguagccacuagcca

SEQ ID NO: 210212 - RNA, 21 nt, Human
ccacgcccggccagaaaaagg

SEQ ID NO: 210213 - RNA, 23 nt, Human
ccacgcccggccagaaaaaggua

SEQ ID NO: 210214 - RNA, 19 nt, Human
ccagcgcccgcccucccgc

SEQ ID NO: 210215 - RNA, 23 nt, Human
ccagcgcccgcccucccgccucc

SEQ ID NO: 210216 - RNA, 24 nt, Human
cccaaagugcugggauuacaggca

SEQ ID NO: 210217 - RNA, 18 nt, Human
ccgcccucccgccuccgc

SEQ ID NO: 210218 - RNA, 29 nt, Human
ccgcccucccgccuccgccucccgccucu

SEQ ID NO: 210219 - RNA, 19 nt, Human
ccucccgccuccgccuccc

SEQ ID NO: 210220 - RNA, 18 nt, Human
ccugugggcucugcugug

SEQ ID NO: 210221 - RNA, 18 nt, Human
cgaggugaggugcguuua

SEQ ID NO: 210222 - RNA, 22 nt, Human
cgcagccgggcgggcgcccgug

SEQ ID NO: 210223 - RNA, 19 nt, Human
cgggucgaagcgggcucgg

SEQ ID NO: 210224 - RNA, 20 nt, Human
cguuuaugcaccaagauaug

SEQ ID NO: 210225 - RNA, 20 nt, Human
cucccgccuccgccucccgc

SEQ ID NO: 210226 - RNA, 20 nt, Human
cucucuccaccgucagauuc

SEQ ID NO: 210227 - RNA, 19 nt, Human
cugcuguguacagccugcu

SEQ ID NO: 210228 - RNA, 18 nt, Human
cuggagcaggggcugggg

SEQ ID NO: 210229 - RNA, 18 nt, Human
cugugucgccuugagcaa

SEQ ID NO: 210230 - RNA, 19 nt, Human
gauuacaggcaugagcuac

SEQ ID NO: 210231 - RNA, 21 nt, Human
gauuacaggcaugagcuacca

SEQ ID NO: 210232 - RNA, 21 nt, Human
gccaccugugggcucugcugu

SEQ ID NO: 210233 - RNA, 19 nt, Human
gccugcggggaccgggugg

SEQ ID NO: 210234 - RNA, 18 nt, Human
gccuugagcaagauaauu

SEQ ID NO: 210235 - RNA, 20 nt, Human
gcuggagcaggggcuggggg

SEQ ID NO: 210236 - RNA, 19 nt, Human
gcugggggaauuggggcag

SEQ ID NO: 210237 - RNA, 20 nt, Human
ggagcaggggcugggggaau

SEQ ID NO: 210238 - RNA, 19 nt, Human
ggauuacaggcaugagcua

SEQ ID NO: 210239 - RNA, 22 nt, Human
ggccggggcgggggucggggcu

SEQ ID NO: 210240 - RNA, 20 nt, Human
ggggcugggcgguggccgca

SEQ ID NO: 210241 - RNA, 22 nt, Human
ggggcugggggaauuggggcag

SEQ ID NO: 210242 - RNA, 23 nt, Human
gggggucggggcugggcgguggc

SEQ ID NO: 210243 - RNA, 20 nt, Human
ggugggcgcggggagcuggc

SEQ ID NO: 210244 - RNA, 18 nt, Human
gugugcucagcguacaca

SEQ ID NO: 210245 - RNA, 22 nt, Human
uacacagccauagagacguggc

SEQ ID NO: 210246 - RNA, 23 nt, Human
uacaggcaugagcuaccacgccc

SEQ ID NO: 210247 - RNA, 19 nt, Human
uaccaagaaaguuacuagg

SEQ ID NO: 210248 - RNA, 18 nt, Human
ucagccucccaaagugcu

SEQ ID NO: 210249 - RNA, 24 nt, Human
ucagucaagcuaaacacauuccaa

SEQ ID NO: 210250 - RNA, 20 nt, Human
uccaagugauuaacagccaa

SEQ ID NO: 210251 - RNA, 24 nt, Human
ucccaaagugcugggauuacaggc

SEQ ID NO: 210252 - RNA, 21 nt, Human
ucccccagagcuggcuugccc

SEQ ID NO: 210253 - RNA, 21 nt, Human
ucccgggccugcggggaccgg

SEQ ID NO: 210254 - RNA, 18 nt, Human
uccggggugggcgcgggg

SEQ ID NO: 210255 - RNA, 22 nt, Human
ucgggccggggcgggggucggg

SEQ ID NO: 210256 - RNA, 25 nt, Human
ucgggugggauucugccaccugugg

SEQ ID NO: 210257 - RNA, 22 nt, Human
ucucauaagacggagcaagggu

SEQ ID NO: 210258 - RNA, 19 nt, Human
ucugagugaagaccaacuc

SEQ ID NO: 210259 - RNA, 20 nt, Human
ucugccaccugugggcucug

SEQ ID NO: 210260 - RNA, 18 nt, Human
ugagaccagucaugacca

SEQ ID NO: 210261 - RNA, 24 nt, Human
ugcagccagaccgaugguggcacc

SEQ ID NO: 210262 - RNA, 23 nt, Human
ugccaccugugggcucugcugug

SEQ ID NO: 210263 - RNA, 18 nt, Human
ugcggauaauaaagccug

SEQ ID NO: 210264 - RNA, 22 nt, Human
ugcggggaccggguggccccgg

SEQ ID NO: 210265 - RNA, 20 nt, Human
ugcugggauuacaggcauga

SEQ ID NO: 210266 - RNA, 20 nt, Human
uggagucucuagguccacac

SEQ ID NO: 210267 - RNA, 18 nt, Human
ugggauuacaggcaugag

SEQ ID NO: 210268 - RNA, 19 nt, Human
ugggauuacaggcaugagc

SEQ ID NO: 210269 - RNA, 22 nt, Human
ugggauuacaggcaugagcuac

SEQ ID NO: 210270 - RNA, 23 nt, Human
ugggauuacaggcaugagcuacc

SEQ ID NO: 210271 - RNA, 24 nt, Human
ugggauuacaggcaugagcuacca

SEQ ID NO: 210272 - RNA, 20 nt, Human
uggggcaggcugugcugguu

SEQ ID NO: 210273 - RNA, 22 nt, Human
uggggcaggcugugcugguuga

SEQ ID NO: 210274 - RNA, 20 nt, Human
ugggggaauuggggcaggcu

SEQ ID NO: 210275 - RNA, 21 nt, Human
ugguuucuacucuccuccuca

SEQ ID NO: 210276 - RNA, 23 nt, Human
uguaugccauuacuacuaagagc

SEQ ID NO: 210277 - RNA, 21 nt, Human
uguguacagccugcuguguag

SEQ ID NO: 210278 - RNA, 19 nt, Human
uguguagcaggugcuuuag

SEQ ID NO: 210279 - RNA, 24 nt, Human
uugcaugaaugguccucuagacug

SEQ ID NO: 210280 - RNA, 20 nt, Human
uuggaggcucucaauaaucu

SEQ ID NO: 210281 - RNA, 18 nt, Human
uuggggcaggcugugcug

SEQ ID NO: 210282 - RNA, 21 nt, Human
uuuuaaggcccugggaaaggc

SEQ ID NO: 210283 - RNA, 24 nt, Human
aauaauaaauaagaccaagaagaa

SEQ ID NO: 210284 - RNA, 21 nt, Human
acaacuuguucaauguccccu

SEQ ID NO: 210285 - RNA, 18 nt, Human
acccaagacauuuuugac

SEQ ID NO: 210286 - RNA, 23 nt, Human
acuuguucaauguccccuccccc

SEQ ID NO: 210287 - RNA, 21 nt, Human
agaccaagaagaagugugccu

SEQ ID NO: 210288 - RNA, 19 nt, Human
aggccccaggaccccagug

SEQ ID NO: 210289 - RNA, 22 nt, Human
agggacuccugggguccacugc

SEQ ID NO: 210290 - RNA, 19 nt, Human
augaggcuccgaggcccca

SEQ ID NO: 210291 - RNA, 21 nt, Human
caagugccagcagccacaguc

SEQ ID NO: 210292 - RNA, 23 nt, Human
cacaauaauaaauaagaccaaga

SEQ ID NO: 210293 - RNA, 20 nt, Human
cagugccaacaggagaggau

SEQ ID NO: 210294 - RNA, 20 nt, Human
caguguucaagguacccuuc

SEQ ID NO: 210295 - RNA, 21 nt, Human
caucagaaagaaaaaugaauc

SEQ ID NO: 210296 - RNA, 18 nt, Human
ccaauccccaacggugac

SEQ ID NO: 210297 - RNA, 22 nt, Human
ccaccgagcucagggcccugga

SEQ ID NO: 210298 - RNA, 24 nt, Human
cccaccacaugucuggcaaggggg

SEQ ID NO: 210299 - RNA, 30 nt, Human
cccaccaggcugagcccugggcaaggggag

SEQ ID NO: 210300 - RNA, 24 nt, Human
ccccaacggugacaaacacacuca

SEQ ID NO: 210301 - RNA, 22 nt, Human
cccuccuucccgccuacccaag

SEQ ID NO: 210302 - RNA, 19 nt, Human
cccuggguccaccgagcuc

SEQ ID NO: 210303 - RNA, 23 nt, Human
ccgaggccccaggaccccaguga

SEQ ID NO: 210304 - RNA, 19 nt, Human
ccucccuaacccuccuucc

SEQ ID NO: 210305 - RNA, 23 nt, Human
ccugacccugccucggaugaggc

SEQ ID NO: 210306 - RNA, 19 nt, Human
cggcuaggcugaagacggg

SEQ ID NO: 210307 - RNA, 22 nt, Human
cggcuguucugccccucuccug

SEQ ID NO: 210308 - RNA, 18 nt, Human
cuaacccuccuucccgcc

SEQ ID NO: 210309 - RNA, 19 nt, Human
cuccugacccugccucgga

SEQ ID NO: 210310 - RNA, 19 nt, Human
cuccugggguccacugcuu

SEQ ID NO: 210311 - RNA, 20 nt, Human
cugaacccuuggcuccaagu

SEQ ID NO: 210312 - RNA, 25 nt, Human
cugaacccuuggcuccaagugccag

SEQ ID NO: 210313 - RNA, 19 nt, Human
cuggguccaccgagcucag

SEQ ID NO: 210314 - RNA, 23 nt, Human
cuuguucaauguccccuccccca

SEQ ID NO: 210315 - RNA, 25 nt, Human
gaaacaacuuguucaauguccccuu

SEQ ID NO: 210316 - RNA, 20 nt, Human
gacaggagcggcuguucugc

SEQ ID NO: 210317 - RNA, 20 nt, Human
gagcucagggcccuggacag

SEQ ID NO: 210318 - RNA, 24 nt, Human
gagcucagggcccuggacagagga

SEQ ID NO: 210319 - RNA, 20 nt, Human
gccacagucuuccccaaucc

SEQ ID NO: 210320 - RNA, 21 nt, Human
gccacagucuuccccaauccc

SEQ ID NO: 210321 - RNA, 19 nt, Human
gcccaccaggcugagcccu

SEQ ID NO: 210322 - RNA, 23 nt, Human
gccugagcugcugucugccucag

SEQ ID NO: 210323 - RNA, 22 nt, Human
gcugagagcuggcugcuggcug

SEQ ID NO: 210324 - RNA, 20 nt, Human
ggcaggggagggguguaggg

SEQ ID NO: 210325 - RNA, 22 nt, Human
ggggagggguguagggacaugu

SEQ ID NO: 210326 - RNA, 19 nt, Human
guacccuucuauauauuaa

SEQ ID NO: 210327 - RNA, 20 nt, Human
gugcuggggcccugagucuc

SEQ ID NO: 210328 - RNA, 18 nt, Human
guucaauguccccucccc

SEQ ID NO: 210329 - RNA, 22 nt, Human
uaacccuccuucccgccuaccc

SEQ ID NO: 210330 - RNA, 22 nt, Human
uaacccuccuucccgccuaccc

SEQ ID NO: 210331 - RNA, 20 nt, Human
uacacaguacuuauuaccag

SEQ ID NO: 210332 - RNA, 22 nt, Human
uaucugucaccaacuuuauuuc

SEQ ID NO: 210333 - RNA, 18 nt, Human
ucccgccuacccaagaca

SEQ ID NO: 210334 - RNA, 18 nt, Human
ucccuggguccaccgagc

SEQ ID NO: 210335 - RNA, 18 nt, Human
ucucugaacccuuggcuc

SEQ ID NO: 210336 - RNA, 27 nt, Human
ucuguacacaguacuuauuaccaggga

SEQ ID NO: 210337 - RNA, 19 nt, Human
ugaaacaacuuguucaaug

SEQ ID NO: 210338 - RNA, 21 nt, Human
ugagagcuggcugcuggcugg

SEQ ID NO: 210339 - RNA, 26 nt, Human
ugaggagcggaugcauaggcugggug

SEQ ID NO: 210340 - RNA, 20 nt, Human
ugaggucggcuaggcugaag

SEQ ID NO: 210341 - RNA, 21 nt, Human
ugcaaauaaugaugcuuucga

SEQ ID NO: 210342 - RNA, 23 nt, Human
ugccugagcugcugucugccuca

SEQ ID NO: 210343 - RNA, 24 nt, Human
ugccugagcugcugucugccucag

SEQ ID NO: 210344 - RNA, 21 nt, Human
uguccccucccccaguguuca

SEQ ID NO: 210345 - RNA, 19 nt, Human
uuaccccucccuaacccuc

SEQ ID NO: 210346 - RNA, 19 nt, Human
uuagugcuggggcccugag

SEQ ID NO: 210347 - RNA, 23 nt, Human
aaaagaagaggaugggaacaaaa

SEQ ID NO: 210348 - RNA, 19 nt, Human
aaauagacuguaaaccccu

SEQ ID NO: 210349 - RNA, 23 nt, Human
aacuuccuuuucccucccuuuuc

SEQ ID NO: 210350 - RNA, 20 nt, Human
aagaacacaaagcaaguaua

SEQ ID NO: 210351 - RNA, 21 nt, Human
aagaaguuaaacagaaacaau

SEQ ID NO: 210352 - RNA, 23 nt, Human
aagaguuuuaauagccacaaaca

SEQ ID NO: 210353 - RNA, 23 nt, Human
aauauaugccccccaaaagcaua

SEQ ID NO: 210354 - RNA, 24 nt, Human
acaaaccaaagacacaguaaaugc

SEQ ID NO: 210355 - RNA, 21 nt, Human
acaaagcaaguauagaucccu

SEQ ID NO: 210356 - RNA, 18 nt, Human
acaauucaccugccucag

SEQ ID NO: 210357 - RNA, 24 nt, Human
acaauucaccugccucagcuuccc

SEQ ID NO: 210358 - RNA, 20 nt, Human
acagacaccuccaagagcuc

SEQ ID NO: 210359 - RNA, 18 nt, Human
accauccugacacugggu

SEQ ID NO: 210360 - RNA, 23 nt, Human
accauuuuggucaggcuggucug

SEQ ID NO: 210361 - RNA, 24 nt, Human
acccaggcuagagugcaguggugu

SEQ ID NO: 210362 - RNA, 25 nt, Human
accccagcuuccucagagaagccag

SEQ ID NO: 210363 - RNA, 23 nt, Human
acggauauguuguguggauaggu

SEQ ID NO: 210364 - RNA, 22 nt, Human
acggccauggaagcagguugcc

SEQ ID NO: 210365 - RNA, 23 nt, Human
agaaaagaggaauccuggaccca

SEQ ID NO: 210366 - RNA, 18 nt, Human
agaaguuaaacagaaaca

SEQ ID NO: 210367 - RNA, 22 nt, Human
agagugcaguggugugaucucu

SEQ ID NO: 210368 - RNA, 22 nt, Human
agaugcuaauuauccucugcuc

SEQ ID NO: 210369 - RNA, 20 nt, Human
agccagggcaccaugcuucu

SEQ ID NO: 210370 - RNA, 18 nt, Human
aggaaaaccaaauauucu

SEQ ID NO: 210371 - RNA, 20 nt, Human
aggagggagaaugcaaaagg

SEQ ID NO: 210372 - RNA, 21 nt, Human
aggagggagaaugcaaaaggg

SEQ ID NO: 210373 - RNA, 21 nt, Human
aggggucugugcuucacaccc

SEQ ID NO: 210374 - RNA, 18 nt, Human
aguagcugggauuacagg

SEQ ID NO: 210375 - RNA, 24 nt, Human
agucauucuaccuccacugccccu

SEQ ID NO: 210376 - RNA, 18 nt, Human
agugcaguggugugaucu

SEQ ID NO: 210377 - RNA, 19 nt, Human
agugcaguggugugaucuc

SEQ ID NO: 210378 - RNA, 21 nt, Human
agugcaguggugugaucucug

SEQ ID NO: 210379 - RNA, 24 nt, Human
agugcaguggugugaucucugcuc

SEQ ID NO: 210380 - RNA, 30 nt, Human
aguuuccauuuaauaaguucccagauaacc

SEQ ID NO: 210381 - RNA, 19 nt, Human
auggugcaguaguuucagu

SEQ ID NO: 210382 - RNA, 20 nt, Human
auuguuucucagauuacuca

SEQ ID NO: 210383 - RNA, 22 nt, Human
caaaagaucacuuccccacucc

SEQ ID NO: 210384 - RNA, 21 nt, Human
caaauagacuguaaaccccug

SEQ ID NO: 210385 - RNA, 24 nt, Human
caaauugcugggauuacaggcgug

SEQ ID NO: 210386 - RNA, 24 nt, Human
caacauaaagaccuguggcucuua

SEQ ID NO: 210387 - RNA, 21 nt, Human
caaccaccacagguauuccca

SEQ ID NO: 210388 - RNA, 23 nt, Human
caaccuccaccucccagguucaa

SEQ ID NO: 210389 - RNA, 21 nt, Human
caagagcucccaagaccuagg

SEQ ID NO: 210390 - RNA, 22 nt, Human
caagcgaauaccaauguucuac

SEQ ID NO: 210391 - RNA, 22 nt, Human
caaucugacuucaagaauaacu

SEQ ID NO: 210392 - RNA, 21 nt, Human
cacaaagcaaguauagauccc

SEQ ID NO: 210393 - RNA, 21 nt, Human
cacaaauaucaaugcugaaaa

SEQ ID NO: 210394 - RNA, 23 nt, Human
cacacucuucuccaaagcgccca

SEQ ID NO: 210395 - RNA, 24 nt, Human
caccacacccaguuaauuuuugua

SEQ ID NO: 210396 - RNA, 21 nt, Human
caccauuuuggucaggcuggu

SEQ ID NO: 210397 - RNA, 22 nt, Human
caccauuuuggucaggcugguc

SEQ ID NO: 210398 - RNA, 21 nt, Human
cacugcaaccuccaccuccca

SEQ ID NO: 210399 - RNA, 18 nt, Human
caugcuucuacacggcca

SEQ ID NO: 210400 - RNA, 21 nt, Human
caugguugaaacucuaauacc

SEQ ID NO: 210401 - RNA, 26 nt, Human
cauguugacacaaagaacacaaagca

SEQ ID NO: 210402 - RNA, 18 nt, Human
ccaaaugaguuccccuac

SEQ ID NO: 210403 - RNA, 20 nt, Human
ccaaauugcugggauuacag

SEQ ID NO: 210404 - RNA, 22 nt, Human
ccaaauugcugggauuacaggc

SEQ ID NO: 210405 - RNA, 22 nt, Human
ccaaauugcugggauuacaggc

SEQ ID NO: 210406 - RNA, 24 nt, Human
ccaaauugcugggauuacaggcgu

SEQ ID NO: 210407 - RNA, 27 nt, Human
ccaccucccagguucaaacaauucuuu

SEQ ID NO: 210408 - RNA, 24 nt, Human
cccaaaagcauaaacagagccuug

SEQ ID NO: 210409 - RNA, 24 nt, Human
cccaaggagucauucuaccuccac

SEQ ID NO: 210410 - RNA, 20 nt, Human
ccccaaaagcauaaacagag

SEQ ID NO: 210411 - RNA, 21 nt, Human
ccccccaaaagcauaaacaga

SEQ ID NO: 210412 - RNA, 23 nt, Human
cccgaguagcugggauuacaggc

SEQ ID NO: 210413 - RNA, 24 nt, Human
cccgaguagcugggauuacaggca

SEQ ID NO: 210414 - RNA, 23 nt, Human
ccgaguagcugggauuacaggca

SEQ ID NO: 210415 - RNA, 24 nt, Human
ccuccaagagcucccaagaccuag

SEQ ID NO: 210416 - RNA, 21 nt, Human
ccucccuuuucccucagcuau

SEQ ID NO: 210417 - RNA, 20 nt, Human
ccucggagcccggccgggcu

SEQ ID NO: 210418 - RNA, 22 nt, Human
ccugaccucgagugauccgccc

SEQ ID NO: 210419 - RNA, 20 nt, Human
ccuuuucccucccuuuuccc

SEQ ID NO: 210420 - RNA, 22 nt, Human
cgggggccuagcacaaaccaaa

SEQ ID NO: 210421 - RNA, 22 nt, Human
cuaccaauguaagacacaaaag

SEQ ID NO: 210422 - RNA, 22 nt, Human
cuagcacaaaccaaagacacag

SEQ ID NO: 210423 - RNA, 21 nt, Human
cuagggggaggcauggguuuu

SEQ ID NO: 210424 - RNA, 24 nt, Human
cucacugcaaccuccaccucccag

SEQ ID NO: 210425 - RNA, 23 nt, Human
cucagcuucccgaguagcuggga

SEQ ID NO: 210426 - RNA, 20 nt, Human
cucaggaaguugucacaacu

SEQ ID NO: 210427 - RNA, 21 nt, Human
cuccaagagcucccaagaccu

SEQ ID NO: 210428 - RNA, 22 nt, Human
cucccagccucaaucugacuuc

SEQ ID NO: 210429 - RNA, 26 nt, Human
cuccugaccucgagugauccgcccgc

SEQ ID NO: 210430 - RNA, 20 nt, Human
cucugucacccaggcuagag

SEQ ID NO: 210431 - RNA, 23 nt, Human
cucugucacccaggcuagagugc

SEQ ID NO: 210432 - RNA, 23 nt, Human
cugcaaccuccaccucccagguu

SEQ ID NO: 210433 - RNA, 24 nt, Human
cugcaaccuccaccucccagguuc

SEQ ID NO: 210434 - RNA, 23 nt, Human
cugccucagcuucccgaguagcu

SEQ ID NO: 210435 - RNA, 23 nt, Human
cuuccuuuucccucccuuuuccc

SEQ ID NO: 210436 - RNA, 20 nt, Human
cuuuguccccuaguuugaag

SEQ ID NO: 210437 - RNA, 21 nt, Human
gaagggaaggagggagaaugc

SEQ ID NO: 210438 - RNA, 24 nt, Human
gaccucgagugauccgcccgccuc

SEQ ID NO: 210439 - RNA, 24 nt, Human
gaguagcugggauuacaggcacgc

SEQ ID NO: 210440 - RNA, 24 nt, Human
gauaccaccucaucucuguuuaga

SEQ ID NO: 210441 - RNA, 18 nt, Human
gauuacaggcacgcgcca

SEQ ID NO: 210442 - RNA, 18 nt, Human
gauuacaggcgugagcca

SEQ ID NO: 210443 - RNA, 21 nt, Human
gauuacaggcgugagccaccg

SEQ ID NO: 210444 - RNA, 24 nt, Human
gauuacaggcgugagccaccggac

SEQ ID NO: 210445 - RNA, 22 nt, Human
gcaaccuccaccucccagguuc

SEQ ID NO: 210446 - RNA, 23 nt, Human
gcagagaaaagaggaauccugga

SEQ ID NO: 210447 - RNA, 24 nt, Human
gccucagcuucccgaguagcuggg

SEQ ID NO: 210448 - RNA, 24 nt, Human
gcucccaagaccuagggaucacaa

SEQ ID NO: 210449 - RNA, 23 nt, Human
gcuggucuggaacuccugaccuc

SEQ ID NO: 210450 - RNA, 19 nt, Human
ggaacccaauauaugcccc

SEQ ID NO: 210451 - RNA, 19 nt, Human
ggaagggaaggagggagaa

SEQ ID NO: 210452 - RNA, 18 nt, Human
ggaggcauggguuuugcu

SEQ ID NO: 210453 - RNA, 22 nt, Human
ggcuagagugcaguggugugau

SEQ ID NO: 210454 - RNA, 24 nt, Human
ggcuggucuggaacuccugaccuc

SEQ ID NO: 210455 - RNA, 22 nt, Human
gggcuuucaaagcagaggaaaa

SEQ ID NO: 210456 - RNA, 20 nt, Human
guaaauguuugaacaacuug

SEQ ID NO: 210457 - RNA, 22 nt, Human
guaagacacaaaagcuauuuaa

SEQ ID NO: 210458 - RNA, 24 nt, Human
gugauccgcccgccucggacuccc

SEQ ID NO: 210459 - RNA, 21 nt, Human
guggagauuaaaaaaaaaagu

SEQ ID NO: 210460 - RNA, 24 nt, Human
guucaaacaauucaccugccucag

SEQ ID NO: 210461 - RNA, 24 nt, Human
guuuuaguagagaggagguuucac

SEQ ID NO: 210462 - RNA, 21 nt, Human
uaaaaauggcuagggggaggc

SEQ ID NO: 210463 - RNA, 21 nt, Human
uaaaagaagaggaugggaaca

SEQ ID NO: 210464 - RNA, 24 nt, Human
uaaaagaguuuuaauagccacaaa

SEQ ID NO: 210465 - RNA, 22 nt, Human
uaaaaggucugaaaaaugacug

SEQ ID NO: 210466 - RNA, 22 nt, Human
uaaaauggcuuugaaaggucuu

SEQ ID NO: 210467 - RNA, 24 nt, Human
uaacuuccuuuucccucccuuuuc

SEQ ID NO: 210468 - RNA, 24 nt, Human
uaauuuuuguaguuuuaguagaga

SEQ ID NO: 210469 - RNA, 24 nt, Human
uacaggcacgcgccaccacaccca

SEQ ID NO: 210470 - RNA, 24 nt, Human
uacaggcgugagccaccggaccca

SEQ ID NO: 210471 - RNA, 19 nt, Human
uacccaaaccuguagagag

SEQ ID NO: 210472 - RNA, 22 nt, Human
uaccuggaaaggaauuaaucuc

SEQ ID NO: 210473 - RNA, 21 nt, Human
uacuugaguagcagaggugaa

SEQ ID NO: 210474 - RNA, 22 nt, Human
uagagugcaguggugugaucuc

SEQ ID NO: 210475 - RNA, 23 nt, Human
uagagugcaguggugugaucucu

SEQ ID NO: 210476 - RNA, 24 nt, Human
uagagugcaguggugugaucucug

SEQ ID NO: 210477 - RNA, 22 nt, Human
uagcacaaaccaaagacacagu

SEQ ID NO: 210478 - RNA, 24 nt, Human
uaggaaaaaauccacauaggcuag

SEQ ID NO: 210479 - RNA, 24 nt, Human
uaggaucccaaacaauacauauca

SEQ ID NO: 210480 - RNA, 22 nt, Human
uagguauguuaggaaaaaaucc

SEQ ID NO: 210481 - RNA, 26 nt, Human
uaguagagaggagguuucaccauuuu

SEQ ID NO: 210482 - RNA, 18 nt, Human
uauaaaauaccuggaaag

SEQ ID NO: 210483 - RNA, 18 nt, Human
uauuuauuuuacucaagc

SEQ ID NO: 210484 - RNA, 20 nt, Human
ucaaacaauucaccugccuc

SEQ ID NO: 210485 - RNA, 20 nt, Human
ucacacccgggggccuagca

SEQ ID NO: 210486 - RNA, 18 nt, Human
ucacagcauccucuucau

SEQ ID NO: 210487 - RNA, 24 nt, Human
ucacugcaaccuccaccucccagg

SEQ ID NO: 210488 - RNA, 25 nt, Human
ucacugcaaccuccaccucccaggu

SEQ ID NO: 210489 - RNA, 27 nt, Human
ucacugcaaccuccaccucccagguuc

SEQ ID NO: 210490 - RNA, 20 nt, Human
ucagcuucccgaguagcugg

SEQ ID NO: 210491 - RNA, 19 nt, Human
ucagugcccagaugaaggg

SEQ ID NO: 210492 - RNA, 20 nt, Human
ucagugcccagaugaaggga

SEQ ID NO: 210493 - RNA, 22 nt, Human
uccacauaggcuagaccuaaaa

SEQ ID NO: 210494 - RNA, 18 nt, Human
ucccaaacaauacauauc

SEQ ID NO: 210495 - RNA, 24 nt, Human
ucccaaauugcugggauuacaggc

SEQ ID NO: 210496 - RNA, 19 nt, Human
ucccagguucaaacaauuc

SEQ ID NO: 210497 - RNA, 24 nt, Human
ucccagguucaaacaauucaccug

SEQ ID NO: 210498 - RNA, 20 nt, Human
ucccagguucaaacaauucc

SEQ ID NO: 210499 - RNA, 24 nt, Human
ucccgaguagcugggauuacaggc

SEQ ID NO: 210500 - RNA, 18 nt, Human
ucuagagaacagcagaac

SEQ ID NO: 210501 - RNA, 19 nt, Human
ucucaaggucacagugaag

SEQ ID NO: 210502 - RNA, 18 nt, Human
ucucagauuacucacacu

SEQ ID NO: 210503 - RNA, 24 nt, Human
ucucagauuacucacacuuaaccu

SEQ ID NO: 210504 - RNA, 19 nt, Human
ucuccccuccccuaggagc

SEQ ID NO: 210505 - RNA, 19 nt, Human
ucugaaaaaugacuggugg

SEQ ID NO: 210506 - RNA, 21 nt, Human
ucuguaguugucaucauggcc

SEQ ID NO: 210507 - RNA, 24 nt, Human
ucugucacccaggcuagagugcag

SEQ ID NO: 210508 - RNA, 19 nt, Human
ucuugcucugucacccagg

SEQ ID NO: 210509 - RNA, 23 nt, Human
ucuugcucugucacccaggcuag

SEQ ID NO: 210510 - RNA, 24 nt, Human
ucuugcucugucacccaggcuaga

SEQ ID NO: 210511 - RNA, 18 nt, Human
ugaccucgagugauccgc

SEQ ID NO: 210512 - RNA, 24 nt, Human
ugaccucgagugauccgcccgccu

SEQ ID NO: 210513 - RNA, 24 nt, Human
ugagaauggaacccaauauaugcc

SEQ ID NO: 210514 - RNA, 21 nt, Human
ugagccaccggacccagccca

SEQ ID NO: 210515 - RNA, 23 nt, Human
ugaucucugcucacugcaaccuc

SEQ ID NO: 210516 - RNA, 21 nt, Human
ugcaugacugucagcaucaau

SEQ ID NO: 210517 - RNA, 24 nt, Human
ugcaugacugucagcaucaauguu

SEQ ID NO: 210518 - RNA, 22 nt, Human
ugccauugucaugaaccccagc

SEQ ID NO: 210519 - RNA, 24 nt, Human
ugccucagcuucccgaguagcugg

SEQ ID NO: 210520 - RNA, 20 nt, Human
ugcugggauuacaggcguga

SEQ ID NO: 210521 - RNA, 24 nt, Human
ugcugggauuacaggcgugagcca

SEQ ID NO: 210522 - RNA, 20 nt, Human
uggaaaggaauuaaucucau

SEQ ID NO: 210523 - RNA, 21 nt, Human
uggaacccaauauaugccccc

SEQ ID NO: 210524 - RNA, 21 nt, Human
uggauaggugagaauggaacc

SEQ ID NO: 210525 - RNA, 21 nt, Human
uggcaagaacugaggagucuc

SEQ ID NO: 210526 - RNA, 21 nt, Human
uggcuggcuggcuaccaaugu

SEQ ID NO: 210527 - RNA, 21 nt, Human
ugggaauuucacagcauccuc

SEQ ID NO: 210528 - RNA, 21 nt, Human
ugggauuacaggcacgcgcca

SEQ ID NO: 210529 - RNA, 22 nt, Human
ugggauuacaggcacgcgccac

SEQ ID NO: 210530 - RNA, 24 nt, Human
ugggauuacaggcacgcgccacca

SEQ ID NO: 210531 - RNA, 19 nt, Human
ugggauuacaggcgugagc

SEQ ID NO: 210532 - RNA, 21 nt, Human
ugggauuacaggcgugagcca

SEQ ID NO: 210533 - RNA, 22 nt, Human
ugggauuacaggcgugagccac

SEQ ID NO: 210534 - RNA, 23 nt, Human
ugggauuacaggcgugagccacc

SEQ ID NO: 210535 - RNA, 24 nt, Human
ugggauuacaggcgugagccaccg

SEQ ID NO: 210536 - RNA, 24 nt, Human
uggucaggcuggucuggaacuccu

SEQ ID NO: 210537 - RNA, 19 nt, Human
uguaguuuuaguagagagg

SEQ ID NO: 210538 - RNA, 21 nt, Human
uguaguuuuaguagagaggag

SEQ ID NO: 210539 - RNA, 22 nt, Human
uguccccuaguuugaagccugc

SEQ ID NO: 210540 - RNA, 25 nt, Human
uguuuuguuuuguuuuguuuugauu

SEQ ID NO: 210541 - RNA, 26 nt, Human
uguuuuguuuuguuuuguuuuuuaau

SEQ ID NO: 210542 - RNA, 24 nt, Human
uguuuuguuuuuuagacagagucu

SEQ ID NO: 210543 - RNA, 23 nt, Human
uuaacauuguuucacauaucccu

SEQ ID NO: 210544 - RNA, 18 nt, Human
uuaguagagaggagguuu

SEQ ID NO: 210545 - RNA, 24 nt, Human
uuaguagagaggagguuucaccau

SEQ ID NO: 210546 - RNA, 20 nt, Human
uucagugcccagaugaaggg

SEQ ID NO: 210547 - RNA, 19 nt, Human
uucccagaauuauaaaaua

SEQ ID NO: 210548 - RNA, 23 nt, Human
uucccauacuucuuuaaauuugg

SEQ ID NO: 210549 - RNA, 26 nt, Human
uuccccuacaaauaaaauuuguucau

SEQ ID NO: 210550 - RNA, 19 nt, Human
uucuguaguugucaucaug

SEQ ID NO: 210551 - RNA, 24 nt, Human
uuucaccauuuuggucaggcuggu

SEQ ID NO: 210552 - RNA, 18 nt, Human
uuuguuuuguuuuguuuu

SEQ ID NO: 210553 - RNA, 21 nt, Human
uuuucggugcgcgacucaaca

SEQ ID NO: 210554 - RNA, 18 nt, Human
uuuuguaguuuuaguaga

SEQ ID NO: 210555 - RNA, 20 nt, Human
uuuuuguaguuuuaguagag

SEQ ID NO: 210556 - RNA, 24 nt, Human
aagaaaaauucaguuuauugagac

SEQ ID NO: 210557 - RNA, 22 nt, Human
gaccagguuauggcgacuucaa

SEQ ID NO: 210558 - RNA, 18 nt, Human
gagucaauaccaugucuc

SEQ ID NO: 210559 - RNA, 22 nt, Human
ugauauugccucucuccccgcc

SEQ ID NO: 210560 - RNA, 23 nt, Human
uggcgacuucaaauagccuucau

SEQ ID NO: 210561 - RNA, 19 nt, Human
uuuauugagacucauauug

SEQ ID NO: 210562 - RNA, 18 nt, Human
uuuuuuuuuuuuuuuucg

SEQ ID NO: 210563 - RNA, 22 nt, Human
uuuuuuuuuuuuuuuuucgcaa

SEQ ID NO: 210564 - RNA, 24 nt, Human
uuuuuuuuuuuuuuuuuuuuucgu

SEQ ID NO: 210565 - RNA, 24 nt, Human
aauaacagaaacacuuuaaaaaga

SEQ ID NO: 210566 - RNA, 19 nt, Human
accgcagccgggagggugc

SEQ ID NO: 210567 - RNA, 18 nt, Human
acgaucuuguaugggcug

SEQ ID NO: 210568 - RNA, 19 nt, Human
acuauauuacucaaugaca

SEQ ID NO: 210569 - RNA, 19 nt, Human
agcagcauggaacaugaug

SEQ ID NO: 210570 - RNA, 19 nt, Human
agccgggagggugcggcca

SEQ ID NO: 210571 - RNA, 18 nt, Human
augacauuuuucugccuu

SEQ ID NO: 210572 - RNA, 18 nt, Human
auggaacaugauggaaca

SEQ ID NO: 210573 - RNA, 21 nt, Human
ccaaggucugaucaucuucuu

SEQ ID NO: 210574 - RNA, 22 nt, Human
ccauccacgaugccuccuacaa

SEQ ID NO: 210575 - RNA, 21 nt, Human
gaagaagagcuggcuauggca

SEQ ID NO: 210576 - RNA, 22 nt, Human
gaauggauucuccaucgagucc

SEQ ID NO: 210577 - RNA, 23 nt, Human
ggcugcaggguggggggcgacag

SEQ ID NO: 210578 - RNA, 24 nt, Human
guaaaauaucagugcaacuuaaaa

SEQ ID NO: 210579 - RNA, 18 nt, Human
gucagcagcagcauggaa

SEQ ID NO: 210580 - RNA, 23 nt, Human
uaaaauaucagugcaacuuaaaa

SEQ ID NO: 210581 - RNA, 18 nt, Human
uaagcagcagagugaugu

SEQ ID NO: 210582 - RNA, 21 nt, Human
uaaguauugaagaagagcugg

SEQ ID NO: 210583 - RNA, 19 nt, Human
uauuggaauggauucucca

SEQ ID NO: 210584 - RNA, 21 nt, Human
uccaaagagccacauggccau

SEQ ID NO: 210585 - RNA, 19 nt, Human
ugaagaagagcuggcuaug

SEQ ID NO: 210586 - RNA, 18 nt, Human
ugacgucagcagcagcau

SEQ ID NO: 210587 - RNA, 22 nt, Human
ugacgucagcagcagcauggaa

SEQ ID NO: 210588 - RNA, 19 nt, Human
uggaacauugcuccaaaga

SEQ ID NO: 210589 - RNA, 19 nt, Human
uggcaagggguuuccagca

SEQ ID NO: 210590 - RNA, 18 nt, Human
uggcugcagggugggggg

SEQ ID NO: 210591 - RNA, 22 nt, Human
uguaugggcuggcuaucugcua

SEQ ID NO: 210592 - RNA, 20 nt, Human
uucauagucacuauauuacu

SEQ ID NO: 210593 - RNA, 23 nt, Human
acgcuggugucuucccuguagac

SEQ ID NO: 210594 - RNA, 21 nt, Human
aggcagguggugcccauggga

SEQ ID NO: 210595 - RNA, 18 nt, Human
aucucucccaccuuuccc

SEQ ID NO: 210596 - RNA, 20 nt, Human
augagggacggaagauucgg

SEQ ID NO: 210597 - RNA, 20 nt, Human
caggagaagccuuguaauug

SEQ ID NO: 210598 - RNA, 19 nt, Human
cauuuuaaaaauauugaaa

SEQ ID NO: 210599 - RNA, 18 nt, Human
cgacaggcaggcaggugg

SEQ ID NO: 210600 - RNA, 21 nt, Human
cgggcgagcgcugcccaggcc

SEQ ID NO: 210601 - RNA, 21 nt, Human
gagcagcuggagacagggugg

SEQ ID NO: 210602 - RNA, 18 nt, Human
gcagcuggagacagggug

SEQ ID NO: 210603 - RNA, 28 nt, Human
gcuaaagcagagaggcuccuucacuccg

SEQ ID NO: 210604 - RNA, 20 nt, Human
ggacaccgcuggacuccccg

SEQ ID NO: 210605 - RNA, 20 nt, Human
uaaauauaaacgcauauauu

SEQ ID NO: 210606 - RNA, 18 nt, Human
uaugucacuuuucucugu

SEQ ID NO: 210607 - RNA, 20 nt, Human
ucagcaucucucccaccuuu

SEQ ID NO: 210608 - RNA, 22 nt, Human
ucagcaucucucccaccuuucc

SEQ ID NO: 210609 - RNA, 19 nt, Human
uccccgggcgagcgcugcc

SEQ ID NO: 210610 - RNA, 21 nt, Human
uccccgggcgagcgcugccca

SEQ ID NO: 210611 - RNA, 19 nt, Human
ucccuguagacgucuccca

SEQ ID NO: 210612 - RNA, 21 nt, Human
uccugcucagaagccuuuggu

SEQ ID NO: 210613 - RNA, 19 nt, Human
uccugggaagcugggcccu

SEQ ID NO: 210614 - RNA, 22 nt, Human
uccugggaagcugggcccuggg

SEQ ID NO: 210615 - RNA, 18 nt, Human
ucucucccaccuuuccca

SEQ ID NO: 210616 - RNA, 23 nt, Human
ucucugugaacugcaaguuagga

SEQ ID NO: 210617 - RNA, 22 nt, Human
ucuuuagcuaaagcagagaggc

SEQ ID NO: 210618 - RNA, 21 nt, Human
ugagauccugcugggacuucu

SEQ ID NO: 210619 - RNA, 18 nt, Human
ugcccaggccggggggag

SEQ ID NO: 210620 - RNA, 19 nt, Human
ugcccaugggaaugcggag

SEQ ID NO: 210621 - RNA, 21 nt, Human
ugcuccuggagcccgcuuccu

SEQ ID NO: 210622 - RNA, 20 nt, Human
uuccugaauccuucaaugga

SEQ ID NO: 210623 - RNA, 24 nt, Human
uuuauacaagguacaaugucaaaa

SEQ ID NO: 210624 - RNA, 25 nt, Human
uuuauacaagguacaaugucaaaau

SEQ ID NO: 210625 - RNA, 21 nt, Human
aagccaggcaugaaugucaua

SEQ ID NO: 210626 - RNA, 19 nt, Human
aagcccaccugugcuuucc

SEQ ID NO: 210627 - RNA, 22 nt, Human
aaggagaggccaccuauaagca

SEQ ID NO: 210628 - RNA, 20 nt, Human
aaugaccccagcaauauuuc

SEQ ID NO: 210629 - RNA, 21 nt, Human
acaaggagaggccaccuauaa

SEQ ID NO: 210630 - RNA, 23 nt, Human
acaaggagaggccaccuauaagc

SEQ ID NO: 210631 - RNA, 21 nt, Human
acaguacuugaaacauuuugc

SEQ ID NO: 210632 - RNA, 27 nt, Human
acccugagaaucagcgguuaugggagc

SEQ ID NO: 210633 - RNA, 19 nt, Human
accuuuugcuggguggcgu

SEQ ID NO: 210634 - RNA, 19 nt, Human
caaggagaggccaccuaua

SEQ ID NO: 210635 - RNA, 22 nt, Human
caaggagaggccaccuauaaga

SEQ ID NO: 210636 - RNA, 22 nt, Human
cacaauauuaucauuaagcucu

SEQ ID NO: 210637 - RNA, 18 nt, Human
cagcugccccagugugac

SEQ ID NO: 210638 - RNA, 24 nt, Human
cagcugccccagugugacucugcc

SEQ ID NO: 210639 - RNA, 21 nt, Human
caggccacaaggagaggccac

SEQ ID NO: 210640 - RNA, 20 nt, Human
caugacuuugcaugacgcca

SEQ ID NO: 210641 - RNA, 24 nt, Human
cauuccaaucucugcccacauugc

SEQ ID NO: 210642 - RNA, 18 nt, Human
cauuuugcgaagccaggc

SEQ ID NO: 210643 - RNA, 19 nt, Human
ccacaaggagaggccaccu

SEQ ID NO: 210644 - RNA, 22 nt, Human
cccaggccacaaggagaggcca

SEQ ID NO: 210645 - RNA, 20 nt, Human
cccuucccuaggauuacuuc

SEQ ID NO: 210646 - RNA, 19 nt, Human
ccuggcucgcccucugugg

SEQ ID NO: 210647 - RNA, 18 nt, Human
cucagguggucccagccu

SEQ ID NO: 210648 - RNA, 20 nt, Human
cuccucuauuuacuggcucc

SEQ ID NO: 210649 - RNA, 18 nt, Human
cugggcuggcucuucucc

SEQ ID NO: 210650 - RNA, 19 nt, Human
cuggguggcguccuagaag

SEQ ID NO: 210651 - RNA, 18 nt, Human
cugugcuuucccccaucu

SEQ ID NO: 210652 - RNA, 19 nt, Human
cuguguguuagcugugugu

SEQ ID NO: 210653 - RNA, 20 nt, Human
cuucccuaggauuacuucuc

SEQ ID NO: 210654 - RNA, 24 nt, Human
gagcugcccauuccaaucucugcc

SEQ ID NO: 210655 - RNA, 27 nt, Human
gcagcaguggcagcagcucucucgcuu

SEQ ID NO: 210656 - RNA, 25 nt, Human
gcagccccaggugaguucccagcca

SEQ ID NO: 210657 - RNA, 18 nt, Human
gcuggcucuucuccaccc

SEQ ID NO: 210658 - RNA, 22 nt, Human
ggacuuggucugugggccgaua

SEQ ID NO: 210659 - RNA, 22 nt, Human
ggggauguuugggucacugggc

SEQ ID NO: 210660 - RNA, 18 nt, Human
gguccugggcagccggca

SEQ ID NO: 210661 - RNA, 18 nt, Human
guggaggacuuggucugu

SEQ ID NO: 210662 - RNA, 24 nt, Human
uaaaugaccccagcaauauuuccu

SEQ ID NO: 210663 - RNA, 22 nt, Human
uaagcauucaggccagcagccc

SEQ ID NO: 210664 - RNA, 24 nt, Human
uagcagcaguggcagcagcucucu

SEQ ID NO: 210665 - RNA, 18 nt, Human
uauuaucauuaagcucuc

SEQ ID NO: 210666 - RNA, 24 nt, Human
uccaaggcaaagguauaaacaaga

SEQ ID NO: 210667 - RNA, 19 nt, Human
ucucagguggucccagccu

SEQ ID NO: 210668 - RNA, 22 nt, Human
ucugcaauuuguaucagcugcc

SEQ ID NO: 210669 - RNA, 18 nt, Human
ugaccccagcaauauuuc

SEQ ID NO: 210670 - RNA, 20 nt, Human
ugacgccagcugaugccaag

SEQ ID NO: 210671 - RNA, 18 nt, Human
ugagaaaaauaaauguca

SEQ ID NO: 210672 - RNA, 22 nt, Human
ugaucucagguggucccagccu

SEQ ID NO: 210673 - RNA, 20 nt, Human
ugccaagugggacagagaug

SEQ ID NO: 210674 - RNA, 24 nt, Human
ugccaugcaacuuccaaggcaaag

SEQ ID NO: 210675 - RNA, 25 nt, Human
ugcuucaccuguacuccucuauuua

SEQ ID NO: 210676 - RNA, 23 nt, Human
uggcagcagcucucucgcuuccu

SEQ ID NO: 210677 - RNA, 22 nt, Human
uggcucuugcgauccugggaug

SEQ ID NO: 210678 - RNA, 18 nt, Human
uggcuuuggcuucagcau

SEQ ID NO: 210679 - RNA, 22 nt, Human
uggcuuuggcuucagcaugucc

SEQ ID NO: 210680 - RNA, 23 nt, Human
ugguuuuuuuguuuguuuucuaa

SEQ ID NO: 210681 - RNA, 18 nt, Human
uguacuccucuauuuacu

SEQ ID NO: 210682 - RNA, 18 nt, Human
ugugguagcagcaguggc

SEQ ID NO: 210683 - RNA, 19 nt, Human
ugugguagcagcaguggca

SEQ ID NO: 210684 - RNA, 32 nt, Human
ugugguagcagcaguggcagcagcucucucuu

SEQ ID NO: 210685 - RNA, 22 nt, Human
ugugucagcucuaacugaugga

SEQ ID NO: 210686 - RNA, 21 nt, Human
uucccuaggauuacuucucca

SEQ ID NO: 210687 - RNA, 22 nt, Human
uuuuucauaaaugaccccagca

SEQ ID NO: 210688 - RNA, 21 nt, Human
aaaaaaguaaacaagaagcaa

SEQ ID NO: 210689 - RNA, 20 nt, Human
aaaaagacaaacaaaauaaa

SEQ ID NO: 210690 - RNA, 24 nt, Human
aaaaugcuucugucuacagcauug

SEQ ID NO: 210691 - RNA, 23 nt, Human
aagacaaugucuccucccagaac

SEQ ID NO: 210692 - RNA, 19 nt, Human
aaggcaugugaaaucgaga

SEQ ID NO: 210693 - RNA, 24 nt, Human
acaugcuuuguuuugcuuauagga

SEQ ID NO: 210694 - RNA, 26 nt, Human
agaaucuuaucuucuuucuccucugg

SEQ ID NO: 210695 - RNA, 22 nt, Human
agacagaagccaggcccuagga

SEQ ID NO: 210696 - RNA, 21 nt, Human
agugcuuuuucaccuuuuucu

SEQ ID NO: 210697 - RNA, 18 nt, Human
auuugcucuauuccuauc

SEQ ID NO: 210698 - RNA, 19 nt, Human
cagaagccaggcccuagga

SEQ ID NO: 210699 - RNA, 20 nt, Human
cagaagccaggcccuaggag

SEQ ID NO: 210700 - RNA, 27 nt, Human
ccaucagcuccuuucuggggggccgcc

SEQ ID NO: 210701 - RNA, 21 nt, Human
cuacagcauuggcuaauagua

SEQ ID NO: 210702 - RNA, 24 nt, Human
cuaggcagaacugauaauagugcu

SEQ ID NO: 210703 - RNA, 19 nt, Human
cuuauaggagaauuugcau

SEQ ID NO: 210704 - RNA, 23 nt, Human
cuuguaaaaccucaacaaauugc

SEQ ID NO: 210705 - RNA, 22 nt, Human
gaaaaugguuacgaugugaaac

SEQ ID NO: 210706 - RNA, 19 nt, Human
gaacaaauaaacauuuucu

SEQ ID NO: 210707 - RNA, 20 nt, Human
gaaggaugaggguuccugag

SEQ ID NO: 210708 - RNA, 25 nt, Human
gacaugcuuuguuuugcuuauagga

SEQ ID NO: 210709 - RNA, 27 nt, Human
gacuugcuguaucucuuguaaaaccuc

SEQ ID NO: 210710 - RNA, 23 nt, Human
uaaaaacaaagaggaggaaauac

SEQ ID NO: 210711 - RNA, 25 nt, Human
uaaaaagacaaacaaaauaaaguag

SEQ ID NO: 210712 - RNA, 22 nt, Human
uaaacaagaagcaaauugguac

SEQ ID NO: 210713 - RNA, 19 nt, Human
uaaauaacuuaaagcccuu

SEQ ID NO: 210714 - RNA, 26 nt, Human
uaaauaauaaaauucccaagcccaga

SEQ ID NO: 210715 - RNA, 24 nt, Human
uacagaaggauuuuauuauaaggg

SEQ ID NO: 210716 - RNA, 19 nt, Human
uacgaugugaaacuugaaa

SEQ ID NO: 210717 - RNA, 18 nt, Human
uacuauauccguauguug

SEQ ID NO: 210718 - RNA, 22 nt, Human
uagauccuuaaauagcucaaau

SEQ ID NO: 210719 - RNA, 21 nt, Human
uaggcagaacugauaauagug

SEQ ID NO: 210720 - RNA, 22 nt, Human
uauauccguauguuguaaagac

SEQ ID NO: 210721 - RNA, 22 nt, Human
uaucuuacauuuaccuaggcag

SEQ ID NO: 210722 - RNA, 22 nt, Human
uccgaaaugaggcugucuuuga

SEQ ID NO: 210723 - RNA, 22 nt, Human
ucuacagcauuggcuaauagua

SEQ ID NO: 210724 - RNA, 19 nt, Human
ucucugaggggccuuaauc

SEQ ID NO: 210725 - RNA, 20 nt, Human
ugaaacuugaaacuacucug

SEQ ID NO: 210726 - RNA, 20 nt, Human
ugaagacaaugucuccuccc

SEQ ID NO: 210727 - RNA, 22 nt, Human
ugaggaagagaaaaauguuggu

SEQ ID NO: 210728 - RNA, 21 nt, Human
ugaggguuccugaggggcugg

SEQ ID NO: 210729 - RNA, 22 nt, Human
ugaggguuccugaggggcuggg

SEQ ID NO: 210730 - RNA, 21 nt, Human
ugagucuaggggagaaacugg

SEQ ID NO: 210731 - RNA, 20 nt, Human
ugccuuaagaacucuaauga

SEQ ID NO: 210732 - RNA, 21 nt, Human
uggaauuuuggguauuuccag

SEQ ID NO: 210733 - RNA, 20 nt, Human
uggaugaguuugugccugcc

SEQ ID NO: 210734 - RNA, 19 nt, Human
uuaguccgaaaugaggcug

SEQ ID NO: 210735 - RNA, 18 nt, Human
uuccugaggggcuggguc

SEQ ID NO: 210736 - RNA, 18 nt, Human
ccugcagcugcugcccgc

SEQ ID NO: 210737 - RNA, 19 nt, Human
gugcaaggaggauggucuc

SEQ ID NO: 210738 - RNA, 23 nt, Human
ucuuggcacaaaggugcaaggag

SEQ ID NO: 210739 - RNA, 24 nt, Human
uggcacaaaggugcaaggaggaug

SEQ ID NO: 210740 - RNA, 21 nt, Human
uggucucgggcugcuggccug

SEQ ID NO: 210741 - RNA, 22 nt, Human
uuggcacaaaggugcaaggagg

SEQ ID NO: 210742 - RNA, 23 nt, Human
cagcagccaucguggcaggcuug

SEQ ID NO: 210743 - RNA, 28 nt, Human
ccugcugacaccugcuacuugacaugga

SEQ ID NO: 210744 - RNA, 19 nt, Human
ucaaucucucuaaaguaga

SEQ ID NO: 210745 - RNA, 25 nt, Human
ucguggcaggcuugugaucuuuuuc

SEQ ID NO: 210746 - RNA, 22 nt, Human
ucugcacagaaagcaguggcau

SEQ ID NO: 210747 - RNA, 19 nt, Human
ugacaccugcuacuugaca

SEQ ID NO: 210748 - RNA, 24 nt, Human
ugaggugguacuuggggcagacac

SEQ ID NO: 210749 - RNA, 21 nt, Human
ugcuacuugacauggagaagu

SEQ ID NO: 210750 - RNA, 24 nt, Human
ugugaucuuuuuccugcugacacc

SEQ ID NO: 210751 - RNA, 18 nt, Human
uucaugaggugguacuug

SEQ ID NO: 210752 - RNA, 18 nt, Human
uuggggcagacacugaga

SEQ ID NO: 210753 - RNA, 19 nt, Human
uuggggcagacacugagag

SEQ ID NO: 210754 - RNA, 26 nt, Human
uuuccugcugacaccugcuacuugac

SEQ ID NO: 210755 - RNA, 18 nt, Human
uuuuccugcugacaccuu

SEQ ID NO: 210756 - RNA, 21 nt, Human
aaacaaacaaauaaaaccagg

SEQ ID NO: 210757 - RNA, 24 nt, Human
aaaccuuuccugagagaaaaugac

SEQ ID NO: 210758 - RNA, 19 nt, Human
aaagauauuuauuuggaua

SEQ ID NO: 210759 - RNA, 19 nt, Human
aaagccccccauccugucc

SEQ ID NO: 210760 - RNA, 24 nt, Human
aagugcagguuuuccccaaagccc

SEQ ID NO: 210761 - RNA, 26 nt, Human
acccucagcagcaucucugcuccucu

SEQ ID NO: 210762 - RNA, 21 nt, Human
agcacagcccucaggcagccc

SEQ ID NO: 210763 - RNA, 22 nt, Human
agcuuccggcggcccuaagcag

SEQ ID NO: 210764 - RNA, 22 nt, Human
agggaccagccuccagcagguc

SEQ ID NO: 210765 - RNA, 21 nt, Human
caaacaaauaaaaccaggggc

SEQ ID NO: 210766 - RNA, 21 nt, Human
caaagccccccauccuguccc

SEQ ID NO: 210767 - RNA, 21 nt, Human
caauaacagcuuccuccucag

SEQ ID NO: 210768 - RNA, 20 nt, Human
cacagcccucaggcagcccc

SEQ ID NO: 210769 - RNA, 22 nt, Human
cacucagucacaagucgggcac

SEQ ID NO: 210770 - RNA, 20 nt, Human
cagacagcacuucacagggg

SEQ ID NO: 210771 - RNA, 18 nt, Human
caggggcucuuucuucuu

SEQ ID NO: 210772 - RNA, 25 nt, Human
cccaaagccccccauccugucccgg

SEQ ID NO: 210773 - RNA, 26 nt, Human
cccagccccaaaccuggcagcuuggc

SEQ ID NO: 210774 - RNA, 23 nt, Human
ccccaaaccuggcagcuuggccu

SEQ ID NO: 210775 - RNA, 21 nt, Human
ccccagccccaaaccuggcag

SEQ ID NO: 210776 - RNA, 25 nt, Human
ccccugggaucccaguuucucacuc

SEQ ID NO: 210777 - RNA, 22 nt, Human
ccuccacccucagcagcaucuc

SEQ ID NO: 210778 - RNA, 21 nt, Human
ccucucccucucagcacagcc

SEQ ID NO: 210779 - RNA, 21 nt, Human
ccuggcagcuuggccucccuc

SEQ ID NO: 210780 - RNA, 21 nt, Human
cgggauccugcugcuccagac

SEQ ID NO: 210781 - RNA, 19 nt, Human
cucacuccacuuggccccc

SEQ ID NO: 210782 - RNA, 18 nt, Human
cuccagacagcacuucac

SEQ ID NO: 210783 - RNA, 18 nt, Human
cucccucucagcacagcc

SEQ ID NO: 210784 - RNA, 21 nt, Human
cuggagcagguuaggaguccu

SEQ ID NO: 210785 - RNA, 19 nt, Human
cuucacaggggccaagcau

SEQ ID NO: 210786 - RNA, 25 nt, Human
cuuggcccccagccccaaaccuggc

SEQ ID NO: 210787 - RNA, 24 nt, Human
gaaugcacccaaaguagaugcuca

SEQ ID NO: 210788 - RNA, 21 nt, Human
gaucccaguuucucacuccac

SEQ ID NO: 210789 - RNA, 21 nt, Human
gcagcccucugcacugaccug

SEQ ID NO: 210790 - RNA, 18 nt, Human
gcccccagccccaaaccu

SEQ ID NO: 210791 - RNA, 19 nt, Human
ggaagagacaggaguggug

SEQ ID NO: 210792 - RNA, 21 nt, Human
ggaucccaguuucucacucca

SEQ ID NO: 210793 - RNA, 22 nt, Human
gguagcaggggaugggaaaaga

SEQ ID NO: 210794 - RNA, 22 nt, Human
gguuguacaccuggcuccaggu

SEQ ID NO: 210795 - RNA, 18 nt, Human
guagcaggggaugggaaa

SEQ ID NO: 210796 - RNA, 28 nt, Human
uaaaucucuauacauucaauaacagcuu

SEQ ID NO: 210797 - RNA, 23 nt, Human
uacacuagaaugcacccaaagua

SEQ ID NO: 210798 - RNA, 23 nt, Human
uagcaggggaugggaaaagagga

SEQ ID NO: 210799 - RNA, 21 nt, Human
ucacaggggccaagcaucugg

SEQ ID NO: 210800 - RNA, 19 nt, Human
ucaggcagcccucugcacu

SEQ ID NO: 210801 - RNA, 21 nt, Human
ucccaaaaagggaccagccuc

SEQ ID NO: 210802 - RNA, 20 nt, Human
uccccaaagccccccauccu

SEQ ID NO: 210803 - RNA, 22 nt, Human
uccccaaagccccccauccugu

SEQ ID NO: 210804 - RNA, 20 nt, Human
ucccccugggaucccaguuu

SEQ ID NO: 210805 - RNA, 23 nt, Human
ucccgggauccugcugcuccaga

SEQ ID NO: 210806 - RNA, 20 nt, Human
ugacuggagcagguuaggag

SEQ ID NO: 210807 - RNA, 24 nt, Human
ugaguaaacaaacaaauaaaacca

SEQ ID NO: 210808 - RNA, 18 nt, Human
ugccugugcugggccagg

SEQ ID NO: 210809 - RNA, 20 nt, Human
uggcccccagccccaaaccu

SEQ ID NO: 210810 - RNA, 27 nt, Human
uggcccccagccccaaaccuggcagcu

SEQ ID NO: 210811 - RNA, 19 nt, Human
ugggccaggguagcagggg

SEQ ID NO: 210812 - RNA, 22 nt, Human
uuccccaaagccccccauccug

SEQ ID NO: 210813 - RNA, 23 nt, Human
uuguacaccuggcuccagguuuc

SEQ ID NO: 210814 - RNA, 25 nt, Human
uuuuuuuuuuuuuuuuuucauuuuu

SEQ ID NO: 210815 - RNA, 24 nt, Human
aaguagcuaggacuacaggcaugu

SEQ ID NO: 210816 - RNA, 27 nt, Human
aaguagcuaggacuacaggcauguguc

SEQ ID NO: 210817 - RNA, 24 nt, Human
aaugugcugggauuacaggcguga

SEQ ID NO: 210818 - RNA, 19 nt, Human
acacacgaacauauacaca

SEQ ID NO: 210819 - RNA, 19 nt, Human
acaugcagacauguacaca

SEQ ID NO: 210820 - RNA, 18 nt, Human
accauguuggccaggcug

SEQ ID NO: 210821 - RNA, 19 nt, Human
agagugauccaccugccuc

SEQ ID NO: 210822 - RNA, 21 nt, Human
agcgggcuguguggauucccc

SEQ ID NO: 210823 - RNA, 23 nt, Human
aggcgugagccaccgugcccggc

SEQ ID NO: 210824 - RNA, 24 nt, Human
aggcuggcucaaacuccugaccuc

SEQ ID NO: 210825 - RNA, 25 nt, Human
aggcuuucuuuuccgcccucgugcc

SEQ ID NO: 210826 - RNA, 23 nt, Human
agugauccaccugccucggccuc

SEQ ID NO: 210827 - RNA, 24 nt, Human
agugcaauggcacaaucucggcuc

SEQ ID NO: 210828 - RNA, 22 nt, Human
aguggagaugggguuucaccau

SEQ ID NO: 210829 - RNA, 18 nt, Human
augggguuucaccauguu

SEQ ID NO: 210830 - RNA, 22 nt, Human
augggguuucaccauguuggcc

SEQ ID NO: 210831 - RNA, 23 nt, Human
augggguuucaccauguuggcca

SEQ ID NO: 210832 - RNA, 24 nt, Human
augggguuucaccauguuggccag

SEQ ID NO: 210833 - RNA, 31 nt, Human
auguacacacagaugaauacgugcacacagu

SEQ ID NO: 210834 - RNA, 24 nt, Human
auuuuucuauuuuuaguggagaug

SEQ ID NO: 210835 - RNA, 22 nt, Human
caagcaauucuccugccucagc

SEQ ID NO: 210836 - RNA, 27 nt, Human
caagcaauucuccugccucagccuccc

SEQ ID NO: 210837 - RNA, 24 nt, Human
caaugugcugggauuacaggcgug

SEQ ID NO: 210838 - RNA, 21 nt, Human
caccauguuggccaggcuggc

SEQ ID NO: 210839 - RNA, 23 nt, Human
caccauguuggccaggcuggcuc

SEQ ID NO: 210840 - RNA, 26 nt, Human
caccauguuggccaggcuggcucaaa

SEQ ID NO: 210841 - RNA, 18 nt, Human
cacugcaaccucugccuc

SEQ ID NO: 210842 - RNA, 21 nt, Human
cacugcaaccucugccuccca

SEQ ID NO: 210843 - RNA, 22 nt, Human
cagaccgcugcacaaagaaaag

SEQ ID NO: 210844 - RNA, 24 nt, Human
cagcgagcgaacguucugaggcuu

SEQ ID NO: 210845 - RNA, 22 nt, Human
cauauacacaugcagacaugua

SEQ ID NO: 210846 - RNA, 24 nt, Human
cauguacacacagaugaauacgug

SEQ ID NO: 210847 - RNA, 23 nt, Human
cauguuggccaggcuggcucaaa

SEQ ID NO: 210848 - RNA, 20 nt, Human
ccaaugugcugggauuacag

SEQ ID NO: 210849 - RNA, 22 nt, Human
ccaaugugcugggauuacaggc

SEQ ID NO: 210850 - RNA, 24 nt, Human
ccaaugugcugggauuacaggcgu

SEQ ID NO: 210851 - RNA, 21 nt, Human
ccauuagcuccugggagcggg

SEQ ID NO: 210852 - RNA, 24 nt, Human
cccaaguagcuaggacuacaggca

SEQ ID NO: 210853 - RNA, 24 nt, Human
ccucccagauucaagcaauucucc

SEQ ID NO: 210854 - RNA, 24 nt, Human
ccugaccucagagugauccaccug

SEQ ID NO: 210855 - RNA, 21 nt, Human
ccugccucggccucccaaugu

SEQ ID NO: 210856 - RNA, 24 nt, Human
ccugccucggccucccaaugugcu

SEQ ID NO: 210857 - RNA, 24 nt, Human
cgcucugucauccaggcugcagug

SEQ ID NO: 210858 - RNA, 24 nt, Human
cgugagccaccgugcccggcccau

SEQ ID NO: 210859 - RNA, 20 nt, Human
cucaaggcugggaucugggc

SEQ ID NO: 210860 - RNA, 24 nt, Human
cucacugcaaccucugccucccag

SEQ ID NO: 210861 - RNA, 24 nt, Human
cucccaaguagcuaggacuacagg

SEQ ID NO: 210862 - RNA, 21 nt, Human
cuccugggagcgggcugugug

SEQ ID NO: 210863 - RNA, 23 nt, Human
cugcaaccucugccucccagauu

SEQ ID NO: 210864 - RNA, 24 nt, Human
cugcaaccucugccucccagauuc

SEQ ID NO: 210865 - RNA, 23 nt, Human
cugccucagccucccaaguagcu

SEQ ID NO: 210866 - RNA, 25 nt, Human
gaccucagagugauccaccugccuc

SEQ ID NO: 210867 - RNA, 24 nt, Human
gacuacaggcaugugucaccaugc

SEQ ID NO: 210868 - RNA, 18 nt, Human
gagaugggguuucaccau

SEQ ID NO: 210869 - RNA, 24 nt, Human
gagaugggguuucaccauguuggc

SEQ ID NO: 210870 - RNA, 24 nt, Human
gagcgggcuguguggauuccccug

SEQ ID NO: 210871 - RNA, 18 nt, Human
gauuacaggcgugagcca

SEQ ID NO: 210872 - RNA, 21 nt, Human
gauuacaggcgugagccaccg

SEQ ID NO: 210873 - RNA, 24 nt, Human
gauuacaggcgugagccaccgugc

SEQ ID NO: 210874 - RNA, 20 nt, Human
gccucagccucccaaguagc

SEQ ID NO: 210875 - RNA, 22 nt, Human
gcuggcucaaacuccugaccuc

SEQ ID NO: 210876 - RNA, 22 nt, Human
ggacuacaggcaugugucacca

SEQ ID NO: 210877 - RNA, 24 nt, Human
ggacuacaggcaugugucaccaug

SEQ ID NO: 210878 - RNA, 24 nt, Human
ggcucaaacuccugaccucagagu

SEQ ID NO: 210879 - RNA, 20 nt, Human
gggcggucccuggggagccg

SEQ ID NO: 210880 - RNA, 22 nt, Human
gggguuucaccauguuggccag

SEQ ID NO: 210881 - RNA, 24 nt, Human
gugauccaccugccucggccuccc

SEQ ID NO: 210882 - RNA, 21 nt, Human
gugcugggauuacaggcguga

SEQ ID NO: 210883 - RNA, 23 nt, Human
guggagaugggguuucaccaugu

SEQ ID NO: 210884 - RNA, 19 nt, Human
uaaccagaccgcugcacaa

SEQ ID NO: 210885 - RNA, 23 nt, Human
uaauuuuucuauuuuuaguggag

SEQ ID NO: 210886 - RNA, 24 nt, Human
uaauuuuucuauuuuuaguggaga

SEQ ID NO: 210887 - RNA, 23 nt, Human
uacaggcaugugucaccaugccc

SEQ ID NO: 210888 - RNA, 23 nt, Human
uacaggcgugagccaccgugccc

SEQ ID NO: 210889 - RNA, 24 nt, Human
uaggacuacaggcaugugucacca

SEQ ID NO: 210890 - RNA, 24 nt, Human
uaguggagaugggguuucaccaug

SEQ ID NO: 210891 - RNA, 24 nt, Human
uauacacaugcagacauguacaca

SEQ ID NO: 210892 - RNA, 18 nt, Human
ucacugcaaccucugccu

SEQ ID NO: 210893 - RNA, 19 nt, Human
ucacugcaaccucugccuc

SEQ ID NO: 210894 - RNA, 23 nt, Human
ucacugcaaccucugccucccag

SEQ ID NO: 210895 - RNA, 24 nt, Human
ucacugcaaccucugccucccaga

SEQ ID NO: 210896 - RNA, 23 nt, Human
ucagagugauccaccugccucgg

SEQ ID NO: 210897 - RNA, 18 nt, Human
ucagccucccaaguagcu

SEQ ID NO: 210898 - RNA, 20 nt, Human
ucagccucccaaguagcuag

SEQ ID NO: 210899 - RNA, 20 nt, Human
uccaggcugcagugcaaugg

SEQ ID NO: 210900 - RNA, 19 nt, Human
ucccaaaugcccgccacau

SEQ ID NO: 210901 - RNA, 24 nt, Human
ucccaaguagcuaggacuacaggc

SEQ ID NO: 210902 - RNA, 24 nt, Human
ucccaaugugcugggauuacaggc

SEQ ID NO: 210903 - RNA, 21 nt, Human
ucccagauucaagcaauucuc

SEQ ID NO: 210904 - RNA, 24 nt, Human
ucccagauucaagcaauucuccug

SEQ ID NO: 210905 - RNA, 26 nt, Human
ucuccugccucagccucccaaguagc

SEQ ID NO: 210906 - RNA, 19 nt, Human
ucucgcucugucauccagg

SEQ ID NO: 210907 - RNA, 22 nt, Human
ucucgcucugucauccaggcug

SEQ ID NO: 210908 - RNA, 26 nt, Human
ucucgcucugucauccaggcugcagu

SEQ ID NO: 210909 - RNA, 27 nt, Human
ucucgcucugucauccaggcugcagug

SEQ ID NO: 210910 - RNA, 24 nt, Human
ucugucauccaggcugcagugcaa

SEQ ID NO: 210911 - RNA, 25 nt, Human
ugaccucagagugauccaccugccu

SEQ ID NO: 210912 - RNA, 18 nt, Human
ugagauagagucucgcuc

SEQ ID NO: 210913 - RNA, 22 nt, Human
ugagauagagucucgcucuguc

SEQ ID NO: 210914 - RNA, 20 nt, Human
ugcccggcuaauuuuucuau

SEQ ID NO: 210915 - RNA, 23 nt, Human
ugccucagccucccaaguagcua

SEQ ID NO: 210916 - RNA, 24 nt, Human
ugccucagccucccaaguagcuag

SEQ ID NO: 210917 - RNA, 21 nt, Human
ugccucggccucccaaugugc

SEQ ID NO: 210918 - RNA, 24 nt, Human
ugccucggccucccaaugugcugg

SEQ ID NO: 210919 - RNA, 24 nt, Human
ugcugggauuacaggcgugagcca

SEQ ID NO: 210920 - RNA, 24 nt, Human
uggcacaaucucggcucacugcaa

SEQ ID NO: 210921 - RNA, 18 nt, Human
ugggauuacaggcgugag

SEQ ID NO: 210922 - RNA, 21 nt, Human
ugggauuacaggcgugagcca

SEQ ID NO: 210923 - RNA, 22 nt, Human
ugggauuacaggcgugagccac

SEQ ID NO: 210924 - RNA, 23 nt, Human
ugggauuacaggcgugagccacc

SEQ ID NO: 210925 - RNA, 23 nt, Human
ugggauuacaggcgugagccacc

SEQ ID NO: 210926 - RNA, 24 nt, Human
ugggauuacaggcgugagccaccg

SEQ ID NO: 210927 - RNA, 24 nt, Human
ugggguuucaccauguuggccagg

SEQ ID NO: 210928 - RNA, 18 nt, Human
uguguggauuccccuggg

SEQ ID NO: 210929 - RNA, 18 nt, Human
uuaguggagaugggguuu

SEQ ID NO: 210930 - RNA, 22 nt, Human
uuaguggagaugggguuucacc

SEQ ID NO: 210931 - RNA, 24 nt, Human
uuaguggagaugggguuucaccau

SEQ ID NO: 210932 - RNA, 21 nt, Human
uucaagcaauucuccugccuc

SEQ ID NO: 210933 - RNA, 24 nt, Human
uucaagcaauucuccugccucagc

SEQ ID NO: 210934 - RNA, 24 nt, Human
uuggccaggcuggcucaaacuccu

SEQ ID NO: 210935 - RNA, 21 nt, Human
uuucaccauguuggccaggcu

SEQ ID NO: 210936 - RNA, 24 nt, Human
uuuuuaguggagaugggguuucac

SEQ ID NO: 210937 - RNA, 25 nt, Human
uuuuuuuuuuuugagauagagucuc

SEQ ID NO: 210938 - RNA, 20 nt, Human
uuuuuuuuuuuuuuuuuugg

SEQ ID NO: 210939 - RNA, 24 nt, Human
aaagggcugggauuacaggcguga

SEQ ID NO: 210940 - RNA, 19 nt, Human
aacaccugaccucugguga

SEQ ID NO: 210941 - RNA, 24 nt, Human
accauguuggucaggcuggucuug

SEQ ID NO: 210942 - RNA, 21 nt, Human
agccagaguuggcagccagga

SEQ ID NO: 210943 - RNA, 18 nt, Human
aggaagcgaucuggaagg

SEQ ID NO: 210944 - RNA, 24 nt, Human
agggcugggauuacaggcgugagc

SEQ ID NO: 210945 - RNA, 24 nt, Human
agugauucuccugccucagccucu

SEQ ID NO: 210946 - RNA, 20 nt, Human
augagguuucaccauguugg

SEQ ID NO: 210947 - RNA, 21 nt, Human
augagguuucaccauguuggu

SEQ ID NO: 210948 - RNA, 24 nt, Human
augagguuucaccauguuggucag

SEQ ID NO: 210949 - RNA, 25 nt, Human
auuuuuaguagagaugagguuucac

SEQ ID NO: 210950 - RNA, 24 nt, Human
caaagggcugggauuacaggcgug

SEQ ID NO: 210951 - RNA, 22 nt, Human
caagugauucuccugccucagc

SEQ ID NO: 210952 - RNA, 21 nt, Human
caccauguuggucaggcuggu

SEQ ID NO: 210953 - RNA, 23 nt, Human
caccauguuggucaggcuggucu

SEQ ID NO: 210954 - RNA, 24 nt, Human
caccauguuggucaggcuggucuu

SEQ ID NO: 210955 - RNA, 26 nt, Human
caccugaccucuggugaucugcccgc

SEQ ID NO: 210956 - RNA, 24 nt, Human
cacuacacucagcuaauuuuuagu

SEQ ID NO: 210957 - RNA, 24 nt, Human
cauguuggucaggcuggucuugaa

SEQ ID NO: 210958 - RNA, 22 nt, Human
ccaaagggcugggauuacaggc

SEQ ID NO: 210959 - RNA, 23 nt, Human
ccaaagggcugggauuacaggcg

SEQ ID NO: 210960 - RNA, 24 nt, Human
ccaaagggcugggauuacaggcgu

SEQ ID NO: 210961 - RNA, 22 nt, Human
ccacaaccucuaccuccggagu

SEQ ID NO: 210962 - RNA, 21 nt, Human
ccugaccucuggugaucuggu

SEQ ID NO: 210963 - RNA, 24 nt, Human
cgccucagccucccaaagggcugg

SEQ ID NO: 210964 - RNA, 24 nt, Human
cucagccucuugaguagcugggau

SEQ ID NO: 210965 - RNA, 23 nt, Human
cugccucagccucuugaguagcu

SEQ ID NO: 210966 - RNA, 18 nt, Human
gagaggaagcgaucugga

SEQ ID NO: 210967 - RNA, 24 nt, Human
gagaugagguuucaccauguuggu

SEQ ID NO: 210968 - RNA, 22 nt, Human
gagguuucaccauguuggucag

SEQ ID NO: 210969 - RNA, 24 nt, Human
gaguagcugggauugagggcaugc

SEQ ID NO: 210970 - RNA, 18 nt, Human
gauuacaggcgugagcca

SEQ ID NO: 210971 - RNA, 22 nt, Human
gauuacaggcgugagccacugc

SEQ ID NO: 210972 - RNA, 22 nt, Human
gauuacaggcgugagccacugc

SEQ ID NO: 210973 - RNA, 21 nt, Human
gcaauggugcaaucucggcuc

SEQ ID NO: 210974 - RNA, 21 nt, Human
gcuguuguugcccaggcuaga

SEQ ID NO: 210975 - RNA, 23 nt, Human
ggagugcaagugauucuccugcc

SEQ ID NO: 210976 - RNA, 21 nt, Human
ggcagccaggagggcaaaaug

SEQ ID NO: 210977 - RNA, 24 nt, Human
ggcuggucuugaacaccugaccuc

SEQ ID NO: 210978 - RNA, 18 nt, Human
ggucuugaacaccugacc

SEQ ID NO: 210979 - RNA, 24 nt, Human
gugaucugcccgccucagccuccc

SEQ ID NO: 210980 - RNA, 24 nt, Human
gugauucuccugccucagccucuu

SEQ ID NO: 210981 - RNA, 24 nt, Human
uaauuuuuaguauuuuuaguagag

SEQ ID NO: 210982 - RNA, 25 nt, Human
uaauuuuuaguauuuuuaguagaga

SEQ ID NO: 210983 - RNA, 19 nt, Human
uacaggcgugagccacugc

SEQ ID NO: 210984 - RNA, 23 nt, Human
uacaggcgugagccacugcgccc

SEQ ID NO: 210985 - RNA, 22 nt, Human
uagagaugagguuucaccaugu

SEQ ID NO: 210986 - RNA, 24 nt, Human
uaguagagaugagguuucaccaug

SEQ ID NO: 210987 - RNA, 26 nt, Human
uaguagagaugagguuucaccauguu

SEQ ID NO: 210988 - RNA, 24 nt, Human
uaguuuguugcgagaggaagcgau

SEQ ID NO: 210989 - RNA, 27 nt, Human
ucaccacaaccucuaccuccggagugc

SEQ ID NO: 210990 - RNA, 20 nt, Human
ucagccucuugaguagcugg

SEQ ID NO: 210991 - RNA, 19 nt, Human
ucccaaagggcugggauua

SEQ ID NO: 210992 - RNA, 23 nt, Human
ucccaaagggcugggauuacagg

SEQ ID NO: 210993 - RNA, 24 nt, Human
ucccaaagggcugggauuacaggc

SEQ ID NO: 210994 - RNA, 24 nt, Human
uccggagugcaagugauucuccug

SEQ ID NO: 210995 - RNA, 24 nt, Human
ucuccugccucagccucuugagua

SEQ ID NO: 210996 - RNA, 21 nt, Human
ucugcccgccucagccuccca

SEQ ID NO: 210997 - RNA, 25 nt, Human
ucuggaaggucugagguuccuuucc

SEQ ID NO: 210998 - RNA, 24 nt, Human
ucuugaguagcugggauugagggc

SEQ ID NO: 210999 - RNA, 25 nt, Human
ucuugaguagcugggauugagggca

SEQ ID NO: 211000 - RNA, 20 nt, Human
ugaccucuggugaucugccc

SEQ ID NO: 211001 - RNA, 24 nt, Human
ugagguuucaccauguuggucagg

SEQ ID NO: 211002 - RNA, 20 nt, Human
ugauucuccugccucagccu

SEQ ID NO: 211003 - RNA, 23 nt, Human
ugcaagugauucuccugccucag

SEQ ID NO: 211004 - RNA, 21 nt, Human
ugcccaggcuagagcgcaaug

SEQ ID NO: 211005 - RNA, 24 nt, Human
ugccucagccucuugaguagcugg

SEQ ID NO: 211006 - RNA, 22 nt, Human
ugggagacaauuccuugcugac

SEQ ID NO: 211007 - RNA, 23 nt, Human
ugggagacaauuccuugcugacu

SEQ ID NO: 211008 - RNA, 18 nt, Human
ugggauuacaggcgugag

SEQ ID NO: 211009 - RNA, 19 nt, Human
ugggauuacaggcgugagc

SEQ ID NO: 211010 - RNA, 21 nt, Human
ugggauuacaggcgugagcca

SEQ ID NO: 211011 - RNA, 22 nt, Human
ugggauuacaggcgugagccac

SEQ ID NO: 211012 - RNA, 22 nt, Human
ugggauuacaggcgugagccac

SEQ ID NO: 211013 - RNA, 24 nt, Human
ugggauuacaggcgugagccacug

SEQ ID NO: 211014 - RNA, 26 nt, Human
ugggauuacaggcgugagccacugcg

SEQ ID NO: 211015 - RNA, 22 nt, Human
ugggauugagggcaugcgucac

SEQ ID NO: 211016 - RNA, 24 nt, Human
uggucaggcuggucuugaacaccu

SEQ ID NO: 211017 - RNA, 22 nt, Human
uggugaucugcccgccucagcc

SEQ ID NO: 211018 - RNA, 24 nt, Human
uggugcaaucucggcucaccacaa

SEQ ID NO: 211019 - RNA, 19 nt, Human
uguugcccaggcuagagcg

SEQ ID NO: 211020 - RNA, 22 nt, Human
uguugcccaggcuagagcgcaa

SEQ ID NO: 211021 - RNA, 18 nt, Human
uuaguagagaugagguuu

SEQ ID NO: 211022 - RNA, 22 nt, Human
uuaguagagaugagguuucacc

SEQ ID NO: 211023 - RNA, 24 nt, Human
uuaguagagaugagguuucaccau

SEQ ID NO: 211024 - RNA, 21 nt, Human
uuauuuauuuauuuuauuuuu

SEQ ID NO: 211025 - RNA, 26 nt, Human
uuauuuuauuuuuugagauggaguuu

SEQ ID NO: 211026 - RNA, 22 nt, Human
uugcgagaggaagcgaucugga

SEQ ID NO: 211027 - RNA, 24 nt, Human
uuucaccauguuggucaggcuggu

SEQ ID NO: 211028 - RNA, 24 nt, Human
uuugcuguuguugcccaggcuaga

SEQ ID NO: 211029 - RNA, 21 nt, Human
uuuuaguauuuuuaguagaga

SEQ ID NO: 211030 - RNA, 23 nt, Human
uuuugcuguuguugcccaggcua

SEQ ID NO: 211031 - RNA, 20 nt, Human
aaaaauagucauggcaacac

SEQ ID NO: 211032 - RNA, 21 nt, Human
aaaacugccuuccucccuaga

SEQ ID NO: 211033 - RNA, 23 nt, Human
aaaaucaacaaauguuucagagc

SEQ ID NO: 211034 - RNA, 30 nt, Human
aaaaugccucuucagacacuuaaaaucccu

SEQ ID NO: 211035 - RNA, 27 nt, Human
aaaugccucuucagacacuuaaaaucc

SEQ ID NO: 211036 - RNA, 18 nt, Human
aaccagccuuccgaacug

SEQ ID NO: 211037 - RNA, 22 nt, Human
aaccuggcaaacauuuugauau

SEQ ID NO: 211038 - RNA, 19 nt, Human
accacagcccacagcgcaa

SEQ ID NO: 211039 - RNA, 23 nt, Human
agacacuuaaaauccccucauuc

SEQ ID NO: 211040 - RNA, 18 nt, Human
agacauuuaacuugaaau

SEQ ID NO: 211041 - RNA, 22 nt, Human
agagguuggauaagguuccaga

SEQ ID NO: 211042 - RNA, 19 nt, Human
agccccuccucccacaucc

SEQ ID NO: 211043 - RNA, 20 nt, Human
auucacacaaaaucaacaaa

SEQ ID NO: 211044 - RNA, 25 nt, Human
cacacaaaaucaacaaauguuucag

SEQ ID NO: 211045 - RNA, 18 nt, Human
cacacauaaaauaugagc

SEQ ID NO: 211046 - RNA, 19 nt, Human
caccaugcugccuuaugcc

SEQ ID NO: 211047 - RNA, 27 nt, Human
cacuacaaacauuaaaucacauucuua

SEQ ID NO: 211048 - RNA, 19 nt, Human
caggaaccacuguaaguac

SEQ ID NO: 211049 - RNA, 24 nt, Human
caggaaccacuguaaguacuuuau

SEQ ID NO: 211050 - RNA, 23 nt, Human
caggauacauuaaaugcauccug

SEQ ID NO: 211051 - RNA, 19 nt, Human
cauuucaguuacucaguca

SEQ ID NO: 211052 - RNA, 24 nt, Human
ccacagcccacagcgcaaucuuua

SEQ ID NO: 211053 - RNA, 26 nt, Human
ccacauguucuaaccagccuuccgaa

SEQ ID NO: 211054 - RNA, 22 nt, Human
ccagccccuccucccacauccu

SEQ ID NO: 211055 - RNA, 20 nt, Human
cccacauguucuaaccagcc

SEQ ID NO: 211056 - RNA, 20 nt, Human
cccugccagccccuccuccc

SEQ ID NO: 211057 - RNA, 23 nt, Human
ccgccaaccuaaugacaaguuuc

SEQ ID NO: 211058 - RNA, 21 nt, Human
ccuuaccgagcuuucaagaac

SEQ ID NO: 211059 - RNA, 21 nt, Human
cucugcguugcagggccuuac

SEQ ID NO: 211060 - RNA, 23 nt, Human
cuggagcucaggaugggcugcac

SEQ ID NO: 211061 - RNA, 24 nt, Human
gacacuuaaaauccccucauucga

SEQ ID NO: 211062 - RNA, 18 nt, Human
gaggaaacugaagcacca

SEQ ID NO: 211063 - RNA, 20 nt, Human
gagugaaagcagcauuucag

SEQ ID NO: 211064 - RNA, 18 nt, Human
gaucugcuucccuucccu

SEQ ID NO: 211065 - RNA, 19 nt, Human
gcacaaccagauccauggu

SEQ ID NO: 211066 - RNA, 23 nt, Human
gugcugggcucccuuuggggagu

SEQ ID NO: 211067 - RNA, 18 nt, Human
uaaaaaacaagcaaguaa

SEQ ID NO: 211068 - RNA, 20 nt, Human
uaaaaaacaagcaaguaacu

SEQ ID NO: 211069 - RNA, 18 nt, Human
uaaccagccuuccgaacu

SEQ ID NO: 211070 - RNA, 19 nt, Human
uaagacauuuaacuugaaa

SEQ ID NO: 211071 - RNA, 24 nt, Human
uaauaaaagagaaaagcaaaauca

SEQ ID NO: 211072 - RNA, 19 nt, Human
uagaacauucauguugcuc

SEQ ID NO: 211073 - RNA, 24 nt, Human
uagggagugaaagcagcauuucag

SEQ ID NO: 211074 - RNA, 26 nt, Human
ucaacaaauguuucagagcauccaaa

SEQ ID NO: 211075 - RNA, 18 nt, Human
ucauaugcucagucccca

SEQ ID NO: 211076 - RNA, 21 nt, Human
ucauaugcucaguccccagaa

SEQ ID NO: 211077 - RNA, 19 nt, Human
uccauuucuuuugaauucc

SEQ ID NO: 211078 - RNA, 22 nt, Human
ucccagugcugggcucccuuug

SEQ ID NO: 211079 - RNA, 24 nt, Human
ucccagugcugggcucccuuuggg

SEQ ID NO: 211080 - RNA, 20 nt, Human
ucccuagaucugcuucccuu

SEQ ID NO: 211081 - RNA, 20 nt, Human
ucugcuucccuucccugcuc

SEQ ID NO: 211082 - RNA, 22 nt, Human
ucuguagcuuccauuaguccac

SEQ ID NO: 211083 - RNA, 24 nt, Human
ugaaagagggagaaaaagaauagc

SEQ ID NO: 211084 - RNA, 20 nt, Human
ugagaucaucaagaaggcuc

SEQ ID NO: 211085 - RNA, 24 nt, Human
ugaggaaacugaagcaccaagagg

SEQ ID NO: 211086 - RNA, 20 nt, Human
ugaggaaacugaagcaccag

SEQ ID NO: 211087 - RNA, 19 nt, Human
ugaguucuuuuuggcguuc

SEQ ID NO: 211088 - RNA, 25 nt, Human
ugauauaaacauucacacaaaauca

SEQ ID NO: 211089 - RNA, 23 nt, Human
ugcugaauaugggauugaguaug

SEQ ID NO: 211090 - RNA, 21 nt, Human
ugggagcacgugaccacagcc

SEQ ID NO: 211091 - RNA, 20 nt, Human
uguauacauuuaagacauuu

SEQ ID NO: 211092 - RNA, 24 nt, Human
uguauacauuuaagacauuuaacu

SEQ ID NO: 211093 - RNA, 21 nt, Human
uuaaaacacacaucuaaugua

SEQ ID NO: 211094 - RNA, 21 nt, Human
uuagaauuugugucucuugug

SEQ ID NO: 211095 - RNA, 22 nt, Human
uuauuuugcaucacguccagcu

SEQ ID NO: 211096 - RNA, 25 nt, Human
uucacagaugaggaaacugaagcac

SEQ ID NO: 211097 - RNA, 22 nt, Human
uucccuucccugcucuguagcu

SEQ ID NO: 211098 - RNA, 22 nt, Human
uuggauaagguuccagaggcca

SEQ ID NO: 211099 - RNA, 25 nt, Human
uuuaaaacacacaucuaauguauac

SEQ ID NO: 211100 - RNA, 19 nt, Human
uuucagagcauccaaagug

SEQ ID NO: 211101 - RNA, 19 nt, Human
aaaccacagucucaauccc

SEQ ID NO: 211102 - RNA, 18 nt, Human
aagaggaaggaacuucaa

SEQ ID NO: 211103 - RNA, 20 nt, Human
acacacacacagagcuguga

SEQ ID NO: 211104 - RNA, 23 nt, Human
agagcugugaguucuguccagca

SEQ ID NO: 211105 - RNA, 20 nt, Human
aguauacauaaagucauaug

SEQ ID NO: 211106 - RNA, 24 nt, Human
aguauacauaaagucauauguaca

SEQ ID NO: 211107 - RNA, 27 nt, Human
cacagucucaaucccauuccauugucc

SEQ ID NO: 211108 - RNA, 22 nt, Human
cagcugucucuuuauuuccugc

SEQ ID NO: 211109 - RNA, 24 nt, Human
cauaaaaaaagaggaaggaacuuc

SEQ ID NO: 211110 - RNA, 30 nt, Human
caucucuaucccagggacuggacuggaggg

SEQ ID NO: 211111 - RNA, 22 nt, Human
cauuucugguaaguauuagaag

SEQ ID NO: 211112 - RNA, 19 nt, Human
ccaucaagcuugcuuggug

SEQ ID NO: 211113 - RNA, 24 nt, Human
ccccaucaccauauguuguccuuc

SEQ ID NO: 211114 - RNA, 20 nt, Human
cuaaaccacagucucaaucc

SEQ ID NO: 211115 - RNA, 18 nt, Human
cucccguguuccugucau

SEQ ID NO: 211116 - RNA, 20 nt, Human
gaaggaauugagagcccaac

SEQ ID NO: 211117 - RNA, 22 nt, Human
gccugaacacacacacacagag

SEQ ID NO: 211118 - RNA, 22 nt, Human
ggacuggagggggcuccagggc

SEQ ID NO: 211119 - RNA, 26 nt, Human
uaaaaaaagaggaaggaacuucaagu

SEQ ID NO: 211120 - RNA, 23 nt, Human
uaaagucauauguacaauacaug

SEQ ID NO: 211121 - RNA, 24 nt, Human
uagaagggggauucauauccaggu

SEQ ID NO: 211122 - RNA, 24 nt, Human
uauguacaauacaugguagacaug

SEQ ID NO: 211123 - RNA, 19 nt, Human
uauguuguccuucacagaa

SEQ ID NO: 211124 - RNA, 21 nt, Human
ucaaagcuucugauuucccca

SEQ ID NO: 211125 - RNA, 20 nt, Human
ucaaucccauuccauugucc

SEQ ID NO: 211126 - RNA, 18 nt, Human
ucauauccagguguagag

SEQ ID NO: 211127 - RNA, 19 nt, Human
uccaguccaggaaaucaaa

SEQ ID NO: 211128 - RNA, 24 nt, Human
ucggaccacugggaaaucuuaggg

SEQ ID NO: 211129 - RNA, 20 nt, Human
ucugcucggaccacugggaa

SEQ ID NO: 211130 - RNA, 24 nt, Human
ugaacacacacacacagagcugug

SEQ ID NO: 211131 - RNA, 23 nt, Human
ugaguucuguccagcaacaucuc

SEQ ID NO: 211132 - RNA, 21 nt, Human
ugcccugaguauccccuucaa

SEQ ID NO: 211133 - RNA, 18 nt, Human
uuccauuguccaucaagc

SEQ ID NO: 211134 - RNA, 26 nt, Human
uucccuagccauaaggcagaaguugg

SEQ ID NO: 211135 - RNA, 20 nt, Human
uucugauucugcucggacca

SEQ ID NO: 211136 - RNA, 25 nt, Human
agccugaggccagccagugggacuu

SEQ ID NO: 211137 - RNA, 20 nt, Human
agcggaauaagacagccuga

SEQ ID NO: 211138 - RNA, 20 nt, Human
aggauaucacuuggcucaca

SEQ ID NO: 211139 - RNA, 18 nt, Human
aggauggccugcaggccc

SEQ ID NO: 211140 - RNA, 20 nt, Human
agguaaaauauggaauuuau

SEQ ID NO: 211141 - RNA, 21 nt, Human
cacagacauggacuauaugac

SEQ ID NO: 211142 - RNA, 20 nt, Human
cacuauacagguuccuuguc

SEQ ID NO: 211143 - RNA, 24 nt, Human
ccagccagugggacuuucagcugc

SEQ ID NO: 211144 - RNA, 19 nt, Human
cccacaguaaaccgcacag

SEQ ID NO: 211145 - RNA, 20 nt, Human
cccaggauggccugcaggcc

SEQ ID NO: 211146 - RNA, 23 nt, Human
cccuuucagcagauagaguuuau

SEQ ID NO: 211147 - RNA, 21 nt, Human
cucccacaguaaaccgcacag

SEQ ID NO: 211148 - RNA, 23 nt, Human
gugggacuuucagcugcaagggg

SEQ ID NO: 211149 - RNA, 22 nt, Human
uagaguuuauuacaaauaccac

SEQ ID NO: 211150 - RNA, 22 nt, Human
ucagcugcaaggggccuucccc

SEQ ID NO: 211151 - RNA, 22 nt, Human
ucccaggauggccugcaggccc

SEQ ID NO: 211152 - RNA, 23 nt, Human
ugggaaggcagcccuuuacuccc

SEQ ID NO: 211153 - RNA, 19 nt, Human
ugggacuuucagcugcaag

SEQ ID NO: 211154 - RNA, 22 nt, Human
uuccccaucuccuuccccuuca

SEQ ID NO: 211155 - RNA, 21 nt, Human
uuccccuucaaggugggcugu

SEQ ID NO: 211156 - RNA, 19 nt, Human
aagagucaaagaucggacc

SEQ ID NO: 211157 - RNA, 19 nt, Human
aagcacaacuuggaccaaa

SEQ ID NO: 211158 - RNA, 23 nt, Human
aagcacaacuuggaccaaaaugc

SEQ ID NO: 211159 - RNA, 23 nt, Human
aaguacuagaaugcagaguuucc

SEQ ID NO: 211160 - RNA, 20 nt, Human
acaugcucagcaaaugacua

SEQ ID NO: 211161 - RNA, 21 nt, Human
acuagaaugcagaguuuccug

SEQ ID NO: 211162 - RNA, 20 nt, Human
aggucucccaaguacuagaa

SEQ ID NO: 211163 - RNA, 20 nt, Human
cauaaaaaacuguugcggca

SEQ ID NO: 211164 - RNA, 18 nt, Human
cccaaguacuagaaugca

SEQ ID NO: 211165 - RNA, 21 nt, Human
gggguucccauaaauauagua

SEQ ID NO: 211166 - RNA, 19 nt, Human
ggucucccaaguacuagaa

SEQ ID NO: 211167 - RNA, 20 nt, Human
uaaaacugaggucccagaaa

SEQ ID NO: 211168 - RNA, 23 nt, Human
uaaauaauaauuaaaaaauaaca

SEQ ID NO: 211169 - RNA, 24 nt, Human
uaacaacauuauauguuaguguug

SEQ ID NO: 211170 - RNA, 21 nt, Human
uaagcacaacuuggaccaaaa

SEQ ID NO: 211171 - RNA, 18 nt, Human
uagcauaaaaaacuguug

SEQ ID NO: 211172 - RNA, 19 nt, Human
ucaaacuuacuuaucccag

SEQ ID NO: 211173 - RNA, 18 nt, Human
ucaguagcucugguccuc

SEQ ID NO: 211174 - RNA, 20 nt, Human
ucauguacaugguacauaug

SEQ ID NO: 211175 - RNA, 18 nt, Human
uccacucuuacaaagagu

SEQ ID NO: 211176 - RNA, 19 nt, Human
uccuaggucuguggcuucu

SEQ ID NO: 211177 - RNA, 22 nt, Human
ucucaugguugucaaaguugag

SEQ ID NO: 211178 - RNA, 24 nt, Human
ugaaaaugauaaaacugagguccc

SEQ ID NO: 211179 - RNA, 18 nt, Human
ugaacugucaacacugca

SEQ ID NO: 211180 - RNA, 18 nt, Human
ugacucaaacgccaauga

SEQ ID NO: 211181 - RNA, 23 nt, Human
ugauaaaacugaggucccagaaa

SEQ ID NO: 211182 - RNA, 24 nt, Human
ugauaaaacugaggucccagaaac

SEQ ID NO: 211183 - RNA, 23 nt, Human
ugcccagguaaguuuaauggcaa

SEQ ID NO: 211184 - RNA, 19 nt, Human
ugcccuguauuaaugaaau

SEQ ID NO: 211185 - RNA, 22 nt, Human
uggaauugaaacaagaaugccc

SEQ ID NO: 211186 - RNA, 22 nt, Human
ugguuccacucuuacaaagagu

SEQ ID NO: 211187 - RNA, 23 nt, Human
uguggcuucuuguuucaacugcu

SEQ ID NO: 211188 - RNA, 23 nt, Human
uuaaaaguagaaggcaaacaguu

SEQ ID NO: 211189 - RNA, 22 nt, Human
uuacaggucucccaaguacuag

SEQ ID NO: 211190 - RNA, 19 nt, Human
uuagcuucuucauguacau

SEQ ID NO: 211191 - RNA, 18 nt, Human
uucaucuugaggcucggc

SEQ ID NO: 211192 - RNA, 18 nt, Human
aaaggagagagcugacug

SEQ ID NO: 211193 - RNA, 22 nt, Human
accaaugaauaaaacaaacaaa

SEQ ID NO: 211194 - RNA, 18 nt, Human
agacaacaggaaagucca

SEQ ID NO: 211195 - RNA, 21 nt, Human
agcagccuguugugccuugug

SEQ ID NO: 211196 - RNA, 18 nt, Human
aggcaggcaguugggcau

SEQ ID NO: 211197 - RNA, 24 nt, Human
caaauaaauaaauaaauagggaag

SEQ ID NO: 211198 - RNA, 21 nt, Human
cacugcuacuucuugcccccu

SEQ ID NO: 211199 - RNA, 20 nt, Human
ccgugguuucugucaggcgg

SEQ ID NO: 211200 - RNA, 22 nt, Human
ccuuucuguucccuuucugcca

SEQ ID NO: 211201 - RNA, 21 nt, Human
cucaaaaaccuuucuguuccc

SEQ ID NO: 211202 - RNA, 21 nt, Human
cucaaaaaccuuucuguuccc

SEQ ID NO: 211203 - RNA, 25 nt, Human
cucaaaaaccuuucuguucccuuuc

SEQ ID NO: 211204 - RNA, 27 nt, Human
cuuucuguucccuuucugccagcccua

SEQ ID NO: 211205 - RNA, 24 nt, Human
gaaccaaauguggccgugguuucu

SEQ ID NO: 211206 - RNA, 20 nt, Human
gaauaaauuagaccaaugaa

SEQ ID NO: 211207 - RNA, 24 nt, Human
uaaggcaggcaguugggcauuggu

SEQ ID NO: 211208 - RNA, 19 nt, Human
uacccuaaggcaggcaguu

SEQ ID NO: 211209 - RNA, 24 nt, Human
uccaggcuauagccguacucaaaa

SEQ ID NO: 211210 - RNA, 21 nt, Human
ucugccagcccuagggauuga

SEQ ID NO: 211211 - RNA, 18 nt, Human
ugaagagaaucccagagc

SEQ ID NO: 211212 - RNA, 24 nt, Human
ugacagaggguuucuuagaaccaa

SEQ ID NO: 211213 - RNA, 22 nt, Human
ugaguccacauucagcacagga

SEQ ID NO: 211214 - RNA, 20 nt, Human
ugcuacuucuugcccccuuu

SEQ ID NO: 211215 - RNA, 20 nt, Human
ugggagcgaaugacagaggg

SEQ ID NO: 211216 - RNA, 21 nt, Human
ugggagcgaaugacagagggu

SEQ ID NO: 211217 - RNA, 18 nt, Human
uggggauuggcccugaaa

SEQ ID NO: 211218 - RNA, 26 nt, Human
uucccauuuaaauaaucugagcuuau

SEQ ID NO: 211219 - RNA, 21 nt, Human
uucccuuucugccagcccuag

SEQ ID NO: 211220 - RNA, 22 nt, Human
uugaauaaauuagaccaaugaa

SEQ ID NO: 211221 - RNA, 18 nt, Human
aaagacaacuuugguaca

SEQ ID NO: 211222 - RNA, 21 nt, Human
aaaucaccuauacugccacca

SEQ ID NO: 211223 - RNA, 19 nt, Human
acaaccaaccagagcagcu

SEQ ID NO: 211224 - RNA, 24 nt, Human
acacuugucaguuaccauuaagca

SEQ ID NO: 211225 - RNA, 19 nt, Human
accacucccccaccccacc

SEQ ID NO: 211226 - RNA, 23 nt, Human
accacucccccaccccaccccca

SEQ ID NO: 211227 - RNA, 18 nt, Human
accuucauccagcaugac

SEQ ID NO: 211228 - RNA, 19 nt, Human
acucccccaccccaccccc

SEQ ID NO: 211229 - RNA, 22 nt, Human
agaaaaaucaccuauacugcca

SEQ ID NO: 211230 - RNA, 22 nt, Human
agaagacaaaguggucaggugc

SEQ ID NO: 211231 - RNA, 22 nt, Human
agaauuuauccaaacugggaac

SEQ ID NO: 211232 - RNA, 25 nt, Human
agaccaaaacugagcaacuuuaaaa

SEQ ID NO: 211233 - RNA, 19 nt, Human
agcauaugacaguggcagg

SEQ ID NO: 211234 - RNA, 25 nt, Human
agccacacaacuucagcacagccuc

SEQ ID NO: 211235 - RNA, 19 nt, Human
agcuggcucugcccaggga

SEQ ID NO: 211236 - RNA, 19 nt, Human
agggaagagauaggaaagg

SEQ ID NO: 211237 - RNA, 18 nt, Human
agggaguucuggggggcc

SEQ ID NO: 211238 - RNA, 18 nt, Human
aggggcccugaaacuugc

SEQ ID NO: 211239 - RNA, 21 nt, Human
auagaucccugacucuaugac

SEQ ID NO: 211240 - RNA, 18 nt, Human
auaugacaguggcaggau

SEQ ID NO: 211241 - RNA, 18 nt, Human
aucauuuuagcagcugua

SEQ ID NO: 211242 - RNA, 22 nt, Human
aucuccaaauaaacucacagac

SEQ ID NO: 211243 - RNA, 21 nt, Human
augggaauagagaccagcauc

SEQ ID NO: 211244 - RNA, 18 nt, Human
auucccaccacuccccca

SEQ ID NO: 211245 - RNA, 22 nt, Human
caaauaaacucacagacugaga

SEQ ID NO: 211246 - RNA, 21 nt, Human
caaccaaccagagcagcagag

SEQ ID NO: 211247 - RNA, 22 nt, Human
caagcuucugaugguugccaca

SEQ ID NO: 211248 - RNA, 22 nt, Human
caaggaugccucagccuuuuaa

SEQ ID NO: 211249 - RNA, 20 nt, Human
cacacacagaauguaaacac

SEQ ID NO: 211250 - RNA, 24 nt, Human
cacacacagaauguaaacacgagg

SEQ ID NO: 211251 - RNA, 27 nt, Human
cacagaauguaaacacgaggagacagg

SEQ ID NO: 211252 - RNA, 18 nt, Human
cacccgagcuggcucugc

SEQ ID NO: 211253 - RNA, 18 nt, Human
cacucccccaccccaccc

SEQ ID NO: 211254 - RNA, 22 nt, Human
cacucccccaccccacccccac

SEQ ID NO: 211255 - RNA, 19 nt, Human
cagcacagccuccuccuca

SEQ ID NO: 211256 - RNA, 19 nt, Human
cagcagagccguuaucccu

SEQ ID NO: 211257 - RNA, 20 nt, Human
cagcagagccguuaucccuc

SEQ ID NO: 211258 - RNA, 28 nt, Human
caucaccaccuccucaugcccacaacaa

SEQ ID NO: 211259 - RNA, 18 nt, Human
cauccagugggggaggac

SEQ ID NO: 211260 - RNA, 19 nt, Human
cauuucuucugacaucacc

SEQ ID NO: 211261 - RNA, 24 nt, Human
ccaaacugggaaccagaagacaaa

SEQ ID NO: 211262 - RNA, 21 nt, Human
ccaaauaaacucacagacuga

SEQ ID NO: 211263 - RNA, 24 nt, Human
ccacaauccuugguguuucuuagc

SEQ ID NO: 211264 - RNA, 19 nt, Human
ccaccacucccccacccca

SEQ ID NO: 211265 - RNA, 21 nt, Human
ccacucccccaccccaccccc

SEQ ID NO: 211266 - RNA, 24 nt, Human
ccagagcgagugagccaagauaga

SEQ ID NO: 211267 - RNA, 21 nt, Human
ccaggaccugaggaggagcag

SEQ ID NO: 211268 - RNA, 24 nt, Human
cccaccacucccccaccccacccc

SEQ ID NO: 211269 - RNA, 20 nt, Human
cccaccacucccccaccccc

SEQ ID NO: 211270 - RNA, 20 nt, Human
ccccaccccacccccacaga

SEQ ID NO: 211271 - RNA, 19 nt, Human
ccccagagcgagugagcca

SEQ ID NO: 211272 - RNA, 25 nt, Human
cccccaccccacccccacagaaauc

SEQ ID NO: 211273 - RNA, 23 nt, Human
cccgagcuggcucugcccaggga

SEQ ID NO: 211274 - RNA, 19 nt, Human
ccuaaucuuggaaguggca

SEQ ID NO: 211275 - RNA, 21 nt, Human
ccucugucucuguguccucuc

SEQ ID NO: 211276 - RNA, 19 nt, Human
cuaaucuuggaaguggcau

SEQ ID NO: 211277 - RNA, 23 nt, Human
cucccccaccccacccccacaga

SEQ ID NO: 211278 - RNA, 19 nt, Human
cuccuggcgggagcugugg

SEQ ID NO: 211279 - RNA, 24 nt, Human
cuccuggcgggagcuguggagucu

SEQ ID NO: 211280 - RNA, 19 nt, Human
cugagauuaagguuucagc

SEQ ID NO: 211281 - RNA, 18 nt, Human
cugagcuccaaaucucag

SEQ ID NO: 211282 - RNA, 19 nt, Human
cuguguccucuccuuuuca

SEQ ID NO: 211283 - RNA, 21 nt, Human
cuuaacuaacuacaucugcag

SEQ ID NO: 211284 - RNA, 24 nt, Human
cuuacccagagauuccagccacac

SEQ ID NO: 211285 - RNA, 22 nt, Human
cuuccaagcuucugaugguugc

SEQ ID NO: 211286 - RNA, 22 nt, Human
gaaaaaucaccuauacugccac

SEQ ID NO: 211287 - RNA, 22 nt, Human
gaaaucuuuucauguuauuccc

SEQ ID NO: 211288 - RNA, 20 nt, Human
gaccugaggaggagcaggau

SEQ ID NO: 211289 - RNA, 27 nt, Human
gagggcucaaguagaagcugcaguguc

SEQ ID NO: 211290 - RNA, 22 nt, Human
gaugaugagggaagagauagga

SEQ ID NO: 211291 - RNA, 22 nt, Human
gauucccaccacucccccaccc

SEQ ID NO: 211292 - RNA, 19 nt, Human
gcacagccuccuccucagu

SEQ ID NO: 211293 - RNA, 21 nt, Human
gcagagaccuuaucuccaaau

SEQ ID NO: 211294 - RNA, 27 nt, Human
gcccagggaguucuggggggcacguug

SEQ ID NO: 211295 - RNA, 23 nt, Human
ggagagcuacugacccuauaagg

SEQ ID NO: 211296 - RNA, 24 nt, Human
ggagagcuacugacccuauaaggc

SEQ ID NO: 211297 - RNA, 20 nt, Human
gggaaggggguggggcuggg

SEQ ID NO: 211298 - RNA, 21 nt, Human
gggaaggggguggggcugggc

SEQ ID NO: 211299 - RNA, 22 nt, Human
gggguggggcugggccaagggc

SEQ ID NO: 211300 - RNA, 18 nt, Human
ggguggggcugggccaag

SEQ ID NO: 211301 - RNA, 19 nt, Human
gguggguggcagagagaga

SEQ ID NO: 211302 - RNA, 22 nt, Human
guggucaggugcccacuaaguc

SEQ ID NO: 211303 - RNA, 21 nt, Human
guuagaccaaaacugagcaac

SEQ ID NO: 211304 - RNA, 22 nt, Human
uaacaaguuagaccaaaacuga

SEQ ID NO: 211305 - RNA, 20 nt, Human
uaaccuaaucuuggaagugg

SEQ ID NO: 211306 - RNA, 23 nt, Human
uaaguuccuuacccagagauucc

SEQ ID NO: 211307 - RNA, 25 nt, Human
uacaaggaaaccagucauauugaau

SEQ ID NO: 211308 - RNA, 19 nt, Human
uaccagaugauuuuuguuc

SEQ ID NO: 211309 - RNA, 22 nt, Human
uacccagagauuccagccacac

SEQ ID NO: 211310 - RNA, 21 nt, Human
uagaucccugacucuaugacc

SEQ ID NO: 211311 - RNA, 21 nt, Human
uaugaccaccucccucuccug

SEQ ID NO: 211312 - RNA, 19 nt, Human
uaugccacuuuguaaguag

SEQ ID NO: 211313 - RNA, 19 nt, Human
ucaaccaguacagcagccu

SEQ ID NO: 211314 - RNA, 22 nt, Human
ucacaaagacaacuuugguacc

SEQ ID NO: 211315 - RNA, 22 nt, Human
ucaccaccuccucaugcccaca

SEQ ID NO: 211316 - RNA, 22 nt, Human
ucaccccucacccgagcuggcc

SEQ ID NO: 211317 - RNA, 18 nt, Human
ucagccuuuuaaguaagg

SEQ ID NO: 211318 - RNA, 22 nt, Human
uccaaacugggaaccagaagac

SEQ ID NO: 211319 - RNA, 24 nt, Human
uccaaauaaacucacagacugaga

SEQ ID NO: 211320 - RNA, 22 nt, Human
uccaaaucucagaauuuaucca

SEQ ID NO: 211321 - RNA, 21 nt, Human
uccaaugccuuggaaucccag

SEQ ID NO: 211322 - RNA, 18 nt, Human
uccacucaccccucaccc

SEQ ID NO: 211323 - RNA, 21 nt, Human
uccagugggggaggaccgugg

SEQ ID NO: 211324 - RNA, 18 nt, Human
ucccccaccccaccccca

SEQ ID NO: 211325 - RNA, 20 nt, Human
uccccgcgucuccucugucu

SEQ ID NO: 211326 - RNA, 24 nt, Human
ucccugacucuaugaccaccuccc

SEQ ID NO: 211327 - RNA, 23 nt, Human
uccuccucaguggcuuugcugag

SEQ ID NO: 211328 - RNA, 21 nt, Human
uccugaucacuacuacaacca

SEQ ID NO: 211329 - RNA, 21 nt, Human
ucuaggaaagaauuaccagau

SEQ ID NO: 211330 - RNA, 21 nt, Human
ucuccaaauaaacucacagac

SEQ ID NO: 211331 - RNA, 21 nt, Human
ucugcagagaccuuaucucca

SEQ ID NO: 211332 - RNA, 23 nt, Human
ucugcagagaccuuaucuccaaa

SEQ ID NO: 211333 - RNA, 18 nt, Human
ucugucucuguguccucu

SEQ ID NO: 211334 - RNA, 20 nt, Human
ucugucucuguguccucucc

SEQ ID NO: 211335 - RNA, 20 nt, Human
ucuucguucaggaggcugga

SEQ ID NO: 211336 - RNA, 22 nt, Human
ugagaucuguuuccugaucacu

SEQ ID NO: 211337 - RNA, 19 nt, Human
ugagggaagagauaggaaa

SEQ ID NO: 211338 - RNA, 23 nt, Human
ugagugacaggacuucaugugga

SEQ ID NO: 211339 - RNA, 20 nt, Human
ugaugagggaagagauagga

SEQ ID NO: 211340 - RNA, 22 nt, Human
ugauucccaccacucccccacc

SEQ ID NO: 211341 - RNA, 24 nt, Human
ugauucccaccacucccccacccc

SEQ ID NO: 211342 - RNA, 21 nt, Human
ugcaaaacuccgaucucugcc

SEQ ID NO: 211343 - RNA, 19 nt, Human
ugccucuuccaagcuucug

SEQ ID NO: 211344 - RNA, 25 nt, Human
ugccuguuccuccaaggaugccuca

SEQ ID NO: 211345 - RNA, 19 nt, Human
ugccuuggaaucccagggg

SEQ ID NO: 211346 - RNA, 19 nt, Human
uggaggcugaggacaauca

SEQ ID NO: 211347 - RNA, 24 nt, Human
uggcucugcccagggaguucuggg

SEQ ID NO: 211348 - RNA, 25 nt, Human
uggcucugcccagggaguucugggg

SEQ ID NO: 211349 - RNA, 19 nt, Human
uggguggcagagagagagg

SEQ ID NO: 211350 - RNA, 20 nt, Human
uguagaaaaauuaggaaaua

SEQ ID NO: 211351 - RNA, 22 nt, Human
uguccgccaugggucuccucca

SEQ ID NO: 211352 - RNA, 21 nt, Human
uguuccuuucuccuggcggga

SEQ ID NO: 211353 - RNA, 24 nt, Human
uuaaagggaaggggguggggcugg

SEQ ID NO: 211354 - RNA, 21 nt, Human
uuuuaaguaaggccuagggag

SEQ ID NO: 211355 - RNA, 20 nt, Human
uuuuuuuuuuuuuuuucucu

SEQ ID NO: 211356 - RNA, 26 nt, Human
caacagaaaauggaaugaagggaccc

SEQ ID NO: 211357 - RNA, 22 nt, Human
uacucaacagaaaauggaauga

SEQ ID NO: 211358 - RNA, 22 nt, Human
uuuuuagugagcagguuuggug

SEQ ID NO: 211359 - RNA, 21 nt, Human
aaaagugaaggagaggugaga

SEQ ID NO: 211360 - RNA, 22 nt, Human
aagagaaaaauuucugcaacuu

SEQ ID NO: 211361 - RNA, 23 nt, Human
aagagaacaagauagaucagaug

SEQ ID NO: 211362 - RNA, 22 nt, Human
agacagaguggggaggaaccuc

SEQ ID NO: 211363 - RNA, 28 nt, Human
aggcuaggaaaagugaaggagaggugag

SEQ ID NO: 211364 - RNA, 22 nt, Human
agugaaggagaggugagaaaga

SEQ ID NO: 211365 - RNA, 23 nt, Human
caaacucuccagaacccaagaaa

SEQ ID NO: 211366 - RNA, 23 nt, Human
cagaguggggaggaaccucgugc

SEQ ID NO: 211367 - RNA, 20 nt, Human
caggaaaagaaauaacagau

SEQ ID NO: 211368 - RNA, 22 nt, Human
cccaagaaaagagaaaaauuuc

SEQ ID NO: 211369 - RNA, 21 nt, Human
cguuucacuccucaugcucua

SEQ ID NO: 211370 - RNA, 21 nt, Human
gaaaugucuuucaauuacuuu

SEQ ID NO: 211371 - RNA, 20 nt, Human
gaccuucucuagcuuuacag

SEQ ID NO: 211372 - RNA, 26 nt, Human
gcuaggaaaagugaaggagaggugag

SEQ ID NO: 211373 - RNA, 26 nt, Human
ggugagaaagacagaguggggaggaa

SEQ ID NO: 211374 - RNA, 19 nt, Human
uaaaaaacacucuaaggac

SEQ ID NO: 211375 - RNA, 22 nt, Human
uaggaaaagugaaggagaggug

SEQ ID NO: 211376 - RNA, 21 nt, Human
ucuuccccauuuuucaugaaa

SEQ ID NO: 211377 - RNA, 22 nt, Human
ucuuccccauuuuucaugaaaa

SEQ ID NO: 211378 - RNA, 24 nt, Human
ugaagagaacaagauagaucagau

SEQ ID NO: 211379 - RNA, 28 nt, Human
ugaaggagaggugagaaagacagagugg

SEQ ID NO: 211380 - RNA, 23 nt, Human
ugaauaauugcacauuauguaaa

SEQ ID NO: 211381 - RNA, 20 nt, Human
ugguggugaggaggcuagga

SEQ ID NO: 211382 - RNA, 20 nt, Human
uguagagaugggaaucuucc

SEQ ID NO: 211383 - RNA, 23 nt, Human
uucaucaggaaaagaaauaacag

SEQ ID NO: 211384 - RNA, 21 nt, Human
uuuacaaacucuccagaaccc

SEQ ID NO: 211385 - RNA, 21 nt, Human
aaagcaaaacagaaacagaga

SEQ ID NO: 211386 - RNA, 23 nt, Human
aagcaaaacagaaacagagauca

SEQ ID NO: 211387 - RNA, 24 nt, Human
aagcaaaacagaaacagagaucag

SEQ ID NO: 211388 - RNA, 18 nt, Human
aagcugccaccucuaggc

SEQ ID NO: 211389 - RNA, 20 nt, Human
aagcugccaccucuaggcug

SEQ ID NO: 211390 - RNA, 21 nt, Human
aagcugccaccucuaggcuga

SEQ ID NO: 211391 - RNA, 25 nt, Human
acagagaucagcucugugcuaguca

SEQ ID NO: 211392 - RNA, 26 nt, Human
agacgaaaacacauugggaaccagaa

SEQ ID NO: 211393 - RNA, 19 nt, Human
agaggacagccuuauacca

SEQ ID NO: 211394 - RNA, 20 nt, Human
agccuugccccugucucagc

SEQ ID NO: 211395 - RNA, 23 nt, Human
auaaagcaaaacagaaacagaga

SEQ ID NO: 211396 - RNA, 19 nt, Human
augauaacagcagccuugc

SEQ ID NO: 211397 - RNA, 24 nt, Human
auuacaauuaggacaaaaaugauu

SEQ ID NO: 211398 - RNA, 21 nt, Human
cauccuguucuucaguugcua

SEQ ID NO: 211399 - RNA, 22 nt, Human
ccagcgugaaaaugacacuaag

SEQ ID NO: 211400 - RNA, 22 nt, Human
ccugcuucugaggccacauccu

SEQ ID NO: 211401 - RNA, 21 nt, Human
ccuuauaccacccagcucucc

SEQ ID NO: 211402 - RNA, 23 nt, Human
cgaaaacacauugggaaccagaa

SEQ ID NO: 211403 - RNA, 19 nt, Human
cucagcaccuggcaagaaa

SEQ ID NO: 211404 - RNA, 19 nt, Human
cugaagcaucuucauaccc

SEQ ID NO: 211405 - RNA, 22 nt, Human
gaaacuuuaagacaaagaccaa

SEQ ID NO: 211406 - RNA, 19 nt, Human
gaaagggucuuuaucuaca

SEQ ID NO: 211407 - RNA, 26 nt, Human
gauaucaucccaagagggaauaaagc

SEQ ID NO: 211408 - RNA, 22 nt, Human
gaugauaucaucccaagaggga

SEQ ID NO: 211409 - RNA, 20 nt, Human
gcuucugaggccacauccug

SEQ ID NO: 211410 - RNA, 25 nt, Human
uaaagcaaaacagaaacagagauca

SEQ ID NO: 211411 - RNA, 27 nt, Human
uaacagcagccuugccccugucucagc

SEQ ID NO: 211412 - RNA, 28 nt, Human
uaagaaaauguagacgaaaacacauugg

SEQ ID NO: 211413 - RNA, 21 nt, Human
uaagacaaagaccaagcugcc

SEQ ID NO: 211414 - RNA, 27 nt, Human
ucagcaccuggcaagaaagggucuuua

SEQ ID NO: 211415 - RNA, 18 nt, Human
ucaguguuuggucuuuga

SEQ ID NO: 211416 - RNA, 19 nt, Human
uccugcuucugaggccaca

SEQ ID NO: 211417 - RNA, 19 nt, Human
ucugaagcaucuucauacc

SEQ ID NO: 211418 - RNA, 20 nt, Human
ucugaggccacauccuguuc

SEQ ID NO: 211419 - RNA, 19 nt, Human
ugcagaugccuuguggccu

SEQ ID NO: 211420 - RNA, 23 nt, Human
ugccccugucucagcaccagcgu

SEQ ID NO: 211421 - RNA, 24 nt, Human
uuaagacaaagaccaagcugccac

SEQ ID NO: 211422 - RNA, 19 nt, Human
uuuaacuuaacacaagaau

SEQ ID NO: 211423 - RNA, 23 nt, Human
aaaaugccauaaaaaaacugcaa

SEQ ID NO: 211424 - RNA, 24 nt, Human
aaagugcugggauuauaggcguga

SEQ ID NO: 211425 - RNA, 24 nt, Human
aaaguucuccaagaauaugucucc

SEQ ID NO: 211426 - RNA, 20 nt, Human
aaccuggccugcaacgccau

SEQ ID NO: 211427 - RNA, 21 nt, Human
aacuaagccaucuguagacgg

SEQ ID NO: 211428 - RNA, 18 nt, Human
aagaaguggaucaauucc

SEQ ID NO: 211429 - RNA, 22 nt, Human
aagaucuucccaagcccucuac

SEQ ID NO: 211430 - RNA, 22 nt, Human
aagcaggcaaagcgggcccagg

SEQ ID NO: 211431 - RNA, 24 nt, Human
aagucagcaugaggcauaaccugg

SEQ ID NO: 211432 - RNA, 19 nt, Human
aagugcugggauuauaggc

SEQ ID NO: 211433 - RNA, 19 nt, Human
aagugcugggauuauaggc

SEQ ID NO: 211434 - RNA, 18 nt, Human
acuuaacuaagccaucug

SEQ ID NO: 211435 - RNA, 23 nt, Human
acuucagccucccaaagugcugg

SEQ ID NO: 211436 - RNA, 19 nt, Human
agaaagcagguggaaaggc

SEQ ID NO: 211437 - RNA, 22 nt, Human
agaaagcagguggaaaggcaag

SEQ ID NO: 211438 - RNA, 20 nt, Human
agagcagcaauuccagcugg

SEQ ID NO: 211439 - RNA, 18 nt, Human
agcagcaauuccagcugg

SEQ ID NO: 211440 - RNA, 18 nt, Human
agcaggagcgggaugaca

SEQ ID NO: 211441 - RNA, 19 nt, Human
agccaccacaccgggccua

SEQ ID NO: 211442 - RNA, 20 nt, Human
agccacuagggagcuguucc

SEQ ID NO: 211443 - RNA, 21 nt, Human
agcgaggggaagcuggaggac

SEQ ID NO: 211444 - RNA, 18 nt, Human
aggagaaagcagguggaa

SEQ ID NO: 211445 - RNA, 19 nt, Human
aggcaagagcagagacaga

SEQ ID NO: 211446 - RNA, 19 nt, Human
aggcgugagccaccacacc

SEQ ID NO: 211447 - RNA, 23 nt, Human
agggguccagcuucucaggaggg

SEQ ID NO: 211448 - RNA, 24 nt, Human
agugcaguggcccaaacucggcuc

SEQ ID NO: 211449 - RNA, 20 nt, Human
aguucaaacauucagagagg

SEQ ID NO: 211450 - RNA, 24 nt, Human
auaauaacaaaggacaggaugguc

SEQ ID NO: 211451 - RNA, 24 nt, Human
augggguuuugccauguuggcugg

SEQ ID NO: 211452 - RNA, 21 nt, Human
auuacaggcgugugccaccau

SEQ ID NO: 211453 - RNA, 20 nt, Human
auucugaucagcuagagaaa

SEQ ID NO: 211454 - RNA, 22 nt, Human
auuuuuguauuuuuaguagaga

SEQ ID NO: 211455 - RNA, 18 nt, Human
caaaaguccucuccaugu

SEQ ID NO: 211456 - RNA, 24 nt, Human
caaagugcugggauuauaggcgug

SEQ ID NO: 211457 - RNA, 18 nt, Human
caacgccauaagacagga

SEQ ID NO: 211458 - RNA, 22 nt, Human
caagcaauucuccugccucagc

SEQ ID NO: 211459 - RNA, 24 nt, Human
caccaggccaaccugggaauucac

SEQ ID NO: 211460 - RNA, 19 nt, Human
caccaugccuagcucauuu

SEQ ID NO: 211461 - RNA, 22 nt, Human
cagcagcuccagaacagcacuu

SEQ ID NO: 211462 - RNA, 22 nt, Human
cagccaccacagccucucccuc

SEQ ID NO: 211463 - RNA, 22 nt, Human
cagugacucuacaggguccccc

SEQ ID NO: 211464 - RNA, 22 nt, Human
cauuccaugaacucugcaaguc

SEQ ID NO: 211465 - RNA, 22 nt, Human
ccaaagugcugggauuauaggc

SEQ ID NO: 211466 - RNA, 24 nt, Human
ccaaagugcugggauuauaggcgu

SEQ ID NO: 211467 - RNA, 19 nt, Human
ccagacaaggcauagcccc

SEQ ID NO: 211468 - RNA, 21 nt, Human
ccagggucagugacucuacag

SEQ ID NO: 211469 - RNA, 19 nt, Human
ccauguuggcugggcuggu

SEQ ID NO: 211470 - RNA, 22 nt, Human
ccauguuggcugggcuggucuc

SEQ ID NO: 211471 - RNA, 23 nt, Human
ccauguuggcugggcuggucucg

SEQ ID NO: 211472 - RNA, 18 nt, Human
cccccacucucuggccaa

SEQ ID NO: 211473 - RNA, 23 nt, Human
ccccgguucaagcaauucuccug

SEQ ID NO: 211474 - RNA, 18 nt, Human
ccccugggagguguuuca

SEQ ID NO: 211475 - RNA, 22 nt, Human
ccugaaaucaaguacucagaac

SEQ ID NO: 211476 - RNA, 24 nt, Human
ccugaccucuggugauccacccac

SEQ ID NO: 211477 - RNA, 24 nt, Human
ccugccucagccucagguguagcu

SEQ ID NO: 211478 - RNA, 21 nt, Human
cgagaaauauaaaaaccaaaa

SEQ ID NO: 211479 - RNA, 24 nt, Human
cuagaagccagaaauggaggcuca

SEQ ID NO: 211480 - RNA, 25 nt, Human
cucacugcaaccuccgucuccccgg

SEQ ID NO: 211481 - RNA, 26 nt, Human
cucagaacaccagacuagaagccaga

SEQ ID NO: 211482 - RNA, 23 nt, Human
cucagccucagguguagcuggga

SEQ ID NO: 211483 - RNA, 19 nt, Human
cucaggagggagucaccau

SEQ ID NO: 211484 - RNA, 21 nt, Human
cuccaaagacguaaaaugcag

SEQ ID NO: 211485 - RNA, 19 nt, Human
cuccaagaauaugucuccc

SEQ ID NO: 211486 - RNA, 23 nt, Human
cucccagaugugcucaccaccau

SEQ ID NO: 211487 - RNA, 21 nt, Human
cuccuucaucaacuaguacaa

SEQ ID NO: 211488 - RNA, 19 nt, Human
cucugcagugggccugacc

SEQ ID NO: 211489 - RNA, 19 nt, Human
cucuguugccaggcuagag

SEQ ID NO: 211490 - RNA, 20 nt, Human
cugcaaaauuauauaaacag

SEQ ID NO: 211491 - RNA, 24 nt, Human
cugcaaccuccgucuccccgguuc

SEQ ID NO: 211492 - RNA, 19 nt, Human
gaaaaugcgagaaggccuc

SEQ ID NO: 211493 - RNA, 18 nt, Human
gaaacauuuuaagaaaug

SEQ ID NO: 211494 - RNA, 19 nt, Human
gaaauggaggcucaagucc

SEQ ID NO: 211495 - RNA, 23 nt, Human
gaaauggaggcucaaguccuagg

SEQ ID NO: 211496 - RNA, 20 nt, Human
gacagggcagggaggugguc

SEQ ID NO: 211497 - RNA, 18 nt, Human
gacauggccaccaggcca

SEQ ID NO: 211498 - RNA, 24 nt, Human
gaccucuggugauccacccacuuc

SEQ ID NO: 211499 - RNA, 18 nt, Human
gagagagaaggcuggaga

SEQ ID NO: 211500 - RNA, 18 nt, Human
gagaugggguuuugccau

SEQ ID NO: 211501 - RNA, 20 nt, Human
gagcagagacagaggagugc

SEQ ID NO: 211502 - RNA, 19 nt, Human
gagcagcaauuccagcugg

SEQ ID NO: 211503 - RNA, 22 nt, Human
gaggauguucugaauuuuggua

SEQ ID NO: 211504 - RNA, 18 nt, Human
gagugcugggggcaggcg

SEQ ID NO: 211505 - RNA, 19 nt, Human
gauguucugaauuuuggua

SEQ ID NO: 211506 - RNA, 18 nt, Human
gauuacaggcgugugcca

SEQ ID NO: 211507 - RNA, 24 nt, Human
gauuacaggcgugugccaccaugc

SEQ ID NO: 211508 - RNA, 18 nt, Human
gauuauaggcgugagcca

SEQ ID NO: 211509 - RNA, 21 nt, Human
gauuauaggcgugagccacca

SEQ ID NO: 211510 - RNA, 22 nt, Human
gauuauaggcgugagccaccac

SEQ ID NO: 211511 - RNA, 28 nt, Human
gcaacgccauaagacaggaggcaccgua

SEQ ID NO: 211512 - RNA, 23 nt, Human
gcaauuccagcuggagggagacc

SEQ ID NO: 211513 - RNA, 21 nt, Human
gcaggacagcgaggggaagcu

SEQ ID NO: 211514 - RNA, 20 nt, Human
gccauguuggcugggcuggu

SEQ ID NO: 211515 - RNA, 22 nt, Human
gccauguuggcugggcuggucu

SEQ ID NO: 211516 - RNA, 22 nt, Human
gcgugugccaccaugccuagcu

SEQ ID NO: 211517 - RNA, 24 nt, Human
gcuagagugcaguggcccaaacuc

SEQ ID NO: 211518 - RNA, 20 nt, Human
gcugcaaaauuauauaaaca

SEQ ID NO: 211519 - RNA, 23 nt, Human
gcuggucucgaacuccugaccuc

SEQ ID NO: 211520 - RNA, 19 nt, Human
gcuugcuuucuuagcacua

SEQ ID NO: 211521 - RNA, 24 nt, Human
ggaagauggggaauaacuuugcac

SEQ ID NO: 211522 - RNA, 20 nt, Human
ggaccguuauugaccugaaa

SEQ ID NO: 211523 - RNA, 18 nt, Human
ggagcgggaugacagaag

SEQ ID NO: 211524 - RNA, 24 nt, Human
ggauuacaggcgugugccaccaug

SEQ ID NO: 211525 - RNA, 20 nt, Human
ggccaaccugggaauucaca

SEQ ID NO: 211526 - RNA, 24 nt, Human
ggcuggucucgaacuccugaccuc

SEQ ID NO: 211527 - RNA, 24 nt, Human
gggaagcuggaggacagggcaggg

SEQ ID NO: 211528 - RNA, 18 nt, Human
gggaauucacacagcagg

SEQ ID NO: 211529 - RNA, 19 nt, Human
gggagguguuucagcagga

SEQ ID NO: 211530 - RNA, 21 nt, Human
gggcagggagguggucuggga

SEQ ID NO: 211531 - RNA, 24 nt, Human
gggcagggagguggucugggagug

SEQ ID NO: 211532 - RNA, 18 nt, Human
gggcccaggagaaagcag

SEQ ID NO: 211533 - RNA, 20 nt, Human
gggcuggucucgaacuccug

SEQ ID NO: 211534 - RNA, 19 nt, Human
gggguuuugccauguuggc

SEQ ID NO: 211535 - RNA, 18 nt, Human
ggguuuugccauguuggc

SEQ ID NO: 211536 - RNA, 19 nt, Human
ggucucgaacuccugaccu

SEQ ID NO: 211537 - RNA, 23 nt, Human
guagagaugggguuuugccaugu

SEQ ID NO: 211538 - RNA, 18 nt, Human
guagcugggauuacaggc

SEQ ID NO: 211539 - RNA, 18 nt, Human
guagcugggauuacaggc

SEQ ID NO: 211540 - RNA, 18 nt, Human
guagcugggauuacaggc

SEQ ID NO: 211541 - RNA, 22 nt, Human
guagcugggauuacaggcgugu

SEQ ID NO: 211542 - RNA, 19 nt, Human
gugagccaccacaccgggc

SEQ ID NO: 211543 - RNA, 24 nt, Human
gugauccacccacuucagccuccc

SEQ ID NO: 211544 - RNA, 18 nt, Human
guggagugaggggggacc

SEQ ID NO: 211545 - RNA, 21 nt, Human
guguagcugggauuacaggcg

SEQ ID NO: 211546 - RNA, 22 nt, Human
guguagcugggauuacaggcgu

SEQ ID NO: 211547 - RNA, 21 nt, Human
uaacaguacaaaguuugaaaa

SEQ ID NO: 211548 - RNA, 21 nt, Human
uaacaguacaaaguuugaaaa

SEQ ID NO: 211549 - RNA, 22 nt, Human
uaagaaaggcaagagagggaaa

SEQ ID NO: 211550 - RNA, 23 nt, Human
uaagaaauguuugccucuaggga

SEQ ID NO: 211551 - RNA, 24 nt, Human
uaagccaucuguagacgguggcua

SEQ ID NO: 211552 - RNA, 21 nt, Human
uacaacucuuaaaacugugcu

SEQ ID NO: 211553 - RNA, 22 nt, Human
uagagaugggguuuugccaugu

SEQ ID NO: 211554 - RNA, 23 nt, Human
uagagugcaguggcccaaacucg

SEQ ID NO: 211555 - RNA, 24 nt, Human
uagagugcaguggcccaaacucgg

SEQ ID NO: 211556 - RNA, 20 nt, Human
uagcucauuuuuguauuuuu

SEQ ID NO: 211557 - RNA, 20 nt, Human
uaggcaaaggaggaggaagg

SEQ ID NO: 211558 - RNA, 26 nt, Human
uaguacaaacauaauuuaucaaaaau

SEQ ID NO: 211559 - RNA, 24 nt, Human
uaguagagaugggguuuugccaug

SEQ ID NO: 211560 - RNA, 19 nt, Human
ucacugcaaccuccgucuc

SEQ ID NO: 211561 - RNA, 24 nt, Human
ucacugcaaccuccgucuccccgg

SEQ ID NO: 211562 - RNA, 24 nt, Human
ucacugcaaccuccgucuccccgg

SEQ ID NO: 211563 - RNA, 27 nt, Human
ucacugcaaccuccgucuccccgguuc

SEQ ID NO: 211564 - RNA, 21 nt, Human
ucagaacaccagacuagaagc

SEQ ID NO: 211565 - RNA, 24 nt, Human
ucagaacaccagacuagaagccaa

SEQ ID NO: 211566 - RNA, 19 nt, Human
ucagccucagguguagcug

SEQ ID NO: 211567 - RNA, 24 nt, Human
ucagguguagcugggauuacaggc

SEQ ID NO: 211568 - RNA, 23 nt, Human
ucagugaggugucagucucacuu

SEQ ID NO: 211569 - RNA, 24 nt, Human
ucauuuuuguauuuuuaguagaga

SEQ ID NO: 211570 - RNA, 21 nt, Human
uccacccacuucagccuccca

SEQ ID NO: 211571 - RNA, 24 nt, Human
ucccaaagugcugggauuauaggc

SEQ ID NO: 211572 - RNA, 22 nt, Human
ucccagaugugcucaccaccau

SEQ ID NO: 211573 - RNA, 26 nt, Human
ucccagaugugcucaccaccaucucu

SEQ ID NO: 211574 - RNA, 21 nt, Human
uccccgguucaagcaauucuc

SEQ ID NO: 211575 - RNA, 24 nt, Human
uccccgguucaagcaauucuccug

SEQ ID NO: 211576 - RNA, 24 nt, Human
uccgucuccccgguucaagcaauu

SEQ ID NO: 211577 - RNA, 24 nt, Human
uccucagugaggugucagucucac

SEQ ID NO: 211578 - RNA, 25 nt, Human
uccuccaaagacguaaaaugcagga

SEQ ID NO: 211579 - RNA, 18 nt, Human
ucuagggaaagaauagau

SEQ ID NO: 211580 - RNA, 24 nt, Human
ucuccccgguucaagcaauucucc

SEQ ID NO: 211581 - RNA, 22 nt, Human
ucuccugccucagccucaggug

SEQ ID NO: 211582 - RNA, 24 nt, Human
ucugcagugggccugaccagagag

SEQ ID NO: 211583 - RNA, 18 nt, Human
ucuggcuguagucugugu

SEQ ID NO: 211584 - RNA, 23 nt, Human
ucuguugccaggcuagagugcag

SEQ ID NO: 211585 - RNA, 18 nt, Human
ucuugcucuguugccagg

SEQ ID NO: 211586 - RNA, 22 nt, Human
ucuugcucuguugccaggcuag

SEQ ID NO: 211587 - RNA, 23 nt, Human
ucuugcucuguugccaggcuaga

SEQ ID NO: 211588 - RNA, 23 nt, Human
ugaaaucaaguacucagaacacc

SEQ ID NO: 211589 - RNA, 20 nt, Human
ugaacagguggagccccugg

SEQ ID NO: 211590 - RNA, 22 nt, Human
ugacuuaacuaagccaucugua

SEQ ID NO: 211591 - RNA, 22 nt, Human
ugagacggagucuugcucuguu

SEQ ID NO: 211592 - RNA, 23 nt, Human
ugcaaaauuaaauuuguaaaaca

SEQ ID NO: 211593 - RNA, 18 nt, Human
ugccaguguggagugagg

SEQ ID NO: 211594 - RNA, 24 nt, Human
ugccauguuggcugggcuggucuc

SEQ ID NO: 211595 - RNA, 24 nt, Human
ugccucagccucagguguagcugg

SEQ ID NO: 211596 - RNA, 19 nt, Human
uggaaggcagugagggaca

SEQ ID NO: 211597 - RNA, 21 nt, Human
uggaaggcagugagggacaga

SEQ ID NO: 211598 - RNA, 20 nt, Human
uggagccccugggagguguu

SEQ ID NO: 211599 - RNA, 22 nt, Human
uggccaccaggccaaccuggga

SEQ ID NO: 211600 - RNA, 22 nt, Human
uggcccaaacucggcucacugc

SEQ ID NO: 211601 - RNA, 24 nt, Human
uggcugggcuggucucgaacuccu

SEQ ID NO: 211602 - RNA, 21 nt, Human
ugggagugacaugcugguggg

SEQ ID NO: 211603 - RNA, 18 nt, Human
ugggauuacaggcgugug

SEQ ID NO: 211604 - RNA, 21 nt, Human
ugggauuacaggcgugugcca

SEQ ID NO: 211605 - RNA, 22 nt, Human
ugggauuacaggcgugugccac

SEQ ID NO: 211606 - RNA, 24 nt, Human
ugggauuacaggcgugugccacca

SEQ ID NO: 211607 - RNA, 25 nt, Human
ugggauuacaggcgugugccaccau

SEQ ID NO: 211608 - RNA, 18 nt, Human
ugggauuauaggcgugag

SEQ ID NO: 211609 - RNA, 19 nt, Human
ugggauuauaggcgugagc

SEQ ID NO: 211610 - RNA, 22 nt, Human
ugggauuauaggcgugagccac

SEQ ID NO: 211611 - RNA, 23 nt, Human
ugggauuauaggcgugagccacc

SEQ ID NO: 211612 - RNA, 24 nt, Human
ugggauuauaggcgugagccacca

SEQ ID NO: 211613 - RNA, 20 nt, Human
uggggaauguuuuuaaacau

SEQ ID NO: 211614 - RNA, 24 nt, Human
ugggguuuugccauguuggcuggg

SEQ ID NO: 211615 - RNA, 23 nt, Human
uguaaaacaucuaauaggcuuuu

SEQ ID NO: 211616 - RNA, 24 nt, Human
uguagcugggauuacaggcgugug

SEQ ID NO: 211617 - RNA, 22 nt, Human
uguauggaaaauacaagcagau

SEQ ID NO: 211618 - RNA, 21 nt, Human
uguauuuuuaguagagauggg

SEQ ID NO: 211619 - RNA, 21 nt, Human
ugucuuuuaccaaggggucca

SEQ ID NO: 211620 - RNA, 23 nt, Human
uguggaauuggaggauguucuga

SEQ ID NO: 211621 - RNA, 18 nt, Human
uuaguagagaugggguuu

SEQ ID NO: 211622 - RNA, 22 nt, Human
uuaguagagaugggguuuugcc

SEQ ID NO: 211623 - RNA, 24 nt, Human
uuaguagagaugggguuuugccau

SEQ ID NO: 211624 - RNA, 23 nt, Human
uucaagacgugacaucccugcuc

SEQ ID NO: 211625 - RNA, 21 nt, Human
uucaagcaauucuccugccuc

SEQ ID NO: 211626 - RNA, 24 nt, Human
uucaagcaauucuccugccucagc

SEQ ID NO: 211627 - RNA, 19 nt, Human
uucagccucccaaagugcu

SEQ ID NO: 211628 - RNA, 23 nt, Human
uucaucaacuaguacaaacauaa

SEQ ID NO: 211629 - RNA, 24 nt, Human
uuccucagugaggugucagucuca

SEQ ID NO: 211630 - RNA, 19 nt, Human
uucucaggagggagucacc

SEQ ID NO: 211631 - RNA, 19 nt, Human
uucuccugccucagccuca

SEQ ID NO: 211632 - RNA, 21 nt, Human
uugaagugaguuuucaagcuc

SEQ ID NO: 211633 - RNA, 23 nt, Human
uuggucaucaucacccccacucu

SEQ ID NO: 211634 - RNA, 23 nt, Human
uuguauuuuuaguagagaugggg

SEQ ID NO: 211635 - RNA, 18 nt, Human
uugucuuuuaccaagggg

SEQ ID NO: 211636 - RNA, 23 nt, Human
uuucuuagcacuaugcaugcuga

SEQ ID NO: 211637 - RNA, 21 nt, Human
uuucuuggcaguucaaacauu

SEQ ID NO: 211638 - RNA, 23 nt, Human
uuuugccauguuggcugggcugg

SEQ ID NO: 211639 - RNA, 20 nt, Human
uuuuguauuuuuaguagaga

SEQ ID NO: 211640 - RNA, 21 nt, Human
uuuuuaaacauaaagcauuac

SEQ ID NO: 211641 - RNA, 21 nt, Human
uuuuuaguagagaugggguuu

SEQ ID NO: 211642 - RNA, 24 nt, Human
uuuuuaguagagaugggguuuugc

SEQ ID NO: 211643 - RNA, 20 nt, Human
uuuuuguauuuuuaguagag

SEQ ID NO: 211644 - RNA, 21 nt, Human
gaggacacgggaaguggagga

SEQ ID NO: 211645 - RNA, 19 nt, Human
ggaaguggaggacugagac

SEQ ID NO: 211646 - RNA, 25 nt, Human
ugcuccugacaacuuccagaggaca

SEQ ID NO: 211647 - RNA, 19 nt, Human
aaaaaaaaguagauccaag

SEQ ID NO: 211648 - RNA, 22 nt, Human
aaaaaagacacucucaaaauau

SEQ ID NO: 211649 - RNA, 21 nt, Human
aaaaacaucaagguauuucua

SEQ ID NO: 211650 - RNA, 23 nt, Human
aaagcaacucucaaggccacuaa

SEQ ID NO: 211651 - RNA, 21 nt, Human
aacaguucaaauaguugagca

SEQ ID NO: 211652 - RNA, 19 nt, Human
aacucuaaaugagcaaugc

SEQ ID NO: 211653 - RNA, 25 nt, Human
aaugaaauaaaaaagacacucucaa

SEQ ID NO: 211654 - RNA, 24 nt, Human
aauuaaugaaugauguuuuuguuu

SEQ ID NO: 211655 - RNA, 23 nt, Human
acaaauuauauauauauauauau

SEQ ID NO: 211656 - RNA, 22 nt, Human
acaauggagcaacaaaaacgag

SEQ ID NO: 211657 - RNA, 22 nt, Human
accauuuaaaaucauaauuuaa

SEQ ID NO: 211658 - RNA, 20 nt, Human
accccggagaccuggauccc

SEQ ID NO: 211659 - RNA, 23 nt, Human
acugcaaccuagauaaacuguag

SEQ ID NO: 211660 - RNA, 21 nt, Human
agacaaauugccaaacauccu

SEQ ID NO: 211661 - RNA, 22 nt, Human
agacaaauugccaaacauccuu

SEQ ID NO: 211662 - RNA, 19 nt, Human
agacugaaccuaguaugga

SEQ ID NO: 211663 - RNA, 20 nt, Human
agauauauaucucauauaca

SEQ ID NO: 211664 - RNA, 23 nt, Human
agcugugaauuaacaaauaauau

SEQ ID NO: 211665 - RNA, 19 nt, Human
aggcaagaacuaugacaac

SEQ ID NO: 211666 - RNA, 22 nt, Human
aggcaagaacuaugacaacuau

SEQ ID NO: 211667 - RNA, 23 nt, Human
aggcuaaaaaaaaguagauccaa

SEQ ID NO: 211668 - RNA, 26 nt, Human
aggcuucuagggccugcugauguucu

SEQ ID NO: 211669 - RNA, 21 nt, Human
agggaggggcaagagugaggc

SEQ ID NO: 211670 - RNA, 23 nt, Human
agggaggggcaagagugaggcuu

SEQ ID NO: 211671 - RNA, 18 nt, Human
agguauauaauucccuuu

SEQ ID NO: 211672 - RNA, 23 nt, Human
aggucagaugaugcaaucuuuuu

SEQ ID NO: 211673 - RNA, 18 nt, Human
agucuugcugugguuaug

SEQ ID NO: 211674 - RNA, 18 nt, Human
aguucuuaggugaugauc

SEQ ID NO: 211675 - RNA, 24 nt, Human
auauaagcagauagggagaaggaa

SEQ ID NO: 211676 - RNA, 26 nt, Human
auauacacguguguauauauauguau

SEQ ID NO: 211677 - RNA, 24 nt, Human
auauuacugaaaacaaacaaaaca

SEQ ID NO: 211678 - RNA, 23 nt, Human
auggagcaacaaaaacgagugag

SEQ ID NO: 211679 - RNA, 18 nt, Human
auguauguguguggauau

SEQ ID NO: 211680 - RNA, 25 nt, Human
auguauguguguggauauguauaua

SEQ ID NO: 211681 - RNA, 19 nt, Human
caaaagcaacucucaaggc

SEQ ID NO: 211682 - RNA, 24 nt, Human
caaaagcaacucucaaggccaguc

SEQ ID NO: 211683 - RNA, 22 nt, Human
caaauuauauauauauauauau

SEQ ID NO: 211684 - RNA, 21 nt, Human
caacaaaaacgagugagaaaa

SEQ ID NO: 211685 - RNA, 19 nt, Human
caaggccacuaagacugac

SEQ ID NO: 211686 - RNA, 23 nt, Human
cagaugccacugcaaccuagaua

SEQ ID NO: 211687 - RNA, 20 nt, Human
caucaagguauuucuagggg

SEQ ID NO: 211688 - RNA, 21 nt, Human
cauggaagcucugugcacagc

SEQ ID NO: 211689 - RNA, 21 nt, Human
ccaaacauccuuuucugugcu

SEQ ID NO: 211690 - RNA, 24 nt, Human
ccacacagucacccuaaauuuauc

SEQ ID NO: 211691 - RNA, 19 nt, Human
ccccuuguucuuuuuaccc

SEQ ID NO: 211692 - RNA, 25 nt, Human
ccccuuguucuuuuuacccuuuuca

SEQ ID NO: 211693 - RNA, 22 nt, Human
ccgggcacugcuuccuuccgcg

SEQ ID NO: 211694 - RNA, 18 nt, Human
ccuaaguggaugucaguc

SEQ ID NO: 211695 - RNA, 22 nt, Human
ccucuggccaaagcggaccccc

SEQ ID NO: 211696 - RNA, 20 nt, Human
ccugcaaacucuaaaugagc

SEQ ID NO: 211697 - RNA, 21 nt, Human
cggaaacucaugacccuguca

SEQ ID NO: 211698 - RNA, 25 nt, Human
cgggaugggugcagugucgccgggc

SEQ ID NO: 211699 - RNA, 20 nt, Human
cgguacuaacaauaucagaa

SEQ ID NO: 211700 - RNA, 22 nt, Human
cguguguauauauauguauaau

SEQ ID NO: 211701 - RNA, 23 nt, Human
cucaaaauauuaaaaccuaugga

SEQ ID NO: 211702 - RNA, 18 nt, Human
cugaaaacaaacaaaaca

SEQ ID NO: 211703 - RNA, 20 nt, Human
cuuccuggagcaccccuugu

SEQ ID NO: 211704 - RNA, 21 nt, Human
gaaaacaaacaaaacaacuuu

SEQ ID NO: 211705 - RNA, 18 nt, Human
gacucuuucuuccuggag

SEQ ID NO: 211706 - RNA, 20 nt, Human
gcacagcagaugccacugca

SEQ ID NO: 211707 - RNA, 22 nt, Human
gggagaaggaaugaaaaaaugu

SEQ ID NO: 211708 - RNA, 20 nt, Human
gggaggggcaagagugaggc

SEQ ID NO: 211709 - RNA, 24 nt, Human
gguauuucuaggggugcccaacag

SEQ ID NO: 211710 - RNA, 21 nt, Human
guaaaauuaaguaccaaaggc

SEQ ID NO: 211711 - RNA, 20 nt, Human
gugcaaaaggaaugcagcau

SEQ ID NO: 211712 - RNA, 18 nt, Human
gugcauguggauuuauau

SEQ ID NO: 211713 - RNA, 25 nt, Human
uaaaaaagacacucucaaaauauua

SEQ ID NO: 211714 - RNA, 20 nt, Human
uaaaaaagauaaaaagaaaa

SEQ ID NO: 211715 - RNA, 21 nt, Human
uaaaaacagcaaaauauuacu

SEQ ID NO: 211716 - RNA, 23 nt, Human
uaaaaagaaaacuauacucggaa

SEQ ID NO: 211717 - RNA, 24 nt, Human
uaaaaagaaaacuauacucggaaa

SEQ ID NO: 211718 - RNA, 18 nt, Human
uaaaagguauauaauucc

SEQ ID NO: 211719 - RNA, 23 nt, Human
uaaaauaauauuauaauuaugca

SEQ ID NO: 211720 - RNA, 25 nt, Human
uaaauuauguuuccccauuucccuu

SEQ ID NO: 211721 - RNA, 24 nt, Human
uaacaauaucagaaacaauauuuu

SEQ ID NO: 211722 - RNA, 24 nt, Human
uaacauaaguaaauuuacaaauca

SEQ ID NO: 211723 - RNA, 25 nt, Human
uaaguaaauuuacaaaucaaaugaa

SEQ ID NO: 211724 - RNA, 19 nt, Human
uaaugcccgauggcuggcu

SEQ ID NO: 211725 - RNA, 22 nt, Human
uaauguauguguguggauaugu

SEQ ID NO: 211726 - RNA, 22 nt, Human
uacacacacacaaauuauauau

SEQ ID NO: 211727 - RNA, 22 nt, Human
uacgguacuaacaauaucagaa

SEQ ID NO: 211728 - RNA, 19 nt, Human
uagaaaaaacaucaaggua

SEQ ID NO: 211729 - RNA, 21 nt, Human
uagaauauuaaugccaaaagc

SEQ ID NO: 211730 - RNA, 18 nt, Human
uagaccauuauuuuugcc

SEQ ID NO: 211731 - RNA, 25 nt, Human
uagauuucauaaauuaccugagaug

SEQ ID NO: 211732 - RNA, 26 nt, Human
uaggagauuucuuucagacugaaccu

SEQ ID NO: 211733 - RNA, 21 nt, Human
uagggaaaaauauuaauaagg

SEQ ID NO: 211734 - RNA, 19 nt, Human
uaguucuuaggugaugauc

SEQ ID NO: 211735 - RNA, 18 nt, Human
uauacacguguguauaua

SEQ ID NO: 211736 - RNA, 21 nt, Human
uauauauauguauaaucuaca

SEQ ID NO: 211737 - RNA, 20 nt, Human
uauauguaauguaugugugu

SEQ ID NO: 211738 - RNA, 24 nt, Human
uaugaaaccauaaacugcgaauga

SEQ ID NO: 211739 - RNA, 19 nt, Human
uauguguguggauauguau

SEQ ID NO: 211740 - RNA, 20 nt, Human
uauuucaugugcauguggau

SEQ ID NO: 211741 - RNA, 25 nt, Human
ucauauacacguguguauauauaug

SEQ ID NO: 211742 - RNA, 22 nt, Human
ucccuugaauguucucuauugg

SEQ ID NO: 211743 - RNA, 23 nt, Human
uccgcgccucuggccaaagcgga

SEQ ID NO: 211744 - RNA, 22 nt, Human
uccuuuaucacucaacaguuca

SEQ ID NO: 211745 - RNA, 20 nt, Human
ucucaaggccacuaagacuu

SEQ ID NO: 211746 - RNA, 19 nt, Human
ucucuuguucucaaucucu

SEQ ID NO: 211747 - RNA, 23 nt, Human
ucuguaaacucugcacuuaguuu

SEQ ID NO: 211748 - RNA, 23 nt, Human
ugacuggagcaaaaacaaaaauu

SEQ ID NO: 211749 - RNA, 21 nt, Human
ugagaaaaaaucacuuuccca

SEQ ID NO: 211750 - RNA, 18 nt, Human
ugagaugaggacaagggu

SEQ ID NO: 211751 - RNA, 21 nt, Human
ugcaaccuagauaaacuguag

SEQ ID NO: 211752 - RNA, 25 nt, Human
ugccaaacauccuuuucugugcucu

SEQ ID NO: 211753 - RNA, 24 nt, Human
ugccuaaaguuuauguaagaauug

SEQ ID NO: 211754 - RNA, 24 nt, Human
uggagcaacaaaaacgagugagaa

SEQ ID NO: 211755 - RNA, 19 nt, Human
uggccaaagcggaccccgg

SEQ ID NO: 211756 - RNA, 23 nt, Human
uggccaaagcggaccccggagac

SEQ ID NO: 211757 - RNA, 19 nt, Human
uguaauguaugugugugga

SEQ ID NO: 211758 - RNA, 19 nt, Human
ugucucacuguacucacgu

SEQ ID NO: 211759 - RNA, 18 nt, Human
uguggauauguauauaua

SEQ ID NO: 211760 - RNA, 19 nt, Human
uguggauauguauauauau

SEQ ID NO: 211761 - RNA, 18 nt, Human
uguguauauauauguaua

SEQ ID NO: 211762 - RNA, 20 nt, Human
ugugucugcugggaauauag

SEQ ID NO: 211763 - RNA, 18 nt, Human
uguguggauauguauaua

SEQ ID NO: 211764 - RNA, 19 nt, Human
uguguggauauguauauau

SEQ ID NO: 211765 - RNA, 24 nt, Human
uguguggauauguauauauauaau

SEQ ID NO: 211766 - RNA, 27 nt, Human
uguguggauauguauauauauaaucaa

SEQ ID NO: 211767 - RNA, 20 nt, Human
uguguguggauauguauaua

SEQ ID NO: 211768 - RNA, 22 nt, Human
uuaaaaccuauggaaagaaaau

SEQ ID NO: 211769 - RNA, 22 nt, Human
uuaauaaggcuaaaaaaaagua

SEQ ID NO: 211770 - RNA, 21 nt, Human
uuagaauauuaaugccaaaag

SEQ ID NO: 211771 - RNA, 22 nt, Human
uucaaguuuacauagauuucau

SEQ ID NO: 211772 - RNA, 22 nt, Human
uucacaggauaccaagauucau

SEQ ID NO: 211773 - RNA, 21 nt, Human
uucaugagucagaaaaaugcc

SEQ ID NO: 211774 - RNA, 27 nt, Human
uucauugacagugacuucucauacuga

SEQ ID NO: 211775 - RNA, 19 nt, Human
uuccaguaaaaacauaagg

SEQ ID NO: 211776 - RNA, 21 nt, Human
uuccgaaagucuuaggucaga

SEQ ID NO: 211777 - RNA, 22 nt, Human
uucugugcucuuuucaugaguc

SEQ ID NO: 211778 - RNA, 22 nt, Human
uugggaggcuuagaccauuauu

SEQ ID NO: 211779 - RNA, 20 nt, Human
uuuauauacacagauauaug

SEQ ID NO: 211780 - RNA, 19 nt, Human
uuucacaggauaccaagau

SEQ ID NO: 211781 - RNA, 23 nt, Human
uuucuuccuggagcaccccuugu

SEQ ID NO: 211782 - RNA, 24 nt, Human
uuuuuuuagcuacauuugggcauu

SEQ ID NO: 211783 - RNA, 18 nt, Human
uuuuuuuuuuuuaggagc

SEQ ID NO: 211784 - RNA, 23 nt, Human
uuuuuuuuuuuuuuuuuuuuagg

SEQ ID NO: 211785 - RNA, 28 nt, Human
aaacggccagcaaaacguccagcagguc

SEQ ID NO: 211786 - RNA, 18 nt, Human
aaagggagaguuaaggag

SEQ ID NO: 211787 - RNA, 21 nt, Human
aacagcggacaguacagcccc

SEQ ID NO: 211788 - RNA, 22 nt, Human
acuccaggagcgaaacaccagc

SEQ ID NO: 211789 - RNA, 24 nt, Human
acuuuggggagagcuggaaaggga

SEQ ID NO: 211790 - RNA, 19 nt, Human
agaauggcagaugcugccu

SEQ ID NO: 211791 - RNA, 20 nt, Human
agaguucagcagagcuucug

SEQ ID NO: 211792 - RNA, 18 nt, Human
agccuguggcccucgccc

SEQ ID NO: 211793 - RNA, 21 nt, Human
aggcagucggaguggcugaag

SEQ ID NO: 211794 - RNA, 19 nt, Human
agggcgccuggaaaugagc

SEQ ID NO: 211795 - RNA, 22 nt, Human
caccagcugcccugucgcccua

SEQ ID NO: 211796 - RNA, 22 nt, Human
cagcaacaccuugccucggcca

SEQ ID NO: 211797 - RNA, 20 nt, Human
caguacagccccgccuguuu

SEQ ID NO: 211798 - RNA, 21 nt, Human
ccaaacagcggacaguacagc

SEQ ID NO: 211799 - RNA, 24 nt, Human
cccaggcagucggaguggcugaag

SEQ ID NO: 211800 - RNA, 23 nt, Human
cccccagccagggaagauuucua

SEQ ID NO: 211801 - RNA, 28 nt, Human
cccgccuguuuuuuccacucccugucuu

SEQ ID NO: 211802 - RNA, 21 nt, Human
ccggagagcgcgggcugggac

SEQ ID NO: 211803 - RNA, 21 nt, Human
ccuguccaccucucucccucc

SEQ ID NO: 211804 - RNA, 20 nt, Human
cuccguaguuagaauggcag

SEQ ID NO: 211805 - RNA, 20 nt, Human
cuucacuuuucuugacagcu

SEQ ID NO: 211806 - RNA, 18 nt, Human
gacgcgggcgccucagcc

SEQ ID NO: 211807 - RNA, 27 nt, Human
gagcagccuugccccagcaacaccuug

SEQ ID NO: 211808 - RNA, 19 nt, Human
gaggugcaggcggcaggug

SEQ ID NO: 211809 - RNA, 24 nt, Human
gcaaaacggccagcaaaacgucca

SEQ ID NO: 211810 - RNA, 21 nt, Human
gccagugugcaaaagcccaca

SEQ ID NO: 211811 - RNA, 23 nt, Human
gcccuaacggaggugcaggcggc

SEQ ID NO: 211812 - RNA, 20 nt, Human
ggugcagacucugccugucc

SEQ ID NO: 211813 - RNA, 21 nt, Human
gguguacuuuaugcuugguau

SEQ ID NO: 211814 - RNA, 23 nt, Human
guaaacuuccccccagccaggga

SEQ ID NO: 211815 - RNA, 24 nt, Human
guaaacuuccccccagccagggaa

SEQ ID NO: 211816 - RNA, 21 nt, Human
guccagcaggucucagaugcg

SEQ ID NO: 211817 - RNA, 18 nt, Human
gugcagacucugccuguc

SEQ ID NO: 211818 - RNA, 18 nt, Human
uacucagcuccguaguua

SEQ ID NO: 211819 - RNA, 19 nt, Human
ucccugucuuagccaaaga

SEQ ID NO: 211820 - RNA, 21 nt, Human
ucuagaguucagcagagcuuc

SEQ ID NO: 211821 - RNA, 21 nt, Human
ucucucagugacuagacucuc

SEQ ID NO: 211822 - RNA, 19 nt, Human
ugacuagacucuccuaagu

SEQ ID NO: 211823 - RNA, 18 nt, Human
ugcacuccgggacgcggg

SEQ ID NO: 211824 - RNA, 22 nt, Human
ugccuguccaccucucucccuc

SEQ ID NO: 211825 - RNA, 22 nt, Human
uggaaagggagaguuaaggagg

SEQ ID NO: 211826 - RNA, 20 nt, Human
uguccagggcgagacggcga

SEQ ID NO: 211827 - RNA, 18 nt, Human
uuagaauggcagaugcug

SEQ ID NO: 211828 - RNA, 21 nt, Human
uuagaauggcagaugcugccu

SEQ ID NO: 211829 - RNA, 21 nt, Human
uugguauaacagaaauucucu

SEQ ID NO: 211830 - RNA, 23 nt, Human
uuuggggagagcuggaaagggag

SEQ ID NO: 211831 - RNA, 19 nt, Human
aaacaggaacagucuacaa

SEQ ID NO: 211832 - RNA, 19 nt, Human
aagcagcagagaagcuccc

SEQ ID NO: 211833 - RNA, 23 nt, Human
aagcucccagcaaacaggaacag

SEQ ID NO: 211834 - RNA, 26 nt, Human
aagcucccagcaaacaggaacagucu

SEQ ID NO: 211835 - RNA, 21 nt, Human
acaaagaucagacagcaaaca

SEQ ID NO: 211836 - RNA, 19 nt, Human
acagcaaacaacaucccga

SEQ ID NO: 211837 - RNA, 21 nt, Human
acaggaacagucuacaaagau

SEQ ID NO: 211838 - RNA, 24 nt, Human
agacagcaaacaacaucccgaaga

SEQ ID NO: 211839 - RNA, 18 nt, Human
aggagggagugggggagg

SEQ ID NO: 211840 - RNA, 20 nt, Human
aggagggagugggggaggac

SEQ ID NO: 211841 - RNA, 22 nt, Human
aucccgaagaagagaagcacau

SEQ ID NO: 211842 - RNA, 21 nt, Human
caaacaacaucccgaagaaga

SEQ ID NO: 211843 - RNA, 27 nt, Human
cagcaaacaacaucccgaagaagagaa

SEQ ID NO: 211844 - RNA, 23 nt, Human
caggaacagucuacaaagaucag

SEQ ID NO: 211845 - RNA, 19 nt, Human
cgguuguuggugcauuucc

SEQ ID NO: 211846 - RNA, 18 nt, Human
cucccagcaaacaggaac

SEQ ID NO: 211847 - RNA, 23 nt, Human
gaagagaagcacauuuuauggca

SEQ ID NO: 211848 - RNA, 20 nt, Human
gagaagcacauuuuauggca

SEQ ID NO: 211849 - RNA, 24 nt, Human
uaagcagcagagaagcucccagca

SEQ ID NO: 211850 - RNA, 23 nt, Human
uacaaagaucagacagcaaacaa

SEQ ID NO: 211851 - RNA, 23 nt, Human
ucaaucaagagcaaguauugguc

SEQ ID NO: 211852 - RNA, 24 nt, Human
ucagacagcaaacaacaucccgaa

SEQ ID NO: 211853 - RNA, 29 nt, Human
uccauucugcuuacacuugcuagagaaaa

SEQ ID NO: 211854 - RNA, 20 nt, Human
uguuuaucaaucaagagcag

SEQ ID NO: 211855 - RNA, 19 nt, Human
uuagaaaacaaggaugacc

SEQ ID NO: 211856 - RNA, 19 nt, Human
uuccuuucacauacaguga

SEQ ID NO: 211857 - RNA, 22 nt, Human
uucugcuuacacuugcuagaga

SEQ ID NO: 211858 - RNA, 19 nt, Human
acacacccugcugccccuc

SEQ ID NO: 211859 - RNA, 19 nt, Human
caccaggcaacgcuaacac

SEQ ID NO: 211860 - RNA, 21 nt, Human
cacugagccgucccuucuaca

SEQ ID NO: 211861 - RNA, 21 nt, Human
caggccacaccacccuuuguu

SEQ ID NO: 211862 - RNA, 23 nt, Human
ccaaugcccaggccacaccaccc

SEQ ID NO: 211863 - RNA, 19 nt, Human
ccaggcccccuuccuggca

SEQ ID NO: 211864 - RNA, 23 nt, Human
cccaggccacaccacccuuuguu

SEQ ID NO: 211865 - RNA, 24 nt, Human
cccguucuuccuuccauggcaggg

SEQ ID NO: 211866 - RNA, 18 nt, Human
cccugcugccccuccuuu

SEQ ID NO: 211867 - RNA, 21 nt, Human
ccgaggcucacguuccaacgc

SEQ ID NO: 211868 - RNA, 21 nt, Human
ccgcaccaggcaacgcuaaca

SEQ ID NO: 211869 - RNA, 18 nt, Human
ccucuggucugcaaaggg

SEQ ID NO: 211870 - RNA, 23 nt, Human
cguuccaacgcugcagugcccac

SEQ ID NO: 211871 - RNA, 20 nt, Human
cuuuggccgggccaucccuc

SEQ ID NO: 211872 - RNA, 21 nt, Human
gaccgcaggcccugacugcac

SEQ ID NO: 211873 - RNA, 19 nt, Human
ggagggcccagguuuccuu

SEQ ID NO: 211874 - RNA, 23 nt, Human
ggcccagguuuccuuguuaggcc

SEQ ID NO: 211875 - RNA, 19 nt, Human
gggccggggcagguggucu

SEQ ID NO: 211876 - RNA, 21 nt, Human
gggccggggcagguggucuuc

SEQ ID NO: 211877 - RNA, 21 nt, Human
ugccccggugcuacucggcgg

SEQ ID NO: 211878 - RNA, 20 nt, Human
ugccuagacuuuggccgggc

SEQ ID NO: 211879 - RNA, 22 nt, Human
uggccgggccaucccucaugcc

SEQ ID NO: 211880 - RNA, 23 nt, Human
ugucccguucuuccuuccauggc

SEQ ID NO: 211881 - RNA, 19 nt, Human
uuggggagggacccccaag

SEQ ID NO: 211882 - RNA, 22 nt, Human
uugucccguucuuccuuccaug

SEQ ID NO: 211883 - RNA, 21 nt, Human
uuuggcaggaaacuaaaauug

SEQ ID NO: 211884 - RNA, 25 nt, Human
gcuaacccuagccucauccugcagc

SEQ ID NO: 211885 - RNA, 19 nt, Human
uaacccuagccucauccug

SEQ ID NO: 211886 - RNA, 19 nt, Human
uagaaugcuaacccuagcc

SEQ ID NO: 211887 - RNA, 21 nt, Human
uagaaugcuaacccuagccuc

SEQ ID NO: 211888 - RNA, 22 nt, Human
uagccucauccugcagcagaaa

SEQ ID NO: 211889 - RNA, 20 nt, Human
uguaggaaugaggagacaug

SEQ ID NO: 211890 - RNA, 20 nt, Human
aaagaagaaaaagaagggaa

SEQ ID NO: 211891 - RNA, 21 nt, Human
aagaacccccaggagccacau

SEQ ID NO: 211892 - RNA, 21 nt, Human
aagaagaaaaagaagggaaaa

SEQ ID NO: 211893 - RNA, 23 nt, Human
aagaagaaaaagaagggaaaagc

SEQ ID NO: 211894 - RNA, 23 nt, Human
aaguggccugauggauccagggc

SEQ ID NO: 211895 - RNA, 26 nt, Human
acaucacaaaaaaagaagaaaaagaa

SEQ ID NO: 211896 - RNA, 22 nt, Human
acauuagaaagaccauucugga

SEQ ID NO: 211897 - RNA, 25 nt, Human
accauucuggaggcagcauggaggc

SEQ ID NO: 211898 - RNA, 21 nt, Human
agaagaaaaagaagggaaaag

SEQ ID NO: 211899 - RNA, 18 nt, Human
agagcugaagucacagga

SEQ ID NO: 211900 - RNA, 23 nt, Human
agcagguugggcagguggucggg

SEQ ID NO: 211901 - RNA, 22 nt, Human
agccaucuuucauacaagucuc

SEQ ID NO: 211902 - RNA, 21 nt, Human
aggcacagccaucuuucauac

SEQ ID NO: 211903 - RNA, 21 nt, Human
aggcaguggcaagaggagagc

SEQ ID NO: 211904 - RNA, 24 nt, Human
aggcaguggcaagaggagagcagg

SEQ ID NO: 211905 - RNA, 19 nt, Human
agggccugauaggacagga

SEQ ID NO: 211906 - RNA, 22 nt, Human
agggcucuccuucacggggacu

SEQ ID NO: 211907 - RNA, 18 nt, Human
agucuccaagugccagaa

SEQ ID NO: 211908 - RNA, 21 nt, Human
aguggagauggagcuuggagg

SEQ ID NO: 211909 - RNA, 20 nt, Human
auacagcauucauucgcuga

SEQ ID NO: 211910 - RNA, 18 nt, Human
auuugcucagagccuugg

SEQ ID NO: 211911 - RNA, 20 nt, Human
caagucuccaagugccagaa

SEQ ID NO: 211912 - RNA, 21 nt, Human
caagucuccaagugccagaag

SEQ ID NO: 211913 - RNA, 23 nt, Human
cacauuagaaagaccauucugga

SEQ ID NO: 211914 - RNA, 25 nt, Human
cagcagaggaagaaagaacccccag

SEQ ID NO: 211915 - RNA, 24 nt, Human
cagccaucuuucauacaagucucc

SEQ ID NO: 211916 - RNA, 24 nt, Human
caucacaaaaaaagaagaaaaaga

SEQ ID NO: 211917 - RNA, 20 nt, Human
ccacuugguugggggucauc

SEQ ID NO: 211918 - RNA, 23 nt, Human
cccauagccgggagcccuggggc

SEQ ID NO: 211919 - RNA, 22 nt, Human
cccccaggagccacauuugcuc

SEQ ID NO: 211920 - RNA, 21 nt, Human
ccccgaaagaacauaaucucc

SEQ ID NO: 211921 - RNA, 21 nt, Human
cccuggggcagggggacuggc

SEQ ID NO: 211922 - RNA, 22 nt, Human
cgccuucugaggguccaccccu

SEQ ID NO: 211923 - RNA, 23 nt, Human
cggggacugaaaaaaaaaaauca

SEQ ID NO: 211924 - RNA, 23 nt, Human
cucuacaaugucaaggagcaauu

SEQ ID NO: 211925 - RNA, 28 nt, Human
cucuccccgaaagaacauaaucuccaaa

SEQ ID NO: 211926 - RNA, 24 nt, Human
cugauaggacaggaggucuucccc

SEQ ID NO: 211927 - RNA, 26 nt, Human
gaagaaagaacccccaggagccacau

SEQ ID NO: 211928 - RNA, 18 nt, Human
gacuggucuuuucuuuuu

SEQ ID NO: 211929 - RNA, 22 nt, Human
gaggaagaggcaguggcaagag

SEQ ID NO: 211930 - RNA, 21 nt, Human
gaggguccaccccucaauggc

SEQ ID NO: 211931 - RNA, 20 nt, Human
gcaugggaagguggaaugag

SEQ ID NO: 211932 - RNA, 21 nt, Human
gccacauuugcucagagccuu

SEQ ID NO: 211933 - RNA, 18 nt, Human
ggaauauuuuaaguccuc

SEQ ID NO: 211934 - RNA, 23 nt, Human
ggagacaggcagaggcacagcca

SEQ ID NO: 211935 - RNA, 22 nt, Human
ggcuaggugcuuggcccugcag

SEQ ID NO: 211936 - RNA, 23 nt, Human
gggcagcagugccuggacagagg

SEQ ID NO: 211937 - RNA, 19 nt, Human
uaaaacagggugugggagc

SEQ ID NO: 211938 - RNA, 19 nt, Human
uagaaagaccauucuggag

SEQ ID NO: 211939 - RNA, 24 nt, Human
uagccgggagcccuggggcagggg

SEQ ID NO: 211940 - RNA, 21 nt, Human
ucagccucuccccgaaagaac

SEQ ID NO: 211941 - RNA, 18 nt, Human
ucagugcccccauagccg

SEQ ID NO: 211942 - RNA, 20 nt, Human
ucagugcccccauagccggg

SEQ ID NO: 211943 - RNA, 23 nt, Human
ucauggacuggucuuuucuuuuu

SEQ ID NO: 211944 - RNA, 20 nt, Human
ucccugcaguccuugccaug

SEQ ID NO: 211945 - RNA, 18 nt, Human
uccugugaccagguuguu

SEQ ID NO: 211946 - RNA, 24 nt, Human
uccuugccaugcaagaaugggaac

SEQ ID NO: 211947 - RNA, 20 nt, Human
ucuccaagugccagaagcuc

SEQ ID NO: 211948 - RNA, 18 nt, Human
ucuggaggcagcauggag

SEQ ID NO: 211949 - RNA, 22 nt, Human
ucuggaggcagcauggaggcug

SEQ ID NO: 211950 - RNA, 27 nt, Human
ucuuuucuuuuuuguaaaacagggugu

SEQ ID NO: 211951 - RNA, 21 nt, Human
ugaagaggaggcagaguccug

SEQ ID NO: 211952 - RNA, 18 nt, Human
ugcucagagccuugggag

SEQ ID NO: 211953 - RNA, 24 nt, Human
ugcucagagccuugggagcugaga

SEQ ID NO: 211954 - RNA, 20 nt, Human
uggcaagaggagagcagguu

SEQ ID NO: 211955 - RNA, 21 nt, Human
uggcaagaggagagcagguug

SEQ ID NO: 211956 - RNA, 19 nt, Human
uggccugauggauccaggg

SEQ ID NO: 211957 - RNA, 20 nt, Human
uggccugauggauccaggga

SEQ ID NO: 211958 - RNA, 21 nt, Human
ugggaacaggcaggccugggc

SEQ ID NO: 211959 - RNA, 23 nt, Human
ugggacaucacaaaaaaagaaga

SEQ ID NO: 211960 - RNA, 23 nt, Human
ugggcagcagugccuggacagag

SEQ ID NO: 211961 - RNA, 18 nt, Human
uggggcagggggacuggc

SEQ ID NO: 211962 - RNA, 19 nt, Human
uggugggggagacaggcag

SEQ ID NO: 211963 - RNA, 23 nt, Human
ugugaccagguuguugugacgcc

SEQ ID NO: 211964 - RNA, 21 nt, Human
uguuuuaaaaggaaaaaaaaa

SEQ ID NO: 211965 - RNA, 24 nt, Human
uuaaaaaccucccucauggacugg

SEQ ID NO: 211966 - RNA, 20 nt, Human
uucagcagaggaagaaagaa

SEQ ID NO: 211967 - RNA, 18 nt, Human
uucgcugaguaccugcca

SEQ ID NO: 211968 - RNA, 21 nt, Human
uugggcagguggucgggguuu

SEQ ID NO: 211969 - RNA, 23 nt, Human
uuuuuuuuuuuuuuuuuuuuagg

SEQ ID NO: 211970 - RNA, 19 nt, Human
caaaccauacauucaacaa

SEQ ID NO: 211971 - RNA, 21 nt, Human
caauagguagcaaaccauaca

SEQ ID NO: 211972 - RNA, 28 nt, Human
uaaauagaaggccugauauuguaaugac

SEQ ID NO: 211973 - RNA, 24 nt, Human
uacaaaaagaaucauaaaagaucc

SEQ ID NO: 211974 - RNA, 18 nt, Human
uacaauagguagcaaacc

SEQ ID NO: 211975 - RNA, 18 nt, Human
uauaguuuuaagauuaag

SEQ ID NO: 211976 - RNA, 20 nt, Human
ugaguagugauuaaagagag

SEQ ID NO: 211977 - RNA, 21 nt, Human
aaaaacagccaaauauccaca

SEQ ID NO: 211978 - RNA, 19 nt, Human
aaaacuucuuucaucccag

SEQ ID NO: 211979 - RNA, 18 nt, Human
aaacagccaaauauccac

SEQ ID NO: 211980 - RNA, 25 nt, Human
aaaccaagggcgagcgacucgcgga

SEQ ID NO: 211981 - RNA, 18 nt, Human
aacuacuuuuacaguuag

SEQ ID NO: 211982 - RNA, 27 nt, Human
aagaggccagaguacacccaccugaau

SEQ ID NO: 211983 - RNA, 18 nt, Human
aaguauuaaagauggccu

SEQ ID NO: 211984 - RNA, 18 nt, Human
aauccaucucuccuacca

SEQ ID NO: 211985 - RNA, 20 nt, Human
accugagucccagggcgccu

SEQ ID NO: 211986 - RNA, 22 nt, Human
agaaaagaaauaaguaauucuc

SEQ ID NO: 211987 - RNA, 23 nt, Human
agaaaagaaauaaguaauucuca

SEQ ID NO: 211988 - RNA, 24 nt, Human
agaaaccaagggcgagcgguggga

SEQ ID NO: 211989 - RNA, 22 nt, Human
agaauagaggauauucauucau

SEQ ID NO: 211990 - RNA, 20 nt, Human
agacaauaagccccuacuaa

SEQ ID NO: 211991 - RNA, 21 nt, Human
agacaauaagccccuacuaaa

SEQ ID NO: 211992 - RNA, 18 nt, Human
agcagcgugacugaagaa

SEQ ID NO: 211993 - RNA, 21 nt, Human
aggcaaaaggaaguguuggca

SEQ ID NO: 211994 - RNA, 18 nt, Human
auaaugaaccaagaggcc

SEQ ID NO: 211995 - RNA, 21 nt, Human
aucauuguuaagagaccuaca

SEQ ID NO: 211996 - RNA, 27 nt, Human
augaaccaagaggccagaguacaccca

SEQ ID NO: 211997 - RNA, 23 nt, Human
cacuccagaacuacucauaaagu

SEQ ID NO: 211998 - RNA, 21 nt, Human
cacugacaaacuggaaaaaac

SEQ ID NO: 211999 - RNA, 22 nt, Human
cagaacacucugauuaauauaa

SEQ ID NO: 212000 - RNA, 22 nt, Human
cagaacuacucauaaaguauua

SEQ ID NO: 212001 - RNA, 20 nt, Human
cagcagacugcucaguccca

SEQ ID NO: 212002 - RNA, 23 nt, Human
cagccccuggacuccagaggccc

SEQ ID NO: 212003 - RNA, 24 nt, Human
caggaaacaaaaggcaaaaggaag

SEQ ID NO: 212004 - RNA, 23 nt, Human
caugaccccagaauccaucucuc

SEQ ID NO: 212005 - RNA, 20 nt, Human
cauuuucuuuuagguuaguu

SEQ ID NO: 212006 - RNA, 22 nt, Human
ccacagccgcgucccccaggcu

SEQ ID NO: 212007 - RNA, 23 nt, Human
ccaccugaauaaauucugcaccc

SEQ ID NO: 212008 - RNA, 18 nt, Human
cccacgcgcgcucccccg

SEQ ID NO: 212009 - RNA, 24 nt, Human
cccacgcgcgcucccccggcuacc

SEQ ID NO: 212010 - RNA, 26 nt, Human
ccccacgcgcgcucccccggcuaccc

SEQ ID NO: 212011 - RNA, 20 nt, Human
ccccagaaaccaagggcgag

SEQ ID NO: 212012 - RNA, 19 nt, Human
cccuggacuccagaggccc

SEQ ID NO: 212013 - RNA, 18 nt, Human
ccgcuggggccaagcgcg

SEQ ID NO: 212014 - RNA, 25 nt, Human
ccugaauaaauucugcacccagucu

SEQ ID NO: 212015 - RNA, 25 nt, Human
cuaaaacaaauauauauuaaggcaa

SEQ ID NO: 212016 - RNA, 24 nt, Human
cuaccaggguugucugccuguacc

SEQ ID NO: 212017 - RNA, 18 nt, Human
cucauaaaguauuaaaga

SEQ ID NO: 212018 - RNA, 19 nt, Human
cuccagaggcccaccauca

SEQ ID NO: 212019 - RNA, 20 nt, Human
cuccgcgccuggggcucugc

SEQ ID NO: 212020 - RNA, 26 nt, Human
gaaacaaaaggcaaaaggagggaccc

SEQ ID NO: 212021 - RNA, 18 nt, Human
gaccccagaauccaucuc

SEQ ID NO: 212022 - RNA, 22 nt, Human
gagacaauaagccccuacuaaa

SEQ ID NO: 212023 - RNA, 23 nt, Human
gagaugggaacaguuacuggaaa

SEQ ID NO: 212024 - RNA, 21 nt, Human
gagcccccacgcgcgcucccc

SEQ ID NO: 212025 - RNA, 21 nt, Human
gcagacugcucagucccacgc

SEQ ID NO: 212026 - RNA, 19 nt, Human
gggaacaguuacuggaaau

SEQ ID NO: 212027 - RNA, 20 nt, Human
gggcugggucacaugucggg

SEQ ID NO: 212028 - RNA, 22 nt, Human
gucacaugucggggggcagcag

SEQ ID NO: 212029 - RNA, 23 nt, Human
gucccccaggcuuccccagaaac

SEQ ID NO: 212030 - RNA, 23 nt, Human
uaaaacaaauauauauuaaggca

SEQ ID NO: 212031 - RNA, 22 nt, Human
uaaaccauuagaucugaaacug

SEQ ID NO: 212032 - RNA, 25 nt, Human
uaaguaauucucacagacacugaca

SEQ ID NO: 212033 - RNA, 23 nt, Human
uacccagaaaauaauuguacaag

SEQ ID NO: 212034 - RNA, 22 nt, Human
uagaaagcuauuguuuuauggc

SEQ ID NO: 212035 - RNA, 25 nt, Human
uauccacaauuauauaugguucaac

SEQ ID NO: 212036 - RNA, 24 nt, Human
uaucuccuccugcucgcaauaaac

SEQ ID NO: 212037 - RNA, 21 nt, Human
uauggcugggaucaaaggggu

SEQ ID NO: 212038 - RNA, 21 nt, Human
ucacacacgugcuaugagaau

SEQ ID NO: 212039 - RNA, 22 nt, Human
ucacucaaaauaugaaucauga

SEQ ID NO: 212040 - RNA, 22 nt, Human
uccagaaauaaauguaauauuc

SEQ ID NO: 212041 - RNA, 19 nt, Human
ucuauuauaaaauguguca

SEQ ID NO: 212042 - RNA, 21 nt, Human
ucugauuaauauaauuacucc

SEQ ID NO: 212043 - RNA, 21 nt, Human
ugaaaacacacuuccagaaau

SEQ ID NO: 212044 - RNA, 22 nt, Human
ugaaaacacacuuccagaaaua

SEQ ID NO: 212045 - RNA, 24 nt, Human
ugaaaauaaugaaccaagaggcca

SEQ ID NO: 212046 - RNA, 18 nt, Human
ugacuaaaacaaauauau

SEQ ID NO: 212047 - RNA, 20 nt, Human
ugcaugaaccaaucacacac

SEQ ID NO: 212048 - RNA, 24 nt, Human
ugcgugccacgcuccaggcgaccu

SEQ ID NO: 212049 - RNA, 23 nt, Human
ugcuuguuugaaaauaaugaacc

SEQ ID NO: 212050 - RNA, 22 nt, Human
uggcauaguuuaguuccuacag

SEQ ID NO: 212051 - RNA, 18 nt, Human
ugggaacaguuacuggaa

SEQ ID NO: 212052 - RNA, 18 nt, Human
ugggaucaaaggggugac

SEQ ID NO: 212053 - RNA, 23 nt, Human
uguaauacaucuguucuucaaaa

SEQ ID NO: 212054 - RNA, 24 nt, Human
uguuuaauauuauaauaguaacac

SEQ ID NO: 212055 - RNA, 20 nt, Human
uugcggauaaucacgaaagg

SEQ ID NO: 212056 - RNA, 24 nt, Human
uuugcacaggaaacaaaaggcaaa

SEQ ID NO: 212057 - RNA, 20 nt, Human
accuuggucucguuuucacu

SEQ ID NO: 212058 - RNA, 21 nt, Human
auaguguccaacugcaaguua

SEQ ID NO: 212059 - RNA, 21 nt, Human
caacaguagagcuagaccuug

SEQ ID NO: 212060 - RNA, 20 nt, Human
uaauagggcuccuccacuuu

SEQ ID NO: 212061 - RNA, 19 nt, Human
aaaucuugguuggugggga

SEQ ID NO: 212062 - RNA, 18 nt, Human
acaaagccccggagaugc

SEQ ID NO: 212063 - RNA, 24 nt, Human
acacacacacacacacacaugcag

SEQ ID NO: 212064 - RNA, 23 nt, Human
acacacacacaugcauaugcaca

SEQ ID NO: 212065 - RNA, 28 nt, Human
acacacacacaugcauaugcacacacaa

SEQ ID NO: 212066 - RNA, 23 nt, Human
acacacacauaugcacacacaca

SEQ ID NO: 212067 - RNA, 25 nt, Human
acacacacaugcauaugcacacaca

SEQ ID NO: 212068 - RNA, 25 nt, Human
acacacaugcauaugcacacacaca

SEQ ID NO: 212069 - RNA, 27 nt, Human
acaggcaaugcccugaucccacaaagc

SEQ ID NO: 212070 - RNA, 28 nt, Human
acauaugcacacacacacacagacacug

SEQ ID NO: 212071 - RNA, 19 nt, Human
accugcagcccccuccaug

SEQ ID NO: 212072 - RNA, 18 nt, Human
acgcuggagggcugggcu

SEQ ID NO: 212073 - RNA, 19 nt, Human
agacgcuggagggcugggc

SEQ ID NO: 212074 - RNA, 21 nt, Human
agaugcuguggaccaacuugc

SEQ ID NO: 212075 - RNA, 18 nt, Human
aggcccacaggcacgugc

SEQ ID NO: 212076 - RNA, 21 nt, Human
auccccuuucgcuuccuguug

SEQ ID NO: 212077 - RNA, 26 nt, Human
augcacacacacacauaugcacacac

SEQ ID NO: 212078 - RNA, 18 nt, Human
cacacacacacacacaca

SEQ ID NO: 212079 - RNA, 26 nt, Human
cacacacacacacacacaugcauaug

SEQ ID NO: 212080 - RNA, 28 nt, Human
cacacacacacacacaugcauaugcaca

SEQ ID NO: 212081 - RNA, 23 nt, Human
cacacacacacacagacacugua

SEQ ID NO: 212082 - RNA, 24 nt, Human
cacacacacauaugcacacacaca

SEQ ID NO: 212083 - RNA, 24 nt, Human
cacacacacaugcauaugcacaca

SEQ ID NO: 212084 - RNA, 22 nt, Human
cacagcccaggugaccuugucu

SEQ ID NO: 212085 - RNA, 33 nt, Human
cacaggcacgugcaaucacacacacacguggug

SEQ ID NO: 212086 - RNA, 31 nt, Human
cacaugcauaugcacacacacacauaugcag

SEQ ID NO: 212087 - RNA, 24 nt, Human
caccaugggcucacuccauccccu

SEQ ID NO: 212088 - RNA, 31 nt, Human
cacugcgcaccuaagacacacacacacacag

SEQ ID NO: 212089 - RNA, 28 nt, Human
caggcaaugcccugaucccacaaagccc

SEQ ID NO: 212090 - RNA, 26 nt, Human
caucacagagcccuagggauguggag

SEQ ID NO: 212091 - RNA, 25 nt, Human
caugcacagggcaggugaaugcaug

SEQ ID NO: 212092 - RNA, 20 nt, Human
ccaggagaccaaaggcugca

SEQ ID NO: 212093 - RNA, 23 nt, Human
ccauccaggagaccaaaggcugc

SEQ ID NO: 212094 - RNA, 25 nt, Human
ccauccaggagaccaaaggcugcag

SEQ ID NO: 212095 - RNA, 21 nt, Human
cccacaaagccccggagaugc

SEQ ID NO: 212096 - RNA, 18 nt, Human
cccaguggccuggccagc

SEQ ID NO: 212097 - RNA, 20 nt, Human
cccccccgaguggcccucug

SEQ ID NO: 212098 - RNA, 22 nt, Human
cccccgcccgccucggcucugg

SEQ ID NO: 212099 - RNA, 21 nt, Human
cccgcgggugcccaggcuguc

SEQ ID NO: 212100 - RNA, 21 nt, Human
cgcaccuaagacacacacaca

SEQ ID NO: 212101 - RNA, 22 nt, Human
cggcucuggccgcagaaggaag

SEQ ID NO: 212102 - RNA, 31 nt, Human
cuaagacacacacacacacacacaugcauag

SEQ ID NO: 212103 - RNA, 26 nt, Human
cuagcccagagaggggaggcgacuug

SEQ ID NO: 212104 - RNA, 19 nt, Human
cucacuccauccccuuucg

SEQ ID NO: 212105 - RNA, 25 nt, Human
cucugccuacaucacagagcccuag

SEQ ID NO: 212106 - RNA, 19 nt, Human
cugaucccacaaagccccg

SEQ ID NO: 212107 - RNA, 25 nt, Human
cuggccgcagaaggaaggaagcuga

SEQ ID NO: 212108 - RNA, 18 nt, Human
cuugcagcuccuggaggc

SEQ ID NO: 212109 - RNA, 20 nt, Human
gagaccaaaggcugcaggug

SEQ ID NO: 212110 - RNA, 21 nt, Human
gagcccuagggauguggaggg

SEQ ID NO: 212111 - RNA, 20 nt, Human
gaggggguaccugcugcuuc

SEQ ID NO: 212112 - RNA, 25 nt, Human
gcacacacacacauaugcacacaca

SEQ ID NO: 212113 - RNA, 33 nt, Human
gcaccuaagacacacacacacacacacauggug

SEQ ID NO: 212114 - RNA, 19 nt, Human
gcccaguggccuggccagc

SEQ ID NO: 212115 - RNA, 23 nt, Human
gcccaguggccuggccagcucug

SEQ ID NO: 212116 - RNA, 30 nt, Human
gccggagcacacugcauaguuccaaccugg

SEQ ID NO: 212117 - RNA, 20 nt, Human
ggaagcugacguuuauugag

SEQ ID NO: 212118 - RNA, 26 nt, Human
ggaggcagacgcuggagggcugggcu

SEQ ID NO: 212119 - RNA, 19 nt, Human
ggagggcugggcuccgccu

SEQ ID NO: 212120 - RNA, 24 nt, Human
ggcccaguggccuggccagcucug

SEQ ID NO: 212121 - RNA, 18 nt, Human
ggccccgcgggugcccag

SEQ ID NO: 212122 - RNA, 21 nt, Human
gggcaggguagggggcccagc

SEQ ID NO: 212123 - RNA, 21 nt, Human
gggcaggguagggggcccagc

SEQ ID NO: 212124 - RNA, 20 nt, Human
uaagacacacacacacacac

SEQ ID NO: 212125 - RNA, 21 nt, Human
uacaucacagagcccuaggga

SEQ ID NO: 212126 - RNA, 21 nt, Human
uagcccagagaggggaggcga

SEQ ID NO: 212127 - RNA, 24 nt, Human
uaugcacacacacacauaugcaca

SEQ ID NO: 212128 - RNA, 25 nt, Human
uaugcacacacacacauaugcacac

SEQ ID NO: 212129 - RNA, 21 nt, Human
ucacacacacacguggacaug

SEQ ID NO: 212130 - RNA, 24 nt, Human
ucacacacacacguggacaugcca

SEQ ID NO: 212131 - RNA, 21 nt, Human
ucgcugacgauugauguucuc

SEQ ID NO: 212132 - RNA, 24 nt, Human
ucucacccccgcccgccucggcuc

SEQ ID NO: 212133 - RNA, 20 nt, Human
ucucuugggugcauaaaggg

SEQ ID NO: 212134 - RNA, 21 nt, Human
ucuggacauccagucagccuc

SEQ ID NO: 212135 - RNA, 19 nt, Human
ucuugggugcauaaaggga

SEQ ID NO: 212136 - RNA, 22 nt, Human
ugacgauugauguucucacccc

SEQ ID NO: 212137 - RNA, 23 nt, Human
ugauaaggaacaauauggacuuc

SEQ ID NO: 212138 - RNA, 22 nt, Human
ugcauaugcacacacacacaua

SEQ ID NO: 212139 - RNA, 24 nt, Human
ugcauaugcacacacacacauaug

SEQ ID NO: 212140 - RNA, 29 nt, Human
ugcgcaccuaagacacacacacacacaca

SEQ ID NO: 212141 - RNA, 23 nt, Human
uggcaggugauaaggaacaauau

SEQ ID NO: 212142 - RNA, 18 nt, Human
uggcucagggcccagugg

SEQ ID NO: 212143 - RNA, 23 nt, Human
uggcucagggcccaguggccugg

SEQ ID NO: 212144 - RNA, 18 nt, Human
ugguugguggggagcugu

SEQ ID NO: 212145 - RNA, 21 nt, Human
ugucucuggcucagggcccag

SEQ ID NO: 212146 - RNA, 20 nt, Human
ugugcacacuugugcacaug

SEQ ID NO: 212147 - RNA, 20 nt, Human
uuacugugcacacuugugca

SEQ ID NO: 212148 - RNA, 20 nt, Human
uuccaaccugcagcccccuc

SEQ ID NO: 212149 - RNA, 23 nt, Human
uuccaaccugcagcccccuccau

SEQ ID NO: 212150 - RNA, 18 nt, Human
uugguggggagcuguuuc

SEQ ID NO: 212151 - RNA, 24 nt, Human
uuuaagccuggaaacccccccgag

SEQ ID NO: 212152 - RNA, 20 nt, Human
agacaauucuaacucgagca

SEQ ID NO: 212153 - RNA, 19 nt, Human
ucugaagauucugcuugug

SEQ ID NO: 212154 - RNA, 18 nt, Human
uggggaaggagaaccugu

SEQ ID NO: 212155 - RNA, 19 nt, Human
uuuuucagcuuugcucugg

SEQ ID NO: 212156 - RNA, 26 nt, Human
aaaaacaaacagaaaagaaaagcuua

SEQ ID NO: 212157 - RNA, 18 nt, Human
aaaaacuaaacaaaacaa

SEQ ID NO: 212158 - RNA, 20 nt, Human
aaaacuaaacaaaacaaaaa

SEQ ID NO: 212159 - RNA, 19 nt, Human
aaaaggacaaaaggcaaaa

SEQ ID NO: 212160 - RNA, 25 nt, Human
aaaaggacaaaaggcaaaaaaggua

SEQ ID NO: 212161 - RNA, 22 nt, Human
aaacaaaacaaaaacaaacaga

SEQ ID NO: 212162 - RNA, 22 nt, Human
aaacaauauacaaacaaaacuu

SEQ ID NO: 212163 - RNA, 22 nt, Human
aaacuaaacaaaacaaaaacaa

SEQ ID NO: 212164 - RNA, 20 nt, Human
aacaaaaacaaacagaaaag

SEQ ID NO: 212165 - RNA, 21 nt, Human
aacaaaaacaaacagaaaaga

SEQ ID NO: 212166 - RNA, 23 nt, Human
aagaaggcagcuuucuguugacc

SEQ ID NO: 212167 - RNA, 19 nt, Human
aagacaggauuaaaaacua

SEQ ID NO: 212168 - RNA, 22 nt, Human
aagcaaaaacagagcaaggcaa

SEQ ID NO: 212169 - RNA, 23 nt, Human
aaggcaaaaaagguaguaagcaa

SEQ ID NO: 212170 - RNA, 23 nt, Human
aauuuuacuuacucgccacccac

SEQ ID NO: 212171 - RNA, 21 nt, Human
acaaaacaaaaacaaacagaa

SEQ ID NO: 212172 - RNA, 22 nt, Human
acaaaacaaaaacaaacagaaa

SEQ ID NO: 212173 - RNA, 20 nt, Human
accaauucucuagcucuugc

SEQ ID NO: 212174 - RNA, 19 nt, Human
agaaaagaaaagcuuaaua

SEQ ID NO: 212175 - RNA, 21 nt, Human
agaacacuuuauucucugccu

SEQ ID NO: 212176 - RNA, 25 nt, Human
agacaggauuaaaaacuaaacaaaa

SEQ ID NO: 212177 - RNA, 22 nt, Human
agagguggagagaacuugacca

SEQ ID NO: 212178 - RNA, 22 nt, Human
agcacaaaagcaaaaacagagc

SEQ ID NO: 212179 - RNA, 21 nt, Human
aggaggggccaguuuggaggg

SEQ ID NO: 212180 - RNA, 19 nt, Human
aggcagugagcaggagggg

SEQ ID NO: 212181 - RNA, 23 nt, Human
auagagaugaggaaggcgccaca

SEQ ID NO: 212182 - RNA, 18 nt, Human
aucuccucacuagaaaga

SEQ ID NO: 212183 - RNA, 19 nt, Human
caccaugaagaagaugaca

SEQ ID NO: 212184 - RNA, 19 nt, Human
cacccaccccacuacucuu

SEQ ID NO: 212185 - RNA, 19 nt, Human
caccuaccaacaccggucc

SEQ ID NO: 212186 - RNA, 18 nt, Human
cagaaggauugaguaaug

SEQ ID NO: 212187 - RNA, 18 nt, Human
cagcaguucccaauaaac

SEQ ID NO: 212188 - RNA, 26 nt, Human
cagcucaggaccaaagaggaaacagg

SEQ ID NO: 212189 - RNA, 23 nt, Human
caggauuaaaaacuaaacaaaac

SEQ ID NO: 212190 - RNA, 22 nt, Human
ccacaaaaggacaaaaggcaaa

SEQ ID NO: 212191 - RNA, 22 nt, Human
ccaguguuccuuuuaaccagcu

SEQ ID NO: 212192 - RNA, 27 nt, Human
cccaccccacuacucuuaauucaucgc

SEQ ID NO: 212193 - RNA, 20 nt, Human
ccuucuccugcuacccacug

SEQ ID NO: 212194 - RNA, 26 nt, Human
cuacugaauugcauucacuaaaaugc

SEQ ID NO: 212195 - RNA, 20 nt, Human
cugauauguaucuccucacu

SEQ ID NO: 212196 - RNA, 19 nt, Human
cuucaagcugaguucucug

SEQ ID NO: 212197 - RNA, 22 nt, Human
gcaaccaguguuccuuuuaacc

SEQ ID NO: 212198 - RNA, 26 nt, Human
ggacaauuguacagagcagacuuccu

SEQ ID NO: 212199 - RNA, 18 nt, Human
gggaagcaaggaaaccaa

SEQ ID NO: 212200 - RNA, 19 nt, Human
gggacgccauguuauguuu

SEQ ID NO: 212201 - RNA, 18 nt, Human
guggagagaacuugacca

SEQ ID NO: 212202 - RNA, 22 nt, Human
guucaggcaaccaguguuccuu

SEQ ID NO: 212203 - RNA, 19 nt, Human
uaaacauauaugaagacuu

SEQ ID NO: 212204 - RNA, 19 nt, Human
uaaauacuauuccuugguu

SEQ ID NO: 212205 - RNA, 23 nt, Human
uaaaugagggacaauuguacaga

SEQ ID NO: 212206 - RNA, 23 nt, Human
uaagacaggauuaaaaacuaaac

SEQ ID NO: 212207 - RNA, 23 nt, Human
uaagauccuucaaacacgaguca

SEQ ID NO: 212208 - RNA, 21 nt, Human
uacaaacaaaacuugauccua

SEQ ID NO: 212209 - RNA, 20 nt, Human
uacagggaagcaaggaaacc

SEQ ID NO: 212210 - RNA, 18 nt, Human
uacauucagaaauaaagu

SEQ ID NO: 212211 - RNA, 19 nt, Human
uacccacugugugcuucca

SEQ ID NO: 212212 - RNA, 21 nt, Human
uagaaagacaaccuuaaacau

SEQ ID NO: 212213 - RNA, 18 nt, Human
uagaagaaugaagguugu

SEQ ID NO: 212214 - RNA, 21 nt, Human
ucagaaauaaaguucugaauu

SEQ ID NO: 212215 - RNA, 19 nt, Human
ucaggagaggcagugagca

SEQ ID NO: 212216 - RNA, 18 nt, Human
ucauagaacacuuuauuc

SEQ ID NO: 212217 - RNA, 20 nt, Human
uccacaaaaggacaaaaggc

SEQ ID NO: 212218 - RNA, 27 nt, Human
uccacaaaaggacaaaaggcaaaaaag

SEQ ID NO: 212219 - RNA, 24 nt, Human
uccuccuauauagagaugaggaag

SEQ ID NO: 212220 - RNA, 20 nt, Human
ucugccucuuauucuccucc

SEQ ID NO: 212221 - RNA, 28 nt, Human
ucuguaaugcuauuuuaaaaaaauuauu

SEQ ID NO: 212222 - RNA, 24 nt, Human
ucuguaggcaccuaccaacaccgg

SEQ ID NO: 212223 - RNA, 22 nt, Human
ucuuaauucaucgcccucucca

SEQ ID NO: 212224 - RNA, 25 nt, Human
ugaagaaacugagacauagauagag

SEQ ID NO: 212225 - RNA, 18 nt, Human
ugacaauauaucccuaac

SEQ ID NO: 212226 - RNA, 19 nt, Human
ugagcauacagggaagcaa

SEQ ID NO: 212227 - RNA, 24 nt, Human
ugcucugccucuuauucuccucca

SEQ ID NO: 212228 - RNA, 24 nt, Human
ugcuuccagcuucaagcugaguuc

SEQ ID NO: 212229 - RNA, 19 nt, Human
ugcuuuaagaaaauacaaa

SEQ ID NO: 212230 - RNA, 18 nt, Human
uggauaaacaaagaaguc

SEQ ID NO: 212231 - RNA, 23 nt, Human
uggauaaacaaagaaguccccaa

SEQ ID NO: 212232 - RNA, 19 nt, Human
uggggucgaccccagcagg

SEQ ID NO: 212233 - RNA, 21 nt, Human
ugucaauaauaagaucuaaua

SEQ ID NO: 212234 - RNA, 24 nt, Human
uucaaaaacagagaucaaaguaaa

SEQ ID NO: 212235 - RNA, 24 nt, Human
uucucugccucaucuuuacauuuc

SEQ ID NO: 212236 - RNA, 21 nt, Human
uugauguuacagaugaagaaa

SEQ ID NO: 212237 - RNA, 18 nt, Human
uuggagcaauuuucaugg

SEQ ID NO: 212238 - RNA, 22 nt, Human
uuucauggggaauuguacaaau

SEQ ID NO: 212239 - RNA, 23 nt, Human
uuuuuuuccccaaaaccuguucu

SEQ ID NO: 212240 - RNA, 18 nt, Human
aaaaaaaaaaggagggca

SEQ ID NO: 212241 - RNA, 21 nt, Human
aaacagaugcaccuuaccccc

SEQ ID NO: 212242 - RNA, 26 nt, Human
aaaggagggcaccaagggaaagggau

SEQ ID NO: 212243 - RNA, 21 nt, Human
aaagggaugauggggugagcu

SEQ ID NO: 212244 - RNA, 23 nt, Human
aagcaccacaguuuauuaaguac

SEQ ID NO: 212245 - RNA, 22 nt, Human
aagcacccauccacugccccac

SEQ ID NO: 212246 - RNA, 26 nt, Human
aagcagccucaauucuucuugguguu

SEQ ID NO: 212247 - RNA, 19 nt, Human
aagcagcuccucaucacag

SEQ ID NO: 212248 - RNA, 23 nt, Human
aagcaucccucucuguuuuuuaa

SEQ ID NO: 212249 - RNA, 19 nt, Human
aagggaugauggggugagc

SEQ ID NO: 212250 - RNA, 23 nt, Human
aauccaaagacaggccaaaaaaa

SEQ ID NO: 212251 - RNA, 19 nt, Human
acaggccaaaaaaagcacc

SEQ ID NO: 212252 - RNA, 22 nt, Human
acaggccaaaaaaagcaccaca

SEQ ID NO: 212253 - RNA, 20 nt, Human
accacaguuuauuaaguacu

SEQ ID NO: 212254 - RNA, 19 nt, Human
acccauggccaagggcgug

SEQ ID NO: 212255 - RNA, 18 nt, Human
agacaggccaaaaaaagc

SEQ ID NO: 212256 - RNA, 23 nt, Human
agacaggccaaaaaaagcaccac

SEQ ID NO: 212257 - RNA, 30 nt, Human
agcacccauccacugccccacacuguggcc

SEQ ID NO: 212258 - RNA, 20 nt, Human
agcauccagaggcaccuucc

SEQ ID NO: 212259 - RNA, 24 nt, Human
aggagggcaccaagggaaagggau

SEQ ID NO: 212260 - RNA, 25 nt, Human
aggcaccuucaccauucaccaauca

SEQ ID NO: 212261 - RNA, 23 nt, Human
aguggaagauuagggaagaauga

SEQ ID NO: 212262 - RNA, 23 nt, Human
auaaauagaacuucaguugaaau

SEQ ID NO: 212263 - RNA, 22 nt, Human
caagaaucuucucuguagacuc

SEQ ID NO: 212264 - RNA, 22 nt, Human
caagaaugggacccauggccaa

SEQ ID NO: 212265 - RNA, 19 nt, Human
caauccaaagacaggccaa

SEQ ID NO: 212266 - RNA, 21 nt, Human
cacagucaugucuugucccuc

SEQ ID NO: 212267 - RNA, 19 nt, Human
caccaagggaaagggauga

SEQ ID NO: 212268 - RNA, 22 nt, Human
caccccaaugcucugucccugc

SEQ ID NO: 212269 - RNA, 21 nt, Human
caccuucaccauucaccaauc

SEQ ID NO: 212270 - RNA, 26 nt, Human
caccuucaccauucaccaaucagagg

SEQ ID NO: 212271 - RNA, 19 nt, Human
cagaaaaguuagacaggca

SEQ ID NO: 212272 - RNA, 22 nt, Human
cagcaaggucagcuugacacuc

SEQ ID NO: 212273 - RNA, 19 nt, Human
cagggaaugucaucacaga

SEQ ID NO: 212274 - RNA, 20 nt, Human
caggugcaaugucaccauca

SEQ ID NO: 212275 - RNA, 27 nt, Human
cagugugauuuucaugcucugaaguuc

SEQ ID NO: 212276 - RNA, 21 nt, Human
ccagggggagggagguccugg

SEQ ID NO: 212277 - RNA, 20 nt, Human
ccccacacuguggcaaggau

SEQ ID NO: 212278 - RNA, 18 nt, Human
cccgucccagccguggaa

SEQ ID NO: 212279 - RNA, 22 nt, Human
ccuccuggccuuccucccaagc

SEQ ID NO: 212280 - RNA, 19 nt, Human
ccuggaggcagcugguucu

SEQ ID NO: 212281 - RNA, 18 nt, Human
ccugggccaagaauggga

SEQ ID NO: 212282 - RNA, 24 nt, Human
ccuucauguaacuuacagucucac

SEQ ID NO: 212283 - RNA, 23 nt, Human
cucaaguggaagauuagggaaga

SEQ ID NO: 212284 - RNA, 23 nt, Human
cucacaaauaaauagaacuucag

SEQ ID NO: 212285 - RNA, 22 nt, Human
cuggaggcagcugguucuuuuu

SEQ ID NO: 212286 - RNA, 22 nt, Human
cuguggcaaggauugugagggg

SEQ ID NO: 212287 - RNA, 19 nt, Human
cuuacuaagcacccaucca

SEQ ID NO: 212288 - RNA, 19 nt, Human
cuucaccauucaccaauca

SEQ ID NO: 212289 - RNA, 24 nt, Human
cuuccucccaagcagccucaauuc

SEQ ID NO: 212290 - RNA, 22 nt, Human
cuucucuguagacucuucacag

SEQ ID NO: 212291 - RNA, 20 nt, Human
gaaagcagcuccucaucaca

SEQ ID NO: 212292 - RNA, 21 nt, Human
gaaguaaagguuugcaggcaa

SEQ ID NO: 212293 - RNA, 19 nt, Human
gagggguaaagaagcaugg

SEQ ID NO: 212294 - RNA, 27 nt, Human
gcauccagaggcaccuucccugacugu

SEQ ID NO: 212295 - RNA, 19 nt, Human
ggaaaugaaauguuuauug

SEQ ID NO: 212296 - RNA, 18 nt, Human
gggaaagggaugaugggg

SEQ ID NO: 212297 - RNA, 24 nt, Human
gugagcuggcgaguguggguggga

SEQ ID NO: 212298 - RNA, 21 nt, Human
uaacuuacagucucacaaaua

SEQ ID NO: 212299 - RNA, 20 nt, Human
uagacaggcaccuucaccau

SEQ ID NO: 212300 - RNA, 23 nt, Human
uagggaagaaugacuaggauaaa

SEQ ID NO: 212301 - RNA, 24 nt, Human
ucccugacugucacuggcgcugcu

SEQ ID NO: 212302 - RNA, 20 nt, Human
ucccugcagauaucagcaga

SEQ ID NO: 212303 - RNA, 18 nt, Human
ugaaaugacacagggaac

SEQ ID NO: 212304 - RNA, 23 nt, Human
ugacuaggauaaaaaaaaaagga

SEQ ID NO: 212305 - RNA, 21 nt, Human
ugagggguaaagaagcauggg

SEQ ID NO: 212306 - RNA, 18 nt, Human
ugccagggggagggaggu

SEQ ID NO: 212307 - RNA, 22 nt, Human
ugcucugucccugcagauauca

SEQ ID NO: 212308 - RNA, 24 nt, Human
ugcucugucccugcagauaucagc

SEQ ID NO: 212309 - RNA, 21 nt, Human
ugggcacuuuaauccacauuu

SEQ ID NO: 212310 - RNA, 23 nt, Human
uguccagugaacagcauaggaag

SEQ ID NO: 212311 - RNA, 23 nt, Human
ugucuugucccucugguccugua

SEQ ID NO: 212312 - RNA, 18 nt, Human
uguuugaaaugacacagg

SEQ ID NO: 212313 - RNA, 19 nt, Human
uuccucccaagcagccuca

SEQ ID NO: 212314 - RNA, 19 nt, Human
uuggcgaaagcagcuccuc

SEQ ID NO: 212315 - RNA, 22 nt, Human
uuguaauaaauacaagaaucuu

SEQ ID NO: 212316 - RNA, 19 nt, Human
uuuacagaaaaguuagaca

SEQ ID NO: 212317 - RNA, 23 nt, Human
agaauggaaacauuauuugaaaa

SEQ ID NO: 212318 - RNA, 18 nt, Human
aucccacuccacacacaa

SEQ ID NO: 212319 - RNA, 18 nt, Human
cacaauguacuugugaau

SEQ ID NO: 212320 - RNA, 22 nt, Human
cacaucccacuccacacacaaa

SEQ ID NO: 212321 - RNA, 26 nt, Human
cccacuccacacacaaauauuacacg

SEQ ID NO: 212322 - RNA, 24 nt, Human
ccccacaucccacuccacacacaa

SEQ ID NO: 212323 - RNA, 24 nt, Human
ccccacaucccacuccacacacaa

SEQ ID NO: 212324 - RNA, 26 nt, Human
cccccacaucccacuccacacacaaa

SEQ ID NO: 212325 - RNA, 26 nt, Human
ccccccacaucccacuccacacacaa

SEQ ID NO: 212326 - RNA, 20 nt, Human
ccccuccaccccccacaucc

SEQ ID NO: 212327 - RNA, 25 nt, Human
cccuccaccccccacaucccacucc

SEQ ID NO: 212328 - RNA, 18 nt, Human
ccuccaccccccacaucc

SEQ ID NO: 212329 - RNA, 18 nt, Human
cuccaccccccacauccc

SEQ ID NO: 212330 - RNA, 21 nt, Human
cugucauucccccuccacccc

SEQ ID NO: 212331 - RNA, 18 nt, Human
ggaaacauuauuugaaaa

SEQ ID NO: 212332 - RNA, 21 nt, Human
uaaacauauuucuagcaguuc

SEQ ID NO: 212333 - RNA, 27 nt, Human
ucccacuccacacacaaaaggucggac

SEQ ID NO: 212334 - RNA, 23 nt, Human
ucccccuccaccccccacauccc

SEQ ID NO: 212335 - RNA, 24 nt, Human
ugacaaaacauguucagaauggaa

SEQ ID NO: 212336 - RNA, 18 nt, Human
ugcauuccagaaaucugu

SEQ ID NO: 212337 - RNA, 26 nt, Human
uucagaauggaaacauuauuugaaaa

SEQ ID NO: 212338 - RNA, 22 nt, Human
uuuacuaaauccuucuugucua

SEQ ID NO: 212339 - RNA, 19 nt, Human
aaacauuucaucucuuccc

SEQ ID NO: 212340 - RNA, 21 nt, Human
acauuucaucucuucccaguu

SEQ ID NO: 212341 - RNA, 21 nt, Human
agagucccuccuagaaaacca

SEQ ID NO: 212342 - RNA, 22 nt, Human
agcauagcccccauguucccca

SEQ ID NO: 212343 - RNA, 23 nt, Human
cacccugcaagccccuccggaca

SEQ ID NO: 212344 - RNA, 18 nt, Human
cagcauagcccccauguu

SEQ ID NO: 212345 - RNA, 23 nt, Human
cagcauagcccccauguucccca

SEQ ID NO: 212346 - RNA, 21 nt, Human
cagccacccugcaagccccuc

SEQ ID NO: 212347 - RNA, 29 nt, Human
cagcuucaccggagaugagaaggugccac

SEQ ID NO: 212348 - RNA, 23 nt, Human
cagggcuucagccacccugcaag

SEQ ID NO: 212349 - RNA, 22 nt, Human
ccagugaugugcuggcccuuuc

SEQ ID NO: 212350 - RNA, 20 nt, Human
ccccagggcuucagccaccc

SEQ ID NO: 212351 - RNA, 21 nt, Human
ccccauguuccccacccucuu

SEQ ID NO: 212352 - RNA, 18 nt, Human
ccccuggguaaacauagg

SEQ ID NO: 212353 - RNA, 26 nt, Human
ccccuggguaaacauaggaaagcagu

SEQ ID NO: 212354 - RNA, 23 nt, Human
cuggaggucggggggagcauggc

SEQ ID NO: 212355 - RNA, 19 nt, Human
gagaugagaaggugccacc

SEQ ID NO: 212356 - RNA, 18 nt, Human
gagcauggcugcuuuccc

SEQ ID NO: 212357 - RNA, 22 nt, Human
gagggcccuggacccucuguuc

SEQ ID NO: 212358 - RNA, 20 nt, Human
gcccuggacccucuguucuc

SEQ ID NO: 212359 - RNA, 19 nt, Human
ggacccucuguucucugcc

SEQ ID NO: 212360 - RNA, 20 nt, Human
ggagcauggcugcuuucccc

SEQ ID NO: 212361 - RNA, 22 nt, Human
uagcccccauguuccccacccu

SEQ ID NO: 212362 - RNA, 24 nt, Human
ucagcuucaccggagaugagaagg

SEQ ID NO: 212363 - RNA, 18 nt, Human
uccucagggcaggggcgg

SEQ ID NO: 212364 - RNA, 19 nt, Human
ucggcuggaggucgggggg

SEQ ID NO: 212365 - RNA, 22 nt, Human
ugagaaggugccacccgcaaca

SEQ ID NO: 212366 - RNA, 20 nt, Human
ugccccagggcuucagccac

SEQ ID NO: 212367 - RNA, 22 nt, Human
uggacuaggguccucagggccg

SEQ ID NO: 212368 - RNA, 21 nt, Human
ugggagccaggagggcccugg

SEQ ID NO: 212369 - RNA, 22 nt, Human
uuaaauaugaaaaaacauuuca

SEQ ID NO: 212370 - RNA, 23 nt, Human
uucagccacccugcaagccccuc

SEQ ID NO: 212371 - RNA, 21 nt, Human
aaaacgcaggcaagcacaacg

SEQ ID NO: 212372 - RNA, 22 nt, Human
aaagacaggaucuugcucuguu

SEQ ID NO: 212373 - RNA, 19 nt, Human
aacggaugucuccugggcg

SEQ ID NO: 212374 - RNA, 25 nt, Human
aagcaauccuccugccucagccucc

SEQ ID NO: 212375 - RNA, 25 nt, Human
accagugugaccuccaucccuucuc

SEQ ID NO: 212376 - RNA, 20 nt, Human
accuccaucccuucucccuc

SEQ ID NO: 212377 - RNA, 19 nt, Human
acuacaggcguaugccacc

SEQ ID NO: 212378 - RNA, 22 nt, Human
acugcagccucgaacuccuggg

SEQ ID NO: 212379 - RNA, 19 nt, Human
acuucuguugucuguuccc

SEQ ID NO: 212380 - RNA, 21 nt, Human
acuugggcuucaugacuucug

SEQ ID NO: 212381 - RNA, 21 nt, Human
agcggcugagaaaggaaccac

SEQ ID NO: 212382 - RNA, 22 nt, Human
aggcaagcacaacggaugucuc

SEQ ID NO: 212383 - RNA, 18 nt, Human
agggagcugggguuauag

SEQ ID NO: 212384 - RNA, 18 nt, Human
agggagcugggguuauag

SEQ ID NO: 212385 - RNA, 20 nt, Human
agugcaguggugccaucaug

SEQ ID NO: 212386 - RNA, 20 nt, Human
auccuccugccucagccucc

SEQ ID NO: 212387 - RNA, 20 nt, Human
augcugcccaggcuggucuc

SEQ ID NO: 212388 - RNA, 19 nt, Human
caaaacgcaggcaagcaca

SEQ ID NO: 212389 - RNA, 21 nt, Human
caaaacgcaggcaagcacaac

SEQ ID NO: 212390 - RNA, 22 nt, Human
caaaacgcaggcaagcacaacg

SEQ ID NO: 212391 - RNA, 22 nt, Human
caagcaauccuccugccucagc

SEQ ID NO: 212392 - RNA, 27 nt, Human
caagcaauccuccugccucagccuccu

SEQ ID NO: 212393 - RNA, 22 nt, Human
cacauauacaugaaaauaagau

SEQ ID NO: 212394 - RNA, 23 nt, Human
caccuuugauuucacuugggcuu

SEQ ID NO: 212395 - RNA, 20 nt, Human
cagccggggcagugaagcgg

SEQ ID NO: 212396 - RNA, 19 nt, Human
cagccuccugaguggcuag

SEQ ID NO: 212397 - RNA, 24 nt, Human
cagccucgaacuccugggcucaag

SEQ ID NO: 212398 - RNA, 24 nt, Human
caggaucuugcucuguugcccagg

SEQ ID NO: 212399 - RNA, 20 nt, Human
cagugugaccuccaucccuu

SEQ ID NO: 212400 - RNA, 19 nt, Human
cauagagacaagguugcca

SEQ ID NO: 212401 - RNA, 23 nt, Human
cauggccucuguuuuuuagaaau

SEQ ID NO: 212402 - RNA, 20 nt, Human
ccaccacauccagccaauuu

SEQ ID NO: 212403 - RNA, 21 nt, Human
cccuucucccucuucacuucc

SEQ ID NO: 212404 - RNA, 20 nt, Human
ccggggcagugaagcggagg

SEQ ID NO: 212405 - RNA, 28 nt, Human
ccggggcagugaagcggaggucuuucuc

SEQ ID NO: 212406 - RNA, 22 nt, Human
ccgugccaggccugaugcgcuc

SEQ ID NO: 212407 - RNA, 21 nt, Human
ccucauggguuuggcugcccc

SEQ ID NO: 212408 - RNA, 19 nt, Human
ccucgaacuccugggcuca

SEQ ID NO: 212409 - RNA, 23 nt, Human
ccucgaacuccugggcucaagca

SEQ ID NO: 212410 - RNA, 24 nt, Human
ccugaguggcuaggacuacaggcg

SEQ ID NO: 212411 - RNA, 23 nt, Human
ccugccucagccuccugaguggc

SEQ ID NO: 212412 - RNA, 24 nt, Human
ccugccucagccuccugaguggcu

SEQ ID NO: 212413 - RNA, 20 nt, Human
ccugggcucaagcaauccuc

SEQ ID NO: 212414 - RNA, 23 nt, Human
ccugggcucaagcaauccuccug

SEQ ID NO: 212415 - RNA, 20 nt, Human
ccuguaaacaucaaauuagu

SEQ ID NO: 212416 - RNA, 22 nt, Human
ccuucuuucuuuccuuccuugc

SEQ ID NO: 212417 - RNA, 19 nt, Human
ccuugggaccagccggggc

SEQ ID NO: 212418 - RNA, 25 nt, Human
cgaacuccugggcucaagcaauccu

SEQ ID NO: 212419 - RNA, 23 nt, Human
cuaauuuuuuguagggauguguc

SEQ ID NO: 212420 - RNA, 24 nt, Human
cucaagcaauccuccugccucagc

SEQ ID NO: 212421 - RNA, 19 nt, Human
cucauucauccuucuguuc

SEQ ID NO: 212422 - RNA, 21 nt, Human
cucauucauccuucuguuccu

SEQ ID NO: 212423 - RNA, 24 nt, Human
cuccugaguggcuaggacuacagg

SEQ ID NO: 212424 - RNA, 20 nt, Human
cucuguugcccaggcuggag

SEQ ID NO: 212425 - RNA, 20 nt, Human
cucuuuuuggcaucgcgccg

SEQ ID NO: 212426 - RNA, 22 nt, Human
cugaaggcucaguagaaggggg

SEQ ID NO: 212427 - RNA, 24 nt, Human
cugaaggcucaguagaaggggguu

SEQ ID NO: 212428 - RNA, 23 nt, Human
cugcagccucgaacuccugggcu

SEQ ID NO: 212429 - RNA, 20 nt, Human
cugugaugugacuucagagc

SEQ ID NO: 212430 - RNA, 19 nt, Human
cuugggacuccugaacugg

SEQ ID NO: 212431 - RNA, 19 nt, Human
cuuuuuggcaucgcgccgg

SEQ ID NO: 212432 - RNA, 23 nt, Human
gaacuccugggcucaagcaaucc

SEQ ID NO: 212433 - RNA, 20 nt, Human
gacccuugggaccagccggg

SEQ ID NO: 212434 - RNA, 25 nt, Human
gcaaucccaaagaaacuaacucuua

SEQ ID NO: 212435 - RNA, 19 nt, Human
gcccaggcuggagugcagu

SEQ ID NO: 212436 - RNA, 20 nt, Human
gcccaggcuggagugcagug

SEQ ID NO: 212437 - RNA, 24 nt, Human
gccucagccuccugaguggcuagg

SEQ ID NO: 212438 - RNA, 18 nt, Human
gcgccggaggauguggga

SEQ ID NO: 212439 - RNA, 25 nt, Human
gcucuguugcccaggcuggagugca

SEQ ID NO: 212440 - RNA, 21 nt, Human
gcuggagugcaguggugccag

SEQ ID NO: 212441 - RNA, 23 nt, Human
gcuggucucaaacuccuggccuc

SEQ ID NO: 212442 - RNA, 19 nt, Human
ggacuacaggcguaugcca

SEQ ID NO: 212443 - RNA, 22 nt, Human
ggacuacaggcguaugccacca

SEQ ID NO: 212444 - RNA, 24 nt, Human
ggagcugggguuauaggccugagc

SEQ ID NO: 212445 - RNA, 22 nt, Human
ggagugcaguggugccaucaug

SEQ ID NO: 212446 - RNA, 24 nt, Human
ggcuggucucaaacuccuggccuc

SEQ ID NO: 212447 - RNA, 22 nt, Human
gggcucaagcaauccuccugcc

SEQ ID NO: 212448 - RNA, 24 nt, Human
gguuauaggccugagccaccgugc

SEQ ID NO: 212449 - RNA, 22 nt, Human
guccugugaugugacuucagag

SEQ ID NO: 212450 - RNA, 18 nt, Human
gugaacgggagaaucagc

SEQ ID NO: 212451 - RNA, 22 nt, Human
uaaagacaggaucuugcucugu

SEQ ID NO: 212452 - RNA, 21 nt, Human
uaagauggagaguucuagugg

SEQ ID NO: 212453 - RNA, 19 nt, Human
uaaguaugauucucugccu

SEQ ID NO: 212454 - RNA, 24 nt, Human
uacaggcguaugccaccacaucca

SEQ ID NO: 212455 - RNA, 24 nt, Human
uacgcauugauuugcaccuugugu

SEQ ID NO: 212456 - RNA, 19 nt, Human
uagcaccuuugauuucacu

SEQ ID NO: 212457 - RNA, 24 nt, Human
uaggacuacaggcguaugccacca

SEQ ID NO: 212458 - RNA, 23 nt, Human
uaugcugcccaggcuggucucaa

SEQ ID NO: 212459 - RNA, 24 nt, Human
uaugcugcccaggcuggucucaaa

SEQ ID NO: 212460 - RNA, 20 nt, Human
ucagagcuuccaaaacgcag

SEQ ID NO: 212461 - RNA, 24 nt, Human
uccaaaacgcaggcaagcacaacg

SEQ ID NO: 212462 - RNA, 24 nt, Human
uccuagggagcugggguuauaggc

SEQ ID NO: 212463 - RNA, 26 nt, Human
uccuccugccucagccuccugagugg

SEQ ID NO: 212464 - RNA, 24 nt, Human
uccugaguggcuaggacuacaggc

SEQ ID NO: 212465 - RNA, 20 nt, Human
uccugggcgaccauuuagca

SEQ ID NO: 212466 - RNA, 18 nt, Human
uccugggcucaagcaauc

SEQ ID NO: 212467 - RNA, 22 nt, Human
uccugggcucaagcaauccucc

SEQ ID NO: 212468 - RNA, 22 nt, Human
uccugggcucaagcaauccucc

SEQ ID NO: 212469 - RNA, 24 nt, Human
uccugggcucaagcaauccuccug

SEQ ID NO: 212470 - RNA, 24 nt, Human
ucucaggaaacguacgcauugauu

SEQ ID NO: 212471 - RNA, 28 nt, Human
ucucccucuucacuuccuucuuucuuuc

SEQ ID NO: 212472 - RNA, 18 nt, Human
ucuguugcccaggcugga

SEQ ID NO: 212473 - RNA, 24 nt, Human
ucuguugcccaggcuggagugcag

SEQ ID NO: 212474 - RNA, 27 nt, Human
ucuucacuuccuucuuucugggccgcc

SEQ ID NO: 212475 - RNA, 22 nt, Human
ucuugcuaugcugcccaggcug

SEQ ID NO: 212476 - RNA, 23 nt, Human
ucuugcuaugcugcccaggcugg

SEQ ID NO: 212477 - RNA, 24 nt, Human
ucuugcuaugcugcccaggcuggu

SEQ ID NO: 212478 - RNA, 23 nt, Human
ucuugcucuguugcccaggcugg

SEQ ID NO: 212479 - RNA, 24 nt, Human
ucuugcucuguugcccaggcugga

SEQ ID NO: 212480 - RNA, 20 nt, Human
ugaauguacggaucccuuuu

SEQ ID NO: 212481 - RNA, 20 nt, Human
ugaccuccaucccuucuccc

SEQ ID NO: 212482 - RNA, 24 nt, Human
ugacugcagccucgaacuccuggg

SEQ ID NO: 212483 - RNA, 19 nt, Human
ugagaaaggaaccacgcug

SEQ ID NO: 212484 - RNA, 19 nt, Human
ugagaugaauguaaaccua

SEQ ID NO: 212485 - RNA, 22 nt, Human
ugaguggcuaggacuacaggcg

SEQ ID NO: 212486 - RNA, 20 nt, Human
ugcagaaggcccaguugccg

SEQ ID NO: 212487 - RNA, 19 nt, Human
ugccaggccugaugcgcuc

SEQ ID NO: 212488 - RNA, 18 nt, Human
ugcccaggcuggagugca

SEQ ID NO: 212489 - RNA, 21 nt, Human
ugcccaggcuggagugcagug

SEQ ID NO: 212490 - RNA, 24 nt, Human
ugcccaggcuggagugcaguggug

SEQ ID NO: 212491 - RNA, 24 nt, Human
ugcccaggcuggucucaaacuccu

SEQ ID NO: 212492 - RNA, 23 nt, Human
ugccucagccuccugaguggcua

SEQ ID NO: 212493 - RNA, 24 nt, Human
ugccucagccuccugaguggcuag

SEQ ID NO: 212494 - RNA, 27 nt, Human
ugcuaugcugcccaggcuggucucaaa

SEQ ID NO: 212495 - RNA, 22 nt, Human
uggaaugagaugaauguaaaaa

SEQ ID NO: 212496 - RNA, 26 nt, Human
uggaaugagaugaauguaaaccuacu

SEQ ID NO: 212497 - RNA, 21 nt, Human
uggagugcaguggugccauca

SEQ ID NO: 212498 - RNA, 23 nt, Human
uggagugcaguggugccaucaug

SEQ ID NO: 212499 - RNA, 28 nt, Human
uggagugcaguggugccauccuagcacg

SEQ ID NO: 212500 - RNA, 28 nt, Human
uggagugcaguggugccauggcucuagc

SEQ ID NO: 212501 - RNA, 20 nt, Human
uggccucaagagaugcuccc

SEQ ID NO: 212502 - RNA, 24 nt, Human
uggccucaagagaugcucccgccu

SEQ ID NO: 212503 - RNA, 19 nt, Human
ugggacugagcuggcauag

SEQ ID NO: 212504 - RNA, 24 nt, Human
ugggcucaagcaauccuccugccu

SEQ ID NO: 212505 - RNA, 18 nt, Human
ugggguuauaggccugag

SEQ ID NO: 212506 - RNA, 24 nt, Human
ugggguuauaggccugagccaccg

SEQ ID NO: 212507 - RNA, 18 nt, Human
uguguauuuacguuagug

SEQ ID NO: 212508 - RNA, 19 nt, Human
uuauaggccugagccaccg

SEQ ID NO: 212509 - RNA, 21 nt, Human
uuccugacauugccucauggg

SEQ ID NO: 212510 - RNA, 24 nt, Human
uuccugacccuugggaccagccgg

SEQ ID NO: 212511 - RNA, 26 nt, Human
uuccugacccuugggaccagccgggg

SEQ ID NO: 212512 - RNA, 22 nt, Human
uuccuucuuucuuuccuuccuu

SEQ ID NO: 212513 - RNA, 25 nt, Human
uucuagugguuuugcccuuccucuu

SEQ ID NO: 212514 - RNA, 19 nt, Human
uucucugccugggaccuca

SEQ ID NO: 212515 - RNA, 24 nt, Human
uugcucuguugcccaggcuggagu

SEQ ID NO: 212516 - RNA, 18 nt, Human
uuuagaaauucaagacug

SEQ ID NO: 212517 - RNA, 20 nt, Human
uuucuggguagcagcccaga

SEQ ID NO: 212518 - RNA, 21 nt, Human
aaacauucaggacccuauggc

SEQ ID NO: 212519 - RNA, 25 nt, Human
aagcacucugaggccucagagaucc

SEQ ID NO: 212520 - RNA, 21 nt, Human
aaguaccaggcugagaagugg

SEQ ID NO: 212521 - RNA, 23 nt, Human
acagaguaacaaagauuuuucuu

SEQ ID NO: 212522 - RNA, 20 nt, Human
accaggcugagaaguggggc

SEQ ID NO: 212523 - RNA, 23 nt, Human
acgacaccggagguacaaguacc

SEQ ID NO: 212524 - RNA, 18 nt, Human
acuccccaucagcuucuc

SEQ ID NO: 212525 - RNA, 18 nt, Human
acugccccccugcaacac

SEQ ID NO: 212526 - RNA, 22 nt, Human
acugccccccugcaacacacac

SEQ ID NO: 212527 - RNA, 21 nt, Human
acuuuguggggggaucugugc

SEQ ID NO: 212528 - RNA, 28 nt, Human
agacaaccucaagaaaggggggaacgcc

SEQ ID NO: 212529 - RNA, 19 nt, Human
agacccaagacucagacaa

SEQ ID NO: 212530 - RNA, 26 nt, Human
agagcaggcagcugccugccucccac

SEQ ID NO: 212531 - RNA, 22 nt, Human
agcagccaagcacucugaggcc

SEQ ID NO: 212532 - RNA, 22 nt, Human
agccgaggaaggaagcccuggc

SEQ ID NO: 212533 - RNA, 24 nt, Human
aggaauccugaccaaauggucagc

SEQ ID NO: 212534 - RNA, 19 nt, Human
aggaggaggcuggggcaga

SEQ ID NO: 212535 - RNA, 19 nt, Human
aggcaacaggaauccugac

SEQ ID NO: 212536 - RNA, 23 nt, Human
aggcuggggcagaaaacccaggg

SEQ ID NO: 212537 - RNA, 18 nt, Human
agggagcccuggagagcc

SEQ ID NO: 212538 - RNA, 22 nt, Human
aguuugucaccuagaugagggg

SEQ ID NO: 212539 - RNA, 21 nt, Human
augaggcccugcccuguggag

SEQ ID NO: 212540 - RNA, 27 nt, Human
auuguacuuauuuuguacaguuaccuu

SEQ ID NO: 212541 - RNA, 26 nt, Human
caaggcauagacccaagacucagaca

SEQ ID NO: 212542 - RNA, 18 nt, Human
cacaagcaccugcuccca

SEQ ID NO: 212543 - RNA, 19 nt, Human
cacacagcaaaggugugga

SEQ ID NO: 212544 - RNA, 21 nt, Human
cacuguccugcugggguggaa

SEQ ID NO: 212545 - RNA, 18 nt, Human
cagagccugugggggcgu

SEQ ID NO: 212546 - RNA, 22 nt, Human
cagagccugugggggcgugugg

SEQ ID NO: 212547 - RNA, 19 nt, Human
cagcaguagguauuuuugu

SEQ ID NO: 212548 - RNA, 23 nt, Human
cagcauuaaagauacagcagcca

SEQ ID NO: 212549 - RNA, 21 nt, Human
caggaggugagacuguccaau

SEQ ID NO: 212550 - RNA, 18 nt, Human
cagggagcccuggagagc

SEQ ID NO: 212551 - RNA, 19 nt, Human
caggguccuucugaggcuc

SEQ ID NO: 212552 - RNA, 25 nt, Human
caggguggagccgaggaaggaagcc

SEQ ID NO: 212553 - RNA, 19 nt, Human
cagugcuucccuccaggag

SEQ ID NO: 212554 - RNA, 25 nt, Human
cagugggaggucccaggccuggcag

SEQ ID NO: 212555 - RNA, 27 nt, Human
ccaccacuaggcggggcugcugccugg

SEQ ID NO: 212556 - RNA, 19 nt, Human
ccagaccuaaugggcacgg

SEQ ID NO: 212557 - RNA, 21 nt, Human
ccagguaauuaauucguucau

SEQ ID NO: 212558 - RNA, 19 nt, Human
cccaagggccucccucccu

SEQ ID NO: 212559 - RNA, 23 nt, Human
cccaggucagaguuagcugggac

SEQ ID NO: 212560 - RNA, 23 nt, Human
cccccugcaacacacacaguucc

SEQ ID NO: 212561 - RNA, 23 nt, Human
ccccugcaacacacacaguuccu

SEQ ID NO: 212562 - RNA, 24 nt, Human
ccccugcaacacacacaguuccug

SEQ ID NO: 212563 - RNA, 18 nt, Human
cccuccaggagaagcaaa

SEQ ID NO: 212564 - RNA, 23 nt, Human
cccugagcugcagaggagacccc

SEQ ID NO: 212565 - RNA, 24 nt, Human
cccugcccuguggagcugcccuuc

SEQ ID NO: 212566 - RNA, 21 nt, Human
cccugggucccugacagcuuc

SEQ ID NO: 212567 - RNA, 19 nt, Human
ccuauggcaggaggugaga

SEQ ID NO: 212568 - RNA, 22 nt, Human
ccuccaguggagggggcagugg

SEQ ID NO: 212569 - RNA, 18 nt, Human
ccugacagcuucucccuc

SEQ ID NO: 212570 - RNA, 23 nt, Human
ccugcucccaagggccucccucc

SEQ ID NO: 212571 - RNA, 18 nt, Human
ccugggucccugacagcu

SEQ ID NO: 212572 - RNA, 23 nt, Human
cgacaccggagguacaaguacca

SEQ ID NO: 212573 - RNA, 21 nt, Human
cggacuccaggguuuacuccc

SEQ ID NO: 212574 - RNA, 22 nt, Human
cggcgcagagcaggcagcugcc

SEQ ID NO: 212575 - RNA, 23 nt, Human
cgggagcagcaguggagguuugg

SEQ ID NO: 212576 - RNA, 18 nt, Human
cuaguucaggcccagccu

SEQ ID NO: 212577 - RNA, 23 nt, Human
cugaccaaauggucagcagcccu

SEQ ID NO: 212578 - RNA, 19 nt, Human
cugacgcuagaaguuucug

SEQ ID NO: 212579 - RNA, 23 nt, Human
cugacgcuagaaguuucuggucc

SEQ ID NO: 212580 - RNA, 23 nt, Human
cugccucccacccuggccaucug

SEQ ID NO: 212581 - RNA, 21 nt, Human
cuggucagagccugugggggc

SEQ ID NO: 212582 - RNA, 24 nt, Human
cuuaaaaaauguaacccucccaag

SEQ ID NO: 212583 - RNA, 19 nt, Human
cuuggugccaaacccccuc

SEQ ID NO: 212584 - RNA, 19 nt, Human
gaaagauacguggaggggu

SEQ ID NO: 212585 - RNA, 23 nt, Human
gaagcaaaaccggcacuugaaga

SEQ ID NO: 212586 - RNA, 18 nt, Human
gaaggaggaggcuggggc

SEQ ID NO: 212587 - RNA, 23 nt, Human
gaccccuccaguggagggggcag

SEQ ID NO: 212588 - RNA, 23 nt, Human
gagcagcaguggagguuuggaaa

SEQ ID NO: 212589 - RNA, 22 nt, Human
gaggcagugcuucccuccagga

SEQ ID NO: 212590 - RNA, 18 nt, Human
gcagagaggauuaguagg

SEQ ID NO: 212591 - RNA, 19 nt, Human
gcaggacccgggagcagcg

SEQ ID NO: 212592 - RNA, 19 nt, Human
gcagugcuucccuccagga

SEQ ID NO: 212593 - RNA, 18 nt, Human
gccacugugggaagaugc

SEQ ID NO: 212594 - RNA, 23 nt, Human
gcccaagacagaguugaucugau

SEQ ID NO: 212595 - RNA, 19 nt, Human
gccccccugcaacacacac

SEQ ID NO: 212596 - RNA, 19 nt, Human
gcccugggucccugacagc

SEQ ID NO: 212597 - RNA, 19 nt, Human
gccugccucccacccuggc

SEQ ID NO: 212598 - RNA, 22 nt, Human
gcgguggcagcgcgcgcucucc

SEQ ID NO: 212599 - RNA, 22 nt, Human
gcucugaguggcucgggaggac

SEQ ID NO: 212600 - RNA, 19 nt, Human
gcuggucagagccuguggg

SEQ ID NO: 212601 - RNA, 23 nt, Human
gcuucucccuccagcacugacgc

SEQ ID NO: 212602 - RNA, 24 nt, Human
gcuugucuaccuuuccaaggcuca

SEQ ID NO: 212603 - RNA, 26 nt, Human
ggaaauggauggaccaagugugcagg

SEQ ID NO: 212604 - RNA, 21 nt, Human
ggaacccaagguccucugcuu

SEQ ID NO: 212605 - RNA, 22 nt, Human
ggaagaggucagggcagggagc

SEQ ID NO: 212606 - RNA, 24 nt, Human
ggagaccccuccaguggagggggc

SEQ ID NO: 212607 - RNA, 18 nt, Human
ggcagugggaggucccag

SEQ ID NO: 212608 - RNA, 21 nt, Human
ggccuggcagcaucagggccc

SEQ ID NO: 212609 - RNA, 20 nt, Human
ggcgguggcagcgcgcgcuc

SEQ ID NO: 212610 - RNA, 22 nt, Human
ggcugagaaguggggcugaggg

SEQ ID NO: 212611 - RNA, 24 nt, Human
gggaaggaggaggcuggggcagaa

SEQ ID NO: 212612 - RNA, 21 nt, Human
gggcagggagcccuggagagc

SEQ ID NO: 212613 - RNA, 20 nt, Human
gggccccagcauuaaagaua

SEQ ID NO: 212614 - RNA, 23 nt, Human
ggggagggaaggaggaggcuggg

SEQ ID NO: 212615 - RNA, 22 nt, Human
ggugccugagggcucccagguc

SEQ ID NO: 212616 - RNA, 19 nt, Human
gucagcagcccucucagca

SEQ ID NO: 212617 - RNA, 18 nt, Human
guccugcugggguggaau

SEQ ID NO: 212618 - RNA, 24 nt, Human
gugaauagcugcagggcuggagag

SEQ ID NO: 212619 - RNA, 21 nt, Human
gugcaggacugggugggggcc

SEQ ID NO: 212620 - RNA, 20 nt, Human
guggagccuuguccacaagc

SEQ ID NO: 212621 - RNA, 22 nt, Human
guggagguuuggaaauggaugg

SEQ ID NO: 212622 - RNA, 20 nt, Human
guggggcugagggcaguggg

SEQ ID NO: 212623 - RNA, 20 nt, Human
uaagggaggcagugcuuccc

SEQ ID NO: 212624 - RNA, 21 nt, Human
uaagugcaggugccugagggc

SEQ ID NO: 212625 - RNA, 21 nt, Human
uaccaggcugagaaguggggc

SEQ ID NO: 212626 - RNA, 20 nt, Human
uagacccaagacucagacaa

SEQ ID NO: 212627 - RNA, 22 nt, Human
uagacccaagacucagacaacc

SEQ ID NO: 212628 - RNA, 22 nt, Human
uagcugggacuggggucacugu

SEQ ID NO: 212629 - RNA, 19 nt, Human
ucagcagcccucucagcag

SEQ ID NO: 212630 - RNA, 21 nt, Human
uccacaagcaccugcucccaa

SEQ ID NO: 212631 - RNA, 24 nt, Human
ucccaagaagugggagccucccaa

SEQ ID NO: 212632 - RNA, 19 nt, Human
ucuccaggcgcccuggguc

SEQ ID NO: 212633 - RNA, 23 nt, Human
ucuccaggcgcccugggucccug

SEQ ID NO: 212634 - RNA, 21 nt, Human
ugagacuguccaauaauucag

SEQ ID NO: 212635 - RNA, 24 nt, Human
ugagccuaaauucgugggauccug

SEQ ID NO: 212636 - RNA, 19 nt, Human
ugagggagcucugaguggc

SEQ ID NO: 212637 - RNA, 20 nt, Human
ugaguucaaacgcccaagac

SEQ ID NO: 212638 - RNA, 20 nt, Human
ugccccagaacacacagcaa

SEQ ID NO: 212639 - RNA, 20 nt, Human
ugcccuguggagcugcccuu

SEQ ID NO: 212640 - RNA, 21 nt, Human
ugcccuguggagcugcccuuc

SEQ ID NO: 212641 - RNA, 22 nt, Human
ugcccuguggagcugcccuucu

SEQ ID NO: 212642 - RNA, 21 nt, Human
ugcccuuacuugggccccagc

SEQ ID NO: 212643 - RNA, 18 nt, Human
ugccugagggcucccagg

SEQ ID NO: 212644 - RNA, 21 nt, Human
ugcugggguggaauguuguuu

SEQ ID NO: 212645 - RNA, 24 nt, Human
ugcugggguggaauguuguuugag

SEQ ID NO: 212646 - RNA, 18 nt, Human
uggacagagcuuggugcc

SEQ ID NO: 212647 - RNA, 19 nt, Human
uggagccccuuguggucug

SEQ ID NO: 212648 - RNA, 19 nt, Human
uggagggggcagugggagg

SEQ ID NO: 212649 - RNA, 22 nt, Human
uggaggggucgggguagggggu

SEQ ID NO: 212650 - RNA, 21 nt, Human
uggccaucucuccagggcccu

SEQ ID NO: 212651 - RNA, 22 nt, Human
uggggggaucugugcccuuacu

SEQ ID NO: 212652 - RNA, 18 nt, Human
uggguuuuuucauuuaca

SEQ ID NO: 212653 - RNA, 20 nt, Human
uggucagagccugugggggc

SEQ ID NO: 212654 - RNA, 21 nt, Human
uggucaggugcccaaucagcu

SEQ ID NO: 212655 - RNA, 19 nt, Human
uguauagauacauauguca

SEQ ID NO: 212656 - RNA, 21 nt, Human
ugugauuaacgagggaguugg

SEQ ID NO: 212657 - RNA, 26 nt, Human
ugugcaggacuggguggggggaacgc

SEQ ID NO: 212658 - RNA, 20 nt, Human
ugugggggcguguggucagg

SEQ ID NO: 212659 - RNA, 18 nt, Human
uguggucaggugcccaau

SEQ ID NO: 212660 - RNA, 19 nt, Human
uguggucaggugcccaauc

SEQ ID NO: 212661 - RNA, 24 nt, Human
uuuccaaggcucaacgcuugugga

SEQ ID NO: 212662 - RNA, 21 nt, Human
aagaggaagggagggaaagag

SEQ ID NO: 212663 - RNA, 21 nt, Human
aagggagggaaagagggaggg

SEQ ID NO: 212664 - RNA, 21 nt, Human
acaaaauuccaaaucagccac

SEQ ID NO: 212665 - RNA, 19 nt, Human
agaggaagggagggaaaga

SEQ ID NO: 212666 - RNA, 18 nt, Human
agagggagggaggaagaa

SEQ ID NO: 212667 - RNA, 20 nt, Human
aggaagaauccugcgaaaag

SEQ ID NO: 212668 - RNA, 22 nt, Human
aggaagaauccugcgaaaagga

SEQ ID NO: 212669 - RNA, 20 nt, Human
aggaagggagggaaagaggg

SEQ ID NO: 212670 - RNA, 24 nt, Human
aggacccugggguucuucugucag

SEQ ID NO: 212671 - RNA, 20 nt, Human
auuccaaaucagccacaggg

SEQ ID NO: 212672 - RNA, 18 nt, Human
caugggggcacaaaauuc

SEQ ID NO: 212673 - RNA, 21 nt, Human
gagaagaaaaacauguucggg

SEQ ID NO: 212674 - RNA, 23 nt, Human
gaggaagaauccugcgaaaagga

SEQ ID NO: 212675 - RNA, 19 nt, Human
ggaaugccaaaugaagggg

SEQ ID NO: 212676 - RNA, 18 nt, Human
gggaaugccaaaugaagg

SEQ ID NO: 212677 - RNA, 19 nt, Human
gggaaugccaaaugaaggg

SEQ ID NO: 212678 - RNA, 19 nt, Human
gguagauggaaagaggaag

SEQ ID NO: 212679 - RNA, 22 nt, Human
gguagauggaaagaggaaggga

SEQ ID NO: 212680 - RNA, 18 nt, Human
uaucaacagaaacuuuau

SEQ ID NO: 212681 - RNA, 21 nt, Human
ugaaggggugcuuacaugggg

SEQ ID NO: 212682 - RNA, 24 nt, Human
ugaaggggugcuuacaugggggca

SEQ ID NO: 212683 - RNA, 20 nt, Human
ugagggagaagaaaaacaug

SEQ ID NO: 212684 - RNA, 21 nt, Human
ugaggugaguaugagacgcag

SEQ ID NO: 212685 - RNA, 22 nt, Human
ugaguaugagacgcaggugggu

SEQ ID NO: 212686 - RNA, 19 nt, Human
uggaaagaggaagggaggg

SEQ ID NO: 212687 - RNA, 18 nt, Human
caggagaagcuaacgaug

SEQ ID NO: 212688 - RNA, 18 nt, Human
aaaacacacagacgagca

SEQ ID NO: 212689 - RNA, 22 nt, Human
aaagugcugggauuauaggcau

SEQ ID NO: 212690 - RNA, 23 nt, Human
aaagugcugggauuauaggcaug

SEQ ID NO: 212691 - RNA, 24 nt, Human
aaagugcugggauuauaggcauga

SEQ ID NO: 212692 - RNA, 27 nt, Human
aacuggugccuuaugccugcugucugg

SEQ ID NO: 212693 - RNA, 24 nt, Human
aagugaucugcccgccucagccuc

SEQ ID NO: 212694 - RNA, 19 nt, Human
aagugcugggauuauaggc

SEQ ID NO: 212695 - RNA, 21 nt, Human
aagugcugggauuauaggcau

SEQ ID NO: 212696 - RNA, 23 nt, Human
aaucaccuucauaccaugguucu

SEQ ID NO: 212697 - RNA, 20 nt, Human
aggcaugagccaccacgccc

SEQ ID NO: 212698 - RNA, 28 nt, Human
agugcccucuacucucaugggauguggc

SEQ ID NO: 212699 - RNA, 18 nt, Human
aucugcagacucagcaac

SEQ ID NO: 212700 - RNA, 21 nt, Human
augaaacuaaaacacacagac

SEQ ID NO: 212701 - RNA, 20 nt, Human
augagccaccacgcccggcu

SEQ ID NO: 212702 - RNA, 24 nt, Human
augaucuggugggcaaaacaugcc

SEQ ID NO: 212703 - RNA, 18 nt, Human
caaaagugcugggauuau

SEQ ID NO: 212704 - RNA, 24 nt, Human
caaaagugcugggauuauaggcau

SEQ ID NO: 212705 - RNA, 24 nt, Human
caaugaccacccucccugaaguuc

SEQ ID NO: 212706 - RNA, 23 nt, Human
cacagacgagcauuacucaaccc

SEQ ID NO: 212707 - RNA, 23 nt, Human
cacgcccggcuucucuaugauuu

SEQ ID NO: 212708 - RNA, 22 nt, Human
cagacgagcauuacucaaccca

SEQ ID NO: 212709 - RNA, 21 nt, Human
ccaaggcaccaggcuggucuc

SEQ ID NO: 212710 - RNA, 22 nt, Human
ccagccuggcugccuuccagga

SEQ ID NO: 212711 - RNA, 21 nt, Human
cccaaggccgcccaagucauu

SEQ ID NO: 212712 - RNA, 18 nt, Human
cccccagccauacagcug

SEQ ID NO: 212713 - RNA, 22 nt, Human
ccugaucucaagugaucugccc

SEQ ID NO: 212714 - RNA, 18 nt, Human
ccuggcugccuuccagga

SEQ ID NO: 212715 - RNA, 21 nt, Human
ccuucuguuccacucuccuca

SEQ ID NO: 212716 - RNA, 19 nt, Human
cgccucagccuccaaaagu

SEQ ID NO: 212717 - RNA, 24 nt, Human
cgccucagccuccaaaagugcugg

SEQ ID NO: 212718 - RNA, 22 nt, Human
cuaugauuucuuccagcugugu

SEQ ID NO: 212719 - RNA, 18 nt, Human
cucaagugaucugcccgc

SEQ ID NO: 212720 - RNA, 21 nt, Human
cucaagugaucugcccgccuc

SEQ ID NO: 212721 - RNA, 21 nt, Human
cucagccuccaaaagugcugg

SEQ ID NO: 212722 - RNA, 21 nt, Human
cucaucugcagacucagcaac

SEQ ID NO: 212723 - RNA, 21 nt, Human
cugccagccuggcugccuucc

SEQ ID NO: 212724 - RNA, 19 nt, Human
cugcgcgccccugcuccau

SEQ ID NO: 212725 - RNA, 26 nt, Human
cuguuccacucuccucagcaaacaca

SEQ ID NO: 212726 - RNA, 26 nt, Human
cuuccagcuguguguaaaucuuuaau

SEQ ID NO: 212727 - RNA, 24 nt, Human
gacccagugcccucuacucucaug

SEQ ID NO: 212728 - RNA, 21 nt, Human
gauuauaggcaugagccacca

SEQ ID NO: 212729 - RNA, 22 nt, Human
gauuauaggcaugagccaccac

SEQ ID NO: 212730 - RNA, 24 nt, Human
gcaccaggcuggucucgaacuccu

SEQ ID NO: 212731 - RNA, 19 nt, Human
ggauuauaggcaugagcca

SEQ ID NO: 212732 - RNA, 24 nt, Human
ggcuggucucgaacuccugaucuc

SEQ ID NO: 212733 - RNA, 19 nt, Human
gggcauggguguuuggcag

SEQ ID NO: 212734 - RNA, 19 nt, Human
gguccagucucugcagccc

SEQ ID NO: 212735 - RNA, 19 nt, Human
ggucugggccaacaugcag

SEQ ID NO: 212736 - RNA, 22 nt, Human
guccucuguugcuccccuuaac

SEQ ID NO: 212737 - RNA, 22 nt, Human
gugaucugcccgccucagccuc

SEQ ID NO: 212738 - RNA, 19 nt, Human
gugcugggauuauaggcau

SEQ ID NO: 212739 - RNA, 22 nt, Human
ucaauuucucaucgauuuccca

SEQ ID NO: 212740 - RNA, 20 nt, Human
ucaguggggccaaucaccuu

SEQ ID NO: 212741 - RNA, 24 nt, Human
uccaaaagugcugggauuauaggc

SEQ ID NO: 212742 - RNA, 21 nt, Human
ucccaggcauggauaagcccu

SEQ ID NO: 212743 - RNA, 21 nt, Human
ucucgaacuccugaucucaag

SEQ ID NO: 212744 - RNA, 18 nt, Human
ucugcagacucagcaaca

SEQ ID NO: 212745 - RNA, 20 nt, Human
ucugcccgccucagccucca

SEQ ID NO: 212746 - RNA, 27 nt, Human
ugaaacuaaaacacacagacgagcauu

SEQ ID NO: 212747 - RNA, 22 nt, Human
ugaggucugggccaacaugcag

SEQ ID NO: 212748 - RNA, 18 nt, Human
ugaucucaagugaucugc

SEQ ID NO: 212749 - RNA, 24 nt, Human
ugaucucaagugaucugcccgccu

SEQ ID NO: 212750 - RNA, 23 nt, Human
ugccaaggcaccaggcuggucuc

SEQ ID NO: 212751 - RNA, 19 nt, Human
ugcccggcccacagggugg

SEQ ID NO: 212752 - RNA, 18 nt, Human
ugggauuauaggcaugag

SEQ ID NO: 212753 - RNA, 19 nt, Human
ugggauuauaggcaugagc

SEQ ID NO: 212754 - RNA, 22 nt, Human
ugggauuauaggcaugagccac

SEQ ID NO: 212755 - RNA, 23 nt, Human
ugggauuauaggcaugagccacc

SEQ ID NO: 212756 - RNA, 24 nt, Human
ugggauuauaggcaugagccacca

SEQ ID NO: 212757 - RNA, 21 nt, Human
uggggcacggcgacccagugc

SEQ ID NO: 212758 - RNA, 19 nt, Human
ugucuggauugcccggccc

SEQ ID NO: 212759 - RNA, 23 nt, Human
uguuccacucuccucagcaaaca

SEQ ID NO: 212760 - RNA, 22 nt, Human
uucccuagcaccugaggucugg

SEQ ID NO: 212761 - RNA, 25 nt, Human
uucuggggguuccaugcauacgagg

SEQ ID NO: 212762 - RNA, 19 nt, Human
uuggaaaucugccagccug

SEQ ID NO: 212763 - RNA, 20 nt, Human
uuucauguccucuguugcuc

SEQ ID NO: 212764 - RNA, 22 nt, Human
uuuccugcaggggccugccgug

SEQ ID NO: 212765 - RNA, 26 nt, Human
aaaauguccuucuccuccaaaaucuu

SEQ ID NO: 212766 - RNA, 22 nt, Human
aaauaagaaaaaaguauaucaa

SEQ ID NO: 212767 - RNA, 22 nt, Human
caaagugucaguaugccugaaa

SEQ ID NO: 212768 - RNA, 25 nt, Human
ccugaaauauuuacuuucccucuga

SEQ ID NO: 212769 - RNA, 24 nt, Human
gaacacaacauaacauuaaauaaa

SEQ ID NO: 212770 - RNA, 18 nt, Human
ggcaaagugucaguaugc

SEQ ID NO: 212771 - RNA, 27 nt, Human
guaaaauguccuucuccuccaaaaucu

SEQ ID NO: 212772 - RNA, 18 nt, Human
uaaaauguccuucuccuc

SEQ ID NO: 212773 - RNA, 23 nt, Human
uaucugaaauauauuuuaagaau

SEQ ID NO: 212774 - RNA, 21 nt, Human
uccuccaaaaucuuuggcugc

SEQ ID NO: 212775 - RNA, 21 nt, Human
ugccuuuggcaaagaaagugc

SEQ ID NO: 212776 - RNA, 24 nt, Human
uggaggaaaauacuucaaugauuc

SEQ ID NO: 212777 - RNA, 22 nt, Human
uggcugcaacaaaccaguuuag

SEQ ID NO: 212778 - RNA, 23 nt, Human
uguuaaguuaaauaagaaaaaag

SEQ ID NO: 212779 - RNA, 18 nt, Human
uucuuggcccucauucuc

SEQ ID NO: 212780 - RNA, 19 nt, Human
aaacagccaaacggcacag

SEQ ID NO: 212781 - RNA, 22 nt, Human
aagcaaauugcaaagauuggca

SEQ ID NO: 212782 - RNA, 19 nt, Human
acuuuuaagagauacaaga

SEQ ID NO: 212783 - RNA, 19 nt, Human
agaaaaaacauggcaaaag

SEQ ID NO: 212784 - RNA, 22 nt, Human
agccaaacggcacagccagaaa

SEQ ID NO: 212785 - RNA, 24 nt, Human
cagcuggacguuagccuuaaaagc

SEQ ID NO: 212786 - RNA, 19 nt, Human
cauggggagaaaaaacaug

SEQ ID NO: 212787 - RNA, 22 nt, Human
ccagaaguaaauacagcuggac

SEQ ID NO: 212788 - RNA, 25 nt, Human
ccaguacucaacagaagauggcgag

SEQ ID NO: 212789 - RNA, 18 nt, Human
cuucgcagguaaauugag

SEQ ID NO: 212790 - RNA, 20 nt, Human
gacaggaaacuucaaucuaa

SEQ ID NO: 212791 - RNA, 19 nt, Human
gacuggugugucugggugu

SEQ ID NO: 212792 - RNA, 20 nt, Human
gagugcuacaauuggcagcu

SEQ ID NO: 212793 - RNA, 19 nt, Human
gccaagagccagcaucccu

SEQ ID NO: 212794 - RNA, 22 nt, Human
gccugagaaaugcgguggccau

SEQ ID NO: 212795 - RNA, 21 nt, Human
ggcacugaggcaugugugagu

SEQ ID NO: 212796 - RNA, 24 nt, Human
ggcagcuuaaacagccaaacggca

SEQ ID NO: 212797 - RNA, 24 nt, Human
gggagaaaaaacauggcaaaaugc

SEQ ID NO: 212798 - RNA, 22 nt, Human
uaaacagccaaacggcacagcc

SEQ ID NO: 212799 - RNA, 21 nt, Human
uaaagaugagugaacaugaca

SEQ ID NO: 212800 - RNA, 23 nt, Human
uacaagacuggugugucugggug

SEQ ID NO: 212801 - RNA, 21 nt, Human
uacuaugaggauuuaaagaug

SEQ ID NO: 212802 - RNA, 18 nt, Human
ucccugcuguaggugagg

SEQ ID NO: 212803 - RNA, 22 nt, Human
ucuuccucagaugguagcugag

SEQ ID NO: 212804 - RNA, 26 nt, Human
ugccuaaauucugaacaccucuuagc

SEQ ID NO: 212805 - RNA, 22 nt, Human
ugcuucgcagguaaauugagug

SEQ ID NO: 212806 - RNA, 20 nt, Human
uggggagaaaaaacauggca

SEQ ID NO: 212807 - RNA, 20 nt, Human
uggugugucuggguguauug

SEQ ID NO: 212808 - RNA, 18 nt, Human
ugucuacagacgauccuc

SEQ ID NO: 212809 - RNA, 19 nt, Human
aaaugaucuggcucugaaa

SEQ ID NO: 212810 - RNA, 18 nt, Human
auaaauuaacucagcuuc

SEQ ID NO: 212811 - RNA, 23 nt, Human
cgcucauacuuuuaguucuccau

SEQ ID NO: 212812 - RNA, 23 nt, Human
gaaacaaaggauauucaaacugc

SEQ ID NO: 212813 - RNA, 20 nt, Human
gcugggcuccuggaggcgag

SEQ ID NO: 212814 - RNA, 18 nt, Human
ggacagguuucugaccag

SEQ ID NO: 212815 - RNA, 25 nt, Human
uaaaaugccauuuauugguauaaaa

SEQ ID NO: 212816 - RNA, 22 nt, Human
uacacuuuccaagaaaugaucu

SEQ ID NO: 212817 - RNA, 23 nt, Human
ucuggcucugaaacaaaggauau

SEQ ID NO: 212818 - RNA, 21 nt, Human
ugcccaguggacagguuucug

SEQ ID NO: 212819 - RNA, 18 nt, Human
uucaagugguacuucuua

SEQ ID NO: 212820 - RNA, 24 nt, Human
aaaaacagaauuugcuaagggcac

SEQ ID NO: 212821 - RNA, 21 nt, Human
aaaacagaauuugcuaagggc

SEQ ID NO: 212822 - RNA, 26 nt, Human
aaacaaaguuauggugcuucccccac

SEQ ID NO: 212823 - RNA, 21 nt, Human
aaacgcauucuugccaggcuc

SEQ ID NO: 212824 - RNA, 18 nt, Human
aacccaaagccaaugcag

SEQ ID NO: 212825 - RNA, 24 nt, Human
aaccucaaccagcugaacagcugg

SEQ ID NO: 212826 - RNA, 23 nt, Human
aacuucuggacucaagugauccu

SEQ ID NO: 212827 - RNA, 24 nt, Human
aaguaaaagccguccccaggccua

SEQ ID NO: 212828 - RNA, 21 nt, Human
acaccgaggcccccaccaacc

SEQ ID NO: 212829 - RNA, 19 nt, Human
acuccauggucccgcagag

SEQ ID NO: 212830 - RNA, 20 nt, Human
acuugcucugucaccccagg

SEQ ID NO: 212831 - RNA, 24 nt, Human
acuugcucugucaccccaggcugg

SEQ ID NO: 212832 - RNA, 25 nt, Human
acuugcucugucaccccaggcugga

SEQ ID NO: 212833 - RNA, 18 nt, Human
agagauccucccaccuca

SEQ ID NO: 212834 - RNA, 19 nt, Human
agagaugggguuuuaucac

SEQ ID NO: 212835 - RNA, 21 nt, Human
agcccucccugcugcuagcuc

SEQ ID NO: 212836 - RNA, 20 nt, Human
agcuucuucccccaggccuu

SEQ ID NO: 212837 - RNA, 19 nt, Human
aggaaaauauuuuuucucu

SEQ ID NO: 212838 - RNA, 22 nt, Human
aggcccccaccaaccugcccag

SEQ ID NO: 212839 - RNA, 25 nt, Human
aggcuggagugcaguggugcaaucu

SEQ ID NO: 212840 - RNA, 19 nt, Human
agguggagaagagagaaca

SEQ ID NO: 212841 - RNA, 20 nt, Human
agugcaguggugcaaucucg

SEQ ID NO: 212842 - RNA, 24 nt, Human
agugcaguggugcaaucucggcuc

SEQ ID NO: 212843 - RNA, 23 nt, Human
aguuggaagaugaaacgaugcag

SEQ ID NO: 212844 - RNA, 20 nt, Human
aucuuuugcugagcccguuu

SEQ ID NO: 212845 - RNA, 21 nt, Human
augacucagagcggcggacgg

SEQ ID NO: 212846 - RNA, 21 nt, Human
caagugauccuccugccucga

SEQ ID NO: 212847 - RNA, 23 nt, Human
caagugauccuccugccucgacc

SEQ ID NO: 212848 - RNA, 20 nt, Human
caaguucacucuaaccccuu

SEQ ID NO: 212849 - RNA, 21 nt, Human
cacaccccugagauaagcugg

SEQ ID NO: 212850 - RNA, 21 nt, Human
cacaggguccaggcugcuggu

SEQ ID NO: 212851 - RNA, 24 nt, Human
cacauugcccaggcugaucucaaa

SEQ ID NO: 212852 - RNA, 25 nt, Human
caccccaggcuggagugcaguggug

SEQ ID NO: 212853 - RNA, 19 nt, Human
cacccucucaagagaaaac

SEQ ID NO: 212854 - RNA, 24 nt, Human
caccucagccccccaaguaucugg

SEQ ID NO: 212855 - RNA, 20 nt, Human
caccugagguccugcaaccc

SEQ ID NO: 212856 - RNA, 21 nt, Human
cacuccauggucccgcagagg

SEQ ID NO: 212857 - RNA, 20 nt, Human
cacucuaccacacuuggcua

SEQ ID NO: 212858 - RNA, 22 nt, Human
cacugcagccuugaccucccag

SEQ ID NO: 212859 - RNA, 20 nt, Human
cacuugacuugguuuugggc

SEQ ID NO: 212860 - RNA, 19 nt, Human
cagccccccaaguaucugg

SEQ ID NO: 212861 - RNA, 21 nt, Human
cagccuugaccucccaggcuc

SEQ ID NO: 212862 - RNA, 23 nt, Human
cagccuugaccucccaggcucaa

SEQ ID NO: 212863 - RNA, 24 nt, Human
cagccuugaccucccaggcucaag

SEQ ID NO: 212864 - RNA, 18 nt, Human
cagcugacaacaaacaaa

SEQ ID NO: 212865 - RNA, 23 nt, Human
caggccccgggggcagccccccc

SEQ ID NO: 212866 - RNA, 22 nt, Human
caggcugaucucaaacuucugg

SEQ ID NO: 212867 - RNA, 18 nt, Human
caggguccaggcugcugg

SEQ ID NO: 212868 - RNA, 23 nt, Human
cagguucagcugacaacaaacaa

SEQ ID NO: 212869 - RNA, 23 nt, Human
ccaaaggccgcacaccccugaga

SEQ ID NO: 212870 - RNA, 19 nt, Human
cccacaccuaaguaaguua

SEQ ID NO: 212871 - RNA, 20 nt, Human
cccaccucagccccccaagu

SEQ ID NO: 212872 - RNA, 22 nt, Human
cccaccugccugagggugcagc

SEQ ID NO: 212873 - RNA, 21 nt, Human
cccacucacccucagcuguuu

SEQ ID NO: 212874 - RNA, 20 nt, Human
cccaggcucaagagauccuc

SEQ ID NO: 212875 - RNA, 22 nt, Human
cccaggcuggagugcaguggug

SEQ ID NO: 212876 - RNA, 24 nt, Human
cccagguucagcugacaacaaaca

SEQ ID NO: 212877 - RNA, 18 nt, Human
ccccaccaaccugcccag

SEQ ID NO: 212878 - RNA, 19 nt, Human
ccccaggcuggagugcagu

SEQ ID NO: 212879 - RNA, 23 nt, Human
ccccgcgccgcgcucggcuccuc

SEQ ID NO: 212880 - RNA, 18 nt, Human
ccccucuccucuccuucc

SEQ ID NO: 212881 - RNA, 20 nt, Human
ccccucuccucuccuuccuc

SEQ ID NO: 212882 - RNA, 19 nt, Human
cccgcgcaccggccgaccg

SEQ ID NO: 212883 - RNA, 25 nt, Human
cccugugccccucuccucuccuucc

SEQ ID NO: 212884 - RNA, 24 nt, Human
ccgaggcccccaccaaccugccca

SEQ ID NO: 212885 - RNA, 23 nt, Human
ccucccaccucagccccccaagu

SEQ ID NO: 212886 - RNA, 22 nt, Human
ccuccugccucgaccucccgaa

SEQ ID NO: 212887 - RNA, 25 nt, Human
ccuccugccucgaccucccgaagug

SEQ ID NO: 212888 - RNA, 23 nt, Human
ccugagguccugcaacccaaagc

SEQ ID NO: 212889 - RNA, 23 nt, Human
ccugcaacccaaagccaaugcag

SEQ ID NO: 212890 - RNA, 24 nt, Human
cggcucacugcagccuugaccucc

SEQ ID NO: 212891 - RNA, 21 nt, Human
cggcuccucucccucuggccc

SEQ ID NO: 212892 - RNA, 19 nt, Human
cucaagagauccucccacc

SEQ ID NO: 212893 - RNA, 24 nt, Human
cucaagagauccucccaccucagc

SEQ ID NO: 212894 - RNA, 24 nt, Human
cucaagugauccuccugccucgac

SEQ ID NO: 212895 - RNA, 24 nt, Human
cucccaccucagccccccaaguau

SEQ ID NO: 212896 - RNA, 25 nt, Human
cucccaggcucaagagauccuccca

SEQ ID NO: 212897 - RNA, 23 nt, Human
cucccgaagugcgugggccucca

SEQ ID NO: 212898 - RNA, 18 nt, Human
cuccucucccucuggccc

SEQ ID NO: 212899 - RNA, 23 nt, Human
cucggccccgcgccgcgcucggc

SEQ ID NO: 212900 - RNA, 22 nt, Human
cucggcucacugcagccuugac

SEQ ID NO: 212901 - RNA, 21 nt, Human
cucuccuuccucugcuucuca

SEQ ID NO: 212902 - RNA, 21 nt, Human
cucugucaccccaggcuggag

SEQ ID NO: 212903 - RNA, 22 nt, Human
cugacaacaaacaaagcugcag

SEQ ID NO: 212904 - RNA, 22 nt, Human
cugcagccuugaccucccaggc

SEQ ID NO: 212905 - RNA, 23 nt, Human
cugcagccuugaccucccaggcu

SEQ ID NO: 212906 - RNA, 19 nt, Human
cugcugcuagcucuccuuu

SEQ ID NO: 212907 - RNA, 23 nt, Human
cuggagcaggcugauuuuccccu

SEQ ID NO: 212908 - RNA, 24 nt, Human
cuggagcaggcugauuuuccccug

SEQ ID NO: 212909 - RNA, 20 nt, Human
cuggcccggcucagugucag

SEQ ID NO: 212910 - RNA, 23 nt, Human
cuguauuauucacccacucaccc

SEQ ID NO: 212911 - RNA, 22 nt, Human
cuuccuccucggcuaccacucc

SEQ ID NO: 212912 - RNA, 23 nt, Human
cuugcucugucaccccaggcugg

SEQ ID NO: 212913 - RNA, 24 nt, Human
cuugcucugucaccccaggcugga

SEQ ID NO: 212914 - RNA, 25 nt, Human
cuugcucugucaccccaggcuggag

SEQ ID NO: 212915 - RNA, 26 nt, Human
cuuuugcugagcccguuuguguuuug

SEQ ID NO: 212916 - RNA, 24 nt, Human
cuuuuuguagagaugggguuuuau

SEQ ID NO: 212917 - RNA, 24 nt, Human
gaacucgcgcuggagcgucucugg

SEQ ID NO: 212918 - RNA, 23 nt, Human
gaagcccucccugcugcuagcuc

SEQ ID NO: 212919 - RNA, 20 nt, Human
gagaugggguuuuaucacau

SEQ ID NO: 212920 - RNA, 19 nt, Human
gccaaaggccgcacacccc

SEQ ID NO: 212921 - RNA, 20 nt, Human
gcggggcggugggcgggcag

SEQ ID NO: 212922 - RNA, 21 nt, Human
gcucugucaccccaggcugga

SEQ ID NO: 212923 - RNA, 22 nt, Human
gcugcuagcucuccuuuguggg

SEQ ID NO: 212924 - RNA, 18 nt, Human
gcuggagcgucucugggc

SEQ ID NO: 212925 - RNA, 20 nt, Human
gcuucuucccccaggccuug

SEQ ID NO: 212926 - RNA, 24 nt, Human
ggaaaauauuuuuucucuuccucc

SEQ ID NO: 212927 - RNA, 22 nt, Human
ggacucaagugauccuccugcc

SEQ ID NO: 212928 - RNA, 25 nt, Human
ggagguggagaagagagaacauugg

SEQ ID NO: 212929 - RNA, 24 nt, Human
ggcagugagaagcaucuuuugcug

SEQ ID NO: 212930 - RNA, 24 nt, Human
ggcguuuaaguaaaagccgucccc

SEQ ID NO: 212931 - RNA, 21 nt, Human
gggcagcccccauccgcagga

SEQ ID NO: 212932 - RNA, 18 nt, Human
gggcaggcgggcucaggc

SEQ ID NO: 212933 - RNA, 18 nt, Human
gggcggcagggguggcag

SEQ ID NO: 212934 - RNA, 23 nt, Human
gggguuuuaucacauugcccagg

SEQ ID NO: 212935 - RNA, 19 nt, Human
gguagagacccugugcccc

SEQ ID NO: 212936 - RNA, 18 nt, Human
guagagacccugugcccc

SEQ ID NO: 212937 - RNA, 20 nt, Human
gugggcgggcaggcgggcuc

SEQ ID NO: 212938 - RNA, 20 nt, Human
guguugaggggugggcugcc

SEQ ID NO: 212939 - RNA, 19 nt, Human
uagagacccugugccccuc

SEQ ID NO: 212940 - RNA, 24 nt, Human
uaucacauugcccaggcugaucuc

SEQ ID NO: 212941 - RNA, 22 nt, Human
ucacccacucacccucagcugu

SEQ ID NO: 212942 - RNA, 20 nt, Human
ucaccugagguccugcaacc

SEQ ID NO: 212943 - RNA, 19 nt, Human
ucacugcagccuugaccuc

SEQ ID NO: 212944 - RNA, 23 nt, Human
ucacugcagccuugaccucccag

SEQ ID NO: 212945 - RNA, 24 nt, Human
ucacugcagccuugaccucccagg

SEQ ID NO: 212946 - RNA, 21 nt, Human
ucagugucagugcgacuuccc

SEQ ID NO: 212947 - RNA, 24 nt, Human
uccacaccgaggcccccaccaacc

SEQ ID NO: 212948 - RNA, 21 nt, Human
uccauggucccgcagaggcgg

SEQ ID NO: 212949 - RNA, 18 nt, Human
ucccaggcucaagagauc

SEQ ID NO: 212950 - RNA, 20 nt, Human
uccccaggccuagaaaaaca

SEQ ID NO: 212951 - RNA, 25 nt, Human
ucccccaggccuuggcguuuaagua

SEQ ID NO: 212952 - RNA, 19 nt, Human
ucccgaagugcgugggccu

SEQ ID NO: 212953 - RNA, 23 nt, Human
ucccucggccccgcgccgcgcuc

SEQ ID NO: 212954 - RNA, 19 nt, Human
uccgugugaguguccaaag

SEQ ID NO: 212955 - RNA, 18 nt, Human
uccucccaccucagcccc

SEQ ID NO: 212956 - RNA, 20 nt, Human
uccucccaccucagcccccc

SEQ ID NO: 212957 - RNA, 23 nt, Human
uccucggcuaccacuccaugguc

SEQ ID NO: 212958 - RNA, 19 nt, Human
uccuuaauauuaucuuccc

SEQ ID NO: 212959 - RNA, 23 nt, Human
ucggcuccucucccucuggcccg

SEQ ID NO: 212960 - RNA, 21 nt, Human
ucucuuccuccuuuuucacuu

SEQ ID NO: 212961 - RNA, 22 nt, Human
ucuggacucaagugauccuccu

SEQ ID NO: 212962 - RNA, 23 nt, Human
ucuggacucaagugauccuccug

SEQ ID NO: 212963 - RNA, 21 nt, Human
ucugucaccccaggcuggagu

SEQ ID NO: 212964 - RNA, 25 nt, Human
ucugucaccccaggcuggagugcag

SEQ ID NO: 212965 - RNA, 19 nt, Human
ugaaaacgaccaggcccug

SEQ ID NO: 212966 - RNA, 18 nt, Human
ugaacagcuggagcaggc

SEQ ID NO: 212967 - RNA, 25 nt, Human
ugaccucccaggcucaagagauccu

SEQ ID NO: 212968 - RNA, 18 nt, Human
ugagcggggagaacaggg

SEQ ID NO: 212969 - RNA, 24 nt, Human
ugaggaacuaauuauaauucuguu

SEQ ID NO: 212970 - RNA, 24 nt, Human
ugaggaacucgcgcuggagcgucu

SEQ ID NO: 212971 - RNA, 24 nt, Human
ugaggggugggcugccagccgcuu

SEQ ID NO: 212972 - RNA, 22 nt, Human
ugagguccugcaacccaaagcc

SEQ ID NO: 212973 - RNA, 23 nt, Human
ugagguccugcaacccaaagcca

SEQ ID NO: 212974 - RNA, 22 nt, Human
ugcagagguguugagggguggg

SEQ ID NO: 212975 - RNA, 22 nt, Human
ugcaguggugcaaucucggcuc

SEQ ID NO: 212976 - RNA, 25 nt, Human
ugccucgaccucccgaagugcgugg

SEQ ID NO: 212977 - RNA, 21 nt, Human
ugcgugggccuccaugccugg

SEQ ID NO: 212978 - RNA, 20 nt, Human
ugcuggugccacccagccag

SEQ ID NO: 212979 - RNA, 24 nt, Human
uggacucaagugauccuccugccu

SEQ ID NO: 212980 - RNA, 23 nt, Human
uggagugcaguggugcaaucucg

SEQ ID NO: 212981 - RNA, 24 nt, Human
uggagugcaguggugcaaucucgg

SEQ ID NO: 212982 - RNA, 20 nt, Human
uggcaggggcggggcggggc

SEQ ID NO: 212983 - RNA, 24 nt, Human
ugggacuucaggcacacucuacca

SEQ ID NO: 212984 - RNA, 20 nt, Human
ugggccuccaugccuggcag

SEQ ID NO: 212985 - RNA, 24 nt, Human
ugggguuuuaucacauugcccagg

SEQ ID NO: 212986 - RNA, 24 nt, Human
uggugcaaucucggcucacugcag

SEQ ID NO: 212987 - RNA, 19 nt, Human
ugguucucuucacaguggc

SEQ ID NO: 212988 - RNA, 20 nt, Human
uguagggaagaaagggagga

SEQ ID NO: 212989 - RNA, 25 nt, Human
uguauuauucacccacucacccuca

SEQ ID NO: 212990 - RNA, 23 nt, Human
uuaaacgcauucuugccaggcuc

SEQ ID NO: 212991 - RNA, 21 nt, Human
uucuugccaggcucauuuuuc

SEQ ID NO: 212992 - RNA, 21 nt, Human
uugaucucagaaauggcagaa

SEQ ID NO: 212993 - RNA, 24 nt, Human
uuguagagaugggguuuuaucaca

SEQ ID NO: 212994 - RNA, 24 nt, Human
uuguagagaugggguuuuaucacg

SEQ ID NO: 212995 - RNA, 19 nt, Human
uuuaugcuuuuuguagaga

SEQ ID NO: 212996 - RNA, 21 nt, Human
uuucagaggcugugauccccc

SEQ ID NO: 212997 - RNA, 21 nt, Human
uuuguagagaugggguuuuau

SEQ ID NO: 212998 - RNA, 26 nt, Human
uuuguagagaugggguuuuaucacau

SEQ ID NO: 212999 - RNA, 23 nt, Human
uuuuaucacauugcccaggcuga

SEQ ID NO: 213000 - RNA, 20 nt, Human
cacucaggccgcgccgccuc

SEQ ID NO: 213001 - RNA, 20 nt, Human
cauuuuagcuuuacuuuaua

SEQ ID NO: 213002 - RNA, 19 nt, Human
cgcgacuccgcgggccuuu

SEQ ID NO: 213003 - RNA, 21 nt, Human
cggcccagcgcgacuccgcgg

SEQ ID NO: 213004 - RNA, 20 nt, Human
cuggcaggcgcggcccccgg

SEQ ID NO: 213005 - RNA, 18 nt, Human
gccaggcugggccagacc

SEQ ID NO: 213006 - RNA, 19 nt, Human
gcgccaggcugggccagac

SEQ ID NO: 213007 - RNA, 20 nt, Human
uccauuggguuucacucagg

SEQ ID NO: 213008 - RNA, 19 nt, Human
ucuccacagcgcacgaacc

SEQ ID NO: 213009 - RNA, 19 nt, Human
ucuccacagcgcacgaacc

SEQ ID NO: 213010 - RNA, 19 nt, Human
ugaagcuaagucuucuacu

SEQ ID NO: 213011 - RNA, 23 nt, Human
uucuaaaugucaugcuuuuucca

SEQ ID NO: 213012 - RNA, 26 nt, Human
aaucucuuuuagguaucuuggaccuu

SEQ ID NO: 213013 - RNA, 18 nt, Human
acucuaaaacaucuccag

SEQ ID NO: 213014 - RNA, 20 nt, Human
aguaacuucuaggaagcauu

SEQ ID NO: 213015 - RNA, 21 nt, Human
agucacucccaggacccuggu

SEQ ID NO: 213016 - RNA, 25 nt, Human
cagcauggaaucuucauuauccccu

SEQ ID NO: 213017 - RNA, 20 nt, Human
cagcugguuccucuuacccu

SEQ ID NO: 213018 - RNA, 24 nt, Human
cauuguuuguauucaucuucuagu

SEQ ID NO: 213019 - RNA, 20 nt, Human
cccauagucacucccaggac

SEQ ID NO: 213020 - RNA, 23 nt, Human
cccgcgcaccuggaugaggacca

SEQ ID NO: 213021 - RNA, 21 nt, Human
cuaaaacaucuccagcacaga

SEQ ID NO: 213022 - RNA, 19 nt, Human
cucaccgcccauagucacu

SEQ ID NO: 213023 - RNA, 23 nt, Human
cucaccgcccauagucacuccca

SEQ ID NO: 213024 - RNA, 22 nt, Human
cuccagcacagaagaagacaau

SEQ ID NO: 213025 - RNA, 19 nt, Human
cucucuccugggcaccugc

SEQ ID NO: 213026 - RNA, 24 nt, Human
cuucccgcgcaccuggaugaggac

SEQ ID NO: 213027 - RNA, 18 nt, Human
gagcaggagcaagcucuc

SEQ ID NO: 213028 - RNA, 24 nt, Human
gcuauaccauuuauugaaggcacu

SEQ ID NO: 213029 - RNA, 24 nt, Human
ggcguggcucugcgcuuugccuuu

SEQ ID NO: 213030 - RNA, 19 nt, Human
gggcguagucaugaugacc

SEQ ID NO: 213031 - RNA, 19 nt, Human
gggggcggcacacacuacg

SEQ ID NO: 213032 - RNA, 18 nt, Human
gggugaucucugcagcug

SEQ ID NO: 213033 - RNA, 22 nt, Human
gucugcagguucaaucuuuggg

SEQ ID NO: 213034 - RNA, 25 nt, Human
guuucauccaucccaaggggggcgg

SEQ ID NO: 213035 - RNA, 19 nt, Human
uaaaucucuugaaaucucu

SEQ ID NO: 213036 - RNA, 25 nt, Human
uaaauguucacauauauaagaaaua

SEQ ID NO: 213037 - RNA, 18 nt, Human
uaauacaguauaauagau

SEQ ID NO: 213038 - RNA, 23 nt, Human
uacaguauaauagauucauagug

SEQ ID NO: 213039 - RNA, 25 nt, Human
uacaguauaauagauucauagugag

SEQ ID NO: 213040 - RNA, 18 nt, Human
ucacauauauaagaaaua

SEQ ID NO: 213041 - RNA, 19 nt, Human
ucacucccaggacccuggu

SEQ ID NO: 213042 - RNA, 23 nt, Human
ucuaggaagcauuccacucugaa

SEQ ID NO: 213043 - RNA, 18 nt, Human
ucucugcagcugguuccu

SEQ ID NO: 213044 - RNA, 23 nt, Human
ucuuacccacgccgcgacugcag

SEQ ID NO: 213045 - RNA, 19 nt, Human
ugcauuucucaaaugcccu

SEQ ID NO: 213046 - RNA, 23 nt, Human
uguguugggcagggugaucucug

SEQ ID NO: 213047 - RNA, 21 nt, Human
uuucauccaucccaagggggg

SEQ ID NO: 213048 - RNA, 20 nt, Human
aggaugcucuugacucaugu

SEQ ID NO: 213049 - RNA, 18 nt, Human
agucuggguuucuuacac

SEQ ID NO: 213050 - RNA, 19 nt, Human
cacaugguagaagcaggau

SEQ ID NO: 213051 - RNA, 18 nt, Human
cagaaucuugcagacugu

SEQ ID NO: 213052 - RNA, 18 nt, Human
cagaaucuugcagacugu

SEQ ID NO: 213053 - RNA, 23 nt, Human
caggaagaguggucaaagcaaug

SEQ ID NO: 213054 - RNA, 24 nt, Human
gcuaauuuugucuucucugugcug

SEQ ID NO: 213055 - RNA, 24 nt, Human
uagaagcaggaugcucuugacuca

SEQ ID NO: 213056 - RNA, 21 nt, Human
uccacaugguagaagcaggau

SEQ ID NO: 213057 - RNA, 18 nt, Human
ugaacucaggaagagugg

SEQ ID NO: 213058 - RNA, 22 nt, Human
ugcugugagggagacuaggaac

SEQ ID NO: 213059 - RNA, 20 nt, Human
ugguagaagcaggaugcucu

SEQ ID NO: 213060 - RNA, 20 nt, Human
uggucaaagcaauguuucag

SEQ ID NO: 213061 - RNA, 23 nt, Human
uugggucaccuuaaaccuuguga

SEQ ID NO: 213062 - RNA, 25 nt, Human
aaaacuucuccacaacccucugcac

SEQ ID NO: 213063 - RNA, 21 nt, Human
aaagugcuuccacauguccuu

SEQ ID NO: 213064 - RNA, 25 nt, Human
aaggagaaaccaaggcacaguggaa

SEQ ID NO: 213065 - RNA, 19 nt, Human
aauaaacaaguuucaacca

SEQ ID NO: 213066 - RNA, 21 nt, Human
aauuauuuguuguuuuuugua

SEQ ID NO: 213067 - RNA, 20 nt, Human
aauuuaucuaauaaaacauc

SEQ ID NO: 213068 - RNA, 22 nt, Human
acacagcacuaccaacacagcu

SEQ ID NO: 213069 - RNA, 24 nt, Human
acagaaaaaaauccaggauuucca

SEQ ID NO: 213070 - RNA, 24 nt, Human
acagagcucucuuccaucagaaag

SEQ ID NO: 213071 - RNA, 24 nt, Human
agaaaaaaauccaggauuuccagc

SEQ ID NO: 213072 - RNA, 18 nt, Human
agaaaccaaggcacagug

SEQ ID NO: 213073 - RNA, 23 nt, Human
agaaauaaaggagaaaccaaggc

SEQ ID NO: 213074 - RNA, 26 nt, Human
auaaacaauaauguacuuauacuaaa

SEQ ID NO: 213075 - RNA, 24 nt, Human
auugacuguggaguuuuggcuguu

SEQ ID NO: 213076 - RNA, 21 nt, Human
caacacagcacuaccaacaca

SEQ ID NO: 213077 - RNA, 22 nt, Human
caaggcacaguggaacaaggac

SEQ ID NO: 213078 - RNA, 19 nt, Human
cacaaauauuugaugcuua

SEQ ID NO: 213079 - RNA, 22 nt, Human
cacaacaucacugugagguaag

SEQ ID NO: 213080 - RNA, 26 nt, Human
cacaauacaugaaguguugaaguaga

SEQ ID NO: 213081 - RNA, 21 nt, Human
cacagugagaugguuccuucc

SEQ ID NO: 213082 - RNA, 23 nt, Human
cacauucuagcaaacccauucaa

SEQ ID NO: 213083 - RNA, 23 nt, Human
cagagcucucuuccaucagaaag

SEQ ID NO: 213084 - RNA, 18 nt, Human
cagauaaacaauaaugua

SEQ ID NO: 213085 - RNA, 19 nt, Human
cccacacaauacaugaagu

SEQ ID NO: 213086 - RNA, 18 nt, Human
ccuggcuagcagacuagg

SEQ ID NO: 213087 - RNA, 18 nt, Human
cuauuuguauauucuccc

SEQ ID NO: 213088 - RNA, 19 nt, Human
cuggcaacccuacaacaga

SEQ ID NO: 213089 - RNA, 24 nt, Human
cuucaaaaacuucuccacaacccu

SEQ ID NO: 213090 - RNA, 26 nt, Human
cuucaaaaacuucuccacaacccucu

SEQ ID NO: 213091 - RNA, 20 nt, Human
cuuccuggcucuuguccuag

SEQ ID NO: 213092 - RNA, 24 nt, Human
cuuggcccuuggccucaauuuugc

SEQ ID NO: 213093 - RNA, 18 nt, Human
gaauucucagcccucuuc

SEQ ID NO: 213094 - RNA, 25 nt, Human
ggagaaaccaaggcacaguggaaca

SEQ ID NO: 213095 - RNA, 24 nt, Human
guugccagauuuaacagaaaaaaa

SEQ ID NO: 213096 - RNA, 24 nt, Human
guuuuggcuguuuuaauaguucua

SEQ ID NO: 213097 - RNA, 21 nt, Human
uaaaaaaaauuuggagagcac

SEQ ID NO: 213098 - RNA, 24 nt, Human
uaacagaaaaaaauccaggauuuc

SEQ ID NO: 213099 - RNA, 26 nt, Human
uacaacagacccacacaauacaugaa

SEQ ID NO: 213100 - RNA, 20 nt, Human
uauuauaagaaucuauuugu

SEQ ID NO: 213101 - RNA, 20 nt, Human
ucacauucuagcaaacccau

SEQ ID NO: 213102 - RNA, 23 nt, Human
ucagcccucuucaaaaacuucuc

SEQ ID NO: 213103 - RNA, 19 nt, Human
uccacaacccucugcaccc

SEQ ID NO: 213104 - RNA, 20 nt, Human
uccacaacccucugcacccu

SEQ ID NO: 213105 - RNA, 24 nt, Human
ugaaaaaacuuaaagugcuuccac

SEQ ID NO: 213106 - RNA, 23 nt, Human
ugaaaugaaaauuuaacugggua

SEQ ID NO: 213107 - RNA, 19 nt, Human
ugacaagacugggaguauc

SEQ ID NO: 213108 - RNA, 26 nt, Human
ugcuugaaguuucacuggucgaaaag

SEQ ID NO: 213109 - RNA, 23 nt, Human
uggcaacccuacaacagacccac

SEQ ID NO: 213110 - RNA, 22 nt, Human
uguauugcaucuggcaacccua

SEQ ID NO: 213111 - RNA, 19 nt, Human
ugugagguaagaugguggc

SEQ ID NO: 213112 - RNA, 19 nt, Human
uguggaguuuuggcuguuu

SEQ ID NO: 213113 - RNA, 25 nt, Human
uucaaaaacuucuccacaacccucu

SEQ ID NO: 213114 - RNA, 27 nt, Human
uucaaaaacuucuccacaacccucugc

SEQ ID NO: 213115 - RNA, 19 nt, Human
uuccacauguccucacaac

SEQ ID NO: 213116 - RNA, 21 nt, Human
uuccacuuagaaauaaaggag

SEQ ID NO: 213117 - RNA, 23 nt, Human
uuccuggcucuuguccuagaagc

SEQ ID NO: 213118 - RNA, 20 nt, Human
uuuuccaaauucuugcacaa

SEQ ID NO: 213119 - RNA, 21 nt, Human
uuuuuuguagauucaaauaaa

SEQ ID NO: 213120 - RNA, 21 nt, Human
aacacucagaguugaggagau

SEQ ID NO: 213121 - RNA, 26 nt, Human
aacccucuuucucuuuguucauccac

SEQ ID NO: 213122 - RNA, 21 nt, Human
aagcauuuggggagggacugg

SEQ ID NO: 213123 - RNA, 21 nt, Human
acaccugagaugggaaaacca

SEQ ID NO: 213124 - RNA, 19 nt, Human
acagugaacaaaccgacag

SEQ ID NO: 213125 - RNA, 22 nt, Human
acugcaacucauggaaagcauu

SEQ ID NO: 213126 - RNA, 26 nt, Human
acuuguggacaaagggaucuuccuuu

SEQ ID NO: 213127 - RNA, 22 nt, Human
agcaggaguuaaagccccaggg

SEQ ID NO: 213128 - RNA, 23 nt, Human
agcaugcauucauuccugugauc

SEQ ID NO: 213129 - RNA, 21 nt, Human
agggaaaacagacuaggaaaa

SEQ ID NO: 213130 - RNA, 20 nt, Human
agguggccagcacauguguc

SEQ ID NO: 213131 - RNA, 22 nt, Human
agucagagaucagagugacuua

SEQ ID NO: 213132 - RNA, 23 nt, Human
auagcguccccccaaaacccaga

SEQ ID NO: 213133 - RNA, 22 nt, Human
caacaguaggagcugcagucag

SEQ ID NO: 213134 - RNA, 25 nt, Human
cacacagagccaccagcuugguggc

SEQ ID NO: 213135 - RNA, 23 nt, Human
cacaccugagaugggaaaaccac

SEQ ID NO: 213136 - RNA, 22 nt, Human
cacagcuucagcccuguucucu

SEQ ID NO: 213137 - RNA, 25 nt, Human
caccaaggacauacagugaacaaag

SEQ ID NO: 213138 - RNA, 23 nt, Human
cagcaaugguuugaucuaacuga

SEQ ID NO: 213139 - RNA, 20 nt, Human
cagcagacacugcaacacac

SEQ ID NO: 213140 - RNA, 19 nt, Human
caggaguuaaagccccagg

SEQ ID NO: 213141 - RNA, 19 nt, Human
cauggaggugcaaaggccg

SEQ ID NO: 213142 - RNA, 25 nt, Human
ccaagauacuuccacagggacaagc

SEQ ID NO: 213143 - RNA, 19 nt, Human
ccagcacaugugucugcga

SEQ ID NO: 213144 - RNA, 21 nt, Human
ccccaaaacccagauagugcc

SEQ ID NO: 213145 - RNA, 19 nt, Human
ccccagggaacacugcccu

SEQ ID NO: 213146 - RNA, 21 nt, Human
ccccagggaacacugcccuuc

SEQ ID NO: 213147 - RNA, 18 nt, Human
ccccccaaaacccagaua

SEQ ID NO: 213148 - RNA, 22 nt, Human
ccccugaagacaccaguuccua

SEQ ID NO: 213149 - RNA, 19 nt, Human
ccuaggcaaggccuaaccc

SEQ ID NO: 213150 - RNA, 22 nt, Human
ccuuggagguaccucaacagcu

SEQ ID NO: 213151 - RNA, 26 nt, Human
cuaacccagaagaugaugcucaccuc

SEQ ID NO: 213152 - RNA, 21 nt, Human
cuauagcguccccccaaaacc

SEQ ID NO: 213153 - RNA, 18 nt, Human
cucaacgcuuaacacuca

SEQ ID NO: 213154 - RNA, 22 nt, Human
cucaacgcuuaacacucagagu

SEQ ID NO: 213155 - RNA, 21 nt, Human
cucggaucagagcacacagag

SEQ ID NO: 213156 - RNA, 22 nt, Human
cugcagucagagaucagaguga

SEQ ID NO: 213157 - RNA, 23 nt, Human
cuuccacacacaaccucagggug

SEQ ID NO: 213158 - RNA, 23 nt, Human
cuuggagguaccucaacagcucc

SEQ ID NO: 213159 - RNA, 22 nt, Human
cuuuguucauccaccaccccca

SEQ ID NO: 213160 - RNA, 18 nt, Human
gagccagaucaccuucca

SEQ ID NO: 213161 - RNA, 21 nt, Human
gagggaaaacagacuaggaaa

SEQ ID NO: 213162 - RNA, 24 nt, Human
gaguuucugugccucaagagacug

SEQ ID NO: 213163 - RNA, 26 nt, Human
gcugcacgccagccuggaagcugcag

SEQ ID NO: 213164 - RNA, 22 nt, Human
ggaaaaaacugcaacucaugga

SEQ ID NO: 213165 - RNA, 25 nt, Human
ggagguaccucaacagcuccucaga

SEQ ID NO: 213166 - RNA, 18 nt, Human
ggccccugaagacaccag

SEQ ID NO: 213167 - RNA, 20 nt, Human
ggcuaagggcugcuugucuc

SEQ ID NO: 213168 - RNA, 18 nt, Human
ggcucagcagguggccag

SEQ ID NO: 213169 - RNA, 19 nt, Human
gggcuaagggcugcuuguc

SEQ ID NO: 213170 - RNA, 21 nt, Human
gucauggggguaaaggggguu

SEQ ID NO: 213171 - RNA, 21 nt, Human
guccccccaaaacccagauag

SEQ ID NO: 213172 - RNA, 23 nt, Human
gugaucauuauuuauugagcauu

SEQ ID NO: 213173 - RNA, 24 nt, Human
uaaagccccagggaacacugcccu

SEQ ID NO: 213174 - RNA, 19 nt, Human
uaggaaaaaacugcaacuc

SEQ ID NO: 213175 - RNA, 21 nt, Human
uagugccuguccagagccaga

SEQ ID NO: 213176 - RNA, 21 nt, Human
uaugggcaugaacaggaguuu

SEQ ID NO: 213177 - RNA, 19 nt, Human
ucaacccagagaggugccu

SEQ ID NO: 213178 - RNA, 26 nt, Human
uccaaacccucuuucucuuuguucau

SEQ ID NO: 213179 - RNA, 27 nt, Human
uccaaacccucuuucucuuuguucauc

SEQ ID NO: 213180 - RNA, 20 nt, Human
uccacacacaaccucagggu

SEQ ID NO: 213181 - RNA, 24 nt, Human
uccccacauccuauagcguccccc

SEQ ID NO: 213182 - RNA, 21 nt, Human
ucccuggaggaggauuuccuu

SEQ ID NO: 213183 - RNA, 20 nt, Human
uccuuggagguaccucaaca

SEQ ID NO: 213184 - RNA, 22 nt, Human
uccuuggagguaccucaacagc

SEQ ID NO: 213185 - RNA, 25 nt, Human
ucuucaguuucagcaaugguuugau

SEQ ID NO: 213186 - RNA, 18 nt, Human
ucuuccuuggccaggggu

SEQ ID NO: 213187 - RNA, 22 nt, Human
ugaacaaaccgacagggcccug

SEQ ID NO: 213188 - RNA, 20 nt, Human
ugaagacaccaguuccuaac

SEQ ID NO: 213189 - RNA, 21 nt, Human
ugagacucccuggaggaggau

SEQ ID NO: 213190 - RNA, 21 nt, Human
ugaggcaggcuaugccuaggc

SEQ ID NO: 213191 - RNA, 19 nt, Human
ugcaacacaccugagaugg

SEQ ID NO: 213192 - RNA, 19 nt, Human
ugccuaggcaaggccuaac

SEQ ID NO: 213193 - RNA, 25 nt, Human
ugcuccugugagggucaacgagagc

SEQ ID NO: 213194 - RNA, 19 nt, Human
uggcagguugauguuuugg

SEQ ID NO: 213195 - RNA, 22 nt, Human
uggcagguugauguuuuggcag

SEQ ID NO: 213196 - RNA, 18 nt, Human
uggcucaacgcuuaacac

SEQ ID NO: 213197 - RNA, 20 nt, Human
ugggaaaaccaccccccuga

SEQ ID NO: 213198 - RNA, 18 nt, Human
ugucacaaccaagauacu

SEQ ID NO: 213199 - RNA, 18 nt, Human
ugucuccagcagacacug

SEQ ID NO: 213200 - RNA, 23 nt, Human
ugucucguuccacuuggggcuca

SEQ ID NO: 213201 - RNA, 24 nt, Human
ugugaucauuauuuauugagcauu

SEQ ID NO: 213202 - RNA, 23 nt, Human
uguggcauagaucuggcuuccaa

SEQ ID NO: 213203 - RNA, 22 nt, Human
uuaaagccccagggaacacugc

SEQ ID NO: 213204 - RNA, 19 nt, Human
uucauccaccacccccaag

SEQ ID NO: 213205 - RNA, 19 nt, Human
uuuggcagugccugccuca

SEQ ID NO: 213206 - RNA, 20 nt, Human
aaacaaauaaucacaacuga

SEQ ID NO: 213207 - RNA, 22 nt, Human
aaucacaacugauacugauuua

SEQ ID NO: 213208 - RNA, 30 nt, Human
cuuuuuaaauuuaauaaauaggauaaauaa

SEQ ID NO: 213209 - RNA, 22 nt, Human
gauuuuuaaauuguagcaacuu

SEQ ID NO: 213210 - RNA, 22 nt, Human
uuaaacaaauaaucacaacuga

SEQ ID NO: 213211 - RNA, 24 nt, Human
uuauuucaaaauaaagacauacaa

SEQ ID NO: 213212 - RNA, 21 nt, Human
acaagggcuccagaaacuuca

SEQ ID NO: 213213 - RNA, 21 nt, Human
acaagucugaggcauccccaa

SEQ ID NO: 213214 - RNA, 22 nt, Human
acacaggccgcccacaucugaa

SEQ ID NO: 213215 - RNA, 20 nt, Human
acgacagguucacacaggcc

SEQ ID NO: 213216 - RNA, 21 nt, Human
agagggguugaggggggagcc

SEQ ID NO: 213217 - RNA, 23 nt, Human
agagggguugaggggggagccuc

SEQ ID NO: 213218 - RNA, 20 nt, Human
agcuuugcacgacagguuca

SEQ ID NO: 213219 - RNA, 21 nt, Human
cagcaaagacccucagccuga

SEQ ID NO: 213220 - RNA, 21 nt, Human
cagccugauucaggagauaac

SEQ ID NO: 213221 - RNA, 18 nt, Human
caggagauaacugcagca

SEQ ID NO: 213222 - RNA, 19 nt, Human
caggagauaacugcagcag

SEQ ID NO: 213223 - RNA, 22 nt, Human
cauccagacaggaccucugacc

SEQ ID NO: 213224 - RNA, 25 nt, Human
ccauccagacaggaccucugaccgc

SEQ ID NO: 213225 - RNA, 25 nt, Human
cccacaucugaaaccacaagcgcau

SEQ ID NO: 213226 - RNA, 19 nt, Human
cucagccugauucaggaga

SEQ ID NO: 213227 - RNA, 20 nt, Human
cuccagaaacuucaguccau

SEQ ID NO: 213228 - RNA, 25 nt, Human
cuccagccuccauccagacaggacc

SEQ ID NO: 213229 - RNA, 21 nt, Human
cugcuaggggccccuucucag

SEQ ID NO: 213230 - RNA, 24 nt, Human
gagcagagggguugaggggggagc

SEQ ID NO: 213231 - RNA, 21 nt, Human
gagccuccagccuccauccag

SEQ ID NO: 213232 - RNA, 21 nt, Human
gccgcccacaucugaaaccac

SEQ ID NO: 213233 - RNA, 21 nt, Human
gggagccuccagccuccaucc

SEQ ID NO: 213234 - RNA, 19 nt, Human
gggguugaggggggagccu

SEQ ID NO: 213235 - RNA, 21 nt, Human
gguugaggggggagccuccag

SEQ ID NO: 213236 - RNA, 21 nt, Human
gugcacagcaaagacccucag

SEQ ID NO: 213237 - RNA, 24 nt, Human
uaggggccccuucucaggagguuc

SEQ ID NO: 213238 - RNA, 18 nt, Human
ucagacaagggcuccaga

SEQ ID NO: 213239 - RNA, 20 nt, Human
ucaguccauuuucccaaaau

SEQ ID NO: 213240 - RNA, 25 nt, Human
ucagucucagacaagggcuccagaa

SEQ ID NO: 213241 - RNA, 23 nt, Human
ucugaaaccacaagcgcauuaca

SEQ ID NO: 213242 - RNA, 21 nt, Human
ucugaggcauccccaaccugg

SEQ ID NO: 213243 - RNA, 20 nt, Human
ugaggcauccccaaccugga

SEQ ID NO: 213244 - RNA, 22 nt, Human
ugauuugucacccaacuaucuc

SEQ ID NO: 213245 - RNA, 21 nt, Human
ugcuccccacaggcacugagc

SEQ ID NO: 213246 - RNA, 20 nt, Human
ugucacccaacuaucucugg

SEQ ID NO: 213247 - RNA, 22 nt, Human
uucacacaggccgcccacaucu

SEQ ID NO: 213248 - RNA, 23 nt, Human
uugcacgacagguucacacaggc

SEQ ID NO: 213249 - RNA, 23 nt, Human
aaacaaacaacaaaaaauagcca

SEQ ID NO: 213250 - RNA, 24 nt, Human
aaacaacaaaaaauagccagaaag

SEQ ID NO: 213251 - RNA, 21 nt, Human
aaagaaacaaacaacaaaaaa

SEQ ID NO: 213252 - RNA, 29 nt, Human
aaagaaacaaacaacaaaaaauagccagg

SEQ ID NO: 213253 - RNA, 26 nt, Human
aacaacaaaaaauagccagaaagaga

SEQ ID NO: 213254 - RNA, 22 nt, Human
aagaaaggacaccucaaaauac

SEQ ID NO: 213255 - RNA, 24 nt, Human
acaaacaacaaaaaauagccagaa

SEQ ID NO: 213256 - RNA, 21 nt, Human
acaaagaaacaaacaacaaaa

SEQ ID NO: 213257 - RNA, 21 nt, Human
acagcaggcgcuggccgugcc

SEQ ID NO: 213258 - RNA, 21 nt, Human
acuugaacaagacagacaaaa

SEQ ID NO: 213259 - RNA, 19 nt, Human
agcggcggcgaggggcggg

SEQ ID NO: 213260 - RNA, 22 nt, Human
aggacaccucaaaauacucuaa

SEQ ID NO: 213261 - RNA, 28 nt, Human
aggcugaaaacaaaaacaaaagggaccc

SEQ ID NO: 213262 - RNA, 21 nt, Human
augaaauccacggaaagggcc

SEQ ID NO: 213263 - RNA, 23 nt, Human
caaaaaauagccagaaagagaac

SEQ ID NO: 213264 - RNA, 24 nt, Human
caacaaaaaauagccagaaagaga

SEQ ID NO: 213265 - RNA, 22 nt, Human
cacaaagaaacaaacaacaaaa

SEQ ID NO: 213266 - RNA, 22 nt, Human
cacagcaggcgcuggccgugcc

SEQ ID NO: 213267 - RNA, 20 nt, Human
caccggagcugagggagggg

SEQ ID NO: 213268 - RNA, 22 nt, Human
caccggagcugagggagggggc

SEQ ID NO: 213269 - RNA, 21 nt, Human
cagcucggugagucccggcag

SEQ ID NO: 213270 - RNA, 22 nt, Human
cagcuggguuuuggguuuucag

SEQ ID NO: 213271 - RNA, 23 nt, Human
cagugcugagaggugaaguccaa

SEQ ID NO: 213272 - RNA, 25 nt, Human
caugcggccacagcguccguccacc

SEQ ID NO: 213273 - RNA, 18 nt, Human
ccacgcgagccacaugcu

SEQ ID NO: 213274 - RNA, 21 nt, Human
ccacgcgagccacaugcugaa

SEQ ID NO: 213275 - RNA, 22 nt, Human
ccauaggcugaaaacaaaaaca

SEQ ID NO: 213276 - RNA, 18 nt, Human
cccccgagugcuggcggg

SEQ ID NO: 213277 - RNA, 21 nt, Human
cccccgcguccugaggccuag

SEQ ID NO: 213278 - RNA, 21 nt, Human
ccugaggccuagucuugggag

SEQ ID NO: 213279 - RNA, 22 nt, Human
cgcuggccgugccguccucaca

SEQ ID NO: 213280 - RNA, 23 nt, Human
cgcuggccgugccguccucacac

SEQ ID NO: 213281 - RNA, 23 nt, Human
cucgcgggaggacagaguuucac

SEQ ID NO: 213282 - RNA, 19 nt, Human
cugaaaacaaaaacaaaac

SEQ ID NO: 213283 - RNA, 25 nt, Human
cuucccggcacuggcucgucccugg

SEQ ID NO: 213284 - RNA, 24 nt, Human
gagcggcggcgaggggcgggagca

SEQ ID NO: 213285 - RNA, 22 nt, Human
gccagggacaaagucaacacaa

SEQ ID NO: 213286 - RNA, 22 nt, Human
gcgccgguggcgcgccgaggcc

SEQ ID NO: 213287 - RNA, 21 nt, Human
gcgggcgccgguggcgcgccg

SEQ ID NO: 213288 - RNA, 22 nt, Human
gcugaaaacaaaaacaaaacua

SEQ ID NO: 213289 - RNA, 22 nt, Human
gcuggguuuuggguuuucagug

SEQ ID NO: 213290 - RNA, 20 nt, Human
ggaggaggcguggggggggg

SEQ ID NO: 213291 - RNA, 22 nt, Human
ggaggaggggaggaggcguggg

SEQ ID NO: 213292 - RNA, 18 nt, Human
ggagguggauaaaauuca

SEQ ID NO: 213293 - RNA, 25 nt, Human
ggccggcgagcgagcgagcggcggg

SEQ ID NO: 213294 - RNA, 19 nt, Human
ggggaggaggcgugggggg

SEQ ID NO: 213295 - RNA, 21 nt, Human
ggggauggcuccccccgcguc

SEQ ID NO: 213296 - RNA, 19 nt, Human
gguuuuguugugugugggu

SEQ ID NO: 213297 - RNA, 24 nt, Human
guaaagaaaggacaccucaaaaua

SEQ ID NO: 213298 - RNA, 20 nt, Human
gucccggcaguuccuucccg

SEQ ID NO: 213299 - RNA, 19 nt, Human
gucucaguagaaauggagu

SEQ ID NO: 213300 - RNA, 19 nt, Human
gugaaaugcccaagacccc

SEQ ID NO: 213301 - RNA, 21 nt, Human
uaacacggaaaugugcagaug

SEQ ID NO: 213302 - RNA, 18 nt, Human
uaaggaguguuaaggcca

SEQ ID NO: 213303 - RNA, 20 nt, Human
uauguuguuucuuugcccca

SEQ ID NO: 213304 - RNA, 18 nt, Human
ucacucguagguagaagc

SEQ ID NO: 213305 - RNA, 20 nt, Human
ucaguagaaauggagugaug

SEQ ID NO: 213306 - RNA, 21 nt, Human
uccaugcggccacagcguccg

SEQ ID NO: 213307 - RNA, 25 nt, Human
uccucgcgggaggacagaguuucac

SEQ ID NO: 213308 - RNA, 18 nt, Human
ugaaaugcccaagacccc

SEQ ID NO: 213309 - RNA, 25 nt, Human
ugaaauggagguggauaaaauucau

SEQ ID NO: 213310 - RNA, 23 nt, Human
ugaacaagacagacaaaaggaaa

SEQ ID NO: 213311 - RNA, 24 nt, Human
ugagggagggggccgagcggaggc

SEQ ID NO: 213312 - RNA, 25 nt, Human
ugccagggacaaagucaacacaaag

SEQ ID NO: 213313 - RNA, 23 nt, Human
ugcggccacagcguccguccacc

SEQ ID NO: 213314 - RNA, 24 nt, Human
uggagugaugugaaaugcccaaga

SEQ ID NO: 213315 - RNA, 20 nt, Human
uuccuucccggcacuggcuc

SEQ ID NO: 213316 - RNA, 23 nt, Human
uugaacaagacagacaaaaggaa

SEQ ID NO: 213317 - RNA, 21 nt, Human
uuguucaagugugacuucugu

SEQ ID NO: 213318 - RNA, 20 nt, Human
aaccagaggccugcugcuuu

SEQ ID NO: 213319 - RNA, 21 nt, Human
aaccccaagcuuuauccucgg

SEQ ID NO: 213320 - RNA, 20 nt, Human
aggcaaccagaggccugcug

SEQ ID NO: 213321 - RNA, 24 nt, Human
aggccugcugcuuuggggaggugc

SEQ ID NO: 213322 - RNA, 22 nt, Human
caaagcucugagcccgccccuc

SEQ ID NO: 213323 - RNA, 23 nt, Human
caccauguggcaagugacaaagc

SEQ ID NO: 213324 - RNA, 22 nt, Human
cagggaaggaggaugaacccca

SEQ ID NO: 213325 - RNA, 18 nt, Human
ccagggaaggaggaugaa

SEQ ID NO: 213326 - RNA, 23 nt, Human
ccccaggcugggguaguaccauu

SEQ ID NO: 213327 - RNA, 19 nt, Human
ccucuggaguucaggcaag

SEQ ID NO: 213328 - RNA, 24 nt, Human
ccucuugcgcacagugguagggau

SEQ ID NO: 213329 - RNA, 23 nt, Human
cugaucccucccauguuggaaga

SEQ ID NO: 213330 - RNA, 19 nt, Human
gacucgggcugcaggaucc

SEQ ID NO: 213331 - RNA, 22 nt, Human
gacuguggagugauccagggaa

SEQ ID NO: 213332 - RNA, 21 nt, Human
gagcccgccccucuugcgcac

SEQ ID NO: 213333 - RNA, 21 nt, Human
ggaggcgggggaggcaaccag

SEQ ID NO: 213334 - RNA, 25 nt, Human
uauccucgggacucgggcugcagga

SEQ ID NO: 213335 - RNA, 18 nt, Human
uccagggaaggaggauga

SEQ ID NO: 213336 - RNA, 26 nt, Human
ugacaggcggggcugaucccuccucu

SEQ ID NO: 213337 - RNA, 18 nt, Human
ugacuggaggcgggggag

SEQ ID NO: 213338 - RNA, 19 nt, Human
ugacuggaggcgggggagg

SEQ ID NO: 213339 - RNA, 20 nt, Human
ugacuggaggcgggggaggc

SEQ ID NO: 213340 - RNA, 21 nt, Human
uggcaagugacaaagcucuga

SEQ ID NO: 213341 - RNA, 18 nt, Human
uguuggaagacaccaugu

SEQ ID NO: 213342 - RNA, 25 nt, Human
uucccccaaccaugucccgacaccu

SEQ ID NO: 213343 - RNA, 20 nt, Human
uuggaagacaccauguggca

SEQ ID NO: 213344 - RNA, 19 nt, Human
accccuccauccccuccuc

SEQ ID NO: 213345 - RNA, 22 nt, Human
aggcccagggcaagcaaugaug

SEQ ID NO: 213346 - RNA, 22 nt, Human
aggcccagggcaagcaaugaug

SEQ ID NO: 213347 - RNA, 23 nt, Human
auuugaccccuccauccccuccu

SEQ ID NO: 213348 - RNA, 21 nt, Human
caagcaaugaugagacuccaa

SEQ ID NO: 213349 - RNA, 18 nt, Human
cagcggcgccccgccucg

SEQ ID NO: 213350 - RNA, 18 nt, Human
ccgugucacgugacccgg

SEQ ID NO: 213351 - RNA, 22 nt, Human
ccuccagcagaauucggccccc

SEQ ID NO: 213352 - RNA, 23 nt, Human
cuccaaaccagcuggacacaguc

SEQ ID NO: 213353 - RNA, 18 nt, Human
gcuggacacaguccaggg

SEQ ID NO: 213354 - RNA, 23 nt, Human
gguccgugaagaggaggguccaa

SEQ ID NO: 213355 - RNA, 23 nt, Human
gugaagaggaggguccaagagcu

SEQ ID NO: 213356 - RNA, 21 nt, Human
ucagcggcgccccgccucgug

SEQ ID NO: 213357 - RNA, 23 nt, Human
uccagcagaauucggcccccucc

SEQ ID NO: 213358 - RNA, 19 nt, Human
uccagggggaggaaggcag

SEQ ID NO: 213359 - RNA, 22 nt, Human
uccgugucacgugacccgggag

SEQ ID NO: 213360 - RNA, 18 nt, Human
uccucagggagguugugg

SEQ ID NO: 213361 - RNA, 23 nt, Human
ucugagauuugaccccuccaucc

SEQ ID NO: 213362 - RNA, 21 nt, Human
ugaagaggaggguccaagagc

SEQ ID NO: 213363 - RNA, 19 nt, Human
ugaccccuccauccccucc

SEQ ID NO: 213364 - RNA, 21 nt, Human
ugacccgggagcguggccgug

SEQ ID NO: 213365 - RNA, 23 nt, Human
ugcccggguggcccacuuggcuc

SEQ ID NO: 213366 - RNA, 23 nt, Human
ugggccucaugggauaggcccag

SEQ ID NO: 213367 - RNA, 20 nt, Human
uguggagucacugggccuca

SEQ ID NO: 213368 - RNA, 21 nt, Human
uuugaccccuccauccccucc

SEQ ID NO: 213369 - RNA, 24 nt, Human
uuuuuuuuuuuuuacuugggccua

SEQ ID NO: 213370 - RNA, 24 nt, Human
uuuuuuuuuuuuuuuuuuacuugg

SEQ ID NO: 213371 - RNA, 25 nt, Human
uuuuuuuuuuuuuuuuuuacuuggg

SEQ ID NO: 213372 - RNA, 21 nt, Human
aacacgcgcacgcacacaugg

SEQ ID NO: 213373 - RNA, 23 nt, Human
aagcaccaaaaucaaaacccaac

SEQ ID NO: 213374 - RNA, 21 nt, Human
aaguuuuucccuuuuggaggc

SEQ ID NO: 213375 - RNA, 22 nt, Human
aaucaaaacccaacaaucaaua

SEQ ID NO: 213376 - RNA, 21 nt, Human
accaccugcccaacacuucca

SEQ ID NO: 213377 - RNA, 18 nt, Human
acgcaggacucgcggccg

SEQ ID NO: 213378 - RNA, 18 nt, Human
agcaagcaccaaaaucaa

SEQ ID NO: 213379 - RNA, 20 nt, Human
agcuccgggccaggugugcc

SEQ ID NO: 213380 - RNA, 22 nt, Human
cacagcgcucccucacggccag

SEQ ID NO: 213381 - RNA, 22 nt, Human
caccaaaaucaaaacccaacaa

SEQ ID NO: 213382 - RNA, 19 nt, Human
cagaaggcagcgcgccccc

SEQ ID NO: 213383 - RNA, 26 nt, Human
cagaaguuuuucccuuuuggaggcuu

SEQ ID NO: 213384 - RNA, 23 nt, Human
cagcaagcaccaaaaucaaaacc

SEQ ID NO: 213385 - RNA, 28 nt, Human
cagcaagcaccaaaaucaaaacccaaca

SEQ ID NO: 213386 - RNA, 21 nt, Human
cagcagcaagcaccaaaauca

SEQ ID NO: 213387 - RNA, 23 nt, Human
cagcaucauauugucagaaguuu

SEQ ID NO: 213388 - RNA, 23 nt, Human
ccaccaccugcccaacacuucca

SEQ ID NO: 213389 - RNA, 18 nt, Human
ccucgcccaauuuggcca

SEQ ID NO: 213390 - RNA, 22 nt, Human
cgcacgcgccucagauaaacac

SEQ ID NO: 213391 - RNA, 22 nt, Human
cgcgcacgcacacaugcucgcg

SEQ ID NO: 213392 - RNA, 18 nt, Human
cucagauaaacacgcgca

SEQ ID NO: 213393 - RNA, 20 nt, Human
cuccuuuguagauaguacaa

SEQ ID NO: 213394 - RNA, 18 nt, Human
cuuugugaggacugggag

SEQ ID NO: 213395 - RNA, 26 nt, Human
gaaaauuauuuauuuaauaauacaga

SEQ ID NO: 213396 - RNA, 22 nt, Human
gacgcucucccaccaccugccc

SEQ ID NO: 213397 - RNA, 20 nt, Human
gcacgcacacaugcucgcga

SEQ ID NO: 213398 - RNA, 19 nt, Human
gcagaaggcagcgcgcccc

SEQ ID NO: 213399 - RNA, 22 nt, Human
gcagaaggcagcgcgcccccac

SEQ ID NO: 213400 - RNA, 19 nt, Human
gcgcguuguuggggcgccg

SEQ ID NO: 213401 - RNA, 23 nt, Human
gcuucuuuuuuccauuccuuucc

SEQ ID NO: 213402 - RNA, 21 nt, Human
ggggcauuaaacaacagggaa

SEQ ID NO: 213403 - RNA, 22 nt, Human
uaaaaaacgacagacagacacg

SEQ ID NO: 213404 - RNA, 20 nt, Human
uaaauauuucucgcacagca

SEQ ID NO: 213405 - RNA, 18 nt, Human
uaacuggccucccaaugc

SEQ ID NO: 213406 - RNA, 20 nt, Human
uaauaauacagaucguuuua

SEQ ID NO: 213407 - RNA, 19 nt, Human
uaaucugaaauucagcccc

SEQ ID NO: 213408 - RNA, 19 nt, Human
uacuguucuuccuaacugg

SEQ ID NO: 213409 - RNA, 19 nt, Human
uauguguauaauauguguu

SEQ ID NO: 213410 - RNA, 18 nt, Human
ucccaaugccagcaacuc

SEQ ID NO: 213411 - RNA, 22 nt, Human
ucccucacggccagagccgggg

SEQ ID NO: 213412 - RNA, 24 nt, Human
ucccucacggccagagccgggggc

SEQ ID NO: 213413 - RNA, 24 nt, Human
ugaaaauuauuuauuuaauaauac

SEQ ID NO: 213414 - RNA, 19 nt, Human
ugaggacugggagagggcg

SEQ ID NO: 213415 - RNA, 22 nt, Human
uggccaaaacccuaaaaguaaa

SEQ ID NO: 213416 - RNA, 23 nt, Human
uggccucccaaugccagcaacuc

SEQ ID NO: 213417 - RNA, 21 nt, Human
ugggagagggcgcguuguugg

SEQ ID NO: 213418 - RNA, 23 nt, Human
ugggagagggcgcguuguuggag

SEQ ID NO: 213419 - RNA, 23 nt, Human
ugggagagggcgcguuguugggg

SEQ ID NO: 213420 - RNA, 24 nt, Human
uggggcgccggcucggcggggagg

SEQ ID NO: 213421 - RNA, 23 nt, Human
ugucagaaguuuuucccuuuugg

SEQ ID NO: 213422 - RNA, 19 nt, Human
ugugaggacugggagaggg

SEQ ID NO: 213423 - RNA, 20 nt, Human
uguucuaccuuaacagcaag

SEQ ID NO: 213424 - RNA, 22 nt, Human
uucaagccugacgcucucccac

SEQ ID NO: 213425 - RNA, 21 nt, Human
uucccuuuuggaggcuucuuu

SEQ ID NO: 213426 - RNA, 23 nt, Human
uuggccaaaacccuaaaaguaaa

SEQ ID NO: 213427 - RNA, 27 nt, Human
uuuaauacuguuuaacauuugaaaauu

SEQ ID NO: 213428 - RNA, 25 nt, Human
uuuuggaggcuucuuuuuuccauuc

SEQ ID NO: 213429 - RNA, 19 nt, Human
aaaaccugaaaaaacagaa

SEQ ID NO: 213430 - RNA, 27 nt, Human
aaagaaagcacuccuggcguucacuga

SEQ ID NO: 213431 - RNA, 21 nt, Human
acaagccucaucaguaaaacc

SEQ ID NO: 213432 - RNA, 19 nt, Human
agcaaauggaaagaauaua

SEQ ID NO: 213433 - RNA, 25 nt, Human
aggcgugcuuccgugugugcgugcc

SEQ ID NO: 213434 - RNA, 28 nt, Human
caaagaaagcacuccuggcguucacuga

SEQ ID NO: 213435 - RNA, 23 nt, Human
caaauggaaagaauauaaaugca

SEQ ID NO: 213436 - RNA, 24 nt, Human
caguaguagagaucacaaacauua

SEQ ID NO: 213437 - RNA, 22 nt, Human
cgggacucucgcugcgaacccu

SEQ ID NO: 213438 - RNA, 21 nt, Human
ggacucgagcugccgcggcgg

SEQ ID NO: 213439 - RNA, 18 nt, Human
ggccucacaagccucauc

SEQ ID NO: 213440 - RNA, 22 nt, Human
guaaaccugcucauuucuagac

SEQ ID NO: 213441 - RNA, 20 nt, Human
uacacaaguugcaaagaaag

SEQ ID NO: 213442 - RNA, 24 nt, Human
uagaacaguacuuguaaaccugcu

SEQ ID NO: 213443 - RNA, 21 nt, Human
ucaucuaucacugcugauuuc

SEQ ID NO: 213444 - RNA, 25 nt, Human
ugaaaaaacagaaaauguuacacaa

SEQ ID NO: 213445 - RNA, 24 nt, Human
ugacaugauagcaaauggaaagaa

SEQ ID NO: 213446 - RNA, 23 nt, Human
uggaaagaauauaaaugcaacag

SEQ ID NO: 213447 - RNA, 30 nt, Human
uucaucuaucacugcugauuuccuuugacu

SEQ ID NO: 213448 - RNA, 25 nt, Human
uucuagacaaguccgggacucucgc

SEQ ID NO: 213449 - RNA, 22 nt, Human
uuuaugaaaaucuuccuaaacc

SEQ ID NO: 213450 - RNA, 26 nt, Human
aaacaaguuccaaauuuuugaccugg

SEQ ID NO: 213451 - RNA, 21 nt, Human
aaagaaaaaaaaguuggccua

SEQ ID NO: 213452 - RNA, 24 nt, Human
aaagaaaaaaaaguuggccuaggg

SEQ ID NO: 213453 - RNA, 22 nt, Human
aaauuuaauugcaaaaacaacc

SEQ ID NO: 213454 - RNA, 21 nt, Human
aacagaauccagcggcaauga

SEQ ID NO: 213455 - RNA, 21 nt, Human
aaccugaagcaaaaguacaga

SEQ ID NO: 213456 - RNA, 25 nt, Human
aagcaaaaguacagaaugcugaguu

SEQ ID NO: 213457 - RNA, 20 nt, Human
aauaagaaacaaguuccaaa

SEQ ID NO: 213458 - RNA, 21 nt, Human
acauccaaaacacauauccau

SEQ ID NO: 213459 - RNA, 21 nt, Human
accaagcauaucauacaucca

SEQ ID NO: 213460 - RNA, 23 nt, Human
auccaaaacacauauccauugau

SEQ ID NO: 213461 - RNA, 19 nt, Human
augagucaccaaaucuggg

SEQ ID NO: 213462 - RNA, 20 nt, Human
augguaacgugaaauaaaaa

SEQ ID NO: 213463 - RNA, 22 nt, Human
auuuaauugcaaaaacaaccug

SEQ ID NO: 213464 - RNA, 18 nt, Human
caaaauuucaggggacca

SEQ ID NO: 213465 - RNA, 23 nt, Human
cacaaucaaaucaguauaaacac

SEQ ID NO: 213466 - RNA, 22 nt, Human
caccuauauacuaagucaaaau

SEQ ID NO: 213467 - RNA, 20 nt, Human
caguauaaacaccuuuaaaa

SEQ ID NO: 213468 - RNA, 21 nt, Human
cauaguaaaauaagaaacaag

SEQ ID NO: 213469 - RNA, 25 nt, Human
cauaguaaaauaagaaacaaguucc

SEQ ID NO: 213470 - RNA, 23 nt, Human
ccaaauuuuugaccuggacaaag

SEQ ID NO: 213471 - RNA, 24 nt, Human
cccacaauaagccaugcuaucuga

SEQ ID NO: 213472 - RNA, 19 nt, Human
ccuaaaguacauucuuaca

SEQ ID NO: 213473 - RNA, 21 nt, Human
cucgucucuuccggagguaga

SEQ ID NO: 213474 - RNA, 22 nt, Human
cucugcaccuauauacuaaguc

SEQ ID NO: 213475 - RNA, 25 nt, Human
cugcagagcaaugaccacuaagaaa

SEQ ID NO: 213476 - RNA, 19 nt, Human
gaaaugcccacaauaagcc

SEQ ID NO: 213477 - RNA, 25 nt, Human
gaccacuaagaaauauuuuuaaagg

SEQ ID NO: 213478 - RNA, 21 nt, Human
gaggacguccggcuagcucug

SEQ ID NO: 213479 - RNA, 23 nt, Human
gcauaucauacauccaaaacaca

SEQ ID NO: 213480 - RNA, 19 nt, Human
gugucucugcaccuauaua

SEQ ID NO: 213481 - RNA, 21 nt, Human
uaaagcaaauccaaacagaca

SEQ ID NO: 213482 - RNA, 30 nt, Human
uaaguacaugugaucaacaguacaaauaaa

SEQ ID NO: 213483 - RNA, 22 nt, Human
uaagugggugucucugcaccua

SEQ ID NO: 213484 - RNA, 19 nt, Human
uagaaauaguuucuucucu

SEQ ID NO: 213485 - RNA, 25 nt, Human
uagcagucaaaccuuaguaucacac

SEQ ID NO: 213486 - RNA, 20 nt, Human
uauccauugaugagucacca

SEQ ID NO: 213487 - RNA, 21 nt, Human
ucuauuguaacuaggaauuac

SEQ ID NO: 213488 - RNA, 19 nt, Human
ucucugcaaagaaaaaaaa

SEQ ID NO: 213489 - RNA, 24 nt, Human
ugaaacuaaagagaaauguuuuuc

SEQ ID NO: 213490 - RNA, 26 nt, Human
ugaaacuaaagagaaauguuuuucca

SEQ ID NO: 213491 - RNA, 19 nt, Human
ugaagaauaaaacaaaaaa

SEQ ID NO: 213492 - RNA, 24 nt, Human
ugagucaccaaaucuggggaaaag

SEQ ID NO: 213493 - RNA, 22 nt, Human
ugcaaagaaaaaaaaguuggcc

SEQ ID NO: 213494 - RNA, 22 nt, Human
ugcaaagaaaaaaaaguuggcc

SEQ ID NO: 213495 - RNA, 21 nt, Human
ugcccacaauaagccaugcua

SEQ ID NO: 213496 - RNA, 24 nt, Human
ugcuuuuuauuauagaaauaguuu

SEQ ID NO: 213497 - RNA, 25 nt, Human
uggguauguuuccuaaaguacauuc

SEQ ID NO: 213498 - RNA, 24 nt, Human
ugggugucucugcaccuauauacu

SEQ ID NO: 213499 - RNA, 26 nt, Human
uuacuuuauguaucuauuguaacuag

SEQ ID NO: 213500 - RNA, 19 nt, Human
uucaaaccugaagcaaaag

SEQ ID NO: 213501 - RNA, 23 nt, Human
uuccuggguauguuuccuaaagu

SEQ ID NO: 213502 - RNA, 21 nt, Human
uugaguucugcagagcaauga

SEQ ID NO: 213503 - RNA, 24 nt, Human
uuuuuaaaucagugaaacaaacau

SEQ ID NO: 213504 - RNA, 23 nt, Human
uuuuuuuuuuuuuuuuaaguuuu

SEQ ID NO: 213505 - RNA, 19 nt, Human
uuuuuuuuuuuuuuuuuaa

SEQ ID NO: 213506 - RNA, 22 nt, Human
aaacagcuaaacaccaaauccu

SEQ ID NO: 213507 - RNA, 20 nt, Human
aaggcgccccgaccccgccg

SEQ ID NO: 213508 - RNA, 19 nt, Human
aaguacuccggggggaggg

SEQ ID NO: 213509 - RNA, 23 nt, Human
acuguagcgugacaacucccucu

SEQ ID NO: 213510 - RNA, 21 nt, Human
agaaacagcuaaacaccaaau

SEQ ID NO: 213511 - RNA, 23 nt, Human
agaaacagcuaaacaccaaaucc

SEQ ID NO: 213512 - RNA, 21 nt, Human
agaacacguacuaaccugaaa

SEQ ID NO: 213513 - RNA, 21 nt, Human
agaagaacacguacuaaccug

SEQ ID NO: 213514 - RNA, 24 nt, Human
agcauggcgaagccccaucucugu

SEQ ID NO: 213515 - RNA, 20 nt, Human
agccugggcagcauggcgaa

SEQ ID NO: 213516 - RNA, 24 nt, Human
agccugggcagcauggcgaagccc

SEQ ID NO: 213517 - RNA, 23 nt, Human
aggacuucaagaccagccugggc

SEQ ID NO: 213518 - RNA, 21 nt, Human
agggccaccuccccaggagcc

SEQ ID NO: 213519 - RNA, 18 nt, Human
aggucaggacuucaagac

SEQ ID NO: 213520 - RNA, 20 nt, Human
cacagcagcccagggaggcc

SEQ ID NO: 213521 - RNA, 20 nt, Human
cacagcagcccagggaggcc

SEQ ID NO: 213522 - RNA, 21 nt, Human
cagcagcccagggaggccuug

SEQ ID NO: 213523 - RNA, 23 nt, Human
cagcccagggaggccuugggagc

SEQ ID NO: 213524 - RNA, 18 nt, Human
cauggcgaagccccaucu

SEQ ID NO: 213525 - RNA, 19 nt, Human
cauggcgaagccccaucuc

SEQ ID NO: 213526 - RNA, 23 nt, Human
cauggcgaagccccaucucuguc

SEQ ID NO: 213527 - RNA, 19 nt, Human
ccaccuccccaggagccca

SEQ ID NO: 213528 - RNA, 21 nt, Human
ccagaagccgcggccucuucu

SEQ ID NO: 213529 - RNA, 18 nt, Human
ccaggagcagagcgugag

SEQ ID NO: 213530 - RNA, 21 nt, Human
ccaucucugucuccccggaga

SEQ ID NO: 213531 - RNA, 19 nt, Human
cccacagcagcccagggag

SEQ ID NO: 213532 - RNA, 22 nt, Human
ccccggagacccggagccgcuu

SEQ ID NO: 213533 - RNA, 20 nt, Human
ccgcuggccauugcagaagg

SEQ ID NO: 213534 - RNA, 20 nt, Human
ccggagccgcuggccauugc

SEQ ID NO: 213535 - RNA, 24 nt, Human
ccucugugcagugguaaaucacuc

SEQ ID NO: 213536 - RNA, 24 nt, Human
ccugggcagcauggcgaagcccca

SEQ ID NO: 213537 - RNA, 20 nt, Human
ccuguaaucccagcacuuug

SEQ ID NO: 213538 - RNA, 24 nt, Human
cgauccgcuuuaucagcaguucua

SEQ ID NO: 213539 - RNA, 19 nt, Human
cgccccgaccccgccggcc

SEQ ID NO: 213540 - RNA, 22 nt, Human
cuaaccugaaaaaggcuacgug

SEQ ID NO: 213541 - RNA, 18 nt, Human
cuccgaauucaagcugug

SEQ ID NO: 213542 - RNA, 19 nt, Human
cuucaagaccagccugggc

SEQ ID NO: 213543 - RNA, 23 nt, Human
cuucaagaccagccugggcagca

SEQ ID NO: 213544 - RNA, 21 nt, Human
gccaccuccccaggagcccac

SEQ ID NO: 213545 - RNA, 20 nt, Human
gccggcccguguacagccgc

SEQ ID NO: 213546 - RNA, 23 nt, Human
gccugggcagcauggcgaagccc

SEQ ID NO: 213547 - RNA, 18 nt, Human
gccuguaaucccagcacu

SEQ ID NO: 213548 - RNA, 20 nt, Human
gcugugggugagcacacacu

SEQ ID NO: 213549 - RNA, 23 nt, Human
ggagacccggagccgcuggccau

SEQ ID NO: 213550 - RNA, 21 nt, Human
ggagcagagcgugagccacug

SEQ ID NO: 213551 - RNA, 21 nt, Human
ggagcagagcgugagccacug

SEQ ID NO: 213552 - RNA, 21 nt, Human
ggcugugggugagcacacacu

SEQ ID NO: 213553 - RNA, 22 nt, Human
uauuuugauuuauugcauucug

SEQ ID NO: 213554 - RNA, 19 nt, Human
ucacaggagauuugaguuu

SEQ ID NO: 213555 - RNA, 23 nt, Human
uccccaggagcccacagcagccc

SEQ ID NO: 213556 - RNA, 26 nt, Human
uccgaauucaagcugugcacaaaauu

SEQ ID NO: 213557 - RNA, 24 nt, Human
ugcaaggcugaggugcgccgaucg

SEQ ID NO: 213558 - RNA, 19 nt, Human
ugcgccgaucgcuuugagg

SEQ ID NO: 213559 - RNA, 23 nt, Human
ugcgccgaucgcuuugaggucag

SEQ ID NO: 213560 - RNA, 21 nt, Human
uggcauggagcgugggccacg

SEQ ID NO: 213561 - RNA, 22 nt, Human
uggcccugacagaagaacacgu

SEQ ID NO: 213562 - RNA, 22 nt, Human
ugggcagcauggcgaagcccca

SEQ ID NO: 213563 - RNA, 26 nt, Human
uugcaaggcugaggugcgccgaucga

SEQ ID NO: 213564 - RNA, 23 nt, Human
uuggccccagaagccgcggccuc

SEQ ID NO: 213565 - RNA, 23 nt, Human
uuugaggucaggacuucaagacc

SEQ ID NO: 213566 - RNA, 18 nt, Human
aaaguggacacuggggug

SEQ ID NO: 213567 - RNA, 21 nt, Human
aaggagcuggagaacccguag

SEQ ID NO: 213568 - RNA, 22 nt, Human
aaggagcuggagaacccguagg

SEQ ID NO: 213569 - RNA, 22 nt, Human
acagcgccguccgccucccugc

SEQ ID NO: 213570 - RNA, 23 nt, Human
acaggagaagccaggaggggccg

SEQ ID NO: 213571 - RNA, 18 nt, Human
accccguccccuucccug

SEQ ID NO: 213572 - RNA, 20 nt, Human
accccguccccuucccugcc

SEQ ID NO: 213573 - RNA, 22 nt, Human
agaaccccguccccuucccugc

SEQ ID NO: 213574 - RNA, 24 nt, Human
agagcagggccaggagagcaccau

SEQ ID NO: 213575 - RNA, 20 nt, Human
aggagaagggaggaaugguu

SEQ ID NO: 213576 - RNA, 18 nt, Human
aggcaggcggccaugacc

SEQ ID NO: 213577 - RNA, 21 nt, Human
aggcaggcggccaugaccagg

SEQ ID NO: 213578 - RNA, 21 nt, Human
aggcggccaugaccagggcag

SEQ ID NO: 213579 - RNA, 26 nt, Human
aggcuggagcaggcugcagcaagaaa

SEQ ID NO: 213580 - RNA, 20 nt, Human
aggugcccuacaggagaagc

SEQ ID NO: 213581 - RNA, 21 nt, Human
agugaguggcccuccaugcgg

SEQ ID NO: 213582 - RNA, 24 nt, Human
caagaaagauccuaaggcagcgca

SEQ ID NO: 213583 - RNA, 21 nt, Human
cagcgccguccgccucccugc

SEQ ID NO: 213584 - RNA, 23 nt, Human
cagcucagggcgggcgagccugg

SEQ ID NO: 213585 - RNA, 23 nt, Human
caggcugcagcaagaaagauccu

SEQ ID NO: 213586 - RNA, 18 nt, Human
cagggccggggaaggggg

SEQ ID NO: 213587 - RNA, 22 nt, Human
cauccccuccaccaccucggcc

SEQ ID NO: 213588 - RNA, 20 nt, Human
ccagggacaggggagcggcc

SEQ ID NO: 213589 - RNA, 23 nt, Human
ccagggccggggaagggggcaga

SEQ ID NO: 213590 - RNA, 20 nt, Human
cccagggccggggaaggggg

SEQ ID NO: 213591 - RNA, 21 nt, Human
cccagggccggggaagggggc

SEQ ID NO: 213592 - RNA, 23 nt, Human
cccauggccagggacaggggagc

SEQ ID NO: 213593 - RNA, 22 nt, Human
cccccgggagcaguccugacuc

SEQ ID NO: 213594 - RNA, 24 nt, Human
ccccguccccuucccugccguccg

SEQ ID NO: 213595 - RNA, 19 nt, Human
cccucaggaccuccccucc

SEQ ID NO: 213596 - RNA, 18 nt, Human
cccuccaccaccucggcc

SEQ ID NO: 213597 - RNA, 20 nt, Human
ccgcagcucagggcgggcga

SEQ ID NO: 213598 - RNA, 23 nt, Human
ccgccugccccuggggugggggc

SEQ ID NO: 213599 - RNA, 23 nt, Human
ccggggccccggcugggcaguga

SEQ ID NO: 213600 - RNA, 23 nt, Human
ccgucucgugucccggguguugc

SEQ ID NO: 213601 - RNA, 27 nt, Human
ccucucugccuggaaaggagcuggaga

SEQ ID NO: 213602 - RNA, 21 nt, Human
ccugcagcagucgggcgcugu

SEQ ID NO: 213603 - RNA, 18 nt, Human
ccugccccuggggugggg

SEQ ID NO: 213604 - RNA, 23 nt, Human
cgcagguccugagagccuggcug

SEQ ID NO: 213605 - RNA, 23 nt, Human
cggaacagcgccguccgccuccc

SEQ ID NO: 213606 - RNA, 23 nt, Human
cggcccgggaagggccagagcag

SEQ ID NO: 213607 - RNA, 24 nt, Human
cggccugcagcagucgggcgcugu

SEQ ID NO: 213608 - RNA, 22 nt, Human
cgggggcggggcaggggaaucc

SEQ ID NO: 213609 - RNA, 22 nt, Human
cuagacucgguucgucucuccc

SEQ ID NO: 213610 - RNA, 21 nt, Human
cucagggcgggcgagccugga

SEQ ID NO: 213611 - RNA, 19 nt, Human
cucccaucccagauucagc

SEQ ID NO: 213612 - RNA, 21 nt, Human
cugcagcaagaaagauccuaa

SEQ ID NO: 213613 - RNA, 19 nt, Human
cuggacaccaacaccugcc

SEQ ID NO: 213614 - RNA, 20 nt, Human
cuggaggcucccggggcccc

SEQ ID NO: 213615 - RNA, 20 nt, Human
cuggcuggucucggaggggg

SEQ ID NO: 213616 - RNA, 24 nt, Human
gaaagaaccccguccccuucccug

SEQ ID NO: 213617 - RNA, 18 nt, Human
gacucugcaggggaugcc

SEQ ID NO: 213618 - RNA, 19 nt, Human
gacugggcuccgccugggc

SEQ ID NO: 213619 - RNA, 18 nt, Human
gagcaggacccaagggua

SEQ ID NO: 213620 - RNA, 21 nt, Human
gagcaguccugacucugcagg

SEQ ID NO: 213621 - RNA, 24 nt, Human
gagcaguccugacucugcagggga

SEQ ID NO: 213622 - RNA, 21 nt, Human
gagcggccugaggagcaggac

SEQ ID NO: 213623 - RNA, 22 nt, Human
gagcggccugaggagcaggacc

SEQ ID NO: 213624 - RNA, 19 nt, Human
gaggggcagcaguccccuc

SEQ ID NO: 213625 - RNA, 24 nt, Human
gcagcaguccccucaggaccuccc

SEQ ID NO: 213626 - RNA, 18 nt, Human
gcagcagucgggcgcugu

SEQ ID NO: 213627 - RNA, 18 nt, Human
gcagccuggcccccggga

SEQ ID NO: 213628 - RNA, 22 nt, Human
gcagggccaggagagcaccauu

SEQ ID NO: 213629 - RNA, 19 nt, Human
gccaggaggggccgccugc

SEQ ID NO: 213630 - RNA, 22 nt, Human
ggaccuccccuccucucugccu

SEQ ID NO: 213631 - RNA, 21 nt, Human
ggaggccgcagcucagggcgg

SEQ ID NO: 213632 - RNA, 19 nt, Human
ggcagugagcgcagcccgg

SEQ ID NO: 213633 - RNA, 19 nt, Human
ggcgggcgagccuggaggc

SEQ ID NO: 213634 - RNA, 22 nt, Human
gggccagagcagggccaggaga

SEQ ID NO: 213635 - RNA, 20 nt, Human
gggcgggcgagccuggaggc

SEQ ID NO: 213636 - RNA, 22 nt, Human
gggcggggccucgugccggggg

SEQ ID NO: 213637 - RNA, 19 nt, Human
gucuccuggccccuuccga

SEQ ID NO: 213638 - RNA, 19 nt, Human
uaaagccuucgacugcagc

SEQ ID NO: 213639 - RNA, 18 nt, Human
uagcccugcgaaggcgau

SEQ ID NO: 213640 - RNA, 18 nt, Human
ucccagggcagccuggcc

SEQ ID NO: 213641 - RNA, 22 nt, Human
ucccagggcagccuggcccccg

SEQ ID NO: 213642 - RNA, 23 nt, Human
uccccuccaccaccucggccucc

SEQ ID NO: 213643 - RNA, 19 nt, Human
ucccgaggaggggcggggc

SEQ ID NO: 213644 - RNA, 19 nt, Human
ucccggggccccggcuggg

SEQ ID NO: 213645 - RNA, 20 nt, Human
ugaggagaagggaggaaugg

SEQ ID NO: 213646 - RNA, 21 nt, Human
ugagggggagaggugucccua

SEQ ID NO: 213647 - RNA, 20 nt, Human
ugccuggaaaggagcuggag

SEQ ID NO: 213648 - RNA, 20 nt, Human
ugcugggaggcuaggggcag

SEQ ID NO: 213649 - RNA, 22 nt, Human
uggaaaggagcuggagaacccg

SEQ ID NO: 213650 - RNA, 19 nt, Human
uggacaccaacaccugcca

SEQ ID NO: 213651 - RNA, 18 nt, Human
uggcuggcuggucucgga

SEQ ID NO: 213652 - RNA, 21 nt, Human
ugggacuggaaagaaccccgu

SEQ ID NO: 213653 - RNA, 26 nt, Human
ugggaggcuaggggcagggaggugcc

SEQ ID NO: 213654 - RNA, 18 nt, Human
ugggcagugagcgcagcc

SEQ ID NO: 213655 - RNA, 21 nt, Human
ugggcagugagcgcagcccgg

SEQ ID NO: 213656 - RNA, 19 nt, Human
uggggugggggccaggcug

SEQ ID NO: 213657 - RNA, 21 nt, Human
uguagcgagguccaaucuagg

SEQ ID NO: 213658 - RNA, 18 nt, Human
uguugccgggcuccgggc

SEQ ID NO: 213659 - RNA, 19 nt, Human
acaaucacagaacaaccuc

SEQ ID NO: 213660 - RNA, 20 nt, Human
acagaacaaccucaaaucuc

SEQ ID NO: 213661 - RNA, 22 nt, Human
agguggaagcaaaccuggcuua

SEQ ID NO: 213662 - RNA, 21 nt, Human
cagaacaaccucaaaucucau

SEQ ID NO: 213663 - RNA, 23 nt, Human
cagucccuaaacaauaaguaagc

SEQ ID NO: 213664 - RNA, 19 nt, Human
cucaaaucucauuaaaaag

SEQ ID NO: 213665 - RNA, 23 nt, Human
cuuuuuuuucagaauuuacuggu

SEQ ID NO: 213666 - RNA, 20 nt, Human
gaaccucaguuucuuuuaaa

SEQ ID NO: 213667 - RNA, 21 nt, Human
gaaccucaguuucuuuuaaag

SEQ ID NO: 213668 - RNA, 21 nt, Human
uaaaauuuucagggaaggugg

SEQ ID NO: 213669 - RNA, 22 nt, Human
uaagcaguaguugcguauaaaa

SEQ ID NO: 213670 - RNA, 24 nt, Human
uaaguaagcuaugcuuguugcaaa

SEQ ID NO: 213671 - RNA, 23 nt, Human
uacacacuacauacauucaugcg

SEQ ID NO: 213672 - RNA, 24 nt, Human
uacacacuacauacauucaugcgg

SEQ ID NO: 213673 - RNA, 21 nt, Human
uacacucacuacagugccuac

SEQ ID NO: 213674 - RNA, 18 nt, Human
uaguacaacuucgcccuu

SEQ ID NO: 213675 - RNA, 19 nt, Human
uaucagacguaguguggag

SEQ ID NO: 213676 - RNA, 20 nt, Human
uccauuuuccuugagaaggc

SEQ ID NO: 213677 - RNA, 22 nt, Human
ucucccaacauagcaucuucuu

SEQ ID NO: 213678 - RNA, 20 nt, Human
ucuggauuuugaugacccau

SEQ ID NO: 213679 - RNA, 23 nt, Human
ucuuuuuuuucagaauuuacugg

SEQ ID NO: 213680 - RNA, 18 nt, Human
ugaggauaaccuucuugg

SEQ ID NO: 213681 - RNA, 19 nt, Human
ugccuacacacuacauaca

SEQ ID NO: 213682 - RNA, 18 nt, Human
ugccugucuccauuuucc

SEQ ID NO: 213683 - RNA, 20 nt, Human
ugccugucuccauuuuccuu

SEQ ID NO: 213684 - RNA, 18 nt, Human
uggaagcaaaccuggcuu

SEQ ID NO: 213685 - RNA, 25 nt, Human
uguaguaacaagaaaaguaagauuu

SEQ ID NO: 213686 - RNA, 21 nt, Human
ugugcugauucucaguguuga

SEQ ID NO: 213687 - RNA, 20 nt, Human
uguguaucugaaccucaguu

SEQ ID NO: 213688 - RNA, 18 nt, Human
uguucagucccuaaacaa

SEQ ID NO: 213689 - RNA, 20 nt, Human
uguucagucccuaaacaaua

SEQ ID NO: 213690 - RNA, 24 nt, Human
uuccaugguauguguaucugaacc

SEQ ID NO: 213691 - RNA, 23 nt, Human
uuugugcauugguaauucugaua

SEQ ID NO: 213692 - RNA, 23 nt, Human
uuuucagaauuuacugguugcca

SEQ ID NO: 213693 - RNA, 18 nt, Human
aaaggaaugaggagagga

SEQ ID NO: 213694 - RNA, 23 nt, Human
aacuuccaauaacaaagaguuau

SEQ ID NO: 213695 - RNA, 24 nt, Human
aauaacaaagaguuauaggaaaga

SEQ ID NO: 213696 - RNA, 23 nt, Human
caauaacaaagaguuauaggaaa

SEQ ID NO: 213697 - RNA, 24 nt, Human
ccaaauccuugaaacuuccaauaa

SEQ ID NO: 213698 - RNA, 30 nt, Human
ccaaauccuugaaacuuccaauaacaaagg

SEQ ID NO: 213699 - RNA, 25 nt, Human
gggccaaaaccaaaggaaugaggag

SEQ ID NO: 213700 - RNA, 20 nt, Human
uaggaaagaccuaacauuua

SEQ ID NO: 213701 - RNA, 26 nt, Human
uauaggaaagaccuaacauuuaaaag

SEQ ID NO: 213702 - RNA, 20 nt, Human
uccuugaaacuuccaauaac

SEQ ID NO: 213703 - RNA, 27 nt, Human
ugagaaugaacaaccacuucaaaacca

SEQ ID NO: 213704 - RNA, 21 nt, Human
uuauaggaaagaccuaacauu

SEQ ID NO: 213705 - RNA, 20 nt, Human
aaaaggcaaacagaaucacu

SEQ ID NO: 213706 - RNA, 25 nt, Human
aaacaaaaggcaaacagaagggacc

SEQ ID NO: 213707 - RNA, 23 nt, Human
aaacaaaaggcaaacagaauccu

SEQ ID NO: 213708 - RNA, 21 nt, Human
aaacagagcccccaaagccuu

SEQ ID NO: 213709 - RNA, 19 nt, Human
aaauauacuacuagaggaa

SEQ ID NO: 213710 - RNA, 22 nt, Human
aacagagcccccaaagccuuga

SEQ ID NO: 213711 - RNA, 19 nt, Human
aacucgccaccucucucug

SEQ ID NO: 213712 - RNA, 23 nt, Human
aagaaaucagucugagacuuaag

SEQ ID NO: 213713 - RNA, 20 nt, Human
aagcauuuuaaaauggccau

SEQ ID NO: 213714 - RNA, 19 nt, Human
aauaagugagaacaauaau

SEQ ID NO: 213715 - RNA, 20 nt, Human
accugccacaguccucucca

SEQ ID NO: 213716 - RNA, 24 nt, Human
agaacgcgcaggggcgccuucccg

SEQ ID NO: 213717 - RNA, 22 nt, Human
aggaaaguuuccccaacagcca

SEQ ID NO: 213718 - RNA, 22 nt, Human
aggcaaacagaaucacugccau

SEQ ID NO: 213719 - RNA, 18 nt, Human
auaaauuaaagaugggua

SEQ ID NO: 213720 - RNA, 20 nt, Human
auagaacgcgcaggggcgcc

SEQ ID NO: 213721 - RNA, 23 nt, Human
auggcagcaagaaacacauuuac

SEQ ID NO: 213722 - RNA, 21 nt, Human
caaaacagagcccccaaagcc

SEQ ID NO: 213723 - RNA, 24 nt, Human
caaaacagagcccccaaagccuug

SEQ ID NO: 213724 - RNA, 19 nt, Human
caaaggcagcaauguaaua

SEQ ID NO: 213725 - RNA, 19 nt, Human
cacauacagcaggaagcac

SEQ ID NO: 213726 - RNA, 18 nt, Human
cacccggggcggccaggu

SEQ ID NO: 213727 - RNA, 21 nt, Human
caccucucucugacacccggg

SEQ ID NO: 213728 - RNA, 26 nt, Human
cagguccucucaccugccacaguccu

SEQ ID NO: 213729 - RNA, 18 nt, Human
caucugcugacugcacuu

SEQ ID NO: 213730 - RNA, 21 nt, Human
caugacuugagguuccuugaa

SEQ ID NO: 213731 - RNA, 21 nt, Human
ccaaagccuugacugaccucg

SEQ ID NO: 213732 - RNA, 20 nt, Human
ccaacucuuccguuucccua

SEQ ID NO: 213733 - RNA, 22 nt, Human
ccacauucaaaacagagccccc

SEQ ID NO: 213734 - RNA, 23 nt, Human
ccagcgaucugcccgcgcccccc

SEQ ID NO: 213735 - RNA, 23 nt, Human
ccccacccaacucuuccguuucc

SEQ ID NO: 213736 - RNA, 25 nt, Human
ccccacccaacucuuccguuucccu

SEQ ID NO: 213737 - RNA, 18 nt, Human
cccgcaagaaaucagucu

SEQ ID NO: 213738 - RNA, 21 nt, Human
ccucacaccaggcgccugucc

SEQ ID NO: 213739 - RNA, 24 nt, Human
cuauauuuguaguuucuaaaaugc

SEQ ID NO: 213740 - RNA, 22 nt, Human
cucaccugccacaguccucucc

SEQ ID NO: 213741 - RNA, 18 nt, Human
cuccaagccagcgaucug

SEQ ID NO: 213742 - RNA, 22 nt, Human
cuccuugcaccucaacaaaggc

SEQ ID NO: 213743 - RNA, 21 nt, Human
cuucccggcagaggcgucuag

SEQ ID NO: 213744 - RNA, 21 nt, Human
gaacucgccaccucucucuga

SEQ ID NO: 213745 - RNA, 18 nt, Human
gaguggugauccacauuc

SEQ ID NO: 213746 - RNA, 18 nt, Human
gcaagaaaucagucugag

SEQ ID NO: 213747 - RNA, 20 nt, Human
gcaccucaacaaaggcagcc

SEQ ID NO: 213748 - RNA, 18 nt, Human
guuccuauaaaauucgcu

SEQ ID NO: 213749 - RNA, 20 nt, Human
uaaaaaagcuaaaugaaaua

SEQ ID NO: 213750 - RNA, 23 nt, Human
uaagacaaauuuuaaaaguuacu

SEQ ID NO: 213751 - RNA, 26 nt, Human
uaccaaugaaaacaaaaggcaaacag

SEQ ID NO: 213752 - RNA, 23 nt, Human
uacuauaggcuguauuuuuggcg

SEQ ID NO: 213753 - RNA, 19 nt, Human
uacuggggggcugaggcgg

SEQ ID NO: 213754 - RNA, 21 nt, Human
uauuuuguccuccucacacca

SEQ ID NO: 213755 - RNA, 25 nt, Human
ucaaaacagagcccccaaagccuug

SEQ ID NO: 213756 - RNA, 22 nt, Human
ucaauuuuuuuuuuugccccca

SEQ ID NO: 213757 - RNA, 19 nt, Human
uccacauucaaaacagagc

SEQ ID NO: 213758 - RNA, 28 nt, Human
uccacauucaaaacagagcccccaaagc

SEQ ID NO: 213759 - RNA, 25 nt, Human
ucggggacagcggucaauuuuuuuu

SEQ ID NO: 213760 - RNA, 21 nt, Human
ugacccagggucugaauacag

SEQ ID NO: 213761 - RNA, 19 nt, Human
ugauagcaaaagcaugacu

SEQ ID NO: 213762 - RNA, 18 nt, Human
ugcgcagccuuguaaaca

SEQ ID NO: 213763 - RNA, 25 nt, Human
uguaccaaugaaaacaaaaggcaaa

SEQ ID NO: 213764 - RNA, 24 nt, Human
uuauuuuguccuccucacaccagg

SEQ ID NO: 213765 - RNA, 20 nt, Human
uucacaacagcaucugcuga

SEQ ID NO: 213766 - RNA, 23 nt, Human
uugaguuuagucccccuccuccc

SEQ ID NO: 213767 - RNA, 23 nt, Human
uuuaaaauggccauuuggggaac

SEQ ID NO: 213768 - RNA, 20 nt, Human
uuuguaguuucuaaaaugcu

SEQ ID NO: 213769 - RNA, 20 nt, Human
uuuuuuuuuugcccccaccc

SEQ ID NO: 213770 - RNA, 23 nt, Human
uuuuuuuuuuuuuuuuuuguguu

SEQ ID NO: 213771 - RNA, 27 nt, Human
uuuuuuuuuuuuuuuuuuuuuuugggg

SEQ ID NO: 213772 - RNA, 23 nt, Human
aaauaacccuuuaaaauguggau

SEQ ID NO: 213773 - RNA, 27 nt, Human
aagcaaacggauuauauaauagucaaa

SEQ ID NO: 213774 - RNA, 23 nt, Human
acccuaaaacauuuucugaaagc

SEQ ID NO: 213775 - RNA, 26 nt, Human
acccuaaaacauuuucugaaagcaaa

SEQ ID NO: 213776 - RNA, 22 nt, Human
cauccagcagccgcacaugcac

SEQ ID NO: 213777 - RNA, 19 nt, Human
caugcaccggccgcggccg

SEQ ID NO: 213778 - RNA, 20 nt, Human
ccgccgcgggcccucagcuc

SEQ ID NO: 213779 - RNA, 19 nt, Human
ccgcgccgucgccgccgcc

SEQ ID NO: 213780 - RNA, 18 nt, Human
ccgucgccgccgccuccg

SEQ ID NO: 213781 - RNA, 20 nt, Human
ccuccgcauccagcagccgc

SEQ ID NO: 213782 - RNA, 19 nt, Human
cgccgccgccuccgcaucc

SEQ ID NO: 213783 - RNA, 20 nt, Human
cgccgccgccuccgcaucca

SEQ ID NO: 213784 - RNA, 20 nt, Human
cgccgucgccgccgccuccg

SEQ ID NO: 213785 - RNA, 20 nt, Human
cuccgcauccagcagccgca

SEQ ID NO: 213786 - RNA, 22 nt, Human
gcauccagcagccgcacaugca

SEQ ID NO: 213787 - RNA, 18 nt, Human
gcccucagcucagcuugg

SEQ ID NO: 213788 - RNA, 23 nt, Human
gccgauccgcgccgucgccgccg

SEQ ID NO: 213789 - RNA, 21 nt, Human
uccgcgccgucgccgccgccu

SEQ ID NO: 213790 - RNA, 23 nt, Human
uccgcgccgucgccgccgccucc

SEQ ID NO: 213791 - RNA, 24 nt, Human
uccgcgccgucgccgccgccuccg

SEQ ID NO: 213792 - RNA, 20 nt, Human
ucgccgccgccuccgcaucc

SEQ ID NO: 213793 - RNA, 19 nt, Human
aagaaggaagaccccccac

SEQ ID NO: 213794 - RNA, 22 nt, Human
acccugccccgugccccuucug

SEQ ID NO: 213795 - RNA, 19 nt, Human
agauagaaguggggugggg

SEQ ID NO: 213796 - RNA, 19 nt, Human
agccaugggauuaagaagg

SEQ ID NO: 213797 - RNA, 20 nt, Human
agccaugggauuaagaagga

SEQ ID NO: 213798 - RNA, 18 nt, Human
aggagggaggagugggag

SEQ ID NO: 213799 - RNA, 19 nt, Human
auccagucuuccccagucc

SEQ ID NO: 213800 - RNA, 24 nt, Human
cacacccacccucuucuacccuuc

SEQ ID NO: 213801 - RNA, 21 nt, Human
cacucuccccuccccauccca

SEQ ID NO: 213802 - RNA, 19 nt, Human
cacuguguucuuuauugag

SEQ ID NO: 213803 - RNA, 23 nt, Human
caucccacacccacccucuucua

SEQ ID NO: 213804 - RNA, 20 nt, Human
ccacucuccccuccccaucc

SEQ ID NO: 213805 - RNA, 24 nt, Human
cccacacccacccucuucuacccu

SEQ ID NO: 213806 - RNA, 23 nt, Human
cccacccucuucuacccuucuca

SEQ ID NO: 213807 - RNA, 19 nt, Human
ccccaucccacacccaccc

SEQ ID NO: 213808 - RNA, 18 nt, Human
ccccgugccccuucugcc

SEQ ID NO: 213809 - RNA, 20 nt, Human
ccccgugccccuucugccag

SEQ ID NO: 213810 - RNA, 21 nt, Human
ccccuccccaucccacaccca

SEQ ID NO: 213811 - RNA, 20 nt, Human
cccgugccccuucugccagg

SEQ ID NO: 213812 - RNA, 20 nt, Human
cccuccccaucccacaccca

SEQ ID NO: 213813 - RNA, 19 nt, Human
cccugccccgugccccuuc

SEQ ID NO: 213814 - RNA, 19 nt, Human
ccgugccccuucugccagg

SEQ ID NO: 213815 - RNA, 24 nt, Human
cuccccuccccaucccacacccac

SEQ ID NO: 213816 - RNA, 21 nt, Human
cuuuccacucuccccucccca

SEQ ID NO: 213817 - RNA, 19 nt, Human
gagaagugaaaggagggag

SEQ ID NO: 213818 - RNA, 19 nt, Human
ggggaggguagcccauagg

SEQ ID NO: 213819 - RNA, 23 nt, Human
gugaaaggagggaggagugggag

SEQ ID NO: 213820 - RNA, 25 nt, Human
ucccacacccacccucuucuacccu

SEQ ID NO: 213821 - RNA, 20 nt, Human
ucucauccagucuuccccag

SEQ ID NO: 213822 - RNA, 24 nt, Human
ucugccagggucugcccagggccu

SEQ ID NO: 213823 - RNA, 24 nt, Human
ugcccagggccuuuccacucuccc

SEQ ID NO: 213824 - RNA, 19 nt, Human
ugccccgugccccuucugc

SEQ ID NO: 213825 - RNA, 19 nt, Human
aaacucauggcuuucuaga

SEQ ID NO: 213826 - RNA, 24 nt, Human
aaccucaaggggggaaaggacaau

SEQ ID NO: 213827 - RNA, 20 nt, Human
aaggguacaccauucucccu

SEQ ID NO: 213828 - RNA, 21 nt, Human
acugcuucaucucugagcccu

SEQ ID NO: 213829 - RNA, 23 nt, Human
acuuuuguuuuuuuuuguuuuuu

SEQ ID NO: 213830 - RNA, 22 nt, Human
caacucuugcucccuuuccccc

SEQ ID NO: 213831 - RNA, 22 nt, Human
caacugaugucaucagugugau

SEQ ID NO: 213832 - RNA, 19 nt, Human
caucucugagcccuggcua

SEQ ID NO: 213833 - RNA, 18 nt, Human
cauuuugccacugucuuc

SEQ ID NO: 213834 - RNA, 21 nt, Human
ccauucucccuuucccuccca

SEQ ID NO: 213835 - RNA, 24 nt, Human
ccauucucccuuucccucccaauc

SEQ ID NO: 213836 - RNA, 18 nt, Human
ccccugggcugggcaacu

SEQ ID NO: 213837 - RNA, 23 nt, Human
cccuggcuaaggcaggccggggc

SEQ ID NO: 213838 - RNA, 18 nt, Human
cccuuucccccugggcug

SEQ ID NO: 213839 - RNA, 21 nt, Human
cccuuucccucccaaucuguc

SEQ ID NO: 213840 - RNA, 25 nt, Human
ccugugaugggcccuuucaaacuca

SEQ ID NO: 213841 - RNA, 23 nt, Human
cucuucacugcuucaucucugag

SEQ ID NO: 213842 - RNA, 24 nt, Human
cuuaaaaauuucuucauuuugccu

SEQ ID NO: 213843 - RNA, 18 nt, Human
gaaagugccugugauggg

SEQ ID NO: 213844 - RNA, 18 nt, Human
gauuuccacaucuuccuu

SEQ ID NO: 213845 - RNA, 23 nt, Human
gcccugcuuuuccuccccccuca

SEQ ID NO: 213846 - RNA, 20 nt, Human
gggaaaggacaauaccccgu

SEQ ID NO: 213847 - RNA, 18 nt, Human
uaaaggguacaccauucu

SEQ ID NO: 213848 - RNA, 19 nt, Human
uaccccguuuaaacaacug

SEQ ID NO: 213849 - RNA, 19 nt, Human
uaggaaagugccugugaug

SEQ ID NO: 213850 - RNA, 24 nt, Human
ucaucagugugauuucagaagaaa

SEQ ID NO: 213851 - RNA, 26 nt, Human
ucucccuuucccucccaaucugucuc

SEQ ID NO: 213852 - RNA, 21 nt, Human
ucucugagcccuggcuaaggc

SEQ ID NO: 213853 - RNA, 18 nt, Human
uguuuuguuuuguuuuua

SEQ ID NO: 213854 - RNA, 27 nt, Human
uuaaaggcccugcuuuucccucucgug

SEQ ID NO: 213855 - RNA, 22 nt, Human
uucaaacucauggcuuucuaga

SEQ ID NO: 213856 - RNA, 20 nt, Human
uucugguuaacucagaaacc

SEQ ID NO: 213857 - RNA, 21 nt, Human
uuguuuuguuuuuaauuucua

SEQ ID NO: 213858 - RNA, 22 nt, Human
uuguuuuuuuuuguuuuuuuuu

SEQ ID NO: 213859 - RNA, 28 nt, Human
uuguuuuuuuuuuuguuuuguuuuguuu

SEQ ID NO: 213860 - RNA, 24 nt, Human
uuuacuuuuguuuuuuuuuguuuu

SEQ ID NO: 213861 - RNA, 18 nt, Human
uuuguuuuguuuuguuuu

SEQ ID NO: 213862 - RNA, 25 nt, Human
uuuuguuuuuuuuuguuuuuuuuuu

SEQ ID NO: 213863 - RNA, 25 nt, Human
uuuuuuguuuuguuuuguuuuuaau

SEQ ID NO: 213864 - RNA, 25 nt, Human
uuuuuuuuguuuuuuuuuuuguuuu

SEQ ID NO: 213865 - RNA, 23 nt, Human
aacuaggcugcuccccucccuug

SEQ ID NO: 213866 - RNA, 22 nt, Human
aacuuggcugagacggaagcga

SEQ ID NO: 213867 - RNA, 22 nt, Human
aagaagcagacaucgagccagg

SEQ ID NO: 213868 - RNA, 18 nt, Human
aagaagcccacccgggac

SEQ ID NO: 213869 - RNA, 21 nt, Human
aagaagcccacccgggacugc

SEQ ID NO: 213870 - RNA, 22 nt, Human
aagaaugccaccuccccgccau

SEQ ID NO: 213871 - RNA, 19 nt, Human
acaagggcauggaaggaca

SEQ ID NO: 213872 - RNA, 20 nt, Human
acacacacacacauaaguca

SEQ ID NO: 213873 - RNA, 21 nt, Human
acauaagucaugucagaggcc

SEQ ID NO: 213874 - RNA, 27 nt, Human
accccaaaaacacacacacacauaagu

SEQ ID NO: 213875 - RNA, 22 nt, Human
acuucugcaaaucagcugaaag

SEQ ID NO: 213876 - RNA, 22 nt, Human
agaggaauguccccaaugaagg

SEQ ID NO: 213877 - RNA, 21 nt, Human
agccacggggcacacgcagcc

SEQ ID NO: 213878 - RNA, 23 nt, Human
agccacggggcacacgcagccuc

SEQ ID NO: 213879 - RNA, 21 nt, Human
agcccccucuucucucccucc

SEQ ID NO: 213880 - RNA, 20 nt, Human
aggaagggccgccggcggcg

SEQ ID NO: 213881 - RNA, 21 nt, Human
aggcugcuccccucccuuggc

SEQ ID NO: 213882 - RNA, 23 nt, Human
agggccccgggggcccgaggggc

SEQ ID NO: 213883 - RNA, 23 nt, Human
agggggagggggccggccgggcc

SEQ ID NO: 213884 - RNA, 24 nt, Human
agggggccggccgggccucggggg

SEQ ID NO: 213885 - RNA, 21 nt, Human
aguggcgcggagcaagcuugg

SEQ ID NO: 213886 - RNA, 22 nt, Human
aucugcagccuucuccccaucc

SEQ ID NO: 213887 - RNA, 22 nt, Human
augaagcuguagaaaaauaucu

SEQ ID NO: 213888 - RNA, 20 nt, Human
caacuucgagacguggccgg

SEQ ID NO: 213889 - RNA, 18 nt, Human
caccccaaaaacacacac

SEQ ID NO: 213890 - RNA, 23 nt, Human
caccccccauccucagcaguuca

SEQ ID NO: 213891 - RNA, 25 nt, Human
caccccccauccucagcaguucaag

SEQ ID NO: 213892 - RNA, 24 nt, Human
cacccuggcacuaucuccacagcc

SEQ ID NO: 213893 - RNA, 18 nt, Human
cagaggcccaagccacaa

SEQ ID NO: 213894 - RNA, 21 nt, Human
cagaggcccaagccacaaaca

SEQ ID NO: 213895 - RNA, 21 nt, Human
cagcgucagugggagcggcgg

SEQ ID NO: 213896 - RNA, 19 nt, Human
caggccugguaaaagccac

SEQ ID NO: 213897 - RNA, 20 nt, Human
caguggcgcggagcaagcuu

SEQ ID NO: 213898 - RNA, 21 nt, Human
cauucccacccguccccaaac

SEQ ID NO: 213899 - RNA, 18 nt, Human
ccaaaaacacacacacac

SEQ ID NO: 213900 - RNA, 20 nt, Human
ccaccccaaaaacacacaca

SEQ ID NO: 213901 - RNA, 26 nt, Human
ccacccgggacugcccuccgugcccc

SEQ ID NO: 213902 - RNA, 18 nt, Human
ccacggccagcccugaug

SEQ ID NO: 213903 - RNA, 20 nt, Human
ccacggccagcccugauggu

SEQ ID NO: 213904 - RNA, 24 nt, Human
ccacggccagcccugaugguuggg

SEQ ID NO: 213905 - RNA, 21 nt, Human
cccaccaccgugccccugccu

SEQ ID NO: 213906 - RNA, 19 nt, Human
cccaggcugggaagaagcc

SEQ ID NO: 213907 - RNA, 22 nt, Human
cccauccucagcaguucaagaa

SEQ ID NO: 213908 - RNA, 20 nt, Human
ccccaaaaacacacacacac

SEQ ID NO: 213909 - RNA, 18 nt, Human
ccccaccaccgugccccu

SEQ ID NO: 213910 - RNA, 22 nt, Human
ccccaccccaaaaacacacaca

SEQ ID NO: 213911 - RNA, 18 nt, Human
ccccaucucuccaagaca

SEQ ID NO: 213912 - RNA, 21 nt, Human
ccccgcccccgcccgcgcccg

SEQ ID NO: 213913 - RNA, 19 nt, Human
ccccgccccgcccccgccc

SEQ ID NO: 213914 - RNA, 24 nt, Human
ccccgccccgcccccgcccgcgcc

SEQ ID NO: 213915 - RNA, 18 nt, Human
ccccggagcggagccggg

SEQ ID NO: 213916 - RNA, 26 nt, Human
ccccgggggcccgaggggcgcgccgg

SEQ ID NO: 213917 - RNA, 20 nt, Human
ccccugcucccaggucucug

SEQ ID NO: 213918 - RNA, 26 nt, Human
cccgcccgggccuccgcccgcccgcc

SEQ ID NO: 213919 - RNA, 22 nt, Human
cccgcucacaggcggcgccgag

SEQ ID NO: 213920 - RNA, 22 nt, Human
cccuccccaccccaaaaacaca

SEQ ID NO: 213921 - RNA, 18 nt, Human
cccucccuccccacccca

SEQ ID NO: 213922 - RNA, 22 nt, Human
cccucuucucucccucccuccc

SEQ ID NO: 213923 - RNA, 23 nt, Human
ccgagcugcgcuccccaccccug

SEQ ID NO: 213924 - RNA, 27 nt, Human
ccgcccccgcccgcgcccgcgcccgcc

SEQ ID NO: 213925 - RNA, 23 nt, Human
ccgccccgcccccgcccgcgccc

SEQ ID NO: 213926 - RNA, 22 nt, Human
ccgccccgccccgcccccgccc

SEQ ID NO: 213927 - RNA, 24 nt, Human
ccgccccgccccgcccccgcccgc

SEQ ID NO: 213928 - RNA, 20 nt, Human
ccgcccgcgcccgcgcccgc

SEQ ID NO: 213929 - RNA, 22 nt, Human
ccgcccgcgcccgcgcccgccc

SEQ ID NO: 213930 - RNA, 18 nt, Human
ccgcccgggccuccgccu

SEQ ID NO: 213931 - RNA, 20 nt, Human
ccuccccgccauuuccuccu

SEQ ID NO: 213932 - RNA, 20 nt, Human
ccuccgcccgcccgcccgcc

SEQ ID NO: 213933 - RNA, 22 nt, Human
ccuccgccgagcugcgcucccc

SEQ ID NO: 213934 - RNA, 21 nt, Human
ccucggccgcgggcccugcag

SEQ ID NO: 213935 - RNA, 21 nt, Human
cgagcugcgcuccccaccccu

SEQ ID NO: 213936 - RNA, 19 nt, Human
cgccaggaagggccgccgg

SEQ ID NO: 213937 - RNA, 18 nt, Human
cgcccgcgcccgcccggg

SEQ ID NO: 213938 - RNA, 20 nt, Human
cgccgagcugcgcuccccac

SEQ ID NO: 213939 - RNA, 18 nt, Human
cgccgagggccccggggg

SEQ ID NO: 213940 - RNA, 21 nt, Human
cgccgggagggcugccgccgg

SEQ ID NO: 213941 - RNA, 21 nt, Human
cgcuggagccccccggagcgg

SEQ ID NO: 213942 - RNA, 22 nt, Human
cggcgggcgcugcggcggggcc

SEQ ID NO: 213943 - RNA, 21 nt, Human
cgggcgggcaggcgggcaggu

SEQ ID NO: 213944 - RNA, 20 nt, Human
cggggccccgcgcucgcacc

SEQ ID NO: 213945 - RNA, 19 nt, Human
cuccacagcccaacagaau

SEQ ID NO: 213946 - RNA, 25 nt, Human
cuccccauccuuuccgcgucggggg

SEQ ID NO: 213947 - RNA, 22 nt, Human
cucccucccuccccaccccaaa

SEQ ID NO: 213948 - RNA, 19 nt, Human
cucggcaucugcagccuuc

SEQ ID NO: 213949 - RNA, 25 nt, Human
cugaaagccuuccccaucucuccaa

SEQ ID NO: 213950 - RNA, 18 nt, Human
cugcuccccucccuuggc

SEQ ID NO: 213951 - RNA, 22 nt, Human
cugcuccccucccuuggccucc

SEQ ID NO: 213952 - RNA, 19 nt, Human
cuggcugugcguggcuacg

SEQ ID NO: 213953 - RNA, 25 nt, Human
cugguugcucuaugaagcuguagaa

SEQ ID NO: 213954 - RNA, 18 nt, Human
cugugcguggcuacgugu

SEQ ID NO: 213955 - RNA, 20 nt, Human
gaagaagcccacccgggacu

SEQ ID NO: 213956 - RNA, 20 nt, Human
gaaugguggcugcucacccc

SEQ ID NO: 213957 - RNA, 18 nt, Human
gagcccucggccgcgggc

SEQ ID NO: 213958 - RNA, 18 nt, Human
gagcggcgguucggccgg

SEQ ID NO: 213959 - RNA, 18 nt, Human
gcaaaguugucuccagga

SEQ ID NO: 213960 - RNA, 27 nt, Human
gcaggaugcgucuggcugugcguggaa

SEQ ID NO: 213961 - RNA, 18 nt, Human
gcaucaaauuuagccccc

SEQ ID NO: 213962 - RNA, 25 nt, Human
gccaccuccccgccauuuccuccug

SEQ ID NO: 213963 - RNA, 23 nt, Human
gcgcuggagccccccggagcgga

SEQ ID NO: 213964 - RNA, 18 nt, Human
gcgggcaguggcgcggag

SEQ ID NO: 213965 - RNA, 29 nt, Human
gcggggccccgcgcucgcaccugagcgcc

SEQ ID NO: 213966 - RNA, 21 nt, Human
gcuaugcgggcgggcgggcag

SEQ ID NO: 213967 - RNA, 22 nt, Human
gcugcggcgggcgcugcggcgg

SEQ ID NO: 213968 - RNA, 19 nt, Human
ggaaggacaggcuccccag

SEQ ID NO: 213969 - RNA, 22 nt, Human
gggaagguggcgaaagagcggg

SEQ ID NO: 213970 - RNA, 20 nt, Human
gggcaggugagugggcaggg

SEQ ID NO: 213971 - RNA, 24 nt, Human
gggcccgaggggcgcgccgggcgg

SEQ ID NO: 213972 - RNA, 18 nt, Human
gggcggggcggaggucgc

SEQ ID NO: 213973 - RNA, 23 nt, Human
ggggccggccgggccucgggggu

SEQ ID NO: 213974 - RNA, 18 nt, Human
ggggcgcgccgggcgggg

SEQ ID NO: 213975 - RNA, 19 nt, Human
gugcuaugcgggcgggcgg

SEQ ID NO: 213976 - RNA, 23 nt, Human
guggaaugguggcugcucacccc

SEQ ID NO: 213977 - RNA, 21 nt, Human
guggccgggccagcuggugga

SEQ ID NO: 213978 - RNA, 19 nt, Human
uaaaagccacggggcacac

SEQ ID NO: 213979 - RNA, 28 nt, Human
uaaaucagugcaaacauuaguuaaagag

SEQ ID NO: 213980 - RNA, 18 nt, Human
uagcuaagcugccauuug

SEQ ID NO: 213981 - RNA, 18 nt, Human
uaggcugcuccccucccu

SEQ ID NO: 213982 - RNA, 18 nt, Human
ucacacggcaaaguuguc

SEQ ID NO: 213983 - RNA, 20 nt, Human
ucagcugaaagccuucccca

SEQ ID NO: 213984 - RNA, 18 nt, Human
uccccaaaccaguccuag

SEQ ID NO: 213985 - RNA, 22 nt, Human
uccccaaaccaguccuagagga

SEQ ID NO: 213986 - RNA, 18 nt, Human
uccccaccccaaaaacac

SEQ ID NO: 213987 - RNA, 20 nt, Human
ucccgcgcggcagggaaggg

SEQ ID NO: 213988 - RNA, 21 nt, Human
ucccucccuccccaccccaaa

SEQ ID NO: 213989 - RNA, 22 nt, Human
ucccucccuccccaccccaaaa

SEQ ID NO: 213990 - RNA, 21 nt, Human
uccgccgagcugcgcucccca

SEQ ID NO: 213991 - RNA, 24 nt, Human
uccgccgagcugcgcuccccaccc

SEQ ID NO: 213992 - RNA, 22 nt, Human
uccgcugaggggacacccccca

SEQ ID NO: 213993 - RNA, 18 nt, Human
uccgggcgcgccgccccg

SEQ ID NO: 213994 - RNA, 24 nt, Human
uccuggaggcugcugugugggugg

SEQ ID NO: 213995 - RNA, 21 nt, Human
ucgcuuaaaaaagaagcaaag

SEQ ID NO: 213996 - RNA, 23 nt, Human
ucgcuuaaaaaagaagcaaagga

SEQ ID NO: 213997 - RNA, 21 nt, Human
ucggcgcucggccaagggcca

SEQ ID NO: 213998 - RNA, 23 nt, Human
ucgggggccccgcagccccguag

SEQ ID NO: 213999 - RNA, 18 nt, Human
ucugacggguuguguccu

SEQ ID NO: 214000 - RNA, 26 nt, Human
ucugcagccuucuccccauccuuucc

SEQ ID NO: 214001 - RNA, 25 nt, Human
ucugcuuuuccucuccguggcucuc

SEQ ID NO: 214002 - RNA, 23 nt, Human
ugagcgccucgcccucacugccu

SEQ ID NO: 214003 - RNA, 22 nt, Human
ugcagccuucuccccauccuuu

SEQ ID NO: 214004 - RNA, 18 nt, Human
ugccccugcucccagguc

SEQ ID NO: 214005 - RNA, 22 nt, Human
ugccccugcucccaggucucug

SEQ ID NO: 214006 - RNA, 23 nt, Human
ugccgcacgggcgucucggggcg

SEQ ID NO: 214007 - RNA, 20 nt, Human
ugcuguguggguggcaggau

SEQ ID NO: 214008 - RNA, 20 nt, Human
uggagaucaguuaaagcauc

SEQ ID NO: 214009 - RNA, 22 nt, Human
uggcacuuggacaucuagaggg

SEQ ID NO: 214010 - RNA, 19 nt, Human
uggcgcggagcaagcuugg

SEQ ID NO: 214011 - RNA, 22 nt, Human
uggcugugcguggcuacgugug

SEQ ID NO: 214012 - RNA, 19 nt, Human
ugggaagaagcagacaucg

SEQ ID NO: 214013 - RNA, 24 nt, Human
uggguggcaggaugcgucuggcug

SEQ ID NO: 214014 - RNA, 19 nt, Human
ugguaaaagccacggggca

SEQ ID NO: 214015 - RNA, 22 nt, Human
uguagaaaaauaucucaggccg

SEQ ID NO: 214016 - RNA, 21 nt, Human
ugucagaggcccaagccacaa

SEQ ID NO: 214017 - RNA, 20 nt, Human
ugugugcucgggaaggcgca

SEQ ID NO: 214018 - RNA, 21 nt, Human
uucucucccucccuccccacc

SEQ ID NO: 214019 - RNA, 25 nt, Human
uuuuuuuucaaauggcaguuucuga

SEQ ID NO: 214020 - RNA, 21 nt, Human
aacagcuguggucucaacucu

SEQ ID NO: 214021 - RNA, 18 nt, Human
aaccaugacaccuagaca

SEQ ID NO: 214022 - RNA, 19 nt, Human
aagggccucucuggagauc

SEQ ID NO: 214023 - RNA, 18 nt, Human
aauguaggcagagcuggg

SEQ ID NO: 214024 - RNA, 18 nt, Human
accuagacagagagggaa

SEQ ID NO: 214025 - RNA, 18 nt, Human
agaaccaugacaccuaga

SEQ ID NO: 214026 - RNA, 21 nt, Human
agaaggacaggggcucacaac

SEQ ID NO: 214027 - RNA, 19 nt, Human
agaaguguguguccagcug

SEQ ID NO: 214028 - RNA, 23 nt, Human
agacagagagggaacagggauaa

SEQ ID NO: 214029 - RNA, 24 nt, Human
agagaaaggcagagaaggacaaaa

SEQ ID NO: 214030 - RNA, 18 nt, Human
agagggcaggggagcuca

SEQ ID NO: 214031 - RNA, 21 nt, Human
agaggguaguggucaggaaga

SEQ ID NO: 214032 - RNA, 18 nt, Human
agccucuauuuugggcag

SEQ ID NO: 214033 - RNA, 20 nt, Human
aggaagauggcacagugacu

SEQ ID NO: 214034 - RNA, 28 nt, Human
aggaaggcauaguggguuauggggucua

SEQ ID NO: 214035 - RNA, 29 nt, Human
aggacaaaaaauggaugaagggggacccc

SEQ ID NO: 214036 - RNA, 26 nt, Human
aggcagagcuggggccauggaagggg

SEQ ID NO: 214037 - RNA, 21 nt, Human
agggacacagaauagccacag

SEQ ID NO: 214038 - RNA, 24 nt, Human
auaagaugcucaggaagagggagu

SEQ ID NO: 214039 - RNA, 24 nt, Human
caaaaaauggaugaagguaugcaa

SEQ ID NO: 214040 - RNA, 24 nt, Human
caacucuguccuggcugccagagg

SEQ ID NO: 214041 - RNA, 23 nt, Human
cagaauagccacaguuacacaga

SEQ ID NO: 214042 - RNA, 22 nt, Human
cagcagugaucuaaacuuuggu

SEQ ID NO: 214043 - RNA, 21 nt, Human
caggcaagucaccccuuaagg

SEQ ID NO: 214044 - RNA, 27 nt, Human
caugcaaccuugggcugcccauaccac

SEQ ID NO: 214045 - RNA, 22 nt, Human
ccacaguuacacagaaccauga

SEQ ID NO: 214046 - RNA, 21 nt, Human
ccuuaagggcauagagaaagg

SEQ ID NO: 214047 - RNA, 21 nt, Human
cuaagaaggacaggggcucac

SEQ ID NO: 214048 - RNA, 18 nt, Human
gaagaaguguguguccag

SEQ ID NO: 214049 - RNA, 18 nt, Human
gaagccagagggcagggg

SEQ ID NO: 214050 - RNA, 24 nt, Human
gaauagccacaguuacacagaacc

SEQ ID NO: 214051 - RNA, 22 nt, Human
gagaaaggcagagaaggacaaa

SEQ ID NO: 214052 - RNA, 24 nt, Human
gagcucaggcaagucaccccuuaa

SEQ ID NO: 214053 - RNA, 22 nt, Human
gcgggauggacuagcgggaugg

SEQ ID NO: 214054 - RNA, 21 nt, Human
gggaacagggauaagaaaugc

SEQ ID NO: 214055 - RNA, 19 nt, Human
gggcucagggucucaacag

SEQ ID NO: 214056 - RNA, 19 nt, Human
gugacuugcuuuagaugaa

SEQ ID NO: 214057 - RNA, 20 nt, Human
uaagccucuauuuugggcag

SEQ ID NO: 214058 - RNA, 24 nt, Human
uagaaaggacaggaaggcauagug

SEQ ID NO: 214059 - RNA, 20 nt, Human
uaggcagagcuggggccaug

SEQ ID NO: 214060 - RNA, 19 nt, Human
ucaggaagagggaguccac

SEQ ID NO: 214061 - RNA, 22 nt, Human
uccaaagaagggccucucugga

SEQ ID NO: 214062 - RNA, 22 nt, Human
ucccuggaguggggcuagcggg

SEQ ID NO: 214063 - RNA, 24 nt, Human
ucucaaggaagugcacuucuguag

SEQ ID NO: 214064 - RNA, 20 nt, Human
ucuguccuggcugccagagg

SEQ ID NO: 214065 - RNA, 25 nt, Human
ugagcuaagggugucuuugccuggg

SEQ ID NO: 214066 - RNA, 24 nt, Human
ugcuggggaaggcccuucuugagc

SEQ ID NO: 214067 - RNA, 18 nt, Human
uggaaggggguagccagg

SEQ ID NO: 214068 - RNA, 23 nt, Human
uggaaggggguagccagguagug

SEQ ID NO: 214069 - RNA, 20 nt, Human
uggacagagaaugaggucau

SEQ ID NO: 214070 - RNA, 19 nt, Human
uggaguggggaccauugag

SEQ ID NO: 214071 - RNA, 20 nt, Human
uggggaccauugaguagaaa

SEQ ID NO: 214072 - RNA, 18 nt, Human
ugguuggagaugggucug

SEQ ID NO: 214073 - RNA, 22 nt, Human
ugucuuugccugggaaccagau

SEQ ID NO: 214074 - RNA, 19 nt, Human
aaaaaaaaaaaaaauuagc

SEQ ID NO: 214075 - RNA, 21 nt, Human
aaaaaauuccccaauauacca

SEQ ID NO: 214076 - RNA, 18 nt, Human
aacacggugaaaccccau

SEQ ID NO: 214077 - RNA, 20 nt, Human
aacacggugaaaccccauau

SEQ ID NO: 214078 - RNA, 21 nt, Human
aacacggugaaaccccauauc

SEQ ID NO: 214079 - RNA, 21 nt, Human
aacacggugaaaccccauauc

SEQ ID NO: 214080 - RNA, 18 nt, Human
aacagguuauauaacaag

SEQ ID NO: 214081 - RNA, 24 nt, Human
aacaguggcucagaccaaguauga

SEQ ID NO: 214082 - RNA, 20 nt, Human
aauuaccuuuuacagacaac

SEQ ID NO: 214083 - RNA, 20 nt, Human
acagagccagacuccgucuc

SEQ ID NO: 214084 - RNA, 23 nt, Human
acagagccagacuccgucucaaa

SEQ ID NO: 214085 - RNA, 24 nt, Human
acagagccagacuccgucucaaaa

SEQ ID NO: 214086 - RNA, 19 nt, Human
acagagcgaaacuccgucu

SEQ ID NO: 214087 - RNA, 20 nt, Human
acagagcgaaacuccgucuc

SEQ ID NO: 214088 - RNA, 23 nt, Human
acagagcgaaacuccgucucaaa

SEQ ID NO: 214089 - RNA, 23 nt, Human
accccaagagccccuguacagca

SEQ ID NO: 214090 - RNA, 18 nt, Human
accucuggcuggcccucc

SEQ ID NO: 214091 - RNA, 24 nt, Human
acgcagagcuugcagugagccgag

SEQ ID NO: 214092 - RNA, 24 nt, Human
acugcacuccagccugggcgacag

SEQ ID NO: 214093 - RNA, 26 nt, Human
acugcacuccagccugggcgacagag

SEQ ID NO: 214094 - RNA, 23 nt, Human
agacaacaguggcucagaccaag

SEQ ID NO: 214095 - RNA, 24 nt, Human
agagcuugcagugagccgagaucg

SEQ ID NO: 214096 - RNA, 22 nt, Human
agcaagcugagcuguguccugg

SEQ ID NO: 214097 - RNA, 24 nt, Human
agcacuuugggaggccgagguggg

SEQ ID NO: 214098 - RNA, 20 nt, Human
agcagcuuaacuuuuucucu

SEQ ID NO: 214099 - RNA, 25 nt, Human
agccauguugagcugagccgaaccc

SEQ ID NO: 214100 - RNA, 23 nt, Human
agccgggcaugguggcgcgugcc

SEQ ID NO: 214101 - RNA, 22 nt, Human
agccugggcgacagagcgaaac

SEQ ID NO: 214102 - RNA, 24 nt, Human
agccugggcgacagagcgaaacuc

SEQ ID NO: 214103 - RNA, 24 nt, Human
agccugggugacagagccagacuc

SEQ ID NO: 214104 - RNA, 22 nt, Human
agcugagcuguguccuggcccc

SEQ ID NO: 214105 - RNA, 20 nt, Human
agcugggugugguggcgagc

SEQ ID NO: 214106 - RNA, 21 nt, Human
agcugguuauagaacauuccc

SEQ ID NO: 214107 - RNA, 22 nt, Human
agcugugcagccugcucucccu

SEQ ID NO: 214108 - RNA, 25 nt, Human
aggcaggagaauggcgucaacccag

SEQ ID NO: 214109 - RNA, 27 nt, Human
aggcaggagaauggcgucaacccagga

SEQ ID NO: 214110 - RNA, 24 nt, Human
aggcaggagaauggcgugaacccg

SEQ ID NO: 214111 - RNA, 21 nt, Human
aggcauggaucucugccuugg

SEQ ID NO: 214112 - RNA, 21 nt, Human
aggccgagguggguggaucac

SEQ ID NO: 214113 - RNA, 19 nt, Human
aggccucacagccugacca

SEQ ID NO: 214114 - RNA, 24 nt, Human
aggcggagcuugcagugagucgag

SEQ ID NO: 214115 - RNA, 19 nt, Human
aggcugaggcaggagaaug

SEQ ID NO: 214116 - RNA, 19 nt, Human
aggcugaggcaggagaaug

SEQ ID NO: 214117 - RNA, 24 nt, Human
agguggguggaucaccaggucagg

SEQ ID NO: 214118 - RNA, 24 nt, Human
aggugugugccugugcaccaaacc

SEQ ID NO: 214119 - RNA, 24 nt, Human
aucgcgccacugcacuccagccug

SEQ ID NO: 214120 - RNA, 23 nt, Human
auuaagcauguuccaugcaguuc

SEQ ID NO: 214121 - RNA, 21 nt, Human
auuaccuuuuacagacaacag

SEQ ID NO: 214122 - RNA, 18 nt, Human
auugcacucuagccuggg

SEQ ID NO: 214123 - RNA, 24 nt, Human
auugcacucuagccugggugacag

SEQ ID NO: 214124 - RNA, 21 nt, Human
caaaacggacagcuuuggcuc

SEQ ID NO: 214125 - RNA, 24 nt, Human
caacccaggacgcagagcuugcag

SEQ ID NO: 214126 - RNA, 19 nt, Human
caagagccccuguacagca

SEQ ID NO: 214127 - RNA, 21 nt, Human
caagagccccuguacagcauu

SEQ ID NO: 214128 - RNA, 22 nt, Human
caauauaccacuguccagaggu

SEQ ID NO: 214129 - RNA, 23 nt, Human
caauuaccuuuuacagacaacag

SEQ ID NO: 214130 - RNA, 18 nt, Human
cacacuguccacccugcc

SEQ ID NO: 214131 - RNA, 20 nt, Human
cacagccugaccagaccucu

SEQ ID NO: 214132 - RNA, 24 nt, Human
cacgccuguaaucccagcacuuug

SEQ ID NO: 214133 - RNA, 24 nt, Human
cacuccagccugggcgacagagcg

SEQ ID NO: 214134 - RNA, 22 nt, Human
cacucuagccugggugacagag

SEQ ID NO: 214135 - RNA, 19 nt, Human
cacugcacuccagccuggg

SEQ ID NO: 214136 - RNA, 20 nt, Human
cacugcacuccagccugggc

SEQ ID NO: 214137 - RNA, 22 nt, Human
cacugcacuccagccugggcga

SEQ ID NO: 214138 - RNA, 23 nt, Human
cacugcacuccagccugggcgac

SEQ ID NO: 214139 - RNA, 24 nt, Human
cacugcacuccagccugggcgaca

SEQ ID NO: 214140 - RNA, 24 nt, Human
cagcacuuugggaggccgaggugg

SEQ ID NO: 214141 - RNA, 24 nt, Human
cagcuacacgggaggcugaggcag

SEQ ID NO: 214142 - RNA, 24 nt, Human
cagcuacucaggaggcugaggcag

SEQ ID NO: 214143 - RNA, 19 nt, Human
cauugcacucuagccuggg

SEQ ID NO: 214144 - RNA, 19 nt, Human
cauugcacucuagccuggg

SEQ ID NO: 214145 - RNA, 21 nt, Human
cauugcacucuagccugggug

SEQ ID NO: 214146 - RNA, 22 nt, Human
cauugcacucuagccuggguga

SEQ ID NO: 214147 - RNA, 24 nt, Human
cauugcacucuagccugggugaca

SEQ ID NO: 214148 - RNA, 25 nt, Human
cauugcacucuagccugggugacag

SEQ ID NO: 214149 - RNA, 20 nt, Human
ccacugcacuccagccuggg

SEQ ID NO: 214150 - RNA, 21 nt, Human
ccacugcacuccagccugggc

SEQ ID NO: 214151 - RNA, 21 nt, Human
ccacugcacuccagccugggc

SEQ ID NO: 214152 - RNA, 23 nt, Human
ccacugcacuccagccugggcga

SEQ ID NO: 214153 - RNA, 24 nt, Human
ccacugcacuccagccugggcgac

SEQ ID NO: 214154 - RNA, 22 nt, Human
ccagagguuuccuuguccuuaa

SEQ ID NO: 214155 - RNA, 23 nt, Human
ccauguaccuuacaccugggucu

SEQ ID NO: 214156 - RNA, 20 nt, Human
ccauugcacucuagccuggg

SEQ ID NO: 214157 - RNA, 21 nt, Human
ccauugcacucuagccugggu

SEQ ID NO: 214158 - RNA, 21 nt, Human
ccauugcacucuagccugggu

SEQ ID NO: 214159 - RNA, 22 nt, Human
ccauugcacucuagccugggug

SEQ ID NO: 214160 - RNA, 23 nt, Human
ccauugcacucuagccuggguga

SEQ ID NO: 214161 - RNA, 24 nt, Human
ccauugcacucuagccugggugac

SEQ ID NO: 214162 - RNA, 21 nt, Human
cccaauauaccacuguccaga

SEQ ID NO: 214163 - RNA, 23 nt, Human
ccccuguacagcauuagcaggac

SEQ ID NO: 214164 - RNA, 24 nt, Human
ccuggccccuuccugguccccugg

SEQ ID NO: 214165 - RNA, 19 nt, Human
ccuggccccuuccugucca

SEQ ID NO: 214166 - RNA, 24 nt, Human
ccuggcuaacacggugaaacccca

SEQ ID NO: 214167 - RNA, 24 nt, Human
ccuggcugggugcgguggcucacg

SEQ ID NO: 214168 - RNA, 23 nt, Human
ccugggcgacagagcgaaacucc

SEQ ID NO: 214169 - RNA, 22 nt, Human
ccugggugacagagccagacuc

SEQ ID NO: 214170 - RNA, 22 nt, Human
ccuguaaucccagcacuuuggg

SEQ ID NO: 214171 - RNA, 21 nt, Human
ccuguagucccagcuacacgg

SEQ ID NO: 214172 - RNA, 21 nt, Human
ccuguagucccagcuacucag

SEQ ID NO: 214173 - RNA, 22 nt, Human
ccuguagucccagcuacucagg

SEQ ID NO: 214174 - RNA, 24 nt, Human
cgagaccauccuggcuaacacggu

SEQ ID NO: 214175 - RNA, 24 nt, Human
cgagaucgcgccacugcacuccag

SEQ ID NO: 214176 - RNA, 24 nt, Human
cgagguggguggaucaccagguca

SEQ ID NO: 214177 - RNA, 23 nt, Human
cgccuguaaucccagcacuuugg

SEQ ID NO: 214178 - RNA, 22 nt, Human
cuaaaaccacgucccugggugc

SEQ ID NO: 214179 - RNA, 22 nt, Human
cucacgccuguaaucccagcac

SEQ ID NO: 214180 - RNA, 24 nt, Human
cucacgccuguaaucccagcacuu

SEQ ID NO: 214181 - RNA, 26 nt, Human
cuccgucucaaaaaaaaaaaaaaaau

SEQ ID NO: 214182 - RNA, 18 nt, Human
cuccuguagucccagcua

SEQ ID NO: 214183 - RNA, 24 nt, Human
cuccuguagucccagcuacucagg

SEQ ID NO: 214184 - RNA, 24 nt, Human
cucugccuuggccuauuccuugac

SEQ ID NO: 214185 - RNA, 23 nt, Human
cuggcuaacacggugaaacccca

SEQ ID NO: 214186 - RNA, 24 nt, Human
cuugcagugagccgagaucgugcc

SEQ ID NO: 214187 - RNA, 19 nt, Human
cuugcagugagucgagauc

SEQ ID NO: 214188 - RNA, 21 nt, Human
cuugcagugagucgagaucgc

SEQ ID NO: 214189 - RNA, 21 nt, Human
gacagagcgaaacuccgucuc

SEQ ID NO: 214190 - RNA, 20 nt, Human
gacagcuuuggcucucucuc

SEQ ID NO: 214191 - RNA, 20 nt, Human
gaccaaguaugaacuuacac

SEQ ID NO: 214192 - RNA, 18 nt, Human
gagcuugcagugagccga

SEQ ID NO: 214193 - RNA, 23 nt, Human
gagcuugcagugagucgagaucg

SEQ ID NO: 214194 - RNA, 24 nt, Human
gaucaccaggucaggagaucgaga

SEQ ID NO: 214195 - RNA, 20 nt, Human
gaugaaauacaggacaccca

SEQ ID NO: 214196 - RNA, 24 nt, Human
gcacuccagccugggcgacagagc

SEQ ID NO: 214197 - RNA, 24 nt, Human
gcacucuagccugggugacagagc

SEQ ID NO: 214198 - RNA, 19 nt, Human
gcagagcuugcagugagcc

SEQ ID NO: 214199 - RNA, 22 nt, Human
gccacugcacuccagccugggc

SEQ ID NO: 214200 - RNA, 24 nt, Human
gccacugcacuccagccugggcga

SEQ ID NO: 214201 - RNA, 24 nt, Human
gccauugcacucuagccuggguga

SEQ ID NO: 214202 - RNA, 20 nt, Human
gcgguggcucacgccuguaa

SEQ ID NO: 214203 - RNA, 18 nt, Human
gcuaacacggugaaaccc

SEQ ID NO: 214204 - RNA, 21 nt, Human
gcucucucucucuuacugggc

SEQ ID NO: 214205 - RNA, 22 nt, Human
gcugaggcaggagaauggcgug

SEQ ID NO: 214206 - RNA, 18 nt, Human
gcuuuggcucucucucuc

SEQ ID NO: 214207 - RNA, 21 nt, Human
gcuuuggcucucucucucuua

SEQ ID NO: 214208 - RNA, 24 nt, Human
ggagcuugcagugagucgagaucg

SEQ ID NO: 214209 - RNA, 19 nt, Human
ggcugggugcgguggcuca

SEQ ID NO: 214210 - RNA, 19 nt, Human
ggguggaucaccaggucag

SEQ ID NO: 214211 - RNA, 23 nt, Human
gguggcucacgccuguaauccca

SEQ ID NO: 214212 - RNA, 24 nt, Human
gguggcucacgccuguaaucccag

SEQ ID NO: 214213 - RNA, 22 nt, Human
gugccuguagucccagcuacac

SEQ ID NO: 214214 - RNA, 24 nt, Human
uaacacggugaaaccccauaucua

SEQ ID NO: 214215 - RNA, 19 nt, Human
uacacgggaggcugaggca

SEQ ID NO: 214216 - RNA, 24 nt, Human
uagaauucuaaaacaaggauguua

SEQ ID NO: 214217 - RNA, 20 nt, Human
uaguauauuagaaaauggaa

SEQ ID NO: 214218 - RNA, 22 nt, Human
uauuucauuuaucuaaaauuca

SEQ ID NO: 214219 - RNA, 22 nt, Human
ucaaaaaaaaaaaaaaaauucc

SEQ ID NO: 214220 - RNA, 25 nt, Human
ucaaauaaaaaaaaaaaaaaaaaaa

SEQ ID NO: 214221 - RNA, 22 nt, Human
ucacacuguccacccugccuug

SEQ ID NO: 214222 - RNA, 18 nt, Human
ucaccaggucaggagauc

SEQ ID NO: 214223 - RNA, 24 nt, Human
ucaccaggucaggagaucgagacc

SEQ ID NO: 214224 - RNA, 24 nt, Human
ucagaagauggaauguuaguguug

SEQ ID NO: 214225 - RNA, 24 nt, Human
ucagaccaaguaugaacuuacaca

SEQ ID NO: 214226 - RNA, 22 nt, Human
ucagagguuuccuuguccuuaa

SEQ ID NO: 214227 - RNA, 22 nt, Human
uccagccugggcgacagagcga

SEQ ID NO: 214228 - RNA, 24 nt, Human
ucccugggugcuccacagucacac

SEQ ID NO: 214229 - RNA, 23 nt, Human
uccgucucaaaaaaaaaaaaaaa

SEQ ID NO: 214230 - RNA, 24 nt, Human
uccgucucaaaaaaaaaaaaaaaa

SEQ ID NO: 214231 - RNA, 24 nt, Human
uccgucucaaaaaaaaaaaaaaag

SEQ ID NO: 214232 - RNA, 23 nt, Human
ucgcgccacugcacuccagccug

SEQ ID NO: 214233 - RNA, 19 nt, Human
ucuacuaaaaauacaaaaa

SEQ ID NO: 214234 - RNA, 24 nt, Human
ucuagccugggugacagagccaga

SEQ ID NO: 214235 - RNA, 19 nt, Human
ucuggggacauacuuaacu

SEQ ID NO: 214236 - RNA, 24 nt, Human
ugagccgaaccccaagagccccug

SEQ ID NO: 214237 - RNA, 22 nt, Human
ugagccgagaucgugccauugc

SEQ ID NO: 214238 - RNA, 18 nt, Human
ugagcugagccgaacccc

SEQ ID NO: 214239 - RNA, 21 nt, Human
ugagcuguguccuggccccuu

SEQ ID NO: 214240 - RNA, 20 nt, Human
ugaggcaggagaauggcguc

SEQ ID NO: 214241 - RNA, 21 nt, Human
ugaggcaggagaauggcguca

SEQ ID NO: 214242 - RNA, 23 nt, Human
ugaggcaggagaauggcgugaac

SEQ ID NO: 214243 - RNA, 24 nt, Human
ugaggcaggagaauggcgugaacc

SEQ ID NO: 214244 - RNA, 25 nt, Human
ugaggcaggagaauggcgugaaccc

SEQ ID NO: 214245 - RNA, 22 nt, Human
ugagucgagaucgcgccacugc

SEQ ID NO: 214246 - RNA, 22 nt, Human
ugcacucuagccugggugacag

SEQ ID NO: 214247 - RNA, 24 nt, Human
ugcacucuagccugggugacagag

SEQ ID NO: 214248 - RNA, 21 nt, Human
ugccuguagucccagcuacac

SEQ ID NO: 214249 - RNA, 23 nt, Human
ugccuguagucccagcuacacgg

SEQ ID NO: 214250 - RNA, 23 nt, Human
ugccuguagucccagcuacacgg

SEQ ID NO: 214251 - RNA, 24 nt, Human
ugccuguagucccagcuacacggg

SEQ ID NO: 214252 - RNA, 24 nt, Human
ugccuuggcugcuugagcccgugg

SEQ ID NO: 214253 - RNA, 18 nt, Human
uggaggugugugccugug

SEQ ID NO: 214254 - RNA, 19 nt, Human
uggccuauuccuugaccaa

SEQ ID NO: 214255 - RNA, 24 nt, Human
uggcgcgugccuguagucccagcu

SEQ ID NO: 214256 - RNA, 21 nt, Human
uggcgucaacccaggacgcag

SEQ ID NO: 214257 - RNA, 22 nt, Human
uggcucacgccuguaaucccag

SEQ ID NO: 214258 - RNA, 24 nt, Human
uggcucacgccuguaaucccagca

SEQ ID NO: 214259 - RNA, 23 nt, Human
uggcugggugcgguggcucacgc

SEQ ID NO: 214260 - RNA, 23 nt, Human
ugggaggccgagguggguggauc

SEQ ID NO: 214261 - RNA, 24 nt, Human
ugggaggccgagguggguggauca

SEQ ID NO: 214262 - RNA, 20 nt, Human
ugggcgugagcaagcugagc

SEQ ID NO: 214263 - RNA, 24 nt, Human
ugguggcgcgugccuguaguccca

SEQ ID NO: 214264 - RNA, 22 nt, Human
ugugccugugcaccaaacccac

SEQ ID NO: 214265 - RNA, 21 nt, Human
uguugagcugagccgaacccc

SEQ ID NO: 214266 - RNA, 24 nt, Human
uuagccgggcaugguggcgcgugc

SEQ ID NO: 214267 - RNA, 18 nt, Human
uuagcugggugugguggc

SEQ ID NO: 214268 - RNA, 18 nt, Human
uuauagaacauucccccu

SEQ ID NO: 214269 - RNA, 18 nt, Human
uugcagugagccgagauc

SEQ ID NO: 214270 - RNA, 21 nt, Human
uugcagugagccgagaucgug

SEQ ID NO: 214271 - RNA, 22 nt, Human
uugcagugagccgagaucgugc

SEQ ID NO: 214272 - RNA, 18 nt, Human
uugcagugagucgagauc

SEQ ID NO: 214273 - RNA, 19 nt, Human
uugcagugagucgagaucg

SEQ ID NO: 214274 - RNA, 22 nt, Human
uugcagugagucgagaucgcgc

SEQ ID NO: 214275 - RNA, 25 nt, Human
uugggaggccgagguggguggauca

SEQ ID NO: 214276 - RNA, 19 nt, Human
uuuacagacaacaguggcu

SEQ ID NO: 214277 - RNA, 19 nt, Human
uuuuccuuuacagagcugg

SEQ ID NO: 214278 - RNA, 19 nt, Human
agcaggaggcagcagccuu

SEQ ID NO: 214279 - RNA, 23 nt, Human
aggacaaagccauccucaaaaga

SEQ ID NO: 214280 - RNA, 24 nt, Human
aggaggaggcgcggcccggcggga

SEQ ID NO: 214281 - RNA, 25 nt, Human
caaaagacagagauaaccgaaacag

SEQ ID NO: 214282 - RNA, 23 nt, Human
caaagccauccucaaaagacaga

SEQ ID NO: 214283 - RNA, 22 nt, Human
cagcuaagccggggaugaggac

SEQ ID NO: 214284 - RNA, 22 nt, Human
caggaggaggaggaggcgcggc

SEQ ID NO: 214285 - RNA, 20 nt, Human
ccucaaaagaggaaggugaa

SEQ ID NO: 214286 - RNA, 20 nt, Human
cucaaaagacagagauaacc

SEQ ID NO: 214287 - RNA, 19 nt, Human
cucaaaagaggaaggugaa

SEQ ID NO: 214288 - RNA, 25 nt, Human
gaaaaauacuccucaaaagaggaag

SEQ ID NO: 214289 - RNA, 19 nt, Human
gaauacauaauggaaaaau

SEQ ID NO: 214290 - RNA, 18 nt, Human
gaaugucauuuauugaaa

SEQ ID NO: 214291 - RNA, 21 nt, Human
gaggacagagcaggaggcagc

SEQ ID NO: 214292 - RNA, 19 nt, Human
gaggacgaggguuggggag

SEQ ID NO: 214293 - RNA, 20 nt, Human
gcagcugcugguggaauugg

SEQ ID NO: 214294 - RNA, 21 nt, Human
gcgcagaggacgaggguuggg

SEQ ID NO: 214295 - RNA, 19 nt, Human
gcggggagcaggaggagga

SEQ ID NO: 214296 - RNA, 19 nt, Human
ggaugaggacagagcagga

SEQ ID NO: 214297 - RNA, 22 nt, Human
gggagcaggaggaggaggaggc

SEQ ID NO: 214298 - RNA, 20 nt, Human
gggaugaggacagagcagga

SEQ ID NO: 214299 - RNA, 20 nt, Human
aaaccaauccuucagucucc

SEQ ID NO: 214300 - RNA, 19 nt, Human
aagaacacaaaauaaacca

SEQ ID NO: 214301 - RNA, 22 nt, Human
agucggccugcggcccggccuc

SEQ ID NO: 214302 - RNA, 21 nt, Human
cagcagcagcagcgacgcgcg

SEQ ID NO: 214303 - RNA, 20 nt, Human
cagcagcagcgacgcgcgcg

SEQ ID NO: 214304 - RNA, 21 nt, Human
cagcccccgcugucccgccgg

SEQ ID NO: 214305 - RNA, 24 nt, Human
cccccgcugucccgccggcuggcg

SEQ ID NO: 214306 - RNA, 23 nt, Human
ccccgccagcccccgcugucccg

SEQ ID NO: 214307 - RNA, 23 nt, Human
cccgccagcccccgcugucccgc

SEQ ID NO: 214308 - RNA, 19 nt, Human
ccggcccccgccagccccc

SEQ ID NO: 214309 - RNA, 22 nt, Human
cgccagagccccgcagcagcag

SEQ ID NO: 214310 - RNA, 26 nt, Human
cgccagagccccgcagcagcagcagc

SEQ ID NO: 214311 - RNA, 20 nt, Human
cuccccggcccccgccagcc

SEQ ID NO: 214312 - RNA, 22 nt, Human
cuccccggcccccgccagcccc

SEQ ID NO: 214313 - RNA, 20 nt, Human
cuggcacuuuuguuuuucuu

SEQ ID NO: 214314 - RNA, 22 nt, Human
gaacacaaaauaaaccaauccu

SEQ ID NO: 214315 - RNA, 19 nt, Human
gacaucuucuggcacuuuu

SEQ ID NO: 214316 - RNA, 20 nt, Human
gaugaugugcuucuugaucc

SEQ ID NO: 214317 - RNA, 22 nt, Human
gccagagccccgcagcagcagc

SEQ ID NO: 214318 - RNA, 23 nt, Human
ucauuggugaugaugugcuucuu

SEQ ID NO: 214319 - RNA, 21 nt, Human
ucuggcacuuuuguuuuucuu

SEQ ID NO: 214320 - RNA, 26 nt, Human
uggcacuuuuguuuuucuugugacuc

SEQ ID NO: 214321 - RNA, 19 nt, Human
uggcuggacaucuucuggc

SEQ ID NO: 214322 - RNA, 20 nt, Human
uggcuggacaucuucuggca

SEQ ID NO: 214323 - RNA, 23 nt, Human
uguccaaauccaucaucuggcgc

SEQ ID NO: 214324 - RNA, 18 nt, Human
uuagaggaaaccgugugu

SEQ ID NO: 214325 - RNA, 24 nt, Human
aaaagacagacaaacgguuuacaa

SEQ ID NO: 214326 - RNA, 23 nt, Human
aaacaguaacaaaagacagacaa

SEQ ID NO: 214327 - RNA, 22 nt, Human
aaccacagcagcgacacggacc

SEQ ID NO: 214328 - RNA, 19 nt, Human
aaccgcggacagcggcaac

SEQ ID NO: 214329 - RNA, 22 nt, Human
aagcagcugcagugugauucaa

SEQ ID NO: 214330 - RNA, 19 nt, Human
acacaaacacccagcuaau

SEQ ID NO: 214331 - RNA, 23 nt, Human
acacagcugagcuccuagacucc

SEQ ID NO: 214332 - RNA, 22 nt, Human
acacccaggcuagcuauaaacu

SEQ ID NO: 214333 - RNA, 20 nt, Human
acagggaggcucacgaagug

SEQ ID NO: 214334 - RNA, 19 nt, Human
acagugagguauguggggc

SEQ ID NO: 214335 - RNA, 22 nt, Human
accaugugacacggcgcagagu

SEQ ID NO: 214336 - RNA, 22 nt, Human
agacagacaaacgguuuacaaa

SEQ ID NO: 214337 - RNA, 22 nt, Human
agacagacccccuugccaugcu

SEQ ID NO: 214338 - RNA, 19 nt, Human
agagacagacccccuugcc

SEQ ID NO: 214339 - RNA, 18 nt, Human
agccccuggacacaccuc

SEQ ID NO: 214340 - RNA, 18 nt, Human
agcgacacggaccugugc

SEQ ID NO: 214341 - RNA, 22 nt, Human
agcgagcccacguuggccgccc

SEQ ID NO: 214342 - RNA, 19 nt, Human
agcggcaaccacagcagcg

SEQ ID NO: 214343 - RNA, 24 nt, Human
auaaaacaguaacaaaagacagac

SEQ ID NO: 214344 - RNA, 18 nt, Human
cacauucaguucuuaaua

SEQ ID NO: 214345 - RNA, 22 nt, Human
caccacggucaauuuuauugcu

SEQ ID NO: 214346 - RNA, 19 nt, Human
cagaacgaccaacagcuga

SEQ ID NO: 214347 - RNA, 18 nt, Human
caggcuagcuauaaacuu

SEQ ID NO: 214348 - RNA, 18 nt, Human
caucggcagagacagacc

SEQ ID NO: 214349 - RNA, 23 nt, Human
ccaacagcugaaacccgcggggc

SEQ ID NO: 214350 - RNA, 19 nt, Human
ccagccccuggacacaccu

SEQ ID NO: 214351 - RNA, 22 nt, Human
ccccucagaacgaccaacagcu

SEQ ID NO: 214352 - RNA, 21 nt, Human
cccgcggggcggacuccgugu

SEQ ID NO: 214353 - RNA, 18 nt, Human
cggcgcagagucagugcc

SEQ ID NO: 214354 - RNA, 20 nt, Human
cgucucggcuuccccagccc

SEQ ID NO: 214355 - RNA, 21 nt, Human
cucagggccacgcugccggcc

SEQ ID NO: 214356 - RNA, 22 nt, Human
cucugugcugaagaagccccuc

SEQ ID NO: 214357 - RNA, 23 nt, Human
cugaaacccgcggggcggacucc

SEQ ID NO: 214358 - RNA, 31 nt, Human
cugugacuuauuuaaaaaaaaaaaaaaaccc

SEQ ID NO: 214359 - RNA, 24 nt, Human
cuuccccagccccuggacacaccu

SEQ ID NO: 214360 - RNA, 20 nt, Human
cuugccaugcucagggccaa

SEQ ID NO: 214361 - RNA, 23 nt, Human
gacacaguggggggucucugugc

SEQ ID NO: 214362 - RNA, 22 nt, Human
gagacagugagguauguggggc

SEQ ID NO: 214363 - RNA, 20 nt, Human
gcagcgacacggaccugugc

SEQ ID NO: 214364 - RNA, 21 nt, Human
gcagcgacacggaccugugcu

SEQ ID NO: 214365 - RNA, 24 nt, Human
gcagugguaguauuuaucccacac

SEQ ID NO: 214366 - RNA, 24 nt, Human
gcccgucucggcuuccccagcccc

SEQ ID NO: 214367 - RNA, 23 nt, Human
ggacacaccuccaccuggcagag

SEQ ID NO: 214368 - RNA, 22 nt, Human
guccucucguggcgcuggcauc

SEQ ID NO: 214369 - RNA, 21 nt, Human
uaaaaauggaaagcagcugca

SEQ ID NO: 214370 - RNA, 22 nt, Human
uaaaagguacacccaggcuagc

SEQ ID NO: 214371 - RNA, 19 nt, Human
uaaaauucccgaagccagu

SEQ ID NO: 214372 - RNA, 21 nt, Human
uaaaauucccgaagccaguuc

SEQ ID NO: 214373 - RNA, 18 nt, Human
uaacguaggauacuuggc

SEQ ID NO: 214374 - RNA, 21 nt, Human
uacacagaagaacggcauggg

SEQ ID NO: 214375 - RNA, 24 nt, Human
uaggaaccagaccggucacuucca

SEQ ID NO: 214376 - RNA, 20 nt, Human
uauauauuuauauauauaua

SEQ ID NO: 214377 - RNA, 18 nt, Human
uauuguuguaacguagga

SEQ ID NO: 214378 - RNA, 25 nt, Human
ucaacagacucucuaaucaccuucu

SEQ ID NO: 214379 - RNA, 23 nt, Human
ucaucaacagacucucuaaucac

SEQ ID NO: 214380 - RNA, 18 nt, Human
uccacggcuacagggagg

SEQ ID NO: 214381 - RNA, 20 nt, Human
ucccacacaaacacccagcu

SEQ ID NO: 214382 - RNA, 26 nt, Human
ucccuggacacaguggggggucucug

SEQ ID NO: 214383 - RNA, 26 nt, Human
ucggcagagacagacccccuugccau

SEQ ID NO: 214384 - RNA, 23 nt, Human
ugacuuauuuaaaaaaaaaaaaa

SEQ ID NO: 214385 - RNA, 26 nt, Human
ugagcuccuagacuccaaugccgccu

SEQ ID NO: 214386 - RNA, 19 nt, Human
ugcaacaagguuaugacau

SEQ ID NO: 214387 - RNA, 19 nt, Human
ugcagcuuucaagagugcg

SEQ ID NO: 214388 - RNA, 19 nt, Human
ugcugaagaagccccucca

SEQ ID NO: 214389 - RNA, 19 nt, Human
ugcuguacuuacugcuaua

SEQ ID NO: 214390 - RNA, 20 nt, Human
uggcaccauaaaacaguaac

SEQ ID NO: 214391 - RNA, 20 nt, Human
uguguugauggacacacagc

SEQ ID NO: 214392 - RNA, 20 nt, Human
uucaucaacagacucucuaa

SEQ ID NO: 214393 - RNA, 21 nt, Human
aacacaguguaugaaugggag

SEQ ID NO: 214394 - RNA, 24 nt, Human
aacuggcucccaucaucuccaguc

SEQ ID NO: 214395 - RNA, 18 nt, Human
aagcuuuuggugaccagc

SEQ ID NO: 214396 - RNA, 21 nt, Human
acacccuccugagcugucacc

SEQ ID NO: 214397 - RNA, 23 nt, Human
acuccgcugccccagguuccggg

SEQ ID NO: 214398 - RNA, 21 nt, Human
agacccaaaacagcugggcag

SEQ ID NO: 214399 - RNA, 24 nt, Human
agguaaucaaccaucauccagagc

SEQ ID NO: 214400 - RNA, 21 nt, Human
agguggggcugguaauuggca

SEQ ID NO: 214401 - RNA, 23 nt, Human
aguggguugcagaggaacuggug

SEQ ID NO: 214402 - RNA, 23 nt, Human
caagcagucccugauauguucaa

SEQ ID NO: 214403 - RNA, 18 nt, Human
caagcuuuuggugaccag

SEQ ID NO: 214404 - RNA, 24 nt, Human
cacacccuccugagcugucaccac

SEQ ID NO: 214405 - RNA, 18 nt, Human
cagaaccagaauguccuc

SEQ ID NO: 214406 - RNA, 20 nt, Human
cagaaccagaauguccucaa

SEQ ID NO: 214407 - RNA, 21 nt, Human
cagaauguccucaauuuuguc

SEQ ID NO: 214408 - RNA, 24 nt, Human
cagagucagcucacuaaugguuuc

SEQ ID NO: 214409 - RNA, 18 nt, Human
cagguaaucaaccaucau

SEQ ID NO: 214410 - RNA, 24 nt, Human
cagguaguucccagacacagacaa

SEQ ID NO: 214411 - RNA, 24 nt, Human
caucuuauuuacgaagagcuccaa

SEQ ID NO: 214412 - RNA, 24 nt, Human
ccagaacacuccaagcaacccgcg

SEQ ID NO: 214413 - RNA, 19 nt, Human
ccauggggcuauccaacug

SEQ ID NO: 214414 - RNA, 19 nt, Human
cccagacacagacaaaaag

SEQ ID NO: 214415 - RNA, 25 nt, Human
ccccugcugagcgcacacacccucc

SEQ ID NO: 214416 - RNA, 19 nt, Human
cuccaagucaaucucaaca

SEQ ID NO: 214417 - RNA, 24 nt, Human
cuccaggaaaagcagcagggcuuc

SEQ ID NO: 214418 - RNA, 21 nt, Human
cuuccugcuggacagcauuuc

SEQ ID NO: 214419 - RNA, 18 nt, Human
gagucagcucacuaaugg

SEQ ID NO: 214420 - RNA, 19 nt, Human
gcagaaccagaauguccuc

SEQ ID NO: 214421 - RNA, 22 nt, Human
ggagacccaaaacagcugggca

SEQ ID NO: 214422 - RNA, 20 nt, Human
ggagagagaggcucagagug

SEQ ID NO: 214423 - RNA, 22 nt, Human
ggaggagagagaggcucagagu

SEQ ID NO: 214424 - RNA, 18 nt, Human
gguugcagaggaacuggu

SEQ ID NO: 214425 - RNA, 20 nt, Human
guggauuuucucccgugucu

SEQ ID NO: 214426 - RNA, 22 nt, Human
uaaggcaucucuugagcugaaa

SEQ ID NO: 214427 - RNA, 23 nt, Human
uagcuagaauauucucauccaaa

SEQ ID NO: 214428 - RNA, 21 nt, Human
uaugguaggugcuguaacaga

SEQ ID NO: 214429 - RNA, 20 nt, Human
uccaacuggcucccaucauc

SEQ ID NO: 214430 - RNA, 20 nt, Human
uccaagcaguuaugguaggu

SEQ ID NO: 214431 - RNA, 18 nt, Human
uccagagcucuuugggga

SEQ ID NO: 214432 - RNA, 21 nt, Human
ucgaagcaauaagcugccaaa

SEQ ID NO: 214433 - RNA, 23 nt, Human
ucugaccucaggccugguugcug

SEQ ID NO: 214434 - RNA, 22 nt, Human
ugcagaaccagaauguccucaa

SEQ ID NO: 214435 - RNA, 21 nt, Human
ugccccagguuccgggacagu

SEQ ID NO: 214436 - RNA, 23 nt, Human
ugcugagcgcacacacccuccug

SEQ ID NO: 214437 - RNA, 22 nt, Human
ugggagacccaaaacagcuggg

SEQ ID NO: 214438 - RNA, 20 nt, Human
ugguagguccaagauuggcu

SEQ ID NO: 214439 - RNA, 24 nt, Human
uucccagacacagacaaaaaguaa

SEQ ID NO: 214440 - RNA, 27 nt, Human
aaaaagcaacauaaggaaagacaucac

SEQ ID NO: 214441 - RNA, 23 nt, Human
aaacaagcuacccagacucuuca

SEQ ID NO: 214442 - RNA, 20 nt, Human
aacaagcuacccagacucuu

SEQ ID NO: 214443 - RNA, 21 nt, Human
aaccaaagaacugagaagcca

SEQ ID NO: 214444 - RNA, 21 nt, Human
aauucugcuauguugaaaaag

SEQ ID NO: 214445 - RNA, 24 nt, Human
acagagauaggaagaaaaggcugc

SEQ ID NO: 214446 - RNA, 19 nt, Human
acugagaagccagguagau

SEQ ID NO: 214447 - RNA, 20 nt, Human
acugggcuucuuaaugcuuu

SEQ ID NO: 214448 - RNA, 20 nt, Human
agagcugaaagccacagaga

SEQ ID NO: 214449 - RNA, 18 nt, Human
agcaaagacucuucuacc

SEQ ID NO: 214450 - RNA, 19 nt, Human
agccacagagauaggaaga

SEQ ID NO: 214451 - RNA, 18 nt, Human
agccaggcuggagagcac

SEQ ID NO: 214452 - RNA, 20 nt, Human
aggcagugaacucugugggc

SEQ ID NO: 214453 - RNA, 19 nt, Human
aggccuuggcaucucuagc

SEQ ID NO: 214454 - RNA, 19 nt, Human
aucucuccacuggagaaua

SEQ ID NO: 214455 - RNA, 22 nt, Human
caaagacucuucuaccagcacg

SEQ ID NO: 214456 - RNA, 21 nt, Human
caacagcaaagacucuucuac

SEQ ID NO: 214457 - RNA, 24 nt, Human
caacagcaaagacucuucuaccag

SEQ ID NO: 214458 - RNA, 18 nt, Human
cacaggccuuggcaucuc

SEQ ID NO: 214459 - RNA, 23 nt, Human
cacccaucuauucuccuaauaac

SEQ ID NO: 214460 - RNA, 25 nt, Human
caggaggagccagcaggaggucccg

SEQ ID NO: 214461 - RNA, 21 nt, Human
caucuauucuccuaauaacca

SEQ ID NO: 214462 - RNA, 21 nt, Human
caucucuagcccaagcugagg

SEQ ID NO: 214463 - RNA, 18 nt, Human
ccaaggaagcagagcuga

SEQ ID NO: 214464 - RNA, 19 nt, Human
ccaggcuggagagcacggc

SEQ ID NO: 214465 - RNA, 18 nt, Human
ccucccuggcagccaggc

SEQ ID NO: 214466 - RNA, 18 nt, Human
ccuccgaacacacaccgu

SEQ ID NO: 214467 - RNA, 21 nt, Human
cgauggaauacauguuggggg

SEQ ID NO: 214468 - RNA, 18 nt, Human
cucucgaggucauccuga

SEQ ID NO: 214469 - RNA, 18 nt, Human
cugcacuauuucaagagc

SEQ ID NO: 214470 - RNA, 25 nt, Human
cuggaaccaagaggcccacccuccc

SEQ ID NO: 214471 - RNA, 27 nt, Human
cugggcaggaggagccagcaggagguu

SEQ ID NO: 214472 - RNA, 22 nt, Human
cugguggguuugggcacguggu

SEQ ID NO: 214473 - RNA, 19 nt, Human
cuuaaugcuuucaccccuc

SEQ ID NO: 214474 - RNA, 23 nt, Human
cuuaaugcuuucaccccuccgaa

SEQ ID NO: 214475 - RNA, 18 nt, Human
gcauaggaagcugggcag

SEQ ID NO: 214476 - RNA, 22 nt, Human
gcugcaguuccuuucuucagaa

SEQ ID NO: 214477 - RNA, 22 nt, Human
gggacuuuagcuaaagcagcuu

SEQ ID NO: 214478 - RNA, 22 nt, Human
gggcaggaggagccagcaggag

SEQ ID NO: 214479 - RNA, 20 nt, Human
gucucacuccaggagggcac

SEQ ID NO: 214480 - RNA, 24 nt, Human
uaaagcagcuugugucacugaagc

SEQ ID NO: 214481 - RNA, 21 nt, Human
uacgcagacuuccaucauggg

SEQ ID NO: 214482 - RNA, 18 nt, Human
uagcccaagcugaggcca

SEQ ID NO: 214483 - RNA, 21 nt, Human
ucaguggcagcucacugaggg

SEQ ID NO: 214484 - RNA, 19 nt, Human
ucaugaguguucgauccau

SEQ ID NO: 214485 - RNA, 23 nt, Human
ucucuccacuggagaauaggagc

SEQ ID NO: 214486 - RNA, 22 nt, Human
ugaaaaagcaacauaaggaaag

SEQ ID NO: 214487 - RNA, 18 nt, Human
ugcacuauuucaagagcc

SEQ ID NO: 214488 - RNA, 18 nt, Human
uggaauacauguuggggg

SEQ ID NO: 214489 - RNA, 19 nt, Human
uggcagccaggcuggagag

SEQ ID NO: 214490 - RNA, 21 nt, Human
uggcagccaggcuggagagca

SEQ ID NO: 214491 - RNA, 18 nt, Human
uggcuuaacuguggcugg

SEQ ID NO: 214492 - RNA, 18 nt, Human
ugggcacgugguuuuagg

SEQ ID NO: 214493 - RNA, 25 nt, Human
ugggcucccgacucaguggcagcuc

SEQ ID NO: 214494 - RNA, 22 nt, Human
uggugcuaagucucacaggcag

SEQ ID NO: 214495 - RNA, 28 nt, Human
uuccagccucagcacuuggugcuaaguc

SEQ ID NO: 214496 - RNA, 19 nt, Human
uucguaaagcacuuagcac

SEQ ID NO: 214497 - RNA, 21 nt, Human
uuggggggcuuggcuuaacug

SEQ ID NO: 214498 - RNA, 18 nt, Human
uuggugcuaagucucaca

SEQ ID NO: 214499 - RNA, 19 nt, Human
aaccauggcaacugaccuu

SEQ ID NO: 214500 - RNA, 20 nt, Human
aaccccaauaauauuaaggu

SEQ ID NO: 214501 - RNA, 19 nt, Human
aaccucccucccccacccu

SEQ ID NO: 214502 - RNA, 19 nt, Human
acagcaccagaguaaccag

SEQ ID NO: 214503 - RNA, 20 nt, Human
acccaaauggacccccacag

SEQ ID NO: 214504 - RNA, 23 nt, Human
acccccacaggcaccccuggggc

SEQ ID NO: 214505 - RNA, 19 nt, Human
accccuggggcugggaggc

SEQ ID NO: 214506 - RNA, 20 nt, Human
acccuggggccauagcuggg

SEQ ID NO: 214507 - RNA, 20 nt, Human
accucccucccccacccugc

SEQ ID NO: 214508 - RNA, 23 nt, Human
acuccgccgcgcaggccgccucg

SEQ ID NO: 214509 - RNA, 26 nt, Human
agacguacccaaauggacccccacag

SEQ ID NO: 214510 - RNA, 23 nt, Human
agagagauacugcccugacccuc

SEQ ID NO: 214511 - RNA, 19 nt, Human
agagauacugcccugaccc

SEQ ID NO: 214512 - RNA, 20 nt, Human
agaguaaccaggguccucgg

SEQ ID NO: 214513 - RNA, 22 nt, Human
agcagggaggggcucugaguuc

SEQ ID NO: 214514 - RNA, 20 nt, Human
aggcuggggccgggcccggg

SEQ ID NO: 214515 - RNA, 19 nt, Human
aggugcucucccuccccag

SEQ ID NO: 214516 - RNA, 22 nt, Human
auccccaauaaauaggcacccc

SEQ ID NO: 214517 - RNA, 20 nt, Human
caauaaauaggcaccccaau

SEQ ID NO: 214518 - RNA, 24 nt, Human
cacagaccaggagacagugagaac

SEQ ID NO: 214519 - RNA, 18 nt, Human
caccagaguaaccagggu

SEQ ID NO: 214520 - RNA, 21 nt, Human
cacccugccgccgugcauccc

SEQ ID NO: 214521 - RNA, 19 nt, Human
caccgcccgcccccgccgc

SEQ ID NO: 214522 - RNA, 21 nt, Human
caccgcgcagccgccgcugcc

SEQ ID NO: 214523 - RNA, 22 nt, Human
cagaacaguuuaaauaaacccc

SEQ ID NO: 214524 - RNA, 18 nt, Human
cagccgccgcugccugca

SEQ ID NO: 214525 - RNA, 18 nt, Human
caggaugcccuaauuagg

SEQ ID NO: 214526 - RNA, 22 nt, Human
ccaaccaaccccaauaauauua

SEQ ID NO: 214527 - RNA, 23 nt, Human
cccacaggcaccccuggggcugg

SEQ ID NO: 214528 - RNA, 25 nt, Human
cccacaggcaccccuggggcuggga

SEQ ID NO: 214529 - RNA, 21 nt, Human
ccccuggggcugggaggcggg

SEQ ID NO: 214530 - RNA, 24 nt, Human
cccgggcugagaccugcgaggaac

SEQ ID NO: 214531 - RNA, 23 nt, Human
cccgguccucgggcuauuccuuc

SEQ ID NO: 214532 - RNA, 19 nt, Human
cccucccccacccugccgc

SEQ ID NO: 214533 - RNA, 21 nt, Human
cccuggggccauagcugggcc

SEQ ID NO: 214534 - RNA, 23 nt, Human
cccuggggccauagcugggccuu

SEQ ID NO: 214535 - RNA, 20 nt, Human
cccuggggcugggaggcggg

SEQ ID NO: 214536 - RNA, 18 nt, Human
ccgcccgcccccgccgcc

SEQ ID NO: 214537 - RNA, 20 nt, Human
ccgcccgcccccgccgcccc

SEQ ID NO: 214538 - RNA, 18 nt, Human
ccgccgcgcaggccgccu

SEQ ID NO: 214539 - RNA, 19 nt, Human
ccgccgcugccugcagcgc

SEQ ID NO: 214540 - RNA, 18 nt, Human
ccgcgcagccgccgcugc

SEQ ID NO: 214541 - RNA, 21 nt, Human
ccgggcccggggcccgggcuu

SEQ ID NO: 214542 - RNA, 18 nt, Human
ccucccucccccacccug

SEQ ID NO: 214543 - RNA, 26 nt, Human
ccugagccuaaaaggcgaggggcagg

SEQ ID NO: 214544 - RNA, 22 nt, Human
ccugccccaccccaaccaaccc

SEQ ID NO: 214545 - RNA, 27 nt, Human
ccugcgaggaaccucccucccccaccc

SEQ ID NO: 214546 - RNA, 25 nt, Human
ccuuacgacugcccaggaggcugcu

SEQ ID NO: 214547 - RNA, 22 nt, Human
cgaggaaccucccucccccacc

SEQ ID NO: 214548 - RNA, 18 nt, Human
cgccgccccgcgccaucc

SEQ ID NO: 214549 - RNA, 18 nt, Human
cuugguagcagggagggg

SEQ ID NO: 214550 - RNA, 21 nt, Human
cuuuauggcugagauccugcc

SEQ ID NO: 214551 - RNA, 18 nt, Human
gaacuaagcaaacuggca

SEQ ID NO: 214552 - RNA, 18 nt, Human
gacacccgcccccacccc

SEQ ID NO: 214553 - RNA, 21 nt, Human
gaccugcgaggaaccucccuc

SEQ ID NO: 214554 - RNA, 22 nt, Human
gaccuuccguccugagccuaaa

SEQ ID NO: 214555 - RNA, 23 nt, Human
gacguacccaaauggacccccac

SEQ ID NO: 214556 - RNA, 24 nt, Human
gagauccugccccaccccaaccaa

SEQ ID NO: 214557 - RNA, 18 nt, Human
gaggaaccucccuccccc

SEQ ID NO: 214558 - RNA, 19 nt, Human
gcagaaacuggugaaagug

SEQ ID NO: 214559 - RNA, 24 nt, Human
gcccgcgcagggcucagcaccgcc

SEQ ID NO: 214560 - RNA, 19 nt, Human
gcgaggggcaggaugcccu

SEQ ID NO: 214561 - RNA, 19 nt, Human
ggaaccucccucccccacc

SEQ ID NO: 214562 - RNA, 21 nt, Human
ggacagagccggggaucggga

SEQ ID NO: 214563 - RNA, 25 nt, Human
ggacggacacccgcccccaccccca

SEQ ID NO: 214564 - RNA, 19 nt, Human
ggagacagugagaacuaag

SEQ ID NO: 214565 - RNA, 21 nt, Human
ggccgggcccggggcccgggc

SEQ ID NO: 214566 - RNA, 19 nt, Human
gggcugagaccugcgagga

SEQ ID NO: 214567 - RNA, 21 nt, Human
gggcuugaggauccgugggcc

SEQ ID NO: 214568 - RNA, 22 nt, Human
ggggccgggcccggggcccggg

SEQ ID NO: 214569 - RNA, 25 nt, Human
ggggccgggcccggggcccgggcuu

SEQ ID NO: 214570 - RNA, 21 nt, Human
gggguggggaggucuuagcgg

SEQ ID NO: 214571 - RNA, 21 nt, Human
gguagcagggaggggcucuga

SEQ ID NO: 214572 - RNA, 22 nt, Human
uaaaacaggacagcaccagagu

SEQ ID NO: 214573 - RNA, 22 nt, Human
uaaauaggcagagagauacugc

SEQ ID NO: 214574 - RNA, 24 nt, Human
uaacuuuucaacccuggggccaua

SEQ ID NO: 214575 - RNA, 20 nt, Human
uaagcaaacuggcacuuuau

SEQ ID NO: 214576 - RNA, 22 nt, Human
uacccaaauggacccccacagg

SEQ ID NO: 214577 - RNA, 25 nt, Human
uagcggagcuccuccgcugugguuc

SEQ ID NO: 214578 - RNA, 23 nt, Human
ucaccgcgcagccgccgcugccu

SEQ ID NO: 214579 - RNA, 21 nt, Human
uccccaauaaauaggcacccc

SEQ ID NO: 214580 - RNA, 18 nt, Human
uccccagacccacacaga

SEQ ID NO: 214581 - RNA, 20 nt, Human
uccugccccaccccaaccaa

SEQ ID NO: 214582 - RNA, 21 nt, Human
ugagaccugcgaggaaccucc

SEQ ID NO: 214583 - RNA, 19 nt, Human
ugcauccccagagcagggc

SEQ ID NO: 214584 - RNA, 18 nt, Human
ugccccaccccaaccaac

SEQ ID NO: 214585 - RNA, 19 nt, Human
ugccccaccccaaccaacc

SEQ ID NO: 214586 - RNA, 22 nt, Human
ugcgaggaaccucccuccccca

SEQ ID NO: 214587 - RNA, 21 nt, Human
ugggccggacagagccgggga

SEQ ID NO: 214588 - RNA, 19 nt, Human
ugggccuugguagcaggga

SEQ ID NO: 214589 - RNA, 18 nt, Human
uggggccauagcugggcc

SEQ ID NO: 214590 - RNA, 21 nt, Human
ugguagcagggaggggcucug

SEQ ID NO: 214591 - RNA, 19 nt, Human
ugguucaggcccgguggaa

SEQ ID NO: 214592 - RNA, 27 nt, Human
ugucccgggcugagaccugcgaggaac

SEQ ID NO: 214593 - RNA, 18 nt, Human
aggcggcggguggggggc

SEQ ID NO: 214594 - RNA, 20 nt, Human
aggcggcggguggggggcug

SEQ ID NO: 214595 - RNA, 19 nt, Human
agugaugugcuugauggcc

SEQ ID NO: 214596 - RNA, 25 nt, Human
agugaugugcuugauggccucuucu

SEQ ID NO: 214597 - RNA, 18 nt, Human
gaggcggcgggugggggg

SEQ ID NO: 214598 - RNA, 21 nt, Human
uauuccaucucucucggugca

SEQ ID NO: 214599 - RNA, 18 nt, Human
ugaugugcuugauggccu

SEQ ID NO: 214600 - RNA, 19 nt, Human
ugaugugcuugauggccuc

SEQ ID NO: 214601 - RNA, 21 nt, Human
ugaugugcuugauggccucuu

SEQ ID NO: 214602 - RNA, 22 nt, Human
ugcaggaggcggcggguggggg

SEQ ID NO: 214603 - RNA, 20 nt, Human
accagacugugcuggugugu

SEQ ID NO: 214604 - RNA, 23 nt, Human
cuguagccuaccagacugugcug

SEQ ID NO: 214605 - RNA, 19 nt, Human
guccaguccaugauuacuc

SEQ ID NO: 214606 - RNA, 19 nt, Human
ucucagccuuucuuuagag

SEQ ID NO: 214607 - RNA, 18 nt, Human
ugagaauggaugagaugu

SEQ ID NO: 214608 - RNA, 20 nt, Human
ugagauguccaguccaugau

SEQ ID NO: 214609 - RNA, 20 nt, Human
uggaugagauguccagucca

SEQ ID NO: 214610 - RNA, 21 nt, Human
acacaauauuaguguucuacc

SEQ ID NO: 214611 - RNA, 20 nt, Human
acuguaauuaaacaugugaa

SEQ ID NO: 214612 - RNA, 22 nt, Human
cacugugguuucaaccgcucag

SEQ ID NO: 214613 - RNA, 18 nt, Human
cauuggguauuugcucuu

SEQ ID NO: 214614 - RNA, 23 nt, Human
cgcagcauuugaaauuucaaagc

SEQ ID NO: 214615 - RNA, 23 nt, Human
gaaucugauaugguaacccacgc

SEQ ID NO: 214616 - RNA, 21 nt, Human
ucacugugguuucaaccgcuc

SEQ ID NO: 214617 - RNA, 23 nt, Human
ucacugugguuucaaccgcucag

SEQ ID NO: 214618 - RNA, 24 nt, Human
uugcaauuuugcgcagcauuugaa

SEQ ID NO: 214619 - RNA, 24 nt, Human
agcuuuuauuagguuagaaaaaau

SEQ ID NO: 214620 - RNA, 19 nt, Human
aaaaagcuucuccccgcca

SEQ ID NO: 214621 - RNA, 18 nt, Human
aaaacgcacaguggaaug

SEQ ID NO: 214622 - RNA, 23 nt, Human
aaacaaucccagacaacaguuca

SEQ ID NO: 214623 - RNA, 22 nt, Human
aacaaagaugaucaaaccaaaa

SEQ ID NO: 214624 - RNA, 26 nt, Human
aagcagaucccuuuagaaaaaggcuc

SEQ ID NO: 214625 - RNA, 23 nt, Human
acauacaaaaagguaaagccaga

SEQ ID NO: 214626 - RNA, 18 nt, Human
acccguacgcuacauaca

SEQ ID NO: 214627 - RNA, 18 nt, Human
aggguggggagggggcag

SEQ ID NO: 214628 - RNA, 24 nt, Human
aguggcaggguggggagggggcag

SEQ ID NO: 214629 - RNA, 25 nt, Human
auuuauuccucaagauucacccaaa

SEQ ID NO: 214630 - RNA, 18 nt, Human
caacguaaaagugggggu

SEQ ID NO: 214631 - RNA, 19 nt, Human
cacaagccauaauaaagcu

SEQ ID NO: 214632 - RNA, 21 nt, Human
cacgagacaaacgcguacagc

SEQ ID NO: 214633 - RNA, 18 nt, Human
cacucccuucccuccccc

SEQ ID NO: 214634 - RNA, 18 nt, Human
cacucucacccggugggg

SEQ ID NO: 214635 - RNA, 19 nt, Human
cagaaagagacugacuccu

SEQ ID NO: 214636 - RNA, 18 nt, Human
cagggcgcacucucuuug

SEQ ID NO: 214637 - RNA, 18 nt, Human
caggguggggagggggca

SEQ ID NO: 214638 - RNA, 23 nt, Human
cccccacaaaacaaucccagaca

SEQ ID NO: 214639 - RNA, 23 nt, Human
ccccccuccgcgcucggccccgg

SEQ ID NO: 214640 - RNA, 20 nt, Human
cccgggcgcggcggcugcgg

SEQ ID NO: 214641 - RNA, 22 nt, Human
cccuccccccacaaaacaaucc

SEQ ID NO: 214642 - RNA, 18 nt, Human
cccuccgcgcucggcccc

SEQ ID NO: 214643 - RNA, 19 nt, Human
cgagacaaacgcguacagc

SEQ ID NO: 214644 - RNA, 19 nt, Human
cgaggcgagaccagaccgc

SEQ ID NO: 214645 - RNA, 21 nt, Human
cgagggcacggcacuggcucg

SEQ ID NO: 214646 - RNA, 21 nt, Human
cgggggcgaggcucccccagc

SEQ ID NO: 214647 - RNA, 23 nt, Human
cguacgcuacauacauagagagc

SEQ ID NO: 214648 - RNA, 24 nt, Human
cucaacaaagaugaucaaaccaaa

SEQ ID NO: 214649 - RNA, 20 nt, Human
cucaagauucacccaaaaca

SEQ ID NO: 214650 - RNA, 19 nt, Human
cuccccccacaaaacaauc

SEQ ID NO: 214651 - RNA, 20 nt, Human
cuccgcgcucggccccggcc

SEQ ID NO: 214652 - RNA, 26 nt, Human
cuccgcgcucggccccggcggcccuc

SEQ ID NO: 214653 - RNA, 21 nt, Human
cucgguccccccuccgcgcuc

SEQ ID NO: 214654 - RNA, 21 nt, Human
gaacacucccuucccuccccc

SEQ ID NO: 214655 - RNA, 21 nt, Human
gcacuggcucgguccccccuc

SEQ ID NO: 214656 - RNA, 25 nt, Human
gcccuggggacccucgaagcagaau

SEQ ID NO: 214657 - RNA, 19 nt, Human
gcgcggcccgagggcacgg

SEQ ID NO: 214658 - RNA, 19 nt, Human
ggagacgacacucucaccc

SEQ ID NO: 214659 - RNA, 20 nt, Human
gggcgaggcucccccagcgc

SEQ ID NO: 214660 - RNA, 26 nt, Human
uacaguugaaacaguucuauugaagc

SEQ ID NO: 214661 - RNA, 19 nt, Human
uagaaaagagauugcauuu

SEQ ID NO: 214662 - RNA, 19 nt, Human
uagaccaugaacacagcga

SEQ ID NO: 214663 - RNA, 19 nt, Human
uagcaagaaaaaaagcuuc

SEQ ID NO: 214664 - RNA, 19 nt, Human
uagcaagaaaaaaagcuuc

SEQ ID NO: 214665 - RNA, 23 nt, Human
uauaaaggcauuuauuccucaag

SEQ ID NO: 214666 - RNA, 25 nt, Human
uaucauaaucuucauaauuaauaua

SEQ ID NO: 214667 - RNA, 22 nt, Human
uauguagaaaagagauugcauu

SEQ ID NO: 214668 - RNA, 23 nt, Human
ucaacaaagaugaucaaaccaaa

SEQ ID NO: 214669 - RNA, 21 nt, Human
ucacccggugggggcgggggc

SEQ ID NO: 214670 - RNA, 18 nt, Human
ucagugcccccggcccau

SEQ ID NO: 214671 - RNA, 19 nt, Human
uccccccuccgcgcucggc

SEQ ID NO: 214672 - RNA, 19 nt, Human
uccucaagauucacccaaa

SEQ ID NO: 214673 - RNA, 19 nt, Human
ucgggggccgggguggagg

SEQ ID NO: 214674 - RNA, 22 nt, Human
ugaaacacugaggcaguuacua

SEQ ID NO: 214675 - RNA, 22 nt, Human
ugauuuguucacauacaaaaag

SEQ ID NO: 214676 - RNA, 20 nt, Human
ugcccgggcgcggcggcugc

SEQ ID NO: 214677 - RNA, 20 nt, Human
uggaaugucaagaguggcag

SEQ ID NO: 214678 - RNA, 22 nt, Human
uguacagaaagagacugacucc

SEQ ID NO: 214679 - RNA, 22 nt, Human
uucacauacaaaaagguaaagc

SEQ ID NO: 214680 - RNA, 23 nt, Human
aaaaaaaaccaaaaaaaccaucu

SEQ ID NO: 214681 - RNA, 22 nt, Human
aaaaaaaauccuucagccugga

SEQ ID NO: 214682 - RNA, 23 nt, Human
aaaaaaccaaaaaaaccaucuug

SEQ ID NO: 214683 - RNA, 21 nt, Human
aaaaaaccaucuugaagcuca

SEQ ID NO: 214684 - RNA, 24 nt, Human
aaacacaaaauccugguuugaaac

SEQ ID NO: 214685 - RNA, 22 nt, Human
aagaagaaucugucgagagcac

SEQ ID NO: 214686 - RNA, 19 nt, Human
aagcucagacaccagcaaa

SEQ ID NO: 214687 - RNA, 18 nt, Human
aaugugaagggaggguag

SEQ ID NO: 214688 - RNA, 23 nt, Human
accgucguugccccaaaggagca

SEQ ID NO: 214689 - RNA, 20 nt, Human
acuguggaaaccccuugccc

SEQ ID NO: 214690 - RNA, 23 nt, Human
agaaaaaaaaaaaaccaaaaaaa

SEQ ID NO: 214691 - RNA, 26 nt, Human
agaaggaaggagagagggggaugagc

SEQ ID NO: 214692 - RNA, 18 nt, Human
aguucuuuuuuuuuuucc

SEQ ID NO: 214693 - RNA, 25 nt, Human
auaggaacgaucucugaacuccauu

SEQ ID NO: 214694 - RNA, 20 nt, Human
aucuugaagcucaaccugua

SEQ ID NO: 214695 - RNA, 23 nt, Human
auggacacacacacgugcauaca

SEQ ID NO: 214696 - RNA, 30 nt, Human
cacacacgugcauacacacgugagcacacg

SEQ ID NO: 214697 - RNA, 18 nt, Human
cacacgugagcacacgcc

SEQ ID NO: 214698 - RNA, 20 nt, Human
ccaccgccaccagcagcggg

SEQ ID NO: 214699 - RNA, 20 nt, Human
ccagcaaaaaaaaaaaaaaa

SEQ ID NO: 214700 - RNA, 24 nt, Human
ccagcaaaaaaaaaaaaaaaaaaa

SEQ ID NO: 214701 - RNA, 26 nt, Human
ccagcaaaaaaaaaaaaaaaaaaaaa

SEQ ID NO: 214702 - RNA, 22 nt, Human
ccccaaaggagcagcaacugug

SEQ ID NO: 214703 - RNA, 22 nt, Human
ccccgccggcccccggugccca

SEQ ID NO: 214704 - RNA, 20 nt, Human
ccccggugcccauggcugcg

SEQ ID NO: 214705 - RNA, 19 nt, Human
cccggugcccauggcugcg

SEQ ID NO: 214706 - RNA, 21 nt, Human
cccugcccgcccccgccacgg

SEQ ID NO: 214707 - RNA, 18 nt, Human
ccgcccccgccggccccc

SEQ ID NO: 214708 - RNA, 23 nt, Human
ccgccgcccccgccggcccccgg

SEQ ID NO: 214709 - RNA, 18 nt, Human
ccgccggcccccggugcc

SEQ ID NO: 214710 - RNA, 19 nt, Human
ccgccggcccccggugccc

SEQ ID NO: 214711 - RNA, 21 nt, Human
ccuugcccuccagguucacag

SEQ ID NO: 214712 - RNA, 19 nt, Human
cgaaaaaacacaaaauccu

SEQ ID NO: 214713 - RNA, 21 nt, Human
cgcgcgggcuuggcccggggg

SEQ ID NO: 214714 - RNA, 20 nt, Human
cgcgggcuuggcccgggggg

SEQ ID NO: 214715 - RNA, 23 nt, Human
cucaguucuuuuuuuuuuuccuu

SEQ ID NO: 214716 - RNA, 21 nt, Human
cugaagcucagacaccagcaa

SEQ ID NO: 214717 - RNA, 21 nt, Human
cugcugggggcgggugggggg

SEQ ID NO: 214718 - RNA, 21 nt, Human
cugguuugaaaccgucguugc

SEQ ID NO: 214719 - RNA, 20 nt, Human
gaaaaaacacaaaauccugg

SEQ ID NO: 214720 - RNA, 21 nt, Human
gaacagggcuggguguuuuug

SEQ ID NO: 214721 - RNA, 18 nt, Human
gaccacagacccuuaucc

SEQ ID NO: 214722 - RNA, 20 nt, Human
gagagcacagucucccaguc

SEQ ID NO: 214723 - RNA, 23 nt, Human
gagcacacgccgggaccacagac

SEQ ID NO: 214724 - RNA, 23 nt, Human
gccgugucuaauggacacacaca

SEQ ID NO: 214725 - RNA, 18 nt, Human
ggagagagggggaugagc

SEQ ID NO: 214726 - RNA, 18 nt, Human
ggaugagagaaaaaaaaa

SEQ ID NO: 214727 - RNA, 19 nt, Human
gggaaccccugcccgcccc

SEQ ID NO: 214728 - RNA, 21 nt, Human
gggaccacagacccuuaucca

SEQ ID NO: 214729 - RNA, 21 nt, Human
ggggcggguggggggaacgaa

SEQ ID NO: 214730 - RNA, 23 nt, Human
guggggggaacgaaaaaacacaa

SEQ ID NO: 214731 - RNA, 20 nt, Human
guuugaaaccgucguugccc

SEQ ID NO: 214732 - RNA, 24 nt, Human
guuuuuucuuucuuuuucuuuuuu

SEQ ID NO: 214733 - RNA, 19 nt, Human
uaaaaacaggugcuuucuu

SEQ ID NO: 214734 - RNA, 20 nt, Human
uaagaaggaaggagagaggg

SEQ ID NO: 214735 - RNA, 24 nt, Human
uagacuucugacacaagaagaauc

SEQ ID NO: 214736 - RNA, 19 nt, Human
uauucucaaaacucuguca

SEQ ID NO: 214737 - RNA, 24 nt, Human
ucagacaccagcaaaaaaaaaaaa

SEQ ID NO: 214738 - RNA, 23 nt, Human
ucaucucaguucuuuuuuuuuuu

SEQ ID NO: 214739 - RNA, 20 nt, Human
uccugaguuuuccagaggcu

SEQ ID NO: 214740 - RNA, 18 nt, Human
ucuccuggaacagggcug

SEQ ID NO: 214741 - RNA, 21 nt, Human
ucuccuggaacagggcugggu

SEQ ID NO: 214742 - RNA, 26 nt, Human
ucuuuuuuuuuuuccuuuuuccauuu

SEQ ID NO: 214743 - RNA, 26 nt, Human
ugaaagcagcagcuauuggucaauuu

SEQ ID NO: 214744 - RNA, 19 nt, Human
ugacacaagaagaaucugu

SEQ ID NO: 214745 - RNA, 18 nt, Human
ugagcacacgccgggacc

SEQ ID NO: 214746 - RNA, 19 nt, Human
ugcacacacaucagccgug

SEQ ID NO: 214747 - RNA, 19 nt, Human
ugccccaaaggagcagcaa

SEQ ID NO: 214748 - RNA, 22 nt, Human
uggaaaccccuugcccuccagg

SEQ ID NO: 214749 - RNA, 23 nt, Human
uggacacacacacgugcauacac

SEQ ID NO: 214750 - RNA, 20 nt, Human
uggaugagagaaaaaaaaaa

SEQ ID NO: 214751 - RNA, 21 nt, Human
ugggggcggguggggggaacg

SEQ ID NO: 214752 - RNA, 23 nt, Human
uguaaagaaaaaaaaaauccuuc

SEQ ID NO: 214753 - RNA, 31 nt, Human
ugucaucucaguucuuuuuuuuuuuccuuuu

SEQ ID NO: 214754 - RNA, 21 nt, Human
uucaaaccagaggaaagcgaa

SEQ ID NO: 214755 - RNA, 23 nt, Human
uucaaaccagaggaaagcgaaaa

SEQ ID NO: 214756 - RNA, 19 nt, Human
uuggcccggggggucuugc

SEQ ID NO: 214757 - RNA, 21 nt, Human
uuguuuuuucuuucgaacuuu

SEQ ID NO: 214758 - RNA, 19 nt, Human
uuucuuuuuuuuuuuuuaa

SEQ ID NO: 214759 - RNA, 21 nt, Human
uuuucuuuuuuuuuuuuuaau

SEQ ID NO: 214760 - RNA, 24 nt, Human
uuuuuuuuuuuuaauguccuagcu

SEQ ID NO: 214761 - RNA, 19 nt, Human
aaguccccgaucuugacgg

SEQ ID NO: 214762 - RNA, 22 nt, Human
accaucccaaaagagcccuggc

SEQ ID NO: 214763 - RNA, 21 nt, Human
agauaccacacccaggagacg

SEQ ID NO: 214764 - RNA, 19 nt, Human
agcccuccagcuccuccag

SEQ ID NO: 214765 - RNA, 19 nt, Human
agcgcacgggcagcagccc

SEQ ID NO: 214766 - RNA, 23 nt, Human
aggagaggaggcggaaggagggc

SEQ ID NO: 214767 - RNA, 22 nt, Human
agggagccccgggccccccggc

SEQ ID NO: 214768 - RNA, 18 nt, Human
auccaugacgaacuucag

SEQ ID NO: 214769 - RNA, 23 nt, Human
augcaguugcgggcugcuagauc

SEQ ID NO: 214770 - RNA, 24 nt, Human
caaguccucgugccagccccucau

SEQ ID NO: 214771 - RNA, 19 nt, Human
cacccuugcgguaauaguc

SEQ ID NO: 214772 - RNA, 22 nt, Human
caccgucuucagggccacgggu

SEQ ID NO: 214773 - RNA, 24 nt, Human
cacgccaaaggaccagacauccga

SEQ ID NO: 214774 - RNA, 24 nt, Human
cagcugaaggggacagcccuccag

SEQ ID NO: 214775 - RNA, 21 nt, Human
caggagacgcaccacauggug

SEQ ID NO: 214776 - RNA, 20 nt, Human
caguugcgggcugcuagauc

SEQ ID NO: 214777 - RNA, 21 nt, Human
caugccgucugcaaucucacc

SEQ ID NO: 214778 - RNA, 19 nt, Human
ccaaaagagcccuggccca

SEQ ID NO: 214779 - RNA, 25 nt, Human
cccccauuuugagggcugcagucuc

SEQ ID NO: 214780 - RNA, 21 nt, Human
ccgcaaagaucgaagauggcu

SEQ ID NO: 214781 - RNA, 22 nt, Human
ccuccagcuccuccaggacccc

SEQ ID NO: 214782 - RNA, 22 nt, Human
ccuccaggaccccgccauccau

SEQ ID NO: 214783 - RNA, 22 nt, Human
ccugagauaccacacccaggag

SEQ ID NO: 214784 - RNA, 27 nt, Human
cuccagccucaaguccucgugccagcc

SEQ ID NO: 214785 - RNA, 21 nt, Human
gaagauggcucuugagguccc

SEQ ID NO: 214786 - RNA, 18 nt, Human
gagcaggaucugcaggug

SEQ ID NO: 214787 - RNA, 19 nt, Human
gccccccggcauuccgggc

SEQ ID NO: 214788 - RNA, 18 nt, Human
ggacagcccuccagcucc

SEQ ID NO: 214789 - RNA, 21 nt, Human
ggacucgggggccauccagcg

SEQ ID NO: 214790 - RNA, 21 nt, Human
gggcgcaggcguggguucggc

SEQ ID NO: 214791 - RNA, 21 nt, Human
gggcugcagucucuuggagug

SEQ ID NO: 214792 - RNA, 18 nt, Human
gucauuaacuccaugaug

SEQ ID NO: 214793 - RNA, 21 nt, Human
uauaccaucccaaaagagccc

SEQ ID NO: 214794 - RNA, 23 nt, Human
ucaccagccauuuggaucauuuc

SEQ ID NO: 214795 - RNA, 22 nt, Human
uccaccacgcugcaguucucca

SEQ ID NO: 214796 - RNA, 22 nt, Human
uccuccaggaccccgccaucca

SEQ ID NO: 214797 - RNA, 18 nt, Human
uccuccuguaugcugucc

SEQ ID NO: 214798 - RNA, 18 nt, Human
uccucgugccagccccuc

SEQ ID NO: 214799 - RNA, 19 nt, Human
uccugggacaccaugcagu

SEQ ID NO: 214800 - RNA, 19 nt, Human
ucucauacacgucccgagu

SEQ ID NO: 214801 - RNA, 21 nt, Human
ucugccaccucugagcgaaua

SEQ ID NO: 214802 - RNA, 21 nt, Human
ucuucagggccacgggugugg

SEQ ID NO: 214803 - RNA, 22 nt, Human
ugacgaacuucagcaccugcuc

SEQ ID NO: 214804 - RNA, 22 nt, Human
ugacggugaaguccugggacac

SEQ ID NO: 214805 - RNA, 19 nt, Human
uggacaggcccugguaggg

SEQ ID NO: 214806 - RNA, 21 nt, Human
uggcucuugagguccccacgg

SEQ ID NO: 214807 - RNA, 26 nt, Human
ugugaaagaugggcgcaggcgugggu

SEQ ID NO: 214808 - RNA, 27 nt, Human
uguggacuccucuccagccucaagucc

SEQ ID NO: 214809 - RNA, 25 nt, Human
uucaugacagaagcuuccuugagga

SEQ ID NO: 214810 - RNA, 20 nt, Human
uucuccagcugacgaagcuc

SEQ ID NO: 214811 - RNA, 19 nt, Human
agagcggguuuuccccuuc

SEQ ID NO: 214812 - RNA, 21 nt, Human
agccacaaacaacgccaaucc

SEQ ID NO: 214813 - RNA, 21 nt, Human
agccgggagccgggagucggg

SEQ ID NO: 214814 - RNA, 19 nt, Human
agguggagugcuguaggag

SEQ ID NO: 214815 - RNA, 22 nt, Human
caacagccacaaacaacgccaa

SEQ ID NO: 214816 - RNA, 28 nt, Human
caauggcucuuuuucuuccggaaggccu

SEQ ID NO: 214817 - RNA, 18 nt, Human
cagccacaaacaacgcca

SEQ ID NO: 214818 - RNA, 28 nt, Human
caggucccaagguggagugcuguaggag

SEQ ID NO: 214819 - RNA, 18 nt, Human
ccacgcccgggguccucc

SEQ ID NO: 214820 - RNA, 22 nt, Human
ccccaacuggcacaugcgccug

SEQ ID NO: 214821 - RNA, 18 nt, Human
ccgcggggccccaacugg

SEQ ID NO: 214822 - RNA, 22 nt, Human
ccuccuaggcccucugcuccuc

SEQ ID NO: 214823 - RNA, 22 nt, Human
cgcccgggguccuccuaggccc

SEQ ID NO: 214824 - RNA, 28 nt, Human
cggcccgggauugggcacccccucuagg

SEQ ID NO: 214825 - RNA, 26 nt, Human
cuguauuccacuggcaucaauuucac

SEQ ID NO: 214826 - RNA, 21 nt, Human
cuguguggcguucccacuccc

SEQ ID NO: 214827 - RNA, 23 nt, Human
gagccgggagccgggagccggga

SEQ ID NO: 214828 - RNA, 23 nt, Human
gagccgggagccgggagucggga

SEQ ID NO: 214829 - RNA, 23 nt, Human
gagcggguuuuccccuucggucu

SEQ ID NO: 214830 - RNA, 21 nt, Human
gcaacagccacaaacaacgcc

SEQ ID NO: 214831 - RNA, 22 nt, Human
gccccauucaacugccagggcg

SEQ ID NO: 214832 - RNA, 19 nt, Human
gcccgggguccuccuaggc

SEQ ID NO: 214833 - RNA, 25 nt, Human
gggagccgggagccgggagccgggg

SEQ ID NO: 214834 - RNA, 23 nt, Human
ggguccuccuaggcccucugcuc

SEQ ID NO: 214835 - RNA, 19 nt, Human
guguaugguacaguuucca

SEQ ID NO: 214836 - RNA, 24 nt, Human
uacccgcggggccccaacuggcac

SEQ ID NO: 214837 - RNA, 24 nt, Human
ucacgggaucuuugaaaacucaaa

SEQ ID NO: 214838 - RNA, 18 nt, Human
uccuccucggcgaguggu

SEQ ID NO: 214839 - RNA, 19 nt, Human
ugaagccccucagccagga

SEQ ID NO: 214840 - RNA, 19 nt, Human
uugaugccagaggaagagg

SEQ ID NO: 214841 - RNA, 24 nt, Human
aaagugcugggacuacaggcguga

SEQ ID NO: 214842 - RNA, 24 nt, Human
aaagugcugggauuauaggcauga

SEQ ID NO: 214843 - RNA, 20 nt, Human
aaccucagccucccaagcag

SEQ ID NO: 214844 - RNA, 21 nt, Human
aaccuggcaaaucugugugag

SEQ ID NO: 214845 - RNA, 25 nt, Human
aagcagaugggaccacagguacaag

SEQ ID NO: 214846 - RNA, 19 nt, Human
aagugcugggacuacaggc

SEQ ID NO: 214847 - RNA, 26 nt, Human
aagugcugggacuacaggcgugagcc

SEQ ID NO: 214848 - RNA, 19 nt, Human
aagugcugggauuauaggc

SEQ ID NO: 214849 - RNA, 21 nt, Human
aagugcugggauuauaggcau

SEQ ID NO: 214850 - RNA, 22 nt, Human
accccuccuaggauaucugcug

SEQ ID NO: 214851 - RNA, 19 nt, Human
acugcagcccugaccuccu

SEQ ID NO: 214852 - RNA, 22 nt, Human
agauauuucccaaacaccccuc

SEQ ID NO: 214853 - RNA, 25 nt, Human
agcgaucccccugccucagccuucc

SEQ ID NO: 214854 - RNA, 22 nt, Human
aggcaugaggccacugcgccca

SEQ ID NO: 214855 - RNA, 23 nt, Human
agugcaguggcaugaucguagcu

SEQ ID NO: 214856 - RNA, 24 nt, Human
agugcaguggcaugaucguagcuc

SEQ ID NO: 214857 - RNA, 22 nt, Human
auauauuccauauccauucuca

SEQ ID NO: 214858 - RNA, 25 nt, Human
aucacguugcccaggcuagucucga

SEQ ID NO: 214859 - RNA, 20 nt, Human
aucucauucuguugcccagg

SEQ ID NO: 214860 - RNA, 19 nt, Human
auucuguugcccagagugg

SEQ ID NO: 214861 - RNA, 19 nt, Human
caaagugcugggacuacag

SEQ ID NO: 214862 - RNA, 21 nt, Human
caaagugcugggacuacaggc

SEQ ID NO: 214863 - RNA, 24 nt, Human
caaagugcugggacuacaggcgug

SEQ ID NO: 214864 - RNA, 24 nt, Human
caaagugcugggauuauaggcaug

SEQ ID NO: 214865 - RNA, 19 nt, Human
caaccucagccucccaagc

SEQ ID NO: 214866 - RNA, 19 nt, Human
caagacaaaaaauaugagc

SEQ ID NO: 214867 - RNA, 20 nt, Human
caagcgaucccccugccuca

SEQ ID NO: 214868 - RNA, 26 nt, Human
cacagguacaagccacaacgcccggg

SEQ ID NO: 214869 - RNA, 19 nt, Human
cacccaggccggugugcag

SEQ ID NO: 214870 - RNA, 24 nt, Human
cacguugcccaggcuagucucgaa

SEQ ID NO: 214871 - RNA, 21 nt, Human
cagcccugaccuccugggcuc

SEQ ID NO: 214872 - RNA, 23 nt, Human
cagcccugaccuccugggcucaa

SEQ ID NO: 214873 - RNA, 24 nt, Human
cagcccugaccuccugggcucaag

SEQ ID NO: 214874 - RNA, 22 nt, Human
ccaaagugcugggauuauaggc

SEQ ID NO: 214875 - RNA, 24 nt, Human
ccaaagugcugggauuauaggcau

SEQ ID NO: 214876 - RNA, 20 nt, Human
ccaggccggugugcaguggc

SEQ ID NO: 214877 - RNA, 23 nt, Human
ccaggccggugugcaguggcaca

SEQ ID NO: 214878 - RNA, 21 nt, Human
cccagaguggagugcaguggc

SEQ ID NO: 214879 - RNA, 26 nt, Human
cccccugccucagccuuccaaagugc

SEQ ID NO: 214880 - RNA, 20 nt, Human
cccgaguucaagccaucuuc

SEQ ID NO: 214881 - RNA, 19 nt, Human
cccugaccuccugggcuca

SEQ ID NO: 214882 - RNA, 20 nt, Human
ccugggcucaagcgaucccc

SEQ ID NO: 214883 - RNA, 23 nt, Human
ccugggcucaagcgaucccccug

SEQ ID NO: 214884 - RNA, 19 nt, Human
ccugggcucaagcgauccu

SEQ ID NO: 214885 - RNA, 20 nt, Human
ccugggcucaagcgauccug

SEQ ID NO: 214886 - RNA, 20 nt, Human
cgaacucccgaguucaagcc

SEQ ID NO: 214887 - RNA, 23 nt, Human
cuacaaccucaaauuccugggcu

SEQ ID NO: 214888 - RNA, 19 nt, Human
cuauuucauuggcuuucuc

SEQ ID NO: 214889 - RNA, 24 nt, Human
cucaagcgaucccccugccucagc

SEQ ID NO: 214890 - RNA, 18 nt, Human
cucaccucggccucucaa

SEQ ID NO: 214891 - RNA, 24 nt, Human
cucacugcagcccugaccuccugg

SEQ ID NO: 214892 - RNA, 19 nt, Human
cucaggaucaagacaaaaa

SEQ ID NO: 214893 - RNA, 22 nt, Human
cucggcucacugcagcccugac

SEQ ID NO: 214894 - RNA, 22 nt, Human
cugcaaccucagccucccaagc

SEQ ID NO: 214895 - RNA, 22 nt, Human
cugcagcccugaccuccugggc

SEQ ID NO: 214896 - RNA, 23 nt, Human
cugcagcccugaccuccugggcu

SEQ ID NO: 214897 - RNA, 23 nt, Human
cugccucagccuuccaaagugcu

SEQ ID NO: 214898 - RNA, 24 nt, Human
cugccucagccuuccaaagugcug

SEQ ID NO: 214899 - RNA, 24 nt, Human
cugcugccaauaaaaaguuugggg

SEQ ID NO: 214900 - RNA, 19 nt, Human
cuggucacuaagaaccucc

SEQ ID NO: 214901 - RNA, 18 nt, Human
gacuacaggcgugagcca

SEQ ID NO: 214902 - RNA, 21 nt, Human
gacuacaggcgugagccacca

SEQ ID NO: 214903 - RNA, 24 nt, Human
gacuacaggcgugagccaccaugc

SEQ ID NO: 214904 - RNA, 18 nt, Human
gagugcaguggcaugauc

SEQ ID NO: 214905 - RNA, 19 nt, Human
gaucguagcucacuacaac

SEQ ID NO: 214906 - RNA, 20 nt, Human
gauuauaggcaugaggccac

SEQ ID NO: 214907 - RNA, 23 nt, Human
gauuauaggcaugaggccacugc

SEQ ID NO: 214908 - RNA, 23 nt, Human
gccauggaaaauuaugcucugga

SEQ ID NO: 214909 - RNA, 24 nt, Human
gcgaucccccugccucagccuucc

SEQ ID NO: 214910 - RNA, 24 nt, Human
gcgauccugcaaccucagccuccc

SEQ ID NO: 214911 - RNA, 21 nt, Human
ggaccacagguacaagccaca

SEQ ID NO: 214912 - RNA, 24 nt, Human
ggacuacaggcgugagccaccaug

SEQ ID NO: 214913 - RNA, 21 nt, Human
guaucuaucuauuaaaauagc

SEQ ID NO: 214914 - RNA, 23 nt, Human
gugcaguggcacaaucucggcuc

SEQ ID NO: 214915 - RNA, 24 nt, Human
uaaaaggacuguugcccauaaucu

SEQ ID NO: 214916 - RNA, 24 nt, Human
uaaaauaggaguugucuacacuua

SEQ ID NO: 214917 - RNA, 26 nt, Human
uaauuuuuauauauuuuuugguagag

SEQ ID NO: 214918 - RNA, 27 nt, Human
uaauuuuuauauauuuuuugguagaga

SEQ ID NO: 214919 - RNA, 24 nt, Human
uacaggcgugagccaccaugccca

SEQ ID NO: 214920 - RNA, 23 nt, Human
uaccaaauacauggaaaacucac

SEQ ID NO: 214921 - RNA, 25 nt, Human
uagcuaaagggacuauuugccagaa

SEQ ID NO: 214922 - RNA, 19 nt, Human
uauagaggucuuuaaacug

SEQ ID NO: 214923 - RNA, 22 nt, Human
uauuugccaggaagcuucuagu

SEQ ID NO: 214924 - RNA, 22 nt, Human
ucaaagugcugggacuacaggc

SEQ ID NO: 214925 - RNA, 24 nt, Human
ucaaagugcugggacuacaggcgu

SEQ ID NO: 214926 - RNA, 22 nt, Human
ucaagacaaaaaauaugagcaa

SEQ ID NO: 214927 - RNA, 23 nt, Human
ucaagcgauccugcaaccucagc

SEQ ID NO: 214928 - RNA, 24 nt, Human
ucacuacaaccucaaauuccuggg

SEQ ID NO: 214929 - RNA, 24 nt, Human
ucacugcagcccugaccuccuggg

SEQ ID NO: 214930 - RNA, 22 nt, Human
ucaugcugucacccaggccggu

SEQ ID NO: 214931 - RNA, 23 nt, Human
uccaaagugcugggauuauaggc

SEQ ID NO: 214932 - RNA, 20 nt, Human
ucccgaguucaagccaucuu

SEQ ID NO: 214933 - RNA, 23 nt, Human
uccugcaaccucagccucccaag

SEQ ID NO: 214934 - RNA, 19 nt, Human
uccugcauuuucaaaaugu

SEQ ID NO: 214935 - RNA, 18 nt, Human
uccugggcucaagcgauc

SEQ ID NO: 214936 - RNA, 18 nt, Human
uccugggcucaagcgauc

SEQ ID NO: 214937 - RNA, 24 nt, Human
uccugggcucaagcgaucccccug

SEQ ID NO: 214938 - RNA, 20 nt, Human
uccugggcucaagcgauccu

SEQ ID NO: 214939 - RNA, 21 nt, Human
uccugggcucaagcgauccug

SEQ ID NO: 214940 - RNA, 24 nt, Human
ucucaaagugcugggacuacaggc

SEQ ID NO: 214941 - RNA, 24 nt, Human
ucucauucuguugcccagagugga

SEQ ID NO: 214942 - RNA, 21 nt, Human
ucucgaacucccgaguucaag

SEQ ID NO: 214943 - RNA, 24 nt, Human
ucuguggcucaaacuauggccaug

SEQ ID NO: 214944 - RNA, 24 nt, Human
ucuguugcccagaguggagugcag

SEQ ID NO: 214945 - RNA, 25 nt, Human
ugaccuccugggcucaagcgauccu

SEQ ID NO: 214946 - RNA, 20 nt, Human
ugaguuuauuuuuuuucuuu

SEQ ID NO: 214947 - RNA, 23 nt, Human
ugaguuuauuuuuuuucuuuaag

SEQ ID NO: 214948 - RNA, 19 nt, Human
ugcaaccucagccucccaa

SEQ ID NO: 214949 - RNA, 22 nt, Human
ugcaguggcacaaucucggcuc

SEQ ID NO: 214950 - RNA, 24 nt, Human
ugccucagccuuccaaagugcugg

SEQ ID NO: 214951 - RNA, 24 nt, Human
ugcugggacuacaggcgugagcca

SEQ ID NO: 214952 - RNA, 18 nt, Human
uggaaaacucacagaauc

SEQ ID NO: 214953 - RNA, 19 nt, Human
uggagugcaguggcaugau

SEQ ID NO: 214954 - RNA, 19 nt, Human
uggagugcaguggcaugau

SEQ ID NO: 214955 - RNA, 24 nt, Human
uggcacaaucucggcucacugcag

SEQ ID NO: 214956 - RNA, 18 nt, Human
uggcaugaucguagcuca

SEQ ID NO: 214957 - RNA, 24 nt, Human
uggcaugaucguagcucacuacaa

SEQ ID NO: 214958 - RNA, 21 nt, Human
ugggaccacagguacaagcca

SEQ ID NO: 214959 - RNA, 24 nt, Human
ugggaccacagguacaagccacaa

SEQ ID NO: 214960 - RNA, 27 nt, Human
ugggaccacagguacaagccacaacgc

SEQ ID NO: 214961 - RNA, 18 nt, Human
ugggacuacaggcgugag

SEQ ID NO: 214962 - RNA, 22 nt, Human
ugggacuacaggcgugagccac

SEQ ID NO: 214963 - RNA, 24 nt, Human
ugggacuacaggcgugagccacca

SEQ ID NO: 214964 - RNA, 25 nt, Human
ugggacuacaggcgugagccaccau

SEQ ID NO: 214965 - RNA, 18 nt, Human
ugggauuauaggcaugag

SEQ ID NO: 214966 - RNA, 19 nt, Human
ugggauuauaggcaugagg

SEQ ID NO: 214967 - RNA, 22 nt, Human
ugggauuauaggcaugaggcca

SEQ ID NO: 214968 - RNA, 23 nt, Human
ugggauuauaggcaugaggccac

SEQ ID NO: 214969 - RNA, 23 nt, Human
ugggauuauaggcaugaggccac

SEQ ID NO: 214970 - RNA, 25 nt, Human
ugggauuauaggcaugaggccacug

SEQ ID NO: 214971 - RNA, 24 nt, Human
ugguagagacggagucucaucacg

SEQ ID NO: 214972 - RNA, 22 nt, Human
ugugcaguggcacaaucucggc

SEQ ID NO: 214973 - RNA, 23 nt, Human
ugugcaguggcacaaucucggcu

SEQ ID NO: 214974 - RNA, 18 nt, Human
uuauaggcaugaggccac

SEQ ID NO: 214975 - RNA, 23 nt, Human
uucaagccaucuucccgucucac

SEQ ID NO: 214976 - RNA, 25 nt, Human
uuccugggcucaagcgaucccccug

SEQ ID NO: 214977 - RNA, 18 nt, Human
uucuaggugcauacugcc

SEQ ID NO: 214978 - RNA, 23 nt, Human
uucucuguggcucaaacuauggc

SEQ ID NO: 214979 - RNA, 21 nt, Human
uuggggcuagugaaaacucuu

SEQ ID NO: 214980 - RNA, 21 nt, Human
uugguagagacggagucucau

SEQ ID NO: 214981 - RNA, 26 nt, Human
uuuuuauauauuuuuugguagagacg

SEQ ID NO: 214982 - RNA, 24 nt, Human
uuuuugguagagacggagucucau

SEQ ID NO: 214983 - RNA, 18 nt, Human
uuuuuugguagagacgga

SEQ ID NO: 214984 - RNA, 26 nt, Human
uuuuuuuuuuuugagacagguucuca

SEQ ID NO: 214985 - RNA, 18 nt, Human
uuuuuuuuuuuuuuuuug

SEQ ID NO: 214986 - RNA, 21 nt, Human
aaacaaacaccaaagcuuaca

SEQ ID NO: 214987 - RNA, 20 nt, Human
aaggagcugugaggugcuuc

SEQ ID NO: 214988 - RNA, 21 nt, Human
aaggagcugugaggugcuucu

SEQ ID NO: 214989 - RNA, 18 nt, Human
acuaagccugaaacacaa

SEQ ID NO: 214990 - RNA, 22 nt, Human
acugcaaccucuaagacuguaa

SEQ ID NO: 214991 - RNA, 26 nt, Human
agaaaccagaaaggucagacuaagcc

SEQ ID NO: 214992 - RNA, 19 nt, Human
agccgugaaaccuuggagg

SEQ ID NO: 214993 - RNA, 20 nt, Human
aggaaagaaggaccuagaaa

SEQ ID NO: 214994 - RNA, 23 nt, Human
aguaauggaagaaaaugaagaaa

SEQ ID NO: 214995 - RNA, 19 nt, Human
auggaagaaaaugaagaaa

SEQ ID NO: 214996 - RNA, 18 nt, Human
caaacaccaaagcuuaca

SEQ ID NO: 214997 - RNA, 26 nt, Human
caauuucacuaugaaaaaaggguaac

SEQ ID NO: 214998 - RNA, 24 nt, Human
caccaaagcuuacaauauaguacu

SEQ ID NO: 214999 - RNA, 23 nt, Human
cacucuuuccuaaguaauggaag

SEQ ID NO: 215000 - RNA, 18 nt, Human
cagacuaagccugaaaca

SEQ ID NO: 215001 - RNA, 20 nt, Human
ccaaugaggaaagaaggacc

SEQ ID NO: 215002 - RNA, 21 nt, Human
ccugaaacacaauuucacuau

SEQ ID NO: 215003 - RNA, 23 nt, Human
cgagaggaguuaaaaauguggca

SEQ ID NO: 215004 - RNA, 19 nt, Human
cuaagacuguaacaacaca

SEQ ID NO: 215005 - RNA, 19 nt, Human
gaaaaaaggguaacaaaug

SEQ ID NO: 215006 - RNA, 20 nt, Human
gaaagaaggaccuagaaagg

SEQ ID NO: 215007 - RNA, 24 nt, Human
gaggaguuaaaaauguggcaucgg

SEQ ID NO: 215008 - RNA, 20 nt, Human
ggucagacuaagccugaaac

SEQ ID NO: 215009 - RNA, 22 nt, Human
gugaggugcuucuuuccuucau

SEQ ID NO: 215010 - RNA, 21 nt, Human
uaaacaaacaccaaagcuuac

SEQ ID NO: 215011 - RNA, 22 nt, Human
uaaaugacacacauuugaaucc

SEQ ID NO: 215012 - RNA, 20 nt, Human
uagaaaggagcugugaggug

SEQ ID NO: 215013 - RNA, 22 nt, Human
ucagacuaagccugaaacacaa

SEQ ID NO: 215014 - RNA, 22 nt, Human
ucagagcgagaggaguuaaaaa

SEQ ID NO: 215015 - RNA, 21 nt, Human
ugaaacacaauuucacuauga

SEQ ID NO: 215016 - RNA, 25 nt, Human
ugaagaaaccagaaaggucagacua

SEQ ID NO: 215017 - RNA, 19 nt, Human
ugaggaaagaaggaccuag

SEQ ID NO: 215018 - RNA, 25 nt, Human
ugcuucuuuccuucauccuucuggg

SEQ ID NO: 215019 - RNA, 23 nt, Human
uggaagauaaccaaugauucccc

SEQ ID NO: 215020 - RNA, 24 nt, Human
uuaaaaauguggcaucgggagugu

SEQ ID NO: 215021 - RNA, 21 nt, Human
uuaaacaaacaccaaagcuua

SEQ ID NO: 215022 - RNA, 18 nt, Human
uuggugcuaauagcuucc

SEQ ID NO: 215023 - RNA, 20 nt, Human
agagccagccacggccgccg

SEQ ID NO: 215024 - RNA, 19 nt, Human
agcaaaaaggcaccugggu

SEQ ID NO: 215025 - RNA, 24 nt, Human
auuacguuauucaagugggacauu

SEQ ID NO: 215026 - RNA, 21 nt, Human
auugugagggguggagguggg

SEQ ID NO: 215027 - RNA, 23 nt, Human
auuucaaucauguuuaaaaacaa

SEQ ID NO: 215028 - RNA, 22 nt, Human
cagagccagccacggccgccgc

SEQ ID NO: 215029 - RNA, 22 nt, Human
ccaggcucgcgggcucugcgcc

SEQ ID NO: 215030 - RNA, 22 nt, Human
ccccccaacuuuaaaacagauc

SEQ ID NO: 215031 - RNA, 25 nt, Human
ccccccgcggcuacccucgcuggcc

SEQ ID NO: 215032 - RNA, 19 nt, Human
cccccgcggcuacccucgc

SEQ ID NO: 215033 - RNA, 19 nt, Human
ccccgccggcgcgcucgga

SEQ ID NO: 215034 - RNA, 22 nt, Human
cccgaagaucugcgacccacuc

SEQ ID NO: 215035 - RNA, 21 nt, Human
ccgcggcuacccucgcuggcc

SEQ ID NO: 215036 - RNA, 23 nt, Human
ccugcgcgucuccgggggcccgc

SEQ ID NO: 215037 - RNA, 20 nt, Human
cucauucuauuauaguauca

SEQ ID NO: 215038 - RNA, 19 nt, Human
gacccacucccucggugcu

SEQ ID NO: 215039 - RNA, 22 nt, Human
gagccagccacggccgccgcgc

SEQ ID NO: 215040 - RNA, 20 nt, Human
gaucugcgacccacucccuc

SEQ ID NO: 215041 - RNA, 22 nt, Human
uaaaagugaacucuccucccuc

SEQ ID NO: 215042 - RNA, 24 nt, Human
uaaaggcucugcgugcaagagucu

SEQ ID NO: 215043 - RNA, 18 nt, Human
uacaguguggauauguuu

SEQ ID NO: 215044 - RNA, 19 nt, Human
uaggaaaauagguuuacau

SEQ ID NO: 215045 - RNA, 18 nt, Human
uagugcacuuucauuuag

SEQ ID NO: 215046 - RNA, 19 nt, Human
uaucaaauuagcaaaaagg

SEQ ID NO: 215047 - RNA, 25 nt, Human
ucagaguaccuauaucacaguacag

SEQ ID NO: 215048 - RNA, 24 nt, Human
uccccuagccgcccgaagaucugc

SEQ ID NO: 215049 - RNA, 20 nt, Human
ucccucggugcucucucgcc

SEQ ID NO: 215050 - RNA, 18 nt, Human
uccuaauccagaugauac

SEQ ID NO: 215051 - RNA, 21 nt, Human
uccuaauccagaugauacaga

SEQ ID NO: 215052 - RNA, 21 nt, Human
uccuuagucacuuaaaggcuc

SEQ ID NO: 215053 - RNA, 21 nt, Human
ucgccgauuuccccuagccgc

SEQ ID NO: 215054 - RNA, 19 nt, Human
ucuccgggggcccgcccgg

SEQ ID NO: 215055 - RNA, 18 nt, Human
ucuucagaacaguuuugg

SEQ ID NO: 215056 - RNA, 18 nt, Human
ugaggcaguagugcacuu

SEQ ID NO: 215057 - RNA, 27 nt, Human
ugauacagaauccaagaaauuucugua

SEQ ID NO: 215058 - RNA, 23 nt, Human
ugucucauucuauuauaguauca

SEQ ID NO: 215059 - RNA, 24 nt, Human
uguuauuguguugucauuuucaau

SEQ ID NO: 215060 - RNA, 24 nt, Human
uucccaccccccaacuuuaaaaca

SEQ ID NO: 215061 - RNA, 18 nt, Human
aaagagcugcugccagag

SEQ ID NO: 215062 - RNA, 24 nt, Human
aaagugcugggauuacaggcguga

SEQ ID NO: 215063 - RNA, 19 nt, Human
aacacaaaaucacugugaa

SEQ ID NO: 215064 - RNA, 19 nt, Human
aacaugcgccagccuccuc

SEQ ID NO: 215065 - RNA, 18 nt, Human
aaccaugagacuuacagc

SEQ ID NO: 215066 - RNA, 19 nt, Human
aacuaggucuugggccuag

SEQ ID NO: 215067 - RNA, 19 nt, Human
aagugcugggauuacaggc

SEQ ID NO: 215068 - RNA, 19 nt, Human
aagugcugggauuacaggc

SEQ ID NO: 215069 - RNA, 26 nt, Human
aagugcugggauuacaggcgugagcc

SEQ ID NO: 215070 - RNA, 19 nt, Human
acagggucucaucauguug

SEQ ID NO: 215071 - RNA, 19 nt, Human
acccaggcuggagugcagu

SEQ ID NO: 215072 - RNA, 22 nt, Human
accucccaagcauaaaugaucc

SEQ ID NO: 215073 - RNA, 18 nt, Human
accuccuucucucccccg

SEQ ID NO: 215074 - RNA, 18 nt, Human
agaggccugggcugcaga

SEQ ID NO: 215075 - RNA, 21 nt, Human
agagugcugaggacucgugca

SEQ ID NO: 215076 - RNA, 23 nt, Human
agccucccaacaugcgccagccu

SEQ ID NO: 215077 - RNA, 20 nt, Human
agcgauccuccugccuuggc

SEQ ID NO: 215078 - RNA, 23 nt, Human
agcgauccuccugccuuggccuc

SEQ ID NO: 215079 - RNA, 21 nt, Human
agcuucacgggggcauguagu

SEQ ID NO: 215080 - RNA, 18 nt, Human
aucaugacucacugcagc

SEQ ID NO: 215081 - RNA, 24 nt, Human
aucauguugcccuggcuggucuug

SEQ ID NO: 215082 - RNA, 22 nt, Human
augggcccccacccccacugcc

SEQ ID NO: 215083 - RNA, 21 nt, Human
caaagagcugcugccagaggc

SEQ ID NO: 215084 - RNA, 24 nt, Human
caaagugcugggauuacaggcgug

SEQ ID NO: 215085 - RNA, 22 nt, Human
cacaccccugcacagcagcccc

SEQ ID NO: 215086 - RNA, 24 nt, Human
caccacauuaggccagcucgcagg

SEQ ID NO: 215087 - RNA, 19 nt, Human
caccccugcacagcagccc

SEQ ID NO: 215088 - RNA, 22 nt, Human
cagagacagggucucaucaugu

SEQ ID NO: 215089 - RNA, 22 nt, Human
cagagccuagaacagcagggcc

SEQ ID NO: 215090 - RNA, 26 nt, Human
cagagccuagaacagcagggccaccu

SEQ ID NO: 215091 - RNA, 25 nt, Human
cagaggccugggcugcagacgcccu

SEQ ID NO: 215092 - RNA, 18 nt, Human
cagcagccccucuccucc

SEQ ID NO: 215093 - RNA, 27 nt, Human
cagcagcugggaccacaggcgugcgcu

SEQ ID NO: 215094 - RNA, 27 nt, Human
cagcagggccaccuccuucucuccccc

SEQ ID NO: 215095 - RNA, 24 nt, Human
cagccucgaccucccaagcauaaa

SEQ ID NO: 215096 - RNA, 26 nt, Human
cagcgauccuccugccuuggccuccc

SEQ ID NO: 215097 - RNA, 18 nt, Human
cagggucucaucauguug

SEQ ID NO: 215098 - RNA, 24 nt, Human
cagggucuugcucugucacccagg

SEQ ID NO: 215099 - RNA, 18 nt, Human
cauacuucacuuuuccca

SEQ ID NO: 215100 - RNA, 26 nt, Human
caucauguugcccuggcuggucuuga

SEQ ID NO: 215101 - RNA, 20 nt, Human
cauggcucucaggggagcca

SEQ ID NO: 215102 - RNA, 20 nt, Human
cauguugcccuggcuggucu

SEQ ID NO: 215103 - RNA, 23 nt, Human
cauguugcccuggcuggucuuga

SEQ ID NO: 215104 - RNA, 20 nt, Human
ccaaagugcugggauuacag

SEQ ID NO: 215105 - RNA, 22 nt, Human
ccaaagugcugggauuacaggc

SEQ ID NO: 215106 - RNA, 22 nt, Human
ccaaagugcugggauuacaggc

SEQ ID NO: 215107 - RNA, 24 nt, Human
ccaaagugcugggauuacaggcgu

SEQ ID NO: 215108 - RNA, 24 nt, Human
ccaacaugcgccagccuccucacu

SEQ ID NO: 215109 - RNA, 24 nt, Human
ccaugagaacuucugaccaugaga

SEQ ID NO: 215110 - RNA, 21 nt, Human
ccauugugcaggguggccacu

SEQ ID NO: 215111 - RNA, 21 nt, Human
cccacagagccuagaacagca

SEQ ID NO: 215112 - RNA, 21 nt, Human
ccccagcagcugggaccacag

SEQ ID NO: 215113 - RNA, 19 nt, Human
cccccacugccggcagagu

SEQ ID NO: 215114 - RNA, 19 nt, Human
ccccugcacagcagccccu

SEQ ID NO: 215115 - RNA, 19 nt, Human
cccuaggccucgucggccc

SEQ ID NO: 215116 - RNA, 21 nt, Human
cccucugccacaaucagugcc

SEQ ID NO: 215117 - RNA, 19 nt, Human
cccugcacagcagccccuc

SEQ ID NO: 215118 - RNA, 24 nt, Human
ccgcacccggccacacuuuuccag

SEQ ID NO: 215119 - RNA, 18 nt, Human
ccggcagagugcugagga

SEQ ID NO: 215120 - RNA, 23 nt, Human
ccuaugcccacagagccuagaac

SEQ ID NO: 215121 - RNA, 22 nt, Human
ccuccgaagccugaccuggcuc

SEQ ID NO: 215122 - RNA, 24 nt, Human
ccuccuacuucagccuccccagca

SEQ ID NO: 215123 - RNA, 26 nt, Human
ccuccugccuuggccucccaaagugc

SEQ ID NO: 215124 - RNA, 21 nt, Human
ccugaaaauguuucccuuccc

SEQ ID NO: 215125 - RNA, 24 nt, Human
ccugccuuggccucccaaagugcu

SEQ ID NO: 215126 - RNA, 19 nt, Human
ccugugcuacagcccuggg

SEQ ID NO: 215127 - RNA, 28 nt, Human
cgaccucccaagcauaaaugauccuuuu

SEQ ID NO: 215128 - RNA, 20 nt, Human
cuacagcccugggcuacuuu

SEQ ID NO: 215129 - RNA, 19 nt, Human
cuagaacagcagggccacc

SEQ ID NO: 215130 - RNA, 21 nt, Human
cucacugcagccucgaccucc

SEQ ID NO: 215131 - RNA, 23 nt, Human
cuccacaccccugcacagcagcc

SEQ ID NO: 215132 - RNA, 18 nt, Human
cuccagcgauccuccugc

SEQ ID NO: 215133 - RNA, 25 nt, Human
cuccccagcagcugggaccacaggc

SEQ ID NO: 215134 - RNA, 22 nt, Human
cucccccgcgggcaugggcccc

SEQ ID NO: 215135 - RNA, 21 nt, Human
cugaggacucgugcaccauga

SEQ ID NO: 215136 - RNA, 22 nt, Human
cugcagccucgaccucccaagc

SEQ ID NO: 215137 - RNA, 22 nt, Human
cugccggggccucucagggccg

SEQ ID NO: 215138 - RNA, 18 nt, Human
cuggcauggaggcagggu

SEQ ID NO: 215139 - RNA, 25 nt, Human
cuggcuggucuugaccuacuggggg

SEQ ID NO: 215140 - RNA, 20 nt, Human
cugggccugaggcugagcuu

SEQ ID NO: 215141 - RNA, 19 nt, Human
cugucacccaggcuggagu

SEQ ID NO: 215142 - RNA, 19 nt, Human
cuuacagccauacuucacu

SEQ ID NO: 215143 - RNA, 19 nt, Human
cuucagccuccccagcagc

SEQ ID NO: 215144 - RNA, 18 nt, Human
cuugaccuacugggcucc

SEQ ID NO: 215145 - RNA, 21 nt, Human
cuugcucugucacccaggcug

SEQ ID NO: 215146 - RNA, 24 nt, Human
cuugcucugucacccaggcuggag

SEQ ID NO: 215147 - RNA, 25 nt, Human
gagcucgucuguggcgcccagggau

SEQ ID NO: 215148 - RNA, 19 nt, Human
gagguuggaggugggugcu

SEQ ID NO: 215149 - RNA, 18 nt, Human
gauuacaggcgugagcca

SEQ ID NO: 215150 - RNA, 22 nt, Human
gauuacaggcgugagccaccgc

SEQ ID NO: 215151 - RNA, 23 nt, Human
gauuacaggcgugagccaccgca

SEQ ID NO: 215152 - RNA, 18 nt, Human
gcagcugggaccacaggc

SEQ ID NO: 215153 - RNA, 21 nt, Human
gcaggguggccacuguccaaa

SEQ ID NO: 215154 - RNA, 26 nt, Human
gcaugggcccccacccccacugccgg

SEQ ID NO: 215155 - RNA, 21 nt, Human
gccaccuccuucucucccccg

SEQ ID NO: 215156 - RNA, 22 nt, Human
gccuuggccucccaaagugcug

SEQ ID NO: 215157 - RNA, 25 nt, Human
gcucugucacccaggcuggagugca

SEQ ID NO: 215158 - RNA, 19 nt, Human
gcugccagaggccugggcu

SEQ ID NO: 215159 - RNA, 20 nt, Human
ggaggcaggguuccacucug

SEQ ID NO: 215160 - RNA, 20 nt, Human
ggccaccacauuaggccagc

SEQ ID NO: 215161 - RNA, 21 nt, Human
ggccugaggcugagcuugugg

SEQ ID NO: 215162 - RNA, 23 nt, Human
ggccugggcugcagacgcccugc

SEQ ID NO: 215163 - RNA, 23 nt, Human
gggccgggaccugccggggccuc

SEQ ID NO: 215164 - RNA, 19 nt, Human
gggcuccagcgauccuccu

SEQ ID NO: 215165 - RNA, 22 nt, Human
gggcuccagcgauccuccugcc

SEQ ID NO: 215166 - RNA, 18 nt, Human
gggcugcagacgcccugc

SEQ ID NO: 215167 - RNA, 22 nt, Human
gggucugugcagccagcagccu

SEQ ID NO: 215168 - RNA, 20 nt, Human
gugcugcucgacuuucugga

SEQ ID NO: 215169 - RNA, 20 nt, Human
uaaaugauccuccuacuuca

SEQ ID NO: 215170 - RNA, 27 nt, Human
uaaaugauccuccuacuucagccuccc

SEQ ID NO: 215171 - RNA, 30 nt, Human
uaaaugauccuccuacuucagccuccccaa

SEQ ID NO: 215172 - RNA, 24 nt, Human
uacagccauacuucacuuuuccca

SEQ ID NO: 215173 - RNA, 23 nt, Human
uacaggcgugagccaccgcaccc

SEQ ID NO: 215174 - RNA, 21 nt, Human
uacuccacaccccugcacagc

SEQ ID NO: 215175 - RNA, 24 nt, Human
uacuucagccuccccagcagcugg

SEQ ID NO: 215176 - RNA, 24 nt, Human
uaugcccacagagccuagaacagc

SEQ ID NO: 215177 - RNA, 21 nt, Human
ucacccaggcuggagugcagu

SEQ ID NO: 215178 - RNA, 19 nt, Human
ucacugcagccucgaccuc

SEQ ID NO: 215179 - RNA, 24 nt, Human
ucacugcagccucgaccucccaag

SEQ ID NO: 215180 - RNA, 20 nt, Human
ucacuggaugaugccagccu

SEQ ID NO: 215181 - RNA, 18 nt, Human
ucagccuccccagcagcu

SEQ ID NO: 215182 - RNA, 20 nt, Human
ucagccuccccagcagcugg

SEQ ID NO: 215183 - RNA, 24 nt, Human
ucccaaagugcugggauuacaggc

SEQ ID NO: 215184 - RNA, 23 nt, Human
uccccagcagcugggaccacagg

SEQ ID NO: 215185 - RNA, 23 nt, Human
ucccccgcgggcaugggccccca

SEQ ID NO: 215186 - RNA, 24 nt, Human
ucccccgcgggcaugggcccccac

SEQ ID NO: 215187 - RNA, 20 nt, Human
ucccugaaaauguuucccuu

SEQ ID NO: 215188 - RNA, 19 nt, Human
uccuucucucccccgcggg

SEQ ID NO: 215189 - RNA, 20 nt, Human
ucgucuguggcgcccaggga

SEQ ID NO: 215190 - RNA, 22 nt, Human
ucucagaauucucgcuucuugc

SEQ ID NO: 215191 - RNA, 23 nt, Human
ucugaagacaugugauacauguc

SEQ ID NO: 215192 - RNA, 22 nt, Human
ucugaccaugagaacuuugacu

SEQ ID NO: 215193 - RNA, 24 nt, Human
ucugucacccaggcuggagugcag

SEQ ID NO: 215194 - RNA, 22 nt, Human
ucuugcucugucacccaggcug

SEQ ID NO: 215195 - RNA, 23 nt, Human
ucuugcucugucacccaggcugg

SEQ ID NO: 215196 - RNA, 24 nt, Human
ucuugcucugucacccaggcugga

SEQ ID NO: 215197 - RNA, 21 nt, Human
ucuugggccuagcuagaccuu

SEQ ID NO: 215198 - RNA, 21 nt, Human
ugaaaauguuucccuucccug

SEQ ID NO: 215199 - RNA, 19 nt, Human
ugaccaugagaacuuugac

SEQ ID NO: 215200 - RNA, 21 nt, Human
ugagcuuguggccuccgaagc

SEQ ID NO: 215201 - RNA, 18 nt, Human
ugaggacucgugcaccau

SEQ ID NO: 215202 - RNA, 23 nt, Human
ugcacagcagccccucuccuccc

SEQ ID NO: 215203 - RNA, 22 nt, Human
ugcagacgcccugcauggcucu

SEQ ID NO: 215204 - RNA, 19 nt, Human
ugcagccagcagccuccca

SEQ ID NO: 215205 - RNA, 22 nt, Human
ugccaugcucccaacuuuucug

SEQ ID NO: 215206 - RNA, 20 nt, Human
ugccugggccugaggcugag

SEQ ID NO: 215207 - RNA, 22 nt, Human
ugccugggccugaggcugagcu

SEQ ID NO: 215208 - RNA, 19 nt, Human
ugcgccagccuccucacug

SEQ ID NO: 215209 - RNA, 24 nt, Human
ugcucugucacccaggcuggagug

SEQ ID NO: 215210 - RNA, 24 nt, Human
ugcugccagaggccugggcugcag

SEQ ID NO: 215211 - RNA, 24 nt, Human
ugcugggauuacaggcgugagcca

SEQ ID NO: 215212 - RNA, 18 nt, Human
uggaggaucucagaauuc

SEQ ID NO: 215213 - RNA, 24 nt, Human
uggcagagacagggucucaucaug

SEQ ID NO: 215214 - RNA, 20 nt, Human
uggccuccgaagccugaccu

SEQ ID NO: 215215 - RNA, 24 nt, Human
ugggaccacaggcgugcgcuacca

SEQ ID NO: 215216 - RNA, 18 nt, Human
ugggauuacaggcgugag

SEQ ID NO: 215217 - RNA, 19 nt, Human
ugggauuacaggcgugagc

SEQ ID NO: 215218 - RNA, 21 nt, Human
ugggauuacaggcgugagcca

SEQ ID NO: 215219 - RNA, 22 nt, Human
ugggauuacaggcgugagccac

SEQ ID NO: 215220 - RNA, 23 nt, Human
ugggauuacaggcgugagccacc

SEQ ID NO: 215221 - RNA, 24 nt, Human
ugggauuacaggcgugagccaccg

SEQ ID NO: 215222 - RNA, 22 nt, Human
ugggcaaagagcugcugccaga

SEQ ID NO: 215223 - RNA, 25 nt, Human
ugggcaaagagcugcugccagaggc

SEQ ID NO: 215224 - RNA, 27 nt, Human
ugggcccccacccccacugccggcagg

SEQ ID NO: 215225 - RNA, 22 nt, Human
ugggcuacuuuuggacacgcaa

SEQ ID NO: 215226 - RNA, 24 nt, Human
ugggcuccagcgauccuccugccu

SEQ ID NO: 215227 - RNA, 22 nt, Human
uuccacucugccugccuaugcc

SEQ ID NO: 215228 - RNA, 21 nt, Human
uuggcagagacagggucucau

SEQ ID NO: 215229 - RNA, 18 nt, Human
uuggccucccaaagugcu

SEQ ID NO: 215230 - RNA, 25 nt, Human
uuuuucuuuuugaaacagggucuug

SEQ ID NO: 215231 - RNA, 18 nt, Human
uuuuuuggcagagacagg

SEQ ID NO: 215232 - RNA, 25 nt, Human
aaagugcugggauuuacagguauga

SEQ ID NO: 215233 - RNA, 21 nt, Human
aacccuguaauuuucaaacug

SEQ ID NO: 215234 - RNA, 20 nt, Human
aaccucuaccucccugguuc

SEQ ID NO: 215235 - RNA, 19 nt, Human
aacuggcucuauaaacuuu

SEQ ID NO: 215236 - RNA, 21 nt, Human
aacuguguuuggugaugcuug

SEQ ID NO: 215237 - RNA, 23 nt, Human
aagaagaauauuuaggaaaaaaa

SEQ ID NO: 215238 - RNA, 19 nt, Human
aagcacagcagauauuagc

SEQ ID NO: 215239 - RNA, 18 nt, Human
aagcuuggaguacucuuc

SEQ ID NO: 215240 - RNA, 19 nt, Human
aaguagcugggacuacagg

SEQ ID NO: 215241 - RNA, 20 nt, Human
aaguagcugggacuacaggu

SEQ ID NO: 215242 - RNA, 25 nt, Human
aaguagcugggacuacaggugucca

SEQ ID NO: 215243 - RNA, 24 nt, Human
accauguuggccaggccggucuug

SEQ ID NO: 215244 - RNA, 18 nt, Human
acgggguuucaccauguu

SEQ ID NO: 215245 - RNA, 23 nt, Human
acgggguuucaccauguuggcca

SEQ ID NO: 215246 - RNA, 24 nt, Human
acgggguuucaccauguuggccag

SEQ ID NO: 215247 - RNA, 18 nt, Human
acucugucacccaggcug

SEQ ID NO: 215248 - RNA, 25 nt, Human
acucugucacccaggcuggagugca

SEQ ID NO: 215249 - RNA, 23 nt, Human
agauuuuuggcagaauucaguuc

SEQ ID NO: 215250 - RNA, 20 nt, Human
agcuagucuccugccucagc

SEQ ID NO: 215251 - RNA, 18 nt, Human
agcuuggaguacucuucu

SEQ ID NO: 215252 - RNA, 23 nt, Human
aggaaaaaaaucaguuaaaaaaa

SEQ ID NO: 215253 - RNA, 24 nt, Human
aggaaccuuaacugcaucugccaa

SEQ ID NO: 215254 - RNA, 25 nt, Human
aggcuggagugcaguggcacgaucu

SEQ ID NO: 215255 - RNA, 24 nt, Human
aggugaucugccugccucggccuc

SEQ ID NO: 215256 - RNA, 18 nt, Human
aggugucagcccaggcug

SEQ ID NO: 215257 - RNA, 21 nt, Human
agucuccugccucagccuccc

SEQ ID NO: 215258 - RNA, 21 nt, Human
agugcaguggcacgaucucag

SEQ ID NO: 215259 - RNA, 23 nt, Human
agugcaguggcacgaucucagcu

SEQ ID NO: 215260 - RNA, 24 nt, Human
agugcaguggcacgaucucagcuc

SEQ ID NO: 215261 - RNA, 18 nt, Human
auuacuguaagaacuggg

SEQ ID NO: 215262 - RNA, 23 nt, Human
auuuauuuaugauggagucucac

SEQ ID NO: 215263 - RNA, 24 nt, Human
auuuuuguauuuuuaguagagacg

SEQ ID NO: 215264 - RNA, 25 nt, Human
caaagugcugggauuuacagguaug

SEQ ID NO: 215265 - RNA, 18 nt, Human
caccauguuggccaggcc

SEQ ID NO: 215266 - RNA, 21 nt, Human
caccauguuggccaggccggu

SEQ ID NO: 215267 - RNA, 24 nt, Human
caccauguuggccaggccggucuu

SEQ ID NO: 215268 - RNA, 27 nt, Human
caccauguuggccaggccggucuugaa

SEQ ID NO: 215269 - RNA, 23 nt, Human
cacucugucacccaggcuggagu

SEQ ID NO: 215270 - RNA, 24 nt, Human
cacucugucacccaggcuggagug

SEQ ID NO: 215271 - RNA, 23 nt, Human
cagcacagaacagauagauucuc

SEQ ID NO: 215272 - RNA, 22 nt, Human
caggugaucugccugccucggc

SEQ ID NO: 215273 - RNA, 19 nt, Human
cagguguccaccaccacgc

SEQ ID NO: 215274 - RNA, 21 nt, Human
cagguguccaccaccacgcuc

SEQ ID NO: 215275 - RNA, 24 nt, Human
cauguuggccaggccggucuugaa

SEQ ID NO: 215276 - RNA, 21 nt, Human
ccaaagugcugggauuuacag

SEQ ID NO: 215277 - RNA, 22 nt, Human
ccaaagugcugggauuuacagg

SEQ ID NO: 215278 - RNA, 23 nt, Human
ccaaagugcugggauuuacaggu

SEQ ID NO: 215279 - RNA, 25 nt, Human
ccaaagugcugggauuuacagguau

SEQ ID NO: 215280 - RNA, 22 nt, Human
cccaaguagcugggacuacagg

SEQ ID NO: 215281 - RNA, 23 nt, Human
cccaaguagcugggacuacaggu

SEQ ID NO: 215282 - RNA, 23 nt, Human
cccugguuccagcuagucuccug

SEQ ID NO: 215283 - RNA, 21 nt, Human
ccggucuugaacucuugaccu

SEQ ID NO: 215284 - RNA, 24 nt, Human
ccugccucagccucccaaguagcu

SEQ ID NO: 215285 - RNA, 19 nt, Human
ccugcuugcugacaacugg

SEQ ID NO: 215286 - RNA, 24 nt, Human
cgggguuucaccauguuggccagg

SEQ ID NO: 215287 - RNA, 24 nt, Human
cucacucugucacccaggcuggag

SEQ ID NO: 215288 - RNA, 24 nt, Human
cucagccucccaaguagcugggac

SEQ ID NO: 215289 - RNA, 18 nt, Human
cucuaccucccugguucc

SEQ ID NO: 215290 - RNA, 26 nt, Human
cucuugaccucaggugaucugccugc

SEQ ID NO: 215291 - RNA, 21 nt, Human
cugcaaccucuaccucccugg

SEQ ID NO: 215292 - RNA, 24 nt, Human
cugcaaccucuaccucccugguuc

SEQ ID NO: 215293 - RNA, 23 nt, Human
cugccucggccucccaaagugcu

SEQ ID NO: 215294 - RNA, 24 nt, Human
gaccucaggugaucugccugccuc

SEQ ID NO: 215295 - RNA, 24 nt, Human
gagacgggguuucaccauguuggc

SEQ ID NO: 215296 - RNA, 20 nt, Human
gccucagccucccaaguagc

SEQ ID NO: 215297 - RNA, 19 nt, Human
gcuggagugcaguggcacg

SEQ ID NO: 215298 - RNA, 23 nt, Human
ggauuuacagguaugagccacca

SEQ ID NO: 215299 - RNA, 24 nt, Human
gggauuuacagguaugagccacca

SEQ ID NO: 215300 - RNA, 23 nt, Human
gggguuucaccauguuggccagg

SEQ ID NO: 215301 - RNA, 25 nt, Human
gguaaagaagaauauuuaggaaaaa

SEQ ID NO: 215302 - RNA, 24 nt, Human
ggucaggcccuuucaacagucuca

SEQ ID NO: 215303 - RNA, 23 nt, Human
guagagacgggguuucaccaugu

SEQ ID NO: 215304 - RNA, 18 nt, Human
gucccaauuuuuuuuucc

SEQ ID NO: 215305 - RNA, 24 nt, Human
gugaacacaaucuauaaauauaug

SEQ ID NO: 215306 - RNA, 18 nt, Human
guuaaagguaaagaagaa

SEQ ID NO: 215307 - RNA, 24 nt, Human
uaauuuuuguauuuuuaguagaga

SEQ ID NO: 215308 - RNA, 24 nt, Human
uacagguaugagccaccacaucca

SEQ ID NO: 215309 - RNA, 19 nt, Human
uacagguguccaccaccac

SEQ ID NO: 215310 - RNA, 22 nt, Human
uagagacgggguuucaccaugu

SEQ ID NO: 215311 - RNA, 24 nt, Human
uaggaaaaaaaucaguuaaaaaaa

SEQ ID NO: 215312 - RNA, 24 nt, Human
uaguagagacgggguuucaccaug

SEQ ID NO: 215313 - RNA, 25 nt, Human
uaguagagacgggguuucaccaugu

SEQ ID NO: 215314 - RNA, 19 nt, Human
uagucuccugccucagccu

SEQ ID NO: 215315 - RNA, 25 nt, Human
uauauuagaaguccagcacagaaca

SEQ ID NO: 215316 - RNA, 19 nt, Human
uauuagaaguccagcacag

SEQ ID NO: 215317 - RNA, 24 nt, Human
ucacccaggcuggagugcaguggc

SEQ ID NO: 215318 - RNA, 24 nt, Human
ucacucugucacccaggcuggagu

SEQ ID NO: 215319 - RNA, 24 nt, Human
ucacugcaaccucuaccucccugg

SEQ ID NO: 215320 - RNA, 24 nt, Human
ucacugcaaccucuaccucccugg

SEQ ID NO: 215321 - RNA, 25 nt, Human
ucacugcaaccucuaccucccuggu

SEQ ID NO: 215322 - RNA, 18 nt, Human
ucagccucccaaguagcu

SEQ ID NO: 215323 - RNA, 23 nt, Human
uccagccaaugugacccauuauc

SEQ ID NO: 215324 - RNA, 23 nt, Human
uccaggugucagcccaggcugug

SEQ ID NO: 215325 - RNA, 18 nt, Human
ucccaaagugcugggauu

SEQ ID NO: 215326 - RNA, 24 nt, Human
ucccaaagugcugggauuuacagg

SEQ ID NO: 215327 - RNA, 24 nt, Human
ucccaaguagcugggacuacaggu

SEQ ID NO: 215328 - RNA, 18 nt, Human
ucggccucccaaagugcu

SEQ ID NO: 215329 - RNA, 18 nt, Human
ucucacaguucuauauau

SEQ ID NO: 215330 - RNA, 23 nt, Human
ucucacucugucacccaggcugg

SEQ ID NO: 215331 - RNA, 24 nt, Human
ucucacucugucacccaggcugga

SEQ ID NO: 215332 - RNA, 26 nt, Human
ucucacucugucacccaggcuggagu

SEQ ID NO: 215333 - RNA, 27 nt, Human
ucucacucugucacccaggcuggagug

SEQ ID NO: 215334 - RNA, 26 nt, Human
ucuccugccucagccucccaaguagc

SEQ ID NO: 215335 - RNA, 24 nt, Human
ucugucacccaggcuggagugcag

SEQ ID NO: 215336 - RNA, 24 nt, Human
ugaagcuuggaguacucuucuaag

SEQ ID NO: 215337 - RNA, 22 nt, Human
ugacccauuuauuuauuuauuu

SEQ ID NO: 215338 - RNA, 18 nt, Human
ugaccucaggugaucugc

SEQ ID NO: 215339 - RNA, 19 nt, Human
ugaccucaggugaucugcc

SEQ ID NO: 215340 - RNA, 21 nt, Human
ugaccucaggugaucugccug

SEQ ID NO: 215341 - RNA, 24 nt, Human
ugaccucaggugaucugccugccu

SEQ ID NO: 215342 - RNA, 25 nt, Human
ugagauagguguauauaaaaaguca

SEQ ID NO: 215343 - RNA, 20 nt, Human
ugauaugguggcucuauuuu

SEQ ID NO: 215344 - RNA, 24 nt, Human
ugccucagccucccaaguagcugg

SEQ ID NO: 215345 - RNA, 21 nt, Human
ugccucggccucccaaagugc

SEQ ID NO: 215346 - RNA, 24 nt, Human
ugccucggccucccaaagugcugg

SEQ ID NO: 215347 - RNA, 23 nt, Human
uggagugcaguggcacgaucuca

SEQ ID NO: 215348 - RNA, 24 nt, Human
uggagugcaguggcacgaucucag

SEQ ID NO: 215349 - RNA, 24 nt, Human
uggcacgaucucagcucacugcaa

SEQ ID NO: 215350 - RNA, 24 nt, Human
uggccaggccggucuugaacucuu

SEQ ID NO: 215351 - RNA, 21 nt, Human
ugggacuacagguguccacca

SEQ ID NO: 215352 - RNA, 24 nt, Human
ugggacuacagguguccaccacca

SEQ ID NO: 215353 - RNA, 28 nt, Human
uggguagggcuaaguguugauauggugg

SEQ ID NO: 215354 - RNA, 21 nt, Human
uguauuuuuaguagagacggg

SEQ ID NO: 215355 - RNA, 21 nt, Human
uuacuguaagaacugggggug

SEQ ID NO: 215356 - RNA, 18 nt, Human
uuaguagagacgggguuu

SEQ ID NO: 215357 - RNA, 22 nt, Human
uuaguagagacgggguuucacc

SEQ ID NO: 215358 - RNA, 24 nt, Human
uuaguagagacgggguuucaccau

SEQ ID NO: 215359 - RNA, 21 nt, Human
uuauuuauuuauuuauuuaug

SEQ ID NO: 215360 - RNA, 26 nt, Human
uucaaacuguguuuggugaugcuuga

SEQ ID NO: 215361 - RNA, 20 nt, Human
uuccugcuugcugacaacug

SEQ ID NO: 215362 - RNA, 21 nt, Human
uuccuugugguugcaacugag

SEQ ID NO: 215363 - RNA, 20 nt, Human
uuguuaaagguaaagaagaa

SEQ ID NO: 215364 - RNA, 23 nt, Human
uuuaggaaaaaaaucaguuaaaa

SEQ ID NO: 215365 - RNA, 19 nt, Human
uuuauuuaugauggagucu

SEQ ID NO: 215366 - RNA, 24 nt, Human
uuucaccauguuggccaggccggu

SEQ ID NO: 215367 - RNA, 22 nt, Human
uuuccacccuacauacagccca

SEQ ID NO: 215368 - RNA, 25 nt, Human
uuucucagggauuacuguaagaacu

SEQ ID NO: 215369 - RNA, 24 nt, Human
uuuuuaguagagacgggguuucac

SEQ ID NO: 215370 - RNA, 20 nt, Human
uuuuuguauuuuuaguagag

SEQ ID NO: 215371 - RNA, 18 nt, Human
aaauaugaaaggcugcau

SEQ ID NO: 215372 - RNA, 21 nt, Human
aacacaaauucugccuuuauu

SEQ ID NO: 215373 - RNA, 22 nt, Human
aacacacuucacacguugauuu

SEQ ID NO: 215374 - RNA, 18 nt, Human
aagaaaucaguucagagu

SEQ ID NO: 215375 - RNA, 19 nt, Human
acaaacuaagaaugccaaa

SEQ ID NO: 215376 - RNA, 22 nt, Human
acacaaucaguuguauccugcc

SEQ ID NO: 215377 - RNA, 20 nt, Human
agagucuaaucuggcuucuu

SEQ ID NO: 215378 - RNA, 21 nt, Human
aguauacugggacuaucugcu

SEQ ID NO: 215379 - RNA, 18 nt, Human
aguggcaaacugcugaaa

SEQ ID NO: 215380 - RNA, 19 nt, Human
augaaaggcugcaucauau

SEQ ID NO: 215381 - RNA, 21 nt, Human
auuuaaauguauagaagaaau

SEQ ID NO: 215382 - RNA, 18 nt, Human
cacaacacacuucacacg

SEQ ID NO: 215383 - RNA, 21 nt, Human
cacaguggcaaacugcugaaa

SEQ ID NO: 215384 - RNA, 23 nt, Human
cauacuuacaggucucuuccaca

SEQ ID NO: 215385 - RNA, 19 nt, Human
ccagacagucacaguggca

SEQ ID NO: 215386 - RNA, 18 nt, Human
ccauacuuacaggucucu

SEQ ID NO: 215387 - RNA, 20 nt, Human
cccauacuuacaggucucuu

SEQ ID NO: 215388 - RNA, 22 nt, Human
ccccauacuuacaggucucuuc

SEQ ID NO: 215389 - RNA, 18 nt, Human
cgccccccccccauacuu

SEQ ID NO: 215390 - RNA, 23 nt, Human
cugcaucauaugugauacauauu

SEQ ID NO: 215391 - RNA, 24 nt, Human
cugcugaaauaugaaaggcugcau

SEQ ID NO: 215392 - RNA, 18 nt, Human
ggacagaaugauugugac

SEQ ID NO: 215393 - RNA, 22 nt, Human
gggggcuugccagacagucaca

SEQ ID NO: 215394 - RNA, 20 nt, Human
guggagggaaccuuggcugg

SEQ ID NO: 215395 - RNA, 20 nt, Human
uaaaauaucgcccccccccc

SEQ ID NO: 215396 - RNA, 25 nt, Human
uaaggugagcaaaauaaucuaaucc

SEQ ID NO: 215397 - RNA, 24 nt, Human
uacacaguuuuauuggugcaaaac

SEQ ID NO: 215398 - RNA, 24 nt, Human
uacaggucucuuccacaacacacu

SEQ ID NO: 215399 - RNA, 21 nt, Human
uacaguauuacauaaggugag

SEQ ID NO: 215400 - RNA, 24 nt, Human
uauacugggacuaucugcugcucc

SEQ ID NO: 215401 - RNA, 27 nt, Human
uaugaaaggcugcaucauaugugauag

SEQ ID NO: 215402 - RNA, 21 nt, Human
uauuggugcaaaacuaaacaa

SEQ ID NO: 215403 - RNA, 20 nt, Human
uccaauggccacaauuuuag

SEQ ID NO: 215404 - RNA, 21 nt, Human
uccaugguaaggauuccuggg

SEQ ID NO: 215405 - RNA, 23 nt, Human
uccggggagggggccagcggggg

SEQ ID NO: 215406 - RNA, 26 nt, Human
uccggggagggggccagcgggggaag

SEQ ID NO: 215407 - RNA, 20 nt, Human
uccuggguccagcacaaaag

SEQ ID NO: 215408 - RNA, 21 nt, Human
ucgccccccccccauacuuac

SEQ ID NO: 215409 - RNA, 26 nt, Human
ucuggcuucuuauauuucaaucuggu

SEQ ID NO: 215410 - RNA, 19 nt, Human
ucuuccacaacacacuuca

SEQ ID NO: 215411 - RNA, 21 nt, Human
ugauaaaauaucgccccccuc

SEQ ID NO: 215412 - RNA, 21 nt, Human
ugcauaggguugagcacccgu

SEQ ID NO: 215413 - RNA, 21 nt, Human
ugcuaauacauggugccacac

SEQ ID NO: 215414 - RNA, 24 nt, Human
ugcuacucuuaaaccaacaaacag

SEQ ID NO: 215415 - RNA, 20 nt, Human
uguggagggaaccuuggcug

SEQ ID NO: 215416 - RNA, 20 nt, Human
uuggugcaaaacuaaacaaa

SEQ ID NO: 215417 - RNA, 24 nt, Human
uuuaaugauugaauaacauucucu

SEQ ID NO: 215418 - RNA, 18 nt, Human
aaaagccagacacugacu

SEQ ID NO: 215419 - RNA, 19 nt, Human
aaauaaaugcaaaggccaa

SEQ ID NO: 215420 - RNA, 19 nt, Human
aaaugcaaaggccaagagc

SEQ ID NO: 215421 - RNA, 20 nt, Human
aauguacauauuuacacacg

SEQ ID NO: 215422 - RNA, 22 nt, Human
acaccacaagaaaaacccagac

SEQ ID NO: 215423 - RNA, 23 nt, Human
acaugacuuaaugguuagaugac

SEQ ID NO: 215424 - RNA, 18 nt, Human
acuccgaguggaagaggg

SEQ ID NO: 215425 - RNA, 21 nt, Human
agaaaaacccagacacuggcc

SEQ ID NO: 215426 - RNA, 31 nt, Human
agacaaauguacauauuuacacacguccuuu

SEQ ID NO: 215427 - RNA, 23 nt, Human
agagcucgggggaaauguuagug

SEQ ID NO: 215428 - RNA, 23 nt, Human
agcugggcucagaggaaaaagcc

SEQ ID NO: 215429 - RNA, 18 nt, Human
aggccaagagcucggggg

SEQ ID NO: 215430 - RNA, 23 nt, Human
auacacuggucucagaaccucau

SEQ ID NO: 215431 - RNA, 19 nt, Human
augacauuuccaauuuuaa

SEQ ID NO: 215432 - RNA, 27 nt, Human
caagaaaaacccagacacuggccugcc

SEQ ID NO: 215433 - RNA, 22 nt, Human
caagagcucgggggaaauguua

SEQ ID NO: 215434 - RNA, 24 nt, Human
caagauccacacgaaaaagugcca

SEQ ID NO: 215435 - RNA, 20 nt, Human
cacacgaaaaagugccaagu

SEQ ID NO: 215436 - RNA, 19 nt, Human
caccacaagaaaaacccag

SEQ ID NO: 215437 - RNA, 23 nt, Human
cacuguauaaauaaaugcaaagg

SEQ ID NO: 215438 - RNA, 19 nt, Human
cagccaaagcagggagcag

SEQ ID NO: 215439 - RNA, 21 nt, Human
cauuucacuggcuuuggaaca

SEQ ID NO: 215440 - RNA, 21 nt, Human
ccaagucccugaccugauaca

SEQ ID NO: 215441 - RNA, 27 nt, Human
cccacagaaguccagcuucucugcacc

SEQ ID NO: 215442 - RNA, 18 nt, Human
cccacuuggcaguggggu

SEQ ID NO: 215443 - RNA, 21 nt, Human
ccggcgacgcaggggcugcag

SEQ ID NO: 215444 - RNA, 18 nt, Human
ccucugaggcugagggag

SEQ ID NO: 215445 - RNA, 19 nt, Human
cgccgagcaaggcacugua

SEQ ID NO: 215446 - RNA, 29 nt, Human
cguggacugggcacggcuccggguggccu

SEQ ID NO: 215447 - RNA, 22 nt, Human
cucagaaccucaucuucccagg

SEQ ID NO: 215448 - RNA, 21 nt, Human
cuccgaguggaagagggaaga

SEQ ID NO: 215449 - RNA, 23 nt, Human
cugggcucagaggaaaaagccag

SEQ ID NO: 215450 - RNA, 19 nt, Human
cuggggcuugagggggugg

SEQ ID NO: 215451 - RNA, 20 nt, Human
cuuauguguucacacaugac

SEQ ID NO: 215452 - RNA, 25 nt, Human
gaccccacuuuccuucacauuucac

SEQ ID NO: 215453 - RNA, 20 nt, Human
gcaguggggucacacuuggc

SEQ ID NO: 215454 - RNA, 18 nt, Human
gccagcuuuacaccacaa

SEQ ID NO: 215455 - RNA, 21 nt, Human
gccagcuuuacaccacaagaa

SEQ ID NO: 215456 - RNA, 19 nt, Human
gccuguugagggcugcugg

SEQ ID NO: 215457 - RNA, 25 nt, Human
ggaggcagggccagcuucccaaggg

SEQ ID NO: 215458 - RNA, 28 nt, Human
ggccggcguggacugggcacggcuccgg

SEQ ID NO: 215459 - RNA, 23 nt, Human
ggucacacuuggcuguugagggg

SEQ ID NO: 215460 - RNA, 20 nt, Human
guacaccucugaucagaaau

SEQ ID NO: 215461 - RNA, 22 nt, Human
uaaauaaaugcaaaggccaaga

SEQ ID NO: 215462 - RNA, 22 nt, Human
uaaaugcaaaggccaagagcuc

SEQ ID NO: 215463 - RNA, 21 nt, Human
uauaaauaaaugcaaaggcca

SEQ ID NO: 215464 - RNA, 18 nt, Human
ucagccaaagcagggagc

SEQ ID NO: 215465 - RNA, 22 nt, Human
ucagcugaaaaggggguaguuc

SEQ ID NO: 215466 - RNA, 22 nt, Human
uccacacgaaaaagugccaagu

SEQ ID NO: 215467 - RNA, 20 nt, Human
ucccaagccccucagccaaa

SEQ ID NO: 215468 - RNA, 19 nt, Human
ucccugggccuguugaggg

SEQ ID NO: 215469 - RNA, 22 nt, Human
ucccugggccuguugagggcug

SEQ ID NO: 215470 - RNA, 21 nt, Human
ucuccaggcagcugggcucag

SEQ ID NO: 215471 - RNA, 19 nt, Human
ugacuccuguccaaguccc

SEQ ID NO: 215472 - RNA, 23 nt, Human
ugagggcugcuggggcuugaggg

SEQ ID NO: 215473 - RNA, 20 nt, Human
ugcagagccagcccugggau

SEQ ID NO: 215474 - RNA, 19 nt, Human
uggaagagggaagaaggca

SEQ ID NO: 215475 - RNA, 24 nt, Human
uggaagagggaagaaggcagaggu

SEQ ID NO: 215476 - RNA, 22 nt, Human
uggucuguuccccuaggagcca

SEQ ID NO: 215477 - RNA, 21 nt, Human
uguacauauuuacacacgucc

SEQ ID NO: 215478 - RNA, 21 nt, Human
uguccaagucccugaccugau

SEQ ID NO: 215479 - RNA, 21 nt, Human
uguugaggggcccacagaagu

SEQ ID NO: 215480 - RNA, 20 nt, Human
uugguguuaugcuuuucugg

SEQ ID NO: 215481 - RNA, 22 nt, Human
uugguguuaugcuuuucugggg

SEQ ID NO: 215482 - RNA, 23 nt, Human
uuuggaacaguccccagggcuca

SEQ ID NO: 215483 - RNA, 23 nt, Human
uuuucccaagccccucagccaaa

SEQ ID NO: 215484 - RNA, 19 nt, Human
aaaaaauaaaaaagcuugc

SEQ ID NO: 215485 - RNA, 23 nt, Human
aaacaaacaacaaaacaaagcca

SEQ ID NO: 215486 - RNA, 26 nt, Human
aaacaaacaacaaaacaaagccaagg

SEQ ID NO: 215487 - RNA, 22 nt, Human
aaacaacaaaacaaagccaaga

SEQ ID NO: 215488 - RNA, 19 nt, Human
aaacaagaaaaggaaucuu

SEQ ID NO: 215489 - RNA, 18 nt, Human
aaauggaaaugaaagccc

SEQ ID NO: 215490 - RNA, 24 nt, Human
aaauuaaaaaaaaaugugccacaa

SEQ ID NO: 215491 - RNA, 24 nt, Human
aacaaacaacaaaacaaagccaag

SEQ ID NO: 215492 - RNA, 19 nt, Human
aacaaagccaagaagcccc

SEQ ID NO: 215493 - RNA, 22 nt, Human
aacaacaaaacaaagccaagaa

SEQ ID NO: 215494 - RNA, 24 nt, Human
aacugcugauaaacaagaaaagga

SEQ ID NO: 215495 - RNA, 22 nt, Human
aagaaaaggaaucuuaaaauua

SEQ ID NO: 215496 - RNA, 22 nt, Human
aagagcgggaugggaugggaug

SEQ ID NO: 215497 - RNA, 22 nt, Human
aaguaggaaaagagcgggaugg

SEQ ID NO: 215498 - RNA, 21 nt, Human
aaugcagcaccuccacugccc

SEQ ID NO: 215499 - RNA, 24 nt, Human
aauucauuuccuucuucuccuccg

SEQ ID NO: 215500 - RNA, 20 nt, Human
acaaaacaaagccaagaagc

SEQ ID NO: 215501 - RNA, 30 nt, Human
acaaacaaacaacaaaacaaagccaagaag

SEQ ID NO: 215502 - RNA, 19 nt, Human
agaguauuuuugucuucaa

SEQ ID NO: 215503 - RNA, 20 nt, Human
agauccagcaggcucuagaa

SEQ ID NO: 215504 - RNA, 22 nt, Human
aggaaaaguaggaaaagagccg

SEQ ID NO: 215505 - RNA, 22 nt, Human
aggcuggggaaugggcagagaa

SEQ ID NO: 215506 - RNA, 19 nt, Human
agucugaaaaugggacauc

SEQ ID NO: 215507 - RNA, 18 nt, Human
auggaaaugaaagcccgu

SEQ ID NO: 215508 - RNA, 20 nt, Human
caaaacaaagccaagaagcc

SEQ ID NO: 215509 - RNA, 21 nt, Human
caaaacaaagccaagaagccc

SEQ ID NO: 215510 - RNA, 23 nt, Human
caaaacaaagccaagaagcccca

SEQ ID NO: 215511 - RNA, 22 nt, Human
caaacaaacaacaaaacaaagc

SEQ ID NO: 215512 - RNA, 27 nt, Human
caaacaaacaacaaaacaaagccaaga

SEQ ID NO: 215513 - RNA, 27 nt, Human
caacaaaacaaagccaagaagccccaa

SEQ ID NO: 215514 - RNA, 20 nt, Human
caaccaccgcggagagucag

SEQ ID NO: 215515 - RNA, 20 nt, Human
caagaagccccaacaaccac

SEQ ID NO: 215516 - RNA, 22 nt, Human
caagaaggccuaucuguaagug

SEQ ID NO: 215517 - RNA, 18 nt, Human
caaugcagcaccuccacu

SEQ ID NO: 215518 - RNA, 19 nt, Human
caccuugcuggccuugacc

SEQ ID NO: 215519 - RNA, 18 nt, Human
cagcaggcucuagaaaca

SEQ ID NO: 215520 - RNA, 23 nt, Human
caggaaaaucugauugcuagaug

SEQ ID NO: 215521 - RNA, 23 nt, Human
ccccaacaaccaccgcggagagu

SEQ ID NO: 215522 - RNA, 19 nt, Human
ccuccggauguggaaugga

SEQ ID NO: 215523 - RNA, 22 nt, Human
ccuccggauguggaauggaagc

SEQ ID NO: 215524 - RNA, 21 nt, Human
cuagaaacacacgucuaccaa

SEQ ID NO: 215525 - RNA, 19 nt, Human
cugcccuuguugguccuug

SEQ ID NO: 215526 - RNA, 24 nt, Human
gaaaaggaaucuuaaaauuauaaa

SEQ ID NO: 215527 - RNA, 18 nt, Human
gcccuuguugguccuuga

SEQ ID NO: 215528 - RNA, 20 nt, Human
gcuuugagggaaggaaaagu

SEQ ID NO: 215529 - RNA, 24 nt, Human
ggaauggaagcuuugagggaagga

SEQ ID NO: 215530 - RNA, 25 nt, Human
ggagauccagcaggcucuagaaaca

SEQ ID NO: 215531 - RNA, 22 nt, Human
ggauaggaagagaggcugggga

SEQ ID NO: 215532 - RNA, 18 nt, Human
gggaaugggcagagaagg

SEQ ID NO: 215533 - RNA, 20 nt, Human
gggaaugggcagagaagggg

SEQ ID NO: 215534 - RNA, 18 nt, Human
gggaugggauaggaagag

SEQ ID NO: 215535 - RNA, 18 nt, Human
ggggaaugggcagagaag

SEQ ID NO: 215536 - RNA, 18 nt, Human
ggggaaugggcagagaag

SEQ ID NO: 215537 - RNA, 20 nt, Human
gugcuuuaagauaaggugca

SEQ ID NO: 215538 - RNA, 23 nt, Human
uaaaauacaaacaaacaacaaaa

SEQ ID NO: 215539 - RNA, 22 nt, Human
uaaagcagucugaaaaugggac

SEQ ID NO: 215540 - RNA, 24 nt, Human
uaagauaaggugcagaagcagacu

SEQ ID NO: 215541 - RNA, 22 nt, Human
uaaggugcagaagcagacugca

SEQ ID NO: 215542 - RNA, 27 nt, Human
uagagcaagaucacaagaaggccuauc

SEQ ID NO: 215543 - RNA, 19 nt, Human
uagaugagcucauaaaagc

SEQ ID NO: 215544 - RNA, 25 nt, Human
uaucucguccguucugaggcaucca

SEQ ID NO: 215545 - RNA, 20 nt, Human
ucagagagaaaaaaauaaaa

SEQ ID NO: 215546 - RNA, 20 nt, Human
uccacuccaccuugcuggcc

SEQ ID NO: 215547 - RNA, 22 nt, Human
uccccuguauaaaaaauaaaaa

SEQ ID NO: 215548 - RNA, 20 nt, Human
uccuuuguaccgcguggcau

SEQ ID NO: 215549 - RNA, 22 nt, Human
ucucagugugcuuuuuucacgc

SEQ ID NO: 215550 - RNA, 18 nt, Human
ucuccuccggauguggaa

SEQ ID NO: 215551 - RNA, 19 nt, Human
ugaaauggaaaugaaagcc

SEQ ID NO: 215552 - RNA, 19 nt, Human
ugaguuaaagagaagcucc

SEQ ID NO: 215553 - RNA, 20 nt, Human
ugccacaaggauguaauaac

SEQ ID NO: 215554 - RNA, 18 nt, Human
uggaauggaagcuuugag

SEQ ID NO: 215555 - RNA, 18 nt, Human
uggaauggaagcuuugag

SEQ ID NO: 215556 - RNA, 23 nt, Human
uggaauggaagcuuugagggaag

SEQ ID NO: 215557 - RNA, 24 nt, Human
ugggauaggaagagaggcugggga

SEQ ID NO: 215558 - RNA, 18 nt, Human
ugggaugggaugggauag

SEQ ID NO: 215559 - RNA, 18 nt, Human
ugggaugggaugggaugg

SEQ ID NO: 215560 - RNA, 18 nt, Human
ugggaugggaugggaugg

SEQ ID NO: 215561 - RNA, 18 nt, Human
ugggaugggaugggaugg

SEQ ID NO: 215562 - RNA, 18 nt, Human
ugggaugggaugggaugg

SEQ ID NO: 215563 - RNA, 19 nt, Human
ugggaugggaugggauggg

SEQ ID NO: 215564 - RNA, 19 nt, Human
ugggaugggaugggauggg

SEQ ID NO: 215565 - RNA, 19 nt, Human
ugggaugggaugggauggg

SEQ ID NO: 215566 - RNA, 19 nt, Human
ugggaugggaugggauggg

SEQ ID NO: 215567 - RNA, 24 nt, Human
ugggaugggaugggaugggauggg

SEQ ID NO: 215568 - RNA, 18 nt, Human
ugggcagagaaggggguc

SEQ ID NO: 215569 - RNA, 24 nt, Human
ugucuucaaaucugggaauuugca

SEQ ID NO: 215570 - RNA, 25 nt, Human
uuaaaauuauaaauuugcuguagaa

SEQ ID NO: 215571 - RNA, 23 nt, Human
uuccaugauacuuuuuccuuugu

SEQ ID NO: 215572 - RNA, 19 nt, Human
acgauggaaggucggggcg

SEQ ID NO: 215573 - RNA, 21 nt, Human
aggugguggggaacagggggg

SEQ ID NO: 215574 - RNA, 20 nt, Human
caguuuauugguugaggugg

SEQ ID NO: 215575 - RNA, 20 nt, Human
gaggugguggggaacagggg

SEQ ID NO: 215576 - RNA, 22 nt, Human
ggaacagggggguuggaggcac

SEQ ID NO: 215577 - RNA, 20 nt, Human
ugaggugguggggaacaggg

SEQ ID NO: 215578 - RNA, 24 nt, Human
ugaggugguggggaacaggggggu

SEQ ID NO: 215579 - RNA, 24 nt, Human
ugaggugguggggaacaggggggu

SEQ ID NO: 215580 - RNA, 21 nt, Human
uggaggcacaccaugaggagc

SEQ ID NO: 215581 - RNA, 21 nt, Human
uggaggcacaccaugaggagc

SEQ ID NO: 215582 - RNA, 20 nt, Human
uggggaacagggggguugga

SEQ ID NO: 215583 - RNA, 20 nt, Human
ugguggggaacagggggguu

SEQ ID NO: 215584 - RNA, 18 nt, Human
uugguugagguggugggg

SEQ ID NO: 215585 - RNA, 22 nt, Human
aaaagcugguuaaaucuaaaca

SEQ ID NO: 215586 - RNA, 20 nt, Human
aaacuucuaacacuguuaga

SEQ ID NO: 215587 - RNA, 22 nt, Human
aaagcugguuaaaucuaaacaa

SEQ ID NO: 215588 - RNA, 19 nt, Human
aaaucagcuuuaaaucuag

SEQ ID NO: 215589 - RNA, 21 nt, Human
aagcaauaaaucugaagccca

SEQ ID NO: 215590 - RNA, 21 nt, Human
aagcugcagcuagaacuuugg

SEQ ID NO: 215591 - RNA, 23 nt, Human
acaaacuucuaacacuguuagag

SEQ ID NO: 215592 - RNA, 24 nt, Human
acuucuaacacuguuagagaaaag

SEQ ID NO: 215593 - RNA, 21 nt, Human
agaagaaggucauugaguccg

SEQ ID NO: 215594 - RNA, 18 nt, Human
agaaggaagaagauggca

SEQ ID NO: 215595 - RNA, 21 nt, Human
agaaggaagaagauggcauuc

SEQ ID NO: 215596 - RNA, 22 nt, Human
agcaauaaaucugaagcccaga

SEQ ID NO: 215597 - RNA, 21 nt, Human
aggaaacuuuaacaaaaccaa

SEQ ID NO: 215598 - RNA, 26 nt, Human
auggaagagcaggcaguguguccaca

SEQ ID NO: 215599 - RNA, 23 nt, Human
caaacucccaggccaaaucuccu

SEQ ID NO: 215600 - RNA, 18 nt, Human
ccaaacucccaggccaaa

SEQ ID NO: 215601 - RNA, 22 nt, Human
gagaaaagagagauuuaaaagc

SEQ ID NO: 215602 - RNA, 23 nt, Human
gcaguuuagccuuguacaaguag

SEQ ID NO: 215603 - RNA, 22 nt, Human
ggaaacuuuaacaaaaccaagg

SEQ ID NO: 215604 - RNA, 22 nt, Human
ggaagagcaggcagugugucca

SEQ ID NO: 215605 - RNA, 23 nt, Human
gguacaagaacaaugcagaagga

SEQ ID NO: 215606 - RNA, 19 nt, Human
gucacauuggaagcaaagc

SEQ ID NO: 215607 - RNA, 22 nt, Human
uaagcaauaaaucugaagccca

SEQ ID NO: 215608 - RNA, 24 nt, Human
uacaagaacaaugcagaaggauuc

SEQ ID NO: 215609 - RNA, 25 nt, Human
uaccauuaggagauuugaaaaagaa

SEQ ID NO: 215610 - RNA, 23 nt, Human
ucaaggucacauuggaaggaacc

SEQ ID NO: 215611 - RNA, 23 nt, Human
ucauugaguccguucuaaagcug

SEQ ID NO: 215612 - RNA, 21 nt, Human
ucccaggccaaaucuccuucu

SEQ ID NO: 215613 - RNA, 23 nt, Human
ucccaggccaaaucuccuucuac

SEQ ID NO: 215614 - RNA, 22 nt, Human
ugaggaaacuuuaacaaaacca

SEQ ID NO: 215615 - RNA, 22 nt, Human
ugcagaaggauucuguuccagg

SEQ ID NO: 215616 - RNA, 25 nt, Human
uggaagagcaggcaguguguccaca

SEQ ID NO: 215617 - RNA, 21 nt, Human
uucaggcacuacuccaaucuc

SEQ ID NO: 215618 - RNA, 21 nt, Human
aaaaacaaccggguggggggc

SEQ ID NO: 215619 - RNA, 20 nt, Human
aacauuguauaccuccaucc

SEQ ID NO: 215620 - RNA, 18 nt, Human
aagcggcggcgucuggcu

SEQ ID NO: 215621 - RNA, 23 nt, Human
aauacucucuccacccaaggcac

SEQ ID NO: 215622 - RNA, 20 nt, Human
aauagaaagacauuuccaga

SEQ ID NO: 215623 - RNA, 19 nt, Human
aauugaaggaaucacccau

SEQ ID NO: 215624 - RNA, 23 nt, Human
acagggcuggaggcagcagaaac

SEQ ID NO: 215625 - RNA, 20 nt, Human
accggguggggggcggaggc

SEQ ID NO: 215626 - RNA, 22 nt, Human
agaaaccccgacucugaaaucc

SEQ ID NO: 215627 - RNA, 26 nt, Human
agacauuuccagaauuuacaaacgcc

SEQ ID NO: 215628 - RNA, 22 nt, Human
agaguaaacccauucucucaug

SEQ ID NO: 215629 - RNA, 19 nt, Human
agccccaaccaaaacaagc

SEQ ID NO: 215630 - RNA, 21 nt, Human
agccccauccgggcccaucuc

SEQ ID NO: 215631 - RNA, 18 nt, Human
agccgccaccagccgccc

SEQ ID NO: 215632 - RNA, 20 nt, Human
aggaaaaaauacaaaauuaa

SEQ ID NO: 215633 - RNA, 22 nt, Human
aggaaaaaauacaaaauuaaga

SEQ ID NO: 215634 - RNA, 21 nt, Human
aggaggggaggggacaagggc

SEQ ID NO: 215635 - RNA, 18 nt, Human
aggcagcagaaaccccac

SEQ ID NO: 215636 - RNA, 20 nt, Human
aggcagugcguccgggguga

SEQ ID NO: 215637 - RNA, 22 nt, Human
agggcuggaggcagcagaaacc

SEQ ID NO: 215638 - RNA, 24 nt, Human
aggggacaagggcgagaggggaug

SEQ ID NO: 215639 - RNA, 21 nt, Human
aggggaugggggagguuuggg

SEQ ID NO: 215640 - RNA, 24 nt, Human
agguugaagaugaaguuuaugcag

SEQ ID NO: 215641 - RNA, 20 nt, Human
auccuugggcagggggaggc

SEQ ID NO: 215642 - RNA, 18 nt, Human
auuuuuuuuuuucgcuug

SEQ ID NO: 215643 - RNA, 19 nt, Human
caaaacaagcggcggcguc

SEQ ID NO: 215644 - RNA, 20 nt, Human
caaacgcccacauuguucag

SEQ ID NO: 215645 - RNA, 22 nt, Human
cacaucagcucacuguggccag

SEQ ID NO: 215646 - RNA, 22 nt, Human
caccaccaacgcugagcagagg

SEQ ID NO: 215647 - RNA, 19 nt, Human
caccagccgcccaaauacc

SEQ ID NO: 215648 - RNA, 24 nt, Human
caccagccgcccaaauaccagcuc

SEQ ID NO: 215649 - RNA, 20 nt, Human
cagacucaucccugccccuc

SEQ ID NO: 215650 - RNA, 24 nt, Human
cagcagaaaccccgacucugaaau

SEQ ID NO: 215651 - RNA, 23 nt, Human
cagccccauccgggcccaucucg

SEQ ID NO: 215652 - RNA, 25 nt, Human
cagccccgauccuccgagagccaag

SEQ ID NO: 215653 - RNA, 21 nt, Human
cagccgccgccgccaccagga

SEQ ID NO: 215654 - RNA, 18 nt, Human
caggaaggagcgaagaug

SEQ ID NO: 215655 - RNA, 19 nt, Human
cagguuuauaugacaagag

SEQ ID NO: 215656 - RNA, 20 nt, Human
ccaaccaaaacaagcggcgg

SEQ ID NO: 215657 - RNA, 24 nt, Human
ccaccgccaccaccaacgcugagc

SEQ ID NO: 215658 - RNA, 21 nt, Human
ccacgccgccccccgcgccgg

SEQ ID NO: 215659 - RNA, 26 nt, Human
cccaccccccaaccgucccagccgcc

SEQ ID NO: 215660 - RNA, 22 nt, Human
cccagccgccaccagccgccca

SEQ ID NO: 215661 - RNA, 19 nt, Human
ccccauccgggcccaucuc

SEQ ID NO: 215662 - RNA, 18 nt, Human
ccccuccucccuccuccu

SEQ ID NO: 215663 - RNA, 24 nt, Human
ccccucgcuccaggcggcugggga

SEQ ID NO: 215664 - RNA, 19 nt, Human
cccuccucccuccuccucc

SEQ ID NO: 215665 - RNA, 18 nt, Human
cccuccuccuccuccucc

SEQ ID NO: 215666 - RNA, 19 nt, Human
cccuccugaguuccccucu

SEQ ID NO: 215667 - RNA, 19 nt, Human
ccgacucugaaauccacgc

SEQ ID NO: 215668 - RNA, 19 nt, Human
ccgccaccagccgcccaaa

SEQ ID NO: 215669 - RNA, 24 nt, Human
ccgcccaaauaccagcucagucgc

SEQ ID NO: 215670 - RNA, 18 nt, Human
ccgccgcccgcgggcgcg

SEQ ID NO: 215671 - RNA, 19 nt, Human
ccucccaccccccaaccgu

SEQ ID NO: 215672 - RNA, 18 nt, Human
ccucccuccuccuccucc

SEQ ID NO: 215673 - RNA, 21 nt, Human
ccuccugaguuccccucugga

SEQ ID NO: 215674 - RNA, 21 nt, Human
ccucucagccgccgccgccac

SEQ ID NO: 215675 - RNA, 18 nt, Human
ccucuggaagcagcgauu

SEQ ID NO: 215676 - RNA, 19 nt, Human
ccugaguuccccucuggaa

SEQ ID NO: 215677 - RNA, 19 nt, Human
ccugcggugccccuccagg

SEQ ID NO: 215678 - RNA, 21 nt, Human
ccugcggugccccuccaggag

SEQ ID NO: 215679 - RNA, 18 nt, Human
ccuugggcagggggaggc

SEQ ID NO: 215680 - RNA, 22 nt, Human
cgaggcaaauuaaauauccuug

SEQ ID NO: 215681 - RNA, 21 nt, Human
cggcccggcacaugcaaacag

SEQ ID NO: 215682 - RNA, 18 nt, Human
cggcuggaguccggcaca

SEQ ID NO: 215683 - RNA, 21 nt, Human
cgggagggcgcugccgcugca

SEQ ID NO: 215684 - RNA, 23 nt, Human
cggguggagaaaguggcuuuucc

SEQ ID NO: 215685 - RNA, 18 nt, Human
cguccggggugagggcag

SEQ ID NO: 215686 - RNA, 28 nt, Human
cuauucuacucuuuuaagccuuguuuua

SEQ ID NO: 215687 - RNA, 18 nt, Human
cucccaccccccaaccgu

SEQ ID NO: 215688 - RNA, 21 nt, Human
cucccaccccccaaccguccc

SEQ ID NO: 215689 - RNA, 22 nt, Human
cuccccuccucccuccuccucc

SEQ ID NO: 215690 - RNA, 20 nt, Human
cucccuccuccuucgccucc

SEQ ID NO: 215691 - RNA, 23 nt, Human
cuccucccaccccccaaccgucc

SEQ ID NO: 215692 - RNA, 20 nt, Human
cucugcgcgccggcccccuc

SEQ ID NO: 215693 - RNA, 25 nt, Human
cugaaauccacgccgccccccgcgc

SEQ ID NO: 215694 - RNA, 18 nt, Human
cuggaguccggcacaggg

SEQ ID NO: 215695 - RNA, 21 nt, Human
cuuacaggaaaaaauacaaaa

SEQ ID NO: 215696 - RNA, 21 nt, Human
cuucgccuccucccacccccc

SEQ ID NO: 215697 - RNA, 22 nt, Human
gaaaaugcauugagaguaaacc

SEQ ID NO: 215698 - RNA, 23 nt, Human
gaagaugcaucucucgucgcccc

SEQ ID NO: 215699 - RNA, 20 nt, Human
gacaagggcgagaggggaug

SEQ ID NO: 215700 - RNA, 18 nt, Human
gagagcuuuugaauugaa

SEQ ID NO: 215701 - RNA, 21 nt, Human
gcauuuuuuuuuuucgcuugg

SEQ ID NO: 215702 - RNA, 18 nt, Human
gcccaaauaccagcucag

SEQ ID NO: 215703 - RNA, 21 nt, Human
gccgccaccagccgcccaaau

SEQ ID NO: 215704 - RNA, 18 nt, Human
gccgccgcccgcgggcgc

SEQ ID NO: 215705 - RNA, 23 nt, Human
gcgccggcccccuccgaccgcgc

SEQ ID NO: 215706 - RNA, 19 nt, Human
gcggcuggggaggagggga

SEQ ID NO: 215707 - RNA, 18 nt, Human
gcugcugcugccgccgcc

SEQ ID NO: 215708 - RNA, 19 nt, Human
gcugcugcugcugccgccg

SEQ ID NO: 215709 - RNA, 22 nt, Human
gcugcugcugcugccgccgccc

SEQ ID NO: 215710 - RNA, 19 nt, Human
ggaaggguucggggaagac

SEQ ID NO: 215711 - RNA, 22 nt, Human
ggacagacucaucccugccccu

SEQ ID NO: 215712 - RNA, 21 nt, Human
ggacgcagcugcugagcccag

SEQ ID NO: 215713 - RNA, 22 nt, Human
ggaggaggggaggggacaaggg

SEQ ID NO: 215714 - RNA, 19 nt, Human
ggaggcagcagaaaccccg

SEQ ID NO: 215715 - RNA, 19 nt, Human
ggaggcggguugccaaguc

SEQ ID NO: 215716 - RNA, 21 nt, Human
ggcuguugcuguugcugcugc

SEQ ID NO: 215717 - RNA, 18 nt, Human
gggcagggggaggcgggu

SEQ ID NO: 215718 - RNA, 19 nt, Human
ggggaccggccggagggac

SEQ ID NO: 215719 - RNA, 19 nt, Human
ggggaugggggagguuugg

SEQ ID NO: 215720 - RNA, 20 nt, Human
gggggagguuugggaagggu

SEQ ID NO: 215721 - RNA, 23 nt, Human
uaaaguaaacaaacugaaaugga

SEQ ID NO: 215722 - RNA, 22 nt, Human
uaagcugacauuugaaaacacc

SEQ ID NO: 215723 - RNA, 19 nt, Human
uagagucuggguacccaug

SEQ ID NO: 215724 - RNA, 21 nt, Human
ucaacaucagguuuauaugac

SEQ ID NO: 215725 - RNA, 22 nt, Human
uccaaaaaaaagaugugcugua

SEQ ID NO: 215726 - RNA, 19 nt, Human
uccaucccacauccaaaaa

SEQ ID NO: 215727 - RNA, 21 nt, Human
ucccgaggcaaauuaaauauc

SEQ ID NO: 215728 - RNA, 23 nt, Human
ucccuccuccuucgccuccuccc

SEQ ID NO: 215729 - RNA, 20 nt, Human
ucccugcggugccccuccag

SEQ ID NO: 215730 - RNA, 19 nt, Human
uccgagagccaagucuccu

SEQ ID NO: 215731 - RNA, 19 nt, Human
uccucccuccuccuccucc

SEQ ID NO: 215732 - RNA, 23 nt, Human
uccucggagaguugccgagagcc

SEQ ID NO: 215733 - RNA, 18 nt, Human
uccuugggcagggggagg

SEQ ID NO: 215734 - RNA, 22 nt, Human
ucucccuccuccuucgccuccu

SEQ ID NO: 215735 - RNA, 22 nt, Human
ucugaauuacaaucuuaaaaca

SEQ ID NO: 215736 - RNA, 23 nt, Human
ucugcagccccauccgggcccau

SEQ ID NO: 215737 - RNA, 26 nt, Human
ucugcagccccauccgggcccaucuc

SEQ ID NO: 215738 - RNA, 18 nt, Human
ugaaaaugcauugagagu

SEQ ID NO: 215739 - RNA, 19 nt, Human
ugaaauggaugcaucguac

SEQ ID NO: 215740 - RNA, 20 nt, Human
ugagcccaggagagagcccg

SEQ ID NO: 215741 - RNA, 22 nt, Human
ugccaccgccaccaccaacgcu

SEQ ID NO: 215742 - RNA, 23 nt, Human
ugcggcuguugcuguugcugcug

SEQ ID NO: 215743 - RNA, 24 nt, Human
ugcuccacucuuuacaacagaaca

SEQ ID NO: 215744 - RNA, 22 nt, Human
ugcugagcccaggagagagccc

SEQ ID NO: 215745 - RNA, 23 nt, Human
ugcugcugcugcugccgccgccc

SEQ ID NO: 215746 - RNA, 21 nt, Human
ugcugcugcugcugcugcugc

SEQ ID NO: 215747 - RNA, 21 nt, Human
ugcugcugcugcugcugcugc

SEQ ID NO: 215748 - RNA, 21 nt, Human
ugcugcugcugcugcugcugc

SEQ ID NO: 215749 - RNA, 21 nt, Human
ugcuguugcugcugcugcugc

SEQ ID NO: 215750 - RNA, 20 nt, Human
uggaagacuuuaauuuccuc

SEQ ID NO: 215751 - RNA, 18 nt, Human
uggaguccggcacaggga

SEQ ID NO: 215752 - RNA, 20 nt, Human
uggcucugcgcgccggcccc

SEQ ID NO: 215753 - RNA, 19 nt, Human
ugggcagggggaggcgggu

SEQ ID NO: 215754 - RNA, 25 nt, Human
uggggaggaggggaggggacaaggg

SEQ ID NO: 215755 - RNA, 19 nt, Human
ugggggagguuugggaagg

SEQ ID NO: 215756 - RNA, 18 nt, Human
ugugaaucaugaaauauu

SEQ ID NO: 215757 - RNA, 21 nt, Human
uguugcugcugcugcugcugc

SEQ ID NO: 215758 - RNA, 21 nt, Human
uguugcuguugcugcugcugc

SEQ ID NO: 215759 - RNA, 21 nt, Human
uuaaaagaucaacaguaucua

SEQ ID NO: 215760 - RNA, 19 nt, Human
uuccaugcgaaacgauacc

SEQ ID NO: 215761 - RNA, 22 nt, Human
uucucccuccuccuucgccucc

SEQ ID NO: 215762 - RNA, 24 nt, Human
uugaagaugaaguuuaugcagacu

SEQ ID NO: 215763 - RNA, 18 nt, Human
uuuacaaugaugcuuugu

SEQ ID NO: 215764 - RNA, 21 nt, Human
uuuuuuuuuuuuuaaaagauc

SEQ ID NO: 215765 - RNA, 23 nt, Human
uuuuuuuuuuuuuuuuuuaaaag

SEQ ID NO: 215766 - RNA, 18 nt, Human
aaaaagaaaacacuguuu

SEQ ID NO: 215767 - RNA, 18 nt, Human
aaacaaaacaaaacaaaa

SEQ ID NO: 215768 - RNA, 22 nt, Human
aaacaaaacaaaacaaaaccaa

SEQ ID NO: 215769 - RNA, 24 nt, Human
aaacaaaacaaaacaaaacgcaaa

SEQ ID NO: 215770 - RNA, 28 nt, Human
aaacaaaaccaacaacuuacaucuccaa

SEQ ID NO: 215771 - RNA, 21 nt, Human
aaacaaaacgcaaacagcaca

SEQ ID NO: 215772 - RNA, 23 nt, Human
aaacaauacguacccaaaaagaa

SEQ ID NO: 215773 - RNA, 19 nt, Human
aaacaucgcagguaccugc

SEQ ID NO: 215774 - RNA, 23 nt, Human
aaaccaacaacuuacaucuccaa

SEQ ID NO: 215775 - RNA, 20 nt, Human
aaagcccuucccucccaccu

SEQ ID NO: 215776 - RNA, 21 nt, Human
aaagcccuucccucccaccuc

SEQ ID NO: 215777 - RNA, 20 nt, Human
aaauuucacuuccauugaga

SEQ ID NO: 215778 - RNA, 21 nt, Human
aacaaaacaaaacgcaaacag

SEQ ID NO: 215779 - RNA, 20 nt, Human
aagaagaagaaauuaaaaga

SEQ ID NO: 215780 - RNA, 22 nt, Human
aaggaaaagaagaagaaauuaa

SEQ ID NO: 215781 - RNA, 26 nt, Human
aaggaaaagaagaagaaauuaaaaga

SEQ ID NO: 215782 - RNA, 20 nt, Human
acaaaacaaaacaaaaccaa

SEQ ID NO: 215783 - RNA, 21 nt, Human
acaaaacaaaacaaaaccaac

SEQ ID NO: 215784 - RNA, 22 nt, Human
acaaaacaaaacaaaacgcaaa

SEQ ID NO: 215785 - RNA, 23 nt, Human
acaaaacaaaacgcaaacagcac

SEQ ID NO: 215786 - RNA, 18 nt, Human
acaaaacgcaaacagcac

SEQ ID NO: 215787 - RNA, 21 nt, Human
acaaagacccaauauacauug

SEQ ID NO: 215788 - RNA, 19 nt, Human
acaaagcaaauaccaccca

SEQ ID NO: 215789 - RNA, 21 nt, Human
acaaugaugaaugccccaucc

SEQ ID NO: 215790 - RNA, 19 nt, Human
acacugcuuucagcagggu

SEQ ID NO: 215791 - RNA, 20 nt, Human
acagcccuccaaucaagugu

SEQ ID NO: 215792 - RNA, 22 nt, Human
acauaauaacauuuuauuaaag

SEQ ID NO: 215793 - RNA, 19 nt, Human
acccuggaauugcuagcac

SEQ ID NO: 215794 - RNA, 24 nt, Human
acgccuacagggauuuuugguuac

SEQ ID NO: 215795 - RNA, 22 nt, Human
acuacucuacggauagagggcg

SEQ ID NO: 215796 - RNA, 18 nt, Human
acugaaaacauaaaacaa

SEQ ID NO: 215797 - RNA, 20 nt, Human
agaaaacggcagaacauucu

SEQ ID NO: 215798 - RNA, 24 nt, Human
agaaaaguaaaaccuuaaaaaugu

SEQ ID NO: 215799 - RNA, 20 nt, Human
agaacugccacacacuggua

SEQ ID NO: 215800 - RNA, 20 nt, Human
agaaggccaaugaaaacauc

SEQ ID NO: 215801 - RNA, 20 nt, Human
agagauauucauccccuucc

SEQ ID NO: 215802 - RNA, 18 nt, Human
agcacaaugaugaaugcc

SEQ ID NO: 215803 - RNA, 24 nt, Human
agcaugcugaggguuauaucugcu

SEQ ID NO: 215804 - RNA, 20 nt, Human
agcccuucccucccaccucc

SEQ ID NO: 215805 - RNA, 19 nt, Human
agccggggugcgcccgggc

SEQ ID NO: 215806 - RNA, 23 nt, Human
aggagaggucgacagcccuccaa

SEQ ID NO: 215807 - RNA, 22 nt, Human
aggcaaaauguacaaagaccca

SEQ ID NO: 215808 - RNA, 25 nt, Human
aggccgaggaccgcgcuccagacac

SEQ ID NO: 215809 - RNA, 18 nt, Human
aggccgcgcggcccgggc

SEQ ID NO: 215810 - RNA, 27 nt, Human
auacaucuuaauaaaguauaucauaca

SEQ ID NO: 215811 - RNA, 26 nt, Human
aucaguuucuuucuuuccuuuuuuuu

SEQ ID NO: 215812 - RNA, 22 nt, Human
caaaacaaaacaaaaccaacaa

SEQ ID NO: 215813 - RNA, 24 nt, Human
caaaacaaaacaaaacgcaaacag

SEQ ID NO: 215814 - RNA, 24 nt, Human
caaagcccuucccucccaccuccc

SEQ ID NO: 215815 - RNA, 21 nt, Human
caagcagcugucuacuuggac

SEQ ID NO: 215816 - RNA, 22 nt, Human
caagggaaagaggcaggugacc

SEQ ID NO: 215817 - RNA, 24 nt, Human
caauacguacccaaaaagaaaaca

SEQ ID NO: 215818 - RNA, 23 nt, Human
caccggggcugcugccgccgcgu

SEQ ID NO: 215819 - RNA, 25 nt, Human
cagagcaagauaaguuaagucucuu

SEQ ID NO: 215820 - RNA, 21 nt, Human
cagcacaaugaugaaugcccc

SEQ ID NO: 215821 - RNA, 19 nt, Human
cagcgcaggggcuacuaca

SEQ ID NO: 215822 - RNA, 22 nt, Human
cagcgcaggggcuacuacagga

SEQ ID NO: 215823 - RNA, 18 nt, Human
cauguacugcgagauugc

SEQ ID NO: 215824 - RNA, 18 nt, Human
ccaaagcccuucccuccc

SEQ ID NO: 215825 - RNA, 21 nt, Human
ccagggguuggggcgaggggc

SEQ ID NO: 215826 - RNA, 24 nt, Human
cccaaagcccuucccucccaccuc

SEQ ID NO: 215827 - RNA, 19 nt, Human
cccauugaugccuauuccc

SEQ ID NO: 215828 - RNA, 19 nt, Human
cccgccacggaaauccggc

SEQ ID NO: 215829 - RNA, 21 nt, Human
cccgcgggggccagcaccgcu

SEQ ID NO: 215830 - RNA, 20 nt, Human
cccuucccucccaccuccca

SEQ ID NO: 215831 - RNA, 21 nt, Human
cccuucccucccaccucccac

SEQ ID NO: 215832 - RNA, 18 nt, Human
ccgcaccggggcugcugc

SEQ ID NO: 215833 - RNA, 22 nt, Human
ccgccggggcugcugcugcugc

SEQ ID NO: 215834 - RNA, 20 nt, Human
ccgcgcccuccgcgcucugg

SEQ ID NO: 215835 - RNA, 21 nt, Human
ccgcgcccuccgcgcucuggg

SEQ ID NO: 215836 - RNA, 18 nt, Human
ccgcgccgccgccggggc

SEQ ID NO: 215837 - RNA, 20 nt, Human
ccgcgggggccagcaccgcu

SEQ ID NO: 215838 - RNA, 22 nt, Human
ccggccgcccgcccgaucacgc

SEQ ID NO: 215839 - RNA, 18 nt, Human
ccggcgcgggcgguggcc

SEQ ID NO: 215840 - RNA, 25 nt, Human
ccuauauacagcguguacaguggaa

SEQ ID NO: 215841 - RNA, 22 nt, Human
ccucccaccucccacuacccaa

SEQ ID NO: 215842 - RNA, 19 nt, Human
ccucgggcucucgggcggc

SEQ ID NO: 215843 - RNA, 22 nt, Human
ccucgggcucucgggcggcgcc

SEQ ID NO: 215844 - RNA, 18 nt, Human
ccuugcgcccggccgccc

SEQ ID NO: 215845 - RNA, 24 nt, Human
cgacaaguaacauguacugcgaga

SEQ ID NO: 215846 - RNA, 18 nt, Human
cgccgccggggcugcugc

SEQ ID NO: 215847 - RNA, 18 nt, Human
cgcgcggcccgggcccgg

SEQ ID NO: 215848 - RNA, 24 nt, Human
cggcgcgggcgguggccgcccccc

SEQ ID NO: 215849 - RNA, 21 nt, Human
cgggcgggggcggcucccucc

SEQ ID NO: 215850 - RNA, 22 nt, Human
cguguacaguggaagacagagc

SEQ ID NO: 215851 - RNA, 24 nt, Human
cucccacccuugcgcccggccgcc

SEQ ID NO: 215852 - RNA, 21 nt, Human
cucccucccacccuugcgccc

SEQ ID NO: 215853 - RNA, 23 nt, Human
cucucugacaugugacauccugg

SEQ ID NO: 215854 - RNA, 18 nt, Human
cucugacaugugacaucc

SEQ ID NO: 215855 - RNA, 23 nt, Human
cugcggccgcugccuccucgggc

SEQ ID NO: 215856 - RNA, 24 nt, Human
cugcggccgcugccuccucgggcu

SEQ ID NO: 215857 - RNA, 23 nt, Human
cugcugcugccaacggcgacccg

SEQ ID NO: 215858 - RNA, 26 nt, Human
cugcugcugcugguguugcugcugcc

SEQ ID NO: 215859 - RNA, 23 nt, Human
cugcugcugguguugcugcugcc

SEQ ID NO: 215860 - RNA, 22 nt, Human
gaaaagaagaagaaauuaaaag

SEQ ID NO: 215861 - RNA, 18 nt, Human
gaagccggggugcgcccg

SEQ ID NO: 215862 - RNA, 24 nt, Human
gagaucacuuuacauucaacuuug

SEQ ID NO: 215863 - RNA, 20 nt, Human
gaggaccgcgcuccagacac

SEQ ID NO: 215864 - RNA, 24 nt, Human
gcacuggggaagcccccacgggag

SEQ ID NO: 215865 - RNA, 24 nt, Human
gcccccacgggaggagaggucgac

SEQ ID NO: 215866 - RNA, 22 nt, Human
gcccgcgggggccagcaccgcu

SEQ ID NO: 215867 - RNA, 20 nt, Human
gcccggcgcccagggguugg

SEQ ID NO: 215868 - RNA, 23 nt, Human
gccgccggggcugcugcugcugc

SEQ ID NO: 215869 - RNA, 20 nt, Human
gcgccgcgcccuccgcgcuc

SEQ ID NO: 215870 - RNA, 21 nt, Human
gcgccgggggacgcgcucgcu

SEQ ID NO: 215871 - RNA, 22 nt, Human
gcgggcgguggccgccccccuc

SEQ ID NO: 215872 - RNA, 20 nt, Human
gcgucuucuuuuaaugauac

SEQ ID NO: 215873 - RNA, 22 nt, Human
gcugcugcugguguugcugcug

SEQ ID NO: 215874 - RNA, 20 nt, Human
gcugcugguguugcugcugc

SEQ ID NO: 215875 - RNA, 25 nt, Human
gcugguguugcugcugcugcugccc

SEQ ID NO: 215876 - RNA, 20 nt, Human
ggaggcccgcgggggccagc

SEQ ID NO: 215877 - RNA, 18 nt, Human
ggcgggggcggcucccuc

SEQ ID NO: 215878 - RNA, 19 nt, Human
ggcgguggccgccccccuc

SEQ ID NO: 215879 - RNA, 19 nt, Human
ggggcgaggggcggagggg

SEQ ID NO: 215880 - RNA, 20 nt, Human
ggguccgcgccgccgccggg

SEQ ID NO: 215881 - RNA, 23 nt, Human
gguggggaagguccggggaggcc

SEQ ID NO: 215882 - RNA, 24 nt, Human
gguuccauucuguaaacuaaauua

SEQ ID NO: 215883 - RNA, 18 nt, Human
guaaaaagagauauucau

SEQ ID NO: 215884 - RNA, 24 nt, Human
guaaacaucgcagguaccugcacu

SEQ ID NO: 215885 - RNA, 21 nt, Human
guguacaguggaagacagagc

SEQ ID NO: 215886 - RNA, 20 nt, Human
guuggggcgaggggcggagg

SEQ ID NO: 215887 - RNA, 23 nt, Human
uaaaaacaaaacaaaacaaaacc

SEQ ID NO: 215888 - RNA, 24 nt, Human
uaaaaacaaaacaaaacaaaacca

SEQ ID NO: 215889 - RNA, 22 nt, Human
uaaaacaaaacaaaacaaaacg

SEQ ID NO: 215890 - RNA, 23 nt, Human
uaaaagacacuggccacaauuua

SEQ ID NO: 215891 - RNA, 21 nt, Human
uacacugcuuucagcaggguc

SEQ ID NO: 215892 - RNA, 24 nt, Human
uacugaaaacauaaaacaagggua

SEQ ID NO: 215893 - RNA, 23 nt, Human
uauauacagcguguacaguggaa

SEQ ID NO: 215894 - RNA, 23 nt, Human
uaugaacacgaaccaucuguaua

SEQ ID NO: 215895 - RNA, 22 nt, Human
ucaauaaggccgaggaccgcgc

SEQ ID NO: 215896 - RNA, 18 nt, Human
ucagucccacacugggcu

SEQ ID NO: 215897 - RNA, 19 nt, Human
ucagucccacacugggcuc

SEQ ID NO: 215898 - RNA, 24 nt, Human
uccaugaucaauacagaccggggc

SEQ ID NO: 215899 - RNA, 24 nt, Human
uccccuucccaaagcccuucccuc

SEQ ID NO: 215900 - RNA, 18 nt, Human
ucccucgggcccaggcgg

SEQ ID NO: 215901 - RNA, 19 nt, Human
uccgcgccgccgccggggc

SEQ ID NO: 215902 - RNA, 21 nt, Human
uccgcgccgccgccggggcug

SEQ ID NO: 215903 - RNA, 20 nt, Human
ucggcggcgccgcgcccucc

SEQ ID NO: 215904 - RNA, 21 nt, Human
ucuaaaaacaaaacaaaacaa

SEQ ID NO: 215905 - RNA, 22 nt, Human
ucuccuagcaugcugaggguua

SEQ ID NO: 215906 - RNA, 21 nt, Human
ucuggggcuccugaggaugcc

SEQ ID NO: 215907 - RNA, 20 nt, Human
ucuucaaaguccaaucccaa

SEQ ID NO: 215908 - RNA, 18 nt, Human
ugaaguaccuacauaaac

SEQ ID NO: 215909 - RNA, 24 nt, Human
ugcacuauucuaguccaguuuauu

SEQ ID NO: 215910 - RNA, 20 nt, Human
ugccggucaaguucagcagu

SEQ ID NO: 215911 - RNA, 25 nt, Human
ugccuuguuggugccucaucuaaca

SEQ ID NO: 215912 - RNA, 27 nt, Human
ugcgcccgggcgcucgggguccgcgcc

SEQ ID NO: 215913 - RNA, 22 nt, Human
ugcugccgccgcgucgcgcucc

SEQ ID NO: 215914 - RNA, 18 nt, Human
ugcugcugguguugcugc

SEQ ID NO: 215915 - RNA, 28 nt, Human
ugcugcugguguugcugcugcugcugcc

SEQ ID NO: 215916 - RNA, 23 nt, Human
uggacguaaacaucgcagguacc

SEQ ID NO: 215917 - RNA, 18 nt, Human
uggcuauuaaggagggca

SEQ ID NO: 215918 - RNA, 28 nt, Human
uggggcgaggggcggagggggcgcgggc

SEQ ID NO: 215919 - RNA, 25 nt, Human
uguaaacuaaauuaaaaauguaaau

SEQ ID NO: 215920 - RNA, 21 nt, Human
uguacaaagacccaauauaca

SEQ ID NO: 215921 - RNA, 19 nt, Human
uguuaaaacaaaacaaaac

SEQ ID NO: 215922 - RNA, 20 nt, Human
uguuaaaacaaaacaaaaca

SEQ ID NO: 215923 - RNA, 22 nt, Human
uguucuaaaguucagcacggaa

SEQ ID NO: 215924 - RNA, 19 nt, Human
uuaaaagacacuggccaca

SEQ ID NO: 215925 - RNA, 18 nt, Human
uuccauugagaaauguca

SEQ ID NO: 215926 - RNA, 24 nt, Human
uucccaaaacuaaauaaaaacuuc

SEQ ID NO: 215927 - RNA, 19 nt, Human
uuccucuaaaaaagccuca

SEQ ID NO: 215928 - RNA, 23 nt, Human
uugaugccuauucccaaaacuaa

SEQ ID NO: 215929 - RNA, 23 nt, Human
uuuaacaucuugauauccagaaa

SEQ ID NO: 215930 - RNA, 20 nt, Human
uuuugcauugccauuaaaua

SEQ ID NO: 215931 - RNA, 22 nt, Human
uuuuuguuuuuuuuguucaggg

SEQ ID NO: 215932 - RNA, 20 nt, Human
uuuuuuuuuuuucuuuuugg

SEQ ID NO: 215933 - RNA, 18 nt, Human
aaaaccucucugcaagga

SEQ ID NO: 215934 - RNA, 21 nt, Human
aaacaagacccacacauuccu

SEQ ID NO: 215935 - RNA, 19 nt, Human
aaagcagcacuugccuaca

SEQ ID NO: 215936 - RNA, 23 nt, Human
aaagcagcacuugccuacaccag

SEQ ID NO: 215937 - RNA, 22 nt, Human
aaccaguagguguaucaugaaa

SEQ ID NO: 215938 - RNA, 18 nt, Human
aacugaauccugacagug

SEQ ID NO: 215939 - RNA, 20 nt, Human
aagacacaguuccuacaaga

SEQ ID NO: 215940 - RNA, 22 nt, Human
aagcagagauccaggucaccca

SEQ ID NO: 215941 - RNA, 22 nt, Human
aaggaguucugaggagacaagc

SEQ ID NO: 215942 - RNA, 18 nt, Human
acaaugguuguagaugua

SEQ ID NO: 215943 - RNA, 24 nt, Human
acagggucuucucuuaacugugga

SEQ ID NO: 215944 - RNA, 19 nt, Human
acugcacugggccugggac

SEQ ID NO: 215945 - RNA, 19 nt, Human
agaauuagaaagcuggaau

SEQ ID NO: 215946 - RNA, 22 nt, Human
agacaagccaggucagcccaga

SEQ ID NO: 215947 - RNA, 20 nt, Human
agagaauaaaaccucucugc

SEQ ID NO: 215948 - RNA, 19 nt, Human
agauccaggucacccaguc

SEQ ID NO: 215949 - RNA, 21 nt, Human
aguuagaaagacuugaaugga

SEQ ID NO: 215950 - RNA, 24 nt, Human
aucccccuucucuaaagcagaccc

SEQ ID NO: 215951 - RNA, 23 nt, Human
cacuugccuacaccagcaccagc

SEQ ID NO: 215952 - RNA, 18 nt, Human
cagauugccaaagcagca

SEQ ID NO: 215953 - RNA, 24 nt, Human
cagcccagauugccaaagcagcac

SEQ ID NO: 215954 - RNA, 25 nt, Human
caguaagcuucuucucugcauaaag

SEQ ID NO: 215955 - RNA, 21 nt, Human
caucagaguagacgaaugagu

SEQ ID NO: 215956 - RNA, 19 nt, Human
caugaaauauccauacaaa

SEQ ID NO: 215957 - RNA, 19 nt, Human
ccagcaccagcagugagcu

SEQ ID NO: 215958 - RNA, 28 nt, Human
ccagcagugagcucaguaagcuucuucu

SEQ ID NO: 215959 - RNA, 20 nt, Human
cccagucuuuuucaucucug

SEQ ID NO: 215960 - RNA, 19 nt, Human
cccuuucuuccucccucuc

SEQ ID NO: 215961 - RNA, 18 nt, Human
ccuucucucucuuuaucc

SEQ ID NO: 215962 - RNA, 20 nt, Human
ccuuucuuccucccucucuu

SEQ ID NO: 215963 - RNA, 20 nt, Human
cuccaggguuggagaaggag

SEQ ID NO: 215964 - RNA, 24 nt, Human
cuucuauuuuucuuuuucucuuuu

SEQ ID NO: 215965 - RNA, 18 nt, Human
cuugccuacaccagcacc

SEQ ID NO: 215966 - RNA, 24 nt, Human
cuuucuuccucccucucuucuuuu

SEQ ID NO: 215967 - RNA, 19 nt, Human
gaaggggcuuuucauuguu

SEQ ID NO: 215968 - RNA, 22 nt, Human
gaguaggacguucccguaacuu

SEQ ID NO: 215969 - RNA, 18 nt, Human
gcaaggacugcacugggc

SEQ ID NO: 215970 - RNA, 24 nt, Human
gggccugggacuuuggacaaggga

SEQ ID NO: 215971 - RNA, 18 nt, Human
guaaagaucaaaucagcg

SEQ ID NO: 215972 - RNA, 21 nt, Human
guggauccuggucauuuuagu

SEQ ID NO: 215973 - RNA, 24 nt, Human
guuuuauuuuuucuuaauuugagu

SEQ ID NO: 215974 - RNA, 20 nt, Human
uaacaguccuucucucucuu

SEQ ID NO: 215975 - RNA, 19 nt, Human
uagaagccaggugauuugc

SEQ ID NO: 215976 - RNA, 24 nt, Human
uagaagccaggugauuugcccuau

SEQ ID NO: 215977 - RNA, 18 nt, Human
uaguuuuggagaguuggu

SEQ ID NO: 215978 - RNA, 20 nt, Human
uaucaugaaauauccauaca

SEQ ID NO: 215979 - RNA, 27 nt, Human
ucagaggccauuccaucccaacaucag

SEQ ID NO: 215980 - RNA, 19 nt, Human
ucaggcccacagcaaauac

SEQ ID NO: 215981 - RNA, 20 nt, Human
ucaguaagcuucuucucugc

SEQ ID NO: 215982 - RNA, 28 nt, Human
uccaggguuggagaaggaguucugagga

SEQ ID NO: 215983 - RNA, 20 nt, Human
uccaugcauuuucuauaaaa

SEQ ID NO: 215984 - RNA, 19 nt, Human
uccuucucucucuuuaucc

SEQ ID NO: 215985 - RNA, 19 nt, Human
uccuuugagaagggaaugg

SEQ ID NO: 215986 - RNA, 18 nt, Human
ucuaaagcagacccuagg

SEQ ID NO: 215987 - RNA, 20 nt, Human
ucucucuguaaaccauucca

SEQ ID NO: 215988 - RNA, 21 nt, Human
ucucuuaacuguggauccugg

SEQ ID NO: 215989 - RNA, 18 nt, Human
ucucuuuuuuugggggug

SEQ ID NO: 215990 - RNA, 22 nt, Human
ucuguuuuucauaacaguccuu

SEQ ID NO: 215991 - RNA, 22 nt, Human
ucuucuauuuuucuuuuucucu

SEQ ID NO: 215992 - RNA, 21 nt, Human
ucuucucuuaacuguggaucc

SEQ ID NO: 215993 - RNA, 26 nt, Human
ucuuuucuucucucucccuuucuucc

SEQ ID NO: 215994 - RNA, 20 nt, Human
ucuuuuucucuuuuuuuggg

SEQ ID NO: 215995 - RNA, 24 nt, Human
ugaaagugaauauccuuuugcuuu

SEQ ID NO: 215996 - RNA, 21 nt, Human
ugagaagaauuagaaagcugg

SEQ ID NO: 215997 - RNA, 23 nt, Human
ugagucuccagugagacaauggu

SEQ ID NO: 215998 - RNA, 19 nt, Human
ugaguugaucauuccaggu

SEQ ID NO: 215999 - RNA, 18 nt, Human
ugauuugcccuauagaac

SEQ ID NO: 216000 - RNA, 18 nt, Human
ugcaagugagucuccagu

SEQ ID NO: 216001 - RNA, 19 nt, Human
ugcaggcagaagugaaggg

SEQ ID NO: 216002 - RNA, 22 nt, Human
uggaaugaguugaucauuccag

SEQ ID NO: 216003 - RNA, 19 nt, Human
ugggacuuuggacaaggga

SEQ ID NO: 216004 - RNA, 24 nt, Human
ugguauuguacacuuccaucagga

SEQ ID NO: 216005 - RNA, 24 nt, Human
ugucuucuauuuuucuuuuucucu

SEQ ID NO: 216006 - RNA, 27 nt, Human
ugugcagccacucacaguuaaacaaac

SEQ ID NO: 216007 - RNA, 18 nt, Human
uuagaaagcuggaaugag

SEQ ID NO: 216008 - RNA, 21 nt, Human
uuauauuugugucucuuuucu

SEQ ID NO: 216009 - RNA, 21 nt, Human
uuaucauuugcuuuuggaagc

SEQ ID NO: 216010 - RNA, 24 nt, Human
uuccuuuuggucgacaugucucgu

SEQ ID NO: 216011 - RNA, 27 nt, Human
uucuuuaaucugcaacugaauccugag

SEQ ID NO: 216012 - RNA, 21 nt, Human
uugcaagaauuauucucauau

SEQ ID NO: 216013 - RNA, 19 nt, Human
uugccaaagcagcacuugc

SEQ ID NO: 216014 - RNA, 19 nt, Human
uuuguggcuuccuauuucu

SEQ ID NO: 216015 - RNA, 23 nt, Human
aaacaggugacaguccagcaggg

SEQ ID NO: 216016 - RNA, 23 nt, Human
aagcucaagacccaagaagagcc

SEQ ID NO: 216017 - RNA, 21 nt, Human
acacugcacaccagcuccaag

SEQ ID NO: 216018 - RNA, 23 nt, Human
acccaagaagagccauuuuucag

SEQ ID NO: 216019 - RNA, 20 nt, Human
acccccucugugggggugug

SEQ ID NO: 216020 - RNA, 18 nt, Human
acucucccaaugagaaau

SEQ ID NO: 216021 - RNA, 24 nt, Human
agaagaagcucucucagcaacagc

SEQ ID NO: 216022 - RNA, 20 nt, Human
agaagcugugcucucaaaaa

SEQ ID NO: 216023 - RNA, 21 nt, Human
agagccacacauucccucucc

SEQ ID NO: 216024 - RNA, 19 nt, Human
agccacuuacuugggcagg

SEQ ID NO: 216025 - RNA, 20 nt, Human
agccagagccacacauuccc

SEQ ID NO: 216026 - RNA, 22 nt, Human
agcccaaagcaggaguuccccc

SEQ ID NO: 216027 - RNA, 25 nt, Human
agccuggugccuccaccuucucaga

SEQ ID NO: 216028 - RNA, 20 nt, Human
agcggccucggugggaaugc

SEQ ID NO: 216029 - RNA, 18 nt, Human
agcuguuaggccagcccg

SEQ ID NO: 216030 - RNA, 18 nt, Human
aggaugggaagaacuugg

SEQ ID NO: 216031 - RNA, 19 nt, Human
aguagccccaccaggcuga

SEQ ID NO: 216032 - RNA, 18 nt, Human
agugaugacaaaugccuc

SEQ ID NO: 216033 - RNA, 22 nt, Human
aucuccugaaggcccacucucc

SEQ ID NO: 216034 - RNA, 21 nt, Human
augacaauugagaaaugcauc

SEQ ID NO: 216035 - RNA, 24 nt, Human
caaaaagagcagaaugcauuagug

SEQ ID NO: 216036 - RNA, 26 nt, Human
caaaaagagcagaaugcauuagugaa

SEQ ID NO: 216037 - RNA, 21 nt, Human
caaggagcacaucugagaagc

SEQ ID NO: 216038 - RNA, 23 nt, Human
cacagacccacugaaucaguauc

SEQ ID NO: 216039 - RNA, 20 nt, Human
cacaugcaugcagugcaguc

SEQ ID NO: 216040 - RNA, 24 nt, Human
cacugcacaccagcuccaaggagc

SEQ ID NO: 216041 - RNA, 22 nt, Human
cacuuggaagcaugaaaagcca

SEQ ID NO: 216042 - RNA, 24 nt, Human
cagaaaaacuuaugucccagccca

SEQ ID NO: 216043 - RNA, 20 nt, Human
cagcacacugcaguagcccc

SEQ ID NO: 216044 - RNA, 20 nt, Human
cagcagcaucagcauccccu

SEQ ID NO: 216045 - RNA, 23 nt, Human
cagcagcaucagcauccccuggg

SEQ ID NO: 216046 - RNA, 24 nt, Human
cagguagacacugacacaugagca

SEQ ID NO: 216047 - RNA, 19 nt, Human
caggugucugguuuccucc

SEQ ID NO: 216048 - RNA, 21 nt, Human
caugucacagagaagaagcuc

SEQ ID NO: 216049 - RNA, 18 nt, Human
ccagcaagcucaagaccc

SEQ ID NO: 216050 - RNA, 18 nt, Human
ccaggagauccaauagca

SEQ ID NO: 216051 - RNA, 18 nt, Human
cccccguggggagaccca

SEQ ID NO: 216052 - RNA, 23 nt, Human
ccuccagaacaaacugugagcag

SEQ ID NO: 216053 - RNA, 21 nt, Human
ccugguccuccuggccuugac

SEQ ID NO: 216054 - RNA, 18 nt, Human
ccuggugccuccaccuuc

SEQ ID NO: 216055 - RNA, 20 nt, Human
ccuggugccuccaccuucuc

SEQ ID NO: 216056 - RNA, 23 nt, Human
cuccaaggagcacaucugagaag

SEQ ID NO: 216057 - RNA, 21 nt, Human
cucucucagcaacagcagcug

SEQ ID NO: 216058 - RNA, 19 nt, Human
cucugaauggagagggcuc

SEQ ID NO: 216059 - RNA, 21 nt, Human
cucuugcugaacaguuuccuc

SEQ ID NO: 216060 - RNA, 18 nt, Human
cugacacaugagcaggag

SEQ ID NO: 216061 - RNA, 21 nt, Human
cugcagucagcaagcuggaga

SEQ ID NO: 216062 - RNA, 22 nt, Human
cuuaugucccagcccaaagcag

SEQ ID NO: 216063 - RNA, 23 nt, Human
cuugcuggguuacuucuguuagg

SEQ ID NO: 216064 - RNA, 18 nt, Human
cuuggugucaagugccga

SEQ ID NO: 216065 - RNA, 21 nt, Human
gaacagaacaucccauugcuc

SEQ ID NO: 216066 - RNA, 18 nt, Human
gaccuggaccaccaaggg

SEQ ID NO: 216067 - RNA, 19 nt, Human
gagaagcccuuccucuugc

SEQ ID NO: 216068 - RNA, 22 nt, Human
gagaagcccuuccucuugcuga

SEQ ID NO: 216069 - RNA, 23 nt, Human
gagagcuuccaaugcccuuggaa

SEQ ID NO: 216070 - RNA, 22 nt, Human
gagccauuuuucaguuugcguc

SEQ ID NO: 216071 - RNA, 21 nt, Human
gagguggggaaacaaagauag

SEQ ID NO: 216072 - RNA, 28 nt, Human
gcaacagcagcugguggugcuguggccc

SEQ ID NO: 216073 - RNA, 21 nt, Human
gcagguagacacugacacaug

SEQ ID NO: 216074 - RNA, 24 nt, Human
gccaugguucagguggagagagcu

SEQ ID NO: 216075 - RNA, 21 nt, Human
gcccaaagcaggaguuccccc

SEQ ID NO: 216076 - RNA, 20 nt, Human
gcugugugcugucccauuug

SEQ ID NO: 216077 - RNA, 18 nt, Human
ggaaagugugaggccuga

SEQ ID NO: 216078 - RNA, 19 nt, Human
ggagaugugcugggcccug

SEQ ID NO: 216079 - RNA, 23 nt, Human
ggccaaaggcuggccagggagca

SEQ ID NO: 216080 - RNA, 22 nt, Human
ggcgugagcuuuguuggugaug

SEQ ID NO: 216081 - RNA, 23 nt, Human
gggcagguagacacugacacaug

SEQ ID NO: 216082 - RNA, 18 nt, Human
gggccguggggcuuaaaa

SEQ ID NO: 216083 - RNA, 20 nt, Human
gggcuucacaugcaugcagu

SEQ ID NO: 216084 - RNA, 21 nt, Human
gggugugaugagagcaguacu

SEQ ID NO: 216085 - RNA, 22 nt, Human
gguggaguuuguucugccacug

SEQ ID NO: 216086 - RNA, 23 nt, Human
gucugguuuccuccuugaaaggu

SEQ ID NO: 216087 - RNA, 24 nt, Human
guggugcuguggccaaaggcuggc

SEQ ID NO: 216088 - RNA, 23 nt, Human
guucagguggagagagcuuccaa

SEQ ID NO: 216089 - RNA, 21 nt, Human
uacacagacccacugaaucag

SEQ ID NO: 216090 - RNA, 22 nt, Human
uacagucaggacacugcacacc

SEQ ID NO: 216091 - RNA, 19 nt, Human
uaguaauugagcaccuccu

SEQ ID NO: 216092 - RNA, 23 nt, Human
uccaaaacagguuuggacuugau

SEQ ID NO: 216093 - RNA, 21 nt, Human
uccaaugcccuuggaaggauu

SEQ ID NO: 216094 - RNA, 18 nt, Human
uccaccuucucagaacug

SEQ ID NO: 216095 - RNA, 20 nt, Human
ucccagcccaaagcaggagu

SEQ ID NO: 216096 - RNA, 23 nt, Human
ucccagggccagcagcaucagca

SEQ ID NO: 216097 - RNA, 19 nt, Human
ucccucuccaugggccucu

SEQ ID NO: 216098 - RNA, 22 nt, Human
uccgugugaaccgaguugggcc

SEQ ID NO: 216099 - RNA, 24 nt, Human
ucucaggcucuacacagacccacu

SEQ ID NO: 216100 - RNA, 20 nt, Human
ucucucagcaacagcagcug

SEQ ID NO: 216101 - RNA, 25 nt, Human
ucugccacugugcaguuaucauucu

SEQ ID NO: 216102 - RNA, 18 nt, Human
ugaaagcagaaaaacuua

SEQ ID NO: 216103 - RNA, 23 nt, Human
ugaagcccacuaaggaauccagg

SEQ ID NO: 216104 - RNA, 25 nt, Human
ugacaaaugccuccagccuuguccu

SEQ ID NO: 216105 - RNA, 18 nt, Human
ugacuguagaggcugaca

SEQ ID NO: 216106 - RNA, 23 nt, Human
ugacuguagaggcugacauaucu

SEQ ID NO: 216107 - RNA, 21 nt, Human
ugagcaccuccuguguuccaa

SEQ ID NO: 216108 - RNA, 23 nt, Human
ugagguggggaaacaaagauagu

SEQ ID NO: 216109 - RNA, 19 nt, Human
ugcaccccugguccuccug

SEQ ID NO: 216110 - RNA, 19 nt, Human
ugcacugggcugcauacag

SEQ ID NO: 216111 - RNA, 21 nt, Human
ugcacugggcugcauacaggc

SEQ ID NO: 216112 - RNA, 18 nt, Human
ugcagucagcaagcugga

SEQ ID NO: 216113 - RNA, 22 nt, Human
ugccagcaagcucaagacccaa

SEQ ID NO: 216114 - RNA, 23 nt, Human
ugcugcuguccuucuugacuuuc

SEQ ID NO: 216115 - RNA, 18 nt, Human
ugcugucccauuuggcag

SEQ ID NO: 216116 - RNA, 23 nt, Human
ugcuguggccaaaggcuggccag

SEQ ID NO: 216117 - RNA, 20 nt, Human
uggagagagcuuccaaugcc

SEQ ID NO: 216118 - RNA, 22 nt, Human
uggcagcuacuuuccgcuuccc

SEQ ID NO: 216119 - RNA, 18 nt, Human
uggccaaaggcuggccag

SEQ ID NO: 216120 - RNA, 25 nt, Human
uggccagggagcagcacgauccgug

SEQ ID NO: 216121 - RNA, 19 nt, Human
uggggugcagaggcugaaa

SEQ ID NO: 216122 - RNA, 19 nt, Human
uggugcuguggccaaaggc

SEQ ID NO: 216123 - RNA, 24 nt, Human
uguacaauccacugggagcaaaga

SEQ ID NO: 216124 - RNA, 24 nt, Human
ugugaugagagcaguacucagaaa

SEQ ID NO: 216125 - RNA, 18 nt, Human
ugugcaguuaucauucuc

SEQ ID NO: 216126 - RNA, 21 nt, Human
ugugcugggcccuggaguggg

SEQ ID NO: 216127 - RNA, 22 nt, Human
ugugugcugucccauuuggcag

SEQ ID NO: 216128 - RNA, 22 nt, Human
uuacagucaggacacugcacac

SEQ ID NO: 216129 - RNA, 24 nt, Human
uucacaggauccucaggugaucca

SEQ ID NO: 216130 - RNA, 21 nt, Human
uucccucuccaugggccucug

SEQ ID NO: 216131 - RNA, 18 nt, Human
uuccuagggagugcacug

SEQ ID NO: 216132 - RNA, 25 nt, Human
uugaaagguuggggcagcagaguca

SEQ ID NO: 216133 - RNA, 22 nt, Human
uugcugaacaguuuccucaucc

SEQ ID NO: 216134 - RNA, 18 nt, Human
uugcuggguuacuucugu

SEQ ID NO: 216135 - RNA, 25 nt, Human
uuggaagcaugaaaagccaugguuc

SEQ ID NO: 216136 - RNA, 20 nt, Human
uuucagggccguggggcuua

SEQ ID NO: 216137 - RNA, 18 nt, Human
uuugagacagguggagga

SEQ ID NO: 216138 - RNA, 19 nt, Human
aaaaagccgaaagccucua

SEQ ID NO: 216139 - RNA, 21 nt, Human
acuccaagccggcaucggcau

SEQ ID NO: 216140 - RNA, 20 nt, Human
acugcagcugcucucagcgg

SEQ ID NO: 216141 - RNA, 22 nt, Human
agccacuuuacuauuaaaaaug

SEQ ID NO: 216142 - RNA, 21 nt, Human
agucaggggcggaaggccggg

SEQ ID NO: 216143 - RNA, 26 nt, Human
cagcggugacucaucucuaacuccaa

SEQ ID NO: 216144 - RNA, 21 nt, Human
cccaaaaagccgaaagccucu

SEQ ID NO: 216145 - RNA, 22 nt, Human
cccaaaaagccgaaagccucua

SEQ ID NO: 216146 - RNA, 23 nt, Human
ccucagagaugcugccugccucu

SEQ ID NO: 216147 - RNA, 20 nt, Human
ccuuggggacccucagagau

SEQ ID NO: 216148 - RNA, 19 nt, Human
cguagagaaaauauagagc

SEQ ID NO: 216149 - RNA, 19 nt, Human
cgucugccucucugcugcc

SEQ ID NO: 216150 - RNA, 23 nt, Human
cgucugccucucugcugccacug

SEQ ID NO: 216151 - RNA, 23 nt, Human
cuacugcagcugcucucagcggu

SEQ ID NO: 216152 - RNA, 24 nt, Human
cucucugcugccacugcucagcua

SEQ ID NO: 216153 - RNA, 21 nt, Human
gcugcuccaucuccugggcua

SEQ ID NO: 216154 - RNA, 22 nt, Human
gcugggcugcuccaucuccugg

SEQ ID NO: 216155 - RNA, 19 nt, Human
ggcuaccggcaggugggga

SEQ ID NO: 216156 - RNA, 18 nt, Human
gggagcucagcuccgggc

SEQ ID NO: 216157 - RNA, 21 nt, Human
ucccaaaaagccgaaagccuc

SEQ ID NO: 216158 - RNA, 18 nt, Human
ucucugcugccacugcuc

SEQ ID NO: 216159 - RNA, 23 nt, Human
uuguuaucaagugaagucagggg

SEQ ID NO: 216160 - RNA, 21 nt, Human
uuuuuuuuuuuuuuuuugcgu

SEQ ID NO: 216161 - RNA, 24 nt, Human
uuuuuuuuuuuuuuuuuugcguag

SEQ ID NO: 216162 - RNA, 20 nt, Human
uuuuuuuuuuuuuuuuuugg

SEQ ID NO: 216163 - RNA, 19 nt, Human
accacggucacucuccagc

SEQ ID NO: 216164 - RNA, 22 nt, Human
accacggucacucuccagcccc

SEQ ID NO: 216165 - RNA, 20 nt, Human
acgcagccgccccaggucac

SEQ ID NO: 216166 - RNA, 22 nt, Human
aggagucagccccagccucgcc

SEQ ID NO: 216167 - RNA, 25 nt, Human
agggagcaggccaugggacccucau

SEQ ID NO: 216168 - RNA, 19 nt, Human
cacucuccagcccccggcc

SEQ ID NO: 216169 - RNA, 20 nt, Human
ccaccccggcccacgcagcc

SEQ ID NO: 216170 - RNA, 18 nt, Human
ccacggucacucuccagc

SEQ ID NO: 216171 - RNA, 20 nt, Human
ccgccaggacccggcgcggg

SEQ ID NO: 216172 - RNA, 20 nt, Human
ccugagggagcaggccaugg

SEQ ID NO: 216173 - RNA, 22 nt, Human
cgccccaggucacucagaccac

SEQ ID NO: 216174 - RNA, 22 nt, Human
cgcggcccgagcgccgccccuc

SEQ ID NO: 216175 - RNA, 21 nt, Human
cggcgcgggcagcgcgcggcc

SEQ ID NO: 216176 - RNA, 22 nt, Human
gcggcccgagcgccgccccucc

SEQ ID NO: 216177 - RNA, 20 nt, Human
ggccaugggacccucaucgg

SEQ ID NO: 216178 - RNA, 18 nt, Human
ucgccgcccgccaggacc

SEQ ID NO: 216179 - RNA, 23 nt, Human
ucuggugcccggcuuugaggccc

SEQ ID NO: 216180 - RNA, 24 nt, Human
ugaggcaggagucagccccagccu

SEQ ID NO: 216181 - RNA, 20 nt, Human
ugagggagcaggccauggga

SEQ ID NO: 216182 - RNA, 24 nt, Human
ugcccggcuuugaggcccaccuua

SEQ ID NO: 216183 - RNA, 22 nt, Human
ugguaagaugccucuuuauugg

SEQ ID NO: 216184 - RNA, 20 nt, Human
uggugcuggagcuguuccug

SEQ ID NO: 216185 - RNA, 23 nt, Human
uuccugagggagcaggccauggg

SEQ ID NO: 216186 - RNA, 21 nt, Human
uuggugguaagaugccucuuu

SEQ ID NO: 216187 - RNA, 18 nt, Human
uuuuuuuuuuuuuuuuug

SEQ ID NO: 216188 - RNA, 20 nt, Human
uuuuuuuuuuuuuuuuuggu

SEQ ID NO: 216189 - RNA, 22 nt, Human
uuuuuuuuuuuuuuuuuggugg

SEQ ID NO: 216190 - RNA, 19 nt, Human
aaaaaaaguggggaggggg

SEQ ID NO: 216191 - RNA, 25 nt, Human
aaaaagacaaaacacauagaauuag

SEQ ID NO: 216192 - RNA, 19 nt, Human
aaccaaugcagcuccaccu

SEQ ID NO: 216193 - RNA, 24 nt, Human
aagaaaaagacaaaacacauagaa

SEQ ID NO: 216194 - RNA, 22 nt, Human
aagucaaacacaaucccgagac

SEQ ID NO: 216195 - RNA, 27 nt, Human
aagucaacuuuaaacauaucaaaccaa

SEQ ID NO: 216196 - RNA, 21 nt, Human
aaguuuccuuuuuuuuuuccu

SEQ ID NO: 216197 - RNA, 22 nt, Human
aaugcaagagcaaacaaaaaaa

SEQ ID NO: 216198 - RNA, 18 nt, Human
acagcccacagagaggau

SEQ ID NO: 216199 - RNA, 23 nt, Human
agaaaaagacaaaacacauagaa

SEQ ID NO: 216200 - RNA, 24 nt, Human
agaaaaagacaaaacacauagaaa

SEQ ID NO: 216201 - RNA, 18 nt, Human
agacacaagucaaacaca

SEQ ID NO: 216202 - RNA, 23 nt, Human
agcuacaggacaggccaagagac

SEQ ID NO: 216203 - RNA, 18 nt, Human
agggggcaaaguaaaaaa

SEQ ID NO: 216204 - RNA, 23 nt, Human
aguaaaaaauaaaccagcuacag

SEQ ID NO: 216205 - RNA, 19 nt, Human
aguuuccuuuuuuuuuucc

SEQ ID NO: 216206 - RNA, 22 nt, Human
aguuuccuuuuuuuuuuccuuu

SEQ ID NO: 216207 - RNA, 26 nt, Human
cacaaucccgagacgcuuguggcaaa

SEQ ID NO: 216208 - RNA, 18 nt, Human
cagcuccaccuuccugaa

SEQ ID NO: 216209 - RNA, 19 nt, Human
cauauaauucaaagaccac

SEQ ID NO: 216210 - RNA, 21 nt, Human
ccuuguuaaagucaacuuuaa

SEQ ID NO: 216211 - RNA, 19 nt, Human
cgcugcggcggcggcagac

SEQ ID NO: 216212 - RNA, 19 nt, Human
cgcugcucggcugcgccgc

SEQ ID NO: 216213 - RNA, 20 nt, Human
cuggagcuguggcuaagugg

SEQ ID NO: 216214 - RNA, 26 nt, Human
cuucacaguguugcuaccauaucacc

SEQ ID NO: 216215 - RNA, 24 nt, Human
cuuuugcuggagcuccuguuuggc

SEQ ID NO: 216216 - RNA, 22 nt, Human
gaaaaagacaaaacacauagaa

SEQ ID NO: 216217 - RNA, 23 nt, Human
gaugcuggagcuguggcuaagug

SEQ ID NO: 216218 - RNA, 18 nt, Human
gcaaaauagagguaaccu

SEQ ID NO: 216219 - RNA, 21 nt, Human
gcaaugcaagagcaaacaaaa

SEQ ID NO: 216220 - RNA, 21 nt, Human
gcccucgcggaucuaggaguu

SEQ ID NO: 216221 - RNA, 24 nt, Human
ggccaagagacccaggauuucaau

SEQ ID NO: 216222 - RNA, 18 nt, Human
ggcgcugcggcggcggca

SEQ ID NO: 216223 - RNA, 25 nt, Human
gggaaaaaaaauacagaaugaaugu

SEQ ID NO: 216224 - RNA, 21 nt, Human
gggaaauauuggccccugggg

SEQ ID NO: 216225 - RNA, 18 nt, Human
gguuuugcguuuuguuug

SEQ ID NO: 216226 - RNA, 23 nt, Human
guuuccuuuuuuuuuuccuuuuu

SEQ ID NO: 216227 - RNA, 24 nt, Human
uaaaaaauaaaccagcuacaggac

SEQ ID NO: 216228 - RNA, 24 nt, Human
uaagaaaaagacaaaacacauaga

SEQ ID NO: 216229 - RNA, 21 nt, Human
uaagagggaguaauguccaca

SEQ ID NO: 216230 - RNA, 24 nt, Human
uaagagggaguaauguccacagug

SEQ ID NO: 216231 - RNA, 28 nt, Human
uacuggguuuugcguuuuggagagaucu

SEQ ID NO: 216232 - RNA, 19 nt, Human
uaucuguaagagggaguaa

SEQ ID NO: 216233 - RNA, 18 nt, Human
ucaaaccaaugcagcucc

SEQ ID NO: 216234 - RNA, 24 nt, Human
ucaguuuucauugacugggucguu

SEQ ID NO: 216235 - RNA, 19 nt, Human
uccaccuuccugaaaggac

SEQ ID NO: 216236 - RNA, 27 nt, Human
ucccaugauugucuucacaguguugcu

SEQ ID NO: 216237 - RNA, 20 nt, Human
ucggcugcgccgcgcccucg

SEQ ID NO: 216238 - RNA, 21 nt, Human
ucuuccgacaauaaauaauaa

SEQ ID NO: 216239 - RNA, 18 nt, Human
ucuuuuuuuuucacuuca

SEQ ID NO: 216240 - RNA, 21 nt, Human
ugaaaggacucuuucagccaa

SEQ ID NO: 216241 - RNA, 19 nt, Human
ugcaaugcaagagcaaaca

SEQ ID NO: 216242 - RNA, 20 nt, Human
ugcuggagcuccuguuuggc

SEQ ID NO: 216243 - RNA, 21 nt, Human
uggcaaaauagagguaaccuu

SEQ ID NO: 216244 - RNA, 18 nt, Human
uggccccugggguugccu

SEQ ID NO: 216245 - RNA, 20 nt, Human
uucaguuuucauugacuggg

SEQ ID NO: 216246 - RNA, 18 nt, Human
uucauggagcauucauuu

SEQ ID NO: 216247 - RNA, 20 nt, Human
uucauggagcauucauuucu

SEQ ID NO: 216248 - RNA, 21 nt, Human
uucauggagcauucauuucuu

SEQ ID NO: 216249 - RNA, 23 nt, Human
uucauggagcauucauuucuuga

SEQ ID NO: 216250 - RNA, 21 nt, Human
uucucuagaugugcagugaaa

SEQ ID NO: 216251 - RNA, 27 nt, Human
uucuuggacagacacaagucaaacaca

SEQ ID NO: 216252 - RNA, 18 nt, Human
uuuauagucgcuucagac

SEQ ID NO: 216253 - RNA, 22 nt, Human
aagaggaaggaagccauccugg

SEQ ID NO: 216254 - RNA, 25 nt, Human
aagcccccaaaucaucagaaaacag

SEQ ID NO: 216255 - RNA, 21 nt, Human
accucccagcuaagccccagc

SEQ ID NO: 216256 - RNA, 23 nt, Human
acuuaaaggggcauugguagggg

SEQ ID NO: 216257 - RNA, 25 nt, Human
agaccaccucccagcuaagccccag

SEQ ID NO: 216258 - RNA, 22 nt, Human
agaggagcagacaacagaugca

SEQ ID NO: 216259 - RNA, 22 nt, Human
agaguucucccugccucggccu

SEQ ID NO: 216260 - RNA, 22 nt, Human
aggagcaggaggagcuugagca

SEQ ID NO: 216261 - RNA, 18 nt, Human
aggcaggaugaagacggg

SEQ ID NO: 216262 - RNA, 23 nt, Human
aggcaggaugaagacgggauggg

SEQ ID NO: 216263 - RNA, 22 nt, Human
agggaggaaggguaagaggaaa

SEQ ID NO: 216264 - RNA, 20 nt, Human
aggggcaaggggaggaguua

SEQ ID NO: 216265 - RNA, 20 nt, Human
aguucucccugccucggccu

SEQ ID NO: 216266 - RNA, 18 nt, Human
augcaggccucaggaguu

SEQ ID NO: 216267 - RNA, 18 nt, Human
caaagggacucccaagcc

SEQ ID NO: 216268 - RNA, 22 nt, Human
caagcccccaaaucaucagaaa

SEQ ID NO: 216269 - RNA, 22 nt, Human
cagaaaacagcaaggagcagga

SEQ ID NO: 216270 - RNA, 21 nt, Human
cagcuccauucccccaauccu

SEQ ID NO: 216271 - RNA, 22 nt, Human
cagcuccauucccccaauccug

SEQ ID NO: 216272 - RNA, 21 nt, Human
ccaccacugaggcuucuccca

SEQ ID NO: 216273 - RNA, 21 nt, Human
ccagcuccauucccccaaucc

SEQ ID NO: 216274 - RNA, 21 nt, Human
cccaaaucaucagaaaacagc

SEQ ID NO: 216275 - RNA, 24 nt, Human
ccccagcuccauucccccaauccu

SEQ ID NO: 216276 - RNA, 20 nt, Human
ccucaggaguugccaacccc

SEQ ID NO: 216277 - RNA, 22 nt, Human
ccucccgaggucacgcagccag

SEQ ID NO: 216278 - RNA, 23 nt, Human
cuacuucccauccuccucuccca

SEQ ID NO: 216279 - RNA, 21 nt, Human
cucagagccauaccagccacu

SEQ ID NO: 216280 - RNA, 23 nt, Human
cuggauccccacauuucagucuc

SEQ ID NO: 216281 - RNA, 24 nt, Human
gacaaagggacucccaagccccca

SEQ ID NO: 216282 - RNA, 27 nt, Human
gacaacagaugcauaguuggggagaaa

SEQ ID NO: 216283 - RNA, 22 nt, Human
gagcacaggcaaugcuguuagc

SEQ ID NO: 216284 - RNA, 21 nt, Human
gagcaggccccagggagccuc

SEQ ID NO: 216285 - RNA, 22 nt, Human
gcaggcugagggaggaagggua

SEQ ID NO: 216286 - RNA, 18 nt, Human
gccuggaauuccaccacu

SEQ ID NO: 216287 - RNA, 21 nt, Human
gcuggccuuugcagaggagca

SEQ ID NO: 216288 - RNA, 22 nt, Human
ggauagagguugcaggcugagg

SEQ ID NO: 216289 - RNA, 22 nt, Human
ggauggaagaggaccccagcuc

SEQ ID NO: 216290 - RNA, 18 nt, Human
ggcauugguaggggcaag

SEQ ID NO: 216291 - RNA, 21 nt, Human
ggccccagggagccucagagc

SEQ ID NO: 216292 - RNA, 22 nt, Human
uaaaggggcauugguaggggca

SEQ ID NO: 216293 - RNA, 22 nt, Human
ucaaauucuauccuagucacua

SEQ ID NO: 216294 - RNA, 20 nt, Human
ucagaaaacagcaaggagca

SEQ ID NO: 216295 - RNA, 19 nt, Human
ucagaugaggacaaaggga

SEQ ID NO: 216296 - RNA, 22 nt, Human
ucaucagaaaacagcaaggagc

SEQ ID NO: 216297 - RNA, 19 nt, Human
uccaggauagagguugcag

SEQ ID NO: 216298 - RNA, 23 nt, Human
uccaggauagagguugcaggcug

SEQ ID NO: 216299 - RNA, 18 nt, Human
ugccuggaauuccaccac

SEQ ID NO: 216300 - RNA, 21 nt, Human
ugccuggaauuccaccacuga

SEQ ID NO: 216301 - RNA, 23 nt, Human
ugccuggaauuccaccacugagg

SEQ ID NO: 216302 - RNA, 23 nt, Human
ugcuucagaccaccucccagcua

SEQ ID NO: 216303 - RNA, 21 nt, Human
uggauccccacauuucagucu

SEQ ID NO: 216304 - RNA, 27 nt, Human
ugucuacuucccauccuccucucccaa

SEQ ID NO: 216305 - RNA, 22 nt, Human
uugcagaggagcagacaacaga

SEQ ID NO: 216306 - RNA, 23 nt, Human
uugcaggcugagggaggaagggu

SEQ ID NO: 216307 - RNA, 18 nt, Human
uuggagcaggucuagaag

SEQ ID NO: 216308 - RNA, 21 nt, Human
aaacaauagucaagucagacu

SEQ ID NO: 216309 - RNA, 22 nt, Human
agaaaggaaaaacaauagucaa

SEQ ID NO: 216310 - RNA, 23 nt, Human
agacagggucucccuauguugcc

SEQ ID NO: 216311 - RNA, 23 nt, Human
agacuuuugacacacauaaaaua

SEQ ID NO: 216312 - RNA, 24 nt, Human
agagugcuaggauuacagguauga

SEQ ID NO: 216313 - RNA, 21 nt, Human
aggaaaaucuuguauauugca

SEQ ID NO: 216314 - RNA, 22 nt, Human
agugcuaggauuacagguauga

SEQ ID NO: 216315 - RNA, 25 nt, Human
caauagguuggaaaaccugaaguuc

SEQ ID NO: 216316 - RNA, 24 nt, Human
cagagugcuaggauuacagguaug

SEQ ID NO: 216317 - RNA, 24 nt, Human
cagggucucccuauguugcccagg

SEQ ID NO: 216318 - RNA, 21 nt, Human
ccagagugcuaggauuacagg

SEQ ID NO: 216319 - RNA, 22 nt, Human
ccagagugcuaggauuacaggu

SEQ ID NO: 216320 - RNA, 24 nt, Human
ccagagugcuaggauuacagguau

SEQ ID NO: 216321 - RNA, 19 nt, Human
ccccaccacgcugcccaaa

SEQ ID NO: 216322 - RNA, 19 nt, Human
ccccaccacgcugcccaaa

SEQ ID NO: 216323 - RNA, 22 nt, Human
ccccaccacgcugcccaaaaaa

SEQ ID NO: 216324 - RNA, 21 nt, Human
ccccagaagcaggaguaagcu

SEQ ID NO: 216325 - RNA, 22 nt, Human
cccccaccacgcugcccaaaaa

SEQ ID NO: 216326 - RNA, 24 nt, Human
cccccaccacgcugcccaaaaaaa

SEQ ID NO: 216327 - RNA, 24 nt, Human
cccuauguugcccaggcuggucuu

SEQ ID NO: 216328 - RNA, 21 nt, Human
ccuccugccucggccucccag

SEQ ID NO: 216329 - RNA, 22 nt, Human
ccuccugccucggccucccaga

SEQ ID NO: 216330 - RNA, 25 nt, Human
ccuccugccucggccucccagagug

SEQ ID NO: 216331 - RNA, 24 nt, Human
ccugccucggccucccagagugcu

SEQ ID NO: 216332 - RNA, 20 nt, Human
ccugggcuaaagggauccuc

SEQ ID NO: 216333 - RNA, 25 nt, Human
cugcagaaugucuaaaagaaaaaaa

SEQ ID NO: 216334 - RNA, 18 nt, Human
gauuacagguaugagcca

SEQ ID NO: 216335 - RNA, 21 nt, Human
gauuacagguaugagccacca

SEQ ID NO: 216336 - RNA, 22 nt, Human
gauuacagguaugagccaccau

SEQ ID NO: 216337 - RNA, 18 nt, Human
gccagaaaggaaaaacaa

SEQ ID NO: 216338 - RNA, 20 nt, Human
gccucacuuccaggaaugau

SEQ ID NO: 216339 - RNA, 25 nt, Human
gcgccagaaaggaaaaacaauaguc

SEQ ID NO: 216340 - RNA, 23 nt, Human
ggagauaaaucuaaaugagaaca

SEQ ID NO: 216341 - RNA, 22 nt, Human
ggauccuccugccucggccucc

SEQ ID NO: 216342 - RNA, 22 nt, Human
ggauuacagguaugagccacca

SEQ ID NO: 216343 - RNA, 24 nt, Human
ggauuacagguaugagccaccaug

SEQ ID NO: 216344 - RNA, 19 nt, Human
ggcggcggcgacuccucag

SEQ ID NO: 216345 - RNA, 19 nt, Human
guauggauucaugcgccag

SEQ ID NO: 216346 - RNA, 18 nt, Human
gucuccacaaggccacug

SEQ ID NO: 216347 - RNA, 21 nt, Human
gugcaacaggcagagaaggac

SEQ ID NO: 216348 - RNA, 18 nt, Human
guuguguuaaaaucucau

SEQ ID NO: 216349 - RNA, 22 nt, Human
uaaaacaaugaaggaaucacaa

SEQ ID NO: 216350 - RNA, 28 nt, Human
uaaaacaaugaaggaaucaccgguaccc

SEQ ID NO: 216351 - RNA, 20 nt, Human
uaaacuaguggaauaagaca

SEQ ID NO: 216352 - RNA, 23 nt, Human
uaaagggauccuccugccucggc

SEQ ID NO: 216353 - RNA, 27 nt, Human
uaacaaaugccucuuaccaagaggcuu

SEQ ID NO: 216354 - RNA, 20 nt, Human
uaacuccugggcuaaaggga

SEQ ID NO: 216355 - RNA, 24 nt, Human
uaaggcguugucuccacaaggcca

SEQ ID NO: 216356 - RNA, 21 nt, Human
uacaagaugugcaacaggcag

SEQ ID NO: 216357 - RNA, 23 nt, Human
uacagguaugagccaccaugccc

SEQ ID NO: 216358 - RNA, 18 nt, Human
uaggauuacagguaugag

SEQ ID NO: 216359 - RNA, 22 nt, Human
uaggauuacagguaugagccac

SEQ ID NO: 216360 - RNA, 24 nt, Human
uaggauuacagguaugagccacca

SEQ ID NO: 216361 - RNA, 20 nt, Human
uagguuggaaaaccugaagu

SEQ ID NO: 216362 - RNA, 19 nt, Human
uauguugcccaggcugguc

SEQ ID NO: 216363 - RNA, 23 nt, Human
uauguugcccaggcuggucuuua

SEQ ID NO: 216364 - RNA, 24 nt, Human
uauguugcccaggcuggucuuuaa

SEQ ID NO: 216365 - RNA, 25 nt, Human
uauuguuguuaaaggaauaaacuag

SEQ ID NO: 216366 - RNA, 19 nt, Human
ucaagucagacuaaaauga

SEQ ID NO: 216367 - RNA, 21 nt, Human
ucaagucagacuaaaaugaga

SEQ ID NO: 216368 - RNA, 23 nt, Human
ucccagagugcuaggauuacagg

SEQ ID NO: 216369 - RNA, 20 nt, Human
uccccagaagcaggaguaag

SEQ ID NO: 216370 - RNA, 23 nt, Human
ucccuauguugcccaggcugguc

SEQ ID NO: 216371 - RNA, 22 nt, Human
uccuccugccucggccucccag

SEQ ID NO: 216372 - RNA, 25 nt, Human
ucggggcggcggcgacuccucaguc

SEQ ID NO: 216373 - RNA, 23 nt, Human
ucucccuauguugcccaggcugg

SEQ ID NO: 216374 - RNA, 24 nt, Human
ucucccuauguugcccaggcuggu

SEQ ID NO: 216375 - RNA, 25 nt, Human
ucucuaaagagccauuguccaauuu

SEQ ID NO: 216376 - RNA, 21 nt, Human
ucuuuaacuccugggcuaaag

SEQ ID NO: 216377 - RNA, 21 nt, Human
ugaaggaaucacaguguuaac

SEQ ID NO: 216378 - RNA, 27 nt, Human
ugagaacauuaauuuacuucccugcgg

SEQ ID NO: 216379 - RNA, 18 nt, Human
ugagacuuuugacacaca

SEQ ID NO: 216380 - RNA, 25 nt, Human
ugcagaaugucuaaaagaaaaaaac

SEQ ID NO: 216381 - RNA, 24 nt, Human
ugcccaaaaaaaagacagggucuc

SEQ ID NO: 216382 - RNA, 24 nt, Human
ugcccaggcuggucuuuaacuccu

SEQ ID NO: 216383 - RNA, 28 nt, Human
ugcccaggcuggucuuuaacuccugggc

SEQ ID NO: 216384 - RNA, 21 nt, Human
ugccucggccucccagagugc

SEQ ID NO: 216385 - RNA, 23 nt, Human
ugccucggccucccagagugcua

SEQ ID NO: 216386 - RNA, 24 nt, Human
ugccucggccucccagagugcuag

SEQ ID NO: 216387 - RNA, 21 nt, Human
ugccucuuaccaagaggcuua

SEQ ID NO: 216388 - RNA, 24 nt, Human
ugcuaggauuacagguaugagcca

SEQ ID NO: 216389 - RNA, 23 nt, Human
uggaaaaccugaaguucucacag

SEQ ID NO: 216390 - RNA, 21 nt, Human
uggguuaaggcguugucucca

SEQ ID NO: 216391 - RNA, 21 nt, Human
ugguaccgggacucggggcgg

SEQ ID NO: 216392 - RNA, 22 nt, Human
uuuaacuccugggcuaaaggga

SEQ ID NO: 216393 - RNA, 23 nt, Human
uuuguagagaugcaagagucuug

SEQ ID NO: 216394 - RNA, 25 nt, Human
uuugucaggcaacugaaacaaucag

SEQ ID NO: 216395 - RNA, 18 nt, Human
uuuuauuuaucccccacc

SEQ ID NO: 216396 - RNA, 21 nt, Human
uuuuuuuuuuuuuuuuuauuu

SEQ ID NO: 216397 - RNA, 23 nt, Human
aaaagcacucagcaggaugaccc

SEQ ID NO: 216398 - RNA, 23 nt, Human
aaaaugcccucauuucuauuuuu

SEQ ID NO: 216399 - RNA, 22 nt, Human
aaacaggacuucugguucaugg

SEQ ID NO: 216400 - RNA, 21 nt, Human
aaccucaacaaauuauaauau

SEQ ID NO: 216401 - RNA, 19 nt, Human
aagcauguucuguaaaagc

SEQ ID NO: 216402 - RNA, 24 nt, Human
aaggaguugagacaacucuuucuu

SEQ ID NO: 216403 - RNA, 24 nt, Human
acagcaacaauccggcaaaagcac

SEQ ID NO: 216404 - RNA, 22 nt, Human
acagcacaggguaaccauuuga

SEQ ID NO: 216405 - RNA, 19 nt, Human
agagaugcauuuucacucc

SEQ ID NO: 216406 - RNA, 20 nt, Human
agagcuauuuuuguauucaa

SEQ ID NO: 216407 - RNA, 22 nt, Human
agcuuuacuacuaagaucuugc

SEQ ID NO: 216408 - RNA, 26 nt, Human
aggagcuuaugcuacaguagauucca

SEQ ID NO: 216409 - RNA, 21 nt, Human
aggaugacccauaauggcacu

SEQ ID NO: 216410 - RNA, 20 nt, Human
auacauuucuugucacauau

SEQ ID NO: 216411 - RNA, 18 nt, Human
aucaccuugggcagggag

SEQ ID NO: 216412 - RNA, 21 nt, Human
aucauucugggaucggacaau

SEQ ID NO: 216413 - RNA, 23 nt, Human
auccaguuggguacagcacaggg

SEQ ID NO: 216414 - RNA, 25 nt, Human
auccaguuggguacagcacaggggg

SEQ ID NO: 216415 - RNA, 22 nt, Human
augaaucccugauggauuacau

SEQ ID NO: 216416 - RNA, 21 nt, Human
auguguacaugugucugcaca

SEQ ID NO: 216417 - RNA, 22 nt, Human
auguuucuaugaucauaaaaau

SEQ ID NO: 216418 - RNA, 24 nt, Human
auuaauaaaaaugaaacuauauga

SEQ ID NO: 216419 - RNA, 24 nt, Human
auugaauaauuguuauuauuuucu

SEQ ID NO: 216420 - RNA, 28 nt, Human
caaaagcacucagcaggauuggagaccc

SEQ ID NO: 216421 - RNA, 21 nt, Human
caagaacaaagaagcacauac

SEQ ID NO: 216422 - RNA, 24 nt, Human
caagauaagcgaaacauugacuug

SEQ ID NO: 216423 - RNA, 23 nt, Human
caauccggcaaaagcacucagca

SEQ ID NO: 216424 - RNA, 25 nt, Human
cacacaaaccucaacaaauuauaau

SEQ ID NO: 216425 - RNA, 18 nt, Human
cacacacacacacacaca

SEQ ID NO: 216426 - RNA, 23 nt, Human
cacucugcccgguagcccaucuu

SEQ ID NO: 216427 - RNA, 18 nt, Human
cagagcuguaaaacugua

SEQ ID NO: 216428 - RNA, 21 nt, Human
cagcggcgcccaggagcggga

SEQ ID NO: 216429 - RNA, 21 nt, Human
cagcuaaauucuuuggaaauu

SEQ ID NO: 216430 - RNA, 18 nt, Human
cagcucuuccucucuuuu

SEQ ID NO: 216431 - RNA, 27 nt, Human
caggccagcaagaggacaccaaaccuc

SEQ ID NO: 216432 - RNA, 22 nt, Human
caguggcagcggcgcccaggag

SEQ ID NO: 216433 - RNA, 23 nt, Human
cauaaugacuacuucaagaacaa

SEQ ID NO: 216434 - RNA, 24 nt, Human
caugacaaaucacugugaugccac

SEQ ID NO: 216435 - RNA, 25 nt, Human
caugacaaaucacugugaugccaca

SEQ ID NO: 216436 - RNA, 26 nt, Human
caugacaaaucacugugaugccacac

SEQ ID NO: 216437 - RNA, 22 nt, Human
ccaaucuuccacagugcuaaaa

SEQ ID NO: 216438 - RNA, 23 nt, Human
ccacaucgcccgccccuucgcgg

SEQ ID NO: 216439 - RNA, 23 nt, Human
ccaguggcagcggcgcccaggag

SEQ ID NO: 216440 - RNA, 18 nt, Human
cucacuggcagcuuccca

SEQ ID NO: 216441 - RNA, 18 nt, Human
cucauuggcagcaauuga

SEQ ID NO: 216442 - RNA, 20 nt, Human
cucuggcugggccacuuauc

SEQ ID NO: 216443 - RNA, 23 nt, Human
cucuuggucucugaaaucucacu

SEQ ID NO: 216444 - RNA, 22 nt, Human
cugauggauuacauaguuacau

SEQ ID NO: 216445 - RNA, 23 nt, Human
cuuggucucugaaaucucacuuc

SEQ ID NO: 216446 - RNA, 22 nt, Human
cuuuacuacuaagaucuugcug

SEQ ID NO: 216447 - RNA, 19 nt, Human
gaaaguuaccaucucuccu

SEQ ID NO: 216448 - RNA, 19 nt, Human
gaguuucuggaugaauaca

SEQ ID NO: 216449 - RNA, 26 nt, Human
ggagaggagugauuuccuguguuuuc

SEQ ID NO: 216450 - RNA, 21 nt, Human
ggcaaagaaagaacaaguggu

SEQ ID NO: 216451 - RNA, 20 nt, Human
ggcaggcugagcacuggggg

SEQ ID NO: 216452 - RNA, 24 nt, Human
ggcagggagggaaaauuuuuaggu

SEQ ID NO: 216453 - RNA, 23 nt, Human
gucauuuuccaaguaaugaaucc

SEQ ID NO: 216454 - RNA, 21 nt, Human
uaaaaacuucaaaaugcccuc

SEQ ID NO: 216455 - RNA, 23 nt, Human
uaaaauauuucauuucuccauuu

SEQ ID NO: 216456 - RNA, 22 nt, Human
uaagcuggaaaaauaugauuuu

SEQ ID NO: 216457 - RNA, 24 nt, Human
uaagcuggaaaaauaugauuuuau

SEQ ID NO: 216458 - RNA, 21 nt, Human
uacagguucugguaaaucaga

SEQ ID NO: 216459 - RNA, 23 nt, Human
uacaugugaugguagcaaauuua

SEQ ID NO: 216460 - RNA, 18 nt, Human
uacauguucuggucuugu

SEQ ID NO: 216461 - RNA, 18 nt, Human
uaccaagggaaaauauuc

SEQ ID NO: 216462 - RNA, 24 nt, Human
uagauuauugaauaauuguuauua

SEQ ID NO: 216463 - RNA, 26 nt, Human
uauacuuguuuuuaaacgagucuauc

SEQ ID NO: 216464 - RNA, 19 nt, Human
uaucagaaaggguuucagg

SEQ ID NO: 216465 - RNA, 18 nt, Human
uaugucuuuuugguauug

SEQ ID NO: 216466 - RNA, 25 nt, Human
ucaaaauuaagcauguucuguaaaa

SEQ ID NO: 216467 - RNA, 19 nt, Human
ucagggacugucucauugg

SEQ ID NO: 216468 - RNA, 23 nt, Human
ucaguggcaucuuucucugcugg

SEQ ID NO: 216469 - RNA, 19 nt, Human
ucaugaauuauacauuucu

SEQ ID NO: 216470 - RNA, 19 nt, Human
ucauucagaagccauuuua

SEQ ID NO: 216471 - RNA, 18 nt, Human
uccaaaagcgcguauuuc

SEQ ID NO: 216472 - RNA, 20 nt, Human
uccaauguccucaguagaau

SEQ ID NO: 216473 - RNA, 21 nt, Human
uccuguugguuugaguuuuca

SEQ ID NO: 216474 - RNA, 23 nt, Human
ucucacuggcagcuucccaggcu

SEQ ID NO: 216475 - RNA, 18 nt, Human
ucugcaguuugcauucuc

SEQ ID NO: 216476 - RNA, 29 nt, Human
ugaaauggaaaauugucuuuucaaaaaaa

SEQ ID NO: 216477 - RNA, 20 nt, Human
ugaacaaagcagagcccagg

SEQ ID NO: 216478 - RNA, 21 nt, Human
ugaauaagagaaacccugagu

SEQ ID NO: 216479 - RNA, 22 nt, Human
ugacaggccagcaagaggacac

SEQ ID NO: 216480 - RNA, 18 nt, Human
ugacuuggcugaugucag

SEQ ID NO: 216481 - RNA, 24 nt, Human
ugaggucugagauacauuuuuccu

SEQ ID NO: 216482 - RNA, 19 nt, Human
ugaguuuucaaaccugaaa

SEQ ID NO: 216483 - RNA, 19 nt, Human
ugaugccacacaaaacuac

SEQ ID NO: 216484 - RNA, 23 nt, Human
ugauguagucauuuucuuuccag

SEQ ID NO: 216485 - RNA, 24 nt, Human
ugauuagauucacaacugucuuuu

SEQ ID NO: 216486 - RNA, 28 nt, Human
ugauuagauucacaacugucuuuuugga

SEQ ID NO: 216487 - RNA, 21 nt, Human
ugcagagcuguaaaacuguag

SEQ ID NO: 216488 - RNA, 18 nt, Human
ugccccaguggcagcggc

SEQ ID NO: 216489 - RNA, 19 nt, Human
ugccccaguggcagcggcg

SEQ ID NO: 216490 - RNA, 23 nt, Human
ugcggauguggagagucaagagg

SEQ ID NO: 216491 - RNA, 21 nt, Human
ugcuacuuaaaaccagagaug

SEQ ID NO: 216492 - RNA, 22 nt, Human
uggcugggccacuuaucccgcu

SEQ ID NO: 216493 - RNA, 21 nt, Human
uggguacagcacaggguaacc

SEQ ID NO: 216494 - RNA, 19 nt, Human
uggucucugaaaucucacu

SEQ ID NO: 216495 - RNA, 21 nt, Human
uguaccaaggaguugagacaa

SEQ ID NO: 216496 - RNA, 22 nt, Human
uguagucauuuucuuuccagag

SEQ ID NO: 216497 - RNA, 18 nt, Human
uguauugcaguccagaau

SEQ ID NO: 216498 - RNA, 18 nt, Human
ugucagaagaagugagau

SEQ ID NO: 216499 - RNA, 18 nt, Human
ugucagaagaagugagau

SEQ ID NO: 216500 - RNA, 19 nt, Human
ugucagaagaagugagauu

SEQ ID NO: 216501 - RNA, 21 nt, Human
uguguacaugugucugcacau

SEQ ID NO: 216502 - RNA, 25 nt, Human
uguugcagaaaugucagcaaacuuu

SEQ ID NO: 216503 - RNA, 22 nt, Human
uguuuuaaaaguaaaugauaga

SEQ ID NO: 216504 - RNA, 24 nt, Human
uuaaaaccagagaugcauuuucac

SEQ ID NO: 216505 - RNA, 23 nt, Human
uuaacagcaacaauccggcaaaa

SEQ ID NO: 216506 - RNA, 23 nt, Human
uuccaaauaaugacaggccagca

SEQ ID NO: 216507 - RNA, 19 nt, Human
uucucaggaagggauaucc

SEQ ID NO: 216508 - RNA, 20 nt, Human
uugaaugaacccuguaccaa

SEQ ID NO: 216509 - RNA, 23 nt, Human
uuggaaaagauccacuuuuucua

SEQ ID NO: 216510 - RNA, 21 nt, Human
uuuaauauacuuguuuuuaaa

SEQ ID NO: 216511 - RNA, 18 nt, Human
uuuacagcaguaguucac

SEQ ID NO: 216512 - RNA, 23 nt, Human
uuuauuuucuguaaacucuguuu

SEQ ID NO: 216513 - RNA, 24 nt, Human
uuuccaaucaccuugggcagggag

SEQ ID NO: 216514 - RNA, 20 nt, Human
uuuggcaauuuggccaauaa

SEQ ID NO: 216515 - RNA, 21 nt, Human
uuuguauuuuugacugugagg

SEQ ID NO: 216516 - RNA, 24 nt, Human
uuuucacuccgaaguucuccccuu

SEQ ID NO: 216517 - RNA, 24 nt, Human
aagacuaaggcauaaauuacucca

SEQ ID NO: 216518 - RNA, 18 nt, Human
acagagccugagggaggc

SEQ ID NO: 216519 - RNA, 22 nt, Human
accucaaaacaagacuaaggca

SEQ ID NO: 216520 - RNA, 23 nt, Human
agaucuguuuugucuuggauccu

SEQ ID NO: 216521 - RNA, 25 nt, Human
agcaagaagacgugggaaugcacag

SEQ ID NO: 216522 - RNA, 22 nt, Human
agcaccuuaguagcuggggcag

SEQ ID NO: 216523 - RNA, 21 nt, Human
agggaaggaugggaggcagug

SEQ ID NO: 216524 - RNA, 24 nt, Human
agggagugggugugacuugggagc

SEQ ID NO: 216525 - RNA, 18 nt, Human
aggggcugcagcuggugg

SEQ ID NO: 216526 - RNA, 33 nt, Human
augggaggcaguguguguguguguguguguggu

SEQ ID NO: 216527 - RNA, 20 nt, Human
caaagccagcuggcuuccuc

SEQ ID NO: 216528 - RNA, 19 nt, Human
caacagcgcuggccaagcc

SEQ ID NO: 216529 - RNA, 18 nt, Human
caacucaaagucuccucu

SEQ ID NO: 216530 - RNA, 24 nt, Human
cacuggucauaccacuuguccugg

SEQ ID NO: 216531 - RNA, 23 nt, Human
cagaauucagaucuguuuugucu

SEQ ID NO: 216532 - RNA, 19 nt, Human
cagagcccggcuaccucuc

SEQ ID NO: 216533 - RNA, 19 nt, Human
cagcucgguggggccacag

SEQ ID NO: 216534 - RNA, 18 nt, Human
cagugcauuccagagggg

SEQ ID NO: 216535 - RNA, 20 nt, Human
caucucaggacagcguccag

SEQ ID NO: 216536 - RNA, 23 nt, Human
cauuaucacuggucauaccacuu

SEQ ID NO: 216537 - RNA, 25 nt, Human
ccacuuguccugggggccggcagau

SEQ ID NO: 216538 - RNA, 18 nt, Human
ccaugagguaccugggaa

SEQ ID NO: 216539 - RNA, 20 nt, Human
ccauucuggagggagcaggc

SEQ ID NO: 216540 - RNA, 23 nt, Human
ccccaucaacucaaagucuccuc

SEQ ID NO: 216541 - RNA, 25 nt, Human
ccccucaacagcgcuggccaagccc

SEQ ID NO: 216542 - RNA, 22 nt, Human
ccccuugcauuucuaccucaaa

SEQ ID NO: 216543 - RNA, 23 nt, Human
ccuagcaccuuaguagcuggggc

SEQ ID NO: 216544 - RNA, 24 nt, Human
ccuaggggucuguguuaaaggugu

SEQ ID NO: 216545 - RNA, 20 nt, Human
cucagagucuuucuucaucc

SEQ ID NO: 216546 - RNA, 19 nt, Human
gaaugcacgugggugcaga

SEQ ID NO: 216547 - RNA, 19 nt, Human
gagcaggcgccauugcucg

SEQ ID NO: 216548 - RNA, 20 nt, Human
gagccaauggagggguggga

SEQ ID NO: 216549 - RNA, 21 nt, Human
gccaggcacgccccuuguccu

SEQ ID NO: 216550 - RNA, 20 nt, Human
gcccgcggcacggcggcugg

SEQ ID NO: 216551 - RNA, 19 nt, Human
gcggcggggggcggcaagc

SEQ ID NO: 216552 - RNA, 19 nt, Human
gcucccuaccccuaccccu

SEQ ID NO: 216553 - RNA, 21 nt, Human
ggaggcucccuaccccuaccc

SEQ ID NO: 216554 - RNA, 19 nt, Human
ggagggggugauacaggga

SEQ ID NO: 216555 - RNA, 20 nt, Human
ggcagugugugugugugugu

SEQ ID NO: 216556 - RNA, 18 nt, Human
gggaaggaugggaggcag

SEQ ID NO: 216557 - RNA, 19 nt, Human
ggggaggcucccuaccccu

SEQ ID NO: 216558 - RNA, 19 nt, Human
ggggugucccuuuaaaucc

SEQ ID NO: 216559 - RNA, 21 nt, Human
gugacccgggaggguuggcag

SEQ ID NO: 216560 - RNA, 20 nt, Human
gugugugugugugugugugu

SEQ ID NO: 216561 - RNA, 26 nt, Human
uagaggccuggagugugcagauuggg

SEQ ID NO: 216562 - RNA, 19 nt, Human
uagggagggggugauacag

SEQ ID NO: 216563 - RNA, 20 nt, Human
uagggcaguuccacuuaaaa

SEQ ID NO: 216564 - RNA, 21 nt, Human
ucacuggucauaccacuuguc

SEQ ID NO: 216565 - RNA, 24 nt, Human
ucauucuucgggagccccaggggc

SEQ ID NO: 216566 - RNA, 23 nt, Human
uccacagagccugaggggcggac

SEQ ID NO: 216567 - RNA, 21 nt, Human
uccacaugcuucccaugaggu

SEQ ID NO: 216568 - RNA, 25 nt, Human
ucccuuuaaaucccuaggggucugu

SEQ ID NO: 216569 - RNA, 21 nt, Human
uccuucuggaacuagaggccu

SEQ ID NO: 216570 - RNA, 20 nt, Human
uccuuggggcauuaucacug

SEQ ID NO: 216571 - RNA, 18 nt, Human
ucucuggaggauggggau

SEQ ID NO: 216572 - RNA, 18 nt, Human
ugacuugggagccaaugg

SEQ ID NO: 216573 - RNA, 19 nt, Human
ugagagcaaggggcugcag

SEQ ID NO: 216574 - RNA, 19 nt, Human
ugcacuggcgggcaugagg

SEQ ID NO: 216575 - RNA, 22 nt, Human
ugcccagcugcagccaggccgg

SEQ ID NO: 216576 - RNA, 19 nt, Human
ugcugcccagcugcagcca

SEQ ID NO: 216577 - RNA, 20 nt, Human
uggaacuagaggccuggagu

SEQ ID NO: 216578 - RNA, 18 nt, Human
uggcuuccucuccgcucc

SEQ ID NO: 216579 - RNA, 20 nt, Human
ugggagccaauggagggguc

SEQ ID NO: 216580 - RNA, 21 nt, Human
ugggagccaauggaggggugg

SEQ ID NO: 216581 - RNA, 18 nt, Human
ugggaugggugagagaaa

SEQ ID NO: 216582 - RNA, 23 nt, Human
ugggaugggugagagaaaagggg

SEQ ID NO: 216583 - RNA, 23 nt, Human
ugggugagagaaaagggcagaau

SEQ ID NO: 216584 - RNA, 23 nt, Human
ugggugagagaaaagggcagaau

SEQ ID NO: 216585 - RNA, 21 nt, Human
ugggugcagagcccggcuacc

SEQ ID NO: 216586 - RNA, 21 nt, Human
uggugggggaaugugugaguu

SEQ ID NO: 216587 - RNA, 18 nt, Human
uguagggagggggugaua

SEQ ID NO: 216588 - RNA, 21 nt, Human
uguagggagggggugauacag

SEQ ID NO: 216589 - RNA, 21 nt, Human
uguagggagggggugauacag

SEQ ID NO: 216590 - RNA, 19 nt, Human
uguccugggggccggcaga

SEQ ID NO: 216591 - RNA, 21 nt, Human
uguccugggggccggcagaug

SEQ ID NO: 216592 - RNA, 24 nt, Human
ugugcagcggcggcggggggcggc

SEQ ID NO: 216593 - RNA, 21 nt, Human
uguguguagggagggggugau

SEQ ID NO: 216594 - RNA, 19 nt, Human
uguguguguguguguguag

SEQ ID NO: 216595 - RNA, 18 nt, Human
ugugugugugugugugug

SEQ ID NO: 216596 - RNA, 18 nt, Human
ugugugugugugugugug

SEQ ID NO: 216597 - RNA, 18 nt, Human
ugugugugugugugugug

SEQ ID NO: 216598 - RNA, 18 nt, Human
ugugugugugugugugug

SEQ ID NO: 216599 - RNA, 18 nt, Human
ugugugugugugugugug

SEQ ID NO: 216600 - RNA, 18 nt, Human
ugugugugugugugugug

SEQ ID NO: 216601 - RNA, 21 nt, Human
ugugugugugugugugugugu

SEQ ID NO: 216602 - RNA, 21 nt, Human
ugugugugugugugugugugu

SEQ ID NO: 216603 - RNA, 21 nt, Human
ugugugugugugugugugugu

SEQ ID NO: 216604 - RNA, 21 nt, Human
ugugugugugugugugugugu

SEQ ID NO: 216605 - RNA, 21 nt, Human
ugugugugugugugugugugu

SEQ ID NO: 216606 - RNA, 21 nt, Human
ugugugugugugugugugugu

SEQ ID NO: 216607 - RNA, 21 nt, Human
ugugugugugugugugugugu

SEQ ID NO: 216608 - RNA, 21 nt, Human
ugugugugugugugugugugu

SEQ ID NO: 216609 - RNA, 21 nt, Human
ugugugugugugugugugugu

SEQ ID NO: 216610 - RNA, 22 nt, Human
ugugugugugugugugugugua

SEQ ID NO: 216611 - RNA, 22 nt, Human
ugugugugugugugugugugug

SEQ ID NO: 216612 - RNA, 22 nt, Human
ugugugugugugugugugugug

SEQ ID NO: 216613 - RNA, 22 nt, Human
ugugugugugugugugugugug

SEQ ID NO: 216614 - RNA, 22 nt, Human
ugugugugugugugugugugug

SEQ ID NO: 216615 - RNA, 19 nt, Human
uguguuaaaggugucccag

SEQ ID NO: 216616 - RNA, 22 nt, Human
uuaaaaccagcuugaguuccau

SEQ ID NO: 216617 - RNA, 23 nt, Human
uuggcagcugagagcaaggggcu

SEQ ID NO: 216618 - RNA, 23 nt, Human
uuggcgugggccugggugugugu

SEQ ID NO: 216619 - RNA, 23 nt, Human
uuuuuuuguuuuuaaacacugua

SEQ ID NO: 216620 - RNA, 18 nt, Human
uuuuuuuuuuuuuuuuug

SEQ ID NO: 216621 - RNA, 24 nt, Human
uuuuuuuuuuuuuuuuuuguuuuu

SEQ ID NO: 216622 - RNA, 30 nt, Human
uuuuuuuuuuuuuuuuuuuuuguuuuuaaa

SEQ ID NO: 216623 - RNA, 22 nt, Human
aaacagcaaacccuggcuggga

SEQ ID NO: 216624 - RNA, 21 nt, Human
aaccuguguuuuguuuucccc

SEQ ID NO: 216625 - RNA, 19 nt, Human
aagcaucacugcugaacuc

SEQ ID NO: 216626 - RNA, 20 nt, Human
aaguagaaaugggugguguu

SEQ ID NO: 216627 - RNA, 19 nt, Human
acagccacagaaggugcac

SEQ ID NO: 216628 - RNA, 23 nt, Human
accugccccccgcaccuccccca

SEQ ID NO: 216629 - RNA, 25 nt, Human
accugccccccgcaccucccccacc

SEQ ID NO: 216630 - RNA, 21 nt, Human
agaaacaagacagccacagaa

SEQ ID NO: 216631 - RNA, 23 nt, Human
agacaaauauuuuaaagagaaca

SEQ ID NO: 216632 - RNA, 22 nt, Human
agagaaaauaaggugcaaaaag

SEQ ID NO: 216633 - RNA, 19 nt, Human
agagcaagauggggugugg

SEQ ID NO: 216634 - RNA, 21 nt, Human
agccgugguauaaaaggaacc

SEQ ID NO: 216635 - RNA, 22 nt, Human
auagacuuuuaaaacuaaaaag

SEQ ID NO: 216636 - RNA, 19 nt, Human
auccaugcacgcaaacagc

SEQ ID NO: 216637 - RNA, 18 nt, Human
cacaaugcaaauuagaau

SEQ ID NO: 216638 - RNA, 18 nt, Human
cagccaaacaaauccuag

SEQ ID NO: 216639 - RNA, 19 nt, Human
ccacaauuucuucauccaa

SEQ ID NO: 216640 - RNA, 22 nt, Human
ccaugcacgcaaacagcaaacc

SEQ ID NO: 216641 - RNA, 20 nt, Human
cccacaauuucuucauccaa

SEQ ID NO: 216642 - RNA, 19 nt, Human
cccaucauauaaaauaggu

SEQ ID NO: 216643 - RNA, 23 nt, Human
cccccgcaccucccccacccccc

SEQ ID NO: 216644 - RNA, 18 nt, Human
ccccgcaccucccccacc

SEQ ID NO: 216645 - RNA, 20 nt, Human
ccccgcaccucccccacccc

SEQ ID NO: 216646 - RNA, 22 nt, Human
ccccgcaccucccccacccccc

SEQ ID NO: 216647 - RNA, 26 nt, Human
cccuaccugccccccgcaccuccccc

SEQ ID NO: 216648 - RNA, 21 nt, Human
cgcaccucccccaccccccac

SEQ ID NO: 216649 - RNA, 23 nt, Human
cucccccaccccccacaauuucu

SEQ ID NO: 216650 - RNA, 25 nt, Human
cucuauaucgcccccucuccuaacu

SEQ ID NO: 216651 - RNA, 18 nt, Human
cugccgguucccacugca

SEQ ID NO: 216652 - RNA, 18 nt, Human
cuucuggugaaauccuga

SEQ ID NO: 216653 - RNA, 18 nt, Human
cuuuaaaaguugucaugc

SEQ ID NO: 216654 - RNA, 25 nt, Human
cuuuggaugagggguaaaggagggg

SEQ ID NO: 216655 - RNA, 22 nt, Human
gagcagcauaaauugaaaaaac

SEQ ID NO: 216656 - RNA, 22 nt, Human
gcaaauuagaauguaaacucug

SEQ ID NO: 216657 - RNA, 19 nt, Human
gccccccgcaccuccccca

SEQ ID NO: 216658 - RNA, 22 nt, Human
gcucaggaacagagaaaauaag

SEQ ID NO: 216659 - RNA, 23 nt, Human
gcucccugaaguuaaggaguuua

SEQ ID NO: 216660 - RNA, 19 nt, Human
ggcagccgugguauaaaag

SEQ ID NO: 216661 - RNA, 23 nt, Human
ggucaaggacuugucaaagcuuu

SEQ ID NO: 216662 - RNA, 18 nt, Human
guuuuguuuuccccucuu

SEQ ID NO: 216663 - RNA, 23 nt, Human
uaaaaagaaauccaugcacgcaa

SEQ ID NO: 216664 - RNA, 18 nt, Human
uaaaaagcaucacugcug

SEQ ID NO: 216665 - RNA, 24 nt, Human
uaaaauuaucacuuggaaguauca

SEQ ID NO: 216666 - RNA, 28 nt, Human
uaaagagaacaguuuucccccuuaauuc

SEQ ID NO: 216667 - RNA, 19 nt, Human
uaaauugaaaaaaccugug

SEQ ID NO: 216668 - RNA, 21 nt, Human
uacugccagucagccaaacaa

SEQ ID NO: 216669 - RNA, 18 nt, Human
uagaagagaacuguugug

SEQ ID NO: 216670 - RNA, 22 nt, Human
uagguuacugccagucagccaa

SEQ ID NO: 216671 - RNA, 20 nt, Human
uauaaaaggaaccaacaaca

SEQ ID NO: 216672 - RNA, 19 nt, Human
uauagaggucaaggacuug

SEQ ID NO: 216673 - RNA, 24 nt, Human
ucccuaccugccccccgcaccucc

SEQ ID NO: 216674 - RNA, 18 nt, Human
ucgcccccucuccuaacu

SEQ ID NO: 216675 - RNA, 20 nt, Human
ucuggcacaggaugggcuuc

SEQ ID NO: 216676 - RNA, 23 nt, Human
ucuggcacaggaugggcuucuag

SEQ ID NO: 216677 - RNA, 20 nt, Human
uggaaggggcagccguggua

SEQ ID NO: 216678 - RNA, 19 nt, Human
uggagagaaagucaggcug

SEQ ID NO: 216679 - RNA, 22 nt, Human
ugggaugcugccgguucccacu

SEQ ID NO: 216680 - RNA, 24 nt, Human
ugggugguguuucucaaagugugg

SEQ ID NO: 216681 - RNA, 20 nt, Human
uguagagggcuucuauaaua

SEQ ID NO: 216682 - RNA, 21 nt, Human
uguuuuguuuuccccucuugu

SEQ ID NO: 216683 - RNA, 24 nt, Human
uguuuuguuuuccccucuuguuaa

SEQ ID NO: 216684 - RNA, 23 nt, Human
uuacauaucaagcacuuccacuu

SEQ ID NO: 216685 - RNA, 22 nt, Human
uucauuaaaauauacacaagug

SEQ ID NO: 216686 - RNA, 21 nt, Human
uucccacugcagguaggucug

SEQ ID NO: 216687 - RNA, 18 nt, Human
uugcugggccuuauccca

SEQ ID NO: 216688 - RNA, 22 nt, Human
uuggaugagggguaaaggaggg

SEQ ID NO: 216689 - RNA, 18 nt, Human
uuugguggugguuuccag

SEQ ID NO: 216690 - RNA, 25 nt, Human
acccaauggaacagcuccaacccuu

SEQ ID NO: 216691 - RNA, 20 nt, Human
agaggacccaauggaacagc

SEQ ID NO: 216692 - RNA, 19 nt, Human
aggcagcaggagggggggu

SEQ ID NO: 216693 - RNA, 20 nt, Human
aggcagcaggagggggggua

SEQ ID NO: 216694 - RNA, 26 nt, Human
caaagcuuggaggcaacuuguuggag

SEQ ID NO: 216695 - RNA, 21 nt, Human
caacccaaagcuuggaggcaa

SEQ ID NO: 216696 - RNA, 19 nt, Human
caagaggacccaauggaac

SEQ ID NO: 216697 - RNA, 24 nt, Human
cagcucuguugggagggaaacgac

SEQ ID NO: 216698 - RNA, 18 nt, Human
caggaggggggguagccc

SEQ ID NO: 216699 - RNA, 22 nt, Human
cccaauggaacagcuccaaccc

SEQ ID NO: 216700 - RNA, 26 nt, Human
ggaacagcuccaacccaaagcuugga

SEQ ID NO: 216701 - RNA, 20 nt, Human
ggaggggggguagcccagcu

SEQ ID NO: 216702 - RNA, 18 nt, Human
uagcccagcucuguuggg

SEQ ID NO: 216703 - RNA, 22 nt, Human
uggaacagcuccaacccaaagc

SEQ ID NO: 216704 - RNA, 23 nt, Human
uggagaaggggcggugcagguag

SEQ ID NO: 216705 - RNA, 21 nt, Human
uuggagaaggggcggugcagg

SEQ ID NO: 216706 - RNA, 27 nt, Human
aaaggggacacugggggaggagggggu

SEQ ID NO: 216707 - RNA, 27 nt, Human
aaaggggacacugggggaggagggggu

SEQ ID NO: 216708 - RNA, 19 nt, Human
aagcaagccuucugggucc

SEQ ID NO: 216709 - RNA, 19 nt, Human
aagcaagccuucugggucc

SEQ ID NO: 216710 - RNA, 19 nt, Human
aagugcccccguagacaac

SEQ ID NO: 216711 - RNA, 20 nt, Human
aagugcccccguagacaacc

SEQ ID NO: 216712 - RNA, 24 nt, Human
aagugucggcucccuccguggucu

SEQ ID NO: 216713 - RNA, 24 nt, Human
aagugucggcucccuccguggucu

SEQ ID NO: 216714 - RNA, 21 nt, Human
acagaaagccaaggauagcua

SEQ ID NO: 216715 - RNA, 21 nt, Human
acagaaagccaaggauagcua

SEQ ID NO: 216716 - RNA, 18 nt, Human
acaguaccauggaagggg

SEQ ID NO: 216717 - RNA, 18 nt, Human
acaguaccauggaagggg

SEQ ID NO: 216718 - RNA, 23 nt, Human
agaaaggggacacugggggagga

SEQ ID NO: 216719 - RNA, 23 nt, Human
agaaaggggacacugggggagga

SEQ ID NO: 216720 - RNA, 21 nt, Human
agacagcaugugcaugcucuu

SEQ ID NO: 216721 - RNA, 21 nt, Human
agacagcaugugcaugcucuu

SEQ ID NO: 216722 - RNA, 21 nt, Human
agccaggcuggcacagaaagc

SEQ ID NO: 216723 - RNA, 21 nt, Human
agccaggcuggcacagaaagc

SEQ ID NO: 216724 - RNA, 19 nt, Human
aggaagaaaggggacacug

SEQ ID NO: 216725 - RNA, 19 nt, Human
aggaagaaaggggacacug

SEQ ID NO: 216726 - RNA, 20 nt, Human
aggacacagcccauggggga

SEQ ID NO: 216727 - RNA, 20 nt, Human
aggacacagcccauggggga

SEQ ID NO: 216728 - RNA, 20 nt, Human
aggcacaaggagggggaggg

SEQ ID NO: 216729 - RNA, 21 nt, Human
aggcuggcacagaaagccaag

SEQ ID NO: 216730 - RNA, 21 nt, Human
aggcuggcacagaaagccaag

SEQ ID NO: 216731 - RNA, 21 nt, Human
agggucucucuggggccuucu

SEQ ID NO: 216732 - RNA, 21 nt, Human
agggucucucuggggccuucu

SEQ ID NO: 216733 - RNA, 22 nt, Human
auggauccaggugugaaagggg

SEQ ID NO: 216734 - RNA, 20 nt, Human
caauugggggcccaccagcc

SEQ ID NO: 216735 - RNA, 20 nt, Human
caauugggggcccaccagcc

SEQ ID NO: 216736 - RNA, 24 nt, Human
cacagcccaugggggaggggcaga

SEQ ID NO: 216737 - RNA, 24 nt, Human
cacagcccaugggggaggggcaga

SEQ ID NO: 216738 - RNA, 24 nt, Human
cacaguccacgagcagugggcccc

SEQ ID NO: 216739 - RNA, 24 nt, Human
cacaguccacgagcagugggcccc

SEQ ID NO: 216740 - RNA, 27 nt, Human
caccucuaggccccugacgcaugguuc

SEQ ID NO: 216741 - RNA, 27 nt, Human
caccucuaggccccugacgcaugguuc

SEQ ID NO: 216742 - RNA, 18 nt, Human
cagcccaugggggagggg

SEQ ID NO: 216743 - RNA, 18 nt, Human
cagcccaugggggagggg

SEQ ID NO: 216744 - RNA, 23 nt, Human
cagcggcccgggggcugcucccu

SEQ ID NO: 216745 - RNA, 23 nt, Human
cagcggcccgggggcugcucccu

SEQ ID NO: 216746 - RNA, 18 nt, Human
cagcuggggucuggcugg

SEQ ID NO: 216747 - RNA, 18 nt, Human
caggcuggcacagaaagc

SEQ ID NO: 216748 - RNA, 18 nt, Human
caggcuggcacagaaagc

SEQ ID NO: 216749 - RNA, 22 nt, Human
cagguccuccaagugcccccgu

SEQ ID NO: 216750 - RNA, 23 nt, Human
cagguccuccaagugcccccgua

SEQ ID NO: 216751 - RNA, 23 nt, Human
caggugggccgggggcggggggc

SEQ ID NO: 216752 - RNA, 21 nt, Human
ccacgugcaucuagggcacag

SEQ ID NO: 216753 - RNA, 21 nt, Human
ccacgugcaucuagggcacag

SEQ ID NO: 216754 - RNA, 22 nt, Human
ccagaauugguccccuccucuc

SEQ ID NO: 216755 - RNA, 22 nt, Human
ccagaauugguccccuccucuc

SEQ ID NO: 216756 - RNA, 20 nt, Human
cccccguagacaaccuuagg

SEQ ID NO: 216757 - RNA, 20 nt, Human
cccccguagacaaccuuagg

SEQ ID NO: 216758 - RNA, 23 nt, Human
ccccugcuacaguaccauggaag

SEQ ID NO: 216759 - RNA, 23 nt, Human
ccccugcuacaguaccauggaag

SEQ ID NO: 216760 - RNA, 25 nt, Human
ccccugcuacaguaccauggaaggg

SEQ ID NO: 216761 - RNA, 25 nt, Human
ccccugcuacaguaccauggaaggg

SEQ ID NO: 216762 - RNA, 21 nt, Human
ccccuguggacugucagaggc

SEQ ID NO: 216763 - RNA, 22 nt, Human
cccgccaugccccagcacagug

SEQ ID NO: 216764 - RNA, 23 nt, Human
cccgccaugccccagcacaguga

SEQ ID NO: 216765 - RNA, 23 nt, Human
ccucagcuucucaaaugggccuu

SEQ ID NO: 216766 - RNA, 23 nt, Human
ccucagcuucucaaaugggccuu

SEQ ID NO: 216767 - RNA, 25 nt, Human
ccuccugugggaagauccccagggc

SEQ ID NO: 216768 - RNA, 25 nt, Human
ccuccugugggaagauccccagggc

SEQ ID NO: 216769 - RNA, 22 nt, Human
cgccagguccuccaagugcccc

SEQ ID NO: 216770 - RNA, 22 nt, Human
cgcgugagggggcggagcuggg

SEQ ID NO: 216771 - RNA, 18 nt, Human
cggcccgggggcugcucc

SEQ ID NO: 216772 - RNA, 18 nt, Human
cggcccgggggcugcucc

SEQ ID NO: 216773 - RNA, 20 nt, Human
cucccuggagguggguagcg

SEQ ID NO: 216774 - RNA, 21 nt, Human
cuggggccuucuggaggcugg

SEQ ID NO: 216775 - RNA, 21 nt, Human
cuggggccuucuggaggcugg

SEQ ID NO: 216776 - RNA, 20 nt, Human
cuggggcuggggagugggcu

SEQ ID NO: 216777 - RNA, 21 nt, Human
gaaaggggacacugggggagg

SEQ ID NO: 216778 - RNA, 21 nt, Human
gaaaggggacacugggggagg

SEQ ID NO: 216779 - RNA, 25 nt, Human
gaaaggggacacugggggaggaggg

SEQ ID NO: 216780 - RNA, 21 nt, Human
gaaggggcuggggcuggggag

SEQ ID NO: 216781 - RNA, 21 nt, Human
gaaggggcuggggcuggggag

SEQ ID NO: 216782 - RNA, 24 nt, Human
gacaaccuuaggcaggauccccac

SEQ ID NO: 216783 - RNA, 24 nt, Human
gacaaccuuaggcaggauccccac

SEQ ID NO: 216784 - RNA, 18 nt, Human
gagagcgcgugagggggc

SEQ ID NO: 216785 - RNA, 23 nt, Human
gauggauccaggugugaaagggg

SEQ ID NO: 216786 - RNA, 18 nt, Human
gcacaaggagggggaggg

SEQ ID NO: 216787 - RNA, 18 nt, Human
gcacaaggagggggaggg

SEQ ID NO: 216788 - RNA, 21 nt, Human
gccagguccuccaagugcccc

SEQ ID NO: 216789 - RNA, 21 nt, Human
gcccaugggggaggggcagag

SEQ ID NO: 216790 - RNA, 21 nt, Human
gcccaugggggaggggcagag

SEQ ID NO: 216791 - RNA, 22 nt, Human
gccccuguggacugucagaggc

SEQ ID NO: 216792 - RNA, 18 nt, Human
gccucagcuucucaaaug

SEQ ID NO: 216793 - RNA, 18 nt, Human
gccucagcuucucaaaug

SEQ ID NO: 216794 - RNA, 23 nt, Human
ggaggcucuuuggcuuguuuugg

SEQ ID NO: 216795 - RNA, 23 nt, Human
ggaggcucuuuggcuuguuuugg

SEQ ID NO: 216796 - RNA, 22 nt, Human
ggcaucuccucuguauccuccc

SEQ ID NO: 216797 - RNA, 22 nt, Human
ggcaucuccucuguauccuccc

SEQ ID NO: 216798 - RNA, 24 nt, Human
gggaggcucuuuggcuuguuuugg

SEQ ID NO: 216799 - RNA, 24 nt, Human
gggaggcucuuuggcuuguuuugg

SEQ ID NO: 216800 - RNA, 19 nt, Human
gggagugggcugccaacag

SEQ ID NO: 216801 - RNA, 19 nt, Human
gggagugggcugccaacag

SEQ ID NO: 216802 - RNA, 22 nt, Human
gggcaugaucugauaauagcgg

SEQ ID NO: 216803 - RNA, 18 nt, Human
gggccuuuuccucccggc

SEQ ID NO: 216804 - RNA, 18 nt, Human
gggccuuuuccucccggc

SEQ ID NO: 216805 - RNA, 21 nt, Human
gggcuggggcuggggaguggg

SEQ ID NO: 216806 - RNA, 21 nt, Human
gggcuggggcuggggaguggg

SEQ ID NO: 216807 - RNA, 23 nt, Human
gggcuggggcuggggagugggcu

SEQ ID NO: 216808 - RNA, 19 nt, Human
ggggacacugggggaggag

SEQ ID NO: 216809 - RNA, 22 nt, Human
ggggacacugggggaggagggg

SEQ ID NO: 216810 - RNA, 22 nt, Human
ggggacacugggggaggagggg

SEQ ID NO: 216811 - RNA, 26 nt, Human
ggggcagagccaggcuggcacagaaa

SEQ ID NO: 216812 - RNA, 26 nt, Human
ggggcagagccaggcuggcacagaaa

SEQ ID NO: 216813 - RNA, 24 nt, Human
ggggcccaccagccagcggcccgg

SEQ ID NO: 216814 - RNA, 24 nt, Human
ggggcccaccagccagcggcccgg

SEQ ID NO: 216815 - RNA, 18 nt, Human
ggggcuggggcuggggag

SEQ ID NO: 216816 - RNA, 18 nt, Human
ggggcuggggcuggggag

SEQ ID NO: 216817 - RNA, 22 nt, Human
gguucagcuggggucuggcugg

SEQ ID NO: 216818 - RNA, 22 nt, Human
gguucagcuggggucuggcugg

SEQ ID NO: 216819 - RNA, 23 nt, Human
guggaggaucccgccaugcccca

SEQ ID NO: 216820 - RNA, 23 nt, Human
guggaggaucccgccaugcccca

SEQ ID NO: 216821 - RNA, 21 nt, Human
gugggccgggggcggggggcu

SEQ ID NO: 216822 - RNA, 23 nt, Human
uacaguaccauggaaggggcugg

SEQ ID NO: 216823 - RNA, 23 nt, Human
uacaguaccauggaaggggcugg

SEQ ID NO: 216824 - RNA, 22 nt, Human
uaccauggaaggggcuggggcu

SEQ ID NO: 216825 - RNA, 22 nt, Human
uaccauggaaggggcuggggcu

SEQ ID NO: 216826 - RNA, 21 nt, Human
uaggcaggauccccaccucuc

SEQ ID NO: 216827 - RNA, 21 nt, Human
uaggcaggauccccaccucuc

SEQ ID NO: 216828 - RNA, 18 nt, Human
uaggccccugacgcaugg

SEQ ID NO: 216829 - RNA, 21 nt, Human
uaggccccugacgcaugguuc

SEQ ID NO: 216830 - RNA, 21 nt, Human
uaggccccugacgcaugguuc

SEQ ID NO: 216831 - RNA, 22 nt, Human
ucaaaugggccuuaggacacag

SEQ ID NO: 216832 - RNA, 22 nt, Human
ucaaaugggccuuaggacacag

SEQ ID NO: 216833 - RNA, 20 nt, Human
ucacaccaggugggccgggg

SEQ ID NO: 216834 - RNA, 19 nt, Human
ucaguaguauuggucccga

SEQ ID NO: 216835 - RNA, 18 nt, Human
ucccgagucugccagcug

SEQ ID NO: 216836 - RNA, 20 nt, Human
ucccggauccgcacugcgug

SEQ ID NO: 216837 - RNA, 23 nt, Human
ucucucuggggccuucuggaggc

SEQ ID NO: 216838 - RNA, 23 nt, Human
ucucucuggggccuucuggaggc

SEQ ID NO: 216839 - RNA, 21 nt, Human
ucuguggccaaggagagaggc

SEQ ID NO: 216840 - RNA, 21 nt, Human
ucuguggccaaggagagaggc

SEQ ID NO: 216841 - RNA, 18 nt, Human
ugacuguggcucucaaga

SEQ ID NO: 216842 - RNA, 18 nt, Human
ugacuguggcucucaaga

SEQ ID NO: 216843 - RNA, 20 nt, Human
ugagcccaggcuacguugcc

SEQ ID NO: 216844 - RNA, 20 nt, Human
ugagcccaggcuacguugcc

SEQ ID NO: 216845 - RNA, 20 nt, Human
ugccugagccugcugcuacc

SEQ ID NO: 216846 - RNA, 20 nt, Human
ugccugagccugcugcuacc

SEQ ID NO: 216847 - RNA, 18 nt, Human
uggaaggggcuggggcug

SEQ ID NO: 216848 - RNA, 18 nt, Human
uggaaggggcuggggcug

SEQ ID NO: 216849 - RNA, 22 nt, Human
uggaggcuggcugguaguggug

SEQ ID NO: 216850 - RNA, 22 nt, Human
uggaggcuggcugguaguggug

SEQ ID NO: 216851 - RNA, 21 nt, Human
uggagguggguagcgcuccuc

SEQ ID NO: 216852 - RNA, 23 nt, Human
uggaugggguggcagggcccccu

SEQ ID NO: 216853 - RNA, 23 nt, Human
uggaugggguggcagggcccccu

SEQ ID NO: 216854 - RNA, 18 nt, Human
uggcacagaaagccaagg

SEQ ID NO: 216855 - RNA, 18 nt, Human
uggcacagaaagccaagg

SEQ ID NO: 216856 - RNA, 22 nt, Human
uggcagaggcugagacacggcg

SEQ ID NO: 216857 - RNA, 22 nt, Human
uggcagaggcugagacacggcg

SEQ ID NO: 216858 - RNA, 18 nt, Human
uggcaugggugucaauug

SEQ ID NO: 216859 - RNA, 18 nt, Human
uggcaugggugucaauug

SEQ ID NO: 216860 - RNA, 22 nt, Human
uggcuggaugggguggcagggc

SEQ ID NO: 216861 - RNA, 22 nt, Human
uggcuggaugggguggcagggc

SEQ ID NO: 216862 - RNA, 18 nt, Human
uggcugguaguggugagu

SEQ ID NO: 216863 - RNA, 18 nt, Human
uggcugguaguggugagu

SEQ ID NO: 216864 - RNA, 19 nt, Human
ugggccgggggcggggggc

SEQ ID NO: 216865 - RNA, 18 nt, Human
ugggccuuaggacacagc

SEQ ID NO: 216866 - RNA, 18 nt, Human
ugggccuuaggacacagc

SEQ ID NO: 216867 - RNA, 21 nt, Human
uggggagugggcugccaacag

SEQ ID NO: 216868 - RNA, 21 nt, Human
uggggagugggcugccaacag

SEQ ID NO: 216869 - RNA, 23 nt, Human
ugggggaggagggggugggauca

SEQ ID NO: 216870 - RNA, 23 nt, Human
ugggggaggagggggugggauca

SEQ ID NO: 216871 - RNA, 22 nt, Human
ugggucugagcacgccaggucc

SEQ ID NO: 216872 - RNA, 22 nt, Human
ugggucugagcacgccaggucc

SEQ ID NO: 216873 - RNA, 19 nt, Human
ugguucagcuggggucugg

SEQ ID NO: 216874 - RNA, 19 nt, Human
ugguucagcuggggucugg

SEQ ID NO: 216875 - RNA, 20 nt, Human
uuaaagaagucacaccaggu

SEQ ID NO: 216876 - RNA, 22 nt, Human
uucuuggugggcagggugcucc

SEQ ID NO: 216877 - RNA, 22 nt, Human
uuggucccgagucugccagcug

SEQ ID NO: 216878 - RNA, 18 nt, Human
uuucuaguuccuuugcug

SEQ ID NO: 216879 - RNA, 18 nt, Human
uuucuaguuccuuugcug

SEQ ID NO: 216880 - RNA, 23 nt, Human
aaaaacaaaaaaccaaacaaaaa

SEQ ID NO: 216881 - RNA, 22 nt, Human
aaaaaccaaacaaaaagacucg

SEQ ID NO: 216882 - RNA, 22 nt, Human
aaaacaaaaaaccaaacaaaaa

SEQ ID NO: 216883 - RNA, 22 nt, Human
aaaggaaggagagagggaagag

SEQ ID NO: 216884 - RNA, 21 nt, Human
aaaugaaccucugcccaccca

SEQ ID NO: 216885 - RNA, 22 nt, Human
aacacuaagcggccacuacccc

SEQ ID NO: 216886 - RNA, 20 nt, Human
aagauaucuucaagggcuua

SEQ ID NO: 216887 - RNA, 23 nt, Human
aaggaaggagagagggaagagga

SEQ ID NO: 216888 - RNA, 20 nt, Human
aaggagagagggaagaggag

SEQ ID NO: 216889 - RNA, 21 nt, Human
aaggagagagggaagaggagg

SEQ ID NO: 216890 - RNA, 18 nt, Human
acaacgcaacacaccuga

SEQ ID NO: 216891 - RNA, 20 nt, Human
acccacuuccuuccucccca

SEQ ID NO: 216892 - RNA, 20 nt, Human
acgguuggccaacggggaag

SEQ ID NO: 216893 - RNA, 21 nt, Human
acucggggagugggacugcgg

SEQ ID NO: 216894 - RNA, 20 nt, Human
acugugucuuguuuuucagg

SEQ ID NO: 216895 - RNA, 27 nt, Human
agauuccggaagucauuucacuaagcu

SEQ ID NO: 216896 - RNA, 28 nt, Human
agcugugugaccccaaacugcgcgcccc

SEQ ID NO: 216897 - RNA, 22 nt, Human
aggaaggagagagggaagagga

SEQ ID NO: 216898 - RNA, 22 nt, Human
aggaaggagagagggaagagga

SEQ ID NO: 216899 - RNA, 22 nt, Human
aguaaaagaaguccaaacaaaa

SEQ ID NO: 216900 - RNA, 20 nt, Human
augaguaaaagaaguccaaa

SEQ ID NO: 216901 - RNA, 25 nt, Human
auuaaaaacaaaaaaccaaacaaaa

SEQ ID NO: 216902 - RNA, 25 nt, Human
caacacuaagcggccacuaccccaa

SEQ ID NO: 216903 - RNA, 20 nt, Human
caagagaugaggcgcagcgu

SEQ ID NO: 216904 - RNA, 20 nt, Human
caccugaacuggguagugag

SEQ ID NO: 216905 - RNA, 23 nt, Human
cacuaagcggccacuaccccaaa

SEQ ID NO: 216906 - RNA, 21 nt, Human
cacucgcccggccccacuccc

SEQ ID NO: 216907 - RNA, 23 nt, Human
cagauuaaaaacaaaaaaccaaa

SEQ ID NO: 216908 - RNA, 19 nt, Human
cagcagccucucaggcuga

SEQ ID NO: 216909 - RNA, 25 nt, Human
ccaaacaaaaagacucgccgaaggc

SEQ ID NO: 216910 - RNA, 23 nt, Human
cccacaacgcaacacaccugaac

SEQ ID NO: 216911 - RNA, 21 nt, Human
cccacacuuccucugcagccc

SEQ ID NO: 216912 - RNA, 20 nt, Human
ccccaaacugcgcgccccuc

SEQ ID NO: 216913 - RNA, 18 nt, Human
cccgggcguggugcggag

SEQ ID NO: 216914 - RNA, 22 nt, Human
ccgagccgggagcuucgggugc

SEQ ID NO: 216915 - RNA, 22 nt, Human
ccgcccagcccggcguggccca

SEQ ID NO: 216916 - RNA, 19 nt, Human
ccucccagcccgcagagcg

SEQ ID NO: 216917 - RNA, 19 nt, Human
cggagacccacaacgcaac

SEQ ID NO: 216918 - RNA, 22 nt, Human
cggcugcgcaggacucgcgucu

SEQ ID NO: 216919 - RNA, 18 nt, Human
cucgcccggccccacucc

SEQ ID NO: 216920 - RNA, 21 nt, Human
cucgcccggccccacucccgg

SEQ ID NO: 216921 - RNA, 24 nt, Human
cucuacccauuuaaaagcugagag

SEQ ID NO: 216922 - RNA, 22 nt, Human
cugaaaugugccggagacccac

SEQ ID NO: 216923 - RNA, 19 nt, Human
cuguauuauuaccuuugca

SEQ ID NO: 216924 - RNA, 19 nt, Human
gaagaggaggggaagucgg

SEQ ID NO: 216925 - RNA, 19 nt, Human
gauaucuucaagggcuuaa

SEQ ID NO: 216926 - RNA, 24 nt, Human
gauccccccuuuucacgcacccac

SEQ ID NO: 216927 - RNA, 19 nt, Human
gcccggcguggcccaaaug

SEQ ID NO: 216928 - RNA, 22 nt, Human
gcgcagcguguccggcgccagc

SEQ ID NO: 216929 - RNA, 21 nt, Human
gcgcaggacucgcgucuggcc

SEQ ID NO: 216930 - RNA, 21 nt, Human
gcguggugcggaggcgcaggg

SEQ ID NO: 216931 - RNA, 18 nt, Human
gcucagcaagagcggacc

SEQ ID NO: 216932 - RNA, 23 nt, Human
ggacucgcgucuggcccgggccu

SEQ ID NO: 216933 - RNA, 20 nt, Human
ggagagagggaagaggaggg

SEQ ID NO: 216934 - RNA, 19 nt, Human
ggcugcagggggcgcuggg

SEQ ID NO: 216935 - RNA, 24 nt, Human
gggagugggacugcggcggggagc

SEQ ID NO: 216936 - RNA, 19 nt, Human
gggcacgggcuuccccuuu

SEQ ID NO: 216937 - RNA, 18 nt, Human
guuagaaaauuugggaac

SEQ ID NO: 216938 - RNA, 18 nt, Human
guugccacgggacacacc

SEQ ID NO: 216939 - RNA, 19 nt, Human
uaaaaacaaaaaaccaaac

SEQ ID NO: 216940 - RNA, 21 nt, Human
uaaagaacauauuuugaacaa

SEQ ID NO: 216941 - RNA, 19 nt, Human
uaaaggaaggagagaggga

SEQ ID NO: 216942 - RNA, 28 nt, Human
uacuuucauuucaagauaucuucaaggg

SEQ ID NO: 216943 - RNA, 18 nt, Human
ucaaagauguauuugaaa

SEQ ID NO: 216944 - RNA, 23 nt, Human
ucaagauaucuucaagggcuuac

SEQ ID NO: 216945 - RNA, 18 nt, Human
ucagcaagagcggaccug

SEQ ID NO: 216946 - RNA, 21 nt, Human
ucagcacccuucuauacccac

SEQ ID NO: 216947 - RNA, 18 nt, Human
ucccgguuucugccgccg

SEQ ID NO: 216948 - RNA, 20 nt, Human
uccucugcagcccgggcugg

SEQ ID NO: 216949 - RNA, 18 nt, Human
ucgcccggccccacuccc

SEQ ID NO: 216950 - RNA, 19 nt, Human
ucgccgaaggccccugggg

SEQ ID NO: 216951 - RNA, 22 nt, Human
ucucuucaagacccacaucuca

SEQ ID NO: 216952 - RNA, 21 nt, Human
ucugccgccgagccgggagcu

SEQ ID NO: 216953 - RNA, 24 nt, Human
ugaaaugugccggagacccacaac

SEQ ID NO: 216954 - RNA, 19 nt, Human
ugaaccucugcccacccag

SEQ ID NO: 216955 - RNA, 22 nt, Human
ugaccccaaacugcgcgccccu

SEQ ID NO: 216956 - RNA, 28 nt, Human
ugagccgcccagcccggcguggcccaag

SEQ ID NO: 216957 - RNA, 21 nt, Human
uggcccaaaugccagccacaa

SEQ ID NO: 216958 - RNA, 22 nt, Human
uggcugaccccaacagagaggu

SEQ ID NO: 216959 - RNA, 22 nt, Human
ugggcucagcaagagcggaccu

SEQ ID NO: 216960 - RNA, 20 nt, Human
ugucuuguuuuucaggugua

SEQ ID NO: 216961 - RNA, 24 nt, Human
uguggcugaccccaacagagaggu

SEQ ID NO: 216962 - RNA, 18 nt, Human
ugugugaccccaaacugc

SEQ ID NO: 216963 - RNA, 20 nt, Human
uuccucugcagcccgggcuc

SEQ ID NO: 216964 - RNA, 18 nt, Human
aaacaaggguccuucaca

SEQ ID NO: 216965 - RNA, 21 nt, Human
aaagaacugugaauggauuuc

SEQ ID NO: 216966 - RNA, 21 nt, Human
aaggcuucagggaggcugggg

SEQ ID NO: 216967 - RNA, 18 nt, Human
aaguuccagguucuuagc

SEQ ID NO: 216968 - RNA, 19 nt, Human
agacaugguggacagcagg

SEQ ID NO: 216969 - RNA, 21 nt, Human
agacucggaaaugcaacugca

SEQ ID NO: 216970 - RNA, 24 nt, Human
agaucuguugccaucauggccccu

SEQ ID NO: 216971 - RNA, 19 nt, Human
agcaucuauccuugugugg

SEQ ID NO: 216972 - RNA, 21 nt, Human
agccuggggacagcugaguuc

SEQ ID NO: 216973 - RNA, 21 nt, Human
agcugccuucugccuuggucc

SEQ ID NO: 216974 - RNA, 20 nt, Human
aggcaggauucgguagggca

SEQ ID NO: 216975 - RNA, 24 nt, Human
aggcaucagagguggcuggaggcu

SEQ ID NO: 216976 - RNA, 19 nt, Human
aggcuggaucuggccccau

SEQ ID NO: 216977 - RNA, 24 nt, Human
aggcuggaucuggccccauuugag

SEQ ID NO: 216978 - RNA, 21 nt, Human
agggccugugucuggccaggc

SEQ ID NO: 216979 - RNA, 26 nt, Human
agguggcuggaggcuugagcugagcu

SEQ ID NO: 216980 - RNA, 24 nt, Human
aguaugucucugggcuggggagag

SEQ ID NO: 216981 - RNA, 23 nt, Human
aucaacuccagaccccaggcugg

SEQ ID NO: 216982 - RNA, 25 nt, Human
auugcacagcuguggccaccugacg

SEQ ID NO: 216983 - RNA, 18 nt, Human
caacagaguuuaaauaag

SEQ ID NO: 216984 - RNA, 20 nt, Human
caacuccagaccccaggcug

SEQ ID NO: 216985 - RNA, 24 nt, Human
caacuccaggcccuuuggguuaau

SEQ ID NO: 216986 - RNA, 21 nt, Human
cacccuggcuaauggagcugg

SEQ ID NO: 216987 - RNA, 21 nt, Human
cacucagccuccgggcauuuc

SEQ ID NO: 216988 - RNA, 20 nt, Human
cagagccuggggacagcuga

SEQ ID NO: 216989 - RNA, 25 nt, Human
cagcugccgaggcaggauucgguag

SEQ ID NO: 216990 - RNA, 20 nt, Human
caggcccaggacagugggcu

SEQ ID NO: 216991 - RNA, 22 nt, Human
caggcccuuuggguuaaugggg

SEQ ID NO: 216992 - RNA, 22 nt, Human
cagggaggcuggggccucuguc

SEQ ID NO: 216993 - RNA, 21 nt, Human
cagggagggccugugucuggc

SEQ ID NO: 216994 - RNA, 22 nt, Human
caggucccagguccuccuccuu

SEQ ID NO: 216995 - RNA, 23 nt, Human
caguugagucccguaacucuggu

SEQ ID NO: 216996 - RNA, 26 nt, Human
caugguggacagcaggucccaggucc

SEQ ID NO: 216997 - RNA, 20 nt, Human
ccaaugucugagucuggguu

SEQ ID NO: 216998 - RNA, 22 nt, Human
ccagcacacccuggcuaaugga

SEQ ID NO: 216999 - RNA, 18 nt, Human
ccagcuccucaccccccu

SEQ ID NO: 217000 - RNA, 18 nt, Human
ccagguccuccuccuucu

SEQ ID NO: 217001 - RNA, 18 nt, Human
ccccccuggcucuggccc

SEQ ID NO: 217002 - RNA, 20 nt, Human
cccucgggauccaacuccag

SEQ ID NO: 217003 - RNA, 18 nt, Human
cccuggcucuggcccuuc

SEQ ID NO: 217004 - RNA, 19 nt, Human
cccuuggagcugggcucug

SEQ ID NO: 217005 - RNA, 18 nt, Human
ccucacacugcaggcuaa

SEQ ID NO: 217006 - RNA, 25 nt, Human
ccucacacugcaggcuaaauggcug

SEQ ID NO: 217007 - RNA, 24 nt, Human
ccuccuucugaggcuggucucggg

SEQ ID NO: 217008 - RNA, 23 nt, Human
ccuccuuuucaguagaaugaggg

SEQ ID NO: 217009 - RNA, 18 nt, Human
ccugagcugguccugggg

SEQ ID NO: 217010 - RNA, 19 nt, Human
ccugagcugguccuggggc

SEQ ID NO: 217011 - RNA, 21 nt, Human
ccuuggagcugggcucugggc

SEQ ID NO: 217012 - RNA, 24 nt, Human
ccuuggagcugggcucugggcccu

SEQ ID NO: 217013 - RNA, 21 nt, Human
cggagagccgaaaggaaacca

SEQ ID NO: 217014 - RNA, 21 nt, Human
cuaauggagcuggggccuugg

SEQ ID NO: 217015 - RNA, 21 nt, Human
cuccagaccccaggcuggauc

SEQ ID NO: 217016 - RNA, 18 nt, Human
cuccuaaaucagggugaa

SEQ ID NO: 217017 - RNA, 25 nt, Human
cuccucaccccccuggcucuggccc

SEQ ID NO: 217018 - RNA, 18 nt, Human
cugauuccccuuggagcu

SEQ ID NO: 217019 - RNA, 20 nt, Human
cuggaucugaguucccccau

SEQ ID NO: 217020 - RNA, 21 nt, Human
cugggcucugggcccugggcc

SEQ ID NO: 217021 - RNA, 18 nt, Human
cuggggccucugucccug

SEQ ID NO: 217022 - RNA, 24 nt, Human
cuggggccucugucccuggaucug

SEQ ID NO: 217023 - RNA, 25 nt, Human
cuucaagaaguacccagaccccucc

SEQ ID NO: 217024 - RNA, 21 nt, Human
cuucagggcuuuguacacagc

SEQ ID NO: 217025 - RNA, 24 nt, Human
cuucaggguccugggaaauuccug

SEQ ID NO: 217026 - RNA, 18 nt, Human
gaccuaggagcaggaggc

SEQ ID NO: 217027 - RNA, 18 nt, Human
gagcucacagcgcagccu

SEQ ID NO: 217028 - RNA, 21 nt, Human
gagcugccaggucuuaacucc

SEQ ID NO: 217029 - RNA, 18 nt, Human
gcauuucaggaucugagg

SEQ ID NO: 217030 - RNA, 21 nt, Human
gccuggggacagcugaguucc

SEQ ID NO: 217031 - RNA, 19 nt, Human
gcucccgcugcaagaaagu

SEQ ID NO: 217032 - RNA, 24 nt, Human
ggaaugggagucugaaauugggag

SEQ ID NO: 217033 - RNA, 21 nt, Human
ggccaggcugagguuccagau

SEQ ID NO: 217034 - RNA, 18 nt, Human
gggagggccugugucugg

SEQ ID NO: 217035 - RNA, 20 nt, Human
gggcuggggagaggagcuuc

SEQ ID NO: 217036 - RNA, 22 nt, Human
ggggggacugguucuucaggaa

SEQ ID NO: 217037 - RNA, 19 nt, Human
ggguggggcuguccagagc

SEQ ID NO: 217038 - RNA, 19 nt, Human
ggucccagguccuccuccu

SEQ ID NO: 217039 - RNA, 21 nt, Human
gguccuucacagugcaugggg

SEQ ID NO: 217040 - RNA, 22 nt, Human
ggugauugguggugcaguugag

SEQ ID NO: 217041 - RNA, 18 nt, Human
ggugccauaugggaggga

SEQ ID NO: 217042 - RNA, 22 nt, Human
guccugagcugguccuggggcc

SEQ ID NO: 217043 - RNA, 20 nt, Human
guccugggugucuggugccc

SEQ ID NO: 217044 - RNA, 18 nt, Human
guuaguguucuuuguugg

SEQ ID NO: 217045 - RNA, 22 nt, Human
uaaguccugggugucuggugcc

SEQ ID NO: 217046 - RNA, 18 nt, Human
uaauggggugauuggugg

SEQ ID NO: 217047 - RNA, 25 nt, Human
uacacagccucacacugcaggcuaa

SEQ ID NO: 217048 - RNA, 18 nt, Human
uagcugggggcuucuuuu

SEQ ID NO: 217049 - RNA, 21 nt, Human
uaggagcugcugaccuuccag

SEQ ID NO: 217050 - RNA, 23 nt, Human
ucaggaaacucuccaaaaugcaa

SEQ ID NO: 217051 - RNA, 19 nt, Human
ucaggcaucagagguggcu

SEQ ID NO: 217052 - RNA, 22 nt, Human
ucagggugaacugggccuccag

SEQ ID NO: 217053 - RNA, 19 nt, Human
ucauggccccuucaggguc

SEQ ID NO: 217054 - RNA, 21 nt, Human
ucauggccccuucaggguccu

SEQ ID NO: 217055 - RNA, 20 nt, Human
uccaaaaugcaaaggcuuca

SEQ ID NO: 217056 - RNA, 19 nt, Human
uccagguucuuagcugggg

SEQ ID NO: 217057 - RNA, 23 nt, Human
uccauugcacagcuguggccacc

SEQ ID NO: 217058 - RNA, 20 nt, Human
ucccagguccuccuccuucu

SEQ ID NO: 217059 - RNA, 18 nt, Human
uccccuuucucuggggaa

SEQ ID NO: 217060 - RNA, 20 nt, Human
uccuuuucaguagaaugagg

SEQ ID NO: 217061 - RNA, 19 nt, Human
ucgggauccaacuccaggc

SEQ ID NO: 217062 - RNA, 21 nt, Human
ucucccuggccgucagcaccu

SEQ ID NO: 217063 - RNA, 19 nt, Human
ucugaaauugggaggacuc

SEQ ID NO: 217064 - RNA, 21 nt, Human
ucugagucuggguuccagauc

SEQ ID NO: 217065 - RNA, 25 nt, Human
ucugcaggcccaggacagugggcuu

SEQ ID NO: 217066 - RNA, 21 nt, Human
ucuggcaaggcugaggacaga

SEQ ID NO: 217067 - RNA, 20 nt, Human
ucuggcccuucaaguauguc

SEQ ID NO: 217068 - RNA, 19 nt, Human
ucugggcuggggagaggag

SEQ ID NO: 217069 - RNA, 23 nt, Human
ucuguugccaucauggccccuuc

SEQ ID NO: 217070 - RNA, 19 nt, Human
ucuuugcagguuggagcug

SEQ ID NO: 217071 - RNA, 20 nt, Human
ugaggcuggucucggggaug

SEQ ID NO: 217072 - RNA, 22 nt, Human
ugaggguggggggacugguucu

SEQ ID NO: 217073 - RNA, 19 nt, Human
ugaguucugauuccccuug

SEQ ID NO: 217074 - RNA, 22 nt, Human
ugcaaaggcuucagggaggcug

SEQ ID NO: 217075 - RNA, 22 nt, Human
uggagcaggcccaaauauaguc

SEQ ID NO: 217076 - RNA, 19 nt, Human
uggagcugggcucugggcc

SEQ ID NO: 217077 - RNA, 22 nt, Human
uggcaggcagaacccaaauucu

SEQ ID NO: 217078 - RNA, 22 nt, Human
uggcaucuguccugagcugguc

SEQ ID NO: 217079 - RNA, 21 nt, Human
uggccaggcugagguuccaga

SEQ ID NO: 217080 - RNA, 21 nt, Human
uggcuaggaugaugauccaca

SEQ ID NO: 217081 - RNA, 20 nt, Human
ugggagucugaaauugggag

SEQ ID NO: 217082 - RNA, 18 nt, Human
ugggcuggggagaggagc

SEQ ID NO: 217083 - RNA, 20 nt, Human
ugggcuggggagaggagcuu

SEQ ID NO: 217084 - RNA, 25 nt, Human
uggggcagcugccgaggcaggauuc

SEQ ID NO: 217085 - RNA, 19 nt, Human
ugggucagauuuauugcac

SEQ ID NO: 217086 - RNA, 20 nt, Human
ugguggugcaguugaguccc

SEQ ID NO: 217087 - RNA, 21 nt, Human
uguugccaucauggccccuuc

SEQ ID NO: 217088 - RNA, 24 nt, Human
uucaaguaugucucugggcuggaa

SEQ ID NO: 217089 - RNA, 19 nt, Human
uugcugaggaucuggaagu

SEQ ID NO: 217090 - RNA, 23 nt, Human
uuggagcuucccguuuuugcugg

SEQ ID NO: 217091 - RNA, 18 nt, Human
uuggugcaggggcccgag

SEQ ID NO: 217092 - RNA, 19 nt, Human
uuucaggaucugagguccc

SEQ ID NO: 217093 - RNA, 22 nt, Human
aaaaacaaaggcaacccagaaa

SEQ ID NO: 217094 - RNA, 18 nt, Human
aaaagccccccccaaaac

SEQ ID NO: 217095 - RNA, 20 nt, Human
aaaauauccaaugccugaaa

SEQ ID NO: 217096 - RNA, 18 nt, Human
aaacaaaggcaacccaga

SEQ ID NO: 217097 - RNA, 27 nt, Human
aaacagaccagugacuugacuugagau

SEQ ID NO: 217098 - RNA, 29 nt, Human
aaacaggaaaagacgguaggagggacccc

SEQ ID NO: 217099 - RNA, 21 nt, Human
aaacaggaaaagacgguaggg

SEQ ID NO: 217100 - RNA, 22 nt, Human
aaacaggagccuuaggcuacgg

SEQ ID NO: 217101 - RNA, 22 nt, Human
aacaaaacaaaaaauagaacac

SEQ ID NO: 217102 - RNA, 25 nt, Human
aacccaucuucuccaagaauuccug

SEQ ID NO: 217103 - RNA, 23 nt, Human
aagaaaaaaagccccccccaaaa

SEQ ID NO: 217104 - RNA, 24 nt, Human
acaaaacaaaaaauagaacacucg

SEQ ID NO: 217105 - RNA, 25 nt, Human
acaaaacaaaaaauagaacacucga

SEQ ID NO: 217106 - RNA, 19 nt, Human
accuucgccuccucucgcc

SEQ ID NO: 217107 - RNA, 20 nt, Human
acguaacaauauccacaguu

SEQ ID NO: 217108 - RNA, 19 nt, Human
agaacacucgacucacuga

SEQ ID NO: 217109 - RNA, 23 nt, Human
agccacgccaaaaacaaaggcaa

SEQ ID NO: 217110 - RNA, 19 nt, Human
aggcccgagguuaggacgg

SEQ ID NO: 217111 - RNA, 20 nt, Human
augucaccugagugcaacug

SEQ ID NO: 217112 - RNA, 23 nt, Human
caaaggcaacccagaaaguuaaa

SEQ ID NO: 217113 - RNA, 23 nt, Human
caaauauccacagguaauuucua

SEQ ID NO: 217114 - RNA, 23 nt, Human
caacugggcaggcccuuccccaa

SEQ ID NO: 217115 - RNA, 27 nt, Human
caagcaagaaacugagacuuuaaacac

SEQ ID NO: 217116 - RNA, 25 nt, Human
cacagcuaggaaacaggaaaagacg

SEQ ID NO: 217117 - RNA, 22 nt, Human
caccuucgccuccucucgccgc

SEQ ID NO: 217118 - RNA, 23 nt, Human
cacgccaaaaacaaaggcaaccc

SEQ ID NO: 217119 - RNA, 25 nt, Human
cagcuccuuagcaaucuagcaaucu

SEQ ID NO: 217120 - RNA, 18 nt, Human
cagguaauuucuaaucau

SEQ ID NO: 217121 - RNA, 18 nt, Human
cagugaauaaacccaucu

SEQ ID NO: 217122 - RNA, 21 nt, Human
cagugaauaaacccaucuucu

SEQ ID NO: 217123 - RNA, 23 nt, Human
ccacgccaaaaacaaaggcaacc

SEQ ID NO: 217124 - RNA, 24 nt, Human
ccagaaaguuaaauuacggcaguu

SEQ ID NO: 217125 - RNA, 20 nt, Human
ccccaaaacaacaguggcac

SEQ ID NO: 217126 - RNA, 23 nt, Human
ccgcgcugcugcuaccgcagcca

SEQ ID NO: 217127 - RNA, 19 nt, Human
ccuccucucgccgcugcgc

SEQ ID NO: 217128 - RNA, 24 nt, Human
ccucucgccgcugcgcccggcccc

SEQ ID NO: 217129 - RNA, 24 nt, Human
cgccaaaaacaaaggcaacccaga

SEQ ID NO: 217130 - RNA, 19 nt, Human
cuaacacauuagggacaca

SEQ ID NO: 217131 - RNA, 18 nt, Human
cuacguaacaauauccac

SEQ ID NO: 217132 - RNA, 21 nt, Human
cuccucagcuacacuaucugg

SEQ ID NO: 217133 - RNA, 22 nt, Human
cuguuagugcaggugaguguag

SEQ ID NO: 217134 - RNA, 20 nt, Human
cuuuuuuuuuuuuaggcccc

SEQ ID NO: 217135 - RNA, 18 nt, Human
gaacacucgacucacuga

SEQ ID NO: 217136 - RNA, 19 nt, Human
gcaacccagaaaguuaaau

SEQ ID NO: 217137 - RNA, 22 nt, Human
gccaaaaacaaaggcaacccag

SEQ ID NO: 217138 - RNA, 19 nt, Human
gcccugcgcuccgggcugg

SEQ ID NO: 217139 - RNA, 24 nt, Human
gcgcugcugcuaccgcagccaccu

SEQ ID NO: 217140 - RNA, 21 nt, Human
gggaauacagauaggggagga

SEQ ID NO: 217141 - RNA, 19 nt, Human
ggggaggggagcggggacc

SEQ ID NO: 217142 - RNA, 18 nt, Human
gguggaggcugucaugaa

SEQ ID NO: 217143 - RNA, 18 nt, Human
guacaaaaauguaucaaa

SEQ ID NO: 217144 - RNA, 21 nt, Human
gugacuaagaauuccaaguac

SEQ ID NO: 217145 - RNA, 22 nt, Human
guguguuuuuagugaaagggag

SEQ ID NO: 217146 - RNA, 20 nt, Human
guugugggguggaggcuguc

SEQ ID NO: 217147 - RNA, 18 nt, Human
uaaaaaauauccaaugcc

SEQ ID NO: 217148 - RNA, 23 nt, Human
uaaaaaauauccaaugccugaaa

SEQ ID NO: 217149 - RNA, 21 nt, Human
uaacaaccauaagucuaaaca

SEQ ID NO: 217150 - RNA, 20 nt, Human
uaacuuaacauugugaagca

SEQ ID NO: 217151 - RNA, 21 nt, Human
uaagucagccacgccaaaaac

SEQ ID NO: 217152 - RNA, 19 nt, Human
uaagucuaaacaccauaac

SEQ ID NO: 217153 - RNA, 22 nt, Human
uaauucugauugauuaaaccaa

SEQ ID NO: 217154 - RNA, 18 nt, Human
uacaguauuugcagcagu

SEQ ID NO: 217155 - RNA, 20 nt, Human
uacaguauuugcagcaguga

SEQ ID NO: 217156 - RNA, 25 nt, Human
uaccccaauggcauagucuugugau

SEQ ID NO: 217157 - RNA, 23 nt, Human
uaccgcagccaccuucgccuccu

SEQ ID NO: 217158 - RNA, 21 nt, Human
uacggcaguuaaagaaaaauc

SEQ ID NO: 217159 - RNA, 19 nt, Human
uagaguaauaauuccaccc

SEQ ID NO: 217160 - RNA, 19 nt, Human
uagccccaaaguaauuuuu

SEQ ID NO: 217161 - RNA, 21 nt, Human
uagugcaggugaguguaggug

SEQ ID NO: 217162 - RNA, 18 nt, Human
uauacaaauauccacagg

SEQ ID NO: 217163 - RNA, 18 nt, Human
ucauaucuauucagucuc

SEQ ID NO: 217164 - RNA, 23 nt, Human
ucauuuauaauuuuagaguuugc

SEQ ID NO: 217165 - RNA, 22 nt, Human
uccaaugccugaaauaaacauc

SEQ ID NO: 217166 - RNA, 23 nt, Human
uccccauauaacuuaacauugug

SEQ ID NO: 217167 - RNA, 18 nt, Human
uccgggcuggguccgagg

SEQ ID NO: 217168 - RNA, 22 nt, Human
ucuaaacaccauaacaucuuug

SEQ ID NO: 217169 - RNA, 18 nt, Human
ucugaguuggaaaaagcc

SEQ ID NO: 217170 - RNA, 18 nt, Human
ugaaacacaacuacccca

SEQ ID NO: 217171 - RNA, 19 nt, Human
ugaaacacaacuaccccaa

SEQ ID NO: 217172 - RNA, 24 nt, Human
ugaaauagauaauucagguuguca

SEQ ID NO: 217173 - RNA, 24 nt, Human
ugaauaaacccaucuucuccaaga

SEQ ID NO: 217174 - RNA, 19 nt, Human
ugaccacccucccaacacc

SEQ ID NO: 217175 - RNA, 22 nt, Human
ugacuaagaauuccaaguacaa

SEQ ID NO: 217176 - RNA, 23 nt, Human
ugaguagcuuucauuucuguucc

SEQ ID NO: 217177 - RNA, 23 nt, Human
ugcagcggccgcccugcgcuccg

SEQ ID NO: 217178 - RNA, 19 nt, Human
ugcgcccggccccaccccc

SEQ ID NO: 217179 - RNA, 20 nt, Human
uggcauagucuugugaugug

SEQ ID NO: 217180 - RNA, 21 nt, Human
ugggaauacagauaggggagg

SEQ ID NO: 217181 - RNA, 24 nt, Human
ugggaauacagauaggggaggaaa

SEQ ID NO: 217182 - RNA, 23 nt, Human
uguaaauccagaaacauuaugca

SEQ ID NO: 217183 - RNA, 21 nt, Human
uguguuuuuagugaaagggag

SEQ ID NO: 217184 - RNA, 18 nt, Human
uguuagugcaggugagug

SEQ ID NO: 217185 - RNA, 25 nt, Human
uuagccccaaaguaauuuuugggaa

SEQ ID NO: 217186 - RNA, 22 nt, Human
uuaguacaaaaauguaucaaau

SEQ ID NO: 217187 - RNA, 28 nt, Human
uucaagucuguugcaccuguguguuuuu

SEQ ID NO: 217188 - RNA, 23 nt, Human
uuccggaaaaagaaaaaaagccc

SEQ ID NO: 217189 - RNA, 24 nt, Human
uucuuuguugaccacccucccaac

SEQ ID NO: 217190 - RNA, 24 nt, Human
uuggguugugggguggaggcuguc

SEQ ID NO: 217191 - RNA, 19 nt, Human
uuguaaacaaaauauauuu

SEQ ID NO: 217192 - RNA, 19 nt, Human
uuuuuuuuuuuuaggcccc

SEQ ID NO: 217193 - RNA, 18 nt, Human
uuuuuuuuuuuuuuuuug

SEQ ID NO: 217194 - RNA, 21 nt, Human
aaccuccuccccgacccucua

SEQ ID NO: 217195 - RNA, 19 nt, Human
aagccccagguccccccag

SEQ ID NO: 217196 - RNA, 22 nt, Human
aagccgauccugccaaaucuug

SEQ ID NO: 217197 - RNA, 24 nt, Human
aaggagccaucucuggggaaggga

SEQ ID NO: 217198 - RNA, 26 nt, Human
aaggagccaucucuggggaagggaug

SEQ ID NO: 217199 - RNA, 19 nt, Human
acacaaccuccuccccgac

SEQ ID NO: 217200 - RNA, 24 nt, Human
acacaaccuccuccccgacccucu

SEQ ID NO: 217201 - RNA, 23 nt, Human
accccauggcccugucccugauu

SEQ ID NO: 217202 - RNA, 23 nt, Human
acgaaaccacgaaaccacuagac

SEQ ID NO: 217203 - RNA, 24 nt, Human
agcccacucuacccucuucauccc

SEQ ID NO: 217204 - RNA, 19 nt, Human
agccccagguccccccagg

SEQ ID NO: 217205 - RNA, 20 nt, Human
agccccagguccccccaggc

SEQ ID NO: 217206 - RNA, 21 nt, Human
aggacaccccugcccuucuca

SEQ ID NO: 217207 - RNA, 22 nt, Human
aggaguucuugugggugggaga

SEQ ID NO: 217208 - RNA, 18 nt, Human
aggcugggacaugggaac

SEQ ID NO: 217209 - RNA, 21 nt, Human
auggagggcagccacaggcca

SEQ ID NO: 217210 - RNA, 19 nt, Human
cacgaaaccacuagacuga

SEQ ID NO: 217211 - RNA, 19 nt, Human
cacucuacccucuucaucc

SEQ ID NO: 217212 - RNA, 27 nt, Human
cacucucaucucacagcacucuaaggg

SEQ ID NO: 217213 - RNA, 19 nt, Human
caggacaccccugcccuuc

SEQ ID NO: 217214 - RNA, 22 nt, Human
caucaggacaccccugcccuuc

SEQ ID NO: 217215 - RNA, 26 nt, Human
caucucacagcacucuaaggggaagu

SEQ ID NO: 217216 - RNA, 20 nt, Human
ccacaggccaggcugggaca

SEQ ID NO: 217217 - RNA, 22 nt, Human
ccagcagcccacucuacccucu

SEQ ID NO: 217218 - RNA, 23 nt, Human
cccaagccccagguccccccagg

SEQ ID NO: 217219 - RNA, 22 nt, Human
cccccaggcgcgucucuggucu

SEQ ID NO: 217220 - RNA, 25 nt, Human
cccccaggcgcgucucuggucucca

SEQ ID NO: 217221 - RNA, 19 nt, Human
ccccgccagcccucccgcc

SEQ ID NO: 217222 - RNA, 21 nt, Human
ccccgccagcccucccgcccg

SEQ ID NO: 217223 - RNA, 27 nt, Human
ccccgccagcccucccgcccgcccgcc

SEQ ID NO: 217224 - RNA, 21 nt, Human
cccugucccugauuuacccac

SEQ ID NO: 217225 - RNA, 25 nt, Human
ccuaccccauggcccugucccugau

SEQ ID NO: 217226 - RNA, 21 nt, Human
ccucccgcccgcccgccgcuc

SEQ ID NO: 217227 - RNA, 24 nt, Human
cucacagcacucuaaggggaaguu

SEQ ID NO: 217228 - RNA, 21 nt, Human
cucccgcccgcccgccgcucc

SEQ ID NO: 217229 - RNA, 21 nt, Human
cuccuccccgacccucuaggu

SEQ ID NO: 217230 - RNA, 19 nt, Human
cucuacccucuucauccca

SEQ ID NO: 217231 - RNA, 19 nt, Human
cucucaucucacagcacuc

SEQ ID NO: 217232 - RNA, 23 nt, Human
cucuggggaagggauggagggca

SEQ ID NO: 217233 - RNA, 21 nt, Human
gaaaccacuagacugauggca

SEQ ID NO: 217234 - RNA, 24 nt, Human
gacacaaccuccuccccgacccuc

SEQ ID NO: 217235 - RNA, 20 nt, Human
gaggcagguccuuggggucc

SEQ ID NO: 217236 - RNA, 22 nt, Human
gaucccuucuccccaccuuugc

SEQ ID NO: 217237 - RNA, 19 nt, Human
gccacaggccaggcuggga

SEQ ID NO: 217238 - RNA, 28 nt, Human
gccagcccucccgcccgcccgccgcucc

SEQ ID NO: 217239 - RNA, 24 nt, Human
gccgauccugccaaaucuugaugc

SEQ ID NO: 217240 - RNA, 18 nt, Human
ggaucccuucuccccacc

SEQ ID NO: 217241 - RNA, 18 nt, Human
gggagaggucugugcccc

SEQ ID NO: 217242 - RNA, 19 nt, Human
gggauggagggcagccaca

SEQ ID NO: 217243 - RNA, 21 nt, Human
ggugaaugggagaggaaggga

SEQ ID NO: 217244 - RNA, 20 nt, Human
gugaaugggagaggaaggga

SEQ ID NO: 217245 - RNA, 19 nt, Human
gugacacaaccuccucccc

SEQ ID NO: 217246 - RNA, 18 nt, Human
uaaggggaaguugggugg

SEQ ID NO: 217247 - RNA, 20 nt, Human
uaaggggaaguuggguggga

SEQ ID NO: 217248 - RNA, 21 nt, Human
uaccccauggcccugucccug

SEQ ID NO: 217249 - RNA, 21 nt, Human
ucccugauuuacccacucuca

SEQ ID NO: 217250 - RNA, 22 nt, Human
ucucacccuaccccauggcccu

SEQ ID NO: 217251 - RNA, 20 nt, Human
ucucuggggaagggauggag

SEQ ID NO: 217252 - RNA, 22 nt, Human
ucucuggucuccaaagucucgu

SEQ ID NO: 217253 - RNA, 18 nt, Human
ucuugugggugggagagg

SEQ ID NO: 217254 - RNA, 21 nt, Human
ugagaggggaaacuagagaag

SEQ ID NO: 217255 - RNA, 23 nt, Human
ugagaggggaaacuagagaagga

SEQ ID NO: 217256 - RNA, 28 nt, Human
ugagaggggaaacuagagaaggagcagc

SEQ ID NO: 217257 - RNA, 19 nt, Human
ugcaucaggacaccccugc

SEQ ID NO: 217258 - RNA, 23 nt, Human
ugccaaaucuugaugcgacacug

SEQ ID NO: 217259 - RNA, 20 nt, Human
ugcccuucucacccuacccc

SEQ ID NO: 217260 - RNA, 22 nt, Human
ugggugggaggaguucuugugg

SEQ ID NO: 217261 - RNA, 22 nt, Human
ugggugggaggaguucuugugg

SEQ ID NO: 217262 - RNA, 19 nt, Human
uuaggaucccuucucccca

SEQ ID NO: 217263 - RNA, 20 nt, Human
uuuuuuuuuuuuuuuuuugg

SEQ ID NO: 217264 - RNA, 23 nt, Human
uuuuuuuuuuuuuuuuuuguucu

SEQ ID NO: 217265 - RNA, 22 nt, Human
agucuuuaaagcgaaguggugc

SEQ ID NO: 217266 - RNA, 20 nt, Human
caccugggcuugauagaaug

SEQ ID NO: 217267 - RNA, 19 nt, Human
caguggggccuccgaaaaa

SEQ ID NO: 217268 - RNA, 19 nt, Human
ccccugagggugaccaugc

SEQ ID NO: 217269 - RNA, 20 nt, Human
ccggccgccuuccccucugc

SEQ ID NO: 217270 - RNA, 18 nt, Human
ccuaaauauugcucggcu

SEQ ID NO: 217271 - RNA, 20 nt, Human
gaagaagagaacagcaucag

SEQ ID NO: 217272 - RNA, 19 nt, Human
gaccuggccgaaguggcug

SEQ ID NO: 217273 - RNA, 19 nt, Human
gcgaaguggugcugccccc

SEQ ID NO: 217274 - RNA, 23 nt, Human
uaaaaggcuuauauuuauaaaaa

SEQ ID NO: 217275 - RNA, 20 nt, Human
uauggaagauacaaagacca

SEQ ID NO: 217276 - RNA, 22 nt, Human
ucugucacucuccaaaguucag

SEQ ID NO: 217277 - RNA, 18 nt, Human
ugaagaagagaacagcau

SEQ ID NO: 217278 - RNA, 20 nt, Human
ugaagaagagaacagcauca

SEQ ID NO: 217279 - RNA, 22 nt, Human
uggaagauacaaagaccaagga

SEQ ID NO: 217280 - RNA, 21 nt, Human
uggccgaaguggcugccucag

SEQ ID NO: 217281 - RNA, 21 nt, Human
uggugcugcccccggucgugu

SEQ ID NO: 217282 - RNA, 24 nt, Human
aaagugcugggauuacaggcguga

SEQ ID NO: 217283 - RNA, 18 nt, Human
aagaaacaugacgugugc

SEQ ID NO: 217284 - RNA, 21 nt, Human
aaggaaggaaccaagagaggc

SEQ ID NO: 217285 - RNA, 18 nt, Human
aaggagccuggccuggga

SEQ ID NO: 217286 - RNA, 25 nt, Human
aaggagccuggccugggagaaaggc

SEQ ID NO: 217287 - RNA, 19 nt, Human
aagugcugggauuacaggc

SEQ ID NO: 217288 - RNA, 19 nt, Human
aagugcugggauuacaggc

SEQ ID NO: 217289 - RNA, 26 nt, Human
aagugcugggauuacaggcgugaacc

SEQ ID NO: 217290 - RNA, 21 nt, Human
aaugcaggaagacaggaagga

SEQ ID NO: 217291 - RNA, 18 nt, Human
acagggaaaaaacaucca

SEQ ID NO: 217292 - RNA, 20 nt, Human
accucaaccuccugaguagc

SEQ ID NO: 217293 - RNA, 24 nt, Human
acggagucucgcuguguugcccag

SEQ ID NO: 217294 - RNA, 19 nt, Human
acuacaggugugugccacc

SEQ ID NO: 217295 - RNA, 23 nt, Human
agacaaguauagccuuuacccuc

SEQ ID NO: 217296 - RNA, 23 nt, Human
agacaggaaggagccuggccugg

SEQ ID NO: 217297 - RNA, 21 nt, Human
agaggcuggugaaccgucugg

SEQ ID NO: 217298 - RNA, 20 nt, Human
agauagggaaacugagggcc

SEQ ID NO: 217299 - RNA, 18 nt, Human
agaucagacauucucuuc

SEQ ID NO: 217300 - RNA, 20 nt, Human
aggaaccaagagaggcuggu

SEQ ID NO: 217301 - RNA, 23 nt, Human
aggcagaggcagaguggcccugg

SEQ ID NO: 217302 - RNA, 24 nt, Human
aggcagaggcagaguggcccuggg

SEQ ID NO: 217303 - RNA, 23 nt, Human
aggcagaguggcccugggcaucc

SEQ ID NO: 217304 - RNA, 24 nt, Human
aggcagaguggcccugggcauccu

SEQ ID NO: 217305 - RNA, 22 nt, Human
aggcagugacucgcccgagggc

SEQ ID NO: 217306 - RNA, 19 nt, Human
aggcgugaaccaccgcgcc

SEQ ID NO: 217307 - RNA, 21 nt, Human
agggaccuguggccccagggg

SEQ ID NO: 217308 - RNA, 22 nt, Human
agggcaggggugagggccagaa

SEQ ID NO: 217309 - RNA, 24 nt, Human
aggugauccacccuccuuggccuc

SEQ ID NO: 217310 - RNA, 23 nt, Human
aguagcugggacuacaggugugu

SEQ ID NO: 217311 - RNA, 22 nt, Human
agucuuucugugggggccacug

SEQ ID NO: 217312 - RNA, 19 nt, Human
agugacacaggucacauuu

SEQ ID NO: 217313 - RNA, 23 nt, Human
agugcaauggcgcaaucuuggcu

SEQ ID NO: 217314 - RNA, 24 nt, Human
agugcaauggcgcaaucuuggcuc

SEQ ID NO: 217315 - RNA, 18 nt, Human
agugcugggauuacaggc

SEQ ID NO: 217316 - RNA, 20 nt, Human
aguuagcagacgugguuccc

SEQ ID NO: 217317 - RNA, 21 nt, Human
aucuucccacuggcucuguca

SEQ ID NO: 217318 - RNA, 20 nt, Human
augggguuucgccaggcugg

SEQ ID NO: 217319 - RNA, 24 nt, Human
caaagugcugggauuacaggcgug

SEQ ID NO: 217320 - RNA, 19 nt, Human
caacagggaggcaucacgg

SEQ ID NO: 217321 - RNA, 20 nt, Human
caaccuccaccucccagguu

SEQ ID NO: 217322 - RNA, 23 nt, Human
caaccuccaccucccagguucaa

SEQ ID NO: 217323 - RNA, 18 nt, Human
caagaacaaggcgugugc

SEQ ID NO: 217324 - RNA, 25 nt, Human
caagaacaaggcgugugccacaguc

SEQ ID NO: 217325 - RNA, 22 nt, Human
caagacaaguauagccuuuacc

SEQ ID NO: 217326 - RNA, 22 nt, Human
caaggaaggaaccaagagaggc

SEQ ID NO: 217327 - RNA, 21 nt, Human
caccgcgcccagccccggccc

SEQ ID NO: 217328 - RNA, 23 nt, Human
cacggcucuagaagaggcugggg

SEQ ID NO: 217329 - RNA, 21 nt, Human
cacugcaaccuccaccuccca

SEQ ID NO: 217330 - RNA, 21 nt, Human
cacugugcuuggcacuggggc

SEQ ID NO: 217331 - RNA, 21 nt, Human
cagaacaucccuagguccuga

SEQ ID NO: 217332 - RNA, 22 nt, Human
cagaagagacuggacuccagug

SEQ ID NO: 217333 - RNA, 19 nt, Human
cagaaugcaggcagaggca

SEQ ID NO: 217334 - RNA, 24 nt, Human
cagcagaagagacuggacuccagu

SEQ ID NO: 217335 - RNA, 18 nt, Human
cagcccucuuggcugguc

SEQ ID NO: 217336 - RNA, 20 nt, Human
caggaaggagccuggccugg

SEQ ID NO: 217337 - RNA, 22 nt, Human
caggcagagggagcugucuggg

SEQ ID NO: 217338 - RNA, 22 nt, Human
cagguucugggggguggaggca

SEQ ID NO: 217339 - RNA, 23 nt, Human
caucccagggcaggggugagggc

SEQ ID NO: 217340 - RNA, 18 nt, Human
cauucucuuccaaggaag

SEQ ID NO: 217341 - RNA, 22 nt, Human
ccaaagugcugggauuacaggc

SEQ ID NO: 217342 - RNA, 22 nt, Human
ccaaagugcugggauuacaggc

SEQ ID NO: 217343 - RNA, 24 nt, Human
ccaaagugcugggauuacaggcgu

SEQ ID NO: 217344 - RNA, 27 nt, Human
ccaccucccagguucaagcaauucuuu

SEQ ID NO: 217345 - RNA, 24 nt, Human
ccacgagggucucauuuugcaggg

SEQ ID NO: 217346 - RNA, 22 nt, Human
ccagaacaucccuagguccuga

SEQ ID NO: 217347 - RNA, 23 nt, Human
cccagccccggcccucuuuuucu

SEQ ID NO: 217348 - RNA, 22 nt, Human
cccaggcuggagugcaauggcg

SEQ ID NO: 217349 - RNA, 21 nt, Human
cccucacuuuugcagcccucu

SEQ ID NO: 217350 - RNA, 24 nt, Human
ccucccagguucaagcaauucucc

SEQ ID NO: 217351 - RNA, 20 nt, Human
ccugaccucaggugauccac

SEQ ID NO: 217352 - RNA, 23 nt, Human
ccugaccucaggugauccacccu

SEQ ID NO: 217353 - RNA, 24 nt, Human
ccugaccucaggugauccacccuc

SEQ ID NO: 217354 - RNA, 22 nt, Human
ccugaguagcugggacuacagg

SEQ ID NO: 217355 - RNA, 23 nt, Human
ccugaguagcugggacuacaggu

SEQ ID NO: 217356 - RNA, 23 nt, Human
cgagauagggaaacugagggcca

SEQ ID NO: 217357 - RNA, 25 nt, Human
cgagggcacacggcagaaugcaggc

SEQ ID NO: 217358 - RNA, 24 nt, Human
cgcuguguugcccaggcuggagug

SEQ ID NO: 217359 - RNA, 24 nt, Human
cggagucucgcuguguugcccagg

SEQ ID NO: 217360 - RNA, 22 nt, Human
cggcucuagaagaggcugggga

SEQ ID NO: 217361 - RNA, 20 nt, Human
cgugugccacagucacguag

SEQ ID NO: 217362 - RNA, 22 nt, Human
cuagaugucccacgcccugaca

SEQ ID NO: 217363 - RNA, 23 nt, Human
cuagaugucccacgcccugacau

SEQ ID NO: 217364 - RNA, 24 nt, Human
cucacugcaaccuccaccucccag

SEQ ID NO: 217365 - RNA, 20 nt, Human
cuccaaggguggggaugucc

SEQ ID NO: 217366 - RNA, 23 nt, Human
cucugcaccucacaggccuggac

SEQ ID NO: 217367 - RNA, 24 nt, Human
cugcaaccuccaccucccagguuc

SEQ ID NO: 217368 - RNA, 23 nt, Human
cuggaaggcaugccaaggaauuu

SEQ ID NO: 217369 - RNA, 24 nt, Human
cuggaaggcaugccaaggaauuug

SEQ ID NO: 217370 - RNA, 24 nt, Human
gaccucaggugauccacccuccuu

SEQ ID NO: 217371 - RNA, 19 nt, Human
gagaugggguuucgccagg

SEQ ID NO: 217372 - RNA, 20 nt, Human
gagaugggguuucgccaggc

SEQ ID NO: 217373 - RNA, 20 nt, Human
gaggcuggugaaccgucugg

SEQ ID NO: 217374 - RNA, 21 nt, Human
gagggccagggagaggcagug

SEQ ID NO: 217375 - RNA, 26 nt, Human
gaguagcugggacuacaggugugugc

SEQ ID NO: 217376 - RNA, 20 nt, Human
gaguccaguucugggcacuc

SEQ ID NO: 217377 - RNA, 22 nt, Human
gauuacaggcgugaaccaccgc

SEQ ID NO: 217378 - RNA, 24 nt, Human
gauuuuguauuuuuaguagagaug

SEQ ID NO: 217379 - RNA, 22 nt, Human
gcaaccuccaccucccagguuc

SEQ ID NO: 217380 - RNA, 19 nt, Human
gcccaggcuggagugcaau

SEQ ID NO: 217381 - RNA, 19 nt, Human
gcccugggcauccugaguc

SEQ ID NO: 217382 - RNA, 25 nt, Human
gcucagucuuucugugggggccacu

SEQ ID NO: 217383 - RNA, 19 nt, Human
gcuggagugcaauggcgca

SEQ ID NO: 217384 - RNA, 23 nt, Human
gcuggccucuaacuccugaccuc

SEQ ID NO: 217385 - RNA, 22 nt, Human
ggagcugucugggugaaugcag

SEQ ID NO: 217386 - RNA, 23 nt, Human
ggagucucgcuguguugcccagg

SEQ ID NO: 217387 - RNA, 20 nt, Human
ggauguccgggcccgugccc

SEQ ID NO: 217388 - RNA, 20 nt, Human
ggcuggggaaggccacgagg

SEQ ID NO: 217389 - RNA, 19 nt, Human
gggcagcgucaggaggccc

SEQ ID NO: 217390 - RNA, 21 nt, Human
gggcgagauggaagguucagg

SEQ ID NO: 217391 - RNA, 24 nt, Human
ggugauccacccuccuuggccucc

SEQ ID NO: 217392 - RNA, 19 nt, Human
guagugcagggugguggaa

SEQ ID NO: 217393 - RNA, 23 nt, Human
gugaacaagacaaguauagccuu

SEQ ID NO: 217394 - RNA, 24 nt, Human
gugauccacccuccuuggccuccc

SEQ ID NO: 217395 - RNA, 21 nt, Human
guggagcuagggcagggcaga

SEQ ID NO: 217396 - RNA, 20 nt, Human
guggcccugggcauccugag

SEQ ID NO: 217397 - RNA, 21 nt, Human
guguugcccaggcuggagugc

SEQ ID NO: 217398 - RNA, 23 nt, Human
guucugggggguggaggcaucug

SEQ ID NO: 217399 - RNA, 24 nt, Human
uacaggcgugaaccaccgcgccca

SEQ ID NO: 217400 - RNA, 22 nt, Human
uacaggugugugccaccacgcc

SEQ ID NO: 217401 - RNA, 24 nt, Human
uaccucaaccuccugaguagcugg

SEQ ID NO: 217402 - RNA, 18 nt, Human
uagaagaggcuggggaag

SEQ ID NO: 217403 - RNA, 21 nt, Human
uagaagaggcuggggaaggcc

SEQ ID NO: 217404 - RNA, 21 nt, Human
uagguccugagacuacaguuu

SEQ ID NO: 217405 - RNA, 18 nt, Human
uaguagagaugggguuuc

SEQ ID NO: 217406 - RNA, 22 nt, Human
uaguagagaugggguuucgcca

SEQ ID NO: 217407 - RNA, 23 nt, Human
uaguagagaugggguuucgccag

SEQ ID NO: 217408 - RNA, 23 nt, Human
uaguagagaugggguuucgccag

SEQ ID NO: 217409 - RNA, 24 nt, Human
uaguagagaugggguuucgccagg

SEQ ID NO: 217410 - RNA, 25 nt, Human
uaguagagaugggguuucgccaggc

SEQ ID NO: 217411 - RNA, 19 nt, Human
uagugcagggugguggaag

SEQ ID NO: 217412 - RNA, 25 nt, Human
uaugucaagcaccuacuagaugucc

SEQ ID NO: 217413 - RNA, 23 nt, Human
ucacguagugacacaggucacau

SEQ ID NO: 217414 - RNA, 24 nt, Human
ucacugcaaccuccaccucccagg

SEQ ID NO: 217415 - RNA, 25 nt, Human
ucacugcaaccuccaccucccaggu

SEQ ID NO: 217416 - RNA, 26 nt, Human
ucacugcaaccuccaccucccagguu

SEQ ID NO: 217417 - RNA, 23 nt, Human
ucagcaggucuucccuaugagcc

SEQ ID NO: 217418 - RNA, 21 nt, Human
ucaggcagagggagcugucug

SEQ ID NO: 217419 - RNA, 21 nt, Human
uccacccuccuuggccuccca

SEQ ID NO: 217420 - RNA, 24 nt, Human
ucccaaagugcugggauuacaggc

SEQ ID NO: 217421 - RNA, 21 nt, Human
ucccagguucaagcaauucuc

SEQ ID NO: 217422 - RNA, 23 nt, Human
ucccagguucaagcaauucuccu

SEQ ID NO: 217423 - RNA, 19 nt, Human
ucccuagguccugagacua

SEQ ID NO: 217424 - RNA, 24 nt, Human
uccugaguagcugggacuacaggu

SEQ ID NO: 217425 - RNA, 21 nt, Human
uccuuggccucccaaagugcu

SEQ ID NO: 217426 - RNA, 21 nt, Human
ucgcccgagggcacacggcag

SEQ ID NO: 217427 - RNA, 24 nt, Human
ucgcuguguugcccaggcuggagu

SEQ ID NO: 217428 - RNA, 24 nt, Human
ucuccuaccucaaccuccugagua

SEQ ID NO: 217429 - RNA, 23 nt, Human
ucucgcuguguugcccaggcugg

SEQ ID NO: 217430 - RNA, 24 nt, Human
ucucgcuguguugcccaggcugga

SEQ ID NO: 217431 - RNA, 24 nt, Human
ucuguaucuucccacuggcucugu

SEQ ID NO: 217432 - RNA, 18 nt, Human
ucuguggacaucccaggg

SEQ ID NO: 217433 - RNA, 18 nt, Human
ucuuucugugggggccac

SEQ ID NO: 217434 - RNA, 20 nt, Human
ugaccucaggugauccaccc

SEQ ID NO: 217435 - RNA, 21 nt, Human
ugaccucaggugauccacccu

SEQ ID NO: 217436 - RNA, 22 nt, Human
ugaccucaggugauccacccuc

SEQ ID NO: 217437 - RNA, 26 nt, Human
ugaguccaguucugggcacucugcac

SEQ ID NO: 217438 - RNA, 23 nt, Human
ugcaauggcgcaaucuuggcuca

SEQ ID NO: 217439 - RNA, 24 nt, Human
ugccaaggaauuuggucuuuggcc

SEQ ID NO: 217440 - RNA, 23 nt, Human
ugccagcagaagagacuggacuc

SEQ ID NO: 217441 - RNA, 18 nt, Human
ugcccaggcuggagugca

SEQ ID NO: 217442 - RNA, 21 nt, Human
ugcccaggcuggagugcaaug

SEQ ID NO: 217443 - RNA, 21 nt, Human
ugcccaggcuggagugcaaug

SEQ ID NO: 217444 - RNA, 22 nt, Human
ugcugggauuacaggcgugaac

SEQ ID NO: 217445 - RNA, 23 nt, Human
ugcuggucaaggaaggaggggug

SEQ ID NO: 217446 - RNA, 23 nt, Human
uggagugcaauggcgcaaucuug

SEQ ID NO: 217447 - RNA, 24 nt, Human
uggagugcaauggcgcaaucuugg

SEQ ID NO: 217448 - RNA, 24 nt, Human
uggauuuuguauuuuuaguagaga

SEQ ID NO: 217449 - RNA, 20 nt, Human
uggccucuaacuccugaccu

SEQ ID NO: 217450 - RNA, 19 nt, Human
uggccugggagaaaggcug

SEQ ID NO: 217451 - RNA, 18 nt, Human
ugggacuacaggugugug

SEQ ID NO: 217452 - RNA, 21 nt, Human
ugggacuacaggugugugcca

SEQ ID NO: 217453 - RNA, 22 nt, Human
ugggacuacaggugugugccac

SEQ ID NO: 217454 - RNA, 24 nt, Human
ugggacuacaggugugugccacca

SEQ ID NO: 217455 - RNA, 19 nt, Human
ugggauuacaggcgugaac

SEQ ID NO: 217456 - RNA, 21 nt, Human
ugggauuacaggcgugaacca

SEQ ID NO: 217457 - RNA, 22 nt, Human
ugggauuacaggcgugaaccac

SEQ ID NO: 217458 - RNA, 23 nt, Human
ugggauuacaggcgugaaccacc

SEQ ID NO: 217459 - RNA, 24 nt, Human
ugggauuacaggcgugaaccaccg

SEQ ID NO: 217460 - RNA, 24 nt, Human
ugggauuugcuggcaaccuagaca

SEQ ID NO: 217461 - RNA, 21 nt, Human
uguauuuuuaguagagauggg

SEQ ID NO: 217462 - RNA, 24 nt, Human
ugucaagcaccuacuagauguccc

SEQ ID NO: 217463 - RNA, 19 nt, Human
ugucugggugaaugcagga

SEQ ID NO: 217464 - RNA, 18 nt, Human
ugugugacgugagcuggg

SEQ ID NO: 217465 - RNA, 18 nt, Human
uguguugcccaggcugga

SEQ ID NO: 217466 - RNA, 24 nt, Human
uguguugcccaggcuggagugcaa

SEQ ID NO: 217467 - RNA, 20 nt, Human
uguugcccaggcuggagugc

SEQ ID NO: 217468 - RNA, 18 nt, Human
uuaguagagaugggguuu

SEQ ID NO: 217469 - RNA, 22 nt, Human
uuaguagagaugggguuucgcc

SEQ ID NO: 217470 - RNA, 23 nt, Human
uuaguagagaugggguuucgcca

SEQ ID NO: 217471 - RNA, 24 nt, Human
uucaagcaauucuccuaccucaac

SEQ ID NO: 217472 - RNA, 22 nt, Human
uucugggggguggaggcaucug

SEQ ID NO: 217473 - RNA, 23 nt, Human
uugcagcccucuuggcugguccc

SEQ ID NO: 217474 - RNA, 18 nt, Human
uugcccaggcuggagugc

SEQ ID NO: 217475 - RNA, 23 nt, Human
uuguauuuuuaguagagaugggg

SEQ ID NO: 217476 - RNA, 19 nt, Human
uuuuguauuuuuaguagag

SEQ ID NO: 217477 - RNA, 20 nt, Human
uuuuguauuuuuaguagaga

SEQ ID NO: 217478 - RNA, 23 nt, Human
uuuuuaguagagaugggguuucg

SEQ ID NO: 217479 - RNA, 24 nt, Human
uuuuuaguagagaugggguuucgc

SEQ ID NO: 217480 - RNA, 18 nt, Human
aaaaaaaaaaaaaaagaa

SEQ ID NO: 217481 - RNA, 23 nt, Human
aaaagaaaaaaaaaaaaaaagaa

SEQ ID NO: 217482 - RNA, 23 nt, Human
aagcaagacguuuucucccaaag

SEQ ID NO: 217483 - RNA, 21 nt, Human
aagucccacuucuuucagugg

SEQ ID NO: 217484 - RNA, 24 nt, Human
aauaauaaaugaauccagaaagga

SEQ ID NO: 217485 - RNA, 18 nt, Human
aauuacuugaacccggga

SEQ ID NO: 217486 - RNA, 21 nt, Human
acacacugcacacacauggac

SEQ ID NO: 217487 - RNA, 18 nt, Human
acacacuugcacacacac

SEQ ID NO: 217488 - RNA, 20 nt, Human
acacgcacacgugcacacac

SEQ ID NO: 217489 - RNA, 20 nt, Human
acagagcgagacuccgucuc

SEQ ID NO: 217490 - RNA, 24 nt, Human
acagagcgagacuccgucucaaaa

SEQ ID NO: 217491 - RNA, 23 nt, Human
acaugcacgcacacgcacacgug

SEQ ID NO: 217492 - RNA, 26 nt, Human
acaugcacgcacacgcacacgugcac

SEQ ID NO: 217493 - RNA, 22 nt, Human
accacugaggaaccacaaggaa

SEQ ID NO: 217494 - RNA, 23 nt, Human
acgcacacgcacacgugcacaca

SEQ ID NO: 217495 - RNA, 27 nt, Human
acgcacauacacacuugcacacacaca

SEQ ID NO: 217496 - RNA, 22 nt, Human
acgggaagucccacuucuuuca

SEQ ID NO: 217497 - RNA, 18 nt, Human
acuaccuuuaaggaggug

SEQ ID NO: 217498 - RNA, 22 nt, Human
agaagaaguccaaggcaaagag

SEQ ID NO: 217499 - RNA, 23 nt, Human
agacaaaggccccuucccaagca

SEQ ID NO: 217500 - RNA, 22 nt, Human
agacagcagaauuacuugaacc

SEQ ID NO: 217501 - RNA, 24 nt, Human
agacagcagaauuacuugaacccg

SEQ ID NO: 217502 - RNA, 23 nt, Human
agacaggaagcaggcccauccca

SEQ ID NO: 217503 - RNA, 23 nt, Human
agacaggaagcaggcccauccca

SEQ ID NO: 217504 - RNA, 23 nt, Human
agagccucucaugcugugcgccc

SEQ ID NO: 217505 - RNA, 19 nt, Human
agaggcuacgcugccguca

SEQ ID NO: 217506 - RNA, 18 nt, Human
agauguggagcucugagc

SEQ ID NO: 217507 - RNA, 23 nt, Human
agccagcaauguugcccaacgcg

SEQ ID NO: 217508 - RNA, 24 nt, Human
agccugggugacagagcgagacuc

SEQ ID NO: 217509 - RNA, 25 nt, Human
aggaaaccucaaaacacaaucuuga

SEQ ID NO: 217510 - RNA, 18 nt, Human
aggaaccacaaggaagcc

SEQ ID NO: 217511 - RNA, 22 nt, Human
aggaagcaggcccaucccagcc

SEQ ID NO: 217512 - RNA, 19 nt, Human
aggagccagaaccuggaag

SEQ ID NO: 217513 - RNA, 19 nt, Human
aggaggcugagacagcaga

SEQ ID NO: 217514 - RNA, 24 nt, Human
aggcgacgggaagucccacuucuu

SEQ ID NO: 217515 - RNA, 21 nt, Human
aggcggagguugcagugagcc

SEQ ID NO: 217516 - RNA, 24 nt, Human
aggcggagguugcagugagccgag

SEQ ID NO: 217517 - RNA, 23 nt, Human
aggcuuuuuuauuuuuagaccuu

SEQ ID NO: 217518 - RNA, 21 nt, Human
agguagaaauugcaagucaag

SEQ ID NO: 217519 - RNA, 18 nt, Human
aguaaguggggaaaacuc

SEQ ID NO: 217520 - RNA, 24 nt, Human
aucacgccauugcacuccagccug

SEQ ID NO: 217521 - RNA, 21 nt, Human
augaagcccugagcugaugcu

SEQ ID NO: 217522 - RNA, 24 nt, Human
augaauccagaaaggaagcuucau

SEQ ID NO: 217523 - RNA, 21 nt, Human
auugcacuccagccuggguga

SEQ ID NO: 217524 - RNA, 24 nt, Human
auugcacuccagccugggugacag

SEQ ID NO: 217525 - RNA, 18 nt, Human
caagacaaaggccccuuc

SEQ ID NO: 217526 - RNA, 24 nt, Human
caagacaaaggccccuucccaagc

SEQ ID NO: 217527 - RNA, 22 nt, Human
cacacacacuggacacacucac

SEQ ID NO: 217528 - RNA, 31 nt, Human
cacacacaugcacacacucgcacacaugcag

SEQ ID NO: 217529 - RNA, 30 nt, Human
cacacacgcacauacacacuugcacacaca

SEQ ID NO: 217530 - RNA, 19 nt, Human
cacacagacacuugcacac

SEQ ID NO: 217531 - RNA, 29 nt, Human
cacacgcacauacacacuugcacacacac

SEQ ID NO: 217532 - RNA, 22 nt, Human
cacagagccucucaugcugugc

SEQ ID NO: 217533 - RNA, 29 nt, Human
cacaugcacacacucgcacacaugcacac

SEQ ID NO: 217534 - RNA, 23 nt, Human
cacaugcacacacugcacacaca

SEQ ID NO: 217535 - RNA, 19 nt, Human
caccacugaggaaccacaa

SEQ ID NO: 217536 - RNA, 26 nt, Human
cacgcacacgugcacacacuugcaca

SEQ ID NO: 217537 - RNA, 20 nt, Human
cacuccagccugggugacag

SEQ ID NO: 217538 - RNA, 22 nt, Human
cacuccagccugggugacagag

SEQ ID NO: 217539 - RNA, 23 nt, Human
cacuccagccugggugacagagc

SEQ ID NO: 217540 - RNA, 24 nt, Human
cacuccagccugggugacagagcg

SEQ ID NO: 217541 - RNA, 31 nt, Human
cacugcacacacauggacacacgcacacaca

SEQ ID NO: 217542 - RNA, 25 nt, Human
cacuugcacacacucgcacacacgc

SEQ ID NO: 217543 - RNA, 24 nt, Human
cagaaggcuuuuuuauuuuuagac

SEQ ID NO: 217544 - RNA, 23 nt, Human
cagcagaugcaauaacaagagau

SEQ ID NO: 217545 - RNA, 19 nt, Human
cagccagcaauguugccca

SEQ ID NO: 217546 - RNA, 22 nt, Human
cagccugggaaaucggaacuga

SEQ ID NO: 217547 - RNA, 20 nt, Human
cagcucugucgggaaggagc

SEQ ID NO: 217548 - RNA, 19 nt, Human
cagggacccuguccuaagg

SEQ ID NO: 217549 - RNA, 24 nt, Human
cagugguuccuccccgucaggccu

SEQ ID NO: 217550 - RNA, 19 nt, Human
cauugcacuccagccuggg

SEQ ID NO: 217551 - RNA, 19 nt, Human
cauugcacuccagccuggg

SEQ ID NO: 217552 - RNA, 21 nt, Human
cauugcacuccagccugggug

SEQ ID NO: 217553 - RNA, 22 nt, Human
cauugcacuccagccuggguga

SEQ ID NO: 217554 - RNA, 24 nt, Human
cauugcacuccagccugggugaca

SEQ ID NO: 217555 - RNA, 25 nt, Human
cauugcacuccagccugggugacag

SEQ ID NO: 217556 - RNA, 19 nt, Human
ccagccagcaauguugccc

SEQ ID NO: 217557 - RNA, 20 nt, Human
ccauugcacuccagccuggg

SEQ ID NO: 217558 - RNA, 21 nt, Human
ccauugcacuccagccugggu

SEQ ID NO: 217559 - RNA, 21 nt, Human
ccauugcacuccagccugggu

SEQ ID NO: 217560 - RNA, 22 nt, Human
ccauugcacuccagccugggug

SEQ ID NO: 217561 - RNA, 23 nt, Human
ccauugcacuccagccuggguga

SEQ ID NO: 217562 - RNA, 24 nt, Human
ccauugcacuccagccugggugac

SEQ ID NO: 217563 - RNA, 19 nt, Human
cccaaagacaggaagcagg

SEQ ID NO: 217564 - RNA, 22 nt, Human
cccaaagacaggaagcaggccc

SEQ ID NO: 217565 - RNA, 26 nt, Human
cccaagcaagacguuuucucccaaag

SEQ ID NO: 217566 - RNA, 19 nt, Human
cccacgaugaagcccugag

SEQ ID NO: 217567 - RNA, 24 nt, Human
cccacgcacaagggagcccaggca

SEQ ID NO: 217568 - RNA, 25 nt, Human
ccccugagcacacacaugcacacag

SEQ ID NO: 217569 - RNA, 21 nt, Human
ccccugagcacacacaugguc

SEQ ID NO: 217570 - RNA, 20 nt, Human
ccuacccacacgccagagac

SEQ ID NO: 217571 - RNA, 22 nt, Human
ccucccuagagggcgcuccucc

SEQ ID NO: 217572 - RNA, 22 nt, Human
ccugggugacagagcgagacuc

SEQ ID NO: 217573 - RNA, 21 nt, Human
ccuguagucccagcuacucag

SEQ ID NO: 217574 - RNA, 22 nt, Human
ccuguagucccagcuacucagg

SEQ ID NO: 217575 - RNA, 22 nt, Human
cgagugcacaugcacgcacacg

SEQ ID NO: 217576 - RNA, 22 nt, Human
cgcacacacacuggacacacuc

SEQ ID NO: 217577 - RNA, 23 nt, Human
cgcacacacgcacauacacacuu

SEQ ID NO: 217578 - RNA, 28 nt, Human
cgcacacacgcacauacacacuugcaca

SEQ ID NO: 217579 - RNA, 27 nt, Human
cgcacacaugcacacacugcacacaca

SEQ ID NO: 217580 - RNA, 26 nt, Human
cgcacacaugcacacacugcacacag

SEQ ID NO: 217581 - RNA, 23 nt, Human
cgcacacgcacacgugcacacac

SEQ ID NO: 217582 - RNA, 24 nt, Human
cgggaggcggagguugcagugagc

SEQ ID NO: 217583 - RNA, 20 nt, Human
cgggggagaagaaguccaag

SEQ ID NO: 217584 - RNA, 18 nt, Human
cucaaaaaaaaaaaaaag

SEQ ID NO: 217585 - RNA, 25 nt, Human
cucaaaaaaaaaaaaaagaaaagaa

SEQ ID NO: 217586 - RNA, 18 nt, Human
cucaaaacacaaucuuga

SEQ ID NO: 217587 - RNA, 21 nt, Human
cucacacaugggcgugcgagu

SEQ ID NO: 217588 - RNA, 19 nt, Human
cuccgucucaaaaaaaaaa

SEQ ID NO: 217589 - RNA, 21 nt, Human
cuccugguuccacccacggcu

SEQ ID NO: 217590 - RNA, 22 nt, Human
cuccugguuccacccacggcuu

SEQ ID NO: 217591 - RNA, 22 nt, Human
cugaugcugacaugacacuaau

SEQ ID NO: 217592 - RNA, 22 nt, Human
cuggccaccgagaggcagcucu

SEQ ID NO: 217593 - RNA, 21 nt, Human
cuucucacgcgaagcuggaga

SEQ ID NO: 217594 - RNA, 21 nt, Human
cuuguguguguguaugugugu

SEQ ID NO: 217595 - RNA, 21 nt, Human
gaagacagguggggaugagca

SEQ ID NO: 217596 - RNA, 21 nt, Human
gaagcccugagcugaugcuga

SEQ ID NO: 217597 - RNA, 21 nt, Human
gacacuaauucacuggaaacg

SEQ ID NO: 217598 - RNA, 24 nt, Human
gacagagcgagacuccgucucaaa

SEQ ID NO: 217599 - RNA, 23 nt, Human
gagaucacgccauugcacuccag

SEQ ID NO: 217600 - RNA, 18 nt, Human
gagccagaaccuggaagg

SEQ ID NO: 217601 - RNA, 22 nt, Human
gagguugcagugagccgagauc

SEQ ID NO: 217602 - RNA, 20 nt, Human
gaugucugagaaauauuggu

SEQ ID NO: 217603 - RNA, 30 nt, Human
gcacacacaugcacacacucgcacacaugg

SEQ ID NO: 217604 - RNA, 23 nt, Human
gcaccacugaggaaccacaagga

SEQ ID NO: 217605 - RNA, 24 nt, Human
gcacuccagccugggugacagagc

SEQ ID NO: 217606 - RNA, 18 nt, Human
gcagugguuccuccccgu

SEQ ID NO: 217607 - RNA, 19 nt, Human
gccauugcacuccagccug

SEQ ID NO: 217608 - RNA, 24 nt, Human
gccauugcacuccagccuggguga

SEQ ID NO: 217609 - RNA, 24 nt, Human
gcccugaagcccacccucugggau

SEQ ID NO: 217610 - RNA, 21 nt, Human
gccgcaccggggccauguccc

SEQ ID NO: 217611 - RNA, 22 nt, Human
gccgggcgagguggcgugugcc

SEQ ID NO: 217612 - RNA, 33 nt, Human
gcgugcgagugcacaugcacgcacacgcacagu

SEQ ID NO: 217613 - RNA, 22 nt, Human
gcuccagcaggccgcaggcucc

SEQ ID NO: 217614 - RNA, 20 nt, Human
ggaaacgagggugauggggg

SEQ ID NO: 217615 - RNA, 21 nt, Human
ggaaacgagggugaugggggc

SEQ ID NO: 217616 - RNA, 18 nt, Human
ggaaggaggugaaccagg

SEQ ID NO: 217617 - RNA, 21 nt, Human
ggagaagaaguccaaggcaaa

SEQ ID NO: 217618 - RNA, 24 nt, Human
ggagaagaaguccaaggcaaagag

SEQ ID NO: 217619 - RNA, 20 nt, Human
ggagaagggagacugaggcc

SEQ ID NO: 217620 - RNA, 24 nt, Human
ggagaagggagacugaggccuggg

SEQ ID NO: 217621 - RNA, 19 nt, Human
ggagacugaggccuggggg

SEQ ID NO: 217622 - RNA, 20 nt, Human
ggagacugaggccugggggu

SEQ ID NO: 217623 - RNA, 20 nt, Human
ggagguugcagugagccgag

SEQ ID NO: 217624 - RNA, 22 nt, Human
ggagguugcagugagccgagau

SEQ ID NO: 217625 - RNA, 23 nt, Human
ggagguugcagugagccgagauc

SEQ ID NO: 217626 - RNA, 24 nt, Human
ggagguugcagugagccgagauca

SEQ ID NO: 217627 - RNA, 31 nt, Human
ggcgugcgagugcacaugcacgcacacggug

SEQ ID NO: 217628 - RNA, 25 nt, Human
gggagaagaaguccaaggcaaagag

SEQ ID NO: 217629 - RNA, 27 nt, Human
gggagaagggagacugaggccuggggg

SEQ ID NO: 217630 - RNA, 18 nt, Human
gggagcuguugaagacag

SEQ ID NO: 217631 - RNA, 18 nt, Human
gggcagaguccugcuggc

SEQ ID NO: 217632 - RNA, 19 nt, Human
gggcgagguggcgugugcc

SEQ ID NO: 217633 - RNA, 18 nt, Human
ggggacuucucacgcgaa

SEQ ID NO: 217634 - RNA, 25 nt, Human
ggggagaagaaguccaaggcaaaga

SEQ ID NO: 217635 - RNA, 27 nt, Human
ggugaugggggcacagaagggagggcc

SEQ ID NO: 217636 - RNA, 23 nt, Human
gguggcgugugccuguaguccca

SEQ ID NO: 217637 - RNA, 20 nt, Human
gucucaaaaaaaaaaaaaag

SEQ ID NO: 217638 - RNA, 25 nt, Human
gugcacaugcacgcacacgcacacg

SEQ ID NO: 217639 - RNA, 19 nt, Human
guugcagugagccgagauc

SEQ ID NO: 217640 - RNA, 19 nt, Human
uaacaagagaugaaaauag

SEQ ID NO: 217641 - RNA, 27 nt, Human
uaacaagagaugaaaauaggggacccc

SEQ ID NO: 217642 - RNA, 21 nt, Human
uaaguaaguggggaaaacucg

SEQ ID NO: 217643 - RNA, 25 nt, Human
uacacacuugcacacacacaaaugg

SEQ ID NO: 217644 - RNA, 23 nt, Human
uacacucacacaauggaauacua

SEQ ID NO: 217645 - RNA, 24 nt, Human
uagaaagaucgggccgggcgaggu

SEQ ID NO: 217646 - RNA, 18 nt, Human
uauaaaagaaugaaaaag

SEQ ID NO: 217647 - RNA, 22 nt, Human
uauccauccaaaaaauuaaagu

SEQ ID NO: 217648 - RNA, 20 nt, Human
uaugguacacucacacaaug

SEQ ID NO: 217649 - RNA, 22 nt, Human
uauguguguggugugugcacac

SEQ ID NO: 217650 - RNA, 24 nt, Human
uauguguguggugugugcacacgu

SEQ ID NO: 217651 - RNA, 21 nt, Human
uauuguccauguauuucuagg

SEQ ID NO: 217652 - RNA, 22 nt, Human
ucacccacaggauugaccgucc

SEQ ID NO: 217653 - RNA, 23 nt, Human
ucacgccauugcacuccagccug

SEQ ID NO: 217654 - RNA, 25 nt, Human
uccaaaaaauuaaagucacauugaa

SEQ ID NO: 217655 - RNA, 19 nt, Human
uccacccacggcuuuucuc

SEQ ID NO: 217656 - RNA, 23 nt, Human
uccagccugggugacagagcgag

SEQ ID NO: 217657 - RNA, 24 nt, Human
uccagccugggugacagagcgaga

SEQ ID NO: 217658 - RNA, 22 nt, Human
ucccaaagacaggaagcaggcc

SEQ ID NO: 217659 - RNA, 18 nt, Human
ucccucucucuucaccca

SEQ ID NO: 217660 - RNA, 20 nt, Human
ucccucucucuucacccaca

SEQ ID NO: 217661 - RNA, 22 nt, Human
uccgucucaaaaaaaaaaaaaa

SEQ ID NO: 217662 - RNA, 23 nt, Human
uccgucucaaaaaaaaaaaaaag

SEQ ID NO: 217663 - RNA, 25 nt, Human
uccgucucaaaaaaaaaaaaaagaa

SEQ ID NO: 217664 - RNA, 22 nt, Human
ucgcgggggagaagaaguccaa

SEQ ID NO: 217665 - RNA, 23 nt, Human
ucucacucccaauucagccuggg

SEQ ID NO: 217666 - RNA, 23 nt, Human
ucucaugcugugcgcccugaagc

SEQ ID NO: 217667 - RNA, 23 nt, Human
ucucccaaagacaggaagcaggc

SEQ ID NO: 217668 - RNA, 21 nt, Human
ucugaaggaaaccucaaaaca

SEQ ID NO: 217669 - RNA, 23 nt, Human
ucugagcuccugggccguugcag

SEQ ID NO: 217670 - RNA, 21 nt, Human
ucuucugccccuggggcuggg

SEQ ID NO: 217671 - RNA, 24 nt, Human
ugaaaaaaagcaagauacagacca

SEQ ID NO: 217672 - RNA, 25 nt, Human
ugaaauaauaaaugaauccagaaag

SEQ ID NO: 217673 - RNA, 19 nt, Human
ugaagacagguggggauga

SEQ ID NO: 217674 - RNA, 25 nt, Human
ugacaagacaaaggccccuucccaa

SEQ ID NO: 217675 - RNA, 20 nt, Human
ugagacagcagaauuacuug

SEQ ID NO: 217676 - RNA, 24 nt, Human
ugagacagcagaauuacuugaacc

SEQ ID NO: 217677 - RNA, 27 nt, Human
ugagcacacacaugcacacacucgcac

SEQ ID NO: 217678 - RNA, 22 nt, Human
ugagccgagaucacgccauugc

SEQ ID NO: 217679 - RNA, 19 nt, Human
ugagcugaugcugacauga

SEQ ID NO: 217680 - RNA, 23 nt, Human
ugagcugaugcugacaugacacu

SEQ ID NO: 217681 - RNA, 18 nt, Human
ugcaagucaaguccuuug

SEQ ID NO: 217682 - RNA, 19 nt, Human
ugcaauaacaagagaugaa

SEQ ID NO: 217683 - RNA, 26 nt, Human
ugcacacacauggacacacgcacaca

SEQ ID NO: 217684 - RNA, 25 nt, Human
ugcacacacucacacaugggcgugc

SEQ ID NO: 217685 - RNA, 21 nt, Human
ugcacacacucacacauggug

SEQ ID NO: 217686 - RNA, 26 nt, Human
ugcacacacucgcacacacgcacaua

SEQ ID NO: 217687 - RNA, 29 nt, Human
ugcacacacugcacacacauggacacacg

SEQ ID NO: 217688 - RNA, 20 nt, Human
ugcacacagacacuugcaca

SEQ ID NO: 217689 - RNA, 22 nt, Human
ugcacacagacacuugcacaca

SEQ ID NO: 217690 - RNA, 24 nt, Human
ugcacacagacacuugcacacacu

SEQ ID NO: 217691 - RNA, 22 nt, Human
ugcacuccagccugggugacag

SEQ ID NO: 217692 - RNA, 24 nt, Human
ugcacuccagccugggugacagag

SEQ ID NO: 217693 - RNA, 18 nt, Human
ugccgucaccuacccaca

SEQ ID NO: 217694 - RNA, 24 nt, Human
ugccuguagucccagcuacucagg

SEQ ID NO: 217695 - RNA, 21 nt, Human
uggaaagggagacuuuucacu

SEQ ID NO: 217696 - RNA, 20 nt, Human
uggaagcccaagcccguccu

SEQ ID NO: 217697 - RNA, 20 nt, Human
uggaagcccaagcccguccu

SEQ ID NO: 217698 - RNA, 19 nt, Human
uggaaggagccagaaccug

SEQ ID NO: 217699 - RNA, 21 nt, Human
uggaaggaggugaaccagggg

SEQ ID NO: 217700 - RNA, 20 nt, Human
uggaauacuaugcagcggua

SEQ ID NO: 217701 - RNA, 25 nt, Human
uggacacacgcacacacacuggaca

SEQ ID NO: 217702 - RNA, 26 nt, Human
uggacacacgcacacacacuggacac

SEQ ID NO: 217703 - RNA, 24 nt, Human
uggcgugugccuguagucccagcu

SEQ ID NO: 217704 - RNA, 18 nt, Human
uggggaaaacucgcgggg

SEQ ID NO: 217705 - RNA, 19 nt, Human
uggucugggcagaguccug

SEQ ID NO: 217706 - RNA, 27 nt, Human
ugguguggaggaggcuccugguuccac

SEQ ID NO: 217707 - RNA, 26 nt, Human
ugugcacacgugcauacacuugcaca

SEQ ID NO: 217708 - RNA, 21 nt, Human
ugugcagaacccagcaugcag

SEQ ID NO: 217709 - RNA, 20 nt, Human
uguggagcucugagcuccug

SEQ ID NO: 217710 - RNA, 20 nt, Human
uguguaaaaaagcuugugug

SEQ ID NO: 217711 - RNA, 26 nt, Human
ugugugcacacgugcauacacuugca

SEQ ID NO: 217712 - RNA, 22 nt, Human
uguguggugugugcacacgugc

SEQ ID NO: 217713 - RNA, 27 nt, Human
uguguggugugugcacacgugcauaca

SEQ ID NO: 217714 - RNA, 22 nt, Human
uguguguauguguguggugugu

SEQ ID NO: 217715 - RNA, 25 nt, Human
uguguguauguguguggugugugca

SEQ ID NO: 217716 - RNA, 20 nt, Human
uguguguggugugugcacac

SEQ ID NO: 217717 - RNA, 19 nt, Human
uguguguguguaugugugu

SEQ ID NO: 217718 - RNA, 20 nt, Human
uguguguguguaugugugug

SEQ ID NO: 217719 - RNA, 20 nt, Human
uguguguguguaugugugug

SEQ ID NO: 217720 - RNA, 24 nt, Human
uuacuugaacccgggaggcggagg

SEQ ID NO: 217721 - RNA, 21 nt, Human
uucacuggaaacgagggugau

SEQ ID NO: 217722 - RNA, 24 nt, Human
uugaacccgggaggcggagguugc

SEQ ID NO: 217723 - RNA, 18 nt, Human
uugcagugagccgagauc

SEQ ID NO: 217724 - RNA, 20 nt, Human
uugcagugagccgagaucac

SEQ ID NO: 217725 - RNA, 21 nt, Human
uugcagugagccgagaucacg

SEQ ID NO: 217726 - RNA, 27 nt, Human
uuuuuuuuuuuuuuuuuuuuuuugggg

SEQ ID NO: 217727 - RNA, 22 nt, Human
aaaaaucuauacuccaagaccc

SEQ ID NO: 217728 - RNA, 19 nt, Human
aaaaggaauagauggcaca

SEQ ID NO: 217729 - RNA, 25 nt, Human
aaaaucccaccauuuucuucagaaa

SEQ ID NO: 217730 - RNA, 25 nt, Human
aaacaacaacaacaacaacaacaac

SEQ ID NO: 217731 - RNA, 23 nt, Human
aaacagaaguguaauaggauccu

SEQ ID NO: 217732 - RNA, 23 nt, Human
aaacagaaguguaauaggaucua

SEQ ID NO: 217733 - RNA, 18 nt, Human
aaauaugguaguauuuca

SEQ ID NO: 217734 - RNA, 24 nt, Human
aacaacaacaacaacaacaacaac

SEQ ID NO: 217735 - RNA, 27 nt, Human
aacaacaacaacaacaacaacaacaac

SEQ ID NO: 217736 - RNA, 27 nt, Human
aacaacaacaacaacaacaacaacaac

SEQ ID NO: 217737 - RNA, 22 nt, Human
aacaugauguaauugcacaaaa

SEQ ID NO: 217738 - RNA, 21 nt, Human
aagauguagcauaacuuaaaa

SEQ ID NO: 217739 - RNA, 20 nt, Human
aauagaagguuuugucuaga

SEQ ID NO: 217740 - RNA, 27 nt, Human
acaacaacaacaaauaaaguuccguac

SEQ ID NO: 217741 - RNA, 19 nt, Human
acaacaacaacaacaacaa

SEQ ID NO: 217742 - RNA, 19 nt, Human
acaacaacaacaacaacaa

SEQ ID NO: 217743 - RNA, 19 nt, Human
acaacaacaacaacaacaa

SEQ ID NO: 217744 - RNA, 19 nt, Human
acaacaacaacaacaacaa

SEQ ID NO: 217745 - RNA, 19 nt, Human
acaacaacaacaacaacaa

SEQ ID NO: 217746 - RNA, 23 nt, Human
acaacaacaacaacaacaaauaa

SEQ ID NO: 217747 - RNA, 22 nt, Human
acaacaacaacaacaacaacaa

SEQ ID NO: 217748 - RNA, 22 nt, Human
acaacaacaacaacaacaacaa

SEQ ID NO: 217749 - RNA, 24 nt, Human
acagagccauauaaaacuacaacu

SEQ ID NO: 217750 - RNA, 22 nt, Human
acagcaucuuucaaucuccaau

SEQ ID NO: 217751 - RNA, 18 nt, Human
acaguaacugaaggaggu

SEQ ID NO: 217752 - RNA, 18 nt, Human
accaaugucaaauguuuu

SEQ ID NO: 217753 - RNA, 21 nt, Human
agaaaagagaaacagaaaaaa

SEQ ID NO: 217754 - RNA, 21 nt, Human
agaaacagaaaaaaugacuca

SEQ ID NO: 217755 - RNA, 24 nt, Human
agaaguguaauaggaucuaccaga

SEQ ID NO: 217756 - RNA, 21 nt, Human
agagaaaagagaaacagaaaa

SEQ ID NO: 217757 - RNA, 23 nt, Human
agagaaaagagaaacagaaaaaa

SEQ ID NO: 217758 - RNA, 20 nt, Human
agaugccauaaaaggaauag

SEQ ID NO: 217759 - RNA, 18 nt, Human
agccauuugugauuaugg

SEQ ID NO: 217760 - RNA, 21 nt, Human
agccgagacugauuuuacaca

SEQ ID NO: 217761 - RNA, 24 nt, Human
aggugaaauuaaacaauuacacaa

SEQ ID NO: 217762 - RNA, 19 nt, Human
aguaaaucaggcacuaccu

SEQ ID NO: 217763 - RNA, 21 nt, Human
auaucauguuaauuucuaaau

SEQ ID NO: 217764 - RNA, 25 nt, Human
aucaauaucaguaucaauauuucuu

SEQ ID NO: 217765 - RNA, 18 nt, Human
aucucaaagaacuacaca

SEQ ID NO: 217766 - RNA, 20 nt, Human
augagugauuaaaaaaaucc

SEQ ID NO: 217767 - RNA, 23 nt, Human
caaaauaucaauucugaaauaaa

SEQ ID NO: 217768 - RNA, 18 nt, Human
caacaacaacaacaacaa

SEQ ID NO: 217769 - RNA, 18 nt, Human
caacaacaacaacaacaa

SEQ ID NO: 217770 - RNA, 18 nt, Human
caacaacaacaacaacaa

SEQ ID NO: 217771 - RNA, 18 nt, Human
caacaacaacaacaacaa

SEQ ID NO: 217772 - RNA, 25 nt, Human
caacaacaacaacaacaacaaauaa

SEQ ID NO: 217773 - RNA, 23 nt, Human
caacaacaacaacaacaacaaca

SEQ ID NO: 217774 - RNA, 23 nt, Human
caacaacaacaacaacaacaaca

SEQ ID NO: 217775 - RNA, 25 nt, Human
caacaacaacaacaacaacaacaaa

SEQ ID NO: 217776 - RNA, 23 nt, Human
cagagccauauaaaacuacaacu

SEQ ID NO: 217777 - RNA, 24 nt, Human
cauugaauaaaaacuaucccuuga

SEQ ID NO: 217778 - RNA, 20 nt, Human
ccaagccgggagcgguagcc

SEQ ID NO: 217779 - RNA, 28 nt, Human
ccaaugucaaauguuuuuaauaucuucu

SEQ ID NO: 217780 - RNA, 19 nt, Human
ccuaaaaacacaagucacc

SEQ ID NO: 217781 - RNA, 19 nt, Human
cgccaagccgggagcggua

SEQ ID NO: 217782 - RNA, 21 nt, Human
cuagaguccuaccuuguauac

SEQ ID NO: 217783 - RNA, 22 nt, Human
cuaguucauucauguuuucuua

SEQ ID NO: 217784 - RNA, 20 nt, Human
cuaucucaaagaacuacaca

SEQ ID NO: 217785 - RNA, 18 nt, Human
cugcuuuaaaacaacaac

SEQ ID NO: 217786 - RNA, 21 nt, Human
cuugacccauucucaguaaca

SEQ ID NO: 217787 - RNA, 26 nt, Human
gacugcuuuaaaacaacaacaacaac

SEQ ID NO: 217788 - RNA, 23 nt, Human
gcuaaaauagaagguuuugucua

SEQ ID NO: 217789 - RNA, 23 nt, Human
gugggucaagauguagcauaacu

SEQ ID NO: 217790 - RNA, 18 nt, Human
uaaaaacacaagucaccc

SEQ ID NO: 217791 - RNA, 21 nt, Human
uaaaacacagcaaaauaguca

SEQ ID NO: 217792 - RNA, 18 nt, Human
uaaaguaguaaaucaggc

SEQ ID NO: 217793 - RNA, 22 nt, Human
uaaaguaguaaaucaggcacua

SEQ ID NO: 217794 - RNA, 19 nt, Human
uaaauagccagacuaaaac

SEQ ID NO: 217795 - RNA, 22 nt, Human
uaaaucauauauuccucuagaa

SEQ ID NO: 217796 - RNA, 22 nt, Human
uaacuaaaaacucugcucuacu

SEQ ID NO: 217797 - RNA, 19 nt, Human
uaacugaucaucaucccca

SEQ ID NO: 217798 - RNA, 20 nt, Human
uaagcaacuaucucaaagaa

SEQ ID NO: 217799 - RNA, 22 nt, Human
uacuaaaacaaaauauuguacc

SEQ ID NO: 217800 - RNA, 18 nt, Human
uagagauuuaaaguuuuc

SEQ ID NO: 217801 - RNA, 24 nt, Human
uagcacuaucagcaguaaagccuu

SEQ ID NO: 217802 - RNA, 25 nt, Human
uagccagacuaaaacaauggaauaa

SEQ ID NO: 217803 - RNA, 20 nt, Human
uaucagcaguaaagccuugg

SEQ ID NO: 217804 - RNA, 19 nt, Human
ucuaacacuuuugccaaag

SEQ ID NO: 217805 - RNA, 22 nt, Human
ucuacagagccauauaaaacua

SEQ ID NO: 217806 - RNA, 24 nt, Human
ugacagccgagacugauuuuacac

SEQ ID NO: 217807 - RNA, 24 nt, Human
ugccauaaaaggaauagauggcac

SEQ ID NO: 217808 - RNA, 22 nt, Human
uggaauaaauaugcuuuggaaa

SEQ ID NO: 217809 - RNA, 20 nt, Human
uggaugguaucauguaugug

SEQ ID NO: 217810 - RNA, 18 nt, Human
uggcacaaaagcaaauuc

SEQ ID NO: 217811 - RNA, 23 nt, Human
uggcacaaaagcaaauucuaaca

SEQ ID NO: 217812 - RNA, 19 nt, Human
ugguuaaugccaauuagca

SEQ ID NO: 217813 - RNA, 24 nt, Human
ugucaacuguaaagauuucucacu

SEQ ID NO: 217814 - RNA, 21 nt, Human
ugucugaacuuauuuauaagg

SEQ ID NO: 217815 - RNA, 22 nt, Human
uguggcuuuuauuaauaauccu

SEQ ID NO: 217816 - RNA, 19 nt, Human
uuaaaacaacaacaacaac

SEQ ID NO: 217817 - RNA, 26 nt, Human
uuaaucaugauaaaaaaaaaucccac

SEQ ID NO: 217818 - RNA, 22 nt, Human
uucaaaauggauuuuuauucuc

SEQ ID NO: 217819 - RNA, 23 nt, Human
uugaaggauuugaccuaaaauuu

SEQ ID NO: 217820 - RNA, 20 nt, Human
uugcuaauucuaguggguca

SEQ ID NO: 217821 - RNA, 20 nt, Human
uuuaaaguuuucauagggca

SEQ ID NO: 217822 - RNA, 24 nt, Human
aaaaggcaaauugaccgcuaaaac

SEQ ID NO: 217823 - RNA, 22 nt, Human
aaagaugaauacacaaaggcca

SEQ ID NO: 217824 - RNA, 24 nt, Human
aaaggucaaaaaggcacaauguga

SEQ ID NO: 217825 - RNA, 23 nt, Human
aaauacugaagauuggcauugcu

SEQ ID NO: 217826 - RNA, 21 nt, Human
aagugaacuguuaaaacuaaa

SEQ ID NO: 217827 - RNA, 18 nt, Human
aauggaaucauauaguau

SEQ ID NO: 217828 - RNA, 21 nt, Human
acaagcuugguauauaaccuu

SEQ ID NO: 217829 - RNA, 19 nt, Human
acucauaaaaaagucuuac

SEQ ID NO: 217830 - RNA, 22 nt, Human
acuucaaagaaaaaguacucau

SEQ ID NO: 217831 - RNA, 21 nt, Human
acuuuggauucugcauaacug

SEQ ID NO: 217832 - RNA, 23 nt, Human
agacauuaaacaaaauaaaaaua

SEQ ID NO: 217833 - RNA, 23 nt, Human
agacucgcguaggugagagcugu

SEQ ID NO: 217834 - RNA, 26 nt, Human
agcaaccacugauuuuugccccuaca

SEQ ID NO: 217835 - RNA, 22 nt, Human
agcuuuaaaaaaaguuaccaaa

SEQ ID NO: 217836 - RNA, 20 nt, Human
aggaagaaaaggucaaaaag

SEQ ID NO: 217837 - RNA, 20 nt, Human
aggcacaaugugaccuuagc

SEQ ID NO: 217838 - RNA, 19 nt, Human
aggggccguucgggcccgg

SEQ ID NO: 217839 - RNA, 18 nt, Human
aguuaccaaaaaaaaaua

SEQ ID NO: 217840 - RNA, 26 nt, Human
augaaaaggcagauuuaggaucaaaa

SEQ ID NO: 217841 - RNA, 19 nt, Human
augaaccagaauauacaug

SEQ ID NO: 217842 - RNA, 19 nt, Human
caaaagguccccauucagc

SEQ ID NO: 217843 - RNA, 25 nt, Human
caaacaaauacauuaaaagauuaga

SEQ ID NO: 217844 - RNA, 22 nt, Human
caaagcacucaaugcuaacaua

SEQ ID NO: 217845 - RNA, 18 nt, Human
caaggacuuuuuagcaga

SEQ ID NO: 217846 - RNA, 21 nt, Human
caagucaucccaaggaagauc

SEQ ID NO: 217847 - RNA, 25 nt, Human
caauccuuaacuagcuagcaggaca

SEQ ID NO: 217848 - RNA, 27 nt, Human
cagcaaauacuuuguaaaguauggccu

SEQ ID NO: 217849 - RNA, 19 nt, Human
cagccccuagcaaccacug

SEQ ID NO: 217850 - RNA, 21 nt, Human
cagccccuagcaaccacugau

SEQ ID NO: 217851 - RNA, 22 nt, Human
cccccgcagcuccggcagcccc

SEQ ID NO: 217852 - RNA, 18 nt, Human
cccgcagcuccggcagcc

SEQ ID NO: 217853 - RNA, 18 nt, Human
cccucauacuucggauug

SEQ ID NO: 217854 - RNA, 18 nt, Human
cccucauacuucggauug

SEQ ID NO: 217855 - RNA, 18 nt, Human
ccgacgugacagcgccca

SEQ ID NO: 217856 - RNA, 20 nt, Human
ccgcagcuccggcagccccg

SEQ ID NO: 217857 - RNA, 21 nt, Human
ccuacaguuuugcuuuuccag

SEQ ID NO: 217858 - RNA, 19 nt, Human
ccucccgggugucgggcgc

SEQ ID NO: 217859 - RNA, 18 nt, Human
ccucuguggucaacacuu

SEQ ID NO: 217860 - RNA, 21 nt, Human
cgcgcggcguccggggcccgg

SEQ ID NO: 217861 - RNA, 18 nt, Human
cgcggcguccggggcccg

SEQ ID NO: 217862 - RNA, 21 nt, Human
cggugggcucgggccugcugu

SEQ ID NO: 217863 - RNA, 21 nt, Human
cguauuuuacaccagcaacuc

SEQ ID NO: 217864 - RNA, 21 nt, Human
cguucggaacgcggcugggcu

SEQ ID NO: 217865 - RNA, 26 nt, Human
cuaacaggcaaauagcaaaauaacag

SEQ ID NO: 217866 - RNA, 22 nt, Human
cucaacauacuugucuuucaga

SEQ ID NO: 217867 - RNA, 19 nt, Human
cucauacuucggauugacc

SEQ ID NO: 217868 - RNA, 19 nt, Human
cucauacuucggauugacc

SEQ ID NO: 217869 - RNA, 24 nt, Human
cucccgcgggcuggcggggccucc

SEQ ID NO: 217870 - RNA, 21 nt, Human
cucccgggugucgggcgcggc

SEQ ID NO: 217871 - RNA, 25 nt, Human
gaaacucucaucaugcucauuacuu

SEQ ID NO: 217872 - RNA, 22 nt, Human
gaacuguuaaaacuaaaggcac

SEQ ID NO: 217873 - RNA, 22 nt, Human
gaagaggugauagaaagcacca

SEQ ID NO: 217874 - RNA, 21 nt, Human
gaugaaaaggcagauuuagga

SEQ ID NO: 217875 - RNA, 20 nt, Human
gcuaaaacuucaaagaaaaa

SEQ ID NO: 217876 - RNA, 21 nt, Human
ggccugcuguuccgcgacucc

SEQ ID NO: 217877 - RNA, 21 nt, Human
ggcguccggggcccggcgcgg

SEQ ID NO: 217878 - RNA, 23 nt, Human
gggaauaaaauacuuagaaagga

SEQ ID NO: 217879 - RNA, 20 nt, Human
gugaacuguuaaaacuaaag

SEQ ID NO: 217880 - RNA, 19 nt, Human
uaaaaaagucuuaccccaa

SEQ ID NO: 217881 - RNA, 18 nt, Human
uaaaaauacugaagauug

SEQ ID NO: 217882 - RNA, 24 nt, Human
uaaauaacuucaguaaauagcacu

SEQ ID NO: 217883 - RNA, 22 nt, Human
uaacagaaacucucaucaugcu

SEQ ID NO: 217884 - RNA, 19 nt, Human
uaacugugacuauggaaau

SEQ ID NO: 217885 - RNA, 20 nt, Human
uaagaaaguuuacaaauuug

SEQ ID NO: 217886 - RNA, 22 nt, Human
uaaguaacucuuaaaauggcac

SEQ ID NO: 217887 - RNA, 25 nt, Human
uaccccaaaauugcaaacaaauaca

SEQ ID NO: 217888 - RNA, 18 nt, Human
uaccccacccucugacuc

SEQ ID NO: 217889 - RNA, 18 nt, Human
uaccccacccucugacuc

SEQ ID NO: 217890 - RNA, 24 nt, Human
uacucauaaaaaagucuuacccca

SEQ ID NO: 217891 - RNA, 18 nt, Human
uagcaaaauaacagauuu

SEQ ID NO: 217892 - RNA, 20 nt, Human
uagcaaaauaacagauuuaa

SEQ ID NO: 217893 - RNA, 23 nt, Human
uauguaaauagugcuaaaucaag

SEQ ID NO: 217894 - RNA, 26 nt, Human
uauuguacauuuucaaaaccugcaca

SEQ ID NO: 217895 - RNA, 22 nt, Human
ucagucaugucuaacaggcaaa

SEQ ID NO: 217896 - RNA, 22 nt, Human
uccaggaagaaaaggucaaaaa

SEQ ID NO: 217897 - RNA, 21 nt, Human
ucccgcgggcuggcggggccu

SEQ ID NO: 217898 - RNA, 19 nt, Human
ucggaacgcggcugggcug

SEQ ID NO: 217899 - RNA, 20 nt, Human
ucucaucaugcucauuacuu

SEQ ID NO: 217900 - RNA, 21 nt, Human
ucucccgcgggcuggcggggc

SEQ ID NO: 217901 - RNA, 23 nt, Human
ucuuuuggcuucccugggccaca

SEQ ID NO: 217902 - RNA, 24 nt, Human
ugaaacaagaugggcaacucaaau

SEQ ID NO: 217903 - RNA, 25 nt, Human
ugaaacaagaugggcaacucaaaug

SEQ ID NO: 217904 - RNA, 20 nt, Human
ugaaggcauaaaaguuacca

SEQ ID NO: 217905 - RNA, 22 nt, Human
ugcauagccacaguauaacuuc

SEQ ID NO: 217906 - RNA, 19 nt, Human
uggcauugcuuucuuguau

SEQ ID NO: 217907 - RNA, 20 nt, Human
uggcuucccugggccacacu

SEQ ID NO: 217908 - RNA, 21 nt, Human
uggugagaaguaaacauacag

SEQ ID NO: 217909 - RNA, 23 nt, Human
uggugagaaguaaacauacagug

SEQ ID NO: 217910 - RNA, 24 nt, Human
uguaaagugaaggcauaaaaguua

SEQ ID NO: 217911 - RNA, 25 nt, Human
uguaaauagugcuaaaucaaggacu

SEQ ID NO: 217912 - RNA, 24 nt, Human
ugugaaacaagaugggcaacucaa

SEQ ID NO: 217913 - RNA, 19 nt, Human
uguggucaacacuuucccc

SEQ ID NO: 217914 - RNA, 25 nt, Human
uguuacggcacucuuauaaauagga

SEQ ID NO: 217915 - RNA, 22 nt, Human
uucaaagcacucaaugcuaaca

SEQ ID NO: 217916 - RNA, 18 nt, Human
uucccccauuccagcccc

SEQ ID NO: 217917 - RNA, 18 nt, Human
uucccugggccacacugg

SEQ ID NO: 217918 - RNA, 24 nt, Human
uuggcuucccugggccacacuggc

SEQ ID NO: 217919 - RNA, 21 nt, Human
uugugggauuugcacgggcag

SEQ ID NO: 217920 - RNA, 27 nt, Human
uuuaaaacaauccuuaacuagcuagca

SEQ ID NO: 217921 - RNA, 23 nt, Human
uuucuuguaucaaaagaugaaua

SEQ ID NO: 217922 - RNA, 19 nt, Human
uuuggauucugcauaacug

SEQ ID NO: 217923 - RNA, 20 nt, Human
uuuggcuucccugggccaca

SEQ ID NO: 217924 - RNA, 20 nt, Human
uuuuaaagaaagaagcagcu

SEQ ID NO: 217925 - RNA, 20 nt, Human
uuuuuguuuguuuguuuuaa

SEQ ID NO: 217926 - RNA, 20 nt, Human
aaaaaaacagcaugguuugg

SEQ ID NO: 217927 - RNA, 23 nt, Human
aaaaaacagcaugguuuggacaa

SEQ ID NO: 217928 - RNA, 23 nt, Human
aacaauauccugguaucuaagau

SEQ ID NO: 217929 - RNA, 19 nt, Human
cacauggccaacaauaucc

SEQ ID NO: 217930 - RNA, 18 nt, Human
ccaacaauauccugguau

SEQ ID NO: 217931 - RNA, 18 nt, Human
ccccuccuucagccuccu

SEQ ID NO: 217932 - RNA, 21 nt, Human
cccuccuucagccuccugcug

SEQ ID NO: 217933 - RNA, 23 nt, Human
uaagauucuaagggaaucauuga

SEQ ID NO: 217934 - RNA, 20 nt, Human
ugguuuggacaauuuuguuc

SEQ ID NO: 217935 - RNA, 21 nt, Human
uuggacaauuuuguucucccc

SEQ ID NO: 217936 - RNA, 22 nt, Human
uuguucuccccuccuucagccu

SEQ ID NO: 217937 - RNA, 23 nt, Human
aaacacgcaccuaaccucaccaa

SEQ ID NO: 217938 - RNA, 19 nt, Human
aaucagacugauguccuga

SEQ ID NO: 217939 - RNA, 25 nt, Human
accucaccaaccucaagcccuccuc

SEQ ID NO: 217940 - RNA, 21 nt, Human
agcuguggccaagccaugucu

SEQ ID NO: 217941 - RNA, 23 nt, Human
augguggguccugacggccuugu

SEQ ID NO: 217942 - RNA, 18 nt, Human
cagaguggagcugucccc

SEQ ID NO: 217943 - RNA, 19 nt, Human
caggaaacacgcaccuaac

SEQ ID NO: 217944 - RNA, 22 nt, Human
cauccucaagagcuguggccaa

SEQ ID NO: 217945 - RNA, 18 nt, Human
ccagucagaguggagcug

SEQ ID NO: 217946 - RNA, 20 nt, Human
ccccgacgagcccccagaag

SEQ ID NO: 217947 - RNA, 19 nt, Human
ccgcggcggugcuccuggc

SEQ ID NO: 217948 - RNA, 25 nt, Human
ccucaccaaccucaagcccuccuca

SEQ ID NO: 217949 - RNA, 21 nt, Human
cgacgagcccccagaagcacc

SEQ ID NO: 217950 - RNA, 22 nt, Human
cuaaccucaccaaccucaagcc

SEQ ID NO: 217951 - RNA, 20 nt, Human
ggaaacacgcaccuaaccuc

SEQ ID NO: 217952 - RNA, 22 nt, Human
ggagcuguccccccgacgagcc

SEQ ID NO: 217953 - RNA, 18 nt, Human
ggggcagacauggugggu

SEQ ID NO: 217954 - RNA, 18 nt, Human
guccugacggccuugucu

SEQ ID NO: 217955 - RNA, 20 nt, Human
ucccucggugugcuggaguc

SEQ ID NO: 217956 - RNA, 19 nt, Human
ucuccaugcaaagacugug

SEQ ID NO: 217957 - RNA, 19 nt, Human
uggcugucauuuugagggc

SEQ ID NO: 217958 - RNA, 21 nt, Human
uuugagggcggaaaauaacug

SEQ ID NO: 217959 - RNA, 19 nt, Human
aaagaacagucccucuucc

SEQ ID NO: 217960 - RNA, 20 nt, Human
aaagaauuagcuugcaagga

SEQ ID NO: 217961 - RNA, 20 nt, Human
aacacacagacccccacaua

SEQ ID NO: 217962 - RNA, 23 nt, Human
aaccuaccccacucugagcccca

SEQ ID NO: 217963 - RNA, 21 nt, Human
aacucaugggaauaauuccuu

SEQ ID NO: 217964 - RNA, 18 nt, Human
aagaacaccugcucagcu

SEQ ID NO: 217965 - RNA, 22 nt, Human
aaggagcucagcuuaucaggac

SEQ ID NO: 217966 - RNA, 24 nt, Human
acaaaccuccagaguagagcugcc

SEQ ID NO: 217967 - RNA, 20 nt, Human
acaacacacacacauaaaca

SEQ ID NO: 217968 - RNA, 22 nt, Human
acaaggcagccaagagguagaa

SEQ ID NO: 217969 - RNA, 20 nt, Human
acacacaacacacacacaua

SEQ ID NO: 217970 - RNA, 24 nt, Human
acacacaacacacacacauaaaca

SEQ ID NO: 217971 - RNA, 21 nt, Human
acacacacacauaaacacaca

SEQ ID NO: 217972 - RNA, 21 nt, Human
acacacagacccacacuucca

SEQ ID NO: 217973 - RNA, 20 nt, Human
acacucccacacacaacaca

SEQ ID NO: 217974 - RNA, 22 nt, Human
agacauccccagcucauagcaa

SEQ ID NO: 217975 - RNA, 21 nt, Human
agagauggugcuggccuaagg

SEQ ID NO: 217976 - RNA, 28 nt, Human
agccaagagguagaagguaaagggaccc

SEQ ID NO: 217977 - RNA, 24 nt, Human
agcucauagcaaaugucuacagca

SEQ ID NO: 217978 - RNA, 19 nt, Human
aggaaagcuggcuucucac

SEQ ID NO: 217979 - RNA, 18 nt, Human
aggcauucugggacaaag

SEQ ID NO: 217980 - RNA, 21 nt, Human
aggccaugaaugaccccugag

SEQ ID NO: 217981 - RNA, 24 nt, Human
aggguagagccaaggcuugguguc

SEQ ID NO: 217982 - RNA, 19 nt, Human
agguaaagagauggugcug

SEQ ID NO: 217983 - RNA, 22 nt, Human
agugacuugcugugaaugaugc

SEQ ID NO: 217984 - RNA, 21 nt, Human
aguucagcucucccugacucc

SEQ ID NO: 217985 - RNA, 21 nt, Human
auacagcacaccaaggcucag

SEQ ID NO: 217986 - RNA, 24 nt, Human
aucuauccccauagccuucuauca

SEQ ID NO: 217987 - RNA, 18 nt, Human
augaacucaggguagagc

SEQ ID NO: 217988 - RNA, 20 nt, Human
augaccccugaguggcccuc

SEQ ID NO: 217989 - RNA, 21 nt, Human
augagagacauccccagcuca

SEQ ID NO: 217990 - RNA, 20 nt, Human
caaaugucuacagcaguggu

SEQ ID NO: 217991 - RNA, 21 nt, Human
caacccauagaagaacaggcc

SEQ ID NO: 217992 - RNA, 24 nt, Human
cacacaacacacacacauaaacac

SEQ ID NO: 217993 - RNA, 23 nt, Human
cacacacaacacacacacauaaa

SEQ ID NO: 217994 - RNA, 26 nt, Human
cacacacaacacacacacauaaacac

SEQ ID NO: 217995 - RNA, 18 nt, Human
cacuggccagugacuugc

SEQ ID NO: 217996 - RNA, 21 nt, Human
cagacccacacuuccacauac

SEQ ID NO: 217997 - RNA, 23 nt, Human
cagcuuaucaggacacaucacaa

SEQ ID NO: 217998 - RNA, 18 nt, Human
caggaaagguccaaugug

SEQ ID NO: 217999 - RNA, 24 nt, Human
cagggacaauggccugaugaggaa

SEQ ID NO: 218000 - RNA, 23 nt, Human
caucacaauuuuaaauuacacac

SEQ ID NO: 218001 - RNA, 21 nt, Human
caugagaaaaauaaaauaaaa

SEQ ID NO: 218002 - RNA, 24 nt, Human
caugagaaaaauaaaauaaaauug

SEQ ID NO: 218003 - RNA, 26 nt, Human
ccaauguguccacacaucuaucccca

SEQ ID NO: 218004 - RNA, 27 nt, Human
cccaaccuaccccacucugagccccaa

SEQ ID NO: 218005 - RNA, 21 nt, Human
cccacacacaacacacacaca

SEQ ID NO: 218006 - RNA, 23 nt, Human
cccacacacaacacacacacaua

SEQ ID NO: 218007 - RNA, 23 nt, Human
cccacauacacacacacagaccc

SEQ ID NO: 218008 - RNA, 24 nt, Human
cccacauacacacacacagaccca

SEQ ID NO: 218009 - RNA, 19 nt, Human
cccacucugagccccaaau

SEQ ID NO: 218010 - RNA, 26 nt, Human
ccccacucugagccccaaaucccucc

SEQ ID NO: 218011 - RNA, 20 nt, Human
cccccacauacacacacaca

SEQ ID NO: 218012 - RNA, 22 nt, Human
cccccacauacacacacacaga

SEQ ID NO: 218013 - RNA, 24 nt, Human
cccccaggccaugaaugaccccug

SEQ ID NO: 218014 - RNA, 21 nt, Human
ccccucacagauccagccacu

SEQ ID NO: 218015 - RNA, 18 nt, Human
ccccugaguggcccagac

SEQ ID NO: 218016 - RNA, 20 nt, Human
cccgggcugccaagcccagc

SEQ ID NO: 218017 - RNA, 20 nt, Human
ccucaagcuaagcaggaaga

SEQ ID NO: 218018 - RNA, 19 nt, Human
ccucuggaaugagaggccu

SEQ ID NO: 218019 - RNA, 27 nt, Human
ccucuggaaugagaggccucagcccuu

SEQ ID NO: 218020 - RNA, 25 nt, Human
ccucuguaaacaugauggcagggac

SEQ ID NO: 218021 - RNA, 19 nt, Human
ccuucuaucaugagagagc

SEQ ID NO: 218022 - RNA, 21 nt, Human
cggccugagggaggggaaagg

SEQ ID NO: 218023 - RNA, 23 nt, Human
cucagcuuaucaggacacaucac

SEQ ID NO: 218024 - RNA, 19 nt, Human
cucccaaccuaccccacuc

SEQ ID NO: 218025 - RNA, 19 nt, Human
cuccuucggccugagggag

SEQ ID NO: 218026 - RNA, 21 nt, Human
cugcucagcuccauagucacc

SEQ ID NO: 218027 - RNA, 19 nt, Human
cuucggccugagggagggg

SEQ ID NO: 218028 - RNA, 18 nt, Human
cuugcaaggacuucccuu

SEQ ID NO: 218029 - RNA, 19 nt, Human
cuugggcauuugggggugg

SEQ ID NO: 218030 - RNA, 18 nt, Human
gaacagucccucuuccuc

SEQ ID NO: 218031 - RNA, 18 nt, Human
gacccacacuuccacaua

SEQ ID NO: 218032 - RNA, 25 nt, Human
gacccaucauuccauccuggcacuu

SEQ ID NO: 218033 - RNA, 18 nt, Human
gaccccugaguggcccag

SEQ ID NO: 218034 - RNA, 19 nt, Human
gaggggaaaggaggcagag

SEQ ID NO: 218035 - RNA, 23 nt, Human
gcagccaagagguagaagguaaa

SEQ ID NO: 218036 - RNA, 22 nt, Human
gccaaggcuuggugucccuucc

SEQ ID NO: 218037 - RNA, 21 nt, Human
ggaaagcuggcuucucacuga

SEQ ID NO: 218038 - RNA, 19 nt, Human
ggacaggaggccggaagca

SEQ ID NO: 218039 - RNA, 24 nt, Human
ggcucagggccagguauguggagg

SEQ ID NO: 218040 - RNA, 22 nt, Human
gggcugccaagcccagcaguuc

SEQ ID NO: 218041 - RNA, 18 nt, Human
ggggaaaggaggcagagg

SEQ ID NO: 218042 - RNA, 23 nt, Human
gucccucuuccucaggaaagguc

SEQ ID NO: 218043 - RNA, 21 nt, Human
guuaagaaaaccucaucauga

SEQ ID NO: 218044 - RNA, 21 nt, Human
uaaacaaaccuccagaguaga

SEQ ID NO: 218045 - RNA, 22 nt, Human
uaaacacacagacccccacaua

SEQ ID NO: 218046 - RNA, 21 nt, Human
uaagaaaaccucaucaugaga

SEQ ID NO: 218047 - RNA, 24 nt, Human
uaaguuaagaaaaccucaucauga

SEQ ID NO: 218048 - RNA, 21 nt, Human
uaccauagcugcugagaguca

SEQ ID NO: 218049 - RNA, 27 nt, Human
uaccauagcugcugagagucaggccug

SEQ ID NO: 218050 - RNA, 18 nt, Human
uagaagaacaggccacac

SEQ ID NO: 218051 - RNA, 18 nt, Human
uagcaaaugucuacagca

SEQ ID NO: 218052 - RNA, 21 nt, Human
ucagcucucccugacuccucc

SEQ ID NO: 218053 - RNA, 21 nt, Human
uccaacccauagaagaacagg

SEQ ID NO: 218054 - RNA, 24 nt, Human
uccauagucacccucaagcuaagc

SEQ ID NO: 218055 - RNA, 24 nt, Human
ucccccaggccaugaaugaccccc

SEQ ID NO: 218056 - RNA, 22 nt, Human
ucccuugcgagagaaccauagc

SEQ ID NO: 218057 - RNA, 22 nt, Human
ucuaauaguucagcucucccug

SEQ ID NO: 218058 - RNA, 25 nt, Human
ucuacaauagcacucucucccuuug

SEQ ID NO: 218059 - RNA, 20 nt, Human
ucuuucuuuuuuucuugggc

SEQ ID NO: 218060 - RNA, 22 nt, Human
ugaaugaccccugaguggccca

SEQ ID NO: 218061 - RNA, 24 nt, Human
ugacccaucauuccauccuggcac

SEQ ID NO: 218062 - RNA, 20 nt, Human
ugagaaccauaaauuuauga

SEQ ID NO: 218063 - RNA, 22 nt, Human
ugagagagccccucacagaucc

SEQ ID NO: 218064 - RNA, 20 nt, Human
ugagccccaaaucccucccc

SEQ ID NO: 218065 - RNA, 27 nt, Human
ugaggaaaagcauuuggggaggcgcuu

SEQ ID NO: 218066 - RNA, 20 nt, Human
ugaggaaaagcauuugguca

SEQ ID NO: 218067 - RNA, 21 nt, Human
ugaggaaaagcauuuggucau

SEQ ID NO: 218068 - RNA, 26 nt, Human
ugaggaaagcuggcuucucacugagg

SEQ ID NO: 218069 - RNA, 19 nt, Human
ugaggggauggcaaaaggc

SEQ ID NO: 218070 - RNA, 18 nt, Human
ugaugccaagugggagug

SEQ ID NO: 218071 - RNA, 20 nt, Human
ugaugccaagugggaguguc

SEQ ID NO: 218072 - RNA, 22 nt, Human
ugcaagcauguuuauauacaug

SEQ ID NO: 218073 - RNA, 20 nt, Human
ugcucuccuucuuugccauu

SEQ ID NO: 218074 - RNA, 18 nt, Human
uggcccagacauccucac

SEQ ID NO: 218075 - RNA, 20 nt, Human
ugggacaaaggcuaaggagc

SEQ ID NO: 218076 - RNA, 23 nt, Human
uguacccugcccaagucugugug

SEQ ID NO: 218077 - RNA, 22 nt, Human
uguggaggugcuauggaugagg

SEQ ID NO: 218078 - RNA, 20 nt, Human
uuccuaccauagcugcugag

SEQ ID NO: 218079 - RNA, 21 nt, Human
uuccucuggaaugagaggccu

SEQ ID NO: 218080 - RNA, 21 nt, Human
uuuuuuucuugggcauuuggg

SEQ ID NO: 218081 - RNA, 21 nt, Human
acauuaaagagccaagaagaa

SEQ ID NO: 218082 - RNA, 21 nt, Human
acccacaaaugcuaaaagucc

SEQ ID NO: 218083 - RNA, 18 nt, Human
agaugcagaaguuggugc

SEQ ID NO: 218084 - RNA, 19 nt, Human
auaagucaagaucuuccuc

SEQ ID NO: 218085 - RNA, 19 nt, Human
cacagaaguguauguggua

SEQ ID NO: 218086 - RNA, 22 nt, Human
cccacaaaugcuaaaaguccac

SEQ ID NO: 218087 - RNA, 23 nt, Human
cucauggugagugcauuucuucu

SEQ ID NO: 218088 - RNA, 22 nt, Human
cugccgcugaauaaaacgaacc

SEQ ID NO: 218089 - RNA, 21 nt, Human
uaaaacgaacccagcaacuuc

SEQ ID NO: 218090 - RNA, 26 nt, Human
uagaaaguuuaaauuagcugcaagaa

SEQ ID NO: 218091 - RNA, 26 nt, Human
uagcugcaagaaauuuuaucuagaca

SEQ ID NO: 218092 - RNA, 22 nt, Human
ugcuuuauuaagucuacccaca

SEQ ID NO: 218093 - RNA, 25 nt, Human
uuuuuuuuuuuuuuuuuuuuuaagg

SEQ ID NO: 218094 - RNA, 19 nt, Human
aagugcagaacaaaggcug

SEQ ID NO: 218095 - RNA, 24 nt, Human
accuugcccccuucaugccuccca

SEQ ID NO: 218096 - RNA, 22 nt, Human
auggcggggguggggcagggug

SEQ ID NO: 218097 - RNA, 21 nt, Human
ccacagaggacggaccuugcc

SEQ ID NO: 218098 - RNA, 26 nt, Human
ccagccucggcugcugcugugcgccc

SEQ ID NO: 218099 - RNA, 28 nt, Human
cccugcucugugcaugcgggugggcugg

SEQ ID NO: 218100 - RNA, 22 nt, Human
ccugggcugccgcuaggagaug

SEQ ID NO: 218101 - RNA, 18 nt, Human
cgccugggcugccgcuag

SEQ ID NO: 218102 - RNA, 24 nt, Human
cgggcgcgggggguuggggggugg

SEQ ID NO: 218103 - RNA, 21 nt, Human
cgggugggcugggcccccagg

SEQ ID NO: 218104 - RNA, 22 nt, Human
cuagccccugcucugugcaugc

SEQ ID NO: 218105 - RNA, 22 nt, Human
cucccaggagacaccuagcccc

SEQ ID NO: 218106 - RNA, 18 nt, Human
cucccggccagccucggc

SEQ ID NO: 218107 - RNA, 21 nt, Human
cucccggccagccucggcugc

SEQ ID NO: 218108 - RNA, 18 nt, Human
cugcugugcgcccguccu

SEQ ID NO: 218109 - RNA, 20 nt, Human
cuggguccuugugcugcucc

SEQ ID NO: 218110 - RNA, 18 nt, Human
gacauggcgggggugggg

SEQ ID NO: 218111 - RNA, 24 nt, Human
gaccuugcccccuucaugccuccc

SEQ ID NO: 218112 - RNA, 22 nt, Human
gagucgggaggacgccuagugg

SEQ ID NO: 218113 - RNA, 22 nt, Human
gcagaacaaaggcuggguccuu

SEQ ID NO: 218114 - RNA, 18 nt, Human
gccucggcugcugcugug

SEQ ID NO: 218115 - RNA, 19 nt, Human
gcgcgggggguuggggggu

SEQ ID NO: 218116 - RNA, 21 nt, Human
gcgggugggcugggcccccag

SEQ ID NO: 218117 - RNA, 20 nt, Human
gggacgaggcgggcagcgcc

SEQ ID NO: 218118 - RNA, 20 nt, Human
gggcgcgggggguugggggg

SEQ ID NO: 218119 - RNA, 23 nt, Human
gggcugcagcgcgcgggcgagca

SEQ ID NO: 218120 - RNA, 18 nt, Human
gggguggggacgaggcgg

SEQ ID NO: 218121 - RNA, 18 nt, Human
gggguuggggggugggga

SEQ ID NO: 218122 - RNA, 20 nt, Human
uagcugaggaggcuccggga

SEQ ID NO: 218123 - RNA, 21 nt, Human
uccgagggcgggcgcgggggg

SEQ ID NO: 218124 - RNA, 22 nt, Human
ucggggcggacucgcucccucc

SEQ ID NO: 218125 - RNA, 22 nt, Human
ucucccggccagccucggcugc

SEQ ID NO: 218126 - RNA, 23 nt, Human
ucucccggccagccucggcugcu

SEQ ID NO: 218127 - RNA, 19 nt, Human
ugcccccuucaugccuccc

SEQ ID NO: 218128 - RNA, 20 nt, Human
ugcugcucccagcucuuugg

SEQ ID NO: 218129 - RNA, 21 nt, Human
uggcggggguggggcaggguc

SEQ ID NO: 218130 - RNA, 23 nt, Human
ugggcugccgcuaggagaugggg

SEQ ID NO: 218131 - RNA, 22 nt, Human
uggggcugcagcgcgcgggcga

SEQ ID NO: 218132 - RNA, 23 nt, Human
uggggcugcagcgcgcgggcgag

SEQ ID NO: 218133 - RNA, 22 nt, Human
uguccgagggcgggcgcggggg

SEQ ID NO: 218134 - RNA, 24 nt, Human
aacugcacuuuaaugggguggcac

SEQ ID NO: 218135 - RNA, 18 nt, Human
aagcacagguggaaaagg

SEQ ID NO: 218136 - RNA, 21 nt, Human
aaguaaccaguaacaagcucg

SEQ ID NO: 218137 - RNA, 19 nt, Human
acaggacagcagaacccuc

SEQ ID NO: 218138 - RNA, 21 nt, Human
acaggacagcagaacccucag

SEQ ID NO: 218139 - RNA, 22 nt, Human
agccaggagcccauggaacaac

SEQ ID NO: 218140 - RNA, 19 nt, Human
aggagcccauggaacaacu

SEQ ID NO: 218141 - RNA, 21 nt, Human
agguuggccacaguccagagc

SEQ ID NO: 218142 - RNA, 22 nt, Human
cacaguccagagccaggagccc

SEQ ID NO: 218143 - RNA, 18 nt, Human
cagaacccucagccagca

SEQ ID NO: 218144 - RNA, 20 nt, Human
cagaacccucagccagcagc

SEQ ID NO: 218145 - RNA, 18 nt, Human
cagcagccacagggccug

SEQ ID NO: 218146 - RNA, 24 nt, Human
caggagcccauggaacaacuugga

SEQ ID NO: 218147 - RNA, 19 nt, Human
caguccagagccaggagcc

SEQ ID NO: 218148 - RNA, 20 nt, Human
cagugagcucucugccaccu

SEQ ID NO: 218149 - RNA, 24 nt, Human
ccagugagcucucugccaccuccc

SEQ ID NO: 218150 - RNA, 24 nt, Human
ccauggaacaacuuggaaggugac

SEQ ID NO: 218151 - RNA, 18 nt, Human
cccagccccucaguccca

SEQ ID NO: 218152 - RNA, 20 nt, Human
cccucagucccagugagcuc

SEQ ID NO: 218153 - RNA, 22 nt, Human
ccggaggaacugcacuuuaaug

SEQ ID NO: 218154 - RNA, 18 nt, Human
cucccuaaaaagguuucc

SEQ ID NO: 218155 - RNA, 18 nt, Human
gccacagggccugccagc

SEQ ID NO: 218156 - RNA, 20 nt, Human
ggcgauaagcacagguggaa

SEQ ID NO: 218157 - RNA, 23 nt, Human
gguacagauugggcggaaugugg

SEQ ID NO: 218158 - RNA, 24 nt, Human
uccagagccaggagcccauggaac

SEQ ID NO: 218159 - RNA, 20 nt, Human
ucccagugagcucucugcca

SEQ ID NO: 218160 - RNA, 22 nt, Human
uuuuuuuuuuuuuuuuuccgga

SEQ ID NO: 218161 - RNA, 23 nt, Human
uuuuuuuuuuuuuuuuuuuccgg

SEQ ID NO: 218162 - RNA, 19 nt, Human
aaacaggaaacagaccaga

SEQ ID NO: 218163 - RNA, 25 nt, Human
aaacaggaaacagaccagauucugg

SEQ ID NO: 218164 - RNA, 20 nt, Human
aagcagcccucuuggguguc

SEQ ID NO: 218165 - RNA, 21 nt, Human
acccacccuuccucucacccu

SEQ ID NO: 218166 - RNA, 25 nt, Human
acccacccuuccucucacccuccag

SEQ ID NO: 218167 - RNA, 20 nt, Human
acccuccaguucccacuguc

SEQ ID NO: 218168 - RNA, 23 nt, Human
agccaaacaggaaacagaccaga

SEQ ID NO: 218169 - RNA, 19 nt, Human
aggaaacagaccagauucu

SEQ ID NO: 218170 - RNA, 19 nt, Human
augcaagguugcaggcaug

SEQ ID NO: 218171 - RNA, 24 nt, Human
auggaugcaagguugcaggcaugg

SEQ ID NO: 218172 - RNA, 20 nt, Human
cacucugaaaaugaaguagg

SEQ ID NO: 218173 - RNA, 19 nt, Human
ccccuaccaaggucuuaca

SEQ ID NO: 218174 - RNA, 18 nt, Human
cgagaucccaagccguag

SEQ ID NO: 218175 - RNA, 22 nt, Human
gacccacccuuccucucacccu

SEQ ID NO: 218176 - RNA, 18 nt, Human
ggagaagagccuugggua

SEQ ID NO: 218177 - RNA, 19 nt, Human
guagugguagaagagccaa

SEQ ID NO: 218178 - RNA, 19 nt, Human
gucacucugaaaaugaagu

SEQ ID NO: 218179 - RNA, 18 nt, Human
uaagugucccucccuccu

SEQ ID NO: 218180 - RNA, 18 nt, Human
uagcccagauggaugcaa

SEQ ID NO: 218181 - RNA, 21 nt, Human
uccacauaggugcgugcagag

SEQ ID NO: 218182 - RNA, 18 nt, Human
uccccuaccaaggucuua

SEQ ID NO: 218183 - RNA, 20 nt, Human
ucucugggcuuuaguuucca

SEQ ID NO: 218184 - RNA, 19 nt, Human
ugaaaaugaaguagggugg

SEQ ID NO: 218185 - RNA, 20 nt, Human
ugggaagcagcccucuuggg

SEQ ID NO: 218186 - RNA, 25 nt, Human
uggggcaagucagacuuucucucug

SEQ ID NO: 218187 - RNA, 18 nt, Human
uuuuuuuuuuuuuuucug

SEQ ID NO: 218188 - RNA, 21 nt, Human
uuuuuuuuuuuuuuucugagg

SEQ ID NO: 218189 - RNA, 25 nt, Human
accaaaugucugcagcauaccuucc

SEQ ID NO: 218190 - RNA, 22 nt, Human
accuccugugugcuugucuuca

SEQ ID NO: 218191 - RNA, 20 nt, Human
agaaauagaaaaacauacaa

SEQ ID NO: 218192 - RNA, 19 nt, Human
agcaucccuggccucuacc

SEQ ID NO: 218193 - RNA, 23 nt, Human
agccauauaacucaauguuucuc

SEQ ID NO: 218194 - RNA, 23 nt, Human
aggugggguucaccgagggaggc

SEQ ID NO: 218195 - RNA, 23 nt, Human
caauggucuuuuuaaccuguccu

SEQ ID NO: 218196 - RNA, 19 nt, Human
cagcagcaucccuggccuc

SEQ ID NO: 218197 - RNA, 19 nt, Human
cagcggcacugcucugggc

SEQ ID NO: 218198 - RNA, 22 nt, Human
ccagaaaaaauaagaauccaga

SEQ ID NO: 218199 - RNA, 19 nt, Human
ccagaccucucucauguaa

SEQ ID NO: 218200 - RNA, 25 nt, Human
cccagaaaaaauaagaauccagacc

SEQ ID NO: 218201 - RNA, 23 nt, Human
cuacccaccaaaugucugcagca

SEQ ID NO: 218202 - RNA, 21 nt, Human
cugcaaggugggguucaccga

SEQ ID NO: 218203 - RNA, 19 nt, Human
cuggccucuacccaccaaa

SEQ ID NO: 218204 - RNA, 24 nt, Human
gacccagugugacaaucaaaauug

SEQ ID NO: 218205 - RNA, 19 nt, Human
gacggacccacggacaccc

SEQ ID NO: 218206 - RNA, 19 nt, Human
gggaggcggcaggagggag

SEQ ID NO: 218207 - RNA, 19 nt, Human
gggaugcucagcagcaucc

SEQ ID NO: 218208 - RNA, 20 nt, Human
uaagagaaucuucuuuggug

SEQ ID NO: 218209 - RNA, 19 nt, Human
uaaugugaauaugcauguu

SEQ ID NO: 218210 - RNA, 21 nt, Human
uccagccccacucugauauuc

SEQ ID NO: 218211 - RNA, 21 nt, Human
ucccuggccucuacccaccuu

SEQ ID NO: 218212 - RNA, 22 nt, Human
ugauccagccccacucugauau

SEQ ID NO: 218213 - RNA, 24 nt, Human
ugauccagccccacucugauauuc

SEQ ID NO: 218214 - RNA, 20 nt, Human
ugcaaggugggguucaccga

SEQ ID NO: 218215 - RNA, 22 nt, Human
ugcgggaugcucagcagcaucc

SEQ ID NO: 218216 - RNA, 19 nt, Human
uggguggaaaaauugcucu

SEQ ID NO: 218217 - RNA, 20 nt, Human
uguccuguacacugcgggau

SEQ ID NO: 218218 - RNA, 18 nt, Human
uucuuuggugaguuuaaa

SEQ ID NO: 218219 - RNA, 21 nt, Human
uuucuuguguaagaaugugga

SEQ ID NO: 218220 - RNA, 25 nt, Human
uuugggcagcggcacugcucugggc

SEQ ID NO: 218221 - RNA, 23 nt, Human
uuuuugcccuugauccagcccca

SEQ ID NO: 218222 - RNA, 21 nt, Human
aaggaaccagcuuagucaagg

SEQ ID NO: 218223 - RNA, 18 nt, Human
aggcgugcuggccagagg

SEQ ID NO: 218224 - RNA, 24 nt, Human
ccuccuccucugccuuggccccgg

SEQ ID NO: 218225 - RNA, 18 nt, Human
cuccucugccuuggcccc

SEQ ID NO: 218226 - RNA, 23 nt, Human
cuccucugccuuggccccggggg

SEQ ID NO: 218227 - RNA, 25 nt, Human
cucugccuuggccccgggggaggac

SEQ ID NO: 218228 - RNA, 21 nt, Human
gcuuugacacaaggaaccagc

SEQ ID NO: 218229 - RNA, 18 nt, Human
ggaggacaggcgugcugg

SEQ ID NO: 218230 - RNA, 24 nt, Human
gggaggacaggcgugcuggccaga

SEQ ID NO: 218231 - RNA, 18 nt, Human
ucuaaggcuccugcugcc

SEQ ID NO: 218232 - RNA, 21 nt, Human
ucugccuuggccccgggggag

SEQ ID NO: 218233 - RNA, 22 nt, Human
uuaauggaaggcaugaggugcu

SEQ ID NO: 218234 - RNA, 21 nt, Human
uuuaauggaaggcaugaggug

SEQ ID NO: 218235 - RNA, 24 nt, Human
ccaaagcagauggucuggggagga

SEQ ID NO: 218236 - RNA, 23 nt, Human
ccccaaagcagauggucugggga

SEQ ID NO: 218237 - RNA, 21 nt, Human
uaucugguucauuuuaauuau

SEQ ID NO: 218238 - RNA, 24 nt, Human
ucaaaccgaagaauaucugcaaaa

SEQ ID NO: 218239 - RNA, 18 nt, Human
agaugccauaaaauccgg

SEQ ID NO: 218240 - RNA, 22 nt, Human
ccacaggccccucucugugccc

SEQ ID NO: 218241 - RNA, 24 nt, Human
cccagccccucccacaggccccuc

SEQ ID NO: 218242 - RNA, 27 nt, Human
cucgaccuuggacuuuauuuucccagc

SEQ ID NO: 218243 - RNA, 23 nt, Human
uauuuucccagccccucccacag

SEQ ID NO: 218244 - RNA, 21 nt, Human
uccaucccaacaggagcuggu

SEQ ID NO: 218245 - RNA, 23 nt, Human
ucccagccccucccacaggcccc

SEQ ID NO: 218246 - RNA, 25 nt, Human
ucccagccccucccacaggccccuc

SEQ ID NO: 218247 - RNA, 18 nt, Human
uuuuucuggcucgaccuu

SEQ ID NO: 218248 - RNA, 19 nt, Human
uuuuuuuucuggcucgacc

SEQ ID NO: 218249 - RNA, 19 nt, Human
accaccuuucuuuauuugu

SEQ ID NO: 218250 - RNA, 19 nt, Human
caaguguacagggugggca

SEQ ID NO: 218251 - RNA, 20 nt, Human
ccagaagcggcccugcaguu

SEQ ID NO: 218252 - RNA, 18 nt, Human
cccaggcucacaccaccu

SEQ ID NO: 218253 - RNA, 23 nt, Human
ccccauggugguccaggccccag

SEQ ID NO: 218254 - RNA, 21 nt, Human
gccaaguguacagggugggca

SEQ ID NO: 218255 - RNA, 18 nt, Human
gggaagccaaguguacag

SEQ ID NO: 218256 - RNA, 21 nt, Human
uccaggccccagaagcggccc

SEQ ID NO: 218257 - RNA, 24 nt, Human
uuuguaaugagugggacucuuccu

SEQ ID NO: 218258 - RNA, 19 nt, Human
aaauaaaacuagaaccaaa

SEQ ID NO: 218259 - RNA, 22 nt, Human
aaauacauagucucaaaaggua

SEQ ID NO: 218260 - RNA, 18 nt, Human
aacacuauucgcuagugg

SEQ ID NO: 218261 - RNA, 22 nt, Human
aacucaccaguuuucuuggaaa

SEQ ID NO: 218262 - RNA, 19 nt, Human
aagaaucuuuuaaaguugc

SEQ ID NO: 218263 - RNA, 21 nt, Human
aagacuacagcugaaaguugg

SEQ ID NO: 218264 - RNA, 23 nt, Human
aagagaaaaaccaggcaggaagc

SEQ ID NO: 218265 - RNA, 22 nt, Human
aagaguuuuggggcaaagaaug

SEQ ID NO: 218266 - RNA, 21 nt, Human
aagcuguggcugacagcauca

SEQ ID NO: 218267 - RNA, 24 nt, Human
aaggaaagaguuuuggggcaaaga

SEQ ID NO: 218268 - RNA, 19 nt, Human
aaucucaagccagucaaaa

SEQ ID NO: 218269 - RNA, 21 nt, Human
aaucuuuuaaaguugcuuuga

SEQ ID NO: 218270 - RNA, 22 nt, Human
acaaaauucuaaaaaguaaaca

SEQ ID NO: 218271 - RNA, 25 nt, Human
acaaaauucuaaaaaguaaacagag

SEQ ID NO: 218272 - RNA, 20 nt, Human
acagcaacagagcacacuca

SEQ ID NO: 218273 - RNA, 18 nt, Human
acagcaucacagcaacag

SEQ ID NO: 218274 - RNA, 19 nt, Human
accacaugugacaagaggc

SEQ ID NO: 218275 - RNA, 22 nt, Human
accauuuaaaaaaugugagaag

SEQ ID NO: 218276 - RNA, 20 nt, Human
agacuuggagucucaaccuu

SEQ ID NO: 218277 - RNA, 19 nt, Human
agagacaucacuccuguuc

SEQ ID NO: 218278 - RNA, 24 nt, Human
agaggcuggaaaaaaggauguuuu

SEQ ID NO: 218279 - RNA, 18 nt, Human
agcaccccagucagugcc

SEQ ID NO: 218280 - RNA, 19 nt, Human
aggaagcuguggcugacag

SEQ ID NO: 218281 - RNA, 23 nt, Human
aggagacuuggagucucaaccuu

SEQ ID NO: 218282 - RNA, 24 nt, Human
aggcaggaagcccauuuugcggga

SEQ ID NO: 218283 - RNA, 22 nt, Human
agguagcagcauacucuguaaa

SEQ ID NO: 218284 - RNA, 26 nt, Human
aguucuugaaagguggugcaccuuuu

SEQ ID NO: 218285 - RNA, 20 nt, Human
auacccaaugcuccaagcau

SEQ ID NO: 218286 - RNA, 21 nt, Human
auagggcaccaggaggugaag

SEQ ID NO: 218287 - RNA, 20 nt, Human
aucacagcaacagagcacac

SEQ ID NO: 218288 - RNA, 23 nt, Human
aucagucaauuccaauguuuucu

SEQ ID NO: 218289 - RNA, 25 nt, Human
caaaaacagacucuuuauuucucuc

SEQ ID NO: 218290 - RNA, 24 nt, Human
caacagagcacacucacucuaauc

SEQ ID NO: 218291 - RNA, 19 nt, Human
caaccacaguggucugugc

SEQ ID NO: 218292 - RNA, 21 nt, Human
cacaaccaaaggaaagaguuu

SEQ ID NO: 218293 - RNA, 25 nt, Human
cagacaucagauacccaaugcucca

SEQ ID NO: 218294 - RNA, 23 nt, Human
cagagcacacucacucuaaucuu

SEQ ID NO: 218295 - RNA, 26 nt, Human
cagaugucuuggcuuuuuaaagccuc

SEQ ID NO: 218296 - RNA, 19 nt, Human
cagcaucacagcaacagag

SEQ ID NO: 218297 - RNA, 20 nt, Human
cagcaucacagcaacagagc

SEQ ID NO: 218298 - RNA, 21 nt, Human
caggaucugcagcccguggcc

SEQ ID NO: 218299 - RNA, 23 nt, Human
caggggaauuuucuaaaccaaac

SEQ ID NO: 218300 - RNA, 24 nt, Human
caguggucugugccagagcaacac

SEQ ID NO: 218301 - RNA, 21 nt, Human
caucaccucuuagcacaacca

SEQ ID NO: 218302 - RNA, 23 nt, Human
cauccugaugguuugagcaaaaa

SEQ ID NO: 218303 - RNA, 23 nt, Human
ccaagggaacauugaccaacacc

SEQ ID NO: 218304 - RNA, 24 nt, Human
ccaaugggucucgccaugcucccu

SEQ ID NO: 218305 - RNA, 20 nt, Human
ccagcucuagacuuucuagu

SEQ ID NO: 218306 - RNA, 20 nt, Human
ccugaugguuugagcaaaaa

SEQ ID NO: 218307 - RNA, 21 nt, Human
cgggauagggcaccaggaggu

SEQ ID NO: 218308 - RNA, 24 nt, Human
cuacgaaauaaaacuagaaccaaa

SEQ ID NO: 218309 - RNA, 23 nt, Human
cucaaccuuaaaauugcucaacu

SEQ ID NO: 218310 - RNA, 23 nt, Human
cucaugaaguguucaagaagacu

SEQ ID NO: 218311 - RNA, 18 nt, Human
cucccagcuugguggcug

SEQ ID NO: 218312 - RNA, 24 nt, Human
cuccuagcucaguacauauucacc

SEQ ID NO: 218313 - RNA, 23 nt, Human
cugacagcaucacagcaacagag

SEQ ID NO: 218314 - RNA, 21 nt, Human
cugucagguugagguuugugc

SEQ ID NO: 218315 - RNA, 21 nt, Human
cuguucuggcucagcucccag

SEQ ID NO: 218316 - RNA, 21 nt, Human
gagaagagaaaaaccaggcag

SEQ ID NO: 218317 - RNA, 24 nt, Human
gagaagagaaaaaccaggcaggaa

SEQ ID NO: 218318 - RNA, 18 nt, Human
gauaagcugaguaaaauc

SEQ ID NO: 218319 - RNA, 18 nt, Human
gcaacagagcacacucac

SEQ ID NO: 218320 - RNA, 20 nt, Human
gcgggauagggcaccaggag

SEQ ID NO: 218321 - RNA, 21 nt, Human
ggaggugaagaauguacacau

SEQ ID NO: 218322 - RNA, 21 nt, Human
gugaacccagggugaacagag

SEQ ID NO: 218323 - RNA, 22 nt, Human
guggucaggaugcugcuuccau

SEQ ID NO: 218324 - RNA, 22 nt, Human
uaaaaagucccuggaaccauaa

SEQ ID NO: 218325 - RNA, 20 nt, Human
uaaaagaagagaccuaagau

SEQ ID NO: 218326 - RNA, 18 nt, Human
uaacuccaaagucauuaa

SEQ ID NO: 218327 - RNA, 26 nt, Human
uaagaagugcaagaaugcugucugaa

SEQ ID NO: 218328 - RNA, 21 nt, Human
uacacauguacaguugaggau

SEQ ID NO: 218329 - RNA, 23 nt, Human
uaccagcucuagacuuucuaguu

SEQ ID NO: 218330 - RNA, 26 nt, Human
uaccagcucuagacuuucuaguucca

SEQ ID NO: 218331 - RNA, 19 nt, Human
uagaauaccagcucuagac

SEQ ID NO: 218332 - RNA, 22 nt, Human
uagacugaauguuccagaaauc

SEQ ID NO: 218333 - RNA, 21 nt, Human
uagggcaccaggaggugaaga

SEQ ID NO: 218334 - RNA, 21 nt, Human
ucaaccacaguggucugugcc

SEQ ID NO: 218335 - RNA, 25 nt, Human
ucaagccagaguaggcacucucaug

SEQ ID NO: 218336 - RNA, 23 nt, Human
ucaccccaauccauccaaugggu

SEQ ID NO: 218337 - RNA, 18 nt, Human
ucaggaugcugguggaag

SEQ ID NO: 218338 - RNA, 20 nt, Human
ucuaaaaaguaaacagagau

SEQ ID NO: 218339 - RNA, 20 nt, Human
ucucaggaugcugguggaag

SEQ ID NO: 218340 - RNA, 18 nt, Human
ugaaagguggugcaccuu

SEQ ID NO: 218341 - RNA, 25 nt, Human
ugaacuguucaccccaauccaucca

SEQ ID NO: 218342 - RNA, 21 nt, Human
ugaaucucaagccagucaaaa

SEQ ID NO: 218343 - RNA, 20 nt, Human
ugaggacauauccuuccucc

SEQ ID NO: 218344 - RNA, 18 nt, Human
ugcucgccaagggaacau

SEQ ID NO: 218345 - RNA, 24 nt, Human
uggcugacccuccagcuguggcuu

SEQ ID NO: 218346 - RNA, 22 nt, Human
ugggaccugaacuguucacccc

SEQ ID NO: 218347 - RNA, 18 nt, Human
ugggcagaugucuuggcu

SEQ ID NO: 218348 - RNA, 26 nt, Human
ugguauaaaagaugagcuugguauaa

SEQ ID NO: 218349 - RNA, 19 nt, Human
ugugagaagagaaaaacca

SEQ ID NO: 218350 - RNA, 21 nt, Human
uugaaagguggugcaccuugg

SEQ ID NO: 218351 - RNA, 23 nt, Human
uugaggauuagaugaaucugagc

SEQ ID NO: 218352 - RNA, 24 nt, Human
uugguggcugacccuccagcugug

SEQ ID NO: 218353 - RNA, 19 nt, Human
uuucuaaaccaaaccacag

SEQ ID NO: 218354 - RNA, 21 nt, Human
uuucuaguuccaucacuuugg

SEQ ID NO: 218355 - RNA, 18 nt, Human
uuugagcaaaaacagacu

SEQ ID NO: 218356 - RNA, 21 nt, Human
uuugcagggaagucuccuagc

SEQ ID NO: 218357 - RNA, 20 nt, Human
caagaggagauccuguuagc

SEQ ID NO: 218358 - RNA, 22 nt, Human
caaggacacucuaucuguugcc

SEQ ID NO: 218359 - RNA, 21 nt, Human
cuacugcaagccgaggucugg

SEQ ID NO: 218360 - RNA, 19 nt, Human
gggcugcagacugcaagag

SEQ ID NO: 218361 - RNA, 23 nt, Human
uaaaugcaugaguaaauaucuug

SEQ ID NO: 218362 - RNA, 22 nt, Human
ucuugaguaucccauaaaccuu

SEQ ID NO: 218363 - RNA, 24 nt, Human
ugacuucuuauuaccaaggacacu

SEQ ID NO: 218364 - RNA, 20 nt, Human
uggaaucagcguccugggcu

SEQ ID NO: 218365 - RNA, 19 nt, Human
uuagcccaaacagcacuua

SEQ ID NO: 218366 - RNA, 23 nt, Human
uuuuuuuuuuuuuuuuuuuacgg

SEQ ID NO: 218367 - RNA, 18 nt, Human
aaaaauccagauaaauga

SEQ ID NO: 218368 - RNA, 21 nt, Human
aaaacauaaaaauccagauaa

SEQ ID NO: 218369 - RNA, 20 nt, Human
aacauaaaaauccagauaaa

SEQ ID NO: 218370 - RNA, 25 nt, Human
acuaauucaaauauaaaagacacca

SEQ ID NO: 218371 - RNA, 18 nt, Human
agauuugaagaaccaaac

SEQ ID NO: 218372 - RNA, 23 nt, Human
auaaaacauaaaaauccagauaa

SEQ ID NO: 218373 - RNA, 20 nt, Human
cacugcacaaaauguaaagg

SEQ ID NO: 218374 - RNA, 24 nt, Human
cauugcacagauauggguuauaca

SEQ ID NO: 218375 - RNA, 22 nt, Human
cggccgggcuccgggagcggcu

SEQ ID NO: 218376 - RNA, 23 nt, Human
cugaaaauacugcacauuuuaau

SEQ ID NO: 218377 - RNA, 25 nt, Human
cuuuaaaaaauaaucacugcacaaa

SEQ ID NO: 218378 - RNA, 19 nt, Human
gcggcugagagguucggga

SEQ ID NO: 218379 - RNA, 26 nt, Human
ggaaaaacaacacgcagucuaguuaa

SEQ ID NO: 218380 - RNA, 25 nt, Human
gggcucccggcugcgauugcagccu

SEQ ID NO: 218381 - RNA, 24 nt, Human
gggcugcgggcucccggcugcgau

SEQ ID NO: 218382 - RNA, 20 nt, Human
uacgggaaaaacaacacgca

SEQ ID NO: 218383 - RNA, 20 nt, Human
uagcagggcaacuaacaacu

SEQ ID NO: 218384 - RNA, 26 nt, Human
uauuaaaaugacuuauuuuuauuuaa

SEQ ID NO: 218385 - RNA, 22 nt, Human
ucuacggccgggcuccgggagc

SEQ ID NO: 218386 - RNA, 21 nt, Human
ugaaaagauaguaaagcccug

SEQ ID NO: 218387 - RNA, 22 nt, Human
ugaaaauacugcacauuuuaau

SEQ ID NO: 218388 - RNA, 20 nt, Human
ugacauguacuauuaucuaa

SEQ ID NO: 218389 - RNA, 22 nt, Human
ugccuaggauauuaaaacauaa

SEQ ID NO: 218390 - RNA, 22 nt, Human
uuaaaaaauaaucacugcacaa

SEQ ID NO: 218391 - RNA, 19 nt, Human
uuuacguaugcauauauau

SEQ ID NO: 218392 - RNA, 21 nt, Human
aaacagauauagcugguuuau

SEQ ID NO: 218393 - RNA, 19 nt, Human
aaccauggaaggcgauuug

SEQ ID NO: 218394 - RNA, 18 nt, Human
acacccucacaaagggga

SEQ ID NO: 218395 - RNA, 20 nt, Human
acccucacaaaggggaaacc

SEQ ID NO: 218396 - RNA, 24 nt, Human
acccugaaggaaguacuucagggg

SEQ ID NO: 218397 - RNA, 22 nt, Human
agauccccggccugaggggccu

SEQ ID NO: 218398 - RNA, 24 nt, Human
augguuccuccccacgcccucacu

SEQ ID NO: 218399 - RNA, 22 nt, Human
caagucucauccagaaauguua

SEQ ID NO: 218400 - RNA, 18 nt, Human
cacccaagguccuuucag

SEQ ID NO: 218401 - RNA, 21 nt, Human
cacccucacaaaggggaaacc

SEQ ID NO: 218402 - RNA, 18 nt, Human
cagagccagcugcuccuc

SEQ ID NO: 218403 - RNA, 20 nt, Human
cagcugcuccuccagacagg

SEQ ID NO: 218404 - RNA, 22 nt, Human
ccacgcccucacucccaccaag

SEQ ID NO: 218405 - RNA, 21 nt, Human
cuccccagauccccggccuga

SEQ ID NO: 218406 - RNA, 24 nt, Human
gacacccucacaaaggggaaaccc

SEQ ID NO: 218407 - RNA, 18 nt, Human
gagcagagccagcugcuc

SEQ ID NO: 218408 - RNA, 20 nt, Human
gauuugcaugguuccucccc

SEQ ID NO: 218409 - RNA, 21 nt, Human
gcagugaauccuaagggcaag

SEQ ID NO: 218410 - RNA, 20 nt, Human
guacagcuuuaccacccaag

SEQ ID NO: 218411 - RNA, 18 nt, Human
uacagcuuuaccacccaa

SEQ ID NO: 218412 - RNA, 23 nt, Human
uacccagcugagccaccgaaaac

SEQ ID NO: 218413 - RNA, 22 nt, Human
uaggagagagcagugaauccua

SEQ ID NO: 218414 - RNA, 24 nt, Human
ucaaaacagauauagcugguuuau

SEQ ID NO: 218415 - RNA, 24 nt, Human
ucauccagaaauguuauuuacugc

SEQ ID NO: 218416 - RNA, 20 nt, Human
uccccacgcccucacucccc

SEQ ID NO: 218417 - RNA, 21 nt, Human
uccccggccugaggggccucc

SEQ ID NO: 218418 - RNA, 19 nt, Human
ucucagagcagagccagcu

SEQ ID NO: 218419 - RNA, 22 nt, Human
ugaggggccuccuccagcugca

SEQ ID NO: 218420 - RNA, 18 nt, Human
ugccugcccgaugcggga

SEQ ID NO: 218421 - RNA, 23 nt, Human
uucagggggugccugcccgaugc

SEQ ID NO: 218422 - RNA, 19 nt, Human
uugcaugguuccuccccac

SEQ ID NO: 218423 - RNA, 19 nt, Human
uuugcaugguuccucccca

SEQ ID NO: 218424 - RNA, 26 nt, Human
uuuuuuuucaaaacagauauagcugg

SEQ ID NO: 218425 - RNA, 24 nt, Human
aagccggcaugcacaguggggaca

SEQ ID NO: 218426 - RNA, 23 nt, Human
agacguuagaccggaaggucugg

SEQ ID NO: 218427 - RNA, 22 nt, Human
ccccccuuaguggcuggcaccu

SEQ ID NO: 218428 - RNA, 19 nt, Human
cccugcaccgcggggcucc

SEQ ID NO: 218429 - RNA, 19 nt, Human
cgcuggggcccgggugggc

SEQ ID NO: 218430 - RNA, 23 nt, Human
cuggcaucggcggugcccccccu

SEQ ID NO: 218431 - RNA, 18 nt, Human
gcagagccuccucagaag

SEQ ID NO: 218432 - RNA, 26 nt, Human
gcuaaauaaaauccgcggucuggcac

SEQ ID NO: 218433 - RNA, 18 nt, Human
guccgucguggugugaga

SEQ ID NO: 218434 - RNA, 23 nt, Human
uaaaauccgcggucuggcaccuc

SEQ ID NO: 218435 - RNA, 18 nt, Human
ugcacaguggggacaaag

SEQ ID NO: 218436 - RNA, 21 nt, Human
aaaaaaacagaaaacaaaaac

SEQ ID NO: 218437 - RNA, 23 nt, Human
aaaaagagaaaaaaaaaacagaa

SEQ ID NO: 218438 - RNA, 24 nt, Human
aaaaaugugcuccucccuggggcc

SEQ ID NO: 218439 - RNA, 18 nt, Human
aaaacaaaaacccuaagu

SEQ ID NO: 218440 - RNA, 22 nt, Human
aaacagaaaacaaaaacccuaa

SEQ ID NO: 218441 - RNA, 23 nt, Human
aaacagaaaacaaaaacccuaag

SEQ ID NO: 218442 - RNA, 25 nt, Human
aaacagaaaacaaaaacccuaagua

SEQ ID NO: 218443 - RNA, 23 nt, Human
aaaggcaagccugggaaaagcaa

SEQ ID NO: 218444 - RNA, 19 nt, Human
aacagaauaacccuaaaau

SEQ ID NO: 218445 - RNA, 21 nt, Human
aacagaauaacccuaaaauga

SEQ ID NO: 218446 - RNA, 18 nt, Human
aacccuaaguaacagaau

SEQ ID NO: 218447 - RNA, 20 nt, Human
aagaguccaucuuacagggc

SEQ ID NO: 218448 - RNA, 21 nt, Human
aagauacccacacuacauugg

SEQ ID NO: 218449 - RNA, 24 nt, Human
aagcaggaaucuaagcccuccagg

SEQ ID NO: 218450 - RNA, 23 nt, Human
aaggaaguucaaaacaaaggcaa

SEQ ID NO: 218451 - RNA, 29 nt, Human
acaaaaaaagagaaaaaaaaaacagaaaa

SEQ ID NO: 218452 - RNA, 19 nt, Human
acaaaaagcagugcaaaca

SEQ ID NO: 218453 - RNA, 30 nt, Human
acagaaaacaaaaacccuaaguaacagaag

SEQ ID NO: 218454 - RNA, 23 nt, Human
acccugcgcccauucaccugggc

SEQ ID NO: 218455 - RNA, 19 nt, Human
acgaaucuccaaaugcaga

SEQ ID NO: 218456 - RNA, 23 nt, Human
acucucaucuccucuucuacaaa

SEQ ID NO: 218457 - RNA, 25 nt, Human
agaaaaaaaaaacagaaaacaaaaa

SEQ ID NO: 218458 - RNA, 19 nt, Human
agaaaacaaaaacccuaag

SEQ ID NO: 218459 - RNA, 29 nt, Human
agaaaggaagcacaggaggaggaaaggag

SEQ ID NO: 218460 - RNA, 27 nt, Human
agagaaaaaaaaaacagaaaacaaaaa

SEQ ID NO: 218461 - RNA, 18 nt, Human
agauggguggggggccuu

SEQ ID NO: 218462 - RNA, 22 nt, Human
agcauggggcacagagcugggg

SEQ ID NO: 218463 - RNA, 21 nt, Human
agccagaagccugccuucuuc

SEQ ID NO: 218464 - RNA, 20 nt, Human
agccagggaccaggaacccg

SEQ ID NO: 218465 - RNA, 21 nt, Human
agccagggaccaggaacccgg

SEQ ID NO: 218466 - RNA, 22 nt, Human
aggaaguucaaaacaaaggcaa

SEQ ID NO: 218467 - RNA, 24 nt, Human
aggaggaaaggaggcccaggcggg

SEQ ID NO: 218468 - RNA, 19 nt, Human
aggaggaggaaaggaggcc

SEQ ID NO: 218469 - RNA, 22 nt, Human
aggagucccuguggugacgagg

SEQ ID NO: 218470 - RNA, 23 nt, Human
aggccccaugggccuccuuuaau

SEQ ID NO: 218471 - RNA, 23 nt, Human
agggaagcgaguggcaaaauggc

SEQ ID NO: 218472 - RNA, 23 nt, Human
agggcagggguucugggagauuc

SEQ ID NO: 218473 - RNA, 23 nt, Human
aggggcuggguuauauacacaug

SEQ ID NO: 218474 - RNA, 21 nt, Human
agggucccuucuagcccaaaa

SEQ ID NO: 218475 - RNA, 18 nt, Human
auagaucccaucuucccc

SEQ ID NO: 218476 - RNA, 23 nt, Human
auagcuccagaggcccagaguug

SEQ ID NO: 218477 - RNA, 21 nt, Human
auagucucccucugugucccu

SEQ ID NO: 218478 - RNA, 19 nt, Human
augacacuaaaggcaagcc

SEQ ID NO: 218479 - RNA, 23 nt, Human
augcagagacuucaggaagaggu

SEQ ID NO: 218480 - RNA, 19 nt, Human
augggguggacagaugcag

SEQ ID NO: 218481 - RNA, 22 nt, Human
caaaaagcagugcaaacaccac

SEQ ID NO: 218482 - RNA, 23 nt, Human
caaaaagcagugcaaacaccacc

SEQ ID NO: 218483 - RNA, 24 nt, Human
caaacaccaccuccaagcccugaa

SEQ ID NO: 218484 - RNA, 21 nt, Human
caagccccaaggagcaugggg

SEQ ID NO: 218485 - RNA, 20 nt, Human
cacaaaaggggaaauguaca

SEQ ID NO: 218486 - RNA, 21 nt, Human
cacagaccaccagggucccuu

SEQ ID NO: 218487 - RNA, 18 nt, Human
cacagaguuuguccugcc

SEQ ID NO: 218488 - RNA, 28 nt, Human
cacagccaaguauugccaauaagaggcc

SEQ ID NO: 218489 - RNA, 20 nt, Human
caccacauacccuacaagau

SEQ ID NO: 218490 - RNA, 24 nt, Human
caccacauacccuacaagauaccc

SEQ ID NO: 218491 - RNA, 20 nt, Human
cacccuccacccccagcaag

SEQ ID NO: 218492 - RNA, 20 nt, Human
caccgcggcaccucuggaag

SEQ ID NO: 218493 - RNA, 25 nt, Human
cagaacaaaaggcacugacgaggug

SEQ ID NO: 218494 - RNA, 22 nt, Human
cagcaagugucacucacacuuc

SEQ ID NO: 218495 - RNA, 20 nt, Human
cagcacucuaacagcacugg

SEQ ID NO: 218496 - RNA, 23 nt, Human
cagcagccagggacccccuccag

SEQ ID NO: 218497 - RNA, 25 nt, Human
cagccuucucuuggcuccugggucu

SEQ ID NO: 218498 - RNA, 25 nt, Human
cagcuucugcucgccuccucuggga

SEQ ID NO: 218499 - RNA, 22 nt, Human
cagggcugcuucugggcucuuu

SEQ ID NO: 218500 - RNA, 24 nt, Human
cagugguuccuccagacacacaca

SEQ ID NO: 218501 - RNA, 22 nt, Human
cauagucucccucugugucccu

SEQ ID NO: 218502 - RNA, 18 nt, Human
caugacaggagcccaugu

SEQ ID NO: 218503 - RNA, 23 nt, Human
cauuuuguucucuuaaacagguc

SEQ ID NO: 218504 - RNA, 21 nt, Human
ccagccagggaccaggaaccc

SEQ ID NO: 218505 - RNA, 18 nt, Human
ccagggacccccuccagc

SEQ ID NO: 218506 - RNA, 19 nt, Human
ccauguaugcaggcagggu

SEQ ID NO: 218507 - RNA, 22 nt, Human
cccaugggccuccuuuaauaag

SEQ ID NO: 218508 - RNA, 23 nt, Human
ccccaacgcccccguccugccug

SEQ ID NO: 218509 - RNA, 18 nt, Human
ccccagagccaggggcug

SEQ ID NO: 218510 - RNA, 19 nt, Human
ccccggggugguggggugg

SEQ ID NO: 218511 - RNA, 19 nt, Human
ccccucagcagccagggac

SEQ ID NO: 218512 - RNA, 21 nt, Human
ccccucagcagccagggaccc

SEQ ID NO: 218513 - RNA, 23 nt, Human
cccgccuccacauucccgguccc

SEQ ID NO: 218514 - RNA, 24 nt, Human
cccgguccccggcugugcugaggg

SEQ ID NO: 218515 - RNA, 18 nt, Human
cccugcucccagccaggg

SEQ ID NO: 218516 - RNA, 20 nt, Human
ccggcccccugggcucuccg

SEQ ID NO: 218517 - RNA, 20 nt, Human
ccuagaucagagaacacagc

SEQ ID NO: 218518 - RNA, 20 nt, Human
ccuagggggcucccagaggc

SEQ ID NO: 218519 - RNA, 20 nt, Human
ccucaugugucccacccucc

SEQ ID NO: 218520 - RNA, 25 nt, Human
ccuccagacacacacaccuuggucc

SEQ ID NO: 218521 - RNA, 20 nt, Human
ccucuggaagccagaagccu

SEQ ID NO: 218522 - RNA, 22 nt, Human
ccugaaguuaggaaaaugacua

SEQ ID NO: 218523 - RNA, 19 nt, Human
ccuggacucucccagcucc

SEQ ID NO: 218524 - RNA, 22 nt, Human
ccuggcauccaccacauacccu

SEQ ID NO: 218525 - RNA, 22 nt, Human
ccuggggccagggcccagagac

SEQ ID NO: 218526 - RNA, 21 nt, Human
cgcaggugguagguccaggcu

SEQ ID NO: 218527 - RNA, 21 nt, Human
cggcagaaauaaggcugugcu

SEQ ID NO: 218528 - RNA, 22 nt, Human
cgggggccagggagggcguggg

SEQ ID NO: 218529 - RNA, 22 nt, Human
cuagaucagagaacacagccaa

SEQ ID NO: 218530 - RNA, 26 nt, Human
cucaugugucccacccuccaccccca

SEQ ID NO: 218531 - RNA, 18 nt, Human
cuccucugggaaggccua

SEQ ID NO: 218532 - RNA, 24 nt, Human
cucugggccccaugacaggagccc

SEQ ID NO: 218533 - RNA, 19 nt, Human
gaaacaagaguccagccuu

SEQ ID NO: 218534 - RNA, 19 nt, Human
gagucccuguggugacgag

SEQ ID NO: 218535 - RNA, 23 nt, Human
gagucccuguggugacgagggcu

SEQ ID NO: 218536 - RNA, 24 nt, Human
gaucccaucuuccccugguagcac

SEQ ID NO: 218537 - RNA, 21 nt, Human
gcaagccccaaggagcauggg

SEQ ID NO: 218538 - RNA, 19 nt, Human
gcaauuuuaaaacccaaca

SEQ ID NO: 218539 - RNA, 24 nt, Human
gcacagguacacagaguuuguccu

SEQ ID NO: 218540 - RNA, 20 nt, Human
gccagggaccaggaacccgg

SEQ ID NO: 218541 - RNA, 21 nt, Human
gccagggcagggguucuggga

SEQ ID NO: 218542 - RNA, 18 nt, Human
gcccccaagcaagcccag

SEQ ID NO: 218543 - RNA, 24 nt, Human
gcccugaaguuaggaaaaugacua

SEQ ID NO: 218544 - RNA, 19 nt, Human
gcccuggcauccaccacau

SEQ ID NO: 218545 - RNA, 19 nt, Human
ggccagggagggcgugggc

SEQ ID NO: 218546 - RNA, 26 nt, Human
ggccagggcugcuucugggcucuuuc

SEQ ID NO: 218547 - RNA, 21 nt, Human
ggcuggugcuuccuagggggc

SEQ ID NO: 218548 - RNA, 22 nt, Human
gggagauuccauuucacaaucc

SEQ ID NO: 218549 - RNA, 18 nt, Human
gggcacagguacacagag

SEQ ID NO: 218550 - RNA, 20 nt, Human
gggcagggguucugggagau

SEQ ID NO: 218551 - RNA, 27 nt, Human
gggcucuuucuaccaagugggaaagga

SEQ ID NO: 218552 - RNA, 22 nt, Human
gggcugggcaggcacggucuuc

SEQ ID NO: 218553 - RNA, 25 nt, Human
ggggcagcaggccuccgcagguggu

SEQ ID NO: 218554 - RNA, 19 nt, Human
ggggugcagaacaggaaga

SEQ ID NO: 218555 - RNA, 19 nt, Human
gggguucugggagauucca

SEQ ID NO: 218556 - RNA, 19 nt, Human
guagaagagaacuagcacg

SEQ ID NO: 218557 - RNA, 22 nt, Human
guccugccugccuuccagauca

SEQ ID NO: 218558 - RNA, 19 nt, Human
gugguggggugggcagugg

SEQ ID NO: 218559 - RNA, 21 nt, Human
uaaaacccaacaaaauaaaua

SEQ ID NO: 218560 - RNA, 21 nt, Human
uaaguaacagaauaacccuaa

SEQ ID NO: 218561 - RNA, 22 nt, Human
uaccagaaagcccugcucccag

SEQ ID NO: 218562 - RNA, 21 nt, Human
uacccuacaagauacccacac

SEQ ID NO: 218563 - RNA, 20 nt, Human
uagaucagagaacacagcca

SEQ ID NO: 218564 - RNA, 19 nt, Human
uagcacccuuggagcucag

SEQ ID NO: 218565 - RNA, 19 nt, Human
uagcacgguaaauacaaaa

SEQ ID NO: 218566 - RNA, 18 nt, Human
uagcuccagaggcccaga

SEQ ID NO: 218567 - RNA, 25 nt, Human
uagcuccuggacucucccagcuccu

SEQ ID NO: 218568 - RNA, 24 nt, Human
uaggaaaaugacuagaaacucuca

SEQ ID NO: 218569 - RNA, 20 nt, Human
uagguucuccacgaaucucc

SEQ ID NO: 218570 - RNA, 20 nt, Human
uaguaggugacccucucuac

SEQ ID NO: 218571 - RNA, 23 nt, Human
ucaaaacaaaggcaaagcuuuca

SEQ ID NO: 218572 - RNA, 24 nt, Human
ucacuauagcuccagaggcccaga

SEQ ID NO: 218573 - RNA, 21 nt, Human
ucacuggcuuucaguuaaaau

SEQ ID NO: 218574 - RNA, 18 nt, Human
ucagucagguguaaguga

SEQ ID NO: 218575 - RNA, 19 nt, Human
uccaaggucccauggggag

SEQ ID NO: 218576 - RNA, 18 nt, Human
uccaaguggcacagcuuc

SEQ ID NO: 218577 - RNA, 21 nt, Human
uccagaggcccagaguugacu

SEQ ID NO: 218578 - RNA, 19 nt, Human
uccauaccagauggguggg

SEQ ID NO: 218579 - RNA, 18 nt, Human
uccauagucucccucugu

SEQ ID NO: 218580 - RNA, 18 nt, Human
ucccacccuccaccccca

SEQ ID NO: 218581 - RNA, 20 nt, Human
ucccacccuccacccccagc

SEQ ID NO: 218582 - RNA, 21 nt, Human
ucccagccagggaccaggaac

SEQ ID NO: 218583 - RNA, 21 nt, Human
ucccucugugucccuagcucc

SEQ ID NO: 218584 - RNA, 21 nt, Human
ucccuguggugacgagggcug

SEQ ID NO: 218585 - RNA, 18 nt, Human
ucgccuccucugggaagg

SEQ ID NO: 218586 - RNA, 19 nt, Human
ucggcaggcgggggggucc

SEQ ID NO: 218587 - RNA, 20 nt, Human
ucucccagcuccuguaccuc

SEQ ID NO: 218588 - RNA, 19 nt, Human
ucuuggcuccugggucugg

SEQ ID NO: 218589 - RNA, 21 nt, Human
ugaccaccccagagccagggg

SEQ ID NO: 218590 - RNA, 18 nt, Human
ugacuagaaacucucauc

SEQ ID NO: 218591 - RNA, 19 nt, Human
ugagagacagaguaggugu

SEQ ID NO: 218592 - RNA, 21 nt, Human
ugagcagcccuggagaggcca

SEQ ID NO: 218593 - RNA, 20 nt, Human
ugauuugcuuuagcaaacuu

SEQ ID NO: 218594 - RNA, 21 nt, Human
ugcacugccaggacccaagga

SEQ ID NO: 218595 - RNA, 19 nt, Human
ugcagagaaacucaaagcu

SEQ ID NO: 218596 - RNA, 20 nt, Human
ugcagagaaacucaaagcua

SEQ ID NO: 218597 - RNA, 21 nt, Human
ugcagagaaacucaaagcuaa

SEQ ID NO: 218598 - RNA, 20 nt, Human
ugccaauaagaggccccaug

SEQ ID NO: 218599 - RNA, 22 nt, Human
ugccagaaggaauucccgccuc

SEQ ID NO: 218600 - RNA, 24 nt, Human
ugccagaaggaauucccgccucca

SEQ ID NO: 218601 - RNA, 18 nt, Human
ugccaggaacucgugggg

SEQ ID NO: 218602 - RNA, 20 nt, Human
ugccaggacccaaggagucc

SEQ ID NO: 218603 - RNA, 19 nt, Human
ugccagggcagggguucug

SEQ ID NO: 218604 - RNA, 27 nt, Human
ugccccaacuaccagaaagcccugcug

SEQ ID NO: 218605 - RNA, 18 nt, Human
uggaagccagaagccugc

SEQ ID NO: 218606 - RNA, 19 nt, Human
uggacagaugcagagaaac

SEQ ID NO: 218607 - RNA, 23 nt, Human
uggcaaaauggcuugagagacag

SEQ ID NO: 218608 - RNA, 19 nt, Human
uggcaagccccaaggagca

SEQ ID NO: 218609 - RNA, 24 nt, Human
uggcacagcuucugcucgccuccu

SEQ ID NO: 218610 - RNA, 18 nt, Human
uggcuccccaacgccccc

SEQ ID NO: 218611 - RNA, 19 nt, Human
uggcuccugggucuggccu

SEQ ID NO: 218612 - RNA, 25 nt, Human
ugggcaggcacggucuuccaggcug

SEQ ID NO: 218613 - RNA, 19 nt, Human
ugggcagguugacaguucc

SEQ ID NO: 218614 - RNA, 22 nt, Human
ugggcucuuucuaccaaguggg

SEQ ID NO: 218615 - RNA, 18 nt, Human
uggggccagggcccagag

SEQ ID NO: 218616 - RNA, 29 nt, Human
uggggccagggcccagagacuccgagggg

SEQ ID NO: 218617 - RNA, 22 nt, Human
uggggccccccgcaggacaggg

SEQ ID NO: 218618 - RNA, 24 nt, Human
uggggugggcagugguuccuccag

SEQ ID NO: 218619 - RNA, 19 nt, Human
uggguggcaagccccaagg

SEQ ID NO: 218620 - RNA, 24 nt, Human
uggguuauauacacauggggugga

SEQ ID NO: 218621 - RNA, 23 nt, Human
ugguagcacccuuggagcucagc

SEQ ID NO: 218622 - RNA, 18 nt, Human
ugucccacccuccacccc

SEQ ID NO: 218623 - RNA, 19 nt, Human
ugucccacccuccaccccc

SEQ ID NO: 218624 - RNA, 23 nt, Human
ugugcaauuuuaaaacccaacaa

SEQ ID NO: 218625 - RNA, 20 nt, Human
ugugcugaggggcugccccc

SEQ ID NO: 218626 - RNA, 21 nt, Human
uguuugacaggcacugugcag

SEQ ID NO: 218627 - RNA, 25 nt, Human
uuccccagagaccccgggguggugg

SEQ ID NO: 218628 - RNA, 23 nt, Human
uuguccugccugcuggcacaugc

SEQ ID NO: 218629 - RNA, 20 nt, Human
aaaacuaggcaacagauaua

SEQ ID NO: 218630 - RNA, 21 nt, Human
aaaugcccaggggccugaaac

SEQ ID NO: 218631 - RNA, 23 nt, Human
aaaugucaucaugccaacaauuc

SEQ ID NO: 218632 - RNA, 28 nt, Human
aaucauauacauacaguauaaaacugag

SEQ ID NO: 218633 - RNA, 21 nt, Human
aauccugcuccucuguaguca

SEQ ID NO: 218634 - RNA, 20 nt, Human
acacaccagcuucaaagaag

SEQ ID NO: 218635 - RNA, 21 nt, Human
acauauauccaaaccuuuaga

SEQ ID NO: 218636 - RNA, 18 nt, Human
acucuguugccaaagcaa

SEQ ID NO: 218637 - RNA, 24 nt, Human
agaaaagaaaucaugugacaagaa

SEQ ID NO: 218638 - RNA, 18 nt, Human
agaugaagaaaaaauaaa

SEQ ID NO: 218639 - RNA, 24 nt, Human
aggcaacagauauaaaagauuuca

SEQ ID NO: 218640 - RNA, 20 nt, Human
aguaucgauuuauccugaac

SEQ ID NO: 218641 - RNA, 20 nt, Human
aguauuaacacaccagcuuc

SEQ ID NO: 218642 - RNA, 22 nt, Human
caaaaugcccaggggccugaaa

SEQ ID NO: 218643 - RNA, 21 nt, Human
caacagauauaaaagauuuca

SEQ ID NO: 218644 - RNA, 18 nt, Human
caagcccagcgaggggug

SEQ ID NO: 218645 - RNA, 22 nt, Human
cacucuguugccaaagcaagcc

SEQ ID NO: 218646 - RNA, 24 nt, Human
caucaagaaaagaaaucaugugac

SEQ ID NO: 218647 - RNA, 25 nt, Human
caucaagaaaagaaaucaugugaca

SEQ ID NO: 218648 - RNA, 21 nt, Human
cauuaucuucuucacaagcua

SEQ ID NO: 218649 - RNA, 21 nt, Human
cccacaccuccucucgggugc

SEQ ID NO: 218650 - RNA, 18 nt, Human
cccggggagccacgccgg

SEQ ID NO: 218651 - RNA, 19 nt, Human
ccgcuggguaaucccaugu

SEQ ID NO: 218652 - RNA, 22 nt, Human
cgagaaacagcaucaccagagg

SEQ ID NO: 218653 - RNA, 22 nt, Human
cgcuggguaaucccauguccgc

SEQ ID NO: 218654 - RNA, 20 nt, Human
cggaacacccacaccuccuc

SEQ ID NO: 218655 - RNA, 19 nt, Human
cucauuagccauacccaca

SEQ ID NO: 218656 - RNA, 28 nt, Human
cucauuagccauacccacacuaauaaua

SEQ ID NO: 218657 - RNA, 29 nt, Human
cucauuagccauacccacacuaauaauaa

SEQ ID NO: 218658 - RNA, 19 nt, Human
cuccucuguagucagcucc

SEQ ID NO: 218659 - RNA, 19 nt, Human
cugauuuaacaguucauag

SEQ ID NO: 218660 - RNA, 21 nt, Human
cuuucuguuaguccuuccaaa

SEQ ID NO: 218661 - RNA, 20 nt, Human
gaaacagcaucaccagagga

SEQ ID NO: 218662 - RNA, 19 nt, Human
gcauuuuuaauauuuuugg

SEQ ID NO: 218663 - RNA, 23 nt, Human
gggggagcagggcgaggagaggg

SEQ ID NO: 218664 - RNA, 21 nt, Human
ggugcaaauccugcuccucug

SEQ ID NO: 218665 - RNA, 22 nt, Human
ggugcaaauccugcuccucuga

SEQ ID NO: 218666 - RNA, 20 nt, Human
uaaaaaacauaaauacuggc

SEQ ID NO: 218667 - RNA, 21 nt, Human
uaaaaguaucuuugaaacuaa

SEQ ID NO: 218668 - RNA, 21 nt, Human
uaacacaccagcuucaaagaa

SEQ ID NO: 218669 - RNA, 19 nt, Human
uaacgagaaacagcaucac

SEQ ID NO: 218670 - RNA, 22 nt, Human
uaaucuagaaaccaucaauuau

SEQ ID NO: 218671 - RNA, 18 nt, Human
uacaugguacaaaaugcc

SEQ ID NO: 218672 - RNA, 18 nt, Human
uacccaggagaugacacu

SEQ ID NO: 218673 - RNA, 24 nt, Human
uagaaaguucccuuuaaaaaauuc

SEQ ID NO: 218674 - RNA, 24 nt, Human
uaggagacggaggcacuacugcca

SEQ ID NO: 218675 - RNA, 24 nt, Human
uaggcaacagauauaaaagauuuc

SEQ ID NO: 218676 - RNA, 24 nt, Human
uauaaaaaacauaaauacuggcua

SEQ ID NO: 218677 - RNA, 19 nt, Human
uaucacuaggagacggagg

SEQ ID NO: 218678 - RNA, 22 nt, Human
ucaaagaagugcacucccuuua

SEQ ID NO: 218679 - RNA, 23 nt, Human
ucacaagcuaaaguaugagccuc

SEQ ID NO: 218680 - RNA, 22 nt, Human
ucagaagaauaacaugucugug

SEQ ID NO: 218681 - RNA, 18 nt, Human
ucucuuguaaaaugagau

SEQ ID NO: 218682 - RNA, 20 nt, Human
ucucuuguaaaaugagaucc

SEQ ID NO: 218683 - RNA, 23 nt, Human
ucuguugccaaagcaagcccagc

SEQ ID NO: 218684 - RNA, 20 nt, Human
ucuugaaaauccugaccugg

SEQ ID NO: 218685 - RNA, 24 nt, Human
ucuuucuugaaaauccugaccugg

SEQ ID NO: 218686 - RNA, 19 nt, Human
ugacaagaaauaaaaccaa

SEQ ID NO: 218687 - RNA, 21 nt, Human
uggacuagauaaucuagaaac

SEQ ID NO: 218688 - RNA, 19 nt, Human
uggcagcagcaucauuuga

SEQ ID NO: 218689 - RNA, 21 nt, Human
ugggucaggcacucuguugcc

SEQ ID NO: 218690 - RNA, 23 nt, Human
uguaaaaugagauccauguacaa

SEQ ID NO: 218691 - RNA, 21 nt, Human
uguagucagcuccuuggugcc

SEQ ID NO: 218692 - RNA, 20 nt, Human
uuuggcacaaaugaaauguc

SEQ ID NO: 218693 - RNA, 20 nt, Human
aaaagcuccaaaguacuaag

SEQ ID NO: 218694 - RNA, 18 nt, Human
aaacaaacaaauaugugg

SEQ ID NO: 218695 - RNA, 19 nt, Human
aagagccacggcggaggca

SEQ ID NO: 218696 - RNA, 25 nt, Human
aagcuuuaaaaauugucagagcaaa

SEQ ID NO: 218697 - RNA, 19 nt, Human
acaucuuggcacuugguug

SEQ ID NO: 218698 - RNA, 18 nt, Human
accugauacuguuaauag

SEQ ID NO: 218699 - RNA, 20 nt, Human
agaauaaccugaacacacca

SEQ ID NO: 218700 - RNA, 27 nt, Human
agaccggggccaagcgccagcucggga

SEQ ID NO: 218701 - RNA, 24 nt, Human
agaguucucccugccccgugucuc

SEQ ID NO: 218702 - RNA, 19 nt, Human
agcucgggacaccccgcga

SEQ ID NO: 218703 - RNA, 21 nt, Human
aguaugagguggugcugggga

SEQ ID NO: 218704 - RNA, 21 nt, Human
auacaguuuuaaauauguaau

SEQ ID NO: 218705 - RNA, 24 nt, Human
aucacuuuuaagcauuuucaugua

SEQ ID NO: 218706 - RNA, 22 nt, Human
auggucucaaaaaacccuuucc

SEQ ID NO: 218707 - RNA, 24 nt, Human
caaauaugugguaucauuuaaagu

SEQ ID NO: 218708 - RNA, 23 nt, Human
caaauggcuuucacuccauguuu

SEQ ID NO: 218709 - RNA, 21 nt, Human
caccccgcgaagaggcagccc

SEQ ID NO: 218710 - RNA, 23 nt, Human
cacucccugucacaucacuuuuu

SEQ ID NO: 218711 - RNA, 22 nt, Human
cagaguaucucccagagucugg

SEQ ID NO: 218712 - RNA, 20 nt, Human
cagccaaccaugucaguggc

SEQ ID NO: 218713 - RNA, 23 nt, Human
cagcccaggcgcccagagaagcc

SEQ ID NO: 218714 - RNA, 21 nt, Human
caggacacugaugaaaggcua

SEQ ID NO: 218715 - RNA, 19 nt, Human
caguggacgucccucuucu

SEQ ID NO: 218716 - RNA, 19 nt, Human
cauccugccgcucccugcc

SEQ ID NO: 218717 - RNA, 20 nt, Human
caugcagacauaucaaaauu

SEQ ID NO: 218718 - RNA, 19 nt, Human
ccaccucguguccacuccc

SEQ ID NO: 218719 - RNA, 20 nt, Human
cccucuucuucccugcgccc

SEQ ID NO: 218720 - RNA, 22 nt, Human
cccugucacaucacuuuuuucc

SEQ ID NO: 218721 - RNA, 21 nt, Human
ccgcagccgccgcccgcuccc

SEQ ID NO: 218722 - RNA, 22 nt, Human
ccgcccgcuccccggcagguuu

SEQ ID NO: 218723 - RNA, 20 nt, Human
ccuauccauaaaacucugcc

SEQ ID NO: 218724 - RNA, 18 nt, Human
ccuccuccuccuccuucc

SEQ ID NO: 218725 - RNA, 18 nt, Human
ccuccuccuucccucucc

SEQ ID NO: 218726 - RNA, 21 nt, Human
ccuccuucccucuccgcuccc

SEQ ID NO: 218727 - RNA, 22 nt, Human
ccuccuucccucuccgcuccca

SEQ ID NO: 218728 - RNA, 19 nt, Human
ccugcgcccucgccgcccu

SEQ ID NO: 218729 - RNA, 20 nt, Human
ccuggggcuuacuguuggcu

SEQ ID NO: 218730 - RNA, 18 nt, Human
cgccgcccucucuccagg

SEQ ID NO: 218731 - RNA, 21 nt, Human
cgcucccugcccucuccagcc

SEQ ID NO: 218732 - RNA, 24 nt, Human
cggcggaggcacggcccgagccac

SEQ ID NO: 218733 - RNA, 23 nt, Human
cgggacaccccgcgaagagggag

SEQ ID NO: 218734 - RNA, 20 nt, Human
cuagaccuuaaaccuuggcc

SEQ ID NO: 218735 - RNA, 21 nt, Human
cuagguucaaaguucugugcu

SEQ ID NO: 218736 - RNA, 21 nt, Human
cuccaacaccuuugcuccucc

SEQ ID NO: 218737 - RNA, 18 nt, Human
cuccagggagccgccgcg

SEQ ID NO: 218738 - RNA, 19 nt, Human
cuccuagguucaaaguucu

SEQ ID NO: 218739 - RNA, 20 nt, Human
cuccuccuccuccuccuucc

SEQ ID NO: 218740 - RNA, 23 nt, Human
cuccuccuucccucuccgcuccc

SEQ ID NO: 218741 - RNA, 22 nt, Human
cugaagcaauucuuuaagcaca

SEQ ID NO: 218742 - RNA, 22 nt, Human
cuggucagaaaaaauacuguca

SEQ ID NO: 218743 - RNA, 25 nt, Human
cugugcugcaugcagacauaucaaa

SEQ ID NO: 218744 - RNA, 18 nt, Human
cuuggauuuuuuuuuccu

SEQ ID NO: 218745 - RNA, 19 nt, Human
cuuggcacuugguuguuuu

SEQ ID NO: 218746 - RNA, 18 nt, Human
gacucuggaggcaguguu

SEQ ID NO: 218747 - RNA, 19 nt, Human
gagaagccgcagccgccgc

SEQ ID NO: 218748 - RNA, 20 nt, Human
gauuaaaauauuuuaaagug

SEQ ID NO: 218749 - RNA, 20 nt, Human
gcacuugguuguuuuuaacu

SEQ ID NO: 218750 - RNA, 25 nt, Human
gcaggacacugaugaaaggcuaguc

SEQ ID NO: 218751 - RNA, 29 nt, Human
gcagguuuccuguuccuuucugaaguuuu

SEQ ID NO: 218752 - RNA, 23 nt, Human
gcugcuucaugcugcuucauguu

SEQ ID NO: 218753 - RNA, 26 nt, Human
ggccaagcgccagcucgggacacccc

SEQ ID NO: 218754 - RNA, 21 nt, Human
ggucuucgcaaccaugaaaac

SEQ ID NO: 218755 - RNA, 24 nt, Human
guggugcuggggaguaccaguagc

SEQ ID NO: 218756 - RNA, 21 nt, Human
uaaaagaagaaauuccagccc

SEQ ID NO: 218757 - RNA, 20 nt, Human
uaaaaggcaaugccaccauc

SEQ ID NO: 218758 - RNA, 24 nt, Human
uaaauuguucucggagcuaaccca

SEQ ID NO: 218759 - RNA, 23 nt, Human
uaacccacucaacaucuuggcac

SEQ ID NO: 218760 - RNA, 23 nt, Human
uaagaauaaccugaacacaccag

SEQ ID NO: 218761 - RNA, 23 nt, Human
uaagaguaacugaaugacagcug

SEQ ID NO: 218762 - RNA, 18 nt, Human
uagcaaacccuaucuaga

SEQ ID NO: 218763 - RNA, 21 nt, Human
uagccaccaaaguaugacuuc

SEQ ID NO: 218764 - RNA, 22 nt, Human
uauaaaaggcaaugccaccauc

SEQ ID NO: 218765 - RNA, 20 nt, Human
uauacaugacuuagaacaug

SEQ ID NO: 218766 - RNA, 20 nt, Human
uauagcaaacccuaucuaga

SEQ ID NO: 218767 - RNA, 23 nt, Human
uauucagugaucaggcaggacac

SEQ ID NO: 218768 - RNA, 22 nt, Human
uauuuugcucugcuauuccaaa

SEQ ID NO: 218769 - RNA, 20 nt, Human
ucagaaaaaauacugucaug

SEQ ID NO: 218770 - RNA, 19 nt, Human
ucagagugaggaauucuuu

SEQ ID NO: 218771 - RNA, 18 nt, Human
ucagggucuuucagcucc

SEQ ID NO: 218772 - RNA, 20 nt, Human
ucccaccucguguccacucc

SEQ ID NO: 218773 - RNA, 23 nt, Human
ucccugccccgugucuccuucca

SEQ ID NO: 218774 - RNA, 20 nt, Human
ucccugcgcccucgccgccc

SEQ ID NO: 218775 - RNA, 19 nt, Human
uccuagguucaaaguucug

SEQ ID NO: 218776 - RNA, 19 nt, Human
uccuggggcuuacuguugg

SEQ ID NO: 218777 - RNA, 21 nt, Human
ucucaauaauuccuaucacuu

SEQ ID NO: 218778 - RNA, 24 nt, Human
ucugaaguuuucucuccaacaccu

SEQ ID NO: 218779 - RNA, 21 nt, Human
ugaaugacagcugaauuucuc

SEQ ID NO: 218780 - RNA, 22 nt, Human
ugaaugacagcugaauuucuca

SEQ ID NO: 218781 - RNA, 21 nt, Human
ugccgcucccugcccucucca

SEQ ID NO: 218782 - RNA, 20 nt, Human
ugcuauuccaaauguguagu

SEQ ID NO: 218783 - RNA, 21 nt, Human
ugcuccacauugacagagccu

SEQ ID NO: 218784 - RNA, 19 nt, Human
ugcucugggucccaacagc

SEQ ID NO: 218785 - RNA, 19 nt, Human
ugcuggggaguaccaguag

SEQ ID NO: 218786 - RNA, 23 nt, Human
uguacuuuuuaccugauacuguu

SEQ ID NO: 218787 - RNA, 21 nt, Human
ugucuccuuccauccugccgc

SEQ ID NO: 218788 - RNA, 18 nt, Human
ugugagaggcaaaagcuc

SEQ ID NO: 218789 - RNA, 21 nt, Human
ugugcuccacauugacagagc

SEQ ID NO: 218790 - RNA, 18 nt, Human
ugugggggagaggccagg

SEQ ID NO: 218791 - RNA, 23 nt, Human
ugugucacaaaccuauaugccac

SEQ ID NO: 218792 - RNA, 24 nt, Human
uuaaaaauugucagagcaaacccu

SEQ ID NO: 218793 - RNA, 18 nt, Human
uucaauacauuucuugga

SEQ ID NO: 218794 - RNA, 19 nt, Human
uucaauacauuucuuggau

SEQ ID NO: 218795 - RNA, 24 nt, Human
uuccuggggcuuacuguuggcuuu

SEQ ID NO: 218796 - RNA, 18 nt, Human
uuccuguuccuuucugaa

SEQ ID NO: 218797 - RNA, 23 nt, Human
uucgcaaccaugaaaacacaguu

SEQ ID NO: 218798 - RNA, 21 nt, Human
uucuucccugcgcccucgccg

SEQ ID NO: 218799 - RNA, 21 nt, Human
uugaaauguggcauuuucuug

SEQ ID NO: 218800 - RNA, 23 nt, Human
uugcuacauuuugaaaagcccuu

SEQ ID NO: 218801 - RNA, 22 nt, Human
uuuaagcacagcaaacguugag

SEQ ID NO: 218802 - RNA, 21 nt, Human
uuuaggaaccaauagcuuaag

SEQ ID NO: 218803 - RNA, 21 nt, Human
aagaggcagguccugggagca

SEQ ID NO: 218804 - RNA, 19 nt, Human
aagccugggaagaggcagg

SEQ ID NO: 218805 - RNA, 23 nt, Human
acagugaggucugcacuggcuac

SEQ ID NO: 218806 - RNA, 19 nt, Human
agcugcacagccaugggca

SEQ ID NO: 218807 - RNA, 27 nt, Human
caaagcccuaaaaucacuaguaacagc

SEQ ID NO: 218808 - RNA, 20 nt, Human
caccaaaaggagaaaaacaa

SEQ ID NO: 218809 - RNA, 22 nt, Human
cacccaacccgagggagggggc

SEQ ID NO: 218810 - RNA, 19 nt, Human
caccuggagccaugccggg

SEQ ID NO: 218811 - RNA, 21 nt, Human
cacgcaagcgcagcucagccc

SEQ ID NO: 218812 - RNA, 19 nt, Human
cagcagaucugaggcacgg

SEQ ID NO: 218813 - RNA, 22 nt, Human
cagcauaacugccaccuccccc

SEQ ID NO: 218814 - RNA, 22 nt, Human
cagccaugggcagggcugagca

SEQ ID NO: 218815 - RNA, 23 nt, Human
cauaacugccaccucccccagag

SEQ ID NO: 218816 - RNA, 19 nt, Human
caucauggagucaccaggc

SEQ ID NO: 218817 - RNA, 24 nt, Human
caugaaacagccacgcaagcgcag

SEQ ID NO: 218818 - RNA, 18 nt, Human
caugccggggguggcaug

SEQ ID NO: 218819 - RNA, 22 nt, Human
cccacaaggaggacuacaaaga

SEQ ID NO: 218820 - RNA, 19 nt, Human
ccccagaggccgcagccgc

SEQ ID NO: 218821 - RNA, 20 nt, Human
ccccagaggccgcagccgcc

SEQ ID NO: 218822 - RNA, 20 nt, Human
ccggggguggcauggacacg

SEQ ID NO: 218823 - RNA, 18 nt, Human
ccuccggggcccagggcg

SEQ ID NO: 218824 - RNA, 24 nt, Human
ccuccggggcccagggcguggggg

SEQ ID NO: 218825 - RNA, 19 nt, Human
ccugggaagaggcaggucc

SEQ ID NO: 218826 - RNA, 24 nt, Human
cucaggccaaaggauuuguaaaac

SEQ ID NO: 218827 - RNA, 22 nt, Human
cucuaagcaggacugucagcuc

SEQ ID NO: 218828 - RNA, 23 nt, Human
cugaggcacggagggagcugcac

SEQ ID NO: 218829 - RNA, 22 nt, Human
gaccccacucuuaacuacccac

SEQ ID NO: 218830 - RNA, 21 nt, Human
gcacagcacccuugaaauaag

SEQ ID NO: 218831 - RNA, 18 nt, Human
gcauaacugccaccuccc

SEQ ID NO: 218832 - RNA, 24 nt, Human
ggaagccugggaagaggcaggucc

SEQ ID NO: 218833 - RNA, 21 nt, Human
gggaagaggcagguccuggga

SEQ ID NO: 218834 - RNA, 26 nt, Human
ggggguggcauggacacgacagugag

SEQ ID NO: 218835 - RNA, 20 nt, Human
ggugggugucagggugucug

SEQ ID NO: 218836 - RNA, 21 nt, Human
uaacagcauaacugccaccuc

SEQ ID NO: 218837 - RNA, 19 nt, Human
uaacauauuaguucucagg

SEQ ID NO: 218838 - RNA, 23 nt, Human
uacaccaaaaggagaaaaacaag

SEQ ID NO: 218839 - RNA, 18 nt, Human
ucaugaaacagccacgca

SEQ ID NO: 218840 - RNA, 20 nt, Human
uccccaggaagccugggaag

SEQ ID NO: 218841 - RNA, 18 nt, Human
ucccccuccaugcucuuc

SEQ ID NO: 218842 - RNA, 19 nt, Human
uccccuguuggggccuucg

SEQ ID NO: 218843 - RNA, 21 nt, Human
ucugcacuggcuacagcagau

SEQ ID NO: 218844 - RNA, 23 nt, Human
ugaggcucccccuccaugcucuu

SEQ ID NO: 218845 - RNA, 19 nt, Human
ugaugagcauccccuguug

SEQ ID NO: 218846 - RNA, 20 nt, Human
ugggaagaggcagguccugg

SEQ ID NO: 218847 - RNA, 21 nt, Human
ugggaagaggcagguccuggg

SEQ ID NO: 218848 - RNA, 21 nt, Human
ugggcagggcugagcacagca

SEQ ID NO: 218849 - RNA, 22 nt, Human
ugggcguacaacucuuccccag

SEQ ID NO: 218850 - RNA, 24 nt, Human
ugucagggugucuggcagaguggg

SEQ ID NO: 218851 - RNA, 24 nt, Human
uuacaccaaaaggagaaaaacaag

SEQ ID NO: 218852 - RNA, 20 nt, Human
uucucaggccaaaggauuug

SEQ ID NO: 218853 - RNA, 22 nt, Human
aaacaaaacacggcccccacuu

SEQ ID NO: 218854 - RNA, 20 nt, Human
aaacacggcccccacuuuuc

SEQ ID NO: 218855 - RNA, 21 nt, Human
aaagaacucaaaccaaacagc

SEQ ID NO: 218856 - RNA, 22 nt, Human
aaauaucacaggccuccgagcc

SEQ ID NO: 218857 - RNA, 27 nt, Human
aacaugcaaacaaaacacggggaaagu

SEQ ID NO: 218858 - RNA, 20 nt, Human
aaccagacccaucccucaag

SEQ ID NO: 218859 - RNA, 24 nt, Human
aaccagacccaucccucaagcccg

SEQ ID NO: 218860 - RNA, 19 nt, Human
acacauucaguucccagca

SEQ ID NO: 218861 - RNA, 20 nt, Human
acaccaguguguuuucauug

SEQ ID NO: 218862 - RNA, 19 nt, Human
acuuugauaacccuaauua

SEQ ID NO: 218863 - RNA, 23 nt, Human
agaaaaggaauacaauuuccaga

SEQ ID NO: 218864 - RNA, 20 nt, Human
agcucuaggcagcauuuccc

SEQ ID NO: 218865 - RNA, 20 nt, Human
agcugcacccuguugagggc

SEQ ID NO: 218866 - RNA, 18 nt, Human
aggcagcauuucccugca

SEQ ID NO: 218867 - RNA, 23 nt, Human
auaauggacugccuucauuuucu

SEQ ID NO: 218868 - RNA, 18 nt, Human
aucacaggccuccgagcc

SEQ ID NO: 218869 - RNA, 20 nt, Human
auguguggccgugggcuggg

SEQ ID NO: 218870 - RNA, 18 nt, Human
caaaacacggcccccacu

SEQ ID NO: 218871 - RNA, 22 nt, Human
caaagagaacaccaucuaguac

SEQ ID NO: 218872 - RNA, 20 nt, Human
cagcagaggggugacuuucu

SEQ ID NO: 218873 - RNA, 23 nt, Human
cagcagaggggugacuuucuaga

SEQ ID NO: 218874 - RNA, 19 nt, Human
caggagagaugggauucug

SEQ ID NO: 218875 - RNA, 20 nt, Human
caguaccaacagaacaugca

SEQ ID NO: 218876 - RNA, 25 nt, Human
ccaaccgagacccagugacccaaca

SEQ ID NO: 218877 - RNA, 18 nt, Human
ccaguaccaacagaacau

SEQ ID NO: 218878 - RNA, 23 nt, Human
ccaguaccaacagaacaugcaaa

SEQ ID NO: 218879 - RNA, 21 nt, Human
cccaucccucaagcccgggaa

SEQ ID NO: 218880 - RNA, 23 nt, Human
cccuagaagccauaaugagaccc

SEQ ID NO: 218881 - RNA, 23 nt, Human
ccgggaaggggcuagacucccag

SEQ ID NO: 218882 - RNA, 21 nt, Human
ccucaagcccgggaaggggcu

SEQ ID NO: 218883 - RNA, 20 nt, Human
ccuguagugaggacaaagga

SEQ ID NO: 218884 - RNA, 20 nt, Human
cgccccagggacaaaucagu

SEQ ID NO: 218885 - RNA, 19 nt, Human
cgggcggguccgcgcugcc

SEQ ID NO: 218886 - RNA, 22 nt, Human
cgucauaauuguuucuaaacuc

SEQ ID NO: 218887 - RNA, 25 nt, Human
cucucaugggaaaugauaacccuac

SEQ ID NO: 218888 - RNA, 19 nt, Human
cugccacaacgcugaugcu

SEQ ID NO: 218889 - RNA, 21 nt, Human
cugccuucauuuucuuuccca

SEQ ID NO: 218890 - RNA, 19 nt, Human
cuguagugaucugauccag

SEQ ID NO: 218891 - RNA, 22 nt, Human
cuuugaggggccugucuuugcc

SEQ ID NO: 218892 - RNA, 20 nt, Human
gaacugaauccacgcaacaa

SEQ ID NO: 218893 - RNA, 22 nt, Human
gaccagcucuucaaagagcuaa

SEQ ID NO: 218894 - RNA, 24 nt, Human
gagaaugauuccuaggagcuuuga

SEQ ID NO: 218895 - RNA, 22 nt, Human
gccuagagggggaaggaacggc

SEQ ID NO: 218896 - RNA, 19 nt, Human
gcgcugccgccccagggac

SEQ ID NO: 218897 - RNA, 18 nt, Human
gcuagacucccagcugca

SEQ ID NO: 218898 - RNA, 21 nt, Human
gcugagcacacccugagcccg

SEQ ID NO: 218899 - RNA, 20 nt, Human
ggcugccaaccgagacccag

SEQ ID NO: 218900 - RNA, 21 nt, Human
gggugguggaggguggaaaag

SEQ ID NO: 218901 - RNA, 23 nt, Human
ggugguggaggguggaaaagugu

SEQ ID NO: 218902 - RNA, 21 nt, Human
uaaacucacaccaaggacugg

SEQ ID NO: 218903 - RNA, 18 nt, Human
uaaagaacucaaaccaaa

SEQ ID NO: 218904 - RNA, 24 nt, Human
uaaaguugccuuuccagugaccug

SEQ ID NO: 218905 - RNA, 22 nt, Human
uaagcaugcugggaaucagaac

SEQ ID NO: 218906 - RNA, 22 nt, Human
uagcauaucuuucauaaauaca

SEQ ID NO: 218907 - RNA, 18 nt, Human
uagggucuuucacccacc

SEQ ID NO: 218908 - RNA, 21 nt, Human
uaguaaccagacccaucccuc

SEQ ID NO: 218909 - RNA, 25 nt, Human
uaugucuguuguucuugauacaaaa

SEQ ID NO: 218910 - RNA, 22 nt, Human
ucaaaccaaacagcuuggcaca

SEQ ID NO: 218911 - RNA, 27 nt, Human
ucacccaccacauaauggacugccuuc

SEQ ID NO: 218912 - RNA, 18 nt, Human
ucaccgagugaucagcuc

SEQ ID NO: 218913 - RNA, 18 nt, Human
ucagaacugaauccacgc

SEQ ID NO: 218914 - RNA, 20 nt, Human
uccacgcaacaauacaccag

SEQ ID NO: 218915 - RNA, 21 nt, Human
uccgagccaaaagagauuuuu

SEQ ID NO: 218916 - RNA, 21 nt, Human
uccgcgcugccgccccaggga

SEQ ID NO: 218917 - RNA, 22 nt, Human
uccuaggagcuuugaggggccu

SEQ ID NO: 218918 - RNA, 20 nt, Human
ugaggacaaaggaaaacaca

SEQ ID NO: 218919 - RNA, 22 nt, Human
ugcaaacaaaacacggccccca

SEQ ID NO: 218920 - RNA, 22 nt, Human
ugccaucccauaucccugugac

SEQ ID NO: 218921 - RNA, 19 nt, Human
ugccccgggaugugcgggg

SEQ ID NO: 218922 - RNA, 20 nt, Human
ugccccgggaugugcggggc

SEQ ID NO: 218923 - RNA, 22 nt, Human
ugcuugaaguaugaccgggcuc

SEQ ID NO: 218924 - RNA, 23 nt, Human
uggauguaagaaacaggaggguu

SEQ ID NO: 218925 - RNA, 21 nt, Human
ugggcugggacccugcugagc

SEQ ID NO: 218926 - RNA, 19 nt, Human
uggggaacguaccaaaaag

SEQ ID NO: 218927 - RNA, 22 nt, Human
uggggugguggaggguggaaaa

SEQ ID NO: 218928 - RNA, 20 nt, Human
uuagcaaaucaaguuacuau

SEQ ID NO: 218929 - RNA, 21 nt, Human
uuauagaaauaggaaagcaug

SEQ ID NO: 218930 - RNA, 20 nt, Human
uucaagcacagaacagguca

SEQ ID NO: 218931 - RNA, 22 nt, Human
uucaugaccacaacaaacuagg

SEQ ID NO: 218932 - RNA, 23 nt, Human
uucauugacauauauuaauacaa

SEQ ID NO: 218933 - RNA, 23 nt, Human
uuuagaaagcacuuugauaaccc

SEQ ID NO: 218934 - RNA, 22 nt, Human
uuucggggcagggaggauuguc

SEQ ID NO: 218935 - RNA, 18 nt, Human
aaacaaacagagcugaac

SEQ ID NO: 218936 - RNA, 19 nt, Human
aaacagagcccccagcgug

SEQ ID NO: 218937 - RNA, 21 nt, Human
aaaccacuccacgguggacac

SEQ ID NO: 218938 - RNA, 23 nt, Human
aacagagcccccagcgugcaugg

SEQ ID NO: 218939 - RNA, 22 nt, Human
aauggaaaccuuggcaucuaaa

SEQ ID NO: 218940 - RNA, 21 nt, Human
aggcugcagccucucauccug

SEQ ID NO: 218941 - RNA, 19 nt, Human
aucaagcuuucccacuuau

SEQ ID NO: 218942 - RNA, 20 nt, Human
aucaaguuucuguuuuuauu

SEQ ID NO: 218943 - RNA, 22 nt, Human
cagcgugcauggcuuugugagg

SEQ ID NO: 218944 - RNA, 22 nt, Human
cauccugacccuuccccuccug

SEQ ID NO: 218945 - RNA, 18 nt, Human
cauucuccagccccagcc

SEQ ID NO: 218946 - RNA, 21 nt, Human
ccccaagagagcgcagucucu

SEQ ID NO: 218947 - RNA, 22 nt, Human
ccccagccuugugggcuguccc

SEQ ID NO: 218948 - RNA, 24 nt, Human
cccucagccccaagagagcgcagu

SEQ ID NO: 218949 - RNA, 21 nt, Human
ccugaguggcugugacccagc

SEQ ID NO: 218950 - RNA, 23 nt, Human
cgagcgguaacaucugguggucu

SEQ ID NO: 218951 - RNA, 20 nt, Human
cuccacgguggacacauuca

SEQ ID NO: 218952 - RNA, 19 nt, Human
cucucauucuccagcccca

SEQ ID NO: 218953 - RNA, 23 nt, Human
cugcauggugcucccucagcccc

SEQ ID NO: 218954 - RNA, 18 nt, Human
gaagcugcauggugcucc

SEQ ID NO: 218955 - RNA, 23 nt, Human
gcccugaaaauggaaaccuuggc

SEQ ID NO: 218956 - RNA, 22 nt, Human
ggcacuguacuaugggguuugg

SEQ ID NO: 218957 - RNA, 23 nt, Human
uaagaaauaugcaaaaacaauga

SEQ ID NO: 218958 - RNA, 18 nt, Human
uagcagagagugauaaaa

SEQ ID NO: 218959 - RNA, 19 nt, Human
uauagcccugaaaauggaa

SEQ ID NO: 218960 - RNA, 20 nt, Human
uccacauuauuagaguucac

SEQ ID NO: 218961 - RNA, 19 nt, Human
uccugaguggcugugaccc

SEQ ID NO: 218962 - RNA, 21 nt, Human
ucucauccugacccuuccccu

SEQ ID NO: 218963 - RNA, 19 nt, Human
ugaggggugaagcugcaug

SEQ ID NO: 218964 - RNA, 19 nt, Human
ugcaggaaaacagagcccc

SEQ ID NO: 218965 - RNA, 21 nt, Human
ugcaggaaaacagagccccca

SEQ ID NO: 218966 - RNA, 24 nt, Human
uggcugugacccagcagaggucac

SEQ ID NO: 218967 - RNA, 22 nt, Human
uguccuaagaaauaugcaaaaa

SEQ ID NO: 218968 - RNA, 19 nt, Human
uucaguaucaggccgcgcc

SEQ ID NO: 218969 - RNA, 19 nt, Human
uuucccacuuauacuccag

SEQ ID NO: 218970 - RNA, 24 nt, Human
aagagccagcgcugaaacugagcc

SEQ ID NO: 218971 - RNA, 22 nt, Human
aagggcacagagucaccaaaac

SEQ ID NO: 218972 - RNA, 18 nt, Human
accaaaaccugucccaac

SEQ ID NO: 218973 - RNA, 21 nt, Human
agagcagcugggcaggagggc

SEQ ID NO: 218974 - RNA, 19 nt, Human
agagguggguaccugcaug

SEQ ID NO: 218975 - RNA, 23 nt, Human
agcagccaaucacccuaggcggc

SEQ ID NO: 218976 - RNA, 18 nt, Human
agcagcugggcaggaggg

SEQ ID NO: 218977 - RNA, 19 nt, Human
agccagugcaacggccgca

SEQ ID NO: 218978 - RNA, 18 nt, Human
aggagggccugcuguggg

SEQ ID NO: 218979 - RNA, 23 nt, Human
caaaaugcuuggaaccacaagug

SEQ ID NO: 218980 - RNA, 23 nt, Human
caaccucauccagaggccagagg

SEQ ID NO: 218981 - RNA, 19 nt, Human
caagaaaggccacuaggug

SEQ ID NO: 218982 - RNA, 19 nt, Human
cacagagucaccaaaaccu

SEQ ID NO: 218983 - RNA, 21 nt, Human
caccaaaaccugucccaacaa

SEQ ID NO: 218984 - RNA, 23 nt, Human
caccaauccaggcuucgccgccc

SEQ ID NO: 218985 - RNA, 26 nt, Human
cagacaauaugcuuccugcugagucc

SEQ ID NO: 218986 - RNA, 19 nt, Human
cagagucaccaaaaccugu

SEQ ID NO: 218987 - RNA, 19 nt, Human
cagauuucaggauuaggga

SEQ ID NO: 218988 - RNA, 18 nt, Human
caugaugcuugggagcug

SEQ ID NO: 218989 - RNA, 20 nt, Human
ccaauccaggcuucgccgcc

SEQ ID NO: 218990 - RNA, 20 nt, Human
ccagagggcugacaagagca

SEQ ID NO: 218991 - RNA, 24 nt, Human
ccagugcaacggccgcaggccgag

SEQ ID NO: 218992 - RNA, 19 nt, Human
cccaagagaaagagguggg

SEQ ID NO: 218993 - RNA, 21 nt, Human
cccaccaaaccggcuaggggg

SEQ ID NO: 218994 - RNA, 19 nt, Human
cccccagaaaagagacuga

SEQ ID NO: 218995 - RNA, 21 nt, Human
ccgcacccgagccaaucaacc

SEQ ID NO: 218996 - RNA, 22 nt, Human
ccugccagcuuccagccagugc

SEQ ID NO: 218997 - RNA, 22 nt, Human
ccugccccgaacgcugcaaaug

SEQ ID NO: 218998 - RNA, 24 nt, Human
ccugcugugggcagggugggaaag

SEQ ID NO: 218999 - RNA, 23 nt, Human
cgaagagccagcgcugaaacuga

SEQ ID NO: 219000 - RNA, 23 nt, Human
cucugccaugcacgaagagccag

SEQ ID NO: 219001 - RNA, 18 nt, Human
cucuuagcuccaccaauc

SEQ ID NO: 219002 - RNA, 25 nt, Human
cugcugaguccauuuuaaaucacac

SEQ ID NO: 219003 - RNA, 19 nt, Human
cugggcaggagggccugcu

SEQ ID NO: 219004 - RNA, 22 nt, Human
cugucccaacaauccccagaca

SEQ ID NO: 219005 - RNA, 19 nt, Human
cuugccagagccucaccca

SEQ ID NO: 219006 - RNA, 23 nt, Human
gaaaagggggcgaagggucucag

SEQ ID NO: 219007 - RNA, 24 nt, Human
gaaauagcagccccuaacugcgga

SEQ ID NO: 219008 - RNA, 18 nt, Human
gagccagcgcugaaacug

SEQ ID NO: 219009 - RNA, 23 nt, Human
gagccagcucuuagcuccaccaa

SEQ ID NO: 219010 - RNA, 28 nt, Human
gaguccauuuuaaaucacacaacacuag

SEQ ID NO: 219011 - RNA, 19 nt, Human
gcacagagucaccaaaacc

SEQ ID NO: 219012 - RNA, 19 nt, Human
gccagcucuuagcuccacc

SEQ ID NO: 219013 - RNA, 19 nt, Human
ggaggugggcaccugcaug

SEQ ID NO: 219014 - RNA, 23 nt, Human
ggccacuaggugcaggaaaaggg

SEQ ID NO: 219015 - RNA, 18 nt, Human
ggcugcgaggcccaugau

SEQ ID NO: 219016 - RNA, 18 nt, Human
gggcaggagggccugcug

SEQ ID NO: 219017 - RNA, 21 nt, Human
gggcaggagggccugcugugg

SEQ ID NO: 219018 - RNA, 19 nt, Human
gugggcaccugcaugcccc

SEQ ID NO: 219019 - RNA, 19 nt, Human
guggguaccugcaugcccc

SEQ ID NO: 219020 - RNA, 26 nt, Human
uaaaucacacaacacuagccguggca

SEQ ID NO: 219021 - RNA, 19 nt, Human
uccccagacaauaugcuuc

SEQ ID NO: 219022 - RNA, 22 nt, Human
uccccagacaauaugcuuccug

SEQ ID NO: 219023 - RNA, 21 nt, Human
ucgccgcccaccaaaccggcu

SEQ ID NO: 219024 - RNA, 21 nt, Human
ugccccgaacgcugcaaaugc

SEQ ID NO: 219025 - RNA, 19 nt, Human
ugccuacccugggaggugg

SEQ ID NO: 219026 - RNA, 19 nt, Human
ugccuacccugggaggugg

SEQ ID NO: 219027 - RNA, 24 nt, Human
ugcugaguccauuuuaaaucacac

SEQ ID NO: 219028 - RNA, 20 nt, Human
ugcuuggaaccacaaguguu

SEQ ID NO: 219029 - RNA, 18 nt, Human
uggagaacucaaccucau

SEQ ID NO: 219030 - RNA, 18 nt, Human
uggcgugcucccuaggau

SEQ ID NO: 219031 - RNA, 20 nt, Human
ugggcagggugggaaagccg

SEQ ID NO: 219032 - RNA, 20 nt, Human
uguggagaacucaaccucau

SEQ ID NO: 219033 - RNA, 22 nt, Human
uuagggauacuuaaccuguacc

SEQ ID NO: 219034 - RNA, 23 nt, Human
uucccaagaaaggccacuaggug

SEQ ID NO: 219035 - RNA, 24 nt, Human
uuggaccgcacccgagccaaucaa

SEQ ID NO: 219036 - RNA, 18 nt, Human
cacaguaaggcugaggca

SEQ ID NO: 219037 - RNA, 19 nt, Human
caguaaggcugaggcagag

SEQ ID NO: 219038 - RNA, 20 nt, Human
uagaagcuacugucaaccag

SEQ ID NO: 219039 - RNA, 21 nt, Human
ucacaguaaggcugaggcaga

SEQ ID NO: 219040 - RNA, 20 nt, Human
uuagaagcuacugucaaccg

SEQ ID NO: 219041 - RNA, 23 nt, Human
aaaaaacccagccuagcucgcgg

SEQ ID NO: 219042 - RNA, 18 nt, Human
aaaaaaccuguucuaaac

SEQ ID NO: 219043 - RNA, 23 nt, Human
aaaaacaaaaaacaaacaaacaa

SEQ ID NO: 219044 - RNA, 21 nt, Human
aaaacaaaaaacaaacaaaca

SEQ ID NO: 219045 - RNA, 18 nt, Human
aaaaggggggagggaggg

SEQ ID NO: 219046 - RNA, 18 nt, Human
aaacaaacaaaaaaaccu

SEQ ID NO: 219047 - RNA, 26 nt, Human
aaacaacaccacuuuucaaaagcccu

SEQ ID NO: 219048 - RNA, 24 nt, Human
aaacaucugacgucguacaaaaaa

SEQ ID NO: 219049 - RNA, 30 nt, Human
aaacaucugacgucguacaaaaaaaauucc

SEQ ID NO: 219050 - RNA, 24 nt, Human
aaaccuguucuaaacuaauccuca

SEQ ID NO: 219051 - RNA, 23 nt, Human
aaaucagaauuuacaaagucaga

SEQ ID NO: 219052 - RNA, 19 nt, Human
aacaaaaaacaaacaaaca

SEQ ID NO: 219053 - RNA, 23 nt, Human
aacaaguaaugagaagaguucaa

SEQ ID NO: 219054 - RNA, 20 nt, Human
aaccacucacauuuuggcua

SEQ ID NO: 219055 - RNA, 20 nt, Human
aacucaagagucaauaaaua

SEQ ID NO: 219056 - RNA, 22 nt, Human
aacuuguucccuuacugcucug

SEQ ID NO: 219057 - RNA, 21 nt, Human
aagcagaaaaacaaaaaacaa

SEQ ID NO: 219058 - RNA, 21 nt, Human
aaggcacuuucaaauacagaa

SEQ ID NO: 219059 - RNA, 24 nt, Human
acaaacaaaaaaaccuguucuaaa

SEQ ID NO: 219060 - RNA, 19 nt, Human
acaaaguucuacuuuugac

SEQ ID NO: 219061 - RNA, 24 nt, Human
acaucaaagucuccccucccccaa

SEQ ID NO: 219062 - RNA, 22 nt, Human
accaauauacaaaaacaacuca

SEQ ID NO: 219063 - RNA, 23 nt, Human
accaauauacaaaaacaacucag

SEQ ID NO: 219064 - RNA, 18 nt, Human
accacuuuucaaaagccc

SEQ ID NO: 219065 - RNA, 27 nt, Human
agaaaaacaaaaaacaaacaaacaaaa

SEQ ID NO: 219066 - RNA, 20 nt, Human
agaaacuaccauugccagug

SEQ ID NO: 219067 - RNA, 22 nt, Human
agacucgaguaugacacgacag

SEQ ID NO: 219068 - RNA, 19 nt, Human
agccaaccacagaaacuac

SEQ ID NO: 219069 - RNA, 21 nt, Human
aggcaaagagcccggccuccu

SEQ ID NO: 219070 - RNA, 19 nt, Human
aggcaguguacucuauggc

SEQ ID NO: 219071 - RNA, 22 nt, Human
agggggcugggcaggcuccugg

SEQ ID NO: 219072 - RNA, 24 nt, Human
aguaaugagaagaguucaaaaaaa

SEQ ID NO: 219073 - RNA, 24 nt, Human
auaggacaauacaaaguaucuuca

SEQ ID NO: 219074 - RNA, 21 nt, Human
auggaaaaaggggggagggag

SEQ ID NO: 219075 - RNA, 25 nt, Human
auggaaaaaggggggagggagggga

SEQ ID NO: 219076 - RNA, 22 nt, Human
caaaaaaaccuguucuaaacua

SEQ ID NO: 219077 - RNA, 21 nt, Human
caaacaaacaaaaaaaccugu

SEQ ID NO: 219078 - RNA, 24 nt, Human
caaaggcacuuucaaauacagaac

SEQ ID NO: 219079 - RNA, 22 nt, Human
caacucaagagucaauaaauau

SEQ ID NO: 219080 - RNA, 20 nt, Human
caauggugaaccaacaagau

SEQ ID NO: 219081 - RNA, 18 nt, Human
cacagaaacuaccauugc

SEQ ID NO: 219082 - RNA, 23 nt, Human
cacauacauauaaauaaaaagga

SEQ ID NO: 219083 - RNA, 23 nt, Human
cagaaaaacaaaaaacaaacaaa

SEQ ID NO: 219084 - RNA, 23 nt, Human
cagaaacuaccauugccagugua

SEQ ID NO: 219085 - RNA, 24 nt, Human
cagcagaucaccugccugucucuu

SEQ ID NO: 219086 - RNA, 21 nt, Human
cagccaaccacagaaacuacc

SEQ ID NO: 219087 - RNA, 24 nt, Human
cagucaguccuuaaaacguguuuu

SEQ ID NO: 219088 - RNA, 23 nt, Human
cauuuuuuucuuuaaauucuuca

SEQ ID NO: 219089 - RNA, 19 nt, Human
ccaaccacagaaacuacca

SEQ ID NO: 219090 - RNA, 19 nt, Human
ccaagaacaacacaucaaa

SEQ ID NO: 219091 - RNA, 23 nt, Human
ccacacuguuccauguuuucaua

SEQ ID NO: 219092 - RNA, 21 nt, Human
ccagccaaccacagaaacuac

SEQ ID NO: 219093 - RNA, 21 nt, Human
cccccuccucuuccaccuccc

SEQ ID NO: 219094 - RNA, 19 nt, Human
ccgcugccccugcggccgc

SEQ ID NO: 219095 - RNA, 18 nt, Human
ccgcugcuguucgcgcug

SEQ ID NO: 219096 - RNA, 26 nt, Human
ccgcugcuguucgcgcuggugcugcc

SEQ ID NO: 219097 - RNA, 18 nt, Human
ccucccggcuuucuuucc

SEQ ID NO: 219098 - RNA, 23 nt, Human
cgaauggugaaaagaaaucagaa

SEQ ID NO: 219099 - RNA, 18 nt, Human
cgcucccccuccucuucc

SEQ ID NO: 219100 - RNA, 18 nt, Human
cuaaagcagaaaaacaaa

SEQ ID NO: 219101 - RNA, 22 nt, Human
cucaagagucaauaaauauaaa

SEQ ID NO: 219102 - RNA, 23 nt, Human
cucccccaacaacaaaaauacaa

SEQ ID NO: 219103 - RNA, 23 nt, Human
cucccccuccucuuccaccuccc

SEQ ID NO: 219104 - RNA, 19 nt, Human
cuccccuagauggggcucc

SEQ ID NO: 219105 - RNA, 23 nt, Human
cuggaaaacaacaccacuuuuca

SEQ ID NO: 219106 - RNA, 22 nt, Human
cuggugcugccgccggugcugc

SEQ ID NO: 219107 - RNA, 19 nt, Human
cuuaaauuaacacagggau

SEQ ID NO: 219108 - RNA, 19 nt, Human
cuugaacuucguaauagca

SEQ ID NO: 219109 - RNA, 23 nt, Human
cuuucaagagcggcccguuccag

SEQ ID NO: 219110 - RNA, 25 nt, Human
cuuucuuuccuucucucgcgcuccc

SEQ ID NO: 219111 - RNA, 18 nt, Human
gaagugggagcucaaaga

SEQ ID NO: 219112 - RNA, 18 nt, Human
gaggggagaaaaaaaaaa

SEQ ID NO: 219113 - RNA, 20 nt, Human
gcagaaaaacaaaaaacaaa

SEQ ID NO: 219114 - RNA, 19 nt, Human
gcagagccuauuauacccc

SEQ ID NO: 219115 - RNA, 21 nt, Human
gccccaggucuuugagaacuc

SEQ ID NO: 219116 - RNA, 24 nt, Human
gcugcuguucgcgcuggugcugcc

SEQ ID NO: 219117 - RNA, 23 nt, Human
gcuucacagcagccccaggucuu

SEQ ID NO: 219118 - RNA, 20 nt, Human
ggaaaaaggggggagggagg

SEQ ID NO: 219119 - RNA, 18 nt, Human
ggcugggcaggcuccugg

SEQ ID NO: 219120 - RNA, 19 nt, Human
gugcuuccaaguucacaca

SEQ ID NO: 219121 - RNA, 24 nt, Human
uaaagcagaaaaacaaaaaacaaa

SEQ ID NO: 219122 - RNA, 23 nt, Human
uaacacuaauaggacaauacaaa

SEQ ID NO: 219123 - RNA, 18 nt, Human
uaacuauacaaaguucua

SEQ ID NO: 219124 - RNA, 25 nt, Human
uaaggcaggcaguguacucuauggc

SEQ ID NO: 219125 - RNA, 18 nt, Human
uacaaagucagauuggug

SEQ ID NO: 219126 - RNA, 20 nt, Human
uacaaugcuaucaaaaaccu

SEQ ID NO: 219127 - RNA, 22 nt, Human
uauaaauaaaacuaugaucuaa

SEQ ID NO: 219128 - RNA, 23 nt, Human
uauaccccgauuaccagaacaga

SEQ ID NO: 219129 - RNA, 26 nt, Human
uauugccaagaacaacacaucaaaga

SEQ ID NO: 219130 - RNA, 22 nt, Human
ucaaaacuuaaauuaacacagg

SEQ ID NO: 219131 - RNA, 21 nt, Human
ucaaaauuuauugccaagaac

SEQ ID NO: 219132 - RNA, 18 nt, Human
ucagacucgaguaugaca

SEQ ID NO: 219133 - RNA, 19 nt, Human
ucagcaggguggcagaagc

SEQ ID NO: 219134 - RNA, 20 nt, Human
ucagcaggguggcagaagca

SEQ ID NO: 219135 - RNA, 19 nt, Human
ucaguucuuccuccauccc

SEQ ID NO: 219136 - RNA, 19 nt, Human
uccagaugaguuuuguggu

SEQ ID NO: 219137 - RNA, 18 nt, Human
uccaucaguauucugggc

SEQ ID NO: 219138 - RNA, 18 nt, Human
ucccagccaaccacagaa

SEQ ID NO: 219139 - RNA, 20 nt, Human
uccccuagauggggcucccg

SEQ ID NO: 219140 - RNA, 20 nt, Human
ucccuaaaugcaguagauua

SEQ ID NO: 219141 - RNA, 27 nt, Human
ucgcgcuggugcugccgccggugcugc

SEQ ID NO: 219142 - RNA, 20 nt, Human
ucgggacgccgccgcugcug

SEQ ID NO: 219143 - RNA, 24 nt, Human
ucuaaacacauacauauaaauaaa

SEQ ID NO: 219144 - RNA, 22 nt, Human
ucuccccucccccaacaacaaa

SEQ ID NO: 219145 - RNA, 18 nt, Human
ucuggcagaagugggagc

SEQ ID NO: 219146 - RNA, 19 nt, Human
ucuuacuggacauuuuaug

SEQ ID NO: 219147 - RNA, 22 nt, Human
ucuuuccuucucucgcgcuccc

SEQ ID NO: 219148 - RNA, 24 nt, Human
ugacaucaaagucuccccuccccc

SEQ ID NO: 219149 - RNA, 23 nt, Human
ugacgucguacaaaaaaaauucc

SEQ ID NO: 219150 - RNA, 22 nt, Human
ugagaacuccagaugaguuuug

SEQ ID NO: 219151 - RNA, 24 nt, Human
ugagaacuccagaugaguuuugug

SEQ ID NO: 219152 - RNA, 23 nt, Human
ugagacgcucccccuccucuucc

SEQ ID NO: 219153 - RNA, 23 nt, Human
ugcauggaaaaaggggggaggga

SEQ ID NO: 219154 - RNA, 19 nt, Human
ugcugccgccggugcugcc

SEQ ID NO: 219155 - RNA, 26 nt, Human
uggaaaacaacaccacuuuucaaaag

SEQ ID NO: 219156 - RNA, 27 nt, Human
uggaaaacaacaccacuuuucaaaagc

SEQ ID NO: 219157 - RNA, 21 nt, Human
uggcagaagcacacggcaaag

SEQ ID NO: 219158 - RNA, 19 nt, Human
uggcagaagugggagcuca

SEQ ID NO: 219159 - RNA, 19 nt, Human
uggcagaagugggagcuca

SEQ ID NO: 219160 - RNA, 23 nt, Human
uggcagaagugggagcucaaaga

SEQ ID NO: 219161 - RNA, 22 nt, Human
ugggcaggcuccugggagccug

SEQ ID NO: 219162 - RNA, 21 nt, Human
uuaaagaacuacaagcccuca

SEQ ID NO: 219163 - RNA, 21 nt, Human
uucaagucuaaagcagaaaaa

SEQ ID NO: 219164 - RNA, 20 nt, Human
uuccaaguucacacaauuaa

SEQ ID NO: 219165 - RNA, 19 nt, Human
uuccuucucucgcgcuccc

SEQ ID NO: 219166 - RNA, 22 nt, Human
uucgcgcuggugcugccgccgg

SEQ ID NO: 219167 - RNA, 23 nt, Human
uuuacauaacuauacaaaguucu

SEQ ID NO: 219168 - RNA, 22 nt, Human
uuugugguugaaaagccuuuca

SEQ ID NO: 219169 - RNA, 21 nt, Human
uuuuuuuuuuuuuuuuccauu

SEQ ID NO: 219170 - RNA, 21 nt, Human
aaaaaugcacuuucacgagga

SEQ ID NO: 219171 - RNA, 20 nt, Human
aacugcgcagcaggaagggc

SEQ ID NO: 219172 - RNA, 28 nt, Human
aagcacaguggagagaucgccgguaccc

SEQ ID NO: 219173 - RNA, 24 nt, Human
aaucaaauauacagagugcuuccu

SEQ ID NO: 219174 - RNA, 22 nt, Human
acaaaaauagcaacuauccgag

SEQ ID NO: 219175 - RNA, 20 nt, Human
acaguggagagaucgcugga

SEQ ID NO: 219176 - RNA, 21 nt, Human
accggcacuuuggccuggagc

SEQ ID NO: 219177 - RNA, 21 nt, Human
accguaggucccaccgacagc

SEQ ID NO: 219178 - RNA, 21 nt, Human
accucaggccccacuaacaac

SEQ ID NO: 219179 - RNA, 25 nt, Human
acgccgaugaccucaggccccacua

SEQ ID NO: 219180 - RNA, 22 nt, Human
agccaugggucucaccggcacu

SEQ ID NO: 219181 - RNA, 24 nt, Human
agccaugggucucaccggcacuuu

SEQ ID NO: 219182 - RNA, 18 nt, Human
agcgcccgcccgcccucc

SEQ ID NO: 219183 - RNA, 22 nt, Human
agcggcagaggcggcggcggcg

SEQ ID NO: 219184 - RNA, 19 nt, Human
aggcggcggcggcggcggc

SEQ ID NO: 219185 - RNA, 18 nt, Human
aggugcgucaacagccac

SEQ ID NO: 219186 - RNA, 21 nt, Human
caaauauacagagugcuuccu

SEQ ID NO: 219187 - RNA, 23 nt, Human
caaauauacagagugcuuccuuu

SEQ ID NO: 219188 - RNA, 21 nt, Human
caagcgcgagguugaccugcc

SEQ ID NO: 219189 - RNA, 18 nt, Human
caauacugccgccguccc

SEQ ID NO: 219190 - RNA, 25 nt, Human
cacaccaucagccacgggucccacc

SEQ ID NO: 219191 - RNA, 27 nt, Human
caccaacagccaugggccacaccaaca

SEQ ID NO: 219192 - RNA, 19 nt, Human
caccaucagccacgggucc

SEQ ID NO: 219193 - RNA, 25 nt, Human
caccaucagccacgggucccaccaa

SEQ ID NO: 219194 - RNA, 24 nt, Human
cacccgcgcaccugcauaugcaug

SEQ ID NO: 219195 - RNA, 21 nt, Human
caccgacagccacaggccaca

SEQ ID NO: 219196 - RNA, 19 nt, Human
caccgaccaccguaggucc

SEQ ID NO: 219197 - RNA, 18 nt, Human
cagcggcagcggcagagg

SEQ ID NO: 219198 - RNA, 21 nt, Human
caggccccacuaacaaccaca

SEQ ID NO: 219199 - RNA, 21 nt, Human
caggguggacuggccagcaag

SEQ ID NO: 219200 - RNA, 27 nt, Human
cauugacagccacgagucccaccgaca

SEQ ID NO: 219201 - RNA, 21 nt, Human
ccacaccaucagccacggguc

SEQ ID NO: 219202 - RNA, 23 nt, Human
ccagggccacaucaauaaccagg

SEQ ID NO: 219203 - RNA, 21 nt, Human
cccaccgacagccacaggucc

SEQ ID NO: 219204 - RNA, 18 nt, Human
cccccgcgacccgcccgc

SEQ ID NO: 219205 - RNA, 19 nt, Human
cccccgcgacccgcccgcc

SEQ ID NO: 219206 - RNA, 22 nt, Human
ccccgccgccgccgcccgcgcc

SEQ ID NO: 219207 - RNA, 24 nt, Human
ccccgccgccgccgcccgcgcccg

SEQ ID NO: 219208 - RNA, 19 nt, Human
cccgcgcaccugcauaugc

SEQ ID NO: 219209 - RNA, 22 nt, Human
cccgcgcaccugcauaugcaug

SEQ ID NO: 219210 - RNA, 24 nt, Human
cccgcgcucccggcaccgcagcca

SEQ ID NO: 219211 - RNA, 22 nt, Human
cccggccccgccgccgccgccc

SEQ ID NO: 219212 - RNA, 25 nt, Human
cccggccucggcucugcgccgguuc

SEQ ID NO: 219213 - RNA, 21 nt, Human
cccggcggcgacggcggcggc

SEQ ID NO: 219214 - RNA, 18 nt, Human
ccgcccgcgcccggcucc

SEQ ID NO: 219215 - RNA, 19 nt, Human
ccgccgccgccgcccgcgc

SEQ ID NO: 219216 - RNA, 23 nt, Human
ccgccgccgccgcccgcgcccgg

SEQ ID NO: 219217 - RNA, 19 nt, Human
ccgccgcgccggccuccca

SEQ ID NO: 219218 - RNA, 22 nt, Human
ccgcggcgcgcgggccugggcg

SEQ ID NO: 219219 - RNA, 21 nt, Human
ccggccccgccgccgccgccc

SEQ ID NO: 219220 - RNA, 22 nt, Human
ccggccucggcucugcgcgccc

SEQ ID NO: 219221 - RNA, 21 nt, Human
ccggcucccagccgccgcgcc

SEQ ID NO: 219222 - RNA, 24 nt, Human
ccucccagcgcccgcccgcccucc

SEQ ID NO: 219223 - RNA, 18 nt, Human
ccugggcggcgggcgugc

SEQ ID NO: 219224 - RNA, 23 nt, Human
ccuugggccacgccgaugaccuc

SEQ ID NO: 219225 - RNA, 23 nt, Human
cgagggcccugggucccggccca

SEQ ID NO: 219226 - RNA, 23 nt, Human
cgcccgcccuccgagcgcccgca

SEQ ID NO: 219227 - RNA, 18 nt, Human
cgccgcggcgcgcgggcc

SEQ ID NO: 219228 - RNA, 19 nt, Human
cgcgcccggcucccagccg

SEQ ID NO: 219229 - RNA, 23 nt, Human
cggcagccagggccacaucaaua

SEQ ID NO: 219230 - RNA, 21 nt, Human
cggcccagcuggcagccgccc

SEQ ID NO: 219231 - RNA, 20 nt, Human
cggcccggcucccacccggc

SEQ ID NO: 219232 - RNA, 21 nt, Human
cggcggcggcggugaaggcag

SEQ ID NO: 219233 - RNA, 25 nt, Human
cgucaacagccacgggccgugccgg

SEQ ID NO: 219234 - RNA, 24 nt, Human
cuccggcugcccggcccggcuccc

SEQ ID NO: 219235 - RNA, 22 nt, Human
gaacgagacugacagcucgcuc

SEQ ID NO: 219236 - RNA, 20 nt, Human
gaggcggcggcggcggcggc

SEQ ID NO: 219237 - RNA, 18 nt, Human
gagugaggaauaaaagga

SEQ ID NO: 219238 - RNA, 22 nt, Human
gcagcaggaagggcacuucuga

SEQ ID NO: 219239 - RNA, 20 nt, Human
gcaggaagggcacuucugaa

SEQ ID NO: 219240 - RNA, 20 nt, Human
gcccugggucccggcccagc

SEQ ID NO: 219241 - RNA, 19 nt, Human
gccggggccggcagguggg

SEQ ID NO: 219242 - RNA, 21 nt, Human
gccucccagcgcccgcccgcc

SEQ ID NO: 219243 - RNA, 24 nt, Human
gcgacggcggcggcggugaaggcu

SEQ ID NO: 219244 - RNA, 23 nt, Human
gcggcagaggcggcggcggcggc

SEQ ID NO: 219245 - RNA, 19 nt, Human
gcggcgacggcggcggcgg

SEQ ID NO: 219246 - RNA, 20 nt, Human
gcggcggcggcggcgcgggc

SEQ ID NO: 219247 - RNA, 19 nt, Human
gcggcggcggcggcggcgc

SEQ ID NO: 219248 - RNA, 19 nt, Human
gcggcggcggugaaggcag

SEQ ID NO: 219249 - RNA, 20 nt, Human
gcggcggcggugaaggcagc

SEQ ID NO: 219250 - RNA, 18 nt, Human
gcggcggugaaggcagcg

SEQ ID NO: 219251 - RNA, 23 nt, Human
ggcagaggcggcggcggcggcgg

SEQ ID NO: 219252 - RNA, 22 nt, Human
ggcggcgacggcggcggcggug

SEQ ID NO: 219253 - RNA, 20 nt, Human
gggcagcgccuggugccacg

SEQ ID NO: 219254 - RNA, 18 nt, Human
gggcggcggcagcuccgg

SEQ ID NO: 219255 - RNA, 19 nt, Human
gggcguucugggcaggagg

SEQ ID NO: 219256 - RNA, 21 nt, Human
uaaagaaacuaugcacauggc

SEQ ID NO: 219257 - RNA, 19 nt, Human
uacaaaaauagcaacuauc

SEQ ID NO: 219258 - RNA, 18 nt, Human
uacuccauuguuuucagc

SEQ ID NO: 219259 - RNA, 19 nt, Human
ucaggccccacuaacaacc

SEQ ID NO: 219260 - RNA, 19 nt, Human
uccauuguuuucagccuga

SEQ ID NO: 219261 - RNA, 21 nt, Human
ucccacccggcggcgacggcg

SEQ ID NO: 219262 - RNA, 18 nt, Human
ucccaccgagggcccugg

SEQ ID NO: 219263 - RNA, 19 nt, Human
ugaaagcacaguggagaga

SEQ ID NO: 219264 - RNA, 22 nt, Human
ugaccucaggccccacuaacaa

SEQ ID NO: 219265 - RNA, 18 nt, Human
ugccggccuugggccacg

SEQ ID NO: 219266 - RNA, 18 nt, Human
uggccagcaagcgcgagg

SEQ ID NO: 219267 - RNA, 23 nt, Human
uggccucggccuccggguccggc

SEQ ID NO: 219268 - RNA, 18 nt, Human
ugggagaacugcgcagca

SEQ ID NO: 219269 - RNA, 23 nt, Human
uucugggcaggaggaagcacaga

SEQ ID NO: 219270 - RNA, 19 nt, Human
uugguuuuuguuuuuggug

SEQ ID NO: 219271 - RNA, 18 nt, Human
uuuuuguuuuuggugguu

SEQ ID NO: 219272 - RNA, 23 nt, Human
cagcuguccaguguucuccaaga

SEQ ID NO: 219273 - RNA, 19 nt, Human
ucagcuguccaguguucuc

SEQ ID NO: 219274 - RNA, 20 nt, Human
uccaguguucuccaagaagc

SEQ ID NO: 219275 - RNA, 23 nt, Human
aaaaaacacauucaccacaaaua

SEQ ID NO: 219276 - RNA, 18 nt, Human
aaagcugaguugaaaaag

SEQ ID NO: 219277 - RNA, 21 nt, Human
aacagacaauguuuaagaaac

SEQ ID NO: 219278 - RNA, 19 nt, Human
aauaauaguccacagcaau

SEQ ID NO: 219279 - RNA, 18 nt, Human
acacagaucgggcgacca

SEQ ID NO: 219280 - RNA, 20 nt, Human
accacaaauagauacaaggg

SEQ ID NO: 219281 - RNA, 22 nt, Human
accacaaauagauacaagggaa

SEQ ID NO: 219282 - RNA, 18 nt, Human
accuccaggcugggcccu

SEQ ID NO: 219283 - RNA, 19 nt, Human
acugcaaugcaaaauucug

SEQ ID NO: 219284 - RNA, 18 nt, Human
aggaauucucauuaaugu

SEQ ID NO: 219285 - RNA, 18 nt, Human
cagcucaaaggaugacaa

SEQ ID NO: 219286 - RNA, 21 nt, Human
cagcucaaaggaugacaauau

SEQ ID NO: 219287 - RNA, 21 nt, Human
cauuuccccucuaaaaaggaa

SEQ ID NO: 219288 - RNA, 20 nt, Human
ccccuucugcuccucuuccu

SEQ ID NO: 219289 - RNA, 21 nt, Human
ccccuucugcuccucuuccuc

SEQ ID NO: 219290 - RNA, 20 nt, Human
cccgacgcgcgccgcaagcc

SEQ ID NO: 219291 - RNA, 21 nt, Human
cccgacgcgcgccgcaagccc

SEQ ID NO: 219292 - RNA, 24 nt, Human
cccuccagugugggcucagcuccc

SEQ ID NO: 219293 - RNA, 20 nt, Human
cccucuaaaaaggaaauaaa

SEQ ID NO: 219294 - RNA, 21 nt, Human
cccugcgccgcagcagcccuc

SEQ ID NO: 219295 - RNA, 23 nt, Human
ccgaccggccgagaagccgaagu

SEQ ID NO: 219296 - RNA, 23 nt, Human
ccgcagcagcccucagccccgac

SEQ ID NO: 219297 - RNA, 21 nt, Human
ccuccagugugggcucagcuc

SEQ ID NO: 219298 - RNA, 19 nt, Human
ccucuuccucucuccuucc

SEQ ID NO: 219299 - RNA, 22 nt, Human
ccugcgccgcagcagcccucag

SEQ ID NO: 219300 - RNA, 21 nt, Human
cgaacacccaagcgagccggg

SEQ ID NO: 219301 - RNA, 21 nt, Human
cgcugcugcccccuucugcuc

SEQ ID NO: 219302 - RNA, 18 nt, Human
cgggcgccggcccagccu

SEQ ID NO: 219303 - RNA, 29 nt, Human
cuccaggcugggcccucgggggcccuccc

SEQ ID NO: 219304 - RNA, 22 nt, Human
cucuucuaugacugcaaugcaa

SEQ ID NO: 219305 - RNA, 20 nt, Human
cugggcccucgggggcccuc

SEQ ID NO: 219306 - RNA, 18 nt, Human
cuuuuacugguggccuca

SEQ ID NO: 219307 - RNA, 22 nt, Human
gacgcgaacacccaagcgagcc

SEQ ID NO: 219308 - RNA, 23 nt, Human
gcaaaauucugaaaccccucaaa

SEQ ID NO: 219309 - RNA, 18 nt, Human
gcagagucuuuuucagaa

SEQ ID NO: 219310 - RNA, 20 nt, Human
gccccggggcgggcacggcu

SEQ ID NO: 219311 - RNA, 21 nt, Human
gcccuccagugugggcucagc

SEQ ID NO: 219312 - RNA, 20 nt, Human
gccgcaagcccgggccgagg

SEQ ID NO: 219313 - RNA, 21 nt, Human
gccggcccagccugucagcgc

SEQ ID NO: 219314 - RNA, 22 nt, Human
gugaaauauaaaacuuuguucu

SEQ ID NO: 219315 - RNA, 20 nt, Human
uaaaaaacaaucuaaucuag

SEQ ID NO: 219316 - RNA, 19 nt, Human
uaaaucccagagaucgaag

SEQ ID NO: 219317 - RNA, 21 nt, Human
uaacagacaauguuuaagaaa

SEQ ID NO: 219318 - RNA, 22 nt, Human
uaagaaacuucuuacaaaaucc

SEQ ID NO: 219319 - RNA, 22 nt, Human
uacaagcuaaaaguauacaccu

SEQ ID NO: 219320 - RNA, 20 nt, Human
uacacagaucgggcgaccag

SEQ ID NO: 219321 - RNA, 21 nt, Human
uacaguacauggaacuacaag

SEQ ID NO: 219322 - RNA, 20 nt, Human
uagcaucaugauuuauauaa

SEQ ID NO: 219323 - RNA, 23 nt, Human
uaggaaaaaauucuuaaccugcu

SEQ ID NO: 219324 - RNA, 21 nt, Human
uauacauacauauucugugca

SEQ ID NO: 219325 - RNA, 21 nt, Human
ucccucggcagcgaggaccag

SEQ ID NO: 219326 - RNA, 18 nt, Human
uccgcugcugcccccuuc

SEQ ID NO: 219327 - RNA, 20 nt, Human
uccuacccggcgggucaagg

SEQ ID NO: 219328 - RNA, 26 nt, Human
ucggcagcgaggaccaggccucuccc

SEQ ID NO: 219329 - RNA, 21 nt, Human
ucugcuccucuuccucucucc

SEQ ID NO: 219330 - RNA, 25 nt, Human
ucuucuaugacugcaaugcaaaauu

SEQ ID NO: 219331 - RNA, 20 nt, Human
ucuuuugccagacaagaguu

SEQ ID NO: 219332 - RNA, 19 nt, Human
ugaaaccccucaaauauac

SEQ ID NO: 219333 - RNA, 24 nt, Human
ugcaucuuuaacauugcaaaauuu

SEQ ID NO: 219334 - RNA, 20 nt, Human
ugcuaaggaauucucauuaa

SEQ ID NO: 219335 - RNA, 20 nt, Human
ugcuccucuuccucucuccu

SEQ ID NO: 219336 - RNA, 19 nt, Human
uggaacuacaagcuaaaag

SEQ ID NO: 219337 - RNA, 25 nt, Human
uggaacuacaagcuaaaaguauaca

SEQ ID NO: 219338 - RNA, 24 nt, Human
uguaauaauaguccacagcaaugu

SEQ ID NO: 219339 - RNA, 24 nt, Human
uuaaaaaacacauucaccacaaau

SEQ ID NO: 219340 - RNA, 19 nt, Human
uuaaugaacaccagcccuc

SEQ ID NO: 219341 - RNA, 25 nt, Human
uuagcggcguccgcugcugcccccu

SEQ ID NO: 219342 - RNA, 24 nt, Human
uucuaugacugcaaugcaaaauuc

SEQ ID NO: 219343 - RNA, 20 nt, Human
uuggucucagaaugaagguc

SEQ ID NO: 219344 - RNA, 23 nt, Human
uuuaaaaaacacauucaccacaa

SEQ ID NO: 219345 - RNA, 23 nt, Human
uuuaacauugcaaaauuuacaua

SEQ ID NO: 219346 - RNA, 19 nt, Human
uuugcuggcuagcaucaug

SEQ ID NO: 219347 - RNA, 21 nt, Human
aaaaggaaacucagggggccc

SEQ ID NO: 219348 - RNA, 24 nt, Human
aacgagcgaggcucugucucaaaa

SEQ ID NO: 219349 - RNA, 21 nt, Human
aagagagagacgagaaaagga

SEQ ID NO: 219350 - RNA, 23 nt, Human
aagcagagguugcacugugagcc

SEQ ID NO: 219351 - RNA, 18 nt, Human
aaucgcuugaaccuggga

SEQ ID NO: 219352 - RNA, 24 nt, Human
aaucgcuugaaccugggaagcaga

SEQ ID NO: 219353 - RNA, 21 nt, Human
acagccagucaacagagaccu

SEQ ID NO: 219354 - RNA, 18 nt, Human
accacugcacuccacccu

SEQ ID NO: 219355 - RNA, 22 nt, Human
accucaucucuauuaaaaauaa

SEQ ID NO: 219356 - RNA, 23 nt, Human
accuuaacaaauugcaaaggcca

SEQ ID NO: 219357 - RNA, 18 nt, Human
acugcacuccacccuggg

SEQ ID NO: 219358 - RNA, 24 nt, Human
acuugagguuaggaguucgagauc

SEQ ID NO: 219359 - RNA, 22 nt, Human
agaaucgcuugaaccugggaag

SEQ ID NO: 219360 - RNA, 23 nt, Human
agagaaaaagccccucaguccug

SEQ ID NO: 219361 - RNA, 21 nt, Human
agagagaaaaagccccucagu

SEQ ID NO: 219362 - RNA, 26 nt, Human
agagguugcacugugagccgagaucg

SEQ ID NO: 219363 - RNA, 20 nt, Human
agccagucaacagagaccua

SEQ ID NO: 219364 - RNA, 18 nt, Human
agccgggugugguggugc

SEQ ID NO: 219365 - RNA, 23 nt, Human
agccuggccaucauggugaaacc

SEQ ID NO: 219366 - RNA, 21 nt, Human
agcgaggcucugucucaaaaa

SEQ ID NO: 219367 - RNA, 24 nt, Human
aggaucacuugagguuaggaguuc

SEQ ID NO: 219368 - RNA, 22 nt, Human
aggcaggagaaucgcuugaacc

SEQ ID NO: 219369 - RNA, 24 nt, Human
aggcaggagaaucgcuugaaccug

SEQ ID NO: 219370 - RNA, 18 nt, Human
aggcccagagaggggcag

SEQ ID NO: 219371 - RNA, 20 nt, Human
aggcugaggcaggagaaucg

SEQ ID NO: 219372 - RNA, 24 nt, Human
aggcugaggcaggagaaucgcuug

SEQ ID NO: 219373 - RNA, 22 nt, Human
agggggccagggcuuaaggggu

SEQ ID NO: 219374 - RNA, 21 nt, Human
aucacuugagguuaggaguuc

SEQ ID NO: 219375 - RNA, 19 nt, Human
aucauggugaaaccucauc

SEQ ID NO: 219376 - RNA, 19 nt, Human
cacaccuguaaucccagcu

SEQ ID NO: 219377 - RNA, 23 nt, Human
caccuguaaucccagcuacucgg

SEQ ID NO: 219378 - RNA, 24 nt, Human
caccuguaaucccagcuacucggg

SEQ ID NO: 219379 - RNA, 21 nt, Human
cacugcacuccacccugggua

SEQ ID NO: 219380 - RNA, 23 nt, Human
cacugcacuccacccuggguaac

SEQ ID NO: 219381 - RNA, 24 nt, Human
cacugcacuccacccuggguaacg

SEQ ID NO: 219382 - RNA, 23 nt, Human
cacuugagguuaggaguucgaga

SEQ ID NO: 219383 - RNA, 24 nt, Human
cagcuacucgggaggcugaggcag

SEQ ID NO: 219384 - RNA, 23 nt, Human
caggacucagagagccccacuga

SEQ ID NO: 219385 - RNA, 18 nt, Human
cauggugaaaccucaucu

SEQ ID NO: 219386 - RNA, 19 nt, Human
cauggugaaaccucaucuc

SEQ ID NO: 219387 - RNA, 20 nt, Human
ccacugcacuccacccuggg

SEQ ID NO: 219388 - RNA, 21 nt, Human
ccacugcacuccacccugggu

SEQ ID NO: 219389 - RNA, 24 nt, Human
ccacugcacuccacccuggguaac

SEQ ID NO: 219390 - RNA, 21 nt, Human
ccauaaugagugcaacuugcc

SEQ ID NO: 219391 - RNA, 21 nt, Human
ccccacugacacauaugccca

SEQ ID NO: 219392 - RNA, 25 nt, Human
cccucauaaggccucugaggcccag

SEQ ID NO: 219393 - RNA, 24 nt, Human
ccuggccaucauggugaaaccuca

SEQ ID NO: 219394 - RNA, 21 nt, Human
ccuguaaucccagcuacucgg

SEQ ID NO: 219395 - RNA, 24 nt, Human
cgagaucagccuggccaucauggu

SEQ ID NO: 219396 - RNA, 20 nt, Human
cucugaggcccagagagggg

SEQ ID NO: 219397 - RNA, 21 nt, Human
cuguaaucccagcuacucggg

SEQ ID NO: 219398 - RNA, 24 nt, Human
gaucacuugagguuaggaguucga

SEQ ID NO: 219399 - RNA, 24 nt, Human
gccaucauggugaaaccucaucuc

SEQ ID NO: 219400 - RNA, 20 nt, Human
ggacucagagagccccacug

SEQ ID NO: 219401 - RNA, 23 nt, Human
ggaucacuugagguuaggaguuc

SEQ ID NO: 219402 - RNA, 21 nt, Human
ggcagcuccgggccuaagguc

SEQ ID NO: 219403 - RNA, 23 nt, Human
ggccacgggagcccccccaaaug

SEQ ID NO: 219404 - RNA, 19 nt, Human
ggccagggcuuaagggguu

SEQ ID NO: 219405 - RNA, 20 nt, Human
ggccaucauggugaaaccuc

SEQ ID NO: 219406 - RNA, 24 nt, Human
gggagcccccccaaaugcaauguc

SEQ ID NO: 219407 - RNA, 23 nt, Human
ggggccagggcuuaagggguugg

SEQ ID NO: 219408 - RNA, 25 nt, Human
gggggccagggcuuaagggguuggg

SEQ ID NO: 219409 - RNA, 24 nt, Human
gggugugguggugcacaccuguaa

SEQ ID NO: 219410 - RNA, 24 nt, Human
gguggugcacaccuguaaucccag

SEQ ID NO: 219411 - RNA, 23 nt, Human
guaacgagcgaggcucugucuca

SEQ ID NO: 219412 - RNA, 19 nt, Human
gugggaggaucacuugagg

SEQ ID NO: 219413 - RNA, 25 nt, Human
uaaaaaaaauuagccggguguggug

SEQ ID NO: 219414 - RNA, 25 nt, Human
uaaaaagagagagacgagaaaagga

SEQ ID NO: 219415 - RNA, 21 nt, Human
uaacaaauugcaaaggccaca

SEQ ID NO: 219416 - RNA, 24 nt, Human
uaacgagcgaggcucugucucaaa

SEQ ID NO: 219417 - RNA, 22 nt, Human
uaccacugcacuccacccuggg

SEQ ID NO: 219418 - RNA, 31 nt, Human
uagaggacccucauaaggccucugaggcccu

SEQ ID NO: 219419 - RNA, 20 nt, Human
ucacuugagguuaggaguuc

SEQ ID NO: 219420 - RNA, 24 nt, Human
ucagggggccagggcuuaaggggu

SEQ ID NO: 219421 - RNA, 24 nt, Human
ucgcuugaaccugggaagcagagg

SEQ ID NO: 219422 - RNA, 24 nt, Human
ucgggaggcugaggcaggagaauc

SEQ ID NO: 219423 - RNA, 24 nt, Human
ugaaccugggaagcagagguugca

SEQ ID NO: 219424 - RNA, 23 nt, Human
ugagccgagaucgcuaccacugc

SEQ ID NO: 219425 - RNA, 24 nt, Human
ugaggcaggagaaucgcuugaacc

SEQ ID NO: 219426 - RNA, 25 nt, Human
ugaggcaggagaaucgcuugaaccu

SEQ ID NO: 219427 - RNA, 26 nt, Human
ugaggcccagagaggggcagcuccgg

SEQ ID NO: 219428 - RNA, 19 nt, Human
ugccuagcgggccgccgga

SEQ ID NO: 219429 - RNA, 21 nt, Human
ugggaagaugcgagagucuua

SEQ ID NO: 219430 - RNA, 22 nt, Human
uggugcacaccuguaaucccag

SEQ ID NO: 219431 - RNA, 24 nt, Human
ugguggugcacaccuguaauccca

SEQ ID NO: 219432 - RNA, 20 nt, Human
uuagccgggugugguggugc

SEQ ID NO: 219433 - RNA, 22 nt, Human
uuagccgggugugguggugcac

SEQ ID NO: 219434 - RNA, 19 nt, Human
uuccugaaguagaggaccc

SEQ ID NO: 219435 - RNA, 24 nt, Human
uugaaccugggaagcagagguugc

SEQ ID NO: 219436 - RNA, 20 nt, Human
aaacgccuccuguuuugccc

SEQ ID NO: 219437 - RNA, 18 nt, Human
aacuccuuucuuccccuc

SEQ ID NO: 219438 - RNA, 25 nt, Human
aagaagccagauuauauuuuaggug

SEQ ID NO: 219439 - RNA, 21 nt, Human
aaggagcagagagucgggagg

SEQ ID NO: 219440 - RNA, 20 nt, Human
agagagucgggaggggagga

SEQ ID NO: 219441 - RNA, 23 nt, Human
aggagggacggcucuagauggga

SEQ ID NO: 219442 - RNA, 19 nt, Human
agggggcagcaggaggaga

SEQ ID NO: 219443 - RNA, 21 nt, Human
aguagucaugaaaauuaaaau

SEQ ID NO: 219444 - RNA, 19 nt, Human
caacuccuuucuuccccuc

SEQ ID NO: 219445 - RNA, 18 nt, Human
cacaagaagccagauuau

SEQ ID NO: 219446 - RNA, 18 nt, Human
cagacacaagaagccaga

SEQ ID NO: 219447 - RNA, 20 nt, Human
cagccggcugcucugaggag

SEQ ID NO: 219448 - RNA, 19 nt, Human
caggaggagagcagcgccc

SEQ ID NO: 219449 - RNA, 19 nt, Human
cccaacuccuuucuucccc

SEQ ID NO: 219450 - RNA, 22 nt, Human
ccccaacuccuuucuuccccuc

SEQ ID NO: 219451 - RNA, 23 nt, Human
ccccaacuccuuucuuccccucg

SEQ ID NO: 219452 - RNA, 22 nt, Human
cccccacgccuccgggauugau

SEQ ID NO: 219453 - RNA, 23 nt, Human
ccccggcgggucgucccuccgcc

SEQ ID NO: 219454 - RNA, 20 nt, Human
cccuugaacuucuggggcgg

SEQ ID NO: 219455 - RNA, 20 nt, Human
ccgcccccacgccuccggga

SEQ ID NO: 219456 - RNA, 19 nt, Human
ccuccagcccagggauggg

SEQ ID NO: 219457 - RNA, 21 nt, Human
cgcccgggaaagccccggcgg

SEQ ID NO: 219458 - RNA, 23 nt, Human
cgccuccuguuuugccccaacuc

SEQ ID NO: 219459 - RNA, 19 nt, Human
cggcggcaggagcgcagga

SEQ ID NO: 219460 - RNA, 22 nt, Human
cgggcaggcugggggugggggg

SEQ ID NO: 219461 - RNA, 21 nt, Human
cucuagaugggaugucaguuu

SEQ ID NO: 219462 - RNA, 23 nt, Human
cuggggcgggaaaggagcagaga

SEQ ID NO: 219463 - RNA, 18 nt, Human
gagcugggggcgggaggc

SEQ ID NO: 219464 - RNA, 19 nt, Human
gaggaagaggagggacggc

SEQ ID NO: 219465 - RNA, 19 nt, Human
gcagcgcccgggaaagccc

SEQ ID NO: 219466 - RNA, 20 nt, Human
gcaggagcgcaggaggccgg

SEQ ID NO: 219467 - RNA, 21 nt, Human
gccggguccuagcgagggggc

SEQ ID NO: 219468 - RNA, 18 nt, Human
gcgggaaaggagcagaga

SEQ ID NO: 219469 - RNA, 22 nt, Human
ggaaagccccggcgggucgucc

SEQ ID NO: 219470 - RNA, 24 nt, Human
ggaggggaggaagaggagggacgg

SEQ ID NO: 219471 - RNA, 22 nt, Human
ggcccuugaacuucuggggcgg

SEQ ID NO: 219472 - RNA, 19 nt, Human
ggcuggggguggggggauu

SEQ ID NO: 219473 - RNA, 18 nt, Human
gggaggggaggaagagga

SEQ ID NO: 219474 - RNA, 18 nt, Human
gggaggggaggaagagga

SEQ ID NO: 219475 - RNA, 21 nt, Human
gggaggggaggaagaggaggg

SEQ ID NO: 219476 - RNA, 20 nt, Human
gggcgggaggcgcgggcagg

SEQ ID NO: 219477 - RNA, 23 nt, Human
gggcugccagcuguccccagggc

SEQ ID NO: 219478 - RNA, 21 nt, Human
ggggauugggugucucgggga

SEQ ID NO: 219479 - RNA, 19 nt, Human
uaaaauagcaaguucaggu

SEQ ID NO: 219480 - RNA, 23 nt, Human
uaaaaugaaauaccaauuccauu

SEQ ID NO: 219481 - RNA, 23 nt, Human
uccuccagcccagggaugggggu

SEQ ID NO: 219482 - RNA, 18 nt, Human
ucugaggaggucgagggu

SEQ ID NO: 219483 - RNA, 21 nt, Human
ugaaauaccaauuccauuucc

SEQ ID NO: 219484 - RNA, 19 nt, Human
uggcugccaagaggcgggu

SEQ ID NO: 219485 - RNA, 18 nt, Human
ugucugguccgcgcgggg

SEQ ID NO: 219486 - RNA, 20 nt, Human
ugucugguccgcgcggggcu

SEQ ID NO: 219487 - RNA, 19 nt, Human
uguguaacaacgguggcuu

SEQ ID NO: 219488 - RNA, 18 nt, Human
uguuuugggggugugggg

SEQ ID NO: 219489 - RNA, 22 nt, Human
uuaguccagacacaagaagcca

SEQ ID NO: 219490 - RNA, 22 nt, Human
uuugccccaacuccuuucuucc

SEQ ID NO: 219491 - RNA, 27 nt, Human
uuuuuuuuuuuuuuuuuuuuuuugggg

SEQ ID NO: 219492 - RNA, 18 nt, Human
aaacaaaugccaaauuac

SEQ ID NO: 219493 - RNA, 23 nt, Human
aaagcuucuccacaauggacacu

SEQ ID NO: 219494 - RNA, 21 nt, Human
aaaguauaaaaaacccaagac

SEQ ID NO: 219495 - RNA, 18 nt, Human
aaauagcauugggggccc

SEQ ID NO: 219496 - RNA, 22 nt, Human
aaccccaggagcugacuggcau

SEQ ID NO: 219497 - RNA, 22 nt, Human
aacgcugaggguggggagccau

SEQ ID NO: 219498 - RNA, 20 nt, Human
aacucagugaacgcacccag

SEQ ID NO: 219499 - RNA, 19 nt, Human
aagaucacccuaauacuca

SEQ ID NO: 219500 - RNA, 22 nt, Human
aagcaacuauggucugaugugu

SEQ ID NO: 219501 - RNA, 19 nt, Human
aagcaggguuccucaggca

SEQ ID NO: 219502 - RNA, 22 nt, Human
aagcucacugggacacagccac

SEQ ID NO: 219503 - RNA, 20 nt, Human
aaggugaguagugagagcca

SEQ ID NO: 219504 - RNA, 21 nt, Human
acccaacucagugaacgcacc

SEQ ID NO: 219505 - RNA, 21 nt, Human
agacacuggaagcugaaagac

SEQ ID NO: 219506 - RNA, 18 nt, Human
agagcgggggcgccuggc

SEQ ID NO: 219507 - RNA, 23 nt, Human
agcagacaccagggagcacugag

SEQ ID NO: 219508 - RNA, 18 nt, Human
aggaacccaacucaguga

SEQ ID NO: 219509 - RNA, 22 nt, Human
aggaagaggcaguucaaagcua

SEQ ID NO: 219510 - RNA, 24 nt, Human
aggcaagaucccucuuccagcaac

SEQ ID NO: 219511 - RNA, 18 nt, Human
aggcagaaucacagccuc

SEQ ID NO: 219512 - RNA, 21 nt, Human
aggccagaaacagauuaggaa

SEQ ID NO: 219513 - RNA, 20 nt, Human
aggcuggagcgugaaucccc

SEQ ID NO: 219514 - RNA, 21 nt, Human
agucaaaauuagaaaacugcu

SEQ ID NO: 219515 - RNA, 23 nt, Human
aucacuaugacaaccaagaagga

SEQ ID NO: 219516 - RNA, 20 nt, Human
auggaagacaccaguguccc

SEQ ID NO: 219517 - RNA, 25 nt, Human
caaaaagcuucuccacaauggacac

SEQ ID NO: 219518 - RNA, 24 nt, Human
caaaguauaaaaaacccaagacac

SEQ ID NO: 219519 - RNA, 18 nt, Human
caccagugucccugcagu

SEQ ID NO: 219520 - RNA, 18 nt, Human
cacugccagggcccaagg

SEQ ID NO: 219521 - RNA, 23 nt, Human
cagacaccagggagcacugagcc

SEQ ID NO: 219522 - RNA, 19 nt, Human
cagccaccucgccaucuca

SEQ ID NO: 219523 - RNA, 24 nt, Human
caggaagaggcaguucaaagcuaa

SEQ ID NO: 219524 - RNA, 18 nt, Human
caggaugccaugcagcag

SEQ ID NO: 219525 - RNA, 23 nt, Human
caggccagaaacagauuaggaac

SEQ ID NO: 219526 - RNA, 23 nt, Human
cagggcccaaggauggcagggcc

SEQ ID NO: 219527 - RNA, 18 nt, Human
caucugagggcuucuggg

SEQ ID NO: 219528 - RNA, 20 nt, Human
ccaaaggcagaaucacagcc

SEQ ID NO: 219529 - RNA, 21 nt, Human
ccacugccagggcccaaggau

SEQ ID NO: 219530 - RNA, 21 nt, Human
ccaggcacacaguggagugcu

SEQ ID NO: 219531 - RNA, 20 nt, Human
ccauagaaaagcauauuuca

SEQ ID NO: 219532 - RNA, 22 nt, Human
ccccaggagcugacuggcaucu

SEQ ID NO: 219533 - RNA, 20 nt, Human
ccuggcgcaaccccaggagc

SEQ ID NO: 219534 - RNA, 21 nt, Human
ccuuuggccuuagacaaucuu

SEQ ID NO: 219535 - RNA, 20 nt, Human
cgccaggccuuucaccuggc

SEQ ID NO: 219536 - RNA, 19 nt, Human
cgccgggaugcgcugcugg

SEQ ID NO: 219537 - RNA, 19 nt, Human
cgcucugugcgcucucagc

SEQ ID NO: 219538 - RNA, 24 nt, Human
cggaugaaaaauuuaaagucaaaa

SEQ ID NO: 219539 - RNA, 23 nt, Human
cucuacuuucacuucucucuacu

SEQ ID NO: 219540 - RNA, 21 nt, Human
cucucagccacaccgcggguc

SEQ ID NO: 219541 - RNA, 19 nt, Human
cuggagcauuuccugccuc

SEQ ID NO: 219542 - RNA, 22 nt, Human
cuggcagacagcgaggcaacag

SEQ ID NO: 219543 - RNA, 20 nt, Human
cuggguucccgccgggaugc

SEQ ID NO: 219544 - RNA, 23 nt, Human
gaacuugcaugcuaagcauccag

SEQ ID NO: 219545 - RNA, 22 nt, Human
gaagacaccagugucccugcag

SEQ ID NO: 219546 - RNA, 19 nt, Human
gaagcugaaagacaaggug

SEQ ID NO: 219547 - RNA, 23 nt, Human
gcgccuggcgcaaccccaggagc

SEQ ID NO: 219548 - RNA, 20 nt, Human
ggcuucacagggcccagcac

SEQ ID NO: 219549 - RNA, 23 nt, Human
gggacgcuacauggaagacacca

SEQ ID NO: 219550 - RNA, 23 nt, Human
uaaaaaacccaagacacuggaag

SEQ ID NO: 219551 - RNA, 22 nt, Human
uaaacaagacccauagaaaagc

SEQ ID NO: 219552 - RNA, 22 nt, Human
uaccaagguggcaaugauggag

SEQ ID NO: 219553 - RNA, 23 nt, Human
uacccuaucacuaugacaaccaa

SEQ ID NO: 219554 - RNA, 20 nt, Human
uagagcgggggcgccuggcg

SEQ ID NO: 219555 - RNA, 24 nt, Human
uagugagagccauucuccaggcac

SEQ ID NO: 219556 - RNA, 20 nt, Human
uaguggucaacuuuggccaa

SEQ ID NO: 219557 - RNA, 19 nt, Human
uauaggcagcuacuuccca

SEQ ID NO: 219558 - RNA, 23 nt, Human
ucacaguaaacuuccaugagagg

SEQ ID NO: 219559 - RNA, 18 nt, Human
uccaaaggcagaaucaca

SEQ ID NO: 219560 - RNA, 18 nt, Human
uccaaaggcagaaucaca

SEQ ID NO: 219561 - RNA, 24 nt, Human
uccauaaccaaaaagaggucuguu

SEQ ID NO: 219562 - RNA, 18 nt, Human
uccccgccaggccuuuca

SEQ ID NO: 219563 - RNA, 24 nt, Human
ucccgccgggaugcgcugcuggug

SEQ ID NO: 219564 - RNA, 19 nt, Human
ucccugcagugcccaccug

SEQ ID NO: 219565 - RNA, 20 nt, Human
ucguggcugcugaacgacca

SEQ ID NO: 219566 - RNA, 20 nt, Human
ucugaaugagugucuagcuc

SEQ ID NO: 219567 - RNA, 18 nt, Human
ucugccaggcggccugcg

SEQ ID NO: 219568 - RNA, 18 nt, Human
ucuguggcaaagaggaac

SEQ ID NO: 219569 - RNA, 19 nt, Human
ugaaaaaggcuaaaacuug

SEQ ID NO: 219570 - RNA, 22 nt, Human
ugaaaugcgacagagccugugg

SEQ ID NO: 219571 - RNA, 19 nt, Human
ugaaguaaggcugcugugu

SEQ ID NO: 219572 - RNA, 18 nt, Human
ugacagaggaagcugagg

SEQ ID NO: 219573 - RNA, 20 nt, Human
ugacaggaguuucuagcaga

SEQ ID NO: 219574 - RNA, 24 nt, Human
ugagugauguugcuaauguccccc

SEQ ID NO: 219575 - RNA, 23 nt, Human
ugauccaaaaagcuucuccacaa

SEQ ID NO: 219576 - RNA, 18 nt, Human
ugauuucgcaauugccuu

SEQ ID NO: 219577 - RNA, 18 nt, Human
ugccaggcggccugcggc

SEQ ID NO: 219578 - RNA, 24 nt, Human
ugccaggcggccugcggcaaagug

SEQ ID NO: 219579 - RNA, 20 nt, Human
ugccucugccaggcggccug

SEQ ID NO: 219580 - RNA, 21 nt, Human
ugcgguggugucugugggccg

SEQ ID NO: 219581 - RNA, 23 nt, Human
ugcuggagcauuuccugccucug

SEQ ID NO: 219582 - RNA, 19 nt, Human
uggcaaagaggaacagugg

SEQ ID NO: 219583 - RNA, 20 nt, Human
uggcaaagaggaacaguggg

SEQ ID NO: 219584 - RNA, 23 nt, Human
uggcaaagaggaacagugggauc

SEQ ID NO: 219585 - RNA, 23 nt, Human
uggccaaaacgaaaagcuucuga

SEQ ID NO: 219586 - RNA, 24 nt, Human
uggccucuggguacagacuguccu

SEQ ID NO: 219587 - RNA, 19 nt, Human
ugggacacagccacugcca

SEQ ID NO: 219588 - RNA, 21 nt, Human
ugggagcagugucuccggcgg

SEQ ID NO: 219589 - RNA, 22 nt, Human
uguacagcaacauccauccaaa

SEQ ID NO: 219590 - RNA, 18 nt, Human
uguacuugacagacuuga

SEQ ID NO: 219591 - RNA, 18 nt, Human
ugugagccauccauaacc

SEQ ID NO: 219592 - RNA, 19 nt, Human
uguugcuaaugucccccca

SEQ ID NO: 219593 - RNA, 23 nt, Human
uuagaaaacugcuuuugauucag

SEQ ID NO: 219594 - RNA, 22 nt, Human
uucaacauugcuuaacuggaau

SEQ ID NO: 219595 - RNA, 21 nt, Human
uucacauaacuaaaaaaaguu

SEQ ID NO: 219596 - RNA, 18 nt, Human
uucugaaugagugucuag

SEQ ID NO: 219597 - RNA, 20 nt, Human
uugaagcuuuuauaaaugag

SEQ ID NO: 219598 - RNA, 23 nt, Human
uugaagcuuuuauaaaugagguu

SEQ ID NO: 219599 - RNA, 22 nt, Human
uuggccuuagacaaucuuaaca

SEQ ID NO: 219600 - RNA, 23 nt, Human
uuggccuuagacaaucuuaacaa

SEQ ID NO: 219601 - RNA, 24 nt, Human
uuguuuugaaaugcgacagagccu

SEQ ID NO: 219602 - RNA, 22 nt, Human
uuuaagaucacccuaauacuca

SEQ ID NO: 219603 - RNA, 22 nt, Human
uuucaguaccauuucagacuua

SEQ ID NO: 219604 - RNA, 22 nt, Human
uuuuccuuaaauccugacaccc

SEQ ID NO: 219605 - RNA, 21 nt, Human
uuuuuuggguuuuuuugaagc

SEQ ID NO: 219606 - RNA, 20 nt, Human
aaacaaagacugcauguugg

SEQ ID NO: 219607 - RNA, 20 nt, Human
aaacuagcuuuaagacuggg

SEQ ID NO: 219608 - RNA, 22 nt, Human
aacaugacauuuuuaagacaua

SEQ ID NO: 219609 - RNA, 20 nt, Human
agcaauucacagacaugaca

SEQ ID NO: 219610 - RNA, 18 nt, Human
aggaaaaagcauauaaua

SEQ ID NO: 219611 - RNA, 21 nt, Human
aggaaaaagcauauaauacaa

SEQ ID NO: 219612 - RNA, 19 nt, Human
caaauauuggaagaaauuc

SEQ ID NO: 219613 - RNA, 18 nt, Human
cacagacaugacauaaac

SEQ ID NO: 219614 - RNA, 18 nt, Human
cacgggguucagacaagu

SEQ ID NO: 219615 - RNA, 21 nt, Human
cagcaauucacagacaugaca

SEQ ID NO: 219616 - RNA, 22 nt, Human
cauagcaaaaacuagcuuuaag

SEQ ID NO: 219617 - RNA, 24 nt, Human
ccucauuuuuugaagcagagauug

SEQ ID NO: 219618 - RNA, 19 nt, Human
cugauucaaggauggagga

SEQ ID NO: 219619 - RNA, 24 nt, Human
gaggaaucaauuaguacucagcaa

SEQ ID NO: 219620 - RNA, 26 nt, Human
gauugcuuuuuaauggauuucuauaa

SEQ ID NO: 219621 - RNA, 24 nt, Human
ggaaaauuauuuauuucuccccac

SEQ ID NO: 219622 - RNA, 22 nt, Human
ggacagucuugcucuuccucau

SEQ ID NO: 219623 - RNA, 20 nt, Human
gggaaaauuauuuauuucuc

SEQ ID NO: 219624 - RNA, 22 nt, Human
uaaaaagcauuaugagaacuga

SEQ ID NO: 219625 - RNA, 22 nt, Human
uaagacauaaacaaagacugca

SEQ ID NO: 219626 - RNA, 20 nt, Human
uaaucaguccuucuucccuc

SEQ ID NO: 219627 - RNA, 19 nt, Human
uacagagauugcuuuuuaa

SEQ ID NO: 219628 - RNA, 21 nt, Human
uauuuaaauacacuguacaga

SEQ ID NO: 219629 - RNA, 20 nt, Human
ucacaguaugucaaugaaau

SEQ ID NO: 219630 - RNA, 23 nt, Human
ucacuaauagagaucacaguaug

SEQ ID NO: 219631 - RNA, 18 nt, Human
uccacauagcaaaaacua

SEQ ID NO: 219632 - RNA, 24 nt, Human
ucccucggaaacaagaggcacagu

SEQ ID NO: 219633 - RNA, 22 nt, Human
ugaauuagagcagcauguucca

SEQ ID NO: 219634 - RNA, 18 nt, Human
ugagaacugauucaagga

SEQ ID NO: 219635 - RNA, 23 nt, Human
uggcagcauaggggacagucuug

SEQ ID NO: 219636 - RNA, 23 nt, Human
uuaaaaagcauuaugagaacuga

SEQ ID NO: 219637 - RNA, 21 nt, Human
uuaaucaguccuucuucccuc

SEQ ID NO: 219638 - RNA, 18 nt, Human
uucaaggauggaggaauc

SEQ ID NO: 219639 - RNA, 19 nt, Human
uuuaaaaagcauuaugaga

SEQ ID NO: 219640 - RNA, 21 nt, Human
aaaaaaaaaaaacauaccggg

SEQ ID NO: 219641 - RNA, 24 nt, Human
aaaaaagaaaaacaaaacaagcaa

SEQ ID NO: 219642 - RNA, 21 nt, Human
aaaaaagggaaccauuccaau

SEQ ID NO: 219643 - RNA, 26 nt, Human
aaaacaaaaacauaauucuuagagga

SEQ ID NO: 219644 - RNA, 25 nt, Human
aaacaaaauagggaacugcaucuga

SEQ ID NO: 219645 - RNA, 31 nt, Human
aaacaaauaaaaggcauaacaguuuucuggg

SEQ ID NO: 219646 - RNA, 18 nt, Human
aagaaaaacaaaacaagc

SEQ ID NO: 219647 - RNA, 22 nt, Human
aagaaaaacaaaacaagcaaaa

SEQ ID NO: 219648 - RNA, 19 nt, Human
aaggaggagagaggggagg

SEQ ID NO: 219649 - RNA, 24 nt, Human
aauaccaaccgcucgccccagcag

SEQ ID NO: 219650 - RNA, 18 nt, Human
acucaaccacagugcucg

SEQ ID NO: 219651 - RNA, 21 nt, Human
agaaaaacaaaacaagcaaaa

SEQ ID NO: 219652 - RNA, 24 nt, Human
agaggggaggagaggggaagggaa

SEQ ID NO: 219653 - RNA, 23 nt, Human
agcugcaguuucccucuuuccua

SEQ ID NO: 219654 - RNA, 24 nt, Human
aggaaaaaaaaagugucuccucag

SEQ ID NO: 219655 - RNA, 20 nt, Human
aggagagaggggaggagagg

SEQ ID NO: 219656 - RNA, 21 nt, Human
aggagagaggggaggagaggg

SEQ ID NO: 219657 - RNA, 18 nt, Human
aggaggagagaggggagg

SEQ ID NO: 219658 - RNA, 24 nt, Human
aggaggagagaggggaggagaggg

SEQ ID NO: 219659 - RNA, 20 nt, Human
aggcaaaaaucagaguuuac

SEQ ID NO: 219660 - RNA, 19 nt, Human
agggaggaggagaggaggg

SEQ ID NO: 219661 - RNA, 25 nt, Human
agggaggaggagaggagggaaggag

SEQ ID NO: 219662 - RNA, 18 nt, Human
agggcaaaauugcucaaa

SEQ ID NO: 219663 - RNA, 19 nt, Human
agggcaaaauugcucaaaa

SEQ ID NO: 219664 - RNA, 21 nt, Human
auaaauuucugaagacaccau

SEQ ID NO: 219665 - RNA, 22 nt, Human
aucauuuacuucaucuaacagu

SEQ ID NO: 219666 - RNA, 18 nt, Human
aucccuucauuaaacaaa

SEQ ID NO: 219667 - RNA, 24 nt, Human
auucuacaccuacaucuccccuaa

SEQ ID NO: 219668 - RNA, 18 nt, Human
auuuggggugggaaucac

SEQ ID NO: 219669 - RNA, 20 nt, Human
caaaugcguucuuuccuugg

SEQ ID NO: 219670 - RNA, 21 nt, Human
caaaugcguucuuuccuuggu

SEQ ID NO: 219671 - RNA, 21 nt, Human
caauaccaaccgcucgcccca

SEQ ID NO: 219672 - RNA, 24 nt, Human
caaugcacuaaaauuauccacaug

SEQ ID NO: 219673 - RNA, 21 nt, Human
cagcuacccgccgggcggccc

SEQ ID NO: 219674 - RNA, 19 nt, Human
caguagugaauccacuuuc

SEQ ID NO: 219675 - RNA, 27 nt, Human
cauuaaacaaaauagggaacugcaucu

SEQ ID NO: 219676 - RNA, 25 nt, Human
cauuuggagagcuuaccaaucaagg

SEQ ID NO: 219677 - RNA, 19 nt, Human
ccccccgccagcuacccgc

SEQ ID NO: 219678 - RNA, 20 nt, Human
ccccccgccagcuacccgcc

SEQ ID NO: 219679 - RNA, 18 nt, Human
ccgccagcuacccgccgg

SEQ ID NO: 219680 - RNA, 18 nt, Human
ccggcggaccgagggggg

SEQ ID NO: 219681 - RNA, 22 nt, Human
cgagaucuacuauccagaggca

SEQ ID NO: 219682 - RNA, 21 nt, Human
cgccugcaauaccaaccgcuc

SEQ ID NO: 219683 - RNA, 19 nt, Human
cgcucgagaucuacuaucc

SEQ ID NO: 219684 - RNA, 23 nt, Human
cggaguuggaauaaaaaccuauu

SEQ ID NO: 219685 - RNA, 25 nt, Human
cuuuuuuuuuuuuuuuuuacauaug

SEQ ID NO: 219686 - RNA, 20 nt, Human
gaaaaacaaaacaagcaaaa

SEQ ID NO: 219687 - RNA, 23 nt, Human
gaaaaacaaaacaagcaaaaugu

SEQ ID NO: 219688 - RNA, 19 nt, Human
gaaacacauuacaaagaca

SEQ ID NO: 219689 - RNA, 23 nt, Human
gaagggaagggaggaggagagga

SEQ ID NO: 219690 - RNA, 23 nt, Human
gacauuuguugaguuuaaaaaua

SEQ ID NO: 219691 - RNA, 20 nt, Human
ggaagggaagggaggaggag

SEQ ID NO: 219692 - RNA, 20 nt, Human
ggaagggaggaggagaggag

SEQ ID NO: 219693 - RNA, 21 nt, Human
ggaagggaggaggagaggagg

SEQ ID NO: 219694 - RNA, 20 nt, Human
ggagaggggaagggaaggga

SEQ ID NO: 219695 - RNA, 23 nt, Human
ggaggagagaggggaggagaggg

SEQ ID NO: 219696 - RNA, 18 nt, Human
ggaguuggaauaaaaacc

SEQ ID NO: 219697 - RNA, 21 nt, Human
gggaaggaggagagaggggag

SEQ ID NO: 219698 - RNA, 18 nt, Human
ggggaagggaagggagga

SEQ ID NO: 219699 - RNA, 21 nt, Human
ggggaagggaagggaggagga

SEQ ID NO: 219700 - RNA, 18 nt, Human
ggugggaaucaccaacuu

SEQ ID NO: 219701 - RNA, 19 nt, Human
guaaucuuauaaaccaaca

SEQ ID NO: 219702 - RNA, 20 nt, Human
gugaaaauuuaauaucuucu

SEQ ID NO: 219703 - RNA, 23 nt, Human
gugaaacacauauaacacagggc

SEQ ID NO: 219704 - RNA, 18 nt, Human
gugauguuacucaaccac

SEQ ID NO: 219705 - RNA, 22 nt, Human
uaaaaaagggaaccauuccaau

SEQ ID NO: 219706 - RNA, 19 nt, Human
uaaagcccgagauaaacgc

SEQ ID NO: 219707 - RNA, 25 nt, Human
uaaagcccgagauaaacgcucgaga

SEQ ID NO: 219708 - RNA, 20 nt, Human
uaaauagccucacaguuaaa

SEQ ID NO: 219709 - RNA, 18 nt, Human
uaagaacacuucuccccc

SEQ ID NO: 219710 - RNA, 21 nt, Human
uaagaacuuaauacuggauga

SEQ ID NO: 219711 - RNA, 22 nt, Human
uaaugcaauauaauuucauaaa

SEQ ID NO: 219712 - RNA, 23 nt, Human
uacaaagacauccuugcaaacaa

SEQ ID NO: 219713 - RNA, 18 nt, Human
uacaaaguagaaaaacag

SEQ ID NO: 219714 - RNA, 20 nt, Human
uacauaugugcacagcuuua

SEQ ID NO: 219715 - RNA, 19 nt, Human
uagaaaaacagccguucau

SEQ ID NO: 219716 - RNA, 18 nt, Human
uauccagaggcaaaaauc

SEQ ID NO: 219717 - RNA, 19 nt, Human
uaugauuaaaaacaaaaac

SEQ ID NO: 219718 - RNA, 21 nt, Human
uaugugcgugaaacacauaua

SEQ ID NO: 219719 - RNA, 18 nt, Human
ucaaacaggcauaagaug

SEQ ID NO: 219720 - RNA, 21 nt, Human
ucaaccacagugcucggaguu

SEQ ID NO: 219721 - RNA, 21 nt, Human
ucaaguuaaaaaaaaaaaaca

SEQ ID NO: 219722 - RNA, 18 nt, Human
ucccucuuuccuauuuuu

SEQ ID NO: 219723 - RNA, 19 nt, Human
uccgaauugacaaaugauu

SEQ ID NO: 219724 - RNA, 24 nt, Human
ucuaauuaaaaaagaaaaacaaaa

SEQ ID NO: 219725 - RNA, 18 nt, Human
ucucaaacaggcauaaga

SEQ ID NO: 219726 - RNA, 19 nt, Human
ucuguaaugaaagcugcag

SEQ ID NO: 219727 - RNA, 21 nt, Human
ucuguaaugaaagcugcaguu

SEQ ID NO: 219728 - RNA, 20 nt, Human
ucuguaguugacauaugaag

SEQ ID NO: 219729 - RNA, 23 nt, Human
ucuuaaaaucucaaaugcguucu

SEQ ID NO: 219730 - RNA, 18 nt, Human
ugaaaacaaauggucugu

SEQ ID NO: 219731 - RNA, 22 nt, Human
ugaaaacaaauggucuguaauc

SEQ ID NO: 219732 - RNA, 25 nt, Human
ugaaacacauuacaaagacauccuu

SEQ ID NO: 219733 - RNA, 23 nt, Human
ugaagaccacuucaauuucuaaa

SEQ ID NO: 219734 - RNA, 21 nt, Human
ugacaucaauaaaagugauau

SEQ ID NO: 219735 - RNA, 21 nt, Human
ugauuaaaaacaaaaacauaa

SEQ ID NO: 219736 - RNA, 24 nt, Human
ugcaaacaaauaaaaggcauaaca

SEQ ID NO: 219737 - RNA, 27 nt, Human
ugcacuaaaauuauccacaugaaaaca

SEQ ID NO: 219738 - RNA, 18 nt, Human
ugccuccuccccccgcca

SEQ ID NO: 219739 - RNA, 23 nt, Human
uggggugggaaucaccaacuuuu

SEQ ID NO: 219740 - RNA, 19 nt, Human
uggugcuuguuaaugugcc

SEQ ID NO: 219741 - RNA, 23 nt, Human
uuaaaaaaaaaaaacauaccggg

SEQ ID NO: 219742 - RNA, 24 nt, Human
uuaaaauuaaaaauaccuguauuu

SEQ ID NO: 219743 - RNA, 20 nt, Human
uuaaauagccucacaguuaa

SEQ ID NO: 219744 - RNA, 18 nt, Human
uuaagaaaugacauaagc

SEQ ID NO: 219745 - RNA, 19 nt, Human
uucaacauauuugaugaca

SEQ ID NO: 219746 - RNA, 21 nt, Human
uucaaguuaaaaaaaaaaaac

SEQ ID NO: 219747 - RNA, 22 nt, Human
uucauaaaaauccuucaauuuc

SEQ ID NO: 219748 - RNA, 18 nt, Human
uucuagaucaauucaaca

SEQ ID NO: 219749 - RNA, 23 nt, Human
uucuuagaggaugaauucccuaa

SEQ ID NO: 219750 - RNA, 18 nt, Human
uuggagaaaauccaacug

SEQ ID NO: 219751 - RNA, 21 nt, Human
uuuauaaauuucugaagacac

SEQ ID NO: 219752 - RNA, 26 nt, Human
uuucaaauaaacauuuaauguaaaaa

SEQ ID NO: 219753 - RNA, 22 nt, Human
uuucuucaaaaucuguuaucaa

SEQ ID NO: 219754 - RNA, 24 nt, Human
aaaaaaaaaaaaaucaaaaccaaa

SEQ ID NO: 219755 - RNA, 18 nt, Human
aaaaucuucuuuagagcu

SEQ ID NO: 219756 - RNA, 22 nt, Human
aaacaaaacgggggugccccgg

SEQ ID NO: 219757 - RNA, 18 nt, Human
aaagaacagcuugugaaa

SEQ ID NO: 219758 - RNA, 21 nt, Human
aaagacagcuugaauccuaca

SEQ ID NO: 219759 - RNA, 20 nt, Human
aaagccauuucaaguuucgu

SEQ ID NO: 219760 - RNA, 20 nt, Human
aacccuguaagcauccaauc

SEQ ID NO: 219761 - RNA, 20 nt, Human
aagaaaaacccuguaagcau

SEQ ID NO: 219762 - RNA, 21 nt, Human
aagacgaacgaagcaaacaaa

SEQ ID NO: 219763 - RNA, 21 nt, Human
aagcacuuacggcuuccauca

SEQ ID NO: 219764 - RNA, 22 nt, Human
aagcauccaauccaaccgauga

SEQ ID NO: 219765 - RNA, 23 nt, Human
acaaagaacagcuugugaaaaca

SEQ ID NO: 219766 - RNA, 23 nt, Human
acacaaccggagaagggcaacag

SEQ ID NO: 219767 - RNA, 28 nt, Human
acagcuugugaaaacaguuucccuuuuu

SEQ ID NO: 219768 - RNA, 18 nt, Human
acaggcauauguacaaaa

SEQ ID NO: 219769 - RNA, 23 nt, Human
accacauuggaaaacacuugacu

SEQ ID NO: 219770 - RNA, 21 nt, Human
accccccuccccaccccccac

SEQ ID NO: 219771 - RNA, 22 nt, Human
accccccuccccaccccccacc

SEQ ID NO: 219772 - RNA, 22 nt, Human
accgagaaaaaggcucaaguau

SEQ ID NO: 219773 - RNA, 19 nt, Human
acgaacgaagcaaacaaaa

SEQ ID NO: 219774 - RNA, 23 nt, Human
acucgcucccgucuccucguucc

SEQ ID NO: 219775 - RNA, 25 nt, Human
agccaaagacgaacgaagcaaacaa

SEQ ID NO: 219776 - RNA, 24 nt, Human
aggccauagaaaccggacaaccac

SEQ ID NO: 219777 - RNA, 24 nt, Human
agggaugggauuuuuuuuucuuuu

SEQ ID NO: 219778 - RNA, 19 nt, Human
agugcaaagacagcuugaa

SEQ ID NO: 219779 - RNA, 24 nt, Human
aguuucgugugugugugugugugg

SEQ ID NO: 219780 - RNA, 21 nt, Human
aucaaaaccaaaaaaaaaggc

SEQ ID NO: 219781 - RNA, 27 nt, Human
auccgacuuuucuuccucuucccccaa

SEQ ID NO: 219782 - RNA, 19 nt, Human
augaaacaaagaacagcuu

SEQ ID NO: 219783 - RNA, 18 nt, Human
auuauuuuuuuguuguug

SEQ ID NO: 219784 - RNA, 24 nt, Human
caaaaccaaaaaaaaaggcuuuug

SEQ ID NO: 219785 - RNA, 20 nt, Human
caaaacgggggugccccggc

SEQ ID NO: 219786 - RNA, 21 nt, Human
caagaaaaacccuguaagcau

SEQ ID NO: 219787 - RNA, 22 nt, Human
cacaaccgcccagagaaacaaa

SEQ ID NO: 219788 - RNA, 19 nt, Human
cacagcaaggccauagaaa

SEQ ID NO: 219789 - RNA, 21 nt, Human
cacagcaaggccauagaaacc

SEQ ID NO: 219790 - RNA, 20 nt, Human
caccaaaaaauaacagaaug

SEQ ID NO: 219791 - RNA, 20 nt, Human
caccaaaaaauaacagaauu

SEQ ID NO: 219792 - RNA, 23 nt, Human
caccccccuccccaccccccacc

SEQ ID NO: 219793 - RNA, 19 nt, Human
cacccucuucaaaaauggg

SEQ ID NO: 219794 - RNA, 22 nt, Human
cagaagacgacagccaaagcaa

SEQ ID NO: 219795 - RNA, 23 nt, Human
cagccaaagcaaagccauuucaa

SEQ ID NO: 219796 - RNA, 25 nt, Human
cagcgcuaauaaauuaaaugucaaa

SEQ ID NO: 219797 - RNA, 18 nt, Human
cagcuugugaaaacaguu

SEQ ID NO: 219798 - RNA, 20 nt, Human
cagucuuuuccgucuuccuc

SEQ ID NO: 219799 - RNA, 20 nt, Human
cauagaaaccggacaaccac

SEQ ID NO: 219800 - RNA, 19 nt, Human
caucuugucuucucacccc

SEQ ID NO: 219801 - RNA, 20 nt, Human
caucuugucuucucaccccc

SEQ ID NO: 219802 - RNA, 30 nt, Human
caucuugucuucucaccccccuccccaccu

SEQ ID NO: 219803 - RNA, 21 nt, Human
caugaagucucccucccaagg

SEQ ID NO: 219804 - RNA, 28 nt, Human
cauuuucacauucaaaaauaacugcagg

SEQ ID NO: 219805 - RNA, 20 nt, Human
ccaaaaucugacugcaguau

SEQ ID NO: 219806 - RNA, 23 nt, Human
ccaacagcaccaaaaaauaacag

SEQ ID NO: 219807 - RNA, 24 nt, Human
ccaacaguuacaaaaaaaaaaaaa

SEQ ID NO: 219808 - RNA, 28 nt, Human
ccccaacaguuacaaaaaaaaaaaaauc

SEQ ID NO: 219809 - RNA, 18 nt, Human
ccccaccccccaccgaga

SEQ ID NO: 219810 - RNA, 21 nt, Human
cccccaccgagaaaaaggcuc

SEQ ID NO: 219811 - RNA, 19 nt, Human
ccccuccccaccccccacc

SEQ ID NO: 219812 - RNA, 23 nt, Human
cccuccccaccccccaccgagaa

SEQ ID NO: 219813 - RNA, 22 nt, Human
ccgccuucagcugccacaaccg

SEQ ID NO: 219814 - RNA, 21 nt, Human
ccgggguuuuuaaaacaguga

SEQ ID NO: 219815 - RNA, 19 nt, Human
ccuaugguuaggaaacaac

SEQ ID NO: 219816 - RNA, 19 nt, Human
ccuccccaccccccaccga

SEQ ID NO: 219817 - RNA, 21 nt, Human
ccuucuaaaaaaucugcucac

SEQ ID NO: 219818 - RNA, 24 nt, Human
ccuuuuuuuuuuuuuuuuuuuuaa

SEQ ID NO: 219819 - RNA, 22 nt, Human
cgaacgaagcaaacaaaaaaaa

SEQ ID NO: 219820 - RNA, 18 nt, Human
cgugugugugugugugug

SEQ ID NO: 219821 - RNA, 21 nt, Human
cucaugugaccccuccaaggc

SEQ ID NO: 219822 - RNA, 18 nt, Human
cuccaaggcaggcagucu

SEQ ID NO: 219823 - RNA, 20 nt, Human
cugauugcaaaaggggacaa

SEQ ID NO: 219824 - RNA, 21 nt, Human
cugcaacaacaaccaacaaag

SEQ ID NO: 219825 - RNA, 18 nt, Human
cuggcacacggcagaaga

SEQ ID NO: 219826 - RNA, 22 nt, Human
cuuccucgcucgcuuuucuucu

SEQ ID NO: 219827 - RNA, 21 nt, Human
cuugugaaaacaguuucccuu

SEQ ID NO: 219828 - RNA, 22 nt, Human
cuuuagagcuagugcaaagaca

SEQ ID NO: 219829 - RNA, 25 nt, Human
gaaaaaauagacaagaugaacgcaa

SEQ ID NO: 219830 - RNA, 21 nt, Human
gaaacaaaacgggggugcccc

SEQ ID NO: 219831 - RNA, 24 nt, Human
gacgaacgaagcaaacaaaaaaaa

SEQ ID NO: 219832 - RNA, 23 nt, Human
gagcagcgcuaauaaauuaaaug

SEQ ID NO: 219833 - RNA, 28 nt, Human
gagccaaagacgaacgaagcaaacaaaa

SEQ ID NO: 219834 - RNA, 18 nt, Human
gcaacaacaaccaacaaa

SEQ ID NO: 219835 - RNA, 23 nt, Human
gcaauacaaauuaauacagcccc

SEQ ID NO: 219836 - RNA, 21 nt, Human
ggcagaagacgacagccaaag

SEQ ID NO: 219837 - RNA, 21 nt, Human
ggccauagaaaccggacaacc

SEQ ID NO: 219838 - RNA, 19 nt, Human
guagccaacagcaccaaaa

SEQ ID NO: 219839 - RNA, 21 nt, Human
uaaaacagugacuauacggca

SEQ ID NO: 219840 - RNA, 19 nt, Human
uaaaccacaugaagucucc

SEQ ID NO: 219841 - RNA, 22 nt, Human
uaaauguuacaagaaaaacccu

SEQ ID NO: 219842 - RNA, 20 nt, Human
uaacagaauggauuuccuaa

SEQ ID NO: 219843 - RNA, 20 nt, Human
uaauuguuaaauauuccaaa

SEQ ID NO: 219844 - RNA, 21 nt, Human
uacaaaaaaaaguucaacagu

SEQ ID NO: 219845 - RNA, 21 nt, Human
uacacagcaaggccauagaaa

SEQ ID NO: 219846 - RNA, 18 nt, Human
uacagcaaguacuccaaa

SEQ ID NO: 219847 - RNA, 24 nt, Human
uagccaacagcaccaaaaaauaac

SEQ ID NO: 219848 - RNA, 22 nt, Human
ucaaaaagagggaaaguacaca

SEQ ID NO: 219849 - RNA, 20 nt, Human
ucaccccccuccccaccccc

SEQ ID NO: 219850 - RNA, 21 nt, Human
ucaccccccuccccacccccc

SEQ ID NO: 219851 - RNA, 21 nt, Human
ucacuuuuuuuuccuuuuuuu

SEQ ID NO: 219852 - RNA, 19 nt, Human
uccaaacuucacccucuuc

SEQ ID NO: 219853 - RNA, 19 nt, Human
uccaaacuucacccucuuc

SEQ ID NO: 219854 - RNA, 19 nt, Human
uccacacauacuguacaca

SEQ ID NO: 219855 - RNA, 21 nt, Human
uccacacauacuguacacaca

SEQ ID NO: 219856 - RNA, 25 nt, Human
uccacacauacuguacacacaaccg

SEQ ID NO: 219857 - RNA, 18 nt, Human
ucccccaaagccagauuc

SEQ ID NO: 219858 - RNA, 22 nt, Human
ucccucaugugaccccuccaaa

SEQ ID NO: 219859 - RNA, 23 nt, Human
uccgaaauugggaaggaaaaaaa

SEQ ID NO: 219860 - RNA, 21 nt, Human
uccuaucccuucuaaaaaauc

SEQ ID NO: 219861 - RNA, 25 nt, Human
uccucguuccaccuaugguuaggaa

SEQ ID NO: 219862 - RNA, 18 nt, Human
uccuuuuuuuuuuuuuuu

SEQ ID NO: 219863 - RNA, 18 nt, Human
uccuuuuuuuuuuuuuuu

SEQ ID NO: 219864 - RNA, 19 nt, Human
ucugacugcaguaucuagg

SEQ ID NO: 219865 - RNA, 25 nt, Human
ugaaaaguaaacaaaaaacucgcaa

SEQ ID NO: 219866 - RNA, 22 nt, Human
ugaauccuacagcaaguacucc

SEQ ID NO: 219867 - RNA, 18 nt, Human
ugacuauacggcaguuuc

SEQ ID NO: 219868 - RNA, 18 nt, Human
ugagauggagauggaaug

SEQ ID NO: 219869 - RNA, 20 nt, Human
ugaucauaaaugaaacaagu

SEQ ID NO: 219870 - RNA, 19 nt, Human
ugcaaaaaaauauccuggu

SEQ ID NO: 219871 - RNA, 19 nt, Human
ugcaaaaaaauauccuggu

SEQ ID NO: 219872 - RNA, 23 nt, Human
ugccacaaccgcccagagaaaca

SEQ ID NO: 219873 - RNA, 23 nt, Human
ugccccggcuucccagaucacaa

SEQ ID NO: 219874 - RNA, 19 nt, Human
uggcacacggcagaagacg

SEQ ID NO: 219875 - RNA, 18 nt, Human
ugggaaggaaaaaaaaag

SEQ ID NO: 219876 - RNA, 24 nt, Human
ugggaaggaaaaaaaaagagccaa

SEQ ID NO: 219877 - RNA, 25 nt, Human
ugggaaggaaaaaaaaagagcugga

SEQ ID NO: 219878 - RNA, 21 nt, Human
ugggauuuuuuuuucuuuuuu

SEQ ID NO: 219879 - RNA, 20 nt, Human
uguaauccgacuuuucuucc

SEQ ID NO: 219880 - RNA, 20 nt, Human
uguacaaaagggaugggauu

SEQ ID NO: 219881 - RNA, 25 nt, Human
ugucuucucaccccccuccccaccc

SEQ ID NO: 219882 - RNA, 23 nt, Human
ugugcgcgugugucuccuauccc

SEQ ID NO: 219883 - RNA, 22 nt, Human
ugugugugcgcgugugucuccu

SEQ ID NO: 219884 - RNA, 20 nt, Human
ugugugugugugcgcgugug

SEQ ID NO: 219885 - RNA, 21 nt, Human
ugugugugugugcgcgugugu

SEQ ID NO: 219886 - RNA, 21 nt, Human
ugugugugugugugcgcgugu

SEQ ID NO: 219887 - RNA, 22 nt, Human
ugugugugugugugugcgcgug

SEQ ID NO: 219888 - RNA, 22 nt, Human
uuaaugcuaaaacaaaauuagu

SEQ ID NO: 219889 - RNA, 21 nt, Human
uuaaugcugacuugugaaggu

SEQ ID NO: 219890 - RNA, 19 nt, Human
uuaguucucuaaaaccaga

SEQ ID NO: 219891 - RNA, 21 nt, Human
uuccucgcucgcuuuucuucu

SEQ ID NO: 219892 - RNA, 23 nt, Human
uugaauccuacagcaaguacucc

SEQ ID NO: 219893 - RNA, 21 nt, Human
uugggaaggaaaaaaaaagag

SEQ ID NO: 219894 - RNA, 20 nt, Human
uugucuucucaccccccucc

SEQ ID NO: 219895 - RNA, 21 nt, Human
uuguugguggugguugaucuu

SEQ ID NO: 219896 - RNA, 23 nt, Human
aaaacaaggccguggacaggaaa

SEQ ID NO: 219897 - RNA, 19 nt, Human
aacaugguacaugccaucc

SEQ ID NO: 219898 - RNA, 25 nt, Human
aacccugucccccucgccccacacc

SEQ ID NO: 219899 - RNA, 18 nt, Human
aacucguuuuuguccuca

SEQ ID NO: 219900 - RNA, 23 nt, Human
aacugggacaugagauuuccaag

SEQ ID NO: 219901 - RNA, 19 nt, Human
aagcaacccugucccccuc

SEQ ID NO: 219902 - RNA, 21 nt, Human
aagcaggaaggaaagguucaa

SEQ ID NO: 219903 - RNA, 23 nt, Human
aagcaggaaggaaagguucaaag

SEQ ID NO: 219904 - RNA, 21 nt, Human
aagggucugcugugcucuccu

SEQ ID NO: 219905 - RNA, 22 nt, Human
acaugccauccagagugucccc

SEQ ID NO: 219906 - RNA, 22 nt, Human
acgcugaugccuggcugugaac

SEQ ID NO: 219907 - RNA, 19 nt, Human
acgguccgcuuuucuguuc

SEQ ID NO: 219908 - RNA, 21 nt, Human
acucuggaguuccuagcacac

SEQ ID NO: 219909 - RNA, 19 nt, Human
agaaauaauaaaaacaugg

SEQ ID NO: 219910 - RNA, 19 nt, Human
aggaagcaacccugucccc

SEQ ID NO: 219911 - RNA, 18 nt, Human
aggaaggaaagguucaaa

SEQ ID NO: 219912 - RNA, 22 nt, Human
aggaugccagcagaggcugaaa

SEQ ID NO: 219913 - RNA, 23 nt, Human
aggcugccugcuggaaagaaagc

SEQ ID NO: 219914 - RNA, 24 nt, Human
agggauaggugagaacaaggauaa

SEQ ID NO: 219915 - RNA, 22 nt, Human
aggucccggaaacaagcaagcu

SEQ ID NO: 219916 - RNA, 24 nt, Human
aggugcucauuccuggccuggagc

SEQ ID NO: 219917 - RNA, 20 nt, Human
agugaaagggugggguggag

SEQ ID NO: 219918 - RNA, 22 nt, Human
agugaaaguuacacgggaggga

SEQ ID NO: 219919 - RNA, 21 nt, Human
augccugcaacacuccuccag

SEQ ID NO: 219920 - RNA, 24 nt, Human
caaagcgucccaagucugccuucc

SEQ ID NO: 219921 - RNA, 22 nt, Human
caaaguccccacaaagcguccc

SEQ ID NO: 219922 - RNA, 21 nt, Human
caacccugucccccucgcccc

SEQ ID NO: 219923 - RNA, 18 nt, Human
caaggauaacccuccaag

SEQ ID NO: 219924 - RNA, 18 nt, Human
caccagccagagcaaggc

SEQ ID NO: 219925 - RNA, 23 nt, Human
caccagccagagcaaggcugccu

SEQ ID NO: 219926 - RNA, 25 nt, Human
cacggaauuagcaggucccggaaac

SEQ ID NO: 219927 - RNA, 21 nt, Human
cagaucugugccaggcaacuc

SEQ ID NO: 219928 - RNA, 24 nt, Human
cagcaguggcaggaagaccuccag

SEQ ID NO: 219929 - RNA, 22 nt, Human
cagcugacugucacgcugaugc

SEQ ID NO: 219930 - RNA, 21 nt, Human
caggaaagacuaauacggucc

SEQ ID NO: 219931 - RNA, 23 nt, Human
caggaagcaacccugucccccuc

SEQ ID NO: 219932 - RNA, 18 nt, Human
caggcaugaugcucagug

SEQ ID NO: 219933 - RNA, 20 nt, Human
caggucccggaaacaagcaa

SEQ ID NO: 219934 - RNA, 21 nt, Human
caggucccggaaacaagcaag

SEQ ID NO: 219935 - RNA, 22 nt, Human
ccacaccccacccucaaccagg

SEQ ID NO: 219936 - RNA, 22 nt, Human
ccagcagaggcugaaagagccc

SEQ ID NO: 219937 - RNA, 21 nt, Human
ccaggcacagaucugugccag

SEQ ID NO: 219938 - RNA, 26 nt, Human
ccaugcccgggagccccgacuccacc

SEQ ID NO: 219939 - RNA, 19 nt, Human
cccacaccccacccucaac

SEQ ID NO: 219940 - RNA, 20 nt, Human
cccacaccccacccucaacc

SEQ ID NO: 219941 - RNA, 23 nt, Human
ccccacaccccacccucaaccag

SEQ ID NO: 219942 - RNA, 19 nt, Human
ccccacccucaaccagggc

SEQ ID NO: 219943 - RNA, 23 nt, Human
ccccagacucaccacugcacccc

SEQ ID NO: 219944 - RNA, 24 nt, Human
cccccagacucaccacugcacccc

SEQ ID NO: 219945 - RNA, 23 nt, Human
ccccggcgccaagucagcaccgg

SEQ ID NO: 219946 - RNA, 18 nt, Human
cccgacuccaccagccag

SEQ ID NO: 219947 - RNA, 19 nt, Human
cccgacuccaccagccaga

SEQ ID NO: 219948 - RNA, 18 nt, Human
ccucaugaggguguggag

SEQ ID NO: 219949 - RNA, 24 nt, Human
ccucaugaggguguggagggcagg

SEQ ID NO: 219950 - RNA, 21 nt, Human
ccuccagcgugggugcagagg

SEQ ID NO: 219951 - RNA, 25 nt, Human
ccuccagcgugggugcagagggcgu

SEQ ID NO: 219952 - RNA, 24 nt, Human
ccuccagugcccucgggggcaggc

SEQ ID NO: 219953 - RNA, 21 nt, Human
ccuccccguccuccagcgugg

SEQ ID NO: 219954 - RNA, 24 nt, Human
ccucccgaagacagugacagcuau

SEQ ID NO: 219955 - RNA, 23 nt, Human
ccuggagcaggggucacucugga

SEQ ID NO: 219956 - RNA, 19 nt, Human
ccuuuaagcagggagugaa

SEQ ID NO: 219957 - RNA, 22 nt, Human
cuaagggucugcugugcucucc

SEQ ID NO: 219958 - RNA, 18 nt, Human
cuagcacaccugggcugc

SEQ ID NO: 219959 - RNA, 22 nt, Human
cucuccuacucuguggcuucag

SEQ ID NO: 219960 - RNA, 19 nt, Human
cucuguggauucugccagg

SEQ ID NO: 219961 - RNA, 21 nt, Human
cugacugucacgcugaugccu

SEQ ID NO: 219962 - RNA, 21 nt, Human
cugcaacacuccuccagugcc

SEQ ID NO: 219963 - RNA, 19 nt, Human
gaaagguucaaagucccca

SEQ ID NO: 219964 - RNA, 18 nt, Human
gaaaguuacacgggaggg

SEQ ID NO: 219965 - RNA, 20 nt, Human
gaggguguggagggcagggc

SEQ ID NO: 219966 - RNA, 20 nt, Human
gcaggaagcaacccuguccc

SEQ ID NO: 219967 - RNA, 18 nt, Human
gcaggcugcaugcagcug

SEQ ID NO: 219968 - RNA, 26 nt, Human
gcaguggcaggaagaccuccaggcac

SEQ ID NO: 219969 - RNA, 23 nt, Human
gcccagaagcugccaagacagca

SEQ ID NO: 219970 - RNA, 18 nt, Human
gccccacaccccacccuc

SEQ ID NO: 219971 - RNA, 20 nt, Human
gccccugacaaccuccccgu

SEQ ID NO: 219972 - RNA, 19 nt, Human
gcuccggggaacagcugcu

SEQ ID NO: 219973 - RNA, 21 nt, Human
ggaaagaaagcaggaaggaaa

SEQ ID NO: 219974 - RNA, 22 nt, Human
ggaagcaacccugucccccucg

SEQ ID NO: 219975 - RNA, 18 nt, Human
ggacaggaaagacuaaua

SEQ ID NO: 219976 - RNA, 23 nt, Human
ggacucaaggcagaacuaagcga

SEQ ID NO: 219977 - RNA, 23 nt, Human
gggcacaugaaucacugaaaaca

SEQ ID NO: 219978 - RNA, 20 nt, Human
gggcagccagcaguggcagg

SEQ ID NO: 219979 - RNA, 24 nt, Human
gggcagccagcaguggcaggaaga

SEQ ID NO: 219980 - RNA, 23 nt, Human
ggguggagggguccccagccuuu

SEQ ID NO: 219981 - RNA, 18 nt, Human
ggugcucauuccuggccu

SEQ ID NO: 219982 - RNA, 18 nt, Human
gugacuccagcucuaccc

SEQ ID NO: 219983 - RNA, 20 nt, Human
gugcagagggcgugggugau

SEQ ID NO: 219984 - RNA, 24 nt, Human
gugggguggagggguccccagccu

SEQ ID NO: 219985 - RNA, 22 nt, Human
uacacuggcaggacucaaggca

SEQ ID NO: 219986 - RNA, 20 nt, Human
uagaaugcccagaagcugcc

SEQ ID NO: 219987 - RNA, 19 nt, Human
uagccccugacaaccuccc

SEQ ID NO: 219988 - RNA, 21 nt, Human
uagccccugacaaccuccccg

SEQ ID NO: 219989 - RNA, 18 nt, Human
ucacugaaaacaaggccg

SEQ ID NO: 219990 - RNA, 22 nt, Human
ucagaaaaugagacucggcauu

SEQ ID NO: 219991 - RNA, 19 nt, Human
uccaccagccagagcaagg

SEQ ID NO: 219992 - RNA, 25 nt, Human
uccaccagccagagcaaggcugccu

SEQ ID NO: 219993 - RNA, 19 nt, Human
uccagccuccaugugugac

SEQ ID NO: 219994 - RNA, 18 nt, Human
uccauagaaugcccagaa

SEQ ID NO: 219995 - RNA, 18 nt, Human
uccccacaaagcguccca

SEQ ID NO: 219996 - RNA, 24 nt, Human
ucccuuuaagcagggagugaaagu

SEQ ID NO: 219997 - RNA, 21 nt, Human
uccuccagugcccucgggggc

SEQ ID NO: 219998 - RNA, 20 nt, Human
uccuggccuggagcaggggu

SEQ ID NO: 219999 - RNA, 19 nt, Human
ucuacauucgaaauggaau

SEQ ID NO: 220000 - RNA, 19 nt, Human
ucuccauagaaugcccaga

SEQ ID NO: 220001 - RNA, 23 nt, Human
ucuccauagaaugcccagaagcu

SEQ ID NO: 220002 - RNA, 19 nt, Human
ugaaaacaaggccguggac

SEQ ID NO: 220003 - RNA, 23 nt, Human
ugacaaccuccccguccuccagc

SEQ ID NO: 220004 - RNA, 22 nt, Human
ugagaacaaggauaacccucca

SEQ ID NO: 220005 - RNA, 23 nt, Human
ugagaacaaggauaacccuccaa

SEQ ID NO: 220006 - RNA, 19 nt, Human
ugcaugcagcuguccagcc

SEQ ID NO: 220007 - RNA, 24 nt, Human
ugccaggcaacucucaucaguucc

SEQ ID NO: 220008 - RNA, 20 nt, Human
ugcccgggagccccgacucc

SEQ ID NO: 220009 - RNA, 23 nt, Human
ugcugugcucuccuggggucucc

SEQ ID NO: 220010 - RNA, 19 nt, Human
ugcuucauugucuuguuuc

SEQ ID NO: 220011 - RNA, 21 nt, Human
uggaaagaaagcaggaaggaa

SEQ ID NO: 220012 - RNA, 20 nt, Human
uggaaucaugucuggcaugg

SEQ ID NO: 220013 - RNA, 19 nt, Human
uggagcaggggucacucug

SEQ ID NO: 220014 - RNA, 18 nt, Human
uggcaggaagcaacccug

SEQ ID NO: 220015 - RNA, 21 nt, Human
ugggcagccagcaguggcagg

SEQ ID NO: 220016 - RNA, 22 nt, Human
ugggguggagggguccccagcc

SEQ ID NO: 220017 - RNA, 18 nt, Human
ugucuuauuuacuguucc

SEQ ID NO: 220018 - RNA, 22 nt, Human
ugugccaggcaugaugcucagu

SEQ ID NO: 220019 - RNA, 23 nt, Human
aaaaaaaggcaaacugugaguga

SEQ ID NO: 220020 - RNA, 20 nt, Human
aaaaaacauuacccagaaaa

SEQ ID NO: 220021 - RNA, 18 nt, Human
aaacagcuaaacauaagc

SEQ ID NO: 220022 - RNA, 20 nt, Human
aagcgcacacacccagagcc

SEQ ID NO: 220023 - RNA, 20 nt, Human
aauaugcauaucuguuaggg

SEQ ID NO: 220024 - RNA, 22 nt, Human
acagcccccuuggcuuccgugc

SEQ ID NO: 220025 - RNA, 21 nt, Human
agaaaaaggccaggcuacugc

SEQ ID NO: 220026 - RNA, 23 nt, Human
agcacugaggcaucuggaaggaa

SEQ ID NO: 220027 - RNA, 21 nt, Human
agcagaagaaaagggcuuugc

SEQ ID NO: 220028 - RNA, 18 nt, Human
agcuccacggcacagccc

SEQ ID NO: 220029 - RNA, 23 nt, Human
aggccgggggcagugccgagaag

SEQ ID NO: 220030 - RNA, 21 nt, Human
agugagugggcagcagaagaa

SEQ ID NO: 220031 - RNA, 21 nt, Human
agugccgagaagagggaagga

SEQ ID NO: 220032 - RNA, 22 nt, Human
caacguccgcuguuaccacuga

SEQ ID NO: 220033 - RNA, 24 nt, Human
caagcgcacacacccagagccccg

SEQ ID NO: 220034 - RNA, 18 nt, Human
cacacccagagccccggc

SEQ ID NO: 220035 - RNA, 19 nt, Human
cacagcccccuuggcuucc

SEQ ID NO: 220036 - RNA, 21 nt, Human
cacugcuggggacacggaacc

SEQ ID NO: 220037 - RNA, 22 nt, Human
cacuggguuugaaccgcauucc

SEQ ID NO: 220038 - RNA, 22 nt, Human
cagagaaagcagugaauccacu

SEQ ID NO: 220039 - RNA, 19 nt, Human
cagagccccggcgcgagcc

SEQ ID NO: 220040 - RNA, 24 nt, Human
cagaucccgcaaacggugaaaagg

SEQ ID NO: 220041 - RNA, 23 nt, Human
cagcccccuuggcuuccgggagg

SEQ ID NO: 220042 - RNA, 21 nt, Human
cagcccugccacucaggggcc

SEQ ID NO: 220043 - RNA, 19 nt, Human
cagcuccacggcacagccc

SEQ ID NO: 220044 - RNA, 18 nt, Human
caugccacacagcagagu

SEQ ID NO: 220045 - RNA, 21 nt, Human
ccacacccaagacgggacggu

SEQ ID NO: 220046 - RNA, 24 nt, Human
cccacagugagugggcagcagaag

SEQ ID NO: 220047 - RNA, 24 nt, Human
cccacgcguccacccugcacgcca

SEQ ID NO: 220048 - RNA, 25 nt, Human
cccacgcguccacccugcacgccaa

SEQ ID NO: 220049 - RNA, 22 nt, Human
cccagagccccggcgcgagccc

SEQ ID NO: 220050 - RNA, 19 nt, Human
ccccacgcguccacccugc

SEQ ID NO: 220051 - RNA, 23 nt, Human
ccccggcgcgagcccagcuccac

SEQ ID NO: 220052 - RNA, 28 nt, Human
cccuucugucuccacguggagcuggagg

SEQ ID NO: 220053 - RNA, 22 nt, Human
cccuuucucuauuuuugcuacc

SEQ ID NO: 220054 - RNA, 21 nt, Human
ccgcggggcugaggcucugcc

SEQ ID NO: 220055 - RNA, 18 nt, Human
ccuccccgggcacagggg

SEQ ID NO: 220056 - RNA, 23 nt, Human
ccuccugcccauacuugucaccc

SEQ ID NO: 220057 - RNA, 21 nt, Human
ccuuuuuucuacccuuucucu

SEQ ID NO: 220058 - RNA, 23 nt, Human
cgggagucagcccugccacucag

SEQ ID NO: 220059 - RNA, 19 nt, Human
cggucucgggcgcgggcgg

SEQ ID NO: 220060 - RNA, 21 nt, Human
cucugccccgggcugcccucc

SEQ ID NO: 220061 - RNA, 24 nt, Human
cugaggcucugccccgggcugccc

SEQ ID NO: 220062 - RNA, 22 nt, Human
cugccccaugccuccugcccau

SEQ ID NO: 220063 - RNA, 18 nt, Human
cugccccgggcugcccuc

SEQ ID NO: 220064 - RNA, 23 nt, Human
cugugagugauacccaaucgugu

SEQ ID NO: 220065 - RNA, 26 nt, Human
gaaggcagaaacauaaggaaccuguu

SEQ ID NO: 220066 - RNA, 18 nt, Human
gacccugguggagaaggc

SEQ ID NO: 220067 - RNA, 25 nt, Human
gagccagggccagggggcacucgga

SEQ ID NO: 220068 - RNA, 23 nt, Human
gagcgacccugguggagaaggca

SEQ ID NO: 220069 - RNA, 21 nt, Human
gaggaauuucagucaaucggg

SEQ ID NO: 220070 - RNA, 18 nt, Human
gaguugcggucuuucccu

SEQ ID NO: 220071 - RNA, 21 nt, Human
gcagaguccauaagacgggcu

SEQ ID NO: 220072 - RNA, 23 nt, Human
gcagcacagaucucacacagaaa

SEQ ID NO: 220073 - RNA, 19 nt, Human
gcccccuuggcuuccgugc

SEQ ID NO: 220074 - RNA, 18 nt, Human
gccgccggcggcccuggg

SEQ ID NO: 220075 - RNA, 28 nt, Human
gcuaaaauccaaaaaacauuacccaguc

SEQ ID NO: 220076 - RNA, 21 nt, Human
ggcacagcccccuuggcuucc

SEQ ID NO: 220077 - RNA, 23 nt, Human
ggccccaagacgaccggaugggg

SEQ ID NO: 220078 - RNA, 21 nt, Human
ggcccucacugcuggggacac

SEQ ID NO: 220079 - RNA, 20 nt, Human
gguuaaaaauauagcaaucc

SEQ ID NO: 220080 - RNA, 24 nt, Human
guccauaagacgggcuggccccaa

SEQ ID NO: 220081 - RNA, 18 nt, Human
uacccagaaaaaaaggca

SEQ ID NO: 220082 - RNA, 19 nt, Human
uagcacugaggcaucugga

SEQ ID NO: 220083 - RNA, 22 nt, Human
uagcagagaaacagcuaaacau

SEQ ID NO: 220084 - RNA, 23 nt, Human
uccauccacacccaagacgggac

SEQ ID NO: 220085 - RNA, 19 nt, Human
uccaugcacacgagagcca

SEQ ID NO: 220086 - RNA, 19 nt, Human
ucccgcaaacggugaaaac

SEQ ID NO: 220087 - RNA, 20 nt, Human
uccgcuguuaccacugaugu

SEQ ID NO: 220088 - RNA, 21 nt, Human
ucgcugggcuguccgaguugc

SEQ ID NO: 220089 - RNA, 21 nt, Human
ucgggggcgauuauuccuuuu

SEQ ID NO: 220090 - RNA, 19 nt, Human
ucgguguggggagucggcu

SEQ ID NO: 220091 - RNA, 18 nt, Human
ucucacagggaggaggug

SEQ ID NO: 220092 - RNA, 19 nt, Human
ucucuauuuuugcuaccgc

SEQ ID NO: 220093 - RNA, 19 nt, Human
ucugccaugccacacagca

SEQ ID NO: 220094 - RNA, 20 nt, Human
ucugccccgggcugcccucc

SEQ ID NO: 220095 - RNA, 19 nt, Human
ucuggugggggaaacagcc

SEQ ID NO: 220096 - RNA, 21 nt, Human
ucuggugggggaaacagccga

SEQ ID NO: 220097 - RNA, 18 nt, Human
ucugucuccacguggagc

SEQ ID NO: 220098 - RNA, 27 nt, Human
ugagcccaggcggaucgggaccaaagu

SEQ ID NO: 220099 - RNA, 21 nt, Human
ugcacgccaagcgcacacacc

SEQ ID NO: 220100 - RNA, 24 nt, Human
ugccacacagcagaguguuauaca

SEQ ID NO: 220101 - RNA, 21 nt, Human
ugccaugccacacagcagagu

SEQ ID NO: 220102 - RNA, 18 nt, Human
ugcccggaccccucaggc

SEQ ID NO: 220103 - RNA, 18 nt, Human
ugcccuccauccacaccc

SEQ ID NO: 220104 - RNA, 26 nt, Human
ugcuuagcugagcccaggcggaucgg

SEQ ID NO: 220105 - RNA, 21 nt, Human
ugggagaaggcguccucuagg

SEQ ID NO: 220106 - RNA, 18 nt, Human
uggggugggccacccugc

SEQ ID NO: 220107 - RNA, 21 nt, Human
uguagcacugaggcaucugga

SEQ ID NO: 220108 - RNA, 25 nt, Human
ugugccgggaucccuucugucucca

SEQ ID NO: 220109 - RNA, 23 nt, Human
uuguuggacugaacaaguuacau

SEQ ID NO: 220110 - RNA, 25 nt, Human
uuuucgagcugcgccgcggagccug

SEQ ID NO: 220111 - RNA, 18 nt, Human
aaauucugggcaacaugg

SEQ ID NO: 220112 - RNA, 20 nt, Human
aacacagugagacccugucu

SEQ ID NO: 220113 - RNA, 21 nt, Human
aacacagugagacccugucuc

SEQ ID NO: 220114 - RNA, 28 nt, Human
aacacccauaaccucaagggcacuggug

SEQ ID NO: 220115 - RNA, 25 nt, Human
aacagcuggggauaagagcacacau

SEQ ID NO: 220116 - RNA, 23 nt, Human
aagaguucaagaccagccugggc

SEQ ID NO: 220117 - RNA, 25 nt, Human
aagcaagaaacacacacuuccagga

SEQ ID NO: 220118 - RNA, 23 nt, Human
aagcagcaggugccucuccaggg

SEQ ID NO: 220119 - RNA, 24 nt, Human
aaguacgagaaaccacagcgagcc

SEQ ID NO: 220120 - RNA, 18 nt, Human
acaaagugaccucgcucu

SEQ ID NO: 220121 - RNA, 20 nt, Human
acacgcugcaccuccugccu

SEQ ID NO: 220122 - RNA, 24 nt, Human
acagagugagacccugccucaaga

SEQ ID NO: 220123 - RNA, 25 nt, Human
accaggacagacaacuccuccccaa

SEQ ID NO: 220124 - RNA, 21 nt, Human
accaugcugacacugggcaac

SEQ ID NO: 220125 - RNA, 20 nt, Human
accuaggccuuggcuccugg

SEQ ID NO: 220126 - RNA, 20 nt, Human
acuacuucccucuccuccug

SEQ ID NO: 220127 - RNA, 24 nt, Human
acuccagccuggucaacagaguga

SEQ ID NO: 220128 - RNA, 18 nt, Human
acugacaucuccacccuc

SEQ ID NO: 220129 - RNA, 24 nt, Human
acuucacuccagccuggucaacag

SEQ ID NO: 220130 - RNA, 25 nt, Human
acuucacuccagccuggucaacaga

SEQ ID NO: 220131 - RNA, 21 nt, Human
acuucccucugccagggagaa

SEQ ID NO: 220132 - RNA, 18 nt, Human
agaaaagaaaaggacaau

SEQ ID NO: 220133 - RNA, 19 nt, Human
agacaacuccuccccaaaa

SEQ ID NO: 220134 - RNA, 20 nt, Human
agaccuaccaacacccauaa

SEQ ID NO: 220135 - RNA, 22 nt, Human
agacgcuggaaugcaaacuacg

SEQ ID NO: 220136 - RNA, 21 nt, Human
agagaggaaaugggcccaggg

SEQ ID NO: 220137 - RNA, 18 nt, Human
agagcccaugggacagga

SEQ ID NO: 220138 - RNA, 19 nt, Human
agaggaaaagaauucaagg

SEQ ID NO: 220139 - RNA, 20 nt, Human
agaggaaaugggcccaggga

SEQ ID NO: 220140 - RNA, 20 nt, Human
agcagauagagccuucugag

SEQ ID NO: 220141 - RNA, 22 nt, Human
agccagggaggucgaggcugca

SEQ ID NO: 220142 - RNA, 19 nt, Human
agccuggcagcuccuccca

SEQ ID NO: 220143 - RNA, 19 nt, Human
agccuggcccccauuccag

SEQ ID NO: 220144 - RNA, 22 nt, Human
agccugggcaacacagugagac

SEQ ID NO: 220145 - RNA, 24 nt, Human
agccugggcaacacagugagaccc

SEQ ID NO: 220146 - RNA, 24 nt, Human
agccuggucaacagagugagaccc

SEQ ID NO: 220147 - RNA, 18 nt, Human
aggaaggaggaucgcuug

SEQ ID NO: 220148 - RNA, 20 nt, Human
aggacauagauagggcucug

SEQ ID NO: 220149 - RNA, 24 nt, Human
aggaucgcuugaggccaagaguuc

SEQ ID NO: 220150 - RNA, 24 nt, Human
aggaugaggaaggaggaucgcuug

SEQ ID NO: 220151 - RNA, 30 nt, Human
aggaugaggaaggaggaucgcuugaggccc

SEQ ID NO: 220152 - RNA, 24 nt, Human
aggcagugaguguugcccgugaaa

SEQ ID NO: 220153 - RNA, 22 nt, Human
aggccgagugcuguggcucaca

SEQ ID NO: 220154 - RNA, 19 nt, Human
aggcuggggcgggaggauc

SEQ ID NO: 220155 - RNA, 24 nt, Human
aggucgaggcugcagugagcuggg

SEQ ID NO: 220156 - RNA, 18 nt, Human
agugcugggauuacaggc

SEQ ID NO: 220157 - RNA, 23 nt, Human
agugucugcacaugcccuccugc

SEQ ID NO: 220158 - RNA, 24 nt, Human
aucacaccacuucacuccagccug

SEQ ID NO: 220159 - RNA, 26 nt, Human
aucagaaauagggaacccaagaccuc

SEQ ID NO: 220160 - RNA, 18 nt, Human
auccucuccuucaugaga

SEQ ID NO: 220161 - RNA, 19 nt, Human
auccugagcacaggcccca

SEQ ID NO: 220162 - RNA, 18 nt, Human
augaggccacaacugaag

SEQ ID NO: 220163 - RNA, 22 nt, Human
augccgcaaagcaacuacagac

SEQ ID NO: 220164 - RNA, 19 nt, Human
caaaaaaaauaaaaaggcg

SEQ ID NO: 220165 - RNA, 22 nt, Human
caaaaugccaaaauaccacaca

SEQ ID NO: 220166 - RNA, 25 nt, Human
caaagcaagaaacacacacuuccag

SEQ ID NO: 220167 - RNA, 21 nt, Human
caaauccucuccuucaugaga

SEQ ID NO: 220168 - RNA, 22 nt, Human
caacacagugagacccugucuc

SEQ ID NO: 220169 - RNA, 24 nt, Human
caacacagugagacccugucucua

SEQ ID NO: 220170 - RNA, 20 nt, Human
caacagagugagacccugcc

SEQ ID NO: 220171 - RNA, 23 nt, Human
caacagcagacgcuggaaugcaa

SEQ ID NO: 220172 - RNA, 21 nt, Human
caacuacagacauggagaaaa

SEQ ID NO: 220173 - RNA, 22 nt, Human
caagaaaagaaaaggacaaugc

SEQ ID NO: 220174 - RNA, 23 nt, Human
caagaaacacacacuuccaggac

SEQ ID NO: 220175 - RNA, 19 nt, Human
caagccagggaggucgagg

SEQ ID NO: 220176 - RNA, 18 nt, Human
cacacagcacaaagugac

SEQ ID NO: 220177 - RNA, 23 nt, Human
cacaccuguaaucccagcacuuu

SEQ ID NO: 220178 - RNA, 24 nt, Human
caccaucgucauggagauggaggc

SEQ ID NO: 220179 - RNA, 28 nt, Human
caccuaagccuagucaccucccaaaggc

SEQ ID NO: 220180 - RNA, 20 nt, Human
caccuaggccuuggcuccug

SEQ ID NO: 220181 - RNA, 18 nt, Human
caccuguaaucccagcac

SEQ ID NO: 220182 - RNA, 19 nt, Human
caccuguaaucccagcacu

SEQ ID NO: 220183 - RNA, 18 nt, Human
cacggggauggccgccag

SEQ ID NO: 220184 - RNA, 20 nt, Human
cacuaccacauccucaaggc

SEQ ID NO: 220185 - RNA, 21 nt, Human
cacuacuucccucuccuccug

SEQ ID NO: 220186 - RNA, 27 nt, Human
cacuccacacgcugcaccuccugccuc

SEQ ID NO: 220187 - RNA, 22 nt, Human
cacuccagccuggucaacagag

SEQ ID NO: 220188 - RNA, 22 nt, Human
cacuccagccuggucaacagag

SEQ ID NO: 220189 - RNA, 24 nt, Human
cacuccagccuggucaacagagug

SEQ ID NO: 220190 - RNA, 23 nt, Human
cacuccuggaagggcucuugagu

SEQ ID NO: 220191 - RNA, 24 nt, Human
cacuucacuccagccuggucaaca

SEQ ID NO: 220192 - RNA, 19 nt, Human
cacuugcaggacacacgcc

SEQ ID NO: 220193 - RNA, 23 nt, Human
cagacaacuccuccccaaaagua

SEQ ID NO: 220194 - RNA, 26 nt, Human
cagaccaugcugacacugguuaaaga

SEQ ID NO: 220195 - RNA, 18 nt, Human
cagcaaugacuuuugccc

SEQ ID NO: 220196 - RNA, 20 nt, Human
cagcaggugccucuccaggg

SEQ ID NO: 220197 - RNA, 23 nt, Human
cagcaggugccucuccagggucc

SEQ ID NO: 220198 - RNA, 19 nt, Human
cagcccaucaagguacaau

SEQ ID NO: 220199 - RNA, 20 nt, Human
cagcuacucaggaggcuggg

SEQ ID NO: 220200 - RNA, 24 nt, Human
cagcuacucaggaggcuggggcgg

SEQ ID NO: 220201 - RNA, 21 nt, Human
caggacacacgccuggccugg

SEQ ID NO: 220202 - RNA, 20 nt, Human
cagggcagggcagagaagcc

SEQ ID NO: 220203 - RNA, 25 nt, Human
cagugcugggauuacaggcgugagc

SEQ ID NO: 220204 - RNA, 19 nt, Human
caguuuucuuguaugcuca

SEQ ID NO: 220205 - RNA, 18 nt, Human
cauagcaagaaaaaccua

SEQ ID NO: 220206 - RNA, 25 nt, Human
cauccucaaggcccacagucuccug

SEQ ID NO: 220207 - RNA, 22 nt, Human
caugcaauccuaaugccuuggc

SEQ ID NO: 220208 - RNA, 21 nt, Human
caugcugacacugggcaacac

SEQ ID NO: 220209 - RNA, 19 nt, Human
cauggucaccccagaggac

SEQ ID NO: 220210 - RNA, 20 nt, Human
ccaagaacugagucccagcu

SEQ ID NO: 220211 - RNA, 19 nt, Human
ccacagaccuaccaacacc

SEQ ID NO: 220212 - RNA, 24 nt, Human
ccacagaccuaccaacacccauaa

SEQ ID NO: 220213 - RNA, 24 nt, Human
ccaccuccuaauaccacccuccug

SEQ ID NO: 220214 - RNA, 19 nt, Human
ccacugcacccagcuugaa

SEQ ID NO: 220215 - RNA, 21 nt, Human
ccacugcacccagcuugaaga

SEQ ID NO: 220216 - RNA, 19 nt, Human
ccacuucacuccagccugg

SEQ ID NO: 220217 - RNA, 19 nt, Human
ccacuucacuccagccugg

SEQ ID NO: 220218 - RNA, 22 nt, Human
ccagcccagcagauagagccuu

SEQ ID NO: 220219 - RNA, 24 nt, Human
ccaggacagacaacuccuccccaa

SEQ ID NO: 220220 - RNA, 18 nt, Human
ccagugcugggauuacag

SEQ ID NO: 220221 - RNA, 20 nt, Human
ccagugcugggauuacaggc

SEQ ID NO: 220222 - RNA, 20 nt, Human
ccagugcugggauuacaggc

SEQ ID NO: 220223 - RNA, 22 nt, Human
ccagugcugggauuacaggcgu

SEQ ID NO: 220224 - RNA, 24 nt, Human
ccagugcugggauuacaggcguga

SEQ ID NO: 220225 - RNA, 23 nt, Human
cccaagaccucgagagaggaaau

SEQ ID NO: 220226 - RNA, 23 nt, Human
cccacagucuccugaaacaacag

SEQ ID NO: 220227 - RNA, 23 nt, Human
cccagagcagaccaugcugacac

SEQ ID NO: 220228 - RNA, 24 nt, Human
ccccaaaaguauuacuaacgugcu

SEQ ID NO: 220229 - RNA, 21 nt, Human
cccgugggcgacccacuccug

SEQ ID NO: 220230 - RNA, 23 nt, Human
cccgugggcgacccacuccugga

SEQ ID NO: 220231 - RNA, 19 nt, Human
ccuaggccuuggcuccugg

SEQ ID NO: 220232 - RNA, 18 nt, Human
ccucaagaaaagaaaagg

SEQ ID NO: 220233 - RNA, 18 nt, Human
ccucagguaucccugguc

SEQ ID NO: 220234 - RNA, 22 nt, Human
ccuccaggcagcacuuaggaau

SEQ ID NO: 220235 - RNA, 19 nt, Human
ccucccaaaggccccaccu

SEQ ID NO: 220236 - RNA, 19 nt, Human
ccuccuaauaccacccucc

SEQ ID NO: 220237 - RNA, 21 nt, Human
ccucgcucuaguuccuuccuu

SEQ ID NO: 220238 - RNA, 21 nt, Human
ccucuagucccagcuacucag

SEQ ID NO: 220239 - RNA, 22 nt, Human
ccucuagucccagcuacucagg

SEQ ID NO: 220240 - RNA, 21 nt, Human
ccugagcacaggccccagucc

SEQ ID NO: 220241 - RNA, 22 nt, Human
ccugggcaacacagugagaccc

SEQ ID NO: 220242 - RNA, 25 nt, Human
cgaacuccuggacucaugcaauccu

SEQ ID NO: 220243 - RNA, 20 nt, Human
cgggaggaucacucaagcca

SEQ ID NO: 220244 - RNA, 23 nt, Human
cgucaguauguccacaccauagg

SEQ ID NO: 220245 - RNA, 24 nt, Human
cgugcugacucggccaaaugauau

SEQ ID NO: 220246 - RNA, 19 nt, Human
cuacuucccucuccuccug

SEQ ID NO: 220247 - RNA, 19 nt, Human
cuaguuccuuccuuuucuu

SEQ ID NO: 220248 - RNA, 22 nt, Human
cucacaccuguaaucccagcac

SEQ ID NO: 220249 - RNA, 24 nt, Human
cucacaccuguaaucccagcacuu

SEQ ID NO: 220250 - RNA, 23 nt, Human
cucagccuggcccccauuccagc

SEQ ID NO: 220251 - RNA, 19 nt, Human
cucucgggccaucggaccu

SEQ ID NO: 220252 - RNA, 20 nt, Human
cugcacaugcccuccugccu

SEQ ID NO: 220253 - RNA, 19 nt, Human
cugcaccuccugccucagg

SEQ ID NO: 220254 - RNA, 19 nt, Human
cugcagugagcugggauca

SEQ ID NO: 220255 - RNA, 20 nt, Human
cugcagugagcugggaucac

SEQ ID NO: 220256 - RNA, 19 nt, Human
cugccugcucugcugaucc

SEQ ID NO: 220257 - RNA, 19 nt, Human
cugccugcucugcugaucc

SEQ ID NO: 220258 - RNA, 21 nt, Human
cugggcacccgagccacaccc

SEQ ID NO: 220259 - RNA, 21 nt, Human
cuucccucuccuccugcuccc

SEQ ID NO: 220260 - RNA, 19 nt, Human
gaaaaaccuauuuaggccg

SEQ ID NO: 220261 - RNA, 19 nt, Human
gaaauucugggcaacaugg

SEQ ID NO: 220262 - RNA, 24 nt, Human
gaaguucuccaacauuaugucucu

SEQ ID NO: 220263 - RNA, 20 nt, Human
gagcacaggccccagucccu

SEQ ID NO: 220264 - RNA, 21 nt, Human
gagccccacccucacgaucuc

SEQ ID NO: 220265 - RNA, 20 nt, Human
gaggcugcagugagcuggga

SEQ ID NO: 220266 - RNA, 24 nt, Human
gaggcugcagugagcugggaucaa

SEQ ID NO: 220267 - RNA, 24 nt, Human
gaucacucaagccagggaggucga

SEQ ID NO: 220268 - RNA, 24 nt, Human
gaucgcuugaggccaagaguucaa

SEQ ID NO: 220269 - RNA, 18 nt, Human
gauuacaggcgugagcca

SEQ ID NO: 220270 - RNA, 22 nt, Human
gauuacaggcgugagccacugc

SEQ ID NO: 220271 - RNA, 23 nt, Human
gauuacaggcgugagccacugca

SEQ ID NO: 220272 - RNA, 18 nt, Human
gcaagaaacacacacuuc

SEQ ID NO: 220273 - RNA, 21 nt, Human
gcaauccuaaugccuuggccu

SEQ ID NO: 220274 - RNA, 20 nt, Human
gcaggugccucuccaggguc

SEQ ID NO: 220275 - RNA, 21 nt, Human
gccaaaaugccaaaauaccac

SEQ ID NO: 220276 - RNA, 19 nt, Human
gccacaacugaagugagau

SEQ ID NO: 220277 - RNA, 24 nt, Human
gccagggaggucgaggcugcagug

SEQ ID NO: 220278 - RNA, 24 nt, Human
gccauaaguaugaaauucugggca

SEQ ID NO: 220279 - RNA, 21 nt, Human
gcugaaugaggccacaacuga

SEQ ID NO: 220280 - RNA, 18 nt, Human
gcuuguucuaggcuaggg

SEQ ID NO: 220281 - RNA, 21 nt, Human
ggaccagggcaagacgccuga

SEQ ID NO: 220282 - RNA, 22 nt, Human
ggagaaacagggccaguggcca

SEQ ID NO: 220283 - RNA, 19 nt, Human
ggagaugccgcaaagcaac

SEQ ID NO: 220284 - RNA, 23 nt, Human
ggaucgcuugaggccaagaguuc

SEQ ID NO: 220285 - RNA, 23 nt, Human
ggccaagaacugagucccagcuc

SEQ ID NO: 220286 - RNA, 19 nt, Human
gggcagggcagagaagcca

SEQ ID NO: 220287 - RNA, 28 nt, Human
gggccaguggccagggcagggcagagaa

SEQ ID NO: 220288 - RNA, 24 nt, Human
gggcggugggcauggccuccuguc

SEQ ID NO: 220289 - RNA, 24 nt, Human
ggguguggggagaaacagggccag

SEQ ID NO: 220290 - RNA, 19 nt, Human
ggugcggcucuggcuuguu

SEQ ID NO: 220291 - RNA, 23 nt, Human
gguggugcgugccucuaguccca

SEQ ID NO: 220292 - RNA, 21 nt, Human
gucaggguuucaacauauaaa

SEQ ID NO: 220293 - RNA, 18 nt, Human
gugaaauggagaugccgc

SEQ ID NO: 220294 - RNA, 22 nt, Human
guggccagggcagggcagagaa

SEQ ID NO: 220295 - RNA, 22 nt, Human
guggcucacaccuguaauccca

SEQ ID NO: 220296 - RNA, 24 nt, Human
guggugcgugccucuagucccagc

SEQ ID NO: 220297 - RNA, 20 nt, Human
guucuaggcuaggguggacc

SEQ ID NO: 220298 - RNA, 24 nt, Human
uaacagcuggggauaagagcacac

SEQ ID NO: 220299 - RNA, 18 nt, Human
uacaaaaaaaauaaaaag

SEQ ID NO: 220300 - RNA, 18 nt, Human
uacaaugaaauagaaaaa

SEQ ID NO: 220301 - RNA, 23 nt, Human
uacagacauggagaaaauaacca

SEQ ID NO: 220302 - RNA, 19 nt, Human
uacaggcgugagccacugc

SEQ ID NO: 220303 - RNA, 24 nt, Human
uacaggcgugagccacugcaccca

SEQ ID NO: 220304 - RNA, 22 nt, Human
uaccaacacccauaaccucaag

SEQ ID NO: 220305 - RNA, 19 nt, Human
uaccacauccucaaggccc

SEQ ID NO: 220306 - RNA, 21 nt, Human
uacgagaaaccacagcgagcc

SEQ ID NO: 220307 - RNA, 19 nt, Human
uagaaggaugaggaaggag

SEQ ID NO: 220308 - RNA, 22 nt, Human
uagcaggccaagaacugagucc

SEQ ID NO: 220309 - RNA, 23 nt, Human
uagggaacccaagaccucgagag

SEQ ID NO: 220310 - RNA, 21 nt, Human
uaucaugccuaggcuggucuc

SEQ ID NO: 220311 - RNA, 22 nt, Human
uaucaugccuaggcuggucucg

SEQ ID NO: 220312 - RNA, 22 nt, Human
uaugaaauucugggcaacaugg

SEQ ID NO: 220313 - RNA, 18 nt, Human
ucaacagcagacgcugga

SEQ ID NO: 220314 - RNA, 21 nt, Human
ucaagccagggaggucgaggc

SEQ ID NO: 220315 - RNA, 21 nt, Human
ucagguggggucggggcacag

SEQ ID NO: 220316 - RNA, 20 nt, Human
ucaguggaaucaacagcaga

SEQ ID NO: 220317 - RNA, 23 nt, Human
uccagccuggucaacagagugag

SEQ ID NO: 220318 - RNA, 24 nt, Human
uccagccuggucaacagagugaga

SEQ ID NO: 220319 - RNA, 23 nt, Human
uccaggggcggugggcauggccu

SEQ ID NO: 220320 - RNA, 21 nt, Human
uccagugcugggauuacaggc

SEQ ID NO: 220321 - RNA, 18 nt, Human
ucccugcucuggaccuca

SEQ ID NO: 220322 - RNA, 25 nt, Human
uccguggggccccccaacaucuugg

SEQ ID NO: 220323 - RNA, 23 nt, Human
uccugggcacccgagccacaccc

SEQ ID NO: 220324 - RNA, 24 nt, Human
uccuuucacacacaucagaaauag

SEQ ID NO: 220325 - RNA, 23 nt, Human
ucgcuugaggccaagaguucaag

SEQ ID NO: 220326 - RNA, 18 nt, Human
ucucacuccacacgcugc

SEQ ID NO: 220327 - RNA, 20 nt, Human
ucucacuccacacgcugcac

SEQ ID NO: 220328 - RNA, 19 nt, Human
ucucgaacuccuggacuca

SEQ ID NO: 220329 - RNA, 21 nt, Human
ucucgaacuccuggacucaug

SEQ ID NO: 220330 - RNA, 20 nt, Human
ucucgcauaagcagcagguu

SEQ ID NO: 220331 - RNA, 18 nt, Human
ucucucccucuccacucu

SEQ ID NO: 220332 - RNA, 18 nt, Human
ucucuguagaggccucca

SEQ ID NO: 220333 - RNA, 22 nt, Human
ucuguagaggccuccaggcagc

SEQ ID NO: 220334 - RNA, 18 nt, Human
ugaaagacgaggcuaauc

SEQ ID NO: 220335 - RNA, 19 nt, Human
ugaaaguacgagaaaccag

SEQ ID NO: 220336 - RNA, 23 nt, Human
ugaaauagaaaaaaggcuggcca

SEQ ID NO: 220337 - RNA, 20 nt, Human
ugaaauggagaugccgcaaa

SEQ ID NO: 220338 - RNA, 21 nt, Human
ugacagcccaucaagguacaa

SEQ ID NO: 220339 - RNA, 18 nt, Human
ugaccaggacagacaacu

SEQ ID NO: 220340 - RNA, 19 nt, Human
ugacuuuugccccuguauc

SEQ ID NO: 220341 - RNA, 20 nt, Human
ugagaugugcggccuguuca

SEQ ID NO: 220342 - RNA, 21 nt, Human
ugagccucauggucaccccag

SEQ ID NO: 220343 - RNA, 20 nt, Human
ugauccugagcacaggcccc

SEQ ID NO: 220344 - RNA, 22 nt, Human
ugccauguggcagaaguucucc

SEQ ID NO: 220345 - RNA, 24 nt, Human
ugccuaggcuggucucgaacuccu

SEQ ID NO: 220346 - RNA, 20 nt, Human
ugccucagguggggucgggg

SEQ ID NO: 220347 - RNA, 24 nt, Human
ugccucuagucccagcuacucagg

SEQ ID NO: 220348 - RNA, 19 nt, Human
ugccuuggcuugggguggc

SEQ ID NO: 220349 - RNA, 22 nt, Human
ugcucacacagcacaaagugac

SEQ ID NO: 220350 - RNA, 22 nt, Human
ugcugaaugaggccacaacuga

SEQ ID NO: 220351 - RNA, 24 nt, Human
ugcugggauuacaggcgugagcca

SEQ ID NO: 220352 - RNA, 20 nt, Human
uggagggcaacuucucucca

SEQ ID NO: 220353 - RNA, 21 nt, Human
uggcucacaccuguaauccca

SEQ ID NO: 220354 - RNA, 22 nt, Human
uggcucacaccuguaaucccag

SEQ ID NO: 220355 - RNA, 24 nt, Human
uggcucacaccuguaaucccagca

SEQ ID NO: 220356 - RNA, 19 nt, Human
ugggauuacaggcgugagc

SEQ ID NO: 220357 - RNA, 21 nt, Human
ugggauuacaggcgugagcca

SEQ ID NO: 220358 - RNA, 22 nt, Human
ugggauuacaggcgugagccac

SEQ ID NO: 220359 - RNA, 22 nt, Human
ugggauuacaggcgugagccac

SEQ ID NO: 220360 - RNA, 24 nt, Human
ugggauuacaggcgugagccacug

SEQ ID NO: 220361 - RNA, 26 nt, Human
ugggauuacaggcgugagccacugca

SEQ ID NO: 220362 - RNA, 24 nt, Human
ugggcaacacagugagacccuguc

SEQ ID NO: 220363 - RNA, 20 nt, Human
uggggcgggaggaucacuca

SEQ ID NO: 220364 - RNA, 20 nt, Human
uggggucggggcacaggacc

SEQ ID NO: 220365 - RNA, 24 nt, Human
uggggucggggcacaggaccaugc

SEQ ID NO: 220366 - RNA, 21 nt, Human
uggucaacagagugagacccu

SEQ ID NO: 220367 - RNA, 24 nt, Human
uggugcgugccucuagucccagcu

SEQ ID NO: 220368 - RNA, 19 nt, Human
ugucugcacaugcccuccu

SEQ ID NO: 220369 - RNA, 24 nt, Human
uguggcucacaccuguaaucccag

SEQ ID NO: 220370 - RNA, 24 nt, Human
uuccagugcugggauuacaggcgu

SEQ ID NO: 220371 - RNA, 21 nt, Human
uucuaggcuaggguggacccu

SEQ ID NO: 220372 - RNA, 24 nt, Human
uucucacuccacacgcugcaccuc

SEQ ID NO: 220373 - RNA, 22 nt, Human
uugaggccaagaguucaagacc

SEQ ID NO: 220374 - RNA, 19 nt, Human
uuuagaaggaugaggaagg

SEQ ID NO: 220375 - RNA, 19 nt, Human
uuuggggggggacacaaac

SEQ ID NO: 220376 - RNA, 24 nt, Human
aaaaaaaaaacuuauuaaaucuca

SEQ ID NO: 220377 - RNA, 20 nt, Human
aaacaggauacaaacauaug

SEQ ID NO: 220378 - RNA, 22 nt, Human
aaacaggauacaaacauaugac

SEQ ID NO: 220379 - RNA, 23 nt, Human
aaacaggauacaaacauaugacu

SEQ ID NO: 220380 - RNA, 22 nt, Human
aaagauaacuauggcagccuuc

SEQ ID NO: 220381 - RNA, 23 nt, Human
aacuuucacuagaaaauuaaggg

SEQ ID NO: 220382 - RNA, 23 nt, Human
aaucucccccucuugcaacccac

SEQ ID NO: 220383 - RNA, 20 nt, Human
acaggauacaaacauaugac

SEQ ID NO: 220384 - RNA, 21 nt, Human
agaacacaaagaaaauuaagc

SEQ ID NO: 220385 - RNA, 22 nt, Human
agaugaugaaaacacauaaucc

SEQ ID NO: 220386 - RNA, 19 nt, Human
agggaaugccacuguuaca

SEQ ID NO: 220387 - RNA, 23 nt, Human
agguuuuuauuucccaguuuccu

SEQ ID NO: 220388 - RNA, 27 nt, Human
auaaaacaggauacaaacauaugacuu

SEQ ID NO: 220389 - RNA, 18 nt, Human
auagauuuccucuuggcc

SEQ ID NO: 220390 - RNA, 22 nt, Human
auagauuuccucuuggccaaaa

SEQ ID NO: 220391 - RNA, 23 nt, Human
auggaaacacuuuacuuuuaaau

SEQ ID NO: 220392 - RNA, 24 nt, Human
auuuauuuuuuaaaaauuuuuggc

SEQ ID NO: 220393 - RNA, 24 nt, Human
caaaagacacagaugaugaaaaca

SEQ ID NO: 220394 - RNA, 21 nt, Human
caaaccacuucagauacauuu

SEQ ID NO: 220395 - RNA, 25 nt, Human
caaauguaagagaaugaaggcauaa

SEQ ID NO: 220396 - RNA, 23 nt, Human
caacccacacaaauguaagagaa

SEQ ID NO: 220397 - RNA, 21 nt, Human
caagaaaagauaacuauggca

SEQ ID NO: 220398 - RNA, 22 nt, Human
cauggaaacacuuuacuuuuaa

SEQ ID NO: 220399 - RNA, 18 nt, Human
cccacacaaauguaagag

SEQ ID NO: 220400 - RNA, 20 nt, Human
cuucagauacauuuugugcc

SEQ ID NO: 220401 - RNA, 26 nt, Human
gaaaacacauaauccucaaaccacuu

SEQ ID NO: 220402 - RNA, 22 nt, Human
gagcagaacaauaaaauugaaa

SEQ ID NO: 220403 - RNA, 28 nt, Human
ggauacaaacauaugacuuauuuaaaau

SEQ ID NO: 220404 - RNA, 22 nt, Human
gucuguucaguuaucucuaacu

SEQ ID NO: 220405 - RNA, 21 nt, Human
guggaaucagaacugcuugca

SEQ ID NO: 220406 - RNA, 25 nt, Human
uaaaaacacuaaaaaaaaaaaaaaa

SEQ ID NO: 220407 - RNA, 24 nt, Human
uaaaaagaucaacuuaccaaauua

SEQ ID NO: 220408 - RNA, 23 nt, Human
uaaaaggacaaaagacacagaug

SEQ ID NO: 220409 - RNA, 23 nt, Human
uaaaaucagccuauuuauucccc

SEQ ID NO: 220410 - RNA, 25 nt, Human
uaaaguuccccagguuuuuauuucc

SEQ ID NO: 220411 - RNA, 23 nt, Human
uaaauaaccuaaaguuccccagg

SEQ ID NO: 220412 - RNA, 25 nt, Human
uaaaucacugccaguuguuuggaag

SEQ ID NO: 220413 - RNA, 22 nt, Human
uaaaucucaaauucccaagaug

SEQ ID NO: 220414 - RNA, 23 nt, Human
uaagggaaugccacuguuacaga

SEQ ID NO: 220415 - RNA, 23 nt, Human
uaauaaacaauaauauuccuuag

SEQ ID NO: 220416 - RNA, 26 nt, Human
uaauaauauaaaucuuucucauccua

SEQ ID NO: 220417 - RNA, 24 nt, Human
uacaaaaaaaauuuaucaaaauuc

SEQ ID NO: 220418 - RNA, 24 nt, Human
uacauggauggcuucauagauuuc

SEQ ID NO: 220419 - RNA, 20 nt, Human
uacuauaaaauuagaugaau

SEQ ID NO: 220420 - RNA, 22 nt, Human
uauuaaaucucaaauucccaag

SEQ ID NO: 220421 - RNA, 25 nt, Human
ucagaacacaaagaaaauuaagcca

SEQ ID NO: 220422 - RNA, 24 nt, Human
ucagcuuucccauaguuucucucu

SEQ ID NO: 220423 - RNA, 22 nt, Human
ucaguaucaucuucugauuauc

SEQ ID NO: 220424 - RNA, 19 nt, Human
ucccauaguuucucucuca

SEQ ID NO: 220425 - RNA, 21 nt, Human
ucccccauauaaggugggagc

SEQ ID NO: 220426 - RNA, 20 nt, Human
ucccccucuugcaacccaca

SEQ ID NO: 220427 - RNA, 23 nt, Human
uccucauacauggauggcuucau

SEQ ID NO: 220428 - RNA, 22 nt, Human
uccuuuucucaucaaagggcca

SEQ ID NO: 220429 - RNA, 23 nt, Human
ucuugaauaaacauacuuaguuu

SEQ ID NO: 220430 - RNA, 19 nt, Human
ugaauacauguguacaugu

SEQ ID NO: 220431 - RNA, 22 nt, Human
uuacagaagguauaauugcaga

SEQ ID NO: 220432 - RNA, 24 nt, Human
uuagaugaauaaauaauaaaccua

SEQ ID NO: 220433 - RNA, 23 nt, Human
uuagcagauuaaucccuuuuuau

SEQ ID NO: 220434 - RNA, 25 nt, Human
uuagcagauuaaucccuuuuuauau

SEQ ID NO: 220435 - RNA, 25 nt, Human
uuauaaucuuuuccuuauuuuuucu

SEQ ID NO: 220436 - RNA, 18 nt, Human
uuauuaaaucucaaauuc

SEQ ID NO: 220437 - RNA, 25 nt, Human
uucccauaguuucucucucauuugg

SEQ ID NO: 220438 - RNA, 23 nt, Human
uuuccagaauaaucucccccucu

SEQ ID NO: 220439 - RNA, 24 nt, Human
uuucuuauaucccgaacuguuguu

SEQ ID NO: 220440 - RNA, 21 nt, Human
uuuuuuuuuuuuacuaauaga

SEQ ID NO: 220441 - RNA, 22 nt, Human
uuuuuuuuuuuuuuuuuacuaa

SEQ ID NO: 220442 - RNA, 20 nt, Human
aagaagaagauggggaaaag

SEQ ID NO: 220443 - RNA, 18 nt, Human
acgcagccaucuagcccc

SEQ ID NO: 220444 - RNA, 21 nt, Human
acuuacucugcagcccuccca

SEQ ID NO: 220445 - RNA, 19 nt, Human
agaagaagauggggaaaag

SEQ ID NO: 220446 - RNA, 21 nt, Human
caaggcuccaaagaaccaaga

SEQ ID NO: 220447 - RNA, 19 nt, Human
ccaaagaaccaagagugca

SEQ ID NO: 220448 - RNA, 19 nt, Human
cuagccccguggaggaucc

SEQ ID NO: 220449 - RNA, 21 nt, Human
cuagccccguggaggauccuc

SEQ ID NO: 220450 - RNA, 21 nt, Human
cucaccuccgcucccgccccc

SEQ ID NO: 220451 - RNA, 22 nt, Human
cuuacucugcagcccucccaga

SEQ ID NO: 220452 - RNA, 19 nt, Human
gcgggcuagggaggcgagc

SEQ ID NO: 220453 - RNA, 21 nt, Human
ggcuuauagucuuccgcgucg

SEQ ID NO: 220454 - RNA, 22 nt, Human
gggcgcuggaggaagggccggc

SEQ ID NO: 220455 - RNA, 24 nt, Human
gggggcguucggucgucgcccgcu

SEQ ID NO: 220456 - RNA, 18 nt, Human
ucagggcagggaaggccg

SEQ ID NO: 220457 - RNA, 20 nt, Human
ucagggcagggaaggccgga

SEQ ID NO: 220458 - RNA, 22 nt, Human
uccaggucagggcagggaaggc

SEQ ID NO: 220459 - RNA, 25 nt, Human
ucggaacagagggaccuacuccaca

SEQ ID NO: 220460 - RNA, 18 nt, Human
ucuaagacccaggauaca

SEQ ID NO: 220461 - RNA, 29 nt, Human
ucucuaagacccaggauacaaggguggag

SEQ ID NO: 220462 - RNA, 23 nt, Human
ucugcagcccucccagagguucc

SEQ ID NO: 220463 - RNA, 24 nt, Human
ugaaagaagaagauggggaaaagg

SEQ ID NO: 220464 - RNA, 19 nt, Human
ugccacagcgagaaaaauc

SEQ ID NO: 220465 - RNA, 25 nt, Human
uggaggaagggccggcgggggcucg

SEQ ID NO: 220466 - RNA, 25 nt, Human
aacccuuuaaaaucaguuacggcaa

SEQ ID NO: 220467 - RNA, 22 nt, Human
agaaccaaagcaaaagggugua

SEQ ID NO: 220468 - RNA, 18 nt, Human
agagcaccauucuuaaaa

SEQ ID NO: 220469 - RNA, 23 nt, Human
caacgcucagaaaccgucagaag

SEQ ID NO: 220470 - RNA, 23 nt, Human
caacgcucagaaaccgucagagg

SEQ ID NO: 220471 - RNA, 25 nt, Human
gaccggccaccucccuucugacccu

SEQ ID NO: 220472 - RNA, 21 nt, Human
gccaccucccuucugacccug

SEQ ID NO: 220473 - RNA, 24 nt, Human
ggccaccucccuucugacccugcu

SEQ ID NO: 220474 - RNA, 20 nt, Human
guguagcgcgugccaaaggc

SEQ ID NO: 220475 - RNA, 23 nt, Human
uaaauaaaaagacucugacucua

SEQ ID NO: 220476 - RNA, 24 nt, Human
uagcgcgugccaaaggccaacgcu

SEQ ID NO: 220477 - RNA, 19 nt, Human
ucagaaaccgucagagguc

SEQ ID NO: 220478 - RNA, 20 nt, Human
uggccuaaauaaaaagacuc

SEQ ID NO: 220479 - RNA, 21 nt, Human
aaaguuucucuaagagcgcac

SEQ ID NO: 220480 - RNA, 18 nt, Human
aacccccucccccucccc

SEQ ID NO: 220481 - RNA, 26 nt, Human
aaccggugcgagcgaagcugagcgca

SEQ ID NO: 220482 - RNA, 21 nt, Human
aagaguucaucuguaggcuca

SEQ ID NO: 220483 - RNA, 23 nt, Human
acacuucuuuuuucucuccgucg

SEQ ID NO: 220484 - RNA, 20 nt, Human
accaaguccuucccacucgu

SEQ ID NO: 220485 - RNA, 21 nt, Human
acccccucccccuccccccuu

SEQ ID NO: 220486 - RNA, 26 nt, Human
accucccuccugccgccccuccccaa

SEQ ID NO: 220487 - RNA, 24 nt, Human
acgcacccgcuggcugucgucccc

SEQ ID NO: 220488 - RNA, 19 nt, Human
acugccgaccuggcuggcu

SEQ ID NO: 220489 - RNA, 20 nt, Human
acuugucuccgguccucccc

SEQ ID NO: 220490 - RNA, 21 nt, Human
agagagaaggugaaaagaaaa

SEQ ID NO: 220491 - RNA, 29 nt, Human
agagagaaggugaaaagaaaagggacccc

SEQ ID NO: 220492 - RNA, 22 nt, Human
agagagaaggugaaaagaaaau

SEQ ID NO: 220493 - RNA, 21 nt, Human
agauagacuaggaucuacaga

SEQ ID NO: 220494 - RNA, 19 nt, Human
agccuuugguaagcaauuc

SEQ ID NO: 220495 - RNA, 19 nt, Human
auaagacaaaggccaucuu

SEQ ID NO: 220496 - RNA, 19 nt, Human
aucagguacaucagguaca

SEQ ID NO: 220497 - RNA, 20 nt, Human
auugugacagaaugcuguua

SEQ ID NO: 220498 - RNA, 20 nt, Human
caacuuggauacccuuggcu

SEQ ID NO: 220499 - RNA, 23 nt, Human
cacucccgaaccaccagcccggg

SEQ ID NO: 220500 - RNA, 24 nt, Human
cagcagggcucuccucccggggcc

SEQ ID NO: 220501 - RNA, 19 nt, Human
caggaaaggcuugcaaaag

SEQ ID NO: 220502 - RNA, 24 nt, Human
cagugcggacccugcaguggccgg

SEQ ID NO: 220503 - RNA, 21 nt, Human
ccacucgugcacacugggggc

SEQ ID NO: 220504 - RNA, 23 nt, Human
cccaaacaaacaaacaagaaaua

SEQ ID NO: 220505 - RNA, 19 nt, Human
cccagagcagcggcucucc

SEQ ID NO: 220506 - RNA, 20 nt, Human
ccccggagccuuugacaggg

SEQ ID NO: 220507 - RNA, 18 nt, Human
ccccuuccuccagccucc

SEQ ID NO: 220508 - RNA, 19 nt, Human
cccgaaccaccagcccggg

SEQ ID NO: 220509 - RNA, 25 nt, Human
cccgcaggcggccgcucccuggcuc

SEQ ID NO: 220510 - RNA, 19 nt, Human
cccuccugccgccccuccc

SEQ ID NO: 220511 - RNA, 22 nt, Human
ccgccgcugucaacagcgccug

SEQ ID NO: 220512 - RNA, 23 nt, Human
ccucccgcacucuuacuugucga

SEQ ID NO: 220513 - RNA, 23 nt, Human
ccuccugccgccccuccccaacc

SEQ ID NO: 220514 - RNA, 20 nt, Human
ccucgcugcuucagccacac

SEQ ID NO: 220515 - RNA, 21 nt, Human
ccucggaguccgcaggcgaac

SEQ ID NO: 220516 - RNA, 23 nt, Human
cgccaagggagggcgcgaccaag

SEQ ID NO: 220517 - RNA, 19 nt, Human
cgccucgcugcuucagccg

SEQ ID NO: 220518 - RNA, 18 nt, Human
cgcgaccaaguccuuccc

SEQ ID NO: 220519 - RNA, 18 nt, Human
cgcucgcccaaguucaac

SEQ ID NO: 220520 - RNA, 19 nt, Human
cggcagccgcggcucgcgc

SEQ ID NO: 220521 - RNA, 20 nt, Human
cgugcacacugggggcgccg

SEQ ID NO: 220522 - RNA, 20 nt, Human
cucacaaaccucccuccugc

SEQ ID NO: 220523 - RNA, 22 nt, Human
cucacuucccagagcagcggcu

SEQ ID NO: 220524 - RNA, 21 nt, Human
cucagagugcuccaaaucucc

SEQ ID NO: 220525 - RNA, 24 nt, Human
cucccgaaccaccagcccgggagc

SEQ ID NO: 220526 - RNA, 23 nt, Human
cucccggggccggcuggagacaa

SEQ ID NO: 220527 - RNA, 25 nt, Human
cucccuggcuccacgccaagggagg

SEQ ID NO: 220528 - RNA, 23 nt, Human
cugccgccccuccccaacccucc

SEQ ID NO: 220529 - RNA, 18 nt, Human
cugcgcccuccucaccag

SEQ ID NO: 220530 - RNA, 19 nt, Human
cugcgcccuccucaccagc

SEQ ID NO: 220531 - RNA, 21 nt, Human
cuggcugugucugucugucug

SEQ ID NO: 220532 - RNA, 19 nt, Human
cuggucuuuaccgccgugg

SEQ ID NO: 220533 - RNA, 22 nt, Human
cuuguccccuccuccgcugcua

SEQ ID NO: 220534 - RNA, 24 nt, Human
cuuguccccuccuccgcugcuagg

SEQ ID NO: 220535 - RNA, 23 nt, Human
gaaaagucgcggucacucacuga

SEQ ID NO: 220536 - RNA, 20 nt, Human
gacuuguccccuccuccgcu

SEQ ID NO: 220537 - RNA, 20 nt, Human
gaugcagaaaagagguuagg

SEQ ID NO: 220538 - RNA, 21 nt, Human
gccgccccuccccaacccucc

SEQ ID NO: 220539 - RNA, 23 nt, Human
gcgcccuccucaccagcucgcuc

SEQ ID NO: 220540 - RNA, 21 nt, Human
gcucuccgccgccuucugguc

SEQ ID NO: 220541 - RNA, 20 nt, Human
gcuuuccgccgcugucaacu

SEQ ID NO: 220542 - RNA, 20 nt, Human
ggaaaguucuuugcugcugc

SEQ ID NO: 220543 - RNA, 20 nt, Human
ggacacuucuuuuuucucuc

SEQ ID NO: 220544 - RNA, 22 nt, Human
ggcgccgucagaccgaacccag

SEQ ID NO: 220545 - RNA, 21 nt, Human
ggcuggagacaaggcucucug

SEQ ID NO: 220546 - RNA, 21 nt, Human
gucagaccgaacccaguccaa

SEQ ID NO: 220547 - RNA, 24 nt, Human
guuaacgaaagcaggccagaaaga

SEQ ID NO: 220548 - RNA, 21 nt, Human
uaacccccucccccucccccc

SEQ ID NO: 220549 - RNA, 22 nt, Human
uaacuuacaaaggcaugaagcu

SEQ ID NO: 220550 - RNA, 22 nt, Human
uagcaucagguacaucagguac

SEQ ID NO: 220551 - RNA, 20 nt, Human
uauauauauguacauacaca

SEQ ID NO: 220552 - RNA, 23 nt, Human
uaucuaggaauugucaaagagaa

SEQ ID NO: 220553 - RNA, 24 nt, Human
uccacugcaaccccccuuccucca

SEQ ID NO: 220554 - RNA, 18 nt, Human
uccccaacccuccccccg

SEQ ID NO: 220555 - RNA, 19 nt, Human
uccccaacccuccccccgc

SEQ ID NO: 220556 - RNA, 22 nt, Human
ucccgaaccaccagcccgggag

SEQ ID NO: 220557 - RNA, 24 nt, Human
ucccuccugccgccccuccccaac

SEQ ID NO: 220558 - RNA, 27 nt, Human
ucccuccugccgccccuccccaacccu

SEQ ID NO: 220559 - RNA, 24 nt, Human
uccgacgacuuguccccuccuccg

SEQ ID NO: 220560 - RNA, 24 nt, Human
uccuccgcugcuagggggaggggg

SEQ ID NO: 220561 - RNA, 23 nt, Human
uccugccgccccuccccaacccu

SEQ ID NO: 220562 - RNA, 23 nt, Human
ucgcugcuucagccacacucagu

SEQ ID NO: 220563 - RNA, 23 nt, Human
ucguugccccucagcccccgacg

SEQ ID NO: 220564 - RNA, 19 nt, Human
ucucaagucugucucucug

SEQ ID NO: 220565 - RNA, 21 nt, Human
ucuccgguccuccccgccggg

SEQ ID NO: 220566 - RNA, 21 nt, Human
ucuuucaacuccaccuagaua

SEQ ID NO: 220567 - RNA, 22 nt, Human
ugacuucucagugggcuguccc

SEQ ID NO: 220568 - RNA, 25 nt, Human
ugcaaccccccuuccuccagccucc

SEQ ID NO: 220569 - RNA, 23 nt, Human
ugccccucagcccccgacggucu

SEQ ID NO: 220570 - RNA, 19 nt, Human
ugccgccccuccccaaccc

SEQ ID NO: 220571 - RNA, 21 nt, Human
ugcugcugcagccgcucgccg

SEQ ID NO: 220572 - RNA, 21 nt, Human
ugcuucagccacacucagugc

SEQ ID NO: 220573 - RNA, 21 nt, Human
uggaauuuucagaaacaaaac

SEQ ID NO: 220574 - RNA, 19 nt, Human
uggagacaaggcucucugg

SEQ ID NO: 220575 - RNA, 21 nt, Human
uggcuggcuggcugugucugu

SEQ ID NO: 220576 - RNA, 19 nt, Human
uggcuggcugugucugucu

SEQ ID NO: 220577 - RNA, 19 nt, Human
uggcugugucugucugucu

SEQ ID NO: 220578 - RNA, 23 nt, Human
uggcuuuaguucucggacacuuc

SEQ ID NO: 220579 - RNA, 22 nt, Human
uguccccuccuccgcugcuagg

SEQ ID NO: 220580 - RNA, 22 nt, Human
uuagagagaaggugaaaagaaa

SEQ ID NO: 220581 - RNA, 21 nt, Human
uuccuccagccuccugaaaca

SEQ ID NO: 220582 - RNA, 28 nt, Human
uucuuugcugcugcagccgcucgccgac

SEQ ID NO: 220583 - RNA, 23 nt, Human
uugaauacauuuauugugacaga

SEQ ID NO: 220584 - RNA, 22 nt, Human
uuguaacccccucccccucccc

SEQ ID NO: 220585 - RNA, 21 nt, Human
uuucggggccgcaacagggcu

SEQ ID NO: 220586 - RNA, 24 nt, Human
aaaaagaacaaacacacacaaaca

SEQ ID NO: 220587 - RNA, 20 nt, Human
aaaagaacaaacacacacaa

SEQ ID NO: 220588 - RNA, 27 nt, Human
aaaagaacaaacacacacaaacacaaa

SEQ ID NO: 220589 - RNA, 21 nt, Human
aaacacacacaaacacaaaca

SEQ ID NO: 220590 - RNA, 21 nt, Human
aaauagauucaauaaaaagaa

SEQ ID NO: 220591 - RNA, 22 nt, Human
acacaaacacgucuuaaaauaa

SEQ ID NO: 220592 - RNA, 18 nt, Human
agagaggggagggcaggg

SEQ ID NO: 220593 - RNA, 24 nt, Human
agcagaaaaaaaacauacaaaaaa

SEQ ID NO: 220594 - RNA, 21 nt, Human
aggggagggcagggggcgggg

SEQ ID NO: 220595 - RNA, 25 nt, Human
auacaaaaaaaaguggaaggggggg

SEQ ID NO: 220596 - RNA, 19 nt, Human
cacacacaaacacaaacac

SEQ ID NO: 220597 - RNA, 19 nt, Human
cagcagaaaaaaaacauac

SEQ ID NO: 220598 - RNA, 22 nt, Human
cagcagaaaaaaaacauacaaa

SEQ ID NO: 220599 - RNA, 23 nt, Human
cagcagaaaaaaaacauacaaaa

SEQ ID NO: 220600 - RNA, 24 nt, Human
cagggugggugcccaccgccugcu

SEQ ID NO: 220601 - RNA, 27 nt, Human
cauacaaaaaaaaguggaagggggggc

SEQ ID NO: 220602 - RNA, 23 nt, Human
cccagcucccagcucccugcugg

SEQ ID NO: 220603 - RNA, 23 nt, Human
ccccagugggaggcgugugccca

SEQ ID NO: 220604 - RNA, 24 nt, Human
cccuaggucccagggugggugccc

SEQ ID NO: 220605 - RNA, 19 nt, Human
ccugcucccuggaccccag

SEQ ID NO: 220606 - RNA, 22 nt, Human
cgagguggaaggacugggcgca

SEQ ID NO: 220607 - RNA, 23 nt, Human
cgcaaaagcccugucaggcuucc

SEQ ID NO: 220608 - RNA, 21 nt, Human
cuaagugcguguuucuuuucc

SEQ ID NO: 220609 - RNA, 19 nt, Human
gaagggggggcuuguaaac

SEQ ID NO: 220610 - RNA, 24 nt, Human
gccgcgaucgcccccucuuccccu

SEQ ID NO: 220611 - RNA, 23 nt, Human
ggaaggacugggcgcaggguagg

SEQ ID NO: 220612 - RNA, 23 nt, Human
ggagggcagggggcggggguccc

SEQ ID NO: 220613 - RNA, 20 nt, Human
gggagggcagggggcggggg

SEQ ID NO: 220614 - RNA, 19 nt, Human
gggagggucccugcggggc

SEQ ID NO: 220615 - RNA, 23 nt, Human
gggcagggggcggggguccccuu

SEQ ID NO: 220616 - RNA, 21 nt, Human
gggccggaguccagugugguu

SEQ ID NO: 220617 - RNA, 18 nt, Human
gggcuggcgcgggcgggu

SEQ ID NO: 220618 - RNA, 18 nt, Human
ggggagggcagggggcgg

SEQ ID NO: 220619 - RNA, 20 nt, Human
gggggcggggguccccuucc

SEQ ID NO: 220620 - RNA, 24 nt, Human
ggggggccggaguccagugugguu

SEQ ID NO: 220621 - RNA, 24 nt, Human
guucucgggggcuggcgcgggcgg

SEQ ID NO: 220622 - RNA, 20 nt, Human
guuuccagcagaaaaaaaac

SEQ ID NO: 220623 - RNA, 21 nt, Human
ucaauaaaaagaacaaacaca

SEQ ID NO: 220624 - RNA, 19 nt, Human
uccacaguacggugcagag

SEQ ID NO: 220625 - RNA, 22 nt, Human
uccacaguacggugcagagagg

SEQ ID NO: 220626 - RNA, 23 nt, Human
uccacaguacggugcagagaggg

SEQ ID NO: 220627 - RNA, 25 nt, Human
uccagcagaaaaaaaacauacaaaa

SEQ ID NO: 220628 - RNA, 24 nt, Human
ucccagggugggugcccaccgccu

SEQ ID NO: 220629 - RNA, 19 nt, Human
ucccgagcccccgucgccc

SEQ ID NO: 220630 - RNA, 18 nt, Human
ucccugcggggccgcucc

SEQ ID NO: 220631 - RNA, 19 nt, Human
ucgcugcagcgagcggcga

SEQ ID NO: 220632 - RNA, 22 nt, Human
ugccuggucgcgcguucucggg

SEQ ID NO: 220633 - RNA, 25 nt, Human
ugccuggucgcgcguucucgggggc

SEQ ID NO: 220634 - RNA, 20 nt, Human
uucccccagcucccagcucc

SEQ ID NO: 220635 - RNA, 24 nt, Human
uucucgggggcuggcgcgggcggg

SEQ ID NO: 220636 - RNA, 19 nt, Human
aaaaaaggggaggggggga

SEQ ID NO: 220637 - RNA, 19 nt, Human
aaaacaaaacaaaacagaa

SEQ ID NO: 220638 - RNA, 24 nt, Human
aaaacaaaacaaaacagaacaaaa

SEQ ID NO: 220639 - RNA, 18 nt, Human
aaaacagaacaaaaaaag

SEQ ID NO: 220640 - RNA, 20 nt, Human
aaaaccaacacaagaaaaca

SEQ ID NO: 220641 - RNA, 21 nt, Human
aaacaaaacaaaacagaacaa

SEQ ID NO: 220642 - RNA, 22 nt, Human
aaacaaaacaaaacagaacaaa

SEQ ID NO: 220643 - RNA, 26 nt, Human
aaacaaaacagaacaaaaaaagggga

SEQ ID NO: 220644 - RNA, 22 nt, Human
aaagaaaaaaaaaaaguaaaag

SEQ ID NO: 220645 - RNA, 21 nt, Human
aacaaaaaaaggggagggggg

SEQ ID NO: 220646 - RNA, 23 nt, Human
aacagaacaaaaaaaggggaggg

SEQ ID NO: 220647 - RNA, 19 nt, Human
aaccaaggauuacaaacag

SEQ ID NO: 220648 - RNA, 26 nt, Human
aagaaaacacacacacacacaaccaa

SEQ ID NO: 220649 - RNA, 19 nt, Human
aaggggagggggggacggu

SEQ ID NO: 220650 - RNA, 22 nt, Human
acaaaacaaaacagaacaaaaa

SEQ ID NO: 220651 - RNA, 21 nt, Human
acacaaccaacguuuguuccc

SEQ ID NO: 220652 - RNA, 23 nt, Human
accaacacaagaaaacacacaca

SEQ ID NO: 220653 - RNA, 27 nt, Human
agaaaaaaaaaaaguaaaaguaaagga

SEQ ID NO: 220654 - RNA, 20 nt, Human
agaacaaaaaaaggggaggg

SEQ ID NO: 220655 - RNA, 21 nt, Human
aggggguccagcuugucgagu

SEQ ID NO: 220656 - RNA, 23 nt, Human
auuuuuuuuucuucuucccauuu

SEQ ID NO: 220657 - RNA, 26 nt, Human
caagaaaacacacacacacacaacca

SEQ ID NO: 220658 - RNA, 28 nt, Human
caagaaaacacacacacacacaaccaac

SEQ ID NO: 220659 - RNA, 22 nt, Human
cacgacacccccccgcgagccc

SEQ ID NO: 220660 - RNA, 18 nt, Human
cacucuguucuucucucu

SEQ ID NO: 220661 - RNA, 24 nt, Human
cagaaaaccgggcgaaccaaggaa

SEQ ID NO: 220662 - RNA, 18 nt, Human
ccaacacaagaaaacaca

SEQ ID NO: 220663 - RNA, 24 nt, Human
ccaacacaagaaaacacacacaca

SEQ ID NO: 220664 - RNA, 18 nt, Human
ccacuggcggcggcuccu

SEQ ID NO: 220665 - RNA, 21 nt, Human
cccccguccgcucggcccugc

SEQ ID NO: 220666 - RNA, 23 nt, Human
cccccuugcggcgcgguguacaa

SEQ ID NO: 220667 - RNA, 21 nt, Human
cccgccccggccgcggccgca

SEQ ID NO: 220668 - RNA, 21 nt, Human
cccggcccuccacuggcggcg

SEQ ID NO: 220669 - RNA, 19 nt, Human
cccggggggcccgcgcccc

SEQ ID NO: 220670 - RNA, 28 nt, Human
ccgcgccggcccgggggggaguggccgc

SEQ ID NO: 220671 - RNA, 21 nt, Human
ccgggagcaggggguccagcu

SEQ ID NO: 220672 - RNA, 24 nt, Human
cgcccacgacacccccccgcgagc

SEQ ID NO: 220673 - RNA, 18 nt, Human
cgccccggccgcggccgc

SEQ ID NO: 220674 - RNA, 19 nt, Human
cgccccggccgcggccgca

SEQ ID NO: 220675 - RNA, 20 nt, Human
cgcggccgcagcgcccggcc

SEQ ID NO: 220676 - RNA, 24 nt, Human
cggagaauuuuuuuuucuucuucc

SEQ ID NO: 220677 - RNA, 22 nt, Human
cggcggcuccugcgccgcgcca

SEQ ID NO: 220678 - RNA, 28 nt, Human
cguagcaaaacaaaacaaaacagaacaa

SEQ ID NO: 220679 - RNA, 19 nt, Human
cuccacuggcggcggcucc

SEQ ID NO: 220680 - RNA, 24 nt, Human
cuccacuggcggcggcuccugcgc

SEQ ID NO: 220681 - RNA, 18 nt, Human
cuccgccucccccgccgc

SEQ ID NO: 220682 - RNA, 23 nt, Human
cucggcccugcgcccgccccggc

SEQ ID NO: 220683 - RNA, 19 nt, Human
cucucugaguuccugggca

SEQ ID NO: 220684 - RNA, 20 nt, Human
cucuguucuucucucuucca

SEQ ID NO: 220685 - RNA, 22 nt, Human
gcagcgcgagggcggggggguc

SEQ ID NO: 220686 - RNA, 25 nt, Human
gccgcacccucuccaaguccggggc

SEQ ID NO: 220687 - RNA, 18 nt, Human
gcgcgguguacaaagggg

SEQ ID NO: 220688 - RNA, 20 nt, Human
gcucgcccccgggagcaggg

SEQ ID NO: 220689 - RNA, 22 nt, Human
gggagggggggacggucgaaag

SEQ ID NO: 220690 - RNA, 21 nt, Human
gggcacacucggggagggggg

SEQ ID NO: 220691 - RNA, 18 nt, Human
ggggagggggggguggag

SEQ ID NO: 220692 - RNA, 20 nt, Human
ggggagggggggguggaggg

SEQ ID NO: 220693 - RNA, 23 nt, Human
gggggaguggccgcggccucccg

SEQ ID NO: 220694 - RNA, 20 nt, Human
ggggguggagggccgcaccc

SEQ ID NO: 220695 - RNA, 18 nt, Human
gggguccagcuugucgag

SEQ ID NO: 220696 - RNA, 21 nt, Human
guccagcuugucgaguccggg

SEQ ID NO: 220697 - RNA, 20 nt, Human
uaaaggaaaggcaggguuug

SEQ ID NO: 220698 - RNA, 21 nt, Human
uagcaaaacaaaacaaaacag

SEQ ID NO: 220699 - RNA, 22 nt, Human
uagcaaaacaaaacaaaacaga

SEQ ID NO: 220700 - RNA, 24 nt, Human
uagggcagaaucgaacacucuguu

SEQ ID NO: 220701 - RNA, 24 nt, Human
uccaaagaaaaaaaaaaaguaaaa

SEQ ID NO: 220702 - RNA, 20 nt, Human
uccagcuugucgaguccggg

SEQ ID NO: 220703 - RNA, 25 nt, Human
ucucucuuccaaagaaaaaaaaaaa

SEQ ID NO: 220704 - RNA, 18 nt, Human
ucuguucuucucucuucc

SEQ ID NO: 220705 - RNA, 19 nt, Human
ugcaacacggggcggccgc

SEQ ID NO: 220706 - RNA, 20 nt, Human
ugcaacacggggcggccgcg

SEQ ID NO: 220707 - RNA, 23 nt, Human
ugggcacacucggggaggggggg

SEQ ID NO: 220708 - RNA, 23 nt, Human
ugggcacacucggggaggggggg

SEQ ID NO: 220709 - RNA, 26 nt, Human
ugggcacacucggggaggggggggug

SEQ ID NO: 220710 - RNA, 25 nt, Human
uugacgugcgcccccucggagcccc

SEQ ID NO: 220711 - RNA, 24 nt, Human
aaaaaaaccaauaaccaaaaacau

SEQ ID NO: 220712 - RNA, 21 nt, Human
aaaaaaccaauaaccaaaaac

SEQ ID NO: 220713 - RNA, 24 nt, Human
aaacagaauggguacuugagucug

SEQ ID NO: 220714 - RNA, 26 nt, Human
aaacaggaaggggaagagaagggacc

SEQ ID NO: 220715 - RNA, 20 nt, Human
aaagacacaagaagaaggca

SEQ ID NO: 220716 - RNA, 21 nt, Human
aaagcccuuccgggcccaggc

SEQ ID NO: 220717 - RNA, 25 nt, Human
aaaucagacccagagaaggaaccaa

SEQ ID NO: 220718 - RNA, 18 nt, Human
aaccaaaaacauaaagcg

SEQ ID NO: 220719 - RNA, 18 nt, Human
aaccaaaaacauaaagcg

SEQ ID NO: 220720 - RNA, 22 nt, Human
aaccaaagcccuuccgggccca

SEQ ID NO: 220721 - RNA, 27 nt, Human
aaccugggcccuggaggcccugggggc

SEQ ID NO: 220722 - RNA, 20 nt, Human
aagaaggcaggccagggcac

SEQ ID NO: 220723 - RNA, 27 nt, Human
aagcaggagcagaacacuaucccaaga

SEQ ID NO: 220724 - RNA, 18 nt, Human
aagcucagcagcaaagga

SEQ ID NO: 220725 - RNA, 22 nt, Human
aagcuggcaucuucuggagcag

SEQ ID NO: 220726 - RNA, 21 nt, Human
aaggagguucuagagaggagg

SEQ ID NO: 220727 - RNA, 19 nt, Human
accugggcccuggaggccc

SEQ ID NO: 220728 - RNA, 18 nt, Human
acuugagucugaagcuuu

SEQ ID NO: 220729 - RNA, 24 nt, Human
agaacacuaucccaagaaagaccc

SEQ ID NO: 220730 - RNA, 21 nt, Human
agaagaaggcaggccagggca

SEQ ID NO: 220731 - RNA, 21 nt, Human
agaaggagguucuagagagga

SEQ ID NO: 220732 - RNA, 26 nt, Human
agagccucucagaugaggaaccgcac

SEQ ID NO: 220733 - RNA, 24 nt, Human
agaggaggaaaagccugcaaagag

SEQ ID NO: 220734 - RNA, 22 nt, Human
agcaaaggauccccccaaaaaa

SEQ ID NO: 220735 - RNA, 20 nt, Human
agccaacuaagcacccugga

SEQ ID NO: 220736 - RNA, 19 nt, Human
agcgauaauaauaaaacac

SEQ ID NO: 220737 - RNA, 20 nt, Human
aggaaaagccugcaaagagg

SEQ ID NO: 220738 - RNA, 23 nt, Human
aggcagcuggagacagggaggcu

SEQ ID NO: 220739 - RNA, 18 nt, Human
agggcagcugugugggug

SEQ ID NO: 220740 - RNA, 20 nt, Human
agggcagcuguguggguggg

SEQ ID NO: 220741 - RNA, 21 nt, Human
aguggccagggccacaggggc

SEQ ID NO: 220742 - RNA, 23 nt, Human
caaaaaaaccaauaaccaaaaac

SEQ ID NO: 220743 - RNA, 24 nt, Human
caaaaaaaccaauaaccaaaaaca

SEQ ID NO: 220744 - RNA, 27 nt, Human
caaaaaaaccaauaaccaaaaacauaa

SEQ ID NO: 220745 - RNA, 20 nt, Human
caacagaaggagguucuaga

SEQ ID NO: 220746 - RNA, 21 nt, Human
caagaaagacccuacggagga

SEQ ID NO: 220747 - RNA, 22 nt, Human
caagaaagacccuacggaggac

SEQ ID NO: 220748 - RNA, 19 nt, Human
cacaagaagaaggcaggcc

SEQ ID NO: 220749 - RNA, 18 nt, Human
caccacacaccagagggg

SEQ ID NO: 220750 - RNA, 23 nt, Human
caccacacaccagaggggucagc

SEQ ID NO: 220751 - RNA, 19 nt, Human
caccccggcuuccccagcu

SEQ ID NO: 220752 - RNA, 18 nt, Human
caccugcccaccaccccc

SEQ ID NO: 220753 - RNA, 24 nt, Human
cacuccauaucuccuccccaucuc

SEQ ID NO: 220754 - RNA, 23 nt, Human
cagacccagagaaggaaccaaag

SEQ ID NO: 220755 - RNA, 22 nt, Human
cagcagcaaaggauccccccaa

SEQ ID NO: 220756 - RNA, 23 nt, Human
cagcagcaaaggauccccccaaa

SEQ ID NO: 220757 - RNA, 20 nt, Human
caggaauaggccuccccauc

SEQ ID NO: 220758 - RNA, 21 nt, Human
ccaaagcccuuccgggcccag

SEQ ID NO: 220759 - RNA, 18 nt, Human
ccaccaaagacacaagaa

SEQ ID NO: 220760 - RNA, 23 nt, Human
ccacuccgugucaccugcccacc

SEQ ID NO: 220761 - RNA, 22 nt, Human
ccagaagcucaagccacuccgu

SEQ ID NO: 220762 - RNA, 18 nt, Human
cccaagaaagacccuacg

SEQ ID NO: 220763 - RNA, 24 nt, Human
cccagccccccacaccaugugcgg

SEQ ID NO: 220764 - RNA, 22 nt, Human
cccaugcccaggacagaaaagc

SEQ ID NO: 220765 - RNA, 24 nt, Human
ccccaaaaaaggagcgcagguuuc

SEQ ID NO: 220766 - RNA, 22 nt, Human
ccccaccaaagacacaagaaga

SEQ ID NO: 220767 - RNA, 22 nt, Human
ccccagaagcucaagccacucc

SEQ ID NO: 220768 - RNA, 20 nt, Human
cccccagccccccacaccau

SEQ ID NO: 220769 - RNA, 22 nt, Human
ccccuggacggucccugaacuu

SEQ ID NO: 220770 - RNA, 18 nt, Human
cccuggaggcccuggggg

SEQ ID NO: 220771 - RNA, 19 nt, Human
cccuggaggcccugggggc

SEQ ID NO: 220772 - RNA, 19 nt, Human
cccugggggcuuagggcag

SEQ ID NO: 220773 - RNA, 20 nt, Human
ccgugucaccugcccaccac

SEQ ID NO: 220774 - RNA, 25 nt, Human
ccugcaaagagggggccgucacugg

SEQ ID NO: 220775 - RNA, 21 nt, Human
ccugcccaccacccccagaag

SEQ ID NO: 220776 - RNA, 19 nt, Human
ccuggaggcccugggggcu

SEQ ID NO: 220777 - RNA, 23 nt, Human
ccugggcccuggaggcccugggg

SEQ ID NO: 220778 - RNA, 18 nt, Human
ccuguuaggggagcgggg

SEQ ID NO: 220779 - RNA, 26 nt, Human
cuaagcacccuggagagagaagcugg

SEQ ID NO: 220780 - RNA, 22 nt, Human
cucacuccauaucuccucccca

SEQ ID NO: 220781 - RNA, 24 nt, Human
cucagcagcaaaggauccccccaa

SEQ ID NO: 220782 - RNA, 24 nt, Human
cuccgugucaccugcccaccaccc

SEQ ID NO: 220783 - RNA, 21 nt, Human
cucggggucagcuagggcagc

SEQ ID NO: 220784 - RNA, 22 nt, Human
cucggggucagcuagggcagcu

SEQ ID NO: 220785 - RNA, 20 nt, Human
cucugcuuggaccuccccca

SEQ ID NO: 220786 - RNA, 20 nt, Human
cuggagacagggaggcugga

SEQ ID NO: 220787 - RNA, 21 nt, Human
cuguccccggagcucccuggg

SEQ ID NO: 220788 - RNA, 18 nt, Human
gacccagagaaggaacca

SEQ ID NO: 220789 - RNA, 19 nt, Human
gagcaggugacucacucca

SEQ ID NO: 220790 - RNA, 22 nt, Human
gagcucggcgcggucgggcggc

SEQ ID NO: 220791 - RNA, 23 nt, Human
gaggaccucuggaggcgcagggu

SEQ ID NO: 220792 - RNA, 24 nt, Human
gaggcccugggggcuuagggcagu

SEQ ID NO: 220793 - RNA, 20 nt, Human
gcaaaggauccccccaaaaa

SEQ ID NO: 220794 - RNA, 19 nt, Human
gccacaggggcggggaggg

SEQ ID NO: 220795 - RNA, 20 nt, Human
gcccugggggcuuagggcag

SEQ ID NO: 220796 - RNA, 21 nt, Human
gccuccaacagaaggagguuc

SEQ ID NO: 220797 - RNA, 23 nt, Human
gccuccccauccccaccaaagac

SEQ ID NO: 220798 - RNA, 26 nt, Human
gcucccuggggagugaggggugggca

SEQ ID NO: 220799 - RNA, 18 nt, Human
ggaaccaaagcccuuccg

SEQ ID NO: 220800 - RNA, 22 nt, Human
ggacggucccugaacuuuucaa

SEQ ID NO: 220801 - RNA, 21 nt, Human
ggagcgcagguuucagcgggg

SEQ ID NO: 220802 - RNA, 20 nt, Human
ggaggaaaagccugcaaaga

SEQ ID NO: 220803 - RNA, 21 nt, Human
ggaggcccugggggcuuaggg

SEQ ID NO: 220804 - RNA, 23 nt, Human
ggcuuagggcaguuggucggugg

SEQ ID NO: 220805 - RNA, 19 nt, Human
gggagcggggacagacagg

SEQ ID NO: 220806 - RNA, 22 nt, Human
gggcaaagccaacuaagcaccc

SEQ ID NO: 220807 - RNA, 21 nt, Human
gggcagcugugugggugggac

SEQ ID NO: 220808 - RNA, 23 nt, Human
uaaccaaaaacauaaagcgauaa

SEQ ID NO: 220809 - RNA, 24 nt, Human
uaaccaaaaacauaaagcgauaau

SEQ ID NO: 220810 - RNA, 26 nt, Human
uaaccaaaaacauaaagcgauaauaa

SEQ ID NO: 220811 - RNA, 24 nt, Human
uacaaaaaaaccaauaaccaaaaa

SEQ ID NO: 220812 - RNA, 20 nt, Human
uacaaaaaaaccaauaaccu

SEQ ID NO: 220813 - RNA, 19 nt, Human
uagagaggaggaaaagccu

SEQ ID NO: 220814 - RNA, 21 nt, Human
ucacuccauaucuccucccca

SEQ ID NO: 220815 - RNA, 24 nt, Human
ucagacccagagaaggaaccaaag

SEQ ID NO: 220816 - RNA, 24 nt, Human
ucagcagcaaaggauccccccaaa

SEQ ID NO: 220817 - RNA, 20 nt, Human
ucaggcccuggacccaugcc

SEQ ID NO: 220818 - RNA, 19 nt, Human
uccauaucuccuccccauc

SEQ ID NO: 220819 - RNA, 19 nt, Human
ucccaagaaagacccuacg

SEQ ID NO: 220820 - RNA, 23 nt, Human
uccccaccaaagacacaagaaga

SEQ ID NO: 220821 - RNA, 21 nt, Human
uccccccaaaaaaggagcgca

SEQ ID NO: 220822 - RNA, 19 nt, Human
uccccggagcucccugggg

SEQ ID NO: 220823 - RNA, 22 nt, Human
uccccggagcucccuggggagu

SEQ ID NO: 220824 - RNA, 22 nt, Human
ucccugaacuuuucaagagaag

SEQ ID NO: 220825 - RNA, 24 nt, Human
ucccugaacuuuucaagagaaguu

SEQ ID NO: 220826 - RNA, 18 nt, Human
ucgguggaguucagugag

SEQ ID NO: 220827 - RNA, 26 nt, Human
ucugcuuggaccucccccagcccccc

SEQ ID NO: 220828 - RNA, 23 nt, Human
ucuugccccaucgccugcacgga

SEQ ID NO: 220829 - RNA, 21 nt, Human
ugacucacuccauaucuccuc

SEQ ID NO: 220830 - RNA, 20 nt, Human
ugagaaaaucagacccagag

SEQ ID NO: 220831 - RNA, 21 nt, Human
ugagaaaaucagacccagaga

SEQ ID NO: 220832 - RNA, 19 nt, Human
ugcgggaaauggggggguc

SEQ ID NO: 220833 - RNA, 24 nt, Human
ugcgggaaaugggggggucugaaa

SEQ ID NO: 220834 - RNA, 21 nt, Human
ugcuuggggaagcucagcagc

SEQ ID NO: 220835 - RNA, 21 nt, Human
uggacccaugcccaggacaga

SEQ ID NO: 220836 - RNA, 18 nt, Human
uggaccucccccagcccc

SEQ ID NO: 220837 - RNA, 19 nt, Human
uggaccucccccagccccc

SEQ ID NO: 220838 - RNA, 22 nt, Human
uggaccucccccagccccccac

SEQ ID NO: 220839 - RNA, 21 nt, Human
uggagacagggaggcuggagg

SEQ ID NO: 220840 - RNA, 24 nt, Human
uggagagagaagcuggcaucuucu

SEQ ID NO: 220841 - RNA, 23 nt, Human
uggaggcccugggggcuuagggc

SEQ ID NO: 220842 - RNA, 22 nt, Human
uggaggcgcagggugcagcagg

SEQ ID NO: 220843 - RNA, 20 nt, Human
uggagguuuggaggggcguu

SEQ ID NO: 220844 - RNA, 18 nt, Human
uggggagugagggguggg

SEQ ID NO: 220845 - RNA, 19 nt, Human
ugucaccugcccaccaccc

SEQ ID NO: 220846 - RNA, 20 nt, Human
ugucaggcccuggacccaug

SEQ ID NO: 220847 - RNA, 18 nt, Human
uuacaccccggcuucccc

SEQ ID NO: 220848 - RNA, 19 nt, Human
uuauuuuuauuuucuuugc

SEQ ID NO: 220849 - RNA, 24 nt, Human
aaagugcugggauuacaggcguga

SEQ ID NO: 220850 - RNA, 19 nt, Human
aaguagcugggacuacagg

SEQ ID NO: 220851 - RNA, 20 nt, Human
aaguagcugggacuacaggu

SEQ ID NO: 220852 - RNA, 19 nt, Human
aagugcugggauuacaggc

SEQ ID NO: 220853 - RNA, 19 nt, Human
aagugcugggauuacaggc

SEQ ID NO: 220854 - RNA, 23 nt, Human
aagugggaggcaggccuggagga

SEQ ID NO: 220855 - RNA, 21 nt, Human
acagaacagccagggcucaag

SEQ ID NO: 220856 - RNA, 25 nt, Human
acccgccucggccucccaaagugcu

SEQ ID NO: 220857 - RNA, 18 nt, Human
acgggguuucaccauguu

SEQ ID NO: 220858 - RNA, 19 nt, Human
acgggguuucaccauguua

SEQ ID NO: 220859 - RNA, 20 nt, Human
acgggguuucaccauguuag

SEQ ID NO: 220860 - RNA, 24 nt, Human
acgggguuucaccauguuagccag

SEQ ID NO: 220861 - RNA, 21 nt, Human
agaccccugggagcccugagg

SEQ ID NO: 220862 - RNA, 24 nt, Human
agccagggagaccccugggagccc

SEQ ID NO: 220863 - RNA, 18 nt, Human
agcccaccugcgccaggg

SEQ ID NO: 220864 - RNA, 21 nt, Human
agcccaccugcgccagggacg

SEQ ID NO: 220865 - RNA, 21 nt, Human
aggcaggccuggaggagggag

SEQ ID NO: 220866 - RNA, 23 nt, Human
aggccccagaaagcccccuacuu

SEQ ID NO: 220867 - RNA, 25 nt, Human
aggcuggagugcaguagcacgaucu

SEQ ID NO: 220868 - RNA, 18 nt, Human
agggagaccccugggagc

SEQ ID NO: 220869 - RNA, 22 nt, Human
agggagauggggauagcagcug

SEQ ID NO: 220870 - RNA, 19 nt, Human
agggcagguagaaguccag

SEQ ID NO: 220871 - RNA, 22 nt, Human
agggcccacuucugccugugcc

SEQ ID NO: 220872 - RNA, 24 nt, Human
agugcaguagcacgaucucagcuc

SEQ ID NO: 220873 - RNA, 21 nt, Human
auucuccugccucagccuccc

SEQ ID NO: 220874 - RNA, 24 nt, Human
caaagugcugggauuacaggcgug

SEQ ID NO: 220875 - RNA, 22 nt, Human
cacaccauucuccugccucagc

SEQ ID NO: 220876 - RNA, 18 nt, Human
caccauguuagccaggau

SEQ ID NO: 220877 - RNA, 22 nt, Human
caccauguuagccaggaugguc

SEQ ID NO: 220878 - RNA, 24 nt, Human
caccauguuagccaggauggucuc

SEQ ID NO: 220879 - RNA, 23 nt, Human
cacccgccucggccucccaaagu

SEQ ID NO: 220880 - RNA, 22 nt, Human
cacugcaaccuccgcucccggg

SEQ ID NO: 220881 - RNA, 19 nt, Human
cagcagcagggaggacucu

SEQ ID NO: 220882 - RNA, 22 nt, Human
caggccuggaggagggagccag

SEQ ID NO: 220883 - RNA, 19 nt, Human
caggugcccgccaccgcgc

SEQ ID NO: 220884 - RNA, 21 nt, Human
caggugcccgccaccgcgccc

SEQ ID NO: 220885 - RNA, 22 nt, Human
ccaaagugcugggauuacaggc

SEQ ID NO: 220886 - RNA, 22 nt, Human
ccaaagugcugggauuacaggc

SEQ ID NO: 220887 - RNA, 24 nt, Human
ccaaagugcugggauuacaggcgu

SEQ ID NO: 220888 - RNA, 23 nt, Human
cccaaguagcugggacuacaggu

SEQ ID NO: 220889 - RNA, 24 nt, Human
cccaaguagcugggacuacaggug

SEQ ID NO: 220890 - RNA, 22 nt, Human
cccagcgucacccgcucgugcc

SEQ ID NO: 220891 - RNA, 19 nt, Human
ccccaggcuggagugcagu

SEQ ID NO: 220892 - RNA, 24 nt, Human
cccggcccccuccuccccaauuuu

SEQ ID NO: 220893 - RNA, 22 nt, Human
cccugggagcccugagguuggg

SEQ ID NO: 220894 - RNA, 24 nt, Human
ccgcgcccggcccccuccucccca

SEQ ID NO: 220895 - RNA, 24 nt, Human
ccgcgcugcaggcccagcgucacc

SEQ ID NO: 220896 - RNA, 19 nt, Human
ccgcucccggguucacacc

SEQ ID NO: 220897 - RNA, 18 nt, Human
ccuccgcucccggguuca

SEQ ID NO: 220898 - RNA, 20 nt, Human
ccugaccucgugauccaccc

SEQ ID NO: 220899 - RNA, 23 nt, Human
ccugccucagccucccaaguagc

SEQ ID NO: 220900 - RNA, 24 nt, Human
ccugccucagccucccaaguagcu

SEQ ID NO: 220901 - RNA, 22 nt, Human
cggcccccuccuccccaauuuu

SEQ ID NO: 220902 - RNA, 24 nt, Human
cggcccccuccuccccaauuuuuc

SEQ ID NO: 220903 - RNA, 18 nt, Human
cucaaggcuggcagcgga

SEQ ID NO: 220904 - RNA, 23 nt, Human
cucacugcaaccuccgcucccgg

SEQ ID NO: 220905 - RNA, 24 nt, Human
cucacugcaaccuccgcucccggg

SEQ ID NO: 220906 - RNA, 24 nt, Human
cucagccucccaaguagcugggac

SEQ ID NO: 220907 - RNA, 21 nt, Human
cucccggguucacaccauucu

SEQ ID NO: 220908 - RNA, 19 nt, Human
cuccgcgcugcaggcccag

SEQ ID NO: 220909 - RNA, 24 nt, Human
cuccugaccucgugauccacccgc

SEQ ID NO: 220910 - RNA, 22 nt, Human
cucuuucugucccccaggcugg

SEQ ID NO: 220911 - RNA, 24 nt, Human
cucuuucugucccccaggcuggag

SEQ ID NO: 220912 - RNA, 20 nt, Human
cugaguugauaagagaaccc

SEQ ID NO: 220913 - RNA, 22 nt, Human
cugcaaccuccgcucccggguu

SEQ ID NO: 220914 - RNA, 24 nt, Human
cuuucugucccccaggcuggagug

SEQ ID NO: 220915 - RNA, 22 nt, Human
gaccucgugauccacccgccuc

SEQ ID NO: 220916 - RNA, 22 nt, Human
gaccucgugauccacccgccuc

SEQ ID NO: 220917 - RNA, 24 nt, Human
gaccucgugauccacccgccucgg

SEQ ID NO: 220918 - RNA, 24 nt, Human
gagacgggguuucaccauguuagc

SEQ ID NO: 220919 - RNA, 23 nt, Human
gagcaccgcgcccggcccccucc

SEQ ID NO: 220920 - RNA, 21 nt, Human
gauuacaggcgugagcaccgc

SEQ ID NO: 220921 - RNA, 21 nt, Human
gcaaccuccgcucccggguuc

SEQ ID NO: 220922 - RNA, 23 nt, Human
gccucggccucccaaagugcugg

SEQ ID NO: 220923 - RNA, 24 nt, Human
gcuaaauuuuuuuuguauuuuuag

SEQ ID NO: 220924 - RNA, 22 nt, Human
ggaggagggagccagggagacc

SEQ ID NO: 220925 - RNA, 24 nt, Human
ggaggcaggccuggaggagggagc

SEQ ID NO: 220926 - RNA, 24 nt, Human
ggauggucucgaucuccugaccuc

SEQ ID NO: 220927 - RNA, 23 nt, Human
ggcagcggauaggccaggagaga

SEQ ID NO: 220928 - RNA, 19 nt, Human
ggccuggaggagggagcca

SEQ ID NO: 220929 - RNA, 22 nt, Human
gggagccagggagaccccuggg

SEQ ID NO: 220930 - RNA, 20 nt, Human
gggcucaaggcuggcagcgg

SEQ ID NO: 220931 - RNA, 19 nt, Human
ggggccaggcagggagaug

SEQ ID NO: 220932 - RNA, 23 nt, Human
gggguuucaccauguuagccagg

SEQ ID NO: 220933 - RNA, 22 nt, Human
ggguuucaccauguuagccagg

SEQ ID NO: 220934 - RNA, 23 nt, Human
guagagacgggguuucaccaugu

SEQ ID NO: 220935 - RNA, 24 nt, Human
gucagggugggcaagagggucuuc

SEQ ID NO: 220936 - RNA, 24 nt, Human
gugauccacccgccucggccuccc

SEQ ID NO: 220937 - RNA, 19 nt, Human
gugcagcuggucacagggc

SEQ ID NO: 220938 - RNA, 23 nt, Human
uaagagaacccugaugggcggug

SEQ ID NO: 220939 - RNA, 22 nt, Human
uagagacgggguuucaccaugu

SEQ ID NO: 220940 - RNA, 24 nt, Human
uagcacgaucucagcucacugcaa

SEQ ID NO: 220941 - RNA, 24 nt, Human
uaguagagacgggguuucaccaug

SEQ ID NO: 220942 - RNA, 26 nt, Human
uaguagagacgggguuucaccauguu

SEQ ID NO: 220943 - RNA, 22 nt, Human
uauacaauauacacacccuuga

SEQ ID NO: 220944 - RNA, 21 nt, Human
ucacaccauucuccugccuca

SEQ ID NO: 220945 - RNA, 24 nt, Human
ucaccauguuagccaggauggucu

SEQ ID NO: 220946 - RNA, 18 nt, Human
ucacugcaaccuccgcuc

SEQ ID NO: 220947 - RNA, 23 nt, Human
ucacugcaaccuccgcucccggg

SEQ ID NO: 220948 - RNA, 20 nt, Human
ucagccucccaaguagcugg

SEQ ID NO: 220949 - RNA, 24 nt, Human
ucccaaagugcugggauuacaggc

SEQ ID NO: 220950 - RNA, 23 nt, Human
ucccaaguagcugggacuacagg

SEQ ID NO: 220951 - RNA, 24 nt, Human
ucccccaggcuggagugcaguagc

SEQ ID NO: 220952 - RNA, 21 nt, Human
ucccggguucacaccauucuc

SEQ ID NO: 220953 - RNA, 24 nt, Human
ucccggguucacaccauucuccug

SEQ ID NO: 220954 - RNA, 21 nt, Human
ucgcuaggccccagaaagccc

SEQ ID NO: 220955 - RNA, 18 nt, Human
ucggccucccaaagugcu

SEQ ID NO: 220956 - RNA, 26 nt, Human
ucuccugccucagccucccaaguagc

SEQ ID NO: 220957 - RNA, 24 nt, Human
ucucuuucugucccccaggcugga

SEQ ID NO: 220958 - RNA, 24 nt, Human
ucugucccccaggcuggagugcag

SEQ ID NO: 220959 - RNA, 21 nt, Human
ucuuucugucccccaggcugg

SEQ ID NO: 220960 - RNA, 22 nt, Human
ucuuucugucccccaggcugga

SEQ ID NO: 220961 - RNA, 24 nt, Human
ucuuucugucccccaggcuggagu

SEQ ID NO: 220962 - RNA, 22 nt, Human
ugagacggagucucuuucuguc

SEQ ID NO: 220963 - RNA, 24 nt, Human
ugagguugggggccaggcagggag

SEQ ID NO: 220964 - RNA, 22 nt, Human
ugccccuauacaauauacacug

SEQ ID NO: 220965 - RNA, 24 nt, Human
ugccucagccucccaaguagcugg

SEQ ID NO: 220966 - RNA, 25 nt, Human
ugcgccagggacgcuguggggagca

SEQ ID NO: 220967 - RNA, 23 nt, Human
ugcugggauuacaggcgugagca

SEQ ID NO: 220968 - RNA, 23 nt, Human
uggagugcaguagcacgaucuca

SEQ ID NO: 220969 - RNA, 24 nt, Human
uggagugcaguagcacgaucucag

SEQ ID NO: 220970 - RNA, 21 nt, Human
ugggacuacaggugcccgcca

SEQ ID NO: 220971 - RNA, 22 nt, Human
ugggacuacaggugcccgccac

SEQ ID NO: 220972 - RNA, 23 nt, Human
ugggacuacaggugcccgccacc

SEQ ID NO: 220973 - RNA, 24 nt, Human
ugggacuacaggugcccgccaccg

SEQ ID NO: 220974 - RNA, 18 nt, Human
ugggauuacaggcgugag

SEQ ID NO: 220975 - RNA, 19 nt, Human
ugggauuacaggcgugagc

SEQ ID NO: 220976 - RNA, 20 nt, Human
ugggauuacaggcgugagca

SEQ ID NO: 220977 - RNA, 22 nt, Human
ugggauuacaggcgugagcacc

SEQ ID NO: 220978 - RNA, 23 nt, Human
ugggauuacaggcgugagcaccg

SEQ ID NO: 220979 - RNA, 19 nt, Human
uuacaggcgugagcaccgc

SEQ ID NO: 220980 - RNA, 18 nt, Human
uuaguagagacgggguuu

SEQ ID NO: 220981 - RNA, 22 nt, Human
uuaguagagacgggguuucacc

SEQ ID NO: 220982 - RNA, 24 nt, Human
uuaguagagacgggguuucaccau

SEQ ID NO: 220983 - RNA, 23 nt, Human
uuguauuuuuaguagagacgggg

SEQ ID NO: 220984 - RNA, 19 nt, Human
uuucaccauguuagccagg

SEQ ID NO: 220985 - RNA, 20 nt, Human
uuucaccauguuagccagga

SEQ ID NO: 220986 - RNA, 24 nt, Human
uuuuuaguagagacgggguuucac

SEQ ID NO: 220987 - RNA, 21 nt, Human
uuuuuguauuuuuaguagaga

SEQ ID NO: 220988 - RNA, 21 nt, Human
uuuuuuguauuuuuaguagag

SEQ ID NO: 220989 - RNA, 24 nt, Human
uuuuuuguauuuuuaguagagacg

SEQ ID NO: 220990 - RNA, 24 nt, Human
uuuuuuuuguauuuuuaguagaga

SEQ ID NO: 220991 - RNA, 20 nt, Human
aaaaucacagguaagaguca

SEQ ID NO: 220992 - RNA, 23 nt, Human
aaacaacaagaagcaaguaccau

SEQ ID NO: 220993 - RNA, 19 nt, Human
aaacauuugaauuuguuca

SEQ ID NO: 220994 - RNA, 23 nt, Human
aacaagcuuacacaucugugcaa

SEQ ID NO: 220995 - RNA, 23 nt, Human
aaccuuaucuucucuaccauguc

SEQ ID NO: 220996 - RNA, 21 nt, Human
aacuauccagccccaaaaguc

SEQ ID NO: 220997 - RNA, 25 nt, Human
aacuccggccggacccuccucgccg

SEQ ID NO: 220998 - RNA, 23 nt, Human
aagcugcaaaacauuccuggaau

SEQ ID NO: 220999 - RNA, 22 nt, Human
acaaacccccacaacagagaac

SEQ ID NO: 221000 - RNA, 18 nt, Human
acaaacucuaacaugaaa

SEQ ID NO: 221001 - RNA, 24 nt, Human
acaagacaaacccccacaacagag

SEQ ID NO: 221002 - RNA, 23 nt, Human
acaccgagucugaccaugcaaaa

SEQ ID NO: 221003 - RNA, 24 nt, Human
acagugcacaagacaaacccccac

SEQ ID NO: 221004 - RNA, 18 nt, Human
accaguauguacaaacuc

SEQ ID NO: 221005 - RNA, 20 nt, Human
acccccacaacagagaacua

SEQ ID NO: 221006 - RNA, 19 nt, Human
acugcaacacucuauauug

SEQ ID NO: 221007 - RNA, 19 nt, Human
acuggagcuuauuaaaauc

SEQ ID NO: 221008 - RNA, 22 nt, Human
agcuaauaaugaaaaauuuuaa

SEQ ID NO: 221009 - RNA, 21 nt, Human
aggaaacaauaaaacaacaag

SEQ ID NO: 221010 - RNA, 21 nt, Human
agggagauguaagcuucagaa

SEQ ID NO: 221011 - RNA, 20 nt, Human
auaaaacaacaagaagcaag

SEQ ID NO: 221012 - RNA, 19 nt, Human
auucuucauuuucuccaug

SEQ ID NO: 221013 - RNA, 22 nt, Human
auucuucauuuucuccaugcuu

SEQ ID NO: 221014 - RNA, 19 nt, Human
auuuuguaucuaugcagag

SEQ ID NO: 221015 - RNA, 22 nt, Human
caaaaaauuaccugccauaaac

SEQ ID NO: 221016 - RNA, 24 nt, Human
caaaaucacagguaagagucaaca

SEQ ID NO: 221017 - RNA, 18 nt, Human
caacaucagaaaaguuau

SEQ ID NO: 221018 - RNA, 23 nt, Human
caaccagagguaccaucccucaa

SEQ ID NO: 221019 - RNA, 24 nt, Human
caaccagagguaccaucccucaag

SEQ ID NO: 221020 - RNA, 24 nt, Human
caagacaaacccccacaacagaga

SEQ ID NO: 221021 - RNA, 26 nt, Human
caagacaaacccccacaacagagaac

SEQ ID NO: 221022 - RNA, 20 nt, Human
caccauacaugaaaacaaaa

SEQ ID NO: 221023 - RNA, 20 nt, Human
caccuaggauaaaaaugauc

SEQ ID NO: 221024 - RNA, 22 nt, Human
cacuccguaaaucauauaacuc

SEQ ID NO: 221025 - RNA, 22 nt, Human
cacugcaacacucuauauugau

SEQ ID NO: 221026 - RNA, 23 nt, Human
cacugcugaggaccaggcagccg

SEQ ID NO: 221027 - RNA, 21 nt, Human
cagcauugauggggaaaauau

SEQ ID NO: 221028 - RNA, 20 nt, Human
caggagcugcagugaaccau

SEQ ID NO: 221029 - RNA, 24 nt, Human
cauauauuugcauauauauacaca

SEQ ID NO: 221030 - RNA, 18 nt, Human
caugaaaauaaugaguca

SEQ ID NO: 221031 - RNA, 25 nt, Human
ccaaagacaugcaucaacaucagaa

SEQ ID NO: 221032 - RNA, 18 nt, Human
ccaauaauauucuagcac

SEQ ID NO: 221033 - RNA, 18 nt, Human
ccaggcaucugcaugaau

SEQ ID NO: 221034 - RNA, 19 nt, Human
cccugcuccgcgccggggc

SEQ ID NO: 221035 - RNA, 23 nt, Human
ccugcacuaaagucacauaggag

SEQ ID NO: 221036 - RNA, 24 nt, Human
cgccggggcugcacugcugaggac

SEQ ID NO: 221037 - RNA, 18 nt, Human
cgggccgaggcucccugc

SEQ ID NO: 221038 - RNA, 20 nt, Human
cgggccucugagcaguuccc

SEQ ID NO: 221039 - RNA, 19 nt, Human
cucacuagaauauucagua

SEQ ID NO: 221040 - RNA, 21 nt, Human
cugcacugcugaggaccaggc

SEQ ID NO: 221041 - RNA, 21 nt, Human
gaaaaggcaaaucucugcaaa

SEQ ID NO: 221042 - RNA, 23 nt, Human
gaaaauauauuauccuuaugacc

SEQ ID NO: 221043 - RNA, 18 nt, Human
gagauguaagcuucagaa

SEQ ID NO: 221044 - RNA, 19 nt, Human
gagcugcagugaaccauuc

SEQ ID NO: 221045 - RNA, 22 nt, Human
gagguaccaucccucaaggggu

SEQ ID NO: 221046 - RNA, 27 nt, Human
gccgcgacugagccggaaaguucaauc

SEQ ID NO: 221047 - RNA, 22 nt, Human
ggaaagauucaaaaaaacaaag

SEQ ID NO: 221048 - RNA, 20 nt, Human
ggaacuuugauuuaccuuug

SEQ ID NO: 221049 - RNA, 24 nt, Human
ggaguuccagguagaaaaacaggg

SEQ ID NO: 221050 - RNA, 24 nt, Human
ggcgccgggcgcgggccgaggcuc

SEQ ID NO: 221051 - RNA, 20 nt, Human
gggaaaacugaguucuguug

SEQ ID NO: 221052 - RNA, 23 nt, Human
gguagcuggcaauaucuggagac

SEQ ID NO: 221053 - RNA, 21 nt, Human
guccgggccucugagcaguuc

SEQ ID NO: 221054 - RNA, 26 nt, Human
gugaauuuucagauggugaaacaaaa

SEQ ID NO: 221055 - RNA, 26 nt, Human
guggacauaaaaaacacaguuuaggc

SEQ ID NO: 221056 - RNA, 24 nt, Human
guguauauacauguauauguacau

SEQ ID NO: 221057 - RNA, 21 nt, Human
guucuuccugcacuaaaguca

SEQ ID NO: 221058 - RNA, 23 nt, Human
uaaaauccauaagagaaacacau

SEQ ID NO: 221059 - RNA, 19 nt, Human
uaacacagauaaauucauc

SEQ ID NO: 221060 - RNA, 19 nt, Human
uaagaacuugaaauucaga

SEQ ID NO: 221061 - RNA, 22 nt, Human
uaaugacaccagaauaaaaaag

SEQ ID NO: 221062 - RNA, 24 nt, Human
uacacaaaaauccaacuuuuuuua

SEQ ID NO: 221063 - RNA, 19 nt, Human
uacaguguuuaauuuugau

SEQ ID NO: 221064 - RNA, 27 nt, Human
uacuaaaaaccuacagugcacaagaca

SEQ ID NO: 221065 - RNA, 24 nt, Human
uagauuacacauuuucauuuaaaa

SEQ ID NO: 221066 - RNA, 20 nt, Human
uauauacauguauauguaca

SEQ ID NO: 221067 - RNA, 20 nt, Human
uauauacauguauauguaca

SEQ ID NO: 221068 - RNA, 23 nt, Human
uauaugcaugugucuguguguau

SEQ ID NO: 221069 - RNA, 24 nt, Human
uauguacauauauuugcauauaua

SEQ ID NO: 221070 - RNA, 23 nt, Human
uauuagcccauuaauagcauuuu

SEQ ID NO: 221071 - RNA, 19 nt, Human
uauucaguagagguaagac

SEQ ID NO: 221072 - RNA, 23 nt, Human
uauuucauugaguuccucuggcu

SEQ ID NO: 221073 - RNA, 20 nt, Human
uauuuuguaucuaugcagag

SEQ ID NO: 221074 - RNA, 21 nt, Human
ucagaugcugguaaugacacc

SEQ ID NO: 221075 - RNA, 18 nt, Human
ucauguauaugcaugugu

SEQ ID NO: 221076 - RNA, 21 nt, Human
uccagggauucaugcucaagg

SEQ ID NO: 221077 - RNA, 21 nt, Human
ucccaaagacaugcaucaaca

SEQ ID NO: 221078 - RNA, 23 nt, Human
ucuaaauaaugugacagacauac

SEQ ID NO: 221079 - RNA, 21 nt, Human
ucuaccuuuagacacugcagu

SEQ ID NO: 221080 - RNA, 23 nt, Human
ucuacuguuucucacuugucucc

SEQ ID NO: 221081 - RNA, 20 nt, Human
ucuaugcacauuucaaacca

SEQ ID NO: 221082 - RNA, 22 nt, Human
ucuaugcacauuucaaaccaug

SEQ ID NO: 221083 - RNA, 19 nt, Human
ucucugcaaagauuuaaac

SEQ ID NO: 221084 - RNA, 19 nt, Human
ucuuccugcacuaaaguca

SEQ ID NO: 221085 - RNA, 19 nt, Human
ugaaaagagcacauguugg

SEQ ID NO: 221086 - RNA, 21 nt, Human
ugaaaagagcacauguugguu

SEQ ID NO: 221087 - RNA, 23 nt, Human
ugaaacaaaagugcaccaaaagc

SEQ ID NO: 221088 - RNA, 26 nt, Human
ugacaaguucauguaaaaaggguuuc

SEQ ID NO: 221089 - RNA, 19 nt, Human
ugaccaugcaaaaucacag

SEQ ID NO: 221090 - RNA, 18 nt, Human
ugacuucugaguuauccu

SEQ ID NO: 221091 - RNA, 21 nt, Human
ugaggagaaaguguggaugcu

SEQ ID NO: 221092 - RNA, 22 nt, Human
ugauacagacacgagucaaaau

SEQ ID NO: 221093 - RNA, 18 nt, Human
ugcaaauaacuguccuuc

SEQ ID NO: 221094 - RNA, 18 nt, Human
ugcaacagauauuuagcc

SEQ ID NO: 221095 - RNA, 21 nt, Human
ugcagugaaccauucagaacc

SEQ ID NO: 221096 - RNA, 21 nt, Human
ugcauauauauacacaugcau

SEQ ID NO: 221097 - RNA, 21 nt, Human
ugcauauauauacacaugcau

SEQ ID NO: 221098 - RNA, 23 nt, Human
ugcauauauauacacaugcauuu

SEQ ID NO: 221099 - RNA, 18 nt, Human
uggcaauaucuggagaca

SEQ ID NO: 221100 - RNA, 19 nt, Human
uguagcauaaaacauuucc

SEQ ID NO: 221101 - RNA, 24 nt, Human
uguauauacauguauauguacaua

SEQ ID NO: 221102 - RNA, 24 nt, Human
ugucaaaaccuaaggauaauguua

SEQ ID NO: 221103 - RNA, 19 nt, Human
uguguauauacauguauau

SEQ ID NO: 221104 - RNA, 20 nt, Human
ugugucuguguguauauaca

SEQ ID NO: 221105 - RNA, 31 nt, Human
ugugucuguguguauauacauguauauguaa

SEQ ID NO: 221106 - RNA, 19 nt, Human
uguguguauauacauguau

SEQ ID NO: 221107 - RNA, 20 nt, Human
uguguguauauacauguaua

SEQ ID NO: 221108 - RNA, 21 nt, Human
uuaauagcauuuuucuuccaa

SEQ ID NO: 221109 - RNA, 20 nt, Human
uuaauuuuugaaauuuuaag

SEQ ID NO: 221110 - RNA, 23 nt, Human
uuagacacugcagugaggcucug

SEQ ID NO: 221111 - RNA, 20 nt, Human
uuagagaaaugaaucuaauu

SEQ ID NO: 221112 - RNA, 18 nt, Human
uuccagguagaaaaacag

SEQ ID NO: 221113 - RNA, 18 nt, Human
uuccuggaauauccacuu

SEQ ID NO: 221114 - RNA, 21 nt, Human
uuccuggaauauccacuuuuu

SEQ ID NO: 221115 - RNA, 19 nt, Human
uucuucauuuucuccaugc

SEQ ID NO: 221116 - RNA, 18 nt, Human
uugaggaaaauaagggaa

SEQ ID NO: 221117 - RNA, 26 nt, Human
uuguagcauaaaacauuuccaaaaag

SEQ ID NO: 221118 - RNA, 20 nt, Human
uuugggacuugcucuagaaa

SEQ ID NO: 221119 - RNA, 18 nt, Human
uuuuaagaacuugaaauu

SEQ ID NO: 221120 - RNA, 24 nt, Human
uuuuugggacuugcucuagaaauu

SEQ ID NO: 221121 - RNA, 24 nt, Human
acagaacugcggugucaaauggaa

SEQ ID NO: 221122 - RNA, 22 nt, Human
agaacugcggugucaaauggaa

SEQ ID NO: 221123 - RNA, 19 nt, Human
cggagggcccgacccaaaa

SEQ ID NO: 221124 - RNA, 21 nt, Human
gcagaaaugcaaagacgccug

SEQ ID NO: 221125 - RNA, 22 nt, Human
gcccgacccaaaaguaaggagg

SEQ ID NO: 221126 - RNA, 19 nt, Human
uaacaggauuaaaaagaaa

SEQ ID NO: 221127 - RNA, 21 nt, Human
aaaaagaagaagaaaaaaaga

SEQ ID NO: 221128 - RNA, 22 nt, Human
aaaaagaagaagaaaaaaagaa

SEQ ID NO: 221129 - RNA, 19 nt, Human
aagaagaaaaaaagaaaca

SEQ ID NO: 221130 - RNA, 19 nt, Human
aagaagaagaaaaaaagaa

SEQ ID NO: 221131 - RNA, 19 nt, Human
agaagaagaaaaaaagaaa

SEQ ID NO: 221132 - RNA, 19 nt, Human
gaagaagaaaaaaagaaac

SEQ ID NO: 221133 - RNA, 22 nt, Human
uaagcuaaaaagaagaagaaaa

SEQ ID NO: 221134 - RNA, 25 nt, Human
aaacaggcaccuguuucagcuucca

SEQ ID NO: 221135 - RNA, 21 nt, Human
aaacaucuguuucuagacuuu

SEQ ID NO: 221136 - RNA, 21 nt, Human
aaacauggguugcuauggaaa

SEQ ID NO: 221137 - RNA, 22 nt, Human
aagcccgaaagaauuaaacuaa

SEQ ID NO: 221138 - RNA, 18 nt, Human
aauacugagcacagcaug

SEQ ID NO: 221139 - RNA, 23 nt, Human
aaugacauaaugauuuucauagu

SEQ ID NO: 221140 - RNA, 22 nt, Human
acaauacugagcacagcauguc

SEQ ID NO: 221141 - RNA, 23 nt, Human
acagaacuucacaggaaucuguu

SEQ ID NO: 221142 - RNA, 20 nt, Human
agaccaagggggcacguucc

SEQ ID NO: 221143 - RNA, 22 nt, Human
aggaaucuguuagucuaaugcu

SEQ ID NO: 221144 - RNA, 19 nt, Human
agggagagggagaaugaag

SEQ ID NO: 221145 - RNA, 25 nt, Human
aucuggaaagguuacugugcaagag

SEQ ID NO: 221146 - RNA, 22 nt, Human
augaagcagcagggagagggag

SEQ ID NO: 221147 - RNA, 21 nt, Human
caagagaugccaugacaaccu

SEQ ID NO: 221148 - RNA, 24 nt, Human
cacagcaugucacuuguaucacau

SEQ ID NO: 221149 - RNA, 24 nt, Human
cagaucaggacaucuugggggcau

SEQ ID NO: 221150 - RNA, 24 nt, Human
cagcccacuugcaaaacaggcacc

SEQ ID NO: 221151 - RNA, 23 nt, Human
cauuucaccuccuuagagucuca

SEQ ID NO: 221152 - RNA, 18 nt, Human
ccacacaauacugagcac

SEQ ID NO: 221153 - RNA, 22 nt, Human
ccagaucaugccuuauuguggu

SEQ ID NO: 221154 - RNA, 20 nt, Human
ccaggaaacauggguugcua

SEQ ID NO: 221155 - RNA, 22 nt, Human
ccuuuaaaauucugagguuaaa

SEQ ID NO: 221156 - RNA, 21 nt, Human
cgaagcaucauuuacuacgga

SEQ ID NO: 221157 - RNA, 22 nt, Human
cguuccacacaauacugagcac

SEQ ID NO: 221158 - RNA, 24 nt, Human
cuggaaggggugucugccacuuua

SEQ ID NO: 221159 - RNA, 21 nt, Human
cuuauugugguuaauaucuaa

SEQ ID NO: 221160 - RNA, 18 nt, Human
cuugggggcauuucccuu

SEQ ID NO: 221161 - RNA, 20 nt, Human
gaagcaucauuuacuacgga

SEQ ID NO: 221162 - RNA, 22 nt, Human
gagagaggguaaagggaaaagg

SEQ ID NO: 221163 - RNA, 23 nt, Human
gcaacacugaaaacaucuguuuc

SEQ ID NO: 221164 - RNA, 18 nt, Human
gggcggcagcucgcggcc

SEQ ID NO: 221165 - RNA, 21 nt, Human
gucauuauucuaguuagacuc

SEQ ID NO: 221166 - RNA, 18 nt, Human
gucuggaaauguauaaaa

SEQ ID NO: 221167 - RNA, 21 nt, Human
uacuagaaaugaaguuuaacg

SEQ ID NO: 221168 - RNA, 22 nt, Human
uaggaaagaaacaacugccuuu

SEQ ID NO: 221169 - RNA, 23 nt, Human
ucagguccuuuccuugaugaaug

SEQ ID NO: 221170 - RNA, 20 nt, Human
ucaugccuuauugugguuaa

SEQ ID NO: 221171 - RNA, 25 nt, Human
uccaaacaccauauuuuccuccuug

SEQ ID NO: 221172 - RNA, 18 nt, Human
ucuaacauuccaaacacc

SEQ ID NO: 221173 - RNA, 24 nt, Human
ucuaacuguucuuuaguuucauuu

SEQ ID NO: 221174 - RNA, 21 nt, Human
ugcaaaacaggcaccuguuuc

SEQ ID NO: 221175 - RNA, 19 nt, Human
ugcuuuagaaaugcuuagc

SEQ ID NO: 221176 - RNA, 18 nt, Human
uggggcugggacauaugc

SEQ ID NO: 221177 - RNA, 18 nt, Human
uuccacacaauacugagc

SEQ ID NO: 221178 - RNA, 20 nt, Human
uucugagguuaaacaguuac

SEQ ID NO: 221179 - RNA, 23 nt, Human
uuuuucggguuucccaggaaaca

SEQ ID NO: 221180 - RNA, 20 nt, Human
aagaagaaagaaaaauaggg

SEQ ID NO: 221181 - RNA, 21 nt, Human
aagaagaagaaagaaaaauag

SEQ ID NO: 221182 - RNA, 24 nt, Human
aagaagaagaaagaaaaauaggga

SEQ ID NO: 221183 - RNA, 19 nt, Human
agaagaaagaaaaauaggg

SEQ ID NO: 221184 - RNA, 22 nt, Human
agaagaaagaaaaauagggcag

SEQ ID NO: 221185 - RNA, 20 nt, Human
agaagaagaaagaaaaauag

SEQ ID NO: 221186 - RNA, 23 nt, Human
agaagaagaaagaaaaauagggg

SEQ ID NO: 221187 - RNA, 20 nt, Human
agaaguccgaaaaugcugga

SEQ ID NO: 221188 - RNA, 20 nt, Human
caagacuaagaaguccgaaa

SEQ ID NO: 221189 - RNA, 21 nt, Human
caguggcagguggaaaaagau

SEQ ID NO: 221190 - RNA, 21 nt, Human
cauugcucuccagagcuuggc

SEQ ID NO: 221191 - RNA, 21 nt, Human
ccaguuguagaagaagaagaa

SEQ ID NO: 221192 - RNA, 23 nt, Human
cucaagacuaagaaguccgaaaa

SEQ ID NO: 221193 - RNA, 19 nt, Human
gaagaaagaaaaauagggc

SEQ ID NO: 221194 - RNA, 22 nt, Human
gagcaguggcagguggaaaaag

SEQ ID NO: 221195 - RNA, 18 nt, Human
gcucucucuucucaggga

SEQ ID NO: 221196 - RNA, 19 nt, Human
uaagguaaguuuggaaccc

SEQ ID NO: 221197 - RNA, 22 nt, Human
uccaguuguagaagaagaagaa

SEQ ID NO: 221198 - RNA, 20 nt, Human
uguagaagaagaagaaagaa

SEQ ID NO: 221199 - RNA, 21 nt, Human
uuuggagaugcugagggggga

SEQ ID NO: 221200 - RNA, 24 nt, Human
aaacagaacagcccauaccaagau

SEQ ID NO: 221201 - RNA, 18 nt, Human
aacagaacagcccauacc

SEQ ID NO: 221202 - RNA, 20 nt, Human
acagaaaaacaucaggacac

SEQ ID NO: 221203 - RNA, 22 nt, Human
acagaacagcccauaccaagau

SEQ ID NO: 221204 - RNA, 19 nt, Human
accaagaucucugacucua

SEQ ID NO: 221205 - RNA, 23 nt, Human
accaauaccacaucccagaaaag

SEQ ID NO: 221206 - RNA, 20 nt, Human
acuacaguacaaaaagccag

SEQ ID NO: 221207 - RNA, 19 nt, Human
agaaaagacagaggcuugg

SEQ ID NO: 221208 - RNA, 19 nt, Human
agagggcaugcugcgcccc

SEQ ID NO: 221209 - RNA, 20 nt, Human
agcaaauuuggaacacaugg

SEQ ID NO: 221210 - RNA, 18 nt, Human
agcugaccggcucccgcg

SEQ ID NO: 221211 - RNA, 22 nt, Human
aggaaacagaacagcccauacc

SEQ ID NO: 221212 - RNA, 19 nt, Human
aggcuccgcuccagcgguc

SEQ ID NO: 221213 - RNA, 23 nt, Human
cacaaagcaccaauaccacaucc

SEQ ID NO: 221214 - RNA, 19 nt, Human
cacaucccagaaaagacag

SEQ ID NO: 221215 - RNA, 20 nt, Human
cauggaaugugguacuuuuu

SEQ ID NO: 221216 - RNA, 22 nt, Human
ccaauaccacaucccagaaaag

SEQ ID NO: 221217 - RNA, 23 nt, Human
ccagcggucggccggccccucuc

SEQ ID NO: 221218 - RNA, 24 nt, Human
ccagcugaccggcucccgcgcccc

SEQ ID NO: 221219 - RNA, 26 nt, Human
cccauaccaagaucucugacucuaau

SEQ ID NO: 221220 - RNA, 19 nt, Human
ccccagcugaccggcuccc

SEQ ID NO: 221221 - RNA, 18 nt, Human
cccuacucacgcuccgcg

SEQ ID NO: 221222 - RNA, 22 nt, Human
cccugcucucugccucucucuc

SEQ ID NO: 221223 - RNA, 24 nt, Human
cccugcucucugccucucucucuu

SEQ ID NO: 221224 - RNA, 19 nt, Human
ccucccauucccuacucca

SEQ ID NO: 221225 - RNA, 18 nt, Human
ccucugcuggguauagga

SEQ ID NO: 221226 - RNA, 20 nt, Human
cgcuccgcgggcgccuggcg

SEQ ID NO: 221227 - RNA, 24 nt, Human
cucacagcgcucaccauuuccaca

SEQ ID NO: 221228 - RNA, 18 nt, Human
cucuggggagagcugggg

SEQ ID NO: 221229 - RNA, 22 nt, Human
cugcucucugccucucucucuu

SEQ ID NO: 221230 - RNA, 21 nt, Human
cuucaagaacauacucugccc

SEQ ID NO: 221231 - RNA, 25 nt, Human
gaaaauggggggaucgagggaggga

SEQ ID NO: 221232 - RNA, 18 nt, Human
gagggagggaggaaagga

SEQ ID NO: 221233 - RNA, 19 nt, Human
gagggagggaggaaaggag

SEQ ID NO: 221234 - RNA, 23 nt, Human
gcgucaggcuccgcuccagcggu

SEQ ID NO: 221235 - RNA, 21 nt, Human
gcuuggagacacaggaaacag

SEQ ID NO: 221236 - RNA, 23 nt, Human
ggaaaggagugaaaggagagggg

SEQ ID NO: 221237 - RNA, 19 nt, Human
ggggggaucgagggaggga

SEQ ID NO: 221238 - RNA, 23 nt, Human
guaaagcaaauuuggaacacaug

SEQ ID NO: 221239 - RNA, 22 nt, Human
gucauggaaugugguacuuuuu

SEQ ID NO: 221240 - RNA, 18 nt, Human
uaaagacaauaaauuauc

SEQ ID NO: 221241 - RNA, 24 nt, Human
uaaagcaaauuuggaacacaugga

SEQ ID NO: 221242 - RNA, 22 nt, Human
uaaggcgcacagaaaaagucag

SEQ ID NO: 221243 - RNA, 24 nt, Human
uacaaaaagccacuuaccaggcau

SEQ ID NO: 221244 - RNA, 22 nt, Human
uacacaaauacaaucauaugua

SEQ ID NO: 221245 - RNA, 21 nt, Human
uaccacaucccagaaaagaca

SEQ ID NO: 221246 - RNA, 21 nt, Human
uaucugaacuacaguacaaaa

SEQ ID NO: 221247 - RNA, 20 nt, Human
ucccagaaaagacagaggcu

SEQ ID NO: 221248 - RNA, 20 nt, Human
uccccuauacacaaauacaa

SEQ ID NO: 221249 - RNA, 21 nt, Human
ucugaacuacaguacaaaaag

SEQ ID NO: 221250 - RNA, 18 nt, Human
ucugccucucucucuucu

SEQ ID NO: 221251 - RNA, 22 nt, Human
ugaccggcucccgcgcccccua

SEQ ID NO: 221252 - RNA, 24 nt, Human
ugcccuagacacaaagcaccaauu

SEQ ID NO: 221253 - RNA, 19 nt, Human
uggcagcccguuaccaagc

SEQ ID NO: 221254 - RNA, 20 nt, Human
ugggaucugggcuauuuaga

SEQ ID NO: 221255 - RNA, 18 nt, Human
uuacauaaucucuuggga

SEQ ID NO: 221256 - RNA, 20 nt, Human
uuccugggauaaaaauaaag

SEQ ID NO: 221257 - RNA, 21 nt, Human
uuggaacacauggauggagga

SEQ ID NO: 221258 - RNA, 20 nt, Human
uuugaagaaaguuacaagaa

SEQ ID NO: 221259 - RNA, 24 nt, Human
aaaaaagccucuuagagugaggcu

SEQ ID NO: 221260 - RNA, 22 nt, Human
aaaucaaacucccaggaagcaa

SEQ ID NO: 221261 - RNA, 19 nt, Human
aaccuauuuugaggcuaug

SEQ ID NO: 221262 - RNA, 20 nt, Human
aaccuugaaugcugcaggga

SEQ ID NO: 221263 - RNA, 28 nt, Human
aagaacacuaaggagggagccgguaccc

SEQ ID NO: 221264 - RNA, 18 nt, Human
aagaagucaacugaagcu

SEQ ID NO: 221265 - RNA, 24 nt, Human
acacaaucucuggagcgcggcacc

SEQ ID NO: 221266 - RNA, 19 nt, Human
acagccgccaccuccuccc

SEQ ID NO: 221267 - RNA, 20 nt, Human
accagugagagcaggucaaa

SEQ ID NO: 221268 - RNA, 19 nt, Human
accccacucccacaucaca

SEQ ID NO: 221269 - RNA, 24 nt, Human
acccgcuccccagcucccgugcgc

SEQ ID NO: 221270 - RNA, 23 nt, Human
accugggcgcuggggauuugguu

SEQ ID NO: 221271 - RNA, 18 nt, Human
agaaaauguggggaaaau

SEQ ID NO: 221272 - RNA, 22 nt, Human
agaaacaaaaggggaggugggc

SEQ ID NO: 221273 - RNA, 22 nt, Human
agacauuccuccuggcucugug

SEQ ID NO: 221274 - RNA, 18 nt, Human
agagaaaauguggggaaa

SEQ ID NO: 221275 - RNA, 22 nt, Human
agcaaagaacacuaaggaggga

SEQ ID NO: 221276 - RNA, 18 nt, Human
agcucagugcuccccucc

SEQ ID NO: 221277 - RNA, 23 nt, Human
agcugcagcggcucggcucuccg

SEQ ID NO: 221278 - RNA, 19 nt, Human
agcuggaguuugccugagg

SEQ ID NO: 221279 - RNA, 18 nt, Human
agcuucccagacauuccc

SEQ ID NO: 221280 - RNA, 23 nt, Human
aggaaacgcacaugacccaaagc

SEQ ID NO: 221281 - RNA, 22 nt, Human
aggcaaaaaacaaauggcaagg

SEQ ID NO: 221282 - RNA, 24 nt, Human
aggcuaugcaaauaaagacucuac

SEQ ID NO: 221283 - RNA, 19 nt, Human
aguaguggaaaugagaagg

SEQ ID NO: 221284 - RNA, 24 nt, Human
agucaagaagucaacugaagcuag

SEQ ID NO: 221285 - RNA, 18 nt, Human
agugguuguuacagggca

SEQ ID NO: 221286 - RNA, 19 nt, Human
aucugcaacacgauuccuc

SEQ ID NO: 221287 - RNA, 20 nt, Human
auuggguggcaccgcuggaa

SEQ ID NO: 221288 - RNA, 23 nt, Human
caaaggcaaaaaacaaauggcaa

SEQ ID NO: 221289 - RNA, 22 nt, Human
caacacgauuccucugccccuu

SEQ ID NO: 221290 - RNA, 21 nt, Human
caagcaaacccucauaaggcu

SEQ ID NO: 221291 - RNA, 24 nt, Human
caauccuaaaucaaacucccagga

SEQ ID NO: 221292 - RNA, 22 nt, Human
cacaaucucuggagcgcggcac

SEQ ID NO: 221293 - RNA, 19 nt, Human
cacacacucuccaagugac

SEQ ID NO: 221294 - RNA, 26 nt, Human
cacccaaaagaucucagaacaguaca

SEQ ID NO: 221295 - RNA, 22 nt, Human
caccccacucccacaucacacc

SEQ ID NO: 221296 - RNA, 21 nt, Human
caccccucgcccagccagggg

SEQ ID NO: 221297 - RNA, 20 nt, Human
cacccgcuccccagcucccg

SEQ ID NO: 221298 - RNA, 19 nt, Human
cacugcgcuccuccagccg

SEQ ID NO: 221299 - RNA, 20 nt, Human
cagcaaaaaagccucuuaga

SEQ ID NO: 221300 - RNA, 19 nt, Human
cagcaauccuaaaucaaac

SEQ ID NO: 221301 - RNA, 21 nt, Human
cagccgggcuagcucuuccca

SEQ ID NO: 221302 - RNA, 24 nt, Human
cagcggcucggcucuccgcucugc

SEQ ID NO: 221303 - RNA, 24 nt, Human
caugacccaaagcaaagaacacua

SEQ ID NO: 221304 - RNA, 21 nt, Human
ccacccaaucaugcccagcuu

SEQ ID NO: 221305 - RNA, 23 nt, Human
ccagcggugccacccaaucaugc

SEQ ID NO: 221306 - RNA, 18 nt, Human
cccacaucacaccccucg

SEQ ID NO: 221307 - RNA, 18 nt, Human
cccaccccacucccacau

SEQ ID NO: 221308 - RNA, 21 nt, Human
cccaccccacucccacaucac

SEQ ID NO: 221309 - RNA, 24 nt, Human
cccacggcucaaggcuucgcugcc

SEQ ID NO: 221310 - RNA, 21 nt, Human
cccacucccacaucacacccc

SEQ ID NO: 221311 - RNA, 21 nt, Human
cccagcucccgugcgcccucu

SEQ ID NO: 221312 - RNA, 24 nt, Human
cccagcucccgugcgcccucuuua

SEQ ID NO: 221313 - RNA, 18 nt, Human
cccccucccaccccacuc

SEQ ID NO: 221314 - RNA, 21 nt, Human
cccccucccaccccacuccca

SEQ ID NO: 221315 - RNA, 18 nt, Human
ccccgccugcugcccccu

SEQ ID NO: 221316 - RNA, 19 nt, Human
ccccgccugcugcccccuc

SEQ ID NO: 221317 - RNA, 19 nt, Human
ccccgccugcugcccccuc

SEQ ID NO: 221318 - RNA, 19 nt, Human
ccccggcgcccgagccggg

SEQ ID NO: 221319 - RNA, 18 nt, Human
cccuaaagcccugguccc

SEQ ID NO: 221320 - RNA, 21 nt, Human
cccucauaaggcuguccucuc

SEQ ID NO: 221321 - RNA, 23 nt, Human
cccucgcccagccaggggcugcc

SEQ ID NO: 221322 - RNA, 19 nt, Human
ccgcagcugcagcggcucg

SEQ ID NO: 221323 - RNA, 18 nt, Human
ccgccgcagcugcagcgg

SEQ ID NO: 221324 - RNA, 23 nt, Human
ccuaaaucaaacucccaggaagc

SEQ ID NO: 221325 - RNA, 26 nt, Human
ccuccaagugguaaaguuugauuuca

SEQ ID NO: 221326 - RNA, 21 nt, Human
ccuccagccgcuccggacccc

SEQ ID NO: 221327 - RNA, 20 nt, Human
ccuccuccggcucggcaaag

SEQ ID NO: 221328 - RNA, 18 nt, Human
ccugcggggcucggccuc

SEQ ID NO: 221329 - RNA, 18 nt, Human
ccugcggggcucggccuc

SEQ ID NO: 221330 - RNA, 22 nt, Human
ccuugagaccccggcucccgga

SEQ ID NO: 221331 - RNA, 22 nt, Human
cgagccggggacccaccucccc

SEQ ID NO: 221332 - RNA, 25 nt, Human
cgccacagccgccaccuccucccua

SEQ ID NO: 221333 - RNA, 19 nt, Human
cgccacuaggacggcgccc

SEQ ID NO: 221334 - RNA, 18 nt, Human
cgcgccgcaggccucgca

SEQ ID NO: 221335 - RNA, 22 nt, Human
cgcucugcccuuccuucccaac

SEQ ID NO: 221336 - RNA, 18 nt, Human
cgcugccgccgccgcagc

SEQ ID NO: 221337 - RNA, 21 nt, Human
cggugccuugagaccccggcu

SEQ ID NO: 221338 - RNA, 22 nt, Human
cuaaaccacauauuucaugccc

SEQ ID NO: 221339 - RNA, 19 nt, Human
cuaaagcccuggucccugc

SEQ ID NO: 221340 - RNA, 20 nt, Human
cuaaauguagaccgaacacc

SEQ ID NO: 221341 - RNA, 19 nt, Human
cuccaguucuucugcucag

SEQ ID NO: 221342 - RNA, 19 nt, Human
cucccggacgcagaggucc

SEQ ID NO: 221343 - RNA, 20 nt, Human
cuccgcucugcccuuccuuc

SEQ ID NO: 221344 - RNA, 20 nt, Human
cuccuggcucugugguuccc

SEQ ID NO: 221345 - RNA, 20 nt, Human
cuccuggcucugugguuccc

SEQ ID NO: 221346 - RNA, 18 nt, Human
cucuaauuccauccaagu

SEQ ID NO: 221347 - RNA, 20 nt, Human
cucuccaagugacguggcag

SEQ ID NO: 221348 - RNA, 18 nt, Human
cucugcccuuccuuccca

SEQ ID NO: 221349 - RNA, 22 nt, Human
cucugugguucccuuucuccag

SEQ ID NO: 221350 - RNA, 21 nt, Human
cucuuagagugaggcuguugg

SEQ ID NO: 221351 - RNA, 20 nt, Human
cugcaggcccugccugcaug

SEQ ID NO: 221352 - RNA, 23 nt, Human
cugcccccucccaccccacuccc

SEQ ID NO: 221353 - RNA, 20 nt, Human
cuggcucugugguucccuuu

SEQ ID NO: 221354 - RNA, 28 nt, Human
cugugguucccuuucuccaguucuucug

SEQ ID NO: 221355 - RNA, 19 nt, Human
cuucccaguucuccacugc

SEQ ID NO: 221356 - RNA, 21 nt, Human
cuucgcugccgccgccgcagc

SEQ ID NO: 221357 - RNA, 22 nt, Human
gacagaagcugggcaugauugg

SEQ ID NO: 221358 - RNA, 24 nt, Human
gagaaaaggcugccaucugcaaca

SEQ ID NO: 221359 - RNA, 24 nt, Human
gcagcugcagcggcucggcucucc

SEQ ID NO: 221360 - RNA, 23 nt, Human
gccccgccugcugcccccuccca

SEQ ID NO: 221361 - RNA, 19 nt, Human
gcccuaaagcccugguccc

SEQ ID NO: 221362 - RNA, 22 nt, Human
gccugcugcccccucccacccc

SEQ ID NO: 221363 - RNA, 19 nt, Human
gcgcuccuccagccgcucc

SEQ ID NO: 221364 - RNA, 22 nt, Human
gcucugcccuuccuucccaaca

SEQ ID NO: 221365 - RNA, 21 nt, Human
ggcacccgcuccccagcuccc

SEQ ID NO: 221366 - RNA, 20 nt, Human
ggcagguggauagauggcag

SEQ ID NO: 221367 - RNA, 22 nt, Human
ggcgcccgagccggggacccac

SEQ ID NO: 221368 - RNA, 19 nt, Human
ggcucugugguucccuuuc

SEQ ID NO: 221369 - RNA, 22 nt, Human
gggaaaaugaaggagaaaaggc

SEQ ID NO: 221370 - RNA, 24 nt, Human
gggaagaaacccaugcugccaucc

SEQ ID NO: 221371 - RNA, 23 nt, Human
gggcuggguccggccaaggucgc

SEQ ID NO: 221372 - RNA, 23 nt, Human
gggucuggggaggugaccugggc

SEQ ID NO: 221373 - RNA, 20 nt, Human
gugcgcuccccgccacuagg

SEQ ID NO: 221374 - RNA, 18 nt, Human
gugguucccuuucuccag

SEQ ID NO: 221375 - RNA, 24 nt, Human
uaacagcaaguugaguacugcuuc

SEQ ID NO: 221376 - RNA, 18 nt, Human
uaaggagggagcgaagac

SEQ ID NO: 221377 - RNA, 20 nt, Human
uaaggagggagcgaagacuc

SEQ ID NO: 221378 - RNA, 18 nt, Human
uagcaauguccccagcuu

SEQ ID NO: 221379 - RNA, 25 nt, Human
ucaaacucccaggaagccggguguc

SEQ ID NO: 221380 - RNA, 21 nt, Human
ucaacagcaauccuaaaucaa

SEQ ID NO: 221381 - RNA, 20 nt, Human
ucacaccccucgcccagcca

SEQ ID NO: 221382 - RNA, 21 nt, Human
ucaggggaucagaguggggag

SEQ ID NO: 221383 - RNA, 21 nt, Human
ucauauaaauguauaucucau

SEQ ID NO: 221384 - RNA, 18 nt, Human
ucccaacacacacucucc

SEQ ID NO: 221385 - RNA, 22 nt, Human
uccccagcuucccagacauucc

SEQ ID NO: 221386 - RNA, 19 nt, Human
ucccugcaaggcugggucu

SEQ ID NO: 221387 - RNA, 19 nt, Human
uccgcucugcccuuccuuc

SEQ ID NO: 221388 - RNA, 19 nt, Human
uccuggcucugugguuccc

SEQ ID NO: 221389 - RNA, 24 nt, Human
ucgcagaggcccggggcugccccg

SEQ ID NO: 221390 - RNA, 19 nt, Human
ucgcccagccaggggcugc

SEQ ID NO: 221391 - RNA, 23 nt, Human
ucugcaacacgauuccucugccc

SEQ ID NO: 221392 - RNA, 21 nt, Human
ucugcccuuccuucccaacac

SEQ ID NO: 221393 - RNA, 18 nt, Human
ucugcgcuucccguuacc

SEQ ID NO: 221394 - RNA, 22 nt, Human
ugacccaaagcaaagaacacua

SEQ ID NO: 221395 - RNA, 24 nt, Human
ugagaaaacaguaucuguuuaagu

SEQ ID NO: 221396 - RNA, 18 nt, Human
ugagaaacaaaaggggag

SEQ ID NO: 221397 - RNA, 19 nt, Human
ugagaaacaaaaggggagg

SEQ ID NO: 221398 - RNA, 22 nt, Human
ugaguaguggaaaugagaagga

SEQ ID NO: 221399 - RNA, 26 nt, Human
ugcccggaaccggcacacaggcgcgu

SEQ ID NO: 221400 - RNA, 21 nt, Human
ugcucuucgagagauaauuuu

SEQ ID NO: 221401 - RNA, 22 nt, Human
uggaauaacagcaaguugagua

SEQ ID NO: 221402 - RNA, 20 nt, Human
uggaauuucaaaaaugucac

SEQ ID NO: 221403 - RNA, 22 nt, Human
uggcagucacagaagccacacu

SEQ ID NO: 221404 - RNA, 18 nt, Human
uggcaguggucucacaau

SEQ ID NO: 221405 - RNA, 21 nt, Human
ugggaagaaacccaugcugcc

SEQ ID NO: 221406 - RNA, 22 nt, Human
uggggagaacuaaauguagacc

SEQ ID NO: 221407 - RNA, 21 nt, Human
uggguccggccaaggucgcgg

SEQ ID NO: 221408 - RNA, 24 nt, Human
uggguccgugagcccuaaagcccu

SEQ ID NO: 221409 - RNA, 18 nt, Human
ugguccuggacuaacccc

SEQ ID NO: 221410 - RNA, 21 nt, Human
uguagaccgaacaccagugcc

SEQ ID NO: 221411 - RNA, 21 nt, Human
uguuacugagaaacaaaaggg

SEQ ID NO: 221412 - RNA, 18 nt, Human
uuagagcuggcagucaca

SEQ ID NO: 221413 - RNA, 22 nt, Human
uucagaacugcacccaaaagau

SEQ ID NO: 221414 - RNA, 25 nt, Human
uuccuugacauuuuugaaauuccag

SEQ ID NO: 221415 - RNA, 23 nt, Human
uucgcugccgccgccgcagcugc

SEQ ID NO: 221416 - RNA, 18 nt, Human
uugacucugcucagacau

SEQ ID NO: 221417 - RNA, 18 nt, Human
aaaauagcccggcagggc

SEQ ID NO: 221418 - RNA, 19 nt, Human
aaagugcugggguuacagg

SEQ ID NO: 221419 - RNA, 24 nt, Human
aaagugcugggguuacaggcauga

SEQ ID NO: 221420 - RNA, 23 nt, Human
aacacugaccuaggaaacucaca

SEQ ID NO: 221421 - RNA, 25 nt, Human
aacccaauccccuccccccagccuu

SEQ ID NO: 221422 - RNA, 19 nt, Human
aaccuagcucuuccuaaac

SEQ ID NO: 221423 - RNA, 19 nt, Human
aacucaacucgcuguggcc

SEQ ID NO: 221424 - RNA, 23 nt, Human
aagcccaacagaacccuacaaga

SEQ ID NO: 221425 - RNA, 21 nt, Human
aagugcugggguuacaggcau

SEQ ID NO: 221426 - RNA, 26 nt, Human
aagugcugggguuacaggcaugagcc

SEQ ID NO: 221427 - RNA, 19 nt, Human
acaaaaugauacgaccaaa

SEQ ID NO: 221428 - RNA, 20 nt, Human
acacaacccaagacccaaca

SEQ ID NO: 221429 - RNA, 19 nt, Human
acacaccucuacacaguua

SEQ ID NO: 221430 - RNA, 21 nt, Human
acaccucccagagcccucgcc

SEQ ID NO: 221431 - RNA, 22 nt, Human
acagaaccuaaaauaacaugcc

SEQ ID NO: 221432 - RNA, 24 nt, Human
acagagugaggcccccagccuguc

SEQ ID NO: 221433 - RNA, 22 nt, Human
acagaguguugcucugcugccc

SEQ ID NO: 221434 - RNA, 19 nt, Human
acaugugaagcagacagac

SEQ ID NO: 221435 - RNA, 21 nt, Human
accaaaccacagaauccuaca

SEQ ID NO: 221436 - RNA, 21 nt, Human
accaaacccaacacugaccua

SEQ ID NO: 221437 - RNA, 27 nt, Human
accaaacccaacacugaccuaggaaac

SEQ ID NO: 221438 - RNA, 27 nt, Human
accacacuaucccagacucacaaccca

SEQ ID NO: 221439 - RNA, 24 nt, Human
accauguugcccaggcuggucuug

SEQ ID NO: 221440 - RNA, 25 nt, Human
accauguugcccaggcuggucuuga

SEQ ID NO: 221441 - RNA, 21 nt, Human
acccaacaagacucaguguuu

SEQ ID NO: 221442 - RNA, 21 nt, Human
acccauugccauucgcugcug

SEQ ID NO: 221443 - RNA, 24 nt, Human
acccggcuaauuuuuuuguauuuu

SEQ ID NO: 221444 - RNA, 24 nt, Human
acccugcccucccucccucccucu

SEQ ID NO: 221445 - RNA, 18 nt, Human
acgggguuucaccguguu

SEQ ID NO: 221446 - RNA, 19 nt, Human
acgggguuucaccguguua

SEQ ID NO: 221447 - RNA, 20 nt, Human
acgggguuucaccguguuag

SEQ ID NO: 221448 - RNA, 24 nt, Human
acgggguuucaccguguuagccag

SEQ ID NO: 221449 - RNA, 20 nt, Human
acuaaaugcaaaacagcccg

SEQ ID NO: 221450 - RNA, 21 nt, Human
acugcaagcuccgccucccag

SEQ ID NO: 221451 - RNA, 24 nt, Human
agagugcugagauuacaggcaugg

SEQ ID NO: 221452 - RNA, 25 nt, Human
agagugcugagauuacaggcauggg

SEQ ID NO: 221453 - RNA, 19 nt, Human
agauuacaggcaugggcca

SEQ ID NO: 221454 - RNA, 21 nt, Human
agauuacaggcaugggccacu

SEQ ID NO: 221455 - RNA, 24 nt, Human
agcauccaccucuuccuaauuuac

SEQ ID NO: 221456 - RNA, 20 nt, Human
agcugcagggaggguaggug

SEQ ID NO: 221457 - RNA, 25 nt, Human
aggaaacucacaaaaugauacgacc

SEQ ID NO: 221458 - RNA, 18 nt, Human
aggagcuaccaaaccaca

SEQ ID NO: 221459 - RNA, 22 nt, Human
aggauuguucugugauucuaug

SEQ ID NO: 221460 - RNA, 25 nt, Human
aggcuggagugcaguggcgcaaucu

SEQ ID NO: 221461 - RNA, 20 nt, Human
aguagagacgggguuucacc

SEQ ID NO: 221462 - RNA, 21 nt, Human
aguagagacgggguuucaccg

SEQ ID NO: 221463 - RNA, 18 nt, Human
aguagcugggacuacagg

SEQ ID NO: 221464 - RNA, 23 nt, Human
aguagcugggaucacaggcaugu

SEQ ID NO: 221465 - RNA, 20 nt, Human
agugcaguggcgcaaucucg

SEQ ID NO: 221466 - RNA, 24 nt, Human
agugcaguggcgcaaucucggcuc

SEQ ID NO: 221467 - RNA, 20 nt, Human
agugcaguggugcaaucaug

SEQ ID NO: 221468 - RNA, 23 nt, Human
agugcaguggugcaaucauggcu

SEQ ID NO: 221469 - RNA, 24 nt, Human
agugcaguggugcaaucauggcuc

SEQ ID NO: 221470 - RNA, 21 nt, Human
agugcugagauuacaggcaug

SEQ ID NO: 221471 - RNA, 18 nt, Human
auggggucucaccauguu

SEQ ID NO: 221472 - RNA, 24 nt, Human
auggggucucaccauguugcccag

SEQ ID NO: 221473 - RNA, 21 nt, Human
auucuccugccucagccuccc

SEQ ID NO: 221474 - RNA, 27 nt, Human
caaaccuaucucaacacuaccccaaaa

SEQ ID NO: 221475 - RNA, 24 nt, Human
caaagugcugggguuacaggcaug

SEQ ID NO: 221476 - RNA, 20 nt, Human
caacacuaccccaaaaggcu

SEQ ID NO: 221477 - RNA, 22 nt, Human
caacacuaccccaaaaggcucc

SEQ ID NO: 221478 - RNA, 24 nt, Human
caacacuaccccaaaaggcuccau

SEQ ID NO: 221479 - RNA, 29 nt, Human
caacagaacccuacaagauucauuugguu

SEQ ID NO: 221480 - RNA, 27 nt, Human
caaccaaacccaacacugaccuaggaa

SEQ ID NO: 221481 - RNA, 18 nt, Human
caacccaagacccaacaa

SEQ ID NO: 221482 - RNA, 22 nt, Human
caagggaucuuucugccucagc

SEQ ID NO: 221483 - RNA, 18 nt, Human
cacaacccaaccaaaccc

SEQ ID NO: 221484 - RNA, 18 nt, Human
cacaacccaagacccaac

SEQ ID NO: 221485 - RNA, 21 nt, Human
cacaacccaagacccaacaag

SEQ ID NO: 221486 - RNA, 24 nt, Human
cacaggcaugugccaccacacuca

SEQ ID NO: 221487 - RNA, 23 nt, Human
cacaguuaagcccaacagaaccc

SEQ ID NO: 221488 - RNA, 19 nt, Human
caccacacacauucgaucu

SEQ ID NO: 221489 - RNA, 24 nt, Human
caccacacucagcuaauuuuugua

SEQ ID NO: 221490 - RNA, 23 nt, Human
caccauguugcccaggcuggucu

SEQ ID NO: 221491 - RNA, 24 nt, Human
caccauguugcccaggcuggucuu

SEQ ID NO: 221492 - RNA, 27 nt, Human
caccauguugcccaggcuggucuugaa

SEQ ID NO: 221493 - RNA, 22 nt, Human
cacccaaucccauggauacaga

SEQ ID NO: 221494 - RNA, 22 nt, Human
cacccugcccucccucccuccc

SEQ ID NO: 221495 - RNA, 18 nt, Human
caccguguuagccaggau

SEQ ID NO: 221496 - RNA, 22 nt, Human
caccguguuagccaggaugguc

SEQ ID NO: 221497 - RNA, 24 nt, Human
caccucggccucccaaagugcugg

SEQ ID NO: 221498 - RNA, 23 nt, Human
caccucuacacaguuaagcccaa

SEQ ID NO: 221499 - RNA, 19 nt, Human
caccucuuccuuuuucugg

SEQ ID NO: 221500 - RNA, 21 nt, Human
cagaauccagucccgcccccu

SEQ ID NO: 221501 - RNA, 24 nt, Human
cagagugcugagauuacaggcaug

SEQ ID NO: 221502 - RNA, 23 nt, Human
cagccacacaccucuacacaguu

SEQ ID NO: 221503 - RNA, 23 nt, Human
cagccuucuuccucuaaaugccc

SEQ ID NO: 221504 - RNA, 19 nt, Human
cagcgagcuggggagccag

SEQ ID NO: 221505 - RNA, 20 nt, Human
cagcuuccugaguagcuggg

SEQ ID NO: 221506 - RNA, 24 nt, Human
caggugcccgccaccgcacccggc

SEQ ID NO: 221507 - RNA, 22 nt, Human
caugccauucuccugccucagc

SEQ ID NO: 221508 - RNA, 20 nt, Human
cauguugcccaggcuggucu

SEQ ID NO: 221509 - RNA, 24 nt, Human
cauguugcccaggcuggucuugaa

SEQ ID NO: 221510 - RNA, 23 nt, Human
ccaaacccaacacugaccuagga

SEQ ID NO: 221511 - RNA, 23 nt, Human
ccaaagugcugggguuacaggca

SEQ ID NO: 221512 - RNA, 24 nt, Human
ccaaagugcugggguuacaggcau

SEQ ID NO: 221513 - RNA, 20 nt, Human
ccaccacacucagcuaauuu

SEQ ID NO: 221514 - RNA, 23 nt, Human
ccaccucuuccuuuuucuggguc

SEQ ID NO: 221515 - RNA, 24 nt, Human
ccaccucuuccuuuuucugggucu

SEQ ID NO: 221516 - RNA, 23 nt, Human
ccagagcccucgccacugcaugc

SEQ ID NO: 221517 - RNA, 23 nt, Human
ccagagugcugagauuacaggca

SEQ ID NO: 221518 - RNA, 24 nt, Human
ccagagugcugagauuacaggcau

SEQ ID NO: 221519 - RNA, 23 nt, Human
ccagcaggcugauggggacaugu

SEQ ID NO: 221520 - RNA, 22 nt, Human
ccagccuugcccuccacccugc

SEQ ID NO: 221521 - RNA, 24 nt, Human
cccaaagugcugggguuacaggca

SEQ ID NO: 221522 - RNA, 21 nt, Human
cccaagacccaacaagacuca

SEQ ID NO: 221523 - RNA, 20 nt, Human
cccagguucaugccauucuc

SEQ ID NO: 221524 - RNA, 31 nt, Human
cccccagccugucugacagccuuccugagcc

SEQ ID NO: 221525 - RNA, 23 nt, Human
ccccccagccuugcccuccaccc

SEQ ID NO: 221526 - RNA, 21 nt, Human
ccccgccgccgccgccgcccg

SEQ ID NO: 221527 - RNA, 27 nt, Human
ccccgccgccgccgccgcccgcgccug

SEQ ID NO: 221528 - RNA, 27 nt, Human
ccccuggaaaacagagugaggccccca

SEQ ID NO: 221529 - RNA, 20 nt, Human
ccccuuucucuccguccuuc

SEQ ID NO: 221530 - RNA, 24 nt, Human
cccgacgcccggccccggugcggc

SEQ ID NO: 221531 - RNA, 23 nt, Human
cccgaguagcugggacuacaggu

SEQ ID NO: 221532 - RNA, 24 nt, Human
cccgaguagcugggacuacaggug

SEQ ID NO: 221533 - RNA, 19 nt, Human
cccgugugucccagcaggc

SEQ ID NO: 221534 - RNA, 24 nt, Human
cccucuguugcccaggcuggagug

SEQ ID NO: 221535 - RNA, 21 nt, Human
cccugagucucuguuucucuc

SEQ ID NO: 221536 - RNA, 19 nt, Human
cccuggggacaagcuguga

SEQ ID NO: 221537 - RNA, 19 nt, Human
cccuuguggcucugaccuc

SEQ ID NO: 221538 - RNA, 19 nt, Human
ccgccgcccgcgccugcuc

SEQ ID NO: 221539 - RNA, 21 nt, Human
ccgccgcccgcgccugcucug

SEQ ID NO: 221540 - RNA, 18 nt, Human
ccgccgccgccccagccc

SEQ ID NO: 221541 - RNA, 20 nt, Human
ccgccgccgcccgcgccugc

SEQ ID NO: 221542 - RNA, 20 nt, Human
ccgccgccgcccgcgccugc

SEQ ID NO: 221543 - RNA, 20 nt, Human
ccgccgccgcccgcgccugc

SEQ ID NO: 221544 - RNA, 22 nt, Human
ccgccgccgcccgcgccugcuc

SEQ ID NO: 221545 - RNA, 23 nt, Human
ccgccgccgccgccccagcccgg

SEQ ID NO: 221546 - RNA, 19 nt, Human
ccgccgccgccgcccgcgc

SEQ ID NO: 221547 - RNA, 21 nt, Human
ccgccgccgccgccgccccag

SEQ ID NO: 221548 - RNA, 23 nt, Human
ccgccgccgccgccgccccagcc

SEQ ID NO: 221549 - RNA, 22 nt, Human
ccgccucggccgccucggccgc

SEQ ID NO: 221550 - RNA, 24 nt, Human
ccgcgccugcucugcgccuuuccc

SEQ ID NO: 221551 - RNA, 21 nt, Human
ccgggacgcccgcccugcccu

SEQ ID NO: 221552 - RNA, 19 nt, Human
ccgguguccgguguccgcg

SEQ ID NO: 221553 - RNA, 18 nt, Human
ccgucccgggguccccuu

SEQ ID NO: 221554 - RNA, 19 nt, Human
ccucaaucaaucccccuuc

SEQ ID NO: 221555 - RNA, 19 nt, Human
ccucccagagcccucgccu

SEQ ID NO: 221556 - RNA, 24 nt, Human
ccucggucucccagagugcugaga

SEQ ID NO: 221557 - RNA, 22 nt, Human
ccucuaaaugcccuuugaguuc

SEQ ID NO: 221558 - RNA, 22 nt, Human
ccucuggaugaacacccaaucc

SEQ ID NO: 221559 - RNA, 24 nt, Human
ccucugggucucugucccucccuc

SEQ ID NO: 221560 - RNA, 25 nt, Human
ccucuguugcccaggcuggagugca

SEQ ID NO: 221561 - RNA, 19 nt, Human
ccugaguagcugggaucac

SEQ ID NO: 221562 - RNA, 25 nt, Human
ccugccccgccgccgccgccgcccc

SEQ ID NO: 221563 - RNA, 23 nt, Human
ccugccucagccucccgaguagc

SEQ ID NO: 221564 - RNA, 18 nt, Human
ccugcucuuggucucugu

SEQ ID NO: 221565 - RNA, 18 nt, Human
ccuggugcuaccacuaaa

SEQ ID NO: 221566 - RNA, 23 nt, Human
ccuugcccuccacccugcccucc

SEQ ID NO: 221567 - RNA, 19 nt, Human
ccuugggaagccacucccc

SEQ ID NO: 221568 - RNA, 22 nt, Human
ccuuggguaacaccugcugcuc

SEQ ID NO: 221569 - RNA, 20 nt, Human
ccuuuggguccuggugcuac

SEQ ID NO: 221570 - RNA, 19 nt, Human
cgcccggccccggugcggc

SEQ ID NO: 221571 - RNA, 19 nt, Human
cggcuucuauccccugcuc

SEQ ID NO: 221572 - RNA, 24 nt, Human
cgggggcucccucuguugcccagg

SEQ ID NO: 221573 - RNA, 19 nt, Human
cuagggcgcgagggagggg

SEQ ID NO: 221574 - RNA, 24 nt, Human
cucagccucccgaguagcugggac

SEQ ID NO: 221575 - RNA, 24 nt, Human
cucagcuuccugaguagcugggau

SEQ ID NO: 221576 - RNA, 25 nt, Human
cuccaugagcuuugcacaacucaga

SEQ ID NO: 221577 - RNA, 23 nt, Human
cucccucuguugcccaggcugga

SEQ ID NO: 221578 - RNA, 24 nt, Human
cucccucuguugcccaggcuggag

SEQ ID NO: 221579 - RNA, 20 nt, Human
cuccugaccucguaauuugc

SEQ ID NO: 221580 - RNA, 27 nt, Human
cucuacacaguuaagcccaacagaacu

SEQ ID NO: 221581 - RNA, 23 nt, Human
cucuauccuuuuggcucuguccc

SEQ ID NO: 221582 - RNA, 21 nt, Human
cucugccauaccccacccucc

SEQ ID NO: 221583 - RNA, 19 nt, Human
cucugcugcccaggcugga

SEQ ID NO: 221584 - RNA, 23 nt, Human
cucugcugcccaggcuggagugc

SEQ ID NO: 221585 - RNA, 21 nt, Human
cucugggucucugucccuccc

SEQ ID NO: 221586 - RNA, 20 nt, Human
cucugucccucccuccccca

SEQ ID NO: 221587 - RNA, 22 nt, Human
cugaccuccaugucugagcaua

SEQ ID NO: 221588 - RNA, 23 nt, Human
cugagccucaguuuccccgucug

SEQ ID NO: 221589 - RNA, 24 nt, Human
cugcaagcuccgccucccagguuc

SEQ ID NO: 221590 - RNA, 24 nt, Human
cugcccaggcuggagugcaguggc

SEQ ID NO: 221591 - RNA, 21 nt, Human
cugccccgccgccgccgccgc

SEQ ID NO: 221592 - RNA, 29 nt, Human
cugcccugccccgccgccgccgccgcccc

SEQ ID NO: 221593 - RNA, 20 nt, Human
cugccgccgggauccugucc

SEQ ID NO: 221594 - RNA, 23 nt, Human
cugccucagccucccgaguagcu

SEQ ID NO: 221595 - RNA, 19 nt, Human
cugcugcccaggcuggagu

SEQ ID NO: 221596 - RNA, 18 nt, Human
cuggaccacacuaucccg

SEQ ID NO: 221597 - RNA, 21 nt, Human
cugucccucccucccccacug

SEQ ID NO: 221598 - RNA, 22 nt, Human
cuuaacaccacacacauucgau

SEQ ID NO: 221599 - RNA, 24 nt, Human
cuuccucggucucccagagugcug

SEQ ID NO: 221600 - RNA, 20 nt, Human
cuuccuuuuucugggucucu

SEQ ID NO: 221601 - RNA, 18 nt, Human
cuuuuucugggucucuuu

SEQ ID NO: 221602 - RNA, 22 nt, Human
gaccucguaauuugcccaccuc

SEQ ID NO: 221603 - RNA, 20 nt, Human
gacucaguguuuccccacuc

SEQ ID NO: 221604 - RNA, 24 nt, Human
gagacgggguuucaccguguuagc

SEQ ID NO: 221605 - RNA, 21 nt, Human
gagccucaguuuccccgucug

SEQ ID NO: 221606 - RNA, 23 nt, Human
gagcuaccaaaccacacaaccca

SEQ ID NO: 221607 - RNA, 18 nt, Human
gagcuggggagccagcuc

SEQ ID NO: 221608 - RNA, 25 nt, Human
gaguagcugggaucacaggcaugug

SEQ ID NO: 221609 - RNA, 19 nt, Human
gaugugggguaaacaggag

SEQ ID NO: 221610 - RNA, 18 nt, Human
gauuacaggcaugggcca

SEQ ID NO: 221611 - RNA, 24 nt, Human
gauuacaggcaugggccacuucgc

SEQ ID NO: 221612 - RNA, 23 nt, Human
gcaaaacagcccgauguggcccu

SEQ ID NO: 221613 - RNA, 23 nt, Human
gcaaaacagcccgauguggcccu

SEQ ID NO: 221614 - RNA, 19 nt, Human
gcccaggcuggagugcagu

SEQ ID NO: 221615 - RNA, 19 nt, Human
gcccgcccugcccugcccc

SEQ ID NO: 221616 - RNA, 23 nt, Human
gcccugccccgccgccgccgccg

SEQ ID NO: 221617 - RNA, 22 nt, Human
gccgcccgcgccugcucugcgc

SEQ ID NO: 221618 - RNA, 25 nt, Human
gccgccucggccgccgccgccgccg

SEQ ID NO: 221619 - RNA, 24 nt, Human
gccucagcuuccugaguagcuggg

SEQ ID NO: 221620 - RNA, 25 nt, Human
gccucccagguucaugccauucucc

SEQ ID NO: 221621 - RNA, 21 nt, Human
gcucaaugcagccucuaccuc

SEQ ID NO: 221622 - RNA, 24 nt, Human
gcucccucuguugcccaggcugga

SEQ ID NO: 221623 - RNA, 19 nt, Human
gcucugcugcccaggcugg

SEQ ID NO: 221624 - RNA, 20 nt, Human
gcucugcugcccaggcugga

SEQ ID NO: 221625 - RNA, 19 nt, Human
gcuggagugcaguggcgca

SEQ ID NO: 221626 - RNA, 23 nt, Human
gcuggucuugaacuccuggccuc

SEQ ID NO: 221627 - RNA, 18 nt, Human
ggaaaacagagugaggcc

SEQ ID NO: 221628 - RNA, 20 nt, Human
ggaacucaauucagcauggc

SEQ ID NO: 221629 - RNA, 22 nt, Human
ggaucuuucugccucagcuucc

SEQ ID NO: 221630 - RNA, 18 nt, Human
ggcgacccgcgaaccgac

SEQ ID NO: 221631 - RNA, 24 nt, Human
ggcuggucuugaacuccuggccuc

SEQ ID NO: 221632 - RNA, 18 nt, Human
gggacccaccaaaccaca

SEQ ID NO: 221633 - RNA, 19 nt, Human
gggaggguaggugacaggc

SEQ ID NO: 221634 - RNA, 24 nt, Human
gggaucuuucugccucagcuuccu

SEQ ID NO: 221635 - RNA, 22 nt, Human
ggggcucccucuguugcccagg

SEQ ID NO: 221636 - RNA, 22 nt, Human
ggggucucaccauguugcccag

SEQ ID NO: 221637 - RNA, 23 nt, Human
gggguuucaccguguuagccagg

SEQ ID NO: 221638 - RNA, 22 nt, Human
gggucucaccauguugcccagg

SEQ ID NO: 221639 - RNA, 23 nt, Human
gggucucugucucucuggguuuc

SEQ ID NO: 221640 - RNA, 22 nt, Human
ggguuacaggcaugagccaccg

SEQ ID NO: 221641 - RNA, 22 nt, Human
ggguuucaccguguuagccagg

SEQ ID NO: 221642 - RNA, 20 nt, Human
ggucuggaucuccugaccuc

SEQ ID NO: 221643 - RNA, 22 nt, Human
gguuacaggcaugagccaccgc

SEQ ID NO: 221644 - RNA, 24 nt, Human
guaauuugcccaccucggccuccc

SEQ ID NO: 221645 - RNA, 23 nt, Human
guagagacgggguuucaccgugu

SEQ ID NO: 221646 - RNA, 21 nt, Human
guagagauggggucucaccau

SEQ ID NO: 221647 - RNA, 22 nt, Human
guagagauggggucucaccaug

SEQ ID NO: 221648 - RNA, 19 nt, Human
guauuuuuuguagagaugg

SEQ ID NO: 221649 - RNA, 19 nt, Human
guccccuuucucuccgucc

SEQ ID NO: 221650 - RNA, 19 nt, Human
gucccucuaucaugucugg

SEQ ID NO: 221651 - RNA, 25 nt, Human
guuuucucccccucuccccuuuccc

SEQ ID NO: 221652 - RNA, 24 nt, Human
uaaacaggaggagcauccaccucu

SEQ ID NO: 221653 - RNA, 23 nt, Human
uaacacaacacaacccauugcca

SEQ ID NO: 221654 - RNA, 21 nt, Human
uaacaugccccuggaagaauc

SEQ ID NO: 221655 - RNA, 20 nt, Human
uaacccaaugugaccuagaa

SEQ ID NO: 221656 - RNA, 18 nt, Human
uaaccuagcucuuccuaa

SEQ ID NO: 221657 - RNA, 22 nt, Human
uaauuuuuguauuuuuuguaga

SEQ ID NO: 221658 - RNA, 24 nt, Human
uaauuuuuguauuuuuuguagaga

SEQ ID NO: 221659 - RNA, 26 nt, Human
uaauuuuuuuguauuuuuaguagaga

SEQ ID NO: 221660 - RNA, 25 nt, Human
uacaagauucauuuggucauacaaa

SEQ ID NO: 221661 - RNA, 21 nt, Human
uacacaguuaagcccaacaga

SEQ ID NO: 221662 - RNA, 23 nt, Human
uacaggcaugagccaccgcgccc

SEQ ID NO: 221663 - RNA, 26 nt, Human
uaccaaaccacacaacccaagaccca

SEQ ID NO: 221664 - RNA, 27 nt, Human
uaccaaaccacacaacccaagacccaa

SEQ ID NO: 221665 - RNA, 22 nt, Human
uagagauggggucucaccaugu

SEQ ID NO: 221666 - RNA, 21 nt, Human
uaguagagacgggguuucacc

SEQ ID NO: 221667 - RNA, 24 nt, Human
uaguagagacgggguuucaccgug

SEQ ID NO: 221668 - RNA, 26 nt, Human
uaguagagacgggguuucaccguguu

SEQ ID NO: 221669 - RNA, 19 nt, Human
ucaauggaacucaauucag

SEQ ID NO: 221670 - RNA, 24 nt, Human
ucaccguguuagccaggauggucu

SEQ ID NO: 221671 - RNA, 18 nt, Human
ucacugcaagcuccgccu

SEQ ID NO: 221672 - RNA, 19 nt, Human
ucacugcaagcuccgccuc

SEQ ID NO: 221673 - RNA, 19 nt, Human
ucacugcaagcuccgccuc

SEQ ID NO: 221674 - RNA, 24 nt, Human
ucacugcaagcuccgccucccagg

SEQ ID NO: 221675 - RNA, 23 nt, Human
ucagccucccgaguagcugggac

SEQ ID NO: 221676 - RNA, 20 nt, Human
ucagcuuccugaguagcugg

SEQ ID NO: 221677 - RNA, 20 nt, Human
ucaggauuguucugugauuc

SEQ ID NO: 221678 - RNA, 24 nt, Human
ucccaaagugcugggguuacaggc

SEQ ID NO: 221679 - RNA, 24 nt, Human
ucccagagugcugagauuacaggc

SEQ ID NO: 221680 - RNA, 20 nt, Human
ucccagguucaugccauucu

SEQ ID NO: 221681 - RNA, 21 nt, Human
ucccagguucaugccauucuc

SEQ ID NO: 221682 - RNA, 24 nt, Human
ucccagguucaugccauucuccug

SEQ ID NO: 221683 - RNA, 18 nt, Human
uccccacucuggauuucu

SEQ ID NO: 221684 - RNA, 21 nt, Human
ucccccuuccucggucuccca

SEQ ID NO: 221685 - RNA, 25 nt, Human
uccccuccccccagccuugcccucc

SEQ ID NO: 221686 - RNA, 18 nt, Human
uccccuuucucuccgucc

SEQ ID NO: 221687 - RNA, 23 nt, Human
ucccgaguagcugggacuacagg

SEQ ID NO: 221688 - RNA, 24 nt, Human
ucccgaguagcugggacuacaggu

SEQ ID NO: 221689 - RNA, 20 nt, Human
ucccucuguugcccaggcug

SEQ ID NO: 221690 - RNA, 22 nt, Human
ucccucuguugcccaggcugga

SEQ ID NO: 221691 - RNA, 24 nt, Human
ucccucuguugcccaggcuggagu

SEQ ID NO: 221692 - RNA, 18 nt, Human
ucccugagacucuguugu

SEQ ID NO: 221693 - RNA, 18 nt, Human
uccuaauuuacccagucg

SEQ ID NO: 221694 - RNA, 22 nt, Human
uccuacacaaugcagcuggacc

SEQ ID NO: 221695 - RNA, 24 nt, Human
uccugaguagcugggaucacaggc

SEQ ID NO: 221696 - RNA, 18 nt, Human
uccuuuuggcucuguccc

SEQ ID NO: 221697 - RNA, 23 nt, Human
ucgaucucaacaaugccaugggg

SEQ ID NO: 221698 - RNA, 20 nt, Human
ucgccucuggaugaacaccc

SEQ ID NO: 221699 - RNA, 18 nt, Human
ucggccucccaaagugcu

SEQ ID NO: 221700 - RNA, 23 nt, Human
ucggccucccaaagugcuggggu

SEQ ID NO: 221701 - RNA, 23 nt, Human
ucucaccauguugcccaggcugg

SEQ ID NO: 221702 - RNA, 26 nt, Human
ucucaccauguugcccaggcuggucu

SEQ ID NO: 221703 - RNA, 27 nt, Human
ucucaccauguugcccaggcuggucuu

SEQ ID NO: 221704 - RNA, 19 nt, Human
ucuccccuuucccuugugg

SEQ ID NO: 221705 - RNA, 19 nt, Human
ucucccucucccugagucu

SEQ ID NO: 221706 - RNA, 24 nt, Human
ucuccugccucagccucccgagua

SEQ ID NO: 221707 - RNA, 21 nt, Human
ucucugucuccccacucugga

SEQ ID NO: 221708 - RNA, 21 nt, Human
ucucuucugcgucucugccau

SEQ ID NO: 221709 - RNA, 22 nt, Human
ucugaaaauguucggccuugug

SEQ ID NO: 221710 - RNA, 24 nt, Human
ucugccucagcuuccugaguagcu

SEQ ID NO: 221711 - RNA, 21 nt, Human
ucugcgucucugccauacccc

SEQ ID NO: 221712 - RNA, 24 nt, Human
ucugcugcccaggcuggagugcag

SEQ ID NO: 221713 - RNA, 18 nt, Human
ucuguugcccaggcugga

SEQ ID NO: 221714 - RNA, 24 nt, Human
ucuguugcccaggcuggagugcag

SEQ ID NO: 221715 - RNA, 19 nt, Human
ucuugaacuccuggccuca

SEQ ID NO: 221716 - RNA, 24 nt, Human
ucuuucugccucagcuuccugagu

SEQ ID NO: 221717 - RNA, 19 nt, Human
ugaaguggaugugggguaa

SEQ ID NO: 221718 - RNA, 23 nt, Human
ugaccucguaauuugcccaccuc

SEQ ID NO: 221719 - RNA, 22 nt, Human
ugagacgggggcucccucuguu

SEQ ID NO: 221720 - RNA, 21 nt, Human
ugagauuacaggcaugggcca

SEQ ID NO: 221721 - RNA, 22 nt, Human
ugagauuacaggcaugggccac

SEQ ID NO: 221722 - RNA, 23 nt, Human
ugagauuacaggcaugggccacu

SEQ ID NO: 221723 - RNA, 24 nt, Human
ugagauuacaggcaugggccacuu

SEQ ID NO: 221724 - RNA, 19 nt, Human
ugagcugcagggaggguag

SEQ ID NO: 221725 - RNA, 18 nt, Human
ugagcugcagggaggguc

SEQ ID NO: 221726 - RNA, 20 nt, Human
ugauggggacaugugaagca

SEQ ID NO: 221727 - RNA, 20 nt, Human
ugauuucagccuucuuccuc

SEQ ID NO: 221728 - RNA, 23 nt, Human
ugcaguggcgcaaucucggcuca

SEQ ID NO: 221729 - RNA, 23 nt, Human
ugcaguggugcaaucauggcuca

SEQ ID NO: 221730 - RNA, 21 nt, Human
ugccaugggggaccaucuaac

SEQ ID NO: 221731 - RNA, 18 nt, Human
ugcccaggcuggagugca

SEQ ID NO: 221732 - RNA, 18 nt, Human
ugcccaggcuggagugca

SEQ ID NO: 221733 - RNA, 21 nt, Human
ugcccaggcuggagugcagug

SEQ ID NO: 221734 - RNA, 21 nt, Human
ugcccaggcuggagugcagug

SEQ ID NO: 221735 - RNA, 22 nt, Human
ugcccaggcuggagugcagugg

SEQ ID NO: 221736 - RNA, 24 nt, Human
ugcccaggcuggagugcaguggcg

SEQ ID NO: 221737 - RNA, 24 nt, Human
ugcccaggcuggagugcaguggug

SEQ ID NO: 221738 - RNA, 24 nt, Human
ugcccaggcuggucuugaacuccu

SEQ ID NO: 221739 - RNA, 21 nt, Human
ugcccucugggucucuguccc

SEQ ID NO: 221740 - RNA, 24 nt, Human
ugccucagccucccgaguagcugg

SEQ ID NO: 221741 - RNA, 24 nt, Human
ugccucagcuuccugaguagcugg

SEQ ID NO: 221742 - RNA, 20 nt, Human
ugcuaccacuaaaugcaaaa

SEQ ID NO: 221743 - RNA, 22 nt, Human
ugcuaccacuaaaugcaaaaca

SEQ ID NO: 221744 - RNA, 24 nt, Human
ugcucugcugcccaggcuggagug

SEQ ID NO: 221745 - RNA, 19 nt, Human
uggaagaaucacagagcua

SEQ ID NO: 221746 - RNA, 23 nt, Human
uggagugcaguggcgcaaucucg

SEQ ID NO: 221747 - RNA, 24 nt, Human
uggagugcaguggcgcaaucucgg

SEQ ID NO: 221748 - RNA, 21 nt, Human
uggagugcaguggugcaauca

SEQ ID NO: 221749 - RNA, 24 nt, Human
uggagugcaguggugcaaucaugg

SEQ ID NO: 221750 - RNA, 23 nt, Human
uggauacagaauccagucccgcc

SEQ ID NO: 221751 - RNA, 21 nt, Human
uggaugaacacccaaucccau

SEQ ID NO: 221752 - RNA, 22 nt, Human
uggaugugggguaaacaggagg

SEQ ID NO: 221753 - RNA, 23 nt, Human
uggaugugggguaaacaggagga

SEQ ID NO: 221754 - RNA, 25 nt, Human
uggaugugggguaaacaggaggagc

SEQ ID NO: 221755 - RNA, 18 nt, Human
uggcccuaggggacccac

SEQ ID NO: 221756 - RNA, 21 nt, Human
ugggacuacaggugcccgcca

SEQ ID NO: 221757 - RNA, 22 nt, Human
ugggacuacaggugcccgccac

SEQ ID NO: 221758 - RNA, 23 nt, Human
ugggacuacaggugcccgccacc

SEQ ID NO: 221759 - RNA, 24 nt, Human
ugggacuacaggugcccgccaccg

SEQ ID NO: 221760 - RNA, 18 nt, Human
ugggaucacaggcaugug

SEQ ID NO: 221761 - RNA, 21 nt, Human
ugggaucacaggcaugugcca

SEQ ID NO: 221762 - RNA, 22 nt, Human
ugggaucacaggcaugugccac

SEQ ID NO: 221763 - RNA, 24 nt, Human
ugggaucacaggcaugugccacca

SEQ ID NO: 221764 - RNA, 19 nt, Human
uggggacaugugaagcaga

SEQ ID NO: 221765 - RNA, 24 nt, Human
uggggucucaccauguugcccagg

SEQ ID NO: 221766 - RNA, 19 nt, Human
ugggguuacaggcaugagc

SEQ ID NO: 221767 - RNA, 22 nt, Human
ugggguuacaggcaugagccac

SEQ ID NO: 221768 - RNA, 23 nt, Human
ugggguuacaggcaugagccacc

SEQ ID NO: 221769 - RNA, 24 nt, Human
ugggguuacaggcaugagccaccg

SEQ ID NO: 221770 - RNA, 20 nt, Human
uggguccuggugcuaccacu

SEQ ID NO: 221771 - RNA, 23 nt, Human
uggguccuggugcuaccacuaaa

SEQ ID NO: 221772 - RNA, 18 nt, Human
ugggucucugucucucug

SEQ ID NO: 221773 - RNA, 19 nt, Human
ugggucucuuucucuaucc

SEQ ID NO: 221774 - RNA, 21 nt, Human
uggguucaggggcaccaacuu

SEQ ID NO: 221775 - RNA, 23 nt, Human
uggguuuccaccucuuccuuuuu

SEQ ID NO: 221776 - RNA, 18 nt, Human
uguacaauucaacacaac

SEQ ID NO: 221777 - RNA, 24 nt, Human
uguagagauggggucucaccaugu

SEQ ID NO: 221778 - RNA, 21 nt, Human
uguauuuuuaguagagacggg

SEQ ID NO: 221779 - RNA, 22 nt, Human
ugucuggacagaguacaguuuu

SEQ ID NO: 221780 - RNA, 18 nt, Human
ugugggguaaacaggagg

SEQ ID NO: 221781 - RNA, 24 nt, Human
uguugcucugcugcccaggcugga

SEQ ID NO: 221782 - RNA, 20 nt, Human
uuacaggcaugagccaccgc

SEQ ID NO: 221783 - RNA, 18 nt, Human
uuaguagagacgggguuu

SEQ ID NO: 221784 - RNA, 22 nt, Human
uuaguagagacgggguuucacc

SEQ ID NO: 221785 - RNA, 24 nt, Human
uuaguagagacgggguuucaccgu

SEQ ID NO: 221786 - RNA, 19 nt, Human
uucaugccauucuccugcc

SEQ ID NO: 221787 - RNA, 19 nt, Human
uucugccuuuuucuauugu

SEQ ID NO: 221788 - RNA, 24 nt, Human
uugcccaggcuggagugcaguggu

SEQ ID NO: 221789 - RNA, 20 nt, Human
uugcucugcugcccaggcug

SEQ ID NO: 221790 - RNA, 20 nt, Human
uugcucugcugcccaggcug

SEQ ID NO: 221791 - RNA, 21 nt, Human
uugcucugcugcccaggcugg

SEQ ID NO: 221792 - RNA, 22 nt, Human
uugcucugcugcccaggcugga

SEQ ID NO: 221793 - RNA, 24 nt, Human
uuggguucaggggcaccaacuuuu

SEQ ID NO: 221794 - RNA, 24 nt, Human
uuguagagauggggucucaccaug

SEQ ID NO: 221795 - RNA, 19 nt, Human
uuucaccguguuagccagg

SEQ ID NO: 221796 - RNA, 21 nt, Human
uuugcccaccucggccuccca

SEQ ID NO: 221797 - RNA, 22 nt, Human
uuuggguccuggugcuaccacu

SEQ ID NO: 221798 - RNA, 22 nt, Human
uuugggucucugucucucuggg

SEQ ID NO: 221799 - RNA, 18 nt, Human
uuuguagagauggggucu

SEQ ID NO: 221800 - RNA, 24 nt, Human
uuuguagagauggggucucaccau

SEQ ID NO: 221801 - RNA, 24 nt, Human
uuuuuaguagagacgggguuucac

SEQ ID NO: 221802 - RNA, 21 nt, Human
uuuuuguauuuuuaguagaga

SEQ ID NO: 221803 - RNA, 20 nt, Human
uuuuuguauuuuuuguagag

SEQ ID NO: 221804 - RNA, 23 nt, Human
uuuuuguauuuuuuguagagaug

SEQ ID NO: 221805 - RNA, 24 nt, Human
uuuuuuguagagauggggucucac

SEQ ID NO: 221806 - RNA, 21 nt, Human
uuuuuuguauuuuuaguagag

SEQ ID NO: 221807 - RNA, 24 nt, Human
uuuuuuguauuuuuaguagagacg

SEQ ID NO: 221808 - RNA, 20 nt, Human
uuuuuuuuuuugagacagag

SEQ ID NO: 221809 - RNA, 20 nt, Human
aaaaacccaaggaagcaaag

SEQ ID NO: 221810 - RNA, 23 nt, Human
aaaaauauaucuguacagccuuc

SEQ ID NO: 221811 - RNA, 22 nt, Human
aacaaaacauguuuucucucuu

SEQ ID NO: 221812 - RNA, 19 nt, Human
aagcaacaguaaauauuug

SEQ ID NO: 221813 - RNA, 18 nt, Human
aagcuaauugcacggugc

SEQ ID NO: 221814 - RNA, 19 nt, Human
aagggccacucccacacca

SEQ ID NO: 221815 - RNA, 19 nt, Human
aauggauuuucuugguugu

SEQ ID NO: 221816 - RNA, 21 nt, Human
acacaaugaacaacugaaaau

SEQ ID NO: 221817 - RNA, 24 nt, Human
agcgacagcagacaccucaaagaa

SEQ ID NO: 221818 - RNA, 22 nt, Human
agcuaaguuuccauagcagugu

SEQ ID NO: 221819 - RNA, 20 nt, Human
aguagccaauaguggcaggg

SEQ ID NO: 221820 - RNA, 21 nt, Human
auagcauuuuucacaaagcca

SEQ ID NO: 221821 - RNA, 21 nt, Human
auggaacaaaacuuguuagua

SEQ ID NO: 221822 - RNA, 29 nt, Human
cacaccacccccuucaaaaaaaaacaaag

SEQ ID NO: 221823 - RNA, 18 nt, Human
cacaguauagucucacaa

SEQ ID NO: 221824 - RNA, 22 nt, Human
caccacccccuucaaaaaaaaa

SEQ ID NO: 221825 - RNA, 22 nt, Human
cagauuuagaauuuaaccauga

SEQ ID NO: 221826 - RNA, 21 nt, Human
cagugcuaauuaaacaaugaa

SEQ ID NO: 221827 - RNA, 24 nt, Human
caugcauauaguuuagugcauaua

SEQ ID NO: 221828 - RNA, 19 nt, Human
cauuagacagcaccucagc

SEQ ID NO: 221829 - RNA, 20 nt, Human
cauuagacagcaccucagcu

SEQ ID NO: 221830 - RNA, 24 nt, Human
ccacaccacccccuucaaaaaaaa

SEQ ID NO: 221831 - RNA, 27 nt, Human
ccacaccacccccuucaaaaaaaaaca

SEQ ID NO: 221832 - RNA, 30 nt, Human
ccacaccacccccuucaaaaaaaaacaaag

SEQ ID NO: 221833 - RNA, 19 nt, Human
ccacucccacaccaccccc

SEQ ID NO: 221834 - RNA, 22 nt, Human
ccacucccacaccacccccuuc

SEQ ID NO: 221835 - RNA, 18 nt, Human
ccauuagacagcaccuca

SEQ ID NO: 221836 - RNA, 19 nt, Human
cccacaccacccccuucaa

SEQ ID NO: 221837 - RNA, 18 nt, Human
cccauauucuucccauug

SEQ ID NO: 221838 - RNA, 20 nt, Human
cccauuagacagcaccucaa

SEQ ID NO: 221839 - RNA, 22 nt, Human
cccccauauucuucccauugca

SEQ ID NO: 221840 - RNA, 18 nt, Human
cccccuucaaaaaaaaac

SEQ ID NO: 221841 - RNA, 19 nt, Human
cccuucaaaaaaaaacaaa

SEQ ID NO: 221842 - RNA, 25 nt, Human
cuaagcaaauaaaucaaucaaauca

SEQ ID NO: 221843 - RNA, 19 nt, Human
cuagcauuuucagauuuag

SEQ ID NO: 221844 - RNA, 24 nt, Human
cucaauuccuuuccuucacugaau

SEQ ID NO: 221845 - RNA, 21 nt, Human
cuccaguccaagauaagaaaa

SEQ ID NO: 221846 - RNA, 18 nt, Human
cuccucuauacauacagc

SEQ ID NO: 221847 - RNA, 23 nt, Human
cuucaaaaaaaaacaaaacaugu

SEQ ID NO: 221848 - RNA, 19 nt, Human
cuugcugugaauaccuugg

SEQ ID NO: 221849 - RNA, 21 nt, Human
gaacaccuaauugcagauaca

SEQ ID NO: 221850 - RNA, 25 nt, Human
gacacuagagguugagcagcaagcu

SEQ ID NO: 221851 - RNA, 21 nt, Human
gauaucucccacuagcauuuu

SEQ ID NO: 221852 - RNA, 21 nt, Human
gcuuuuuuuuuuuugcaguga

SEQ ID NO: 221853 - RNA, 24 nt, Human
gguaauaaagcaaauaccuagaaa

SEQ ID NO: 221854 - RNA, 20 nt, Human
guaaguggacauaacauuag

SEQ ID NO: 221855 - RNA, 18 nt, Human
guaccacacccccuggcc

SEQ ID NO: 221856 - RNA, 20 nt, Human
uaaaaaacugagcaugugua

SEQ ID NO: 221857 - RNA, 25 nt, Human
uaaaauguaguaaaaaaugaacacc

SEQ ID NO: 221858 - RNA, 21 nt, Human
uaaagcucaaauauuuaaacu

SEQ ID NO: 221859 - RNA, 21 nt, Human
uaacaaugccucaaaaauacc

SEQ ID NO: 221860 - RNA, 23 nt, Human
uaacaaugccucaaaaauaccaa

SEQ ID NO: 221861 - RNA, 21 nt, Human
uaacacgggcaaaaaauucaa

SEQ ID NO: 221862 - RNA, 21 nt, Human
uaagaaaaaucucucaauucc

SEQ ID NO: 221863 - RNA, 24 nt, Human
uaauaaagcaaauaccuagaaauu

SEQ ID NO: 221864 - RNA, 18 nt, Human
uaauaugauuauagaacc

SEQ ID NO: 221865 - RNA, 23 nt, Human
uaauugcagauacauugcauuuu

SEQ ID NO: 221866 - RNA, 19 nt, Human
uacagauauugacacagua

SEQ ID NO: 221867 - RNA, 19 nt, Human
uacagcaaugcaagaauag

SEQ ID NO: 221868 - RNA, 21 nt, Human
uacugcuuuuuuuuuuuugca

SEQ ID NO: 221869 - RNA, 22 nt, Human
uagacauucuggauaaguugua

SEQ ID NO: 221870 - RNA, 23 nt, Human
uagcgacagcagacaccucaaag

SEQ ID NO: 221871 - RNA, 24 nt, Human
uaguggcagggcuagauacaccuc

SEQ ID NO: 221872 - RNA, 25 nt, Human
uaugaaugugaaaauagaaaaaaaa

SEQ ID NO: 221873 - RNA, 23 nt, Human
uauuuuaaccaugcagcuucugu

SEQ ID NO: 221874 - RNA, 24 nt, Human
ucaaaaauaccaaacauuauauua

SEQ ID NO: 221875 - RNA, 20 nt, Human
ucacauugcaucuguggauu

SEQ ID NO: 221876 - RNA, 18 nt, Human
ucccacaccacccccuuc

SEQ ID NO: 221877 - RNA, 18 nt, Human
ucccacaccacccccuuc

SEQ ID NO: 221878 - RNA, 22 nt, Human
ucccacaccacccccuucaaaa

SEQ ID NO: 221879 - RNA, 22 nt, Human
ucuguaaaccucagagugauuu

SEQ ID NO: 221880 - RNA, 19 nt, Human
ugacauagcauuuuucaca

SEQ ID NO: 221881 - RNA, 18 nt, Human
ugaccagaaaauuaaaug

SEQ ID NO: 221882 - RNA, 22 nt, Human
ugaguuaccaaaugccugaagg

SEQ ID NO: 221883 - RNA, 19 nt, Human
ugcaaagaacuuucaugca

SEQ ID NO: 221884 - RNA, 20 nt, Human
ugccucaaaaauaccaaaca

SEQ ID NO: 221885 - RNA, 24 nt, Human
uggaacaaaacuuguuaguaugaa

SEQ ID NO: 221886 - RNA, 21 nt, Human
uggauaaguuguacaaggcca

SEQ ID NO: 221887 - RNA, 19 nt, Human
uggcccccauauucuuccc

SEQ ID NO: 221888 - RNA, 20 nt, Human
uguagcccucucuuucauaa

SEQ ID NO: 221889 - RNA, 24 nt, Human
uguggggaacuugcugaccagaaa

SEQ ID NO: 221890 - RNA, 20 nt, Human
uuaaccaugcagcuucugug

SEQ ID NO: 221891 - RNA, 22 nt, Human
uuaguaacaccuuucuguacug

SEQ ID NO: 221892 - RNA, 24 nt, Human
uuagucuaucuacucuguuucuua

SEQ ID NO: 221893 - RNA, 18 nt, Human
uuccauagcaguguagcc

SEQ ID NO: 221894 - RNA, 22 nt, Human
uuccuggguauuuuacagguuu

SEQ ID NO: 221895 - RNA, 20 nt, Human
uucgcuggauugaauacaca

SEQ ID NO: 221896 - RNA, 18 nt, Human
uucuucuguaaaccucag

SEQ ID NO: 221897 - RNA, 23 nt, Human
uugguugugaguuuucagaugug

SEQ ID NO: 221898 - RNA, 21 nt, Human
uuucuugguugugaguuuuca

SEQ ID NO: 221899 - RNA, 26 nt, Human
ccagccucacuuauccagacuugcuc

SEQ ID NO: 221900 - RNA, 20 nt, Human
cccggcgccaacucccccug

SEQ ID NO: 221901 - RNA, 18 nt, Human
cgcgccccccuccccggc

SEQ ID NO: 221902 - RNA, 23 nt, Human
cgcgccccccuccccggcgccaa

SEQ ID NO: 221903 - RNA, 18 nt, Human
cuccccggcgccaacucc

SEQ ID NO: 221904 - RNA, 19 nt, Human
ucccccuggcggccgcucc

SEQ ID NO: 221905 - RNA, 18 nt, Human
aaccuggggggaaggggc

SEQ ID NO: 221906 - RNA, 21 nt, Human
aagcccagugucuuggggaca

SEQ ID NO: 221907 - RNA, 20 nt, Human
aaggacggggucgggggugg

SEQ ID NO: 221908 - RNA, 20 nt, Human
aaggcucugagcuucugacg

SEQ ID NO: 221909 - RNA, 21 nt, Human
aagggagcugucuggacaaaa

SEQ ID NO: 221910 - RNA, 24 nt, Human
acggggucggggguggggggcggu

SEQ ID NO: 221911 - RNA, 19 nt, Human
acucaagauccagcaacag

SEQ ID NO: 221912 - RNA, 22 nt, Human
agagagcagggaggaggggcgg

SEQ ID NO: 221913 - RNA, 24 nt, Human
agagggacaucuuuaaagggucca

SEQ ID NO: 221914 - RNA, 22 nt, Human
agcagggaggaggggcggggcc

SEQ ID NO: 221915 - RNA, 18 nt, Human
agcccagugucuugggga

SEQ ID NO: 221916 - RNA, 20 nt, Human
agcgaagcuggcagugcccu

SEQ ID NO: 221917 - RNA, 24 nt, Human
aggacggggucggggguggggggc

SEQ ID NO: 221918 - RNA, 25 nt, Human
aggcaggggguggggucugcaaggg

SEQ ID NO: 221919 - RNA, 20 nt, Human
aggcggugacaagagcccgg

SEQ ID NO: 221920 - RNA, 21 nt, Human
aggcggugacaagagcccggg

SEQ ID NO: 221921 - RNA, 18 nt, Human
agggacaucuuuaaaggg

SEQ ID NO: 221922 - RNA, 21 nt, Human
agggaggaggggcggggcggg

SEQ ID NO: 221923 - RNA, 18 nt, Human
aggggguggggucugcaa

SEQ ID NO: 221924 - RNA, 19 nt, Human
aggggguggggucugcaag

SEQ ID NO: 221925 - RNA, 19 nt, Human
caagggaggcgggaccggu

SEQ ID NO: 221926 - RNA, 20 nt, Human
caagggggcugaguggagcg

SEQ ID NO: 221927 - RNA, 24 nt, Human
caggggguggggucugcaaggggg

SEQ ID NO: 221928 - RNA, 18 nt, Human
cagugggggggggguggg

SEQ ID NO: 221929 - RNA, 21 nt, Human
caguggggggggggugggggg

SEQ ID NO: 221930 - RNA, 22 nt, Human
ccagaagauucuaaggacgggg

SEQ ID NO: 221931 - RNA, 24 nt, Human
ccagcaacagugugugugguuucu

SEQ ID NO: 221932 - RNA, 21 nt, Human
ccaggagcagugggggggggg

SEQ ID NO: 221933 - RNA, 23 nt, Human
cccucccagccauucccaauugc

SEQ ID NO: 221934 - RNA, 23 nt, Human
cgaagcuggcagugcccuugggg

SEQ ID NO: 221935 - RNA, 21 nt, Human
cggggcuguggcugggaggag

SEQ ID NO: 221936 - RNA, 21 nt, Human
cggggguggggggcggugagg

SEQ ID NO: 221937 - RNA, 18 nt, Human
cggggucggggguggggg

SEQ ID NO: 221938 - RNA, 22 nt, Human
cggugaggcggagggcugggga

SEQ ID NO: 221939 - RNA, 21 nt, Human
cguaggagggagggcuugggg

SEQ ID NO: 221940 - RNA, 19 nt, Human
cgucaagggaggcgggacc

SEQ ID NO: 221941 - RNA, 18 nt, Human
cugacgggugcgggaagg

SEQ ID NO: 221942 - RNA, 22 nt, Human
cuguggcugggaggaguggggc

SEQ ID NO: 221943 - RNA, 19 nt, Human
cuuuaaaggguccaagaag

SEQ ID NO: 221944 - RNA, 19 nt, Human
gacggggucgggggugggg

SEQ ID NO: 221945 - RNA, 19 nt, Human
gagagcaggcagggggugg

SEQ ID NO: 221946 - RNA, 20 nt, Human
gagcaggcaggggguggggu

SEQ ID NO: 221947 - RNA, 19 nt, Human
gagcucuguggcuuuucca

SEQ ID NO: 221948 - RNA, 19 nt, Human
gaggaggagcgagguagcg

SEQ ID NO: 221949 - RNA, 23 nt, Human
gaggcuccuccagaagauucuaa

SEQ ID NO: 221950 - RNA, 19 nt, Human
gagucggggccgccaauga

SEQ ID NO: 221951 - RNA, 21 nt, Human
gcaggggcggggacacggggg

SEQ ID NO: 221952 - RNA, 22 nt, Human
gcaguggggggggggugggggg

SEQ ID NO: 221953 - RNA, 19 nt, Human
gcccuuggggaaucagaug

SEQ ID NO: 221954 - RNA, 23 nt, Human
gcggggcgggaggggcggggacg

SEQ ID NO: 221955 - RNA, 28 nt, Human
gcuccuccagaagauucuaaggacgggg

SEQ ID NO: 221956 - RNA, 21 nt, Human
ggacucaagauccagcaacag

SEQ ID NO: 221957 - RNA, 22 nt, Human
ggaggaggggcggggcggggcg

SEQ ID NO: 221958 - RNA, 18 nt, Human
ggagguggggcggggcug

SEQ ID NO: 221959 - RNA, 21 nt, Human
ggcaggggguggggucugcaa

SEQ ID NO: 221960 - RNA, 21 nt, Human
ggcggggcugggggcugaccu

SEQ ID NO: 221961 - RNA, 19 nt, Human
ggcugggggcugaccuagu

SEQ ID NO: 221962 - RNA, 23 nt, Human
gggcuggggagagggacaucuuu

SEQ ID NO: 221963 - RNA, 18 nt, Human
ggggcggggcgggagggg

SEQ ID NO: 221964 - RNA, 21 nt, Human
ggggcugggggcugaccuagu

SEQ ID NO: 221965 - RNA, 22 nt, Human
gggggcggggcgggaggggcgg

SEQ ID NO: 221966 - RNA, 23 nt, Human
ggggggagggaggcuccuccaga

SEQ ID NO: 221967 - RNA, 25 nt, Human
gggggggagggaggcuccuccagaa

SEQ ID NO: 221968 - RNA, 18 nt, Human
ggggguggggggggaggg

SEQ ID NO: 221969 - RNA, 21 nt, Human
ggggguggggggggagggagg

SEQ ID NO: 221970 - RNA, 23 nt, Human
ggggguggggggggagggaggcu

SEQ ID NO: 221971 - RNA, 19 nt, Human
ggggucggggguggggggc

SEQ ID NO: 221972 - RNA, 20 nt, Human
gggguggggggcggugaggc

SEQ ID NO: 221973 - RNA, 22 nt, Human
gggguggggucugcaagggggc

SEQ ID NO: 221974 - RNA, 21 nt, Human
ggguggggucugcaagggggc

SEQ ID NO: 221975 - RNA, 25 nt, Human
gugacaagagcccggggggaggggg

SEQ ID NO: 221976 - RNA, 18 nt, Human
gugggggggggguggggg

SEQ ID NO: 221977 - RNA, 21 nt, Human
uccaagaaggcucugagcuuc

SEQ ID NO: 221978 - RNA, 19 nt, Human
uccaggagcaguggggggg

SEQ ID NO: 221979 - RNA, 19 nt, Human
ucucacagcuaaugggacu

SEQ ID NO: 221980 - RNA, 23 nt, Human
ugacaagagcccggggggagggg

SEQ ID NO: 221981 - RNA, 21 nt, Human
ugacgggugcgggaaggcucu

SEQ ID NO: 221982 - RNA, 22 nt, Human
uggcucuuucuaagagagcagg

SEQ ID NO: 221983 - RNA, 21 nt, Human
ugggggagguggggcggggcu

SEQ ID NO: 221984 - RNA, 18 nt, Human
uggggggggggugggggg

SEQ ID NO: 221985 - RNA, 21 nt, Human
ugggugggaggaggagcgagg

SEQ ID NO: 221986 - RNA, 22 nt, Human
ugggugggaggaggagcgaggu

SEQ ID NO: 221987 - RNA, 22 nt, Human
ugugugugguuucugcaaagcc

SEQ ID NO: 221988 - RNA, 20 nt, Human
aacacccuucccgaggaggc

SEQ ID NO: 221989 - RNA, 18 nt, Human
aggcgguggcggcccccu

SEQ ID NO: 221990 - RNA, 19 nt, Human
ccaaacacccuucccgagg

SEQ ID NO: 221991 - RNA, 28 nt, Human
cgaagaggaggcaggaggcgguggcggc

SEQ ID NO: 221992 - RNA, 21 nt, Human
gcaggaggcgguggcggcccc

SEQ ID NO: 221993 - RNA, 25 nt, Human
gcaggaggcgguggcggcccccucu

SEQ ID NO: 221994 - RNA, 18 nt, Human
gcccuccaaacacccuuc

SEQ ID NO: 221995 - RNA, 19 nt, Human
gcgggucuccggcuugggg

SEQ ID NO: 221996 - RNA, 20 nt, Human
ggagggggaggagacgaaga

SEQ ID NO: 221997 - RNA, 19 nt, Human
ucccgaggaggcagcguca

SEQ ID NO: 221998 - RNA, 18 nt, Human
aaaaaggcgaccuguugu

SEQ ID NO: 221999 - RNA, 29 nt, Human
aaaauacaacguccuaacaaucacccuca

SEQ ID NO: 222000 - RNA, 20 nt, Human
aaacaacaaagacguuagag

SEQ ID NO: 222001 - RNA, 18 nt, Human
aaacuauucuagaaaugg

SEQ ID NO: 222002 - RNA, 19 nt, Human
aacacccucugugucugcc

SEQ ID NO: 222003 - RNA, 25 nt, Human
aacccagccaaaucucuuccugcag

SEQ ID NO: 222004 - RNA, 19 nt, Human
aagacgaacgagagucacc

SEQ ID NO: 222005 - RNA, 24 nt, Human
aagaggaggcagaauugucaauug

SEQ ID NO: 222006 - RNA, 22 nt, Human
aagcagccaaaagucacccacu

SEQ ID NO: 222007 - RNA, 23 nt, Human
aagcagccaaaagucacccacuu

SEQ ID NO: 222008 - RNA, 20 nt, Human
aagggaagaggagagaaagc

SEQ ID NO: 222009 - RNA, 21 nt, Human
acaaaauacaacguccuaaca

SEQ ID NO: 222010 - RNA, 20 nt, Human
acaaagucaaagggccacag

SEQ ID NO: 222011 - RNA, 18 nt, Human
acccucaacagaacccag

SEQ ID NO: 222012 - RNA, 31 nt, Human
accuuccuuuccaaguagcccuucccgccag

SEQ ID NO: 222013 - RNA, 27 nt, Human
acgguauauuuuuaaaucaccuaaaac

SEQ ID NO: 222014 - RNA, 21 nt, Human
agaaacuauucuagaaauggg

SEQ ID NO: 222015 - RNA, 23 nt, Human
aggccacccucuggcacaaauaa

SEQ ID NO: 222016 - RNA, 19 nt, Human
aguaacuuuuuaaaagaug

SEQ ID NO: 222017 - RNA, 18 nt, Human
auaaacccaauagagagg

SEQ ID NO: 222018 - RNA, 18 nt, Human
augcacuuaacacaguca

SEQ ID NO: 222019 - RNA, 20 nt, Human
augccuauucugaagacaac

SEQ ID NO: 222020 - RNA, 21 nt, Human
auggcaacaaaauacaacguc

SEQ ID NO: 222021 - RNA, 18 nt, Human
auguggaguguaggauag

SEQ ID NO: 222022 - RNA, 22 nt, Human
auguugugugaguuuuuuuuuc

SEQ ID NO: 222023 - RNA, 18 nt, Human
caaaaguaggaaagucac

SEQ ID NO: 222024 - RNA, 22 nt, Human
caaaccuuccuuuccaaguagc

SEQ ID NO: 222025 - RNA, 22 nt, Human
caaaguacuagugagaaacgug

SEQ ID NO: 222026 - RNA, 25 nt, Human
caaauaagcacacaggugcagccgu

SEQ ID NO: 222027 - RNA, 19 nt, Human
caagcaaaguacuagugag

SEQ ID NO: 222028 - RNA, 20 nt, Human
caauagaauucuuucgacga

SEQ ID NO: 222029 - RNA, 24 nt, Human
caccauggaacaugaacacucagc

SEQ ID NO: 222030 - RNA, 20 nt, Human
cacccucugugucugccaaa

SEQ ID NO: 222031 - RNA, 18 nt, Human
caccuaaaacaucaaaaa

SEQ ID NO: 222032 - RNA, 19 nt, Human
cagcagcaucugcuuccgc

SEQ ID NO: 222033 - RNA, 19 nt, Human
cagccaaaagucacccacu

SEQ ID NO: 222034 - RNA, 22 nt, Human
cagcucaggugcagugugacag

SEQ ID NO: 222035 - RNA, 25 nt, Human
caucugcuuccgcgcagaacgcgcc

SEQ ID NO: 222036 - RNA, 24 nt, Human
ccaaaagucacccacuuccuccag

SEQ ID NO: 222037 - RNA, 22 nt, Human
ccccacgucucucuuugggggu

SEQ ID NO: 222038 - RNA, 18 nt, Human
ccuaaaaccuggccacac

SEQ ID NO: 222039 - RNA, 20 nt, Human
ccuuacaccuacccuucuca

SEQ ID NO: 222040 - RNA, 22 nt, Human
ccuuuccaaguagcccuucccg

SEQ ID NO: 222041 - RNA, 24 nt, Human
cggaaagggaagaggagagaaagc

SEQ ID NO: 222042 - RNA, 18 nt, Human
cuaaaaccuggccacacc

SEQ ID NO: 222043 - RNA, 22 nt, Human
cuccaaaggucuauuuuuuucc

SEQ ID NO: 222044 - RNA, 18 nt, Human
cuccccggcacagucugg

SEQ ID NO: 222045 - RNA, 20 nt, Human
cucuguauaacaggucaaac

SEQ ID NO: 222046 - RNA, 25 nt, Human
cugcaggugggcuaggccacccucu

SEQ ID NO: 222047 - RNA, 19 nt, Human
cuuugcaucaucaaacucc

SEQ ID NO: 222048 - RNA, 18 nt, Human
cuuuuccauaaacaacaa

SEQ ID NO: 222049 - RNA, 21 nt, Human
gaagcagccaaaagucaccca

SEQ ID NO: 222050 - RNA, 18 nt, Human
gagcucaggagcuggcag

SEQ ID NO: 222051 - RNA, 22 nt, Human
gcagcagcaucugcuuccgcgc

SEQ ID NO: 222052 - RNA, 20 nt, Human
gcaggugggcuaggccaccc

SEQ ID NO: 222053 - RNA, 19 nt, Human
gcagugguuacgguggggg

SEQ ID NO: 222054 - RNA, 21 nt, Human
gccacccucuggcacaaauaa

SEQ ID NO: 222055 - RNA, 20 nt, Human
gccccacgucucucuuuggg

SEQ ID NO: 222056 - RNA, 18 nt, Human
ggaacccuuacaccuacc

SEQ ID NO: 222057 - RNA, 19 nt, Human
ggaaucaaaagacauagua

SEQ ID NO: 222058 - RNA, 25 nt, Human
ggucaacuccuuuuuuucuaguuuu

SEQ ID NO: 222059 - RNA, 23 nt, Human
gugcacccggaaagggaagagga

SEQ ID NO: 222060 - RNA, 19 nt, Human
gugcagugugacaguuaca

SEQ ID NO: 222061 - RNA, 20 nt, Human
gugcugccuuccugaauggc

SEQ ID NO: 222062 - RNA, 20 nt, Human
guggaccaaaaaauauuacu

SEQ ID NO: 222063 - RNA, 24 nt, Human
guucucagaagggcaacuuucccu

SEQ ID NO: 222064 - RNA, 19 nt, Human
uaaaaaguuaccuaaaacc

SEQ ID NO: 222065 - RNA, 21 nt, Human
uaaagcacuccaguguaucuc

SEQ ID NO: 222066 - RNA, 27 nt, Human
uaaaucaccuaaaacaucaaaaaguuu

SEQ ID NO: 222067 - RNA, 23 nt, Human
uaaauguacagagaucaacuuug

SEQ ID NO: 222068 - RNA, 18 nt, Human
uaacuuuuuaaaagaugu

SEQ ID NO: 222069 - RNA, 26 nt, Human
uaagauuggaagcuuugugguaaaga

SEQ ID NO: 222070 - RNA, 26 nt, Human
uaauggcaacaaaauacaacguccua

SEQ ID NO: 222071 - RNA, 18 nt, Human
uacaaaaguaggaaaguc

SEQ ID NO: 222072 - RNA, 21 nt, Human
uacaaaaguaggaaagucacu

SEQ ID NO: 222073 - RNA, 24 nt, Human
uacauagugauauauccaguaucu

SEQ ID NO: 222074 - RNA, 19 nt, Human
uaccguaucuauaaggauc

SEQ ID NO: 222075 - RNA, 20 nt, Human
uaccuggccaagugcgcgcc

SEQ ID NO: 222076 - RNA, 25 nt, Human
uaggaaugaagccaguucuucccaa

SEQ ID NO: 222077 - RNA, 18 nt, Human
uauucaagaucuaaagca

SEQ ID NO: 222078 - RNA, 21 nt, Human
uauucugaagacaacauaagg

SEQ ID NO: 222079 - RNA, 21 nt, Human
ucaacagaacccagccaaauc

SEQ ID NO: 222080 - RNA, 18 nt, Human
uccaaaagccuaauaaaa

SEQ ID NO: 222081 - RNA, 18 nt, Human
uccaagacagguauuugg

SEQ ID NO: 222082 - RNA, 19 nt, Human
uccaaguagcccuucccgc

SEQ ID NO: 222083 - RNA, 20 nt, Human
uccccaugagaaauacugca

SEQ ID NO: 222084 - RNA, 21 nt, Human
ucccccacgucuacaaacacc

SEQ ID NO: 222085 - RNA, 23 nt, Human
ucccccacgucuacaaacacccu

SEQ ID NO: 222086 - RNA, 27 nt, Human
ucuacaaacacccucugugucugccaa

SEQ ID NO: 222087 - RNA, 27 nt, Human
ucuacaaacacccucugugucugccaa

SEQ ID NO: 222088 - RNA, 21 nt, Human
ucuacaaugggucaccgaagc

SEQ ID NO: 222089 - RNA, 20 nt, Human
ucuuuccauguacagaagcu

SEQ ID NO: 222090 - RNA, 18 nt, Human
ugaaaauagaacuucucc

SEQ ID NO: 222091 - RNA, 19 nt, Human
ugaagccaguucuucccaa

SEQ ID NO: 222092 - RNA, 23 nt, Human
ugaauaaaaacuuugcauuugac

SEQ ID NO: 222093 - RNA, 23 nt, Human
ugagauucuuuucacagccaggg

SEQ ID NO: 222094 - RNA, 25 nt, Human
ugcacagaaauuaccccuuucuaca

SEQ ID NO: 222095 - RNA, 19 nt, Human
ugcuucaaagaauucuagc

SEQ ID NO: 222096 - RNA, 21 nt, Human
ugcuucaaagaauucuagcau

SEQ ID NO: 222097 - RNA, 22 nt, Human
uggaaugaauaaaaacuuugca

SEQ ID NO: 222098 - RNA, 18 nt, Human
uggaggugaugugcagug

SEQ ID NO: 222099 - RNA, 23 nt, Human
uggcacaaauaagcacacaggug

SEQ ID NO: 222100 - RNA, 23 nt, Human
ugguuggauuaaucccuuuuuau

SEQ ID NO: 222101 - RNA, 26 nt, Human
uguacagagaucaacuuugcaucauc

SEQ ID NO: 222102 - RNA, 24 nt, Human
uguaggauagagaagacgaacgag

SEQ ID NO: 222103 - RNA, 19 nt, Human
uuacucuguauaacagguc

SEQ ID NO: 222104 - RNA, 23 nt, Human
uuagauuuacuaaugagcauccc

SEQ ID NO: 222105 - RNA, 18 nt, Human
uuauucucaaaauguauu

SEQ ID NO: 222106 - RNA, 19 nt, Human
uuccaaguagcccuucccg

SEQ ID NO: 222107 - RNA, 21 nt, Human
uuccugauacaacaguuguac

SEQ ID NO: 222108 - RNA, 19 nt, Human
uucugagaugauugauccu

SEQ ID NO: 222109 - RNA, 24 nt, Human
uuucuaguuuucgacaaggggauu

SEQ ID NO: 222110 - RNA, 19 nt, Human
uuugauuucuccccggcac

SEQ ID NO: 222111 - RNA, 18 nt, Human
aaaggggggagggagugg

SEQ ID NO: 222112 - RNA, 18 nt, Human
aagucucagugcuagggg

SEQ ID NO: 222113 - RNA, 24 nt, Human
aauaguggggaaaggggggaggga

SEQ ID NO: 222114 - RNA, 21 nt, Human
acccacucuggcccucugucc

SEQ ID NO: 222115 - RNA, 33 nt, Human
accccaccacccucccuuccucuggccccagga

SEQ ID NO: 222116 - RNA, 21 nt, Human
accucagccuguugcugacau

SEQ ID NO: 222117 - RNA, 21 nt, Human
agguaacuuugcccagucccu

SEQ ID NO: 222118 - RNA, 22 nt, Human
agugcgauuucaggucuggaac

SEQ ID NO: 222119 - RNA, 18 nt, Human
aguucagcaaaccccuuu

SEQ ID NO: 222120 - RNA, 26 nt, Human
auggggcaggcagaaauaguggggaa

SEQ ID NO: 222121 - RNA, 19 nt, Human
cagcaaaccccuuuuucuu

SEQ ID NO: 222122 - RNA, 24 nt, Human
cagcgugaaccucaggugccccuu

SEQ ID NO: 222123 - RNA, 22 nt, Human
cccaaaccgcuccggguuucca

SEQ ID NO: 222124 - RNA, 23 nt, Human
ccccaccacccucccuuccucug

SEQ ID NO: 222125 - RNA, 21 nt, Human
ccccuuuuucuugcagugcga

SEQ ID NO: 222126 - RNA, 19 nt, Human
ccgagcuggagaacuuugc

SEQ ID NO: 222127 - RNA, 20 nt, Human
ccucccuuccucuggcccca

SEQ ID NO: 222128 - RNA, 20 nt, Human
cgaagcgccccaaaccgcuu

SEQ ID NO: 222129 - RNA, 21 nt, Human
cgugaaccucaggugccccuu

SEQ ID NO: 222130 - RNA, 20 nt, Human
cuacccacucuggcccucug

SEQ ID NO: 222131 - RNA, 26 nt, Human
cuaccucuuuuuccuuccaggcacaa

SEQ ID NO: 222132 - RNA, 24 nt, Human
cuagggguacaauggggcaggcag

SEQ ID NO: 222133 - RNA, 22 nt, Human
cuccggguuuccacuuucagcc

SEQ ID NO: 222134 - RNA, 23 nt, Human
cucuugggccggcagccgcgcgg

SEQ ID NO: 222135 - RNA, 21 nt, Human
gcaggaauuuaguugagucca

SEQ ID NO: 222136 - RNA, 24 nt, Human
gccccaaaccgcuccggguuucca

SEQ ID NO: 222137 - RNA, 27 nt, Human
gccgaccccaccacccucccuuccucu

SEQ ID NO: 222138 - RNA, 22 nt, Human
gcuccggguuuccacuuucagc

SEQ ID NO: 222139 - RNA, 23 nt, Human
gcuccggguuuccacuuucagcc

SEQ ID NO: 222140 - RNA, 22 nt, Human
ggacuggcccccagccucuggu

SEQ ID NO: 222141 - RNA, 19 nt, Human
ggccgcgacggcccuuggc

SEQ ID NO: 222142 - RNA, 22 nt, Human
gggcaggcagaaauagugggga

SEQ ID NO: 222143 - RNA, 18 nt, Human
ggggaaaggggggaggga

SEQ ID NO: 222144 - RNA, 21 nt, Human
ggggggagggaguggucucag

SEQ ID NO: 222145 - RNA, 21 nt, Human
ggugccccuuugcuaccucuu

SEQ ID NO: 222146 - RNA, 21 nt, Human
gucuggaaccucagccuguug

SEQ ID NO: 222147 - RNA, 23 nt, Human
ucaacacuaagcaagcgcaggaa

SEQ ID NO: 222148 - RNA, 19 nt, Human
ucaggugccccuuugcuac

SEQ ID NO: 222149 - RNA, 20 nt, Human
ucauuccccacuacccacuc

SEQ ID NO: 222150 - RNA, 20 nt, Human
ucauuccccacuacccacuc

SEQ ID NO: 222151 - RNA, 18 nt, Human
uccccggggccgcgacgg

SEQ ID NO: 222152 - RNA, 24 nt, Human
uccggguuuccacuuucagccauu

SEQ ID NO: 222153 - RNA, 22 nt, Human
uccuuccaggcacaagucucag

SEQ ID NO: 222154 - RNA, 22 nt, Human
ucucagugaccacccaccaaca

SEQ ID NO: 222155 - RNA, 27 nt, Human
ugaccacccaccaacaugccagucccc

SEQ ID NO: 222156 - RNA, 22 nt, Human
ugcccagucccuucccgucccc

SEQ ID NO: 222157 - RNA, 23 nt, Human
ugcgaagcgccccaaaccgcucc

SEQ ID NO: 222158 - RNA, 22 nt, Human
ugcuagggguacaauggggcag

SEQ ID NO: 222159 - RNA, 22 nt, Human
uggccccagugagaugcaguau

SEQ ID NO: 222160 - RNA, 20 nt, Human
aagagagagggagggaaaag

SEQ ID NO: 222161 - RNA, 20 nt, Human
aagcagacacugcaauaaca

SEQ ID NO: 222162 - RNA, 23 nt, Human
acagcgguagcacccagcucucc

SEQ ID NO: 222163 - RNA, 19 nt, Human
agaggagaggcauuuggaa

SEQ ID NO: 222164 - RNA, 26 nt, Human
agcuaccaaaaaucaggcguuaccac

SEQ ID NO: 222165 - RNA, 24 nt, Human
agcuggacugcugcagucggccug

SEQ ID NO: 222166 - RNA, 19 nt, Human
cagaagauggcauagcuac

SEQ ID NO: 222167 - RNA, 21 nt, Human
cagcaaucuggggcugugguu

SEQ ID NO: 222168 - RNA, 22 nt, Human
cagccccuggagcagcugccag

SEQ ID NO: 222169 - RNA, 18 nt, Human
cauugcuucaguucagug

SEQ ID NO: 222170 - RNA, 23 nt, Human
ccaggacgcugcugaccuuuccc

SEQ ID NO: 222171 - RNA, 20 nt, Human
cccccuuccgucccccauua

SEQ ID NO: 222172 - RNA, 22 nt, Human
ccccugggcgaggggaagcgag

SEQ ID NO: 222173 - RNA, 22 nt, Human
cccguugagcacuccucccccu

SEQ ID NO: 222174 - RNA, 24 nt, Human
ccuggaagggaguuggggguggaa

SEQ ID NO: 222175 - RNA, 21 nt, Human
ccuuuauuaccugccucugac

SEQ ID NO: 222176 - RNA, 23 nt, Human
cgcugcugaccuuucccccuggg

SEQ ID NO: 222177 - RNA, 25 nt, Human
cuccaggacgcugcugaccuuuccc

SEQ ID NO: 222178 - RNA, 21 nt, Human
cucccugcugaaagagagagg

SEQ ID NO: 222179 - RNA, 21 nt, Human
cuuccagacaaggucuccugg

SEQ ID NO: 222180 - RNA, 21 nt, Human
gaagagggagaaacuggcccg

SEQ ID NO: 222181 - RNA, 21 nt, Human
gaagagggagaaacuggcccg

SEQ ID NO: 222182 - RNA, 21 nt, Human
gagcgugcugucagggcuguc

SEQ ID NO: 222183 - RNA, 18 nt, Human
gaugagcgagaugaggag

SEQ ID NO: 222184 - RNA, 18 nt, Human
gcaacuggaagcuggacu

SEQ ID NO: 222185 - RNA, 21 nt, Human
gcugcagucggccugcaaccc

SEQ ID NO: 222186 - RNA, 21 nt, Human
ggcaacuggaagcuggacugc

SEQ ID NO: 222187 - RNA, 21 nt, Human
ggccuuccagacaaggucucc

SEQ ID NO: 222188 - RNA, 23 nt, Human
gggcucagcagcggaaacagcgg

SEQ ID NO: 222189 - RNA, 19 nt, Human
ggugcaggggugaagaggg

SEQ ID NO: 222190 - RNA, 19 nt, Human
gucccuaaggcaacuggaa

SEQ ID NO: 222191 - RNA, 18 nt, Human
gucccuggcagccccugg

SEQ ID NO: 222192 - RNA, 18 nt, Human
gugcaggggugaagaggg

SEQ ID NO: 222193 - RNA, 25 nt, Human
guggaaggugggaggcgcgcccagg

SEQ ID NO: 222194 - RNA, 20 nt, Human
guuaccacugggaugaaaac

SEQ ID NO: 222195 - RNA, 20 nt, Human
uaaguucauucuaucccaca

SEQ ID NO: 222196 - RNA, 22 nt, Human
uaauccucagcagaagauggca

SEQ ID NO: 222197 - RNA, 20 nt, Human
uccacggaugaagcagacac

SEQ ID NO: 222198 - RNA, 25 nt, Human
uccacggaugaagcagaccgggguc

SEQ ID NO: 222199 - RNA, 19 nt, Human
ucccccugggcgaggggaa

SEQ ID NO: 222200 - RNA, 23 nt, Human
ucccuaaggcaacuggaagcugg

SEQ ID NO: 222201 - RNA, 18 nt, Human
ucuccuggccucucacca

SEQ ID NO: 222202 - RNA, 21 nt, Human
ucuccuggccucucaccauua

SEQ ID NO: 222203 - RNA, 22 nt, Human
ugcuucuccuuccagggccuuc

SEQ ID NO: 222204 - RNA, 18 nt, Human
uggaagggaguugggggg

SEQ ID NO: 222205 - RNA, 21 nt, Human
uggaaggugcaggggugaaga

SEQ ID NO: 222206 - RNA, 18 nt, Human
ugggaugaaaacugggga

SEQ ID NO: 222207 - RNA, 19 nt, Human
aacaaagagcaaggaacuc

SEQ ID NO: 222208 - RNA, 23 nt, Human
aagcaagcauaaaucacugagau

SEQ ID NO: 222209 - RNA, 26 nt, Human
caacaaagagcaaggaacucacuuuu

SEQ ID NO: 222210 - RNA, 18 nt, Human
caagcaagcauaaaucac

SEQ ID NO: 222211 - RNA, 19 nt, Human
caagcaagcauaaaucacu

SEQ ID NO: 222212 - RNA, 24 nt, Human
caagcaagcauaaaucacugagau

SEQ ID NO: 222213 - RNA, 23 nt, Human
cagcacaaaauauugcuccaaca

SEQ ID NO: 222214 - RNA, 21 nt, Human
ccaacaagcaagcauaaauca

SEQ ID NO: 222215 - RNA, 26 nt, Human
cuccaacaagcaagcauaagguaccc

SEQ ID NO: 222216 - RNA, 24 nt, Human
gaaaauucucaacaaagagcaagg

SEQ ID NO: 222217 - RNA, 20 nt, Human
ugagauugaaaugucaucua

SEQ ID NO: 222218 - RNA, 19 nt, Human
ugccucguggcacuggcau

SEQ ID NO: 222219 - RNA, 18 nt, Human
uggcaucucuucaugucu

SEQ ID NO: 222220 - RNA, 23 nt, Human
uggccaaccacauaaucuccaug

SEQ ID NO: 222221 - RNA, 19 nt, Human
aacagggauugaggugggg

SEQ ID NO: 222222 - RNA, 19 nt, Human
acugggcucucaaucaguu

SEQ ID NO: 222223 - RNA, 24 nt, Human
cagacgcaauccccaggugucuug

SEQ ID NO: 222224 - RNA, 22 nt, Human
cugcuggcaaauccacugggcu

SEQ ID NO: 222225 - RNA, 19 nt, Human
cuuccaccgucccagcccu

SEQ ID NO: 222226 - RNA, 21 nt, Human
gcucucaaucaguuucaagga

SEQ ID NO: 222227 - RNA, 20 nt, Human
ggaggccccagacgcaaucc

SEQ ID NO: 222228 - RNA, 28 nt, Human
guccacagcagaguucuggaggccccag

SEQ ID NO: 222229 - RNA, 22 nt, Human
uccacagcagaguucuggaggc

SEQ ID NO: 222230 - RNA, 18 nt, Human
uccccaggugucuugguc

SEQ ID NO: 222231 - RNA, 22 nt, Human
acccaucuguccaccgccuggu

SEQ ID NO: 222232 - RNA, 19 nt, Human
agccugcgggggcgcgccg

SEQ ID NO: 222233 - RNA, 23 nt, Human
aggcaugcacccggcggcggggc

SEQ ID NO: 222234 - RNA, 24 nt, Human
aggccgcggccuccacucguccca

SEQ ID NO: 222235 - RNA, 23 nt, Human
cacaccccucccucccgggcucc

SEQ ID NO: 222236 - RNA, 19 nt, Human
caccccucccucccgggcu

SEQ ID NO: 222237 - RNA, 21 nt, Human
caccccucccucccgggcucc

SEQ ID NO: 222238 - RNA, 23 nt, Human
cagcccuucugugcugucgauga

SEQ ID NO: 222239 - RNA, 28 nt, Human
cagccgccgccgccgcugccgcuggggg

SEQ ID NO: 222240 - RNA, 21 nt, Human
caggcagcggcggcagguccc

SEQ ID NO: 222241 - RNA, 26 nt, Human
ccaccgccugguccaucucugccuga

SEQ ID NO: 222242 - RNA, 20 nt, Human
cccccugcagccgccgccgc

SEQ ID NO: 222243 - RNA, 20 nt, Human
ccccgcgcccccugcagccg

SEQ ID NO: 222244 - RNA, 18 nt, Human
cccgcgcgcgcccucgca

SEQ ID NO: 222245 - RNA, 18 nt, Human
ccgccgccgccgcugccg

SEQ ID NO: 222246 - RNA, 21 nt, Human
ccuccccgcgcgcgcccucgc

SEQ ID NO: 222247 - RNA, 20 nt, Human
ccucccucccgggcuccugg

SEQ ID NO: 222248 - RNA, 22 nt, Human
ccucccucccgggcuccuggac

SEQ ID NO: 222249 - RNA, 18 nt, Human
ccuccugcgggagcgggg

SEQ ID NO: 222250 - RNA, 19 nt, Human
ccugcggggaagggcgguc

SEQ ID NO: 222251 - RNA, 23 nt, Human
cgagccuuuucuaaacacaaagc

SEQ ID NO: 222252 - RNA, 21 nt, Human
cgccccgcgcccccugcagcc

SEQ ID NO: 222253 - RNA, 23 nt, Human
cgccccggggcgcgcaggcagcg

SEQ ID NO: 222254 - RNA, 20 nt, Human
cgccugguccaucucugccu

SEQ ID NO: 222255 - RNA, 18 nt, Human
cggcuccugcacaccccu

SEQ ID NO: 222256 - RNA, 20 nt, Human
cggcuccugcacaccccucc

SEQ ID NO: 222257 - RNA, 24 nt, Human
cucccgggcuccuggacagcaggc

SEQ ID NO: 222258 - RNA, 18 nt, Human
cucgcagccuccgccccg

SEQ ID NO: 222259 - RNA, 19 nt, Human
cucgcagccuccgccccgc

SEQ ID NO: 222260 - RNA, 22 nt, Human
cucgucccacacggcccugcgg

SEQ ID NO: 222261 - RNA, 18 nt, Human
cuucugugcugucgauga

SEQ ID NO: 222262 - RNA, 18 nt, Human
cuuugcccgagccuuuuc

SEQ ID NO: 222263 - RNA, 26 nt, Human
gagggccuucagagucuguccagggg

SEQ ID NO: 222264 - RNA, 19 nt, Human
gcagagagcgaacuugggc

SEQ ID NO: 222265 - RNA, 20 nt, Human
gcagcagccugcgggggcgc

SEQ ID NO: 222266 - RNA, 20 nt, Human
gcagccgccgccgccgcugc

SEQ ID NO: 222267 - RNA, 22 nt, Human
gccccggggcgcgcaggcagcg

SEQ ID NO: 222268 - RNA, 22 nt, Human
gcccgggcgagcccgcgggggc

SEQ ID NO: 222269 - RNA, 20 nt, Human
gccgccgccgccgcugccgc

SEQ ID NO: 222270 - RNA, 20 nt, Human
gccggccucgcccggggcac

SEQ ID NO: 222271 - RNA, 21 nt, Human
gcggccgccggccucgcccgg

SEQ ID NO: 222272 - RNA, 20 nt, Human
gcuucagcucggccuccugc

SEQ ID NO: 222273 - RNA, 21 nt, Human
ggcagaggugccgggagggcc

SEQ ID NO: 222274 - RNA, 25 nt, Human
ggcucggggcuggcauccgggcgcc

SEQ ID NO: 222275 - RNA, 18 nt, Human
ggcuggcauccgggcgcc

SEQ ID NO: 222276 - RNA, 19 nt, Human
gggagagccuggccggcgc

SEQ ID NO: 222277 - RNA, 23 nt, Human
gggcuuuggcggccgccggccuc

SEQ ID NO: 222278 - RNA, 20 nt, Human
ggggaagggcggucacagcg

SEQ ID NO: 222279 - RNA, 27 nt, Human
ucaccccggcuggcuggcggcgcgcuc

SEQ ID NO: 222280 - RNA, 21 nt, Human
uccaggggaggguugggggga

SEQ ID NO: 222281 - RNA, 18 nt, Human
ucccacacggcccugcgg

SEQ ID NO: 222282 - RNA, 23 nt, Human
ugcacaccccucccucccgggcu

SEQ ID NO: 222283 - RNA, 20 nt, Human
ugcgggggcgcgccgcgggg

SEQ ID NO: 222284 - RNA, 21 nt, Human
uggcaccguccuccgccccgg

SEQ ID NO: 222285 - RNA, 20 nt, Human
uggcauccgggcgcccgggc

SEQ ID NO: 222286 - RNA, 18 nt, Human
uucagcucggccuccugc

SEQ ID NO: 222287 - RNA, 22 nt, Human
uugggcuggcuuugcccgagcc

SEQ ID NO: 222288 - RNA, 20 nt, Human
uuuauugagggagauacaga

SEQ ID NO: 222289 - RNA, 24 nt, Human
uuuuuuuuugcacagagcaggagg

SEQ ID NO: 222290 - RNA, 21 nt, Human
uuuuuuuuuuuugcacagagc

SEQ ID NO: 222291 - RNA, 22 nt, Human
uuuuuuuuuuuuuuuugcacag

SEQ ID NO: 222292 - RNA, 20 nt, Human
agcaggaaacuggccucggg

SEQ ID NO: 222293 - RNA, 21 nt, Human
cagcagcucgggguccggcgg

SEQ ID NO: 222294 - RNA, 18 nt, Human
cagcaggaaacuggccuc

SEQ ID NO: 222295 - RNA, 18 nt, Human
cagcucgggguccggcgg

SEQ ID NO: 222296 - RNA, 18 nt, Human
ccucccagcagcucgggg

SEQ ID NO: 222297 - RNA, 22 nt, Human
ccucggggcccgcacgcagucc

SEQ ID NO: 222298 - RNA, 19 nt, Human
cgaagcgccccaugcgccc

SEQ ID NO: 222299 - RNA, 22 nt, Human
cgaagcgccccaugcgcccggc

SEQ ID NO: 222300 - RNA, 23 nt, Human
cgccccaugcgcccggcggggau

SEQ ID NO: 222301 - RNA, 23 nt, Human
cggcgggcguccuggcgcggcuu

SEQ ID NO: 222302 - RNA, 21 nt, Human
gcgggcguccuggcgcggcuu

SEQ ID NO: 222303 - RNA, 19 nt, Human
gcucgggguccggcgggcg

SEQ ID NO: 222304 - RNA, 22 nt, Human
ggcagggcuggcggcucccucu

SEQ ID NO: 222305 - RNA, 20 nt, Human
gggguccggcgggcguccug

SEQ ID NO: 222306 - RNA, 19 nt, Human
acaggccccaccuacugcc

SEQ ID NO: 222307 - RNA, 20 nt, Human
acugccggcccugccccugc

SEQ ID NO: 222308 - RNA, 19 nt, Human
aggagaagauggucccaag

SEQ ID NO: 222309 - RNA, 25 nt, Human
aggagaagauggucccaagggcugg

SEQ ID NO: 222310 - RNA, 20 nt, Human
aguaaauagcagaaaagucc

SEQ ID NO: 222311 - RNA, 24 nt, Human
cacaggccccaccuacugccggcc

SEQ ID NO: 222312 - RNA, 19 nt, Human
caccgcgccaagcgagcac

SEQ ID NO: 222313 - RNA, 19 nt, Human
caguggggggaccacaggc

SEQ ID NO: 222314 - RNA, 23 nt, Human
ccaagcgagcacgggcgcgcaca

SEQ ID NO: 222315 - RNA, 24 nt, Human
ccagcagcgccuugaucccugggu

SEQ ID NO: 222316 - RNA, 21 nt, Human
ccagggccgggugccuccggg

SEQ ID NO: 222317 - RNA, 23 nt, Human
cccacccacccggcgacgcacua

SEQ ID NO: 222318 - RNA, 18 nt, Human
cccagggccgggugccuc

SEQ ID NO: 222319 - RNA, 20 nt, Human
cccugccccugccccucuca

SEQ ID NO: 222320 - RNA, 18 nt, Human
ccuacugccggcccugcc

SEQ ID NO: 222321 - RNA, 21 nt, Human
ccucagggcaguggggggacc

SEQ ID NO: 222322 - RNA, 19 nt, Human
ccucccgccuccccuccga

SEQ ID NO: 222323 - RNA, 22 nt, Human
ccucccgccuccccuccgaccc

SEQ ID NO: 222324 - RNA, 23 nt, Human
ccucccgccuccccuccgaccgg

SEQ ID NO: 222325 - RNA, 26 nt, Human
ccucgcucgccucccgccuccccucc

SEQ ID NO: 222326 - RNA, 18 nt, Human
ccucuccccuuccacggu

SEQ ID NO: 222327 - RNA, 18 nt, Human
ccuugaggugccuaaggc

SEQ ID NO: 222328 - RNA, 22 nt, Human
ccuugaggugccuaaggcccag

SEQ ID NO: 222329 - RNA, 18 nt, Human
cgaguuccucuccccuuc

SEQ ID NO: 222330 - RNA, 23 nt, Human
cgcacagacuggacugcgggcgc

SEQ ID NO: 222331 - RNA, 21 nt, Human
cgccuugaucccugggugagc

SEQ ID NO: 222332 - RNA, 18 nt, Human
cgcuggucccgcaccgcg

SEQ ID NO: 222333 - RNA, 19 nt, Human
cucgccucccgccuccccu

SEQ ID NO: 222334 - RNA, 20 nt, Human
cuggaggccugagcaggccg

SEQ ID NO: 222335 - RNA, 18 nt, Human
gacuggacugcgggcgcg

SEQ ID NO: 222336 - RNA, 18 nt, Human
gccccugccccucucacu

SEQ ID NO: 222337 - RNA, 21 nt, Human
gcccugccccugccccucuca

SEQ ID NO: 222338 - RNA, 23 nt, Human
gccggcccugccccugccccucu

SEQ ID NO: 222339 - RNA, 20 nt, Human
ggcaguggggggaccacagg

SEQ ID NO: 222340 - RNA, 21 nt, Human
ggggcccaggggacugcagga

SEQ ID NO: 222341 - RNA, 26 nt, Human
uacugccggcccugccccugccccuc

SEQ ID NO: 222342 - RNA, 19 nt, Human
uagaccagcuaaugcccuc

SEQ ID NO: 222343 - RNA, 28 nt, Human
uauuauucauagucaucagcaucuucau

SEQ ID NO: 222344 - RNA, 20 nt, Human
ucauaugauccuuaauuauu

SEQ ID NO: 222345 - RNA, 18 nt, Human
uccacacugggcagcccc

SEQ ID NO: 222346 - RNA, 22 nt, Human
ucccgcaccgcgccaagcgagc

SEQ ID NO: 222347 - RNA, 22 nt, Human
uccucgcucgccucccgccucc

SEQ ID NO: 222348 - RNA, 21 nt, Human
uccugagcagggccuccaagg

SEQ ID NO: 222349 - RNA, 19 nt, Human
ucgaguuccucuccccuuc

SEQ ID NO: 222350 - RNA, 23 nt, Human
ucuccccuuccacggucagggcc

SEQ ID NO: 222351 - RNA, 19 nt, Human
ugagcccauggcgccgggc

SEQ ID NO: 222352 - RNA, 24 nt, Human
ugccccucucacuggggcccaggg

SEQ ID NO: 222353 - RNA, 18 nt, Human
uggggcccaggggacugc

SEQ ID NO: 222354 - RNA, 21 nt, Human
uguccacacugggcagcccca

SEQ ID NO: 222355 - RNA, 25 nt, Human
aaagcucuuccuuguccucaggccu

SEQ ID NO: 222356 - RNA, 24 nt, Human
agaggagcaggccgaggagaggcc

SEQ ID NO: 222357 - RNA, 22 nt, Human
aggcaggggcacaugcagggga

SEQ ID NO: 222358 - RNA, 23 nt, Human
aggccucugcccccagccugcag

SEQ ID NO: 222359 - RNA, 19 nt, Human
agggauccagccuauccuc

SEQ ID NO: 222360 - RNA, 20 nt, Human
caaagcucuuccuuguccuc

SEQ ID NO: 222361 - RNA, 22 nt, Human
caaaucccgggcuccaggcccc

SEQ ID NO: 222362 - RNA, 21 nt, Human
cagccugcagagggagaccgg

SEQ ID NO: 222363 - RNA, 23 nt, Human
caggagccagguccuccuuugcu

SEQ ID NO: 222364 - RNA, 24 nt, Human
caggagccagguccuccuuugcuu

SEQ ID NO: 222365 - RNA, 19 nt, Human
caggggauggcaaagcucu

SEQ ID NO: 222366 - RNA, 24 nt, Human
ccacaaaucccgggcuccaggccc

SEQ ID NO: 222367 - RNA, 20 nt, Human
cccacaaaucccgggcucca

SEQ ID NO: 222368 - RNA, 22 nt, Human
cccccagccugcagagggagac

SEQ ID NO: 222369 - RNA, 18 nt, Human
ccccccgccgggccccgc

SEQ ID NO: 222370 - RNA, 23 nt, Human
ccccccgccgggccccgcgcucc

SEQ ID NO: 222371 - RNA, 21 nt, Human
ccccucgcgcccucgccgccc

SEQ ID NO: 222372 - RNA, 20 nt, Human
cccgccccaucccuccgggg

SEQ ID NO: 222373 - RNA, 22 nt, Human
cccgcggcugcccgccccaucc

SEQ ID NO: 222374 - RNA, 24 nt, Human
ccuauccucucugagagucaggag

SEQ ID NO: 222375 - RNA, 24 nt, Human
ccucgccgcccacaaaucccgggc

SEQ ID NO: 222376 - RNA, 18 nt, Human
ccucgcgcccucgccgcc

SEQ ID NO: 222377 - RNA, 18 nt, Human
ccucgcgcccucgccgcc

SEQ ID NO: 222378 - RNA, 24 nt, Human
ccucucugagagucaggagccagg

SEQ ID NO: 222379 - RNA, 21 nt, Human
cggccgccccccgccgggccc

SEQ ID NO: 222380 - RNA, 19 nt, Human
gagaggccugccccaggga

SEQ ID NO: 222381 - RNA, 18 nt, Human
gcccugagccagcgggcc

SEQ ID NO: 222382 - RNA, 19 nt, Human
ggcgcgcgagggggcgucc

SEQ ID NO: 222383 - RNA, 20 nt, Human
gggaggucagaggagcaggc

SEQ ID NO: 222384 - RNA, 22 nt, Human
gggcccggagcauggcgcgcgg

SEQ ID NO: 222385 - RNA, 22 nt, Human
guccucaggccucugcccccag

SEQ ID NO: 222386 - RNA, 23 nt, Human
guggggaggcugccacccugccu

SEQ ID NO: 222387 - RNA, 24 nt, Human
uagaggcaggggcacaugcagggg

SEQ ID NO: 222388 - RNA, 18 nt, Human
ucccgggcuccaggcccc

SEQ ID NO: 222389 - RNA, 24 nt, Human
ucgccgcccacaaaucccgggcuc

SEQ ID NO: 222390 - RNA, 23 nt, Human
ugccccagggauccagccuaucc

SEQ ID NO: 222391 - RNA, 20 nt, Human
uggcagcacaccuggcaacu

SEQ ID NO: 222392 - RNA, 23 nt, Human
uuccaggcucccugcccugagcc

SEQ ID NO: 222393 - RNA, 22 nt, Human
uugcuuccaggcucccugcccu

SEQ ID NO: 222394 - RNA, 22 nt, Human
auauacuguuuuaauauauuaa

SEQ ID NO: 222395 - RNA, 18 nt, Human
caggccagaauccagcug

SEQ ID NO: 222396 - RNA, 24 nt, Human
ccagaauccagcuggacaugcaau

SEQ ID NO: 222397 - RNA, 27 nt, Human
cuguauauacacacauauguauauacu

SEQ ID NO: 222398 - RNA, 21 nt, Human
gcaggccagaauccagcugga

SEQ ID NO: 222399 - RNA, 22 nt, Human
uauauacacacauauguauaua

SEQ ID NO: 222400 - RNA, 23 nt, Human
uauauacacacauauguauauac

SEQ ID NO: 222401 - RNA, 25 nt, Human
uauauacacacauauguauauacug

SEQ ID NO: 222402 - RNA, 25 nt, Human
uauauauauguauauacuguauaua

SEQ ID NO: 222403 - RNA, 27 nt, Human
uauauauguauauacuguauauacaca

SEQ ID NO: 222404 - RNA, 23 nt, Human
uauauguauauacuguauauaca

SEQ ID NO: 222405 - RNA, 19 nt, Human
uauguauauacuguauaua

SEQ ID NO: 222406 - RNA, 20 nt, Human
uauuuacauaucaaaaucca

SEQ ID NO: 222407 - RNA, 24 nt, Human
uauuuacauaucaaaauccaugug

SEQ ID NO: 222408 - RNA, 18 nt, Human
ugaaagcaagugaaaaua

SEQ ID NO: 222409 - RNA, 23 nt, Human
uguauauacacacauauguauag

SEQ ID NO: 222410 - RNA, 23 nt, Human
uguauauacacacauauguauau

SEQ ID NO: 222411 - RNA, 21 nt, Human
aaacagacuuaaaagaagucu

SEQ ID NO: 222412 - RNA, 19 nt, Human
aacaacuggccggaaacac

SEQ ID NO: 222413 - RNA, 18 nt, Human
aagacaugacaagccauc

SEQ ID NO: 222414 - RNA, 19 nt, Human
aaguggugcugguuguugg

SEQ ID NO: 222415 - RNA, 18 nt, Human
aaucucuccauacaacag

SEQ ID NO: 222416 - RNA, 22 nt, Human
acaacaguuauguaagaaacag

SEQ ID NO: 222417 - RNA, 19 nt, Human
acugaaauacugaguuuuc

SEQ ID NO: 222418 - RNA, 21 nt, Human
agacaaaaguaagaucacacc

SEQ ID NO: 222419 - RNA, 20 nt, Human
agcaaggaaguggugcuggu

SEQ ID NO: 222420 - RNA, 22 nt, Human
aguaagaucacaccaggaagaa

SEQ ID NO: 222421 - RNA, 27 nt, Human
caaaacaagcggauuacauuacugcca

SEQ ID NO: 222422 - RNA, 20 nt, Human
caagccccaagcugaauagg

SEQ ID NO: 222423 - RNA, 24 nt, Human
caagccccaagcugaauagguauu

SEQ ID NO: 222424 - RNA, 24 nt, Human
caauugguuguucucagaccaagc

SEQ ID NO: 222425 - RNA, 20 nt, Human
caccaggaagaaacaagaua

SEQ ID NO: 222426 - RNA, 18 nt, Human
cacuuacuuaucaucaau

SEQ ID NO: 222427 - RNA, 25 nt, Human
caggauaaauucauccacuaaccaa

SEQ ID NO: 222428 - RNA, 31 nt, Human
cauccacuaaccaaaacugucauucacaugg

SEQ ID NO: 222429 - RNA, 22 nt, Human
ccaggaagaaacaagauaccau

SEQ ID NO: 222430 - RNA, 19 nt, Human
ccuuccucuccuuggccac

SEQ ID NO: 222431 - RNA, 22 nt, Human
ccuuggccacgcucuaucgcuc

SEQ ID NO: 222432 - RNA, 22 nt, Human
cggccuauucucugaaacccac

SEQ ID NO: 222433 - RNA, 20 nt, Human
cuaauaacaacuggccggaa

SEQ ID NO: 222434 - RNA, 24 nt, Human
cucccggccuauucucugaaaccc

SEQ ID NO: 222435 - RNA, 23 nt, Human
cuccuuggccacgcucuaucgcu

SEQ ID NO: 222436 - RNA, 22 nt, Human
cugaaacccacugaaauacuga

SEQ ID NO: 222437 - RNA, 21 nt, Human
cugaguuuuccaaggguucac

SEQ ID NO: 222438 - RNA, 19 nt, Human
ggaaaaagcaaggaagugg

SEQ ID NO: 222439 - RNA, 21 nt, Human
ggaaaaccuggcauuuacuga

SEQ ID NO: 222440 - RNA, 23 nt, Human
guucagagugagagggauuauuc

SEQ ID NO: 222441 - RNA, 23 nt, Human
uaaaaguugugccuaauaacaac

SEQ ID NO: 222442 - RNA, 19 nt, Human
uaaggucucugggcagcag

SEQ ID NO: 222443 - RNA, 22 nt, Human
uaaguacauauuuacaagacaa

SEQ ID NO: 222444 - RNA, 22 nt, Human
uaccaacaugcuaagacaugac

SEQ ID NO: 222445 - RNA, 23 nt, Human
uaccaacaugcuaagacaugaca

SEQ ID NO: 222446 - RNA, 21 nt, Human
uagcuaauauuuaccaaggua

SEQ ID NO: 222447 - RNA, 22 nt, Human
uaggugauuagagauugucccc

SEQ ID NO: 222448 - RNA, 22 nt, Human
uauuuaccaagguauuuuuagu

SEQ ID NO: 222449 - RNA, 19 nt, Human
ucacaccaggaagaaacaa

SEQ ID NO: 222450 - RNA, 18 nt, Human
ucuaugcagacugauuuc

SEQ ID NO: 222451 - RNA, 20 nt, Human
ucucccggccuauucucuga

SEQ ID NO: 222452 - RNA, 18 nt, Human
ugaaacccacugaaauac

SEQ ID NO: 222453 - RNA, 21 nt, Human
ugaaauacugaguuuuccaag

SEQ ID NO: 222454 - RNA, 18 nt, Human
ugaacauacagacauaag

SEQ ID NO: 222455 - RNA, 24 nt, Human
ugacaagccaucagcuaaggucuc

SEQ ID NO: 222456 - RNA, 22 nt, Human
uggaaaaagcaaggaaguggug

SEQ ID NO: 222457 - RNA, 23 nt, Human
uggcagaccuauuauugcacaga

SEQ ID NO: 222458 - RNA, 22 nt, Human
uggcauuuacugaagguguuuu

SEQ ID NO: 222459 - RNA, 20 nt, Human
uggccggaaacacuuacuua

SEQ ID NO: 222460 - RNA, 20 nt, Human
uugaaaucaguaaaucuuaa

SEQ ID NO: 222461 - RNA, 19 nt, Human
uuguaggcgacagucagug

SEQ ID NO: 222462 - RNA, 25 nt, Human
uuuauuguuggaagucuuuauuauu

SEQ ID NO: 222463 - RNA, 21 nt, Human
aaacagaucuucucugggcug

SEQ ID NO: 222464 - RNA, 18 nt, Human
aaagagaccagaggaaug

SEQ ID NO: 222465 - RNA, 24 nt, Human
aaagguaacagagggagcuccagc

SEQ ID NO: 222466 - RNA, 25 nt, Human
aagagaccagaggaaugggggagug

SEQ ID NO: 222467 - RNA, 21 nt, Human
aagaguucagaauccaggaua

SEQ ID NO: 222468 - RNA, 22 nt, Human
aagcacagaccacaaagugacc

SEQ ID NO: 222469 - RNA, 23 nt, Human
aagcauggcugaggccuucuaag

SEQ ID NO: 222470 - RNA, 22 nt, Human
aagugaccaucagagagagucu

SEQ ID NO: 222471 - RNA, 20 nt, Human
aaucccacucuuucccccag

SEQ ID NO: 222472 - RNA, 21 nt, Human
acagagggagcuccagccuca

SEQ ID NO: 222473 - RNA, 21 nt, Human
acagugggaggcgaaccugga

SEQ ID NO: 222474 - RNA, 22 nt, Human
acuccaauucucugagaacaga

SEQ ID NO: 222475 - RNA, 18 nt, Human
acuucauggugguggugg

SEQ ID NO: 222476 - RNA, 26 nt, Human
agaaacuacagagggaaaacaguggc

SEQ ID NO: 222477 - RNA, 19 nt, Human
agagaggaaaagagaccag

SEQ ID NO: 222478 - RNA, 18 nt, Human
agagauugguagaaaccc

SEQ ID NO: 222479 - RNA, 18 nt, Human
agaggaaaagagaccaga

SEQ ID NO: 222480 - RNA, 18 nt, Human
aggaguuaggagcagagc

SEQ ID NO: 222481 - RNA, 25 nt, Human
agggaaacagaucuucucugggcug

SEQ ID NO: 222482 - RNA, 20 nt, Human
aucaagcuucacaguggcaa

SEQ ID NO: 222483 - RNA, 25 nt, Human
aucccacucuuucccccauccuggc

SEQ ID NO: 222484 - RNA, 25 nt, Human
cagaagucaccagcagaaaucaagc

SEQ ID NO: 222485 - RNA, 25 nt, Human
cagaccacaaagugaccaucagaga

SEQ ID NO: 222486 - RNA, 24 nt, Human
cagcagaaaucaagcuucacagug

SEQ ID NO: 222487 - RNA, 19 nt, Human
caggccacuggguuaaaga

SEQ ID NO: 222488 - RNA, 19 nt, Human
caguggcaaacccuggcuu

SEQ ID NO: 222489 - RNA, 21 nt, Human
caguggcaaacccuggcuucu

SEQ ID NO: 222490 - RNA, 19 nt, Human
ccaaccacaugguccuccu

SEQ ID NO: 222491 - RNA, 24 nt, Human
ccacaugguccuccuaaugugagu

SEQ ID NO: 222492 - RNA, 18 nt, Human
ccacuggguuaaagaaga

SEQ ID NO: 222493 - RNA, 23 nt, Human
ccugagaguguucacuugagaaa

SEQ ID NO: 222494 - RNA, 20 nt, Human
ccuggaagauagguuuaaag

SEQ ID NO: 222495 - RNA, 23 nt, Human
cggccgggggcagagcugggccg

SEQ ID NO: 222496 - RNA, 23 nt, Human
cuccagccucaagucaccaaacu

SEQ ID NO: 222497 - RNA, 20 nt, Human
cuugagaaacuacagaggga

SEQ ID NO: 222498 - RNA, 21 nt, Human
gagaacagaggcuaugaggga

SEQ ID NO: 222499 - RNA, 22 nt, Human
gagcugggccgggccgggccgc

SEQ ID NO: 222500 - RNA, 21 nt, Human
gaggaugggugcuucggggga

SEQ ID NO: 222501 - RNA, 21 nt, Human
gaguuaggagcagagcugugc

SEQ ID NO: 222502 - RNA, 19 nt, Human
gcagagcugggccgggccg

SEQ ID NO: 222503 - RNA, 18 nt, Human
gccgggggcagagcuggg

SEQ ID NO: 222504 - RNA, 20 nt, Human
gccgggggcagagcugggcc

SEQ ID NO: 222505 - RNA, 19 nt, Human
ggaguggaggaugggugcu

SEQ ID NO: 222506 - RNA, 21 nt, Human
ggaguggaggaugggugcuuc

SEQ ID NO: 222507 - RNA, 19 nt, Human
ggauauguugauaucagau

SEQ ID NO: 222508 - RNA, 22 nt, Human
ggcauuggaagagaggaaaaga

SEQ ID NO: 222509 - RNA, 20 nt, Human
ggccaggacucuuaaacccg

SEQ ID NO: 222510 - RNA, 18 nt, Human
gggacagugggaggcgaa

SEQ ID NO: 222511 - RNA, 19 nt, Human
gggaguggaggaugggugc

SEQ ID NO: 222512 - RNA, 28 nt, Human
gggcagaagcuggggaaguggaaagggg

SEQ ID NO: 222513 - RNA, 20 nt, Human
gggcaggaguuaggagcaga

SEQ ID NO: 222514 - RNA, 20 nt, Human
gggccgggccgggccgcccc

SEQ ID NO: 222515 - RNA, 18 nt, Human
ggguccgagguggagugg

SEQ ID NO: 222516 - RNA, 23 nt, Human
uaccagggcauuggaagagagga

SEQ ID NO: 222517 - RNA, 23 nt, Human
uagaaacccuaggauauguugau

SEQ ID NO: 222518 - RNA, 21 nt, Human
uaucagauuccuguauuucug

SEQ ID NO: 222519 - RNA, 19 nt, Human
uauccaagcauggcugagg

SEQ ID NO: 222520 - RNA, 23 nt, Human
uauuggggcagaagcuggggaag

SEQ ID NO: 222521 - RNA, 23 nt, Human
ucagaagucaccagcagaaauca

SEQ ID NO: 222522 - RNA, 20 nt, Human
ucagagagagucuugccuuu

SEQ ID NO: 222523 - RNA, 25 nt, Human
ucagagagagucuugccuuugggaa

SEQ ID NO: 222524 - RNA, 25 nt, Human
ucagccuaaucccacucuuuccccc

SEQ ID NO: 222525 - RNA, 18 nt, Human
uccaaccacaugguccuc

SEQ ID NO: 222526 - RNA, 21 nt, Human
ugaaagcacagaccacaaagu

SEQ ID NO: 222527 - RNA, 26 nt, Human
ugagggaacuggguauccugagagug

SEQ ID NO: 222528 - RNA, 24 nt, Human
uggaaaggggacagugggaggcga

SEQ ID NO: 222529 - RNA, 18 nt, Human
uggaagauagguuuaaag

SEQ ID NO: 222530 - RNA, 23 nt, Human
uggaguggcccuuggaugggccg

SEQ ID NO: 222531 - RNA, 19 nt, Human
uggcugaggccuucuaagc

SEQ ID NO: 222532 - RNA, 19 nt, Human
uggguccgagguggagugg

SEQ ID NO: 222533 - RNA, 25 nt, Human
uggguuaaagaagagggaguggagg

SEQ ID NO: 222534 - RNA, 20 nt, Human
uggugggagguagggggcag

SEQ ID NO: 222535 - RNA, 24 nt, Human
uggugguggugggagguagggggc

SEQ ID NO: 222536 - RNA, 18 nt, Human
uguccgggggccggggcc

SEQ ID NO: 222537 - RNA, 24 nt, Human
uguuagucacuccaaauugaagag

SEQ ID NO: 222538 - RNA, 21 nt, Human
uguuuauguuucuugggccaa

SEQ ID NO: 222539 - RNA, 18 nt, Human
uucacaggacacagggaa

SEQ ID NO: 222540 - RNA, 21 nt, Human
uucacaguggcaaacccuggc

SEQ ID NO: 222541 - RNA, 22 nt, Human
uuggggcagaagcuggggaagu

SEQ ID NO: 222542 - RNA, 22 nt, Human
aaaacgcuacugagucugcaac

SEQ ID NO: 222543 - RNA, 21 nt, Human
aaacagucucacccaagcuaa

SEQ ID NO: 222544 - RNA, 19 nt, Human
aaacccggggccccugagc

SEQ ID NO: 222545 - RNA, 23 nt, Human
aaacgcuacugagucugcaaccc

SEQ ID NO: 222546 - RNA, 18 nt, Human
aacccggggccccugagc

SEQ ID NO: 222547 - RNA, 20 nt, Human
aacccggggccccugagcga

SEQ ID NO: 222548 - RNA, 18 nt, Human
aacccgguguuucucccc

SEQ ID NO: 222549 - RNA, 25 nt, Human
agccuggcccucguggccuggcccc

SEQ ID NO: 222550 - RNA, 23 nt, Human
aggucaagaaagcugaaacccgg

SEQ ID NO: 222551 - RNA, 19 nt, Human
auagccucugaggccgggg

SEQ ID NO: 222552 - RNA, 21 nt, Human
caagaaagcugaaacccggug

SEQ ID NO: 222553 - RNA, 24 nt, Human
caccaucgagcugagcugcuuccc

SEQ ID NO: 222554 - RNA, 24 nt, Human
cacccaagcuaaggucaagaaagc

SEQ ID NO: 222555 - RNA, 23 nt, Human
cagaagccuggcccucguggccu

SEQ ID NO: 222556 - RNA, 18 nt, Human
cagucucacccaagcuaa

SEQ ID NO: 222557 - RNA, 21 nt, Human
ccaccaucgagcugagcugcu

SEQ ID NO: 222558 - RNA, 23 nt, Human
ccccaggaggccacuucuuugcc

SEQ ID NO: 222559 - RNA, 23 nt, Human
cccccaggcuagcuccaggccuc

SEQ ID NO: 222560 - RNA, 22 nt, Human
ccccugagcgaccgcggggccu

SEQ ID NO: 222561 - RNA, 28 nt, Human
ccccugagcgaccgcggggccucucccc

SEQ ID NO: 222562 - RNA, 21 nt, Human
cccgcaggcugcagcuccauc

SEQ ID NO: 222563 - RNA, 23 nt, Human
cccucguggccuggccccccagg

SEQ ID NO: 222564 - RNA, 22 nt, Human
cccugagcgaccgcggggccuc

SEQ ID NO: 222565 - RNA, 23 nt, Human
ccggccaaacuucugaggccguu

SEQ ID NO: 222566 - RNA, 22 nt, Human
ccucuccccagccgggggugga

SEQ ID NO: 222567 - RNA, 19 nt, Human
ccuggcccucguggccugg

SEQ ID NO: 222568 - RNA, 19 nt, Human
ccugugauagccucugagg

SEQ ID NO: 222569 - RNA, 20 nt, Human
cguugcaaagaaacauaaaa

SEQ ID NO: 222570 - RNA, 20 nt, Human
cuagccagccuuggacagca

SEQ ID NO: 222571 - RNA, 20 nt, Human
cucuccggccaaacuucuga

SEQ ID NO: 222572 - RNA, 19 nt, Human
cuggccccccaggaggcca

SEQ ID NO: 222573 - RNA, 24 nt, Human
cuuugcccugagccugugauagcc

SEQ ID NO: 222574 - RNA, 19 nt, Human
gaccgcggggccucucccc

SEQ ID NO: 222575 - RNA, 24 nt, Human
gaggccacuucuuugcccugagcc

SEQ ID NO: 222576 - RNA, 19 nt, Human
gguugggggacccuggcuc

SEQ ID NO: 222577 - RNA, 25 nt, Human
uaaaacgcuacugagucugcaaccc

SEQ ID NO: 222578 - RNA, 22 nt, Human
uccccgcaggcugcagcuccau

SEQ ID NO: 222579 - RNA, 22 nt, Human
ucuccggccaaacuucugaggc

SEQ ID NO: 222580 - RNA, 21 nt, Human
ucugcaacccagggcacuggg

SEQ ID NO: 222581 - RNA, 23 nt, Human
ucugcaacccagggcacugggcc

SEQ ID NO: 222582 - RNA, 22 nt, Human
ucuucaggcagaagccuggccc

SEQ ID NO: 222583 - RNA, 24 nt, Human
ugaaacccgguguuucuccccaag

SEQ ID NO: 222584 - RNA, 21 nt, Human
ugcaaagaaacauaaaacgac

SEQ ID NO: 222585 - RNA, 23 nt, Human
ugcaaagaaacauaaaacgacua

SEQ ID NO: 222586 - RNA, 20 nt, Human
ugcccugagccugugauagc

SEQ ID NO: 222587 - RNA, 22 nt, Human
ugcccugagccugugauagccu

SEQ ID NO: 222588 - RNA, 21 nt, Human
ugccgcucuggcugcccccuc

SEQ ID NO: 222589 - RNA, 24 nt, Human
uggcucgcccccaggcuagcucca

SEQ ID NO: 222590 - RNA, 18 nt, Human
ugugauagccucugaggc

SEQ ID NO: 222591 - RNA, 22 nt, Human
uuaaaaaccagcaaggagcacc

SEQ ID NO: 222592 - RNA, 21 nt, Human
uguauuucucuaaaaucaaga

SEQ ID NO: 222593 - RNA, 22 nt, Human
aaaacucucucacuguucacag

SEQ ID NO: 222594 - RNA, 21 nt, Human
aaauacauuuccuuuuaaugu

SEQ ID NO: 222595 - RNA, 19 nt, Human
aagagaggccaggucugga

SEQ ID NO: 222596 - RNA, 19 nt, Human
aagcucuuagaaauguagc

SEQ ID NO: 222597 - RNA, 22 nt, Human
agaaauguagcuuuauuuuaua

SEQ ID NO: 222598 - RNA, 25 nt, Human
agaacacuguccagagcacagcuuu

SEQ ID NO: 222599 - RNA, 22 nt, Human
agacgaagcaccuaacaggaaa

SEQ ID NO: 222600 - RNA, 19 nt, Human
agauaagaaaugaaauggc

SEQ ID NO: 222601 - RNA, 21 nt, Human
agcagugagaucaaugaauac

SEQ ID NO: 222602 - RNA, 26 nt, Human
aggcagguagaacguccucgcucccc

SEQ ID NO: 222603 - RNA, 20 nt, Human
agguagaacguccucgcucc

SEQ ID NO: 222604 - RNA, 20 nt, Human
agugcagacuccuggcugga

SEQ ID NO: 222605 - RNA, 21 nt, Human
agugcagacuccuggcuggau

SEQ ID NO: 222606 - RNA, 22 nt, Human
auaaugaaaugaagagaggcca

SEQ ID NO: 222607 - RNA, 19 nt, Human
auagagucucucuaccucu

SEQ ID NO: 222608 - RNA, 20 nt, Human
augagaguucacuuucagac

SEQ ID NO: 222609 - RNA, 20 nt, Human
augucaagucagagaaaugc

SEQ ID NO: 222610 - RNA, 22 nt, Human
cagaaaguugcuuugagaacac

SEQ ID NO: 222611 - RNA, 24 nt, Human
caguccacugaagaaagguaaaaa

SEQ ID NO: 222612 - RNA, 19 nt, Human
ccacaauucaacucucagc

SEQ ID NO: 222613 - RNA, 23 nt, Human
ccacacagagucaguuuuccaca

SEQ ID NO: 222614 - RNA, 19 nt, Human
ccauacaauucaguccacu

SEQ ID NO: 222615 - RNA, 18 nt, Human
ccaugggauucugcuacu

SEQ ID NO: 222616 - RNA, 22 nt, Human
ccaugggauucugcuacugccu

SEQ ID NO: 222617 - RNA, 20 nt, Human
ccccuucacccaccuggcua

SEQ ID NO: 222618 - RNA, 20 nt, Human
cgggcucuccaaacaccccc

SEQ ID NO: 222619 - RNA, 21 nt, Human
cucaguccagacagguugccu

SEQ ID NO: 222620 - RNA, 22 nt, Human
cugaaccacaauucaacucuca

SEQ ID NO: 222621 - RNA, 21 nt, Human
cuuuuuagguauuaccacaua

SEQ ID NO: 222622 - RNA, 20 nt, Human
gaaaucucucaaacacagaa

SEQ ID NO: 222623 - RNA, 24 nt, Human
gaacauagagucucucuaccucuu

SEQ ID NO: 222624 - RNA, 22 nt, Human
gaagaaaacucucucacuguuc

SEQ ID NO: 222625 - RNA, 22 nt, Human
gagaacacuguccagagcacag

SEQ ID NO: 222626 - RNA, 21 nt, Human
gcaucagccccauuuguguag

SEQ ID NO: 222627 - RNA, 22 nt, Human
gccccauuuguguagguuucca

SEQ ID NO: 222628 - RNA, 23 nt, Human
gggcauccaguccgggcucucca

SEQ ID NO: 222629 - RNA, 22 nt, Human
guccagacagguugccuuggga

SEQ ID NO: 222630 - RNA, 22 nt, Human
guccucgcuccccuucacccac

SEQ ID NO: 222631 - RNA, 19 nt, Human
gucuggcugggacaugaga

SEQ ID NO: 222632 - RNA, 19 nt, Human
uagaacguccucgcucccc

SEQ ID NO: 222633 - RNA, 24 nt, Human
uauuccaauugcccuacaccaagc

SEQ ID NO: 222634 - RNA, 21 nt, Human
ucaguccagacagguugccuu

SEQ ID NO: 222635 - RNA, 18 nt, Human
uccacugaagaaagguaa

SEQ ID NO: 222636 - RNA, 22 nt, Human
uccacugaagaaagguaaaaau

SEQ ID NO: 222637 - RNA, 18 nt, Human
uccuuccauacaauucag

SEQ ID NO: 222638 - RNA, 21 nt, Human
ucucaaacacagaaaugcugg

SEQ ID NO: 222639 - RNA, 21 nt, Human
ugaacauagagucucucuacc

SEQ ID NO: 222640 - RNA, 23 nt, Human
ugaacauagagucucucuaccuc

SEQ ID NO: 222641 - RNA, 23 nt, Human
ugaaccacaauucaacucucagc

SEQ ID NO: 222642 - RNA, 19 nt, Human
ugaaccacauuuugaaugg

SEQ ID NO: 222643 - RNA, 18 nt, Human
ugaagaaaacucucucac

SEQ ID NO: 222644 - RNA, 19 nt, Human
ugaagagaggccaggucug

SEQ ID NO: 222645 - RNA, 22 nt, Human
ugaagggaguucugauguggaa

SEQ ID NO: 222646 - RNA, 19 nt, Human
ugagaacacuguccagagc

SEQ ID NO: 222647 - RNA, 23 nt, Human
ugagaucaaugaauacugaacca

SEQ ID NO: 222648 - RNA, 22 nt, Human
ugggaaagauagguguuuaggg

SEQ ID NO: 222649 - RNA, 21 nt, Human
uguccagagcacagcuuucga

SEQ ID NO: 222650 - RNA, 21 nt, Human
uguuaagauacagaccccaau

SEQ ID NO: 222651 - RNA, 24 nt, Human
uuagaaauguagcuuuauuuuaua

SEQ ID NO: 222652 - RNA, 21 nt, Human
uuagccacaagaucaaaggaa

SEQ ID NO: 222653 - RNA, 21 nt, Human
uuccauacaauucaguccacu

SEQ ID NO: 222654 - RNA, 22 nt, Human
uucugauguggaaacagcuugc

SEQ ID NO: 222655 - RNA, 21 nt, Human
uuuaauagauaagaaaugaaa

SEQ ID NO: 222656 - RNA, 22 nt, Human
uuuuuuuuuuuuuucucucaag

SEQ ID NO: 222657 - RNA, 21 nt, Human
uuuuuuuuuuuuuuuucucuc

SEQ ID NO: 222658 - RNA, 26 nt, Human
aaaaaaaaaaaaaaaagggaaaagaa

SEQ ID NO: 222659 - RNA, 21 nt, Human
aaaaaagaaaaaagaaaagaa

SEQ ID NO: 222660 - RNA, 18 nt, Human
aaaaagaaaaaagaaaag

SEQ ID NO: 222661 - RNA, 19 nt, Human
aaaacaaaaacaaaacaca

SEQ ID NO: 222662 - RNA, 24 nt, Human
aaaagaaaaaagaaaagaaaagaa

SEQ ID NO: 222663 - RNA, 23 nt, Human
aaacaaaaacaaaacacaaauaa

SEQ ID NO: 222664 - RNA, 30 nt, Human
aaacaaaaacaaaacacaaauaauucugag

SEQ ID NO: 222665 - RNA, 21 nt, Human
aaacauagccauaacacuuuc

SEQ ID NO: 222666 - RNA, 23 nt, Human
aaagaaaagaaaagaaacagaaa

SEQ ID NO: 222667 - RNA, 22 nt, Human
aaagaaggagaaagggaaggau

SEQ ID NO: 222668 - RNA, 23 nt, Human
aaagauaaaaugauucaguggua

SEQ ID NO: 222669 - RNA, 19 nt, Human
aagaaaagaaaagaaacag

SEQ ID NO: 222670 - RNA, 22 nt, Human
aagagaaagaaagauuuuccag

SEQ ID NO: 222671 - RNA, 21 nt, Human
aaggagaaagggaaggaugag

SEQ ID NO: 222672 - RNA, 25 nt, Human
aauguaaaacaaaaacaaaacacaa

SEQ ID NO: 222673 - RNA, 18 nt, Human
acaaaaaaagaaaaaaga

SEQ ID NO: 222674 - RNA, 23 nt, Human
acccagcaucaucauaaaacaua

SEQ ID NO: 222675 - RNA, 21 nt, Human
agaaaaaagaaaagaaaagaa

SEQ ID NO: 222676 - RNA, 28 nt, Human
agaaaaaagaaaagaaaagaaacagaaa

SEQ ID NO: 222677 - RNA, 27 nt, Human
agaaaaaauugcuucuaacucucacug

SEQ ID NO: 222678 - RNA, 19 nt, Human
agaaaaagcaaaaacugug

SEQ ID NO: 222679 - RNA, 22 nt, Human
agaaaagaaaagaaacagaaag

SEQ ID NO: 222680 - RNA, 20 nt, Human
agcaacgguuucucuccaag

SEQ ID NO: 222681 - RNA, 20 nt, Human
agcagagauugggcucacca

SEQ ID NO: 222682 - RNA, 18 nt, Human
agcagccaaaguugcaau

SEQ ID NO: 222683 - RNA, 18 nt, Human
agcugggcaaugguagag

SEQ ID NO: 222684 - RNA, 22 nt, Human
aggaaggaagaacaaaaaaaga

SEQ ID NO: 222685 - RNA, 21 nt, Human
agggaaaagaaggagaaagga

SEQ ID NO: 222686 - RNA, 20 nt, Human
agggggaggagggaagaaag

SEQ ID NO: 222687 - RNA, 25 nt, Human
aguuagaauccugugucucacuaac

SEQ ID NO: 222688 - RNA, 25 nt, Human
auaaacaaauaaaaacagugccaca

SEQ ID NO: 222689 - RNA, 19 nt, Human
auaaaguuuaaagugacuc

SEQ ID NO: 222690 - RNA, 19 nt, Human
auauugacaaggcaaacau

SEQ ID NO: 222691 - RNA, 19 nt, Human
aucaucuugaguuacuccu

SEQ ID NO: 222692 - RNA, 19 nt, Human
aucuaccuauaccuauaua

SEQ ID NO: 222693 - RNA, 25 nt, Human
aucucccuccccacccuccccccaa

SEQ ID NO: 222694 - RNA, 26 nt, Human
augagggggaggagggaagaaaggaa

SEQ ID NO: 222695 - RNA, 21 nt, Human
caaaaaaaaaaaaaaaaggga

SEQ ID NO: 222696 - RNA, 26 nt, Human
caaaaacaaaacacaaauaauucuga

SEQ ID NO: 222697 - RNA, 28 nt, Human
caagaagcauacauaacugccggggccc

SEQ ID NO: 222698 - RNA, 21 nt, Human
caagacuaaaaacaaucuuac

SEQ ID NO: 222699 - RNA, 24 nt, Human
caaguaauugcugcuguaaaaucc

SEQ ID NO: 222700 - RNA, 21 nt, Human
cacaaauaaauaucucccucc

SEQ ID NO: 222701 - RNA, 23 nt, Human
cacaacucgagucauuuguaucu

SEQ ID NO: 222702 - RNA, 22 nt, Human
cacugaucacuaccugggcaag

SEQ ID NO: 222703 - RNA, 18 nt, Human
cagagcgcacaauuuuuu

SEQ ID NO: 222704 - RNA, 24 nt, Human
cagcagagauugggcucaccagac

SEQ ID NO: 222705 - RNA, 23 nt, Human
cagcgguagcagagucaacaaag

SEQ ID NO: 222706 - RNA, 21 nt, Human
cagcugggcaaugguagagaa

SEQ ID NO: 222707 - RNA, 24 nt, Human
caguaaccaagacaagaagcauac

SEQ ID NO: 222708 - RNA, 27 nt, Human
cauaaaacauagccauaacacuuucaa

SEQ ID NO: 222709 - RNA, 21 nt, Human
cauagaaaguccccuccucag

SEQ ID NO: 222710 - RNA, 27 nt, Human
caucauaaaacauagccauaacacuuu

SEQ ID NO: 222711 - RNA, 19 nt, Human
ccaagacaagaagcauaca

SEQ ID NO: 222712 - RNA, 20 nt, Human
ccaagggucugagaauguuu

SEQ ID NO: 222713 - RNA, 18 nt, Human
ccacccuccccccaaaaa

SEQ ID NO: 222714 - RNA, 23 nt, Human
ccacccuccccccaaaaagguuc

SEQ ID NO: 222715 - RNA, 21 nt, Human
ccaggucaaaaaaaaaaaaaa

SEQ ID NO: 222716 - RNA, 28 nt, Human
ccaggucaaaaaaaaaaaaaaaagggaa

SEQ ID NO: 222717 - RNA, 24 nt, Human
cccaggucaaaaaaaaaaaaaaaa

SEQ ID NO: 222718 - RNA, 21 nt, Human
ccccaaaaagguucuauccuu

SEQ ID NO: 222719 - RNA, 20 nt, Human
cccccauucuuuauucacuc

SEQ ID NO: 222720 - RNA, 21 nt, Human
ccuccccacccuccccccaaa

SEQ ID NO: 222721 - RNA, 24 nt, Human
ccugaccucaacugcgugacugac

SEQ ID NO: 222722 - RNA, 24 nt, Human
cucaagucaaagugaaauuuaaaa

SEQ ID NO: 222723 - RNA, 23 nt, Human
cucaccagacgggcaaggcccag

SEQ ID NO: 222724 - RNA, 20 nt, Human
cuccaagggucugagaaugu

SEQ ID NO: 222725 - RNA, 25 nt, Human
cucccaggucaaaaaaaaaaaaaaa

SEQ ID NO: 222726 - RNA, 19 nt, Human
cuccccccaaaaagguucu

SEQ ID NO: 222727 - RNA, 21 nt, Human
cuccccccaaaaagguucuau

SEQ ID NO: 222728 - RNA, 18 nt, Human
cucuccccacagagaauc

SEQ ID NO: 222729 - RNA, 19 nt, Human
cugggcaaguagcagugga

SEQ ID NO: 222730 - RNA, 22 nt, Human
cugggcacaaauaaauaucucc

SEQ ID NO: 222731 - RNA, 26 nt, Human
cuggugagcugauuucacaguuacau

SEQ ID NO: 222732 - RNA, 23 nt, Human
cugugugugugugugucugggug

SEQ ID NO: 222733 - RNA, 25 nt, Human
cuuacagccacucgcuaugcucgcu

SEQ ID NO: 222734 - RNA, 22 nt, Human
cuuuacucaguggaugugggcu

SEQ ID NO: 222735 - RNA, 23 nt, Human
gaacauagaaaguccccuccuca

SEQ ID NO: 222736 - RNA, 27 nt, Human
gcaacaauguaaaacaaaaacaaaaca

SEQ ID NO: 222737 - RNA, 22 nt, Human
gcaagacuaaaaacaaucuuac

SEQ ID NO: 222738 - RNA, 24 nt, Human
ggaaaagaaggagaaagggaaggg

SEQ ID NO: 222739 - RNA, 20 nt, Human
ggagugugcauuccucaagc

SEQ ID NO: 222740 - RNA, 26 nt, Human
gggaaaagaaggagaaagggaaggau

SEQ ID NO: 222741 - RNA, 22 nt, Human
gggaaaagaaggagaaagggga

SEQ ID NO: 222742 - RNA, 22 nt, Human
gggaaggaugagggggaggagg

SEQ ID NO: 222743 - RNA, 20 nt, Human
gggcaaugguagagaaugcu

SEQ ID NO: 222744 - RNA, 24 nt, Human
gugcagcaacaauguaaaacaaaa

SEQ ID NO: 222745 - RNA, 21 nt, Human
guggaugucuuuaaagugaga

SEQ ID NO: 222746 - RNA, 23 nt, Human
uaaaaauguauuauuuaugcugu

SEQ ID NO: 222747 - RNA, 19 nt, Human
uaaaauccaaaucuacaga

SEQ ID NO: 222748 - RNA, 18 nt, Human
uaaagugagaggcaacac

SEQ ID NO: 222749 - RNA, 19 nt, Human
uaaagugagaggcaacaca

SEQ ID NO: 222750 - RNA, 20 nt, Human
uaaccauccccucaccucag

SEQ ID NO: 222751 - RNA, 21 nt, Human
uaauaggccaaaggauuuccc

SEQ ID NO: 222752 - RNA, 24 nt, Human
uaauugcugcuguaaaauccaaau

SEQ ID NO: 222753 - RNA, 24 nt, Human
uacacagauaauuagagauauaug

SEQ ID NO: 222754 - RNA, 22 nt, Human
uacaguaaccaagacaagaagc

SEQ ID NO: 222755 - RNA, 20 nt, Human
uaccugggcaaguagcagug

SEQ ID NO: 222756 - RNA, 18 nt, Human
uagaauccugugucucac

SEQ ID NO: 222757 - RNA, 23 nt, Human
uaucgcugcuaaccauccccuca

SEQ ID NO: 222758 - RNA, 18 nt, Human
uaugauccugucccuugg

SEQ ID NO: 222759 - RNA, 18 nt, Human
uccuuccugccuucauuc

SEQ ID NO: 222760 - RNA, 19 nt, Human
ucgcugcuaaccauccccu

SEQ ID NO: 222761 - RNA, 24 nt, Human
ucuaauuuagccaaguaauugcug

SEQ ID NO: 222762 - RNA, 22 nt, Human
ucucacaaaauccuucauuuaa

SEQ ID NO: 222763 - RNA, 23 nt, Human
ucucccuccccacccucccccca

SEQ ID NO: 222764 - RNA, 25 nt, Human
ucugugccucaaucccccauucuuu

SEQ ID NO: 222765 - RNA, 22 nt, Human
ucuuacagccacucgcuaugcu

SEQ ID NO: 222766 - RNA, 21 nt, Human
ugaaaccaagacgguccaagu

SEQ ID NO: 222767 - RNA, 20 nt, Human
ugaacauagaaaguccccuc

SEQ ID NO: 222768 - RNA, 22 nt, Human
ugagauaaagugccagucugcc

SEQ ID NO: 222769 - RNA, 24 nt, Human
ugagauaaagugccagucugccag

SEQ ID NO: 222770 - RNA, 18 nt, Human
ugauccugucccuugguc

SEQ ID NO: 222771 - RNA, 23 nt, Human
ugcagcaacaauguaaaacaaaa

SEQ ID NO: 222772 - RNA, 24 nt, Human
ugggcaaguagcaguggaauuggu

SEQ ID NO: 222773 - RNA, 20 nt, Human
uguagguaaaacaagcuaaa

SEQ ID NO: 222774 - RNA, 23 nt, Human
ugucaugguggcuguuuucuacu

SEQ ID NO: 222775 - RNA, 22 nt, Human
ugugugugugugugucugggug

SEQ ID NO: 222776 - RNA, 25 nt, Human
ugugugugugugugucugggugugu

SEQ ID NO: 222777 - RNA, 26 nt, Human
ugugugugugugugucugggugugua

SEQ ID NO: 222778 - RNA, 19 nt, Human
uguugcuauuucuugguuu

SEQ ID NO: 222779 - RNA, 18 nt, Human
uucacgggacacugaugc

SEQ ID NO: 222780 - RNA, 19 nt, Human
uucacucuccccacagaga

SEQ ID NO: 222781 - RNA, 21 nt, Human
uuggcgaacaagaaaaauuuu

SEQ ID NO: 222782 - RNA, 19 nt, Human
uuggguuuucaguuagaac

SEQ ID NO: 222783 - RNA, 24 nt, Human
uuguacucagauuauccacuuacu

SEQ ID NO: 222784 - RNA, 22 nt, Human
uuucaaaaaagccacguuuaca

SEQ ID NO: 222785 - RNA, 18 nt, Human
uuugcugugcccuuaggg

SEQ ID NO: 222786 - RNA, 18 nt, Human
uuuuuuuuuuuuuuuuug

SEQ ID NO: 222787 - RNA, 21 nt, Human
aagaccuuaaacagcagaaaa

SEQ ID NO: 222788 - RNA, 18 nt, Human
aaucaugccauaaaacua

SEQ ID NO: 222789 - RNA, 22 nt, Human
acaagaacuacaacuuugaaca

SEQ ID NO: 222790 - RNA, 23 nt, Human
acacacacacacacagacauaua

SEQ ID NO: 222791 - RNA, 23 nt, Human
agccucccaagaccuuaaacagc

SEQ ID NO: 222792 - RNA, 20 nt, Human
aggugggggcggggggagga

SEQ ID NO: 222793 - RNA, 18 nt, Human
auauauauauguauaugu

SEQ ID NO: 222794 - RNA, 22 nt, Human
auauauauguauguauguaugu

SEQ ID NO: 222795 - RNA, 21 nt, Human
auauauguauguauguaugua

SEQ ID NO: 222796 - RNA, 18 nt, Human
auguauguauguauguau

SEQ ID NO: 222797 - RNA, 24 nt, Human
auguguauguauguguauauauua

SEQ ID NO: 222798 - RNA, 28 nt, Human
cacaagaacuacaacuuugaacaaaaca

SEQ ID NO: 222799 - RNA, 26 nt, Human
cacacacacacacagacauauauuua

SEQ ID NO: 222800 - RNA, 18 nt, Human
cagggagaguaucucccc

SEQ ID NO: 222801 - RNA, 19 nt, Human
caugcacaagaacuacaac

SEQ ID NO: 222802 - RNA, 19 nt, Human
ccaagaccuuaaacagcag

SEQ ID NO: 222803 - RNA, 18 nt, Human
cgaaggcgcaggagcugg

SEQ ID NO: 222804 - RNA, 18 nt, Human
cguaacuguugcuuucug

SEQ ID NO: 222805 - RNA, 24 nt, Human
cucaucgccaaauauuggacuauu

SEQ ID NO: 222806 - RNA, 18 nt, Human
cucccaagaccuuaaaca

SEQ ID NO: 222807 - RNA, 22 nt, Human
cucccaagaccuuaaacagcag

SEQ ID NO: 222808 - RNA, 18 nt, Human
cugcagacgccucuccuu

SEQ ID NO: 222809 - RNA, 19 nt, Human
cugcggucucugcccccug

SEQ ID NO: 222810 - RNA, 21 nt, Human
cuguugcuuucugcacauucg

SEQ ID NO: 222811 - RNA, 19 nt, Human
cuuuaaauauauauauaua

SEQ ID NO: 222812 - RNA, 18 nt, Human
gaaagggggcgaagcgag

SEQ ID NO: 222813 - RNA, 19 nt, Human
gaacuacaacuuugaacaa

SEQ ID NO: 222814 - RNA, 23 nt, Human
gauuccuuagggagaauuaccuc

SEQ ID NO: 222815 - RNA, 20 nt, Human
gccaguagccuuccuacucu

SEQ ID NO: 222816 - RNA, 18 nt, Human
gcccccugcagacgccuc

SEQ ID NO: 222817 - RNA, 21 nt, Human
ggaaggguucucgaaauaugc

SEQ ID NO: 222818 - RNA, 23 nt, Human
gggaggaaagggggcgaagcgag

SEQ ID NO: 222819 - RNA, 20 nt, Human
gggccauagauagcacaaac

SEQ ID NO: 222820 - RNA, 30 nt, Human
guauauguguguauacauacacacacacag

SEQ ID NO: 222821 - RNA, 21 nt, Human
guguauauauauauguauaaa

SEQ ID NO: 222822 - RNA, 24 nt, Human
guuauauuuuugcagggccauaga

SEQ ID NO: 222823 - RNA, 22 nt, Human
uaaaguaaacaugcacaagaac

SEQ ID NO: 222824 - RNA, 23 nt, Human
uaaaucaaacauuaaauaaugcc

SEQ ID NO: 222825 - RNA, 23 nt, Human
uaacuucacacagauucugauau

SEQ ID NO: 222826 - RNA, 23 nt, Human
uaauuguguaacuucacacagau

SEQ ID NO: 222827 - RNA, 26 nt, Human
uacauacacacacacacacagacaua

SEQ ID NO: 222828 - RNA, 21 nt, Human
uagcugcggucucugcccccu

SEQ ID NO: 222829 - RNA, 22 nt, Human
uagcugcggucucugcccccug

SEQ ID NO: 222830 - RNA, 19 nt, Human
uauauguauauguguguau

SEQ ID NO: 222831 - RNA, 20 nt, Human
uauauguauauguguguaua

SEQ ID NO: 222832 - RNA, 18 nt, Human
uauguauguauguaugua

SEQ ID NO: 222833 - RNA, 21 nt, Human
uauguauguauguauguaugu

SEQ ID NO: 222834 - RNA, 21 nt, Human
uauguauguauguauguguau

SEQ ID NO: 222835 - RNA, 21 nt, Human
uauguauguauguguauguau

SEQ ID NO: 222836 - RNA, 22 nt, Human
uauguguauauauauauguaua

SEQ ID NO: 222837 - RNA, 24 nt, Human
uauguguauauauauauguauaug

SEQ ID NO: 222838 - RNA, 18 nt, Human
uauguguauguaugugua

SEQ ID NO: 222839 - RNA, 19 nt, Human
uauguguauguauguguau

SEQ ID NO: 222840 - RNA, 19 nt, Human
uauguguauguauguguau

SEQ ID NO: 222841 - RNA, 22 nt, Human
uauguguauguauguguauaua

SEQ ID NO: 222842 - RNA, 18 nt, Human
uauguuagaaaugucagg

SEQ ID NO: 222843 - RNA, 24 nt, Human
uauuggacuauuacuaaaucaaac

SEQ ID NO: 222844 - RNA, 18 nt, Human
ucauugcauugucauguc

SEQ ID NO: 222845 - RNA, 19 nt, Human
ucgcaauacuugggaaagg

SEQ ID NO: 222846 - RNA, 25 nt, Human
ucuaggaaaggaauaauucucaaau

SEQ ID NO: 222847 - RNA, 24 nt, Human
ugccauaaaacuaaaugcaaaauu

SEQ ID NO: 222848 - RNA, 18 nt, Human
ugccuaagggagugcuuu

SEQ ID NO: 222849 - RNA, 22 nt, Human
ugggggcggggggaggaaaggg

SEQ ID NO: 222850 - RNA, 25 nt, Human
uguauacauacacacacacacacag

SEQ ID NO: 222851 - RNA, 25 nt, Human
uguauacauacacacacacacacag

SEQ ID NO: 222852 - RNA, 18 nt, Human
uguauauguguguauaca

SEQ ID NO: 222853 - RNA, 19 nt, Human
uguauauguguguauacau

SEQ ID NO: 222854 - RNA, 18 nt, Human
uguauguauguauguaug

SEQ ID NO: 222855 - RNA, 19 nt, Human
uguauguauguauguaugu

SEQ ID NO: 222856 - RNA, 19 nt, Human
uguauguauguauguguau

SEQ ID NO: 222857 - RNA, 21 nt, Human
uguauguauguauguguaugu

SEQ ID NO: 222858 - RNA, 23 nt, Human
uguauguauguauguguauguau

SEQ ID NO: 222859 - RNA, 25 nt, Human
uguauguauguguauauauauaugu

SEQ ID NO: 222860 - RNA, 19 nt, Human
uguauguauguguauguau

SEQ ID NO: 222861 - RNA, 23 nt, Human
uguauguauguguauguaugugu

SEQ ID NO: 222862 - RNA, 23 nt, Human
uguauuagaucauauacaaaaca

SEQ ID NO: 222863 - RNA, 19 nt, Human
uguguauauauauauguau

SEQ ID NO: 222864 - RNA, 21 nt, Human
uguguauauauauauguauau

SEQ ID NO: 222865 - RNA, 23 nt, Human
uguguauauauauauguauaugu

SEQ ID NO: 222866 - RNA, 18 nt, Human
uguguauguauguguaua

SEQ ID NO: 222867 - RNA, 20 nt, Human
uguguauguauguguauaua

SEQ ID NO: 222868 - RNA, 28 nt, Human
uguguauguauguguauauauauaugua

SEQ ID NO: 222869 - RNA, 20 nt, Human
uguugcuuucugcacauucc

SEQ ID NO: 222870 - RNA, 26 nt, Human
uuaauaacuuccuuaugauguccucc

SEQ ID NO: 222871 - RNA, 25 nt, Human
uuaauuagucuaggaaaggaauaau

SEQ ID NO: 222872 - RNA, 26 nt, Human
uuaccucaucgccaaauauuggaccg

SEQ ID NO: 222873 - RNA, 23 nt, Human
uuauauuuuugcagggccauaga

SEQ ID NO: 222874 - RNA, 24 nt, Human
uucaguguuuguucagagcucauc

SEQ ID NO: 222875 - RNA, 21 nt, Human
uucauugcauugucaugucuu

SEQ ID NO: 222876 - RNA, 26 nt, Human
uuccagaaaaagaaagaaaauguuuc

SEQ ID NO: 222877 - RNA, 19 nt, Human
uuccuuagggagaauuacc

SEQ ID NO: 222878 - RNA, 19 nt, Human
uuuccagaaaaagaaagaa

SEQ ID NO: 222879 - RNA, 21 nt, Human
aaacgcaccccccccucccca

SEQ ID NO: 222880 - RNA, 20 nt, Human
aaacuaacccccugcccacc

SEQ ID NO: 222881 - RNA, 23 nt, Human
aaacuaacccccugcccacccug

SEQ ID NO: 222882 - RNA, 23 nt, Human
aaagaaacgcaccccccccuccc

SEQ ID NO: 222883 - RNA, 19 nt, Human
acccugaaaccccgagaug

SEQ ID NO: 222884 - RNA, 23 nt, Human
acccugaaaccccgagauguccc

SEQ ID NO: 222885 - RNA, 18 nt, Human
acuaacccccugcccacc

SEQ ID NO: 222886 - RNA, 19 nt, Human
agaaacgcaccccccccuc

SEQ ID NO: 222887 - RNA, 21 nt, Human
agaaguaggcgcuggcggaac

SEQ ID NO: 222888 - RNA, 19 nt, Human
agcaguccagccaccuucc

SEQ ID NO: 222889 - RNA, 25 nt, Human
aggaaggggucccccagucuuugaa

SEQ ID NO: 222890 - RNA, 24 nt, Human
agucaggaggaaggggucccccag

SEQ ID NO: 222891 - RNA, 18 nt, Human
aguccagccaccuucccc

SEQ ID NO: 222892 - RNA, 21 nt, Human
caaaagaaacgcacccccccc

SEQ ID NO: 222893 - RNA, 20 nt, Human
caaacuaacccccugcccac

SEQ ID NO: 222894 - RNA, 20 nt, Human
caccagaaguaggcgcuggc

SEQ ID NO: 222895 - RNA, 18 nt, Human
caccccccccuccccaaa

SEQ ID NO: 222896 - RNA, 22 nt, Human
ccagccaccuuccccaagguuc

SEQ ID NO: 222897 - RNA, 23 nt, Human
cccaccuuccuccagaaggucca

SEQ ID NO: 222898 - RNA, 24 nt, Human
cccagucuuugaaacccccaccuu

SEQ ID NO: 222899 - RNA, 23 nt, Human
ccccccccuccccaaacuaaccc

SEQ ID NO: 222900 - RNA, 24 nt, Human
ccccccccuccccaaacuaacccc

SEQ ID NO: 222901 - RNA, 22 nt, Human
cccccugcccacccugaaaccc

SEQ ID NO: 222902 - RNA, 22 nt, Human
ccccugcccacccugaaacccc

SEQ ID NO: 222903 - RNA, 19 nt, Human
cccugcccacccugaaacc

SEQ ID NO: 222904 - RNA, 24 nt, Human
cccugcccacccugaaaccccgag

SEQ ID NO: 222905 - RNA, 27 nt, Human
ccuccccaaacuaacccccugcccacc

SEQ ID NO: 222906 - RNA, 20 nt, Human
ccugaaaccccgagaugucc

SEQ ID NO: 222907 - RNA, 20 nt, Human
ccugcccacccugaaacccc

SEQ ID NO: 222908 - RNA, 21 nt, Human
ccugcccacccugaaaccccg

SEQ ID NO: 222909 - RNA, 19 nt, Human
ccuuugcacuggcuguucu

SEQ ID NO: 222910 - RNA, 20 nt, Human
cgagaugucccccgcccagc

SEQ ID NO: 222911 - RNA, 23 nt, Human
cgcaccccccccuccccaaacua

SEQ ID NO: 222912 - RNA, 31 nt, Human
cgcaccccccccuccccaaacuaaccccccc

SEQ ID NO: 222913 - RNA, 21 nt, Human
cugaaaccccgagaugucccc

SEQ ID NO: 222914 - RNA, 20 nt, Human
cuggagucaggaggaagggg

SEQ ID NO: 222915 - RNA, 24 nt, Human
gaaaccccgagaugucccccgccc

SEQ ID NO: 222916 - RNA, 19 nt, Human
gaaacgcaccccccccucc

SEQ ID NO: 222917 - RNA, 23 nt, Human
gcaacaggccacagucaugcaaa

SEQ ID NO: 222918 - RNA, 19 nt, Human
gcaccccccccuccccaaa

SEQ ID NO: 222919 - RNA, 21 nt, Human
gcacuggcuguucuuucuggu

SEQ ID NO: 222920 - RNA, 24 nt, Human
gcccagcaguccagccaccuuccc

SEQ ID NO: 222921 - RNA, 24 nt, Human
gcucuugugggcaguggugagggc

SEQ ID NO: 222922 - RNA, 18 nt, Human
ggccugggugcuggaguc

SEQ ID NO: 222923 - RNA, 25 nt, Human
ggccuuugcacuggcuguucuuucu

SEQ ID NO: 222924 - RNA, 20 nt, Human
ggcugaucggggccgagcuc

SEQ ID NO: 222925 - RNA, 24 nt, Human
ggggaagggugguggauccgggga

SEQ ID NO: 222926 - RNA, 19 nt, Human
ggugcuggagucaggagga

SEQ ID NO: 222927 - RNA, 20 nt, Human
guaggcgcuggcggaacuca

SEQ ID NO: 222928 - RNA, 22 nt, Human
ucaugcaaaagaaacgcacccc

SEQ ID NO: 222929 - RNA, 22 nt, Human
uccccaaacuaacccccugccc

SEQ ID NO: 222930 - RNA, 22 nt, Human
uccccaagguucugagagcaaa

SEQ ID NO: 222931 - RNA, 22 nt, Human
ucccccagucuuugaaaccccc

SEQ ID NO: 222932 - RNA, 25 nt, Human
ucccccgcccagcaguccagccacc

SEQ ID NO: 222933 - RNA, 21 nt, Human
ucucugggccuuugcacuggc

SEQ ID NO: 222934 - RNA, 24 nt, Human
ucucugggccuuugcacuggccga

SEQ ID NO: 222935 - RNA, 26 nt, Human
ucucugggccuuugcacuggcuggcc

SEQ ID NO: 222936 - RNA, 23 nt, Human
ugaaacccccaccuuccuccaga

SEQ ID NO: 222937 - RNA, 19 nt, Human
ugaaaccccgagauguccc

SEQ ID NO: 222938 - RNA, 20 nt, Human
ugaaaccccgagaugucccc

SEQ ID NO: 222939 - RNA, 20 nt, Human
ugaagagucagugggggaag

SEQ ID NO: 222940 - RNA, 25 nt, Human
ugaagagucagugggggaagggugg

SEQ ID NO: 222941 - RNA, 21 nt, Human
uggcucuguccugaguguggg

SEQ ID NO: 222942 - RNA, 20 nt, Human
ugggaggggguguccuggca

SEQ ID NO: 222943 - RNA, 22 nt, Human
ugggccuuugcacuggcuguuc

SEQ ID NO: 222944 - RNA, 18 nt, Human
ugggggaaggguggugga

SEQ ID NO: 222945 - RNA, 20 nt, Human
uguccuggcaucccaccccc

SEQ ID NO: 222946 - RNA, 21 nt, Human
ugugggaggggguguccuggc

SEQ ID NO: 222947 - RNA, 24 nt, Human
ugugggcaguggugagggccgggc

SEQ ID NO: 222948 - RNA, 20 nt, Human
uuuuuuuuuuuuggugucuc

SEQ ID NO: 222949 - RNA, 26 nt, Human
aaaaaaacaaaacaaaacaaaacaaa

SEQ ID NO: 222950 - RNA, 20 nt, Human
aaaaggaagugacccagggc

SEQ ID NO: 222951 - RNA, 24 nt, Human
aaaaugcugggaucacagguguga

SEQ ID NO: 222952 - RNA, 22 nt, Human
aaacaaaacaaaacaaaacaaa

SEQ ID NO: 222953 - RNA, 22 nt, Human
aaacaaaacaaaacaaaacaaa

SEQ ID NO: 222954 - RNA, 22 nt, Human
aaacaaaacaaaacaaaacaaa

SEQ ID NO: 222955 - RNA, 24 nt, Human
aaacaaaacaaaacaaaacacaaa

SEQ ID NO: 222956 - RNA, 25 nt, Human
aaacaaaacacaaaaacuacuguga

SEQ ID NO: 222957 - RNA, 21 nt, Human
aaagcacuagaaaagccccag

SEQ ID NO: 222958 - RNA, 18 nt, Human
aaaugcuccuggcucucc

SEQ ID NO: 222959 - RNA, 26 nt, Human
aaaugcugggaucacaggugugagcc

SEQ ID NO: 222960 - RNA, 19 nt, Human
aacaaaacacaaaaacuac

SEQ ID NO: 222961 - RNA, 18 nt, Human
aagcacucugagauucuu

SEQ ID NO: 222962 - RNA, 21 nt, Human
acaaaacaaaacaaaacaaaa

SEQ ID NO: 222963 - RNA, 21 nt, Human
acaaaacaaaacaaaacaaaa

SEQ ID NO: 222964 - RNA, 30 nt, Human
acaaaacaaaacaaaacaaaacacaaaaaa

SEQ ID NO: 222965 - RNA, 25 nt, Human
acaaaacaaaacaaaacacaaaaaa

SEQ ID NO: 222966 - RNA, 26 nt, Human
acaaaacaaaacaaaacacaaaaacu

SEQ ID NO: 222967 - RNA, 20 nt, Human
acaaaacacaaaaacuacug

SEQ ID NO: 222968 - RNA, 23 nt, Human
acagaacacagcagaggaaaaac

SEQ ID NO: 222969 - RNA, 21 nt, Human
acaggcaccugccaccaugcc

SEQ ID NO: 222970 - RNA, 25 nt, Human
acccgccucggccucccaaaaugcu

SEQ ID NO: 222971 - RNA, 18 nt, Human
acgggguuucaccguguu

SEQ ID NO: 222972 - RNA, 19 nt, Human
acgggguuucaccguguua

SEQ ID NO: 222973 - RNA, 20 nt, Human
acgggguuucaccguguuag

SEQ ID NO: 222974 - RNA, 24 nt, Human
acgggguuucaccguguuagccag

SEQ ID NO: 222975 - RNA, 21 nt, Human
acucaacuauuccccuccccu

SEQ ID NO: 222976 - RNA, 19 nt, Human
acucauccuggccuggccc

SEQ ID NO: 222977 - RNA, 21 nt, Human
acugccauggggggcccaggc

SEQ ID NO: 222978 - RNA, 24 nt, Human
agacccaaaaaaggaagugaccca

SEQ ID NO: 222979 - RNA, 25 nt, Human
aggcuggagugcaguggcaugaucu

SEQ ID NO: 222980 - RNA, 20 nt, Human
aggggacaaggugaugguuc

SEQ ID NO: 222981 - RNA, 18 nt, Human
aguagcugggacuacagg

SEQ ID NO: 222982 - RNA, 20 nt, Human
agugcaguggcaugaucuug

SEQ ID NO: 222983 - RNA, 23 nt, Human
agugcaguggcaugaucuuggcu

SEQ ID NO: 222984 - RNA, 24 nt, Human
agugcaguggcaugaucuuggcuc

SEQ ID NO: 222985 - RNA, 24 nt, Human
aguggcaugaucuuggcucacugc

SEQ ID NO: 222986 - RNA, 18 nt, Human
auccacagcaagccucag

SEQ ID NO: 222987 - RNA, 25 nt, Human
auccacagcaagccucaggguggaa

SEQ ID NO: 222988 - RNA, 24 nt, Human
augauccacccgccucggccuccc

SEQ ID NO: 222989 - RNA, 21 nt, Human
caaaacaaaacaaaacaaaac

SEQ ID NO: 222990 - RNA, 21 nt, Human
caaaacaaaacaaaacaaaac

SEQ ID NO: 222991 - RNA, 22 nt, Human
caaaacaaaacaaaacaaaaca

SEQ ID NO: 222992 - RNA, 24 nt, Human
caaaacaaaacaaaacaaaacaaa

SEQ ID NO: 222993 - RNA, 24 nt, Human
caaaacaaaacaaaacaaaacaaa

SEQ ID NO: 222994 - RNA, 24 nt, Human
caaaacaaaacaaaacacaaaaac

SEQ ID NO: 222995 - RNA, 21 nt, Human
caaaacacaaaaacuacugug

SEQ ID NO: 222996 - RNA, 24 nt, Human
caaaacacaaaaacuacugugaug

SEQ ID NO: 222997 - RNA, 24 nt, Human
caaaaugcugggaucacaggugug

SEQ ID NO: 222998 - RNA, 18 nt, Human
caaccuccaccucccagg

SEQ ID NO: 222999 - RNA, 23 nt, Human
caacuuucuccccaggucacacc

SEQ ID NO: 223000 - RNA, 19 nt, Human
caauaggcuacacuggaca

SEQ ID NO: 223001 - RNA, 21 nt, Human
caccauggggaaacucauccu

SEQ ID NO: 223002 - RNA, 23 nt, Human
cacccgccucggccucccaaaau

SEQ ID NO: 223003 - RNA, 18 nt, Human
caccguguuagccaggau

SEQ ID NO: 223004 - RNA, 24 nt, Human
caccguguuagccaggauggucuc

SEQ ID NO: 223005 - RNA, 18 nt, Human
cacucugagauucuuggg

SEQ ID NO: 223006 - RNA, 21 nt, Human
cacugcaaccuccaccuccca

SEQ ID NO: 223007 - RNA, 19 nt, Human
cagaacacagcagaggaaa

SEQ ID NO: 223008 - RNA, 19 nt, Human
cagcugcugggguuccccc

SEQ ID NO: 223009 - RNA, 23 nt, Human
cagggccaacuggcucaucaugu

SEQ ID NO: 223010 - RNA, 21 nt, Human
caguagagacgggguuucacc

SEQ ID NO: 223011 - RNA, 24 nt, Human
caguagagacgggguuucaccgug

SEQ ID NO: 223012 - RNA, 26 nt, Human
caguagagacgggguuucaccguguu

SEQ ID NO: 223013 - RNA, 26 nt, Human
caguagagacgggguuucaccguugg

SEQ ID NO: 223014 - RNA, 18 nt, Human
caucccagacuagagguu

SEQ ID NO: 223015 - RNA, 22 nt, Human
caugccauucuucugccucagc

SEQ ID NO: 223016 - RNA, 24 nt, Human
ccaaaaugcugggaucacaggugu

SEQ ID NO: 223017 - RNA, 18 nt, Human
ccacaggcuggcugagau

SEQ ID NO: 223018 - RNA, 20 nt, Human
ccaccuucuaagagucacuc

SEQ ID NO: 223019 - RNA, 25 nt, Human
ccagcugcugggguucccccuuggu

SEQ ID NO: 223020 - RNA, 22 nt, Human
ccauccugucccuucacucgcg

SEQ ID NO: 223021 - RNA, 26 nt, Human
cccagaugcugauuuuuaaaugcucc

SEQ ID NO: 223022 - RNA, 20 nt, Human
cccagguucaugccauucuu

SEQ ID NO: 223023 - RNA, 19 nt, Human
ccccaaacagcacacucaa

SEQ ID NO: 223024 - RNA, 22 nt, Human
cccccaaacagcacacucaacu

SEQ ID NO: 223025 - RNA, 24 nt, Human
cccccaaacagcacacucaacuau

SEQ ID NO: 223026 - RNA, 23 nt, Human
cccgaguagcugggacuacaggc

SEQ ID NO: 223027 - RNA, 24 nt, Human
cccgaguagcugggacuacaggca

SEQ ID NO: 223028 - RNA, 21 nt, Human
cccugcucccaggcucugcag

SEQ ID NO: 223029 - RNA, 24 nt, Human
ccucccagguucaugccauucuuc

SEQ ID NO: 223030 - RNA, 20 nt, Human
ccugaccucaugauccaccc

SEQ ID NO: 223031 - RNA, 23 nt, Human
ccuggcccuuagccagcaccuac

SEQ ID NO: 223032 - RNA, 20 nt, Human
ccuugauggcuccugagccc

SEQ ID NO: 223033 - RNA, 22 nt, Human
cgcucuguaccucucaguaaug

SEQ ID NO: 223034 - RNA, 24 nt, Human
cgggguuucaccguguuagccagg

SEQ ID NO: 223035 - RNA, 19 nt, Human
cggugcaggggggcucagg

SEQ ID NO: 223036 - RNA, 24 nt, Human
cucacugcaaccuccaccucccag

SEQ ID NO: 223037 - RNA, 24 nt, Human
cucagcuucccgaguagcugggac

SEQ ID NO: 223038 - RNA, 24 nt, Human
cuccugaccucaugauccacccgc

SEQ ID NO: 223039 - RNA, 18 nt, Human
cuccuugcucuuugcccc

SEQ ID NO: 223040 - RNA, 21 nt, Human
cuccuugcucuuugccccauu

SEQ ID NO: 223041 - RNA, 24 nt, Human
cucgcucugucgcccaggcuggag

SEQ ID NO: 223042 - RNA, 21 nt, Human
cucuccuugcucuuugcccca

SEQ ID NO: 223043 - RNA, 18 nt, Human
cucucucucucucucucu

SEQ ID NO: 223044 - RNA, 18 nt, Human
cucucucucucucucucu

SEQ ID NO: 223045 - RNA, 18 nt, Human
cucucucucucucucucu

SEQ ID NO: 223046 - RNA, 18 nt, Human
cucucucucucucucucu

SEQ ID NO: 223047 - RNA, 18 nt, Human
cucucucucucucucucu

SEQ ID NO: 223048 - RNA, 18 nt, Human
cucucucucucucucucu

SEQ ID NO: 223049 - RNA, 18 nt, Human
cucucucucucucucucu

SEQ ID NO: 223050 - RNA, 18 nt, Human
cucucucucucucucucu

SEQ ID NO: 223051 - RNA, 20 nt, Human
cucugucgcccaggcuggag

SEQ ID NO: 223052 - RNA, 23 nt, Human
cucugucgcccaggcuggagugc

SEQ ID NO: 223053 - RNA, 23 nt, Human
cugaauaauuccccagagauuaa

SEQ ID NO: 223054 - RNA, 23 nt, Human
cugcaaccuccaccucccagguu

SEQ ID NO: 223055 - RNA, 24 nt, Human
cugcaaccuccaccucccagguuc

SEQ ID NO: 223056 - RNA, 18 nt, Human
cugcagugucuguguuca

SEQ ID NO: 223057 - RNA, 24 nt, Human
cuggagugcaguggcaugaucuug

SEQ ID NO: 223058 - RNA, 21 nt, Human
cuggcccagaugcugauuuuu

SEQ ID NO: 223059 - RNA, 20 nt, Human
cuggcucaucauguccccug

SEQ ID NO: 223060 - RNA, 24 nt, Human
cuggcugagauugugaaaaaaaca

SEQ ID NO: 223061 - RNA, 18 nt, Human
cuugggucacucccuuuc

SEQ ID NO: 223062 - RNA, 22 nt, Human
gaaaaaaacaaaacaaaacaaa

SEQ ID NO: 223063 - RNA, 18 nt, Human
gaaggaaugaggggacaa

SEQ ID NO: 223064 - RNA, 21 nt, Human
gaaugaggggacaaggugaug

SEQ ID NO: 223065 - RNA, 22 nt, Human
gaccucaugauccacccgccuc

SEQ ID NO: 223066 - RNA, 24 nt, Human
gacuacaggcaccugccaccaugc

SEQ ID NO: 223067 - RNA, 24 nt, Human
gagacgggguuucaccguguuagc

SEQ ID NO: 223068 - RNA, 23 nt, Human
gagcuuccgagucccacugaugc

SEQ ID NO: 223069 - RNA, 18 nt, Human
gagggcuggguuuauggu

SEQ ID NO: 223070 - RNA, 20 nt, Human
gaguagcugggacuacaggc

SEQ ID NO: 223071 - RNA, 25 nt, Human
gaguagcugggacuacaggcaccug

SEQ ID NO: 223072 - RNA, 18 nt, Human
gaucacaggugugagcca

SEQ ID NO: 223073 - RNA, 21 nt, Human
gaugguucucucuagguguca

SEQ ID NO: 223074 - RNA, 22 nt, Human
gcaaccuccaccucccagguuc

SEQ ID NO: 223075 - RNA, 21 nt, Human
gcagcuggaacaaucucucuc

SEQ ID NO: 223076 - RNA, 23 nt, Human
gcccaggcuggagugcaguggca

SEQ ID NO: 223077 - RNA, 24 nt, Human
gcccaggcuggagugcaguggcau

SEQ ID NO: 223078 - RNA, 19 nt, Human
gccccuugggucacucccu

SEQ ID NO: 223079 - RNA, 24 nt, Human
gccucagcuucccgaguagcuggg

SEQ ID NO: 223080 - RNA, 23 nt, Human
gccucggccucccaaaaugcugg

SEQ ID NO: 223081 - RNA, 20 nt, Human
gcuccugagcccccaaacag

SEQ ID NO: 223082 - RNA, 19 nt, Human
gcuggagugcaguggcaug

SEQ ID NO: 223083 - RNA, 24 nt, Human
ggaaaaacacacacauuuggcaga

SEQ ID NO: 223084 - RNA, 19 nt, Human
ggccccuugggucacuccc

SEQ ID NO: 223085 - RNA, 20 nt, Human
ggccccuugggucacucccu

SEQ ID NO: 223086 - RNA, 20 nt, Human
gggacuccccagccccugcc

SEQ ID NO: 223087 - RNA, 18 nt, Human
ggggcugucuagucccag

SEQ ID NO: 223088 - RNA, 20 nt, Human
gggggcccaggcaggaugcc

SEQ ID NO: 223089 - RNA, 23 nt, Human
gggguuucaccguguuagccagg

SEQ ID NO: 223090 - RNA, 19 nt, Human
ggucacucccuuucucuag

SEQ ID NO: 223091 - RNA, 20 nt, Human
ggucucgaucuccugaccuc

SEQ ID NO: 223092 - RNA, 23 nt, Human
guagagacgggguuucaccgugu

SEQ ID NO: 223093 - RNA, 19 nt, Human
gugcaggggggcucagggc

SEQ ID NO: 223094 - RNA, 23 nt, Human
uaaaaggaauugccuaugugaua

SEQ ID NO: 223095 - RNA, 18 nt, Human
uaacuucugggguguccc

SEQ ID NO: 223096 - RNA, 22 nt, Human
uaaguugaaacacugaauaauu

SEQ ID NO: 223097 - RNA, 24 nt, Human
uaauuuuuucuauuuucaguagag

SEQ ID NO: 223098 - RNA, 20 nt, Human
uacaagaggcagcacugcca

SEQ ID NO: 223099 - RNA, 21 nt, Human
uacacuggacacacagaacac

SEQ ID NO: 223100 - RNA, 22 nt, Human
uacaggcaccugccaccaugcc

SEQ ID NO: 223101 - RNA, 18 nt, Human
uagagacgggguuucacc

SEQ ID NO: 223102 - RNA, 23 nt, Human
uaggccaggaagcugcugaugcc

SEQ ID NO: 223103 - RNA, 24 nt, Human
ucaccguguuagccaggauggucu

SEQ ID NO: 223104 - RNA, 22 nt, Human
ucacucccuuucucuagcgaga

SEQ ID NO: 223105 - RNA, 24 nt, Human
ucacugcaaccuccaccucccagg

SEQ ID NO: 223106 - RNA, 25 nt, Human
ucacugcaaccuccaccucccaggu

SEQ ID NO: 223107 - RNA, 26 nt, Human
ucacugcaaccuccaccucccagguu

SEQ ID NO: 223108 - RNA, 23 nt, Human
ucagcuucccgaguagcugggac

SEQ ID NO: 223109 - RNA, 22 nt, Human
ucaguagagacgggguuucacc

SEQ ID NO: 223110 - RNA, 24 nt, Human
ucaguagagacgggguuucaccgu

SEQ ID NO: 223111 - RNA, 18 nt, Human
ucaugagggcucugugag

SEQ ID NO: 223112 - RNA, 22 nt, Human
uccaauaggcuacacuggacac

SEQ ID NO: 223113 - RNA, 25 nt, Human
uccacagcaagccucaggguggaag

SEQ ID NO: 223114 - RNA, 24 nt, Human
uccacccgccucggccucccaaaa

SEQ ID NO: 223115 - RNA, 23 nt, Human
ucccaaaaugcugggaucacagg

SEQ ID NO: 223116 - RNA, 20 nt, Human
ucccagguucaugccauucu

SEQ ID NO: 223117 - RNA, 21 nt, Human
ucccagguucaugccauucuu

SEQ ID NO: 223118 - RNA, 24 nt, Human
ucccagguucaugccauucuucug

SEQ ID NO: 223119 - RNA, 20 nt, Human
uccccagagauuaauuucug

SEQ ID NO: 223120 - RNA, 24 nt, Human
ucccgaguagcugggacuacaggc

SEQ ID NO: 223121 - RNA, 18 nt, Human
ucccuuucucuagcgaga

SEQ ID NO: 223122 - RNA, 22 nt, Human
uccgagucccacugaugcuaac

SEQ ID NO: 223123 - RNA, 23 nt, Human
uccugagcccccaaacagcacac

SEQ ID NO: 223124 - RNA, 25 nt, Human
uccugagcccccaaacagcacacuc

SEQ ID NO: 223125 - RNA, 19 nt, Human
uccugugggcagagguacc

SEQ ID NO: 223126 - RNA, 24 nt, Human
ucgcccaggcuggagugcaguggc

SEQ ID NO: 223127 - RNA, 24 nt, Human
ucgcucugucgcccaggcuggagu

SEQ ID NO: 223128 - RNA, 18 nt, Human
ucggccucccaaaaugcu

SEQ ID NO: 223129 - RNA, 19 nt, Human
ucucgcucugucgcccagg

SEQ ID NO: 223130 - RNA, 22 nt, Human
ucucgcucugucgcccaggcug

SEQ ID NO: 223131 - RNA, 23 nt, Human
ucucgcucugucgcccaggcugg

SEQ ID NO: 223132 - RNA, 24 nt, Human
ucucgcucugucgcccaggcugga

SEQ ID NO: 223133 - RNA, 26 nt, Human
ucucgcucugucgcccaggcuggagu

SEQ ID NO: 223134 - RNA, 27 nt, Human
ucucgcucugucgcccaggcuggagug

SEQ ID NO: 223135 - RNA, 26 nt, Human
ucucucugugugugugugugugugug

SEQ ID NO: 223136 - RNA, 24 nt, Human
ucugccucagcuucccgaguagcu

SEQ ID NO: 223137 - RNA, 24 nt, Human
ucugucgcccaggcuggagugcag

SEQ ID NO: 223138 - RNA, 24 nt, Human
ucugugugugugugugugugugug

SEQ ID NO: 223139 - RNA, 18 nt, Human
ucuuugccccauuccugu

SEQ ID NO: 223140 - RNA, 23 nt, Human
ugaaaaaaacaaaacaaaacaaa

SEQ ID NO: 223141 - RNA, 24 nt, Human
ugaaaaaaacaaaacaaaacaaaa

SEQ ID NO: 223142 - RNA, 24 nt, Human
ugaaacacugaauaauuccccaga

SEQ ID NO: 223143 - RNA, 23 nt, Human
ugacacucaacuuucuccccagg

SEQ ID NO: 223144 - RNA, 24 nt, Human
ugacccagggcauggagagaacag

SEQ ID NO: 223145 - RNA, 24 nt, Human
ugaccccacggaggagcuguagcu

SEQ ID NO: 223146 - RNA, 23 nt, Human
ugaccucaugauccacccgccuc

SEQ ID NO: 223147 - RNA, 22 nt, Human
ugagauggagucucgcucuguc

SEQ ID NO: 223148 - RNA, 22 nt, Human
ugagcucucaucagguaagucu

SEQ ID NO: 223149 - RNA, 18 nt, Human
ugaggggacaaggugaug

SEQ ID NO: 223150 - RNA, 22 nt, Human
ugcaguggcaugaucuuggcuc

SEQ ID NO: 223151 - RNA, 22 nt, Human
ugccaugaccccacggaggagc

SEQ ID NO: 223152 - RNA, 21 nt, Human
ugccauggggggcccaggcag

SEQ ID NO: 223153 - RNA, 20 nt, Human
ugccccauuccuguuucagg

SEQ ID NO: 223154 - RNA, 24 nt, Human
ugccucagcuucccgaguagcugg

SEQ ID NO: 223155 - RNA, 24 nt, Human
ugcugggaucacaggugugagcca

SEQ ID NO: 223156 - RNA, 24 nt, Human
uggagucucgcucugucgcccagg

SEQ ID NO: 223157 - RNA, 19 nt, Human
uggagugcaguggcaugau

SEQ ID NO: 223158 - RNA, 24 nt, Human
uggagugcaguggcaugaucuugg

SEQ ID NO: 223159 - RNA, 24 nt, Human
uggauggaucuuaacucaugaggg

SEQ ID NO: 223160 - RNA, 19 nt, Human
uggcaugaucuuggcucac

SEQ ID NO: 223161 - RNA, 21 nt, Human
uggcaugaucuuggcucacug

SEQ ID NO: 223162 - RNA, 20 nt, Human
uggcuccugagcccccaaac

SEQ ID NO: 223163 - RNA, 22 nt, Human
uggcugagauugugaaaaaaac

SEQ ID NO: 223164 - RNA, 21 nt, Human
ugggacuacaggcaccugcca

SEQ ID NO: 223165 - RNA, 22 nt, Human
ugggacuacaggcaccugccac

SEQ ID NO: 223166 - RNA, 24 nt, Human
ugggacuacaggcaccugccacca

SEQ ID NO: 223167 - RNA, 25 nt, Human
ugggacuacaggcaccugccaccau

SEQ ID NO: 223168 - RNA, 20 nt, Human
ugggagcugugagggcuggg

SEQ ID NO: 223169 - RNA, 18 nt, Human
ugggaucacaggugugag

SEQ ID NO: 223170 - RNA, 19 nt, Human
ugggaucacaggugugagc

SEQ ID NO: 223171 - RNA, 21 nt, Human
ugggaucacaggugugagcca

SEQ ID NO: 223172 - RNA, 22 nt, Human
ugggaucacaggugugagccau

SEQ ID NO: 223173 - RNA, 26 nt, Human
ugggaucacaggugugagccaucuug

SEQ ID NO: 223174 - RNA, 28 nt, Human
ugggaucacaggugugagccaucuugcc

SEQ ID NO: 223175 - RNA, 28 nt, Human
uggugggaggugcagggcacagugugau

SEQ ID NO: 223176 - RNA, 24 nt, Human
ugugaaaaaaacaaaacaaaacaa

SEQ ID NO: 223177 - RNA, 18 nt, Human
uguguguguguguguaua

SEQ ID NO: 223178 - RNA, 18 nt, Human
ugugugugugugugugug

SEQ ID NO: 223179 - RNA, 18 nt, Human
ugugugugugugugugug

SEQ ID NO: 223180 - RNA, 18 nt, Human
ugugugugugugugugug

SEQ ID NO: 223181 - RNA, 18 nt, Human
ugugugugugugugugug

SEQ ID NO: 223182 - RNA, 18 nt, Human
ugugugugugugugugug

SEQ ID NO: 223183 - RNA, 22 nt, Human
uguguguguguguguguguaua

SEQ ID NO: 223184 - RNA, 21 nt, Human
ugugugugugugugugugugu

SEQ ID NO: 223185 - RNA, 21 nt, Human
ugugugugugugugugugugu

SEQ ID NO: 223186 - RNA, 21 nt, Human
ugugugugugugugugugugu

SEQ ID NO: 223187 - RNA, 21 nt, Human
ugugugugugugugugugugu

SEQ ID NO: 223188 - RNA, 21 nt, Human
ugugugugugugugugugugu

SEQ ID NO: 223189 - RNA, 21 nt, Human
ugugugugugugugugugugu

SEQ ID NO: 223190 - RNA, 22 nt, Human
ugugugugugugugugugugua

SEQ ID NO: 223191 - RNA, 22 nt, Human
ugugugugugugugugugugug

SEQ ID NO: 223192 - RNA, 22 nt, Human
ugugugugugugugugugugug

SEQ ID NO: 223193 - RNA, 25 nt, Human
uuagcggcggugcaggggggcucuu

SEQ ID NO: 223194 - RNA, 19 nt, Human
uucaugccauucuucugcc

SEQ ID NO: 223195 - RNA, 21 nt, Human
uugccuggcccagaugcugau

SEQ ID NO: 223196 - RNA, 18 nt, Human
uugggccaaaaagcacua

SEQ ID NO: 223197 - RNA, 19 nt, Human
uuucaccguguuagccagg

SEQ ID NO: 223198 - RNA, 24 nt, Human
uuuucaguagagacgggguuucac

SEQ ID NO: 223199 - RNA, 25 nt, Human
uuuuuuuuuuuugagauggagucuc

SEQ ID NO: 223200 - RNA, 22 nt, Human
uuuuuuuuuuuuuugagaugga

SEQ ID NO: 223201 - RNA, 23 nt, Human
aaaaaaaaaauccccgguuagga

SEQ ID NO: 223202 - RNA, 20 nt, Human
aaaaaagaaaaggaaaagaa

SEQ ID NO: 223203 - RNA, 24 nt, Human
aaaaggaaaagaaaaaaacuggaa

SEQ ID NO: 223204 - RNA, 21 nt, Human
aaacggagcaagacugaacaa

SEQ ID NO: 223205 - RNA, 26 nt, Human
aaauauaaacaaauaaagaacaaagc

SEQ ID NO: 223206 - RNA, 20 nt, Human
aaaugcaaaaaagaaaagga

SEQ ID NO: 223207 - RNA, 18 nt, Human
aagaacaaagcaagagag

SEQ ID NO: 223208 - RNA, 24 nt, Human
aagaacaaagcaagagagacagaa

SEQ ID NO: 223209 - RNA, 20 nt, Human
aauauccagcacaacauugu

SEQ ID NO: 223210 - RNA, 18 nt, Human
aaucaugaucuccucucu

SEQ ID NO: 223211 - RNA, 19 nt, Human
aaugcaaaaaagaaaagga

SEQ ID NO: 223212 - RNA, 18 nt, Human
acaaagcaagagagacag

SEQ ID NO: 223213 - RNA, 19 nt, Human
acaaagcaagagagacaga

SEQ ID NO: 223214 - RNA, 21 nt, Human
acaaagcaagagagacagaaa

SEQ ID NO: 223215 - RNA, 19 nt, Human
acaaaugagggcacuuugc

SEQ ID NO: 223216 - RNA, 18 nt, Human
acaaggaaagauuguguu

SEQ ID NO: 223217 - RNA, 22 nt, Human
agaagagaaggguuugcccagc

SEQ ID NO: 223218 - RNA, 27 nt, Human
agacagaaaaagaaagagaagggaccc

SEQ ID NO: 223219 - RNA, 23 nt, Human
agacagaaaaagaaagagaauga

SEQ ID NO: 223220 - RNA, 18 nt, Human
agagacagaaaaagaaag

SEQ ID NO: 223221 - RNA, 20 nt, Human
agagacagaaaaagaaagag

SEQ ID NO: 223222 - RNA, 23 nt, Human
agcaagagagacagaaaaagaaa

SEQ ID NO: 223223 - RNA, 20 nt, Human
agcgcggagagcagggcugg

SEQ ID NO: 223224 - RNA, 22 nt, Human
agggaaggaaaugcaaaaaaga

SEQ ID NO: 223225 - RNA, 22 nt, Human
aggggcgcgcguuugggcaggg

SEQ ID NO: 223226 - RNA, 28 nt, Human
auauaucuaaaccuacauuaaugauaca

SEQ ID NO: 223227 - RNA, 26 nt, Human
augagagacaaggaaagauuguguug

SEQ ID NO: 223228 - RNA, 21 nt, Human
caaaaaagaaaaggaaaagaa

SEQ ID NO: 223229 - RNA, 22 nt, Human
caaagcaagagagacagaaaaa

SEQ ID NO: 223230 - RNA, 25 nt, Human
caagagagacagaaaaagaaagaga

SEQ ID NO: 223231 - RNA, 23 nt, Human
caccagaaaccuugcuugucaua

SEQ ID NO: 223232 - RNA, 20 nt, Human
cacccuguaguagaugaaau

SEQ ID NO: 223233 - RNA, 24 nt, Human
cagcaccgagaggcuguuaggaga

SEQ ID NO: 223234 - RNA, 23 nt, Human
caugaaauccgcagauucaauga

SEQ ID NO: 223235 - RNA, 21 nt, Human
ccagcacaacauugucagagc

SEQ ID NO: 223236 - RNA, 20 nt, Human
ccgcccgcccagccucucca

SEQ ID NO: 223237 - RNA, 22 nt, Human
cgcgggucuccaccccuccgcc

SEQ ID NO: 223238 - RNA, 24 nt, Human
cggcguccgcgggucuccaccccu

SEQ ID NO: 223239 - RNA, 21 nt, Human
cggcuccagguccggcuuccc

SEQ ID NO: 223240 - RNA, 18 nt, Human
cggcuucccggcguccgc

SEQ ID NO: 223241 - RNA, 26 nt, Human
cguuugggcagggacgggggagggag

SEQ ID NO: 223242 - RNA, 23 nt, Human
cucugugucucacugaaugaaua

SEQ ID NO: 223243 - RNA, 22 nt, Human
cugcaauauccagcacaacauu

SEQ ID NO: 223244 - RNA, 23 nt, Human
cugccacacccacaugggggcaa

SEQ ID NO: 223245 - RNA, 18 nt, Human
cugggcccaagggagggg

SEQ ID NO: 223246 - RNA, 24 nt, Human
cugggcccuguaacugccacaccc

SEQ ID NO: 223247 - RNA, 20 nt, Human
cuguaacugccacacccaca

SEQ ID NO: 223248 - RNA, 22 nt, Human
cuugaagauuuguuuucugguc

SEQ ID NO: 223249 - RNA, 22 nt, Human
gaaguggggaaagauaagagug

SEQ ID NO: 223250 - RNA, 21 nt, Human
gacgggggagggagacugggu

SEQ ID NO: 223251 - RNA, 22 nt, Human
gagaaugagagacaaggaaaga

SEQ ID NO: 223252 - RNA, 24 nt, Human
gagaccaggcuugggccacaaaug

SEQ ID NO: 223253 - RNA, 22 nt, Human
gagcagggcugggcgcugggcc

SEQ ID NO: 223254 - RNA, 20 nt, Human
gauaagaguggcagaagaaa

SEQ ID NO: 223255 - RNA, 20 nt, Human
gcaagagagacagaaaaaga

SEQ ID NO: 223256 - RNA, 19 nt, Human
gcccaagggaggggcggag

SEQ ID NO: 223257 - RNA, 20 nt, Human
ggaaggaaaugcaaaaaaga

SEQ ID NO: 223258 - RNA, 18 nt, Human
ggaaugaaguggggaaag

SEQ ID NO: 223259 - RNA, 20 nt, Human
ggcuguuaggagacuccauu

SEQ ID NO: 223260 - RNA, 22 nt, Human
gggaaagauaagaguggcagaa

SEQ ID NO: 223261 - RNA, 18 nt, Human
gggacgggggagggagac

SEQ ID NO: 223262 - RNA, 19 nt, Human
gggcccaagggaggggcgg

SEQ ID NO: 223263 - RNA, 22 nt, Human
gggcugggcgcugggcccaagg

SEQ ID NO: 223264 - RNA, 18 nt, Human
guacuuuuguacaugcug

SEQ ID NO: 223265 - RNA, 21 nt, Human
guggcagaagaaaaaaaaaaa

SEQ ID NO: 223266 - RNA, 22 nt, Human
uaaauaggcaccagaaaccuug

SEQ ID NO: 223267 - RNA, 25 nt, Human
uaacugagagagggcagguagauau

SEQ ID NO: 223268 - RNA, 20 nt, Human
uacaaaaagaaaauaauuac

SEQ ID NO: 223269 - RNA, 18 nt, Human
uacauaaggcauauauau

SEQ ID NO: 223270 - RNA, 19 nt, Human
uacuuuuguacaugcuggg

SEQ ID NO: 223271 - RNA, 20 nt, Human
uagcagugcugugcuauggu

SEQ ID NO: 223272 - RNA, 23 nt, Human
uaguagaugaaaugaauugggau

SEQ ID NO: 223273 - RNA, 19 nt, Human
uauuguacaacacaugcag

SEQ ID NO: 223274 - RNA, 18 nt, Human
uccagccaggugcggccg

SEQ ID NO: 223275 - RNA, 25 nt, Human
uccaugucuaccuugucaaucugaa

SEQ ID NO: 223276 - RNA, 21 nt, Human
ucccucuggccgagcgcggag

SEQ ID NO: 223277 - RNA, 25 nt, Human
uccuuacaucugcaccuugaaagca

SEQ ID NO: 223278 - RNA, 19 nt, Human
ucugcucgcggcugcuccg

SEQ ID NO: 223279 - RNA, 22 nt, Human
ugaaacggagcaagacugaaca

SEQ ID NO: 223280 - RNA, 21 nt, Human
ugaauaacugagagagggcag

SEQ ID NO: 223281 - RNA, 18 nt, Human
ugaaugaauaaauaggca

SEQ ID NO: 223282 - RNA, 20 nt, Human
ugagagacaaggaaagauug

SEQ ID NO: 223283 - RNA, 28 nt, Human
ugcaaaaaagaaaaggaaaagaaaaaaa

SEQ ID NO: 223284 - RNA, 23 nt, Human
ugcuccggcuccagguccggcuu

SEQ ID NO: 223285 - RNA, 22 nt, Human
uggcagaagaaaaaaaaaaauc

SEQ ID NO: 223286 - RNA, 23 nt, Human
uggcagaagaaaaaaaaaaaucc

SEQ ID NO: 223287 - RNA, 18 nt, Human
uggggggagaagagaagg

SEQ ID NO: 223288 - RNA, 21 nt, Human
uggggggagaagagaaggguu

SEQ ID NO: 223289 - RNA, 19 nt, Human
uguacaacacaugcaggua

SEQ ID NO: 223290 - RNA, 21 nt, Human
uguuaggagacuccauucugc

SEQ ID NO: 223291 - RNA, 21 nt, Human
uuaaauccuuacaucugcacc

SEQ ID NO: 223292 - RNA, 23 nt, Human
uucccggcguccgcgggucucca

SEQ ID NO: 223293 - RNA, 23 nt, Human
uucuaaaguuauauaucuaaacc

SEQ ID NO: 223294 - RNA, 22 nt, Human
uugucuucagcucaccugggcc

SEQ ID NO: 223295 - RNA, 18 nt, Human
uuucacaucagcaccgag

SEQ ID NO: 223296 - RNA, 25 nt, Human
uuugggaggagaccaggcuugggcc

SEQ ID NO: 223297 - RNA, 24 nt, Human
aaacaagcauaagccaugaauccu

SEQ ID NO: 223298 - RNA, 25 nt, Human
aaacaagcauaagccaugaauccuc

SEQ ID NO: 223299 - RNA, 28 nt, Human
aaacaagcauaagccaugaauccuccac

SEQ ID NO: 223300 - RNA, 19 nt, Human
accaggggccgcccaggcg

SEQ ID NO: 223301 - RNA, 21 nt, Human
aggcggagggacaaauugggg

SEQ ID NO: 223302 - RNA, 20 nt, Human
auaaaauguagaaggacaca

SEQ ID NO: 223303 - RNA, 20 nt, Human
caccugccucuccgucccug

SEQ ID NO: 223304 - RNA, 19 nt, Human
cagcuuagccaccucccuc

SEQ ID NO: 223305 - RNA, 19 nt, Human
cagcuuagccaccucccuc

SEQ ID NO: 223306 - RNA, 24 nt, Human
cagugcccagcauaaaccgucaaa

SEQ ID NO: 223307 - RNA, 20 nt, Human
cccucucaccugccucuccg

SEQ ID NO: 223308 - RNA, 24 nt, Human
cccuggacacccguccucagacuc

SEQ ID NO: 223309 - RNA, 24 nt, Human
cggcgggccgcgggcaggucccuc

SEQ ID NO: 223310 - RNA, 21 nt, Human
cgggaccaggggccgcccagg

SEQ ID NO: 223311 - RNA, 18 nt, Human
cguguccuaaggagaaga

SEQ ID NO: 223312 - RNA, 20 nt, Human
cuccggguagcgggcgcggc

SEQ ID NO: 223313 - RNA, 27 nt, Human
gcccaggcggagggacaaauugggggc

SEQ ID NO: 223314 - RNA, 18 nt, Human
gcgcgcgggaccaggggc

SEQ ID NO: 223315 - RNA, 19 nt, Human
ggaccuccuugcacacgcc

SEQ ID NO: 223316 - RNA, 20 nt, Human
ggaccuccuugcacacgccg

SEQ ID NO: 223317 - RNA, 19 nt, Human
ggcaggucccucgcucucc

SEQ ID NO: 223318 - RNA, 18 nt, Human
gggcgcggcggcuggacc

SEQ ID NO: 223319 - RNA, 18 nt, Human
ucccucucaccugccucu

SEQ ID NO: 223320 - RNA, 22 nt, Human
ucucaccugccucuccgucccu

SEQ ID NO: 223321 - RNA, 24 nt, Human
uguccuaaggagaagaguuaaaau

SEQ ID NO: 223322 - RNA, 23 nt, Human
uguuccagcucugguucagucug

SEQ ID NO: 223323 - RNA, 26 nt, Human
aaaaugaacauacuuaagccucuucc

SEQ ID NO: 223324 - RNA, 20 nt, Human
aaagccaaagccaaggccaa

SEQ ID NO: 223325 - RNA, 23 nt, Human
aaagccaaggccaacgccgcaga

SEQ ID NO: 223326 - RNA, 23 nt, Human
aagagaaaucaaaagaaacaaaa

SEQ ID NO: 223327 - RNA, 20 nt, Human
aagccaaagccaaggccaaa

SEQ ID NO: 223328 - RNA, 22 nt, Human
aagccaaggccaacgccgcaga

SEQ ID NO: 223329 - RNA, 23 nt, Human
acagaauauaaacauauuuauac

SEQ ID NO: 223330 - RNA, 19 nt, Human
acauugcaaacaguagcua

SEQ ID NO: 223331 - RNA, 18 nt, Human
acuacacuaggaucuggu

SEQ ID NO: 223332 - RNA, 23 nt, Human
agccaucagcuaaaugaucuaaa

SEQ ID NO: 223333 - RNA, 28 nt, Human
agccucuuccuugcacccugacccuggu

SEQ ID NO: 223334 - RNA, 21 nt, Human
aguuucagaacuacacuagga

SEQ ID NO: 223335 - RNA, 22 nt, Human
caaagccaaagccaaggccaac

SEQ ID NO: 223336 - RNA, 21 nt, Human
caaagccaaggccaacgccgc

SEQ ID NO: 223337 - RNA, 22 nt, Human
caccgccgccgccaaagccaaa

SEQ ID NO: 223338 - RNA, 24 nt, Human
caccgccgccgccaaagccaaagc

SEQ ID NO: 223339 - RNA, 20 nt, Human
cagcauacugcuucaaguau

SEQ ID NO: 223340 - RNA, 25 nt, Human
cauugcaaacaguagcuauuucuua

SEQ ID NO: 223341 - RNA, 21 nt, Human
ccaaaaauaaucauuuugggu

SEQ ID NO: 223342 - RNA, 20 nt, Human
ccaaagccaaagccaaggcc

SEQ ID NO: 223343 - RNA, 21 nt, Human
ccaaagccaaagccaaggccc

SEQ ID NO: 223344 - RNA, 26 nt, Human
ccaaagccaaggccaacgccgcagac

SEQ ID NO: 223345 - RNA, 22 nt, Human
ccaacgccgcagaccggccgga

SEQ ID NO: 223346 - RNA, 22 nt, Human
ccaccgccgccgccaaagccaa

SEQ ID NO: 223347 - RNA, 19 nt, Human
ccaguuaaaaguauaaaau

SEQ ID NO: 223348 - RNA, 19 nt, Human
ccccaaaguuuccaguuaa

SEQ ID NO: 223349 - RNA, 18 nt, Human
cccccgcccccgcccggg

SEQ ID NO: 223350 - RNA, 18 nt, Human
ccccgcccccgcccgggc

SEQ ID NO: 223351 - RNA, 20 nt, Human
ccccgcccgggccuggcucc

SEQ ID NO: 223352 - RNA, 24 nt, Human
ccccgccgcccccgcccccgcccg

SEQ ID NO: 223353 - RNA, 20 nt, Human
cccgcccgccgcccgcuccc

SEQ ID NO: 223354 - RNA, 22 nt, Human
cccgccgcccccgcccccgccc

SEQ ID NO: 223355 - RNA, 19 nt, Human
cccgcgcgcccgcccgccc

SEQ ID NO: 223356 - RNA, 19 nt, Human
ccgccccgcuccuccgggc

SEQ ID NO: 223357 - RNA, 20 nt, Human
ccgccccgcuccuccgggca

SEQ ID NO: 223358 - RNA, 22 nt, Human
ccgcccgcucccccgcgcgccc

SEQ ID NO: 223359 - RNA, 20 nt, Human
ccgcccgggccuggcucccg

SEQ ID NO: 223360 - RNA, 18 nt, Human
ccgccgcccccgcccccg

SEQ ID NO: 223361 - RNA, 19 nt, Human
ccgccgcccccgcccccgc

SEQ ID NO: 223362 - RNA, 21 nt, Human
ccgccgcccccgcccccgccc

SEQ ID NO: 223363 - RNA, 23 nt, Human
ccgccgcccccgcccccgcccgg

SEQ ID NO: 223364 - RNA, 28 nt, Human
ccgccgcccgcucccccgcgcgcccgcc

SEQ ID NO: 223365 - RNA, 25 nt, Human
ccgcucccccgcgcgcccgcccgcc

SEQ ID NO: 223366 - RNA, 22 nt, Human
ccgcuccuccgggcagcgccgu

SEQ ID NO: 223367 - RNA, 27 nt, Human
ccuccgggcagcgccgucuuccugccc

SEQ ID NO: 223368 - RNA, 21 nt, Human
cgccaaagccaaagccaaggc

SEQ ID NO: 223369 - RNA, 23 nt, Human
cgcccccgcccccgcccgggccu

SEQ ID NO: 223370 - RNA, 19 nt, Human
cgccccgcuccuccgggca

SEQ ID NO: 223371 - RNA, 20 nt, Human
cgcccgggccuggcucccgc

SEQ ID NO: 223372 - RNA, 18 nt, Human
cgccgcagaccggccgga

SEQ ID NO: 223373 - RNA, 18 nt, Human
cgcgcgcccgcccgcccc

SEQ ID NO: 223374 - RNA, 24 nt, Human
cgcgcgcccgcccgccccgcuccu

SEQ ID NO: 223375 - RNA, 24 nt, Human
cuuaguuucagaacuacacuagga

SEQ ID NO: 223376 - RNA, 18 nt, Human
cuucuaaccacagcagca

SEQ ID NO: 223377 - RNA, 27 nt, Human
cuugcacccugacccuggugcucuagc

SEQ ID NO: 223378 - RNA, 19 nt, Human
gcccccgcccccgcccggg

SEQ ID NO: 223379 - RNA, 20 nt, Human
gccccgcuccuccgggcagc

SEQ ID NO: 223380 - RNA, 20 nt, Human
gccccgcuccuccgggcagc

SEQ ID NO: 223381 - RNA, 23 nt, Human
gcccgcucccccgcgcgcccgcc

SEQ ID NO: 223382 - RNA, 22 nt, Human
gccgccgccaaagccaaagcca

SEQ ID NO: 223383 - RNA, 18 nt, Human
ggccuggcucccgcccgc

SEQ ID NO: 223384 - RNA, 19 nt, Human
gugaccuaaaccauaugua

SEQ ID NO: 223385 - RNA, 18 nt, Human
uaaaacacaucucuaugc

SEQ ID NO: 223386 - RNA, 26 nt, Human
uacacauaaaccuauuuauaaaacac

SEQ ID NO: 223387 - RNA, 18 nt, Human
uaguauaaagagaaaucc

SEQ ID NO: 223388 - RNA, 18 nt, Human
uauuguagcaacucugga

SEQ ID NO: 223389 - RNA, 22 nt, Human
ucccgcccgccgcccgcucccc

SEQ ID NO: 223390 - RNA, 23 nt, Human
ucucaaguuuauuauuccccuua

SEQ ID NO: 223391 - RNA, 21 nt, Human
ugauaaaaaugaacauacuua

SEQ ID NO: 223392 - RNA, 21 nt, Human
ugcaaaccccaaaguuuccag

SEQ ID NO: 223393 - RNA, 21 nt, Human
ugcacccugacccuggugcuc

SEQ ID NO: 223394 - RNA, 23 nt, Human
ugcuggggucacagcuucuuugu

SEQ ID NO: 223395 - RNA, 19 nt, Human
uggcucccgcccgccgccc

SEQ ID NO: 223396 - RNA, 26 nt, Human
uggguacaugcaaaccaguacacaua

SEQ ID NO: 223397 - RNA, 23 nt, Human
uucuccaccgccgccgccaaagc

SEQ ID NO: 223398 - RNA, 23 nt, Human
uuugucacauaugaauuuuaggu

SEQ ID NO: 223399 - RNA, 24 nt, Human
aaaacaucguggcgcaaagucucc

SEQ ID NO: 223400 - RNA, 25 nt, Human
aacacacacacacacacacacaacg

SEQ ID NO: 223401 - RNA, 18 nt, Human
aacgcucaguccaagacc

SEQ ID NO: 223402 - RNA, 18 nt, Human
aagaugccgcuccaagcg

SEQ ID NO: 223403 - RNA, 21 nt, Human
aaggcugggaaagcccgaaaa

SEQ ID NO: 223404 - RNA, 27 nt, Human
acacacaacgcucaguccaagaccaau

SEQ ID NO: 223405 - RNA, 25 nt, Human
acacacacacacaacgcucagucca

SEQ ID NO: 223406 - RNA, 22 nt, Human
acacacacacacacacacaacg

SEQ ID NO: 223407 - RNA, 23 nt, Human
acacacacacacacacacacaca

SEQ ID NO: 223408 - RNA, 26 nt, Human
acacacacacacacacacacacaacg

SEQ ID NO: 223409 - RNA, 20 nt, Human
acauaaccagcucccaccca

SEQ ID NO: 223410 - RNA, 20 nt, Human
acauaaccagcucccaccca

SEQ ID NO: 223411 - RNA, 22 nt, Human
acauaaccagcucccacccaau

SEQ ID NO: 223412 - RNA, 27 nt, Human
accccagaaaaagacaggugggaaaau

SEQ ID NO: 223413 - RNA, 21 nt, Human
acuagguaugaugcacugaau

SEQ ID NO: 223414 - RNA, 21 nt, Human
acuagguaugaugcacugaau

SEQ ID NO: 223415 - RNA, 21 nt, Human
acuuuaaugaaugccgugugg

SEQ ID NO: 223416 - RNA, 18 nt, Human
agaaaaagacagguggga

SEQ ID NO: 223417 - RNA, 23 nt, Human
agaaaugaaaagaacccaaauaa

SEQ ID NO: 223418 - RNA, 20 nt, Human
agaacuggagagggcuuggg

SEQ ID NO: 223419 - RNA, 21 nt, Human
agaaggggaagaaaugaaaag

SEQ ID NO: 223420 - RNA, 22 nt, Human
agaaggggaagaaaugaaaaga

SEQ ID NO: 223421 - RNA, 18 nt, Human
agcgguucugucucccuc

SEQ ID NO: 223422 - RNA, 23 nt, Human
aggugggaaaauauuagcuuggu

SEQ ID NO: 223423 - RNA, 21 nt, Human
auagaaagacuagguaugaug

SEQ ID NO: 223424 - RNA, 21 nt, Human
auagaaagacuagguaugaug

SEQ ID NO: 223425 - RNA, 31 nt, Human
auauuaaaaacacacacacacacacacacag

SEQ ID NO: 223426 - RNA, 31 nt, Human; identical to SEQ ID NO: 223425

SEQ ID NO: 223427 - RNA, 31 nt, Human
auuaaaaacacacacacacacacacacacag

SEQ ID NO: 223428 - RNA, 21 nt, Human
auuccaggugcucucaggucc

SEQ ID NO: 223429 - RNA, 21 nt, Human
auuccaggugcucucaggucc

SEQ ID NO: 223430 - RNA, 22 nt, Human
caagaaagaugccgcuccaagc

SEQ ID NO: 223431 - RNA, 24 nt, Human
cacaacgcucaguccaagaccaau

SEQ ID NO: 223432 - RNA, 23 nt, Human
cacacaacgcucaguccaagacc

SEQ ID NO: 223433 - RNA, 30 nt, Human
cacacacacacacacacaacgcucagucca

SEQ ID NO: 223434 - RNA, 20 nt, Human
cacacacacacacacacaca

SEQ ID NO: 223435 - RNA, 20 nt, Human
cacacacacacacacacaca

SEQ ID NO: 223436 - RNA, 26 nt, Human
cacacacacacacacacacaacgcuc

SEQ ID NO: 223437 - RNA, 19 nt, Human
cacgggucucugcagcuca

SEQ ID NO: 223438 - RNA, 25 nt, Human
cagaguaaagugcaggcuccaugcc

SEQ ID NO: 223439 - RNA, 19 nt, Human
cagcucaaaaccugcccgg

SEQ ID NO: 223440 - RNA, 21 nt, Human
cagggguacagcacugccacu

SEQ ID NO: 223441 - RNA, 21 nt, Human
cagggguacagcacugccacu

SEQ ID NO: 223442 - RNA, 20 nt, Human
caugccaaaaugucaacucc

SEQ ID NO: 223443 - RNA, 20 nt, Human
caugccaaaaugucaacucc

SEQ ID NO: 223444 - RNA, 18 nt, Human
ccaagaaagaugccgcuc

SEQ ID NO: 223445 - RNA, 19 nt, Human
ccagaaggggaagaaauga

SEQ ID NO: 223446 - RNA, 22 nt, Human
ccagaaggggaagaaaugaaaa

SEQ ID NO: 223447 - RNA, 21 nt, Human
ccccuccccacgcuccagccc

SEQ ID NO: 223448 - RNA, 22 nt, Human
cccgaaaaccccagucaucucu

SEQ ID NO: 223449 - RNA, 19 nt, Human
cccucugugccgccgcaac

SEQ ID NO: 223450 - RNA, 20 nt, Human
ccucaagcuuuacacgccuc

SEQ ID NO: 223451 - RNA, 24 nt, Human
ccuucugugugugcacauauuacu

SEQ ID NO: 223452 - RNA, 24 nt, Human
ccuucugugugugcacauauuacu

SEQ ID NO: 223453 - RNA, 25 nt, Human
cuggagcgcaccaauaguugccccc

SEQ ID NO: 223454 - RNA, 19 nt, Human
cuggcaacgaaguuucccc

SEQ ID NO: 223455 - RNA, 23 nt, Human
cuggcucccuuacccccucccca

SEQ ID NO: 223456 - RNA, 20 nt, Human
cuugggggagaacuggagag

SEQ ID NO: 223457 - RNA, 21 nt, Human
gaaaugaaaagaacccaaaua

SEQ ID NO: 223458 - RNA, 22 nt, Human
gcccgaaaaccccagucaucuc

SEQ ID NO: 223459 - RNA, 21 nt, Human
gcucccuuacccccuccccac

SEQ ID NO: 223460 - RNA, 22 nt, Human
ggagaacuggagagggcuuggg

SEQ ID NO: 223461 - RNA, 24 nt, Human
ggcuggcggccacugcguccuggg

SEQ ID NO: 223462 - RNA, 20 nt, Human
ggggaagaaaugaaaagaac

SEQ ID NO: 223463 - RNA, 18 nt, Human
gugcucucagguccccac

SEQ ID NO: 223464 - RNA, 18 nt, Human
gugcucucagguccccac

SEQ ID NO: 223465 - RNA, 23 nt, Human
guuccugcggcaggaaaacaaaa

SEQ ID NO: 223466 - RNA, 21 nt, Human
uaaaaacacacacacacacac

SEQ ID NO: 223467 - RNA, 25 nt, Human
uaaaaacacacacacacacacacac

SEQ ID NO: 223468 - RNA, 19 nt, Human
uaaaaagacacaccuguuu

SEQ ID NO: 223469 - RNA, 19 nt, Human
uaaaaagacacaccuguuu

SEQ ID NO: 223470 - RNA, 25 nt, Human
uaaccagcucccacccaaucagguc

SEQ ID NO: 223471 - RNA, 25 nt, Human
uaaccagcucccacccaaucagguc

SEQ ID NO: 223472 - RNA, 23 nt, Human
uacccccuccccacgcuccagcc

SEQ ID NO: 223473 - RNA, 25 nt, Human
uacgugcacggacacucuuggugug

SEQ ID NO: 223474 - RNA, 25 nt, Human
uacgugcacggacacucuuggugug

SEQ ID NO: 223475 - RNA, 21 nt, Human
ucaaaaccugcccggcuggag

SEQ ID NO: 223476 - RNA, 23 nt, Human
uccaacgcuaguuacacauaacc

SEQ ID NO: 223477 - RNA, 23 nt, Human
uccaacgcuaguuacacauaacc

SEQ ID NO: 223478 - RNA, 19 nt, Human
uccaggugcucucaggucc

SEQ ID NO: 223479 - RNA, 22 nt, Human
ucccacccaaucagguccccuu

SEQ ID NO: 223480 - RNA, 22 nt, Human
ucccacccaaucagguccccuu

SEQ ID NO: 223481 - RNA, 18 nt, Human
uccccgaguuggcuggcu

SEQ ID NO: 223482 - RNA, 18 nt, Human
ucccucugugccgccgca

SEQ ID NO: 223483 - RNA, 22 nt, Human
ucccugcacucgccggccccca

SEQ ID NO: 223484 - RNA, 25 nt, Human
ucccuuacccccuccccacgcucca

SEQ ID NO: 223485 - RNA, 23 nt, Human
uccgaggaugggggagccuugga

SEQ ID NO: 223486 - RNA, 21 nt, Human
uccucaagcuuuacacgccuc

SEQ ID NO: 223487 - RNA, 20 nt, Human
uccugggugcacucgguggc

SEQ ID NO: 223488 - RNA, 19 nt, Human
ucgguggcaaagcgcugcu

SEQ ID NO: 223489 - RNA, 20 nt, Human
ucguacgugugcucugaucu

SEQ ID NO: 223490 - RNA, 20 nt, Human
ucguacgugugcucugaucu

SEQ ID NO: 223491 - RNA, 20 nt, Human
ugaaaagaacccaaauaaua

SEQ ID NO: 223492 - RNA, 21 nt, Human
ugaaaagaacccaaauaauaa

SEQ ID NO: 223493 - RNA, 18 nt, Human
ugagaaaagcaauugcac

SEQ ID NO: 223494 - RNA, 18 nt, Human
ugagaaaagcaauugcac

SEQ ID NO: 223495 - RNA, 20 nt, Human
ugagaaaagcaauugcaccc

SEQ ID NO: 223496 - RNA, 22 nt, Human
ugaucugcuuccaacaaauucc

SEQ ID NO: 223497 - RNA, 22 nt, Human
ugaucugcuuccaacaaauucc

SEQ ID NO: 223498 - RNA, 22 nt, Human
ugcacggacacucuuggugugu

SEQ ID NO: 223499 - RNA, 22 nt, Human
ugcacggacacucuuggugugu

SEQ ID NO: 223500 - RNA, 20 nt, Human
ugcccagaaggggaagaaau

SEQ ID NO: 223501 - RNA, 18 nt, Human
ugccgcuccaagcgguuc

SEQ ID NO: 223502 - RNA, 20 nt, Human
uggaaagagacugccuagcg

SEQ ID NO: 223503 - RNA, 27 nt, Human
uggagcgcaccaauaguugccccacca

SEQ ID NO: 223504 - RNA, 22 nt, Human
uggcccggcaugggaaggcugg

SEQ ID NO: 223505 - RNA, 21 nt, Human
ugggaaaauauuagcuugggg

SEQ ID NO: 223506 - RNA, 18 nt, Human
uguccugcguuugcuauc

SEQ ID NO: 223507 - RNA, 18 nt, Human
uguccugcguuugcuauc

SEQ ID NO: 223508 - RNA, 20 nt, Human
uuaaaaacacacacacacac

SEQ ID NO: 223509 - RNA, 20 nt, Human
uuaaaaacacacacacacac

SEQ ID NO: 223510 - RNA, 23 nt, Human
uuacccccuccccacgcuccagc

SEQ ID NO: 223511 - RNA, 24 nt, Human
uucaaugcuauguaauuuuggacu

SEQ ID NO: 223512 - RNA, 24 nt, Human
uucaaugcuauguaauuuuggacu

SEQ ID NO: 223513 - RNA, 21 nt, Human
uuugucaugagaaaagcaauu

SEQ ID NO: 223514 - RNA, 21 nt, Human
uuugucaugagaaaagcaauu

SEQ ID NO: 223515 - RNA, 18 nt, Human
uuuuuuuuuuuucuuuug

SEQ ID NO: 223516 - RNA, 19 nt, Human
uuuuuuuuuuuucuuuugu

SEQ ID NO: 223517 - RNA, 24 nt, Human
uuuuuuuuuuuuuuuucuuuuggg

SEQ ID NO: 223518 - RNA, 18 nt, Human
acccugaaaaguuaagaa

SEQ ID NO: 223519 - RNA, 18 nt, Human
acccugaaaaguuaagaa

SEQ ID NO: 223520 - RNA, 20 nt, Human
agaaagaaagugcuggcuca

SEQ ID NO: 223521 - RNA, 24 nt, Human
aggugagccuaggggugggggcag

SEQ ID NO: 223522 - RNA, 19 nt, Human
agucugggcacaaaaaggc

SEQ ID NO: 223523 - RNA, 25 nt, Human
auaaggcacugacagaaaauuucuu

SEQ ID NO: 223524 - RNA, 18 nt, Human
aucagaaagaaagugcug

SEQ ID NO: 223525 - RNA, 19 nt, Human
augggagaacugggguaaa

SEQ ID NO: 223526 - RNA, 23 nt, Human
auuccacucaucaaagaaagugg

SEQ ID NO: 223527 - RNA, 23 nt, Human
caacaagcaucaucagaaagaaa

SEQ ID NO: 223528 - RNA, 20 nt, Human
cacacuguuuccagcaaggu

SEQ ID NO: 223529 - RNA, 18 nt, Human
cagcaacagucauaaaga

SEQ ID NO: 223530 - RNA, 20 nt, Human
cauuuuacacacuguuucca

SEQ ID NO: 223531 - RNA, 20 nt, Human
cccuuugagcucaugcacaa

SEQ ID NO: 223532 - RNA, 24 nt, Human
ccuauggcuaugccuaagguuauu

SEQ ID NO: 223533 - RNA, 27 nt, Human
cuauuuuguucccccuuugagcucaug

SEQ ID NO: 223534 - RNA, 22 nt, Human
gaccaugauggguguaucuagu

SEQ ID NO: 223535 - RNA, 21 nt, Human
gagaacugggguaaaagacug

SEQ ID NO: 223536 - RNA, 26 nt, Human
gagaaguccucaccuauggcuaugcc

SEQ ID NO: 223537 - RNA, 18 nt, Human
gcuagagagguucuguuu

SEQ ID NO: 223538 - RNA, 18 nt, Human
gggaaagagagaggaaaa

SEQ ID NO: 223539 - RNA, 21 nt, Human
uaaaaaaugcuaccagcaaca

SEQ ID NO: 223540 - RNA, 25 nt, Human
uaaaaaaugcuaccagcaacaguca

SEQ ID NO: 223541 - RNA, 22 nt, Human
uacaaaaaaaaaauuguuguca

SEQ ID NO: 223542 - RNA, 19 nt, Human
uacacacuguuuccagcaa

SEQ ID NO: 223543 - RNA, 23 nt, Human
uacauuguuaccagaaacaauuc

SEQ ID NO: 223544 - RNA, 24 nt, Human
uaccagaaacaauucucauucauu

SEQ ID NO: 223545 - RNA, 25 nt, Human
uaccagaaacaauucucauucauuc

SEQ ID NO: 223546 - RNA, 21 nt, Human
uaggcucaguuagguagaccc

SEQ ID NO: 223547 - RNA, 19 nt, Human
uagguagacccugaaaagu

SEQ ID NO: 223548 - RNA, 24 nt, Human
ucaaagcuacauuguuaccagaaa

SEQ ID NO: 223549 - RNA, 23 nt, Human
uccagcaagguaugguauucaaa

SEQ ID NO: 223550 - RNA, 20 nt, Human
ugagccuaggggugggggca

SEQ ID NO: 223551 - RNA, 22 nt, Human
ugggagaacugggguaaaagac

SEQ ID NO: 223552 - RNA, 24 nt, Human
uucucauucauucugaggccuuau

SEQ ID NO: 223553 - RNA, 20 nt, Human
aaacaauccucccaccucaa

SEQ ID NO: 223554 - RNA, 25 nt, Human
aaacaauccucccaccucagccucc

SEQ ID NO: 223555 - RNA, 22 nt, Human
aagccaugcaaaacaacacgaa

SEQ ID NO: 223556 - RNA, 20 nt, Human
aagggcagugucuggaaggc

SEQ ID NO: 223557 - RNA, 22 nt, Human
aagucgcugggacucccaggcc

SEQ ID NO: 223558 - RNA, 18 nt, Human
acccagcccccaccccuu

SEQ ID NO: 223559 - RNA, 19 nt, Human
acccaggcuggaguacagu

SEQ ID NO: 223560 - RNA, 23 nt, Human
accucagccucccaagucgcugg

SEQ ID NO: 223561 - RNA, 24 nt, Human
acuaugucaccuaggcuggucucg

SEQ ID NO: 223562 - RNA, 18 nt, Human
agaauguggcuggaggcc

SEQ ID NO: 223563 - RNA, 21 nt, Human
agaccuagcaggacagaggua

SEQ ID NO: 223564 - RNA, 21 nt, Human
agcaauccuccaaccucagcc

SEQ ID NO: 223565 - RNA, 18 nt, Human
agccucgaccucccaggc

SEQ ID NO: 223566 - RNA, 19 nt, Human
aguacaguggugcaaucag

SEQ ID NO: 223567 - RNA, 21 nt, Human
augaccuaaguaggguuuugu

SEQ ID NO: 223568 - RNA, 22 nt, Human
auggggucucacuaugucaccu

SEQ ID NO: 223569 - RNA, 23 nt, Human
auggggucucacuaugucaccua

SEQ ID NO: 223570 - RNA, 24 nt, Human
auggggucucacuaugucaccuag

SEQ ID NO: 223571 - RNA, 27 nt, Human
caaacaauccucccaccucagccuccc

SEQ ID NO: 223572 - RNA, 23 nt, Human
caaagccaugcaaaacaacacga

SEQ ID NO: 223573 - RNA, 24 nt, Human
caaagccaugcaaaacaacacgaa

SEQ ID NO: 223574 - RNA, 24 nt, Human
cacccuggcuuuuggaaccaaggg

SEQ ID NO: 223575 - RNA, 24 nt, Human
caccuaggcuggucucgaauuccu

SEQ ID NO: 223576 - RNA, 18 nt, Human
caccugguuaauuuuuua

SEQ ID NO: 223577 - RNA, 22 nt, Human
cacuacagccucgaccucccag

SEQ ID NO: 223578 - RNA, 24 nt, Human
cacuaugucaccuaggcuggucuc

SEQ ID NO: 223579 - RNA, 19 nt, Human
cacugcacccagcccccac

SEQ ID NO: 223580 - RNA, 18 nt, Human
cagaaggcagcaggggca

SEQ ID NO: 223581 - RNA, 19 nt, Human
cagagcccggccuccugcc

SEQ ID NO: 223582 - RNA, 23 nt, Human
cagagcccggccuccugccggcu

SEQ ID NO: 223583 - RNA, 27 nt, Human
cagccucccaagucgcugggacucccu

SEQ ID NO: 223584 - RNA, 21 nt, Human
cagccucgaccucccaggcuc

SEQ ID NO: 223585 - RNA, 25 nt, Human
cagccucgaccucccaggcucaaac

SEQ ID NO: 223586 - RNA, 21 nt, Human
caguuagcuugaaccuccagu

SEQ ID NO: 223587 - RNA, 20 nt, Human
ccacugcacccagcccccac

SEQ ID NO: 223588 - RNA, 19 nt, Human
ccccggaggcggccugggg

SEQ ID NO: 223589 - RNA, 25 nt, Human
ccccggcccgcgcaucggccccggc

SEQ ID NO: 223590 - RNA, 18 nt, Human
ccccggcgcccccggccc

SEQ ID NO: 223591 - RNA, 19 nt, Human
ccccggcgcccccggcccg

SEQ ID NO: 223592 - RNA, 19 nt, Human
ccccuuugccuuuugcucu

SEQ ID NO: 223593 - RNA, 20 nt, Human
ccccuuugccuuuugcucuc

SEQ ID NO: 223594 - RNA, 20 nt, Human
cccugucacccaggcuggag

SEQ ID NO: 223595 - RNA, 23 nt, Human
cccugucacccaggcuggaguac

SEQ ID NO: 223596 - RNA, 20 nt, Human
ccgcccgcgcccccaggugc

SEQ ID NO: 223597 - RNA, 22 nt, Human
ccgcccgcgcccccaggugcuc

SEQ ID NO: 223598 - RNA, 21 nt, Human
ccgcccgggccgccgccggcc

SEQ ID NO: 223599 - RNA, 19 nt, Human
ccgccgcugcugcugcccc

SEQ ID NO: 223600 - RNA, 20 nt, Human
ccgccggccccccggcgccc

SEQ ID NO: 223601 - RNA, 18 nt, Human
ccgcugcugcugccccgg

SEQ ID NO: 223602 - RNA, 19 nt, Human
ccggccccccggcgccccc

SEQ ID NO: 223603 - RNA, 22 nt, Human
ccggccgccgcugcugcugccc

SEQ ID NO: 223604 - RNA, 22 nt, Human
ccucagagcccggccuccugcc

SEQ ID NO: 223605 - RNA, 18 nt, Human
ccuccaaccucagccucc

SEQ ID NO: 223606 - RNA, 23 nt, Human
ccucccaccucagccucccaagu

SEQ ID NO: 223607 - RNA, 24 nt, Human
ccucccagcaggggucccccgccc

SEQ ID NO: 223608 - RNA, 20 nt, Human
ccucccagcucgccccuccu

SEQ ID NO: 223609 - RNA, 20 nt, Human
ccucgaccucccaggcucaa

SEQ ID NO: 223610 - RNA, 18 nt, Human
ccugcuaugagaaugugg

SEQ ID NO: 223611 - RNA, 20 nt, Human
ccugggcucaagcaauccuc

SEQ ID NO: 223612 - RNA, 24 nt, Human
ccugucacccaggcuggaguacag

SEQ ID NO: 223613 - RNA, 18 nt, Human
ccugucccuccuucuuuc

SEQ ID NO: 223614 - RNA, 23 nt, Human
ccuuuugcucucuggucacuuca

SEQ ID NO: 223615 - RNA, 25 nt, Human
cgaccucccaggcucaaacaauccu

SEQ ID NO: 223616 - RNA, 24 nt, Human
cgcccccggcccgcgcaucggccc

SEQ ID NO: 223617 - RNA, 23 nt, Human
cgcccgcgcccccaggugcucca

SEQ ID NO: 223618 - RNA, 20 nt, Human
cgcgcccccaggugcuccag

SEQ ID NO: 223619 - RNA, 20 nt, Human
cgcugggacucccaggcacg

SEQ ID NO: 223620 - RNA, 18 nt, Human
cggccccccggcgccccc

SEQ ID NO: 223621 - RNA, 18 nt, Human
cggccuggggcauggcug

SEQ ID NO: 223622 - RNA, 23 nt, Human
cuacagccucgaccucccaggcu

SEQ ID NO: 223623 - RNA, 21 nt, Human
cucaaacaauccucccaccuc

SEQ ID NO: 223624 - RNA, 24 nt, Human
cucaaacaauccucccaccucagc

SEQ ID NO: 223625 - RNA, 24 nt, Human
cucaagcaauccuccaaccucagc

SEQ ID NO: 223626 - RNA, 23 nt, Human
cucccaccucagccucccaaguc

SEQ ID NO: 223627 - RNA, 22 nt, Human
cucccagcucgccccuccugcu

SEQ ID NO: 223628 - RNA, 23 nt, Human
cucccagcucgccccuccugcug

SEQ ID NO: 223629 - RNA, 25 nt, Human
cucccaggcucaaacaauccuccca

SEQ ID NO: 223630 - RNA, 24 nt, Human
cucccugaccccaccaaguuucac

SEQ ID NO: 223631 - RNA, 21 nt, Human
cugcagacugacaggccgcug

SEQ ID NO: 223632 - RNA, 19 nt, Human
cuggggaugaggaagggga

SEQ ID NO: 223633 - RNA, 24 nt, Human
cuugcccugucacccaggcuggag

SEQ ID NO: 223634 - RNA, 23 nt, Human
cuuuagggacugcuggguuuccu

SEQ ID NO: 223635 - RNA, 23 nt, Human
cuuucuguccugcuuucugggga

SEQ ID NO: 223636 - RNA, 18 nt, Human
gaauacaggugugagcca

SEQ ID NO: 223637 - RNA, 22 nt, Human
gaauacaggugugagccacugc

SEQ ID NO: 223638 - RNA, 23 nt, Human
gaauacaggugugagccacugca

SEQ ID NO: 223639 - RNA, 23 nt, Human
gaauuccugggcucaagcaaucc

SEQ ID NO: 223640 - RNA, 18 nt, Human
gacacagcuggggaugag

SEQ ID NO: 223641 - RNA, 22 nt, Human
gaccagcuuuagggacugcugg

SEQ ID NO: 223642 - RNA, 19 nt, Human
gaccuaaguaggguuuugu

SEQ ID NO: 223643 - RNA, 20 nt, Human
gagacagggucuugcccugu

SEQ ID NO: 223644 - RNA, 18 nt, Human
gaggaaggggaguggggc

SEQ ID NO: 223645 - RNA, 19 nt, Human
gcaaaacaacacgaaggga

SEQ ID NO: 223646 - RNA, 23 nt, Human
gccccggccgccgcugcugcugc

SEQ ID NO: 223647 - RNA, 21 nt, Human
gcccgggccgccgccggcccc

SEQ ID NO: 223648 - RNA, 26 nt, Human
gcucccagcuucugccuuuccucccc

SEQ ID NO: 223649 - RNA, 20 nt, Human
gcugaguaggggugacuugg

SEQ ID NO: 223650 - RNA, 18 nt, Human
gcugccugccugucccuc

SEQ ID NO: 223651 - RNA, 19 nt, Human
gcugccugccugucccucc

SEQ ID NO: 223652 - RNA, 22 nt, Human
ggaauacaggugugagccacug

SEQ ID NO: 223653 - RNA, 21 nt, Human
ggagaugggggugcuggggga

SEQ ID NO: 223654 - RNA, 18 nt, Human
ggaguggggcugaguagg

SEQ ID NO: 223655 - RNA, 21 nt, Human
ggccccagggguccucagagc

SEQ ID NO: 223656 - RNA, 18 nt, Human
ggcuccgaugggggcccc

SEQ ID NO: 223657 - RNA, 22 nt, Human
ggcuccgaugggggccccaggg

SEQ ID NO: 223658 - RNA, 19 nt, Human
gggcagucuccuggccucc

SEQ ID NO: 223659 - RNA, 19 nt, Human
ggggagaguggugagggau

SEQ ID NO: 223660 - RNA, 22 nt, Human
gggucucacuaugucaccuagg

SEQ ID NO: 223661 - RNA, 19 nt, Human
gggugcugggggagagugg

SEQ ID NO: 223662 - RNA, 23 nt, Human
guaggguuuugugagacucaaag

SEQ ID NO: 223663 - RNA, 23 nt, Human
uaagggcagugucuggaaggcug

SEQ ID NO: 223664 - RNA, 23 nt, Human
uaauuuuuuauuuuuuguagaga

SEQ ID NO: 223665 - RNA, 22 nt, Human
uacacggaacaugaaguccccu

SEQ ID NO: 223666 - RNA, 19 nt, Human
uacaggugugagccacugc

SEQ ID NO: 223667 - RNA, 24 nt, Human
uacaggugugagccacugcaccca

SEQ ID NO: 223668 - RNA, 23 nt, Human
uaccagcagggucucugaggacu

SEQ ID NO: 223669 - RNA, 25 nt, Human
uaccagcagggucucugaggacugg

SEQ ID NO: 223670 - RNA, 22 nt, Human
uagagauggggucucacuaugu

SEQ ID NO: 223671 - RNA, 23 nt, Human
uaugucaccuaggcuggucucga

SEQ ID NO: 223672 - RNA, 24 nt, Human
uaugucaccuaggcuggucucgaa

SEQ ID NO: 223673 - RNA, 19 nt, Human
uauucucaucuguaaaaug

SEQ ID NO: 223674 - RNA, 23 nt, Human
ucacuacagccucgaccucccag

SEQ ID NO: 223675 - RNA, 24 nt, Human
ucacuacagccucgaccucccagg

SEQ ID NO: 223676 - RNA, 19 nt, Human
ucagagcccggccuccugc

SEQ ID NO: 223677 - RNA, 24 nt, Human
uccauaacugcaaagccaugcaaa

SEQ ID NO: 223678 - RNA, 20 nt, Human
ucccgcccgggccgccgccg

SEQ ID NO: 223679 - RNA, 19 nt, Human
ucccuccuucuuucugucc

SEQ ID NO: 223680 - RNA, 19 nt, Human
uccuccaaccucagccucc

SEQ ID NO: 223681 - RNA, 27 nt, Human
uccucccaccucagccucccaagucgc

SEQ ID NO: 223682 - RNA, 24 nt, Human
uccugcugccugccugucgucguc

SEQ ID NO: 223683 - RNA, 18 nt, Human
uccugggcucaagcaauc

SEQ ID NO: 223684 - RNA, 22 nt, Human
uccugggcucaagcaauccucc

SEQ ID NO: 223685 - RNA, 20 nt, Human
ucggccccggccgccgcugc

SEQ ID NO: 223686 - RNA, 23 nt, Human
ucucacuaugucaccuaggcugg

SEQ ID NO: 223687 - RNA, 24 nt, Human
ucucacuaugucaccuaggcuggu

SEQ ID NO: 223688 - RNA, 23 nt, Human
ucuccuggccucccagcaggggu

SEQ ID NO: 223689 - RNA, 19 nt, Human
ucucgaauuccugggcuca

SEQ ID NO: 223690 - RNA, 23 nt, Human
ucucgaauuccugggcucaagca

SEQ ID NO: 223691 - RNA, 21 nt, Human
ucugccuuuccucccugaccc

SEQ ID NO: 223692 - RNA, 23 nt, Human
ucuugcccugucacccaggcugg

SEQ ID NO: 223693 - RNA, 24 nt, Human
ucuugcccugucacccaggcugga

SEQ ID NO: 223694 - RNA, 22 nt, Human
ugagacagggucuugcccuguc

SEQ ID NO: 223695 - RNA, 20 nt, Human
ugcaaaacaacacgaaggga

SEQ ID NO: 223696 - RNA, 19 nt, Human
ugcaaagccaugcaaaaca

SEQ ID NO: 223697 - RNA, 23 nt, Human
ugcaaucagggcucacuacagcc

SEQ ID NO: 223698 - RNA, 20 nt, Human
ugcacccagcccccaccccu

SEQ ID NO: 223699 - RNA, 21 nt, Human
ugcccugucacccaggcugga

SEQ ID NO: 223700 - RNA, 25 nt, Human
ugcccugucacccaggcuggaguac

SEQ ID NO: 223701 - RNA, 19 nt, Human
ugcuaugagaauguggcug

SEQ ID NO: 223702 - RNA, 19 nt, Human
ugcuggguuuccacuuucu

SEQ ID NO: 223703 - RNA, 23 nt, Human
uggaguacaguggugcaaucagg

SEQ ID NO: 223704 - RNA, 25 nt, Human
uggccucccagcaggggucccccuc

SEQ ID NO: 223705 - RNA, 22 nt, Human
ugggaauacaggugugagccac

SEQ ID NO: 223706 - RNA, 22 nt, Human
ugggaauacaggugugagccac

SEQ ID NO: 223707 - RNA, 24 nt, Human
ugggaauacaggugugagccacug

SEQ ID NO: 223708 - RNA, 19 nt, Human
ugggagaccuagcaggaca

SEQ ID NO: 223709 - RNA, 20 nt, Human
ugggcucaagcaauccucca

SEQ ID NO: 223710 - RNA, 19 nt, Human
uggggcugaguagggguga

SEQ ID NO: 223711 - RNA, 20 nt, Human
ugggggugcugggggagagu

SEQ ID NO: 223712 - RNA, 24 nt, Human
uggggucucacuaugucaccuagg

SEQ ID NO: 223713 - RNA, 24 nt, Human
uggugcaaucagggcucacuacag

SEQ ID NO: 223714 - RNA, 24 nt, Human
uguagagauggggucucacuaugu

SEQ ID NO: 223715 - RNA, 27 nt, Human
uguccugcuuucuggggaccagcuuua

SEQ ID NO: 223716 - RNA, 19 nt, Human
ugugcggggucccacuggg

SEQ ID NO: 223717 - RNA, 20 nt, Human
uuccucccugaccccaccaa

SEQ ID NO: 223718 - RNA, 23 nt, Human
uuccugggcucaagcaauccucc

SEQ ID NO: 223719 - RNA, 24 nt, Human
uugcccugucacccaggcuggagu

SEQ ID NO: 223720 - RNA, 24 nt, Human
uuguagagauggggucucacuaug

SEQ ID NO: 223721 - RNA, 22 nt, Human
uuuauuuuuuguagagaugggg

SEQ ID NO: 223722 - RNA, 18 nt, Human
uuuguagagauggggucu

SEQ ID NO: 223723 - RNA, 24 nt, Human
uuuguagagauggggucucacuau

SEQ ID NO: 223724 - RNA, 22 nt, Human
uuuuauuuuuuguagagauggg

SEQ ID NO: 223725 - RNA, 28 nt, Human
uuuuuuauuuuuuguagagauggggucu

SEQ ID NO: 223726 - RNA, 24 nt, Human
uuuuuuguagagauggggucucac

SEQ ID NO: 223727 - RNA, 24 nt, Human
uuuuuuuuuugagacagggucuug

SEQ ID NO: 223728 - RNA, 20 nt, Human
uuuuuuuuuuugagacaggg

SEQ ID NO: 223729 - RNA, 23 nt, Human
uuuuuuuuuuuugagacaggguc

SEQ ID NO: 223730 - RNA, 24 nt, Human
uuuuuuuuuuuugagacagggucu

SEQ ID NO: 223731 - RNA, 24 nt, Human
uuuuuuuuuuuuuuugagacaggg

SEQ ID NO: 223732 - RNA, 18 nt, Human
acacacccagucccccuc

SEQ ID NO: 223733 - RNA, 20 nt, Human
acacagucuccuccaggcag

SEQ ID NO: 223734 - RNA, 23 nt, Human
accguuuucauuuauugaugcag

SEQ ID NO: 223735 - RNA, 23 nt, Human
accguuuucauuuauugaugcag

SEQ ID NO: 223736 - RNA, 18 nt, Human
acuguagccuccucccca

SEQ ID NO: 223737 - RNA, 18 nt, Human
acuguagccuccucccca

SEQ ID NO: 223738 - RNA, 22 nt, Human
acuucagucucguggaaagagg

SEQ ID NO: 223739 - RNA, 22 nt, Human
acuucagucucguggaaagagg

SEQ ID NO: 223740 - RNA, 26 nt, Human
agacaucccucuggcuggacacaccc

SEQ ID NO: 223741 - RNA, 26 nt, Human
agacgagaagggagucaacgcuccag

SEQ ID NO: 223742 - RNA, 23 nt, Human
agacgccacaggccucgagacgg

SEQ ID NO: 223743 - RNA, 20 nt, Human
agcugcacuguccacagaca

SEQ ID NO: 223744 - RNA, 24 nt, Human
agcuggccugacacccacacccuc

SEQ ID NO: 223745 - RNA, 23 nt, Human
agcuucauucuccaugaguucca

SEQ ID NO: 223746 - RNA, 22 nt, Human
aggaagacuuuucggccucgaa

SEQ ID NO: 223747 - RNA, 18 nt, Human
aggaagggggcggggcag

SEQ ID NO: 223748 - RNA, 21 nt, Human
aggaaguggucccugccgaaa

SEQ ID NO: 223749 - RNA, 20 nt, Human
aggagccggagagggguugc

SEQ ID NO: 223750 - RNA, 18 nt, Human
aggcagagacgcgggccu

SEQ ID NO: 223751 - RNA, 19 nt, Human
augcaggcuuugaggcaca

SEQ ID NO: 223752 - RNA, 19 nt, Human
augcaggcuuugaggcaca

SEQ ID NO: 223753 - RNA, 21 nt, Human
caaacgacagcccuccacgcg

SEQ ID NO: 223754 - RNA, 18 nt, Human
caaauuccacucggaugg

SEQ ID NO: 223755 - RNA, 21 nt, Human
caacuguagccuccuccccag

SEQ ID NO: 223756 - RNA, 21 nt, Human
caacuguagccuccuccccag

SEQ ID NO: 223757 - RNA, 23 nt, Human
cacacccuccuccucuauccccu

SEQ ID NO: 223758 - RNA, 20 nt, Human
cacccaaagauccauaaagc

SEQ ID NO: 223759 - RNA, 18 nt, Human
cagcggcagggccccgac

SEQ ID NO: 223760 - RNA, 18 nt, Human
cagcggcagggccccgac

SEQ ID NO: 223761 - RNA, 20 nt, Human
cagcggcauguucagcugug

SEQ ID NO: 223762 - RNA, 19 nt, Human
cagcugugccugggacagc

SEQ ID NO: 223763 - RNA, 20 nt, Human
caggccucgagacgagaagg

SEQ ID NO: 223764 - RNA, 24 nt, Human
cagucccccuccuaucuccagccu

SEQ ID NO: 223765 - RNA, 21 nt, Human
ccccacgccggacccuacaca

SEQ ID NO: 223766 - RNA, 26 nt, Human
ccccugccucucccucccugcacccc

SEQ ID NO: 223767 - RNA, 22 nt, Human
cccucccugcaccccacccgcc

SEQ ID NO: 223768 - RNA, 18 nt, Human
cccugccucucccucccu

SEQ ID NO: 223769 - RNA, 20 nt, Human
cccuugagaggcccggccag

SEQ ID NO: 223770 - RNA, 20 nt, Human
cccuugagaggcccggccag

SEQ ID NO: 223771 - RNA, 20 nt, Human
ccgccuggaggggccgggcg

SEQ ID NO: 223772 - RNA, 20 nt, Human
ccgccuggaggggccgggcg

SEQ ID NO: 223773 - RNA, 18 nt, Human
ccggccagggauccugcc

SEQ ID NO: 223774 - RNA, 26 nt, Human
ccuccuaucuccagccuuccccuuac

SEQ ID NO: 223775 - RNA, 22 nt, Human
ccucguccgagccuuggcgguc

SEQ ID NO: 223776 - RNA, 21 nt, Human
ccucucccucccugcacccca

SEQ ID NO: 223777 - RNA, 24 nt, Human
ccucuggcuggacacacccagucc

SEQ ID NO: 223778 - RNA, 20 nt, Human
ccugacacccacacccuccu

SEQ ID NO: 223779 - RNA, 18 nt, Human
ccugcucugcugcucugc

SEQ ID NO: 223780 - RNA, 20 nt, Human
ccuuccccuuaccuccgcug

SEQ ID NO: 223781 - RNA, 23 nt, Human
cgagaagggaaaggaaggcgagu

SEQ ID NO: 223782 - RNA, 21 nt, Human
cgcccaggcgccgggccagcu

SEQ ID NO: 223783 - RNA, 21 nt, Human
cgcccaggcgccgggccagcu

SEQ ID NO: 223784 - RNA, 20 nt, Human
cgcuaugcacgcucuccucg

SEQ ID NO: 223785 - RNA, 20 nt, Human
cgggcugugccacccgcggg

SEQ ID NO: 223786 - RNA, 25 nt, Human
cgugguccacaggucccgagugucu

SEQ ID NO: 223787 - RNA, 19 nt, Human
cuccagccuuccccuuacc

SEQ ID NO: 223788 - RNA, 22 nt, Human
cucccugcaccccacccgccaa

SEQ ID NO: 223789 - RNA, 24 nt, Human
cuccucuauccccuacacacccaa

SEQ ID NO: 223790 - RNA, 22 nt, Human
cucgucgaagcccucgcagacc

SEQ ID NO: 223791 - RNA, 18 nt, Human
cugcaccccacccgccaa

SEQ ID NO: 223792 - RNA, 22 nt, Human
cugcacuguccacagacauccc

SEQ ID NO: 223793 - RNA, 21 nt, Human
cugcagcuccuuagucaggaa

SEQ ID NO: 223794 - RNA, 19 nt, Human
cuggaggggccgggcgggg

SEQ ID NO: 223795 - RNA, 19 nt, Human
cuggaggggccgggcgggg

SEQ ID NO: 223796 - RNA, 25 nt, Human
cuggcacggggcugguucgggucgc

SEQ ID NO: 223797 - RNA, 18 nt, Human
cuggccuuguaccccucg

SEQ ID NO: 223798 - RNA, 19 nt, Human
cuugggucuggggaccggg

SEQ ID NO: 223799 - RNA, 18 nt, Human
gacccagacgccacaggc

SEQ ID NO: 223800 - RNA, 21 nt, Human
gacuucagucucguggaaaga

SEQ ID NO: 223801 - RNA, 21 nt, Human
gacuucagucucguggaaaga

SEQ ID NO: 223802 - RNA, 22 nt, Human
gagaagggagucaacgcuccag

SEQ ID NO: 223803 - RNA, 21 nt, Human
gagaggcccggccagggaucc

SEQ ID NO: 223804 - RNA, 21 nt, Human
gagaggcccggccagggaucc

SEQ ID NO: 223805 - RNA, 20 nt, Human
gagcagaaacgaagcccuug

SEQ ID NO: 223806 - RNA, 20 nt, Human
gagcagaaacgaagcccuug

SEQ ID NO: 223807 - RNA, 20 nt, Human
gagcuggccugacacccacc

SEQ ID NO: 223808 - RNA, 20 nt, Human
gcaguggcagccugcucugc

SEQ ID NO: 223809 - RNA, 19 nt, Human
gccccgggcugugccaccc

SEQ ID NO: 223810 - RNA, 20 nt, Human
gccugacacccacacccucc

SEQ ID NO: 223811 - RNA, 19 nt, Human
gccugcucugcugcucugc

SEQ ID NO: 223812 - RNA, 20 nt, Human
gccuggaggggccgggcggg

SEQ ID NO: 223813 - RNA, 20 nt, Human
gccuggaggggccgggcggg

SEQ ID NO: 223814 - RNA, 19 nt, Human
gccuugggggggucuagag

SEQ ID NO: 223815 - RNA, 19 nt, Human
gccuugggggggucuagag

SEQ ID NO: 223816 - RNA, 24 nt, Human
gcugucgucacugcggccgccugg

SEQ ID NO: 223817 - RNA, 23 nt, Human
ggcgagugggaggccgaaagaga

SEQ ID NO: 223818 - RNA, 20 nt, Human
ggcgccgggccagcuccacu

SEQ ID NO: 223819 - RNA, 20 nt, Human
ggcgccgggccagcuccacu

SEQ ID NO: 223820 - RNA, 19 nt, Human
ggcucgauggggcaugugc

SEQ ID NO: 223821 - RNA, 23 nt, Human
ggcuugggucuggggaccgggcu

SEQ ID NO: 223822 - RNA, 27 nt, Human
gggccggggccagggaggaggcggaga

SEQ ID NO: 223823 - RNA, 27 nt, Human
gggccggggccagggaggaggcggaga

SEQ ID NO: 223824 - RNA, 19 nt, Human
ggggacccucggccugggg

SEQ ID NO: 223825 - RNA, 20 nt, Human
gggggucuagagauggaugg

SEQ ID NO: 223826 - RNA, 23 nt, Human
ggggucuagagauggauggaagu

SEQ ID NO: 223827 - RNA, 23 nt, Human
ggggucuagagauggauggaagu

SEQ ID NO: 223828 - RNA, 23 nt, Human
gggucacgggaggccagaggugc

SEQ ID NO: 223829 - RNA, 23 nt, Human
ggucgugguccacaggucccggc

SEQ ID NO: 223830 - RNA, 19 nt, Human
gugaggaaagagaggaggg

SEQ ID NO: 223831 - RNA, 22 nt, Human
gugaggauuuccagagcuucau

SEQ ID NO: 223832 - RNA, 24 nt, Human
guggcagaggagccggagaggggu

SEQ ID NO: 223833 - RNA, 19 nt, Human
guguggccagcggcagggc

SEQ ID NO: 223834 - RNA, 22 nt, Human
guucaaacgacagcccuccacc

SEQ ID NO: 223835 - RNA, 22 nt, Human
guuccagcacggccucgccggu

SEQ ID NO: 223836 - RNA, 18 nt, Human
uacacacccaaagaucca

SEQ ID NO: 223837 - RNA, 20 nt, Human
uaugcacgcucuccucgucc

SEQ ID NO: 223838 - RNA, 23 nt, Human
uauugagugaugacauugaggaa

SEQ ID NO: 223839 - RNA, 23 nt, Human
uccacagacaucccucuggcugg

SEQ ID NO: 223840 - RNA, 19 nt, Human
uccagagcuucauucucca

SEQ ID NO: 223841 - RNA, 25 nt, Human
uccaggcagagacgcgggccugaga

SEQ ID NO: 223842 - RNA, 19 nt, Human
uccauggagcugccgcggu

SEQ ID NO: 223843 - RNA, 24 nt, Human
uccccuacacacccaaagauccau

SEQ ID NO: 223844 - RNA, 23 nt, Human
uccccugccucucccucccugca

SEQ ID NO: 223845 - RNA, 23 nt, Human
ucccucuggcuggacacacccag

SEQ ID NO: 223846 - RNA, 24 nt, Human
uccuccaugguucugccccaacgg

SEQ ID NO: 223847 - RNA, 25 nt, Human
uccuccucuauccccuacacaccca

SEQ ID NO: 223848 - RNA, 20 nt, Human
ucgagacgagaagggaguca

SEQ ID NO: 223849 - RNA, 18 nt, Human
ucuagagauggauggaag

SEQ ID NO: 223850 - RNA, 18 nt, Human
ucuagagauggauggaag

SEQ ID NO: 223851 - RNA, 23 nt, Human
ucuauccccuacacacccaaaga

SEQ ID NO: 223852 - RNA, 25 nt, Human
ucuauccccuacacacccaaagauc

SEQ ID NO: 223853 - RNA, 21 nt, Human
ucuccagccuuccccuuaccu

SEQ ID NO: 223854 - RNA, 24 nt, Human
ucuccuccaggcagagacgcgggc

SEQ ID NO: 223855 - RNA, 18 nt, Human
ucucucuccccugccucu

SEQ ID NO: 223856 - RNA, 22 nt, Human
ucugccccaacggacccagacg

SEQ ID NO: 223857 - RNA, 19 nt, Human
ugagcuggccugacaccca

SEQ ID NO: 223858 - RNA, 19 nt, Human
ugaugcaggcuuugaggac

SEQ ID NO: 223859 - RNA, 19 nt, Human
ugaugcaggcuuugaggac

SEQ ID NO: 223860 - RNA, 21 nt, Human
ugcccggggacccucggccug

SEQ ID NO: 223861 - RNA, 22 nt, Human
ugccucucccucccugcacccc

SEQ ID NO: 223862 - RNA, 21 nt, Human
uggcacggggcugguucgggu

SEQ ID NO: 223863 - RNA, 23 nt, Human
uggcagaggagccggagaggggu

SEQ ID NO: 223864 - RNA, 24 nt, Human
uggugaggauuuccagagcuucau

SEQ ID NO: 223865 - RNA, 27 nt, Human
uguccuucucccccagauugauuucca

SEQ ID NO: 223866 - RNA, 24 nt, Human
uucaugcaucgacucuuuuauuuc

SEQ ID NO: 223867 - RNA, 19 nt, Human
uuccagagcuucauucucc

SEQ ID NO: 223868 - RNA, 20 nt, Human
uuccuccaugguucugcccc

SEQ ID NO: 223869 - RNA, 22 nt, Human
uuccuccaugguucugccccaa

SEQ ID NO: 223870 - RNA, 18 nt, Human
uuuccauggagcugccgc

SEQ ID NO: 223871 - RNA, 21 nt, Human
uuuggucaaacaagccaggca

SEQ ID NO: 223872 - RNA, 20 nt, Human
aaaaaauaacaaaaacauuc

SEQ ID NO: 223873 - RNA, 22 nt, Human
aaaauaacaaaaacauucagga

SEQ ID NO: 223874 - RNA, 28 nt, Human
aaacaaaaaauaacaaaaacauucagga

SEQ ID NO: 223875 - RNA, 19 nt, Human
aaacagcugaggccccaga

SEQ ID NO: 223876 - RNA, 23 nt, Human
aaacagcugaggccccagaccuc

SEQ ID NO: 223877 - RNA, 24 nt, Human
aaagacccugcaggcaaggccucc

SEQ ID NO: 223878 - RNA, 18 nt, Human
aaagccucuccuagcccc

SEQ ID NO: 223879 - RNA, 26 nt, Human
aacagcaguuuguuuaaaaaauaaaa

SEQ ID NO: 223880 - RNA, 25 nt, Human
aagaacacaggacuugacucugggc

SEQ ID NO: 223881 - RNA, 22 nt, Human
aaggccuccucagggucagucc

SEQ ID NO: 223882 - RNA, 20 nt, Human
aagggcagaaccagccagag

SEQ ID NO: 223883 - RNA, 20 nt, Human
aauaacaaaaacauucagga

SEQ ID NO: 223884 - RNA, 20 nt, Human
acagggaaggagaagacagc

SEQ ID NO: 223885 - RNA, 21 nt, Human
accaggggccaggcgucccgg

SEQ ID NO: 223886 - RNA, 22 nt, Human
acccugcccucaucuccucacu

SEQ ID NO: 223887 - RNA, 20 nt, Human
acggaaacaccugaccccac

SEQ ID NO: 223888 - RNA, 19 nt, Human
acucaccccccgcaagcac

SEQ ID NO: 223889 - RNA, 19 nt, Human
agaaagccucuccuagccc

SEQ ID NO: 223890 - RNA, 21 nt, Human
agaagacagcaggauugggag

SEQ ID NO: 223891 - RNA, 23 nt, Human
agacacuagaucucccaauccuu

SEQ ID NO: 223892 - RNA, 23 nt, Human
agacagggaacacagcucugggc

SEQ ID NO: 223893 - RNA, 23 nt, Human
agaggccaucaaagguggggugg

SEQ ID NO: 223894 - RNA, 23 nt, Human
agccaggguaugguucagcugga

SEQ ID NO: 223895 - RNA, 24 nt, Human
aggccccuggccccccacucccag

SEQ ID NO: 223896 - RNA, 21 nt, Human
agggugaggggggaagaggcc

SEQ ID NO: 223897 - RNA, 24 nt, Human
aguuccgaggcugccccccccacc

SEQ ID NO: 223898 - RNA, 21 nt, Human
auugaguugcagggcaggagg

SEQ ID NO: 223899 - RNA, 25 nt, Human
caaaaaauaacaaaaacauucagga

SEQ ID NO: 223900 - RNA, 20 nt, Human
caaaaacauucaggacacag

SEQ ID NO: 223901 - RNA, 22 nt, Human
caaccagcaacaacaugguuca

SEQ ID NO: 223902 - RNA, 21 nt, Human
caccagcggggcugaaagggc

SEQ ID NO: 223903 - RNA, 20 nt, Human
caccgcuccccggacagagu

SEQ ID NO: 223904 - RNA, 19 nt, Human
cacucacgcggcccggggu

SEQ ID NO: 223905 - RNA, 25 nt, Human
cacucccaccuccagcagccuccac

SEQ ID NO: 223906 - RNA, 19 nt, Human
cagauuccagguauauaaa

SEQ ID NO: 223907 - RNA, 18 nt, Human
cagcgggcagggugugca

SEQ ID NO: 223908 - RNA, 22 nt, Human
cagcucccuggccaccagcccu

SEQ ID NO: 223909 - RNA, 19 nt, Human
cagugggccagccccaggg

SEQ ID NO: 223910 - RNA, 19 nt, Human
caguuccgaggcugccccc

SEQ ID NO: 223911 - RNA, 22 nt, Human
ccacagccaggguaugguucag

SEQ ID NO: 223912 - RNA, 19 nt, Human
ccaccaaauggugagacaa

SEQ ID NO: 223913 - RNA, 21 nt, Human
cccacaguaguggggcagaag

SEQ ID NO: 223914 - RNA, 23 nt, Human
cccaggccccaggcccacauagg

SEQ ID NO: 223915 - RNA, 25 nt, Human
cccagggggcuggugggaggggaag

SEQ ID NO: 223916 - RNA, 20 nt, Human
cccaugcucugcuacucucc

SEQ ID NO: 223917 - RNA, 25 nt, Human
ccccacgcacagcgguaccuccccc

SEQ ID NO: 223918 - RNA, 19 nt, Human
ccccagaccucagagaacc

SEQ ID NO: 223919 - RNA, 18 nt, Human
ccccaggccccaggccca

SEQ ID NO: 223920 - RNA, 20 nt, Human
ccccgcaagcaccgcucccc

SEQ ID NO: 223921 - RNA, 18 nt, Human
cccgcaagcaccgcuccc

SEQ ID NO: 223922 - RNA, 22 nt, Human
cccgcccuccagccucugaaaa

SEQ ID NO: 223923 - RNA, 21 nt, Human
cccggcuuccaguaacccaug

SEQ ID NO: 223924 - RNA, 23 nt, Human
cccgggcauacaucuagcugagg

SEQ ID NO: 223925 - RNA, 19 nt, Human
cccuggccaccagcccuag

SEQ ID NO: 223926 - RNA, 20 nt, Human
ccgaggcugccccccccacc

SEQ ID NO: 223927 - RNA, 28 nt, Human
ccuggccaccagcccuagcagucccggc

SEQ ID NO: 223928 - RNA, 18 nt, Human
ccuggggccagcgggcag

SEQ ID NO: 223929 - RNA, 24 nt, Human
cggccgccuccuagagaaagccuc

SEQ ID NO: 223930 - RNA, 22 nt, Human
cggcuuccaguaacccaugcuc

SEQ ID NO: 223931 - RNA, 22 nt, Human
cggcuuccaguaacccaugcuc

SEQ ID NO: 223932 - RNA, 24 nt, Human
cgggaagaacacaggacuugacuc

SEQ ID NO: 223933 - RNA, 21 nt, Human
cgggacacccuagggugaggg

SEQ ID NO: 223934 - RNA, 18 nt, Human
cggggugggcgaacacca

SEQ ID NO: 223935 - RNA, 21 nt, Human
cuaccaguccgcccgcccucc

SEQ ID NO: 223936 - RNA, 23 nt, Human
cucaguguccccuucuccaccuc

SEQ ID NO: 223937 - RNA, 19 nt, Human
cuccagcagccuccacccc

SEQ ID NO: 223938 - RNA, 24 nt, Human
cucccuccuaccacuugggggccc

SEQ ID NO: 223939 - RNA, 21 nt, Human
cucccuggccaccagcccuag

SEQ ID NO: 223940 - RNA, 21 nt, Human
cugaagccaacaacagauucc

SEQ ID NO: 223941 - RNA, 22 nt, Human
cugaagccaacaacagauuccc

SEQ ID NO: 223942 - RNA, 22 nt, Human
cugcaggcaaggccuccucagg

SEQ ID NO: 223943 - RNA, 22 nt, Human
cuggaccgcggaugcguaagga

SEQ ID NO: 223944 - RNA, 20 nt, Human
cuggugggaggggaaggcgg

SEQ ID NO: 223945 - RNA, 19 nt, Human
cuugcuuccugcccggccu

SEQ ID NO: 223946 - RNA, 21 nt, Human
cuugggggcccacagaaagcc

SEQ ID NO: 223947 - RNA, 22 nt, Human
gaaggccccuggccccccacuc

SEQ ID NO: 223948 - RNA, 19 nt, Human
gacccugcucuuuaaccac

SEQ ID NO: 223949 - RNA, 19 nt, Human
gaccugagacagggaacac

SEQ ID NO: 223950 - RNA, 24 nt, Human
gacuugcuuccugcccggccucca

SEQ ID NO: 223951 - RNA, 18 nt, Human
gagaagacagcaggauug

SEQ ID NO: 223952 - RNA, 24 nt, Human
gagacagggaacacagcucugggc

SEQ ID NO: 223953 - RNA, 24 nt, Human
gaggcugcuccuuuucaggccccu

SEQ ID NO: 223954 - RNA, 20 nt, Human
gcaggcaaggccuccucagg

SEQ ID NO: 223955 - RNA, 23 nt, Human
gccaagcucaggacagaugcccc

SEQ ID NO: 223956 - RNA, 19 nt, Human
gccagccccagggggcugg

SEQ ID NO: 223957 - RNA, 18 nt, Human
gcccaauugaguugcagg

SEQ ID NO: 223958 - RNA, 26 nt, Human
gcgggcgggcccugcuccugcugugg

SEQ ID NO: 223959 - RNA, 19 nt, Human
gcggggagcugcguggggc

SEQ ID NO: 223960 - RNA, 18 nt, Human
gcugccccccccaccagg

SEQ ID NO: 223961 - RNA, 25 nt, Human
gcuggagaacagaggcccugucccg

SEQ ID NO: 223962 - RNA, 22 nt, Human
ggacuuguuuccaggcccugug

SEQ ID NO: 223963 - RNA, 19 nt, Human
ggaggugggcucuggcccc

SEQ ID NO: 223964 - RNA, 19 nt, Human
ggcagaaccagccagagcu

SEQ ID NO: 223965 - RNA, 24 nt, Human
ggcaggagggcagacacuagaucu

SEQ ID NO: 223966 - RNA, 23 nt, Human
ggcagugagguccuuguucaggg

SEQ ID NO: 223967 - RNA, 21 nt, Human
ggccccuggccccccacuccc

SEQ ID NO: 223968 - RNA, 18 nt, Human
ggcccuugacaucauggc

SEQ ID NO: 223969 - RNA, 20 nt, Human
ggcccuugacaucauggccu

SEQ ID NO: 223970 - RNA, 19 nt, Human
ggcuagagaagugggggug

SEQ ID NO: 223971 - RNA, 20 nt, Human
ggcuggugggaggggaaggc

SEQ ID NO: 223972 - RNA, 18 nt, Human
gggaaggagaagacagca

SEQ ID NO: 223973 - RNA, 20 nt, Human
gggcagaaccagccagagcu

SEQ ID NO: 223974 - RNA, 24 nt, Human
gggcagugagguccuuguucaggg

SEQ ID NO: 223975 - RNA, 18 nt, Human
gggggcccacagaaagcc

SEQ ID NO: 223976 - RNA, 20 nt, Human
guccccuucuccaccucugc

SEQ ID NO: 223977 - RNA, 21 nt, Human
gugggccgcuucuccacgcgu

SEQ ID NO: 223978 - RNA, 25 nt, Human
gugguacggaaacaccugaccccac

SEQ ID NO: 223979 - RNA, 19 nt, Human
guuuguuuaaaaaauaaaa

SEQ ID NO: 223980 - RNA, 25 nt, Human
uaaaaaauaaaacaaaaaauaacaa

SEQ ID NO: 223981 - RNA, 20 nt, Human
uaguggggcagaaggcagag

SEQ ID NO: 223982 - RNA, 19 nt, Human
ucaggacagaugcccccac

SEQ ID NO: 223983 - RNA, 19 nt, Human
ucaggccccugcugggugg

SEQ ID NO: 223984 - RNA, 23 nt, Human
ucaguguccccuucuccaccucu

SEQ ID NO: 223985 - RNA, 18 nt, Human
uccccggacagaguugcu

SEQ ID NO: 223986 - RNA, 23 nt, Human
ucugccacugcuugaccugagac

SEQ ID NO: 223987 - RNA, 20 nt, Human
ugaaaacagcuguuugaauu

SEQ ID NO: 223988 - RNA, 23 nt, Human
ugaaaacagcuguuugaauuugg

SEQ ID NO: 223989 - RNA, 18 nt, Human
ugaccccacgcacagcgg

SEQ ID NO: 223990 - RNA, 18 nt, Human
ugaggaccccaggcccca

SEQ ID NO: 223991 - RNA, 22 nt, Human
ugaggggggaagaggccaucaa

SEQ ID NO: 223992 - RNA, 25 nt, Human
ugaggggggaagaggccaucaaagg

SEQ ID NO: 223993 - RNA, 21 nt, Human
ugaugacuugcuuccugcccg

SEQ ID NO: 223994 - RNA, 24 nt, Human
ugcagcucccuggccaccagcccu

SEQ ID NO: 223995 - RNA, 18 nt, Human
ugcuuccugcccggccuc

SEQ ID NO: 223996 - RNA, 21 nt, Human
uggaugccccuuccugcuuuu

SEQ ID NO: 223997 - RNA, 21 nt, Human
uggccccccacucccaguucc

SEQ ID NO: 223998 - RNA, 21 nt, Human
ugggccagccccagggggcug

SEQ ID NO: 223999 - RNA, 24 nt, Human
ugggccagccccagggggcuggug

SEQ ID NO: 224000 - RNA, 19 nt, Human
uggggcagaaggcagagag

SEQ ID NO: 224001 - RNA, 24 nt, Human
ugggggcccacagaaagccuugcg

SEQ ID NO: 224002 - RNA, 23 nt, Human
ugggggugugggcacgugcccau

SEQ ID NO: 224003 - RNA, 18 nt, Human
uggguggcggccucugca

SEQ ID NO: 224004 - RNA, 18 nt, Human
uguaguaggugcccgacc

SEQ ID NO: 224005 - RNA, 21 nt, Human
uuccaguaacccaugcucugc

SEQ ID NO: 224006 - RNA, 27 nt, Human
uuuucaggccccugcuggguggcggcc

SEQ ID NO: 224007 - RNA, 21 nt, Human
uuuuuuuuuuuuuuuugccug

SEQ ID NO: 224008 - RNA, 18 nt, Human
uuuuuuuuuuuuuuuuug

SEQ ID NO: 224009 - RNA, 24 nt, Human
aaagugcuggguguauaggcguga

SEQ ID NO: 224010 - RNA, 24 nt, Human
aacuucuuccugccuauuucucau

SEQ ID NO: 224011 - RNA, 20 nt, Human
aagcuccauaagggcaguuc

SEQ ID NO: 224012 - RNA, 24 nt, Human
aaguagccaggaucacaggcaugc

SEQ ID NO: 224013 - RNA, 18 nt, Human
acaaaggagagacggugg

SEQ ID NO: 224014 - RNA, 22 nt, Human
acagacggaacaugaaagagaa

SEQ ID NO: 224015 - RNA, 18 nt, Human
acccaagccuggcagagg

SEQ ID NO: 224016 - RNA, 21 nt, Human
acccaccgggaccccgcgagc

SEQ ID NO: 224017 - RNA, 22 nt, Human
accccgcgagcccuggguggcc

SEQ ID NO: 224018 - RNA, 23 nt, Human
accucagccucugaaguagccag

SEQ ID NO: 224019 - RNA, 20 nt, Human
acugcaagcuccauaagggc

SEQ ID NO: 224020 - RNA, 19 nt, Human
acugcagccucaaacuccu

SEQ ID NO: 224021 - RNA, 28 nt, Human
agagaacaagguuauguuggucgacugg

SEQ ID NO: 224022 - RNA, 25 nt, Human
agagagacacaguguaaagaggaug

SEQ ID NO: 224023 - RNA, 21 nt, Human
agauaaggaaacaaaaucaga

SEQ ID NO: 224024 - RNA, 21 nt, Human
agcacacaggagggguuuagg

SEQ ID NO: 224025 - RNA, 19 nt, Human
agccaccacacucagccug

SEQ ID NO: 224026 - RNA, 20 nt, Human
agccucaaacuccuggccuc

SEQ ID NO: 224027 - RNA, 20 nt, Human
agccuuccaaagugcugggu

SEQ ID NO: 224028 - RNA, 23 nt, Human
aggaucacaggcaugcaccacca

SEQ ID NO: 224029 - RNA, 20 nt, Human
aggcaugcaccaccacaccc

SEQ ID NO: 224030 - RNA, 21 nt, Human
aggcgugagccaccacacuca

SEQ ID NO: 224031 - RNA, 18 nt, Human
aggcucagagacgggcag

SEQ ID NO: 224032 - RNA, 25 nt, Human
agucuaucgcccaggccuacaccag

SEQ ID NO: 224033 - RNA, 22 nt, Human
aguguaaagaggaugagagaaa

SEQ ID NO: 224034 - RNA, 18 nt, Human
auaacucacugcagccuc

SEQ ID NO: 224035 - RNA, 22 nt, Human
caaaggagagacgguggacggc

SEQ ID NO: 224036 - RNA, 24 nt, Human
caaagugcuggguguauaggcgug

SEQ ID NO: 224037 - RNA, 23 nt, Human
caaccaggcugauuccagggcac

SEQ ID NO: 224038 - RNA, 27 nt, Human
caagcgauccuccuuccucagccuucc

SEQ ID NO: 224039 - RNA, 20 nt, Human
caagugauccuuccaccuca

SEQ ID NO: 224040 - RNA, 27 nt, Human
cacacccaagccuggcagaggcugccc

SEQ ID NO: 224041 - RNA, 22 nt, Human
cacacucagccugaaauccuuu

SEQ ID NO: 224042 - RNA, 19 nt, Human
caccacacucagccugaaa

SEQ ID NO: 224043 - RNA, 19 nt, Human
cacccaccgggaccccgcg

SEQ ID NO: 224044 - RNA, 20 nt, Human
cacccaccgggaccccgcga

SEQ ID NO: 224045 - RNA, 22 nt, Human
caccucaccuccuccauuaaag

SEQ ID NO: 224046 - RNA, 21 nt, Human
caccucagccucugaaguagc

SEQ ID NO: 224047 - RNA, 22 nt, Human
caccugagaaaaaugagucaac

SEQ ID NO: 224048 - RNA, 19 nt, Human
cacucugucccgcaggcug

SEQ ID NO: 224049 - RNA, 24 nt, Human
cacucugucccgcaggcuggagug

SEQ ID NO: 224050 - RNA, 24 nt, Human
cacuguguugccuaggcuagucuc

SEQ ID NO: 224051 - RNA, 24 nt, Human
cagauaaggaaacaaaaucagaga

SEQ ID NO: 224052 - RNA, 20 nt, Human
cagcccaguagaaucagcag

SEQ ID NO: 224053 - RNA, 24 nt, Human
cagccucaaacuccuggccucaag

SEQ ID NO: 224054 - RNA, 21 nt, Human
caggaucacaggcaugcacca

SEQ ID NO: 224055 - RNA, 19 nt, Human
caggccaggcacacccaag

SEQ ID NO: 224056 - RNA, 23 nt, Human
caugaaagagaaugagaaacaga

SEQ ID NO: 224057 - RNA, 23 nt, Human
caugcaccaccacacccagcuaa

SEQ ID NO: 224058 - RNA, 22 nt, Human
ccaaagugcuggguguauaggc

SEQ ID NO: 224059 - RNA, 22 nt, Human
ccaaagugcuggguguauaggc

SEQ ID NO: 224060 - RNA, 24 nt, Human
ccaaagugcuggguguauaggcgu

SEQ ID NO: 224061 - RNA, 21 nt, Human
ccaccgggaccccgcgagccc

SEQ ID NO: 224062 - RNA, 18 nt, Human
ccaggccaggcacaccca

SEQ ID NO: 224063 - RNA, 23 nt, Human
ccaggggucccuccauggguccu

SEQ ID NO: 224064 - RNA, 18 nt, Human
cccacagcccaguagaau

SEQ ID NO: 224065 - RNA, 19 nt, Human
cccaguggagcccgggaca

SEQ ID NO: 224066 - RNA, 18 nt, Human
ccgggaccccgcgagccc

SEQ ID NO: 224067 - RNA, 21 nt, Human
ccuccauggguccugcucccu

SEQ ID NO: 224068 - RNA, 20 nt, Human
ccucccaugccauucagauc

SEQ ID NO: 224069 - RNA, 19 nt, Human
ccuccuuccucagccuucc

SEQ ID NO: 224070 - RNA, 26 nt, Human
ccuccuuccucagccuuccaaagugc

SEQ ID NO: 224071 - RNA, 25 nt, Human
ccugcucccuggagacaccugagaa

SEQ ID NO: 224072 - RNA, 18 nt, Human
ccuggccucaagcgaucc

SEQ ID NO: 224073 - RNA, 20 nt, Human
ccuggccucaagcgauccuc

SEQ ID NO: 224074 - RNA, 22 nt, Human
ccuggccucaagugauccuucc

SEQ ID NO: 224075 - RNA, 24 nt, Human
ccuggccucaagugauccuuccac

SEQ ID NO: 224076 - RNA, 23 nt, Human
ccuuccaccucagccucugaagu

SEQ ID NO: 224077 - RNA, 18 nt, Human
cgccuggaccccucaguc

SEQ ID NO: 224078 - RNA, 20 nt, Human
cgggacauggggacagggag

SEQ ID NO: 224079 - RNA, 21 nt, Human
cuagcacagggccagcacaca

SEQ ID NO: 224080 - RNA, 24 nt, Human
cucaagcgauccuccuuccucagc

SEQ ID NO: 224081 - RNA, 24 nt, Human
cucaagugauccuuccaccucagc

SEQ ID NO: 224082 - RNA, 24 nt, Human
cucacucugucccgcaggcuggag

SEQ ID NO: 224083 - RNA, 21 nt, Human
cucacugcagccucaaacucc

SEQ ID NO: 224084 - RNA, 24 nt, Human
cucacugcagccucaaacuccugg

SEQ ID NO: 224085 - RNA, 19 nt, Human
cuccagcacugucuagcac

SEQ ID NO: 224086 - RNA, 21 nt, Human
cucucucucuuucucuuucuu

SEQ ID NO: 224087 - RNA, 22 nt, Human
cugcagccucaaacuccuggcc

SEQ ID NO: 224088 - RNA, 20 nt, Human
cuggccucaagugauccuuc

SEQ ID NO: 224089 - RNA, 18 nt, Human
cuguguugccuaggcuag

SEQ ID NO: 224090 - RNA, 28 nt, Human
cuuccaucuuucccuuucuccucugaag

SEQ ID NO: 224091 - RNA, 22 nt, Human
cuucccauuuggcagcugagga

SEQ ID NO: 224092 - RNA, 18 nt, Human
cuuucccuuucuuucuuu

SEQ ID NO: 224093 - RNA, 24 nt, Human
cuuucuuucuuucucucucuuucu

SEQ ID NO: 224094 - RNA, 22 nt, Human
cuuucuuucuuucucucuuucu

SEQ ID NO: 224095 - RNA, 18 nt, Human
cuuucuuucuuucuuucu

SEQ ID NO: 224096 - RNA, 20 nt, Human
cuuucuuucuuucuuucucu

SEQ ID NO: 224097 - RNA, 20 nt, Human
cuuucuuucuuucuuucucu

SEQ ID NO: 224098 - RNA, 18 nt, Human
gaaaucaaggcucagaga

SEQ ID NO: 224099 - RNA, 20 nt, Human
gagaaaggacagagaacaag

SEQ ID NO: 224100 - RNA, 21 nt, Human
gagacagcaagagggaaagac

SEQ ID NO: 224101 - RNA, 25 nt, Human
gagacagcaagagggaaagacagag

SEQ ID NO: 224102 - RNA, 22 nt, Human
gauaaggaaacaaaaucagaga

SEQ ID NO: 224103 - RNA, 20 nt, Human
gaugaucaccauuuuacaga

SEQ ID NO: 224104 - RNA, 21 nt, Human
gaugcugggaaacaaaggaga

SEQ ID NO: 224105 - RNA, 23 nt, Human
gaugcugggaaacaaaggagaga

SEQ ID NO: 224106 - RNA, 20 nt, Human
gccaucacugucuggggaca

SEQ ID NO: 224107 - RNA, 19 nt, Human
gcuagucucaaacuccugg

SEQ ID NO: 224108 - RNA, 23 nt, Human
gcuagucucaaacuccuggccuc

SEQ ID NO: 224109 - RNA, 21 nt, Human
gcuggagugcagcagugccag

SEQ ID NO: 224110 - RNA, 27 nt, Human
ggaaacaaaggagagacgguggacggc

SEQ ID NO: 224111 - RNA, 22 nt, Human
ggaucacaggcaugcaccacca

SEQ ID NO: 224112 - RNA, 22 nt, Human
ggccccgcugacguggcccccg

SEQ ID NO: 224113 - RNA, 24 nt, Human
ggccucaagugauccuuccaccuc

SEQ ID NO: 224114 - RNA, 19 nt, Human
gggaaagacagaggcagcg

SEQ ID NO: 224115 - RNA, 23 nt, Human
gggucccuccauggguccugcuc

SEQ ID NO: 224116 - RNA, 21 nt, Human
ggguccugcucccuggagaca

SEQ ID NO: 224117 - RNA, 18 nt, Human
gguccugcucccuggaga

SEQ ID NO: 224118 - RNA, 19 nt, Human
uaaggaaacaaaaucagag

SEQ ID NO: 224119 - RNA, 22 nt, Human
uacagauaaggaaacaaaauca

SEQ ID NO: 224120 - RNA, 22 nt, Human
uauaggcgugagccaccacacu

SEQ ID NO: 224121 - RNA, 22 nt, Human
uaugaugaucaccauuuuacag

SEQ ID NO: 224122 - RNA, 24 nt, Human
ucacugcagccucaaacuccuggc

SEQ ID NO: 224123 - RNA, 20 nt, Human
ucagagagguagugugacug

SEQ ID NO: 224124 - RNA, 21 nt, Human
ucagaucugggcugggguccu

SEQ ID NO: 224125 - RNA, 21 nt, Human
ucagccucugaaguagccagg

SEQ ID NO: 224126 - RNA, 18 nt, Human
uccaggcuggauugggcc

SEQ ID NO: 224127 - RNA, 21 nt, Human
ucccauuuggcagcugaggaa

SEQ ID NO: 224128 - RNA, 20 nt, Human
ucccugacuuuccaggcugg

SEQ ID NO: 224129 - RNA, 22 nt, Human
ucccuggagacaccugagaaaa

SEQ ID NO: 224130 - RNA, 21 nt, Human
uccuccuuccucagccuucca

SEQ ID NO: 224131 - RNA, 19 nt, Human
uccuuccucagccuuccaa

SEQ ID NO: 224132 - RNA, 24 nt, Human
ucucacucugucccgcaggcugga

SEQ ID NO: 224133 - RNA, 18 nt, Human
ucuccagcacugucuagc

SEQ ID NO: 224134 - RNA, 24 nt, Human
ucugucccgcaggcuggagugcag

SEQ ID NO: 224135 - RNA, 23 nt, Human
ucuuacuuuucuuucuuuuucuu

SEQ ID NO: 224136 - RNA, 23 nt, Human
ucuuacuuuucuuucuuuuucuu

SEQ ID NO: 224137 - RNA, 19 nt, Human
ucuuucucucucucucucc

SEQ ID NO: 224138 - RNA, 20 nt, Human
ucuuucucuuucuuuuuccu

SEQ ID NO: 224139 - RNA, 20 nt, Human
ucuuucuuucucucucuuuc

SEQ ID NO: 224140 - RNA, 21 nt, Human
ucuuucuuucucucuuucuuu

SEQ ID NO: 224141 - RNA, 20 nt, Human
ucuuucuuucuuucuuucuc

SEQ ID NO: 224142 - RNA, 20 nt, Human
ucuuucuuucuuucuuucuc

SEQ ID NO: 224143 - RNA, 19 nt, Human
ugagaaacagagacagcaa

SEQ ID NO: 224144 - RNA, 19 nt, Human
ugagauaaggccucacugu

SEQ ID NO: 224145 - RNA, 21 nt, Human
ugaggaaaucaaggcucagag

SEQ ID NO: 224146 - RNA, 21 nt, Human
ugccaggcugcugaggaagag

SEQ ID NO: 224147 - RNA, 21 nt, Human
ugccugaaaugaggucugagc

SEQ ID NO: 224148 - RNA, 21 nt, Human
ugcugcccuucacaucccagc

SEQ ID NO: 224149 - RNA, 24 nt, Human
ugcugugcucguggacauuccugu

SEQ ID NO: 224150 - RNA, 23 nt, Human
uggaccccucagucccaggccag

SEQ ID NO: 224151 - RNA, 18 nt, Human
uggccucaagcgauccuc

SEQ ID NO: 224152 - RNA, 19 nt, Human
uggccucaagcgauccucc

SEQ ID NO: 224153 - RNA, 20 nt, Human
uggccucaagcgauccuccu

SEQ ID NO: 224154 - RNA, 21 nt, Human
uggccucaagugauccuucca

SEQ ID NO: 224155 - RNA, 24 nt, Human
uggccucaagugauccuuccaccu

SEQ ID NO: 224156 - RNA, 23 nt, Human
ugggcugggguccuaugucuguu

SEQ ID NO: 224157 - RNA, 24 nt, Human
uggguguauaggcgugagccacca

SEQ ID NO: 224158 - RNA, 22 nt, Human
uggugucaugguuaagggcagc

SEQ ID NO: 224159 - RNA, 24 nt, Human
uguugagauaaggccucacugugu

SEQ ID NO: 224160 - RNA, 22 nt, Human
uguugccuaggcuagucucaaa

SEQ ID NO: 224161 - RNA, 20 nt, Human
uuccucagccuuccaaagug

SEQ ID NO: 224162 - RNA, 21 nt, Human
uuccucagccuuccaaagugc

SEQ ID NO: 224163 - RNA, 20 nt, Human
uucuuucuuuuucuuucucu

SEQ ID NO: 224164 - RNA, 20 nt, Human
uugggauuugagcucaaccg

SEQ ID NO: 224165 - RNA, 23 nt, Human
uuuuccuuccuuccuuccaucuu

SEQ ID NO: 224166 - RNA, 19 nt, Human
uuuuuagauuuugugguug

SEQ ID NO: 224167 - RNA, 18 nt, Human
aaccuggggaggagaagg

SEQ ID NO: 224168 - RNA, 19 nt, Human
aacuggcaccacucacccc

SEQ ID NO: 224169 - RNA, 21 nt, Human
aagaacuuccccauggcacgg

SEQ ID NO: 224170 - RNA, 21 nt, Human
aagaacuuccccauggcacgg

SEQ ID NO: 224171 - RNA, 21 nt, Human
aagaacuuccccauggcacgg

SEQ ID NO: 224172 - RNA, 25 nt, Human
aagcaaguaacccccuucucaacgc

SEQ ID NO: 224173 - RNA, 25 nt, Human
aagcaaguaacccccuucucaacgc

SEQ ID NO: 224174 - RNA, 20 nt, Human
aagcaggggcuuguccugaa

SEQ ID NO: 224175 - RNA, 20 nt, Human
aagcaggggcuuguccugaa

SEQ ID NO: 224176 - RNA, 20 nt, Human
aagcaggggcuuguccugaa

SEQ ID NO: 224177 - RNA, 19 nt, Human
aaggcccagccccccagug

SEQ ID NO: 224178 - RNA, 22 nt, Human
aaggcccagccccccagugauu

SEQ ID NO: 224179 - RNA, 22 nt, Human
acccuucccagguccuggaggc

SEQ ID NO: 224180 - RNA, 24 nt, Human
accuggggaggagaaggugcuggg

SEQ ID NO: 224181 - RNA, 19 nt, Human
agcagcugggauggugggg

SEQ ID NO: 224182 - RNA, 20 nt, Human
aggcaccugggaggggcugg

SEQ ID NO: 224183 - RNA, 21 nt, Human
aggcaccugggaggggcuggg

SEQ ID NO: 224184 - RNA, 18 nt, Human
agggcggggccaggagga

SEQ ID NO: 224185 - RNA, 20 nt, Human
aggggcugggcagggcgggg

SEQ ID NO: 224186 - RNA, 18 nt, Human
augauuaacaguaucccc

SEQ ID NO: 224187 - RNA, 18 nt, Human
augauuaacaguaucccc

SEQ ID NO: 224188 - RNA, 22 nt, Human
caacuggcaccacucacccccu

SEQ ID NO: 224189 - RNA, 18 nt, Human
caaguaaccuggggagga

SEQ ID NO: 224190 - RNA, 21 nt, Human
caccacucacccccuucucaa

SEQ ID NO: 224191 - RNA, 18 nt, Human
cacccuucccagguccug

SEQ ID NO: 224192 - RNA, 23 nt, Human
cacccuucccagguccuggaggc

SEQ ID NO: 224193 - RNA, 25 nt, Human
cacuccuggcugcuuccuccucagg

SEQ ID NO: 224194 - RNA, 25 nt, Human
cacuccuggcugcuuccuccucagg

SEQ ID NO: 224195 - RNA, 25 nt, Human
cacuccuggcugcuuccuccucagg

SEQ ID NO: 224196 - RNA, 25 nt, Human
cacuccuggcugcuuccuccucagg

SEQ ID NO: 224197 - RNA, 22 nt, Human
cagagccaguucauccugcccc

SEQ ID NO: 224198 - RNA, 22 nt, Human
cagagccaguucauccugcccc

SEQ ID NO: 224199 - RNA, 22 nt, Human
cagagccaguucauccugcccc

SEQ ID NO: 224200 - RNA, 22 nt, Human
cagagcucuucgacuaccccuc

SEQ ID NO: 224201 - RNA, 18 nt, Human
cagcgcagugacuugccc

SEQ ID NO: 224202 - RNA, 18 nt, Human
caggaggaggugcugugu

SEQ ID NO: 224203 - RNA, 21 nt, Human
caggcaccugggaggggcugg

SEQ ID NO: 224204 - RNA, 24 nt, Human
cagggcggggccaggaggaggugc

SEQ ID NO: 224205 - RNA, 19 nt, Human
ccacucacccccuucucaa

SEQ ID NO: 224206 - RNA, 21 nt, Human
cccccagugauuuaugggagu

SEQ ID NO: 224207 - RNA, 22 nt, Human
ccccccagugauuuaugggagu

SEQ ID NO: 224208 - RNA, 22 nt, Human
ccccgcccaccucccagcgcag

SEQ ID NO: 224209 - RNA, 20 nt, Human
cccugaggccucccgcccac

SEQ ID NO: 224210 - RNA, 20 nt, Human
cccugaggccucccgcccac

SEQ ID NO: 224211 - RNA, 20 nt, Human
cccugaggccucccgcccac

SEQ ID NO: 224212 - RNA, 20 nt, Human
cccugaggccucccgcccac

SEQ ID NO: 224213 - RNA, 22 nt, Human
ccgcggcuccaucuccagauuc

SEQ ID NO: 224214 - RNA, 22 nt, Human
ccgcggcuccaucuccagauuc

SEQ ID NO: 224215 - RNA, 22 nt, Human
ccgcggcuccaucuccagauuc

SEQ ID NO: 224216 - RNA, 22 nt, Human
ccgcggcuccaucuccagauuc

SEQ ID NO: 224217 - RNA, 18 nt, Human
ccucaggugccgccaccu

SEQ ID NO: 224218 - RNA, 18 nt, Human
ccucaggugccgccaccu

SEQ ID NO: 224219 - RNA, 18 nt, Human
ccucaggugccgccaccu

SEQ ID NO: 224220 - RNA, 18 nt, Human
ccucaggugccgccaccu

SEQ ID NO: 224221 - RNA, 20 nt, Human
ccucccagcgcagugacuug

SEQ ID NO: 224222 - RNA, 21 nt, Human
ccuccucaggugccgccaccu

SEQ ID NO: 224223 - RNA, 21 nt, Human
ccuccucaggugccgccaccu

SEQ ID NO: 224224 - RNA, 21 nt, Human
ccuccucaggugccgccaccu

SEQ ID NO: 224225 - RNA, 21 nt, Human
ccuccucaggugccgccaccu

SEQ ID NO: 224226 - RNA, 21 nt, Human
ccugaagcuggggccgcgggc

SEQ ID NO: 224227 - RNA, 21 nt, Human
ccugaagcuggggccgcgggc

SEQ ID NO: 224228 - RNA, 21 nt, Human
ccugaagcuggggccgcgggc

SEQ ID NO: 224229 - RNA, 24 nt, Human
ccuggcugcuuccuccucaggugc

SEQ ID NO: 224230 - RNA, 23 nt, Human
cgccaccuuacggagcugaacuc

SEQ ID NO: 224231 - RNA, 23 nt, Human
cgccaccuuacggagcugaacuc

SEQ ID NO: 224232 - RNA, 23 nt, Human
cgccaccuuacggagcugaacuc

SEQ ID NO: 224233 - RNA, 23 nt, Human
cgccaccuuacggagcugaacuc

SEQ ID NO: 224234 - RNA, 27 nt, Human
cuagaagcaaguaacccccuucucaac

SEQ ID NO: 224235 - RNA, 27 nt, Human
cuagaagcaaguaacccccuucucaac

SEQ ID NO: 224236 - RNA, 24 nt, Human
cucacccccuucucaacgcugcca

SEQ ID NO: 224237 - RNA, 24 nt, Human
cuccaccugcaaggcccagccccc

SEQ ID NO: 224238 - RNA, 24 nt, Human
cugcaucacccuucccagguccug

SEQ ID NO: 224239 - RNA, 22 nt, Human
cuucccagguccuggaggcaag

SEQ ID NO: 224240 - RNA, 25 nt, Human
cuuccccagccacuccuggcugcuu

SEQ ID NO: 224241 - RNA, 25 nt, Human
cuuccccagccacuccuggcugcuu

SEQ ID NO: 224242 - RNA, 26 nt, Human
cuuccccagccacuccuggcugcuuc

SEQ ID NO: 224243 - RNA, 26 nt, Human
cuuccccagccacuccuggcugcuuc

SEQ ID NO: 224244 - RNA, 19 nt, Human
gcaccugggaggggcuggg

SEQ ID NO: 224245 - RNA, 19 nt, Human
gccuggguucuggugaugc

SEQ ID NO: 224246 - RNA, 20 nt, Human
gcggggccaggaggagguga

SEQ ID NO: 224247 - RNA, 23 nt, Human
gcugccaccagagcucuucgacu

SEQ ID NO: 224248 - RNA, 20 nt, Human
gcuggggugugaacaggagg

SEQ ID NO: 224249 - RNA, 21 nt, Human
gcuggggugugaacaggaggg

SEQ ID NO: 224250 - RNA, 19 nt, Human
ggaggagaaggugcugggg

SEQ ID NO: 224251 - RNA, 22 nt, Human
ggauggcugggguggcuggggu

SEQ ID NO: 224252 - RNA, 20 nt, Human
ggcagggugcucagagccag

SEQ ID NO: 224253 - RNA, 20 nt, Human
ggcagggugcucagagccag

SEQ ID NO: 224254 - RNA, 20 nt, Human
ggcagggugcucagagccag

SEQ ID NO: 224255 - RNA, 20 nt, Human
ggccaggaggaggugcugug

SEQ ID NO: 224256 - RNA, 18 nt, Human
ggcugggcagggcggggc

SEQ ID NO: 224257 - RNA, 22 nt, Human
gggacccggcugggauggcugg

SEQ ID NO: 224258 - RNA, 19 nt, Human
gggaggggcugggcagggc

SEQ ID NO: 224259 - RNA, 21 nt, Human
gggcagggcggggccaggagg

SEQ ID NO: 224260 - RNA, 19 nt, Human
ggggcugggcagggcgggg

SEQ ID NO: 224261 - RNA, 21 nt, Human
ggugcugugggaacuggcggc

SEQ ID NO: 224262 - RNA, 19 nt, Human
guccugaagcuggggccgc

SEQ ID NO: 224263 - RNA, 19 nt, Human
guccugaagcuggggccgc

SEQ ID NO: 224264 - RNA, 19 nt, Human
guccugaagcuggggccgc

SEQ ID NO: 224265 - RNA, 19 nt, Human
gugcuggggcagcgccugg

SEQ ID NO: 224266 - RNA, 18 nt, Human
uaacaguauccccugagg

SEQ ID NO: 224267 - RNA, 18 nt, Human
uaacaguauccccugagg

SEQ ID NO: 224268 - RNA, 18 nt, Human
uaacaguauccccugagg

SEQ ID NO: 224269 - RNA, 18 nt, Human
uaacaguauccccugagg

SEQ ID NO: 224270 - RNA, 21 nt, Human
uaacaguauccccugaggccu

SEQ ID NO: 224271 - RNA, 21 nt, Human
uaacaguauccccugaggccu

SEQ ID NO: 224272 - RNA, 21 nt, Human
uaacaguauccccugaggccu

SEQ ID NO: 224273 - RNA, 19 nt, Human
uaugauuaacaguaucccc

SEQ ID NO: 224274 - RNA, 19 nt, Human
uaugauuaacaguaucccc

SEQ ID NO: 224275 - RNA, 19 nt, Human
ucacccuucccagguccug

SEQ ID NO: 224276 - RNA, 19 nt, Human
ucagagccaguucauccug

SEQ ID NO: 224277 - RNA, 19 nt, Human
ucagagccaguucauccug

SEQ ID NO: 224278 - RNA, 19 nt, Human
ucagagccaguucauccug

SEQ ID NO: 224279 - RNA, 22 nt, Human
ucaggcaccugggaggggcugg

SEQ ID NO: 224280 - RNA, 23 nt, Human
ucaggcaccugggaggggcuggg

SEQ ID NO: 224281 - RNA, 28 nt, Human
uccaucuccagauucuuccccagccacu

SEQ ID NO: 224282 - RNA, 28 nt, Human
uccaucuccagauucuuccccagccacu

SEQ ID NO: 224283 - RNA, 28 nt, Human
uccaucuccagauucuuccccagccacu

SEQ ID NO: 224284 - RNA, 28 nt, Human
uccaucuccagauucuuccccagccacu

SEQ ID NO: 224285 - RNA, 20 nt, Human
ucccagguccuggaggcaag

SEQ ID NO: 224286 - RNA, 24 nt, Human
ucccagguccuggaggcaagacau

SEQ ID NO: 224287 - RNA, 26 nt, Human
ucccagguccuggaggcaagacauuu

SEQ ID NO: 224288 - RNA, 20 nt, Human
uccccgcccaccucccagcg

SEQ ID NO: 224289 - RNA, 21 nt, Human
ucccgcccacccucaccgcgg

SEQ ID NO: 224290 - RNA, 21 nt, Human
ucccgcccacccucaccgcgg

SEQ ID NO: 224291 - RNA, 21 nt, Human
ucccgcccacccucaccgcgg

SEQ ID NO: 224292 - RNA, 21 nt, Human
ucccgcccacccucaccgcgg

SEQ ID NO: 224293 - RNA, 18 nt, Human
uccuagaagcaaguaacc

SEQ ID NO: 224294 - RNA, 18 nt, Human
uccuagaagcaaguaacc

SEQ ID NO: 224295 - RNA, 18 nt, Human
uccuagaagcaaguaacc

SEQ ID NO: 224296 - RNA, 18 nt, Human
uccuccucaggugccgcc

SEQ ID NO: 224297 - RNA, 18 nt, Human
uccuccucaggugccgcc

SEQ ID NO: 224298 - RNA, 18 nt, Human
uccuccucaggugccgcc

SEQ ID NO: 224299 - RNA, 25 nt, Human
uccuggcugcuuccuccucaggugc

SEQ ID NO: 224300 - RNA, 25 nt, Human
uccuggcugcuuccuccucaggugc

SEQ ID NO: 224301 - RNA, 25 nt, Human
uccuggcugcuuccuccucaggugc

SEQ ID NO: 224302 - RNA, 23 nt, Human
ucgacuaccccucccacgccgug

SEQ ID NO: 224303 - RNA, 24 nt, Human
ucuuccccagccacuccuggcugc

SEQ ID NO: 224304 - RNA, 24 nt, Human
ucuuccccagccacuccuggcugc

SEQ ID NO: 224305 - RNA, 24 nt, Human
ucuuccccagccacuccuggcugc

SEQ ID NO: 224306 - RNA, 24 nt, Human
ucuuccccagccacuccuggcugc

SEQ ID NO: 224307 - RNA, 23 nt, Human
ugaagaacuuccccauggcacgg

SEQ ID NO: 224308 - RNA, 23 nt, Human
ugaagaacuuccccauggcacgg

SEQ ID NO: 224309 - RNA, 23 nt, Human
ugaagaacuuccccauggcacgg

SEQ ID NO: 224310 - RNA, 18 nt, Human
ugcucagagccaguucau

SEQ ID NO: 224311 - RNA, 18 nt, Human
ugcucagagccaguucau

SEQ ID NO: 224312 - RNA, 18 nt, Human
ugcucagagccaguucau

SEQ ID NO: 224313 - RNA, 20 nt, Human
uggagugaggucccuccacc

SEQ ID NO: 224314 - RNA, 19 nt, Human
uggcaccacucacccccuu

SEQ ID NO: 224315 - RNA, 19 nt, Human
uggccaagaguccuagaag

SEQ ID NO: 224316 - RNA, 19 nt, Human
uggccaagaguccuagaag

SEQ ID NO: 224317 - RNA, 19 nt, Human
uggccaagaguccuagaag

SEQ ID NO: 224318 - RNA, 19 nt, Human
uggcugggguggcuggggu

SEQ ID NO: 224319 - RNA, 21 nt, Human
uggcugggguggcuggggugu

SEQ ID NO: 224320 - RNA, 21 nt, Human
uggcugggguggcuggggugu

SEQ ID NO: 224321 - RNA, 22 nt, Human
uggcuggggugugaacaggagg

SEQ ID NO: 224322 - RNA, 24 nt, Human
ugggaggggcugggcagggcgggg

SEQ ID NO: 224323 - RNA, 27 nt, Human
ugggaggggcugggcagggcggggccc

SEQ ID NO: 224324 - RNA, 22 nt, Human
uggggccgcgggcggcagggug

SEQ ID NO: 224325 - RNA, 22 nt, Human
uggggccgcgggcggcagggug

SEQ ID NO: 224326 - RNA, 26 nt, Human
ugugaacaggagggaggugagcugca

SEQ ID NO: 224327 - RNA, 20 nt, Human
uguggguggcugggacccgg

SEQ ID NO: 224328 - RNA, 22 nt, Human
uuaacaguauccccugaggccu

SEQ ID NO: 224329 - RNA, 22 nt, Human
uuccuccucaggugccgccagu

SEQ ID NO: 224330 - RNA, 24 nt, Human
uuuuucguugcucauuuuaugauu

SEQ ID NO: 224331 - RNA, 25 nt, Human
uuuuucguugcucauuuuaugauua

SEQ ID NO: 224332 - RNA, 25 nt, Human
uuuuucguugcucauuuuaugauua

SEQ ID NO: 224333 - RNA, 25 nt, Human
uuuuucguugcucauuuuaugauua

SEQ ID NO: 224334 - RNA, 19 nt, Human
uuuuuuuuuuuuuuucguu

SEQ ID NO: 224335 - RNA, 19 nt, Human
uuuuuuuuuuuuuuucguu

SEQ ID NO: 224336 - RNA, 19 nt, Human
uuuuuuuuuuuuuuucguu

SEQ ID NO: 224337 - RNA, 20 nt, Human
uuuuuuuuuuuuuuuuucgg

SEQ ID NO: 224338 - RNA, 21 nt, Human
uuuuuuuuuuuuuuuuucguu

SEQ ID NO: 224339 - RNA, 20 nt, Human
aaggagccggcgcggggggc

SEQ ID NO: 224340 - RNA, 23 nt, Human
acccagcauccacggacgccucu

SEQ ID NO: 224341 - RNA, 20 nt, Human
agcauccacggacgccucuc

SEQ ID NO: 224342 - RNA, 22 nt, Human
aggcagaaaucccgaagccgug

SEQ ID NO: 224343 - RNA, 19 nt, Human
auccacggacgccucucuu

SEQ ID NO: 224344 - RNA, 23 nt, Human
caugucccgcaggcucacagccg

SEQ ID NO: 224345 - RNA, 18 nt, Human
cccgcaggcucacagccu

SEQ ID NO: 224346 - RNA, 19 nt, Human
ccgcaggcucacagccgcg

SEQ ID NO: 224347 - RNA, 23 nt, Human
cgcccagcacagcagagguccac

SEQ ID NO: 224348 - RNA, 23 nt, Human
uccacuugagaaggcagaaauug

SEQ ID NO: 224349 - RNA, 19 nt, Human
ucccgcaggcucacagccg

SEQ ID NO: 224350 - RNA, 21 nt, Human
ucccgcaggcucacagccgcg

SEQ ID NO: 224351 - RNA, 22 nt, Human
accacaugcacacuaucauaca

SEQ ID NO: 224352 - RNA, 23 nt, Human
ccacaugcacacuaucauacaua

SEQ ID NO: 224353 - RNA, 27 nt, Human
ccacaugcacacuaucauacauauggu

SEQ ID NO: 224354 - RNA, 19 nt, Human
cccccagaaucauaaauaa

SEQ ID NO: 224355 - RNA, 20 nt, Human
ccccccagaaucauaaauaa

SEQ ID NO: 224356 - RNA, 21 nt, Human
cuuuggguuauuuucccccca

SEQ ID NO: 224357 - RNA, 18 nt, Human
uaacuuugggcccguccu

SEQ ID NO: 224358 - RNA, 24 nt, Human
uaucauacauaugcaaauaugugu

SEQ ID NO: 224359 - RNA, 23 nt, Human
uaugguggugaaauaaaaaugac

SEQ ID NO: 224360 - RNA, 22 nt, Human
uggaaacaccaacuggggaaau

SEQ ID NO: 224361 - RNA, 22 nt, Human
ugucuggagcaugccuuugggu

SEQ ID NO: 224362 - RNA, 20 nt, Human
uuugcuguugugcucaaggg

SEQ ID NO: 224363 - RNA, 19 nt, Human
aaacaaagaagggaggcuc

SEQ ID NO: 224364 - RNA, 24 nt, Human
aaacaaagaagggaggcucgcugg

SEQ ID NO: 224365 - RNA, 22 nt, Human
aacuggcuggccuuauggccuc

SEQ ID NO: 224366 - RNA, 24 nt, Human
aagugguauggcauggauggaugg

SEQ ID NO: 224367 - RNA, 22 nt, Human
acagguaauagagagcuagaac

SEQ ID NO: 224368 - RNA, 21 nt, Human
accccaaaagaggccacagag

SEQ ID NO: 224369 - RNA, 21 nt, Human
accgcuuugagacaacaggga

SEQ ID NO: 224370 - RNA, 18 nt, Human
agaagacagcguggauug

SEQ ID NO: 224371 - RNA, 18 nt, Human
agcagcccugggggccca

SEQ ID NO: 224372 - RNA, 23 nt, Human
agcuucugggggaggauggguac

SEQ ID NO: 224373 - RNA, 23 nt, Human
auggccuccaaggcauuggggag

SEQ ID NO: 224374 - RNA, 23 nt, Human
cagcaggaaguuuggccuccccg

SEQ ID NO: 224375 - RNA, 19 nt, Human
cagcguggauuggacugga

SEQ ID NO: 224376 - RNA, 24 nt, Human
cccccaccccaaaagaggccacag

SEQ ID NO: 224377 - RNA, 18 nt, Human
ccccgcccccaccccaaa

SEQ ID NO: 224378 - RNA, 20 nt, Human
cccugggggcccagccaguc

SEQ ID NO: 224379 - RNA, 21 nt, Human
cuggggacagcuucuggggga

SEQ ID NO: 224380 - RNA, 23 nt, Human
gagacaacagggagaacucaggc

SEQ ID NO: 224381 - RNA, 18 nt, Human
gagcaggcaaugacuuca

SEQ ID NO: 224382 - RNA, 20 nt, Human
gcaacagaagacagcgugga

SEQ ID NO: 224383 - RNA, 20 nt, Human
gcacagaggugacgaucauc

SEQ ID NO: 224384 - RNA, 21 nt, Human
gcccccaccccaaaagaggcc

SEQ ID NO: 224385 - RNA, 23 nt, Human
gcccccaccccaaaagaggccac

SEQ ID NO: 224386 - RNA, 21 nt, Human
gcuggccuuauggccuccaag

SEQ ID NO: 224387 - RNA, 24 nt, Human
ggauuucucaaagguuaguccugc

SEQ ID NO: 224388 - RNA, 21 nt, Human
ggcagguggagaaggcauugu

SEQ ID NO: 224389 - RNA, 21 nt, Human
ggccacagagcuucagcagga

SEQ ID NO: 224390 - RNA, 21 nt, Human
gggacagcuucugggggagga

SEQ ID NO: 224391 - RNA, 21 nt, Human
gggagggcagguggagaaggc

SEQ ID NO: 224392 - RNA, 19 nt, Human
ggggagcagcccugggggc

SEQ ID NO: 224393 - RNA, 19 nt, Human
gggucuugagcagcagaca

SEQ ID NO: 224394 - RNA, 18 nt, Human
guauggcauggauggaug

SEQ ID NO: 224395 - RNA, 18 nt, Human
uauccuagaaaauaguaa

SEQ ID NO: 224396 - RNA, 19 nt, Human
uaugagucaguugaguggg

SEQ ID NO: 224397 - RNA, 21 nt, Human
uauuagagaauucaaacaaag

SEQ ID NO: 224398 - RNA, 21 nt, Human
ucgcuggggacagcuucuggg

SEQ ID NO: 224399 - RNA, 22 nt, Human
ucugccuggacccccgccccca

SEQ ID NO: 224400 - RNA, 19 nt, Human
ucuugagcagcagacaguu

SEQ ID NO: 224401 - RNA, 21 nt, Human
ugacuucacaaaaggauuucu

SEQ ID NO: 224402 - RNA, 26 nt, Human
ugagacaacagggagaacucaggcac

SEQ ID NO: 224403 - RNA, 19 nt, Human
ugagcaggcaaugacuuca

SEQ ID NO: 224404 - RNA, 19 nt, Human
uggaagagugggagggcag

SEQ ID NO: 224405 - RNA, 23 nt, Human
uggaagagugggagggcaggugg

SEQ ID NO: 224406 - RNA, 21 nt, Human
uggacccccgcccccacccca

SEQ ID NO: 224407 - RNA, 19 nt, Human
uggauuggacuggaagagu

SEQ ID NO: 224408 - RNA, 21 nt, Human
ugggggaggauggguaccgcu

SEQ ID NO: 224409 - RNA, 23 nt, Human
ugggggaggauggguaccgcuuu

SEQ ID NO: 224410 - RNA, 19 nt, Human
ugggggcagugaucauuua

SEQ ID NO: 224411 - RNA, 24 nt, Human
ugggucuugagcagcagacaguuu

SEQ ID NO: 224412 - RNA, 23 nt, Human
uugagcagcagacaguuucuuuc

SEQ ID NO: 224413 - RNA, 21 nt, Human
aaaaguucacauuuggaauua

SEQ ID NO: 224414 - RNA, 19 nt, Human
aaaggcagcauauccacca

SEQ ID NO: 224415 - RNA, 21 nt, Human
aacagcguccugaacaggguu

SEQ ID NO: 224416 - RNA, 20 nt, Human
aauuuguuuacauucuccuu

SEQ ID NO: 224417 - RNA, 20 nt, Human
acucaaaaaguucacauuug

SEQ ID NO: 224418 - RNA, 22 nt, Human
agacaggcauaauuagguccuc

SEQ ID NO: 224419 - RNA, 22 nt, Human
agacaucugaaggccagcacuu

SEQ ID NO: 224420 - RNA, 24 nt, Human
agcaaaggaugagauacauucucg

SEQ ID NO: 224421 - RNA, 20 nt, Human
ccaccagaauuucuggccac

SEQ ID NO: 224422 - RNA, 19 nt, Human
cccuccuucuccuccucuc

SEQ ID NO: 224423 - RNA, 19 nt, Human
cccuucauuucuucucucc

SEQ ID NO: 224424 - RNA, 22 nt, Human
ccucaugcaagucuguagagau

SEQ ID NO: 224425 - RNA, 19 nt, Human
ccucucacccuccuucucc

SEQ ID NO: 224426 - RNA, 21 nt, Human
cucaaaaaguucacauuugga

SEQ ID NO: 224427 - RNA, 20 nt, Human
cugcccaguccacucagaau

SEQ ID NO: 224428 - RNA, 18 nt, Human
cuucucuccucucuccac

SEQ ID NO: 224429 - RNA, 26 nt, Human
gugccugcaaaccugcuccagcaaag

SEQ ID NO: 224430 - RNA, 24 nt, Human
guuuaaucaauaacuagagaaugu

SEQ ID NO: 224431 - RNA, 23 nt, Human
uaagaaauguugccucaugcaag

SEQ ID NO: 224432 - RNA, 20 nt, Human
uaagugucccuucauuucuu

SEQ ID NO: 224433 - RNA, 21 nt, Human
uaagugucccuucauuucuuc

SEQ ID NO: 224434 - RNA, 20 nt, Human
ucauuucuucucuccucucu

SEQ ID NO: 224435 - RNA, 25 nt, Human
uccaccaccagaauuucuggccacu

SEQ ID NO: 224436 - RNA, 19 nt, Human
ucccacaugaaaauaugau

SEQ ID NO: 224437 - RNA, 21 nt, Human
uccuuugaauuccacaugaaa

SEQ ID NO: 224438 - RNA, 28 nt, Human
ucucuccucucuccacugugccugcaaa

SEQ ID NO: 224439 - RNA, 21 nt, Human
ucuucucuccucucuccacug

SEQ ID NO: 224440 - RNA, 22 nt, Human
ugaaaagaaugacucaaaaagu

SEQ ID NO: 224441 - RNA, 18 nt, Human
ugacucaaaaaguucaca

SEQ ID NO: 224442 - RNA, 18 nt, Human
ugcuccucucacccuccu

SEQ ID NO: 224443 - RNA, 23 nt, Human
uggaaaggcagcauauccaccac

SEQ ID NO: 224444 - RNA, 23 nt, Human
uggaauuaacagcguccugaaca

SEQ ID NO: 224445 - RNA, 21 nt, Human
uguagcaaacaagccuaagaa

SEQ ID NO: 224446 - RNA, 18 nt, Human
ugugccugcaaaccugcc

SEQ ID NO: 224447 - RNA, 19 nt, Human
ugugccugcaaaccugcuc

SEQ ID NO: 224448 - RNA, 25 nt, Human
uguuggaaaggcagcauauccaacc

SEQ ID NO: 224449 - RNA, 21 nt, Human
uucuggccacugcccaguccc

SEQ ID NO: 224450 - RNA, 18 nt, Human
uugcuccucucacccucc

SEQ ID NO: 224451 - RNA, 23 nt, Human
uugucauggcuucuuugcuccuc

SEQ ID NO: 224452 - RNA, 22 nt, Human
uuuggaauuaacagcguccuga

SEQ ID NO: 224453 - RNA, 24 nt, Human
agcgcccccugccagccuccgccc

SEQ ID NO: 224454 - RNA, 23 nt, Human
agcgcgcgagaacaaaggggccg

SEQ ID NO: 224455 - RNA, 21 nt, Human
agcuucuguacuuugcuuucu

SEQ ID NO: 224456 - RNA, 18 nt, Human
aggaaacacagguuccgc

SEQ ID NO: 224457 - RNA, 23 nt, Human
caaaggggccgaggccagcgacg

SEQ ID NO: 224458 - RNA, 20 nt, Human
caccgccgccgccgcgcgac

SEQ ID NO: 224459 - RNA, 19 nt, Human
cagagccuccugcacccuc

SEQ ID NO: 224460 - RNA, 20 nt, Human
cagccccccagccgccgccu

SEQ ID NO: 224461 - RNA, 18 nt, Human
cagcgccccccagccccc

SEQ ID NO: 224462 - RNA, 18 nt, Human
cagcuuccagcgcccccu

SEQ ID NO: 224463 - RNA, 22 nt, Human
ccagcgcccccugccagccucc

SEQ ID NO: 224464 - RNA, 19 nt, Human
ccccagccgccgccugggc

SEQ ID NO: 224465 - RNA, 23 nt, Human
cccccagccgccgccugggcccc

SEQ ID NO: 224466 - RNA, 18 nt, Human
ccccccgcccccucccgc

SEQ ID NO: 224467 - RNA, 20 nt, Human
cccccgcccccucccgcccc

SEQ ID NO: 224468 - RNA, 24 nt, Human
cccccggcgccgagcccgacugcc

SEQ ID NO: 224469 - RNA, 19 nt, Human
ccccgcccccucccgcccc

SEQ ID NO: 224470 - RNA, 21 nt, Human
ccccgcccccucccgcccccg

SEQ ID NO: 224471 - RNA, 23 nt, Human
ccccggcgccgagcccgacugcc

SEQ ID NO: 224472 - RNA, 22 nt, Human
ccccugccagccuccgcccccc

SEQ ID NO: 224473 - RNA, 24 nt, Human
ccccugccagccuccgccccccgc

SEQ ID NO: 224474 - RNA, 18 nt, Human
cccggcgccgagcccgac

SEQ ID NO: 224475 - RNA, 24 nt, Human
cccggcgccgagcccgacugccuc

SEQ ID NO: 224476 - RNA, 19 nt, Human
ccgccgccaccgccgccgc

SEQ ID NO: 224477 - RNA, 22 nt, Human
ccgccgccaccgccgccgccgc

SEQ ID NO: 224478 - RNA, 25 nt, Human
ccgccgccaccgccgccgccgcgcg

SEQ ID NO: 224479 - RNA, 23 nt, Human
ccgccgccgccaccgccgccgcc

SEQ ID NO: 224480 - RNA, 24 nt, Human
ccgccgccgccaccgccgccgccg

SEQ ID NO: 224481 - RNA, 19 nt, Human
ccgccgccugggccccgcg

SEQ ID NO: 224482 - RNA, 19 nt, Human
ccucccgcccccggcgccg

SEQ ID NO: 224483 - RNA, 22 nt, Human
ccucccgcccccggcgccgagc

SEQ ID NO: 224484 - RNA, 20 nt, Human
ccuccgccccccgcacucuc

SEQ ID NO: 224485 - RNA, 21 nt, Human
cgagcccgacugccucgggcg

SEQ ID NO: 224486 - RNA, 22 nt, Human
cgccaggaaacacagguuccgc

SEQ ID NO: 224487 - RNA, 21 nt, Human
cgcccccugccagccuccgcc

SEQ ID NO: 224488 - RNA, 25 nt, Human
cgccugggccccgcggugcagcagc

SEQ ID NO: 224489 - RNA, 22 nt, Human
cggcagcgccccccagcccccc

SEQ ID NO: 224490 - RNA, 19 nt, Human
cggcggcggcggcggcagc

SEQ ID NO: 224491 - RNA, 21 nt, Human
cggcggcggcggcggcagcgc

SEQ ID NO: 224492 - RNA, 19 nt, Human
cguggcccuguccaucucc

SEQ ID NO: 224493 - RNA, 19 nt, Human
cuccccccgcccccucccg

SEQ ID NO: 224494 - RNA, 21 nt, Human
cuccccccgcccccucccgcc

SEQ ID NO: 224495 - RNA, 20 nt, Human
cuccgccccccgcacucucc

SEQ ID NO: 224496 - RNA, 21 nt, Human
cugccagccuccgccccccgc

SEQ ID NO: 224497 - RNA, 19 nt, Human
gccaggaaacacagguucc

SEQ ID NO: 224498 - RNA, 20 nt, Human
gcccccggcggcggcggcgg

SEQ ID NO: 224499 - RNA, 21 nt, Human
gcgacagcaggggagugggcg

SEQ ID NO: 224500 - RNA, 18 nt, Human
gcggcgagggggagcgcg

SEQ ID NO: 224501 - RNA, 19 nt, Human
ggaaacacagguuccgcag

SEQ ID NO: 224502 - RNA, 21 nt, Human
ggcggcggcggcggcagcgcc

SEQ ID NO: 224503 - RNA, 23 nt, Human
gggagugggcggcgagggggagc

SEQ ID NO: 224504 - RNA, 19 nt, Human
gggccgaggccagcgacgc

SEQ ID NO: 224505 - RNA, 23 nt, Human
ggggagugggcggcgagggggag

SEQ ID NO: 224506 - RNA, 20 nt, Human
uagcauaaaucauaaugguu

SEQ ID NO: 224507 - RNA, 23 nt, Human
ucggcggcuggcgugcucccccc

SEQ ID NO: 224508 - RNA, 21 nt, Human
ucguggcccuguccaucuccu

SEQ ID NO: 224509 - RNA, 19 nt, Human
ugaguacagcuucuguacu

SEQ ID NO: 224510 - RNA, 19 nt, Human
ugccagccuccgccccccg

SEQ ID NO: 224511 - RNA, 22 nt, Human
ugccagccuccgccccccgcac

SEQ ID NO: 224512 - RNA, 19 nt, Human
ugcgccaggaaacacaggg

SEQ ID NO: 224513 - RNA, 19 nt, Human
ugcuacagcagauggaaua

SEQ ID NO: 224514 - RNA, 20 nt, Human
uggaauacaagcuuugaggu

SEQ ID NO: 224515 - RNA, 22 nt, Human
uggcgugcuccccccgcccccu

SEQ ID NO: 224516 - RNA, 23 nt, Human
uguuucuguugccacugagggau

SEQ ID NO: 224517 - RNA, 21 nt, Human
uuccaagucuuccaguugugc

SEQ ID NO: 224518 - RNA, 19 nt, Human
uugcuuucuacaagccucc

SEQ ID NO: 224519 - RNA, 18 nt, Human
accauaugauggcaaaaa

SEQ ID NO: 224520 - RNA, 23 nt, Human
agcagcagcagcagcaggacgag

SEQ ID NO: 224521 - RNA, 20 nt, Human
aggaggugcggguccggaag

SEQ ID NO: 224522 - RNA, 19 nt, Human
caccggaggaggcgcagcu

SEQ ID NO: 224523 - RNA, 20 nt, Human
cagaacccggauaacgcugg

SEQ ID NO: 224524 - RNA, 23 nt, Human
cagcagcaggacgagcccgacag

SEQ ID NO: 224525 - RNA, 18 nt, Human
cagcagggacagguuauc

SEQ ID NO: 224526 - RNA, 22 nt, Human
cagcagggacagguuaucuccc

SEQ ID NO: 224527 - RNA, 23 nt, Human
caggaggaacaaucuauauagca

SEQ ID NO: 224528 - RNA, 20 nt, Human
ccccgccgccggggcaccgg

SEQ ID NO: 224529 - RNA, 20 nt, Human
cccgcccccgccgccggggc

SEQ ID NO: 224530 - RNA, 23 nt, Human
cccgccgccggggcaccggagga

SEQ ID NO: 224531 - RNA, 23 nt, Human
cccgccgccggggcaccggagga

SEQ ID NO: 224532 - RNA, 19 nt, Human
ccggcgcgacgagcagcag

SEQ ID NO: 224533 - RNA, 20 nt, Human
cgccgccgggcgaggaggug

SEQ ID NO: 224534 - RNA, 21 nt, Human
cgccuggggcugguggugcug

SEQ ID NO: 224535 - RNA, 24 nt, Human
cgccuggggcugguggugcuggug

SEQ ID NO: 224536 - RNA, 20 nt, Human
cgcggagcccagacugccga

SEQ ID NO: 224537 - RNA, 18 nt, Human
cggaggaggcgcagcugu

SEQ ID NO: 224538 - RNA, 24 nt, Human
cggaggcaugggcugcugccgccg

SEQ ID NO: 224539 - RNA, 19 nt, Human
cgggugguggugguggugc

SEQ ID NO: 224540 - RNA, 29 nt, Human
cuauauagcaauaauaggugcauucccuu

SEQ ID NO: 224541 - RNA, 23 nt, Human
cugcaggcuguggcacugguggu

SEQ ID NO: 224542 - RNA, 18 nt, Human
cuggggcugguggugcug

SEQ ID NO: 224543 - RNA, 22 nt, Human
cuggggcugguggugcuggugg

SEQ ID NO: 224544 - RNA, 21 nt, Human
gcagcagcaggacgagcccga

SEQ ID NO: 224545 - RNA, 21 nt, Human
gcgagagcgggggcgcggagg

SEQ ID NO: 224546 - RNA, 27 nt, Human
gcgccuggggcuggugguggcgucgcg

SEQ ID NO: 224547 - RNA, 18 nt, Human
gcugcccguggggcuggc

SEQ ID NO: 224548 - RNA, 22 nt, Human
ggacagguuaucucccgccccc

SEQ ID NO: 224549 - RNA, 20 nt, Human
ggcuggcggcgggcugcagg

SEQ ID NO: 224550 - RNA, 22 nt, Human
gggcuuuacaauaaaagcuaaa

SEQ ID NO: 224551 - RNA, 19 nt, Human
ggggcuggcggcgggcugc

SEQ ID NO: 224552 - RNA, 20 nt, Human
ggugcggguccggaaggcgc

SEQ ID NO: 224553 - RNA, 22 nt, Human
gugguggugcgagagcgggggc

SEQ ID NO: 224554 - RNA, 23 nt, Human
uacaauaaaagcuaaaauauuga

SEQ ID NO: 224555 - RNA, 21 nt, Human
uacaggaggaacaaucuauau

SEQ ID NO: 224556 - RNA, 22 nt, Human
ucacauugagcuggcugccccg

SEQ ID NO: 224557 - RNA, 21 nt, Human
ucacucauuuuggccuaaaac

SEQ ID NO: 224558 - RNA, 27 nt, Human
ucccgcccccgccgccggggcaccgga

SEQ ID NO: 224559 - RNA, 25 nt, Human
ucucccgcccccgccgccggggcac

SEQ ID NO: 224560 - RNA, 24 nt, Human
ugccccggcgcgacgagcagcagc

SEQ ID NO: 224561 - RNA, 18 nt, Human
uggcauggcuggacggcg

SEQ ID NO: 224562 - RNA, 19 nt, Human
uggccuaaaacuuaguguu

SEQ ID NO: 224563 - RNA, 21 nt, Human
ugugcaucugaaagaaaaaaa

SEQ ID NO: 224564 - RNA, 23 nt, Human
aacccucccucccagcggacccc

SEQ ID NO: 224565 - RNA, 24 nt, Human
aacucugcagcaagggcccugcca

SEQ ID NO: 224566 - RNA, 19 nt, Human
aagaagagggggugaaaga

SEQ ID NO: 224567 - RNA, 19 nt, Human
aagcacgcugaaugaacau

SEQ ID NO: 224568 - RNA, 18 nt, Human
aagcgaccaggagagagu

SEQ ID NO: 224569 - RNA, 22 nt, Human
acaagcccccaccccaaagcca

SEQ ID NO: 224570 - RNA, 28 nt, Human
acacaacccucccucccagcggaccccu

SEQ ID NO: 224571 - RNA, 20 nt, Human
acccagaggcuuccguagac

SEQ ID NO: 224572 - RNA, 21 nt, Human
acccucccucccagcggaccc

SEQ ID NO: 224573 - RNA, 18 nt, Human
acccucgcuccaaagaug

SEQ ID NO: 224574 - RNA, 18 nt, Human
agaaagaagaggggguga

SEQ ID NO: 224575 - RNA, 26 nt, Human
agacaaaaggaaaggagaggggaccc

SEQ ID NO: 224576 - RNA, 18 nt, Human
agcaggaggggagcuugg

SEQ ID NO: 224577 - RNA, 24 nt, Human
aggaggggagcuuggagaaagaag

SEQ ID NO: 224578 - RNA, 18 nt, Human
aggcuuccguagacaaaa

SEQ ID NO: 224579 - RNA, 20 nt, Human
agggagggagagcaggaggg

SEQ ID NO: 224580 - RNA, 24 nt, Human
agggagggagagcaggaggggagc

SEQ ID NO: 224581 - RNA, 19 nt, Human
aucuccucuucccgcuccc

SEQ ID NO: 224582 - RNA, 24 nt, Human
caagcccccaccccaaagccaccc

SEQ ID NO: 224583 - RNA, 18 nt, Human
caagggcccugccagagg

SEQ ID NO: 224584 - RNA, 19 nt, Human
caagggcccugccagaggc

SEQ ID NO: 224585 - RNA, 22 nt, Human
caaguugugggcagcucucuuu

SEQ ID NO: 224586 - RNA, 23 nt, Human
cacaagcccccaccccaaagcca

SEQ ID NO: 224587 - RNA, 25 nt, Human
caccccaaagccacccucgcuccaa

SEQ ID NO: 224588 - RNA, 29 nt, Human
cacccucgcuccaaagauguccucaaaga

SEQ ID NO: 224589 - RNA, 27 nt, Human
cagcggaccccucuucuggacugguuu

SEQ ID NO: 224590 - RNA, 18 nt, Human
caguaucuuggcuccagu

SEQ ID NO: 224591 - RNA, 18 nt, Human
cauccaaucucccccacc

SEQ ID NO: 224592 - RNA, 20 nt, Human
cauccaaucucccccaccag

SEQ ID NO: 224593 - RNA, 22 nt, Human
caucccccaagccugacacaac

SEQ ID NO: 224594 - RNA, 25 nt, Human
caucccccaagccugacacaacccu

SEQ ID NO: 224595 - RNA, 18 nt, Human
caucugacccccaccccc

SEQ ID NO: 224596 - RNA, 21 nt, Human
ccaccccaaagccacccucgc

SEQ ID NO: 224597 - RNA, 20 nt, Human
ccagaggcuuccguagacaa

SEQ ID NO: 224598 - RNA, 23 nt, Human
ccagcggaccccucuucuggacu

SEQ ID NO: 224599 - RNA, 21 nt, Human
ccaucccccaagccugacaca

SEQ ID NO: 224600 - RNA, 23 nt, Human
ccauggcgaagagcccauccccc

SEQ ID NO: 224601 - RNA, 19 nt, Human
cccaaagccacccucgcuc

SEQ ID NO: 224602 - RNA, 21 nt, Human
cccaccccccgcgugaagacc

SEQ ID NO: 224603 - RNA, 26 nt, Human
cccaccccccgcgugaagaccugaga

SEQ ID NO: 224604 - RNA, 18 nt, Human
cccagcggaccccucuuc

SEQ ID NO: 224605 - RNA, 21 nt, Human
ccccaaagccacccucgcucc

SEQ ID NO: 224606 - RNA, 21 nt, Human
ccccaccccaaagccacccuc

SEQ ID NO: 224607 - RNA, 23 nt, Human
ccuaaacagagauuagauuucug

SEQ ID NO: 224608 - RNA, 20 nt, Human
ccucccagcggaccccucuu

SEQ ID NO: 224609 - RNA, 21 nt, Human
ccucgcuccaaagauguccuc

SEQ ID NO: 224610 - RNA, 25 nt, Human
cgaagagcccaucccccaagccuga

SEQ ID NO: 224611 - RNA, 19 nt, Human
cuccaguccucucuuuggc

SEQ ID NO: 224612 - RNA, 18 nt, Human
cuccucuucccgcuccca

SEQ ID NO: 224613 - RNA, 19 nt, Human
cuggucugaauguuucuug

SEQ ID NO: 224614 - RNA, 23 nt, Human
gagaaagaagagggggugaaaga

SEQ ID NO: 224615 - RNA, 24 nt, Human
gagcuuggagaaagaagagggggu

SEQ ID NO: 224616 - RNA, 23 nt, Human
gauggcaaagcgaccaggagaga

SEQ ID NO: 224617 - RNA, 24 nt, Human
gcuugcuucgguucucuggggcug

SEQ ID NO: 224618 - RNA, 21 nt, Human
ggagcuuggagaaagaagagg

SEQ ID NO: 224619 - RNA, 20 nt, Human
ggcagcucucuuuuacuuuu

SEQ ID NO: 224620 - RNA, 22 nt, Human
ggcauccaaucucccccaccag

SEQ ID NO: 224621 - RNA, 19 nt, Human
ucacccagaggcuuccgua

SEQ ID NO: 224622 - RNA, 19 nt, Human
ucccccaagccugacacaa

SEQ ID NO: 224623 - RNA, 19 nt, Human
ucccccaccaguaucuugg

SEQ ID NO: 224624 - RNA, 19 nt, Human
ucccucccagcggaccccu

SEQ ID NO: 224625 - RNA, 24 nt, Human
ucccugcagcacaagcccccaccc

SEQ ID NO: 224626 - RNA, 21 nt, Human
ucucuggggcugccuggaguc

SEQ ID NO: 224627 - RNA, 23 nt, Human
ucuucccgcucccaaguagaggc

SEQ ID NO: 224628 - RNA, 25 nt, Human
ugaaagaacucucucaggagguggu

SEQ ID NO: 224629 - RNA, 23 nt, Human
ugaagaccugagauugagcgugg

SEQ ID NO: 224630 - RNA, 19 nt, Human
ugacacaacccucccuccc

SEQ ID NO: 224631 - RNA, 22 nt, Human
ugcuucgguucucuggggcugc

SEQ ID NO: 224632 - RNA, 18 nt, Human
uggcaaagcgaccaggag

SEQ ID NO: 224633 - RNA, 21 nt, Human
uggcaaguugugggcagcucu

SEQ ID NO: 224634 - RNA, 22 nt, Human
ugguuucgcuguuggcuacuuc

SEQ ID NO: 224635 - RNA, 21 nt, Human
uguauugggcagggagggaga

SEQ ID NO: 224636 - RNA, 21 nt, Human
uuaauuagcucggucucucuu

SEQ ID NO: 224637 - RNA, 24 nt, Human
uucagugcaucugacccccacccc

SEQ ID NO: 224638 - RNA, 22 nt, Human
uucccugcagcacaagccccca

SEQ ID NO: 224639 - RNA, 24 nt, Human
uucccuggucugaauguuucuuga

SEQ ID NO: 224640 - RNA, 20 nt, Human
uucgaguauaucuguuuugg

SEQ ID NO: 224641 - RNA, 19 nt, Human
uugcuucgguucucugggg

SEQ ID NO: 224642 - RNA, 21 nt, Human
aagccaacccacuccaagccg

SEQ ID NO: 224643 - RNA, 18 nt, Human
acacacagacacacgaug

SEQ ID NO: 224644 - RNA, 22 nt, Human
acacaccucuacucaccacacc

SEQ ID NO: 224645 - RNA, 22 nt, Human
accaggugcucucugcagcucu

SEQ ID NO: 224646 - RNA, 23 nt, Human
acccacuuuagccagcguccccu

SEQ ID NO: 224647 - RNA, 19 nt, Human
acucaccacacccagacac

SEQ ID NO: 224648 - RNA, 21 nt, Human
acugaagccucccagaauccu

SEQ ID NO: 224649 - RNA, 19 nt, Human
agaauaaggaggggcuagg

SEQ ID NO: 224650 - RNA, 22 nt, Human
agaauaaggaggggcuagggug

SEQ ID NO: 224651 - RNA, 23 nt, Human
agauaagagcagaggcuggugag

SEQ ID NO: 224652 - RNA, 22 nt, Human
agccccgccccagccucauacc

SEQ ID NO: 224653 - RNA, 18 nt, Human
aggcagggcggggagggg

SEQ ID NO: 224654 - RNA, 23 nt, Human
aggcuggugaguuacacuucuuc

SEQ ID NO: 224655 - RNA, 22 nt, Human
aggggcaggggaggccccaggg

SEQ ID NO: 224656 - RNA, 22 nt, Human
agggggaggcuccccagcuccc

SEQ ID NO: 224657 - RNA, 18 nt, Human
caacccacuccaagccag

SEQ ID NO: 224658 - RNA, 21 nt, Human
caccuccagccccgccccagc

SEQ ID NO: 224659 - RNA, 23 nt, Human
caccuccagccccgccccagccu

SEQ ID NO: 224660 - RNA, 22 nt, Human
cacgcacagggcagccacugug

SEQ ID NO: 224661 - RNA, 19 nt, Human
cacuucuuccuccccacca

SEQ ID NO: 224662 - RNA, 22 nt, Human
cagaauccuggauccgggcccc

SEQ ID NO: 224663 - RNA, 18 nt, Human
cagcaagccaacccacuc

SEQ ID NO: 224664 - RNA, 20 nt, Human
cagcaagccaacccacuccu

SEQ ID NO: 224665 - RNA, 23 nt, Human
cagggacccaggaguccugccuc

SEQ ID NO: 224666 - RNA, 19 nt, Human
cagggcggggaggggcagg

SEQ ID NO: 224667 - RNA, 23 nt, Human
ccacguggauaaagacacacaca

SEQ ID NO: 224668 - RNA, 20 nt, Human
ccacuccaagccagggcccc

SEQ ID NO: 224669 - RNA, 22 nt, Human
ccagccccgccccagccucaua

SEQ ID NO: 224670 - RNA, 23 nt, Human
ccagccccgccccagccucauac

SEQ ID NO: 224671 - RNA, 18 nt, Human
ccaucagcaagccaaccc

SEQ ID NO: 224672 - RNA, 20 nt, Human
cccaccuggggccucaggug

SEQ ID NO: 224673 - RNA, 21 nt, Human
ccccagccucauacccaguuc

SEQ ID NO: 224674 - RNA, 21 nt, Human
cccccaccucgcagcacgcac

SEQ ID NO: 224675 - RNA, 20 nt, Human
cccccggggucuuggggcuc

SEQ ID NO: 224676 - RNA, 26 nt, Human
ccccgccccagccucauaccgguucc

SEQ ID NO: 224677 - RNA, 21 nt, Human
ccccuaguacccucuuuccca

SEQ ID NO: 224678 - RNA, 21 nt, Human
ccuaguacccucuuucccagg

SEQ ID NO: 224679 - RNA, 18 nt, Human
cgccccagccucauaccc

SEQ ID NO: 224680 - RNA, 23 nt, Human
cgccccagccucauacccaguuc

SEQ ID NO: 224681 - RNA, 23 nt, Human
cgccugcacuuguaacugagagc

SEQ ID NO: 224682 - RNA, 20 nt, Human
cuccagccccgccccagccu

SEQ ID NO: 224683 - RNA, 23 nt, Human
cucgcagcacgcacagggcagcc

SEQ ID NO: 224684 - RNA, 19 nt, Human
cuggaggucguccauagca

SEQ ID NO: 224685 - RNA, 23 nt, Human
cuugcacuugaggugcuuuguuc

SEQ ID NO: 224686 - RNA, 20 nt, Human
gagcagaggcuggugaguua

SEQ ID NO: 224687 - RNA, 21 nt, Human
gaggggcaggggaggccccag

SEQ ID NO: 224688 - RNA, 22 nt, Human
gaguguuuuugaugaggguaug

SEQ ID NO: 224689 - RNA, 20 nt, Human
ggaggcuccccagcuccccc

SEQ ID NO: 224690 - RNA, 20 nt, Human
ggcagagcaagaaagagacg

SEQ ID NO: 224691 - RNA, 18 nt, Human
ggcaggggaggccccagg

SEQ ID NO: 224692 - RNA, 19 nt, Human
ggcaggggaggccccaggg

SEQ ID NO: 224693 - RNA, 20 nt, Human
ggccagcgguaacugaagcc

SEQ ID NO: 224694 - RNA, 20 nt, Human
gggcaggggaggccccaggg

SEQ ID NO: 224695 - RNA, 21 nt, Human
gggcaggggaggccccagggu

SEQ ID NO: 224696 - RNA, 26 nt, Human
gggccccuaguacccucuuucccagg

SEQ ID NO: 224697 - RNA, 24 nt, Human
gggcggggaggggcaggggaggcc

SEQ ID NO: 224698 - RNA, 20 nt, Human
ggggcaggggaggccccagg

SEQ ID NO: 224699 - RNA, 22 nt, Human
ggggcucagccagcuuccugcc

SEQ ID NO: 224700 - RNA, 18 nt, Human
ggucuguacuuugugaca

SEQ ID NO: 224701 - RNA, 19 nt, Human
ggugcuuuguucagggcug

SEQ ID NO: 224702 - RNA, 19 nt, Human
gugggggugaccauguucc

SEQ ID NO: 224703 - RNA, 22 nt, Human
guuacacuucuuccuccccacc

SEQ ID NO: 224704 - RNA, 21 nt, Human
guucagggcugggucaggagu

SEQ ID NO: 224705 - RNA, 22 nt, Human
uaaggaggggcuaggguguguc

SEQ ID NO: 224706 - RNA, 19 nt, Human
uacccucuuucccagggac

SEQ ID NO: 224707 - RNA, 21 nt, Human
uacucaccacacccagacacc

SEQ ID NO: 224708 - RNA, 18 nt, Human
uacuuugugacacacacc

SEQ ID NO: 224709 - RNA, 23 nt, Human
uagccagcguccccuccagcagc

SEQ ID NO: 224710 - RNA, 22 nt, Human
ucaccacacccagacaccgaag

SEQ ID NO: 224711 - RNA, 26 nt, Human
ucggccagcgguaacugaagccuccc

SEQ ID NO: 224712 - RNA, 19 nt, Human
ucgucagccugcucugcug

SEQ ID NO: 224713 - RNA, 21 nt, Human
ucuacucaccacacccagaca

SEQ ID NO: 224714 - RNA, 19 nt, Human
ugagaauaaggaggggcua

SEQ ID NO: 224715 - RNA, 27 nt, Human
ugagaguguuuuugaugaggguaugca

SEQ ID NO: 224716 - RNA, 24 nt, Human
ugaggugcuuuguucagggcuggg

SEQ ID NO: 224717 - RNA, 27 nt, Human
ugcaggucgucagccugcucugcuggc

SEQ ID NO: 224718 - RNA, 25 nt, Human
ugcccagggucccccaccucgcagc

SEQ ID NO: 224719 - RNA, 21 nt, Human
uggcagagacgauguccacca

SEQ ID NO: 224720 - RNA, 19 nt, Human
uggggaguggugacggcca

SEQ ID NO: 224721 - RNA, 19 nt, Human
uuacacuucuuccucccca

SEQ ID NO: 224722 - RNA, 23 nt, Human
uucccaccuggggccucagguga

SEQ ID NO: 224723 - RNA, 22 nt, Human
uugcacuugaggugcuuuguuc

SEQ ID NO: 224724 - RNA, 28 nt, Human
uugcaggucgucagccugcucugcuggc

SEQ ID NO: 224725 - RNA, 21 nt, Human
uuucccagggacccaggaguc

SEQ ID NO: 224726 - RNA, 23 nt, Human
aaacacagauccaaaucaccaca

SEQ ID NO: 224727 - RNA, 19 nt, Human
aaggaaccccuguccugug

SEQ ID NO: 224728 - RNA, 18 nt, Human
acagauccaaaucaccac

SEQ ID NO: 224729 - RNA, 22 nt, Human
agcugggggcucaggagcaguc

SEQ ID NO: 224730 - RNA, 18 nt, Human
aggaagagcuggcagucu

SEQ ID NO: 224731 - RNA, 21 nt, Human
aggcagggcuccucuccagcu

SEQ ID NO: 224732 - RNA, 19 nt, Human
agggguuggaggcgggagc

SEQ ID NO: 224733 - RNA, 18 nt, Human
augggucagcauuuccug

SEQ ID NO: 224734 - RNA, 21 nt, Human
auugccgguggcccuguaguc

SEQ ID NO: 224735 - RNA, 23 nt, Human
caagcagggugggccugcacuca

SEQ ID NO: 224736 - RNA, 25 nt, Human
cacacugugaaacucauuaaaacac

SEQ ID NO: 224737 - RNA, 22 nt, Human
cacagauccaaaucaccacaaa

SEQ ID NO: 224738 - RNA, 20 nt, Human
caccaugugggggccagggc

SEQ ID NO: 224739 - RNA, 20 nt, Human
caggaagagguggccuugcu

SEQ ID NO: 224740 - RNA, 21 nt, Human
caggcccuccaaaugggcucc

SEQ ID NO: 224741 - RNA, 20 nt, Human
cagugaugucaacaucacca

SEQ ID NO: 224742 - RNA, 19 nt, Human
ccaagcagggugggccugc

SEQ ID NO: 224743 - RNA, 21 nt, Human
ccagaaggaaccccuguccug

SEQ ID NO: 224744 - RNA, 19 nt, Human
ccagacacacacaugugca

SEQ ID NO: 224745 - RNA, 26 nt, Human
ccagacacacacaugugcaggcgcaa

SEQ ID NO: 224746 - RNA, 22 nt, Human
ccaggcccaggcccuccaaaug

SEQ ID NO: 224747 - RNA, 18 nt, Human
ccaggcccggcaccagug

SEQ ID NO: 224748 - RNA, 23 nt, Human
ccagguggggccacucuuggccu

SEQ ID NO: 224749 - RNA, 18 nt, Human
ccccagccccauccccuc

SEQ ID NO: 224750 - RNA, 21 nt, Human
cccccacaccggccaggaaga

SEQ ID NO: 224751 - RNA, 25 nt, Human
cccggcaccagugccauccuacacu

SEQ ID NO: 224752 - RNA, 18 nt, Human
cccuccaaaugggcuccu

SEQ ID NO: 224753 - RNA, 22 nt, Human
cccuccugcuggaagcuggggg

SEQ ID NO: 224754 - RNA, 21 nt, Human
ccuacacuccagacacacaca

SEQ ID NO: 224755 - RNA, 27 nt, Human
ccuacacuccagacacacacaugugca

SEQ ID NO: 224756 - RNA, 23 nt, Human
ccucaggaagcccccugggccaa

SEQ ID NO: 224757 - RNA, 22 nt, Human
ccuccugcuggaagcugggggc

SEQ ID NO: 224758 - RNA, 18 nt, Human
ccuggauuugaggcuggg

SEQ ID NO: 224759 - RNA, 24 nt, Human
ccuggccauacaugggccaggccc

SEQ ID NO: 224760 - RNA, 18 nt, Human
cggcucagcagcuggcaa

SEQ ID NO: 224761 - RNA, 23 nt, Human
cgucuacaacuuccagccggugg

SEQ ID NO: 224762 - RNA, 27 nt, Human
cuccccucaggaagcccccugggccaa

SEQ ID NO: 224763 - RNA, 25 nt, Human
cuccugcuggaagcugggggcucag

SEQ ID NO: 224764 - RNA, 21 nt, Human
cuuccuggccauacaugggcc

SEQ ID NO: 224765 - RNA, 19 nt, Human
cuuggccuccccucucacu

SEQ ID NO: 224766 - RNA, 19 nt, Human
gauguaaugcccagaagga

SEQ ID NO: 224767 - RNA, 23 nt, Human
gcaccagugccauccuacacucc

SEQ ID NO: 224768 - RNA, 22 nt, Human
gccugugccuggcaggguccug

SEQ ID NO: 224769 - RNA, 22 nt, Human
gggaaauggugagacugucccu

SEQ ID NO: 224770 - RNA, 20 nt, Human
gggguugcucugucuccccu

SEQ ID NO: 224771 - RNA, 26 nt, Human
uaaaacacagauccaaaucaccacaa

SEQ ID NO: 224772 - RNA, 21 nt, Human
uaggaaaagcuugcacaauua

SEQ ID NO: 224773 - RNA, 22 nt, Human
uaggaaaagcuugcacaauuaa

SEQ ID NO: 224774 - RNA, 19 nt, Human
uaggaagagcuggcagucu

SEQ ID NO: 224775 - RNA, 18 nt, Human
uaggagguggccuccuuc

SEQ ID NO: 224776 - RNA, 21 nt, Human
uccacagucuccugcccaugg

SEQ ID NO: 224777 - RNA, 19 nt, Human
ucccccagccccauccccu

SEQ ID NO: 224778 - RNA, 21 nt, Human
ucccgggccucucacagcccc

SEQ ID NO: 224779 - RNA, 18 nt, Human
uccugcccugccugugcc

SEQ ID NO: 224780 - RNA, 21 nt, Human
uccugcuggaagcugggggcu

SEQ ID NO: 224781 - RNA, 24 nt, Human
ucuaugcgauguaaugcccagaag

SEQ ID NO: 224782 - RNA, 21 nt, Human
ucuccacagucuccugcccau

SEQ ID NO: 224783 - RNA, 22 nt, Human
ugagagugagggagccaggccc

SEQ ID NO: 224784 - RNA, 19 nt, Human
ugaggcugggguccagggg

SEQ ID NO: 224785 - RNA, 20 nt, Human
ugaggcugggguccaggggu

SEQ ID NO: 224786 - RNA, 21 nt, Human
ugaggcugggguccagggguu

SEQ ID NO: 224787 - RNA, 24 nt, Human
ugagggagccaggcccaggcccuc

SEQ ID NO: 224788 - RNA, 21 nt, Human
ugccacugggucccaaccacc

SEQ ID NO: 224789 - RNA, 24 nt, Human
ugccauccuacacuccagacacac

SEQ ID NO: 224790 - RNA, 20 nt, Human
ugcccagaaggaaccccugu

SEQ ID NO: 224791 - RNA, 22 nt, Human
ugcccugccacugggucccaac

SEQ ID NO: 224792 - RNA, 19 nt, Human
ugccugugccuggcagggu

SEQ ID NO: 224793 - RNA, 19 nt, Human
ugcuggaagcugggggcuc

SEQ ID NO: 224794 - RNA, 18 nt, Human
uggcugcugggacugggc

SEQ ID NO: 224795 - RNA, 22 nt, Human
uggcuggcugcugggacugggc

SEQ ID NO: 224796 - RNA, 23 nt, Human
ugggccugcacucagccugugcu

SEQ ID NO: 224797 - RNA, 20 nt, Human
ugggggccagggcgcuuggg

SEQ ID NO: 224798 - RNA, 23 nt, Human
ugugcaggcgcaaagacagugcc

SEQ ID NO: 224799 - RNA, 20 nt, Human
ugugggggccagggcgcuug

SEQ ID NO: 224800 - RNA, 22 nt, Human
ugugggggccagggcgcuuggg

SEQ ID NO: 224801 - RNA, 19 nt, Human
uuccagccggugggacgcu

SEQ ID NO: 224802 - RNA, 18 nt, Human
uucccgggccucucacag

SEQ ID NO: 224803 - RNA, 18 nt, Human
aaagggccccagaggguu

SEQ ID NO: 224804 - RNA, 19 nt, Human
aaaggucacugccaggagc

SEQ ID NO: 224805 - RNA, 19 nt, Human
aaaggucacugccaggagc

SEQ ID NO: 224806 - RNA, 20 nt, Human
aaccucggaggcaccgugcu

SEQ ID NO: 224807 - RNA, 19 nt, Human
acagcggccggccacaccc

SEQ ID NO: 224808 - RNA, 22 nt, Human
accccaccgggacccaaggccg

SEQ ID NO: 224809 - RNA, 21 nt, Human
accccgucaucacucccgccc

SEQ ID NO: 224810 - RNA, 25 nt, Human
accucggaggcaccgugcugaggag

SEQ ID NO: 224811 - RNA, 23 nt, Human
agaguggacagggcagccuugcu

SEQ ID NO: 224812 - RNA, 24 nt, Human
agcccaggccccccggccgggagc

SEQ ID NO: 224813 - RNA, 23 nt, Human
aggccgcagguccucaccaaaca

SEQ ID NO: 224814 - RNA, 24 nt, Human
agggccccagaggguucccgccuc

SEQ ID NO: 224815 - RNA, 18 nt, Human
caaaaccucggaggcacc

SEQ ID NO: 224816 - RNA, 22 nt, Human
cacaugggccccuccagggccc

SEQ ID NO: 224817 - RNA, 18 nt, Human
caccccgucaucacuccc

SEQ ID NO: 224818 - RNA, 21 nt, Human
cacccuucccgccacacucag

SEQ ID NO: 224819 - RNA, 18 nt, Human
caccgugcugaggagggc

SEQ ID NO: 224820 - RNA, 23 nt, Human
cagaggguucccgccucaaaacc

SEQ ID NO: 224821 - RNA, 18 nt, Human
cagccuugcuccugcacg

SEQ ID NO: 224822 - RNA, 21 nt, Human
caggagcccccauccuucagc

SEQ ID NO: 224823 - RNA, 19 nt, Human
caguuacuguaagaaaagg

SEQ ID NO: 224824 - RNA, 19 nt, Human
ccacgcuggcaacaccccg

SEQ ID NO: 224825 - RNA, 26 nt, Human
ccagaggguucccgccucaaaaccuc

SEQ ID NO: 224826 - RNA, 22 nt, Human
cccacaugggccccuccagggc

SEQ ID NO: 224827 - RNA, 19 nt, Human
cccagcccaggccccccgg

SEQ ID NO: 224828 - RNA, 21 nt, Human
cccaggccccccggccgggag

SEQ ID NO: 224829 - RNA, 20 nt, Human
cccauccuucagcccacaug

SEQ ID NO: 224830 - RNA, 18 nt, Human
ccccagcccaggcccccc

SEQ ID NO: 224831 - RNA, 20 nt, Human
ccccauccuucagcccacau

SEQ ID NO: 224832 - RNA, 20 nt, Human
cccccauccuucagcccaca

SEQ ID NO: 224833 - RNA, 21 nt, Human
ccccgucaucacucccgcccc

SEQ ID NO: 224834 - RNA, 21 nt, Human
ccccuccagggcccacccuuc

SEQ ID NO: 224835 - RNA, 24 nt, Human
ccgcgcgcggagacgcugcggcca

SEQ ID NO: 224836 - RNA, 18 nt, Human
ccgggacccaaggccgca

SEQ ID NO: 224837 - RNA, 24 nt, Human
ccuccagggcccacccuucccgcc

SEQ ID NO: 224838 - RNA, 21 nt, Human
ccugcacgcugcuccuggagc

SEQ ID NO: 224839 - RNA, 22 nt, Human
ccugcccuuugugccuccccug

SEQ ID NO: 224840 - RNA, 19 nt, Human
ccuggagccacagggcccu

SEQ ID NO: 224841 - RNA, 22 nt, Human
ccuggagccacagggcccugcc

SEQ ID NO: 224842 - RNA, 21 nt, Human
ccuucagcccacaugggcccc

SEQ ID NO: 224843 - RNA, 21 nt, Human
cgccuguagcugcccggaaac

SEQ ID NO: 224844 - RNA, 18 nt, Human
cgcgggccccagcccagg

SEQ ID NO: 224845 - RNA, 19 nt, Human
cugccgggcuugggccgcg

SEQ ID NO: 224846 - RNA, 21 nt, Human
gagccacagggcccugcccag

SEQ ID NO: 224847 - RNA, 21 nt, Human
gcccacaugggccccuccagg

SEQ ID NO: 224848 - RNA, 20 nt, Human
gcccugcccagcccuccagc

SEQ ID NO: 224849 - RNA, 21 nt, Human
gggccccuccagggcccaccc

SEQ ID NO: 224850 - RNA, 21 nt, Human
gggcggagcgcggggggcggc

SEQ ID NO: 224851 - RNA, 19 nt, Human
gggcggcgcgggccccagc

SEQ ID NO: 224852 - RNA, 19 nt, Human
ggggcggagcgcggggggc

SEQ ID NO: 224853 - RNA, 23 nt, Human
ggggcggagcgcggggggcggcg

SEQ ID NO: 224854 - RNA, 20 nt, Human
ggguucccgccucaaaaccu

SEQ ID NO: 224855 - RNA, 20 nt, Human
guccucagggaacaggccug

SEQ ID NO: 224856 - RNA, 23 nt, Human
gugcugaggagggccgcgggcgg

SEQ ID NO: 224857 - RNA, 20 nt, Human
uaagaaaagggccccagagg

SEQ ID NO: 224858 - RNA, 23 nt, Human
uacuguaagaaaagggccccaga

SEQ ID NO: 224859 - RNA, 18 nt, Human
ucaccaaacaggcccgcc

SEQ ID NO: 224860 - RNA, 19 nt, Human
ucagcccacaugggccccu

SEQ ID NO: 224861 - RNA, 18 nt, Human
uccucaccaaacaggccc

SEQ ID NO: 224862 - RNA, 24 nt, Human
uccugcacgcugcuccuggagcca

SEQ ID NO: 224863 - RNA, 26 nt, Human
uccugcacgcugcuccuggagccaca

SEQ ID NO: 224864 - RNA, 20 nt, Human
ugagcagaguggacagggca

SEQ ID NO: 224865 - RNA, 21 nt, Human
ugccaggagcccccauccuuc

SEQ ID NO: 224866 - RNA, 19 nt, Human
ugcccggaaaccccaccgg

SEQ ID NO: 224867 - RNA, 21 nt, Human
ugcccggaaaccccaccggga

SEQ ID NO: 224868 - RNA, 22 nt, Human
uggaaaauaacuuuuguaaaag

SEQ ID NO: 224869 - RNA, 21 nt, Human
ugugccuccccugggcucggc

SEQ ID NO: 224870 - RNA, 24 nt, Human
uucccgccucaaaaccucggaggc

SEQ ID NO: 224871 - RNA, 20 nt, Human
uugcuccugcacgcugcucc

SEQ ID NO: 224872 - RNA, 19 nt, Human
aggcaaaggcgggcccccu

SEQ ID NO: 224873 - RNA, 23 nt, Human
aggcaaaggcgggcccccugggg

SEQ ID NO: 224874 - RNA, 18 nt, Human
aggcagggggucaggggg

SEQ ID NO: 224875 - RNA, 19 nt, Human
aggccaggcagggggucag

SEQ ID NO: 224876 - RNA, 22 nt, Human
agggggucagggggucacaucc

SEQ ID NO: 224877 - RNA, 19 nt, Human
auccgcgcgccccucccca

SEQ ID NO: 224878 - RNA, 23 nt, Human
cacccacccccaaaagcaggcaa

SEQ ID NO: 224879 - RNA, 23 nt, Human
cacccccaaaagcaggcaaaggc

SEQ ID NO: 224880 - RNA, 22 nt, Human
ccccacccacccccaaaagcag

SEQ ID NO: 224881 - RNA, 24 nt, Human
cccccaaaagcaggcaaaggcggg

SEQ ID NO: 224882 - RNA, 18 nt, Human
cccgccggccgcuucgcc

SEQ ID NO: 224883 - RNA, 22 nt, Human
cccuccccacccacccccaaaa

SEQ ID NO: 224884 - RNA, 23 nt, Human
cccuccccacccacccccaaaag

SEQ ID NO: 224885 - RNA, 23 nt, Human
ccuccccacccacccccaaaagc

SEQ ID NO: 224886 - RNA, 19 nt, Human
ccuggggggcaggggaggc

SEQ ID NO: 224887 - RNA, 21 nt, Human
ccuucuccgcugcugcucuua

SEQ ID NO: 224888 - RNA, 20 nt, Human
cgccccuccccacccacccc

SEQ ID NO: 224889 - RNA, 20 nt, Human
cgccuucuccgcugcugcuc

SEQ ID NO: 224890 - RNA, 23 nt, Human
cgcgccccuccccacccaccccc

SEQ ID NO: 224891 - RNA, 18 nt, Human
cggcggcugcaagcccgg

SEQ ID NO: 224892 - RNA, 24 nt, Human
cugccucgcccccgccggccgcuu

SEQ ID NO: 224893 - RNA, 20 nt, Human
cugcugcucugggaagaagg

SEQ ID NO: 224894 - RNA, 21 nt, Human
gaggcggcggcggcggcugca

SEQ ID NO: 224895 - RNA, 19 nt, Human
gauccgcgcgccccucccc

SEQ ID NO: 224896 - RNA, 21 nt, Human
gcaggggaggccaggcagggg

SEQ ID NO: 224897 - RNA, 23 nt, Human
gccaggcagggggucaggggguc

SEQ ID NO: 224898 - RNA, 19 nt, Human
gccccuccccacccacccc

SEQ ID NO: 224899 - RNA, 20 nt, Human
gccucgcccccgccggccgc

SEQ ID NO: 224900 - RNA, 22 nt, Human
gcggcggcggcggcugcaagcc

SEQ ID NO: 224901 - RNA, 19 nt, Human
gcgggcccccuggggggca

SEQ ID NO: 224902 - RNA, 19 nt, Human
gcucggggugcgugaacga

SEQ ID NO: 224903 - RNA, 18 nt, Human
gugaacgaggcggcggcg

SEQ ID NO: 224904 - RNA, 22 nt, Human
uaagaguaagugaacuauacaa

SEQ ID NO: 224905 - RNA, 21 nt, Human
uacaaggaggggucagccagu

SEQ ID NO: 224906 - RNA, 28 nt, Human
uccgcgcgccccuccccacccaccccca

SEQ ID NO: 224907 - RNA, 26 nt, Human
ucgcccccgccggccgcuucgccuuc

SEQ ID NO: 224908 - RNA, 22 nt, Human
ucuacauuacaaggagggguca

SEQ ID NO: 224909 - RNA, 20 nt, Human
ugauccgcgcgccccucccc

SEQ ID NO: 224910 - RNA, 19 nt, Human
ugcucugggaagaaggggc

SEQ ID NO: 224911 - RNA, 24 nt, Human
cagagggcagucggagcgccaggg

SEQ ID NO: 224912 - RNA, 20 nt, Human
cccgggcacgguccggggcg

SEQ ID NO: 224913 - RNA, 21 nt, Human
cgggcugggggcgccggggcc

SEQ ID NO: 224914 - RNA, 24 nt, Human
ggcgggggcgcgcucggggcgcuc

SEQ ID NO: 224915 - RNA, 21 nt, Human
uaccacgcccacucaggcagc

SEQ ID NO: 224916 - RNA, 24 nt, Human
ucaauacugcguguggucucucuc

SEQ ID NO: 224917 - RNA, 24 nt, Human
aaaaacgauucuaaaaacuguaaa

SEQ ID NO: 224918 - RNA, 22 nt, Human
aaacacaaaccuauaaccaaua

SEQ ID NO: 224919 - RNA, 19 nt, Human
aaacacacaagaaauacca

SEQ ID NO: 224920 - RNA, 21 nt, Human
aaacaggagcacgacaacuca

SEQ ID NO: 224921 - RNA, 22 nt, Human
aaaugcugggagugacacuucu

SEQ ID NO: 224922 - RNA, 21 nt, Human
aacacacagccuguacagauc

SEQ ID NO: 224923 - RNA, 20 nt, Human
aacccaacaacguucaccuc

SEQ ID NO: 224924 - RNA, 20 nt, Human
aaccucagaaacaggagcac

SEQ ID NO: 224925 - RNA, 22 nt, Human
aagaugauuggugcacccaugc

SEQ ID NO: 224926 - RNA, 24 nt, Human
aagucaaguuuuccagcuuucaca

SEQ ID NO: 224927 - RNA, 18 nt, Human
aauggaaagauuugaacu

SEQ ID NO: 224928 - RNA, 21 nt, Human
acaagaacacaaagccuucug

SEQ ID NO: 224929 - RNA, 18 nt, Human
acacaaagccuucugaua

SEQ ID NO: 224930 - RNA, 21 nt, Human
acaccaccaucgugcacgucu

SEQ ID NO: 224931 - RNA, 19 nt, Human
acaccauaaccauaaggug

SEQ ID NO: 224932 - RNA, 20 nt, Human
acaccugggagcacgggugc

SEQ ID NO: 224933 - RNA, 24 nt, Human
acagccuguacagaucaccacuau

SEQ ID NO: 224934 - RNA, 21 nt, Human
acaggagcacgacaacucaua

SEQ ID NO: 224935 - RNA, 19 nt, Human
acauacuauauccuagaag

SEQ ID NO: 224936 - RNA, 18 nt, Human
accaccagguuuccaugu

SEQ ID NO: 224937 - RNA, 20 nt, Human
acccaauaccaucagccuug

SEQ ID NO: 224938 - RNA, 21 nt, Human
acccagagaggcaggaacccg

SEQ ID NO: 224939 - RNA, 18 nt, Human
acccagucaccccccaug

SEQ ID NO: 224940 - RNA, 27 nt, Human
acgacaacucauagacaguacugggcc

SEQ ID NO: 224941 - RNA, 22 nt, Human
acuaaguaacauucucuaaaga

SEQ ID NO: 224942 - RNA, 21 nt, Human
agaaaacacaaaccuauaacc

SEQ ID NO: 224943 - RNA, 20 nt, Human
agaacucacacgacaaccuc

SEQ ID NO: 224944 - RNA, 26 nt, Human
agacaacacgaccuuacuccuaaaca

SEQ ID NO: 224945 - RNA, 21 nt, Human
agacagccaccucccagccuc

SEQ ID NO: 224946 - RNA, 23 nt, Human
aggagcacgacaacucauagaca

SEQ ID NO: 224947 - RNA, 18 nt, Human
aggagcauuuuggaggag

SEQ ID NO: 224948 - RNA, 24 nt, Human
aggcaacaaaaguauuuaagcuac

SEQ ID NO: 224949 - RNA, 19 nt, Human
aggcaggaacccgcgccgc

SEQ ID NO: 224950 - RNA, 22 nt, Human
aguaucaucuucaaucaacuga

SEQ ID NO: 224951 - RNA, 21 nt, Human
agucacccuaggaaacaagga

SEQ ID NO: 224952 - RNA, 25 nt, Human
auaaugaaagccaccuggaaaacca

SEQ ID NO: 224953 - RNA, 21 nt, Human
auggaacaauaaugaaagcca

SEQ ID NO: 224954 - RNA, 19 nt, Human
auggugucagacacaccac

SEQ ID NO: 224955 - RNA, 21 nt, Human
caacacgaccuuacuccuaaa

SEQ ID NO: 224956 - RNA, 18 nt, Human
caacugaaacacaaaagg

SEQ ID NO: 224957 - RNA, 25 nt, Human
caagaggagcaggagcauuuuggag

SEQ ID NO: 224958 - RNA, 21 nt, Human
caagaggcagcucagcaaugu

SEQ ID NO: 224959 - RNA, 22 nt, Human
cacaaaaggaccucuuaagaag

SEQ ID NO: 224960 - RNA, 22 nt, Human
cacaccaccaucgugcacgucu

SEQ ID NO: 224961 - RNA, 21 nt, Human
cacaccacccucuaaaaacga

SEQ ID NO: 224962 - RNA, 21 nt, Human
caccagauaaaugcaagucau

SEQ ID NO: 224963 - RNA, 24 nt, Human
caccagccaaaucuaaguguucca

SEQ ID NO: 224964 - RNA, 23 nt, Human
caccauaaccauaaggugccuuu

SEQ ID NO: 224965 - RNA, 23 nt, Human
caccucccagccucccacaagcc

SEQ ID NO: 224966 - RNA, 22 nt, Human
cagaaaacacaaaccuauaacc

SEQ ID NO: 224967 - RNA, 21 nt, Human
cagcacuuccaaaaugcacau

SEQ ID NO: 224968 - RNA, 18 nt, Human
cagcugccgaaggcucac

SEQ ID NO: 224969 - RNA, 21 nt, Human
cagcugccgaaggcucacagg

SEQ ID NO: 224970 - RNA, 18 nt, Human
cagcuggaaacaagucau

SEQ ID NO: 224971 - RNA, 18 nt, Human
caggacacaaguggcuag

SEQ ID NO: 224972 - RNA, 22 nt, Human
cagugcagccugugucaaugcu

SEQ ID NO: 224973 - RNA, 28 nt, Human
caucuuaaaaaauaaauauuucaaaaac

SEQ ID NO: 224974 - RNA, 20 nt, Human
caugcaagccacggaacuac

SEQ ID NO: 224975 - RNA, 24 nt, Human
caugcuguuaaaacacacaagaaa

SEQ ID NO: 224976 - RNA, 21 nt, Human
cauucaauaaaucacccacac

SEQ ID NO: 224977 - RNA, 22 nt, Human
ccacaagccuccaguccaaugg

SEQ ID NO: 224978 - RNA, 24 nt, Human
ccacaccaccaucgugcacgucua

SEQ ID NO: 224979 - RNA, 24 nt, Human
ccaccagguuuccaugucauggca

SEQ ID NO: 224980 - RNA, 24 nt, Human
ccacccagagaggcaggaacccgc

SEQ ID NO: 224981 - RNA, 20 nt, Human
ccagagaggcaggaacccgc

SEQ ID NO: 224982 - RNA, 21 nt, Human
ccagggcuggaagcaccagcc

SEQ ID NO: 224983 - RNA, 20 nt, Human
cccacuggcauugaaaacaa

SEQ ID NO: 224984 - RNA, 18 nt, Human
cccagucaccccccauga

SEQ ID NO: 224985 - RNA, 21 nt, Human
cccagucaccccccaugaaag

SEQ ID NO: 224986 - RNA, 25 nt, Human
cccagucaccccccaugaaaggcag

SEQ ID NO: 224987 - RNA, 23 nt, Human
cccgcggccgaggccggcgggaa

SEQ ID NO: 224988 - RNA, 20 nt, Human
ccgcccgcagcugccgaagg

SEQ ID NO: 224989 - RNA, 20 nt, Human
ccgccgccgcccgcagcugc

SEQ ID NO: 224990 - RNA, 22 nt, Human
ccgcugccugcuggcggugcgu

SEQ ID NO: 224991 - RNA, 19 nt, Human
ccggauccgcgcgccccuc

SEQ ID NO: 224992 - RNA, 22 nt, Human
ccucacccacccagagaggcag

SEQ ID NO: 224993 - RNA, 24 nt, Human
ccuccaguccaauggaaagauuug

SEQ ID NO: 224994 - RNA, 21 nt, Human
ccucccagccucccacaagcc

SEQ ID NO: 224995 - RNA, 22 nt, Human
ccugcuggcggugcgugcgcgg

SEQ ID NO: 224996 - RNA, 24 nt, Human
cgacaaccucagaaacaggagcac

SEQ ID NO: 224997 - RNA, 18 nt, Human
cgcccgcgccgcgcgggg

SEQ ID NO: 224998 - RNA, 24 nt, Human
cgccgccgccgcccgcagcugccg

SEQ ID NO: 224999 - RNA, 20 nt, Human
cgcgccccucacccacccag

SEQ ID NO: 225000 - RNA, 20 nt, Human
cgcgcgccccucacccaccc

SEQ ID NO: 225001 - RNA, 23 nt, Human
cggccgcccgcgccgcgcggggg

SEQ ID NO: 225002 - RNA, 24 nt, Human
cuacccagucaccccccaugaaag

SEQ ID NO: 225003 - RNA, 18 nt, Human
cuaccuuacgagcuacaa

SEQ ID NO: 225004 - RNA, 24 nt, Human
cucauagacaguacugggccacaa

SEQ ID NO: 225005 - RNA, 21 nt, Human
cuccaacgaaaggcaccagau

SEQ ID NO: 225006 - RNA, 24 nt, Human
cuccaggguuuaagccagccgggu

SEQ ID NO: 225007 - RNA, 20 nt, Human
cucccacuuaucugaaacca

SEQ ID NO: 225008 - RNA, 22 nt, Human
cucccagccucccacaagccuc

SEQ ID NO: 225009 - RNA, 19 nt, Human
cucucccugguuagcuuca

SEQ ID NO: 225010 - RNA, 18 nt, Human
cucuuaagaagaggccca

SEQ ID NO: 225011 - RNA, 23 nt, Human
cugccugcuggcggugcgugcgc

SEQ ID NO: 225012 - RNA, 25 nt, Human
cuuucacaucugcaaaggguaacca

SEQ ID NO: 225013 - RNA, 18 nt, Human
gaaacaagucaucuccag

SEQ ID NO: 225014 - RNA, 18 nt, Human
gaaacuuccccaacccgc

SEQ ID NO: 225015 - RNA, 19 nt, Human
gaaacuuccccaacccgcg

SEQ ID NO: 225016 - RNA, 23 nt, Human
gacauuuuaugaacuagcaguuu

SEQ ID NO: 225017 - RNA, 19 nt, Human
gacccaauaccaucagccu

SEQ ID NO: 225018 - RNA, 21 nt, Human
gaccccuggguucuauugccu

SEQ ID NO: 225019 - RNA, 18 nt, Human
gacuaaaagaaacugcug

SEQ ID NO: 225020 - RNA, 20 nt, Human
gcagccugugucaaugcuug

SEQ ID NO: 225021 - RNA, 19 nt, Human
gcagcugccgaaggcucac

SEQ ID NO: 225022 - RNA, 18 nt, Human
gccaccucccagccuccc

SEQ ID NO: 225023 - RNA, 18 nt, Human
gccagaggcacaagaggc

SEQ ID NO: 225024 - RNA, 23 nt, Human
gccucuacccagucaccccccau

SEQ ID NO: 225025 - RNA, 21 nt, Human
gccuuguuccuugcuuccacu

SEQ ID NO: 225026 - RNA, 23 nt, Human
gccuuguuccuugcuuccacuuu

SEQ ID NO: 225027 - RNA, 21 nt, Human
gcggccgaggccggcgggaaa

SEQ ID NO: 225028 - RNA, 20 nt, Human
gcucccggagcccccucucu

SEQ ID NO: 225029 - RNA, 24 nt, Human
ggaaagauuugaacugggggcucc

SEQ ID NO: 225030 - RNA, 19 nt, Human
ggaaauacauuucucuaca

SEQ ID NO: 225031 - RNA, 24 nt, Human
ggagacagccaccucccagccucc

SEQ ID NO: 225032 - RNA, 18 nt, Human
ggagaggaagauuauuuc

SEQ ID NO: 225033 - RNA, 18 nt, Human
ggauguagacacuaggag

SEQ ID NO: 225034 - RNA, 18 nt, Human
ggccacaagcacuagaau

SEQ ID NO: 225035 - RNA, 25 nt, Human
gggauuccuccaacgaaaggcacca

SEQ ID NO: 225036 - RNA, 23 nt, Human
gggccggcgggcgggggccgccg

SEQ ID NO: 225037 - RNA, 19 nt, Human
ggugcgagugugugcgccc

SEQ ID NO: 225038 - RNA, 19 nt, Human
gguuguucuuucucccacu

SEQ ID NO: 225039 - RNA, 18 nt, Human
guaaauguuaugccuucc

SEQ ID NO: 225040 - RNA, 21 nt, Human
uaaaaacaacuuagagacuug

SEQ ID NO: 225041 - RNA, 22 nt, Human
uaaaacacacaagaaauaccag

SEQ ID NO: 225042 - RNA, 22 nt, Human
uaacuaaguaacauucucuaaa

SEQ ID NO: 225043 - RNA, 23 nt, Human
uaagauccuugccacaccuccaa

SEQ ID NO: 225044 - RNA, 18 nt, Human
uacaacauacuauauccu

SEQ ID NO: 225045 - RNA, 20 nt, Human
uacaagagauguuaaaaaga

SEQ ID NO: 225046 - RNA, 23 nt, Human
uacaagagauguuaaaaagauag

SEQ ID NO: 225047 - RNA, 27 nt, Human
uaccaggcucagugacccaauaccauc

SEQ ID NO: 225048 - RNA, 19 nt, Human
uacugggccacaagcacua

SEQ ID NO: 225049 - RNA, 20 nt, Human
uagaggaacccagguucccc

SEQ ID NO: 225050 - RNA, 20 nt, Human
uagcaacccaacaacguuca

SEQ ID NO: 225051 - RNA, 18 nt, Human
uagcauucuggguguacu

SEQ ID NO: 225052 - RNA, 22 nt, Human
uagugagacuuuaggggagagg

SEQ ID NO: 225053 - RNA, 23 nt, Human
uauagaggaacccagguucccca

SEQ ID NO: 225054 - RNA, 21 nt, Human
uauauaaguauauauguaugu

SEQ ID NO: 225055 - RNA, 22 nt, Human
uauauaaguauauauguaugua

SEQ ID NO: 225056 - RNA, 25 nt, Human
uaucugaaaccaccacuugaaaaac

SEQ ID NO: 225057 - RNA, 23 nt, Human
uaugcccacgaugcaaagaccag

SEQ ID NO: 225058 - RNA, 19 nt, Human
uauuugagugcuaagauaa

SEQ ID NO: 225059 - RNA, 20 nt, Human
ucaauacaaguuuggaagcu

SEQ ID NO: 225060 - RNA, 18 nt, Human
ucacagcuggaaacaagu

SEQ ID NO: 225061 - RNA, 24 nt, Human
ucacccacccagagaggcaggaac

SEQ ID NO: 225062 - RNA, 23 nt, Human
ucauagacaguacugggccacaa

SEQ ID NO: 225063 - RNA, 20 nt, Human
ucccaacccagcacuuccaa

SEQ ID NO: 225064 - RNA, 21 nt, Human
ucccagccucccacaagccuc

SEQ ID NO: 225065 - RNA, 18 nt, Human
ucccggagcccccucucc

SEQ ID NO: 225066 - RNA, 22 nt, Human
ucccugggucaccauucagucu

SEQ ID NO: 225067 - RNA, 20 nt, Human
ucgucucccuucaauacaag

SEQ ID NO: 225068 - RNA, 21 nt, Human
ucuccaguuucuacucugucc

SEQ ID NO: 225069 - RNA, 21 nt, Human
ucucccuaacacaucuguucu

SEQ ID NO: 225070 - RNA, 18 nt, Human
ucugacagccugguugcc

SEQ ID NO: 225071 - RNA, 21 nt, Human
ucugacuaaauucugcuugga

SEQ ID NO: 225072 - RNA, 19 nt, Human
ucuguaagaagucaugcug

SEQ ID NO: 225073 - RNA, 19 nt, Human
ugaaaaauaacucugcucc

SEQ ID NO: 225074 - RNA, 23 nt, Human
ugaaaacaauaaccuucaaaugc

SEQ ID NO: 225075 - RNA, 22 nt, Human
ugaaaacccuggauagcuccau

SEQ ID NO: 225076 - RNA, 21 nt, Human
ugaaagccaccuggaaaacca

SEQ ID NO: 225077 - RNA, 26 nt, Human
ugaaagugacugaguuauucugccuu

SEQ ID NO: 225078 - RNA, 20 nt, Human
ugaagccccucucccuaaca

SEQ ID NO: 225079 - RNA, 23 nt, Human
ugaagccccucucccuaacacau

SEQ ID NO: 225080 - RNA, 22 nt, Human
ugacccaauaccaucagccuug

SEQ ID NO: 225081 - RNA, 24 nt, Human
ugacuaaauucugcuuggaaauaa

SEQ ID NO: 225082 - RNA, 24 nt, Human
ugagaugaacaucaguguacaucg

SEQ ID NO: 225083 - RNA, 22 nt, Human
ugagauuuuguuuucacaugac

SEQ ID NO: 225084 - RNA, 19 nt, Human
ugagcaaaaucucaucaua

SEQ ID NO: 225085 - RNA, 20 nt, Human
ugaggaagacaacacgaccc

SEQ ID NO: 225086 - RNA, 24 nt, Human
ugaguaaagguccaguugggcaag

SEQ ID NO: 225087 - RNA, 18 nt, Human
ugccugggcugugccaga

SEQ ID NO: 225088 - RNA, 21 nt, Human
ugccugggcugugccagaggc

SEQ ID NO: 225089 - RNA, 24 nt, Human
ugccugggcugugccagaggcaca

SEQ ID NO: 225090 - RNA, 19 nt, Human
ugcgagugugugcgcccgg

SEQ ID NO: 225091 - RNA, 18 nt, Human
ugcucagaccccuggguu

SEQ ID NO: 225092 - RNA, 18 nt, Human
ugcugggagugacacuuc

SEQ ID NO: 225093 - RNA, 22 nt, Human
uggaaagauuugaacugggggc

SEQ ID NO: 225094 - RNA, 18 nt, Human
uggaacaauaaugaaagc

SEQ ID NO: 225095 - RNA, 22 nt, Human
uggcagaaaacacaaaccuaua

SEQ ID NO: 225096 - RNA, 20 nt, Human
uggcaggaacuccagggcaa

SEQ ID NO: 225097 - RNA, 21 nt, Human
uggccucuacccagucacccc

SEQ ID NO: 225098 - RNA, 22 nt, Human
uggccucuacccagucaccccc

SEQ ID NO: 225099 - RNA, 18 nt, Human
ugggaauuagcuccaggg

SEQ ID NO: 225100 - RNA, 20 nt, Human
ugggagugacacuucucuca

SEQ ID NO: 225101 - RNA, 19 nt, Human
ugggguggagggugacaag

SEQ ID NO: 225102 - RNA, 25 nt, Human
ugguuagauguuaucuagcaagguc

SEQ ID NO: 225103 - RNA, 19 nt, Human
uguucuugggaaaaaaauu

SEQ ID NO: 225104 - RNA, 18 nt, Human
uuacuccuaaacaucuua

SEQ ID NO: 225105 - RNA, 21 nt, Human
uuacuccuaaacaucuuaaaa

SEQ ID NO: 225106 - RNA, 18 nt, Human
uuaucugacuaaauucug

SEQ ID NO: 225107 - RNA, 24 nt, Human
uucaaaaacaugcuaauaucuuag

SEQ ID NO: 225108 - RNA, 18 nt, Human
uuccuggucagcggccau

SEQ ID NO: 225109 - RNA, 22 nt, Human
uuccuugugggaauuagcucca

SEQ ID NO: 225110 - RNA, 22 nt, Human
uucuaaagaugauuggugcacc

SEQ ID NO: 225111 - RNA, 21 nt, Human
uucuggguguacucaucuggc

SEQ ID NO: 225112 - RNA, 23 nt, Human
uuggaugaaaacccuggauagcu

SEQ ID NO: 225113 - RNA, 19 nt, Human
uuugaugagcuuucagagu

SEQ ID NO: 225114 - RNA, 24 nt, Human
uuuuacaacucuuuccuuucuccu

SEQ ID NO: 225115 - RNA, 20 nt, Human
aaacaggcacaaacaccccc

SEQ ID NO: 225116 - RNA, 20 nt, Human
aaacaggcacaaacaccccc

SEQ ID NO: 225117 - RNA, 18 nt, Human
aaagcuguguuaaccuaa

SEQ ID NO: 225118 - RNA, 23 nt, Human
aaggauaagagaaacaggcacaa

SEQ ID NO: 225119 - RNA, 24 nt, Human
aaugucgggaaaggauaagagaaa

SEQ ID NO: 225120 - RNA, 20 nt, Human
acacgcucugccuucauccu

SEQ ID NO: 225121 - RNA, 18 nt, Human
acagaaugaugcauaagc

SEQ ID NO: 225122 - RNA, 19 nt, Human
acaggcacaaacacccccg

SEQ ID NO: 225123 - RNA, 20 nt, Human
acccaauaccauuuaucuua

SEQ ID NO: 225124 - RNA, 22 nt, Human
acccaauaccauuuaucuuaua

SEQ ID NO: 225125 - RNA, 18 nt, Human
agagugcuggcuggcaag

SEQ ID NO: 225126 - RNA, 23 nt, Human
aggccaaagcaaucacuggaaaa

SEQ ID NO: 225127 - RNA, 21 nt, Human
agggagaagaggaagaucagg

SEQ ID NO: 225128 - RNA, 22 nt, Human
caaaaagaagggaagaauccug

SEQ ID NO: 225129 - RNA, 18 nt, Human
caagaagcucugcccuuc

SEQ ID NO: 225130 - RNA, 19 nt, Human
cacagagaaaaauaaagac

SEQ ID NO: 225131 - RNA, 22 nt, Human
cacagagaaaaauaaagacaau

SEQ ID NO: 225132 - RNA, 22 nt, Human
caugagcauggauuuacaugca

SEQ ID NO: 225133 - RNA, 22 nt, Human
ccaauaccauuuaucuuauauu

SEQ ID NO: 225134 - RNA, 23 nt, Human
ccugccgccgcggcggcgaggag

SEQ ID NO: 225135 - RNA, 24 nt, Human
cgcugcagggaucaggccucgcgg

SEQ ID NO: 225136 - RNA, 19 nt, Human
cucucuuguaaaaaauaaa

SEQ ID NO: 225137 - RNA, 24 nt, Human
cugaaagguacacccugagaauua

SEQ ID NO: 225138 - RNA, 27 nt, Human
cuugagguggagaugccacacgcucug

SEQ ID NO: 225139 - RNA, 21 nt, Human
gaaacaggcacaaacaccccc

SEQ ID NO: 225140 - RNA, 23 nt, Human
gaaacaggcacaaacacccccgc

SEQ ID NO: 225141 - RNA, 24 nt, Human
gaacaugagcauggauuuacaugc

SEQ ID NO: 225142 - RNA, 18 nt, Human
gagaugccacacgcucug

SEQ ID NO: 225143 - RNA, 20 nt, Human
gagaugccacacgcucugcc

SEQ ID NO: 225144 - RNA, 23 nt, Human
gcggcggcgaggagagcggggug

SEQ ID NO: 225145 - RNA, 22 nt, Human
ggauaagagaaacaggcacaaa

SEQ ID NO: 225146 - RNA, 18 nt, Human
ggcaagggagaagaggaa

SEQ ID NO: 225147 - RNA, 18 nt, Human
ggccaaagcaaucacugg

SEQ ID NO: 225148 - RNA, 23 nt, Human
guggugcacauaggcauuuggug

SEQ ID NO: 225149 - RNA, 21 nt, Human
uaaaugauuuuaacgaaccca

SEQ ID NO: 225150 - RNA, 20 nt, Human
uaacgaacccacugagguuu

SEQ ID NO: 225151 - RNA, 23 nt, Human
uaagagaaacaggcacaaacacc

SEQ ID NO: 225152 - RNA, 28 nt, Human
uccauguuuagaacaugagccggggucc

SEQ ID NO: 225153 - RNA, 23 nt, Human
uccuguucucugguuguacaggc

SEQ ID NO: 225154 - RNA, 21 nt, Human
ucucugguuguacaggccaaa

SEQ ID NO: 225155 - RNA, 24 nt, Human
ucugcccuucucagcacacuggaa

SEQ ID NO: 225156 - RNA, 21 nt, Human
ugacaaacacagaaugaugcu

SEQ ID NO: 225157 - RNA, 18 nt, Human
ugaguaaaugacaaacac

SEQ ID NO: 225158 - RNA, 19 nt, Human
ugaguaaaugacaaacaca

SEQ ID NO: 225159 - RNA, 24 nt, Human
ugcauugucucauuuuguggaucu

SEQ ID NO: 225160 - RNA, 24 nt, Human
ugccacacgcucugccuucauccu

SEQ ID NO: 225161 - RNA, 19 nt, Human
uggcugaaagguacacccu

SEQ ID NO: 225162 - RNA, 26 nt, Human
uuacaugcaugucgucucagucagcu

SEQ ID NO: 225163 - RNA, 20 nt, Human
uucagaacaaggcauuuaau

SEQ ID NO: 225164 - RNA, 18 nt, Human
uugagguggagaugccac

SEQ ID NO: 225165 - RNA, 27 nt, Human
uuuuuuuuuuuuuuccauacugaauua

SEQ ID NO: 225166 - RNA, 19 nt, Human
aaaaggacagaacaagggc

SEQ ID NO: 225167 - RNA, 22 nt, Human
aaaaggacagaacaagggcaaa

SEQ ID NO: 225168 - RNA, 18 nt, Human
aaccuucuaaaaccagaa

SEQ ID NO: 225169 - RNA, 30 nt, Human
aaccuucuaaaaccagaaaccccgucugaa

SEQ ID NO: 225170 - RNA, 20 nt, Human
aaugacaucaauugcugaaa

SEQ ID NO: 225171 - RNA, 19 nt, Human
acacagcuucacauugaac

SEQ ID NO: 225172 - RNA, 18 nt, Human
accccaugcccaccucca

SEQ ID NO: 225173 - RNA, 23 nt, Human
accccaugcccaccuccaccaga

SEQ ID NO: 225174 - RNA, 24 nt, Human
accuccaccagagcaaacacaaug

SEQ ID NO: 225175 - RNA, 24 nt, Human
acuuccugcugguggaaagaacaa

SEQ ID NO: 225176 - RNA, 20 nt, Human
agaacagaccccaugcccac

SEQ ID NO: 225177 - RNA, 18 nt, Human
agaccccaugcccaccuc

SEQ ID NO: 225178 - RNA, 21 nt, Human
agaggaaacgcagcgaccaca

SEQ ID NO: 225179 - RNA, 24 nt, Human
agggggaagaacaaaaggguaaaa

SEQ ID NO: 225180 - RNA, 21 nt, Human
aguggguuggggacaggggga

SEQ ID NO: 225181 - RNA, 18 nt, Human
aucaggacagauaugagg

SEQ ID NO: 225182 - RNA, 21 nt, Human
caaagcaagguaacguuaguc

SEQ ID NO: 225183 - RNA, 19 nt, Human
caacucgaagaacacgcaa

SEQ ID NO: 225184 - RNA, 21 nt, Human
cacacacugaccgcucucccg

SEQ ID NO: 225185 - RNA, 22 nt, Human
cacauugaaccucccgcauuca

SEQ ID NO: 225186 - RNA, 21 nt, Human
cagacggacuuucugcggcgc

SEQ ID NO: 225187 - RNA, 22 nt, Human
cagacuauaaauauaugugcca

SEQ ID NO: 225188 - RNA, 23 nt, Human
cagcaggggcaugauaaugcuuu

SEQ ID NO: 225189 - RNA, 20 nt, Human
caggcagaggaaacgcagcg

SEQ ID NO: 225190 - RNA, 22 nt, Human
cauaaacagacuauaaauauau

SEQ ID NO: 225191 - RNA, 21 nt, Human
ccccaugcccaccuccaccag

SEQ ID NO: 225192 - RNA, 18 nt, Human
cccgcagcgcaggacagu

SEQ ID NO: 225193 - RNA, 23 nt, Human
cccgcagcgcaggacaguugagc

SEQ ID NO: 225194 - RNA, 20 nt, Human
ccuccaccagagcaaacaca

SEQ ID NO: 225195 - RNA, 21 nt, Human
ccucuuggauagacucagccc

SEQ ID NO: 225196 - RNA, 26 nt, Human
cgaagaacacgcaaccuucuaaaacc

SEQ ID NO: 225197 - RNA, 22 nt, Human
cgcagcgaccacacacugaccg

SEQ ID NO: 225198 - RNA, 22 nt, Human
cggcggcugcaggggcgucugc

SEQ ID NO: 225199 - RNA, 20 nt, Human
cuaaacccauggugagaccc

SEQ ID NO: 225200 - RNA, 25 nt, Human
cucagcccugcaaauccuucccauc

SEQ ID NO: 225201 - RNA, 24 nt, Human
cucgagccgggcgaaaugcccaga

SEQ ID NO: 225202 - RNA, 24 nt, Human
cugaaacuuugacaccacacacag

SEQ ID NO: 225203 - RNA, 21 nt, Human
cugagcagaccucucauguga

SEQ ID NO: 225204 - RNA, 20 nt, Human
cugcgggugccgguaggaga

SEQ ID NO: 225205 - RNA, 22 nt, Human
cuucaaaaucugagcagaccuc

SEQ ID NO: 225206 - RNA, 18 nt, Human
gaaaugcccagaacucgg

SEQ ID NO: 225207 - RNA, 24 nt, Human
gaacaacacuucaaaaucugagca

SEQ ID NO: 225208 - RNA, 22 nt, Human
gaacacgcaaccuucuaaaacc

SEQ ID NO: 225209 - RNA, 22 nt, Human
gaacagaccccaugcccaccuc

SEQ ID NO: 225210 - RNA, 21 nt, Human
gaccgcucucccggggucccg

SEQ ID NO: 225211 - RNA, 19 nt, Human
gagaguggguuggggacag

SEQ ID NO: 225212 - RNA, 19 nt, Human
gagccgggcgaaaugccca

SEQ ID NO: 225213 - RNA, 20 nt, Human
gagccgggcgaaaugcccag

SEQ ID NO: 225214 - RNA, 24 nt, Human
gcaaccuucuaaaaccagaaaccc

SEQ ID NO: 225215 - RNA, 19 nt, Human
gcagaggaaacgcagcgac

SEQ ID NO: 225216 - RNA, 23 nt, Human
gcagaggaaacgcagcgaccaca

SEQ ID NO: 225217 - RNA, 23 nt, Human
ggagaagacacagacacauucuu

SEQ ID NO: 225218 - RNA, 22 nt, Human
ggcgaaaugcccagaacucggg

SEQ ID NO: 225219 - RNA, 20 nt, Human
ggcgcaggcagaggaaacgc

SEQ ID NO: 225220 - RNA, 18 nt, Human
gggacagggggaagaaca

SEQ ID NO: 225221 - RNA, 21 nt, Human
gggacagggggaagaacaaaa

SEQ ID NO: 225222 - RNA, 22 nt, Human
gggcuuggcaaggagacagcua

SEQ ID NO: 225223 - RNA, 19 nt, Human
gugagacccgcagcagggg

SEQ ID NO: 225224 - RNA, 19 nt, Human
uagaagacuggcucccugc

SEQ ID NO: 225225 - RNA, 24 nt, Human
ucaaaaucugagcagaccucucau

SEQ ID NO: 225226 - RNA, 27 nt, Human
ucacacuaugguaccaaacaaaaaaca

SEQ ID NO: 225227 - RNA, 19 nt, Human
uccagaagaaaccagaagc

SEQ ID NO: 225228 - RNA, 27 nt, Human
ucccugcaguccgagguccuuuuucug

SEQ ID NO: 225229 - RNA, 22 nt, Human
uccuggggcuuggcaaggagac

SEQ ID NO: 225230 - RNA, 21 nt, Human
ucgaagaacacgcaaccuucu

SEQ ID NO: 225231 - RNA, 18 nt, Human
ucgggagccgguucuuuc

SEQ ID NO: 225232 - RNA, 21 nt, Human
ucucaugugauguccgggagu

SEQ ID NO: 225233 - RNA, 21 nt, Human
ucugcgggugccgguaggaga

SEQ ID NO: 225234 - RNA, 19 nt, Human
ucuugggucacaagccucu

SEQ ID NO: 225235 - RNA, 23 nt, Human
ugaaaaaagaggaucaggucaac

SEQ ID NO: 225236 - RNA, 26 nt, Human
ugaaacuuugacaccacacacagcuu

SEQ ID NO: 225237 - RNA, 21 nt, Human
ugaaccucccgcauucagucu

SEQ ID NO: 225238 - RNA, 20 nt, Human
ugagacccgcagcaggggca

SEQ ID NO: 225239 - RNA, 19 nt, Human
ugagcagaccucucaugug

SEQ ID NO: 225240 - RNA, 19 nt, Human
ugaggauggggccauugcu

SEQ ID NO: 225241 - RNA, 22 nt, Human
ugcagucagaacucuucaacac

SEQ ID NO: 225242 - RNA, 18 nt, Human
ugcccggcgcaggcagag

SEQ ID NO: 225243 - RNA, 18 nt, Human
ugccgguaggagaggaua

SEQ ID NO: 225244 - RNA, 20 nt, Human
uggaaagaacaacacuucaa

SEQ ID NO: 225245 - RNA, 18 nt, Human
uggaacucgcggcacccc

SEQ ID NO: 225246 - RNA, 21 nt, Human
uggaguagaggccaaauaacu

SEQ ID NO: 225247 - RNA, 22 nt, Human
uggauagacucagcccugcaaa

SEQ ID NO: 225248 - RNA, 21 nt, Human
uggcuaauaaucauucagaga

SEQ ID NO: 225249 - RNA, 23 nt, Human
uggcucccugcaguccgaggucc

SEQ ID NO: 225250 - RNA, 22 nt, Human
uggguugcggggugagaguggg

SEQ ID NO: 225251 - RNA, 20 nt, Human
uggguuggggacagggggaa

SEQ ID NO: 225252 - RNA, 23 nt, Human
ugucuagagaaggaggcgcggag

SEQ ID NO: 225253 - RNA, 21 nt, Human
uuaaaugaaugaaaaaagagg

SEQ ID NO: 225254 - RNA, 22 nt, Human
uuaaaugaaugaaaaaagagga

SEQ ID NO: 225255 - RNA, 21 nt, Human
uucacauugaaccucccgcau

SEQ ID NO: 225256 - RNA, 23 nt, Human
aaacaccccccgccccaguuccu

SEQ ID NO: 225257 - RNA, 25 nt, Human
aagcagaaaggaaaucuugcucuga

SEQ ID NO: 225258 - RNA, 18 nt, Human
aaggaaaucuugcucuga

SEQ ID NO: 225259 - RNA, 23 nt, Human
aagugccagcuuuuauuuuugga

SEQ ID NO: 225260 - RNA, 22 nt, Human
agaauccuuccugguuccacuc

SEQ ID NO: 225261 - RNA, 23 nt, Human
cacucuaggagcugauucggagg

SEQ ID NO: 225262 - RNA, 18 nt, Human
ccuugauccuggagaagg

SEQ ID NO: 225263 - RNA, 22 nt, Human
cgccccaguuccuugauccugg

SEQ ID NO: 225264 - RNA, 19 nt, Human
cucuuucgccuugucccca

SEQ ID NO: 225265 - RNA, 25 nt, Human
cugcugcucuuucgccuuggugaca

SEQ ID NO: 225266 - RNA, 18 nt, Human
gagcugauucggaggacu

SEQ ID NO: 225267 - RNA, 20 nt, Human
ggaacagaagcagaaaggaa

SEQ ID NO: 225268 - RNA, 21 nt, Human
ggagguguuggucgauauuuc

SEQ ID NO: 225269 - RNA, 24 nt, Human
ggguccaggaaacaccccccgccc

SEQ ID NO: 225270 - RNA, 19 nt, Human
guggcuccagaauccuucc

SEQ ID NO: 225271 - RNA, 19 nt, Human
uccaggaaacaccccccgc

SEQ ID NO: 225272 - RNA, 24 nt, Human
uccccagacacacaggacuggccu

SEQ ID NO: 225273 - RNA, 27 nt, Human
uccccagacacacaggacuggccucug

SEQ ID NO: 225274 - RNA, 21 nt, Human
uccuugauccuggagaagggg

SEQ ID NO: 225275 - RNA, 23 nt, Human
uggaacagaagcagaaaggaaau

SEQ ID NO: 225276 - RNA, 19 nt, Human
uggccucuggguggagccu

SEQ ID NO: 225277 - RNA, 20 nt, Human
uuggaacagaagcagaaagg

SEQ ID NO: 225278 - RNA, 21 nt, Human
uuggaacagaagcagaaagga

SEQ ID NO: 225279 - RNA, 24 nt, Human
uuuaagagacaagcggaagccaag

SEQ ID NO: 225280 - RNA, 19 nt, Human
uuuuuuuuuuuuuaagaga

SEQ ID NO: 225281 - RNA, 20 nt, Human
uuuuuuuuuuuuuuuuuaag

SEQ ID NO: 225282 - RNA, 25 nt, Human
aaacacaaucaaauauaaagaacaa

SEQ ID NO: 225283 - RNA, 23 nt, Human
aacaagaauucuuuagugaugaa

SEQ ID NO: 225284 - RNA, 19 nt, Human
aaguauuugauucauucca

SEQ ID NO: 225285 - RNA, 24 nt, Human
acacagcccagcaaagggggaacc

SEQ ID NO: 225286 - RNA, 19 nt, Human
acauacacaaauguguccc

SEQ ID NO: 225287 - RNA, 19 nt, Human
accaauaggcagcugaagg

SEQ ID NO: 225288 - RNA, 19 nt, Human
agcaccuugccuuccagga

SEQ ID NO: 225289 - RNA, 18 nt, Human
aguguuaauaagcuaugg

SEQ ID NO: 225290 - RNA, 23 nt, Human
aucuucuucuuccuuuucuauug

SEQ ID NO: 225291 - RNA, 20 nt, Human
cacaaaugaaaaugguggcc

SEQ ID NO: 225292 - RNA, 22 nt, Human
caccaacagcuacuuagcaauc

SEQ ID NO: 225293 - RNA, 21 nt, Human
caggaauacaccguugagucc

SEQ ID NO: 225294 - RNA, 22 nt, Human
cccuuuuauuguauaaggaugu

SEQ ID NO: 225295 - RNA, 18 nt, Human
cuuggaucuucuucuucc

SEQ ID NO: 225296 - RNA, 22 nt, Human
cuuuaguguuaauaagcuaugg

SEQ ID NO: 225297 - RNA, 23 nt, Human
gaagacugcuuaccucagccuuc

SEQ ID NO: 225298 - RNA, 25 nt, Human
gaucuucuucuuccuuuucuauugg

SEQ ID NO: 225299 - RNA, 20 nt, Human
gauuuuaaaacauuuucccu

SEQ ID NO: 225300 - RNA, 19 nt, Human
ggaaauucuuacuuuaauc

SEQ ID NO: 225301 - RNA, 23 nt, Human
uaaaaacaacagcuacaagaaau

SEQ ID NO: 225302 - RNA, 23 nt, Human
uaaaacacuaagauuccacaaga

SEQ ID NO: 225303 - RNA, 25 nt, Human
uaagaaaaaaaaaaaaacuuugacg

SEQ ID NO: 225304 - RNA, 21 nt, Human
uacacagcccagcaaaggaaa

SEQ ID NO: 225305 - RNA, 19 nt, Human
uacaccguugaguccugug

SEQ ID NO: 225306 - RNA, 20 nt, Human
uacacugcacaaaugaaaau

SEQ ID NO: 225307 - RNA, 21 nt, Human
uaguauauguugucauguacu

SEQ ID NO: 225308 - RNA, 20 nt, Human
uauaaagaacaauuugcagu

SEQ ID NO: 225309 - RNA, 23 nt, Human
uauccagaccuuauuuaccaaua

SEQ ID NO: 225310 - RNA, 20 nt, Human
ucaaacuuguaccaccaaca

SEQ ID NO: 225311 - RNA, 21 nt, Human
ucagaagacugcuuaccucag

SEQ ID NO: 225312 - RNA, 22 nt, Human
ucaguuaagaaaaaaaaaaaaa

SEQ ID NO: 225313 - RNA, 26 nt, Human
ucaguuaagaaaaaaaaaaaaacuuu

SEQ ID NO: 225314 - RNA, 20 nt, Human
ucuaaaaacaacagcuacaa

SEQ ID NO: 225315 - RNA, 23 nt, Human
ucuccuauaagaaacagugaaac

SEQ ID NO: 225316 - RNA, 19 nt, Human
ucuucuuccuuuucuauug

SEQ ID NO: 225317 - RNA, 24 nt, Human
ugaacaccuuugaucuauuguuuc

SEQ ID NO: 225318 - RNA, 25 nt, Human
ugaauagaaaaauacacugcacaaa

SEQ ID NO: 225319 - RNA, 22 nt, Human
uggaagagaccaaaauaaaacu

SEQ ID NO: 225320 - RNA, 22 nt, Human
uuggaucuucuucuuccuuuuc

SEQ ID NO: 225321 - RNA, 27 nt, Human
uuugcuaaaaaucaguuaagaaaaaaa

SEQ ID NO: 225322 - RNA, 24 nt, Human
uuuucuauuggucacugcuuguac

SEQ ID NO: 225323 - RNA, 23 nt, Human
aaagcccuuuacauuauaugcuc

SEQ ID NO: 225324 - RNA, 18 nt, Human
aaccuggacgccaggcug

SEQ ID NO: 225325 - RNA, 21 nt, Human
accccugccccccacuggccu

SEQ ID NO: 225326 - RNA, 19 nt, Human
acgccaggcuggauggagg

SEQ ID NO: 225327 - RNA, 21 nt, Human
agaggagaagcuggcucugag

SEQ ID NO: 225328 - RNA, 18 nt, Human
agaguccuccccacagcu

SEQ ID NO: 225329 - RNA, 21 nt, Human
aggcgcaccccugccccccac

SEQ ID NO: 225330 - RNA, 26 nt, Human
auggacacaaagagggaggaucgaag

SEQ ID NO: 225331 - RNA, 22 nt, Human
auggugugugaggagccggcac

SEQ ID NO: 225332 - RNA, 19 nt, Human
caaccuggacgccaggcug

SEQ ID NO: 225333 - RNA, 20 nt, Human
cacaauaauucuguagccaa

SEQ ID NO: 225334 - RNA, 21 nt, Human
cacagcuugcaucuguccccu

SEQ ID NO: 225335 - RNA, 18 nt, Human
cagagccucucccugugg

SEQ ID NO: 225336 - RNA, 20 nt, Human
cagcaacacucuguauccug

SEQ ID NO: 225337 - RNA, 21 nt, Human
cagccagagcaguucagacau

SEQ ID NO: 225338 - RNA, 18 nt, Human
cagcgguguggacuccca

SEQ ID NO: 225339 - RNA, 18 nt, Human
cagcuugcaucugucccc

SEQ ID NO: 225340 - RNA, 19 nt, Human
caggacacaggcagagucc

SEQ ID NO: 225341 - RNA, 22 nt, Human
caggacacaggcagaguccucc

SEQ ID NO: 225342 - RNA, 24 nt, Human
caggcuggauggaggggagaaggc

SEQ ID NO: 225343 - RNA, 22 nt, Human
ccacagcuugcaucuguccccu

SEQ ID NO: 225344 - RNA, 21 nt, Human
ccagccauccccccagagccu

SEQ ID NO: 225345 - RNA, 25 nt, Human
ccagccauccccccagagccucucc

SEQ ID NO: 225346 - RNA, 18 nt, Human
ccagggcagagcuggugg

SEQ ID NO: 225347 - RNA, 19 nt, Human
cccccagagccucucccug

SEQ ID NO: 225348 - RNA, 22 nt, Human
cccccagccauccccccagagc

SEQ ID NO: 225349 - RNA, 21 nt, Human
ccuaaggugauaugcagcuaa

SEQ ID NO: 225350 - RNA, 20 nt, Human
ccuuacccacccuauauugg

SEQ ID NO: 225351 - RNA, 24 nt, Human
cgcccuuaauuccaaggugggcuc

SEQ ID NO: 225352 - RNA, 19 nt, Human
cucacaauaauucuguagc

SEQ ID NO: 225353 - RNA, 20 nt, Human
cucacaauaauucuguagcc

SEQ ID NO: 225354 - RNA, 22 nt, Human
cucacaauaauucuguagccaa

SEQ ID NO: 225355 - RNA, 19 nt, Human
cucuagcccaggcagcccc

SEQ ID NO: 225356 - RNA, 21 nt, Human
cugaacagggcaaccuggacg

SEQ ID NO: 225357 - RNA, 18 nt, Human
cuggacaaugaagacccc

SEQ ID NO: 225358 - RNA, 21 nt, Human
cuucugagcugugggaauaga

SEQ ID NO: 225359 - RNA, 19 nt, Human
cuuucaggcucuggggcag

SEQ ID NO: 225360 - RNA, 23 nt, Human
gaagcuggcucugaggaagauuu

SEQ ID NO: 225361 - RNA, 18 nt, Human
gaauggacacaaagaggg

SEQ ID NO: 225362 - RNA, 24 nt, Human
gacacaggcagaguccuccccaca

SEQ ID NO: 225363 - RNA, 22 nt, Human
gagcaguucagacauugagagg

SEQ ID NO: 225364 - RNA, 21 nt, Human
gcacaacgcagggccccgaag

SEQ ID NO: 225365 - RNA, 21 nt, Human
gcagaguccuccccacagcuu

SEQ ID NO: 225366 - RNA, 22 nt, Human
gcagaguccuccccacagcuug

SEQ ID NO: 225367 - RNA, 20 nt, Human
ggaauggacacaaagaggga

SEQ ID NO: 225368 - RNA, 19 nt, Human
ggacaaugaagaccccauc

SEQ ID NO: 225369 - RNA, 23 nt, Human
gggaauggacacaaagagggagg

SEQ ID NO: 225370 - RNA, 18 nt, Human
gggcagggcagaggaggc

SEQ ID NO: 225371 - RNA, 18 nt, Human
gugggaauagagucugca

SEQ ID NO: 225372 - RNA, 23 nt, Human
uaaggugauaugcagcuaauuaa

SEQ ID NO: 225373 - RNA, 19 nt, Human
uagcccaggcagccccucc

SEQ ID NO: 225374 - RNA, 19 nt, Human
ucccagcuucugagcugug

SEQ ID NO: 225375 - RNA, 19 nt, Human
ucccccagccaucccccca

SEQ ID NO: 225376 - RNA, 19 nt, Human
ucugagcugugggaauaga

SEQ ID NO: 225377 - RNA, 20 nt, Human
ucugcacaacgcagggcccc

SEQ ID NO: 225378 - RNA, 22 nt, Human
ugaacagggcaaccuggacgcu

SEQ ID NO: 225379 - RNA, 19 nt, Human
ugaacagggcaaccuggag

SEQ ID NO: 225380 - RNA, 24 nt, Human
ugagacuuucaggcucuggggcag

SEQ ID NO: 225381 - RNA, 21 nt, Human
ugagaggagaagcuggcucug

SEQ ID NO: 225382 - RNA, 19 nt, Human
uggacaaugaagaccccau

SEQ ID NO: 225383 - RNA, 24 nt, Human
uggacgccaggcuggauggagggg

SEQ ID NO: 225384 - RNA, 24 nt, Human
ugguggcaagcccagggcacuucu

SEQ ID NO: 225385 - RNA, 22 nt, Human
uggugggcagggcagaggaggc

SEQ ID NO: 225386 - RNA, 21 nt, Human
aaaaaaaaaaaaaacaccgca

SEQ ID NO: 225387 - RNA, 18 nt, Human
aaaaaaaacaagcaagga

SEQ ID NO: 225388 - RNA, 22 nt, Human
aaaaaaacaagcaaggaaaaca

SEQ ID NO: 225389 - RNA, 24 nt, Human
aaaaaaacaagcaaggaaaacaga

SEQ ID NO: 225390 - RNA, 27 nt, Human
aaaaacaagcaaggaaaaccgguaccc

SEQ ID NO: 225391 - RNA, 19 nt, Human
aaaaacacacucacacaca

SEQ ID NO: 225392 - RNA, 24 nt, Human
aaaaacacacucacacacaagacu

SEQ ID NO: 225393 - RNA, 21 nt, Human
aaagggggaaggggcggagag

SEQ ID NO: 225394 - RNA, 23 nt, Human
aacgucagauagcacuuuaauau

SEQ ID NO: 225395 - RNA, 22 nt, Human
aagaaagagaggagaaagaaaa

SEQ ID NO: 225396 - RNA, 22 nt, Human
aagcucacaacuaaaccuucag

SEQ ID NO: 225397 - RNA, 18 nt, Human
aaggggaagggguggggc

SEQ ID NO: 225398 - RNA, 19 nt, Human
aaguaugcuguaaauggau

SEQ ID NO: 225399 - RNA, 25 nt, Human
aaucccacccucccuggcacugguu

SEQ ID NO: 225400 - RNA, 23 nt, Human
acaauacugaaagcuaccacuac

SEQ ID NO: 225401 - RNA, 22 nt, Human
acaccgagcccucccucccccu

SEQ ID NO: 225402 - RNA, 22 nt, Human
acagcaaaaagguccguauaga

SEQ ID NO: 225403 - RNA, 22 nt, Human
acauaacuauguacacggccuu

SEQ ID NO: 225404 - RNA, 23 nt, Human
acuuuuuuuuuuuuuuuuuuuug

SEQ ID NO: 225405 - RNA, 18 nt, Human
agaaaacuugaagcuuuc

SEQ ID NO: 225406 - RNA, 22 nt, Human
agaaagaaaagggggaaggggc

SEQ ID NO: 225407 - RNA, 18 nt, Human
agagaggagaaagaaaag

SEQ ID NO: 225408 - RNA, 19 nt, Human
agagaggggaagaaagaga

SEQ ID NO: 225409 - RNA, 20 nt, Human
agaggggaagaaagagagga

SEQ ID NO: 225410 - RNA, 23 nt, Human
agaggggaggagggacggggagc

SEQ ID NO: 225411 - RNA, 20 nt, Human
aggagaaagaaaagggggaa

SEQ ID NO: 225412 - RNA, 22 nt, Human
aggagaaagaaaagggggaagg

SEQ ID NO: 225413 - RNA, 21 nt, Human
aggggcggagagaggggagga

SEQ ID NO: 225414 - RNA, 20 nt, Human
agucugugugagccaugcag

SEQ ID NO: 225415 - RNA, 21 nt, Human
aucucuuuacaauacugaaag

SEQ ID NO: 225416 - RNA, 18 nt, Human
augugcacugagucuaua

SEQ ID NO: 225417 - RNA, 25 nt, Human
caaaaaacacacucacacacaagac

SEQ ID NO: 225418 - RNA, 20 nt, Human
caauacugaaagcuaccacu

SEQ ID NO: 225419 - RNA, 18 nt, Human
cacaaaaucugaagcuca

SEQ ID NO: 225420 - RNA, 22 nt, Human
cacacaaaaaaaaauugacacc

SEQ ID NO: 225421 - RNA, 23 nt, Human
cacccucuaacucgcgauggcuc

SEQ ID NO: 225422 - RNA, 20 nt, Human
caccgagcccucccuccccc

SEQ ID NO: 225423 - RNA, 21 nt, Human
cagacaccaccacccgucccc

SEQ ID NO: 225424 - RNA, 23 nt, Human
caggauaaacagcaaaaaggucc

SEQ ID NO: 225425 - RNA, 24 nt, Human
caguagacaagauauauuguauuu

SEQ ID NO: 225426 - RNA, 18 nt, Human
caucuuacccuuuugcau

SEQ ID NO: 225427 - RNA, 21 nt, Human
cauucauugcauaguugaagg

SEQ ID NO: 225428 - RNA, 23 nt, Human
ccacacaaaaaaaaauugacacc

SEQ ID NO: 225429 - RNA, 26 nt, Human
ccacacaaaaaaaaauugacaccgag

SEQ ID NO: 225430 - RNA, 21 nt, Human
ccaccacccguccccugauuu

SEQ ID NO: 225431 - RNA, 22 nt, Human
cccagucugugugagccaugca

SEQ ID NO: 225432 - RNA, 30 nt, Human
ccccaccgcccccgcuacaauuaucaucca

SEQ ID NO: 225433 - RNA, 22 nt, Human
ccccagagcccacaagcggcaa

SEQ ID NO: 225434 - RNA, 18 nt, Human
cccccagagcccacaagc

SEQ ID NO: 225435 - RNA, 24 nt, Human
cccccagagcccacaagcggcaac

SEQ ID NO: 225436 - RNA, 18 nt, Human
cccccccaccgcccccgc

SEQ ID NO: 225437 - RNA, 23 nt, Human
cccccccaccgcccccgcuacaa

SEQ ID NO: 225438 - RNA, 21 nt, Human
cccccccagucugugugagcc

SEQ ID NO: 225439 - RNA, 20 nt, Human
cccgccacaggcuacggccg

SEQ ID NO: 225440 - RNA, 22 nt, Human
cccgccacaggcuacggccgca

SEQ ID NO: 225441 - RNA, 20 nt, Human
cccucccucccccuucacgg

SEQ ID NO: 225442 - RNA, 25 nt, Human
cccucccucccccuucacggcuucc

SEQ ID NO: 225443 - RNA, 23 nt, Human
cccucuaacucgcgauggcuccc

SEQ ID NO: 225444 - RNA, 20 nt, Human
ccgaggagggcgcgggggag

SEQ ID NO: 225445 - RNA, 18 nt, Human
ccuggugucugccuaggg

SEQ ID NO: 225446 - RNA, 21 nt, Human
ccuucccaccucaucugaaag

SEQ ID NO: 225447 - RNA, 19 nt, Human
cgccccgaggagggcgcgg

SEQ ID NO: 225448 - RNA, 21 nt, Human
cuccggggcuacacuuucccc

SEQ ID NO: 225449 - RNA, 24 nt, Human
cugggcuaaaagaucugaaaaauc

SEQ ID NO: 225450 - RNA, 18 nt, Human
cuuaaaaaaaaaaaaaaa

SEQ ID NO: 225451 - RNA, 24 nt, Human
cuuuuuuuuuuuuuuuuuuuuggg

SEQ ID NO: 225452 - RNA, 21 nt, Human
gaaaaggcuccuuugaguuag

SEQ ID NO: 225453 - RNA, 18 nt, Human
gaaagaagggagagaggg

SEQ ID NO: 225454 - RNA, 23 nt, Human
gaagaaagagaggagaaagaaaa

SEQ ID NO: 225455 - RNA, 18 nt, Human
gagcccacaagcggcaac

SEQ ID NO: 225456 - RNA, 20 nt, Human
gaggagcccaaguguggggc

SEQ ID NO: 225457 - RNA, 23 nt, Human
gaggggaggagggacggggagcg

SEQ ID NO: 225458 - RNA, 23 nt, Human
gauagcacuuuaauauacuagaa

SEQ ID NO: 225459 - RNA, 18 nt, Human
gcaugauggauggcgugg

SEQ ID NO: 225460 - RNA, 22 nt, Human
gccaucuuucacccucuaacuc

SEQ ID NO: 225461 - RNA, 21 nt, Human
gccccgaggagggcgcggggg

SEQ ID NO: 225462 - RNA, 19 nt, Human
gccugggguccaauuugca

SEQ ID NO: 225463 - RNA, 23 nt, Human
gcgggcuuuugugaaaagcccga

SEQ ID NO: 225464 - RNA, 21 nt, Human
ggaaaacagagucauaucacg

SEQ ID NO: 225465 - RNA, 21 nt, Human
ggaaacgugcaccuuacaucc

SEQ ID NO: 225466 - RNA, 22 nt, Human
ggagagaggggaggagggacgg

SEQ ID NO: 225467 - RNA, 23 nt, Human
gucugugugagccaugcaggagu

SEQ ID NO: 225468 - RNA, 21 nt, Human
guugcuucacuuuucuuuuca

SEQ ID NO: 225469 - RNA, 21 nt, Human
uaacucgcgauggcuccacaa

SEQ ID NO: 225470 - RNA, 23 nt, Human
uaaguaaaucucauuacaaaacg

SEQ ID NO: 225471 - RNA, 21 nt, Human
uaaguuccagccuggggucca

SEQ ID NO: 225472 - RNA, 21 nt, Human
uaaguuugcaaauagcacauu

SEQ ID NO: 225473 - RNA, 21 nt, Human
uacaaggggaagggguggggc

SEQ ID NO: 225474 - RNA, 22 nt, Human
uagaucucucugcuuauuagaa

SEQ ID NO: 225475 - RNA, 19 nt, Human
uaggguuucuucuuccucg

SEQ ID NO: 225476 - RNA, 20 nt, Human
uaugaaauaggacacacuaa

SEQ ID NO: 225477 - RNA, 23 nt, Human
ucaaaaaacacacucacacacaa

SEQ ID NO: 225478 - RNA, 18 nt, Human
ucacaacuaaaccuucag

SEQ ID NO: 225479 - RNA, 21 nt, Human
ucaucuucacuguuuugguuc

SEQ ID NO: 225480 - RNA, 21 nt, Human
ucauugcauaguugaaggguu

SEQ ID NO: 225481 - RNA, 20 nt, Human
uccaauuugcaaaacaggau

SEQ ID NO: 225482 - RNA, 21 nt, Human
uccacaagguugaccuguuac

SEQ ID NO: 225483 - RNA, 21 nt, Human
ucccagacuugaucaccagcu

SEQ ID NO: 225484 - RNA, 18 nt, Human
ucccccccaccgcccccg

SEQ ID NO: 225485 - RNA, 24 nt, Human
ucugcuuauuagaaacaauggucu

SEQ ID NO: 225486 - RNA, 19 nt, Human
ugaaaaaaaacaagcaagg

SEQ ID NO: 225487 - RNA, 19 nt, Human
ugaagagacauuaagauug

SEQ ID NO: 225488 - RNA, 19 nt, Human
ugagaacauaugacugggc

SEQ ID NO: 225489 - RNA, 21 nt, Human
ugaggugugugugaagucacu

SEQ ID NO: 225490 - RNA, 20 nt, Human
ugcaaaaacaggauaacaac

SEQ ID NO: 225491 - RNA, 21 nt, Human
ugcuuauuagaaacaaugguc

SEQ ID NO: 225492 - RNA, 21 nt, Human
ugggagcagcgccgagcaaag

SEQ ID NO: 225493 - RNA, 25 nt, Human
uuacauaacuauguacacggccuuc

SEQ ID NO: 225494 - RNA, 19 nt, Human
uuacauuacacaagaaggc

SEQ ID NO: 225495 - RNA, 26 nt, Human
uucaaaaugugcacugagucuauaca

SEQ ID NO: 225496 - RNA, 23 nt, Human
uuccaguguacauauuccuugca

SEQ ID NO: 225497 - RNA, 22 nt, Human
uucuccguuugaaaaaaaacaa

SEQ ID NO: 225498 - RNA, 24 nt, Human
uugacaccgagcccucccuccccc

SEQ ID NO: 225499 - RNA, 19 nt, Human
uugcaaaaacaggauaaca

SEQ ID NO: 225500 - RNA, 21 nt, Human
uuuuuuuuuuuuuuuuugcaa

SEQ ID NO: 225501 - RNA, 20 nt, Human
aaaagcaagcccacaggccc

SEQ ID NO: 225502 - RNA, 20 nt, Human
aaaagcaugacugaaacccu

SEQ ID NO: 225503 - RNA, 22 nt, Human
aaacagcaaagcagaagggacc

SEQ ID NO: 225504 - RNA, 24 nt, Human
aaacaggcagcguggucauugucc

SEQ ID NO: 225505 - RNA, 19 nt, Human
aaagacacacaaguugugc

SEQ ID NO: 225506 - RNA, 26 nt, Human
aaagagccuuaacuaggaagacaaac

SEQ ID NO: 225507 - RNA, 25 nt, Human
aagacagacgaugccccacugcaga

SEQ ID NO: 225508 - RNA, 19 nt, Human
aagcaaaccaggggcuggg

SEQ ID NO: 225509 - RNA, 24 nt, Human
aagcaugacugaaacccuggggac

SEQ ID NO: 225510 - RNA, 20 nt, Human
aagcugccaaaguucccugc

SEQ ID NO: 225511 - RNA, 24 nt, Human
aagugcuuaaaacaugaagaacaa

SEQ ID NO: 225512 - RNA, 22 nt, Human
acaaacagcuccagacugaagc

SEQ ID NO: 225513 - RNA, 18 nt, Human
acagcccacagcagugcu

SEQ ID NO: 225514 - RNA, 21 nt, Human
acagcuccagacugaagcaga

SEQ ID NO: 225515 - RNA, 28 nt, Human
acauggcacucgccccacaaacagcucc

SEQ ID NO: 225516 - RNA, 20 nt, Human
acccaaugacccccaaaagc

SEQ ID NO: 225517 - RNA, 21 nt, Human
accccgcccaccaaaggcaca

SEQ ID NO: 225518 - RNA, 21 nt, Human
acccugcagcaacacagaguu

SEQ ID NO: 225519 - RNA, 20 nt, Human
acuaggaagacaaacagcaa

SEQ ID NO: 225520 - RNA, 21 nt, Human
agacaaacagcaaagcagaac

SEQ ID NO: 225521 - RNA, 18 nt, Human
agacucaggacauggcag

SEQ ID NO: 225522 - RNA, 19 nt, Human
agagggcaggcagcaauag

SEQ ID NO: 225523 - RNA, 18 nt, Human
agcaaagcagaaccaugc

SEQ ID NO: 225524 - RNA, 20 nt, Human
agcagggcagccccaggccu

SEQ ID NO: 225525 - RNA, 24 nt, Human
aggaagguugagggagcagcaacu

SEQ ID NO: 225526 - RNA, 23 nt, Human
aggcaggagggagaggagcaagg

SEQ ID NO: 225527 - RNA, 24 nt, Human
aggcaggugggaaagacccagggc

SEQ ID NO: 225528 - RNA, 19 nt, Human
aggggcuuuccuccaugug

SEQ ID NO: 225529 - RNA, 24 nt, Human
aggggucagggagcagccugaagc

SEQ ID NO: 225530 - RNA, 26 nt, Human
agggugccccaagcugccaaaguucc

SEQ ID NO: 225531 - RNA, 21 nt, Human
aggucagggccagggcuggga

SEQ ID NO: 225532 - RNA, 20 nt, Human
agguggucaagagcucgaaa

SEQ ID NO: 225533 - RNA, 22 nt, Human
aguggauacuuuucucagauuu

SEQ ID NO: 225534 - RNA, 18 nt, Human
aguugugcacagaaccug

SEQ ID NO: 225535 - RNA, 26 nt, Human
auacuagaagccccuccaaccggagg

SEQ ID NO: 225536 - RNA, 24 nt, Human
aucaccccccauuuuugcuaauuc

SEQ ID NO: 225537 - RNA, 21 nt, Human
auccuugggggauaauaaagu

SEQ ID NO: 225538 - RNA, 19 nt, Human
aucuggacaggcaacaaga

SEQ ID NO: 225539 - RNA, 24 nt, Human
augaaaacaggcaggugggaaaga

SEQ ID NO: 225540 - RNA, 24 nt, Human
caaaagcaagcccacaggcccucu

SEQ ID NO: 225541 - RNA, 22 nt, Human
caaaagcaugacugaaacccug

SEQ ID NO: 225542 - RNA, 21 nt, Human
caaagcagaaccaugccugcu

SEQ ID NO: 225543 - RNA, 18 nt, Human
caaaggacagauacuuca

SEQ ID NO: 225544 - RNA, 26 nt, Human
caaaucauaagcagucccaagcccca

SEQ ID NO: 225545 - RNA, 22 nt, Human
caaggcaagacagacgaugccc

SEQ ID NO: 225546 - RNA, 23 nt, Human
caaggcaagacagacgaugcccc

SEQ ID NO: 225547 - RNA, 22 nt, Human
caaugacccccaaaagcaugac

SEQ ID NO: 225548 - RNA, 22 nt, Human
cacagaaccugaugccuccaaa

SEQ ID NO: 225549 - RNA, 19 nt, Human
cagaagggacaggcugaga

SEQ ID NO: 225550 - RNA, 19 nt, Human
cagacagacaucacccaga

SEQ ID NO: 225551 - RNA, 22 nt, Human
cagcagccccaguugaggcagg

SEQ ID NO: 225552 - RNA, 23 nt, Human
cagccugaagcacacacaucauc

SEQ ID NO: 225553 - RNA, 19 nt, Human
cagcgccccgcccccugcc

SEQ ID NO: 225554 - RNA, 19 nt, Human
cagcuccagacugaagcag

SEQ ID NO: 225555 - RNA, 20 nt, Human
caggaccuggugacaaaccc

SEQ ID NO: 225556 - RNA, 26 nt, Human
caggcccucuccugaagaaguggugg

SEQ ID NO: 225557 - RNA, 19 nt, Human
cagucccaagccccagccu

SEQ ID NO: 225558 - RNA, 21 nt, Human
caguggauacuuuucucagau

SEQ ID NO: 225559 - RNA, 22 nt, Human
cauaagcagucccaagccccag

SEQ ID NO: 225560 - RNA, 23 nt, Human
caucaacaaggacccugggcuuc

SEQ ID NO: 225561 - RNA, 20 nt, Human
caucacccagagggcacgug

SEQ ID NO: 225562 - RNA, 19 nt, Human
ccaaaagcaagcccacagg

SEQ ID NO: 225563 - RNA, 18 nt, Human
ccaagccaggcaagcccc

SEQ ID NO: 225564 - RNA, 21 nt, Human
ccacacauucccaugugacac

SEQ ID NO: 225565 - RNA, 19 nt, Human
ccagacaaugagagugagc

SEQ ID NO: 225566 - RNA, 21 nt, Human
ccaggccugccugcccgccug

SEQ ID NO: 225567 - RNA, 18 nt, Human
ccaggggcugggccaaag

SEQ ID NO: 225568 - RNA, 28 nt, Human
ccauguguggcgcuccucugcuccaucc

SEQ ID NO: 225569 - RNA, 22 nt, Human
cccacaaacagcuccagacuga

SEQ ID NO: 225570 - RNA, 22 nt, Human
ccccaagcugccaaaguucccu

SEQ ID NO: 225571 - RNA, 19 nt, Human
ccccacaaacagcuccaga

SEQ ID NO: 225572 - RNA, 19 nt, Human
ccccaggccugccugcccg

SEQ ID NO: 225573 - RNA, 19 nt, Human
cccccaaaagcaugacuga

SEQ ID NO: 225574 - RNA, 23 nt, Human
cccccaaaagcaugacugaaacc

SEQ ID NO: 225575 - RNA, 18 nt, Human
cccccugccccgccccgc

SEQ ID NO: 225576 - RNA, 23 nt, Human
cccccugccccgccccgcgcccg

SEQ ID NO: 225577 - RNA, 22 nt, Human
ccccgccccgcgcccgccgccc

SEQ ID NO: 225578 - RNA, 20 nt, Human
ccccgcgcccgccgccccaa

SEQ ID NO: 225579 - RNA, 22 nt, Human
ccccugccccgccccgcgcccc

SEQ ID NO: 225580 - RNA, 24 nt, Human
ccccugccccgccccgcgcccgcc

SEQ ID NO: 225581 - RNA, 21 nt, Human
ccccugcgccccacacauucc

SEQ ID NO: 225582 - RNA, 23 nt, Human
ccccugcgccccacacauuccca

SEQ ID NO: 225583 - RNA, 22 nt, Human
cccgcccccugccccgccccgc

SEQ ID NO: 225584 - RNA, 19 nt, Human
cccgccccugcgccccaca

SEQ ID NO: 225585 - RNA, 19 nt, Human
ccgcacccgccccugcgcc

SEQ ID NO: 225586 - RNA, 21 nt, Human
ccgcacccgccccugcgcccc

SEQ ID NO: 225587 - RNA, 19 nt, Human
ccgccccgcgcccgccgcc

SEQ ID NO: 225588 - RNA, 20 nt, Human
ccgccccgcgcccgccgccc

SEQ ID NO: 225589 - RNA, 20 nt, Human
ccgcgcccgccgccccaacc

SEQ ID NO: 225590 - RNA, 19 nt, Human
ccggccgccgccuccccgc

SEQ ID NO: 225591 - RNA, 18 nt, Human
ccuccccgccucaccggg

SEQ ID NO: 225592 - RNA, 21 nt, Human
ccuccuggggguagggugagg

SEQ ID NO: 225593 - RNA, 19 nt, Human
cgccgccgcagcugcgggc

SEQ ID NO: 225594 - RNA, 20 nt, Human
cggccgccgccuccccgccu

SEQ ID NO: 225595 - RNA, 22 nt, Human
cuaauacccaaugacccccaaa

SEQ ID NO: 225596 - RNA, 23 nt, Human
cuaccauguuuucuacaagcaaa

SEQ ID NO: 225597 - RNA, 23 nt, Human
cuagaagccccuccagggacugg

SEQ ID NO: 225598 - RNA, 23 nt, Human
cucacuaagcuguuaaguauccu

SEQ ID NO: 225599 - RNA, 20 nt, Human
cuccauguguggcgcuccuc

SEQ ID NO: 225600 - RNA, 18 nt, Human
cucccucuuccaggcaag

SEQ ID NO: 225601 - RNA, 21 nt, Human
cuccgcacccgccccugcgcc

SEQ ID NO: 225602 - RNA, 22 nt, Human
cucgccccacaaacagcuccag

SEQ ID NO: 225603 - RNA, 22 nt, Human
cugaaacccuggggaccagugg

SEQ ID NO: 225604 - RNA, 18 nt, Human
cugaugccuccaaaggga

SEQ ID NO: 225605 - RNA, 23 nt, Human
cugcucccugcccaacccaccug

SEQ ID NO: 225606 - RNA, 20 nt, Human
cuggccgcgggccgcgccgc

SEQ ID NO: 225607 - RNA, 20 nt, Human
cuuaaaacaugaagaacaag

SEQ ID NO: 225608 - RNA, 19 nt, Human
gacccagggcucccaaaga

SEQ ID NO: 225609 - RNA, 24 nt, Human
gagaagaaacaucaacaaggaccc

SEQ ID NO: 225610 - RNA, 18 nt, Human
gagcagggcagccccagg

SEQ ID NO: 225611 - RNA, 22 nt, Human
gagcucgaaaagcaaaaaggug

SEQ ID NO: 225612 - RNA, 21 nt, Human
gagguggucaagagcucgaaa

SEQ ID NO: 225613 - RNA, 20 nt, Human
gaugagagaguucaggagga

SEQ ID NO: 225614 - RNA, 26 nt, Human
gcaaagcagaaccaugccugcucccu

SEQ ID NO: 225615 - RNA, 19 nt, Human
gcaacaagaauagacaugg

SEQ ID NO: 225616 - RNA, 22 nt, Human
gcacagaaccugaugccuccaa

SEQ ID NO: 225617 - RNA, 23 nt, Human
gcagcagacagacaucacccaga

SEQ ID NO: 225618 - RNA, 24 nt, Human
gcagccugaagcacacacaucauc

SEQ ID NO: 225619 - RNA, 20 nt, Human
gcagcuuaauggauggaugg

SEQ ID NO: 225620 - RNA, 24 nt, Human
gccccacugcagaugagagaguuc

SEQ ID NO: 225621 - RNA, 21 nt, Human
gccccagccuggagggaccua

SEQ ID NO: 225622 - RNA, 22 nt, Human
gccccgcgcccgccgccccaac

SEQ ID NO: 225623 - RNA, 23 nt, Human
gcgaggucuggccgagccggugc

SEQ ID NO: 225624 - RNA, 18 nt, Human
gcgcuccucugcuccauc

SEQ ID NO: 225625 - RNA, 19 nt, Human
gcucuugccuccucacuaa

SEQ ID NO: 225626 - RNA, 22 nt, Human
ggaagacagcaggaagguugag

SEQ ID NO: 225627 - RNA, 20 nt, Human
ggagaggucgacauccaggg

SEQ ID NO: 225628 - RNA, 25 nt, Human
ggagggaaaugaaggggauggggcu

SEQ ID NO: 225629 - RNA, 19 nt, Human
gggcagccccaggccugcc

SEQ ID NO: 225630 - RNA, 25 nt, Human
gggcugggccgggccgaccggccgc

SEQ ID NO: 225631 - RNA, 22 nt, Human
ggugcucucuccgcacccgccc

SEQ ID NO: 225632 - RNA, 21 nt, Human
gucuaguauggcuaaguccug

SEQ ID NO: 225633 - RNA, 24 nt, Human
uaacuaggaagacaaacagcaaag

SEQ ID NO: 225634 - RNA, 20 nt, Human
uaacucacagacaaacaggc

SEQ ID NO: 225635 - RNA, 23 nt, Human
uaaguauccuucuucagcaccuc

SEQ ID NO: 225636 - RNA, 20 nt, Human
uacacauuggagguggucaa

SEQ ID NO: 225637 - RNA, 21 nt, Human
uacccaaugacccccaaaagc

SEQ ID NO: 225638 - RNA, 25 nt, Human
uaggagaagaaacaucaacaaggaa

SEQ ID NO: 225639 - RNA, 18 nt, Human
ucaaacccugcagcaaca

SEQ ID NO: 225640 - RNA, 20 nt, Human
ucaggacauggcagagacug

SEQ ID NO: 225641 - RNA, 21 nt, Human
ucauccaccacuguccacaug

SEQ ID NO: 225642 - RNA, 24 nt, Human
uccaaaaguucaaacccugcagca

SEQ ID NO: 225643 - RNA, 24 nt, Human
uccagacugaagcagacucaggac

SEQ ID NO: 225644 - RNA, 18 nt, Human
uccaggcaagcugacugg

SEQ ID NO: 225645 - RNA, 19 nt, Human
uccaugccaacccuccugg

SEQ ID NO: 225646 - RNA, 21 nt, Human
ucccaaaggcauagugggacc

SEQ ID NO: 225647 - RNA, 25 nt, Human
ucccaagccccagccuggagggacc

SEQ ID NO: 225648 - RNA, 21 nt, Human
ucccagauuacugcaucaagc

SEQ ID NO: 225649 - RNA, 24 nt, Human
ucccaguaauacuagaagccccuc

SEQ ID NO: 225650 - RNA, 19 nt, Human
ucccugcagaugccuuggg

SEQ ID NO: 225651 - RNA, 23 nt, Human
uccgcacccgccccugcgcccca

SEQ ID NO: 225652 - RNA, 24 nt, Human
uccuaaguauaggugucucccaaa

SEQ ID NO: 225653 - RNA, 21 nt, Human
ucgccccacaaacagcuccag

SEQ ID NO: 225654 - RNA, 24 nt, Human
ucuacaagcaaaccaggggcuggg

SEQ ID NO: 225655 - RNA, 18 nt, Human
ucucuccgcacccgcccc

SEQ ID NO: 225656 - RNA, 19 nt, Human
ucugucuugggggaagagu

SEQ ID NO: 225657 - RNA, 23 nt, Human
ugaagaagugguggucccagagg

SEQ ID NO: 225658 - RNA, 21 nt, Human
ugaauaaagcccagaggaauc

SEQ ID NO: 225659 - RNA, 20 nt, Human
ugacccccaaaagcaugacu

SEQ ID NO: 225660 - RNA, 18 nt, Human
ugagagaguucaggagga

SEQ ID NO: 225661 - RNA, 23 nt, Human
ugagggagcagcaacuuggccag

SEQ ID NO: 225662 - RNA, 23 nt, Human
ugccaaaguucccugcagaugcc

SEQ ID NO: 225663 - RNA, 19 nt, Human
ugcccaacccaccugcaac

SEQ ID NO: 225664 - RNA, 19 nt, Human
ugccccaagcugccaaagu

SEQ ID NO: 225665 - RNA, 21 nt, Human
ugccugaggccuuccaaaagc

SEQ ID NO: 225666 - RNA, 19 nt, Human
ugcucucaggggaaugggu

SEQ ID NO: 225667 - RNA, 21 nt, Human
ugcucugucuugggggaagag

SEQ ID NO: 225668 - RNA, 18 nt, Human
uggagggaaaugaagggg

SEQ ID NO: 225669 - RNA, 19 nt, Human
uggcacucgccccacaaac

SEQ ID NO: 225670 - RNA, 21 nt, Human
uggcaucuggacaggcaacaa

SEQ ID NO: 225671 - RNA, 25 nt, Human
uggcuaggagaagaaacaucaacaa

SEQ ID NO: 225672 - RNA, 22 nt, Human
ugggaaagacccagggcuccca

SEQ ID NO: 225673 - RNA, 20 nt, Human
ugggguugagggaggggaag

SEQ ID NO: 225674 - RNA, 25 nt, Human
uguuuuauucuucauaaagugcuua

SEQ ID NO: 225675 - RNA, 19 nt, Human
uucaaacccugcagcaaca

SEQ ID NO: 225676 - RNA, 18 nt, Human
uucauaaagugcuuaaaa

SEQ ID NO: 225677 - RNA, 21 nt, Human
uuccagcagccccaguugagg

SEQ ID NO: 225678 - RNA, 25 nt, Human
uugaccccgcccaccaaaggcacau

SEQ ID NO: 225679 - RNA, 21 nt, Human
uuugcuaauucagggugcccc

SEQ ID NO: 225680 - RNA, 18 nt, Human
aaacagacuugcucuccg

SEQ ID NO: 225681 - RNA, 23 nt, Human
aaggaaucacagauuugaugaaa

SEQ ID NO: 225682 - RNA, 19 nt, Human
aagggccucugggguugac

SEQ ID NO: 225683 - RNA, 21 nt, Human
aauuggcaguauuuuuucuua

SEQ ID NO: 225684 - RNA, 24 nt, Human
auuggcaguauuuuuucuuaauga

SEQ ID NO: 225685 - RNA, 19 nt, Human
cacuuugggaaaacuggua

SEQ ID NO: 225686 - RNA, 19 nt, Human
caggaagugagccugcuuc

SEQ ID NO: 225687 - RNA, 20 nt, Human
ccacuggucuuauaauuuca

SEQ ID NO: 225688 - RNA, 20 nt, Human
ccaugugccagguaaaaaaa

SEQ ID NO: 225689 - RNA, 21 nt, Human
cugaacacuucauucaacacc

SEQ ID NO: 225690 - RNA, 19 nt, Human
ugaaucuuuccuaccaagu

SEQ ID NO: 225691 - RNA, 23 nt, Human
ugaaucuuuccuaccaaguuguu

SEQ ID NO: 225692 - RNA, 23 nt, Human
ugauccuuauccaucugaacacu

SEQ ID NO: 225693 - RNA, 24 nt, Human
ugcuaccagaacacuuugggaaaa

SEQ ID NO: 225694 - RNA, 27 nt, Human
uuaauuggcaguauuuuuucuuaauga

SEQ ID NO: 225695 - RNA, 23 nt, Human
uuuuuuuuuuuuuuuuugauaug

SEQ ID NO: 225696 - RNA, 27 nt, Human
uuuuuuuuuuuuuuuuuuuuuuugggg

SEQ ID NO: 225697 - RNA, 21 nt, Human
aaaaaagaaaagaguacagag

SEQ ID NO: 225698 - RNA, 24 nt, Human
aaaaagagacagaggggaaaaaaa

SEQ ID NO: 225699 - RNA, 23 nt, Human
aaacagagaaaagaaaaaaaaag

SEQ ID NO: 225700 - RNA, 23 nt, Human
aacuguaccaccaccaucacuaa

SEQ ID NO: 225701 - RNA, 26 nt, Human
aagaaaaaaaaaguauguugucuuga

SEQ ID NO: 225702 - RNA, 24 nt, Human
aagcagcuggaauuacaggcaugu

SEQ ID NO: 225703 - RNA, 25 nt, Human
aagcagcuggaauuacaggcaugug

SEQ ID NO: 225704 - RNA, 19 nt, Human
aaguaguuaagccacagga

SEQ ID NO: 225705 - RNA, 23 nt, Human
aagugcuuggauuacaggcguga

SEQ ID NO: 225706 - RNA, 22 nt, Human
aaugccaaaagcagaacugaga

SEQ ID NO: 225707 - RNA, 24 nt, Human
aauuacaggcaugugccaccauac

SEQ ID NO: 225708 - RNA, 20 nt, Human
aauuccaacuguaccaccac

SEQ ID NO: 225709 - RNA, 22 nt, Human
acaaacagagaaaagaaaaaaa

SEQ ID NO: 225710 - RNA, 23 nt, Human
acagagaaaagaaaaaaaaagua

SEQ ID NO: 225711 - RNA, 19 nt, Human
acauuggccaggcuggucu

SEQ ID NO: 225712 - RNA, 20 nt, Human
accagaaagugaaacacucc

SEQ ID NO: 225713 - RNA, 22 nt, Human
accaucacuaaugccaaaagca

SEQ ID NO: 225714 - RNA, 19 nt, Human
acccaggcuggagugcaau

SEQ ID NO: 225715 - RNA, 20 nt, Human
acgggguuucaucacauugg

SEQ ID NO: 225716 - RNA, 24 nt, Human
acgggguuucaucacauuggccag

SEQ ID NO: 225717 - RNA, 21 nt, Human
acugucccaggcccacugaaa

SEQ ID NO: 225718 - RNA, 23 nt, Human
agagaaaaaacagugggcaggaa

SEQ ID NO: 225719 - RNA, 19 nt, Human
agcaucccaccgccugcug

SEQ ID NO: 225720 - RNA, 23 nt, Human
aggcgugagccacugugcccggc

SEQ ID NO: 225721 - RNA, 18 nt, Human
agguggucaugaugggga

SEQ ID NO: 225722 - RNA, 24 nt, Human
agugcaauagcgcgaucuuggcuc

SEQ ID NO: 225723 - RNA, 18 nt, Human
auccuuggcauuucccuu

SEQ ID NO: 225724 - RNA, 18 nt, Human
augccguaaaaagcccca

SEQ ID NO: 225725 - RNA, 22 nt, Human
augugugugugugugugugugu

SEQ ID NO: 225726 - RNA, 22 nt, Human
augugugugugugugugugugu

SEQ ID NO: 225727 - RNA, 25 nt, Human
caaaaagagacagaggggaaaaaaa

SEQ ID NO: 225728 - RNA, 20 nt, Human
caaaagcagaacugagacac

SEQ ID NO: 225729 - RNA, 19 nt, Human
caaaaggaagccaaaguac

SEQ ID NO: 225730 - RNA, 25 nt, Human
caaaaggaagccaaaguacacccac

SEQ ID NO: 225731 - RNA, 28 nt, Human
caagcaguucuccugccucaggcuccca

SEQ ID NO: 225732 - RNA, 18 nt, Human
cacauuggccaggcuggu

SEQ ID NO: 225733 - RNA, 20 nt, Human
cacauuggccaggcuggucu

SEQ ID NO: 225734 - RNA, 24 nt, Human
cacauuggccaggcuggucuugaa

SEQ ID NO: 225735 - RNA, 19 nt, Human
caccaccaucacuaaugcc

SEQ ID NO: 225736 - RNA, 24 nt, Human
cacccacaauaauuuggagauuca

SEQ ID NO: 225737 - RNA, 24 nt, Human
cacggccaaacccugggguccccu

SEQ ID NO: 225738 - RNA, 21 nt, Human
cacugcaaccucugccuccug

SEQ ID NO: 225739 - RNA, 23 nt, Human
cacugcaaccucugccuccuggg

SEQ ID NO: 225740 - RNA, 19 nt, Human
cagagguggucaugauggg

SEQ ID NO: 225741 - RNA, 19 nt, Human
cagcacaagaaaaaagaaa

SEQ ID NO: 225742 - RNA, 23 nt, Human
cagccaaguuuccucagccgcgc

SEQ ID NO: 225743 - RNA, 27 nt, Human
caucacauuggccaggcuggucuugaa

SEQ ID NO: 225744 - RNA, 23 nt, Human
caucacggcccacggccaaaccc

SEQ ID NO: 225745 - RNA, 22 nt, Human
cauuggccaggcuggucuugaa

SEQ ID NO: 225746 - RNA, 21 nt, Human
cauuucccuucacacaaaguc

SEQ ID NO: 225747 - RNA, 26 nt, Human
cauuucccuucacacaaagucaagag

SEQ ID NO: 225748 - RNA, 19 nt, Human
ccaaaagcagaacugagac

SEQ ID NO: 225749 - RNA, 24 nt, Human
ccaagcagcuggaauuacaggcau

SEQ ID NO: 225750 - RNA, 23 nt, Human
ccaagugcuuggauuacaggcgu

SEQ ID NO: 225751 - RNA, 19 nt, Human
cccaacuuugacucagaau

SEQ ID NO: 225752 - RNA, 24 nt, Human
cccaagugcuuggauuacaggcgu

SEQ ID NO: 225753 - RNA, 21 nt, Human
ccgccugcugccaucacggcc

SEQ ID NO: 225754 - RNA, 20 nt, Human
ccuagaaaagagcuucccuc

SEQ ID NO: 225755 - RNA, 24 nt, Human
ccucucgucuccucucuaccagua

SEQ ID NO: 225756 - RNA, 19 nt, Human
ccucugccuccuggguuca

SEQ ID NO: 225757 - RNA, 24 nt, Human
ccucugccuccuggguucaagcag

SEQ ID NO: 225758 - RNA, 20 nt, Human
ccugggguccccugaagucc

SEQ ID NO: 225759 - RNA, 23 nt, Human
ccuggguucaagcaguucuccug

SEQ ID NO: 225760 - RNA, 29 nt, Human
cgacuaauuuuguauuuuuaguagagacg

SEQ ID NO: 225761 - RNA, 20 nt, Human
cgcggcgcgcgggggcgcgg

SEQ ID NO: 225762 - RNA, 20 nt, Human
cgcgggggcgcggggggccg

SEQ ID NO: 225763 - RNA, 21 nt, Human
cggccaaacccuggggucccc

SEQ ID NO: 225764 - RNA, 19 nt, Human
cgggagagcuagaaaagug

SEQ ID NO: 225765 - RNA, 24 nt, Human
cgggguuucaucacauuggccagg

SEQ ID NO: 225766 - RNA, 24 nt, Human
cucacugcaaccucugccuccugg

SEQ ID NO: 225767 - RNA, 24 nt, Human
cuccugaucucgugaucugcccgc

SEQ ID NO: 225768 - RNA, 21 nt, Human
cuccuggguucaagcaguucu

SEQ ID NO: 225769 - RNA, 19 nt, Human
cucgugaucugcccgccuc

SEQ ID NO: 225770 - RNA, 20 nt, Human
cucugucacccaggcuggag

SEQ ID NO: 225771 - RNA, 19 nt, Human
cugcaaccucugccuccug

SEQ ID NO: 225772 - RNA, 23 nt, Human
cugcaaccucugccuccuggguu

SEQ ID NO: 225773 - RNA, 24 nt, Human
cugcaaccucugccuccuggguuc

SEQ ID NO: 225774 - RNA, 24 nt, Human
cugcccgccucggccuccccaagu

SEQ ID NO: 225775 - RNA, 24 nt, Human
cugggguccccugaaguccaccag

SEQ ID NO: 225776 - RNA, 18 nt, Human
cugucacccaggcuggag

SEQ ID NO: 225777 - RNA, 20 nt, Human
cuuggauuacaggcgugagc

SEQ ID NO: 225778 - RNA, 24 nt, Human
gaaguuacagccaaguuuccucag

SEQ ID NO: 225779 - RNA, 20 nt, Human
gagacgggguuucaucacau

SEQ ID NO: 225780 - RNA, 24 nt, Human
gagacgggguuucaucacauuggc

SEQ ID NO: 225781 - RNA, 24 nt, Human
gaucucgugaucugcccgccucgg

SEQ ID NO: 225782 - RNA, 18 nt, Human
gauuacaggcgugagcca

SEQ ID NO: 225783 - RNA, 19 nt, Human
gauuacaggcgugagccac

SEQ ID NO: 225784 - RNA, 21 nt, Human
gauuacaggcgugagccacug

SEQ ID NO: 225785 - RNA, 22 nt, Human
gcaguccagaaauaaagaauca

SEQ ID NO: 225786 - RNA, 22 nt, Human
gcaucccaccgccugcugccau

SEQ ID NO: 225787 - RNA, 22 nt, Human
gccacccaagaaaaauuaaagu

SEQ ID NO: 225788 - RNA, 19 nt, Human
gccgcgcugcagaccgacg

SEQ ID NO: 225789 - RNA, 18 nt, Human
gcgcgggggcgcgggggg

SEQ ID NO: 225790 - RNA, 21 nt, Human
gcucacugcaaccucugccuc

SEQ ID NO: 225791 - RNA, 27 nt, Human
gcucugucacccaggcuggagugcaau

SEQ ID NO: 225792 - RNA, 24 nt, Human
ggaaaugcagggauuagccauggc

SEQ ID NO: 225793 - RNA, 22 nt, Human
ggaagccaaaguacacccacaa

SEQ ID NO: 225794 - RNA, 22 nt, Human
ggaagccaaaguacacccacaa

SEQ ID NO: 225795 - RNA, 20 nt, Human
ggaauccugcugugaggagc

SEQ ID NO: 225796 - RNA, 20 nt, Human
ggauuacaggcgugagccac

SEQ ID NO: 225797 - RNA, 20 nt, Human
ggauuacaggcgugagccac

SEQ ID NO: 225798 - RNA, 24 nt, Human
ggcuggucuugaacuccugaucuc

SEQ ID NO: 225799 - RNA, 23 nt, Human
gggguuucaucacauuggccagg

SEQ ID NO: 225800 - RNA, 24 nt, Human
gucuugcucugucacccaggcugg

SEQ ID NO: 225801 - RNA, 24 nt, Human
gugaucugcccgccucggccuccc

SEQ ID NO: 225802 - RNA, 21 nt, Human
gugugugugugugugugugug

SEQ ID NO: 225803 - RNA, 24 nt, Human
uaagccacccaagaaaaauuaaag

SEQ ID NO: 225804 - RNA, 23 nt, Human
uacaggcaugugccaccauaccc

SEQ ID NO: 225805 - RNA, 23 nt, Human
uacaggcgugagccacugugccc

SEQ ID NO: 225806 - RNA, 23 nt, Human
uacaggcgugagccacugugccc

SEQ ID NO: 225807 - RNA, 22 nt, Human
uaccaccaccaucacuaaugcc

SEQ ID NO: 225808 - RNA, 23 nt, Human
uaguagagacgggguuucaucac

SEQ ID NO: 225809 - RNA, 24 nt, Human
uaguagagacgggguuucaucaca

SEQ ID NO: 225810 - RNA, 24 nt, Human
uaucaccagaaagugaaacacucc

SEQ ID NO: 225811 - RNA, 18 nt, Human
uaugugugugugugugug

SEQ ID NO: 225812 - RNA, 23 nt, Human
uaugugugugugugugugugugu

SEQ ID NO: 225813 - RNA, 24 nt, Human
uaugugugugugugugugugugug

SEQ ID NO: 225814 - RNA, 18 nt, Human
ucacccaggcuggagugc

SEQ ID NO: 225815 - RNA, 22 nt, Human
ucacuaccaccuuuucccugaa

SEQ ID NO: 225816 - RNA, 24 nt, Human
ucacugcaaccucugccuccuggg

SEQ ID NO: 225817 - RNA, 25 nt, Human
ucacugcaaccucugccuccugggu

SEQ ID NO: 225818 - RNA, 26 nt, Human
ucacugcaaccucugccuccuggguu

SEQ ID NO: 225819 - RNA, 21 nt, Human
uccaacuguaccaccaccauc

SEQ ID NO: 225820 - RNA, 21 nt, Human
uccauaauuaugccguaaaaa

SEQ ID NO: 225821 - RNA, 24 nt, Human
uccccaagugcuuggauuacaggc

SEQ ID NO: 225822 - RNA, 20 nt, Human
uccccugaaguccaccagaa

SEQ ID NO: 225823 - RNA, 23 nt, Human
uccccugaaguccaccagaagca

SEQ ID NO: 225824 - RNA, 21 nt, Human
uccugcugugaggagcuacaa

SEQ ID NO: 225825 - RNA, 19 nt, Human
uccuggguucaagcaguuc

SEQ ID NO: 225826 - RNA, 21 nt, Human
uccuggguucaagcaguucuc

SEQ ID NO: 225827 - RNA, 24 nt, Human
uccuggguucaagcaguucuccug

SEQ ID NO: 225828 - RNA, 23 nt, Human
ucgaaggcgagugagggcacucg

SEQ ID NO: 225829 - RNA, 24 nt, Human
ucuaccaguaaauaaaaauuccau

SEQ ID NO: 225830 - RNA, 23 nt, Human
ucucagguucuaaaaaggccaga

SEQ ID NO: 225831 - RNA, 23 nt, Human
ucuccugccucaggcucccaagc

SEQ ID NO: 225832 - RNA, 22 nt, Human
ucucucgaaggcgagugagggc

SEQ ID NO: 225833 - RNA, 24 nt, Human
ucugucacccaggcuggagugcaa

SEQ ID NO: 225834 - RNA, 19 nt, Human
ucuugaacuccugaucucg

SEQ ID NO: 225835 - RNA, 23 nt, Human
ucuugcucugucacccaggcugg

SEQ ID NO: 225836 - RNA, 24 nt, Human
ucuugcucugucacccaggcugga

SEQ ID NO: 225837 - RNA, 22 nt, Human
ugaaaaacaaaggugccuggug

SEQ ID NO: 225838 - RNA, 20 nt, Human
ugaaaaagccucucgucucc

SEQ ID NO: 225839 - RNA, 23 nt, Human
ugacagcagcacagacaucagag

SEQ ID NO: 225840 - RNA, 22 nt, Human
ugaggcagagucuugcucuguc

SEQ ID NO: 225841 - RNA, 20 nt, Human
ugagggcacucggcagaguu

SEQ ID NO: 225842 - RNA, 21 nt, Human
ugccucaggcucccaagcagc

SEQ ID NO: 225843 - RNA, 24 nt, Human
ugccucaggcucccaagcagcugg

SEQ ID NO: 225844 - RNA, 18 nt, Human
ugccuggugacagcagca

SEQ ID NO: 225845 - RNA, 18 nt, Human
uggaauuacaggcaugug

SEQ ID NO: 225846 - RNA, 21 nt, Human
uggaauuacaggcaugugcca

SEQ ID NO: 225847 - RNA, 22 nt, Human
uggaauuacaggcaugugccac

SEQ ID NO: 225848 - RNA, 24 nt, Human
uggaauuacaggcaugugccacca

SEQ ID NO: 225849 - RNA, 23 nt, Human
uggagugcaauagcgcgaucuug

SEQ ID NO: 225850 - RNA, 24 nt, Human
uggagugcaauagcgcgaucuugg

SEQ ID NO: 225851 - RNA, 20 nt, Human
uggauuacaggcgugagcca

SEQ ID NO: 225852 - RNA, 23 nt, Human
uggauuacaggcgugagccacug

SEQ ID NO: 225853 - RNA, 24 nt, Human
uggccaggcuggucuugaacuccu

SEQ ID NO: 225854 - RNA, 21 nt, Human
uguauuuuuaguagagacggg

SEQ ID NO: 225855 - RNA, 20 nt, Human
ugucacccaggcuggagugc

SEQ ID NO: 225856 - RNA, 22 nt, Human
ugucacccaggcuggagugcaa

SEQ ID NO: 225857 - RNA, 19 nt, Human
ugucuccucccuuagucuc

SEQ ID NO: 225858 - RNA, 20 nt, Human
ugucuugaaaaacaaagguu

SEQ ID NO: 225859 - RNA, 21 nt, Human
uguguaugugugugugugugu

SEQ ID NO: 225860 - RNA, 26 nt, Human
uguguaugugugugugugugugugug

SEQ ID NO: 225861 - RNA, 18 nt, Human
ugugugugugugugugug

SEQ ID NO: 225862 - RNA, 18 nt, Human
ugugugugugugugugug

SEQ ID NO: 225863 - RNA, 18 nt, Human
ugugugugugugugugug

SEQ ID NO: 225864 - RNA, 18 nt, Human
ugugugugugugugugug

SEQ ID NO: 225865 - RNA, 18 nt, Human
ugugugugugugugugug

SEQ ID NO: 225866 - RNA, 18 nt, Human
ugugugugugugugugug

SEQ ID NO: 225867 - RNA, 18 nt, Human
ugugugugugugugugug

SEQ ID NO: 225868 - RNA, 18 nt, Human
ugugugugugugugugug

SEQ ID NO: 225869 - RNA, 21 nt, Human
ugugugugugugugugugugu

SEQ ID NO: 225870 - RNA, 21 nt, Human
ugugugugugugugugugugu

SEQ ID NO: 225871 - RNA, 21 nt, Human
ugugugugugugugugugugu

SEQ ID NO: 225872 - RNA, 21 nt, Human
ugugugugugugugugugugu

SEQ ID NO: 225873 - RNA, 21 nt, Human
ugugugugugugugugugugu

SEQ ID NO: 225874 - RNA, 21 nt, Human
ugugugugugugugugugugu

SEQ ID NO: 225875 - RNA, 21 nt, Human
ugugugugugugugugugugu

SEQ ID NO: 225876 - RNA, 21 nt, Human
ugugugugugugugugugugu

SEQ ID NO: 225877 - RNA, 21 nt, Human
ugugugugugugugugugugu

SEQ ID NO: 225878 - RNA, 21 nt, Human
ugugugugugugugugugugu

SEQ ID NO: 225879 - RNA, 21 nt, Human
ugugugugugugugugugugu

SEQ ID NO: 225880 - RNA, 22 nt, Human
ugugugugugugugugugugug

SEQ ID NO: 225881 - RNA, 22 nt, Human
ugugugugugugugugugugug

SEQ ID NO: 225882 - RNA, 22 nt, Human
ugugugugugugugugugugug

SEQ ID NO: 225883 - RNA, 22 nt, Human
ugugugugugugugugugugug

SEQ ID NO: 225884 - RNA, 18 nt, Human
uuaguagagacgggguuu

SEQ ID NO: 225885 - RNA, 20 nt, Human
uuaguagagacgggguuuca

SEQ ID NO: 225886 - RNA, 21 nt, Human
uuaguagagacgggguuucau

SEQ ID NO: 225887 - RNA, 24 nt, Human
uuaguagagacgggguuucaucac

SEQ ID NO: 225888 - RNA, 25 nt, Human
uuaguagagacgggguuucaucaca

SEQ ID NO: 225889 - RNA, 21 nt, Human
uucaagcaguucuccugccuc

SEQ ID NO: 225890 - RNA, 25 nt, Human
uucacacaaagucaagagcagccac

SEQ ID NO: 225891 - RNA, 25 nt, Human
uuccauaauuaugccguaaaaagcc

SEQ ID NO: 225892 - RNA, 19 nt, Human
uuccucagccgcgcugcag

SEQ ID NO: 225893 - RNA, 23 nt, Human
uucuccugccucaggcucccaag

SEQ ID NO: 225894 - RNA, 20 nt, Human
uucuuuugaaguuacagcca

SEQ ID NO: 225895 - RNA, 24 nt, Human
uugcucugucacccaggcuggagu

SEQ ID NO: 225896 - RNA, 22 nt, Human
uuggauuacaggcgugagccac

SEQ ID NO: 225897 - RNA, 24 nt, Human
uuggauuacaggcgugagccacug

SEQ ID NO: 225898 - RNA, 23 nt, Human
uuguauuuuuaguagagacgggg

SEQ ID NO: 225899 - RNA, 19 nt, Human
uugucuguguaugugugug

SEQ ID NO: 225900 - RNA, 19 nt, Human
uuuuguauuuuuaguagag

SEQ ID NO: 225901 - RNA, 20 nt, Human
uuuuguauuuuuaguagaga

SEQ ID NO: 225902 - RNA, 23 nt, Human
uuuuuaguagagacgggguuuca

SEQ ID NO: 225903 - RNA, 19 nt, Human
aaacugacaaggaucucca

SEQ ID NO: 225904 - RNA, 28 nt, Human
aaagaaaaugcuaagaaaaauuauaauc

SEQ ID NO: 225905 - RNA, 24 nt, Human
aaaguaaaucacuauuuguguaaa

SEQ ID NO: 225906 - RNA, 24 nt, Human
aaauagaaaauaaaacugacaagg

SEQ ID NO: 225907 - RNA, 22 nt, Human
aaggcacaaagcaggaaaagug

SEQ ID NO: 225908 - RNA, 20 nt, Human
acaaagcaggaaaagugagc

SEQ ID NO: 225909 - RNA, 21 nt, Human
acugaguuaaaaggaaaugcu

SEQ ID NO: 225910 - RNA, 18 nt, Human
caaauggcccuuacagcu

SEQ ID NO: 225911 - RNA, 20 nt, Human
caaauggcccuuacagcuga

SEQ ID NO: 225912 - RNA, 22 nt, Human
cgcaaaggauuuaaaacugcuc

SEQ ID NO: 225913 - RNA, 22 nt, Human
cugcaaaauuaacuagucacac

SEQ ID NO: 225914 - RNA, 19 nt, Human
cuuaaucaaggcacaaagc

SEQ ID NO: 225915 - RNA, 19 nt, Human
gcacagcugucucuaggag

SEQ ID NO: 225916 - RNA, 25 nt, Human
ggcacaaagcaggaaaagugagcac

SEQ ID NO: 225917 - RNA, 21 nt, Human
guccagcagcuauauccacug

SEQ ID NO: 225918 - RNA, 25 nt, Human
uacaaugacaaggaauguaauuuuu

SEQ ID NO: 225919 - RNA, 21 nt, Human
ucaaauggcccuuacagcuga

SEQ ID NO: 225920 - RNA, 23 nt, Human
ucaaugauauggcacauccugca

SEQ ID NO: 225921 - RNA, 24 nt, Human
ucaguagccuuaaucaaggcacaa

SEQ ID NO: 225922 - RNA, 25 nt, Human
uccacagacacuuaaaauuccaaac

SEQ ID NO: 225923 - RNA, 21 nt, Human
uccuuuagcagcaaaugccgg

SEQ ID NO: 225924 - RNA, 25 nt, Human
ugaaggacaaaacauuuuccacaga

SEQ ID NO: 225925 - RNA, 18 nt, Human
ugacaaggaucuccaaaa

SEQ ID NO: 225926 - RNA, 20 nt, Human
ugacaaggaucuccaaaagu

SEQ ID NO: 225927 - RNA, 26 nt, Human
ugaugagguaugcaugcacgcagugu

SEQ ID NO: 225928 - RNA, 18 nt, Human
uggcucuggauugagucc

SEQ ID NO: 225929 - RNA, 24 nt, Human
uguguaaaugaaacaaaaugcuuc

SEQ ID NO: 225930 - RNA, 20 nt, Human
uuuacaaugacaaggaaugu

SEQ ID NO: 225931 - RNA, 23 nt, Human
uuuuccacagacacuuaaaauuc

SEQ ID NO: 225932 - RNA, 24 nt, Human
uuuuuuuuuuuuuuuuuucuucag

SEQ ID NO: 225933 - RNA, 22 nt, Human
aaaaaggagauaagccgcugga

SEQ ID NO: 225934 - RNA, 24 nt, Human
aaagugccaggauuacaggcauga

SEQ ID NO: 225935 - RNA, 18 nt, Human
aaaugcuguuuccgcccu

SEQ ID NO: 225936 - RNA, 18 nt, Human
aacaggcaaauucuuagu

SEQ ID NO: 225937 - RNA, 24 nt, Human
aaccucaggugguccacccaccuc

SEQ ID NO: 225938 - RNA, 20 nt, Human
aaccuccgccucccaggccc

SEQ ID NO: 225939 - RNA, 21 nt, Human
aagaaggguuacuaaaaagga

SEQ ID NO: 225940 - RNA, 18 nt, Human
aagaaguaaaguuugauc

SEQ ID NO: 225941 - RNA, 23 nt, Human
aagcagaaauuggaagaggggac

SEQ ID NO: 225942 - RNA, 19 nt, Human
aaggugcaccaguguggca

SEQ ID NO: 225943 - RNA, 21 nt, Human
acaaaacaggcccacugcaga

SEQ ID NO: 225944 - RNA, 23 nt, Human
acaagaacaggcaccuauucaag

SEQ ID NO: 225945 - RNA, 21 nt, Human
acagacaaaaggcaacaacug

SEQ ID NO: 225946 - RNA, 19 nt, Human
acauugcacuuaguaccuc

SEQ ID NO: 225947 - RNA, 24 nt, Human
accauguuggccaggcuggucucg

SEQ ID NO: 225948 - RNA, 25 nt, Human
acccaccucggccucccaaagugcc

SEQ ID NO: 225949 - RNA, 23 nt, Human
accucggccucccaaagugccag

SEQ ID NO: 225950 - RNA, 21 nt, Human
accugagucgccaccuuccug

SEQ ID NO: 225951 - RNA, 18 nt, Human
acgggguuccaccauguu

SEQ ID NO: 225952 - RNA, 24 nt, Human
acgggguuccaccauguuggccag

SEQ ID NO: 225953 - RNA, 19 nt, Human
acuaaaaaggagauaagcc

SEQ ID NO: 225954 - RNA, 18 nt, Human
acucugucacccaggcug

SEQ ID NO: 225955 - RNA, 24 nt, Human
acucugucacccaggcuggaaugc

SEQ ID NO: 225956 - RNA, 25 nt, Human
agaaagggagcacaggggaaggggg

SEQ ID NO: 225957 - RNA, 21 nt, Human
agaagaaggcaagggggaagg

SEQ ID NO: 225958 - RNA, 21 nt, Human
agaagugucaauucaaaaugu

SEQ ID NO: 225959 - RNA, 23 nt, Human
agaggcaugcaccaccacaccag

SEQ ID NO: 225960 - RNA, 24 nt, Human
agccgcuggacaacagaucuccau

SEQ ID NO: 225961 - RNA, 24 nt, Human
agcgggcggcggcggcggcggcgg

SEQ ID NO: 225962 - RNA, 23 nt, Human
aggacuagaggcaugcaccacca

SEQ ID NO: 225963 - RNA, 23 nt, Human
aggauuacaggcaugagucacca

SEQ ID NO: 225964 - RNA, 24 nt, Human
aggcaagggggaaggaagcaaggu

SEQ ID NO: 225965 - RNA, 19 nt, Human
agggagccacaguucuagg

SEQ ID NO: 225966 - RNA, 20 nt, Human
aggggaagggggagaagaag

SEQ ID NO: 225967 - RNA, 24 nt, Human
agggggaaggaagcaaggucacug

SEQ ID NO: 225968 - RNA, 19 nt, Human
agggggagaagaaggcaag

SEQ ID NO: 225969 - RNA, 24 nt, Human
aggugguccacccaccucggccuc

SEQ ID NO: 225970 - RNA, 22 nt, Human
aguacagacgggguuccaccau

SEQ ID NO: 225971 - RNA, 23 nt, Human
auaaaaugaagcucugaaucuca

SEQ ID NO: 225972 - RNA, 25 nt, Human
aucacacagcuauucuucaccagca

SEQ ID NO: 225973 - RNA, 19 nt, Human
aucucaagaaaauaugagg

SEQ ID NO: 225974 - RNA, 18 nt, Human
aucuguuaugucuucccu

SEQ ID NO: 225975 - RNA, 26 nt, Human
augcaccaccacaccaggcaaaccuu

SEQ ID NO: 225976 - RNA, 20 nt, Human
auuguucaacaagaagggag

SEQ ID NO: 225977 - RNA, 20 nt, Human
caaaacaggcccacugcaga

SEQ ID NO: 225978 - RNA, 24 nt, Human
caaagugccaggauuacaggcaug

SEQ ID NO: 225979 - RNA, 23 nt, Human
caaccuccgccucccaggcccaa

SEQ ID NO: 225980 - RNA, 24 nt, Human
caaccuccgccucccaggcccaag

SEQ ID NO: 225981 - RNA, 28 nt, Human
caagcgauucucgugccucagccucccg

SEQ ID NO: 225982 - RNA, 24 nt, Human
caaggaacuaaaacuuacaaacca

SEQ ID NO: 225983 - RNA, 22 nt, Human
caauacagacaaaaggcaacaa

SEQ ID NO: 225984 - RNA, 24 nt, Human
caauacagacaaaaggcaacaacc

SEQ ID NO: 225985 - RNA, 18 nt, Human
caccacaccaggcaaacc

SEQ ID NO: 225986 - RNA, 21 nt, Human
caccauguuggccaggcuggu

SEQ ID NO: 225987 - RNA, 24 nt, Human
caccauguuggccaggcuggucuc

SEQ ID NO: 225988 - RNA, 22 nt, Human
cacccaccucggccucccaaag

SEQ ID NO: 225989 - RNA, 23 nt, Human
cacccaccucggccucccaaagu

SEQ ID NO: 225990 - RNA, 20 nt, Human
cacguguaaccagcagaaaa

SEQ ID NO: 225991 - RNA, 23 nt, Human
cacucugucacccaggcuggaau

SEQ ID NO: 225992 - RNA, 24 nt, Human
cacucugucacccaggcuggaaug

SEQ ID NO: 225993 - RNA, 21 nt, Human
cacugagcaggucccaaaggc

SEQ ID NO: 225994 - RNA, 21 nt, Human
cacugcaaccuccgccuccca

SEQ ID NO: 225995 - RNA, 21 nt, Human
cagaaugcuaagacauugcag

SEQ ID NO: 225996 - RNA, 22 nt, Human
cagcaucuuaggcucugccugg

SEQ ID NO: 225997 - RNA, 26 nt, Human
cagcaucuuaggcucugccuggaggg

SEQ ID NO: 225998 - RNA, 19 nt, Human
cagcuccuucccucaacuc

SEQ ID NO: 225999 - RNA, 24 nt, Human
caggauuacaggcaugagucacca

SEQ ID NO: 226000 - RNA, 18 nt, Human
caggauuccuuugcuucc

SEQ ID NO: 226001 - RNA, 22 nt, Human
caggggaagggggagaagaagg

SEQ ID NO: 226002 - RNA, 24 nt, Human
caugcaccaccacaccaggcaaac

SEQ ID NO: 226003 - RNA, 28 nt, Human
caugcaccaccacaccaggcaaaccuuu

SEQ ID NO: 226004 - RNA, 24 nt, Human
cauguuggccaggcuggucucgaa

SEQ ID NO: 226005 - RNA, 24 nt, Human
ccaaagugccaggauuacaggcau

SEQ ID NO: 226006 - RNA, 22 nt, Human
cccacacaaggauguucagagu

SEQ ID NO: 226007 - RNA, 19 nt, Human
cccacacacacuuaugagc

SEQ ID NO: 226008 - RNA, 22 nt, Human
cccacaugggaaugcuuccagc

SEQ ID NO: 226009 - RNA, 20 nt, Human
cccugggaacugagcagcug

SEQ ID NO: 226010 - RNA, 24 nt, Human
ccgccucccaggcccaagcgauuc

SEQ ID NO: 226011 - RNA, 24 nt, Human
ccuaaccucaggugguccacccac

SEQ ID NO: 226012 - RNA, 21 nt, Human
cgagccgaaagcgggcggcgg

SEQ ID NO: 226013 - RNA, 20 nt, Human
cgggcggcggcggcggcggc

SEQ ID NO: 226014 - RNA, 24 nt, Human
cgggguuccaccauguuggccagg

SEQ ID NO: 226015 - RNA, 26 nt, Human
cuaaaacuuacaaaccaaacuaguaa

SEQ ID NO: 226016 - RNA, 19 nt, Human
cucacugagcaggucccaa

SEQ ID NO: 226017 - RNA, 24 nt, Human
cucacugcaaccuccgccucccag

SEQ ID NO: 226018 - RNA, 25 nt, Human
cucgugccucagccucccgaguagc

SEQ ID NO: 226019 - RNA, 25 nt, Human
cucucacacccacacacacuuauga

SEQ ID NO: 226020 - RNA, 23 nt, Human
cugcaaccuccgccucccaggcc

SEQ ID NO: 226021 - RNA, 20 nt, Human
cugcuaaggugacuccugau

SEQ ID NO: 226022 - RNA, 21 nt, Human
cuuacagacuuaggucuuuga

SEQ ID NO: 226023 - RNA, 19 nt, Human
gaacacaggcaccaucgug

SEQ ID NO: 226024 - RNA, 21 nt, Human
gaaccccuggcucagccauuc

SEQ ID NO: 226025 - RNA, 21 nt, Human
gaauccucucugcagcuuuuc

SEQ ID NO: 226026 - RNA, 22 nt, Human
gacacauucacagaacacaggc

SEQ ID NO: 226027 - RNA, 22 nt, Human
gacaggauggucaugguuuuga

SEQ ID NO: 226028 - RNA, 23 nt, Human
gacaggauggucaugguuuugag

SEQ ID NO: 226029 - RNA, 19 nt, Human
gagagaggagagaaaggga

SEQ ID NO: 226030 - RNA, 24 nt, Human
gagaugcuaauuaaaagauguuuc

SEQ ID NO: 226031 - RNA, 23 nt, Human
gagcagcugaguuaaaauauaac

SEQ ID NO: 226032 - RNA, 19 nt, Human
gagcaggucccaaaggcaa

SEQ ID NO: 226033 - RNA, 21 nt, Human
gagccgaaagcgggcggcggc

SEQ ID NO: 226034 - RNA, 24 nt, Human
gaguagccaggacuagaggcaugc

SEQ ID NO: 226035 - RNA, 18 nt, Human
gauuacaggcaugaguca

SEQ ID NO: 226036 - RNA, 21 nt, Human
gauuacaggcaugagucacca

SEQ ID NO: 226037 - RNA, 24 nt, Human
gauuacaggcaugagucaccauac

SEQ ID NO: 226038 - RNA, 21 nt, Human
gauucucgugccucagccucc

SEQ ID NO: 226039 - RNA, 20 nt, Human
gcaaccuccgccucccaggc

SEQ ID NO: 226040 - RNA, 26 nt, Human
gcagagacagccuccuuucuuccaca

SEQ ID NO: 226041 - RNA, 18 nt, Human
gcccaccuggggccugga

SEQ ID NO: 226042 - RNA, 18 nt, Human
gcccgagccgaaagcggg

SEQ ID NO: 226043 - RNA, 24 nt, Human
gcgauucucgugccucagccuccc

SEQ ID NO: 226044 - RNA, 20 nt, Human
gcggcggcggcggcggcggc

SEQ ID NO: 226045 - RNA, 20 nt, Human
gcggcggcggcggcggcggc

SEQ ID NO: 226046 - RNA, 20 nt, Human
gcggcggcggcggcggcggc

SEQ ID NO: 226047 - RNA, 20 nt, Human
gcggcggcggcggcggcggc

SEQ ID NO: 226048 - RNA, 20 nt, Human
gcggcggcggcggcggcggc

SEQ ID NO: 226049 - RNA, 20 nt, Human
gcggcggcggcggcggcggc

SEQ ID NO: 226050 - RNA, 23 nt, Human
gcggcggcggcggcggcggcggc

SEQ ID NO: 226051 - RNA, 23 nt, Human
gcggcggcggcggcggcggcggc

SEQ ID NO: 226052 - RNA, 24 nt, Human
gcggcggcggcggcggcggcggcg

SEQ ID NO: 226053 - RNA, 24 nt, Human
gcggcggcggcggcggcggcggcg

SEQ ID NO: 226054 - RNA, 24 nt, Human
gcggcggcggcggcggcggcggcg

SEQ ID NO: 226055 - RNA, 23 nt, Human
gcggcggcggcggcggcgggggc

SEQ ID NO: 226056 - RNA, 24 nt, Human
gcggcggcggcggcgggggcggcg

SEQ ID NO: 226057 - RNA, 19 nt, Human
ggauuacaggcaugaguca

SEQ ID NO: 226058 - RNA, 22 nt, Human
ggauuacaggcaugagucacca

SEQ ID NO: 226059 - RNA, 22 nt, Human
ggcagaccuggagacucacugu

SEQ ID NO: 226060 - RNA, 23 nt, Human
ggcggcggcggcggcggcggcgg

SEQ ID NO: 226061 - RNA, 23 nt, Human
ggcggcggcggcggcggcggcgg

SEQ ID NO: 226062 - RNA, 23 nt, Human
ggcggcggcggcggcggcggcgg

SEQ ID NO: 226063 - RNA, 23 nt, Human
ggcggcggcggcggcggcggcgg

SEQ ID NO: 226064 - RNA, 23 nt, Human
ggcggcggcggcggcggcggcgg

SEQ ID NO: 226065 - RNA, 18 nt, Human
gggcggcgaaccccuggc

SEQ ID NO: 226066 - RNA, 19 nt, Human
gggcggcggcggcggcggc

SEQ ID NO: 226067 - RNA, 24 nt, Human
gggcggcggcggcggcggcggcgg

SEQ ID NO: 226068 - RNA, 23 nt, Human
gggguuccaccauguuggccagg

SEQ ID NO: 226069 - RNA, 22 nt, Human
gugccucagccucccgaguagc

SEQ ID NO: 226070 - RNA, 24 nt, Human
gugguccacccaccucggccuccc

SEQ ID NO: 226071 - RNA, 26 nt, Human
guucaaccagauuaaguugguugauc

SEQ ID NO: 226072 - RNA, 18 nt, Human
guucuuggucucugucuc

SEQ ID NO: 226073 - RNA, 18 nt, Human
uaacucaaggcccaccug

SEQ ID NO: 226074 - RNA, 22 nt, Human
uacagacgggguuccaccaugu

SEQ ID NO: 226075 - RNA, 23 nt, Human
uacaggcaugagucaccauaccc

SEQ ID NO: 226076 - RNA, 24 nt, Human
uaguacagacgggguuccaccaug

SEQ ID NO: 226077 - RNA, 27 nt, Human
uaucgcacuuuaccuuacccaugacaa

SEQ ID NO: 226078 - RNA, 19 nt, Human
ucaagaaaauaugagggaa

SEQ ID NO: 226079 - RNA, 23 nt, Human
ucacagaacacaggcaccaucgu

SEQ ID NO: 226080 - RNA, 19 nt, Human
ucacccaggcuggaaugca

SEQ ID NO: 226081 - RNA, 26 nt, Human
ucacccaggcuggaaugcaguagugu

SEQ ID NO: 226082 - RNA, 19 nt, Human
ucacugcaaccuccgccuc

SEQ ID NO: 226083 - RNA, 24 nt, Human
ucacugcaaccuccgccucccagg

SEQ ID NO: 226084 - RNA, 25 nt, Human
ucacugcaaccuccgccucccaggc

SEQ ID NO: 226085 - RNA, 26 nt, Human
ucacugcaaccuccgccucccaggcc

SEQ ID NO: 226086 - RNA, 20 nt, Human
ucagaaggcaaaugcuguuu

SEQ ID NO: 226087 - RNA, 18 nt, Human
ucagagaaggcaaaggga

SEQ ID NO: 226088 - RNA, 19 nt, Human
ucagccauuccccgcugcc

SEQ ID NO: 226089 - RNA, 24 nt, Human
ucagccauuccccgcugccccgga

SEQ ID NO: 226090 - RNA, 21 nt, Human
ucagccucccgaguagccagg

SEQ ID NO: 226091 - RNA, 23 nt, Human
ucaggggaacaguucugaguuug

SEQ ID NO: 226092 - RNA, 18 nt, Human
uccacaaaacaggcccac

SEQ ID NO: 226093 - RNA, 22 nt, Human
uccacaaaacaggcccacugca

SEQ ID NO: 226094 - RNA, 18 nt, Human
uccagaaaugugcccugg

SEQ ID NO: 226095 - RNA, 19 nt, Human
ucccaaaggcagauccacu

SEQ ID NO: 226096 - RNA, 24 nt, Human
ucccaaagugccaggauuacaggc

SEQ ID NO: 226097 - RNA, 21 nt, Human
ucccaggcccaagcgauucuc

SEQ ID NO: 226098 - RNA, 19 nt, Human
ucccgaguagccaggacua

SEQ ID NO: 226099 - RNA, 19 nt, Human
ucccuacaagaacaggcac

SEQ ID NO: 226100 - RNA, 24 nt, Human
ucuauaccaauauggaacaaaacg

SEQ ID NO: 226101 - RNA, 23 nt, Human
ucucacucugucacccaggcugg

SEQ ID NO: 226102 - RNA, 24 nt, Human
ucucacucugucacccaggcugga

SEQ ID NO: 226103 - RNA, 26 nt, Human
ucucacucugucacccaggcuggaau

SEQ ID NO: 226104 - RNA, 27 nt, Human
ucucacucugucacccaggcuggaaug

SEQ ID NO: 226105 - RNA, 21 nt, Human
ucucaggaugcuacgguccug

SEQ ID NO: 226106 - RNA, 24 nt, Human
ucugucacccaggcuggaaugcag

SEQ ID NO: 226107 - RNA, 23 nt, Human
ucuuccacaaaacaggcccacug

SEQ ID NO: 226108 - RNA, 23 nt, Human
ugaaggcaggcaggauuccuuug

SEQ ID NO: 226109 - RNA, 24 nt, Human
ugaaucauucagaagcagaaauug

SEQ ID NO: 226110 - RNA, 18 nt, Human
ugacaugguguauggaca

SEQ ID NO: 226111 - RNA, 21 nt, Human
ugacaugguguauggacaugg

SEQ ID NO: 226112 - RNA, 19 nt, Human
ugacuccugauucugcccu

SEQ ID NO: 226113 - RNA, 22 nt, Human
ugagaagugucaauucaaaaug

SEQ ID NO: 226114 - RNA, 20 nt, Human
ugaggcaccgugccagcaag

SEQ ID NO: 226115 - RNA, 21 nt, Human
ugcaaagaggccaccgcuucu

SEQ ID NO: 226116 - RNA, 24 nt, Human
ugcaccaccacaccaggcaaaccu

SEQ ID NO: 226117 - RNA, 24 nt, Human
ugccaggauuacaggcaugaguca

SEQ ID NO: 226118 - RNA, 18 nt, Human
ugccucagccucccgagu

SEQ ID NO: 226119 - RNA, 24 nt, Human
ugccucagccucccgaguagccag

SEQ ID NO: 226120 - RNA, 22 nt, Human
uggacacauucacagaacacag

SEQ ID NO: 226121 - RNA, 24 nt, Human
uggccaggcuggucucgaaguccu

SEQ ID NO: 226122 - RNA, 22 nt, Human
ugggaaugcuuccagccuggau

SEQ ID NO: 226123 - RNA, 23 nt, Human
ugggccgaauccucucugcagcu

SEQ ID NO: 226124 - RNA, 24 nt, Human
ugguccacccaccucggccuccca

SEQ ID NO: 226125 - RNA, 19 nt, Human
uguaaagaacaggcuagaa

SEQ ID NO: 226126 - RNA, 19 nt, Human
uuaaaauauaacucaaggc

SEQ ID NO: 226127 - RNA, 24 nt, Human
uuaguacagacgggguuccaccau

SEQ ID NO: 226128 - RNA, 21 nt, Human
uucaaacaggcaaauucuuag

SEQ ID NO: 226129 - RNA, 21 nt, Human
uucaacaagaagggagcccca

SEQ ID NO: 226130 - RNA, 21 nt, Human
uucacagaacacaggcaccau

SEQ ID NO: 226131 - RNA, 21 nt, Human
uuccaccauguuggccaggcu

SEQ ID NO: 226132 - RNA, 21 nt, Human
uuggaagagauuuccucacug

SEQ ID NO: 226133 - RNA, 19 nt, Human
uuucucauuucucccuaca

SEQ ID NO: 226134 - RNA, 19 nt, Human
uuugacaggauggucaugg

SEQ ID NO: 226135 - RNA, 20 nt, Human
aaacacgcacacaaacacgc

SEQ ID NO: 226136 - RNA, 22 nt, Human
aaacacgcacacaaacacgcac

SEQ ID NO: 226137 - RNA, 22 nt, Human
aaagagcguacgcagugaccac

SEQ ID NO: 226138 - RNA, 25 nt, Human
aaauuuacuuaucacuugagauacc

SEQ ID NO: 226139 - RNA, 23 nt, Human
aacaaaggaauccaguggaggga

SEQ ID NO: 226140 - RNA, 28 nt, Human
aacacgcacacaaacacgcacacacaua

SEQ ID NO: 226141 - RNA, 24 nt, Human
aagcagucucccagucccagaaag

SEQ ID NO: 226142 - RNA, 23 nt, Human
aagcuggaaaagauugugccugg

SEQ ID NO: 226143 - RNA, 21 nt, Human
aaggagcccaagaggcugaau

SEQ ID NO: 226144 - RNA, 20 nt, Human
aaucaaauauuugauacacc

SEQ ID NO: 226145 - RNA, 24 nt, Human
aauccaguggagggacuuccguug

SEQ ID NO: 226146 - RNA, 19 nt, Human
acagaugaagggaaaaagc

SEQ ID NO: 226147 - RNA, 20 nt, Human
acauacacacauacacaaaa

SEQ ID NO: 226148 - RNA, 21 nt, Human
accaagcagucucccaguccc

SEQ ID NO: 226149 - RNA, 22 nt, Human
accaagcagucucccaguccca

SEQ ID NO: 226150 - RNA, 19 nt, Human
accaccucccacacccccc

SEQ ID NO: 226151 - RNA, 21 nt, Human
acccagcugcaggugcauuuc

SEQ ID NO: 226152 - RNA, 18 nt, Human
acccccgccaccaccucc

SEQ ID NO: 226153 - RNA, 20 nt, Human
accucugaucugaauccuga

SEQ ID NO: 226154 - RNA, 23 nt, Human
acgcacacacauacacacauaca

SEQ ID NO: 226155 - RNA, 21 nt, Human
acgcagccuggaggucccccu

SEQ ID NO: 226156 - RNA, 22 nt, Human
acggggucuaggcagcugcagg

SEQ ID NO: 226157 - RNA, 19 nt, Human
acuccugguggcccuguuc

SEQ ID NO: 226158 - RNA, 25 nt, Human
acuccugucccagccacagucgaac

SEQ ID NO: 226159 - RNA, 22 nt, Human
agagaaagagagacagagagac

SEQ ID NO: 226160 - RNA, 20 nt, Human
agcaaauggcaagugggugg

SEQ ID NO: 226161 - RNA, 21 nt, Human
aggacaggagcaaauggcaag

SEQ ID NO: 226162 - RNA, 19 nt, Human
aggcagcugcagggagaaa

SEQ ID NO: 226163 - RNA, 19 nt, Human
auaaaggaggcgaagaaga

SEQ ID NO: 226164 - RNA, 24 nt, Human
aucugucagucucaugguuucacc

SEQ ID NO: 226165 - RNA, 23 nt, Human
augacuccucggaggggacagaa

SEQ ID NO: 226166 - RNA, 21 nt, Human
caaaaccgcaggcaggagcuc

SEQ ID NO: 226167 - RNA, 25 nt, Human
cacaaaaccgcaggcaggagcuccu

SEQ ID NO: 226168 - RNA, 20 nt, Human
cacacacauacacacauaca

SEQ ID NO: 226169 - RNA, 22 nt, Human
cacaguucccauccaagguggg

SEQ ID NO: 226170 - RNA, 26 nt, Human
cacaugcacgcacacgcacacgcacc

SEQ ID NO: 226171 - RNA, 25 nt, Human
caccaccucccacaccccccauuuc

SEQ ID NO: 226172 - RNA, 21 nt, Human
caccucccacaccccccauuu

SEQ ID NO: 226173 - RNA, 25 nt, Human
cacgcacacacauacacacauacac

SEQ ID NO: 226174 - RNA, 27 nt, Human
cacgcacacgcacacgcaccaagcggc

SEQ ID NO: 226175 - RNA, 31 nt, Human
cacgcacacgcacaugcacgcacacgcacag

SEQ ID NO: 226176 - RNA, 28 nt, Human
cacgcacaugcacgcacacgcacacgca

SEQ ID NO: 226177 - RNA, 18 nt, Human
cagccucggacugggggg

SEQ ID NO: 226178 - RNA, 25 nt, Human
caggcgagggcaucuccccaacacg

SEQ ID NO: 226179 - RNA, 25 nt, Human
caugcacgcacacgcacacgcacca

SEQ ID NO: 226180 - RNA, 21 nt, Human
cauuucagcucaacagaaauu

SEQ ID NO: 226181 - RNA, 20 nt, Human
ccaagugaugaaugagguga

SEQ ID NO: 226182 - RNA, 19 nt, Human
ccagaaagugcucaggggc

SEQ ID NO: 226183 - RNA, 21 nt, Human
ccagaaagugcucaggggcug

SEQ ID NO: 226184 - RNA, 23 nt, Human
ccauccgaagccaaggggacaga

SEQ ID NO: 226185 - RNA, 22 nt, Human
ccaucugccagauucucacccc

SEQ ID NO: 226186 - RNA, 20 nt, Human
cccaacgacagcacucuuca

SEQ ID NO: 226187 - RNA, 18 nt, Human
ccccaacgacagcacucu

SEQ ID NO: 226188 - RNA, 25 nt, Human
cccccaggcgcacgucuucaauccg

SEQ ID NO: 226189 - RNA, 20 nt, Human
cccccgagccccuccgcagc

SEQ ID NO: 226190 - RNA, 21 nt, Human
cccguccuccaaaauauacac

SEQ ID NO: 226191 - RNA, 18 nt, Human
cccugcgcucaggccacc

SEQ ID NO: 226192 - RNA, 23 nt, Human
cccuguggagguaaacacgcaca

SEQ ID NO: 226193 - RNA, 25 nt, Human
ccucagggaacaccaagcagucucc

SEQ ID NO: 226194 - RNA, 25 nt, Human
ccugaaggaaagagaauaacccccg

SEQ ID NO: 226195 - RNA, 20 nt, Human
ccugcccccgagccccuccg

SEQ ID NO: 226196 - RNA, 22 nt, Human
cgaagcaggcaggagcagccuc

SEQ ID NO: 226197 - RNA, 21 nt, Human
cgaccauaccuugggcccagc

SEQ ID NO: 226198 - RNA, 23 nt, Human
cgaccauaccuugggcccagccu

SEQ ID NO: 226199 - RNA, 19 nt, Human
cgagaaagaggucaguggg

SEQ ID NO: 226200 - RNA, 20 nt, Human
cgauguguccaagugaugaa

SEQ ID NO: 226201 - RNA, 21 nt, Human
cgcacacaaacacgcacacac

SEQ ID NO: 226202 - RNA, 24 nt, Human
cgcacacaaacacgcacacacaua

SEQ ID NO: 226203 - RNA, 22 nt, Human
cgcacacacauacacacauaca

SEQ ID NO: 226204 - RNA, 20 nt, Human
cgcaggcaggagcuccuccu

SEQ ID NO: 226205 - RNA, 22 nt, Human
cgcgaauaaauaacaugaauua

SEQ ID NO: 226206 - RNA, 20 nt, Human
cugcccccgagccccuccgc

SEQ ID NO: 226207 - RNA, 20 nt, Human
cugcucgcuaggucgggauc

SEQ ID NO: 226208 - RNA, 21 nt, Human
cuuccugcccccgagccccuc

SEQ ID NO: 226209 - RNA, 21 nt, Human
gaaauuccuccauccgaagcc

SEQ ID NO: 226210 - RNA, 22 nt, Human
gaagggcaugagcuauguuggu

SEQ ID NO: 226211 - RNA, 18 nt, Human
gaauaaauaacaugaauu

SEQ ID NO: 226212 - RNA, 21 nt, Human
gaaugacauugacuccuccca

SEQ ID NO: 226213 - RNA, 20 nt, Human
gacagaaacaaaggaaucca

SEQ ID NO: 226214 - RNA, 22 nt, Human
gacguccgcgaauaaauaacau

SEQ ID NO: 226215 - RNA, 18 nt, Human
gagaaagaggucaguggg

SEQ ID NO: 226216 - RNA, 20 nt, Human
gaggggacagaaacaaagga

SEQ ID NO: 226217 - RNA, 25 nt, Human
gcacacaaacacgcacacacauaca

SEQ ID NO: 226218 - RNA, 29 nt, Human
gcacacacauacacacauacacaaaaccg

SEQ ID NO: 226219 - RNA, 24 nt, Human
gccaccaccucccacaccccccau

SEQ ID NO: 226220 - RNA, 20 nt, Human
gccaccuggugaauuucuac

SEQ ID NO: 226221 - RNA, 23 nt, Human
gcccccgagccccuccgcagccu

SEQ ID NO: 226222 - RNA, 21 nt, Human
gcucgcuaggucgggaucagc

SEQ ID NO: 226223 - RNA, 22 nt, Human
gcuggggccugcaagcugcugg

SEQ ID NO: 226224 - RNA, 22 nt, Human
gcuguuccauuuccugcagguu

SEQ ID NO: 226225 - RNA, 24 nt, Human
ggaaggacaggagcaaauggcaag

SEQ ID NO: 226226 - RNA, 26 nt, Human
ggagaagauggagguuauggagugcg

SEQ ID NO: 226227 - RNA, 22 nt, Human
ggagcuccuccuccgaccauac

SEQ ID NO: 226228 - RNA, 19 nt, Human
ggcccagacggcucaggcg

SEQ ID NO: 226229 - RNA, 21 nt, Human
gggacugucuucucaggcacu

SEQ ID NO: 226230 - RNA, 24 nt, Human
gggcaugagcuauguuggugaggu

SEQ ID NO: 226231 - RNA, 21 nt, Human
gggcuggggccugcaagcugc

SEQ ID NO: 226232 - RNA, 24 nt, Human
gguaacaggcaaagcuggaaaaga

SEQ ID NO: 226233 - RNA, 22 nt, Human
gucaggaugucucuuguccgcg

SEQ ID NO: 226234 - RNA, 22 nt, Human
uaaaaagccagucaaugaacau

SEQ ID NO: 226235 - RNA, 22 nt, Human
uaaauaaagaccauagcaacac

SEQ ID NO: 226236 - RNA, 19 nt, Human
uaacaggcaaagcuggaaa

SEQ ID NO: 226237 - RNA, 19 nt, Human
uaacccccgccaccaccuc

SEQ ID NO: 226238 - RNA, 21 nt, Human
uaacccccgccaccaccuccc

SEQ ID NO: 226239 - RNA, 26 nt, Human
uaacccccgccaccaccucccacacc

SEQ ID NO: 226240 - RNA, 20 nt, Human
uaaggaguaucccccuagga

SEQ ID NO: 226241 - RNA, 22 nt, Human
uacacaaaaccgcaggcaggac

SEQ ID NO: 226242 - RNA, 23 nt, Human
uacacacauacacaaaaccgcag

SEQ ID NO: 226243 - RNA, 18 nt, Human
uaccuagagacauuuugg

SEQ ID NO: 226244 - RNA, 23 nt, Human
uaccuagagacauuuugggccau

SEQ ID NO: 226245 - RNA, 25 nt, Human
uagcaacacacgagaauuugguccu

SEQ ID NO: 226246 - RNA, 22 nt, Human
ucaaucaaauauuugauacacc

SEQ ID NO: 226247 - RNA, 18 nt, Human
ucaccccaacgacagcag

SEQ ID NO: 226248 - RNA, 21 nt, Human
ucagaaacagggguaacaggc

SEQ ID NO: 226249 - RNA, 18 nt, Human
ucagacccaagcuugauc

SEQ ID NO: 226250 - RNA, 24 nt, Human
uccaaaauauacacuuaaaaagcc

SEQ ID NO: 226251 - RNA, 20 nt, Human
uccacaaacgagaaagaggu

SEQ ID NO: 226252 - RNA, 20 nt, Human
ucccagccacagucgaaccu

SEQ ID NO: 226253 - RNA, 21 nt, Human
ucccagccacagucgaaccuc

SEQ ID NO: 226254 - RNA, 21 nt, Human
ucccagucccagaaagugcuc

SEQ ID NO: 226255 - RNA, 19 nt, Human
ucccccugcgcucaggcca

SEQ ID NO: 226256 - RNA, 19 nt, Human
uccucagggaacaccaagc

SEQ ID NO: 226257 - RNA, 20 nt, Human
uccucggaggggacagaaac

SEQ ID NO: 226258 - RNA, 21 nt, Human
uccugagucucaaauaaucuc

SEQ ID NO: 226259 - RNA, 24 nt, Human
uccugcccccgagccccuccgcag

SEQ ID NO: 226260 - RNA, 30 nt, Human
ucucaccccugcacacacgcacacgcacag

SEQ ID NO: 226261 - RNA, 23 nt, Human
ucucaggcacuggcuaccuuccc

SEQ ID NO: 226262 - RNA, 19 nt, Human
ucugccagauucucacccc

SEQ ID NO: 226263 - RNA, 22 nt, Human
ugaaaauggggaguugccuuga

SEQ ID NO: 226264 - RNA, 19 nt, Human
ugaagcagaaaugacagug

SEQ ID NO: 226265 - RNA, 22 nt, Human
ugaagggcaugagcuauguugg

SEQ ID NO: 226266 - RNA, 20 nt, Human
ugaauuucuacacacaacuc

SEQ ID NO: 226267 - RNA, 20 nt, Human
ugacaagacaaugcaaaggc

SEQ ID NO: 226268 - RNA, 22 nt, Human
ugacaagacaaugcaaaggcga

SEQ ID NO: 226269 - RNA, 19 nt, Human
ugagggaggugugacaaga

SEQ ID NO: 226270 - RNA, 25 nt, Human
ugcacacacgcacacgcacaugcac

SEQ ID NO: 226271 - RNA, 25 nt, Human
ugcacacacgcacacgcacaugcag

SEQ ID NO: 226272 - RNA, 20 nt, Human
ugcagguuccaaggcgaugg

SEQ ID NO: 226273 - RNA, 20 nt, Human
ugcauuguuaauuguugucc

SEQ ID NO: 226274 - RNA, 21 nt, Human
ugccccaucccaggagucuau

SEQ ID NO: 226275 - RNA, 24 nt, Human
ugcccccgagccccuccgcagccu

SEQ ID NO: 226276 - RNA, 18 nt, Human
ugcuauaagacugugagg

SEQ ID NO: 226277 - RNA, 22 nt, Human
uggagaguggggcuguguccac

SEQ ID NO: 226278 - RNA, 26 nt, Human
ugggagaagauggagguuauggagug

SEQ ID NO: 226279 - RNA, 21 nt, Human
uggggccugcaagcugcuggc

SEQ ID NO: 226280 - RNA, 21 nt, Human
uggguagaaaagggacugucu

SEQ ID NO: 226281 - RNA, 23 nt, Human
ugucugaggcucagaaaguggag

SEQ ID NO: 226282 - RNA, 23 nt, Human
ugugacagaugaagggaaaaagc

SEQ ID NO: 226283 - RNA, 24 nt, Human
uguuuuauauauauauuuauauau

SEQ ID NO: 226284 - RNA, 20 nt, Human
uuauauauuacauauguccc

SEQ ID NO: 226285 - RNA, 24 nt, Human
uuaugaccucuucacccguccucc

SEQ ID NO: 226286 - RNA, 23 nt, Human
uucagcucaacagaaauuccucc

SEQ ID NO: 226287 - RNA, 23 nt, Human
uucauauucuaggaacuggagac

SEQ ID NO: 226288 - RNA, 19 nt, Human
uuccuuuauugucaacugc

SEQ ID NO: 226289 - RNA, 19 nt, Human
uugaaaauggggaguugcc

SEQ ID NO: 226290 - RNA, 24 nt, Human
uugauacaccaaaauuaaaaggag

SEQ ID NO: 226291 - RNA, 24 nt, Human
uuguuguccuaaauaaagaccaua

SEQ ID NO: 226292 - RNA, 22 nt, Human
aacaacagggguuggggaggga

SEQ ID NO: 226293 - RNA, 18 nt, Human
aagaagaaacauucaccc

SEQ ID NO: 226294 - RNA, 18 nt, Human
acagaguugagggcgccc

SEQ ID NO: 226295 - RNA, 20 nt, Human
agaaacauucacccuccucc

SEQ ID NO: 226296 - RNA, 20 nt, Human
agaagagagacauagcagca

SEQ ID NO: 226297 - RNA, 20 nt, Human
agauacuugagaauaagaca

SEQ ID NO: 226298 - RNA, 20 nt, Human
agcagcccuuccauuuuacc

SEQ ID NO: 226299 - RNA, 18 nt, Human
aguagaugagaaagaaga

SEQ ID NO: 226300 - RNA, 19 nt, Human
aguaucagagaccacaggu

SEQ ID NO: 226301 - RNA, 20 nt, Human
caacaacagggguuggggag

SEQ ID NO: 226302 - RNA, 24 nt, Human
cacccuccucccuauugccccaaa

SEQ ID NO: 226303 - RNA, 20 nt, Human
cagaguacaaagagauacag

SEQ ID NO: 226304 - RNA, 24 nt, Human
cccuuccauuuuaccuucugugcu

SEQ ID NO: 226305 - RNA, 24 nt, Human
ccggcguggggcugggacucuucu

SEQ ID NO: 226306 - RNA, 23 nt, Human
cggcguggggcugggacucuucu

SEQ ID NO: 226307 - RNA, 21 nt, Human
cucagcagaggccgaggcgga

SEQ ID NO: 226308 - RNA, 18 nt, Human
gaaacauucacccuccuc

SEQ ID NO: 226309 - RNA, 18 nt, Human
gagaauaagacagaagag

SEQ ID NO: 226310 - RNA, 22 nt, Human
gaggacaggugcucagucucug

SEQ ID NO: 226311 - RNA, 21 nt, Human
gcagcccuuccauuuuaccuu

SEQ ID NO: 226312 - RNA, 21 nt, Human
gccccaaauaaggaagguaga

SEQ ID NO: 226313 - RNA, 20 nt, Human
gcguggggcugggacucuuc

SEQ ID NO: 226314 - RNA, 21 nt, Human
gcguggggcugggacucuucu

SEQ ID NO: 226315 - RNA, 20 nt, Human
gcucagucucuggggacaga

SEQ ID NO: 226316 - RNA, 20 nt, Human
gcugcagggguggugugugc

SEQ ID NO: 226317 - RNA, 26 nt, Human
ggcugcagggguggugugugcuccag

SEQ ID NO: 226318 - RNA, 20 nt, Human
ggggcugggacucuucuugg

SEQ ID NO: 226319 - RNA, 19 nt, Human
ggguuggggagggaguuag

SEQ ID NO: 226320 - RNA, 24 nt, Human
ggucacaacccucuagcucccauu

SEQ ID NO: 226321 - RNA, 21 nt, Human
gguggugugugcuccagagga

SEQ ID NO: 226322 - RNA, 22 nt, Human
guggggcugggacucuucuugg

SEQ ID NO: 226323 - RNA, 30 nt, Human
gugugugcauguuugugugcgugugugcgg

SEQ ID NO: 226324 - RNA, 18 nt, Human
uaagacagaagagagaca

SEQ ID NO: 226325 - RNA, 24 nt, Human
uaagagaagacaucaaacauagua

SEQ ID NO: 226326 - RNA, 24 nt, Human
uacaaagagauacagaguaaguaa

SEQ ID NO: 226327 - RNA, 20 nt, Human
uacucagugacuaacaccac

SEQ ID NO: 226328 - RNA, 21 nt, Human
uagcagcccuuccauuuuacc

SEQ ID NO: 226329 - RNA, 24 nt, Human
uaguacaguccaacaacagggguu

SEQ ID NO: 226330 - RNA, 24 nt, Human
ucacccuccucccuauugccccaa

SEQ ID NO: 226331 - RNA, 19 nt, Human
uccauuuuaccuucugugc

SEQ ID NO: 226332 - RNA, 21 nt, Human
ucugugaccucuacucaguga

SEQ ID NO: 226333 - RNA, 19 nt, Human
ugcagccguggguguggga

SEQ ID NO: 226334 - RNA, 26 nt, Human
ugcgugugugcauguuugugugcgug

SEQ ID NO: 226335 - RNA, 23 nt, Human
ugggcugcagggguggugugugc

SEQ ID NO: 226336 - RNA, 22 nt, Human
ugguagccggcguggggcuggg

SEQ ID NO: 226337 - RNA, 22 nt, Human
ugugcgugugugcgugugugua

SEQ ID NO: 226338 - RNA, 22 nt, Human
ugugugcaugcgugugugcaug

SEQ ID NO: 226339 - RNA, 25 nt, Human
ugugugcaugcgugugugcauguuu

SEQ ID NO: 226340 - RNA, 19 nt, Human
ugugugcauguuugugugc

SEQ ID NO: 226341 - RNA, 22 nt, Human
ugugugcgugugugcgugugug

SEQ ID NO: 226342 - RNA, 24 nt, Human
ugugugcgugugugcgugugugua

SEQ ID NO: 226343 - RNA, 24 nt, Human
ugugugugcaugcgugugugcaug

SEQ ID NO: 226344 - RNA, 21 nt, Human
ugugugugugcaugcgugugu

SEQ ID NO: 226345 - RNA, 23 nt, Human
ugugugugugcaugcgugugugc

SEQ ID NO: 226346 - RNA, 24 nt, Human
ugugugugugcaugcgugugugca

SEQ ID NO: 226347 - RNA, 26 nt, Human
uuagcagcccuuccauuuuaccuucu

SEQ ID NO: 226348 - RNA, 25 nt, Human
uucacccuccucccuauugccccaa

SEQ ID NO: 226349 - RNA, 24 nt, Human
uuccauuuuaccuucugugcuaua

SEQ ID NO: 226350 - RNA, 23 nt, Human
uuugugugugugcaugcgugugu

SEQ ID NO: 226351 - RNA, 22 nt, Human
aaacuguccuuuuucccuccua

SEQ ID NO: 226352 - RNA, 22 nt, Human
aaagacuaaauuuaagacacga

SEQ ID NO: 226353 - RNA, 20 nt, Human
aaugacugcuugauaccaug

SEQ ID NO: 226354 - RNA, 21 nt, Human
acaggccagguauaauuuaua

SEQ ID NO: 226355 - RNA, 22 nt, Human
acauacacaaaaaauacaaaaa

SEQ ID NO: 226356 - RNA, 21 nt, Human
acuguccuuuuucccuccuaa

SEQ ID NO: 226357 - RNA, 18 nt, Human
agaugccaaaauugcacu

SEQ ID NO: 226358 - RNA, 23 nt, Human
agcuguacaggccagguauaauu

SEQ ID NO: 226359 - RNA, 26 nt, Human
augccaaaauugcacucuaguugugu

SEQ ID NO: 226360 - RNA, 24 nt, Human
auggcagccauggcggcggcagcg

SEQ ID NO: 226361 - RNA, 24 nt, Human
auggcggcggcagcggcggcggca

SEQ ID NO: 226362 - RNA, 20 nt, Human
auggcggcggcagcggcggg

SEQ ID NO: 226363 - RNA, 22 nt, Human
auugcacucuaguuguguuggg

SEQ ID NO: 226364 - RNA, 21 nt, Human
cacaaaaaauacaaaaaguac

SEQ ID NO: 226365 - RNA, 21 nt, Human
cacaguaaagacuaaauuuaa

SEQ ID NO: 226366 - RNA, 23 nt, Human
cagcggcggcggcaccggggagg

SEQ ID NO: 226367 - RNA, 25 nt, Human
caguaaagacuaaauuuaagacacg

SEQ ID NO: 226368 - RNA, 25 nt, Human
cgcagccggggccgcggccgggagc

SEQ ID NO: 226369 - RNA, 20 nt, Human
cggcagccguuaacccuaau

SEQ ID NO: 226370 - RNA, 22 nt, Human
cggcggcaccggggagagcguc

SEQ ID NO: 226371 - RNA, 28 nt, Human
cggcggcagcggcggcggcaccggggag

SEQ ID NO: 226372 - RNA, 19 nt, Human
cggcuccucagcguccccc

SEQ ID NO: 226373 - RNA, 21 nt, Human
cuccuaagaugccaaaauugc

SEQ ID NO: 226374 - RNA, 18 nt, Human
gaagagccggcgccggca

SEQ ID NO: 226375 - RNA, 24 nt, Human
gauuacuuuuuaacaccugugggu

SEQ ID NO: 226376 - RNA, 20 nt, Human
gccggcagccguuaacccua

SEQ ID NO: 226377 - RNA, 21 nt, Human
ggcggcagcggcggcggcacc

SEQ ID NO: 226378 - RNA, 27 nt, Human
ggggagccgggacuugaagagccggcg

SEQ ID NO: 226379 - RNA, 21 nt, Human
gguggaggcggccggggagcc

SEQ ID NO: 226380 - RNA, 20 nt, Human
uaaacauacacaaaaaauac

SEQ ID NO: 226381 - RNA, 25 nt, Human
uaaacauacacaaaaaauacaaaaa

SEQ ID NO: 226382 - RNA, 21 nt, Human
uaaagacuaaauuuaagacac

SEQ ID NO: 226383 - RNA, 26 nt, Human
uacaagaagaguagguaggaaacagc

SEQ ID NO: 226384 - RNA, 26 nt, Human
uacacaaaaaauacaaaaaguacagu

SEQ ID NO: 226385 - RNA, 18 nt, Human
uacaguccuauaagguag

SEQ ID NO: 226386 - RNA, 21 nt, Human
uagcuuggcacaguaaagacu

SEQ ID NO: 226387 - RNA, 22 nt, Human
ucacuuccgauccaucauggcc

SEQ ID NO: 226388 - RNA, 19 nt, Human
uccccggguggaggcggcc

SEQ ID NO: 226389 - RNA, 24 nt, Human
uccuaagaugccaaaauugcacuc

SEQ ID NO: 226390 - RNA, 24 nt, Human
uuaacccuaaugcucacuuccgau

SEQ ID NO: 226391 - RNA, 24 nt, Human
aaaaaaaaaauggaaacuguaggg

SEQ ID NO: 226392 - RNA, 22 nt, Human
aaaacaaauagcagcacaguca

SEQ ID NO: 226393 - RNA, 25 nt, Human
aaaagaccugaaacugguguacugc

SEQ ID NO: 226394 - RNA, 22 nt, Human
aaaaucacccuggaaagaaucu

SEQ ID NO: 226395 - RNA, 22 nt, Human
aaacaaaacauacauaaacaaa

SEQ ID NO: 226396 - RNA, 20 nt, Human
aaacauacauaaacaaagug

SEQ ID NO: 226397 - RNA, 22 nt, Human
aaacucuacacagcucaaaaga

SEQ ID NO: 226398 - RNA, 24 nt, Human
aaagaaugaaaaaaauuuaaacaa

SEQ ID NO: 226399 - RNA, 20 nt, Human
aacaaauaaauuaagucaaa

SEQ ID NO: 226400 - RNA, 24 nt, Human
aacacacaucugcaguacacagga

SEQ ID NO: 226401 - RNA, 18 nt, Human
aacaugauaggauaggag

SEQ ID NO: 226402 - RNA, 28 nt, Human
aacauucuccuaauuuaccaauccacca

SEQ ID NO: 226403 - RNA, 20 nt, Human
aagcaaacauaucaacaagg

SEQ ID NO: 226404 - RNA, 19 nt, Human
aagcagcucggaggugaau

SEQ ID NO: 226405 - RNA, 19 nt, Human
aagcuucagggcacagugc

SEQ ID NO: 226406 - RNA, 23 nt, Human
aauguuucccuuugaaacaugaa

SEQ ID NO: 226407 - RNA, 23 nt, Human
aauuuuguacaagaaauguuugg

SEQ ID NO: 226408 - RNA, 21 nt, Human
acaaagugcaacauuuaacaa

SEQ ID NO: 226409 - RNA, 23 nt, Human
acacacacacacacacacacaca

SEQ ID NO: 226410 - RNA, 23 nt, Human
acacacacacacacacacacaca

SEQ ID NO: 226411 - RNA, 23 nt, Human
acacacacacacacacacacaca

SEQ ID NO: 226412 - RNA, 23 nt, Human
acacacacacacacacacacaca

SEQ ID NO: 226413 - RNA, 23 nt, Human
acacacacacacacacacacaca

SEQ ID NO: 226414 - RNA, 23 nt, Human
acacacacacacacacacacaca

SEQ ID NO: 226415 - RNA, 23 nt, Human
acacacacacacacacacacaca

SEQ ID NO: 226416 - RNA, 23 nt, Human
acacacacacacacacacacaca

SEQ ID NO: 226417 - RNA, 23 nt, Human
acacacauacacacacacacaca

SEQ ID NO: 226418 - RNA, 21 nt, Human
acacagcucaaaagaccugaa

SEQ ID NO: 226419 - RNA, 20 nt, Human
acaccccggaggccgagucg

SEQ ID NO: 226420 - RNA, 24 nt, Human
acagaaacucuacacagcucaaaa

SEQ ID NO: 226421 - RNA, 19 nt, Human
acagaaugcccuauucccc

SEQ ID NO: 226422 - RNA, 21 nt, Human
acagauccaaagaugugacca

SEQ ID NO: 226423 - RNA, 20 nt, Human
acaggaaaccagacaguuga

SEQ ID NO: 226424 - RNA, 18 nt, Human
acccagggaaaaaucacc

SEQ ID NO: 226425 - RNA, 22 nt, Human
acccccaaauuugucaaaacaa

SEQ ID NO: 226426 - RNA, 19 nt, Human
agaaaccacccaacacccc

SEQ ID NO: 226427 - RNA, 20 nt, Human
agaccaugaucaucugccuc

SEQ ID NO: 226428 - RNA, 25 nt, Human
agagaggaaguagugaggagagggg

SEQ ID NO: 226429 - RNA, 24 nt, Human
agaugggacagugcacugcccaga

SEQ ID NO: 226430 - RNA, 26 nt, Human
agcaagcagcucggaggugaauuuua

SEQ ID NO: 226431 - RNA, 26 nt, Human
agggagggggcacggggauggguggg

SEQ ID NO: 226432 - RNA, 18 nt, Human
agucaaaagcugcauaua

SEQ ID NO: 226433 - RNA, 25 nt, Human
aguggaucuucugcaaccaucuccu

SEQ ID NO: 226434 - RNA, 24 nt, Human
aguucccagacauaaaucuugaua

SEQ ID NO: 226435 - RNA, 21 nt, Human
auccugcagauaaagauuauu

SEQ ID NO: 226436 - RNA, 18 nt, Human
aucgcgagcccggccggc

SEQ ID NO: 226437 - RNA, 24 nt, Human
auuguucugucuacuaccugcugu

SEQ ID NO: 226438 - RNA, 18 nt, Human
auuuaaggauccauuuga

SEQ ID NO: 226439 - RNA, 20 nt, Human
caaaucagaagcaaacauau

SEQ ID NO: 226440 - RNA, 18 nt, Human
caacuggaaguaaggguu

SEQ ID NO: 226441 - RNA, 22 nt, Human
caagaaguagcaugaaauauaa

SEQ ID NO: 226442 - RNA, 24 nt, Human
caagagccaaaaaccauuacugac

SEQ ID NO: 226443 - RNA, 23 nt, Human
caaugaacaguauuuaaaacuga

SEQ ID NO: 226444 - RNA, 18 nt, Human
cacacacacacacacaca

SEQ ID NO: 226445 - RNA, 20 nt, Human
cacacacacacacacacaca

SEQ ID NO: 226446 - RNA, 20 nt, Human
cacacacacacacacacaca

SEQ ID NO: 226447 - RNA, 20 nt, Human
cacacacacacacacacaca

SEQ ID NO: 226448 - RNA, 20 nt, Human
cacacacacacacacacaca

SEQ ID NO: 226449 - RNA, 20 nt, Human
cacacacacacacacacaca

SEQ ID NO: 226450 - RNA, 20 nt, Human
cacacacacacacacacaca

SEQ ID NO: 226451 - RNA, 20 nt, Human
cacacacacacacacacaca

SEQ ID NO: 226452 - RNA, 20 nt, Human
cacacacacacacacacaca

SEQ ID NO: 226453 - RNA, 20 nt, Human
cacacacacacacacacaca

SEQ ID NO: 226454 - RNA, 20 nt, Human
cacacacacacacacacaca

SEQ ID NO: 226455 - RNA, 20 nt, Human
cacacacacacacacacaca

SEQ ID NO: 226456 - RNA, 22 nt, Human
cacacacacacacacacacaca

SEQ ID NO: 226457 - RNA, 22 nt, Human
cacacacacacacacacacaca

SEQ ID NO: 226458 - RNA, 24 nt, Human
cacagaaacucuacacagcucaaa

SEQ ID NO: 226459 - RNA, 21 nt, Human
cacggggauggguggggggcc

SEQ ID NO: 226460 - RNA, 21 nt, Human
cagaaaccacccaacaccccg

SEQ ID NO: 226461 - RNA, 26 nt, Human
cagaaaccacccaacaccccggaggc

SEQ ID NO: 226462 - RNA, 23 nt, Human
cagaaacucuacacagcucaaaa

SEQ ID NO: 226463 - RNA, 18 nt, Human
cagauccaaagaugugac

SEQ ID NO: 226464 - RNA, 18 nt, Human
cagcaauacccacucaag

SEQ ID NO: 226465 - RNA, 18 nt, Human
cagcacagucaguuuccc

SEQ ID NO: 226466 - RNA, 21 nt, Human
caggaaccacccagaaaccac

SEQ ID NO: 226467 - RNA, 19 nt, Human
caguacacaggacacacuu

SEQ ID NO: 226468 - RNA, 23 nt, Human
cauauaaaccaucuggcuguucu

SEQ ID NO: 226469 - RNA, 21 nt, Human
ccacccagaaaccacccaaca

SEQ ID NO: 226470 - RNA, 25 nt, Human
ccacccagaaaccacccaacacccc

SEQ ID NO: 226471 - RNA, 25 nt, Human
ccaggaaccacccagaaaccaccca

SEQ ID NO: 226472 - RNA, 25 nt, Human
cccaaaucagaagcaaacauaucaa

SEQ ID NO: 226473 - RNA, 19 nt, Human
cccaccugcccgcgaccac

SEQ ID NO: 226474 - RNA, 20 nt, Human
cccccaaauuugucaaaacc

SEQ ID NO: 226475 - RNA, 19 nt, Human
ccccccggcccaccugccc

SEQ ID NO: 226476 - RNA, 21 nt, Human
ccccucaaaccccccggacaa

SEQ ID NO: 226477 - RNA, 19 nt, Human
ccccugcccagcgcccccc

SEQ ID NO: 226478 - RNA, 21 nt, Human
ccgccccugcccagcgccccc

SEQ ID NO: 226479 - RNA, 22 nt, Human
ccgcuccggccccuccggcugc

SEQ ID NO: 226480 - RNA, 18 nt, Human
ccggccugcccuggcccu

SEQ ID NO: 226481 - RNA, 20 nt, Human
ccggcugagcagccccggcc

SEQ ID NO: 226482 - RNA, 19 nt, Human
ccucucucuccuuauuccc

SEQ ID NO: 226483 - RNA, 23 nt, Human
ccugcagccuccgacgacgcuuc

SEQ ID NO: 226484 - RNA, 21 nt, Human
ccuggcccugccccgccccug

SEQ ID NO: 226485 - RNA, 24 nt, Human
ccuggcccugccccgccccugccc

SEQ ID NO: 226486 - RNA, 22 nt, Human
cgcuccggccccuccggcugca

SEQ ID NO: 226487 - RNA, 18 nt, Human
cggccggcugagcagccc

SEQ ID NO: 226488 - RNA, 22 nt, Human
cucaaacaacauucuccuaauu

SEQ ID NO: 226489 - RNA, 21 nt, Human
cuccacccucugccuuuccca

SEQ ID NO: 226490 - RNA, 22 nt, Human
cuccaggaaccacccagaaacc

SEQ ID NO: 226491 - RNA, 24 nt, Human
cuccccucaaaccccccggacaag

SEQ ID NO: 226492 - RNA, 20 nt, Human
cuccggcugcagaccggccu

SEQ ID NO: 226493 - RNA, 24 nt, Human
cucucucuccuuauuccccaccaa

SEQ ID NO: 226494 - RNA, 19 nt, Human
cugcagccuccgacgacgc

SEQ ID NO: 226495 - RNA, 24 nt, Human
cuggaaagaaucuaaaacaaucua

SEQ ID NO: 226496 - RNA, 25 nt, Human
gaaaucuucccuccacccucugccu

SEQ ID NO: 226497 - RNA, 23 nt, Human
gaacaugguccugauauaauaac

SEQ ID NO: 226498 - RNA, 19 nt, Human
gaaugcccuauuccccuua

SEQ ID NO: 226499 - RNA, 20 nt, Human
gaccaugaucaucugccucc

SEQ ID NO: 226500 - RNA, 21 nt, Human
gaccaugaucaucugccucca

SEQ ID NO: 226501 - RNA, 22 nt, Human
gagcacacaucuguacacacag

SEQ ID NO: 226502 - RNA, 25 nt, Human
gagcagccccggccgcuccgagccc

SEQ ID NO: 226503 - RNA, 22 nt, Human
gaguacccauacaucuucauuu

SEQ ID NO: 226504 - RNA, 21 nt, Human
gcaaaaccugccccacaagga

SEQ ID NO: 226505 - RNA, 21 nt, Human
gcacugcccagaggaggcucc

SEQ ID NO: 226506 - RNA, 18 nt, Human
gccagcucacucaucuug

SEQ ID NO: 226507 - RNA, 20 nt, Human
gccggggccgggaacgacga

SEQ ID NO: 226508 - RNA, 21 nt, Human
gcuacauucuagacaaacauu

SEQ ID NO: 226509 - RNA, 24 nt, Human
ggcuagacaaugaagugaaaucuu

SEQ ID NO: 226510 - RNA, 21 nt, Human
gggaacgacgagggaggaggc

SEQ ID NO: 226511 - RNA, 18 nt, Human
gggcacggggaugggugg

SEQ ID NO: 226512 - RNA, 23 nt, Human
gggcacggggauggguggggggc

SEQ ID NO: 226513 - RNA, 19 nt, Human
ggggauggguggggggccg

SEQ ID NO: 226514 - RNA, 21 nt, Human
ggggauggguggggggccggg

SEQ ID NO: 226515 - RNA, 27 nt, Human
ggggccggggccgggaacgacgaggga

SEQ ID NO: 226516 - RNA, 18 nt, Human
ggggggccggggccggga

SEQ ID NO: 226517 - RNA, 20 nt, Human
ggggggccggggccgggaac

SEQ ID NO: 226518 - RNA, 18 nt, Human
ggguggggggccggggcc

SEQ ID NO: 226519 - RNA, 21 nt, Human
gguagggagggggcacgggga

SEQ ID NO: 226520 - RNA, 19 nt, Human
guaaaauggaacuacaagc

SEQ ID NO: 226521 - RNA, 20 nt, Human
gucuuugggguaauuuguuu

SEQ ID NO: 226522 - RNA, 19 nt, Human
gugccaaagaaagaauuca

SEQ ID NO: 226523 - RNA, 21 nt, Human
guuucuuuagcuugcucaaga

SEQ ID NO: 226524 - RNA, 19 nt, Human
uaaauucugauuucuuaau

SEQ ID NO: 226525 - RNA, 21 nt, Human
uaacaaaagcaaagugugcag

SEQ ID NO: 226526 - RNA, 22 nt, Human
uaacaaaagcaaagugugcagc

SEQ ID NO: 226527 - RNA, 20 nt, Human
uacacacauacacacacaca

SEQ ID NO: 226528 - RNA, 22 nt, Human
uaguaaguggaucuucugcaac

SEQ ID NO: 226529 - RNA, 18 nt, Human
uaguugcugcagguucaa

SEQ ID NO: 226530 - RNA, 20 nt, Human
uauaaaaaaaaaauggaaac

SEQ ID NO: 226531 - RNA, 26 nt, Human
uauaaaccaccauucuccccucaaac

SEQ ID NO: 226532 - RNA, 22 nt, Human
uauuaccugauaagcuuugcaa

SEQ ID NO: 226533 - RNA, 21 nt, Human
uauuccccaccaaaaacaaaa

SEQ ID NO: 226534 - RNA, 23 nt, Human
uauuucuucauuuaucccaauau

SEQ ID NO: 226535 - RNA, 19 nt, Human
ucaauagaauuugucgucc

SEQ ID NO: 226536 - RNA, 18 nt, Human
ucaaugcacaguucuuag

SEQ ID NO: 226537 - RNA, 21 nt, Human
ucaauuuccaaacaaaaagua

SEQ ID NO: 226538 - RNA, 23 nt, Human
ucaauuuuauuuuccacuuuuag

SEQ ID NO: 226539 - RNA, 19 nt, Human
ucagaagcaaacauaucaa

SEQ ID NO: 226540 - RNA, 21 nt, Human
ucaguaguaaguggaucuucu

SEQ ID NO: 226541 - RNA, 21 nt, Human
uccaaaugucuccugcccugc

SEQ ID NO: 226542 - RNA, 19 nt, Human
uccccaccaaaaacaaaac

SEQ ID NO: 226543 - RNA, 22 nt, Human
uccccaccaaaaacaaaacaua

SEQ ID NO: 226544 - RNA, 18 nt, Human
uccccuuauaucugcaca

SEQ ID NO: 226545 - RNA, 21 nt, Human
ucccuccacccucugccuuuc

SEQ ID NO: 226546 - RNA, 18 nt, Human
ucggugguaaugguucuc

SEQ ID NO: 226547 - RNA, 22 nt, Human
ucuaaaaaccugaaaauugcac

SEQ ID NO: 226548 - RNA, 22 nt, Human
ucuacagaaugcccuauucccc

SEQ ID NO: 226549 - RNA, 21 nt, Human
ucuaguaauugacaaaaacac

SEQ ID NO: 226550 - RNA, 18 nt, Human
ucucccgaaggcuuccuu

SEQ ID NO: 226551 - RNA, 21 nt, Human
ucuggcuguucucuuagagca

SEQ ID NO: 226552 - RNA, 23 nt, Human
ugaaaaaaauuuaaacaaaugca

SEQ ID NO: 226553 - RNA, 23 nt, Human
ugaaacaugaaagugccaagcaa

SEQ ID NO: 226554 - RNA, 28 nt, Human
ugaaaucuucccuccacccucugccuuu

SEQ ID NO: 226555 - RNA, 21 nt, Human
ugaacaguauuuaaaacugau

SEQ ID NO: 226556 - RNA, 23 nt, Human
ugacaaaaacacauuuggcauua

SEQ ID NO: 226557 - RNA, 19 nt, Human
ugacaugcuacguggaguc

SEQ ID NO: 226558 - RNA, 22 nt, Human
ugaggcagaccaugaucaucug

SEQ ID NO: 226559 - RNA, 20 nt, Human
ugcaaaaccugccccacaag

SEQ ID NO: 226560 - RNA, 27 nt, Human
ugccaaagaaagaauucauauaaacag

SEQ ID NO: 226561 - RNA, 22 nt, Human
ugcccagcgccccccggcccac

SEQ ID NO: 226562 - RNA, 19 nt, Human
ugccccgccccugcccagc

SEQ ID NO: 226563 - RNA, 24 nt, Human
ugcccuggcccugccccgccccug

SEQ ID NO: 226564 - RNA, 24 nt, Human
uggaaugauguuggauuucuucag

SEQ ID NO: 226565 - RNA, 21 nt, Human
uggcuguucucuuagagcauc

SEQ ID NO: 226566 - RNA, 21 nt, Human
uggugccaaagaaagaauuca

SEQ ID NO: 226567 - RNA, 23 nt, Human
ugguuucuuuagcuugcucaaga

SEQ ID NO: 226568 - RNA, 23 nt, Human
uguacacacagaaacucuacaca

SEQ ID NO: 226569 - RNA, 24 nt, Human
uguagggggggaaaaauaaaggaa

SEQ ID NO: 226570 - RNA, 24 nt, Human
uuauuccccaccaaaaacaaaaca

SEQ ID NO: 226571 - RNA, 19 nt, Human
uucaagaaguagcaugaaa

SEQ ID NO: 226572 - RNA, 22 nt, Human
uucauggagcggcgcuuacuuc

SEQ ID NO: 226573 - RNA, 19 nt, Human
uuggugauuaauguagucc

SEQ ID NO: 226574 - RNA, 21 nt, Human
uuggugccaaagaaagaauuc

SEQ ID NO: 226575 - RNA, 21 nt, Human
uuuaaugugaaagcuacugua

SEQ ID NO: 226576 - RNA, 21 nt, Human
uuuacauuuaaaguacaggga

SEQ ID NO: 226577 - RNA, 19 nt, Human
uuuagaaguagaaacgggg

SEQ ID NO: 226578 - RNA, 19 nt, Human
uuugaacccuauagcagca

SEQ ID NO: 226579 - RNA, 18 nt, Human
uuugcaaaaccugcccca

SEQ ID NO: 226580 - RNA, 25 nt, Human
uuugcagcauuuucagcacuucuga

SEQ ID NO: 226581 - RNA, 19 nt, Human
aaaacaaacacagacccac

SEQ ID NO: 226582 - RNA, 19 nt, Human
aaacaaacacagacccaca

SEQ ID NO: 226583 - RNA, 23 nt, Human
aaaguacccucacacccagaggc

SEQ ID NO: 226584 - RNA, 24 nt, Human
aagauccaaaauuaacccaacccc

SEQ ID NO: 226585 - RNA, 22 nt, Human
aagccuccagcuccucccacag

SEQ ID NO: 226586 - RNA, 24 nt, Human
agccuccagcuccucccacagcuu

SEQ ID NO: 226587 - RNA, 23 nt, Human
agcugagauuacacauggaaaca

SEQ ID NO: 226588 - RNA, 23 nt, Human
aguagcuuuucagcauucaguuu

SEQ ID NO: 226589 - RNA, 24 nt, Human
auaaaaacaaacacagacccacaa

SEQ ID NO: 226590 - RNA, 21 nt, Human
auccaaaauuaacccaaccca

SEQ ID NO: 226591 - RNA, 24 nt, Human
caaacacagacccacaauaacauc

SEQ ID NO: 226592 - RNA, 24 nt, Human
cacagcuucugugccccaaaacac

SEQ ID NO: 226593 - RNA, 19 nt, Human
cacccagaggcgaugacag

SEQ ID NO: 226594 - RNA, 21 nt, Human
cagacccgcccagagucgccu

SEQ ID NO: 226595 - RNA, 22 nt, Human
cagcagcggcgcugugguuacc

SEQ ID NO: 226596 - RNA, 21 nt, Human
cagcggcagcggcguggagag

SEQ ID NO: 226597 - RNA, 21 nt, Human
cagcggcguggagaggauggg

SEQ ID NO: 226598 - RNA, 27 nt, Human
cagcuaacaacauauaaaaauaaaaac

SEQ ID NO: 226599 - RNA, 26 nt, Human
ccagaggcgaugacaguccugaggcc

SEQ ID NO: 226600 - RNA, 21 nt, Human
ccagucuaguagcuuuucagc

SEQ ID NO: 226601 - RNA, 24 nt, Human
cccaaaacacuggagcggcccaga

SEQ ID NO: 226602 - RNA, 20 nt, Human
ccccaaaacacuggagcggc

SEQ ID NO: 226603 - RNA, 26 nt, Human
cgacgcaugcgcuugcucugcaccuc

SEQ ID NO: 226604 - RNA, 19 nt, Human
cgcccagagucgccuaagc

SEQ ID NO: 226605 - RNA, 23 nt, Human
cgccuaagccgggccgucacgac

SEQ ID NO: 226606 - RNA, 22 nt, Human
cggcagcggcagcggcguggag

SEQ ID NO: 226607 - RNA, 22 nt, Human
cuccagcuccucccacagcuuc

SEQ ID NO: 226608 - RNA, 23 nt, Human
cugcaaggcggggcagcagcggc

SEQ ID NO: 226609 - RNA, 22 nt, Human
gaagccuccagcuccucccaca

SEQ ID NO: 226610 - RNA, 19 nt, Human
gacgguggccaaaguaccc

SEQ ID NO: 226611 - RNA, 20 nt, Human
gagaggaugggguaucuuga

SEQ ID NO: 226612 - RNA, 20 nt, Human
gaggaugggguaucuugaga

SEQ ID NO: 226613 - RNA, 18 nt, Human
gcagcagcggcgcugugg

SEQ ID NO: 226614 - RNA, 25 nt, Human
gcagcuaacaacauauaaaaauaaa

SEQ ID NO: 226615 - RNA, 23 nt, Human
ggagaggaugggguaucuugaga

SEQ ID NO: 226616 - RNA, 21 nt, Human
ggcggcagcggcagcggcgug

SEQ ID NO: 226617 - RNA, 19 nt, Human
gggcagcagcggcgcugug

SEQ ID NO: 226618 - RNA, 23 nt, Human
uaaaaauaaaaacaaacacagac

SEQ ID NO: 226619 - RNA, 19 nt, Human
uaccacggugaagccucca

SEQ ID NO: 226620 - RNA, 24 nt, Human
uaccacggugaagccuccagcucc

SEQ ID NO: 226621 - RNA, 22 nt, Human
uacccucacacccagaggcgau

SEQ ID NO: 226622 - RNA, 21 nt, Human
uagcuuuucagcauucaguuu

SEQ ID NO: 226623 - RNA, 21 nt, Human
uccagcuccucccacagcuuc

SEQ ID NO: 226624 - RNA, 22 nt, Human
ugccccaaaacacuggagcggg

SEQ ID NO: 226625 - RNA, 22 nt, Human
ugguuugaugagugaacaaugu

SEQ ID NO: 226626 - RNA, 25 nt, Human
uuaacagaagacagaggggcugggg

SEQ ID NO: 226627 - RNA, 26 nt, Human
uugaugagugaacaaugucaguauca

SEQ ID NO: 226628 - RNA, 22 nt, Human
aagagcagccacccccgccuuu

SEQ ID NO: 226629 - RNA, 20 nt, Human
aagcugaggagaggggccga

SEQ ID NO: 226630 - RNA, 20 nt, Human
acccgcuggcugccucugcc

SEQ ID NO: 226631 - RNA, 19 nt, Human
agaaucccccacccgcugg

SEQ ID NO: 226632 - RNA, 24 nt, Human
agaaucccccacccgcuggcugcc

SEQ ID NO: 226633 - RNA, 23 nt, Human
agccauaaacacagcacggcccc

SEQ ID NO: 226634 - RNA, 19 nt, Human
agccggccuggcggaggca

SEQ ID NO: 226635 - RNA, 21 nt, Human
agcuucuccuucagguguucu

SEQ ID NO: 226636 - RNA, 22 nt, Human
aggcagcuccacgccgccgccu

SEQ ID NO: 226637 - RNA, 19 nt, Human
aggcuccucgcccaccccc

SEQ ID NO: 226638 - RNA, 19 nt, Human
agggggcuggccagcucug

SEQ ID NO: 226639 - RNA, 21 nt, Human
auaaacacagcacggccccgu

SEQ ID NO: 226640 - RNA, 20 nt, Human
auccccggcucgggcuccgg

SEQ ID NO: 226641 - RNA, 20 nt, Human
caccaggcagccggccuggc

SEQ ID NO: 226642 - RNA, 21 nt, Human
caccaggcagccggccuggcg

SEQ ID NO: 226643 - RNA, 20 nt, Human
cacccgcuggcugccucugc

SEQ ID NO: 226644 - RNA, 20 nt, Human
cacggccccguggcgggagg

SEQ ID NO: 226645 - RNA, 24 nt, Human
cacucucgccucuaccuccggggg

SEQ ID NO: 226646 - RNA, 18 nt, Human
cagcagggacaggccagu

SEQ ID NO: 226647 - RNA, 20 nt, Human
cagccggccuggcggaggca

SEQ ID NO: 226648 - RNA, 24 nt, Human
caggcaggugagcgagcagcagaa

SEQ ID NO: 226649 - RNA, 18 nt, Human
ccacccccgccuuuccgc

SEQ ID NO: 226650 - RNA, 24 nt, Human
ccacgcuaagggcucggcacugag

SEQ ID NO: 226651 - RNA, 26 nt, Human
ccagaggcuccucgcccacccccuaa

SEQ ID NO: 226652 - RNA, 21 nt, Human
ccagcugcgggaacccuccuu

SEQ ID NO: 226653 - RNA, 19 nt, Human
ccaguccccaugguucuug

SEQ ID NO: 226654 - RNA, 21 nt, Human
ccaguccccaugguucuuggg

SEQ ID NO: 226655 - RNA, 21 nt, Human
cccacccccuaaggagggggc

SEQ ID NO: 226656 - RNA, 18 nt, Human
cccacucuccacaggccc

SEQ ID NO: 226657 - RNA, 23 nt, Human
cccagaggcuccucgcccacccc

SEQ ID NO: 226658 - RNA, 23 nt, Human
cccagcugcgggaacccuccuug

SEQ ID NO: 226659 - RNA, 21 nt, Human
ccccagcugcgggaacccucc

SEQ ID NO: 226660 - RNA, 18 nt, Human
cccgcucgcgccccuccc

SEQ ID NO: 226661 - RNA, 28 nt, Human
cccggcccacucuccacaggccccgcag

SEQ ID NO: 226662 - RNA, 22 nt, Human
ccgccuccuccucggccagccc

SEQ ID NO: 226663 - RNA, 22 nt, Human
ccggcccacucuccacaggccc

SEQ ID NO: 226664 - RNA, 20 nt, Human
ccggcccggcccgccggcag

SEQ ID NO: 226665 - RNA, 23 nt, Human
ccuccacacucccgcccuccuca

SEQ ID NO: 226666 - RNA, 18 nt, Human
ccucggccagcccgcucg

SEQ ID NO: 226667 - RNA, 22 nt, Human
ccugccaggaagagcagccacc

SEQ ID NO: 226668 - RNA, 21 nt, Human
ccugggccuggcuaaugagcu

SEQ ID NO: 226669 - RNA, 18 nt, Human
ccuugaaggagaggggcg

SEQ ID NO: 226670 - RNA, 20 nt, Human
ccuugaaggagaggggcggg

SEQ ID NO: 226671 - RNA, 21 nt, Human
cgagagaccagcgagccaggc

SEQ ID NO: 226672 - RNA, 21 nt, Human
cgcccggggcucggcccggcc

SEQ ID NO: 226673 - RNA, 21 nt, Human
cgccucuaccuccgggggucc

SEQ ID NO: 226674 - RNA, 19 nt, Human
cggccgggcuggcuggggc

SEQ ID NO: 226675 - RNA, 18 nt, Human
cggugccccccagcucag

SEQ ID NO: 226676 - RNA, 20 nt, Human
cucagagccacagccgagag

SEQ ID NO: 226677 - RNA, 19 nt, Human
cuccacacucccgcccucc

SEQ ID NO: 226678 - RNA, 20 nt, Human
cuccacgccgccgccuccuc

SEQ ID NO: 226679 - RNA, 24 nt, Human
cuccuucagguguucuaccugcag

SEQ ID NO: 226680 - RNA, 19 nt, Human
cuggcuaaugagcuucucc

SEQ ID NO: 226681 - RNA, 19 nt, Human
cuggcuggggcuggggcgg

SEQ ID NO: 226682 - RNA, 24 nt, Human
cuucugaacauguuucucaucuuu

SEQ ID NO: 226683 - RNA, 19 nt, Human
cuuugaggggagacggggc

SEQ ID NO: 226684 - RNA, 25 nt, Human
gcacuggaguccucgucaaccggag

SEQ ID NO: 226685 - RNA, 22 nt, Human
gccagcccgcucgcgccccucc

SEQ ID NO: 226686 - RNA, 24 nt, Human
gcccaguucucaaccuccccgggc

SEQ ID NO: 226687 - RNA, 19 nt, Human
gcgcccggggcucggcccg

SEQ ID NO: 226688 - RNA, 23 nt, Human
gcuggcugccucugccagccaua

SEQ ID NO: 226689 - RNA, 20 nt, Human
ggaggcaggauccaggcguc

SEQ ID NO: 226690 - RNA, 20 nt, Human
ggcaggugagcgagcagcag

SEQ ID NO: 226691 - RNA, 21 nt, Human
ggcccaguucgcugauggccc

SEQ ID NO: 226692 - RNA, 20 nt, Human
ggcggccgggcuggcugggg

SEQ ID NO: 226693 - RNA, 21 nt, Human
gggcugggcgagcugcacuuc

SEQ ID NO: 226694 - RNA, 23 nt, Human
ggggcccaguucgcugauggccc

SEQ ID NO: 226695 - RNA, 25 nt, Human
guucuugggucugcccagaggcucc

SEQ ID NO: 226696 - RNA, 21 nt, Human
uaaaaauggcuaagcuuccaa

SEQ ID NO: 226697 - RNA, 24 nt, Human
uaaugagcuucuccuucagguguu

SEQ ID NO: 226698 - RNA, 18 nt, Human
ucagagccacagccgaga

SEQ ID NO: 226699 - RNA, 26 nt, Human
ucagagccacagccgagagacaccgu

SEQ ID NO: 226700 - RNA, 23 nt, Human
uccacacucccgcccuccucacg

SEQ ID NO: 226701 - RNA, 21 nt, Human
uccucggggcaccaggcagcc

SEQ ID NO: 226702 - RNA, 20 nt, Human
uccuugaaggagaggggcgg

SEQ ID NO: 226703 - RNA, 18 nt, Human
ucggcacugagcuagggc

SEQ ID NO: 226704 - RNA, 25 nt, Human
ucuccaagucggugccccccagcuc

SEQ ID NO: 226705 - RNA, 25 nt, Human
ucuccacaggccccgcagcgagggc

SEQ ID NO: 226706 - RNA, 22 nt, Human
ucugcccagaggcuccucgccc

SEQ ID NO: 226707 - RNA, 21 nt, Human
ucuuugaggggagacggggca

SEQ ID NO: 226708 - RNA, 18 nt, Human
ugagcgagcagcagaauc

SEQ ID NO: 226709 - RNA, 22 nt, Human
ugagcuagggcugggcgagcug

SEQ ID NO: 226710 - RNA, 22 nt, Human
ugccaggaagagcagccacccc

SEQ ID NO: 226711 - RNA, 22 nt, Human
ugcccagaggcuccucgcccac

SEQ ID NO: 226712 - RNA, 20 nt, Human
uggcuaagcuuccaaaaguu

SEQ ID NO: 226713 - RNA, 22 nt, Human
uggcucccagguuccacguccu

SEQ ID NO: 226714 - RNA, 23 nt, Human
uucagagggaagaaaauucgaga

SEQ ID NO: 226715 - RNA, 19 nt, Human
uuccggggccagcccaguc

SEQ ID NO: 226716 - RNA, 23 nt, Human
uuuuguguaaaaaggcuucuuuu

SEQ ID NO: 226717 - RNA, 24 nt, Human
uuuuuuuuuuuguguaaaaaggcu

SEQ ID NO: 226718 - RNA, 19 nt, Human
uuuuuuuuuuuuuuugugu

SEQ ID NO: 226719 - RNA, 19 nt, Human
uuuuuuuuuuuuuuuuugu

SEQ ID NO: 226720 - RNA, 20 nt, Human
uuuuuuuuuuuuuuuuuugg

SEQ ID NO: 226721 - RNA, 18 nt, Human
aaugccuuggcgaacacc

SEQ ID NO: 226722 - RNA, 25 nt, Human
caaaggaaacaaaaauaacaaggac

SEQ ID NO: 226723 - RNA, 24 nt, Human
caguaauauuuucaaaaaccuguu

SEQ ID NO: 226724 - RNA, 20 nt, Human
caucaaguaaauuacaaagg

SEQ ID NO: 226725 - RNA, 26 nt, Human
cucauaaugccuuggcgaacaccaau

SEQ ID NO: 226726 - RNA, 20 nt, Human
uagagucucauaaugccuug

SEQ ID NO: 226727 - RNA, 27 nt, Human
uauacaguaauauuuucaaaaaccugu

SEQ ID NO: 226728 - RNA, 21 nt, Human
ugaacaacuauacaguaauau

SEQ ID NO: 226729 - RNA, 28 nt, Human
ugaagauauaaacucaucaaguaaauua

SEQ ID NO: 226730 - RNA, 19 nt, Human
uuacaaaggaaacaaaaau

SEQ ID NO: 226731 - RNA, 21 nt, Human
aacccugaccucuuuuuuuuu

SEQ ID NO: 226732 - RNA, 22 nt, Human
acccagaggcagagacaggagc

SEQ ID NO: 226733 - RNA, 21 nt, Human
accuuggguuuuggaaaaaga

SEQ ID NO: 226734 - RNA, 20 nt, Human
agaggcugccacugcuuucc

SEQ ID NO: 226735 - RNA, 23 nt, Human
aggacuggggcauggggcggggu

SEQ ID NO: 226736 - RNA, 19 nt, Human
agggugucugccagcacuu

SEQ ID NO: 226737 - RNA, 24 nt, Human
auauuugugguguaaaccccagag

SEQ ID NO: 226738 - RNA, 23 nt, Human
cacaaaucuguggacagcacacc

SEQ ID NO: 226739 - RNA, 26 nt, Human
cacagcuucacauugugaaggaggcc

SEQ ID NO: 226740 - RNA, 19 nt, Human
cacaggcccccuuccuggu

SEQ ID NO: 226741 - RNA, 18 nt, Human
cacccaugugacugcagg

SEQ ID NO: 226742 - RNA, 19 nt, Human
cagaccccaccaccuccug

SEQ ID NO: 226743 - RNA, 26 nt, Human
caugacccagaggcagagacaggagc

SEQ ID NO: 226744 - RNA, 23 nt, Human
ccacugcuuuccuggggagcuug

SEQ ID NO: 226745 - RNA, 20 nt, Human
cccaugugacugcagggcag

SEQ ID NO: 226746 - RNA, 27 nt, Human
ccccaccaccuccuguuggguuaucug

SEQ ID NO: 226747 - RNA, 24 nt, Human
ccccagaggcugccacugcuuucc

SEQ ID NO: 226748 - RNA, 18 nt, Human
ccgcucuguccuggguga

SEQ ID NO: 226749 - RNA, 21 nt, Human
ccuuggcgccacugcacccac

SEQ ID NO: 226750 - RNA, 18 nt, Human
cggggcugugggaagggu

SEQ ID NO: 226751 - RNA, 18 nt, Human
cggggugcggagggccug

SEQ ID NO: 226752 - RNA, 21 nt, Human
cgucagaccccaccaccuccu

SEQ ID NO: 226753 - RNA, 21 nt, Human
cuaggccccuacagccucggc

SEQ ID NO: 226754 - RNA, 27 nt, Human
cuuccugguuaagguuuuuuuuuugcu

SEQ ID NO: 226755 - RNA, 19 nt, Human
gagggccuggagagaggcc

SEQ ID NO: 226756 - RNA, 21 nt, Human
ggacuggggcauggggcgggg

SEQ ID NO: 226757 - RNA, 23 nt, Human
ggacuucuaggccccuacagccu

SEQ ID NO: 226758 - RNA, 21 nt, Human
gggagaaggggaacaggcagg

SEQ ID NO: 226759 - RNA, 21 nt, Human
gggcauggggcggggugcgga

SEQ ID NO: 226760 - RNA, 22 nt, Human
gggcggggugcggagggccugg

SEQ ID NO: 226761 - RNA, 20 nt, Human
gggcuggaccacagcggggc

SEQ ID NO: 226762 - RNA, 22 nt, Human
ggggaacaggcaggggugggaa

SEQ ID NO: 226763 - RNA, 26 nt, Human
ggguuuuggaaaaagauugcauagcu

SEQ ID NO: 226764 - RNA, 20 nt, Human
guguuggggaggcaggcagg

SEQ ID NO: 226765 - RNA, 28 nt, Human
ucacaggcccccuuccugguuaagguuu

SEQ ID NO: 226766 - RNA, 23 nt, Human
ucagaccccaccaccuccuguug

SEQ ID NO: 226767 - RNA, 18 nt, Human
ucccggggcuggaccaca

SEQ ID NO: 226768 - RNA, 19 nt, Human
uccuaaccuucacaggccc

SEQ ID NO: 226769 - RNA, 19 nt, Human
uccuaaccuucacaggccc

SEQ ID NO: 226770 - RNA, 18 nt, Human
uccugggugaccagggug

SEQ ID NO: 226771 - RNA, 26 nt, Human
ucuuggggggguggggagcauuucug

SEQ ID NO: 226772 - RNA, 20 nt, Human
ugacccagaggcagagacag

SEQ ID NO: 226773 - RNA, 19 nt, Human
ugacugcagggcaggaugg

SEQ ID NO: 226774 - RNA, 19 nt, Human
ugccacugcuuuccugggg

SEQ ID NO: 226775 - RNA, 25 nt, Human
ugcggagggccuggagagaggccau

SEQ ID NO: 226776 - RNA, 19 nt, Human
uggacagcacaccagugag

SEQ ID NO: 226777 - RNA, 24 nt, Human
uggacuucuaggccccuacagccu

SEQ ID NO: 226778 - RNA, 21 nt, Human
uggagagaggccauggguccc

SEQ ID NO: 226779 - RNA, 20 nt, Human
uggaguaggaaaggacuggg

SEQ ID NO: 226780 - RNA, 26 nt, Human
uggggggguggggagcauuucuggag

SEQ ID NO: 226781 - RNA, 22 nt, Human
uggguuuuggaaaaagauugca

SEQ ID NO: 226782 - RNA, 20 nt, Human
uuggcgccacugcacccaca

SEQ ID NO: 226783 - RNA, 19 nt, Human
uuugcugaaagggccacag

SEQ ID NO: 226784 - RNA, 21 nt, Human
uuuucccucuugggggggugg

SEQ ID NO: 226785 - RNA, 20 nt, Human
uuuuccgcucuguccugggu

SEQ ID NO: 226786 - RNA, 18 nt, Human
acugcugacagaagacug

SEQ ID NO: 226787 - RNA, 19 nt, Human
agaacugugggcuaagcaa

SEQ ID NO: 226788 - RNA, 20 nt, Human
gagaggcacauucagauuug

SEQ ID NO: 226789 - RNA, 20 nt, Human
gagccucuuguauguuugga

SEQ ID NO: 226790 - RNA, 23 nt, Human
gagggagccucuuguauguuugg

SEQ ID NO: 226791 - RNA, 19 nt, Human
ggagccucuuguauguuug

SEQ ID NO: 226792 - RNA, 22 nt, Human
ggaguguguuuuuucuccagca

SEQ ID NO: 226793 - RNA, 20 nt, Human
gggcuaagcaaaggagugug

SEQ ID NO: 226794 - RNA, 24 nt, Human
gucaagugaaauggagaacugugg

SEQ ID NO: 226795 - RNA, 18 nt, Human
guggaacagcaugaggga

SEQ ID NO: 226796 - RNA, 19 nt, Human
uauuugaaggauggaaaac

SEQ ID NO: 226797 - RNA, 21 nt, Human
uauuugaaggauggaaaacua

SEQ ID NO: 226798 - RNA, 21 nt, Human
ucagauuccagcugcugguac

SEQ ID NO: 226799 - RNA, 21 nt, Human
ucagugugauugcagccucaa

SEQ ID NO: 226800 - RNA, 19 nt, Human
ucuccagcaggcagugggg

SEQ ID NO: 226801 - RNA, 22 nt, Human
ucuuguauguuuggaauuguga

SEQ ID NO: 226802 - RNA, 18 nt, Human
ugaaauggagaacugugg

SEQ ID NO: 226803 - RNA, 19 nt, Human
ugacagaagacugaaagcu

SEQ ID NO: 226804 - RNA, 24 nt, Human
ugacagaagacugaaagcuagucu

SEQ ID NO: 226805 - RNA, 22 nt, Human
uggaacaacacgugucuaagug

SEQ ID NO: 226806 - RNA, 23 nt, Human
ugugaguuccucagugugauugc

SEQ ID NO: 226807 - RNA, 20 nt, Human
uuguauguuuggaauuguga

SEQ ID NO: 226808 - RNA, 21 nt, Human
uuguauguuuggaauugugag

SEQ ID NO: 226809 - RNA, 18 nt, Human
acugcugacagaagacug

SEQ ID NO: 226810 - RNA, 19 nt, Human
agaacugugggcuaagcaa

SEQ ID NO: 226811 - RNA, 18 nt, Human
caagugaaauggagaacu

SEQ ID NO: 226812 - RNA, 20 nt, Human
gagaggcacauucagauuug

SEQ ID NO: 226813 - RNA, 20 nt, Human
gagccucuuguauguuugga

SEQ ID NO: 226814 - RNA, 23 nt, Human
gagggagccucuuguauguuugg

SEQ ID NO: 226815 - RNA, 19 nt, Human
ggagccucuuguauguuug

SEQ ID NO: 226816 - RNA, 22 nt, Human
ggaguguguuuuuucuccagca

SEQ ID NO: 226817 - RNA, 20 nt, Human
gggcuaagcaaaggagugug

SEQ ID NO: 226818 - RNA, 18 nt, Human
guggaacagcaugaggga

SEQ ID NO: 226819 - RNA, 19 nt, Human
uauuugaaggauggaaaac

SEQ ID NO: 226820 - RNA, 21 nt, Human
uauuugaaggauggaaaacua

SEQ ID NO: 226821 - RNA, 21 nt, Human
ucagauuccagcugcugguac

SEQ ID NO: 226822 - RNA, 21 nt, Human
ucagugugauugcagccucaa

SEQ ID NO: 226823 - RNA, 19 nt, Human
ucuccagcaggcagugggg

SEQ ID NO: 226824 - RNA, 22 nt, Human
ucuuguauguuuggaauuguga

SEQ ID NO: 226825 - RNA, 18 nt, Human
ugaaauggagaacugugg

SEQ ID NO: 226826 - RNA, 19 nt, Human
ugacagaagacugaaagcu

SEQ ID NO: 226827 - RNA, 24 nt, Human
ugacagaagacugaaagcuagucu

SEQ ID NO: 226828 - RNA, 22 nt, Human
uggaacaacacgugucuaagug

SEQ ID NO: 226829 - RNA, 23 nt, Human
ugugaguuccucagugugauugc

SEQ ID NO: 226830 - RNA, 18 nt, Human
uguggugugaggaagagc

SEQ ID NO: 226831 - RNA, 20 nt, Human
uuguauguuuggaauuguga

SEQ ID NO: 226832 - RNA, 21 nt, Human
uuguauguuuggaauugugag

SEQ ID NO: 226833 - RNA, 20 nt, Human
acugcugacagaaggcugaa

SEQ ID NO: 226834 - RNA, 19 nt, Human
agacaggcggccgcgcccc

SEQ ID NO: 226835 - RNA, 20 nt, Human
gagccucuuguauguuugga

SEQ ID NO: 226836 - RNA, 23 nt, Human
gagggagccucuuguauguuugg

SEQ ID NO: 226837 - RNA, 19 nt, Human
ggagccucuuguauguuug

SEQ ID NO: 226838 - RNA, 20 nt, Human
gggcuaagcaaaggagugug

SEQ ID NO: 226839 - RNA, 18 nt, Human
guggaacagcaugaggga

SEQ ID NO: 226840 - RNA, 19 nt, Human
uauuugaaggagggaaaac

SEQ ID NO: 226841 - RNA, 21 nt, Human
uauuugaaggagggaaaacua

SEQ ID NO: 226842 - RNA, 22 nt, Human
uauuugaaggagggaaaacuac

SEQ ID NO: 226843 - RNA, 21 nt, Human
ucagauuccagcugcugguac

SEQ ID NO: 226844 - RNA, 21 nt, Human
ucagugugauugcagccucaa

SEQ ID NO: 226845 - RNA, 23 nt, Human
ucucuccagcaggcaguggggac

SEQ ID NO: 226846 - RNA, 22 nt, Human
ucuuguauguuuggaauuguga

SEQ ID NO: 226847 - RNA, 22 nt, Human
uggaacagcacgugucuaagug

SEQ ID NO: 226848 - RNA, 23 nt, Human
ugugaguuccucagugugauugc

SEQ ID NO: 226849 - RNA, 18 nt, Human
uguggugugaggaagagc

SEQ ID NO: 226850 - RNA, 20 nt, Human
uuguauguuuggaauuguga

SEQ ID NO: 226851 - RNA, 21 nt, Human
uuguauguuuggaauugugag

SEQ ID NO: 226852 - RNA, 18 nt, Human
agagacaggcaccagauu

SEQ ID NO: 226853 - RNA, 21 nt, Human
agaggagagaacuacacugaa

SEQ ID NO: 226854 - RNA, 22 nt, Human
aggaguguguuuucucugcagc

SEQ ID NO: 226855 - RNA, 23 nt, Human
gacauugguaagcaagagacagg

SEQ ID NO: 226856 - RNA, 22 nt, Human
gagagccucuuguauguuugga

SEQ ID NO: 226857 - RNA, 24 nt, Human
gugaugcucuaagauggagacuca

SEQ ID NO: 226858 - RNA, 18 nt, Human
guggaacagcacgaggga

SEQ ID NO: 226859 - RNA, 25 nt, Human
uaagguuugcugaugccaaccacag

SEQ ID NO: 226860 - RNA, 18 nt, Human
uauaagguuugcugaugc

SEQ ID NO: 226861 - RNA, 21 nt, Human
ucagugugauugcagccucaa

SEQ ID NO: 226862 - RNA, 22 nt, Human
ucucugcagcaggcagugggga

SEQ ID NO: 226863 - RNA, 22 nt, Human
ucuuguauguuuggaauuguga

SEQ ID NO: 226864 - RNA, 18 nt, Human
ugaggaagagugaugcuc

SEQ ID NO: 226865 - RNA, 22 nt, Human
ugaggaagagugaugcucuaag

SEQ ID NO: 226866 - RNA, 22 nt, Human
uggaacagcacgugucuaagug

SEQ ID NO: 226867 - RNA, 23 nt, Human
ugugaguuccucagugugauugc

SEQ ID NO: 226868 - RNA, 19 nt, Human
uuauaagguuugcugaugc

SEQ ID NO: 226869 - RNA, 21 nt, Human
uuggagaggugggccaggggu

SEQ ID NO: 226870 - RNA, 20 nt, Human
uuguauguuuggaauuguga

SEQ ID NO: 226871 - RNA, 21 nt, Human
uuguauguuuggaauugugag

SEQ ID NO: 226872 - RNA, 23 nt, Human
aagcaagagagaggcauguucag

SEQ ID NO: 226873 - RNA, 19 nt, Human
agacaggcggccgcgcccc

SEQ ID NO: 226874 - RNA, 20 nt, Human
ccgcgccccagcucagcuca

SEQ ID NO: 226875 - RNA, 22 nt, Human
cgccccagcucagcucagcagc

SEQ ID NO: 226876 - RNA, 19 nt, Human
gagccucuuguaugucugg

SEQ ID NO: 226877 - RNA, 23 nt, Human
gagggagccucuuguaugucugg

SEQ ID NO: 226878 - RNA, 22 nt, Human
gcaagagagaggcauguucaga

SEQ ID NO: 226879 - RNA, 18 nt, Human
ggagccucuuguaugucu

SEQ ID NO: 226880 - RNA, 20 nt, Human
gggcuaagcaaaggagugug

SEQ ID NO: 226881 - RNA, 18 nt, Human
gugaaacagcaugaggga

SEQ ID NO: 226882 - RNA, 20 nt, Human
uauuugaaaaggagacagcu

SEQ ID NO: 226883 - RNA, 21 nt, Human
ucagugugauugcagccucaa

SEQ ID NO: 226884 - RNA, 18 nt, Human
ucaguuggagaggugggc

SEQ ID NO: 226885 - RNA, 21 nt, Human
ucaguuggagaggugggcagg

SEQ ID NO: 226886 - RNA, 22 nt, Human
ucucuccagcaggcagugggga

SEQ ID NO: 226887 - RNA, 19 nt, Human
ugaaaaggagacagcuaca

SEQ ID NO: 226888 - RNA, 23 nt, Human
ugugaguuccucagugugauugc

SEQ ID NO: 226889 - RNA, 18 nt, Human
uguggugugaggaagagc

SEQ ID NO: 226890 - RNA, 23 nt, Human
agaagacaacuuuggaucugggc

SEQ ID NO: 226891 - RNA, 23 nt, Human
cgagugauuuuucucugugugaa

SEQ ID NO: 226892 - RNA, 20 nt, Human
uauguacaugcugguaucug

SEQ ID NO: 226893 - RNA, 24 nt, Human
ucagaagggcgagugauuuuucuc

SEQ ID NO: 226894 - RNA, 19 nt, Human
ucagcauuuggaaguucua

SEQ ID NO: 226895 - RNA, 18 nt, Human
ucuguugggggugucuug

SEQ ID NO: 226896 - RNA, 24 nt, Human
uuggaaguucuauguacaugcugg

SEQ ID NO: 226897 - RNA, 23 nt, Human
aagcaagagagaggcauguucag

SEQ ID NO: 226898 - RNA, 23 nt, Human
agaagacaacuuuggaucugggc

SEQ ID NO: 226899 - RNA, 20 nt, Human
gagccucuuguauguuugga

SEQ ID NO: 226900 - RNA, 26 nt, Human
gagcgaugcccuaagaugaagacuga

SEQ ID NO: 226901 - RNA, 22 nt, Human
gagugauuucucucugugugaa

SEQ ID NO: 226902 - RNA, 22 nt, Human
gcaagagagaggcauguucaga

SEQ ID NO: 226903 - RNA, 19 nt, Human
ggagccucuuguauguuug

SEQ ID NO: 226904 - RNA, 23 nt, Human
ggcagacauguuuauuugaaggc

SEQ ID NO: 226905 - RNA, 20 nt, Human
gggcuaagcaaaggagugug

SEQ ID NO: 226906 - RNA, 20 nt, Human
uauguacaugcugguaucug

SEQ ID NO: 226907 - RNA, 19 nt, Human
uauuugaaggcgggaaaac

SEQ ID NO: 226908 - RNA, 21 nt, Human
uauuugaaggcgggaaaacua

SEQ ID NO: 226909 - RNA, 24 nt, Human
ucagaagggcgagugauuucucuc

SEQ ID NO: 226910 - RNA, 21 nt, Human
ucagauuccagcugcugguac

SEQ ID NO: 226911 - RNA, 19 nt, Human
ucagcauuuggaaguucua

SEQ ID NO: 226912 - RNA, 21 nt, Human
ucagugugauugcagccucag

SEQ ID NO: 226913 - RNA, 23 nt, Human
ucucuccagcaggcaguggggac

SEQ ID NO: 226914 - RNA, 18 nt, Human
ucuguugggggugucuug

SEQ ID NO: 226915 - RNA, 22 nt, Human
ucuuguauguuuggaauuguga

SEQ ID NO: 226916 - RNA, 22 nt, Human
uggaacagcacgugucuaagug

SEQ ID NO: 226917 - RNA, 23 nt, Human
ugugaguuccucagugugauugc

SEQ ID NO: 226918 - RNA, 24 nt, Human
uuggaaguucuauguacaugcugg

SEQ ID NO: 226919 - RNA, 20 nt, Human
uuguauguuuggaauuguga

SEQ ID NO: 226920 - RNA, 21 nt, Human
uuguauguuuggaauugugag

SEQ ID NO: 226921 - RNA, 24 nt, Human
uuuuacugcuggcagaaggcugaa

SEQ ID NO: 226922 - RNA, 23 nt, Human
aagcaagagagaggcauguucag

SEQ ID NO: 226923 - RNA, 23 nt, Human
agaagacaacuuuggaucugggc

SEQ ID NO: 226924 - RNA, 19 nt, Human
agacaggcgaccgcgcccc

SEQ ID NO: 226925 - RNA, 19 nt, Human
cccuaagaugaagacugau

SEQ ID NO: 226926 - RNA, 23 nt, Human
cgagugauuuuucucugugugaa

SEQ ID NO: 226927 - RNA, 26 nt, Human
gagcgaugcccuaagaugaagacuga

SEQ ID NO: 226928 - RNA, 22 nt, Human
gcaagagagaggcauguucaga

SEQ ID NO: 226929 - RNA, 20 nt, Human
uauguacaugcugguaucug

SEQ ID NO: 226930 - RNA, 24 nt, Human
ucagaagggcgagugauuuuucuc

SEQ ID NO: 226931 - RNA, 21 nt, Human
ucagauuccagcugcugguac

SEQ ID NO: 226932 - RNA, 19 nt, Human
ucagcauuuggaaguucua

SEQ ID NO: 226933 - RNA, 23 nt, Human
ucucuccagcaggcaguggggac

SEQ ID NO: 226934 - RNA, 18 nt, Human
ucuguugggggugucuug

SEQ ID NO: 226935 - RNA, 24 nt, Human
uuggaaguucuauguacaugcugg

SEQ ID NO: 226936 - RNA, 23 nt, Human
aagcaagagagaggcauguucag

SEQ ID NO: 226937 - RNA, 21 nt, Human
agaggagagagcuacacugaa

SEQ ID NO: 226938 - RNA, 22 nt, Human
aggaguguguuuucucugcagc

SEQ ID NO: 226939 - RNA, 24 nt, Human
aggcaguggcgaccuuaggcauuu

SEQ ID NO: 226940 - RNA, 22 nt, Human
auaaauuuuacugaugacagaa

SEQ ID NO: 226941 - RNA, 19 nt, Human
caagugaaauagauaccuu

SEQ ID NO: 226942 - RNA, 18 nt, Human
cauuggaucuggcaaccu

SEQ ID NO: 226943 - RNA, 23 nt, Human
ccuugugggcuaagcaaaggagu

SEQ ID NO: 226944 - RNA, 20 nt, Human
gagccucuuguauguuugga

SEQ ID NO: 226945 - RNA, 23 nt, Human
gagggagccucuuguauguuugg

SEQ ID NO: 226946 - RNA, 20 nt, Human
gaugacagaaggcugaaaga

SEQ ID NO: 226947 - RNA, 22 nt, Human
gcaagagagaggcauguucaga

SEQ ID NO: 226948 - RNA, 20 nt, Human
gggcuaagcaaaggagugug

SEQ ID NO: 226949 - RNA, 18 nt, Human
guggaacagcaugaggga

SEQ ID NO: 226950 - RNA, 21 nt, Human
ucagugugauugcagccucaa

SEQ ID NO: 226951 - RNA, 22 nt, Human
ucuuguauguuuggaauuguga

SEQ ID NO: 226952 - RNA, 21 nt, Human
ugaaagauagucugaggggag

SEQ ID NO: 226953 - RNA, 20 nt, Human
ugaaauagauaccuuguggg

SEQ ID NO: 226954 - RNA, 24 nt, Human
ugacagaaggcugaaagauagucu

SEQ ID NO: 226955 - RNA, 22 nt, Human
uggaacagcaaguguguaagug

SEQ ID NO: 226956 - RNA, 23 nt, Human
ugugaguuccucagugugauugc

SEQ ID NO: 226957 - RNA, 20 nt, Human
uuguauguuuggaauuguga

SEQ ID NO: 226958 - RNA, 21 nt, Human
uuguauguuuggaauugugag

SEQ ID NO: 226959 - RNA, 24 nt, Human
augcucugacuccuuuggggucug

SEQ ID NO: 226960 - RNA, 20 nt, Human
ccccaccccgcccccgcccc

SEQ ID NO: 226961 - RNA, 21 nt, Human
cccccaccccgcccccgcccc

SEQ ID NO: 226962 - RNA, 19 nt, Human
ccccccaccccgcccccgc

SEQ ID NO: 226963 - RNA, 21 nt, Human
cccccccaccccgcccccgcc

SEQ ID NO: 226964 - RNA, 25 nt, Human
cccccccaccccgcccccgccccgc

SEQ ID NO: 226965 - RNA, 18 nt, Human
cccccgccccgcaugcuc

SEQ ID NO: 226966 - RNA, 19 nt, Human
cccccucccuuagcccuac

SEQ ID NO: 226967 - RNA, 22 nt, Human
ccccgcaugcucugacuccuuu

SEQ ID NO: 226968 - RNA, 21 nt, Human
ccgccccgcaugcucugacuc

SEQ ID NO: 226969 - RNA, 21 nt, Human
ccuacgucccccccaccccgc

SEQ ID NO: 226970 - RNA, 19 nt, Human
ccucggguuggaagcucca

SEQ ID NO: 226971 - RNA, 24 nt, Human
ccuggcugggugaauguccagagg

SEQ ID NO: 226972 - RNA, 20 nt, Human
cgcccccgccccgcaugcuc

SEQ ID NO: 226973 - RNA, 22 nt, Human
cgucccccccaccccgcccccg

SEQ ID NO: 226974 - RNA, 19 nt, Human
cucaguccuggccugggca

SEQ ID NO: 226975 - RNA, 23 nt, Human
cucaguccuggccugggcaggag

SEQ ID NO: 226976 - RNA, 21 nt, Human
gccucaguccuggccugggca

SEQ ID NO: 226977 - RNA, 22 nt, Human
gccucggguuggaagcuccagc

SEQ ID NO: 226978 - RNA, 23 nt, Human
gugaauguccagagggugggcag

SEQ ID NO: 226979 - RNA, 21 nt, Human
uagcccuacgucccccccacc

SEQ ID NO: 226980 - RNA, 23 nt, Human
ucccccccaccccgcccccgccc

SEQ ID NO: 226981 - RNA, 23 nt, Human
ucugaggugacgagaccaccugg

SEQ ID NO: 226982 - RNA, 18 nt, Human
ugagaagagccagguccu

SEQ ID NO: 226983 - RNA, 23 nt, Human
ugagaagagccagguccuagaag

SEQ ID NO: 226984 - RNA, 22 nt, Human
ugcucugacuccuuuggggucu

SEQ ID NO: 226985 - RNA, 18 nt, Human
aaaagacauugacaaaac

SEQ ID NO: 226986 - RNA, 26 nt, Human
aaaauaaccaucauggaagccaaaag

SEQ ID NO: 226987 - RNA, 23 nt, Human
aaaggacccucuuggacucaggg

SEQ ID NO: 226988 - RNA, 18 nt, Human
aacacaaccccaaaaucu

SEQ ID NO: 226989 - RNA, 19 nt, Human
aagggggaaaccauaaagg

SEQ ID NO: 226990 - RNA, 18 nt, Human
aauagaaacacaaaggaa

SEQ ID NO: 226991 - RNA, 23 nt, Human
acacacauacaaacguacauaca

SEQ ID NO: 226992 - RNA, 20 nt, Human
accauauuuuugggcagaau

SEQ ID NO: 226993 - RNA, 21 nt, Human
agaaagacaggauugcagugg

SEQ ID NO: 226994 - RNA, 18 nt, Human
agacaggauugcaguggg

SEQ ID NO: 226995 - RNA, 19 nt, Human
agacaggauugcagugggg

SEQ ID NO: 226996 - RNA, 24 nt, Human
aggaauaaaacacguggaacacca

SEQ ID NO: 226997 - RNA, 25 nt, Human
aggcaacauaccugaaucccugaag

SEQ ID NO: 226998 - RNA, 26 nt, Human
aggcaacauaccugaaucuuucaaga

SEQ ID NO: 226999 - RNA, 19 nt, Human
auaaaacacguggaacacc

SEQ ID NO: 227000 - RNA, 21 nt, Human
auaccugaaucuuucaagaca

SEQ ID NO: 227001 - RNA, 24 nt, Human
auucugaagcugauaggcuuguuc

SEQ ID NO: 227002 - RNA, 21 nt, Human
caacacaaccccaaaaucugu

SEQ ID NO: 227003 - RNA, 25 nt, Human
caagacaaaacucucaaugaagugc

SEQ ID NO: 227004 - RNA, 23 nt, Human
caaggacucaugggcuugggaau

SEQ ID NO: 227005 - RNA, 23 nt, Human
caaguugaaagaaaagaaaauaa

SEQ ID NO: 227006 - RNA, 31 nt, Human
cacacauacaaacguacauacacauauauag

SEQ ID NO: 227007 - RNA, 21 nt, Human
cacaguucucuaaauguaguc

SEQ ID NO: 227008 - RNA, 18 nt, Human
cacguggaacaccaacau

SEQ ID NO: 227009 - RNA, 18 nt, Human
cagaaagacaggauugca

SEQ ID NO: 227010 - RNA, 18 nt, Human
cagaauaaguucaucagc

SEQ ID NO: 227011 - RNA, 20 nt, Human
cagggcaaaaauaccccucc

SEQ ID NO: 227012 - RNA, 20 nt, Human
caguccauaccucccucucu

SEQ ID NO: 227013 - RNA, 24 nt, Human
cagugcaaaugguuacuuccagau

SEQ ID NO: 227014 - RNA, 22 nt, Human
cauaccucccucucuuuuucca

SEQ ID NO: 227015 - RNA, 20 nt, Human
cauugaguacaaugccauuc

SEQ ID NO: 227016 - RNA, 24 nt, Human
ccaggcuacagucuaaaggguaaa

SEQ ID NO: 227017 - RNA, 27 nt, Human
cccaguccauaccucccucucuuuuuc

SEQ ID NO: 227018 - RNA, 19 nt, Human
ccugaaucuuucaagacaa

SEQ ID NO: 227019 - RNA, 20 nt, Human
ccugaaucuuucaagacaac

SEQ ID NO: 227020 - RNA, 28 nt, Human
cuacacacauacaaacguacauacacau

SEQ ID NO: 227021 - RNA, 18 nt, Human
cuauuuaaaaaccagguc

SEQ ID NO: 227022 - RNA, 21 nt, Human
cucaugcagugguccacagaa

SEQ ID NO: 227023 - RNA, 18 nt, Human
cuguuuccuucaaacuua

SEQ ID NO: 227024 - RNA, 23 nt, Human
gaaaggacucuggcccccagucc

SEQ ID NO: 227025 - RNA, 19 nt, Human
gacaacacaaccccaaaau

SEQ ID NO: 227026 - RNA, 23 nt, Human
gauaacggccacaguucucuaaa

SEQ ID NO: 227027 - RNA, 24 nt, Human
gcagaauuggagaagccuuggaaa

SEQ ID NO: 227028 - RNA, 26 nt, Human
gcaguguuuucccacuccugugggag

SEQ ID NO: 227029 - RNA, 18 nt, Human
ggaaaggacucuggcccc

SEQ ID NO: 227030 - RNA, 20 nt, Human
gggaggccuucucuccaauu

SEQ ID NO: 227031 - RNA, 20 nt, Human
ggugacaacacaaccccaaa

SEQ ID NO: 227032 - RNA, 21 nt, Human
gucaauagaaacacaaaggaa

SEQ ID NO: 227033 - RNA, 21 nt, Human
gugcuggcuagggaggccuuc

SEQ ID NO: 227034 - RNA, 21 nt, Human
uaaaggacccucuuggacuca

SEQ ID NO: 227035 - RNA, 18 nt, Human
uaagauggcaguguuuuc

SEQ ID NO: 227036 - RNA, 20 nt, Human
uacaagaauaauauccaggc

SEQ ID NO: 227037 - RNA, 27 nt, Human
uacauaagaauccaaacuaagauggca

SEQ ID NO: 227038 - RNA, 21 nt, Human
uaccugaaucuuucaagacaa

SEQ ID NO: 227039 - RNA, 24 nt, Human
uaccugaaucuuucaagacaacac

SEQ ID NO: 227040 - RNA, 23 nt, Human
uagaugcguauauacaagugcug

SEQ ID NO: 227041 - RNA, 24 nt, Human
uaguauaaaagcucaugcaguggu

SEQ ID NO: 227042 - RNA, 18 nt, Human
uauagaugcguauauaca

SEQ ID NO: 227043 - RNA, 20 nt, Human
uaucaucauacuacuaugga

SEQ ID NO: 227044 - RNA, 23 nt, Human
uauccuggaguuggaugcaaguu

SEQ ID NO: 227045 - RNA, 22 nt, Human
uauggaagcuucugguaagcua

SEQ ID NO: 227046 - RNA, 18 nt, Human
uauugggcagugaggaag

SEQ ID NO: 227047 - RNA, 20 nt, Human
uauugggcagugaggaaggg

SEQ ID NO: 227048 - RNA, 23 nt, Human
uauugggcagugaggaaggggag

SEQ ID NO: 227049 - RNA, 20 nt, Human
ucagaauguuuucuguucau

SEQ ID NO: 227050 - RNA, 22 nt, Human
ucagacaaaguauggcaagaca

SEQ ID NO: 227051 - RNA, 22 nt, Human
ucagcuaaaagaggagauuuug

SEQ ID NO: 227052 - RNA, 22 nt, Human
ucaugguagaagcuacguugcu

SEQ ID NO: 227053 - RNA, 20 nt, Human
uccaggcuacagucuaaagg

SEQ ID NO: 227054 - RNA, 25 nt, Human
uccauaccucccucucuuuuuccaa

SEQ ID NO: 227055 - RNA, 22 nt, Human
ucccucucuuuuuccaaaucag

SEQ ID NO: 227056 - RNA, 20 nt, Human
ucuaaggaacagguacagua

SEQ ID NO: 227057 - RNA, 19 nt, Human
ucuagacagcuaugugaaa

SEQ ID NO: 227058 - RNA, 21 nt, Human
ucucuugggugacaacacaac

SEQ ID NO: 227059 - RNA, 23 nt, Human
ucucuugggugacaacacaaccc

SEQ ID NO: 227060 - RNA, 23 nt, Human
ugaaaagaaacaagagcaguacu

SEQ ID NO: 227061 - RNA, 25 nt, Human
ugaaaagaaacaagagcaguacuaa

SEQ ID NO: 227062 - RNA, 24 nt, Human
ugacaaaacucucaaugaagugcc

SEQ ID NO: 227063 - RNA, 21 nt, Human
ugagacaguagcauuauggaa

SEQ ID NO: 227064 - RNA, 26 nt, Human
ugauguucuguuuuccacauaaagga

SEQ ID NO: 227065 - RNA, 21 nt, Human
uggaaaggacucuggccccca

SEQ ID NO: 227066 - RNA, 19 nt, Human
uggaugcaaguugaaagaa

SEQ ID NO: 227067 - RNA, 20 nt, Human
uggcaagacaaaacucucaa

SEQ ID NO: 227068 - RNA, 21 nt, Human
uggcaguguuuucccacuccu

SEQ ID NO: 227069 - RNA, 25 nt, Human
uggcaguguuuucccacuccugugg

SEQ ID NO: 227070 - RNA, 22 nt, Human
uggcccccaguccauaccuccc

SEQ ID NO: 227071 - RNA, 23 nt, Human
uggccuaugucucauucccagca

SEQ ID NO: 227072 - RNA, 28 nt, Human
ugucuacacacauacaaacguacauaca

SEQ ID NO: 227073 - RNA, 18 nt, Human
uguuuuguuuuguuuuua

SEQ ID NO: 227074 - RNA, 19 nt, Human
uuacuaccauuuauucagg

SEQ ID NO: 227075 - RNA, 18 nt, Human
uuguucacacuuggggau

SEQ ID NO: 227076 - RNA, 19 nt, Human
uuuguucacacuuggggau

SEQ ID NO: 227077 - RNA, 18 nt, Human
uuuguuuuguuuuguuuu

SEQ ID NO: 227078 - RNA, 21 nt, Human
uuuugggcagaauuggagaag

SEQ ID NO: 227079 - RNA, 18 nt, Human
aaaauagaguccugcucc

SEQ ID NO: 227080 - RNA, 20 nt, Human
aagcaaacaugaacuguuac

SEQ ID NO: 227081 - RNA, 22 nt, Human
aagcaaacaugaacuguuacua

SEQ ID NO: 227082 - RNA, 19 nt, Human
agaacagauaaagaugugg

SEQ ID NO: 227083 - RNA, 25 nt, Human
agcgcccucuccacugucccugcuu

SEQ ID NO: 227084 - RNA, 19 nt, Human
agcggcggcagauaguccu

SEQ ID NO: 227085 - RNA, 23 nt, Human
aggcagcgcugcgauccagcaca

SEQ ID NO: 227086 - RNA, 19 nt, Human
auagaguccugcuccaugc

SEQ ID NO: 227087 - RNA, 22 nt, Human
auagaguccugcuccaugcaag

SEQ ID NO: 227088 - RNA, 22 nt, Human
cagcgcugcgauccagcacaaa

SEQ ID NO: 227089 - RNA, 21 nt, Human
cccugcuucccgcagcgcuuc

SEQ ID NO: 227090 - RNA, 25 nt, Human
cgaacagcggcggcagauaguccuu

SEQ ID NO: 227091 - RNA, 23 nt, Human
cucuccacugucccugcuucccg

SEQ ID NO: 227092 - RNA, 24 nt, Human
cucuccacugucccugcuucccgc

SEQ ID NO: 227093 - RNA, 22 nt, Human
cuggagcuccagcauauugcac

SEQ ID NO: 227094 - RNA, 21 nt, Human
gcuccagcauauugcacgaac

SEQ ID NO: 227095 - RNA, 22 nt, Human
gcuccagcauauugcacgaaca

SEQ ID NO: 227096 - RNA, 20 nt, Human
ggaaaggcagcgcugcgauc

SEQ ID NO: 227097 - RNA, 21 nt, Human
gguagcaagaacagauaaaga

SEQ ID NO: 227098 - RNA, 18 nt, Human
uauugcacgaacagcggc

SEQ ID NO: 227099 - RNA, 23 nt, Human
ucuggagcuccagcauauugcac

SEQ ID NO: 227100 - RNA, 19 nt, Human
uuaaaauagaguccugcuc

SEQ ID NO: 227101 - RNA, 20 nt, Human
uuaaaauagaguccugcucc

SEQ ID NO: 227102 - RNA, 18 nt, Human
uucuggagccaugcaaau

SEQ ID NO: 227103 - RNA, 19 nt, Human
uuucuggagccaugcaaau

SEQ ID NO: 227104 - RNA, 22 nt, Human
aaaaagagaacaaauucaggca

SEQ ID NO: 227105 - RNA, 26 nt, Human
aaaaauuaauaaagauacuaacuaua

SEQ ID NO: 227106 - RNA, 22 nt, Human
aaacauaaaauagaccucagag

SEQ ID NO: 227107 - RNA, 25 nt, Human
aaacauaaaauagaccucagagauc

SEQ ID NO: 227108 - RNA, 24 nt, Human
aaagcuuaucuuucaugaaaaaau

SEQ ID NO: 227109 - RNA, 19 nt, Human
aagaaacuagucuaacaaa

SEQ ID NO: 227110 - RNA, 20 nt, Human
accagauugcuuuugaaccu

SEQ ID NO: 227111 - RNA, 18 nt, Human
agaugccagugagacaga

SEQ ID NO: 227112 - RNA, 22 nt, Human
aggcaaaaaguugcaggcagau

SEQ ID NO: 227113 - RNA, 19 nt, Human
aggcauuauuauggcagcu

SEQ ID NO: 227114 - RNA, 21 nt, Human
aguaaaacuaguucaaagcua

SEQ ID NO: 227115 - RNA, 18 nt, Human
aucaugcuuuugaagacu

SEQ ID NO: 227116 - RNA, 22 nt, Human
caaaaagagaacaaauucaggc

SEQ ID NO: 227117 - RNA, 20 nt, Human
cacaacacuuagaggugcaa

SEQ ID NO: 227118 - RNA, 20 nt, Human
cagaaguagcagcaaaaaca

SEQ ID NO: 227119 - RNA, 24 nt, Human
ccagaaaaacauuaaauuuagaag

SEQ ID NO: 227120 - RNA, 23 nt, Human
cccauuucaaaaccucugucaua

SEQ ID NO: 227121 - RNA, 19 nt, Human
cuagucuaacaaacgggaa

SEQ ID NO: 227122 - RNA, 22 nt, Human
cuccuuuccuccaccuagagcc

SEQ ID NO: 227123 - RNA, 19 nt, Human
gaaauuacaguacagcuaa

SEQ ID NO: 227124 - RNA, 23 nt, Human
gaauagaaaguagugucacuguu

SEQ ID NO: 227125 - RNA, 21 nt, Human
gacccugugucagugagguug

SEQ ID NO: 227126 - RNA, 19 nt, Human
gcaauuacuacuuccagaa

SEQ ID NO: 227127 - RNA, 25 nt, Human
uaaaauacacauuuccauaauuugc

SEQ ID NO: 227128 - RNA, 25 nt, Human
uaaaauagaccucagagaucacaga

SEQ ID NO: 227129 - RNA, 20 nt, Human
uaagcacuuuuuccuccuuu

SEQ ID NO: 227130 - RNA, 23 nt, Human
uaauaagcacuuuuuccuccuuu

SEQ ID NO: 227131 - RNA, 24 nt, Human
uaauaaugacaaaggaaaguuuca

SEQ ID NO: 227132 - RNA, 24 nt, Human
uacaguacagcuaaagaauagaaa

SEQ ID NO: 227133 - RNA, 23 nt, Human
uacauaaaauaaacuugauucuc

SEQ ID NO: 227134 - RNA, 18 nt, Human
uacuguauuucacaauug

SEQ ID NO: 227135 - RNA, 22 nt, Human
uaugugcaaggcccucaacaag

SEQ ID NO: 227136 - RNA, 20 nt, Human
uauuugauagaagcauugcu

SEQ ID NO: 227137 - RNA, 19 nt, Human
ucacaggauucauguuugu

SEQ ID NO: 227138 - RNA, 20 nt, Human
uccaaguaugucauuaacca

SEQ ID NO: 227139 - RNA, 22 nt, Human
uccacagaaguagcagcaaaaa

SEQ ID NO: 227140 - RNA, 23 nt, Human
ugaaaaaaucauaccucuaaaga

SEQ ID NO: 227141 - RNA, 21 nt, Human
ugaaagaaggcaaaaaguugc

SEQ ID NO: 227142 - RNA, 20 nt, Human
ugagugauuauuucauccuu

SEQ ID NO: 227143 - RNA, 23 nt, Human
ugaugugucugcauaauuauuuc

SEQ ID NO: 227144 - RNA, 19 nt, Human
ugguguauaaucagauuaa

SEQ ID NO: 227145 - RNA, 19 nt, Human
uguaaaacuaucaacucaa

SEQ ID NO: 227146 - RNA, 18 nt, Human
ugucugaaaaucagcaag

SEQ ID NO: 227147 - RNA, 25 nt, Human
uguuacagaaauuauagugccuguc

SEQ ID NO: 227148 - RNA, 22 nt, Human
uuacuugguacauaacuuucua

SEQ ID NO: 227149 - RNA, 25 nt, Human
uucaaaaugaaugaauagaaaaaug

SEQ ID NO: 227150 - RNA, 24 nt, Human
uucaaauuucugcacaaauguugc

SEQ ID NO: 227151 - RNA, 20 nt, Human
uuccuaaucuugucauucaa

SEQ ID NO: 227152 - RNA, 25 nt, Human
uuccugaagagcccaauaucacagg

SEQ ID NO: 227153 - RNA, 22 nt, Human
uucuagaagucaaauguaugaa

SEQ ID NO: 227154 - RNA, 19 nt, Human
uucucuagcauccaauuuu

SEQ ID NO: 227155 - RNA, 22 nt, Human
uugcaauuacuacuuccagaaa

SEQ ID NO: 227156 - RNA, 20 nt, Human
uuucacaauugcuuuaugcu

SEQ ID NO: 227157 - RNA, 23 nt, Human
uuuuacaaugaacauauauuacu

SEQ ID NO: 227158 - RNA, 20 nt, Human
uuuuacgaucaccuaugccc

SEQ ID NO: 227159 - RNA, 18 nt, Human
cccugggccucaagccuc

SEQ ID NO: 227160 - RNA, 22 nt, Human
ccuccucuuccucggcugccuc

SEQ ID NO: 227161 - RNA, 21 nt, Human
gcuggugcccacccugggccu

SEQ ID NO: 227162 - RNA, 18 nt, Human
ucaagccuccucuuccuc

SEQ ID NO: 227163 - RNA, 22 nt, Human
uggcuggugcccacccugggcc

SEQ ID NO: 227164 - RNA, 19 nt, Human
uggugcccacccugggccu

SEQ ID NO: 227165 - RNA, 21 nt, Human
aaggaaaggccagggacucac

SEQ ID NO: 227166 - RNA, 22 nt, Human
accugaggugaaaaaaauuguu

SEQ ID NO: 227167 - RNA, 19 nt, Human
agggacucacgagggggug

SEQ ID NO: 227168 - RNA, 18 nt, Human
aucaaguucucucucuuc

SEQ ID NO: 227169 - RNA, 24 nt, Human
caaaaggaaaggccagggacucac

SEQ ID NO: 227170 - RNA, 20 nt, Human
caaguucucucucuucuuuc

SEQ ID NO: 227171 - RNA, 24 nt, Human
caccugaggugaaaaaaauuguuu

SEQ ID NO: 227172 - RNA, 21 nt, Human
cucacgagggggugggagcgg

SEQ ID NO: 227173 - RNA, 23 nt, Human
gaaaaaaauuguuuuuucgugga

SEQ ID NO: 227174 - RNA, 23 nt, Human
gaaaggccagggacucacgaggg

SEQ ID NO: 227175 - RNA, 24 nt, Human
gcugcgggcuggggccggcggcgg

SEQ ID NO: 227176 - RNA, 20 nt, Human
ggccagggacucacgagggg

SEQ ID NO: 227177 - RNA, 23 nt, Human
ggcggcggugcucuugcugcgag

SEQ ID NO: 227178 - RNA, 24 nt, Human
uacaaaaggaaaggccagggacuc

SEQ ID NO: 227179 - RNA, 21 nt, Human
ucacgagggggugggagcggc

SEQ ID NO: 227180 - RNA, 22 nt, Human
ugggagcggcugcucauggcug

SEQ ID NO: 227181 - RNA, 18 nt, Human
uuacuuugacaccugagg

SEQ ID NO: 227182 - RNA, 27 nt, Human
uucucucucuucuuucuuauuacaaaa

SEQ ID NO: 227183 - RNA, 24 nt, Human
aaaacccaaaaccccaaauuggcc

SEQ ID NO: 227184 - RNA, 18 nt, Human
aaaacgaagccaaaaccc

SEQ ID NO: 227185 - RNA, 22 nt, Human
aaacgaagccaaaacccaaaac

SEQ ID NO: 227186 - RNA, 25 nt, Human
aaacgaagccaaaacccaaaacccc

SEQ ID NO: 227187 - RNA, 22 nt, Human
aacgaagccaaaacccaaaacc

SEQ ID NO: 227188 - RNA, 22 nt, Human
aacgcaaaaauagacaaucagc

SEQ ID NO: 227189 - RNA, 23 nt, Human
aagcgucuuuuuuaaaaaguucc

SEQ ID NO: 227190 - RNA, 24 nt, Human
acccaaaaccccaaauuggccgag

SEQ ID NO: 227191 - RNA, 23 nt, Human
accccaaagucaacgaagagaaa

SEQ ID NO: 227192 - RNA, 19 nt, Human
acucgccagguggcugccu

SEQ ID NO: 227193 - RNA, 18 nt, Human
agaaaaaacgaagccaaa

SEQ ID NO: 227194 - RNA, 19 nt, Human
agagaaaaaacgaagccaa

SEQ ID NO: 227195 - RNA, 18 nt, Human
agcgcgcgcggccauggg

SEQ ID NO: 227196 - RNA, 23 nt, Human
agugugggucauauccacugucu

SEQ ID NO: 227197 - RNA, 27 nt, Human
caaaacccaaaaccccaaauuggccga

SEQ ID NO: 227198 - RNA, 19 nt, Human
ccgugggcgcaggggcugu

SEQ ID NO: 227199 - RNA, 24 nt, Human
cgaagagaaaaaacgaagccaaaa

SEQ ID NO: 227200 - RNA, 24 nt, Human
cgaagcagcuggggcaccugaacc

SEQ ID NO: 227201 - RNA, 24 nt, Human
cgguggccgggcugcgcucucuuc

SEQ ID NO: 227202 - RNA, 19 nt, Human
cuggucggcggcgcagggc

SEQ ID NO: 227203 - RNA, 20 nt, Human
cuguggccggggcggugggc

SEQ ID NO: 227204 - RNA, 23 nt, Human
cuuuguauacaaaaguucuuaga

SEQ ID NO: 227205 - RNA, 24 nt, Human
gaaaaaacgaagccaaaacccaaa

SEQ ID NO: 227206 - RNA, 19 nt, Human
gaagccaaaacccaaaacc

SEQ ID NO: 227207 - RNA, 24 nt, Human
gaagcgucuuuuuuaaaaaguucc

SEQ ID NO: 227208 - RNA, 18 nt, Human
gagcgcgcgcggccaugg

SEQ ID NO: 227209 - RNA, 18 nt, Human
gcagcccgaagcagcugg

SEQ ID NO: 227210 - RNA, 19 nt, Human
gccaaaacccaaaacccca

SEQ ID NO: 227211 - RNA, 18 nt, Human
gcgggccacgggcgggug

SEQ ID NO: 227212 - RNA, 20 nt, Human
ggcccagaagguccucggca

SEQ ID NO: 227213 - RNA, 22 nt, Human
gggcccagaagguccucggcag

SEQ ID NO: 227214 - RNA, 22 nt, Human
gggcgcgggccacgggcgggug

SEQ ID NO: 227215 - RNA, 30 nt, Human
ucccccaccacugucgcggucgccucgauu

SEQ ID NO: 227216 - RNA, 22 nt, Human
ugaaccccaaagucaacgaaga

SEQ ID NO: 227217 - RNA, 21 nt, Human
uggccgagauccuucuucuuu

SEQ ID NO: 227218 - RNA, 19 nt, Human
uggccggggcggugggcgg

SEQ ID NO: 227219 - RNA, 19 nt, Human
uggcugccguggcgcggag

SEQ ID NO: 227220 - RNA, 19 nt, Human
ugugggggcccagaagguc

SEQ ID NO: 227221 - RNA, 28 nt, Human
aaaaggaaaaaaaaaaaucaaugcagga

SEQ ID NO: 227222 - RNA, 18 nt, Human
aaugcaggagagggagag

SEQ ID NO: 227223 - RNA, 23 nt, Human
acagugcagacgacugccaggaa

SEQ ID NO: 227224 - RNA, 21 nt, Human
acuaaaaaggaaaaaaaaaaa

SEQ ID NO: 227225 - RNA, 19 nt, Human
agaggaggugagagaggag

SEQ ID NO: 227226 - RNA, 22 nt, Human
agagggagagaggaggugagag

SEQ ID NO: 227227 - RNA, 20 nt, Human
aggcagacauccaguggccc

SEQ ID NO: 227228 - RNA, 19 nt, Human
agugagugggguggaugga

SEQ ID NO: 227229 - RNA, 22 nt, Human
augugugugugugugugugugu

SEQ ID NO: 227230 - RNA, 23 nt, Human
auguguguguguguguguguguu

SEQ ID NO: 227231 - RNA, 20 nt, Human
caguggcccuuuuguuuugu

SEQ ID NO: 227232 - RNA, 25 nt, Human
caugacaguguguaugugugugggu

SEQ ID NO: 227233 - RNA, 18 nt, Human
ccaauagugcugaaguaa

SEQ ID NO: 227234 - RNA, 23 nt, Human
ccugaaguccagcccccugccuc

SEQ ID NO: 227235 - RNA, 18 nt, Human
cuugcugaguucaccugg

SEQ ID NO: 227236 - RNA, 21 nt, Human
gaaacccucccccgaacacag

SEQ ID NO: 227237 - RNA, 18 nt, Human
gaaguccagcccccugcc

SEQ ID NO: 227238 - RNA, 18 nt, Human
gacaguguguaugugugu

SEQ ID NO: 227239 - RNA, 18 nt, Human
gagagaggagcgagugag

SEQ ID NO: 227240 - RNA, 20 nt, Human
gagcgagugaguggggugga

SEQ ID NO: 227241 - RNA, 21 nt, Human
gaggugagagaggagcgagug

SEQ ID NO: 227242 - RNA, 24 nt, Human
gcaauggguccccgccugaagucc

SEQ ID NO: 227243 - RNA, 18 nt, Human
gcugcugccgggcaaaac

SEQ ID NO: 227244 - RNA, 20 nt, Human
ggaaaaggggacuucuccac

SEQ ID NO: 227245 - RNA, 19 nt, Human
ggagagggagagaggaggu

SEQ ID NO: 227246 - RNA, 18 nt, Human
ggagcgagugaguggggu

SEQ ID NO: 227247 - RNA, 21 nt, Human
gggaaauaauuccaauagugc

SEQ ID NO: 227248 - RNA, 18 nt, Human
gggcucuaaucacuccag

SEQ ID NO: 227249 - RNA, 21 nt, Human
gguggauggagagaggcaucc

SEQ ID NO: 227250 - RNA, 18 nt, Human
gugcaugacaguguguau

SEQ ID NO: 227251 - RNA, 18 nt, Human
guggauggagagaggcau

SEQ ID NO: 227252 - RNA, 22 nt, Human
guguguauaugugugugugugu

SEQ ID NO: 227253 - RNA, 22 nt, Human
guguguguauauguguguguug

SEQ ID NO: 227254 - RNA, 19 nt, Human
uauaugugugugugugugu

SEQ ID NO: 227255 - RNA, 24 nt, Human
uauaugugugugugugugugugag

SEQ ID NO: 227256 - RNA, 23 nt, Human
uauaugugugugugugugugugu

SEQ ID NO: 227257 - RNA, 28 nt, Human
uaugugugugggucugugagugugugua

SEQ ID NO: 227258 - RNA, 18 nt, Human
uaugugugugugugugug

SEQ ID NO: 227259 - RNA, 23 nt, Human
uaugugugugugugugugugugu

SEQ ID NO: 227260 - RNA, 24 nt, Human
uaugugugugugugugugugugug

SEQ ID NO: 227261 - RNA, 24 nt, Human
ucaacuaaaaaggaaaaaaaaaaa

SEQ ID NO: 227262 - RNA, 19 nt, Human
ucaaugcaggagagggaga

SEQ ID NO: 227263 - RNA, 24 nt, Human
uccacgggaguaacaauucccuuc

SEQ ID NO: 227264 - RNA, 19 nt, Human
ucugcgaggcaaugggucc

SEQ ID NO: 227265 - RNA, 23 nt, Human
ugaaauaagccccucggacugcc

SEQ ID NO: 227266 - RNA, 24 nt, Human
ugaaguaagcagccagucugcccc

SEQ ID NO: 227267 - RNA, 22 nt, Human
ugagugcaugacaguguguaug

SEQ ID NO: 227268 - RNA, 24 nt, Human
ugaguguguguauaugugugugug

SEQ ID NO: 227269 - RNA, 20 nt, Human
ugcaugacaguguguaugug

SEQ ID NO: 227270 - RNA, 20 nt, Human
ugccaggaaaaggggacuuc

SEQ ID NO: 227271 - RNA, 23 nt, Human
ugccaggaaaaggggacuucucc

SEQ ID NO: 227272 - RNA, 24 nt, Human
ugccaggaaaaggggacuucucca

SEQ ID NO: 227273 - RNA, 20 nt, Human
uggagagaggcauccagcgu

SEQ ID NO: 227274 - RNA, 19 nt, Human
uggcaacagcgggaaauaa

SEQ ID NO: 227275 - RNA, 21 nt, Human
uggcucaccccccaagaaggc

SEQ ID NO: 227276 - RNA, 21 nt, Human
uguauaugugugugugugugu

SEQ ID NO: 227277 - RNA, 23 nt, Human
ugugaguguguguauaugugugu

SEQ ID NO: 227278 - RNA, 19 nt, Human
uguguauaugugugugugu

SEQ ID NO: 227279 - RNA, 21 nt, Human
uguguauaugugugugugugu

SEQ ID NO: 227280 - RNA, 22 nt, Human
uguguauaugugugugugugug

SEQ ID NO: 227281 - RNA, 21 nt, Human
uguguaugugugugggucugu

SEQ ID NO: 227282 - RNA, 22 nt, Human
ugugugggucugugagugugug

SEQ ID NO: 227283 - RNA, 26 nt, Human
ugugugggucugugaguguguguaua

SEQ ID NO: 227284 - RNA, 19 nt, Human
uguguguauaugugugugu

SEQ ID NO: 227285 - RNA, 23 nt, Human
uguguguauaugugugugugugu

SEQ ID NO: 227286 - RNA, 31 nt, Human
uguguguauaugugugugugugugugugugg

SEQ ID NO: 227287 - RNA, 19 nt, Human
uguguguguguacagaggu

SEQ ID NO: 227288 - RNA, 21 nt, Human
uguguguguguguguguacag

SEQ ID NO: 227289 - RNA, 18 nt, Human
ugugugugugugugugug

SEQ ID NO: 227290 - RNA, 18 nt, Human
ugugugugugugugugug

SEQ ID NO: 227291 - RNA, 18 nt, Human
ugugugugugugugugug

SEQ ID NO: 227292 - RNA, 22 nt, Human
ugugugugugugugugugugua

SEQ ID NO: 227293 - RNA, 19 nt, Human
uuagacacuagccgaugcc

SEQ ID NO: 227294 - RNA, 20 nt, Human
uuguuucagucaacuaaaaa

SEQ ID NO: 227295 - RNA, 20 nt, Human
uuuguuuuguuuuguuucag

SEQ ID NO: 227296 - RNA, 24 nt, Human
aaaacaagagaaaaauuggaaaga

SEQ ID NO: 227297 - RNA, 19 nt, Human
aaacaaagcucucaagcau

SEQ ID NO: 227298 - RNA, 23 nt, Human
aaacaagagaaaaauuggaaaga

SEQ ID NO: 227299 - RNA, 25 nt, Human
aaagaaaaaaaagaggaggagaagg

SEQ ID NO: 227300 - RNA, 24 nt, Human
aaagugcugagauuacagguguga

SEQ ID NO: 227301 - RNA, 18 nt, Human
aaauggcccaugguaggg

SEQ ID NO: 227302 - RNA, 24 nt, Human
aacccaaaaaucaggggccggcag

SEQ ID NO: 227303 - RNA, 25 nt, Human
aagcaauccuccugccucagccucc

SEQ ID NO: 227304 - RNA, 21 nt, Human
aagcucucaagcauccaaccc

SEQ ID NO: 227305 - RNA, 27 nt, Human
aaggagaaaguggaaaagaagggaccc

SEQ ID NO: 227306 - RNA, 26 nt, Human
aagugcugagauuacaggugugagcc

SEQ ID NO: 227307 - RNA, 24 nt, Human
acucaugccguccuccgggaggcu

SEQ ID NO: 227308 - RNA, 23 nt, Human
acuggucuugaacucccaaccuc

SEQ ID NO: 227309 - RNA, 26 nt, Human
agaaaacaagagaaaaauuggaaaga

SEQ ID NO: 227310 - RNA, 18 nt, Human
agagcagggggggauggg

SEQ ID NO: 227311 - RNA, 22 nt, Human
agauuacaggugugagccacca

SEQ ID NO: 227312 - RNA, 19 nt, Human
aggaggagaaggacaagaa

SEQ ID NO: 227313 - RNA, 18 nt, Human
aggagggggggucgaaag

SEQ ID NO: 227314 - RNA, 23 nt, Human
agguccuccguuccccuuuuacc

SEQ ID NO: 227315 - RNA, 20 nt, Human
auaagaguucuagaaaacaa

SEQ ID NO: 227316 - RNA, 21 nt, Human
auccuccugccucagccuccc

SEQ ID NO: 227317 - RNA, 21 nt, Human
caaacucagaaaccaaauccc

SEQ ID NO: 227318 - RNA, 24 nt, Human
caaagugcugagauuacaggugug

SEQ ID NO: 227319 - RNA, 20 nt, Human
caaccucaagcaauccuccu

SEQ ID NO: 227320 - RNA, 24 nt, Human
caagagagcuguuccccucacacc

SEQ ID NO: 227321 - RNA, 22 nt, Human
caagcaauccuccugccucagc

SEQ ID NO: 227322 - RNA, 27 nt, Human
caagcaauccuccugccucagccuccc

SEQ ID NO: 227323 - RNA, 27 nt, Human
caagcaauccuccugccucagccuccc

SEQ ID NO: 227324 - RNA, 23 nt, Human
caagggaaacaaagcucucaagc

SEQ ID NO: 227325 - RNA, 22 nt, Human
caauucaguuccggccaagccc

SEQ ID NO: 227326 - RNA, 23 nt, Human
cagaaaccaaaucccuguaaauc

SEQ ID NO: 227327 - RNA, 25 nt, Human
cagcgcagcuucucuagugugaccu

SEQ ID NO: 227328 - RNA, 19 nt, Human
caggugugagccaccaggc

SEQ ID NO: 227329 - RNA, 18 nt, Human
cagugggcugcuucaacc

SEQ ID NO: 227330 - RNA, 22 nt, Human
cauccaacccaaaaaucagggg

SEQ ID NO: 227331 - RNA, 20 nt, Human
cauguugcccagacuggucu

SEQ ID NO: 227332 - RNA, 24 nt, Human
cauguugcccagacuggucuugaa

SEQ ID NO: 227333 - RNA, 21 nt, Human
ccaaagugcugagauuacagg

SEQ ID NO: 227334 - RNA, 21 nt, Human
ccaaagugcugagauuacagg

SEQ ID NO: 227335 - RNA, 24 nt, Human
ccaaagugcugagauuacaggugu

SEQ ID NO: 227336 - RNA, 23 nt, Human
ccaacccaaaaaucaggggccgg

SEQ ID NO: 227337 - RNA, 28 nt, Human
ccagcucucuuuuccuccagucuccuca

SEQ ID NO: 227338 - RNA, 23 nt, Human
ccauaugcaagcugaagucaaag

SEQ ID NO: 227339 - RNA, 21 nt, Human
ccauguugcccagacuggucu

SEQ ID NO: 227340 - RNA, 19 nt, Human
cccaaccucagcacacgac

SEQ ID NO: 227341 - RNA, 22 nt, Human
cccccacuccccuauuucuccc

SEQ ID NO: 227342 - RNA, 19 nt, Human
ccccccugcagcuuuuccu

SEQ ID NO: 227343 - RNA, 19 nt, Human
ccuccguuccccuuuuacc

SEQ ID NO: 227344 - RNA, 24 nt, Human
ccugaaggagaaaguggaaaagaa

SEQ ID NO: 227345 - RNA, 26 nt, Human
cgaaaggggagggagucgauucagac

SEQ ID NO: 227346 - RNA, 23 nt, Human
cgcugggccgaaguggccagagc

SEQ ID NO: 227347 - RNA, 24 nt, Human
cucaagcaauccuccugccucagc

SEQ ID NO: 227348 - RNA, 21 nt, Human
cucccaaagugcugagauuac

SEQ ID NO: 227349 - RNA, 19 nt, Human
cugaaguguccagaacuca

SEQ ID NO: 227350 - RNA, 23 nt, Human
cugccucagccucccaaagugcu

SEQ ID NO: 227351 - RNA, 24 nt, Human
cugccucagccucccaaagugcug

SEQ ID NO: 227352 - RNA, 19 nt, Human
cuggaauuccgugaaggua

SEQ ID NO: 227353 - RNA, 19 nt, Human
cuuggacaaaaauaaagug

SEQ ID NO: 227354 - RNA, 18 nt, Human
gaaaagaaaaaaaagagg

SEQ ID NO: 227355 - RNA, 23 nt, Human
gagucgauucagacccagcuggg

SEQ ID NO: 227356 - RNA, 18 nt, Human
gauuacaggugugagcca

SEQ ID NO: 227357 - RNA, 24 nt, Human
gauuacaggugugagccaccaggc

SEQ ID NO: 227358 - RNA, 22 nt, Human
gccacucucggaacaagggaaa

SEQ ID NO: 227359 - RNA, 26 nt, Human
gcuucaaccccauaugcaagcugaag

SEQ ID NO: 227360 - RNA, 19 nt, Human
ggaaaagaaaaaaaagagg

SEQ ID NO: 227361 - RNA, 20 nt, Human
ggaaaagaaaaaaaagagga

SEQ ID NO: 227362 - RNA, 21 nt, Human
gggggggucgaaaggggaggg

SEQ ID NO: 227363 - RNA, 19 nt, Human
guagaauaugaagagcccc

SEQ ID NO: 227364 - RNA, 24 nt, Human
gucgaaaggggagggagucgauuc

SEQ ID NO: 227365 - RNA, 19 nt, Human
uaaaaagaauccucccccc

SEQ ID NO: 227366 - RNA, 23 nt, Human
uaaaaagaauccuccccccugca

SEQ ID NO: 227367 - RNA, 18 nt, Human
uaaaagaaguaaaaggag

SEQ ID NO: 227368 - RNA, 19 nt, Human
uaaaagaaguaaaaggagg

SEQ ID NO: 227369 - RNA, 18 nt, Human
uaagaagcagaagcacca

SEQ ID NO: 227370 - RNA, 18 nt, Human
uacaggugugagccacca

SEQ ID NO: 227371 - RNA, 22 nt, Human
uacaggugugagccaccaggcu

SEQ ID NO: 227372 - RNA, 21 nt, Human
uagaaaacaagagaaaaauug

SEQ ID NO: 227373 - RNA, 25 nt, Human
uaggaaaaauguccuauuucagagc

SEQ ID NO: 227374 - RNA, 20 nt, Human
ucacuagcugaggacuccug

SEQ ID NO: 227375 - RNA, 19 nt, Human
ucagacccagcugggccac

SEQ ID NO: 227376 - RNA, 25 nt, Human
ucagcacacgaccaggaaagauacc

SEQ ID NO: 227377 - RNA, 23 nt, Human
ucccaaagugcugagauuacagg

SEQ ID NO: 227378 - RNA, 22 nt, Human
uccgggcuggaaaaugaggagg

SEQ ID NO: 227379 - RNA, 20 nt, Human
uccuccguuccccuuuuacc

SEQ ID NO: 227380 - RNA, 24 nt, Human
uccuccguuccccuuuuaccucua

SEQ ID NO: 227381 - RNA, 27 nt, Human
uccuccugccucagccucccaaagugc

SEQ ID NO: 227382 - RNA, 21 nt, Human
ucgaaaggggagggagucgau

SEQ ID NO: 227383 - RNA, 22 nt, Human
ucgcugggccgaaguggccaga

SEQ ID NO: 227384 - RNA, 19 nt, Human
ucggaacaagggaaacaaa

SEQ ID NO: 227385 - RNA, 19 nt, Human
ucucaagcauccaacccaa

SEQ ID NO: 227386 - RNA, 24 nt, Human
ucucaagcauccaacccaaaaauc

SEQ ID NO: 227387 - RNA, 21 nt, Human
ucugaaaaccaaacuuuaaga

SEQ ID NO: 227388 - RNA, 19 nt, Human
ugaaacacuuuaaauggcc

SEQ ID NO: 227389 - RNA, 24 nt, Human
ugaacucccaaccucaagcaaucc

SEQ ID NO: 227390 - RNA, 18 nt, Human
ugagauuacaggugugag

SEQ ID NO: 227391 - RNA, 19 nt, Human
ugagauuacaggugugagc

SEQ ID NO: 227392 - RNA, 22 nt, Human
ugagauuacaggugugagccac

SEQ ID NO: 227393 - RNA, 23 nt, Human
ugagauuacaggugugagccacc

SEQ ID NO: 227394 - RNA, 24 nt, Human
ugagauuacaggugugagccacca

SEQ ID NO: 227395 - RNA, 18 nt, Human
ugagcugaucgcaagaga

SEQ ID NO: 227396 - RNA, 19 nt, Human
ugaggagggggggucgaaa

SEQ ID NO: 227397 - RNA, 19 nt, Human
ugaguuuuugccauguugc

SEQ ID NO: 227398 - RNA, 24 nt, Human
ugccauguugcccagacuggucuu

SEQ ID NO: 227399 - RNA, 27 nt, Human
ugccauguugcccagacuggucuugaa

SEQ ID NO: 227400 - RNA, 20 nt, Human
ugccucaaacucagaaacca

SEQ ID NO: 227401 - RNA, 24 nt, Human
ugccucagccucccaaagugcuga

SEQ ID NO: 227402 - RNA, 24 nt, Human
ugcugagauuacaggugugagcca

SEQ ID NO: 227403 - RNA, 18 nt, Human
uggaaaagaaaaaaaaga

SEQ ID NO: 227404 - RNA, 18 nt, Human
ugugccucaaacucagaa

SEQ ID NO: 227405 - RNA, 20 nt, Human
ugugccucaaacucagaaac

SEQ ID NO: 227406 - RNA, 20 nt, Human
uguuaugcucuuuccauuua

SEQ ID NO: 227407 - RNA, 20 nt, Human
uuaaaaccuuuugagugugg

SEQ ID NO: 227408 - RNA, 24 nt, Human
uuaccaaucaacuacuuguuaugc

SEQ ID NO: 227409 - RNA, 22 nt, Human
uucagagcagggggggauggga

SEQ ID NO: 227410 - RNA, 21 nt, Human
uuccuuggacaaaaauaaagu

SEQ ID NO: 227411 - RNA, 19 nt, Human
uugaaacacuuuaaauggc

SEQ ID NO: 227412 - RNA, 18 nt, Human
uuguucacagccuugagu

SEQ ID NO: 227413 - RNA, 23 nt, Human
uuuugccauguugcccagacugg

SEQ ID NO: 227414 - RNA, 21 nt, Human
aaagcccaauaauuacacugc

SEQ ID NO: 227415 - RNA, 20 nt, Human
aaauauuggucucuccuuuc

SEQ ID NO: 227416 - RNA, 18 nt, Human
aacauaaggcaaaagccc

SEQ ID NO: 227417 - RNA, 21 nt, Human
aaccauucccgaacuaacuaa

SEQ ID NO: 227418 - RNA, 24 nt, Human
aacucaacauaaggcaaaagccca

SEQ ID NO: 227419 - RNA, 23 nt, Human
aagaaaaaacaagccuuugguaa

SEQ ID NO: 227420 - RNA, 24 nt, Human
aagcaaagcaaaaugguaagccua

SEQ ID NO: 227421 - RNA, 22 nt, Human
aagccgcgcguuucagccgugg

SEQ ID NO: 227422 - RNA, 21 nt, Human
aaucauaaacacuccaacuua

SEQ ID NO: 227423 - RNA, 20 nt, Human
acaacccuuaggcuggagau

SEQ ID NO: 227424 - RNA, 19 nt, Human
acucuuggcaaucucuugg

SEQ ID NO: 227425 - RNA, 21 nt, Human
agagccagaagacgcuaggug

SEQ ID NO: 227426 - RNA, 25 nt, Human
agagcgcagagagaaagagccccaa

SEQ ID NO: 227427 - RNA, 18 nt, Human
agaguucagugucuggag

SEQ ID NO: 227428 - RNA, 18 nt, Human
agauacugucagaugaaa

SEQ ID NO: 227429 - RNA, 21 nt, Human
aggacagcggggcccgggggc

SEQ ID NO: 227430 - RNA, 24 nt, Human
aggagcagaggcaggacugggacg

SEQ ID NO: 227431 - RNA, 21 nt, Human
aggcaaaagcccaauaauuac

SEQ ID NO: 227432 - RNA, 22 nt, Human
aggcaaaagcccaauaauuaca

SEQ ID NO: 227433 - RNA, 18 nt, Human
aggcaaaaggcuggcagc

SEQ ID NO: 227434 - RNA, 23 nt, Human
aggcagaagcagguuuguuugaa

SEQ ID NO: 227435 - RNA, 19 nt, Human
aggcaggagcagaggcagg

SEQ ID NO: 227436 - RNA, 22 nt, Human
aggugggggaggacagcggggc

SEQ ID NO: 227437 - RNA, 20 nt, Human
aguagggaaggugguggcgu

SEQ ID NO: 227438 - RNA, 24 nt, Human
caaacauguggcuuaaaauaaugu

SEQ ID NO: 227439 - RNA, 19 nt, Human
caaagcaaaaugguaagcc

SEQ ID NO: 227440 - RNA, 22 nt, Human
caaauuaccaauaaccauuccc

SEQ ID NO: 227441 - RNA, 18 nt, Human
caacaucaguagguaacg

SEQ ID NO: 227442 - RNA, 19 nt, Human
caacugcucaagaaaaaac

SEQ ID NO: 227443 - RNA, 19 nt, Human
cacugcaucuuuggcucag

SEQ ID NO: 227444 - RNA, 25 nt, Human
cagagagaaagagccccaagucucg

SEQ ID NO: 227445 - RNA, 18 nt, Human
caugcaauggauauauau

SEQ ID NO: 227446 - RNA, 23 nt, Human
cauucagaaucacuagcuuccau

SEQ ID NO: 227447 - RNA, 23 nt, Human
cauuguguaauguuuccacuuug

SEQ ID NO: 227448 - RNA, 22 nt, Human
ccaggcgaaggcuggagcgcag

SEQ ID NO: 227449 - RNA, 19 nt, Human
ccaugcuuacacugaacuc

SEQ ID NO: 227450 - RNA, 20 nt, Human
ccgggggcggaggaagaggc

SEQ ID NO: 227451 - RNA, 21 nt, Human
ccguggucggguccgcaggac

SEQ ID NO: 227452 - RNA, 21 nt, Human
ccugcgccccugucccuggcc

SEQ ID NO: 227453 - RNA, 23 nt, Human
ccuguauaaguuuaauguuuucu

SEQ ID NO: 227454 - RNA, 22 nt, Human
cgaacuaacuaacauauggcca

SEQ ID NO: 227455 - RNA, 26 nt, Human
cgcucugccaggcgaaggcuggagcg

SEQ ID NO: 227456 - RNA, 22 nt, Human
cggcugcagcuggauacaccuc

SEQ ID NO: 227457 - RNA, 18 nt, Human
cggguggcucugagaaag

SEQ ID NO: 227458 - RNA, 22 nt, Human
cucaagaaaaaacaagccuuug

SEQ ID NO: 227459 - RNA, 27 nt, Human
cucaagaaaaaacaagccuuugguaac

SEQ ID NO: 227460 - RNA, 19 nt, Human
cugcaccccuagagccaga

SEQ ID NO: 227461 - RNA, 19 nt, Human
gaaggcaaaaggcuggcag

SEQ ID NO: 227462 - RNA, 18 nt, Human
gacaccaccaggcaggag

SEQ ID NO: 227463 - RNA, 18 nt, Human
gagauccuuguucuugaa

SEQ ID NO: 227464 - RNA, 20 nt, Human
gagauccuuguucuugaaga

SEQ ID NO: 227465 - RNA, 21 nt, Human
gcaaagcaaaaugguaagccu

SEQ ID NO: 227466 - RNA, 18 nt, Human
gcugcgcgcucugccagg

SEQ ID NO: 227467 - RNA, 24 nt, Human
gcuggagcgcagacggcaaagccg

SEQ ID NO: 227468 - RNA, 18 nt, Human
ggggaggacagcggggcc

SEQ ID NO: 227469 - RNA, 25 nt, Human
gugggacaacccuuaggcuggagau

SEQ ID NO: 227470 - RNA, 20 nt, Human
uaaggacauuguguaauguu

SEQ ID NO: 227471 - RNA, 21 nt, Human
uaaggcaaaagcccaauaauu

SEQ ID NO: 227472 - RNA, 19 nt, Human
uacagagauccuuguucuu

SEQ ID NO: 227473 - RNA, 19 nt, Human
uagcuuccaugcuuacacu

SEQ ID NO: 227474 - RNA, 19 nt, Human
uagguaacgcuacagagau

SEQ ID NO: 227475 - RNA, 21 nt, Human
uauggccagacauuuuuccug

SEQ ID NO: 227476 - RNA, 28 nt, Human
uauucuguuugaucuacuaacucuuuca

SEQ ID NO: 227477 - RNA, 19 nt, Human
uccagcaaguaaaaucuuu

SEQ ID NO: 227478 - RNA, 25 nt, Human
uccgcaggaccugggcguggggaca

SEQ ID NO: 227479 - RNA, 20 nt, Human
uccucgaugcccgcgcgaga

SEQ ID NO: 227480 - RNA, 21 nt, Human
ucggguccgcaggaccugggc

SEQ ID NO: 227481 - RNA, 19 nt, Human
ucuagcaauaaucauaaac

SEQ ID NO: 227482 - RNA, 23 nt, Human
ucugcaccccuagagccagaaga

SEQ ID NO: 227483 - RNA, 18 nt, Human
ucugccaggcgaaggcug

SEQ ID NO: 227484 - RNA, 21 nt, Human
ucugucuucuacucuuggcaa

SEQ ID NO: 227485 - RNA, 23 nt, Human
ugaaugcaagauacaagcaugaa

SEQ ID NO: 227486 - RNA, 26 nt, Human
ugagaauaugaagucugccuucuuuc

SEQ ID NO: 227487 - RNA, 21 nt, Human
ugauuaguaggacaguuuguu

SEQ ID NO: 227488 - RNA, 19 nt, Human
ugccauagacuauaaaaug

SEQ ID NO: 227489 - RNA, 21 nt, Human
ugggacaacccuuaggcugga

SEQ ID NO: 227490 - RNA, 22 nt, Human
ugggaugcgcuuguggcagagc

SEQ ID NO: 227491 - RNA, 18 nt, Human
ugucuggagagcgcagag

SEQ ID NO: 227492 - RNA, 19 nt, Human
uguguuaaaaaagcaaagc

SEQ ID NO: 227493 - RNA, 19 nt, Human
uguuugaauaaagcauaau

SEQ ID NO: 227494 - RNA, 27 nt, Human
uuaaaauaauguacagaucaauguaac

SEQ ID NO: 227495 - RNA, 21 nt, Human
uuaauggaucauauguuuucu

SEQ ID NO: 227496 - RNA, 20 nt, Human
uugaagaguuuucaucucug

SEQ ID NO: 227497 - RNA, 19 nt, Human
uuggcucaguguguuaaaa

SEQ ID NO: 227498 - RNA, 18 nt, Human
uuguguaauguuuccacu

SEQ ID NO: 227499 - RNA, 20 nt, Human
uuuuuuuuuuaaaugcaaau

SEQ ID NO: 227500 - RNA, 20 nt, Human
aaaagcaaacaguguauccc

SEQ ID NO: 227501 - RNA, 18 nt, Human
aaaauacacaccaaaaca

SEQ ID NO: 227502 - RNA, 23 nt, Human
aaacaugaccaagauuaaacuaa

SEQ ID NO: 227503 - RNA, 22 nt, Human
aaagcaacuguugucuaaagac

SEQ ID NO: 227504 - RNA, 20 nt, Human
aaagugagauuaauugaaga

SEQ ID NO: 227505 - RNA, 21 nt, Human
aagaccaugcaaauucaauug

SEQ ID NO: 227506 - RNA, 21 nt, Human
aagcaaacaguguaucccuca

SEQ ID NO: 227507 - RNA, 20 nt, Human
acacaccaaaacaugaccaa

SEQ ID NO: 227508 - RNA, 23 nt, Human
acauuacuucauccuccuucaca

SEQ ID NO: 227509 - RNA, 19 nt, Human
agaaaaagccuacacggug

SEQ ID NO: 227510 - RNA, 20 nt, Human
agaaagacauguuuugguca

SEQ ID NO: 227511 - RNA, 25 nt, Human
agaaagacauguuuuggucauuuuu

SEQ ID NO: 227512 - RNA, 18 nt, Human
agaacgcaggcaccgacc

SEQ ID NO: 227513 - RNA, 23 nt, Human
auuuucaguuccugguauacaga

SEQ ID NO: 227514 - RNA, 19 nt, Human
cacagccagcaccauucca

SEQ ID NO: 227515 - RNA, 26 nt, Human
caccugcggcggcggcccccgcggcc

SEQ ID NO: 227516 - RNA, 18 nt, Human
cagaacgcaggcaccgac

SEQ ID NO: 227517 - RNA, 20 nt, Human
cagaacgcaggcaccgacca

SEQ ID NO: 227518 - RNA, 26 nt, Human
cauauagacacacauuuauaugcaca

SEQ ID NO: 227519 - RNA, 20 nt, Human
cccccgcggccauggcccgc

SEQ ID NO: 227520 - RNA, 21 nt, Human
cccccgcggccauggcccgcu

SEQ ID NO: 227521 - RNA, 19 nt, Human
ccgcgcgccaccaccugcc

SEQ ID NO: 227522 - RNA, 18 nt, Human
ccgcucggccgggcgcgc

SEQ ID NO: 227523 - RNA, 18 nt, Human
ccugcggcggcggccccc

SEQ ID NO: 227524 - RNA, 21 nt, Human
cgccggcacugcccgcccgcc

SEQ ID NO: 227525 - RNA, 21 nt, Human
cggcccccgcggccauggccc

SEQ ID NO: 227526 - RNA, 18 nt, Human
cggcucccgcgcucgccc

SEQ ID NO: 227527 - RNA, 18 nt, Human
cuacacggugcuucuacc

SEQ ID NO: 227528 - RNA, 19 nt, Human
cucgggcuucagaacgcag

SEQ ID NO: 227529 - RNA, 23 nt, Human
cucuccucaccgcgcgccaccac

SEQ ID NO: 227530 - RNA, 19 nt, Human
cugcaguaauguucaugcc

SEQ ID NO: 227531 - RNA, 20 nt, Human
cugcugagacuuaaagugca

SEQ ID NO: 227532 - RNA, 21 nt, Human
cuuauauuguauuuuaaaaag

SEQ ID NO: 227533 - RNA, 22 nt, Human
gaaaauaauaaauaagcauaac

SEQ ID NO: 227534 - RNA, 22 nt, Human
gaacuagucuuuaugaaagcaa

SEQ ID NO: 227535 - RNA, 19 nt, Human
gauaagaacuagucuuuau

SEQ ID NO: 227536 - RNA, 22 nt, Human
gccccggagggggcgccgcgcu

SEQ ID NO: 227537 - RNA, 18 nt, Human
gcccgagugcggggcggc

SEQ ID NO: 227538 - RNA, 21 nt, Human
gccgagccgcguuccauccgc

SEQ ID NO: 227539 - RNA, 20 nt, Human
gucacuucacaaauacuugu

SEQ ID NO: 227540 - RNA, 18 nt, Human
uaaaggaaagcauauaga

SEQ ID NO: 227541 - RNA, 21 nt, Human
uaagaaaaaaauuaaaaauac

SEQ ID NO: 227542 - RNA, 22 nt, Human
uagcagcuaaauuuauacacac

SEQ ID NO: 227543 - RNA, 22 nt, Human
uauacaaacuuuuauucaaagu

SEQ ID NO: 227544 - RNA, 19 nt, Human
ucaaaaaccugcaguaaug

SEQ ID NO: 227545 - RNA, 21 nt, Human
ucaaagauuuucaguuccugg

SEQ ID NO: 227546 - RNA, 22 nt, Human
ucaaguguguuacaccaggucc

SEQ ID NO: 227547 - RNA, 19 nt, Human
ucaccgcgcgccaccaccu

SEQ ID NO: 227548 - RNA, 23 nt, Human
ucagaaguggcauuuaaaguguu

SEQ ID NO: 227549 - RNA, 20 nt, Human
ucagcugcugcucauugcag

SEQ ID NO: 227550 - RNA, 18 nt, Human
ucagucacuucacaaaua

SEQ ID NO: 227551 - RNA, 23 nt, Human
ucugaucaacacacauggcuacu

SEQ ID NO: 227552 - RNA, 18 nt, Human
ucuguagucauucaaggu

SEQ ID NO: 227553 - RNA, 20 nt, Human
ucuucaguaucugaggccua

SEQ ID NO: 227554 - RNA, 18 nt, Human
ucuuuuuuuuuuuuuuuu

SEQ ID NO: 227555 - RNA, 21 nt, Human
ugcaguaauguucaugccaaa

SEQ ID NO: 227556 - RNA, 26 nt, Human
ugcucauugcagaaaaagccuacacg

SEQ ID NO: 227557 - RNA, 19 nt, Human
uuauauucauguaaucaaa

SEQ ID NO: 227558 - RNA, 21 nt, Human
uuuaugaaagcaacuguuguc

SEQ ID NO: 227559 - RNA, 22 nt, Human
uuuuuuuuuuuuuuuucuuuuu

SEQ ID NO: 227560 - RNA, 22 nt, Human
aaaaaaaaaaaaaaagacacaa

SEQ ID NO: 227561 - RNA, 20 nt, Human
aaaaaaaaaaaaaaggcuca

SEQ ID NO: 227562 - RNA, 20 nt, Human
aaaaaaaaagacacaaucaa

SEQ ID NO: 227563 - RNA, 19 nt, Human
aaacaagaaguacaacaag

SEQ ID NO: 227564 - RNA, 18 nt, Human
aaagcucucaccaagcuc

SEQ ID NO: 227565 - RNA, 21 nt, Human
aaaguacauaagugggugugg

SEQ ID NO: 227566 - RNA, 21 nt, Human
aacagccacgcagagaacacc

SEQ ID NO: 227567 - RNA, 23 nt, Human
aacuggaauaugaguuugcucag

SEQ ID NO: 227568 - RNA, 24 nt, Human
aacuguguaugcacucggggaucc

SEQ ID NO: 227569 - RNA, 19 nt, Human
aagaaaaagaagacaagga

SEQ ID NO: 227570 - RNA, 18 nt, Human
aagaagacaaggacauua

SEQ ID NO: 227571 - RNA, 21 nt, Human
aagcaaguugaauccagucac

SEQ ID NO: 227572 - RNA, 23 nt, Human
aagcaaguugaauccagucacca

SEQ ID NO: 227573 - RNA, 20 nt, Human
aaggguccucuauugccacu

SEQ ID NO: 227574 - RNA, 21 nt, Human
aaucuaugacaucaaagacca

SEQ ID NO: 227575 - RNA, 19 nt, Human
aaucucauaaccaaacaug

SEQ ID NO: 227576 - RNA, 23 nt, Human
aaucucauaaccaaacauggcac

SEQ ID NO: 227577 - RNA, 22 nt, Human
aauucuggguaccuuguuguuc

SEQ ID NO: 227578 - RNA, 23 nt, Human
acaaaacagagccuggaguagag

SEQ ID NO: 227579 - RNA, 24 nt, Human
acaaaacagagccuggaguagaga

SEQ ID NO: 227580 - RNA, 19 nt, Human
acaaauuacuccaugcccc

SEQ ID NO: 227581 - RNA, 20 nt, Human
acaagcagccguggccaccc

SEQ ID NO: 227582 - RNA, 26 nt, Human
acacaagacuuccccugcuuaugccu

SEQ ID NO: 227583 - RNA, 23 nt, Human
acacacacacacacacacacaca

SEQ ID NO: 227584 - RNA, 20 nt, Human
acacaccgaaacaagucuca

SEQ ID NO: 227585 - RNA, 24 nt, Human
acagagccuuuaaaaacuccaacu

SEQ ID NO: 227586 - RNA, 20 nt, Human
acauaacaccucccaggccu

SEQ ID NO: 227587 - RNA, 22 nt, Human
acccacacagacauacacauuc

SEQ ID NO: 227588 - RNA, 23 nt, Human
accccagccucauccccaucaca

SEQ ID NO: 227589 - RNA, 24 nt, Human
acuccaaaaaaaaaaaaaaagaca

SEQ ID NO: 227590 - RNA, 19 nt, Human
acugcgaugaacaacacca

SEQ ID NO: 227591 - RNA, 18 nt, Human
agacaagaugcucccaaa

SEQ ID NO: 227592 - RNA, 20 nt, Human
agacaagaugcucccaaaaa

SEQ ID NO: 227593 - RNA, 19 nt, Human
agagcacucaacuaaaaca

SEQ ID NO: 227594 - RNA, 18 nt, Human
agaucccaaccccagccu

SEQ ID NO: 227595 - RNA, 21 nt, Human
agauggagagaugccauuggg

SEQ ID NO: 227596 - RNA, 25 nt, Human
agcacagggaacccauuugucccuu

SEQ ID NO: 227597 - RNA, 19 nt, Human
agcuaggugcaaaugggga

SEQ ID NO: 227598 - RNA, 28 nt, Human
aggaagccucaaauccaaggcccacuga

SEQ ID NO: 227599 - RNA, 18 nt, Human
aggauggagugcacaugg

SEQ ID NO: 227600 - RNA, 22 nt, Human
aggcuucucugaagagcuaguu

SEQ ID NO: 227601 - RNA, 18 nt, Human
agggagggagacaugagg

SEQ ID NO: 227602 - RNA, 20 nt, Human
aguggugggggaggggcagg

SEQ ID NO: 227603 - RNA, 23 nt, Human
aucagaucccaaccccagccuca

SEQ ID NO: 227604 - RNA, 21 nt, Human
auccagcagcaaaggccucaa

SEQ ID NO: 227605 - RNA, 18 nt, Human
augcccccucaaaugccc

SEQ ID NO: 227606 - RNA, 22 nt, Human
auggcugaugcuauauccauga

SEQ ID NO: 227607 - RNA, 19 nt, Human
auuaaacugggauaauaag

SEQ ID NO: 227608 - RNA, 23 nt, Human
auuacuccaugcccccucaaaug

SEQ ID NO: 227609 - RNA, 20 nt, Human
caaaacaaagcccaaaggug

SEQ ID NO: 227610 - RNA, 25 nt, Human
caaaacaaagcccaaaggugcugcc

SEQ ID NO: 227611 - RNA, 26 nt, Human
caaaacaaagcccaaaggugcugccc

SEQ ID NO: 227612 - RNA, 24 nt, Human
caaaacagagccuggaguagagac

SEQ ID NO: 227613 - RNA, 21 nt, Human
caaagcucucaccaagcuccc

SEQ ID NO: 227614 - RNA, 27 nt, Human
caacacaggcacaaaucuaucuuuggg

SEQ ID NO: 227615 - RNA, 20 nt, Human
cacacacacacacacacaca

SEQ ID NO: 227616 - RNA, 20 nt, Human
cacacacacacacacacaca

SEQ ID NO: 227617 - RNA, 20 nt, Human
cacacacacacacacacaca

SEQ ID NO: 227618 - RNA, 22 nt, Human
cacacacacacacacacacaca

SEQ ID NO: 227619 - RNA, 25 nt, Human
cacacagacacaccgaaacaagucu

SEQ ID NO: 227620 - RNA, 26 nt, Human
cacacagacauacacauucagugucu

SEQ ID NO: 227621 - RNA, 23 nt, Human
cacagcagcacagacccucccaa

SEQ ID NO: 227622 - RNA, 20 nt, Human
cacaggguaccaggcucagu

SEQ ID NO: 227623 - RNA, 24 nt, Human
cacuggcugggaagacuucggggu

SEQ ID NO: 227624 - RNA, 21 nt, Human
cagaaguccaacaucaggauu

SEQ ID NO: 227625 - RNA, 20 nt, Human
cagaggagagcgguucucac

SEQ ID NO: 227626 - RNA, 19 nt, Human
cagcacaacuuuaagguuu

SEQ ID NO: 227627 - RNA, 23 nt, Human
cagcagcaaaggccucaagcuau

SEQ ID NO: 227628 - RNA, 18 nt, Human
cagccguggccacccuaa

SEQ ID NO: 227629 - RNA, 18 nt, Human
cagggucuguauuguccc

SEQ ID NO: 227630 - RNA, 23 nt, Human
caguaguaaagaaauccaguaga

SEQ ID NO: 227631 - RNA, 25 nt, Human
caguagugggguucuuggggguugg

SEQ ID NO: 227632 - RNA, 20 nt, Human
caucaaagaccaauggccua

SEQ ID NO: 227633 - RNA, 25 nt, Human
cauccaauguccaucugaaucacac

SEQ ID NO: 227634 - RNA, 24 nt, Human
caucugcuuccuguaggagaacuc

SEQ ID NO: 227635 - RNA, 22 nt, Human
caugugcuuaacaucagaaaga

SEQ ID NO: 227636 - RNA, 20 nt, Human
cauuccaucagcuuccaacc

SEQ ID NO: 227637 - RNA, 23 nt, Human
cauuuuacacauaauaugcaaau

SEQ ID NO: 227638 - RNA, 19 nt, Human
ccaaaaacagaaaacauga

SEQ ID NO: 227639 - RNA, 18 nt, Human
ccagaacacuucugagua

SEQ ID NO: 227640 - RNA, 21 nt, Human
ccagagaacugccccucucac

SEQ ID NO: 227641 - RNA, 24 nt, Human
ccagcagaccagugggaaaucuga

SEQ ID NO: 227642 - RNA, 23 nt, Human
ccaucagcuuccaacccacagcc

SEQ ID NO: 227643 - RNA, 21 nt, Human
cccaagcaaguugaauccagu

SEQ ID NO: 227644 - RNA, 18 nt, Human
cccacagaaagcagacuc

SEQ ID NO: 227645 - RNA, 19 nt, Human
cccagcagaccagugggaa

SEQ ID NO: 227646 - RNA, 23 nt, Human
ccccacuucauagugagaccaga

SEQ ID NO: 227647 - RNA, 19 nt, Human
ccccagccucauccccauc

SEQ ID NO: 227648 - RNA, 28 nt, Human
cccccacagaaagcagacuccaaaaaaa

SEQ ID NO: 227649 - RNA, 18 nt, Human
cccccucaaaugcccgcu

SEQ ID NO: 227650 - RNA, 21 nt, Human
ccccucaaaugcccgcuccuc

SEQ ID NO: 227651 - RNA, 18 nt, Human
cccuggaauagggggaaa

SEQ ID NO: 227652 - RNA, 18 nt, Human
ccgcuccucaagaugcuu

SEQ ID NO: 227653 - RNA, 20 nt, Human
ccggaagacgacacauaaaa

SEQ ID NO: 227654 - RNA, 25 nt, Human
cucacagcagcacagacccucccaa

SEQ ID NO: 227655 - RNA, 24 nt, Human
cucaccccccaacuuagagaaaca

SEQ ID NO: 227656 - RNA, 18 nt, Human
cuccaaaaaaaaaaaaaa

SEQ ID NO: 227657 - RNA, 26 nt, Human
cuccaaaaaaaaaaaaaaagacacaa

SEQ ID NO: 227658 - RNA, 27 nt, Human
cuccaaaaaaaaaaaaaaagacacaau

SEQ ID NO: 227659 - RNA, 22 nt, Human
cucggggauccuaguucuguuc

SEQ ID NO: 227660 - RNA, 23 nt, Human
cugaucagcaacagugauucagc

SEQ ID NO: 227661 - RNA, 25 nt, Human
cugcugaacuguguaugcacucggg

SEQ ID NO: 227662 - RNA, 23 nt, Human
cugcuggcucuccugcuugguca

SEQ ID NO: 227663 - RNA, 23 nt, Human
cuguguaugcacucggggauccu

SEQ ID NO: 227664 - RNA, 25 nt, Human
gaaacaccaaaacaaagcccaaagg

SEQ ID NO: 227665 - RNA, 20 nt, Human
gaaaucucuuccauucccaa

SEQ ID NO: 227666 - RNA, 18 nt, Human
gaacucaaggaaaaacag

SEQ ID NO: 227667 - RNA, 22 nt, Human
gaagugcugcuggcucuccugc

SEQ ID NO: 227668 - RNA, 21 nt, Human
gaauaauuuacaaucucauaa

SEQ ID NO: 227669 - RNA, 22 nt, Human
gacugcguuuuaaaauucagca

SEQ ID NO: 227670 - RNA, 19 nt, Human
gaggaugggggagcgaaua

SEQ ID NO: 227671 - RNA, 19 nt, Human
gaguaugugcugggggggc

SEQ ID NO: 227672 - RNA, 21 nt, Human
gaguaugugcugggggggcag

SEQ ID NO: 227673 - RNA, 20 nt, Human
gcaaagcucucaccaagcuc

SEQ ID NO: 227674 - RNA, 21 nt, Human
gcaaagcucucaccaagcucc

SEQ ID NO: 227675 - RNA, 21 nt, Human
gcccggccucacccccacaga

SEQ ID NO: 227676 - RNA, 22 nt, Human
gccuggaguagagacauagcuc

SEQ ID NO: 227677 - RNA, 21 nt, Human
gcugcuggcucuccugcuugg

SEQ ID NO: 227678 - RNA, 24 nt, Human
ggaaaaacagugagcugagaagca

SEQ ID NO: 227679 - RNA, 23 nt, Human
ggaaaaccuaaaaguaggacccu

SEQ ID NO: 227680 - RNA, 23 nt, Human
ggagcauggaggcaauuuaaaug

SEQ ID NO: 227681 - RNA, 20 nt, Human
ggcaucugugggcagcuaga

SEQ ID NO: 227682 - RNA, 18 nt, Human
gggacaaauccagaagag

SEQ ID NO: 227683 - RNA, 24 nt, Human
gggcaguaagaggcuucaucuacc

SEQ ID NO: 227684 - RNA, 19 nt, Human
gggcugggggaugccaauc

SEQ ID NO: 227685 - RNA, 18 nt, Human
ggggaggggaggaugggg

SEQ ID NO: 227686 - RNA, 18 nt, Human
ggguuggggagagggugc

SEQ ID NO: 227687 - RNA, 22 nt, Human
gguauuuuuaaaaaaaaaaaaa

SEQ ID NO: 227688 - RNA, 20 nt, Human
guagcccagucguaucagaa

SEQ ID NO: 227689 - RNA, 21 nt, Human
gugcugccuggggaugucaag

SEQ ID NO: 227690 - RNA, 24 nt, Human
gugcugcuggcucuccugcuuggu

SEQ ID NO: 227691 - RNA, 18 nt, Human
guggagggacccuucccc

SEQ ID NO: 227692 - RNA, 20 nt, Human
uaaaaaaaaaaaaaaggcuc

SEQ ID NO: 227693 - RNA, 20 nt, Human
uaaaaauucuggguaccuug

SEQ ID NO: 227694 - RNA, 20 nt, Human
uaaauacacaaaacagagcc

SEQ ID NO: 227695 - RNA, 18 nt, Human
uaaauggcaccuguccca

SEQ ID NO: 227696 - RNA, 21 nt, Human
uaacagccacgcagagaacac

SEQ ID NO: 227697 - RNA, 19 nt, Human
uaaguauaaauggggacug

SEQ ID NO: 227698 - RNA, 22 nt, Human
uacaaucucauaaccaaacaug

SEQ ID NO: 227699 - RNA, 20 nt, Human
uacacacacacacacacaca

SEQ ID NO: 227700 - RNA, 25 nt, Human
uacaguaaauacacaaaguggcuca

SEQ ID NO: 227701 - RNA, 22 nt, Human
uacaucagaucccaaccccagc

SEQ ID NO: 227702 - RNA, 19 nt, Human
uacauuugaggaaauguuu

SEQ ID NO: 227703 - RNA, 21 nt, Human
uaccacgugaccagcacaaac

SEQ ID NO: 227704 - RNA, 21 nt, Human
uaccuaugcaauauguuguac

SEQ ID NO: 227705 - RNA, 18 nt, Human
uaccuggugaugaagaga

SEQ ID NO: 227706 - RNA, 23 nt, Human
uagaaacacagcacagcugaaca

SEQ ID NO: 227707 - RNA, 28 nt, Human
uagaaacaccaaaacaaagcccaaaggu

SEQ ID NO: 227708 - RNA, 20 nt, Human
uagcagaaaaugaggucagu

SEQ ID NO: 227709 - RNA, 19 nt, Human
uagcccagucguaucagaa

SEQ ID NO: 227710 - RNA, 19 nt, Human
uaggagaacucaaggaaaa

SEQ ID NO: 227711 - RNA, 24 nt, Human
uagggagggagacaugaggugaaa

SEQ ID NO: 227712 - RNA, 20 nt, Human
uaguaaagaaauccaguaga

SEQ ID NO: 227713 - RNA, 21 nt, Human
uauacagucccuaacagccac

SEQ ID NO: 227714 - RNA, 25 nt, Human
uaugccagaaauuucagcaugagca

SEQ ID NO: 227715 - RNA, 25 nt, Human
uauugccacugaaaaugaggggagg

SEQ ID NO: 227716 - RNA, 20 nt, Human
ucaaagaccaauggccuaaa

SEQ ID NO: 227717 - RNA, 20 nt, Human
ucaaaugcccgcuccucaag

SEQ ID NO: 227718 - RNA, 20 nt, Human
ucaagaaacaccagugacug

SEQ ID NO: 227719 - RNA, 18 nt, Human
ucacaaagugccaagggc

SEQ ID NO: 227720 - RNA, 27 nt, Human
ucacacacgcucaccccccaacuuaga

SEQ ID NO: 227721 - RNA, 18 nt, Human
ucacugagucccaugacg

SEQ ID NO: 227722 - RNA, 22 nt, Human
ucagucccuagcaauucaagaa

SEQ ID NO: 227723 - RNA, 21 nt, Human
uccaaaaacagaaaacaugac

SEQ ID NO: 227724 - RNA, 22 nt, Human
uccagaagagaggucucuguga

SEQ ID NO: 227725 - RNA, 24 nt, Human
uccaggcaaacagagccuuuaaaa

SEQ ID NO: 227726 - RNA, 18 nt, Human
uccagucaccaagguccu

SEQ ID NO: 227727 - RNA, 19 nt, Human
ucccaaccccagccucauc

SEQ ID NO: 227728 - RNA, 22 nt, Human
ucccaaccccagccucaucccc

SEQ ID NO: 227729 - RNA, 23 nt, Human
ucccaaccccagccucaucccca

SEQ ID NO: 227730 - RNA, 22 nt, Human
ucccaugacgaaggcugcacag

SEQ ID NO: 227731 - RNA, 20 nt, Human
ucccuguagaaacaccaaaa

SEQ ID NO: 227732 - RNA, 20 nt, Human
ucuacacacacacacacaca

SEQ ID NO: 227733 - RNA, 23 nt, Human
ucucuuccauucccaaaugcugg

SEQ ID NO: 227734 - RNA, 18 nt, Human
ucugugggcagcuagagc

SEQ ID NO: 227735 - RNA, 23 nt, Human
ucuuccaggucccccaaagcugg

SEQ ID NO: 227736 - RNA, 21 nt, Human
ugaaaaugaggggaggggagg

SEQ ID NO: 227737 - RNA, 23 nt, Human
ugaauccagucaccaagguccug

SEQ ID NO: 227738 - RNA, 18 nt, Human
ugaauggcauacaucaga

SEQ ID NO: 227739 - RNA, 21 nt, Human
ugagaagcacagggaacccau

SEQ ID NO: 227740 - RNA, 21 nt, Human
ugagaagcacagggaacccau

SEQ ID NO: 227741 - RNA, 19 nt, Human
ugagaccagagcacucaac

SEQ ID NO: 227742 - RNA, 20 nt, Human
ugaggaaauguuucuucagc

SEQ ID NO: 227743 - RNA, 18 nt, Human
ugaggggaggggaggaug

SEQ ID NO: 227744 - RNA, 22 nt, Human
ugcaaauggcagauaaauacac

SEQ ID NO: 227745 - RNA, 18 nt, Human
ugcugaacuguguaugca

SEQ ID NO: 227746 - RNA, 21 nt, Human
ugcugugaauaauuaaacugg

SEQ ID NO: 227747 - RNA, 24 nt, Human
uggaagugcugcuggcuccgaccc

SEQ ID NO: 227748 - RNA, 21 nt, Human
uggaggagggugaccucuuau

SEQ ID NO: 227749 - RNA, 20 nt, Human
uggcaucugugggcagcuag

SEQ ID NO: 227750 - RNA, 18 nt, Human
ugggaaaaccuaaaagua

SEQ ID NO: 227751 - RNA, 22 nt, Human
ugggguucuuggggguugggga

SEQ ID NO: 227752 - RNA, 19 nt, Human
ugggucuggaggaggguga

SEQ ID NO: 227753 - RNA, 22 nt, Human
uggugaugaagagauagcaggu

SEQ ID NO: 227754 - RNA, 22 nt, Human
uguagggagggagacaugaggu

SEQ ID NO: 227755 - RNA, 23 nt, Human
uuaaauacaaauuacuccaugcc

SEQ ID NO: 227756 - RNA, 21 nt, Human
uucacaagcagccguggccac

SEQ ID NO: 227757 - RNA, 19 nt, Human
uucaccaccgcaaucagau

SEQ ID NO: 227758 - RNA, 20 nt, Human
uucagcuauugcuguaacug

SEQ ID NO: 227759 - RNA, 19 nt, Human
uucagugucuucaguuuuc

SEQ ID NO: 227760 - RNA, 25 nt, Human
uuccaacccacagccagguagaguu

SEQ ID NO: 227761 - RNA, 24 nt, Human
uucuuggggguuggggagagggug

SEQ ID NO: 227762 - RNA, 21 nt, Human
uugaccacugucacaaagugc

SEQ ID NO: 227763 - RNA, 18 nt, Human
uuugucccuuauucuagc

SEQ ID NO: 227764 - RNA, 22 nt, Human
uuuguuuuucaguguuacccga

SEQ ID NO: 227765 - RNA, 18 nt, Human
uuuuccuguuuuuguuuu

SEQ ID NO: 227766 - RNA, 18 nt, Human
agagguguccaggggcca

SEQ ID NO: 227767 - RNA, 22 nt, Human
gagguguccaggggccagcagg

SEQ ID NO: 227768 - RNA, 21 nt, Human
gggguaggggacagggcuggg

SEQ ID NO: 227769 - RNA, 23 nt, Human
uacuggggguaggggacagggcu

SEQ ID NO: 227770 - RNA, 18 nt, Human
uggggguaggggacaggg

SEQ ID NO: 227771 - RNA, 23 nt, Human
uggggguaggggacagggcuggg

SEQ ID NO: 227772 - RNA, 21 nt, Human
aaacgcccccuuuucaucccu

SEQ ID NO: 227773 - RNA, 24 nt, Human
agaggcugggugaugaccggcuuc

SEQ ID NO: 227774 - RNA, 20 nt, Human
aggggcccuggaauacaggc

SEQ ID NO: 227775 - RNA, 18 nt, Human
cacacagcggggaguggc

SEQ ID NO: 227776 - RNA, 20 nt, Human
cacguccccagcaaggcuag

SEQ ID NO: 227777 - RNA, 22 nt, Human
cacuccugggucccagauuccu

SEQ ID NO: 227778 - RNA, 18 nt, Human
cagugcccgaaacgcccc

SEQ ID NO: 227779 - RNA, 20 nt, Human
cagugcccgaaacgcccccu

SEQ ID NO: 227780 - RNA, 23 nt, Human
ccagugcccgaaacgcccccuuu

SEQ ID NO: 227781 - RNA, 20 nt, Human
cccgaaacgcccccuuuuca

SEQ ID NO: 227782 - RNA, 21 nt, Human
cuccugggucccagauuccug

SEQ ID NO: 227783 - RNA, 22 nt, Human
gaaacgcccccuuuucaucccu

SEQ ID NO: 227784 - RNA, 24 nt, Human
gaauggggauaggugggggaauga

SEQ ID NO: 227785 - RNA, 19 nt, Human
gagaauggggauagguggg

SEQ ID NO: 227786 - RNA, 20 nt, Human
gaggaagaggauggacgaug

SEQ ID NO: 227787 - RNA, 20 nt, Human
ggagaguucagccgacuggg

SEQ ID NO: 227788 - RNA, 20 nt, Human
gggaaugaggugagagggga

SEQ ID NO: 227789 - RNA, 24 nt, Human
gggaggggcccuggaauacaggcu

SEQ ID NO: 227790 - RNA, 28 nt, Human
gggauaggugggggaaugaggugagagg

SEQ ID NO: 227791 - RNA, 22 nt, Human
ggggauaggugggggaaugagg

SEQ ID NO: 227792 - RNA, 20 nt, Human
gggggaaugaggugagaggg

SEQ ID NO: 227793 - RNA, 20 nt, Human
guucccauuuugcagaugag

SEQ ID NO: 227794 - RNA, 21 nt, Human
uacaggcuucucccagugccc

SEQ ID NO: 227795 - RNA, 24 nt, Human
ucccaggcgcggggagaggguuca

SEQ ID NO: 227796 - RNA, 24 nt, Human
ucccggugccaagaaggcuuccca

SEQ ID NO: 227797 - RNA, 21 nt, Human
uccgggucccggugccaagaa

SEQ ID NO: 227798 - RNA, 23 nt, Human
uccugggucccagauuccugcuc

SEQ ID NO: 227799 - RNA, 21 nt, Human
ugaggaaacugagguucagag

SEQ ID NO: 227800 - RNA, 24 nt, Human
ugaggaaacugagguucagagagg

SEQ ID NO: 227801 - RNA, 24 nt, Human
ugagguucagagagggcacuuggc

SEQ ID NO: 227802 - RNA, 23 nt, Human
ugcccaaagucacacagcgggga

SEQ ID NO: 227803 - RNA, 22 nt, Human
uggcagaggaagucagguuggg

SEQ ID NO: 227804 - RNA, 19 nt, Human
uggcuucucuggaauaaac

SEQ ID NO: 227805 - RNA, 27 nt, Human
ugggaggggcccuggaauacaggcuuc

SEQ ID NO: 227806 - RNA, 20 nt, Human
ugggaggggcccuggaauag

SEQ ID NO: 227807 - RNA, 18 nt, Human
uggggaggaagaggaugg

SEQ ID NO: 227808 - RNA, 25 nt, Human
uggggaggaagaggauggacgaugg

SEQ ID NO: 227809 - RNA, 19 nt, Human
uguggagggcggcagaggu

SEQ ID NO: 227810 - RNA, 23 nt, Human
uuagagguguggagggcggcaga

SEQ ID NO: 227811 - RNA, 18 nt, Human
uucacguccccagcaagg

SEQ ID NO: 227812 - RNA, 19 nt, Human
uuccugcauuucagcuuca

SEQ ID NO: 227813 - RNA, 22 nt, Human
uuccugcauuucagcuucagaa

SEQ ID NO: 227814 - RNA, 22 nt, Human
uuggaacuggcuuccgugggga

SEQ ID NO: 227815 - RNA, 24 nt, Human
uuuacauacacauguuauaucaua

SEQ ID NO: 227816 - RNA, 19 nt, Human
uuuuuuuuuuuuuuuuuaa

SEQ ID NO: 227817 - RNA, 18 nt, Human
acacugggaauaaggagc

SEQ ID NO: 227818 - RNA, 23 nt, Human
agagaccugggccauugucuggg

SEQ ID NO: 227819 - RNA, 25 nt, Human
auggugacaggauggaagccgguac

SEQ ID NO: 227820 - RNA, 19 nt, Human
cacugggaauaaggagcag

SEQ ID NO: 227821 - RNA, 19 nt, Human
cgggaggggagggcagggc

SEQ ID NO: 227822 - RNA, 20 nt, Human
cuggguugggacauucaggu

SEQ ID NO: 227823 - RNA, 24 nt, Human
gaauaaggagcagagaagggcuaa

SEQ ID NO: 227824 - RNA, 26 nt, Human
gagagaccugggccauugucuggguu

SEQ ID NO: 227825 - RNA, 18 nt, Human
gaucgggaggggagggca

SEQ ID NO: 227826 - RNA, 18 nt, Human
gcuaagcagaccauguga

SEQ ID NO: 227827 - RNA, 20 nt, Human
ggaucgggaggggagggcag

SEQ ID NO: 227828 - RNA, 21 nt, Human
ggaucgggaggggagggcagg

SEQ ID NO: 227829 - RNA, 20 nt, Human
gggaauaaggagcagagaag

SEQ ID NO: 227830 - RNA, 23 nt, Human
uaagaaugugccacagacagaac

SEQ ID NO: 227831 - RNA, 20 nt, Human
uaagcagaccaugugaggaa

SEQ ID NO: 227832 - RNA, 20 nt, Human
ucagggaugcaacaucuggg

SEQ ID NO: 227833 - RNA, 22 nt, Human
uccgggaucgggaggggagggc

SEQ ID NO: 227834 - RNA, 21 nt, Human
ugaggaagucauggugacagg

SEQ ID NO: 227835 - RNA, 21 nt, Human
ugaucugggcucauagaagcc

SEQ ID NO: 227836 - RNA, 18 nt, Human
ugcaagccuggcagugcc

SEQ ID NO: 227837 - RNA, 21 nt, Human
ugccacagacagaacguucag

SEQ ID NO: 227838 - RNA, 22 nt, Human
ugccugaaugcuucugaaacau

SEQ ID NO: 227839 - RNA, 24 nt, Human
uggaacacugggaauaaggagcag

SEQ ID NO: 227840 - RNA, 19 nt, Human
ugggagacugcaagccugg

SEQ ID NO: 227841 - RNA, 18 nt, Human
uggguugggacauucagg

SEQ ID NO: 227842 - RNA, 24 nt, Human
ugucaaggaugguccauuuauagg

SEQ ID NO: 227843 - RNA, 21 nt, Human
uucagguggugaucugggcuc

SEQ ID NO: 227844 - RNA, 19 nt, Human
acuagagguagggguggga

SEQ ID NO: 227845 - RNA, 18 nt, Human
agguaggggugggacagg

SEQ ID NO: 227846 - RNA, 21 nt, Human
agguaggggugggacaggggc

SEQ ID NO: 227847 - RNA, 19 nt, Human
agguguccacggccaggug

SEQ ID NO: 227848 - RNA, 23 nt, Human
cggccagguggugaguuuggggc

SEQ ID NO: 227849 - RNA, 24 nt, Human
gcugacacagguguccacggccag

SEQ ID NO: 227850 - RNA, 20 nt, Human
ggccagguggugaguuuggg

SEQ ID NO: 227851 - RNA, 21 nt, Human
uugagguggacuuaaauuuac

SEQ ID NO: 227852 - RNA, 21 nt, Human
uuuuuuuuuuugagguggacu

SEQ ID NO: 227853 - RNA, 22 nt, Human
uuuuuuuuuuuuuugaggugga

SEQ ID NO: 227854 - RNA, 18 nt, Human
uuuuuuuuuuuuuuuuug

SEQ ID NO: 227855 - RNA, 23 nt, Human
uuuuuuuuuuuuuuuuuuugagg

SEQ ID NO: 227856 - RNA, 22 nt, Human
aauaacacagacaccccauccu

SEQ ID NO: 227857 - RNA, 21 nt, Human
acaugucacucuccacucucu

SEQ ID NO: 227858 - RNA, 21 nt, Human
agaaacacucuggucuacacc

SEQ ID NO: 227859 - RNA, 19 nt, Human
agaacuggggaggcuugag

SEQ ID NO: 227860 - RNA, 19 nt, Human
caaauaacacagacacccc

SEQ ID NO: 227861 - RNA, 20 nt, Human
caacccuggaccucacaccu

SEQ ID NO: 227862 - RNA, 20 nt, Human
caauacaccuccccccauag

SEQ ID NO: 227863 - RNA, 18 nt, Human
cacagacaccccauccua

SEQ ID NO: 227864 - RNA, 24 nt, Human
caccccauccuaucuguguccuca

SEQ ID NO: 227865 - RNA, 21 nt, Human
caggacacagagaggacaaaa

SEQ ID NO: 227866 - RNA, 22 nt, Human
cauccccaucccaugccaaagg

SEQ ID NO: 227867 - RNA, 18 nt, Human
cauggccaguauucccca

SEQ ID NO: 227868 - RNA, 23 nt, Human
ccacaaauaacacagacacccca

SEQ ID NO: 227869 - RNA, 21 nt, Human
ccaggggguccagucccucuc

SEQ ID NO: 227870 - RNA, 25 nt, Human
cccacaaauaacacagacaccccau

SEQ ID NO: 227871 - RNA, 23 nt, Human
cccaugccaaaggaagacccucc

SEQ ID NO: 227872 - RNA, 23 nt, Human
ccccacaaauaacacagacaccc

SEQ ID NO: 227873 - RNA, 22 nt, Human
ccuggaccucacaccuaaggac

SEQ ID NO: 227874 - RNA, 23 nt, Human
cuaaggacaaaggucaguagaac

SEQ ID NO: 227875 - RNA, 24 nt, Human
cucacagccuucucuaggcuuccc

SEQ ID NO: 227876 - RNA, 20 nt, Human
cucuccuuacuucaucccca

SEQ ID NO: 227877 - RNA, 24 nt, Human
cucuuucaucucuguaccccacaa

SEQ ID NO: 227878 - RNA, 19 nt, Human
cugcucagugcuucaugga

SEQ ID NO: 227879 - RNA, 18 nt, Human
cugcugauuucuuuuccu

SEQ ID NO: 227880 - RNA, 21 nt, Human
gacccucccuccuuggcucac

SEQ ID NO: 227881 - RNA, 20 nt, Human
gaucccaccccucuuucauc

SEQ ID NO: 227882 - RNA, 22 nt, Human
ggaucccaccccucuuucaucu

SEQ ID NO: 227883 - RNA, 22 nt, Human
gggugcaggugguaagcuuggg

SEQ ID NO: 227884 - RNA, 19 nt, Human
guaccccacaaauaacaca

SEQ ID NO: 227885 - RNA, 18 nt, Human
uaacacagacaccccauc

SEQ ID NO: 227886 - RNA, 19 nt, Human
uaacacagacaccccaucc

SEQ ID NO: 227887 - RNA, 19 nt, Human
uccagcuucugcucagugc

SEQ ID NO: 227888 - RNA, 21 nt, Human
ucccaugccaaaggaagaccc

SEQ ID NO: 227889 - RNA, 21 nt, Human
uccuuacuucauccccauccc

SEQ ID NO: 227890 - RNA, 22 nt, Human
ucugaggguugucuggaggacu

SEQ ID NO: 227891 - RNA, 18 nt, Human
ucugcugauuucuuuucc

SEQ ID NO: 227892 - RNA, 23 nt, Human
ucuggucuacaccugugucugcu

SEQ ID NO: 227893 - RNA, 25 nt, Human
ugccuccagcuucugcucagugcuu

SEQ ID NO: 227894 - RNA, 21 nt, Human
ugucugcugauuucuuuuccu

SEQ ID NO: 227895 - RNA, 23 nt, Human
uucagcuccauccuugcugugag

SEQ ID NO: 227896 - RNA, 23 nt, Human
uucucuaggcuucccagugccuc

SEQ ID NO: 227897 - RNA, 19 nt, Human
uuuucagcuccauccuugc

SEQ ID NO: 227898 - RNA, 19 nt, Human
cacuguguacagggagagu

SEQ ID NO: 227899 - RNA, 23 nt, Human
ccuggaccccugggucugaggga

SEQ ID NO: 227900 - RNA, 21 nt, Human
ccuggaccucugggucugggg

SEQ ID NO: 227901 - RNA, 23 nt, Human
ccuggacuccugggccugaggga

SEQ ID NO: 227902 - RNA, 18 nt, Human
ccuugguuugagggagga

SEQ ID NO: 227903 - RNA, 19 nt, Human
cugagggaggaggggcugg

SEQ ID NO: 227904 - RNA, 18 nt, Human
cuggaucuaggggaaagg

SEQ ID NO: 227905 - RNA, 18 nt, Human
cugggucugagggaggag

SEQ ID NO: 227906 - RNA, 22 nt, Human
gaacagauauuccugaauuccu

SEQ ID NO: 227907 - RNA, 18 nt, Human
gaggaggggcuggggggu

SEQ ID NO: 227908 - RNA, 19 nt, Human
gccugagggaggaggggcu

SEQ ID NO: 227909 - RNA, 24 nt, Human
ggaaggagggguugggggcuugga

SEQ ID NO: 227910 - RNA, 21 nt, Human
ggacaaaaaaugaaaaaccaa

SEQ ID NO: 227911 - RNA, 22 nt, Human
ggaggaggggcugggaccugga

SEQ ID NO: 227912 - RNA, 18 nt, Human
gggaggaggggcuggggg

SEQ ID NO: 227913 - RNA, 19 nt, Human
gggaggaggggcugggggg

SEQ ID NO: 227914 - RNA, 19 nt, Human
gggaggaggggcugggggg

SEQ ID NO: 227915 - RNA, 19 nt, Human
gggccugagggaggagggg

SEQ ID NO: 227916 - RNA, 21 nt, Human
gggcugggaccuggaccucug

SEQ ID NO: 227917 - RNA, 21 nt, Human
gggggccuggacuccugggcc

SEQ ID NO: 227918 - RNA, 21 nt, Human
gggguugggggcuuggaccuc

SEQ ID NO: 227919 - RNA, 19 nt, Human
gggucugagggaggagggg

SEQ ID NO: 227920 - RNA, 19 nt, Human
gggucugagggaggagggg

SEQ ID NO: 227921 - RNA, 19 nt, Human
gggucugagggaggagggg

SEQ ID NO: 227922 - RNA, 19 nt, Human
gggucugagggaggagggg

SEQ ID NO: 227923 - RNA, 19 nt, Human
gggucugagggaggagggg

SEQ ID NO: 227924 - RNA, 18 nt, Human
gguaagguugggucaacg

SEQ ID NO: 227925 - RNA, 20 nt, Human
ggucuggggaaggagggguu

SEQ ID NO: 227926 - RNA, 21 nt, Human
gguugggggccuggaccccug

SEQ ID NO: 227927 - RNA, 19 nt, Human
gucugagggaggaggggcu

SEQ ID NO: 227928 - RNA, 19 nt, Human
gucugagggaggaggggcu

SEQ ID NO: 227929 - RNA, 19 nt, Human
gucugagggaggaggggcu

SEQ ID NO: 227930 - RNA, 19 nt, Human
gucugagggaggaggggcu

SEQ ID NO: 227931 - RNA, 19 nt, Human
guuugagggaggaggggcu

SEQ ID NO: 227932 - RNA, 20 nt, Human
uccugggccugagggaggag

SEQ ID NO: 227933 - RNA, 20 nt, Human
uccugggucugagggaggag

SEQ ID NO: 227934 - RNA, 20 nt, Human
uccugggucugagggaggag

SEQ ID NO: 227935 - RNA, 20 nt, Human
uccugggucugagggaggag

SEQ ID NO: 227936 - RNA, 23 nt, Human
ucuuagacuuuauuucuggaucu

SEQ ID NO: 227937 - RNA, 23 nt, Human
ugagggaggaggggcuggacucc

SEQ ID NO: 227938 - RNA, 24 nt, Human
ugagggaggaggggcuggacuccu

SEQ ID NO: 227939 - RNA, 21 nt, Human
ugagggaggaggggcugggaa

SEQ ID NO: 227940 - RNA, 23 nt, Human
ugagggaggaggggcugggaccu

SEQ ID NO: 227941 - RNA, 21 nt, Human
ugagggaggaggggcugggga

SEQ ID NO: 227942 - RNA, 23 nt, Human
ugagggaggaggggcuggggggu

SEQ ID NO: 227943 - RNA, 20 nt, Human
uggggaaggagggguugggg

SEQ ID NO: 227944 - RNA, 20 nt, Human
ugggggccuggacuccuggg

SEQ ID NO: 227945 - RNA, 22 nt, Human
ugggggccuggacuccugggcc

SEQ ID NO: 227946 - RNA, 22 nt, Human
ugggggcuuggaccucugaguc

SEQ ID NO: 227947 - RNA, 23 nt, Human
uucuggaucuaggggaaagggac

SEQ ID NO: 227948 - RNA, 19 nt, Human
uugggggucaauuucaugg

SEQ ID NO: 227949 - RNA, 18 nt, Human
aaguagagaggaaccaca

SEQ ID NO: 227950 - RNA, 24 nt, Human
acaccucuccuuccuuccugcuga

SEQ ID NO: 227951 - RNA, 23 nt, Human
agacgcaacccccgcccuggaca

SEQ ID NO: 227952 - RNA, 23 nt, Human
agagaugaacauucucaacaucu

SEQ ID NO: 227953 - RNA, 21 nt, Human
aggaaugagggucugaaagga

SEQ ID NO: 227954 - RNA, 18 nt, Human
agggcaaggaggggacag

SEQ ID NO: 227955 - RNA, 19 nt, Human
caccaggucucacuugccc

SEQ ID NO: 227956 - RNA, 18 nt, Human
caccucuccuuccuuccu

SEQ ID NO: 227957 - RNA, 24 nt, Human
cacuauagaauucagaagauagga

SEQ ID NO: 227958 - RNA, 20 nt, Human
cacugcgcugagacccaggc

SEQ ID NO: 227959 - RNA, 18 nt, Human
caggacgcacagacaccu

SEQ ID NO: 227960 - RNA, 24 nt, Human
cagggcaaggaggggacagagaaa

SEQ ID NO: 227961 - RNA, 18 nt, Human
cccccagguagggggugg

SEQ ID NO: 227962 - RNA, 19 nt, Human
cccccagguaggggguggg

SEQ ID NO: 227963 - RNA, 19 nt, Human
cccugagcuugaggaugaa

SEQ ID NO: 227964 - RNA, 20 nt, Human
ccugcugagccacccucacc

SEQ ID NO: 227965 - RNA, 25 nt, Human
cucaccaggucucacuugcccuguc

SEQ ID NO: 227966 - RNA, 18 nt, Human
cugcgcugagacccaggc

SEQ ID NO: 227967 - RNA, 18 nt, Human
cugcugagccacccucac

SEQ ID NO: 227968 - RNA, 20 nt, Human
cugcugagccacccucacca

SEQ ID NO: 227969 - RNA, 19 nt, Human
cugugccuuccccucgugc

SEQ ID NO: 227970 - RNA, 19 nt, Human
gagagacacggucagccca

SEQ ID NO: 227971 - RNA, 23 nt, Human
ggaaccacaaggacgggccacca

SEQ ID NO: 227972 - RNA, 21 nt, Human
ggacaguuuuggaaauuguuc

SEQ ID NO: 227973 - RNA, 22 nt, Human
gggaaggaaugagggucugaaa

SEQ ID NO: 227974 - RNA, 18 nt, Human
gggagauugagacgcaac

SEQ ID NO: 227975 - RNA, 21 nt, Human
gggucaggggcuggagagaug

SEQ ID NO: 227976 - RNA, 18 nt, Human
ucccccagguagggggug

SEQ ID NO: 227977 - RNA, 19 nt, Human
ucccugcagcaggugggga

SEQ ID NO: 227978 - RNA, 21 nt, Human
ucucugggaaggaaugagggu

SEQ ID NO: 227979 - RNA, 25 nt, Human
ucugggaaggaaugagggucugaaa

SEQ ID NO: 227980 - RNA, 20 nt, Human
ugcccugucccccagguagg

SEQ ID NO: 227981 - RNA, 18 nt, Human
ugcgcugagacccaggca

SEQ ID NO: 227982 - RNA, 21 nt, Human
ugggugcaggacgcacagaca

SEQ ID NO: 227983 - RNA, 21 nt, Human
ugggugcaggacgcacagaca

SEQ ID NO: 227984 - RNA, 28 nt, Human
uuggaaauuguucccaggguucaacuag

SEQ ID NO: 227985 - RNA, 22 nt, Human
uuuuuuuuuuuuccacuucuca

SEQ ID NO: 227986 - RNA, 22 nt, Human
uuuuuuuuuuuuuuuuccacuu

SEQ ID NO: 227987 - RNA, 20 nt, Human
agagccuggggagcuucugg

SEQ ID NO: 227988 - RNA, 24 nt, Human
cagaauccaggggcggggucaccu

SEQ ID NO: 227989 - RNA, 23 nt, Human
ccccaguacuucaguucucugcc

SEQ ID NO: 227990 - RNA, 18 nt, Human
ccuccuccuucuccuccu

SEQ ID NO: 227991 - RNA, 19 nt, Human
ccugcacuagagccugggg

SEQ ID NO: 227992 - RNA, 18 nt, Human
cuccaccuccugcuccuc

SEQ ID NO: 227993 - RNA, 23 nt, Human
cugagccccaggaugugaugccc

SEQ ID NO: 227994 - RNA, 23 nt, Human
cugauucggacccaguggaggag

SEQ ID NO: 227995 - RNA, 21 nt, Human
cuuccagaauccaggggcggg

SEQ ID NO: 227996 - RNA, 22 nt, Human
cuucuccuccugcacuagagcc

SEQ ID NO: 227997 - RNA, 20 nt, Human
gaggaggccccaguacuuca

SEQ ID NO: 227998 - RNA, 21 nt, Human
uaacugggaaucuccaccucc

SEQ ID NO: 227999 - RNA, 22 nt, Human
uaacugggaaucuccaccuccu

SEQ ID NO: 228000 - RNA, 22 nt, Human
uagagccuggggagcuucuggg

SEQ ID NO: 228001 - RNA, 23 nt, Human
ucagcccuugcugccuaugaucu

SEQ ID NO: 228002 - RNA, 19 nt, Human
uccagaauccaggggcggg

SEQ ID NO: 228003 - RNA, 23 nt, Human
ucccacaggggucugagccccag

SEQ ID NO: 228004 - RNA, 19 nt, Human
ucuccaccuccugcuccuc

SEQ ID NO: 228005 - RNA, 20 nt, Human
ucuccuccugcacuagagcc

SEQ ID NO: 228006 - RNA, 20 nt, Human
ugauccaguccagguagcgg

SEQ ID NO: 228007 - RNA, 21 nt, Human
ugucggaccucccacaggggu

SEQ ID NO: 228008 - RNA, 22 nt, Human
uugcugccuaugaucuucuuga

SEQ ID NO: 228009 - RNA, 18 nt, Human
agccccugguuacggcgu

SEQ ID NO: 228010 - RNA, 24 nt, Human
aggaugcaaagaagaugccacucu

SEQ ID NO: 228011 - RNA, 22 nt, Human
cuuucaccauuuuauuucacaa

SEQ ID NO: 228012 - RNA, 20 nt, Human
gaagaugccacucuccaugc

SEQ ID NO: 228013 - RNA, 19 nt, Human
gacauuguccucagcagcu

SEQ ID NO: 228014 - RNA, 22 nt, Human
gcuuugcagaugaggacccccc

SEQ ID NO: 228015 - RNA, 20 nt, Human
uacggcgugcugaaagcggg

SEQ ID NO: 228016 - RNA, 24 nt, Human
ucuccaugcuuugcagaugaggac

SEQ ID NO: 228017 - RNA, 20 nt, Human
ugacuugaacucagguugua

SEQ ID NO: 228018 - RNA, 21 nt, Human
uugcagaugaggaccccccuc

SEQ ID NO: 228019 - RNA, 22 nt, Human
aaaaaugcacauucuccucucc

SEQ ID NO: 228020 - RNA, 19 nt, Human
aaaagcaaugauuuauaau

SEQ ID NO: 228021 - RNA, 21 nt, Human
aagaaaacauuccauuuucac

SEQ ID NO: 228022 - RNA, 24 nt, Human
agaaaauagagucuauucucuucc

SEQ ID NO: 228023 - RNA, 21 nt, Human
aggaagaaagauggcaucuga

SEQ ID NO: 228024 - RNA, 21 nt, Human
aucugugcuaugcaguggugc

SEQ ID NO: 228025 - RNA, 21 nt, Human
cauucuuguugaggucaaaaa

SEQ ID NO: 228026 - RNA, 20 nt, Human
ccacagauacaauuguacgu

SEQ ID NO: 228027 - RNA, 24 nt, Human
cgaaucagagaaaauagagucuau

SEQ ID NO: 228028 - RNA, 19 nt, Human
cucaaaagagaaaaucucc

SEQ ID NO: 228029 - RNA, 22 nt, Human
gaucuuuaaagucauaguccaa

SEQ ID NO: 228030 - RNA, 21 nt, Human
gcacauucuccucucccagaa

SEQ ID NO: 228031 - RNA, 19 nt, Human
guccaaaauaauuuucuuu

SEQ ID NO: 228032 - RNA, 26 nt, Human
uaagaagguaaguuuugcauucaaau

SEQ ID NO: 228033 - RNA, 22 nt, Human
uacuuucccuuucaucauauga

SEQ ID NO: 228034 - RNA, 23 nt, Human
uauuaugggaaacaaaaaaagaa

SEQ ID NO: 228035 - RNA, 23 nt, Human
uccucucccagaagaaaaacgca

SEQ ID NO: 228036 - RNA, 18 nt, Human
ucuccaggaagaaagaug

SEQ ID NO: 228037 - RNA, 24 nt, Human
ucuccaggaagaaagauggcaucu

SEQ ID NO: 228038 - RNA, 21 nt, Human
ugaagaauuaacuaaguccca

SEQ ID NO: 228039 - RNA, 22 nt, Human
ugaaugcaaucaauaguugcca

SEQ ID NO: 228040 - RNA, 18 nt, Human
uucauaaaucugagauug

SEQ ID NO: 228041 - RNA, 21 nt, Human
uuccacuuacuuucccuuuca

SEQ ID NO: 228042 - RNA, 23 nt, Human
uucuccucucccagaagaaaaac

SEQ ID NO: 228043 - RNA, 23 nt, Human
uuggcgcacaccgaaucagagaa

SEQ ID NO: 228044 - RNA, 20 nt, Human
uaagaacaaacucucaauuc

SEQ ID NO: 228045 - RNA, 19 nt, Human
aaaggcauaaauccaagac

SEQ ID NO: 228046 - RNA, 19 nt, Human
aaaggcauaaauccaagac

SEQ ID NO: 228047 - RNA, 20 nt, Human
aaagucacacauccuuuagu

SEQ ID NO: 228048 - RNA, 20 nt, Human
aaagucacacauccuuuagu

SEQ ID NO: 228049 - RNA, 23 nt, Human
aaauccaagacaagaacaaacaa

SEQ ID NO: 228050 - RNA, 23 nt, Human
aaauccaagacaagaacaaacaa

SEQ ID NO: 228051 - RNA, 19 nt, Human
aaaugcuaggaugucugua

SEQ ID NO: 228052 - RNA, 26 nt, Human
aaccaucaccacuacugaaauuuaga

SEQ ID NO: 228053 - RNA, 21 nt, Human
aaccucccucagacauuggca

SEQ ID NO: 228054 - RNA, 23 nt, Human
accacaaauaccauguugagcaa

SEQ ID NO: 228055 - RNA, 22 nt, Human
agacaagaacaaacaaugccug

SEQ ID NO: 228056 - RNA, 22 nt, Human
agacaagaacaaacaaugccug

SEQ ID NO: 228057 - RNA, 21 nt, Human
auacaauuuaucugaugcacu

SEQ ID NO: 228058 - RNA, 19 nt, Human
auaccauguugagcaaaau

SEQ ID NO: 228059 - RNA, 26 nt, Human
caaaaugagcccgacacaaaugcuag

SEQ ID NO: 228060 - RNA, 22 nt, Human
caaauaccauguugagcaaaau

SEQ ID NO: 228061 - RNA, 20 nt, Human
caaaugcuaggaugucugua

SEQ ID NO: 228062 - RNA, 22 nt, Human
caagaacaaacaaugccugcaa

SEQ ID NO: 228063 - RNA, 24 nt, Human
caagaacaaacaaugccugcaauc

SEQ ID NO: 228064 - RNA, 22 nt, Human
caagacaagaacaaacaaugcc

SEQ ID NO: 228065 - RNA, 22 nt, Human
caagacaagaacaaacaaugcc

SEQ ID NO: 228066 - RNA, 27 nt, Human
cacaaauaccauguugagcaaaaugag

SEQ ID NO: 228067 - RNA, 21 nt, Human
cacgacacaaaguaacguucu

SEQ ID NO: 228068 - RNA, 18 nt, Human
ccaagacaagaacaaaca

SEQ ID NO: 228069 - RNA, 18 nt, Human
ccaagacaagaacaaaca

SEQ ID NO: 228070 - RNA, 20 nt, Human
ccccagaaagucacacaucc

SEQ ID NO: 228071 - RNA, 20 nt, Human
ccccagaaagucacacaucc

SEQ ID NO: 228072 - RNA, 22 nt, Human
ccugcaaucuucgcagacugcc

SEQ ID NO: 228073 - RNA, 21 nt, Human
cgacacaaaugcuaggauguc

SEQ ID NO: 228074 - RNA, 26 nt, Human
cguguacaaagcauacauuucaugca

SEQ ID NO: 228075 - RNA, 25 nt, Human
cuauaagcugacucacauaacaugc

SEQ ID NO: 228076 - RNA, 20 nt, Human
gacacaaaugcuaggauguc

SEQ ID NO: 228077 - RNA, 19 nt, Human
gagcaaaaugagcccgaca

SEQ ID NO: 228078 - RNA, 21 nt, Human
gaugcacugcaaaugcaaacg

SEQ ID NO: 228079 - RNA, 20 nt, Human
guacucuucuguccccagaa

SEQ ID NO: 228080 - RNA, 20 nt, Human
guacucuucuguccccagaa

SEQ ID NO: 228081 - RNA, 18 nt, Human
guagauuucucaucaacg

SEQ ID NO: 228082 - RNA, 23 nt, Human
guggaaaaaguagauuucucauc

SEQ ID NO: 228083 - RNA, 18 nt, Human
gugugaugucagggacug

SEQ ID NO: 228084 - RNA, 18 nt, Human
gugugaugucagggacug

SEQ ID NO: 228085 - RNA, 18 nt, Human
uaccauguugagcaaaau

SEQ ID NO: 228086 - RNA, 18 nt, Human
uagcuuuauugaaguguc

SEQ ID NO: 228087 - RNA, 21 nt, Human
uaguggagaggccagguuagu

SEQ ID NO: 228088 - RNA, 21 nt, Human
uaguggagaggccagguuagu

SEQ ID NO: 228089 - RNA, 20 nt, Human
uauauucgcagaguuacaac

SEQ ID NO: 228090 - RNA, 18 nt, Human
uauuucuauuuuaagaaa

SEQ ID NO: 228091 - RNA, 25 nt, Human
ucaucuccuauuucaaccucccuca

SEQ ID NO: 228092 - RNA, 18 nt, Human
uccaagacaagaacaaac

SEQ ID NO: 228093 - RNA, 18 nt, Human
uccaagacaagaacaaac

SEQ ID NO: 228094 - RNA, 18 nt, Human
uccaagacaagaacaaac

SEQ ID NO: 228095 - RNA, 18 nt, Human
uccaagacaagaacaaac

SEQ ID NO: 228096 - RNA, 19 nt, Human
uccaagacaagaacaaaca

SEQ ID NO: 228097 - RNA, 19 nt, Human
uccaagacaagaacaaaca

SEQ ID NO: 228098 - RNA, 20 nt, Human
uccuauuucaaccucccuca

SEQ ID NO: 228099 - RNA, 22 nt, Human
ucuccauggguuugacuguucu

SEQ ID NO: 228100 - RNA, 25 nt, Human
ucuucgcagacugcccugugaaggc

SEQ ID NO: 228101 - RNA, 21 nt, Human
ugagcccgacacaaaugcuag

SEQ ID NO: 228102 - RNA, 22 nt, Human
ugcacugcaaaugcaaacgcuu

SEQ ID NO: 228103 - RNA, 21 nt, Human
uggaaaaaguagauuucucau

SEQ ID NO: 228104 - RNA, 19 nt, Human
uucgcagaguuacaaccau

SEQ ID NO: 228105 - RNA, 19 nt, Human
uuuucaucacgacacaaag

SEQ ID NO: 228106 - RNA, 19 nt, Human
aaaugcuaggaugucugua

SEQ ID NO: 228107 - RNA, 26 nt, Human
aaccaucaccacuacugaaauuuaga

SEQ ID NO: 228108 - RNA, 19 nt, Human
aagcagacuggaguucuuc

SEQ ID NO: 228109 - RNA, 23 nt, Human
accacaaauaccauguugagcaa

SEQ ID NO: 228110 - RNA, 19 nt, Human
auaccauguugagcaaaau

SEQ ID NO: 228111 - RNA, 21 nt, Human
auguacaaagcauacauuuca

SEQ ID NO: 228112 - RNA, 26 nt, Human
caaaaugagcccgacacaaaugcuag

SEQ ID NO: 228113 - RNA, 22 nt, Human
caaauaccauguugagcaaaau

SEQ ID NO: 228114 - RNA, 27 nt, Human
cacaaauaccauguugagcaaaaugag

SEQ ID NO: 228115 - RNA, 21 nt, Human
cacgacacaaagaaacguucu

SEQ ID NO: 228116 - RNA, 24 nt, Human
caggccagcaaacucucuucccaa

SEQ ID NO: 228117 - RNA, 26 nt, Human
cauguacaaagcauacauuucaugca

SEQ ID NO: 228118 - RNA, 25 nt, Human
cuauaagcugacucacauaacaugc

SEQ ID NO: 228119 - RNA, 20 nt, Human
gaagugucauguacaaagca

SEQ ID NO: 228120 - RNA, 20 nt, Human
gacacaaaugcuaggauguc

SEQ ID NO: 228121 - RNA, 19 nt, Human
gagcaaaaugagcccgaca

SEQ ID NO: 228122 - RNA, 18 nt, Human
uaccauguugagcaaaau

SEQ ID NO: 228123 - RNA, 20 nt, Human
uauauucgcagaguuacaac

SEQ ID NO: 228124 - RNA, 25 nt, Human
uauuucuauuuuaagaaauauaaaa

SEQ ID NO: 228125 - RNA, 19 nt, Human
ucacgacacaaagaaacgu

SEQ ID NO: 228126 - RNA, 27 nt, Human
ucaucuccuauuucaaccucccugaga

SEQ ID NO: 228127 - RNA, 19 nt, Human
ucgaaguacaggccagcaa

SEQ ID NO: 228128 - RNA, 22 nt, Human
ucuccauggguuugacuguucu

SEQ ID NO: 228129 - RNA, 21 nt, Human
ugagcccgacacaaaugcuag

SEQ ID NO: 228130 - RNA, 22 nt, Human
uuuagaauuuuuguaucagagc

SEQ ID NO: 228131 - RNA, 26 nt, Human
uuucuauuuuaagaaauauaaaaugu

SEQ ID NO: 228132 - RNA, 26 nt, Human
aaucccagcaacuugggaggccaaga

SEQ ID NO: 228133 - RNA, 21 nt, Human
ggcuugugucaguaaucccag

SEQ ID NO: 228134 - RNA, 23 nt, Human
gguggcuugugucaguaauccca

SEQ ID NO: 228135 - RNA, 24 nt, Human
gguggcuugugucaguaaucccag

SEQ ID NO: 228136 - RNA, 19 nt, Human
guaaucccagcaacuuggg

SEQ ID NO: 228137 - RNA, 24 nt, Human
guggcuugugucaguaaucccagc

SEQ ID NO: 228138 - RNA, 18 nt, Human
gugugaugugagggacug

SEQ ID NO: 228139 - RNA, 25 nt, Human
uaaaacaucaucuaguuaaaauagg

SEQ ID NO: 228140 - RNA, 22 nt, Human
uggcuugugucaguaaucccag

SEQ ID NO: 228141 - RNA, 24 nt, Human
uggcuugugucaguaaucccagca

SEQ ID NO: 228142 - RNA, 24 nt, Human
ugugagggacugugcucuaugaua

SEQ ID NO: 228143 - RNA, 23 nt, Human
uuaaaacacaagcuaaaugguac

SEQ ID NO: 228144 - RNA, 21 nt, Human
caugaaaagcaaaacuggaaa

SEQ ID NO: 228145 - RNA, 23 nt, Human
cauggguuuccaugaaaagcaaa

SEQ ID NO: 228146 - RNA, 27 nt, Human
ccaugaaaagcaaaacuggaaauaacc

SEQ ID NO: 228147 - RNA, 21 nt, Human
cuuuuaguaaaguguugaaac

SEQ ID NO: 228148 - RNA, 22 nt, Human
cuuuuuuuuuuuuuuuuuuggg

SEQ ID NO: 228149 - RNA, 26 nt, Human
cuuuuuuuuuuuuuuuuuugguuuuu

SEQ ID NO: 228150 - RNA, 22 nt, Human
gccgccuuuuuuuuuuuuuuuu

SEQ ID NO: 228151 - RNA, 24 nt, Human
gccuuuuuuuuuuuuuuuuuuggu

SEQ ID NO: 228152 - RNA, 23 nt, Human
ggcaaacugcauguguuggaggc

SEQ ID NO: 228153 - RNA, 23 nt, Human
ggccgccuuuuuuuuuuuuuuuu

SEQ ID NO: 228154 - RNA, 21 nt, Human
gguacuaauuuccuaaaguuu

SEQ ID NO: 228155 - RNA, 18 nt, Human
gugugaugucagggacug

SEQ ID NO: 228156 - RNA, 24 nt, Human
guugaauacuacacagacuuaaaa

SEQ ID NO: 228157 - RNA, 18 nt, Human
uagaagcauggguuucca

SEQ ID NO: 228158 - RNA, 25 nt, Human
uaugaaguaaauauauguauaaaca

SEQ ID NO: 228159 - RNA, 20 nt, Human
uauuuugacaggaucccugg

SEQ ID NO: 228160 - RNA, 23 nt, Human
ugauaaaaacauuuauagaagca

SEQ ID NO: 228161 - RNA, 24 nt, Human
uggaaauaaccaaaugugcauuaa

SEQ ID NO: 228162 - RNA, 24 nt, Human
uucuuuauauuuauuuugugauaa

SEQ ID NO: 228163 - RNA, 18 nt, Human
acuaugcuccagccuggg

SEQ ID NO: 228164 - RNA, 23 nt, Human
acuaugcuccagccugggcagug

SEQ ID NO: 228165 - RNA, 19 nt, Human
acucuccaccuucucugcc

SEQ ID NO: 228166 - RNA, 24 nt, Human
acuguaucauuguuaguaauguug

SEQ ID NO: 228167 - RNA, 24 nt, Human
acuuuuucagaaagaacagcguug

SEQ ID NO: 228168 - RNA, 21 nt, Human
agaagcaguagaaucacaagc

SEQ ID NO: 228169 - RNA, 23 nt, Human
agaauuagcaagaauguaaauaa

SEQ ID NO: 228170 - RNA, 19 nt, Human
agcaaaaauagagaaugaa

SEQ ID NO: 228171 - RNA, 23 nt, Human
agccugggcaacauagcaagacc

SEQ ID NO: 228172 - RNA, 24 nt, Human
agccugggcaacauagcaagaccu

SEQ ID NO: 228173 - RNA, 22 nt, Human
agccugggcagugugaguuaaa

SEQ ID NO: 228174 - RNA, 23 nt, Human
aggaguucaagaccagccugggc

SEQ ID NO: 228175 - RNA, 24 nt, Human
aggcugagucaggaggaucacuug

SEQ ID NO: 228176 - RNA, 24 nt, Human
agucaggaggaucacuugagcuug

SEQ ID NO: 228177 - RNA, 20 nt, Human
aucuugccacuaugcuccag

SEQ ID NO: 228178 - RNA, 24 nt, Human
aucuugccacuaugcuccagccug

SEQ ID NO: 228179 - RNA, 23 nt, Human
augaucuugccacuaugcuccag

SEQ ID NO: 228180 - RNA, 21 nt, Human
caacauagcaagaccuugucu

SEQ ID NO: 228181 - RNA, 26 nt, Human
caacauagcaagaccuugucuugaca

SEQ ID NO: 228182 - RNA, 22 nt, Human
caccuucucugccccaagaagg

SEQ ID NO: 228183 - RNA, 19 nt, Human
caccuucucugccccaagg

SEQ ID NO: 228184 - RNA, 20 nt, Human
cacuaugcuccagccugggc

SEQ ID NO: 228185 - RNA, 24 nt, Human
cacuaugcuccagccugggcagug

SEQ ID NO: 228186 - RNA, 18 nt, Human
cauagcaagaccuugucu

SEQ ID NO: 228187 - RNA, 21 nt, Human
cauagcaagaccuugucuuga

SEQ ID NO: 228188 - RNA, 21 nt, Human
cauuuuauagacuccagaagu

SEQ ID NO: 228189 - RNA, 21 nt, Human
ccacuaugcuccagccugggc

SEQ ID NO: 228190 - RNA, 22 nt, Human
ccacuaugcuccagccugggca

SEQ ID NO: 228191 - RNA, 22 nt, Human
ccacuaugcuccagccugggca

SEQ ID NO: 228192 - RNA, 22 nt, Human
ccacuaugcuccagccugggca

SEQ ID NO: 228193 - RNA, 23 nt, Human
ccacuaugcuccagccugggcag

SEQ ID NO: 228194 - RNA, 22 nt, Human
ccugcaguccuagcuacuuggg

SEQ ID NO: 228195 - RNA, 21 nt, Human
ccugggcaacauagcaagacc

SEQ ID NO: 228196 - RNA, 23 nt, Human
cgauguguacuuuuucagaaaga

SEQ ID NO: 228197 - RNA, 22 nt, Human
cgauguguacuuuuucaggggc

SEQ ID NO: 228198 - RNA, 18 nt, Human
cuucucugccccaagaaa

SEQ ID NO: 228199 - RNA, 24 nt, Human
cuugaaucaucuauuggugagaca

SEQ ID NO: 228200 - RNA, 22 nt, Human
gccacuaugcuccagccugggc

SEQ ID NO: 228201 - RNA, 24 nt, Human
gccacuaugcuccagccugggcag

SEQ ID NO: 228202 - RNA, 20 nt, Human
guugaagcugagcuggagau

SEQ ID NO: 228203 - RNA, 26 nt, Human
uaaaugauguucuugaaucccugaag

SEQ ID NO: 228204 - RNA, 23 nt, Human
uaagaagcaguagaaucacaagc

SEQ ID NO: 228205 - RNA, 21 nt, Human
uagcaaaaauagagaaugaaa

SEQ ID NO: 228206 - RNA, 20 nt, Human
uagcaagaccuugucuugac

SEQ ID NO: 228207 - RNA, 24 nt, Human
ucacauacaugacaauuguauaug

SEQ ID NO: 228208 - RNA, 19 nt, Human
ucagaaagaacagcguuga

SEQ ID NO: 228209 - RNA, 21 nt, Human
uccaccuucucugccccaaga

SEQ ID NO: 228210 - RNA, 22 nt, Human
ugcaaugagcuaugaucuugcc

SEQ ID NO: 228211 - RNA, 24 nt, Human
ugccugcaguccuagcuacuuggg

SEQ ID NO: 228212 - RNA, 19 nt, Human
ugcuccagccugggcagug

SEQ ID NO: 228213 - RNA, 19 nt, Human
ugggaggcugagucaggag

SEQ ID NO: 228214 - RNA, 24 nt, Human
ugggaggcugagucaggaggauca

SEQ ID NO: 228215 - RNA, 23 nt, Human
uguguaauaaaacuacauugaau

SEQ ID NO: 228216 - RNA, 19 nt, Human
uuaguaauguugggucuuu

SEQ ID NO: 228217 - RNA, 18 nt, Human
uugaagcugagcuggaga

SEQ ID NO: 228218 - RNA, 22 nt, Human
uugaggccaggaguucaagacc

SEQ ID NO: 228219 - RNA, 25 nt, Human
uugggaggcugagucaggaggauca

SEQ ID NO: 228220 - RNA, 23 nt, Human
uuuagcaaaaauagagaaugaaa

SEQ ID NO: 228221 - RNA, 23 nt, Human
aaaacgcaagauacagaaaaaca

SEQ ID NO: 228222 - RNA, 24 nt, Human
aagccuggaaacaaaguuaauucu

SEQ ID NO: 228223 - RNA, 19 nt, Human
aagcgacgaauaaaaaucc

SEQ ID NO: 228224 - RNA, 24 nt, Human
aagggagaagagauuuuggcauuu

SEQ ID NO: 228225 - RNA, 23 nt, Human
aauguguguguauacagguaugu

SEQ ID NO: 228226 - RNA, 20 nt, Human
aauuuuguuuaggaccuuau

SEQ ID NO: 228227 - RNA, 20 nt, Human
agaaaaacaggcauaauuug

SEQ ID NO: 228228 - RNA, 21 nt, Human
agaguagcaaaagccuggagg

SEQ ID NO: 228229 - RNA, 21 nt, Human
agugaagaguagcaaaagccu

SEQ ID NO: 228230 - RNA, 22 nt, Human
agugaagaguagcaaaagccug

SEQ ID NO: 228231 - RNA, 21 nt, Human
cgaugauggagggagaaggga

SEQ ID NO: 228232 - RNA, 18 nt, Human
cugagugaagaguagcaa

SEQ ID NO: 228233 - RNA, 19 nt, Human
gacaaaaggguaaaaaaug

SEQ ID NO: 228234 - RNA, 26 nt, Human
gaugauggagggagaagggagaagag

SEQ ID NO: 228235 - RNA, 25 nt, Human
uaaaauaagcgacgaauaaaaaucc

SEQ ID NO: 228236 - RNA, 19 nt, Human
uaagcgacgaauaaaaauc

SEQ ID NO: 228237 - RNA, 19 nt, Human
uagcaaaagccuggaaaca

SEQ ID NO: 228238 - RNA, 25 nt, Human
ugagugaauguguguguauacaggu

SEQ ID NO: 228239 - RNA, 18 nt, Human
ugugagugaaugugugug

SEQ ID NO: 228240 - RNA, 19 nt, Human
ugugagugaaugugugugu

SEQ ID NO: 228241 - RNA, 22 nt, Human
ugugagugaauguguguguaua

SEQ ID NO: 228242 - RNA, 22 nt, Human
uucaggauguuuauuguagcug

SEQ ID NO: 228243 - RNA, 23 nt, Human
uuugaaguguacauuuuaguuug

SEQ ID NO: 228244 - RNA, 24 nt, Human
aaagagaaaaagauuauaauccag

SEQ ID NO: 228245 - RNA, 26 nt, Human
aaauagcuaggacuacagguacacac

SEQ ID NO: 228246 - RNA, 20 nt, Human
aauagucacugaacguaagc

SEQ ID NO: 228247 - RNA, 19 nt, Human
aaucauagcucacugcagc

SEQ ID NO: 228248 - RNA, 25 nt, Human
accucagcuucccaaauagcuagga

SEQ ID NO: 228249 - RNA, 23 nt, Human
acuaugaaagauaaagagaaaaa

SEQ ID NO: 228250 - RNA, 19 nt, Human
acugcagccucaaacuccu

SEQ ID NO: 228251 - RNA, 25 nt, Human
agaaaaaaaacaaaaucaguuaaga

SEQ ID NO: 228252 - RNA, 26 nt, Human
agaaaaaaaacaaaaucaguuaagaa

SEQ ID NO: 228253 - RNA, 22 nt, Human
agagauggagucuugcucuauc

SEQ ID NO: 228254 - RNA, 20 nt, Human
aggaucaucaacacuacaga

SEQ ID NO: 228255 - RNA, 21 nt, Human
agguacacaccagcaugccag

SEQ ID NO: 228256 - RNA, 23 nt, Human
aguacaguggcacaaucauagcu

SEQ ID NO: 228257 - RNA, 18 nt, Human
auagcucacugcagccuc

SEQ ID NO: 228258 - RNA, 18 nt, Human
auugguucauucaaccac

SEQ ID NO: 228259 - RNA, 25 nt, Human
caaacuccugggcucaagcgacccu

SEQ ID NO: 228260 - RNA, 24 nt, Human
caaacucuacugaggagaaauaau

SEQ ID NO: 228261 - RNA, 27 nt, Human
caagcgacccucccaccucagcuuccc

SEQ ID NO: 228262 - RNA, 28 nt, Human
caagcgacccucccaccucagcuuccca

SEQ ID NO: 228263 - RNA, 20 nt, Human
caccucagcuucccaaauag

SEQ ID NO: 228264 - RNA, 28 nt, Human
cagaaaaaaaacaaaaucaguuaagacc

SEQ ID NO: 228265 - RNA, 24 nt, Human
cagccucaaacuccugggcucaag

SEQ ID NO: 228266 - RNA, 27 nt, Human
cauucaaccacauauaugcauacucag

SEQ ID NO: 228267 - RNA, 22 nt, Human
ccacaauuuauauucucacauu

SEQ ID NO: 228268 - RNA, 20 nt, Human
cccaccucagcuucccaaau

SEQ ID NO: 228269 - RNA, 22 nt, Human
cccaggcuggaguacaguggca

SEQ ID NO: 228270 - RNA, 24 nt, Human
ccucccaccucagcuucccaaaua

SEQ ID NO: 228271 - RNA, 20 nt, Human
ccugggcucaagcgacccuc

SEQ ID NO: 228272 - RNA, 24 nt, Human
cucaagcgacccucccaccucagc

SEQ ID NO: 228273 - RNA, 21 nt, Human
cucacugcagccucaaacucc

SEQ ID NO: 228274 - RNA, 24 nt, Human
cucacugcagccucaaacuccugg

SEQ ID NO: 228275 - RNA, 23 nt, Human
cuccugggcucaagcgacccucc

SEQ ID NO: 228276 - RNA, 25 nt, Human
cuccugggcucaagcgacccuccca

SEQ ID NO: 228277 - RNA, 23 nt, Human
cugcagccucaaacuccugggcu

SEQ ID NO: 228278 - RNA, 23 nt, Human
gaaaagauacaaucacacauugg

SEQ ID NO: 228279 - RNA, 23 nt, Human
gcgacccucccaccucagcuucc

SEQ ID NO: 228280 - RNA, 19 nt, Human
gcuggaguacaguggcaca

SEQ ID NO: 228281 - RNA, 19 nt, Human
ggacuacagguacacacca

SEQ ID NO: 228282 - RNA, 24 nt, Human
gucuugcucuaucucccaggcugg

SEQ ID NO: 228283 - RNA, 28 nt, Human
uaaaaaaacuaugaaagauaaagagaaa

SEQ ID NO: 228284 - RNA, 18 nt, Human
uacaaucacacauugguu

SEQ ID NO: 228285 - RNA, 24 nt, Human
uagcucacugcagccucaaacucc

SEQ ID NO: 228286 - RNA, 21 nt, Human
uaggacuacagguacacacca

SEQ ID NO: 228287 - RNA, 19 nt, Human
uauagugguagauaagaua

SEQ ID NO: 228288 - RNA, 25 nt, Human
uaugcaggucaaacagucacauaau

SEQ ID NO: 228289 - RNA, 24 nt, Human
ucacugcagccucaaacuccuggg

SEQ ID NO: 228290 - RNA, 20 nt, Human
uccaaacucuacugaggaga

SEQ ID NO: 228291 - RNA, 23 nt, Human
ucccaggcuggaguacaguggca

SEQ ID NO: 228292 - RNA, 21 nt, Human
uccucuaugaaaaugccuuau

SEQ ID NO: 228293 - RNA, 21 nt, Human
uccugggcucaagcgacccuc

SEQ ID NO: 228294 - RNA, 19 nt, Human
ucuaucucccaggcuggag

SEQ ID NO: 228295 - RNA, 23 nt, Human
ucuugcucuaucucccaggcugg

SEQ ID NO: 228296 - RNA, 24 nt, Human
ucuugcucuaucucccaggcugga

SEQ ID NO: 228297 - RNA, 19 nt, Human
uggaguacaguggcacaau

SEQ ID NO: 228298 - RNA, 20 nt, Human
uggcacaaucauagcucacu

SEQ ID NO: 228299 - RNA, 23 nt, Human
uggcacaaucauagcucacugca

SEQ ID NO: 228300 - RNA, 21 nt, Human
uuaaaaaaacuaugaaagaua

SEQ ID NO: 228301 - RNA, 24 nt, Human
uucccaaauagcuaggacuacagg

SEQ ID NO: 228302 - RNA, 25 nt, Human
uuuuuaauucauccauuuauuuauu

SEQ ID NO: 228303 - RNA, 25 nt, Human
uuuuuuuuuuuuagagauggagucu

SEQ ID NO: 228304 - RNA, 23 nt, Human
aaaaaacaacuuaaaucagcuca

SEQ ID NO: 228305 - RNA, 22 nt, Human
aaaaagaaauccucuuguugga

SEQ ID NO: 228306 - RNA, 25 nt, Human
aaaaauucuucaccuaauuaaagag

SEQ ID NO: 228307 - RNA, 22 nt, Human
aaaacaaauucuuuuaauucaa

SEQ ID NO: 228308 - RNA, 24 nt, Human
aaaacccuuuccuguccuucacuu

SEQ ID NO: 228309 - RNA, 21 nt, Human
aaaauaccaugguagccccag

SEQ ID NO: 228310 - RNA, 18 nt, Human
aaaaugcaccccccaacc

SEQ ID NO: 228311 - RNA, 18 nt, Human
aaacagauagaugauaau

SEQ ID NO: 228312 - RNA, 20 nt, Human
aaacucugccaggaagagcc

SEQ ID NO: 228313 - RNA, 21 nt, Human
aaagaggaguuucagagacaa

SEQ ID NO: 228314 - RNA, 21 nt, Human
aacagaaccuugugguccagc

SEQ ID NO: 228315 - RNA, 22 nt, Human
aaccccacauccacaccugcua

SEQ ID NO: 228316 - RNA, 19 nt, Human
aagagguugaacaaaaaca

SEQ ID NO: 228317 - RNA, 22 nt, Human
aaguugucuccccuuguuuccu

SEQ ID NO: 228318 - RNA, 22 nt, Human
aaucaaauauggcaauggaaac

SEQ ID NO: 228319 - RNA, 20 nt, Human
acaaaaaacaacuuaaauca

SEQ ID NO: 228320 - RNA, 24 nt, Human
acaugaggccaggaguuugagacu

SEQ ID NO: 228321 - RNA, 20 nt, Human
accaccagaggaaucuacaa

SEQ ID NO: 228322 - RNA, 21 nt, Human
acgacagcgacaaaaccaaug

SEQ ID NO: 228323 - RNA, 24 nt, Human
acuccagccuggucaacagaguga

SEQ ID NO: 228324 - RNA, 24 nt, Human
acugcacuccagccuggucaacag

SEQ ID NO: 228325 - RNA, 24 nt, Human
acugcacuccagccuggucaacag

SEQ ID NO: 228326 - RNA, 20 nt, Human
acugucgcguacacaugugu

SEQ ID NO: 228327 - RNA, 21 nt, Human
acuuugggaggcugagguggg

SEQ ID NO: 228328 - RNA, 22 nt, Human
agaaagauggggacaggccaaa

SEQ ID NO: 228329 - RNA, 25 nt, Human
agaccaccaccagaggaaucuacaa

SEQ ID NO: 228330 - RNA, 20 nt, Human
agagguugcagugaacccag

SEQ ID NO: 228331 - RNA, 21 nt, Human
agaucccuuuugcagcuucug

SEQ ID NO: 228332 - RNA, 23 nt, Human
agccuggucaacagagugagacc

SEQ ID NO: 228333 - RNA, 24 nt, Human
agccuggucaacagagugagaccu

SEQ ID NO: 228334 - RNA, 19 nt, Human
aggcagagguugcagugaa

SEQ ID NO: 228335 - RNA, 24 nt, Human
aggcugaagugggaggauugcuug

SEQ ID NO: 228336 - RNA, 21 nt, Human
aggcugaggugggcagaucac

SEQ ID NO: 228337 - RNA, 22 nt, Human
aggugggcagaucacaugaggg

SEQ ID NO: 228338 - RNA, 20 nt, Human
agguguugagucaaugcugu

SEQ ID NO: 228339 - RNA, 19 nt, Human
aguggugaaucacugucag

SEQ ID NO: 228340 - RNA, 18 nt, Human
auaguauuuuuuucccca

SEQ ID NO: 228341 - RNA, 21 nt, Human
auaguauuuuuuuccccaacu

SEQ ID NO: 228342 - RNA, 24 nt, Human
aucucaccacugcacuccagccug

SEQ ID NO: 228343 - RNA, 21 nt, Human
auggcaacgaaagauggggcc

SEQ ID NO: 228344 - RNA, 20 nt, Human
auugcaauuaacauacagag

SEQ ID NO: 228345 - RNA, 19 nt, Human
auugcuugagcccaggagg

SEQ ID NO: 228346 - RNA, 19 nt, Human
auuguugcuucugcucgug

SEQ ID NO: 228347 - RNA, 19 nt, Human
caagacccggucucuacug

SEQ ID NO: 228348 - RNA, 20 nt, Human
caauguuuguugaugacauu

SEQ ID NO: 228349 - RNA, 21 nt, Human
cacaccugcuaacaaacaaaa

SEQ ID NO: 228350 - RNA, 20 nt, Human
caccccccaaccaguaauug

SEQ ID NO: 228351 - RNA, 18 nt, Human
caccuaguagaugcccac

SEQ ID NO: 228352 - RNA, 22 nt, Human
cacuccagccuggucaacagag

SEQ ID NO: 228353 - RNA, 24 nt, Human
cacuccagccuggucaacagagug

SEQ ID NO: 228354 - RNA, 18 nt, Human
cacugcacuccagccugg

SEQ ID NO: 228355 - RNA, 21 nt, Human
cacugcacuccagccugguca

SEQ ID NO: 228356 - RNA, 22 nt, Human
cacugcacuccagccuggucaa

SEQ ID NO: 228357 - RNA, 24 nt, Human
cacugcacuccagccuggucaaca

SEQ ID NO: 228358 - RNA, 24 nt, Human
cagaucacaugaggccaggaguuu

SEQ ID NO: 228359 - RNA, 23 nt, Human
cagcgguggcucacaacucuaau

SEQ ID NO: 228360 - RNA, 23 nt, Human
caggaagagccuuaucuguuuuu

SEQ ID NO: 228361 - RNA, 21 nt, Human
caguaauugcaauuaacauac

SEQ ID NO: 228362 - RNA, 22 nt, Human
caugaggccaggaguuugagac

SEQ ID NO: 228363 - RNA, 20 nt, Human
ccacauauauauuacauaua

SEQ ID NO: 228364 - RNA, 26 nt, Human
ccacauccacaccugcuaacaaacaa

SEQ ID NO: 228365 - RNA, 19 nt, Human
ccacugcacuccagccugg

SEQ ID NO: 228366 - RNA, 19 nt, Human
ccacugcacuccagccugg

SEQ ID NO: 228367 - RNA, 20 nt, Human
ccacugcacuccagccuggu

SEQ ID NO: 228368 - RNA, 23 nt, Human
ccacugcacuccagccuggucaa

SEQ ID NO: 228369 - RNA, 20 nt, Human
ccagcagcuggaagugaaau

SEQ ID NO: 228370 - RNA, 21 nt, Human
cccacauccacaccugcuaac

SEQ ID NO: 228371 - RNA, 21 nt, Human
ccccuuguuuccuuuccauuc

SEQ ID NO: 228372 - RNA, 18 nt, Human
cccuuguuuccuuuccau

SEQ ID NO: 228373 - RNA, 25 nt, Human
cgaaaauaccuuacuguaaaaauaa

SEQ ID NO: 228374 - RNA, 23 nt, Human
cgacuacuauaacaagcaacccc

SEQ ID NO: 228375 - RNA, 22 nt, Human
cuacuauaacaagcaaccccaa

SEQ ID NO: 228376 - RNA, 21 nt, Human
cucugccaggaagagccuuau

SEQ ID NO: 228377 - RNA, 24 nt, Human
cuguacuuugggaggcugaggugg

SEQ ID NO: 228378 - RNA, 18 nt, Human
cuguccuaugcagucauu

SEQ ID NO: 228379 - RNA, 20 nt, Human
cuugucagccuggagaccac

SEQ ID NO: 228380 - RNA, 19 nt, Human
cuuguuuccuuuccauucu

SEQ ID NO: 228381 - RNA, 23 nt, Human
cuuugggaggcugaggugggcag

SEQ ID NO: 228382 - RNA, 24 nt, Human
cuuuguaggaaugaagaauggcaa

SEQ ID NO: 228383 - RNA, 25 nt, Human
gaaccaaagaaaacauuucacuaaa

SEQ ID NO: 228384 - RNA, 21 nt, Human
gaagcggaaaggaggccaaga

SEQ ID NO: 228385 - RNA, 24 nt, Human
gaagugggaggauugcuugagccc

SEQ ID NO: 228386 - RNA, 23 nt, Human
gacaaagaggaguuucagagaca

SEQ ID NO: 228387 - RNA, 22 nt, Human
gagcaugaccacauaaccccac

SEQ ID NO: 228388 - RNA, 19 nt, Human
gaggagaagcggaaaggag

SEQ ID NO: 228389 - RNA, 19 nt, Human
gaggccugcuaaagaccua

SEQ ID NO: 228390 - RNA, 24 nt, Human
gaucacaugaggccaggaguuuga

SEQ ID NO: 228391 - RNA, 24 nt, Human
gcacuccagccuggucaacagagu

SEQ ID NO: 228392 - RNA, 18 nt, Human
gcagagaggagaagcgga

SEQ ID NO: 228393 - RNA, 19 nt, Human
gcagcauggcaagacccgg

SEQ ID NO: 228394 - RNA, 24 nt, Human
gcccaggaggcagagguugcagug

SEQ ID NO: 228395 - RNA, 23 nt, Human
gccugggcagcauggcaagaccc

SEQ ID NO: 228396 - RNA, 22 nt, Human
gcguacacaugugugaaguagc

SEQ ID NO: 228397 - RNA, 22 nt, Human
ggagaagcggaaaggaggccaa

SEQ ID NO: 228398 - RNA, 25 nt, Human
ggcagaucacaugaggccaggaguu

SEQ ID NO: 228399 - RNA, 19 nt, Human
gugaacccagaucucacca

SEQ ID NO: 228400 - RNA, 20 nt, Human
gugggaaaauaaaaugaguu

SEQ ID NO: 228401 - RNA, 18 nt, Human
guugcuucugcucgugcc

SEQ ID NO: 228402 - RNA, 18 nt, Human
guuuccuuuccauucugg

SEQ ID NO: 228403 - RNA, 19 nt, Human
uaaaaugcaccccccaacc

SEQ ID NO: 228404 - RNA, 18 nt, Human
uaaagaaaaggcaugauu

SEQ ID NO: 228405 - RNA, 24 nt, Human
uaaauuacucuauuuuccaaaaca

SEQ ID NO: 228406 - RNA, 27 nt, Human
uaaccccacauccacaccugcuaacaa

SEQ ID NO: 228407 - RNA, 20 nt, Human
uaaucauguuugaaggauuu

SEQ ID NO: 228408 - RNA, 20 nt, Human
uaauccagauuagugcccaa

SEQ ID NO: 228409 - RNA, 21 nt, Human
uaauuuaugaauaaaacccuu

SEQ ID NO: 228410 - RNA, 18 nt, Human
uaccugcccucauagaaa

SEQ ID NO: 228411 - RNA, 19 nt, Human
uaccugcccucauagaaag

SEQ ID NO: 228412 - RNA, 21 nt, Human
uagaaugacucaaccugagug

SEQ ID NO: 228413 - RNA, 24 nt, Human
uagagauagauagauagauagaua

SEQ ID NO: 228414 - RNA, 22 nt, Human
uagauagauagauagauagaua

SEQ ID NO: 228415 - RNA, 22 nt, Human
uagauagauagauagauagaua

SEQ ID NO: 228416 - RNA, 22 nt, Human
uagauagauagauagauagaua

SEQ ID NO: 228417 - RNA, 22 nt, Human
uagauagauagauagauagaua

SEQ ID NO: 228418 - RNA, 22 nt, Human
uagauagauagauagauagaua

SEQ ID NO: 228419 - RNA, 22 nt, Human
uagauagauagauagauagaua

SEQ ID NO: 228420 - RNA, 22 nt, Human
uagauagauagauagauagaua

SEQ ID NO: 228421 - RNA, 22 nt, Human
uagauagauagauagauagaug

SEQ ID NO: 228422 - RNA, 25 nt, Human
uagauagauagauagaugauagaua

SEQ ID NO: 228423 - RNA, 25 nt, Human
uagauagauagauagaugauagaua

SEQ ID NO: 228424 - RNA, 18 nt, Human
uaguauuuuuuuccccaa

SEQ ID NO: 228425 - RNA, 21 nt, Human
uauaacaagcaaccccaacau

SEQ ID NO: 228426 - RNA, 25 nt, Human
uauaacaagcaaccccaacauuuca

SEQ ID NO: 228427 - RNA, 24 nt, Human
uauaucugaucaaguuaucaagga

SEQ ID NO: 228428 - RNA, 23 nt, Human
uaucugaucaaguuaucaaggag

SEQ ID NO: 228429 - RNA, 18 nt, Human
uauuugaaggugggaaaa

SEQ ID NO: 228430 - RNA, 20 nt, Human
uauuugaaggugggaaaaua

SEQ ID NO: 228431 - RNA, 18 nt, Human
ucaaugcuguugcgaguc

SEQ ID NO: 228432 - RNA, 18 nt, Human
ucagugaauuaauacaga

SEQ ID NO: 228433 - RNA, 19 nt, Human
ucaguugacgacagcgaca

SEQ ID NO: 228434 - RNA, 21 nt, Human
uccaaaguugauguaauccaa

SEQ ID NO: 228435 - RNA, 22 nt, Human
uccacaccugcuaacaaacaaa

SEQ ID NO: 228436 - RNA, 21 nt, Human
uccacuuuauuuuuucucugc

SEQ ID NO: 228437 - RNA, 23 nt, Human
uccagccuggucaacagagugag

SEQ ID NO: 228438 - RNA, 24 nt, Human
uccagccuggucaacagagugaga

SEQ ID NO: 228439 - RNA, 23 nt, Human
uccauauauucaacauuuauuuc

SEQ ID NO: 228440 - RNA, 23 nt, Human
uccccuuguuuccuuuccauucu

SEQ ID NO: 228441 - RNA, 20 nt, Human
ucccugaggcaucuagggcc

SEQ ID NO: 228442 - RNA, 23 nt, Human
uccuuauuuccauuucugguuuu

SEQ ID NO: 228443 - RNA, 24 nt, Human
ucucuaauuauagcacaguggcug

SEQ ID NO: 228444 - RNA, 20 nt, Human
ucugagugacucagcagccu

SEQ ID NO: 228445 - RNA, 25 nt, Human
ucuguccuaugcagucauuuaggaa

SEQ ID NO: 228446 - RNA, 25 nt, Human
ugaaaaagaaauccucuuguuggaa

SEQ ID NO: 228447 - RNA, 20 nt, Human
ugaaaugcagaucagaccca

SEQ ID NO: 228448 - RNA, 22 nt, Human
ugaagugggaggauugcuugag

SEQ ID NO: 228449 - RNA, 24 nt, Human
ugaagugggaggauugcuugagcc

SEQ ID NO: 228450 - RNA, 23 nt, Human
ugacaaagaggaguuucagagac

SEQ ID NO: 228451 - RNA, 19 nt, Human
ugagcaugaccacauaacc

SEQ ID NO: 228452 - RNA, 19 nt, Human
ugaggugggcagaucacau

SEQ ID NO: 228453 - RNA, 26 nt, Human
ugaggugggcagaucacaugaggcca

SEQ ID NO: 228454 - RNA, 21 nt, Human
ugauaauacuuauauuugaag

SEQ ID NO: 228455 - RNA, 20 nt, Human
ugccccuacagacucaaagc

SEQ ID NO: 228456 - RNA, 19 nt, Human
uggaccgacuacuauaaca

SEQ ID NO: 228457 - RNA, 22 nt, Human
uggacucuauucagugucaugu

SEQ ID NO: 228458 - RNA, 22 nt, Human
ugggaggcugaagugggaggau

SEQ ID NO: 228459 - RNA, 24 nt, Human
ugggaggcugaagugggaggauug

SEQ ID NO: 228460 - RNA, 20 nt, Human
ugggaggcugaggugggcag

SEQ ID NO: 228461 - RNA, 24 nt, Human
ugggaggcugaggugggcagauca

SEQ ID NO: 228462 - RNA, 21 nt, Human
ugggcagaucacaugaggcca

SEQ ID NO: 228463 - RNA, 24 nt, Human
ugggcagaucacaugaggccagga

SEQ ID NO: 228464 - RNA, 21 nt, Human
ugguagccccagcuauuuggg

SEQ ID NO: 228465 - RNA, 23 nt, Human
uguaauguagggaagcugcaugu

SEQ ID NO: 228466 - RNA, 20 nt, Human
uguggcacacgaugggcauc

SEQ ID NO: 228467 - RNA, 24 nt, Human
ugugugaaguagcuagaacauacc

SEQ ID NO: 228468 - RNA, 18 nt, Human
uguuggaaacaaaagacg

SEQ ID NO: 228469 - RNA, 21 nt, Human
uuaaucauguuugaaggauuu

SEQ ID NO: 228470 - RNA, 22 nt, Human
uugacgacagcgacaaaaccaa

SEQ ID NO: 228471 - RNA, 24 nt, Human
uugcuugagcccaggaggcagagg

SEQ ID NO: 228472 - RNA, 20 nt, Human
uugggaggcugaagugggag

SEQ ID NO: 228473 - RNA, 25 nt, Human
uugggaggcugaggugggcagauca

SEQ ID NO: 228474 - RNA, 22 nt, Human
uuuaaaaugcaccccccaacca

SEQ ID NO: 228475 - RNA, 18 nt, Human
uuucccuacaaacugaac

SEQ ID NO: 228476 - RNA, 22 nt, Human
uuugagauuugcucauuccccu

SEQ ID NO: 228477 - RNA, 24 nt, Human
uuugcucauuccccuguauuuccc

SEQ ID NO: 228478 - RNA, 22 nt, Human
uuuucuuuguuuuguuguuucu

SEQ ID NO: 228479 - RNA, 24 nt, Human
uuuuucuuucccuacaaacugaac

SEQ ID NO: 228480 - RNA, 18 nt, Human
aucccaucuuucuucuug

SEQ ID NO: 228481 - RNA, 19 nt, Human
cccaucuuucuucuugucc

SEQ ID NO: 228482 - RNA, 24 nt, Human
ccucucaagguugcuggcagaggu

SEQ ID NO: 228483 - RNA, 20 nt, Human
gcugagggaugguuucaacc

SEQ ID NO: 228484 - RNA, 18 nt, Human
ggagcugagggaugguuu

SEQ ID NO: 228485 - RNA, 18 nt, Human
uaacaaucucccucuagg

SEQ ID NO: 228486 - RNA, 20 nt, Human
ucccaucuuucuucuugucc

SEQ ID NO: 228487 - RNA, 22 nt, Human
ucucaagguugcuggcagaggu

SEQ ID NO: 228488 - RNA, 19 nt, Human
ugccuggagugaagauucu

SEQ ID NO: 228489 - RNA, 21 nt, Human
ugcuggcagaggugguugggg

SEQ ID NO: 228490 - RNA, 25 nt, Human
uggcagaggugguuggggcuauggu

SEQ ID NO: 228491 - RNA, 22 nt, Human
ugguuggggcuaugugccugga

SEQ ID NO: 228492 - RNA, 18 nt, Human
uguccuuccucucaaggu

SEQ ID NO: 228493 - RNA, 21 nt, Human
accacgccgcaccagggcacc

SEQ ID NO: 228494 - RNA, 26 nt, Human
accagcuuaggcccagccccagcccc

SEQ ID NO: 228495 - RNA, 24 nt, Human
aggggccucccugccgcccuggcc

SEQ ID NO: 228496 - RNA, 19 nt, Human
cacagccccgcggcuccuc

SEQ ID NO: 228497 - RNA, 20 nt, Human
caccagggcaccagcuuagg

SEQ ID NO: 228498 - RNA, 20 nt, Human
cagccccagccccaagguca

SEQ ID NO: 228499 - RNA, 18 nt, Human
cagcuccgggccacacuc

SEQ ID NO: 228500 - RNA, 19 nt, Human
caggagaaaugagugagcg

SEQ ID NO: 228501 - RNA, 19 nt, Human
caggggccucccugccgcc

SEQ ID NO: 228502 - RNA, 24 nt, Human
ccagcuuaggcccagccccagccc

SEQ ID NO: 228503 - RNA, 22 nt, Human
ccaggggccucccugccgcccu

SEQ ID NO: 228504 - RNA, 19 nt, Human
cccaaggucacgccagccu

SEQ ID NO: 228505 - RNA, 18 nt, Human
cccagccagucccgcucg

SEQ ID NO: 228506 - RNA, 30 nt, Human
cccagccccagccccaaggucacgccagcc

SEQ ID NO: 228507 - RNA, 21 nt, Human
cccgcagcauccucggccacc

SEQ ID NO: 228508 - RNA, 24 nt, Human
cccgcagcauccucggccacccac

SEQ ID NO: 228509 - RNA, 18 nt, Human
cccggccaggggccuccc

SEQ ID NO: 228510 - RNA, 24 nt, Human
ccgccccgcagcauccucggccac

SEQ ID NO: 228511 - RNA, 20 nt, Human
ccgccgggcgcgcgcgcgga

SEQ ID NO: 228512 - RNA, 18 nt, Human
ccgcgcucucucgcgcug

SEQ ID NO: 228513 - RNA, 24 nt, Human
ccugccgcccuggcugucccgggc

SEQ ID NO: 228514 - RNA, 19 nt, Human
cgccgccgggcgcgcgcgc

SEQ ID NO: 228515 - RNA, 23 nt, Human
cgcgcugucagcaccuggagcgc

SEQ ID NO: 228516 - RNA, 21 nt, Human
cggccacccacgcgcuguccc

SEQ ID NO: 228517 - RNA, 22 nt, Human
cgugggcccagcucaugcccca

SEQ ID NO: 228518 - RNA, 22 nt, Human
cucccugccgcccuggcugucc

SEQ ID NO: 228519 - RNA, 20 nt, Human
cugugcgccgagcccgccuc

SEQ ID NO: 228520 - RNA, 27 nt, Human
cuuaggcccagccccagccccaagguc

SEQ ID NO: 228521 - RNA, 23 nt, Human
gagcacagccccgcggcuccucg

SEQ ID NO: 228522 - RNA, 26 nt, Human
gagcacagccccgcggcuccucgcac

SEQ ID NO: 228523 - RNA, 19 nt, Human
gagggccgcgcucucucgc

SEQ ID NO: 228524 - RNA, 22 nt, Human
gcccagccccagccccaagguc

SEQ ID NO: 228525 - RNA, 19 nt, Human
gccgggcgcgcgcgcggag

SEQ ID NO: 228526 - RNA, 19 nt, Human
gcggggccaggucgggguc

SEQ ID NO: 228527 - RNA, 18 nt, Human
ggcgccggagcuaccgcc

SEQ ID NO: 228528 - RNA, 21 nt, Human
ggcuccucgcaccagcagccc

SEQ ID NO: 228529 - RNA, 19 nt, Human
ucccauccuggagcggggc

SEQ ID NO: 228530 - RNA, 20 nt, Human
ucccgggccagcuccgggcc

SEQ ID NO: 228531 - RNA, 23 nt, Human
ucgccuugcuccugagggccgcg

SEQ ID NO: 228532 - RNA, 23 nt, Human
uggagcggggccaggucgggguc

SEQ ID NO: 228533 - RNA, 19 nt, Human
ugggagagaccacgccgca

SEQ ID NO: 228534 - RNA, 24 nt, Human
uugcuccugagggccgcgcucucu

SEQ ID NO: 228535 - RNA, 19 nt, Human
aaacaagcaacaacaaaaa

SEQ ID NO: 228536 - RNA, 24 nt, Human
aaagugcugggauuacaggcauga

SEQ ID NO: 228537 - RNA, 24 nt, Human
aagcaauccacccgccucagccuc

SEQ ID NO: 228538 - RNA, 23 nt, Human
aagcugaaacaucucaacuucca

SEQ ID NO: 228539 - RNA, 26 nt, Human
aagugauucucgugccucagccuccc

SEQ ID NO: 228540 - RNA, 19 nt, Human
aagugcugggauuacaggc

SEQ ID NO: 228541 - RNA, 21 nt, Human
aagugcugggauuacaggcau

SEQ ID NO: 228542 - RNA, 26 nt, Human
aagugcugggauuacaggcaugagcc

SEQ ID NO: 228543 - RNA, 20 nt, Human
accacauuuauuaaccaugg

SEQ ID NO: 228544 - RNA, 25 nt, Human
acccgccucagccucccaaagugcu

SEQ ID NO: 228545 - RNA, 20 nt, Human
acgagguuuugccacguugg

SEQ ID NO: 228546 - RNA, 24 nt, Human
acgagguuuugccacguuggccag

SEQ ID NO: 228547 - RNA, 19 nt, Human
acuaaacucaucgugagca

SEQ ID NO: 228548 - RNA, 21 nt, Human
acuuaauaauauacaagaaaa

SEQ ID NO: 228549 - RNA, 21 nt, Human
agcaauccacccgccucagcc

SEQ ID NO: 228550 - RNA, 19 nt, Human
aggacagauguuggugaua

SEQ ID NO: 228551 - RNA, 18 nt, Human
aggagaaagcgaaauagg

SEQ ID NO: 228552 - RNA, 21 nt, Human
aggagaaagcgaaauagggaa

SEQ ID NO: 228553 - RNA, 18 nt, Human
agggagaaagugagccga

SEQ ID NO: 228554 - RNA, 22 nt, Human
agguuuugccacguuggccagg

SEQ ID NO: 228555 - RNA, 23 nt, Human
aguagcugggauuacaggagugu

SEQ ID NO: 228556 - RNA, 18 nt, Human
agugcugggauuacaggc

SEQ ID NO: 228557 - RNA, 18 nt, Human
aucucaacuuccagaaau

SEQ ID NO: 228558 - RNA, 19 nt, Human
auuacaggagugugccacc

SEQ ID NO: 228559 - RNA, 22 nt, Human
auucuuuguacauauuccuucu

SEQ ID NO: 228560 - RNA, 24 nt, Human
caaagugcugggauuacaggcaug

SEQ ID NO: 228561 - RNA, 21 nt, Human
caaaucccaaaugaaacccaa

SEQ ID NO: 228562 - RNA, 22 nt, Human
caagucauagcaagaaaaaaaa

SEQ ID NO: 228563 - RNA, 22 nt, Human
caagugauucucgugccucagc

SEQ ID NO: 228564 - RNA, 22 nt, Human
cacauuuggggcaacaaguuuu

SEQ ID NO: 228565 - RNA, 24 nt, Human
caccacgcccggcuaauuuuuaac

SEQ ID NO: 228566 - RNA, 23 nt, Human
cacccgccucagccucccaaagu

SEQ ID NO: 228567 - RNA, 24 nt, Human
cacguuggccaggcuggucucaaa

SEQ ID NO: 228568 - RNA, 22 nt, Human
cacugcaaccccgcuuccuggg

SEQ ID NO: 228569 - RNA, 26 nt, Human
caguagcugggauuacaggagugugc

SEQ ID NO: 228570 - RNA, 23 nt, Human
ccaaagugcugggauuacaggca

SEQ ID NO: 228571 - RNA, 24 nt, Human
ccaaagugcugggauuacaggcau

SEQ ID NO: 228572 - RNA, 20 nt, Human
ccaccacgcccggcuaauuu

SEQ ID NO: 228573 - RNA, 26 nt, Human
ccacccgccucagccucccaaagugc

SEQ ID NO: 228574 - RNA, 19 nt, Human
ccacguuggccaggcuggu

SEQ ID NO: 228575 - RNA, 22 nt, Human
ccacguuggccaggcuggucuc

SEQ ID NO: 228576 - RNA, 24 nt, Human
ccauuagucagaugucuggguggu

SEQ ID NO: 228577 - RNA, 24 nt, Human
cccaaagugcugggauuacaggca

SEQ ID NO: 228578 - RNA, 19 nt, Human
cccaggcuggaguguagug

SEQ ID NO: 228579 - RNA, 23 nt, Human
ccccaguagcugggauuacagga

SEQ ID NO: 228580 - RNA, 24 nt, Human
ccgccucagccucccaaagugcug

SEQ ID NO: 228581 - RNA, 22 nt, Human
ccugggcucaagcaauccaccc

SEQ ID NO: 228582 - RNA, 20 nt, Human
ccuggguucaagugauucuc

SEQ ID NO: 228583 - RNA, 24 nt, Human
cgccucagccucccaaagugcugg

SEQ ID NO: 228584 - RNA, 20 nt, Human
cgcugcguggccuggaggac

SEQ ID NO: 228585 - RNA, 23 nt, Human
cucacugcaaccccgcuuccugg

SEQ ID NO: 228586 - RNA, 24 nt, Human
cucagccuccccaguagcugggau

SEQ ID NO: 228587 - RNA, 23 nt, Human
cucgugccucagccuccccagua

SEQ ID NO: 228588 - RNA, 20 nt, Human
cucuguugcccaggcuggag

SEQ ID NO: 228589 - RNA, 22 nt, Human
cugcaaccccgcuuccuggguu

SEQ ID NO: 228590 - RNA, 23 nt, Human
cugcaaccccgcuuccuggguuc

SEQ ID NO: 228591 - RNA, 21 nt, Human
cuuccuggguucaagugauuc

SEQ ID NO: 228592 - RNA, 19 nt, Human
cuuuguacauauuccuucu

SEQ ID NO: 228593 - RNA, 21 nt, Human
gaaacaucucaacuuccagaa

SEQ ID NO: 228594 - RNA, 18 nt, Human
gauuacaggagugugcca

SEQ ID NO: 228595 - RNA, 18 nt, Human
gauuacaggcaugagcca

SEQ ID NO: 228596 - RNA, 22 nt, Human
gauuacaggcaugagccaccgc

SEQ ID NO: 228597 - RNA, 22 nt, Human
gauuacaggcaugagccaccgc

SEQ ID NO: 228598 - RNA, 21 nt, Human
gauucucgugccucagccucc

SEQ ID NO: 228599 - RNA, 24 nt, Human
gcaauccacccgccucagccuccc

SEQ ID NO: 228600 - RNA, 24 nt, Human
gcccaggcuggaguguaguggugu

SEQ ID NO: 228601 - RNA, 22 nt, Human
gcgcugugaggggcggaggggc

SEQ ID NO: 228602 - RNA, 27 nt, Human
gcggaccugggcgcugugaggggcggc

SEQ ID NO: 228603 - RNA, 25 nt, Human
gcucuguugcccaggcuggagugua

SEQ ID NO: 228604 - RNA, 22 nt, Human
ggagaaagcgaaauagggaagu

SEQ ID NO: 228605 - RNA, 22 nt, Human
ggauuacaggcaugagccaccg

SEQ ID NO: 228606 - RNA, 24 nt, Human
gggcgcugugaggggcggaggggc

SEQ ID NO: 228607 - RNA, 24 nt, Human
gggcucaagcaauccacccgccuc

SEQ ID NO: 228608 - RNA, 24 nt, Human
gugauucucgugccucagccuccc

SEQ ID NO: 228609 - RNA, 23 nt, Human
gugccucagccuccccaguagcu

SEQ ID NO: 228610 - RNA, 25 nt, Human
uaaaaauaaaauugccaacccccaa

SEQ ID NO: 228611 - RNA, 24 nt, Human
uaacagagacgagguuuugccacg

SEQ ID NO: 228612 - RNA, 18 nt, Human
uaaccacuaaaaaggugu

SEQ ID NO: 228613 - RNA, 24 nt, Human
uacaaacaagcaacaacaaaaagu

SEQ ID NO: 228614 - RNA, 23 nt, Human
uacaggagugugccaccacgccc

SEQ ID NO: 228615 - RNA, 23 nt, Human
uacaggcaugagccaccgcgccc

SEQ ID NO: 228616 - RNA, 19 nt, Human
uacauguacacauuguauu

SEQ ID NO: 228617 - RNA, 22 nt, Human
uaccuuuggcucacugcaaccc

SEQ ID NO: 228618 - RNA, 18 nt, Human
uagcaagaaaaaaaacau

SEQ ID NO: 228619 - RNA, 18 nt, Human
uagucagaugucugggug

SEQ ID NO: 228620 - RNA, 24 nt, Human
uauacaaacaagcaacaacaaaaa

SEQ ID NO: 228621 - RNA, 20 nt, Human
ucaaaaauaccagaguccua

SEQ ID NO: 228622 - RNA, 20 nt, Human
ucacugcaaccccgcuuccu

SEQ ID NO: 228623 - RNA, 23 nt, Human
ucacugcaaccccgcuuccuggg

SEQ ID NO: 228624 - RNA, 24 nt, Human
ucacugcaaccccgcuuccugggu

SEQ ID NO: 228625 - RNA, 18 nt, Human
ucagccuccccaguagcu

SEQ ID NO: 228626 - RNA, 20 nt, Human
ucagccuccccaguagcugg

SEQ ID NO: 228627 - RNA, 23 nt, Human
ucaucauguaaacaaaagaauau

SEQ ID NO: 228628 - RNA, 21 nt, Human
uccacccgccucagccuccca

SEQ ID NO: 228629 - RNA, 23 nt, Human
uccagaaauaugguugccagauc

SEQ ID NO: 228630 - RNA, 24 nt, Human
ucccaaagugcugggauuacaggc

SEQ ID NO: 228631 - RNA, 18 nt, Human
uccugggcucaagcaauc

SEQ ID NO: 228632 - RNA, 19 nt, Human
uccugggcucaagcaaucc

SEQ ID NO: 228633 - RNA, 20 nt, Human
uccuggguucaagugauucu

SEQ ID NO: 228634 - RNA, 21 nt, Human
uccuggguucaagugauucuc

SEQ ID NO: 228635 - RNA, 24 nt, Human
uccuggguucaagugauucucgug

SEQ ID NO: 228636 - RNA, 20 nt, Human
ucuaaacuuuacacacuaaa

SEQ ID NO: 228637 - RNA, 21 nt, Human
ucuagggaggaugcaagaaaa

SEQ ID NO: 228638 - RNA, 23 nt, Human
ucucaaacuccugggcucaagca

SEQ ID NO: 228639 - RNA, 22 nt, Human
ucuugcucuguugcccaggcug

SEQ ID NO: 228640 - RNA, 23 nt, Human
ucuugcucuguugcccaggcugg

SEQ ID NO: 228641 - RNA, 24 nt, Human
ucuugcucuguugcccaggcugga

SEQ ID NO: 228642 - RNA, 20 nt, Human
ugaaaaauaaaaagggagaa

SEQ ID NO: 228643 - RNA, 19 nt, Human
ugagaagaguacaguucuu

SEQ ID NO: 228644 - RNA, 24 nt, Human
ugccacguuggccaggcuggucuc

SEQ ID NO: 228645 - RNA, 27 nt, Human
ugccacguuggccaggcuggucucaaa

SEQ ID NO: 228646 - RNA, 21 nt, Human
ugcccaggcuggaguguagug

SEQ ID NO: 228647 - RNA, 24 nt, Human
ugcccaggcuggaguguaguggug

SEQ ID NO: 228648 - RNA, 21 nt, Human
ugccucagccuccccaguagc

SEQ ID NO: 228649 - RNA, 24 nt, Human
ugccucagccuccccaguagcugg

SEQ ID NO: 228650 - RNA, 24 nt, Human
uggccaggcuggucucaaacuccu

SEQ ID NO: 228651 - RNA, 22 nt, Human
uggccuggaggaccgacugcac

SEQ ID NO: 228652 - RNA, 22 nt, Human
ugggauuacaggagugugccac

SEQ ID NO: 228653 - RNA, 24 nt, Human
ugggauuacaggagugugccacca

SEQ ID NO: 228654 - RNA, 18 nt, Human
ugggauuacaggcaugag

SEQ ID NO: 228655 - RNA, 19 nt, Human
ugggauuacaggcaugagc

SEQ ID NO: 228656 - RNA, 21 nt, Human
ugggauuacaggcaugagcca

SEQ ID NO: 228657 - RNA, 22 nt, Human
ugggauuacaggcaugagccac

SEQ ID NO: 228658 - RNA, 23 nt, Human
ugggauuacaggcaugagccacc

SEQ ID NO: 228659 - RNA, 24 nt, Human
ugggauuacaggcaugagccaccg

SEQ ID NO: 228660 - RNA, 24 nt, Human
ugggauuacaggcaugagccaccg

SEQ ID NO: 228661 - RNA, 23 nt, Human
uggguucaagugauucucgugcc

SEQ ID NO: 228662 - RNA, 23 nt, Human
ugguuuggugaaaaauaaaaagg

SEQ ID NO: 228663 - RNA, 24 nt, Human
uguaccuuuggcucacugcaaccc

SEQ ID NO: 228664 - RNA, 19 nt, Human
ugugaggggcggaggggcu

SEQ ID NO: 228665 - RNA, 19 nt, Human
uguugcccaggcuggagug

SEQ ID NO: 228666 - RNA, 19 nt, Human
uuagguauuauccaucgcu

SEQ ID NO: 228667 - RNA, 23 nt, Human
uucaagugauucucgugccucag

SEQ ID NO: 228668 - RNA, 20 nt, Human
uucaucauguaaacaaaaga

SEQ ID NO: 228669 - RNA, 24 nt, Human
uugcccaggcuggaguguaguggu

SEQ ID NO: 228670 - RNA, 24 nt, Human
uugcucuguugcccaggcuggagu

SEQ ID NO: 228671 - RNA, 23 nt, Human
uuguacauauuccuucuguuuug

SEQ ID NO: 228672 - RNA, 24 nt, Human
uuuggugaaaaauaaaaagggaga

SEQ ID NO: 228673 - RNA, 20 nt, Human
uuuguagcucuacaaauggu

SEQ ID NO: 228674 - RNA, 19 nt, Human
uuuugugaacucugucagg

SEQ ID NO: 228675 - RNA, 23 nt, Human
uuuugugaacucugucaggguga

SEQ ID NO: 228676 - RNA, 20 nt, Human
aaaaaaaaccaaacuauucu

SEQ ID NO: 228677 - RNA, 19 nt, Human
aaagcacccuccagcaacc

SEQ ID NO: 228678 - RNA, 23 nt, Human
aaagcacccuccagcaacccucc

SEQ ID NO: 228679 - RNA, 18 nt, Human
aagcacccuccagcaacc

SEQ ID NO: 228680 - RNA, 22 nt, Human
aagcaggguagagaacucgcac

SEQ ID NO: 228681 - RNA, 23 nt, Human
acacacacacacacacacacaca

SEQ ID NO: 228682 - RNA, 23 nt, Human
acacacacacacacacacacaca

SEQ ID NO: 228683 - RNA, 23 nt, Human
acacacacacacacacacacaca

SEQ ID NO: 228684 - RNA, 23 nt, Human
acacacacacacacacacacaca

SEQ ID NO: 228685 - RNA, 23 nt, Human
acacacacacacacacacacaca

SEQ ID NO: 228686 - RNA, 23 nt, Human
acacacacacacacacacacaca

SEQ ID NO: 228687 - RNA, 23 nt, Human
acacacacacacacacacacaca

SEQ ID NO: 228688 - RNA, 23 nt, Human
acacacacacacacacacacaca

SEQ ID NO: 228689 - RNA, 23 nt, Human
acacacacacacacacacacaca

SEQ ID NO: 228690 - RNA, 28 nt, Human
acacacacacacacacacacacagaucu

SEQ ID NO: 228691 - RNA, 33 nt, Human
acauagggacacacacacacacacacacacagu

SEQ ID NO: 228692 - RNA, 26 nt, Human
acccaauaaagcacccuccagcaacc

SEQ ID NO: 228693 - RNA, 21 nt, Human
acucgcguucucucgcccgcu

SEQ ID NO: 228694 - RNA, 19 nt, Human
auaaagcacccuccagcaa

SEQ ID NO: 228695 - RNA, 21 nt, Human
caacccucccaccccucaccc

SEQ ID NO: 228696 - RNA, 20 nt, Human
cacacacacacacacacaca

SEQ ID NO: 228697 - RNA, 20 nt, Human
cacacacacacacacacaca

SEQ ID NO: 228698 - RNA, 20 nt, Human
cacacacacacacacacaca

SEQ ID NO: 228699 - RNA, 20 nt, Human
cacacacacacacacacaca

SEQ ID NO: 228700 - RNA, 20 nt, Human
cacacacacacacacacaca

SEQ ID NO: 228701 - RNA, 20 nt, Human
cacacacacacacacacaca

SEQ ID NO: 228702 - RNA, 20 nt, Human
cacacacacacacacacaca

SEQ ID NO: 228703 - RNA, 20 nt, Human
cacacacacacacacacaca

SEQ ID NO: 228704 - RNA, 20 nt, Human
cacacacacacacacacaca

SEQ ID NO: 228705 - RNA, 20 nt, Human
cacacacacacacacacaca

SEQ ID NO: 228706 - RNA, 20 nt, Human
cacacacacacacacacaca

SEQ ID NO: 228707 - RNA, 20 nt, Human
cacacacacacacacacaca

SEQ ID NO: 228708 - RNA, 20 nt, Human
cacacacacacacacacaca

SEQ ID NO: 228709 - RNA, 20 nt, Human
cacacacacacacacacaca

SEQ ID NO: 228710 - RNA, 20 nt, Human
cacacacacacacacacaca

SEQ ID NO: 228711 - RNA, 22 nt, Human
cacacacacacacacacacaca

SEQ ID NO: 228712 - RNA, 22 nt, Human
cacacacacacacacacacaca

SEQ ID NO: 228713 - RNA, 22 nt, Human
cacacacacacacacacacaca

SEQ ID NO: 228714 - RNA, 22 nt, Human
cacacacacacacacacacaca

SEQ ID NO: 228715 - RNA, 22 nt, Human
cacacacacacacacacacaca

SEQ ID NO: 228716 - RNA, 26 nt, Human
cacacacacacacacacacacacaca

SEQ ID NO: 228717 - RNA, 26 nt, Human
cacacacacacacacacacacacaca

SEQ ID NO: 228718 - RNA, 26 nt, Human
cacacacacacacacacacacacaca

SEQ ID NO: 228719 - RNA, 26 nt, Human
cacacacacacacacacacacacaca

SEQ ID NO: 228720 - RNA, 26 nt, Human
cacacacacacacacacacacacaca

SEQ ID NO: 228721 - RNA, 26 nt, Human
cacacacacacacacacacacacaca

SEQ ID NO: 228722 - RNA, 26 nt, Human
cacacacacacacacacacacacaca

SEQ ID NO: 228723 - RNA, 26 nt, Human
cacacacacacacacacacacacaca

SEQ ID NO: 228724 - RNA, 26 nt, Human
cacacacacacacacacacacacaca

SEQ ID NO: 228725 - RNA, 26 nt, Human
cacacacacacacacacacacacaca

SEQ ID NO: 228726 - RNA, 26 nt, Human
caccucggucccacacgcgccggggg

SEQ ID NO: 228727 - RNA, 19 nt, Human
cagcaacccucccaccccu

SEQ ID NO: 228728 - RNA, 19 nt, Human
cagcaacccucccaccccu

SEQ ID NO: 228729 - RNA, 20 nt, Human
cagcaacccucccaccccuc

SEQ ID NO: 228730 - RNA, 26 nt, Human
ccacccaauaaagcacccuccagcaa

SEQ ID NO: 228731 - RNA, 19 nt, Human
cccaccccucacccgauac

SEQ ID NO: 228732 - RNA, 20 nt, Human
ccccgcgccacacccgccac

SEQ ID NO: 228733 - RNA, 22 nt, Human
ccccgcgccacacccgccacuu

SEQ ID NO: 228734 - RNA, 26 nt, Human
ccgcuaccagccccgcgccacacccg

SEQ ID NO: 228735 - RNA, 24 nt, Human
ccuccacccaauaaagcacccucc

SEQ ID NO: 228736 - RNA, 19 nt, Human
cuccagcaacccucccacc

SEQ ID NO: 228737 - RNA, 25 nt, Human
cuccagcaacccucccaccccucac

SEQ ID NO: 228738 - RNA, 19 nt, Human
cugggugccggggauccug

SEQ ID NO: 228739 - RNA, 31 nt, Human
gacauagggacacacacacacacacacacag

SEQ ID NO: 228740 - RNA, 19 nt, Human
gagaacucgcacggcuccg

SEQ ID NO: 228741 - RNA, 22 nt, Human
gcaacccucccaccccucaccc

SEQ ID NO: 228742 - RNA, 18 nt, Human
gccccgcgccacacccgc

SEQ ID NO: 228743 - RNA, 22 nt, Human
uaaaaaaaaaaccaaacuauuc

SEQ ID NO: 228744 - RNA, 22 nt, Human
uaaagcacccuccagcaacccu

SEQ ID NO: 228745 - RNA, 26 nt, Human
uaaagcacccuccagcaacccuccca

SEQ ID NO: 228746 - RNA, 31 nt, Human
uagggacacacacacacacacacacacacag

SEQ ID NO: 228747 - RNA, 22 nt, Human
uccacccaauaaagcacccucc

SEQ ID NO: 228748 - RNA, 20 nt, Human
uccagcaacccucccacccc

SEQ ID NO: 228749 - RNA, 26 nt, Human
uccagcaacccucccaccccucaccc

SEQ ID NO: 228750 - RNA, 25 nt, Human
ucccaccccucacccgauacauaga

SEQ ID NO: 228751 - RNA, 25 nt, Human
uccggccgcuaccagccccgcgcca

SEQ ID NO: 228752 - RNA, 28 nt, Human
uggugcccuccacccaauaaagcacccu

SEQ ID NO: 228753 - RNA, 19 nt, Human
aacacaagccccaccaacc

SEQ ID NO: 228754 - RNA, 18 nt, Human
aagcaaggacaagaaaca

SEQ ID NO: 228755 - RNA, 20 nt, Human
aaggccaggacggcuccaga

SEQ ID NO: 228756 - RNA, 22 nt, Human
cacaagccccaccaaccccagc

SEQ ID NO: 228757 - RNA, 19 nt, Human
caggacggcuccagaccca

SEQ ID NO: 228758 - RNA, 18 nt, Human
cauuauaaagcaaggaca

SEQ ID NO: 228759 - RNA, 18 nt, Human
ccaugucagcugggaagg

SEQ ID NO: 228760 - RNA, 20 nt, Human
ccccaccaaccccagccugc

SEQ ID NO: 228761 - RNA, 26 nt, Human
ccccaccaaccccagccugccgccug

SEQ ID NO: 228762 - RNA, 21 nt, Human
cuccagacccaggccuggccu

SEQ ID NO: 228763 - RNA, 22 nt, Human
cugaagcugaccugagguccau

SEQ ID NO: 228764 - RNA, 22 nt, Human
ggaaggccaggacggcuccaga

SEQ ID NO: 228765 - RNA, 23 nt, Human
ggacaagaaacacaguuuuagga

SEQ ID NO: 228766 - RNA, 21 nt, Human
uaaacacaagccccaccaacc

SEQ ID NO: 228767 - RNA, 24 nt, Human
uaaacacaagccccaccaacccca

SEQ ID NO: 228768 - RNA, 21 nt, Human
uauaaagcaaggacaagaaac

SEQ ID NO: 228769 - RNA, 23 nt, Human
uauaaagcaaggacaagaaacac

SEQ ID NO: 228770 - RNA, 18 nt, Human
ugaaaccuguuuauuucu

SEQ ID NO: 228771 - RNA, 21 nt, Human
ugaaaccuguuuauuucuaag

SEQ ID NO: 228772 - RNA, 19 nt, Human
ugggaaggccaggacggcu

SEQ ID NO: 228773 - RNA, 25 nt, Human
ugggaaggccaggacggcuccagac

SEQ ID NO: 228774 - RNA, 30 nt, Human
uuaauuaaacacaagccccaccaaccccaa

SEQ ID NO: 228775 - RNA, 18 nt, Human
uuccugagagaaaagagu

SEQ ID NO: 228776 - RNA, 22 nt, Human
cacaacacgggguuauacaaaa

SEQ ID NO: 228777 - RNA, 23 nt, Human
aaaagaccaaagagaagcaaaag

SEQ ID NO: 228778 - RNA, 25 nt, Human
aaaagaccaaagagaagcaguggga

SEQ ID NO: 228779 - RNA, 25 nt, Human
aaaaucccaaaguuacuuucaaaag

SEQ ID NO: 228780 - RNA, 20 nt, Human
aaacaguauuauggaaaaca

SEQ ID NO: 228781 - RNA, 18 nt, Human
aaagagaagcaaaagcga

SEQ ID NO: 228782 - RNA, 21 nt, Human
aaaguauguguuaucugccag

SEQ ID NO: 228783 - RNA, 22 nt, Human
aagaaaaagggagccacauuaa

SEQ ID NO: 228784 - RNA, 19 nt, Human
aagcaaaagcgauacaaau

SEQ ID NO: 228785 - RNA, 18 nt, Human
aagcaaaugagcgcaaac

SEQ ID NO: 228786 - RNA, 22 nt, Human
aaggaugcuacauuaaaggaau

SEQ ID NO: 228787 - RNA, 21 nt, Human
acaagaaaaagggagccacau

SEQ ID NO: 228788 - RNA, 20 nt, Human
acaguacuagcaggagauga

SEQ ID NO: 228789 - RNA, 19 nt, Human
acuguuuuuauuuugugug

SEQ ID NO: 228790 - RNA, 25 nt, Human
agaaacacagccccuaguuacacug

SEQ ID NO: 228791 - RNA, 20 nt, Human
agaaguuagcuccaugagga

SEQ ID NO: 228792 - RNA, 22 nt, Human
agagagccggagguuuuccaga

SEQ ID NO: 228793 - RNA, 25 nt, Human
agcaggagaugaaauaaaagggacc

SEQ ID NO: 228794 - RNA, 24 nt, Human
aggaaacaaugagguuauaagauc

SEQ ID NO: 228795 - RNA, 22 nt, Human
aggaaagaaaaccauccaaucu

SEQ ID NO: 228796 - RNA, 26 nt, Human
aggaaagaaaaccauccaaucucagu

SEQ ID NO: 228797 - RNA, 19 nt, Human
aggaccacaaagccugaaa

SEQ ID NO: 228798 - RNA, 21 nt, Human
aggcaagcaaaugagcgcaaa

SEQ ID NO: 228799 - RNA, 21 nt, Human
aggggaaaagcaccuagggug

SEQ ID NO: 228800 - RNA, 20 nt, Human
auccaaggguucacugugga

SEQ ID NO: 228801 - RNA, 19 nt, Human
auuagaaucgagcugcacc

SEQ ID NO: 228802 - RNA, 22 nt, Human
caaauuaauaugugccccucuc

SEQ ID NO: 228803 - RNA, 23 nt, Human
caacaggucuaaacaucucccuu

SEQ ID NO: 228804 - RNA, 22 nt, Human
cacaguacuagcaggagaugaa

SEQ ID NO: 228805 - RNA, 23 nt, Human
cacaguacuagcaggagaugaaa

SEQ ID NO: 228806 - RNA, 23 nt, Human
caccagguaauccaaggguucac

SEQ ID NO: 228807 - RNA, 19 nt, Human
cagaaggcagauacuguuu

SEQ ID NO: 228808 - RNA, 26 nt, Human
cagcaacagaaaugaaccacuuccaa

SEQ ID NO: 228809 - RNA, 21 nt, Human
cagcaugaaaagauuagaauc

SEQ ID NO: 228810 - RNA, 19 nt, Human
caggugcgcaaggcaagca

SEQ ID NO: 228811 - RNA, 21 nt, Human
caggugcgcaaggcaagcaaa

SEQ ID NO: 228812 - RNA, 28 nt, Human
cauuccugacaacuagaaagcacauugc

SEQ ID NO: 228813 - RNA, 25 nt, Human
ccacaaagccugaaacagcggaccc

SEQ ID NO: 228814 - RNA, 22 nt, Human
ccacgccgccccgccccgccua

SEQ ID NO: 228815 - RNA, 19 nt, Human
ccccucuccuuucugcucu

SEQ ID NO: 228816 - RNA, 27 nt, Human
ccgauggcgaucacaccagggcuccuu

SEQ ID NO: 228817 - RNA, 18 nt, Human
ccgccccgccuagccucg

SEQ ID NO: 228818 - RNA, 26 nt, Human
ccgccgccgcgccacgccgccccgcc

SEQ ID NO: 228819 - RNA, 18 nt, Human
ccgccgcgccacgccgcc

SEQ ID NO: 228820 - RNA, 22 nt, Human
ccgcgccacgccgccccgcccc

SEQ ID NO: 228821 - RNA, 28 nt, Human
ccuugaucaggaccacaaagccugaaac

SEQ ID NO: 228822 - RNA, 23 nt, Human
cgcaaacaguauuauggaaaaca

SEQ ID NO: 228823 - RNA, 18 nt, Human
cgccacgccgccccgccc

SEQ ID NO: 228824 - RNA, 25 nt, Human
cuaagacacaaaagaccaaagagaa

SEQ ID NO: 228825 - RNA, 27 nt, Human
cuaauguaagugcggaucuccaaagcc

SEQ ID NO: 228826 - RNA, 23 nt, Human
cucauaccagcaacagaaaugaa

SEQ ID NO: 228827 - RNA, 20 nt, Human
cuuucugcucuaagggaauc

SEQ ID NO: 228828 - RNA, 23 nt, Human
gaaggcugaaggugagggagugg

SEQ ID NO: 228829 - RNA, 18 nt, Human
gacacaaaagaccaaaga

SEQ ID NO: 228830 - RNA, 24 nt, Human
gaguccucuuuuauucccccacaa

SEQ ID NO: 228831 - RNA, 25 nt, Human
gcaacagaaaugaaccacuuccaaa

SEQ ID NO: 228832 - RNA, 21 nt, Human
gcacauucacugaaggcugaa

SEQ ID NO: 228833 - RNA, 19 nt, Human
gccacgccgccccgccccg

SEQ ID NO: 228834 - RNA, 20 nt, Human
gccccgccuagccucgaccg

SEQ ID NO: 228835 - RNA, 22 nt, Human
ggagucaaaguguuaauucuuc

SEQ ID NO: 228836 - RNA, 18 nt, Human
gugccccucuccuuucug

SEQ ID NO: 228837 - RNA, 23 nt, Human
guguauauucccauaacucuaau

SEQ ID NO: 228838 - RNA, 23 nt, Human
uaaaagagagugggccguucugg

SEQ ID NO: 228839 - RNA, 20 nt, Human
uaagacacaaaagaccaaag

SEQ ID NO: 228840 - RNA, 22 nt, Human
uaagggaaucuacaaaccagua

SEQ ID NO: 228841 - RNA, 22 nt, Human
uaauaugugccccucuccuuuc

SEQ ID NO: 228842 - RNA, 19 nt, Human
uagaaaaagccaccaggua

SEQ ID NO: 228843 - RNA, 22 nt, Human
uagaaagcacauucacugaagg

SEQ ID NO: 228844 - RNA, 23 nt, Human
uauuagaaggguauuccaccaca

SEQ ID NO: 228845 - RNA, 19 nt, Human
uauuauggaaaacauuuga

SEQ ID NO: 228846 - RNA, 21 nt, Human
uauucccccacaagaaaaagg

SEQ ID NO: 228847 - RNA, 19 nt, Human
uccaaggguucacugugga

SEQ ID NO: 228848 - RNA, 24 nt, Human
uccucuuuuauucccccacaagaa

SEQ ID NO: 228849 - RNA, 23 nt, Human
ucuaagacacaaaagaccaaaga

SEQ ID NO: 228850 - RNA, 23 nt, Human
ucugaaguauacacaacaggucu

SEQ ID NO: 228851 - RNA, 18 nt, Human
uggaagaacucaugaaaa

SEQ ID NO: 228852 - RNA, 23 nt, Human
uggaagaacucaugaaaaguacu

SEQ ID NO: 228853 - RNA, 18 nt, Human
uguggaagaacucaugaa

SEQ ID NO: 228854 - RNA, 18 nt, Human
uguuaaagggaaugagga

SEQ ID NO: 228855 - RNA, 21 nt, Human
uuaaauuacaggauaugguuu

SEQ ID NO: 228856 - RNA, 19 nt, Human
uucaagauaaagauuuagu

SEQ ID NO: 228857 - RNA, 21 nt, Human
uucgaaauccucauaccagca

SEQ ID NO: 228858 - RNA, 19 nt, Human
uucuaagacacaaaagacc

SEQ ID NO: 228859 - RNA, 21 nt, Human
auaccaaagugucuugaucca

SEQ ID NO: 228860 - RNA, 23 nt, Human
auccacagcgcaccauuuuccaa

SEQ ID NO: 228861 - RNA, 18 nt, Human
cacagcgcaccauuuucc

SEQ ID NO: 228862 - RNA, 23 nt, Human
cauaugcauuuacaguccaugug

SEQ ID NO: 228863 - RNA, 24 nt, Human
ccugcggcugcggcggcggcggcg

SEQ ID NO: 228864 - RNA, 24 nt, Human
cggcggcggcggcgaaucuuggag

SEQ ID NO: 228865 - RNA, 23 nt, Human
cuaaaacaguuuaggaaaucaug

SEQ ID NO: 228866 - RNA, 21 nt, Human
cugcaguugucagccuguggc

SEQ ID NO: 228867 - RNA, 26 nt, Human
cugcggcggcggcggcggcgaaucuu

SEQ ID NO: 228868 - RNA, 27 nt, Human
gccuuuuguugcuguuguucuuaucau

SEQ ID NO: 228869 - RNA, 22 nt, Human
gcggcggcggcgaaucuuggag

SEQ ID NO: 228870 - RNA, 23 nt, Human
gcggcugcggcggcggcggcggc

SEQ ID NO: 228871 - RNA, 23 nt, Human
gcugcgcgcggcuccggcggcgg

SEQ ID NO: 228872 - RNA, 18 nt, Human
ggcaccagggaacaggga

SEQ ID NO: 228873 - RNA, 22 nt, Human
ggcaccagggaacagggaaaaa

SEQ ID NO: 228874 - RNA, 21 nt, Human
ggcggcggcggcggcgaaucu

SEQ ID NO: 228875 - RNA, 20 nt, Human
ggcugcggcggcggcggcgg

SEQ ID NO: 228876 - RNA, 21 nt, Human
guggugcuucauauugaaugu

SEQ ID NO: 228877 - RNA, 22 nt, Human
uaccaaagugucuugauccaca

SEQ ID NO: 228878 - RNA, 21 nt, Human
uauaugcaucauaccaaagug

SEQ ID NO: 228879 - RNA, 22 nt, Human
ucagugggcagcugacauguca

SEQ ID NO: 228880 - RNA, 19 nt, Human
ucaguuccaccaaugaaaa

SEQ ID NO: 228881 - RNA, 21 nt, Human
uccacauaaagaauaugaaaa

SEQ ID NO: 228882 - RNA, 21 nt, Human
uccaugugauagugacuuuug

SEQ ID NO: 228883 - RNA, 18 nt, Human
uggagccuuuuguugcug

SEQ ID NO: 228884 - RNA, 22 nt, Human
uggagccuuuuguugcuguugu

SEQ ID NO: 228885 - RNA, 24 nt, Human
ugucaguuccaccaaugaaaauca

SEQ ID NO: 228886 - RNA, 20 nt, Human
uguggaggacaaugauggag

SEQ ID NO: 228887 - RNA, 22 nt, Human
uucaauaaccaaguuucuuguu

SEQ ID NO: 228888 - RNA, 20 nt, Human
uuccaaaggaguaucagugg

SEQ ID NO: 228889 - RNA, 21 nt, Human
uuccaaaggaguaucaguggg

SEQ ID NO: 228890 - RNA, 18 nt, Human
uucuaaacuggagacugc

SEQ ID NO: 228891 - RNA, 20 nt, Human
uuggagccuuuuguugcugu

SEQ ID NO: 228892 - RNA, 24 nt, Human
uuuuuugugucaguuccaccaaug

SEQ ID NO: 228893 - RNA, 22 nt, Human
auacacacacacauauauauau

SEQ ID NO: 228894 - RNA, 20 nt, Human
auauguauauauauauauau

SEQ ID NO: 228895 - RNA, 30 nt, Human
aucaaaccuuuuuauauauauguauauauu

SEQ ID NO: 228896 - RNA, 18 nt, Human
auguauauauauauauau

SEQ ID NO: 228897 - RNA, 19 nt, Human
auguauauauauauauaua

SEQ ID NO: 228898 - RNA, 18 nt, Human
cacacacacauauauaua

SEQ ID NO: 228899 - RNA, 24 nt, Human
ccuuuuuauauauauguauauauu

SEQ ID NO: 228900 - RNA, 24 nt, Human
cugcauuguaccuaacuuccacag

SEQ ID NO: 228901 - RNA, 28 nt, Human
gaucaaaccuuuuuauauauauguauau

SEQ ID NO: 228902 - RNA, 19 nt, Human
guauauauauauauauaua

SEQ ID NO: 228903 - RNA, 21 nt, Human
guauauauauauauauauaca

SEQ ID NO: 228904 - RNA, 18 nt, Human
uaccuaacuuccacaaca

SEQ ID NO: 228905 - RNA, 25 nt, Human
uauauacacacacacauauauauau

SEQ ID NO: 228906 - RNA, 31 nt, Human
uauauauauauacacacacacauauauauag

SEQ ID NO: 228907 - RNA, 20 nt, Human
uauauauauguauauauaua

SEQ ID NO: 228908 - RNA, 23 nt, Human
uauauauauguauauauauauau

SEQ ID NO: 228909 - RNA, 18 nt, Human
uauauauguauauauaua

SEQ ID NO: 228910 - RNA, 22 nt, Human
uauauguauauauauauauaua

SEQ ID NO: 228911 - RNA, 18 nt, Human
uauguauauauauauaua

SEQ ID NO: 228912 - RNA, 22 nt, Human
uauguauauauauauauauaua

SEQ ID NO: 228913 - RNA, 18 nt, Human
uguauauauauauauaua

SEQ ID NO: 228914 - RNA, 20 nt, Human
uuuuuuuuuuuugauggauc

SEQ ID NO: 228915 - RNA, 20 nt, Human
uuuuuuuuuuuuuugaugga

SEQ ID NO: 228916 - RNA, 18 nt, Human
uuuuuuuuuuuuuuuuug

SEQ ID NO: 228917 - RNA, 22 nt, Human
uuuuuuuuuuuuuuuuugaugg

SEQ ID NO: 228918 - RNA, 23 nt, Human
acagcgcugcuguuggcggcugc

SEQ ID NO: 228919 - RNA, 22 nt, Human
acucacucauccucucauuccc

SEQ ID NO: 228920 - RNA, 19 nt, Human
acucauccucucauuccca

SEQ ID NO: 228921 - RNA, 20 nt, Human
agcauccgugcacacuccuc

SEQ ID NO: 228922 - RNA, 21 nt, Human
agcucagagcgcgcuggugcu

SEQ ID NO: 228923 - RNA, 27 nt, Human
agggugggguggggggcgggggucacc

SEQ ID NO: 228924 - RNA, 20 nt, Human
cagcauccgugcacacuccu

SEQ ID NO: 228925 - RNA, 18 nt, Human
cagcucagagcgcgcugg

SEQ ID NO: 228926 - RNA, 19 nt, Human
cauucagcauccgugcacc

SEQ ID NO: 228927 - RNA, 24 nt, Human
ccaaacauucagcauccgugcaca

SEQ ID NO: 228928 - RNA, 20 nt, Human
ccucacucacucauccucuc

SEQ ID NO: 228929 - RNA, 19 nt, Human
ccuuacuuccucccuccaa

SEQ ID NO: 228930 - RNA, 21 nt, Human
cgcugcuguuggcggcugcgg

SEQ ID NO: 228931 - RNA, 24 nt, Human
cggcucgaacuggggauggggguu

SEQ ID NO: 228932 - RNA, 19 nt, Human
cucacucauccucucauuc

SEQ ID NO: 228933 - RNA, 22 nt, Human
cucacucauccucucauuccca

SEQ ID NO: 228934 - RNA, 20 nt, Human
cucauccucucauucccaaa

SEQ ID NO: 228935 - RNA, 19 nt, Human
cuccccuuccucuccucuu

SEQ ID NO: 228936 - RNA, 20 nt, Human
cugcuguuggcggcugcggc

SEQ ID NO: 228937 - RNA, 20 nt, Human
cuguuggcggcugcggcugc

SEQ ID NO: 228938 - RNA, 22 nt, Human
gccucacucacucauccucuca

SEQ ID NO: 228939 - RNA, 31 nt, Human
gcggagguggcggcggcggcgacuccuccuu

SEQ ID NO: 228940 - RNA, 25 nt, Human
gcggcgggggagggacccugggggc

SEQ ID NO: 228941 - RNA, 18 nt, Human
gcuguuggcggcugcggc

SEQ ID NO: 228942 - RNA, 19 nt, Human
ggcggagguggcggcggcg

SEQ ID NO: 228943 - RNA, 22 nt, Human
ggcggagguggcggcggcggcg

SEQ ID NO: 228944 - RNA, 20 nt, Human
ggcucugucuggguagucgg

SEQ ID NO: 228945 - RNA, 25 nt, Human
gggaagggagggugggguggggggc

SEQ ID NO: 228946 - RNA, 20 nt, Human
gggagggugggguggggggc

SEQ ID NO: 228947 - RNA, 22 nt, Human
gggauggggguugggggucggg

SEQ ID NO: 228948 - RNA, 19 nt, Human
gggcugcuggcggcggggg

SEQ ID NO: 228949 - RNA, 19 nt, Human
ggggagggacccugggggc

SEQ ID NO: 228950 - RNA, 19 nt, Human
ggggcagcucagagcgcgc

SEQ ID NO: 228951 - RNA, 19 nt, Human
ggggguugggggucgggug

SEQ ID NO: 228952 - RNA, 26 nt, Human
ggggucgggugggaagggaggguggg

SEQ ID NO: 228953 - RNA, 19 nt, Human
gggguugggggucgggugg

SEQ ID NO: 228954 - RNA, 23 nt, Human
gggugggaagggaggguggggug

SEQ ID NO: 228955 - RNA, 22 nt, Human
gggugggguggggggcgggggu

SEQ ID NO: 228956 - RNA, 26 nt, Human
ucaagccucacucacucauccucuca

SEQ ID NO: 228957 - RNA, 23 nt, Human
ucacucauccucucauucccaaa

SEQ ID NO: 228958 - RNA, 18 nt, Human
ucacuuccagguuuuuca

SEQ ID NO: 228959 - RNA, 23 nt, Human
uccgugcacacuccucacuucca

SEQ ID NO: 228960 - RNA, 20 nt, Human
uccucuccucuucccuuacu

SEQ ID NO: 228961 - RNA, 23 nt, Human
ucuucccuuacuuccucccucca

SEQ ID NO: 228962 - RNA, 22 nt, Human
ugcuguuggcggcugcggcugc

SEQ ID NO: 228963 - RNA, 19 nt, Human
uggggauggggguuggggg

SEQ ID NO: 228964 - RNA, 21 nt, Human
uggggggcgggggucaccaca

SEQ ID NO: 228965 - RNA, 23 nt, Human
ugggggucgggugggaagggagg

SEQ ID NO: 228966 - RNA, 18 nt, Human
uggggguugggggucggg

SEQ ID NO: 228967 - RNA, 18 nt, Human
ugggguggggggcggggg

SEQ ID NO: 228968 - RNA, 19 nt, Human
ugggguggggggcgggggu

SEQ ID NO: 228969 - RNA, 24 nt, Human
ugggguggggggcgggggucacca

SEQ ID NO: 228970 - RNA, 24 nt, Human
uggguagucgguccggcuccccuu

SEQ ID NO: 228971 - RNA, 19 nt, Human
uguuaugguuuucuacgaa

SEQ ID NO: 228972 - RNA, 22 nt, Human
uucccuuacuuccucccuccaa

SEQ ID NO: 228973 - RNA, 20 nt, Human
uugggggucgggugggaagg

SEQ ID NO: 228974 - RNA, 21 nt, Human
uuuuucucuuuuccaagaugg

SEQ ID NO: 228975 - RNA, 22 nt, Human
aacaccucccucccgccccucc

SEQ ID NO: 228976 - RNA, 24 nt, Human
aacaccucccucccgccccuccca

SEQ ID NO: 228977 - RNA, 18 nt, Human
accucccucccgccccuc

SEQ ID NO: 228978 - RNA, 18 nt, Human
agacugaaggaccccuaa

SEQ ID NO: 228979 - RNA, 21 nt, Human
aucccagagcccucgggcggc

SEQ ID NO: 228980 - RNA, 20 nt, Human
cauuuucccugggugcagag

SEQ ID NO: 228981 - RNA, 21 nt, Human
cauuuucccugggugcagagg

SEQ ID NO: 228982 - RNA, 21 nt, Human
cccagagcccucgggcggcuc

SEQ ID NO: 228983 - RNA, 19 nt, Human
cccgccccucccaguaggg

SEQ ID NO: 228984 - RNA, 18 nt, Human
cccugggugcagaggcuc

SEQ ID NO: 228985 - RNA, 18 nt, Human
ccucgggcggcucggccu

SEQ ID NO: 228986 - RNA, 20 nt, Human
gcucccuuauagucuccaag

SEQ ID NO: 228987 - RNA, 27 nt, Human
uaacuggagacauauuuccacccacaa

SEQ ID NO: 228988 - RNA, 23 nt, Human
uaauacagugacggcaacaccuc

SEQ ID NO: 228989 - RNA, 24 nt, Human
uacagugacggcaacaccucccuc

SEQ ID NO: 228990 - RNA, 22 nt, Human
uggagacauauuuccacccaca

SEQ ID NO: 228991 - RNA, 23 nt, Human
uggagacauauuuccacccacaa

SEQ ID NO: 228992 - RNA, 28 nt, Human
uuaauacagugacggcaacaccucccuc

SEQ ID NO: 228993 - RNA, 22 nt, Human
uuuuugcuucuucacauccacu

SEQ ID NO: 228994 - RNA, 18 nt, Human
uuuuuuuuuuuuuuugcu

SEQ ID NO: 228995 - RNA, 19 nt, Human
uuuuuuuuuuuuuuugcuu

SEQ ID NO: 228996 - RNA, 25 nt, Human
aaaaccccaagacagaaaucuuagg

SEQ ID NO: 228997 - RNA, 25 nt, Human
aaaaccccaagacagaaaucuuagg

SEQ ID NO: 228998 - RNA, 22 nt, Human
aacugcaugcaccaaaaacccc

SEQ ID NO: 228999 - RNA, 22 nt, Human
aacugcaugcaccaaaaacccc

SEQ ID NO: 229000 - RNA, 21 nt, Human
aagcuucauuaauuuguuuca

SEQ ID NO: 229001 - RNA, 21 nt, Human
aagcuucauuaauuuguuuca

SEQ ID NO: 229002 - RNA, 19 nt, Human
accugggagccgcugagcc

SEQ ID NO: 229003 - RNA, 21 nt, Human
accugggagccgcugagccuc

SEQ ID NO: 229004 - RNA, 24 nt, Human
accuuugugaacaguguaacuuua

SEQ ID NO: 229005 - RNA, 24 nt, Human
accuuugugaacaguguaacuuua

SEQ ID NO: 229006 - RNA, 27 nt, Human
acucugggaauacuggcacuucgagga

SEQ ID NO: 229007 - RNA, 27 nt, Human
acucugggaauacuggcacuucgagga

SEQ ID NO: 229008 - RNA, 18 nt, Human
acuucgaggaaaaaaaaa

SEQ ID NO: 229009 - RNA, 18 nt, Human
acuucgaggaaaaaaaaa

SEQ ID NO: 229010 - RNA, 24 nt, Human
agacagaaaucuuagguauucagu

SEQ ID NO: 229011 - RNA, 24 nt, Human
agacagaaaucuuagguauucagu

SEQ ID NO: 229012 - RNA, 21 nt, Human
auggagcaggaaaaaaauuag

SEQ ID NO: 229013 - RNA, 24 nt, Human
auggagcaggaaaaaaauuaggua

SEQ ID NO: 229014 - RNA, 21 nt, Human
augugacuagauaaaacacag

SEQ ID NO: 229015 - RNA, 21 nt, Human
augugacuagauaaaacacag

SEQ ID NO: 229016 - RNA, 22 nt, Human
auuacacacuuugucuuugacu

SEQ ID NO: 229017 - RNA, 19 nt, Human
auucaguuucuuuuucaca

SEQ ID NO: 229018 - RNA, 19 nt, Human
auucaguuucuuuuucaca

SEQ ID NO: 229019 - RNA, 25 nt, Human
caaaaaccccaagacagaaaucuua

SEQ ID NO: 229020 - RNA, 25 nt, Human
caaaaaccccaagacagaaaucuua

SEQ ID NO: 229021 - RNA, 25 nt, Human
caacugcaugcaccaaaaaccccaa

SEQ ID NO: 229022 - RNA, 25 nt, Human
caacugcaugcaccaaaaaccccaa

SEQ ID NO: 229023 - RNA, 22 nt, Human
cacacuugguaagaaaaauaag

SEQ ID NO: 229024 - RNA, 22 nt, Human
cacacuugguaagaaaaauaag

SEQ ID NO: 229025 - RNA, 21 nt, Human
cacagaauagggaugauucaa

SEQ ID NO: 229026 - RNA, 21 nt, Human
cacagaauagggaugauucaa

SEQ ID NO: 229027 - RNA, 21 nt, Human
caccuucgccgccgccacugc

SEQ ID NO: 229028 - RNA, 23 nt, Human
cagcaggccucucucccgcaccu

SEQ ID NO: 229029 - RNA, 23 nt, Human
ccacugccgccgccgcugcugcc

SEQ ID NO: 229030 - RNA, 24 nt, Human
ccacugccgccgccgcugcugccu

SEQ ID NO: 229031 - RNA, 27 nt, Human
ccgccacugccgccgccgcugcugccg

SEQ ID NO: 229032 - RNA, 21 nt, Human
ccgccgccaccuucgccgccg

SEQ ID NO: 229033 - RNA, 23 nt, Human
ccgccgccacugccgccgccgcu

SEQ ID NO: 229034 - RNA, 19 nt, Human
ccgccgccgccuucagugc

SEQ ID NO: 229035 - RNA, 24 nt, Human
ccgccgccgcugcugccuccgccg

SEQ ID NO: 229036 - RNA, 24 nt, Human
ccgccgcugcugccuccgccgccg

SEQ ID NO: 229037 - RNA, 20 nt, Human
ccgcugcugccuccgccgcc

SEQ ID NO: 229038 - RNA, 22 nt, Human
ccgcugcugccuccgccgccgc

SEQ ID NO: 229039 - RNA, 20 nt, Human
ccucuggccccgccgccgcc

SEQ ID NO: 229040 - RNA, 20 nt, Human
ccucuggccccgccgccgcc

SEQ ID NO: 229041 - RNA, 24 nt, Human
cgaaauggcgggggccgggaguac

SEQ ID NO: 229042 - RNA, 26 nt, Human
cuaauagcaguggaaaggagacaaaa

SEQ ID NO: 229043 - RNA, 26 nt, Human
cuaauagcaguggaaaggagacaaaa

SEQ ID NO: 229044 - RNA, 20 nt, Human
cugccgccgccgcugcugcc

SEQ ID NO: 229045 - RNA, 20 nt, Human
cugcugccuccgccgccgcg

SEQ ID NO: 229046 - RNA, 21 nt, Human
cuucgccgccgccacugccgc

SEQ ID NO: 229047 - RNA, 22 nt, Human
gaaggcaucaucaacacccaga

SEQ ID NO: 229048 - RNA, 20 nt, Human
gagcaggaaaaaaauuaggu

SEQ ID NO: 229049 - RNA, 20 nt, Human
gagcaggaaaaaaauuaggu

SEQ ID NO: 229050 - RNA, 22 nt, Human
gccgccgccgcugcugccuccg

SEQ ID NO: 229051 - RNA, 25 nt, Human
uaacuuuacauucaucagggaugac

SEQ ID NO: 229052 - RNA, 25 nt, Human
uaacuuuacauucaucagggaugac

SEQ ID NO: 229053 - RNA, 18 nt, Human
uaagaaguaaucaacugc

SEQ ID NO: 229054 - RNA, 18 nt, Human
uaagaaguaaucaacugc

SEQ ID NO: 229055 - RNA, 18 nt, Human
uaauauuuuggggagagu

SEQ ID NO: 229056 - RNA, 18 nt, Human
uaauauuuuggggagagu

SEQ ID NO: 229057 - RNA, 23 nt, Human
uagggaugauucaaaagcuucau

SEQ ID NO: 229058 - RNA, 23 nt, Human
uagggaugauucaaaagcuucau

SEQ ID NO: 229059 - RNA, 24 nt, Human
ucgccgccgccacugccgccgccg

SEQ ID NO: 229060 - RNA, 23 nt, Human
ucuggccccgccgccgccuucag

SEQ ID NO: 229061 - RNA, 22 nt, Human
ugacuaauagcaguggaaagga

SEQ ID NO: 229062 - RNA, 22 nt, Human
ugacuaauagcaguggaaagga

SEQ ID NO: 229063 - RNA, 21 nt, Human
ugagccucuggccccgccgcc

SEQ ID NO: 229064 - RNA, 22 nt, Human
ugcaccaaaaaccccaagacag

SEQ ID NO: 229065 - RNA, 22 nt, Human
ugcaccaaaaaccccaagacag

SEQ ID NO: 229066 - RNA, 25 nt, Human
ugcaugcaccaaaaaccccaagaca

SEQ ID NO: 229067 - RNA, 25 nt, Human
ugcaugcaccaaaaaccccaagaca

SEQ ID NO: 229068 - RNA, 18 nt, Human
uggaaaggagacaaaacc

SEQ ID NO: 229069 - RNA, 18 nt, Human
uggaaaggagacaaaacc

SEQ ID NO: 229070 - RNA, 19 nt, Human
uggaaaggagacaaaaccu

SEQ ID NO: 229071 - RNA, 19 nt, Human
uggaaaggagacaaaaccu

SEQ ID NO: 229072 - RNA, 25 nt, Human
uuaaaauaagcauuuaagguaaaag

SEQ ID NO: 229073 - RNA, 25 nt, Human
uuaaaauaagcauuuaagguaaaag

SEQ ID NO: 229074 - RNA, 24 nt, Human
uuaagguaaaagcuaacagucugc

SEQ ID NO: 229075 - RNA, 24 nt, Human
uuaagguaaaagcuaacagucugc

SEQ ID NO: 229076 - RNA, 20 nt, Human
aaaacagcacagagauaaga

SEQ ID NO: 229077 - RNA, 21 nt, Human
aaaaccaaaacagcacagaga

SEQ ID NO: 229078 - RNA, 21 nt, Human
aagagcugggggaauaggaug

SEQ ID NO: 229079 - RNA, 19 nt, Human
acagcacagagauaagaug

SEQ ID NO: 229080 - RNA, 27 nt, Human
acagcacagagauaagaugcuaaggag

SEQ ID NO: 229081 - RNA, 23 nt, Human
accucuccacaaaagaaaaacaa

SEQ ID NO: 229082 - RNA, 21 nt, Human
acugcugaacuguuucucagg

SEQ ID NO: 229083 - RNA, 18 nt, Human
agagcugggggaauagga

SEQ ID NO: 229084 - RNA, 20 nt, Human
agcagaaaagaaagagcugg

SEQ ID NO: 229085 - RNA, 21 nt, Human
agcauauuuguuagugaugcu

SEQ ID NO: 229086 - RNA, 18 nt, Human
agggaaagaacaaagcag

SEQ ID NO: 229087 - RNA, 19 nt, Human
aggggacugagauugccac

SEQ ID NO: 229088 - RNA, 22 nt, Human
aucugaaaacuucauugggaaa

SEQ ID NO: 229089 - RNA, 23 nt, Human
cacaaaacacccauccagguuag

SEQ ID NO: 229090 - RNA, 22 nt, Human
cagcaaaacaaggaaaugggga

SEQ ID NO: 229091 - RNA, 24 nt, Human
cagcaaaacaaggaaauggggagu

SEQ ID NO: 229092 - RNA, 22 nt, Human
ccucuccacaaaagaaaaacaa

SEQ ID NO: 229093 - RNA, 18 nt, Human
cucacaaaacacccaucc

SEQ ID NO: 229094 - RNA, 18 nt, Human
cugggggaauaggaugag

SEQ ID NO: 229095 - RNA, 19 nt, Human
gaaaaacaacuugcuuaca

SEQ ID NO: 229096 - RNA, 19 nt, Human
gcagaaaagaaagagcugg

SEQ ID NO: 229097 - RNA, 23 nt, Human
gcuaaggagcuguccacacccug

SEQ ID NO: 229098 - RNA, 23 nt, Human
ggaaacagcagaaaagaaagagc

SEQ ID NO: 229099 - RNA, 18 nt, Human
ggagcaagguagaguaag

SEQ ID NO: 229100 - RNA, 20 nt, Human
uaagaccucuccacaaaaga

SEQ ID NO: 229101 - RNA, 22 nt, Human
uacaaaaccaaaacagcacaga

SEQ ID NO: 229102 - RNA, 20 nt, Human
uagagcuaaugaaacagagg

SEQ ID NO: 229103 - RNA, 24 nt, Human
ucgaccucggucuugccaagcaua

SEQ ID NO: 229104 - RNA, 19 nt, Human
ugaucugaaaacuucauug

SEQ ID NO: 229105 - RNA, 23 nt, Human
ugccacugaucugaaaacuucau

SEQ ID NO: 229106 - RNA, 24 nt, Human
ugcuuugaaaugucaugugggugg

SEQ ID NO: 229107 - RNA, 23 nt, Human
uggcuggcuuaaggaggugcuuu

SEQ ID NO: 229108 - RNA, 21 nt, Human
aaaacaccuuguagacaccuu

SEQ ID NO: 229109 - RNA, 22 nt, Human
aaccacaaaacaccuuguagac

SEQ ID NO: 229110 - RNA, 26 nt, Human
aagaagaaauacggaaaccacaaaac

SEQ ID NO: 229111 - RNA, 22 nt, Human
acaaaacaccuuguagacaccu

SEQ ID NO: 229112 - RNA, 19 nt, Human
acggaaaccacaaaacacc

SEQ ID NO: 229113 - RNA, 24 nt, Human
agaagaaauacggaaaccacaaaa

SEQ ID NO: 229114 - RNA, 21 nt, Human
caaccguagaugaaagaacuc

SEQ ID NO: 229115 - RNA, 18 nt, Human
ccguagaugaaagaacuc

SEQ ID NO: 229116 - RNA, 19 nt, Human
cucuaccgucgggcgccac

SEQ ID NO: 229117 - RNA, 22 nt, Human
gaaauacggaaaccacaaaaca

SEQ ID NO: 229118 - RNA, 19 nt, Human
gaagaaauacggaaaccac

SEQ ID NO: 229119 - RNA, 23 nt, Human
gcaucaguaagaaaguuuauuga

SEQ ID NO: 229120 - RNA, 19 nt, Human
gccaccucuucaauaauug

SEQ ID NO: 229121 - RNA, 20 nt, Human
uaaagaacacuuucugguaa

SEQ ID NO: 229122 - RNA, 19 nt, Human
uacggaaaccacaaaacac

SEQ ID NO: 229123 - RNA, 19 nt, Human
ugaaaagaagaaauacgga

SEQ ID NO: 229124 - RNA, 18 nt, Human
ugaaagaacucuaccguc

SEQ ID NO: 229125 - RNA, 27 nt, Human
uucaugcaguuuaauaguaguguuucu

SEQ ID NO: 229126 - RNA, 18 nt, Human
aaaaaggauucaauguga

SEQ ID NO: 229127 - RNA, 18 nt, Human
aaaugacuugugacugaa

SEQ ID NO: 229128 - RNA, 21 nt, Human
aagaaaauggaacagacaaaa

SEQ ID NO: 229129 - RNA, 24 nt, Human
acaaagaccaacaugaccaaaaug

SEQ ID NO: 229130 - RNA, 19 nt, Human
agacaaaaauagggauuga

SEQ ID NO: 229131 - RNA, 23 nt, Human
agggauugaaguaauacagcaug

SEQ ID NO: 229132 - RNA, 23 nt, Human
auggaacagacaaaaauagggau

SEQ ID NO: 229133 - RNA, 21 nt, Human
caacaugaccaaaaugacuug

SEQ ID NO: 229134 - RNA, 21 nt, Human
cagacaaaaauagggauugaa

SEQ ID NO: 229135 - RNA, 23 nt, Human
gaaaauauuccggguuaccagaa

SEQ ID NO: 229136 - RNA, 21 nt, Human
uacuccaguuguccagaagga

SEQ ID NO: 229137 - RNA, 19 nt, Human
ucagaagggcaaaaaggau

SEQ ID NO: 229138 - RNA, 21 nt, Human
uccaaagaaaauggaacagac

SEQ ID NO: 229139 - RNA, 24 nt, Human
ucguuaaaagacuacuccaguugu

SEQ ID NO: 229140 - RNA, 22 nt, Human
ugaaguaauacagcauguuacu

SEQ ID NO: 229141 - RNA, 19 nt, Human
uggaacagacaaaaauagg

SEQ ID NO: 229142 - RNA, 19 nt, Human
uguccagaaggauauaagg

SEQ ID NO: 229143 - RNA, 23 nt, Human
uuacaaagaccaacaugaccaaa

SEQ ID NO: 229144 - RNA, 18 nt, Human
uuacucugaaaggaauaa

SEQ ID NO: 229145 - RNA, 20 nt, Human
uuguccagaaggauauaagg

SEQ ID NO: 229146 - RNA, 26 nt, Human
agagaagagcacagagggcccaccau

SEQ ID NO: 229147 - RNA, 19 nt, Human
agcaggauugagagcaggu

SEQ ID NO: 229148 - RNA, 19 nt, Human
aggcagauuuaaggccuac

SEQ ID NO: 229149 - RNA, 19 nt, Human
agggacugagccuuggguc

SEQ ID NO: 229150 - RNA, 20 nt, Human
cagaggcacuagaagucgug

SEQ ID NO: 229151 - RNA, 19 nt, Human
cagcagccccuccucucuc

SEQ ID NO: 229152 - RNA, 21 nt, Human
ccagcagccccuccucucucc

SEQ ID NO: 229153 - RNA, 18 nt, Human
ccucugggugcugaagac

SEQ ID NO: 229154 - RNA, 18 nt, Human
cugagccuuggguccagc

SEQ ID NO: 229155 - RNA, 18 nt, Human
cugccggcucucuccucc

SEQ ID NO: 229156 - RNA, 19 nt, Human
gagccuuggguccagcagc

SEQ ID NO: 229157 - RNA, 19 nt, Human
ggugcugaagacagaggga

SEQ ID NO: 229158 - RNA, 21 nt, Human
gucagagaggagagagauccg

SEQ ID NO: 229159 - RNA, 26 nt, Human
ucagaagugcggcgaccagaggccga

SEQ ID NO: 229160 - RNA, 23 nt, Human
uccgaccggaagagaagagcaca

SEQ ID NO: 229161 - RNA, 22 nt, Human
uccucugggugcugaagacaga

SEQ ID NO: 229162 - RNA, 18 nt, Human
uccugagagcagagggac

SEQ ID NO: 229163 - RNA, 23 nt, Human
ugagagcagagggacugagccuu

SEQ ID NO: 229164 - RNA, 22 nt, Human
ugagccuuggguccagcagccc

SEQ ID NO: 229165 - RNA, 24 nt, Human
ugcugaagacagagggaggggacc

SEQ ID NO: 229166 - RNA, 23 nt, Human
ugguaacagaggcacuagaaguc

SEQ ID NO: 229167 - RNA, 24 nt, Human
uuagagguggugguaacagaggca

SEQ ID NO: 229168 - RNA, 18 nt, Human
aagcaggguccagcugug

SEQ ID NO: 229169 - RNA, 18 nt, Human
auugccaggaggggguga

SEQ ID NO: 229170 - RNA, 18 nt, Human
ugccaggagggggugagg

SEQ ID NO: 229171 - RNA, 20 nt, Human
aaacccaagaggugcuggca

SEQ ID NO: 229172 - RNA, 21 nt, Human
aaacccaagaggugcuggcag

SEQ ID NO: 229173 - RNA, 21 nt, Human
acacaauacagcugcaucucc

SEQ ID NO: 229174 - RNA, 18 nt, Human
agaagguggggagaggca

SEQ ID NO: 229175 - RNA, 22 nt, Human
agaggcagagggggaauagagc

SEQ ID NO: 229176 - RNA, 20 nt, Human
aggcagagggggaauagagg

SEQ ID NO: 229177 - RNA, 20 nt, Human
agggacccuuuucagcucuc

SEQ ID NO: 229178 - RNA, 20 nt, Human
auagagcgcaugcaaagccc

SEQ ID NO: 229179 - RNA, 26 nt, Human
caaagcccugaaauaaaagaccgagg

SEQ ID NO: 229180 - RNA, 21 nt, Human
cccaagaggugcuggcaggag

SEQ ID NO: 229181 - RNA, 18 nt, Human
cccucuggccaguccucc

SEQ ID NO: 229182 - RNA, 18 nt, Human
cucuggccaguccuccac

SEQ ID NO: 229183 - RNA, 24 nt, Human
cucuggccaguccuccacuuggcc

SEQ ID NO: 229184 - RNA, 20 nt, Human
cugaaauaaaagaccgaggg

SEQ ID NO: 229185 - RNA, 19 nt, Human
cugaaggcagggacuggag

SEQ ID NO: 229186 - RNA, 18 nt, Human
gaagguggggagaggcag

SEQ ID NO: 229187 - RNA, 20 nt, Human
gacuggaguuugcaugugca

SEQ ID NO: 229188 - RNA, 20 nt, Human
gagaggcagagggggaauag

SEQ ID NO: 229189 - RNA, 20 nt, Human
gagaguggggaguggcaagg

SEQ ID NO: 229190 - RNA, 24 nt, Human
gagcccgugaguucucagcaaacc

SEQ ID NO: 229191 - RNA, 20 nt, Human
gagggggaauagagcgcaug

SEQ ID NO: 229192 - RNA, 25 nt, Human
gcaaagcccugaaauaaaagaccga

SEQ ID NO: 229193 - RNA, 22 nt, Human
gcaggcccucuggccaguccuc

SEQ ID NO: 229194 - RNA, 18 nt, Human
gcccucuggccaguccuc

SEQ ID NO: 229195 - RNA, 21 nt, Human
gcuggagcccgugaguucuca

SEQ ID NO: 229196 - RNA, 19 nt, Human
ggcagagggggaauagagc

SEQ ID NO: 229197 - RNA, 24 nt, Human
uaaaagaccgagggacccuuuuca

SEQ ID NO: 229198 - RNA, 18 nt, Human
uacagcugcaucuccuug

SEQ ID NO: 229199 - RNA, 21 nt, Human
ucagcaaacccaagaggugcu

SEQ ID NO: 229200 - RNA, 24 nt, Human
ucagcaaacccaagaggugcuggc

SEQ ID NO: 229201 - RNA, 24 nt, Human
uccuugcuccaaagaaggugggga

SEQ ID NO: 229202 - RNA, 23 nt, Human
ucuccuugcuccaaagaaggugg

SEQ ID NO: 229203 - RNA, 21 nt, Human
ugcaggcccucuggccagucc

SEQ ID NO: 229204 - RNA, 19 nt, Human
uggggagaggcagaggggg

SEQ ID NO: 229205 - RNA, 24 nt, Human
uguuacacaauacagcugcagcgg

SEQ ID NO: 229206 - RNA, 18 nt, Human
uucucagcaaacccaaga

SEQ ID NO: 229207 - RNA, 26 nt, Human
aagccaccacccaagccagcacccaa

SEQ ID NO: 229208 - RNA, 19 nt, Human
aagccaccaccgaagccag

SEQ ID NO: 229209 - RNA, 24 nt, Human
aagccaccaccgaagccagcacca

SEQ ID NO: 229210 - RNA, 24 nt, Human
aagccaccgccauagccgcccccc

SEQ ID NO: 229211 - RNA, 32 nt, Human
aagccagcacccaagccaccaccgaagccagg

SEQ ID NO: 229212 - RNA, 22 nt, Human
aagcugcugcugcugccgaagc

SEQ ID NO: 229213 - RNA, 20 nt, Human
accacccaagccagcaccca

SEQ ID NO: 229214 - RNA, 18 nt, Human
acugcaggagcccuucau

SEQ ID NO: 229215 - RNA, 21 nt, Human
acugcaggagcccuucaugga

SEQ ID NO: 229216 - RNA, 23 nt, Human
agaaagucagcuuuauuagccca

SEQ ID NO: 229217 - RNA, 19 nt, Human
agcaaagccaccacccaag

SEQ ID NO: 229218 - RNA, 23 nt, Human
agcgagcgagcaguuggcugaaa

SEQ ID NO: 229219 - RNA, 18 nt, Human
agcuggugggcaggaggc

SEQ ID NO: 229220 - RNA, 23 nt, Human
agcuggugggcaggaggcugugg

SEQ ID NO: 229221 - RNA, 21 nt, Human
aggagcagggagacagcuggg

SEQ ID NO: 229222 - RNA, 22 nt, Human
agggucagcucguccaacaccc

SEQ ID NO: 229223 - RNA, 24 nt, Human
aggugaggccagcuggugggcagg

SEQ ID NO: 229224 - RNA, 22 nt, Human
auccucccccaaagccacuagu

SEQ ID NO: 229225 - RNA, 25 nt, Human
auggaucuggaggaggugaacuggu

SEQ ID NO: 229226 - RNA, 18 nt, Human
caagccagcacccaagcc

SEQ ID NO: 229227 - RNA, 19 nt, Human
caccaaggccaccaccaua

SEQ ID NO: 229228 - RNA, 23 nt, Human
caccaaggccaccaccauauccu

SEQ ID NO: 229229 - RNA, 24 nt, Human
caccaccagcaaagccaccacccc

SEQ ID NO: 229230 - RNA, 22 nt, Human
caccacccaagccagcacccaa

SEQ ID NO: 229231 - RNA, 23 nt, Human
caccagaagcccaucaccaccag

SEQ ID NO: 229232 - RNA, 22 nt, Human
cacccaagccaccaccgaagcc

SEQ ID NO: 229233 - RNA, 20 nt, Human
caccgccauagccgcccccc

SEQ ID NO: 229234 - RNA, 19 nt, Human
caccucacugcggcugcuc

SEQ ID NO: 229235 - RNA, 20 nt, Human
cacuugguccugaagucauc

SEQ ID NO: 229236 - RNA, 31 nt, Human
cagcaccaaggccaccaccauauccuccccc

SEQ ID NO: 229237 - RNA, 25 nt, Human
cagcacccaagccaccaccgaagcc

SEQ ID NO: 229238 - RNA, 24 nt, Human
cagcuggugggcaggaggcugugg

SEQ ID NO: 229239 - RNA, 18 nt, Human
caggcccuggaacacccu

SEQ ID NO: 229240 - RNA, 20 nt, Human
cagggccagcucgugcucuc

SEQ ID NO: 229241 - RNA, 23 nt, Human
cauggucaccuucucacugccca

SEQ ID NO: 229242 - RNA, 22 nt, Human
ccaccaccauauccucccccaa

SEQ ID NO: 229243 - RNA, 23 nt, Human
ccaccacccaagccagcacccaa

SEQ ID NO: 229244 - RNA, 22 nt, Human
ccaccaccgaagccagcaccaa

SEQ ID NO: 229245 - RNA, 21 nt, Human
ccacgccaggugcggcauccg

SEQ ID NO: 229246 - RNA, 25 nt, Human
ccagaagcccaucaccaccagcaaa

SEQ ID NO: 229247 - RNA, 20 nt, Human
ccagcacccaagccaccacc

SEQ ID NO: 229248 - RNA, 22 nt, Human
ccagcacccaagccaccaccga

SEQ ID NO: 229249 - RNA, 21 nt, Human
ccaggacagaggagaugcggc

SEQ ID NO: 229250 - RNA, 22 nt, Human
cccaaaggagaagcgagagaag

SEQ ID NO: 229251 - RNA, 19 nt, Human
cccaccagaagcccaucac

SEQ ID NO: 229252 - RNA, 25 nt, Human
cccaucaccaccagcaaagccacca

SEQ ID NO: 229253 - RNA, 19 nt, Human
cccccaaaggagaagcgag

SEQ ID NO: 229254 - RNA, 20 nt, Human
ccccccagcccgcaggcucc

SEQ ID NO: 229255 - RNA, 22 nt, Human
ccccccagcccgcaggcucccc

SEQ ID NO: 229256 - RNA, 26 nt, Human
ccccccagcccgcaggcucccccaaa

SEQ ID NO: 229257 - RNA, 18 nt, Human
cccgcaggcucccccaaa

SEQ ID NO: 229258 - RNA, 22 nt, Human
ccgaugcugcccccgauacugc

SEQ ID NO: 229259 - RNA, 22 nt, Human
ccggucugaccucgcagagcaa

SEQ ID NO: 229260 - RNA, 25 nt, Human
ccuuccaucuccaucuccaggucag

SEQ ID NO: 229261 - RNA, 22 nt, Human
cgagagaaggagacacacaggc

SEQ ID NO: 229262 - RNA, 23 nt, Human
cgagagaaggagacacacaggcc

SEQ ID NO: 229263 - RNA, 21 nt, Human
cucgugcucucacuugguccu

SEQ ID NO: 229264 - RNA, 21 nt, Human
cucuguaccaguucacugcug

SEQ ID NO: 229265 - RNA, 19 nt, Human
cucugugguugugcuuugc

SEQ ID NO: 229266 - RNA, 23 nt, Human
cuucaggccuuccaucuccaucu

SEQ ID NO: 229267 - RNA, 18 nt, Human
cuuuauuagcccaucacc

SEQ ID NO: 229268 - RNA, 18 nt, Human
gaagccagcaccaaggcc

SEQ ID NO: 229269 - RNA, 22 nt, Human
gaagcccaucaccaccagcaaa

SEQ ID NO: 229270 - RNA, 19 nt, Human
gagcagggagacagcuggg

SEQ ID NO: 229271 - RNA, 22 nt, Human
gaggugaacugguggcugcagg

SEQ ID NO: 229272 - RNA, 21 nt, Human
gaggugaggccagcugguggg

SEQ ID NO: 229273 - RNA, 24 nt, Human
gcccuggaacacccucuggagcuc

SEQ ID NO: 229274 - RNA, 25 nt, Human
gcuccgucaccucacugcggcugcu

SEQ ID NO: 229275 - RNA, 24 nt, Human
gcucgugcucucacuugguccuga

SEQ ID NO: 229276 - RNA, 18 nt, Human
ggagacagcugggaacug

SEQ ID NO: 229277 - RNA, 18 nt, Human
ggcaggaggcugugguag

SEQ ID NO: 229278 - RNA, 23 nt, Human
gggagacagcugggaacugcacu

SEQ ID NO: 229279 - RNA, 19 nt, Human
gggcauggcaggacccucc

SEQ ID NO: 229280 - RNA, 20 nt, Human
ggggcauggcaggacccucc

SEQ ID NO: 229281 - RNA, 23 nt, Human
ggugggcaggaggcugugguaga

SEQ ID NO: 229282 - RNA, 20 nt, Human
gugccaaggagggaggugag

SEQ ID NO: 229283 - RNA, 19 nt, Human
gugguugugcuuugccauc

SEQ ID NO: 229284 - RNA, 22 nt, Human
uagccgccccccagcccgcagg

SEQ ID NO: 229285 - RNA, 19 nt, Human
uaggaggccaggcggucac

SEQ ID NO: 229286 - RNA, 23 nt, Human
uaggugcugggggcauggcagga

SEQ ID NO: 229287 - RNA, 21 nt, Human
uauccucccccaaagccacua

SEQ ID NO: 229288 - RNA, 25 nt, Human
ucaccaccagcaaagccaccaccca

SEQ ID NO: 229289 - RNA, 22 nt, Human
ucacuuccaggucggcguuggc

SEQ ID NO: 229290 - RNA, 19 nt, Human
ucagguccacgccaggugc

SEQ ID NO: 229291 - RNA, 18 nt, Human
ucaguccuggccaggguc

SEQ ID NO: 229292 - RNA, 21 nt, Human
ucaguccuggccagggucagc

SEQ ID NO: 229293 - RNA, 19 nt, Human
uccacagucagccgcaggg

SEQ ID NO: 229294 - RNA, 23 nt, Human
uccagguaggaggccaggcgguc

SEQ ID NO: 229295 - RNA, 24 nt, Human
ucccccaaaggagaagcgagagaa

SEQ ID NO: 229296 - RNA, 22 nt, Human
uccugaagucaucagcugccag

SEQ ID NO: 229297 - RNA, 18 nt, Human
ucucacuugguccugaag

SEQ ID NO: 229298 - RNA, 25 nt, Human
ugcaaaaugggcugcgcauucucaa

SEQ ID NO: 229299 - RNA, 21 nt, Human
ugccgaagccaccgccauagc

SEQ ID NO: 229300 - RNA, 19 nt, Human
ugcggcugcucuguaccag

SEQ ID NO: 229301 - RNA, 23 nt, Human
ugcucaucgugccaaggagggag

SEQ ID NO: 229302 - RNA, 19 nt, Human
ugcugggggcauggcagga

SEQ ID NO: 229303 - RNA, 25 nt, Human
ugucaaucugcaaaaugggcugcgc

SEQ ID NO: 229304 - RNA, 23 nt, Human
uucaggccuuccaucuccaucuc

SEQ ID NO: 229305 - RNA, 23 nt, Human
uugaaguagggacuguagucuuu

SEQ ID NO: 229306 - RNA, 20 nt, Human
uugguccugaagucaucagc

SEQ ID NO: 229307 - RNA, 18 nt, Human
aagcagggggcugaggcu

SEQ ID NO: 229308 - RNA, 21 nt, Human
aggcaggcacacaggagaagg

SEQ ID NO: 229309 - RNA, 23 nt, Human
caggcacacaggagaagggcugg

SEQ ID NO: 229310 - RNA, 19 nt, Human
cugcucccugccuccuggg

SEQ ID NO: 229311 - RNA, 18 nt, Human
gaagcauggggaagggac

SEQ ID NO: 229312 - RNA, 21 nt, Human
gaagcauggggaagggacuga

SEQ ID NO: 229313 - RNA, 23 nt, Human
ggcaaggaagcauggggaaggga

SEQ ID NO: 229314 - RNA, 25 nt, Human
ggggcugaggcuggaggauaccgug

SEQ ID NO: 229315 - RNA, 24 nt, Human
guggcggcggcaggaggcaggcac

SEQ ID NO: 229316 - RNA, 21 nt, Human
uggggaagggacugaagcagg

SEQ ID NO: 229317 - RNA, 22 nt, Human
uggggcagauggggcggcugcu

SEQ ID NO: 229318 - RNA, 20 nt, Human
aaggacaggacucaggcuuu

SEQ ID NO: 229319 - RNA, 23 nt, Human
agagagaaaggacaggacucagg

SEQ ID NO: 229320 - RNA, 21 nt, Human
gagaaaggacaggacucaggc

SEQ ID NO: 229321 - RNA, 18 nt, Human
gccuccugcuccccaaag

SEQ ID NO: 229322 - RNA, 18 nt, Human
ggacaggacucaggcuuu

SEQ ID NO: 229323 - RNA, 23 nt, Human
ggacaggacucaggcuuugcgga

SEQ ID NO: 229324 - RNA, 20 nt, Human
uguccggggagagagaaagg

SEQ ID NO: 229325 - RNA, 23 nt, Human
aaaggacagcagaagccccagag

SEQ ID NO: 229326 - RNA, 25 nt, Human
caaaggacagcagaagccccagagc

SEQ ID NO: 229327 - RNA, 19 nt, Human
cagaagacacccuccaaag

SEQ ID NO: 229328 - RNA, 23 nt, Human
caggagaagagccggggguaagg

SEQ ID NO: 229329 - RNA, 19 nt, Human
cccaucccucuacccagaa

SEQ ID NO: 229330 - RNA, 19 nt, Human
cccuuccuucccaucccuc

SEQ ID NO: 229331 - RNA, 21 nt, Human
ccggggguaagggucccuucc

SEQ ID NO: 229332 - RNA, 23 nt, Human
ccuucccaucccucuacccagaa

SEQ ID NO: 229333 - RNA, 25 nt, Human
cucuacccagaagacacccuccaaa

SEQ ID NO: 229334 - RNA, 19 nt, Human
gcggagcacggacggagca

SEQ ID NO: 229335 - RNA, 21 nt, Human
ggagaagagccggggguaagg

SEQ ID NO: 229336 - RNA, 20 nt, Human
uccaaaggacagcagaagcc

SEQ ID NO: 229337 - RNA, 19 nt, Human
ucccaucccucuacccaga

SEQ ID NO: 229338 - RNA, 19 nt, Human
ucccaucccucuacccaga

SEQ ID NO: 229339 - RNA, 19 nt, Human
aaagugccaucagagauaa

SEQ ID NO: 229340 - RNA, 21 nt, Human
aacacauuuccccccagcacu

SEQ ID NO: 229341 - RNA, 22 nt, Human
aagaucuuucaaaaacuguaug

SEQ ID NO: 229342 - RNA, 19 nt, Human
aagcacaaaccuagacagc

SEQ ID NO: 229343 - RNA, 22 nt, Human
acacagaaacacauuucccccc

SEQ ID NO: 229344 - RNA, 21 nt, Human
accacagcacuuccgaaagca

SEQ ID NO: 229345 - RNA, 18 nt, Human
agacagcacagauuccgc

SEQ ID NO: 229346 - RNA, 19 nt, Human
agagucggugguggugggg

SEQ ID NO: 229347 - RNA, 22 nt, Human
agugccaucagagauaaaugac

SEQ ID NO: 229348 - RNA, 25 nt, Human
aucuggaaaaugggcaaugcaaagg

SEQ ID NO: 229349 - RNA, 24 nt, Human
caaaccuagacagcacagauuccg

SEQ ID NO: 229350 - RNA, 20 nt, Human
caacagaauacacaucugga

SEQ ID NO: 229351 - RNA, 26 nt, Human
caagaggagcuauauacacagaaaca

SEQ ID NO: 229352 - RNA, 20 nt, Human
cacagauuccgccccagaac

SEQ ID NO: 229353 - RNA, 20 nt, Human
cagaacacagaggcgucacu

SEQ ID NO: 229354 - RNA, 25 nt, Human
cagaauacacaucuggaaaaugggc

SEQ ID NO: 229355 - RNA, 19 nt, Human
cagaccacagcacuuccga

SEQ ID NO: 229356 - RNA, 20 nt, Human
cagauuccgccccagaacac

SEQ ID NO: 229357 - RNA, 19 nt, Human
ccagaacacagaggcguca

SEQ ID NO: 229358 - RNA, 20 nt, Human
ccagaacacagaggcgucac

SEQ ID NO: 229359 - RNA, 23 nt, Human
cccagaacacagaggcgucacug

SEQ ID NO: 229360 - RNA, 22 nt, Human
ccccagaacacagaggcgucac

SEQ ID NO: 229361 - RNA, 22 nt, Human
cccccagaccacagcacuuccg

SEQ ID NO: 229362 - RNA, 19 nt, Human
cuuccgaaagcagagugga

SEQ ID NO: 229363 - RNA, 22 nt, Human
gcacaaaccuagacagcacaga

SEQ ID NO: 229364 - RNA, 22 nt, Human
uaacugguuuggagagaagauc

SEQ ID NO: 229365 - RNA, 23 nt, Human
uaacugguuuggagagaagaucu

SEQ ID NO: 229366 - RNA, 19 nt, Human
uagaagcacaaaccuagac

SEQ ID NO: 229367 - RNA, 23 nt, Human
uauuaugaagacccccagaccac

SEQ ID NO: 229368 - RNA, 23 nt, Human
ucggugguggugggggcucaucu

SEQ ID NO: 229369 - RNA, 19 nt, Human
ucuggguugggagagucgg

SEQ ID NO: 229370 - RNA, 24 nt, Human
ugacaaaaauuuaacuugcugcca

SEQ ID NO: 229371 - RNA, 18 nt, Human
uggcuagaagcacaaacc

SEQ ID NO: 229372 - RNA, 25 nt, Human
uggguccucaacagaauacacaucu

SEQ ID NO: 229373 - RNA, 21 nt, Human
uggguugggagagucgguggu

SEQ ID NO: 229374 - RNA, 20 nt, Human
agcggaggggaggcgcugga

SEQ ID NO: 229375 - RNA, 21 nt, Human
aggccacagccuuccagcgca

SEQ ID NO: 229376 - RNA, 24 nt, Human
cacaccuggacaaucacaggcugg

SEQ ID NO: 229377 - RNA, 21 nt, Human
cccagggaggggacuccgggg

SEQ ID NO: 229378 - RNA, 18 nt, Human
gacagaccggaggggcgg

SEQ ID NO: 229379 - RNA, 20 nt, Human
gcgcagagccgcguucuugg

SEQ ID NO: 229380 - RNA, 20 nt, Human
gcgccuaggccacaccugga

SEQ ID NO: 229381 - RNA, 24 nt, Human
ggccggggaucuggaaggaggagc

SEQ ID NO: 229382 - RNA, 21 nt, Human
gggaggcgcuggaguggcugc

SEQ ID NO: 229383 - RNA, 23 nt, Human
gggcggagggggcugugugcuuc

SEQ ID NO: 229384 - RNA, 20 nt, Human
ugaaauucucgugacugggc

SEQ ID NO: 229385 - RNA, 19 nt, Human
uggcgccuaggccacaccu

SEQ ID NO: 229386 - RNA, 19 nt, Human
uggggagcggaggggaggc

SEQ ID NO: 229387 - RNA, 19 nt, Human
uggggagcggaggggaggc

SEQ ID NO: 229388 - RNA, 20 nt, Human
ugggggcguggggagcggag

SEQ ID NO: 229389 - RNA, 18 nt, Human
uguagugagcaucccacc

SEQ ID NO: 229390 - RNA, 24 nt, Human
uucucgugacugggcuuggccggg

SEQ ID NO: 229391 - RNA, 23 nt, Human
aaagcauuuuauugaagauucac

SEQ ID NO: 229392 - RNA, 20 nt, Human
aagccccugccugggcccag

SEQ ID NO: 229393 - RNA, 27 nt, Human
acaccccaucacccauccucucacccc

SEQ ID NO: 229394 - RNA, 20 nt, Human
accaaacuccaagaggcaga

SEQ ID NO: 229395 - RNA, 18 nt, Human
acuaagugguucucaucc

SEQ ID NO: 229396 - RNA, 19 nt, Human
agcgcacagccugccaccu

SEQ ID NO: 229397 - RNA, 21 nt, Human
agcuggacacagugagcugca

SEQ ID NO: 229398 - RNA, 19 nt, Human
agugaaggaagcacagaga

SEQ ID NO: 229399 - RNA, 19 nt, Human
aucacacuacucucuggga

SEQ ID NO: 229400 - RNA, 20 nt, Human
auguccuggagcagcagggc

SEQ ID NO: 229401 - RNA, 22 nt, Human
caagcccauccuucccgcaccc

SEQ ID NO: 229402 - RNA, 20 nt, Human
cacagcaccucccuccucca

SEQ ID NO: 229403 - RNA, 18 nt, Human
cacccauccucucacccc

SEQ ID NO: 229404 - RNA, 19 nt, Human
cacccauccucucacccca

SEQ ID NO: 229405 - RNA, 22 nt, Human
cacccauccucucaccccacag

SEQ ID NO: 229406 - RNA, 24 nt, Human
caccccaucacccauccucucacc

SEQ ID NO: 229407 - RNA, 22 nt, Human
cagaagccccugccugggccca

SEQ ID NO: 229408 - RNA, 22 nt, Human
cagagaagugacagggcccagg

SEQ ID NO: 229409 - RNA, 20 nt, Human
cagcacagaagaucauccug

SEQ ID NO: 229410 - RNA, 21 nt, Human
cagcgcuccaggcccacaccc

SEQ ID NO: 229411 - RNA, 24 nt, Human
caucucgcuaggcucacagcaccu

SEQ ID NO: 229412 - RNA, 24 nt, Human
cauuuucuucucugcccaugggag

SEQ ID NO: 229413 - RNA, 20 nt, Human
ccacuguaccuccaucucgc

SEQ ID NO: 229414 - RNA, 24 nt, Human
ccagaaaagacaccccaucaccca

SEQ ID NO: 229415 - RNA, 21 nt, Human
ccaggcccacacccacuguac

SEQ ID NO: 229416 - RNA, 19 nt, Human
ccaggugggucaccaggcc

SEQ ID NO: 229417 - RNA, 25 nt, Human
cccacacccacuguaccuccaucuc

SEQ ID NO: 229418 - RNA, 23 nt, Human
cccacagaauguggaguuagaca

SEQ ID NO: 229419 - RNA, 18 nt, Human
cccagcgcuccaggccca

SEQ ID NO: 229420 - RNA, 22 nt, Human
ccccacagaauguggaguuaga

SEQ ID NO: 229421 - RNA, 26 nt, Human
ccccagagacagaggauggaggugaa

SEQ ID NO: 229422 - RNA, 19 nt, Human
ccccaucacccauccucuc

SEQ ID NO: 229423 - RNA, 22 nt, Human
cccugccugggcccagcgcucc

SEQ ID NO: 229424 - RNA, 26 nt, Human
ccuccagaaaagacaccccaucaccc

SEQ ID NO: 229425 - RNA, 21 nt, Human
ccugaacuggugccccagggc

SEQ ID NO: 229426 - RNA, 22 nt, Human
cguugagcaugucacuaaacac

SEQ ID NO: 229427 - RNA, 18 nt, Human
cuccaagaggcagagucc

SEQ ID NO: 229428 - RNA, 21 nt, Human
cugccugggcccagcgcucca

SEQ ID NO: 229429 - RNA, 18 nt, Human
cugggagcuaucagagaa

SEQ ID NO: 229430 - RNA, 19 nt, Human
cugggcccagcuggacaca

SEQ ID NO: 229431 - RNA, 20 nt, Human
gaagccccugccugggccca

SEQ ID NO: 229432 - RNA, 19 nt, Human
gacacagugagcugcaggg

SEQ ID NO: 229433 - RNA, 18 nt, Human
gagccccagagacagagg

SEQ ID NO: 229434 - RNA, 24 nt, Human
gaugagccccagagacagaggaug

SEQ ID NO: 229435 - RNA, 21 nt, Human
gcauaaagggaaaaaucugaa

SEQ ID NO: 229436 - RNA, 19 nt, Human
gcauuggacugggaaggga

SEQ ID NO: 229437 - RNA, 18 nt, Human
gcccaggccggugagugc

SEQ ID NO: 229438 - RNA, 19 nt, Human
gcccaggccggugagugcu

SEQ ID NO: 229439 - RNA, 20 nt, Human
gcccaugggaggugagaggu

SEQ ID NO: 229440 - RNA, 23 nt, Human
gcucacagcaccucccuccucca

SEQ ID NO: 229441 - RNA, 19 nt, Human
ggagaugacacuccugguc

SEQ ID NO: 229442 - RNA, 22 nt, Human
gggaagggacauaugugacccc

SEQ ID NO: 229443 - RNA, 23 nt, Human
gggucaccaggcccaaaucaaga

SEQ ID NO: 229444 - RNA, 18 nt, Human
uaagagggaaugagagga

SEQ ID NO: 229445 - RNA, 21 nt, Human
uaagagggaaugagaggagua

SEQ ID NO: 229446 - RNA, 24 nt, Human
uaagaugagccccagagacagagg

SEQ ID NO: 229447 - RNA, 25 nt, Human
uaagugguucucauccuaagcuugc

SEQ ID NO: 229448 - RNA, 18 nt, Human
uacuaguaagaugagccc

SEQ ID NO: 229449 - RNA, 18 nt, Human
uagaaugggacacuaagu

SEQ ID NO: 229450 - RNA, 24 nt, Human
ucacccauccucucaccccacaga

SEQ ID NO: 229451 - RNA, 25 nt, Human
ucacccauccucucaccccacagaa

SEQ ID NO: 229452 - RNA, 20 nt, Human
ucaccccacagaauguggag

SEQ ID NO: 229453 - RNA, 23 nt, Human
uccagaaaagacaccccaucacc

SEQ ID NO: 229454 - RNA, 22 nt, Human
uccuaaucagaagccccugccu

SEQ ID NO: 229455 - RNA, 19 nt, Human
uccuccagaaaagacaccc

SEQ ID NO: 229456 - RNA, 20 nt, Human
uccuggggcagagagagccc

SEQ ID NO: 229457 - RNA, 19 nt, Human
ucugaaacaucucugggcu

SEQ ID NO: 229458 - RNA, 23 nt, Human
ugacaaaagcauuuuauugaaga

SEQ ID NO: 229459 - RNA, 18 nt, Human
ugacagggcccaggccgg

SEQ ID NO: 229460 - RNA, 18 nt, Human
ugcagagagcgagcuggg

SEQ ID NO: 229461 - RNA, 21 nt, Human
uggagaugacacuccuggucu

SEQ ID NO: 229462 - RNA, 20 nt, Human
ugggagaaccugaacuggug

SEQ ID NO: 229463 - RNA, 21 nt, Human
ugggcccagcgcuccaggccc

SEQ ID NO: 229464 - RNA, 18 nt, Human
uggggcagagagagccca

SEQ ID NO: 229465 - RNA, 20 nt, Human
uggggcagagagagcccaug

SEQ ID NO: 229466 - RNA, 24 nt, Human
uggggcagagagagcccccccgag

SEQ ID NO: 229467 - RNA, 19 nt, Human
uguagauggauaauacagg

SEQ ID NO: 229468 - RNA, 22 nt, Human
uuccaggugggucaccaggccc

SEQ ID NO: 229469 - RNA, 20 nt, Human
uucucugcccaugggaggug

SEQ ID NO: 229470 - RNA, 26 nt, Human
uugcagggccaagugcugccgggugu

SEQ ID NO: 229471 - RNA, 18 nt, Human
aacacauucuggagguag

SEQ ID NO: 229472 - RNA, 18 nt, Human
acgggagaccaggggcug

SEQ ID NO: 229473 - RNA, 21 nt, Human
agguggcucuguuacccagga

SEQ ID NO: 229474 - RNA, 18 nt, Human
cacuuggaaggcagugac

SEQ ID NO: 229475 - RNA, 19 nt, Human
cagcaggacgcagaaggug

SEQ ID NO: 229476 - RNA, 19 nt, Human
cagcaggggccaugcugug

SEQ ID NO: 229477 - RNA, 23 nt, Human
ccaggaacggugaugcccccuuu

SEQ ID NO: 229478 - RNA, 19 nt, Human
gaggugcuggagagaacag

SEQ ID NO: 229479 - RNA, 21 nt, Human
ggaggugcuggagagaacaga

SEQ ID NO: 229480 - RNA, 19 nt, Human
ggauucuguuuugaugauu

SEQ ID NO: 229481 - RNA, 21 nt, Human
gguggcucuguuacccaggaa

SEQ ID NO: 229482 - RNA, 18 nt, Human
gugucagcaggggccaug

SEQ ID NO: 229483 - RNA, 19 nt, Human
ucuagacuacucuccagaa

SEQ ID NO: 229484 - RNA, 18 nt, Human
ucucgugucagcaggggc

SEQ ID NO: 229485 - RNA, 22 nt, Human
ugcccccuuuuuaucccuucca

SEQ ID NO: 229486 - RNA, 19 nt, Human
ugccuagaagaggcaaucu

SEQ ID NO: 229487 - RNA, 23 nt, Human
ugcugcacuuggaaggcagugac

SEQ ID NO: 229488 - RNA, 25 nt, Human
ugggaggugcuggagagaacagagc

SEQ ID NO: 229489 - RNA, 22 nt, Human
ugggauugggguggggauucug

SEQ ID NO: 229490 - RNA, 18 nt, Human
ugggcugggcgagagagg

SEQ ID NO: 229491 - RNA, 18 nt, Human
ugggguggggauucuguu

SEQ ID NO: 229492 - RNA, 20 nt, Human
agagagagagaagaagugag

SEQ ID NO: 229493 - RNA, 22 nt, Human
caggcuuuguacaucauaggac

SEQ ID NO: 229494 - RNA, 20 nt, Human
ccaggagaugagagagcuga

SEQ ID NO: 229495 - RNA, 23 nt, Human
ccccuggcaauuuucugcaauga

SEQ ID NO: 229496 - RNA, 28 nt, Human
ccucagagauagaacacuggaggcaagg

SEQ ID NO: 229497 - RNA, 23 nt, Human
cugcagccagagaggggccugag

SEQ ID NO: 229498 - RNA, 20 nt, Human
cuggcaauuuucugcaauga

SEQ ID NO: 229499 - RNA, 21 nt, Human
gagagagagagaagaagugag

SEQ ID NO: 229500 - RNA, 19 nt, Human
ggcucugcagccagagagg

SEQ ID NO: 229501 - RNA, 24 nt, Human
gggacagcaggggagacuggaggc

SEQ ID NO: 229502 - RNA, 21 nt, Human
uaacagugaagcuccaguggu

SEQ ID NO: 229503 - RNA, 24 nt, Human
uacaucaugauguaaaaucagagg

SEQ ID NO: 229504 - RNA, 19 nt, Human
uagaacacuggaggcaaga

SEQ ID NO: 229505 - RNA, 21 nt, Human
uagagaguuugagagccagug

SEQ ID NO: 229506 - RNA, 19 nt, Human
uccccagcucuaccuggga

SEQ ID NO: 229507 - RNA, 20 nt, Human
ugagagagcugaggagagug

SEQ ID NO: 229508 - RNA, 18 nt, Human
ugaggagagggcucugca

SEQ ID NO: 229509 - RNA, 18 nt, Human
ugcucagaugguauagag

SEQ ID NO: 229510 - RNA, 24 nt, Human
ugcucagccucagagauagaacac

SEQ ID NO: 229511 - RNA, 23 nt, Human
uggaaguuguucugaaauaagcc

SEQ ID NO: 229512 - RNA, 22 nt, Human
uuaguaacagugaagcuccagu

SEQ ID NO: 229513 - RNA, 21 nt, Human
uucacaacacuuauaaguuag

SEQ ID NO: 229514 - RNA, 22 nt, Human
uucuuauaaugcucagccucag

SEQ ID NO: 229515 - RNA, 19 nt, Human
aacagaacaaaagaaggca

SEQ ID NO: 229516 - RNA, 23 nt, Human
aauaauacgggaacuaaaaagga

SEQ ID NO: 229517 - RNA, 24 nt, Human
acacugcaagagaagaucaggacc

SEQ ID NO: 229518 - RNA, 21 nt, Human
acagaacaaaagaaggcaaag

SEQ ID NO: 229519 - RNA, 22 nt, Human
acccgggagggcaggggagacu

SEQ ID NO: 229520 - RNA, 21 nt, Human
agaacaaaagaaggcaaagag

SEQ ID NO: 229521 - RNA, 19 nt, Human
agaaggcaaagagagcagg

SEQ ID NO: 229522 - RNA, 18 nt, Human
agacugcaucagaaggua

SEQ ID NO: 229523 - RNA, 25 nt, Human
agagcugugggacugagagcuggcg

SEQ ID NO: 229524 - RNA, 20 nt, Human
agcuauaaugggcaggaugg

SEQ ID NO: 229525 - RNA, 23 nt, Human
agcucaguggaacagguauugau

SEQ ID NO: 229526 - RNA, 23 nt, Human
aggcaaagagagcagagaaagca

SEQ ID NO: 229527 - RNA, 21 nt, Human
aggggccugagagcugugggg

SEQ ID NO: 229528 - RNA, 22 nt, Human
caacagaacaaaagaaggcaaa

SEQ ID NO: 229529 - RNA, 22 nt, Human
cacuugccauucagggacacug

SEQ ID NO: 229530 - RNA, 19 nt, Human
cagcucuacccgggagggc

SEQ ID NO: 229531 - RNA, 18 nt, Human
cucugcugccagagaggg

SEQ ID NO: 229532 - RNA, 23 nt, Human
cugcugccagagaggggccugag

SEQ ID NO: 229533 - RNA, 22 nt, Human
gacugagagcuggcggcacgac

SEQ ID NO: 229534 - RNA, 19 nt, Human
gagcugugggacugagagc

SEQ ID NO: 229535 - RNA, 19 nt, Human
gaucaggacaacugacuug

SEQ ID NO: 229536 - RNA, 21 nt, Human
ggacugagagcuggcggcacg

SEQ ID NO: 229537 - RNA, 19 nt, Human
ggcaggggagacuggaggc

SEQ ID NO: 229538 - RNA, 19 nt, Human
ggcucugcugccagagagg

SEQ ID NO: 229539 - RNA, 24 nt, Human
guaagcaacaggagcucaguggaa

SEQ ID NO: 229540 - RNA, 23 nt, Human
ucaacagaacaaaagaaggcaaa

SEQ ID NO: 229541 - RNA, 18 nt, Human
ucugcagcuggaccuaga

SEQ ID NO: 229542 - RNA, 20 nt, Human
ucugcagcuggaccuagacu

SEQ ID NO: 229543 - RNA, 21 nt, Human
ugaggagagggcucugcugcc

SEQ ID NO: 229544 - RNA, 21 nt, Human
ugcaagagaagaucaggacaa

SEQ ID NO: 229545 - RNA, 21 nt, Human
ugcaagagaagaucaggacac

SEQ ID NO: 229546 - RNA, 20 nt, Human
ugccagagaggggccugaga

SEQ ID NO: 229547 - RNA, 22 nt, Human
cgggauggaccuagcggcgggc

SEQ ID NO: 229548 - RNA, 18 nt, Human
cuagcggcgggcgaggag

SEQ ID NO: 229549 - RNA, 19 nt, Human
gguggcugggccgggaugg

SEQ ID NO: 229550 - RNA, 19 nt, Human
aggcaggaguggaggcagg

SEQ ID NO: 229551 - RNA, 21 nt, Human
aggcaggcgggccgaaccagg

SEQ ID NO: 229552 - RNA, 23 nt, Human
agggguaggcugggaggggcugc

SEQ ID NO: 229553 - RNA, 25 nt, Human
agguaguaaacuccccaggugggcc

SEQ ID NO: 229554 - RNA, 23 nt, Human
ccaggugggcugagggcuagggc

SEQ ID NO: 229555 - RNA, 24 nt, Human
ccuccuucccaggcucuggggcag

SEQ ID NO: 229556 - RNA, 24 nt, Human
cuacccugcauagcggccuccuuc

SEQ ID NO: 229557 - RNA, 18 nt, Human
cugggaggggcugccgca

SEQ ID NO: 229558 - RNA, 19 nt, Human
gggccgaaccaggcggaga

SEQ ID NO: 229559 - RNA, 25 nt, Human
gggcuagggcugagccucagguggg

SEQ ID NO: 229560 - RNA, 31 nt, Human
guccccagguaguaaacuccccaggugggcc

SEQ ID NO: 229561 - RNA, 18 nt, Human
guggaggcaggcgggccg

SEQ ID NO: 229562 - RNA, 22 nt, Human
uagcggccuccuucccaggcuc

SEQ ID NO: 229563 - RNA, 22 nt, Human
uccccaggugggcugagggcua

SEQ ID NO: 229564 - RNA, 19 nt, Human
uggaccaaaaaaaaaaagc

SEQ ID NO: 229565 - RNA, 20 nt, Human
uucccaggcucuggggcagc

SEQ ID NO: 229566 - RNA, 20 nt, Human
uuggcagagcuagcugaggu

SEQ ID NO: 229567 - RNA, 24 nt, Human
uuuuguagcuggaggcaugggcaa

SEQ ID NO: 229568 - RNA, 18 nt, Human
aagccagaggcacauaug

SEQ ID NO: 229569 - RNA, 18 nt, Human
accccaggccagagagag

SEQ ID NO: 229570 - RNA, 18 nt, Human
acccugaaggcaucaaag

SEQ ID NO: 229571 - RNA, 28 nt, Human
acccugaaggcaucaaagccaagcaggg

SEQ ID NO: 229572 - RNA, 22 nt, Human
agcaccccaggccagagagagg

SEQ ID NO: 229573 - RNA, 24 nt, Human
aggguuggaagccaauggaaagcc

SEQ ID NO: 229574 - RNA, 23 nt, Human
caggccagagagaggaaagaggu

SEQ ID NO: 229575 - RNA, 20 nt, Human
ccaagcaggguuggaagcca

SEQ ID NO: 229576 - RNA, 23 nt, Human
cgaaaggaagccuuuugucucau

SEQ ID NO: 229577 - RNA, 18 nt, Human
cugaaggcaucaaagcca

SEQ ID NO: 229578 - RNA, 22 nt, Human
cuuguugccagcuauuccugau

SEQ ID NO: 229579 - RNA, 21 nt, Human
gaaaggaagccuuuugucuca

SEQ ID NO: 229580 - RNA, 18 nt, Human
gaagcagugauaggagug

SEQ ID NO: 229581 - RNA, 25 nt, Human
gaagccaauggaaagccagaggcac

SEQ ID NO: 229582 - RNA, 18 nt, Human
gcucagcuggggcugggc

SEQ ID NO: 229583 - RNA, 21 nt, Human
gggcacaggggcuuguugcca

SEQ ID NO: 229584 - RNA, 23 nt, Human
gggcaggagaaguuuacagaggc

SEQ ID NO: 229585 - RNA, 21 nt, Human
uaugccaagucaguucagucc

SEQ ID NO: 229586 - RNA, 19 nt, Human
ugagaagcagugauaggag

SEQ ID NO: 229587 - RNA, 20 nt, Human
ugccaagucaguucaguccc

SEQ ID NO: 229588 - RNA, 21 nt, Human
ugcucagcuggggcugggcag

SEQ ID NO: 229589 - RNA, 22 nt, Human
ugcucagcuggggcugggcagg

SEQ ID NO: 229590 - RNA, 25 nt, Human
uggaaagccagaggcacauaugcca

SEQ ID NO: 229591 - RNA, 25 nt, Human
ugucaggauccaauaagcaggcuuc

SEQ ID NO: 229592 - RNA, 21 nt, Human
uugagaagcagugauaggagu

SEQ ID NO: 229593 - RNA, 20 nt, Human
aggaacagacccccaggaag

SEQ ID NO: 229594 - RNA, 24 nt, Human
aggaaggaacagacccccaggaaa

SEQ ID NO: 229595 - RNA, 22 nt, Human
aggcuuugggugaguuucuugg

SEQ ID NO: 229596 - RNA, 22 nt, Human
agugcugggagggagggaggga

SEQ ID NO: 229597 - RNA, 22 nt, Human
cauaggaaggaacagaccccca

SEQ ID NO: 229598 - RNA, 22 nt, Human
cccccaggaaggaaagggugag

SEQ ID NO: 229599 - RNA, 19 nt, Human
cccugcauccuugcuccuc

SEQ ID NO: 229600 - RNA, 18 nt, Human
ccuuacgcgggcaacucc

SEQ ID NO: 229601 - RNA, 28 nt, Human
cgggcaacuccagccaugcaaaugaugu

SEQ ID NO: 229602 - RNA, 22 nt, Human
cugggcccugcauccuugcucc

SEQ ID NO: 229603 - RNA, 25 nt, Human
gcuuugggugaguuucuuggcugcc

SEQ ID NO: 229604 - RNA, 19 nt, Human
ggaggcuacaggcuuuggg

SEQ ID NO: 229605 - RNA, 26 nt, Human
ggcuuugggugaguuucuuggcugcc

SEQ ID NO: 229606 - RNA, 19 nt, Human
uaaaagggaggcccacugg

SEQ ID NO: 229607 - RNA, 20 nt, Human
uaggaaggaacagaccccca

SEQ ID NO: 229608 - RNA, 23 nt, Human
ucacagcucuggaguccugggcc

SEQ ID NO: 229609 - RNA, 18 nt, Human
uccucuggcauucccuag

SEQ ID NO: 229610 - RNA, 24 nt, Human
uccugggcccugcauccuugcucc

SEQ ID NO: 229611 - RNA, 23 nt, Human
uccuugcuccucuggcauucccu

SEQ ID NO: 229612 - RNA, 22 nt, Human
ugaagacagagucuaaauucuc

SEQ ID NO: 229613 - RNA, 23 nt, Human
ugccuuacgcgggcaacuccagc

SEQ ID NO: 229614 - RNA, 18 nt, Human
uggcugaagacagagucu

SEQ ID NO: 229615 - RNA, 24 nt, Human
uuacgcgggcaacuccagccaugc

SEQ ID NO: 229616 - RNA, 18 nt, Human
uucaggccccuuuuguug

SEQ ID NO: 229617 - RNA, 19 nt, Human
uuuuuuuuuuuuuugccaa

SEQ ID NO: 229618 - RNA, 23 nt, Human
uuuuuuuuuuuuuuuugccaagg

SEQ ID NO: 229619 - RNA, 18 nt, Human
uuuuuuuuuuuuuuuuug

SEQ ID NO: 229620 - RNA, 22 nt, Human
uuuuuuuuuuuuuuuuugccaa

SEQ ID NO: 229621 - RNA, 23 nt, Human
aaaaagaggcaguuuugaaguga

SEQ ID NO: 229622 - RNA, 25 nt, Human
aacacacgcucuuugaggcagcaca

SEQ ID NO: 229623 - RNA, 22 nt, Human
agaaacaucaccaaagagaaca

SEQ ID NO: 229624 - RNA, 20 nt, Human
agcacagacaaccagaaaca

SEQ ID NO: 229625 - RNA, 20 nt, Human
aggcugcccagccccaggcc

SEQ ID NO: 229626 - RNA, 23 nt, Human
cacagacaaccagaaacaucacc

SEQ ID NO: 229627 - RNA, 19 nt, Human
caccaaagagaacaguuca

SEQ ID NO: 229628 - RNA, 20 nt, Human
cagcacagacaaccagaaac

SEQ ID NO: 229629 - RNA, 22 nt, Human
cagcacagacaaccagaaacau

SEQ ID NO: 229630 - RNA, 26 nt, Human
ccacugaauaccaggcugcccagccc

SEQ ID NO: 229631 - RNA, 21 nt, Human
ccagaaacaucaccaaagaga

SEQ ID NO: 229632 - RNA, 22 nt, Human
ggcccugcucuucugguggcca

SEQ ID NO: 229633 - RNA, 24 nt, Human
ggcccugcucuucugguggccacc

SEQ ID NO: 229634 - RNA, 26 nt, Human
uaccaggcugcccagccccaggcccu

SEQ ID NO: 229635 - RNA, 21 nt, Human
ucaccaaagagaacaguucac

SEQ ID NO: 229636 - RNA, 18 nt, Human
ucagagcuuguugcaggu

SEQ ID NO: 229637 - RNA, 20 nt, Human
ucagggucuuccuugcugac

SEQ ID NO: 229638 - RNA, 23 nt, Human
uccucagccacagcuaccuggau

SEQ ID NO: 229639 - RNA, 21 nt, Human
ucuccucagccacagcuaccu

SEQ ID NO: 229640 - RNA, 18 nt, Human
ugaagugaugagggcuua

SEQ ID NO: 229641 - RNA, 24 nt, Human
uugcugaccggggcuggcccugcu

SEQ ID NO: 229642 - RNA, 22 nt, Human
ggugcagggagggaguguccag

SEQ ID NO: 229643 - RNA, 25 nt, Human
aaaaaggaaaacaggaaaugcagua

SEQ ID NO: 229644 - RNA, 22 nt, Human
aaacaaacaggcucgacccuca

SEQ ID NO: 229645 - RNA, 23 nt, Human
aaacaaacaggcucgacccucaa

SEQ ID NO: 229646 - RNA, 24 nt, Human
aaacaaacaggcucgacccucaac

SEQ ID NO: 229647 - RNA, 21 nt, Human
aacaggaaggaguuguccaga

SEQ ID NO: 229648 - RNA, 19 nt, Human
aacaggaaggaguuguccg

SEQ ID NO: 229649 - RNA, 22 nt, Human
aagaaaaaaggaaaacaggaaa

SEQ ID NO: 229650 - RNA, 26 nt, Human
acaggaaggaguuguccagacauugg

SEQ ID NO: 229651 - RNA, 24 nt, Human
agaaaaaaggaaaacaggaaaugc

SEQ ID NO: 229652 - RNA, 23 nt, Human
agaaacaaacaggcucgacccuc

SEQ ID NO: 229653 - RNA, 25 nt, Human
agaaacaaacaggcucgacccucaa

SEQ ID NO: 229654 - RNA, 21 nt, Human
agaggcaagaugagguuucuu

SEQ ID NO: 229655 - RNA, 20 nt, Human
agcugagcuccagaaaaguc

SEQ ID NO: 229656 - RNA, 25 nt, Human
aggaaggaguuguccagacauugga

SEQ ID NO: 229657 - RNA, 18 nt, Human
aggcaagaugagguuucu

SEQ ID NO: 229658 - RNA, 22 nt, Human
auuccagagaaugccaaagaaa

SEQ ID NO: 229659 - RNA, 20 nt, Human
cagagaaaugaaguuuauug

SEQ ID NO: 229660 - RNA, 24 nt, Human
caggaaacaccuuaaguaguaacu

SEQ ID NO: 229661 - RNA, 18 nt, Human
caggaaaugcaguaguac

SEQ ID NO: 229662 - RNA, 18 nt, Human
ccagagaaugccaaagaa

SEQ ID NO: 229663 - RNA, 20 nt, Human
gaaguugaugaugugugucu

SEQ ID NO: 229664 - RNA, 21 nt, Human
gcuugggucaggaaagcuuuu

SEQ ID NO: 229665 - RNA, 24 nt, Human
gcuugggucaggaaagcuuuucag

SEQ ID NO: 229666 - RNA, 19 nt, Human
ggaaaugcaguaguacguu

SEQ ID NO: 229667 - RNA, 20 nt, Human
uagaaacaaacaggcucgac

SEQ ID NO: 229668 - RNA, 18 nt, Human
uagaaauaacauagaggc

SEQ ID NO: 229669 - RNA, 24 nt, Human
uagaggcaagaugagguuucuuga

SEQ ID NO: 229670 - RNA, 20 nt, Human
ugagcuccagaaaagucagg

SEQ ID NO: 229671 - RNA, 23 nt, Human
ugccaaagaaaaaaggaaaacag

SEQ ID NO: 229672 - RNA, 21 nt, Human
ugugugucuuugcuuggguca

SEQ ID NO: 229673 - RNA, 28 nt, Human
uuagaaacaaacaggcucgacccucaac

SEQ ID NO: 229674 - RNA, 23 nt, Human
uuccagagaaugccaaagaaaaa

SEQ ID NO: 229675 - RNA, 18 nt, Human
aagacucaucuccaccac

SEQ ID NO: 229676 - RNA, 21 nt, Human
accagucucauaaaauaggag

SEQ ID NO: 229677 - RNA, 22 nt, Human
acccuggcacccauugaaauga

SEQ ID NO: 229678 - RNA, 23 nt, Human
agacccuggcacccauugaaaug

SEQ ID NO: 229679 - RNA, 20 nt, Human
agccauggccaucuggguca

SEQ ID NO: 229680 - RNA, 19 nt, Human
aggcaucaggggccugagc

SEQ ID NO: 229681 - RNA, 25 nt, Human
aggccagacaccccaaagcagagaa

SEQ ID NO: 229682 - RNA, 21 nt, Human
auugauaggucucugaggcca

SEQ ID NO: 229683 - RNA, 21 nt, Human
cagaauccaccggaacagcac

SEQ ID NO: 229684 - RNA, 22 nt, Human
cagagaagcagcuccuuacccc

SEQ ID NO: 229685 - RNA, 18 nt, Human
cagcaccuagaaggaaaa

SEQ ID NO: 229686 - RNA, 21 nt, Human
cagcaccuagaaggaaaaccu

SEQ ID NO: 229687 - RNA, 23 nt, Human
cagccagacccugggccugggcu

SEQ ID NO: 229688 - RNA, 22 nt, Human
ccacuggccccuccugggcucu

SEQ ID NO: 229689 - RNA, 19 nt, Human
ccagacaccccaaagcaga

SEQ ID NO: 229690 - RNA, 21 nt, Human
ccagugggcauugguuggccu

SEQ ID NO: 229691 - RNA, 21 nt, Human
ccccacuggccccuccugggc

SEQ ID NO: 229692 - RNA, 21 nt, Human
cgaguggagcccccacuggcc

SEQ ID NO: 229693 - RNA, 22 nt, Human
cucaucuccaccaccccacauc

SEQ ID NO: 229694 - RNA, 26 nt, Human
cugagaacagagacccuggcacccau

SEQ ID NO: 229695 - RNA, 19 nt, Human
cuuuucagccagacccugg

SEQ ID NO: 229696 - RNA, 19 nt, Human
gacaccccaaagcagagaa

SEQ ID NO: 229697 - RNA, 22 nt, Human
gagaacagagacccuggcaccc

SEQ ID NO: 229698 - RNA, 19 nt, Human
gagcccccacuggccccuc

SEQ ID NO: 229699 - RNA, 23 nt, Human
ggaggcagccugagaacagagac

SEQ ID NO: 229700 - RNA, 22 nt, Human
uaaguuuggguagaggccaagu

SEQ ID NO: 229701 - RNA, 25 nt, Human
uagaaggaaaaccugacccaggagg

SEQ ID NO: 229702 - RNA, 21 nt, Human
uagggcauguauuugcagaaa

SEQ ID NO: 229703 - RNA, 23 nt, Human
ucaagacucaucuccaccacccc

SEQ ID NO: 229704 - RNA, 23 nt, Human
ucacugggaagaccaagucccug

SEQ ID NO: 229705 - RNA, 21 nt, Human
ucugaggccagacaccccaaa

SEQ ID NO: 229706 - RNA, 23 nt, Human
ucugaggccagacaccccaaagc

SEQ ID NO: 229707 - RNA, 18 nt, Human
ugacaggcucugagaaac

SEQ ID NO: 229708 - RNA, 19 nt, Human
ugacccaggaggcagccug

SEQ ID NO: 229709 - RNA, 19 nt, Human
ugaggaguugagaccuuug

SEQ ID NO: 229710 - RNA, 21 nt, Human
ugaggaguugagaccuuuggg

SEQ ID NO: 229711 - RNA, 23 nt, Human
ugaugaggaguugagaccuuugg

SEQ ID NO: 229712 - RNA, 23 nt, Human
uggagcccccacuggccccuccu

SEQ ID NO: 229713 - RNA, 21 nt, Human
ugugaaaauuuaccagucuca

SEQ ID NO: 229714 - RNA, 20 nt, Human
uuccugugaaaauuuaccag

SEQ ID NO: 229715 - RNA, 25 nt, Human
uucuccucauuaaaguuaacaccac

SEQ ID NO: 229716 - RNA, 20 nt, Human
aagaagagacaccaggaaaa

SEQ ID NO: 229717 - RNA, 21 nt, Human
aagcaauguugacaaaucuga

SEQ ID NO: 229718 - RNA, 23 nt, Human
aagccuccucuccucccaacccu

SEQ ID NO: 229719 - RNA, 23 nt, Human
accaggaaaaauaauugcuuuca

SEQ ID NO: 229720 - RNA, 23 nt, Human
agacugaagccuccucuccuccc

SEQ ID NO: 229721 - RNA, 22 nt, Human
agccuccucuccucccaacccu

SEQ ID NO: 229722 - RNA, 22 nt, Human
aggagguuuauugaccauuuaa

SEQ ID NO: 229723 - RNA, 24 nt, Human
caacaaacaccagcaguugauuca

SEQ ID NO: 229724 - RNA, 18 nt, Human
ccugggcggguguuggcu

SEQ ID NO: 229725 - RNA, 22 nt, Human
ccugggcggguguuggcuccag

SEQ ID NO: 229726 - RNA, 18 nt, Human
cucuuccauaucagguua

SEQ ID NO: 229727 - RNA, 19 nt, Human
cugaagccuccucuccucc

SEQ ID NO: 229728 - RNA, 18 nt, Human
cugaggcugcacaggagc

SEQ ID NO: 229729 - RNA, 21 nt, Human
gaugccucuuggcucuuccau

SEQ ID NO: 229730 - RNA, 21 nt, Human
ggugggaagucagagacucac

SEQ ID NO: 229731 - RNA, 19 nt, Human
guuacucagcugcugaguu

SEQ ID NO: 229732 - RNA, 21 nt, Human
uaccaagaagagacaccagga

SEQ ID NO: 229733 - RNA, 19 nt, Human
uaccaugagaaguuccuca

SEQ ID NO: 229734 - RNA, 25 nt, Human
ucccaacccuuuuauaccccauccu

SEQ ID NO: 229735 - RNA, 22 nt, Human
uccucccaacccuuuuauaccc

SEQ ID NO: 229736 - RNA, 19 nt, Human
ugcagggaacccaguuaca

SEQ ID NO: 229737 - RNA, 21 nt, Human
uggugccaucauccuguuacu

SEQ ID NO: 229738 - RNA, 23 nt, Human
uuacaacauuuuagcaacaacca

SEQ ID NO: 229739 - RNA, 19 nt, Human
uuagggaaaaugccucagu

SEQ ID NO: 229740 - RNA, 18 nt, Human
uugaccuccugccuugau

SEQ ID NO: 229741 - RNA, 23 nt, Human
uuggcuccagugcuuugaccucc

SEQ ID NO: 229742 - RNA, 24 nt, Human
aaacaacccaagaaaugugggaaa

SEQ ID NO: 229743 - RNA, 24 nt, Human
aacuuuccuguuggucaguggugu

SEQ ID NO: 229744 - RNA, 24 nt, Human
aagaagcaaaguuauagccaucag

SEQ ID NO: 229745 - RNA, 23 nt, Human
aauguuagaaacaacccaagaaa

SEQ ID NO: 229746 - RNA, 18 nt, Human
acccugaaguagagaaaa

SEQ ID NO: 229747 - RNA, 21 nt, Human
acccugaaguagagaaaacuc

SEQ ID NO: 229748 - RNA, 23 nt, Human
agacugaagccuccucuccuccc

SEQ ID NO: 229749 - RNA, 18 nt, Human
agauagggaggcaggagg

SEQ ID NO: 229750 - RNA, 23 nt, Human
aggaacagaaaggccaguguggc

SEQ ID NO: 229751 - RNA, 18 nt, Human
aggagaagggaauuagaa

SEQ ID NO: 229752 - RNA, 22 nt, Human
aggauuugauacaaggaaaguu

SEQ ID NO: 229753 - RNA, 20 nt, Human
aggcaggaggauaggagaag

SEQ ID NO: 229754 - RNA, 18 nt, Human
aucauacuuagcaaaucu

SEQ ID NO: 229755 - RNA, 20 nt, Human
cauagcaagaagcuauggaa

SEQ ID NO: 229756 - RNA, 20 nt, Human
ccaggcugccaauguuagaa

SEQ ID NO: 229757 - RNA, 23 nt, Human
ccccagagagaaggaagagcagg

SEQ ID NO: 229758 - RNA, 23 nt, Human
cccugguaucucauagccuuugg

SEQ ID NO: 229759 - RNA, 18 nt, Human
ccugggcggguguuggcu

SEQ ID NO: 229760 - RNA, 22 nt, Human
ccuuaugccucuccaauccaga

SEQ ID NO: 229761 - RNA, 18 nt, Human
cuccaggcauguccaagg

SEQ ID NO: 229762 - RNA, 21 nt, Human
cucuuuggguaucccucgccu

SEQ ID NO: 229763 - RNA, 19 nt, Human
cugaagccuccucuccucc

SEQ ID NO: 229764 - RNA, 18 nt, Human
cugaggcugcacaggagc

SEQ ID NO: 229765 - RNA, 23 nt, Human
cuggagagucagaauuuauagag

SEQ ID NO: 229766 - RNA, 19 nt, Human
gagggggaagagcacccca

SEQ ID NO: 229767 - RNA, 21 nt, Human
gaugggaggucagaagcuuuu

SEQ ID NO: 229768 - RNA, 24 nt, Human
gccccuguggguccacaggaauug

SEQ ID NO: 229769 - RNA, 21 nt, Human
gccuccucuccucccagcccu

SEQ ID NO: 229770 - RNA, 20 nt, Human
gcugcaauccagccacugag

SEQ ID NO: 229771 - RNA, 24 nt, Human
ggaaaucucagacagugaagucug

SEQ ID NO: 229772 - RNA, 19 nt, Human
ggggaagagcaccccagag

SEQ ID NO: 229773 - RNA, 19 nt, Human
guuacucagcugcugaguu

SEQ ID NO: 229774 - RNA, 21 nt, Human
uaaggagggggaagagcaccc

SEQ ID NO: 229775 - RNA, 22 nt, Human
uacaauucugauucuauuuccc

SEQ ID NO: 229776 - RNA, 21 nt, Human
uacagaaaguuagaagccaga

SEQ ID NO: 229777 - RNA, 23 nt, Human
uagaaaagacagggucagguaca

SEQ ID NO: 229778 - RNA, 23 nt, Human
uauagagaaaaaagagagaaauu

SEQ ID NO: 229779 - RNA, 23 nt, Human
ucauagccuuuggacaggccuau

SEQ ID NO: 229780 - RNA, 23 nt, Human
uccaagauagggaggcaggagga

SEQ ID NO: 229781 - RNA, 22 nt, Human
uccucccagcccuuuuauaccc

SEQ ID NO: 229782 - RNA, 21 nt, Human
ucuggagagucagaauuuaua

SEQ ID NO: 229783 - RNA, 22 nt, Human
ugaaccacugagacugaagccu

SEQ ID NO: 229784 - RNA, 23 nt, Human
ugaagugcaagugcaauuuuaaa

SEQ ID NO: 229785 - RNA, 21 nt, Human
ugccaauguuagaaacaaccc

SEQ ID NO: 229786 - RNA, 23 nt, Human
ugggaaaaccaagagcaggaaag

SEQ ID NO: 229787 - RNA, 27 nt, Human
uggguaucccucgccuuagccagcccc

SEQ ID NO: 229788 - RNA, 26 nt, Human
ugguaaggaagguagagaguaugaag

SEQ ID NO: 229789 - RNA, 21 nt, Human
uggugccaucauccuguuacu

SEQ ID NO: 229790 - RNA, 19 nt, Human
uguugggcugaggcugcac

SEQ ID NO: 229791 - RNA, 18 nt, Human
uuauaaggagggggaaga

SEQ ID NO: 229792 - RNA, 22 nt, Human
uucaggagaaaguacuagaaaa

SEQ ID NO: 229793 - RNA, 18 nt, Human
uugaccuccugccuugau

SEQ ID NO: 229794 - RNA, 23 nt, Human
uuggcuccaaugcuuugaccucc

SEQ ID NO: 229795 - RNA, 22 nt, Human
uuuauagagaaaaaagagagaa

SEQ ID NO: 229796 - RNA, 23 nt, Human
uuuauagagaaaaaagagagaaa

SEQ ID NO: 229797 - RNA, 23 nt, Human
uuuauggauguguccacucugga

SEQ ID NO: 229798 - RNA, 27 nt, Human
aaagaugccuggggccugggacuugag

SEQ ID NO: 229799 - RNA, 19 nt, Human
aagagcagaggaggaaggg

SEQ ID NO: 229800 - RNA, 18 nt, Human
aagaugccuggggccugg

SEQ ID NO: 229801 - RNA, 22 nt, Human
agaggacaggauaggggaccug

SEQ ID NO: 229802 - RNA, 19 nt, Human
agaggaggaaggggagagg

SEQ ID NO: 229803 - RNA, 23 nt, Human
aggcaggaaggcaguugccgugg

SEQ ID NO: 229804 - RNA, 19 nt, Human
cacugugggguggcagagc

SEQ ID NO: 229805 - RNA, 24 nt, Human
cagcggacuucuuucuaggguggc

SEQ ID NO: 229806 - RNA, 20 nt, Human
ccuggcccuuccugcuccug

SEQ ID NO: 229807 - RNA, 19 nt, Human
ccugggacuugaguugggg

SEQ ID NO: 229808 - RNA, 22 nt, Human
cuccugaggccccuuccuaugg

SEQ ID NO: 229809 - RNA, 24 nt, Human
cugcuccugaggccccuuccuaug

SEQ ID NO: 229810 - RNA, 18 nt, Human
cuuccugcuccugaggcc

SEQ ID NO: 229811 - RNA, 22 nt, Human
gagcacuucuccaggcgccuga

SEQ ID NO: 229812 - RNA, 18 nt, Human
gcaaagaugccuggggcc

SEQ ID NO: 229813 - RNA, 23 nt, Human
ggcaaagaugccuggggccuggg

SEQ ID NO: 229814 - RNA, 20 nt, Human
ugagcacuucuccaggcgcc

SEQ ID NO: 229815 - RNA, 24 nt, Human
ugcagaggacaggauaggggaccc

SEQ ID NO: 229816 - RNA, 18 nt, Human
uggcagagcccagaagug

SEQ ID NO: 229817 - RNA, 22 nt, Human
ugggacuugaguugggggggua

SEQ ID NO: 229818 - RNA, 21 nt, Human
ugggaggggucuuucaaagug

SEQ ID NO: 229819 - RNA, 24 nt, Human
ugguccuggcccuuccugcuccug

SEQ ID NO: 229820 - RNA, 19 nt, Human
ugugaggccaggaguggga

SEQ ID NO: 229821 - RNA, 18 nt, Human
uuccuaugggugccagcg

SEQ ID NO: 229822 - RNA, 20 nt, Human
uugaaacacagaucaagagc

SEQ ID NO: 229823 - RNA, 21 nt, Human
uuucuaggguggccuuuccca

SEQ ID NO: 229824 - RNA, 21 nt, Human
uuuuuuuuuuuuuuuuuggcu

SEQ ID NO: 229825 - RNA, 20 nt, Human
uuuuuuuuuuuuuuuuuugg

SEQ ID NO: 229826 - RNA, 24 nt, Human
aaaaaaacagaagguaggaggaag

SEQ ID NO: 229827 - RNA, 21 nt, Human
aaaaacagaagguaggaggaa

SEQ ID NO: 229828 - RNA, 24 nt, Human
aaacacagagugaaacaaagacaa

SEQ ID NO: 229829 - RNA, 21 nt, Human
aaacagaagguaggaggaaga

SEQ ID NO: 229830 - RNA, 29 nt, Human
aaacagaagguaggaggaagagggacccc

SEQ ID NO: 229831 - RNA, 20 nt, Human
acaaagacaaaggagaaggc

SEQ ID NO: 229832 - RNA, 19 nt, Human
acaggcgcuggcggaggcg

SEQ ID NO: 229833 - RNA, 19 nt, Human
agagugacggcgacaggcg

SEQ ID NO: 229834 - RNA, 22 nt, Human
aggaagaaaaagaugaauccuc

SEQ ID NO: 229835 - RNA, 24 nt, Human
aggcaaaagcacaugggcagaguc

SEQ ID NO: 229836 - RNA, 21 nt, Human
caaagacaaaggagaaggcag

SEQ ID NO: 229837 - RNA, 21 nt, Human
caagaccaaugcauacaugaa

SEQ ID NO: 229838 - RNA, 22 nt, Human
cacacgcgugggccugucccuc

SEQ ID NO: 229839 - RNA, 24 nt, Human
ccauggcgccucccggcccucccc

SEQ ID NO: 229840 - RNA, 18 nt, Human
cccggagcggacgugggg

SEQ ID NO: 229841 - RNA, 20 nt, Human
cccggcccuccccggacucc

SEQ ID NO: 229842 - RNA, 23 nt, Human
cccgggcccucccccguuccucc

SEQ ID NO: 229843 - RNA, 27 nt, Human
ccugcgaccggggauggcucccggagc

SEQ ID NO: 229844 - RNA, 21 nt, Human
cggcgacaggcgcuggcggag

SEQ ID NO: 229845 - RNA, 21 nt, Human
cgggcccucccccguuccucc

SEQ ID NO: 229846 - RNA, 23 nt, Human
cgggcccucccccguuccuccaa

SEQ ID NO: 229847 - RNA, 21 nt, Human
cuggcggaggcggcagccucc

SEQ ID NO: 229848 - RNA, 21 nt, Human
cuuugaggaagagcucaggca

SEQ ID NO: 229849 - RNA, 18 nt, Human
gagguucugaggauggag

SEQ ID NO: 229850 - RNA, 21 nt, Human
gccucccggcccuccccggac

SEQ ID NO: 229851 - RNA, 20 nt, Human
gcggacguggggagagcgcu

SEQ ID NO: 229852 - RNA, 22 nt, Human
ggcgcuggcggaggcggcagcc

SEQ ID NO: 229853 - RNA, 20 nt, Human
ggcggcgcguucuccuggcg

SEQ ID NO: 229854 - RNA, 20 nt, Human
gggaggccggcgcgggcggc

SEQ ID NO: 229855 - RNA, 22 nt, Human
uacaugaaaaaaaaaacagaag

SEQ ID NO: 229856 - RNA, 23 nt, Human
uccacaggcaaaagcacaugggc

SEQ ID NO: 229857 - RNA, 25 nt, Human
uccacaggcaaaagcacaugggcag

SEQ ID NO: 229858 - RNA, 23 nt, Human
uccaggguccgcgucuccauucc

SEQ ID NO: 229859 - RNA, 23 nt, Human
uccauuccacaggcaaaagcaca

SEQ ID NO: 229860 - RNA, 23 nt, Human
ucgcagagucauagaaccacuau

SEQ ID NO: 229861 - RNA, 22 nt, Human
ucuccauuccacaggcaaaagc

SEQ ID NO: 229862 - RNA, 19 nt, Human
ugaaaaaaaaaacagaagg

SEQ ID NO: 229863 - RNA, 24 nt, Human
ugaaaaaaaaaacagaagguagga

SEQ ID NO: 229864 - RNA, 24 nt, Human
ugagggcagccccggaaggagaug

SEQ ID NO: 229865 - RNA, 22 nt, Human
ugcauacaugaaaaaaaaaaca

SEQ ID NO: 229866 - RNA, 19 nt, Human
uggaaacacagagugaaac

SEQ ID NO: 229867 - RNA, 26 nt, Human
uggaaacacagagugaaacaaagaca

SEQ ID NO: 229868 - RNA, 19 nt, Human
uggcggaggcggcagccuc

SEQ ID NO: 229869 - RNA, 25 nt, Human
uucccgggcccucccccguuccucc

SEQ ID NO: 229870 - RNA, 25 nt, Human
uuuuggggaagagaggagguucuga

SEQ ID NO: 229871 - RNA, 20 nt, Human
uuuuuuuuuuuuuuuuuugg

SEQ ID NO: 229872 - RNA, 18 nt, Human
aaaaguguuuucuugagu

SEQ ID NO: 229873 - RNA, 21 nt, Human
acucugaaggugucuacagag

SEQ ID NO: 229874 - RNA, 25 nt, Human
auuugugacgccauuacaaaaaccg

SEQ ID NO: 229875 - RNA, 19 nt, Human
ccuauaaaacccugugcgg

SEQ ID NO: 229876 - RNA, 18 nt, Human
cuaacaaggauuagaaaa

SEQ ID NO: 229877 - RNA, 21 nt, Human
cugugcggccgggaaaggaga

SEQ ID NO: 229878 - RNA, 20 nt, Human
gaguuggcuuuuuuuuuccu

SEQ ID NO: 229879 - RNA, 27 nt, Human
guaaaacaguguacaacaucaguauua

SEQ ID NO: 229880 - RNA, 21 nt, Human
uacaaugccuuuuuuauccuc

SEQ ID NO: 229881 - RNA, 24 nt, Human
uagaaaagacaaaacucuguucag

SEQ ID NO: 229882 - RNA, 18 nt, Human
uauuauaaaacuaaacuc

SEQ ID NO: 229883 - RNA, 19 nt, Human
ucuaacaaggauuagaaaa

SEQ ID NO: 229884 - RNA, 25 nt, Human
ucuaacaaggauuagaaaagacaaa

SEQ ID NO: 229885 - RNA, 22 nt, Human
ucuacagaguuggcuuuuuuuu

SEQ ID NO: 229886 - RNA, 24 nt, Human
ucuguucaguguuucugacaaagu

SEQ ID NO: 229887 - RNA, 23 nt, Human
ugaaaacauaaauaaggcuuuaa

SEQ ID NO: 229888 - RNA, 18 nt, Human
ugacgccauuacaaaaac

SEQ ID NO: 229889 - RNA, 19 nt, Human
ugcggccgggaaaggagac

SEQ ID NO: 229890 - RNA, 21 nt, Human
aaaacagcacccaaaggcccc

SEQ ID NO: 229891 - RNA, 18 nt, Human
aaaagacagcagauggug

SEQ ID NO: 229892 - RNA, 21 nt, Human
aaaccacagccucucugccca

SEQ ID NO: 229893 - RNA, 21 nt, Human
aagaaaagacagcagauggug

SEQ ID NO: 229894 - RNA, 19 nt, Human
aagacagcauuucggagac

SEQ ID NO: 229895 - RNA, 23 nt, Human
acagcauuucggagacccuuucg

SEQ ID NO: 229896 - RNA, 19 nt, Human
accacagccucucugccca

SEQ ID NO: 229897 - RNA, 21 nt, Human
accccaccaugucugccccca

SEQ ID NO: 229898 - RNA, 25 nt, Human
acccugguccugaggagaccccacc

SEQ ID NO: 229899 - RNA, 20 nt, Human
agaaaagacagcagauggug

SEQ ID NO: 229900 - RNA, 18 nt, Human
agacagcagauggugggg

SEQ ID NO: 229901 - RNA, 19 nt, Human
agagcagcgugugcccagg

SEQ ID NO: 229902 - RNA, 20 nt, Human
agauggccuccccugccccc

SEQ ID NO: 229903 - RNA, 25 nt, Human
agcaagaaagacagcauuucggaga

SEQ ID NO: 229904 - RNA, 18 nt, Human
agcaaguucuccucugcc

SEQ ID NO: 229905 - RNA, 23 nt, Human
aggagaccccaccaugucugccc

SEQ ID NO: 229906 - RNA, 24 nt, Human
aggcuggcuggggaguggcugggg

SEQ ID NO: 229907 - RNA, 20 nt, Human
agugacggaggccacuugga

SEQ ID NO: 229908 - RNA, 19 nt, Human
aguggcugggggaggggga

SEQ ID NO: 229909 - RNA, 19 nt, Human
caaaacagcacccaaaggc

SEQ ID NO: 229910 - RNA, 26 nt, Human
caagaaagacagcauuucggagaccc

SEQ ID NO: 229911 - RNA, 22 nt, Human
caccccuacuucuucuccccca

SEQ ID NO: 229912 - RNA, 24 nt, Human
caccccuacuucuucucccccaaa

SEQ ID NO: 229913 - RNA, 24 nt, Human
cagcaaguucuccucugccccaac

SEQ ID NO: 229914 - RNA, 22 nt, Human
cagcauuucggagacccuuucg

SEQ ID NO: 229915 - RNA, 22 nt, Human
caugucugcccccagucaggga

SEQ ID NO: 229916 - RNA, 24 nt, Human
ccaucccgguuggagcagagauug

SEQ ID NO: 229917 - RNA, 23 nt, Human
cccaacuccagccucccaugggc

SEQ ID NO: 229918 - RNA, 19 nt, Human
cccaggaaggggugcagcu

SEQ ID NO: 229919 - RNA, 21 nt, Human
ccccaaaccacagccucucug

SEQ ID NO: 229920 - RNA, 19 nt, Human
ccccaacuccagccuccca

SEQ ID NO: 229921 - RNA, 19 nt, Human
cccccaaaccacagccucu

SEQ ID NO: 229922 - RNA, 20 nt, Human
cccccaaaccacagccucuc

SEQ ID NO: 229923 - RNA, 19 nt, Human
cccccagucagggagcaag

SEQ ID NO: 229924 - RNA, 24 nt, Human
cccugguccugaggagaccccacc

SEQ ID NO: 229925 - RNA, 24 nt, Human
cggccagugggcagugggaggagg

SEQ ID NO: 229926 - RNA, 21 nt, Human
cggccauggggugggcugggc

SEQ ID NO: 229927 - RNA, 23 nt, Human
cggcgggaagaggcggugcugcc

SEQ ID NO: 229928 - RNA, 18 nt, Human
cggcucccaucccgguug

SEQ ID NO: 229929 - RNA, 20 nt, Human
cgggugguaggaaggggauc

SEQ ID NO: 229930 - RNA, 19 nt, Human
cuggcaaaacagcacccaa

SEQ ID NO: 229931 - RNA, 20 nt, Human
cuggcaaaacagcacccaaa

SEQ ID NO: 229932 - RNA, 19 nt, Human
cuucucccccaaaccacag

SEQ ID NO: 229933 - RNA, 19 nt, Human
gaguggggggacucugggc

SEQ ID NO: 229934 - RNA, 20 nt, Human
gcaaaacagcacccaaaggc

SEQ ID NO: 229935 - RNA, 23 nt, Human
gcccaagcuggggcagagcagcg

SEQ ID NO: 229936 - RNA, 19 nt, Human
ggagcagagauggcaaaga

SEQ ID NO: 229937 - RNA, 18 nt, Human
ggaggaggugugcccgcc

SEQ ID NO: 229938 - RNA, 22 nt, Human
ggaggggccuggaucccaaggc

SEQ ID NO: 229939 - RNA, 18 nt, Human
ggccaggggcacagcauc

SEQ ID NO: 229940 - RNA, 18 nt, Human
ggccagugggcaguggga

SEQ ID NO: 229941 - RNA, 20 nt, Human
ggcggcgggaagaggcggug

SEQ ID NO: 229942 - RNA, 19 nt, Human
ggcuggggaguggcugggg

SEQ ID NO: 229943 - RNA, 21 nt, Human
gggaguggggggacucugggc

SEQ ID NO: 229944 - RNA, 21 nt, Human
gggcggcgggaagaggcggug

SEQ ID NO: 229945 - RNA, 20 nt, Human
gggggacucugggcucucca

SEQ ID NO: 229946 - RNA, 26 nt, Human
gugcugccagagugcgaugcugggag

SEQ ID NO: 229947 - RNA, 18 nt, Human
gugggcagugggaggagg

SEQ ID NO: 229948 - RNA, 24 nt, Human
guggggggacucugggcucuccag

SEQ ID NO: 229949 - RNA, 20 nt, Human
ucccagccaggcuggcuggg

SEQ ID NO: 229950 - RNA, 18 nt, Human
ucccaucccgguuggagc

SEQ ID NO: 229951 - RNA, 19 nt, Human
ucccccaaaccacagccuc

SEQ ID NO: 229952 - RNA, 18 nt, Human
ucccgguuggagcagaga

SEQ ID NO: 229953 - RNA, 19 nt, Human
ucccgguuggagcagagau

SEQ ID NO: 229954 - RNA, 22 nt, Human
ucccgguuggagcagagauggc

SEQ ID NO: 229955 - RNA, 23 nt, Human
ucuccagauggccuccccugccc

SEQ ID NO: 229956 - RNA, 19 nt, Human
ugcccaagcuggggcagag

SEQ ID NO: 229957 - RNA, 21 nt, Human
ugcccaagcuggggcagagca

SEQ ID NO: 229958 - RNA, 22 nt, Human
ugcccaggaaggggugcagcuu

SEQ ID NO: 229959 - RNA, 23 nt, Human
ugccccaacuccagccucccaug

SEQ ID NO: 229960 - RNA, 18 nt, Human
ugcuggagagggaggggc

SEQ ID NO: 229961 - RNA, 24 nt, Human
ugcugggaguggggggacucuggg

SEQ ID NO: 229962 - RNA, 21 nt, Human
uggcuggggaguggcuggggg

SEQ ID NO: 229963 - RNA, 24 nt, Human
uggcuggggaguggcugggggagg

SEQ ID NO: 229964 - RNA, 21 nt, Human
uggcugggggagggggaaggu

SEQ ID NO: 229965 - RNA, 18 nt, Human
ugggagaucugcccaagc

SEQ ID NO: 229966 - RNA, 18 nt, Human
ugggcggcgggaagaggc

SEQ ID NO: 229967 - RNA, 18 nt, Human
uggggaccgggugguagg

SEQ ID NO: 229968 - RNA, 19 nt, Human
uggggaguggcugggggag

SEQ ID NO: 229969 - RNA, 24 nt, Human
ugguaggaaggggauccgaggcag

SEQ ID NO: 229970 - RNA, 18 nt, Human
ugugguggguaccgaagg

SEQ ID NO: 229971 - RNA, 22 nt, Human
uucuccucugccccaacuccag

SEQ ID NO: 229972 - RNA, 24 nt, Human
uuggagcagagauggcaaagaaaa

SEQ ID NO: 229973 - RNA, 24 nt, Human
uuggagcagagauggcaaagaaaa

SEQ ID NO: 229974 - RNA, 25 nt, Human
uuggagcagagauggcaaagaaaag

SEQ ID NO: 229975 - RNA, 18 nt, Human
aaaaaaggaacagggaca

SEQ ID NO: 229976 - RNA, 19 nt, Human
aaccacagcuuuaaggggu

SEQ ID NO: 229977 - RNA, 21 nt, Human
aaggagcuggcugagucuugc

SEQ ID NO: 229978 - RNA, 23 nt, Human
agacaggugacucuggaguucuu

SEQ ID NO: 229979 - RNA, 21 nt, Human
agcagaggucucugggcagga

SEQ ID NO: 229980 - RNA, 19 nt, Human
agcagggagacggggcaca

SEQ ID NO: 229981 - RNA, 22 nt, Human
agccaccaccuuaaugugagaa

SEQ ID NO: 229982 - RNA, 18 nt, Human
agccggccagggaaggga

SEQ ID NO: 229983 - RNA, 24 nt, Human
agcucauaggagccaugaggucca

SEQ ID NO: 229984 - RNA, 18 nt, Human
aggagccaugagguccag

SEQ ID NO: 229985 - RNA, 21 nt, Human
aggagccaugagguccagagc

SEQ ID NO: 229986 - RNA, 23 nt, Human
aggcaaaaaaggaacagggacaa

SEQ ID NO: 229987 - RNA, 23 nt, Human
agggacccuggccaaacagaucc

SEQ ID NO: 229988 - RNA, 22 nt, Human
agggaggggagaaccaagcagg

SEQ ID NO: 229989 - RNA, 23 nt, Human
auccacaggcaaaaaaggaacag

SEQ ID NO: 229990 - RNA, 19 nt, Human
caaacagauccacaggcaa

SEQ ID NO: 229991 - RNA, 21 nt, Human
caaacagauccacaggcaaaa

SEQ ID NO: 229992 - RNA, 18 nt, Human
cacaggcaaaaaaggaac

SEQ ID NO: 229993 - RNA, 24 nt, Human
cacaggcaaaaaaggaacagggac

SEQ ID NO: 229994 - RNA, 26 nt, Human
cacaggcaaaaaaggaacagggacaa

SEQ ID NO: 229995 - RNA, 21 nt, Human
cacuugugcugugaccugggc

SEQ ID NO: 229996 - RNA, 18 nt, Human
cagcccaggccggcccgg

SEQ ID NO: 229997 - RNA, 20 nt, Human
cagcuccuucuccccuggcc

SEQ ID NO: 229998 - RNA, 19 nt, Human
caggacauaggccccauag

SEQ ID NO: 229999 - RNA, 18 nt, Human
cagggagacggggcacag

SEQ ID NO: 230000 - RNA, 19 nt, Human
caggucugucuuggcgggg

SEQ ID NO: 230001 - RNA, 20 nt, Human
ccacaggcaaaaaaggaaca

SEQ ID NO: 230002 - RNA, 20 nt, Human
ccaggcugauguuccuagcu

SEQ ID NO: 230003 - RNA, 19 nt, Human
ccccagggacaaagauggg

SEQ ID NO: 230004 - RNA, 23 nt, Human
ccccagggacccuggccaaacag

SEQ ID NO: 230005 - RNA, 19 nt, Human
cccccgcgcgccccggccg

SEQ ID NO: 230006 - RNA, 20 nt, Human
cccccgcgcgccccggccgc

SEQ ID NO: 230007 - RNA, 21 nt, Human
cccccgcgcgccccggccgcg

SEQ ID NO: 230008 - RNA, 21 nt, Human
ccccgcguggccgcccgcgcc

SEQ ID NO: 230009 - RNA, 19 nt, Human
ccccuccccuuccagccca

SEQ ID NO: 230010 - RNA, 21 nt, Human
ccccuggccagagcgggccuc

SEQ ID NO: 230011 - RNA, 22 nt, Human
cccgccggccgccgccucaccu

SEQ ID NO: 230012 - RNA, 20 nt, Human
cccgcgcgccccggccgcgc

SEQ ID NO: 230013 - RNA, 21 nt, Human
cccgcgcgccccggccgcgcu

SEQ ID NO: 230014 - RNA, 26 nt, Human
ccgcccgcgccccgccggccgccgcc

SEQ ID NO: 230015 - RNA, 27 nt, Human
ccgcccgcgccccgccggccgccgccu

SEQ ID NO: 230016 - RNA, 22 nt, Human
ccgcgcuccgauuugccgaccc

SEQ ID NO: 230017 - RNA, 18 nt, Human
ccucaccuggcgccccuc

SEQ ID NO: 230018 - RNA, 21 nt, Human
ccugaccccagggacccuggc

SEQ ID NO: 230019 - RNA, 23 nt, Human
ccugccgcagggugagaaagucc

SEQ ID NO: 230020 - RNA, 18 nt, Human
cgccccuccccuuccagc

SEQ ID NO: 230021 - RNA, 19 nt, Human
cgccggccgccgccucacc

SEQ ID NO: 230022 - RNA, 21 nt, Human
cucacccccgcgcgccccggc

SEQ ID NO: 230023 - RNA, 20 nt, Human
cucuuacaccugagaguaaa

SEQ ID NO: 230024 - RNA, 24 nt, Human
gacaaagccgcauugauugcagcc

SEQ ID NO: 230025 - RNA, 18 nt, Human
gagcaggaaggagcagag

SEQ ID NO: 230026 - RNA, 26 nt, Human
gagcauggggguggggguuggagggg

SEQ ID NO: 230027 - RNA, 24 nt, Human
gagguccagagcaugggggugggg

SEQ ID NO: 230028 - RNA, 23 nt, Human
gaugugggcgucccagacaaagc

SEQ ID NO: 230029 - RNA, 20 nt, Human
gcaaaaaaggaacagggaca

SEQ ID NO: 230030 - RNA, 22 nt, Human
gcaaaaaaggaacagggacaau

SEQ ID NO: 230031 - RNA, 20 nt, Human
gccgacccgggaauggccuc

SEQ ID NO: 230032 - RNA, 22 nt, Human
ggaacagggacaaugagaggaa

SEQ ID NO: 230033 - RNA, 21 nt, Human
ggaagacgcacggcagcuccu

SEQ ID NO: 230034 - RNA, 18 nt, Human
ggaaggaggguaggccug

SEQ ID NO: 230035 - RNA, 22 nt, Human
ggaagggaggggagaaccaagc

SEQ ID NO: 230036 - RNA, 19 nt, Human
ggccgcgaggccgcaagca

SEQ ID NO: 230037 - RNA, 18 nt, Human
ggcugggaaggagcuggc

SEQ ID NO: 230038 - RNA, 18 nt, Human
ggcugggaaggagcuggc

SEQ ID NO: 230039 - RNA, 21 nt, Human
ggcugggagcaggccccaggg

SEQ ID NO: 230040 - RNA, 20 nt, Human
gggaauggccucugggaugu

SEQ ID NO: 230041 - RNA, 18 nt, Human
gggagccgaugagacagg

SEQ ID NO: 230042 - RNA, 19 nt, Human
gggguggggguuggagggg

SEQ ID NO: 230043 - RNA, 22 nt, Human
gugcugaugugcacuugugcug

SEQ ID NO: 230044 - RNA, 18 nt, Human
uaaggucucaucagucuc

SEQ ID NO: 230045 - RNA, 23 nt, Human
uagaaagcaaggccuccagagag

SEQ ID NO: 230046 - RNA, 24 nt, Human
uaucagauccuuccugagaacagg

SEQ ID NO: 230047 - RNA, 20 nt, Human
ucaccaugcuccaagcucau

SEQ ID NO: 230048 - RNA, 19 nt, Human
uccacaggcaaaaaaggaa

SEQ ID NO: 230049 - RNA, 23 nt, Human
ucccagccccaagaggcugggcu

SEQ ID NO: 230050 - RNA, 20 nt, Human
ucucugggcaggacauaggc

SEQ ID NO: 230051 - RNA, 23 nt, Human
ucugcuagaaagcaaggccucca

SEQ ID NO: 230052 - RNA, 22 nt, Human
ugagaagaggggggaugaggaa

SEQ ID NO: 230053 - RNA, 18 nt, Human
ugaggaaaaugaugaucc

SEQ ID NO: 230054 - RNA, 21 nt, Human
ugauugcagcccaggccggcc

SEQ ID NO: 230055 - RNA, 18 nt, Human
uggccaaacagauccaca

SEQ ID NO: 230056 - RNA, 21 nt, Human
uggccaaacagauccacaggc

SEQ ID NO: 230057 - RNA, 19 nt, Human
uggccagagcgggccucag

SEQ ID NO: 230058 - RNA, 21 nt, Human
uggccgcccgcgccccgccgg

SEQ ID NO: 230059 - RNA, 24 nt, Human
uggcugggagcaggccccagggac

SEQ ID NO: 230060 - RNA, 18 nt, Human
ugggaaggagcuggcuga

SEQ ID NO: 230061 - RNA, 24 nt, Human
ugggaaggagcuggcugagucuug

SEQ ID NO: 230062 - RNA, 20 nt, Human
ugggagccgaugagacaggu

SEQ ID NO: 230063 - RNA, 18 nt, Human
uggggguggggguuggag

SEQ ID NO: 230064 - RNA, 21 nt, Human
ugugcacuugugcugugaccu

SEQ ID NO: 230065 - RNA, 21 nt, Human
ugugggcgucccagacaaagc

SEQ ID NO: 230066 - RNA, 18 nt, Human
uguggggaaggaggguag

SEQ ID NO: 230067 - RNA, 20 nt, Human
uuccugaccccagggacccu

SEQ ID NO: 230068 - RNA, 20 nt, Human
uugcagcccaggccggcccg

SEQ ID NO: 230069 - RNA, 18 nt, Human
uugguugguucuagauuc

SEQ ID NO: 230070 - RNA, 19 nt, Human
uuuuuuuuuuuuuuucuaa

SEQ ID NO: 230071 - RNA, 21 nt, Human
accagagcccacucuggcccc

SEQ ID NO: 230072 - RNA, 19 nt, Human
accgcagucuauaaaugcu

SEQ ID NO: 230073 - RNA, 18 nt, Human
agcacaguguccaaaaac

SEQ ID NO: 230074 - RNA, 22 nt, Human
aguagcacaguguccaaaaacg

SEQ ID NO: 230075 - RNA, 18 nt, Human
augcuguggcugggaguu

SEQ ID NO: 230076 - RNA, 24 nt, Human
cacucuggccccagggugaggucc

SEQ ID NO: 230077 - RNA, 21 nt, Human
ccgccgcuaccgccgccgccg

SEQ ID NO: 230078 - RNA, 22 nt, Human
ccgccgcuaccgccgccgccga

SEQ ID NO: 230079 - RNA, 23 nt, Human
ccgccgcuaccgccgccgccgag

SEQ ID NO: 230080 - RNA, 20 nt, Human
uaccgccgccgccgaggcuc

SEQ ID NO: 230081 - RNA, 19 nt, Human
ucaguagcacaguguccaa

SEQ ID NO: 230082 - RNA, 24 nt, Human
ugggaggugucagcgucgccgccg

SEQ ID NO: 230083 - RNA, 24 nt, Human
uguccaaaaacguugagccaucug

SEQ ID NO: 230084 - RNA, 23 nt, Human
aaggaggucagaaaaggaaaggg

SEQ ID NO: 230085 - RNA, 22 nt, Human
agaagaagggagaccaggagag

SEQ ID NO: 230086 - RNA, 20 nt, Human
agaagggagaccaggagagg

SEQ ID NO: 230087 - RNA, 22 nt, Human
agaagggagaccaggagagggc

SEQ ID NO: 230088 - RNA, 26 nt, Human
agaagggagaccaggagagggccuug

SEQ ID NO: 230089 - RNA, 24 nt, Human
agagagggagguggaggaaggggu

SEQ ID NO: 230090 - RNA, 21 nt, Human
agagggagguggaggaagggg

SEQ ID NO: 230091 - RNA, 22 nt, Human
agagggagguggaggaaggggu

SEQ ID NO: 230092 - RNA, 19 nt, Human
agagggccuuggagagagg

SEQ ID NO: 230093 - RNA, 21 nt, Human
agccugaggaggugggggcgg

SEQ ID NO: 230094 - RNA, 22 nt, Human
aggaaagggggcaguggugggg

SEQ ID NO: 230095 - RNA, 24 nt, Human
aggaaagggggcaguggugggggg

SEQ ID NO: 230096 - RNA, 20 nt, Human
aggccggaauccagaggaaa

SEQ ID NO: 230097 - RNA, 24 nt, Human
agggagguggaggaagggguuccc

SEQ ID NO: 230098 - RNA, 22 nt, Human
agggccuuggagagaggguggg

SEQ ID NO: 230099 - RNA, 22 nt, Human
agggggcagugguggggggugg

SEQ ID NO: 230100 - RNA, 19 nt, Human
ccggaauccagaggaaagc

SEQ ID NO: 230101 - RNA, 18 nt, Human
ccguucugcuggucucug

SEQ ID NO: 230102 - RNA, 24 nt, Human
ccuauggucugggcagcgcugagc

SEQ ID NO: 230103 - RNA, 21 nt, Human
cgucguggcugggaugccguu

SEQ ID NO: 230104 - RNA, 18 nt, Human
cuagaagaagggagacca

SEQ ID NO: 230105 - RNA, 24 nt, Human
cuccaaaaggaggucagaaaagga

SEQ ID NO: 230106 - RNA, 18 nt, Human
cugggccuucaccccugu

SEQ ID NO: 230107 - RNA, 23 nt, Human
cuuggagagaggguggggaggga

SEQ ID NO: 230108 - RNA, 22 nt, Human
gccggaauccagaggaaagcug

SEQ ID NO: 230109 - RNA, 26 nt, Human
ggacugggcugcugagaucugcuggc

SEQ ID NO: 230110 - RNA, 18 nt, Human
ggagagaggguggggagg

SEQ ID NO: 230111 - RNA, 22 nt, Human
ggccgucguggcugggaugccg

SEQ ID NO: 230112 - RNA, 23 nt, Human
ggccgucguggcugggaugccgu

SEQ ID NO: 230113 - RNA, 18 nt, Human
gggccuuggagagagggu

SEQ ID NO: 230114 - RNA, 25 nt, Human
ggggcaguggugggggguggggggu

SEQ ID NO: 230115 - RNA, 21 nt, Human
gggugggggguaaaggagaag

SEQ ID NO: 230116 - RNA, 18 nt, Human
ggguucuagaagaaggga

SEQ ID NO: 230117 - RNA, 19 nt, Human
gguggggggugggggguaa

SEQ ID NO: 230118 - RNA, 18 nt, Human
ucagaaaaggaaaggggg

SEQ ID NO: 230119 - RNA, 25 nt, Human
ugagaucugcuggcugccucagcuc

SEQ ID NO: 230120 - RNA, 18 nt, Human
ugaggaggugggggcggg

SEQ ID NO: 230121 - RNA, 21 nt, Human
ugcugagaucugcuggcugcc

SEQ ID NO: 230122 - RNA, 24 nt, Human
uggaaagcugggcagaucaggcag

SEQ ID NO: 230123 - RNA, 24 nt, Human
uggcggacagcagacagagcaaag

SEQ ID NO: 230124 - RNA, 19 nt, Human
uggggagggaugaccagag

SEQ ID NO: 230125 - RNA, 22 nt, Human
uggggggugggggguaaaggag

SEQ ID NO: 230126 - RNA, 22 nt, Human
uggucucugggccuucaccccu

SEQ ID NO: 230127 - RNA, 18 nt, Human
ugucccagggaacagagc

SEQ ID NO: 230128 - RNA, 20 nt, Human
aaauaacugagaaacagucu

SEQ ID NO: 230129 - RNA, 18 nt, Human
aacccagagaacugggcu

SEQ ID NO: 230130 - RNA, 19 nt, Human
aacccagagaacugggcuu

SEQ ID NO: 230131 - RNA, 21 nt, Human
aagaggaauccaacaggaagc

SEQ ID NO: 230132 - RNA, 21 nt, Human
acacagcccgggcuguccucu

SEQ ID NO: 230133 - RNA, 19 nt, Human
accaccuggcuaacgaacc

SEQ ID NO: 230134 - RNA, 18 nt, Human
accuccagucuccagcuc

SEQ ID NO: 230135 - RNA, 23 nt, Human
agaaacagccagggaacuguagc

SEQ ID NO: 230136 - RNA, 25 nt, Human
agaacaggcaggugacuuuagcugg

SEQ ID NO: 230137 - RNA, 28 nt, Human
agaacaggcaggugacuuuagcuggguc

SEQ ID NO: 230138 - RNA, 20 nt, Human
aggucccagcagugcagccu

SEQ ID NO: 230139 - RNA, 21 nt, Human
aggugcagaggccaggugggu

SEQ ID NO: 230140 - RNA, 18 nt, Human
cagcagugcagccuggcc

SEQ ID NO: 230141 - RNA, 22 nt, Human
cagccuggcggccgaggacugg

SEQ ID NO: 230142 - RNA, 19 nt, Human
cagcugagcauacgucacc

SEQ ID NO: 230143 - RNA, 24 nt, Human
caggaccaggccuggggcugccag

SEQ ID NO: 230144 - RNA, 25 nt, Human
cagucuccagcucuugucuccagga

SEQ ID NO: 230145 - RNA, 18 nt, Human
ccaggacagcugccuggc

SEQ ID NO: 230146 - RNA, 26 nt, Human
ccuggggcugccagaugugaggccuu

SEQ ID NO: 230147 - RNA, 21 nt, Human
cgauuguagaagggaccaccu

SEQ ID NO: 230148 - RNA, 23 nt, Human
cuaagaggaaaaauaaaagugaa

SEQ ID NO: 230149 - RNA, 19 nt, Human
cuaugcacccaggaccagg

SEQ ID NO: 230150 - RNA, 19 nt, Human
cugcagccagggccgaggu

SEQ ID NO: 230151 - RNA, 21 nt, Human
cuggggucacuggagguucac

SEQ ID NO: 230152 - RNA, 20 nt, Human
cugggucucuggaaauaacu

SEQ ID NO: 230153 - RNA, 21 nt, Human
cuguagcugggccuuuagaac

SEQ ID NO: 230154 - RNA, 18 nt, Human
cuguccaaggagcugcuc

SEQ ID NO: 230155 - RNA, 18 nt, Human
cuucucaggaaguccauu

SEQ ID NO: 230156 - RNA, 21 nt, Human
cuugucugcuguccucucuag

SEQ ID NO: 230157 - RNA, 23 nt, Human
cuuuagcugggucucuggaaaca

SEQ ID NO: 230158 - RNA, 18 nt, Human
gagaacugggcuuggcuc

SEQ ID NO: 230159 - RNA, 23 nt, Human
gcucgauuguagaagggaccacc

SEQ ID NO: 230160 - RNA, 20 nt, Human
gugugagggcccaguggucc

SEQ ID NO: 230161 - RNA, 20 nt, Human
uaaaaagaaaacgcugacac

SEQ ID NO: 230162 - RNA, 21 nt, Human
uaaagcacaacccagagaacu

SEQ ID NO: 230163 - RNA, 22 nt, Human
uaaagcacaacccagagaacug

SEQ ID NO: 230164 - RNA, 20 nt, Human
uaacugagaaacagucuguu

SEQ ID NO: 230165 - RNA, 19 nt, Human
uagaaacagccagggaacu

SEQ ID NO: 230166 - RNA, 19 nt, Human
uagaacaucaacagccagg

SEQ ID NO: 230167 - RNA, 21 nt, Human
uagaacaucaacagccagguc

SEQ ID NO: 230168 - RNA, 20 nt, Human
uagaagggaccaccuggcua

SEQ ID NO: 230169 - RNA, 21 nt, Human
ucaauuaaauuuuaaaaagaa

SEQ ID NO: 230170 - RNA, 21 nt, Human
ucacagcagacaccuaggaca

SEQ ID NO: 230171 - RNA, 22 nt, Human
ucccucacucagcuuugaacaa

SEQ ID NO: 230172 - RNA, 18 nt, Human
ucccugcagccagggccg

SEQ ID NO: 230173 - RNA, 21 nt, Human
ucuagaacaucaacagccagg

SEQ ID NO: 230174 - RNA, 21 nt, Human
ucuccaggacagcugccuggc

SEQ ID NO: 230175 - RNA, 24 nt, Human
ucucuggaaacagucaggugaaua

SEQ ID NO: 230176 - RNA, 19 nt, Human
ucuguccaaggagcugcuc

SEQ ID NO: 230177 - RNA, 22 nt, Human
ugacacguuuucguaaguccug

SEQ ID NO: 230178 - RNA, 22 nt, Human
ugagaaacagucuguccaagga

SEQ ID NO: 230179 - RNA, 23 nt, Human
ugcugguuagaaaccuccagucu

SEQ ID NO: 230180 - RNA, 18 nt, Human
uggcaacggcugcauacg

SEQ ID NO: 230181 - RNA, 24 nt, Human
uggcuggcuuucuagaugaagagg

SEQ ID NO: 230182 - RNA, 23 nt, Human
uguagaagggaccaccuggcuaa

SEQ ID NO: 230183 - RNA, 20 nt, Human
uguagcugggucucuggaaa

SEQ ID NO: 230184 - RNA, 20 nt, Human
uguggacuguggggacacag

SEQ ID NO: 230185 - RNA, 21 nt, Human
uuaaaaagaaaacgcugacac

SEQ ID NO: 230186 - RNA, 27 nt, Human
uuaaauuuuaaaaagaaaacgcugaca

SEQ ID NO: 230187 - RNA, 18 nt, Human
uuagaaaccuccagucuc

SEQ ID NO: 230188 - RNA, 24 nt, Human
agaaagaaacaaacugagguggca

SEQ ID NO: 230189 - RNA, 24 nt, Human
aggcacugaguaagggucuagagc

SEQ ID NO: 230190 - RNA, 22 nt, Human
aggcaucccuggaaaauagucu

SEQ ID NO: 230191 - RNA, 21 nt, Human
aggcucagagacagauaagcu

SEQ ID NO: 230192 - RNA, 19 nt, Human
agggaagagguauuccagg

SEQ ID NO: 230193 - RNA, 23 nt, Human
aucccuggaaaauagucuucaag

SEQ ID NO: 230194 - RNA, 25 nt, Human
cagaaagaaacaaacugagguggca

SEQ ID NO: 230195 - RNA, 26 nt, Human
cagaaagaaacaaacugagguggcau

SEQ ID NO: 230196 - RNA, 19 nt, Human
cuagagcucagugcaccac

SEQ ID NO: 230197 - RNA, 19 nt, Human
gaacagaaagaaacaaacu

SEQ ID NO: 230198 - RNA, 21 nt, Human
gggcccaaggcucagagacag

SEQ ID NO: 230199 - RNA, 23 nt, Human
gugaaagugccaucgaaggcacu

SEQ ID NO: 230200 - RNA, 20 nt, Human
gugcuguagugaaagugcca

SEQ ID NO: 230201 - RNA, 21 nt, Human
uaagcuuugggggaacagaaa

SEQ ID NO: 230202 - RNA, 19 nt, Human
ucccuggaaaauagucuuc

SEQ ID NO: 230203 - RNA, 22 nt, Human
ucccuggaaaauagucuucaag

SEQ ID NO: 230204 - RNA, 20 nt, Human
ugaguaagggucuagagcuc

SEQ ID NO: 230205 - RNA, 24 nt, Human
ugaguaagggucuagagcucagug

SEQ ID NO: 230206 - RNA, 21 nt, Human
ugcaccacucaggcaucccug

SEQ ID NO: 230207 - RNA, 19 nt, Human
ugcuguagugaaagugcca

SEQ ID NO: 230208 - RNA, 21 nt, Human
uguggagugggcaggggugcc

SEQ ID NO: 230209 - RNA, 19 nt, Human
auauacuuguuuugacaga

SEQ ID NO: 230210 - RNA, 18 nt, Human
ggagccagaggagucgcu

SEQ ID NO: 230211 - RNA, 19 nt, Human
guuuuacuugauauacuug

SEQ ID NO: 230212 - RNA, 19 nt, Human
uauguacaugcacaaauua

SEQ ID NO: 230213 - RNA, 22 nt, Human
uguuuugacagacucuuccugg

SEQ ID NO: 230214 - RNA, 24 nt, Human
aaaccugucugguuuguguccuaa

SEQ ID NO: 230215 - RNA, 20 nt, Human
cacauguagcacugaaugcc

SEQ ID NO: 230216 - RNA, 21 nt, Human
gcauuggguaaucagugcuuu

SEQ ID NO: 230217 - RNA, 19 nt, Human
gggagggaggugcauuggg

SEQ ID NO: 230218 - RNA, 25 nt, Human
uaccaaaaacauucugugcauaaca

SEQ ID NO: 230219 - RNA, 18 nt, Human
ugcauuggguaaucagug

SEQ ID NO: 230220 - RNA, 21 nt, Human
uggggagggaggugcauuggg

SEQ ID NO: 230221 - RNA, 24 nt, Human
uuuuuuaucuucaagaaaugggau

SEQ ID NO: 230222 - RNA, 23 nt, Human
aaauauccggucccugaugauuc

SEQ ID NO: 230223 - RNA, 19 nt, Human
accuugauaacuucagcua

SEQ ID NO: 230224 - RNA, 19 nt, Human
caaguaaguuugccucucc

SEQ ID NO: 230225 - RNA, 23 nt, Human
caauacaaguaaguuugccucuc

SEQ ID NO: 230226 - RNA, 18 nt, Human
cagcgcuaggccaccucc

SEQ ID NO: 230227 - RNA, 22 nt, Human
caguagugcucuuccagggcuc

SEQ ID NO: 230228 - RNA, 22 nt, Human
ccagcgcuaggccaccuccucu

SEQ ID NO: 230229 - RNA, 18 nt, Human
ccagggcucgggcgcugu

SEQ ID NO: 230230 - RNA, 18 nt, Human
cgaaggaagaguuacugu

SEQ ID NO: 230231 - RNA, 23 nt, Human
cgcaaccagcagaguacggcauc

SEQ ID NO: 230232 - RNA, 22 nt, Human
gagguggcugcgcaaccagcag

SEQ ID NO: 230233 - RNA, 24 nt, Human
gcuuauuuucccuccucuccgugu

SEQ ID NO: 230234 - RNA, 21 nt, Human
ggauuggggugagccccgcca

SEQ ID NO: 230235 - RNA, 20 nt, Human
ggcugcgcaaccagcagagu

SEQ ID NO: 230236 - RNA, 23 nt, Human
gggcgcugugggucuccguaggu

SEQ ID NO: 230237 - RNA, 24 nt, Human
guaagucucuucaaaauaaagaaa

SEQ ID NO: 230238 - RNA, 18 nt, Human
uacggcaucaaaaggcag

SEQ ID NO: 230239 - RNA, 20 nt, Human
uacggcaucaaaaggcagag

SEQ ID NO: 230240 - RNA, 23 nt, Human
uacugauagaccaaacaaaaggg

SEQ ID NO: 230241 - RNA, 18 nt, Human
ucccuggccguucgggac

SEQ ID NO: 230242 - RNA, 21 nt, Human
uccgugugcaguaucccgagg

SEQ ID NO: 230243 - RNA, 22 nt, Human
ugccucgcuuauuuucccuccu

SEQ ID NO: 230244 - RNA, 20 nt, Human
uggaagaaaggugaaucuga

SEQ ID NO: 230245 - RNA, 22 nt, Human
uggaagaaaggugaaucugaga

SEQ ID NO: 230246 - RNA, 19 nt, Human
ugugcaaguguuuauuugg

SEQ ID NO: 230247 - RNA, 18 nt, Human
ugugugcaaguguuuauu

SEQ ID NO: 230248 - RNA, 26 nt, Human
uucaagguuaagaauccaaaugagaa

SEQ ID NO: 230249 - RNA, 23 nt, Human
uuugggcagcugugcucugucau

SEQ ID NO: 230250 - RNA, 18 nt, Human
aaaauggguggaagggcc

SEQ ID NO: 230251 - RNA, 22 nt, Human
cacaaggggcggugugaggcag

SEQ ID NO: 230252 - RNA, 21 nt, Human
cagcugcaggggccugaccag

SEQ ID NO: 230253 - RNA, 19 nt, Human
caggggccugaccaggggc

SEQ ID NO: 230254 - RNA, 19 nt, Human
ccagugaugauuggugaca

SEQ ID NO: 230255 - RNA, 27 nt, Human
ccagugaugauuggugacaaaucucuc

SEQ ID NO: 230256 - RNA, 20 nt, Human
ccugaccaggggccgggguu

SEQ ID NO: 230257 - RNA, 19 nt, Human
cggcuccgggccgcguccc

SEQ ID NO: 230258 - RNA, 22 nt, Human
uaagaagcuauaacuuaaacca

SEQ ID NO: 230259 - RNA, 20 nt, Human
uccccgagcuccagggacag

SEQ ID NO: 230260 - RNA, 21 nt, Human
uggaagggccaaauauaaaaa

SEQ ID NO: 230261 - RNA, 23 nt, Human
uggaagggccaaauauaaaaaca

SEQ ID NO: 230262 - RNA, 22 nt, Human
uucagaaacaagaucugucacc

SEQ ID NO: 230263 - RNA, 26 nt, Human
aacucauacaaaaugugauuaaaaac

SEQ ID NO: 230264 - RNA, 19 nt, Human
agaaaguuuagccuuggga

SEQ ID NO: 230265 - RNA, 25 nt, Human
aggaacagagggaggcgccgguacc

SEQ ID NO: 230266 - RNA, 18 nt, Human
ccaaagaagggaauuaga

SEQ ID NO: 230267 - RNA, 24 nt, Human
cccccgagcccaaagaagggaauu

SEQ ID NO: 230268 - RNA, 18 nt, Human
ccccgagcccaaagaagg

SEQ ID NO: 230269 - RNA, 19 nt, Human
ccccgagcccaaagaaggg

SEQ ID NO: 230270 - RNA, 19 nt, Human
cccugcuccgggagccccc

SEQ ID NO: 230271 - RNA, 22 nt, Human
ccgggugaggucccggucccac

SEQ ID NO: 230272 - RNA, 23 nt, Human
cggcagaggaguggagaagacgc

SEQ ID NO: 230273 - RNA, 21 nt, Human
gagaagacgcccgccgagccg

SEQ ID NO: 230274 - RNA, 18 nt, Human
gagccggggcugaagggg

SEQ ID NO: 230275 - RNA, 22 nt, Human
gcgacgcgagcucucgcccugc

SEQ ID NO: 230276 - RNA, 19 nt, Human
gcugaaggggcgggcggcc

SEQ ID NO: 230277 - RNA, 23 nt, Human
ggagagccggggcugaaggggcg

SEQ ID NO: 230278 - RNA, 19 nt, Human
ggcagaggaguggagaaga

SEQ ID NO: 230279 - RNA, 22 nt, Human
ggggcgccucuuuuguuugaaa

SEQ ID NO: 230280 - RNA, 19 nt, Human
guaguuguuuuaccuuguu

SEQ ID NO: 230281 - RNA, 19 nt, Human
uaccuuguucaccucagcc

SEQ ID NO: 230282 - RNA, 21 nt, Human
uaccuuguucaccucagccau

SEQ ID NO: 230283 - RNA, 27 nt, Human
uaccuuguucaccucagccauuuuuua

SEQ ID NO: 230284 - RNA, 22 nt, Human
ucccugcagccacggggacgcg

SEQ ID NO: 230285 - RNA, 18 nt, Human
ucgcugcggggcuggggc

SEQ ID NO: 230286 - RNA, 18 nt, Human
ucucgcccugcuccggga

SEQ ID NO: 230287 - RNA, 19 nt, Human
ugggaggaacagagggagg

SEQ ID NO: 230288 - RNA, 21 nt, Human
ugggaggaacagagggaggcg

SEQ ID NO: 230289 - RNA, 18 nt, Human
uugggaggaacagaggga

SEQ ID NO: 230290 - RNA, 20 nt, Human
uuugaagagcauuaagucag

SEQ ID NO: 230291 - RNA, 21 nt, Human
accccaacccuaccccuuccc

SEQ ID NO: 230292 - RNA, 22 nt, Human
acccuaccccuucccuccggaa

SEQ ID NO: 230293 - RNA, 26 nt, Human
agacaugcauguggggcagugcuagg

SEQ ID NO: 230294 - RNA, 26 nt, Human
agagcgcccccaccccaacccuaccc

SEQ ID NO: 230295 - RNA, 24 nt, Human
aggccggagcggauucugggaagg

SEQ ID NO: 230296 - RNA, 25 nt, Human
aggccggagcggauucugggaagga

SEQ ID NO: 230297 - RNA, 22 nt, Human
aggugaacggucucggcccgag

SEQ ID NO: 230298 - RNA, 21 nt, Human
cagcggucccuccgacagcuu

SEQ ID NO: 230299 - RNA, 25 nt, Human
cagugcauaggcagacaugcaugug

SEQ ID NO: 230300 - RNA, 21 nt, Human
ccagcggucccuccgacagcu

SEQ ID NO: 230301 - RNA, 27 nt, Human
cccaacccuaccccuucccuccggaaa

SEQ ID NO: 230302 - RNA, 19 nt, Human
cccuaccccuucccuccgg

SEQ ID NO: 230303 - RNA, 27 nt, Human
ccuccaggcccucugucccggcucacc

SEQ ID NO: 230304 - RNA, 18 nt, Human
ccucugucaguucccagg

SEQ ID NO: 230305 - RNA, 18 nt, Human
cggcaggaaggaaaggcc

SEQ ID NO: 230306 - RNA, 18 nt, Human
cgugucaacucugccugu

SEQ ID NO: 230307 - RNA, 22 nt, Human
cucugccugugggucuuuggcc

SEQ ID NO: 230308 - RNA, 19 nt, Human
gcccccaccccaacccuac

SEQ ID NO: 230309 - RNA, 18 nt, Human
gcggcaggaaggaaaggc

SEQ ID NO: 230310 - RNA, 20 nt, Human
ggauaaggggaggugaacgg

SEQ ID NO: 230311 - RNA, 18 nt, Human
uaggcagacaugcaugug

SEQ ID NO: 230312 - RNA, 26 nt, Human
ucccuccaggcccucugucaguuccc

SEQ ID NO: 230313 - RNA, 21 nt, Human
ugcauguggggcagugcuagg

SEQ ID NO: 230314 - RNA, 20 nt, Human
ugccugugggucuuuggccu

SEQ ID NO: 230315 - RNA, 22 nt, Human
ugggaaggagcgcaacaccggu

SEQ ID NO: 230316 - RNA, 24 nt, Human
ugggggcccugccgggccaagagc

SEQ ID NO: 230317 - RNA, 22 nt, Human
aaccaaaagcaaaggcggcaga

SEQ ID NO: 230318 - RNA, 19 nt, Human
aagauuuuuauuuggcuuu

SEQ ID NO: 230319 - RNA, 25 nt, Human
auuccaacccaaucugcccccaacc

SEQ ID NO: 230320 - RNA, 22 nt, Human
caaaagcaaaggcggcagauga

SEQ ID NO: 230321 - RNA, 22 nt, Human
caaccaaaagcaaaggcggcag

SEQ ID NO: 230322 - RNA, 21 nt, Human
caacccaaucugcccccaacc

SEQ ID NO: 230323 - RNA, 19 nt, Human
caaucugcccccaaccaaa

SEQ ID NO: 230324 - RNA, 20 nt, Human
cagcuuccuugacuugagag

SEQ ID NO: 230325 - RNA, 21 nt, Human
caugccaaucuccaccaucuu

SEQ ID NO: 230326 - RNA, 23 nt, Human
ccaaucuccaccaucuuugucug

SEQ ID NO: 230327 - RNA, 19 nt, Human
cccagcccagcuuccuuga

SEQ ID NO: 230328 - RNA, 21 nt, Human
cccccaaccaaaagcaaaggc

SEQ ID NO: 230329 - RNA, 21 nt, Human
ccuugcuguguguucugccgu

SEQ ID NO: 230330 - RNA, 22 nt, Human
cugcccccaaccaaaagcaaag

SEQ ID NO: 230331 - RNA, 26 nt, Human
gccaauggggugauccccagaaagga

SEQ ID NO: 230332 - RNA, 22 nt, Human
gcccccaaccaaaagcaaaggc

SEQ ID NO: 230333 - RNA, 20 nt, Human
gcucagcugcagcucagggu

SEQ ID NO: 230334 - RNA, 23 nt, Human
ggauacugcccagcccagcuucc

SEQ ID NO: 230335 - RNA, 19 nt, Human
ggggcaacgggcuggaagc

SEQ ID NO: 230336 - RNA, 21 nt, Human
uaaguuuuugugcuuggucca

SEQ ID NO: 230337 - RNA, 22 nt, Human
uccccagaaaggaccuuuccuu

SEQ ID NO: 230338 - RNA, 23 nt, Human
ugcccccaaccaaaagcaaaggc

SEQ ID NO: 230339 - RNA, 21 nt, Human
uggaaagcauuccaacccaau

SEQ ID NO: 230340 - RNA, 21 nt, Human
uggggcaacgggcuggaagcu

SEQ ID NO: 230341 - RNA, 21 nt, Human
ugguccaggauuccuccccag

SEQ ID NO: 230342 - RNA, 22 nt, Human
aaaacacaaaacauucacacaa

SEQ ID NO: 230343 - RNA, 24 nt, Human
aaaagcacugauggauggcuaccg

SEQ ID NO: 230344 - RNA, 19 nt, Human
aaaaggaaaccaaaccaaa

SEQ ID NO: 230345 - RNA, 27 nt, Human
aaacaaaacacaaaacaagccuuucgg

SEQ ID NO: 230346 - RNA, 22 nt, Human
aaacaggaagugggaucaucaa

SEQ ID NO: 230347 - RNA, 24 nt, Human
aaacaggaagugggaucaucaaga

SEQ ID NO: 230348 - RNA, 25 nt, Human
aaacuagcuuggcagucaaucuuca

SEQ ID NO: 230349 - RNA, 19 nt, Human
aaagggcauuucucccuca

SEQ ID NO: 230350 - RNA, 21 nt, Human
aaauaaaauacuguuuuucuu

SEQ ID NO: 230351 - RNA, 20 nt, Human
aacuaauaaaaaagcuguaa

SEQ ID NO: 230352 - RNA, 22 nt, Human
aacucugguauaucccaagcag

SEQ ID NO: 230353 - RNA, 20 nt, Human
aacuuaccuauccagcucca

SEQ ID NO: 230354 - RNA, 23 nt, Human
aagauggaaacaucagaagaaaa

SEQ ID NO: 230355 - RNA, 19 nt, Human
aaggaaaccaaaccaaacc

SEQ ID NO: 230356 - RNA, 21 nt, Human
aaguuaaaaggaaaccaaacc

SEQ ID NO: 230357 - RNA, 18 nt, Human
aaucacaaagugcaggaa

SEQ ID NO: 230358 - RNA, 23 nt, Human
agaaaagcaaauaacaaaaagaa

SEQ ID NO: 230359 - RNA, 19 nt, Human
agaagaacaaauggauaca

SEQ ID NO: 230360 - RNA, 19 nt, Human
agaagccagcagagugaaa

SEQ ID NO: 230361 - RNA, 19 nt, Human
agaauggagaugcugcaaa

SEQ ID NO: 230362 - RNA, 18 nt, Human
agagugucauucuagaaa

SEQ ID NO: 230363 - RNA, 19 nt, Human
agcaaagugaacagagugu

SEQ ID NO: 230364 - RNA, 22 nt, Human
agcauggauaaacaaaacacaa

SEQ ID NO: 230365 - RNA, 24 nt, Human
aggagaaaagcaaauaacaaaaag

SEQ ID NO: 230366 - RNA, 19 nt, Human
aggaggaagggggugugug

SEQ ID NO: 230367 - RNA, 22 nt, Human
aggaggaaggggguguguggcc

SEQ ID NO: 230368 - RNA, 21 nt, Human
aggaucaaaaguugagaagcc

SEQ ID NO: 230369 - RNA, 18 nt, Human
aggcaagggcaccggcgc

SEQ ID NO: 230370 - RNA, 18 nt, Human
aggcaagggcaccggcgc

SEQ ID NO: 230371 - RNA, 28 nt, Human
aggcacaauucuuuggaguacaauccaa

SEQ ID NO: 230372 - RNA, 23 nt, Human
agguuaggaucaucaggacugca

SEQ ID NO: 230373 - RNA, 18 nt, Human
agguuucuuuccccccac

SEQ ID NO: 230374 - RNA, 23 nt, Human
auaauuaauagcaccaguguguc

SEQ ID NO: 230375 - RNA, 21 nt, Human
augcugccuuccagcccuaaa

SEQ ID NO: 230376 - RNA, 25 nt, Human
caaaacacaaaacauucacacaaaa

SEQ ID NO: 230377 - RNA, 23 nt, Human
caaaauguacucccuuauaaaac

SEQ ID NO: 230378 - RNA, 20 nt, Human
caaagugcaggaacucgaua

SEQ ID NO: 230379 - RNA, 19 nt, Human
caacagaagaacaaaugga

SEQ ID NO: 230380 - RNA, 22 nt, Human
caacagaagaacaaauggauac

SEQ ID NO: 230381 - RNA, 25 nt, Human
caagggcaccggcgcguuggagacc

SEQ ID NO: 230382 - RNA, 21 nt, Human
cacaaaacauucacacaaaaa

SEQ ID NO: 230383 - RNA, 22 nt, Human
cacacuguggucuuaaaaccac

SEQ ID NO: 230384 - RNA, 24 nt, Human
cacacuguggucuuaaaaccacag

SEQ ID NO: 230385 - RNA, 19 nt, Human
caccaggauuuggcaaaca

SEQ ID NO: 230386 - RNA, 19 nt, Human
cacccaaacuagcuuggca

SEQ ID NO: 230387 - RNA, 22 nt, Human
caccccagccccugcuacgcaa

SEQ ID NO: 230388 - RNA, 18 nt, Human
caccccggagagcaaggc

SEQ ID NO: 230389 - RNA, 24 nt, Human
caccuaccccgggagcagccugca

SEQ ID NO: 230390 - RNA, 24 nt, Human
cacucuguggccucacaacugccc

SEQ ID NO: 230391 - RNA, 22 nt, Human
cacuguuccugaugcccuaagu

SEQ ID NO: 230392 - RNA, 21 nt, Human
cagcagaggagugggggucug

SEQ ID NO: 230393 - RNA, 21 nt, Human
cagcauacaugggcucacacg

SEQ ID NO: 230394 - RNA, 21 nt, Human
cagcuccaacaauugccaaaa

SEQ ID NO: 230395 - RNA, 23 nt, Human
caguccucuugcugcaaccuuga

SEQ ID NO: 230396 - RNA, 24 nt, Human
cauggauaaacaaaacacaaaaca

SEQ ID NO: 230397 - RNA, 23 nt, Human
cauuuuauuaaccaccccggaga

SEQ ID NO: 230398 - RNA, 19 nt, Human
ccacuaggaaacuccacgg

SEQ ID NO: 230399 - RNA, 21 nt, Human
ccacugcccccgcgccccgcc

SEQ ID NO: 230400 - RNA, 23 nt, Human
cccccaccccagccccugcuacg

SEQ ID NO: 230401 - RNA, 20 nt, Human
ccccccaccccagccccugc

SEQ ID NO: 230402 - RNA, 19 nt, Human
cccccgcgccccgccuccg

SEQ ID NO: 230403 - RNA, 24 nt, Human
cccccggaggccgcuucgcugcuu

SEQ ID NO: 230404 - RNA, 22 nt, Human
ccccgccuccgcgcuucccuca

SEQ ID NO: 230405 - RNA, 22 nt, Human
ccgaccacugcccccgcgcccc

SEQ ID NO: 230406 - RNA, 23 nt, Human
ccgacccccgacuuccgagcgcg

SEQ ID NO: 230407 - RNA, 20 nt, Human
ccgggagcagccugcacucc

SEQ ID NO: 230408 - RNA, 21 nt, Human
ccucaccuaccccgggagcag

SEQ ID NO: 230409 - RNA, 21 nt, Human
ccucuucagcaaacuuuccua

SEQ ID NO: 230410 - RNA, 22 nt, Human
cgacccccgacuuccgagcgcg

SEQ ID NO: 230411 - RNA, 24 nt, Human
cgccuagcggcgucccccggaggc

SEQ ID NO: 230412 - RNA, 19 nt, Human
cucagucaaaauguacucc

SEQ ID NO: 230413 - RNA, 18 nt, Human
cucccucauuccuggcua

SEQ ID NO: 230414 - RNA, 22 nt, Human
cuccgcgccgacccccgacuuc

SEQ ID NO: 230415 - RNA, 21 nt, Human
cucuagaagggagggaaggag

SEQ ID NO: 230416 - RNA, 20 nt, Human
cucucccagucuacccacca

SEQ ID NO: 230417 - RNA, 21 nt, Human
cugaaaaauguaaucuuugug

SEQ ID NO: 230418 - RNA, 24 nt, Human
cugccauaguagaagaggccuggg

SEQ ID NO: 230419 - RNA, 23 nt, Human
cugcuugagccugggggcccagg

SEQ ID NO: 230420 - RNA, 24 nt, Human
cugcuugagccugggggcccaggg

SEQ ID NO: 230421 - RNA, 24 nt, Human
cuguggccucacaacugccccccu

SEQ ID NO: 230422 - RNA, 19 nt, Human
gaacaaauggauacacggg

SEQ ID NO: 230423 - RNA, 18 nt, Human
gaaggaagaggggcagga

SEQ ID NO: 230424 - RNA, 22 nt, Human
gaccacugcccccgcgccccgc

SEQ ID NO: 230425 - RNA, 23 nt, Human
gcaacagcacaccacaucuccug

SEQ ID NO: 230426 - RNA, 23 nt, Human
gcaaggcuguagaguaaggcaaa

SEQ ID NO: 230427 - RNA, 24 nt, Human
gcagcagaggagugggggucugaa

SEQ ID NO: 230428 - RNA, 24 nt, Human
gcagcagaggagugggggucugaa

SEQ ID NO: 230429 - RNA, 23 nt, Human
gccccgccuccgcgcuucccuca

SEQ ID NO: 230430 - RNA, 21 nt, Human
gcgguggcggcggcucgcgcc

SEQ ID NO: 230431 - RNA, 18 nt, Human
gcugcaaacacaaggcac

SEQ ID NO: 230432 - RNA, 28 nt, Human
ggagaagccagcagagugaaagcucagg

SEQ ID NO: 230433 - RNA, 24 nt, Human
ggauaaacaaaacacaaaacauuc

SEQ ID NO: 230434 - RNA, 19 nt, Human
ggcaggagaugcagaugca

SEQ ID NO: 230435 - RNA, 19 nt, Human
ggcagucaaucuucagucc

SEQ ID NO: 230436 - RNA, 25 nt, Human
ggcauuucucccucauuccuggcua

SEQ ID NO: 230437 - RNA, 19 nt, Human
ggcgcgggcgguggcggcg

SEQ ID NO: 230438 - RNA, 19 nt, Human
ggcgguggcggcggcucgc

SEQ ID NO: 230439 - RNA, 18 nt, Human
gggcgguggcggcggcuc

SEQ ID NO: 230440 - RNA, 19 nt, Human
gggcgguggcggcggcucg

SEQ ID NO: 230441 - RNA, 25 nt, Human
gggcgguggcggcggcucgcgccgg

SEQ ID NO: 230442 - RNA, 24 nt, Human
gguauucagauacuugugccagug

SEQ ID NO: 230443 - RNA, 24 nt, Human
uaaaaaauaaaauucugcuuaaaa

SEQ ID NO: 230444 - RNA, 21 nt, Human
uaaaaaauauaccacacaggu

SEQ ID NO: 230445 - RNA, 22 nt, Human
uaaaagcacugauggauggcua

SEQ ID NO: 230446 - RNA, 22 nt, Human
uaaaaggaaaccaaaccaaacc

SEQ ID NO: 230447 - RNA, 20 nt, Human
uaaaauacagauaacuggag

SEQ ID NO: 230448 - RNA, 22 nt, Human
uaagguaucaucuuguaaagaa

SEQ ID NO: 230449 - RNA, 20 nt, Human
uaaguuacaccaccucuccc

SEQ ID NO: 230450 - RNA, 19 nt, Human
uacaccaccucucccaguc

SEQ ID NO: 230451 - RNA, 26 nt, Human
uaccuuuggcacaggauguuuauuuc

SEQ ID NO: 230452 - RNA, 24 nt, Human
uagaagaggccugggagaagccag

SEQ ID NO: 230453 - RNA, 21 nt, Human
uagcaguauaauaaucccugu

SEQ ID NO: 230454 - RNA, 24 nt, Human
uagcggcgucccccggaggccgcu

SEQ ID NO: 230455 - RNA, 19 nt, Human
uagguuucuuuccccccac

SEQ ID NO: 230456 - RNA, 24 nt, Human
uauaugaaucucaaagguggguug

SEQ ID NO: 230457 - RNA, 19 nt, Human
uaucagcugcccaaagauc

SEQ ID NO: 230458 - RNA, 18 nt, Human
ucaaaauguacucccuua

SEQ ID NO: 230459 - RNA, 23 nt, Human
ucagucaaaauguacucccuuau

SEQ ID NO: 230460 - RNA, 19 nt, Human
ucauuccuggcuaguccca

SEQ ID NO: 230461 - RNA, 19 nt, Human
uccacaguuggaauuccaa

SEQ ID NO: 230462 - RNA, 20 nt, Human
ucccaagcagauggaaacag

SEQ ID NO: 230463 - RNA, 18 nt, Human
uccccccaccccagcccc

SEQ ID NO: 230464 - RNA, 25 nt, Human
ucccuauuucuucuguguaaguucc

SEQ ID NO: 230465 - RNA, 24 nt, Human
uccucacgcaaaucagagggaagu

SEQ ID NO: 230466 - RNA, 18 nt, Human
ucuaaaugaccaauaccu

SEQ ID NO: 230467 - RNA, 22 nt, Human
ucugccagauacuuaacacuag

SEQ ID NO: 230468 - RNA, 19 nt, Human
ugaaauacugagugcaagu

SEQ ID NO: 230469 - RNA, 21 nt, Human
ugaaaugaacuagccaggaaa

SEQ ID NO: 230470 - RNA, 19 nt, Human
ugacgugaaaacuuugcaa

SEQ ID NO: 230471 - RNA, 24 nt, Human
ugagacugaggagguucugcugga

SEQ ID NO: 230472 - RNA, 21 nt, Human
ugagcaaagugaacagagugu

SEQ ID NO: 230473 - RNA, 18 nt, Human
ugagugcaaguauuugcc

SEQ ID NO: 230474 - RNA, 24 nt, Human
ugcaacagcacaccacaucuccug

SEQ ID NO: 230475 - RNA, 21 nt, Human
ugccaaaaagggcauuucucc

SEQ ID NO: 230476 - RNA, 24 nt, Human
ugccagauacuuaacacuaguucc

SEQ ID NO: 230477 - RNA, 23 nt, Human
ugcuggaucgaugagacagggga

SEQ ID NO: 230478 - RNA, 19 nt, Human
ugcuugagccugggggccc

SEQ ID NO: 230479 - RNA, 23 nt, Human
uggaaacaucagaagaaaacugg

SEQ ID NO: 230480 - RNA, 18 nt, Human
uggacagcagcagaggag

SEQ ID NO: 230481 - RNA, 21 nt, Human
uggaguacaauccaaagaacu

SEQ ID NO: 230482 - RNA, 24 nt, Human
uggaguacaauccaaagaacucua

SEQ ID NO: 230483 - RNA, 27 nt, Human
uggcagggaacugucacacugugguca

SEQ ID NO: 230484 - RNA, 19 nt, Human
uggccugagacuugcugga

SEQ ID NO: 230485 - RNA, 21 nt, Human
uggcggcggcucgcgccggag

SEQ ID NO: 230486 - RNA, 18 nt, Human
ugucaagaccuuagggau

SEQ ID NO: 230487 - RNA, 24 nt, Human
uguccuacacucauaauagcuaaa

SEQ ID NO: 230488 - RNA, 25 nt, Human
uguggccugagacuugcuggaguga

SEQ ID NO: 230489 - RNA, 18 nt, Human
uuccuuguucuauagcau

SEQ ID NO: 230490 - RNA, 21 nt, Human
uugcauaguguuaaaggcuau

SEQ ID NO: 230491 - RNA, 18 nt, Human
uugguaggaggaaggggg

SEQ ID NO: 230492 - RNA, 18 nt, Human
uuuccccccaccccagcc

SEQ ID NO: 230493 - RNA, 20 nt, Human
uuuuucuucuguuuugucaa

SEQ ID NO: 230494 - RNA, 26 nt, Human
aaaacucaagugcccccuccggccgg

SEQ ID NO: 230495 - RNA, 21 nt, Human
aaacaggguccaguaaaugua

SEQ ID NO: 230496 - RNA, 24 nt, Human
aaagugcuagaauuacaggcguga

SEQ ID NO: 230497 - RNA, 23 nt, Human
aacccccucuucaagcuuuccuc

SEQ ID NO: 230498 - RNA, 22 nt, Human
aaccugccuucucucuaacccc

SEQ ID NO: 230499 - RNA, 23 nt, Human
aagaaaugugcacaacccagagc

SEQ ID NO: 230500 - RNA, 20 nt, Human
aaggaugaauggagggaugg

SEQ ID NO: 230501 - RNA, 19 nt, Human
aagugcccccaugggaggg

SEQ ID NO: 230502 - RNA, 19 nt, Human
aagugcccccaugggaggg

SEQ ID NO: 230503 - RNA, 26 nt, Human
aagugcuagaauuacaggcgugagcc

SEQ ID NO: 230504 - RNA, 24 nt, Human
aaucaacucuaugagggcagagac

SEQ ID NO: 230505 - RNA, 23 nt, Human
aaugcuugucuuccucacuagac

SEQ ID NO: 230506 - RNA, 21 nt, Human
aauggauggaaagauggaugg

SEQ ID NO: 230507 - RNA, 18 nt, Human
aauuacaggcgugagcca

SEQ ID NO: 230508 - RNA, 21 nt, Human
aauuacaggcgugagccacca

SEQ ID NO: 230509 - RNA, 23 nt, Human
acaccacuugugacaaacaaagu

SEQ ID NO: 230510 - RNA, 18 nt, Human
acaggguuucaccauguu

SEQ ID NO: 230511 - RNA, 21 nt, Human
acaggguuucaccauguuggc

SEQ ID NO: 230512 - RNA, 24 nt, Human
acaggguuucaccauguuggccag

SEQ ID NO: 230513 - RNA, 18 nt, Human
accauguuggccaggcug

SEQ ID NO: 230514 - RNA, 25 nt, Human
acccgcuucagucucccaaagugcu

SEQ ID NO: 230515 - RNA, 21 nt, Human
acucugaucagcaagaagcuu

SEQ ID NO: 230516 - RNA, 22 nt, Human
agaaaugugcacaacccagagc

SEQ ID NO: 230517 - RNA, 21 nt, Human
agacuaugucaccacuguccc

SEQ ID NO: 230518 - RNA, 23 nt, Human
agagcaguggugcaaucuuggcu

SEQ ID NO: 230519 - RNA, 24 nt, Human
agagcaguggugcaaucuuggcuc

SEQ ID NO: 230520 - RNA, 23 nt, Human
agccccuggcacacaguagguac

SEQ ID NO: 230521 - RNA, 22 nt, Human
aggcagcaccauagucuuccca

SEQ ID NO: 230522 - RNA, 22 nt, Human
aguagagacaggguuucaccau

SEQ ID NO: 230523 - RNA, 18 nt, Human
aguagcuggaauuacagg

SEQ ID NO: 230524 - RNA, 23 nt, Human
aguagguacucaauaaauauaug

SEQ ID NO: 230525 - RNA, 21 nt, Human
aucacuuugaaaccgaaaaag

SEQ ID NO: 230526 - RNA, 24 nt, Human
auuuuuguacuuuuaguagagaca

SEQ ID NO: 230527 - RNA, 24 nt, Human
caaagugcuagaauuacaggcgug

SEQ ID NO: 230528 - RNA, 21 nt, Human
caaauguccccaucccaccca

SEQ ID NO: 230529 - RNA, 24 nt, Human
caacaauaucuuaaguagucucaa

SEQ ID NO: 230530 - RNA, 23 nt, Human
caagcaccauagcucugaauggg

SEQ ID NO: 230531 - RNA, 20 nt, Human
caagcgauucuccugccuca

SEQ ID NO: 230532 - RNA, 24 nt, Human
caauaaacaccacuugugacaaac

SEQ ID NO: 230533 - RNA, 24 nt, Human
caccacauccagcuaauuuuugua

SEQ ID NO: 230534 - RNA, 23 nt, Human
caccauagcucugaaugggccug

SEQ ID NO: 230535 - RNA, 21 nt, Human
caccauguuggccaggcuggu

SEQ ID NO: 230536 - RNA, 23 nt, Human
caccauguuggccaggcuggucu

SEQ ID NO: 230537 - RNA, 24 nt, Human
caccauguuggccaggcuggucuu

SEQ ID NO: 230538 - RNA, 27 nt, Human
caccauguuggccaggcuggucuucaa

SEQ ID NO: 230539 - RNA, 22 nt, Human
cacucuguucugacauuaggaa

SEQ ID NO: 230540 - RNA, 21 nt, Human
cacuguaaccuccgccuccug

SEQ ID NO: 230541 - RNA, 23 nt, Human
cacuguaaccuccgccuccuggg

SEQ ID NO: 230542 - RNA, 19 nt, Human
cacuugugacaaacaaagu

SEQ ID NO: 230543 - RNA, 22 nt, Human
cagagugacagcuggaaugcaa

SEQ ID NO: 230544 - RNA, 21 nt, Human
cagcaagaagcuugcagagga

SEQ ID NO: 230545 - RNA, 24 nt, Human
cagcaccauagucuucccagccaa

SEQ ID NO: 230546 - RNA, 21 nt, Human
cagcuugaaaauggagaacau

SEQ ID NO: 230547 - RNA, 24 nt, Human
caggguuucaccauguuggccagg

SEQ ID NO: 230548 - RNA, 21 nt, Human
caguggugauguuauuccucu

SEQ ID NO: 230549 - RNA, 18 nt, Human
cauggcucccgagcccug

SEQ ID NO: 230550 - RNA, 23 nt, Human
cauguuggccaggcuggucuuca

SEQ ID NO: 230551 - RNA, 19 nt, Human
ccaaaacucaagugccccc

SEQ ID NO: 230552 - RNA, 22 nt, Human
ccaaagugcuagaauuacaggc

SEQ ID NO: 230553 - RNA, 24 nt, Human
ccaaagugcuagaauuacaggcgu

SEQ ID NO: 230554 - RNA, 22 nt, Human
ccaacacugcucacuucuucca

SEQ ID NO: 230555 - RNA, 21 nt, Human
ccaccuggccaugggaucagg

SEQ ID NO: 230556 - RNA, 19 nt, Human
ccagaacuugaagguggca

SEQ ID NO: 230557 - RNA, 23 nt, Human
ccagcaagcaccauagcucugaa

SEQ ID NO: 230558 - RNA, 18 nt, Human
ccagcaauucccacuggu

SEQ ID NO: 230559 - RNA, 24 nt, Human
cccaagaaccucaguugagaaaua

SEQ ID NO: 230560 - RNA, 21 nt, Human
cccaccaccacauccagcuaa

SEQ ID NO: 230561 - RNA, 19 nt, Human
ccccaucccacccacucac

SEQ ID NO: 230562 - RNA, 28 nt, Human
cccucuucaagcuuuccuccacucggcu

SEQ ID NO: 230563 - RNA, 24 nt, Human
ccgccuccuggguucaagcgauuc

SEQ ID NO: 230564 - RNA, 24 nt, Human
ccgcuucagucucccaaagugcua

SEQ ID NO: 230565 - RNA, 19 nt, Human
ccuccgccuccuggguuca

SEQ ID NO: 230566 - RNA, 24 nt, Human
ccuccuggguucaagcgauucucc

SEQ ID NO: 230567 - RNA, 19 nt, Human
ccucugcuuaaaacugucc

SEQ ID NO: 230568 - RNA, 20 nt, Human
ccucugcuuaaaacugucca

SEQ ID NO: 230569 - RNA, 22 nt, Human
ccugaccucgggugauccaccc

SEQ ID NO: 230570 - RNA, 18 nt, Human
ccugagaucuguauccca

SEQ ID NO: 230571 - RNA, 23 nt, Human
ccugaguagcuggaauuacaggc

SEQ ID NO: 230572 - RNA, 23 nt, Human
ccuggguucaagcgauucuccug

SEQ ID NO: 230573 - RNA, 25 nt, Human
ccuugccaaaacucaagugccccca

SEQ ID NO: 230574 - RNA, 20 nt, Human
cgaaaguuaucugggccugg

SEQ ID NO: 230575 - RNA, 21 nt, Human
cgcccaccaccacauccagcu

SEQ ID NO: 230576 - RNA, 24 nt, Human
cucacuguaaccuccgccuccugg

SEQ ID NO: 230577 - RNA, 26 nt, Human
cuccugaccucgggugauccacccgc

SEQ ID NO: 230578 - RNA, 19 nt, Human
cuccugccucagacuccug

SEQ ID NO: 230579 - RNA, 21 nt, Human
cuccuggguucaagcgauucu

SEQ ID NO: 230580 - RNA, 23 nt, Human
cugccucagacuccugaguagcu

SEQ ID NO: 230581 - RNA, 24 nt, Human
cugguuccuccagcaauucccacu

SEQ ID NO: 230582 - RNA, 24 nt, Human
cuuaaaacuguccacuggcuucuc

SEQ ID NO: 230583 - RNA, 19 nt, Human
cuucaagcuuuccuccacu

SEQ ID NO: 230584 - RNA, 22 nt, Human
cuugccaaaacucaagugcccc

SEQ ID NO: 230585 - RNA, 24 nt, Human
cuugccaaaacucaagugccccca

SEQ ID NO: 230586 - RNA, 24 nt, Human
cuuuuaguagagacaggguuucac

SEQ ID NO: 230587 - RNA, 18 nt, Human
cuuuuuuuuuuuuuuuug

SEQ ID NO: 230588 - RNA, 18 nt, Human
gaaauauuuauggcagcu

SEQ ID NO: 230589 - RNA, 27 nt, Human
gaaggauggauggagguaauggauggg

SEQ ID NO: 230590 - RNA, 19 nt, Human
gaauuacaggcgugagcca

SEQ ID NO: 230591 - RNA, 24 nt, Human
gaccucgggugauccacccgcuuc

SEQ ID NO: 230592 - RNA, 18 nt, Human
gagacuccccuuugcugg

SEQ ID NO: 230593 - RNA, 19 nt, Human
gagcaaagcccuggagcau

SEQ ID NO: 230594 - RNA, 20 nt, Human
gagcaaagcccuggagcaug

SEQ ID NO: 230595 - RNA, 25 nt, Human
gaguagcuggaauuacaggcgccca

SEQ ID NO: 230596 - RNA, 23 nt, Human
gcaaagucaaaguuuuuuccuuu

SEQ ID NO: 230597 - RNA, 21 nt, Human
gcaccauagucuucccagcca

SEQ ID NO: 230598 - RNA, 19 nt, Human
gcaggcaccagcaagcacc

SEQ ID NO: 230599 - RNA, 19 nt, Human
gcaggcaccagcaagcacc

SEQ ID NO: 230600 - RNA, 23 nt, Human
gcauggagcuggaagguuguggg

SEQ ID NO: 230601 - RNA, 21 nt, Human
gccaaaacucaagugccccca

SEQ ID NO: 230602 - RNA, 23 nt, Human
gcccacagaccuuuacccccaag

SEQ ID NO: 230603 - RNA, 18 nt, Human
gcccaccaccacauccag

SEQ ID NO: 230604 - RNA, 23 nt, Human
gcuggucuucaacuccugaccuc

SEQ ID NO: 230605 - RNA, 25 nt, Human
ggcaccagcaagcaccauagcucug

SEQ ID NO: 230606 - RNA, 24 nt, Human
ggcuggucuucaacuccugaccuc

SEQ ID NO: 230607 - RNA, 22 nt, Human
ggguuucaccauguuggccagg

SEQ ID NO: 230608 - RNA, 23 nt, Human
ggugauccacccgcuucagucuc

SEQ ID NO: 230609 - RNA, 20 nt, Human
ggugcaauaagacaaccacc

SEQ ID NO: 230610 - RNA, 20 nt, Human
gucgcugcccggcgccucgg

SEQ ID NO: 230611 - RNA, 20 nt, Human
gugacccaucuuagcaacgg

SEQ ID NO: 230612 - RNA, 24 nt, Human
gugauccacccgcuucagucuccc

SEQ ID NO: 230613 - RNA, 23 nt, Human
uaaaaacacuuucaggaaaaucc

SEQ ID NO: 230614 - RNA, 26 nt, Human
uaaacaccacuugugacaaacaaagu

SEQ ID NO: 230615 - RNA, 18 nt, Human
uaagacaaccaccuggcc

SEQ ID NO: 230616 - RNA, 20 nt, Human
uaauaaaaaugcaaucucua

SEQ ID NO: 230617 - RNA, 24 nt, Human
uaauuuuuguacuuuuaguagaga

SEQ ID NO: 230618 - RNA, 23 nt, Human
uacaggcgugagccaccacaccc

SEQ ID NO: 230619 - RNA, 20 nt, Human
uacccauuaaacauguucaa

SEQ ID NO: 230620 - RNA, 24 nt, Human
uagaauuacaggcgugagccacca

SEQ ID NO: 230621 - RNA, 24 nt, Human
uagaauuacaggcgugagccacca

SEQ ID NO: 230622 - RNA, 22 nt, Human
uagacaaucaacucuaugaggg

SEQ ID NO: 230623 - RNA, 22 nt, Human
uagagacaggguuucaccaugu

SEQ ID NO: 230624 - RNA, 20 nt, Human
uagcuggaauuacaggcgcc

SEQ ID NO: 230625 - RNA, 22 nt, Human
uaggaaaugcuuuaauaaaaau

SEQ ID NO: 230626 - RNA, 24 nt, Human
uaguagagacaggguuucaccaug

SEQ ID NO: 230627 - RNA, 26 nt, Human
uaguagagacaggguuucaccauguu

SEQ ID NO: 230628 - RNA, 21 nt, Human
uagugaguguucuggagcaaa

SEQ ID NO: 230629 - RNA, 20 nt, Human
uaucauaacucaacagucug

SEQ ID NO: 230630 - RNA, 23 nt, Human
uaucccaacagcacuuguccaaa

SEQ ID NO: 230631 - RNA, 25 nt, Human
ucaacuccugaccucgggugaucca

SEQ ID NO: 230632 - RNA, 19 nt, Human
ucaagcgauucuccugccu

SEQ ID NO: 230633 - RNA, 23 nt, Human
ucacuguaaccuccgccuccugg

SEQ ID NO: 230634 - RNA, 24 nt, Human
ucacuguaaccuccgccuccuggg

SEQ ID NO: 230635 - RNA, 25 nt, Human
ucacuguaaccuccgccuccugggu

SEQ ID NO: 230636 - RNA, 27 nt, Human
ucacuguaaccuccgccuccuggguuc

SEQ ID NO: 230637 - RNA, 22 nt, Human
ucagucucccaaagugcuagaa

SEQ ID NO: 230638 - RNA, 22 nt, Human
uccaaggaaauacagaagcaag

SEQ ID NO: 230639 - RNA, 21 nt, Human
uccacccgcuucagucuccca

SEQ ID NO: 230640 - RNA, 24 nt, Human
ucccaaagugcuagaauuacaggc

SEQ ID NO: 230641 - RNA, 18 nt, Human
ucccagccaagguggaag

SEQ ID NO: 230642 - RNA, 19 nt, Human
ucccagccaagguggaagu

SEQ ID NO: 230643 - RNA, 22 nt, Human
uccucugcuuaaaacuguccac

SEQ ID NO: 230644 - RNA, 24 nt, Human
uccugaguagcuggaauuacaggc

SEQ ID NO: 230645 - RNA, 21 nt, Human
uccuggguucaagcgauucuc

SEQ ID NO: 230646 - RNA, 24 nt, Human
uccuggguucaagcgauucuccug

SEQ ID NO: 230647 - RNA, 24 nt, Human
uccuugaucauucucacacccagu

SEQ ID NO: 230648 - RNA, 18 nt, Human
uccuuuuuuuuuuuuuuu

SEQ ID NO: 230649 - RNA, 21 nt, Human
ucucaaccugccuucucucua

SEQ ID NO: 230650 - RNA, 24 nt, Human
ucuccgcugcaggggucgcugccc

SEQ ID NO: 230651 - RNA, 18 nt, Human
ucucuaaguugccauggc

SEQ ID NO: 230652 - RNA, 18 nt, Human
ucuggagcaaagcccugg

SEQ ID NO: 230653 - RNA, 24 nt, Human
ucuucaauuauuucaacaauaucu

SEQ ID NO: 230654 - RNA, 19 nt, Human
ucuugcucuguuccccagg

SEQ ID NO: 230655 - RNA, 23 nt, Human
ucuugcucuguuccccaggcugg

SEQ ID NO: 230656 - RNA, 24 nt, Human
ucuugcucuguuccccaggcugga

SEQ ID NO: 230657 - RNA, 22 nt, Human
ugaccucgggugauccacccgc

SEQ ID NO: 230658 - RNA, 24 nt, Human
ugaccucgggugauccacccgcuu

SEQ ID NO: 230659 - RNA, 26 nt, Human
ugagaaaauaagauaaaauacauuga

SEQ ID NO: 230660 - RNA, 20 nt, Human
ugagcaaagagguugcaaac

SEQ ID NO: 230661 - RNA, 19 nt, Human
ugaggcaauaguauuuuac

SEQ ID NO: 230662 - RNA, 21 nt, Human
ugcaauagguguucagugacc

SEQ ID NO: 230663 - RNA, 21 nt, Human
ugcaaucuuggcucacuguaa

SEQ ID NO: 230664 - RNA, 22 nt, Human
ugccaaaacucaagugccccca

SEQ ID NO: 230665 - RNA, 24 nt, Human
ugccaaaacucaagugcccccaug

SEQ ID NO: 230666 - RNA, 21 nt, Human
ugccucagacuccugaguagc

SEQ ID NO: 230667 - RNA, 24 nt, Human
ugccucagacuccugaguagcugg

SEQ ID NO: 230668 - RNA, 24 nt, Human
ugccucugguuccuccagcaauuc

SEQ ID NO: 230669 - RNA, 24 nt, Human
ugcuagaauuacaggcgugagcca

SEQ ID NO: 230670 - RNA, 21 nt, Human
ugcucuguuccccaggcugga

SEQ ID NO: 230671 - RNA, 22 nt, Human
ugcucuguuccccaggcuggag

SEQ ID NO: 230672 - RNA, 24 nt, Human
uggaagugccucugguuccuccag

SEQ ID NO: 230673 - RNA, 21 nt, Human
uggaauuacaggcgcccacca

SEQ ID NO: 230674 - RNA, 24 nt, Human
uggaauuacaggcgcccaccacca

SEQ ID NO: 230675 - RNA, 24 nt, Human
uggagagcaguggugcaaucuugg

SEQ ID NO: 230676 - RNA, 19 nt, Human
uggcaggcaccagcaagca

SEQ ID NO: 230677 - RNA, 22 nt, Human
uggcaggcaccagcaagcacca

SEQ ID NO: 230678 - RNA, 24 nt, Human
uggccaggcuggucuucaacuccu

SEQ ID NO: 230679 - RNA, 18 nt, Human
ugggagggucuugcaaca

SEQ ID NO: 230680 - RNA, 23 nt, Human
uggguucaagcgauucuccugcc

SEQ ID NO: 230681 - RNA, 23 nt, Human
uggugcaaucuuggcucacugua

SEQ ID NO: 230682 - RNA, 24 nt, Human
uuaaguagucucaaccugccuucu

SEQ ID NO: 230683 - RNA, 24 nt, Human
uuaguagagacaggguuucaccau

SEQ ID NO: 230684 - RNA, 20 nt, Human
uucaaauguccccaucccac

SEQ ID NO: 230685 - RNA, 21 nt, Human
uucaagcgauucuccugccuc

SEQ ID NO: 230686 - RNA, 23 nt, Human
uucaagcgauucuccugccucag

SEQ ID NO: 230687 - RNA, 25 nt, Human
uucaagcgauucuccugccucagac

SEQ ID NO: 230688 - RNA, 20 nt, Human
uucacaucuucccagccacc

SEQ ID NO: 230689 - RNA, 20 nt, Human
uucaggaaaauccaaggaaa

SEQ ID NO: 230690 - RNA, 18 nt, Human
uuccuccacucggcugcc

SEQ ID NO: 230691 - RNA, 22 nt, Human
uuccuccacucggcugcccuag

SEQ ID NO: 230692 - RNA, 23 nt, Human
uuccuuuuuuuuuuuuuuuugag

SEQ ID NO: 230693 - RNA, 24 nt, Human
uuucaccauguuggccaggcuggu

SEQ ID NO: 230694 - RNA, 20 nt, Human
uuuuuguacuuuuaguagag

SEQ ID NO: 230695 - RNA, 23 nt, Human
uuuuuuuuuuuuugagacagucu

SEQ ID NO: 230696 - RNA, 24 nt, Human
aagaagccacagacagaaucggca

SEQ ID NO: 230697 - RNA, 21 nt, Human
aggugggggagugugugccgg

SEQ ID NO: 230698 - RNA, 24 nt, Human
aggugggggagugugugccgggga

SEQ ID NO: 230699 - RNA, 18 nt, Human
caagggcaccgacgccgc

SEQ ID NO: 230700 - RNA, 18 nt, Human
caagggcaccgacgccgc

SEQ ID NO: 230701 - RNA, 20 nt, Human
cagaaucggcagggagugug

SEQ ID NO: 230702 - RNA, 22 nt, Human
cagcagccggcuccggggaaug

SEQ ID NO: 230703 - RNA, 18 nt, Human
ccccugggucauguaaac

SEQ ID NO: 230704 - RNA, 23 nt, Human
gcagggaagaagccacagacaga

SEQ ID NO: 230705 - RNA, 22 nt, Human
gcagggagugugacuauccaca

SEQ ID NO: 230706 - RNA, 22 nt, Human
gcaggggugagagugugcacuc

SEQ ID NO: 230707 - RNA, 20 nt, Human
ggaagaagccacagacagaa

SEQ ID NO: 230708 - RNA, 20 nt, Human
gugggggagugugugccggg

SEQ ID NO: 230709 - RNA, 19 nt, Human
gugggguagugugcacccc

SEQ ID NO: 230710 - RNA, 18 nt, Human
ugccggggaucugggcag

SEQ ID NO: 230711 - RNA, 20 nt, Human
ugggggagugugugccgggg

SEQ ID NO: 230712 - RNA, 19 nt, Human
ugggucauguaaacagcag

SEQ ID NO: 230713 - RNA, 25 nt, Human
ugucuguaugggcacaccugugggg

SEQ ID NO: 230714 - RNA, 18 nt, Human
aaaaaagugccagcccuu

SEQ ID NO: 230715 - RNA, 19 nt, Human
aagaagcccgcccgaauuc

SEQ ID NO: 230716 - RNA, 22 nt, Human
aagccacggcaaaacaucagga

SEQ ID NO: 230717 - RNA, 19 nt, Human
aagcggcacccccaccccc

SEQ ID NO: 230718 - RNA, 22 nt, Human
aaugaagaaaccaaacaccaga

SEQ ID NO: 230719 - RNA, 27 nt, Human
aaugaagaaaccaaacaccagaacccu

SEQ ID NO: 230720 - RNA, 21 nt, Human
acagcggcacccccacccccu

SEQ ID NO: 230721 - RNA, 21 nt, Human
acagcggcacccccaccccuc

SEQ ID NO: 230722 - RNA, 22 nt, Human
accaaacaccagaacccuaaac

SEQ ID NO: 230723 - RNA, 22 nt, Human
accagacgcaagagcccggcca

SEQ ID NO: 230724 - RNA, 19 nt, Human
agagagcacccccacccuc

SEQ ID NO: 230725 - RNA, 23 nt, Human
agagagcacccccacccucaaaa

SEQ ID NO: 230726 - RNA, 25 nt, Human
agagagcacccccacccucaaaauc

SEQ ID NO: 230727 - RNA, 25 nt, Human
agagcacccccacccucaaaauccu

SEQ ID NO: 230728 - RNA, 20 nt, Human
agagcagcacccccaccccc

SEQ ID NO: 230729 - RNA, 21 nt, Human
agccaauuuagagcggcaccc

SEQ ID NO: 230730 - RNA, 23 nt, Human
agcuggucccgugucgugacaca

SEQ ID NO: 230731 - RNA, 20 nt, Human
caaacaccagaacccuaaac

SEQ ID NO: 230732 - RNA, 24 nt, Human
caauccccaagccacggcaaaaca

SEQ ID NO: 230733 - RNA, 18 nt, Human
cacagcgcagaacaggau

SEQ ID NO: 230734 - RNA, 23 nt, Human
cacagcgcagaacaggaucaccc

SEQ ID NO: 230735 - RNA, 23 nt, Human
caccagaacccuaaacucaauga

SEQ ID NO: 230736 - RNA, 20 nt, Human
cacccccacccucaaaaucc

SEQ ID NO: 230737 - RNA, 22 nt, Human
cacccccucagagagagcaccc

SEQ ID NO: 230738 - RNA, 21 nt, Human
cacccucaaaauccuacuuug

SEQ ID NO: 230739 - RNA, 18 nt, Human
cagaaagugugccucccc

SEQ ID NO: 230740 - RNA, 21 nt, Human
cagagagagcggcacccccac

SEQ ID NO: 230741 - RNA, 21 nt, Human
cagagagagcggcacccccac

SEQ ID NO: 230742 - RNA, 24 nt, Human
cagagguuucccuuuguaaggcuu

SEQ ID NO: 230743 - RNA, 21 nt, Human
cagcacccccacccccucaga

SEQ ID NO: 230744 - RNA, 22 nt, Human
cagcgaagaagcccgcccgaau

SEQ ID NO: 230745 - RNA, 21 nt, Human
cagcgcagaacaggaucaccc

SEQ ID NO: 230746 - RNA, 19 nt, Human
cagcggcacccccaccccc

SEQ ID NO: 230747 - RNA, 24 nt, Human
cagcggcacccccaccccucagag

SEQ ID NO: 230748 - RNA, 24 nt, Human
caggacccuaagcccagagaaagg

SEQ ID NO: 230749 - RNA, 22 nt, Human
caggagaacgcaccgaucucac

SEQ ID NO: 230750 - RNA, 24 nt, Human
caguaaagaaugaagaaaccaaac

SEQ ID NO: 230751 - RNA, 27 nt, Human
ccacuggaacgaggccgccagccacgu

SEQ ID NO: 230752 - RNA, 26 nt, Human
cccaagccacggcaaaacaucaggag

SEQ ID NO: 230753 - RNA, 24 nt, Human
cccagagaaaggaacagaggcccc

SEQ ID NO: 230754 - RNA, 25 nt, Human
cccccaccccucagacagcggcacc

SEQ ID NO: 230755 - RNA, 21 nt, Human
ccccucagacagcggcacccc

SEQ ID NO: 230756 - RNA, 23 nt, Human
ccccucagagaaagcggcacccc

SEQ ID NO: 230757 - RNA, 24 nt, Human
ccccucagagaaagcggcaccccc

SEQ ID NO: 230758 - RNA, 23 nt, Human
ccccucagagacagcggcacccc

SEQ ID NO: 230759 - RNA, 23 nt, Human
ccccucagagagagcggcacccc

SEQ ID NO: 230760 - RNA, 23 nt, Human
ccccucagagagagcggcacccc

SEQ ID NO: 230761 - RNA, 23 nt, Human
ccccucggagagagcagcacccc

SEQ ID NO: 230762 - RNA, 25 nt, Human
ccccugcagcugcugugccugcgug

SEQ ID NO: 230763 - RNA, 22 nt, Human
cccuaagcccagagaaaggaac

SEQ ID NO: 230764 - RNA, 23 nt, Human
cccucagagagagcacccccacc

SEQ ID NO: 230765 - RNA, 21 nt, Human
cccugcagcugcugugccugc

SEQ ID NO: 230766 - RNA, 20 nt, Human
ccguguacaauccccaagcc

SEQ ID NO: 230767 - RNA, 23 nt, Human
ccucaaaauccuacuuugguaaa

SEQ ID NO: 230768 - RNA, 22 nt, Human
ccucagagacagcggcaccccc

SEQ ID NO: 230769 - RNA, 21 nt, Human
cggagagagcagcacccccac

SEQ ID NO: 230770 - RNA, 18 nt, Human
cucagagacagcggcacc

SEQ ID NO: 230771 - RNA, 19 nt, Human
gaacaggaucacccgaaug

SEQ ID NO: 230772 - RNA, 21 nt, Human
gacagcggcauuccaccccuc

SEQ ID NO: 230773 - RNA, 20 nt, Human
gagcacccccacccucaaaa

SEQ ID NO: 230774 - RNA, 24 nt, Human
gagcacccccacccucaaaauccu

SEQ ID NO: 230775 - RNA, 19 nt, Human
gagccaauuuagagcggca

SEQ ID NO: 230776 - RNA, 21 nt, Human
gagcggcacccccaccccuca

SEQ ID NO: 230777 - RNA, 21 nt, Human
gagcggcacccccaccccuca

SEQ ID NO: 230778 - RNA, 21 nt, Human
gaucacccgaaugucaacaga

SEQ ID NO: 230779 - RNA, 24 nt, Human
gaucacccgaaugucaacagaaga

SEQ ID NO: 230780 - RNA, 21 nt, Human
gcacccccaccccucagagac

SEQ ID NO: 230781 - RNA, 19 nt, Human
gcagcacccccacccccuc

SEQ ID NO: 230782 - RNA, 22 nt, Human
gcagcgaagaagcccgcccgaa

SEQ ID NO: 230783 - RNA, 20 nt, Human
gccacgugucgcgcguccug

SEQ ID NO: 230784 - RNA, 18 nt, Human
gccggguacggugcggag

SEQ ID NO: 230785 - RNA, 19 nt, Human
gcggcacccccacccccuc

SEQ ID NO: 230786 - RNA, 19 nt, Human
gcggcacccccacccccuc

SEQ ID NO: 230787 - RNA, 22 nt, Human
gcggguggucugugcgcagugc

SEQ ID NO: 230788 - RNA, 18 nt, Human
gcugcagacauuagagac

SEQ ID NO: 230789 - RNA, 23 nt, Human
ggaacgaggccgccagccacgug

SEQ ID NO: 230790 - RNA, 20 nt, Human
gucuuaggauuuucccucuc

SEQ ID NO: 230791 - RNA, 19 nt, Human
uaaaaaagugccagcccuu

SEQ ID NO: 230792 - RNA, 20 nt, Human
uaaaaaagugccagcccuug

SEQ ID NO: 230793 - RNA, 18 nt, Human
uagagcggcacccccacc

SEQ ID NO: 230794 - RNA, 22 nt, Human
uagagcggcacccccaccccuc

SEQ ID NO: 230795 - RNA, 18 nt, Human
uaguaaaugcugcaagau

SEQ ID NO: 230796 - RNA, 18 nt, Human
uccccaagccacggcaaa

SEQ ID NO: 230797 - RNA, 24 nt, Human
ucuggaguuccucugucuuaggau

SEQ ID NO: 230798 - RNA, 24 nt, Human
ucugucuuaggauuuucccucucu

SEQ ID NO: 230799 - RNA, 22 nt, Human
ucugugcgcagugcgcgcgaga

SEQ ID NO: 230800 - RNA, 23 nt, Human
ugaacugaagccgcuccagacac

SEQ ID NO: 230801 - RNA, 25 nt, Human
ugcagaaagugugccuccccuuccu

SEQ ID NO: 230802 - RNA, 20 nt, Human
ugccgccacuggaacgagga

SEQ ID NO: 230803 - RNA, 21 nt, Human
uuaaagcugaacugaagccgc

SEQ ID NO: 230804 - RNA, 21 nt, Human
uucgacaggacccuaagccca

SEQ ID NO: 230805 - RNA, 22 nt, Human
uuucgauaguuacucuguugug

SEQ ID NO: 230806 - RNA, 23 nt, Human
uuugcagaaagugugccuccccu

SEQ ID NO: 230807 - RNA, 23 nt, Human
aaaaaaaaaacacgaaaaaacaa

SEQ ID NO: 230808 - RNA, 23 nt, Human
aaaaaacacgaaaaaacaacccc

SEQ ID NO: 230809 - RNA, 20 nt, Human
aaaaacaaccccacaggaac

SEQ ID NO: 230810 - RNA, 24 nt, Human
aaaaacacccaaaaccagauagag

SEQ ID NO: 230811 - RNA, 24 nt, Human
aaaaaccaaagucaggcaguggga

SEQ ID NO: 230812 - RNA, 19 nt, Human
aaaaaucacacacacacac

SEQ ID NO: 230813 - RNA, 31 nt, Human
aaaaaucacacacacacacacacacacacag

SEQ ID NO: 230814 - RNA, 24 nt, Human
aaaacaaccccacaggaaccuucc

SEQ ID NO: 230815 - RNA, 25 nt, Human
aaaacacccaaaaccagauagagcg

SEQ ID NO: 230816 - RNA, 19 nt, Human
aaacagacaggcaaauauc

SEQ ID NO: 230817 - RNA, 18 nt, Human
aaaccaaagucaggcaac

SEQ ID NO: 230818 - RNA, 21 nt, Human
aaagcauuuauugcuaagaac

SEQ ID NO: 230819 - RNA, 24 nt, Human
aaagugcugggauuacaggcguga

SEQ ID NO: 230820 - RNA, 22 nt, Human
aaauaucuaaagauaccauaca

SEQ ID NO: 230821 - RNA, 22 nt, Human
aacaacagcugcaacaccaggg

SEQ ID NO: 230822 - RNA, 22 nt, Human
aagaacauaauaauaccagccc

SEQ ID NO: 230823 - RNA, 18 nt, Human
aagagcacugaugaccac

SEQ ID NO: 230824 - RNA, 19 nt, Human
aagagcacugaugaccacc

SEQ ID NO: 230825 - RNA, 24 nt, Human
aagagcacugaugaccaccgacca

SEQ ID NO: 230826 - RNA, 19 nt, Human
aagugcugggauuacaggc

SEQ ID NO: 230827 - RNA, 19 nt, Human
aagugcugggauuacaggc

SEQ ID NO: 230828 - RNA, 26 nt, Human
aagugcugggauuacaggcgugagcc

SEQ ID NO: 230829 - RNA, 23 nt, Human
aauguuggaaggcuaaagagaaa

SEQ ID NO: 230830 - RNA, 24 nt, Human
acaaaaaucacacacacacacaca

SEQ ID NO: 230831 - RNA, 20 nt, Human
acacacacacacacacaaaa

SEQ ID NO: 230832 - RNA, 28 nt, Human
acacacacacacacacacacaaaaagag

SEQ ID NO: 230833 - RNA, 23 nt, Human
acacacacacacacacacacaca

SEQ ID NO: 230834 - RNA, 23 nt, Human
acacacacacacacacacacaca

SEQ ID NO: 230835 - RNA, 23 nt, Human
acacacacacacacacacacaca

SEQ ID NO: 230836 - RNA, 23 nt, Human
acacacacacacacacacacaca

SEQ ID NO: 230837 - RNA, 22 nt, Human
acacacacacacacacacacag

SEQ ID NO: 230838 - RNA, 21 nt, Human
acaugaaaaacacccaaaacc

SEQ ID NO: 230839 - RNA, 20 nt, Human
accaguagugaaaugacauu

SEQ ID NO: 230840 - RNA, 23 nt, Human
accaguuucuuuauacaaaugcu

SEQ ID NO: 230841 - RNA, 18 nt, Human
accauguuggccaggcug

SEQ ID NO: 230842 - RNA, 25 nt, Human
acccacuucggccucccaaagugcu

SEQ ID NO: 230843 - RNA, 22 nt, Human
accccgcagagcaggcggcgac

SEQ ID NO: 230844 - RNA, 21 nt, Human
accuuaaaacauugcacguug

SEQ ID NO: 230845 - RNA, 23 nt, Human
agaaaaaacauggaaaguauuua

SEQ ID NO: 230846 - RNA, 18 nt, Human
agacaauuuucucauuuu

SEQ ID NO: 230847 - RNA, 18 nt, Human
agagcacugaugaccacc

SEQ ID NO: 230848 - RNA, 30 nt, Human
agaugggguuucaccauguuggccaggcuu

SEQ ID NO: 230849 - RNA, 24 nt, Human
aggcucgcuggaccugggucaaga

SEQ ID NO: 230850 - RNA, 23 nt, Human
agggaaaaggcucgcuggaccug

SEQ ID NO: 230851 - RNA, 18 nt, Human
aguaacugggauuacagg

SEQ ID NO: 230852 - RNA, 23 nt, Human
aguaacugggauuacaggcgccc

SEQ ID NO: 230853 - RNA, 18 nt, Human
agucaggaaucugaucuu

SEQ ID NO: 230854 - RNA, 21 nt, Human
agucaggaaucugaucuugag

SEQ ID NO: 230855 - RNA, 20 nt, Human
agugauccacccacuucggc

SEQ ID NO: 230856 - RNA, 24 nt, Human
agugauucuccugccucagccucc

SEQ ID NO: 230857 - RNA, 24 nt, Human
agugcaauggugcgcucuuggcuc

SEQ ID NO: 230858 - RNA, 18 nt, Human
agugcugggauuacaggc

SEQ ID NO: 230859 - RNA, 20 nt, Human
aguuuuuuuaaaaaaaagau

SEQ ID NO: 230860 - RNA, 21 nt, Human
auagagaugggguuucaccau

SEQ ID NO: 230861 - RNA, 22 nt, Human
auagagaugggguuucaccaug

SEQ ID NO: 230862 - RNA, 22 nt, Human
aucacacacacacacacacaca

SEQ ID NO: 230863 - RNA, 19 nt, Human
augaaaaacacccaaaacc

SEQ ID NO: 230864 - RNA, 18 nt, Human
augggguuucaccauguu

SEQ ID NO: 230865 - RNA, 22 nt, Human
augggguuucaccauguuggcc

SEQ ID NO: 230866 - RNA, 21 nt, Human
auuaucucuaaagcaccuaaa

SEQ ID NO: 230867 - RNA, 19 nt, Human
auuugcucagccauucccc

SEQ ID NO: 230868 - RNA, 18 nt, Human
caaaaaaaaaaaacacga

SEQ ID NO: 230869 - RNA, 19 nt, Human
caaaaagagcaaaaggagc

SEQ ID NO: 230870 - RNA, 19 nt, Human
caaaaugcugggauugaua

SEQ ID NO: 230871 - RNA, 19 nt, Human
caaacaaaaaucacacaca

SEQ ID NO: 230872 - RNA, 24 nt, Human
caaagugcugggauuacaggcgug

SEQ ID NO: 230873 - RNA, 24 nt, Human
caacaacagcugcaacaccaggga

SEQ ID NO: 230874 - RNA, 22 nt, Human
caacacacaccaaaaaaguucu

SEQ ID NO: 230875 - RNA, 25 nt, Human
caagagcacugaugaccaccgacca

SEQ ID NO: 230876 - RNA, 18 nt, Human
caagcuggaaacaagacc

SEQ ID NO: 230877 - RNA, 20 nt, Human
caagugauucuccugccuca

SEQ ID NO: 230878 - RNA, 22 nt, Human
caagugauucuccugccucagc

SEQ ID NO: 230879 - RNA, 18 nt, Human
cacaaaacugaacacaaa

SEQ ID NO: 230880 - RNA, 23 nt, Human
cacaaaacugaacacaaagcacc

SEQ ID NO: 230881 - RNA, 20 nt, Human
cacacacaaaaagagcaaaa

SEQ ID NO: 230882 - RNA, 27 nt, Human
cacacacacacaaaaagagcaaaagga

SEQ ID NO: 230883 - RNA, 22 nt, Human
cacacacacacacacaaaaaga

SEQ ID NO: 230884 - RNA, 20 nt, Human
cacacacacacacacacaca

SEQ ID NO: 230885 - RNA, 20 nt, Human
cacacacacacacacacaca

SEQ ID NO: 230886 - RNA, 20 nt, Human
cacacacacacacacacaca

SEQ ID NO: 230887 - RNA, 20 nt, Human
cacacacacacacacacaca

SEQ ID NO: 230888 - RNA, 20 nt, Human
cacacacacacacacacaca

SEQ ID NO: 230889 - RNA, 20 nt, Human
cacacacacacacacacaca

SEQ ID NO: 230890 - RNA, 20 nt, Human
cacacacacacacacacaca

SEQ ID NO: 230891 - RNA, 20 nt, Human
cacacacacacacacacaca

SEQ ID NO: 230892 - RNA, 22 nt, Human
cacacacacacacacacacaca

SEQ ID NO: 230893 - RNA, 22 nt, Human
cacacacacacacacacacaca

SEQ ID NO: 230894 - RNA, 22 nt, Human
cacacacacacacacacacaca

SEQ ID NO: 230895 - RNA, 23 nt, Human
cacacacacacacacacacacaa

SEQ ID NO: 230896 - RNA, 26 nt, Human
cacacacacacacacacacacacaca

SEQ ID NO: 230897 - RNA, 26 nt, Human
cacacacacacacacacacacacaca

SEQ ID NO: 230898 - RNA, 26 nt, Human
cacacacacacacacacacacacaca

SEQ ID NO: 230899 - RNA, 26 nt, Human
cacacacacacacacacacacacaca

SEQ ID NO: 230900 - RNA, 23 nt, Human
cacaccaaaaaaguucuccuaga

SEQ ID NO: 230901 - RNA, 20 nt, Human
cacaucuuuugcuguaaaaa

SEQ ID NO: 230902 - RNA, 21 nt, Human
caccauguuggccaggcuggu

SEQ ID NO: 230903 - RNA, 24 nt, Human
caccauguuggccaggcuggucuc

SEQ ID NO: 230904 - RNA, 27 nt, Human
caccauguuggccaggcuggucucaaa

SEQ ID NO: 230905 - RNA, 23 nt, Human
caccgaccacagccuugcaaaag

SEQ ID NO: 230906 - RNA, 21 nt, Human
caccgcaaccucugccucccg

SEQ ID NO: 230907 - RNA, 23 nt, Human
caccgcaaccucugccucccggg

SEQ ID NO: 230908 - RNA, 24 nt, Human
cagaacaccaguagugaaaugaca

SEQ ID NO: 230909 - RNA, 21 nt, Human
cagaggccaauuuaugagcac

SEQ ID NO: 230910 - RNA, 18 nt, Human
cagcauucagucagugcc

SEQ ID NO: 230911 - RNA, 21 nt, Human
cagccccuguucaaaucuacu

SEQ ID NO: 230912 - RNA, 21 nt, Human
cagccuugcaaaagccaggaa

SEQ ID NO: 230913 - RNA, 21 nt, Human
caggcgcccaccaccaugccc

SEQ ID NO: 230914 - RNA, 24 nt, Human
cagggaaaaaaaaucucuuuuuca

SEQ ID NO: 230915 - RNA, 23 nt, Human
cauaucaauuuuaagaagcaaag

SEQ ID NO: 230916 - RNA, 20 nt, Human
caugcaacugccuauauaug

SEQ ID NO: 230917 - RNA, 24 nt, Human
cauguuggccaggcuggucucaaa

SEQ ID NO: 230918 - RNA, 21 nt, Human
cauuucuuaagaaaaagaaaa

SEQ ID NO: 230919 - RNA, 25 nt, Human
ccaaaaccagauagagcguuacccc

SEQ ID NO: 230920 - RNA, 22 nt, Human
ccaaagugcugggauuacaggc

SEQ ID NO: 230921 - RNA, 22 nt, Human
ccaaagugcugggauuacaggc

SEQ ID NO: 230922 - RNA, 24 nt, Human
ccaaagugcugggauuacaggcgu

SEQ ID NO: 230923 - RNA, 20 nt, Human
ccaccacaaaaaaaaaaaac

SEQ ID NO: 230924 - RNA, 21 nt, Human
ccaggaccaguaaauaugaca

SEQ ID NO: 230925 - RNA, 22 nt, Human
cccaccacaaaaaaaaaaaaca

SEQ ID NO: 230926 - RNA, 24 nt, Human
cccaccacaaaaaaaaaaaacacg

SEQ ID NO: 230927 - RNA, 18 nt, Human
cccaugcuaggcaugcaa

SEQ ID NO: 230928 - RNA, 19 nt, Human
cccgaguaacugggauuac

SEQ ID NO: 230929 - RNA, 24 nt, Human
cccgaguaacugggauuacaggcg

SEQ ID NO: 230930 - RNA, 23 nt, Human
cccggguucaagugauucuccuc

SEQ ID NO: 230931 - RNA, 23 nt, Human
cccggguucaagugauucuccug

SEQ ID NO: 230932 - RNA, 26 nt, Human
cccucaauuggcacuggcaagcaauu

SEQ ID NO: 230933 - RNA, 22 nt, Human
ccgaguaacugggauuacaggc

SEQ ID NO: 230934 - RNA, 18 nt, Human
ccgcaaccucugccuccc

SEQ ID NO: 230935 - RNA, 19 nt, Human
ccgcaaccucugccucccg

SEQ ID NO: 230936 - RNA, 23 nt, Human
ccgcaaccucugccucccggguu

SEQ ID NO: 230937 - RNA, 24 nt, Human
ccgcaaccucugccucccggguuc

SEQ ID NO: 230938 - RNA, 22 nt, Human
ccucaagugauccacccacuuc

SEQ ID NO: 230939 - RNA, 24 nt, Human
ccucccggguucaagugauucucc

SEQ ID NO: 230940 - RNA, 18 nt, Human
ccuggccucaagugaucc

SEQ ID NO: 230941 - RNA, 24 nt, Human
ccuggccucaagugauccacccac

SEQ ID NO: 230942 - RNA, 18 nt, Human
cgaaaaaacaaccccaca

SEQ ID NO: 230943 - RNA, 23 nt, Human
cgaaaaaacaaccccacaggaac

SEQ ID NO: 230944 - RNA, 18 nt, Human
cgcagagcaggcggcgac

SEQ ID NO: 230945 - RNA, 21 nt, Human
cgcuggaccugggucaagagc

SEQ ID NO: 230946 - RNA, 20 nt, Human
cuaaaacaugaaaaacaccc

SEQ ID NO: 230947 - RNA, 24 nt, Human
cucaagugauccacccacuucggc

SEQ ID NO: 230948 - RNA, 24 nt, Human
cucaccgcaaccucugccucccgg

SEQ ID NO: 230949 - RNA, 20 nt, Human
cucccggguucaagugauuc

SEQ ID NO: 230950 - RNA, 23 nt, Human
cuccuggccucaagugauccacc

SEQ ID NO: 230951 - RNA, 27 nt, Human
cuccuggccucaagugauccacccacu

SEQ ID NO: 230952 - RNA, 19 nt, Human
cucuaaagcaccuaaaaaa

SEQ ID NO: 230953 - RNA, 24 nt, Human
cugauagagaugggguuucaccau

SEQ ID NO: 230954 - RNA, 19 nt, Human
cugcaaacaaaaaucacac

SEQ ID NO: 230955 - RNA, 23 nt, Human
cugccucagccucccgaguaacu

SEQ ID NO: 230956 - RNA, 23 nt, Human
cugccucccggguucaagugauu

SEQ ID NO: 230957 - RNA, 24 nt, Human
cuggagugcaauggugcgcucuug

SEQ ID NO: 230958 - RNA, 20 nt, Human
cuuuugcuguaaaaauaaca

SEQ ID NO: 230959 - RNA, 18 nt, Human
gaaaaaacaaccccacag

SEQ ID NO: 230960 - RNA, 18 nt, Human
gaaaaaacaaccccacag

SEQ ID NO: 230961 - RNA, 20 nt, Human
gaaaaaacaaccccacagga

SEQ ID NO: 230962 - RNA, 24 nt, Human
gaccaacuuuuaauggauuaagau

SEQ ID NO: 230963 - RNA, 20 nt, Human
gagaugggguuucaccaugu

SEQ ID NO: 230964 - RNA, 24 nt, Human
gagaugggguuucaccauguuggc

SEQ ID NO: 230965 - RNA, 19 nt, Human
gagcaaguacaaauccacg

SEQ ID NO: 230966 - RNA, 26 nt, Human
gaggcacauaaucccaccacaaaaaa

SEQ ID NO: 230967 - RNA, 24 nt, Human
gauuacaggcgcccaccaccaugc

SEQ ID NO: 230968 - RNA, 18 nt, Human
gauuacaggcgugagccg

SEQ ID NO: 230969 - RNA, 21 nt, Human
gauuacaggcgugagccgcca

SEQ ID NO: 230970 - RNA, 22 nt, Human
gauuacaggcgugagccgccac

SEQ ID NO: 230971 - RNA, 18 nt, Human
gcaagcuggaaacaagac

SEQ ID NO: 230972 - RNA, 21 nt, Human
gcucaccgcaaccucugccuc

SEQ ID NO: 230973 - RNA, 20 nt, Human
gcuggaccugggucaagagc

SEQ ID NO: 230974 - RNA, 23 nt, Human
gcuggucucaaacuccuggccuc

SEQ ID NO: 230975 - RNA, 18 nt, Human
ggaggcacauaaucccac

SEQ ID NO: 230976 - RNA, 20 nt, Human
ggccagggcuucuuaagaua

SEQ ID NO: 230977 - RNA, 24 nt, Human
ggcggcgacggcggcgacggcggc

SEQ ID NO: 230978 - RNA, 24 nt, Human
ggcuggucucaaacuccuggccuc

SEQ ID NO: 230979 - RNA, 22 nt, Human
gggguuucaccauguuggccag

SEQ ID NO: 230980 - RNA, 22 nt, Human
ggguucaagugauucuccugcc

SEQ ID NO: 230981 - RNA, 18 nt, Human
ggguuucaccauguuggc

SEQ ID NO: 230982 - RNA, 24 nt, Human
gugauccacccacuucggccuccc

SEQ ID NO: 230983 - RNA, 24 nt, Human
gugauucuccugccucagccuccc

SEQ ID NO: 230984 - RNA, 23 nt, Human
guuugaaaucccccauaccaccc

SEQ ID NO: 230985 - RNA, 22 nt, Human
uaaaacauugcacguugauguu

SEQ ID NO: 230986 - RNA, 24 nt, Human
uaaaauacaaaaauauucacugaa

SEQ ID NO: 230987 - RNA, 24 nt, Human
uaaaauacccaugcuaggcaugca

SEQ ID NO: 230988 - RNA, 22 nt, Human
uaaagauaccauacaucaacua

SEQ ID NO: 230989 - RNA, 26 nt, Human
uaaauuaaaaacgauuuugaaaaauu

SEQ ID NO: 230990 - RNA, 21 nt, Human
uaacgaauaauaacaacgaaa

SEQ ID NO: 230991 - RNA, 19 nt, Human
uaacugggauuacaggcgc

SEQ ID NO: 230992 - RNA, 19 nt, Human
uaagauaaaaccaagacuu

SEQ ID NO: 230993 - RNA, 22 nt, Human
uaagcugauuaaagagaacaac

SEQ ID NO: 230994 - RNA, 21 nt, Human
uaaguuaaccugcaaacaaaa

SEQ ID NO: 230995 - RNA, 18 nt, Human
uaaucugaauguagaaac

SEQ ID NO: 230996 - RNA, 24 nt, Human
uaauggauuaagauaaaaccaaga

SEQ ID NO: 230997 - RNA, 24 nt, Human
uaauuuuuuguauuucugauagag

SEQ ID NO: 230998 - RNA, 22 nt, Human
uaccauaacgaauaauaacaac

SEQ ID NO: 230999 - RNA, 19 nt, Human
uagaagcagcaagaaauau

SEQ ID NO: 231000 - RNA, 23 nt, Human
uagaagcagcaagaaauauuuga

SEQ ID NO: 231001 - RNA, 22 nt, Human
uagagaugggguuucaccaugu

SEQ ID NO: 231002 - RNA, 24 nt, Human
uagcuaaguuaaccugcaaacaaa

SEQ ID NO: 231003 - RNA, 22 nt, Human
uaggugguacacgguaauuuga

SEQ ID NO: 231004 - RNA, 24 nt, Human
uauauauauauauaugucugugug

SEQ ID NO: 231005 - RNA, 22 nt, Human
uauauauaugucugugugugug

SEQ ID NO: 231006 - RNA, 20 nt, Human
uauauaugugugcauauaua

SEQ ID NO: 231007 - RNA, 22 nt, Human
uauauaugugugcauauauaua

SEQ ID NO: 231008 - RNA, 20 nt, Human
uauaugucugugugugugua

SEQ ID NO: 231009 - RNA, 24 nt, Human
uauaugugugcauauauauauaua

SEQ ID NO: 231010 - RNA, 27 nt, Human
uauaugugugcauauauauauauauau

SEQ ID NO: 231011 - RNA, 18 nt, Human
uaugagcacaaaguacua

SEQ ID NO: 231012 - RNA, 23 nt, Human
uauuuuauucuuauaauggccaa

SEQ ID NO: 231013 - RNA, 18 nt, Human
uauuuugcuuucuccuau

SEQ ID NO: 231014 - RNA, 21 nt, Human
ucaagagcacugaugaccacc

SEQ ID NO: 231015 - RNA, 19 nt, Human
ucaagugauucuccugccu

SEQ ID NO: 231016 - RNA, 18 nt, Human
ucaaucagguugcagauu

SEQ ID NO: 231017 - RNA, 24 nt, Human
ucaccgcaaccucugccucccggg

SEQ ID NO: 231018 - RNA, 25 nt, Human
ucaccgcaaccucugccucccgggu

SEQ ID NO: 231019 - RNA, 19 nt, Human
ucagugccaugcauugugc

SEQ ID NO: 231020 - RNA, 24 nt, Human
ucccaaagugcugggauuacaggc

SEQ ID NO: 231021 - RNA, 24 nt, Human
ucccgaguaacugggauuacaggc

SEQ ID NO: 231022 - RNA, 21 nt, Human
ucccggguucaagugauucuc

SEQ ID NO: 231023 - RNA, 24 nt, Human
ucccggguucaagugauucuccug

SEQ ID NO: 231024 - RNA, 20 nt, Human
ucgcccaaggcuggagugcc

SEQ ID NO: 231025 - RNA, 22 nt, Human
ucuaaagcaccuaaaaaaugga

SEQ ID NO: 231026 - RNA, 18 nt, Human
ucucaaaaugcugggauu

SEQ ID NO: 231027 - RNA, 22 nt, Human
ucucagaccacaaaacugaaca

SEQ ID NO: 231028 - RNA, 24 nt, Human
ucuccugccucagccucccgagua

SEQ ID NO: 231029 - RNA, 18 nt, Human
ugaaaaacacccaaaacc

SEQ ID NO: 231030 - RNA, 18 nt, Human
ugaaaaacacccaaaacc

SEQ ID NO: 231031 - RNA, 19 nt, Human
ugaaaacacugaaauacua

SEQ ID NO: 231032 - RNA, 20 nt, Human
ugaaaucccccauaccaccc

SEQ ID NO: 231033 - RNA, 23 nt, Human
ugaacacaaagcacgugaauuaa

SEQ ID NO: 231034 - RNA, 24 nt, Human
ugauagagaugggguuucaccaug

SEQ ID NO: 231035 - RNA, 19 nt, Human
ugaugggcauuuauaccac

SEQ ID NO: 231036 - RNA, 20 nt, Human
ugauucuccugccucagccu

SEQ ID NO: 231037 - RNA, 22 nt, Human
ugcagcucgcuguagcucuaag

SEQ ID NO: 231038 - RNA, 24 nt, Human
ugccucagccucccgaguaacugg

SEQ ID NO: 231039 - RNA, 20 nt, Human
ugcugggauuacaggcguga

SEQ ID NO: 231040 - RNA, 22 nt, Human
uggaaacaagaccaacuuuuaa

SEQ ID NO: 231041 - RNA, 22 nt, Human
uggaauagucuuauauauugca

SEQ ID NO: 231042 - RNA, 21 nt, Human
uggagugcaauggugcgcucu

SEQ ID NO: 231043 - RNA, 24 nt, Human
uggagugcaauggugcgcucuugg

SEQ ID NO: 231044 - RNA, 24 nt, Human
uggccaggcuggucucaaacuccu

SEQ ID NO: 231045 - RNA, 22 nt, Human
uggccucaagugauccacccac

SEQ ID NO: 231046 - RNA, 22 nt, Human
ugggaggcacauaaucccacca

SEQ ID NO: 231047 - RNA, 21 nt, Human
ugggauuacaggcgcccacca

SEQ ID NO: 231048 - RNA, 24 nt, Human
ugggauuacaggcgcccaccacca

SEQ ID NO: 231049 - RNA, 25 nt, Human
ugggauuacaggcgcccaccaccau

SEQ ID NO: 231050 - RNA, 18 nt, Human
ugggauuacaggcgugag

SEQ ID NO: 231051 - RNA, 19 nt, Human
ugggauuacaggcgugagc

SEQ ID NO: 231052 - RNA, 21 nt, Human
ugggauuacaggcgugagccg

SEQ ID NO: 231053 - RNA, 22 nt, Human
ugggauuacaggcgugagccgc

SEQ ID NO: 231054 - RNA, 23 nt, Human
ugggauuacaggcgugagccgcc

SEQ ID NO: 231055 - RNA, 24 nt, Human
ugggauuacaggcgugagccgcca

SEQ ID NO: 231056 - RNA, 24 nt, Human
ugggguuucaccauguuggccagg

SEQ ID NO: 231057 - RNA, 18 nt, Human
ugucgcccaaggcuggag

SEQ ID NO: 231058 - RNA, 23 nt, Human
ugucgcccaaggcuggagugcaa

SEQ ID NO: 231059 - RNA, 18 nt, Human
ugugcauauauauauaua

SEQ ID NO: 231060 - RNA, 20 nt, Human
ugugcauauauauauauaua

SEQ ID NO: 231061 - RNA, 22 nt, Human
ugugcauauauauauauauaug

SEQ ID NO: 231062 - RNA, 18 nt, Human
ugugugcauauauauaua

SEQ ID NO: 231063 - RNA, 18 nt, Human
ugugugcauauauauaua

SEQ ID NO: 231064 - RNA, 20 nt, Human
ugugugcauauauauauaua

SEQ ID NO: 231065 - RNA, 22 nt, Human
ugugugcauauauauauauaua

SEQ ID NO: 231066 - RNA, 22 nt, Human
ugugugcauauauauauauaua

SEQ ID NO: 231067 - RNA, 24 nt, Human
ugugugcauauauauauauauaug

SEQ ID NO: 231068 - RNA, 20 nt, Human
uguucaacucaacuaccugc

SEQ ID NO: 231069 - RNA, 24 nt, Human
uguuuuguuuugaagauggaguuu

SEQ ID NO: 231070 - RNA, 23 nt, Human
uguuuuguuuuguuuugaagaug

SEQ ID NO: 231071 - RNA, 25 nt, Human
uguuuuguuuuguuuuguuuugauu

SEQ ID NO: 231072 - RNA, 21 nt, Human
uuaaaguuucaacauaucaau

SEQ ID NO: 231073 - RNA, 21 nt, Human
uuaaauuaaaaacgauuuuga

SEQ ID NO: 231074 - RNA, 24 nt, Human
uuaauauuugcucagccauuccaa

SEQ ID NO: 231075 - RNA, 24 nt, Human
uuagaaaagcauuuauugcuaaga

SEQ ID NO: 231076 - RNA, 23 nt, Human
uuauaauggccauguuaauaagu

SEQ ID NO: 231077 - RNA, 21 nt, Human
uucaagugauucuccugccuc

SEQ ID NO: 231078 - RNA, 23 nt, Human
uucaagugauucuccugccucag

SEQ ID NO: 231079 - RNA, 24 nt, Human
uucaagugauucuccugccucagc

SEQ ID NO: 231080 - RNA, 22 nt, Human
uucaggcuaaacaaagaacaaa

SEQ ID NO: 231081 - RNA, 19 nt, Human
uucggccucccaaagugcu

SEQ ID NO: 231082 - RNA, 18 nt, Human
uucuccuauaaacauuag

SEQ ID NO: 231083 - RNA, 19 nt, Human
uuggauuuuaagcugauua

SEQ ID NO: 231084 - RNA, 19 nt, Human
uuguacuugcuuuuuucuu

SEQ ID NO: 231085 - RNA, 20 nt, Human
uuguuuguuuguuuuguuuu

SEQ ID NO: 231086 - RNA, 24 nt, Human
uuucaccauguuggccaggcuggu

SEQ ID NO: 231087 - RNA, 24 nt, Human
uuucucauuuucuagugaauggga

SEQ ID NO: 231088 - RNA, 24 nt, Human
uuucugauagagaugggguuucac

SEQ ID NO: 231089 - RNA, 19 nt, Human
uuuguuuuguuuuguuuug

SEQ ID NO: 231090 - RNA, 21 nt, Human
uuuugaacaaguuugucucca

SEQ ID NO: 231091 - RNA, 24 nt, Human
uuuugguuaagaugcaaguuuugu

SEQ ID NO: 231092 - RNA, 21 nt, Human
uuuuuguauuucugauagaga

SEQ ID NO: 231093 - RNA, 24 nt, Human
uuuuuuguauuucugauagagaug

SEQ ID NO: 231094 - RNA, 21 nt, Human
aaccauuuuuccaugcugcuu

SEQ ID NO: 231095 - RNA, 23 nt, Human
ucccuuuaaguuacgacgggaau

SEQ ID NO: 231096 - RNA, 20 nt, Human
uuccaugcugcuuaagagcc

SEQ ID NO: 231097 - RNA, 21 nt, Human
aaaaccugauucuguggucuc

SEQ ID NO: 231098 - RNA, 19 nt, Human
aaaagaccaaaguucagau

SEQ ID NO: 231099 - RNA, 22 nt, Human
aaaaggccccguuuugcaaccc

SEQ ID NO: 231100 - RNA, 20 nt, Human
aaaaugaaccaccuagagaa

SEQ ID NO: 231101 - RNA, 24 nt, Human
aaacagaaguagaauacuguacaa

SEQ ID NO: 231102 - RNA, 20 nt, Human
aaacaggagauaauaggagg

SEQ ID NO: 231103 - RNA, 23 nt, Human
aaagagacaaaacaagccaggca

SEQ ID NO: 231104 - RNA, 22 nt, Human
aagagacaaaacaagccaggca

SEQ ID NO: 231105 - RNA, 19 nt, Human
aagaguuccaaaaaacuca

SEQ ID NO: 231106 - RNA, 26 nt, Human
aagcauaaauacaacaaauagcauac

SEQ ID NO: 231107 - RNA, 19 nt, Human
aagugcgccucccgcgucc

SEQ ID NO: 231108 - RNA, 20 nt, Human
aaguuuugaaaagcuuaaaa

SEQ ID NO: 231109 - RNA, 21 nt, Human
aaucaguugcaaagagacaaa

SEQ ID NO: 231110 - RNA, 21 nt, Human
aauugucugcccuccaguugg

SEQ ID NO: 231111 - RNA, 21 nt, Human
accaugaagguuuuugaugcc

SEQ ID NO: 231112 - RNA, 18 nt, Human
accauguuguuaggggau

SEQ ID NO: 231113 - RNA, 24 nt, Human
accauguuguuaggggauugucuc

SEQ ID NO: 231114 - RNA, 25 nt, Human
acuaccauguuguuaggggauuguc

SEQ ID NO: 231115 - RNA, 24 nt, Human
acugugaucaagucuucucuggcu

SEQ ID NO: 231116 - RNA, 18 nt, Human
agaaaauugucugcccuc

SEQ ID NO: 231117 - RNA, 19 nt, Human
agaaagaguagaagcugau

SEQ ID NO: 231118 - RNA, 20 nt, Human
agagagccacaugacucagg

SEQ ID NO: 231119 - RNA, 22 nt, Human
agagcaugcacaugcuuaccag

SEQ ID NO: 231120 - RNA, 23 nt, Human
agauaagagaugaugguauugag

SEQ ID NO: 231121 - RNA, 24 nt, Human
agcaagcccggauaaaaaggcccc

SEQ ID NO: 231122 - RNA, 24 nt, Human
agcauacauauaaaauugugccag

SEQ ID NO: 231123 - RNA, 24 nt, Human
aggaaauguuaauaaagaaaguaa

SEQ ID NO: 231124 - RNA, 21 nt, Human
aggaagaaauggaaauuaaag

SEQ ID NO: 231125 - RNA, 23 nt, Human
aggaagcugauccuggaaacuga

SEQ ID NO: 231126 - RNA, 18 nt, Human
aggcagagcaugcacaug

SEQ ID NO: 231127 - RNA, 23 nt, Human
aggcagggcaucguaagaucaga

SEQ ID NO: 231128 - RNA, 20 nt, Human
aguauucccuuucucaucuc

SEQ ID NO: 231129 - RNA, 26 nt, Human
agucagaaaauugucugcccuccagu

SEQ ID NO: 231130 - RNA, 22 nt, Human
agugccaacuuacacaagugac

SEQ ID NO: 231131 - RNA, 22 nt, Human
auaagauuuccuccaaguucug

SEQ ID NO: 231132 - RNA, 22 nt, Human
auaguauucccuuucucaucuc

SEQ ID NO: 231133 - RNA, 18 nt, Human
auuggcuuccugaucuua

SEQ ID NO: 231134 - RNA, 22 nt, Human
caaaacaagccaggcaaaggca

SEQ ID NO: 231135 - RNA, 21 nt, Human
caaaacacuugaacagaauuu

SEQ ID NO: 231136 - RNA, 23 nt, Human
caagagagcugugaaauaggcac

SEQ ID NO: 231137 - RNA, 21 nt, Human
caccgccguccaugguaucua

SEQ ID NO: 231138 - RNA, 22 nt, Human
caccuagagaaaagcaagucag

SEQ ID NO: 231139 - RNA, 19 nt, Human
cacgcccgcgacuugaagc

SEQ ID NO: 231140 - RNA, 19 nt, Human
cagaauuuucacaaugauc

SEQ ID NO: 231141 - RNA, 19 nt, Human
cagacuguuauuguuagcu

SEQ ID NO: 231142 - RNA, 18 nt, Human
cagaguggacugaaaucc

SEQ ID NO: 231143 - RNA, 19 nt, Human
caggccacaccgccgucca

SEQ ID NO: 231144 - RNA, 25 nt, Human
caguuugcuuuauaauuagagaaac

SEQ ID NO: 231145 - RNA, 25 nt, Human
ccacgcccgcgacuugaagcaagug

SEQ ID NO: 231146 - RNA, 24 nt, Human
ccagccuuucccauuaaaugacaa

SEQ ID NO: 231147 - RNA, 23 nt, Human
ccaugaagguuuuugaugccaaa

SEQ ID NO: 231148 - RNA, 18 nt, Human
ccccguuuugcaaccccg

SEQ ID NO: 231149 - RNA, 19 nt, Human
ccucccgcguccugaagcc

SEQ ID NO: 231150 - RNA, 22 nt, Human
ccugccuugaaaucuuccuggg

SEQ ID NO: 231151 - RNA, 24 nt, Human
cuaaacaggagauaauaggagacu

SEQ ID NO: 231152 - RNA, 19 nt, Human
cucaggccacaccgccguc

SEQ ID NO: 231153 - RNA, 21 nt, Human
cucaggccacaccgccgucca

SEQ ID NO: 231154 - RNA, 18 nt, Human
cucccgcguccugaagcc

SEQ ID NO: 231155 - RNA, 18 nt, Human
cugaaaaaagcuaacaaa

SEQ ID NO: 231156 - RNA, 18 nt, Human
cugccuugaaaucuuccu

SEQ ID NO: 231157 - RNA, 20 nt, Human
cuugaugaccuuugacaacc

SEQ ID NO: 231158 - RNA, 21 nt, Human
cuuucaaaaugaaccaccuag

SEQ ID NO: 231159 - RNA, 19 nt, Human
gaaccaccuagagaaaagc

SEQ ID NO: 231160 - RNA, 19 nt, Human
gaagcugaugagucaaaac

SEQ ID NO: 231161 - RNA, 22 nt, Human
gaagcugaugagucaaaacacu

SEQ ID NO: 231162 - RNA, 18 nt, Human
gcauauucauacauagaa

SEQ ID NO: 231163 - RNA, 19 nt, Human
gcuaccugcaggaaccagu

SEQ ID NO: 231164 - RNA, 24 nt, Human
gggcaucguaagaucagacaaaaa

SEQ ID NO: 231165 - RNA, 22 nt, Human
guaaguuuugaaaagcuuaaaa

SEQ ID NO: 231166 - RNA, 19 nt, Human
guucuucucccugccuuga

SEQ ID NO: 231167 - RNA, 22 nt, Human
uaaagcauauucauacauagaa

SEQ ID NO: 231168 - RNA, 20 nt, Human
uaaaguagcuaguaaaaggc

SEQ ID NO: 231169 - RNA, 19 nt, Human
uaaauaauaaaggacuaca

SEQ ID NO: 231170 - RNA, 24 nt, Human
uaaauacaacaaauagcauacaua

SEQ ID NO: 231171 - RNA, 19 nt, Human
uaaauucugaaaaaagcua

SEQ ID NO: 231172 - RNA, 19 nt, Human
uaaccugaggacauaguag

SEQ ID NO: 231173 - RNA, 24 nt, Human
uaacuaaaccaaaugagcuuuauu

SEQ ID NO: 231174 - RNA, 18 nt, Human
uaagaagccuaguauaaa

SEQ ID NO: 231175 - RNA, 21 nt, Human
uacaaacuagaacugaaacaa

SEQ ID NO: 231176 - RNA, 19 nt, Human
uacaauuuagugaaaagac

SEQ ID NO: 231177 - RNA, 24 nt, Human
uacacacucaguggggauuugguu

SEQ ID NO: 231178 - RNA, 19 nt, Human
uaccaaagagucagcacua

SEQ ID NO: 231179 - RNA, 29 nt, Human
uaccauguuguuaggggauugucucagcg

SEQ ID NO: 231180 - RNA, 19 nt, Human
uagaaacagaaacauguga

SEQ ID NO: 231181 - RNA, 21 nt, Human
uagagaaacaguucgucuaca

SEQ ID NO: 231182 - RNA, 18 nt, Human
uaggagacugcuaccugc

SEQ ID NO: 231183 - RNA, 18 nt, Human
uagugccaacuuacacaa

SEQ ID NO: 231184 - RNA, 25 nt, Human
uauauucauaaacuuaaauaagauu

SEQ ID NO: 231185 - RNA, 22 nt, Human
ucacuguaaaaacccaaguuaa

SEQ ID NO: 231186 - RNA, 22 nt, Human
ucagaaaauugucugcccucca

SEQ ID NO: 231187 - RNA, 24 nt, Human
ucagcguuguaggcuuugcugaau

SEQ ID NO: 231188 - RNA, 23 nt, Human
ucaggauuaaagacugacaacuc

SEQ ID NO: 231189 - RNA, 18 nt, Human
ucagucagaguggacuga

SEQ ID NO: 231190 - RNA, 22 nt, Human
ucagucagaguggacugaaauc

SEQ ID NO: 231191 - RNA, 22 nt, Human
uccacuuuuaccuaaaacucua

SEQ ID NO: 231192 - RNA, 19 nt, Human
ucccacgcccgcgacuuga

SEQ ID NO: 231193 - RNA, 20 nt, Human
ucccauuaaaugacaacaua

SEQ ID NO: 231194 - RNA, 18 nt, Human
ucccgcguccugaagccc

SEQ ID NO: 231195 - RNA, 22 nt, Human
ucccugaauaucccaaacaguu

SEQ ID NO: 231196 - RNA, 23 nt, Human
ucccugaauaucccaaacaguuu

SEQ ID NO: 231197 - RNA, 19 nt, Human
uccuggaagcauuuagucg

SEQ ID NO: 231198 - RNA, 24 nt, Human
ucuuggaauuuuucuccuggaagc

SEQ ID NO: 231199 - RNA, 21 nt, Human
ugaaaaaagcuaacaaaauca

SEQ ID NO: 231200 - RNA, 21 nt, Human
ugaaaaacacacauauuuaaa

SEQ ID NO: 231201 - RNA, 22 nt, Human
ugaaaagaccaaaguucagaua

SEQ ID NO: 231202 - RNA, 22 nt, Human
ugaaaagcuuaaaaaaaaacca

SEQ ID NO: 231203 - RNA, 26 nt, Human
ugaaaguauguuuaccucuaguccaa

SEQ ID NO: 231204 - RNA, 20 nt, Human
ugaacacugcuugaugaccu

SEQ ID NO: 231205 - RNA, 22 nt, Human
ugaacucuggauaauaccuccu

SEQ ID NO: 231206 - RNA, 20 nt, Human
ugaagguuuuauuaccuagu

SEQ ID NO: 231207 - RNA, 24 nt, Human
ugaccuuugacaaccuuugaaggu

SEQ ID NO: 231208 - RNA, 21 nt, Human
ugacucccacaagcuuagcau

SEQ ID NO: 231209 - RNA, 26 nt, Human
ugcaaaaucaguugcaaagagacaaa

SEQ ID NO: 231210 - RNA, 24 nt, Human
ugcaggaaccaguacacacucagu

SEQ ID NO: 231211 - RNA, 19 nt, Human
ugccuuaccgacaaaaaca

SEQ ID NO: 231212 - RNA, 19 nt, Human
ugcuuggagaacugugauc

SEQ ID NO: 231213 - RNA, 21 nt, Human
uggaaagcaacggaagcacuu

SEQ ID NO: 231214 - RNA, 21 nt, Human
uggaacacuaggcauaaaugg

SEQ ID NO: 231215 - RNA, 19 nt, Human
ugggaaagauuuuuaaaga

SEQ ID NO: 231216 - RNA, 20 nt, Human
uguaugccuuaccgacaaaa

SEQ ID NO: 231217 - RNA, 18 nt, Human
ugugaaaaaucagaccuu

SEQ ID NO: 231218 - RNA, 18 nt, Human
ugugaaaaaucagaccuu

SEQ ID NO: 231219 - RNA, 21 nt, Human
uguucuaagcaugaacucugg

SEQ ID NO: 231220 - RNA, 22 nt, Human
uuacagaacauagaaauacaua

SEQ ID NO: 231221 - RNA, 23 nt, Human
uucucaucuccccuuuuuaaaca

SEQ ID NO: 231222 - RNA, 19 nt, Human
uucucccugccuugaaauc

SEQ ID NO: 231223 - RNA, 18 nt, Human
uugaauacugaaaaacac

SEQ ID NO: 231224 - RNA, 21 nt, Human
uugaauacugaaaaacacaca

SEQ ID NO: 231225 - RNA, 22 nt, Human
uuugcaauuucuaaauuacuau

SEQ ID NO: 231226 - RNA, 22 nt, Human
uuuucuaggaaccaacuucugg

SEQ ID NO: 231227 - RNA, 21 nt, Human
aaagaguggaaaaccccaggg

SEQ ID NO: 231228 - RNA, 23 nt, Human
aagaaagaggcauuuccucaugu

SEQ ID NO: 231229 - RNA, 26 nt, Human
aagcguuggagcucaaagagugagcu

SEQ ID NO: 231230 - RNA, 20 nt, Human
aagcuggaaggugaauucau

SEQ ID NO: 231231 - RNA, 22 nt, Human
acaagacacaggaagauaggaa

SEQ ID NO: 231232 - RNA, 20 nt, Human
acagccagcugcuagcugcc

SEQ ID NO: 231233 - RNA, 22 nt, Human
accugaauucuccuuuccauuc

SEQ ID NO: 231234 - RNA, 23 nt, Human
agauaggaaaugcagaaggagga

SEQ ID NO: 231235 - RNA, 24 nt, Human
agccagcugcuagcugccagcaca

SEQ ID NO: 231236 - RNA, 18 nt, Human
agcugccagcacagcuaa

SEQ ID NO: 231237 - RNA, 19 nt, Human
aggaaaugcagaaggagga

SEQ ID NO: 231238 - RNA, 21 nt, Human
aggaaaugcagaaggaggagg

SEQ ID NO: 231239 - RNA, 24 nt, Human
aggggcuggauggacgcugggugg

SEQ ID NO: 231240 - RNA, 18 nt, Human
aguaacuuugaugugaug

SEQ ID NO: 231241 - RNA, 24 nt, Human
auucugaggaagcuggaaggugaa

SEQ ID NO: 231242 - RNA, 18 nt, Human
caagaaaagcccuggaug

SEQ ID NO: 231243 - RNA, 21 nt, Human
cacagccagcugcuagcugcc

SEQ ID NO: 231244 - RNA, 19 nt, Human
caccccucccacuuuaacc

SEQ ID NO: 231245 - RNA, 20 nt, Human
cagccaagacagacggacuc

SEQ ID NO: 231246 - RNA, 25 nt, Human
caggggcuggauggacgcugggugg

SEQ ID NO: 231247 - RNA, 19 nt, Human
caugcacaagacacaggaa

SEQ ID NO: 231248 - RNA, 25 nt, Human
ccaagacagacggacuccagaaugc

SEQ ID NO: 231249 - RNA, 22 nt, Human
cccaccccucccacuuuaaccu

SEQ ID NO: 231250 - RNA, 24 nt, Human
cccaggcagcauuuuauucugagg

SEQ ID NO: 231251 - RNA, 22 nt, Human
ccggagaggugaggacaggggc

SEQ ID NO: 231252 - RNA, 23 nt, Human
ccucauguuuaacaagcguugga

SEQ ID NO: 231253 - RNA, 21 nt, Human
ccucucuacccaccccuccca

SEQ ID NO: 231254 - RNA, 23 nt, Human
cgucagagaauuuccagccaaga

SEQ ID NO: 231255 - RNA, 24 nt, Human
cuaaauccucucuacccaccccuc

SEQ ID NO: 231256 - RNA, 21 nt, Human
cuccuuuccauuccagcugcc

SEQ ID NO: 231257 - RNA, 21 nt, Human
cugaggaagcuggaaggugaa

SEQ ID NO: 231258 - RNA, 21 nt, Human
gaacuucuaaauccucucuac

SEQ ID NO: 231259 - RNA, 22 nt, Human
gaagauaggaaaugcagaagga

SEQ ID NO: 231260 - RNA, 20 nt, Human
gaaggaggaggaggugccgg

SEQ ID NO: 231261 - RNA, 24 nt, Human
gagacauggaaauucuaggggguu

SEQ ID NO: 231262 - RNA, 19 nt, Human
gaggugaggacaggggcug

SEQ ID NO: 231263 - RNA, 19 nt, Human
gaguggaaggagaagggag

SEQ ID NO: 231264 - RNA, 19 nt, Human
gaugauguggaugaagaaa

SEQ ID NO: 231265 - RNA, 23 nt, Human
gcacugcaaacacagccagcugc

SEQ ID NO: 231266 - RNA, 21 nt, Human
ggagaagggaggcugggugcc

SEQ ID NO: 231267 - RNA, 21 nt, Human
ggcuggauggacgcugggugg

SEQ ID NO: 231268 - RNA, 18 nt, Human
ggggcuggauggacgcug

SEQ ID NO: 231269 - RNA, 25 nt, Human
gugccggagaggugaggacaggggc

SEQ ID NO: 231270 - RNA, 20 nt, Human
uaaauccucucuacccaccc

SEQ ID NO: 231271 - RNA, 24 nt, Human
uagaugauguggaugaagaaacca

SEQ ID NO: 231272 - RNA, 26 nt, Human
uccagccaagacagacggacuccaga

SEQ ID NO: 231273 - RNA, 18 nt, Human
uccagcugccuccaagac

SEQ ID NO: 231274 - RNA, 18 nt, Human
uccgugucagccacugac

SEQ ID NO: 231275 - RNA, 23 nt, Human
uccucucuacccaccccucccac

SEQ ID NO: 231276 - RNA, 26 nt, Human
ucucugaaagaguggaaaaccccagg

SEQ ID NO: 231277 - RNA, 23 nt, Human
ugacaauaucaggagaauugcuu

SEQ ID NO: 231278 - RNA, 21 nt, Human
ugacuugaaccagagaagaac

SEQ ID NO: 231279 - RNA, 20 nt, Human
ugagcuugggagccuguccu

SEQ ID NO: 231280 - RNA, 21 nt, Human
uggaaggagaagggaggcugg

SEQ ID NO: 231281 - RNA, 21 nt, Human
uggaaggugaauucaugaagg

SEQ ID NO: 231282 - RNA, 21 nt, Human
uggacgcuggguggaaggcag

SEQ ID NO: 231283 - RNA, 21 nt, Human
uggccaagaaaagcccuggau

SEQ ID NO: 231284 - RNA, 24 nt, Human
uucuaaauccucucuacccacccc

SEQ ID NO: 231285 - RNA, 18 nt, Human
uucugaggaagcuggaag

SEQ ID NO: 231286 - RNA, 19 nt, Human
uugcacugcaaacacagcc

SEQ ID NO: 231287 - RNA, 23 nt, Human
uuuuauucugaggaagcuggaag

SEQ ID NO: 231288 - RNA, 18 nt, Human
uuuuuuuuuuuuuccuug

SEQ ID NO: 231289 - RNA, 19 nt, Human
aaaaaagcagauuaugagg

SEQ ID NO: 231290 - RNA, 22 nt, Human
aaccaagcauuguugggcugaa

SEQ ID NO: 231291 - RNA, 22 nt, Human
aagcaaaaaagcagauuaugag

SEQ ID NO: 231292 - RNA, 24 nt, Human
aagcagauuaugaggcagcuccac

SEQ ID NO: 231293 - RNA, 19 nt, Human
aagcaggcacaggagggcu

SEQ ID NO: 231294 - RNA, 21 nt, Human
aauggccaaucgucuaaacaa

SEQ ID NO: 231295 - RNA, 18 nt, Human
acaaccgccaugacccca

SEQ ID NO: 231296 - RNA, 23 nt, Human
accccccgacaguccccagagac

SEQ ID NO: 231297 - RNA, 30 nt, Human
agagacccugccuccguggccuccaccucu

SEQ ID NO: 231298 - RNA, 23 nt, Human
aggcacaggagggcuguuggggc

SEQ ID NO: 231299 - RNA, 20 nt, Human
agggaagcaggcacaggagg

SEQ ID NO: 231300 - RNA, 21 nt, Human
auucuaaaugacucaugguug

SEQ ID NO: 231301 - RNA, 29 nt, Human
caaaccuccccagcugccacaaccgccau

SEQ ID NO: 231302 - RNA, 22 nt, Human
caaccgccaugaccccaguggc

SEQ ID NO: 231303 - RNA, 24 nt, Human
cacaggcccugcaggaggagcagg

SEQ ID NO: 231304 - RNA, 21 nt, Human
cacccaggccacaggggccac

SEQ ID NO: 231305 - RNA, 25 nt, Human
cagaacagauucgccuaugacugaa

SEQ ID NO: 231306 - RNA, 21 nt, Human
cagauuguccugccagggagg

SEQ ID NO: 231307 - RNA, 20 nt, Human
cagcagaacaauuguguguu

SEQ ID NO: 231308 - RNA, 24 nt, Human
cagccacacugaccacagagcaac

SEQ ID NO: 231309 - RNA, 18 nt, Human
cagcucacaggcccugca

SEQ ID NO: 231310 - RNA, 27 nt, Human
cagggucagugcccacaaggggguugc

SEQ ID NO: 231311 - RNA, 20 nt, Human
caguccccagagacccugcc

SEQ ID NO: 231312 - RNA, 25 nt, Human
ccaaaccuccccagcugccacaacc

SEQ ID NO: 231313 - RNA, 30 nt, Human
ccaaagcaaaaaagcagauuaugaggcagg

SEQ ID NO: 231314 - RNA, 22 nt, Human
ccacaaccgccaugaccccagu

SEQ ID NO: 231315 - RNA, 20 nt, Human
ccaccucugggucagcuccc

SEQ ID NO: 231316 - RNA, 22 nt, Human
ccguggccuccaccucuggguc

SEQ ID NO: 231317 - RNA, 19 nt, Human
ccucccagcacuggggcug

SEQ ID NO: 231318 - RNA, 21 nt, Human
ccucugagacacugaagggga

SEQ ID NO: 231319 - RNA, 27 nt, Human
cuaaaugacucaugguuggcuaauuga

SEQ ID NO: 231320 - RNA, 24 nt, Human
cuauuuauaaaucaaugcaauaga

SEQ ID NO: 231321 - RNA, 18 nt, Human
cuugcagagccuucuccc

SEQ ID NO: 231322 - RNA, 25 nt, Human
gaaacuuccucccugucgcacacaa

SEQ ID NO: 231323 - RNA, 20 nt, Human
gaagggacuguuuuaugaug

SEQ ID NO: 231324 - RNA, 21 nt, Human
gaauggauggccagcgacagc

SEQ ID NO: 231325 - RNA, 23 nt, Human
gacccugccuccguggccuccac

SEQ ID NO: 231326 - RNA, 20 nt, Human
gauuacauauauuuauauau

SEQ ID NO: 231327 - RNA, 18 nt, Human
gcagggcagagaagggga

SEQ ID NO: 231328 - RNA, 23 nt, Human
gccuaaagcguugacccaguugu

SEQ ID NO: 231329 - RNA, 18 nt, Human
ggagcaggccagcgaggg

SEQ ID NO: 231330 - RNA, 20 nt, Human
ggagggcccacccaggccac

SEQ ID NO: 231331 - RNA, 18 nt, Human
ggccagcgacagccuggc

SEQ ID NO: 231332 - RNA, 21 nt, Human
gggaagcaggcacaggagggc

SEQ ID NO: 231333 - RNA, 21 nt, Human
guccccuccucugagacacug

SEQ ID NO: 231334 - RNA, 18 nt, Human
gucuaaacaagugucaga

SEQ ID NO: 231335 - RNA, 21 nt, Human
guggcagggucagugcccaca

SEQ ID NO: 231336 - RNA, 23 nt, Human
uacugaacugacaaguggguuuu

SEQ ID NO: 231337 - RNA, 27 nt, Human
uagaauggccaaucgucuaaacaagug

SEQ ID NO: 231338 - RNA, 20 nt, Human
uauaggggguaacuaauuaa

SEQ ID NO: 231339 - RNA, 22 nt, Human
ucacuaaaaugacuccuuucau

SEQ ID NO: 231340 - RNA, 25 nt, Human
ucccagcacuggggcuggggcggag

SEQ ID NO: 231341 - RNA, 21 nt, Human
uccccagagacccugccuccg

SEQ ID NO: 231342 - RNA, 19 nt, Human
uccccagcugccacaaccg

SEQ ID NO: 231343 - RNA, 19 nt, Human
ucccucuguaccccccgac

SEQ ID NO: 231344 - RNA, 25 nt, Human
ucccucuguaccccccgacaguccc

SEQ ID NO: 231345 - RNA, 21 nt, Human
uccguggccuccaccucuggg

SEQ ID NO: 231346 - RNA, 20 nt, Human
ucgccagaguuggcauccag

SEQ ID NO: 231347 - RNA, 21 nt, Human
ugaaauaacuguuauuuccug

SEQ ID NO: 231348 - RNA, 19 nt, Human
ugaauuaaaugguuuggag

SEQ ID NO: 231349 - RNA, 23 nt, Human
ugacaaacucaccaacuuuagaa

SEQ ID NO: 231350 - RNA, 20 nt, Human
ugaccacagagcaacugaau

SEQ ID NO: 231351 - RNA, 20 nt, Human
ugacugaacuaaccuguggg

SEQ ID NO: 231352 - RNA, 21 nt, Human
ugagacacugaaggggaaaga

SEQ ID NO: 231353 - RNA, 18 nt, Human
ugagcagcucacaggccc

SEQ ID NO: 231354 - RNA, 22 nt, Human
ugaugacaacucuucagcagaa

SEQ ID NO: 231355 - RNA, 21 nt, Human
ugccacaaccgccaugacccc

SEQ ID NO: 231356 - RNA, 21 nt, Human
ugccagggagcucuugcagag

SEQ ID NO: 231357 - RNA, 21 nt, Human
ugccuggagcagggcagagaa

SEQ ID NO: 231358 - RNA, 21 nt, Human
ugcuaugcagccacacugacc

SEQ ID NO: 231359 - RNA, 23 nt, Human
uggcagggucagugcccacaagg

SEQ ID NO: 231360 - RNA, 22 nt, Human
uugaagggacuguuuuaugaug

SEQ ID NO: 231361 - RNA, 18 nt, Human
uugcuuggcugaacugau

SEQ ID NO: 231362 - RNA, 19 nt, Human
uuugucaguugcuuggcug

SEQ ID NO: 231363 - RNA, 24 nt, Human
uuuuacugaacugacaaguggguu

SEQ ID NO: 231364 - RNA, 21 nt, Human
aaaaaguccagugucuccuca

SEQ ID NO: 231365 - RNA, 21 nt, Human
aaaaauaaacaaaacccccaa

SEQ ID NO: 231366 - RNA, 18 nt, Human
aaacaaaacaaaacagga

SEQ ID NO: 231367 - RNA, 23 nt, Human
aaacaaaacaggagugacuuugg

SEQ ID NO: 231368 - RNA, 25 nt, Human
aaacaaaccgaaaaagcauggcuca

SEQ ID NO: 231369 - RNA, 19 nt, Human
aaacacaauauuaauauug

SEQ ID NO: 231370 - RNA, 18 nt, Human
aaacagcccagcagaggg

SEQ ID NO: 231371 - RNA, 19 nt, Human
aaacccccaaagaaaaaca

SEQ ID NO: 231372 - RNA, 24 nt, Human
aaacccccaaagaaaaacaaaaca

SEQ ID NO: 231373 - RNA, 21 nt, Human
aaauaaaaacaaaccgaaaaa

SEQ ID NO: 231374 - RNA, 21 nt, Human
aacagcgaguggcacuucccc

SEQ ID NO: 231375 - RNA, 23 nt, Human
aaccccaccuccaggacccucug

SEQ ID NO: 231376 - RNA, 18 nt, Human
aacccccaaagaaaaaca

SEQ ID NO: 231377 - RNA, 19 nt, Human
aagcaggcaagaaccagag

SEQ ID NO: 231378 - RNA, 20 nt, Human
aagcauccagaacauccuaa

SEQ ID NO: 231379 - RNA, 21 nt, Human
aagcauccagaacauccuaaa

SEQ ID NO: 231380 - RNA, 18 nt, Human
aagcauggcucaauuuug

SEQ ID NO: 231381 - RNA, 26 nt, Human
aaugcaggguuguggggcagagaggg

SEQ ID NO: 231382 - RNA, 18 nt, Human
acaaaacaaaacaggagu

SEQ ID NO: 231383 - RNA, 26 nt, Human
acaaaacccccaaagaaaaacaaaac

SEQ ID NO: 231384 - RNA, 24 nt, Human
acagugaagcaggcaagaaccaga

SEQ ID NO: 231385 - RNA, 21 nt, Human
acccccaaagaaaaacaaaac

SEQ ID NO: 231386 - RNA, 27 nt, Human
acccccaaagaaaaacaaaacaaaaca

SEQ ID NO: 231387 - RNA, 23 nt, Human
acuccaccucccgcgcuccaagc

SEQ ID NO: 231388 - RNA, 25 nt, Human
acucucuuggccgugacugccgcca

SEQ ID NO: 231389 - RNA, 21 nt, Human
agaaaaacaaaacaaaacagg

SEQ ID NO: 231390 - RNA, 22 nt, Human
aggacccucugguuacaauguc

SEQ ID NO: 231391 - RNA, 19 nt, Human
aguggugggcuucuuggug

SEQ ID NO: 231392 - RNA, 23 nt, Human
auaaaaacaaaccgaaaaagcau

SEQ ID NO: 231393 - RNA, 19 nt, Human
auccagaacauccuaaagc

SEQ ID NO: 231394 - RNA, 19 nt, Human
auccagaacauccuaaagc

SEQ ID NO: 231395 - RNA, 18 nt, Human
auccuaaagcccugcccu

SEQ ID NO: 231396 - RNA, 18 nt, Human
augaaucagucacugcca

SEQ ID NO: 231397 - RNA, 22 nt, Human
caaaacaaaacaggagugacuu

SEQ ID NO: 231398 - RNA, 24 nt, Human
caaaacaaaacaggagugacuuug

SEQ ID NO: 231399 - RNA, 22 nt, Human
caaaacccccaaagaaaaacaa

SEQ ID NO: 231400 - RNA, 24 nt, Human
caaaacccccaaagaaaaacaaaa

SEQ ID NO: 231401 - RNA, 25 nt, Human
caaaacccccaaagaaaaacaaaac

SEQ ID NO: 231402 - RNA, 23 nt, Human
caacucaauacaaacagcccagc

SEQ ID NO: 231403 - RNA, 21 nt, Human
caagaaccagaggaacccaau

SEQ ID NO: 231404 - RNA, 20 nt, Human
caccucccgcgcuccaagcc

SEQ ID NO: 231405 - RNA, 20 nt, Human
caccucccgcgcuccaagcc

SEQ ID NO: 231406 - RNA, 20 nt, Human
cacugcugauagaggguggu

SEQ ID NO: 231407 - RNA, 18 nt, Human
cagaacauccuaaagccc

SEQ ID NO: 231408 - RNA, 24 nt, Human
cagcagaggguagggcauuaacuc

SEQ ID NO: 231409 - RNA, 24 nt, Human
cagcgaguggcacuuccccuacag

SEQ ID NO: 231410 - RNA, 18 nt, Human
cagggucccggcaggcgc

SEQ ID NO: 231411 - RNA, 18 nt, Human
cagggucccggcaggcgc

SEQ ID NO: 231412 - RNA, 19 nt, Human
cagggucccggcaggcgcu

SEQ ID NO: 231413 - RNA, 19 nt, Human
cagggucccggcaggcgcu

SEQ ID NO: 231414 - RNA, 21 nt, Human
caggguuguggggcagagagg

SEQ ID NO: 231415 - RNA, 23 nt, Human
caggucccaaagggagacugagg

SEQ ID NO: 231416 - RNA, 20 nt, Human
cauccagaacauccuaaagc

SEQ ID NO: 231417 - RNA, 19 nt, Human
caugaaucagucacugcca

SEQ ID NO: 231418 - RNA, 27 nt, Human
cauugcaacucaauacaaacagcccag

SEQ ID NO: 231419 - RNA, 28 nt, Human
cauugcaacucaauacaaacagcccagu

SEQ ID NO: 231420 - RNA, 22 nt, Human
ccaaagaaaaacaaaacaaaac

SEQ ID NO: 231421 - RNA, 23 nt, Human
ccaaagaaaaacaaaacaaaaca

SEQ ID NO: 231422 - RNA, 25 nt, Human
ccaaagaaaaacaaaacaaaacagg

SEQ ID NO: 231423 - RNA, 27 nt, Human
ccagaacauccuaaagcccugcccuga

SEQ ID NO: 231424 - RNA, 21 nt, Human
ccagccccaaaaauaaacaaa

SEQ ID NO: 231425 - RNA, 21 nt, Human
ccagcuacauugcagggcaaa

SEQ ID NO: 231426 - RNA, 18 nt, Human
ccagugucuccucaaucu

SEQ ID NO: 231427 - RNA, 18 nt, Human
cccaaagaaaaacaaaac

SEQ ID NO: 231428 - RNA, 24 nt, Human
cccaucaaccccaccuccaggacc

SEQ ID NO: 231429 - RNA, 23 nt, Human
ccccaaaaauaaacaaaaccccc

SEQ ID NO: 231430 - RNA, 25 nt, Human
ccccaaagaaaaacaaaacaaaaca

SEQ ID NO: 231431 - RNA, 22 nt, Human
cccccaaagaaaaacaaaacaa

SEQ ID NO: 231432 - RNA, 24 nt, Human
cccccaaagaaaaacaaaacaaaa

SEQ ID NO: 231433 - RNA, 18 nt, Human
ccccgcaugggcaggggc

SEQ ID NO: 231434 - RNA, 18 nt, Human
ccccgcaugggcaggggc

SEQ ID NO: 231435 - RNA, 24 nt, Human
ccccgcaugggcaggggccugggu

SEQ ID NO: 231436 - RNA, 24 nt, Human
ccccgcaugggcaggggccugggu

SEQ ID NO: 231437 - RNA, 18 nt, Human
ccccuagaacccugacuu

SEQ ID NO: 231438 - RNA, 23 nt, Human
ccccuagaacccugacuucccuu

SEQ ID NO: 231439 - RNA, 22 nt, Human
ccccuggauucuggagaguagg

SEQ ID NO: 231440 - RNA, 21 nt, Human
cccggcccgggggacucuucc

SEQ ID NO: 231441 - RNA, 21 nt, Human
cccggcccgggggacucuucc

SEQ ID NO: 231442 - RNA, 22 nt, Human
cccggcccgggggacucuuccg

SEQ ID NO: 231443 - RNA, 22 nt, Human
cccuacagcaugucucccccua

SEQ ID NO: 231444 - RNA, 22 nt, Human
cccucguaauuccgcagucccc

SEQ ID NO: 231445 - RNA, 19 nt, Human
cccuucuuccucuuccucc

SEQ ID NO: 231446 - RNA, 19 nt, Human
cccuucuuccucuuccucc

SEQ ID NO: 231447 - RNA, 24 nt, Human
cccuugauuucccauucuugaaga

SEQ ID NO: 231448 - RNA, 28 nt, Human
ccgccggggccgacuccaccucccgcgc

SEQ ID NO: 231449 - RNA, 28 nt, Human
ccgccggggccgacuccaccucccgcgc

SEQ ID NO: 231450 - RNA, 23 nt, Human
ccgcugccuggagcugcucccgg

SEQ ID NO: 231451 - RNA, 23 nt, Human
ccgcugccuggagcugcucccgg

SEQ ID NO: 231452 - RNA, 22 nt, Human
ccuacccuuggacaggucccaa

SEQ ID NO: 231453 - RNA, 20 nt, Human
ccuccaggacccucugguua

SEQ ID NO: 231454 - RNA, 19 nt, Human
ccuccggggccgcugccug

SEQ ID NO: 231455 - RNA, 19 nt, Human
ccuccggggccgcugccug

SEQ ID NO: 231456 - RNA, 18 nt, Human
ccugacuucccuuucucc

SEQ ID NO: 231457 - RNA, 21 nt, Human
ccugacuucccuuucucccca

SEQ ID NO: 231458 - RNA, 22 nt, Human
cgaauaaccccuagaacccuga

SEQ ID NO: 231459 - RNA, 23 nt, Human
cgacaggugcuuuacaaacggcu

SEQ ID NO: 231460 - RNA, 21 nt, Human
cgauucgucccuucagggcaa

SEQ ID NO: 231461 - RNA, 21 nt, Human
cgauucgucccuucagggcaa

SEQ ID NO: 231462 - RNA, 18 nt, Human
cgccuacgaggcgcaggg

SEQ ID NO: 231463 - RNA, 18 nt, Human
cgccuacgaggcgcaggg

SEQ ID NO: 231464 - RNA, 18 nt, Human
cgugacugccgccaggca

SEQ ID NO: 231465 - RNA, 24 nt, Human
cucccggcccgggggacucuuccg

SEQ ID NO: 231466 - RNA, 23 nt, Human
cucucagaaguggcaaucccuaa

SEQ ID NO: 231467 - RNA, 23 nt, Human
cucucagaaguggcaaucccuaa

SEQ ID NO: 231468 - RNA, 20 nt, Human
cugacuucccuuucucccca

SEQ ID NO: 231469 - RNA, 21 nt, Human
cugccaauagaaaaugugacc

SEQ ID NO: 231470 - RNA, 19 nt, Human
cuuccugggccacugcuga

SEQ ID NO: 231471 - RNA, 19 nt, Human
gaaaguucuucgaaaggcc

SEQ ID NO: 231472 - RNA, 21 nt, Human
gaauaaccccuagaacccuga

SEQ ID NO: 231473 - RNA, 24 nt, Human
gacuccaccucccgcgcuccaagc

SEQ ID NO: 231474 - RNA, 18 nt, Human
gauaaauaaaaacaaacc

SEQ ID NO: 231475 - RNA, 20 nt, Human
gcagagagggacuggcugga

SEQ ID NO: 231476 - RNA, 23 nt, Human
gcugcauagcuaaccucugggaa

SEQ ID NO: 231477 - RNA, 18 nt, Human
ggacaggucccaaaggga

SEQ ID NO: 231478 - RNA, 23 nt, Human
ggagcaugaaguccucggccucc

SEQ ID NO: 231479 - RNA, 23 nt, Human
ggagcaugaaguccucggccucc

SEQ ID NO: 231480 - RNA, 18 nt, Human
ggagcugcucccggcccg

SEQ ID NO: 231481 - RNA, 18 nt, Human
ggagcugcucccggcccg

SEQ ID NO: 231482 - RNA, 18 nt, Human
ggcaggggccugggucag

SEQ ID NO: 231483 - RNA, 21 nt, Human
ggccugggucagccucggguu

SEQ ID NO: 231484 - RNA, 21 nt, Human
ggccugggucagccucggguu

SEQ ID NO: 231485 - RNA, 18 nt, Human
gggcagggccugcccgcg

SEQ ID NO: 231486 - RNA, 18 nt, Human
gggcagggccugcccgcg

SEQ ID NO: 231487 - RNA, 20 nt, Human
gggcaggggccugggucagc

SEQ ID NO: 231488 - RNA, 19 nt, Human
gggccugggucagccucgg

SEQ ID NO: 231489 - RNA, 19 nt, Human
gggccugggucagccucgg

SEQ ID NO: 231490 - RNA, 21 nt, Human
ggucagggucccggcaggcgc

SEQ ID NO: 231491 - RNA, 21 nt, Human
ggucagggucccggcaggcgc

SEQ ID NO: 231492 - RNA, 18 nt, Human
gguuguggggcagagagg

SEQ ID NO: 231493 - RNA, 25 nt, Human
gugaagcaggcaagaaccagaggaa

SEQ ID NO: 231494 - RNA, 19 nt, Human
gugaaucuucagaacuggg

SEQ ID NO: 231495 - RNA, 24 nt, Human
uaaacaaaacccccaaagaaaaac

SEQ ID NO: 231496 - RNA, 25 nt, Human
uaaacaaaacccccaaagaaaaaca

SEQ ID NO: 231497 - RNA, 23 nt, Human
uaaagaaaauggguaaaaagucc

SEQ ID NO: 231498 - RNA, 24 nt, Human
uaaccccuagaacccugacuuccc

SEQ ID NO: 231499 - RNA, 21 nt, Human
uagaucaucgguuugcccucc

SEQ ID NO: 231500 - RNA, 18 nt, Human
uagguucuuggccgugac

SEQ ID NO: 231501 - RNA, 22 nt, Human
uaugaugggaagcauaauuauu

SEQ ID NO: 231502 - RNA, 21 nt, Human
uauuaaaaagcauccagaaca

SEQ ID NO: 231503 - RNA, 21 nt, Human
uccacagugaagcaggcaaga

SEQ ID NO: 231504 - RNA, 23 nt, Human
uccacagugaagcaggcaagaac

SEQ ID NO: 231505 - RNA, 18 nt, Human
ucccauccacagugaagc

SEQ ID NO: 231506 - RNA, 24 nt, Human
ucccuucuuccucuuccuccgggg

SEQ ID NO: 231507 - RNA, 27 nt, Human
ucccuucuuccucuuccuccggggcca

SEQ ID NO: 231508 - RNA, 22 nt, Human
uccuaaagcccugcccugaucu

SEQ ID NO: 231509 - RNA, 22 nt, Human
ucgcuggucacauugcaacuca

SEQ ID NO: 231510 - RNA, 19 nt, Human
ucuaggugggcugcauagc

SEQ ID NO: 231511 - RNA, 22 nt, Human
ucucuuggccgugacugccgcc

SEQ ID NO: 231512 - RNA, 18 nt, Human
ucuguagugagggcagcu

SEQ ID NO: 231513 - RNA, 27 nt, Human
ucuguagugagggcagcuuggcugggc

SEQ ID NO: 231514 - RNA, 23 nt, Human
ugaaguccucggccucccucaua

SEQ ID NO: 231515 - RNA, 23 nt, Human
ugaaguccucggccucccucaua

SEQ ID NO: 231516 - RNA, 20 nt, Human
ugagcacugucccuucuucc

SEQ ID NO: 231517 - RNA, 20 nt, Human
ugagcacugucccuucuucc

SEQ ID NO: 231518 - RNA, 19 nt, Human
ugcauagcuaaccucuggg

SEQ ID NO: 231519 - RNA, 23 nt, Human
ugccagccccaaaaauaaacaaa

SEQ ID NO: 231520 - RNA, 19 nt, Human
ugcccugaucuuguggcuu

SEQ ID NO: 231521 - RNA, 19 nt, Human
ugccuggagcugcucccgg

SEQ ID NO: 231522 - RNA, 19 nt, Human
ugccuggagcugcucccgg

SEQ ID NO: 231523 - RNA, 19 nt, Human
ugggaaugcaggguugugg

SEQ ID NO: 231524 - RNA, 21 nt, Human
ugggucagccucggguugggu

SEQ ID NO: 231525 - RNA, 21 nt, Human
ugggucagccucggguugggu

SEQ ID NO: 231526 - RNA, 21 nt, Human
ugguagaggcagcugauuuuc

SEQ ID NO: 231527 - RNA, 29 nt, Human
ugguagaggcagcugauuuuccucccggg

SEQ ID NO: 231528 - RNA, 22 nt, Human
uguaaacacaauauuaauauug

SEQ ID NO: 231529 - RNA, 20 nt, Human
uguggcuuugcaguaagaug

SEQ ID NO: 231530 - RNA, 21 nt, Human
uguggggcagagagggacugg

SEQ ID NO: 231531 - RNA, 20 nt, Human
ugugugaaggugaagguggu

SEQ ID NO: 231532 - RNA, 22 nt, Human
uuaaauaucggccgaagaugcu

SEQ ID NO: 231533 - RNA, 22 nt, Human
uuaauauugaagauuaaagaaa

SEQ ID NO: 231534 - RNA, 20 nt, Human
uucuuaauguagguucuugg

SEQ ID NO: 231535 - RNA, 24 nt, Human
uucuugaagagacucaucuaggug

SEQ ID NO: 231536 - RNA, 21 nt, Human
uucuuggccgugacugccgcc

SEQ ID NO: 231537 - RNA, 21 nt, Human
uugaauuugaaggccgggccc

SEQ ID NO: 231538 - RNA, 26 nt, Human
aagaaaccaggauaaaucuccaaugg

SEQ ID NO: 231539 - RNA, 20 nt, Human
aaguacaccucauaaaagga

SEQ ID NO: 231540 - RNA, 24 nt, Human
acacccaaagaaagggaaaaaaaa

SEQ ID NO: 231541 - RNA, 18 nt, Human
acccuggcgaccuccaca

SEQ ID NO: 231542 - RNA, 21 nt, Human
agccaaucaguagacacaauc

SEQ ID NO: 231543 - RNA, 22 nt, Human
agcuaacuccauaaaugaauau

SEQ ID NO: 231544 - RNA, 31 nt, Human
cacuuuuauguucaucuuaaaaaccagaaag

SEQ ID NO: 231545 - RNA, 25 nt, Human
caucaugaaguucucuucauuuaaa

SEQ ID NO: 231546 - RNA, 19 nt, Human
caucuuaaaaaccagaaac

SEQ ID NO: 231547 - RNA, 24 nt, Human
cuuuucuuuuuuuaaaaaaaauac

SEQ ID NO: 231548 - RNA, 18 nt, Human
ggacacccaaagaaaggg

SEQ ID NO: 231549 - RNA, 23 nt, Human
guaguaguauuccuaagaaacca

SEQ ID NO: 231550 - RNA, 19 nt, Human
uaaaaagcuguuagguaca

SEQ ID NO: 231551 - RNA, 19 nt, Human
uaacuccauaaaugaauau

SEQ ID NO: 231552 - RNA, 22 nt, Human
uaagaaaccaggauaaaucucc

SEQ ID NO: 231553 - RNA, 21 nt, Human
uaauuaaagcuuuaaaaaguc

SEQ ID NO: 231554 - RNA, 22 nt, Human
uacugcuuauaaacuauugaua

SEQ ID NO: 231555 - RNA, 21 nt, Human
uagaaaugaaaucaaucuauu

SEQ ID NO: 231556 - RNA, 25 nt, Human
uagcaacaauuuguuuuuuaaaaag

SEQ ID NO: 231557 - RNA, 21 nt, Human
uagguccagccuaagguucug

SEQ ID NO: 231558 - RNA, 18 nt, Human
uagguccaggaaucaaag

SEQ ID NO: 231559 - RNA, 20 nt, Human
uauuccuaagaaaccaggag

SEQ ID NO: 231560 - RNA, 24 nt, Human
ucucuucauuuaaaaaaaaaaaaa

SEQ ID NO: 231561 - RNA, 18 nt, Human
uuggacacccaaagaaag

SEQ ID NO: 231562 - RNA, 20 nt, Human
aaaccaggauuagccuaaug

SEQ ID NO: 231563 - RNA, 22 nt, Human
aacaaugguggcauugccaucu

SEQ ID NO: 231564 - RNA, 18 nt, Human
aacugcugaacugcaggg

SEQ ID NO: 231565 - RNA, 20 nt, Human
aagagaccauucacuaccau

SEQ ID NO: 231566 - RNA, 18 nt, Human
acaggcucuggcugcggc

SEQ ID NO: 231567 - RNA, 20 nt, Human
acccccuccucaguagcuca

SEQ ID NO: 231568 - RNA, 18 nt, Human
agaccauucacuaccauc

SEQ ID NO: 231569 - RNA, 18 nt, Human
agagaccauucacuacca

SEQ ID NO: 231570 - RNA, 18 nt, Human
agauucuccccuaccuuc

SEQ ID NO: 231571 - RNA, 21 nt, Human
agcaguuccaaguggcuggca

SEQ ID NO: 231572 - RNA, 22 nt, Human
aggaaccagcacugccugccuu

SEQ ID NO: 231573 - RNA, 24 nt, Human
aggaaguggugccuugccugggaa

SEQ ID NO: 231574 - RNA, 24 nt, Human
aggcagagccauuucccagauccg

SEQ ID NO: 231575 - RNA, 18 nt, Human
aggggcacugcuccuucc

SEQ ID NO: 231576 - RNA, 21 nt, Human
agucaagacauuugucuuuuc

SEQ ID NO: 231577 - RNA, 24 nt, Human
agugguggggacacaggcagagga

SEQ ID NO: 231578 - RNA, 21 nt, Human
auauuucuccuuugcccagcu

SEQ ID NO: 231579 - RNA, 22 nt, Human
auccagccugaaggcaaagaga

SEQ ID NO: 231580 - RNA, 19 nt, Human
auccagcugggguugggga

SEQ ID NO: 231581 - RNA, 20 nt, Human
aucccaggccuggaaggagg

SEQ ID NO: 231582 - RNA, 19 nt, Human
caacccccuccucaguagc

SEQ ID NO: 231583 - RNA, 19 nt, Human
caacccccuccucaguagc

SEQ ID NO: 231584 - RNA, 22 nt, Human
caccggaggcaacaucuggggg

SEQ ID NO: 231585 - RNA, 19 nt, Human
cacugccgggccacggacc

SEQ ID NO: 231586 - RNA, 21 nt, Human
cacugcuccuuccugcuccca

SEQ ID NO: 231587 - RNA, 22 nt, Human
cacugcuccuuccugcucccac

SEQ ID NO: 231588 - RNA, 23 nt, Human
cacugcuccuuccugcucccacc

SEQ ID NO: 231589 - RNA, 19 nt, Human
cagcaccaggccacacuac

SEQ ID NO: 231590 - RNA, 19 nt, Human
cagcagugucucugauggc

SEQ ID NO: 231591 - RNA, 18 nt, Human
cagcucaccuucacccca

SEQ ID NO: 231592 - RNA, 23 nt, Human
caguguggguggggggugagggg

SEQ ID NO: 231593 - RNA, 22 nt, Human
caucuggggcccacaugagccc

SEQ ID NO: 231594 - RNA, 19 nt, Human
cauugcaccugaguccugc

SEQ ID NO: 231595 - RNA, 18 nt, Human
cauuugucuuuucccuuc

SEQ ID NO: 231596 - RNA, 18 nt, Human
ccacagcaggccugggag

SEQ ID NO: 231597 - RNA, 23 nt, Human
ccacagcaggccugggaggcaca

SEQ ID NO: 231598 - RNA, 19 nt, Human
ccaccagcagugucucuga

SEQ ID NO: 231599 - RNA, 25 nt, Human
ccagcagugucucugauggcuuccc

SEQ ID NO: 231600 - RNA, 20 nt, Human
ccauuccuggccaucuuccc

SEQ ID NO: 231601 - RNA, 23 nt, Human
ccauuccuggccaucuucccaac

SEQ ID NO: 231602 - RNA, 21 nt, Human
cccacaugagcccucuggggc

SEQ ID NO: 231603 - RNA, 20 nt, Human
cccagauccgcaggcuuccu

SEQ ID NO: 231604 - RNA, 18 nt, Human
ccugaguccugcaguucc

SEQ ID NO: 231605 - RNA, 22 nt, Human
cucacaggcucuggcugcggcc

SEQ ID NO: 231606 - RNA, 21 nt, Human
cucaccuucaccccagcacca

SEQ ID NO: 231607 - RNA, 22 nt, Human
cucuguggugagcuugcucuuc

SEQ ID NO: 231608 - RNA, 18 nt, Human
cugcaugacagagcuggg

SEQ ID NO: 231609 - RNA, 23 nt, Human
cugccugccuuuugauucaaagc

SEQ ID NO: 231610 - RNA, 19 nt, Human
cugcggccuccucuacucc

SEQ ID NO: 231611 - RNA, 19 nt, Human
cugcuccuuccugcuccca

SEQ ID NO: 231612 - RNA, 23 nt, Human
cugcuccuuccugcucccaccag

SEQ ID NO: 231613 - RNA, 20 nt, Human
cugguuccacuucacuacac

SEQ ID NO: 231614 - RNA, 19 nt, Human
gacuugcugcuccucauuc

SEQ ID NO: 231615 - RNA, 21 nt, Human
gagcuugcucuuccuaauaac

SEQ ID NO: 231616 - RNA, 20 nt, Human
gcugaacugcagggggacca

SEQ ID NO: 231617 - RNA, 22 nt, Human
ggacacaggcagaggaaccagc

SEQ ID NO: 231618 - RNA, 18 nt, Human
ggaggcacauccagcugg

SEQ ID NO: 231619 - RNA, 20 nt, Human
ggcuuccuggcugcucgagg

SEQ ID NO: 231620 - RNA, 19 nt, Human
gggccucaguuccacuccu

SEQ ID NO: 231621 - RNA, 20 nt, Human
ggguggggggugaggggcag

SEQ ID NO: 231622 - RNA, 19 nt, Human
gguggggggugaggggcag

SEQ ID NO: 231623 - RNA, 22 nt, Human
gguuggggaggacaggccugca

SEQ ID NO: 231624 - RNA, 21 nt, Human
gugaggggcaggauguccaac

SEQ ID NO: 231625 - RNA, 21 nt, Human
uacccaagggagugguuauga

SEQ ID NO: 231626 - RNA, 21 nt, Human
uaccugcaguguggguggggg

SEQ ID NO: 231627 - RNA, 20 nt, Human
uagauucuccccuaccuucc

SEQ ID NO: 231628 - RNA, 25 nt, Human
uagauuucuggcauuauaaaauggc

SEQ ID NO: 231629 - RNA, 23 nt, Human
ucagaagaucccuguguccauuu

SEQ ID NO: 231630 - RNA, 24 nt, Human
ucauaagccggaguaaaucccaga

SEQ ID NO: 231631 - RNA, 21 nt, Human
uccccuaccuucccucauuaa

SEQ ID NO: 231632 - RNA, 19 nt, Human
ucccuacugggcugcggug

SEQ ID NO: 231633 - RNA, 20 nt, Human
uccugcaguuccucaggcug

SEQ ID NO: 231634 - RNA, 22 nt, Human
ucuaccugcagugugggugggg

SEQ ID NO: 231635 - RNA, 21 nt, Human
ucuggggcccacaugagcccu

SEQ ID NO: 231636 - RNA, 22 nt, Human
ugaguccugcaguuccucaggc

SEQ ID NO: 231637 - RNA, 22 nt, Human
ugcccagcucaccuucacccca

SEQ ID NO: 231638 - RNA, 24 nt, Human
ugcccagcucaccuucaccccagc

SEQ ID NO: 231639 - RNA, 18 nt, Human
ugcgguggggcucugagg

SEQ ID NO: 231640 - RNA, 20 nt, Human
ugcgguggggcucugagguu

SEQ ID NO: 231641 - RNA, 20 nt, Human
ugcugacuucacauaaaacc

SEQ ID NO: 231642 - RNA, 20 nt, Human
ugcugcuccucauucaugug

SEQ ID NO: 231643 - RNA, 24 nt, Human
ugggaggcacauccagcugggguu

SEQ ID NO: 231644 - RNA, 19 nt, Human
ugggaucagauggccuccu

SEQ ID NO: 231645 - RNA, 23 nt, Human
uggggcucugagguugggaccag

SEQ ID NO: 231646 - RNA, 21 nt, Human
uucaccccagcaccaggccac

SEQ ID NO: 231647 - RNA, 21 nt, Human
uuggacaccggaggcaacauc

SEQ ID NO: 231648 - RNA, 18 nt, Human
uugucuuuucccuucccc

SEQ ID NO: 231649 - RNA, 19 nt, Human
uuucuggcauuauaaaaug

SEQ ID NO: 231650 - RNA, 25 nt, Human
aaagaagagcacggagaugggcgac

SEQ ID NO: 231651 - RNA, 25 nt, Human
aagcgcccccggggccgccgcccaa

SEQ ID NO: 231652 - RNA, 21 nt, Human
aagcggcgcccagcagcuccg

SEQ ID NO: 231653 - RNA, 18 nt, Human
accagcagcagcgaggcc

SEQ ID NO: 231654 - RNA, 19 nt, Human
accccgacagcgcgacggg

SEQ ID NO: 231655 - RNA, 18 nt, Human
accggcccgggguccgcg

SEQ ID NO: 231656 - RNA, 18 nt, Human
acgggggcggggccgagg

SEQ ID NO: 231657 - RNA, 18 nt, Human
agaggagcagaguuggag

SEQ ID NO: 231658 - RNA, 23 nt, Human
agccugggggcacccuggggcuc

SEQ ID NO: 231659 - RNA, 22 nt, Human
aggcaggaugagggggcggggu

SEQ ID NO: 231660 - RNA, 21 nt, Human
aggcggcaggggcccgggggc

SEQ ID NO: 231661 - RNA, 23 nt, Human
agggcagcagcagggccaggagg

SEQ ID NO: 231662 - RNA, 20 nt, Human
aggggcagggguccuggggg

SEQ ID NO: 231663 - RNA, 19 nt, Human
augggcgacaggcgcgcgg

SEQ ID NO: 231664 - RNA, 24 nt, Human
caagcgcccccggggccgccgccc

SEQ ID NO: 231665 - RNA, 25 nt, Human
caccagcagcagcgaggccucggcc

SEQ ID NO: 231666 - RNA, 18 nt, Human
cacuggcggccccagggc

SEQ ID NO: 231667 - RNA, 19 nt, Human
cagaguuggagggggugga

SEQ ID NO: 231668 - RNA, 21 nt, Human
cagcagcagcgaggccucggc

SEQ ID NO: 231669 - RNA, 19 nt, Human
cagcagcgaggccucggcc

SEQ ID NO: 231670 - RNA, 22 nt, Human
cagcagggcaggucggcggcuc

SEQ ID NO: 231671 - RNA, 21 nt, Human
cagggcaaugccccgcggccg

SEQ ID NO: 231672 - RNA, 20 nt, Human
cagggccaggaggaggaggg

SEQ ID NO: 231673 - RNA, 23 nt, Human
ccacucagggcaaugccccgcgg

SEQ ID NO: 231674 - RNA, 21 nt, Human
ccaggaggaggaggagguggu

SEQ ID NO: 231675 - RNA, 22 nt, Human
cccaagcggcgcccagcagcuc

SEQ ID NO: 231676 - RNA, 21 nt, Human
cccccagcuccuccacguggc

SEQ ID NO: 231677 - RNA, 19 nt, Human
cccccggggccgccgccca

SEQ ID NO: 231678 - RNA, 23 nt, Human
ccccggguuagcggcagccgcac

SEQ ID NO: 231679 - RNA, 26 nt, Human
cccgcggccgagacaggccggggucc

SEQ ID NO: 231680 - RNA, 26 nt, Human
cccgcggccgagacaggcuccgaggc

SEQ ID NO: 231681 - RNA, 23 nt, Human
cccgcuugcgccacgcucagcuc

SEQ ID NO: 231682 - RNA, 23 nt, Human
cccugcccgccccggguuagcgg

SEQ ID NO: 231683 - RNA, 22 nt, Human
cccuggcccgcuugcgccacgc

SEQ ID NO: 231684 - RNA, 22 nt, Human
cccuggggcucaucgcgcaguc

SEQ ID NO: 231685 - RNA, 23 nt, Human
cccuggggcucaucgcgcagucc

SEQ ID NO: 231686 - RNA, 18 nt, Human
ccgcacucguccaccacc

SEQ ID NO: 231687 - RNA, 20 nt, Human
ccgcagggaccuugcugcgg

SEQ ID NO: 231688 - RNA, 23 nt, Human
ccgccgccgccgccgcgaaacgc

SEQ ID NO: 231689 - RNA, 28 nt, Human
ccgccgccgccgcgaaacgcagcuccag

SEQ ID NO: 231690 - RNA, 20 nt, Human
ccgcgcccgcgcccuggccc

SEQ ID NO: 231691 - RNA, 19 nt, Human
ccgcgucccugcccgcccc

SEQ ID NO: 231692 - RNA, 24 nt, Human
ccggagccugggggcacccugggg

SEQ ID NO: 231693 - RNA, 24 nt, Human
ccggggcugccgccgccgccgccg

SEQ ID NO: 231694 - RNA, 22 nt, Human
ccgggugggcgcaccgcggucc

SEQ ID NO: 231695 - RNA, 18 nt, Human
ccugggggcacccugggg

SEQ ID NO: 231696 - RNA, 19 nt, Human
ccuggggggcguggccggg

SEQ ID NO: 231697 - RNA, 20 nt, Human
ccuggggggcguggccggga

SEQ ID NO: 231698 - RNA, 25 nt, Human
ccuggucuccugggggucccggcgu

SEQ ID NO: 231699 - RNA, 18 nt, Human
cgagggcagcagcagggc

SEQ ID NO: 231700 - RNA, 20 nt, Human
cgagggucaccagcagcagc

SEQ ID NO: 231701 - RNA, 23 nt, Human
cgcacgauguuuccggcgacccc

SEQ ID NO: 231702 - RNA, 24 nt, Human
cgcacucguccaccaccauguccu

SEQ ID NO: 231703 - RNA, 23 nt, Human
cgcccgcgguagccgacggagcc

SEQ ID NO: 231704 - RNA, 20 nt, Human
cgccgugcccgucgccugcg

SEQ ID NO: 231705 - RNA, 25 nt, Human
cgcgacgggcagcgcgcacugaccc

SEQ ID NO: 231706 - RNA, 22 nt, Human
cgcgccgcggccgggccagggg

SEQ ID NO: 231707 - RNA, 18 nt, Human
cgcgcgcagcacagcgug

SEQ ID NO: 231708 - RNA, 22 nt, Human
cgcggaagcucacguacagccg

SEQ ID NO: 231709 - RNA, 21 nt, Human
cgcggccgagacaggcuccga

SEQ ID NO: 231710 - RNA, 21 nt, Human
cgcgggcacgcagcagggcag

SEQ ID NO: 231711 - RNA, 20 nt, Human
cgcgugcaugagcgcgcgca

SEQ ID NO: 231712 - RNA, 26 nt, Human
cggaagcucacguacagccgccgcgc

SEQ ID NO: 231713 - RNA, 23 nt, Human
cggagccugggggcacccugggg

SEQ ID NO: 231714 - RNA, 19 nt, Human
cggccgagacaggcuccga

SEQ ID NO: 231715 - RNA, 19 nt, Human
cggcgucgcgccgcggccg

SEQ ID NO: 231716 - RNA, 19 nt, Human
cggcucgggcgcucagcgg

SEQ ID NO: 231717 - RNA, 18 nt, Human
cuagagccuggagcaggc

SEQ ID NO: 231718 - RNA, 21 nt, Human
cucagcucccagccgcccucc

SEQ ID NO: 231719 - RNA, 24 nt, Human
cuccacguggcacgguugcagggu

SEQ ID NO: 231720 - RNA, 19 nt, Human
cuccggggcugccgccgcc

SEQ ID NO: 231721 - RNA, 22 nt, Human
cucguccaccaccauguccuca

SEQ ID NO: 231722 - RNA, 24 nt, Human
cugagggcggggccgguguccccg

SEQ ID NO: 231723 - RNA, 19 nt, Human
gaccagagagugcgcaggg

SEQ ID NO: 231724 - RNA, 18 nt, Human
gacccagcggugccagcc

SEQ ID NO: 231725 - RNA, 18 nt, Human
gaccuggucuccuggggg

SEQ ID NO: 231726 - RNA, 22 nt, Human
gacuguccacucagggcaaugc

SEQ ID NO: 231727 - RNA, 22 nt, Human
gagacaggcuccgaggcccggg

SEQ ID NO: 231728 - RNA, 20 nt, Human
gagcagcaccggcccggggu

SEQ ID NO: 231729 - RNA, 21 nt, Human
gagcgcgcgcagcacagcgug

SEQ ID NO: 231730 - RNA, 24 nt, Human
gaggagcagaguuggagggggugg

SEQ ID NO: 231731 - RNA, 18 nt, Human
gaggaggaggagguggug

SEQ ID NO: 231732 - RNA, 20 nt, Human
gaggaggaggaggugguggc

SEQ ID NO: 231733 - RNA, 18 nt, Human
gaggggcagggguccugg

SEQ ID NO: 231734 - RNA, 18 nt, Human
gcaaugccccgcggccga

SEQ ID NO: 231735 - RNA, 18 nt, Human
gcagcagcagggccagga

SEQ ID NO: 231736 - RNA, 21 nt, Human
gcccgggugggcgcaccgcgg

SEQ ID NO: 231737 - RNA, 18 nt, Human
gcccgucgccugcgcccg

SEQ ID NO: 231738 - RNA, 20 nt, Human
gccggguccacgggggcggg

SEQ ID NO: 231739 - RNA, 24 nt, Human
gccugcgcccgcccgcgguagccg

SEQ ID NO: 231740 - RNA, 19 nt, Human
gcgagcccaagcggcgccc

SEQ ID NO: 231741 - RNA, 18 nt, Human
gcgcacuggcggccccag

SEQ ID NO: 231742 - RNA, 18 nt, Human
gcgcgcgggcacgcagca

SEQ ID NO: 231743 - RNA, 19 nt, Human
gcgcggcgcgaugacccag

SEQ ID NO: 231744 - RNA, 18 nt, Human
gcggagcagcaccggccc

SEQ ID NO: 231745 - RNA, 18 nt, Human
gcggcaggggcccggggg

SEQ ID NO: 231746 - RNA, 21 nt, Human
gcuccgaggcccgggugggcg

SEQ ID NO: 231747 - RNA, 24 nt, Human
ggaaauggaggcaggaugaggggg

SEQ ID NO: 231748 - RNA, 20 nt, Human
ggaggaggaggagguggugg

SEQ ID NO: 231749 - RNA, 18 nt, Human
ggcagggguccugggggg

SEQ ID NO: 231750 - RNA, 18 nt, Human
ggcagggguccugggggg

SEQ ID NO: 231751 - RNA, 19 nt, Human
ggcagggguccuggggggc

SEQ ID NO: 231752 - RNA, 21 nt, Human
ggcccgcuugcgccacgcuca

SEQ ID NO: 231753 - RNA, 22 nt, Human
gggaaccggccggagccugggg

SEQ ID NO: 231754 - RNA, 25 nt, Human
gggcgcgggucaggggcagcgaggg

SEQ ID NO: 231755 - RNA, 22 nt, Human
gggcggccaaggacggggagcg

SEQ ID NO: 231756 - RNA, 25 nt, Human
gggcggcggcugggccugggggcaa

SEQ ID NO: 231757 - RNA, 19 nt, Human
ggggcggggucccagggga

SEQ ID NO: 231758 - RNA, 20 nt, Human
gggguccuggggggcguggc

SEQ ID NO: 231759 - RNA, 20 nt, Human
guccuggggggcguggccgg

SEQ ID NO: 231760 - RNA, 22 nt, Human
guugagcgccggcggccccccg

SEQ ID NO: 231761 - RNA, 23 nt, Human
uagaggagcagaguuggaggggg

SEQ ID NO: 231762 - RNA, 19 nt, Human
ucaaagaagagcacggaga

SEQ ID NO: 231763 - RNA, 22 nt, Human
uccacagccgacaggucgaaga

SEQ ID NO: 231764 - RNA, 18 nt, Human
ucccugcccgccccgggu

SEQ ID NO: 231765 - RNA, 19 nt, Human
uccgcgcgcacuggcggcc

SEQ ID NO: 231766 - RNA, 21 nt, Human
uccgcgcgcacuggcggcccc

SEQ ID NO: 231767 - RNA, 21 nt, Human
ucgaaacaggcgccacaugac

SEQ ID NO: 231768 - RNA, 24 nt, Human
ucgcgcaguccuagagccuggagc

SEQ ID NO: 231769 - RNA, 21 nt, Human
ugagcgcgcgcagcacagcgu

SEQ ID NO: 231770 - RNA, 20 nt, Human
uggggccggguccacggggg

SEQ ID NO: 231771 - RNA, 23 nt, Human
ugucaaagaagagcacggagaug

SEQ ID NO: 231772 - RNA, 21 nt, Human
uguccccggaggggcaggggu

SEQ ID NO: 231773 - RNA, 19 nt, Human
aaaaacaauggcgaagacc

SEQ ID NO: 231774 - RNA, 21 nt, Human
aaaagcaguagaaaggaugac

SEQ ID NO: 231775 - RNA, 21 nt, Human
aaacagcuggggccaaauucu

SEQ ID NO: 231776 - RNA, 26 nt, Human
aaccccuacccacagagagcugaggg

SEQ ID NO: 231777 - RNA, 23 nt, Human
aacucccaucauggaauugaaga

SEQ ID NO: 231778 - RNA, 25 nt, Human
aagaaggcaggauagagcuccagug

SEQ ID NO: 231779 - RNA, 23 nt, Human
aagaggccagagaaaggaggagg

SEQ ID NO: 231780 - RNA, 25 nt, Human
aagaggccagagaaaggaggaggca

SEQ ID NO: 231781 - RNA, 21 nt, Human
aagugacccuauagcgcaggg

SEQ ID NO: 231782 - RNA, 22 nt, Human
acaagcaaggagggaggaugca

SEQ ID NO: 231783 - RNA, 23 nt, Human
acagaauauaaccaacguccccc

SEQ ID NO: 231784 - RNA, 19 nt, Human
acccuggcucuggagguca

SEQ ID NO: 231785 - RNA, 20 nt, Human
acgaugguuguuauugagga

SEQ ID NO: 231786 - RNA, 19 nt, Human
agaaagguuagccuugguc

SEQ ID NO: 231787 - RNA, 20 nt, Human
agaacucuccucucacuuuc

SEQ ID NO: 231788 - RNA, 19 nt, Human
agaagagggaagggggaag

SEQ ID NO: 231789 - RNA, 20 nt, Human
agaauauaaccaacgucccc

SEQ ID NO: 231790 - RNA, 20 nt, Human
agagggaagggggaagaggc

SEQ ID NO: 231791 - RNA, 21 nt, Human
agagggaagggggaagaggcc

SEQ ID NO: 231792 - RNA, 21 nt, Human
agcuuaaagugacccuauagc

SEQ ID NO: 231793 - RNA, 22 nt, Human
aggagggaggaugcagagaacu

SEQ ID NO: 231794 - RNA, 21 nt, Human
aggcaaacagcuggggccaaa

SEQ ID NO: 231795 - RNA, 22 nt, Human
aggcccagaagauaugcagcag

SEQ ID NO: 231796 - RNA, 18 nt, Human
agggaagggggaagaggg

SEQ ID NO: 231797 - RNA, 19 nt, Human
caaaagcaguagaaaggau

SEQ ID NO: 231798 - RNA, 21 nt, Human
caacccuccgcucccggcccc

SEQ ID NO: 231799 - RNA, 19 nt, Human
cacagccgcguccacgccc

SEQ ID NO: 231800 - RNA, 19 nt, Human
caccagggugcaaugcagg

SEQ ID NO: 231801 - RNA, 18 nt, Human
cacccuccuccuacccuc

SEQ ID NO: 231802 - RNA, 18 nt, Human
cagaagauaugcagcagc

SEQ ID NO: 231803 - RNA, 20 nt, Human
cagaaugaggcccacagauu

SEQ ID NO: 231804 - RNA, 18 nt, Human
cagaccccaacccuccgc

SEQ ID NO: 231805 - RNA, 20 nt, Human
cagcccaagggccgggaggc

SEQ ID NO: 231806 - RNA, 20 nt, Human
caggauccagaagggcagga

SEQ ID NO: 231807 - RNA, 25 nt, Human
ccaacccuccgcucccggccccaca

SEQ ID NO: 231808 - RNA, 26 nt, Human
ccagaccccaacccuccgcucccggc

SEQ ID NO: 231809 - RNA, 23 nt, Human
ccauuaacaguacauuuuggucu

SEQ ID NO: 231810 - RNA, 20 nt, Human
cccacagccgcguccacgcc

SEQ ID NO: 231811 - RNA, 25 nt, Human
cccauuaacaguacauuuuggucua

SEQ ID NO: 231812 - RNA, 22 nt, Human
ccccaacccuccgcucccggcc

SEQ ID NO: 231813 - RNA, 28 nt, Human
ccccacagccgcguccacgcccgucacc

SEQ ID NO: 231814 - RNA, 20 nt, Human
ccccagagcuuaaagugacc

SEQ ID NO: 231815 - RNA, 19 nt, Human
cccccuaccuggggauagg

SEQ ID NO: 231816 - RNA, 22 nt, Human
ccccuucgccccggcgcgggag

SEQ ID NO: 231817 - RNA, 23 nt, Human
cccgagcccagccgggaaaaaaa

SEQ ID NO: 231818 - RNA, 22 nt, Human
cccgcccgccggcccgcgcccg

SEQ ID NO: 231819 - RNA, 18 nt, Human
cccgcccucgcccucccu

SEQ ID NO: 231820 - RNA, 19 nt, Human
cccgcgccucuccucccuc

SEQ ID NO: 231821 - RNA, 27 nt, Human
ccgcccgcccgccggcccgcgcccgcc

SEQ ID NO: 231822 - RNA, 21 nt, Human
ccgccggcgccgccgccgccg

SEQ ID NO: 231823 - RNA, 24 nt, Human
ccgccggcgccgccgccgccgccc

SEQ ID NO: 231824 - RNA, 25 nt, Human
ccgcgcccgcccucgcccucccucc

SEQ ID NO: 231825 - RNA, 19 nt, Human
ccucaaaagcaguagaaag

SEQ ID NO: 231826 - RNA, 21 nt, Human
ccuccuccuacccucaauucu

SEQ ID NO: 231827 - RNA, 21 nt, Human
ccucuccucccucuuccgccc

SEQ ID NO: 231828 - RNA, 24 nt, Human
ccuggcuccccgcgccucuccucc

SEQ ID NO: 231829 - RNA, 24 nt, Human
cgagcaguccccaguacagccccc

SEQ ID NO: 231830 - RNA, 22 nt, Human
cucacuuucuccuuuuucccca

SEQ ID NO: 231831 - RNA, 20 nt, Human
cucccccagcugcagccucc

SEQ ID NO: 231832 - RNA, 25 nt, Human
cuccucccucuuccgcccgcccgcc

SEQ ID NO: 231833 - RNA, 21 nt, Human
cucgcccucccuccuccgcca

SEQ ID NO: 231834 - RNA, 24 nt, Human
cucugagcucucuguuucuucccg

SEQ ID NO: 231835 - RNA, 23 nt, Human
cucugcgcugcggcugccccuuc

SEQ ID NO: 231836 - RNA, 21 nt, Human
cugagcucucuguuucuuccc

SEQ ID NO: 231837 - RNA, 21 nt, Human
cuggcuccccgcgccucuccu

SEQ ID NO: 231838 - RNA, 22 nt, Human
gacaauaaggcacaacccuggc

SEQ ID NO: 231839 - RNA, 22 nt, Human
gacgaugaagauguuguugcag

SEQ ID NO: 231840 - RNA, 22 nt, Human
gacgggaggggagggcggggcg

SEQ ID NO: 231841 - RNA, 22 nt, Human
gagcagcccaagggccgggagg

SEQ ID NO: 231842 - RNA, 18 nt, Human
gcaaugcaggauccagaa

SEQ ID NO: 231843 - RNA, 19 nt, Human
gccagagaaaggaggaggc

SEQ ID NO: 231844 - RNA, 19 nt, Human
gccagccgccggcgccgcc

SEQ ID NO: 231845 - RNA, 23 nt, Human
gccccgaggccuggcuccccgcg

SEQ ID NO: 231846 - RNA, 22 nt, Human
gccggcccgcgcccgcccucgc

SEQ ID NO: 231847 - RNA, 18 nt, Human
gcugcagccuccuccccc

SEQ ID NO: 231848 - RNA, 25 nt, Human
gcuuugguuucuggcccaaguuagg

SEQ ID NO: 231849 - RNA, 20 nt, Human
ggaagggggaagaggccaga

SEQ ID NO: 231850 - RNA, 19 nt, Human
ggccgggaggcugggcgug

SEQ ID NO: 231851 - RNA, 18 nt, Human
ggcggggccggggccgcu

SEQ ID NO: 231852 - RNA, 23 nt, Human
ggcugggcgugacgggaggggag

SEQ ID NO: 231853 - RNA, 19 nt, Human
gggccgggaggcugggcgu

SEQ ID NO: 231854 - RNA, 26 nt, Human
gggcgggccucugcgcugcggcugcc

SEQ ID NO: 231855 - RNA, 23 nt, Human
guaguuccuuggcuuuaugcauu

SEQ ID NO: 231856 - RNA, 18 nt, Human
guggccauuggcuagggg

SEQ ID NO: 231857 - RNA, 19 nt, Human
uaaccaacgucccccuacc

SEQ ID NO: 231858 - RNA, 19 nt, Human
uaccuggggauaggcuggu

SEQ ID NO: 231859 - RNA, 18 nt, Human
uagaaaggaugacuuggc

SEQ ID NO: 231860 - RNA, 19 nt, Human
uagaaaggaugacuuggcg

SEQ ID NO: 231861 - RNA, 18 nt, Human
uagcgcagggagcggggu

SEQ ID NO: 231862 - RNA, 22 nt, Human
ucaaaggcaaacagcuggggcc

SEQ ID NO: 231863 - RNA, 22 nt, Human
ucaauucauuugugucauagag

SEQ ID NO: 231864 - RNA, 20 nt, Human
ucccccagcugcagccuccu

SEQ ID NO: 231865 - RNA, 19 nt, Human
uccccgcgccucuccuccc

SEQ ID NO: 231866 - RNA, 23 nt, Human
uccgaggccccgaggccuggcuc

SEQ ID NO: 231867 - RNA, 24 nt, Human
ucucacuuucuccuuuuuccccag

SEQ ID NO: 231868 - RNA, 18 nt, Human
ucuccucucacuuucucc

SEQ ID NO: 231869 - RNA, 21 nt, Human
ucucuguuucuucccggucac

SEQ ID NO: 231870 - RNA, 23 nt, Human
ucugcgcugcggcugccccuucg

SEQ ID NO: 231871 - RNA, 24 nt, Human
ugaaaugcuaggugcuagccguaa

SEQ ID NO: 231872 - RNA, 18 nt, Human
ugaagagaagagggaagg

SEQ ID NO: 231873 - RNA, 19 nt, Human
ugagguaggcccagaagau

SEQ ID NO: 231874 - RNA, 25 nt, Human
ugagguaggcccagaagauaugcag

SEQ ID NO: 231875 - RNA, 21 nt, Human
ugcgcugcggcugccccuucg

SEQ ID NO: 231876 - RNA, 20 nt, Human
ugcuagccguaauucuggcu

SEQ ID NO: 231877 - RNA, 19 nt, Human
uggaguaaugguucaguca

SEQ ID NO: 231878 - RNA, 21 nt, Human
uggcagagguaggguaagggu

SEQ ID NO: 231879 - RNA, 20 nt, Human
uggcgaagacgaugaagaug

SEQ ID NO: 231880 - RNA, 22 nt, Human
ugggacaauaaggcacaacccu

SEQ ID NO: 231881 - RNA, 19 nt, Human
ugggugacaagcaaggagg

SEQ ID NO: 231882 - RNA, 22 nt, Human
ugugcacccuccuccuacccuc

SEQ ID NO: 231883 - RNA, 27 nt, Human
uuaaaaccaaaaccccaaauauuuaau

SEQ ID NO: 231884 - RNA, 24 nt, Human
uuaugugcacccuccuccuacccu

SEQ ID NO: 231885 - RNA, 21 nt, Human
uuccccagagcuuaaagugac

SEQ ID NO: 231886 - RNA, 18 nt, Human
uucuaccagcuuuccagu

SEQ ID NO: 231887 - RNA, 24 nt, Human
aagaaaaaauggauauaaacaaaa

SEQ ID NO: 231888 - RNA, 26 nt, Human
aaguaaucgacggacuaauuuaaaac

SEQ ID NO: 231889 - RNA, 20 nt, Human
aauacaaauguagaaaauaa

SEQ ID NO: 231890 - RNA, 24 nt, Human
agcccucggcuucccuauuggccu

SEQ ID NO: 231891 - RNA, 18 nt, Human
aggcagcgaguggugggg

SEQ ID NO: 231892 - RNA, 21 nt, Human
ccccgggcggcggcgguggcg

SEQ ID NO: 231893 - RNA, 22 nt, Human
ccgggccucucgcgccgggaga

SEQ ID NO: 231894 - RNA, 20 nt, Human
ccgggcggcggcgguggcgu

SEQ ID NO: 231895 - RNA, 20 nt, Human
cggcucccgggccucucgcg

SEQ ID NO: 231896 - RNA, 20 nt, Human
cuccgggacccugaccuggg

SEQ ID NO: 231897 - RNA, 24 nt, Human
gcggcggcgguggcguggacggcg

SEQ ID NO: 231898 - RNA, 18 nt, Human
ggagcugcugcuggcccc

SEQ ID NO: 231899 - RNA, 24 nt, Human
ggccccgcagggacgggggagccc

SEQ ID NO: 231900 - RNA, 27 nt, Human
gggcgcggucuacacccucggggggaa

SEQ ID NO: 231901 - RNA, 18 nt, Human
gggcggcggcgguggcgg

SEQ ID NO: 231902 - RNA, 26 nt, Human
gggggagccccgggcggcggcggugg

SEQ ID NO: 231903 - RNA, 19 nt, Human
gguccugaaaagccuauug

SEQ ID NO: 231904 - RNA, 18 nt, Human
gguggcguggacggcgac

SEQ ID NO: 231905 - RNA, 24 nt, Human
guuuucuuggugaagagcagaauu

SEQ ID NO: 231906 - RNA, 18 nt, Human
uaaaacaaaacagcccuc

SEQ ID NO: 231907 - RNA, 24 nt, Human
uagagaaccuaaaauuuuccaaag

SEQ ID NO: 231908 - RNA, 27 nt, Human
uagagaaccuaaaauuuuccaaagucu

SEQ ID NO: 231909 - RNA, 20 nt, Human
uauaaacaaaauaagugcuc

SEQ ID NO: 231910 - RNA, 23 nt, Human
uauagagaaccuaaaauuuucca

SEQ ID NO: 231911 - RNA, 21 nt, Human
uauuuaaaaaaaaaaacuguc

SEQ ID NO: 231912 - RNA, 25 nt, Human
ucccgggccucucgcgccgggagga

SEQ ID NO: 231913 - RNA, 26 nt, Human
uccugaaaagccuauugaccauuggg

SEQ ID NO: 231914 - RNA, 18 nt, Human
ugaaaagccuauugaaag

SEQ ID NO: 231915 - RNA, 18 nt, Human
ugaagagcagaauuucaa

SEQ ID NO: 231916 - RNA, 23 nt, Human
ugaagauuaucacucucuccagg

SEQ ID NO: 231917 - RNA, 18 nt, Human
ugaccugggaggcagcga

SEQ ID NO: 231918 - RNA, 21 nt, Human
ugagggcaccggcuccgggac

SEQ ID NO: 231919 - RNA, 22 nt, Human
ugauuugucaaaguuaaucccu

SEQ ID NO: 231920 - RNA, 23 nt, Human
uggagcugcugcuggccccgcag

SEQ ID NO: 231921 - RNA, 22 nt, Human
uggcuggagcugcugcuggccc

SEQ ID NO: 231922 - RNA, 23 nt, Human
ugugagggcaccggcuccgggac

SEQ ID NO: 231923 - RNA, 22 nt, Human
uugaaagcgaugcugaguccug

SEQ ID NO: 231924 - RNA, 23 nt, Human
uuuucaaaaguguccuguuuggg

SEQ ID NO: 231925 - RNA, 27 nt, Human
uuuugaaaauguucuuuccuuccauuu

SEQ ID NO: 231926 - RNA, 18 nt, Human
uuuuuuuuuuuuuuuucg

SEQ ID NO: 231927 - RNA, 21 nt, Human
uuuuuuuuuuuuuuuuucguu

SEQ ID NO: 231928 - RNA, 22 nt, Human
aaaaaauacaguauaaacugca

SEQ ID NO: 231929 - RNA, 21 nt, Human
aaaagaaaaaaaaaaguacag

SEQ ID NO: 231930 - RNA, 23 nt, Human
aaacacggcuauauuaaaagauc

SEQ ID NO: 231931 - RNA, 21 nt, Human
aaacaugucaaaaacaaacuu

SEQ ID NO: 231932 - RNA, 23 nt, Human
aaauaaacaugucaaaaacaaac

SEQ ID NO: 231933 - RNA, 19 nt, Human
aagcaaaauaaaaaaacug

SEQ ID NO: 231934 - RNA, 21 nt, Human
acaaugacaauuucacuaaaa

SEQ ID NO: 231935 - RNA, 19 nt, Human
acaccgcggagcguggaac

SEQ ID NO: 231936 - RNA, 21 nt, Human
acauucaaaauacuguacaaa

SEQ ID NO: 231937 - RNA, 23 nt, Human
accauauauuacaaaaaacuaag

SEQ ID NO: 231938 - RNA, 21 nt, Human
acccugucagugcaacaaaag

SEQ ID NO: 231939 - RNA, 21 nt, Human
accgaaacacaacuugaccug

SEQ ID NO: 231940 - RNA, 18 nt, Human
agaaaagcaaaauaaaaa

SEQ ID NO: 231941 - RNA, 18 nt, Human
agaaaagccagaagagca

SEQ ID NO: 231942 - RNA, 23 nt, Human
agaaaccauaaacaucaauagca

SEQ ID NO: 231943 - RNA, 24 nt, Human
agaugcaguagaaaauccccaaca

SEQ ID NO: 231944 - RNA, 21 nt, Human
aucacuuuucacuuucagcau

SEQ ID NO: 231945 - RNA, 22 nt, Human
augaacuuuuaaaaagucaaaa

SEQ ID NO: 231946 - RNA, 24 nt, Human
auguacuuuaaauggaacaguguu

SEQ ID NO: 231947 - RNA, 24 nt, Human
caaaaaaacaucaaaauuugaaaa

SEQ ID NO: 231948 - RNA, 20 nt, Human
caaaaaaaucugaagucacc

SEQ ID NO: 231949 - RNA, 26 nt, Human
caaaaagaaaaaaaaaaguacagacc

SEQ ID NO: 231950 - RNA, 18 nt, Human
cacacuauguuuauuaca

SEQ ID NO: 231951 - RNA, 21 nt, Human
cagaaaacgccaccacuuucu

SEQ ID NO: 231952 - RNA, 24 nt, Human
cagaaaccauaaacaucaauagca

SEQ ID NO: 231953 - RNA, 21 nt, Human
caguuguuuuuaagacagcac

SEQ ID NO: 231954 - RNA, 24 nt, Human
cauaaaaaauacaguauaaacugc

SEQ ID NO: 231955 - RNA, 22 nt, Human
cauuuuauuuucaacuuaaaac

SEQ ID NO: 231956 - RNA, 25 nt, Human
ccccaacaccgcggagcguggaaca

SEQ ID NO: 231957 - RNA, 24 nt, Human
ccugacucaaaaagaaaaaaaaaa

SEQ ID NO: 231958 - RNA, 22 nt, Human
ccugcaauugagguagcaaagc

SEQ ID NO: 231959 - RNA, 22 nt, Human
cgaaacacaacuugaccugcaa

SEQ ID NO: 231960 - RNA, 23 nt, Human
cgaaacacaacuugaccugcaac

SEQ ID NO: 231961 - RNA, 25 nt, Human
cgaaacacaacuugaccugcaaccu

SEQ ID NO: 231962 - RNA, 20 nt, Human
cuagaauuuaauugcuaaag

SEQ ID NO: 231963 - RNA, 20 nt, Human
cucaaaaagaaaaaaaaaag

SEQ ID NO: 231964 - RNA, 25 nt, Human
cuucaugacugcauuaacauaagcu

SEQ ID NO: 231965 - RNA, 23 nt, Human
cuucuauacaauagugaaugaau

SEQ ID NO: 231966 - RNA, 25 nt, Human
gaaaagccaacuggcaaaaaaacau

SEQ ID NO: 231967 - RNA, 21 nt, Human
gaaaauccccaacaccgcgga

SEQ ID NO: 231968 - RNA, 26 nt, Human
gggcucuuuucauuaccagggaaaga

SEQ ID NO: 231969 - RNA, 20 nt, Human
guagaaaagccagaagagca

SEQ ID NO: 231970 - RNA, 23 nt, Human
guugcuacauuuuauuuucaacu

SEQ ID NO: 231971 - RNA, 25 nt, Human
uaaaaaaacugcuugcacacauuag

SEQ ID NO: 231972 - RNA, 24 nt, Human
uaaaaagucaaaaauauauaaaaa

SEQ ID NO: 231973 - RNA, 21 nt, Human
uaaaagaaacgacuuuaaccc

SEQ ID NO: 231974 - RNA, 23 nt, Human
uaaacuaaaagaaacgacuuuaa

SEQ ID NO: 231975 - RNA, 24 nt, Human
uaaauauaaaggauacauaaaaaa

SEQ ID NO: 231976 - RNA, 18 nt, Human
uaacagcaucuucuauac

SEQ ID NO: 231977 - RNA, 19 nt, Human
uaagaaaagccaacuggca

SEQ ID NO: 231978 - RNA, 20 nt, Human
uaagcuaaguuacauacacu

SEQ ID NO: 231979 - RNA, 23 nt, Human
uaauucacauuacuuuacaaaau

SEQ ID NO: 231980 - RNA, 22 nt, Human
uacaaaaaaaucugaagucacc

SEQ ID NO: 231981 - RNA, 18 nt, Human
uagaaaauccccaacacc

SEQ ID NO: 231982 - RNA, 20 nt, Human
uagaaaauccccaacaccgc

SEQ ID NO: 231983 - RNA, 18 nt, Human
uagcugauauccagaaau

SEQ ID NO: 231984 - RNA, 22 nt, Human
uauuuuguagaaaagccagaag

SEQ ID NO: 231985 - RNA, 26 nt, Human
uauuuuguagaaaagccagaagagca

SEQ ID NO: 231986 - RNA, 22 nt, Human
uccuuuaagcagugucugcuaa

SEQ ID NO: 231987 - RNA, 23 nt, Human
ucuccuuuaagcagugucugcua

SEQ ID NO: 231988 - RNA, 24 nt, Human
ugagguuaagccaacugcuacaaa

SEQ ID NO: 231989 - RNA, 21 nt, Human
ugccaaauaaacaugucaaaa

SEQ ID NO: 231990 - RNA, 20 nt, Human
uguagaaaagccagaagagc

SEQ ID NO: 231991 - RNA, 18 nt, Human
uguuuauuacauuccccu

SEQ ID NO: 231992 - RNA, 24 nt, Human
uuaaaacccaaacauacacacuau

SEQ ID NO: 231993 - RNA, 23 nt, Human
uuaauugaaccccaaaaugcuga

SEQ ID NO: 231994 - RNA, 20 nt, Human
uuagugaauuugcuacuguu

SEQ ID NO: 231995 - RNA, 24 nt, Human
uuccuccccaaaagcuuccuuggu

SEQ ID NO: 231996 - RNA, 26 nt, Human
uuccuccccaaaagcuuccuuggugc

SEQ ID NO: 231997 - RNA, 18 nt, Human
uugaaccccaaaaugcug

SEQ ID NO: 231998 - RNA, 25 nt, Human
uuuguuaaaaagacaguuaguccug

SEQ ID NO: 231999 - RNA, 18 nt, Human
uuuucagauuaaggguug

SEQ ID NO: 232000 - RNA, 21 nt, Human
uuuuguagaaaagccagaaga

SEQ ID NO: 232001 - RNA, 18 nt, Human
agaggcggcugccaggag

SEQ ID NO: 232002 - RNA, 21 nt, Human
agagggaagaggcggcugcca

SEQ ID NO: 232003 - RNA, 19 nt, Human
aggaggcgggaguggcaga

SEQ ID NO: 232004 - RNA, 22 nt, Human
agggaagaggcggcugccagga

SEQ ID NO: 232005 - RNA, 19 nt, Human
cagcggcggguggaaggag

SEQ ID NO: 232006 - RNA, 19 nt, Human
cagcggcggguggaaggag

SEQ ID NO: 232007 - RNA, 18 nt, Human
cccucggcgguccggucc

SEQ ID NO: 232008 - RNA, 18 nt, Human
cgagagggaagaggcggc

SEQ ID NO: 232009 - RNA, 19 nt, Human
cgagggcuuccggggcggc

SEQ ID NO: 232010 - RNA, 19 nt, Human
cggacggcgcgggccaggc

SEQ ID NO: 232011 - RNA, 24 nt, Human
cggcccggccggccagccuggguu

SEQ ID NO: 232012 - RNA, 19 nt, Human
cggcgcgggccaggcagcg

SEQ ID NO: 232013 - RNA, 21 nt, Human
cggguggaaggaggccgcacu

SEQ ID NO: 232014 - RNA, 22 nt, Human
gacaggggaggaggcgggagug

SEQ ID NO: 232015 - RNA, 23 nt, Human
gagccgaguccggggacagggga

SEQ ID NO: 232016 - RNA, 19 nt, Human
gaggcgggaguggcagagg

SEQ ID NO: 232017 - RNA, 20 nt, Human
gaguggcagaggagguccca

SEQ ID NO: 232018 - RNA, 20 nt, Human
gcccagggcggcggaagacc

SEQ ID NO: 232019 - RNA, 21 nt, Human
gcccagggcggcggaagaccc

SEQ ID NO: 232020 - RNA, 24 nt, Human
gcggcucgggcgcggggaccagcc

SEQ ID NO: 232021 - RNA, 20 nt, Human
gcugguggcggccggcccgg

SEQ ID NO: 232022 - RNA, 21 nt, Human
ggagcccagggcggcggaaga

SEQ ID NO: 232023 - RNA, 18 nt, Human
ggccggccagccuggguu

SEQ ID NO: 232024 - RNA, 19 nt, Human
ggcgcgggccaggcagcgg

SEQ ID NO: 232025 - RNA, 22 nt, Human
ggcggaggccgcugguggcggc

SEQ ID NO: 232026 - RNA, 20 nt, Human
guggcggccggcccggccgg

SEQ ID NO: 232027 - RNA, 22 nt, Human
uggaaggaggccgcacugggca

SEQ ID NO: 232028 - RNA, 18 nt, Human
uggcagaggaggucccag

SEQ ID NO: 232029 - RNA, 21 nt, Human
uuuuuuuuuuuggggagaacc

SEQ ID NO: 232030 - RNA, 23 nt, Human
aggagagggggcgcagggcaggg

SEQ ID NO: 232031 - RNA, 23 nt, Human
aggagagggggcgcagggcaggg

SEQ ID NO: 232032 - RNA, 23 nt, Human
aggagccaagguguccccugccc

SEQ ID NO: 232033 - RNA, 22 nt, Human
aggcggggggugguaggaaggg

SEQ ID NO: 232034 - RNA, 22 nt, Human
aggcggggggugguaggaaggg

SEQ ID NO: 232035 - RNA, 23 nt, Human
agggcagggggaaggcggggggu

SEQ ID NO: 232036 - RNA, 23 nt, Human
agggcagggggaaggcggggggu

SEQ ID NO: 232037 - RNA, 21 nt, Human
cagccgcguucugcaggggug

SEQ ID NO: 232038 - RNA, 21 nt, Human
cagccgcguucugcaggggug

SEQ ID NO: 232039 - RNA, 20 nt, Human
cagggcagggggaaggcggg

SEQ ID NO: 232040 - RNA, 20 nt, Human
cagggcagggggaaggcggg

SEQ ID NO: 232041 - RNA, 21 nt, Human
cuccggagucugaguccacgg

SEQ ID NO: 232042 - RNA, 18 nt, Human
cuggauggugccguccuu

SEQ ID NO: 232043 - RNA, 18 nt, Human
cuggauggugccguccuu

SEQ ID NO: 232044 - RNA, 18 nt, Human
gcgcagggcagggggaag

SEQ ID NO: 232045 - RNA, 18 nt, Human
gcgcagggcagggggaag

SEQ ID NO: 232046 - RNA, 21 nt, Human
gcggggggugguaggaagggg

SEQ ID NO: 232047 - RNA, 21 nt, Human
gcggggggugguaggaagggg

SEQ ID NO: 232048 - RNA, 19 nt, Human
ggggaaggcgggggguggu

SEQ ID NO: 232049 - RNA, 19 nt, Human
ggggaaggcgggggguggu

SEQ ID NO: 232050 - RNA, 22 nt, Human
guccuuggcugcugaggagcca

SEQ ID NO: 232051 - RNA, 19 nt, Human
guccuugggcugcugagga

SEQ ID NO: 232052 - RNA, 20 nt, Human
ucugcagggguggggagcuu

SEQ ID NO: 232053 - RNA, 20 nt, Human
ucugcagggguggggagcuu

SEQ ID NO: 232054 - RNA, 20 nt, Human
ucuuuauggagaaccaggag

SEQ ID NO: 232055 - RNA, 20 nt, Human
ucuuuauggagaaccaggag

SEQ ID NO: 232056 - RNA, 18 nt, Human
ugaggagccaaggugucc

SEQ ID NO: 232057 - RNA, 19 nt, Human
ugguaggaaggggugcaga

SEQ ID NO: 232058 - RNA, 19 nt, Human
ugguaggaaggggugcaga

SEQ ID NO: 232059 - RNA, 21 nt, Human
ugguaggaaggggugcagcca

SEQ ID NO: 232060 - RNA, 21 nt, Human
ugguaggaaggggugcagcca

SEQ ID NO: 232061 - RNA, 20 nt, Human
uucugcagggguggggagcu

SEQ ID NO: 232062 - RNA, 20 nt, Human
uucugcagggguggggagcu

SEQ ID NO: 232063 - RNA, 18 nt, Human
aaaccaaccaauuuguau

SEQ ID NO: 232064 - RNA, 18 nt, Human
aaaccuauauauaggagg

SEQ ID NO: 232065 - RNA, 23 nt, Human
aaagucaugggaggcaggguagg

SEQ ID NO: 232066 - RNA, 21 nt, Human
aaccaaccaauuuguauucag

SEQ ID NO: 232067 - RNA, 22 nt, Human
aagcaaauaaaucaagaauaga

SEQ ID NO: 232068 - RNA, 18 nt, Human
aagcgagaaggguaccug

SEQ ID NO: 232069 - RNA, 19 nt, Human
aaguggcccagagacaagg

SEQ ID NO: 232070 - RNA, 27 nt, Human
aaucaucugaggcuacaguaaguucaa

SEQ ID NO: 232071 - RNA, 26 nt, Human
aaugacaaaucaucagccaggaaaga

SEQ ID NO: 232072 - RNA, 22 nt, Human
acagaaagaggggcuugcaaca

SEQ ID NO: 232073 - RNA, 23 nt, Human
acaggagaggcuacuuggcugca

SEQ ID NO: 232074 - RNA, 20 nt, Human
accaauuuguauucagaagc

SEQ ID NO: 232075 - RNA, 18 nt, Human
accaccacuaaagaagau

SEQ ID NO: 232076 - RNA, 24 nt, Human
accuaugagaccugcucaaauuca

SEQ ID NO: 232077 - RNA, 22 nt, Human
accucauugauggagcuuuuca

SEQ ID NO: 232078 - RNA, 22 nt, Human
acuccaaguggcccagagacaa

SEQ ID NO: 232079 - RNA, 19 nt, Human
agacaaggaccgccagaag

SEQ ID NO: 232080 - RNA, 24 nt, Human
agacuccugagacuucaacagcuu

SEQ ID NO: 232081 - RNA, 24 nt, Human
agagacaaggaccgccagaagaga

SEQ ID NO: 232082 - RNA, 21 nt, Human
aggaaaggcucugaugaugag

SEQ ID NO: 232083 - RNA, 20 nt, Human
aggaagaggggacagaaaga

SEQ ID NO: 232084 - RNA, 26 nt, Human
aggcaggaagugacuagaagggaccc

SEQ ID NO: 232085 - RNA, 18 nt, Human
aggcaggguaggaagagg

SEQ ID NO: 232086 - RNA, 21 nt, Human
agggcaggugugauguuuccc

SEQ ID NO: 232087 - RNA, 19 nt, Human
aggggacagaaagaggggc

SEQ ID NO: 232088 - RNA, 24 nt, Human
agguaacagaucuugcaggaaaaa

SEQ ID NO: 232089 - RNA, 20 nt, Human
agucaugggaggcaggguag

SEQ ID NO: 232090 - RNA, 21 nt, Human
augaggcuuacuucugcaggc

SEQ ID NO: 232091 - RNA, 19 nt, Human
auggccugacaacaaucag

SEQ ID NO: 232092 - RNA, 22 nt, Human
caaaaauacugguuaugggcug

SEQ ID NO: 232093 - RNA, 26 nt, Human
caaucugaagucaaaaccaaccaauu

SEQ ID NO: 232094 - RNA, 20 nt, Human
caccgccucccacccagccc

SEQ ID NO: 232095 - RNA, 23 nt, Human
cacugccaaggaacagauccaga

SEQ ID NO: 232096 - RNA, 24 nt, Human
cagaagcagcaaaaauacugguuu

SEQ ID NO: 232097 - RNA, 23 nt, Human
caggaaccccuucuuucugaucu

SEQ ID NO: 232098 - RNA, 23 nt, Human
caucugugccgggcagucaggag

SEQ ID NO: 232099 - RNA, 20 nt, Human
cauugguucacaauggccug

SEQ ID NO: 232100 - RNA, 19 nt, Human
ccacccagccccauuggcc

SEQ ID NO: 232101 - RNA, 22 nt, Human
ccacugcagcuucuauccuugg

SEQ ID NO: 232102 - RNA, 18 nt, Human
cccccggaaggcaugguu

SEQ ID NO: 232103 - RNA, 20 nt, Human
cccuggaguuuagggguggc

SEQ ID NO: 232104 - RNA, 18 nt, Human
ccgccucccacccagccc

SEQ ID NO: 232105 - RNA, 22 nt, Human
ccucccacccagccccauuggc

SEQ ID NO: 232106 - RNA, 22 nt, Human
ccuggcccucaucuugaacaaa

SEQ ID NO: 232107 - RNA, 19 nt, Human
ccugggaggcggagggggg

SEQ ID NO: 232108 - RNA, 18 nt, Human
cgccagaagagaugggcc

SEQ ID NO: 232109 - RNA, 18 nt, Human
cuaaagaagauaccucau

SEQ ID NO: 232110 - RNA, 22 nt, Human
cugccaaggaacagauccagag

SEQ ID NO: 232111 - RNA, 26 nt, Human
cuuucugaguccacugccaaggaaca

SEQ ID NO: 232112 - RNA, 22 nt, Human
cuuucuuccugggaggcggagg

SEQ ID NO: 232113 - RNA, 20 nt, Human
gagcaaagucaugggaggca

SEQ ID NO: 232114 - RNA, 20 nt, Human
gaggaaaggcucugaugaug

SEQ ID NO: 232115 - RNA, 19 nt, Human
gaggagcaaagucauggga

SEQ ID NO: 232116 - RNA, 18 nt, Human
gaggggacagaaagaggg

SEQ ID NO: 232117 - RNA, 19 nt, Human
gaugacauuugggacucca

SEQ ID NO: 232118 - RNA, 20 nt, Human
gaugaggcuuacuucugcag

SEQ ID NO: 232119 - RNA, 19 nt, Human
gauguuuccccuccuggcc

SEQ ID NO: 232120 - RNA, 24 nt, Human
gccacauguuggcuuucugagucc

SEQ ID NO: 232121 - RNA, 26 nt, Human
gcccccccggaaggcaugguuccaaa

SEQ ID NO: 232122 - RNA, 18 nt, Human
gcugaaggcucuagaggg

SEQ ID NO: 232123 - RNA, 23 nt, Human
ggagcaaagucaugggaggcagg

SEQ ID NO: 232124 - RNA, 22 nt, Human
ggaggagccacauguuggcuuu

SEQ ID NO: 232125 - RNA, 19 nt, Human
ggcugggaggagccacaug

SEQ ID NO: 232126 - RNA, 19 nt, Human
ggugcuauugauuggcaca

SEQ ID NO: 232127 - RNA, 19 nt, Human
guuuagggggaaauugcuc

SEQ ID NO: 232128 - RNA, 22 nt, Human
uaaguucaaucugaagucaaaa

SEQ ID NO: 232129 - RNA, 18 nt, Human
uacaggagaggcuacuug

SEQ ID NO: 232130 - RNA, 23 nt, Human
uaccaaaaaaguaaacauugaua

SEQ ID NO: 232131 - RNA, 20 nt, Human
uaccacaguaacuagaucuu

SEQ ID NO: 232132 - RNA, 21 nt, Human
uaccuggaaaauaacuucuuu

SEQ ID NO: 232133 - RNA, 21 nt, Human
uacuguucugguuuugcuuug

SEQ ID NO: 232134 - RNA, 20 nt, Human
uagagugucaccaaguugaa

SEQ ID NO: 232135 - RNA, 19 nt, Human
uagguguguguguauguga

SEQ ID NO: 232136 - RNA, 19 nt, Human
ucacaaggcaggaagugac

SEQ ID NO: 232137 - RNA, 21 nt, Human
ucuugcaggaaaaaagcuguc

SEQ ID NO: 232138 - RNA, 23 nt, Human
ucuuucuuuuccucuagauuuuc

SEQ ID NO: 232139 - RNA, 20 nt, Human
ugaagucaaaaccaaccaau

SEQ ID NO: 232140 - RNA, 19 nt, Human
ugacaaaucaucagccagg

SEQ ID NO: 232141 - RNA, 23 nt, Human
ugacagguauuagccauaccaca

SEQ ID NO: 232142 - RNA, 20 nt, Human
ugaccaggaaccccuucuuu

SEQ ID NO: 232143 - RNA, 23 nt, Human
ugacuagaaugacaaaucaucag

SEQ ID NO: 232144 - RNA, 22 nt, Human
ugaugacauuugggacuccagu

SEQ ID NO: 232145 - RNA, 19 nt, Human
ugauggagcuuuucaccau

SEQ ID NO: 232146 - RNA, 22 nt, Human
ugcaacagaucaaaugcugacc

SEQ ID NO: 232147 - RNA, 19 nt, Human
ugcaccgccucccacccag

SEQ ID NO: 232148 - RNA, 22 nt, Human
ugcaccgccucccacccagccc

SEQ ID NO: 232149 - RNA, 21 nt, Human
ugccaaggaacagauccagag

SEQ ID NO: 232150 - RNA, 21 nt, Human
ugccuggagaggcagaacccu

SEQ ID NO: 232151 - RNA, 22 nt, Human
uggcccagagacaaggaccgcc

SEQ ID NO: 232152 - RNA, 22 nt, Human
uggccuguugcuuuuuagccuu

SEQ ID NO: 232153 - RNA, 21 nt, Human
ugggaggagccacauguuggc

SEQ ID NO: 232154 - RNA, 24 nt, Human
ugggaggagccacauguuggcuuu

SEQ ID NO: 232155 - RNA, 18 nt, Human
ugggaggcaggguaggaa

SEQ ID NO: 232156 - RNA, 22 nt, Human
ugggaggcaggguaggaagagg

SEQ ID NO: 232157 - RNA, 23 nt, Human
ugggaggcggaggggggaaauca

SEQ ID NO: 232158 - RNA, 23 nt, Human
uggguguguggucacaaggcagg

SEQ ID NO: 232159 - RNA, 23 nt, Human
uguaugugaguaggggugcuauu

SEQ ID NO: 232160 - RNA, 19 nt, Human
uuaguuauagcuccaugcc

SEQ ID NO: 232161 - RNA, 21 nt, Human
uuccugggaggcggagggggg

SEQ ID NO: 232162 - RNA, 19 nt, Human
uugauggagcuuuucacca

SEQ ID NO: 232163 - RNA, 21 nt, Human
uugauuccgauuccauuacac

SEQ ID NO: 232164 - RNA, 27 nt, Human
acccuguggaacaccccuguuggaggg

SEQ ID NO: 232165 - RNA, 26 nt, Human
agagaagcucaaauccagagcucgga

SEQ ID NO: 232166 - RNA, 22 nt, Human
aggcaggaggacgguucauuug

SEQ ID NO: 232167 - RNA, 28 nt, Human
cacccaugggcagagaagcucaaaucca

SEQ ID NO: 232168 - RNA, 22 nt, Human
ccagaaagcaacggcuuccucu

SEQ ID NO: 232169 - RNA, 19 nt, Human
ccucugcgaacaaauaugg

SEQ ID NO: 232170 - RNA, 21 nt, Human
cgggaagaagcucacaagcug

SEQ ID NO: 232171 - RNA, 21 nt, Human
gaacaccccuguuggagccga

SEQ ID NO: 232172 - RNA, 22 nt, Human
guucauggggagggguucaguu

SEQ ID NO: 232173 - RNA, 21 nt, Human
uacccuguggaacaccccugu

SEQ ID NO: 232174 - RNA, 22 nt, Human
uacccuguggaacaccccuguu

SEQ ID NO: 232175 - RNA, 18 nt, Human
ucaaauccagagcucgga

SEQ ID NO: 232176 - RNA, 21 nt, Human
ucacaagcugagcaugggcgc

SEQ ID NO: 232177 - RNA, 19 nt, Human
ugagcaugggcgcuucacc

SEQ ID NO: 232178 - RNA, 25 nt, Human
ugccguagccagaucccagaaagca

SEQ ID NO: 232179 - RNA, 23 nt, Human
uguccauugaccaaggcugauug

SEQ ID NO: 232180 - RNA, 19 nt, Human
uguuuguccauugaccaag

SEQ ID NO: 232181 - RNA, 23 nt, Human
uuucugccguagccagaucccag

SEQ ID NO: 232182 - RNA, 26 nt, Human
aaacuuaaaacagcccuguuaaguuc

SEQ ID NO: 232183 - RNA, 28 nt, Human
aaucauucaagauuaaagucaucucuaa

SEQ ID NO: 232184 - RNA, 23 nt, Human
cacagacccacuagaccaguauc

SEQ ID NO: 232185 - RNA, 21 nt, Human
cagcagagucuaagacccuaa

SEQ ID NO: 232186 - RNA, 22 nt, Human
cucccuuaacaacccuuaacaa

SEQ ID NO: 232187 - RNA, 28 nt, Human
cuucucaaaugcccaaaugaacucugag

SEQ ID NO: 232188 - RNA, 18 nt, Human
gaguugauuucuucuuau

SEQ ID NO: 232189 - RNA, 21 nt, Human
gcaauggaguugauuucuucu

SEQ ID NO: 232190 - RNA, 21 nt, Human
gggcaggagaugauauugcag

SEQ ID NO: 232191 - RNA, 19 nt, Human
uaagugguucacagaccca

SEQ ID NO: 232192 - RNA, 24 nt, Human
uaaguucaauuaagugguucacag

SEQ ID NO: 232193 - RNA, 24 nt, Human
uagggagagcuugcagaagggcag

SEQ ID NO: 232194 - RNA, 22 nt, Human
ucagcaagucgaaaucauucaa

SEQ ID NO: 232195 - RNA, 23 nt, Human
ucccuuaacaacccuuaacaacu

SEQ ID NO: 232196 - RNA, 27 nt, Human
ucuggaaaacacaagaugugaagcuag

SEQ ID NO: 232197 - RNA, 22 nt, Human
ugcaauggaguugauuucuucu

SEQ ID NO: 232198 - RNA, 22 nt, Human
ugguucacagacccacuagacc

SEQ ID NO: 232199 - RNA, 23 nt, Human
uuuuugcucccuuaacaacccuu

SEQ ID NO: 232200 - RNA, 19 nt, Human
aaaaaacuuggagcuggga

SEQ ID NO: 232201 - RNA, 20 nt, Human
aaaaaacuuggagcugggau

SEQ ID NO: 232202 - RNA, 20 nt, Human
aaccugggagaacugagggg

SEQ ID NO: 232203 - RNA, 24 nt, Human
aaguggcagcagggaggaggggcc

SEQ ID NO: 232204 - RNA, 22 nt, Human
acucaaacacacacgcagcgcc

SEQ ID NO: 232205 - RNA, 21 nt, Human
acuuugaggaacaaccuggga

SEQ ID NO: 232206 - RNA, 23 nt, Human
agaggccaggcccagcccagggc

SEQ ID NO: 232207 - RNA, 23 nt, Human
agcagggaggaggggcccagagc

SEQ ID NO: 232208 - RNA, 20 nt, Human
aggcagagcacuggguggcc

SEQ ID NO: 232209 - RNA, 21 nt, Human
aggggggaaaggcguugccgu

SEQ ID NO: 232210 - RNA, 24 nt, Human
agggguggggcagguaggcagagc

SEQ ID NO: 232211 - RNA, 23 nt, Human
augaguacccccucccccuaaaa

SEQ ID NO: 232212 - RNA, 22 nt, Human
caacgaagccccguaacuuuaa

SEQ ID NO: 232213 - RNA, 19 nt, Human
caagcccagaggaguccug

SEQ ID NO: 232214 - RNA, 25 nt, Human
cacucacucacacucgcacacucaa

SEQ ID NO: 232215 - RNA, 22 nt, Human
cacugggccgggggccgggggc

SEQ ID NO: 232216 - RNA, 23 nt, Human
cacugggggggcaaaucuuggca

SEQ ID NO: 232217 - RNA, 18 nt, Human
cagccucggcccgccccg

SEQ ID NO: 232218 - RNA, 19 nt, Human
caggagaggcaggacccgg

SEQ ID NO: 232219 - RNA, 21 nt, Human
caggagaggcaggacccggca

SEQ ID NO: 232220 - RNA, 24 nt, Human
cccccuaaaaggcucuguagaggc

SEQ ID NO: 232221 - RNA, 21 nt, Human
ccccguaacuuuaagucccua

SEQ ID NO: 232222 - RNA, 19 nt, Human
cccgcccgcccuccccagg

SEQ ID NO: 232223 - RNA, 19 nt, Human
cccucuauuaccagcugcc

SEQ ID NO: 232224 - RNA, 21 nt, Human
cccugaagcggguggauggag

SEQ ID NO: 232225 - RNA, 21 nt, Human
cccuggggcugugaggggugg

SEQ ID NO: 232226 - RNA, 23 nt, Human
ccgcacaaagacucgcacgcaca

SEQ ID NO: 232227 - RNA, 21 nt, Human
ccgccgccgccucuugcugcc

SEQ ID NO: 232228 - RNA, 22 nt, Human
ccgccgccgccucuugcugccu

SEQ ID NO: 232229 - RNA, 26 nt, Human
ccggcacucacacucacucacacucg

SEQ ID NO: 232230 - RNA, 19 nt, Human
ccuccgagcagcccgcccg

SEQ ID NO: 232231 - RNA, 25 nt, Human
ccucuugcugccucugccuccgagc

SEQ ID NO: 232232 - RNA, 20 nt, Human
ccuggggggcggggggccgc

SEQ ID NO: 232233 - RNA, 21 nt, Human
ccuucucggcucuccccgccg

SEQ ID NO: 232234 - RNA, 20 nt, Human
cgcacgcacagccucggccc

SEQ ID NO: 232235 - RNA, 24 nt, Human
cgccggccgcacaaagacucgcac

SEQ ID NO: 232236 - RNA, 20 nt, Human
cggcucuccccgccgccgcc

SEQ ID NO: 232237 - RNA, 18 nt, Human
cuccccaggccaccgggc

SEQ ID NO: 232238 - RNA, 21 nt, Human
cucccccuaaaaggcucugua

SEQ ID NO: 232239 - RNA, 24 nt, Human
cuccgagcagcccgcccgcccucc

SEQ ID NO: 232240 - RNA, 20 nt, Human
cuguagaggccaggcccagc

SEQ ID NO: 232241 - RNA, 19 nt, Human
cugucuucugcucccuggg

SEQ ID NO: 232242 - RNA, 26 nt, Human
cuucucggcucuccccgccgccgccu

SEQ ID NO: 232243 - RNA, 25 nt, Human
gacccggcacucacacucacucaca

SEQ ID NO: 232244 - RNA, 19 nt, Human
gagcagcccgcccgcccuc

SEQ ID NO: 232245 - RNA, 19 nt, Human
gcaagguuucccucaacaa

SEQ ID NO: 232246 - RNA, 19 nt, Human
gcagcagggaggaggggcc

SEQ ID NO: 232247 - RNA, 21 nt, Human
gcccgcccuccccaggccacc

SEQ ID NO: 232248 - RNA, 19 nt, Human
gcccuccccaggccaccgg

SEQ ID NO: 232249 - RNA, 19 nt, Human
gcccugggggguggucagg

SEQ ID NO: 232250 - RNA, 21 nt, Human
ggagcgacugcaagcccagag

SEQ ID NO: 232251 - RNA, 19 nt, Human
ggaggaggggcccagagcu

SEQ ID NO: 232252 - RNA, 22 nt, Human
ggauaaguggcagcagggagga

SEQ ID NO: 232253 - RNA, 18 nt, Human
ggauggaaggggggaaag

SEQ ID NO: 232254 - RNA, 23 nt, Human
ggcaggacccggcacucacacuc

SEQ ID NO: 232255 - RNA, 20 nt, Human
ggcccagagcuuuaccccuc

SEQ ID NO: 232256 - RNA, 19 nt, Human
ggccuggggggcggggggc

SEQ ID NO: 232257 - RNA, 19 nt, Human
gggaggaggggcccagagc

SEQ ID NO: 232258 - RNA, 19 nt, Human
gggauggaaggggggaaag

SEQ ID NO: 232259 - RNA, 20 nt, Human
ggggggaaaggcguugccgu

SEQ ID NO: 232260 - RNA, 18 nt, Human
guauagacaaccccaggc

SEQ ID NO: 232261 - RNA, 20 nt, Human
ucacacucacucacacucgc

SEQ ID NO: 232262 - RNA, 22 nt, Human
ucagcagcucaugucccgagug

SEQ ID NO: 232263 - RNA, 24 nt, Human
uccccaggccaccgggccccucug

SEQ ID NO: 232264 - RNA, 18 nt, Human
uccccgccgccgccucuu

SEQ ID NO: 232265 - RNA, 20 nt, Human
uccccgccgccgccucuugc

SEQ ID NO: 232266 - RNA, 25 nt, Human
uccccgccgccgccucuugcugccu

SEQ ID NO: 232267 - RNA, 24 nt, Human
ucccugaagcggguggauggaggc

SEQ ID NO: 232268 - RNA, 21 nt, Human
ucccuggggcugugaggggug

SEQ ID NO: 232269 - RNA, 23 nt, Human
ucccuggggcugugagggguggg

SEQ ID NO: 232270 - RNA, 21 nt, Human
ucgcacgcacagccucggccc

SEQ ID NO: 232271 - RNA, 21 nt, Human
ucuccccgccgccgccucuug

SEQ ID NO: 232272 - RNA, 18 nt, Human
ucuccuccuccuccuucu

SEQ ID NO: 232273 - RNA, 19 nt, Human
ucugcugggggcaccagga

SEQ ID NO: 232274 - RNA, 23 nt, Human
ugacggggggacaacuucagcag

SEQ ID NO: 232275 - RNA, 20 nt, Human
ugcccugggggguggucagg

SEQ ID NO: 232276 - RNA, 22 nt, Human
ugccucugccuccgagcagccc

SEQ ID NO: 232277 - RNA, 19 nt, Human
uggcagcagggaggagggg

SEQ ID NO: 232278 - RNA, 22 nt, Human
ugggauaaguggcagcagggag

SEQ ID NO: 232279 - RNA, 19 nt, Human
ugggccgggggccgggggc

SEQ ID NO: 232280 - RNA, 24 nt, Human
uggggggcggggggccgcggggag

SEQ ID NO: 232281 - RNA, 19 nt, Human
uguuugcaagguuucccuc

SEQ ID NO: 232282 - RNA, 21 nt, Human
uugcugccucugccuccgagc

SEQ ID NO: 232283 - RNA, 22 nt, Human
uuugaggaacaaccugggagaa

SEQ ID NO: 232284 - RNA, 18 nt, Human
aaauagauauuugcaugg

SEQ ID NO: 232285 - RNA, 24 nt, Human
aacacaguuuauuauuggcacacu

SEQ ID NO: 232286 - RNA, 22 nt, Human
aagaaauauacuauaaaaagaa

SEQ ID NO: 232287 - RNA, 23 nt, Human
aagcugauuuuuuugucuuuucu

SEQ ID NO: 232288 - RNA, 18 nt, Human
aaggccuccaagaaaggg

SEQ ID NO: 232289 - RNA, 23 nt, Human
aaugaaagaaaacauaaagaaaa

SEQ ID NO: 232290 - RNA, 24 nt, Human
aaugaaagaaaacauaaagaaaaa

SEQ ID NO: 232291 - RNA, 19 nt, Human
acggagccacugugccuuu

SEQ ID NO: 232292 - RNA, 18 nt, Human
acugcccacaaaaccaau

SEQ ID NO: 232293 - RNA, 22 nt, Human
agaagaugcgcuagaguuuucu

SEQ ID NO: 232294 - RNA, 21 nt, Human
agguacaauuagaaaacacac

SEQ ID NO: 232295 - RNA, 22 nt, Human
auauuaaugagauccugagcac

SEQ ID NO: 232296 - RNA, 25 nt, Human
augaaagaaaacauaaagaaaaaaa

SEQ ID NO: 232297 - RNA, 21 nt, Human
auuuauggacaauauggccuu

SEQ ID NO: 232298 - RNA, 20 nt, Human
caagaaagggucauggaagc

SEQ ID NO: 232299 - RNA, 19 nt, Human
cacacggagccacugugcc

SEQ ID NO: 232300 - RNA, 20 nt, Human
caguggauucuggugccgau

SEQ ID NO: 232301 - RNA, 18 nt, Human
ccauaaaagaaccaggug

SEQ ID NO: 232302 - RNA, 22 nt, Human
cccaaaaacgaaaaguccccau

SEQ ID NO: 232303 - RNA, 25 nt, Human
ccugugaaggccuccaagaaagggu

SEQ ID NO: 232304 - RNA, 23 nt, Human
cuguguucuucccaguacaaagu

SEQ ID NO: 232305 - RNA, 20 nt, Human
gaaagaaaacauaaagaaaa

SEQ ID NO: 232306 - RNA, 23 nt, Human
gaaagaaaacauaaagaaaaaaa

SEQ ID NO: 232307 - RNA, 20 nt, Human
gcugggcccucuuagcuguu

SEQ ID NO: 232308 - RNA, 18 nt, Human
ggauuacauggcuugaaa

SEQ ID NO: 232309 - RNA, 21 nt, Human
gggcuguguucuucccaguac

SEQ ID NO: 232310 - RNA, 24 nt, Human
uaaaaagaaaggauggucaacuca

SEQ ID NO: 232311 - RNA, 22 nt, Human
uaaaaaggaaauucaacacaaa

SEQ ID NO: 232312 - RNA, 24 nt, Human
uaacacacggagccacugugccuu

SEQ ID NO: 232313 - RNA, 23 nt, Human
uacaaaauaucauacaagaaaua

SEQ ID NO: 232314 - RNA, 24 nt, Human
uacacuggaguugcccaaaaacga

SEQ ID NO: 232315 - RNA, 18 nt, Human
uacauggcuugaaaauau

SEQ ID NO: 232316 - RNA, 19 nt, Human
uaccugugaaggccuccaa

SEQ ID NO: 232317 - RNA, 21 nt, Human
uaccugugaaggccuccaaga

SEQ ID NO: 232318 - RNA, 18 nt, Human
uaucucuucuguuuccuc

SEQ ID NO: 232319 - RNA, 20 nt, Human
uauuaaacugcccacaaaag

SEQ ID NO: 232320 - RNA, 23 nt, Human
uauuggcacacuuaucaguaaag

SEQ ID NO: 232321 - RNA, 22 nt, Human
ucaauuagaaaaaaagaaagaa

SEQ ID NO: 232322 - RNA, 25 nt, Human
ucaauuagaaaaaaagaaagaagaa

SEQ ID NO: 232323 - RNA, 26 nt, Human
uccccauaaaagaaccaggugagagc

SEQ ID NO: 232324 - RNA, 18 nt, Human
ucuccuguaaguaaagau

SEQ ID NO: 232325 - RNA, 25 nt, Human
ucuccuguaaguaaagauuugcaau

SEQ ID NO: 232326 - RNA, 22 nt, Human
ugaaaaaaaugacauuucuugu

SEQ ID NO: 232327 - RNA, 23 nt, Human
ugagauccugagcacugagcauu

SEQ ID NO: 232328 - RNA, 23 nt, Human
ugcaagucaaaaagcagaaaaua

SEQ ID NO: 232329 - RNA, 18 nt, Human
ugcccaaaaacgaaaagu

SEQ ID NO: 232330 - RNA, 18 nt, Human
ugcccaaugaaagaaaac

SEQ ID NO: 232331 - RNA, 19 nt, Human
uggauucuggugccgauca

SEQ ID NO: 232332 - RNA, 22 nt, Human
uggcacacuuaucaguaaagca

SEQ ID NO: 232333 - RNA, 25 nt, Human
uugcauggaaaaguuuuuaucucuu

SEQ ID NO: 232334 - RNA, 24 nt, Human
uuguuucagcacuugggcuaaauu

SEQ ID NO: 232335 - RNA, 20 nt, Human
uuucuuguuucagcacuugg

SEQ ID NO: 232336 - RNA, 18 nt, Human
uuuucuuuuuuuacugaa

SEQ ID NO: 232337 - RNA, 24 nt, Human
aaaaauccaaaacaggagugagga

SEQ ID NO: 232338 - RNA, 27 nt, Human
aaacaggagugaggacagaagggaccc

SEQ ID NO: 232339 - RNA, 26 nt, Human
aaacaugcaaagagaaaaauccaaaa

SEQ ID NO: 232340 - RNA, 18 nt, Human
aaaggaacauuugaaaag

SEQ ID NO: 232341 - RNA, 22 nt, Human
aacacuuccuuuuuuggugagg

SEQ ID NO: 232342 - RNA, 21 nt, Human
aacccaaagccuuuaaaaaaa

SEQ ID NO: 232343 - RNA, 25 nt, Human
aacccaaagccuuuaaaaaaaucuc

SEQ ID NO: 232344 - RNA, 19 nt, Human
aacgaacccuuaaagcuaa

SEQ ID NO: 232345 - RNA, 19 nt, Human
aagcaaguguaucgcuuug

SEQ ID NO: 232346 - RNA, 18 nt, Human
aagcgacuacacuguuuc

SEQ ID NO: 232347 - RNA, 19 nt, Human
acacaccacagagcaaaac

SEQ ID NO: 232348 - RNA, 21 nt, Human
acacaccacagagcaaaacug

SEQ ID NO: 232349 - RNA, 26 nt, Human
acaccacagagcaaaacuggaaaaac

SEQ ID NO: 232350 - RNA, 20 nt, Human
acacucaugcuaacgaaccc

SEQ ID NO: 232351 - RNA, 18 nt, Human
acaggccaccaagccuau

SEQ ID NO: 232352 - RNA, 24 nt, Human
acgaacccuuaaagcuaaacaaag

SEQ ID NO: 232353 - RNA, 24 nt, Human
acguccgggcucccaagaagguuu

SEQ ID NO: 232354 - RNA, 20 nt, Human
acuucaauaaauacuuaaau

SEQ ID NO: 232355 - RNA, 22 nt, Human
agaaaaauccaaaacaggagug

SEQ ID NO: 232356 - RNA, 22 nt, Human
agaagaaacaucagccucccga

SEQ ID NO: 232357 - RNA, 19 nt, Human
agagcccuuccuggagccc

SEQ ID NO: 232358 - RNA, 23 nt, Human
agcaguuaacacaauuguacaaa

SEQ ID NO: 232359 - RNA, 22 nt, Human
agccuauucugccauccuguuu

SEQ ID NO: 232360 - RNA, 19 nt, Human
aggccaaagacaacccaaa

SEQ ID NO: 232361 - RNA, 19 nt, Human
aggggcuuccugcagcuag

SEQ ID NO: 232362 - RNA, 21 nt, Human
aguguaucgcuuugggaaagc

SEQ ID NO: 232363 - RNA, 23 nt, Human
auacauuuucaaaauauuggccc

SEQ ID NO: 232364 - RNA, 18 nt, Human
augcaaaugcacgaucug

SEQ ID NO: 232365 - RNA, 21 nt, Human
augcucccugggggagacugg

SEQ ID NO: 232366 - RNA, 23 nt, Human
caaacaugcaaagagaaaaaucc

SEQ ID NO: 232367 - RNA, 24 nt, Human
caaaggccaaagacaacccaaagc

SEQ ID NO: 232368 - RNA, 19 nt, Human
caaaugcacgaucugugua

SEQ ID NO: 232369 - RNA, 22 nt, Human
caagcucucagcuaugacucua

SEQ ID NO: 232370 - RNA, 24 nt, Human
caagugccugcuucaaugccaugu

SEQ ID NO: 232371 - RNA, 23 nt, Human
cacaccacagagcaaaacuggaa

SEQ ID NO: 232372 - RNA, 21 nt, Human
cacacgacuggacacucaugc

SEQ ID NO: 232373 - RNA, 21 nt, Human
caccuucucacagauccaaag

SEQ ID NO: 232374 - RNA, 22 nt, Human
cagagcaaaacuggaaaaaccc

SEQ ID NO: 232375 - RNA, 23 nt, Human
cagcaggagcagcuccgggccuc

SEQ ID NO: 232376 - RNA, 24 nt, Human
cagcugcucuaagcucuguccucc

SEQ ID NO: 232377 - RNA, 22 nt, Human
ccaaaacaggagugaggacaac

SEQ ID NO: 232378 - RNA, 21 nt, Human
ccaacucuacuuucccaucac

SEQ ID NO: 232379 - RNA, 23 nt, Human
ccacagagcaaaacuggaaaaac

SEQ ID NO: 232380 - RNA, 18 nt, Human
ccagagcccuuccuggag

SEQ ID NO: 232381 - RNA, 19 nt, Human
ccaguggcucccagaagac

SEQ ID NO: 232382 - RNA, 22 nt, Human
cccagaguuugggcaugugagc

SEQ ID NO: 232383 - RNA, 24 nt, Human
ccccucagaagaaacaucagccuc

SEQ ID NO: 232384 - RNA, 18 nt, Human
ccucaagaccagccccug

SEQ ID NO: 232385 - RNA, 25 nt, Human
ccugagccagagcccuuccuggagc

SEQ ID NO: 232386 - RNA, 22 nt, Human
ccugcagcgagugcuguuuggc

SEQ ID NO: 232387 - RNA, 28 nt, Human
ccugcagcuagggacauagccggggucc

SEQ ID NO: 232388 - RNA, 22 nt, Human
ccuuaaagcuaaacaaaggcca

SEQ ID NO: 232389 - RNA, 22 nt, Human
cgcagaaugcuucagauucucc

SEQ ID NO: 232390 - RNA, 21 nt, Human
cuaacgaacccuuaaagcuaa

SEQ ID NO: 232391 - RNA, 18 nt, Human
cuagaucaacucagcuca

SEQ ID NO: 232392 - RNA, 25 nt, Human
cuccccauuccccucagaagaaaca

SEQ ID NO: 232393 - RNA, 21 nt, Human
cuccgggccucgucagcacag

SEQ ID NO: 232394 - RNA, 24 nt, Human
cuccucuggugaccaaagcaagug

SEQ ID NO: 232395 - RNA, 22 nt, Human
cucuaagcucuguccuccucug

SEQ ID NO: 232396 - RNA, 25 nt, Human
cucuccccauuccccucagaagaaa

SEQ ID NO: 232397 - RNA, 18 nt, Human
cugcuuccuucucccuca

SEQ ID NO: 232398 - RNA, 22 nt, Human
cuggagcccuggcaauugccca

SEQ ID NO: 232399 - RNA, 20 nt, Human
cugucucucugucucucuuc

SEQ ID NO: 232400 - RNA, 21 nt, Human
cugucugcaaccugagccaga

SEQ ID NO: 232401 - RNA, 18 nt, Human
cuuggauuaauaacuagc

SEQ ID NO: 232402 - RNA, 22 nt, Human
cuuugggaaagcugcuuguugc

SEQ ID NO: 232403 - RNA, 25 nt, Human
gaaaaauccaaaacaggagugagga

SEQ ID NO: 232404 - RNA, 19 nt, Human
gagacugguggcuucgugc

SEQ ID NO: 232405 - RNA, 26 nt, Human
gaugcagaccugaaggugggaggucc

SEQ ID NO: 232406 - RNA, 21 nt, Human
gcaaagagaaaaauccaaaac

SEQ ID NO: 232407 - RNA, 22 nt, Human
gcacacgacuggacacucaugc

SEQ ID NO: 232408 - RNA, 21 nt, Human
gcagcaggagcagcuccgggc

SEQ ID NO: 232409 - RNA, 21 nt, Human
gcgacuacacuguuuccaacc

SEQ ID NO: 232410 - RNA, 20 nt, Human
gcucucagcuaugacucuaa

SEQ ID NO: 232411 - RNA, 18 nt, Human
gcugcuuccuucucccuc

SEQ ID NO: 232412 - RNA, 18 nt, Human
gcuuccucucucucccca

SEQ ID NO: 232413 - RNA, 24 nt, Human
ggacagaauagagugaguuggaag

SEQ ID NO: 232414 - RNA, 20 nt, Human
ggagacgucauaagugagca

SEQ ID NO: 232415 - RNA, 21 nt, Human
ggagacugguggcuucgugcc

SEQ ID NO: 232416 - RNA, 21 nt, Human
uaaaaaaaucucucacacacc

SEQ ID NO: 232417 - RNA, 23 nt, Human
uaaacaaaggccaaagacaaccc

SEQ ID NO: 232418 - RNA, 24 nt, Human
uaaagcuaaacaaaggccaaagac

SEQ ID NO: 232419 - RNA, 21 nt, Human
uaacaagcucucagcuaugac

SEQ ID NO: 232420 - RNA, 24 nt, Human
uaacgaacccuuaaagcuaaacaa

SEQ ID NO: 232421 - RNA, 23 nt, Human
uaaguuuguucaaggucugaagu

SEQ ID NO: 232422 - RNA, 20 nt, Human
uaauacauucccauaaaaca

SEQ ID NO: 232423 - RNA, 18 nt, Human
uagcuaacaagcucucag

SEQ ID NO: 232424 - RNA, 23 nt, Human
uagcuagaucaacucagcucaua

SEQ ID NO: 232425 - RNA, 18 nt, Human
uagcuagcugcuuccuuc

SEQ ID NO: 232426 - RNA, 18 nt, Human
uaggggcuuccugcagcu

SEQ ID NO: 232427 - RNA, 22 nt, Human
uaguaauggaauaacacuuccu

SEQ ID NO: 232428 - RNA, 23 nt, Human
uaugcaaaugcacgaucugugua

SEQ ID NO: 232429 - RNA, 21 nt, Human
ucacacaccacagagcaaaac

SEQ ID NO: 232430 - RNA, 19 nt, Human
ucagcaaccuccuuguccc

SEQ ID NO: 232431 - RNA, 20 nt, Human
uccaaagguaggaagggccc

SEQ ID NO: 232432 - RNA, 18 nt, Human
ucccagaagacaucucuc

SEQ ID NO: 232433 - RNA, 22 nt, Human
ucccuuccagcaguuaacacaa

SEQ ID NO: 232434 - RNA, 24 nt, Human
ucucugucucucuucuuuuccaca

SEQ ID NO: 232435 - RNA, 19 nt, Human
ucugaacuaugcaaaugca

SEQ ID NO: 232436 - RNA, 19 nt, Human
ucugucucucuucuuuucc

SEQ ID NO: 232437 - RNA, 19 nt, Human
ucuuggaauucugcucuaa

SEQ ID NO: 232438 - RNA, 18 nt, Human
ugagaaacauccacgcaa

SEQ ID NO: 232439 - RNA, 20 nt, Human
ugaggaaagcccaauggguc

SEQ ID NO: 232440 - RNA, 23 nt, Human
ugaggaaagcccaaugggucuua

SEQ ID NO: 232441 - RNA, 18 nt, Human
ugaggacagaauagagug

SEQ ID NO: 232442 - RNA, 20 nt, Human
ugaguuggaagagagccuaa

SEQ ID NO: 232443 - RNA, 24 nt, Human
ugaugcagaccugaaggugggagg

SEQ ID NO: 232444 - RNA, 24 nt, Human
ugcaaagagaaaaauccaaaacag

SEQ ID NO: 232445 - RNA, 22 nt, Human
ugcagaccugaaggugggaggu

SEQ ID NO: 232446 - RNA, 23 nt, Human
ugcaucugucccuuccagcaguu

SEQ ID NO: 232447 - RNA, 21 nt, Human
ugcuuuguauucaccuucuca

SEQ ID NO: 232448 - RNA, 18 nt, Human
uggagaagagacagguaa

SEQ ID NO: 232449 - RNA, 21 nt, Human
uggccaaaacagcaaaugcau

SEQ ID NO: 232450 - RNA, 24 nt, Human
uggugaggaaagcccaaugggucu

SEQ ID NO: 232451 - RNA, 18 nt, Human
uguacagaagaaaaaacc

SEQ ID NO: 232452 - RNA, 26 nt, Human
uguauucaccuucucacagauccaaa

SEQ ID NO: 232453 - RNA, 20 nt, Human
uucaccuucucacagaucca

SEQ ID NO: 232454 - RNA, 22 nt, Human
uuccaaccacagaaucuaagcu

SEQ ID NO: 232455 - RNA, 21 nt, Human
uuccacaggccaccaagccua

SEQ ID NO: 232456 - RNA, 18 nt, Human
uuccucaagaccagcccc

SEQ ID NO: 232457 - RNA, 21 nt, Human
uugaaaaggaugaugcagacc

SEQ ID NO: 232458 - RNA, 21 nt, Human
uugaaggccccucuacuucaa

SEQ ID NO: 232459 - RNA, 19 nt, Human
uuggaagagagccuaaaua

SEQ ID NO: 232460 - RNA, 21 nt, Human
agacagugaaaugauaugaca

SEQ ID NO: 232461 - RNA, 20 nt, Human
aggaguugauguuuuuccca

SEQ ID NO: 232462 - RNA, 21 nt, Human
aguggugcgucagagguggca

SEQ ID NO: 232463 - RNA, 20 nt, Human
aucccaggaugugacucacu

SEQ ID NO: 232464 - RNA, 21 nt, Human
caacaugcacaaccuccaccu

SEQ ID NO: 232465 - RNA, 21 nt, Human
caagacaugauauuggauuua

SEQ ID NO: 232466 - RNA, 18 nt, Human
caaggggcaaaugcagua

SEQ ID NO: 232467 - RNA, 20 nt, Human
cacacgguaaacauccaccu

SEQ ID NO: 232468 - RNA, 19 nt, Human
caucaggauauagcugugg

SEQ ID NO: 232469 - RNA, 24 nt, Human
cauucuuauuucuaacuucaggag

SEQ ID NO: 232470 - RNA, 27 nt, Human
ccaucuuaaaauauuacugcuuuaauc

SEQ ID NO: 232471 - RNA, 22 nt, Human
cuccaccuagaauccuguugua

SEQ ID NO: 232472 - RNA, 21 nt, Human
cuggaucccaggaugugacuc

SEQ ID NO: 232473 - RNA, 24 nt, Human
cuucaggaguugauguuuuuccca

SEQ ID NO: 232474 - RNA, 20 nt, Human
gacagugaaaugauaugaca

SEQ ID NO: 232475 - RNA, 20 nt, Human
gaguugauguuuuucccagu

SEQ ID NO: 232476 - RNA, 26 nt, Human
uaaaaaggacaacaugcacaaccucc

SEQ ID NO: 232477 - RNA, 22 nt, Human
uaaucacagaucagauaaaaag

SEQ ID NO: 232478 - RNA, 19 nt, Human
uacugcuuuaaucacagau

SEQ ID NO: 232479 - RNA, 20 nt, Human
uggaagaauuaugcacaaga

SEQ ID NO: 232480 - RNA, 22 nt, Human
uggaagaauuaugcacaagaca

SEQ ID NO: 232481 - RNA, 18 nt, Human
uggaucccaggaugugac

SEQ ID NO: 232482 - RNA, 28 nt, Human
uggaucccaggaugugacucacugggaa

SEQ ID NO: 232483 - RNA, 20 nt, Human
uggcaguggugcgucagagg

SEQ ID NO: 232484 - RNA, 28 nt, Human
uguacacuacugauauaguucacaaaau

SEQ ID NO: 232485 - RNA, 21 nt, Human
uuacugcuuuaaucacagauc

SEQ ID NO: 232486 - RNA, 22 nt, Human
uuauaugguaauguacacuacu

SEQ ID NO: 232487 - RNA, 24 nt, Human
aaauggccagccagcuuggggagc

SEQ ID NO: 232488 - RNA, 19 nt, Human
aagaagaucaaagcaaacu

SEQ ID NO: 232489 - RNA, 20 nt, Human
aagaucaaagcaaacuguga

SEQ ID NO: 232490 - RNA, 20 nt, Human
aagcauaggcuuugauucug

SEQ ID NO: 232491 - RNA, 23 nt, Human
accucugcuuccugccuaacuaa

SEQ ID NO: 232492 - RNA, 22 nt, Human
agaaggaggcuuagccccagaa

SEQ ID NO: 232493 - RNA, 20 nt, Human
agauccugaucaccgcccag

SEQ ID NO: 232494 - RNA, 21 nt, Human
agaugguguaugggggccuug

SEQ ID NO: 232495 - RNA, 21 nt, Human
agcaauggcaacagaugaaga

SEQ ID NO: 232496 - RNA, 24 nt, Human
agcaauggcaacagaugaagagga

SEQ ID NO: 232497 - RNA, 22 nt, Human
agcaccuccacacacagcagca

SEQ ID NO: 232498 - RNA, 22 nt, Human
agcaccuccacacacagcagca

SEQ ID NO: 232499 - RNA, 26 nt, Human
agcucagauugcaagcauuaaaccaa

SEQ ID NO: 232500 - RNA, 22 nt, Human
aggggucagaggcacagaaacu

SEQ ID NO: 232501 - RNA, 20 nt, Human
agggguuccugaaaugucug

SEQ ID NO: 232502 - RNA, 20 nt, Human
aggugggaggcaugccuggg

SEQ ID NO: 232503 - RNA, 23 nt, Human
aguuucuucaucuccaaaauggg

SEQ ID NO: 232504 - RNA, 21 nt, Human
augagcagaauauacuugccc

SEQ ID NO: 232505 - RNA, 28 nt, Human
caagauggugucccagauagagcugaag

SEQ ID NO: 232506 - RNA, 21 nt, Human
cacaaaguacauagccaauga

SEQ ID NO: 232507 - RNA, 18 nt, Human
cacacacagcagcaaaau

SEQ ID NO: 232508 - RNA, 22 nt, Human
cacacacagcagcaaaauggcc

SEQ ID NO: 232509 - RNA, 22 nt, Human
cacacagcagcaaaauggccag

SEQ ID NO: 232510 - RNA, 21 nt, Human
cagauagagcugaagaaggca

SEQ ID NO: 232511 - RNA, 21 nt, Human
cagauugcaagcauuaaacca

SEQ ID NO: 232512 - RNA, 22 nt, Human
cagauugcaagcauuaaaccaa

SEQ ID NO: 232513 - RNA, 24 nt, Human
cagcagcaauggcaacagaugaag

SEQ ID NO: 232514 - RNA, 25 nt, Human
cagcgccccgggcccuggagggagg

SEQ ID NO: 232515 - RNA, 18 nt, Human
caguguguguccuuggga

SEQ ID NO: 232516 - RNA, 23 nt, Human
ccagaggucuucuucauccuucu

SEQ ID NO: 232517 - RNA, 22 nt, Human
ccagggaaucuccugguugcug

SEQ ID NO: 232518 - RNA, 19 nt, Human
cccugggacuucccuccac

SEQ ID NO: 232519 - RNA, 19 nt, Human
ccggcgccggucucgaguu

SEQ ID NO: 232520 - RNA, 20 nt, Human
ccuccacacacagcagcaaa

SEQ ID NO: 232521 - RNA, 24 nt, Human
ccuucuucuucuucuucuucuuuu

SEQ ID NO: 232522 - RNA, 19 nt, Human
cuaaacaggcagugauggu

SEQ ID NO: 232523 - RNA, 24 nt, Human
cugaaucuggcaaggcuuucccau

SEQ ID NO: 232524 - RNA, 18 nt, Human
cugacagcgccccgggcc

SEQ ID NO: 232525 - RNA, 23 nt, Human
cugcgugcgucuccuccggcgcc

SEQ ID NO: 232526 - RNA, 20 nt, Human
cuucucuggcugcuggcccc

SEQ ID NO: 232527 - RNA, 20 nt, Human
cuucuucuucuucuucuucu

SEQ ID NO: 232528 - RNA, 20 nt, Human
cuucuucuucuucuuuuucu

SEQ ID NO: 232529 - RNA, 24 nt, Human
cuucuugcuuugcguugucagggg

SEQ ID NO: 232530 - RNA, 20 nt, Human
cuucuugguguuuggucaag

SEQ ID NO: 232531 - RNA, 20 nt, Human
cuucuuguucuucucuggcu

SEQ ID NO: 232532 - RNA, 22 nt, Human
cuuuuucuucuuguucuucucu

SEQ ID NO: 232533 - RNA, 21 nt, Human
gaggacucccaggcagauggu

SEQ ID NO: 232534 - RNA, 20 nt, Human
gaugguguuguagaugccuu

SEQ ID NO: 232535 - RNA, 24 nt, Human
gcacaggugaggggucagaggcac

SEQ ID NO: 232536 - RNA, 18 nt, Human
gcaggcccaggaggacuc

SEQ ID NO: 232537 - RNA, 18 nt, Human
gcagguccugggcucaaa

SEQ ID NO: 232538 - RNA, 19 nt, Human
gccacugacagcaccucca

SEQ ID NO: 232539 - RNA, 18 nt, Human
gcccuggagggaggugug

SEQ ID NO: 232540 - RNA, 22 nt, Human
ggagaagacaaagucagcugcg

SEQ ID NO: 232541 - RNA, 19 nt, Human
ggagggagguguggguucc

SEQ ID NO: 232542 - RNA, 22 nt, Human
gggguuccugaaaugucugugu

SEQ ID NO: 232543 - RNA, 26 nt, Human
ggucucgaguuuuuuuuuuuuuuuuu

SEQ ID NO: 232544 - RNA, 19 nt, Human
gugguuuauggaauagaug

SEQ ID NO: 232545 - RNA, 23 nt, Human
gugugucuguaucaagacacaca

SEQ ID NO: 232546 - RNA, 22 nt, Human
uaaacaaucacugaacacccgc

SEQ ID NO: 232547 - RNA, 19 nt, Human
uaacuaaacaggcagugau

SEQ ID NO: 232548 - RNA, 25 nt, Human
uagaguuagaaauaggaaagcaugc

SEQ ID NO: 232549 - RNA, 19 nt, Human
uaggaaauuguauauaugu

SEQ ID NO: 232550 - RNA, 23 nt, Human
uauuccucuuccagcuuuggguu

SEQ ID NO: 232551 - RNA, 23 nt, Human
uauuccucuuccagcuuuggguu

SEQ ID NO: 232552 - RNA, 22 nt, Human
uauuucagggguuccugaaaug

SEQ ID NO: 232553 - RNA, 18 nt, Human
ucaaagcaaacugugauc

SEQ ID NO: 232554 - RNA, 20 nt, Human
uccacacacagcagcaaaau

SEQ ID NO: 232555 - RNA, 19 nt, Human
uccacacacagcagcaacc

SEQ ID NO: 232556 - RNA, 19 nt, Human
ucccugggacuucccucca

SEQ ID NO: 232557 - RNA, 21 nt, Human
ucuccugguugcugccccguc

SEQ ID NO: 232558 - RNA, 24 nt, Human
ucucgaguuuuuuuuuuuuuuuuu

SEQ ID NO: 232559 - RNA, 26 nt, Human
ucucggccagaacugcuuuccuggag

SEQ ID NO: 232560 - RNA, 23 nt, Human
ucuuguucuucucuggcugcugg

SEQ ID NO: 232561 - RNA, 25 nt, Human
ucuuuuucuucuuguucuucucugg

SEQ ID NO: 232562 - RNA, 22 nt, Human
ugacagcaccuccacacacagc

SEQ ID NO: 232563 - RNA, 22 nt, Human
ugacagcaccuccacacacagc

SEQ ID NO: 232564 - RNA, 21 nt, Human
ugcaugugggguaugccagag

SEQ ID NO: 232565 - RNA, 22 nt, Human
ugccaagacaguauccaagaaa

SEQ ID NO: 232566 - RNA, 19 nt, Human
ugcccacguaccugcuacc

SEQ ID NO: 232567 - RNA, 19 nt, Human
ugccccgucugacagcgcc

SEQ ID NO: 232568 - RNA, 19 nt, Human
ugcguugucaggggaucuc

SEQ ID NO: 232569 - RNA, 28 nt, Human
ugcuaccugaauuugugugugugugugu

SEQ ID NO: 232570 - RNA, 18 nt, Human
uggaauagaugguguaug

SEQ ID NO: 232571 - RNA, 22 nt, Human
uggcaacagaugaagaggagug

SEQ ID NO: 232572 - RNA, 19 nt, Human
uggguuugggcaugccacu

SEQ ID NO: 232573 - RNA, 19 nt, Human
uggguuugggcaugccacu

SEQ ID NO: 232574 - RNA, 24 nt, Human
uggugucccagauagagcugaaga

SEQ ID NO: 232575 - RNA, 21 nt, Human
uggugugucuguaucaagaca

SEQ ID NO: 232576 - RNA, 23 nt, Human
ugguguuguagaugccuucuugg

SEQ ID NO: 232577 - RNA, 23 nt, Human
ugguguuuggucaagaugguguc

SEQ ID NO: 232578 - RNA, 18 nt, Human
ugguugccucugcacccu

SEQ ID NO: 232579 - RNA, 19 nt, Human
ugugagcccaaauucacau

SEQ ID NO: 232580 - RNA, 19 nt, Human
ugugaugaucaccaagagu

SEQ ID NO: 232581 - RNA, 20 nt, Human
ugugcuuugcauguggggua

SEQ ID NO: 232582 - RNA, 21 nt, Human
uguguguguguguguuacgug

SEQ ID NO: 232583 - RNA, 23 nt, Human
uguguguguguuacgugcaugug

SEQ ID NO: 232584 - RNA, 21 nt, Human
uguguuacgugcaugugcaca

SEQ ID NO: 232585 - RNA, 24 nt, Human
uucacauauugaagaagaucaaag

SEQ ID NO: 232586 - RNA, 21 nt, Human
uucagauccugaucaccgccc

SEQ ID NO: 232587 - RNA, 19 nt, Human
uucauccuucuucuucuuc

SEQ ID NO: 232588 - RNA, 18 nt, Human
uugagucucaguuucuuc

SEQ ID NO: 232589 - RNA, 21 nt, Human
uugcugguuaggaaauuguau

SEQ ID NO: 232590 - RNA, 20 nt, Human
uuggguuugggcaugccacu

SEQ ID NO: 232591 - RNA, 20 nt, Human
uuggguuugggcaugccacu

SEQ ID NO: 232592 - RNA, 21 nt, Human
uuguauauaugugucugaauc

SEQ ID NO: 232593 - RNA, 18 nt, Human
uuucuucaucuccaaaau

SEQ ID NO: 232594 - RNA, 23 nt, Human
uuuuuuuuuuuuuuuuucacacu

SEQ ID NO: 232595 - RNA, 18 nt, Human
uuuuuuuuuuuuuuuuug

SEQ ID NO: 232596 - RNA, 21 nt, Human
aaaaauacaccaacgacaguu

SEQ ID NO: 232597 - RNA, 22 nt, Human
accagaaaaauacaccaacgac

SEQ ID NO: 232598 - RNA, 22 nt, Human
accagaaaaauacaccaacgac

SEQ ID NO: 232599 - RNA, 28 nt, Human
cacagccugcuaucuucuguucuccaaa

SEQ ID NO: 232600 - RNA, 19 nt, Human
caccagaaaaauacaccaa

SEQ ID NO: 232601 - RNA, 19 nt, Human
caccagaaaaauacaccaa

SEQ ID NO: 232602 - RNA, 22 nt, Human
cagaaaaauacaccaacgacag

SEQ ID NO: 232603 - RNA, 28 nt, Human
cagaaaaauacaccaacgacaguugagg

SEQ ID NO: 232604 - RNA, 20 nt, Human
ccuuugaaggaaggcacaga

SEQ ID NO: 232605 - RNA, 20 nt, Human
uaagaucaaugaaaauacuu

SEQ ID NO: 232606 - RNA, 19 nt, Human
ucaguacagaugacccaca

SEQ ID NO: 232607 - RNA, 21 nt, Human
uggagaacaaaugcuuucuug

SEQ ID NO: 232608 - RNA, 23 nt, Human
aaaaaauccccacuaucuguaca

SEQ ID NO: 232609 - RNA, 18 nt, Human
aaacacguugacuccuga

SEQ ID NO: 232610 - RNA, 24 nt, Human
aaaccaaaaucccaacccaagcca

SEQ ID NO: 232611 - RNA, 24 nt, Human
aaagugcugggauuacaggcguga

SEQ ID NO: 232612 - RNA, 24 nt, Human
aaagugcugggauuacaggcguga

SEQ ID NO: 232613 - RNA, 19 nt, Human
aaaucccaacccaagccau

SEQ ID NO: 232614 - RNA, 23 nt, Human
aaaugccaaauguacacagugua

SEQ ID NO: 232615 - RNA, 25 nt, Human
aacacacacgacagaaaacagugca

SEQ ID NO: 232616 - RNA, 19 nt, Human
aaccaaaaucccaacccaa

SEQ ID NO: 232617 - RNA, 20 nt, Human
aaccuccaccuccugggcuc

SEQ ID NO: 232618 - RNA, 24 nt, Human
aaguagcugggaucacaggcacgu

SEQ ID NO: 232619 - RNA, 25 nt, Human
aaguagcugggaucacaggcacgug

SEQ ID NO: 232620 - RNA, 19 nt, Human
aagugcugggauuacaggc

SEQ ID NO: 232621 - RNA, 19 nt, Human
aagugcugggauuacaggc

SEQ ID NO: 232622 - RNA, 19 nt, Human
aagugcugggauuacaggc

SEQ ID NO: 232623 - RNA, 19 nt, Human
aagugcugggauuacaggc

SEQ ID NO: 232624 - RNA, 24 nt, Human
acaaagugcaaacauaacaaaaaa

SEQ ID NO: 232625 - RNA, 19 nt, Human
acaggaaaggaagaaacca

SEQ ID NO: 232626 - RNA, 23 nt, Human
acaggugcccaccaccgcgcccg

SEQ ID NO: 232627 - RNA, 21 nt, Human
acauacccaucaacgacaaga

SEQ ID NO: 232628 - RNA, 24 nt, Human
accaauauacaaagugcaaacaua

SEQ ID NO: 232629 - RNA, 25 nt, Human
acccgccucggccucccaaagugcu

SEQ ID NO: 232630 - RNA, 22 nt, Human
accucagccucgccaugccugg

SEQ ID NO: 232631 - RNA, 18 nt, Human
acgggguuucaccuuguu

SEQ ID NO: 232632 - RNA, 20 nt, Human
acgggguuucaccuuguuag

SEQ ID NO: 232633 - RNA, 25 nt, Human
acuauguugcccaggcuggaaagca

SEQ ID NO: 232634 - RNA, 22 nt, Human
acugaacaaauacagcaaccag

SEQ ID NO: 232635 - RNA, 20 nt, Human
acugcaguggcgcaaucucg

SEQ ID NO: 232636 - RNA, 24 nt, Human
acugcaguggcgcaaucucggcuc

SEQ ID NO: 232637 - RNA, 24 nt, Human
agaaaccaaaaucccaacccaagc

SEQ ID NO: 232638 - RNA, 21 nt, Human
agagauggggucuuacuaugu

SEQ ID NO: 232639 - RNA, 23 nt, Human
agccucaaaugccugagcucaaa

SEQ ID NO: 232640 - RNA, 18 nt, Human
aggcgauccuccugccuc

SEQ ID NO: 232641 - RNA, 18 nt, Human
aggcuggagugcaguggc

SEQ ID NO: 232642 - RNA, 18 nt, Human
aguagcugggacuacagg

SEQ ID NO: 232643 - RNA, 23 nt, Human
agugcaaaauaauaacacaaaug

SEQ ID NO: 232644 - RNA, 20 nt, Human
agugcaguggcucgaucaug

SEQ ID NO: 232645 - RNA, 23 nt, Human
agugcaguggcucgaucauggcu

SEQ ID NO: 232646 - RNA, 18 nt, Human
agugcugggauuacaggc

SEQ ID NO: 232647 - RNA, 18 nt, Human
agugcugggauuacaggc

SEQ ID NO: 232648 - RNA, 24 nt, Human
auauauguguguauauauauauau

SEQ ID NO: 232649 - RNA, 22 nt, Human
aucccaucccaacacacacgac

SEQ ID NO: 232650 - RNA, 24 nt, Human
aucuguugcccaggcuggagugca

SEQ ID NO: 232651 - RNA, 24 nt, Human
augauccacccgccucggccuccc

SEQ ID NO: 232652 - RNA, 24 nt, Human
auguguguauauauauauauaagu

SEQ ID NO: 232653 - RNA, 21 nt, Human
auucuccugccucagccuccc

SEQ ID NO: 232654 - RNA, 24 nt, Human
caaagugcugggauuacaggcgug

SEQ ID NO: 232655 - RNA, 24 nt, Human
caaagugcugggauuacaggcgug

SEQ ID NO: 232656 - RNA, 19 nt, Human
caacacacacgacagaaaa

SEQ ID NO: 232657 - RNA, 20 nt, Human
caaccuccaccuccugggcu

SEQ ID NO: 232658 - RNA, 23 nt, Human
caaccuccaccuccugggcucag

SEQ ID NO: 232659 - RNA, 21 nt, Human
caagauuggggaagugaaugg

SEQ ID NO: 232660 - RNA, 22 nt, Human
cacaccauucuccugccucagc

SEQ ID NO: 232661 - RNA, 22 nt, Human
cacacgacagaaaacagugcaa

SEQ ID NO: 232662 - RNA, 24 nt, Human
cacaggcacgugccaccauaccca

SEQ ID NO: 232663 - RNA, 23 nt, Human
cacccgccucggccucccaaagu

SEQ ID NO: 232664 - RNA, 24 nt, Human
caccuccugggcucaggcgauccu

SEQ ID NO: 232665 - RNA, 22 nt, Human
caccugugucuggccaaauuca

SEQ ID NO: 232666 - RNA, 24 nt, Human
caccuuguuagccaggauggucuc

SEQ ID NO: 232667 - RNA, 22 nt, Human
cacgcgggagucugacggaggc

SEQ ID NO: 232668 - RNA, 21 nt, Human
cacugcaaccuccaccuccug

SEQ ID NO: 232669 - RNA, 23 nt, Human
cacugcaaccuccaccuccuggg

SEQ ID NO: 232670 - RNA, 23 nt, Human
cacugggggggacacaguguuuu

SEQ ID NO: 232671 - RNA, 20 nt, Human
cagaggcaauaacccccuac

SEQ ID NO: 232672 - RNA, 22 nt, Human
cagcucagccucccaaagugcu

SEQ ID NO: 232673 - RNA, 24 nt, Human
cagcucagccucccaaagugcugg

SEQ ID NO: 232674 - RNA, 22 nt, Human
caggcgauccuccugccucagc

SEQ ID NO: 232675 - RNA, 20 nt, Human
caggcuacaaaaaccuucua

SEQ ID NO: 232676 - RNA, 19 nt, Human
caggugcccaccaccgcgc

SEQ ID NO: 232677 - RNA, 21 nt, Human
caggugcccaccaccgcgccc

SEQ ID NO: 232678 - RNA, 23 nt, Human
caucuguugcccaggcuggagug

SEQ ID NO: 232679 - RNA, 22 nt, Human
ccaaagugcugggauuacaggc

SEQ ID NO: 232680 - RNA, 22 nt, Human
ccaaagugcugggauuacaggc

SEQ ID NO: 232681 - RNA, 22 nt, Human
ccaaagugcugggauuacaggc

SEQ ID NO: 232682 - RNA, 22 nt, Human
ccaaagugcugggauuacaggc

SEQ ID NO: 232683 - RNA, 24 nt, Human
ccaaagugcugggauuacaggcgu

SEQ ID NO: 232684 - RNA, 24 nt, Human
ccaaagugcugggauuacaggcgu

SEQ ID NO: 232685 - RNA, 24 nt, Human
ccaacuccugaacucaagugaucc

SEQ ID NO: 232686 - RNA, 24 nt, Human
ccaccuccugggcucaggcgaucc

SEQ ID NO: 232687 - RNA, 20 nt, Human
cccaacccaagccauugcau

SEQ ID NO: 232688 - RNA, 19 nt, Human
cccaaguagcugggaucac

SEQ ID NO: 232689 - RNA, 23 nt, Human
cccgaguagcugggacuacaggu

SEQ ID NO: 232690 - RNA, 24 nt, Human
cccgaguagcugggacuacaggug

SEQ ID NO: 232691 - RNA, 19 nt, Human
cccgcgauugcacucgggg

SEQ ID NO: 232692 - RNA, 24 nt, Human
ccgaaaccagaaaggcuuaucacg

SEQ ID NO: 232693 - RNA, 19 nt, Human
ccuccaccuccugggcuca

SEQ ID NO: 232694 - RNA, 30 nt, Human
ccucccaccucagccucgccaugccuggcc

SEQ ID NO: 232695 - RNA, 24 nt, Human
ccuccugggcucaggcgauccucc

SEQ ID NO: 232696 - RNA, 21 nt, Human
ccugaacucaagugauccagc

SEQ ID NO: 232697 - RNA, 20 nt, Human
ccugaccucaugauccaccc

SEQ ID NO: 232698 - RNA, 20 nt, Human
ccugagcucaaaccauccuc

SEQ ID NO: 232699 - RNA, 20 nt, Human
ccugcacugggggggacaca

SEQ ID NO: 232700 - RNA, 23 nt, Human
ccugccucagccucccgaguagc

SEQ ID NO: 232701 - RNA, 18 nt, Human
ccuggcugucuagcaagg

SEQ ID NO: 232702 - RNA, 19 nt, Human
ccugggugcaggccacgug

SEQ ID NO: 232703 - RNA, 22 nt, Human
cgaagccuguucugccucccag

SEQ ID NO: 232704 - RNA, 23 nt, Human
cgaagccuguucugccucccaga

SEQ ID NO: 232705 - RNA, 21 nt, Human
cgcccaggccagacugcggac

SEQ ID NO: 232706 - RNA, 24 nt, Human
cgccucggccucccaaagugcugg

SEQ ID NO: 232707 - RNA, 20 nt, Human
cgcucugucgcccaggccag

SEQ ID NO: 232708 - RNA, 18 nt, Human
cgcuuuguugcucaggcc

SEQ ID NO: 232709 - RNA, 20 nt, Human
cggcgaggucucaggaaggg

SEQ ID NO: 232710 - RNA, 24 nt, Human
cgggguuucaccuuguuagccagg

SEQ ID NO: 232711 - RNA, 26 nt, Human
cucaaaccauccucccaccucagccu

SEQ ID NO: 232712 - RNA, 24 nt, Human
cucacugcaaccuccaccuccugg

SEQ ID NO: 232713 - RNA, 27 nt, Human
cucacugcaaccuccaccuccugggcu

SEQ ID NO: 232714 - RNA, 24 nt, Human
cucagccucccaaguagcugggau

SEQ ID NO: 232715 - RNA, 24 nt, Human
cucagccucccgaguagcugggac

SEQ ID NO: 232716 - RNA, 22 nt, Human
cucaggccuggucuccaacucc

SEQ ID NO: 232717 - RNA, 19 nt, Human
cucccagaugaauaaauau

SEQ ID NO: 232718 - RNA, 24 nt, Human
cuccugaccucaugauccacccgc

SEQ ID NO: 232719 - RNA, 19 nt, Human
cuccugaguuuagggguuu

SEQ ID NO: 232720 - RNA, 19 nt, Human
cucgcagccucugccaggc

SEQ ID NO: 232721 - RNA, 23 nt, Human
cucugucgcccaggccagacugc

SEQ ID NO: 232722 - RNA, 19 nt, Human
cucuuauccuucacaggaa

SEQ ID NO: 232723 - RNA, 24 nt, Human
cugcaaccuccaccuccugggcuc

SEQ ID NO: 232724 - RNA, 23 nt, Human
cugccucagccucccaaguagcu

SEQ ID NO: 232725 - RNA, 23 nt, Human
cugccucagccucccgaguagcu

SEQ ID NO: 232726 - RNA, 25 nt, Human
gaagaaaccaaaaucccaacccaag

SEQ ID NO: 232727 - RNA, 22 nt, Human
gaccucaugauccacccgccuc

SEQ ID NO: 232728 - RNA, 28 nt, Human
gaccugcuguguccuagcuggaaacccu

SEQ ID NO: 232729 - RNA, 20 nt, Human
gagacgggguuucaccuugu

SEQ ID NO: 232730 - RNA, 19 nt, Human
gaucauggcucacugcaac

SEQ ID NO: 232731 - RNA, 20 nt, Human
gaucucgcuuuguugcucag

SEQ ID NO: 232732 - RNA, 22 nt, Human
gaugggcaccaggcuggugucc

SEQ ID NO: 232733 - RNA, 18 nt, Human
gauuacaggcgugaggca

SEQ ID NO: 232734 - RNA, 25 nt, Human
gauuacaggcgugaggcaccugugu

SEQ ID NO: 232735 - RNA, 19 nt, Human
gauuacaggcgugaggcca

SEQ ID NO: 232736 - RNA, 23 nt, Human
gauuacaggcgugaggccacugc

SEQ ID NO: 232737 - RNA, 23 nt, Human
gauuacaggcgugaggccacugc

SEQ ID NO: 232738 - RNA, 22 nt, Human
gcaauaacccccuacacagggc

SEQ ID NO: 232739 - RNA, 21 nt, Human
gcaugguuuuuuuuuguuuug

SEQ ID NO: 232740 - RNA, 21 nt, Human
gccagacugcggacugcagug

SEQ ID NO: 232741 - RNA, 19 nt, Human
gcccaggcuggaaagcagu

SEQ ID NO: 232742 - RNA, 24 nt, Human
gcccaggcuggaaagcaguggcau

SEQ ID NO: 232743 - RNA, 19 nt, Human
gcccaggcuggagugcagu

SEQ ID NO: 232744 - RNA, 23 nt, Human
gcccggcuaauuuuuuguauuuu

SEQ ID NO: 232745 - RNA, 20 nt, Human
gccucagccucccaaguagc

SEQ ID NO: 232746 - RNA, 24 nt, Human
gcgauccuccugccucagccuccc

SEQ ID NO: 232747 - RNA, 23 nt, Human
gcuggagugcaguggcucgauca

SEQ ID NO: 232748 - RNA, 25 nt, Human
gcuucccggguucacaccauucucc

SEQ ID NO: 232749 - RNA, 22 nt, Human
ggaucucgcuuuguugcucagg

SEQ ID NO: 232750 - RNA, 25 nt, Human
ggcaggcaaugcuuuggucuucucu

SEQ ID NO: 232751 - RNA, 20 nt, Human
ggcaggggcgggacuccagg

SEQ ID NO: 232752 - RNA, 19 nt, Human
ggcuggagugcaguggcuc

SEQ ID NO: 232753 - RNA, 19 nt, Human
gggccugacauccccugcc

SEQ ID NO: 232754 - RNA, 22 nt, Human
gggcucaggcgauccuccugcc

SEQ ID NO: 232755 - RNA, 22 nt, Human
gggucuuacuauguugcccagg

SEQ ID NO: 232756 - RNA, 24 nt, Human
gggugaccggugacucaggcucug

SEQ ID NO: 232757 - RNA, 20 nt, Human
ggucucgaucuccugaccuc

SEQ ID NO: 232758 - RNA, 19 nt, Human
gugggucaugauucggggg

SEQ ID NO: 232759 - RNA, 24 nt, Human
uaaacacauacccaucaacgacaa

SEQ ID NO: 232760 - RNA, 18 nt, Human
uaaccgggugucucaggc

SEQ ID NO: 232761 - RNA, 19 nt, Human
uaaccgggugucucaggca

SEQ ID NO: 232762 - RNA, 19 nt, Human
uaaccuggcugucuagcaa

SEQ ID NO: 232763 - RNA, 21 nt, Human
uaaggaagguacaaacccacc

SEQ ID NO: 232764 - RNA, 24 nt, Human
uaauuuuuuguauuuuuaguagag

SEQ ID NO: 232765 - RNA, 25 nt, Human
uaauuuuuuguauuuuuaguagaga

SEQ ID NO: 232766 - RNA, 23 nt, Human
uacaaacccaccucgaaagacac

SEQ ID NO: 232767 - RNA, 22 nt, Human
uacauaaagaagaggcauuuca

SEQ ID NO: 232768 - RNA, 19 nt, Human
uacuauguugcccaggcug

SEQ ID NO: 232769 - RNA, 25 nt, Human
uacuauguugcccaggcuggaaagc

SEQ ID NO: 232770 - RNA, 22 nt, Human
uagagaugggaucucgcuuugu

SEQ ID NO: 232771 - RNA, 24 nt, Human
uagggucuucaucuguugcccagg

SEQ ID NO: 232772 - RNA, 21 nt, Human
uaguagagacgggguuucacc

SEQ ID NO: 232773 - RNA, 24 nt, Human
uaguagagacgggguuucaccuug

SEQ ID NO: 232774 - RNA, 26 nt, Human
uaguagagacgggguuucaccuuguu

SEQ ID NO: 232775 - RNA, 22 nt, Human
uauauauguguguauauauaua

SEQ ID NO: 232776 - RNA, 20 nt, Human
uauauguguguauauauaua

SEQ ID NO: 232777 - RNA, 21 nt, Human
uaucuguacagggacgcauuu

SEQ ID NO: 232778 - RNA, 22 nt, Human
uauguguguauauauauauaua

SEQ ID NO: 232779 - RNA, 18 nt, Human
uauguugcccaggcugga

SEQ ID NO: 232780 - RNA, 23 nt, Human
uauguugcccaggcuggaaagca

SEQ ID NO: 232781 - RNA, 25 nt, Human
ucaaaccauccucccaccucagccu

SEQ ID NO: 232782 - RNA, 24 nt, Human
ucaccuuguuagccaggauggucu

SEQ ID NO: 232783 - RNA, 20 nt, Human
ucacgacagccucaaaugcc

SEQ ID NO: 232784 - RNA, 22 nt, Human
ucacgguggagagaaacucaaa

SEQ ID NO: 232785 - RNA, 23 nt, Human
ucacugcaaccuccaccuccugg

SEQ ID NO: 232786 - RNA, 24 nt, Human
ucacugcaaccuccaccuccuggg

SEQ ID NO: 232787 - RNA, 25 nt, Human
ucacugcaaccuccaccuccugggc

SEQ ID NO: 232788 - RNA, 27 nt, Human
ucacugcaaccuccaccuccugggcuc

SEQ ID NO: 232789 - RNA, 23 nt, Human
ucacugcaagcuccgcuucccgg

SEQ ID NO: 232790 - RNA, 24 nt, Human
ucacugcaagcuccgcuucccggg

SEQ ID NO: 232791 - RNA, 21 nt, Human
ucagaaagaaccugaaguccc

SEQ ID NO: 232792 - RNA, 18 nt, Human
ucagccagaucauuuccg

SEQ ID NO: 232793 - RNA, 18 nt, Human
ucagccucccaaagugcu

SEQ ID NO: 232794 - RNA, 18 nt, Human
ucagccucccaaguagcu

SEQ ID NO: 232795 - RNA, 20 nt, Human
ucagccucccaaguagcugg

SEQ ID NO: 232796 - RNA, 23 nt, Human
ucagccucccgaguagcugggac

SEQ ID NO: 232797 - RNA, 24 nt, Human
ucaucuguugcccaggcuggagug

SEQ ID NO: 232798 - RNA, 24 nt, Human
ucauugacacgggcuuucccuggc

SEQ ID NO: 232799 - RNA, 24 nt, Human
ucccaaagugcugggauuacaggc

SEQ ID NO: 232800 - RNA, 24 nt, Human
ucccaaagugcugggauuacaggc

SEQ ID NO: 232801 - RNA, 24 nt, Human
ucccaaguagcugggaucacaggc

SEQ ID NO: 232802 - RNA, 21 nt, Human
uccccccgggccuguuucucu

SEQ ID NO: 232803 - RNA, 20 nt, Human
uccccugcccuuucaucuuc

SEQ ID NO: 232804 - RNA, 22 nt, Human
uccccugcccuuucaucuucca

SEQ ID NO: 232805 - RNA, 23 nt, Human
ucccgaguagcugggacuacagg

SEQ ID NO: 232806 - RNA, 24 nt, Human
ucccgaguagcugggacuacaggu

SEQ ID NO: 232807 - RNA, 20 nt, Human
ucccggguucacaccauucu

SEQ ID NO: 232808 - RNA, 21 nt, Human
ucccggguucacaccauucuc

SEQ ID NO: 232809 - RNA, 24 nt, Human
ucccggguucacaccauucuccug

SEQ ID NO: 232810 - RNA, 20 nt, Human
ucccggucaaccugccccuc

SEQ ID NO: 232811 - RNA, 23 nt, Human
ucccuggggacaauugccaaucc

SEQ ID NO: 232812 - RNA, 27 nt, Human
uccuccugccucagccucccaaguagc

SEQ ID NO: 232813 - RNA, 21 nt, Human
uccugggcucaggcgauccuc

SEQ ID NO: 232814 - RNA, 24 nt, Human
uccugggcucaggcgauccuccug

SEQ ID NO: 232815 - RNA, 18 nt, Human
ucggccucccaaagugcu

SEQ ID NO: 232816 - RNA, 24 nt, Human
ucuccugccucagccucccgagua

SEQ ID NO: 232817 - RNA, 18 nt, Human
ucucgcucugucgcccag

SEQ ID NO: 232818 - RNA, 18 nt, Human
ucucgcucugucgcccag

SEQ ID NO: 232819 - RNA, 19 nt, Human
ucucgcucugucgcccagg

SEQ ID NO: 232820 - RNA, 23 nt, Human
ucucgcucugucgcccaggccag

SEQ ID NO: 232821 - RNA, 24 nt, Human
ucucgcucugucgcccaggccaga

SEQ ID NO: 232822 - RNA, 24 nt, Human
ucucgcuuuguugcucaggccugg

SEQ ID NO: 232823 - RNA, 19 nt, Human
ucucugggccugacauccc

SEQ ID NO: 232824 - RNA, 21 nt, Human
ucucuuauccuucacaggaaa

SEQ ID NO: 232825 - RNA, 23 nt, Human
ucugccaggcagugucccgaccc

SEQ ID NO: 232826 - RNA, 19 nt, Human
ucugucuuugaauaaaaca

SEQ ID NO: 232827 - RNA, 18 nt, Human
ucuguugcccaggcugga

SEQ ID NO: 232828 - RNA, 24 nt, Human
ucuguugcccaggcuggagugcag

SEQ ID NO: 232829 - RNA, 23 nt, Human
ucuuacuauguugcccaggcugg

SEQ ID NO: 232830 - RNA, 24 nt, Human
ucuuacuauguugcccaggcugga

SEQ ID NO: 232831 - RNA, 23 nt, Human
ucuucaucuguugcccaggcugg

SEQ ID NO: 232832 - RNA, 24 nt, Human
ucuucaucuguugcccaggcugga

SEQ ID NO: 232833 - RNA, 19 nt, Human
ugaaagccacuugcuucuc

SEQ ID NO: 232834 - RNA, 22 nt, Human
ugaaauagggucuucaucuguu

SEQ ID NO: 232835 - RNA, 21 nt, Human
ugaacucaagugauccagcuc

SEQ ID NO: 232836 - RNA, 21 nt, Human
ugaccggugacucaggcucug

SEQ ID NO: 232837 - RNA, 21 nt, Human
ugacucaggcucugccucugg

SEQ ID NO: 232838 - RNA, 22 nt, Human
ugagacggagucucgcucuguc

SEQ ID NO: 232839 - RNA, 19 nt, Human
ugaggcaccugugucuggc

SEQ ID NO: 232840 - RNA, 22 nt, Human
ugaggcagggccaggggguccc

SEQ ID NO: 232841 - RNA, 25 nt, Human
ugaggcagggccagggggucccguu

SEQ ID NO: 232842 - RNA, 19 nt, Human
ugaguuuagggguuuggcu

SEQ ID NO: 232843 - RNA, 24 nt, Human
ugcaaggagaccacgggaauggaa

SEQ ID NO: 232844 - RNA, 22 nt, Human
ugcacacaguccaguucgugca

SEQ ID NO: 232845 - RNA, 23 nt, Human
ugcaguggcgcaaucucggcuca

SEQ ID NO: 232846 - RNA, 23 nt, Human
ugccaaucccuugugacaucuuc

SEQ ID NO: 232847 - RNA, 21 nt, Human
ugcccaggcuggagugcagug

SEQ ID NO: 232848 - RNA, 22 nt, Human
ugcccaggcuggagugcagugg

SEQ ID NO: 232849 - RNA, 25 nt, Human
ugcccaggcuggagugcaguggcuc

SEQ ID NO: 232850 - RNA, 24 nt, Human
ugccucagccucccaaguagcugg

SEQ ID NO: 232851 - RNA, 24 nt, Human
ugccucagccucccgaguagcugg

SEQ ID NO: 232852 - RNA, 18 nt, Human
ugccucugggaaguggca

SEQ ID NO: 232853 - RNA, 24 nt, Human
ugcugggauuacaggcgugaggca

SEQ ID NO: 232854 - RNA, 24 nt, Human
ugcugggauuacaggcgugaggcc

SEQ ID NO: 232855 - RNA, 23 nt, Human
uggaagcacuaggugggcggaca

SEQ ID NO: 232856 - RNA, 20 nt, Human
uggagagaaauggagguguc

SEQ ID NO: 232857 - RNA, 19 nt, Human
uggagugcaguggcucgau

SEQ ID NO: 232858 - RNA, 24 nt, Human
uggagugcaguggcucgaucaugg

SEQ ID NO: 232859 - RNA, 18 nt, Human
uggcaggcaaugcuuugg

SEQ ID NO: 232860 - RNA, 18 nt, Human
uggcaggcaaugcuuugg

SEQ ID NO: 232861 - RNA, 23 nt, Human
uggcaggcaaugcuuuggucuuc

SEQ ID NO: 232862 - RNA, 18 nt, Human
uggccagaggccaugggc

SEQ ID NO: 232863 - RNA, 18 nt, Human
uggcuucccgcgauugca

SEQ ID NO: 232864 - RNA, 22 nt, Human
ugggaaguggcaucauuuggug

SEQ ID NO: 232865 - RNA, 21 nt, Human
ugggacuacaggugcccacca

SEQ ID NO: 232866 - RNA, 24 nt, Human
ugggacuacaggugcccaccaccg

SEQ ID NO: 232867 - RNA, 21 nt, Human
ugggaucacaggcacgugcca

SEQ ID NO: 232868 - RNA, 22 nt, Human
ugggaucacaggcacgugccac

SEQ ID NO: 232869 - RNA, 24 nt, Human
ugggaucacaggcacgugccacca

SEQ ID NO: 232870 - RNA, 24 nt, Human
ugggaucccaucccaacacacacg

SEQ ID NO: 232871 - RNA, 24 nt, Human
ugggaucucgcuuuguugcucagg

SEQ ID NO: 232872 - RNA, 18 nt, Human
ugggauuacaggcgugag

SEQ ID NO: 232873 - RNA, 18 nt, Human
ugggauuacaggcgugag

SEQ ID NO: 232874 - RNA, 19 nt, Human
ugggauuacaggcgugagg

SEQ ID NO: 232875 - RNA, 19 nt, Human
ugggauuacaggcgugagg

SEQ ID NO: 232876 - RNA, 21 nt, Human
ugggauuacaggcgugaggca

SEQ ID NO: 232877 - RNA, 22 nt, Human
ugggauuacaggcgugaggcac

SEQ ID NO: 232878 - RNA, 23 nt, Human
ugggauuacaggcgugaggcacc

SEQ ID NO: 232879 - RNA, 23 nt, Human
ugggauuacaggcgugaggcacc

SEQ ID NO: 232880 - RNA, 25 nt, Human
ugggauuacaggcgugaggcaccug

SEQ ID NO: 232881 - RNA, 22 nt, Human
ugggauuacaggcgugaggcca

SEQ ID NO: 232882 - RNA, 23 nt, Human
ugggauuacaggcgugaggccac

SEQ ID NO: 232883 - RNA, 23 nt, Human
ugggauuacaggcgugaggccac

SEQ ID NO: 232884 - RNA, 25 nt, Human
ugggauuacaggcgugaggccacug

SEQ ID NO: 232885 - RNA, 24 nt, Human
ugggcucaggcgauccuccugccu

SEQ ID NO: 232886 - RNA, 24 nt, Human
uggggucuuacuauguugcccagg

SEQ ID NO: 232887 - RNA, 19 nt, Human
ugggugggucaugauucgg

SEQ ID NO: 232888 - RNA, 21 nt, Human
uguccuagcuggaaacccugg

SEQ ID NO: 232889 - RNA, 20 nt, Human
ugucgcccaggccagacugc

SEQ ID NO: 232890 - RNA, 22 nt, Human
ugucuggccaaauucauuuuuu

SEQ ID NO: 232891 - RNA, 18 nt, Human
uguguauauauauauaua

SEQ ID NO: 232892 - RNA, 18 nt, Human
uguguauauauauauaua

SEQ ID NO: 232893 - RNA, 22 nt, Human
uguguauauauauauauaagug

SEQ ID NO: 232894 - RNA, 22 nt, Human
uguguauauauauauauaagug

SEQ ID NO: 232895 - RNA, 24 nt, Human
uguguauauauauauauaaguggc

SEQ ID NO: 232896 - RNA, 26 nt, Human
uguguccuagcuggaaacccuggcuu

SEQ ID NO: 232897 - RNA, 18 nt, Human
uuacaggcgugaggccac

SEQ ID NO: 232898 - RNA, 24 nt, Human
uuaguagagacgggguuucaccuu

SEQ ID NO: 232899 - RNA, 25 nt, Human
uuaguagagacgggguuucaccuug

SEQ ID NO: 232900 - RNA, 21 nt, Human
uucaggcuacaaaaaccuucu

SEQ ID NO: 232901 - RNA, 24 nt, Human
uucaucuguugcccaggcuggagu

SEQ ID NO: 232902 - RNA, 18 nt, Human
uucaucuuccauguuuga

SEQ ID NO: 232903 - RNA, 20 nt, Human
uucaucuuccauguuugagg

SEQ ID NO: 232904 - RNA, 24 nt, Human
uugcccaggcuggagugcaguggc

SEQ ID NO: 232905 - RNA, 24 nt, Human
uuguagagaugggaucucgcuuug

SEQ ID NO: 232906 - RNA, 23 nt, Human
uuguauuuuuaguagagacgggg

SEQ ID NO: 232907 - RNA, 28 nt, Human
uuuauauauauguguguauauauauauu

SEQ ID NO: 232908 - RNA, 20 nt, Human
uuuauuuauuuuuuuuauag

SEQ ID NO: 232909 - RNA, 25 nt, Human
uuuguagagaugggaucucgcuuug

SEQ ID NO: 232910 - RNA, 24 nt, Human
uuuuuaguagagacgggguuucac

SEQ ID NO: 232911 - RNA, 23 nt, Human
uuuuuguagagaugggaucucgc

SEQ ID NO: 232912 - RNA, 21 nt, Human
uuuuuguauuuuuaguagaga

SEQ ID NO: 232913 - RNA, 24 nt, Human
uuuuuuguauuuuuaguagagacg

SEQ ID NO: 232914 - RNA, 21 nt, Human
aaggggaccggagggcaaggg

SEQ ID NO: 232915 - RNA, 21 nt, Human
accagugcauaggaaaaaaga

SEQ ID NO: 232916 - RNA, 25 nt, Human
acuuccaagcacuuccgagugagug

SEQ ID NO: 232917 - RNA, 20 nt, Human
aggaaaaaagaagugucaac

SEQ ID NO: 232918 - RNA, 21 nt, Human
agggcagguggcagcagcagg

SEQ ID NO: 232919 - RNA, 24 nt, Human
caacaauuuggcugccaggcacac

SEQ ID NO: 232920 - RNA, 22 nt, Human
caauagcugggguucaggacac

SEQ ID NO: 232921 - RNA, 21 nt, Human
cagcagcagggcuaugggugg

SEQ ID NO: 232922 - RNA, 20 nt, Human
cagcagcagguaacuggagg

SEQ ID NO: 232923 - RNA, 21 nt, Human
cagcagggcuauggguggucu

SEQ ID NO: 232924 - RNA, 25 nt, Human
cagggcccucccccccgaggcccga

SEQ ID NO: 232925 - RNA, 20 nt, Human
ccaagcacuuccgagugagu

SEQ ID NO: 232926 - RNA, 21 nt, Human
ccaauagcugggguucaggac

SEQ ID NO: 232927 - RNA, 26 nt, Human
ccagccccgaccccagcagcagguaa

SEQ ID NO: 232928 - RNA, 27 nt, Human
cgugcagggcccucccccccgaggccc

SEQ ID NO: 232929 - RNA, 21 nt, Human
cuaaccaggcugaacggcccc

SEQ ID NO: 232930 - RNA, 23 nt, Human
cuauuccuggaacaaagacaagc

SEQ ID NO: 232931 - RNA, 23 nt, Human
cucggaguagguagaaaacuaac

SEQ ID NO: 232932 - RNA, 22 nt, Human
cugcagcaaucugguggggcag

SEQ ID NO: 232933 - RNA, 20 nt, Human
cugccaggcacaccgcgccc

SEQ ID NO: 232934 - RNA, 20 nt, Human
gagggaucccggggauggcc

SEQ ID NO: 232935 - RNA, 18 nt, Human
gagggcaagggggagagc

SEQ ID NO: 232936 - RNA, 19 nt, Human
gcagcagcagggcuauggg

SEQ ID NO: 232937 - RNA, 20 nt, Human
gcggguagguaaggggaccg

SEQ ID NO: 232938 - RNA, 21 nt, Human
ggagagcaguggcuccuggcg

SEQ ID NO: 232939 - RNA, 21 nt, Human
ggagggcaagggggagagcag

SEQ ID NO: 232940 - RNA, 20 nt, Human
ggcagcagcagggcuauggg

SEQ ID NO: 232941 - RNA, 21 nt, Human
gggaucccggggauggccagg

SEQ ID NO: 232942 - RNA, 21 nt, Human
gggugagggcugcggggaggg

SEQ ID NO: 232943 - RNA, 18 nt, Human
guggucugcgcaguuugu

SEQ ID NO: 232944 - RNA, 20 nt, Human
ucagggguuggugagcuguc

SEQ ID NO: 232945 - RNA, 23 nt, Human
uccagguaguauugaggagcuuc

SEQ ID NO: 232946 - RNA, 20 nt, Human
ucucugggaagauguaagcc

SEQ ID NO: 232947 - RNA, 23 nt, Human
ucucugggaagauguaagccugg

SEQ ID NO: 232948 - RNA, 24 nt, Human
ugaggagcugggcugagugcuugu

SEQ ID NO: 232949 - RNA, 21 nt, Human
ugaggcuccagccccgacccc

SEQ ID NO: 232950 - RNA, 23 nt, Human
ugaggcuccagccccgaccccag

SEQ ID NO: 232951 - RNA, 21 nt, Human
ugaguggaugugaaguggcca

SEQ ID NO: 232952 - RNA, 23 nt, Human
ugccaggcacaccgcgccccugc

SEQ ID NO: 232953 - RNA, 24 nt, Human
ugcggggaggggguggcggcgugc

SEQ ID NO: 232954 - RNA, 19 nt, Human
ugcguguccacggaggcgc

SEQ ID NO: 232955 - RNA, 22 nt, Human
uggaaggacaggacucggcucg

SEQ ID NO: 232956 - RNA, 18 nt, Human
uggcagcagcagggcuau

SEQ ID NO: 232957 - RNA, 23 nt, Human
uggcauuuuccagguugguccuc

SEQ ID NO: 232958 - RNA, 18 nt, Human
uggcggcgugcagggccc

SEQ ID NO: 232959 - RNA, 19 nt, Human
ugggaagauguaagccugg

SEQ ID NO: 232960 - RNA, 21 nt, Human
uggggcaggggaggacacucg

SEQ ID NO: 232961 - RNA, 21 nt, Human
uggguggucugcgcaguuugu

SEQ ID NO: 232962 - RNA, 20 nt, Human
uguaaaaccagugcauagga

SEQ ID NO: 232963 - RNA, 18 nt, Human
uguuuuguuuuuaaguac

SEQ ID NO: 232964 - RNA, 18 nt, Human
uuccagguaguauugagg

SEQ ID NO: 232965 - RNA, 27 nt, Human
uuuccagguaguauugaggagcugggc

SEQ ID NO: 232966 - RNA, 19 nt, Human
uuuuuuuuuucuuuuuuua

SEQ ID NO: 232967 - RNA, 21 nt, Human
aaaaaguuuaagaggauggag

SEQ ID NO: 232968 - RNA, 18 nt, Human
aagaggauggagcaaguc

SEQ ID NO: 232969 - RNA, 22 nt, Human
aagcaaccaguucacaugaaca

SEQ ID NO: 232970 - RNA, 21 nt, Human
acagaucaaagagcccgaagc

SEQ ID NO: 232971 - RNA, 22 nt, Human
auacaggcaugcaauguguaau

SEQ ID NO: 232972 - RNA, 19 nt, Human
caucagagugacaaugagu

SEQ ID NO: 232973 - RNA, 18 nt, Human
cuuugaagaauauucaag

SEQ ID NO: 232974 - RNA, 22 nt, Human
gacagaucaaagagcccgaagc

SEQ ID NO: 232975 - RNA, 26 nt, Human
gagcaagucaaguucuaauauuccau

SEQ ID NO: 232976 - RNA, 24 nt, Human
gaucaaagagcccgaagcaaccag

SEQ ID NO: 232977 - RNA, 23 nt, Human
gugagacacaaaaaguuuaagag

SEQ ID NO: 232978 - RNA, 21 nt, Human
uaaaaaauaaaaccacucaga

SEQ ID NO: 232979 - RNA, 20 nt, Human
uaauaaucaugucauggaaa

SEQ ID NO: 232980 - RNA, 20 nt, Human
uagaguugcccccacacucu

SEQ ID NO: 232981 - RNA, 21 nt, Human
uagaguugcccccacacucuc

SEQ ID NO: 232982 - RNA, 24 nt, Human
uagaucuuugggacugagaaaucu

SEQ ID NO: 232983 - RNA, 22 nt, Human
uccauggauagcuauuugauuu

SEQ ID NO: 232984 - RNA, 24 nt, Human
ucuaaaaaauaaaaccacucagau

SEQ ID NO: 232985 - RNA, 20 nt, Human
ucuuagaucuuugggacuga

SEQ ID NO: 232986 - RNA, 18 nt, Human
ucuuugggacugagaaau

SEQ ID NO: 232987 - RNA, 20 nt, Human
uggguacauagguguauaug

SEQ ID NO: 232988 - RNA, 21 nt, Human
uuuaagaggauggagcaaguc

SEQ ID NO: 232989 - RNA, 19 nt, Human
uuugugaacacaaauuucu

SEQ ID NO: 232990 - RNA, 22 nt, Human
aaaaaaagaaaaagaaaaagga

SEQ ID NO: 232991 - RNA, 25 nt, Human
aaaaaaagaaaagaagaaaacagaa

SEQ ID NO: 232992 - RNA, 26 nt, Human
aaaaaagaaaagaagaaaacagaaga

SEQ ID NO: 232993 - RNA, 21 nt, Human
aaaaagaaaaaggagccaccc

SEQ ID NO: 232994 - RNA, 21 nt, Human
aaaaaggagccacccacggug

SEQ ID NO: 232995 - RNA, 18 nt, Human
aaaagaaaaagaaaaagg

SEQ ID NO: 232996 - RNA, 20 nt, Human
aaaagaaaaagaaaaaggag

SEQ ID NO: 232997 - RNA, 24 nt, Human
aaaagaaagaaaaaugaagcagaa

SEQ ID NO: 232998 - RNA, 24 nt, Human
aaaagaagaaaacagaagaaaaaa

SEQ ID NO: 232999 - RNA, 22 nt, Human
aaacagaagaaaaaauaaacug

SEQ ID NO: 233000 - RNA, 23 nt, Human
aaacagaagaaaaaauaaacuga

SEQ ID NO: 233001 - RNA, 23 nt, Human
aaacagauacaaauacagaacau

SEQ ID NO: 233002 - RNA, 25 nt, Human
aaaucccacuaauuggcuaauaaaa

SEQ ID NO: 233003 - RNA, 18 nt, Human
aaaugcagccaaguuacc

SEQ ID NO: 233004 - RNA, 23 nt, Human
aacaagggggugauaaggaaaga

SEQ ID NO: 233005 - RNA, 22 nt, Human
aacucuuccaugaacuccucca

SEQ ID NO: 233006 - RNA, 19 nt, Human
aacuuggcucuugcaguag

SEQ ID NO: 233007 - RNA, 22 nt, Human
aagaaaagaagaaaacagaaga

SEQ ID NO: 233008 - RNA, 19 nt, Human
aagaagaaaacagaagaaa

SEQ ID NO: 233009 - RNA, 20 nt, Human
aagaagaaaacagaagaaaa

SEQ ID NO: 233010 - RNA, 20 nt, Human
aagaagaaaacagaagaaaa

SEQ ID NO: 233011 - RNA, 21 nt, Human
aaucuccgcuccgcuguggga

SEQ ID NO: 233012 - RNA, 21 nt, Human
acaggcaauucacagagaagc

SEQ ID NO: 233013 - RNA, 22 nt, Human
accccgcgaccccgcgucgccg

SEQ ID NO: 233014 - RNA, 25 nt, Human
agaaaaaugaagcagaaacaaagag

SEQ ID NO: 233015 - RNA, 19 nt, Human
agaaaagaaaagaaagaaa

SEQ ID NO: 233016 - RNA, 22 nt, Human
agaaaagaagaaaacagaagaa

SEQ ID NO: 233017 - RNA, 18 nt, Human
agaaacaaagagggaacc

SEQ ID NO: 233018 - RNA, 23 nt, Human
agaagccacuuaccagacaagcu

SEQ ID NO: 233019 - RNA, 27 nt, Human
agacagagggguaacucaagggugggg

SEQ ID NO: 233020 - RNA, 21 nt, Human
agagguccuggggucgcugcc

SEQ ID NO: 233021 - RNA, 18 nt, Human
agccggagcagcugccgc

SEQ ID NO: 233022 - RNA, 18 nt, Human
agcugccccacagccugc

SEQ ID NO: 233023 - RNA, 19 nt, Human
aggaggguccggcggcgcg

SEQ ID NO: 233024 - RNA, 20 nt, Human
aggaggguccggcggcgcgu

SEQ ID NO: 233025 - RNA, 18 nt, Human
aguagacgaaagaggggu

SEQ ID NO: 233026 - RNA, 26 nt, Human
auaaaaacagauacaaauacagaaca

SEQ ID NO: 233027 - RNA, 21 nt, Human
augugcuuuuacauuuccuuu

SEQ ID NO: 233028 - RNA, 19 nt, Human
caaacuggaaugacaaacg

SEQ ID NO: 233029 - RNA, 19 nt, Human
caacagcaggaaagacaga

SEQ ID NO: 233030 - RNA, 24 nt, Human
cagaaacaaagagggaacucuucc

SEQ ID NO: 233031 - RNA, 21 nt, Human
cagaagagguccuggggucgc

SEQ ID NO: 233032 - RNA, 21 nt, Human
cagccggagcagcugccgcgg

SEQ ID NO: 233033 - RNA, 19 nt, Human
caggaaagacagaggggua

SEQ ID NO: 233034 - RNA, 22 nt, Human
caggguaaaauugaugucagug

SEQ ID NO: 233035 - RNA, 24 nt, Human
ccacuggggugcugauggauagcu

SEQ ID NO: 233036 - RNA, 23 nt, Human
cccaaagugcagaggaggguccg

SEQ ID NO: 233037 - RNA, 19 nt, Human
cccacagccugcuagcauu

SEQ ID NO: 233038 - RNA, 18 nt, Human
ccccgaggccgaagggcc

SEQ ID NO: 233039 - RNA, 20 nt, Human
ccgaggccgaagggcacugg

SEQ ID NO: 233040 - RNA, 26 nt, Human
ccggcagccggagcagcugccgcggc

SEQ ID NO: 233041 - RNA, 18 nt, Human
cgcccgccccgaggccga

SEQ ID NO: 233042 - RNA, 24 nt, Human
cgccgggauuugcgcgcggagaac

SEQ ID NO: 233043 - RNA, 19 nt, Human
cggaagcggggcgggcgag

SEQ ID NO: 233044 - RNA, 21 nt, Human
cggccgccgcgcuuucccgcu

SEQ ID NO: 233045 - RNA, 18 nt, Human
cgugcagcaggacagcgg

SEQ ID NO: 233046 - RNA, 27 nt, Human
cucuccacuguaguuaccccggaugcc

SEQ ID NO: 233047 - RNA, 18 nt, Human
cugaaauagggcugccaa

SEQ ID NO: 233048 - RNA, 24 nt, Human
cugcaaaccagucugcugaacgca

SEQ ID NO: 233049 - RNA, 21 nt, Human
gaaaugaaaauucacugcaaa

SEQ ID NO: 233050 - RNA, 20 nt, Human
gacaggcaaaugcagccaag

SEQ ID NO: 233051 - RNA, 19 nt, Human
gaggaaaggagaguuggaa

SEQ ID NO: 233052 - RNA, 28 nt, Human
gcaacagcaggaaagacagagggguaac

SEQ ID NO: 233053 - RNA, 20 nt, Human
gccccgaggccgaagggcac

SEQ ID NO: 233054 - RNA, 18 nt, Human
gcccgaaucccggcggcc

SEQ ID NO: 233055 - RNA, 23 nt, Human
gccgccgcgcuuucccgcuucgg

SEQ ID NO: 233056 - RNA, 23 nt, Human
gcgcaacagcaggaaagacagag

SEQ ID NO: 233057 - RNA, 21 nt, Human
gcggaagcggggcgggcgagc

SEQ ID NO: 233058 - RNA, 21 nt, Human
gcugccuuggcuuugcacguu

SEQ ID NO: 233059 - RNA, 19 nt, Human
ggaacucuuccaugaacuc

SEQ ID NO: 233060 - RNA, 24 nt, Human
ggagcacgccuccccaaagugcag

SEQ ID NO: 233061 - RNA, 20 nt, Human
ggcgacuccgggggcgucug

SEQ ID NO: 233062 - RNA, 18 nt, Human
gggaggaaaggagaguug

SEQ ID NO: 233063 - RNA, 24 nt, Human
gggcggaagcggggcgggcgagcg

SEQ ID NO: 233064 - RNA, 21 nt, Human
gggcgucugcgcggcgcgcgc

SEQ ID NO: 233065 - RNA, 19 nt, Human
ggggaggaaaggagaguug

SEQ ID NO: 233066 - RNA, 23 nt, Human
ggggaucugggcagaagggcccc

SEQ ID NO: 233067 - RNA, 20 nt, Human
ggggcgggcgagcgcggggc

SEQ ID NO: 233068 - RNA, 27 nt, Human
ggugauaaggaaagaaaagggagggcc

SEQ ID NO: 233069 - RNA, 19 nt, Human
ggugcugauggauagcugg

SEQ ID NO: 233070 - RNA, 24 nt, Human
gugggaaaaaaagaaaaagaaaaa

SEQ ID NO: 233071 - RNA, 19 nt, Human
uaacaauucaagugcuggg

SEQ ID NO: 233072 - RNA, 19 nt, Human
uaacgaaacguccacuucc

SEQ ID NO: 233073 - RNA, 23 nt, Human
uaccaacagagugggguuuggcu

SEQ ID NO: 233074 - RNA, 26 nt, Human
uagcugguugcuggcuccaguugcgc

SEQ ID NO: 233075 - RNA, 23 nt, Human
uaggagaaaagaaaagaaagaaa

SEQ ID NO: 233076 - RNA, 22 nt, Human
ucaagggugggggaggaaagga

SEQ ID NO: 233077 - RNA, 23 nt, Human
ucaagggugggggaggaaaggag

SEQ ID NO: 233078 - RNA, 18 nt, Human
uccgcggaaacccucucc

SEQ ID NO: 233079 - RNA, 19 nt, Human
uccgcggaaacccucucca

SEQ ID NO: 233080 - RNA, 24 nt, Human
uccuggggucgcugccuuggcuuu

SEQ ID NO: 233081 - RNA, 24 nt, Human
ucuccgcggaaacccucuccacug

SEQ ID NO: 233082 - RNA, 22 nt, Human
ugaagggugggaaaaaaagaaa

SEQ ID NO: 233083 - RNA, 19 nt, Human
ugauaaggaaagaaaugaa

SEQ ID NO: 233084 - RNA, 20 nt, Human
ugcaagaugcucugggaagu

SEQ ID NO: 233085 - RNA, 20 nt, Human
ugcuaccaacagaguggggu

SEQ ID NO: 233086 - RNA, 23 nt, Human
ugcuagcauucucaugugcuuuu

SEQ ID NO: 233087 - RNA, 19 nt, Human
uggaaggguucgugcagca

SEQ ID NO: 233088 - RNA, 22 nt, Human
uggaaugacaaacguuaggaug

SEQ ID NO: 233089 - RNA, 18 nt, Human
ugggaaaaaaagaaaaag

SEQ ID NO: 233090 - RNA, 21 nt, Human
ugggaagugcacgcagauaug

SEQ ID NO: 233091 - RNA, 24 nt, Human
ugggaagugcacgcagauaugggg

SEQ ID NO: 233092 - RNA, 22 nt, Human
ugggcuuuuuacaacaaggggg

SEQ ID NO: 233093 - RNA, 22 nt, Human
uggggggagaaaagcugcucag

SEQ ID NO: 233094 - RNA, 19 nt, Human
uuaaaaaagcaaaaaaaaa

SEQ ID NO: 233095 - RNA, 21 nt, Human
uuuaaaagcucauagcuagca

SEQ ID NO: 233096 - RNA, 20 nt, Human
uuuaggagaaaagaaaagaa

SEQ ID NO: 233097 - RNA, 24 nt, Human
uuuaggagaaaagaaaagaaagaa

SEQ ID NO: 233098 - RNA, 25 nt, Human
uuuaggagaaaagaaaagaaagaaa

SEQ ID NO: 233099 - RNA, 23 nt, Human
uuuuuuuuuuuuuuuuuuaaaug

SEQ ID NO: 233100 - RNA, 21 nt, Human
aagcagcaggcacaggaaggg

SEQ ID NO: 233101 - RNA, 25 nt, Human
aagcaggaggagggcagccaugugg

SEQ ID NO: 233102 - RNA, 21 nt, Human
aagccagcuccaggcccacgg

SEQ ID NO: 233103 - RNA, 21 nt, Human
aaggcaaacugugccagagac

SEQ ID NO: 233104 - RNA, 20 nt, Human
aaggcauuccuuagcaacaa

SEQ ID NO: 233105 - RNA, 23 nt, Human
aagggccagagccagacgguggg

SEQ ID NO: 233106 - RNA, 22 nt, Human
aagggccgguaguugccgaagc

SEQ ID NO: 233107 - RNA, 21 nt, Human
aaggugaucccauccccaggc

SEQ ID NO: 233108 - RNA, 25 nt, Human
aauuccugcuuggcuuuacuagggg

SEQ ID NO: 233109 - RNA, 20 nt, Human
acacugcaguugccagggaa

SEQ ID NO: 233110 - RNA, 18 nt, Human
acuacccccacaacagaa

SEQ ID NO: 233111 - RNA, 22 nt, Human
acucaguauauucagagaagcc

SEQ ID NO: 233112 - RNA, 18 nt, Human
acugcagcugucaggaac

SEQ ID NO: 233113 - RNA, 19 nt, Human
agaagcuggagcaggggcc

SEQ ID NO: 233114 - RNA, 18 nt, Human
agacccuccucugcacuc

SEQ ID NO: 233115 - RNA, 22 nt, Human
agaccgcggccggccagcauca

SEQ ID NO: 233116 - RNA, 20 nt, Human
agagaagccgccaaggaugg

SEQ ID NO: 233117 - RNA, 21 nt, Human
agagggcagggaggacacccc

SEQ ID NO: 233118 - RNA, 18 nt, Human
agauguuaagguccaacc

SEQ ID NO: 233119 - RNA, 24 nt, Human
agccaugaaaagccuugaagggcu

SEQ ID NO: 233120 - RNA, 18 nt, Human
agccccugccagacccuc

SEQ ID NO: 233121 - RNA, 23 nt, Human
agcuaggcggccugagcagcccc

SEQ ID NO: 233122 - RNA, 21 nt, Human
agcuggaaggcggccagcgcc

SEQ ID NO: 233123 - RNA, 19 nt, Human
agcuggaggucagggcacg

SEQ ID NO: 233124 - RNA, 25 nt, Human
aggaagaggcuucccacucccagga

SEQ ID NO: 233125 - RNA, 20 nt, Human
aggaaggugggugggcuggg

SEQ ID NO: 233126 - RNA, 18 nt, Human
aggcaauggggaggccag

SEQ ID NO: 233127 - RNA, 23 nt, Human
aggcauuccuuagcaacaaugcc

SEQ ID NO: 233128 - RNA, 25 nt, Human
aggccaaggcaaacugugccagaga

SEQ ID NO: 233129 - RNA, 23 nt, Human
aggcugugugucccacaucugcu

SEQ ID NO: 233130 - RNA, 18 nt, Human
agggaaguugugguuauc

SEQ ID NO: 233131 - RNA, 18 nt, Human
agggaggguggcccagag

SEQ ID NO: 233132 - RNA, 22 nt, Human
agguggccucugggcagagggc

SEQ ID NO: 233133 - RNA, 18 nt, Human
agguggcucagauggaag

SEQ ID NO: 233134 - RNA, 21 nt, Human
agguuguggcagggacccagg

SEQ ID NO: 233135 - RNA, 21 nt, Human
agugguggucccgacgcagga

SEQ ID NO: 233136 - RNA, 19 nt, Human
auacuuugauuuuguagga

SEQ ID NO: 233137 - RNA, 21 nt, Human
augaagcagcaggcacaggaa

SEQ ID NO: 233138 - RNA, 18 nt, Human
augaagccuugguggccu

SEQ ID NO: 233139 - RNA, 24 nt, Human
caacaggcuguucccccagccgca

SEQ ID NO: 233140 - RNA, 22 nt, Human
caaggcaaacugugccagagac

SEQ ID NO: 233141 - RNA, 20 nt, Human
cacccccgggucugcuucag

SEQ ID NO: 233142 - RNA, 20 nt, Human
cagaauucccgggaccagcu

SEQ ID NO: 233143 - RNA, 22 nt, Human
cagacccuccucugcacuccuc

SEQ ID NO: 233144 - RNA, 21 nt, Human
cagagacacucugccugugag

SEQ ID NO: 233145 - RNA, 20 nt, Human
cagcaagggaggguggccca

SEQ ID NO: 233146 - RNA, 23 nt, Human
cagccaggcccccucccgacgcc

SEQ ID NO: 233147 - RNA, 24 nt, Human
cagccaggcccccucccgacgccu

SEQ ID NO: 233148 - RNA, 19 nt, Human
cagccccugccagacccuc

SEQ ID NO: 233149 - RNA, 22 nt, Human
cagcgcacccgccacgcacgug

SEQ ID NO: 233150 - RNA, 24 nt, Human
cagcggcccagcaggcggcagugg

SEQ ID NO: 233151 - RNA, 20 nt, Human
cagcggcggcggcccgggac

SEQ ID NO: 233152 - RNA, 24 nt, Human
cagcugcgcgggcgccccguccgu

SEQ ID NO: 233153 - RNA, 23 nt, Human
cagcugucaggaacacaagggca

SEQ ID NO: 233154 - RNA, 20 nt, Human
caggaacacaagggcagucu

SEQ ID NO: 233155 - RNA, 18 nt, Human
caggacccucuccaaggu

SEQ ID NO: 233156 - RNA, 21 nt, Human
cagugguggucccgacgcagg

SEQ ID NO: 233157 - RNA, 25 nt, Human
caguguccgcugcguggaggcugac

SEQ ID NO: 233158 - RNA, 26 nt, Human
caguguccgcugcguggcggcaccug

SEQ ID NO: 233159 - RNA, 22 nt, Human
caguugcaggcaggguauuuag

SEQ ID NO: 233160 - RNA, 24 nt, Human
cauccucucucuagcagcuggagg

SEQ ID NO: 233161 - RNA, 20 nt, Human
ccaaggaagggguggaguug

SEQ ID NO: 233162 - RNA, 23 nt, Human
ccagacccuccucugcacuccuc

SEQ ID NO: 233163 - RNA, 23 nt, Human
ccagccccgcacagcagcgcacc

SEQ ID NO: 233164 - RNA, 25 nt, Human
ccagcggcggcggcccgggaccgag

SEQ ID NO: 233165 - RNA, 24 nt, Human
ccaggcccacggccgcggcccaca

SEQ ID NO: 233166 - RNA, 24 nt, Human
ccagggcugccguuuuuuuuuuuu

SEQ ID NO: 233167 - RNA, 22 nt, Human
cccaagcccuggacacguagga

SEQ ID NO: 233168 - RNA, 18 nt, Human
cccaagcuccgaccccac

SEQ ID NO: 233169 - RNA, 22 nt, Human
cccagaagcuggagcaggggcc

SEQ ID NO: 233170 - RNA, 26 nt, Human
cccagccccggcccagaccgcggccg

SEQ ID NO: 233171 - RNA, 24 nt, Human
cccagcggggccccagggcugccu

SEQ ID NO: 233172 - RNA, 21 nt, Human
ccccagccgcaguccaagccu

SEQ ID NO: 233173 - RNA, 20 nt, Human
cccccaagcuccgaccccac

SEQ ID NO: 233174 - RNA, 23 nt, Human
cccccagccgcaguccaagcccc

SEQ ID NO: 233175 - RNA, 18 nt, Human
cccccgggucugcuucag

SEQ ID NO: 233176 - RNA, 21 nt, Human
cccccucucaccccuuccucc

SEQ ID NO: 233177 - RNA, 19 nt, Human
ccccgcacagcagcgcacc

SEQ ID NO: 233178 - RNA, 21 nt, Human
ccccgcacagcagcgcacccg

SEQ ID NO: 233179 - RNA, 19 nt, Human
ccccugccagacccuccuc

SEQ ID NO: 233180 - RNA, 20 nt, Human
cccggcccagaccgcggccg

SEQ ID NO: 233181 - RNA, 21 nt, Human
cccguccgugcucccagccgc

SEQ ID NO: 233182 - RNA, 22 nt, Human
cccugcacagcucuggcucuuc

SEQ ID NO: 233183 - RNA, 22 nt, Human
ccgaagcccacgcagcggccca

SEQ ID NO: 233184 - RNA, 21 nt, Human
ccgagcaccagcacguaagcc

SEQ ID NO: 233185 - RNA, 21 nt, Human
ccgccacgcacguguccguca

SEQ ID NO: 233186 - RNA, 19 nt, Human
ccgggaccagcuggcagag

SEQ ID NO: 233187 - RNA, 23 nt, Human
ccucucaccccuuccucccugca

SEQ ID NO: 233188 - RNA, 24 nt, Human
ccucugcacuccucugccuaaguc

SEQ ID NO: 233189 - RNA, 21 nt, Human
ccugccagacccuccucugca

SEQ ID NO: 233190 - RNA, 25 nt, Human
cgacagccccagcagugggaaacac

SEQ ID NO: 233191 - RNA, 22 nt, Human
cgccagugggguccccaugauc

SEQ ID NO: 233192 - RNA, 23 nt, Human
cgccccguccgugcucccagccg

SEQ ID NO: 233193 - RNA, 21 nt, Human
cgccggcggcaugaagcagcg

SEQ ID NO: 233194 - RNA, 21 nt, Human
cggcaccuggcuuuggcauug

SEQ ID NO: 233195 - RNA, 18 nt, Human
cggcccagcaggcggcag

SEQ ID NO: 233196 - RNA, 21 nt, Human
cggcccgggaccgagcaccag

SEQ ID NO: 233197 - RNA, 23 nt, Human
cgggccaggggucccagcggcgg

SEQ ID NO: 233198 - RNA, 19 nt, Human
cucccaggaccugccccca

SEQ ID NO: 233199 - RNA, 25 nt, Human
cucccaggaccugcccccaagcuuu

SEQ ID NO: 233200 - RNA, 19 nt, Human
cucucaccccuuccucccu

SEQ ID NO: 233201 - RNA, 19 nt, Human
cugagcagccccugccaga

SEQ ID NO: 233202 - RNA, 19 nt, Human
cugcaaggcccgggccagg

SEQ ID NO: 233203 - RNA, 21 nt, Human
cugcacagcucuggcucuucc

SEQ ID NO: 233204 - RNA, 21 nt, Human
cugcccccaagcuccgacccc

SEQ ID NO: 233205 - RNA, 18 nt, Human
cuggccccgcagcagcag

SEQ ID NO: 233206 - RNA, 23 nt, Human
cugucagacuugcuagggcagca

SEQ ID NO: 233207 - RNA, 23 nt, Human
cuuucuggggaggagacagcaac

SEQ ID NO: 233208 - RNA, 20 nt, Human
gaaagacacaaggaagaggc

SEQ ID NO: 233209 - RNA, 22 nt, Human
gaagcuuaugcuuccuuccaag

SEQ ID NO: 233210 - RNA, 23 nt, Human
gaauuugcccaaaacccacugcc

SEQ ID NO: 233211 - RNA, 22 nt, Human
gacgagggcccagcggggcccc

SEQ ID NO: 233212 - RNA, 21 nt, Human
gacugcagcugucaggaacac

SEQ ID NO: 233213 - RNA, 18 nt, Human
gagaguccacagcuaugg

SEQ ID NO: 233214 - RNA, 19 nt, Human
gagccagacgagggcccag

SEQ ID NO: 233215 - RNA, 18 nt, Human
gagccccacguugcccag

SEQ ID NO: 233216 - RNA, 27 nt, Human
gaggagggcagccauguggaggggcgu

SEQ ID NO: 233217 - RNA, 25 nt, Human
gaggccaggaagggccagagccaga

SEQ ID NO: 233218 - RNA, 24 nt, Human
gcaaagaaagggaauuugcccaaa

SEQ ID NO: 233219 - RNA, 21 nt, Human
gcacccgccacgcacgugucc

SEQ ID NO: 233220 - RNA, 18 nt, Human
gcagcggcccagcaggcg

SEQ ID NO: 233221 - RNA, 18 nt, Human
gcaguccaagccccuggg

SEQ ID NO: 233222 - RNA, 18 nt, Human
gccacagccaugaaaagc

SEQ ID NO: 233223 - RNA, 21 nt, Human
gcccagccccggcccagaccu

SEQ ID NO: 233224 - RNA, 18 nt, Human
gcccccaagcuccgaccc

SEQ ID NO: 233225 - RNA, 18 nt, Human
gccgaagcccacgcagcg

SEQ ID NO: 233226 - RNA, 24 nt, Human
gccgaagcccacgcagcggcccag

SEQ ID NO: 233227 - RNA, 19 nt, Human
gccgacagugcagggccca

SEQ ID NO: 233228 - RNA, 19 nt, Human
gcgcgggcgccccguccgu

SEQ ID NO: 233229 - RNA, 19 nt, Human
gcucagauggaagccaugg

SEQ ID NO: 233230 - RNA, 19 nt, Human
ggagugcuggggucccgag

SEQ ID NO: 233231 - RNA, 24 nt, Human
ggaugcugggauccgagcgcagga

SEQ ID NO: 233232 - RNA, 21 nt, Human
ggcaaggccaaggaaggggug

SEQ ID NO: 233233 - RNA, 20 nt, Human
ggcaccuggcuuuggcauug

SEQ ID NO: 233234 - RNA, 22 nt, Human
ggcagggaggacacccccgggu

SEQ ID NO: 233235 - RNA, 18 nt, Human
ggccucugggcagagggc

SEQ ID NO: 233236 - RNA, 24 nt, Human
ggcugccguuuuuuuuuuuuuuuu

SEQ ID NO: 233237 - RNA, 23 nt, Human
gggccagagccagacgagggccc

SEQ ID NO: 233238 - RNA, 18 nt, Human
ggguauuuagcuggggaa

SEQ ID NO: 233239 - RNA, 21 nt, Human
gguaaggacucuuucugggga

SEQ ID NO: 233240 - RNA, 23 nt, Human
ggugggcugggugguacaguuca

SEQ ID NO: 233241 - RNA, 24 nt, Human
guccgugcucccagccgcccaggg

SEQ ID NO: 233242 - RNA, 21 nt, Human
gucuggccccgcagcagcagc

SEQ ID NO: 233243 - RNA, 21 nt, Human
gugcaacacuuuauugggaaa

SEQ ID NO: 233244 - RNA, 18 nt, Human
gugcuggggucccgaggu

SEQ ID NO: 233245 - RNA, 18 nt, Human
uaagcccagccccggccc

SEQ ID NO: 233246 - RNA, 20 nt, Human
uacacacggugaccugucaa

SEQ ID NO: 233247 - RNA, 19 nt, Human
uacccagaagcuggagcag

SEQ ID NO: 233248 - RNA, 22 nt, Human
uagcaauacaguggcucccuca

SEQ ID NO: 233249 - RNA, 22 nt, Human
uagcaguaagcccagccccggc

SEQ ID NO: 233250 - RNA, 22 nt, Human
uaggcgggcaggggcaaggcca

SEQ ID NO: 233251 - RNA, 20 nt, Human
uaggguaggaaggugggugg

SEQ ID NO: 233252 - RNA, 21 nt, Human
uauuagggcagugguaacaaa

SEQ ID NO: 233253 - RNA, 19 nt, Human
ucacagaauucccgggacc

SEQ ID NO: 233254 - RNA, 20 nt, Human
ucccgacgccugcuaguguc

SEQ ID NO: 233255 - RNA, 22 nt, Human
ucccgugggggugucacuaccc

SEQ ID NO: 233256 - RNA, 18 nt, Human
ucccuagcaacacggggg

SEQ ID NO: 233257 - RNA, 20 nt, Human
ucccuagcaacacgggggca

SEQ ID NO: 233258 - RNA, 20 nt, Human
uccgagcgcaggaagagccc

SEQ ID NO: 233259 - RNA, 21 nt, Human
uccucugcacuccucugccua

SEQ ID NO: 233260 - RNA, 21 nt, Human
uccuuuagcaaccaaacucag

SEQ ID NO: 233261 - RNA, 24 nt, Human
ucgcagcagggccgacagugcagg

SEQ ID NO: 233262 - RNA, 22 nt, Human
ucgcagugauuauuggagaagu

SEQ ID NO: 233263 - RNA, 23 nt, Human
ucuaggugugggggccccccucu

SEQ ID NO: 233264 - RNA, 23 nt, Human
ucucuggauacccagaagcugga

SEQ ID NO: 233265 - RNA, 23 nt, Human
ucugccugugagcaacaugagcc

SEQ ID NO: 233266 - RNA, 20 nt, Human
ucuggacaauacuuugauuu

SEQ ID NO: 233267 - RNA, 21 nt, Human
ugagcagccccugccagaccc

SEQ ID NO: 233268 - RNA, 23 nt, Human
ugaguccuuuagcaaccaaacuc

SEQ ID NO: 233269 - RNA, 24 nt, Human
ugaguccuuuagcaaccaaacuca

SEQ ID NO: 233270 - RNA, 22 nt, Human
ugcaaagaaagggaauuugccc

SEQ ID NO: 233271 - RNA, 18 nt, Human
ugcaaggcccgggccagg

SEQ ID NO: 233272 - RNA, 23 nt, Human
ugccagacccuccucugcacucc

SEQ ID NO: 233273 - RNA, 25 nt, Human
ugcccaaaacccacugcccaggggc

SEQ ID NO: 233274 - RNA, 21 nt, Human
ugcugggauccgagcgcagga

SEQ ID NO: 233275 - RNA, 27 nt, Human
uggaggggcgugugggcucgggagugc

SEQ ID NO: 233276 - RNA, 20 nt, Human
uggcaaaggggcagcuaggc

SEQ ID NO: 233277 - RNA, 18 nt, Human
uggcccucuggcugucag

SEQ ID NO: 233278 - RNA, 22 nt, Human
ugggaaagauuuacacacggug

SEQ ID NO: 233279 - RNA, 19 nt, Human
ugggcugggugguacaguu

SEQ ID NO: 233280 - RNA, 23 nt, Human
uggggaggagacagcagccuggu

SEQ ID NO: 233281 - RNA, 23 nt, Human
ugggguccccaugaucuuuguug

SEQ ID NO: 233282 - RNA, 24 nt, Human
uguaggcgggcaggggcaaggcca

SEQ ID NO: 233283 - RNA, 22 nt, Human
ugucauaggccaagcgaugaga

SEQ ID NO: 233284 - RNA, 18 nt, Human
uucacagaauucccggga

SEQ ID NO: 233285 - RNA, 24 nt, Human
uucacgguugcuagggagauguuc

SEQ ID NO: 233286 - RNA, 18 nt, Human
uucccacucccaggaccu

SEQ ID NO: 233287 - RNA, 18 nt, Human
uucccccagccgcagucc

SEQ ID NO: 233288 - RNA, 21 nt, Human
uuccuggucgcagugauuauu

SEQ ID NO: 233289 - RNA, 21 nt, Human
uuccuuagcaacaaugccuag

SEQ ID NO: 233290 - RNA, 21 nt, Human
uuuagaaaaaccuucaauucc

SEQ ID NO: 233291 - RNA, 20 nt, Human
uuuuuuuuuuuuaacaaguc

SEQ ID NO: 233292 - RNA, 18 nt, Human
uuuuuuuuuuuuucuuug

SEQ ID NO: 233293 - RNA, 24 nt, Human
uuuuuuuuuuuuuuuuuuaacaag

SEQ ID NO: 233294 - RNA, 21 nt, Human
aaacauuccccaccccugggg

SEQ ID NO: 233295 - RNA, 26 nt, Human
aaagaacccaccacacaaauguuauu

SEQ ID NO: 233296 - RNA, 21 nt, Human
aaagaccacucccuagcaguc

SEQ ID NO: 233297 - RNA, 24 nt, Human
aaagugcugggauuacaggcguga

SEQ ID NO: 233298 - RNA, 18 nt, Human
aacacugugauguaacau

SEQ ID NO: 233299 - RNA, 22 nt, Human
aagagccuggagaagcuggugc

SEQ ID NO: 233300 - RNA, 21 nt, Human
aagcgauucuccugucucagc

SEQ ID NO: 233301 - RNA, 23 nt, Human
aaggaccccugcucugaagaucg

SEQ ID NO: 233302 - RNA, 19 nt, Human
aagugcugggauuacaggc

SEQ ID NO: 233303 - RNA, 19 nt, Human
aagugcugggauuacaggc

SEQ ID NO: 233304 - RNA, 26 nt, Human
aagugcugggauuacaggcgugagcc

SEQ ID NO: 233305 - RNA, 21 nt, Human
aauuagccauugugccagguu

SEQ ID NO: 233306 - RNA, 19 nt, Human
aauucacaucccucaccuc

SEQ ID NO: 233307 - RNA, 19 nt, Human
acacaccaaaccuuccaac

SEQ ID NO: 233308 - RNA, 21 nt, Human
acacaccaaaccuuccaacaa

SEQ ID NO: 233309 - RNA, 23 nt, Human
acaccaaaccuuccaacaaaaca

SEQ ID NO: 233310 - RNA, 19 nt, Human
accaaggaccccugcucug

SEQ ID NO: 233311 - RNA, 22 nt, Human
accauguuggccaggaugcucg

SEQ ID NO: 233312 - RNA, 22 nt, Human
accccucugcccucucugaaau

SEQ ID NO: 233313 - RNA, 18 nt, Human
accuugugauccccccac

SEQ ID NO: 233314 - RNA, 24 nt, Human
accuugugauccccccaccuuggc

SEQ ID NO: 233315 - RNA, 18 nt, Human
acgggguuucaccauguu

SEQ ID NO: 233316 - RNA, 23 nt, Human
acgggguuucaccauguuggcca

SEQ ID NO: 233317 - RNA, 24 nt, Human
acgggguuucaccauguuggccag

SEQ ID NO: 233318 - RNA, 19 nt, Human
acucuccgccucccagguu

SEQ ID NO: 233319 - RNA, 24 nt, Human
acuuuuguguuuuuaguagagacg

SEQ ID NO: 233320 - RNA, 23 nt, Human
agaaaacacauucuagauccuuc

SEQ ID NO: 233321 - RNA, 22 nt, Human
agacaagaacuacaauuuggca

SEQ ID NO: 233322 - RNA, 27 nt, Human
agaccccuggcccuggcugaccccaag

SEQ ID NO: 233323 - RNA, 27 nt, Human
agagccuggagaagcugggaccaaagu

SEQ ID NO: 233324 - RNA, 25 nt, Human
aggccggagugcaguggcgcgaucu

SEQ ID NO: 233325 - RNA, 18 nt, Human
agggcaacaccauugcaa

SEQ ID NO: 233326 - RNA, 24 nt, Human
agucacaguagaaaugaaaccagu

SEQ ID NO: 233327 - RNA, 18 nt, Human
agugcaagcaggguuccc

SEQ ID NO: 233328 - RNA, 23 nt, Human
agugcaguggcgcgaucuuggcu

SEQ ID NO: 233329 - RNA, 24 nt, Human
agugcaguggcgcgaucuuggcuc

SEQ ID NO: 233330 - RNA, 18 nt, Human
agugcugggauuacaggc

SEQ ID NO: 233331 - RNA, 18 nt, Human
aguggcugggacuacagg

SEQ ID NO: 233332 - RNA, 19 nt, Human
aguggcugggacuacaggc

SEQ ID NO: 233333 - RNA, 22 nt, Human
aguggcuuagaggagucaggga

SEQ ID NO: 233334 - RNA, 21 nt, Human
aucagcuucuccaggcucuuu

SEQ ID NO: 233335 - RNA, 20 nt, Human
auccaccacccacuguguga

SEQ ID NO: 233336 - RNA, 21 nt, Human
aucccugagggcaggccucaa

SEQ ID NO: 233337 - RNA, 24 nt, Human
aucucgcucugucaucaggccgga

SEQ ID NO: 233338 - RNA, 21 nt, Human
caaagcaucagcuucuccagg

SEQ ID NO: 233339 - RNA, 24 nt, Human
caaagugcugggauuacaggcgug

SEQ ID NO: 233340 - RNA, 18 nt, Human
caacaaaacaggcuucuc

SEQ ID NO: 233341 - RNA, 23 nt, Human
caacaccauugcaaacacuguga

SEQ ID NO: 233342 - RNA, 18 nt, Human
caagccccaaauaggaac

SEQ ID NO: 233343 - RNA, 18 nt, Human
caagccccaaauaggaag

SEQ ID NO: 233344 - RNA, 18 nt, Human
caccauguuggccaggau

SEQ ID NO: 233345 - RNA, 22 nt, Human
caccauguuggccaggaugcuc

SEQ ID NO: 233346 - RNA, 18 nt, Human
caccgcacccggccaaac

SEQ ID NO: 233347 - RNA, 20 nt, Human
cacucaaaauggguucagcu

SEQ ID NO: 233348 - RNA, 22 nt, Human
cacuccuuccaaagaacccacc

SEQ ID NO: 233349 - RNA, 19 nt, Human
cacugugugauagcaaaaa

SEQ ID NO: 233350 - RNA, 19 nt, Human
cagcaggaugguggcagac

SEQ ID NO: 233351 - RNA, 24 nt, Human
caggaccaccugcuaaaggaguuu

SEQ ID NO: 233352 - RNA, 21 nt, Human
caggcgcccgccaccacgcuc

SEQ ID NO: 233353 - RNA, 19 nt, Human
cagggaaauugacagaguc

SEQ ID NO: 233354 - RNA, 23 nt, Human
cagggccagaaacuucucuccag

SEQ ID NO: 233355 - RNA, 18 nt, Human
cagggggugccuggccag

SEQ ID NO: 233356 - RNA, 18 nt, Human
caguagaaaugaaaccag

SEQ ID NO: 233357 - RNA, 19 nt, Human
caguggcgcgaucuuggcu

SEQ ID NO: 233358 - RNA, 18 nt, Human
cauccugguggccuggcc

SEQ ID NO: 233359 - RNA, 18 nt, Human
caugaaaaacauccuaag

SEQ ID NO: 233360 - RNA, 24 nt, Human
ccaaaccuccucuuucaucuuccu

SEQ ID NO: 233361 - RNA, 18 nt, Human
ccaaacuuuuuuuuuuuu

SEQ ID NO: 233362 - RNA, 22 nt, Human
ccaaagaacccaccacacaaau

SEQ ID NO: 233363 - RNA, 22 nt, Human
ccaaagugcugggauuacaggc

SEQ ID NO: 233364 - RNA, 22 nt, Human
ccaaagugcugggauuacaggc

SEQ ID NO: 233365 - RNA, 24 nt, Human
ccaaagugcugggauuacaggcgu

SEQ ID NO: 233366 - RNA, 24 nt, Human
ccacuggaguaaaaaccccccaag

SEQ ID NO: 233367 - RNA, 27 nt, Human
ccagaauaaaaugcagaauaaauaaag

SEQ ID NO: 233368 - RNA, 24 nt, Human
cccaaacauuccccaccccugggu

SEQ ID NO: 233369 - RNA, 20 nt, Human
cccaaagagccuggagaagc

SEQ ID NO: 233370 - RNA, 23 nt, Human
cccagguuuaagcgauucuccug

SEQ ID NO: 233371 - RNA, 26 nt, Human
ccccccaccuuggccucccaaagugc

SEQ ID NO: 233372 - RNA, 21 nt, Human
ccccugggcacggccccccuc

SEQ ID NO: 233373 - RNA, 23 nt, Human
cccgaguggcugggacuacaggc

SEQ ID NO: 233374 - RNA, 24 nt, Human
cccgaguggcugggacuacaggcg

SEQ ID NO: 233375 - RNA, 21 nt, Human
cccgccaccacgcucagcuaa

SEQ ID NO: 233376 - RNA, 20 nt, Human
cccucagcucauaccauuuc

SEQ ID NO: 233377 - RNA, 19 nt, Human
cccuccugucucuucuuuc

SEQ ID NO: 233378 - RNA, 27 nt, Human
ccgccucccagguuuaagcgauucuuu

SEQ ID NO: 233379 - RNA, 24 nt, Human
ccuccagugggaagggcauccugg

SEQ ID NO: 233380 - RNA, 24 nt, Human
ccucccagguuuaagcgauucucc

SEQ ID NO: 233381 - RNA, 18 nt, Human
ccucucugaaaucacccc

SEQ ID NO: 233382 - RNA, 21 nt, Human
ccuggagaagcuggugcuuug

SEQ ID NO: 233383 - RNA, 20 nt, Human
ccugguccuuggagauccac

SEQ ID NO: 233384 - RNA, 19 nt, Human
ccugguggccuggccuggg

SEQ ID NO: 233385 - RNA, 22 nt, Human
ccuucaaacucuaccucgaaac

SEQ ID NO: 233386 - RNA, 19 nt, Human
ccuuggugggaaucccaga

SEQ ID NO: 233387 - RNA, 19 nt, Human
cgaaacuccucuuuuccag

SEQ ID NO: 233388 - RNA, 18 nt, Human
cgagagaacuaacuggag

SEQ ID NO: 233389 - RNA, 22 nt, Human
cgagucacucaaaauggguuca

SEQ ID NO: 233390 - RNA, 18 nt, Human
cgcaagaucccugagggc

SEQ ID NO: 233391 - RNA, 24 nt, Human
cggagugcaguggcgcgaucuugg

SEQ ID NO: 233392 - RNA, 18 nt, Human
cucaaaauggguucagcu

SEQ ID NO: 233393 - RNA, 24 nt, Human
cucaccuccuucaaacucuaccuc

SEQ ID NO: 233394 - RNA, 22 nt, Human
cucagccucccgaguggcuggg

SEQ ID NO: 233395 - RNA, 24 nt, Human
cucagccucccgaguggcugggac

SEQ ID NO: 233396 - RNA, 21 nt, Human
cucuuugcuggguggaccccc

SEQ ID NO: 233397 - RNA, 21 nt, Human
cugcccucucugaaaucaccc

SEQ ID NO: 233398 - RNA, 22 nt, Human
cugcccucucugaaaucacccc

SEQ ID NO: 233399 - RNA, 21 nt, Human
cuggugcuuugcuucaaaucc

SEQ ID NO: 233400 - RNA, 23 nt, Human
cugucucagccucccgaguggcu

SEQ ID NO: 233401 - RNA, 21 nt, Human
cuuaccacugccccaacaaau

SEQ ID NO: 233402 - RNA, 24 nt, Human
cuuccaaagaacccaccacacaaa

SEQ ID NO: 233403 - RNA, 27 nt, Human
cuugugauccccccaccuuggccuccc

SEQ ID NO: 233404 - RNA, 22 nt, Human
cuuugcuucaaauccauccaga

SEQ ID NO: 233405 - RNA, 20 nt, Human
cuuuuguguuuuuaguagag

SEQ ID NO: 233406 - RNA, 23 nt, Human
gaaauugacagaguccuggauaa

SEQ ID NO: 233407 - RNA, 19 nt, Human
gaagaucgcagucaccagu

SEQ ID NO: 233408 - RNA, 21 nt, Human
gaccuugugauccccccaccu

SEQ ID NO: 233409 - RNA, 24 nt, Human
gacggaaucucgcucugucaucag

SEQ ID NO: 233410 - RNA, 24 nt, Human
gagacgggguuucaccauguuggc

SEQ ID NO: 233411 - RNA, 19 nt, Human
gagcuuaccacugccccaa

SEQ ID NO: 233412 - RNA, 19 nt, Human
gaucccugagggcaggccu

SEQ ID NO: 233413 - RNA, 26 nt, Human
gaucucacuccuuccaaagaacccac

SEQ ID NO: 233414 - RNA, 18 nt, Human
gauuacaggcgugagcca

SEQ ID NO: 233415 - RNA, 22 nt, Human
gauuacaggcgugagccaccgc

SEQ ID NO: 233416 - RNA, 23 nt, Human
gauuacaggcgugagccaccgca

SEQ ID NO: 233417 - RNA, 21 nt, Human
gauucuccugucucagccucc

SEQ ID NO: 233418 - RNA, 19 nt, Human
gcaaaaggcuuaagacacc

SEQ ID NO: 233419 - RNA, 22 nt, Human
gcagcccacucuuugcugggug

SEQ ID NO: 233420 - RNA, 21 nt, Human
gccaggccucacaaccccccu

SEQ ID NO: 233421 - RNA, 19 nt, Human
gccggagugcaguggcgcg

SEQ ID NO: 233422 - RNA, 24 nt, Human
gcgauucuccugucucagccuccc

SEQ ID NO: 233423 - RNA, 21 nt, Human
gcgcgaucuuggcucacugua

SEQ ID NO: 233424 - RNA, 21 nt, Human
gcugaccccaaagagccugga

SEQ ID NO: 233425 - RNA, 18 nt, Human
ggaguccuggcacucgcc

SEQ ID NO: 233426 - RNA, 23 nt, Human
ggagugcaguggcgcgaucuugg

SEQ ID NO: 233427 - RNA, 19 nt, Human
ggccuggccuggggagucc

SEQ ID NO: 233428 - RNA, 22 nt, Human
gggauuggaaacugcacuccag

SEQ ID NO: 233429 - RNA, 18 nt, Human
ggggucagccagggccag

SEQ ID NO: 233430 - RNA, 23 nt, Human
gggguuucaccauguuggccagg

SEQ ID NO: 233431 - RNA, 22 nt, Human
ggguuucaccauguuggccagg

SEQ ID NO: 233432 - RNA, 24 nt, Human
gguuucaccauguuggccaggaug

SEQ ID NO: 233433 - RNA, 21 nt, Human
guaauuuuggccuugcuuggg

SEQ ID NO: 233434 - RNA, 23 nt, Human
guagagacgggguuucaccaugu

SEQ ID NO: 233435 - RNA, 19 nt, Human
gucacaguagaaaugaaac

SEQ ID NO: 233436 - RNA, 23 nt, Human
gugcucagucuuaaaguuaacug

SEQ ID NO: 233437 - RNA, 19 nt, Human
guggauguggucuucaugg

SEQ ID NO: 233438 - RNA, 24 nt, Human
guucccugugggccccugggcacg

SEQ ID NO: 233439 - RNA, 26 nt, Human
uaacucacugcucacacuuuuaccuc

SEQ ID NO: 233440 - RNA, 24 nt, Human
uaacuuuuguguuuuuaguagaga

SEQ ID NO: 233441 - RNA, 22 nt, Human
uaagacggaaucucgcucuguc

SEQ ID NO: 233442 - RNA, 19 nt, Human
uacaggcgcccgccaccac

SEQ ID NO: 233443 - RNA, 23 nt, Human
uacaggcgugagccaccgcaccc

SEQ ID NO: 233444 - RNA, 20 nt, Human
uaccuggcucacguaaugcu

SEQ ID NO: 233445 - RNA, 22 nt, Human
uagagacgggguuucaccaugu

SEQ ID NO: 233446 - RNA, 18 nt, Human
uagcagucggagaaagcc

SEQ ID NO: 233447 - RNA, 24 nt, Human
uaguagagacgggguuucaccaug

SEQ ID NO: 233448 - RNA, 25 nt, Human
uaguagagacgggguuucaccaugu

SEQ ID NO: 233449 - RNA, 19 nt, Human
ucacacuuuuaccucugcc

SEQ ID NO: 233450 - RNA, 19 nt, Human
ucacaucccucaccuccuu

SEQ ID NO: 233451 - RNA, 18 nt, Human
ucacuccaugauaggaaa

SEQ ID NO: 233452 - RNA, 18 nt, Human
ucacuccuuccaaagaac

SEQ ID NO: 233453 - RNA, 23 nt, Human
ucacuguacucuccgccucccag

SEQ ID NO: 233454 - RNA, 24 nt, Human
ucacuguacucuccgccucccagg

SEQ ID NO: 233455 - RNA, 18 nt, Human
ucagaaaacacauucuag

SEQ ID NO: 233456 - RNA, 24 nt, Human
ucagacaagaacuacaauuuggca

SEQ ID NO: 233457 - RNA, 19 nt, Human
ucagccagacccaucuaug

SEQ ID NO: 233458 - RNA, 23 nt, Human
ucagccucccgaguggcugggac

SEQ ID NO: 233459 - RNA, 23 nt, Human
ucaggccggagugcaguggcgcg

SEQ ID NO: 233460 - RNA, 24 nt, Human
uccaaaggcucugccuaccccucu

SEQ ID NO: 233461 - RNA, 19 nt, Human
uccacacaccaaaccuucc

SEQ ID NO: 233462 - RNA, 21 nt, Human
uccacacaccaaaccuuccaa

SEQ ID NO: 233463 - RNA, 19 nt, Human
uccagaaagcgcucggucu

SEQ ID NO: 233464 - RNA, 24 nt, Human
ucccaaagugcugggauuacaggc

SEQ ID NO: 233465 - RNA, 24 nt, Human
ucccagaugcagcccacucuuugc

SEQ ID NO: 233466 - RNA, 19 nt, Human
ucccaggauggcuucuugg

SEQ ID NO: 233467 - RNA, 21 nt, Human
ucccagguuuaagcgauucuc

SEQ ID NO: 233468 - RNA, 24 nt, Human
ucccagguuuaagcgauucuccug

SEQ ID NO: 233469 - RNA, 19 nt, Human
uccccccaccuuggccucc

SEQ ID NO: 233470 - RNA, 24 nt, Human
ucccgaguggcugggacuacaggc

SEQ ID NO: 233471 - RNA, 23 nt, Human
ucccugagggcaggccucaaucu

SEQ ID NO: 233472 - RNA, 19 nt, Human
uccugucucuucuuucucu

SEQ ID NO: 233473 - RNA, 24 nt, Human
ucuccacacaccaaaccuuccaac

SEQ ID NO: 233474 - RNA, 18 nt, Human
ucuccagggggugccugg

SEQ ID NO: 233475 - RNA, 26 nt, Human
ucuccugucucagccucccgaguggc

SEQ ID NO: 233476 - RNA, 23 nt, Human
ucucgcucugucaucaggccgga

SEQ ID NO: 233477 - RNA, 22 nt, Human
ucugaaaucaccccuggucaca

SEQ ID NO: 233478 - RNA, 22 nt, Human
ucugcccaaacauuccccaccc

SEQ ID NO: 233479 - RNA, 20 nt, Human
ucugcccucucugaaaucac

SEQ ID NO: 233480 - RNA, 22 nt, Human
ucugcccucucugaaaucaccc

SEQ ID NO: 233481 - RNA, 18 nt, Human
ucugccuaccccucugcc

SEQ ID NO: 233482 - RNA, 27 nt, Human
ugaaaaacauccuaagcaauugcagaa

SEQ ID NO: 233483 - RNA, 18 nt, Human
ugaccuugugaucccccc

SEQ ID NO: 233484 - RNA, 18 nt, Human
ugagcaaaaggcuuaaga

SEQ ID NO: 233485 - RNA, 18 nt, Human
ugagcaaaaggcuuaaga

SEQ ID NO: 233486 - RNA, 25 nt, Human
ugagccaaucagacaagaacuacaa

SEQ ID NO: 233487 - RNA, 23 nt, Human
ugagugcgguuugaccacuggga

SEQ ID NO: 233488 - RNA, 21 nt, Human
ugauaggaaagaccacucccu

SEQ ID NO: 233489 - RNA, 22 nt, Human
ugcaagccccaaauaggaacac

SEQ ID NO: 233490 - RNA, 22 nt, Human
ugcaguggcgcgaucuuggcuc

SEQ ID NO: 233491 - RNA, 24 nt, Human
ugcugggauuacaggcgugagcca

SEQ ID NO: 233492 - RNA, 21 nt, Human
ugcugucaacugcaccaugca

SEQ ID NO: 233493 - RNA, 22 nt, Human
uggaagaguggcuuagaggagu

SEQ ID NO: 233494 - RNA, 25 nt, Human
uggaauucucagagggaaccuuguu

SEQ ID NO: 233495 - RNA, 19 nt, Human
uggagagccaccuuugcca

SEQ ID NO: 233496 - RNA, 21 nt, Human
uggccaggaugcucgccaucu

SEQ ID NO: 233497 - RNA, 24 nt, Human
uggccuggccuggggaguccuggc

SEQ ID NO: 233498 - RNA, 19 nt, Human
uggcugaccccaaagagcc

SEQ ID NO: 233499 - RNA, 23 nt, Human
uggcuguuauggucuuauguauu

SEQ ID NO: 233500 - RNA, 19 nt, Human
ugggaagggcauccuggug

SEQ ID NO: 233501 - RNA, 21 nt, Human
ugggaagggcauccugguggc

SEQ ID NO: 233502 - RNA, 21 nt, Human
ugggacuacaggcgcccgcca

SEQ ID NO: 233503 - RNA, 22 nt, Human
ugggacuacaggcgcccgccac

SEQ ID NO: 233504 - RNA, 24 nt, Human
ugggacuacaggcgcccgccacca

SEQ ID NO: 233505 - RNA, 19 nt, Human
ugggauuacaggcgugagc

SEQ ID NO: 233506 - RNA, 21 nt, Human
ugggauuacaggcgugagcca

SEQ ID NO: 233507 - RNA, 22 nt, Human
ugggauuacaggcgugagccac

SEQ ID NO: 233508 - RNA, 23 nt, Human
ugggauuacaggcgugagccacc

SEQ ID NO: 233509 - RNA, 24 nt, Human
ugggauuacaggcgugagccaccg

SEQ ID NO: 233510 - RNA, 18 nt, Human
ugggauuggaaacugcac

SEQ ID NO: 233511 - RNA, 22 nt, Human
ugggccccugggcacggccccc

SEQ ID NO: 233512 - RNA, 24 nt, Human
ugggugcagacaccuacauaugac

SEQ ID NO: 233513 - RNA, 23 nt, Human
ugguccugccaccuguuggcugu

SEQ ID NO: 233514 - RNA, 19 nt, Human
uggucuucauggaacuccu

SEQ ID NO: 233515 - RNA, 18 nt, Human
ugguggcagaccccaaac

SEQ ID NO: 233516 - RNA, 23 nt, Human
ugguggcagaccccaaaccuccu

SEQ ID NO: 233517 - RNA, 24 nt, Human
ugguggccuggccuggggaguccu

SEQ ID NO: 233518 - RNA, 24 nt, Human
ugucucagccucccgaguggcugg

SEQ ID NO: 233519 - RNA, 20 nt, Human
ugugggccccugggcacggc

SEQ ID NO: 233520 - RNA, 20 nt, Human
uguguugcugggaguuccug

SEQ ID NO: 233521 - RNA, 21 nt, Human
uguuacaaagugcaagcaggg

SEQ ID NO: 233522 - RNA, 24 nt, Human
uguuauggucuuauguauuuucuu

SEQ ID NO: 233523 - RNA, 18 nt, Human
uuaguagagacgggguuu

SEQ ID NO: 233524 - RNA, 22 nt, Human
uuaguagagacgggguuucacc

SEQ ID NO: 233525 - RNA, 24 nt, Human
uuaguagagacgggguuucaccau

SEQ ID NO: 233526 - RNA, 21 nt, Human
uuauggucuuauguauuuucu

SEQ ID NO: 233527 - RNA, 21 nt, Human
uucaagcaaaaggaggcuuag

SEQ ID NO: 233528 - RNA, 19 nt, Human
uuccaaagaacccaccaca

SEQ ID NO: 233529 - RNA, 19 nt, Human
uuccagcuuguguugcugg

SEQ ID NO: 233530 - RNA, 24 nt, Human
uuggaagaguggcuuagaggaguc

SEQ ID NO: 233531 - RNA, 18 nt, Human
uuggccucccaaagugcu

SEQ ID NO: 233532 - RNA, 20 nt, Human
uuuaagacggaaucucgcuc

SEQ ID NO: 233533 - RNA, 23 nt, Human
uuuaagcgauucuccugucucag

SEQ ID NO: 233534 - RNA, 24 nt, Human
uuuaagcgauucuccugucucagc

SEQ ID NO: 233535 - RNA, 19 nt, Human
uuucaccauguuggccagg

SEQ ID NO: 233536 - RNA, 20 nt, Human
uuucaccauguuggccagga

SEQ ID NO: 233537 - RNA, 24 nt, Human
uuuguguuuuuaguagagacgggg

SEQ ID NO: 233538 - RNA, 24 nt, Human
uuuuuaguagagacgggguuucac

SEQ ID NO: 233539 - RNA, 27 nt, Human
aaguacacccauaauccucuaaggcac

SEQ ID NO: 233540 - RNA, 20 nt, Human
acucugguuucuuuucucuc

SEQ ID NO: 233541 - RNA, 21 nt, Human
acuucagagaaguacacccau

SEQ ID NO: 233542 - RNA, 21 nt, Human
agaaguacacccauaauccuc

SEQ ID NO: 233543 - RNA, 23 nt, Human
agagaaguacacccauaauccuc

SEQ ID NO: 233544 - RNA, 26 nt, Human
cacccacaacuauaaucuauuacacu

SEQ ID NO: 233545 - RNA, 22 nt, Human
cagccugcccaagccagaccgg

SEQ ID NO: 233546 - RNA, 19 nt, Human
cauaagaaaagucagucca

SEQ ID NO: 233547 - RNA, 24 nt, Human
cccgggcagccugcccaagccaga

SEQ ID NO: 233548 - RNA, 27 nt, Human
cucugguuucuuuucucucucccaccc

SEQ ID NO: 233549 - RNA, 19 nt, Human
gcccaagccagaccggcuc

SEQ ID NO: 233550 - RNA, 25 nt, Human
gcccgggcagccugcccaagccaga

SEQ ID NO: 233551 - RNA, 18 nt, Human
ggccgcggcugcuuccgg

SEQ ID NO: 233552 - RNA, 21 nt, Human
ggccgcggcugcuuccggcuu

SEQ ID NO: 233553 - RNA, 19 nt, Human
gggccgcggcugcuuccgg

SEQ ID NO: 233554 - RNA, 23 nt, Human
uaaggcacaucccagcauaagaa

SEQ ID NO: 233555 - RNA, 20 nt, Human
ugcccaagccagaccggcuc

SEQ ID NO: 233556 - RNA, 25 nt, Human
ugcuuccggcuuccugccacggccc

SEQ ID NO: 233557 - RNA, 19 nt, Human
uuccugccacggcccgggc

SEQ ID NO: 233558 - RNA, 18 nt, Human
uuggacucugguuucuuu

SEQ ID NO: 233559 - RNA, 21 nt, Human
aaaauauuagaugagccacug

SEQ ID NO: 233560 - RNA, 25 nt, Human
aaauaacugaaagcugaaaccucuu

SEQ ID NO: 233561 - RNA, 24 nt, Human
aaauauuaguuaaggaucuaaaac

SEQ ID NO: 233562 - RNA, 19 nt, Human
aaaucuagaaaucaagguc

SEQ ID NO: 233563 - RNA, 23 nt, Human
aaaugcgcuucagagccccacca

SEQ ID NO: 233564 - RNA, 21 nt, Human
aaccgcacgugagaaccagca

SEQ ID NO: 233565 - RNA, 22 nt, Human
aagaaccccaaaugcgcuucag

SEQ ID NO: 233566 - RNA, 25 nt, Human
aagaaccccaaaugcgcuucagagc

SEQ ID NO: 233567 - RNA, 19 nt, Human
aagccgagaaagagcuccg

SEQ ID NO: 233568 - RNA, 25 nt, Human
aaggagcccaggggccugagccugc

SEQ ID NO: 233569 - RNA, 19 nt, Human
acagugaauccacugcagc

SEQ ID NO: 233570 - RNA, 20 nt, Human
acccagagggcacagggcaa

SEQ ID NO: 233571 - RNA, 21 nt, Human
accccaaaugcgcuucagagc

SEQ ID NO: 233572 - RNA, 25 nt, Human
accugcccacgcccuggccagccug

SEQ ID NO: 233573 - RNA, 24 nt, Human
agacugaaucuccauggaaugaug

SEQ ID NO: 233574 - RNA, 21 nt, Human
agcagggagacgucacucucc

SEQ ID NO: 233575 - RNA, 18 nt, Human
agccacugagaaucacca

SEQ ID NO: 233576 - RNA, 18 nt, Human
aggaggauggaggugcca

SEQ ID NO: 233577 - RNA, 19 nt, Human
aggcauugucugagugcag

SEQ ID NO: 233578 - RNA, 20 nt, Human
aggccguggcagccacacca

SEQ ID NO: 233579 - RNA, 21 nt, Human
agggagacgucacucuccaga

SEQ ID NO: 233580 - RNA, 20 nt, Human
agggguuccgggauuccaga

SEQ ID NO: 233581 - RNA, 22 nt, Human
auccagacacgauucuguggag

SEQ ID NO: 233582 - RNA, 22 nt, Human
aucgcccucacggcccuugcca

SEQ ID NO: 233583 - RNA, 18 nt, Human
cacaaugacccacaucca

SEQ ID NO: 233584 - RNA, 25 nt, Human
cacaaugacccacauccaacugaaa

SEQ ID NO: 233585 - RNA, 22 nt, Human
caccacaaagcaaucgcccuca

SEQ ID NO: 233586 - RNA, 23 nt, Human
caccucugucuccacaaugaccc

SEQ ID NO: 233587 - RNA, 19 nt, Human
cagcacucccagcagggag

SEQ ID NO: 233588 - RNA, 20 nt, Human
cagcagccagcucugugugg

SEQ ID NO: 233589 - RNA, 21 nt, Human
cagcugccucuggagccagga

SEQ ID NO: 233590 - RNA, 24 nt, Human
caggaggccguggcagccacacca

SEQ ID NO: 233591 - RNA, 25 nt, Human
caggggccugagccugcaacacugc

SEQ ID NO: 233592 - RNA, 21 nt, Human
caugggggcgccuuccugccu

SEQ ID NO: 233593 - RNA, 23 nt, Human
ccacaccacaguguggauccaga

SEQ ID NO: 233594 - RNA, 18 nt, Human
ccacugcagcccccgugg

SEQ ID NO: 233595 - RNA, 19 nt, Human
ccaggcugugucuccugac

SEQ ID NO: 233596 - RNA, 22 nt, Human
ccaggggaugcccugugccgga

SEQ ID NO: 233597 - RNA, 23 nt, Human
ccagggugacggcacagcaggag

SEQ ID NO: 233598 - RNA, 23 nt, Human
cccaagccaggcucaucccugac

SEQ ID NO: 233599 - RNA, 21 nt, Human
ccccaggggaugcccugugcc

SEQ ID NO: 233600 - RNA, 24 nt, Human
cccugugccggauccucaugccuc

SEQ ID NO: 233601 - RNA, 25 nt, Human
ccggcaccagcggcggccuuguccc

SEQ ID NO: 233602 - RNA, 20 nt, Human
ccucacggcccuugccaggg

SEQ ID NO: 233603 - RNA, 20 nt, Human
ccucuggaagccaacugucc

SEQ ID NO: 233604 - RNA, 21 nt, Human
ccucugucuccacaaugaccc

SEQ ID NO: 233605 - RNA, 21 nt, Human
cgagaaagagcuccgauacac

SEQ ID NO: 233606 - RNA, 24 nt, Human
cggcggcgcuucagacccggcccg

SEQ ID NO: 233607 - RNA, 21 nt, Human
cguccggaggcgcggggcggg

SEQ ID NO: 233608 - RNA, 21 nt, Human
cucaaaccucacauuagaagc

SEQ ID NO: 233609 - RNA, 23 nt, Human
cucagcgcccgccgcuggccagg

SEQ ID NO: 233610 - RNA, 22 nt, Human
cucuucccuggggacagggcag

SEQ ID NO: 233611 - RNA, 18 nt, Human
cugaaggagcccaggggc

SEQ ID NO: 233612 - RNA, 19 nt, Human
cugaccuuaaaaagaugag

SEQ ID NO: 233613 - RNA, 21 nt, Human
cugaccuuaaaaagaugagug

SEQ ID NO: 233614 - RNA, 22 nt, Human
cuggggacagggcagcacaguc

SEQ ID NO: 233615 - RNA, 24 nt, Human
gaagccccaggggaugcccugugc

SEQ ID NO: 233616 - RNA, 21 nt, Human
gaaggagcccaggggccugag

SEQ ID NO: 233617 - RNA, 21 nt, Human
gaauggaggcaucuucagccc

SEQ ID NO: 233618 - RNA, 22 nt, Human
gacacagccggcugggcaggag

SEQ ID NO: 233619 - RNA, 23 nt, Human
gacacagugaauccacugcagcc

SEQ ID NO: 233620 - RNA, 18 nt, Human
gaggaggccaggcugugu

SEQ ID NO: 233621 - RNA, 23 nt, Human
gaggcggcuggccucggacggga

SEQ ID NO: 233622 - RNA, 20 nt, Human
gauggcagacaccucugucu

SEQ ID NO: 233623 - RNA, 21 nt, Human
gcacagcagccagcucugugu

SEQ ID NO: 233624 - RNA, 20 nt, Human
gccaggaggccguggcagcc

SEQ ID NO: 233625 - RNA, 23 nt, Human
ggagacgucacucuccagaggcc

SEQ ID NO: 233626 - RNA, 18 nt, Human
ggagcccaggggccugag

SEQ ID NO: 233627 - RNA, 24 nt, Human
ggcaggaggauggagguggggacc

SEQ ID NO: 233628 - RNA, 26 nt, Human
gggcaggaggauggagguggggaccc

SEQ ID NO: 233629 - RNA, 21 nt, Human
gggccccucagcgcccgccgc

SEQ ID NO: 233630 - RNA, 18 nt, Human
ggggaggccaccccaccc

SEQ ID NO: 233631 - RNA, 20 nt, Human
gucccggcacagacguccgg

SEQ ID NO: 233632 - RNA, 22 nt, Human
uaaaaagaugagugugacacaa

SEQ ID NO: 233633 - RNA, 23 nt, Human
uaaaaagaugagugugacacaga

SEQ ID NO: 233634 - RNA, 21 nt, Human
uaaggaucuaaaacaaacuuc

SEQ ID NO: 233635 - RNA, 23 nt, Human
uaugcuuggaggccccuggaggu

SEQ ID NO: 233636 - RNA, 22 nt, Human
uauuuugucaaguuucuuuaau

SEQ ID NO: 233637 - RNA, 18 nt, Human
ucaagguccacaggcgaa

SEQ ID NO: 233638 - RNA, 22 nt, Human
ucaucccugacacagugaaucc

SEQ ID NO: 233639 - RNA, 22 nt, Human
uccacaaugacccacauccaac

SEQ ID NO: 233640 - RNA, 18 nt, Human
ucccuggggacagggcag

SEQ ID NO: 233641 - RNA, 24 nt, Human
uccucaaggacccggcaccagcgg

SEQ ID NO: 233642 - RNA, 22 nt, Human
uccugacgccccugaggguggg

SEQ ID NO: 233643 - RNA, 19 nt, Human
ucgccgucccggcggcgcu

SEQ ID NO: 233644 - RNA, 20 nt, Human
ucuaaaacaaacuucucaaa

SEQ ID NO: 233645 - RNA, 21 nt, Human
ucuccauggaaugaugaaaau

SEQ ID NO: 233646 - RNA, 23 nt, Human
ucucuucccuggggacagggcag

SEQ ID NO: 233647 - RNA, 18 nt, Human
ucuucagcccugaggagg

SEQ ID NO: 233648 - RNA, 18 nt, Human
ugaaggagcccaggggcc

SEQ ID NO: 233649 - RNA, 19 nt, Human
ugacacagccggcugggca

SEQ ID NO: 233650 - RNA, 19 nt, Human
ugaccuuaaaaagaugagu

SEQ ID NO: 233651 - RNA, 22 nt, Human
ugacggcacagcaggaggacag

SEQ ID NO: 233652 - RNA, 21 nt, Human
ugagaagggcaugcugcugug

SEQ ID NO: 233653 - RNA, 22 nt, Human
ugagacugaggccacacacaug

SEQ ID NO: 233654 - RNA, 21 nt, Human
ugagggugggcacagcagcca

SEQ ID NO: 233655 - RNA, 18 nt, Human
ugccaggaaccaaccuga

SEQ ID NO: 233656 - RNA, 22 nt, Human
ugccucuggagccaggaggccg

SEQ ID NO: 233657 - RNA, 19 nt, Human
ugccuuggcccggcccagc

SEQ ID NO: 233658 - RNA, 29 nt, Human
ugcgcugccuccuucuccgcggcggaacg

SEQ ID NO: 233659 - RNA, 28 nt, Human
uggaggccccuggagguaccgguagacc

SEQ ID NO: 233660 - RNA, 19 nt, Human
ugggaaacucugugccaau

SEQ ID NO: 233661 - RNA, 21 nt, Human
uggggacagggcagcacaguc

SEQ ID NO: 233662 - RNA, 20 nt, Human
uucagagccccaccaacccc

SEQ ID NO: 233663 - RNA, 20 nt, Human
uugacacugaaaucuagaaa

SEQ ID NO: 233664 - RNA, 22 nt, Human
uugccaggaaccaaccugaccu

SEQ ID NO: 233665 - RNA, 18 nt, Human
uugcugaaggagcccagg

SEQ ID NO: 233666 - RNA, 18 nt, Human
uuggcccggcccagcugc

SEQ ID NO: 233667 - RNA, 18 nt, Human
aaaagagcucugucauga

SEQ ID NO: 233668 - RNA, 20 nt, Human
aaagaagccauuucucaaag

SEQ ID NO: 233669 - RNA, 22 nt, Human
aacagcacaccucgucucccuu

SEQ ID NO: 233670 - RNA, 19 nt, Human
aagaaacccucaccuaaua

SEQ ID NO: 233671 - RNA, 24 nt, Human
aagaugggcagacugggacagcca

SEQ ID NO: 233672 - RNA, 22 nt, Human
aagccgcuggucccagagccaa

SEQ ID NO: 233673 - RNA, 19 nt, Human
aagcggcagagggcugggc

SEQ ID NO: 233674 - RNA, 20 nt, Human
aagugucaaugccugaccug

SEQ ID NO: 233675 - RNA, 22 nt, Human
acaugauugugcagcccuagga

SEQ ID NO: 233676 - RNA, 28 nt, Human
acccagaguaggaggcugcggcaucuuc

SEQ ID NO: 233677 - RNA, 18 nt, Human
accgcagccugccugcgu

SEQ ID NO: 233678 - RNA, 21 nt, Human
agaaagacaggaggacacaga

SEQ ID NO: 233679 - RNA, 25 nt, Human
agaaagacaggaggacacagacugg

SEQ ID NO: 233680 - RNA, 24 nt, Human
agaccagcacacagugggcaucuc

SEQ ID NO: 233681 - RNA, 21 nt, Human
agagcagccaggacaccuggg

SEQ ID NO: 233682 - RNA, 20 nt, Human
agagcgcugucucuggagga

SEQ ID NO: 233683 - RNA, 18 nt, Human
agagcucugucaugaccc

SEQ ID NO: 233684 - RNA, 22 nt, Human
agaggaaacugaggggcccgga

SEQ ID NO: 233685 - RNA, 23 nt, Human
agaggacuucagugggagacccc

SEQ ID NO: 233686 - RNA, 19 nt, Human
agcaccucggcuuuucccu

SEQ ID NO: 233687 - RNA, 20 nt, Human
agcaggagugucgggggugu

SEQ ID NO: 233688 - RNA, 23 nt, Human
agcccaccccuuccugggcccag

SEQ ID NO: 233689 - RNA, 24 nt, Human
agccgggccaggcgagccggcgcg

SEQ ID NO: 233690 - RNA, 18 nt, Human
agccguaugaccugggac

SEQ ID NO: 233691 - RNA, 20 nt, Human
agcgcaggggagggacaggg

SEQ ID NO: 233692 - RNA, 22 nt, Human
aggaaauaagaggugcagaagg

SEQ ID NO: 233693 - RNA, 23 nt, Human
aggaaggguggggagggaugggg

SEQ ID NO: 233694 - RNA, 23 nt, Human
aggaauugcaguggggcucaggg

SEQ ID NO: 233695 - RNA, 24 nt, Human
aggagggugggaaccgggugagaa

SEQ ID NO: 233696 - RNA, 19 nt, Human
aggagguggaggagggugg

SEQ ID NO: 233697 - RNA, 23 nt, Human
aggccacaugauugugcagcccu

SEQ ID NO: 233698 - RNA, 20 nt, Human
aggcccgccacucgcuagcc

SEQ ID NO: 233699 - RNA, 18 nt, Human
agggagggcuugggaggg

SEQ ID NO: 233700 - RNA, 21 nt, Human
agggcuugggaggggguacac

SEQ ID NO: 233701 - RNA, 20 nt, Human
aggggcccggaggagaggag

SEQ ID NO: 233702 - RNA, 20 nt, Human
aggguggggagggauggggc

SEQ ID NO: 233703 - RNA, 26 nt, Human
agguggaggagggugggaaccggguc

SEQ ID NO: 233704 - RNA, 18 nt, Human
aucucacccgugccccca

SEQ ID NO: 233705 - RNA, 19 nt, Human
augagaaagacaggaggac

SEQ ID NO: 233706 - RNA, 24 nt, Human
auggcguauguacaagcggcagag

SEQ ID NO: 233707 - RNA, 24 nt, Human
augggcagacugggacagccaucc

SEQ ID NO: 233708 - RNA, 23 nt, Human
caaaacuucaaaugcuucugcaa

SEQ ID NO: 233709 - RNA, 23 nt, Human
caagaaacccucaccuaauagca

SEQ ID NO: 233710 - RNA, 18 nt, Human
caaggcagacggagcucc

SEQ ID NO: 233711 - RNA, 18 nt, Human
cacacacaccacccgcca

SEQ ID NO: 233712 - RNA, 22 nt, Human
cacaguaacuuuccacuggccu

SEQ ID NO: 233713 - RNA, 20 nt, Human
cacagugggcaucucacccg

SEQ ID NO: 233714 - RNA, 24 nt, Human
cacagugggcaucucacccgugcc

SEQ ID NO: 233715 - RNA, 25 nt, Human
cacccaggccaaaaaugugaagggc

SEQ ID NO: 233716 - RNA, 23 nt, Human
cacccccccucaggacccagagu

SEQ ID NO: 233717 - RNA, 19 nt, Human
cacuggagggcagcaaagu

SEQ ID NO: 233718 - RNA, 19 nt, Human
cagacugggacagccaucc

SEQ ID NO: 233719 - RNA, 19 nt, Human
cagaguaggaggcugcggc

SEQ ID NO: 233720 - RNA, 21 nt, Human
cagauggggcuggccuggcag

SEQ ID NO: 233721 - RNA, 20 nt, Human
cagccccacccaggccaaaa

SEQ ID NO: 233722 - RNA, 18 nt, Human
cagcugccuggcgggugg

SEQ ID NO: 233723 - RNA, 21 nt, Human
cagcuguguccccuacccccu

SEQ ID NO: 233724 - RNA, 19 nt, Human
caggagcccgcuggcagug

SEQ ID NO: 233725 - RNA, 19 nt, Human
cagggaagggaacaggugc

SEQ ID NO: 233726 - RNA, 19 nt, Human
caguggggcucagggcucu

SEQ ID NO: 233727 - RNA, 19 nt, Human
cauccugcccacccacucc

SEQ ID NO: 233728 - RNA, 21 nt, Human
caucguucggcaaaagaaaac

SEQ ID NO: 233729 - RNA, 26 nt, Human
caucucacccgugcccccaaugccuu

SEQ ID NO: 233730 - RNA, 22 nt, Human
ccacccaggccaaaaaugugaa

SEQ ID NO: 233731 - RNA, 24 nt, Human
ccacccaggcccaggggcaagcgu

SEQ ID NO: 233732 - RNA, 23 nt, Human
ccacucagagccuuccuguaucc

SEQ ID NO: 233733 - RNA, 22 nt, Human
ccagauccugcccccaaccucc

SEQ ID NO: 233734 - RNA, 23 nt, Human
ccagcccaccccuuccugggccc

SEQ ID NO: 233735 - RNA, 21 nt, Human
ccagccccacccaggccaaaa

SEQ ID NO: 233736 - RNA, 23 nt, Human
ccagccggagggcccaaucacac

SEQ ID NO: 233737 - RNA, 18 nt, Human
ccauccugcccacccacu

SEQ ID NO: 233738 - RNA, 19 nt, Human
ccauccugcccacccacuc

SEQ ID NO: 233739 - RNA, 21 nt, Human
cccagccccacccaggccaaa

SEQ ID NO: 233740 - RNA, 22 nt, Human
cccauccugacucccucggaag

SEQ ID NO: 233741 - RNA, 21 nt, Human
cccaucugcagcuuccagaag

SEQ ID NO: 233742 - RNA, 24 nt, Human
ccccaaccuccagccacaugggcc

SEQ ID NO: 233743 - RNA, 22 nt, Human
ccccacccaggcccaggggcaa

SEQ ID NO: 233744 - RNA, 25 nt, Human
cccccaagcuuuuggcacucagccc

SEQ ID NO: 233745 - RNA, 23 nt, Human
cccccaguguggccuccugguuc

SEQ ID NO: 233746 - RNA, 19 nt, Human
cccccugcccucaccuccu

SEQ ID NO: 233747 - RNA, 21 nt, Human
cccccugcccucaccuccugc

SEQ ID NO: 233748 - RNA, 20 nt, Human
cccgccaguucuuggcuccu

SEQ ID NO: 233749 - RNA, 19 nt, Human
cccuacccccuuucuuaca

SEQ ID NO: 233750 - RNA, 20 nt, Human
cccuuggacccucaaaccca

SEQ ID NO: 233751 - RNA, 22 nt, Human
cccuuggacccucaaacccaga

SEQ ID NO: 233752 - RNA, 25 nt, Human
ccgaggaccugucccuccuccccca

SEQ ID NO: 233753 - RNA, 18 nt, Human
ccgcuggucccagagcca

SEQ ID NO: 233754 - RNA, 19 nt, Human
ccgggcccccaucugcagc

SEQ ID NO: 233755 - RNA, 26 nt, Human
ccucaaacccagaggagccuucagcc

SEQ ID NO: 233756 - RNA, 19 nt, Human
ccuccagccacaugggccc

SEQ ID NO: 233757 - RNA, 21 nt, Human
ccuccagguccaaaucccuag

SEQ ID NO: 233758 - RNA, 18 nt, Human
ccucggguuagggcugag

SEQ ID NO: 233759 - RNA, 21 nt, Human
ccugacccugcugccuacacu

SEQ ID NO: 233760 - RNA, 21 nt, Human
ccugagaucccagccgccugg

SEQ ID NO: 233761 - RNA, 21 nt, Human
ccugcccacccacuccaccug

SEQ ID NO: 233762 - RNA, 24 nt, Human
ccugcccagcuguguccccuaccc

SEQ ID NO: 233763 - RNA, 23 nt, Human
ccugcccccaaccuccagccaca

SEQ ID NO: 233764 - RNA, 26 nt, Human
ccugcccucaccuccugccccaaaag

SEQ ID NO: 233765 - RNA, 20 nt, Human
ccugccugcgucucuuccuu

SEQ ID NO: 233766 - RNA, 25 nt, Human
ccugccugcgucucuuccuuccucc

SEQ ID NO: 233767 - RNA, 22 nt, Human
ccugcgucucuuccuuccuccg

SEQ ID NO: 233768 - RNA, 18 nt, Human
ccuggauuggagauggaa

SEQ ID NO: 233769 - RNA, 18 nt, Human
cggcucagggagggcuug

SEQ ID NO: 233770 - RNA, 21 nt, Human
cggggcccccugcccucaccu

SEQ ID NO: 233771 - RNA, 21 nt, Human
cuacuucugacgccucuccug

SEQ ID NO: 233772 - RNA, 21 nt, Human
cuagcaacauccacugcagcc

SEQ ID NO: 233773 - RNA, 21 nt, Human
cucagccuuaggccuguggcc

SEQ ID NO: 233774 - RNA, 18 nt, Human
cucagggcucugccgggc

SEQ ID NO: 233775 - RNA, 23 nt, Human
cucccgggcccccaucugcagcc

SEQ ID NO: 233776 - RNA, 24 nt, Human
cuccuauugcccuuggccuccagg

SEQ ID NO: 233777 - RNA, 18 nt, Human
cuccugguucccucccca

SEQ ID NO: 233778 - RNA, 22 nt, Human
cucgguccugcaaccccaaaug

SEQ ID NO: 233779 - RNA, 21 nt, Human
cucucccaaaccaggcccugc

SEQ ID NO: 233780 - RNA, 21 nt, Human
cugaauaagcuucuaaauccc

SEQ ID NO: 233781 - RNA, 19 nt, Human
cugacccugcugccuacac

SEQ ID NO: 233782 - RNA, 20 nt, Human
cugcaauguuucuugaaagc

SEQ ID NO: 233783 - RNA, 18 nt, Human
cugcuaggcuucuccucc

SEQ ID NO: 233784 - RNA, 22 nt, Human
cuggcuguuagcaucagcugga

SEQ ID NO: 233785 - RNA, 18 nt, Human
cuggguggauuggcuccc

SEQ ID NO: 233786 - RNA, 19 nt, Human
cuggucccagagccaagag

SEQ ID NO: 233787 - RNA, 20 nt, Human
cuuggcuccuuuucucuuca

SEQ ID NO: 233788 - RNA, 22 nt, Human
cuuggcuucaggugggccaggg

SEQ ID NO: 233789 - RNA, 24 nt, Human
gaaaccagaaaucuugccucccag

SEQ ID NO: 233790 - RNA, 18 nt, Human
gaacaaaacuucaaaugc

SEQ ID NO: 233791 - RNA, 23 nt, Human
gaagaggaggagggcgaagccaa

SEQ ID NO: 233792 - RNA, 18 nt, Human
gaagccaagggagggucc

SEQ ID NO: 233793 - RNA, 20 nt, Human
gaccucaggaggccuggcug

SEQ ID NO: 233794 - RNA, 19 nt, Human
gagaaagacaggaggacac

SEQ ID NO: 233795 - RNA, 23 nt, Human
gaggaggagggcgaagccaaggg

SEQ ID NO: 233796 - RNA, 18 nt, Human
gaggccagagaugaggag

SEQ ID NO: 233797 - RNA, 22 nt, Human
gaggggcccggaggagaggagg

SEQ ID NO: 233798 - RNA, 19 nt, Human
gaguuggccacugcacaug

SEQ ID NO: 233799 - RNA, 19 nt, Human
gcaaccccaaaugccuccc

SEQ ID NO: 233800 - RNA, 22 nt, Human
gcaaccccaaaugccucccagg

SEQ ID NO: 233801 - RNA, 19 nt, Human
gccacccccccucaggacc

SEQ ID NO: 233802 - RNA, 20 nt, Human
gcccacccacuccaccugcc

SEQ ID NO: 233803 - RNA, 18 nt, Human
gcccagccccacccaggc

SEQ ID NO: 233804 - RNA, 22 nt, Human
gcccagccccacccaggccaaa

SEQ ID NO: 233805 - RNA, 18 nt, Human
gcccucaccuccugcccc

SEQ ID NO: 233806 - RNA, 20 nt, Human
gccuggaguuggccacugca

SEQ ID NO: 233807 - RNA, 19 nt, Human
gccuuaggccuguggcagc

SEQ ID NO: 233808 - RNA, 19 nt, Human
gcugccuggcggguggaga

SEQ ID NO: 233809 - RNA, 21 nt, Human
ggaaccagaaaccagaaaucu

SEQ ID NO: 233810 - RNA, 26 nt, Human
ggaaggguggggagggauggggcugg

SEQ ID NO: 233811 - RNA, 18 nt, Human
ggagaacuuggacaagua

SEQ ID NO: 233812 - RNA, 20 nt, Human
ggagaggagguggaggaggg

SEQ ID NO: 233813 - RNA, 19 nt, Human
ggagccccagggcaggccc

SEQ ID NO: 233814 - RNA, 24 nt, Human
ggaggaauugcaguggggcucagg

SEQ ID NO: 233815 - RNA, 21 nt, Human
ggaggagaggagguggaggag

SEQ ID NO: 233816 - RNA, 23 nt, Human
ggaggagaggagguggaggaggg

SEQ ID NO: 233817 - RNA, 23 nt, Human
ggaggccuggcuggggacgagcc

SEQ ID NO: 233818 - RNA, 20 nt, Human
ggauuggcuccccagcuccc

SEQ ID NO: 233819 - RNA, 20 nt, Human
ggcagagggcugggcugggc

SEQ ID NO: 233820 - RNA, 21 nt, Human
ggccauucacagcaagcagca

SEQ ID NO: 233821 - RNA, 24 nt, Human
ggcccagccccacccaggccaaaa

SEQ ID NO: 233822 - RNA, 26 nt, Human
ggcccuggcuguuagcaucagcugga

SEQ ID NO: 233823 - RNA, 18 nt, Human
ggcuccccagcucccacu

SEQ ID NO: 233824 - RNA, 18 nt, Human
ggcugaugagaagacagg

SEQ ID NO: 233825 - RNA, 22 nt, Human
ggcugaugagaagacagguccc

SEQ ID NO: 233826 - RNA, 18 nt, Human
ggcugcggcaucuucugc

SEQ ID NO: 233827 - RNA, 24 nt, Human
gggaaggggucccugaggcccggg

SEQ ID NO: 233828 - RNA, 18 nt, Human
gggagggauggggcuggg

SEQ ID NO: 233829 - RNA, 22 nt, Human
gggaggucugaggagagcucgg

SEQ ID NO: 233830 - RNA, 23 nt, Human
gggccauucacagcaagcagcag

SEQ ID NO: 233831 - RNA, 23 nt, Human
gggcccccugcccucaccuccug

SEQ ID NO: 233832 - RNA, 20 nt, Human
ggggagagagaagaggagga

SEQ ID NO: 233833 - RNA, 22 nt, Human
gggguguggcagcuggccuggg

SEQ ID NO: 233834 - RNA, 20 nt, Human
ggugacucucccaaaccagg

SEQ ID NO: 233835 - RNA, 23 nt, Human
ggugcggacacuggggaacuugc

SEQ ID NO: 233836 - RNA, 22 nt, Human
gguggcugaugagaagacaggu

SEQ ID NO: 233837 - RNA, 23 nt, Human
gucagauuccuggcugccuccag

SEQ ID NO: 233838 - RNA, 23 nt, Human
gugccucccgggcccccaucugc

SEQ ID NO: 233839 - RNA, 23 nt, Human
guggucucauuccggcccccacc

SEQ ID NO: 233840 - RNA, 21 nt, Human
guuugcuugaggcagcugugg

SEQ ID NO: 233841 - RNA, 19 nt, Human
uaagcuucuaaauccccag

SEQ ID NO: 233842 - RNA, 22 nt, Human
uacccuguuugcuugaggcagc

SEQ ID NO: 233843 - RNA, 24 nt, Human
uaggaaauaagaggugcagaaggg

SEQ ID NO: 233844 - RNA, 20 nt, Human
uaugcaaaaaucccaccccg

SEQ ID NO: 233845 - RNA, 24 nt, Human
ucacaccucacucagccuuaggcc

SEQ ID NO: 233846 - RNA, 23 nt, Human
ucacagaccccaggaaggugagg

SEQ ID NO: 233847 - RNA, 24 nt, Human
ucacagcaagcagcagacagcaca

SEQ ID NO: 233848 - RNA, 19 nt, Human
ucagcuggauggcuuccaa

SEQ ID NO: 233849 - RNA, 22 nt, Human
uccacugcagccgggccaggcg

SEQ ID NO: 233850 - RNA, 21 nt, Human
ucccagacucgugugugccuc

SEQ ID NO: 233851 - RNA, 23 nt, Human
uccccuacccccuuucuuacaaa

SEQ ID NO: 233852 - RNA, 23 nt, Human
uccccugcccuuccuacuucuga

SEQ ID NO: 233853 - RNA, 20 nt, Human
ucccgcccuauccuggcuau

SEQ ID NO: 233854 - RNA, 21 nt, Human
ucccgcccuauccuggcuaug

SEQ ID NO: 233855 - RNA, 19 nt, Human
ucccugaggcccggguggc

SEQ ID NO: 233856 - RNA, 19 nt, Human
ucccugaggcccggguggc

SEQ ID NO: 233857 - RNA, 24 nt, Human
ucccugaggcccggguggccgcuu

SEQ ID NO: 233858 - RNA, 19 nt, Human
ucccuggagcugugucugc

SEQ ID NO: 233859 - RNA, 26 nt, Human
uccugcaaccccaaaugccucccagg

SEQ ID NO: 233860 - RNA, 22 nt, Human
uccugcccacccacuccaccug

SEQ ID NO: 233861 - RNA, 19 nt, Human
uccugccccaaaagagcuc

SEQ ID NO: 233862 - RNA, 20 nt, Human
uccugggcccagccccaccc

SEQ ID NO: 233863 - RNA, 18 nt, Human
ucuccagucagucacaga

SEQ ID NO: 233864 - RNA, 20 nt, Human
ucuccugguguuucaggauu

SEQ ID NO: 233865 - RNA, 20 nt, Human
ucugacgccucuccuggugu

SEQ ID NO: 233866 - RNA, 28 nt, Human
ucugcagcuuccagaagaggacuucagu

SEQ ID NO: 233867 - RNA, 23 nt, Human
ugaaagcugggaguaggaagggu

SEQ ID NO: 233868 - RNA, 19 nt, Human
ugacaggaaggguuuagga

SEQ ID NO: 233869 - RNA, 21 nt, Human
ugacucccucggaaggaagag

SEQ ID NO: 233870 - RNA, 24 nt, Human
ugacucccucggaaggaagaguag

SEQ ID NO: 233871 - RNA, 21 nt, Human
ugagaaagacaggaggacaca

SEQ ID NO: 233872 - RNA, 23 nt, Human
ugagaaagucaguggagagaaau

SEQ ID NO: 233873 - RNA, 19 nt, Human
ugagaggaugugggucucg

SEQ ID NO: 233874 - RNA, 20 nt, Human
ugagaggaugugggucucgg

SEQ ID NO: 233875 - RNA, 23 nt, Human
ugaggagagcucgggccagaucc

SEQ ID NO: 233876 - RNA, 22 nt, Human
ugaggcccggguggccgcuugg

SEQ ID NO: 233877 - RNA, 23 nt, Human
ugaggcuaggaaccagaaaccag

SEQ ID NO: 233878 - RNA, 19 nt, Human
ugaggggcccggaggagag

SEQ ID NO: 233879 - RNA, 21 nt, Human
ugaggggcccggaggagagga

SEQ ID NO: 233880 - RNA, 19 nt, Human
ugaggucagggaagggaac

SEQ ID NO: 233881 - RNA, 22 nt, Human
ugaggucagggaagggaacagg

SEQ ID NO: 233882 - RNA, 20 nt, Human
ugaugagaagacaggucugg

SEQ ID NO: 233883 - RNA, 23 nt, Human
ugcaaagaagccauuucucaaau

SEQ ID NO: 233884 - RNA, 20 nt, Human
ugcaguggggcucagggcuc

SEQ ID NO: 233885 - RNA, 25 nt, Human
ugcccacccacuccaccugcccagc

SEQ ID NO: 233886 - RNA, 22 nt, Human
ugcccggcuuccccagcucugc

SEQ ID NO: 233887 - RNA, 19 nt, Human
ugcccucagggacucagga

SEQ ID NO: 233888 - RNA, 20 nt, Human
ugccucccgggcccccaucu

SEQ ID NO: 233889 - RNA, 23 nt, Human
ugccugcgucucuuccuuccucc

SEQ ID NO: 233890 - RNA, 21 nt, Human
ugcgauggauuaauuuagacc

SEQ ID NO: 233891 - RNA, 23 nt, Human
ugcuagccacucagagccuuccu

SEQ ID NO: 233892 - RNA, 19 nt, Human
uggaacaaaacuucaaaug

SEQ ID NO: 233893 - RNA, 21 nt, Human
uggaggagggugggaaccggg

SEQ ID NO: 233894 - RNA, 18 nt, Human
uggcagauggaaaaacug

SEQ ID NO: 233895 - RNA, 24 nt, Human
uggcaggagaguggggugcugggg

SEQ ID NO: 233896 - RNA, 21 nt, Human
uggccuccagguccaaauccc

SEQ ID NO: 233897 - RNA, 23 nt, Human
uggccuccagguccaaaucccuu

SEQ ID NO: 233898 - RNA, 20 nt, Human
uggccuccugguucccuccc

SEQ ID NO: 233899 - RNA, 19 nt, Human
uggccugggucccuggagc

SEQ ID NO: 233900 - RNA, 23 nt, Human
uggcuccccagcucccacuuccc

SEQ ID NO: 233901 - RNA, 21 nt, Human
uggcuggggacgagccagcaa

SEQ ID NO: 233902 - RNA, 23 nt, Human
ugggaaccgggugagaaagucag

SEQ ID NO: 233903 - RNA, 21 nt, Human
ugggacuuggcuucagguggg

SEQ ID NO: 233904 - RNA, 21 nt, Human
ugggaguaggaagggugggga

SEQ ID NO: 233905 - RNA, 19 nt, Human
ugggcccagccccacccag

SEQ ID NO: 233906 - RNA, 19 nt, Human
uggggagggauggggcugg

SEQ ID NO: 233907 - RNA, 22 nt, Human
uggggagggauggggcugggaa

SEQ ID NO: 233908 - RNA, 18 nt, Human
uggggcagggagggcucc

SEQ ID NO: 233909 - RNA, 19 nt, Human
uggggcuggccuggcagcu

SEQ ID NO: 233910 - RNA, 18 nt, Human
ugggucccuggagcugug

SEQ ID NO: 233911 - RNA, 23 nt, Human
ugguucccuccccacaggcgccc

SEQ ID NO: 233912 - RNA, 25 nt, Human
ugucaugacccgggagggccggcgc

SEQ ID NO: 233913 - RNA, 24 nt, Human
ugugcagcccuaggaggaauugca

SEQ ID NO: 233914 - RNA, 19 nt, Human
uucaggaaagacgggaggc

SEQ ID NO: 233915 - RNA, 18 nt, Human
uuccagacagcaagaaac

SEQ ID NO: 233916 - RNA, 21 nt, Human
uuccauguggcagauggaaaa

SEQ ID NO: 233917 - RNA, 20 nt, Human
uuccggacagucagauuccu

SEQ ID NO: 233918 - RNA, 19 nt, Human
uuccggcccccacccaggc

SEQ ID NO: 233919 - RNA, 22 nt, Human
uuccuguuccccugcccuuccu

SEQ ID NO: 233920 - RNA, 24 nt, Human
uuccuuaaucuugcauuccuguuc

SEQ ID NO: 233921 - RNA, 21 nt, Human
uugcugcacacacaccacccg

SEQ ID NO: 233922 - RNA, 27 nt, Human
uuggcccugacccugcugccgguuccg

SEQ ID NO: 233923 - RNA, 18 nt, Human
aaaaaaacagcacaguaa

SEQ ID NO: 233924 - RNA, 23 nt, Human
aaaaaacagcacaguaaaaaaau

SEQ ID NO: 233925 - RNA, 20 nt, Human
aaaaaauacugucacaauau

SEQ ID NO: 233926 - RNA, 21 nt, Human
aaaaacaacaagaaacacagc

SEQ ID NO: 233927 - RNA, 27 nt, Human
aacaagaacacccuacuuuuuacccau

SEQ ID NO: 233928 - RNA, 20 nt, Human
aagacccucccccaccccca

SEQ ID NO: 233929 - RNA, 20 nt, Human
aagagcaccuuuauucacag

SEQ ID NO: 233930 - RNA, 21 nt, Human
aagcaaaaaacaagaacaccc

SEQ ID NO: 233931 - RNA, 23 nt, Human
aagcaaaaaacaagaacacccua

SEQ ID NO: 233932 - RNA, 23 nt, Human
aagccacagcguccaggccagga

SEQ ID NO: 233933 - RNA, 21 nt, Human
aauauuuacagacacgcccac

SEQ ID NO: 233934 - RNA, 23 nt, Human
acacacacacacacgcacacgca

SEQ ID NO: 233935 - RNA, 19 nt, Human
acacacccacacaaagagc

SEQ ID NO: 233936 - RNA, 22 nt, Human
acacccacacaaagagcaaaac

SEQ ID NO: 233937 - RNA, 23 nt, Human
acacccacacaaagagcaaaacc

SEQ ID NO: 233938 - RNA, 20 nt, Human
acgcacccccagacccagcc

SEQ ID NO: 233939 - RNA, 19 nt, Human
acuguuugcccagcuggac

SEQ ID NO: 233940 - RNA, 21 nt, Human
aggacgucaccauagcaacaa

SEQ ID NO: 233941 - RNA, 22 nt, Human
aggcccugcagcccacuggccc

SEQ ID NO: 233942 - RNA, 23 nt, Human
auaaaauaagacccucccccacc

SEQ ID NO: 233943 - RNA, 20 nt, Human
auauuuacagacacgcccac

SEQ ID NO: 233944 - RNA, 19 nt, Human
aucauagccacucacacac

SEQ ID NO: 233945 - RNA, 30 nt, Human
augcaguacacacacacacacacgcacacg

SEQ ID NO: 233946 - RNA, 22 nt, Human
caaaaaacaagaacacccuacu

SEQ ID NO: 233947 - RNA, 24 nt, Human
caaaaaacaagaacacccuacuuu

SEQ ID NO: 233948 - RNA, 22 nt, Human
caaagagaaaaacaacaagaaa

SEQ ID NO: 233949 - RNA, 22 nt, Human
caacaacacuucaauucccuga

SEQ ID NO: 233950 - RNA, 21 nt, Human
caacaagaaacacagcccacg

SEQ ID NO: 233951 - RNA, 22 nt, Human
caagaaacacagcccacgggac

SEQ ID NO: 233952 - RNA, 23 nt, Human
caagaacacccuacuuuuuaccc

SEQ ID NO: 233953 - RNA, 23 nt, Human
caagcaaaaaacaagaacacccu

SEQ ID NO: 233954 - RNA, 26 nt, Human
cacacacacacacacgcacacgcaca

SEQ ID NO: 233955 - RNA, 28 nt, Human
cacacacacacacgcacacgcacacgca

SEQ ID NO: 233956 - RNA, 25 nt, Human
cacacacacgcacacgcacacgcac

SEQ ID NO: 233957 - RNA, 28 nt, Human
cacacgcacacgcacacgcacaggcacg

SEQ ID NO: 233958 - RNA, 20 nt, Human
caccauagcaacaacacuuc

SEQ ID NO: 233959 - RNA, 21 nt, Human
caccauagcaacaacacuuca

SEQ ID NO: 233960 - RNA, 20 nt, Human
cacccacacaaagagcaaaa

SEQ ID NO: 233961 - RNA, 18 nt, Human
cacccccacccucccaag

SEQ ID NO: 233962 - RNA, 23 nt, Human
cacccccacccucccaagcaaaa

SEQ ID NO: 233963 - RNA, 22 nt, Human
cacccuacuuuuuacccauccc

SEQ ID NO: 233964 - RNA, 20 nt, Human
cacccucccaagcaaaaaac

SEQ ID NO: 233965 - RNA, 24 nt, Human
cacgcacacgcacaggcacggccc

SEQ ID NO: 233966 - RNA, 23 nt, Human
cacuucagcuuuaaaaacaaaga

SEQ ID NO: 233967 - RNA, 18 nt, Human
cagacccagccuccccug

SEQ ID NO: 233968 - RNA, 21 nt, Human
cagacccagccuccccugcaa

SEQ ID NO: 233969 - RNA, 21 nt, Human
cagcacagagcuuguggucag

SEQ ID NO: 233970 - RNA, 22 nt, Human
cagcgcaacagggucccugggc

SEQ ID NO: 233971 - RNA, 23 nt, Human
cagcguccaggccaggaggaagg

SEQ ID NO: 233972 - RNA, 21 nt, Human
cauggcucagugagucguacu

SEQ ID NO: 233973 - RNA, 19 nt, Human
ccacagagcagaacugccc

SEQ ID NO: 233974 - RNA, 22 nt, Human
ccacccucccaagcaaaaaaca

SEQ ID NO: 233975 - RNA, 20 nt, Human
ccacugggggcuucgugggg

SEQ ID NO: 233976 - RNA, 20 nt, Human
ccaugcugggcccagcgggg

SEQ ID NO: 233977 - RNA, 20 nt, Human
cccaagcaaaaaacaagaac

SEQ ID NO: 233978 - RNA, 20 nt, Human
cccaagcaaaaaacaagagg

SEQ ID NO: 233979 - RNA, 19 nt, Human
cccacacaaagagcaaaac

SEQ ID NO: 233980 - RNA, 24 nt, Human
cccacgggacaggugagccaugcu

SEQ ID NO: 233981 - RNA, 21 nt, Human
cccauccccuuucaaaaaaaa

SEQ ID NO: 233982 - RNA, 23 nt, Human
cccauccccuuucaaaaaaaaca

SEQ ID NO: 233983 - RNA, 22 nt, Human
ccccagacccagccuccccugc

SEQ ID NO: 233984 - RNA, 18 nt, Human
cccccacccccacccucc

SEQ ID NO: 233985 - RNA, 19 nt, Human
cccccacccccacccuccc

SEQ ID NO: 233986 - RNA, 24 nt, Human
cccucccaagcaaaaaacaagaac

SEQ ID NO: 233987 - RNA, 23 nt, Human
ccuccaagcaggcccugcagccc

SEQ ID NO: 233988 - RNA, 22 nt, Human
ccuccacagagcagaacugccc

SEQ ID NO: 233989 - RNA, 28 nt, Human
ccucccaagcaaaaaacaagaacacccu

SEQ ID NO: 233990 - RNA, 18 nt, Human
ccucccccacccccaccc

SEQ ID NO: 233991 - RNA, 24 nt, Human
ccucugaggaggccuggaagacuc

SEQ ID NO: 233992 - RNA, 24 nt, Human
ccuuccuccaagcaggcccugcag

SEQ ID NO: 233993 - RNA, 24 nt, Human
cgaaugccgaggccagggcagcgc

SEQ ID NO: 233994 - RNA, 25 nt, Human
cucacacacccacacaaagagcaaa

SEQ ID NO: 233995 - RNA, 21 nt, Human
cucccccacccccacccuccc

SEQ ID NO: 233996 - RNA, 25 nt, Human
cucccccacccccacccucccaagc

SEQ ID NO: 233997 - RNA, 19 nt, Human
cuggaacugggcgguggcu

SEQ ID NO: 233998 - RNA, 19 nt, Human
cuggaagacuccccacuca

SEQ ID NO: 233999 - RNA, 20 nt, Human
cuggacagccagccacuggg

SEQ ID NO: 234000 - RNA, 21 nt, Human
cuggcccucggagcagaggca

SEQ ID NO: 234001 - RNA, 18 nt, Human
cuuuccuagcuaugucuu

SEQ ID NO: 234002 - RNA, 18 nt, Human
gacccagccuccccugca

SEQ ID NO: 234003 - RNA, 21 nt, Human
gacccucccccacccccaccc

SEQ ID NO: 234004 - RNA, 23 nt, Human
gagaaaaacaacaagaaacacag

SEQ ID NO: 234005 - RNA, 23 nt, Human
gagcauggcucagugagucguac

SEQ ID NO: 234006 - RNA, 19 nt, Human
gagguggcagcuacacagg

SEQ ID NO: 234007 - RNA, 21 nt, Human
gaguggccuccgacacacaaa

SEQ ID NO: 234008 - RNA, 18 nt, Human
gaucauagccacucacac

SEQ ID NO: 234009 - RNA, 22 nt, Human
gcaaagagcaccuuuauucaca

SEQ ID NO: 234010 - RNA, 18 nt, Human
gcaacagggucccugggc

SEQ ID NO: 234011 - RNA, 23 nt, Human
gcaguacacacacacacacacgc

SEQ ID NO: 234012 - RNA, 31 nt, Human
gcaugcaguacacacacacacacacgcacag

SEQ ID NO: 234013 - RNA, 20 nt, Human
gcccgccccuccacagagcc

SEQ ID NO: 234014 - RNA, 25 nt, Human
ggaugggagguuccagaugcuggaa

SEQ ID NO: 234015 - RNA, 19 nt, Human
ggcagggaugggagguucc

SEQ ID NO: 234016 - RNA, 22 nt, Human
ggcagggaugggagguuccaga

SEQ ID NO: 234017 - RNA, 32 nt, Human
ggcaugcaguacacacacacacacacgcagug

SEQ ID NO: 234018 - RNA, 25 nt, Human
gggcagcgcaacagggucccugggc

SEQ ID NO: 234019 - RNA, 18 nt, Human
gggcagggaugggagguu

SEQ ID NO: 234020 - RNA, 23 nt, Human
gggcagggaugggagguuccaga

SEQ ID NO: 234021 - RNA, 23 nt, Human
uaaauacacagagugccagacag

SEQ ID NO: 234022 - RNA, 25 nt, Human
uaagauaaaauaagacccucccccc

SEQ ID NO: 234023 - RNA, 24 nt, Human
uacacaggaggagggcagggaugg

SEQ ID NO: 234024 - RNA, 19 nt, Human
uaccaggggcgcccaggga

SEQ ID NO: 234025 - RNA, 21 nt, Human
uaccaggggcgcccagggauu

SEQ ID NO: 234026 - RNA, 21 nt, Human
uacugucacaauauuuacaga

SEQ ID NO: 234027 - RNA, 24 nt, Human
uacuuggggcuaugacacaggggc

SEQ ID NO: 234028 - RNA, 24 nt, Human
uagcuguagaaagauccaaaaauc

SEQ ID NO: 234029 - RNA, 22 nt, Human
ucacacacccacacaaagagca

SEQ ID NO: 234030 - RNA, 24 nt, Human
ucacacacccacacaaagagcaaa

SEQ ID NO: 234031 - RNA, 18 nt, Human
uccacgcagcagcuggac

SEQ ID NO: 234032 - RNA, 23 nt, Human
uccccacucagaagagcugggag

SEQ ID NO: 234033 - RNA, 18 nt, Human
ucccccacccccacccuc

SEQ ID NO: 234034 - RNA, 24 nt, Human
ucccccacccccacccucccaagc

SEQ ID NO: 234035 - RNA, 20 nt, Human
ucccugagaacuuuucccuu

SEQ ID NO: 234036 - RNA, 18 nt, Human
uccuuccuccaagcaggc

SEQ ID NO: 234037 - RNA, 25 nt, Human
ugcaaagagaaaaacaacaagaaac

SEQ ID NO: 234038 - RNA, 22 nt, Human
ugcaaagagcaccuuuauucac

SEQ ID NO: 234039 - RNA, 24 nt, Human
ugcugggcccagcggggagguggc

SEQ ID NO: 234040 - RNA, 18 nt, Human
uggccuccgacacacaaa

SEQ ID NO: 234041 - RNA, 22 nt, Human
uggccuccgacacacaaauccu

SEQ ID NO: 234042 - RNA, 24 nt, Human
uucacagcaaaaggacgucaccau

SEQ ID NO: 234043 - RNA, 23 nt, Human
uucuccacgcagcagcuggacaa

SEQ ID NO: 234044 - RNA, 19 nt, Human
uuggcuucuguuuuuucug

SEQ ID NO: 234045 - RNA, 18 nt, Human
uuuacccauccccuuuca

SEQ ID NO: 234046 - RNA, 22 nt, Human
uuugcaaagagaaaaacaacaa

SEQ ID NO: 234047 - RNA, 24 nt, Human
uuuggagaggagauuaaaugcuga

SEQ ID NO: 234048 - RNA, 21 nt, Human
caccagcugucagaaggacuc

SEQ ID NO: 234049 - RNA, 22 nt, Human
gcaccagcugucagaaggacuc

SEQ ID NO: 234050 - RNA, 22 nt, Human
gccuuuauugggggccaugggc

SEQ ID NO: 234051 - RNA, 19 nt, Human
gggggccaugggcuggcug

SEQ ID NO: 234052 - RNA, 18 nt, Human
ugggggccaugggcuggc

SEQ ID NO: 234053 - RNA, 22 nt, Human
ugggggccaugggcuggcugau

SEQ ID NO: 234054 - RNA, 19 nt, Human
uugggggccaugggcuggc

SEQ ID NO: 234055 - RNA, 18 nt, Human
agauucuuuuuuuuuuuu

SEQ ID NO: 234056 - RNA, 20 nt, Human
gauucuuuuuuuuuuuuuuu

SEQ ID NO: 234057 - RNA, 25 nt, Human
uaaguagaugacuuacaagagggau

SEQ ID NO: 234058 - RNA, 19 nt, Human
uagaugacuuacaagaggg

SEQ ID NO: 234059 - RNA, 20 nt, Human
ucuuuuuuuuuuuuuuuaau

SEQ ID NO: 234060 - RNA, 20 nt, Human
uuagauucuuuuuuuuuuuu

SEQ ID NO: 234061 - RNA, 19 nt, Human
uucuuuuuuuuuuuuuuua

SEQ ID NO: 234062 - RNA, 24 nt, Human
uucuuuuuuuuuuuuuuuaaucug

SEQ ID NO: 234063 - RNA, 23 nt, Human
uuuagauucuuuuuuuuuuuuuu

SEQ ID NO: 234064 - RNA, 20 nt, Human
uuuuuuuaaucugccccuuu

SEQ ID NO: 234065 - RNA, 18 nt, Human
uuuuuuuuuaaucugccc

SEQ ID NO: 234066 - RNA, 22 nt, Human
uuuuuuuuuuuaaucugccccu

SEQ ID NO: 234067 - RNA, 27 nt, Human
uuuuuuuuuuuuuuuaaucugccccuu

SEQ ID NO: 234068 - RNA, 19 nt, Human
aaacuggugaggugguggg

SEQ ID NO: 234069 - RNA, 18 nt, Human
aaggacugguagggguag

SEQ ID NO: 234070 - RNA, 20 nt, Human
aauggugcgaucugagccgc

SEQ ID NO: 234071 - RNA, 18 nt, Human
acccagaagccucuccca

SEQ ID NO: 234072 - RNA, 23 nt, Human
agaccagugacaagggcagacug

SEQ ID NO: 234073 - RNA, 27 nt, Human
agagaggaaggaagccgaggaggggag

SEQ ID NO: 234074 - RNA, 20 nt, Human
agcagcucuggauggugggg

SEQ ID NO: 234075 - RNA, 18 nt, Human
aggaagccgaggagggga

SEQ ID NO: 234076 - RNA, 20 nt, Human
aggaagccgaggaggggagc

SEQ ID NO: 234077 - RNA, 19 nt, Human
aggaaggaagccgaggagg

SEQ ID NO: 234078 - RNA, 21 nt, Human
aguuggucagguagaaggggc

SEQ ID NO: 234079 - RNA, 18 nt, Human
caggagaagccguaguuc

SEQ ID NO: 234080 - RNA, 24 nt, Human
ccacgccgucuaguccacaccugg

SEQ ID NO: 234081 - RNA, 19 nt, Human
ccagaagccucucccagua

SEQ ID NO: 234082 - RNA, 27 nt, Human
ccagauccuggcugcgguagcugcaac

SEQ ID NO: 234083 - RNA, 25 nt, Human
ccaggacagggagcucguccgagga

SEQ ID NO: 234084 - RNA, 21 nt, Human
cgccagacuuggugaggccca

SEQ ID NO: 234085 - RNA, 20 nt, Human
cuccugguggacccuagugg

SEQ ID NO: 234086 - RNA, 19 nt, Human
cuguggggggaucccagag

SEQ ID NO: 234087 - RNA, 24 nt, Human
gagcaggagaagccguaguuccag

SEQ ID NO: 234088 - RNA, 24 nt, Human
gagccugcagugagggcguccugg

SEQ ID NO: 234089 - RNA, 21 nt, Human
gagcgcucaggugaguagggc

SEQ ID NO: 234090 - RNA, 22 nt, Human
gagguggugggagaacuccugg

SEQ ID NO: 234091 - RNA, 20 nt, Human
gcagcucuggauggugggga

SEQ ID NO: 234092 - RNA, 25 nt, Human
gccgaggaggggagccugcagugag

SEQ ID NO: 234093 - RNA, 21 nt, Human
ggaagaggaagcugggguguu

SEQ ID NO: 234094 - RNA, 20 nt, Human
ggaaggacugguagggguag

SEQ ID NO: 234095 - RNA, 22 nt, Human
ggaaggacugguagggguagua

SEQ ID NO: 234096 - RNA, 23 nt, Human
ggaaucgcagccuuccagcccuc

SEQ ID NO: 234097 - RNA, 20 nt, Human
ggaucccagagcaaccucga

SEQ ID NO: 234098 - RNA, 19 nt, Human
gggcguccugggguucucc

SEQ ID NO: 234099 - RNA, 19 nt, Human
guagaccagggaccaggac

SEQ ID NO: 234100 - RNA, 19 nt, Human
gugcucuucgagcuguugg

SEQ ID NO: 234101 - RNA, 18 nt, Human
uaccaccuggaaacuggu

SEQ ID NO: 234102 - RNA, 20 nt, Human
ucagaccagugacaagggca

SEQ ID NO: 234103 - RNA, 21 nt, Human
ucccagagcaaccucgagggc

SEQ ID NO: 234104 - RNA, 25 nt, Human
ucgcagccuuccagcccucgaaauc

SEQ ID NO: 234105 - RNA, 19 nt, Human
ucuccgguucucaccaccu

SEQ ID NO: 234106 - RNA, 21 nt, Human
ugacccagaagccucucccag

SEQ ID NO: 234107 - RNA, 18 nt, Human
ugaggcccaggacaggga

SEQ ID NO: 234108 - RNA, 23 nt, Human
ugagguggugggagaacuccugg

SEQ ID NO: 234109 - RNA, 19 nt, Human
ugcaacggccguguggagc

SEQ ID NO: 234110 - RNA, 20 nt, Human
ugcagagaggaaggaagccg

SEQ ID NO: 234111 - RNA, 22 nt, Human
ugcuuaccaccuggaaacuggu

SEQ ID NO: 234112 - RNA, 20 nt, Human
uggaugguggggagguagac

SEQ ID NO: 234113 - RNA, 21 nt, Human
uggugcuuaccaccuggaaac

SEQ ID NO: 234114 - RNA, 21 nt, Human
ugguggacccuaguggaagcc

SEQ ID NO: 234115 - RNA, 19 nt, Human
uguuguggagucuggaagg

SEQ ID NO: 234116 - RNA, 24 nt, Human
gccccgggcccgccugggcuucug

SEQ ID NO: 234117 - RNA, 22 nt, Human
gccccgggccgccugggcuucc

SEQ ID NO: 234118 - RNA, 23 nt, Human
gccccgggccgccugggcuucug

SEQ ID NO: 234119 - RNA, 22 nt, Human
agaaaauauccccaaccaugaa

SEQ ID NO: 234120 - RNA, 25 nt, Human
aggaguccaccccuuuccucugccu

SEQ ID NO: 234121 - RNA, 26 nt, Human
agucgagaaaauauccccaaccauga

SEQ ID NO: 234122 - RNA, 20 nt, Human
auaaaagguaacuucccaca

SEQ ID NO: 234123 - RNA, 20 nt, Human
caccccuuuccucugccucu

SEQ ID NO: 234124 - RNA, 18 nt, Human
cagagaccugcagcugau

SEQ ID NO: 234125 - RNA, 20 nt, Human
caugaauaaauaaauggaaa

SEQ ID NO: 234126 - RNA, 23 nt, Human
cauuuuauuuggcaguuguuucu

SEQ ID NO: 234127 - RNA, 18 nt, Human
cccaaccaugaacagggc

SEQ ID NO: 234128 - RNA, 24 nt, Human
cccacaucacuggacuggacaguu

SEQ ID NO: 234129 - RNA, 27 nt, Human
cuaagaacaggucacauaggaguccac

SEQ ID NO: 234130 - RNA, 19 nt, Human
ggaagagaccugugaggua

SEQ ID NO: 234131 - RNA, 24 nt, Human
ggaguccaccccuuuccucugccu

SEQ ID NO: 234132 - RNA, 23 nt, Human
gucgagaaaauauccccaaccau

SEQ ID NO: 234133 - RNA, 22 nt, Human
uacacaucuucacugcaaagaa

SEQ ID NO: 234134 - RNA, 21 nt, Human
ucacauaggaguccaccccuu

SEQ ID NO: 234135 - RNA, 20 nt, Human
ucuugcucuaagaacagguc

SEQ ID NO: 234136 - RNA, 20 nt, Human
ugauucgugagcuucuccuc

SEQ ID NO: 234137 - RNA, 22 nt, Human
uggcagccacagaauuuggugu

SEQ ID NO: 234138 - RNA, 24 nt, Human
uguaucucugcuuuuucaaaacag

SEQ ID NO: 234139 - RNA, 21 nt, Human
uuaaacgcuuauuuacacauc

SEQ ID NO: 234140 - RNA, 19 nt, Human
uucauuugcaagugugaua

SEQ ID NO: 234141 - RNA, 24 nt, Human
aaacaacaaaccuccuagaaagca

SEQ ID NO: 234142 - RNA, 20 nt, Human
aacaaaccuccuagaaagca

SEQ ID NO: 234143 - RNA, 21 nt, Human
aacucgcggcggcucgcagcc

SEQ ID NO: 234144 - RNA, 23 nt, Human
aacucgcggcggcucgcagccuc

SEQ ID NO: 234145 - RNA, 19 nt, Human
aagcaaucaaaaaucauca

SEQ ID NO: 234146 - RNA, 25 nt, Human
aauacaaaagcaaucaaaaaucauc

SEQ ID NO: 234147 - RNA, 19 nt, Human
agaaaagacuggggaagca

SEQ ID NO: 234148 - RNA, 20 nt, Human
agaagguccuggagcgagcc

SEQ ID NO: 234149 - RNA, 20 nt, Human
agaauaaagacuccuuuuga

SEQ ID NO: 234150 - RNA, 21 nt, Human
aggcaaaacaacaaaccuccu

SEQ ID NO: 234151 - RNA, 26 nt, Human
aggcaaaacaacaaaccuccuagaaa

SEQ ID NO: 234152 - RNA, 18 nt, Human
aguucaauugcagacacc

SEQ ID NO: 234153 - RNA, 24 nt, Human
auuuucuaaaaacaguuuuccauu

SEQ ID NO: 234154 - RNA, 22 nt, Human
caaaagcaaucaaaaaucauca

SEQ ID NO: 234155 - RNA, 19 nt, Human
caacaaaccuccuagaaag

SEQ ID NO: 234156 - RNA, 18 nt, Human
cacacagucgguggggcg

SEQ ID NO: 234157 - RNA, 18 nt, Human
cacagucgguggggcgcu

SEQ ID NO: 234158 - RNA, 26 nt, Human
caccugcagaauuaaauacaaaagca

SEQ ID NO: 234159 - RNA, 19 nt, Human
cacuuggaaaagcuuccag

SEQ ID NO: 234160 - RNA, 20 nt, Human
cacuuggaaaagcuuccagg

SEQ ID NO: 234161 - RNA, 19 nt, Human
cagaauuaaauacaaaagc

SEQ ID NO: 234162 - RNA, 19 nt, Human
caggagggcccgagcagcg

SEQ ID NO: 234163 - RNA, 22 nt, Human
caggagggcccgagcagcggag

SEQ ID NO: 234164 - RNA, 19 nt, Human
caucuugugaagaaggucc

SEQ ID NO: 234165 - RNA, 22 nt, Human
ccccaugagcuuccugcuccuc

SEQ ID NO: 234166 - RNA, 19 nt, Human
ccgugguggcagugguggc

SEQ ID NO: 234167 - RNA, 20 nt, Human
cgagcccuggagcgggggcu

SEQ ID NO: 234168 - RNA, 18 nt, Human
cgguggggcgcucacacu

SEQ ID NO: 234169 - RNA, 20 nt, Human
cucaaaacuaacaggcaaaa

SEQ ID NO: 234170 - RNA, 25 nt, Human
cucgcggcggcucgcagccucccuc

SEQ ID NO: 234171 - RNA, 18 nt, Human
gaaagcaaauaugacccu

SEQ ID NO: 234172 - RNA, 24 nt, Human
gaccgugguggcagugguggcggc

SEQ ID NO: 234173 - RNA, 18 nt, Human
gagcuuuucccacccuaa

SEQ ID NO: 234174 - RNA, 21 nt, Human
gagugaccgcggugguggcgc

SEQ ID NO: 234175 - RNA, 18 nt, Human
gcaaaacaacaaaccucc

SEQ ID NO: 234176 - RNA, 21 nt, Human
gcuacagaagcccccaugagc

SEQ ID NO: 234177 - RNA, 22 nt, Human
ggagcgggggcuccccaggagg

SEQ ID NO: 234178 - RNA, 23 nt, Human
ggcagugguggcggcggcggcgg

SEQ ID NO: 234179 - RNA, 18 nt, Human
ggcuacagaagcccccau

SEQ ID NO: 234180 - RNA, 26 nt, Human
ggcuugcggcccucuucaauaaaauc

SEQ ID NO: 234181 - RNA, 19 nt, Human
gggggcuccccaggagggc

SEQ ID NO: 234182 - RNA, 18 nt, Human
gugaccgcggugguggcg

SEQ ID NO: 234183 - RNA, 25 nt, Human
guggcggcggcggcggugagugacc

SEQ ID NO: 234184 - RNA, 19 nt, Human
gugguggcggcggcggcgg

SEQ ID NO: 234185 - RNA, 25 nt, Human
gugguggcggcggcggcggugagug

SEQ ID NO: 234186 - RNA, 25 nt, Human
uaacaggcaaaacaacaaaccuccu

SEQ ID NO: 234187 - RNA, 21 nt, Human
ucagaaaagacuggggaagca

SEQ ID NO: 234188 - RNA, 20 nt, Human
ucagaauaaagacuccuuuu

SEQ ID NO: 234189 - RNA, 22 nt, Human
uccaccucuccagucucugauc

SEQ ID NO: 234190 - RNA, 18 nt, Human
ucucacuccaccucucca

SEQ ID NO: 234191 - RNA, 18 nt, Human
uggcagugguggcggcgg

SEQ ID NO: 234192 - RNA, 19 nt, Human
uggggcgcucacacuugga

SEQ ID NO: 234193 - RNA, 21 nt, Human
ugguggcggcggcggcgguga

SEQ ID NO: 234194 - RNA, 19 nt, Human
uguggcaggcgaccguggu

SEQ ID NO: 234195 - RNA, 22 nt, Human
uucuaaaaacaguuuuccauuu

SEQ ID NO: 234196 - RNA, 21 nt, Human
uuggggcuugcggcccucuuc

SEQ ID NO: 234197 - RNA, 22 nt, Human
uuuuuuuuuuuuuuuuuggguu

SEQ ID NO: 234198 - RNA, 23 nt, Human
uuuuuuuuuuuuuuuuuuugggu

SEQ ID NO: 234199 - RNA, 24 nt, Human
uuuuuuuuuuuuuuuuuuuuuggg

SEQ ID NO: 234200 - RNA, 19 nt, Human
aacccuccaccccuucacu

SEQ ID NO: 234201 - RNA, 23 nt, Human
aacccuccaccccuucacugucu

SEQ ID NO: 234202 - RNA, 25 nt, Human
aacccuccaccccuucacugucuuu

SEQ ID NO: 234203 - RNA, 18 nt, Human
aaguccaggucucugguc

SEQ ID NO: 234204 - RNA, 21 nt, Human
acaggcccgccagcgaacacg

SEQ ID NO: 234205 - RNA, 18 nt, Human
acaugacaaggaagaggc

SEQ ID NO: 234206 - RNA, 21 nt, Human
acccaaguacugccaggaagc

SEQ ID NO: 234207 - RNA, 23 nt, Human
accgggggcagggggacaggccc

SEQ ID NO: 234208 - RNA, 20 nt, Human
acugcacugcggccagagug

SEQ ID NO: 234209 - RNA, 21 nt, Human
acugcacugcggccagaguga

SEQ ID NO: 234210 - RNA, 24 nt, Human
agacaaaaguccaggucucugguc

SEQ ID NO: 234211 - RNA, 23 nt, Human
agaggggaagagaagaaugggga

SEQ ID NO: 234212 - RNA, 20 nt, Human
agcagcaccgaugccuccga

SEQ ID NO: 234213 - RNA, 23 nt, Human
agcagcaccgaugccuccgaccc

SEQ ID NO: 234214 - RNA, 18 nt, Human
aggaaaugccagucaagg

SEQ ID NO: 234215 - RNA, 21 nt, Human
aggcagaguggggaggccccg

SEQ ID NO: 234216 - RNA, 21 nt, Human
agggaagagaggggaagagaa

SEQ ID NO: 234217 - RNA, 22 nt, Human
agggagggggacuucccauagg

SEQ ID NO: 234218 - RNA, 19 nt, Human
agggcaggcagagugggga

SEQ ID NO: 234219 - RNA, 19 nt, Human
agggcaucgacugaggcua

SEQ ID NO: 234220 - RNA, 21 nt, Human
agggccacggugaagcccagg

SEQ ID NO: 234221 - RNA, 19 nt, Human
agggggagagaggaaaggg

SEQ ID NO: 234222 - RNA, 20 nt, Human
aggucucugguccacagcuu

SEQ ID NO: 234223 - RNA, 23 nt, Human
aggugaucaguggagccagggac

SEQ ID NO: 234224 - RNA, 22 nt, Human
agguggcgcguagggcaggcag

SEQ ID NO: 234225 - RNA, 22 nt, Human
aguggcccggcagccuagcccc

SEQ ID NO: 234226 - RNA, 23 nt, Human
caaggugaagcugaggaaggcca

SEQ ID NO: 234227 - RNA, 23 nt, Human
caccccuucacugucuuuacuuc

SEQ ID NO: 234228 - RNA, 19 nt, Human
cacgggaaaucaccuucca

SEQ ID NO: 234229 - RNA, 22 nt, Human
cacggugaagcccagggcugcu

SEQ ID NO: 234230 - RNA, 19 nt, Human
cacugcacugcggccagag

SEQ ID NO: 234231 - RNA, 20 nt, Human
cacugcacugcggccagagu

SEQ ID NO: 234232 - RNA, 18 nt, Human
cagcagcaccgaugccuc

SEQ ID NO: 234233 - RNA, 24 nt, Human
cagcagcaccgaugccuccgaccc

SEQ ID NO: 234234 - RNA, 18 nt, Human
cagccuagccccgucucc

SEQ ID NO: 234235 - RNA, 24 nt, Human
ccacagcuucagacaugacaagga

SEQ ID NO: 234236 - RNA, 18 nt, Human
ccaggaagccaguggccc

SEQ ID NO: 234237 - RNA, 22 nt, Human
cccagggcugcuggcugacccu

SEQ ID NO: 234238 - RNA, 20 nt, Human
ccgacccaaguacugccagg

SEQ ID NO: 234239 - RNA, 22 nt, Human
ccuagccccgucucccagcggg

SEQ ID NO: 234240 - RNA, 18 nt, Human
ccuaggaccccugcucga

SEQ ID NO: 234241 - RNA, 20 nt, Human
ccugcaaucgcaccuaccac

SEQ ID NO: 234242 - RNA, 26 nt, Human
ccugccagugccaggcagccuaggac

SEQ ID NO: 234243 - RNA, 24 nt, Human
ccuucacugucuuuacuucccuca

SEQ ID NO: 234244 - RNA, 23 nt, Human
cgacugaggcuagaaggccacag

SEQ ID NO: 234245 - RNA, 21 nt, Human
cgagggggagagaggaaaggg

SEQ ID NO: 234246 - RNA, 19 nt, Human
cggagacgcugcacugcac

SEQ ID NO: 234247 - RNA, 19 nt, Human
cggccagagugagcagcag

SEQ ID NO: 234248 - RNA, 23 nt, Human
cggcggccagcccugccagugcc

SEQ ID NO: 234249 - RNA, 22 nt, Human
cucccacugaggccaggggcag

SEQ ID NO: 234250 - RNA, 20 nt, Human
cugcuggcugacccucaggu

SEQ ID NO: 234251 - RNA, 25 nt, Human
cuuccaggccuuucucugugagguc

SEQ ID NO: 234252 - RNA, 19 nt, Human
gagaggaaagggaagagag

SEQ ID NO: 234253 - RNA, 25 nt, Human
gaggggaagagaagaauggggaggg

SEQ ID NO: 234254 - RNA, 23 nt, Human
gaggugaucaguggagccaggga

SEQ ID NO: 234255 - RNA, 21 nt, Human
gccuaggaccccugcucgaac

SEQ ID NO: 234256 - RNA, 21 nt, Human
gcggccagcccugccagugcc

SEQ ID NO: 234257 - RNA, 20 nt, Human
ggaagagaagaauggggagg

SEQ ID NO: 234258 - RNA, 23 nt, Human
ggggaagagaagaauggggaggg

SEQ ID NO: 234259 - RNA, 19 nt, Human
ggugauggucacaggagag

SEQ ID NO: 234260 - RNA, 22 nt, Human
uaccacaaacuugaccgggggc

SEQ ID NO: 234261 - RNA, 25 nt, Human
uacuucccucauuucccuuaagcag

SEQ ID NO: 234262 - RNA, 22 nt, Human
ucaaggugaagcugaggaaggc

SEQ ID NO: 234263 - RNA, 20 nt, Human
ucccuuaagcagacaaaagu

SEQ ID NO: 234264 - RNA, 23 nt, Human
ucucccacugaggccaggggcug

SEQ ID NO: 234265 - RNA, 19 nt, Human
ugaagcugaggaaggccaa

SEQ ID NO: 234266 - RNA, 21 nt, Human
ugaggucucccuguccacugu

SEQ ID NO: 234267 - RNA, 18 nt, Human
ugccaggcagccuaggac

SEQ ID NO: 234268 - RNA, 18 nt, Human
ugccaggcagccuaggac

SEQ ID NO: 234269 - RNA, 25 nt, Human
ugcggccagagugagcagcagcacc

SEQ ID NO: 234270 - RNA, 21 nt, Human
uggcugacccucagguggcgc

SEQ ID NO: 234271 - RNA, 19 nt, Human
ugguccacagcuucagaca

SEQ ID NO: 234272 - RNA, 20 nt, Human
ugguuguauuuguuuuagaa

SEQ ID NO: 234273 - RNA, 21 nt, Human
uuaaugguacauggaacacau

SEQ ID NO: 234274 - RNA, 18 nt, Human
aaucuucucagcaguccu

SEQ ID NO: 234275 - RNA, 18 nt, Human
acuuuguuguuuguuucu

SEQ ID NO: 234276 - RNA, 21 nt, Human
caaaaaaaaaagucaaaagca

SEQ ID NO: 234277 - RNA, 20 nt, Human
gaguaguugugagcucuauu

SEQ ID NO: 234278 - RNA, 19 nt, Human
ggacaaaaaaaaaagucaa

SEQ ID NO: 234279 - RNA, 22 nt, Human
uaacaauuacaugucuaaagga

SEQ ID NO: 234280 - RNA, 21 nt, Human
uauauuuauugccacccaaaa

SEQ ID NO: 234281 - RNA, 19 nt, Human
uauccaggucaacauacac

SEQ ID NO: 234282 - RNA, 23 nt, Human
ucuuguuauuguugcuguuguua

SEQ ID NO: 234283 - RNA, 22 nt, Human
uggacaaaaaaaaaagucaaaa

SEQ ID NO: 234284 - RNA, 24 nt, Human
uuauuguugcuguuguuaauuaca

SEQ ID NO: 234285 - RNA, 21 nt, Human
uuccauggacaaaaaaaaaag

SEQ ID NO: 234286 - RNA, 20 nt, Human
uuguuguuuguuucuguuau

SEQ ID NO: 234287 - RNA, 25 nt, Human
uuuuuuuuuuuuuuuuuagucauuu

SEQ ID NO: 234288 - RNA, 18 nt, Human
aagaaagcgagggcgcag

SEQ ID NO: 234289 - RNA, 18 nt, Human
agccgugggggcagccau

SEQ ID NO: 234290 - RNA, 19 nt, Human
agggaaugucaagaaagcg

SEQ ID NO: 234291 - RNA, 27 nt, Human
auaaaaauuaccagcccagagcuugga

SEQ ID NO: 234292 - RNA, 21 nt, Human
auuuuguauuugcaaaagcug

SEQ ID NO: 234293 - RNA, 19 nt, Human
cacgugagacaaaagaguc

SEQ ID NO: 234294 - RNA, 24 nt, Human
cagccgugggggcagccaugcugg

SEQ ID NO: 234295 - RNA, 23 nt, Human
ccaccggauccaccacgugagac

SEQ ID NO: 234296 - RNA, 20 nt, Human
guaaagaauuauauuuugua

SEQ ID NO: 234297 - RNA, 18 nt, Human
guggccuggggaagagag

SEQ ID NO: 234298 - RNA, 22 nt, Human
ucauaaaaauuaccagcccaga

SEQ ID NO: 234299 - RNA, 22 nt, Human
uccaccacgugagacaaaagag

SEQ ID NO: 234300 - RNA, 22 nt, Human
agaagccuuuauugugggagga

SEQ ID NO: 234301 - RNA, 22 nt, Human
gcuccaggagucgggauggacu

SEQ ID NO: 234302 - RNA, 25 nt, Human
ggaggaucggggugucagggcuccc

SEQ ID NO: 234303 - RNA, 20 nt, Human
uauugugggaggaucggggu

SEQ ID NO: 234304 - RNA, 21 nt, Human
ugggaggaucggggugucagg

SEQ ID NO: 234305 - RNA, 18 nt, Human
ugugggaggaucggggug

SEQ ID NO: 234306 - RNA, 20 nt, Human
aaacaaaaugcacugagaca

SEQ ID NO: 234307 - RNA, 24 nt, Human
aagcaggaaaacaaaaugcacuga

SEQ ID NO: 234308 - RNA, 25 nt, Human
acaaauaguuuuuacguguggcagu

SEQ ID NO: 234309 - RNA, 22 nt, Human
acagauagaacuuucuguggug

SEQ ID NO: 234310 - RNA, 18 nt, Human
agguagaggucucuugcc

SEQ ID NO: 234311 - RNA, 23 nt, Human
agguaggaagcaggaaaacaaaa

SEQ ID NO: 234312 - RNA, 23 nt, Human
caaacuaccugaggaaaaagccc

SEQ ID NO: 234313 - RNA, 19 nt, Human
cacguagccauugagaacu

SEQ ID NO: 234314 - RNA, 20 nt, Human
ccccuuauuuuaaauuucug

SEQ ID NO: 234315 - RNA, 30 nt, Human
cuaaaaauaaauaauuuccuaaauccaacc

SEQ ID NO: 234316 - RNA, 22 nt, Human
cucucaacuucauauuuaugcc

SEQ ID NO: 234317 - RNA, 23 nt, Human
cuuaauguuucacuaagcaaaua

SEQ ID NO: 234318 - RNA, 22 nt, Human
gaaaaaaagauaugcaaaauac

SEQ ID NO: 234319 - RNA, 18 nt, Human
gaaaacaaaaugcacuga

SEQ ID NO: 234320 - RNA, 21 nt, Human
gaaugcaauacaaauuacgaa

SEQ ID NO: 234321 - RNA, 24 nt, Human
gaguguguuuuucaaacuaccuga

SEQ ID NO: 234322 - RNA, 19 nt, Human
ggaaaacaaaaugcacuga

SEQ ID NO: 234323 - RNA, 19 nt, Human
guuuuucaaacuaccugag

SEQ ID NO: 234324 - RNA, 19 nt, Human
uaacucagcacauuuguag

SEQ ID NO: 234325 - RNA, 21 nt, Human
uaagcaaauaggcugaaaugu

SEQ ID NO: 234326 - RNA, 26 nt, Human
uacaaauuacgaaaaugaaaaaaaga

SEQ ID NO: 234327 - RNA, 18 nt, Human
uaccugaggaaaaagccc

SEQ ID NO: 234328 - RNA, 19 nt, Human
uaccugaggaaaaagccuu

SEQ ID NO: 234329 - RNA, 18 nt, Human
uauagaaugcaauacaaa

SEQ ID NO: 234330 - RNA, 18 nt, Human
uauucugugucugugcug

SEQ ID NO: 234331 - RNA, 21 nt, Human
ucacuaagcaaauaggcugaa

SEQ ID NO: 234332 - RNA, 22 nt, Human
ucuauaauagaacagauagaac

SEQ ID NO: 234333 - RNA, 24 nt, Human
ugagaacuugacguagccauugag

SEQ ID NO: 234334 - RNA, 22 nt, Human
uuacgaaaaugaaaaaaagaua

SEQ ID NO: 234335 - RNA, 23 nt, Human
uugacguagccauugagaacuug

SEQ ID NO: 234336 - RNA, 21 nt, Human
uugagaacuugaaacguagug

SEQ ID NO: 234337 - RNA, 23 nt, Human
aagccaaaacucgcaccaggaaa

SEQ ID NO: 234338 - RNA, 23 nt, Human
aaguagagcccaggggaugacuc

SEQ ID NO: 234339 - RNA, 19 nt, Human
cagccggggaguccggggc

SEQ ID NO: 234340 - RNA, 18 nt, Human
cagcgagaacggcggcgg

SEQ ID NO: 234341 - RNA, 26 nt, Human
cagcgagaacggcggcgggaacggaa

SEQ ID NO: 234342 - RNA, 19 nt, Human
ccaggaaaucaaaguaggg

SEQ ID NO: 234343 - RNA, 21 nt, Human
ccccagucucuccaaaaagag

SEQ ID NO: 234344 - RNA, 20 nt, Human
ccgagcucggguugcgagga

SEQ ID NO: 234345 - RNA, 21 nt, Human
ccgggcuggagcgcgccgccu

SEQ ID NO: 234346 - RNA, 19 nt, Human
cucaggcgggagagaaugc

SEQ ID NO: 234347 - RNA, 21 nt, Human
cucaggcgggagagaaugcga

SEQ ID NO: 234348 - RNA, 18 nt, Human
cuccaaaaagaggacaca

SEQ ID NO: 234349 - RNA, 18 nt, Human
cugcucagagcccgcgga

SEQ ID NO: 234350 - RNA, 22 nt, Human
gcagccggggaguccggggccc

SEQ ID NO: 234351 - RNA, 20 nt, Human
gccccgggcuggagcgcgcc

SEQ ID NO: 234352 - RNA, 21 nt, Human
gccccgggcuggagcgcgccg

SEQ ID NO: 234353 - RNA, 23 nt, Human
ggcggcgggaacggaaauaaaua

SEQ ID NO: 234354 - RNA, 27 nt, Human
gggaacggaaauaaauaaauaaaaacg

SEQ ID NO: 234355 - RNA, 18 nt, Human
gggcuggagcgcgccgcc

SEQ ID NO: 234356 - RNA, 19 nt, Human
gugcagccggggaguccgg

SEQ ID NO: 234357 - RNA, 23 nt, Human
uaaaaacggagaagaagaagacg

SEQ ID NO: 234358 - RNA, 21 nt, Human
uccccagucucuccaaaaaga

SEQ ID NO: 234359 - RNA, 27 nt, Human
uccccagucucuccaaaaagaggacac

SEQ ID NO: 234360 - RNA, 23 nt, Human
ucgggccugggggcgucucagug

SEQ ID NO: 234361 - RNA, 21 nt, Human
ugcagccggggaguccggggc

SEQ ID NO: 234362 - RNA, 18 nt, Human
ugcgaggaaagcgccggg

SEQ ID NO: 234363 - RNA, 22 nt, Human
ugcucagagcccgcggaggagu

SEQ ID NO: 234364 - RNA, 24 nt, Human
uucuguacaaccacgaacuccgca

SEQ ID NO: 234365 - RNA, 21 nt, Human
aaaaggaaugaacuaaugaua

SEQ ID NO: 234366 - RNA, 19 nt, Human
aaacagaauauacaaugug

SEQ ID NO: 234367 - RNA, 20 nt, Human
aaauacacuuggaauucaac

SEQ ID NO: 234368 - RNA, 21 nt, Human
aacaagucauccaaaguaugg

SEQ ID NO: 234369 - RNA, 21 nt, Human
aagaagccagauaaaacagaa

SEQ ID NO: 234370 - RNA, 23 nt, Human
aagaagccagauaaaacagaaua

SEQ ID NO: 234371 - RNA, 19 nt, Human
aauaaaaggaaugaacuaa

SEQ ID NO: 234372 - RNA, 22 nt, Human
aauauacagagaaaaagaggga

SEQ ID NO: 234373 - RNA, 21 nt, Human
acaccgcugcauuagccgggc

SEQ ID NO: 234374 - RNA, 18 nt, Human
agacugggagggaggggc

SEQ ID NO: 234375 - RNA, 20 nt, Human
agacugggagggaggggcua

SEQ ID NO: 234376 - RNA, 19 nt, Human
aggaagacugggagggagg

SEQ ID NO: 234377 - RNA, 21 nt, Human
agggaauggguaaaaucacug

SEQ ID NO: 234378 - RNA, 27 nt, Human
auaaaacagaauauacaaugugugauu

SEQ ID NO: 234379 - RNA, 22 nt, Human
caaugugugauuccaauuauau

SEQ ID NO: 234380 - RNA, 19 nt, Human
caguauuccuaaggcacgu

SEQ ID NO: 234381 - RNA, 26 nt, Human
cugggagggaggggcuacaugaggaa

SEQ ID NO: 234382 - RNA, 18 nt, Human
cuuuuggguaugaugaau

SEQ ID NO: 234383 - RNA, 21 nt, Human
gguaaggaagacugggaggga

SEQ ID NO: 234384 - RNA, 18 nt, Human
guccacaaaacuguacag

SEQ ID NO: 234385 - RNA, 21 nt, Human
uaaaacaguauuccuaaggca

SEQ ID NO: 234386 - RNA, 22 nt, Human
uaaaaucacugguguaucccua

SEQ ID NO: 234387 - RNA, 19 nt, Human
uacagagaaaaagagggag

SEQ ID NO: 234388 - RNA, 24 nt, Human
uagcagcuuuauuugcaauagcca

SEQ ID NO: 234389 - RNA, 22 nt, Human
uagccaaaaucuagaaacaacc

SEQ ID NO: 234390 - RNA, 21 nt, Human
ucaguccacaaaacuguacag

SEQ ID NO: 234391 - RNA, 21 nt, Human
uccacaccgcugcauuagccg

SEQ ID NO: 234392 - RNA, 23 nt, Human
uccacaccgcugcauuagccggg

SEQ ID NO: 234393 - RNA, 21 nt, Human
uccuuugucuguuguggugau

SEQ ID NO: 234394 - RNA, 23 nt, Human
ucgcucaguccacaaaacuguac

SEQ ID NO: 234395 - RNA, 23 nt, Human
ugaaaauacagaagcucuagcca

SEQ ID NO: 234396 - RNA, 18 nt, Human
ugaacaagucauccaaag

SEQ ID NO: 234397 - RNA, 24 nt, Human
ugaacaagucauccaaaguaugga

SEQ ID NO: 234398 - RNA, 18 nt, Human
ugaauguucauagcagcu

SEQ ID NO: 234399 - RNA, 21 nt, Human
ugcaauagccaaaaucuagaa

SEQ ID NO: 234400 - RNA, 18 nt, Human
ugccuggugggguggaga

SEQ ID NO: 234401 - RNA, 21 nt, Human
ugccuggugggguggagaggu

SEQ ID NO: 234402 - RNA, 21 nt, Human
uggugggguggagagguaagg

SEQ ID NO: 234403 - RNA, 20 nt, Human
uguuguuuuuuuuguuuuuu

SEQ ID NO: 234404 - RNA, 21 nt, Human
uuguuguuuuuuuuguuuuuu

SEQ ID NO: 234405 - RNA, 20 nt, Human
uuuuuuuuguacaugaaugu

SEQ ID NO: 234406 - RNA, 24 nt, Human
acgccaccccgcaauagccccgaa

SEQ ID NO: 234407 - RNA, 20 nt, Human
cccgcaauagccccgaaccu

SEQ ID NO: 234408 - RNA, 23 nt, Human
ccgccgcccggcgucgccacucu

SEQ ID NO: 234409 - RNA, 21 nt, Human
ccggcguccaagcgacuccgg

SEQ ID NO: 234410 - RNA, 25 nt, Human
ccgggcccagcgacgccaccccgca

SEQ ID NO: 234411 - RNA, 19 nt, Human
cuccgggugcugcugggcg

SEQ ID NO: 234412 - RNA, 21 nt, Human
gacgccaccccgcaauagccc

SEQ ID NO: 234413 - RNA, 22 nt, Human
uccaagcgacuccgggugcugc

SEQ ID NO: 234414 - RNA, 22 nt, Human
aagcagaacagcaggggagaga

SEQ ID NO: 234415 - RNA, 18 nt, Human
acaggcuggccggccccc

SEQ ID NO: 234416 - RNA, 19 nt, Human
acuccacaggcuggccggc

SEQ ID NO: 234417 - RNA, 23 nt, Human
agacccaacaagccagugucccu

SEQ ID NO: 234418 - RNA, 22 nt, Human
agcaaaguucccaaaggccaag

SEQ ID NO: 234419 - RNA, 20 nt, Human
agccaggggggcagguaggg

SEQ ID NO: 234420 - RNA, 24 nt, Human
aggcauugugugagacacaccagu

SEQ ID NO: 234421 - RNA, 22 nt, Human
agguaggguggggaggagagaa

SEQ ID NO: 234422 - RNA, 20 nt, Human
aucacagucaccuugugcua

SEQ ID NO: 234423 - RNA, 21 nt, Human
caagccaggggggcagguagg

SEQ ID NO: 234424 - RNA, 26 nt, Human
caagccccuaagcagaacagcagggg

SEQ ID NO: 234425 - RNA, 23 nt, Human
caaugcccuaguguggucucaca

SEQ ID NO: 234426 - RNA, 18 nt, Human
caccaguuggagcaaagu

SEQ ID NO: 234427 - RNA, 25 nt, Human
cagaacagcaggggagagacccaac

SEQ ID NO: 234428 - RNA, 21 nt, Human
ccaaagcacugagcagccaag

SEQ ID NO: 234429 - RNA, 21 nt, Human
ccaagcaggccgcuggaguca

SEQ ID NO: 234430 - RNA, 20 nt, Human
ccccccgccaguccccaggg

SEQ ID NO: 234431 - RNA, 19 nt, Human
cccccuccccccgccaguc

SEQ ID NO: 234432 - RNA, 20 nt, Human
ccgcgucgacgaggcauugu

SEQ ID NO: 234433 - RNA, 25 nt, Human
ccugugcuguguucugagaugaguc

SEQ ID NO: 234434 - RNA, 22 nt, Human
cgaaagccagcgagucgcaguc

SEQ ID NO: 234435 - RNA, 21 nt, Human
cggagcgaaagccagcgaguc

SEQ ID NO: 234436 - RNA, 25 nt, Human
cggcccccuccccccgccagucccc

SEQ ID NO: 234437 - RNA, 22 nt, Human
cuaggccauuacccccugugcu

SEQ ID NO: 234438 - RNA, 24 nt, Human
cuaucacagucaccuugugcuacc

SEQ ID NO: 234439 - RNA, 20 nt, Human
cucacagccuucuaggaauc

SEQ ID NO: 234440 - RNA, 19 nt, Human
cucuuuugauccuugaaga

SEQ ID NO: 234441 - RNA, 20 nt, Human
cuggagucacgguggaagcc

SEQ ID NO: 234442 - RNA, 22 nt, Human
cuugaagauauucucucaagcc

SEQ ID NO: 234443 - RNA, 20 nt, Human
gagucugcucucccacugcu

SEQ ID NO: 234444 - RNA, 18 nt, Human
gccccuaagcagaacagc

SEQ ID NO: 234445 - RNA, 20 nt, Human
gcuaccaaagcacugagcag

SEQ ID NO: 234446 - RNA, 19 nt, Human
ggaagccgggcccuccgcu

SEQ ID NO: 234447 - RNA, 23 nt, Human
guccccagucuguuuccaauccc

SEQ ID NO: 234448 - RNA, 23 nt, Human
gucugcucucccacugcuucccc

SEQ ID NO: 234449 - RNA, 20 nt, Human
gugcuguguucugagaugag

SEQ ID NO: 234450 - RNA, 25 nt, Human
uaaaaccccaagcaggccgcuggag

SEQ ID NO: 234451 - RNA, 26 nt, Human
uaauaauuaaaaccccaagcaggccg

SEQ ID NO: 234452 - RNA, 20 nt, Human
uagcucgauucagaaauuuc

SEQ ID NO: 234453 - RNA, 23 nt, Human
uaggaaucagcggaggacuucca

SEQ ID NO: 234454 - RNA, 25 nt, Human
ucaaaauaauaauuaaaaccccaag

SEQ ID NO: 234455 - RNA, 18 nt, Human
ucaagccaggggggcagg

SEQ ID NO: 234456 - RNA, 23 nt, Human
ucaagccaggggggcagguaggg

SEQ ID NO: 234457 - RNA, 22 nt, Human
ucccaaaggccaagggggccuc

SEQ ID NO: 234458 - RNA, 19 nt, Human
ucccacugcuuccccaggg

SEQ ID NO: 234459 - RNA, 20 nt, Human
uuacccccugugcuguguuc

SEQ ID NO: 234460 - RNA, 26 nt, Human
uucaaaauaauaauuaaaaccccaag

SEQ ID NO: 234461 - RNA, 21 nt, Human
uugaaaauaauggaaauucac

SEQ ID NO: 234462 - RNA, 24 nt, Human
uuggagcaaaguucccaaaggcca

SEQ ID NO: 234463 - RNA, 21 nt, Human
acagagcaaaaaaaacaaggc

SEQ ID NO: 234464 - RNA, 23 nt, Human
agagagaacccccgagggacacc

SEQ ID NO: 234465 - RNA, 21 nt, Human
agcagcugcagggcgagucug

SEQ ID NO: 234466 - RNA, 20 nt, Human
agccgaggagcagcugccag

SEQ ID NO: 234467 - RNA, 21 nt, Human
caaaaaaaacaaggcaucagu

SEQ ID NO: 234468 - RNA, 20 nt, Human
cagccgaggagcagcugcca

SEQ ID NO: 234469 - RNA, 20 nt, Human
cagcugccaguugagugcgg

SEQ ID NO: 234470 - RNA, 19 nt, Human
cauaucuaaauuggcuaca

SEQ ID NO: 234471 - RNA, 26 nt, Human
cccccgagggacacccacgucuccca

SEQ ID NO: 234472 - RNA, 20 nt, Human
ccccgggggccgagcgcggg

SEQ ID NO: 234473 - RNA, 23 nt, Human
cccggaguggggugguggggggc

SEQ ID NO: 234474 - RNA, 26 nt, Human
cccuccgcugcccuucgccucuuguc

SEQ ID NO: 234475 - RNA, 20 nt, Human
cccucgggccugccgggccc

SEQ ID NO: 234476 - RNA, 19 nt, Human
ccgcugcccuucgccucuu

SEQ ID NO: 234477 - RNA, 20 nt, Human
ccgcugcccuucgccucuug

SEQ ID NO: 234478 - RNA, 29 nt, Human
ccgguggcggaggcgccggcacuuucccc

SEQ ID NO: 234479 - RNA, 19 nt, Human
cgaggagcagcugccaguu

SEQ ID NO: 234480 - RNA, 22 nt, Human
cgagggacacccacgucuccca

SEQ ID NO: 234481 - RNA, 19 nt, Human
cucaucuuugucuggucgc

SEQ ID NO: 234482 - RNA, 19 nt, Human
cugcagggcgagucugguc

SEQ ID NO: 234483 - RNA, 22 nt, Human
cuggcgcugggcugcccggagu

SEQ ID NO: 234484 - RNA, 18 nt, Human
cuguccggacagagcaaa

SEQ ID NO: 234485 - RNA, 20 nt, Human
cuucggccgccuugcccucc

SEQ ID NO: 234486 - RNA, 19 nt, Human
gagaacccccgagggacac

SEQ ID NO: 234487 - RNA, 22 nt, Human
gagcaaaaaaaacaaggcauca

SEQ ID NO: 234488 - RNA, 19 nt, Human
gaguauugacuuugguccc

SEQ ID NO: 234489 - RNA, 20 nt, Human
ggacagagcaaaaaaaacaa

SEQ ID NO: 234490 - RNA, 18 nt, Human
ggacccgagagagaaccc

SEQ ID NO: 234491 - RNA, 21 nt, Human
ggagaguacuggcggugggcu

SEQ ID NO: 234492 - RNA, 19 nt, Human
ggagaugggggucggcccc

SEQ ID NO: 234493 - RNA, 23 nt, Human
ggaguauugacuuuggucccaag

SEQ ID NO: 234494 - RNA, 19 nt, Human
ggagugggguggugggggg

SEQ ID NO: 234495 - RNA, 22 nt, Human
ggcccccgggggccgagcgcgg

SEQ ID NO: 234496 - RNA, 25 nt, Human
ggcggugggcugaggcuccuggaga

SEQ ID NO: 234497 - RNA, 18 nt, Human
ggcugaggcuccuggaga

SEQ ID NO: 234498 - RNA, 18 nt, Human
ggggcggggcccccgggg

SEQ ID NO: 234499 - RNA, 19 nt, Human
gggggucggccccccucgg

SEQ ID NO: 234500 - RNA, 24 nt, Human
uagcauaucuaaauuggcuacagc

SEQ ID NO: 234501 - RNA, 18 nt, Human
uccggaccaagacucagc

SEQ ID NO: 234502 - RNA, 22 nt, Human
ugcucgcgguugcugggagagu

SEQ ID NO: 234503 - RNA, 21 nt, Human
ugcugggagaguacuggcggu

SEQ ID NO: 234504 - RNA, 22 nt, Human
uggccuggcgcugggcugcccg

SEQ ID NO: 234505 - RNA, 18 nt, Human
uggcggugggcugaggcu

SEQ ID NO: 234506 - RNA, 19 nt, Human
ugggagaguacuggcggug

SEQ ID NO: 234507 - RNA, 19 nt, Human
ugggccccuggcccucggg

SEQ ID NO: 234508 - RNA, 19 nt, Human
uggggugguggggggcggg

SEQ ID NO: 234509 - RNA, 25 nt, Human
uggggugguggggggcggguggcgu

SEQ ID NO: 234510 - RNA, 22 nt, Human
ugguuucaggaggcugcuucgg

SEQ ID NO: 234511 - RNA, 23 nt, Human
uguccggacagagcaaaaaaaac

SEQ ID NO: 234512 - RNA, 23 nt, Human
uucggccgccuugcccucccuuu

SEQ ID NO: 234513 - RNA, 19 nt, Human
uugaguauuagcuuguacc

SEQ ID NO: 234514 - RNA, 18 nt, Human
uugcccucccuuugggcc

SEQ ID NO: 234515 - RNA, 18 nt, Human
uugguuucaggaggcugc

SEQ ID NO: 234516 - RNA, 20 nt, Human
uuucaagcgguccggauccu

SEQ ID NO: 234517 - RNA, 25 nt, Human
aaauaaucugucaguaugaaacauc

SEQ ID NO: 234518 - RNA, 23 nt, Human
aacacugcucugagcagcugccc

SEQ ID NO: 234519 - RNA, 20 nt, Human
aacuuggaggccggcagccc

SEQ ID NO: 234520 - RNA, 26 nt, Human
aagaagccagaacacugcucugagca

SEQ ID NO: 234521 - RNA, 21 nt, Human
aagcaagacagaaaggcaccc

SEQ ID NO: 234522 - RNA, 18 nt, Human
aaggaggacgauggggac

SEQ ID NO: 234523 - RNA, 18 nt, Human
acaaggacagggugggcc

SEQ ID NO: 234524 - RNA, 21 nt, Human
acacacuaugucuacucugga

SEQ ID NO: 234525 - RNA, 20 nt, Human
acacgcuaaagcaagucaca

SEQ ID NO: 234526 - RNA, 18 nt, Human
accaucaucuugucggag

SEQ ID NO: 234527 - RNA, 19 nt, Human
accccaaccccaggccuca

SEQ ID NO: 234528 - RNA, 20 nt, Human
accccaccuuccuggggucu

SEQ ID NO: 234529 - RNA, 20 nt, Human
accccaggccucaggaccug

SEQ ID NO: 234530 - RNA, 23 nt, Human
acccuccaccccaaccccaggcc

SEQ ID NO: 234531 - RNA, 22 nt, Human
acggugggcccacggagcuagc

SEQ ID NO: 234532 - RNA, 22 nt, Human
acucccacucaggccuccccau

SEQ ID NO: 234533 - RNA, 22 nt, Human
acugucuugcccacugcuccag

SEQ ID NO: 234534 - RNA, 20 nt, Human
agaaacccagcucccggccu

SEQ ID NO: 234535 - RNA, 22 nt, Human
agaaaggcacccggccucucca

SEQ ID NO: 234536 - RNA, 22 nt, Human
agacccugacccuaaguucugc

SEQ ID NO: 234537 - RNA, 18 nt, Human
agacccuggccaucccag

SEQ ID NO: 234538 - RNA, 23 nt, Human
agagcuguuucacgcaaaggcuc

SEQ ID NO: 234539 - RNA, 21 nt, Human
agaggcagcauggggacacag

SEQ ID NO: 234540 - RNA, 24 nt, Human
agaugccggcaguuuucagagguu

SEQ ID NO: 234541 - RNA, 22 nt, Human
aggcccccacaucuggacccaa

SEQ ID NO: 234542 - RNA, 19 nt, Human
agggccgcaaggugggccu

SEQ ID NO: 234543 - RNA, 21 nt, Human
aggugugguccacaccagcag

SEQ ID NO: 234544 - RNA, 21 nt, Human
aguaggggauggggguggagc

SEQ ID NO: 234545 - RNA, 24 nt, Human
agucacaguaggggaugggggugg

SEQ ID NO: 234546 - RNA, 19 nt, Human
caaagggacaaguagaggc

SEQ ID NO: 234547 - RNA, 22 nt, Human
caaagugagugaaaaguaccau

SEQ ID NO: 234548 - RNA, 19 nt, Human
caacuccgggccgcacccu

SEQ ID NO: 234549 - RNA, 26 nt, Human
caaggccccccacucccacucaggcc

SEQ ID NO: 234550 - RNA, 19 nt, Human
cacaagaccucccagggcc

SEQ ID NO: 234551 - RNA, 24 nt, Human
caccccaaccccaggccucaggac

SEQ ID NO: 234552 - RNA, 18 nt, Human
cacccuccaccccaaccc

SEQ ID NO: 234553 - RNA, 21 nt, Human
cacccuccaccccaaccccag

SEQ ID NO: 234554 - RNA, 24 nt, Human
cacccuccaccccaaccccaggcc

SEQ ID NO: 234555 - RNA, 19 nt, Human
caccuccacaaaccccugc

SEQ ID NO: 234556 - RNA, 24 nt, Human
caccuccacaaaccccugcugcag

SEQ ID NO: 234557 - RNA, 21 nt, Human
cacgcgccauccagguaaagu

SEQ ID NO: 234558 - RNA, 23 nt, Human
cacugcucugagcagcugcccca

SEQ ID NO: 234559 - RNA, 21 nt, Human
cagaacacugcucugagcagc

SEQ ID NO: 234560 - RNA, 20 nt, Human
cagaaccucugcaccugacu

SEQ ID NO: 234561 - RNA, 24 nt, Human
cagagcuccaaccccacacacuau

SEQ ID NO: 234562 - RNA, 19 nt, Human
cagccacauccucgucuug

SEQ ID NO: 234563 - RNA, 22 nt, Human
cagccccugcagccuggacccu

SEQ ID NO: 234564 - RNA, 25 nt, Human
cagccuggacccugacacgcuaaag

SEQ ID NO: 234565 - RNA, 21 nt, Human
cagcuuccuggucugaguccc

SEQ ID NO: 234566 - RNA, 22 nt, Human
caggccccccgcaccgucuaug

SEQ ID NO: 234567 - RNA, 19 nt, Human
cagggaaaggugcaaagug

SEQ ID NO: 234568 - RNA, 19 nt, Human
cagggagaugaggugaugg

SEQ ID NO: 234569 - RNA, 19 nt, Human
cagggccgcaaggugggcc

SEQ ID NO: 234570 - RNA, 19 nt, Human
cagggccucagaugugagc

SEQ ID NO: 234571 - RNA, 23 nt, Human
caggggcaggguuguuccagggc

SEQ ID NO: 234572 - RNA, 19 nt, Human
cagguaaagugcuuagaga

SEQ ID NO: 234573 - RNA, 22 nt, Human
caucagacccuggccaucccag

SEQ ID NO: 234574 - RNA, 21 nt, Human
caucccagaggccccucucua

SEQ ID NO: 234575 - RNA, 19 nt, Human
ccacucgccuggccccagc

SEQ ID NO: 234576 - RNA, 23 nt, Human
ccagaggccccucucuaucuucc

SEQ ID NO: 234577 - RNA, 21 nt, Human
ccagccccaagcuaagccgga

SEQ ID NO: 234578 - RNA, 28 nt, Human
ccaggcccugcuaagcccuggcccuggc

SEQ ID NO: 234579 - RNA, 21 nt, Human
ccaggccucaggaccugccug

SEQ ID NO: 234580 - RNA, 21 nt, Human
ccagggccgcaaggugggccu

SEQ ID NO: 234581 - RNA, 19 nt, Human
cccaaccccaggccucagg

SEQ ID NO: 234582 - RNA, 23 nt, Human
cccacagcuuccuggucugaguc

SEQ ID NO: 234583 - RNA, 20 nt, Human
cccacaucucaacagccaca

SEQ ID NO: 234584 - RNA, 24 nt, Human
cccacaucucaacagccacauccu

SEQ ID NO: 234585 - RNA, 20 nt, Human
cccacgcuccccaguccaca

SEQ ID NO: 234586 - RNA, 24 nt, Human
cccacucccacucaggccucccca

SEQ ID NO: 234587 - RNA, 21 nt, Human
cccagaguggaguggacuggc

SEQ ID NO: 234588 - RNA, 27 nt, Human
cccagccccugcagccuggacccugac

SEQ ID NO: 234589 - RNA, 23 nt, Human
ccccaaccccaggccucaggacc

SEQ ID NO: 234590 - RNA, 21 nt, Human
ccccaacucugcugccuccuu

SEQ ID NO: 234591 - RNA, 26 nt, Human
ccccacucccacucaggccuccccau

SEQ ID NO: 234592 - RNA, 25 nt, Human
ccccagccacccuuggacaggcccc

SEQ ID NO: 234593 - RNA, 23 nt, Human
cccccacucccacucaggccucc

SEQ ID NO: 234594 - RNA, 22 nt, Human
cccccagucuaccccaccuucc

SEQ ID NO: 234595 - RNA, 23 nt, Human
ccccccagucuaccccaccuucc

SEQ ID NO: 234596 - RNA, 20 nt, Human
ccccgggugccagagcucca

SEQ ID NO: 234597 - RNA, 20 nt, Human
ccccggguggaaucagcaac

SEQ ID NO: 234598 - RNA, 18 nt, Human
ccccugcccuacccaccu

SEQ ID NO: 234599 - RNA, 25 nt, Human
ccccugcugcagguccagccaucag

SEQ ID NO: 234600 - RNA, 23 nt, Human
ccccugggcccugcugucucacc

SEQ ID NO: 234601 - RNA, 23 nt, Human
cccgcaccgucuauggguguccg

SEQ ID NO: 234602 - RNA, 19 nt, Human
cccuccaccccaaccccag

SEQ ID NO: 234603 - RNA, 21 nt, Human
cccuccaccccaaccccaggc

SEQ ID NO: 234604 - RNA, 21 nt, Human
cccucggggucugccagcagc

SEQ ID NO: 234605 - RNA, 23 nt, Human
cccugcccuacccaccuccacaa

SEQ ID NO: 234606 - RNA, 21 nt, Human
cccugcuaagcccuggcccug

SEQ ID NO: 234607 - RNA, 19 nt, Human
cccuggcgcuugugucggg

SEQ ID NO: 234608 - RNA, 19 nt, Human
cccugggccccagccaccc

SEQ ID NO: 234609 - RNA, 19 nt, Human
cccugggccccagccaccc

SEQ ID NO: 234610 - RNA, 22 nt, Human
ccgcucaggguuugagaagaag

SEQ ID NO: 234611 - RNA, 23 nt, Human
ccggccaggcccagguguggucc

SEQ ID NO: 234612 - RNA, 22 nt, Human
ccucaggaccugccugcacacu

SEQ ID NO: 234613 - RNA, 22 nt, Human
ccuccccugcucucagacugga

SEQ ID NO: 234614 - RNA, 24 nt, Human
ccuccucuugggagcaaugggcag

SEQ ID NO: 234615 - RNA, 20 nt, Human
ccucuccuccucccaguguc

SEQ ID NO: 234616 - RNA, 21 nt, Human
ccucuccuccucccagugucu

SEQ ID NO: 234617 - RNA, 20 nt, Human
ccugagacccugacccuaag

SEQ ID NO: 234618 - RNA, 21 nt, Human
ccuuccaucccagaggccccu

SEQ ID NO: 234619 - RNA, 22 nt, Human
ccuuugggauccuagccccucu

SEQ ID NO: 234620 - RNA, 20 nt, Human
cgacucagagccagggccgc

SEQ ID NO: 234621 - RNA, 22 nt, Human
cgcacccuccaccccaacccca

SEQ ID NO: 234622 - RNA, 23 nt, Human
cgcccaagaacagugugaaccag

SEQ ID NO: 234623 - RNA, 19 nt, Human
cgcgccauccagguaaagu

SEQ ID NO: 234624 - RNA, 20 nt, Human
cggcaaggcagagcuggacu

SEQ ID NO: 234625 - RNA, 22 nt, Human
cggggucugccagcagccccca

SEQ ID NO: 234626 - RNA, 21 nt, Human
cgugggcgggacugaaggcug

SEQ ID NO: 234627 - RNA, 20 nt, Human
cuaagcccuggcccuggcgc

SEQ ID NO: 234628 - RNA, 19 nt, Human
cuacccaccuccacaaacu

SEQ ID NO: 234629 - RNA, 21 nt, Human
cucaaguaccucugugugacc

SEQ ID NO: 234630 - RNA, 19 nt, Human
cuccaccccaaccccaggc

SEQ ID NO: 234631 - RNA, 19 nt, Human
cuccaccccaaccccaggc

SEQ ID NO: 234632 - RNA, 20 nt, Human
cuccaccccaaccccaggcc

SEQ ID NO: 234633 - RNA, 23 nt, Human
cuccagucccccucaaguaccuc

SEQ ID NO: 234634 - RNA, 21 nt, Human
cucccggccuggcagagcugu

SEQ ID NO: 234635 - RNA, 19 nt, Human
cucugagcuaccccagccc

SEQ ID NO: 234636 - RNA, 21 nt, Human
cucugcaccugacuuagcaac

SEQ ID NO: 234637 - RNA, 20 nt, Human
cucuggagagccggcaaggc

SEQ ID NO: 234638 - RNA, 21 nt, Human
cucugugugaccucacaagac

SEQ ID NO: 234639 - RNA, 18 nt, Human
cugcagccucccucuccu

SEQ ID NO: 234640 - RNA, 20 nt, Human
cugcagccucccucuccucc

SEQ ID NO: 234641 - RNA, 22 nt, Human
cugcccuacccaccuccacaaa

SEQ ID NO: 234642 - RNA, 20 nt, Human
cugcugcagguccagccauc

SEQ ID NO: 234643 - RNA, 18 nt, Human
cuggacccugacacgcua

SEQ ID NO: 234644 - RNA, 22 nt, Human
cuggagagccggcaaggcagag

SEQ ID NO: 234645 - RNA, 20 nt, Human
cuuccuggucugagucccag

SEQ ID NO: 234646 - RNA, 19 nt, Human
gaaggcuggaugccgggau

SEQ ID NO: 234647 - RNA, 23 nt, Human
gaaguccagcccacgcuccccag

SEQ ID NO: 234648 - RNA, 21 nt, Human
gaccaggcccugcuaagcccu

SEQ ID NO: 234649 - RNA, 21 nt, Human
gagcacugaggauggguccca

SEQ ID NO: 234650 - RNA, 22 nt, Human
gauggggguggagcaggagggc

SEQ ID NO: 234651 - RNA, 20 nt, Human
gauucagugaugcugugcag

SEQ ID NO: 234652 - RNA, 22 nt, Human
gcaaagugagugaaaaguacca

SEQ ID NO: 234653 - RNA, 18 nt, Human
gcagagcuggacuggcug

SEQ ID NO: 234654 - RNA, 19 nt, Human
gcagcugccccaacucugc

SEQ ID NO: 234655 - RNA, 28 nt, Human
gcaggaacaucuguaccaucugcaggga

SEQ ID NO: 234656 - RNA, 20 nt, Human
gcagggaagaucacggggaa

SEQ ID NO: 234657 - RNA, 23 nt, Human
gcaggggcaggguuguuccaggg

SEQ ID NO: 234658 - RNA, 21 nt, Human
gccaagcugccggacgggauc

SEQ ID NO: 234659 - RNA, 21 nt, Human
gcccacgcuccccaguccaca

SEQ ID NO: 234660 - RNA, 22 nt, Human
gccgcacccuccaccccaaccc

SEQ ID NO: 234661 - RNA, 18 nt, Human
gcuguucccuugcccugg

SEQ ID NO: 234662 - RNA, 20 nt, Human
ggaaaccucuaaggccgcac

SEQ ID NO: 234663 - RNA, 18 nt, Human
ggacaaguagaggcagaa

SEQ ID NO: 234664 - RNA, 21 nt, Human
ggacagggugggccacaagga

SEQ ID NO: 234665 - RNA, 19 nt, Human
ggacgggaucuggagggag

SEQ ID NO: 234666 - RNA, 19 nt, Human
ggaggaacuuggaggccgg

SEQ ID NO: 234667 - RNA, 22 nt, Human
ggcacaauaucugccaggaaca

SEQ ID NO: 234668 - RNA, 19 nt, Human
ggccuccagucccccucaa

SEQ ID NO: 234669 - RNA, 21 nt, Human
ggccugaagguggcuucucug

SEQ ID NO: 234670 - RNA, 18 nt, Human
gggaagaucacggggaag

SEQ ID NO: 234671 - RNA, 19 nt, Human
gggcagcaaaggcacagau

SEQ ID NO: 234672 - RNA, 21 nt, Human
gggcgcuauuucagaggcagc

SEQ ID NO: 234673 - RNA, 23 nt, Human
ggggacgauggggaggagagaca

SEQ ID NO: 234674 - RNA, 20 nt, Human
ggggccaaguccaggcuggg

SEQ ID NO: 234675 - RNA, 24 nt, Human
gggggcugguccacuccccugggc

SEQ ID NO: 234676 - RNA, 19 nt, Human
gggugggagugggaugggg

SEQ ID NO: 234677 - RNA, 18 nt, Human
ggugcaggggcaggguug

SEQ ID NO: 234678 - RNA, 18 nt, Human
guccacuccccugggccc

SEQ ID NO: 234679 - RNA, 19 nt, Human
gugauaauuugcugggggc

SEQ ID NO: 234680 - RNA, 21 nt, Human
uaaauaagggcccggagacau

SEQ ID NO: 234681 - RNA, 23 nt, Human
uaaauaauaaauaagggcccgga

SEQ ID NO: 234682 - RNA, 26 nt, Human
uaacuuggccacugaaagcaccaaga

SEQ ID NO: 234683 - RNA, 21 nt, Human
uaaggcaggaacaucuguacc

SEQ ID NO: 234684 - RNA, 23 nt, Human
uaggauaucauaauaaauagaaa

SEQ ID NO: 234685 - RNA, 24 nt, Human
ucagaaccucugcaccugacuuag

SEQ ID NO: 234686 - RNA, 18 nt, Human
ucaggccuccccauucuc

SEQ ID NO: 234687 - RNA, 22 nt, Human
ucagggacaaggaggacgaugg

SEQ ID NO: 234688 - RNA, 21 nt, Human
uccaaccccacacacuauguc

SEQ ID NO: 234689 - RNA, 19 nt, Human
uccacaaaccccugcugca

SEQ ID NO: 234690 - RNA, 24 nt, Human
uccacaaaccccugcugcaggucc

SEQ ID NO: 234691 - RNA, 21 nt, Human
uccacaaauuggcccagcccc

SEQ ID NO: 234692 - RNA, 24 nt, Human
uccacucgccuggccccagcacaa

SEQ ID NO: 234693 - RNA, 24 nt, Human
uccagcccacgcuccccaguccac

SEQ ID NO: 234694 - RNA, 20 nt, Human
uccaggcugggugggagagc

SEQ ID NO: 234695 - RNA, 24 nt, Human
ucccagaggaaggggcaccuucuu

SEQ ID NO: 234696 - RNA, 24 nt, Human
ucccagaggccccucucuaucuuc

SEQ ID NO: 234697 - RNA, 20 nt, Human
ucccauggggccaaguccag

SEQ ID NO: 234698 - RNA, 24 nt, Human
uccccgggugccagagcuccaacc

SEQ ID NO: 234699 - RNA, 30 nt, Human
ucccggccuggcagagcuguuucacgcaaa

SEQ ID NO: 234700 - RNA, 20 nt, Human
uccuggggucuggcccagcc

SEQ ID NO: 234701 - RNA, 18 nt, Human
uccuucccaggccugaag

SEQ ID NO: 234702 - RNA, 25 nt, Human
uccuuugggauccuagccccucugg

SEQ ID NO: 234703 - RNA, 19 nt, Human
ucucaacagccacauccuc

SEQ ID NO: 234704 - RNA, 23 nt, Human
ucucccagaggaaggggcaccuu

SEQ ID NO: 234705 - RNA, 21 nt, Human
ucugcugccuccuucccuccc

SEQ ID NO: 234706 - RNA, 23 nt, Human
ugacccuaaguucugcuguuccc

SEQ ID NO: 234707 - RNA, 25 nt, Human
ugagaucccucgguucacagcacac

SEQ ID NO: 234708 - RNA, 21 nt, Human
ugaggugaugggcgagucagc

SEQ ID NO: 234709 - RNA, 19 nt, Human
ugcaggguggacgccaagc

SEQ ID NO: 234710 - RNA, 21 nt, Human
ugcauccuggacaagggugag

SEQ ID NO: 234711 - RNA, 21 nt, Human
ugccccugcccuacccaccuc

SEQ ID NO: 234712 - RNA, 19 nt, Human
ugcccugggccccagccac

SEQ ID NO: 234713 - RNA, 21 nt, Human
ugcccuggggaccagagacgg

SEQ ID NO: 234714 - RNA, 18 nt, Human
ugccugggagcccagaca

SEQ ID NO: 234715 - RNA, 25 nt, Human
ugcugggggcugguccacuccccug

SEQ ID NO: 234716 - RNA, 28 nt, Human
ugcugggggcugguccacuccccugggc

SEQ ID NO: 234717 - RNA, 18 nt, Human
ugcugggugcaggggcag

SEQ ID NO: 234718 - RNA, 20 nt, Human
uggaaacuucugccagauug

SEQ ID NO: 234719 - RNA, 21 nt, Human
uggaaguuuccacucugcuca

SEQ ID NO: 234720 - RNA, 23 nt, Human
uggaaucagcaacucugguuucc

SEQ ID NO: 234721 - RNA, 21 nt, Human
uggaggaaaccucagaugccg

SEQ ID NO: 234722 - RNA, 22 nt, Human
uggaguggacuggccaggcacc

SEQ ID NO: 234723 - RNA, 21 nt, Human
uggcccacaucucaacagcca

SEQ ID NO: 234724 - RNA, 22 nt, Human
uggcccaccuaagucccaaccu

SEQ ID NO: 234725 - RNA, 18 nt, Human
uggcugggucagggugga

SEQ ID NO: 234726 - RNA, 20 nt, Human
uggcugggucaggguggaag

SEQ ID NO: 234727 - RNA, 20 nt, Human
ugggagugggaugggggugg

SEQ ID NO: 234728 - RNA, 21 nt, Human
ugggagugggauggggguggg

SEQ ID NO: 234729 - RNA, 22 nt, Human
ugggauggacagauggacaacu

SEQ ID NO: 234730 - RNA, 18 nt, Human
ugggauggggguggagca

SEQ ID NO: 234731 - RNA, 19 nt, Human
ugggauggggguggagcag

SEQ ID NO: 234732 - RNA, 24 nt, Human
ugggauggggguggagcaggaggg

SEQ ID NO: 234733 - RNA, 23 nt, Human
ugggcccugcugucucacccugu

SEQ ID NO: 234734 - RNA, 22 nt, Human
uggggacacagaaacaaggaca

SEQ ID NO: 234735 - RNA, 18 nt, Human
uggggacgauggggagga

SEQ ID NO: 234736 - RNA, 20 nt, Human
uggggccaaguccaggcugg

SEQ ID NO: 234737 - RNA, 18 nt, Human
ugguccacaccagcagau

SEQ ID NO: 234738 - RNA, 19 nt, Human
uggucugagucccaggcgu

SEQ ID NO: 234739 - RNA, 18 nt, Human
ugucuugcccacugcucc

SEQ ID NO: 234740 - RNA, 18 nt, Human
uguugaguagggaccagg

SEQ ID NO: 234741 - RNA, 20 nt, Human
uuccuggucugagucccagg

SEQ ID NO: 234742 - RNA, 24 nt, Human
uugcugggggcugguccacucccc

SEQ ID NO: 234743 - RNA, 28 nt, Human
uugcugggggcugguccacuccccuggg

SEQ ID NO: 234744 - RNA, 20 nt, Human
uuuccaggccucuccuccuc

SEQ ID NO: 234745 - RNA, 23 nt, Human
uuuccaggccucuccuccuccca

SEQ ID NO: 234746 - RNA, 21 nt, Human
aaaaaaaacaaacaaaaaaga

SEQ ID NO: 234747 - RNA, 25 nt, Human
aaaaaaaacaaacaaaaaagacaua

SEQ ID NO: 234748 - RNA, 20 nt, Human
aaaaaacaaacaaaaaagac

SEQ ID NO: 234749 - RNA, 21 nt, Human
aaaaaauaaugaaaaggcaag

SEQ ID NO: 234750 - RNA, 21 nt, Human
aaaaauaaugaaaaggcaagc

SEQ ID NO: 234751 - RNA, 30 nt, Human
aaacaaacaaaaaagacauaucuuauucgg

SEQ ID NO: 234752 - RNA, 27 nt, Human
aaacaaacaaccaaccaaaaaaaacaa

SEQ ID NO: 234753 - RNA, 21 nt, Human
aaacaacagaacagaaaacag

SEQ ID NO: 234754 - RNA, 19 nt, Human
aaagggcccggugccuugc

SEQ ID NO: 234755 - RNA, 21 nt, Human
aaauccacuuacaauuccacc

SEQ ID NO: 234756 - RNA, 18 nt, Human
aaccugagggcagggaaa

SEQ ID NO: 234757 - RNA, 18 nt, Human
aacuucaccuguuacuug

SEQ ID NO: 234758 - RNA, 19 nt, Human
aagcaaaaccuaucacagc

SEQ ID NO: 234759 - RNA, 18 nt, Human
aagcauucucucuuuagu

SEQ ID NO: 234760 - RNA, 19 nt, Human
aaugaaaaggcaagcaaaa

SEQ ID NO: 234761 - RNA, 21 nt, Human
acaaccaaccaaaaaaaacaa

SEQ ID NO: 234762 - RNA, 27 nt, Human
acaugaacuuucaguguaacuuaacau

SEQ ID NO: 234763 - RNA, 20 nt, Human
accaaaaaaaacaaacaaaa

SEQ ID NO: 234764 - RNA, 22 nt, Human
acuuuugccuuaaauaugaaaa

SEQ ID NO: 234765 - RNA, 25 nt, Human
agacaucgcuuaugagaaacaaggg

SEQ ID NO: 234766 - RNA, 18 nt, Human
agcaaaaccuaucacagc

SEQ ID NO: 234767 - RNA, 19 nt, Human
agcugaauccuagcaguua

SEQ ID NO: 234768 - RNA, 22 nt, Human
aggcaaauaaacuucaccuguu

SEQ ID NO: 234769 - RNA, 18 nt, Human
agggaaaauacaagauac

SEQ ID NO: 234770 - RNA, 23 nt, Human
agggugggcagaggaugcugugc

SEQ ID NO: 234771 - RNA, 20 nt, Human
aggugucaaagaucaccacu

SEQ ID NO: 234772 - RNA, 24 nt, Human
aggugucaaagaucaccacugccu

SEQ ID NO: 234773 - RNA, 24 nt, Human
aguuacuaagaaacagcccuuggg

SEQ ID NO: 234774 - RNA, 20 nt, Human
auaaagcucagaaauuuagc

SEQ ID NO: 234775 - RNA, 21 nt, Human
auaaugaaaaggcaagcaaaa

SEQ ID NO: 234776 - RNA, 23 nt, Human
auccauuauuugcaaauacauua

SEQ ID NO: 234777 - RNA, 22 nt, Human
caaaaaaaacaaacaaaaaaga

SEQ ID NO: 234778 - RNA, 22 nt, Human
caaaacacuaaaucgcugucac

SEQ ID NO: 234779 - RNA, 22 nt, Human
caaaguuuguaccccugagaca

SEQ ID NO: 234780 - RNA, 21 nt, Human
caacacuagcaguaagagcuu

SEQ ID NO: 234781 - RNA, 21 nt, Human
caaccaaccaaaaaaaacaaa

SEQ ID NO: 234782 - RNA, 24 nt, Human
caaccaaccaaaaaaaacaaacaa

SEQ ID NO: 234783 - RNA, 21 nt, Human
caacugaaauaauggaagcaa

SEQ ID NO: 234784 - RNA, 25 nt, Human
caauugcugcaccucgaacacaggu

SEQ ID NO: 234785 - RNA, 20 nt, Human
cacagaucauaaagcucaga

SEQ ID NO: 234786 - RNA, 18 nt, Human
cagaaaacaguugcggcg

SEQ ID NO: 234787 - RNA, 23 nt, Human
cagaacagaaaacaguugcggcg

SEQ ID NO: 234788 - RNA, 21 nt, Human
cagaggcucccuuucugagcu

SEQ ID NO: 234789 - RNA, 22 nt, Human
cagcccuuggguaacuguuccu

SEQ ID NO: 234790 - RNA, 20 nt, Human
caguaggcacagaaauaagc

SEQ ID NO: 234791 - RNA, 25 nt, Human
ccaaaaaaaacaaacaaaaaagaca

SEQ ID NO: 234792 - RNA, 22 nt, Human
ccacaaacaacagaacagaaaa

SEQ ID NO: 234793 - RNA, 21 nt, Human
cgaacacagguaugcccaugg

SEQ ID NO: 234794 - RNA, 26 nt, Human
cuagcaguuaaaaucaggauucauac

SEQ ID NO: 234795 - RNA, 22 nt, Human
cuccuaacaauacuucacagga

SEQ ID NO: 234796 - RNA, 18 nt, Human
cuccucaggaggaacgaa

SEQ ID NO: 234797 - RNA, 20 nt, Human
cuuacaauuccaccaaguau

SEQ ID NO: 234798 - RNA, 24 nt, Human
cuucugcuuuuccaagaaccacaa

SEQ ID NO: 234799 - RNA, 20 nt, Human
gaggaacauccaccagaagg

SEQ ID NO: 234800 - RNA, 24 nt, Human
gcaaugcagucaguccuggagggc

SEQ ID NO: 234801 - RNA, 21 nt, Human
gcugcaccucgaacacaggua

SEQ ID NO: 234802 - RNA, 26 nt, Human
gcugugcugaaggcaaucaauucugc

SEQ ID NO: 234803 - RNA, 18 nt, Human
ggaguaaacgucaggcaa

SEQ ID NO: 234804 - RNA, 23 nt, Human
guagguauuagccuugaaaugcu

SEQ ID NO: 234805 - RNA, 24 nt, Human
uaaaaaacaaacaaccaaccaaaa

SEQ ID NO: 234806 - RNA, 21 nt, Human
uaaaaaauaaugaaaaggcaa

SEQ ID NO: 234807 - RNA, 25 nt, Human
uaaaauacauaggcaaccugagggc

SEQ ID NO: 234808 - RNA, 19 nt, Human
uacauaggcaaccugaggg

SEQ ID NO: 234809 - RNA, 25 nt, Human
uacauaugagaaaaccacaaacaac

SEQ ID NO: 234810 - RNA, 19 nt, Human
uacuauguauguacaaaau

SEQ ID NO: 234811 - RNA, 23 nt, Human
uagaaaggaguaaacgucaggca

SEQ ID NO: 234812 - RNA, 20 nt, Human
uagaguacaugagaauucuu

SEQ ID NO: 234813 - RNA, 21 nt, Human
uagcaacacuagcaguaagag

SEQ ID NO: 234814 - RNA, 25 nt, Human
uagcugaauccuagcaguuaaaauc

SEQ ID NO: 234815 - RNA, 18 nt, Human
uaucacaaaauaaaauga

SEQ ID NO: 234816 - RNA, 20 nt, Human
ucagaugauaaaaaacaaac

SEQ ID NO: 234817 - RNA, 21 nt, Human
uccaaauuuccacagaucaua

SEQ ID NO: 234818 - RNA, 22 nt, Human
uccuucugcuuuuccaagaacc

SEQ ID NO: 234819 - RNA, 24 nt, Human
ucuuuggcuugaucacaaagagcu

SEQ ID NO: 234820 - RNA, 18 nt, Human
ugaaaagacucaugagug

SEQ ID NO: 234821 - RNA, 23 nt, Human
ugaaaaggcaagcaaaaccuauc

SEQ ID NO: 234822 - RNA, 19 nt, Human
ugaaggcaaucaauucugc

SEQ ID NO: 234823 - RNA, 23 nt, Human
ugaaggcaaucaauucugcacag

SEQ ID NO: 234824 - RNA, 22 nt, Human
ugagaaaaccacaaacaacaga

SEQ ID NO: 234825 - RNA, 23 nt, Human
ugagaaaaccacaaacaacagaa

SEQ ID NO: 234826 - RNA, 25 nt, Human
ugagaaaaccacaaacaacagaacc

SEQ ID NO: 234827 - RNA, 20 nt, Human
ugagauggcugacugaagug

SEQ ID NO: 234828 - RNA, 18 nt, Human
ugaggauucugagucacu

SEQ ID NO: 234829 - RNA, 19 nt, Human
ugauaaaaaacaaacaacc

SEQ ID NO: 234830 - RNA, 19 nt, Human
ugcaagugcaguucugcag

SEQ ID NO: 234831 - RNA, 18 nt, Human
uggcugacugaagugaca

SEQ ID NO: 234832 - RNA, 22 nt, Human
ugggaggaacauccaccagaag

SEQ ID NO: 234833 - RNA, 21 nt, Human
ugucaaagaucaccacugccu

SEQ ID NO: 234834 - RNA, 19 nt, Human
ugucacuguaucacaaaau

SEQ ID NO: 234835 - RNA, 26 nt, Human
ugucacuguaucacaaaauaaaauga

SEQ ID NO: 234836 - RNA, 21 nt, Human
uguggcaugaugaaaagacuc

SEQ ID NO: 234837 - RNA, 18 nt, Human
uguuugauaaccauuaua

SEQ ID NO: 234838 - RNA, 19 nt, Human
uuacuaagaaacagcccuu

SEQ ID NO: 234839 - RNA, 22 nt, Human
uuacuuggacauuuucucccug

SEQ ID NO: 234840 - RNA, 23 nt, Human
uuacuuggacauuuucucccuga

SEQ ID NO: 234841 - RNA, 20 nt, Human
uucaucuagaaaggaguaaa

SEQ ID NO: 234842 - RNA, 22 nt, Human
uugaaaugcuucuugaagguag

SEQ ID NO: 234843 - RNA, 22 nt, Human
uuuuuuuucgggauggcucuga

SEQ ID NO: 234844 - RNA, 26 nt, Human
uuuuuuuuuucgggauggcucugauu

SEQ ID NO: 234845 - RNA, 25 nt, Human
acaccccuccccugacucucaaaau

SEQ ID NO: 234846 - RNA, 20 nt, Human
agcacuuuucuucgucuguc

SEQ ID NO: 234847 - RNA, 24 nt, Human
aggcaauaauaacccugggguccg

SEQ ID NO: 234848 - RNA, 18 nt, Human
cacaccccuccccugacu

SEQ ID NO: 234849 - RNA, 25 nt, Human
cacaccccuccccugacucucaaaa

SEQ ID NO: 234850 - RNA, 20 nt, Human
cacccccucacacacacacc

SEQ ID NO: 234851 - RNA, 19 nt, Human
caccccuccccugacucuc

SEQ ID NO: 234852 - RNA, 24 nt, Human
cagacuccggaguaagccaccccc

SEQ ID NO: 234853 - RNA, 24 nt, Human
ccacagccugccacagcagauuug

SEQ ID NO: 234854 - RNA, 21 nt, Human
ccacccccucacacacacacc

SEQ ID NO: 234855 - RNA, 21 nt, Human
cccaggcccuaggagggcgag

SEQ ID NO: 234856 - RNA, 23 nt, Human
cccgggcaacacacucagauccg

SEQ ID NO: 234857 - RNA, 19 nt, Human
ccucacacacacaccccuc

SEQ ID NO: 234858 - RNA, 19 nt, Human
ccucacacacacaccccuc

SEQ ID NO: 234859 - RNA, 24 nt, Human
ccucacacacacaccccuccccug

SEQ ID NO: 234860 - RNA, 24 nt, Human
ccuuccuguccagcacuuuucuuc

SEQ ID NO: 234861 - RNA, 20 nt, Human
gcgcgccgcugcccgggcaa

SEQ ID NO: 234862 - RNA, 20 nt, Human
gcuaaaaagcaaaggcaaua

SEQ ID NO: 234863 - RNA, 20 nt, Human
ucccgcgcgccgcugcccgg

SEQ ID NO: 234864 - RNA, 23 nt, Human
ucccgcgcgccgcugcccgggca

SEQ ID NO: 234865 - RNA, 22 nt, Human
ugccacagcagauuugcuaaaa

SEQ ID NO: 234866 - RNA, 20 nt, Human
uuucuucgucugucagcugc

SEQ ID NO: 234867 - RNA, 18 nt, Human
aaaaagauggcaaaccca

SEQ ID NO: 234868 - RNA, 21 nt, Human
aaaaagauggcaaacccagca

SEQ ID NO: 234869 - RNA, 22 nt, Human
aaaacaaaaagauggcaaaccc

SEQ ID NO: 234870 - RNA, 20 nt, Human
aaacaaaaagauggcaaacc

SEQ ID NO: 234871 - RNA, 23 nt, Human
aaacaaaaagauggcaaacccag

SEQ ID NO: 234872 - RNA, 19 nt, Human
aaaggagaguauggccuga

SEQ ID NO: 234873 - RNA, 22 nt, Human
aaccagcaagacaaacugacuu

SEQ ID NO: 234874 - RNA, 20 nt, Human
aagaaaacaaaaagauggca

SEQ ID NO: 234875 - RNA, 21 nt, Human
aagaaaacaagguagguggca

SEQ ID NO: 234876 - RNA, 19 nt, Human
aagaagaucuugaaagcca

SEQ ID NO: 234877 - RNA, 22 nt, Human
aagagacaguggagaacuggug

SEQ ID NO: 234878 - RNA, 22 nt, Human
agaagcaagcccauucccccua

SEQ ID NO: 234879 - RNA, 20 nt, Human
agcacccagcucugaaagau

SEQ ID NO: 234880 - RNA, 18 nt, Human
agcugccucuccggcucc

SEQ ID NO: 234881 - RNA, 19 nt, Human
agcuguggcacccacagca

SEQ ID NO: 234882 - RNA, 21 nt, Human
aggcuuucuucucaggaagag

SEQ ID NO: 234883 - RNA, 23 nt, Human
agugauguuuucggaauaggcac

SEQ ID NO: 234884 - RNA, 25 nt, Human
cacccacagcaacuaauuccugguc

SEQ ID NO: 234885 - RNA, 18 nt, Human
cagcaagacaaacugacu

SEQ ID NO: 234886 - RNA, 23 nt, Human
cagcaagacaaacugacuucagc

SEQ ID NO: 234887 - RNA, 18 nt, Human
ccggcuccggcgcucacc

SEQ ID NO: 234888 - RNA, 18 nt, Human
ccugagggagagggaaga

SEQ ID NO: 234889 - RNA, 26 nt, Human
cuggaaugauagaacaggcuuucuuc

SEQ ID NO: 234890 - RNA, 22 nt, Human
cuuacaucacgccagugauguu

SEQ ID NO: 234891 - RNA, 24 nt, Human
cuuucuucucaggaagaggggaug

SEQ ID NO: 234892 - RNA, 20 nt, Human
uaaauuuugacuuggggcca

SEQ ID NO: 234893 - RNA, 19 nt, Human
uagguggcacgugaucuua

SEQ ID NO: 234894 - RNA, 23 nt, Human
ucggaauaggcacaguucuuuuc

SEQ ID NO: 234895 - RNA, 21 nt, Human
ucuccggcuccggcgcucacc

SEQ ID NO: 234896 - RNA, 25 nt, Human
ucugaaagaucuauuuaaaccagca

SEQ ID NO: 234897 - RNA, 19 nt, Human
ugacugggcuuuucccuuu

SEQ ID NO: 234898 - RNA, 20 nt, Human
ugacuuggggccagcagcug

SEQ ID NO: 234899 - RNA, 20 nt, Human
ugagucccugcagucucucc

SEQ ID NO: 234900 - RNA, 19 nt, Human
ugagugcacggaggguuug

SEQ ID NO: 234901 - RNA, 20 nt, Human
ugaucuuagauggcuucccu

SEQ ID NO: 234902 - RNA, 20 nt, Human
ugcacggaggguuuguggaa

SEQ ID NO: 234903 - RNA, 23 nt, Human
ugccuccagccugaguccagucc

SEQ ID NO: 234904 - RNA, 27 nt, Human
uggaaagaagaucuugaaagccaaaga

SEQ ID NO: 234905 - RNA, 18 nt, Human
uucucaggaagaggggau

SEQ ID NO: 234906 - RNA, 23 nt, Human
uuuuuuuuuuuuuuuuuuaacug

SEQ ID NO: 234907 - RNA, 18 nt, Human
aagagucugugacaucuu

SEQ ID NO: 234908 - RNA, 20 nt, Human
aagcaggcaauacaguucca

SEQ ID NO: 234909 - RNA, 21 nt, Human
aaucauugaauacuacauuca

SEQ ID NO: 234910 - RNA, 18 nt, Human
aggcagccaucaaagcgg

SEQ ID NO: 234911 - RNA, 26 nt, Human
augaaauuuucuccaagaaucuaaaa

SEQ ID NO: 234912 - RNA, 23 nt, Human
caaaaggaacgugagaugcaaca

SEQ ID NO: 234913 - RNA, 18 nt, Human
caaugagucugccagauc

SEQ ID NO: 234914 - RNA, 26 nt, Human
caaugagucugccagaucagaggcuu

SEQ ID NO: 234915 - RNA, 20 nt, Human
cacagcaucaggaggccagg

SEQ ID NO: 234916 - RNA, 20 nt, Human
caccuugaucauaaaaaauc

SEQ ID NO: 234917 - RNA, 22 nt, Human
cagcuguaaaaugagaucuuga

SEQ ID NO: 234918 - RNA, 21 nt, Human
caucaaagcggugaugaaucu

SEQ ID NO: 234919 - RNA, 19 nt, Human
cccagcuguaaaaugagau

SEQ ID NO: 234920 - RNA, 19 nt, Human
ccucugugaaccagagaau

SEQ ID NO: 234921 - RNA, 24 nt, Human
cuaaaaauucccugaagugucuga

SEQ ID NO: 234922 - RNA, 22 nt, Human
cugauuuuuucugcacguccuu

SEQ ID NO: 234923 - RNA, 19 nt, Human
gagcaucaugaaauuuucu

SEQ ID NO: 234924 - RNA, 18 nt, Human
gcacagcaucaggaggcc

SEQ ID NO: 234925 - RNA, 23 nt, Human
gcaucaugaaauuuucuccaaga

SEQ ID NO: 234926 - RNA, 23 nt, Human
uaaaaagagucugugacaucuuu

SEQ ID NO: 234927 - RNA, 21 nt, Human
uaaagcaggcaauacaguucc

SEQ ID NO: 234928 - RNA, 19 nt, Human
uaccucugugaaccagaga

SEQ ID NO: 234929 - RNA, 23 nt, Human
uacgcagguaaagcaggcaauac

SEQ ID NO: 234930 - RNA, 23 nt, Human
ucaaagcggugaugaaucuucuc

SEQ ID NO: 234931 - RNA, 24 nt, Human
ucccugaagugucugauuuuuucu

SEQ ID NO: 234932 - RNA, 23 nt, Human
ucuagauuucuauauggauauua

SEQ ID NO: 234933 - RNA, 20 nt, Human
ugagaugcaacaguuuguga

SEQ ID NO: 234934 - RNA, 23 nt, Human
uucaccuugaucauaaaaaauca

SEQ ID NO: 234935 - RNA, 24 nt, Human
uugaacacaaaucugcaaaaggaa

SEQ ID NO: 234936 - RNA, 23 nt, Human
uugugaggcagccaucaaagcgg

SEQ ID NO: 234937 - RNA, 20 nt, Human
uuuccugcgggguugccaug

SEQ ID NO: 234938 - RNA, 22 nt, Human
uuuuucuuucuuggcuuuggga

SEQ ID NO: 234939 - RNA, 23 nt, Human
aaauugucucccggaaccuccug

SEQ ID NO: 234940 - RNA, 19 nt, Human
agacucagaucagcagaga

SEQ ID NO: 234941 - RNA, 18 nt, Human
agguaucacauguuaaug

SEQ ID NO: 234942 - RNA, 23 nt, Human
aucagcccuaaauugucucccgg

SEQ ID NO: 234943 - RNA, 19 nt, Human
cagcccuaaauugucuccc

SEQ ID NO: 234944 - RNA, 23 nt, Human
caucagaucuguucccaaggcuc

SEQ ID NO: 234945 - RNA, 19 nt, Human
ccuaaauugucucccggaa

SEQ ID NO: 234946 - RNA, 21 nt, Human
ccuccagcccuggagaugcuu

SEQ ID NO: 234947 - RNA, 22 nt, Human
cuccagcccuggagaugcuuca

SEQ ID NO: 234948 - RNA, 21 nt, Human
cucccggaaccuccuggcauc

SEQ ID NO: 234949 - RNA, 21 nt, Human
cuucagggaagaccaaggucc

SEQ ID NO: 234950 - RNA, 22 nt, Human
gauuggcagacaguccagauaa

SEQ ID NO: 234951 - RNA, 24 nt, Human
ucagaucuguucccaaggcuccac

SEQ ID NO: 234952 - RNA, 23 nt, Human
uccaugcugcaggcagacucaga

SEQ ID NO: 234953 - RNA, 23 nt, Human
ucccaaggcuccaccacucugaa

SEQ ID NO: 234954 - RNA, 21 nt, Human
ucgcaucuggcuguguagcuc

SEQ ID NO: 234955 - RNA, 24 nt, Human
ucggugcauggcagucgucccucc

SEQ ID NO: 234956 - RNA, 20 nt, Human
ucucccggaaccuccuggca

SEQ ID NO: 234957 - RNA, 22 nt, Human
uggcagacaguccagauaacau

SEQ ID NO: 234958 - RNA, 18 nt, Human
ugucucccggaaccuccu

SEQ ID NO: 234959 - RNA, 23 nt, Human
uuccucccucuaaaaaugauugg

SEQ ID NO: 234960 - RNA, 21 nt, Human
aggacagagagacgcacaggg

SEQ ID NO: 234961 - RNA, 18 nt, Human
caggacagagagacgcac

SEQ ID NO: 234962 - RNA, 23 nt, Human
caucagaucugucccugaggcuc

SEQ ID NO: 234963 - RNA, 20 nt, Human
cgcugaaguaugcauugucc

SEQ ID NO: 234964 - RNA, 23 nt, Human
cuaggaaucaccccagacaguuu

SEQ ID NO: 234965 - RNA, 22 nt, Human
cugucccugaggcuccaccacg

SEQ ID NO: 234966 - RNA, 18 nt, Human
cugucucuagaaaugacc

SEQ ID NO: 234967 - RNA, 18 nt, Human
uagguccuagauuguccu

SEQ ID NO: 234968 - RNA, 18 nt, Human
ucaaauauugauugcugu

SEQ ID NO: 234969 - RNA, 19 nt, Human
ucaccccagacaguuuccu

SEQ ID NO: 234970 - RNA, 23 nt, Human
uccuuacacucaaauauugauug

SEQ ID NO: 234971 - RNA, 19 nt, Human
ugggaucaucagaucuguc

SEQ ID NO: 234972 - RNA, 23 nt, Human
aaaaaaaaaaaaaaaagaaagaa

SEQ ID NO: 234973 - RNA, 24 nt, Human
aaaaaaagaaagaaaagaaaagaa

SEQ ID NO: 234974 - RNA, 21 nt, Human
aaauguccacccaggacaccc

SEQ ID NO: 234975 - RNA, 23 nt, Human
aaguuggaaugaauauaauucuu

SEQ ID NO: 234976 - RNA, 24 nt, Human
aaucacuugaacccgagaggcgga

SEQ ID NO: 234977 - RNA, 24 nt, Human
acagagcaagacuccaucucaaaa

SEQ ID NO: 234978 - RNA, 22 nt, Human
acucaaacacccauuccucccu

SEQ ID NO: 234979 - RNA, 23 nt, Human
acugcauuccagccuggugacag

SEQ ID NO: 234980 - RNA, 25 nt, Human
acugcauuccagccuggugacagag

SEQ ID NO: 234981 - RNA, 19 nt, Human
agaaaagaaaagaaagaaa

SEQ ID NO: 234982 - RNA, 24 nt, Human
agaaagaaaagaaaagaaagaaaa

SEQ ID NO: 234983 - RNA, 21 nt, Human
agaaucacuugaacccgagag

SEQ ID NO: 234984 - RNA, 21 nt, Human
agccuggugacagagcaagac

SEQ ID NO: 234985 - RNA, 23 nt, Human
agccuggugacagagcaagacuc

SEQ ID NO: 234986 - RNA, 19 nt, Human
aggaccugacccucugugc

SEQ ID NO: 234987 - RNA, 18 nt, Human
aggcaggagaaucacuug

SEQ ID NO: 234988 - RNA, 24 nt, Human
aggcaggagaaucacuugaacccg

SEQ ID NO: 234989 - RNA, 19 nt, Human
aggcggagguugcagugag

SEQ ID NO: 234990 - RNA, 24 nt, Human
aggcggagguugcagugagcccag

SEQ ID NO: 234991 - RNA, 24 nt, Human
aggcugaggcaggagaaucacuug

SEQ ID NO: 234992 - RNA, 22 nt, Human
aucagauucgcuuccaaggcuc

SEQ ID NO: 234993 - RNA, 24 nt, Human
auugcgccacugcauuccagccug

SEQ ID NO: 234994 - RNA, 21 nt, Human
caagacuccaucucaaaaaaa

SEQ ID NO: 234995 - RNA, 18 nt, Human
cacugcauuccagccugg

SEQ ID NO: 234996 - RNA, 18 nt, Human
cacugcauuccagccugg

SEQ ID NO: 234997 - RNA, 23 nt, Human
cacugcauuccagccuggugaca

SEQ ID NO: 234998 - RNA, 24 nt, Human
cacugcauuccagccuggugacag

SEQ ID NO: 234999 - RNA, 23 nt, Human
cagaccagugucucugcacucaa

SEQ ID NO: 235000 - RNA, 24 nt, Human
cagugucucugcacucaaacaccc

SEQ ID NO: 235001 - RNA, 22 nt, Human
ccaaggcuccagcauucaaugg

SEQ ID NO: 235002 - RNA, 18 nt, Human
ccacccaggacacccagc

SEQ ID NO: 235003 - RNA, 18 nt, Human
ccacugcauuccagccug

SEQ ID NO: 235004 - RNA, 19 nt, Human
ccacugcauuccagccugg

SEQ ID NO: 235005 - RNA, 19 nt, Human
ccacugcauuccagccugg

SEQ ID NO: 235006 - RNA, 23 nt, Human
ccacugcauuccagccuggugac

SEQ ID NO: 235007 - RNA, 24 nt, Human
ccagaggcugaggcaggagaauca

SEQ ID NO: 235008 - RNA, 24 nt, Human
ccagauugcgccacugcauuccag

SEQ ID NO: 235009 - RNA, 18 nt, Human
ccaucagauucgcuucca

SEQ ID NO: 235010 - RNA, 25 nt, Human
ccaucucaaaaaaaaaaaaaaaaaa

SEQ ID NO: 235011 - RNA, 26 nt, Human
cccauuccucccucuagaaauugcca

SEQ ID NO: 235012 - RNA, 21 nt, Human
ccccagaccagugucucugca

SEQ ID NO: 235013 - RNA, 20 nt, Human
ccucuugacaggaccugacc

SEQ ID NO: 235014 - RNA, 21 nt, Human
ccuggugacagagcaagacuc

SEQ ID NO: 235015 - RNA, 18 nt, Human
cucaaaaaaaaaaaaaaa

SEQ ID NO: 235016 - RNA, 19 nt, Human
cuccaucucaaaaaaaaaa

SEQ ID NO: 235017 - RNA, 18 nt, Human
cucugcacucaaacaccc

SEQ ID NO: 235018 - RNA, 23 nt, Human
cucugcacucaaacacccauucc

SEQ ID NO: 235019 - RNA, 22 nt, Human
cuucaaauguccacccaggaca

SEQ ID NO: 235020 - RNA, 18 nt, Human
cuucccgaaccuccuagg

SEQ ID NO: 235021 - RNA, 23 nt, Human
gagaggcggagguugcagugagc

SEQ ID NO: 235022 - RNA, 23 nt, Human
gagguugcagugagcccagauug

SEQ ID NO: 235023 - RNA, 22 nt, Human
gcaggagaaucacuugaacccg

SEQ ID NO: 235024 - RNA, 23 nt, Human
gcauuccagccuggugacagagc

SEQ ID NO: 235025 - RNA, 22 nt, Human
ggagguugcagugagcccagau

SEQ ID NO: 235026 - RNA, 24 nt, Human
ggagguugcagugagcccagauug

SEQ ID NO: 235027 - RNA, 20 nt, Human
uacauuguuaaagguguugg

SEQ ID NO: 235028 - RNA, 22 nt, Human
ucaaaaaaaaaaaaaaaaaaaa

SEQ ID NO: 235029 - RNA, 23 nt, Human
ucaaaaaaaaaaaaaaaaaaaaa

SEQ ID NO: 235030 - RNA, 24 nt, Human
ucaaauguccacccaggacaccca

SEQ ID NO: 235031 - RNA, 19 nt, Human
ucaauggugcauuguucuc

SEQ ID NO: 235032 - RNA, 22 nt, Human
ucaauggugcauuguucucucu

SEQ ID NO: 235033 - RNA, 23 nt, Human
uccaucucaaaaaaaaaaaaaaa

SEQ ID NO: 235034 - RNA, 23 nt, Human
uccaugccacaggcagacucaga

SEQ ID NO: 235035 - RNA, 22 nt, Human
ucccacugcacugcucugugga

SEQ ID NO: 235036 - RNA, 23 nt, Human
ugacaggaccugacccucugugc

SEQ ID NO: 235037 - RNA, 22 nt, Human
ugagcccagauugcgccacugc

SEQ ID NO: 235038 - RNA, 20 nt, Human
ugaggcaggagaaucacuug

SEQ ID NO: 235039 - RNA, 24 nt, Human
ugaggcaggagaaucacuugaacc

SEQ ID NO: 235040 - RNA, 25 nt, Human
ugaggcaggagaaucacuugaaccc

SEQ ID NO: 235041 - RNA, 25 nt, Human
uggaaugaauauaauucuucaaaug

SEQ ID NO: 235042 - RNA, 23 nt, Human
uggaucaccccagaccagugucu

SEQ ID NO: 235043 - RNA, 21 nt, Human
uguagcccaggcugagcugca

SEQ ID NO: 235044 - RNA, 21 nt, Human
uucuucaaguuggaaugaaua

SEQ ID NO: 235045 - RNA, 24 nt, Human
uugaacccgagaggcggagguugc

SEQ ID NO: 235046 - RNA, 22 nt, Human
uugcagugagcccagauugcgc

SEQ ID NO: 235047 - RNA, 22 nt, Human
uuucagcccuggagaugcuuca

SEQ ID NO: 235048 - RNA, 20 nt, Human
aaaaccaauggagugcccac

SEQ ID NO: 235049 - RNA, 19 nt, Human
aaagugcuggaauuacagg

SEQ ID NO: 235050 - RNA, 24 nt, Human
aaagugcuggaauuacaggcguga

SEQ ID NO: 235051 - RNA, 22 nt, Human
aaauagcugggauuacaggcac

SEQ ID NO: 235052 - RNA, 25 nt, Human
aaauagcugggauuacaggcacugc

SEQ ID NO: 235053 - RNA, 19 nt, Human
aaccucugacucccugguu

SEQ ID NO: 235054 - RNA, 26 nt, Human
aagugcuggaauuacaggcgugagcc

SEQ ID NO: 235055 - RNA, 18 nt, Human
aauuacaggcgugagcca

SEQ ID NO: 235056 - RNA, 21 nt, Human
aauuacaggcgugagccaccg

SEQ ID NO: 235057 - RNA, 24 nt, Human
aauuacaggcgugagccaccgugc

SEQ ID NO: 235058 - RNA, 18 nt, Human
acaggguuucaccauguu

SEQ ID NO: 235059 - RNA, 20 nt, Human
acaggguuucaccauguugg

SEQ ID NO: 235060 - RNA, 21 nt, Human
acaggguuucaccauguuggc

SEQ ID NO: 235061 - RNA, 24 nt, Human
acaggguuucaccauguuggccaa

SEQ ID NO: 235062 - RNA, 25 nt, Human
acaggguuucaccauguuggccaag

SEQ ID NO: 235063 - RNA, 24 nt, Human
accauguuggccaagauggucucg

SEQ ID NO: 235064 - RNA, 24 nt, Human
agaagucuguugcuuuauuucaaa

SEQ ID NO: 235065 - RNA, 21 nt, Human
agagacaggguuucaccaugu

SEQ ID NO: 235066 - RNA, 23 nt, Human
agagcaguggugcgaucuuggcu

SEQ ID NO: 235067 - RNA, 22 nt, Human
aggagagacaggguuucaccau

SEQ ID NO: 235068 - RNA, 18 nt, Human
auaaaaccaauggagugc

SEQ ID NO: 235069 - RNA, 20 nt, Human
auaaaaccaauggagugccc

SEQ ID NO: 235070 - RNA, 21 nt, Human
auaaaaccaauggagugccca

SEQ ID NO: 235071 - RNA, 20 nt, Human
caaacuccagaaaguagagg

SEQ ID NO: 235072 - RNA, 24 nt, Human
caaagugcuggaauuacaggcgug

SEQ ID NO: 235073 - RNA, 23 nt, Human
caaauagcugggauuacaggcac

SEQ ID NO: 235074 - RNA, 22 nt, Human
caagcgauucuccugccucagc

SEQ ID NO: 235075 - RNA, 27 nt, Human
caagcgauucuccugccucagccuccc

SEQ ID NO: 235076 - RNA, 24 nt, Human
caccacauccagcuaauuuuugua

SEQ ID NO: 235077 - RNA, 22 nt, Human
caccauguuggccaagaugguc

SEQ ID NO: 235078 - RNA, 24 nt, Human
caccauguuggccaagauggucuc

SEQ ID NO: 235079 - RNA, 19 nt, Human
cacugccaccacauccagc

SEQ ID NO: 235080 - RNA, 20 nt, Human
cacugccaccacauccagcu

SEQ ID NO: 235081 - RNA, 19 nt, Human
cacuuuuucuuuucuuuuc

SEQ ID NO: 235082 - RNA, 21 nt, Human
cagggaagacccagguccaug

SEQ ID NO: 235083 - RNA, 24 nt, Human
caggguuucaccauguuggccaag

SEQ ID NO: 235084 - RNA, 22 nt, Human
ccaaagugcuggaauuacaggc

SEQ ID NO: 235085 - RNA, 24 nt, Human
ccaaagugcuggaauuacaggcgu

SEQ ID NO: 235086 - RNA, 19 nt, Human
ccacuuuuucuuuucuuuu

SEQ ID NO: 235087 - RNA, 23 nt, Human
cccaaauagcugggauuacaggc

SEQ ID NO: 235088 - RNA, 24 nt, Human
cccaaauagcugggauuacaggca

SEQ ID NO: 235089 - RNA, 18 nt, Human
ccccuaaaaguucccaga

SEQ ID NO: 235090 - RNA, 23 nt, Human
cccugguucaagcgauucuccug

SEQ ID NO: 235091 - RNA, 20 nt, Human
ccugggguagauccaggcug

SEQ ID NO: 235092 - RNA, 21 nt, Human
cgccaggcuggagagcagugg

SEQ ID NO: 235093 - RNA, 23 nt, Human
cuaauuuuuguauuuuuaggaga

SEQ ID NO: 235094 - RNA, 25 nt, Human
cucacugaaaccucugacucccugg

SEQ ID NO: 235095 - RNA, 22 nt, Human
cuccagcccuggagaugcuuca

SEQ ID NO: 235096 - RNA, 24 nt, Human
cucccaaauagcugggauuacagg

SEQ ID NO: 235097 - RNA, 23 nt, Human
cucccucugucgccaggcuggag

SEQ ID NO: 235098 - RNA, 23 nt, Human
cucccugguucaagcgauucucc

SEQ ID NO: 235099 - RNA, 24 nt, Human
cuccugaacucgugaucugcccgc

SEQ ID NO: 235100 - RNA, 23 nt, Human
cugccucagccucccaaauagcu

SEQ ID NO: 235101 - RNA, 24 nt, Human
cugggauuacaggcacugccacca

SEQ ID NO: 235102 - RNA, 26 nt, Human
cugggugggguccaaugguguccacu

SEQ ID NO: 235103 - RNA, 19 nt, Human
cuuuucuuuucuuuucugu

SEQ ID NO: 235104 - RNA, 19 nt, Human
gacuccauggagugugggg

SEQ ID NO: 235105 - RNA, 21 nt, Human
gauucuccugccucagccucc

SEQ ID NO: 235106 - RNA, 21 nt, Human
gcaguggugcgaucuuggcuc

SEQ ID NO: 235107 - RNA, 23 nt, Human
gccucggccucccaaagugcugg

SEQ ID NO: 235108 - RNA, 24 nt, Human
gcgauucuccugccucagccuccc

SEQ ID NO: 235109 - RNA, 24 nt, Human
gcucccaugcauuccagacuccau

SEQ ID NO: 235110 - RNA, 22 nt, Human
gcugggugggguccaauggugu

SEQ ID NO: 235111 - RNA, 21 nt, Human
gcuuucuccucauucuuagau

SEQ ID NO: 235112 - RNA, 20 nt, Human
ggagagacaggguuucacca

SEQ ID NO: 235113 - RNA, 22 nt, Human
ggagagacaggguuucaccaug

SEQ ID NO: 235114 - RNA, 18 nt, Human
ggcacugccaccacaucc

SEQ ID NO: 235115 - RNA, 24 nt, Human
gguuucaccauguuggccaagaug

SEQ ID NO: 235116 - RNA, 19 nt, Human
guagaggcgccauaaaacc

SEQ ID NO: 235117 - RNA, 24 nt, Human
gugaucugcccgccucggccuccc

SEQ ID NO: 235118 - RNA, 25 nt, Human
uaaaaccaauggagugcccacaagg

SEQ ID NO: 235119 - RNA, 18 nt, Human
uaaaugugcacaaagacc

SEQ ID NO: 235120 - RNA, 23 nt, Human
uacaggcacugccaccacaucca

SEQ ID NO: 235121 - RNA, 23 nt, Human
uacaggcgugagccaccgugccc

SEQ ID NO: 235122 - RNA, 24 nt, Human
uacaggcgugagccaccgugcccu

SEQ ID NO: 235123 - RNA, 24 nt, Human
uaggagagacaggguuucaccaug

SEQ ID NO: 235124 - RNA, 19 nt, Human
ucaagcgauucuccugccu

SEQ ID NO: 235125 - RNA, 20 nt, Human
ucagcagagacgcaucucgc

SEQ ID NO: 235126 - RNA, 18 nt, Human
ucagccucccaaauagcu

SEQ ID NO: 235127 - RNA, 20 nt, Human
ucagccucccaaauagcugg

SEQ ID NO: 235128 - RNA, 26 nt, Human
ucauuuccuacuuuuuuucuuuccua

SEQ ID NO: 235129 - RNA, 19 nt, Human
uccagaaaguagaggcgcc

SEQ ID NO: 235130 - RNA, 21 nt, Human
uccaggcugggugggguccaa

SEQ ID NO: 235131 - RNA, 23 nt, Human
uccaugcugcaggcagacucaga

SEQ ID NO: 235132 - RNA, 24 nt, Human
ucccaaagugcuggaauuacaggc

SEQ ID NO: 235133 - RNA, 24 nt, Human
ucccaaauagcugggauuacaggc

SEQ ID NO: 235134 - RNA, 23 nt, Human
ucccuccagcccuggagaugcuu

SEQ ID NO: 235135 - RNA, 19 nt, Human
ucccucugucgccaggcug

SEQ ID NO: 235136 - RNA, 21 nt, Human
ucccugguucaagcgauucuc

SEQ ID NO: 235137 - RNA, 24 nt, Human
ucccugguucaagcgauucuccug

SEQ ID NO: 235138 - RNA, 21 nt, Human
ucgcaucuggcugugccgccc

SEQ ID NO: 235139 - RNA, 18 nt, Human
ucggccucccaaagugcu

SEQ ID NO: 235140 - RNA, 24 nt, Human
ucggugcauggcagucgucccucc

SEQ ID NO: 235141 - RNA, 23 nt, Human
ucucccucugucgccaggcugga

SEQ ID NO: 235142 - RNA, 26 nt, Human
ucuccugccucagccucccaaauagc

SEQ ID NO: 235143 - RNA, 24 nt, Human
ucuggcugugccgcccaggcugag

SEQ ID NO: 235144 - RNA, 21 nt, Human
ucugucgccaggcuggagagc

SEQ ID NO: 235145 - RNA, 21 nt, Human
ucuugcuuucuccucauucuu

SEQ ID NO: 235146 - RNA, 21 nt, Human
ucuuuucuuuucuguuccucc

SEQ ID NO: 235147 - RNA, 18 nt, Human
ucuuuuuuuuuuuuuuuu

SEQ ID NO: 235148 - RNA, 19 nt, Human
ugaccccuaaaaguucccu

SEQ ID NO: 235149 - RNA, 22 nt, Human
ugagauggagucucccucuguc

SEQ ID NO: 235150 - RNA, 21 nt, Human
ugagugaccccuaaaaguucc

SEQ ID NO: 235151 - RNA, 23 nt, Human
ugagugaccccuaaaaguuccca

SEQ ID NO: 235152 - RNA, 21 nt, Human
ugauucaguuuaaugcacuuu

SEQ ID NO: 235153 - RNA, 22 nt, Human
ugcagaauugagugaccccuaa

SEQ ID NO: 235154 - RNA, 27 nt, Human
ugccucagccucccaaauagcugggau

SEQ ID NO: 235155 - RNA, 24 nt, Human
ugcuggaauuacaggcgugagcca

SEQ ID NO: 235156 - RNA, 18 nt, Human
uggaauuacaggcgugag

SEQ ID NO: 235157 - RNA, 21 nt, Human
uggaauuacaggcgugagcca

SEQ ID NO: 235158 - RNA, 22 nt, Human
uggaauuacaggcgugagccac

SEQ ID NO: 235159 - RNA, 23 nt, Human
uggaauuacaggcgugagccacc

SEQ ID NO: 235160 - RNA, 23 nt, Human
uggaauuacaggcgugagccacc

SEQ ID NO: 235161 - RNA, 24 nt, Human
uggaauuacaggcgugagccaccg

SEQ ID NO: 235162 - RNA, 24 nt, Human
uggaauuacaggcgugagccaccg

SEQ ID NO: 235163 - RNA, 21 nt, Human
uggagugcccacaaggggguc

SEQ ID NO: 235164 - RNA, 19 nt, Human
uggcucacugaaaccucug

SEQ ID NO: 235165 - RNA, 19 nt, Human
ugggauuacaggcacugcc

SEQ ID NO: 235166 - RNA, 20 nt, Human
ugggauuacaggcacugcca

SEQ ID NO: 235167 - RNA, 21 nt, Human
ugggauuacaggcacugccac

SEQ ID NO: 235168 - RNA, 23 nt, Human
ugggauuacaggcacugccacca

SEQ ID NO: 235169 - RNA, 23 nt, Human
ugguucaagcgauucuccugccu

SEQ ID NO: 235170 - RNA, 24 nt, Human
uuaggagagacaggguuucaccau

SEQ ID NO: 235171 - RNA, 21 nt, Human
uucaagcgauucuccugccuc

SEQ ID NO: 235172 - RNA, 23 nt, Human
uucaagcgauucuccugccucag

SEQ ID NO: 235173 - RNA, 24 nt, Human
uucaagcgauucuccugccucagc

SEQ ID NO: 235174 - RNA, 20 nt, Human
uugcuuucuccucauucuua

SEQ ID NO: 235175 - RNA, 19 nt, Human
uuucaccauguuggccaag

SEQ ID NO: 235176 - RNA, 20 nt, Human
uuucaccauguuggccaaga

SEQ ID NO: 235177 - RNA, 19 nt, Human
uuucuuuucuuuucuguuc

SEQ ID NO: 235178 - RNA, 24 nt, Human
uuuuuaggagagacaggguuucac

SEQ ID NO: 235179 - RNA, 18 nt, Human
uuuuuguauuuuuaggag

SEQ ID NO: 235180 - RNA, 23 nt, Human
uuuuuguauuuuuaggagagaca

SEQ ID NO: 235181 - RNA, 23 nt, Human
uuuuuuuuuuuuucuuucuuuuu

SEQ ID NO: 235182 - RNA, 24 nt, Human
uuuuuuuuuuuuuuuuuuaauuug

SEQ ID NO: 235183 - RNA, 18 nt, Human
agggguccaggcugacug

SEQ ID NO: 235184 - RNA, 21 nt, Human
aucuccucauggucuuuguua

SEQ ID NO: 235185 - RNA, 21 nt, Human
caaaguucccagcaucuccuc

SEQ ID NO: 235186 - RNA, 21 nt, Human
cagggaagacccagguccaug

SEQ ID NO: 235187 - RNA, 18 nt, Human
cauggucuuuguuagggg

SEQ ID NO: 235188 - RNA, 20 nt, Human
ccgugccuucagcaguccug

SEQ ID NO: 235189 - RNA, 21 nt, Human
ccuucuacugaguguggaguc

SEQ ID NO: 235190 - RNA, 22 nt, Human
cuccagcccuggagaugcuuca

SEQ ID NO: 235191 - RNA, 18 nt, Human
gagucugcguacccuccg

SEQ ID NO: 235192 - RNA, 20 nt, Human
ucagcagagacgcaucucgc

SEQ ID NO: 235193 - RNA, 19 nt, Human
ucagcaguccugagucucc

SEQ ID NO: 235194 - RNA, 20 nt, Human
ucagcaguccugagucuccc

SEQ ID NO: 235195 - RNA, 22 nt, Human
ucagcaguccugagucuccuuc

SEQ ID NO: 235196 - RNA, 18 nt, Human
ucauugguguccacuggg

SEQ ID NO: 235197 - RNA, 23 nt, Human
uccaugcugcaggcagacucaga

SEQ ID NO: 235198 - RNA, 20 nt, Human
ucccgugccuucagcagucc

SEQ ID NO: 235199 - RNA, 23 nt, Human
ucccuccagcccuggagaugcuu

SEQ ID NO: 235200 - RNA, 21 nt, Human
ucgcaucuggcugugccgccc

SEQ ID NO: 235201 - RNA, 24 nt, Human
ucggugcauggcagucgucccucc

SEQ ID NO: 235202 - RNA, 24 nt, Human
ucuggcugugccgcccaggcugag

SEQ ID NO: 235203 - RNA, 21 nt, Human
ugaguguggagucugcguacc

SEQ ID NO: 235204 - RNA, 18 nt, Human
uggaacgagacgaccugc

SEQ ID NO: 235205 - RNA, 22 nt, Human
uguuagggguccaggcugacug

SEQ ID NO: 235206 - RNA, 25 nt, Human
uguuagggguccaggcugacugggg

SEQ ID NO: 235207 - RNA, 19 nt, Human
aaguucccagcgucuccuc

SEQ ID NO: 235208 - RNA, 18 nt, Human
agggguccaggcugacug

SEQ ID NO: 235209 - RNA, 20 nt, Human
agggguccaggcugacuggg

SEQ ID NO: 235210 - RNA, 20 nt, Human
ccgugccuucagcaguccug

SEQ ID NO: 235211 - RNA, 18 nt, Human
cugggguucacugguguc

SEQ ID NO: 235212 - RNA, 18 nt, Human
guggggucugcguacccc

SEQ ID NO: 235213 - RNA, 19 nt, Human
ucagcaguccugagucucc

SEQ ID NO: 235214 - RNA, 20 nt, Human
ucagcaguccugagucuccc

SEQ ID NO: 235215 - RNA, 22 nt, Human
ucagcaguccugagucuccuuc

SEQ ID NO: 235216 - RNA, 20 nt, Human
ucccgugccuucagcagucc

SEQ ID NO: 235217 - RNA, 20 nt, Human
uccuucugcugagugugggg

SEQ ID NO: 235218 - RNA, 21 nt, Human
ucugcugaguguggggucugc

SEQ ID NO: 235219 - RNA, 19 nt, Human
ugagucuccuucugcugag

SEQ ID NO: 235220 - RNA, 22 nt, Human
uguuagggguccaggcugacug

SEQ ID NO: 235221 - RNA, 25 nt, Human
uucccagcgucuccucauggucugu

SEQ ID NO: 235222 - RNA, 23 nt, Human
aaaaaaaaguucauaccugcaga

SEQ ID NO: 235223 - RNA, 24 nt, Human
aaaaaaccaccaacaaaccuugcu

SEQ ID NO: 235224 - RNA, 26 nt, Human
aaaaaaccaccaacaaaccuugcuga

SEQ ID NO: 235225 - RNA, 23 nt, Human
aaaaaaccaguguggucaugaua

SEQ ID NO: 235226 - RNA, 19 nt, Human
aaaagcaaaaauagacaaa

SEQ ID NO: 235227 - RNA, 21 nt, Human
aaacacaagcaacaaaagcaa

SEQ ID NO: 235228 - RNA, 25 nt, Human
aaacagguauagugaucagugcaac

SEQ ID NO: 235229 - RNA, 18 nt, Human
aacaaaagcaaaaauaga

SEQ ID NO: 235230 - RNA, 22 nt, Human
aacaaaagcaaaaauagacaaa

SEQ ID NO: 235231 - RNA, 24 nt, Human
aacaaaauuccaaggucguuuucc

SEQ ID NO: 235232 - RNA, 20 nt, Human
aagaaaccaaaaacuaccgu

SEQ ID NO: 235233 - RNA, 21 nt, Human
aagagacaacucagaaauggg

SEQ ID NO: 235234 - RNA, 18 nt, Human
aagcaaagaaggaaacac

SEQ ID NO: 235235 - RNA, 21 nt, Human
aagcaaagaaggaaacacaca

SEQ ID NO: 235236 - RNA, 20 nt, Human
aagcaacagcaagaaaccaa

SEQ ID NO: 235237 - RNA, 22 nt, Human
aagcaacagcaagaaaccaaaa

SEQ ID NO: 235238 - RNA, 23 nt, Human
aagcuacagccaggaagacauca

SEQ ID NO: 235239 - RNA, 18 nt, Human
aaggaccccaaauagcca

SEQ ID NO: 235240 - RNA, 24 nt, Human
aaggaccccaaauagccaaaacaa

SEQ ID NO: 235241 - RNA, 19 nt, Human
aaugaagagacaacucaga

SEQ ID NO: 235242 - RNA, 21 nt, Human
aaugaagagacaacucagaaa

SEQ ID NO: 235243 - RNA, 21 nt, Human
acaaaauauucucagggaaaa

SEQ ID NO: 235244 - RNA, 20 nt, Human
acaaagcaacagcaagaaac

SEQ ID NO: 235245 - RNA, 22 nt, Human
acaaagcaacagcaagaaacca

SEQ ID NO: 235246 - RNA, 25 nt, Human
acaaagcaacagcaagaaaccaaaa

SEQ ID NO: 235247 - RNA, 20 nt, Human
acaagcaacaaaagcaaaaa

SEQ ID NO: 235248 - RNA, 18 nt, Human
acagggaggggaacaacc

SEQ ID NO: 235249 - RNA, 19 nt, Human
acuaaaacaaagcaacagc

SEQ ID NO: 235250 - RNA, 22 nt, Human
agcaagaaaccaaaaacuacuu

SEQ ID NO: 235251 - RNA, 19 nt, Human
agggaagaaggggauauca

SEQ ID NO: 235252 - RNA, 21 nt, Human
agggagggagagcaucagggg

SEQ ID NO: 235253 - RNA, 19 nt, Human
agggcggaugaugaaggga

SEQ ID NO: 235254 - RNA, 20 nt, Human
aggggaacaacacacacugg

SEQ ID NO: 235255 - RNA, 20 nt, Human
aggugcucagacaaaagcuu

SEQ ID NO: 235256 - RNA, 22 nt, Human
augaaaaggugcucagacaaaa

SEQ ID NO: 235257 - RNA, 22 nt, Human
augaaagcaaagaaggaaacac

SEQ ID NO: 235258 - RNA, 22 nt, Human
auggugaauugauccucaacaa

SEQ ID NO: 235259 - RNA, 22 nt, Human
caaagcaacagcaagaaaccaa

SEQ ID NO: 235260 - RNA, 23 nt, Human
caaagcaacagcaagaaaccaaa

SEQ ID NO: 235261 - RNA, 23 nt, Human
caaaggauaacaaaaaaccagug

SEQ ID NO: 235262 - RNA, 18 nt, Human
caaaguagcugaacaggc

SEQ ID NO: 235263 - RNA, 23 nt, Human
caaauggucagcagcuauaugaa

SEQ ID NO: 235264 - RNA, 22 nt, Human
caacaaaagcaaaaauagacaa

SEQ ID NO: 235265 - RNA, 24 nt, Human
caacagcaagaaaccaaaaacuac

SEQ ID NO: 235266 - RNA, 23 nt, Human
caagaaaccaaaaacuacuugaa

SEQ ID NO: 235267 - RNA, 21 nt, Human
caagaacaagagagggcaguc

SEQ ID NO: 235268 - RNA, 24 nt, Human
caagcaacaaaagcaaaaauagac

SEQ ID NO: 235269 - RNA, 21 nt, Human
cacucggcucagcugaacguc

SEQ ID NO: 235270 - RNA, 25 nt, Human
cagaaugaagagacaacucagaaau

SEQ ID NO: 235271 - RNA, 19 nt, Human
cagcaagaaaccaaaaacu

SEQ ID NO: 235272 - RNA, 23 nt, Human
cagcuuccaugccuucugggguc

SEQ ID NO: 235273 - RNA, 24 nt, Human
cagcuuccaugccuucuggggucc

SEQ ID NO: 235274 - RNA, 20 nt, Human
cagggaugaaagcaaagaag

SEQ ID NO: 235275 - RNA, 21 nt, Human
caucaggaaaaagagcuaaug

SEQ ID NO: 235276 - RNA, 25 nt, Human
caucaggaaaaagagcuaaugcaug

SEQ ID NO: 235277 - RNA, 21 nt, Human
cauggaacuggaauagaaaca

SEQ ID NO: 235278 - RNA, 24 nt, Human
ccaguguggucaugauauacuguc

SEQ ID NO: 235279 - RNA, 20 nt, Human
cccaaauauccuacaaagcu

SEQ ID NO: 235280 - RNA, 19 nt, Human
cccauauacaaaaaugggu

SEQ ID NO: 235281 - RNA, 25 nt, Human
cccugaaaacacaagcaacaaaagc

SEQ ID NO: 235282 - RNA, 19 nt, Human
cccuggaacuuuaaaaaaa

SEQ ID NO: 235283 - RNA, 18 nt, Human
ccucccaggggccccagc

SEQ ID NO: 235284 - RNA, 23 nt, Human
cuaccuauguaacaaagcugcag

SEQ ID NO: 235285 - RNA, 22 nt, Human
cucaaugcaauuccuaacaaaa

SEQ ID NO: 235286 - RNA, 22 nt, Human
cucccaggggccccagcugugc

SEQ ID NO: 235287 - RNA, 21 nt, Human
cugcaaacagaaugaagagac

SEQ ID NO: 235288 - RNA, 21 nt, Human
cugccuccuauuuuguuccug

SEQ ID NO: 235289 - RNA, 22 nt, Human
cuggaacuuuaaaaaaaaguuc

SEQ ID NO: 235290 - RNA, 21 nt, Human
cugggcauaugacacauccug

SEQ ID NO: 235291 - RNA, 23 nt, Human
cugggguccugagucuccauggc

SEQ ID NO: 235292 - RNA, 18 nt, Human
cugugcagcugggcauau

SEQ ID NO: 235293 - RNA, 24 nt, Human
cuucaagacguugguccgggcaac

SEQ ID NO: 235294 - RNA, 22 nt, Human
cuuguggggucugggucccccc

SEQ ID NO: 235295 - RNA, 21 nt, Human
gaaaacacaagcaacaaaagc

SEQ ID NO: 235296 - RNA, 26 nt, Human
gaacuaaaacaaagcaacagcaagaa

SEQ ID NO: 235297 - RNA, 23 nt, Human
gaguuuuugaaaauuaagcuauc

SEQ ID NO: 235298 - RNA, 24 nt, Human
gcagcaaaccaccauggcacaagc

SEQ ID NO: 235299 - RNA, 21 nt, Human
gcugacaguuuucuuucaccu

SEQ ID NO: 235300 - RNA, 19 nt, Human
gcugugcagcugggcauau

SEQ ID NO: 235301 - RNA, 20 nt, Human
ggaagaaggggauaucacac

SEQ ID NO: 235302 - RNA, 20 nt, Human
gguccuaggagaacugaguc

SEQ ID NO: 235303 - RNA, 21 nt, Human
gucaggggucugggcuggcug

SEQ ID NO: 235304 - RNA, 21 nt, Human
guuuccuuuucagguuuuggu

SEQ ID NO: 235305 - RNA, 20 nt, Human
uaaaacaaagcaacagcaag

SEQ ID NO: 235306 - RNA, 21 nt, Human
uaacaaaaaaccagugugguc

SEQ ID NO: 235307 - RNA, 19 nt, Human
uaagaguuugaaaaaacca

SEQ ID NO: 235308 - RNA, 19 nt, Human
uaauggguugauaggugca

SEQ ID NO: 235309 - RNA, 23 nt, Human
uacaaaaggaccccaaauagcca

SEQ ID NO: 235310 - RNA, 20 nt, Human
uacuugaaacaugggcaaag

SEQ ID NO: 235311 - RNA, 22 nt, Human
uagccaaaacaaucuugagcaa

SEQ ID NO: 235312 - RNA, 22 nt, Human
uagcugaacaggcauuucucaa

SEQ ID NO: 235313 - RNA, 21 nt, Human
uaugaugauucaguuuuucua

SEQ ID NO: 235314 - RNA, 27 nt, Human
uauggcccugaaaacacaagcaacaaa

SEQ ID NO: 235315 - RNA, 24 nt, Human
uauguaaggaacuaaaacaaagca

SEQ ID NO: 235316 - RNA, 19 nt, Human
uauuucaucuaucucaucu

SEQ ID NO: 235317 - RNA, 19 nt, Human
uccacagaaauagaaaaac

SEQ ID NO: 235318 - RNA, 19 nt, Human
ucccaacguucccggaauc

SEQ ID NO: 235319 - RNA, 19 nt, Human
ucccaggggccccagcugu

SEQ ID NO: 235320 - RNA, 23 nt, Human
ucccaggggccccagcugugcag

SEQ ID NO: 235321 - RNA, 19 nt, Human
uccuacaaagcuacagcca

SEQ ID NO: 235322 - RNA, 20 nt, Human
uccuacaaagcuacagccag

SEQ ID NO: 235323 - RNA, 22 nt, Human
uccuaggagaacugagucucca

SEQ ID NO: 235324 - RNA, 18 nt, Human
uccugagucuccauggcu

SEQ ID NO: 235325 - RNA, 20 nt, Human
ugaaaaaaccaccaacaaac

SEQ ID NO: 235326 - RNA, 19 nt, Human
ugaaaacacaagcaacaaa

SEQ ID NO: 235327 - RNA, 23 nt, Human
ugaaaacacaagcaacaaaagca

SEQ ID NO: 235328 - RNA, 24 nt, Human
ugaaaacacaagcaacaaaagcaa

SEQ ID NO: 235329 - RNA, 24 nt, Human
ugaaaacacaagcaacaaaagcaa

SEQ ID NO: 235330 - RNA, 22 nt, Human
ugaagaagaaugaaauugaacc

SEQ ID NO: 235331 - RNA, 18 nt, Human
ugagcaaagggaagaagg

SEQ ID NO: 235332 - RNA, 20 nt, Human
ugaggguaagcugugcagcu

SEQ ID NO: 235333 - RNA, 21 nt, Human
ugauugaguuuuugaaaauua

SEQ ID NO: 235334 - RNA, 21 nt, Human
ugcaaacagaaugaagagaca

SEQ ID NO: 235335 - RNA, 22 nt, Human
ugcaaacagaaugaagagacaa

SEQ ID NO: 235336 - RNA, 22 nt, Human
ugcagaaucaggugacucccaa

SEQ ID NO: 235337 - RNA, 20 nt, Human
uggaauagaaacagguagug

SEQ ID NO: 235338 - RNA, 24 nt, Human
uggcccugaaaacacaagcaacaa

SEQ ID NO: 235339 - RNA, 20 nt, Human
uggcuucuaaacagcuucuu

SEQ ID NO: 235340 - RNA, 18 nt, Human
ugggcauaugacacaucc

SEQ ID NO: 235341 - RNA, 22 nt, Human
uggggcuuguagugggagggcg

SEQ ID NO: 235342 - RNA, 22 nt, Human
ugguaucaacuuguuccuaguc

SEQ ID NO: 235343 - RNA, 19 nt, Human
uggugaauugauccucaac

SEQ ID NO: 235344 - RNA, 21 nt, Human
ugugugugugugucugugugu

SEQ ID NO: 235345 - RNA, 21 nt, Human
ugugugugugugugucugugu

SEQ ID NO: 235346 - RNA, 22 nt, Human
ugugugugugugugucugugug

SEQ ID NO: 235347 - RNA, 26 nt, Human
uuaugcaaguuugugugugugugugu

SEQ ID NO: 235348 - RNA, 21 nt, Human
uucuauuuauccuuauguuca

SEQ ID NO: 235349 - RNA, 20 nt, Human
uucuguaguuuccuuuucag

SEQ ID NO: 235350 - RNA, 22 nt, Human
uugguccgggcaagguuuuuuu

SEQ ID NO: 235351 - RNA, 21 nt, Human
uugugggaacauuuuugauua

SEQ ID NO: 235352 - RNA, 21 nt, Human
uuucagguuuugguaucaacu

SEQ ID NO: 235353 - RNA, 19 nt, Human
uuugcagaaucaggacgag

SEQ ID NO: 235354 - RNA, 25 nt, Human
uuugugugugugugugucugugugu

SEQ ID NO: 235355 - RNA, 20 nt, Human
uuuuuuuuuuuuuuuucugg

SEQ ID NO: 235356 - RNA, 18 nt, Human
agggguccaggcuggcug

SEQ ID NO: 235357 - RNA, 20 nt, Human
ccacuggacucagcugugca

SEQ ID NO: 235358 - RNA, 24 nt, Human
cuguggcuucauuucaaaaaugca

SEQ ID NO: 235359 - RNA, 21 nt, Human
guaugagaucugggucccccg

SEQ ID NO: 235360 - RNA, 23 nt, Human
guguccacugggggcagcuccug

SEQ ID NO: 235361 - RNA, 19 nt, Human
uagggguccaggcuggcug

SEQ ID NO: 235362 - RNA, 18 nt, Human
ucauugguguccacuggg

SEQ ID NO: 235363 - RNA, 22 nt, Human
ucccaggauguccugguggucu

SEQ ID NO: 235364 - RNA, 23 nt, Human
uccugugccuucuggagucucug

SEQ ID NO: 235365 - RNA, 27 nt, Human
ucuggagucucugagucuccuucuguu

SEQ ID NO: 235366 - RNA, 18 nt, Human
ugagaagucuguggcuuc

SEQ ID NO: 235367 - RNA, 26 nt, Human
ugagucccagaguucccaggaugucc

SEQ ID NO: 235368 - RNA, 20 nt, Human
ugagucuccuucuguugagu

SEQ ID NO: 235369 - RNA, 26 nt, Human
ugagucuccuucuguugaguaugaga

SEQ ID NO: 235370 - RNA, 22 nt, Human
uguuagggguccaggcuggcug

SEQ ID NO: 235371 - RNA, 19 nt, Human
aaccaggauuucaggccuc

SEQ ID NO: 235372 - RNA, 25 nt, Human
aggagucagccuccccccacaaacc

SEQ ID NO: 235373 - RNA, 21 nt, Human
aggccucuagacccuccuccu

SEQ ID NO: 235374 - RNA, 22 nt, Human
caaacccacaguccagaacuga

SEQ ID NO: 235375 - RNA, 22 nt, Human
cacaaacccacaguccagaacu

SEQ ID NO: 235376 - RNA, 20 nt, Human
cacaguccagaacugagccc

SEQ ID NO: 235377 - RNA, 28 nt, Human
cacuuuaacuuccagaugaaguuggggg

SEQ ID NO: 235378 - RNA, 20 nt, Human
cagaacugagcccccucauu

SEQ ID NO: 235379 - RNA, 20 nt, Human
cagcucccucccaugggccc

SEQ ID NO: 235380 - RNA, 20 nt, Human
caggccucuagacccuccuc

SEQ ID NO: 235381 - RNA, 18 nt, Human
cccacaaacccacagucc

SEQ ID NO: 235382 - RNA, 24 nt, Human
cccacaaacccacaguccagaacu

SEQ ID NO: 235383 - RNA, 19 nt, Human
cccacaguccagaacugag

SEQ ID NO: 235384 - RNA, 21 nt, Human
cccacaguccagaacugagcc

SEQ ID NO: 235385 - RNA, 19 nt, Human
ccuccuccucuucaguggc

SEQ ID NO: 235386 - RNA, 23 nt, Human
cuccccccacaaacccacagucc

SEQ ID NO: 235387 - RNA, 23 nt, Human
cugagcccccucauuccccuagg

SEQ ID NO: 235388 - RNA, 19 nt, Human
cugccaggcagacggggac

SEQ ID NO: 235389 - RNA, 24 nt, Human
ggccccagaaaguugcucuaaugg

SEQ ID NO: 235390 - RNA, 22 nt, Human
gucagccuccccccacaaaccc

SEQ ID NO: 235391 - RNA, 22 nt, Human
guccauuuuucuaacaaccugc

SEQ ID NO: 235392 - RNA, 19 nt, Human
ucagccuccccccacaaac

SEQ ID NO: 235393 - RNA, 18 nt, Human
ucagcucccucccauggg

SEQ ID NO: 235394 - RNA, 24 nt, Human
ucaguggccucacuuuaacuucca

SEQ ID NO: 235395 - RNA, 20 nt, Human
uccuccuccucuucaguggc

SEQ ID NO: 235396 - RNA, 21 nt, Human
ucuaacaaccugccaggcaga

SEQ ID NO: 235397 - RNA, 19 nt, Human
ugagcccccucauuccccu

SEQ ID NO: 235398 - RNA, 22 nt, Human
uucaguggccucacuuuaacuu

SEQ ID NO: 235399 - RNA, 24 nt, Human
uucucagcucccucccaugggccc

SEQ ID NO: 235400 - RNA, 18 nt, Human
aaaaaaaaaaauccuggu

SEQ ID NO: 235401 - RNA, 18 nt, Human
aaaaagaaaacccagaag

SEQ ID NO: 235402 - RNA, 19 nt, Human
aaaaagaaaacccagaagg

SEQ ID NO: 235403 - RNA, 22 nt, Human
aaaaagacaaaacaggagacgg

SEQ ID NO: 235404 - RNA, 19 nt, Human
aaaccuaaaaggcacaaug

SEQ ID NO: 235405 - RNA, 22 nt, Human
aaagcacacauuagagcuuccu

SEQ ID NO: 235406 - RNA, 24 nt, Human
aaaggcaccccccacaugcucaca

SEQ ID NO: 235407 - RNA, 20 nt, Human
aacacgugggcaaaaaaaaa

SEQ ID NO: 235408 - RNA, 26 nt, Human
aaccaaugaugaugcacagcgcggcc

SEQ ID NO: 235409 - RNA, 21 nt, Human
aaccacccaggcaguuucuga

SEQ ID NO: 235410 - RNA, 19 nt, Human
aaccccggcuccucauccc

SEQ ID NO: 235411 - RNA, 20 nt, Human
aaccucagaggacucagcug

SEQ ID NO: 235412 - RNA, 22 nt, Human
aagcagcagcagcaaccccggc

SEQ ID NO: 235413 - RNA, 23 nt, Human
aagcuaaaaacaggugcaagcga

SEQ ID NO: 235414 - RNA, 18 nt, Human
acagagaaaagcacuugg

SEQ ID NO: 235415 - RNA, 24 nt, Human
accaaaugagucaaaacauggccu

SEQ ID NO: 235416 - RNA, 28 nt, Human
acuccagagaaaaacagcgcaaacaaua

SEQ ID NO: 235417 - RNA, 19 nt, Human
acuuccaccccaggggcca

SEQ ID NO: 235418 - RNA, 22 nt, Human
agaaaaaaaagacaaaacagga

SEQ ID NO: 235419 - RNA, 23 nt, Human
agaaaaaaaagacaaaacaggag

SEQ ID NO: 235420 - RNA, 22 nt, Human
agaaaagaaaaaaaagacaaaa

SEQ ID NO: 235421 - RNA, 21 nt, Human
agaaaccaacgaaaugaauau

SEQ ID NO: 235422 - RNA, 21 nt, Human
agacaaaacaggagacggugg

SEQ ID NO: 235423 - RNA, 21 nt, Human
agagaaaaacaacugauugga

SEQ ID NO: 235424 - RNA, 26 nt, Human
agagaaaaacagcgcaaacacguggg

SEQ ID NO: 235425 - RNA, 18 nt, Human
agagaaaagcacuuggaa

SEQ ID NO: 235426 - RNA, 23 nt, Human
agaggacucagcugaaagagguu

SEQ ID NO: 235427 - RNA, 23 nt, Human
agauuccuaucuggcgccuucuc

SEQ ID NO: 235428 - RNA, 19 nt, Human
agccagugauuuccaacac

SEQ ID NO: 235429 - RNA, 22 nt, Human
agccccagcguucauggguuuu

SEQ ID NO: 235430 - RNA, 23 nt, Human
agccgggcccaaugaaaagccug

SEQ ID NO: 235431 - RNA, 21 nt, Human
aggaacucucccuccugcccc

SEQ ID NO: 235432 - RNA, 19 nt, Human
aggacucagcugaaagagg

SEQ ID NO: 235433 - RNA, 19 nt, Human
aggagaaaagaaaaaaaag

SEQ ID NO: 235434 - RNA, 25 nt, Human
aggagaaaagaaaaaaaagacaaaa

SEQ ID NO: 235435 - RNA, 23 nt, Human
aggcaaaagcacugaaucggauc

SEQ ID NO: 235436 - RNA, 25 nt, Human
aggcaccccccacaugcucacagga

SEQ ID NO: 235437 - RNA, 21 nt, Human
aggccaacauucuuagguuga

SEQ ID NO: 235438 - RNA, 20 nt, Human
agugaagggaaacaacuaaa

SEQ ID NO: 235439 - RNA, 19 nt, Human
auaaauacaaccccauuac

SEQ ID NO: 235440 - RNA, 21 nt, Human
augaaccaagacggcagaugg

SEQ ID NO: 235441 - RNA, 19 nt, Human
caaaaaaaaaaauccuggu

SEQ ID NO: 235442 - RNA, 22 nt, Human
caaacaaaucccagcuacuucu

SEQ ID NO: 235443 - RNA, 21 nt, Human
caaacauaaugccugugccaa

SEQ ID NO: 235444 - RNA, 19 nt, Human
caaaccacccaggcaguuu

SEQ ID NO: 235445 - RNA, 22 nt, Human
caaaggccuaagauggaggcug

SEQ ID NO: 235446 - RNA, 25 nt, Human
caagcgauguaccugcauggguucc

SEQ ID NO: 235447 - RNA, 22 nt, Human
caaguccaagaauugucaaaaa

SEQ ID NO: 235448 - RNA, 18 nt, Human
caccggaagcagcagcag

SEQ ID NO: 235449 - RNA, 21 nt, Human
cacugaaucggaucuauuccc

SEQ ID NO: 235450 - RNA, 21 nt, Human
cacuuggaaaauacacgcagg

SEQ ID NO: 235451 - RNA, 24 nt, Human
cagcagaaccucagaggacucagc

SEQ ID NO: 235452 - RNA, 20 nt, Human
cagcagcagcaaccccggcu

SEQ ID NO: 235453 - RNA, 24 nt, Human
cagcagcagcaaccccggcuccuc

SEQ ID NO: 235454 - RNA, 21 nt, Human
cagccugugaaaaagaaccaa

SEQ ID NO: 235455 - RNA, 19 nt, Human
caguccucuugcucugggu

SEQ ID NO: 235456 - RNA, 21 nt, Human
cauggcuuuuguguaagggcc

SEQ ID NO: 235457 - RNA, 23 nt, Human
cauuccaucagccacccaggacu

SEQ ID NO: 235458 - RNA, 24 nt, Human
ccaaugaugaugcacacccuggcu

SEQ ID NO: 235459 - RNA, 21 nt, Human
ccacccaggacucaacagcag

SEQ ID NO: 235460 - RNA, 20 nt, Human
ccacccaggcaguuucugaa

SEQ ID NO: 235461 - RNA, 22 nt, Human
ccacgccccacacugagcugga

SEQ ID NO: 235462 - RNA, 24 nt, Human
ccagaccuccucaaucauuccauc

SEQ ID NO: 235463 - RNA, 20 nt, Human
ccauggaaacaaggcgauga

SEQ ID NO: 235464 - RNA, 21 nt, Human
ccauggcaccaauucugugcu

SEQ ID NO: 235465 - RNA, 22 nt, Human
cccacuuccaccccaggggcca

SEQ ID NO: 235466 - RNA, 20 nt, Human
ccccaggggccaccggaagc

SEQ ID NO: 235467 - RNA, 21 nt, Human
ccccuaccccacuuccacccc

SEQ ID NO: 235468 - RNA, 20 nt, Human
cccugaccaguuggaguugg

SEQ ID NO: 235469 - RNA, 19 nt, Human
ccgcagccgauggcugggu

SEQ ID NO: 235470 - RNA, 24 nt, Human
ccuccugccccuccucuuccccua

SEQ ID NO: 235471 - RNA, 24 nt, Human
ccucugcagcccagcacccagucc

SEQ ID NO: 235472 - RNA, 21 nt, Human
ccugaaggaagagaaaggguu

SEQ ID NO: 235473 - RNA, 22 nt, Human
ccugccacgccccacacugagc

SEQ ID NO: 235474 - RNA, 21 nt, Human
ccugccgugaugucugcaagu

SEQ ID NO: 235475 - RNA, 33 nt, Human
cgaaaugaauauaauaacuuauccugaggcggu

SEQ ID NO: 235476 - RNA, 21 nt, Human
cggcagaugggggaauaacau

SEQ ID NO: 235477 - RNA, 22 nt, Human
cggccucugcagcccagcaccc

SEQ ID NO: 235478 - RNA, 22 nt, Human
cggccuuccaagucaccaacuc

SEQ ID NO: 235479 - RNA, 23 nt, Human
cggccuuccaagucaccaacucu

SEQ ID NO: 235480 - RNA, 21 nt, Human
cggcuccuguguccccggccu

SEQ ID NO: 235481 - RNA, 19 nt, Human
cuaaaaaaauuaaacagac

SEQ ID NO: 235482 - RNA, 19 nt, Human
cuaaaaggcacaaugaggc

SEQ ID NO: 235483 - RNA, 18 nt, Human
cuccucauccccugccgu

SEQ ID NO: 235484 - RNA, 24 nt, Human
cucuugagaacuccagagaaaaac

SEQ ID NO: 235485 - RNA, 19 nt, Human
cuggcuuugggaucugaaa

SEQ ID NO: 235486 - RNA, 23 nt, Human
cuucauggcuuuuguguaagggc

SEQ ID NO: 235487 - RNA, 20 nt, Human
cuuccccuaccccacuucca

SEQ ID NO: 235488 - RNA, 20 nt, Human
cuugccuuaaugcaauuaaa

SEQ ID NO: 235489 - RNA, 22 nt, Human
gaaaacccagaagggcuauuca

SEQ ID NO: 235490 - RNA, 20 nt, Human
gaaaauacacgcaggaggca

SEQ ID NO: 235491 - RNA, 20 nt, Human
gaaaauguggcaacagagaa

SEQ ID NO: 235492 - RNA, 24 nt, Human
gaaccaagacggcagaugggggaa

SEQ ID NO: 235493 - RNA, 18 nt, Human
gagcacuaaccacagaga

SEQ ID NO: 235494 - RNA, 22 nt, Human
gagccgggcccaaugaaaagcc

SEQ ID NO: 235495 - RNA, 21 nt, Human
gaguggucuugaaaucuugcc

SEQ ID NO: 235496 - RNA, 25 nt, Human
gaucacucugcccugaccaguugga

SEQ ID NO: 235497 - RNA, 19 nt, Human
gaucugaaauccggccaca

SEQ ID NO: 235498 - RNA, 18 nt, Human
gauuacgaauggauccuu

SEQ ID NO: 235499 - RNA, 22 nt, Human
gcagagugcacacaccggcucc

SEQ ID NO: 235500 - RNA, 24 nt, Human
gccauucugcagaagaacugaagc

SEQ ID NO: 235501 - RNA, 22 nt, Human
gcugccuuucuuuugcagcuuc

SEQ ID NO: 235502 - RNA, 21 nt, Human
gcuggcuuugggaucugaaau

SEQ ID NO: 235503 - RNA, 20 nt, Human
gcuucauuuaccccccugcc

SEQ ID NO: 235504 - RNA, 26 nt, Human
gcuucauuuaccccccugccacgccc

SEQ ID NO: 235505 - RNA, 21 nt, Human
ggacaggaggauuccuuuggu

SEQ ID NO: 235506 - RNA, 24 nt, Human
ggaguugggccugugugaagccag

SEQ ID NO: 235507 - RNA, 20 nt, Human
ggcaaaaaaaaaaauccugg

SEQ ID NO: 235508 - RNA, 22 nt, Human
ggcaggagagaaaccaacgaaa

SEQ ID NO: 235509 - RNA, 21 nt, Human
ggcagguaguguucaccuccc

SEQ ID NO: 235510 - RNA, 21 nt, Human
ggccuagaaguggagccgggc

SEQ ID NO: 235511 - RNA, 21 nt, Human
gggccaccggaagcagcagca

SEQ ID NO: 235512 - RNA, 21 nt, Human
ggguaggacuaaaugcccuuc

SEQ ID NO: 235513 - RNA, 18 nt, Human
gguacugaccucuggccu

SEQ ID NO: 235514 - RNA, 21 nt, Human
guaucugaguccagugugaaa

SEQ ID NO: 235515 - RNA, 21 nt, Human
gugaaaagaagccuuaaguca

SEQ ID NO: 235516 - RNA, 18 nt, Human
gugaacaucucuucaugg

SEQ ID NO: 235517 - RNA, 18 nt, Human
gugaagccagugauuucc

SEQ ID NO: 235518 - RNA, 22 nt, Human
gugccaagaauugggcaggaga

SEQ ID NO: 235519 - RNA, 24 nt, Human
guguaccuuauccugguuucuuca

SEQ ID NO: 235520 - RNA, 26 nt, Human
uaaaaugguauauucgcaaaccuauc

SEQ ID NO: 235521 - RNA, 23 nt, Human
uaaacuaauuacccaauuugcaa

SEQ ID NO: 235522 - RNA, 18 nt, Human
uaagaaaaccuaaaaggc

SEQ ID NO: 235523 - RNA, 19 nt, Human
uaagcuaaaaacaggugca

SEQ ID NO: 235524 - RNA, 18 nt, Human
uaaggcaaaagcacugaa

SEQ ID NO: 235525 - RNA, 21 nt, Human
uaccaaguccuuguguuuucu

SEQ ID NO: 235526 - RNA, 23 nt, Human
uaccccacuuccaccccaggggc

SEQ ID NO: 235527 - RNA, 19 nt, Human
uaggagaaaagaaaaaaaa

SEQ ID NO: 235528 - RNA, 18 nt, Human
uauauucgcaaaccuauc

SEQ ID NO: 235529 - RNA, 19 nt, Human
uaucugaguccagugugaa

SEQ ID NO: 235530 - RNA, 18 nt, Human
uaucuuaggauacaaagc

SEQ ID NO: 235531 - RNA, 20 nt, Human
ucaaacauaaugccugugcc

SEQ ID NO: 235532 - RNA, 18 nt, Human
ucaauaaaaaccucuccc

SEQ ID NO: 235533 - RNA, 22 nt, Human
ucaggguucacuuccccagccc

SEQ ID NO: 235534 - RNA, 21 nt, Human
ucauaccgcagccgauggcug

SEQ ID NO: 235535 - RNA, 22 nt, Human
uccagagaaaaacagcgcaaac

SEQ ID NO: 235536 - RNA, 25 nt, Human
uccccagccccagcguucauggguu

SEQ ID NO: 235537 - RNA, 19 nt, Human
ucccugguuaaaggaaagg

SEQ ID NO: 235538 - RNA, 20 nt, Human
uccucagcuccugccacccu

SEQ ID NO: 235539 - RNA, 20 nt, Human
uccugccacccuggggagcc

SEQ ID NO: 235540 - RNA, 22 nt, Human
uccugcugucauaccgcagccg

SEQ ID NO: 235541 - RNA, 19 nt, Human
uccuggccuaccaaguccu

SEQ ID NO: 235542 - RNA, 18 nt, Human
ucgcacacacaaaaacuc

SEQ ID NO: 235543 - RNA, 22 nt, Human
ucucucaguaugcgggcagcuc

SEQ ID NO: 235544 - RNA, 20 nt, Human
ucugcccugaccaguuggag

SEQ ID NO: 235545 - RNA, 22 nt, Human
ucuggccucagggaugugacuu

SEQ ID NO: 235546 - RNA, 18 nt, Human
ucuggcgccuucuccagg

SEQ ID NO: 235547 - RNA, 24 nt, Human
ucugugauuuggugaagcucugug

SEQ ID NO: 235548 - RNA, 23 nt, Human
ucuguggugagaugaaccaagac

SEQ ID NO: 235549 - RNA, 23 nt, Human
ucuguugcuaggauuucuaggac

SEQ ID NO: 235550 - RNA, 18 nt, Human
ucuucagugcagagagug

SEQ ID NO: 235551 - RNA, 21 nt, Human
ugaaaagaagccuuaagucau

SEQ ID NO: 235552 - RNA, 22 nt, Human
ugaaaauuucauuuaaaaaugu

SEQ ID NO: 235553 - RNA, 21 nt, Human
ugaaacaagcucaauaaaaac

SEQ ID NO: 235554 - RNA, 21 nt, Human
ugacagagacagguuaacaca

SEQ ID NO: 235555 - RNA, 24 nt, Human
ugaccagaccuccucaaucauucc

SEQ ID NO: 235556 - RNA, 22 nt, Human
ugagaugaaccaagacggcaga

SEQ ID NO: 235557 - RNA, 19 nt, Human
ugaggaaaauguggcaaca

SEQ ID NO: 235558 - RNA, 19 nt, Human
ugcaaacaaaucccagcua

SEQ ID NO: 235559 - RNA, 20 nt, Human
ugccaagaauugggcaggag

SEQ ID NO: 235560 - RNA, 24 nt, Human
ugccaguguguggcccuuccucag

SEQ ID NO: 235561 - RNA, 20 nt, Human
ugcuggagcauuuuccugag

SEQ ID NO: 235562 - RNA, 19 nt, Human
uggccuagaaguggagccg

SEQ ID NO: 235563 - RNA, 18 nt, Human
uggcugaagugacaucug

SEQ ID NO: 235564 - RNA, 22 nt, Human
uggcuucauuuaccccccugcc

SEQ ID NO: 235565 - RNA, 23 nt, Human
uggcuuugggaucugaaauccgg

SEQ ID NO: 235566 - RNA, 19 nt, Human
ugggaagagagggucccca

SEQ ID NO: 235567 - RNA, 20 nt, Human
uggguaagaaaaccuaaaag

SEQ ID NO: 235568 - RNA, 27 nt, Human
uguaaucacagauuuuuagagguaucc

SEQ ID NO: 235569 - RNA, 19 nt, Human
ugugaaaaagaaccaauga

SEQ ID NO: 235570 - RNA, 18 nt, Human
ugugaaacaagcucaaua

SEQ ID NO: 235571 - RNA, 22 nt, Human
uuaaaggaaaggcaccccccac

SEQ ID NO: 235572 - RNA, 24 nt, Human
uuaggagaguaaggauuugaaggg

SEQ ID NO: 235573 - RNA, 23 nt, Human
uucacacgugcuaggggcuccac

SEQ ID NO: 235574 - RNA, 21 nt, Human
uucccaaaagcccgucauuaa

SEQ ID NO: 235575 - RNA, 21 nt, Human
uuccucagcuccugccacccu

SEQ ID NO: 235576 - RNA, 22 nt, Human
uuccuuuggugcuaugaugcaa

SEQ ID NO: 235577 - RNA, 22 nt, Human
uucgcaaaccuaucugaaucac

SEQ ID NO: 235578 - RNA, 22 nt, Human
uucucaaaccacccaggcaguu

SEQ ID NO: 235579 - RNA, 18 nt, Human
uugcagaucaaacugggu

SEQ ID NO: 235580 - RNA, 20 nt, Human
uugcagaucaaacuggguug

SEQ ID NO: 235581 - RNA, 25 nt, Human
aaaaaaaagacccaaagcgagagaa

SEQ ID NO: 235582 - RNA, 25 nt, Human
aaaaaaaagacccaaagcgagagaa

SEQ ID NO: 235583 - RNA, 21 nt, Human
aaaaauaaaaucccaagcccc

SEQ ID NO: 235584 - RNA, 21 nt, Human
aaaagacccaaagcgagagaa

SEQ ID NO: 235585 - RNA, 21 nt, Human
aaaagacccaaagcgagagaa

SEQ ID NO: 235586 - RNA, 24 nt, Human
aaacaaaaaaaagacccaaagcga

SEQ ID NO: 235587 - RNA, 24 nt, Human
aaacaaaaaaaagacccaaagcga

SEQ ID NO: 235588 - RNA, 22 nt, Human
aaagaaacaaaaaaaagaccca

SEQ ID NO: 235589 - RNA, 22 nt, Human
aaagaaacaaaaaaaagaccca

SEQ ID NO: 235590 - RNA, 24 nt, Human
aaagaaacaaaaaaaagacccaaa

SEQ ID NO: 235591 - RNA, 24 nt, Human
aaagaaacaaaaaaaagacccaaa

SEQ ID NO: 235592 - RNA, 20 nt, Human
aaagcgagagaaggggcugu

SEQ ID NO: 235593 - RNA, 20 nt, Human
aaagcgagagaaggggcugu

SEQ ID NO: 235594 - RNA, 19 nt, Human
aaccucuguccagcugcuc

SEQ ID NO: 235595 - RNA, 19 nt, Human
aacugaggcaaagugacaa

SEQ ID NO: 235596 - RNA, 21 nt, Human
aagaaagaaacaaaaaaaaga

SEQ ID NO: 235597 - RNA, 21 nt, Human
aagaaagaaacaaaaaaaaga

SEQ ID NO: 235598 - RNA, 28 nt, Human
aagaaagaaacaaaaaaaagacccaaag

SEQ ID NO: 235599 - RNA, 28 nt, Human
aagaaagaaacaaaaaaaagacccaaag

SEQ ID NO: 235600 - RNA, 22 nt, Human
aagcaagaggggacagcccugc

SEQ ID NO: 235601 - RNA, 22 nt, Human
aagcaagaggggacagcccugc

SEQ ID NO: 235602 - RNA, 27 nt, Human
aagcagcccuugcccagcaccuccccg

SEQ ID NO: 235603 - RNA, 20 nt, Human
aagcucggggggcaguuugg

SEQ ID NO: 235604 - RNA, 18 nt, Human
acaaaaaaaagacccaaa

SEQ ID NO: 235605 - RNA, 18 nt, Human
acaaaaaaaagacccaaa

SEQ ID NO: 235606 - RNA, 21 nt, Human
acaaaauggcccucccacccc

SEQ ID NO: 235607 - RNA, 21 nt, Human
acaaaauggcccucccacccc

SEQ ID NO: 235608 - RNA, 20 nt, Human
acagcccugccaagacagag

SEQ ID NO: 235609 - RNA, 20 nt, Human
acagcccugccaagacagag

SEQ ID NO: 235610 - RNA, 24 nt, Human
accccgaugaacuugagcacguug

SEQ ID NO: 235611 - RNA, 24 nt, Human
acugccggagccggcuccucccca

SEQ ID NO: 235612 - RNA, 24 nt, Human
acugccggagccggcuccucccca

SEQ ID NO: 235613 - RNA, 21 nt, Human
acugugccuauccucucacug

SEQ ID NO: 235614 - RNA, 21 nt, Human
acugugccuauccucucacug

SEQ ID NO: 235615 - RNA, 24 nt, Human
agaaacaaaaaaaagacccaaagc

SEQ ID NO: 235616 - RNA, 24 nt, Human
agaaagaaacaaaaaaaagaccca

SEQ ID NO: 235617 - RNA, 24 nt, Human
agaaagaaacaaaaaaaagaccca

SEQ ID NO: 235618 - RNA, 27 nt, Human
agaaagaaacaaaaaaaagacccaaag

SEQ ID NO: 235619 - RNA, 27 nt, Human
agaaagaaacaaaaaaaagacccaaag

SEQ ID NO: 235620 - RNA, 24 nt, Human
agaaggcaagucagggccuggcuc

SEQ ID NO: 235621 - RNA, 20 nt, Human
agaggacagaggggcaugag

SEQ ID NO: 235622 - RNA, 20 nt, Human
agaggacagaggggcaugag

SEQ ID NO: 235623 - RNA, 20 nt, Human
agaggggcaugaggaggggc

SEQ ID NO: 235624 - RNA, 20 nt, Human
agaggggcaugaggaggggc

SEQ ID NO: 235625 - RNA, 18 nt, Human
agcacguugggguguucc

SEQ ID NO: 235626 - RNA, 24 nt, Human
agcacguugggguguuccaggcau

SEQ ID NO: 235627 - RNA, 19 nt, Human
agccuccagggagcuaugg

SEQ ID NO: 235628 - RNA, 19 nt, Human
agccuccagggagcuaugg

SEQ ID NO: 235629 - RNA, 19 nt, Human
aggagaagcaagaggggac

SEQ ID NO: 235630 - RNA, 19 nt, Human
aggagaagcaagaggggac

SEQ ID NO: 235631 - RNA, 24 nt, Human
aggcgggggcggagggcgcgggcc

SEQ ID NO: 235632 - RNA, 23 nt, Human
agggagcuauggaccagacaggu

SEQ ID NO: 235633 - RNA, 23 nt, Human
agggagcuauggaccagacaggu

SEQ ID NO: 235634 - RNA, 27 nt, Human
aggggacagcccugccaagacagaggu

SEQ ID NO: 235635 - RNA, 27 nt, Human
aggggacagcccugccaagacagaggu

SEQ ID NO: 235636 - RNA, 19 nt, Human
aggggcucugagaugacug

SEQ ID NO: 235637 - RNA, 19 nt, Human
aggggcucugagaugacug

SEQ ID NO: 235638 - RNA, 21 nt, Human
aggggcugagcugcuggugga

SEQ ID NO: 235639 - RNA, 21 nt, Human
aggggcugagcugcuggugga

SEQ ID NO: 235640 - RNA, 21 nt, Human
agguagucagggucugcguuc

SEQ ID NO: 235641 - RNA, 24 nt, Human
aguagggguugcccaccacggugu

SEQ ID NO: 235642 - RNA, 19 nt, Human
caaaaaaaagacccaaagc

SEQ ID NO: 235643 - RNA, 19 nt, Human
caaaaaaaagacccaaagc

SEQ ID NO: 235644 - RNA, 22 nt, Human
caaaaauaaaaucccaagcccc

SEQ ID NO: 235645 - RNA, 18 nt, Human
caaagcgagagaaggggc

SEQ ID NO: 235646 - RNA, 18 nt, Human
caaagcgagagaaggggc

SEQ ID NO: 235647 - RNA, 20 nt, Human
caacugaggcaaagugacaa

SEQ ID NO: 235648 - RNA, 18 nt, Human
caagacagagguuacagc

SEQ ID NO: 235649 - RNA, 18 nt, Human
caagacagagguuacagc

SEQ ID NO: 235650 - RNA, 23 nt, Human
cacagaaaaaacgcagaggacag

SEQ ID NO: 235651 - RNA, 23 nt, Human
cacagaaaaaacgcagaggacag

SEQ ID NO: 235652 - RNA, 19 nt, Human
cacauccaccuucucauca

SEQ ID NO: 235653 - RNA, 19 nt, Human
caccuugauagccuggccg

SEQ ID NO: 235654 - RNA, 20 nt, Human
cacgcucccucaagggaccc

SEQ ID NO: 235655 - RNA, 20 nt, Human
cacgcucccucaagggaccc

SEQ ID NO: 235656 - RNA, 20 nt, Human
cagaaaaaacgcagaggaca

SEQ ID NO: 235657 - RNA, 20 nt, Human
cagaaaaaacgcagaggaca

SEQ ID NO: 235658 - RNA, 20 nt, Human
cagccaccaccacauucuug

SEQ ID NO: 235659 - RNA, 20 nt, Human
cagccacuggggaccuccgc

SEQ ID NO: 235660 - RNA, 20 nt, Human
cagccacuggggaccuccgc

SEQ ID NO: 235661 - RNA, 19 nt, Human
cagcggcguguggaaaggg

SEQ ID NO: 235662 - RNA, 21 nt, Human
cagcggcguguggaaaggggc

SEQ ID NO: 235663 - RNA, 19 nt, Human
caggacgaucccaaaggaa

SEQ ID NO: 235664 - RNA, 21 nt, Human
cagggugggcaggcaguccgc

SEQ ID NO: 235665 - RNA, 23 nt, Human
caguguuccagcuucacaaagga

SEQ ID NO: 235666 - RNA, 22 nt, Human
caucucaggugccauccaguag

SEQ ID NO: 235667 - RNA, 25 nt, Human
cauggucccacgggccuguugggau

SEQ ID NO: 235668 - RNA, 25 nt, Human
cauggucccacgggccuguugggau

SEQ ID NO: 235669 - RNA, 20 nt, Human
ccaaaggagaacacauccac

SEQ ID NO: 235670 - RNA, 21 nt, Human
ccaaaggagaacacauccacc

SEQ ID NO: 235671 - RNA, 25 nt, Human
ccacaaaaauaaaaucccaagcccc

SEQ ID NO: 235672 - RNA, 25 nt, Human
ccacaaaaauaaaaucccaagcccc

SEQ ID NO: 235673 - RNA, 19 nt, Human
ccagagguggggacagggg

SEQ ID NO: 235674 - RNA, 19 nt, Human
ccagagguggggacagggg

SEQ ID NO: 235675 - RNA, 21 nt, Human
ccagagguggggacaggggca

SEQ ID NO: 235676 - RNA, 21 nt, Human
ccagagguggggacaggggca

SEQ ID NO: 235677 - RNA, 20 nt, Human
ccagccaguguuccagcuuc

SEQ ID NO: 235678 - RNA, 20 nt, Human
ccaguguuccagcuucacaa

SEQ ID NO: 235679 - RNA, 22 nt, Human
cccaaaggagaacacauccacc

SEQ ID NO: 235680 - RNA, 23 nt, Human
cccacccccgcccgccacaaaaa

SEQ ID NO: 235681 - RNA, 23 nt, Human
cccacccccgcccgccacaaaaa

SEQ ID NO: 235682 - RNA, 20 nt, Human
cccacgcacccaagcguuau

SEQ ID NO: 235683 - RNA, 20 nt, Human
cccacgcacccaagcguuau

SEQ ID NO: 235684 - RNA, 21 nt, Human
cccacugucccagcugagggc

SEQ ID NO: 235685 - RNA, 21 nt, Human
cccacugucccagcugagggc

SEQ ID NO: 235686 - RNA, 25 nt, Human
cccacugucccagcugagggccacc

SEQ ID NO: 235687 - RNA, 25 nt, Human
cccacugucccagcugagggccacc

SEQ ID NO: 235688 - RNA, 25 nt, Human
ccccuggcagcugcugcugcagccg

SEQ ID NO: 235689 - RNA, 25 nt, Human
ccccuggcagcugcugcugcagccg

SEQ ID NO: 235690 - RNA, 27 nt, Human
ccccuggcagcugcugcugcagccgua

SEQ ID NO: 235691 - RNA, 27 nt, Human
ccccuggcagcugcugcugcagccgua

SEQ ID NO: 235692 - RNA, 19 nt, Human
ccccuggggggaaaacggg

SEQ ID NO: 235693 - RNA, 23 nt, Human
ccccuggggggaaaacgggcccc

SEQ ID NO: 235694 - RNA, 19 nt, Human
cccucaagggacccccuuc

SEQ ID NO: 235695 - RNA, 19 nt, Human
cccucaagggacccccuuc

SEQ ID NO: 235696 - RNA, 22 nt, Human
cccucaagggacccccuucacc

SEQ ID NO: 235697 - RNA, 22 nt, Human
cccucaagggacccccuucacc

SEQ ID NO: 235698 - RNA, 20 nt, Human
cccucccacccccgcccgcc

SEQ ID NO: 235699 - RNA, 20 nt, Human
cccucccacccccgcccgcc

SEQ ID NO: 235700 - RNA, 19 nt, Human
cccuggcagcugcugcugc

SEQ ID NO: 235701 - RNA, 19 nt, Human
cccuggcagcugcugcugc

SEQ ID NO: 235702 - RNA, 22 nt, Human
cccuggggggaaaacgggcccc

SEQ ID NO: 235703 - RNA, 23 nt, Human
ccgcccgccacaaaaauaaaauc

SEQ ID NO: 235704 - RNA, 23 nt, Human
ccgcccgccacaaaaauaaaauc

SEQ ID NO: 235705 - RNA, 26 nt, Human
ccgcgccgguaggucucccagaaacc

SEQ ID NO: 235706 - RNA, 21 nt, Human
ccgcggaggaaucuggugggg

SEQ ID NO: 235707 - RNA, 21 nt, Human
ccgcggaggaaucuggugggg

SEQ ID NO: 235708 - RNA, 19 nt, Human
ccggccagggcaccgcagc

SEQ ID NO: 235709 - RNA, 19 nt, Human
ccggccagggcaccgcagc

SEQ ID NO: 235710 - RNA, 22 nt, Human
ccuagacacccccuggggggaa

SEQ ID NO: 235711 - RNA, 22 nt, Human
ccuagacacccccuggggggaa

SEQ ID NO: 235712 - RNA, 24 nt, Human
ccucccacccccgcccgccacaaa

SEQ ID NO: 235713 - RNA, 24 nt, Human
ccucccacccccgcccgccacaaa

SEQ ID NO: 235714 - RNA, 27 nt, Human
ccucccgcggaggaaucuggugggggu

SEQ ID NO: 235715 - RNA, 24 nt, Human
ccuccuggcccagccuccagggag

SEQ ID NO: 235716 - RNA, 24 nt, Human
ccuccuggcccagccuccagggag

SEQ ID NO: 235717 - RNA, 21 nt, Human
ccucuguccagcugcuccagc

SEQ ID NO: 235718 - RNA, 19 nt, Human
ccuugcccagcaccucccc

SEQ ID NO: 235719 - RNA, 20 nt, Human
ccuugggggagaggcccggg

SEQ ID NO: 235720 - RNA, 23 nt, Human
cgaagucagccaccaccacauuc

SEQ ID NO: 235721 - RNA, 21 nt, Human
cgccgccggcccggggaggcg

SEQ ID NO: 235722 - RNA, 26 nt, Human
cggccagggcaccgcagcuccacggc

SEQ ID NO: 235723 - RNA, 20 nt, Human
cgggaaggggcucugagaug

SEQ ID NO: 235724 - RNA, 21 nt, Human
cgggaaggggcucugagauga

SEQ ID NO: 235725 - RNA, 21 nt, Human
cgggaaggggcucugagauga

SEQ ID NO: 235726 - RNA, 19 nt, Human
cggggcccggcggggcugg

SEQ ID NO: 235727 - RNA, 22 nt, Human
cggggggcaguuuggggggcag

SEQ ID NO: 235728 - RNA, 19 nt, Human
cucaacugaggcaaaguga

SEQ ID NO: 235729 - RNA, 19 nt, Human
cucaacugaggcaaaguga

SEQ ID NO: 235730 - RNA, 20 nt, Human
cucaagggacccccuucacc

SEQ ID NO: 235731 - RNA, 20 nt, Human
cucaagggacccccuucacc

SEQ ID NO: 235732 - RNA, 22 nt, Human
cucgccgcgccgguaggucucc

SEQ ID NO: 235733 - RNA, 21 nt, Human
cucugcuuuggggguuuggag

SEQ ID NO: 235734 - RNA, 21 nt, Human
cucugcuuuggggguuuggag

SEQ ID NO: 235735 - RNA, 21 nt, Human
cugcggccguugaucaucuca

SEQ ID NO: 235736 - RNA, 19 nt, Human
cuggaacuuggccucugcc

SEQ ID NO: 235737 - RNA, 19 nt, Human
cuggaacuuggccucugcc

SEQ ID NO: 235738 - RNA, 18 nt, Human
cuguugggauuguuuucc

SEQ ID NO: 235739 - RNA, 18 nt, Human
cuguugggauuguuuucc

SEQ ID NO: 235740 - RNA, 20 nt, Human
cuugcggucuggcuucuuga

SEQ ID NO: 235741 - RNA, 23 nt, Human
cuuggccucugcccugaugugcg

SEQ ID NO: 235742 - RNA, 23 nt, Human
cuuggccucugcccugaugugcg

SEQ ID NO: 235743 - RNA, 20 nt, Human
gaaaacgggccccagacucc

SEQ ID NO: 235744 - RNA, 20 nt, Human
gaaaacgggccccagacucc

SEQ ID NO: 235745 - RNA, 21 nt, Human
gaagcaagaggggacagcccu

SEQ ID NO: 235746 - RNA, 21 nt, Human
gaagcaagaggggacagcccu

SEQ ID NO: 235747 - RNA, 23 nt, Human
gaaggcaagucagggccuggcuc

SEQ ID NO: 235748 - RNA, 23 nt, Human
gaaggcaagucagggccuggcuc

SEQ ID NO: 235749 - RNA, 24 nt, Human
gacaaaauggcccucccacccccg

SEQ ID NO: 235750 - RNA, 24 nt, Human
gacaaaauggcccucccacccccg

SEQ ID NO: 235751 - RNA, 19 nt, Human
gacagcccugccaagacag

SEQ ID NO: 235752 - RNA, 19 nt, Human
gacagcccugccaagacag

SEQ ID NO: 235753 - RNA, 19 nt, Human
gacccccuucacccugagg

SEQ ID NO: 235754 - RNA, 19 nt, Human
gacccccuucacccugagg

SEQ ID NO: 235755 - RNA, 20 nt, Human
gaccuccgccccaugggauc

SEQ ID NO: 235756 - RNA, 20 nt, Human
gaccuccgccccaugggauc

SEQ ID NO: 235757 - RNA, 18 nt, Human
gauggggguggguggguc

SEQ ID NO: 235758 - RNA, 20 nt, Human
gccacaaaaauaaaauccca

SEQ ID NO: 235759 - RNA, 20 nt, Human
gccacaaaaauaaaauccca

SEQ ID NO: 235760 - RNA, 19 nt, Human
gccacggcagagagaaggc

SEQ ID NO: 235761 - RNA, 19 nt, Human
gccacggcagagagaaggc

SEQ ID NO: 235762 - RNA, 19 nt, Human
gcccagccuccagggagcu

SEQ ID NO: 235763 - RNA, 19 nt, Human
gcccagccuccagggagcu

SEQ ID NO: 235764 - RNA, 18 nt, Human
gccccggagcgugccgcc

SEQ ID NO: 235765 - RNA, 19 nt, Human
gcccggggaggcgggggcg

SEQ ID NO: 235766 - RNA, 18 nt, Human
gcccugaugugcgcccuc

SEQ ID NO: 235767 - RNA, 18 nt, Human
gcccugaugugcgcccuc

SEQ ID NO: 235768 - RNA, 20 nt, Human
gccggccagggcaccgcagc

SEQ ID NO: 235769 - RNA, 20 nt, Human
gccggccagggcaccgcagc

SEQ ID NO: 235770 - RNA, 21 nt, Human
gccuugggggagaggcccggg

SEQ ID NO: 235771 - RNA, 22 nt, Human
gcgcacggugauggggaagaag

SEQ ID NO: 235772 - RNA, 22 nt, Human
gcgggggcggagggcgcgggcc

SEQ ID NO: 235773 - RNA, 20 nt, Human
gcucggggggcaguuugggg

SEQ ID NO: 235774 - RNA, 20 nt, Human
gcucugaggagaagccuggg

SEQ ID NO: 235775 - RNA, 20 nt, Human
gcucugaggagaagccuggg

SEQ ID NO: 235776 - RNA, 23 nt, Human
gcugccuccuggcccagccucca

SEQ ID NO: 235777 - RNA, 23 nt, Human
gcugccuccuggcccagccucca

SEQ ID NO: 235778 - RNA, 22 nt, Human
ggacaccggcggggaaaccggc

SEQ ID NO: 235779 - RNA, 19 nt, Human
ggacccccuucacccugag

SEQ ID NO: 235780 - RNA, 19 nt, Human
ggacccccuucacccugag

SEQ ID NO: 235781 - RNA, 22 nt, Human
ggagaggcccgggaaggggcuc

SEQ ID NO: 235782 - RNA, 22 nt, Human
ggagaggcccgggaaggggcuc

SEQ ID NO: 235783 - RNA, 19 nt, Human
ggagccuugggggagaggc

SEQ ID NO: 235784 - RNA, 19 nt, Human
ggagccuugggggagaggc

SEQ ID NO: 235785 - RNA, 19 nt, Human
ggauggggguggguggguc

SEQ ID NO: 235786 - RNA, 23 nt, Human
ggcagcggcguguggaaaggggc

SEQ ID NO: 235787 - RNA, 23 nt, Human
ggcagcggcguguggaaaggggc

SEQ ID NO: 235788 - RNA, 23 nt, Human
ggcagggagccuugggggagagg

SEQ ID NO: 235789 - RNA, 25 nt, Human
ggccagggcaccgcagcuccacggc

SEQ ID NO: 235790 - RNA, 19 nt, Human
ggcccucccacccccgccc

SEQ ID NO: 235791 - RNA, 19 nt, Human
ggcccucccacccccgccc

SEQ ID NO: 235792 - RNA, 21 nt, Human
ggcucugaggagaagccuggg

SEQ ID NO: 235793 - RNA, 21 nt, Human
ggcucugaggagaagccuggg

SEQ ID NO: 235794 - RNA, 21 nt, Human
gggaagaagcucggggggcag

SEQ ID NO: 235795 - RNA, 24 nt, Human
gggcagcggcguguggaaaggggc

SEQ ID NO: 235796 - RNA, 24 nt, Human
gggcagcggcguguggaaaggggc

SEQ ID NO: 235797 - RNA, 26 nt, Human
gggcagggagccuugggggagaggcc

SEQ ID NO: 235798 - RNA, 21 nt, Human
gggcaguuuggggggcaguag

SEQ ID NO: 235799 - RNA, 21 nt, Human
gggccgggccgggggcgccuc

SEQ ID NO: 235800 - RNA, 22 nt, Human
gggccuggcucugaggagaagc

SEQ ID NO: 235801 - RNA, 22 nt, Human
gggccuggcucugaggagaagc

SEQ ID NO: 235802 - RNA, 23 nt, Human
ggggaagaagcucggggggcagu

SEQ ID NO: 235803 - RNA, 26 nt, Human
gggggagaggcccgggaaggggcucu

SEQ ID NO: 235804 - RNA, 26 nt, Human
gggggagaggcccgggaaggggcucu

SEQ ID NO: 235805 - RNA, 18 nt, Human
gggggcggggcccggcgg

SEQ ID NO: 235806 - RNA, 23 nt, Human
gggggcggggcccggcggggcug

SEQ ID NO: 235807 - RNA, 21 nt, Human
ggggugggugggucccaccuc

SEQ ID NO: 235808 - RNA, 21 nt, Human
ggggugggugggucccaccuc

SEQ ID NO: 235809 - RNA, 21 nt, Human
guccacggggugggagaaggc

SEQ ID NO: 235810 - RNA, 20 nt, Human
guccaggaauccucgcacgu

SEQ ID NO: 235811 - RNA, 23 nt, Human
gugcagcugggccggcucugggc

SEQ ID NO: 235812 - RNA, 23 nt, Human
gugcagcugggccggcucugggc

SEQ ID NO: 235813 - RNA, 18 nt, Human
guggagguaggccauccc

SEQ ID NO: 235814 - RNA, 25 nt, Human
uaaaaaauagauuacacagaaaaaa

SEQ ID NO: 235815 - RNA, 25 nt, Human
uaaaaaauagauuacacagaaaaaa

SEQ ID NO: 235816 - RNA, 20 nt, Human
uaaaaucccaagccccuggc

SEQ ID NO: 235817 - RNA, 21 nt, Human
uaagaaagaaacaaaaaaaag

SEQ ID NO: 235818 - RNA, 22 nt, Human
uaagaaagaaacaaaaaaaaga

SEQ ID NO: 235819 - RNA, 21 nt, Human
uacacagaaaaaacgcagagg

SEQ ID NO: 235820 - RNA, 21 nt, Human
uacacagaaaaaacgcagagg

SEQ ID NO: 235821 - RNA, 24 nt, Human
uauuuuauuguucugcgucugggu

SEQ ID NO: 235822 - RNA, 24 nt, Human
uauuuuauuguucugcgucugggu

SEQ ID NO: 235823 - RNA, 18 nt, Human
uccacggggugggagaag

SEQ ID NO: 235824 - RNA, 21 nt, Human
uccauggguacuggcugucca

SEQ ID NO: 235825 - RNA, 23 nt, Human
uccauggugcggggcagguaguc

SEQ ID NO: 235826 - RNA, 20 nt, Human
ucccaaaggagaacacauca

SEQ ID NO: 235827 - RNA, 21 nt, Human
ucccaagccccuggcagcugc

SEQ ID NO: 235828 - RNA, 21 nt, Human
ucccaagccccuggcagcugc

SEQ ID NO: 235829 - RNA, 22 nt, Human
ucccacgcacccaagcguuaua

SEQ ID NO: 235830 - RNA, 22 nt, Human
ucccacgcacccaagcguuaua

SEQ ID NO: 235831 - RNA, 18 nt, Human
ucccucaagggacccccu

SEQ ID NO: 235832 - RNA, 18 nt, Human
ucccucaagggacccccu

SEQ ID NO: 235833 - RNA, 25 nt, Human
ucccucaagggacccccuucacccu

SEQ ID NO: 235834 - RNA, 25 nt, Human
ucccucaagggacccccuucacccu

SEQ ID NO: 235835 - RNA, 19 nt, Human
uccgcaggcccucaggcug

SEQ ID NO: 235836 - RNA, 19 nt, Human
uccucgcacguugaggcca

SEQ ID NO: 235837 - RNA, 22 nt, Human
uccuuggacgucacgguuccug

SEQ ID NO: 235838 - RNA, 22 nt, Human
uccuuggacgucacgguuccug

SEQ ID NO: 235839 - RNA, 20 nt, Human
ucuccagagguggggacagg

SEQ ID NO: 235840 - RNA, 26 nt, Human
ucucccagaaaccucuguccagcugc

SEQ ID NO: 235841 - RNA, 18 nt, Human
ugacaaaauggcccuccc

SEQ ID NO: 235842 - RNA, 18 nt, Human
ugacaaaauggcccuccc

SEQ ID NO: 235843 - RNA, 20 nt, Human
ugaggagaagccuggguccc

SEQ ID NO: 235844 - RNA, 20 nt, Human
ugaggagaagccuggguccc

SEQ ID NO: 235845 - RNA, 22 nt, Human
ugaggagaagccugggucccca

SEQ ID NO: 235846 - RNA, 22 nt, Human
ugaggagaagccugggucccca

SEQ ID NO: 235847 - RNA, 23 nt, Human
ugaggagaagccuggguccccac

SEQ ID NO: 235848 - RNA, 23 nt, Human
ugaggagaagccuggguccccac

SEQ ID NO: 235849 - RNA, 25 nt, Human
ugaggaggggcagggagccuugggg

SEQ ID NO: 235850 - RNA, 25 nt, Human
ugaggaggggcagggagccuugggg

SEQ ID NO: 235851 - RNA, 21 nt, Human
ugaggccaaaguccauggugc

SEQ ID NO: 235852 - RNA, 21 nt, Human
ugagucuucucguccaccaug

SEQ ID NO: 235853 - RNA, 21 nt, Human
ugauguacucagugaugaagu

SEQ ID NO: 235854 - RNA, 26 nt, Human
ugcaaggagaagcaagaggggacagc

SEQ ID NO: 235855 - RNA, 19 nt, Human
ugcuggggcagcggcgugu

SEQ ID NO: 235856 - RNA, 19 nt, Human
ugcuggggcagcggcgugu

SEQ ID NO: 235857 - RNA, 21 nt, Human
uggaccagacagguggagcgu

SEQ ID NO: 235858 - RNA, 21 nt, Human
uggaccagacagguggagcgu

SEQ ID NO: 235859 - RNA, 19 nt, Human
uggagguaggccaucccuu

SEQ ID NO: 235860 - RNA, 19 nt, Human
uggcagcugcugcugcagg

SEQ ID NO: 235861 - RNA, 19 nt, Human
uggcagcugcugcugcagg

SEQ ID NO: 235862 - RNA, 20 nt, Human
uggcccucccacccccgccc

SEQ ID NO: 235863 - RNA, 20 nt, Human
uggcccucccacccccgccc

SEQ ID NO: 235864 - RNA, 19 nt, Human
uggcuguccaugcucuuga

SEQ ID NO: 235865 - RNA, 28 nt, Human
uggcuuuaagaaagaaacaaaaaaaaga

SEQ ID NO: 235866 - RNA, 18 nt, Human
ugggaucagcccucucuc

SEQ ID NO: 235867 - RNA, 18 nt, Human
ugggaucagcccucucuc

SEQ ID NO: 235868 - RNA, 19 nt, Human
uggggcagcggcgugugga

SEQ ID NO: 235869 - RNA, 19 nt, Human
uggggcagcggcgugugga

SEQ ID NO: 235870 - RNA, 21 nt, Human
ugggggugggugggucccacc

SEQ ID NO: 235871 - RNA, 21 nt, Human
ugggggugggugggucccacc

SEQ ID NO: 235872 - RNA, 23 nt, Human
ugucccagcugagggccaccucc

SEQ ID NO: 235873 - RNA, 23 nt, Human
ugucccagcugagggccaccucc

SEQ ID NO: 235874 - RNA, 22 nt, Human
uguugggauuguuuuccagguu

SEQ ID NO: 235875 - RNA, 22 nt, Human
uguugggauuguuuuccagguu

SEQ ID NO: 235876 - RNA, 19 nt, Human
uugcccagcaccuccccgu

SEQ ID NO: 235877 - RNA, 19 nt, Human
uuguagagcaccccgauga

SEQ ID NO: 235878 - RNA, 21 nt, Human
uuugcucagccacuggggacc

SEQ ID NO: 235879 - RNA, 21 nt, Human
uuugcucagccacuggggacc

SEQ ID NO: 235880 - RNA, 25 nt, Human
aaaacagaauggauauaaugaccuu

SEQ ID NO: 235881 - RNA, 27 nt, Human
aaacaaaagaccugggaaagaaaaaca

SEQ ID NO: 235882 - RNA, 20 nt, Human
aacaaaagaccugggaaaga

SEQ ID NO: 235883 - RNA, 24 nt, Human
aagaaaaacaaguguuuuacagaa

SEQ ID NO: 235884 - RNA, 23 nt, Human
aagcauuguacuguuagugcagc

SEQ ID NO: 235885 - RNA, 20 nt, Human
aaggacaugaaaacugcgua

SEQ ID NO: 235886 - RNA, 20 nt, Human
aauauggacuucccaacaua

SEQ ID NO: 235887 - RNA, 22 nt, Human
acauuuucacaugacauaauca

SEQ ID NO: 235888 - RNA, 22 nt, Human
agaaaaacaaguguuuuacaga

SEQ ID NO: 235889 - RNA, 21 nt, Human
agacaaauauggacuucccaa

SEQ ID NO: 235890 - RNA, 21 nt, Human
agacuuuaaaaguuacaaagu

SEQ ID NO: 235891 - RNA, 19 nt, Human
agagcucaugaauauagau

SEQ ID NO: 235892 - RNA, 20 nt, Human
agcgggcuccaagaguacau

SEQ ID NO: 235893 - RNA, 22 nt, Human
aggcaaggacaugaaaacugcg

SEQ ID NO: 235894 - RNA, 21 nt, Human
auaaaaaaacaaaagaccugg

SEQ ID NO: 235895 - RNA, 21 nt, Human
auuucauuuaaccugagcaau

SEQ ID NO: 235896 - RNA, 21 nt, Human
caaaaugaaucccugagcuga

SEQ ID NO: 235897 - RNA, 27 nt, Human
caaaaugaaucccugagcugaguuugc

SEQ ID NO: 235898 - RNA, 18 nt, Human
caagaaaagcagacaaaa

SEQ ID NO: 235899 - RNA, 18 nt, Human
cacagcucaaguccagcu

SEQ ID NO: 235900 - RNA, 22 nt, Human
cacuggcuuccuauuccagccc

SEQ ID NO: 235901 - RNA, 27 nt, Human
cagcccuaauuaaagaaaaaauagcua

SEQ ID NO: 235902 - RNA, 20 nt, Human
cagugcaauuuguuuuugaa

SEQ ID NO: 235903 - RNA, 20 nt, Human
cauccgaaaacaucacguuc

SEQ ID NO: 235904 - RNA, 20 nt, Human
caugacauaaucauugacuu

SEQ ID NO: 235905 - RNA, 18 nt, Human
ccggacaguauuguaagg

SEQ ID NO: 235906 - RNA, 24 nt, Human
cuauauuaaccauuaacaagcauu

SEQ ID NO: 235907 - RNA, 18 nt, Human
cuaugguugagacacugg

SEQ ID NO: 235908 - RNA, 22 nt, Human
cuuaagucagugacagauuuac

SEQ ID NO: 235909 - RNA, 18 nt, Human
cuuccuauuccagcccua

SEQ ID NO: 235910 - RNA, 23 nt, Human
gcugcaagaaaagcagacaaaua

SEQ ID NO: 235911 - RNA, 18 nt, Human
guuuuugaagacgccgga

SEQ ID NO: 235912 - RNA, 21 nt, Human
uaaaaaaacaaaagaccuggg

SEQ ID NO: 235913 - RNA, 28 nt, Human
uaaaaaaacaaaagaccugggaaagaaa

SEQ ID NO: 235914 - RNA, 22 nt, Human
uaaccugagcaauuaaaacgug

SEQ ID NO: 235915 - RNA, 25 nt, Human
uaacgacaguagcgggcuccaagag

SEQ ID NO: 235916 - RNA, 18 nt, Human
uaaggcaaggacaugaaa

SEQ ID NO: 235917 - RNA, 20 nt, Human
uaaggcaaggacaugaaaac

SEQ ID NO: 235918 - RNA, 19 nt, Human
uaauuauaucagaaaaaca

SEQ ID NO: 235919 - RNA, 23 nt, Human
uauaaaacuaagacacaaaauga

SEQ ID NO: 235920 - RNA, 18 nt, Human
uaugaagggcaaaaaguc

SEQ ID NO: 235921 - RNA, 27 nt, Human
ucaauaacgacaguagcgggcuccaag

SEQ ID NO: 235922 - RNA, 18 nt, Human
ucauuuaaccugagcaau

SEQ ID NO: 235923 - RNA, 21 nt, Human
ucccaacauagggacgugaag

SEQ ID NO: 235924 - RNA, 19 nt, Human
ucccugagcugaguuugca

SEQ ID NO: 235925 - RNA, 21 nt, Human
ucucaugggcaaccacggggc

SEQ ID NO: 235926 - RNA, 23 nt, Human
ucuggagcuguccugccgggccg

SEQ ID NO: 235927 - RNA, 18 nt, Human
ugaagggcaaaaagucaa

SEQ ID NO: 235928 - RNA, 18 nt, Human
ugacuaugcaccugcugc

SEQ ID NO: 235929 - RNA, 21 nt, Human
ugacuuggugguacacagcuc

SEQ ID NO: 235930 - RNA, 18 nt, Human
ugcaagaaaagcagacaa

SEQ ID NO: 235931 - RNA, 23 nt, Human
ugcaagaaaagcagacaaauaug

SEQ ID NO: 235932 - RNA, 20 nt, Human
ugcaauuuguuuuugaagac

SEQ ID NO: 235933 - RNA, 19 nt, Human
uguccugccgggccgcugu

SEQ ID NO: 235934 - RNA, 24 nt, Human
uuaaccauuaacaagcauuguacu

SEQ ID NO: 235935 - RNA, 22 nt, Human
uuacagaaaugaagcaaacaca

SEQ ID NO: 235936 - RNA, 18 nt, Human
uuacuuuguccuaugaag

SEQ ID NO: 235937 - RNA, 18 nt, Human
uuugggugaaaaugaaca

SEQ ID NO: 235938 - RNA, 23 nt, Human
aaaccaaaccgaccugcaaggga

SEQ ID NO: 235939 - RNA, 23 nt, Human
aggaauaggaggggacuaugugc

SEQ ID NO: 235940 - RNA, 22 nt, Human
cacagcccgcguccccuuccgc

SEQ ID NO: 235941 - RNA, 25 nt, Human
cacccccgacuuaaguaaggcacag

SEQ ID NO: 235942 - RNA, 24 nt, Human
cagcagcagcagcaaaaggcagcg

SEQ ID NO: 235943 - RNA, 21 nt, Human
cagcuuucgggcccccgcccc

SEQ ID NO: 235944 - RNA, 25 nt, Human
ccacccagcccucucucuucacaga

SEQ ID NO: 235945 - RNA, 23 nt, Human
ccacuaaguaaugaacucugugc

SEQ ID NO: 235946 - RNA, 20 nt, Human
ccaguccccgucccugcggc

SEQ ID NO: 235947 - RNA, 20 nt, Human
cccccgccccgcccccuugc

SEQ ID NO: 235948 - RNA, 26 nt, Human
cccccgccccgcccccuugccacccc

SEQ ID NO: 235949 - RNA, 26 nt, Human
ccccgccccgcccccuugccaccccc

SEQ ID NO: 235950 - RNA, 19 nt, Human
ccgcccccuugccaccccc

SEQ ID NO: 235951 - RNA, 24 nt, Human
ccgcccccuugccacccccgacuu

SEQ ID NO: 235952 - RNA, 27 nt, Human
ccgccccgcccccuugccacccccgac

SEQ ID NO: 235953 - RNA, 24 nt, Human
ccggugugugugcgcgucccccuc

SEQ ID NO: 235954 - RNA, 18 nt, Human
cgccccgcccccuugcca

SEQ ID NO: 235955 - RNA, 21 nt, Human
cuaaguaaugaacucugugcc

SEQ ID NO: 235956 - RNA, 21 nt, Human
cuagcaucacuggucuuccuu

SEQ ID NO: 235957 - RNA, 20 nt, Human
cucaugauggcacuuccucu

SEQ ID NO: 235958 - RNA, 20 nt, Human
cucucucuucacagaucucu

SEQ ID NO: 235959 - RNA, 19 nt, Human
gcagcagcagcagcaaaag

SEQ ID NO: 235960 - RNA, 19 nt, Human
gggcccccgccccgccccc

SEQ ID NO: 235961 - RNA, 23 nt, Human
gugcgcgucccccuccccguggc

SEQ ID NO: 235962 - RNA, 20 nt, Human
guucuauccuucugggcucc

SEQ ID NO: 235963 - RNA, 22 nt, Human
uaaugaacucugugccucuuuc

SEQ ID NO: 235964 - RNA, 22 nt, Human
uaggaggggacuaugugccuag

SEQ ID NO: 235965 - RNA, 21 nt, Human
uccagguucuauccuucuggg

SEQ ID NO: 235966 - RNA, 26 nt, Human
ucccacccagcccucucucuucacag

SEQ ID NO: 235967 - RNA, 24 nt, Human
uccccguggcgagggucucagcuu

SEQ ID NO: 235968 - RNA, 21 nt, Human
ucccucacgggagauauugau

SEQ ID NO: 235969 - RNA, 19 nt, Human
ucugggcucccacccagcc

SEQ ID NO: 235970 - RNA, 20 nt, Human
ucugggcucccacccagccc

SEQ ID NO: 235971 - RNA, 20 nt, Human
ucuuccagguucuauccuuc

SEQ ID NO: 235972 - RNA, 23 nt, Human
ucuuccagguucuauccuucugg

SEQ ID NO: 235973 - RNA, 19 nt, Human
ucuuccuuuuuaaggcagc

SEQ ID NO: 235974 - RNA, 24 nt, Human
ugggaggauuaggaauaggagggg

SEQ ID NO: 235975 - RNA, 19 nt, Human
ugggcucccacccagcccu

SEQ ID NO: 235976 - RNA, 22 nt, Human
ugugugugcgcgucccccuccc

SEQ ID NO: 235977 - RNA, 21 nt, Human
uucacuccauccuagcaucac

SEQ ID NO: 235978 - RNA, 26 nt, Human
aaaaaaaggaaaaauacucugcaaag

SEQ ID NO: 235979 - RNA, 22 nt, Human
aaaaggaaaaauacucugcaaa

SEQ ID NO: 235980 - RNA, 19 nt, Human
aacauggugaaaccccauc

SEQ ID NO: 235981 - RNA, 20 nt, Human
aacauggugaaaccccaucu

SEQ ID NO: 235982 - RNA, 20 nt, Human
aacauggugaaaccccaucu

SEQ ID NO: 235983 - RNA, 21 nt, Human
aacauggugaaaccccaucuc

SEQ ID NO: 235984 - RNA, 20 nt, Human
aagaaaaaaaaaaaaaagga

SEQ ID NO: 235985 - RNA, 19 nt, Human
acagagcaagacuccgucu

SEQ ID NO: 235986 - RNA, 25 nt, Human
acagagcaagacuccgucuuuaaga

SEQ ID NO: 235987 - RNA, 23 nt, Human
accccaucucuacuaaaaauaca

SEQ ID NO: 235988 - RNA, 24 nt, Human
acugcacuccagccugggcgacag

SEQ ID NO: 235989 - RNA, 26 nt, Human
acugcacuccagccugggcgacagag

SEQ ID NO: 235990 - RNA, 23 nt, Human
agaaaaaaaaaaaaaaggaaaaa

SEQ ID NO: 235991 - RNA, 23 nt, Human
agaagaauggcgggaacccagaa

SEQ ID NO: 235992 - RNA, 24 nt, Human
agagauggggccacugcacuccag

SEQ ID NO: 235993 - RNA, 19 nt, Human
agcacuccagcuccgagca

SEQ ID NO: 235994 - RNA, 24 nt, Human
agcaggcgugguucuauguuaagg

SEQ ID NO: 235995 - RNA, 24 nt, Human
agccugggcgacagagcaagacuc

SEQ ID NO: 235996 - RNA, 23 nt, Human
agcugggcgugguggugggcgcc

SEQ ID NO: 235997 - RNA, 22 nt, Human
aggcagaagaauggcgggaacc

SEQ ID NO: 235998 - RNA, 18 nt, Human
aggcagugggcccccagg

SEQ ID NO: 235999 - RNA, 20 nt, Human
aggcagugggcccccagggc

SEQ ID NO: 236000 - RNA, 22 nt, Human
aggcagugggcccccagggcag

SEQ ID NO: 236001 - RNA, 24 nt, Human
aggcggggcuugcagugagcagag

SEQ ID NO: 236002 - RNA, 19 nt, Human
agggggggagguggcacag

SEQ ID NO: 236003 - RNA, 20 nt, Human
agugggcccccagggcagcc

SEQ ID NO: 236004 - RNA, 24 nt, Human
auggggccacugcacuccagccug

SEQ ID NO: 236005 - RNA, 23 nt, Human
cacuccagccugggcgacagagc

SEQ ID NO: 236006 - RNA, 21 nt, Human
cacuccagcuccgagcagggc

SEQ ID NO: 236007 - RNA, 19 nt, Human
cacugcacuccagccuggg

SEQ ID NO: 236008 - RNA, 20 nt, Human
cacugcacuccagccugggc

SEQ ID NO: 236009 - RNA, 22 nt, Human
cacugcacuccagccugggcga

SEQ ID NO: 236010 - RNA, 23 nt, Human
cacugcacuccagccugggcgac

SEQ ID NO: 236011 - RNA, 24 nt, Human
cacugcacuccagccugggcgaca

SEQ ID NO: 236012 - RNA, 27 nt, Human
cacugcacuccagccugggcgacagag

SEQ ID NO: 236013 - RNA, 25 nt, Human
cagaaaaaauuagcugggcguggug

SEQ ID NO: 236014 - RNA, 24 nt, Human
cagagcaagacuccgucuuuaaga

SEQ ID NO: 236015 - RNA, 24 nt, Human
cagcuacuugggaggcugaggcag

SEQ ID NO: 236016 - RNA, 19 nt, Human
caggcccacacccuggggc

SEQ ID NO: 236017 - RNA, 20 nt, Human
cagggcccagggucaggcgg

SEQ ID NO: 236018 - RNA, 20 nt, Human
caggucccaggcccacaccc

SEQ ID NO: 236019 - RNA, 22 nt, Human
ccaccuguccucuucccuaggc

SEQ ID NO: 236020 - RNA, 20 nt, Human
ccacugcacuccagccuggg

SEQ ID NO: 236021 - RNA, 21 nt, Human
ccacugcacuccagccugggc

SEQ ID NO: 236022 - RNA, 21 nt, Human
ccacugcacuccagccugggc

SEQ ID NO: 236023 - RNA, 24 nt, Human
ccacugcacuccagccugggcgac

SEQ ID NO: 236024 - RNA, 20 nt, Human
cccaccuguccucuucccua

SEQ ID NO: 236025 - RNA, 20 nt, Human
ccccaccuguccucuucccu

SEQ ID NO: 236026 - RNA, 21 nt, Human
ccccagggcagccaaaugccu

SEQ ID NO: 236027 - RNA, 23 nt, Human
ccccagggcagccaaaugccugc

SEQ ID NO: 236028 - RNA, 22 nt, Human
ccuggcuaacauggugaaaccc

SEQ ID NO: 236029 - RNA, 23 nt, Human
ccuggcuaacauggugaaacccc

SEQ ID NO: 236030 - RNA, 24 nt, Human
ccuggcuaacauggugaaacccca

SEQ ID NO: 236031 - RNA, 22 nt, Human
ccugggcgacagagcaagacuc

SEQ ID NO: 236032 - RNA, 21 nt, Human
ccuguagucccagcuacuugg

SEQ ID NO: 236033 - RNA, 24 nt, Human
cgagaccauccuggcuaacauggu

SEQ ID NO: 236034 - RNA, 23 nt, Human
cgccuguagucccagcuacuugg

SEQ ID NO: 236035 - RNA, 24 nt, Human
cgccuguagucccagcuacuuggg

SEQ ID NO: 236036 - RNA, 18 nt, Human
cuacuaaaaauacagaaa

SEQ ID NO: 236037 - RNA, 23 nt, Human
cuggcuaacauggugaaacccca

SEQ ID NO: 236038 - RNA, 18 nt, Human
gaacccagaaggcggggc

SEQ ID NO: 236039 - RNA, 24 nt, Human
gcacuccagccugggcgacagagc

SEQ ID NO: 236040 - RNA, 22 nt, Human
gcacuccagcuccgagcagggc

SEQ ID NO: 236041 - RNA, 22 nt, Human
gcagaagaauggcgggaaccca

SEQ ID NO: 236042 - RNA, 22 nt, Human
gccacugcacuccagccugggc

SEQ ID NO: 236043 - RNA, 24 nt, Human
gccacugcacuccagccugggcga

SEQ ID NO: 236044 - RNA, 23 nt, Human
gcccaggucccaggcccacaccc

SEQ ID NO: 236045 - RNA, 23 nt, Human
gccuguagucccagcuacuuggg

SEQ ID NO: 236046 - RNA, 24 nt, Human
gcuaacauggugaaaccccaucuc

SEQ ID NO: 236047 - RNA, 20 nt, Human
ggccaggcaggugccaggga

SEQ ID NO: 236048 - RNA, 22 nt, Human
ggcgugguggugggcgccugua

SEQ ID NO: 236049 - RNA, 18 nt, Human
gggcccagggucaggcgg

SEQ ID NO: 236050 - RNA, 18 nt, Human
ggggcuugcagugagcag

SEQ ID NO: 236051 - RNA, 24 nt, Human
ggggcuugcagugagcagagaugg

SEQ ID NO: 236052 - RNA, 24 nt, Human
gguggugggcgccuguagucccag

SEQ ID NO: 236053 - RNA, 23 nt, Human
gugagggggaaggauggugugug

SEQ ID NO: 236054 - RNA, 24 nt, Human
uaaaaauacagaaaaaauuagcug

SEQ ID NO: 236055 - RNA, 22 nt, Human
uaacauggugaaaccccaucuc

SEQ ID NO: 236056 - RNA, 24 nt, Human
uaacauggugaaaccccaucucua

SEQ ID NO: 236057 - RNA, 21 nt, Human
uaagaaaaaaaaaaaaaagga

SEQ ID NO: 236058 - RNA, 21 nt, Human
ucaggcgggacaggacagcag

SEQ ID NO: 236059 - RNA, 24 nt, Human
uccagccugggcgacagagcaaga

SEQ ID NO: 236060 - RNA, 22 nt, Human
ucucuacuaaaaauacagaaaa

SEQ ID NO: 236061 - RNA, 19 nt, Human
ugaaaccccaucucuacua

SEQ ID NO: 236062 - RNA, 24 nt, Human
ugaggcagaagaauggcgggaacc

SEQ ID NO: 236063 - RNA, 25 nt, Human
ugaggcagaagaauggcgggaaccc

SEQ ID NO: 236064 - RNA, 18 nt, Human
ugcagugagcagagaugg

SEQ ID NO: 236065 - RNA, 24 nt, Human
ugggaggcugaggcagaagaaugg

SEQ ID NO: 236066 - RNA, 27 nt, Human
ugggaggcugaggcagaagaauggcgg

SEQ ID NO: 236067 - RNA, 24 nt, Human
ugguggugggcgccuguaguccca

SEQ ID NO: 236068 - RNA, 22 nt, Human
uguggagggggggagguggcac

SEQ ID NO: 236069 - RNA, 20 nt, Human
uguuaaggggccaggcaggu

SEQ ID NO: 236070 - RNA, 18 nt, Human
uuagcugggcgugguggu

SEQ ID NO: 236071 - RNA, 22 nt, Human
uuagcugggcgugguggugggc

SEQ ID NO: 236072 - RNA, 24 nt, Human
uuagcugggcgugguggugggcgc

SEQ ID NO: 236073 - RNA, 22 nt, Human
uucccuaggcagugggccccca

SEQ ID NO: 236074 - RNA, 18 nt, Human
uugcagugagcagagaug

SEQ ID NO: 236075 - RNA, 25 nt, Human
uugcagugagcagagauggggccac

SEQ ID NO: 236076 - RNA, 18 nt, Human
uugggaggcugaggcaga

SEQ ID NO: 236077 - RNA, 25 nt, Human
uuuaagaaaaaaaaaaaaaaggaaa

SEQ ID NO: 236078 - RNA, 21 nt, Human
aaagauuaguuggggcuuugc

SEQ ID NO: 236079 - RNA, 22 nt, Human
aacagguaauauuagcaccaug

SEQ ID NO: 236080 - RNA, 20 nt, Human
auauaccuguugguauaaga

SEQ ID NO: 236081 - RNA, 19 nt, Human
cauuuuaaaauggaguuau

SEQ ID NO: 236082 - RNA, 19 nt, Human
uagcaccaugaaaacaggu

SEQ ID NO: 236083 - RNA, 19 nt, Human
uagcagugggagaacaggu

SEQ ID NO: 236084 - RNA, 24 nt, Human
uagcagugggagaacagguaauau

SEQ ID NO: 236085 - RNA, 23 nt, Human
ugucauuagcagugggagaacag

SEQ ID NO: 236086 - RNA, 21 nt, Human
uugcucauuuuaaaauggagu

SEQ ID NO: 236087 - RNA, 23 nt, Human
uuugcucauuuuaaaauggaguu

SEQ ID NO: 236088 - RNA, 26 nt, Human
aaaacuccuuccagucugaggcacuc

SEQ ID NO: 236089 - RNA, 24 nt, Human
aaaauaccuauaaaagccauucuc

SEQ ID NO: 236090 - RNA, 22 nt, Human
aagcucucagacaaaauauucu

SEQ ID NO: 236091 - RNA, 20 nt, Human
aaugaagaaacauucaagaa

SEQ ID NO: 236092 - RNA, 21 nt, Human
accugcaauauuggagacuua

SEQ ID NO: 236093 - RNA, 23 nt, Human
aggggguaacauucauauccagg

SEQ ID NO: 236094 - RNA, 22 nt, Human
agggguugcccccacuuuauuu

SEQ ID NO: 236095 - RNA, 18 nt, Human
caagugcuucacaauguc

SEQ ID NO: 236096 - RNA, 18 nt, Human
caauguuuaaacaguuau

SEQ ID NO: 236097 - RNA, 24 nt, Human
cagcuauauuuuccuccaaaauuu

SEQ ID NO: 236098 - RNA, 22 nt, Human
caggcaaaauaccuauaaaagc

SEQ ID NO: 236099 - RNA, 22 nt, Human
cagggguugcccccacuuuauu

SEQ ID NO: 236100 - RNA, 26 nt, Human
ccacccacaagguuuuuuaggcaaaa

SEQ ID NO: 236101 - RNA, 21 nt, Human
ccagaaguaugcacaaagaca

SEQ ID NO: 236102 - RNA, 23 nt, Human
ccaggccuuugauuaggaagucu

SEQ ID NO: 236103 - RNA, 20 nt, Human
cccagccagcaugaaguaac

SEQ ID NO: 236104 - RNA, 21 nt, Human
ccccauuggaaugaagaaaca

SEQ ID NO: 236105 - RNA, 27 nt, Human
ccuccaaaauuuccuuuaaaagugaag

SEQ ID NO: 236106 - RNA, 22 nt, Human
ccucuaaaaaagacuuugguua

SEQ ID NO: 236107 - RNA, 20 nt, Human
ccucuacuacagccuccuug

SEQ ID NO: 236108 - RNA, 18 nt, Human
cuguuuuucaaauuuugc

SEQ ID NO: 236109 - RNA, 25 nt, Human
cuuaaaauguuauuuacagacuguu

SEQ ID NO: 236110 - RNA, 20 nt, Human
gggaaaccugcaauauugga

SEQ ID NO: 236111 - RNA, 22 nt, Human
uaaaaggaaacaauuagaagua

SEQ ID NO: 236112 - RNA, 18 nt, Human
uaacaagugcuucacaau

SEQ ID NO: 236113 - RNA, 24 nt, Human
uaaccccagccagcaugaaguaac

SEQ ID NO: 236114 - RNA, 23 nt, Human
uaagaugaaaggacugcaggccc

SEQ ID NO: 236115 - RNA, 19 nt, Human
uaccagauccuuaaagcuc

SEQ ID NO: 236116 - RNA, 23 nt, Human
uagacagauuuacauacugugaa

SEQ ID NO: 236117 - RNA, 20 nt, Human
uaggcaaaaagcagcuauau

SEQ ID NO: 236118 - RNA, 18 nt, Human
uauaaaagccauucucag

SEQ ID NO: 236119 - RNA, 23 nt, Human
uaugcacaaagacauaaaaacuc

SEQ ID NO: 236120 - RNA, 18 nt, Human
ucacugaaauuuagacag

SEQ ID NO: 236121 - RNA, 21 nt, Human
uccaaaauuuccuuuaaaagu

SEQ ID NO: 236122 - RNA, 19 nt, Human
ucccucaaaacgacaucau

SEQ ID NO: 236123 - RNA, 19 nt, Human
ugaacagaauuaaauuugc

SEQ ID NO: 236124 - RNA, 22 nt, Human
ugaacagaauuaaauuugcauc

SEQ ID NO: 236125 - RNA, 22 nt, Human
ugaaugaauacauuaccaggca

SEQ ID NO: 236126 - RNA, 19 nt, Human
ugaccagaaauucacugaa

SEQ ID NO: 236127 - RNA, 22 nt, Human
ugcacaaagacauaaaaacucc

SEQ ID NO: 236128 - RNA, 23 nt, Human
ugcaucauacugaccagaaauuc

SEQ ID NO: 236129 - RNA, 20 nt, Human
ugcucagaggcugcaucaua

SEQ ID NO: 236130 - RNA, 18 nt, Human
ugggaggcaugagggcaa

SEQ ID NO: 236131 - RNA, 19 nt, Human
uguaaaccagaauguagug

SEQ ID NO: 236132 - RNA, 21 nt, Human
ugugguugucuuugcuuuaag

SEQ ID NO: 236133 - RNA, 22 nt, Human
uuccuccaaaauuuccuuuaaa

SEQ ID NO: 236134 - RNA, 23 nt, Human
uuucaagguuaaguuuacuaaca

SEQ ID NO: 236135 - RNA, 19 nt, Human
uuugugaauuuaaauccuc

SEQ ID NO: 236136 - RNA, 22 nt, Human
aaaaaagcacgcacauucuaca

SEQ ID NO: 236137 - RNA, 21 nt, Human
aaaagcacgcacauucuacag

SEQ ID NO: 236138 - RNA, 20 nt, Human
aaggaacuccauccuaagac

SEQ ID NO: 236139 - RNA, 24 nt, Human
acaucggacccuuaggauggucuc

SEQ ID NO: 236140 - RNA, 20 nt, Human
accaccacccaaccuagaau

SEQ ID NO: 236141 - RNA, 27 nt, Human
acccucaaggaucuaccaccacccaac

SEQ ID NO: 236142 - RNA, 25 nt, Human
agaaagaaaaggaacuccauccuaa

SEQ ID NO: 236143 - RNA, 20 nt, Human
auauaucuauauauaucuca

SEQ ID NO: 236144 - RNA, 24 nt, Human
auccuguggauucuggcugugggu

SEQ ID NO: 236145 - RNA, 20 nt, Human
auugcauucuggaaaacucc

SEQ ID NO: 236146 - RNA, 23 nt, Human
caaaaaagcacgcacauucuaca

SEQ ID NO: 236147 - RNA, 23 nt, Human
caaauuccacuugaaaaagaggc

SEQ ID NO: 236148 - RNA, 22 nt, Human
caacagaaagaaaaggaacucc

SEQ ID NO: 236149 - RNA, 24 nt, Human
caacagaaagaaaaggaacuccau

SEQ ID NO: 236150 - RNA, 20 nt, Human
cagaacgccauuugugucuu

SEQ ID NO: 236151 - RNA, 24 nt, Human
caggcagaggcgcgagggcgcgca

SEQ ID NO: 236152 - RNA, 21 nt, Human
ccagccugcuccuggaggagc

SEQ ID NO: 236153 - RNA, 22 nt, Human
ccucaaggaucuaccaccaccc

SEQ ID NO: 236154 - RNA, 25 nt, Human
ccucaaggaucuaccaccacccaac

SEQ ID NO: 236155 - RNA, 20 nt, Human
gaaaaagaggcaacaagcga

SEQ ID NO: 236156 - RNA, 22 nt, Human
gagcuccuguguccacaaaaaa

SEQ ID NO: 236157 - RNA, 19 nt, Human
ggccugggagggagcucug

SEQ ID NO: 236158 - RNA, 23 nt, Human
ucaaggaucuaccaccacccaac

SEQ ID NO: 236159 - RNA, 23 nt, Human
ucccagccugcuccuggaggagc

SEQ ID NO: 236160 - RNA, 22 nt, Human
uccuguggauucuggcuguggg

SEQ ID NO: 236161 - RNA, 21 nt, Human
ucggcacaccuggcucuccuu

SEQ ID NO: 236162 - RNA, 18 nt, Human
ucuccuucucggugggau

SEQ ID NO: 236163 - RNA, 25 nt, Human
ucuggaaaacuccucccagaguccu

SEQ ID NO: 236164 - RNA, 19 nt, Human
uggaaaacuccucccagag

SEQ ID NO: 236165 - RNA, 19 nt, Human
ugggaucccagccugcucc

SEQ ID NO: 236166 - RNA, 21 nt, Human
ugggauccuguggauucuggc

SEQ ID NO: 236167 - RNA, 22 nt, Human
ugggauccuguggauucuggcu

SEQ ID NO: 236168 - RNA, 24 nt, Human
ugggauccuguggauucuggcugu

SEQ ID NO: 236169 - RNA, 22 nt, Human
uucuacagcuaugcgauuugcu

SEQ ID NO: 236170 - RNA, 21 nt, Human
uucuuagaauauuuuugguuu

SEQ ID NO: 236171 - RNA, 21 nt, Human
uuguagcugggaaacaacaac

SEQ ID NO: 236172 - RNA, 24 nt, Human
uuuaucaugccaaaaaaaguuguu

SEQ ID NO: 236173 - RNA, 22 nt, Human
uuuuugguuuugaaacuacuga

SEQ ID NO: 236174 - RNA, 18 nt, Human
uuuuuuuuuuuuuuuuug

SEQ ID NO: 236175 - RNA, 23 nt, Human
uuuuuuuuuuuuuuuuuggaauu

SEQ ID NO: 236176 - RNA, 22 nt, Human
agucggagugcgccggccggcu

SEQ ID NO: 236177 - RNA, 27 nt, Human
cccccaggccuggcuggguggccccag

SEQ ID NO: 236178 - RNA, 18 nt, Human
cccggaaagggcgcgggg

SEQ ID NO: 236179 - RNA, 18 nt, Human
cggagucggagugcgccg

SEQ ID NO: 236180 - RNA, 21 nt, Human
gagugcgccggccggcuggcu

SEQ ID NO: 236181 - RNA, 21 nt, Human
gcacggggaggcuggggagag

SEQ ID NO: 236182 - RNA, 22 nt, Human
gcuugcuccuggcaggcguggg

SEQ ID NO: 236183 - RNA, 21 nt, Human
ggaaagggcgcggggcucggg

SEQ ID NO: 236184 - RNA, 19 nt, Human
ucggaccucgggaucuggg

SEQ ID NO: 236185 - RNA, 20 nt, Human
ucggaccucgggaucugggu

SEQ ID NO: 236186 - RNA, 19 nt, Human
ucgggaucuggguuggcug

SEQ ID NO: 236187 - RNA, 26 nt, Human
ugcccccaggccuggcuggguggccc

SEQ ID NO: 236188 - RNA, 21 nt, Human
uggggaucugggccgggcgcu

SEQ ID NO: 236189 - RNA, 19 nt, Human
ugguguaggugcggcuccc

SEQ ID NO: 236190 - RNA, 30 nt, Human
aaaaaaagaaaaaacacacauacaaaaaag

SEQ ID NO: 236191 - RNA, 19 nt, Human
aaaaaacacaacgaaugca

SEQ ID NO: 236192 - RNA, 22 nt, Human
aaaaacacaacgaaugcauuuu

SEQ ID NO: 236193 - RNA, 19 nt, Human
aaaaugcuuuuccccuccc

SEQ ID NO: 236194 - RNA, 24 nt, Human
aaacccuucccucccuccaccucc

SEQ ID NO: 236195 - RNA, 24 nt, Human
aacacacauacaaaaaaagucaaa

SEQ ID NO: 236196 - RNA, 18 nt, Human
aacccuucccucccucca

SEQ ID NO: 236197 - RNA, 23 nt, Human
aagaaaaaacacacauacaaaaa

SEQ ID NO: 236198 - RNA, 22 nt, Human
aagaaguaaccauaaaaccaag

SEQ ID NO: 236199 - RNA, 23 nt, Human
aaguaaccauaaaaccaaguuuu

SEQ ID NO: 236200 - RNA, 21 nt, Human
aagucaaaaaauuugaggaac

SEQ ID NO: 236201 - RNA, 23 nt, Human
aaguuacacuaucuuaaaaaaca

SEQ ID NO: 236202 - RNA, 18 nt, Human
acacuaucuuaaaaaaca

SEQ ID NO: 236203 - RNA, 19 nt, Human
acccuucccucccuccacc

SEQ ID NO: 236204 - RNA, 21 nt, Human
acuuucagugucaaaaaggaa

SEQ ID NO: 236205 - RNA, 24 nt, Human
agaaacccuucccucccuccaccu

SEQ ID NO: 236206 - RNA, 25 nt, Human
agaaacccuucccucccuccaccuc

SEQ ID NO: 236207 - RNA, 20 nt, Human
aggccaucagauuugcagcu

SEQ ID NO: 236208 - RNA, 26 nt, Human
aggccaucagauuugcagcuuaaaaa

SEQ ID NO: 236209 - RNA, 20 nt, Human
auaaaaauauucugugcuuc

SEQ ID NO: 236210 - RNA, 19 nt, Human
augcauuuuaauagagaaa

SEQ ID NO: 236211 - RNA, 24 nt, Human
auugccuucuuacaaaauuucuau

SEQ ID NO: 236212 - RNA, 25 nt, Human
caaaaaaagucaaaaaauuugagga

SEQ ID NO: 236213 - RNA, 22 nt, Human
cacccuccucaugaauuaagaa

SEQ ID NO: 236214 - RNA, 24 nt, Human
cccacccuccucaugaauuaagaa

SEQ ID NO: 236215 - RNA, 18 nt, Human
ccccucccucacagcacc

SEQ ID NO: 236216 - RNA, 27 nt, Human
cccuccccuccucauaagaacuuaaaa

SEQ ID NO: 236217 - RNA, 25 nt, Human
cccucccuccaccucccucccccaa

SEQ ID NO: 236218 - RNA, 27 nt, Human
cccucccuccaccucccucccccaccc

SEQ ID NO: 236219 - RNA, 21 nt, Human
cccuccucauaagaacuuaaa

SEQ ID NO: 236220 - RNA, 21 nt, Human
ccuccucaugaauuaagaauc

SEQ ID NO: 236221 - RNA, 20 nt, Human
cucccuccaccucccucccc

SEQ ID NO: 236222 - RNA, 20 nt, Human
gaaacccuucccucccucca

SEQ ID NO: 236223 - RNA, 24 nt, Human
uaagaacuuaaaaaaaaagaaaaa

SEQ ID NO: 236224 - RNA, 19 nt, Human
uaagagaagaaguaaccau

SEQ ID NO: 236225 - RNA, 23 nt, Human
uaagagaagaaguaaccauaaaa

SEQ ID NO: 236226 - RNA, 22 nt, Human
uagagaaacccuucccucccuc

SEQ ID NO: 236227 - RNA, 21 nt, Human
uagcagagaauaaugaagaga

SEQ ID NO: 236228 - RNA, 24 nt, Human
uauaaaaauauucugugcuucuga

SEQ ID NO: 236229 - RNA, 25 nt, Human
uauugccuucuuacaaaauuucuau

SEQ ID NO: 236230 - RNA, 19 nt, Human
ucaaaaaauuugaggaacc

SEQ ID NO: 236231 - RNA, 21 nt, Human
ugaaaaaugcuuuuccccucc

SEQ ID NO: 236232 - RNA, 22 nt, Human
ugaaaaaugcuuuuccccuccc

SEQ ID NO: 236233 - RNA, 21 nt, Human
ugaauuaagaaucuaagagaa

SEQ ID NO: 236234 - RNA, 19 nt, Human
ugagaaggcucugcacugu

SEQ ID NO: 236235 - RNA, 19 nt, Human
uggaauccaucauccagag

SEQ ID NO: 236236 - RNA, 25 nt, Human
ugguuuauuuacccuccccuccuca

SEQ ID NO: 236237 - RNA, 18 nt, Human
uguauggacaugauuucu

SEQ ID NO: 236238 - RNA, 21 nt, Human
uguauggacaugauuucuuuu

SEQ ID NO: 236239 - RNA, 24 nt, Human
uuacccuccccuccucauaagaac

SEQ ID NO: 236240 - RNA, 18 nt, Human
uucugugcuucugagaag

SEQ ID NO: 236241 - RNA, 20 nt, Human
uuugcagcuuaaaaauucac

SEQ ID NO: 236242 - RNA, 20 nt, Human
uuuguggaauccaucaucca

SEQ ID NO: 236243 - RNA, 18 nt, Human
aauggcucaauuugccca

SEQ ID NO: 236244 - RNA, 20 nt, Human
agagaagggggaaaagagga

SEQ ID NO: 236245 - RNA, 19 nt, Human
agagaugggggaaucucgu

SEQ ID NO: 236246 - RNA, 21 nt, Human
aggcaggugggcaggcgggca

SEQ ID NO: 236247 - RNA, 18 nt, Human
aggcucggccgggagaag

SEQ ID NO: 236248 - RNA, 19 nt, Human
agggagagggagagagaag

SEQ ID NO: 236249 - RNA, 22 nt, Human
caccuucuaaauggcucaauuu

SEQ ID NO: 236250 - RNA, 21 nt, Human
cacugguagaguggcuggcug

SEQ ID NO: 236251 - RNA, 19 nt, Human
cagauacaaaagcagucuc

SEQ ID NO: 236252 - RNA, 20 nt, Human
caggcgggcagauggacaga

SEQ ID NO: 236253 - RNA, 22 nt, Human
cauuacauuucucauaaaauaa

SEQ ID NO: 236254 - RNA, 18 nt, Human
ccuacuuuugugccuccg

SEQ ID NO: 236255 - RNA, 19 nt, Human
ccuagauugcacucagcua

SEQ ID NO: 236256 - RNA, 19 nt, Human
ccuggccccaggagggguc

SEQ ID NO: 236257 - RNA, 21 nt, Human
ccuggccccaggaggggucac

SEQ ID NO: 236258 - RNA, 23 nt, Human
cgacucggggcgcgcuuuggcgg

SEQ ID NO: 236259 - RNA, 21 nt, Human
cggagaaguucuaauguggca

SEQ ID NO: 236260 - RNA, 21 nt, Human
gagggagagggagagagaagg

SEQ ID NO: 236261 - RNA, 19 nt, Human
gccaggcaggugggcaggc

SEQ ID NO: 236262 - RNA, 21 nt, Human
gcgcuuuggcggggcggccgg

SEQ ID NO: 236263 - RNA, 18 nt, Human
ggagaagggcgccgacuc

SEQ ID NO: 236264 - RNA, 20 nt, Human
ggagaaguucuaauguggca

SEQ ID NO: 236265 - RNA, 18 nt, Human
ggaggccaggcgccgggc

SEQ ID NO: 236266 - RNA, 20 nt, Human
ggccaggcaggugggcaggc

SEQ ID NO: 236267 - RNA, 18 nt, Human
ggccgggagaagggcgcc

SEQ ID NO: 236268 - RNA, 21 nt, Human
ggcgccgacucggggcgcgcu

SEQ ID NO: 236269 - RNA, 20 nt, Human
gggcaggcgggcagauggac

SEQ ID NO: 236270 - RNA, 18 nt, Human
guggaggaggaagggcca

SEQ ID NO: 236271 - RNA, 25 nt, Human
uggcaacgacacagcuuucagccuc

SEQ ID NO: 236272 - RNA, 21 nt, Human
uguaauugcauuugauagcuc

SEQ ID NO: 236273 - RNA, 20 nt, Human
uuauauucaaagagaugggg

SEQ ID NO: 236274 - RNA, 20 nt, Human
uucaaagagaugggggaauc

SEQ ID NO: 236275 - RNA, 19 nt, Human
uucgcagauacaaaagcag

SEQ ID NO: 236276 - RNA, 23 nt, Human
uucucauaaaauaaauguuccca

SEQ ID NO: 236277 - RNA, 21 nt, Human
uuggcggggcggccgguccuc

SEQ ID NO: 236278 - RNA, 24 nt, Human
aaacaggggaguuaaaaagccagg

SEQ ID NO: 236279 - RNA, 21 nt, Human
aaagaugcccggggacucggg

SEQ ID NO: 236280 - RNA, 22 nt, Human
aagaaaaaaagaauggccacuc

SEQ ID NO: 236281 - RNA, 20 nt, Human
aagaaaucccuuaccccacc

SEQ ID NO: 236282 - RNA, 21 nt, Human
aagggggccaagaaaaaaaga

SEQ ID NO: 236283 - RNA, 20 nt, Human
aaggugucuaaaaacaguga

SEQ ID NO: 236284 - RNA, 26 nt, Human
aagugucagccccugaauuaugccac

SEQ ID NO: 236285 - RNA, 23 nt, Human
aaucccuuaccccacccucaaac

SEQ ID NO: 236286 - RNA, 20 nt, Human
aaucuguggaacuccucccc

SEQ ID NO: 236287 - RNA, 21 nt, Human
accccacccucaaacccccaa

SEQ ID NO: 236288 - RNA, 18 nt, Human
acucagacccucauccuc

SEQ ID NO: 236289 - RNA, 19 nt, Human
agacgaagaugccauggag

SEQ ID NO: 236290 - RNA, 19 nt, Human
aggaagaaaagaaaucaau

SEQ ID NO: 236291 - RNA, 23 nt, Human
agggggcggcggccuaggggcgg

SEQ ID NO: 236292 - RNA, 18 nt, Human
agugauugaaacagggga

SEQ ID NO: 236293 - RNA, 19 nt, Human
auggagacggcgucuucag

SEQ ID NO: 236294 - RNA, 23 nt, Human
caaacccccaaagugccuaagag

SEQ ID NO: 236295 - RNA, 21 nt, Human
caccgcgcucccuuccauccc

SEQ ID NO: 236296 - RNA, 19 nt, Human
cacgacaaauacuuugaua

SEQ ID NO: 236297 - RNA, 22 nt, Human
cagcauugcuuuaaauaauugu

SEQ ID NO: 236298 - RNA, 21 nt, Human
caggacccaaauccuaacuca

SEQ ID NO: 236299 - RNA, 27 nt, Human
caggacccaaauccuaacucagacccu

SEQ ID NO: 236300 - RNA, 22 nt, Human
cagugaacaccuccccaaagau

SEQ ID NO: 236301 - RNA, 23 nt, Human
ccccaaagaugcccggggacucu

SEQ ID NO: 236302 - RNA, 22 nt, Human
ccccaaagugccuaagagugaa

SEQ ID NO: 236303 - RNA, 18 nt, Human
ccccgggucgcggcgccc

SEQ ID NO: 236304 - RNA, 19 nt, Human
cccucauccuccuacucag

SEQ ID NO: 236305 - RNA, 23 nt, Human
ccgcccggccgcccggagccccc

SEQ ID NO: 236306 - RNA, 19 nt, Human
ccgccgccgccaccgcccg

SEQ ID NO: 236307 - RNA, 21 nt, Human
ccgccgccgccaccgcccggu

SEQ ID NO: 236308 - RNA, 18 nt, Human
ccgccgccgccgccgccg

SEQ ID NO: 236309 - RNA, 24 nt, Human
ccgccgccgccgccgccgucgccg

SEQ ID NO: 236310 - RNA, 18 nt, Human
ccgccgccgccgccgucg

SEQ ID NO: 236311 - RNA, 24 nt, Human
ccgccgccgccgccgucgccgccg

SEQ ID NO: 236312 - RNA, 25 nt, Human
ccgccgccgccgccgucgccgccgc

SEQ ID NO: 236313 - RNA, 27 nt, Human
ccgccgccgccgccgucgccgccgcuc

SEQ ID NO: 236314 - RNA, 21 nt, Human
ccgccgccgccgucgccgccg

SEQ ID NO: 236315 - RNA, 18 nt, Human
ccgccgucgccgccgcuc

SEQ ID NO: 236316 - RNA, 20 nt, Human
ccggccccgggucgcggcgc

SEQ ID NO: 236317 - RNA, 18 nt, Human
ccggcgagcucgccccuc

SEQ ID NO: 236318 - RNA, 22 nt, Human
ccggggcucggacccccucggg

SEQ ID NO: 236319 - RNA, 23 nt, Human
ccgucgccgccgcuccugccucc

SEQ ID NO: 236320 - RNA, 24 nt, Human
ccuaagaaaucccuuaccccaccc

SEQ ID NO: 236321 - RNA, 18 nt, Human
ccuacucagaauguggag

SEQ ID NO: 236322 - RNA, 21 nt, Human
ccucaaacccccaaagugccu

SEQ ID NO: 236323 - RNA, 23 nt, Human
ccugcaggacccaaauccuaacu

SEQ ID NO: 236324 - RNA, 24 nt, Human
ccugccccacggauaccuucuggg

SEQ ID NO: 236325 - RNA, 22 nt, Human
ccuuuuuccugccucuccacua

SEQ ID NO: 236326 - RNA, 18 nt, Human
cgagggcagagagggggc

SEQ ID NO: 236327 - RNA, 21 nt, Human
cgccgccgcuccugccuccgc

SEQ ID NO: 236328 - RNA, 21 nt, Human
cgccgccgucgccgccgcucc

SEQ ID NO: 236329 - RNA, 19 nt, Human
cgccggcuccgcgccgccc

SEQ ID NO: 236330 - RNA, 22 nt, Human
cggccccgggucgcggcgcccu

SEQ ID NO: 236331 - RNA, 23 nt, Human
cggcugagggcagguggggguau

SEQ ID NO: 236332 - RNA, 23 nt, Human
cggggauggugugcgcccgcccg

SEQ ID NO: 236333 - RNA, 23 nt, Human
cucaaaaugaaggugucuaaaaa

SEQ ID NO: 236334 - RNA, 26 nt, Human
cuccccucaaaaugaaggugucuaaa

SEQ ID NO: 236335 - RNA, 20 nt, Human
cucgggaggcccuggcaccc

SEQ ID NO: 236336 - RNA, 22 nt, Human
cucuccuuucuguccuucccuu

SEQ ID NO: 236337 - RNA, 20 nt, Human
cugccuccgcuugcucggcc

SEQ ID NO: 236338 - RNA, 18 nt, Human
cuucagugaacaccuccc

SEQ ID NO: 236339 - RNA, 24 nt, Human
cuucucgggaggcccuggcacccu

SEQ ID NO: 236340 - RNA, 21 nt, Human
cuucuuuucagagcaguuguu

SEQ ID NO: 236341 - RNA, 18 nt, Human
gaaaucccuuaccccacc

SEQ ID NO: 236342 - RNA, 21 nt, Human
gaacaccuccccaaagaugcc

SEQ ID NO: 236343 - RNA, 20 nt, Human
gaagaugccauggagacggc

SEQ ID NO: 236344 - RNA, 24 nt, Human
gacaaauacuuugauauaaucuag

SEQ ID NO: 236345 - RNA, 23 nt, Human
gacgaagaugccauggagacggc

SEQ ID NO: 236346 - RNA, 25 nt, Human
gagcucucucacaccagaugugcuc

SEQ ID NO: 236347 - RNA, 18 nt, Human
gcaaauccaggguuugga

SEQ ID NO: 236348 - RNA, 22 nt, Human
gcaagcgucaaagucacaacaa

SEQ ID NO: 236349 - RNA, 19 nt, Human
gccccuggcaccuuuccgg

SEQ ID NO: 236350 - RNA, 20 nt, Human
gcccggucccucucgcgcgc

SEQ ID NO: 236351 - RNA, 23 nt, Human
gcccuugugaauagcaaagccca

SEQ ID NO: 236352 - RNA, 22 nt, Human
gccuccgcuugcucggccuccg

SEQ ID NO: 236353 - RNA, 19 nt, Human
gccuugggaagggggccaa

SEQ ID NO: 236354 - RNA, 21 nt, Human
gcggggcuggccggcugccgg

SEQ ID NO: 236355 - RNA, 24 nt, Human
gcggggugccgggcggcgggggcg

SEQ ID NO: 236356 - RNA, 21 nt, Human
gcucaaggcccguugcuguuc

SEQ ID NO: 236357 - RNA, 23 nt, Human
ggccccgggucgcggcgcccugc

SEQ ID NO: 236358 - RNA, 21 nt, Human
gggagggaggcggggugccgg

SEQ ID NO: 236359 - RNA, 18 nt, Human
gggcagagagggggcggc

SEQ ID NO: 236360 - RNA, 21 nt, Human
gggcggcgggggcgcucccuu

SEQ ID NO: 236361 - RNA, 18 nt, Human
guuaaaaguugugguuuc

SEQ ID NO: 236362 - RNA, 23 nt, Human
guuccuuucuucugcuaaucaug

SEQ ID NO: 236363 - RNA, 22 nt, Human
uaaaaagccaggaagaaaagaa

SEQ ID NO: 236364 - RNA, 22 nt, Human
uaaaggucuaccauccccuaag

SEQ ID NO: 236365 - RNA, 18 nt, Human
uaagaaaucccuuacccc

SEQ ID NO: 236366 - RNA, 19 nt, Human
uaccccacccucaaacccc

SEQ ID NO: 236367 - RNA, 24 nt, Human
uaccccacccucaaacccccaaag

SEQ ID NO: 236368 - RNA, 21 nt, Human
uaccuucugggcuaauugccu

SEQ ID NO: 236369 - RNA, 24 nt, Human
uagcaagcccugcaggacccaaau

SEQ ID NO: 236370 - RNA, 19 nt, Human
ucaaggcccguugcuguuc

SEQ ID NO: 236371 - RNA, 21 nt, Human
ucacaccagaugugcucugcg

SEQ ID NO: 236372 - RNA, 19 nt, Human
ucagugaacaccuccccaa

SEQ ID NO: 236373 - RNA, 19 nt, Human
uccaggguuuggagggcug

SEQ ID NO: 236374 - RNA, 22 nt, Human
uccaggguuuggagggcugggc

SEQ ID NO: 236375 - RNA, 18 nt, Human
ucccggucccgccgccgc

SEQ ID NO: 236376 - RNA, 19 nt, Human
ucccuuaccccacccucaa

SEQ ID NO: 236377 - RNA, 18 nt, Human
uccuucucgggaggcccu

SEQ ID NO: 236378 - RNA, 24 nt, Human
uccuucugucaccuugaaguguca

SEQ ID NO: 236379 - RNA, 21 nt, Human
uccuuuuuccugccucuccac

SEQ ID NO: 236380 - RNA, 21 nt, Human
ucgccgccgcuccugccuccg

SEQ ID NO: 236381 - RNA, 24 nt, Human
ucgccgccgcuccugccuccgcuu

SEQ ID NO: 236382 - RNA, 20 nt, Human
ucgccggcuccgcgccgccc

SEQ ID NO: 236383 - RNA, 22 nt, Human
ucgcgcgcugucgccggcuccg

SEQ ID NO: 236384 - RNA, 25 nt, Human
ucgggcgccgccgccgccgccgccg

SEQ ID NO: 236385 - RNA, 26 nt, Human
ucgggcgccgccgccgccgccgccgg

SEQ ID NO: 236386 - RNA, 30 nt, Human
ucuaccauccccuaagaaaucccuuacccu

SEQ ID NO: 236387 - RNA, 22 nt, Human
ucucugccaggacacccagagg

SEQ ID NO: 236388 - RNA, 21 nt, Human
ucugucucuguuucauuuccu

SEQ ID NO: 236389 - RNA, 24 nt, Human
ugaaacaggggaguuaaaaagcca

SEQ ID NO: 236390 - RNA, 23 nt, Human
ugcaggacccaaauccuaacuca

SEQ ID NO: 236391 - RNA, 19 nt, Human
ugccggggcucggaccccc

SEQ ID NO: 236392 - RNA, 19 nt, Human
ugccugugccaucuccccu

SEQ ID NO: 236393 - RNA, 24 nt, Human
ugccugugccaucuccccucucug

SEQ ID NO: 236394 - RNA, 25 nt, Human
ugcuuugcaccuguuccuucucggg

SEQ ID NO: 236395 - RNA, 19 nt, Human
uggaggacagugauugaaa

SEQ ID NO: 236396 - RNA, 23 nt, Human
uggaugggcuguggccauaaguu

SEQ ID NO: 236397 - RNA, 18 nt, Human
uggcacccuagcaccugg

SEQ ID NO: 236398 - RNA, 21 nt, Human
uggccauaaguucucccucaa

SEQ ID NO: 236399 - RNA, 24 nt, Human
uggggagggaggcggggugccggg

SEQ ID NO: 236400 - RNA, 20 nt, Human
uggggguauuuccuucucaa

SEQ ID NO: 236401 - RNA, 18 nt, Human
uguuccuuucuucugcua

SEQ ID NO: 236402 - RNA, 24 nt, Human
uuccugccucuccacuagcuacug

SEQ ID NO: 236403 - RNA, 21 nt, Human
uugaaaaauaucuucuuuuca

SEQ ID NO: 236404 - RNA, 19 nt, Human
aaagaaggugcaauggcau

SEQ ID NO: 236405 - RNA, 20 nt, Human
aaagagcaaauagaauguug

SEQ ID NO: 236406 - RNA, 19 nt, Human
aaagauuuuuuuuuuucuu

SEQ ID NO: 236407 - RNA, 20 nt, Human
aagcaggaaaggagaggagg

SEQ ID NO: 236408 - RNA, 21 nt, Human
agauuuuuuuuuuucuucauu

SEQ ID NO: 236409 - RNA, 25 nt, Human
agcggcggcggacggugcggaggcc

SEQ ID NO: 236410 - RNA, 22 nt, Human
aggagaggagggggcuaagggc

SEQ ID NO: 236411 - RNA, 21 nt, Human
aggccggcaggcaggcgcacc

SEQ ID NO: 236412 - RNA, 21 nt, Human
aggcggcggcggcggcggcgc

SEQ ID NO: 236413 - RNA, 23 nt, Human
aggguacaaacucuggccagugc

SEQ ID NO: 236414 - RNA, 26 nt, Human
caacugcugcaaucgcugcugcaagu

SEQ ID NO: 236415 - RNA, 25 nt, Human
cacuuacaugcauacauacauugua

SEQ ID NO: 236416 - RNA, 19 nt, Human
cagcucccucccccucccc

SEQ ID NO: 236417 - RNA, 20 nt, Human
caggagcccucggcccgcgc

SEQ ID NO: 236418 - RNA, 18 nt, Human
caggcaggcgcacccagg

SEQ ID NO: 236419 - RNA, 19 nt, Human
cauguguuacugacagagc

SEQ ID NO: 236420 - RNA, 24 nt, Human
cccaagauguccucugguggaucu

SEQ ID NO: 236421 - RNA, 18 nt, Human
ccccccagcucccucccc

SEQ ID NO: 236422 - RNA, 23 nt, Human
cccccgcccccgcccgcgcuccc

SEQ ID NO: 236423 - RNA, 18 nt, Human
cccccgcccgcgcuccuc

SEQ ID NO: 236424 - RNA, 19 nt, Human
cccccuccccaagaugucc

SEQ ID NO: 236425 - RNA, 26 nt, Human
ccccgcccccgcccgcgcuccucccg

SEQ ID NO: 236426 - RNA, 25 nt, Human
ccccgcccgcgcuccucccgcuccu

SEQ ID NO: 236427 - RNA, 22 nt, Human
cccgcgcuccucccgcuccucc

SEQ ID NO: 236428 - RNA, 21 nt, Human
ccgcccccgcccgcgcuccuc

SEQ ID NO: 236429 - RNA, 19 nt, Human
ccgcccgcgcuccucccgc

SEQ ID NO: 236430 - RNA, 19 nt, Human
ccgcccgcgcuccucccgc

SEQ ID NO: 236431 - RNA, 21 nt, Human
ccgcccgcgcuccucccgcuc

SEQ ID NO: 236432 - RNA, 19 nt, Human
ccgcugccggggcuguugc

SEQ ID NO: 236433 - RNA, 24 nt, Human
ccuauauugcaauauugcgagagg

SEQ ID NO: 236434 - RNA, 23 nt, Human
ccuccuccuccuccgccgccgcc

SEQ ID NO: 236435 - RNA, 23 nt, Human
ccuccuccuccuccgccgccgcc

SEQ ID NO: 236436 - RNA, 21 nt, Human
cgaagccgcucggcuuccagg

SEQ ID NO: 236437 - RNA, 25 nt, Human
cgcagcggcagcaacugcugcaauc

SEQ ID NO: 236438 - RNA, 23 nt, Human
cgcccgcgcuccucccgcuccuc

SEQ ID NO: 236439 - RNA, 23 nt, Human
cgcucgcucccuccgcggcucuu

SEQ ID NO: 236440 - RNA, 22 nt, Human
cggcucggaggcggcggcggcg

SEQ ID NO: 236441 - RNA, 18 nt, Human
cggcucggcugagcuccc

SEQ ID NO: 236442 - RNA, 30 nt, Human
cucccccccagcucccucccccuccccaag

SEQ ID NO: 236443 - RNA, 21 nt, Human
cucccccuccccaagaugucc

SEQ ID NO: 236444 - RNA, 20 nt, Human
cuccucccgcuccuccuccu

SEQ ID NO: 236445 - RNA, 19 nt, Human
cuccuccuccuccuccgcc

SEQ ID NO: 236446 - RNA, 22 nt, Human
cucggaggcggcggcggcggcg

SEQ ID NO: 236447 - RNA, 18 nt, Human
cugagcucccugcaccuc

SEQ ID NO: 236448 - RNA, 23 nt, Human
cuggagccugcgccgcugccggg

SEQ ID NO: 236449 - RNA, 24 nt, Human
gaauguuguuaagguaaaacacag

SEQ ID NO: 236450 - RNA, 18 nt, Human
gagcagcugcaggagccc

SEQ ID NO: 236451 - RNA, 26 nt, Human
gagcggcggcggacggugcggaggcc

SEQ ID NO: 236452 - RNA, 22 nt, Human
gaggcggcggcggugaaaugcg

SEQ ID NO: 236453 - RNA, 20 nt, Human
gauggcagcggcggcucggc

SEQ ID NO: 236454 - RNA, 18 nt, Human
gcaaucaagacuaaagaa

SEQ ID NO: 236455 - RNA, 24 nt, Human
gcacccaggcgucgggggcugcgg

SEQ ID NO: 236456 - RNA, 18 nt, Human
gcaggaaaggagaggagg

SEQ ID NO: 236457 - RNA, 21 nt, Human
gcgcggcuucaggcgcggcgc

SEQ ID NO: 236458 - RNA, 25 nt, Human
gcgcggcuucaggcgcgggggaacc

SEQ ID NO: 236459 - RNA, 26 nt, Human
gcgcggcuucaggcgcgggggaacgc

SEQ ID NO: 236460 - RNA, 19 nt, Human
gcucuggggcggguugggg

SEQ ID NO: 236461 - RNA, 20 nt, Human
gcugcccggcucggaggcgg

SEQ ID NO: 236462 - RNA, 25 nt, Human
gcuguugcugcccggcucggaggcg

SEQ ID NO: 236463 - RNA, 18 nt, Human
ggagcggcggcggacggu

SEQ ID NO: 236464 - RNA, 20 nt, Human
ggaggcggcggcggcggcgg

SEQ ID NO: 236465 - RNA, 20 nt, Human
ggccggcaggcaggcgcacc

SEQ ID NO: 236466 - RNA, 18 nt, Human
ggcggccgggagcagaag

SEQ ID NO: 236467 - RNA, 20 nt, Human
ggcggcggcggcggcggcgc

SEQ ID NO: 236468 - RNA, 22 nt, Human
ggcggcggcggcggcggcgcug

SEQ ID NO: 236469 - RNA, 21 nt, Human
ggcggcuuuuuuuuuuuuuuu

SEQ ID NO: 236470 - RNA, 29 nt, Human
ggcucggaggcggcggcggcggcggcgac

SEQ ID NO: 236471 - RNA, 22 nt, Human
gggaguucucgcagaagcagga

SEQ ID NO: 236472 - RNA, 19 nt, Human
gggcggcuuuuuuuuuuuu

SEQ ID NO: 236473 - RNA, 19 nt, Human
gggggcugcggccggccgg

SEQ ID NO: 236474 - RNA, 20 nt, Human
ggguacaaacucuggccagu

SEQ ID NO: 236475 - RNA, 24 nt, Human
ggugacuugucuacugaagacaca

SEQ ID NO: 236476 - RNA, 21 nt, Human
ggugcuagcuacaaaggugac

SEQ ID NO: 236477 - RNA, 23 nt, Human
guugcugcccggcucggaggcgg

SEQ ID NO: 236478 - RNA, 19 nt, Human
uaaaacacaggguacaaac

SEQ ID NO: 236479 - RNA, 28 nt, Human
uaagggcggcuuuuuuuuuuuuuuuaaa

SEQ ID NO: 236480 - RNA, 23 nt, Human
uaagguaaaacacaggguacaaa

SEQ ID NO: 236481 - RNA, 25 nt, Human
uacaugcauacauacauuguauuuu

SEQ ID NO: 236482 - RNA, 19 nt, Human
uacugaagacacaugggau

SEQ ID NO: 236483 - RNA, 24 nt, Human
uagaauaucacaaaagccacaucu

SEQ ID NO: 236484 - RNA, 18 nt, Human
uagcaacauuaggacaaa

SEQ ID NO: 236485 - RNA, 19 nt, Human
ucaggcgcggcgcagcggc

SEQ ID NO: 236486 - RNA, 19 nt, Human
ucccccgcccggcggcccc

SEQ ID NO: 236487 - RNA, 18 nt, Human
ucccgcgcgcucgcucgc

SEQ ID NO: 236488 - RNA, 24 nt, Human
ucccgcuccuccuccuccuccgcc

SEQ ID NO: 236489 - RNA, 18 nt, Human
ucccucccccccagcucc

SEQ ID NO: 236490 - RNA, 26 nt, Human
uccgcggcucuuacacauguguuacu

SEQ ID NO: 236491 - RNA, 21 nt, Human
uccuccgccgccgccuuccuc

SEQ ID NO: 236492 - RNA, 23 nt, Human
uccuccuccgccgccgccuuccu

SEQ ID NO: 236493 - RNA, 23 nt, Human
ucgcucgcucccuccgcggcucu

SEQ ID NO: 236494 - RNA, 22 nt, Human
ucucccauuagcccagguucau

SEQ ID NO: 236495 - RNA, 24 nt, Human
ucugagaugaaggcacgcauucug

SEQ ID NO: 236496 - RNA, 26 nt, Human
ugaaaauaucacaaauaaaagauuuu

SEQ ID NO: 236497 - RNA, 22 nt, Human
ugcaauggcauggagcuggcac

SEQ ID NO: 236498 - RNA, 18 nt, Human
ugcccggcucggaggcgg

SEQ ID NO: 236499 - RNA, 25 nt, Human
ugccgggcggccgggagcagaagug

SEQ ID NO: 236500 - RNA, 20 nt, Human
ugcggccggccgggcccggc

SEQ ID NO: 236501 - RNA, 23 nt, Human
ugcugcaaucgcugcugcaaguu

SEQ ID NO: 236502 - RNA, 18 nt, Human
uggcagcggcggcucggc

SEQ ID NO: 236503 - RNA, 18 nt, Human
uggcauggagcuggcacu

SEQ ID NO: 236504 - RNA, 21 nt, Human
uggccucuagccggcucgcuc

SEQ ID NO: 236505 - RNA, 23 nt, Human
ugggcuggcggagcuggagggag

SEQ ID NO: 236506 - RNA, 21 nt, Human
ugguggaucuuuuuucauuuu

SEQ ID NO: 236507 - RNA, 20 nt, Human
uguugcugcccggcucggag

SEQ ID NO: 236508 - RNA, 25 nt, Human
uuacagagauacaauaaguguuuuu

SEQ ID NO: 236509 - RNA, 20 nt, Human
uuauuuuuucuuuuaaguuu

SEQ ID NO: 236510 - RNA, 22 nt, Human
uucauucuuuuuuuuuucuuug

SEQ ID NO: 236511 - RNA, 21 nt, Human
uuuuuuccaaauuuuuuuucu

SEQ ID NO: 236512 - RNA, 23 nt, Human
uuuuuuuuauuuuuucuuuuaag

SEQ ID NO: 236513 - RNA, 24 nt, Human
uuuuuuuucuuuuuuucauucuuu

SEQ ID NO: 236514 - RNA, 24 nt, Human
uuuuuuuuuuuauuuuuucuuuua

SEQ ID NO: 236515 - RNA, 25 nt, Human
uuuuuuuuuuuuuuuuuuuauuuuu

SEQ ID NO: 236516 - RNA, 19 nt, Human
acucugacuggagaaugga

SEQ ID NO: 236517 - RNA, 22 nt, Human
agggaggaagaggauuuaugag

SEQ ID NO: 236518 - RNA, 20 nt, Human
gaggaagaggauuuaugacu

SEQ ID NO: 236519 - RNA, 20 nt, Human
gcccccuccaggacggccug

SEQ ID NO: 236520 - RNA, 26 nt, Human
ggagcccccuccaggacggccugccu

SEQ ID NO: 236521 - RNA, 19 nt, Human
uuguaggggcggggcgugg

SEQ ID NO: 236522 - RNA, 24 nt, Human
aaaaaaagcaaaaaagacauacaa

SEQ ID NO: 236523 - RNA, 24 nt, Human
aaaaaaagcaaaaaagacauacaa

SEQ ID NO: 236524 - RNA, 21 nt, Human
aaaaggccacauacugaaaua

SEQ ID NO: 236525 - RNA, 21 nt, Human
aaaaggccacauacugaaaua

SEQ ID NO: 236526 - RNA, 27 nt, Human
aaaaggccugaggucagacagugggca

SEQ ID NO: 236527 - RNA, 27 nt, Human
aaaaggccugaggucagacagugggca

SEQ ID NO: 236528 - RNA, 23 nt, Human
aaaauacccucuucaaaacacca

SEQ ID NO: 236529 - RNA, 23 nt, Human
aaaauacccucuucaaaacacca

SEQ ID NO: 236530 - RNA, 25 nt, Human
aaacauaacaucaaaaaaggccaca

SEQ ID NO: 236531 - RNA, 24 nt, Human
aacauaacaucaaaaaaggccaca

SEQ ID NO: 236532 - RNA, 20 nt, Human
aagcaaaaaagacauacaac

SEQ ID NO: 236533 - RNA, 21 nt, Human
aagcaaaaaagacauacaaca

SEQ ID NO: 236534 - RNA, 21 nt, Human
aaguugcucccuucucuucua

SEQ ID NO: 236535 - RNA, 21 nt, Human
aauaauagguagaaggaagga

SEQ ID NO: 236536 - RNA, 21 nt, Human
aauaauagguagaaggaagga

SEQ ID NO: 236537 - RNA, 22 nt, Human
aauuucugaaggauaaguugcu

SEQ ID NO: 236538 - RNA, 22 nt, Human
acacggguccucucuuuuugca

SEQ ID NO: 236539 - RNA, 24 nt, Human
acccucuucaaaacaccacuaguu

SEQ ID NO: 236540 - RNA, 24 nt, Human
acccucuucaaaacaccacuaguu

SEQ ID NO: 236541 - RNA, 19 nt, Human
accuuaguaaagcuacugg

SEQ ID NO: 236542 - RNA, 19 nt, Human
accuuaguaaagcuacugg

SEQ ID NO: 236543 - RNA, 19 nt, Human
agaaaauagagcucccuuc

SEQ ID NO: 236544 - RNA, 19 nt, Human
agaaaauagagcucccuuc

SEQ ID NO: 236545 - RNA, 21 nt, Human
agcuacuggauaaaacauaac

SEQ ID NO: 236546 - RNA, 21 nt, Human
agcuacuggauaaaacauaac

SEQ ID NO: 236547 - RNA, 23 nt, Human
aguauacacuuuaaauauaugca

SEQ ID NO: 236548 - RNA, 23 nt, Human
aguauacacuuuaaauauaugca

SEQ ID NO: 236549 - RNA, 19 nt, Human
auaaaauacccucuucaaa

SEQ ID NO: 236550 - RNA, 19 nt, Human
auaaaauacccucuucaaa

SEQ ID NO: 236551 - RNA, 21 nt, Human
aucaaaaauaaacuuccuuau

SEQ ID NO: 236552 - RNA, 21 nt, Human
aucaaaaauaaacuuccuuau

SEQ ID NO: 236553 - RNA, 20 nt, Human
auccagacuguggcauaguu

SEQ ID NO: 236554 - RNA, 20 nt, Human
auccagacuguggcauaguu

SEQ ID NO: 236555 - RNA, 22 nt, Human
aucuacaugagcagcaaccacc

SEQ ID NO: 236556 - RNA, 22 nt, Human
aucuacaugagcagcaaccacc

SEQ ID NO: 236557 - RNA, 19 nt, Human
caaaaaagacauacaacac

SEQ ID NO: 236558 - RNA, 19 nt, Human
caaaaaagacauacaacac

SEQ ID NO: 236559 - RNA, 21 nt, Human
caaaaaaggccacauacugaa

SEQ ID NO: 236560 - RNA, 21 nt, Human
caaaaaaggccacauacugaa

SEQ ID NO: 236561 - RNA, 26 nt, Human
caaaaauacugguucuaccaagacua

SEQ ID NO: 236562 - RNA, 26 nt, Human
caaaaauacugguucuaccaagacua

SEQ ID NO: 236563 - RNA, 21 nt, Human
caaaacaccacuaacuagaaa

SEQ ID NO: 236564 - RNA, 21 nt, Human
caaaacaccacuaacuagaaa

SEQ ID NO: 236565 - RNA, 22 nt, Human
cacaggacuuugagaaggaagc

SEQ ID NO: 236566 - RNA, 25 nt, Human
cacauacaccuaagaaaaagacgac

SEQ ID NO: 236567 - RNA, 25 nt, Human
cacauacaccuaagaaaaagacgac

SEQ ID NO: 236568 - RNA, 24 nt, Human
caccuaagaaaaagacgacccacu

SEQ ID NO: 236569 - RNA, 24 nt, Human
caccuaagaaaaagacgacccacu

SEQ ID NO: 236570 - RNA, 21 nt, Human
cacuaacuagaaagucaaacu

SEQ ID NO: 236571 - RNA, 21 nt, Human
cacuaacuagaaagucaaacu

SEQ ID NO: 236572 - RNA, 22 nt, Human
cagaaaggcucaccaguuucug

SEQ ID NO: 236573 - RNA, 22 nt, Human
cagaaaggcucaccaguuucug

SEQ ID NO: 236574 - RNA, 18 nt, Human
cagagcaaaugcaauuau

SEQ ID NO: 236575 - RNA, 18 nt, Human
cagagcaaaugcaauuau

SEQ ID NO: 236576 - RNA, 19 nt, Human
caucaaaaaaggccacaua

SEQ ID NO: 236577 - RNA, 19 nt, Human
caucaaaaaaggccacaua

SEQ ID NO: 236578 - RNA, 20 nt, Human
caugagcagcaaccaccucu

SEQ ID NO: 236579 - RNA, 20 nt, Human
caugagcagcaaccaccucu

SEQ ID NO: 236580 - RNA, 18 nt, Human
cccuucucuucuacucuc

SEQ ID NO: 236581 - RNA, 19 nt, Human
ccucaaaaauauucguagg

SEQ ID NO: 236582 - RNA, 19 nt, Human
ccucaaaaauauucguagg

SEQ ID NO: 236583 - RNA, 22 nt, Human
ccugcuuuucaauuucuucucu

SEQ ID NO: 236584 - RNA, 20 nt, Human
cucaagaugcugaauucaac

SEQ ID NO: 236585 - RNA, 20 nt, Human
cucaagaugcugaauucaac

SEQ ID NO: 236586 - RNA, 20 nt, Human
cucccuucucuucuacucuc

SEQ ID NO: 236587 - RNA, 23 nt, Human
cugaaauauggcuaaaaggccug

SEQ ID NO: 236588 - RNA, 23 nt, Human
cugaaauauggcuaaaaggccug

SEQ ID NO: 236589 - RNA, 25 nt, Human
gacccacucguuaaaugcaucagca

SEQ ID NO: 236590 - RNA, 25 nt, Human
gacccacucguuaaaugcaucagca

SEQ ID NO: 236591 - RNA, 18 nt, Human
gagaagacaaagaggcug

SEQ ID NO: 236592 - RNA, 23 nt, Human
gcuucugacacagucauuguagg

SEQ ID NO: 236593 - RNA, 21 nt, Human
ggauaaaacauaacaucaaaa

SEQ ID NO: 236594 - RNA, 21 nt, Human
ggauaaaacauaacaucaaaa

SEQ ID NO: 236595 - RNA, 23 nt, Human
guaaagaaaauagagcucccuuc

SEQ ID NO: 236596 - RNA, 23 nt, Human
guaaagaaaauagagcucccuuc

SEQ ID NO: 236597 - RNA, 21 nt, Human
guagaaggaaggauacagaaa

SEQ ID NO: 236598 - RNA, 21 nt, Human
guagaaggaaggauacagaaa

SEQ ID NO: 236599 - RNA, 19 nt, Human
guagaaucuucuuugggaa

SEQ ID NO: 236600 - RNA, 19 nt, Human
guugcucccuucucuucua

SEQ ID NO: 236601 - RNA, 21 nt, Human
uaaaaaaaaagcaaaaaagac

SEQ ID NO: 236602 - RNA, 21 nt, Human
uaaaaaaaaagcaaaaaagac

SEQ ID NO: 236603 - RNA, 23 nt, Human
uaaauaaacaacaaaaauacugg

SEQ ID NO: 236604 - RNA, 23 nt, Human
uaaauaaacaacaaaaauacugg

SEQ ID NO: 236605 - RNA, 25 nt, Human
uaacuagaaagucaaacuagaucau

SEQ ID NO: 236606 - RNA, 25 nt, Human
uaacuagaaagucaaacuagaucau

SEQ ID NO: 236607 - RNA, 22 nt, Human
uaacuugcuucugacacaguca

SEQ ID NO: 236608 - RNA, 22 nt, Human
uaagaaaaagacgacccacucg

SEQ ID NO: 236609 - RNA, 22 nt, Human
uaagaaaaagacgacccacucg

SEQ ID NO: 236610 - RNA, 18 nt, Human
uaaucuaaagaggcaaaa

SEQ ID NO: 236611 - RNA, 23 nt, Human
uaaucuaaagaggcaaaaaaagu

SEQ ID NO: 236612 - RNA, 18 nt, Human
uacacggguccucucuuu

SEQ ID NO: 236613 - RNA, 21 nt, Human
uacauuacaauaaacagagca

SEQ ID NO: 236614 - RNA, 21 nt, Human
uacauuacaauaaacagagca

SEQ ID NO: 236615 - RNA, 18 nt, Human
uaccaagacuacaaugcu

SEQ ID NO: 236616 - RNA, 18 nt, Human
uaccaagacuacaaugcu

SEQ ID NO: 236617 - RNA, 22 nt, Human
uaccaagacuacaaugcuucua

SEQ ID NO: 236618 - RNA, 22 nt, Human
uaccaagacuacaaugcuucua

SEQ ID NO: 236619 - RNA, 25 nt, Human
ucaaaaauaaacuuccuuauuaaaa

SEQ ID NO: 236620 - RNA, 18 nt, Human
ucaaaacaccacuaacua

SEQ ID NO: 236621 - RNA, 18 nt, Human
ucaaaacaccacuaacua

SEQ ID NO: 236622 - RNA, 18 nt, Human
ucacuguugucuucuccu

SEQ ID NO: 236623 - RNA, 18 nt, Human
ucacuguugucuucuccu

SEQ ID NO: 236624 - RNA, 27 nt, Human
uccaaaaacauaacuuuaucaaaaaua

SEQ ID NO: 236625 - RNA, 27 nt, Human
uccaaaaacauaacuuuaucaaaaaua

SEQ ID NO: 236626 - RNA, 19 nt, Human
ucgaagguauacaccaugu

SEQ ID NO: 236627 - RNA, 19 nt, Human
ucgaagguauacaccaugu

SEQ ID NO: 236628 - RNA, 25 nt, Human
ucucaagaugcugaauucaacaggu

SEQ ID NO: 236629 - RNA, 25 nt, Human
ucucaagaugcugaauucaacaggu

SEQ ID NO: 236630 - RNA, 26 nt, Human
ucucacucugguaacuugcuucugac

SEQ ID NO: 236631 - RNA, 28 nt, Human
ucucucacucugguaacuugcuucugac

SEQ ID NO: 236632 - RNA, 18 nt, Human
ugaaaauaagcagcuuuc

SEQ ID NO: 236633 - RNA, 18 nt, Human
ugaaaauaagcagcuuuc

SEQ ID NO: 236634 - RNA, 19 nt, Human
ugaggucagacacauacac

SEQ ID NO: 236635 - RNA, 19 nt, Human
ugaggucagacacauacac

SEQ ID NO: 236636 - RNA, 24 nt, Human
ugcucccuucucuucuacucucuc

SEQ ID NO: 236637 - RNA, 19 nt, Human
uggauaaaacauaacauca

SEQ ID NO: 236638 - RNA, 19 nt, Human
uggauaaaacauaacauca

SEQ ID NO: 236639 - RNA, 22 nt, Human
uggcuaaaaggccugaggucag

SEQ ID NO: 236640 - RNA, 22 nt, Human
uggcuaaaaggccugaggucag

SEQ ID NO: 236641 - RNA, 19 nt, Human
ugucaaaguauacacuuua

SEQ ID NO: 236642 - RNA, 19 nt, Human
ugucaaaguauacacuuua

SEQ ID NO: 236643 - RNA, 21 nt, Human
uguuucaguaaacacauccag

SEQ ID NO: 236644 - RNA, 21 nt, Human
uguuucaguaaacacauccag

SEQ ID NO: 236645 - RNA, 24 nt, Human
uuacacggguccucucuuuuugca

SEQ ID NO: 236646 - RNA, 20 nt, Human
uuacuuagcaacauuucugg

SEQ ID NO: 236647 - RNA, 20 nt, Human
uuacuuagcaacauuucugg

SEQ ID NO: 236648 - RNA, 20 nt, Human
uuugagaaggaagcugaauu

SEQ ID NO: 236649 - RNA, 21 nt, Human
uuuuugcuuuauagauauucu

SEQ ID NO: 236650 - RNA, 23 nt, Human
aaaaaaaaaagaaaagugcauag

SEQ ID NO: 236651 - RNA, 22 nt, Human
aaacaauaaggagaaagccagg

SEQ ID NO: 236652 - RNA, 23 nt, Human
aaaccuacaggagggcccuucaa

SEQ ID NO: 236653 - RNA, 24 nt, Human
aaauagcauggguguuaguugaaa

SEQ ID NO: 236654 - RNA, 20 nt, Human
aacauggugaaacccugucu

SEQ ID NO: 236655 - RNA, 21 nt, Human
aacauggugaaacccugucuc

SEQ ID NO: 236656 - RNA, 25 nt, Human
aaccaggaagguggagguugcagug

SEQ ID NO: 236657 - RNA, 19 nt, Human
aagaagcagaccuaacccu

SEQ ID NO: 236658 - RNA, 25 nt, Human
aaggcggguggaucaccugagguca

SEQ ID NO: 236659 - RNA, 24 nt, Human
aaucgcuugaaccaggaaggugga

SEQ ID NO: 236660 - RNA, 18 nt, Human
aauuagccaggcauggug

SEQ ID NO: 236661 - RNA, 20 nt, Human
acauaaaaccauacauaaaa

SEQ ID NO: 236662 - RNA, 20 nt, Human
accccaacuccuuucucuaa

SEQ ID NO: 236663 - RNA, 24 nt, Human
acccugucucuacuaaaaauacaa

SEQ ID NO: 236664 - RNA, 20 nt, Human
acugcacuccagcccgguug

SEQ ID NO: 236665 - RNA, 27 nt, Human
acugcacuccagcccgguugacaagag

SEQ ID NO: 236666 - RNA, 18 nt, Human
agaaacuccaucucaaaa

SEQ ID NO: 236667 - RNA, 19 nt, Human
agaagccacugcugugagc

SEQ ID NO: 236668 - RNA, 25 nt, Human
agacaagccagcaugcuggcucaga

SEQ ID NO: 236669 - RNA, 20 nt, Human
agacaggagcucugggcccg

SEQ ID NO: 236670 - RNA, 22 nt, Human
agcaaaauuugcauuauucaag

SEQ ID NO: 236671 - RNA, 19 nt, Human
agcagaccugccaugugga

SEQ ID NO: 236672 - RNA, 24 nt, Human
agcagaccugccauguggacugac

SEQ ID NO: 236673 - RNA, 22 nt, Human
agccaggcaugguggcuggugc

SEQ ID NO: 236674 - RNA, 21 nt, Human
agcccgguugacaagagaaac

SEQ ID NO: 236675 - RNA, 22 nt, Human
agccuggccaacauggugaaac

SEQ ID NO: 236676 - RNA, 24 nt, Human
agccuggccaacauggugaaaccc

SEQ ID NO: 236677 - RNA, 20 nt, Human
agccuuguugcugaaggauc

SEQ ID NO: 236678 - RNA, 22 nt, Human
agcugaucuaaacucccaguuu

SEQ ID NO: 236679 - RNA, 29 nt, Human
aggaagguggagguugcagugacaacggu

SEQ ID NO: 236680 - RNA, 24 nt, Human
aggaagguggagguugcagugagc

SEQ ID NO: 236681 - RNA, 18 nt, Human
aggagauagauagauuuu

SEQ ID NO: 236682 - RNA, 21 nt, Human
aggcaggaaacccgggcucgg

SEQ ID NO: 236683 - RNA, 22 nt, Human
aggcaggaaacccgggcucgga

SEQ ID NO: 236684 - RNA, 21 nt, Human
aggcaugguggcuggugcuug

SEQ ID NO: 236685 - RNA, 21 nt, Human
aggccaaggcggguggaucac

SEQ ID NO: 236686 - RNA, 22 nt, Human
aggcggguggaucaccugaggu

SEQ ID NO: 236687 - RNA, 26 nt, Human
aggcggguggaucaccugaggucaga

SEQ ID NO: 236688 - RNA, 19 nt, Human
aggcugggcgcgguggcuc

SEQ ID NO: 236689 - RNA, 19 nt, Human
agggaucaugaugucuacu

SEQ ID NO: 236690 - RNA, 24 nt, Human
agguggagguugcagugagccaag

SEQ ID NO: 236691 - RNA, 24 nt, Human
aguggccacucaguggcaggugac

SEQ ID NO: 236692 - RNA, 21 nt, Human
aguggggugccugccccacaa

SEQ ID NO: 236693 - RNA, 19 nt, Human
auaaagccauauggauugc

SEQ ID NO: 236694 - RNA, 21 nt, Human
auaaugauacaagauggaucc

SEQ ID NO: 236695 - RNA, 21 nt, Human
auagauagauuuucaauccag

SEQ ID NO: 236696 - RNA, 20 nt, Human
aucagcugauuuugcuccca

SEQ ID NO: 236697 - RNA, 22 nt, Human
aucccagcacuuugggaggcca

SEQ ID NO: 236698 - RNA, 19 nt, Human
augaaaccuacaggagggc

SEQ ID NO: 236699 - RNA, 18 nt, Human
auggcucugcuggcaccc

SEQ ID NO: 236700 - RNA, 18 nt, Human
auguggucaucuguggug

SEQ ID NO: 236701 - RNA, 22 nt, Human
auuacauucacaaguucacacu

SEQ ID NO: 236702 - RNA, 20 nt, Human
auugcaccacugcacuccag

SEQ ID NO: 236703 - RNA, 19 nt, Human
caaaaaaggagccuaaaac

SEQ ID NO: 236704 - RNA, 24 nt, Human
caacauggugaaacccugucucua

SEQ ID NO: 236705 - RNA, 21 nt, Human
caagaacuacaucuguaaaca

SEQ ID NO: 236706 - RNA, 24 nt, Human
caaggcagguuaguugacuuaauu

SEQ ID NO: 236707 - RNA, 24 nt, Human
caaggcggguggaucaccugaggu

SEQ ID NO: 236708 - RNA, 18 nt, Human
cacugcacuccagcccgg

SEQ ID NO: 236709 - RNA, 25 nt, Human
cacugcacuccagcccgguugacaa

SEQ ID NO: 236710 - RNA, 24 nt, Human
cacugccagcucuggcccucaccc

SEQ ID NO: 236711 - RNA, 24 nt, Human
cagcacuuugggaggccaaggcgg

SEQ ID NO: 236712 - RNA, 24 nt, Human
cagcuacuugagaggucgaggcag

SEQ ID NO: 236713 - RNA, 19 nt, Human
cagcuguugaggccuggaa

SEQ ID NO: 236714 - RNA, 23 nt, Human
cauuuccgccgccagcgcuugac

SEQ ID NO: 236715 - RNA, 23 nt, Human
ccacaauggugcccaccccuuca

SEQ ID NO: 236716 - RNA, 20 nt, Human
ccacagaaucugaacuugca

SEQ ID NO: 236717 - RNA, 19 nt, Human
ccacugcacuccagcccgg

SEQ ID NO: 236718 - RNA, 19 nt, Human
ccacugcacuccagcccgg

SEQ ID NO: 236719 - RNA, 20 nt, Human
ccacugcacuccagcccggu

SEQ ID NO: 236720 - RNA, 23 nt, Human
ccacugcacuccagcccgguuga

SEQ ID NO: 236721 - RNA, 25 nt, Human
ccacugcacuccagcccgguugaca

SEQ ID NO: 236722 - RNA, 19 nt, Human
ccagaaaugaucaaaggca

SEQ ID NO: 236723 - RNA, 21 nt, Human
ccaggaagguggagguugcag

SEQ ID NO: 236724 - RNA, 27 nt, Human
ccagugacuuuccauaauaagcuuucu

SEQ ID NO: 236725 - RNA, 21 nt, Human
cccacaauggugcccaccccu

SEQ ID NO: 236726 - RNA, 21 nt, Human
ccccacaauggugcccacccc

SEQ ID NO: 236727 - RNA, 23 nt, Human
ccccacccucugaaagaccccaa

SEQ ID NO: 236728 - RNA, 20 nt, Human
cccccguuucugagccucca

SEQ ID NO: 236729 - RNA, 24 nt, Human
ccccgcccugggcgcguccucucc

SEQ ID NO: 236730 - RNA, 19 nt, Human
ccgcccugggcgcguccuc

SEQ ID NO: 236731 - RNA, 24 nt, Human
ccgccgucgccaccgcgggccgcg

SEQ ID NO: 236732 - RNA, 19 nt, Human
ccgggcccucgaaaucccg

SEQ ID NO: 236733 - RNA, 23 nt, Human
ccgggcccucgaaaucccgaggg

SEQ ID NO: 236734 - RNA, 24 nt, Human
ccgggcgggcagccgggcggaggg

SEQ ID NO: 236735 - RNA, 18 nt, Human
ccuaaagcugagaguaga

SEQ ID NO: 236736 - RNA, 21 nt, Human
ccuaaagcugagaguagaagc

SEQ ID NO: 236737 - RNA, 24 nt, Human
ccucaagggcagcuguugaggccu

SEQ ID NO: 236738 - RNA, 19 nt, Human
ccuccaaaucucugccaca

SEQ ID NO: 236739 - RNA, 23 nt, Human
ccucgaaaucccgagggggcggg

SEQ ID NO: 236740 - RNA, 22 nt, Human
ccugaggucagacauucgagac

SEQ ID NO: 236741 - RNA, 24 nt, Human
ccuggcaugaagacgucauauccc

SEQ ID NO: 236742 - RNA, 22 nt, Human
ccuggccaacauggugaaaccc

SEQ ID NO: 236743 - RNA, 24 nt, Human
ccuggccaacauggugaaacccug

SEQ ID NO: 236744 - RNA, 22 nt, Human
ccuguaaucccagcacuuuggg

SEQ ID NO: 236745 - RNA, 24 nt, Human
cgagaccagccuggccaacauggu

SEQ ID NO: 236746 - RNA, 23 nt, Human
cgcccccgggcccucgaaauccc

SEQ ID NO: 236747 - RNA, 23 nt, Human
cgccuguaaucccagcacuuugg

SEQ ID NO: 236748 - RNA, 20 nt, Human
cgcgccuguaaucccagcac

SEQ ID NO: 236749 - RNA, 24 nt, Human
cgcgccuguaaucccagcacuuug

SEQ ID NO: 236750 - RNA, 23 nt, Human
cggccgggcugagagacaggagc

SEQ ID NO: 236751 - RNA, 18 nt, Human
cggcuggggccuggucag

SEQ ID NO: 236752 - RNA, 19 nt, Human
cgggcucggaaaauggcca

SEQ ID NO: 236753 - RNA, 27 nt, Human
cggguggaucaccugaggucagacauu

SEQ ID NO: 236754 - RNA, 21 nt, Human
cuaaacucccaguuuccuaga

SEQ ID NO: 236755 - RNA, 21 nt, Human
cuaccuggugugccucuuggc

SEQ ID NO: 236756 - RNA, 22 nt, Human
cuacuggguaccuuuccugugc

SEQ ID NO: 236757 - RNA, 19 nt, Human
cuccaucucaaaaaaaaaa

SEQ ID NO: 236758 - RNA, 19 nt, Human
cucccacauaaagaaaggu

SEQ ID NO: 236759 - RNA, 22 nt, Human
cucgaaaucccgagggggcggg

SEQ ID NO: 236760 - RNA, 24 nt, Human
cucgcgccuguaaucccagcacuu

SEQ ID NO: 236761 - RNA, 21 nt, Human
cucucgguagaaguugccggc

SEQ ID NO: 236762 - RNA, 18 nt, Human
cugauuuugcucccacau

SEQ ID NO: 236763 - RNA, 22 nt, Human
cugcugugagccuggggguugu

SEQ ID NO: 236764 - RNA, 24 nt, Human
cuggccaacauggugaaacccugu

SEQ ID NO: 236765 - RNA, 19 nt, Human
cugucccgaggaugcagua

SEQ ID NO: 236766 - RNA, 21 nt, Human
gaagaagcagaccuaacccuc

SEQ ID NO: 236767 - RNA, 18 nt, Human
gaagcaaaaauuugaccu

SEQ ID NO: 236768 - RNA, 18 nt, Human
gaagcaggauuagaugug

SEQ ID NO: 236769 - RNA, 19 nt, Human
gacaagagaaacuccaucu

SEQ ID NO: 236770 - RNA, 24 nt, Human
gacauucgagaccagccuggccaa

SEQ ID NO: 236771 - RNA, 21 nt, Human
gagcggggcucaggcaggaaa

SEQ ID NO: 236772 - RNA, 22 nt, Human
gaggaugcaguagacaagccag

SEQ ID NO: 236773 - RNA, 18 nt, Human
gagguugcagugagccaa

SEQ ID NO: 236774 - RNA, 23 nt, Human
gagguugcagugagccaagauug

SEQ ID NO: 236775 - RNA, 24 nt, Human
gaucaccugaggucagacauucga

SEQ ID NO: 236776 - RNA, 24 nt, Human
gaucaccugaggucagacauucga

SEQ ID NO: 236777 - RNA, 20 nt, Human
gauugugugugcccaugugu

SEQ ID NO: 236778 - RNA, 20 nt, Human
gcagccgggcggaggcggug

SEQ ID NO: 236779 - RNA, 19 nt, Human
gcauagggaccccgggcag

SEQ ID NO: 236780 - RNA, 24 nt, Human
gccaacauggugaaacccugucuc

SEQ ID NO: 236781 - RNA, 19 nt, Human
gcccccgggcccucgaaau

SEQ ID NO: 236782 - RNA, 20 nt, Human
gccggcccauggcgucgcgc

SEQ ID NO: 236783 - RNA, 19 nt, Human
gcgccuguaaucccagcac

SEQ ID NO: 236784 - RNA, 23 nt, Human
gcgggcgggcccccgcccugggc

SEQ ID NO: 236785 - RNA, 19 nt, Human
gcucugcuggcacccaaga

SEQ ID NO: 236786 - RNA, 22 nt, Human
gcucuggcccucaccccaacuc

SEQ ID NO: 236787 - RNA, 20 nt, Human
gcuuguaaucccagcuacuu

SEQ ID NO: 236788 - RNA, 20 nt, Human
ggacuggaaggagaguggug

SEQ ID NO: 236789 - RNA, 22 nt, Human
ggagguugcagugagccaagau

SEQ ID NO: 236790 - RNA, 24 nt, Human
ggagguugcagugagccaagauug

SEQ ID NO: 236791 - RNA, 19 nt, Human
ggcagccgggcggaggcgg

SEQ ID NO: 236792 - RNA, 18 nt, Human
ggcaugguggcuggugcu

SEQ ID NO: 236793 - RNA, 23 nt, Human
ggcccggccggcccauggcgucg

SEQ ID NO: 236794 - RNA, 23 nt, Human
ggcgcgguggcucgcgccuguaa

SEQ ID NO: 236795 - RNA, 20 nt, Human
ggcucggaaaauggccagcg

SEQ ID NO: 236796 - RNA, 23 nt, Human
gggcgggcagccgggcggaggcg

SEQ ID NO: 236797 - RNA, 18 nt, Human
ggggacugggcauaggga

SEQ ID NO: 236798 - RNA, 24 nt, Human
ggugcuuguaaucccagcuacuug

SEQ ID NO: 236799 - RNA, 23 nt, Human
gguggcucgcgccuguaauccca

SEQ ID NO: 236800 - RNA, 24 nt, Human
gguggcucgcgccuguaaucccag

SEQ ID NO: 236801 - RNA, 24 nt, Human
gguggcuggugcuuguaaucccag

SEQ ID NO: 236802 - RNA, 24 nt, Human
gucaaaaaaggagccuaaaaccca

SEQ ID NO: 236803 - RNA, 21 nt, Human
gugaaacccugucucuacuaa

SEQ ID NO: 236804 - RNA, 23 nt, Human
guggcucgcgccuguaaucccag

SEQ ID NO: 236805 - RNA, 18 nt, Human
gugggaugugcugugccu

SEQ ID NO: 236806 - RNA, 19 nt, Human
gugggaugugcugugccua

SEQ ID NO: 236807 - RNA, 24 nt, Human
gugggguauuaaaggaguuucuca

SEQ ID NO: 236808 - RNA, 21 nt, Human
guguaggcugggcgcgguggc

SEQ ID NO: 236809 - RNA, 20 nt, Human
uaaaaauacaaaauuagcca

SEQ ID NO: 236810 - RNA, 22 nt, Human
uaaaaauacaaaauuagccagg

SEQ ID NO: 236811 - RNA, 23 nt, Human
uaaaaauacaaaauuagccaggc

SEQ ID NO: 236812 - RNA, 20 nt, Human
uaaggagaaagccaggugga

SEQ ID NO: 236813 - RNA, 20 nt, Human
uacaucuguaaacaauaagg

SEQ ID NO: 236814 - RNA, 20 nt, Human
uagguuaagaaacuguuaug

SEQ ID NO: 236815 - RNA, 19 nt, Human
uagucagagcugcuaaguu

SEQ ID NO: 236816 - RNA, 23 nt, Human
uauguagagaggcugcuaagaaa

SEQ ID NO: 236817 - RNA, 22 nt, Human
ucaauccagugaagcaguagcc

SEQ ID NO: 236818 - RNA, 18 nt, Human
ucaguccuaugaguuuua

SEQ ID NO: 236819 - RNA, 18 nt, Human
ucagugucaggucugcuu

SEQ ID NO: 236820 - RNA, 19 nt, Human
uccacugccagcucuggcc

SEQ ID NO: 236821 - RNA, 20 nt, Human
uccaucucaaaaaaaaaaaa

SEQ ID NO: 236822 - RNA, 23 nt, Human
uccaucucaaaaaaaaaaaagaa

SEQ ID NO: 236823 - RNA, 19 nt, Human
ucccgagggggcgggcggg

SEQ ID NO: 236824 - RNA, 22 nt, Human
ucgaggcagaaucgcuugaacc

SEQ ID NO: 236825 - RNA, 24 nt, Human
ucgcuugaaccaggaagguggagg

SEQ ID NO: 236826 - RNA, 22 nt, Human
ucucuacuaaaaauacaaaauu

SEQ ID NO: 236827 - RNA, 24 nt, Human
ucugcuggcacccaagagcagcug

SEQ ID NO: 236828 - RNA, 20 nt, Human
ucuuuggugcuggugacugu

SEQ ID NO: 236829 - RNA, 21 nt, Human
ugaaggaagggauggugccgg

SEQ ID NO: 236830 - RNA, 22 nt, Human
ugaauggcucugcuggcaccca

SEQ ID NO: 236831 - RNA, 18 nt, Human
ugaauggcucugcuggcc

SEQ ID NO: 236832 - RNA, 21 nt, Human
ugacagugucagugaaaaaga

SEQ ID NO: 236833 - RNA, 21 nt, Human
ugacuccacugucacugcccc

SEQ ID NO: 236834 - RNA, 20 nt, Human
ugacuuugaggaaauaaaga

SEQ ID NO: 236835 - RNA, 24 nt, Human
ugagagauguauguagagaggcug

SEQ ID NO: 236836 - RNA, 20 nt, Human
ugagccuccagacagguucu

SEQ ID NO: 236837 - RNA, 21 nt, Human
ugcaccacugcacuccagccc

SEQ ID NO: 236838 - RNA, 19 nt, Human
ugccugugcuccucaaggg

SEQ ID NO: 236839 - RNA, 22 nt, Human
ugcggccgggcugagagacagg

SEQ ID NO: 236840 - RNA, 19 nt, Human
ugcuuggagggcaccaagc

SEQ ID NO: 236841 - RNA, 22 nt, Human
ugcuuguaaucccagcuacuug

SEQ ID NO: 236842 - RNA, 23 nt, Human
ugcuuguaaucccagcuacuuga

SEQ ID NO: 236843 - RNA, 24 nt, Human
uggaucaccugaggucagacauuc

SEQ ID NO: 236844 - RNA, 24 nt, Human
uggccaacauggugaaacccuguc

SEQ ID NO: 236845 - RNA, 22 nt, Human
uggcucgcgccuguaaucccag

SEQ ID NO: 236846 - RNA, 24 nt, Human
uggcucgcgccuguaaucccagca

SEQ ID NO: 236847 - RNA, 20 nt, Human
uggcuggagggagggaacuu

SEQ ID NO: 236848 - RNA, 21 nt, Human
uggcuggugcuuguaauccca

SEQ ID NO: 236849 - RNA, 22 nt, Human
uggcuggugcuuguaaucccag

SEQ ID NO: 236850 - RNA, 24 nt, Human
uggcuggugcuuguaaucccagcu

SEQ ID NO: 236851 - RNA, 24 nt, Human
ugggaggccaaggcggguggauca

SEQ ID NO: 236852 - RNA, 21 nt, Human
ugggaugugcugugccuaugg

SEQ ID NO: 236853 - RNA, 24 nt, Human
ugguggcuggugcuuguaauccca

SEQ ID NO: 236854 - RNA, 21 nt, Human
ugguguaggcugggcgcggug

SEQ ID NO: 236855 - RNA, 24 nt, Human
uguaaacaauaaggagaaagccag

SEQ ID NO: 236856 - RNA, 21 nt, Human
uguaaucccagcuacuugaga

SEQ ID NO: 236857 - RNA, 24 nt, Human
ugucacugcccccguuucugagcc

SEQ ID NO: 236858 - RNA, 26 nt, Human
uguggacacagcagaccugccaugug

SEQ ID NO: 236859 - RNA, 20 nt, Human
uguggucaucuguggugugg

SEQ ID NO: 236860 - RNA, 25 nt, Human
uguuaauauacuugcaaguuccuuu

SEQ ID NO: 236861 - RNA, 25 nt, Human
uuaacagugucccuuaaaucuuucu

SEQ ID NO: 236862 - RNA, 18 nt, Human
uuagccaggcaugguggc

SEQ ID NO: 236863 - RNA, 18 nt, Human
uuaguccugaauagaaag

SEQ ID NO: 236864 - RNA, 24 nt, Human
uuaguugacuuaauucuuuggugc

SEQ ID NO: 236865 - RNA, 21 nt, Human
uucccccacccucugaaagac

SEQ ID NO: 236866 - RNA, 18 nt, Human
uucgagaccagccuggcc

SEQ ID NO: 236867 - RNA, 20 nt, Human
uucugacuacaaaaauagca

SEQ ID NO: 236868 - RNA, 24 nt, Human
uugaaccaggaagguggagguugc

SEQ ID NO: 236869 - RNA, 22 nt, Human
uugcagugagccaagauugcac

SEQ ID NO: 236870 - RNA, 19 nt, Human
uuuaggaaggacaguggcc

SEQ ID NO: 236871 - RNA, 23 nt, Human
uuuccgccgccagcgcuugacag

SEQ ID NO: 236872 - RNA, 22 nt, Human
aacuuggcagcgauccuggcuu

SEQ ID NO: 236873 - RNA, 23 nt, Human
aagcggcagagcccaagcuuaca

SEQ ID NO: 236874 - RNA, 24 nt, Human
aaugccaucuaucaauaagaagca

SEQ ID NO: 236875 - RNA, 18 nt, Human
acugugucaguaacuuuc

SEQ ID NO: 236876 - RNA, 25 nt, Human
agaacagaauuccaaaacaggguuu

SEQ ID NO: 236877 - RNA, 24 nt, Human
auaaauaacuacauacugcccaaa

SEQ ID NO: 236878 - RNA, 26 nt, Human
caaagacacuucagaaaagauggaug

SEQ ID NO: 236879 - RNA, 23 nt, Human
caacuuggcagcgauccuggcuu

SEQ ID NO: 236880 - RNA, 21 nt, Human
cagagcccaagcuuacaagcu

SEQ ID NO: 236881 - RNA, 21 nt, Human
caggguuuuuguccccaucug

SEQ ID NO: 236882 - RNA, 22 nt, Human
caguaacuuucuggauacugag

SEQ ID NO: 236883 - RNA, 22 nt, Human
cccaucuguguaucuucaaagu

SEQ ID NO: 236884 - RNA, 22 nt, Human
ccccugccgcggcuccuuacag

SEQ ID NO: 236885 - RNA, 22 nt, Human
cccgagcuuccuacuccgagag

SEQ ID NO: 236886 - RNA, 20 nt, Human
cccugagcuaacuagaacuc

SEQ ID NO: 236887 - RNA, 21 nt, Human
cgcccgagcuuccuacuccga

SEQ ID NO: 236888 - RNA, 24 nt, Human
cugaagugauggcggcucuuaggg

SEQ ID NO: 236889 - RNA, 22 nt, Human
cuuacaagcucucugaaugggc

SEQ ID NO: 236890 - RNA, 18 nt, Human
cuuggcagcgauccuggc

SEQ ID NO: 236891 - RNA, 21 nt, Human
gcaaaagcggcagagcccaag

SEQ ID NO: 236892 - RNA, 27 nt, Human
uaaauaacuacauacugcccaaagacc

SEQ ID NO: 236893 - RNA, 21 nt, Human
uaauaaauaacuacauacugc

SEQ ID NO: 236894 - RNA, 24 nt, Human
uacagccggagcgcccgagcuucc

SEQ ID NO: 236895 - RNA, 21 nt, Human
uacauacugcccaaagacacu

SEQ ID NO: 236896 - RNA, 18 nt, Human
uaccauauucuucagagc

SEQ ID NO: 236897 - RNA, 19 nt, Human
uacugugucaguaacuuuc

SEQ ID NO: 236898 - RNA, 25 nt, Human
uagaacagaauuccaaaacaggguu

SEQ ID NO: 236899 - RNA, 19 nt, Human
uaggguagaacuuuccuug

SEQ ID NO: 236900 - RNA, 21 nt, Human
ucagagcuaacuuuguaccac

SEQ ID NO: 236901 - RNA, 19 nt, Human
uccaaagagugcaaacaac

SEQ ID NO: 236902 - RNA, 18 nt, Human
ucccccugccgcggcucc

SEQ ID NO: 236903 - RNA, 23 nt, Human
ugaggaauagaacagaauuccaa

SEQ ID NO: 236904 - RNA, 18 nt, Human
uucaaaguagaaaaauua

SEQ ID NO: 236905 - RNA, 21 nt, Human
uucagaaaagauggaugaaaa

SEQ ID NO: 236906 - RNA, 22 nt, Human
uuccaaaacaggguuuuugucc

SEQ ID NO: 236907 - RNA, 22 nt, Human
uuuguccccaucuguguaucuu

SEQ ID NO: 236908 - RNA, 18 nt, Human
aacccaagucuuucaggc

SEQ ID NO: 236909 - RNA, 20 nt, Human
aacuucccucuaacuccucc

SEQ ID NO: 236910 - RNA, 23 nt, Human
aacuucccucuaacuccuccuac

SEQ ID NO: 236911 - RNA, 24 nt, Human
aagcccaagaagaaugaaucagga

SEQ ID NO: 236912 - RNA, 18 nt, Human
aaggccucaaagcuguaa

SEQ ID NO: 236913 - RNA, 20 nt, Human
aagucuuucaggcaguggaa

SEQ ID NO: 236914 - RNA, 24 nt, Human
aauuuucuucccauccaccaaggc

SEQ ID NO: 236915 - RNA, 18 nt, Human
acacaccagccacaaacu

SEQ ID NO: 236916 - RNA, 21 nt, Human
acuucccucuaacuccuccua

SEQ ID NO: 236917 - RNA, 18 nt, Human
agaaaauucucuaauuca

SEQ ID NO: 236918 - RNA, 22 nt, Human
agaaagauaaacucuccacagg

SEQ ID NO: 236919 - RNA, 19 nt, Human
agacaucccuggagcugcu

SEQ ID NO: 236920 - RNA, 20 nt, Human
agacaucccuggagcugcug

SEQ ID NO: 236921 - RNA, 23 nt, Human
agauagaaagugaacagacaaag

SEQ ID NO: 236922 - RNA, 27 nt, Human
agccacaaacucguaaauguucacgcu

SEQ ID NO: 236923 - RNA, 24 nt, Human
aggaacauuacugccuaugaaugu

SEQ ID NO: 236924 - RNA, 23 nt, Human
aggcaaagcucccauuaagccca

SEQ ID NO: 236925 - RNA, 20 nt, Human
aggccucaaagcuguaaaca

SEQ ID NO: 236926 - RNA, 18 nt, Human
auaauacacaagaacacc

SEQ ID NO: 236927 - RNA, 27 nt, Human
caaagcccaagaagaaugaaucaggaa

SEQ ID NO: 236928 - RNA, 19 nt, Human
caaagcuguaaacagcaga

SEQ ID NO: 236929 - RNA, 22 nt, Human
caaagugaaccuggagcagaga

SEQ ID NO: 236930 - RNA, 20 nt, Human
cacauuaaggcaacuguccu

SEQ ID NO: 236931 - RNA, 30 nt, Human
caccaaggccucaaagcuguaaacagcagg

SEQ ID NO: 236932 - RNA, 26 nt, Human
caccagccacaaacucguaaauguuc

SEQ ID NO: 236933 - RNA, 18 nt, Human
cacugucacuuuucugag

SEQ ID NO: 236934 - RNA, 21 nt, Human
cagcaaaagugauacuagagg

SEQ ID NO: 236935 - RNA, 18 nt, Human
cagcagccagggaaaccu

SEQ ID NO: 236936 - RNA, 22 nt, Human
caggucccaggcaaagcuccca

SEQ ID NO: 236937 - RNA, 18 nt, Human
caguggaccccugcaguc

SEQ ID NO: 236938 - RNA, 30 nt, Human
cauccccaucuccaaaaccacgcugggggg

SEQ ID NO: 236939 - RNA, 23 nt, Human
ccaaaaccacgcuggggguaugc

SEQ ID NO: 236940 - RNA, 23 nt, Human
ccaaagugaaccuggagcagaga

SEQ ID NO: 236941 - RNA, 24 nt, Human
ccaacaguuauaguucaacccaag

SEQ ID NO: 236942 - RNA, 18 nt, Human
ccaccaaggccucaaagc

SEQ ID NO: 236943 - RNA, 22 nt, Human
ccacccuucccuuuacugcacu

SEQ ID NO: 236944 - RNA, 19 nt, Human
ccauagauguugaaauaac

SEQ ID NO: 236945 - RNA, 21 nt, Human
ccaugagaaagauaaacucuc

SEQ ID NO: 236946 - RNA, 20 nt, Human
cccaucuccaaaaccacgcu

SEQ ID NO: 236947 - RNA, 19 nt, Human
ccccaacagugucaccucu

SEQ ID NO: 236948 - RNA, 22 nt, Human
ccccaacagugucaccucucac

SEQ ID NO: 236949 - RNA, 19 nt, Human
ccccugcagucucugucuu

SEQ ID NO: 236950 - RNA, 24 nt, Human
cccuggaaacccugggaggaacau

SEQ ID NO: 236951 - RNA, 19 nt, Human
ccucaagaaagggaauagg

SEQ ID NO: 236952 - RNA, 24 nt, Human
ccugguggcccugggagauggcuu

SEQ ID NO: 236953 - RNA, 21 nt, Human
cucccauuaagcccacccuuc

SEQ ID NO: 236954 - RNA, 19 nt, Human
cuccuacgcaagcuuacca

SEQ ID NO: 236955 - RNA, 23 nt, Human
cugcacuagaucagggccugacu

SEQ ID NO: 236956 - RNA, 21 nt, Human
cugcuuccagaggcagcuccu

SEQ ID NO: 236957 - RNA, 22 nt, Human
cuucccgagcgguccaugagaa

SEQ ID NO: 236958 - RNA, 24 nt, Human
gaaaauucucuaauucaagcauuc

SEQ ID NO: 236959 - RNA, 20 nt, Human
gaaccuggagcagagaagcg

SEQ ID NO: 236960 - RNA, 18 nt, Human
gacacaagggucaggaac

SEQ ID NO: 236961 - RNA, 21 nt, Human
gcaaagcucccauuaagccca

SEQ ID NO: 236962 - RNA, 20 nt, Human
gcacaaagcgcagagcccca

SEQ ID NO: 236963 - RNA, 18 nt, Human
gccaugcugggaaucuau

SEQ ID NO: 236964 - RNA, 21 nt, Human
gccucaaagcuguaaacagca

SEQ ID NO: 236965 - RNA, 24 nt, Human
ggaaaagaaagaucauauccaaag

SEQ ID NO: 236966 - RNA, 18 nt, Human
gggaacacaaagaaggcc

SEQ ID NO: 236967 - RNA, 21 nt, Human
gggcagguccuccacagggac

SEQ ID NO: 236968 - RNA, 22 nt, Human
gguucaggucccaggcaaagcu

SEQ ID NO: 236969 - RNA, 20 nt, Human
uaaacucuucagcagcaaaa

SEQ ID NO: 236970 - RNA, 20 nt, Human
uaaggcaacuguccuuagac

SEQ ID NO: 236971 - RNA, 18 nt, Human
uaauucaagcauucucuc

SEQ ID NO: 236972 - RNA, 23 nt, Human
uacaggcuagcaaagcccaagaa

SEQ ID NO: 236973 - RNA, 22 nt, Human
uacuucacacucuccggaaagc

SEQ ID NO: 236974 - RNA, 24 nt, Human
uaggaagagccaaauccauagaug

SEQ ID NO: 236975 - RNA, 18 nt, Human
uauaauacacaagaacac

SEQ ID NO: 236976 - RNA, 21 nt, Human
uauguugggaaaagaaagauc

SEQ ID NO: 236977 - RNA, 21 nt, Human
uauugauacaaguuauuuuaa

SEQ ID NO: 236978 - RNA, 24 nt, Human
ucaacuucccucuaacuccuccua

SEQ ID NO: 236979 - RNA, 23 nt, Human
ucaaugccaugcugggaaucuau

SEQ ID NO: 236980 - RNA, 20 nt, Human
ucagggccugacuuagagga

SEQ ID NO: 236981 - RNA, 24 nt, Human
uccaaagugaaccuggagcagaga

SEQ ID NO: 236982 - RNA, 19 nt, Human
uccaccaaggccucaaagc

SEQ ID NO: 236983 - RNA, 22 nt, Human
uccauagauguugaaauaacag

SEQ ID NO: 236984 - RNA, 20 nt, Human
ucccaucaaaugaccuggcu

SEQ ID NO: 236985 - RNA, 22 nt, Human
uccuagguacucgguaggacuc

SEQ ID NO: 236986 - RNA, 22 nt, Human
ucuaauucaagcauucucuaac

SEQ ID NO: 236987 - RNA, 19 nt, Human
ucucaaugccaugcuggga

SEQ ID NO: 236988 - RNA, 24 nt, Human
ucucaaugccaugcugggaaucua

SEQ ID NO: 236989 - RNA, 22 nt, Human
ucuucagcagcaaaaucagugu

SEQ ID NO: 236990 - RNA, 18 nt, Human
ugaucuugacauuacauu

SEQ ID NO: 236991 - RNA, 18 nt, Human
ugcuacaauuuucuuccc

SEQ ID NO: 236992 - RNA, 24 nt, Human
ugcuacaauuuucuucccauccaa

SEQ ID NO: 236993 - RNA, 21 nt, Human
ugcugcaaucuuuagucugua

SEQ ID NO: 236994 - RNA, 20 nt, Human
uggaaacccugggaggaaca

SEQ ID NO: 236995 - RNA, 24 nt, Human
uggauagaaacucaccauugcaga

SEQ ID NO: 236996 - RNA, 23 nt, Human
uggcaaaaaauaaagaguuauaa

SEQ ID NO: 236997 - RNA, 30 nt, Human
uggcaaaaaauaaagaguuauaauacacaa

SEQ ID NO: 236998 - RNA, 18 nt, Human
uggcccugggagauggcu

SEQ ID NO: 236999 - RNA, 22 nt, Human
uggcuacucauggggcucugca

SEQ ID NO: 237000 - RNA, 21 nt, Human
uggggaacacaaagaaggccg

SEQ ID NO: 237001 - RNA, 23 nt, Human
uguauccuggcuacucauggggc

SEQ ID NO: 237002 - RNA, 26 nt, Human
uguuaggcauccccaucuccaaaacc

SEQ ID NO: 237003 - RNA, 21 nt, Human
uguuucccuggaaacccuggg

SEQ ID NO: 237004 - RNA, 20 nt, Human
uuacugcacuagaucagggc

SEQ ID NO: 237005 - RNA, 19 nt, Human
uucauguuguuucccugga

SEQ ID NO: 237006 - RNA, 21 nt, Human
uucccauccaccaaggccuca

SEQ ID NO: 237007 - RNA, 21 nt, Human
uuguaguaaaucaggaguucc

SEQ ID NO: 237008 - RNA, 18 nt, Human
uuguguccagcagccagg

SEQ ID NO: 237009 - RNA, 21 nt, Human
uuuuuuuuuuuuuaaagggua

SEQ ID NO: 237010 - RNA, 23 nt, Human
uuuuuuuuuuuuuuuuuaaaggg

SEQ ID NO: 237011 - RNA, 19 nt, Human
aagcccaucggugccccug

SEQ ID NO: 237012 - RNA, 22 nt, Human
acuccuucgccuccgugguacc

SEQ ID NO: 237013 - RNA, 24 nt, Human
acuccuucgccuccgugguacccu

SEQ ID NO: 237014 - RNA, 22 nt, Human
agaaggaaggagagcccaaagc

SEQ ID NO: 237015 - RNA, 21 nt, Human
cagaaaccaaagaggcuaaac

SEQ ID NO: 237016 - RNA, 19 nt, Human
cagcagaacuagaugcagc

SEQ ID NO: 237017 - RNA, 18 nt, Human
ccccuggaaaacaccucc

SEQ ID NO: 237018 - RNA, 24 nt, Human
ccccuggaaaacaccuccaacucu

SEQ ID NO: 237019 - RNA, 24 nt, Human
ccggagagcucaauggcuucuucc

SEQ ID NO: 237020 - RNA, 21 nt, Human
ggagagcucaauggcuucuuc

SEQ ID NO: 237021 - RNA, 21 nt, Human
guacagaaaccaaagaggcua

SEQ ID NO: 237022 - RNA, 23 nt, Human
gucugagaaggaaggagagccca

SEQ ID NO: 237023 - RNA, 23 nt, Human
uacagaaaccaaagaggcuaaac

SEQ ID NO: 237024 - RNA, 21 nt, Human
ucugagaaggaaggagagccc

SEQ ID NO: 237025 - RNA, 20 nt, Human
uguacagaaaccaaagaggc

SEQ ID NO: 237026 - RNA, 18 nt, Human
aaacaguccaaacaaaaa

SEQ ID NO: 237027 - RNA, 26 nt, Human
aaauaaaaacggggcucaaaucacgg

SEQ ID NO: 237028 - RNA, 23 nt, Human
agaaaauaaaaacggggcucaaa

SEQ ID NO: 237029 - RNA, 27 nt, Human
aggcacugauuuauccauugggaggaa

SEQ ID NO: 237030 - RNA, 26 nt, Human
caaaucacgugagggaaggagaaauc

SEQ ID NO: 237031 - RNA, 19 nt, Human
caacggggagcggcgcgga

SEQ ID NO: 237032 - RNA, 21 nt, Human
cacagaaaauaaaaacggggc

SEQ ID NO: 237033 - RNA, 24 nt, Human
cacccuucccuuuccccuuucuca

SEQ ID NO: 237034 - RNA, 21 nt, Human
cacuguguuaauucacaaagu

SEQ ID NO: 237035 - RNA, 21 nt, Human
cacuucagaacaccaggcacu

SEQ ID NO: 237036 - RNA, 20 nt, Human
cagucaaggcggcugcucgg

SEQ ID NO: 237037 - RNA, 18 nt, Human
ccuggaaggcaacgggga

SEQ ID NO: 237038 - RNA, 22 nt, Human
cguggcacccuucccuuucccc

SEQ ID NO: 237039 - RNA, 23 nt, Human
cguggcucacagaaaauaaaaac

SEQ ID NO: 237040 - RNA, 24 nt, Human
cuggaaggcaacggggagcggcgc

SEQ ID NO: 237041 - RNA, 18 nt, Human
gaaaacaguccaaacaaa

SEQ ID NO: 237042 - RNA, 21 nt, Human
gagcggcgcggagucccggag

SEQ ID NO: 237043 - RNA, 23 nt, Human
guccuggaaggcaacggggagcg

SEQ ID NO: 237044 - RNA, 20 nt, Human
ucacuaaaguuccagcacuu

SEQ ID NO: 237045 - RNA, 21 nt, Human
ugaaaacaguccaaacaaaaa

SEQ ID NO: 237046 - RNA, 23 nt, Human
ugcuuuguuauugaaaacagucc

SEQ ID NO: 237047 - RNA, 22 nt, Human
uuacagaauugaaacacugugu

SEQ ID NO: 237048 - RNA, 19 nt, Human
uucaaaaggaacaugagaa

SEQ ID NO: 237049 - RNA, 18 nt, Human
uucccuuuccccuuucuc

SEQ ID NO: 237050 - RNA, 20 nt, Human
uugccagauugaccccgcuc

SEQ ID NO: 237051 - RNA, 21 nt, Human
uuugcacuacaauuucaaaag

SEQ ID NO: 237052 - RNA, 20 nt, Human
uuuguuguuuucuguucucu

SEQ ID NO: 237053 - RNA, 21 nt, Human
uuuugcacuacaauuucaaaa

SEQ ID NO: 237054 - RNA, 26 nt, Human
aacaacaaaacaacacuguagagaaa

SEQ ID NO: 237055 - RNA, 24 nt, Human
acaacaaaacaacacuguagagaa

SEQ ID NO: 237056 - RNA, 18 nt, Human
acacuguagagaaaagug

SEQ ID NO: 237057 - RNA, 22 nt, Human
aggggucagggcagggcagggg

SEQ ID NO: 237058 - RNA, 19 nt, Human
aguggcccccugggcgugc

SEQ ID NO: 237059 - RNA, 24 nt, Human
caacaacaaaacaacacuguagag

SEQ ID NO: 237060 - RNA, 18 nt, Human
caacacuguagagaaaag

SEQ ID NO: 237061 - RNA, 21 nt, Human
caaggccaaggggucagggca

SEQ ID NO: 237062 - RNA, 18 nt, Human
cacggccucgaggacagg

SEQ ID NO: 237063 - RNA, 20 nt, Human
caggaguggcccccugggcg

SEQ ID NO: 237064 - RNA, 20 nt, Human
cauggccagccccgcacugg

SEQ ID NO: 237065 - RNA, 20 nt, Human
cccacggccucgaggacagg

SEQ ID NO: 237066 - RNA, 19 nt, Human
cccagggcugcacgaggcu

SEQ ID NO: 237067 - RNA, 20 nt, Human
ccucgaggacaggaaggcuc

SEQ ID NO: 237068 - RNA, 20 nt, Human
ccuguggguugggggcuggg

SEQ ID NO: 237069 - RNA, 21 nt, Human
ccuguggguugggggcugggc

SEQ ID NO: 237070 - RNA, 26 nt, Human
ccuugucccgagcgggacggcuccuc

SEQ ID NO: 237071 - RNA, 22 nt, Human
cguccggaaucccugugguuuu

SEQ ID NO: 237072 - RNA, 18 nt, Human
cuccuugcuugccccagc

SEQ ID NO: 237073 - RNA, 18 nt, Human
gccaaggggucagggcag

SEQ ID NO: 237074 - RNA, 18 nt, Human
gcccccugggcgugcuuc

SEQ ID NO: 237075 - RNA, 21 nt, Human
gcccggggagcagggccugcu

SEQ ID NO: 237076 - RNA, 19 nt, Human
gccugugggccuuacaugg

SEQ ID NO: 237077 - RNA, 19 nt, Human
gcucucaggaguggccccc

SEQ ID NO: 237078 - RNA, 18 nt, Human
ggacagagaggcucucag

SEQ ID NO: 237079 - RNA, 20 nt, Human
ggcaggaccgccugugggcc

SEQ ID NO: 237080 - RNA, 18 nt, Human
gggaggcugcccggggag

SEQ ID NO: 237081 - RNA, 18 nt, Human
gggcagggcaggggcggu

SEQ ID NO: 237082 - RNA, 19 nt, Human
ggggucagggcagggcagg

SEQ ID NO: 237083 - RNA, 18 nt, Human
gguugggggcugggcccc

SEQ ID NO: 237084 - RNA, 23 nt, Human
guggguugggggcugggccccuc

SEQ ID NO: 237085 - RNA, 22 nt, Human
uaaaaaccaacaacaacaaaac

SEQ ID NO: 237086 - RNA, 24 nt, Human
uauggccaaaguauaaaaaauaaa

SEQ ID NO: 237087 - RNA, 26 nt, Human
uccaugcuggccuugucccgagcggg

SEQ ID NO: 237088 - RNA, 21 nt, Human
ucccacggccucgaggacagg

SEQ ID NO: 237089 - RNA, 21 nt, Human
ucccugaggccggcagggagg

SEQ ID NO: 237090 - RNA, 22 nt, Human
ugccccagcucuagcuuugucc

SEQ ID NO: 237091 - RNA, 18 nt, Human
ugccuguggguugggggc

SEQ ID NO: 237092 - RNA, 20 nt, Human
uggaaggggagagauuggcc

SEQ ID NO: 237093 - RNA, 24 nt, Human
uggacagagaggcucucaggaguc

SEQ ID NO: 237094 - RNA, 18 nt, Human
ugggccccucggcgggag

SEQ ID NO: 237095 - RNA, 19 nt, Human
uggggucuggcguccggaa

SEQ ID NO: 237096 - RNA, 21 nt, Human
uguccaugcuggccuuguccc

SEQ ID NO: 237097 - RNA, 19 nt, Human
uucucuucccacggccucg

SEQ ID NO: 237098 - RNA, 21 nt, Human
uuuauucagcccagaccuggg

SEQ ID NO: 237099 - RNA, 24 nt, Human
aaacacguggcaccauuaucuaug

SEQ ID NO: 237100 - RNA, 19 nt, Human
aagaggaggagaaaugggg

SEQ ID NO: 237101 - RNA, 19 nt, Human
aagcaccaagcguagguag

SEQ ID NO: 237102 - RNA, 20 nt, Human
aagcaccaagucugagcuca

SEQ ID NO: 237103 - RNA, 21 nt, Human
aaggggcccugcgcagcuggg

SEQ ID NO: 237104 - RNA, 23 nt, Human
aaucaaaaacccacagaauugga

SEQ ID NO: 237105 - RNA, 23 nt, Human
acaaaccccacccccccaaggcc

SEQ ID NO: 237106 - RNA, 23 nt, Human
acagaagcagcaggagcuuuuug

SEQ ID NO: 237107 - RNA, 18 nt, Human
accugucugugggccuca

SEQ ID NO: 237108 - RNA, 18 nt, Human
acuggcucuuggugcugc

SEQ ID NO: 237109 - RNA, 20 nt, Human
agacaggaguugaccacgca

SEQ ID NO: 237110 - RNA, 18 nt, Human
agaggaggagaaaugggg

SEQ ID NO: 237111 - RNA, 24 nt, Human
agauauucaaguuugcugaaaaug

SEQ ID NO: 237112 - RNA, 26 nt, Human
aggccccaagggucagguagcagccc

SEQ ID NO: 237113 - RNA, 22 nt, Human
agggucccuuuccuccugagcu

SEQ ID NO: 237114 - RNA, 19 nt, Human
aguaucuugaaaaacaagg

SEQ ID NO: 237115 - RNA, 24 nt, Human
auagcaccguugaaucaaaaaccc

SEQ ID NO: 237116 - RNA, 19 nt, Human
cacgaaggggcccugcgca

SEQ ID NO: 237117 - RNA, 20 nt, Human
cagaaaacacguggcaccau

SEQ ID NO: 237118 - RNA, 18 nt, Human
cagcugggagggacaggc

SEQ ID NO: 237119 - RNA, 23 nt, Human
ccaaaucagaaaacacguggcac

SEQ ID NO: 237120 - RNA, 18 nt, Human
ccacgguggucccccucc

SEQ ID NO: 237121 - RNA, 19 nt, Human
ccaggacccugguuauagc

SEQ ID NO: 237122 - RNA, 20 nt, Human
cccacagaauuggaacaaca

SEQ ID NO: 237123 - RNA, 21 nt, Human
cccacagaauuggaacaacag

SEQ ID NO: 237124 - RNA, 22 nt, Human
ccccacccccccaaggccuucu

SEQ ID NO: 237125 - RNA, 22 nt, Human
ccccccaaggccuucucaggcc

SEQ ID NO: 237126 - RNA, 18 nt, Human
ccgauggcuggagaaagc

SEQ ID NO: 237127 - RNA, 18 nt, Human
ccgcgcucuccacggugg

SEQ ID NO: 237128 - RNA, 25 nt, Human
ccgcuuccgccgccgcugagccccu

SEQ ID NO: 237129 - RNA, 22 nt, Human
cgagcagagggggcggcucugg

SEQ ID NO: 237130 - RNA, 23 nt, Human
cgauggcuggagaaagcaagcac

SEQ ID NO: 237131 - RNA, 21 nt, Human
cgcccugucacccaggacccu

SEQ ID NO: 237132 - RNA, 24 nt, Human
cuccagcagcucuguggacaaacc

SEQ ID NO: 237133 - RNA, 19 nt, Human
gagaaagcaagcaccaagc

SEQ ID NO: 237134 - RNA, 19 nt, Human
gagcagagggggcggcucu

SEQ ID NO: 237135 - RNA, 23 nt, Human
gcccugucacccaggacccuggg

SEQ ID NO: 237136 - RNA, 19 nt, Human
gccugaagacaggaguuga

SEQ ID NO: 237137 - RNA, 20 nt, Human
gcuccacugugucuguggug

SEQ ID NO: 237138 - RNA, 19 nt, Human
ggacaaaccccaccccccc

SEQ ID NO: 237139 - RNA, 21 nt, Human
ggagaaaugggguucggccug

SEQ ID NO: 237140 - RNA, 22 nt, Human
ggagggacaggcgggguacaga

SEQ ID NO: 237141 - RNA, 25 nt, Human
ggguggggguuguggagagggaagc

SEQ ID NO: 237142 - RNA, 25 nt, Human
ggugggggccgggcugggugagggc

SEQ ID NO: 237143 - RNA, 18 nt, Human
gucccuuuccuccugagc

SEQ ID NO: 237144 - RNA, 21 nt, Human
gucugugggccucaucccggu

SEQ ID NO: 237145 - RNA, 19 nt, Human
uacagaagcagcaggagcu

SEQ ID NO: 237146 - RNA, 21 nt, Human
uagcagccccccaugaaugau

SEQ ID NO: 237147 - RNA, 23 nt, Human
uaggggucuggacaggguggggg

SEQ ID NO: 237148 - RNA, 22 nt, Human
ucagaaaacacguggcaccauu

SEQ ID NO: 237149 - RNA, 20 nt, Human
uccaagggcccagaugucca

SEQ ID NO: 237150 - RNA, 22 nt, Human
uccgcaguggccgggcugggac

SEQ ID NO: 237151 - RNA, 24 nt, Human
ucuccgauggcuggaagugcguca

SEQ ID NO: 237152 - RNA, 23 nt, Human
ucuugaaaaacaagggguggggg

SEQ ID NO: 237153 - RNA, 20 nt, Human
ugaagacaggaguugaccac

SEQ ID NO: 237154 - RNA, 18 nt, Human
ugacaaccugucuguggg

SEQ ID NO: 237155 - RNA, 21 nt, Human
ugagcgcccugucacccagga

SEQ ID NO: 237156 - RNA, 25 nt, Human
ugagcgcccugucacccaggacccu

SEQ ID NO: 237157 - RNA, 18 nt, Human
ugagcucgguggcuugaa

SEQ ID NO: 237158 - RNA, 19 nt, Human
ugcucagugagcgcccugu

SEQ ID NO: 237159 - RNA, 19 nt, Human
uggaagagaggucuagaua

SEQ ID NO: 237160 - RNA, 21 nt, Human
uggacaaaccccaccccccca

SEQ ID NO: 237161 - RNA, 22 nt, Human
uggacaaaccccacccccccaa

SEQ ID NO: 237162 - RNA, 21 nt, Human
uggagaagagcgcggcuccac

SEQ ID NO: 237163 - RNA, 21 nt, Human
ugggagggucccuuuccuccu

SEQ ID NO: 237164 - RNA, 19 nt, Human
ugggggccgggcuggguga

SEQ ID NO: 237165 - RNA, 22 nt, Human
ugggggccgggcugggugaggg

SEQ ID NO: 237166 - RNA, 19 nt, Human
uggggguuguggagaggga

SEQ ID NO: 237167 - RNA, 23 nt, Human
uggggguuguggagagggaagca

SEQ ID NO: 237168 - RNA, 22 nt, Human
ugggguucggccugacccucuc

SEQ ID NO: 237169 - RNA, 18 nt, Human
ugucacccaggacccugg

SEQ ID NO: 237170 - RNA, 22 nt, Human
uguccaauauuaaaugccaaua

SEQ ID NO: 237171 - RNA, 22 nt, Human
uuccaaguuucaaguaugugua

SEQ ID NO: 237172 - RNA, 24 nt, Human
uugaaaaacaagggguggggguug

SEQ ID NO: 237173 - RNA, 21 nt, Human
uuggaacaacaggaagaugag

SEQ ID NO: 237174 - RNA, 21 nt, Human
aacuucugcuugacaguucca

SEQ ID NO: 237175 - RNA, 22 nt, Human
acccuaagggcugggagaagag

SEQ ID NO: 237176 - RNA, 20 nt, Human
agauacugacagcuggccuc

SEQ ID NO: 237177 - RNA, 23 nt, Human
aggggccaguggugguuugcaga

SEQ ID NO: 237178 - RNA, 21 nt, Human
cauggguuucuugguaagcuc

SEQ ID NO: 237179 - RNA, 18 nt, Human
ccucugaaggagggugaa

SEQ ID NO: 237180 - RNA, 20 nt, Human
ccucugaaggagggugaaaa

SEQ ID NO: 237181 - RNA, 21 nt, Human
cucggugcugggccugggagc

SEQ ID NO: 237182 - RNA, 25 nt, Human
cugagguaauggcagccucagaccc

SEQ ID NO: 237183 - RNA, 20 nt, Human
gcugacauggguuucuuggu

SEQ ID NO: 237184 - RNA, 24 nt, Human
ggaaggccuuggccgagcaggacc

SEQ ID NO: 237185 - RNA, 19 nt, Human
ggcugggagaagagugcug

SEQ ID NO: 237186 - RNA, 23 nt, Human
ucagaccccugccauuaggggcc

SEQ ID NO: 237187 - RNA, 19 nt, Human
ugacauggguuucuuggua

SEQ ID NO: 237188 - RNA, 21 nt, Human
ugcugacauggguuucuuggu

SEQ ID NO: 237189 - RNA, 23 nt, Human
uggccgagcaggacccuaagggc

SEQ ID NO: 237190 - RNA, 23 nt, Human
uuucuugguaagcuccugaggua

SEQ ID NO: 237191 - RNA, 18 nt, Human
aacacguucuuuuggcaa

SEQ ID NO: 237192 - RNA, 27 nt, Human
aagaauaaacaggggugaccgguaccc

SEQ ID NO: 237193 - RNA, 20 nt, Human
aaucuuaaaauaccuggcug

SEQ ID NO: 237194 - RNA, 19 nt, Human
aauguaaaagauuugcagu

SEQ ID NO: 237195 - RNA, 19 nt, Human
acacaccgagccagaggcc

SEQ ID NO: 237196 - RNA, 20 nt, Human
agaauaguucauuguacagu

SEQ ID NO: 237197 - RNA, 18 nt, Human
agggagcugcgucaggcc

SEQ ID NO: 237198 - RNA, 26 nt, Human
caagaauaaacaggggugacacacaa

SEQ ID NO: 237199 - RNA, 24 nt, Human
cagcagaaucuuaaaauaccuggc

SEQ ID NO: 237200 - RNA, 23 nt, Human
cagcuucaucaagaccaucaguc

SEQ ID NO: 237201 - RNA, 18 nt, Human
cauuucauaacaugugca

SEQ ID NO: 237202 - RNA, 21 nt, Human
ccccgaaacuuuuaguuuccg

SEQ ID NO: 237203 - RNA, 22 nt, Human
cuaacuuugucaaagcagaaca

SEQ ID NO: 237204 - RNA, 18 nt, Human
cuuuagccauuuuucaug

SEQ ID NO: 237205 - RNA, 25 nt, Human
gaaaaugaguagaacuuaccaugac

SEQ ID NO: 237206 - RNA, 20 nt, Human
gagaaccacaggucaagaga

SEQ ID NO: 237207 - RNA, 20 nt, Human
gcuggcaucucuuuucuuug

SEQ ID NO: 237208 - RNA, 21 nt, Human
ggccaauggugucuuuauuua

SEQ ID NO: 237209 - RNA, 18 nt, Human
ggucaagagucaucucuu

SEQ ID NO: 237210 - RNA, 19 nt, Human
uacccuagcaauagaacaa

SEQ ID NO: 237211 - RNA, 24 nt, Human
uaugaaauaaggccuguggcuuga

SEQ ID NO: 237212 - RNA, 19 nt, Human
ucaggaauaguaagguaca

SEQ ID NO: 237213 - RNA, 21 nt, Human
uccacacaccgagccagaggc

SEQ ID NO: 237214 - RNA, 22 nt, Human
ucucuaaacagcagcagaaucu

SEQ ID NO: 237215 - RNA, 26 nt, Human
ucucuucaagcagaguuugagggagc

SEQ ID NO: 237216 - RNA, 19 nt, Human
ucucuuuucuuuguaacaa

SEQ ID NO: 237217 - RNA, 23 nt, Human
ucuuuguaacaaauaauucacuu

SEQ ID NO: 237218 - RNA, 23 nt, Human
ugacaaaguguaagaaaaaacau

SEQ ID NO: 237219 - RNA, 18 nt, Human
ugaguagaacuuaccaug

SEQ ID NO: 237220 - RNA, 21 nt, Human
ugaguagaacuuaccaugaca

SEQ ID NO: 237221 - RNA, 23 nt, Human
ugaguagaacuuaccaugacaaa

SEQ ID NO: 237222 - RNA, 24 nt, Human
ugcauggaggagaaagaacgucug

SEQ ID NO: 237223 - RNA, 22 nt, Human
ugcccagugcccucuuugcccu

SEQ ID NO: 237224 - RNA, 23 nt, Human
uguauauacaaaguuuuuguaug

SEQ ID NO: 237225 - RNA, 22 nt, Human
uuaaaauuauuuuaaugacaau

SEQ ID NO: 237226 - RNA, 18 nt, Human
uucacagaacugcaaggu

SEQ ID NO: 237227 - RNA, 22 nt, Human
uucaguuggacacaaauguauu

SEQ ID NO: 237228 - RNA, 23 nt, Human
uuuacccuagcaauagaacaaaa

SEQ ID NO: 237229 - RNA, 23 nt, Human
uuucaucacuuuugugcaaggca

SEQ ID NO: 237230 - RNA, 23 nt, Human
uuugugcaaggcaugacauaacu

SEQ ID NO: 237231 - RNA, 21 nt, Human
aaaggcagcgucguaacuggc

SEQ ID NO: 237232 - RNA, 18 nt, Human
aaagggaaucugcacaug

SEQ ID NO: 237233 - RNA, 19 nt, Human
aaagugcucccuuccuauc

SEQ ID NO: 237234 - RNA, 23 nt, Human
aaccauuuggcaaaggcauccaa

SEQ ID NO: 237235 - RNA, 21 nt, Human
aaguaggauucauuuccauag

SEQ ID NO: 237236 - RNA, 22 nt, Human
aaugacagugguauagaaagaa

SEQ ID NO: 237237 - RNA, 18 nt, Human
aaugggugacaaccaggc

SEQ ID NO: 237238 - RNA, 22 nt, Human
acaaaucucacuuucagaagcc

SEQ ID NO: 237239 - RNA, 23 nt, Human
acaugcacauccguguuucuaca

SEQ ID NO: 237240 - RNA, 19 nt, Human
acccaggcuggagugcagu

SEQ ID NO: 237241 - RNA, 18 nt, Human
acucugucacccaggcug

SEQ ID NO: 237242 - RNA, 21 nt, Human
acucugucacccaggcuggag

SEQ ID NO: 237243 - RNA, 24 nt, Human
acucugucacccaggcuggagugc

SEQ ID NO: 237244 - RNA, 20 nt, Human
agcagguggccuugaauucu

SEQ ID NO: 237245 - RNA, 25 nt, Human
aggcguugcaaaguuaccaugagcu

SEQ ID NO: 237246 - RNA, 25 nt, Human
agguauauauuuuucucuaugccag

SEQ ID NO: 237247 - RNA, 22 nt, Human
agugaacaagcgcagaggaguu

SEQ ID NO: 237248 - RNA, 24 nt, Human
agugcaguagugcaagcucggcuc

SEQ ID NO: 237249 - RNA, 23 nt, Human
auucaaaauacugccuuaguaau

SEQ ID NO: 237250 - RNA, 18 nt, Human
auuugaguggaaaaagcu

SEQ ID NO: 237251 - RNA, 19 nt, Human
auuuuuaauaccugcaaaa

SEQ ID NO: 237252 - RNA, 24 nt, Human
caaauacagaucaaaugcaaauaa

SEQ ID NO: 237253 - RNA, 23 nt, Human
cacaaagauaaaccaacucguau

SEQ ID NO: 237254 - RNA, 19 nt, Human
cacacugucagcaccaccu

SEQ ID NO: 237255 - RNA, 19 nt, Human
cacagaaagaguaaaauuu

SEQ ID NO: 237256 - RNA, 21 nt, Human
cacuaaguaggauucauuucc

SEQ ID NO: 237257 - RNA, 24 nt, Human
cagcaaauacuguaaggggcccau

SEQ ID NO: 237258 - RNA, 24 nt, Human
cagcaggcugggccacugcugggu

SEQ ID NO: 237259 - RNA, 20 nt, Human
cagggugugcugcugcagag

SEQ ID NO: 237260 - RNA, 24 nt, Human
caguacaacacaaugaaguauuac

SEQ ID NO: 237261 - RNA, 22 nt, Human
cagugucaaacucauucaaaau

SEQ ID NO: 237262 - RNA, 20 nt, Human
cauauuugucuucaucacaa

SEQ ID NO: 237263 - RNA, 21 nt, Human
cauucaaaauacugccuuagu

SEQ ID NO: 237264 - RNA, 19 nt, Human
ccacacugucagcaccacc

SEQ ID NO: 237265 - RNA, 21 nt, Human
ccaggcucccagguggagcug

SEQ ID NO: 237266 - RNA, 25 nt, Human
ccagguauauauuuuucucuaugcc

SEQ ID NO: 237267 - RNA, 24 nt, Human
ccauccacaaggccaagucugagg

SEQ ID NO: 237268 - RNA, 18 nt, Human
cccaacuccuagccuaga

SEQ ID NO: 237269 - RNA, 22 nt, Human
cccaugagcuuauacuuaguuc

SEQ ID NO: 237270 - RNA, 20 nt, Human
cccccauucucgcagccaaa

SEQ ID NO: 237271 - RNA, 18 nt, Human
ccccccauucucgcagcc

SEQ ID NO: 237272 - RNA, 22 nt, Human
cccuucaucucucuucccuccu

SEQ ID NO: 237273 - RNA, 22 nt, Human
ccuacuuugccaaaaaccgugc

SEQ ID NO: 237274 - RNA, 20 nt, Human
ccucccauccucucucccuc

SEQ ID NO: 237275 - RNA, 24 nt, Human
ccucccauccucucucccucucca

SEQ ID NO: 237276 - RNA, 22 nt, Human
ccucgccucccauccucucucc

SEQ ID NO: 237277 - RNA, 20 nt, Human
cuacaacggaggcaacaacc

SEQ ID NO: 237278 - RNA, 20 nt, Human
cuagaaagugcucccuuccu

SEQ ID NO: 237279 - RNA, 18 nt, Human
cuaguucucagcaggcug

SEQ ID NO: 237280 - RNA, 21 nt, Human
cugccuggaugccaacugcau

SEQ ID NO: 237281 - RNA, 24 nt, Human
cugccuggaugccaacugcaugag

SEQ ID NO: 237282 - RNA, 19 nt, Human
cuggagcaggccggaaagg

SEQ ID NO: 237283 - RNA, 23 nt, Human
cuguuccuucccucaggcugccu

SEQ ID NO: 237284 - RNA, 24 nt, Human
cuuacucugucacccaggcuggag

SEQ ID NO: 237285 - RNA, 22 nt, Human
cuucacagcccuccccacugug

SEQ ID NO: 237286 - RNA, 21 nt, Human
cuugcccuucaucucucuucc

SEQ ID NO: 237287 - RNA, 19 nt, Human
gauuucuaucagagaccuc

SEQ ID NO: 237288 - RNA, 21 nt, Human
gcaaaggagaaaccgucugaa

SEQ ID NO: 237289 - RNA, 18 nt, Human
gcaggacuuuuuuuuuuu

SEQ ID NO: 237290 - RNA, 21 nt, Human
gcccccuacuuugccaaaaac

SEQ ID NO: 237291 - RNA, 21 nt, Human
gccccggucuugcccuucauc

SEQ ID NO: 237292 - RNA, 18 nt, Human
gcccucagacagccgccu

SEQ ID NO: 237293 - RNA, 22 nt, Human
gcgccaggcucccagguggagc

SEQ ID NO: 237294 - RNA, 21 nt, Human
gcucuguuucagggugcagug

SEQ ID NO: 237295 - RNA, 20 nt, Human
gcugcagagggcugccugga

SEQ ID NO: 237296 - RNA, 23 nt, Human
ggaaaugugcccccuacuuugcc

SEQ ID NO: 237297 - RNA, 26 nt, Human
ggagaaaccgucugaaccuuugcagg

SEQ ID NO: 237298 - RNA, 18 nt, Human
ggagauaugccaaugaaa

SEQ ID NO: 237299 - RNA, 22 nt, Human
ggcaacuuugaaaugugugguc

SEQ ID NO: 237300 - RNA, 22 nt, Human
ggggcccaccaacuacaacgga

SEQ ID NO: 237301 - RNA, 24 nt, Human
gucaggaccuggcucagcuuccau

SEQ ID NO: 237302 - RNA, 22 nt, Human
gugcaaaggagaaaccgucuga

SEQ ID NO: 237303 - RNA, 23 nt, Human
guguccacaugaaccauuuggca

SEQ ID NO: 237304 - RNA, 23 nt, Human
guugucuucuguuaagcaggugg

SEQ ID NO: 237305 - RNA, 22 nt, Human
uaaacaagugaaagaaucacaa

SEQ ID NO: 237306 - RNA, 22 nt, Human
uaaagcaaaaucuuuuaccaaa

SEQ ID NO: 237307 - RNA, 20 nt, Human
uaaccaaaggaauuaaagaa

SEQ ID NO: 237308 - RNA, 23 nt, Human
uaaggggcccauccacaaggcca

SEQ ID NO: 237309 - RNA, 21 nt, Human
uaauuugaguggaaaaagcua

SEQ ID NO: 237310 - RNA, 18 nt, Human
uacaacggaggcaacaac

SEQ ID NO: 237311 - RNA, 20 nt, Human
uacacaaagauaaaccaacu

SEQ ID NO: 237312 - RNA, 26 nt, Human
uacuuugccaaaaaccgugcacaucu

SEQ ID NO: 237313 - RNA, 18 nt, Human
uaucagagaccucagauc

SEQ ID NO: 237314 - RNA, 20 nt, Human
uaugccagccuugccagggc

SEQ ID NO: 237315 - RNA, 19 nt, Human
ucaaguccacacugucagc

SEQ ID NO: 237316 - RNA, 21 nt, Human
ucacauugaacuugacacaga

SEQ ID NO: 237317 - RNA, 22 nt, Human
ucacccaggcuggagugcagua

SEQ ID NO: 237318 - RNA, 19 nt, Human
ucacugcaaccucaggcag

SEQ ID NO: 237319 - RNA, 27 nt, Human
ucacugcaaccucaggcagggggcccu

SEQ ID NO: 237320 - RNA, 20 nt, Human
ucacuggguuauagucaugu

SEQ ID NO: 237321 - RNA, 18 nt, Human
ucauuuggcauaagugug

SEQ ID NO: 237322 - RNA, 23 nt, Human
uccacaaggccaagucugaggcc

SEQ ID NO: 237323 - RNA, 26 nt, Human
uccagccuugagccacaaaaacuggg

SEQ ID NO: 237324 - RNA, 23 nt, Human
ucccauccucucucccucuccag

SEQ ID NO: 237325 - RNA, 20 nt, Human
ucgcuggauggaaggaagcc

SEQ ID NO: 237326 - RNA, 19 nt, Human
ucuaugccagguauacagg

SEQ ID NO: 237327 - RNA, 19 nt, Human
ucuccuuuuucuucugauu

SEQ ID NO: 237328 - RNA, 23 nt, Human
ucuccuuuuucuucugauuuucu

SEQ ID NO: 237329 - RNA, 18 nt, Human
ucucugcugucaggccaa

SEQ ID NO: 237330 - RNA, 20 nt, Human
ucugcacaugcacauccgug

SEQ ID NO: 237331 - RNA, 24 nt, Human
ucugucacccaggcuggagugcag

SEQ ID NO: 237332 - RNA, 19 nt, Human
ucuuaaaugucugccauag

SEQ ID NO: 237333 - RNA, 23 nt, Human
ucuuacucugucacccaggcugg

SEQ ID NO: 237334 - RNA, 24 nt, Human
ucuuacucugucacccaggcugga

SEQ ID NO: 237335 - RNA, 22 nt, Human
ugaaagaaucacauucuguagg

SEQ ID NO: 237336 - RNA, 19 nt, Human
ugaacaagcgcagaggagu

SEQ ID NO: 237337 - RNA, 19 nt, Human
ugaauaaaugccuaucaca

SEQ ID NO: 237338 - RNA, 24 nt, Human
ugacucagaaauuccaaaagaagg

SEQ ID NO: 237339 - RNA, 20 nt, Human
ugagaaagagagaauaaggc

SEQ ID NO: 237340 - RNA, 20 nt, Human
ugagagugugacuuucugga

SEQ ID NO: 237341 - RNA, 18 nt, Human
ugagccuucacagcccuc

SEQ ID NO: 237342 - RNA, 20 nt, Human
ugagugcagcccauauacaa

SEQ ID NO: 237343 - RNA, 21 nt, Human
ugcaaaggagaaaccgucuga

SEQ ID NO: 237344 - RNA, 24 nt, Human
ugcaaagggaauucucuuugaaag

SEQ ID NO: 237345 - RNA, 23 nt, Human
ugccaaugaaauagacuaucuuu

SEQ ID NO: 237346 - RNA, 18 nt, Human
ugcccuucaucucucuuc

SEQ ID NO: 237347 - RNA, 19 nt, Human
uggaaaaagcuaaggaaaa

SEQ ID NO: 237348 - RNA, 23 nt, Human
uggaaaugugcccccuacuuugc

SEQ ID NO: 237349 - RNA, 18 nt, Human
uggagugcaguagugcaa

SEQ ID NO: 237350 - RNA, 24 nt, Human
uggagugcaguagugcaagcucgg

SEQ ID NO: 237351 - RNA, 18 nt, Human
uggcaagaggcugcuugg

SEQ ID NO: 237352 - RNA, 19 nt, Human
ugggccacugcuggguggc

SEQ ID NO: 237353 - RNA, 19 nt, Human
uggggcaggggagaaaugc

SEQ ID NO: 237354 - RNA, 25 nt, Human
uggggcaggggagaaaugcuucuca

SEQ ID NO: 237355 - RNA, 20 nt, Human
uggguuauagucauguacac

SEQ ID NO: 237356 - RNA, 20 nt, Human
uguaauuauuuuucuccaau

SEQ ID NO: 237357 - RNA, 23 nt, Human
ugucaggaccuggcucagcuucc

SEQ ID NO: 237358 - RNA, 27 nt, Human
uguucagaaggugguggcacuaacauu

SEQ ID NO: 237359 - RNA, 24 nt, Human
uuacucugucacccaggcuggagu

SEQ ID NO: 237360 - RNA, 23 nt, Human
uucagauaaaggccccugcucau

SEQ ID NO: 237361 - RNA, 23 nt, Human
uuccaaaagaaggucagucuaug

SEQ ID NO: 237362 - RNA, 22 nt, Human
uucuccuuuuucuucugauuuu

SEQ ID NO: 237363 - RNA, 24 nt, Human
uugaaacuauuuucuuaaaaccaa

SEQ ID NO: 237364 - RNA, 24 nt, Human
uuggagagcucccaacagaaguca

SEQ ID NO: 237365 - RNA, 23 nt, Human
uuucuaguucucagcaggcuggg

SEQ ID NO: 237366 - RNA, 24 nt, Human
uuuuuuuuuuuuuuuuugacaugg

SEQ ID NO: 237367 - RNA, 27 nt, Human
uuuuuuuuuuuuuuuuuuuuuuugggg

SEQ ID NO: 237368 - RNA, 23 nt, Human
aaaacacaacacaguacccaaaa

SEQ ID NO: 237369 - RNA, 22 nt, Human
aaacagaacccaggaucccuaa

SEQ ID NO: 237370 - RNA, 23 nt, Human
aaacaugugugcgacccacaaag

SEQ ID NO: 237371 - RNA, 21 nt, Human
aaagcaaauacgagacuuaga

SEQ ID NO: 237372 - RNA, 23 nt, Human
aaagcagaguuguugggggcggg

SEQ ID NO: 237373 - RNA, 20 nt, Human
aaagggccauuucaccaaug

SEQ ID NO: 237374 - RNA, 23 nt, Human
aacacaguacccaaaaacggagg

SEQ ID NO: 237375 - RNA, 21 nt, Human
aagcaaauacgagacuuagac

SEQ ID NO: 237376 - RNA, 22 nt, Human
aaugucauuuguaccaaauggc

SEQ ID NO: 237377 - RNA, 22 nt, Human
acaaaugucauuuguaccaaau

SEQ ID NO: 237378 - RNA, 20 nt, Human
acacaacacaguacccaaaa

SEQ ID NO: 237379 - RNA, 22 nt, Human
acagcccugguuacagaagcca

SEQ ID NO: 237380 - RNA, 21 nt, Human
accaagaccugggguugguuc

SEQ ID NO: 237381 - RNA, 22 nt, Human
accagcccagcaccugucucca

SEQ ID NO: 237382 - RNA, 26 nt, Human
accagcuacccucaacacagggccag

SEQ ID NO: 237383 - RNA, 22 nt, Human
acucgagggcaucucuuucaca

SEQ ID NO: 237384 - RNA, 18 nt, Human
acuguguggccggcucug

SEQ ID NO: 237385 - RNA, 33 nt, Human
agaaacuagucaaaaacucuuuaaaggacaaaa

SEQ ID NO: 237386 - RNA, 19 nt, Human
agaagagccagcugccuuc

SEQ ID NO: 237387 - RNA, 22 nt, Human
agaccugggguugguucugggc

SEQ ID NO: 237388 - RNA, 23 nt, Human
agagaauaaugacuuagagccca

SEQ ID NO: 237389 - RNA, 22 nt, Human
agagcaaaguuuccccucccuu

SEQ ID NO: 237390 - RNA, 22 nt, Human
agcaaagcaaauacgagacuua

SEQ ID NO: 237391 - RNA, 18 nt, Human
agcaguucagggacccug

SEQ ID NO: 237392 - RNA, 19 nt, Human
agccuuccuagguuuugcc

SEQ ID NO: 237393 - RNA, 24 nt, Human
agcgcucuucccaggaccccacuc

SEQ ID NO: 237394 - RNA, 19 nt, Human
agcugcuuuuuucuuccuu

SEQ ID NO: 237395 - RNA, 24 nt, Human
aggaugacugcccuccaacaacug

SEQ ID NO: 237396 - RNA, 18 nt, Human
aggcagcaagcagaggga

SEQ ID NO: 237397 - RNA, 22 nt, Human
aggccuccagccccaggcccag

SEQ ID NO: 237398 - RNA, 22 nt, Human
agggaagagccgauguuggacg

SEQ ID NO: 237399 - RNA, 24 nt, Human
agucagggacuuucaacucuccaa

SEQ ID NO: 237400 - RNA, 21 nt, Human
aguguuuugguccacucuuuu

SEQ ID NO: 237401 - RNA, 20 nt, Human
auacuugugagaccuguucu

SEQ ID NO: 237402 - RNA, 25 nt, Human
aucccucucugcucaggaaccacca

SEQ ID NO: 237403 - RNA, 18 nt, Human
augcugcaggaggaccag

SEQ ID NO: 237404 - RNA, 22 nt, Human
augcuuuccaaaggcccacacc

SEQ ID NO: 237405 - RNA, 20 nt, Human
auggggucucacagggcuag

SEQ ID NO: 237406 - RNA, 24 nt, Human
caaaacacaacacaguacccaaaa

SEQ ID NO: 237407 - RNA, 23 nt, Human
caaaagccaaagucacacacugc

SEQ ID NO: 237408 - RNA, 21 nt, Human
caaaagcucuggagcagcuua

SEQ ID NO: 237409 - RNA, 19 nt, Human
caaacugggaagaacuuca

SEQ ID NO: 237410 - RNA, 20 nt, Human
caaagcaaauacgagacuua

SEQ ID NO: 237411 - RNA, 24 nt, Human
caaagcucucauucuuccucuaaa

SEQ ID NO: 237412 - RNA, 21 nt, Human
cacaacacaguacccaaaaac

SEQ ID NO: 237413 - RNA, 24 nt, Human
cacacagacagcaaagcaaauacg

SEQ ID NO: 237414 - RNA, 23 nt, Human
cacacuguucuuuuucuucucug

SEQ ID NO: 237415 - RNA, 26 nt, Human
caccucaacugcccaguggaaacugg

SEQ ID NO: 237416 - RNA, 18 nt, Human
caccugucuccauccccu

SEQ ID NO: 237417 - RNA, 20 nt, Human
cacuguguggccggcucugc

SEQ ID NO: 237418 - RNA, 23 nt, Human
cacuguucuuuuucuucucuggc

SEQ ID NO: 237419 - RNA, 18 nt, Human
cagagaagaaacgugcac

SEQ ID NO: 237420 - RNA, 24 nt, Human
cagagcaaaacacaacacaguacc

SEQ ID NO: 237421 - RNA, 18 nt, Human
cagcacacagacagcaaa

SEQ ID NO: 237422 - RNA, 23 nt, Human
cagccccaggcccaguuccuccc

SEQ ID NO: 237423 - RNA, 20 nt, Human
caggaaccaccacguccugu

SEQ ID NO: 237424 - RNA, 21 nt, Human
caggccccacaguugcagggg

SEQ ID NO: 237425 - RNA, 26 nt, Human
cagggaaagacucaauuuuuaaccag

SEQ ID NO: 237426 - RNA, 22 nt, Human
caguaccauacauaugcaaaga

SEQ ID NO: 237427 - RNA, 21 nt, Human
caucacugacugggcccgcag

SEQ ID NO: 237428 - RNA, 21 nt, Human
caucaguaaauggagcuacca

SEQ ID NO: 237429 - RNA, 25 nt, Human
ccaauggagaccaagaccugggguu

SEQ ID NO: 237430 - RNA, 22 nt, Human
ccagaagcacccguccccgcug

SEQ ID NO: 237431 - RNA, 28 nt, Human
ccagcccagcaccugucuccauccccuu

SEQ ID NO: 237432 - RNA, 22 nt, Human
ccagugccuuuaagcaagcuuc

SEQ ID NO: 237433 - RNA, 24 nt, Human
cccacaccaggcagcaagcagagg

SEQ ID NO: 237434 - RNA, 22 nt, Human
cccacuuuuauuacagacauca

SEQ ID NO: 237435 - RNA, 23 nt, Human
cccaguuccucccuucuccuucc

SEQ ID NO: 237436 - RNA, 21 nt, Human
ccccggaagucuguuuuugcc

SEQ ID NO: 237437 - RNA, 20 nt, Human
ccccucccuuucuuacuuuc

SEQ ID NO: 237438 - RNA, 26 nt, Human
cccucccuuucuuacuuucaaacaaa

SEQ ID NO: 237439 - RNA, 19 nt, Human
ccgggccagcgcuucccag

SEQ ID NO: 237440 - RNA, 25 nt, Human
ccuagacugaacccucuaagaaggc

SEQ ID NO: 237441 - RNA, 22 nt, Human
ccuccagccccaggcccaguuc

SEQ ID NO: 237442 - RNA, 28 nt, Human
ccucccuaaaagcagaguuguugggaaa

SEQ ID NO: 237443 - RNA, 19 nt, Human
ccucccuucuccuuccagg

SEQ ID NO: 237444 - RNA, 19 nt, Human
ccugagcagcuggccuggg

SEQ ID NO: 237445 - RNA, 20 nt, Human
ccugagcagcuggccuggga

SEQ ID NO: 237446 - RNA, 18 nt, Human
ccugcaggggcggggguc

SEQ ID NO: 237447 - RNA, 20 nt, Human
cgagaccaccccgagcgcca

SEQ ID NO: 237448 - RNA, 21 nt, Human
cgagaccaccccgagcgccaa

SEQ ID NO: 237449 - RNA, 19 nt, Human
cuaggaaaauggcugaaau

SEQ ID NO: 237450 - RNA, 20 nt, Human
cucaacacagggccaggaga

SEQ ID NO: 237451 - RNA, 20 nt, Human
cuccagaagcacccgucccc

SEQ ID NO: 237452 - RNA, 19 nt, Human
cuccagccccaggcccagu

SEQ ID NO: 237453 - RNA, 18 nt, Human
cucugggaacaugagccu

SEQ ID NO: 237454 - RNA, 18 nt, Human
cugcaccugcagugccaa

SEQ ID NO: 237455 - RNA, 20 nt, Human
cugggaacaugagccuuccu

SEQ ID NO: 237456 - RNA, 23 nt, Human
cugggguugguucugggcuccug

SEQ ID NO: 237457 - RNA, 26 nt, Human
cuggugcaugggcccugcaggggcgg

SEQ ID NO: 237458 - RNA, 21 nt, Human
cugguuacagaagccaccuca

SEQ ID NO: 237459 - RNA, 18 nt, Human
cuguaucugcagaucccu

SEQ ID NO: 237460 - RNA, 23 nt, Human
cugucaagaaaaagaaacuaguc

SEQ ID NO: 237461 - RNA, 25 nt, Human
cuucucccccgcuucagcaucaccu

SEQ ID NO: 237462 - RNA, 21 nt, Human
cuucucugggaacaugagccu

SEQ ID NO: 237463 - RNA, 19 nt, Human
gaaaaagaaacuagucaaa

SEQ ID NO: 237464 - RNA, 23 nt, Human
gaaaaagaaacuagucaaaaacu

SEQ ID NO: 237465 - RNA, 18 nt, Human
gaaggcaaaggaggaugg

SEQ ID NO: 237466 - RNA, 19 nt, Human
gaaggcaaaggaggauggc

SEQ ID NO: 237467 - RNA, 20 nt, Human
gaccccuucaguguagcagg

SEQ ID NO: 237468 - RNA, 24 nt, Human
gacugaacccucuaagaaggccca

SEQ ID NO: 237469 - RNA, 23 nt, Human
gagaccaccccgagcgccaagcc

SEQ ID NO: 237470 - RNA, 25 nt, Human
gagcaaaacacaacacaguacccaa

SEQ ID NO: 237471 - RNA, 22 nt, Human
gagcuaccauguauauuuuagu

SEQ ID NO: 237472 - RNA, 20 nt, Human
gaugugagcucauuacaacc

SEQ ID NO: 237473 - RNA, 20 nt, Human
gauuacagggugugauccca

SEQ ID NO: 237474 - RNA, 21 nt, Human
gcaaaacacaacacaguaccc

SEQ ID NO: 237475 - RNA, 20 nt, Human
gcccaguuccucccuucucc

SEQ ID NO: 237476 - RNA, 19 nt, Human
gcugcagaccugccgagcc

SEQ ID NO: 237477 - RNA, 19 nt, Human
ggaccagcuccagaagcac

SEQ ID NO: 237478 - RNA, 21 nt, Human
gggaagcuuugcaugggagaa

SEQ ID NO: 237479 - RNA, 24 nt, Human
gggaagcuuugcaugggagaaggc

SEQ ID NO: 237480 - RNA, 21 nt, Human
gggaaggcugguaucugaggu

SEQ ID NO: 237481 - RNA, 23 nt, Human
gggaucccaggccuccagccccc

SEQ ID NO: 237482 - RNA, 23 nt, Human
gggcccugcaggggcgggggucc

SEQ ID NO: 237483 - RNA, 19 nt, Human
gggcggggguccugcccaa

SEQ ID NO: 237484 - RNA, 19 nt, Human
ggggcggggcgggguuugg

SEQ ID NO: 237485 - RNA, 20 nt, Human
ggguccugcccaacuuggcc

SEQ ID NO: 237486 - RNA, 21 nt, Human
guaauuggagggaagagccga

SEQ ID NO: 237487 - RNA, 20 nt, Human
gugaucccaaaagccaaagu

SEQ ID NO: 237488 - RNA, 23 nt, Human
uaaaaugaugcaauggaaggagg

SEQ ID NO: 237489 - RNA, 26 nt, Human
uaaaaugaugcaauggaaggaggccc

SEQ ID NO: 237490 - RNA, 19 nt, Human
uaagcugggggaagcuuug

SEQ ID NO: 237491 - RNA, 18 nt, Human
uacaaacacacucgaggg

SEQ ID NO: 237492 - RNA, 23 nt, Human
uacagaagccaccucaacugccc

SEQ ID NO: 237493 - RNA, 24 nt, Human
uagacagagcaaaacacaacacag

SEQ ID NO: 237494 - RNA, 23 nt, Human
uagcaggaaaugaggcgaccaga

SEQ ID NO: 237495 - RNA, 24 nt, Human
uagcaggaaaugaggcgaccagag

SEQ ID NO: 237496 - RNA, 20 nt, Human
uaggugaagcaaacuaaaaa

SEQ ID NO: 237497 - RNA, 22 nt, Human
uaucugaggucagcagaagagc

SEQ ID NO: 237498 - RNA, 18 nt, Human
uauuucucuaucucuaga

SEQ ID NO: 237499 - RNA, 18 nt, Human
ucaacucuccaaucugga

SEQ ID NO: 237500 - RNA, 20 nt, Human
ucacugaagauagcgcgagg

SEQ ID NO: 237501 - RNA, 22 nt, Human
ucagcgcucuucccaggacccc

SEQ ID NO: 237502 - RNA, 23 nt, Human
ucaguggcucuggugcaugggcc

SEQ ID NO: 237503 - RNA, 22 nt, Human
ucaguguagcaggaaaugaggg

SEQ ID NO: 237504 - RNA, 24 nt, Human
uccaaucuccuuugucccucgguu

SEQ ID NO: 237505 - RNA, 23 nt, Human
uccaaucuggaaaaauaaccacc

SEQ ID NO: 237506 - RNA, 20 nt, Human
uccacuacaacggcaggggc

SEQ ID NO: 237507 - RNA, 24 nt, Human
uccagaagcacccguccccgcugg

SEQ ID NO: 237508 - RNA, 24 nt, Human
ucccaaaagccaaagucacacacu

SEQ ID NO: 237509 - RNA, 20 nt, Human
ucccacuuuuauuacagaca

SEQ ID NO: 237510 - RNA, 24 nt, Human
ucccaggccuccagccccaggccc

SEQ ID NO: 237511 - RNA, 19 nt, Human
uccccgcuggggaaggcug

SEQ ID NO: 237512 - RNA, 21 nt, Human
uccccggaagucuguuuuugc

SEQ ID NO: 237513 - RNA, 24 nt, Human
uccuaacacuacagcaauaguaau

SEQ ID NO: 237514 - RNA, 22 nt, Human
uccugcccaacuuggcccacug

SEQ ID NO: 237515 - RNA, 24 nt, Human
ucugcucaggaaccaccacguccu

SEQ ID NO: 237516 - RNA, 24 nt, Human
ugaacauaauuauuaaaagagcaa

SEQ ID NO: 237517 - RNA, 18 nt, Human
ugaacaucaaacacugca

SEQ ID NO: 237518 - RNA, 21 nt, Human
ugacugcccuccaacaacuga

SEQ ID NO: 237519 - RNA, 20 nt, Human
ugagacacaaucaacuacaa

SEQ ID NO: 237520 - RNA, 25 nt, Human
ugagacacaaucaacuacaauguaa

SEQ ID NO: 237521 - RNA, 23 nt, Human
ugagaccuguucuucuggugagg

SEQ ID NO: 237522 - RNA, 19 nt, Human
ugagaggaggaugcucugu

SEQ ID NO: 237523 - RNA, 19 nt, Human
ugaucccaaaagccaaagu

SEQ ID NO: 237524 - RNA, 21 nt, Human
ugcauggcugcuguacuagaa

SEQ ID NO: 237525 - RNA, 23 nt, Human
ugccgagccugagcagcuggccu

SEQ ID NO: 237526 - RNA, 18 nt, Human
ugcuguggggagggggac

SEQ ID NO: 237527 - RNA, 23 nt, Human
uggaaagagcacuuacuucaggg

SEQ ID NO: 237528 - RNA, 21 nt, Human
uggaaggaggccccagcucac

SEQ ID NO: 237529 - RNA, 23 nt, Human
uggaguaacugagagaauaauga

SEQ ID NO: 237530 - RNA, 20 nt, Human
uggcucuggugcaugggccc

SEQ ID NO: 237531 - RNA, 18 nt, Human
ugggaaggcaaaggagga

SEQ ID NO: 237532 - RNA, 19 nt, Human
ugggagaaggcucaugugg

SEQ ID NO: 237533 - RNA, 20 nt, Human
uggggagggggaccaagccc

SEQ ID NO: 237534 - RNA, 26 nt, Human
ugucaagaaaaagaaacuagucaaaa

SEQ ID NO: 237535 - RNA, 18 nt, Human
ugucucugcauccgacaa

SEQ ID NO: 237536 - RNA, 21 nt, Human
uguggggaucuuuccccaaag

SEQ ID NO: 237537 - RNA, 21 nt, Human
ugugugcaggccccacaguug

SEQ ID NO: 237538 - RNA, 18 nt, Human
uguuccgggccagcgcuu

SEQ ID NO: 237539 - RNA, 20 nt, Human
uuaaacaauuaguccuuauc

SEQ ID NO: 237540 - RNA, 19 nt, Human
uuacuuucaaacaaaacca

SEQ ID NO: 237541 - RNA, 23 nt, Human
uuagagcccaaucugccugccau

SEQ ID NO: 237542 - RNA, 20 nt, Human
uuagccuauguacccacugg

SEQ ID NO: 237543 - RNA, 19 nt, Human
uuaguccuuaucaacuauu

SEQ ID NO: 237544 - RNA, 21 nt, Human
uucagcaucaccugccacuuc

SEQ ID NO: 237545 - RNA, 19 nt, Human
uucaucuugcaacaauugc

SEQ ID NO: 237546 - RNA, 21 nt, Human
uucccuugcuguggggagggg

SEQ ID NO: 237547 - RNA, 18 nt, Human
uuccuagguuuugccacu

SEQ ID NO: 237548 - RNA, 18 nt, Human
uuccuuuaaaaugaugca

SEQ ID NO: 237549 - RNA, 20 nt, Human
uucuucuggugaggacuaag

SEQ ID NO: 237550 - RNA, 20 nt, Human
uugggggcggggcgggguuu

SEQ ID NO: 237551 - RNA, 21 nt, Human
uuguugggggcggggcggggu

SEQ ID NO: 237552 - RNA, 20 nt, Human
uuucagcaagagggacuccu

SEQ ID NO: 237553 - RNA, 22 nt, Human
uuuuuagacagagcaaaacaca

SEQ ID NO: 237554 - RNA, 22 nt, Human
aaaauguaaagccagaacaucc

SEQ ID NO: 237555 - RNA, 21 nt, Human
aaacaccccaaacacugggua

SEQ ID NO: 237556 - RNA, 21 nt, Human
aaagaagggggagagagggau

SEQ ID NO: 237557 - RNA, 18 nt, Human
aaaguuacuuccuccacu

SEQ ID NO: 237558 - RNA, 21 nt, Human
aaauaaaauguaaagccagaa

SEQ ID NO: 237559 - RNA, 22 nt, Human
aaauaacuaacaaggguagggc

SEQ ID NO: 237560 - RNA, 24 nt, Human
aaauccacuuuugaaacaccccaa

SEQ ID NO: 237561 - RNA, 21 nt, Human
aaauccagaaauuuaaugaau

SEQ ID NO: 237562 - RNA, 19 nt, Human
aagcaugaccaagguaagc

SEQ ID NO: 237563 - RNA, 19 nt, Human
acaaaagagacgcacugga

SEQ ID NO: 237564 - RNA, 21 nt, Human
acaaugaccuuuccaauaugu

SEQ ID NO: 237565 - RNA, 22 nt, Human
accccaggaaccucuccacccu

SEQ ID NO: 237566 - RNA, 20 nt, Human
acucugcgcucaaacaauua

SEQ ID NO: 237567 - RNA, 25 nt, Human
agcaugaccaagguaagccuaaaaa

SEQ ID NO: 237568 - RNA, 21 nt, Human
agggggagagagggauuaagc

SEQ ID NO: 237569 - RNA, 19 nt, Human
caaaagagacgcacuggaa

SEQ ID NO: 237570 - RNA, 22 nt, Human
caaaagagacgcacuggaagua

SEQ ID NO: 237571 - RNA, 18 nt, Human
cacaacccaaauccagaa

SEQ ID NO: 237572 - RNA, 22 nt, Human
cacaacccaaauccagaaauuu

SEQ ID NO: 237573 - RNA, 23 nt, Human
cacaacccaaauccagaaauuua

SEQ ID NO: 237574 - RNA, 19 nt, Human
cacauccacacauguauuu

SEQ ID NO: 237575 - RNA, 19 nt, Human
cacaugccguucuuuguuc

SEQ ID NO: 237576 - RNA, 20 nt, Human
caggaaccucuccacccuuu

SEQ ID NO: 237577 - RNA, 24 nt, Human
ccaucacugauaaagacacauaca

SEQ ID NO: 237578 - RNA, 20 nt, Human
ccccaggaaccucuccaccc

SEQ ID NO: 237579 - RNA, 24 nt, Human
ccccauaaauugaauuagccacuu

SEQ ID NO: 237580 - RNA, 23 nt, Human
cccucuggaggagcugcaaggcg

SEQ ID NO: 237581 - RNA, 25 nt, Human
ccucuccacccuuuuacuuaguaaa

SEQ ID NO: 237582 - RNA, 22 nt, Human
ccuugaggaggaggaagagggg

SEQ ID NO: 237583 - RNA, 22 nt, Human
cuagaagugggcagcuuucccu

SEQ ID NO: 237584 - RNA, 23 nt, Human
cuauuuauaggcacgaucaucuc

SEQ ID NO: 237585 - RNA, 20 nt, Human
cucaaaggacaaaacagcac

SEQ ID NO: 237586 - RNA, 21 nt, Human
cuccgacauguuccaauacau

SEQ ID NO: 237587 - RNA, 19 nt, Human
cuccuaaaauaacuaacaa

SEQ ID NO: 237588 - RNA, 25 nt, Human
cugaagcaugaccaagguaagccua

SEQ ID NO: 237589 - RNA, 23 nt, Human
cugaaggacaacacacaugcaga

SEQ ID NO: 237590 - RNA, 20 nt, Human
cugauuccauuucuucacac

SEQ ID NO: 237591 - RNA, 25 nt, Human
cuuccuccacuucauucuucacaga

SEQ ID NO: 237592 - RNA, 19 nt, Human
gaagggggagagagggauu

SEQ ID NO: 237593 - RNA, 20 nt, Human
gcugagccggaggcuggaga

SEQ ID NO: 237594 - RNA, 20 nt, Human
gggggagagagggauuaagc

SEQ ID NO: 237595 - RNA, 19 nt, Human
ggucacaacccaaauccag

SEQ ID NO: 237596 - RNA, 18 nt, Human
guagaagagcauucugaa

SEQ ID NO: 237597 - RNA, 22 nt, Human
uaaaaacaacaaauaacaaccc

SEQ ID NO: 237598 - RNA, 21 nt, Human
uaaaauaacuaacaaggguag

SEQ ID NO: 237599 - RNA, 22 nt, Human
uaaauaaaauguaaagccagaa

SEQ ID NO: 237600 - RNA, 24 nt, Human
uaaaugcagauagccacaaugacc

SEQ ID NO: 237601 - RNA, 18 nt, Human
uaaucuugagacaaaaaa

SEQ ID NO: 237602 - RNA, 18 nt, Human
uacacauccacacaugua

SEQ ID NO: 237603 - RNA, 23 nt, Human
uaccccauaaauugaauuagcca

SEQ ID NO: 237604 - RNA, 18 nt, Human
uagaagugggcagcuuuc

SEQ ID NO: 237605 - RNA, 23 nt, Human
uauaauauaaucuugagacaaaa

SEQ ID NO: 237606 - RNA, 18 nt, Human
uauacguagaagagcauu

SEQ ID NO: 237607 - RNA, 23 nt, Human
uauguacaagcuccauuuacaca

SEQ ID NO: 237608 - RNA, 22 nt, Human
ucaguccgaaagauccagaauu

SEQ ID NO: 237609 - RNA, 18 nt, Human
uccaagccugaugauguu

SEQ ID NO: 237610 - RNA, 18 nt, Human
ucucaaaggacaaaacag

SEQ ID NO: 237611 - RNA, 20 nt, Human
ucucagagaaagggucgaag

SEQ ID NO: 237612 - RNA, 22 nt, Human
ucuggaccacauuccaauagca

SEQ ID NO: 237613 - RNA, 22 nt, Human
ucuuuuuuuuuucugcaccauu

SEQ ID NO: 237614 - RNA, 22 nt, Human
ugaaggacaacacacaugcaga

SEQ ID NO: 237615 - RNA, 18 nt, Human
ugagacaaaaaagaaggg

SEQ ID NO: 237616 - RNA, 18 nt, Human
ugaucgacuguuuucccu

SEQ ID NO: 237617 - RNA, 24 nt, Human
ugcuuaggaauccaccccaggaac

SEQ ID NO: 237618 - RNA, 18 nt, Human
uggagacuuagaguaaag

SEQ ID NO: 237619 - RNA, 19 nt, Human
uguagaagcucacacaaug

SEQ ID NO: 237620 - RNA, 23 nt, Human
uguuuuguaaaaguuacuuccuc

SEQ ID NO: 237621 - RNA, 19 nt, Human
uuaaaggggauggcagggc

SEQ ID NO: 237622 - RNA, 21 nt, Human
uuaaugcacccugggucacaa

SEQ ID NO: 237623 - RNA, 18 nt, Human
uucaacaccuacccagag

SEQ ID NO: 237624 - RNA, 22 nt, Human
uucuacuccgacauguuccaau

SEQ ID NO: 237625 - RNA, 20 nt, Human
uuggagacuuagaguaaagu

SEQ ID NO: 237626 - RNA, 18 nt, Human
aaaggagaagccacugga

SEQ ID NO: 237627 - RNA, 24 nt, Human
aaauggcccuguggaccaaaggga

SEQ ID NO: 237628 - RNA, 18 nt, Human
aaugugcugugcaccaug

SEQ ID NO: 237629 - RNA, 21 nt, Human
aggcagccacccuggggccug

SEQ ID NO: 237630 - RNA, 18 nt, Human
caagcuggagcagaaggg

SEQ ID NO: 237631 - RNA, 21 nt, Human
ccagcugcaaagaagggcugg

SEQ ID NO: 237632 - RNA, 20 nt, Human
cgucuaguuacuuauuuggc

SEQ ID NO: 237633 - RNA, 20 nt, Human
cuaggugccacaggggaccc

SEQ ID NO: 237634 - RNA, 18 nt, Human
cugcaaagaagggcuggg

SEQ ID NO: 237635 - RNA, 22 nt, Human
gacagaaaggagaagccacugg

SEQ ID NO: 237636 - RNA, 20 nt, Human
gcuggagcagaagggcaucu

SEQ ID NO: 237637 - RNA, 22 nt, Human
ggugagaggacaggaagaaaga

SEQ ID NO: 237638 - RNA, 18 nt, Human
guccuggcccagggagcu

SEQ ID NO: 237639 - RNA, 22 nt, Human
uagagaggcccagcugcaaaga

SEQ ID NO: 237640 - RNA, 20 nt, Human
uauagagaggcccagcugca

SEQ ID NO: 237641 - RNA, 18 nt, Human
ugacagaaaggagaagcc

SEQ ID NO: 237642 - RNA, 19 nt, Human
ugagcacuucuaaugugcu

SEQ ID NO: 237643 - RNA, 23 nt, Human
ugaguguaagagcugggagggcc

SEQ ID NO: 237644 - RNA, 18 nt, Human
ugcaaagaagggcuggga

SEQ ID NO: 237645 - RNA, 24 nt, Human
ugccuugucuuuucacggcagcca

SEQ ID NO: 237646 - RNA, 19 nt, Human
uggcccagggagcuuacaa

SEQ ID NO: 237647 - RNA, 25 nt, Human
ugggauauggagcucuaagggacca

SEQ ID NO: 237648 - RNA, 20 nt, Human
uuggcagugauuccgagguc

SEQ ID NO: 237649 - RNA, 20 nt, Human
aagcagcuguccacaccccc

SEQ ID NO: 237650 - RNA, 24 nt, Human
aaugaaaaaagcagaacacaggga

SEQ ID NO: 237651 - RNA, 24 nt, Human
acuguaagaaguacuccccuggga

SEQ ID NO: 237652 - RNA, 21 nt, Human
agaacacagggaaucagaaga

SEQ ID NO: 237653 - RNA, 20 nt, Human
aucuugucuugaaaucccac

SEQ ID NO: 237654 - RNA, 22 nt, Human
aucuugucuugaaaucccacug

SEQ ID NO: 237655 - RNA, 19 nt, Human
cagaagaccagguucuguc

SEQ ID NO: 237656 - RNA, 18 nt, Human
ccccugggaaagcagcug

SEQ ID NO: 237657 - RNA, 21 nt, Human
gcagaacacagggaaucagaa

SEQ ID NO: 237658 - RNA, 23 nt, Human
ggaaagcagcuguccacaccccc

SEQ ID NO: 237659 - RNA, 19 nt, Human
guggaacaaugaaaaaagc

SEQ ID NO: 237660 - RNA, 20 nt, Human
uaagaaguacuccccuggga

SEQ ID NO: 237661 - RNA, 22 nt, Human
ucucugagccucaaaguuccca

SEQ ID NO: 237662 - RNA, 22 nt, Human
ucugagccucaaaguucccacu

SEQ ID NO: 237663 - RNA, 21 nt, Human
ucugucuucugcucugucucu

SEQ ID NO: 237664 - RNA, 21 nt, Human
ugaaaaaagcagaacacaggg

SEQ ID NO: 237665 - RNA, 23 nt, Human
ugaaaaaagcagaacacagggaa

SEQ ID NO: 237666 - RNA, 20 nt, Human
ugcucugucucugagccuca

SEQ ID NO: 237667 - RNA, 18 nt, Human
ugucuugaaaucccacug

SEQ ID NO: 237668 - RNA, 23 nt, Human
aaaaacaaaaauacacugaagga

SEQ ID NO: 237669 - RNA, 22 nt, Human
aaaacaaaaauacacugaagga

SEQ ID NO: 237670 - RNA, 24 nt, Human
aaaauacacugaaggaagaugcaa

SEQ ID NO: 237671 - RNA, 19 nt, Human
aaaccuaagaaaaccagug

SEQ ID NO: 237672 - RNA, 18 nt, Human
aagaagaggaccgcaaag

SEQ ID NO: 237673 - RNA, 23 nt, Human
aagaugcucuugucucacaggcc

SEQ ID NO: 237674 - RNA, 27 nt, Human
aauuagagaagauaugaguagggccaa

SEQ ID NO: 237675 - RNA, 19 nt, Human
acccuuuccucuccucucu

SEQ ID NO: 237676 - RNA, 26 nt, Human
acuccaagugcuugauuggagaagag

SEQ ID NO: 237677 - RNA, 21 nt, Human
agaaacaaguaucaggaccaa

SEQ ID NO: 237678 - RNA, 24 nt, Human
agaaaccuaagaaaaccaguguug

SEQ ID NO: 237679 - RNA, 23 nt, Human
agacagugagccacagggcaaau

SEQ ID NO: 237680 - RNA, 23 nt, Human
agcagaaggucaguaacagaaaa

SEQ ID NO: 237681 - RNA, 18 nt, Human
aggaagaugcaaagagcu

SEQ ID NO: 237682 - RNA, 25 nt, Human
aguguuggcaugaauuaugcaagug

SEQ ID NO: 237683 - RNA, 19 nt, Human
augaugucaguacucaaag

SEQ ID NO: 237684 - RNA, 19 nt, Human
cacagcagugauuguaaga

SEQ ID NO: 237685 - RNA, 21 nt, Human
cacugaaggaagaugcaaaga

SEQ ID NO: 237686 - RNA, 20 nt, Human
caguacucaaaguuguccag

SEQ ID NO: 237687 - RNA, 19 nt, Human
ccucuugaaaaacaaaaau

SEQ ID NO: 237688 - RNA, 23 nt, Human
cuuuggcaugugcugaagaagag

SEQ ID NO: 237689 - RNA, 21 nt, Human
gaaaaacaaaaauacacugaa

SEQ ID NO: 237690 - RNA, 23 nt, Human
gaaaaacaaaaauacacugaagg

SEQ ID NO: 237691 - RNA, 19 nt, Human
gaaguuccuuuauuugcuc

SEQ ID NO: 237692 - RNA, 22 nt, Human
gagaagauaugaguagggccau

SEQ ID NO: 237693 - RNA, 20 nt, Human
gagagggagaaagagaauuu

SEQ ID NO: 237694 - RNA, 20 nt, Human
uagaagccuaaaaaauaaga

SEQ ID NO: 237695 - RNA, 18 nt, Human
uagagggacgagauagaa

SEQ ID NO: 237696 - RNA, 22 nt, Human
uauagaagccuaaaaaauaaga

SEQ ID NO: 237697 - RNA, 21 nt, Human
uccuacauccaagaugcucuu

SEQ ID NO: 237698 - RNA, 22 nt, Human
ucucacaggccgugaggaacag

SEQ ID NO: 237699 - RNA, 19 nt, Human
ucugaagaggcuauggauc

SEQ ID NO: 237700 - RNA, 19 nt, Human
ugaaaaacaaaaauacacu

SEQ ID NO: 237701 - RNA, 21 nt, Human
ugaaaaacaaaaauacacuga

SEQ ID NO: 237702 - RNA, 24 nt, Human
ugaaaaacaaaaauacacugaagg

SEQ ID NO: 237703 - RNA, 26 nt, Human
ugaaaaacaaaaauacacugaaggaa

SEQ ID NO: 237704 - RNA, 24 nt, Human
ugaaaccacaagccaguuuauuua

SEQ ID NO: 237705 - RNA, 18 nt, Human
ugaaggaagaugcaaaga

SEQ ID NO: 237706 - RNA, 21 nt, Human
ugcaaagagcuaaaaguggua

SEQ ID NO: 237707 - RNA, 19 nt, Human
aaaaaccacuaacacggua

SEQ ID NO: 237708 - RNA, 26 nt, Human
aaaaggaaaaaaauaaugaauuccag

SEQ ID NO: 237709 - RNA, 19 nt, Human
aaaguaaauuuacaguaaa

SEQ ID NO: 237710 - RNA, 24 nt, Human
aagcaauuuuaauaccugaaaugc

SEQ ID NO: 237711 - RNA, 25 nt, Human
aaggcaaaggaggacagcgaggccu

SEQ ID NO: 237712 - RNA, 18 nt, Human
acagauacucuauaauga

SEQ ID NO: 237713 - RNA, 21 nt, Human
acuaagccacuuuaaaauuau

SEQ ID NO: 237714 - RNA, 19 nt, Human
agaaagccuuuguucuugg

SEQ ID NO: 237715 - RNA, 24 nt, Human
agaauagguccagagaacaccuau

SEQ ID NO: 237716 - RNA, 26 nt, Human
agccgaacaguacaaggauuacagga

SEQ ID NO: 237717 - RNA, 19 nt, Human
agccuuuguucuugggcuu

SEQ ID NO: 237718 - RNA, 22 nt, Human
aggaaaacacagauuucuauaa

SEQ ID NO: 237719 - RNA, 22 nt, Human
aguacaaggauuacaggagaaa

SEQ ID NO: 237720 - RNA, 20 nt, Human
auaaagcaaucaagaacaag

SEQ ID NO: 237721 - RNA, 21 nt, Human
auacagaauacacacacugac

SEQ ID NO: 237722 - RNA, 22 nt, Human
auagauuggacuuacuuuuaca

SEQ ID NO: 237723 - RNA, 20 nt, Human
augagcuuauuuuuugacca

SEQ ID NO: 237724 - RNA, 21 nt, Human
caagugauacuauagugcuau

SEQ ID NO: 237725 - RNA, 27 nt, Human
cacacacacaugccaaauacccacaua

SEQ ID NO: 237726 - RNA, 18 nt, Human
cagaauacacacacugac

SEQ ID NO: 237727 - RNA, 21 nt, Human
cagauacucuauaaugaacac

SEQ ID NO: 237728 - RNA, 20 nt, Human
cagcagaaucaauuuacaug

SEQ ID NO: 237729 - RNA, 19 nt, Human
cagccgaacaguacaagga

SEQ ID NO: 237730 - RNA, 23 nt, Human
cauuaaaguacuauuugccaaua

SEQ ID NO: 237731 - RNA, 18 nt, Human
ccaaucuuaagaacgucc

SEQ ID NO: 237732 - RNA, 21 nt, Human
ccagaacacaguguuacgggu

SEQ ID NO: 237733 - RNA, 18 nt, Human
cccuccccauauucacuc

SEQ ID NO: 237734 - RNA, 18 nt, Human
ccuggcgaccggcucagc

SEQ ID NO: 237735 - RNA, 19 nt, Human
cguauuuccaagguuugga

SEQ ID NO: 237736 - RNA, 27 nt, Human
cuagaaaacaaaucugaaggcuuuuaa

SEQ ID NO: 237737 - RNA, 22 nt, Human
cucuacagauacucuauaauga

SEQ ID NO: 237738 - RNA, 21 nt, Human
cuuacuuuuacauucaccucu

SEQ ID NO: 237739 - RNA, 20 nt, Human
gaaaaaccacuaacacggua

SEQ ID NO: 237740 - RNA, 18 nt, Human
gaaggcaaaggaggacag

SEQ ID NO: 237741 - RNA, 18 nt, Human
gaaguaagucaagacuaa

SEQ ID NO: 237742 - RNA, 20 nt, Human
gauaauaaagcaaucaagaa

SEQ ID NO: 237743 - RNA, 22 nt, Human
gauaauaaagcaaucaagaaca

SEQ ID NO: 237744 - RNA, 21 nt, Human
gcaaaggaggacagcgaggcc

SEQ ID NO: 237745 - RNA, 19 nt, Human
ggaaggcaaaggaggacag

SEQ ID NO: 237746 - RNA, 22 nt, Human
ggauuacaggagaaaaaaaaac

SEQ ID NO: 237747 - RNA, 18 nt, Human
uaaaagacaacccaucca

SEQ ID NO: 237748 - RNA, 21 nt, Human
uaaaagacaacccauccaaua

SEQ ID NO: 237749 - RNA, 25 nt, Human
uaaaagacaacccauccaauaacau

SEQ ID NO: 237750 - RNA, 18 nt, Human
uaaaguagccacaguggc

SEQ ID NO: 237751 - RNA, 24 nt, Human
uacacacacugacauggggguaug

SEQ ID NO: 237752 - RNA, 19 nt, Human
uacaggaaaacacagauuu

SEQ ID NO: 237753 - RNA, 20 nt, Human
uacccacauaacuucaaucc

SEQ ID NO: 237754 - RNA, 24 nt, Human
uaccugaaaugcaagucuagcugu

SEQ ID NO: 237755 - RNA, 22 nt, Human
uagaauagguccagagaacacc

SEQ ID NO: 237756 - RNA, 23 nt, Human
uauuuauuucacacacacauggu

SEQ ID NO: 237757 - RNA, 23 nt, Human
uauuucacacacacaugccaaau

SEQ ID NO: 237758 - RNA, 19 nt, Human
ucagucuguguauauguga

SEQ ID NO: 237759 - RNA, 21 nt, Human
uccagaacacaguguuacggg

SEQ ID NO: 237760 - RNA, 22 nt, Human
ucucuuguggcuaucauuuuag

SEQ ID NO: 237761 - RNA, 18 nt, Human
ucugaacugccugagaag

SEQ ID NO: 237762 - RNA, 22 nt, Human
ugaaaugcaagucuagcugugg

SEQ ID NO: 237763 - RNA, 22 nt, Human
ugacugauuggccccgcccucc

SEQ ID NO: 237764 - RNA, 21 nt, Human
ugaggagagaggaaggcaaag

SEQ ID NO: 237765 - RNA, 24 nt, Human
ugaggagagaggaaggcaaaggag

SEQ ID NO: 237766 - RNA, 20 nt, Human
ugauuggccccgcccucccc

SEQ ID NO: 237767 - RNA, 23 nt, Human
ugcaaaaaaauuaauuauuugag

SEQ ID NO: 237768 - RNA, 28 nt, Human
ugccaaauacccacauaacuucaauccu

SEQ ID NO: 237769 - RNA, 18 nt, Human
ugcuugaaugcuuguuuu

SEQ ID NO: 237770 - RNA, 19 nt, Human
uggcuuuuaaugagggguc

SEQ ID NO: 237771 - RNA, 24 nt, Human
uggguucuacuuguuuggguuuua

SEQ ID NO: 237772 - RNA, 24 nt, Human
uguaauaacuaaaguuugcaaaaa

SEQ ID NO: 237773 - RNA, 23 nt, Human
uuaagauaauuuuaagugguuag

SEQ ID NO: 237774 - RNA, 25 nt, Human
uuaauaccugaaaugcaagucuagc

SEQ ID NO: 237775 - RNA, 24 nt, Human
uucacacacacaugccaaauaccc

SEQ ID NO: 237776 - RNA, 21 nt, Human
uugcugccuguaauaacuagu

SEQ ID NO: 237777 - RNA, 21 nt, Human
uuggccccgcccuccccauau

SEQ ID NO: 237778 - RNA, 21 nt, Human
uuuaauaccugaaaugcaagu

SEQ ID NO: 237779 - RNA, 23 nt, Human
uuuacauacuacuguggcauccu

SEQ ID NO: 237780 - RNA, 23 nt, Human
uuucucauauugcugaauucuac

SEQ ID NO: 237781 - RNA, 22 nt, Human
uuuugugauucuugacaguuaa

SEQ ID NO: 237782 - RNA, 24 nt, Human
aacccuucaccccacccccccgcu

SEQ ID NO: 237783 - RNA, 18 nt, Human
aacuaaaacacuccaucc

SEQ ID NO: 237784 - RNA, 21 nt, Human
aagucuccagcccugggaacc

SEQ ID NO: 237785 - RNA, 19 nt, Human
accccacccccccgcuuca

SEQ ID NO: 237786 - RNA, 24 nt, Human
acccccccgcuucacuccucgcug

SEQ ID NO: 237787 - RNA, 22 nt, Human
aggaggcggggagggggggugg

SEQ ID NO: 237788 - RNA, 27 nt, Human
aggaggcggggaggggggguggggggc

SEQ ID NO: 237789 - RNA, 19 nt, Human
aggcggggagggggggugg

SEQ ID NO: 237790 - RNA, 20 nt, Human
aggggcucacugaaggacuc

SEQ ID NO: 237791 - RNA, 22 nt, Human
agggggcaggaggcuuucuggg

SEQ ID NO: 237792 - RNA, 19 nt, Human
auggagcucugggggcucc

SEQ ID NO: 237793 - RNA, 24 nt, Human
auggggcgagaggggagagccuug

SEQ ID NO: 237794 - RNA, 19 nt, Human
caaacccuucaccccaccc

SEQ ID NO: 237795 - RNA, 21 nt, Human
caaacccuucaccccaccccc

SEQ ID NO: 237796 - RNA, 23 nt, Human
caaacccuucaccccaccccccc

SEQ ID NO: 237797 - RNA, 21 nt, Human
cacguccccaaaacggggcug

SEQ ID NO: 237798 - RNA, 24 nt, Human
cagcagccccuuccccucuggucc

SEQ ID NO: 237799 - RNA, 23 nt, Human
ccaggggaggggaggcuggagga

SEQ ID NO: 237800 - RNA, 21 nt, Human
cccaccuccuuggcgucccca

SEQ ID NO: 237801 - RNA, 19 nt, Human
ccccaagaacuaaaacacu

SEQ ID NO: 237802 - RNA, 22 nt, Human
ccccacccccccgcuucacucc

SEQ ID NO: 237803 - RNA, 23 nt, Human
ccccacccccccgcuucacuccu

SEQ ID NO: 237804 - RNA, 19 nt, Human
cccccgcuucacuccucgc

SEQ ID NO: 237805 - RNA, 18 nt, Human
cccccuuuuccuccuuuc

SEQ ID NO: 237806 - RNA, 19 nt, Human
cccccuuuuccuccuuucc

SEQ ID NO: 237807 - RNA, 20 nt, Human
cccccuuuuccuccuuuccc

SEQ ID NO: 237808 - RNA, 18 nt, Human
ccccuccuccuucucugu

SEQ ID NO: 237809 - RNA, 20 nt, Human
ccccuccuccuucucuguuc

SEQ ID NO: 237810 - RNA, 19 nt, Human
ccccucugguccugcuacu

SEQ ID NO: 237811 - RNA, 26 nt, Human
ccccuggaguuggggcuggggucccc

SEQ ID NO: 237812 - RNA, 25 nt, Human
ccccuggaguuggggcugggguuug

SEQ ID NO: 237813 - RNA, 21 nt, Human
cccgccuaccucacccagagc

SEQ ID NO: 237814 - RNA, 20 nt, Human
cccgggcgaagcucacagcc

SEQ ID NO: 237815 - RNA, 18 nt, Human
cccugaaggcagcauggg

SEQ ID NO: 237816 - RNA, 25 nt, Human
cccugccccgaaauccaaacccuuc

SEQ ID NO: 237817 - RNA, 21 nt, Human
ccgaaauccaaacccuucacc

SEQ ID NO: 237818 - RNA, 20 nt, Human
ccggcugcaaaaaugcacaa

SEQ ID NO: 237819 - RNA, 19 nt, Human
ccucagugcaugggccugg

SEQ ID NO: 237820 - RNA, 19 nt, Human
ccuccuuucccccuccucc

SEQ ID NO: 237821 - RNA, 18 nt, Human
ccugaaggcagcaugggg

SEQ ID NO: 237822 - RNA, 19 nt, Human
ccuggaguuggggcugggg

SEQ ID NO: 237823 - RNA, 23 nt, Human
ccuucaccccccccaguuggggg

SEQ ID NO: 237824 - RNA, 23 nt, Human
cggcggggccagggaagggcugg

SEQ ID NO: 237825 - RNA, 19 nt, Human
cggugggggcccuggagac

SEQ ID NO: 237826 - RNA, 21 nt, Human
cuaaaacacuccauccuuucc

SEQ ID NO: 237827 - RNA, 22 nt, Human
cuccggcugcaaaaaugcacaa

SEQ ID NO: 237828 - RNA, 19 nt, Human
cuccucagugcaugggccu

SEQ ID NO: 237829 - RNA, 24 nt, Human
cucgcucacauauaaaauguaauu

SEQ ID NO: 237830 - RNA, 24 nt, Human
cugaugcaagcagcagccccuucc

SEQ ID NO: 237831 - RNA, 18 nt, Human
cugcccgcuuucccuucc

SEQ ID NO: 237832 - RNA, 21 nt, Human
gaaauccaaacccuucacccc

SEQ ID NO: 237833 - RNA, 18 nt, Human
gaaccucggugggggccc

SEQ ID NO: 237834 - RNA, 19 nt, Human
gagccgccuccggcugcaa

SEQ ID NO: 237835 - RNA, 23 nt, Human
gcaaagaacucucccuucccaga

SEQ ID NO: 237836 - RNA, 19 nt, Human
gcagccccaagcccucccu

SEQ ID NO: 237837 - RNA, 25 nt, Human
gccccaagcccucccugccugucuc

SEQ ID NO: 237838 - RNA, 20 nt, Human
gccccgaaauccaaacccuu

SEQ ID NO: 237839 - RNA, 24 nt, Human
gccuccggcugcaaaaaugcacaa

SEQ ID NO: 237840 - RNA, 21 nt, Human
gcugacgggggugcgcccccu

SEQ ID NO: 237841 - RNA, 24 nt, Human
gcugcaccaccagcucucccagug

SEQ ID NO: 237842 - RNA, 22 nt, Human
gcuggggaggggcucacugaag

SEQ ID NO: 237843 - RNA, 22 nt, Human
ggaaggcugcaccaccagcucu

SEQ ID NO: 237844 - RNA, 23 nt, Human
ggagggccugcugacgggggugc

SEQ ID NO: 237845 - RNA, 21 nt, Human
ggcgagaggggagagccuugg

SEQ ID NO: 237846 - RNA, 22 nt, Human
ggcgagaggggagagccuuggc

SEQ ID NO: 237847 - RNA, 23 nt, Human
gggaaggcugcaccaccagcucu

SEQ ID NO: 237848 - RNA, 22 nt, Human
gggagcgggcaagcagggaugg

SEQ ID NO: 237849 - RNA, 23 nt, Human
gggaggaggcggggagggggggu

SEQ ID NO: 237850 - RNA, 18 nt, Human
gggguggggggcguggac

SEQ ID NO: 237851 - RNA, 18 nt, Human
guccccaggggaggggag

SEQ ID NO: 237852 - RNA, 22 nt, Human
guccugcuacuucucuccuuca

SEQ ID NO: 237853 - RNA, 26 nt, Human
guccugcuacuucucuccuucacccc

SEQ ID NO: 237854 - RNA, 21 nt, Human
gugcgcccccugccccgaaau

SEQ ID NO: 237855 - RNA, 20 nt, Human
uaaaacacuccauccuuucc

SEQ ID NO: 237856 - RNA, 25 nt, Human
uauucuuuccuucggcaaagcgcac

SEQ ID NO: 237857 - RNA, 21 nt, Human
ucacguccccaaaacggggcu

SEQ ID NO: 237858 - RNA, 22 nt, Human
uccaaacccuucaccccacccc

SEQ ID NO: 237859 - RNA, 21 nt, Human
uccagacaggggcagcaaaga

SEQ ID NO: 237860 - RNA, 22 nt, Human
uccccaaaacggggcugcccgc

SEQ ID NO: 237861 - RNA, 25 nt, Human
uccccgggcgaagcucacagcccca

SEQ ID NO: 237862 - RNA, 18 nt, Human
uccuccuuucccccuccu

SEQ ID NO: 237863 - RNA, 24 nt, Human
ucucauaggugccccuggaguugg

SEQ ID NO: 237864 - RNA, 22 nt, Human
ugaagagguagaguuccgagcc

SEQ ID NO: 237865 - RNA, 21 nt, Human
ugccaaggagcaggcagggag

SEQ ID NO: 237866 - RNA, 25 nt, Human
ugggaggaggcggggagggggggug

SEQ ID NO: 237867 - RNA, 19 nt, Human
ugggagggggguugagcau

SEQ ID NO: 237868 - RNA, 19 nt, Human
ugggcugaugcaagcagca

SEQ ID NO: 237869 - RNA, 20 nt, Human
ugggcugaugcaagcagcag

SEQ ID NO: 237870 - RNA, 18 nt, Human
ugggggcccuggagacag

SEQ ID NO: 237871 - RNA, 20 nt, Human
ugggggugccaaggagcagg

SEQ ID NO: 237872 - RNA, 24 nt, Human
uggugggaggguaggaggugcagc

SEQ ID NO: 237873 - RNA, 21 nt, Human
uguaaagaauucagcaaaaau

SEQ ID NO: 237874 - RNA, 18 nt, Human
uucccccuccuccuucuc

SEQ ID NO: 237875 - RNA, 20 nt, Human
uucccuuccuggguguggcc

SEQ ID NO: 237876 - RNA, 19 nt, Human
uucuggugggaggguagga

SEQ ID NO: 237877 - RNA, 23 nt, Human
uucuggugggaggguaggaggug

SEQ ID NO: 237878 - RNA, 18 nt, Human
uugccggcuugcucgcuc

SEQ ID NO: 237879 - RNA, 20 nt, Human
uuuaccagaggaagucucca

SEQ ID NO: 237880 - RNA, 21 nt, Human
uuuuacauuuauacauccggc

SEQ ID NO: 237881 - RNA, 24 nt, Human
uuuuacauuuauacauccggcggg

SEQ ID NO: 237882 - RNA, 18 nt, Human
aaaaagacacacaggaua

SEQ ID NO: 237883 - RNA, 22 nt, Human
aagacacacaggauaccuccac

SEQ ID NO: 237884 - RNA, 24 nt, Human
acagggaaaaauauauuuuuuuca

SEQ ID NO: 237885 - RNA, 22 nt, Human
accgcaccggcagcgccucugc

SEQ ID NO: 237886 - RNA, 23 nt, Human
cagacaacuucagugcaaagaua

SEQ ID NO: 237887 - RNA, 24 nt, Human
cagcagacaucuuuauuagcaaau

SEQ ID NO: 237888 - RNA, 28 nt, Human
caguaacaggauaaucuuuccaaaauuu

SEQ ID NO: 237889 - RNA, 19 nt, Human
caucuuuauuagcaaauuc

SEQ ID NO: 237890 - RNA, 26 nt, Human
ccgcaccggcagcgccucugcuagcg

SEQ ID NO: 237891 - RNA, 22 nt, Human
ccggccucgccguuccuucccc

SEQ ID NO: 237892 - RNA, 23 nt, Human
cuaauuauucccuaaauagcugg

SEQ ID NO: 237893 - RNA, 20 nt, Human
cuccaccuauaggcaaacag

SEQ ID NO: 237894 - RNA, 26 nt, Human
guaaaaaaagacacacaggauaccuc

SEQ ID NO: 237895 - RNA, 20 nt, Human
uaaaaaaagacacacaggaa

SEQ ID NO: 237896 - RNA, 21 nt, Human
uaacaggauaaucuuuccaaa

SEQ ID NO: 237897 - RNA, 21 nt, Human
uaccuccaccuauaggcaaac

SEQ ID NO: 237898 - RNA, 25 nt, Human
uagcaaauucaguaacaggauaauc

SEQ ID NO: 237899 - RNA, 22 nt, Human
uagcgaacgcuccuuuaggucu

SEQ ID NO: 237900 - RNA, 23 nt, Human
uaguauuaccuucagacaacuuc

SEQ ID NO: 237901 - RNA, 25 nt, Human
uauacaauauauuuauaguauuacc

SEQ ID NO: 237902 - RNA, 26 nt, Human
uauacaauauauuuauaguauuaccu

SEQ ID NO: 237903 - RNA, 21 nt, Human
uauuagcaaauucaguaacag

SEQ ID NO: 237904 - RNA, 26 nt, Human
ucaguaacaggauaaucuuuccaaaa

SEQ ID NO: 237905 - RNA, 25 nt, Human
uccaccuauaggcaaacagggaaaa

SEQ ID NO: 237906 - RNA, 20 nt, Human
uguuaacuuuuuucaucugu

SEQ ID NO: 237907 - RNA, 18 nt, Human
cccgcgggcgccgccucc

SEQ ID NO: 237908 - RNA, 24 nt, Human
ccgccuccugccccgcggcuccgg

SEQ ID NO: 237909 - RNA, 24 nt, Human
cggcucuggcucuggcugcggcuc

SEQ ID NO: 237910 - RNA, 22 nt, Human
cggggcuguggcggucaccagc

SEQ ID NO: 237911 - RNA, 23 nt, Human
cugccccgcggcuccggcuccgg

SEQ ID NO: 237912 - RNA, 21 nt, Human
gggcuagggcucgggcuccgg

SEQ ID NO: 237913 - RNA, 24 nt, Human
ugcggcuccggcucuggcucuggc

SEQ ID NO: 237914 - RNA, 22 nt, Human
uggcucuggcugcggcucgggc

SEQ ID NO: 237915 - RNA, 19 nt, Human
uggcugcggcucgggcucg

SEQ ID NO: 237916 - RNA, 19 nt, Human
uuccggcugcggcuccggc

SEQ ID NO: 237917 - RNA, 25 nt, Human
aaaaaaaccccacgaagaacagcua

SEQ ID NO: 237918 - RNA, 19 nt, Human
aaaaccccacgaagaacag

SEQ ID NO: 237919 - RNA, 25 nt, Human
aaacaaaaaaaccccacgaagaaca

SEQ ID NO: 237920 - RNA, 19 nt, Human
aaacaaacaaaaaaacccc

SEQ ID NO: 237921 - RNA, 22 nt, Human
aaacaaacaaaaaaaccccacg

SEQ ID NO: 237922 - RNA, 24 nt, Human
aaagcaaauuaggcaaaaaaacaa

SEQ ID NO: 237923 - RNA, 23 nt, Human
aacaaacaaaaaaaccccacgaa

SEQ ID NO: 237924 - RNA, 19 nt, Human
aaccugguuaauuugagca

SEQ ID NO: 237925 - RNA, 20 nt, Human
aaccugguuaauuugagcaa

SEQ ID NO: 237926 - RNA, 19 nt, Human
aacucaggaaacuuccccu

SEQ ID NO: 237927 - RNA, 20 nt, Human
aagaacagccugagccaccc

SEQ ID NO: 237928 - RNA, 24 nt, Human
aagauccuucccccuuuccaauca

SEQ ID NO: 237929 - RNA, 19 nt, Human
aagcggggccugcggugua

SEQ ID NO: 237930 - RNA, 19 nt, Human
aauaagauccuucccccuu

SEQ ID NO: 237931 - RNA, 20 nt, Human
aauguagaaacagcuccaga

SEQ ID NO: 237932 - RNA, 18 nt, Human
acaaacaaaaaaacccca

SEQ ID NO: 237933 - RNA, 24 nt, Human
acaaggcuuggucagaaaaagcaa

SEQ ID NO: 237934 - RNA, 20 nt, Human
accaggcugagacacgugcc

SEQ ID NO: 237935 - RNA, 18 nt, Human
acccacacccccaugucc

SEQ ID NO: 237936 - RNA, 19 nt, Human
acccacacccccauguccc

SEQ ID NO: 237937 - RNA, 19 nt, Human
acccccaugucccagcccc

SEQ ID NO: 237938 - RNA, 19 nt, Human
acuuuucuacuugcucuuc

SEQ ID NO: 237939 - RNA, 22 nt, Human
agaaaaagcaaauuaggcaaaa

SEQ ID NO: 237940 - RNA, 24 nt, Human
agaaaaagcaaauuaggcaaaaaa

SEQ ID NO: 237941 - RNA, 24 nt, Human
agacauucuaggaggaggaagaac

SEQ ID NO: 237942 - RNA, 22 nt, Human
agagacucagcccccaaggccu

SEQ ID NO: 237943 - RNA, 18 nt, Human
agccacaggcuugcuguc

SEQ ID NO: 237944 - RNA, 22 nt, Human
agcuagggagacguuuuagggc

SEQ ID NO: 237945 - RNA, 23 nt, Human
aggaggaggacaagcacacagaa

SEQ ID NO: 237946 - RNA, 25 nt, Human
aggcaggcagggaagagaauguggg

SEQ ID NO: 237947 - RNA, 20 nt, Human
aggcagggaagagaaugugg

SEQ ID NO: 237948 - RNA, 18 nt, Human
aguagccuugugauaggg

SEQ ID NO: 237949 - RNA, 19 nt, Human
agugguggcaccaggaggg

SEQ ID NO: 237950 - RNA, 23 nt, Human
aucccugucuuuacccacacccc

SEQ ID NO: 237951 - RNA, 21 nt, Human
augaaccaagugauggcaucc

SEQ ID NO: 237952 - RNA, 19 nt, Human
caacucaggaaacuucccc

SEQ ID NO: 237953 - RNA, 19 nt, Human
caagaauaauguccacugc

SEQ ID NO: 237954 - RNA, 21 nt, Human
caagucuccaaccugaucguu

SEQ ID NO: 237955 - RNA, 22 nt, Human
cacacccccaugucccagcccc

SEQ ID NO: 237956 - RNA, 20 nt, Human
caccacagucguugaccccg

SEQ ID NO: 237957 - RNA, 20 nt, Human
caccacagucguugaccccg

SEQ ID NO: 237958 - RNA, 18 nt, Human
caccccguagccacaggc

SEQ ID NO: 237959 - RNA, 21 nt, Human
cagauccaacuaccccccaaa

SEQ ID NO: 237960 - RNA, 19 nt, Human
cagaugcccauaccugcug

SEQ ID NO: 237961 - RNA, 23 nt, Human
cagcaauggaccagacacccaga

SEQ ID NO: 237962 - RNA, 22 nt, Human
cagcacugagaagcaggcacug

SEQ ID NO: 237963 - RNA, 18 nt, Human
cagccucuauccuucauc

SEQ ID NO: 237964 - RNA, 23 nt, Human
cagcgcccauuccaacacaggaa

SEQ ID NO: 237965 - RNA, 25 nt, Human
caggauggaguacaagaugugaggu

SEQ ID NO: 237966 - RNA, 24 nt, Human
caggcaggcagggaagagaauguu

SEQ ID NO: 237967 - RNA, 20 nt, Human
caggcugagacacgugcccu

SEQ ID NO: 237968 - RNA, 23 nt, Human
caugaaccaagugauggcauccc

SEQ ID NO: 237969 - RNA, 23 nt, Human
cauggaaacuaagccgucagaga

SEQ ID NO: 237970 - RNA, 18 nt, Human
ccacaggcuugcugucca

SEQ ID NO: 237971 - RNA, 19 nt, Human
ccaccccguagccacaggc

SEQ ID NO: 237972 - RNA, 20 nt, Human
ccagaaaguccaaucucucc

SEQ ID NO: 237973 - RNA, 19 nt, Human
ccagacacccagauccaac

SEQ ID NO: 237974 - RNA, 18 nt, Human
ccagaugcccauaccugc

SEQ ID NO: 237975 - RNA, 18 nt, Human
ccagccccugaugggcaa

SEQ ID NO: 237976 - RNA, 24 nt, Human
ccaguaucugcugcugaaaaggca

SEQ ID NO: 237977 - RNA, 21 nt, Human
cccacacccccaugucccagc

SEQ ID NO: 237978 - RNA, 23 nt, Human
cccacacccccaugucccagccc

SEQ ID NO: 237979 - RNA, 18 nt, Human
cccacauggaaacuaagc

SEQ ID NO: 237980 - RNA, 19 nt, Human
cccagauccaacuaccccc

SEQ ID NO: 237981 - RNA, 25 nt, Human
ccccaugucccagccccugaugggc

SEQ ID NO: 237982 - RNA, 21 nt, Human
cccccaaggccuaacauucac

SEQ ID NO: 237983 - RNA, 20 nt, Human
ccccuagaaauucuccccuc

SEQ ID NO: 237984 - RNA, 21 nt, Human
ccccuuagcugaggggacagc

SEQ ID NO: 237985 - RNA, 19 nt, Human
ccuagaaauucuccccucc

SEQ ID NO: 237986 - RNA, 24 nt, Human
ccugccacuucuaauuccuggggg

SEQ ID NO: 237987 - RNA, 22 nt, Human
cgcccauuccaacacaggaacu

SEQ ID NO: 237988 - RNA, 20 nt, Human
cuaacauucacucaagccac

SEQ ID NO: 237989 - RNA, 26 nt, Human
cuagaaauucuccccuccauucccag

SEQ ID NO: 237990 - RNA, 24 nt, Human
cucucagccucuauccuucauccc

SEQ ID NO: 237991 - RNA, 23 nt, Human
cucuucaucgcuguugucugcac

SEQ ID NO: 237992 - RNA, 21 nt, Human
cugggggagaagaggucuggg

SEQ ID NO: 237993 - RNA, 19 nt, Human
cuuccuucuucucucagcc

SEQ ID NO: 237994 - RNA, 21 nt, Human
cuugcucuuccuccccagacg

SEQ ID NO: 237995 - RNA, 22 nt, Human
gaaacagcuccagacauucuag

SEQ ID NO: 237996 - RNA, 21 nt, Human
gaagaacagccugagccaccc

SEQ ID NO: 237997 - RNA, 24 nt, Human
gaauguagaaacagcuccagacau

SEQ ID NO: 237998 - RNA, 20 nt, Human
gacaacuucugguuuuucuu

SEQ ID NO: 237999 - RNA, 25 nt, Human
gacacccagauccaacuacccccca

SEQ ID NO: 238000 - RNA, 19 nt, Human
gaggaggaggacaagcaca

SEQ ID NO: 238001 - RNA, 24 nt, Human
gcaaaaaaacaaacaaaaaaaccc

SEQ ID NO: 238002 - RNA, 21 nt, Human
gcaauggaccagacacccaga

SEQ ID NO: 238003 - RNA, 20 nt, Human
gcccaggauggaguacaaga

SEQ ID NO: 238004 - RNA, 23 nt, Human
gcccuggguuucccaagucucca

SEQ ID NO: 238005 - RNA, 18 nt, Human
gcugcaucagcacugaga

SEQ ID NO: 238006 - RNA, 18 nt, Human
gcugugggcuuucgucgc

SEQ ID NO: 238007 - RNA, 20 nt, Human
gcuuucgucgcuguugucac

SEQ ID NO: 238008 - RNA, 21 nt, Human
ggaacaguuauggggugggag

SEQ ID NO: 238009 - RNA, 22 nt, Human
ggcaaaaaaacaaacaaaaaaa

SEQ ID NO: 238010 - RNA, 22 nt, Human
ggccuaacauucacucaagcca

SEQ ID NO: 238011 - RNA, 22 nt, Human
ggcugauucuuccuucuucucu

SEQ ID NO: 238012 - RNA, 18 nt, Human
ggggaaaggggaggugga

SEQ ID NO: 238013 - RNA, 18 nt, Human
gguaaaauccaggucuaa

SEQ ID NO: 238014 - RNA, 20 nt, Human
ggucucuuccccagaauccc

SEQ ID NO: 238015 - RNA, 21 nt, Human
guauucucacaguucucuuca

SEQ ID NO: 238016 - RNA, 18 nt, Human
gugagucuaaggacccaa

SEQ ID NO: 238017 - RNA, 23 nt, Human
gugauggggcagagcgcaguccu

SEQ ID NO: 238018 - RNA, 23 nt, Human
guugaccccguugcacagcuucc

SEQ ID NO: 238019 - RNA, 19 nt, Human
uaaauaacuccagaaaguc

SEQ ID NO: 238020 - RNA, 23 nt, Human
uaaaucagugcucaaauagauag

SEQ ID NO: 238021 - RNA, 19 nt, Human
uaacauucacucaagccac

SEQ ID NO: 238022 - RNA, 20 nt, Human
uaaguguaauguggggaggc

SEQ ID NO: 238023 - RNA, 21 nt, Human
uaggaacaguuaugggguggg

SEQ ID NO: 238024 - RNA, 23 nt, Human
uaucauaaaguccuaaaauacug

SEQ ID NO: 238025 - RNA, 23 nt, Human
ucaaauagauacuuccucaaaua

SEQ ID NO: 238026 - RNA, 22 nt, Human
ucaacucaggaaacuuccccua

SEQ ID NO: 238027 - RNA, 20 nt, Human
ucagaacuggggcugacgcu

SEQ ID NO: 238028 - RNA, 19 nt, Human
uccaaucaagaaaaugcca

SEQ ID NO: 238029 - RNA, 21 nt, Human
uccaaucaagaaaaugccacu

SEQ ID NO: 238030 - RNA, 20 nt, Human
uccacuaacuuagaucccug

SEQ ID NO: 238031 - RNA, 23 nt, Human
ucccagaugcccauaccugcugg

SEQ ID NO: 238032 - RNA, 19 nt, Human
ucccagccccugaugggca

SEQ ID NO: 238033 - RNA, 19 nt, Human
ucccagccccuguuguucu

SEQ ID NO: 238034 - RNA, 20 nt, Human
ucccagccccuguuguucuc

SEQ ID NO: 238035 - RNA, 23 nt, Human
uccccuagaaauucuccccucca

SEQ ID NO: 238036 - RNA, 21 nt, Human
ucccugagcacuugagaaaga

SEQ ID NO: 238037 - RNA, 19 nt, Human
ucgcuguugucugcacagu

SEQ ID NO: 238038 - RNA, 21 nt, Human
ucuacuugcucuuccucccca

SEQ ID NO: 238039 - RNA, 21 nt, Human
ucucuaccuuccuacuccuua

SEQ ID NO: 238040 - RNA, 21 nt, Human
ucuuccuucuucucucagccu

SEQ ID NO: 238041 - RNA, 18 nt, Human
ugagaagcaggcacugag

SEQ ID NO: 238042 - RNA, 19 nt, Human
ugagggagagaggggucag

SEQ ID NO: 238043 - RNA, 25 nt, Human
ugagggagagaggggucaggaggua

SEQ ID NO: 238044 - RNA, 18 nt, Human
ugaggguacuggggaaag

SEQ ID NO: 238045 - RNA, 18 nt, Human
ugcccauaccugcugggc

SEQ ID NO: 238046 - RNA, 21 nt, Human
uggggcagagcgcaguccugg

SEQ ID NO: 238047 - RNA, 22 nt, Human
uggggcugacgcuacugagagc

SEQ ID NO: 238048 - RNA, 18 nt, Human
uggggugggaggaggagg

SEQ ID NO: 238049 - RNA, 19 nt, Human
uggggugggaggaggagga

SEQ ID NO: 238050 - RNA, 22 nt, Human
uggggugggaggaggaggagga

SEQ ID NO: 238051 - RNA, 24 nt, Human
uggggugggaggaggaggaggaca

SEQ ID NO: 238052 - RNA, 18 nt, Human
ugguaaacagcuccggug

SEQ ID NO: 238053 - RNA, 18 nt, Human
ugucaccacagucguuga

SEQ ID NO: 238054 - RNA, 26 nt, Human
uucccagccccuguuguucucuccug

SEQ ID NO: 238055 - RNA, 22 nt, Human
uuccugggggagaagaggucug

SEQ ID NO: 238056 - RNA, 21 nt, Human
uucucuucaucgcuguuguua

SEQ ID NO: 238057 - RNA, 24 nt, Human
uuggucagaaaaagcaaauuaggc

SEQ ID NO: 238058 - RNA, 22 nt, Human
uuuuauuuauucagcccuccca

SEQ ID NO: 238059 - RNA, 23 nt, Human
aaaguucucccagcccugcccac

SEQ ID NO: 238060 - RNA, 25 nt, Human
aaaguucucccagcccugcccaccc

SEQ ID NO: 238061 - RNA, 20 nt, Human
caaaguucucccagcccugc

SEQ ID NO: 238062 - RNA, 19 nt, Human
cccaccccaucacaguuca

SEQ ID NO: 238063 - RNA, 18 nt, Human
cgcgccgcgcucacucgg

SEQ ID NO: 238064 - RNA, 19 nt, Human
cggccggacgggcccgcgc

SEQ ID NO: 238065 - RNA, 23 nt, Human
cucccagcccugcccaccccauc

SEQ ID NO: 238066 - RNA, 21 nt, Human
gcccugcccaccccaucacag

SEQ ID NO: 238067 - RNA, 22 nt, Human
ggacgggcccgcgccgcgcuca

SEQ ID NO: 238068 - RNA, 22 nt, Human
uaaaacuauuuacaggggcaca

SEQ ID NO: 238069 - RNA, 19 nt, Human
uauuuguuccacuguacaa

SEQ ID NO: 238070 - RNA, 21 nt, Human
uucucccagcccugcccaccc

SEQ ID NO: 238071 - RNA, 24 nt, Human
uuuguucauauuuaaaacuauuua

SEQ ID NO: 238072 - RNA, 22 nt, Human
auggcacaagcagcaaaucugc

SEQ ID NO: 238073 - RNA, 27 nt, Human
cauuuuuacguuggaggcagucagagg

SEQ ID NO: 238074 - RNA, 20 nt, Human
ccuucucgcguucucuucuc

SEQ ID NO: 238075 - RNA, 21 nt, Human
uaauagcucccucccccccuc

SEQ ID NO: 238076 - RNA, 28 nt, Human
uaauagcucccucccccccuccagaucu

SEQ ID NO: 238077 - RNA, 18 nt, Human
ucaccggcgagggguggc

SEQ ID NO: 238078 - RNA, 23 nt, Human
ucagugaugccuuuauuauuccu

SEQ ID NO: 238079 - RNA, 26 nt, Human
ucagugaugccuuuauuauuccuguu

SEQ ID NO: 238080 - RNA, 20 nt, Human
ucccucccccccuccagauc

SEQ ID NO: 238081 - RNA, 18 nt, Human
ucuccaguauucccuacc

SEQ ID NO: 238082 - RNA, 29 nt, Human
ucucuaauagcucccucccccccuccagg

SEQ ID NO: 238083 - RNA, 20 nt, Human
ucucucaccggcgagggguu

SEQ ID NO: 238084 - RNA, 20 nt, Human
uggaggcagucagaggagga

SEQ ID NO: 238085 - RNA, 22 nt, Human
uggcacaagcagcaaaucugcu

SEQ ID NO: 238086 - RNA, 20 nt, Human
uggcacaagcagcaaaucuu

SEQ ID NO: 238087 - RNA, 22 nt, Human
ugggggaggcgaggagccgggg

SEQ ID NO: 238088 - RNA, 24 nt, Human
uguacaaauaucuccaguauuccc

SEQ ID NO: 238089 - RNA, 19 nt, Human
aaaaaacaaaugccccaaa

SEQ ID NO: 238090 - RNA, 22 nt, Human
aaaaacaaaugcccaaaaccua

SEQ ID NO: 238091 - RNA, 24 nt, Human
aaaaacaaaugcccaaaaccuaaa

SEQ ID NO: 238092 - RNA, 23 nt, Human
aaaaacaaaugccccaaaaccca

SEQ ID NO: 238093 - RNA, 20 nt, Human
aaaaagcccccccagcaacc

SEQ ID NO: 238094 - RNA, 21 nt, Human
aaaaagcccccccagcaaccu

SEQ ID NO: 238095 - RNA, 21 nt, Human
aaaacccaaaaaagccccccc

SEQ ID NO: 238096 - RNA, 19 nt, Human
aaaagcccccccagcaacc

SEQ ID NO: 238097 - RNA, 18 nt, Human
aaacaaaugccccaaaac

SEQ ID NO: 238098 - RNA, 23 nt, Human
aaacaugccaaaaauaaauacuc

SEQ ID NO: 238099 - RNA, 25 nt, Human
aaaccaaauuccugugugaacauaa

SEQ ID NO: 238100 - RNA, 20 nt, Human
aaagcaguaaaccaaauucc

SEQ ID NO: 238101 - RNA, 29 nt, Human
aaagcauaaucaucuuauuuacaaaaaaa

SEQ ID NO: 238102 - RNA, 22 nt, Human
aaagcccccccagcaaccaaac

SEQ ID NO: 238103 - RNA, 23 nt, Human
aaaggaaaugguagagaguaagg

SEQ ID NO: 238104 - RNA, 24 nt, Human
aaaggaaaugguagagaguaaggg

SEQ ID NO: 238105 - RNA, 19 nt, Human
aaaugcccaaaaccuaaaa

SEQ ID NO: 238106 - RNA, 19 nt, Human
aacacacacauacacacac

SEQ ID NO: 238107 - RNA, 22 nt, Human
aacaugccaaaaauaaauacuc

SEQ ID NO: 238108 - RNA, 21 nt, Human
aaccaugguaucuauuuccug

SEQ ID NO: 238109 - RNA, 25 nt, Human
aacccaaaaaagcccccccagcaac

SEQ ID NO: 238110 - RNA, 19 nt, Human
aacccaaguguccugaaag

SEQ ID NO: 238111 - RNA, 20 nt, Human
aagauauaccccuuguggac

SEQ ID NO: 238112 - RNA, 20 nt, Human
acaaaaaacaaaugcccaaa

SEQ ID NO: 238113 - RNA, 23 nt, Human
acaaaaaacaaaugccccaaaac

SEQ ID NO: 238114 - RNA, 23 nt, Human
acaaaccaugguaucuauuuccu

SEQ ID NO: 238115 - RNA, 31 nt, Human
acacacacauacacacacagagucugugugg

SEQ ID NO: 238116 - RNA, 25 nt, Human
acacacauacacacacagagucugg

SEQ ID NO: 238117 - RNA, 29 nt, Human
acacacauacacacacagagucugugugg

SEQ ID NO: 238118 - RNA, 28 nt, Human
acacacauacacauauaaacacacacaa

SEQ ID NO: 238119 - RNA, 33 nt, Human
acacauacacauauaaacacacacauacacagu

SEQ ID NO: 238120 - RNA, 19 nt, Human
accaucuuuaucuucaucc

SEQ ID NO: 238121 - RNA, 21 nt, Human
acccuucagggugcuucagag

SEQ ID NO: 238122 - RNA, 21 nt, Human
accuaaaaaagccccccagca

SEQ ID NO: 238123 - RNA, 20 nt, Human
accuucgccaaagccaagaa

SEQ ID NO: 238124 - RNA, 24 nt, Human
acuacauaauugcacaaaccaugg

SEQ ID NO: 238125 - RNA, 26 nt, Human
agaaacccauucauccagucauacac

SEQ ID NO: 238126 - RNA, 27 nt, Human
agaaacccauucauccagucauacacc

SEQ ID NO: 238127 - RNA, 18 nt, Human
agccaugggugagcugaa

SEQ ID NO: 238128 - RNA, 22 nt, Human
agccaugggugagcugaaaggc

SEQ ID NO: 238129 - RNA, 20 nt, Human
agcugaaaggcuuuuccuga

SEQ ID NO: 238130 - RNA, 21 nt, Human
aguagccauuccacgaauucc

SEQ ID NO: 238131 - RNA, 29 nt, Human
auacacauauaaacacacacauacacagu

SEQ ID NO: 238132 - RNA, 22 nt, Human
auagaacucaucugauuuuuaa

SEQ ID NO: 238133 - RNA, 22 nt, Human
auccagaguguagugcauggga

SEQ ID NO: 238134 - RNA, 21 nt, Human
auccagucauacaccauccag

SEQ ID NO: 238135 - RNA, 22 nt, Human
auccggaguguagugcauggga

SEQ ID NO: 238136 - RNA, 22 nt, Human
caaaaaacaaaugcccaaaacc

SEQ ID NO: 238137 - RNA, 23 nt, Human
caaaaaacaaaugccccaaaacc

SEQ ID NO: 238138 - RNA, 22 nt, Human
caaaaaagcccccccagcaacc

SEQ ID NO: 238139 - RNA, 30 nt, Human
caaagcauaaucaucuuauuuacaaaaaaa

SEQ ID NO: 238140 - RNA, 30 nt, Human; identical to SEQ ID NO: 238139

SEQ ID NO: 238141 - RNA, 26 nt, Human
caaaugcccaaaaccuaaaaaagccc

SEQ ID NO: 238142 - RNA, 22 nt, Human
caaaugccccaaaacccaaaaa

SEQ ID NO: 238143 - RNA, 18 nt, Human
cacaaaccaugguaucua

SEQ ID NO: 238144 - RNA, 24 nt, Human
cacaaaccaugguaucuauuuccu

SEQ ID NO: 238145 - RNA, 18 nt, Human
cacacacauacacauaua

SEQ ID NO: 238146 - RNA, 23 nt, Human
cacacacauacacauauaaacac

SEQ ID NO: 238147 - RNA, 21 nt, Human
cacacauacacauauaaacac

SEQ ID NO: 238148 - RNA, 21 nt, Human
cacauacacucacacagaccc

SEQ ID NO: 238149 - RNA, 20 nt, Human
cagagucuguguggugggcc

SEQ ID NO: 238150 - RNA, 21 nt, Human
cagcagccaugggugagcuga

SEQ ID NO: 238151 - RNA, 22 nt, Human
caguagccauuccacgaauucc

SEQ ID NO: 238152 - RNA, 22 nt, Human
caguagccauuccacgaauucc

SEQ ID NO: 238153 - RNA, 19 nt, Human
cauacacucacacagaccc

SEQ ID NO: 238154 - RNA, 24 nt, Human
cauacacucacacagacccauaua

SEQ ID NO: 238155 - RNA, 20 nt, Human
caucuuuaucuucauccaca

SEQ ID NO: 238156 - RNA, 23 nt, Human
ccaaaacccaaaaaagccccccc

SEQ ID NO: 238157 - RNA, 22 nt, Human
ccaaaaccuaaaaaagcccccc

SEQ ID NO: 238158 - RNA, 27 nt, Human
ccaaaaccuaaaaaagccccccagcaa

SEQ ID NO: 238159 - RNA, 22 nt, Human
cccaaaaaagcccccccagcaa

SEQ ID NO: 238160 - RNA, 19 nt, Human
cccaaaacccaaaaaagcc

SEQ ID NO: 238161 - RNA, 22 nt, Human
cccauauauagaaacccauuca

SEQ ID NO: 238162 - RNA, 21 nt, Human
ccccaaaacccaaaaaagccc

SEQ ID NO: 238163 - RNA, 25 nt, Human
ccccaaaacccaaaaaagccccccc

SEQ ID NO: 238164 - RNA, 21 nt, Human
ccccccagcaaccaaacaucu

SEQ ID NO: 238165 - RNA, 21 nt, Human
ccccccagcaaccaaacaucu

SEQ ID NO: 238166 - RNA, 24 nt, Human
cccccgccgccgccgccgccgccg

SEQ ID NO: 238167 - RNA, 24 nt, Human
cccccgccgccgccgccgccgccg

SEQ ID NO: 238168 - RNA, 26 nt, Human
cccccgccgccgccgccgccgccgcu

SEQ ID NO: 238169 - RNA, 19 nt, Human
ccccgccgccgccgccgcc

SEQ ID NO: 238170 - RNA, 21 nt, Human
ccccgccgccgccgccgccgc

SEQ ID NO: 238171 - RNA, 18 nt, Human
ccccgcgccgccgccgcc

SEQ ID NO: 238172 - RNA, 23 nt, Human
ccccuuguggacugugugaaaau

SEQ ID NO: 238173 - RNA, 19 nt, Human
cccgcgccgccgccgccgc

SEQ ID NO: 238174 - RNA, 20 nt, Human
cccugggcggccgccgccag

SEQ ID NO: 238175 - RNA, 21 nt, Human
ccgccccggcuccucggcugc

SEQ ID NO: 238176 - RNA, 20 nt, Human
ccgcccgccccggcuccucg

SEQ ID NO: 238177 - RNA, 23 nt, Human
ccgccgccgccgccgccgccgcu

SEQ ID NO: 238178 - RNA, 22 nt, Human
ccgccgccgccgccgccgcugc

SEQ ID NO: 238179 - RNA, 24 nt, Human
ccgccgccgccgccgccgcugccg

SEQ ID NO: 238180 - RNA, 27 nt, Human
ccgccgccgccgccgccgcugccgccc

SEQ ID NO: 238181 - RNA, 18 nt, Human
ccgccgccgccgcugccg

SEQ ID NO: 238182 - RNA, 24 nt, Human
ccgccgccgccgcugccgcccgcc

SEQ ID NO: 238183 - RNA, 21 nt, Human
ccgccgcgccccgcgcucccc

SEQ ID NO: 238184 - RNA, 20 nt, Human
ccgccgcgucucagcccucc

SEQ ID NO: 238185 - RNA, 18 nt, Human
ccgcgccgccgccgccgc

SEQ ID NO: 238186 - RNA, 21 nt, Human
ccugucacacacauacacaua

SEQ ID NO: 238187 - RNA, 25 nt, Human
cgccccggcuccucggcugcauuuc

SEQ ID NO: 238188 - RNA, 19 nt, Human
cgccgccgccgcugccgcc

SEQ ID NO: 238189 - RNA, 20 nt, Human
cgccgcgccccgcgcucccc

SEQ ID NO: 238190 - RNA, 22 nt, Human
cgccgcgccccgcgcuccccgc

SEQ ID NO: 238191 - RNA, 22 nt, Human
cgcggccccggcccugggcggc

SEQ ID NO: 238192 - RNA, 24 nt, Human
cguaugccauuuccccccacaaau

SEQ ID NO: 238193 - RNA, 20 nt, Human
cugaaaggcuuuuccugacu

SEQ ID NO: 238194 - RNA, 22 nt, Human
cugagcacucugguaccaugga

SEQ ID NO: 238195 - RNA, 21 nt, Human
gaccuucgccaaagccaagaa

SEQ ID NO: 238196 - RNA, 24 nt, Human
gaguugaaguguuuuuuuuuuuuu

SEQ ID NO: 238197 - RNA, 21 nt, Human
gccaaagccaagaaagcccug

SEQ ID NO: 238198 - RNA, 20 nt, Human
gccauuuccccccacaaaua

SEQ ID NO: 238199 - RNA, 21 nt, Human
gcccaaaaccuaaaaaagccc

SEQ ID NO: 238200 - RNA, 22 nt, Human
gcccaaaaccuaaaaaagcccc

SEQ ID NO: 238201 - RNA, 22 nt, Human
gccccaaaacccaaaaaagccc

SEQ ID NO: 238202 - RNA, 23 nt, Human
gccccaaaacccaaaaaagcccc

SEQ ID NO: 238203 - RNA, 31 nt, Human
gccccaaaacccaaaaaagcccccccagcag

SEQ ID NO: 238204 - RNA, 23 nt, Human
gcccccgccgccgccgccgccgg

SEQ ID NO: 238205 - RNA, 20 nt, Human
gccgccgcgccccgcgcucc

SEQ ID NO: 238206 - RNA, 18 nt, Human
gccgcugcccccgccgcc

SEQ ID NO: 238207 - RNA, 21 nt, Human
gccgcugcccccgccgccgcc

SEQ ID NO: 238208 - RNA, 22 nt, Human
gccgcugcccccgccgccgccg

SEQ ID NO: 238209 - RNA, 19 nt, Human
gcgccccgcgcuccccgcg

SEQ ID NO: 238210 - RNA, 18 nt, Human
gcugccgcccgccccggc

SEQ ID NO: 238211 - RNA, 19 nt, Human
gcuucagaggaaacuuacu

SEQ ID NO: 238212 - RNA, 24 nt, Human
gcuuuuccugacuuccuggggucu

SEQ ID NO: 238213 - RNA, 25 nt, Human
ggccgccgcgccccgcgcuccccgc

SEQ ID NO: 238214 - RNA, 24 nt, Human
gggcgcgcggccccggcccugggc

SEQ ID NO: 238215 - RNA, 23 nt, Human
guaugccauuuccccccacaaau

SEQ ID NO: 238216 - RNA, 21 nt, Human
uaaaaaagccccccagcaacc

SEQ ID NO: 238217 - RNA, 30 nt, Human
uaaacacacacauacacacacagagucugg

SEQ ID NO: 238218 - RNA, 23 nt, Human
uaaauaaucuaaaugggggaggg

SEQ ID NO: 238219 - RNA, 22 nt, Human
uaaauauccaauauaauauaau

SEQ ID NO: 238220 - RNA, 18 nt, Human
uaaaugaugaguaaggua

SEQ ID NO: 238221 - RNA, 28 nt, Human
uaaguaaccuauuuauuaccuuaaaaug

SEQ ID NO: 238222 - RNA, 22 nt, Human
uacaaaaaacaaaugccccaaa

SEQ ID NO: 238223 - RNA, 22 nt, Human
uacacauauaaacacacacaua

SEQ ID NO: 238224 - RNA, 24 nt, Human
uacacucacacagacccauauaua

SEQ ID NO: 238225 - RNA, 22 nt, Human
uacauagaaaaacucucacauc

SEQ ID NO: 238226 - RNA, 22 nt, Human
uacauagaaaaacucucacauc

SEQ ID NO: 238227 - RNA, 22 nt, Human
uagccagaggugaaaagauuug

SEQ ID NO: 238228 - RNA, 20 nt, Human
uaggagucacagcagccaug

SEQ ID NO: 238229 - RNA, 22 nt, Human
uauauagaaacccauucaucca

SEQ ID NO: 238230 - RNA, 21 nt, Human
uaugugcaucauguuagucag

SEQ ID NO: 238231 - RNA, 21 nt, Human
uaugugcaucauguuagucag

SEQ ID NO: 238232 - RNA, 21 nt, Human
uauuccaccaucuuuaucuuc

SEQ ID NO: 238233 - RNA, 25 nt, Human
ucacacacauacacauauaaacaca

SEQ ID NO: 238234 - RNA, 21 nt, Human
ucauccagucauacaccaucc

SEQ ID NO: 238235 - RNA, 23 nt, Human
ucauccagucauacaccauccag

SEQ ID NO: 238236 - RNA, 19 nt, Human
uccacagcauguccuagac

SEQ ID NO: 238237 - RNA, 23 nt, Human
uccaccaucuuuaucuucaucca

SEQ ID NO: 238238 - RNA, 23 nt, Human
uccagauuuccaaaggcuuuucu

SEQ ID NO: 238239 - RNA, 19 nt, Human
uccccgcgccgccgccgcc

SEQ ID NO: 238240 - RNA, 21 nt, Human
uccccgcgccgccgccgccgc

SEQ ID NO: 238241 - RNA, 19 nt, Human
uccuuuggauguuugcagu

SEQ ID NO: 238242 - RNA, 19 nt, Human
uccuuuggauguuugcagu

SEQ ID NO: 238243 - RNA, 21 nt, Human
ucgccaaagccaagaaagccc

SEQ ID NO: 238244 - RNA, 19 nt, Human
ucggcggcggggcgggcuc

SEQ ID NO: 238245 - RNA, 20 nt, Human
ugaaagaaauugaagaaguu

SEQ ID NO: 238246 - RNA, 19 nt, Human
ugaagaaguuacucaaaga

SEQ ID NO: 238247 - RNA, 22 nt, Human
ugacuuaagccaaaaauuaguu

SEQ ID NO: 238248 - RNA, 22 nt, Human
ugaucuggaaacgucuccacuu

SEQ ID NO: 238249 - RNA, 20 nt, Human
ugcccaaaaccuaaaaaagc

SEQ ID NO: 238250 - RNA, 20 nt, Human
ugccccaaaacccaaaaaag

SEQ ID NO: 238251 - RNA, 20 nt, Human
ugccccaaaacccaaaaaag

SEQ ID NO: 238252 - RNA, 22 nt, Human
ugccccaaaacccaaaaaagcc

SEQ ID NO: 238253 - RNA, 21 nt, Human
ugcccccgccgccgccgccgc

SEQ ID NO: 238254 - RNA, 20 nt, Human
ugguaccauggaaugucuga

SEQ ID NO: 238255 - RNA, 22 nt, Human
ugguaucuauuuccugauccag

SEQ ID NO: 238256 - RNA, 23 nt, Human
uguacacugaccuucgccaaagc

SEQ ID NO: 238257 - RNA, 21 nt, Human
ugucacacacauacacauaua

SEQ ID NO: 238258 - RNA, 26 nt, Human
ugucacacacauacacauauaaacac

SEQ ID NO: 238259 - RNA, 20 nt, Human
ugucuguacacugaccuucg

SEQ ID NO: 238260 - RNA, 20 nt, Human
uuacaaagcaguaaaccaaa

SEQ ID NO: 238261 - RNA, 22 nt, Human
uuacugaauucaacccaagugu

SEQ ID NO: 238262 - RNA, 21 nt, Human
uuagucagcaguagccauucc

SEQ ID NO: 238263 - RNA, 18 nt, Human
uuccucauggguagugca

SEQ ID NO: 238264 - RNA, 18 nt, Human
uuccucauggguagugca

SEQ ID NO: 238265 - RNA, 24 nt, Human
uuccugacuuccuggggucucagg

SEQ ID NO: 238266 - RNA, 23 nt, Human
uugcacaaaccaugguaucuauu

SEQ ID NO: 238267 - RNA, 23 nt, Human
uugccgcugcccccgccgccgcc

SEQ ID NO: 238268 - RNA, 19 nt, Human
uugcguaugccauuucccc

SEQ ID NO: 238269 - RNA, 21 nt, Human
uuuacaaaaaacaaaugcccc

SEQ ID NO: 238270 - RNA, 25 nt, Human
uuuccugucacacacauacacauag

SEQ ID NO: 238271 - RNA, 25 nt, Human
uuucugagcacucugguaccaugga

SEQ ID NO: 238272 - RNA, 21 nt, Human
aaaugcuaccaccaccaagcc

SEQ ID NO: 238273 - RNA, 23 nt, Human
acaauccuuccugccucgacacc

SEQ ID NO: 238274 - RNA, 18 nt, Human
acccgugccagccccagc

SEQ ID NO: 238275 - RNA, 21 nt, Human
cacggccaagagcccaggucc

SEQ ID NO: 238276 - RNA, 21 nt, Human
cacucuauuuuuuaaggacuc

SEQ ID NO: 238277 - RNA, 19 nt, Human
cagcagcuggacaucgagg

SEQ ID NO: 238278 - RNA, 18 nt, Human
ccacggaaaugccacggc

SEQ ID NO: 238279 - RNA, 21 nt, Human
ccccagccacccugacggcgg

SEQ ID NO: 238280 - RNA, 22 nt, Human
cccugccgggcugggcucccca

SEQ ID NO: 238281 - RNA, 21 nt, Human
cccugugucgcgacggcagcg

SEQ ID NO: 238282 - RNA, 18 nt, Human
ccuucagucagagcuggg

SEQ ID NO: 238283 - RNA, 18 nt, Human
ccuuccugccucgacacc

SEQ ID NO: 238284 - RNA, 19 nt, Human
cggccaagagcccaggucc

SEQ ID NO: 238285 - RNA, 24 nt, Human
cucgacacccgugccagccccagc

SEQ ID NO: 238286 - RNA, 23 nt, Human
cuuccugccucgacacccgugcc

SEQ ID NO: 238287 - RNA, 24 nt, Human
gagcccagguccuucacgcuggcc

SEQ ID NO: 238288 - RNA, 21 nt, Human
gccagccccagccacccugac

SEQ ID NO: 238289 - RNA, 21 nt, Human
gccucuucccugccgggcugg

SEQ ID NO: 238290 - RNA, 18 nt, Human
ggccaagagcccaggucc

SEQ ID NO: 238291 - RNA, 19 nt, Human
ggcugcagucaccagaaac

SEQ ID NO: 238292 - RNA, 22 nt, Human
guccacggaaaugccacggcca

SEQ ID NO: 238293 - RNA, 18 nt, Human
uccgguggcagaugugua

SEQ ID NO: 238294 - RNA, 24 nt, Human
ucgacacccgugccagccccagcc

SEQ ID NO: 238295 - RNA, 21 nt, Human
ugccucgacacccgugccagc

SEQ ID NO: 238296 - RNA, 18 nt, Human
ugcuaccaccaccaagcc

SEQ ID NO: 238297 - RNA, 24 nt, Human
ugcugaguggaagccaagccccuu

SEQ ID NO: 238298 - RNA, 23 nt, Human
uggacaucgagguccucacuggg

SEQ ID NO: 238299 - RNA, 25 nt, Human
aaaauaacaaaacacucucaucuga

SEQ ID NO: 238300 - RNA, 24 nt, Human
aaagugcugggauuacagguguga

SEQ ID NO: 238301 - RNA, 24 nt, Human
aaagugcugggauuauaggcguga

SEQ ID NO: 238302 - RNA, 24 nt, Human
aaccagccucgaacuccggaccuc

SEQ ID NO: 238303 - RNA, 19 nt, Human
aacuagaucuacccacgca

SEQ ID NO: 238304 - RNA, 22 nt, Human
aacuccggaccucaggugaucc

SEQ ID NO: 238305 - RNA, 25 nt, Human
aagugauuuucccaccucagccucc

SEQ ID NO: 238306 - RNA, 18 nt, Human
aagugcugggauuacagg

SEQ ID NO: 238307 - RNA, 19 nt, Human
aagugcugggauuacaggu

SEQ ID NO: 238308 - RNA, 19 nt, Human
aagugcugggauuauaggc

SEQ ID NO: 238309 - RNA, 19 nt, Human
aagugcugggauuauaggc

SEQ ID NO: 238310 - RNA, 24 nt, Human
aaucccaccucucccaaauucaaa

SEQ ID NO: 238311 - RNA, 28 nt, Human
aauuuuucaauucuccaguccauggagg

SEQ ID NO: 238312 - RNA, 24 nt, Human
acaaccugcuugccucagccuccc

SEQ ID NO: 238313 - RNA, 20 nt, Human
acacugcagccucgaccucc

SEQ ID NO: 238314 - RNA, 24 nt, Human
acacugcagccucgaccuccuggg

SEQ ID NO: 238315 - RNA, 18 nt, Human
acaggguuucacuauguu

SEQ ID NO: 238316 - RNA, 19 nt, Human
acaggguuucacuauguug

SEQ ID NO: 238317 - RNA, 24 nt, Human
acaggguuucacuauguuguuuag

SEQ ID NO: 238318 - RNA, 19 nt, Human
acccaggcuggagugcagu

SEQ ID NO: 238319 - RNA, 20 nt, Human
accucagccuccugaguagc

SEQ ID NO: 238320 - RNA, 23 nt, Human
accucagccuccugaguagcugg

SEQ ID NO: 238321 - RNA, 24 nt, Human
acuauguuguuuaggcuggucucg

SEQ ID NO: 238322 - RNA, 18 nt, Human
acucugucacccaggcug

SEQ ID NO: 238323 - RNA, 25 nt, Human
acucugucacccaggcuggagggca

SEQ ID NO: 238324 - RNA, 27 nt, Human
acucuguugcccaggcuggagugcaau

SEQ ID NO: 238325 - RNA, 19 nt, Human
acugaucacccugccauuu

SEQ ID NO: 238326 - RNA, 21 nt, Human
acugcaaccucugcuuccugg

SEQ ID NO: 238327 - RNA, 22 nt, Human
acugcaaccucugcuuccuggg

SEQ ID NO: 238328 - RNA, 24 nt, Human
acugcaacuccaccucccagguuc

SEQ ID NO: 238329 - RNA, 19 nt, Human
acugcagccucgaccuccu

SEQ ID NO: 238330 - RNA, 18 nt, Human
agcccagcccccacccaa

SEQ ID NO: 238331 - RNA, 18 nt, Human
agccuccugaguagcuag

SEQ ID NO: 238332 - RNA, 18 nt, Human
agccucgaccuccugggc

SEQ ID NO: 238333 - RNA, 24 nt, Human
agcgauucuccugccucagccucc

SEQ ID NO: 238334 - RNA, 23 nt, Human
aggaacuccuuaucaguguggac

SEQ ID NO: 238335 - RNA, 23 nt, Human
aggcgugagucaccgcgcccggc

SEQ ID NO: 238336 - RNA, 25 nt, Human
aggcuggagugcaauggugggaucu

SEQ ID NO: 238337 - RNA, 25 nt, Human
aggcuggagugcagucccaugaucu

SEQ ID NO: 238338 - RNA, 21 nt, Human
aggcuguuuacaccgcagagg

SEQ ID NO: 238339 - RNA, 22 nt, Human
aggcuguuuacaccgcagaggc

SEQ ID NO: 238340 - RNA, 20 nt, Human
agggcagugucacaaucaca

SEQ ID NO: 238341 - RNA, 24 nt, Human
aggugauccacccacuucggccuc

SEQ ID NO: 238342 - RNA, 20 nt, Human
aggugugagccaccgugccc

SEQ ID NO: 238343 - RNA, 23 nt, Human
aggugugagccaccgugcccggc

SEQ ID NO: 238344 - RNA, 22 nt, Human
aguagagaugggguuucgccau

SEQ ID NO: 238345 - RNA, 18 nt, Human
aguagcuaggauuacagg

SEQ ID NO: 238346 - RNA, 18 nt, Human
aguagcugggauuacggg

SEQ ID NO: 238347 - RNA, 24 nt, Human
agugauuuucccaccucagccucc

SEQ ID NO: 238348 - RNA, 23 nt, Human
agugcaauggugggaucucagcu

SEQ ID NO: 238349 - RNA, 24 nt, Human
agugcagucccaugaucucggcuc

SEQ ID NO: 238350 - RNA, 22 nt, Human
agugcugggauuauagguguga

SEQ ID NO: 238351 - RNA, 24 nt, Human
auagugcugggauuauagguguga

SEQ ID NO: 238352 - RNA, 22 nt, Human
aucccaccucucccaaauucaa

SEQ ID NO: 238353 - RNA, 18 nt, Human
augggcagauauuccagc

SEQ ID NO: 238354 - RNA, 20 nt, Human
augggguuucgccaugcugg

SEQ ID NO: 238355 - RNA, 24 nt, Human
augggguuucgucaugauguccaa

SEQ ID NO: 238356 - RNA, 18 nt, Human
augguagccacaugugug

SEQ ID NO: 238357 - RNA, 18 nt, Human
caaaacacucucaucuga

SEQ ID NO: 238358 - RNA, 24 nt, Human
caaagugcugggauuacaggugug

SEQ ID NO: 238359 - RNA, 24 nt, Human
caaagugcugggauuauaggcgug

SEQ ID NO: 238360 - RNA, 22 nt, Human
caacuccaccucccagguucaa

SEQ ID NO: 238361 - RNA, 24 nt, Human
caagaccacagaggagaugauuca

SEQ ID NO: 238362 - RNA, 22 nt, Human
caagcaauucuccugccucagc

SEQ ID NO: 238363 - RNA, 22 nt, Human
caagcgauucuccugccucagc

SEQ ID NO: 238364 - RNA, 24 nt, Human
caaggacgcugcagcccaugcugu

SEQ ID NO: 238365 - RNA, 22 nt, Human
caagugauuuucccaccucagc

SEQ ID NO: 238366 - RNA, 21 nt, Human
cacacugcagccucgaccucc

SEQ ID NO: 238367 - RNA, 24 nt, Human
cacacugcagccucgaccuccugg

SEQ ID NO: 238368 - RNA, 22 nt, Human
cacaggcacaugccaccacacc

SEQ ID NO: 238369 - RNA, 21 nt, Human
caccaucagccacaaccuguu

SEQ ID NO: 238370 - RNA, 22 nt, Human
cacccaucucggccucccaaag

SEQ ID NO: 238371 - RNA, 23 nt, Human
cacccaucucggccucccaaagu

SEQ ID NO: 238372 - RNA, 23 nt, Human
cacccugccauuuagugcuucuu

SEQ ID NO: 238373 - RNA, 19 nt, Human
caccgugcccggccaaagu

SEQ ID NO: 238374 - RNA, 19 nt, Human
caccucucccaaauucaaa

SEQ ID NO: 238375 - RNA, 20 nt, Human
caccuguugagaauaaaaug

SEQ ID NO: 238376 - RNA, 24 nt, Human
cacuauguuguuuaggcuggucuc

SEQ ID NO: 238377 - RNA, 22 nt, Human
cacucugucacccaggcuggag

SEQ ID NO: 238378 - RNA, 25 nt, Human
cacucugucacccaggcuggagggc

SEQ ID NO: 238379 - RNA, 24 nt, Human
cacucuguugcccaggcuggagug

SEQ ID NO: 238380 - RNA, 25 nt, Human
cacugaagacuucccaugaacagcc

SEQ ID NO: 238381 - RNA, 20 nt, Human
cacugcaacuccaccuccca

SEQ ID NO: 238382 - RNA, 23 nt, Human
cacugcagccucgaccuccuggg

SEQ ID NO: 238383 - RNA, 22 nt, Human
cacuuccucaacuagaucuacc

SEQ ID NO: 238384 - RNA, 22 nt, Human
cagcccagcccccacccaaauu

SEQ ID NO: 238385 - RNA, 19 nt, Human
cagccuccugaguagcuag

SEQ ID NO: 238386 - RNA, 20 nt, Human
cagccuccugaguagcuggg

SEQ ID NO: 238387 - RNA, 20 nt, Human
cagccuccugaguagcuggg

SEQ ID NO: 238388 - RNA, 24 nt, Human
cagccucgaccuccugggcucaag

SEQ ID NO: 238389 - RNA, 23 nt, Human
cagccuuuguuucuucaaggccu

SEQ ID NO: 238390 - RNA, 26 nt, Human
caggacccccagggugaccacucagg

SEQ ID NO: 238391 - RNA, 24 nt, Human
caggguuucacuauguuguuuagg

SEQ ID NO: 238392 - RNA, 22 nt, Human
cauagugcugggauuauaggug

SEQ ID NO: 238393 - RNA, 24 nt, Human
cauagugcugggauuauaggugug

SEQ ID NO: 238394 - RNA, 23 nt, Human
cauaugugacagugaaacaaggu

SEQ ID NO: 238395 - RNA, 24 nt, Human
caugccaccacaccuggcuaauuu

SEQ ID NO: 238396 - RNA, 24 nt, Human
caugcuggccaaaccagccucgaa

SEQ ID NO: 238397 - RNA, 18 nt, Human
cauggccaucuuggagga

SEQ ID NO: 238398 - RNA, 24 nt, Human
caugugaacuccaucccccaaccc

SEQ ID NO: 238399 - RNA, 20 nt, Human
ccaaaaaaacaaauaacuag

SEQ ID NO: 238400 - RNA, 20 nt, Human
ccaaagugcugggauuacag

SEQ ID NO: 238401 - RNA, 21 nt, Human
ccaaagugcugggauuacagg

SEQ ID NO: 238402 - RNA, 21 nt, Human
ccaaagugcugggauuacagg

SEQ ID NO: 238403 - RNA, 24 nt, Human
ccaaagugcugggauuacaggugu

SEQ ID NO: 238404 - RNA, 22 nt, Human
ccaaagugcugggauuauaggc

SEQ ID NO: 238405 - RNA, 24 nt, Human
ccaaagugcugggauuauaggcgu

SEQ ID NO: 238406 - RNA, 23 nt, Human
ccaccucagccuccugaguagcu

SEQ ID NO: 238407 - RNA, 22 nt, Human
ccacgcaccaucugagcaucuc

SEQ ID NO: 238408 - RNA, 22 nt, Human
ccacuggaugguacugggcaag

SEQ ID NO: 238409 - RNA, 21 nt, Human
ccauagugcugggauuauagg

SEQ ID NO: 238410 - RNA, 24 nt, Human
ccauagugcugggauuauaggugu

SEQ ID NO: 238411 - RNA, 21 nt, Human
cccaccacgcccggcuaauuu

SEQ ID NO: 238412 - RNA, 26 nt, Human
cccagccugggccuugaaccgguucc

SEQ ID NO: 238413 - RNA, 18 nt, Human
cccaggcuggagugcaau

SEQ ID NO: 238414 - RNA, 19 nt, Human
cccaggcuggagugcaaug

SEQ ID NO: 238415 - RNA, 20 nt, Human
cccagguucaagcgauucuc

SEQ ID NO: 238416 - RNA, 23 nt, Human
cccagguucaagcgauucuccug

SEQ ID NO: 238417 - RNA, 19 nt, Human
cccaugaacagccaggccc

SEQ ID NO: 238418 - RNA, 18 nt, Human
cccaugggcucccucugg

SEQ ID NO: 238419 - RNA, 24 nt, Human
ccggaccucaggugauccacccac

SEQ ID NO: 238420 - RNA, 24 nt, Human
ccucccagguucaagcgauucucc

SEQ ID NO: 238421 - RNA, 20 nt, Human
ccuccugggcucaagugauu

SEQ ID NO: 238422 - RNA, 20 nt, Human
ccucgaccuccugggcucaa

SEQ ID NO: 238423 - RNA, 22 nt, Human
ccucgaccuccugggcucaagu

SEQ ID NO: 238424 - RNA, 23 nt, Human
ccugaguagcuaggauuacaggc

SEQ ID NO: 238425 - RNA, 24 nt, Human
ccugaguagcuaggauuacaggca

SEQ ID NO: 238426 - RNA, 22 nt, Human
ccugaguagcugggauuacggg

SEQ ID NO: 238427 - RNA, 23 nt, Human
ccugaguagcugggauuacgggu

SEQ ID NO: 238428 - RNA, 24 nt, Human
ccugaguagcugggauuacgggug

SEQ ID NO: 238429 - RNA, 23 nt, Human
ccugccucagccuccugaguagc

SEQ ID NO: 238430 - RNA, 23 nt, Human
ccugccucagccuccugaguagc

SEQ ID NO: 238431 - RNA, 24 nt, Human
ccugccucagccuccugaguagcu

SEQ ID NO: 238432 - RNA, 18 nt, Human
ccugcuugccucagccuc

SEQ ID NO: 238433 - RNA, 21 nt, Human
ccugggccuugaacauuccua

SEQ ID NO: 238434 - RNA, 22 nt, Human
ccugggcucaagugauuuuccc

SEQ ID NO: 238435 - RNA, 23 nt, Human
ccuggguucaagcaauucuccug

SEQ ID NO: 238436 - RNA, 20 nt, Human
ccuuuguuucuucaaggccu

SEQ ID NO: 238437 - RNA, 27 nt, Human
cgccaugcuggccaaaccagccucgaa

SEQ ID NO: 238438 - RNA, 19 nt, Human
cucaaaauccuguucucaa

SEQ ID NO: 238439 - RNA, 23 nt, Human
cucaagugauuuucccaccucag

SEQ ID NO: 238440 - RNA, 24 nt, Human
cucaagugauuuucccaccucagc

SEQ ID NO: 238441 - RNA, 24 nt, Human
cucacucugucacccaggcuggag

SEQ ID NO: 238442 - RNA, 24 nt, Human
cucacucuguugcccaggcuggag

SEQ ID NO: 238443 - RNA, 23 nt, Human
cucacugcaacuccaccucccag

SEQ ID NO: 238444 - RNA, 24 nt, Human
cucagccuccugaguagcugggac

SEQ ID NO: 238445 - RNA, 24 nt, Human
cucagccuccugaguagcugggau

SEQ ID NO: 238446 - RNA, 18 nt, Human
cuccugaccucaugauuc

SEQ ID NO: 238447 - RNA, 24 nt, Human
cuccugaguagcuaggauuacagg

SEQ ID NO: 238448 - RNA, 24 nt, Human
cuccugaguagcugggaccacagg

SEQ ID NO: 238449 - RNA, 20 nt, Human
cucugucacccaggcuggag

SEQ ID NO: 238450 - RNA, 23 nt, Human
cucugucacccaggcuggagugc

SEQ ID NO: 238451 - RNA, 24 nt, Human
cucuuuucacaaucccuuuaucuu

SEQ ID NO: 238452 - RNA, 23 nt, Human
cugcaaccucugcuuccuggguu

SEQ ID NO: 238453 - RNA, 24 nt, Human
cugcaaccucugcuuccuggguuc

SEQ ID NO: 238454 - RNA, 23 nt, Human
cugcagccucgaccuccugggcu

SEQ ID NO: 238455 - RNA, 23 nt, Human
cugccucagccuccugaguagcu

SEQ ID NO: 238456 - RNA, 24 nt, Human
cuggagugcagucccaugaucucg

SEQ ID NO: 238457 - RNA, 21 nt, Human
cugggauuauaggugugagcc

SEQ ID NO: 238458 - RNA, 20 nt, Human
cugggcucaagugauuuucc

SEQ ID NO: 238459 - RNA, 22 nt, Human
cuguugagaauaaaauguuugg

SEQ ID NO: 238460 - RNA, 24 nt, Human
cuuccuggguucaagcaauucucc

SEQ ID NO: 238461 - RNA, 24 nt, Human
cuugccucagccucccauagugcu

SEQ ID NO: 238462 - RNA, 21 nt, Human
cuugcuaggaacuccuuauca

SEQ ID NO: 238463 - RNA, 21 nt, Human
gaacuccaucccccaaccccc

SEQ ID NO: 238464 - RNA, 24 nt, Human
gaccucaggugauccacccacuuc

SEQ ID NO: 238465 - RNA, 22 nt, Human
gaccucaugauucacccaucuc

SEQ ID NO: 238466 - RNA, 18 nt, Human
gagaugggguuucgccau

SEQ ID NO: 238467 - RNA, 24 nt, Human
gagaugggguuucgccaugcuggc

SEQ ID NO: 238468 - RNA, 18 nt, Human
gagaugggguuucgucau

SEQ ID NO: 238469 - RNA, 22 nt, Human
gagaugggguuucgucaugaug

SEQ ID NO: 238470 - RNA, 23 nt, Human
gagggcagugucacaaucacagc

SEQ ID NO: 238471 - RNA, 26 nt, Human
gaguagcuaggauuacaggcaacugc

SEQ ID NO: 238472 - RNA, 25 nt, Human
gaguagcugggaccacaggcacaug

SEQ ID NO: 238473 - RNA, 22 nt, Human
gaguagcugggauuacgggugc

SEQ ID NO: 238474 - RNA, 24 nt, Human
gauuacaggcaacugccaccaugc

SEQ ID NO: 238475 - RNA, 18 nt, Human
gauuacaggugugagcca

SEQ ID NO: 238476 - RNA, 21 nt, Human
gauuacaggugugagccacca

SEQ ID NO: 238477 - RNA, 22 nt, Human
gauuacaggugugagccaccac

SEQ ID NO: 238478 - RNA, 20 nt, Human
gauuauaggcgugagucacc

SEQ ID NO: 238479 - RNA, 18 nt, Human
gauuauaggugugagcca

SEQ ID NO: 238480 - RNA, 20 nt, Human
gauuauaggugugagccacc

SEQ ID NO: 238481 - RNA, 21 nt, Human
gauuauaggugugagccaccg

SEQ ID NO: 238482 - RNA, 23 nt, Human
gcaaaugaaccuggaaauaucaa

SEQ ID NO: 238483 - RNA, 21 nt, Human
gcaacuccaccucccagguuc

SEQ ID NO: 238484 - RNA, 19 nt, Human
gcccagcccccacccaaau

SEQ ID NO: 238485 - RNA, 23 nt, Human
gcccagcuaauuuuuuguauuuu

SEQ ID NO: 238486 - RNA, 19 nt, Human
gccccgaggggcgggcacu

SEQ ID NO: 238487 - RNA, 24 nt, Human
gcccggcccucuugucuucucuua

SEQ ID NO: 238488 - RNA, 19 nt, Human
gccuagauuguaccuacaa

SEQ ID NO: 238489 - RNA, 23 nt, Human
gcgauucuccugccucagccucc

SEQ ID NO: 238490 - RNA, 19 nt, Human
gcucaagugauuuucccac

SEQ ID NO: 238491 - RNA, 22 nt, Human
gcucaagugauuuucccaccuc

SEQ ID NO: 238492 - RNA, 23 nt, Human
gcuggucucgaacuccugaccuc

SEQ ID NO: 238493 - RNA, 21 nt, Human
gcuguauguaagcuccccuca

SEQ ID NO: 238494 - RNA, 22 nt, Human
ggaaacacugaaagaucagccg

SEQ ID NO: 238495 - RNA, 23 nt, Human
ggagucucacucuguugcccagg

SEQ ID NO: 238496 - RNA, 22 nt, Human
ggauuacaggcaacugccacca

SEQ ID NO: 238497 - RNA, 23 nt, Human
ggcacugacaguccuggccugcc

SEQ ID NO: 238498 - RNA, 18 nt, Human
ggccgagccggaagaagc

SEQ ID NO: 238499 - RNA, 24 nt, Human
ggcuggucucgaacuccugaccuc

SEQ ID NO: 238500 - RNA, 19 nt, Human
gggcagauauuccagccuu

SEQ ID NO: 238501 - RNA, 22 nt, Human
gggcucaagugauuuucccacc

SEQ ID NO: 238502 - RNA, 18 nt, Human
gggguuucgccaugcugg

SEQ ID NO: 238503 - RNA, 19 nt, Human
ggucucgaacuccugaccu

SEQ ID NO: 238504 - RNA, 21 nt, Human
guacugggcaagaccacagag

SEQ ID NO: 238505 - RNA, 28 nt, Human
guagaagccagcccagcccccacccaaa

SEQ ID NO: 238506 - RNA, 21 nt, Human
gucacugcagaaagcuccacu

SEQ ID NO: 238507 - RNA, 24 nt, Human
gugauccacccacuucggccuccc

SEQ ID NO: 238508 - RNA, 24 nt, Human
gugauuuucccaccucagccuccu

SEQ ID NO: 238509 - RNA, 21 nt, Human
guggagaugggguuucgucau

SEQ ID NO: 238510 - RNA, 22 nt, Human
guggagaugggguuucgucaug

SEQ ID NO: 238511 - RNA, 21 nt, Human
uaaaacauauuaaaugugcau

SEQ ID NO: 238512 - RNA, 19 nt, Human
uaacacauaccuuagcaug

SEQ ID NO: 238513 - RNA, 22 nt, Human
uaacaugaaauaauuauauauc

SEQ ID NO: 238514 - RNA, 24 nt, Human
uaacuucaguauuuggucuuuuag

SEQ ID NO: 238515 - RNA, 20 nt, Human
uaaguggaagcaguccucca

SEQ ID NO: 238516 - RNA, 24 nt, Human
uaauagagacaggguuucacuaug

SEQ ID NO: 238517 - RNA, 19 nt, Human
uaaugaaucccaccucucc

SEQ ID NO: 238518 - RNA, 24 nt, Human
uaauuuuuugcauuuuuaauagag

SEQ ID NO: 238519 - RNA, 24 nt, Human
uaauuuuuuguauuuuuaguagag

SEQ ID NO: 238520 - RNA, 24 nt, Human
uacaggcaacugccaccaugccca

SEQ ID NO: 238521 - RNA, 23 nt, Human
uacaggugugagccaccacaccc

SEQ ID NO: 238522 - RNA, 19 nt, Human
uaccccagauuaacuucca

SEQ ID NO: 238523 - RNA, 20 nt, Human
uaccugccccgaggggcggg

SEQ ID NO: 238524 - RNA, 23 nt, Human
uacugcaaccucugcuuccuggg

SEQ ID NO: 238525 - RNA, 21 nt, Human
uagagacaggguuucacuaug

SEQ ID NO: 238526 - RNA, 22 nt, Human
uagagacaggguuucacuaugu

SEQ ID NO: 238527 - RNA, 20 nt, Human
uagagaugggguuucgccau

SEQ ID NO: 238528 - RNA, 22 nt, Human
uagccacauguguguggggucc

SEQ ID NO: 238529 - RNA, 21 nt, Human
uaggaacuccuuaucagugug

SEQ ID NO: 238530 - RNA, 21 nt, Human
uaggauuacaggcaacugcca

SEQ ID NO: 238531 - RNA, 22 nt, Human
uaggauuacaggcaacugccac

SEQ ID NO: 238532 - RNA, 24 nt, Human
uaggauuacaggcaacugccacca

SEQ ID NO: 238533 - RNA, 25 nt, Human
uaggauuacaggcaacugccaccau

SEQ ID NO: 238534 - RNA, 24 nt, Human
uaguagagaugggguuucgccaug

SEQ ID NO: 238535 - RNA, 26 nt, Human
uaguagagcuaauaaauuugaauugu

SEQ ID NO: 238536 - RNA, 21 nt, Human
uaucucuacaaacauauucaa

SEQ ID NO: 238537 - RNA, 24 nt, Human
uauguuguuuaggcuggucucgaa

SEQ ID NO: 238538 - RNA, 19 nt, Human
ucaagcaauucuccugccu

SEQ ID NO: 238539 - RNA, 24 nt, Human
ucacccaggcuggagggcaguguc

SEQ ID NO: 238540 - RNA, 22 nt, Human
ucacccaggcuggagugcaguc

SEQ ID NO: 238541 - RNA, 22 nt, Human
ucacuauguuguuuaggcuggu

SEQ ID NO: 238542 - RNA, 24 nt, Human
ucacucuguugcccaggcuggagu

SEQ ID NO: 238543 - RNA, 18 nt, Human
ucacugcaacuccaccuc

SEQ ID NO: 238544 - RNA, 23 nt, Human
ucacugcaacuccaccucccagg

SEQ ID NO: 238545 - RNA, 20 nt, Human
ucagccuccugaguagcugg

SEQ ID NO: 238546 - RNA, 23 nt, Human
ucagccuccugaguagcugggac

SEQ ID NO: 238547 - RNA, 19 nt, Human
ucaggucaaacccaaggcu

SEQ ID NO: 238548 - RNA, 19 nt, Human
uccauggagggagauacuc

SEQ ID NO: 238549 - RNA, 23 nt, Human
uccauggagggagauacucaugu

SEQ ID NO: 238550 - RNA, 22 nt, Human
uccauuacccuacauggccauc

SEQ ID NO: 238551 - RNA, 23 nt, Human
ucccaaagugcugggauuacagg

SEQ ID NO: 238552 - RNA, 24 nt, Human
ucccaaagugcugggauuauaggc

SEQ ID NO: 238553 - RNA, 21 nt, Human
ucccagguucaagcgauucuc

SEQ ID NO: 238554 - RNA, 24 nt, Human
ucccagguucaagcgauucuccug

SEQ ID NO: 238555 - RNA, 23 nt, Human
ucccauagugcugggauuauagg

SEQ ID NO: 238556 - RNA, 19 nt, Human
ucccccaacccccucgcug

SEQ ID NO: 238557 - RNA, 19 nt, Human
uccugaguagcuaggauua

SEQ ID NO: 238558 - RNA, 24 nt, Human
uccugaguagcuaggauuacaggc

SEQ ID NO: 238559 - RNA, 24 nt, Human
uccugaguagcugggaccacaggc

SEQ ID NO: 238560 - RNA, 24 nt, Human
uccugaguagcugggauuacgggu

SEQ ID NO: 238561 - RNA, 18 nt, Human
uccugggcucaaacaacc

SEQ ID NO: 238562 - RNA, 21 nt, Human
uccugggcucaaacaaccugc

SEQ ID NO: 238563 - RNA, 21 nt, Human
uccugggcucaagugauuuuc

SEQ ID NO: 238564 - RNA, 22 nt, Human
uccugggcucaagugauuuucc

SEQ ID NO: 238565 - RNA, 23 nt, Human
uccugggcucaagugauuuuccc

SEQ ID NO: 238566 - RNA, 24 nt, Human
uccugggcucaagugauuuuccca

SEQ ID NO: 238567 - RNA, 20 nt, Human
uccuggguucaagcaauucu

SEQ ID NO: 238568 - RNA, 21 nt, Human
uccuggguucaagcaauucuc

SEQ ID NO: 238569 - RNA, 24 nt, Human
uccuggguucaagcaauucuccug

SEQ ID NO: 238570 - RNA, 19 nt, Human
ucucaaauuccugggcuca

SEQ ID NO: 238571 - RNA, 23 nt, Human
ucucacucugucacccaggcugg

SEQ ID NO: 238572 - RNA, 24 nt, Human
ucucacucugucacccaggcugga

SEQ ID NO: 238573 - RNA, 26 nt, Human
ucucacucugucacccaggcuggagg

SEQ ID NO: 238574 - RNA, 27 nt, Human
ucucacucugucacccaggcuggaggg

SEQ ID NO: 238575 - RNA, 23 nt, Human
ucucacucuguugcccaggcugg

SEQ ID NO: 238576 - RNA, 24 nt, Human
ucucacucuguugcccaggcugga

SEQ ID NO: 238577 - RNA, 26 nt, Human
ucucacucuguugcccaggcuggagu

SEQ ID NO: 238578 - RNA, 27 nt, Human
ucucacucuguugcccaggcuggagug

SEQ ID NO: 238579 - RNA, 24 nt, Human
ucuccugccucagccuccugagua

SEQ ID NO: 238580 - RNA, 24 nt, Human
ucuccugccucagccuccugagua

SEQ ID NO: 238581 - RNA, 21 nt, Human
ucucgaacuccugaccucaug

SEQ ID NO: 238582 - RNA, 20 nt, Human
ucucggccucccaaagugcu

SEQ ID NO: 238583 - RNA, 24 nt, Human
ucucucuuuuuuuuuuugagaugg

SEQ ID NO: 238584 - RNA, 23 nt, Human
ucugcaggucugaaccccagccu

SEQ ID NO: 238585 - RNA, 19 nt, Human
ucuggcucugucacccagg

SEQ ID NO: 238586 - RNA, 23 nt, Human
ucuggcucugucacccaggcugg

SEQ ID NO: 238587 - RNA, 24 nt, Human
ucuggcucugucacccaggcugga

SEQ ID NO: 238588 - RNA, 24 nt, Human
ucugucacccaggcuggagugcag

SEQ ID NO: 238589 - RNA, 21 nt, Human
ucuguccugaccaaguaacac

SEQ ID NO: 238590 - RNA, 18 nt, Human
ucuguugcccaggcugga

SEQ ID NO: 238591 - RNA, 24 nt, Human
ucuguugcccaggcuggagugcaa

SEQ ID NO: 238592 - RNA, 20 nt, Human
ucuucaugugaacuccaucc

SEQ ID NO: 238593 - RNA, 22 nt, Human
ugaaacaagguuuuuaaacaaa

SEQ ID NO: 238594 - RNA, 21 nt, Human
ugaacuccaucccccaacccc

SEQ ID NO: 238595 - RNA, 22 nt, Human
ugacagugaaacaagguuuuua

SEQ ID NO: 238596 - RNA, 21 nt, Human
ugacauaagagcccaaagucu

SEQ ID NO: 238597 - RNA, 21 nt, Human
ugaccaaguaacacauggugc

SEQ ID NO: 238598 - RNA, 22 nt, Human
ugaccaaguaacacauggugcc

SEQ ID NO: 238599 - RNA, 18 nt, Human
ugaccacucaggacugga

SEQ ID NO: 238600 - RNA, 19 nt, Human
ugagaauaaaauguuugga

SEQ ID NO: 238601 - RNA, 20 nt, Human
ugagacagggucucacucug

SEQ ID NO: 238602 - RNA, 22 nt, Human
ugagccaccacacccggccccu

SEQ ID NO: 238603 - RNA, 20 nt, Human
ugauuccugaaaacaaugca

SEQ ID NO: 238604 - RNA, 19 nt, Human
ugcaaccucugcuuccugg

SEQ ID NO: 238605 - RNA, 18 nt, Human
ugcaacuccaccucccag

SEQ ID NO: 238606 - RNA, 18 nt, Human
ugcaauggugggaucuca

SEQ ID NO: 238607 - RNA, 18 nt, Human
ugcauuauuuggaaaaaa

SEQ ID NO: 238608 - RNA, 20 nt, Human
ugccauuuagugcuucuucc

SEQ ID NO: 238609 - RNA, 18 nt, Human
ugcccaaagcaugggcag

SEQ ID NO: 238610 - RNA, 18 nt, Human
ugcccaggcuggagugca

SEQ ID NO: 238611 - RNA, 21 nt, Human
ugcccaggcuggagugcaaug

SEQ ID NO: 238612 - RNA, 24 nt, Human
ugcccaggcuggagugcaauggug

SEQ ID NO: 238613 - RNA, 24 nt, Human
ugccucagccucccauagugcugg

SEQ ID NO: 238614 - RNA, 24 nt, Human
ugccucagccuccugaguagcuag

SEQ ID NO: 238615 - RNA, 24 nt, Human
ugccucagccuccugaguagcugg

SEQ ID NO: 238616 - RNA, 18 nt, Human
ugccuugacccagccagc

SEQ ID NO: 238617 - RNA, 24 nt, Human
ugcugggauuacaggugugagcca

SEQ ID NO: 238618 - RNA, 28 nt, Human
uggagcacucucucaugggaauuuuccc

SEQ ID NO: 238619 - RNA, 24 nt, Human
uggagucucacucuguugcccagg

SEQ ID NO: 238620 - RNA, 20 nt, Human
uggagugcaauggugggauc

SEQ ID NO: 238621 - RNA, 23 nt, Human
uggagugcaauggugggaucuca

SEQ ID NO: 238622 - RNA, 19 nt, Human
uggagugcagucccaugau

SEQ ID NO: 238623 - RNA, 24 nt, Human
uggagugcagucccaugaucucgg

SEQ ID NO: 238624 - RNA, 24 nt, Human
uggcucugucacccaggcuggagu

SEQ ID NO: 238625 - RNA, 21 nt, Human
ugggaccacaggcacaugcca

SEQ ID NO: 238626 - RNA, 24 nt, Human
ugggaccacaggcacaugccacca

SEQ ID NO: 238627 - RNA, 23 nt, Human
ugggaugucaauaauaaccuuuu

SEQ ID NO: 238628 - RNA, 18 nt, Human
ugggauuacaggugugag

SEQ ID NO: 238629 - RNA, 19 nt, Human
ugggauuacaggugugagc

SEQ ID NO: 238630 - RNA, 22 nt, Human
ugggauuacaggugugagccac

SEQ ID NO: 238631 - RNA, 23 nt, Human
ugggauuacaggugugagccacc

SEQ ID NO: 238632 - RNA, 24 nt, Human
ugggauuacaggugugagccacca

SEQ ID NO: 238633 - RNA, 19 nt, Human
ugggauuacgggugcccac

SEQ ID NO: 238634 - RNA, 21 nt, Human
ugggauuacgggugcccacca

SEQ ID NO: 238635 - RNA, 18 nt, Human
ugggauuauaggcgugag

SEQ ID NO: 238636 - RNA, 21 nt, Human
ugggauuauaggcgugaguca

SEQ ID NO: 238637 - RNA, 22 nt, Human
ugggauuauaggcgugagucac

SEQ ID NO: 238638 - RNA, 23 nt, Human
ugggauuauaggcgugagucacc

SEQ ID NO: 238639 - RNA, 24 nt, Human
ugggauuauaggcgugagucaccg

SEQ ID NO: 238640 - RNA, 21 nt, Human
ugggauuauaggugugagcca

SEQ ID NO: 238641 - RNA, 22 nt, Human
ugggauuauaggugugagccac

SEQ ID NO: 238642 - RNA, 23 nt, Human
ugggauuauaggugugagccacc

SEQ ID NO: 238643 - RNA, 23 nt, Human
ugggauuauaggugugagccacc

SEQ ID NO: 238644 - RNA, 24 nt, Human
ugggauuauaggugugagccaccg

SEQ ID NO: 238645 - RNA, 24 nt, Human
ugggcucaagugauuuucccaccu

SEQ ID NO: 238646 - RNA, 19 nt, Human
ugggguuucgccaugcugg

SEQ ID NO: 238647 - RNA, 21 nt, Human
uggguucaagcaauucuccug

SEQ ID NO: 238648 - RNA, 23 nt, Human
uggguucaagcaauucuccugcc

SEQ ID NO: 238649 - RNA, 24 nt, Human
uggguucaagcaauucuccugccu

SEQ ID NO: 238650 - RNA, 18 nt, Human
ugguagccacaugugugu

SEQ ID NO: 238651 - RNA, 24 nt, Human
uggugggaucucagcuuacugcaa

SEQ ID NO: 238652 - RNA, 19 nt, Human
ugugacagugaaacaaggu

SEQ ID NO: 238653 - RNA, 20 nt, Human
uguugcccaggcuggagugc

SEQ ID NO: 238654 - RNA, 24 nt, Human
uguugcuaaacauguagaagccag

SEQ ID NO: 238655 - RNA, 24 nt, Human
uguuuaggcuggucucgaacuccu

SEQ ID NO: 238656 - RNA, 19 nt, Human
uuaaauaguaucucuacaa

SEQ ID NO: 238657 - RNA, 18 nt, Human
uuaaaugugcauuauuug

SEQ ID NO: 238658 - RNA, 21 nt, Human
uuaauagagacaggguuucac

SEQ ID NO: 238659 - RNA, 24 nt, Human
uuaauagagacaggguuucacuau

SEQ ID NO: 238660 - RNA, 19 nt, Human
uuacccuacauggccaucu

SEQ ID NO: 238661 - RNA, 24 nt, Human
uuacugcaaccucugcuuccuggg

SEQ ID NO: 238662 - RNA, 18 nt, Human
uuaguagagaugggguuu

SEQ ID NO: 238663 - RNA, 22 nt, Human
uuaguagagaugggguuucgcc

SEQ ID NO: 238664 - RNA, 24 nt, Human
uuaguagagaugggguuucgccau

SEQ ID NO: 238665 - RNA, 21 nt, Human
uucaagcaauucuccugccuc

SEQ ID NO: 238666 - RNA, 24 nt, Human
uucaagcaauucuccugccucagc

SEQ ID NO: 238667 - RNA, 21 nt, Human
uucaagcgauucuccugccuc

SEQ ID NO: 238668 - RNA, 23 nt, Human
uucaagcgauucuccugccucag

SEQ ID NO: 238669 - RNA, 24 nt, Human
uucaagcgauucuccugccucagc

SEQ ID NO: 238670 - RNA, 20 nt, Human
uucacaaucccuuuaucuuu

SEQ ID NO: 238671 - RNA, 24 nt, Human
uucacaaucccuuuaucuuuuucu

SEQ ID NO: 238672 - RNA, 23 nt, Human
uucccaccucagccuccugagua

SEQ ID NO: 238673 - RNA, 22 nt, Human
uuccucugcaggucugaacccc

SEQ ID NO: 238674 - RNA, 19 nt, Human
uuccugggcucaaacaacc

SEQ ID NO: 238675 - RNA, 23 nt, Human
uuccuucuuagucacaaaagcug

SEQ ID NO: 238676 - RNA, 23 nt, Human
uucuaaguggaagcaguccucca

SEQ ID NO: 238677 - RNA, 19 nt, Human
uugaacauuccuaggcacu

SEQ ID NO: 238678 - RNA, 25 nt, Human
uugagacagagucuggcucugucac

SEQ ID NO: 238679 - RNA, 22 nt, Human
uugagacagggucucacucugu

SEQ ID NO: 238680 - RNA, 18 nt, Human
uugcccaggcuggagugc

SEQ ID NO: 238681 - RNA, 23 nt, Human
uuguauuuuuaguagagaugggg

SEQ ID NO: 238682 - RNA, 24 nt, Human
uuguggagaugggguuucgucaug

SEQ ID NO: 238683 - RNA, 18 nt, Human
uuuacaccgcagaggcug

SEQ ID NO: 238684 - RNA, 19 nt, Human
uuucaaaauaacaaaacac

SEQ ID NO: 238685 - RNA, 19 nt, Human
uuugacauuugaaaaccau

SEQ ID NO: 238686 - RNA, 24 nt, Human
uuuguggagaugggguuucgucau

SEQ ID NO: 238687 - RNA, 24 nt, Human
uuuuuaauagagacaggguuucac

SEQ ID NO: 238688 - RNA, 22 nt, Human
uuuuuaguagagaugggguuuc

SEQ ID NO: 238689 - RNA, 23 nt, Human
uuuuuaguagagaugggguuucg

SEQ ID NO: 238690 - RNA, 21 nt, Human
uuuuuguauuuuuaguagaga

SEQ ID NO: 238691 - RNA, 24 nt, Human
uuuuuuguauuuuuaguagagaug

SEQ ID NO: 238692 - RNA, 23 nt, Human
uuuuuuguggagaugggguuucg

SEQ ID NO: 238693 - RNA, 24 nt, Human
uuuuuuguggagaugggguuucgu

SEQ ID NO: 238694 - RNA, 23 nt, Human
uuuuuuuuugagacagagucugg

SEQ ID NO: 238695 - RNA, 25 nt, Human
uuuuuuuuuuugagacagagucugg

SEQ ID NO: 238696 - RNA, 23 nt, Human
aagaagcggagcuggguggggag

SEQ ID NO: 238697 - RNA, 23 nt, Human
agagaguggaagggcagagaggc

SEQ ID NO: 238698 - RNA, 19 nt, Human
agcccuugaccugcaguuu

SEQ ID NO: 238699 - RNA, 20 nt, Human
cacaggcugugccucaaccu

SEQ ID NO: 238700 - RNA, 18 nt, Human
cagagaggcuaaaggguc

SEQ ID NO: 238701 - RNA, 21 nt, Human
cagcaucaagcauccugcaug

SEQ ID NO: 238702 - RNA, 18 nt, Human
cagcccuugaccugcagu

SEQ ID NO: 238703 - RNA, 19 nt, Human
caggaguuucuuuccuccc

SEQ ID NO: 238704 - RNA, 21 nt, Human
caucaaagaggcgaggguagg

SEQ ID NO: 238705 - RNA, 22 nt, Human
caucaaagaggcgaggguaggu

SEQ ID NO: 238706 - RNA, 18 nt, Human
ccaaguaacaagaagcgg

SEQ ID NO: 238707 - RNA, 22 nt, Human
ccagccggcuggaccugcagac

SEQ ID NO: 238708 - RNA, 22 nt, Human
cccccaaguaacaagaagcgga

SEQ ID NO: 238709 - RNA, 25 nt, Human
ccugcagacccaggaagcgagaugg

SEQ ID NO: 238710 - RNA, 25 nt, Human
ccuugaccugcaguuuccccuuggu

SEQ ID NO: 238711 - RNA, 22 nt, Human
cgggguggggggcggcaagcag

SEQ ID NO: 238712 - RNA, 23 nt, Human
cuggcaacaggaagcaacuucuu

SEQ ID NO: 238713 - RNA, 23 nt, Human
cuggcuggaaucuccccugggua

SEQ ID NO: 238714 - RNA, 21 nt, Human
cugggccccacagggugcugg

SEQ ID NO: 238715 - RNA, 19 nt, Human
gaccugcaguuuccccuug

SEQ ID NO: 238716 - RNA, 21 nt, Human
gagcuggguggggagggcggg

SEQ ID NO: 238717 - RNA, 22 nt, Human
gagcuggguggggagggcgggg

SEQ ID NO: 238718 - RNA, 18 nt, Human
gcuggaaucuccccuggg

SEQ ID NO: 238719 - RNA, 22 nt, Human
gcuggaaucuccccuggguaca

SEQ ID NO: 238720 - RNA, 19 nt, Human
ggagcuggguggggagggc

SEQ ID NO: 238721 - RNA, 18 nt, Human
ggcagagaggcuaaaggg

SEQ ID NO: 238722 - RNA, 18 nt, Human
ggcggcaagcagcggggg

SEQ ID NO: 238723 - RNA, 19 nt, Human
ggggagggcgggggcggug

SEQ ID NO: 238724 - RNA, 20 nt, Human
ggggcggcaagcagcggggg

SEQ ID NO: 238725 - RNA, 21 nt, Human
ggggcggcaagcagcggggga

SEQ ID NO: 238726 - RNA, 21 nt, Human
gucugggccccacagggugcu

SEQ ID NO: 238727 - RNA, 21 nt, Human
gugcuggcagaucccuggagu

SEQ ID NO: 238728 - RNA, 18 nt, Human
uaacuuccuagaaggcac

SEQ ID NO: 238729 - RNA, 19 nt, Human
uccaggagcaaaaggaggu

SEQ ID NO: 238730 - RNA, 19 nt, Human
uccccuuggaucugggggg

SEQ ID NO: 238731 - RNA, 20 nt, Human
uccuagaaggcacuuggccu

SEQ ID NO: 238732 - RNA, 21 nt, Human
ucuuagccagggccggggggc

SEQ ID NO: 238733 - RNA, 20 nt, Human
ugccucaaccuccuaacuuc

SEQ ID NO: 238734 - RNA, 24 nt, Human
ugccucaaccuccuaacuuccuag

SEQ ID NO: 238735 - RNA, 18 nt, Human
ugcuggcaacaggaagca

SEQ ID NO: 238736 - RNA, 22 nt, Human
uggaccugcagacccaggaagc

SEQ ID NO: 238737 - RNA, 18 nt, Human
uggcaacaggaagcaacu

SEQ ID NO: 238738 - RNA, 21 nt, Human
uggcaacaggaagcaacuucu

SEQ ID NO: 238739 - RNA, 19 nt, Human
uggccaaugaucaggaguu

SEQ ID NO: 238740 - RNA, 20 nt, Human
uggggggcggcaagcagcgg

SEQ ID NO: 238741 - RNA, 19 nt, Human
uggguacauggagggugcc

SEQ ID NO: 238742 - RNA, 21 nt, Human
ugucuggcuggaaucuccccu

SEQ ID NO: 238743 - RNA, 18 nt, Human
uguggcuuucuuaauugg

SEQ ID NO: 238744 - RNA, 26 nt, Human
uuggccaaugaucaggaguuucuuuc

SEQ ID NO: 238745 - RNA, 18 nt, Human
aaaaaaccuccuagccuc

SEQ ID NO: 238746 - RNA, 19 nt, Human
acacaggcacagcugcucc

SEQ ID NO: 238747 - RNA, 25 nt, Human
acccacccuguccccaucccugccu

SEQ ID NO: 238748 - RNA, 24 nt, Human
acccagggguaugcggcuccauga

SEQ ID NO: 238749 - RNA, 21 nt, Human
acuacuauaaacccuguagac

SEQ ID NO: 238750 - RNA, 24 nt, Human
acuggaacgcacagacggcaccca

SEQ ID NO: 238751 - RNA, 23 nt, Human
agacaaaaggugcaggagaagcc

SEQ ID NO: 238752 - RNA, 18 nt, Human
agcccagagcccacucga

SEQ ID NO: 238753 - RNA, 21 nt, Human
agccugcccagggccgacccc

SEQ ID NO: 238754 - RNA, 18 nt, Human
aggcaagcucacgaccca

SEQ ID NO: 238755 - RNA, 22 nt, Human
agggccgaccccagcccagagc

SEQ ID NO: 238756 - RNA, 19 nt, Human
agggguuggagcccaagac

SEQ ID NO: 238757 - RNA, 20 nt, Human
aggugcaggagaagccugcc

SEQ ID NO: 238758 - RNA, 22 nt, Human
aguaaaaaucaagagucuaagc

SEQ ID NO: 238759 - RNA, 19 nt, Human
aucaagagucuaagccacc

SEQ ID NO: 238760 - RNA, 21 nt, Human
augcggcuccaugacaccacc

SEQ ID NO: 238761 - RNA, 25 nt, Human
caagcccgacaagcuacuuucagaa

SEQ ID NO: 238762 - RNA, 24 nt, Human
cacaaacagcauuccacgcaggug

SEQ ID NO: 238763 - RNA, 23 nt, Human
cacaggguugcccucgugucccu

SEQ ID NO: 238764 - RNA, 21 nt, Human
cacccacccuguccccauccc

SEQ ID NO: 238765 - RNA, 22 nt, Human
cacccacccuguccccaucccu

SEQ ID NO: 238766 - RNA, 19 nt, Human
cacggcuccugugcccccu

SEQ ID NO: 238767 - RNA, 21 nt, Human
cagaauaucagucuccacacc

SEQ ID NO: 238768 - RNA, 21 nt, Human
cagcugcuccucucccaagaa

SEQ ID NO: 238769 - RNA, 22 nt, Human
caggaccccuuggccucacugg

SEQ ID NO: 238770 - RNA, 22 nt, Human
caggaugcuccaugagcaaccc

SEQ ID NO: 238771 - RNA, 21 nt, Human
caugacaccaccccauacgca

SEQ ID NO: 238772 - RNA, 18 nt, Human
caugacagacccugcaua

SEQ ID NO: 238773 - RNA, 22 nt, Human
caugaggcuccaugacaccacc

SEQ ID NO: 238774 - RNA, 25 nt, Human
cccaacccggccaggaccccuuggc

SEQ ID NO: 238775 - RNA, 20 nt, Human
ccccauacgcaggcaagcuc

SEQ ID NO: 238776 - RNA, 20 nt, Human
ccccauacucaggcgagcuc

SEQ ID NO: 238777 - RNA, 18 nt, Human
cccccuuccucacccaag

SEQ ID NO: 238778 - RNA, 18 nt, Human
ccccgcacugggcuauuc

SEQ ID NO: 238779 - RNA, 22 nt, Human
ccuccagccuggcccccagauu

SEQ ID NO: 238780 - RNA, 18 nt, Human
ccuccuagccucacuacc

SEQ ID NO: 238781 - RNA, 22 nt, Human
ccugcccagggccgaccccagc

SEQ ID NO: 238782 - RNA, 18 nt, Human
ccuggcccccagauucac

SEQ ID NO: 238783 - RNA, 21 nt, Human
ccuugaggccgugcccagagg

SEQ ID NO: 238784 - RNA, 19 nt, Human
cggcuccaugacaccaccc

SEQ ID NO: 238785 - RNA, 21 nt, Human
cggcuccugugcccccuuccu

SEQ ID NO: 238786 - RNA, 19 nt, Human
cucacaaacagcauuccac

SEQ ID NO: 238787 - RNA, 20 nt, Human
cucacaaacagcauuccacg

SEQ ID NO: 238788 - RNA, 22 nt, Human
cucagcccagcagacaaaaggu

SEQ ID NO: 238789 - RNA, 24 nt, Human
cuccagccuggcccccagauucac

SEQ ID NO: 238790 - RNA, 21 nt, Human
cuggcccccagauucacaucu

SEQ ID NO: 238791 - RNA, 21 nt, Human
cuggcccccagauucacaucu

SEQ ID NO: 238792 - RNA, 25 nt, Human
cuugaggccgugcccagagguggcc

SEQ ID NO: 238793 - RNA, 20 nt, Human
gaccccuuggccucacugga

SEQ ID NO: 238794 - RNA, 19 nt, Human
gacggcacccagcagguag

SEQ ID NO: 238795 - RNA, 20 nt, Human
gcagaaggcgcugugccucc

SEQ ID NO: 238796 - RNA, 20 nt, Human
gcugggccacagacuaugug

SEQ ID NO: 238797 - RNA, 22 nt, Human
ggagaagccugcccagggccga

SEQ ID NO: 238798 - RNA, 19 nt, Human
ggugcaggagaagccugcc

SEQ ID NO: 238799 - RNA, 20 nt, Human
guccccaucccugccuccag

SEQ ID NO: 238800 - RNA, 21 nt, Human
uaagccacccacccugucccc

SEQ ID NO: 238801 - RNA, 21 nt, Human
uacaguaaaaaucaagagucu

SEQ ID NO: 238802 - RNA, 23 nt, Human
uacaguaaaaaucaagagucuaa

SEQ ID NO: 238803 - RNA, 21 nt, Human
uaugcggcuccaugacaccac

SEQ ID NO: 238804 - RNA, 18 nt, Human
ucaagagucuaagccacc

SEQ ID NO: 238805 - RNA, 23 nt, Human
ucagaaaaaaccuccuagccuca

SEQ ID NO: 238806 - RNA, 22 nt, Human
ucagcccagcagacaaaaggug

SEQ ID NO: 238807 - RNA, 22 nt, Human
ucaggggucacggcuccugugc

SEQ ID NO: 238808 - RNA, 26 nt, Human
uccaugagcaacccccgcacugggcu

SEQ ID NO: 238809 - RNA, 25 nt, Human
ucccaagaacucagcuauuggucag

SEQ ID NO: 238810 - RNA, 18 nt, Human
uccccaucccugccucca

SEQ ID NO: 238811 - RNA, 18 nt, Human
uccucacccaagcccgac

SEQ ID NO: 238812 - RNA, 22 nt, Human
ugacaccaccccauacgcaggc

SEQ ID NO: 238813 - RNA, 22 nt, Human
ugacaccaccccauacucaggc

SEQ ID NO: 238814 - RNA, 18 nt, Human
ugacagacccugcauaug

SEQ ID NO: 238815 - RNA, 18 nt, Human
ugagauagagguugaggg

SEQ ID NO: 238816 - RNA, 20 nt, Human
ugaggccgugcccagaggug

SEQ ID NO: 238817 - RNA, 25 nt, Human
ugccuccagccuggcccccagauuc

SEQ ID NO: 238818 - RNA, 22 nt, Human
ugcugcacggccucaggaugcu

SEQ ID NO: 238819 - RNA, 19 nt, Human
uggagcccaagacaggguu

SEQ ID NO: 238820 - RNA, 21 nt, Human
uggggcucccugcugcacggc

SEQ ID NO: 238821 - RNA, 18 nt, Human
ugucccaggggcaugggg

SEQ ID NO: 238822 - RNA, 18 nt, Human
uguccccaucccugccuc

SEQ ID NO: 238823 - RNA, 21 nt, Human
uugcugggccacagacuaugu

SEQ ID NO: 238824 - RNA, 18 nt, Human
aaccaaggcccaggccca

SEQ ID NO: 238825 - RNA, 21 nt, Human
aauaguccccucccugccucu

SEQ ID NO: 238826 - RNA, 19 nt, Human
aauggaggcagaaugggga

SEQ ID NO: 238827 - RNA, 23 nt, Human
acgaagcacgggcagcccaagga

SEQ ID NO: 238828 - RNA, 22 nt, Human
acgaccccugaaauggucagaa

SEQ ID NO: 238829 - RNA, 23 nt, Human
agagccuuucccugccuucuggg

SEQ ID NO: 238830 - RNA, 20 nt, Human
aggcagaauggggagaaggu

SEQ ID NO: 238831 - RNA, 23 nt, Human
aggcagaauggggagaaggucuu

SEQ ID NO: 238832 - RNA, 22 nt, Human
aggcagcaggugcaggagggac

SEQ ID NO: 238833 - RNA, 21 nt, Human
aggcaggccggggauccaggc

SEQ ID NO: 238834 - RNA, 19 nt, Human
aggcccaggcaggccgggg

SEQ ID NO: 238835 - RNA, 23 nt, Human
agggaugguucagggaggugugg

SEQ ID NO: 238836 - RNA, 20 nt, Human
agggugcagaugccuccgug

SEQ ID NO: 238837 - RNA, 27 nt, Human
auuauuuuuucuuucuggauuuuucca

SEQ ID NO: 238838 - RNA, 23 nt, Human
caagcuccuccaugugccugcuc

SEQ ID NO: 238839 - RNA, 18 nt, Human
caggagggaccgaggccc

SEQ ID NO: 238840 - RNA, 22 nt, Human
caggagggaccgaggcccaggc

SEQ ID NO: 238841 - RNA, 18 nt, Human
caggccggggauccaggc

SEQ ID NO: 238842 - RNA, 23 nt, Human
caggccggggauccaggcagcag

SEQ ID NO: 238843 - RNA, 18 nt, Human
ccccucucuccauccucc

SEQ ID NO: 238844 - RNA, 18 nt, Human
ccccucucuccauccucc

SEQ ID NO: 238845 - RNA, 22 nt, Human
ccccugaaauggucagaaugga

SEQ ID NO: 238846 - RNA, 23 nt, Human
cuagucaucccccaagcuccucc

SEQ ID NO: 238847 - RNA, 22 nt, Human
cuccuccaugugccugcucuuc

SEQ ID NO: 238848 - RNA, 20 nt, Human
cucuagucaucccccaagcu

SEQ ID NO: 238849 - RNA, 23 nt, Human
cuucuauuauuccccucucucca

SEQ ID NO: 238850 - RNA, 21 nt, Human
gacagaccaacagcuuugggc

SEQ ID NO: 238851 - RNA, 20 nt, Human
gaggcagaauggggagaagg

SEQ ID NO: 238852 - RNA, 18 nt, Human
gcuguuggaauggccaaa

SEQ ID NO: 238853 - RNA, 19 nt, Human
gcuguuggaauggccaaag

SEQ ID NO: 238854 - RNA, 27 nt, Human
ggaccgaggcccaggcagagggcagga

SEQ ID NO: 238855 - RNA, 24 nt, Human
ggagaaccaaggcccaggcccagg

SEQ ID NO: 238856 - RNA, 19 nt, Human
ggcagcaggugcaggaggg

SEQ ID NO: 238857 - RNA, 18 nt, Human
gggcccugugaucccuca

SEQ ID NO: 238858 - RNA, 19 nt, Human
guaguccaaagcacgaagc

SEQ ID NO: 238859 - RNA, 19 nt, Human
uagcuggugggacagacca

SEQ ID NO: 238860 - RNA, 22 nt, Human
ucagagccuuucccugccuucu

SEQ ID NO: 238861 - RNA, 20 nt, Human
uccccucucuccauccucca

SEQ ID NO: 238862 - RNA, 18 nt, Human
ucuaggccccaccuagcu

SEQ ID NO: 238863 - RNA, 19 nt, Human
ucucuugggccugucucug

SEQ ID NO: 238864 - RNA, 22 nt, Human
ucuguuucuccuuggauguucu

SEQ ID NO: 238865 - RNA, 22 nt, Human
ugaaauggucagaauggaggca

SEQ ID NO: 238866 - RNA, 21 nt, Human
uggaauggccaaaggagaggu

SEQ ID NO: 238867 - RNA, 22 nt, Human
uggaauggccaaaggagaggug

SEQ ID NO: 238868 - RNA, 24 nt, Human
uggaggcagaauggggagaagguc

SEQ ID NO: 238869 - RNA, 22 nt, Human
uguggggcucuggucggcagcu

SEQ ID NO: 238870 - RNA, 22 nt, Human
uucuauuauuccccucucucca

SEQ ID NO: 238871 - RNA, 22 nt, Human
uucuggggcccugugaucccuc

SEQ ID NO: 238872 - RNA, 20 nt, Human
uuggaauggccaaaggagag

SEQ ID NO: 238873 - RNA, 21 nt, Human
uugugcgcaugcccucucacu

SEQ ID NO: 238874 - RNA, 24 nt, Human
aaaacaauaaaaagccaaaacuaa

SEQ ID NO: 238875 - RNA, 23 nt, Human
aacaaaacaauaaaaagccaaaa

SEQ ID NO: 238876 - RNA, 24 nt, Human
aacaaaacaauaaaaagccaaaac

SEQ ID NO: 238877 - RNA, 24 nt, Human
aagacaguuuuaauugugagcuga

SEQ ID NO: 238878 - RNA, 22 nt, Human
acaaaacaauaaaaagccaaaa

SEQ ID NO: 238879 - RNA, 22 nt, Human
acaauaaaaagccaaaacuaaa

SEQ ID NO: 238880 - RNA, 18 nt, Human
agcacagcgaccuacagc

SEQ ID NO: 238881 - RNA, 27 nt, Human
cagcacagcgaccuacagcccaacgcu

SEQ ID NO: 238882 - RNA, 25 nt, Human
ccaacaaaacaauaaaaagccaaaa

SEQ ID NO: 238883 - RNA, 20 nt, Human
uaaaaagccaaaacuaaaaa

SEQ ID NO: 238884 - RNA, 26 nt, Human
uaaaaucaccaacaaaacuggagacc

SEQ ID NO: 238885 - RNA, 19 nt, Human
uacagcccaacgcucagcu

SEQ ID NO: 238886 - RNA, 22 nt, Human
uacagcccaacgcucagcuacc

SEQ ID NO: 238887 - RNA, 21 nt, Human
uugugagcugaaguuuuauau

SEQ ID NO: 238888 - RNA, 24 nt, Human
aaacagucuccuacauuuuuccca

SEQ ID NO: 238889 - RNA, 22 nt, Human
acagucuccuacauuuuuccca

SEQ ID NO: 238890 - RNA, 22 nt, Human
acagucuccuacauuuuuccca

SEQ ID NO: 238891 - RNA, 23 nt, Human
acauuuuucccacugccaugggg

SEQ ID NO: 238892 - RNA, 23 nt, Human
acauuuuucccacugccaugggg

SEQ ID NO: 238893 - RNA, 18 nt, Human
agcagcagcucgggagug

SEQ ID NO: 238894 - RNA, 21 nt, Human
agcggcccuggggguccccgc

SEQ ID NO: 238895 - RNA, 18 nt, Human
aucagguucaaaaucaau

SEQ ID NO: 238896 - RNA, 18 nt, Human
aucagguucaaaaucaau

SEQ ID NO: 238897 - RNA, 23 nt, Human
caaacagucuccuacauuuuucc

SEQ ID NO: 238898 - RNA, 23 nt, Human
caaacagucuccuacauuuuucc

SEQ ID NO: 238899 - RNA, 25 nt, Human
caaacagucuccuacauuuuuccca

SEQ ID NO: 238900 - RNA, 23 nt, Human
caccccaccaucacggccccaaa

SEQ ID NO: 238901 - RNA, 19 nt, Human
cagccuagccccugccccu

SEQ ID NO: 238902 - RNA, 21 nt, Human
cagccuagccccugccccuuu

SEQ ID NO: 238903 - RNA, 21 nt, Human
ccccaaagaaggucuucccuc

SEQ ID NO: 238904 - RNA, 24 nt, Human
ccccaauauucacgcacucgcacc

SEQ ID NO: 238905 - RNA, 24 nt, Human
ccccaauauucacgcacucgcacc

SEQ ID NO: 238906 - RNA, 22 nt, Human
cccguaggcgccccccgcccgg

SEQ ID NO: 238907 - RNA, 18 nt, Human
cccucgagcagcagcucg

SEQ ID NO: 238908 - RNA, 21 nt, Human
ccgaaccccacgcucguguac

SEQ ID NO: 238909 - RNA, 24 nt, Human
ccgaaccccacgcucguguaccag

SEQ ID NO: 238910 - RNA, 21 nt, Human
ccgccagggggcgcccggccc

SEQ ID NO: 238911 - RNA, 22 nt, Human
ccuacauuuuucccacugccau

SEQ ID NO: 238912 - RNA, 22 nt, Human
ccuacauuuuucccacugccau

SEQ ID NO: 238913 - RNA, 21 nt, Human
ccuagccccugccccuucagc

SEQ ID NO: 238914 - RNA, 25 nt, Human
ccucaccccaccaucacggccccaa

SEQ ID NO: 238915 - RNA, 20 nt, Human
ccugggcguccgggccccca

SEQ ID NO: 238916 - RNA, 22 nt, Human
cgccuguuccuucgucgucucc

SEQ ID NO: 238917 - RNA, 20 nt, Human
cggcccguaggcgccccccg

SEQ ID NO: 238918 - RNA, 20 nt, Human
cguccgggcccccaauauuc

SEQ ID NO: 238919 - RNA, 20 nt, Human
cguccgggcccccaauauuc

SEQ ID NO: 238920 - RNA, 22 nt, Human
cgucucggcgcccucgagcagc

SEQ ID NO: 238921 - RNA, 19 nt, Human
cguguaccagagaggcccg

SEQ ID NO: 238922 - RNA, 20 nt, Human
cucaccccaccaucacggcc

SEQ ID NO: 238923 - RNA, 20 nt, Human
cugcgucccgcucgucagaa

SEQ ID NO: 238924 - RNA, 19 nt, Human
cuggagucaccgucucggc

SEQ ID NO: 238925 - RNA, 23 nt, Human
gcccguaggcgccccccgcccgg

SEQ ID NO: 238926 - RNA, 22 nt, Human
gggguccugggcguccgggccc

SEQ ID NO: 238927 - RNA, 22 nt, Human
gggguccugggcguccgggccc

SEQ ID NO: 238928 - RNA, 20 nt, Human
uaccagagaggcccguaccc

SEQ ID NO: 238929 - RNA, 23 nt, Human
ucaccccaccaucacggccccaa

SEQ ID NO: 238930 - RNA, 19 nt, Human
ucccagccuagccccugcc

SEQ ID NO: 238931 - RNA, 18 nt, Human
uccugggcguccgggccc

SEQ ID NO: 238932 - RNA, 18 nt, Human
uccugggcguccgggccc

SEQ ID NO: 238933 - RNA, 21 nt, Human
uccugggcguccgggccccca

SEQ ID NO: 238934 - RNA, 21 nt, Human
ucggcagcacugaagcuuucc

SEQ ID NO: 238935 - RNA, 21 nt, Human
ucggcagcacugaagcuuucc

SEQ ID NO: 238936 - RNA, 20 nt, Human
ucggcgcccucgagcagcag

SEQ ID NO: 238937 - RNA, 20 nt, Human
ucguguaccagagaggcccg

SEQ ID NO: 238938 - RNA, 22 nt, Human
ucucccagccuagccccugccc

SEQ ID NO: 238939 - RNA, 33 nt, Human
ugacugauguugacguacacccucucgcccccc

SEQ ID NO: 238940 - RNA, 21 nt, Human
ugcaccaggccgccgaacccc

SEQ ID NO: 238941 - RNA, 23 nt, Human
ugggguccugggcguccgggccc

SEQ ID NO: 238942 - RNA, 23 nt, Human
ugggguccugggcguccgggccc

SEQ ID NO: 238943 - RNA, 19 nt, Human
uuuccaaacagucuccuac

SEQ ID NO: 238944 - RNA, 19 nt, Human
uuuccaaacagucuccuac

SEQ ID NO: 238945 - RNA, 22 nt, Human
aaaaaaaaaagaaacuaaaaag

SEQ ID NO: 238946 - RNA, 21 nt, Human
aaaaaagaaacuaaaaagucc

SEQ ID NO: 238947 - RNA, 20 nt, Human
aaaaagaaacuaaaaagucc

SEQ ID NO: 238948 - RNA, 21 nt, Human
aaaaagaaacuaaaaaguccc

SEQ ID NO: 238949 - RNA, 18 nt, Human
aaaagccagagcagagau

SEQ ID NO: 238950 - RNA, 24 nt, Human
aaacuaaaaaguccuuccuucaau

SEQ ID NO: 238951 - RNA, 19 nt, Human
aacauggugaaaccccguc

SEQ ID NO: 238952 - RNA, 20 nt, Human
aacauggugaaaccccgucu

SEQ ID NO: 238953 - RNA, 21 nt, Human
aacauggugaaaccccgucuc

SEQ ID NO: 238954 - RNA, 21 nt, Human
aagaacugaagucagaguuca

SEQ ID NO: 238955 - RNA, 26 nt, Human
aagagaccaggaaggagcagugggca

SEQ ID NO: 238956 - RNA, 23 nt, Human
aagcaccuaccuugugcuugccc

SEQ ID NO: 238957 - RNA, 23 nt, Human
aagcugccugugggagccaggcu

SEQ ID NO: 238958 - RNA, 20 nt, Human
aaguggaggcugcagugagc

SEQ ID NO: 238959 - RNA, 24 nt, Human
aaguggaggcugcagugagcugag

SEQ ID NO: 238960 - RNA, 19 nt, Human
acagagcagaggacaggga

SEQ ID NO: 238961 - RNA, 24 nt, Human
acagagcgagacuccauuucaaaa

SEQ ID NO: 238962 - RNA, 18 nt, Human
accagcaaugcagaaaug

SEQ ID NO: 238963 - RNA, 21 nt, Human
acccagaaggcaggaggacuc

SEQ ID NO: 238964 - RNA, 24 nt, Human
acccccuuuccuccccuuacuuaa

SEQ ID NO: 238965 - RNA, 24 nt, Human
accccgucucuacuaaaaauacaa

SEQ ID NO: 238966 - RNA, 25 nt, Human
acccguuuccuggacagaggaaugu

SEQ ID NO: 238967 - RNA, 24 nt, Human
acugcacuccagccugaaugacag

SEQ ID NO: 238968 - RNA, 26 nt, Human
acugcacuccagccugaaugacagag

SEQ ID NO: 238969 - RNA, 23 nt, Human
agaaggagguaugguagccagag

SEQ ID NO: 238970 - RNA, 22 nt, Human
agagcccccacuuguucugcuu

SEQ ID NO: 238971 - RNA, 22 nt, Human
agaggaaagaggggugugggga

SEQ ID NO: 238972 - RNA, 23 nt, Human
agaucacuugauguuagcaguuu

SEQ ID NO: 238973 - RNA, 18 nt, Human
agcaagaacugaagucag

SEQ ID NO: 238974 - RNA, 22 nt, Human
agcacuuugggaggcugagggg

SEQ ID NO: 238975 - RNA, 22 nt, Human
agccuggccaacauggugaaac

SEQ ID NO: 238976 - RNA, 24 nt, Human
agccuggccaacauggugaaaccc

SEQ ID NO: 238977 - RNA, 23 nt, Human
agcuggguguaguggcaugugcc

SEQ ID NO: 238978 - RNA, 22 nt, Human
aggaaagagggguguggggagu

SEQ ID NO: 238979 - RNA, 20 nt, Human
aggaaugucuccuuuccuug

SEQ ID NO: 238980 - RNA, 18 nt, Human
aggcaggagaaucaugug

SEQ ID NO: 238981 - RNA, 24 nt, Human
aggcaggagaaucaugugaaccca

SEQ ID NO: 238982 - RNA, 20 nt, Human
aggcugaggcaggagaauca

SEQ ID NO: 238983 - RNA, 22 nt, Human
aggcugaggcaggagaaucaug

SEQ ID NO: 238984 - RNA, 21 nt, Human
aggcugaggggagcagaucac

SEQ ID NO: 238985 - RNA, 22 nt, Human
agggguguggggagugagaagg

SEQ ID NO: 238986 - RNA, 20 nt, Human
aucaguaaaugccgaagggg

SEQ ID NO: 238987 - RNA, 24 nt, Human
aucgcaccacugcacuccagccug

SEQ ID NO: 238988 - RNA, 22 nt, Human
augaggagcaggagugagggag

SEQ ID NO: 238989 - RNA, 21 nt, Human
caaaggccuggccccaggucu

SEQ ID NO: 238990 - RNA, 24 nt, Human
caacauggugaaaccccgucucua

SEQ ID NO: 238991 - RNA, 19 nt, Human
caagcaccuaccuugugcu

SEQ ID NO: 238992 - RNA, 27 nt, Human
caccacugcacuccagccugaaugaca

SEQ ID NO: 238993 - RNA, 19 nt, Human
cacccccuuuccuccccuu

SEQ ID NO: 238994 - RNA, 22 nt, Human
cacccccuuuccuccccuuacu

SEQ ID NO: 238995 - RNA, 21 nt, Human
cacuccacucccgccucccac

SEQ ID NO: 238996 - RNA, 24 nt, Human
cacuccagccugaaugacagagcg

SEQ ID NO: 238997 - RNA, 19 nt, Human
cacugcacuccagccugaa

SEQ ID NO: 238998 - RNA, 19 nt, Human
cacugcacuccagccugaa

SEQ ID NO: 238999 - RNA, 25 nt, Human
cacugcacuccagccugaaugacag

SEQ ID NO: 239000 - RNA, 21 nt, Human
cacuuuagacacacaaaguug

SEQ ID NO: 239001 - RNA, 19 nt, Human
cagaaugccaauuacuucc

SEQ ID NO: 239002 - RNA, 21 nt, Human
cagaaugccaauuacuucccc

SEQ ID NO: 239003 - RNA, 22 nt, Human
cagcacuuugggaggcugaggg

SEQ ID NO: 239004 - RNA, 24 nt, Human
cagcuacuugggaggcugaggcag

SEQ ID NO: 239005 - RNA, 22 nt, Human
caggcugagcaugaggagcagg

SEQ ID NO: 239006 - RNA, 24 nt, Human
cauaccgguaaucccagcacuuug

SEQ ID NO: 239007 - RNA, 24 nt, Human
ccaagcaccuaccuugugcuugcc

SEQ ID NO: 239008 - RNA, 23 nt, Human
ccaauuacuuccccuuuccccaa

SEQ ID NO: 239009 - RNA, 19 nt, Human
ccacuccacucccgccucc

SEQ ID NO: 239010 - RNA, 18 nt, Human
ccacugcacuccagccug

SEQ ID NO: 239011 - RNA, 21 nt, Human
ccacugcacuccagccugaau

SEQ ID NO: 239012 - RNA, 24 nt, Human
ccacugcacuccagccugaaugac

SEQ ID NO: 239013 - RNA, 25 nt, Human
ccacugcacuccagccugaaugaca

SEQ ID NO: 239014 - RNA, 22 nt, Human
ccaggaaguggaggcugcagug

SEQ ID NO: 239015 - RNA, 21 nt, Human
ccaucucucccucuucuucca

SEQ ID NO: 239016 - RNA, 21 nt, Human
cccacccugccaagaggggaa

SEQ ID NO: 239017 - RNA, 21 nt, Human
cccacgcucccacgcccucca

SEQ ID NO: 239018 - RNA, 20 nt, Human
ccccuacccacucccuucac

SEQ ID NO: 239019 - RNA, 22 nt, Human
ccccugcuccuccuccagguac

SEQ ID NO: 239020 - RNA, 21 nt, Human
ccccuuacccguuuccuggac

SEQ ID NO: 239021 - RNA, 22 nt, Human
ccgcagcaagaacugaagucag

SEQ ID NO: 239022 - RNA, 24 nt, Human
ccuacccacucccuucacuaggag

SEQ ID NO: 239023 - RNA, 25 nt, Human
ccucacuuugcuccaucucucccuc

SEQ ID NO: 239024 - RNA, 22 nt, Human
ccuccagguacugaacuggcuc

SEQ ID NO: 239025 - RNA, 22 nt, Human
ccugaaugacagagcgagacuc

SEQ ID NO: 239026 - RNA, 23 nt, Human
ccuggccaacauggugaaacccc

SEQ ID NO: 239027 - RNA, 24 nt, Human
ccuggccaacauggugaaaccccg

SEQ ID NO: 239028 - RNA, 21 nt, Human
ccuguagucucagcuacuugg

SEQ ID NO: 239029 - RNA, 22 nt, Human
cgaagggggcagcacucugucc

SEQ ID NO: 239030 - RNA, 23 nt, Human
cgagacuccauuucaaaaaaaaa

SEQ ID NO: 239031 - RNA, 21 nt, Human
cgcaccacugcacuccagccu

SEQ ID NO: 239032 - RNA, 18 nt, Human
cgcccuccacgccccugc

SEQ ID NO: 239033 - RNA, 23 nt, Human
cuccauuucaaaaaaaaaaaaaa

SEQ ID NO: 239034 - RNA, 23 nt, Human
cucccacgcccuccacgcccucc

SEQ ID NO: 239035 - RNA, 22 nt, Human
cucccacgcucccacgcccucc

SEQ ID NO: 239036 - RNA, 20 nt, Human
cuccugcaaaagcuaaaaac

SEQ ID NO: 239037 - RNA, 21 nt, Human
cugaggggagcagaucacuug

SEQ ID NO: 239038 - RNA, 20 nt, Human
cugcagugagcugagaucgc

SEQ ID NO: 239039 - RNA, 22 nt, Human
cugcagugagcugagaucgcac

SEQ ID NO: 239040 - RNA, 18 nt, Human
cugccaggaggaaagugc

SEQ ID NO: 239041 - RNA, 20 nt, Human
cuggaucugucccacugcca

SEQ ID NO: 239042 - RNA, 21 nt, Human
cuguuuuccagggcaacccag

SEQ ID NO: 239043 - RNA, 27 nt, Human
gaaaccccuacccacucccuucacuag

SEQ ID NO: 239044 - RNA, 18 nt, Human
gaaguggaggcugcagug

SEQ ID NO: 239045 - RNA, 23 nt, Human
gagaaucaugugaacccaggaag

SEQ ID NO: 239046 - RNA, 23 nt, Human
gagaucgcaccacugcacuccag

SEQ ID NO: 239047 - RNA, 20 nt, Human
gagcugugacuagguccugg

SEQ ID NO: 239048 - RNA, 23 nt, Human
gaggcugcagugagcugagaucg

SEQ ID NO: 239049 - RNA, 24 nt, Human
gaucacuugauguuagcaguuuga

SEQ ID NO: 239050 - RNA, 22 nt, Human
gaugagaagagaccaggaagga

SEQ ID NO: 239051 - RNA, 20 nt, Human
gcaccacugcacuccagccu

SEQ ID NO: 239052 - RNA, 24 nt, Human
gcacuccagccugaaugacagagc

SEQ ID NO: 239053 - RNA, 22 nt, Human
gcaggagaaucaugugaaccca

SEQ ID NO: 239054 - RNA, 24 nt, Human
gccaacauggugaaaccccgucuc

SEQ ID NO: 239055 - RNA, 18 nt, Human
gcccaugugguuacccug

SEQ ID NO: 239056 - RNA, 18 nt, Human
gccugugggagccaggcu

SEQ ID NO: 239057 - RNA, 20 nt, Human
gcugagaucgcaccacugca

SEQ ID NO: 239058 - RNA, 21 nt, Human
ggaaagaugcaaaguauaaug

SEQ ID NO: 239059 - RNA, 23 nt, Human
ggaagcugaugccaaucccaggg

SEQ ID NO: 239060 - RNA, 19 nt, Human
ggagccaggcuggagcacg

SEQ ID NO: 239061 - RNA, 18 nt, Human
ggaggcugcagugagcug

SEQ ID NO: 239062 - RNA, 20 nt, Human
ggaggcugcagugagcugag

SEQ ID NO: 239063 - RNA, 24 nt, Human
ggaggcugcagugagcugagaucg

SEQ ID NO: 239064 - RNA, 21 nt, Human
ggguguggggagugagaaggc

SEQ ID NO: 239065 - RNA, 22 nt, Human
gguaucauauaggagaaggagg

SEQ ID NO: 239066 - RNA, 24 nt, Human
ggugggaagagggccaucuuccag

SEQ ID NO: 239067 - RNA, 24 nt, Human
ggugguucauaccgguaaucccag

SEQ ID NO: 239068 - RNA, 25 nt, Human
gguuggagcugugacuagguccugg

SEQ ID NO: 239069 - RNA, 18 nt, Human
gugagggagcaggaacag

SEQ ID NO: 239070 - RNA, 20 nt, Human
gugcgccuccuuccaccagg

SEQ ID NO: 239071 - RNA, 20 nt, Human
guggaggcugcagugagcug

SEQ ID NO: 239072 - RNA, 23 nt, Human
guggggccagaugagaagagacc

SEQ ID NO: 239073 - RNA, 23 nt, Human
gugguucauaccgguaaucccag

SEQ ID NO: 239074 - RNA, 22 nt, Human
uaccacagagcagaggacaggg

SEQ ID NO: 239075 - RNA, 23 nt, Human
uaccgguaaucccagcacuuugg

SEQ ID NO: 239076 - RNA, 24 nt, Human
uaccgguaaucccagcacuuuggg

SEQ ID NO: 239077 - RNA, 19 nt, Human
uagaagccaaaauccaaau

SEQ ID NO: 239078 - RNA, 22 nt, Human
uagcuggguguaguggcaugug

SEQ ID NO: 239079 - RNA, 20 nt, Human
uaggagaaggagguauggua

SEQ ID NO: 239080 - RNA, 19 nt, Human
uaggucaaccaauucucca

SEQ ID NO: 239081 - RNA, 24 nt, Human
uaguggcaugugccuguagucuca

SEQ ID NO: 239082 - RNA, 23 nt, Human
ucauaccgguaaucccagcacuu

SEQ ID NO: 239083 - RNA, 23 nt, Human
uccacuccacucccgccucccac

SEQ ID NO: 239084 - RNA, 24 nt, Human
uccagccugaaugacagagcgaga

SEQ ID NO: 239085 - RNA, 18 nt, Human
uccagggcaacccagaag

SEQ ID NO: 239086 - RNA, 25 nt, Human
uccauuucaaaaaaaaaaaaaagaa

SEQ ID NO: 239087 - RNA, 21 nt, Human
uccuuggcuucaguucaagcu

SEQ ID NO: 239088 - RNA, 21 nt, Human
uccuugguaucacacagaaug

SEQ ID NO: 239089 - RNA, 23 nt, Human
ucgcaccacugcacuccagccug

SEQ ID NO: 239090 - RNA, 20 nt, Human
ucucccucuucuuccacucc

SEQ ID NO: 239091 - RNA, 19 nt, Human
ucuccugcaaaagcuaaaa

SEQ ID NO: 239092 - RNA, 20 nt, Human
ucucuacuaaaaauacaaaa

SEQ ID NO: 239093 - RNA, 21 nt, Human
ucugcuuggagaaaagccaga

SEQ ID NO: 239094 - RNA, 25 nt, Human
ucuuccagcacccccuuuccucccc

SEQ ID NO: 239095 - RNA, 20 nt, Human
ugaaaccccuacccacuccc

SEQ ID NO: 239096 - RNA, 22 nt, Human
ugaccaugggccuuccugcuuc

SEQ ID NO: 239097 - RNA, 20 nt, Human
ugaccgcacgggaugugaga

SEQ ID NO: 239098 - RNA, 20 nt, Human
ugagaaggcuggguguggcc

SEQ ID NO: 239099 - RNA, 23 nt, Human
ugagaccagccuggccaacaugg

SEQ ID NO: 239100 - RNA, 24 nt, Human
ugagaccagccuggccaacauggu

SEQ ID NO: 239101 - RNA, 19 nt, Human
ugagagaggaaagaggggu

SEQ ID NO: 239102 - RNA, 22 nt, Human
ugagcugagaucgcaccacugc

SEQ ID NO: 239103 - RNA, 18 nt, Human
ugaggcaggagaaucaug

SEQ ID NO: 239104 - RNA, 22 nt, Human
ugaggcaggagaaucaugugaa

SEQ ID NO: 239105 - RNA, 24 nt, Human
ugaggcaggagaaucaugugaacc

SEQ ID NO: 239106 - RNA, 25 nt, Human
ugaggcaggagaaucaugugaaccc

SEQ ID NO: 239107 - RNA, 23 nt, Human
ugaggguggggcugaaaccccua

SEQ ID NO: 239108 - RNA, 22 nt, Human
ugccaggaggaaagugcgccuc

SEQ ID NO: 239109 - RNA, 23 nt, Human
ugccuguagucucagcuacuugg

SEQ ID NO: 239110 - RNA, 24 nt, Human
ugccuguagucucagcuacuuggg

SEQ ID NO: 239111 - RNA, 18 nt, Human
ugccugugggagccaggc

SEQ ID NO: 239112 - RNA, 18 nt, Human
ugccugugggagccaggc

SEQ ID NO: 239113 - RNA, 19 nt, Human
ugcgccuccuuccaccagg

SEQ ID NO: 239114 - RNA, 26 nt, Human
ugcuccaucucucccucuucuuccaa

SEQ ID NO: 239115 - RNA, 19 nt, Human
ugcuccuccuccagguacu

SEQ ID NO: 239116 - RNA, 23 nt, Human
ugcuuggagaaaagccagagcag

SEQ ID NO: 239117 - RNA, 22 nt, Human
uggaagcugaugccaaucccag

SEQ ID NO: 239118 - RNA, 18 nt, Human
uggaggcugcagugagcu

SEQ ID NO: 239119 - RNA, 24 nt, Human
uggcaugugccuguagucucagcu

SEQ ID NO: 239120 - RNA, 24 nt, Human
uggccaacauggugaaaccccguc

SEQ ID NO: 239121 - RNA, 19 nt, Human
uggcucagagcuagcauuc

SEQ ID NO: 239122 - RNA, 25 nt, Human
uggcucagagcuagcauucugccag

SEQ ID NO: 239123 - RNA, 19 nt, Human
ugggaggcugaggcaggag

SEQ ID NO: 239124 - RNA, 24 nt, Human
ugggaggcugaggcaggagaauca

SEQ ID NO: 239125 - RNA, 24 nt, Human
ugggaggcugaggggagcagauca

SEQ ID NO: 239126 - RNA, 19 nt, Human
ugggcagaaaccgcagcaa

SEQ ID NO: 239127 - RNA, 23 nt, Human
uggggcugaaaccccuacccacu

SEQ ID NO: 239128 - RNA, 18 nt, Human
uggguguaguggcaugug

SEQ ID NO: 239129 - RNA, 24 nt, Human
uggugguucauaccgguaauccca

SEQ ID NO: 239130 - RNA, 20 nt, Human
ugguuaaagcugccuguggg

SEQ ID NO: 239131 - RNA, 22 nt, Human
ugguucauaccgguaaucccag

SEQ ID NO: 239132 - RNA, 24 nt, Human
ugguucauaccgguaaucccagca

SEQ ID NO: 239133 - RNA, 23 nt, Human
ugugggagccaggcuggagcacg

SEQ ID NO: 239134 - RNA, 22 nt, Human
uguggggagugagaaggcuggg

SEQ ID NO: 239135 - RNA, 19 nt, Human
uguuagcaguuugagacca

SEQ ID NO: 239136 - RNA, 19 nt, Human
uuagcuggguguaguggca

SEQ ID NO: 239137 - RNA, 24 nt, Human
uuagcuggguguaguggcaugugc

SEQ ID NO: 239138 - RNA, 19 nt, Human
uuccugaggguggggcuga

SEQ ID NO: 239139 - RNA, 22 nt, Human
uucugcuuggagaaaagccaga

SEQ ID NO: 239140 - RNA, 25 nt, Human
uugggaggcugaggcaggagaauca

SEQ ID NO: 239141 - RNA, 25 nt, Human
uugggaggcugaggggagcagauca

SEQ ID NO: 239142 - RNA, 24 nt, Human
uuuguuucgcuuuguuuuaagauu

SEQ ID NO: 239143 - RNA, 19 nt, Human
aaaaaaaacaaaacaacau

SEQ ID NO: 239144 - RNA, 27 nt, Human
aaaaacaguagccaaggaacugcacaa

SEQ ID NO: 239145 - RNA, 23 nt, Human
aaaaagaaaagaaaggagcaaga

SEQ ID NO: 239146 - RNA, 20 nt, Human
aacagaaaaaaagaaaagaa

SEQ ID NO: 239147 - RNA, 22 nt, Human
aaggagcaagaggggaaaagag

SEQ ID NO: 239148 - RNA, 23 nt, Human
aaggagcaagaggggaaaagaga

SEQ ID NO: 239149 - RNA, 25 nt, Human
aagguuuaaaaaaacagaaaaaaag

SEQ ID NO: 239150 - RNA, 20 nt, Human
aauuaacaccugcuagcagc

SEQ ID NO: 239151 - RNA, 26 nt, Human
acaaaacaacauaauaauacaaccuu

SEQ ID NO: 239152 - RNA, 18 nt, Human
agaaaagaaaggagcaag

SEQ ID NO: 239153 - RNA, 19 nt, Human
agcaagaggggaaaagaga

SEQ ID NO: 239154 - RNA, 23 nt, Human
agguuuaaaaaaacagaaaaaaa

SEQ ID NO: 239155 - RNA, 22 nt, Human
auuugaauuucaaaaaugcucc

SEQ ID NO: 239156 - RNA, 24 nt, Human
caagaggggaaaagagagagccca

SEQ ID NO: 239157 - RNA, 24 nt, Human
caagcaauaguaaaaaaaacaaaa

SEQ ID NO: 239158 - RNA, 23 nt, Human
caauacuaacguaagcuuauaaa

SEQ ID NO: 239159 - RNA, 27 nt, Human
caguagccaaggaacugcacaaccaaa

SEQ ID NO: 239160 - RNA, 30 nt, Human
ccuguguaacaauacuuauaauacagcuuu

SEQ ID NO: 239161 - RNA, 19 nt, Human
cucucauugucuucagagg

SEQ ID NO: 239162 - RNA, 18 nt, Human
gaaaaacaguagccaagg

SEQ ID NO: 239163 - RNA, 24 nt, Human
gaacugcacaaccaaaaaaugaaa

SEQ ID NO: 239164 - RNA, 18 nt, Human
gagcaagaggggaaaaga

SEQ ID NO: 239165 - RNA, 23 nt, Human
gcaauaguaaaaaaaacaaaaca

SEQ ID NO: 239166 - RNA, 19 nt, Human
uaaaaaaaacaaaacaaca

SEQ ID NO: 239167 - RNA, 22 nt, Human
uaaaaaaacagaaaaaaagaaa

SEQ ID NO: 239168 - RNA, 23 nt, Human
uaaaaaaacagaaaaaaagaaaa

SEQ ID NO: 239169 - RNA, 21 nt, Human
uaaaauaacagcacuguuccc

SEQ ID NO: 239170 - RNA, 25 nt, Human
uaaaugccaaauuuaaucaagcaau

SEQ ID NO: 239171 - RNA, 18 nt, Human
uaauacagcuuaacaaua

SEQ ID NO: 239172 - RNA, 20 nt, Human
uaggugcaaugucucaagua

SEQ ID NO: 239173 - RNA, 23 nt, Human
ucuccaaauguguauacaaaguu

SEQ ID NO: 239174 - RNA, 23 nt, Human
ugaaggaaagggauccaauuaac

SEQ ID NO: 239175 - RNA, 22 nt, Human
uggaacaaaaucacugccugcu

SEQ ID NO: 239176 - RNA, 24 nt, Human
uggaagguuuaaaaaaacagaaaa

SEQ ID NO: 239177 - RNA, 24 nt, Human
uguguauacaaaguuuuggaacaa

SEQ ID NO: 239178 - RNA, 23 nt, Human
uuaaaaaaacagaaaaaaagaaa

SEQ ID NO: 239179 - RNA, 23 nt, Human
uuaaaaaacugaaguaaaagaaa

SEQ ID NO: 239180 - RNA, 20 nt, Human
uuuuggaacaaaaucacugc

SEQ ID NO: 239181 - RNA, 20 nt, Human
aaaccucuggccugauguca

SEQ ID NO: 239182 - RNA, 19 nt, Human
aagcaagggcauggaggca

SEQ ID NO: 239183 - RNA, 21 nt, Human
aggaaaggugguggacagggc

SEQ ID NO: 239184 - RNA, 22 nt, Human
auccacaccaggcccccuccuc

SEQ ID NO: 239185 - RNA, 22 nt, Human
aucguuuucugaagggaaaggg

SEQ ID NO: 239186 - RNA, 24 nt, Human
caaaaucagggcccagaacagauu

SEQ ID NO: 239187 - RNA, 22 nt, Human
cacauuucuuuauuccaccaug

SEQ ID NO: 239188 - RNA, 19 nt, Human
cagaacagauuggcugagu

SEQ ID NO: 239189 - RNA, 19 nt, Human
cagcugggcucgcacggcu

SEQ ID NO: 239190 - RNA, 20 nt, Human
cagugugaggccauggggcc

SEQ ID NO: 239191 - RNA, 18 nt, Human
cauagcaaggccaggaaa

SEQ ID NO: 239192 - RNA, 24 nt, Human
caucauguccucuugcugcuuucu

SEQ ID NO: 239193 - RNA, 21 nt, Human
cauccucaaggccccugccug

SEQ ID NO: 239194 - RNA, 22 nt, Human
cauccucaaggccccugccugu

SEQ ID NO: 239195 - RNA, 21 nt, Human
ccagcuucucugagucuaggg

SEQ ID NO: 239196 - RNA, 18 nt, Human
ccccaaauccuuucuugc

SEQ ID NO: 239197 - RNA, 23 nt, Human
ccccgagccucgaguccgcgcuc

SEQ ID NO: 239198 - RNA, 23 nt, Human
cccggccccgcccggcggccagc

SEQ ID NO: 239199 - RNA, 18 nt, Human
cggccagcuucucugagu

SEQ ID NO: 239200 - RNA, 19 nt, Human
cggccgacugggggcccgg

SEQ ID NO: 239201 - RNA, 24 nt, Human
cuagggcagauguagccucugucc

SEQ ID NO: 239202 - RNA, 20 nt, Human
cucgcacggcugcugcaccu

SEQ ID NO: 239203 - RNA, 18 nt, Human
cuuggcuccccuuucuca

SEQ ID NO: 239204 - RNA, 18 nt, Human
gaaagcaggcaaggcuga

SEQ ID NO: 239205 - RNA, 21 nt, Human
gaacaagaccacacuggaaaa

SEQ ID NO: 239206 - RNA, 23 nt, Human
gaggggaaaaacaacauuggaaa

SEQ ID NO: 239207 - RNA, 23 nt, Human
gcggaacgagggcugcgcgcccc

SEQ ID NO: 239208 - RNA, 18 nt, Human
gcuaauaucagccuugcu

SEQ ID NO: 239209 - RNA, 21 nt, Human
gcucagcccccucauuaccgg

SEQ ID NO: 239210 - RNA, 19 nt, Human
gcucucggcggaacgaggg

SEQ ID NO: 239211 - RNA, 20 nt, Human
gcuuuguggucggcacgcug

SEQ ID NO: 239212 - RNA, 21 nt, Human
ggagaguggugcgcgcgggca

SEQ ID NO: 239213 - RNA, 21 nt, Human
ggcaaaaucagggcccagaac

SEQ ID NO: 239214 - RNA, 19 nt, Human
gggaggguggaugagggcc

SEQ ID NO: 239215 - RNA, 19 nt, Human
gggcauggaggcaaugacc

SEQ ID NO: 239216 - RNA, 20 nt, Human
gggggcucuggagucagucc

SEQ ID NO: 239217 - RNA, 20 nt, Human
gggugcuguaucccauggca

SEQ ID NO: 239218 - RNA, 23 nt, Human
ggugguggacagggccucaugcg

SEQ ID NO: 239219 - RNA, 18 nt, Human
uaaagcgauugguggugc

SEQ ID NO: 239220 - RNA, 22 nt, Human
uaagcugggagagaugaaagca

SEQ ID NO: 239221 - RNA, 21 nt, Human
ucacugggcggauucagcuac

SEQ ID NO: 239222 - RNA, 22 nt, Human
ucagccuugcuucucugaguga

SEQ ID NO: 239223 - RNA, 22 nt, Human
ucccauggcagcccuugcugcu

SEQ ID NO: 239224 - RNA, 19 nt, Human
uccccaaauccuuucuugc

SEQ ID NO: 239225 - RNA, 24 nt, Human
uccccaaauccuuucuugcuccac

SEQ ID NO: 239226 - RNA, 23 nt, Human
uccccuuucucaucaacuccacg

SEQ ID NO: 239227 - RNA, 24 nt, Human
ucccuagggcagauguagccucug

SEQ ID NO: 239228 - RNA, 25 nt, Human
ucuagggggcccugaagcggcccca

SEQ ID NO: 239229 - RNA, 19 nt, Human
ucucugcuuguaaacucag

SEQ ID NO: 239230 - RNA, 23 nt, Human
ucugcagugugaggccauggggc

SEQ ID NO: 239231 - RNA, 21 nt, Human
ugaacaagaccacacuggaaa

SEQ ID NO: 239232 - RNA, 20 nt, Human
ugaauauuuucuuuagacgu

SEQ ID NO: 239233 - RNA, 19 nt, Human
ugacuggaggccauuucca

SEQ ID NO: 239234 - RNA, 22 nt, Human
ugacuggaggccauuuccaggu

SEQ ID NO: 239235 - RNA, 19 nt, Human
ugcuugagccaagcaaggg

SEQ ID NO: 239236 - RNA, 21 nt, Human
ugcuugagccaagcaagggca

SEQ ID NO: 239237 - RNA, 21 nt, Human
uggaaaggggugucugcagug

SEQ ID NO: 239238 - RNA, 21 nt, Human
uggacagggccucaugcggug

SEQ ID NO: 239239 - RNA, 20 nt, Human
uggcagcccuugcugcuggu

SEQ ID NO: 239240 - RNA, 23 nt, Human
uggcagcccuugcugcuggugcc

SEQ ID NO: 239241 - RNA, 19 nt, Human
ugggcucgcacggcugcug

SEQ ID NO: 239242 - RNA, 22 nt, Human
ugggugcuguaucccauggcag

SEQ ID NO: 239243 - RNA, 19 nt, Human
ugucacggugucuucccag

SEQ ID NO: 239244 - RNA, 25 nt, Human
ugucacggugucuucccagcuagga

SEQ ID NO: 239245 - RNA, 22 nt, Human
uguggucggcacgcuggacgcc

SEQ ID NO: 239246 - RNA, 23 nt, Human
uucacaaaaggagaucccagaag

SEQ ID NO: 239247 - RNA, 19 nt, Human
uuggaaaccucccccggcu

SEQ ID NO: 239248 - RNA, 19 nt, Human
uuggguuggagugagucuc

SEQ ID NO: 239249 - RNA, 19 nt, Human
uugguggugcuugagccaa

SEQ ID NO: 239250 - RNA, 22 nt, Human
uuuuuuuuuuuuuuggaccaga

SEQ ID NO: 239251 - RNA, 28 nt, Human
uuuuuuuuuuuuuuuuuuuuuuuggggg

SEQ ID NO: 239252 - RNA, 19 nt, Human
aggccgagcucgcggaaau

SEQ ID NO: 239253 - RNA, 21 nt, Human
caaccgcccgcuaaccgggga

SEQ ID NO: 239254 - RNA, 24 nt, Human
caaggguaaagaggcacgaucuga

SEQ ID NO: 239255 - RNA, 20 nt, Human
caccgaggucugggccgagg

SEQ ID NO: 239256 - RNA, 22 nt, Human
cccgcuaaccggggaggggggc

SEQ ID NO: 239257 - RNA, 19 nt, Human
ccucugggaggaaggcagg

SEQ ID NO: 239258 - RNA, 21 nt, Human
cgcccgccggagaccuuacaa

SEQ ID NO: 239259 - RNA, 23 nt, Human
cgccggagaccuuacaaccgccc

SEQ ID NO: 239260 - RNA, 23 nt, Human
cggggaggggggccgguaggggc

SEQ ID NO: 239261 - RNA, 28 nt, Human
cucgcggaaaucccucagugaucacccc

SEQ ID NO: 239262 - RNA, 18 nt, Human
cugcgggcccugaagguc

SEQ ID NO: 239263 - RNA, 21 nt, Human
gcagcgcccgccggagaccuu

SEQ ID NO: 239264 - RNA, 20 nt, Human
gccucgggucucaaggcgcc

SEQ ID NO: 239265 - RNA, 18 nt, Human
uuuuuuuuuuuuuuuucg

SEQ ID NO: 239266 - RNA, 27 nt, Human
aaagugcccuugugccccccuucuucu

SEQ ID NO: 239267 - RNA, 20 nt, Human
accccaaagggucucugaag

SEQ ID NO: 239268 - RNA, 24 nt, Human
agcaacgugggggccugggaggaa

SEQ ID NO: 239269 - RNA, 19 nt, Human
agcccagagccugggacgg

SEQ ID NO: 239270 - RNA, 29 nt, Human
aggcaggaggcccgacguccugggcagcc

SEQ ID NO: 239271 - RNA, 21 nt, Human
aggcccgacguccugggcagc

SEQ ID NO: 239272 - RNA, 19 nt, Human
agggggugggugggucugc

SEQ ID NO: 239273 - RNA, 20 nt, Human
aguccuguggagggcaccgu

SEQ ID NO: 239274 - RNA, 26 nt, Human
agugcccaccugcucucagagguguc

SEQ ID NO: 239275 - RNA, 21 nt, Human
aucaugugcccuguccgugcc

SEQ ID NO: 239276 - RNA, 20 nt, Human
cagcaguugguaucaugugc

SEQ ID NO: 239277 - RNA, 19 nt, Human
caggcggccagcaacgugg

SEQ ID NO: 239278 - RNA, 21 nt, Human
ccagggccgggagcggccagg

SEQ ID NO: 239279 - RNA, 25 nt, Human
ccauaccuaggaauccuacccaacc

SEQ ID NO: 239280 - RNA, 22 nt, Human
ccauuuuccuccccuuccaaaa

SEQ ID NO: 239281 - RNA, 26 nt, Human
ccccauaccuaggaauccuacccaac

SEQ ID NO: 239282 - RNA, 18 nt, Human
ccccgggcccuacucagg

SEQ ID NO: 239283 - RNA, 21 nt, Human
ccccgggcccuacucaggccc

SEQ ID NO: 239284 - RNA, 22 nt, Human
ccccgggcccuacucaggcccc

SEQ ID NO: 239285 - RNA, 21 nt, Human
cccgagcccagagccugggac

SEQ ID NO: 239286 - RNA, 19 nt, Human
cccuucuucugccuuuucu

SEQ ID NO: 239287 - RNA, 22 nt, Human
ccguacccagccagugcccacc

SEQ ID NO: 239288 - RNA, 19 nt, Human
ccucaagggagaaagugcc

SEQ ID NO: 239289 - RNA, 18 nt, Human
cguccucccuauaauuuc

SEQ ID NO: 239290 - RNA, 18 nt, Human
cucaagggagaaagugcc

SEQ ID NO: 239291 - RNA, 26 nt, Human
cugggcagcgguggcggcggcugccc

SEQ ID NO: 239292 - RNA, 23 nt, Human
cuugccauuuuccuccccuucca

SEQ ID NO: 239293 - RNA, 25 nt, Human
cuugccauuuuccuccccuuccaaa

SEQ ID NO: 239294 - RNA, 19 nt, Human
gaaagugcccuugugcccc

SEQ ID NO: 239295 - RNA, 24 nt, Human
gagcggcacgaguuuaggucccau

SEQ ID NO: 239296 - RNA, 23 nt, Human
gagcggccaggccgggccuccag

SEQ ID NO: 239297 - RNA, 22 nt, Human
gaggggcccgugacguccuugc

SEQ ID NO: 239298 - RNA, 26 nt, Human
gcagccucaagggagaagggaacgcc

SEQ ID NO: 239299 - RNA, 19 nt, Human
ggcaguagggagaguccug

SEQ ID NO: 239300 - RNA, 21 nt, Human
gggcagggcagccucaaggga

SEQ ID NO: 239301 - RNA, 28 nt, Human
gggccgggagcggccaggccgggccucc

SEQ ID NO: 239302 - RNA, 19 nt, Human
guccacgugaaguguggaa

SEQ ID NO: 239303 - RNA, 19 nt, Human
uaaugacucccuuuccucu

SEQ ID NO: 239304 - RNA, 21 nt, Human
uaggaauccuacccaaccccc

SEQ ID NO: 239305 - RNA, 21 nt, Human
uccaaaacucuuccccauacc

SEQ ID NO: 239306 - RNA, 18 nt, Human
uccacgugaaguguggaa

SEQ ID NO: 239307 - RNA, 20 nt, Human
ucccacgugggcagggcagc

SEQ ID NO: 239308 - RNA, 20 nt, Human
uccccgggcccuacucaggc

SEQ ID NO: 239309 - RNA, 25 nt, Human
uccccgggcccuacucaggccccug

SEQ ID NO: 239310 - RNA, 19 nt, Human
ucccuauaauuucaucuuc

SEQ ID NO: 239311 - RNA, 19 nt, Human
uccgugccugaggcugagc

SEQ ID NO: 239312 - RNA, 18 nt, Human
ucggugccgugcuccggu

SEQ ID NO: 239313 - RNA, 18 nt, Human
ucucagaggugucugagc

SEQ ID NO: 239314 - RNA, 22 nt, Human
ucuccucuaggaggggagggaa

SEQ ID NO: 239315 - RNA, 21 nt, Human
ucucugaagcuuggggaugag

SEQ ID NO: 239316 - RNA, 20 nt, Human
ugagcagccccagggggugg

SEQ ID NO: 239317 - RNA, 22 nt, Human
ugccgggaggccucagguuugc

SEQ ID NO: 239318 - RNA, 20 nt, Human
ugccugaggcugagcagccc

SEQ ID NO: 239319 - RNA, 23 nt, Human
ugggaggaaggcaggaggcccga

SEQ ID NO: 239320 - RNA, 22 nt, Human
ugggcagcaguugguaucaugu

SEQ ID NO: 239321 - RNA, 18 nt, Human
ugggugggucugccggga

SEQ ID NO: 239322 - RNA, 21 nt, Human
uuagggcucugcuuccccggg

SEQ ID NO: 239323 - RNA, 21 nt, Human
aagcgagcgccccuccccggg

SEQ ID NO: 239324 - RNA, 18 nt, Human
ccccgucugcugcucaga

SEQ ID NO: 239325 - RNA, 21 nt, Human
cggcucuucuuucccggcucc
